United States Patent Application Publication US 2011/0014706 A2 - sequence listing, part 30

SEQ ID NO: 67373 - DNA, 923 bp, Arabidopsis thaliana landsberg
ttagacttttattaacaaaaagaaaagaaaaaaaaaaagacatgatccttaattgggctagaaagctttcatttttagttctgggtcagttctaatatatagatcacgtcctttatgcgatcatgctttaaaggccgatcactgtttcttacattcctaagtcggcacttcttcactttttcctacgacatgaattaagaattgaagaccaaacgccaaaagacattttattcctctaattgtctcattttataatttttttgggctattcaaaaatatattatagcaaaggtacaagtcaaaaacttgatcgatcgtctcgtatttctgttatacattgtgataaaaaaacttaacaatacagagacgacgtgtatgcaggtaaaacaaaagctttgatccaaagtaatggccaaatgatacagttggatccaaccgagataagtaaaaaaagattctatctttaaaatgggacctctctcctttttctcttcattattgctatggttcaaaacgtacaatcatcggcctcgctcggaatttaaatcatatacaatatgcttactaagtattattcacgtataagtaacaatatgcaactaaaggttttgggccacgaattacttacaataaaaaacttttgtaaactcaagttccaaatgtttagtaatataaattcacattttatctcaaaaaaaagagaaaaagagaaaactttttatcaagagagaaaagttaacttaagttataactcgttgagttgatcttcatcttgtacaacaataatgcccacacatcggatggattgatattccctatgatgaaaatcaacgattcaccaactttcctttttttgtatatcaaaggagaacttttaatagtatataccaactttccttcctctgcctattattattaagcat

SEQ ID NO: 67374 - DNA, 415 bp, Arabidopsis thaliana landsberg
gggggaccagctcattcatgatacactgtaccttcgaatccaggagctgtttcagtgtgtgatattaaagctaatactatagtatctaggttgctaatcgatgctgggcttataattagggatgacgctccaatgacacatatgcattctttagcatgtgtggactgacctctgagagacctagtgttagggcgtgacccaaagactatgatggagcctttcggaggcaaaacatggcggacgggaggtgaattttgtcaagcactacctagtacgcgtcaaggaggcaggcttgcactggtattgggatcacagaaccgctcttatctttggagccactgccaagtgttgacgctaccagaagatatgtgactgggatagacagaaagagattgtgccaagcgggtttcggatg

SEQ ID NO: 67375 - DNA, 203 bp, Arabidopsis thaliana landsberg
  unsure (1)..(203): unsure at all n locations
aagaaccagaaaaaaccncgaggcgcgacaaaaagaaggccgaaagaaccccaaacaaacaacagaaaccaacacagagaaaacaagcacgaaggncaacccgaaacaaaaaaaccgaaagggcccaccaaccccccggaaaacaaagaaagggaaggggacaaagacgaggcccggcaaaaaaacgaaaagacccaaaaaaa

SEQ ID NO: 67376 - DNA, 545 bp, Arabidopsis thaliana landsberg
tacttaatacttggtaacttttttttttctttggttacttctcattctcgttgatcactttacactatatacttggttatatcccttgttgatacgtcttgtattttttctcatatttttacctttatttccgttttgcctttgaatttttgtgtgtcttttgctacaaatatttcttcactttcattgaaattcatcaccttcaatggatgcacctacgtccgttagtcatttatggctttaggcctcatatttattctaggtgctctagtatatccctcaaaatggacggtgagaaacaataccaatttttgatcccaagggatttgaaccggttatgtttgaataacatagtgatttgaacgtcaaatcaacaacttacgaaacgattaaaaaaaaatgtaatagatggcacacaaaaatttatagtgtttcacttttaaagaattgaatctaatttcccatgctccaaacatgctaaaacatttttgaatgttttcaaatatggatttgatcgacaaatatagaagccatatactccttga

SEQ ID NO: 67377 - DNA, 214 bp, Arabidopsis thaliana landsberg
  unsure (1)..(214): unsure at all n locations
gccgacgacaaagaggaccagcaccagacccccggcaccggcgaagcgccggagcccgaggcgagcgagcaaggcgcggagaaggcgaacggcccaggcggcaaacacgcgcccccggccgctcgcgcgctgcacgaccacgagcccgacgccgagacgaacgngcgcaaggcgaagaaaaacgccggcgaaaccngcgncaacaccaaccaca

SEQ ID NO: 67378 - DNA, 329 bp, Arabidopsis thaliana landsberg
ttgtgccgaaagcggattggcctggtccctgtcaattggcaagcgtggtgcatgctggcgtggttcagccggtcggtgaacagcaggggttctgcctgccacagtgttttgtcgagcagcacagacagtgcggtggcgttggcctggtagcccgtgctgtaaaccagggcggcgggggtgtctttgaattgggcaatctggtgttccagcgctttaaagcaggccaggttgccagacagcaggcgtgagcccgtggaccctgcgccgtattcttttgcacattgcacaccggcttctatacctctcggtttttacttagcgacaggtaa

SEQ ID NO: 67379 - DNA, 179 bp, Arabidopsis thaliana landsberg
  unsure (1)..(179): unsure at all n locations
ggaagagcaacacacagagagagaagagccaccgcagacacgggaacagagcgaagagaaaaaaaaggaaaggcccccccaaccccgggaagacccggcgcacccggaacggagaacagcgaaaggcaccacnccacccggaaaaccagcgggccaacccncccagaaagaaaaaaaaa

SEQ ID NO: 67380 - DNA, 547 bp, Arabidopsis thaliana landsberg
ccttggcagtaccgttgatcgaaaagattcccggcgccaacctgcgtctgctgatgcgcaattttctgtttgaaatcaccggcctcgatccccagcaggtcgaacaactggcgcagcaggtcccggccaccagtagcgtgccggactacgaccccgggtatgactacgatgccatggtcagctacacccccgactacggggacatgccgcagccggactacgcgccgatgcaacaggagcaacagtggtaacccaaacagggtagcggcaagaagccctggagcgacaagccctgggacaagggccgcaagggcggcaagccttggcagcaacgtgacgaagccccgccacgggtgccggtccccgtggagccgccgaccctggccgcgctgcgcaccctgctgcaccacccgctgctggccggcaaggtcgaggatgccagtcatttcgccgacgaagaacacctgtacagtcagttgctggtggcgctgatcgaggccgcacagaataatcctggtctaagctctatgcagttgatcgcacgttg

SEQ ID NO: 67381 - DNA, 618 bp, Arabidopsis thaliana landsberg
  unsure (1)..(618): unsure at all n locations
aattaagtcacatcaactacagacgcgtctgctttttctcacaatggacgaatantattctattggaagaacaatttcactcacattgagcatatcacccagaagtttcgaaaagagattcatccatggacagagctgctttcccacatacagaggatctttcccagaaagcaccgaagatgatgaaataattgagacctgggtgacctaagattgacgcatcgatttcccacttttcccttctcttattttattttaaatagatcatactgcagaaagcggaagctaaaaaaatacttaaaaaacataaaaaaaataatggaaattaagctgactcaattatgggtcaattgcatgaatatggctttttcaataaaatagtgaaaaattaacctcatattactcataatgtaattaacatcagatttgggaagtatagtggatcctatcggttacatacagctgttcaaatcttaactgttaacggtgataaaaactttttcggaatactgcaaagttgtaaaaaaataattatacgagaaagctctatagtaataaagctgagagtaaaacttattgtacgcttgaataaagcttttgtattaacagaaacaaagc

SEQ ID NO: 67382 - DNA, 310 bp, Arabidopsis thaliana landsberg
acgagaacgagggtggggaggtaggggaaaaagtagggcgcgagcgagagaagagagagagacagagaagaacacggagggaggagacaaaaagaaagagagaagaaggaaggagaaggaggggaaggggaacgggggaaaagaagacgcgaaggggtgagcaagaccgaggagaagaaggaaaaccggaagaggaagataaaaggcgaagtaaaggaggggagccagaagaaacaaaggcaaaggggaacatagggacttggaggtagccatagggggctggaaaagaaagaagaaggcctgggggaga

SEQ ID NO: 67383 - DNA, 407 bp, Arabidopsis thaliana landsberg
  unsure (1)..(407): unsure at all n locations
agcaccgggttttaaaccataccgatgtgctcatttccattaaattaaagacagagaataaggcgttcgacgtaaagatttacgaacacagctacccgcactcgtggcgtactgatgagccgatattatactatccgctggacagctggttcattaaaaccaccgccgttaaagataagctgggagaaccaataataactatcaactnnnnnnnnnnnnnnnnnnnnnnnnnnnnnnnnnnnnnnnnnnnnnnnnnnnnnnnnnnnnnnnnnnnnnnnnnnnnnnnnnnnnnnnnnnnnnnnnnnnnnnnnnnnnnnnnnnnnnnnnnnnnnnnnnnnnnnnnnnnnnnnnnnnnnnnnnnnnnnnnnnnnnnnnnnnnnnnnnnnnnnnnnnnnnnnnnnnnnnnn

SEQ ID NO: 67384 - DNA, 2136 bp, Arabidopsis thaliana landsberg
  unsure (1)..(2136): unsure at all n locations
ccggtaaaagcaaaatgttttcccactaaaagactgaaaaaaacactaaaccaaaattaaatcatcaaaaatcaaaatctctaaaatcaaaaattcgcattttctctctcgccggagagatgcaacggtttcttctacctttactcttccttgcactatcgccgccggcgatttgtcattactcttcctcaacctcttcaccttcttcgtcctccgtttcttccgacgcctcnnnnnnnnnnnnnnnnnnnnnnncctactacgccgctacgaatcctcgagacgcggtgggcggtgcgtgtggatacggagatctcgtcaaatctgggtacggtatggctactgttggtctaagcgagactctgtttgagcgtggtcagatctgtggtgcttgtttcgagctcagatgtgttgatgatctccgttggtgtatccctggaacttcaattatactcaccgctacgaatttctgtgctcctaattacggttttgatcccgacggtggtggtcattgtaatccacctaacaaacatttcgtgcttccgatcgaagcgtttgagaagatcgctatttggaaagctgggaacatgccggtgcagtatcgaaggtgcgtttctctccgctttttcccaatttgtttcgcgttttgttaaaaaaatgcgtttgcggtggtggggaacgcggttctgcttttagacgccactatcgatttaaaaaatccggcgatgcttttgcttttgtgtcttcttcgatatccgtgtgctttattatgtgagatgggtttaccctaaatctcttcctcaatatgcaatttactttattgcccctaatcgttttatcttagtgtgtacaagattctgagaaatggtagataggtttgctcatcatagttgagtagctttgctctcattttcatcttagccatgagaggactgaaattgactgtttctgtgaagttctaggcacaatgcggtaaactactatttaggttcatgatacaatggatcattagatcctttattagtttgtgaagtgttttggagctgagcctataaatagttagttgcatatcacttaagttatgagttatgacttacaaccatttttgttggcttttaccaaaacaggatcaactgtagaaaggaagggagcatgcggtttacagtcgatggtggaggcattttcatttcggttttgatcaccaatgttgcagggtccggtgatatagttgctgtgaagatcaaagggtcgagaaccgggtggttacctatgggtcgtaattggggacaaaattggcatattaatgctgatctcaggaaccaagctctctcatttgaagtaacttctagtgacaggtcaaccgtgacatcttacaatgtctcccctaaaaactggaattatggacagaccttcgaagggaaacaattcgagactccgtgagacagagacggacacattgagatacaatcccatgattctttttttccgggtcagaattttttgatggcaagtatattgatcttggtctaaggttatctttagggttgaaaaggaaagaacttgggtcagacttttgcatttcatagttctctctctcccacgcataggtacaaaaactcaccaatgtactaagaacagtgatcacacaaacatcactattgtatctatttgtttacattactaaggagcgaaagcttccttcaagtgcttaaagctaatgatgagtactgagtcttatcgtaaaaagaatgcaaaagggtactgtgatataacaagaatcagaatagctaaaggttataacttctcaaagtcaaaagatattaaacctattatagccatgaatgtaagttcacttacttctccaatgtgaagatcactcaggccaaaaggatcaccgtgtgttgtaaaattcctatgaacatcccacttctcttaaaactctacaagagaaccccaatcaaaataaaaggaaaaaaaacaaaaaaaaaacgtgtcaagaactcataaagattgatgagattcaataagcaacgcattgagcatgacatgatcagcggcatcatagaccgcagagtcataatgcatcccgtcaagtgtacattgcggtccacagttccaggtaaacgactggatatc

SEQ ID NO: 67385 - DNA, 591 bp, Arabidopsis thaliana landsberg
  unsure (1)..(591): unsure at all n locations
tatacacgcacagacagaggaaattggatacccattttaccttttgagccggaactgtcatatcttgagacgaaatcctgatgaaagttctgatcatttaatagcagttattgaatttttcaagagcgtcaaacatgcaaaaaatgttcaaactgtacccagaagatgggaaacgccatcagactctctaacaaaaaccggattttcacttaaaaagatacctaaacaccaatctcctaaaaaaagtaaatctaagtcgtaaatgcgcctcttcgaggttaaacacacctcttcgaggttaatccatagatacacatgtatcgatgaatgaaaatgtttataacatagcaggtttgaaaggtttattgcaatttgtacaataagcatttattattggagcctcatcgcctctcgtgattgccccataatggaatgtcttgtactgattgcacctagtgcattgatatataccttctcttttataggtttgntgagttgaagctcttcctgttgtttcaatctttcatttgggttcttgaggagtggattttgaaagataatnttatatcttgcaccatcaatagtttttga

SEQ ID NO: 67386 - DNA, 526 bp, Arabidopsis thaliana landsberg
  unsure (1)..(526): unsure at all n locations
gattttttttaaacaagattgataatttgtttttatttttgagttcagaagaaaataccatcgaaaccggcgaagggtttaaaaataatttacccttaggcgacctttatgaaggctggtttcttgattatgcctcttatgtgatcttggaccgggcggtacctgccggcgatgatggcttaaagccggtacagcgccgcatcctgcatgccatgaaagaaatggacgatggacggtacaataaggtggnnnnnnnnnnnnnnnnnnnnnnnnnnnnnnnnnnnnnnnnnnncgcgtctatcggcgatgctttggtgaatatggggcagaaggacctgctgatagatacgcaggggaactggggcgatgtacgcacgggggacgacgcggcggcttcacgttatattgaagcgcgcttatccaagttcgcgctggaagtggcttttaacgcgaaaacaacgacctggcaattgagttacgacggccgcaaaaatgaaccgctgacgctgcccatgaagttcccctt

SEQ ID NO: 67387 - DNA, 1754 bp, Arabidopsis thaliana landsberg
caagagtgaaaaagatgaaagctttaggttcctctgattgcaatttaaacattttagaaactctatcagacgatgcgattcaggagattactgaaagctatgatggatttttcactactgtagagtctctcattgctggtactggagattccttagttgaagatgagtttgtgtctcatgtgtattgtctctgcaagtatgggcttgattctcttgttcgtgatcactttcttagatcacttgaggtactgaacataaacgtcttccttttagattaaagtttgagtcttggagctttctgattgcataactgattagcttgtaccacttagtagctgctctgttggtgtagagtaaaagtggaagaagtatgtttgttctcttatgatacatttgttttgtttcagcaagcttttgagaagggaggtgcatcgagtttttggcaacattttgatgcttatagtgagaagaaacatcatgtaagaagttacacgcttggttgattctttgtttgctataaaatattctgaaattgacttctagttttgactaaaaatgagtgcttttgggcagaattatggagaggagattcagatagtgttatgcaaggctttggaagaaatttctattgaaaagcagtatcatgagaagtgtctgtccatagtagttcatgctttgcagtcgtttaaagaacagtcgtcagatgatagacagaactcagatacagaaagagttcatcttttttcgaggttccagtcaatgctgtcttcaactctgatgactacacttcctcagcattttcctggtatacccatctttgaaagcttgttctttgtgtgatttctgatgtagtttgattgcttggaagttttatttatacgtttgccacttgttcaatcattactctcttattgttcctctttttattatgttcttagaaatactccactggtattttaaggaaaggctggaggagttaagcgcaatcatggacggagatggtattgaagaacaagaggatgattgcatggatttggacgagaagttgagatataaaaacggagaaatggatgttgatgaaggctgttcccaaggaaaacgtttgggacatgacaagttggtgaagaacattgggaaggtggtccgtgaccttagaagtattggatttacatctatggctgaaaatgcttatgcttctgccatctttttgctccttaaggtattttttatgcatcagattattcatctgcctcacagagagttataacactatatctattgtcagtaacttgtaccctgtttggcaatgttatactgtaggcgaaagtccatgatctggctggtgatgattacaggacttctgttttggaatcaatcaaagaatggattcaggtagtttttgctggttagattttcactgctccatcagattagtttggtaatttggagattcctgacatcttattttctcttttcagacagtccctctacaattccttaatgcacttctttcttatcttggtgattccgtaagttatggtaccacatcgtctggcctcacgtcccctctggcttgttgcccatctccaagcttttccagagtggtgactccttctgaaggaattgttcggtggaaattacggctagaatattttgcatatgaaacacttcaagatttaaggattgccaaattatttgagataattgttgattatcctgagaagtattttcttttctgatggtacttttttatg

SEQ ID NO: 67388 - DNA, 1273 bp, Arabidopsis thaliana landsberg
aagtgaaaaagggtcaaaagctttcttcttcttcttcttgccgagacaaggaggaatgattcatcaaataaatttccattgatcgccaacaaagatgggggctttaaagccacccgaatttcaattactaaaaaccctaacatcaatcctcacatcagagaaaacccatttcctcgaaaccctaaatccctacattcctcaaatcacacagcctctccttacctctctcctctcttctccttcactcgctaagaaaccagaaaccctagtatctttcttccaatgggctcaaacttcaatccccgaagcatttccatcggattcacctcttccacttatctccgtcgtccgttctcttctctctcaccacaaattcgccgacgccaagtctcttctcgtctcctatatccgcacctccgatgcatctctctctctttgcaactctctccttcacccgaatcttcatctatcacctccaccttctaaagctctattcgacattgctcttagtgcttatcttcatgagggaaagcctcacgttgcgttacagatcttccagaagatgattcgattaaagcttaagccaaatctgctcacttgcaatactcttctcattggtttagtcaggtacccttctagcttctctatctcaagtgctagagaagtgtttgatgatatggttaagattggtgtttcgctaaatgtgcaaactttcaatgttttggttaatgggtattgcttggaaggtaagcttgaggatgctttaggaatgttagagaggatggttaatgaattcaaggttaatcctgataatgttacttacaatacgattttgaaagcaatgtctaagaaaggtcgtttgagtgatcttaaggaattgttgttggatatgaagaagaatggattggtgccaaatagggttacttataataatttagtgtatggttactgtaagttaggttcgttgaaagaagcatttcagattgtggagctgatgaagcaaactaatgtattaccggatctttgtacctataacattttgatcaatgggctttgcaatgcggggagtatgagggaaggtcttgaattaatggatgcgatgaagagtttgaagttacagcccgatgtggttacttacaatacattgattgatgggtgtttcgaattggggcttagtttggaggctaggaagttgatggagcaaatggaaaatgatggagtcaaagctaaccaagtgactcataatatctttcttaagtggctttgttaggga

SEQ ID NO: 67389 - DNA, 734 bp, Arabidopsis thaliana landsberg
ctcagcaaagtaaagagaagctctttctctacacttagtcaaattagtgattatgcaggaccaaggattttcgattagaactacaaaaaatgcgagctttgggtacgattaaaaagatcattctaattgaagggagataatagaaaaacccagaaagcaaaaccctagaaatcaatttgatgttgcagaagaaaaggggaaagtaagatattacttcgactaggatcgaatgtagccggaggagtagacgtttccggtgggggatgttcgggttgggatgaagattccggcggagaaggaagaggaggttccggtgaagttcgcttctcttcttccgccattgaagaagtttcaagaaatttttttcccacagagatttttattttattaaagtcagctgaagtaaatacaaaatctccttattgctattttccactgtgatttatttatttccgttttgttaaaaaagttttaaaagctctttataatgtcattttatcaaatagtgatactattatattttaatttctttcatataatttatcattgtttatttcgctgagggaaaaaaaactataaagtcgtttaaaaaaaaacaaatccaactatattttgtaaaaccacctataaatagtacaattaatttattcgggtatcttttatcaactgtttttttcttactttctagaacctctaaagttagcacaagaattaaattaagaattaccatgtcg

SEQ ID NO: 67390 - DNA, 549 bp, Arabidopsis thaliana landsberg
tggggggcttaatacgtagagtatatagcaaaattatcttactttgtggtctctggacaaaattttgagaggttggattattgtatggttcatatttaattaaagttacggtttcttcatttgattggtgaagttgcgttgtttgaagaccaaacgagtataccgcttccttcgtcatctctgacattggtggtacttgaaaatgcaactatggtaaaaatttcttagggtgatcataaactattctaaaagcatggggtcatatcatgaatagtactgattataagtccttaaagtgcaaaaatagtcaaggaagaaagtacttttacaaaagggtcattccgggtaaatgcaattgatcggcgacgcattctcctctcacagtctctctcagtcactggacgccgatcattctcctctcacagtctctctcagtcactggctctcaaattcatactacttggcaagcttgctcgatttccctcgtacagccaaattgtgctatgggaatcaaaattaacagtcgcagaagccagttataatggagtc

SEQ ID NO: 67391 - DNA, 890 bp, Arabidopsis thaliana landsberg
aatttatattttaatttttcttattttgcataacaattaaccaaaatttgttacaataaactttttactaatattttgtttttttaaaagacacccattcaaggatcaccaatgggagatgatcaattaaaacaacaataataaatgtcttcaaattaaaatagtactaattttataattaaataaagttgagacaccacccataatgggattaaccaatgtggatgctcttaaaaatctccacattagagtaaatgttgtacaacagatcaaagaggcggctttggatatatcctttacacaggaaatcgccatgttcccacgtatgaacgctcgcaagtgcatgagggttcgtgttgttcgctggaaggatcggtttctctttacgcctgtactggctcagcttcagtgttatcaagcagaaaaacatctttttctgccacatcttagatgagctcccaccgagcttgtcgggaaggagacctgctgaatttgccgctggaagttaaaattgttaagggcctgcagtttgcacacgttcaagtgtcgctactttcactggagggagagtaccaaactgaatttcaacttcactttcacccccacagttggtgacctcagcgacgttgagaagttgacgttctcactcgacatgtctggaaataaacacaaaaccagatcagtatcgtgagttatcaatagaaaaactgcaggttacacttgattaatgtttctatttgcacacacacaaatgaaagcaaagccaagtaccagatttcgttaactccacgttattcaataaacaaattgcattatgttttaaagcccaatgttaattaaaaaccacttagacgttgcaggttttgcaaaagacaattgttattaaaaca

SEQ ID NO: 67392 - DNA, 578 bp, Arabidopsis thaliana landsberg
tatgatctgatccttaaattttatagtgtaaaatttagagaccattaccattgaaggtacacactatacagtatgattcacttattattaaaaatgacagaaggggaaaacacagatcaataacatcatactaatgacaccagataataacttcctgcttctttatcaagaacttcctgatttcttaatttcacaggtaggaattacaaaacctagatttttttgggtgacaaatggcaacatacatgaaaagttaaacagtatcattcttgtgaacggcaagacagaagtgttggtcatcaatggacacaaaagtcagcttggagaacacaaatgaagaaactgacctctttctctcgttgtgatggcataagcataccaacaaatccaatgtgtgccagctggccttcagcttgctctagtttatcagttgcaaggataaaatgccatggattcggcttgtaatcagatcattcgttctatcttaatatattgacacacagttctcctgcatgttttgagaaaaagaataaaatggtacaagatatttatctggaccagacccaatataataattt

SEQ ID NO: 67393 - DNA, 511 bp, Arabidopsis thaliana landsberg
atgtgtaatgtgttcgttaccactaattatacttgtattacaaattaaatacatttattatcggcgaacgtaacgtgataataatgagagcattcatacttacatgcttgcatgttgaaagcgaattggtttcccacacactccaagtctccaaccacaatcccgtttaatttcagcttaagtataattagtaatacaacatttgtataattaacagaagaagaaaaaacatcaagtaattttaaaggtgatttctgtttatctgagttttttttttttttttttaggttcaaatacttgttactatttttttttaatccaatctggttttagataaatttatgttttttagaaatgtatatcttacgtttttagcaaaaataagttttctatagaataaatagcatttaattttgcaagataccattgtcccattaaaacaacctttacatcatttatcttgcgggatcccatttcacattcaaaatcattatgaaatctttacttttct

SEQ ID NO: 67394 - DNA, 2241 bp, Arabidopsis thaliana landsberg
tctcgaaagaacttaatttcgaatactatataataaatcgattttgatgtatgaatgagaatgttttgaactatgacaagaatttgacttttcgttatcaagaatttggtggctaaattagatatgaagttaacatacacataaaaagttagctgaatgttaaactgtagtctattcgaaatatgaagtttaaagtagaatgtgaatggtaaatgttaaagttaaattaagatacataataattggttcaaacttgagataaccgggacgaaataattggtttggtacaaagtacaaaacaactttggttaaaggaatcatactttccacgaggaatcgccagttcgccaccagttggccggatcgaacggtgcctactgcttaacccggtctttagataatacccacctgttaagtcattcgggtcatctctgacccggaagtttctaatctctctctctttcccaaagtaacaaactttaaattttctgcaaaatcgaacaacgaatcatcagcccgagaagcttcttcaatcctgtaaatttttcattctacgtaccaatctctcatttcccagattcgtttcttgcttccattgctcttcctttgtaccaatcatcatctccaggtgatcggtttattaaaaattagggtttttgattgttctaatccgatctctcggttcctttaagattgaagatgaatttcgaagcgtgatatgaaaagatctgaagacttgatgtcagaacttgcgttgcgtgggttccgagataattgttgatggaaagagtatcagagcgaagtttgtcagaaaatttgagaagaagcgatcgagaagatgggaagattatagaatgggaagaattcgaccatgagcttacgaggttatggagtctttcttctgctatgaaattagccacagagaggaaacaaatcctgcaaccgaaacttgagtctcttattcaggtttttctcttactcatgtgttttcttttgggcatgtctgaatttgattcatttctgagtgtaaagcatagatttttattagtggcattgtcttaagggtggatgaagatagctagaagaagaaactctattcaaagaaaatttatgctttcttattgtgttggttaggaatgtgttgtttagtcttattattcttgcttatctcttactttatctactcgatgagctttaattgattagcccgcggattagcgggcggcaaaatttcgggcaggttagtactgaatcattgagacgcactaatgaacttgaagaaatgcgtcagaggcttgaagcaagaaagttgttggtggacaagacatcagttgcttgcaaagttactgagcaggatgttaaaaagaaagaggagaatcttagtacagaagtgaggtctttgctagtaggcggaacaaccctttcgatcgctaaaagcaaattgcaggtattacctcattcagtgcagaattatcttattaggaagcaaggtgcatcagttttgcatatcctggtgtttggctatttcaaattagttgtttccccatgttctcttggtctcttctttggcaggagtacagtttattttacgacttacgttttcttcttctaactgtattttagttctagtatgaattatttgatagctgtttctttaaagaaggaaagctaattttcttcagtatattctccattctatgaacaatttgtgaatgattgaatcatagatacactgttttaacttatttttctcttttcataggaatcaaactgccaactagaaggagaaagtggttatgcacatttaaagattgtaacgaataagctgagaaagaggcagcagttcatggtatctcaagtttcatttatctatcccttgaagattgaggctggaccttcacaagaccaagaactggaatcatttcctggtggcagtagattaggtcagttaagtctaacatcttataagaattaagaatgtagcctttgatgagaacgagacctaactccttaacatctttcagtgcatgcctttatctttacttcattcagtctgatattgatatcaggactaactttgcctttgttgtcgtaagtgtttacagaaagtttttaattgcagcatctaccttcttgacatgtttatatctatggcttttgtaggaactaagcctctgagtcaaggatctgtgagaattctggggttgccttttagtatggccccgtttacaaagatgagct

SEQ ID NO: 67395 - DNA, 549 bp, Arabidopsis thaliana landsberg
taaatggcgccgaggtcaaaaacaagaacatcattaatgcaataataatattttgagagccaaacgggcagtcatgattatttgggattggtctgttgctagtagtataataggtacatgcctggcaatgtccaaaatgcctgtccatttttgatccttggatcaaattgtaatttgaggatttttgcctcatatggggtctttgttgcatcatgggacgtcaataggggtaaagatgtttatttataagaggtcttcgtctaattttagtttaacctgtactatatgaaacgtttccttatacgaaacgttgcctggtggactacaggcaggcttacccacctaactaaaccaaaatcagaccattttaaatttttttccgtttttttgaataagtctttattacacaaaggcaaaaacgaactcggcagaccatccaaattgccatccaattgttaattaatttcaaatcaaactacatagcaatctaaaaatcaattattgcgcaaagactcaaaatagttttattatttttagtggcgaaaacat

SEQ ID NO: 67396 - DNA, 2003 bp, Arabidopsis thaliana landsberg
tgcaggagaaggctgcacaagaggagagagcctcaacgtgctgcatcagaacaataatgggtcctaatggaaccactgtttcatttcccattgacaaagtgcctagcctgttcgatcccaaaccatcagggtatgctatactcttttccttctctctcaatctctgtttgtggaatcagaccaattcataattcaatgtcccttaatctcgtagctgattgggtctggttaatgtgaacaatccttaatcctacacttgctatgttattgagccagtataaatagtagagaatgcttcaactgttttggatgtggtaaaatttaaggaatgctctaggattcagtttctacccattattcttttggtctgttggtggtgttctacattcaaaaagtctaaaggaattttacgatttgaaatcttatgataacaatgtcaagtactatctttatctgcagttatcctcctccgcgggaaaattgtgtgggtccatcgtgcaccaatccttacaagtatcgtgactcgaagactaaagttcctctatgcagtctcaaatgctacaaagcggttcaggggcaacagattgcacctccttaagagatattgatatgatttttttgatggaaatgagaagaagaacttagcttccttacctgattttattgatggtacagaactacagaaaacaattgtttagtactttgcttttagacttgtctgatcattttgactagatattgtttttctccccttttcctttgtgacgagatcgtggccgtccattggctttttcaccaaaccatcacatcatagccgttcttatatacaaatcttcaacggctatctctcctagatttaaataataaaagggatacatttgttttctaagacatgatacgaaatgctctattattggaagcaagcaagtgcatcatcatggattaccaccagtacgtcgtcgtttctgagctgtgtgtttgcgtctctccacttatgatttcttaacattatcgttccttctccataattgtttttgcagttgacaatttgtattagggacaaatgaaacttaaattacttggaaagaataaaggcaatgatttctcatcactcttctatctgttttaataatcaagtaaccttgttatgcgtgtgttgtttaatactataatttcctctaacaaaatgtatttaattctgtttacatgaatgattctttttcatcaaacctaacttgaaactatagacatggcacccactccttcatctttccttcaaacataaaccttcattttctcttataataaaacatataaataactttcttttatgtttcttaacttcacaacaattcctccaccttagattaagatgagtttcgccggcggaaagtggcggaaagaggcggagcagctggtggttaagcctttccggctggtgacaacaactctcctcagccttctccttcctctctctttcctcctccttagtcgtctctcttcagcttctttcctcttctccttaaccaaatctcagccgcaaacagagtcatcattcttcgtcttctctctgtttcttcgcgtgaatccggcgatcgtatacgctgtcgtttcgtcaataagcgtttacactctagttcttggcttaaccacaaagatcacagctacagatccaaagcattcgattgccttttatccacatgtcagcatcgcgtggcttacactcttccttgttcaaatctccgtcggtataggcctcgaaacaacgatctccaacggtttaatcatcggaagcgaacgcaatttcttgagcaggcttgtgtttttctttggtcttcatgaggtgatgcttctgtggtatcgagtgatcgtgagaccggtggtggataacacgttgttaggaggagaagacggtcaacgaagagaagagacggtggtggagagggtggctttggccgttagctgtgggaccttgtggtgcgtggaagcttcgggatatagta

SEQ ID NO: 67397 - DNA, 557 bp, Arabidopsis thaliana landsberg
cgtgcggttgatgaccaacgcctcggccagccagatcagcatcgcccacggcttgcgcggccccacctacgcggaggccagcgcctgcgcctcggccaaccacgccatcatccaggccgcgcagatgatccgcttcggcatggtcgatgcggccattaccggcggcaccgaggcttgcctcagctacggcgcgctgcgtgcgtgggaagccatgcgtgtgctgtccgacgacacctgccgcccgttcagcgccaaccgccgcggcctggtgctgggcgaaggcgccggcatcttcgtgctggaatcgctggaacacgcgcaggcacgcggtgcaaacatcctcgccgaactggccggcaccggcatgagcgcggacgcctcggacatcgtgatgccaaatcccgaaggcgccgccatggcgatgcgccaggccatggacgaagccgggctggcaccgcaggacgtcgactacatcaacgcccacggcaccggcacgcaagccaacgacgccaccgaaacccgcgcgatccggctcgccttcggcacgcatgccgacc

SEQ ID NO: 67398 - DNA, 325 bp, Arabidopsis thaliana landsberg
gcaccctgctggaactcgtccacggcagtgcggcggccggctccgaggtcattttgcgtggtcatccacgacccgctggacgagtcgcggtgggcgcccgggtcgctggtgctcggcatcggcgtctccaagcccggcgacatcgtccggctcctggaggagtgcggccggcggggctgcaccggcctggtgctccgcgcgccggtgcccggcgccccgctgatcgccgaggccgcgcgcaccgccggggtggccagcttcggcttcgcccagggggtgtcggggatccagcacgccgtgaagctgcgcttgctgctggcccagg

SEQ ID NO: 67399 - DNA, 450 bp, Arabidopsis thaliana landsberg
gcgggcggcatcacgaagtcctgggtgaccattttagtttatggcgcagcggaaatcctcgacgggcgtttgagggtcctccaagaagcgaggttcgccaccgctgtgcccctggaaggacgcgtcgaacgccaaggttatgtagccccgcttggtgagctgctcgccgtagattgagccagaggtctgctccttgcagctgctgatggggtgtcccacgatgatcgcgggatacgtcttggactcgtcgaagtcgtcgggcaggcgcaggtccgccgcgacatcgatgtcacgatttttgaacgtcaccgacatctgatccatttgccttctctttacttttattaatcagagaattttttcaatgaactgtctggcgctgcggccgcttcatctaccgtgcacccgctttgccacggcgacaatgggcagatcgcgacctatgacaca

SEQ ID NO: 67400 - DNA, 644 bp, Arabidopsis thaliana landsberg
  unsure (1)..(644): unsure at all n locations
tgatgaatatccttactattgtagtaccaaatttcaatttcaatcaacatgctttagctattatcaattatgtgacgacatatggacttaaagttggaaatatgcacattttttgaactttttgtttacaaaagatttgtctatgttaattaataattttttttattgaattgatttggttcaagaaaaaaatggttataagaatttaattccatcaacaacacaaatctcaacgtcaatcttcgatatctcggattcatgaataaagatttgtctatgtttattaataatttcttattgaattgatttggttcaagagaaaaatggttatagaacttaatctcatcaacgacacaaatctcaacatcaatcttcgatatctcggattcagaaataaagattttgtcaactttgcttaactcttcgactggtttgaaaacagctatcgtgctgtaaaatgtaaagcaacttcattttaagaaaagaacaaatgagaaagtgaggttcaaatcaaagtcatacttattcttcatctatggcattcaattcttcataacatttacaagagcatatcanatgttacatgatggtaagatgcttgtatgtttttttgtgtgaccttaaaacctaccatagctcacaat

SEQ ID NO: 67401 - DNA, 1649 bp, Arabidopsis thaliana landsberg
aagctgcaaagctgactcattggttaatttattattgtttactttgcttccaagttttcttccaatatctcctccaagaaaagaagggatggtgttgatcgtggcactatactgaccaaatatacctaatgagtaatgattcagactaagactgatccacttctcactatggtccagtttacgaccccactctctcgctcccatctctgtcttcttcttcttttttcccctaaataagcaaagtaaaaaactccagattgtccatatcttaaaaatctattcgtaatttctcaacctcaaatagcaattgccaattgttttaactggcaaagaaaaagcaataatttcatagcatcttggtatttttctgtcggttcacgtgtcgatttagtgacagaggggacataaattgtccgatacttaaccagtgaaacatcaactccaagtatctttctcaaaatccaaccggagctgatttaaaacaatttgatgattatgattgatctccatctccaaccactttcaccaccaaactcaatcactcttcttcttcttcaagtaaccatcacccaaaaagcttccattgttcctcgctccttgtcgtctctgtttcgattccaaccatgaaaactttggtcggattttacatcctctgtttcttaatcggacaagatctgcctttcttagctgcagatgacgtcaatgtcataaacgattcgacccagaatctctgttttgcaaaccgattatccgatttcctccctccaccgtacagcaatatctccgataacatgccctgtactcctctttggaacacgttcgtcttacgggtaaaccgaaaaacataaaccaacttttcctaaaacccataattttgattttcaacgctgcttgctctgttttgcagtactcagaaaacagagacaatgtgatgacgattatagtatcggctttatacacaaccgggtgggttgggattggattctcgaaagaaggaagaatggttggatcaagcgcgatgatcggatggatttcgaaaaagggtcacgccaaaatcaaacaatactatctccaaggaacggagagagaccaagttgtgccggatcaaggagaattgcaactacaaaaagtcccgccggtggtggctcttcacggagcaatgatttacttagctttccaggtgaaattcgccgttagagttcctcggagagctgtcattctagcgtttagcactgcttatccttccaagctaggccgtttgactaagcatgatgataaaactacagtcatcgtcgatttttccaaaggtaatataatgtatatactagtctaatctatacatgttaaaaacaggggagagttcaatagttgtatgttcttggtcaatgcagctagtggagcaacctccataaagacgacaacttctacggagaagacaaaacatggagtaatggcgatactcggatggggtttcttacttcctgtaggggcaatcctagcaagatatctaagacataaagaccctctttggtactatcttcatatcggttttcagttcacgggctttatcttcggtttagccgcagttattcttgggattcagctttacaataggatccagccggatatacctgcgcatcgaggcataa

SEQ ID NO: 67402 - DNA, 438 bp, Arabidopsis thaliana landsberg
gcccagctgcggagggccttttagcccattttaattcacatcaacccaattagcaaccccacaattaagttcggttttcttttttttttatagatttatttaattctattatatttcttctcaaaccattttaggtctactatccttattcttgattattataaaaccaacaaccaaacacacttttaacattatatatacttatcaaaactaatattttcgattctcaaatatttttagtttatatttatatgcattgaaaatttcaattcgaaagatattactttctaatctactaaaaattaaagtaattatttatatgacagaatctttataaaaatctaacaaaaaaaatgagttttgacatcccaaaataaatgataacatattatattttcttattaatcattttattataatggggatccaacaaacatc

SEQ ID NO: 67403 - DNA, 664 bp, Arabidopsis thaliana landsberg
ggttttggaaattttttcaccccattgcgtgagccaactattttaaaactccctgtaacaaacagctcaaaggatctaaatggaaaaaaataaaataaaatcagtgtaaggttaggcgcacaagagacttacgaggaaagtggaggtgatcttcctggagcattaaacttcttttgcaatttaaatattggccaaggatcatcaccggtagagaaatcaacagctatcaagagaaagaacttgctagtcattgttatatcacaatgttagaaacagaccattatttcagtttactatgaatcatggatgcagagtaaacatatactttacctgagtagacatcagctacagggacagttcctttatcaagagtttcttttgtccctccatctgttgtgtacctgaagatcattatcagcaacaccaaaaattctcaactgatcaaagaaactgctagttatcaactgattcaacacaatctcttttcacaggacaatggtttcaaggtgcataacaaaacactactagataataccactgaaaaacgagagcctagcatgagatgtaattcttaacatatattcaataacatctataaaaattcacccgaaacatgccaaaacagaaagtaaaaggagcatatttactggagagtatagaactg

SEQ ID NO: 67404 - DNA, 580 bp, Arabidopsis thaliana landsberg
  unsure (1)..(580): unsure at all n locations
aaagatatatacataaaaatgataatttaaggatatataaaagacgacgagaggaaagcgaanaggtgcaagaaagcatgagaggctttgcttcttacacatgtgtcccgacaaatagtcacaggtgctgtgtcagctcaactctattctaccaacactacaatttcttttcaacaaaaaaacccataaaatcacaacttacaaactcactaatattttcacaaaacttgaaaatggtataaaaatcgcctcatggtgtaatcatttatggtaaatatgaagtttaattcaaattgggttttgctttgtagagctttctttgagaagggataaagtgcaaaaataccaaataaaaactcataatacaaaacagaaaagaaaagaatatactttttttgagttgtctaataaaaaagttgtggaccagagatctctcctcgaagacaaacggcgtacattttaagaaaaggtgaatcatttgggttttttaaaaacaatttcttttaagactttcacagtcaaaaataaaaggcgtatcatngaattttcacttttcattcatattttatagctttacata

SEQ ID NO: 67405 - DNA, 502 bp, Arabidopsis thaliana landsberg
caagcttggaaactaccttgcgagctaagccaaagaaatcagtgtgttttgcgcgcgctcttgatactccggcaccgagaagaaaattacgcgaccctgattctggccaggaggaggtcatcagggattgaaggcccgtcagctaagaatcgcaaagtctagtctccgctgtttatcttggactactaaagtctggtgtttctccaatttatccactagttactaagcacagcatcatttggataaaattcagtcaaatcggaccggtgtcggggtgtcaaaatcagttgaaattttgtgtttacggcacaatatcaaagcctcgcattgcttcagtgatactgcttttcagaatagtgctcgattagagaatggagcgatagatcgttaggtttttgaccgcctgaaccaatcctggccgaaacaggactttcagatagcgatcgacgtcaataggtgggttcttgagttgtgctcgctggcgttgcgcagcggctaccac

SEQ ID NO: 67406 - DNA, 379 bp, Arabidopsis thaliana landsberg
gacatttttgtattaactattttaatatatgctcttcttaatgaatagatatccgatttattatggattagtgatgacttataattattacaataataaatagttcgtttactttataattttctttcgtgtcatagttgttgttaaagacatataaatgaagtggattatcctatatttcgaatccgattgaaatgagtagtttaaattttttttcgtatgcagataatgagtaatcttacttatttttaagatatagaatttgaccgataagacatacttaattatctagagacaatatttatgagtgatgtacaatgatacaggacacttacaaaaacttatatatgcaaccgccaatctagtcttttatttgaca

SEQ ID NO: 67407 - DNA, 1627 bp, Arabidopsis thaliana landsberg
atgctcgtccaatgtgacctaaaggttttttttcttccgatttcagtgtgaggatccaagatgccatgtttggcagcatgttggctgtgttattctcccagataagcctatggatgggaatccaccacttccggaatcattttattgtgaaatctgccgacttactcgagctgacccgtatgtgtttcaaggattttacttttcctgtctgagtttaagtttgatatgtgattgattttccatctgagttcctccctcactgctttatgattctttcctgccataactgaaaagaaagacatatttatacatttgacatgctttgcattctagtttctttgcgtttgattgttcttcttcttctagtactgttttcatagttgtcaattttcttttatatattatttcctatctttacattagcacctgtggatatcctatagcatgattattcacggttttcctacatggtttccttgttcagattttgggttacagtggcacatccactctctccagtgaggctgactgcaacgactatcccaaatgatgggtaagaattttatattcttgatattgctattgctttgaacgagtgtactttcagtgccattattgtgtgaattggtactttataagtcactttgactttaaattttctacttggaactggtataagacattcattctagtttcaagaatgacaattgtttcctggctatatgcatagcacctgctgaagaaatactgttactggcttttgtttgtactaatactccgatccaaaacttttcagtgcaagcacaatgcaaagtgtggagagaacatttcaaatcacaagggcagacaaggaccttttggccaaaccagagtacgatgttcaggttgggttttgtaaactacatttaatatgtcaaggtgtatctacctatacgtttctaactggaaatcaattttgtttaggcttggtgtatgctcttgaatgataaagttctctttaggatgcagtggcctcagtatgctgatctgcaggtcaatggtatgacaatgacatcgaccagagttttagtcggttgagcatttcctttgaaacaggggaatgttgttttatttcatgttgcataaattcctgtgggcacattccattcacattcacattgtctttatttgtctgttattctgatcatactcaataagactgtgtatgtttctgatgtgggattcatgatatataccctatcatttcataggtgtgcctgtacgtgcaattaatcgacctggaggacagcttttgggagtcaacggccgcgacgatggacccattgtgtgttttttatcatcccttttgagtagtaacccttttgaattacatataggagtcaatctctcatacattgaaaatctagcaatcagtgatgtaagttttaaccatttcattttactattttggcagattacatcttgtattagggatggagttaacagaatatccttgagtggaggtgacgttcggattttttgttttggggtcagacttgtgaagcgcaggactctacaacaggtactgataacagatatgcataagaaacattcaaagatttggtcgtatatgtggtcaatgaagagt

SEQ ID NO: 67408 - DNA, 321 bp, Arabidopsis thaliana landsberg
aactcgtggtagagtttttaagttatcatggggagaacaaaaaagaaagtttttaattttatttgtttgaaagccatgtattcatagagtatacaaaaagaagagaaataaagaagaaaaataaaaaataaaaataaggctttgagaactttcaaaataaataaagtaaaaaaagcatgattgacaaaaataaatctgtagagactttgggggtgattggaagacactttaagggctttagattttatttaaagacttaaaagtcaaatatttactaatcacaagttcaggactttatgttgtcttaaagtattgaaagac

SEQ ID NO: 67409 - DNA, 791 bp, Arabidopsis thaliana landsberg
cataaactccatttatcaattaattaagacaaacttcaggtggatgacctagtcagtctttcatatgacaccaaaagtcccgattccaactcttataagatataataaaatgggttgaagaaagcaaaccgggtgcaagtcaaaccaaacatgttgatttacttcgtcaaattaaagaggctgctcactgtgtaatatatgcaatttcgtagtagttaacagatccttaatatattagataattaaaaatataatgatttatttacttcaaacactttatgccgttagttttgttattgttactacaatatgttctgcaaaagaaaaagaaaacaactcttcaaatgttatttttttttgtaattgtttactcttaactagtttataataaatgcgggtcaaacctatgaattcgaacttaatttataatataattataaatatttttaacagcttttttacatatacatacattaaaattttctatattaatctaagagtaattttaaatttataatcataaaaattcgttttaatatattatttatcaaaattttaaaaacttgaaatgcgtgataaagaattctattacgaataaaattcgatattcttagattgatctacattttgcaaattgaaggtaaaattacataaaatgttatttaaagcggttttcctttttcaaattatcctaaaataatcttttaaaaaaaataatttcaatcacaattcataactaacaaacaatgaaaaaattattttaaaaaaaacccatttttataaaataaccc

SEQ ID NO: 67410 - DNA, 568 bp, Arabidopsis thaliana landsberg
aagtcagttctgggaccactgtctcggctatgaatgatggttttgggagcttgttgcagctgcctgggatcggggtgagcggttgtatcgcgagattcgatctcgtcgagagaccgagatcaccaaagtgatccgtcatccatacggtacgatttccattccttgccatgcagagcacgatgcatgctgactatattgatagctgccatggagatccaattccgcaagcccagcatgaagtacaaagccggccagtggctattcctccaggtacccgacgtgtccagcaatcagtggcatccattcacaataacatcctgtccgttcgacccgtacgttagcattcacgtccgtcaagttggcgacttcactcgcgccctcggagacgctctcggttgcggtcctgcacaggcaaaggacctcgaaggtctcgaccctctgggcatgtacgaagttgccttgcagaacgggcagacgatgcctaatatacgcattgacggcccctacggtgcctccgcagaggacgtctttgaaaatgaaatcgctgtactcatcggaactggcatcg

SEQ ID NO: 67411 - DNA, 1871 bp, Arabidopsis thaliana landsberg
cccctcaagacagtaacctgcagcttcatattcattttatcactaccttaaacaatcttttaccaagttaacatgatttgacaaattgggccgacatactaaattaggacatgggcttcttctagacattaaatttgaaaaacttggaagcataatatatggaatatacctttttgattttttctggacctacaatttataatttagattttaaaaatctatcttcatattccccattaaaagcaaccgtcctcaactaatagctattattatatacataccctcacaatatttaaccaaaactttttaattttatatatttttccaaccacccattctgatgaagtaacgcttcaagtcggtcaagatttagttttgtagccaaaaaaatttgtgtgaaacttttgtgtagaaaaaaatctatttttataaagttgttgttttgtgcgaccgcgaatacttgtaaacgtttgttaagaaggaaaaaaaaaaaagttgaaaatagaaaaagcttgcctgagagaagagctctagcaaagaagagagcatagtagccgttaaagccaaagcggcgcagtttagcactaaagcgttaccgagaaccagagacaacctcatactcataccttgttctttcaactccattctttcttcactctgtatttaacagttatgaaaaccgttagatctgcaataataataactaaagcaaaattttcagacaactttcttgtccatttatcaaatatggagcaatcttcgttttgaagttattgacgagaaaaaaaaaagacaaaacagagcaatcatagaaagaatcatgaaaaacagaggaaacaaccaagtttagaggttgtcctctacttcaatatttgacaacatacaaaacaataatctaagaaacaaaataaacagatacaagaagaagaagaacgtaccaaagaaaagctctgtaattagcggaaaaaggaagaaagaaagagaaaaggactagaagaaatgagctctgttcattaatggaaaaagtgtgagatttgtgatcaaagaagagttgttcagaatctcagatataggagaagagagagatgagagatgaaagagaagagtgtgaagctgcccgtagttgttactacgaatccttagggcagtacgggcagtgactctatgtgatcatctctaattgacctgccacgtaagctacacaagtgtgggctctctctgttaagtcatacattttatgccgaccaagatctttcttcatctatgtattaatgtatgtatgtagtcaatggttagtaaaaactaaaaagaaaagcttttggtaacaaacagaaccatattctcttcttcttctccttcttcttctatacttctttctgattgttccaattccatttcctctttatgcttttcccaaaaatatctcaatcgttcattatatccttctcctttagcactaaagactcacatgccatgtcatcttattctaatgctcaataactatgatgatgatggaacttacataccaattaaacaatgaaagaggaaaacttttgttggtttccctccaacgaagccatacctgaatctgatctgtacaatggcttgagttagaccttatgagaattctttggatcttccttattttcaccaataattctcggtaagaacaaaacccatcttggagatggagaaatcttgttgtatctctcactatgatttcccttcccacaagcttggaaatgaactttatagccgtgtggcaatcattgcacactctgagattcttcatgatcctcaatgtggttttatccggagtgctaattagtccaaatgcgattgctagtttctcgctgtggtgccttagaatc

SEQ ID NO: 67412 - DNA, 523 bp, Arabidopsis thaliana landsberg
  unsure (1)..(523): unsure at all n locations
ttccttccctccaagtgccactctggcttcatccgttatttctccgtttccaagcaacagattaccggtagggttgggcaattttattcttcgacgtggctaaccatgtcagaagctctgcgatatgccaagtgctgctcctttgnnnnnnnnnnnnnnnnnnnnnnnnnnnnnnnttttgatgcgtcgtccgtcatgtaattcagtaaacttttctgaaccctgccctgtttttccagtgcaattcagtctcaggaaaatcctgggaaaatctgcacgacaaaagttctgatgatctttttgcacatggagcagatgacggctatttgtcttcaacactgttttatttcatttagtagatttatcattctcagcccaaacatgtgagaccattacgaaatcactctggatgaggcaaccattgctctccaccaactccaatccatcaatagcacattgagtatgttccccttcctattggctactccatttccatatgtacattgatacaatatttaatatc

SEQ ID NO: 67413 - DNA, 611 bp, Arabidopsis thaliana landsberg
  unsure (1)..(611): unsure at all n locations
cttcacggagataatcacaggaagagaaaggtctccgatcttcatctcttttctgtttacttgaggataaatcgctgtcagtctttgagctactcatgggtgtggatcagcgagtgccgatccgaacccaagaaaaacgccaagatctctagcatcttgatacttcccctttttcttcgagaaggacgaatcatcttnnnnnnnnnnnnnnnnnnnnaaagaagcttaataaccagtggctgagctacaaaaaattgttatagggatcatattttattttaataattaattaaatatttaaatataatatttaatttcaaaaaacaaaatccttaaaaaattaaaattcattgtctttaaaaataaagaaaataagagataatcattattgttctttattcataatatacagtatatttatcattccattttaacatattttgtcatagttcaataatattttctaaaaatataatgcaaaagaaatgattgaaacaatataatatggtttccataggtgcaaagaatagacttgagcactagacatgaggtcaatttatgagaagagcaccaatttaccacantaatcaaatgggacataagattataaa

SEQ ID NO: 67414 - DNA, 703 bp, Arabidopsis thaliana landsberg
  unsure (1)..(703): unsure at all n locations
gctattggatgggatgctaaatagattatccatagtngcagactcaaacaaactctttgggtatggagattacaaaacacagagaaggtgacctgatcatcaagtagcagagatgatgattgaattcaaatgaaagcagaaccacaaattttctaattttccataacagttcaatcactagaagtgtagaatctgagatcactgaaacaacaatttcacggttcttagaccaacaaatttagaaacccaacccagaaaaaaccaatccctaagacacgattcctcataaaacccatgaaggattagaagaaatcaatcagagaagaaaggatcatgcgattcaacagcttaataactaagatcagatcagaggaaaaagcaaaattgaaaaggaagagtgaaggattatgaacaaaagtcaaagctgcttaccaaaagtgaagttcacaaaaaatgatcaccggcggtcaccgtcagagagtttgctccgatcaccggcggttaaaacaatcaattcgaagtagagagacgaaagagagagaggaggaattggaatcagagagatgggatattctgggagagagtaaaaacgtattttaaatattattacaaaattgagcttggttcattcttattaaagtttagttggataaatttccatcgactcatagactcctattttattttattttctttgtcgaca

SEQ ID NO: 67415 - DNA, 430 bp, Arabidopsis thaliana landsberg
gggacagaattaaactggctcgtagggtttgactgtatttgtccgacgctgtgatagattatgtaagatagatcattttaacttcaattacaactttttagaaccgactcccctacattttttacttactacaaatcgacgtacgtatctaatgaatctcaattccgccaatatattcttattcttagatatttttcaagtttgataaataatttataaacgacacaaatttcaacagcggtacggaaaatgaaattagaacgatatttgatatcaattttggattatgtagggtcgtaaaagatatgtttgatgattcatgtttgacacaaattatggctatgtctgaaaagataatatcatcatgttaccctaattacgttttatttgtgacgagatcttgttgatatatctgaacttttgagggggc

SEQ ID NO: 67416 - DNA, 549 bp, Arabidopsis thaliana landsberg
  unsure (1)..(549): unsure at all n locations
cgccaaagcatcaatcctctaccgtactgccggcaagatgagcacgaagcggcagatcaagtatttggagattatcgaggactactggaaggacacgctggttaaggacatgacggcaggcgcaattaggcagagcgcgatcgacatctatccgaaggccgcgccggcgacacgtaatcggcaggtcatcacaccgacgcgcgccgtcatcaaccactgcgccgaactggaaatgtgcccaccgatcagggtccgaaaattcaagtttgaacagaagatcaagaaacccatcctgttagactgnnnnnnnnnnnnnnnnnnnnncgcgcggccgataaccggtgcgcttgccacgttcatgtttgcgacggcctgccgaatatcagaagcgcgacggctcgaatgggcggacattgattttaaccaccgcacgatcctggtgcagaaaacgaagaacaagaaacagcgactatcccacctgcccgaccgcctgcttgtggcgctggcaaatctaccgcgagacagaaagccattctggccgggcgagac

SEQ ID NO: 67417 - DNA, 699 bp, Arabidopsis thaliana landsberg
acggccgatacctcctctccgtgtgcgcctcgctcgaagcggtcaatttgcgccgttcgccggaggatatccgcgccgcctgcgcgcgtcgtagcgcgatttgggacaggcgttggaaagcccgtttggcccgcgcctgatcgccccaaaaacgaatcacggtgacagcgtacgaattaccgtgacaccttacccgaacgtccgctcaagtcgggaagcacattgatccgccctctgatcctaggcgtcgccctgaccctgacaggctgtgcccacgcggcatacttccccgtcgaactttcgcgcgatggggcgtgcggacctgttatccgtgagtacgagagcgaatggtattcccgcgttctctacgctgcgaacgaaccctctctcctgcccctcacgcagacgccggcatcggagcaggtcgtgcgctttctatatctgcccagctttgaagcgcagatcatcgtccggttgaacatcccggcgacgggtccggttcgcgtcacggcgaaaaaggttttcggggacggccgcaatgaaccgtacatgaccagaagcagggtctcgaagaccctgagcgcgccggagagcgcgagggttcgagacctcgtcgccgcggcgcgtctgtcgcaaatcgcctcgaacggctgtgagggccctggcatggatggccagacctggatcatcgaaagcgtc

SEQ ID NO: 67418 - DNA, 400 bp, Arabidopsis thaliana landsberg
gcctttcgcatttcagcgaatccggcttcttttgcagcttgctggccgcgctggagagaaacgggtgcctggactgctttaatgccacgagaaagttctggaacaatcttctcaacacccttagcaataccagcagcctttccagcaagtttgagtcccttaacgaacggagcgactccagtgaacgttaagggatcagtcagcacgtctaacccgaaaccaccaatagcgtcggcatatttgttgtcaatgccggccgactttaggagttctgagccagaagtaaagtgctcaccgtggtgagaaatatcgggttggaaaatataatccaagaccttctttcccaaaggagtgtgaaccggacccagatcaataacaggttgagcaaagtgtgttaaag

SEQ ID NO: 67419 - DNA, 515 bp, Arabidopsis thaliana landsberg
ctgcagatgttgaaaagccaggatcttttatttgtttaagtgagagtgggaaagctcatggggcttgggatgccatactccacacaaaatgccgaagaggctttgaaaaaagctttgaaagccgggctctataatcctttgatcgaagtcgcacaaattgaagggatggcttacttatgaaagtgggagtcttacgatttccaggcaccaactgcgatcgcgacgtgtttcaggggatgatcgaccagggacacaagcctgaatggctgtggcacgccgaccagttccgtgctcaagactactaagctctcgcggacccgggcggatttagctttggcgattacttaagatcgggagctgtggcggcgaggtcagcggctttaaaaagtgtgaaagagatggctgacagtggaaagcctgtcattgggacctggaatggctttcacattttatgcgaggccggacttttgcccggagccttgattcctaatgaatcgggacttttattgatgatt

SEQ ID NO: 67420 - DNA, 539 bp, Arabidopsis thaliana landsberg
cgctgcggtgccgatgatcggatccgtgcgcacgccgaacgggctggtgaccgcgtggcccggcgcgggattggcaagcggcaggcggcgcgcctcctgcttcagatggtcgagcgtgtccagcgcatcgtccagttccttgaccttggtgtcgaacatcgccgcgctgttgacgggaatcagcgggccgccgacgtcgctctcgtccttgccgaaattgctggcgacaggcaggtcggccgcttgcagcgcctccgcgatcgtgtcggcattttacgtaggccgcgtcggccagattggtgatgcgggtcaattgctcgttctcgatggtgcgcagcgactggttgatcgaaacgaagagcttgtcggcacggtcggcgggcgattcgccgggcagcgatacgtctggggtcgaccacagctagaacggccgcgtgtcgctggcgcccacgctggcgagcgaagcctgcgcgacgggcaggacgtaccccgtgatctctgcgcgcttgtccgaccttatctgcggtgacggcgggctg

SEQ ID NO: 67421 - DNA, 816 bp, Arabidopsis thaliana landsberg
tttaagaaaaatagggcttcccattttcagaaaaagaagttaagttcaaaattgaaactgccaagcaatagtcaatactaaattttatataaagctagacaggatattcattggatttgtgttatgtccttctctaccctctctctcgtgtagtaaattaatagtcaatacaaaacgctcacctccctctctcttttggatatcaaacacatcaaatcacctccaaactcaaagcaaaaaagatgaataatttttcctaaatagatacatgtatagtttcgattaaaacacacgtacggtataattagacaacttactttacattgtatatttttaatgaatttggttaagagttaagacaatctcggaatctccaactaaacaagatgatatatttgtttaaaggaaaaaaaaaacagtttgattgtatttaatggcgtttttatatgtaagaggagaagaaacaaaaagctgcaaatgtataaataggtgtaatcatcacaaaactatgggatgtgacaatacattgtcaagcttctgtctctttctctgttttctctctgatgggtttttaatttcttaattatatgcagaaacagtgaaacaaaagtaagtttttcgaaattgaagaagtgtaacatgcatgcatatttaccaattcttcaacgttcagattgtctaaatcaaagaatcccttataccaatatagaaagtggggcacgacgactttgatactccatatttttaattccggtcagaaaaaatactaattatttttgtcaactcggaaataaactttattttttgcaaaaacct

SEQ ID NO: 67422 - DNA, 760 bp, Arabidopsis thaliana landsberg
gtatgacatatcttcttcaatttcttcacaatcatataggcatcaatctctcccgtcaccgttagtttaccatctttcacctccaccgagttaactccttcaataccaaaagaaaagataatccttcaatacaaaaaaaaatcaaaatgtacttaattatgatttaatcaattgattaagagaatttagaggcttatgagtaaaaaaaaaaaaaattagcaattgatgagtgttgtttatacctgagagacaacatacagttgacatagctttttgtttggttttttcacaataaacatctaatttcagtacaactacctgtcatgaaaatattaattatggtaaagagctaattagggtagaattatgacatttgatatataagcaataaaaaaatattcggaaaaattattacaagcttccaattaagaaacatagattaggaaaatatatataaagaatcgaacctgcatgtttttcttcaattagtgtttggaaaatatgaaaaagtcttagattactaatgagctttgaaagtgtccctcctttccttagtcctttatataagcagctgcaagttgcagggcatgaaaaagacaaggatatactaattcacaccaattttcctataacgttgaaaatggaaaaaaaatcaagtatatgtcttaagtgttagttggtgtaacttattacttctccatgcatacacaataattattaaacttttaaaaataatttaaagttaaaataacacgttttc

SEQ ID NO: 67423 - DNA, 597 bp, Arabidopsis thaliana landsberg
aagtcagcggcagaatttattaattccaagcgtttatcatctttcatttgtgttttgaacgaattaaggacaagggaaatctggtcgaggttttttgcgctttcattgagtatcccgctatatacatcatacatataatccagttcctccggtttaaagtttttatcctgctttgccaggttccatgcccttttatattcttccacaatgaaaacttgcttagttgttatttctctaattctttgatagtaagaaatagctgatttaactttccataattctgtgtaatatttgccgtataagtccttttgcttttctgcccagtctgagatttcggtgagtttcaatttggaaagctgatttttcataactttttgagcattctgcagccagatagtttcgctttgcatacgttgaattttcaggtccaccgacttgatcactttctaactcccgctttgattactttcaggacagcgatctgaacatttgcatgctcgactggtaatgacacccatcacacaatcaggctgggtggcataagaatcataaatttttttattgaactccatttaagttatttaacctaattgtctt

SEQ ID NO: 67424 - DNA, 349 bp, Arabidopsis thaliana landsberg
gatacagtgaaaaagtatgctgcatgcacattaaaatgcagttttaccgttacgttggagatggccttacttcattgtataactcgtattattttctgtgtgacaattgaataaagcaatgaagagatgagaaacacaaacacaaattgattcttagtgttatagttagagatactagtattaattttgggaatgatttatcgctcattaattaaaatgaaattcgttggaaagccttttaaaaagaagaagccttgtcccaattttttttttgcaaacatggttggaaattaaattttcatggaattaaaattaacttattattgttaaaaatattgattaaaaaggt

SEQ ID NO: 67425 - DNA, 659 bp, Arabidopsis thaliana landsberg
gatgttgtcttccttgagacgaagtcgacgatgcttcccttggtgccgtgcaccgggatcgacacatacgctttgccttctggagtgaaaagcgggtggcccaggttggcggtgtatcgaatggcccggatcttgaaccctgcggcgaggtccgtctcgctctggttgcaatcggatttattaatgaggttgagggctatcgcgatgtggagggaccccagtaccctgtccgataggcggtgcatgcacaagggcttctcgcggagacatcgccagatgcattcacttccagctgcaggatcccagacgggccttcgcttgacttcgaaaatagccggagtcggagtcatgttggtaacgagagcgaatagtgaagagcaaagaatatgcggtgtgtagggagaagggagggagggcgcggcgggccacgcgagagagttgttgatggaaagaaagaaagaggtgcccgaagaaaaaagggcgccaaatttacaagaagctcaatagagcccgctgaggcaagatataaaggcggagcttaaaggcgcccgaacagagtatgaggtgttttgtttttggaaagagcgaatagcctcggaaggggtgtattatttcagaaagagcgaatagtcggaaggagtgaataatttccgaaagag

SEQ ID NO: 67426 - DNA, 556 bp, Arabidopsis thaliana landsberg
taaaagactaggatcatgcactcgtgtgcaaagcattatgatgggtgtcagctagctgaataaaaagctcacctactcaatttgcctgaaaccaactttgtcttgcgcttcgattttgtgagtgatagatagcagccaaaccagctctccctagcgagtattatctagtaaatgccatgctctacgtgcatgttacaataactcagacattttccctagttcttgtgcaaatgcatctttttccaaatctcactggccgttcttacttattcaaagaaataaagaactcttctcttcacatgaccatttcaggcaacagctattccattctttcagctcatccatcccttgatagccaagaggtttacccaacagcatgtgctggctccagatacaatactggattcagaaaacaggtcaacctgttccaggaaagctccttcgcaggacccaagcaatacacagaggaagacttcaaggatgagagaaacagtgatttttttgatggatttcttgccattggaacccttggtggagaaacacttcttgatgaaca

SEQ ID NO: 67427 - DNA, 181 bp, Arabidopsis thaliana landsberg
tatacatgtacagaaaacccactaaatttaagtgaggtgattatttttatggtataaatattatctatatgattcttgcccaatgtaatatattttcatttttcgtttcatatttctacatttcatttttttcttttcttttttttacatttcatattcctttccatcgtggcccaaaaaa

SEQ ID NO: 67428 - DNA, 690 bp, Arabidopsis thaliana landsberg
  unsure (1)..(690): unsure at all n locations
ttgctaagctcgcttgacaattggtcgtataatcgtcgtattcgggctaatgttcctattatctccatcacacagtcgtgtcggtgttttagatttttcaacaaatttgtacattatactaaattcatttattctaaaaccaataaaatcttaaatttatgtaaaatcttcatgacaacgagtcatgattcttaattatttttgtcagtcccaatctaaaatgaaatagctgacacgtattatcaaggtcgaatccaaaatatgatacgataacgaccgcaatgatacaaagaggggttttgaactaattaactgataccgtacgtttttgtatttttcatcagcatatattatttcgttgttaaatcaacaaagatagcgaagcagattaatatcgttttccatgtttcatcgatcaatatttgattaattagaatacttttagcaattcaagatttttatgggtcataatgacaaccatttgcgtgtttcgttgactagtactatactctctaaagcaaaaagatgttaagagtaagtactgtcctacgtctcgacgtgtcttatttttctctgtctggtcaattttgtctctcaatggaacatacacaanatagtgatacatatatatgttgaatagggaataaaactacacaccatatgatattaacttcaatttattctatgctt

SEQ ID NO: 67429 - DNA, 595 bp, Arabidopsis thaliana landsberg
tcattgggtttgtcgctcggcttttccattttgctgtacgatttgtcggcgaaacctttatactcagggtccaggggctttgagtcggccgcgaaagctgtcatcgtgctgaataaaaccgaaagtaacagtgccgccatttttgttgccatcttagcggtccttcctcatggcgttgcgggtttgcttgtcgatatccttttgcttcaaggactcgcgcttatcatgttgttttttacctcgcaccaaagcgatttccactttgatgcgtccatctttaaaatacatcttgagcggcacacaggtaaaaccgcgctcctgcatcttgccataaagcttgttgagttcgtggcggtttaaaagcagcttacgggtgcgttcgggctcgtggctgttgtaactggcggcctttaagacgctgatgtgggctttttgcatataagcttcatcaccgcgaaaggcgatataggcatccttcaggttcacggacccttcacgcgccgatttgacttcactgacccgtaaaaccaaggccgcctcgtaagtatcgacgatctccgaatcaaaacgggctttttgttaacactgataactt

SEQ ID NO: 67430 - DNA, 690 bp, Arabidopsis thaliana landsberg
ccaatgttattgacaattaagtgttttcaaacattattaaatttaccaaaaaaatgtgtatattgtttgttaaagatataaatatataataaccaagatataaatataaaattttaaccagtaatataatcaaacacaaatatttgcgttgaaacagtctacttattattggtgcatgacttcatccataaataaaacaaacctatggggagatgagtaggcgaattcaatccagccaagatcttcaccgctccatttgaggatgcgaccgtcagtgacgccaacgtatgggccttctcctcttgggtcccagtccaggctctccggtccatccacgggaaggaggattgtcctcgctgtggttaggacgtttttcgagccctctatactctccggtccaatgatgtatggaccgactaagacgaccaggacggccataattgccaccaaaacggcccacgttagaattttccgactgatcggcattgattttatactctgcctcctcttccgtgaaaaatgtgtgtttaagtgtaagttggaatggtaattacttaattatatgcacgattagcaattatttggatgtttcttgtttgagaatacgtgagagagaaggaataaatagagaaaagcataagctattaggagaagcgattccatgttactactttttaatacatgtttttt

SEQ ID NO: 67431 - DNA, 723 bp, Arabidopsis thaliana landsberg
ttttggctttggatgctaccttaccatattattcttgagattgataagttattgtgaagaatatagtacttttcaatagtatcactcatgcgttgcatcttttaagaagattaaaagtccattggaccttagttctttatcacaagagttttcacatataatgccaagaccgaatgcgtcaacatctcaatcaagtttaagaagtttgaaaagagggaaaataaaactgaaaaacgttttgttaaattccaaattcgttaaccaacaacaatataacattgacttgcactattcaacaccattctcacattctaccccaaaaaaaaagtgctttatctaacaaccaagttaattactattcttgaaacccttaaaaaacgtttcttccttttgtcgtttaagaaaatctttagtataatgtgataggattactcaataacttgattgggcagttttagcatcaatttttagtcttactgacaaaatcttttatgatgtctttttagtttctagtatgtataaaactgtttacatgttttgaaaagtgatcttgaagactattatcaaccgttacttagcaaaagtaaatatgtggaaaatgaaaaccaaacatatgtcatttagtctaatagagatagtggagaatgaactaaccgagatcagtagccgccaaatctaacgtaaaagatcttggaccaccctttgggcataattccctggata

SEQ ID NO: 67432 - DNA, 1263 bp, Arabidopsis thaliana landsberg
  unsure (1)..(1263): unsure at all n locations
gcattaagattcattaaatttctgcccatatgttcctcagaaactgttatcattttggtgaataaacttgttcctggaaaaacctgcatgacgtcatttttatacaatgatgcatcatgttagctgaatccaaatgtatattccctctcctataactatgtcttgtcactactttatctgactatatattttttgtattcacttaaatatgaatcaactctcctaggatcgaaaaccgttccatgtttcttcctattcgctatcgccaagtggaaggtgtcagcgagtcttggcaatttcttcctcctaatgcggctgcttcgttttattgggaaaatcttggtagacgacatctatttgaacttcttgttgatggaaacgatccttctaattcagaaaagttcgatattgataagataggtgattatccaccacgaagtgaaagtggacctaccagacccatacgagttactattttaaaggaagacaaaaagaatattgtcagaatcagtgactggatgccagcaattgagcctacttcaagcataagcagaagacttccagcatcatccctgtcagaattatctggaaatgagtctcagcaatctcatcttttggcctcagaagattctgagtttcatgttattgatgagcttgctgaacttggaatctccgtaatcgaccatgctcctgaggaaatactgtacatgtcagtgcaaaacctctttgcggcatattcaaccggcttgggctctggacttagcaggtgagtttatcaggttcttaaggtgtagctctattttacaaatgtaagggccaccatatatcaccaattcgccatactgattttctatcaaattcgataaatctgggtactgtctctatgcattcattagtgtcaaaagttcaaaacatctaaaaatgcagaaagggatttgattgagacttgcagggaatttttttttgctaagatcatgaatttccagttgcgcttatcagattttgttggctgctatacgaacaaagtactttgggctattgctaaacgcttattgttttacaggttcaaactaaggatgcaaggaatacaagttgataaccaattgccattggctccaatgccagttctgttcagaccacagcgagccggagataaagctgattatattttgaagttttctgttnctttgcaatcaaatgctggacttgatctccgtgtctacccgtatatagatttccaagtaagtttatcaaattctgttt

SEQ ID NO: 67433 - DNA, 539 bp, Arabidopsis thaliana landsberg
caatctgaaaatttgttttaaatttaagatctctttttccatgatgatatcattggttgccggggagaggaagtctttattggcctgccactgtgtgcaatagtacatcaaggtccataatttacacatgggcttaaactcataacaatctttttgttgtttaggaacaaaacaaaaagtactcctaataaattgatgtgactattgaattcgtttgcttgcaaccttgaggtcttcttttggtagactcttattggaaatgcatttaccataacttaggatctgatcactatttttttgtttgatatatattgttttttagacatggataattattacgtgtatggaccaggacaaacaaacgaatagagtatatgcttatatacgatctaacccttttgattctttcttgtgttaacatttattaatatcactattgcttatataaagattctatgtagaaggggaggaattaccgattgaaatatggaaatagaacaaatgagatcacttactttaattaaagtgttgatgcaata

SEQ ID NO: 67434 - DNA, 560 bp, Arabidopsis thaliana landsberg
ttgatgccttaaatacttaaacatcacagaactaatagcttaaagacccacagatatatccatcaacggagaaagatctgcactctcaacttcactttttggagcaaaggtgatgacataccttcttcattcgtttgcttggttgggattaagaattaattagaaagttgagataaggtgtttaatgtgtgttatcagtgttgagaagcttgtacaggaagttcagacaagaaaagatataaattgtcattgttaaaagggtaaaaccacaatgtacaagtaaaagacatacttataaaaacatttacaatagggatcaatctaaaatcttttatatgtccgcagctaaagcaacacatcagctctttgcttatccgcaccaacatctcttaactttaatggaggaagattattcttttatgtattcattatctatcgcgactctctctttttttttaacataaatccattatagacataagcaagcaatgggcattgggcttttaaccaactgtctttttgcattactaacgtccaaatctggtttgatacaactgaca

SEQ ID NO: 67435 - DNA, 506 bp, Arabidopsis thaliana landsberg
  unsure (1)..(506): unsure at all n locations
cagcttttttaccattaatttacggttggcgtctaaattttataccgggtgaatggtgccgcgggggaaggggtttgataaatccctgctcatgtgctaggttacaaaannnnnnnnnnnnnnnnnnnnnnnnnnnnnnnnnnnnnnntgatcgagcaggagctcaacttcctggtcgctttttttggtcacatcggttaccgagcccgggcgttcgagtcccatcagcacataatttttggcatttggataaaatacgtgggcaaaaagaaaatcgggcccgccaaagggataaaaacaggtgagggtatcatgagctgatacaatttctttttctgcggttaagcgatcgatgcgggtaatggtgctgtcgtgaacatggttccatactttttccgaaaagcttttatggtccgttataaaacgattttgcctggatttttttgaaaggttcgcttcagcagggtttggctgccaacaggcgggcataatccggtaaaaaagtt

SEQ ID NO: 67436 - DNA, 2278 bp, Arabidopsis thaliana landsberg
ctgtgcttacagaccactttaggactgccatgtagggtctaacaggacaattttattaacttacgcaatttttcactgacttaatatatatacagggagaaaacctgtaacaggacaatcttattaacttgaaaagatcactacaaccggaccatgaataagcaaatcatcaaaactgtaacttacatatgcactcacaaactgtccatttatcactagtgcaggtcataaaatcctatatttacaatgttattagaaagcagttttcagattagatcaaagattagcgtggagaatagcataccagtcaaacatgctctgcaatatgcaccagttaagggtccactcaagggtctttgtcaatacaaggtgatactgtgtcccatctggtgcggatttgactgctggaccagcaccagggatccaatgggaaattgggaaagaaagcaaacctttgttgagcattccaatcaagtagttttctttccgcataaggcgcataaccatatcatgagcagaaagatccttaaccacacaaaggcattgtgagctttgtaactgaacaaccttctcaaggactgttgcccatggcatagtaaggatttcattgtctgtgacatggagactgcaaatttacaacaaaaagaaagaaaatcaattatgacctaaaatgcatgttttgctctagcaataactattcatagcatgttgcaacttccaacttacttgttgtaataaaagtgccgaaagtccaaagtatctttcaactgggcaaaaaaccttaagaagcagaagagccagtacacagagaagagggccaaatatccaacaattatagcagttgtgagcgtgaaaggggataaaggatgcggatggatagcttctttgacaagatcacatggtttagttcctgattcaactgcatccattccacattttgcattctgaagaccattccaatcaacatacagcaagaaaaacccagagaagcatatgatgaagcccagacttagaagctcaacagcccactttactataatacaccaaagtcctttgtctctgtagtagctgtagagcctttcgacaaaaagatccaaatcagcaattggttgaacatttaaactctctccattaagaagtcccgatgggctctcactaccaggacttggtattcctccgtagttagatagctcaatctcgtgtgactcattatgaagcaatccagtagtcaaagacgatgatgattcaccacgttgccatttaaaaaagttacgtacatttggacccttatgcccactgctcatcatttgtaaacacagacgattggccaaaacagccggtccattccctgcttaccacgcggaaatttgaagaaagtgtagtgcgcaatgagaatgcaactacaaatcctgcatcaaacatgaataacataaagcatccacaatgcaaatcacctaatgacagatataatttatgtatgcaaacaaaaaagtgccactaaaatgttcaagctagaagcacatacaatgaatatactaaccgatgagacactaaggcaaatcaaatccttaaacgcagaaagacaaaccaaggatacggaactcgtggcataacctgctaaagaaatgtttctatatctgttttccaccatgatggatataaaccagacccacctatcctttgcttgacactcaaaagactattcgatttcaaacacttcctttctttttcaacaatagcattcatgcacaagcagaatctttggacaatgcactaaatgcctagcactctgatgacaattgatggtgcagagaaagcgaagacgaagtaatctatactcaatcaagaggctgacacaagattcacgcaacctttgcacaaccaatagaccttgatcaaagtcaattacctaaaaccaactctatttttcacaagaagacgaagcaaaaacggcgaattccttcccaatagaacaaggggtttatctacttttaacagggaaatgatcaggagcaatacgattctaaattgaaacctcaaaaacccttaagctaacactataatctcctccaaccttaaatcacagtgcgattaatcaaaaaaaatcaacctttctcgataacagcagatgagaaaatcaaaacttaccagagacccacgaaaggaacagcaattagaaagcaaaggtctataagcagctaggaagatataattgtcttaaaatccgaagctttagagaaggaggaatcatataaagaggctatggcaaggaaaattc

SEQ ID NO: 67437 - DNA, 745 bp, Arabidopsis thaliana landsberg
  unsure (1)..(745): unsure at all n locations
aaaattttattagatgtaaatatctattttaatatatatatatatatatattaaagcctcttttgaaaataaaaaatattcaactattttgtttgtttttgtaaaacattatcgtaaatacaattgttaaacgatgtatttgatatatatatatgtacatacatgatatataaaaatgatggaatactatttttgaagagaaacaaaatgccaatagataagtgtggaccaagatgaccacgttctgttaactttagtgctaatacatacaaaagagtatactacaaactgaatttagaaaatatatagtaaatgtttaaatgcaagaaacaatgattaaaaatttagaatgacatcttaatcctgcataataacattaattaaatctaacttcaattgatttttcttttttgttttacgatttcattntgatttattgtttatgcttttacaatagtagatatgaatttaaatttttatatataaattatgcaaagacacattatatttcctcatgtgctttctagaaagtgttagccaacttttcattaatagttatgcatctaacaaaggatgcatgaattttgtgaagatgaacaagggtggagctcaacagaaaggtcattcgtcaaagcaagctgaaaacatagttttagtaggccggacagggaatggaaaaagtgcgacaggtaacagcctcattgngaaaaaggtgtttgcttcaaaggcacacgcttctggtgtg

SEQ ID NO: 67438 - DNA, 742 bp, Arabidopsis thaliana landsberg
ggcaggcccggcgtttcccattccgtcgccacaagctgaccctttgacgaggctgtgatataggccgttttcagatctttgccgccaaagcagatattggtgacaaccacatcatcaatcggcacatgcttgttcttgccatccggcgcgaaaatcgtgatgccgccattcagaatggtcgcaacacagatattgcccttggcatcgaccgccagactgtcgaaataggtatgccccggtgccgagccgacatagcgccctgcaccgcccagacccgcatccggcccaagctcacccggcccgacaatgtcgaaagccaaaagccgcgccgaaaaagtatcggccacatagactgtcttttcgtccggcgacaagccaacgccattggcgctcaaaaccggaaaagccacttccttgatcgaggacccatcaatcttcgcatagtaaagaccgccgcgatattggatgcgtccgtccgtcttgccatgatcggtgaaccagaacccgccttccttgtcgaaaacaatatcgttcggcccgatcagcggattgccattgcattccgtatagagaatttttgattcacctgttttcagatcgacgcgctcgatccgtccgcccgaataatcggcaggcttgccgcccggaatgacaagcccgtccatctcatgaaactcaaacccgccatcattgcacacatagcaggccccatcccgcccgatggccgcaccgttcggcccgc

SEQ ID NO: 67439 - DNA, 1480 bp, Arabidopsis thaliana landsberg
tctacaattggaagatagtctaacaaatataacaaaaacagtcatcgatattcatgcattataaatagttattcaaattttcaaaagattgatagtttgataccatatcaattatcgtatatttttctggaagtacatataagtaatttttaaacctatttaatctttttttttttaaatatgctaattttgtatagatataattttgaatattacaactaatatttatgttaattggtcttagttgtttgactatatctcgtgcattaattatctttaacaaaatgttgaatcactctttactataaaaccagtgtctctacaccacagaactatcacagaccaaatctccttcactcactctctctgtctatctctccatgcttccctccctccctcattccctttatcccatccctcccagacttgtcatctttattgtagttcgttatcatgtcttccgaagaaagtgtttcacaaaaccacaccacactgatgagccagtcaaaacgtgttacatacttctaagacttcgtgactttatgggagtttggcatatcgttaacaagaaccaattggtaagaagtaaatggcatggtgaatgttagaaagaacggagcgattgctcatgtcctccacgtcacaaagaactgacttctacatgggttatagggtggttacagcatgattcaagggtcactacccaaaccggttttaggggaaaccagttagggtggtgtcaactgaatcatgccgaaacaatccattaacccgttcggaaacaggttctatgcggcattgtgaacatcggcaatagctccagctttttaaactcatctaagcgttttttgcttatactaactggttcatgttcacggtataatggataccaataaaatcaccaaatcttagaagtagagtggcgtgttttgatcacttcatcattgggtgttgtaaagttatgtgaagctccttctccggacgacatgacaacgaactacaataatgttgtgactgattttagaagtttatgggaaaatgtattctcacgaaaggaaaatttgttaaatcttggtgttatgctttattattcctcattggcaggtgaataattgagattaaaatagctcaaatttttctttcacataataaaaaaaaatcacatttttaaccttcaatttcaaaagaattttactaatactataaactaccaaaataattttattaatattttaaacatccaaaatagttttcctatttacatcgtcataaaagatgaccgaacagtaacggaacaattaatttatgtttgcttagtataattttttaatttaatttttaattaataattatttattccaattaataaaaatctaaaacaaaaaaaaaactttttttttatctactcaccgtctgactatgaaagttctagattaacctttaaaattagagactggagcccaagagaaatttaatgttt

SEQ ID NO: 67440 - DNA, 869 bp, Arabidopsis thaliana landsberg
atgcatcattctctcgtctataaataccattcacgtcgttcgttactcttcatctaaaaacattcatacacatacaaacacacgaaaatacatcccaattctaaaaaaattgttttttcaatttttctcctttgatttcttaaaagaagatccacaacaacaagaatgaatacattcaagatatcatatttcattatggtgctcataatggtcttagccattgctataacatttagcgagccgctaacggttgaagcaaaacatcaacacaaatatggttgggggatagccgcttctgcaaggaacaaaggtaggaaacatttaggtgcaacattgacatgtgacaaaagctccaaggtatgtcgtctcaaaggcagtccaggtcgtaattgttgtcgtaagaagtgtgtcgatttgaggaccaacaaattgaactgcggaagatgtggaaaaagctgccaatactcggaggtttgctgcaacggatattgtgtaaacccaatgtttgataggagacattgtggaggttgctttaagaagtgcaagaaagggagatcgtgcgcctatgggatgtgcagctatgcttaaagaaaaaatatgggataaaggtcactaaggaaaaataattttaatttattggttgaaattggattacattccctttatattacatacacttcggaattaaaagataatatagctagcttacataacggtctagtacttgttcttaaagatatataggtcttgtaaaagtttgtcatcactattacattgttaaatttatttatatgcacatgtcacatgtaacaatccaatgtattattattgaataaagtttgaattgattagttaccattttatttttt

SEQ ID NO: 67441 - DNA, 1224 bp, Arabidopsis thaliana landsberg
acttacaaactgatagacttattcagacagggagtagcataagagtcttattaaggagtttaaccagtgtgcctatagcgtcacagtccgaactttaaattgcagcaatgtccttcaagttgaagggactttttgtacttgtttaaaatacgcaaatatattagggtcccaaatttattattcattgaatttatcccaccaagttaagtgtcaacgccttacttgagtgctctcagaactgaatttagtcaagtttgaacaaatatgtatataccgtgtattacggaaagtcttgtattgtacatttgtactcgtacctttttctctcctatatatttttcttagttctaaatgtattatttgcttcatggatatgattgatactacaaaaaaactagttgaataataaatatgaacgcttcaaaaaatgtcaatgtctaaccttttgacaaaaaaagaatgcaagtttcgtaaacatggcacataaaggctaaagtgtgtacaacaaaaagacttggtttggttcggatagtggagttccattccatatggatacactattgaacaatatctccctaaatcagtaaatctctatatagtatatacttcgtaaaaacattataatttagttgattgtttgtaatcaacctaacaatattacgcaaaaacattatatttttaaagatatattatcataaaacgtattacgttacgtttataattaaatccttaaaaacaattagtagataaatcatttgagctttctgagttaactgatcgtgttgtcaggatcaggaagagaaaaaaaatcactaacggatgcgatcaagacgttactatactagttgcacttttagctaaaagattatttatttttactttgtctctagatattattaaacttggatatctcatggtgttattctttgcaaaatatctagatatttccccttttacttatttaaagtaattaatttccttattttgtctctggatattttggagaaatttttatctccaaatatcgatgatatataccaaatcacaaaaacatctatatatctagagctatatagctaaaaacaatttattgccaaatgatcaaatgaatttcatgtgtcccacttttgttctgcctaaatttagaaatttattgtttttttttctacgcgagcctaactcgttttactcttctgaaatctaaactcttcgaatttaattgac

SEQ ID NO: 67442 - DNA, 597 bp, Arabidopsis thaliana landsberg
tgcccggacgggaaaggagaaggcgaccaatatctttctttccttttgactacactgaaaccctatatagggcagaggtaccgcacacggaagggtgtggccactacatttatcgccggcagcagtatgggcgcgctgatcagcttttatgcattgctcaaatacccggatgtattcggcggtgccggtgttttctcgccttcttttcccatagctcccggtatattcacagaagcggaaaaatttacaccgccacccggtacgctcaattataaatgttacctgtatgcaggaaaacaggagagtgccgatatggttcccgccgcggaaaagatggctgctatcctgcagaaaaaagcaggtgtatatacgcgcctcctgatctatccgctcggcaaacacaacgaagccacctggcggcaggaattcgcatcattctattaatggttgatgaactgatcaaaaacagacctgtatgaaaataggatatctcccggtggtatttgctttcctgtcggttatctccagcgacaacgaccctgcaaacgattttcggaactgaaacatctcaccggcggacatgggttatgcagggca

SEQ ID NO: 67443 - DNA, 1671 bp, Arabidopsis thaliana landsberg
cttaaattaattgctttggaaaaggaatatattcatcatattttaactcataatgaatttaccattacttgttatcatttaaaaaattcaactggatataatgacacttgccactcacaatcccaaagccggacaagagtataggttagagctgtacctcagaagaatcaagcttctgaaggaagtaggtatagggaagcttagggcgatatcgccaccatctctttgatatccagagagctctagttccctcagtttcagatgtccttccaataacatcttcgcgaagacttttctctacctctttcatatcaaattcaaccacatacttcgccgctgaggagtttaactgttctgataatttttctcgttctaacatttccttccaggttgcaagcctttcccgccaattacctacactgtctccaatttcacctatcatagaagaatgcaatagaggattagatggtcaaaagcacaggttaccaatgatagtagatgagggatctagaagtgctgctctgaaagaaacttgattagtgagataagattaggtcgtcaaaaacaaaggtttcgcacaataaatcacttcttgttatatcttcagcatgccactactaaacaagtatcacctaacgaatgtatactgaccagagacacccagatcttggcttagtttcttctttgcctctgtctgaatcctagcatttctaccaattattttcttgagagatccctctgtggtctctagatcgtcatcccacgcattttctccaacataagaactatcgtggacaagtgttccatcaggcgcttcaatgaacctttttaatttcaagcctttaggtgttgctttcctccacatatttctcttgaacctgaaacactagaataagtcaggacattctacaaaatcaaataaacagaagttcttttagtcttcccactcttgacgctttaaatgcctcattagctgagtatttacttgttaaaggatgataccatagtttgaatatgaaccatattttaccatgtcccagtagagaaaattacaatcggaaactgaggattaggaagcacctacttttctatatttccaggagatggctcggggatcaaagcctccataaaagactctgttaactctcttctctctcgtactacccgaggagcttggatggcaacataaactctttgacaagaaagtaacagcgcaaaagcatatatgaacaaggcagcaactcgtttaccgtcccaattcctgatgtcctgatacaatacatcttccctcattaagaaacaacctaatacactagtatatgtcgctagaataagcgtagttgtagtctcctccaaaatttatgcttccgttaaatcaacaacaaaataaataaataccatacgtttgtccctcaatgttttagaacacaagcagaagtctaacaatacttgagaatcagaaatttgataattacgttaaaaagctgaaccagcttaccttccaatgctcccacttgttccaatcaataaacgaaggcactgtctcattcgtaaagcgagtcagctcgtgatggcccttgtgcacactatccttaactcgagccacatactcattcactctcccacatgcttcttccgagtcaacccaatttctgcatcacagatgctcaa

SEQ ID NO: 67444 - DNA, 2546 bp, Arabidopsis thaliana landsberg
tttttacatttataaaaactatataatatgtgtaaatatgaaatatattaaataaattttaatcaattaatctatgatcgaacccaagcaaaccaatgatccgtgactcagaagatagtccggtttaccatccgggtcgagtttaaaaacaatgaatattatataaaaaaaactttttgatccattttttatatttttctgaatttaatttaacattacattacaaaaaatgatttgagaataaatatttgatatctatatatacattttgtttttggcaaaaaaaaatcttttcctattcatttattacaattcttttaccattacatgatttgcgtatgcatttgatacatgatcaaaaaattagaattaaaatagtgaacctatttgatttctaataagtccgatcaactattaaaacattgtaagaaataaatataactttaagtatttgcaattttaaccttggatctaaagcagatagcactgtatatatcccgatactttgcaaagttcatttgcatcttctgagctattgttctcacatcaatatcatcttacttcagcaacaactcaattttttcacccttgtataaaataaacattactttaattttaaaataaattagtgctcacttaattttttgttattcgactttagttttttattggccagctttctcgtaggctggatttgagttggctttttaacccacattaacatggcaagtcagaaatattttagagacaagcaccttcaatattacggactaaaaaggtatagtagttatataaaagtaaagctgtgttaaaaaatccccaaaatttgttaaaacccctaaactaagaagcaacaagataatatcactctcatgaatcagtttctgcatagcaaatcctactaaacatactaagtaaggtagcaagcataccaaccaagattggcaatgcaacaactcggtattattcgttatctacaacttttctccagaacgacccgctcttcaacaagactcctgggatgcatccagcatggccaggtactcatttatagcttcaatttccttgtcaagattgatatcataagccgacaaagcatcgacccttgcaatctcgtctgctatttcatcttctatctcagagtcccgctcttcttccatgccgtcactggatgtgcttgctcggtttgcaatgtcatccgttgtttcatctttcatctcagagtcctgctctgccccaccgccaaaaccactgctctccgcacccacattgtttgtgctacttgttgcatttataacagaggtagtagtagttcctggatttgctactgatgcagatagtagcctttggattatatcttctcggctgccaccagcttccaaagcagaggtagctgcagtgcaaaccagagatcatcaattctctaccgtggacttttacaatatatgcaattgcagaaactatccagatgggaaatttaccttttcctcgttcaaagcccatagacacaagttcagcaactgatatgcctaccagttgttcttgccgttttcttttcctcgattcaatgtaagcctgtatcgttgaattaacttttgggtctgtgagtatatcaagcgccttctgaatatcgttctcatttctccggagggattcagcagcaagttccctcgcatatctgcacaagtaaacgctctaagtcatactaaatacataaactaatctgaaaagtttcaaattcagatatccaaatagaacatttccactagttaagcattgaaaaaacaactaaaaccaacattagttcttaagctaaagacttatatgtatacaagggggagcttgaaggctttcttacaaacatcgagaagctcatagtaggggaagacaacagtaaaactatttacagtttgttacttacccaatagagacgagcctctcaagcatctgcatatcaacagctttcttcatgggtgttactccatactttttctgctcactgaatcagagctcataaagtcactacaaagttaaagatcataactagtataattacagtagtaagaacatacagtatttcgctttgtctctgaagatcctgctcccgctgttgggcttttttcgcccgctcttcgataagacatccaacagaacttgcaatgtcgtgattgttcagtcgcaaagctcctttagcatctttctcttgaaagcccatacccataacatagcgacagcgtttcatcgggtatttgtagttacatcaacacgcacaacagcaagttatacctcggtaataattgagtatcactaagcgccaagttataccagtacagctccctgacctgcaaggatttcgcatgggcagacttcagtgcattcaaggctttatcattctgaccagtgtgatatgccaccacaccttgtagtaactctagcctcaaatatctatcaattaaaaaaatcaaaatcttttacctctataagcatatttattgggtttcctcaactgaaaaacaaaaaaaaaaacatattaaaactaactcacc

SEQ ID NO: 67445 - DNA, 377 bp, Arabidopsis thaliana landsberg
atcatgttccggatccatctaaggatcacttcctttaggccatatttatgggtggctatctttttcaaaccttctgtctttccctggtttaaaagcagacattcgtctgcaaacgaactaatgaagattgatcttgttaatatgataaaaagagagtataagatcaccgagacattcagcggcttagccattggctgacccactagaggataacaaagctttcagtgaaaattgaaggagaggcgacagaaacattttttgcagctgtttagggtaagcaacacccagatccttctacattttcctttctctcactacctataaaataatgacacttaaatatataattaaacttaataaactgttatacaagaacc

SEQ ID NO: 67446 - DNA, 558 bp, Arabidopsis thaliana landsberg
aaattctatttattctatttgagttttattttgaatctgttttactctcttagatcatatgttcgagtctattgcttttaatttatagccccgcgaagtttcatgatcaaatctcaacaactttcaacatcagaacccaagaaaaaataaatcatgttttggatcaaggaacgtttgttgattctcatatatgtctggttttccttagggattgatgcccacacggaaattaagttgtctatctaccacaaaaaaagaaagaaaggtagctaccacattaaatttctctggttacgtacaatcaatgttaaaagatttgttgtttcaatgtatctaggtctcacctatatatggattcctatacggggtttttacataccgtatatactgttttgtgagtttgaacttaatactaattgacaatatttatatattaacccacgtacgtttttatatttcatgctactgctatagagatttcatcattagcaatatgaaataccattctttaatgcttaattatgaatttatgatcaatcaaatctgtgtacttgcaat

SEQ ID NO: 67447 - DNA, 676 bp, Arabidopsis thaliana landsberg
  unsure (1)..(676): unsure at all n locations
tgatatacttaaaatcaaatattttctccatttcaaattagatgttttttagttgaagatatataaatatatctaaaaattttctaaatgactaaactatacgtcacccatatcaaattgtcaaatgttttggagttctagtttgtttcaaaatatctaattattcttccatgcatattacaaacacactatcactatttgtcgtcaagaaatgaatagagaagataaaaaataagaagaaggattgtgattaacgtacacaatttggtaagggttccaaagaagcccataagtgtggtagtgtttggttggattgaaccaaagcaaaaacctctcttctctgtttccttctccatttagaaaaagatttgtctgtaacgttatcggttttccgttgttgttccctagaaactcgaagtcaatctcgtcgtgaccacctcctttcgacgtcaactgtataattatttacacatatagacaacttatcgatacgagttttggattagtctacgaatttatgtaactaatcaagaatacaaacgtaaaaagcggtgacgatgccgccagtatttcctgaaggcactttgattctcatttcaaagagacctgatccgtangcgtccttggattcgaacccaccacctgtttcatgtagaagccaaactcttaaagatta

SEQ ID NO: 67448 - DNA, 398 bp, Arabidopsis thaliana landsberg
cttattggttccctacttgcatagtcaacttttaatatcatatgaaaaaagtttttacctcttctagtgcttatatatatgtactaagagataaagaggttgggggcttttggtccataatcccctcggactgggactagagcaagtaaaactagttttctctttccattgtttacaaaaatattagaagattgttttatttatgcatggcattattgggtatgtttttatttgattgaaaccacaactctttaagtatttattttaaacaaattacttataacataaaaatttgtaactcaatcggaagaaactttttttgccattacaagtttccaaaataatatcaagttaatgaaaatgttttatatatcccaaactaaattaaaatctaaact

SEQ ID NO: 67449 - DNA, 648 bp, Arabidopsis thaliana landsberg
ctcgccgcacacgacgcggaaggcgttgaggcggggctgcgactcctcgatccgggtaagggacagctcgaccagctcgcgcgagctgacctcgcgtgcggccagcaggcgagcctgggcgccgagcccggtgaaggcgagctccggcgcggaggcggcgtcggggaagggcgggcacgcgaagcccggccccccggcctcggtcgtcgcggtgctgtcggtcgcttgctcgaaggtcgccatcgggttcgcggaagatactagatcgttcgaacgaacgagtaatgcgggtacgatgccggacagtgcctaccccgaccaaaggacgtgaggcgccggaggcgatcgaccggcgccgcgcccccgagacgcgcgagcggatcctccgcgcgacgcttgccctgctcgccgaggaggggaccgcggcgctgtcgaaccggcggatcgcggccgaggccgacgtcgcgctcggctcgctgacctaccacttccccagccaggcctcgctgctgcgcgagagcctcctcctatatgtggggaggggaaggtcgcgcggctggaggcgatcgccgcggcgctgcgcgagcgcgacccgagcccgggggaggtcgccgccgatgtcgaggcgctgatcggccgaccgagcgg

SEQ ID NO: 67450 - DNA, 684 bp, Arabidopsis thaliana landsberg
actatcttttctctccctccttggacttttcacgtatttatttgtttcttccacctatttttccgtataagttaagtataataactcctattcattaaattattttccatttcttccaaaaccaaaagtttttacctatgatactatcaaattattgattttttttttttcattttaacattctactactaacgtgaaataaataaattacagagaaatattccccgttcttttgtcatcattatataaactcaatattcaatttcaactagattcactttattatactcttagatttttttactttacataaacctcgtatagtgtggtaaattcccactagtaatgctacatgtatgtctatattaagattattaaaaacataaatctttttaaaaagctacatatatgtgtgagagtctccattatcaacggttcattgtctgctactctgattagcattttcttaaaaaaaaagtaattagaaaaagaaaacaaacgaattaaaaaaaagaacaaaaaccctaataaatctctaaaaagtccacacacactaacacactctctctccgtctctcactaaaagcttctcacttacatttctgctttcattcattaatctctgggtttccttctttttgatctttttggcaagatctctatttttcttccaaaaaaggaaaa

SEQ ID NO: 67451 - DNA, 760 bp, Arabidopsis thaliana landsberg
tttgaatttaacgtgcagtttactgataacattgagtgttttcataaggatagctcagataagaaacagtttaattatcaaatttaagcgaaactaagattgtatattttctggcgggaaacatagaaaccattgcgattccactaaagttcactaaaataaaattaaaaaaaaaagagacttacttaagagtttgtttcttatagcttaaacaaacaaatattttgatgagctgatggtgggatttcaaatcgaaattccgcccgaggcccatgccattataatgtgacacatgctatatacatggactacaattaaatattggaaagtggaggacgattaatatctacatataagactaggcaatagcaatactatagtttctagaatttgatttcaatgtttttttttttccttcgataactttattaatcatcatggtttacatcattgtttataagaggacatgagaaatgtaggacatgaatgatacaatgcataattgagagggcttgagacagccattttagctaacggatctgcacacgaattttgctcccgatgccgaaatgtacttcacctgtgtaaatgttttattgatgattaaagatcacaataaatcaaaattttcatattaaactgatataatctatttgtattaaaatgatttttggtagtattcctaaaattgtcatatggaaaccaaagattgaaacgaatcaaacctcgttataattataccgacatttgttacatgcac

SEQ ID NO: 67452 - DNA, 137 bp, Arabidopsis thaliana landsberg
gtgattccccgtaatcgtatatatatctatatatatatctccatctgtttcctatttcctacctatcctttcatcatatgtatatgtataaatataaaatttggacgaggttgccttgcatccatccacagtcccga

SEQ ID NO: 67453 - DNA, 579 bp, Arabidopsis thaliana landsberg
ccctatttatatactattaaatacactatggatattgaccgtttagtttttcaactaaatacactattttttgctgttctgaatttcatatagatgataaaaagaaattgtaaaccaagacgatttttttttttgtttttgttttcctaaccgctgatttatatacaattcatatgtatatagtgggaattttacaattataacaattatttttgttgttgttaatagagatactgcggaataccctccattgatgaaatcaagcaagctaagcaactctctcaagtacttaacccaagcctatctcgggtaatgtttttttttttttacatttccatagtatacaaactgacattgtcatattggatatcataaattattgaaaatctattgatcagactttaaaatgttccatgataatttaaaaaatattcaacttgaaaacaaaatagttcatctactaaaccatgcatatacttttcaaaaaaagaaaacaaatcttgtgtgatattcggacgcaacaactataagctagtaaagaaggtatcccgatttttgacatgatttaaaattttttaa

SEQ ID NO: 67454 - DNA, 557 bp, Arabidopsis thaliana landsberg
  unsure (1)..(557): unsure at all n locations
tgctattacgggccttatttttattgtgctcgaaggcagcctcgatttcaaattgacccggagcaagcttccgctggtgggaaaatcaattttgtcggcccttttggttttgctggccaccgtaagcatcatcagctatatttttatcgagttcctgtcgctgcctgtacgcaatgccgtggtgtatgccgttccgctgggggtcatcagcagttccattgccattcccagtgtcaccaagctctccgaggcgcaaagggagttcattatctacgaaagtactttttccgacatcctcggcatcatggcctttaattacgtggagctggagaatgtgctgagcggtgctgccgtgctgggctttttcatcgatctattcatgatcattggggtatcgttcctgagcacggcctttttgctggtggtgctgaattataccacttcacatgtcaagttttacctcatttttgcagtgctcatcctggtgtactcgctcagcanaatgtttcacctgccctcgctgctgctcatcctggtattcgggcttatgctcaaca

SEQ ID NO: 67455 - DNA, 378 bp, Arabidopsis thaliana landsberg
  unsure (1)..(378): unsure at all n locations
aatgctgtggttcacaaaatgattcccaatgaatcgactatatatagacttctccaaatggaagtcagtctacttaataacaaatctattcaacttccataatatcatttttcttgaagctataattatgttccattgcatatatagagagttttgatccatcgtgattcgttaaacgttctattatatcctaaaaaacgatatggcaatagctaaaanccgaacttataaaacgcggtttcaatcggtccatagaagttaaagggtaccggtgtgaacgaagtaagtttatggaggtgaatattattttgtcggttctgaaattgaatacagtaaaatattaattttagcaatcctaagagtagcaggcgatcgctc

SEQ ID NO: 67456 - DNA, 192 bp, Arabidopsis thaliana landsberg
tgactgaggtttgttaactgttggtgttatcattattaaggatcttacgtggtgactgtttggtatccctccccaggtcccataatagtacgtgcgagatattaaacgcatgcctgaggcatgggtggcctatatggagctaaaatgtatctctgttgatggctagctttttcttgtctcagtgcctctcgt

SEQ ID NO: 67457 - DNA, 1831 bp, Arabidopsis thaliana landsberg
cattgagacttatgtatcaacatcatctcaaggcatctacttccaatagcttaggaactcctttcaacctcaaggcgtacattcttccacttaactgaaactagggacactgataagccaaccccctaatctacactgaggtattctaggggtgtgcatccatacattcatgataaatcactcatatttctgcaactctatcttttcatcctaattcatacaccaaggtctactttcaatagttttcattacagcttacagtcattcaatgtgttgcccagtatgagaaaaggaacattactgataggtaggtggcaagtgcataaaagactttgaagtcgaactgaattctttttttcgagttctcacgacagtcaaagaaaattttagtcatcaagttctagttctttaacactcgttaaaacgtccatgtcacaaacagctcgtgcttagtttccagttgtggcattgaaagtaattgtgtgcaagcttaagatatctttcatttctattttggtacctaagatgtggcattgttttctctggatctcttcaatgcatactgatctcagatgccgagacctatggcatggaatggaatctccatcctctcatgagaatagatatgttaccatatgttcacatgtttcttggatactacacagatgttggtataaatggtttatactaagtcctataaattatttttcactacttgcgatttttgaagtctaattttttttggcaagactcaagaaacatgtgaaagtagaccaatttcacattgccatttctagagaaagttataaacgattctttcagaaatatcaagcaattacactagacatatattctttgaaagacataccaggcaaagaggctttttaatctgaatattagaaacgcgatagttcccaccggctactattaaaatggtatcgccgggtctagaggtgacaatttggttagatttatggacccttttacgaataacaaagaagtgtaaataacgtaactgataatattacaaaccttgctgcagatacagctgactcaatgttgaggaaaactccaggctgagataaatccttgacaaaacggtcaacacggagccacaagcgagggtgacacgccagatatctccatctgtggcaaacgagtgctgtgttatacctatctgcaaactcacaagagatacacaaaacagcattgaaacagactgtagtacgcaacaaatgcccaagtcaatcatacaaacaaaatacgaaattttcaaagcttcacacaacaccatacagatcaaaacatagcaattcaatacaaagtcaaaagctttcttgctgattctgttacattactacaaagctgtatcacatacaccccaagtcaagagaaacagataattcatcatggagattagaattgaattcaattatgatttgattaggatctgcaaagtctcaaagtagtaaatttgagacacagaaccgtaattaagatgtgaaacagttggtcaaattttctaaatgaattacaaacaacgaaacaattaaaagcagaattgaacaaagaagtataaaagtatgagaaaaccaaagtaatagatgcgaaaaagaaaccaattttacctggaattggagataggaagctgaggatatgcataaggcaaccatcgtcgagattgttaagagacgtgagagaataaggtttcattctcttcttcatcttcgattcaacaattctctctggatgcttcttattggccgagctttgagatctcatgtaactccatggccgctttagtaagtatgcccccggaggggtcgccgtc

SEQ ID NO: 67458 - DNA, 379 bp, Arabidopsis thaliana landsberg
aaactctatcggcaagctaatactttttgtattttcgggattttattttaaatactaagatttttgcctcattttatcaaacacttgaaacccacactatatatgtacgtgaatgagcaagcagaagttcttgcctcctcactctctaacttgaatattttattcttaattctcttcttcctctctacacacccaaatctccctctccctcactctctttatgtgtaaaatataatatgtgtgtgtaagtagctacatatacgtggccatggagattatttggagtttgatgatgcaagagagaaagtaatgggtgagtaacacttgatggagaagcagggcacgtgcgaacacaaatgaaatcgatcggtacttgttg

SEQ ID NO: 67459 - DNA, 533 bp, Arabidopsis thaliana landsberg
tgatgtattagctctgcatatatattcaaattttatgtttatatcaaatttaagaatcgtttttttttttttctagacaatcgtttttctttggtaaaatgcaaaacataattctttcttttcaaatatgagatgtttaaacatacgtgattttatgtatttaacatgaactgcatgttaacgtttggagaagaaggacgatgaagaagtaatgattatttgttgttacactaatcatttgtagatgaaaatcattatcaaacagaattcaaagaggacatattcgtgtcaactttcttctgctcatctatcaatacatgcttacaacgttagctcgaaacggcgtctgtcatccacatgcggagctatctctgagttttcatttatttatcttttacttattaatagatttttgttttgtttctctcagaaaatattactaattgttaaaagatgattattttggagaactagcaaacggacctgccatgattttttgtggaccatgttttgagctgaaattacggaaactt

SEQ ID NO: 67460 - DNA, 1088 bp, Arabidopsis thaliana landsberg
tctcatgatctgttctacaacttgtttcagagtgcaacgccatcaaaacgaccgtcgggtaggcaagcaaatgagagcccttcatctcttctgaagaaacgaaagcagctgtcaatggatgattatgtgagctcggtactcaaaatcatttccaaaacataaaaagagtttttcattttactggttaattcatgcaaagcagacagaccatctatttctgatcctaactaaaaaaaaactttatgtctctgcagggaaagcgtaggaaataagaaggcttgtgttgaatccatcactaagtaatcagaaagatttatgatcacttctaggtttgattccgaatcggagaattagttagaaaaagctccttagagacaaggatctaatattttgtacccgcaagcatcactgcattgtctccgacttctcttatttcttcaacgtgtattttactctattttgtttgtagaaatattcaccacattcctagtagtgcgtttttagtaaatctcaaatcaacttttgtggtcggatttgaacaaaacataactctctcgtctcttctcatgttgtcacaacttcccaattgagtgtgacaagtgtagatttgtagatgataagagaagtctttcaaagatagattttttttcttcttttccttctgtctgtagactcgaaacctgaatccatacacaatgagacattaaatagtacagaaaaattataaaaatcgactcgaatcctccctcccatattacatatacaacccattgaacaagaagaaaaaaaaaaaaaaaaaaaaaaaaaacccccaaaaacatcacctgaaaataaactttttcttcccctcctaatcgtccccaactactcatcattcttcttgaactctcttcctcatatgttcttcagcttcaaccacaatattgaagagtcctctttctcgactcagacatcaaattcgacaactgaccgacccgactcgacaaaatgttcgcatgaacccaaagcctctctccctttgccttttggcacaatgacaaaagaaaactatttttcaaacaagctttcatctttcccatttcggtcat

SEQ ID NO: 67461 - DNA, 363 bp, Arabidopsis thaliana landsberg
agccctgactaacaaatgtgactgtccaccaaccatttttactgtgcaacaaaaagaatgacacccctagggttggggtatattcttattcaaacaagacgacccccaaagtcaaaattctaactactcacaaaccaacgcatatccccacgctaattctaaagattcaaccctaacaagtgtatccaaagacctacacccgtaaccatacaccttagcagagagggttgtgcacaaatctgtctctacacttagtattatcactatccaccattacaaacgtatagaaaactcaaccaacctgcctaagaaagcaatttgaccaacttataacaactaacctcaatagaagaacctccgcac

SEQ ID NO: 67462 - DNA, 568 bp, Arabidopsis thaliana landsberg
  unsure (1)..(568): unsure at all n locations
gcttcgaggagttacccaagagacactagctagaagctctcattacatcgacattgcaacgnnnnccattaattaataagtttctacaattacataaatatttcaatgccgttgaattattagattttccgcttcacaatgacgctcaagaaaataaatgtcgtcaatgaaacatgtatgaacttgataataattacttatagtattaaagaaaaattaatgttggaattcatatttaggatattctattgcagtttcttaatctttaatgtgaaaacgtaaaatctcgatcgagttttcgcatcttatatttgataataatttgccgaacgctctttactaatgggctacacaatatattagttgttaaagtgtttgttaatgggttcaatatttgatgggccaaatctgtctagttcttatggtaattgcagtttgaatatttgtttgatcatttgaaacggngttcgatccactaaaattatgatccatcaggcacataataggccgatataccagttttaccttcagatacaaaatttttggtccactgcttggttagttcttg

SEQ ID NO: 67463 - DNA, 546 bp, Arabidopsis thaliana landsberg
caaacacatacactttgtgtatatattgaggcacattctctctttttttaatatattgatgaattgcgggacgggatgatttgctagaaataattccacaagaaattgttttttctttgtatgtgtgtgtgtgactgtgtgggtgtgtttattgatatactcacatatgataatctaaactattaggtatgaaaagatgattaaagttcaaaagttccaagatatctgcaccttaatcataatttaaaataaaactagtttaattaagaaattgatattcccacaaatcacagattagctacaattgtttgccacttgacatcacctgagaagatgacttgtctttttggttatggatggacccaattctgattaaaaacaaagacaaacaatacacgtcattgaatggaaatttaccaacacaactttcttcatatttatcatttaatataaatgactaaagagaggacatatcttttgatgattggcgtcgttttttgatgatagatacacatgcattatttttactgactttctttataaaaa

SEQ ID NO: 67464 - DNA, 282 bp, Arabidopsis thaliana landsberg
accaatccttcacttctttcccctatgtccttccccattgtcatccgcctcatggaatcacttcccgcttctttcttccggcagctacgatgcgatctgagtttcaacttgaggaggcttctagacctttcagatgatcctctatggactgatgggtggctttatcttagggtgcaaaaccaactcgcatttgcgtttaatggttagttccgagaatctttagatctatgagtggccatatttttctcttgagaccctgcagtattcttcctctatatcaat

SEQ ID NO: 67465 - DNA, 524 bp, Arabidopsis thaliana landsberg
  unsure (1)..(524): unsure at all n locations
attctcactaagcttttccttttcagaattgattttcctgatgctggagaggaggttggattcaaaggtttcaatgaaggaaaacacttagctttttcacgtatgtggtcaaagactgtatgttcattgataatgacacagtcatcttcttccattgtcacatagggctctttctctgcaaagaattttgggtttagaaaaatggtgaatggaatacaaaggacataaaagaaaaagcttgtgacagatttaaatttttattgagcatctataaccttcttctgaatcatcatcgatgagcttgaaactaggcctgaagaaggaaattgagcagttaaaagaaagttgtaatcatgagacattttctgagtaagaaagtatttaaaatgaactcacatatcatcttttttatcctttcggtttgaaggtccagatgtnnnnnnnnnnnnnnnnnnnnnnnnnnnnnnnnttgccataggaggataatactgaggcatcctgttttcgcttttgtaatttacttt

SEQ ID NO: 67466 - DNA, 339 bp, Arabidopsis thaliana landsberg
gtggaagactatgtgaaagataccagcgtgcacatcgactttgatgtaatttgcccatcacctgctggtattggataaaatggcgcgtaaaaacggcctccggatcaacaaggtaattttacagattgaactgaaagatgaattgtacgccacaccacatggaaagctcctgaagcaaaaaggaatttatcttgttcagaaactggaccacctggccaatatttcgcacgatgaccattaccatgtggattttaaggtatgtagcagcacggattgaaacccacgctaacttttaagtatttatttagaatcaggtccattacgctccggctgccgact

SEQ ID NO: 67467 - DNA, 534 bp, Arabidopsis thaliana landsberg
  unsure (1)..(534): unsure at all n locations
cgaagtggtggggctttactcaatcaagtagcacttccattctaggagatttgcgtagttagagaggtgggcgggagccaacccattaacctggacgatgagatatctctgcttcaaaggtttgtctctgtctgtgcagcctgtttaggttgcttgttgaccgccgaaagccaatagccaatgcaaatatcatcctgcggatgattaaattttattgctctgctcgaatgtgcagagaatagcagctaacacccatgactttgttagtccacaacaacggaaacagaccaatcctggccctgctgctgaacccatacattttatggactgatcccnnnnnnnnnnnnnnnnnnntccccatggggatgcttgataggaagcggtgacctgttttgagcggccaactccgctgagatatatcgacgcgacatcatgacgcggtctcaggcactcgaatttggcggtgttcaggttactacccttttcagcagttgtcaacgctaaccgacgtcaccgtattaacgtcaaggattc

SEQ ID NO: 67468 - DNA, 415 bp, Arabidopsis thaliana landsberg
  unsure (1)..(415): unsure at all n locations
tcccggaccgagccgaccacgtttgtttgtggtaaaaaaaaaagagccccgcccaacgccgcggcgcanncagccgggcacgccgacgagcaccggggcgccgtccggcagcctgcgccaccgggcgggcgccgcgaaacggacgaaaccgcgggaggcgaaggcccttgcgagcagcacccggccggcgccgaggaaggcgaccacggcgctgccggcctgctcgacaagcggccaggacgacgcggcggcgcccacgccgaacgagaccagccggggcgcgagggacagggaggcgagcgaggtcgcggcgaagccggccggcccgggggcggcgcgcacggtgacgacgaccacccccgcgggggggttgcggcaaacctggaaccaccgcccgggggcgacgcccgctgcc

SEQ ID NO: 67469 - DNA, 2504 bp, Arabidopsis thaliana landsberg
ttctcggaatctcaatgcatagagatattgttcctcgagcattctcctgcaattaccctaaccgagccgcaaagcttctcaaggcattgaatggaaacttccggaaccatccttgtctgaataaccaggtaaaaatgtgaaaaacatcttaagctgtttgcttcagatcgttgtttcttggcttactctgtttggcttattctgcagaatgtattgtattctccaatggggaagcttctaattctgcaaccatccgagagattctctcccccacaccccctgcttcctcccggaagtggtctctatctcttagcatctaagaataccgatgaaacagagaaaagtctaagggctgcaaagattctcttctttaactcaccacaccccctagagattctcagtgatcgtcgttcttacgggtcggaaggaaaaatcaaaagaaaccatgacatgagctcttacctgaaggccttgaggcatgtgatccggaaggagctgaagcagatgaaagctgagcgggatcaatggctgcgcaagttctttattataaacattttatttagtgggagagattctttgaaactcataacaagattcgtggcatcaaggagtagtcaactagtgatcatcttctttctcccaattagattgttaataatgagtgtctacagtgtggtctttcaccattcacaagcacattttagtttcttcaagtgaagcagcttaggcctattctgtaatagaatctatcaaacatggattatttttagagaaagacaggaagtatcttcgtacaagagtgcttggtaacaatttctttcatgatttcactgaaatatgtttggagtctgacacaatcttactaagggattggcgaggaaatgcaagagatttattcattaagggggcgtaaaaggtcagacctttgtgacaagatgagtattgaggaggaaactagagattcaacttcccagctagataccaagaatgcatagcaaggcttccaaatgaaaagatgttagcaagggatgataacccgtgaatcattccaaacttcttgttcatagcagctagctttgggatactctttgccttttctctgttcttggaccaaccaacttcatctccaatgttgttttccctctctactttgtgcctttgtttcatcatctacatacaccaaagcaaaggccattgactggttcattaggatcttgtatgcatttttctatgcaattggaggggaatagccacttacatcgatggtcatgggagtgaagacaaacaaattggtgagattgaaagcaaaagcggataggagaaaccctatctgatatttctcgaccgtagaagatgacttccatggatgcaaataaccaaaagcagagagtgaaattgcgcagcaagaaccaaccaaagtgaagtaagctggaaacaacttgctctgaagattaccaaactgatgcctcggtaaattcctgatcagtcaatacaagagagaaaaataaatcacacagaatccaaattgattggatagagatagagatgcgtacttgaacatgatgattcctccgatgaaggtagcccagagagcagctccccaagctgtagcgaaactgagtagatgagctagcttcaggaatatcgaaatcttcgccgaattctctccattcgtcaacgatccgaatgtctccggcgagaatataactccgacggctaaggacgccaccactactaagaaactggtataccaacccattgccgatgattatttttcccgatcactctttctcgaattttgaagctgagatcagaagaagcgacacgttttctaaacgtcgaattgagtttcggtaggtagttgctattggcattgactaaagtaccccttgacttgtataactatatgtcgcacatattcaatttgcttctttttcttttttggggccaaagacaaaaggcctattataggtgttcggtccattatccacaatcgaaattgtcgttttttctgccagcaacaatattacaagttaaccagctagaattgattctttttgtcgaccaagattgtcataatatgaaaagcccattaaagggttgtacaagtgatgaaaagttcagcccaacgccataagtttacaaagacataaggttaagaaaatttggtagagaaaaaacctctttactactaactcatcattataattgcttttataaaaccaaagtttgataatcaggaggttcaaagtcaaaacttgtaatctccaagatggtggataagagtggattttaattttctccaaaaaagaaattgaatcatattgtttgtttttgcctttatgaccactattccaattttttttcttttttttttgtaatccactaaaattgcaaaccactctaatagtatcacagtaaatgtcttgtcttactggtagtggtatagtagtagtattagatattcgatttggctaaaaagaatagtcattattctaaacatc

SEQ ID NO: 67470 - DNA, 464 bp, Arabidopsis thaliana landsberg
aacaacgggtacgaacgaaaccagtactactaccagcccacagaagccagaccagagcggacccacgacgaacactatgcaaccaacaagaaaacacaccgaaacactagaatgaggacaagccacccataaaaaaaacttagatgcccgagaatcatcgggctccaaggagaagtagagatgggcttctcgacttgccaggaaaaaagttaacgacgcctacggcgtgacgggttgtcaaaacatgccttggctaccgagaattgataaagacgaggaggtagagaaaccaagagaaagaaaacatcaatccagctgcgaaagctgcaaactaaaaaaaacacgagccacgaacgtacaagaaatgataaggaacgatcatctaagccgcacggcttcaatgtcgattaacgtagatccccgaaatgttaatcagcctagccagaaacggccaaacacctttt

SEQ ID NO: 67471 - DNA, 665 bp, Arabidopsis thaliana landsberg
  unsure (1)..(665): unsure at all n locations
ttatttaaaaaaaacacataaacggagagactcaaatanaatattccnactaangaggaaaagagtggtgtgttttaaaagcatgggctacctcaaggatcttgttgctaagagcctccatcattggaaatgttggtctggctatcagcagccaccgggctacccactctgttgcctcagaacaaaaaaccttcaacaatatgacacaaccgatccagtcgggttccaacaagtacctatctcctctacatacgctccgcattattgctttcgcacacctctcggctgattctactggcaatacgctcatttgcacctgattcatatatattcattctcttaattttacatagcaactagttgttcatggtaactacaaccgatgaaatttgaatcccagcgtaaatgtaaaaaaaaattgggtcctcaatcgaacaaaaatgagtgactatagctggatttcatcaaaaagttaccattgacgctggcaatatcttactagtaaatttaatttaagttaattaatctaacatgaacttatcattcattatatttatcttatattactccaaataaccattagttatagccatattttcttaaccattcaagaacaataaagattcccgggatgcttacatctctgagctctttatcgacgacaa

SEQ ID NO: 67472 - DNA, 544 bp, Arabidopsis thaliana landsberg
  unsure (1)..(544): unsure at all n locations
ccccacgggctttaattgagtgtctatcatctcaatancnaacaaacatananttaacncanncncaaaggncnncgttgtttttttttatataaacatttcccctattctannctttcgnnnatgcaatgactcagacacttccttcctttccttctccctctgctcttcaacctctttacactccttcaaagcctcgatcttcgccacttcaaccaatacatgttcttcattcgcaacatcaacttctaacttgagactctcaagcaacttcaaattctcctccattctagactccaactccattacttctttctccgccacaactttctctctcgaaacatacactacatcaagcttcagcttactcaattcttgcttcatatcttctaactctctcataatcctaacataaccaccattcccatctatccttgactcattcatcacagcttcaatatcgattctccgagactttaaccttctattccactcctctatccgtaaagtaagctcctttactatcttcttcaccttacacaat

SEQ ID NO: 67473 - DNA, 2254 bp, Arabidopsis thaliana landsberg
  unsure (1)..(2254): unsure at all n locations
actcagtgttagaggcgcaagctagtggtcattttatttgtcgctgtagaggtgtctttatttctggggaaactgtcaaggtgtatagtgttgatataagaaaccctttatacttttctttgcttccacaaagaggatggctaccaatgcatgtaagttaggaaatttaacctagattcacatcacctaggcacacaaaattttcgttctgtatcttctattctcccttgggaaattaaacattcactattgaatttggcaggaagctgtccttatatctcaccccaatggtgtccctgcgaagacaattggactaagaagttctgccactggaaggtcttgttctttctgctgagatgacacaattgtagaattaatttttctttatttaattggtctcacacagttgaatttatgcaagcaggattgctcaagtaatactggagcaaaactatgatgaacagcagatagttttgtcgaagatcatcagagtttacgctccgttctggttttcgattgcgaggtgtccctcacttacactcagacttttagatctgtcagggaagaagcaaacaagaaaagttggtcttccctttcgaagtaaaaagaatgatgaagtagtcctagatgaggtaaccgaagaagaaatatatgaaggtcatacaattgcttctactttgaatttcaaacttctgggcctgtcagtgtctatatctcagtttggcaatcagcaacatggtcctgtcaaagatctttctgctctgggtgacatggtcagtaatattttattgcatttgatcgatagactagtattctcaaatattgagcttaattaacctttgagtttgtgttaataggatggatctttggatgtggatgcgtatgatcccgatggaaattgcatgcggctatttttatctacaaaaccttgtgcttaccagtcggttcctacaaaggtaacaagcattttgtcttctactttttctttgttattacgtactgactcgaatttattttcagatcatatctgttcgaccattcatgactttcaccaacaggatcggtgaagacatatatattaaactgaacagtgcagatgaaccaaaagtactccatgcttatgattcaagggtctcctttgttttccagccaagtgggagagatgaactccaggtgagctgtctaatttgcagagtctacaccactttctatttcttcataaatttgctttagtcactttgttgaaaaagggagagacacaaaaacaaaagaatggttaaaaatgttgttgaaggtgtccactggaagcatgtagnnnnnnnnnnnnnnnnnntaaaaccagtgagacttctaggagcagtaaattagagtttcactgcaaggcgattatgttctgtattgttaaatggtttacatatgcatacttcccttacctaccacatatgtttacattgtgagaggtaagagcatctctttttatattaatgatgtatcatcttcttattacattgcctaatttcaggtccggttaagagaaacagagtggtcatttcccgttcaagttacccgagaggacacaattgttcttgtattaaagagtaaaaatggtgcacggagatatgtgaaagcagagatacggggatttgaagagggatcacgttttatagttgtatttcgactaggaccaagcaacggtcctatgaggtatcttctctacaagcgacagacatccatgcttgtgaaacaatcactaatttcctcttctttttttgtgaaaacttttcaaaccagggttgaaaatagatcaactgtcaaaagcatcagtgttcggcaatctggttttggtgaagattcgtgggttttgttggaacctcttacaacagaaaattttgcatgggaagatccttatggtcaaaagttcttggatgctaaggttgaaagtgatcaccgctctggggtattcaaagtagacatggaaaaaggtgctgtggattctgaattgtgtagggagttagaagtgaactttgatgttcaagaaattggtgacatcaagattgctagattcaccgatgatgacagtacttcacagagttctaacgaaatcatatctttgacatcgattggaaatcatggatattctactcctcagacacctacagaacacaagaccaccactctggaggtcataaataaaatgggactagtggggatctctcttgtagatcacatgcctaaagagttatcatatatttct

SEQ ID NO: 67474 - DNA, 547 bp, Arabidopsis thaliana landsberg
agatgacacagagaaatgaaaactcctaaattttttctgtaacagcaccttctcatcgtctgctgggacaggtgatgacgcctttcctgatgcatctgactcagaatccttgtcctttcttaagctacctttaggaggctttgtagatattacaattttgtacttgacatcttctggtgaaggaaactcttttaaaccaccagcctctggaaaatacaccatatccatgaatatctctttcatcatctgcaacaatatataaaaggaaaagtagaactttttcaatattttcaagactttctgaaactagcacaacaatgtttgcttattgagatcaagaaagcacctcagctgctttggcttgaagatctggagtcaaatgatcttccaaagttaagatcacagggtatgcagatgcataaaaggcatgttcttttatagacctcaagcatttgactagttcaactggaggtgtccatgccctacaagcagtaaacatactctcttttttttggtaaaaactgctcgacctatagattttggaata

SEQ ID NO: 67475 - DNA, 1674 bp, Arabidopsis thaliana landsberg
ttgttcggggatgaacttgttcggcatgtgatcagtttcctttacagttgttaactcagacccactggcccagagaaacatagcgtggctgggagttctgactccaggccaaacgccaccatttgcttcaagcactgccatgtcgcgtttcttactctcaatagcttctttttgaagctgcttgtatgtttttggctctcgtccctttaatggaacccacggtggaattcccttctggagtttgtgtaggaaagccgttgccgctgcaccaagcctcactgaacaagaaagaaacgagccaataaaaccaacaatgaagtcatatatataggaggcaaaattgtaattcttcaatgatcagattcatccgagatttcaaattatcccatagacagaccttcccaagttgcaattgcaggttccaaaccgtaaaccatgtgaataggcgcccattcatccatgtcctcgccccaaatgaaagtatctctgtcaattattccagctccataagccgtcttaagggttataatctcacaagggcctctagaacggccaagtcggtctttataccaccaaccaccagtcttcattatgactacaattttaaatcataggagaacaaacaaaaggttatgatccaacacaaaggaacccacaaaaaagcataccactttcatcatattcctgcaattcaacaacaggcacaagcttggaccttcatgcagaacataaacaagataaaatgtggaaccatataaactcgcgcatagacaagaaactatgactatacaatttaacaacattaagaacaacaagagcttggaatccagagcctctcactgaatcatgatagccacctactaactcataaacacagaatatggatcaaatcccacaaacacagaaacaacatcaatatgaagcaacccggtaatgtcttaacgatccagaaacacttgaatatgctcccttaacgattcagaaacatcatgacatgggagagtcaaaatcatttcaccaagatatcacactatggttaagcaaacgaaggcacttacagtcataatagcgcttctcgagccgtttgtaaccaatagcctgagccacatcaatgggtcgaccaggcgggtaaggacgttgacggaaaccccagaggccgaagagaaactgtttcatgaaatcccaaaacttatcatcactctcttcctttgatttgatcgccttcctaggcatgggcctcccgtcaaagcccgggacatgaggaatggctctccagtaatccttgtcttctttccgataaggcgtgtcgttatcctcgagctccatcttgttcatatcgtcggcaatctcctcggcgcgagtcataaactgaaccacaggactcgctcgaaaactctcccaccatttctgctcagcttcaatctcttctgtgctcggattctccttcttctcgaaaactggatcttcgttgagaagcttatccacttctggagtgtgcctgtaatccggtatgttctcacactcccataagaactgctctgctatttgcttgtacggtcctggttcgtccgttcctgctgtttctggtcttggggacttctttgagaattttggaagtccaatccaagcgaaattcggagactgcgacttgggaaagaaggaatcagccagcga

SEQ ID NO: 67476 - DNA, 626 bp, Arabidopsis thaliana landsberg
cgtgttggccatgcgcggtgaagtccgccgggatgttcaccagccgacggtagaacatgaattcttaatttttctgcacgcccgagagcaccgactcgaccggatacggcaccagcaccttgtccgccagcgtcttgccgaacggcggcgcaccatggccgtcgcccggcgcgtattgccacaggccgttgaggttcatccactgcggatgcgccagcgacgggcgcgccagttgcgggcgcggatagtcgggcaaggcattggttggcgagacctcggccgtccacggcgtggccaatggcgccaccttgcccgaccaggtggtcgcctggtcgggcgctgccatcgcctgcatggcaaagcccatggtcatggccagacccaggcaggtgcccaggcgtcgtacggcgatgttgccggtcatccgcgctctcctcgtggttccgctcgatgcggctttgcgcattgtcgttccgacagggtggacaattgtccgacaaatgtccagcatggcgatgtcctcgaccggcgatccagacgtatggacgtcgaattcccgccctgcccgcggcaacggacccgcacgaaaaggacaaccgtgatgactggcttgcgaaaattgccat

SEQ ID NO: 67477 - DNA, 148 bp, Arabidopsis thaliana landsberg
attttaacgagattttaaattttaactttatgagagatcatttttgtttgggttacaaactttatgagagttcatataaaggatgtttactagagatgcatgtagtgtaaatgaaatactgtagattacttactcttggtaatggtta

SEQ ID NO: 67478 - DNA, 494 bp, Arabidopsis thaliana landsberg
aagccggtcaataatactctaaaacattgttttaattggttggattatttgctcttgggctagcctttcttagggataaggggattttttttttctaacattggtgtttcatagatgaaaccaagttcttaccctaaaggtaaaaataatgaatcttcacacagagagaagaaacaaagtgttgtgactcaactatggacaggtaacggagaatgtcccaaaaacagtattccgatcagaagaacgagaagaaaagaaattttgcgaaccgaatatatgcaaagatatgacaaaaagaattcaaacataataaatcatcctaaagcatcaactagtaactccatacatgaggtgcatacataatgattcaataagatttagaaaagtcatgattgtcggacttattgatatgtgtttgagtgtgtatagtacgcccaaattcaagcgacaggaaagtttcatggagcccatgcggatataaatgtttggaaacc

SEQ ID NO: 67479 - DNA, 409 bp, Arabidopsis thaliana landsberg
gaatttgaatcccagttttgggtagtgatgatttgatgatgatattgaaatatgattgagaacctctattattaaaccaaaacgtttatcaaagaaaaaaaaaaactttagaaatactaataagaagagaagagtggccccaaatctgaacacatctgagtggtatgtaatgttgcttttaagagcagcttgaccttcgctgacaaactatcttatttttttacagtacattttatttttcaaaacctaagagttgttttaatgtcatcatcctctgtgtttattacgtaggcttcactaagaagaaaaggacctctccctatctcctacgtattttgattccctctgtcttcttggttattcacttctcaaaatttatctggcttcttgtttctttttaagctttagc

SEQ ID NO: 67480 - DNA, 309 bp, Arabidopsis thaliana landsberg
aggttaaacctttttcggattttgggtttgggccctttttggtaattttaggtaaccatggaggccaaggggattttggtcttttttggagggacccaatttttttaagaaggaaggttaaattaatgtgggggcccaaatattataccacattttggtagggttatattaggatttaaaatggaccaaaatattttttgattaccatattggaggcctaattacaggagaaggtccctaaggaaaggattggccttggaaaatctggaatgagaaaaacaaaatggttggaataatgggtttggggga

SEQ ID NO: 67481 - DNA, 1012 bp, Arabidopsis thaliana landsberg
tgggagtcccagctctctatctctataacatctcttttctctcttcctcttctttgcttccgccactggcattggtttgtaatgtcttcaattttcatggagtttgtatctcatttgaattgaatctttatgattcgccttcttgcagcaatcaggtactagaaaggacaaccttttgcggtgtgccttgcaacgagtcttcaacttctgctggtaaagattgatgcataaaacagaatgtttggctcaaaaattcgagaagagtaactttcttgttctcttcctagctactactgaatagacaaacaacgaagatgaagagtcaacagtggcggctccggcttagaaacctaaacccgcagcgaaagcggctgcagtggcgaaaccgctgagacaaatgatggaagaagacgtgattcctcctttacaagccattcttgaatctcaagatgatatctctgacatagatttatctttccaagacgataaggtttcttgcttctaacttctaatgctttgttgccatgcttatggggccatctctctaccctatatggctccagttttattggatgttctcaaaatgtcttcttgattataacttctaagacaattatcattatttgtgtcagttggaaggttttttcttaaagaaaagtattccatattccttttgggcctttttccctactggaaaccttacaggtgaagtattgaatcttttacttgagactcttgttacagaaaatttcaatggaacattatgtcttttggtttgttgcttaaaacaggagcaaaaggattttcaatttcctcgcacgggtcaggtccgagcaccgtggaaccatttcttgtcgacgagaggaaaccaactgcgaaccacgttgtgttttgggtcgagaagcgtcttgctgcacaagggatcatccccgtttggaaccaatgaggtttttgttaacttgtaattattacatttgtatacccaaattgaagaaaactataaatcctgtca

SEQ ID NO: 67482 - DNA, 203 bp, Arabidopsis thaliana landsberg
cttcctatctctagtttcttctgattccaccatgattggaaaaatcgactggtgttgaggggtttgcttatatttttcttttaagaagataattaaaacagttttagacctttttcttttttaagaagaaaatggtgcaaacacactcgttcatcgatttctttatttctaaccacacagagagaacacaacccgcggatctg

SEQ ID NO: 67483 - DNA, 508 bp, Arabidopsis thaliana landsberg
ctaatggcatttgattgctaaatgtgcagacacgtcggtgtttgtttcgggtgcaatcttgattgtggtattggcatttcagcggtttggcaccgataaagctggattctcattcgccccgatcatcctcgtatggatcacattactgatcggaattggtctctttaatctgttcaagcatgacattaccgtcttaaaggcacttaatccactctatatcatttactactttagaagaactggtagacagggttggatttccctcggaggtgttttcctctgcatcactggtgagaggccacatatattccataaacatttttttgtgtgtgtcttaattatcaactttactttttatgattgaaatgtaatgcgttgaactagggacggaggcaatgtttgctgatctatgtcacttcactgttcgagctggacaggctatatacgttacattccctagagtggattaaacacacacatatgaataattttgatagtaattcactaa

SEQ ID NO: 67484 - DNA, 475 bp, Arabidopsis thaliana landsberg
tgccatcgttgtctttgctttcccatgatttcatttaaatccaatgttctcttttaatctatgttcaatgtaatttatattagtgccttaaaagaaggcgaatctatcctaccaaaaaaaaaagaaggcgaatctaaacgaattcggttaattcatcatatttctcaattaatatacgtaagacacactttggcacaaaacttatataattatttattccctgaaacaagttatcctctaaatatgtatatttaatgtcctaaggtgtagtaccctcggtattcactagacagagacggggaagactaacgagtcgcacgtcaaatcaaaatcacaacacatattttgaggtgttgttacattattttgtggtccgatcactatgtgtgagtcaccctcacggagaacatttcctcgtcaagtggtctatatactctagacactgcttatgaataaacacttttgcacactctta

SEQ ID NO: 67485 - DNA, 527 bp, Arabidopsis thaliana landsberg
tatacatttgggatgtgaaaacaggtgctcgagaacgtgtactccatggggcagcttcacattcaatgtttgatcatttctgtgcaggcattagtgagaaatctcattctggtactgtcttaaatggaaatacatcagtttcctctttgcttttcccagtagacgaagagaggaaaccattttatttgaagaactacgagcgagcagcctctttgtcaacatctaagccaagttcttcgcaggaaaagactagagaagagagttctactgcttcgtcttttctccaaagcatcagctaccctgccatcaaatgcacttgcccattccctggaatatctactctgattttcgatctttcatctgtagcagtttattgtcaaacacatgaagactctgatatgcataagatgctagacgagaagagtgataaggcaactgctcagcagaagacttcaaaagacaagtctcctgtccagaagactctagatcaccatgcagaaagtgttcacatggacaaggctattgga

SEQ ID NO: 67486 - DNA, 176 bp, Arabidopsis thaliana landsberg
gagcctgaaaatcttgatgaaattgaaaacgaaatcgggaagggtttttgattttacctttgtgtcggtggctttttaatctgtacaccgtatgttccttctccgaggatttgacggcggaggtatctatcaactggttgattatagccggattccgacattgggtttagattcct

SEQ ID NO: 67487 - DNA, 254 bp, Arabidopsis thaliana landsberg
aaaccaataacgagattcgtcgccggaggaattctcagagagaaggagggaagagaaaatttcaaaaaaaattgttaatgttgtagaatgtttatcagtttatgactagtgagggagtctgggagatcgtttgaagtttatagaaatggagaacaatatttagtggcaaagctgatatttagtggtgatagcatgggtaaaatcgactaattgtgtaacgacgcgaaagatatttactggtaacgttggtattt

SEQ ID NO: 67488 - DNA, 337 bp, Arabidopsis thaliana landsberg
tttgtttccaaaatacatgcgctaaggtttaaggaaagaaaaagaagtgaagtgatcggacattcatttattttcacaaattaaacacaccataagactgctatgattaattacacatcttaaaaaccagtttttggttcgaaaatgggtacaagtgggatacacattgcatggtcaatgagatttaatttcaattcatattaatttgtctgttgtgacaagtgagatacacactttgcttttagttatgttaacaattcattggtaaagtcttatttgctacatcctttttaattttaaaacatgctaagttgggattttatgtgtgtatgtgggg

SEQ ID NO: 67489 - DNA, 554 bp, Arabidopsis thaliana landsberg
  unsure (1)..(554): unsure at all n locations
ataagtattacaccatacatttctagattatgattctagtatattacatactctcttaatgcatggataaagtgaatatttgaaaattttcaagcccaatacttgatatggtgaagaagattcgtatttgaaatattttctgtagtatcgttgaaaacgggattgatgaacaacctcggatccacgtttgatgcattgctgccaaaacataaaattttaaatattcatttaaaatcaactaaatttctttcttaactttcaaaatttttaaacaatattacacaatttaagttacacaatatatgaatctatatataaaatacatatatatatatatatatatatcctcattttaaattttgactttttaatattttactgcgtttttcgaacaaatgttgtttttgaagatgacaattacgttgtcgggaattagcaaattgcatctaaatctaaatttaaaataaaataaaaacagcttaaaatacggatatatataacacgaatattttgctacctctacttaacgtatacttncagttttctacaaacac

SEQ ID NO: 67490 - DNA, 650 bp, Arabidopsis thaliana landsberg
  unsure (1)..(650): unsure at all n locations
catcatagtagattaatgaccctaaatctgataatgatgtatctatttttcaccgntaaatggtnatctttgcaggtacatttttaaatagatagtccttctattatgatcttttaagattgaaagcttgccaaatatagaatcaaaataacattatctatgtaaaaaaaaagaaaaaaaagttactttgttattgaccaaaacacagaagaaaaaaaaagttactttcttcaacatttgtttgttcattaggatagaaatgtggaaaattatctctaattccacattcactagatagccaaattcaattttcttatttgtaaaaaggttaatatatcagtagactaatttcaacttatacttctttacgcccaatcaattgttataccacaacatatagttaaaaaattaatgttattttatttgatattaatttttttttatttaaatcacacgaaacactagttaattatggttttgccaccaagttattcgttttgcaaataagcccaaaacatttatctatacaactaacccaaaaaaaaaaattcttaaatttatctgtcattctattctatgaattatttagtagtttaaggtatgnttgaataatatttcatcaaaatataaaagcatgaaccttacgttag

SEQ ID NO: 67491 - DNA, 655 bp, Arabidopsis thaliana landsberg
atatccatatcttccagattctgaagcaactcaaccaaagattttttatactgaaaccacaaacaaaacaagtttccggcttcgggctgaaatcatcaaatcaagatccaagtgaaaaaaacttttaagcaaaccacatcaggatcttcaagtttctccttgatttcaacaatactcttctgctcatcatcaaacaaaccagcaaagggatcgaagtcgtcatcgtcttcaacattaacagatttctctctaacttcttcttctgctgctgctgctgttactccttcttcatcttcctcctccgtctcctcgtgaaccctcccattattaaccctaccaatcgccgcctccataacgttaccaccgccgccaaaatcgcagtttctacacttgttagccatcgacgtagcgtagagacgctcgacgatgttatctctccgacgtttcagttcttgaccatagtcaagagacgcaacaagaatcgccgtatcgataaatgtccaaacatcaacacctgcgttatccataaccgatcggaaatcattcaaatccattatcacccacactccttttttcccacatttggtactttattaaagattcaaaacgaaaaacaaaaacagagcacatcgattacttacccgatctaaagatg

SEQ ID NO: 67492 - DNA, 659 bp, Arabidopsis thaliana landsberg
cttcatttggaattgtcactctcaaaattggcgtattttccagttcatatcttcattcatctatggccccataaaccataactctttgaaccatatttaataatgttacctgcatgcatatacattcatataaaacatgtattcattatcatgttagatatgtctagtctattatttcccaaaagaaagacacctaagagagcaagattcttgttattcatgataacatttttgaagattaaaaaaaaatgagtgattgatgaattatttatggtcagcatctagtaaaattgggtagaatattatatatatacatatatatatatatatatatatatatatatatatttaagataaatcatatggacatatccagtcagcctcattagaaatgcaccaaagtgatatagaatggatttctctcgatccgtgtagaaatagaccaccacactgtctgtttcgaatattatatttttttgtataaaattgtagacataatcttttattaataaatatttaatgcaagttagttatttttaattttacgaaaagaagttaactctaatatgtaccatactacttggagaagttaaattacaaaaaaaaaatataagtaatactaccacttccatatatggtactgatatttcaaactttaa

SEQ ID NO: 67493 - DNA, 219 bp, Arabidopsis thaliana landsberg
tgagttacgaacccctaatgcaaaattctgtttccccccaccccccaaaaaaaagttcaagctactttttattattagaggccatgtatttgagatgacataaattacatctaaataactaactgctttaatcgaaaacactaactaaaaaacctttctctctgctcggaaaataaagctccaatttgaccaactttaaaccatggggggaggaggaag

SEQ ID NO: 67494 - DNA, 1307 bp, Arabidopsis thaliana landsberg
  unsure (1)..(1307): unsure at all n locations
cagttgcgtatgagaggttaactttatatttcatatgaaattttaacttaaaattaggcttgtttgancttatgcagattaattttggaacttgggatcatcattgtaggtatggccctttctcttgggatattatgcatatgactcgacatatgcagagagagaatatcttcgatctgtcaaacggatggaatatgcaacattgaaacagcagtggcaggttcattcatcatcatttctagattctttaattggctatgtagttcttttgcccaatgatgcctgagctatttacataaaattttgaggcgttcctagagtagtttatttccctcatgtagatgcacttttaactagtatattttttttggcagagcatttcccctgaacaagcaaaaaggttcacaaaatatcgggagagaaaaggattgatagataaagatgtggtaagaagagtttgagaattgtgatatatgtggtgtgccttattcaccgaattcctgttgagttattatattcctggtttcttcttgtgtaggtaagaactgatagggcatttgaatactatgaaggggatgacaatctacatgtcaatagcatgcgtgatattctgttgacctactccttctacaattttgacctgggttactgccaggtactcatcagttttcaaagttcattcttagcactgaattacaagttggcgttgtccttactgttatgaatccatattttggggtcggttgccccacttagcgtacaaaacagaactgctggacactcttctatttctggcttttgctttgaatttttccattgtgtttaactgacaaatgtttttttatctggttgttagggaatgagtgattatctgtctcctatcttgttcgtgatggaggatgaatcagaatctttttggtgtttcgtggcactgatggaacgacttggacccaactttaaccgtgaccagaatgggatgcatactcagctctttgcactctcaaaggtctataaatttttttcttcgagaacccctctacaatttacattttgcatttcttcctttctatcagcattcggcatcaatgttgggggatctgaacctgaagcatttctttttcattttcactgtcacacagctggtagagttgctcgatagcccgctacataattactttaaggagaatgactgcttgaattacttcttctgtttccgctggattctgattcagtttaaaaggtttgtttcttcttttctgcctctttttcgttattggttagatgtttgtaccacaacatcatgtggg

SEQ ID NO: 67495 - DNA, 1213 bp, Arabidopsis thaliana landsberg
ccgtacatagttatcctgaaaagttgtcgaacattgctgaggaaaagcatcatgaaatccgtcatagttattctgaaaatgaccttctcaaggatgacgaaatttcttatattgatgtccctgctgatcccttagaggtaacgatcattttttttgttataagcattaccatgttggtggaaactatattggtatattgtgaaccatcctgtgtacgcaacatctagtttttttcgtctcgtggatagattgtcatttattctaaagcacagggtgaaatttttatattacctattgactaaattccatacatcatagatttttgtccttgtgtctgattcattctagatccccaattgacaattaccatgaccttggtactctagttatcctactgggcataattcgagtgcttatatgggtggacttatgcatgcatttcagttgtgcttgtactttcaattagttggaacactaccttagatactagtgactattgaattacagcacttttgcttgttcttgttaaagtttgttggaaacacagcgctgaaagttctttttatatattcaagggcaatcactttgtagactaagcaagttaagcattgattaaaacgatcagctttagttaataatcacttctgcaatatatatgaatgattcacctagtataagtaagataaacatttacggatggaatgctttctatgctaccaaacacaactggccacttgttacgacaagtacatatagagtatgatacttatgaattttttgaagattatgccatttaattcgtcctattttgcagtttgataaattaagtttgatgtggggaaaaccaaggcaaccaccaatggggcataaagaggtaagcccttccgaatattgcaatttttcaaagtctggaaagtttagagaggaagctttcttgggtgctgtgttttttttcttaatactaaattttagagaagaaatgatatatcaccaatcattaagtgtagaatatcgacagagtatgtgcaacctggtagagaatatggtttgcttcttcgtatgctataagcctctgtttaaattcaaacttttgctggttcttagttcacagcattgttggattctgaagggcgagttgtggaatcaaaagctcttcgggagagagttttctatggaggcattgagcaccagttgcgtagagaggttaacttcg

SEQ ID NO: 67496 - DNA, 435 bp, Arabidopsis thaliana landsberg
acatacgttagaatccggctattactgggggctgggttaagggagagacttatagtgaaccacccacatggccaacagatttgaatctgctagtgtggcagaaagactgtccagaaatgagtaaaccggattcattgtagtttaaatcctaatactttcttgtgcatgaagatccagtttactgtatctttcatttttggctacagcaatcttgcattaacggcgaaatcgattttcgcatgcatccatacttactgaattgttatgttcaaaatgagtaggttaaggagattctgtcttactatccatccgaatacaagcagcctcgagtgattctctcttctacatcttgcgcatcagctgcgtggaggctggctccctgtttcagcaatgaatgcggtatgtcttgtaagacttttttgttcgattttctct

SEQ ID NO: 67497 - DNA, 533 bp, Arabidopsis thaliana landsberg
  unsure (1)..(533): unsure at all n locations
cgggttggccgaataggccaggaaggtcaccaggttcttgaccttttcgtcgaactgctcggtggtcagggtaccggagttcggcgtgagggtcagctggtcacaggcttcatgnnnnnnnnnnnnnnnnnnnnnnnnnnnnnnnnnnnnnnnnnnnnnnnnnnnnnnnnnnnnnnnnnnnnnnnnnnncacctggttgccctgcaggccagccagcacgttaggcatgccgacgttggggaagaccttgttgttcaccccgtaaggccgcgacttgtcctcgtagaagcnnnnnnnnnnnnnnnnnnnnnnatcgttgccgcgcacccgcgccaccagggtcaggtccggcggggctgcaccgaaccaggtcttggcatcgctcggctgnnnnnnnnnnnnnnnnnnnnnnnnnnnnnnnnnnccggtgaacaccatcttttccagcatcagttcgtgcgggatgcccaagtcatcggcgacccgctcgtagcgttggaacttggcgctgtggcagcccatgcaatagttga

SEQ ID NO: 67498 - DNA, 490 bp, Arabidopsis thaliana landsberg
gcgctcgttatggaagcctggaggagggctatcgctgatcaactcggcgatagtgtatgcgtggttgttctgcctgttgtttcgatgagtggcataaacgcaggcaccaggatttgataagagatagaggcagacatggaacaaacaatggttgcagcacggctgcatgcgctcggcactccgatgacgctcgacacgatccccatcccgaagccccggccgacggacgtgctcgtgcgcgtcaaagcatgcggcatcgtgccgaacatggccaacgtcatcaacaattggcccacttggtttccgcaccagccgctgccgaaatttcccgcgatttttggcttggatccggccggcgtggtcgaacaagtcagcgaagccgtcatcaacgcgaaacccggcgatagcgtttatgtgagcccgccgcactattgctgcttgagcgaagcaggccatgcaggccacactcaaatagtagcggtaactacac

SEQ ID NO: 67499 - DNA, 380 bp, Arabidopsis thaliana landsberg
ttttttgtggacttacaatgaatggcggaaccaaaataattactcatggaggtcataactattaagtagtggcatgaaagtcatcaaccaaaatgtaagaaccttaattgtccagttctttctgtgaacgaatgtggctactcgagttgttctaggtagaaaagcgaatgtgatttttgagtttcgacgcagctgccgatgtgtttcggcaatatttgttggatcaacacaaattgcacttctttaatttgtcataaatttcgaaaactctagagtcaatggaaaacaaaaatccttctttgtcttatttttaaaaaatgttgataaaacatgtgtcactatattcaaagttcgtcccttacttgacttttttttttatg

SEQ ID NO: 67500 - DNA, 512 bp, Arabidopsis thaliana landsberg
  unsure (1)..(512): unsure at all n locations
gatcctggtgcccacccgtgagctggtggtgcaggtggaacgcgtgatcaaaaagtttttctttttatatgaacgtggtgaccgtgggcgtatacggtgggaccaatatccgtacccnnnnnnnnnnnnnnnnnnnnnnnnnnnnnnnnnnnntggccacaccgggccgcctcattgatttggtcatgaacggatcgatcaaaatgaaagctattaaaagactggtgnnnnnnnnnnnnnnnnnnnnnnnnnnnnnnnnnnnnnnnnnnnnnnnnnnnnntatcctggacctgctcccggtcaaaagacaaaacctgcttttttcggccaccattaccgaagaggtggaaaacttcatgcagcagcatttcaatcagtccgaacgggtagaggctgtacctgcaggtacgcccgttgaaaaaattggccagctcggatacaaggtgcctaatttttataccaaggtcaacctgctgacacttttgctgaaggagaacccggacatgaaaaaa

SEQ ID NO: 67501 - DNA, 523 bp, Arabidopsis thaliana landsberg
  unsure (1)..(523): unsure at all n locations
caaatttgcggatgccaccggcgatcaccagtggatccacgtggatccggtgaaggccgcggccggtcctttcggtgcctgcattgcgcacggctatctctcgctctcgctggtggccagcttccaggaacagatggcgacgctggaaaacctgaagatgggcgtcaactacggtaccgacaaggtgcggttcccctcggccgtcaaagtgaattcgcgcctgcgcggcaagggcgagttgatcgccgctgaaaagaccaaggacggcggcgtgcaggccatcatccgtgtcaccgtcgagatcgaaggcgcggaccgtcccgcctgcgtcgccgaaaccatttcccgttattacttcaattgagacttgccatgaccgaagccgtcatcgtttccgtagcccgcacgcctatcggcaaggctttccgtggtgcgttcaacgacaccgaagcgccggtgtggngcggtcatgtcgtaaagtccgtcgtcgaacgcgccaaggttggcgccgatgaaatcgatg

SEQ ID NO: 67502 - DNA, 706 bp, Arabidopsis thaliana landsberg
gtaatattaatcccacatactcaaatattcatttgttacgcagatttcgaaaataacctttcgggttgctttcgaaaacttccctgaaaattcgcccatcctttcctggtgccttcatggtcttcttgtggaggcccgaactcattccggagaataaaccggcaatagctccgacgacacctatgaccgccatggctgttccaagatatgatgacgtgtcttgtttctggttattgttacggtcgttgtcgctcattttgatatactgatgagtgacgattatcaagattctaagattttagcttcttctttttttaatctttcgagtgtaaggtcatgtgatttttatagctgtagttgtgatgccaaacgatttattagatgaattaaactctttgctcaatttacaaggaggagatcttgattacgattttgtattagaatttattgcaacagttcggaaagggttgggattttctagggaagaatgtgaatatacataaacttcatcgggaatttaagaaatttaacgtacctgatctctattaatatctccaaaggtcttagaaaagaaaaaaaatctccaaaggttatatatacgatacaaaaaaaaatacgagaaatttgtctttttttttataatggtggtaggatgatgatagtatgacgattatgatgatgatgtgataatgatgttatgattatg

SEQ ID NO: 67503 - DNA, 738 bp, Arabidopsis thaliana landsberg
gccggcagcaacactggcagcatcagacgcttgaaaattgtcgtcggtcaagtaaacagcatacgtgttccatgtggagctcagcgggcggacactggggttccagctgacacaattgctgccgctgcaaaaacgcaccacgtttgacgagtcctccactggagtggaagtatggctgatcattttcagttgaaagctgaggactccgccgtagaatgcactgaggttgccgtagaatgtgttgggagcctcgaagccccactggctgcccttgccatcgtcggtggcctggatgaatccgccggggtcgccaccactggcaatgtactgcatattgacgccgtcagcatacaagccccagccctcagtgccgtcggagaatgtgctgcggatggcattgacggcggccgcgggggctaacagtgagtggagaaagaaaatgaagagtgaggagatgaggagcttgtgcagtggtttttcattagctcattttctctccgtcccatcccccctgctttccctccactcccccccaccgtctctctcgcactcagtccaagcgacaagtgtttcaaaacaataaacaaacaaacaaacatctcattcccggccccgcgctgcgtaaccctctggtgcggcagcgcgccttgtaccacacacacaccctctgcttctttcccagcgcgtggcgccagtgcaaagcgcgcgaatgaggaggtcgaacaagagggagagaga

SEQ ID NO: 67504 - DNA, 2372 bp, Arabidopsis thaliana landsberg
gtgatccctttgtcaagttaaggattcttccttgtgccttagtcattccaccagctattgtaatatttcaaagtgtatcacttcaaatgacaaaagaaaaataatcatatataacctaaagaattgttggttggagtctcaaaacaaaattgatcagagtttgtattcacaagaaaacccaaaacacaaaaactaaaggacaacttttcattttctaatagctaactcttcaaagtttaatagatcttctcatgttagagcttttctttttcttggtcggagaatcactcaaagcattagcgagctttcgagcgcgaggtgtctgggccctgttgagatatgaaagagcatgatttttgtacttaggatctggagcagaagcagcaacattgcttctaaacaacggccgctttgttttacgagattcttcttgcttcttagtttgcaaatgcgcacgttgaatctgaaaggttcctgttacagaatcacacacactcagactaaggatctttctttttttcaccacttaaatacataaaactcttccacagttttactataattgagattaaatctatcaaaacacatagtacctgggcgtttcggatgggaatttggtttttgatacttgagcttaggtccaccgagcgtagctctctcaccagctgtacatagagttacacatacactgtataagaactttgttgacagatcaacactctccagtttgttctaggttctagttcagattgatacttcttgcaacagatgatttacgtattacacaatcatttatctgaatttatcagattctcctatctttcttagtattctccaaggtaagctgtcaaaagtacttagtaagagatagtacctttgcgttttggaaatatttcttgattctgaaccttgagcagaggggaatcgatgctagctctgtcagcagctggacttggcttaggttctttcggttgagaggtctcagcaaatggcttctcagattcatcgatgtaagctttgttttcagttggacatgactcaggttctgtctgttgggaggtttcagcgaatggtttctcagattgaggtgacccgagaacatcaatcatggctgaagaatcttcattgttgctagactcggctgaatggaacacttcctcttttggctcttgacagcaagaatctggccattttacatcagggatcgatactcccaccgaatcgttgcagactttactggaattatcaacactctcgtaactgttatcaagcactgatactggtgaaaaatgtaacggagtagcttcaaacactgtcttcaactgttcaaaagtactggaaaaccaaggagttccttctcttgcataaaacaatatatacgcaggacgggatagaactctctcttcactgattctcgtgacctgccatagttaaaaaaaaaaaacatcaagaaagttaaatttattgaaatcagagaggactaagccacacaaatgatatgaaagcactatataataatattaccttggagtcatcaaaattatgccatgtctcaggagctgatctcacataagaggaataatgaccaaaggttgctctaatcccaatatgctccacaaaggcataaagatgatatcttgtggaaacctgaatatacaaaattgggtgttaagactcaaaaatctcaagttttacaaaacaaaaaagtctgaaattttgacatacctcaggatcatggttactgctcatgaaaggggacaaatccaactccaaagggaactcaatatgatcgaagatcttctccatagtaactccatcattagtaaacctcttaagatggaatgtagcaaccggcggcaacttatcgaacctaagttgcttctcctttgtgactttctccttacagttatcacatgttaactggtcctcaagtttttcgacacatgtaaaggattctagagctttccagagggtattaacatcttctatttccagactccatccaagagaaggttcaaacgtgttggaaacagaattacaattgcaacaacaaagctgaaaaaggaatagatcaaacatatttccaagagtcattatgcataaatggaaactgcttcaacactagattaatagtacggtaatgaattaacgatatcttaccgtactcatgagaccgccaccaaagacattgtcaacaatgttcaaatcttgagatgagacagagccaagctgattcttaggatctaaacaacatctttctaacttatccagaaatgattgtagaaactcgtgtgcatcttcttggtggtttatcataaaatcagatgaaaaaatctgtgattggttaaagcttacaattcatataaagaaac

SEQ ID NO: 67505 - DNA, 741 bp, Arabidopsis thaliana landsberg
gcagcagtaccctattcaaatttcagtctggaaagatgtaaggaccaataatgtataaatcctcttgatatataaaataaacaactatgaaaactaaaaaaaaacacagccaatttggtccaaaagaacatatagaatagagagttagaaaaatcacaataattaagtcacgacccatgaggtaggtaacacttataaaggcatctcctaattcattcaccattcattttctccatctctctctctccttgtacctctctaaagtcaagcttctcgtctaaaagggaacaccttccaagaaccaagaaaggcaaaagaagaacagagcatccaaagaacaaaccattaatggagatagaagtggcagtagcagcaggagcagaactcaatttcgacagcacaacttcgtctccttacataacagctccttcgagcccaactcgatttggcaacaactttttcagtgcaccaacaagcccttctccttccacttcctctaacataccttttgattgggatgaccaaccaagaactcccaagaagagatcagccagcggtttcgatgacgattttgagttcaatttcagtggtcagttggagaaaacttctttctctgcagctgatgagctctttgatggaggaaagattcgtcctttaaggacacctctcactcctactgtttcttctcctagatctaggggtcttgagatagaagattcggatgatcagaaagatcgagga

SEQ ID NO: 67506 - DNA, 2187 bp, Arabidopsis thaliana landsberg
aactgaagagtcttcttatagctgactagtgatgatgattttgtaatctatctcaattgagtgtggccttttgattttgatcttcttcttccgactattttccttttgatgagtcaatggaggattttgggagcttatcagctgttattcgatgtggataattgttgattttttttcttccggaatatttgagattctcgtgaagagaaagaatcttactctcagctggatctctatgtctgtcccttaggttcttatcactctactactaccagctttttcttagtagcaatattcggtttggtcttgttatgttttggatgatgatgataactagtctgcttgaagaagagattgcttgtccctcacttgctggttttttcccttttgtggttctcctttcaggctttcagaataatttgaaatgcaccgggttggaagtgccggcagtaatggcggttctgttcgcactcgcaaagagaaaaagcttacttatgtgttaaatgatgccaacgatacaaaggttagtttttttacaccaatatggtttattgccatcaggagttgtgttactctttgtttgatttattttctagttccttcgtattatacattaagacatgacttgaaatagtttgaagttataagacatctccttctcaactcaatcctgatgatgttcttcttatgttatttgcaagctgcagcattgtgctggcataaattgcttggatgtgttgaagtcgtctgtttctaatgatcaaagctacctcttcactggaagtcgtgatggtacactcaagagatgggcatttgacgaggatgcgaccttctgctcagctacatttgagtctcatgttgactgggtatatagttttcttgacactgaaaaatttaattgtatagggatgatcagtgattaggatcctgtgtttcctgaggtggatgctgttctattgtgcatctaataatttcaaaccccatgttgactggtcaggtgaacgacgctgctctggctggtgagagcactcttgtttcttgttcttcagacactacggtcaaggtttgtgaatttgtttcgctagccgaaccaatattttactttgttttgtttttgtaattccatattggtttctaaatgcggcttaattattttgtatctagacatgggacggtttatcagatggagtctgtacgaggactctccgtcagcattctgactatgttacttgtttggcagttgcggcaaaaaatgtaatttctcatttgtcatgcttttttctttatagttctcactgaaaaaaattggtatggtggtgcaagttttgaggatatatgtgcttctcattgtcgcattctgattctatcttgatttcacaacttttagaataatgttgttgcatctggtggccttggtggggaggtttttatatgggatattgaagctgctttgtcaccagttaccaaacctaatgacgctaatgaagatagttcttcaaatggtgcaaatggtcctgttacaagtttaagaactgttggttcaagcaacaatatctctgtgcagtcatctccatctcatgggtacacaccaacaattgcgaaaggccataaggagtctgtatatgctttggcgatgaatgataccggaacgatgctcgtttctggtggaacagaaaaggtattcgtacattcccaagttgcagagagtatacctgagaacaacaacggataatttttttggggtttagatttcttaaaactaagttttttttatttattgcaggttttacgtgtctgggaccctagaaccggttcaaagagtatgaagctgagagggcatacagataatgttagagtgctgcttctggactcaactggcaggtaacttttttttttttttttttagttgtacatgccagcaatggtttattttgggtccttttggtacctattttttctctgacttacttgcgtttcctcgtgtttctcaccttgagactgcaggttttgcttgtctgggtcgtctgattctatgataaggtctgtatttttcttaactagtacataactatgatagctgaatcatttcagttctaactggttctaaattcatgtttagactatgggatctaggtcagcagcgatgtcttcatacctatgcggtgcatacagattctgtttgggcgc

SEQ ID NO: 67507 - DNA, 309 bp, Arabidopsis thaliana landsberg
  unsure (1)..(309): unsure at all n locations
aagtcatattcgactgcagaacactaaccaacctccttctagtttttaaaaggtttgatggagaagacaaagggggggggattctcttgatacagagagctgcacacaccacagagaccagctatttgcacgatggtctgtctgcgacttatctctctcatacaatgcaatgtatccagaaaaaacctnnnnnnnnnnnnnnnnnnnnnnnnnnnnnaagatatgcttccagagtgaactgaagaccaaacaaaacaaatacgcgttcgtctcctagaatgtgtccgtatctcagtcgtttccatgggc

SEQ ID NO: 67508 - DNA, 593 bp, Arabidopsis thaliana landsberg
  unsure (1)..(593): unsure at all n locations
aaattcataaatgtcactccaaaaaatagtaaaatcctttttaatttcagaaaacactatgtttcagaatggaaaaaaacgagaaataaagacaagagaaaaaaaagatactaaatatatcacactagctcccatggaggaacttaaaatcgtgagaaaacattttgaagaaaacttgtcactttcatgcaggttaagtattatcaactcttagatatatatttagctcataaataaactgactagtctacattaaactttagtatacagagaaaaaaggaagataaatctcgtattttgaaatttttgcatcaatcatgcatcttaagcctgatattaagatctgaattctttcaatagaacgatccaattgacatcttatttctaatacatctagttgaacaataatattatcttctgcaaatatgactaactaatacttgagccttattccaaatttttcgaaaacaggacaataatgtatcataattatttctttctaattaagcttatcatatataattatgcatcatttaataactcctttntcttaagtgattactgattagaatgattaataatgtatagaccat

SEQ ID NO: 67509 - DNA, 2029 bp, Arabidopsis thaliana landsberg
acagggacgagggcgtttctgtcacagcttttcccgagatatgtacattattgtggacctaactggtctagtgggaaagatggaggttcgatggtttgggatcagagacctattgattggttagatcattgctgttattgccatgatattggttatgatactcatgaccaggcagagttgcttaaagctgacatggcgtttcttgagtgtttggaatcaaacaagcgtgtagttactaggggagatgctcaagttgctcacttttacaaaacaatgtgcattacaggtaactacaatctccttatgcttttatatcaatgtgggattatttcataatttaccttattattcaggtagtaatatttgataatggccgtttccatttggtgatgtactgatgtatcttgaaaccatctatctcgaatgctttcaggtctcaagagcatactaataccctacagaagttaccttgtgaagatacaatacgggcaaaatctactcgactttggctggatagtgagcaacctcagcaagagaagctggagttttcagaaaaactgagacataaggaagtatatcggaggtactctgtcatcccgttaagcctttgcgggtgtcttcactttcgttttgtacatagaagtcataaagaaaggaatctgaggattaggttctttagtagtatagatatatatgtttagtatgaagatgtgaaaacgctagtaagtgttgtgcgtcttgtaaacccgttgtacatgtctagtaataaacccttgtttttgaagtcttttgtttgaatgatataagctctatcaaaggatcattataacttcatttcatggaaactcatgaactagaaaaactattttctatagtaaagtttgcatccaaaacatatataacaatgaaaaccacatccggtttacacactaccaaaacttttatacatatgaattatgaagtcttccttgttaaacacacatacacaaacccatatgtttcattagattgattagagaaagaagtaagaggaagaggccttattagagcttagtagaggctggtttaagaaagatcaaacatcactcctagcacacaaacacacaagaatacttcaaaacaaaatggctattcaatttcttaaaaacatattttttcaaatcatatattatcacataaaagggcttttcctagttcctgcttctgcacttctccatcacccttggagctgcaaaaaaagaaaaagcaagatttgtgtatgaatcattgtgtattcttcatttgtacagtagtgtgcagtaagttcctagtgtttaagaggcttggaaaggactaaattgcatcgttttagtttctccagtaatatatttctttagcttcagaatgtttatagaatccagcgagaagcttaagaaccatgaaagtattagaagggtgtcttagttcaaaatggaccacctttctaatacatcttaaaatcgagcacatgggtgtggaacattaaactagggtttagtaaagaaatactaacctaagccgatagcctcagagctcttcatgattctcagcttcttgcaggagcatataaacattctgcagaggaaaaaacagtaagagagcttcactgatctatattcttctgttaagctaaaactgtgctaagatcattagatatgatctaatacttgatgttaatttacattgctgagattgatcttttaaaaatcaaagacttactcccaagggacatctccgaccagcatccagtcactgtctttatcttcataggttacaacatactcagaaccacgcaagagatcagtcaagcgactctcgtttaacccatctgtgccacaccctccatgagaaccaaactgacctgaaaaaaggaaccaaaagaaaacagttaactcaatcactggtattgatctcaaagaaggagagactagaaaacgttaccaatggtgaagcaactgaacatcttctcaagagcagaagagagctcaaggtagcttttgtaagtcttgag

SEQ ID NO: 67510 - DNA, 571 bp, Arabidopsis thaliana landsberg
  unsure (1)..(571): unsure at all n locations
aaacactttgtttctattgaatacagatacgacacacgaggtaagatttctatgtatctaaaatgtaatgttgggtttgtgtaacacgattttaatataaactttgacatcgcttttttcgttgtgatatggtatagatttattaatgtttgtaattgtgatacattaaaagaaagtcaaatcataactattcatatttcatagtaatacaaacacatttggttgatgaaaggcattagtacaggtggcctattaaannnnnnnnnnnnnnnnngagtagacattttaaccgatccaaacaaatatcgaaccgtattttaaaatagaagacatgtaaaacataagacagaatcaaaccaattctttaacaaaatcaactgaaccaaacataaaccagaccgaactaaaatggctttgatttgggtttaataatagtcccatccaccacttaaacgaactaaccaaacaaaaaacataaccaaacgaaaactgaacagaaaggattcaagatttcaaaattaattttactacgatcgtattaaccaaccgattaaacaacatcttaaccatt

SEQ ID NO: 67511 - DNA, 218 bp, Arabidopsis thaliana landsberg
taaagagtcaagttagttttttgcacgagttgagctttgaatgatgagttctaaacagtgcttctgatgatgagatcaatgtaaataattgtatgagttcacaaacaattattctgttgtgtagagagagactcatctccatggcaccaaggtggaaatgggctctaggtttcctctcaagttgtaacgtatttctatcagagcaagctgagcttttg

SEQ ID NO: 67512 - DNA, 511 bp, Arabidopsis thaliana landsberg
gggggttttcttccaaaggaacccattctttttattccaaaattaaaaaggtttttggcctaatttttaggatttccagttagtttaaatccgaatactgcttgggccaaaatccaacatcaaacttccaaacatatgtgatttttgttttgagtatagattaaacatggataaattcctttcaacttttctctaattttcactactacaaactgtgatcgtgtgggtttgggtattagttgtgttctaaaatatgatatatgctagtcatatggcaataacattttaaatgattttttataagaaagtaagaacattctacaacgtataaataaatgtatgtgattgtttataggaaactatatacttgctctggtttatattataaggtggtgtagaccttttttttggtttcaaaaatgttttgaaaaaacaattccagtttctaagcagactattagatttaaatgatttctgaccactaatattcttgagtaaattatatcattta

SEQ ID NO: 67513 - DNA, 378 bp, Arabidopsis thaliana landsberg
ccgcccctgcctggcgcggatgcagcagccatgttcgggccggcactatcgtgggcttgcaactacgcgcaggcggtgcaaatgatgggcgtcggacttggcttttccaaagaatccgaattaagctcaacataaagtcgagcaggggctcggctaaaccaaagcgagggggaacggtatgatccatcccatcggggggtattatcgcgtgcgcgactatttcatcgactatctcgatactgcattccgcatcaaaaaccctcacctatcggctagtcgctcggcgctcctgaagaccgaagggcaattggcccgtagcgccttcttagaacccagtaccgggtacgagcaattcgaacggtctttggaagctctcta

SEQ ID NO: 67514 - DNA, 743 bp, Arabidopsis thaliana landsberg
  unsure (1)..(743): unsure at all n locations
acctgctacattggcacagacttgaaacatgcgtttttttattttaccacaaattaaacttttatttacattttcagaaaatagaattaaatggtaaaagtgaaaacaggctgttgatggggccatggctttatttttaaatgttgatattctatacaaaattacatatgacaataaaagaattgatcaaattgtaactcctcgacagaggcacagctgaagcctgaagcatgggtgaatttctaaagcaaccaaaaattaaattcaaattgaaactgtagttacttacagctgcctggcatttgttttctcaaaaaagtactaacattttacaacaaatagaaaatagagatttgttccaaaaaaaaaaaaagacttgttccaaaaaaataaaaatttaaaacattttctgttataattaaaattttaatggtcaatatttttttggtaaacttttttttcttccataacttgtttttatcgaatctttgaattctaaaattgtgtatgcacaagaaatatattttggtgacatgtgctggtttgctttcagagttttcgaaaggcgatatagttctaaacatcagggtgacccgtgtgaccaggcagagtatcgaacttccgatagagtgtaacttggtcactaactccaacattttcagctgatcaaacagttctgacaatgagcctggatngaaagctactatttatcatcaaatctatcattacgcatgtctgttact

SEQ ID NO: 67515 - DNA, 2875 bp, Arabidopsis thaliana landsberg
cctacccggccttttggaggcatcaaatccccagactgaatccacatcatcgttagtgtcaaatgcacttgcccaattcgagtcatcaaagaattcagaattctttccctgagaataatctggagatgggacctcagtagcattcctagagacaggactgtctctaggacttctatcttcactgtgagttgtcccatattcactctcatggtggcggtctgaggtttctgaaaaagggccatagttgtcctctacatgggtcggcgaatcaggtggcccactaccatcatccaccgtaccattttccttctcaccagacgagttttgctcttttgatttgtcaaaagtgatctcattgccaaaacctaacagtgggaacattatcagtcaatgtccttgttatgtgcttaactatatatatctaagtgtattagtaagagaaagataggaaaaaacattgtaccttcatcttcaaacttatcccattcctcatcccaaagagctgcaccttcttgaattccaggttgccagcctgtaagtcacaacatagcaaattccacataagttgtttgtttacaaaatacatgttatttgcaatcatctacaacgaaagcaagaagtcacaaggcaacggaatcatataccagctggaaggtctacaagggccttcgagttaacctccaacccgtgtttcttgcatcgttcagttaaagccttcatcaattcctcaagatctgattgtattctgtcagcccggacctaaatgggcccagtacagcatcaaatcaggcatgtacagcagatactcgacagttaaggcatctcgtaagcatatagaatagcatgtacctgaaggagaccatcagcactaccaccttgctccatgttcacaattgcttgactcaactccatcttccgcccctggatgggttagcaaagcaaaagttcaataagtaacaaatttccgtaagatgtgttacaaaattattcaaagccccttcaccagcaaaggtgaaagaagggagcattgggccatagaataagaggagaggacaagacgcacaacatgatccagagaaaaagaaaaagaaaaaaacaatgatgaagtttagataagcctagtaagggaaaatgcacatagaagaactggagaaaaaaaaatatacggctggagtgtacataggtgttgccacttgaattagtcatacctcaatctcacggaacctggcctcttcaatagttaattttgaccctatttctgcaacttgcttatacttctcctcatacttctttgccaatgtttcagcctgcagcagaaattgttctggataagacagaattgcttctaaggaaatgagaaaagtgattttctatgtgaaaagcacctcacgcttgtcagcagaagccctttcggagatctcatttaatctattgtcacacctgcttttgtacaagacctgagagaaagatgaatgaaaaagtgggatggtgagaattggatctcagcacaagaaccttactctctgacacacagattgtaaatataatctaaataagataatagatcaagctgaagaactagatctaaatagcaaagcctcaaacaggaaatacgttcctataggaaaagatcagaacttcaggagaccaacaatctcaaacttataagaccattacctagataacattcaagttctgcagcttaatctagatggtcagattccagtagattggtcttaatcttacacacaatctttcaaacgtttcagagaaaaatcaagattccctctttcaaaagagctaacaatttcgttaaggtattaatgaatacaaatatatcaaagtttacatcaacaaaagttaattatttttaaatatagcaaactgagacagatcaaagtaatttctcacttctcaaataacaagagtaatactcacaatatcctgcattttcgtccggtagtaatcaagtttctccctggagtccatataggcattctgcttttcatcaacctacacagattagaaatttttgtttcacaagcctccaaggaaacgcatatggaaatgcaactcatctaagcttaaatatcctgatcaccttttcctcatcagctgctgcttctggaagatttgagcttgcagaatatccattacctaggtgattagcaaaaggagcatccaaaactggcgcttgattccttggctgattaggtggtataccactgccaggttgagggcctggtgcaggaactggtggtctcataccagtcgttggagtgattggccgcgcacccatccctggttgctgtacaaaaccttccaatacggaaatttgacttaaagtgaagtaccagggaaagggaaaagatcatcactaaaatgcatcaaatctgggcaataccttgaccagatccccatccagcatttgcatagccatgactgggtgcgcctgagatagatagcagtgtttcatcaaacatgatgctgctaggaagtgcggtcgggagaggacggccttctctataccgctccatcaaatacaatgaaatgcagaactccctcagagaaagcatagtatcattatcctgatcagataattcccacacatgcttcaatacctctgggaaccaagtaaaaggaaaatgttagcataagcacttcatagctttatcagttgcatatgttattaaaggaacataaccctcaggagggtagcaaatatatttaacataacagcacatggtctgtcccatgaagaaaggagacgaaaaaaagttctaaaaggattcttcaatccagaaatgcataaaattacaacggaggtaacagttcatttcatatattaacagaaaaattatgttcttatgtaggc

SEQ ID NO: 67516 - DNA, 526 bp, Arabidopsis thaliana landsberg
ctgtgatggatgaaagaggggaacgggttccaggtgtagcggatgtgctacccaccatttatcgtcgcaccttatttgctgtttgtttaaaagaacaaaaacaagggctttctcctcttattaagcatcatcagacgagctttgttgttgggtggttggcgatgataacacctccacccttgtgttatgtgctgctaccccaacaactaccgctcattactgtgcctccaccaaaatatcacctagtggtgcttgttgaatgatgaattatttaattccgactttttgtgggcccacgggaacaaatagaccaacttgcgaggattctcctgtcttttgtcgacacaacagctattatcaaatgcctaacctcttgcatcactggtccgagaataataccacactattcaaacacacttctttactctattatcaattcccgacggctgtcgccactggagttgtaatattcatgctgttcaatcctggcggggaagggactaatacgcatctacaaattagttgt

SEQ ID NO: 67517 - DNA, 836 bp, Arabidopsis thaliana landsberg
ttgagagttgaactagggtttgttttagttcgatcggtatccatttgtttttttttcttgtatgctcatgtttttttaagatgaataataatacctaaaattaattatagatgtaatttaaaactttttgtccatgtttgaagtttagtagagaatttgatttcaacaatggattaaattaaactcttcacaacaaatttgattcattttttcttttttggacacgaacaatttcattggtattctagaataaataattctgtcataatgtttaccgaaacataacttttatgtacagttatttatttccgttttctaatttgtcaaaattcgcttgtctttcgaacctaaaggttccaacgggtatgaaaacattaattaaaaacggatatcaaaaactataatataaataaattaaagagataataaaaggaacaattgagtaagaatgtggttttatatctgttaaagaaatttccagctcacacttagctggacaataattatttaagatttgtttctgtatttagcttcatacatctattttaatatttcttaatacacagatatatattttaatatatatatatatatatatatatatatatatatatatatatatatattattttcaaaattctcaaggaaaaaaaaagaaataaaaaggaaggaaaactaaatctaaagaataagaaactaatttttgtgtaaataaaaattactttaataaacttttattagttttcccttaaattcctttactttatccattggttaatatgtatttagaaaaaaatactaaataacctttatttagataaaaaaaaaaaacttga

SEQ ID NO: 67518 - DNA, 456 bp, Arabidopsis thaliana landsberg
catactgggggaccgcattaccaattgctgcgtcaaacaagagaaataaattcatgccgttatcggttgggtgtctggggcatctattgttacatcataaacattcattgacaagcttactagttactacggaacaacattttgaaaatgtgtagattaacacagggttaaacttatactagttaattataatacaggatcaaacatgacctaggatatgagtcacagtgcaggctcaaactaaattttacaaggcgacacaagttaatcccgtgtttatcgagtgtcagtccagtatgcagtattaaataaacaaaggaaagtcacaaatgatatataaggcgaaagaggatttactatttatgaagctgtgggagcctaaaagattggtcataatggatccaggatgaagtgaattagcagtgatattcacaccttgttcctgttttaagcaaa

SEQ ID NO: 67519 - DNA, 633 bp, Arabidopsis thaliana landsberg
gagcttgcttcgctgcctgtattcgttcgtggcggtgcgatttttcctattgagcctctggtacaaagcaccaatgaaatacctcgcgggccacttacattacgtgtctattatggaggtgcggccaataagtgtgccgggagtctttatacggatgatggcacaacttatgcttatagaaacggcgcgtttttgaggatgcggtttacctgtaatgtcgatcccgatggatttcatctgcacatctccgctcatcaagggtcgtatccggcttggtggaaggagatcagcgccgaaatctatggatggaatccgaagacgaagcaggttgttcttgatggaaggtctatgagcagagccgctttgaagtctctgccctacggaatgaatgtggtgttcgccgataacggaaagggagaagacctgcaactccgctgagcgccagatttatcttcgcatgtgcttttgtggacgcggttttttgcgcttcagggagggacgctcccgcgttgctatgtctggagcgaaggtaaggctgaagtgggcgtgtagccattgcaaaatcggggagggatgggcaagttctgtacatggtggctgcatgcatggtcggagtttcttaccaattacccg

SEQ ID NO: 67520 - DNA, 540 bp, Arabidopsis thaliana landsberg
taataccaagttaaatgaatgcaggaatcaactttgtgatgtaataaaagttacacagacacatgggacgggcaaacctgaaattggtactcccaagtttgagaacgcacagcgaactgcagacagaaatatatttcagggccatgtcggtcaacttaaccacgccccagagatcaagagcacctagattcgcacaatatgctccaattgcttggatggagacgtcacttacattcctatataccacacaggaaacagaaagcgtgctcagctattaaaacaaattcctaatttctttgtaaagacaaaaacaaagtcagaaaatccagtcaacatgcaggaaatttgaagaaaaacagacagaaatggcttaaacccaatggggaacaaagatcttagacaatatatgcaaaaagctattagtggacttactcgcatcttgcaagagaaagaccaagcaacttagatccgcaaacattgagaaacgtgacaacaaaagcatcatcaacactttcatttcccgcaattgaaagtattgga

SEQ ID NO: 67521 - DNA, 338 bp, Arabidopsis thaliana landsberg
ctagggtcgcctctgtaactggataactagcactaaaccgctttacatggtatggtttgggttgatgaccctaccttagaccgactttgttttattatccttcattgtgtctcagaatattgaggatcggaacctgtttggactttttacgacaattattcgtgcctattcctacttctggctatgatgatttacccactgaactgatcgtgtaatggttcaacgcgcctataactaattgttacactttctgtgtactgtattggcggagggactagtccgctgggatcgcctgatgctgtgctttactcccgtgcactgccactgtgttcttgact

SEQ ID NO: 67522 - DNA, 831 bp, Arabidopsis thaliana landsberg
gaatcaatcatcatattgggtttgtttatattactaaagcaaaaactttggtaatataaaccatccgtcaattattcttgtgttaattcgaaaaacttatgcgtggtaattgtgcactgcgcatgtccttagcttgtctggctctttatttagaaggcaatcagttgaattttaagatctgatgaataattttgttttcttatgctcagaaactggatgacgctgcagtgcgtaaggtgttcttgaagtccctggaaaactacatcaagtggtgtgattacctttgtattcaacctgcgtggagcaagtaaattatcccctctcccttctctatttttcctgctaccactcttgcatactcactccgacatttcgtaagatgcagtttagaagccatcaatggagataagaaactgctattcctctctttgtacttcctgatttggggagaagctgccaacatacggtttcttccagaatgtttgtgctacatattccaccatgtaagtttatgctgactgtttatttttctccatattctaacaggtgttaagatgaatgaaatctcctaagtacttaccgctctgacttgctactggttcattttcatcataatatgccgtttgtttggtcttttgcgctgatactgattattttgtacagatggttagagaaatggatgagatcttacgccagcaggttgctcgcccagctgagagttgtatgccagtcgatagtcgtggctctgatgatggtgtatcattccttgatcatgtcattgctccgctgtatggagtggtttcagcggactgtcctctgtaatattctttc

SEQ ID NO: 67523 - DNA, 592 bp, Arabidopsis thaliana landsberg
agaaagcttacatagcatatgtataagcatgcaggtaggtggagagatagtaaaatgatgcatcgtggatataccatggagatctgtgattggaatatatgaactattctttcaatgaaactctgttccagcgcatttcgggtacgagacttaaccttattatgcagagtgcattcaagaaatcataaattaatgttagttaatttcacaagccgagcaatattgacacaatgctggacttgcctgaatatcctatatgctcgtgaggctggacaacaattatggccgcagaataagaccgtggcgcttgtggagaactgaccacaatactatataatatgttgacagctgagtaaccaatatcagctagactgtgcagcctctgcagttgaaagcataattatattaagctatgaatgagaaagaagcatatgtgttatcctgtgctatcaagccacacttacaggcgttttacgagaatcaactgcatctacaggtcttataattgcacggaagatacaaaacaaaaaaggtgcgggttccttgatggtaaaaccattattgttgatactaaagtacacctggaagaccg

SEQ ID NO: 67524 - DNA, 448 bp, Arabidopsis thaliana landsberg
actgggaaaaaatataaagaaaattatgagagcactttaaactttatccattggccaaatcaataactggggcatgggagatgaatagctgatacacgacaacggtggcaactctacaatacaaagatcggtctagtagcatgtgtgactgtcttggaagaagttgcgtcccccccaagcaagttcaaaagatcaccgggagaggagatttagggcatatatccaaatgttgtagaggcttttagcccatcaaagaaaaaaaaaacattatacgcataatccaatatttcaaatcgcttagaaactttagataatatagatacatgattgtgatatgacatgtcccgtttacatttatatgggcccatgaatttattttgtaatggcccacttataaaagggcctactttgcgatgacagcccatacatatcagagagtattaaaaac

SEQ ID NO: 67525 - DNA, 625 bp, Arabidopsis thaliana landsberg
ttgtttgggtttgcggctttgattctcttcttctttttgttcgtgcgcgttattgagaggctactcgggtgcttggttagaatcgccgccggtagagccgacctcggaagtctcagagatagcaaccatcgccgtgtgagtgtgacgttagcagcaacgaattatctaactgaaagtgagaatgaatgtgatgatagttgaaaaaaatgctcgtatttataataacgaagaacgatgtcgtatcgatttgctaaaatgcgcctttaaggcccatgaattgagtaatttatttatttatccaaaaaataaaaataaaataagaattgaaagaaattagaaagacgatgatggagaaaattatggagtatctgcaattgagcgatgaggtggttgacgacggtgaggcaccgcgagttgaagaatttttaggtgaagggaaaagcttctacgagaattttagtctcagaggaatccgagtcaaccgagtcgaaccgggtttcatttcctgctctttcaaggttcctcttcgtttgacggtaagtctttctctcaatcctctaagccccttctattttgattaattgtcgaattagcgtgataggtttttggaaataagctaatttga

SEQ ID NO: 67526 - DNA, 1260 bp, Arabidopsis thaliana landsberg
tcaaaaactcacacgacatcggatttatttatcctgtgactagatgtacttggatcatgtaactggagaaatcctacacatgagtgtgctcacaggcgtttttatttcttgttctggctgttctctacttcattcttttagctctagctcctgttggttgcttctgacctgttttccttctgatttttcttgttgtagactcgagtcaacaaaaggaacatatgcagcggaatggaccaaatgggagaaacaactacgagatactctagttgcaaattctgagtatctcagttctattcaggtaaaaaattcctttgtcattgatggctcatgaaaagcaagaaatctgcgattgagttttaaactgcttcaatgttccttcagtacatggtaaaagagtataagaagaaggatgtacatatgatgtctttgttttctggtttgcaactttcaggttccatttgagtctatggttcatcaagtgcgagaagagctaaaaacaatagcgaagggtgattacaagccaccaagttcggagaaaagaaaacacgggtctattgttttcgctgccatcaacttgcctgctactcaagttcacagtcttcttgaataggtaaccaaccaatttcttatactatcatataaaaaaacaaaaggaatattgagacaagaactcttcaactgccgaaaactaaaggttaagtatgggctttgttattaattaatagatgttattcttatcagttggctgcagcaaacccaacaatgagatcttttctagagggaaagaaaaagagcatacaggaaaaacttgaacggtctcacgtgacgctcgcccacaagagaagccatggcgtagcaactgtagccagctatagtcagcacttgaacagagaggtacccgtagagctcaccgagctcatctacaacgacaagatggctgctctaacagcccatgttggatctgtggacggagagaccgtagtctccaagaacgaatggccacatgttacattgtggacagcggaaggcgttactgcgaaagaggccaacacgttacctcagctttacttagaaggaaaggcgagccgcttggtgatagatcctccggtgtcaatctcaggtcctctggagtttttctgaatacttgattaaacatggaagtttctctcttgagggaggttgctcgtggaatgggacacatatggttgttataataaaccatttccattgtcatgagattttgaggttaatatatac

SEQ ID NO: 67527 - DNA, 595 bp, Arabidopsis thaliana landsberg
tgatgtagcaaacttagaacaaggaaactcaaccggcaaagcgaaaacaccttctaaaaccctttaaagacctctaacatcccaatctccacttttatcccatacaaacactcaaatactacagtgaaagtgagaacttttgccgaacggtagaggctaatctcttccttgcctcgccattcggtttcatgatgaaacttaacggtatcacagagcttaggtattaaggactctaacccaatgtagctaagactattagctacaatccctctgaggacccgatgcttctcgccttgtttagccatgatgcagttcatgcccattagttgaacagaagatgaaggccacgagctcaccaccaagctaaactcgttggataatatgagcctattggcttcagctccattgactactattgttggtgatcccatgattcttgtcttgaagatgttcccatgtttgatgatccttggatttacaaaatcctcaaaaactctgttgcttttctgagctttgtagaaatccattgttttaccaatccatggaagccccatttctccaggaagaagcttctttttcttctgaatcttctttg

SEQ ID NO: 67528 - DNA, 721 bp, Arabidopsis thaliana landsberg
atttggatacgataaatgtcaatataatacagttgggatctgatattttgtatagtttaaaaattcgtttaatctatatattaatatttcttaattatataaataatctatcaatgtaagatattttccttgggaatttaggagaatatgtgtttggacagtttcattcaagtattattaatgtttttgacactcaatttttttcatttttagctaaattaaatccttattaagagaataacaaatatgtcgagtatttttttgtcgtctttctatgatatattagtttaaatagtttatattgaaattctttattaacaatcaagtgttccaaatggcataaataatgaaaatagtttagttgacatatgatatggtacaattgtttctaaatttttagcagtagatggtataaattaacggttaaatggttaacagtttaacaccatatgtttacatgaatagaatggcattagttatctattttaacctacaacttcaatcatagaaggaaattaatagttggcacacctactaaaatctaccattgtaaacttttgtttttgtctattcatatttctccttcgttaaaagaaatacataatagagtttcgatcttcaaatggttatttgcctcaattgaataagcgggccataattatacataccaccacttaatatttacgtaactatattaagatatttttctagaaacgaaaaa

SEQ ID NO: 67529 - DNA, 604 bp, Arabidopsis thaliana landsberg
accctcgaaataacatcagtaaaaatggatagcaacataacagataaataaaaaccgaattttaattttaatccagggtaagttaatatgaaacaaatgcattagatcaaaaacttatttattagtgtagcaacttaaacagaaataataagtctcaaagttaattttttttttaataccaaaaattatatcttttatattttgaatgaccacgaatatctttttcacttgatcgataaaattacatcatacagttcatcttttctaaatagaaacaaatctaaaacatggttaacaaaacaaacgggttaaatgtgaataaacaaaaagtattgggtgcaaaacataaaaagacaaaaataaaagactgagtccaaaatttcaaaaagtcaaagccaccttcctaacttgtctgcatagacgaagaagacaaagaagatgagattcgatcacacaagaaaaattacaattcttcttaatcctcattattatatatataaataaacttcaatctaagcttcttcgaaatttctcttttggtcaatggtattctttttagatctcgaacaagacaaaatcttcagaagaaaaaaccaaatttcat

SEQ ID NO: 67530 - DNA, 1661 bp, Arabidopsis thaliana landsberg
tattaattacttaactcaaccttatagttattactattagacatcttcctctttcttctatcaatgcgtccacataatgtactcggttattatagtccaattttttttattttttcttaaagtttgttttgatcatattccttagtttacatttacggttttgataacgtggttctcatataatgacttgaggattttactattatatacctaacaggctaatacatattagtgtattactcagttaatttatgatagcacatgtgatgtggggtcacaatctccaatgttatagtcatagtgcattacagttcatatctttctctatctccccatcgacaccatcttcttcttcatgcagagacatctctttctcggcttttaacccaagattccattactcaacccttatagaatctgtgccctctctgcttgttttgcatttcagtgaacaatagaggaaactgaaaatgaattatcatcctctttctcccatgaaaatttattatacatcttcctctttctcgtctcattacctatataaaacctcttctagatatctaaaatctaaacctaaactcaaacacaaacaacatacatagtcatcgtgaagaagagtgctctcttggagtatatcatcgtgaggactcctactgacgtctcccagaatatgacttcggagacggtctacactgtgcagatgcctcatgatggcggcggtggagccagcagctccaagtcaaccaaaaaatagaaaactagctactgtattaagtattatgttatgtaataaactatgtcgtttgactctcttcgatcggtttgttgtgtgactttttttttctgctttgttaacttattgtgagactgttttctaatttaatatctattatgctaagttatatattcttgtttttttttttctctttctaatatgtttttgtctaggaagtgtgttcttgccttcaagatgaggtggagcatgaagcggtgaccacggctacgcgacacggcgaactcaaaacaattttcctttttagtttcttacacttttctttaaattttaaatcccataatttgtttgcttgtttcatttctctcagtgtttttaaatattcaagttactctttaaagaataaaaaaatatatatatatatatatatactgcataaagaatggggaaactaggagtagtgaacaagagagaaaaagacattttggggaaaaaaaacatgaagctcagagtcgaaacattaataacaagacgtgtaggcgtctagcatcaacgcttaccaatcttatcggggtcgggctcgcttgtctaatgtggttcacttggtttatctatgtggattatatttattaatcaatgagtttctgtacgtgtaaaaaagtttttgtcgaacaacctaagcaatgtatgaattgtgtggttagtttttaagtcacgtgaattatattgtatacttgttttttcttttattttggtatacttgtttccttgtcaacaaatttatcgtaggttttaccagtggtccacgatagactgaatattgcgtaataaattaaatatagaaagtgaagaaaaaatatagaaaattggaggattcgattagtctgttttaaccaaaaaaggaaagaggaagaatgctatgtaaacc

SEQ ID NO: 67531 - DNA, 504 bp, Arabidopsis thaliana landsberg
caaaaaaactcaaacaatcaaaaggaaagtacacaaacccaaataagaagaaattgaccaaaaagagagacgtaaagaaagtaaaatacaaaaaaagctgcaataaaagagaaaggcacccaaataccaaaaatgaaaacataaagagtgcgtatttcatagtgaaaaatcacacaaaagaacaaaaagacagtagaaaaaaatgcatgcatatctcaaagcccaaagagggaaagctaacgtgacaaacaaacacaacgagtaaaaccaatgtatcgactgagccaggattggaatcaaaaaacaaaaattgacaccaaagcaagcaagaaaacaaaaaaaccccttccacaagatcattacaacaaactaaagatgcaaaaaaaaaatcacccaatcatccaacaagaaagagatgatagatataaaggaaggaggttcaataacaaaaaaaaaaacaaactcgaggagaaaaaaggaatagagaaaaaaaaaaaaaaggcc

SEQ ID NO: 67532 - DNA, 2361 bp, Arabidopsis thaliana landsberg
tgggctcaggtaatctgagcttgtcgagtcgttcataggcaccaccaaaaggcctattggtcctgcttactaaggtaaagtgatacgtaatgggactaaattaatagatctgagacacatggatacgtggctgccaatgtttgccctagcaatgtaagatgccgccacccactatgatcagctccaaaaatacattcatcgtcgctacaaccatcttatgcctctccatggccatattatccgaaggtcaagctaacccttttctattgcaactcgatcggtgggaaatgttgctaccgagcatcggtatatccgccatgcacatgcaactcctccacaacggcatggttataatgttcgaccgtaccgatttcggtacctcaaatgtttctctacccggaggcatatgtcgttacgaccctactgacaccgcagaaaagttcgattgcagcgcacactcagttctctacgatgttgtctccaacacataccgtcctttgaatgtccaaacagatacttggtgttcttctggtgcggttcttcccaacggaacattggttcaaaccggtggatacaacgatggtgagcgtgctgctcgaatgtttagcccttgtggttatagtgaaacatgtgattggattgagtttcctcagtatctatcccaacgtagatggtatgccaccaaccaaatattacccgatggacggatcattgtggtcggaggaagaagacagttcaactatgaactttttccccgacatgattctcggtctagaagctcaagacttgagtttcttagagaaacttcagatggaagtaacgagaacaacttatatccgttcatacatcttttacctgatggaaacttatttgtcttcgctaacacaagatccattgtgttcgattacaaaaagaaccgaatcgtgaaagagtttccagagattccaggtggtgatccaaggaactatccaagcagtggttcttctatactatttccattagatgataccaacgatgctaacgtagaagttgagataatggtatgtggaggctctcctaaaggcggcttctcacgtggattcacacgtgccacctccacatgcgggaggctaaaactatccgatcagagtccaagttgggaaatggaaaccatgccattgccacgtgttatgggagacatgctactcttaccaacaggtgacgtcatcatcgtaaacggagccggagctggcacggccggttgggagaaagcacgtgacccgattatccaacctgtgatatatcaaccgtttgatcatctcttcaccgttatgtccacaccatcacgtcctaggatgtaccattcctcagcgattttattaccagacggtcgggttttagttggtggaagtaatcctcacgtttattacaactttaccaacgtcgagtatccaacggatttaagcctcgaggcttattctccaccatatctatttttcacatccgacccaatacgtcccaagatattattgacaagcgacaaagtattgagttacaagagattgtttaacgtggatttctccatagctcagtttctgaccgttgatcttctctctgtgaggatagttgcaccatctttcactacacactcctttgcgatgaatcagaggatggtaatcttgaagctactctctgtgacgcgtgaccagctaacaaattcttatagagtcagtgcattgggtccatcaacggctgagattgctcctccgggatactatatgatatttctggtgcatgcaggtataccaagctcagccgcttgggtgcagattgagtgaagcttaaatagatcgattatgaatagtttgaaatgtatgttgcatgatatatataaatattcaagcaaaataaagagagaggaagagattagataatatgctgaataaattgttaacttacgatctttataaaaactggcttgaatttaacaaatagagttttgcttacataatgactgatggttcacctaactcaaaacccaagattattccttttcaaaaagaatcgatttggcaatgaatcttgaatgattctgccgtgtgtatatgtatatgcttctgcagcttctgaggtatttacttccaaagttccaactttttgttttagattttgatcagctggttttatggagacattcttgcggcaaaccataatctttagtccggtttacggcttgctctcgtctccatggatcgttgtgtagcttgaaatgcagagtttgtatgatagtagcgaagatatcatcgtgcttcagtttagagaattgaacagcccagtcttcttcattgttcataagtagctttttgtctctctgcttcaagc

SEQ ID NO: 67533 - DNA, 541 bp, Arabidopsis thaliana landsberg
tactgctcatgctgagaatgtttttaccatgagtttaaataagaactggatcatcaaagttgcctccatatagcagaaatctaagagtgcatgtttgtcaaaggaagtcaacagaggaaaacaagtgctcgagacaaaacctgaagaggagctggagaagccaataggtgcttaatgagtgtaatcaccctttcagatattttggtactggagatgagaggcttgtgagaagcagtaagcttgatcaattctagctgcacgaaagaaagaagtttctagttaagtgtttttctggaaagtaagacccaatgcatttgattcaggaacatacaagctttgatcggtacgggccaaagtctcccttcccttcaaattcatcactccagagttctaggggcccaagcgaaagagcaattccagtaggaactttttctttcttgagcatccgctggaaagatacgtccagtatagcgctcgagatgtcatcattaataagacttaaagtctttttcttttcactatcaacctggcttgaactatc

SEQ ID NO: 67534 - DNA, 481 bp, Arabidopsis thaliana landsberg
tcacaagtgctgggacgccctgcgcgccgagcgcctggacaagctggtgcgctcgggcctgctgagcgacgcctggaaactgagcgaccgcggccccacgcaggcgccctggacagacgcgaaggaaaaggcctggctgctgcgctgcatggaagtctacgcggcacaggtcgacaggatggaccagggcataggccggatcgtggccgcgctgaaggaaacaggccagttcgacaacacgctgatcatcttcctgtccgacaacggggcatgcgccgaagacatcccggagggcgtcaccgtggatgaactcgtcaaccacctgatgatcgcgaaatcccacacccgcgacggccgcccgatgcgcttcggcaacgaccccgagatcatgccggggccggaagacacgtaccagagctacggcacggcctgtgccaacctgtcgaacacaccgttccgcctgtacaagcactggatacac

SEQ ID NO: 67535 - DNA, 290 bp, Arabidopsis thaliana landsberg
  unsure (1)..(290): unsure at all n locations
actttcctcaacagatcgcgtacagatttcttgttgctattctgtggaactattctttgaatgctaatgaactgattttatcataagatggagaagtgaatatttaaaacctcatttacaataattagttaagaggctttcagtaggagtagagttgagtggtacctcccaattaattcttttgacatcaattgtttcttgacacagaccatcagtgtattgctctttggtnnnnnnnnnnnnnnnnnnnnnnnncatattttcttgtgccaagcttttacaaccgtgcg

SEQ ID NO: 67536 - DNA, 529 bp, Arabidopsis thaliana landsberg
  unsure (1)..(529): unsure at all n locations
gaaacattgcgggcgatagtcctcgtcttcacgccggaaagtgccgaatattgtgactgttcggagaatagagcgacggcaagctgggccatgctggagagcagtggccaatcgccgcagatccgatcccggcgaaaaccagaaactcgccctttgacgaaggcgaggctgatccgctttcagcgggtcggtatcggcgtctcgccgcggtaatcgtagaagccgcgttgcgtcttgcgccccagccagccggcttcgacatatttcaccagcannnnnnnnnnnnnnnnnnnnnnnnnnnnnnnnnnnnnnnnnnnnnnnnnnnnnnnnnaaagacaggtatcgaggccgatgaaannnnnnnnnnnnnnnnnnnnnnnnnnnnnnnnnnnnnnnnnnnnnnnnnnnnnnnnnnnnnnnnnnnnnnnnnnnnnnnnnnnnnnnnnnnnnnnnnnnnnnnnnnnnnnnnnggcagcaggatgcggctgacgatgaaggcggtgaaatcttccgcgacggtgatcgtctt

SEQ ID NO: 67537 - DNA, 2926 bp, Arabidopsis thaliana landsberg
  unsure (1)..(2926): unsure at all n locations
gtcatttcacaccgttttcacagttggcaaaacatcatttcttaaaccttcgagcatagactcgttttgatgcagactgacgctgtatgtctctttatgttagatgtgatatatatagataattttatttaaatggtttttcgtcaacatattccccactcttttttctcacataatattttacctctcgccgaatatactcaatttgaatgcgagggattcagatttggacaaatgccaactcaagatgtcactatttgattgtttctagatataaaccgattcagcagactctctctagatccaacataattgtcgtgaacgctaacaatttgattgtttaataactaatcaataatgttttgtgctatgattatactatgttagtcacatgttttatgttatgattatactatgtttccgtgtaatgattctactggatggcaacgactttaatagtatttatcataataagtaacgaattatacgagtcttttagatatgatgatatctcattagtattgttctaataattggtacaaagtatatggtaataaacttgaatgtttacatatcttcttcttaaaacaatatatttttctcatatacttattctcaatatctttaaactcgtatggattgccaatgcgtgatgatgttccccattatagccaccaacggaaaaccatatgtctacacgtacaaaaaaattttggttcggtttttataagattcatcttccactggttgacaaacatgctcatcaatattatacatatgtaaccaaaagacatacagtataaaataaagatatctgcgcaagagatatcattttcttgcgaggggggggacgaatattacgtttgaaagttcaaaaaagcctaaaccctataaagcctacgacactctcgaattttttaatagtattctttacaatggtggagtgtttgaaggaatatattgattttgtttatttatttttggctttattcctacacataatgcaagtaataaacatatgggggtacggttcaagtagtttagttaattcacattcaaatttggaaacatatttgaatgaacttcgcaaatagtatatttgggttcacctaatatgtgttatttatgaaaatacctaagttgtgtccaaacaagactaactatgttctgatactaacaatttagtggcaaaatcatttggaggacattatccatattcaggttcatatattttcttaaattgttgtatgtaggcatagttgtttacttgtttttgttaaaaggatttagcatgaggtctaattgtgatatgatagcgttgactccccaaaatagaactatgcaaacgcccaaataaattgtaagtctcaatctcataaaaggagaaatagggatcgatcgaacacctatagagtatacagtgcaaaccaacgtgccttggtaagtggaagcaacaagattacagagtctcctgcgtaatttaatctaagtcagtgagaatagtaacactaaaaagtgcacaaataggctcatcagtgagtcagtttatagcaaaaacagcttttgaaacctaaaaatagaatggggataactcatgaattgatgcatatgaaggtatagcttagggaatatatatgatcaaaaatccaaattttgattcaaaagctgtaactgatacaataatatgggctgacaaatgaacacaaaatcggccgacatagttaaagaaaataccttaatataataactagtagtctagtatacgtatatcatgttagtgacacttcaaataaataaaatatatatacctataattttcgttgatttagctataagcctacaacatttcgtatttactaattatatgtaacaacatctacacgactacaactataacattttgtatttactaatatgataagtgcatgagaaaatggactttatttttttgctaaattaacttggacattattctaggatcaatggtttgtgaataaaagttaatatcttacacaactcatttgaagaaattttagttataatgttagaattaatttagattgctaagataacaaactaattaatacaacaaaattatcgaacaagtcttaacaaacaaatatggttttatgtatgagttgccgcatattttcgtgcgggtgtttcagtcctaggaatacatgagatctatacttaaaaaaaaacgccatttcaagcaaaacgttaggtgtttatacactaccagttaagtaaaataaaatctgtcgatacgtcgtctgttgcagcattagaagtagtttgtccaaatggacaattcatacaacagtgaaatattcgtttgtatctaaccccactggataaaaacattagagaaaatcttttctttcaaacagtaaactttcttgaatttggtttaactgtaaaacccaccgcctgaacctccaccaccaccataaacaacattaggtgggtcgagaataggcgccgaggcagaaactccgttatggttattggctgaaccacctaaatgcaaatccgnnnnnnnnnnnnnnnnnnnnnnnnnnncaagcccttgatcgtacaagaatcctttaaagacatggccgccgattttcaccaccgcttggtacgcgtactcatcatccccgtcctccactgccgttactctaacacacttgaacaccgccgctgccctaacctgccctggccatgcttcccttgaccctcctccgtcttgcatacataaaacataattatgaatcattatcaccatatcatgatattaagagtgtttattattatcaaatacaatgtttttaatacggataaactaatcggaaccaaaccgaaataagagactcttaaactgactataattctatatggttaaaacaattcccatttttccatagccaacaaccaaact

SEQ ID NO: 67538 - DNA, 2456 bp, Arabidopsis thaliana landsberg
  unsure (1)..(2456): unsure at all n locations
tagttatcgttactataagaaaagtttggtattctgttattttaataggactagatatataagaattatataatgcaaaacgtgttgcgatcttttcaaagattcatatttatccaaaaaggagaaatttatctacctatagaaataatgcaaatcagatattttaggcatagaaaatcttaattttgagataatgataaatcatgattacacaaggaaaaccagaatccgaatctatctatatgagtttgaaacaaaccaaatcggtttacatatatataaagttagattcaggcaaaacaaaaccttgaatctgatggggaaccagtgaggactacaatggcctcatctcaagatcagagctatggtgtgaaaccggaacagagttgaggtggtgttggtctctgtcaccagaagcactcatctcttgaaccggtggtgggttgataacagtcataggcatcacaaagttatccgaaagacgattcttcatctcacggtgctcttgacaaaccgcacaaaagtgaaggcaacaatgcaccatacatggatcacatggagcattctgtttccatcaaaaccaaaaccaaaaaacacattttcagattcttttttcgcagttttatcgattttagatgttaatgaagactttgcttacctgaagatgatatttcctttgtagagtttgacggacatttccagtgtatatcccacacatccaccaaacaaacaacaaaccttcccatataagaaaagaagtatgcggatcaataccgggaacacaagcaagcatcgatgcagcagtaagaccgccttctactacaatggaatggcaaatacatgctttcttccacgaggtttcctcatcactcagagtttcatagacacgtccaaatagaacacttgggcagaaaagtcccagccaaactgtaaagagcgtataaagacatgagaagcgaatcaaaaccgaaagatcaatcacttgatgatggatttattatacagatctgtggaaacgtttagatagaacttacaactattcatgtcctcagtgcagccgaatattccggtagtccagggctcatcagcaggagcttcaaaattctcaggcaaaggttggccacactcattgcatttgtgaacagctagctgcggaggagtttacacagaatcagaaaatttcatagatcgaattgggaaatctagagactctgatctgagagtcacaaatcagtcaaattgacacaaccacaaatcaaaattgatcatttgaagaagaagaatcacggatctaattcacaaatcactgacattttcgattgaatcgtgaacaggtgaaatcgaaaattgggaagcgtaattgtgaaattagatcagtagaggaaaagagacagacatacatgagaaacttcaatgggctgattgagttcaccgggatgaatctcatcgaccggagcttgttccttcgtcaacttcacgtatctcgacggtgctcctccgtccgacatctgaaatccaaaattagatcagccaaaattgaattgaaaaatggagaaaaagagatctttacgaaccatatgaaggattggagaaaccgaagagtgtcctcaaaggttcgtcgtcttcactattttttttttttttggttttatgacattgaaacttattaaagggctgtttctgtgctttaaaccaaactgttacctaaacgagtttaagactaatttggtcttcttctcttccgttgactcactcaactcattaattaagctacgcattatgtaaaacgatgacgtttaactgcagaagaaatttccataattaaaatttgttgacttctttcacattgttttccgatttgatagtgttagccggagttaaattggtatggtaagaaattcaaattttagttaacctcatgtcattttaggcacgattcaaaattatgtgtaagtacgccaaacaactatttttcgttttatccctccacgtacaagtggttctgtttgcagatttgatggttttggccagatttgaactgttagtgtaagaaattcaattttagttaaatgatttaaagtttttttttgtatatatatgccaaaacgataaagtttcattgaataaatggttgttaacccgctgatcaatgcattagaaacttgggctacaaaaaacgtgaacttttttaagatcccaacgaaaccgtcaaagattatcattggtatccaactattgcatgctcttcatatccaactattgcacgctcttcaactctcatcaacaacttttattttgacaaatgttgcgtcattcttacaagtttgccatataaaagaagcttatctatagctgcaaaccaggagccccgaaacaatggtttcatatgctgagctcttgtttgaatcaaatagactgtagaggagaaatcgcanaaaaacanaaaaaaaaaaaaa

SEQ ID NO: 67539 - DNA, 496 bp, Arabidopsis thaliana landsberg
aaaaaaagataaaccaaaagcatgaatcaaagggcagcgtacaaacaaacggcgctcgcaaagagaatcaccactccaacgaaacgcgaaacaaacgaatgcaaccgtcagaaacacgacacaaagaaacagaaatgcccaagaaaagaaaaaagagtaaaagtgaaaggagaaggccaatcacgcgctctcggccatctaagtagctaaaacatgcgaaaaagcccaacagagaggggaaaaggccacaggatacgggcacacacgctaaaacgcgctacaggtgcgacagggaatgactctagcggtcaaaaagacaaaaggagcgtaaactgacaaaccatgaatacagaataatgaaatagaaccatatgtacgacaataatacataaacatgcaggaaaaaaagccatcactgacaaacgaaattgcaaggaaggaaaaaagatcaaaaaaggcagaaccaaaaagcaacacaaaaaaaaaaaaggaaagc

SEQ ID NO: 67540 - DNA, 116 bp, Arabidopsis thaliana landsberg
tgagggttcaggatctgggatccttttctatcagcataggaagggctgctgcacaaaatgtacttattagtatttgccccacagatcctatatctatctatatgaaggacaaatca

SEQ ID NO: 67541 - DNA, 693 bp, Arabidopsis thaliana landsberg
attttaaatttacacactataatgatcgcctaaatgttatttggtcgactttcttatggatacatctaattttttatcaactatataaaccgtttgtcaacgagtaaatacaatttgtgtatgtgagctaactggaaattgagagacggagattccataaatgtggttacatatatgtcgggattttccataaacactacttcccctatatcaaaatataagatgttttagaaaaattttaaaataatatatactttttaccaatttttatgcaaattttaaatattttgatattttatgaccatttgtattatgcagcctttatatcattggctgaatttttttgaattaaattatttaatagttcttttcaaaaacaatttatttttttcaagtgtatgcattttagctaaaacatcctaccttttaatacaaaggtagtatttttttgttattagttagaatgtaaaaactcacaatataatgatcgcaaatatgattaaatttaacgtatcattaggctattatagtatggctggtgaaaaaaatattttatttagtaaactattatacccactacaaacagtcaaacaatgttaatattatttaattagttaattgggtttttttggtacagaaaagacaccaaattggaggaataatttagttttcttacctacctatattaaatat

SEQ ID NO: 67542 - DNA, 275 bp, Arabidopsis thaliana landsberg
gcataatgacatctgttgctaaccacaagaataattcgttggactataacttaaacttataatatatcaactgaattgcctacaatttgagaatacgccttttcaaaaagttttagaattttataaaaatttctccaccataatattactttaataaaagcttgttattaaaatgatatattaacaaaaaaaagaggtaggcaaagtgctttattaaaattaatgttcctatggtaatataaaccaaaatgggtattatttacttatgaagatct

SEQ ID NO: 67543 - DNA, 144 bp, Arabidopsis thaliana landsberg
caactctctactcgctgcctctctattctataagctgtgtctacttcatattcagaacattgggagatttctaacacacagaagtggaaaacttttatatcaagatttaaacgttccatcattgaatttttttctttccccctt

SEQ ID NO: 67544 - DNA, 1155 bp, Arabidopsis thaliana landsberg
tgaaagattgtgcaatctagttttttccccattataacatagccttaagcatgaagccaaagcttcgtcaacaggttaaaaagattgggtgtttggtaaaaaaagttaaggaatttaaagagtgattgatacacatagatggtgaatataccaattaatagaaaaaaaggaggaaagagtaaattacaagttcccggcagtttcagacaaactcacgtgacgcaaactttaaagggtttgactagagccacataagctgtctggtccgaaccagatatgatagtgaagaacgagccattaaaccacaccagtctctctcacgtgccaactaagtaaaattgggtgtgcttaataaagtgtctgttataaatcgctttgcttccttttattttgcctctcttctactttcctctttcctttttagggatttcactttcctcttctctctctctctctctctctctctctgcctaacctcgatttctctcgatcgctcttcaccatggatctacgatcatgtggtccttcttgaagttttttgatctcttcttcttacgggtttttacttcgtttgattttcctggtaaagttgcttttttttttatcttctcttgaggtatatactttttttttgttttgagttcatgttcgtgttctcttcactgtagctagggtttgttgatttctccacaatatagctcaaaatttctgctatgaccttgaattttggtcgtgaagtttgtttatgtgatggattaagctgggatttcatagaatcactgaatcagcttgcttgtttctactctcatttcgtcatctactcttctcttaatctgtatttgtattatttcagctaatttttttataagtacgtctgattagttcttgaggttgaattatctttgtgactaaaaaaatagtgtgaatttttcttgaatggattcatttttttgggggtttcttgttcatttgtctttacttgccttgtaggccattttcttacatagttgtccactatgacttgtacggtcttgttacagagctaatttgtttttatctttaacgagtgatattgtcattggatagttttgactgatctttgtttatctgttcttgatgattttttttttgtagttgtttgttgttcaaggatcg

SEQ ID NO: 67545 - DNA, 540 bp, Arabidopsis thaliana landsberg
acggccggcgcccatgcccacatgctggagcttgacttggatgtcatcgttaggtatgtatcatgccgacgagagatgcgtggaagctacggacacggacgatgttgttctcagcagcccaggtctctaccaagcttcgaaccgctgcactggagtacatgccgtgcgtgatggttccaggcagggcagcatagctcgcgaagacgcgtgagacgtggattggattgtagtcaccggagacgcgcgcataggtctcattggaggcgggcgcacgaaggaggagaggagtctggccgctgagaggaatgggattctcagaaattgacgggctgcgcgataggagtgccgaggcgtacgagatagtcgatgaccgggtttccgtgtgactccccagcctcgtagtcgacgctggcaacctgtatcacttctttggtggagagctctaggaggacttgaccttgcgtctcgacgctgctgaatacgctgcggtacttgaaccggacgacgctttgcagattgtatgtcatggtctgaccgagc

SEQ ID NO: 67546 - DNA, 1376 bp, Arabidopsis thaliana landsberg
cggcgtgcccttgatgccagaggccaggttttctttcttctacctctcttctaatcttctctctctttcttctaccactttcttgttgttatgcttggttagttacatgactacagtggcaaacatttccagattttagataggatgccttatctttgttgtgtctttgtattaaatctgaattgaattgctaggatttcatttgtgaatataacttgtctactctaggttcttggtagactagcttcccagatatcaaccgtgcttcaagccaaagataagcctacttattgtcctaaccgcgacgatggcgatatttgtattgttgtcaatgctaaggaaatcggcttcacaggaagaaagctcactgacaaattctaccgttggcatactgggcaagttgcactctttcttttaatgctcctgtgaatcttcagctactacaagtgttttatcatatcttttagtatctcccattttcatctactttatttaatctctctttgtaggtacatcggacacctgaaggaacggagtctgaaagatcagatggccaaagatcccacagaggtcattcgtaaggctgtctggcgcatgcttccaagtaacaatttacgtgatgtgagtacactataactgaaacattttctaatcacctgaatcctcagtcttttagatccctgactttctggctacagatattaccccacaccttggctttactcttacttgttgatatccatcatgagttgtgtggaatgagattcttggtgtcctatgtctagaaaggttgtctctcctcacaaatcggtcttatcgaatgagatgatatacccttgttttgaaaatcatttaggtttggaaggaagattgttctgaactcttggttttaccattttgttatttgtcctttatctttggtgggaatagtggcttgtttgtactgatacattctcgcttctcagctcctaaatgaattgctcgcatagtttaggatgtgttgcttaaaacaagaatgtgctgaggttttgttgctttgtgtgggtataggacagggatcggaagctgaggatatttgaaggcggtgagcatccttttggggacaagccacttgagccatttgtgatgccgcctcgtagagttagagagatgcgaccgcgcgcaaggcgagcaatgatccgtgcgcagaagaaggcagagcaggcagaaaatgagggaacagaggtaaagaaaggaaagaagaggaccctctctgaagtacctgcgtagaggaattacttcagaggaaagctagtgatgtgactgtctttttatttgtaagcaaagttcataatgcagacgtggacaagctcccaaggctttcttgtttctcagac

SEQ ID NO: 67547 - DNA, 637 bp, Arabidopsis thaliana landsberg
  unsure (1)..(637): unsure at all n locations
taaaataaaaaaatgtttggggcatgttctatgcatactgaaaatcttgtttatgttatgacaacttcccattttcttcttttttttttaggtaagaatatgactttctatttcaattcaaaaaaatagttaccatagatttgtatttatactatactctaatgttattgatataagattcagaacattaattttttatttttaatacagtcacaatgattatgtcatttaaattagtaaaatttgatccataacaaaaaaacttgataacacaggataacttgattgtttagattcaaactcaaacaccaaatgtccttaaagtagaatttaggaaaaatgattagcaactacagaaaaaagacgccatcacatatgaaaactttaaaagtatcttattagctatacaaaatattgtcaccgtatacgcacatttctaaacaaatataagttatgttacaaaacactataatcattatatttacttcttttttttctcgaaacctattatacttactatttatgtgtaatgggtgccaaaattcagaattaaccgaggttgactagtgttgataaaaaatgttattatttttaaacaccaaannnattatatatatatatatatatatatatatat

SEQ ID NO: 67548 - DNA, 1142 bp, Arabidopsis thaliana landsberg
ctagacaatccacattcaccggcggaaactaacctagactagtttccaacatcaaaagtccaatttttgtttcgtttaaatagatggcgcaaacgtacaactaagattagatttaagtatttaactctacacctaggttgagccaaacgtcgacaattgttgatatacacaactatcgttgatatttgattagatgagttcgtgaacggctacacatccattagcttctatttaaaccatttgttatgaaacaatgtttgacaactcaaatgaaaaagatgaacaatatttctataccaagtaccaagtgaaactttttgtgtttacatcaggtatgtaatcattttccgtgttcctttgttaaaaaccgtccatccttgattcttctgataatggtaaaactatccgtttgtaaattgttttattgtatttttatctattgtaaaaaaactaattaaattttaaatttgctatgcataaacaatactgtatatacattttttataataagattagagaattatagtaccatcttgtaacaatgatgtaataagagacgaaaaaaaaataactaactgatcattaacatccataaataaatagttgctgccataaaccaaacacattgtgcttatcaaaaagaagaaatttgtacttaatgaaacattcattattagcaaagtgtaaaaccaaagaaaaacaaactttatttctcattttattagtaaaagtgaagaagagtaaagaaaaagagagactgagatgaggctgagagcctgagtctgcgggtggagagagagagaaagaaagcctctttacacgtgatttttaaaagagaccaaaaccccaaaagcaaacctcttttgcatgcgtccttaaaagacataaatttctctcaaaattttctacatcacaaaatcaatctttttctcttcttcttcgtcttcatcatcatcatcatcatcttcctctttctcttcctactgagatattttctccacattgagaggaaagctatcttctctagcgtcactcttcttcttcattggtcggtgagtgttttattttttttactgtatttctttttaatatagcggacgggtcattttctctccgtagcaataaattcacttatatatata

SEQ ID NO: 67549 - DNA, 1756 bp, Arabidopsis thaliana landsberg
atggttcaaactggtaaaagagcggaaattgaagctctgtattgtcatggttataattatctcggtaaatatatagctaccaagatcgtgcaaggcaaatacatataacacttaaaacaccaacatgtaaggtcttccaccaataaagatgcgtttgctttatattggttccaaatataagagagtaacttattagggtgaagttttatgcaaactctaatagaatgtaaaaatagattacaatcaaatcaaaattttccaaactgaagtatgatctttgtttacatatggcattgtgatgatttagtaacaaaacttgtcctaatctccactttcctatgcaggtataatgataattccaaccaaaaattctcgctcacttcttgcttgatacaagactaatcttctttccctccacaacaaacttgccacttcgctccagctgcaacaaggacgttagaacaatatcagtaagaatgacaaactttggaactttgtgtagaatatgagaatcccactttaaaatgattatgtttactaacttcactatcacacttctttaatctcaaatataatgaatttcatacgcttaatgtagattctatacgaagatttggcataaagattagctaagattgcattaccttaagtttcaagtaagcaatagcatcttttcttgaagaaaactctgaaagaactgatggtgcttgttcatcgatcagagattttagctgtttcagcttcatgaatccacctttaccagcatcctaagaatgtttttgcacatatacatataagtcgatatgagtggtgggatgttttagaagaatacaatgacagttcaaaataagttgacaacgaacctttttaacaatctgcttgcacaggttctttaacttgattttgggttcaatgatttcatcgtgcttccttttcgcgggaagagaactttcaattacagagtccttgtcatcatcatctgcttcactctcgtcttcatcttcctcttcgtcttcttcgtcatcatcatcatcatcatcactgttatcaaaagaggttttcttcccttcgtaacgaacaccagctattttctttggccggtctttgatacccagtccttgttttcccgctgtggctttatcctacagacattccaaaacgtcaatatattattagatcccaacctcttttccaagaacagcctgcaaagaacatacctgaaccatgttgtaaagattctcttgatcattctcactaaacatttttctctcgctagcttttaatttctttttgcccgacttggcccccagaagaccacccgagacaaacccggatttaaatccccaccagttcgaagaaggttcttcaattttctgttctgttcagtccaaaagatccatacattttcagttcaaaaaaaagagcagaaagtcacaatttcaagatgcaaggacaaactaatcacctttaatactagcatcttggtcctcagatataatttcaatatccatagaatcggctatgtcacaaactgcaggagaaggatcctcagttcgcttaacctacaaaacagtaaaataacgtgcctaagtcggactatcactttcataatgagatttgtttacataatggtgatagcagagaaaattctaacaacatgcacaagttcacagtacatgtagaagttatgatccattctaatcaacatgaatcttgatcatgagcggataaaagacaggacagatactgttttgaa

SEQ ID NO: 67550 - DNA, 2176 bp, Arabidopsis thaliana landsberg
cactcgcagcttttaatgcttttctggaacatagagttgaaaagttaaaactggaagatcaatctggctcttcgatacatggacaaagaaatatgcagtcagatgttccgatgctacttgcacctctgacgcagagtgatgagtcacttctttcatctgtacgtgccggtcaccttaccattactagcttaaatttcattcgacatatctgcattgcttttatgctgtctatttatgtctgcatgactgttgctttaccttcaggtcataccacttgctatcacacactttggggattctgtgttggtggcttcgtgtgccttccttcttgagctttgtggtttatctgctagcatgcttcggatagacgttgcatccttgagaagaatatcatccttctataaatcaaatggtaatgcggatatggcacatcagaaatcgctgaagcgctcaatgtttcatagtgtatctagtgaagatgatctaatggggtcactagctagggcccttgctaacgaatacgcttatcctgatatttcaagtgtccctaagcaaaaacagaatccaagtatttctggtagtcaacccggtcttccgctaatgcttgttcttcatcatttggaacaagctagtcttccagagattggagtaggtagaaaaacaagtggatactggctgttaacaggtgatggtgatgggtctgaactgcggtctcaacagacatctgctagcttgcattggagtttagttactcttttttgtcagatgcataagattcctctgagcaccaaatatcttgccatgctagcaagagacaatgattgggtatgcttcatgataattcttcttaccttttcgtttcttacccttgagctattacttgtcctaatatacgtaaatatcaggttggatttttatctgaggcgcagcttggaggatacccatttgatacagtgctcaatgtggtacgtctctcactccttactggtttcagaaatcacaaacagcaacttaatgtgctatgttacaattatatgacacattttcatctatcaggcatcgaaggagtttggtgatcaacgtttaaaagctcacatactgactgttttgagatatgccaactcaaaaaagaaagccaccacatcgttctcagatgacccaagcagaggactttcatgttccccctcagagggtggagcttatgtctctgctgaactctttcgtgttttggcatactctgagaagctaaagaatcctggggaataccttttgtcaaaagctaaggaattctcgtggtctattttggctctcatagcatcatgctttccggatgtttctcctttatcatgcctaacaatttggttggaaattaccgcagccaggtgtgacaaaatttaatgaaattcaattgggttgggtgtaatagtagtaatttactatcttaatgcaagtctatataacattgggcgttttaaactctttttcttgcatgttttctggaataaaaagatgcataacttttttcttagctctaacaaagatcatgcttttcagggaaacgtcgtctatcaaggtgaacgatataacgactaaaatagctgaaaatataggagcagctgttgtatctacaaattccttgccgacggatgctagaggtgtccagtttcattacaataggaggaatcccaaacggagacgacttactgcacatacatctgtggatttattggcttcagccaatagtttaaacatctctgctggtaaaacattttgttctcatagaacagaagctgcagaagatgaaaaagcggaagatagcagtgttattgatgattcgtctgatgagcatgcgtctctatcaaaaatggtcgcagtgctttgtgaacaacgcttgtttcttcctctgctaaaagcttttgacttgttcctcccgtcctgctctctactgccatttttccgtgctcttcaggtttgtcttacattttaacccactatttgccttctctgttttctgttcccggccttgattgtctgtttaaaataacttttacacgatacatgttcatgggtctgatgctgtttgataattttttcaccatgaacatctgttttctttttcatatgttttgctgtgggagaaaaactgatgatgcaattctgcaaaaggtctagacta

SEQ ID NO: 67551 - DNA, 2175 bp, Arabidopsis thaliana landsberg
  unsure (1)..(2175): unsure at all n locations
ggcatacttctcgaaagtaataaaccagatgagaggcttatggcgtacatagaaaatgatttggggaggtttcctatcaaaattttagagaaacatgaattagttagaaaccagaacacaaagccaaattcagagcaatgtctttggaataacttatacaagcatttgaaactaaaacctatcggatgcaagaataacttggaaagcctatatatgcatattaaggaaatatgacagaaagcttaagcaagtgtaacaacaaatcaaaacaaaacaaaacactcactggtactagcaaagaagcagccactggttaagcagagcatcgcaactgcataggtagcgatacgtttcccatactttctggagagcgcaacaaccaggacagtatctgaaactgcagaaaccagtccgagaaagagtctcactgcatagaaaactctaacctatccaaaagatagacgtaaactggataagaaacatgcagttatatctataccgattagaatgtacatcagtaagtatgcattgcttaccttgtcatcaccaaaccaccaagaagcaggccgtccagccaattcatggaatagaatgtataagtacgaccgaagagcaaagtttggaactgcaaannataccacacacacacacacacacacacacacaaaaaaaaaaagtaatcaatctcatgattatatcttcatataaaacaaagctcgataacctaataaagattccgttgaaaccgaagttccactaaaaccaaatcccaacctcacatttctgatttcaaattgaaacaaaatgttgagaatcagtagtcaccgatacataagtatagaatcacagctcaaagtacatgctcactcgagctaacatcgggtctttagctcagtagtaacataatcaaatgtagcggaaaagcaaacctgtattcccaggtctgaaatccggacttgtagagaatataatgaagaggctcccagtaattgaacacttcatcgcagtcatgaatgatattagaagtcgcgctcatgtaacgaagataacaaagcgctataaacggcaagaaccatcggagaccaccatcctccgcatcaccgccattagatcggccaggtttatcggtcttcgagtaagatttcgtagaagacgaagaagaagagtcagatacaagtggacgcctctgacgcgtcgtcgttagatccatcgagcttagagaatctcagcacgaaaatggaggtcgtgaaattgcaaaaggaagttttattagttcacttcattgttcattctcttctcgacgaagcaatgaagaaaaagatttgtgaaaagtatctcatcgaattagaggcttattacatagataaaaaggcctttattaagtcatacatataatgggcttagataactcgtcgggccgtcggagcgggaagatagtgactggcgtttttttagctatgcacccattatgttttttgccttttctacacgttactgatcacacattaggagttttgatataagccacttttctggaatcagacactttgactaaagtcccaagctcataactaatccaacacttaaagctacttttatcgtaaaaataccccaaacatttacagtctccactacacaaaccccgacacttgctctctccaagcgcaagaccaacgttatacttagtcatgaaatgctcaacacctccaagtctataataatgaaaactcttcggatcacaactcttcaccttcttaggcttacaagccttactccagcccattaagcccactcccaacggacaagccacacattgattgtcctcacaaatcccaaacgctccacacttggacggtaaccaacactcgttgttgttgtcgtggttgaaaagctcgaacgttacttcccatgcaagaaacgtgaccttggaatcgaaagagtaaatcctaagatttccatcagcgtcgagcctaaggaaactttgtgaggcgttgaatctaggccttgcgagaaaatgtttatatggaaactcaggcctgagccccggcgtggctaggcccaattgagtcgaggtcccttggtctttagccgagtatagagtggcgctcggaataaaccgaccctctataatgtgatacacaagggatttgttgttgctacaagggaataaacggt

SEQ ID NO: 67552 - DNA, 661 bp, Arabidopsis thaliana landsberg
tggagacagcggataaagtgtggaaatacatgaggaagaaaggggtgttccctagtatgcatacattctcggttcttattaatgggttgtgcgaggagcgtaccactcagaaagcttgtgttttgttagaggagatgatcgagatggggattcgaccatcgggtgtaacgtttggtagattaagacagctgcttatcaaagaagagagagaagatgtgctcaagttccttaatgagaagatgaacgttttggtcaatgagccgttgtgtgattgactttcttagatttcctgtgaaccacagattagtacgctaacaacagctgatcctaagcatttggctcaggctccatttaccttggtaaagttgtaatttaaattggaatcagcaattgttgcggtttcgatacatgagatattaaaatatagatgatacaaaccatttgatgtgtctggttgcggatgatacgatgtcgaggccaaaagacacaattcagtttctccaagaacataagacacaactaaaatgattatctctatgattataagctgcaaaggaaacagacctaatactcacatcaagcataagatgtggattttgaatttagggtttctaagtatcacaattcatgatgttgaaagtgtttttgcatcttcaagtgc

SEQ ID NO: 67553 - DNA, 527 bp, Arabidopsis thaliana landsberg
  unsure (1)..(527): unsure at all n locations
tgcccctacattaaaatgttgctgaacggcccctactagattagtttcaacttgcgatctggttattgaattaataaaggagctggcaaaatatggatcgagtttttcaccacatctaacaataacaagatccgagcaattagcaatttttagattattgggaatgaccgcagaagctcctggtttaccggttcgtacaataactacatctcctggcttcaatgcagatttacgcaatcttctatgaaactcttcagatatttgcataactcctgctagaaccaatgaaaaaggctgnnnnnnnnnnnnnnnnnnnnnnnnnnnnnnntcctcaacatactctgatgccatgggtccaacaaaaccgacagtaatttcctccgccaagtcccccaacaatactgtattccactcactcatcttccttttcgatttctatttttcttaattcatttaaaaccattgtttccagctctttagtgggaagcacaagcctgtattcggctacaccaatgggtttgtttatg

SEQ ID NO: 67554 - DNA, 576 bp, Arabidopsis thaliana landsberg
  unsure (1)..(576): unsure at all n locations
gagatatgactactacgatcacattgcttcatgttttcttctctatggattcgaaattttgtttgtggatagaaagaaagaagggaagggatggtgcagagacgacgagcttcatcaaccttgtcctacccttttcactgtgctatctgtgattagtgattaccaatgttttctaaaccaaactccgacagtaaaccggactacatttcggttcaaccggattcgaccattgcttgattgattataatttatttaatgtaacttatgtagttttataaaagtaaaactaattataccatatttaacaaaaatataaaatcatttctttttgttcaaactaaaatattaagtttaacaatattacaataataatgaagtgattatttattttttactataaccgaataaaatagtataaagataatggtcggtcaccaatgataaaaataaactaattaaacatctttaagtcaatacaattaatttctatcaagctgatgacttacttactttctttcaagagaattgattcaataattagactaacccgaaaccgttttactntaaaaagatatt

SEQ ID NO: 67555 - DNA, 2371 bp, Arabidopsis thaliana landsberg
gacaggaactcgcgagactgtccacatcagcacaatttagattttatatggctaccttgtacagtcgagactcgttggtggttctgtttgcagagaatgttatagtctctgtcgttgttgacgaagctgctttgaatcggcagactatcctcacttccacacctgtgtaaagaaacgttaagaaacagagtttttgcagggaattaattaaagagatctttttgttctgagttactaccggacatgaagtaactgtgtttagagaaactgtttttggagcaaacatcgcagtaaacaaaacccattatagtgatttctgcatctggttttggtttgggtgatgaatgctttgaagatagagagtttacgagcagaaattgcagaagtataaaaagaaacattgtcagtgatttcttcgtcatcttaagcacaacaagtttcaagtttggtttatttgatatttatgtaagaattggagaatatgtgtgtgaagaaagaagaaatatagggaactagttttcagacaagaatagaactctcttgaaagagcttcgtggttcctttctatatatagagagagttatacaaacgtgtcttttaaaaataggcttggatacgaaacggatatttttactattcattttgtttttcatagttacaatattcgaatcggattaaagtaaataccatatcgaagagaaagtgatgggagtacaaagaaaggtgcatttggagtgaagattataaatgagagccagaggagaggaatagaattaaaggcgaaacaagacaagatagtggagagacactaagtgaaagtgaaggttataaatgagagaattaagtgggagacagtgataagttaggtgaaaggacatttattgagatctcatgctctctgtttcttttggaggtttgtatctacctacatccccaaaacattggctttgtggaagtggaaaatgatgagaaaggtatggaccatatagtaacatatcaaagtgtttgccactcaagaacccaactgcaaacgtttagtactcgttttcactgtaggtaatggactggataaagatgtttggatacagttttgggcggatcctgatagagaaaaaaaccaggtctaaaatgtactaaagattgacaaaaccatacaagatatgttacagagatacttgaattagttcgcggtaacaaaactcttatctttataaaggatgctccaaacaagagtttttccatcacagctcaagagaaacaactctaatagactagctttataacgccatcgatgaaggtttctttgaacttgtgaagaaaatgtcgaatatgaagcggtagtttatgtttatatggtcttttagcaaataccacagagaagcaaaacttaactctttcagattttttgacttgggacttgttgttgttctcacattatggtacatgagcaaaagcttctctgtggggcttcttccttttcgatttttttctctgtaagagaaagaaaaaacaagatattaggctaaagaattcattccacaaacaagatttacggagataagaaagaacaagacctggtcttgcttttgttggagacagttgcacgacaacatgcattgtaatgacggatttagggagatcatcaaatggagctttacactgtgcaacagttttaccattctccaaaatcttaccagcatttatcaacttgatgtcactagctgattttggaacaatcttcttgtctacacacattcaaaacccccaaattcgattagtcaataagatacaataggaaacaaaatgagacaaattcaattttttgttgaatgcacaagactgaagagtaagatcaagaaattctactaaaaagaaccagaacagtattcgtccctatagtctctaaagacatgatttgtagtataagacaagtgattagtaatacaatcagaccaattcaaaagcctataccacaagtggagaaactgttaaaacatagatcacaagatcgagtaaccttttaaaagatcaatagtttaacttccatcttctgttcctactttaagacaaatgattagtaagtcaatcagatcctatgacttatgtctgaactttgtctatcaagccacaagtgaagaaactgaagaaaaaaaaaaatggctgaagcaaacgttctaaagccaaatctaaagcattaaagagcacttctatcgcatttttacttctttttcacggattagccgaaaaacaaaccaaaagattgtgctcggtgctaacctttaggccattcagagacaattctctccttaagcattgacactgggacggttggagagtactgaaacgggccaacatctgaaccgtcatatta

SEQ ID NO: 67556 - DNA, 549 bp, Arabidopsis thaliana landsberg
tcatgtgcggccaataacaaactaagaatgagatcgagaatttgctccgtcgatgaattcgaatgtttcaaaacccatcccaaaagatcatggtgtgttctttgtttcctaacatgatcactcttactcatctctgcttcatgctctgttttcactgcttcttcttcttgatcttcttccttgatatccaattttctctcttccattttcctctcaatgaacttcaatatcgttgctcgtgactacacaaccattgtggatatgtgatttaacacataaaataaaattaaaaacctataataagagtttgtgactttacagcaaaaaaaaataaatgtacctgaagagctttatgataagcagttcctggtagatttagaggagcagagacaactcctttcatgaaaggtacatactctttctttaattgctctgaggcttcttctgcaggatccatactcattatatgcttggccattagattaaacgtaaactgttcaattaaaaaaaaaaagctagaaactcaaaggattcatgaacaaaaaaatt

SEQ ID NO: 67557 - DNA, 2466 bp, Arabidopsis thaliana landsberg
acctgtgctgctaattcaagcggtgtcactgccgcgattctcttgtccgatctctctcaggtgctgctaatctctctcatacttcgattttgaaatgtttttatcggtggggaagttatagtatgtgggatgctttgatttgatgagtaacattgtaacgtttctttcagtttgtttttgggaattctcttggccaatgagattgatcaatgtgttattattatatgagatatagctttgaatttgttaatttacattctgtagtcgattctggatgtttctctgaatgtttttgttgtaggcatggcatgagcaaaacaaaccaggaatgtcaaagaagaagccggaacttatagatcagttgaagaagggtcacagaagaagaagactcgctaataccgttacaattgactccatttatgagaagaactttttgtccatgaacagcgttttggaagctgttattatcaatgccgatgttcttcctggtatcttacaaattctggcagcacattcatttcccctgccgtacgatgccaagttggtggttatccatttaaaacataaattctatttcaggtacaaacatattcatgcttacactaggggacttttggagctccaacaccattgatctctatctacatcggaggtatgcttattcggtagaggtgaattatcatcatctcggattgagatgagtttgactgcttgtcataagtttatgatgtctgtatagagtttcttaaggatctaatgtctcttgtctaggtattatgagttggtggaaacaccaaatgggattcttcggaaaggcagagaagttttgatcactggatgctaccttcgtaccgcgagagaaggatttggcactccacggttacttccaactgagtatcttgtcgtattgctagatgaggtttggtttctgacaatcttttgaaagagaaattagaactgcagtattgaatttgcttgtagttagtcctaacacatctcagttttcatgcgaagtttatatgaaaaagagtggtttagtctttacctgactttcaaataccacaggaccaagatgatgatgcaatcctcatagcagctcaattttgttccgatactttctcatctgtttctcttgatgctttcaacgatggagcttcttactctctgtatgctaggtaagagaatatgtgggtaaacaatcttactaccaatcttggtaaaagcaacttactattcacattcctagttgcaaacacattcaagaaacttcaaatactaatacagtgattatttttatcagatcaaaaccttttggaagtaatgcctagtataactccaagtgttgtgattttatagtaaaattgtagaaatatgcgtaaagtaccccataacaaaagtatatgttttgagaaattgagtggttaccatgacttaacttctaaagtaatatttcatgttcccctctttgtttgagagcagaattgaatctataggtcctctggaatctgaactcacgtttagtactgcacgtagaaggcaaatttcacttgtagatggtgatggcgataggttaaaatttatcttgtggggagagcaagtcattgtggcaaaccttctgaggtaagctcctggctgggtgcttctacctttaaatttttcgaccaaccccttcttatagattcattttcagtgtgggaagtgtgcttgggattgagaggccttatatttctagtctcgaagagagtgcaatggaaggaaattatgagttctgccttgaatacggtagcgcaacacatctctatctagtgccatcaaccttacaagaggaacgggtaaatgaagttttttttatgttgcttcctttttctggttcagatttttgcattgatttgttttttttttcttcaggtttgtgtagcgttgtcacaacatcagtgtcaaggatctaaactgcttggttcagtcggagtttcacaggtgacattgcctcgtgatgccgatgggtctgtagacttcagtaattatccttttcgggtgagtagaagttaagataccatttattcaagcatgatgttaattgatggttatggtaattgatatttgtaaagttcacactgaatctaggttcataggttcttaatcaattccgtgtttagaaatcaggcaatagggaggttcttcatcacttccgtgttaataggttcacactgaatctaggttcatatcgctacagatcctattcatatgcataccatttattggtttttcttatcatagcaccaaaaaatgcattcataagtcttacagttttgcttttatatggcgcacaatatcatctctgttggaaatttacagccttgtaagcctaggagattatacgtaaagcctgctctggctattatttgagaatctatgtcttagctgcatctgctaatattcctctccttggttgaagttctgcagacg

SEQ ID NO: 67558 - DNA, 249 bp, Arabidopsis thaliana landsberg
gtgagctagccaaaagattctgtaaagtgaatggtcctgcaccgtcttgagggacaattcgccacacatatatattgaccctgcttttgcccttgtactgcacaaagtagattgcacacacacaggcaaaaccgtggaacaacttaatcgtttttctagactttaacgcagatgttgactacgcagtgcaaatggaacaataaacaacatattgtgcatatatctctctgaagatgagacacagcactc

SEQ ID NO: 67559 - DNA, 284 bp, Arabidopsis thaliana landsberg
  unsure (1)..(284): unsure at all n locations
tgcgcgctactaattatacgacaaagcttttgctttttttaaaagagatcatagaaactgcgtccgggggcacagtcttggccaaatttctctacttgaacatttacatcactgaccataaatcacataagcatacagcactcgcacggaccatcgcagtgctatgagatacataaacaggcggattacccttgaccgaaccagtacagagctnnnnnnnnnnnnnnnnnnnnnnnnnaatgagagagcctatcctagtccgcaaccggggcgtcactcagcga

SEQ ID NO: 67560 - DNA, 180 bp, Arabidopsis thaliana landsberg
  unsure (1)..(180): unsure at all n locations
ggggggaatcaatactcaaaatatctttttcgtttttgattacatcaatgcaattatgagtggcgggtgtttttaaacccccctaccgcctttcacccttattggnnnnnnnnnnnnnnnnnnnnnnnnnnntgtatactatccttgggcacaccttcacaaccctagtattgtgccaag

SEQ ID NO: 67561 - DNA, 1230 bp, Arabidopsis thaliana landsberg
aaggagcttcagaatatatggcatcatgttgtgaagaagaacattaaatcttacgcaaaactgctcccaccttctgaatctgattccgtcccaagcgccagcaggaaacggaaagacaaagtcaatgacagtggtgatgaagatgacagtgacagagaagaggatgatggtgaggggagtgaacaggatggtgacgagtcaggtacgcggaagaagccacgtgttgtttggtctcaggagcttcaccagaagtttgtcagtgccgttcagcaattgggcctcgacagtgagtttccccatagacctctttaaacctttccttatgtgtgatgtccactcttgtttctcctatagagttattttgatgctttcatgtgtgggatcctcttttcatttctccttgtgttcatcacagaggctgttcccaaaaaaatacttgatctcatgagtatagaaggtctcactagggaaaacgtagccagtcatttgcaggtactaattccccattctctcttgcatttttccccttctttcgcaaatataatcttggatggttagacttgttttattctctggttttggttgcagaagtacagactgtacttgaaaaagatagacgaaggtcagcagcaaaatatgaccccagatgcatttggaacaagagattcatcttactttcagatggctcaacttgatggacttagagattttactgccgcaagacaaattccaagctcaggactcttatcgcgttcccatctcaccaaactccaaccccctatgtattcatcgataaatctccaaggaatgaactcctccagcttcatccaacaggggcatcaccagaactcaagcaattcagctaatccgtttggaacatatcacagtactctgtcaccaagaatccagaacgtgaatctgtttcagcgaacttcatctccactagaacccctccagtttcctagaagcaagtcatacattggagattttaaaggcttaggggacagagctattggcggtagcttcctagatacttgtatgccatttggtagctctagcacctctttaccaagtgcttccaccaatcctctaatgttgcaagcaaaactatacacaacccctgcatataggccttagatggaattcagccttgcatcgagggaactccgtccaactttgccttcccaaacattaattttcaaggcttaactagatttcctggtcatagct

SEQ ID NO: 67562 - DNA, 614 bp, Arabidopsis thaliana landsberg
ccggaatcctgccaaaccctaacgtattcctccggtgacattaatatcttaatctatttatgaaagttagtttacaacaaaagtgcggaaagtgatgagacaatgtggcactaacttttggcttgagtgtgtgagactctcgaggtttccaactttgtatttatagtcgatctatacttgtcagctaaaaaactagtgaaccctacctataatgacacgttttcctgtaactggcggtttttatatctccacgaaagcaagtgaacagtttggtgattagcttctacttcgtgtggtgtgggctcatttatagttatagccacttagcatcttctaaactgtcattagtggatgtaattgcatgtgtacggatatcttttcagttttaatttctattagcctggtatcaaaagaagaagaagaagaagaaatcactgtcaactaaaaaagaagaaagaagaagaagaaatcagcccggatctttaagctcccacgtcacgactgatgggttcgattaaggagaaaaatatataaattgattatattatccactagcattcacaaaacgagaaaaatatatattctaaatacccatatttactttctaaatagag

SEQ ID NO: 67563 - DNA, 473 bp, Arabidopsis thaliana landsberg
gcctgcagaagcttgaaggtgtgctgcccagctagcaatatatagaactgcgacacgtgtgacaggggtaatcacagcttgctagctaatacctccatccttgcaagagaatcccccattcagacatcattagacaagccttataaacatactcatcgaatttgctcgttcttacgacatcatgagaatagcctgaatgaacgcacttctatgcacagacttgaaggtatgctcaccagacagcgttgtatagacaatcagattcaattatccaatcttcgtacataagcgagacttacagacttcaatcactcataatcttgcttgtcattgatagcagggtgggtaactcctgtctcgagacccatgcatgagacccatcataatccatatgtctgacttagtgggagtatagccatggctgcttagaatgatcaatgtacagtctgaagcctgagtctaagactaaagct

SEQ ID NO: 67564 - DNA, 594 bp, Arabidopsis thaliana landsberg
taaggcagagattaatggaagagcagtagatgagacaatcatcaaagattgcgaagacataatgaagaacaatttcttagcattgcatgatgaggttatgtctctaaaacggtaccaatatcatcttatagattctctcaagaacgtcagtaactcacctataagacccactaaccaaagtttttcatgaaataattacatttgatttaatatcagtttaaattaaagtatactatgcaataataatgaaatatccacgatttgatatgggcatatggctcttctatactattgttttggtgtgagtggagtatttagaatcccatatgttttatgggccatttagtgaaagcctatgtgtaatttatttgaaagatatcggcccatttagattttcaaatgcagtgacatgaccttgtatgagtattttgcaattttttatctttgatttagtataaatatataatgattgaagtcaatgttatgctaattcagtttgtggacattcaaagtaatcttacgaagtttctaaaaccgtttcaatagataataatataagcaataatataacgtagtggttaactatataggcac

SEQ ID NO: 67565 - DNA, 479 bp, Arabidopsis thaliana landsberg
ggagacacataaataaaagagatgaagcagcaaagctgaaatttagagagagattcagaaactaatcaggtggtgaggccgttagggtagcataatcttaacaatggagccgatttatctttctcgaagagtactgaaactcattgtagaaatgacctgcaaaatataaacactgacctgaccatatccacagagagaactcgcacggaagttgaattaggcttagtgataataagtacagtttgtggatcagactcccatgtcagtgaaatctgaaattagaagttgttaggtttagtctacaaaacaccttaccaagcaactaaagtaatatgaattgagaacaaatattttccatcagttgtaaattcagagatgggaaacagaaagatagagaagatgaaacaatagtcctacctgtgtactactgcgctctgctgtgctgatattccctctctcaacgaaacaatttctttttt

SEQ ID NO: 67566 - DNA, 2840 bp, Arabidopsis thaliana landsberg
atatatatgagtgcgagaaaaaagaacaagtaatcaatactggcaataatagagcacacacacaaggtaagggtcgatatgggaccattcgtataagagtatcccatgctaacgtgcaccgtcatgagatgtgcatgtttagatgagtattattgtgttactcttccctagctactccatgtatatatccccaaatgtttacagtgtgatgagaagaatgtcgattataaaaccataagaaaattaaaggatgagatccagcctgatcattcatcttcaaaacattataattcccaaaaaaaaaaaaaaaatatgaaagttttgatcttgatctagttgcagtcagtgttggggttttcgaagcttggatctaataagaaaagaaaatttggtatattttttccaataagtaattacaccacgcaaagttatatgagagtccagagacaagagaaggaattttgatgtaagaagaaatctttatcgaattctcacatacctgcccgatgcatcagaacgactcttgacgtctacatcaccattatcatcatccttttagcaaaaacaaaacagaagggaagtaagataaacaattgaacattccattgtaataagatctgcaaatgacaagagttattctcagtggtgtaaaattaaaccaaatattcccacccaaccaaaaaagtagttttaaaaaataaagaaaaaagagagtcaagtacggtcttctgtcttcatacacgacacaacaaaaacttgcacccaaaaatccaatttgttataatccatcgataaaaacgaattggatgttttaaattggtgtctctatacgtatactaagaagcttaccaaagccttgacctcctccttcttctttatcaaatctctttgaataagccgatcagaaatctgcgacggcggcggaagcgaaagctgaagagaaccaaaatcatcaccgccgtctttataaccaccgcgaaagtatctcgcggtggccgtcggtgagcggttaaagtagagatctgatagaggaactggtaatagagacgataaaggaagaggcacttgtcgtttccggatcctcatcgagagaaagcagataaagattcttccttttgatttattctctctttcgattttgattttttgggatctttgcaccaaagaaggactgtagtataaacccagatattaaagagagagtaatctttttgatttttttggttacacgggaaaaaaataaaggggaaggctttgtggtgttgtgttcttgttgtgagctctttttattaactcttttttatctctctctatctctaactttttttgtttttgttgcacccaaaaagcaagtaagtagtagtatattgagagaggaagagctcacgtaggaatgactgatatttcaatgtaaagtttttattgaaaatgtgataattgataacatgtgcctgattagaattacaaaacgataaaaccattttttagatgcactgttaattttttatttacatatttggtaacaatggaaatgctaagcatctagtggtaattaagattgagtttttgaagttgtaattagataaatatgatgagtcatatatctatagagacttatatgtacatgagaacgttttacataaccatactttgtaaaatagtctcacatatgaaaagactgggggatgtaatttggtatctactcacaccagtttttgaaccatgttacacatgtataatgtgagatataaaatctaatgattcatatgtacagtttaaacaaatgtttgtatagataaaaaaaaacagatttgaacatgaatagttaaaaacaatatagagagctaaaaaattggtaatcaacgcccatggtatataaatttcttgaaactagtatgaaatgaggtgtgatttgcgttgagtactcttattttgaatgagagaaaaaaaaaacatgaagaagaagagaattataggagggaggcacgtggagagtggatggctcacgtgcggggaaaccgggagagaaggtaatcggtggctctcatcgttgccagcttggacgaaagagagagaaggagtgggtgagcggagaagttttatccgtaggctttcatttgtgggtcctttttaaaatctcataatttcattacgacccccttatgtttcatttcttccgatttttaccctctttctttcttttctttcttcgtttattctataatttctaatataagcatatgatgtgtctttttttttatcatatcatatctttttttgaagtattaagacaaaagttagcaaattataataataaagaaaagaggaacgacaatgttgcacttgcactctccattgaaataggtgggaatgggctggcatgtcacattaagccaaaacgggtattagttttttcttcatctttttgttatcgtgtaggcgtaggatagagatgatccagcttaatgtgttaacgtgcaccttcttcagtcacatacttttcaattcatgaatgttttttttttttcgatgaatgtgttgttgttagaatcgtctattgtgaatttttgtttatgaattatgagtaatatggttggttgtgatttcgttcatggaaccgttcgatatccaaatgttacaaagaaatttattctttactcatatatcataaatcataaatcattattttataatatgctagtgtactatagagtatatagtctattgtttattagtcgagaaaattatttttttagaaaccaacgggttagtgctggtgtgtatctcaccaagaaataaatgttttgtattttttaatgcaaaatttgtatcatcttttt

SEQ ID NO: 67567 - DNA, 752 bp, Arabidopsis thaliana landsberg
gaagtatcctacaaaaaaataaaaatgaaatccatatatatgtgcttgcatgcaattgatttatggttattactctattagcattggttttttgtgtgtgcacttatgttgtttgcatacatattgacccaaggcccatttttctttaattgtacaagaagtgtgcatatttttgcattcgaatttaaatagtttataaggtcataatcaatctgtttttttttctgctaacaaagctttcgattatctatgtcaatctctaatacaaactatatctgtatacgcaaactaatggaatctacatattacggttttaccactccaaactcatttctcatactaaaaaatatatctgcatgtggatgattaaatatatatatatatatatatatatatatatatatatatttgttctagactccaatcaaatgacgatataatggtgcaggctcaggagagttatgtataggactatgtgcatgatgagattcataatccacataattccaagaccggacgatattgttttcctcgactccgatccaatgatgatgttctggtgaaggctgaggaggattatgtaaaggatcaggacctgttgggatctgtctgtctactccaatcaacgatgggtcttcacgaatagcaacaatagacgacgttattaggaacaagattagcgctatgattaataccacaccaccttttaacaaatgcatctttctgatccttattttttgctttttgactgt

SEQ ID NO: 67568 - DNA, 2470 bp, Arabidopsis thaliana landsberg
ggagagatgaatcacggccaacaatctggtgaggcaaagcatgaagatgatgctgctcttacagagttccttgcttctctgatggattatactcctactgtatactttcctttgtactagttacaactttttctcggctctacatgactgaaatttgggtattgattgagttctggatttttatttttctttcagattcctgatgatttagtggagcactacttggctaagagtggatttcagtgccccgacgtacgattgtaggtatttccgacaagttatatctgatacttacaatgaaagagcagataagttgatattgaatggaatcattgttgggtcttagaatgggtgaccagtagttagatcaatggcttggtttaaatcattttggattaaggttttgccctgtttaacattcctgtaaaatggtatgataaagaagtctatgttggactagcactgaaaaagattggcaatttgaatgtaaacttcagagttcagtttgaatgcgtagaataatgaggggattcttctctttctatcaaattgagtgctgaatattggtatattttagtttttgagtttttcactcctgtcataatcttttcctgtatctattcttgccaatattctgtttttttgtttacttgtttgacaggataaggctagttgctgtggctacacaaaagtttgttgcagatgttgccagtgacgcccttcagtaagttttcattctcttcacaacgaattatcataccctttttcatatttgacttgtaattgagaaagagaagacactgcccattctgagtagatgagatgaaaagatgtctacgctagattttcccagaagctaaaagcattgatataagctcctgaataataaaaattgtcaattatatacaggcattgcaaggctagaccagcaccagttgtgaaagacaaaaaacagcaaaaggtaacatctgactcccttttgttttttttccctctgcaagactgcaacaaatatgttttggatgatgacatgaatattaatgtttccttaacaggataagcgtttggtattgacaatggaagatctttcaaaagctttgcgtgaggtaaatgcttcttcctctaagttcatgcttctggtattgttgtccctcagacctccaatgtatgagaagaaaatgtagatgtctcttgtttttttttacttaagctgcaaattactctaaatacacatggcatgaaactaattcagtatcacagaatcaacataaaatgcttagaaacatgttttagagttagtggttataatattgtgtattgcagtagtgtaggtagataggtaaggttttacagtctcgtcttaactagtagtgggaagctaactcgtgagtaaactcggtttggcagtatggtgtgaacgtgaagcatccagaatattttgctgatagcccttcgactggaatggaccctgcaacaagggacgaatagaaaccaggaattcctcaaaatctttgcctaataaggacggtcatgtgtctcagatccctgattctctgatgtgtttcagataaaaacaaaactcacttgtcttgctagtcctcaattactacattacatgtatattcgtttgttgtttgttctctggtgatttttggggttctagatcacttatccaccattcttgcaagtctccaagtcgtgaaaataagataagtatccatccttgtgattaactggatactgtaggattgaaaaaccacaaagtatattttccatctagcaatgatgaacctaagtgcttctgatctaacttgaaacattgccacactctgttgtatacctttagacaatccccctttgtaaccgcggcatctcaataataaagttactttttggaatttagcaattgaaaaaagctgttctgttttgttttttcactttctcatgtccgaatattctttacctagaaatacatgaaagaagacaacaatctgaaaaatctagtaacctttcgtcagcttttacaacgctacattgaagacaagaacacattggttttttcatcacaaagaaagttgaagattcttgagtttttttcctcctgaattgtttgaaatggtgaatcctccacttcagtctccgaccaatccgcatttcttccagccactacttcccggtttcgagtgtcacctcgtacacactctctctgtctctctctgtttttgtctttctttcagagtcggttttgttttaaatgttttgaggctgaaaagttaaggtaagtttcaagttttttatatgacataggtacttgtggtttctgagcacattctccttatatgtatacaggaccataaacgttgtctggaatgattctatatgccgactttttgtctgtaatatgtaaagtctctgtccaattcttctcgcatgacttagctaaaatatcttgggtttacaggagaaagag

SEQ ID NO: 67569 - DNA, 594 bp, Arabidopsis thaliana landsberg
  unsure (1)..(594): unsure at all n locations
cctgctgcttgagaaaggatttaaggtaaagctcaattttgtggttttcgcggggaaaaataccgaagacagggtttcttgggtggccttgacgcaggttcacgacttatcggtacgcttcctggaggaaatgccttttaacgggagcgctgcctttacgccatcctggaactatcaacagatctacgaatatatccatcaacattattcgcccattgaaaagctggaagatggaaaaaacgccacttcggtgaattataaaatacgaggttatcgcggttcattcggcatcattccggcgttcagccgtaccttttgcggtacttgcaatcgaattaggttgtcggccaccggagaactcagaacctgcttgtacggtcctgcagtagccaacttgcgtgatctgctgcgtagcggagtaaactcagccggattaaccgaggaaatccagcgcgcggtcagacagcgagaaaaggacngatttgcagacgaacttggaacctgaatccccgtcccatgcctctatgtcggtcctacgaggctaaaaggtgagcacccgtgaaggatgcaaccgacttgtaccgggggctgctg

SEQ ID NO: 67570 - DNA, 600 bp, Arabidopsis thaliana landsberg
gtataagtacaaatattgataaatactgttaaaaccacagataacttccaaataaaaaaactgttgaggtttgtgttttatgcgtgtgatattgatttaatacatatatctatttgtttctctcttttttgacatacgttctatcaaatttgtttgaataataagaaacataatgacaatttagtaagttatagaaaaagaggaaatgaaataagtagcaaaccttgagtaatccatatgtatcatatactatttgtgtagaaccacgaacaccaggaggacctggaagcccaccaagaggaatatctgaacggaccaaaacgattgcagccggacacaagctgttataacactgattttgacctgcctatacaattatatgtatcgttatgtctagcgtataaatatttagtacatcgaataatttaacaaaatatgatggagtcatttatagcattgttatttttaaatgataaattacactaaaaaatattcatttagaaaacatagtttttaaaatatcaaaaaatcaatatttagaatgaaattataaaaataaaatataatgtgaggaattagttttattttgtaaatatatat

SEQ ID NO: 67571 - DNA, 276 bp, Arabidopsis thaliana landsberg
atgccattaactaccataaacaaaccgctatgaacatatctaggaaagcatacgacccattcatggaacacacattctggaaaagcgaccaacatgacagaccgctcctaatctccatggaaaggggctcctaagacaaaaagagctacctgcttgccacaccgtgctacaccacaaatccctgcttactagatgggaaggttgagaacacgaccccaatctactcaatgatgccgtaacagggtacactcacacgatacacctatcacaaagaat

SEQ ID NO: 67572 - DNA, 439 bp, Arabidopsis thaliana landsberg
atggatttgatctcacttttatgattcatatcaaattctttcaggttcctggggaatacaagagttacttttggagctgtgaacaggaattggcggatactcacgtcggttagttccggattttccacttcaatcgtatccaggatcgcatacgtatccggaggatacgattccacattgtattccacttccggaatctccgttttttctttcgtcaccttatctatcaggcgtgaacccactattttggtatgcttcaggtgtttcttcactacgtcgagctgagactcatctttagacagggaatttatacttctgcaataaggatagaattgcgccttatcactcgaaggaagacgcatcgggatgatttccttgttgatcatgtccaggtatttccattctccggttctttcccagattttggaagccatgaatt

SEQ ID NO: 67573 - DNA, 1043 bp, Arabidopsis thaliana landsberg
cgacatatttttctcaccctgaggttttcgccccatctagattcgaggtagataattaagaaactacatacacatttagctctttagtgacttatatttattacttttgataaaagatagataatctatcacgtgtgagttggtcacacataaactgaaggtatatccgaagccgaatacattcacgccttttgtaagtggagttcatgcttgtccggggaacgaactcgcccagtcacaaattcttatatttctcccccctttagtttccaatttccggtatgttttccatgcacgataagatattcaaattggtatgatctatgatccacacactctttaagtgtgtttatatatatatatatatatatatatatatatatatatatatataaacatacacgtaattaaattaattgggaggtcttaatattagtataatcgagcatttacaacatatgttgttaccatcttaacatcgtgtcaaaaacatggttttgaaaatttatgatcgtacacaaaacacaataaagactttggatagtaacttgcctaaacatgattaatcacatcactatccctaactaataaagaacattgatctctatatatataactcagacaaacgctctcacatatgaatatatgatgcactaatgatgtaattaataaatgatagttggcgctgttattcaatggtatctaatattgtgtgtatgcacacgggaagtgaagggaggagagaaagggaattatcagttacagattcccaaattttttttttttttaaccccccaaaaaatttttttttttacccccccccttggggggaggggaatttttattggggggggccttttttccccctttaaaaaatctctttttttgtggccccccaaaaactctttttaaaaccccaaatttttttttttttccggggttttaccggaaaacccaaattttttccctttttcctttttttgttaaaagggattttttcccccccttttttaataaaaaaccccccttttttttggggttta

SEQ ID NO: 67574 - DNA, 521 bp, Arabidopsis thaliana landsberg
caactttttttgcgatttgttctttgcgtgcttggttgacaaaaacacggactgtttgacaaacgactctaactaattttattaatgaaatcttccaagcctggactgaattaatgaaaaaagtacatagctaattaatgttgtctctatcaaacacgtcgattcatgggaaagaaaaagagagaagcctatctaaggcccattactttagatttacttgttaatggcaacaaaatctgacgttgccgacttgccgcatctgagtggtgattgaataccagtgttgtgctcgctttcatcatcatgtgtcattgtcttgatttgcatcatgtgtttcagtcggcctcagtcattgcctcgctccctaaatcgggcacttgaatctatctatcatctttgaagtctcataaatacgaccactatctatcatcttatgtgttatctattttcaatttctgtaagacttattagttattaggaaacactgacactacagtagaccacgactgacgcaataacat

SEQ ID NO: 67575 - DNA, 175 bp, Arabidopsis thaliana landsberg
  unsure (1)..(175): unsure at all n locations
aaacccaatgaatgtgagtttttctattttgacttgctccctnnctgngaaccgaaaanaatggataagaggctcgggggaatgacctgaggggggaggggtagctatatttctgggagcgaactccatgcgaatatgaagcgcatggatacaagttatgacttggaatgaaaga

SEQ ID NO: 67576 - DNA, 706 bp, Arabidopsis thaliana landsberg
aaactttaaaaaacttataatgttatattattccaactgacctaacgaaaatgaaagaatttcgacattgaatgagaatcgaaaatggaaaaaacaaattgacaccatatatttttgaccaccaagtcactaccatttggttgagcttgtatttaaaaccaacaaaagcttttaagaacagactttctaaaaacgtttatttctaatagtaggtgaaaattaaattgctttatctagacgaaagagattcaaatctgagatacagttacgtttcaaaataaaacctgaactttcgtagtttgcacgagctatgtttgaatactattaaatattcagtacacacacacacacactatagttagtagtaacttataaacattaaacaaaaacattttcaaataaagaagaggtgaggaagttgccctacattggaaagctactcttctccatcctcttgactactgtatataaaaagcctctcaaaacctctttccattctcattctcatttctttaaactcccataaagtttctccgatcaatggattccctagcgatttctccgaggaagctccgatcagacctctactcttactcttaccaagatgattccaacacagtacctctagtcatctctgttctctcgtctttgatcgaacgaactttagctaggaacgagagaatcagccggagctacggtggttttt

SEQ ID NO: 67577 - DNA, 396 bp, Arabidopsis thaliana landsberg
ccacccttcttacatatgaaaatgctcttcatcagttatgttttgtatctgattacactaacccaacaagggcacgcatacctttttattcagagccaagatatctaagctataaatatcctcaactacttcaaaacctctcactcagcgaccataaactccattctatgacccatcataataacctaaatataccaccaacttcaatcctattacaacttcctctataaaaaagttaacatctaaagcataatctagaagcacacataccattagaaaagctccaatcttacacacactcaatcaaacatcctacataaaaccaagattacgacactcagtagagctaccattaaacctctcccatgcttgataacaaatatcatagattttaca

SEQ ID NO: 67578 - DNA, 927 bp, Arabidopsis thaliana landsberg
ccaccagaactagaactgggacacttcataagagtcagttcactttggcggtcagttggatcaagggagggatttgtgatacttccattctcagatagatcttcaaagtctccatgtccattccgatgtttctcaatttccagtcttagaacccctttaacaggtttgtgaaccttccgtttggggtcctgtaaaaaccaaagaattaattattagacattagcacattaggagattccgtatgtccaactgatcaagacagtttaaagagattttagatatgtatttcctccagataaaagcagcaatatacagtaagatgttatatcaataaaaagcattccagttatttgtctgatgacgttaccaaacacgattcagatctgaatttttttgtgtgagtaaaagaagagagagctcggaaatcttgttttcttgtgatgtatttagtaatatacttataactaactacacttcagaagggaaaacagaaatgaagaacttctattcctcaaaacttatgaattaaacaccatgacctaattgtcaaatgctaccaaaattgattcattcaaatagaaaacaaaaaaaaactgttatcaattaaatacagaagtattttgtcaatcgactgtgcatgcaactctacttgcttagatacatatccagttcaggaaaacccaaccaaagtgtacctagcaagtaggattttcaaattgaacaaaatctatgaaaaatgttatcacaccatgtgaagatcaaagcactgaatatacaatcataaagaacatggtaaaaactgtgggatttgataagaaacatcctacctgaatggactattaagaggagctagttttaactggatctaaattataaattggaactacgacagaacttacacctgaataaccatgctttccatctgat

SEQ ID NO: 67579 - DNA, 510 bp, Arabidopsis thaliana landsberg
  unsure (1)..(510): unsure at all n locations
acgcgggtgtaatcctcgagcttgccgaccttgtttgagcatgcgtggctaatcgcttcgctggattcgcataccacccgcatccgcagtggccatttgctgctggcgctgttgacccaggccgagttggtacaaatggcgcagcgcgcgtgcgcacaattcgcgcgcttcaagctggacgaaatcaagcacgacttcgccaaactcaccaagggctcatgcgaagccagtgaaagcgtggatttcgccgatgcaccagcaggcgaaggcaccgaaggcgattccggtgcgcccgtgccgaatgcgctaggcaaaacgcccgcgctcgatcagttcaccaccaacctaacccaacgcgcgcgcgacggcaagctcgatccggtagtcggccgtgacactgagatacgccaggccatcgacatcctgatgcgtcgccgncagaacaacccgatcctcaccggcgaagccggcgtgggcaagaacgccgtggtcgaaggcttggccctcaaa

SEQ ID NO: 67580 - DNA, 554 bp, Arabidopsis thaliana landsberg
aacttactaggatttaacctgcattcactttatttttaggtattctgctcttgcaccactattctacctttgagctggagttgctgttattgtgtatgatataacaagccctgaatcgttcgagaaagcacagtattgggttaaggtatgttttcagggggttcacacggttccatttcggtcatgtgactaggattcgtgcaatagcttgcgagctatatctttaccaggactgaaaattatgagttacagacagtcatatagccaacagcactcctgtctgtgtatataatgggtatcatttagatgggcaactggtttacttctctgacattgctgctccattaattcgcactcgttgctaccatgaagccatttggcacaactccgtgcaggaaagatatcaacattatattgaatctagtgctattgttttacccctgcccataaatctaacaggaactgtcaaagcatggaagcccagatattgttatggctctggatggtaacacagctgctctacatgaaaaaagagaagtacctactgatgtgag

SEQ ID NO: 67581 - DNA, 372 bp, Arabidopsis thaliana landsberg
atcattaatattctgaatcgatgaaaaagatattaacaaatagtatggtgattatcgccggcgttatgacggtgtttttctcctgtaaagaaagctttctggataagccagccacaggcgcggtgagtgaagaacttcttacctctacaaaagggctcgaaggagtgctgatcggggtctatggccagatcaacggcaagggcgcgggcggcaggatggccagcccgagcaactgggtttggggcagtatccgcggaggcgatgccaacaaaggtaccgaccccggtgattttagcgacatcaacccgatccagcgctatgaatacctgagtactcagggggttatctctgataaatgggtaggtaattatg

SEQ ID NO: 67582 - DNA, 569 bp, Arabidopsis thaliana landsberg
atcaaaaaagttcgacaacttgggccaatgaatttccagttgcttccgcgtatatatataagtccttccacgtcaatttcttaatcccaaaatgcaaacctttttataacaaccaaataaaaatgtgccacttgtaattaaaaataaattactccataagcaataatattcaccgttttaatagtatgctctagaacacagcacacaaagatttgttttgaccagaacattatttttttcttataccggaaacggtaacgtgataataaaattaggttaataataataaagatactaagatgactagattattagcaagaaattgtattcacttgttatccgtctttcttagttgacaagcaaatatatcagctacacgttggctacaggttactcatacttacccattgatatattcaaatacaaaatatataagacacaaaatagaatttatttattgctatttgcagacgatgtaaacatttttgtagacatgaacaatttaattgattctttactcatcgtagacatgaatttatatttcaaaagggtctactatttctaaataa

SEQ ID NO: 67583 - DNA, 582 bp, Arabidopsis thaliana landsberg
tatattttgaaagattattttcggcaaaagtttattaatttgattacatataagttctctttgtaacagggtcatatgcatgtagatccggttttttagttgataatttttggacttccaaaaacagtgtcatatacatgtagatccagttaaacatttgatttcttattctttaatttgaatacccattttaaaaaagaaagtagccgtagaacaagctgaaagtaacgtttttggtatggttagtttcagcagtaaaaaattcaccaatcaaacacatagaccataccaagaaagtggccgtgttttttttttttccggatatcaaaagtctagatgcatattgacttgtgtaggatgcccataaatctaatactcattcattgaagtaggctcaagtacatgtattttgattcttctaaaatgtcttatccgctttcacttctagttcattaagaaatatatttttcaaaatcaaagtctgagagaaacaatttattatgaacaaaaagagaagatggagctttgtaaacataaacacatacaaagtttttttgttttggacacaccattactcctcat

SEQ ID NO: 67584 - DNA, 574 bp, Arabidopsis thaliana landsberg
atggtatctattattgtacatttcataactataccacaccaaaagtagagcatattaagcagccggcaaaacaaagttcaattgctgctttcttgtctctctcgtatcatcactctcctttgctaattgctctcagcccataattataaacgagtagaagaatatttaacactctttttcgtaaattttaatttttaccacttgttaaatgctctgtcttactttttttttatccattgtaattttcattggcggtatgcatatttttagacagacaaaatttaaaccgatacgtggtcccataactattgaaactctgattataatggaaaacatattaaatttataggtattttagaccactcagcctcttaaatattggatggtcccatttctatctaaatcattttaacaacaacaaaagaaaatataccataaaacaatctgatttgattttacttattgctaaaaccatataataattttaataaaatataataaacacacgcatgttatttgtggacctacaaaataaaataaaaagaataacagagacaaaaaaaagtcatttcaa

SEQ ID NO: 67585 - DNA, 612 bp, Arabidopsis thaliana landsberg
aacaaaagttttgtggactaccatgagtaaagaaaaaatgaggcaagtataaaatttgcattgtctatgaagtacgaagccgttaacccgcgcgattaacttagattggtgtcgtttaagatttttttttgacattcggagtaatacattcggttcgataagagattatttacaatacaatataagttaatgatgatctagaaaatatatattgtagtttaaaaatgcttcataaatcagtgatgtaatacaaaaaaaaatacgtctcttagaaatttacaaagttgttcgttaattgtttttcttggtcaatgactcggtgtttgtttgcttcaaagtttgattagtaggatttgtaccactaccatgtttgtataaacaaatatgaactactttttagacgtgaatttatcttttgaagtaatataaaagactaaacggtttataataagctggaggagtaaatgtatagccttttttttttttttgtgacttccggagtcaaactttgtttgatggtttctttttgaggccgggcattttaaaaatttagaccctttttccctttttcttaggaaaaccccggctttttataaattttggaaaaaaaaa

SEQ ID NO: 67586 - DNA, 3214 bp, Arabidopsis thaliana landsberg
ctctcttctgtaactagctatatatgcccctggataattcgatattttttggaggtctgacctataatgtttttgtctgcacttagctctccacttctgaaatgtagtttcattcactgccttgggttcacataatttgatgcatattttgaaactgcaggccaggaacaatgctagggttgtgatctcaggctcagtgcagttgtttagcgataggtgagcaaatgtttgatggtattcctccaactatttcatgcctatggatgtttctgactcagagtttggttttccacgagacaggttaatcagatctggtgtccagaaagcagggagtccgaaccagtaagtagacacatagtttatcaagtcaaacttttagtcgcctgatctgtagctacaaagatttaaggattcttttgtcagtgatagatgtctcattacattttgaaagaagattagctgatcttatctaacactttcccagatacgaaaaatctggcaacgaacagtttgtgactgaactaagcaaatgggtcttccacgaaaggggccatctgaaggtatatgcataatcattttcacttgttttgctctttccttgaaactttcgactctgcagatgttaattgcttactcctatacataaatcagatgatagcttgtttgttcaattagtcatctctgttaccttcattggtgcgttcctcacttagcttttgtgtccaggctggtaatcttgtacaccatagggttggagaaacagatgagccagctatatataggataaaggatgacctcgtatggttctagatcttctgactcaaccaaagatgtgtgcttaggtgataatctcctgggaatatgtggcaagcttttaatgtggctgttaattgcaggaattttctgtagagatatatgagtggtcaggaaagagctgggagccgtatgttgctaacgatgtgcaggttcagttttacatgatgagcccgtatgtgttgaaaaccctgtcaacagacaagaaggtaacttatttctgatctccaaagcagagtcatctcgtcttttttttgtttttggatttaagttgctttcaactttagaagttagaactcagtctgctttgttgcctactttgcagggtctgtttcatacatctttcaaggttcctgatgtctacggtgtattccagtttaaggttgaatatgaaaagctaggctacactacattatctctttcgaagcaggtgagtaactaactatctcctagagttttgctcactttccagactaagacatgatgcaaaaaaaatgcgggcttttgcagattccggtgcggccttacagacacaatgagtatgagagatttatcccaactgcgtatccttattatggagcctgctttacgacggtaaaccctaacttcttctatcttctcactttcacacatacacacacacacacacagaggtacgactgagaaagctaatctttaacttcatcgtttgctcttggacacagatggctggtttcttcgtcttcagcttcgtctacctctaccataagtagaatcccttaaatggtggccaagtcccataaagtaagccaaacctccatatttagatgagaaaaaacaactttcgaactagagaccaatatttttgggcagcaaggttttcatatgtttctagttttagccaaacagttgcaaccttctttttgtttcccagatatttctatgttaacgtaactttacaccctttctctgctcctttctcctctttcccgtaatcaaagatataagtatgcccaaggcagctcaataatcaaccatttaaaacccataaatcaattcagggtaatatatgtaagtatctataatggttgcggaacaattgtaaatatcgtgatgtcattggtaatcgtgtaaatatcagaaagtatcggggtctgtgtgaactaatcggaaacggttggtgtttatgcaaaataaacaatactttcgactttttgtgtaaaaataagcaaaaataaaccaagttaaaattacggacttgttttcgtatttgggcccattgatagaaactcaaaatttcgatgatcatttgattcattcccaatttcacgcatctaaaccaaaatgaacagatgggttcacaacgaaaccataatcactggcccaagaatagtacttttgttgctctcgttgtagtcaggagtcatggactcataaatatggtatagtactagaagagtagtgcacgaatacaatcatcaacttgtagttggtacacagaggggagactgattagagagtgtaataaaggtgaagaataaaagaattattttattaaaaaatgcgacttgactaaacgaaacagtgtggaacatgtcaaactcgcgaccaaatacacaaatgggaaaatcaaagagaagacaagtcaaagatagaagaagcaactcagttgtttctctcctcttcttgttccccacaccacaatccatccctctccttcaccactctctctttgactttcagagtaactaagatttcagctcaatctcttatctcttccggatcctcatcgattttcaggtacttaccgatccgatctcagttttagttccagcctcccgcaacgaaaactctgtcttgattctcgcactctgcttcctacagaccagatttttctcaaatcaagtaagatttctgtttctgtaggttcttcactagttttgtttgaaaagtgtgctcaaaacactggttctggattctatttgtcataaaagtcaacatctttttggctcttattaatcgtccctacctgagacagtccatgtttcttggaatgttctccaaaaccatggaagacaaatcaaattccagcaggaacagaaccaacaacactccacttcctcaacagatccgaacagacatgggttccttatactctgcagatcttactgcttacaattcagcctgtagagaagatccagatttacaatccttcgattcctctcttcaccaacgcaccaaccgggtcatcaactcgctcgcctctggtgctcaaactcggtctttatcctttgacgcgctcattgaagtctcagggtgtcttcttgaaatgaaccaagaagtcgttagagtttatcattgaaagcaaagaagacgtctgggacaacaaagatttgacatgtttggtcaatgcttattttga

SEQ ID NO: 67587 - DNA, 678 bp, Arabidopsis thaliana landsberg
gcgcgttgcggtcgctggcgtagagcacctgctcggtgaccagccgataggcggcgcgctcgaaatcctgcacggcgtttacgccgttggagatctggctgagcgtgttccagctgcgtttcatgcggtcttccgaagccgggtgacggcgaagcgcggcgcgcgcaggtagccgttgtcgtccgcctcgcccacgtcgagcaattccacgcggaagccgcgctgcaggcggccaagcgggtcctcgcgacgcaggccgccgatgcggcgactgcgcaacgccagggtgagcagggtctggtaggcacgcaggtcctcgatcgaggcgatggacagttgcgtggagtcgatgccgccctcgggcggcaggtggcggccgacgtagcgggccatgtcctcggcattgaccagccgcgcacgcttcatccggcgcagcaggctgagccgggccagctgttcgggcgtgggctgctgcatggcattggcgctgcgcgggatcggctgcggcttgcggcgcggcggacgcaactgggcatcgtccatcagcgtgccgggtgccaccggcaggcgcagtgcatcttccggcgcctgcaacacgccgcggcaggtgcggcgcagcaacacgtcgagcctgtccggcgcacgcagccggtaatcgaggaaagccagcgcgcgacg

SEQ ID NO: 67588 - DNA, 879 bp, Arabidopsis thaliana landsberg
tatgacaaatttatagcctcacctttcttcttcttcttcttcttcttctgtgtgtttttgaatttgctttcttcaagaggtttcttctccacaccgcttcggtgtatgatctgattgtgatctctctcgatatctgggatcttcggggtaagcgatttgatttttgtgtatttctcgtttctcgtaatcttcatgattggttttaatagtttgctgcgattttacataatcttcttctgttttgattagctactttagattacagctaatgatacgtttcgggattagtgattattgtatgtttaactagttttagaatctctacatgcatgaatttactaggtagggcttctttcttcttcttcttcttcttcttcttcattttgttggtttgattctgatttgtttttgtattgtatatgatttaaggtatggaggctgtagattattattattattacgtgtggtgctgatgcaatgagtgttgatgcctgttatggaaagagtagctgaagaaactgtggcgactaccaacatacaattgaaagcacgagtggatgatgttccttgtaataagcttgatgctcgtcataacgatatggtgattcaatcagaaactgcaaacagtgattgtcctggaagctcagctcacaggaatgttgatttgactaagccgccgcctcctgaggaagccgcaggagataagctttctgttgaagagttgacattggggacccacaggattgttcaagggagtaataatactaatgtggatagtcctagggctggcaagtttgagcatctttatcgtttggctagagggtctgcttttagggcaggagatggggatcgtgattctcaacctcgtgatatggatca

SEQ ID NO: 67589 - DNA, 569 bp, Arabidopsis thaliana landsberg
ctctctttttactaacttacctgtccatacttaattacttttccttttgtgaaattcatgatacttttatgggggtagggtcaacggttgcatgttatgttgtattctaataacattattagaatattttctgtcaaaaatccaaacattgaaatttgaaatactagattttttattggagataaagtttattttttaaaataaaattataccttctatacatttttattacattttagaggacaaccttgagttctaaaaaaacttacaaggaataccattagaattaaaataacaagaaaacaaaattttacactcctggtctaagtgactaggtctagctaaggaaaatgcactttttcattatctctaatttgatccatccatatttgttgctgcaggttagaaagaaggcgacgtctcctttctttttttgctttttatagaaaaaaatcgtacctgatctttgagatttagatttctttcaatcgagacattttttaattgagaaaattgttagaaatatacatattaattatgatgtaaaccagaagtcgaacaacatgccc

SEQ ID NO: 67590 - DNA, 578 bp, Arabidopsis thaliana landsberg
catgggagcgcttacgggtatatgtcataggtcaacagacaggtgcttttttttaggctaggatgcatagaccacaacctatacggagtccatggacgcagactggagagatagataagattcaaatatgcatactctaactaaaagtagcccatcgagaggatgagcatgaatatccatactccatgtcgcggccattactaatgtaaggagcgaaagggaatgtttgcttaatgaatttgaaactatggacaatggaggacattagattctgagcacaataaatgattcgactgataaattattacaacatagctgcgacaacaacacacatctaatgtgtatagatgggcgaatatttctaaataggccatcagattgcacaacaaacaattagtactacgtaccttacatatgtatgaatgatggtgatgccaaagcaaggaaaaatcatcagccgattcaacatagctaaagaatcaacatgtagaagcacagatacgggaccacctgtgacagggtgggtaactgtactagccgtagaaagatataagagtggaagtgtactccaatataaa

SEQ ID NO: 67591 - DNA, 429 bp, Arabidopsis thaliana landsberg
aaagccaaattatttaatattaaaaatgtctacaaacgcctttttccttgtttcccaaggcgaacacaaatacacacgtgtaaagtcgaaacaaataaagcattttctactgttcttttgtcaaaaagagacgctcttcaaatcacataatgcattactttgactgggcttattaacttattatgaaacctaatcttcttcattgctacatgggctatgaaatggatagatcaaaaactgtgtttaatgagagaataatcctgagacaaagctataaacactagaacacatataaagaaaactctgaagctttctttactgaatccaagatgtggacaactcttgcccttgattatgcagactgttctctgtttctactcgttcctcacctgcattgaagtcagctcgtaagactaaaccaagattctg

SEQ ID NO: 67592 - DNA, 784 bp, Arabidopsis thaliana landsberg
aaaaggaccatttacacttagttgaatattaggcttagtgatgttataatatatttgatactaaatattgataactacaagtattgaatacgccattaataaggatcttagtctgctatgagagttagttataataagaaaccaaacaaatataaacttatatatacatctaaactccggtcatgttatcttcatattagttttcttcctttaaaagaaaacagggcaaatgcagacctttttcgatttggttaataatgtcaacatttactttacctttttctttaaattgtaatcatatatagaaatgtgaattgggataaaggagaggtgaaatggaatagtgacgcacacatgatttgaaagcgtcgaatcataatcatagttcataggtctaccaatattgatctctttcaaatctaaatcattaattagatatagttctgattatctttagccattattttggattttaagactttgcttgctttatttagctcgagacaaaatagttttgcaaacctcccaataaatatctattataaataaaggttttttttagcatatatagataatacatatgaattacatgtatagactgtctatcctcgtcaataatacaatttttgtagatgaaattcaaaataatcatctatatcaactttcaacaatgcatattccaatttcttgtatctagcattcatcctagaaaagtttatttttctttatctaattttttttgtttcaaaaataaagaattattttttttaaacgtaagggatct

SEQ ID NO: 67593 - DNA, 285 bp, Arabidopsis thaliana landsberg
cgggtggcctaaaacctatccaaagacgcctgtattttacccactttcgagagtaaacttcatccattggggcttataggacggtcttcatcggactctgttaatcacccctagaacatatacacgaccccacgtcaggcacaagtacaccttgatattaagcatactgacatgcgcaggaaaaaaaactaacatggcttcccttatttacagcgaccgatcctggaagaacccaacttgataaccttacctcttaacatttatactctgaagcctgagaatcga

SEQ ID NO: 67594 - DNA, 673 bp, Arabidopsis thaliana landsberg
  unsure (1)..(673): unsure at all n locations
agctcgacttccgcgtccgccgcatcccccctgccccggcactcgatcagactcttgctcgcattccggctgcgcaggactccggctacatgatcgacacgtcgacgccggacgacgcagaccagggcacgggaagcagcatcggtgcgccgtcatgggtttcgatatggcgcgcgctcttggttggcgctggggaagctgggatcagcggctatgccgcaggtctcggcggaacagcatctgaggccgcgcagcacgccgcgaactccatcaatgcgtcgtctcaattcttcaacgccactgcgtcggggacgactgtaaccatcacggaaagagggaacgccaacaatcagtgggtcaatgcggtgcagcctgtcgccgatcccgattatccctataaggccagcgtcggcaactcgacgagtgggttcgaatatttcttcgagatcacggctttcggcgctcaaanggcgggggcggnncgtgggcgtgcctntccggccccgcccaaagtgtcgcaacgctgaccctcttgcgggtgccagaacgggggatggtcgttctcgctcgcccgggaagggtgttcaccattcacgagctaccccggcggacgacgccaaccgggcgtttatgatatacgatgtcctgacgacaccgattgtggcatgggcta

SEQ ID NO: 67595 - DNA, 363 bp, Arabidopsis thaliana landsberg
  unsure (1)..(363): unsure at all n locations
gccaggcctgtgaatttgattattcccgctcccatgctgcccttttccttcgggaagaaggtattgaagggatcctggggacagtaatcccgccaccatcatgacagaccccatgatggccgacaaggtatacctgctgcccctgaccgcggaaagcattgagcagatactggatgagaacaaaatagatgctgttctgcccacgatgggtggtcagactgcgcttaacctgtgtaaggaagcgtatgatctgcgtgtatgggaaaaatataacgtacggcttatctttgaggatgtggaagctatagatactgcggaagacagggaaaaatttcgccnnnnnnnnnnnnnnnnnnncataca

SEQ ID NO: 67596 - DNA, 452 bp, Arabidopsis thaliana landsberg
atggccctagatcacgttttttgggccttgttgggggcggctcgagcgggagcgggccggatgcgttggtcggcacgggccgccgcacattggccgggattttgaggtcatctgccggcggagccgcgggcttggtggccggtgtggcgggagcgccggcctgcgttgggccgggggccggctgctgcgaagcgccctgcggcgtggctgcgggcgctatgggaggggctttcggcgccgggggctccgccggctggccgtcctgctggcccgacacggcctttcccgtgccggggtttatgtcggtgacgctgccgcctgccgccctggcgagcgcgtcggcggcgccgcctgccgactgccggagctggcgtggcttgcgctggcgccgctgctgaggctcggcaggctgtccggtgaccggatcgggtgcgcccggcgggtcgagatcg

SEQ ID NO: 67597 - DNA, 285 bp, Arabidopsis thaliana landsberg
ccttagtctcaactttatgcactttctgctatttagtaacacctccctttttcaccttggaatgattgggagactctaaaatgctaacttctctaggcttattccactacatgaaatatagcccaatcatgaaccggtctcacacataaccagaacactctccttattgttaggctagatgatagtcatatctatctttcctgctcatgtgttatccacgaccataaaaaaaccttacaggcattaaaggggacatcaactggacaaggccagaaaagcctgaat

SEQ ID NO: 67598 - DNA, 406 bp, Arabidopsis thaliana landsberg
  unsure (1)..(406): unsure at all n locations
agggtgctgggcatttcttgtactctgataaataaatcacatccccggggtcgtgcagttaacacagggcctctgatgacacngtgaggattctgtaatagcagcgaaacaccacaacacattcagaataaaagaacatagtgaaaaacaaagaaagagaggcaagaactggacatgcagacaagaaacgcaattcacagacttttagacaacacacagaactaatcacctgagaatactgggaaagtagcttcgcccatggagcctttaaagctcgcttcttagcacgcncagatttgcagcatccgccaccgcttcacctagatccacataaacaccaaaacattagaaaggagaatactttacactagaaatggtgagatcacattgaaagaagtgaaaacct

SEQ ID NO: 67599 - DNA, 226 bp, Arabidopsis thaliana landsberg
cccactgccactgtggcggctgggacgatcagaccgcgccactgagccggtctgcaactggcctgccgaagccgacacccggctggcgctgtacaccctatgacttcaaggcggcctgaaggaacttaagaaccgggacttgttattgacgagtgatgagagagttgaatacatttttctaaacaagttgtttttttgcgtttctacatcggtttacggctttagc

SEQ ID NO: 67600 - DNA, 627 bp, Arabidopsis thaliana landsberg
ggccgacctcgtcgtacatctgccgccactcggcggccgggtcgacggtctgccggatccgggtgaggtcgacggttatgttgctgtcgctgtcctcgtcggaggaggcacggcggtcgctgggcacgaccttgagccggctgtcggtccacagcaggacccgcttgccgtcaccggtgacggcgtagtggtcggcgtcgcccgcgagatgctcgacgcgctgctggaccaggtcgtagcgctccaggtcggtcttgggaccggggtcctcggaggtggcgcgcgaggcgccgaggacaccctggagggggtggcgcagccacaggacgccgtccttcgcggcccgcagggtggagtagcgggccgcctcgacggggaagggcacgatccggtcggcgagtccgtcgaggtcgatccgggtggtgggggtgccctcgctgtcgggggtctcgtccttgtcgggcgcgtcgaaggggcggccgtgccgctgcggtccgaagggggacggggtggtcgccgcgagcgtgatgaggtgcgggcgcaccccgccgacgaaagccagatcgaagacgtgctcgtcgtagaccgggtcgaaggagcgggcggagaggaacgcgaaggtgcttg

SEQ ID NO: 67601 - DNA, 734 bp, Arabidopsis thaliana landsberg
gaaacggaaaaaaattggtttgagctgaaagtgtcgaaaactttataattttttccgctacaaaacaattagagaaaatggtcagaaataattacgccaaaatctatttttattttactcccacatctttttgctttcaccatatcacaccctatatgtgattagaaaacgtataggataaacaatgaaagaagacaacggggtatgataaacaaagaataaaaacaagaataatatggtcaaaattgggaaatggggaagactacataagatttgatgagaatgtgtcagaggcagaagctttaataagactccctatacatactcatcaaccttctcttacgaaattctctactaatatttttttaacaaattttagtggaatccaatggagattattagattaatatggtcaaatttaacagataggaccatatgtagttcttattaattagtctttgaactactagaattaaagtactaacaaaggaagctattgaatatgtaatcccatttcttgtatttgaatccgttatcccataaaaaacgtaatcatattttcatatgcgagtatagaaattaatgtgggcacattattcaaattatacattttcgtttgcccatttgtataaacttgatagtttttactttttagagattaatttgcttatgatgaatcttgggtattagaaaagtagaaataaataaacgtgtatataaattaaagataattg

SEQ ID NO: 67602 - DNA, 532 bp, Arabidopsis thaliana landsberg
aatatatcaacccttttacgatcttaaaccatattcagtttacctaagctttaggttgtgcaatctgaaacaccagaggttatacagttgacatagaacatgaaactgtgtttacacaaatcaatccacagagaatacgagttattcattacattaccataggttgcgaatagacatagcaatcttggttgctctcagttcggtcgttcgcgtaacactttaagatcaacctcagtaggatcagtagctcgaatctgatagtgaatcccttgaagcttcttacttaactggtctttagaagtcgagtaaagcaccttcgcccgaactggataagtcgaaggagacctaccacataagtcgtgcaattcaaaatgtttttagtctcaacacatcaaaacccttatagaatgactcatgggaaatatcagactaaccaagaaaagaagaagattgtgctgtcttgacaattctcagaagtgacgaaatcgaagtcatagacagcgtatctgcagtcattatcaggaagtgaagc

SEQ ID NO: 67603 - DNA, 301 bp, Arabidopsis thaliana landsberg
ctaagggctgacgttgagacattatgagctaaggtatgaagtcttctgtgtttttctcctctcctttttatgaactaccgtccttttggatgcagatttagttgctcgcgcgtcttgtgcaggtgaatatggcataagcaaccgcgtgacgagaagcatgttctgagccatcgcttcccggaagagctagtgtacatatcttcaacatccgatggcctttcaccggtcacaacagggtggtaacttgtagcactgtttcggctcttgaaccacactcaaacctactctgtttgacaaacca

SEQ ID NO: 67604 - DNA, 619 bp, Arabidopsis thaliana landsberg
  unsure (1)..(619): unsure at all n locations
attggcttgcagtgttctgcttcatcatctcttatgttcacaaacacatcgtatagattctttgccttaccgtaatcacaaaacaacaaaaacgttatatagattcttaatttaacatcaaagtaagtcacaaactgtgaataatgcttcctccatacaaacataagacagaatctcagtcatttatagagcgcagaatcataaccatggataaatcataaacttttttttagcattttgtggttcgacggaatcagagatggaaagaactaaacggatatgaaatagatttgctacctattactggtcttcgagtattgggagttcttgatgtttggaactcatctgcagacaatacagggccagtttaaaagactactaatcataggtaaaaacatctctacaactctggaggatattgataattcctggaaagacaaactcaccaaataagtacaagtcacctcccgtatagtattttactgcgatatccggtgcaggcatattcttcaactcctctggttagggaaaccaataaanaatgaagcacaacaattcagaatggtaagatcgttgaagaattttgtgttatattcaaagcaataactcatttaacact

SEQ ID NO: 67605 - DNA, 601 bp, Arabidopsis thaliana landsberg
ccaacttccagcaggaacaaaagcatagagtggttacatgttagtctctaagatttggcctctataccagttttgttccaaggctcatcttctaagagctctgaggtagcagatggccagcagtgcttgagagctatcagaacgatgtgtgcatcttttcttctgcccaacctgaggccagtaccatctcttttgagggctgtggctcctcaggcagccccaaggactaaaattcaaagggactcctaacttcagggagagggcagagctaggaacaaggcacgagagcatggtgagaggaagggatagagttaggatagaccaagaacttacttcttcttgtctttagacacacccagaagagacctagggttctctctatgaagaacaacacaggggactgaatgacgatggtggtagcactttcgtcatatgtcttttatatgtattgaatccatgcatcacaccacagactcatgtttcattctggaaagatactgtggtctcgtggggggatggctatcatgtgacaggggcatttgcctttgcagaggaccgaacacctgggacttaaaaacacacaacgtgctgttcttgttct

SEQ ID NO: 67606 - DNA, 586 bp, Arabidopsis thaliana landsberg
  unsure (1)..(586): unsure at all n locations
aatacatcaaaagatatagttaagaaaagaattactgtgtctacctgaataggtagtgcttccatatcagcccgaaccgcaacaaaaggcggtccaccggatccgatccaagcccgaatacccgttttcgctaacggatatctatacatgatacccatacggtccagctccgacctaacaagcctactagtctcatactcctcaaacgctagctccgggttctcatggatcgtcctcctaacgcgtttaagccacgcaacgttatccggctgataagtcagcctaagaatctcatcagaacatgctttggtccaaacccaacactcatctgacccgacatgagccggtagacccaaggactggatcttgatcggtgtcggtcgtagtaacatcccaaaagggttnnnnnnnnnnnnnnnnnnnnnnaagaaaggtaagttggtggctatggtaagagagacaaagattatggttagagagacagagagaagatcagtttccgagattgccataactttgcgttcttgttgtgagagagaaaagagagatacagttgttttgttataaaagaagctgatgaaagaga

SEQ ID NO: 67607 - DNA, 535 bp, Arabidopsis thaliana landsberg
  unsure (1)..(535): unsure at all n locations
ggccaatgcccagcaggatgccgagcgcgtggggagcgagcttgccgagcttctgtcgaagaattctttgctcaagnggaaggaaaacagcttgcacgccctggttggcgctcgcaaaaaaccacccaatgctagcgagcggccgtggggccggcaaacgcacgggcgcgtggacgccgtgcaattacgcgtcgtgctcgcgcgtcgggtgcttggccagcttgcgttgcagggtgcggcgatgcatgcccagccgccgggccgcttcggagacgttgccgtcgcaatcctggagcgtgcgctggatgtgttcccactcgaggcggcgcagaggcaacggcagttcgggcgggtccgtttccgcatcatcggtgcggtcgtacagcagcgcgcgcaccaccgcgtcggcatcgaccggtttggcaagatagtcatgggcgccgcgcttgatggcttccaccgcggtggcgatggacgcgtagccggtcagcagcaggatgcgcagcgctggcacttcgcgcagcagcgcgggaat

SEQ ID NO: 67608 - DNA, 179 bp, Arabidopsis thaliana landsberg
ccgtgtatccttctcagtatcggcgttttgctatagtcggtaagttactgggttttttattaaaaaaattgtgcttatcaactgttcgataaaatgtctaagtgaacttttaaaatatggttaggttttcagtcatacttttttcgttattactttttcttgtgctacttagtttcaag

SEQ ID NO: 67609 - DNA, 1599 bp, Arabidopsis thaliana landsberg
cgctacaatgtcaatagatgagtatataccctaatcgcctttttctattttcccgccggaatggtttttcagaaaggtttcagaatctctgtgggtgtcatagcaattaaataaaaataactaaaataaatataatatattattatataatggtattaaaacaccataattatattattatgataaaatctatcaaaaattagtcaaaaacatgattgataattaagaactatgaataaagttccaaacatgtattcaaaaattataaaattatagtaaaatgtttattactttaataaataaataaataaaaatcatactaaaaataaacaaataaagtttgcttttgttaaaataaacatagaaaactatgaaattagttagaatattgtttttttttttgttaaaagatataattttttttgattagtgtgagatatttaatcaaacaagttttgcgcaaaaattaaaaattagaactaggaaacacacaaacccaacaataaaccctagcatttaggaagactcttgaagaatcttgcaaaatccaatcctattgttggtgctattgaatccttgatgaagctcgagtcataattacatttctcccaaccatgtttaggtcgcttccaatatcgaatcctagctagattgattaattgtgctatagaagatatttcctaattttctagttaatccctctgttaatttttttcatttggaagtgtcaagtcttttacatttgcttcgttatgtacataatggatgtatttattaattcgggagtgagtgaattgaaggcatttcgggtaattattttgacaatttcaaatcataaattttaataaaccaagaaactagttgacaaaaaaaaaacaagagataacaacatataccactaatctgtgcataatttgcaaaaatacaagaattatttgctcttataaaaaacaattacttttttttgttgttggtcaacaaattataatttattcctaaaaccgttaaggacatagccaaacaaaggaaagaagttctaatttagccaaagaatccgactatacatggtagttctatcaacaatatatagaaattaaaattacattttggaggactaaattcaaagacgtataagtgtaatcaatggttagagaaagaaacaacattgtcatcggaaaaaaaagaaaaagagagaaagaaacaacattaagtaaacgataagcaatatttaaaatatgagtttagctttcatagatgaaagcagctacaacaacaacaacaacaaaagacaaacatcatttaatacattactaggccactgatgtatgaacctaataacctactacaagagatatgatatgataattacacctcttcatcatcatcatcagcttcttatacttcttctcctgatcggcgaatgcaaatttgcatcttcaatatagaggcttcatcaagtaaatagtaaggaatcgacatgaaattagaggcttcaccacgtaaatagtaaggaatcggcttgtaattcgccacatgattttcagcgctcactttttgaatcttattcatcttcttggattcaaacgtaatcttttcact

SEQ ID NO: 67610 - DNA, 745 bp, Arabidopsis thaliana landsberg
atggtccggtcatcactagcagaggctagcatccgaggatttttcgggttccagcttacacagtttacggtcatcgaatgtcttgataacacttcaagcggctttgtgttctttagattccatatgtaaacctgtgaacaacagatcaatgtcagtcaacagcaaccaaaaaacaactgtcttggtcgaaaataatgtgcttacctgtgaatcctcacttccactggcgatgaacgaactatccaacccaccaaaacatgaccgtatcacgtatttgctctgcctgtgacccgagaacttcaatggttgtttccactctccagcaagatcccaaagatgtatctcttggcagctcaagttgactataaaaaacttaccatcaccagaaattgaaagggaagtaattggctgttcctcagagataacacgttcgacttttgtctccaaattcaagatccggatctctttatccgaaaacactgtaatcatactctcgccatccggcgtcacagccaaatccaccacctattaggaaattgtgcatttcgaatttcaagtatttgaataccaaaacggataagcaaatcttttaacctttactaacctttggaattctcgttcctctccaggctttgatctcgttttcatcagtgtcccacattacaatccctctttctgggtcagaactgccacagacaagccgagttgagtcagggaaccatgcgccagagctgacagtgaatcc

SEQ ID NO: 67611 - DNA, 487 bp, Arabidopsis thaliana landsberg
  unsure (1)..(487): unsure at all n locations
acgccgccgtcccgtcgggggacacctcgatgtcgatttcagccggtttgccaccacgacgaaatcggaggggcccgacgggggcatttacgccccgtgcttctcggcgttcgcgggcccgatccccagcatggacaggaacacccggcattcgtcggcgtcctcggcgtaggcggccaccactcggcgggcctggcgcgcggtgctgtcggccagcggttccacgtcgtcgatgtcggcgcgttcggatttagcaggcatgtgtcgactctagcgaagtccgcagcgcaccgtagcctgtccagcatgaccgaacnnnnnnnnnnnnnnnnnnnnnnnnnnnnnnnnnnnnnnnnnnnnnnnnnnnnnnnnnaccgcccggaggcccacaacgcgcagagtcgcaccctgctggtgcagctcgacgaggcgttctgcagagccgaggccgacgacaccgtgcgggtggcgatcctggcggcacgcg

SEQ ID NO: 67612 - DNA, 539 bp, Arabidopsis thaliana landsberg
  unsure (1)..(539): unsure at all n locations
cgcgcgccactgcgactgcacgggcgcgctttcgtccaacagtcgcgccatttcgtcccatgagccgacgtcgcggcagcccaggtcgcacggaacgcaggcctgggcggcgagcttctccatgatcgcgtaatcgagcgagatgccgtcgaccatcgcgtagttgtattcggcgttcttcatcgaggcgtccatctgcgagatcttgctcnnnnnnnnnnnnnnnnnnnnnnnnnnnnnnnnnnnnatctcggaaactttgaacacgaacatgccggcgttccaaaagtgccggcccgaatcggcgtatccctgcgcggtcttcaaattgggcttctcacggaagcccttcactttgaaagcctcgaggtctttgtccttggccagcgcctcgctgctcacttcgatatagccgtagccggtcgcggngtaatgcggcatgactccgagggtcgtcacgaagccctgggccgccgtctgctcggcagcttcacgcacgccggagacctcttcgttggcatcagatgatccgggggaaa

SEQ ID NO: 67613 - DNA, 220 bp, Arabidopsis thaliana landsberg
tttgttaatatagtgagaatgtggtaaagacgtaaactcgctcccctcggtttaattccgcttgcacaactttattgctatctatctactcattgactaccatatccgattctaatagaaaaaccctttgaccaaccaaaattttgataaattatagatttatcagcttaccaaaatgatcaattttctgcagattaagaccacaaaaacaaaaaaaaaa

SEQ ID NO: 67614 - DNA, 610 bp, Arabidopsis thaliana landsberg
  unsure (1)..(610): unsure at all n locations
aatgttttattattattttgtttatgatttttttaattaaatttactgattccaaaaattaatacgagtggtcgagtcgtgcattgctattatattatgaatcttaaataatagctgatttttttcaataattttcgagtgaaatgaaatgattttcttatattacgtggatgaaaaataaaattttatattcaaaacgacactctcatatctttcaaaaattgcaagaattttaaaatatattttgcaattaagaaaaaactagaatgttatttattaaacaaaattagactaaaatcatgtatcaaacaataatatcagaacaaaatttcagattcatgtcaccagaaagttcataaagacggctttattagtataatagttataattaattattaatagaagactatacaataatttgactagaatcactagatcgatttagtccactacagtctaaacgcgtgggtgtttcctattagtagtacttattaataatttcataacaaatgtttgtggctgccatgatagactttgttcatttctctcgnttcttatttttcaaaagatatataagtcaataagttgacaaaaatgtgaattgagtttt

SEQ ID NO: 67615 - DNA, 357 bp, Arabidopsis thaliana landsberg
ctatcataagccttccttttataatccggcgcacgctccataataaccatataagaaatagtcactgggtataggagtgaagtgcacaaatgacttgccggacgatacatcatatcgatcaaaaataacatgaagattagattccgaacttacataatctgtcaatattaacacgcataaaactggtgatgcggcgacaccatgaataaaacacaccaaaccgatagagtagttattttacccgaacactatcatatcataatagagaccatacacacagctcagctcaattccagaatataaccaacacctgacaccattacaatgatcaataaactactgcccacataaaacacc

SEQ ID NO: 67616 - DNA, 1280 bp, Arabidopsis thaliana landsberg
accatgatattggtcggtgctattatttttttccttcatttgaccaacaaacttctctcttcatttcgaaaaatcggtcgatacgtagtaagactaaattaaatctatcacaacgaatcgattcgatggtttttacattaagccaatttctccgatttgtttttggcgaatgtatctggtgaatggagaaaggtggtggatttgtgttaatggtaaaactgaaaaagtggtctgatgattcttctgtaatggtgaaaactgaatcttccatgaaagttgaggacacccatttaagctcaccaatgggaagagaaaactgaaacaaagttaatgaatgtcttcagattaaaatagtattaattttataataaattaaagttaagacatcctgtatgaggatcaccgatgtagatgctcttaggttttatggtttttaagttaacaactgaaaaaaactttctaaaaacttgcaaccatacagaattatataatttgtatgggtttttcttggtatagttttttttgcctacttagtaataagaaagaggaaaattgtatatcatttaggttaatctaatacgattttcattaattggtttaaatgaacactaaaaatgatttacgtatatcacttagagggtaaatattttaccattatctttgggaaataaaagtttacaacaacatagtctaaagtaaaattggcacacttcaactcgtacatgactttgagaaacctataacacttatttttggaaacattagaagatattctcacatcctccgaatcttatgtgggacaaagaaagagcttcaatgctttgacgaagtgatgtttcgacgaactgatggtaacattttcgttgaaacatagttttggttgaatgagataacgtcgctgattccatggcaagatatacgagaattctgacaaacattaggagtaacgatcctcgcgttgttcacatatatcccggaccctccagattttgtgatggtgaacattctatcagagaagctacaaggaacaagagttctgtttggaaaatgaagcatgtggttgatcataagccaagcagggatcgtatgttttaggataaatgtttcaagactctccggagtaatgtctgcatgagaaatatcgttgtcgctaggcatcaagaaagtaatatctgtgttcctgaagtaattcgtatcgttgaggaaacgaagaaggatgacaaaaccgttgtaagattggcttctcatgtcggtcatggcagagatgaggtcggtttggt

SEQ ID NO: 67617 - DNA, 716 bp, Arabidopsis thaliana landsberg
ttctctacacgaggtagtttttaaatggttgaattagcttagttaatcatacatttttttctttttgatatatgtaatcacagcattattaccacctatgatgtaaattattccaacaattacgttgtctcatttatttaaagtccttttctattgttaggttttgatcttttctctgtggacaaaaatatatgttgtatgacatctctaattggtttaattggcatgttcattgtatgtaagagcatagttttttttgtagacctgctaactgatacggttagtccctttctatgttgagtctctatgtggaaggtaaattcactctagcttctttcatctaatgacaccaaatatataatgctgacagaaaaaaataaaatatccaacaactttaaaaaagttaaagcatataatttatactttaaagcatatccaactctagtcaatggaaagtttctgaaatctaaccaaatttatttactttattaaatataactatatatatatattatattaaaatgctatgaacttcaatttattaaatttatttaattttttaaaagaaaatatattatattagaatgcaatgaatttcaatttattaaatttcttaatttatttattattaacttgttcatttttcattttataatgaagatatctaactatagacattatatataccaaaatttctttctacctttttttacttt

SEQ ID NO: 67618 - DNA, 439 bp, Arabidopsis thaliana landsberg
ttaccagggcctgctgacactactgtgatttgatcccatttctgtacggaagtccgaccgggatcatgggggcggtgtcagtcatacttgcaacatacctttcgttgaaagcttacagacagattgtacgttcgataggcggtccggtcggatgtgtaccacctgagatactgaaccagtggacattgaaacctgctgtagtcgtcacgatggcaatataaattggctcggcaggtaagtttacgatatgagagatggatgcccatgtctgacgtacgccaggtgacggaactgcgatcgatccatagttaagaccgcctccaggagctggaagcatgatcccgccttcaccgatatgactggctacgcgatacgatactgagaaagttgcagcgctagtaacgtatacacgatagcccatccagtcagtggcatctat

SEQ ID NO: 67619 - DNA, 364 bp, Arabidopsis thaliana landsberg
ctcaaatgctgctattttactatgcgagctggattgacctgtctatataagatacaaactcgtagtagccggagttcaagtcaatcactatgataacaaacacacattctttcacaactaaccaacaaaatcagatcctatctaaaaccctagcggaaaaatatcccgcttaacacatgataataccacaagtacctactcacttaaatctattggaggatacttcttcatctatcaaataagatgaccaaacattataaagtgtcctaaagctcgtctttgaagctgaggatgaaacgacgatcgtccaattgcacagtgacattattataccactatgccgagagcactctttttcttatgc

SEQ ID NO: 67620 - DNA, 402 bp, Arabidopsis thaliana landsberg
  unsure (1)..(402): unsure at all n locations
gggagaacnccatggggggctgtgttcaattttataatataaacttccccccctcgtgaaangaaagcttgtttgttttttttccagtccaatgctaggttctctttaatgcggtttttagaaaaattattggattaaccaagtttaccaaacaagggaatcaaattatctaatatgtcgaagttcaaaacactactattctacttaattgatccaacattgccggtcactcactaacttagtctgctatttttgtgaagcacatagccacattgtcaaccatctgcaaatggaaacatatcctgctatcaataaaatactgatgaaatttagtttagtgtgaaaaagcattaaaagagctgggcatcattttacctaactatacttaatttgagatgagtg

SEQ ID NO: 67621 - DNA, 675 bp, Arabidopsis thaliana landsberg
ctggttgatttccatctctctgccgtttttcgagctcttcattccgaagccaactatattcgcatccaggtatcaaaatcagctagcgcactaaccatttctttttctttgtctccacaattcctaagatttgggtattaattatataggatgacacattaactggggatgctgcttctgttgatatcgctaccgtcgagaatctggacattcttgccaagacaggagatgaactacttaaaaaacctgttgcaagagtcaacctagactcgggttgtaacgaaaatgcttatgaaacgactaatgaacatgctcttataaagtaagtggcccaatttttgcattttatagctttattctttcatacttaaggtgattaaaagtattttgctaatatatttaaattttggttgtgaaggttagcaggaatactttcaaaagaaaagaagatccgagacattcgttcacctcatgcaaaagctccaattaggatctaaagagatcaaatattggatcttgtatattgctgatgattccgttgtttcactaatgcacgtttggatttatattaataaaaaggttgcaccacattgtggtcacttgtacgtttggattaagtcaataaatatttaatggaccgggaatgcttttaaaatgtttggtcatttttttcaa

SEQ ID NO: 67622 - DNA, 278 bp, Arabidopsis thaliana landsberg
gaaactgtcaatatgatcttgagatgctgcaatataagaaacacaatcttaaggatttggacatgaaactgatttggggccatttcgccattctagtattgattggtaagcatgttactgttttcgtttgattctgcacttcctcttatcaatttccatacagaagcaaatacctttttatttaatattatttatgggtcatatcagtttgcaatcagttgcaagttggttgtgtaacttacgtcccgcgaaagcttggcttactctcaaccatctcc

SEQ ID NO: 67623 - DNA, 496 bp, Arabidopsis thaliana landsberg
gcttcgtcgccgctggccagtaccagcacatagatccgcgcgccggcatcggcggctaccaactgcgattccatttcctgctccttgcgccgtccatggcgcgctgacttccattccgacccagccgcagcgcggcggttccgtgacgctcgactatggcaagggcggcaggcgcacgcgcgtcgcgtcgtcgagcgcgatcagcgtcaccagcaatgccagccacgccagcggcagcaatatcgcgatgcgcagcaacgtgccgctgcgacgcagttccatccaccagctggcgagcagcgccgcttcgctcaacgcgagcgcaatgctgagcggtgcatgccaggcgccgatcggcagaaacgcggcgccgacattggcagcgagcagcaccaggcaggcgacccataccagcaccagagttcgcagtggcaagggcgtgcgcgcgctcatgtgcggtcgaccagatagaacagcgcgaacaacagcatccaca

SEQ ID NO: 67624 - DNA, 289 bp, Arabidopsis thaliana landsberg
attcacacttttaaaaataatctgctctatcaagatacacgtacaatctttaccttacttctgggccgtaatattcactcatatgcactcataacattacgtgcccataatcctacgtggaccccactcagacattccgtaccaatcaacagccaaaattcacctacatcattaaccaatctcatgtcactttcgtgctaaaacctgaccttgacgaccgacatgacttctcacacatcagaaatgcacggcgttcttcttatccacattgacagagcccgttaacacc

SEQ ID NO: 67625 - DNA, 230 bp, Arabidopsis thaliana landsberg
tagacttgatgacaagagaaaaaaaacgtttgtggttttaatttccgctaaggaaaggcttcatggctatcttgctcccataaataagccacttcagcgatgtcaacacttaactaatacatttgagatttttgttgacattcgttgatatctagatcctaactcaaattgtattagggagagaataaaatggttggaaaaaggaaaaaaaaaaactattttgggccata

SEQ ID NO: 67626 - DNA, 343 bp, Arabidopsis thaliana landsberg
gatgactcgtatgaattacacatcaacacataccctgacccaaggctttcagtctacaaggacgggaaagaccaccctgtcaacaccacacggagtgcattctatcccatcatgaacgcacccgcccattcccttgtctactctcttctagaataaggggtaatgcgtgcataattgattgacgcatgtggaatcagtgagtgctacatgctgccgctgtactatgctgttatatgctctcctatcaatctgtatgccacagacggattgttccatatacttgcgaaagagtacatggattgacactgcctaacggctgttgatgaatgaaactgcatctatg

SEQ ID NO: 67627 - DNA, 351 bp, Arabidopsis thaliana landsberg
aaagatcctctttcgttcttaaatagcttttcgttaaacataaatattttgtttaattccaattaattttgaaattactttatcactattgataaaaaacacacaaaaaataacatattgagaaaatatgtcagtattcggtatttatttttagtttggtagttacaccaggtaccaactaatatatagattctctaagtacctttcaaatactaaaatcatataaacaacttactcaaacattttgtggaaaagaaaaaaacatttttgatacgaaccaatatgaaataaaaagctggatttagttaaaatcagataaattttgattgaaataaaaaccaaaaacgaacg

SEQ ID NO: 67628 - DNA, 589 bp, Arabidopsis thaliana landsberg
aacctgccttctgtctcgccggaacccatctccgtcgtcgtcgtctccgtacactttccgatcaaacgtcattttctcaatggctctaatcctctctcttcccataggaacaccatctcagtcacaagagctagttcttgacaccggaagccaactctgatggatccaatgccatcccaagaaaatcaagaaaccacttcctcctccaacgacgtcgtttgatccttctttatcttcatggttctccgacttaccttgctctcatcctctttgtaaacctagaattcccgatgttacccttcccacgtcttgtgactcgaaccgtctgtgtcactactcttacttgtacgctgatggaaccttcgccgagggcaatctcggtaaagaaaaattcactttctcaaattcccaaactacccctcctttgattcttggttgtgctaatgagtcaactgacgagaagggtattttgggaatgaatcatggccgactttcttttatctcacaagcaaagatgtctaaattctcttactgtatcccaacccggtcaaaccgtcccggtttagcctcaaccggctcgttttacctc

SEQ ID NO: 67629 - DNA, 342 bp, Arabidopsis thaliana landsberg
cgcttcttgtttaaaaagcacgtcgctatttccatattctagttgcttggaggaaataaatggcaaaggtttcccatagctgcacatccctaccggagcaaaagaagatgactgcggcattaaatattcagattttacacccccatcagcatgccttccatgtgcagcgtttacgggcactggggcaatttgattactctgcataagcaaaagtactggaaaatgtagcttgagaaattacaagataactaaatcacgaaataagagaaatcaatgggcttacagtggcaatgctagaatgatcccgctgcatagatatctggtattcatgttgcaatagtg

SEQ ID NO: 67630 - DNA, 2128 bp, Arabidopsis thaliana landsberg
atagagaagctgaagatgctgcaacgaagaataaacagtttggtgtagatgaccttgactccttttttagcgctcggtccagcagtgtaccgaaatcacgtaccactactgaagtaagaagactttgaaatattactaagttccactttacaagttattacaataaagaaatgtgttttgtatgtgtatccttattcttctttctgatgcaagacaactcgcaagcaagcgtccaacgcaccaaaaaagacccctaatggggtttctaatgcaaagaagcctcctgctccagcaaatctggtggatgacttttctgcactttttggaggtaaatattgtaaaaacatttctattccagcaattggttacactggtttagcttactaggaaatgtttccttctctacagaggatcctatatttagacaatttgaggaaatcccaggggaaagcgaagaacgaagaaaggccagatgggatcgtgaacagagaacaaagagtcgtgtggtatgtttggttatgcttgttttctttgaatcttctagtacaatccttgtgcttgaaaatatcgcttcatattcaaaagtttacttaagttccctggagaatctgttgaatcagttgaaacatatttccaacgtcaggtctttccatatttgatttagttgtcctgtttgcacatcaaaattggtgactcataactgactggcatactgcaaccagtttctagtttaagttttacaatgctcatcaatgttttagcttgatcttgattgtataatttggtttgacatgatttttcactattcaatcccttttaacatgtaggctcaagctgtagctgatatgaataaccgtgatcatcaatctcggattgaacaagaacagagaactgtgagtaatgtttttcttgatatctacgttttaatctacactatcataaaacttggttatgaacaatgaactttatgtatttgttagtcttcgtgacgataatactgtttttgacatctacatttcctatcgtggtttacatatagtcagtctccttgttgttgtgtttaaacacaaatgatggtttcttgttaatcttgctttccagaggatttctgagactgttgatactgagataaggcgttgggcaactggaaaagaaggaaacatgcgtgcgctgttatcttccttgcacatcgtgagttttgaataataaaaaattggagtttaatgttcttttacatctgtctatccatgtgatcctcctaagttcactctgagttctggttcggatgacaggtactctggcccggatgtggttgggaggctgtttccataacagatttgatcacttcgtcagcagtcaagaaagtctatagaaaggcaacactgtatgtccatcccgataaagttcagcagaaaggagccacccttgaacaaaagtatatcgccgaaaaggtttttgacattttgaaggtatttcctcaatggatcttcatgagtagctccctttctaaaagcctatgtagacgaaagttgacttgatggtttagttccctccaaatcgatcagtagagtttcatggaaacgatgtttgatttagtaggttggatgttactctgtattagtaatttgaaggcctccggtttagtttcttgtctcttgcatagatccgctaacctgacctcgtaactgatttgccttgtacaggaagcttggaacaagttcaacaaggaggagctctcttaagcccatatactgtgaatatagttgctctctgtacaactataattcgtctgtgagtttcctcgagtcttttcttgtttttaatcttcttgtttatgattttttcctttgaccgtaacttgtcatctttctgtacacccaacaacaaaaatccatgggggatattgtatagccccaaaaaccgaaatagagtttctttttataagatatatattgaatgtttttattataatagcttatagcgtagagatgattcactgatgttagtttcattcctatggaataacaaaatgcttttgatggtatcttcatgaacatgtacgttcacaactatctttgtagctctataactatttggtaactccggtttaagcaaaattctacacttt

SEQ ID NO: 67631 - DNA, 600 bp, Arabidopsis thaliana landsberg
gtgaaaagttatgaaagttacctgatttagatattggaatatttatgatcagattggtaagcctcttttccaaaaggattgtctccttccactggcaatcgcctgattagctacaatttaaacaaaacagacaacaaaaattacagaatttgaagaagaacaaaattaacaaactatatcagatactcttctatgcggtatggcacataaatagaaacaaccaaaccatgtcatcgcaaattaagctcaacataaattatgaggggctttaaagaataacttcgcttaagaaatcaaacctttagagtagaaacaacaaggggaggaatggtgaactttaagcgctttggccctcctgtcaggaaatgcttcttcaggacattgactatctgaaattcaattgaacagcttcaaacactgaaagccaaaaccttaatagaatgttgaaggaaatgatgactcctggggataagtataatctatgtctcagttgaaaattacaaacaaagaataaaggcaactgggaataaatgccattaaacattaaaaatattaatgtaagccaataactagaaagcctaaagtcagcataaagatttt

SEQ ID NO: 67632 - DNA, 352 bp, Arabidopsis thaliana landsberg
acatctctttgaatttaacaggggtgattagaatggagctcactcgaaactctaccacgcattgcacaacgtctacaatccgaatggtcaaaaatgtaatgtgtatatataaagtaaaaaccaaaatgtataccttcaacgtagaaatagtaatttctcaaactttgaatgtttatgcttcttgtgtaattttcccttaaatatagccaaaagaaaaacatatgatttgttattaaaaaattagtaaattaaaaaagagtatgatctcacttttgaaatcaggagacgttttcatcgttgtgacttgtgaaggagaaagctaagcgtgtgagacgaatgttaaaactagtat

SEQ ID NO: 67633 - DNA, 1877 bp, Arabidopsis thaliana landsberg
atttttttttacattattgtgtagtagagtaacattccctatctaaatattattacattgagtttctcctgtgtccttatctctttttaactattatcctctctgagcatgtctacatttctataataagaagatagcttgaatcagccaacaaggaaaattctagtacgataatctgaaagataaagataaataaacattacttcaccttatttaagaggattgtcaaaactcagaatcaaaatgagtttgataagaatattaagttgtcatcaccaccttgtgttctgtattaggagagaaagtcacaaaagagaagccaataagctgacttttcatggatttcaagtttttaaaacatgaaaaaacacttatctctaataattacaaatagattttggaacttacattcgatttatctgggaaaaaatattttagaaaatctgcaggccaccaaggaactctgatagcctgaaatcagtaacacattattattatcagaggataaggctaatgacaatgaatgatgactgaagttgatcatattgggtaaagacctgatactgtctgttattacagtttctccttcttgagaaccaagatgccgtaaaacaacctcttccaagtgaccatcagaatatgcatgctatatagcaacaccaaaaatgagtaagactaaaaatcattcgtctgctgctttgcctgacaataaagaatagaggaaaatacataccttatagaaacaacttgctccaaatgggcagtttccatttccaaagttgaagtgcttacagtcgattgatctgcaagattggaatggaacacaaattgtatctactaagcaaaatcaaatttgaagccagctcaaaatcaagtttttattgcagttagtaactatacctgagtttagccttgtatatgtcgataatttccttcttctcctcaggagaagagtaccagaccacactagggacaacaaaataagagagtttgcgacatataggacaagctctcaacgtactgttgacatccattcccgaaacaggagcactgctacgccaattacgaatacattgtatacaaaacggatgatcacactcagtcaacagcccaaacttcctttcccctggagtagcctttgacaagatacgatccaaacacacactacactcaatatcttgactttgtttcaaagcctcaatgtgcttctgcttcttctcacattctttcgtatgctcttctcgttcctcgggtctaaaaggatgcaaacacttcttgccacaagtattgcagaggtctccatgcatatgtggacactggttacctcgagggcaatcaccagctgcagcaaaagagcagatcgggtactctctagggtggatacagtagacgttagaggatttgtcaccgtcattattatcgccttgttgtagcaaatgcctagagggggtggtggatatagagcgatctaaagactcagaatctgagctaagaggaagattggaagcagctctgacatgatcgtatctacatctacttccgtacaaacatattcgtttctgatagaatgtgcaaacctaatttatacaaccaagagtcaaatatttgggactgatgaatcaaaagaaggaaacttgagaagagattagattacattattgggcggatccttagagtcatgggaaaattcgcaattttcgcctttcaagcacgagccatggacaaagaacttgcacagtatcctacaaaaaagaaatcaaatgaatcatcgtccccagaaacgaaagaatcaatctttatcaccaatcaaagagacacaaaattgaagagttcgatgaatcgagaagttgggggattacgatacctatcggacattt

SEQ ID NO: 67634 - DNA, 252 bp, Arabidopsis thaliana landsberg
ttggtattatgctgacaaatggtacttgtttaatggttatacaggaggcgtgttgatcttgatacttataggtttgttgtttttgactagagactattcaaagatgtttttttttatattcttagactatgtatacaaagttactatccaaacatttggtctggtttaatgcattgctatttactatcaggtatcattgttggctaggggataatcagtctatgttgctgagcctatattgtaataaagtaa

SEQ ID NO: 67635 - DNA, 2204 bp, Arabidopsis thaliana landsberg
tatttttaagaaaagtagtcatacagtagtataattttacattaaatcacgctttgattaaaagaattaaataacgggatataatcatttatccaaagaaacacaaagagagagagatataagtaatcattaaggtttttggaacgagaacgatcataagtgcagatacaaaaaggattacttatcagttatcatacctaatttgtttatacgtgaaaaagatttctaaaatgtatattcaaccttgtctaaaaatatttgaaagtaatagataatattgttgaactgtagtttataagaaagccatatacgtatgtttgtggtttgtggaaactggaaagcatatgatattcattctcatctggtggttgtgaaatgggcagctccataaaataaaagcaaaaaataggcccattaatgttaaaagggggcccattaggacccagtggtaattatgaaaatatggggaagaagcagggtcaagtgaagatggaggcgccaaagaagcgagagtggataagaaaatcaaaaaaaggattctctttttctctctttcttctcacttctctctgtagtttgtgtgtctctctcgccggccgatatggcgcctccgtagcaaactgctgcttctccgtcctcaatgcctccgttaaaattcaatcttcgtccatctcctcaccgtggtgtttcgtgtccgcatcgtcgttgactccccgagcttcctccaatattaagaggaaatcgtcgaggtctgattcaccatctcctatattaaacccagaggtacattccccacctcataaactcttcaatcaattcccccttcgttttttcttcttcttatatggttggaattattcgttgcagaagaattacccaggtagagttcgagatgaaagttccaatcctcctcaaaaaatggctttcaaggcttttgggtcacccaaaaaggagaaaaaagagtctctttctgattttagtcgagaccaacaggtttgcttccttctcctagtcgggcatttgtatttcctgtggtctaatgccatttccttgtgcagactgatcctgccaagattcacgatgcatcctttctcaacgctgttgtcaaggtttcgaaatcaaattcgctttcttccttaaaattcactctgcttgcttttgaacccacccgtgcttctttccaggtttattgcactcatactgctcctgattactccctcccatggcagaagcaaaggcaatttactagtactggaaggcaagcttttttttttttaatcacatgttccactttttctcgcttttaggttgtttcatgactccatcacatcttcttcaactgcagtgcttttatgattggagatggcaagctcttgaccaatgcccattgtgtcgaacacgatacacaggtttactttccttctcggacttcattttcttattatctgattttctcttctcattatgttaacttttgatcacatatctcttcatcaggttaaagttaagagaaggggagatgatcgaaagtatgtggctaaggtttgtttttcacctgtgattattacttctgctttcaattagtagcaaatatgtgcatgtattcatcaatatgctcattatagttcctacaatagaatttgtttatttctctcttaagttcaattaaacatgtacctgtcgctatacaattgaagataacttccctctcatttatcctgcacaggttttagttaggggtgtggactgtgacattgctttgctttccgtagaaagcgaggatttctggaaaggagctgaaccactacggctgggccatttaccccgccttcaggttccatcatctcatcagataatgatgtatttcttagtcttttcagtttttttttcaagttcagtcctcttcaaatatttaaagaacacatttgacggtctaagcgaagcatgaacaataccaaaaacaaaaaaacagatcttttttctttcctgcattaataagtaaaaggcataagatgttcttctctgtttctttatttctaattatctatctgaatatagctcttctttatagagttgccatgttggctttgatatgcaggattcagttactgtcgtgggatatcctcttggaggagatacaatctctgttacaaaaggggttgtatcacgtatagaagttcccgatatcttggctttgctttatg

SEQ ID NO: 67636 - DNA, 1767 bp, Arabidopsis thaliana landsberg
  unsure (1)..(1767): unsure at all n locations
aaacgatttccctgctttgctatattttccatagcactcattttcaagaaactcgtttcctttctttgaatcaatcctgcaaaatattaatttcgggtcaatcaatgtgataatagagagacccatatgcttcataaactagaatagacagacttatggggaagttagagaatattactcctccacacaggcaagcagatgaagtactcgtgtaaacgcatccaagagtctctgcttgctcgaatcccttagggcttcagatattgcattcttctctgactttttgacctgcaattagttcgaataggctttgataggttaaactggaaatgatgttaacttcttgtttctaaagaagatgaggtgaatttgttaccaaacctgtttattcctttcgtagtacttttcctcagcttgctccagtaaaaccaatttctcgtctagtcccaactttttcgatagtttaggtcctgttacgctattggcagcctcagtggcatctgggtgtagatgactcaacatgtgagttagaaattaaagctacaagaagtttactcgaaaagattggatatgcatgcaagtaaatatcaataaaggagnnnnnnnnnnnnnnnnnnatttcctcattggaattgcttccatcttcattacgattccagaactcagagtactgtccctcattggtcttattgttcgagctttcaaaagaatgggcatggggttcagttagactctgtatacctcgcagcacatttagattcggttaaaagcaaaacctggtgatgaaaattcgagaagaattgtgtcttcgggaggcagtggtcataagctcctccaagcaatgagcaacttgattaggatgcttacatgcatcacacgtttttttgcattgctgcacaggaaactgtttgcaactagaaaatcagcagcttactttgatagttgattcatgaatcatcagtaaaatacaaatcacacctcttcaccaaagctctcaagaatcttttttcttcggcatccagaactttcgcagtacgtcacaatctaaatacatggagaaataagtttaaactagaatacatagaggctagaagaaacaagaaagcatttacctgttcaaagtcagatgtaggcttcttagaggatgaggatttcttattctccgaattccgcagaagatattcctagcaaagagttagtagagtaagctatagaacttacacgtagaatgaaacttgtgaagccaaaacttgtcataacccgtttaacgttaccattttctttctgtcatctacaccatagtataatacacttcttgaaggtaattgatcccgacctgctctaccagactcttgatagaaagattccattgattttggaatgttaaaatggcaaaccattctgacatccttcttatctatgccctagaaagtcagtagtctcatcatgctacagtacataagaagtacacaattaaacagatgcaacatgagaaagaatctttgtttaccattctgaagaaaaaccgttagaagtttaccacgtgccccaacgagctcccaaacataataaggcgtaaagaagatgatcataatgaacccaggaaccaaatgcaaggtaattcacagagttattcatacccgaaagccactgtggcaacaataatttgcttcttggaggacagccaatcatctaaaacagtactcctcattttactattgagtcctgcatgataggctgcatatatatggataaagtaatgtcagc

SEQ ID NO: 67637 - DNA, 498 bp, Arabidopsis thaliana landsberg
tcattagtttttcaaatttgctccaggtggcctgttgtgattctgtttgtttttttatgtcatcaataatggattctttgctttcccagtagtcgatgccgaggcttggttttgattcttcttcagtatcactattttgacttgtccagttttcaaagaaacttaagatttggtcttcggaaattcctttgattggtagtggtgcgccgatcaggtatgataagaagtagtgatttttaattttatcaatggcttttgtaaggtctcggcttccgaggttgtatgtcttcatcagttctttttttgtaacggtgaactgagggtgagaccactcggactttggaggtagagcacgagctaactcataaatttttgggcgagacagtttgcttgtaaaggtccctcgttggtactcctgtttaagccagaggttgagagagtgaagggtgtcgaggtttttttctagctcgccaaatttattttttagaaggaagaaat

SEQ ID NO: 67638 - DNA, 154 bp, Arabidopsis thaliana landsberg
ttttggtttcggcaaaagaggcaaaataagcagcttaactcttggctttattggttgcacatttttttttcactcgttgttgatgagtgagacctttttttcctctttataacaaaaaaaaactaattggctagtatggctgtatgtacgggtg

SEQ ID NO: 67639 - DNA, 525 bp, Arabidopsis thaliana landsberg
caagaataccatttggggaatgaactggaacctgcaagcccgtttatattagatgtttagatgatgactgatttttactgtttaaggaactggagagagagagagcacgctatggtcagaaaatatcaactgaacccaccatatatttacacttgatttgaagaatctagcattaaagtagctcattatgattccgaggttcatttgagaaactccgagaaggattgacattttcatcttcagcgagttcaggaatggcagctcactgcgggatccatgccacacaggatctagaccaaatggataagtgtctctgacctttatcaaaccaattgttgtagcttcgctgaacaaagagaagaaaacggaaaaaaaaaataaaaaaaaatcagaaccgtaaagatattcctacaattgttctactaatatgctctttcatttaaaaacctgaattattagaagtagcctgaatacctgcaagagacatcccggcaatcatacgctgaaggagcaaacaatgggaat

SEQ ID NO: 67640 - DNA, 484 bp, Arabidopsis thaliana landsberg
atttcaatcactgagttacggaaaaaacagtcatcacctccagagcaaaataaagaatttccttgatgatagaagaaactgaagtaaccagttacgacagtcccaaccttgtgaaacacattccaaaagtgtggaaatcaatttgctcagaaactcaaacactactgtatatcctaaaatctcaggcagtttaattctttatcacagagtagtttctcaacttgaaccatgtagctctgatcaatatcatccctaattcatcaatctatagtgtttcagtgatacattaccagcatccaggaaaaaaaagaaaaaagggaagatcaataagtgaaaagaggaataatgcaaagcaagacttttcaactaatccttaaacgtttcttgttttctgtattattagtgtaatctcattttttcaagtttatgttttcacgatcagctcaagctaatttaccactttcaactttaaaaacatttccaa

SEQ ID NO: 67641 - DNA, 379 bp, Arabidopsis thaliana landsberg
  unsure (1)..(379): unsure at all n locations
gccaaggcaaagacggcgctttgtatgccaaacctatatgaaattgccctaccagcactgggcaaggnnnnnnnnnnnnnnnnnnnnnnnnnnnnnnnnnngtaacggtgactccctctgctgaggcgtgcgatacgttggggtctaacgccagcggaaagagagttctgacctgaccgggctactttttagaatggggaaaaggccgaacatgccactgaagactctctggacaagaggctgcaagaacgaaggagtagaggtcagtggcacactagatggacgacatnnnnnnnnnnnnnnnnnnnnnnnnnnnnnnnnnnnnnnnnnnnnnnnnnnnnnnnnnnnnnnnnnnnnnnnnnnnnnnnnnnnnnnntca

SEQ ID NO: 67642 - DNA, 642 bp, Arabidopsis thaliana landsberg
  unsure (1)..(642): unsure at all n locations
taatatgtttggaggaaaggtgggggtttttctacccattttccgataataggagtttgtcccagctccagttttacttacatanctnngnnngnggnggcagagccatcatgttcatgcgtgtcagatgtaccttgcaaataaggagaaacaacaaattagtagaacaaattcaagcagcaacaaagaataatgtctggtttgtaaagttactagttgcagctttgtcaattgtacttgcatcggtttcatgaggtgcatctttgttcttattcttcttcgctgccactctacggtctctgtttttatgatttttctttttcttcttcttggctctgcggattttgaggccaatgctcttagacattgatgagtgttgaaatcagcttgaaagaaccatgtaatctttaaacttggcaacaaaatgactcattgagcctaaccaaaatgagagtatttttaccaaatttataccataaaccttgaccacaatttaaacacaattgtatgcattaaaatctaatctgccgttctttcataatgtctttagcaacaaaatctaaatatcaaaaaccaaaaaaaaaagaaccaaatagaaaaaacagagtcataagggatgaaaatgaaaaaggatgcattaca

SEQ ID NO: 67643 - DNA, 238 bp, Arabidopsis thaliana landsberg
taatgcatcctttttcattttcatcccttatgactctgttttttctatttggctcttttttttttggcttttgatactcagacactgccgcccccgacatccccaacgaacccccgccccggcgctcaccccccaccaccgcccctccctcgcaccccccccaccccccttccccactcgcccaaccctaccacccccccgcgcccggcgcccccccaccctaccccccccccccgcc

SEQ ID NO: 67644 - DNA, 548 bp, Arabidopsis thaliana landsberg
  unsure (1)..(548): unsure at all n locations
gattgaaactgtttttggtgggctgggtttgagagggaaaaaggatgtgactttgtagttagatcgcagtatgaatgaagcgagtaaggctgttaactcaaggtctgttgcgggttttaaggattcgaggagaagcgaagcggatgagtttacgcgtgcaggggatttcaatttcccttgtgggactaatcctggtaggatgttcatggaatgtcttgctatgaataggactattggtgatgatgatgatgatgatgatgaagatggggggtcggattacatttcctttgagtacagctaggatgattcggagtaataagtttggttttaagagcaggttaactcaacatgcttcaacttcaactattggaggatctgctctatctttgcactatgcaaatgttgtgattgtggtagaaaagcttcttaagtaccctcatctaatangcgaagaagcaagagatgatctttaccaaatgttaccaacgagtttgaagacaacgcttatggctagtctaagatcatacttgaagaacattttgatctac

SEQ ID NO: 67645 - DNA, 1153 bp, Arabidopsis thaliana landsberg
gctcagactccagctaaaaccctagcagagaacaaatatggaaatcgacaccacaagtgcttaaaattggacaagggcgatgaaattgagagagacggagagaaaaactatccacaatttgagggttattagtcatcgagaaattgaacgccgacactccgaccactgagcttccgggactctcagggaaccgaaaccgaaagtggacaaaaacaaatcccaattttgtagcgaagggcaccaatcgagtatcgccacttaacatttcggtacactacaaaccgggtcgggtatgttgttacgcaaaagctatagttaggccttacaaactgaggcccatttatagaatatttaatgtctgtcgagataaattcataagcccatgtaagcccatagaatatttaatgaaacagttcctctttttctgataaactctcaatgtcgaacgttggtttaaaacaggtagaaaacaaacaaaccatgttacaggagacgcccaaaaccatgtggtgtgtacctaaatgcgataaccagatcaaccacacaccgacattgctggcgaagaattcataaacaacaggatgttttgcttgttgtcatccacctggtgaagactttgcttcaatcttttttggagttgctatcgtcgtcctcctcctcttcctcctcctcatcttcatcggtacggccggaataatgcttcaggtcctcttctctcagctcctcctctctccgcttcatcctccgagcaatccttttgtcataatctttctgaactttgtccattatagtgtcaaaacccgggactgtcctctccagcttctggcctactcgaacactcaggttgtagaaaatccggaatagcctctgcaaacagaaagcaagaaacggaagagaaaagatgaatcaatttatcacaaagatacagtgagtgtttaaaagtttgttgtttgtgaaatcagaagaaaggagaggaaacttaccatgacactcctattccactctctgatataaggaggaccagtggtgtaggtaccaagcggctcacggtaccactctccaccatagctgatctgatccatagcttgctcgatacttatcacttcccatggccttaaccctggtattactttggccaactctagtgtctttc

SEQ ID NO: 67646 - DNA, 612 bp, Arabidopsis thaliana landsberg
acacatgggagttctaatgtcttcacgtctcaagattcctgccattaccaaccaagaaaattgcataaaatttatgtcttatagataagtaaaaggacaaacttttgtcaactgaattctgcatcaattgctttactacatatttagaggcaaattctaacctttcatagagagcttccactctttcaataaaacattggctgtgtacacataaaaaggaccaaactaagctcccaaggaaataaaaaaatgactgatcaatgtcatttcttaaaaacggaatcgatgacactattgatagacaaacctggaccatcaagccctaaagtaccaatcataaaaggtgtaattccaagcttgaagatgcaatcagctacatttcttgctacaccacccggcgcaaataagacctattaaagataatttacatgttgattacttaataaacatctatgtcctaattaataacacataattgccacactttgggtggggctaaaagatcgttaactactccagcttttaggaaaaatcaaagtgacgatccgtaactattgaatttttttccgtttcggattgttgacaagaaatcaatcaaaagtcagacaaaag

SEQ ID NO: 67647 - DNA, 486 bp, Arabidopsis thaliana landsberg
ccatgctataacctgagagctaagggggctctaataaaaatgcgcatgcgtaccaggtctctattcttctttatcgtgtcaatgcacgaatcaatatgtatgtcttcttatctagaataaatgtaagatatcctatttattcaagaacagaaaatatctctcaataaatgcgacgaatagtcaacagaaaataaatgggggaagaccttaatgctatgactccatcccaataagcgtagcatggtttactatgaacagaatttcaccattactgtgttgacttgaaaggccattccagcggacattgtcgaatggtaagatttcatcttgccaatgagaaaacgctggtcctgaacgcgctatacgcccaaaagtaactggcgtccgactgtgacagaaaactgtagccccgaccgggaaaaaatgcgaccatttctctggggtgcaaaagacacccatttaggattggctcgtcagaaaagataa

SEQ ID NO: 67648 - DNA, 508 bp, Arabidopsis thaliana landsberg
catcctctgtgaacacagcaggttcatcgtcgcgaatcttgagcgccacggcaacgtgcgcggccaccattacctggccgatattgtagggctattgtggattgccgcctacctgccgcaaaaccctgaaaccgaccactggctgcacctggcctgccgtgaactgctgcatgaaatacccctgcgcttttacgctgatggcggctacgcggaaggctcaaccccctgtcaccggtttgcggctgaaatggccatatggggcgtaagcctgctgctggccttgccggccaaccgtgagccaccggtaaagcctgacaccgtggtgcttgagcgcctgtacaacatggcgcggttcaccatggccatcacccgcccccacggggccatagcccaggtgggcgataacaacggcagccgcttcttcgccctgcagcaggtgtatgacatgctgaccacggccctggcccgccagcgctacggcaacctgcccaaattgggccgcgaaacc

SEQ ID NO: 67649 - DNA, 423 bp, Arabidopsis thaliana landsberg
gaaaagttttttttttttttgaactttgaagtggaatgtctagacccttgtgggtgggtttagggatgatgatgttcaataatttgaaaaaacaaccttccaaatcgattatgagggttcaaaatctaatctaattttcgagaaagctaattaacgattttgagttttttttttttgaaaatgatgtcttttagctaattatagaaactattaacggatacctaacattgcctgattagtccattaggtagttaataatatgtttgagttggttttgtcaacgaaaattagtgatttaacttaaagttaacataaaatcaagcattttattcatcaaatttaaaattcatggtttaaatcaacgaaaatggataattgatgatttaaatggtatttttcccctcatcttcttctaccatgact

SEQ ID NO: 67650 - DNA, 2357 bp, Arabidopsis thaliana landsberg
tcacaacatatccattttccaggtaattattatttgacaccttttttttttttgttcttgtgttttttttggtaggcttttttgttttttgtttgttcttgttgttcacatgtagttgtccccagaaaaatatataatatattatttttaaaccaaagtttctttaattacacaacaaaatttttataattaagtattgattttccaccaataaatatatctggcatgtttcagttagtttaaacaaaaccatcaaatttgaattttaaaatttataactaaaaacaatgaagaacaactgtacaagtattttgttgaccaaattttaaaaaaaatcacaactaatataattttttttataggaaaatagaaaataaagaaagaaaatctgctaatttttctcgtggacttgtttattaaaaaacaaattgagttttcatcatcaaccgattcatatctttcttcttcttcctctacagcttcttcataaatctctctctcttcccctctcttctcaaagatcgaacctttcgatttcagtctcttcagagttctttcgttttcatcgaaacaatggcgaagaacgttgggattttggctatggatatctatttccctcccacctgtgttcaacaggtaacaaaactccaagcttttttttttttattctctctgtttattattggagctattgcatttgatactctgtttttatcagagcatctttctgttttgtgtaccgttttaattctccatttttgacgtttggtttcataaatcttcaaactttatgagattttacgaacagggctttgagaatcaatccaagaaaatctcgttagattagacacacacacgaacacttgtttcattgtctctgtttttttgttctttcttctctgtaatggcggcggagttttgtatccgatgaagacagaaaatgctcaatttttaattttcatttaagaaacaaaaggatttttattaaatttctctattctcaaactcgagatctctgcatctgattgaaatgaggactttgaaaggttgaaaggggttttttttatactgagatttatcgtataagtctcaattggaaaaactgaaaaaggtacaattttgtgaatctgatcttgttgatcattttttggttatataggaagctttggaagcacatgatggagcaagtaaagggaaatacactattggacttggccaagattgtttagctttttgcactgagcttgaagatgttatctctatgaggtatttgttttctgtctcttttcagtaatggctaattgttttttgtttgcatatgtatcataaactcatgaaaagactgaattgatctatttcttggttgtgtttttttagtttcaatgcggtgacatcactttttgagaagtataagattgaccctaaccaaatcgggcgtcttgaagtaggaagtgagactgttattgacaaaagcaagtccatcaagaccttcttgatgcagctctttgaggtattcgtactttcttttgacctggattgctattgtaaatacgtggaccgctcatgtttctttgtatgttgggaatgaacagaaatgtggaaacactgatgtcgaaggtgttgactcgaccaatgcttgctatggtggaactgcagctttgttaaactgtgtcaattgggttgagagtaactcttgggatggacgttatggcctcgtcatttgtactgacagcgcggtataacatcttacatggaaatgttttttttgttatgcctaagagtctttgcataattcttgacttgtttatattttgtatgctttcaggtttatgcagaaggacccgcaaggcccactggaggagctgcagcgattgctatgttgataggacctgatgctcctatcgttttcgaaagcaaattgagagcaagccacatggctcatgtctatgacttttacaagcccaatcttgctagcgagtacccggtaactcttcaatgcatgatattaagtatttcgaacagagaatcaaagtcttatatgttattgtttcttgtgtacttgtaggttgttgatggtaagctttcacagacttgctacctcatggctcttgactcctgctataaacatttatgcaacaagtaagtgtttcttttcacagttacaaaaactcagtttctttcttctgttgttgtgtgactctttggtttttattaggttcgagaagatcgagggcaaagagttctccataaatgatgctgattacattgtttccattctccatcaataaagtaatttcttaatcctccacaatagttttgtctagttggattgctcttaccagcttctctctatgata

SEQ ID NO: 67651 - DNA, 2657 bp, Arabidopsis thaliana landsberg
tcttagatgaggactaatctggagaatggcgatgaggagagaaacctgagcgagaatgctgatcatggtggaaactatcttatcgaagtttgattttcctgggattgggaaaggcttcttcttctgttttttctcgcgaaaaaataaaatggcgaagacgaccgatgcaagagatgatgagacggagacgtctaatagtgggccgagtatgggccttagcccataactgtaacattaatgggtgcaaatgggttatccttcaaaacgatatgaaaataaattgttggagaagttttcatcttcttcgtcatttatttttgactagggtatacatttttcttgcgatacaaaccagtgtggtatattttttttttgctaaacaaccagtgtggtatattcaaaataaatagatgatccattttctccaatctattaattttttttcttaacaactaattttaagaagaaaatcaagatgctacaaaactgttttttcctaccaaacattttcagcacaaaaactacatttgttcggattgtatgtcatgacttcttgatttaatcaagagacaaaaaaaaataaaaatgtattcaaaaagttgtatatcatgacttcttgattgccatttaaactacaagtgttataaatagaaaagaaaaagaaaagaaaaaagagagacatgcatccaagtttgaaatgtgaagctgcttaatgcgttagacatgggtggatcaaacacattttaataacattctatatttgttaattgtcgaaacatgtattgattctgcttcttccatttttattctctccctcctttgttctttgtaacgagagaagatattccacaattggtgtcttaattcaatccacattaactcgaagctacattatcaaatcacaatggcgaaaaagctctgtttcattgttatgctatcaatatgtctcctaattttcgactttgcgggtgctcaggaggaatctccttcacctgctgctgtcttgccaggacgtggaccttcaacggattctcctttgtcaccgtcttcatcaccggaagaagattctcctttgtcaccgtcttcatcaccggaagaagattctcctctcccaccatcttcatcaccggaagaagattctcctctggcaccgtcttcatcaccggaagtagattctcctctggcaccgtcttcttcaccagaagtagattcccctcagccaccgtcttcttcaccagaagcagattctcctctgccaccgtcttcttcaccagaagcgaattcccctcagtcaccggcttcatcaccgaaacctgaatccctagcggattctccttcaccacccccacctcctcctcagccggaatcttcttcttctccatcatatcctgaaccagcacctgttcctgctccatctgacgatgattccgatgatgatcccgagccagagaccgaatatttcccttctccagcgccatctccggaattgggaatggcacaagacatcaaagcaagtgatgctgccggcgaagaactcaatgacgaaagaggtgaagataatggaatgagtggattggagaaagccggaatagccattggaacgatactcggagtaggagctattgtaatcggagctcttgtttacaagaaacgaagagataacatgaccagagctcgttacacttactttactgaaggagagttcctttaaagagccatttttttttttgatataaaaaacttgtttcagttcttaaacatatatataatccttaaattgtgtttatgcaaaacaaaatagttgttgcttgttcttttggtgctacatcattctcttaaagactttattgcgtattcttacctctcaaggagcattaccatttcgcagtggtctgtatggggaaaaaggtcaacggccatggctttgacaggtctaaaagcctcagaagttggcattgacttggctctatgtcgagccaaagcggcaatgcctattttcttgcgccctctgtaatttttgtttcctctatccggttcatcaaaagatggcgtgcaaagctctatcgcgtttgcaactagcgtttcagggttgcacgaaatgtacctgcatcaaagcaaagatgggcaactgtgttaaacagaggaaacagagacgaagtaaccaagtttgtggtagtgagtgtttagagaagggactaacacaagtctctttaaccggggatgggttcttagagctttgattacagctggatgaagtccagagcgaggtggatcgactatagcaaccacatttttgaactgtggttttgtagatttttccggttctaaggacgaggaatccttctgctcattgtcttgaagttcttccactcgagtgtttgaaggaggtaggttttgatcagctacatgctccgagtttgtcatttcttctgttgagggaatttgtttgttgagatcatcgttagcattacatagaggcttagcttcttccatttgagccacatctaggtactgtttaagtagagagctcataacatcctctgcctgtacaacaaatccaacagaactaccatgaagacagattaatacaatggaaccaactacgaaatatgttactgtcaaaatgcatgcctttgagcagatgaacttgcagttgc

SEQ ID NO: 67652 - DNA, 593 bp, Arabidopsis thaliana landsberg
  unsure (1)..(593): unsure at all n locations
ccgntgtcgaagggctcgtcccaggggccgacgattagcgcgcgtactccgggtggtgtccaccgcggcggagaaccgcgggaactgcttgcgccagccgtcctcttcctcctcgatctcgacggcgatgcgccaggcgacggtgtccggggcgggcaggtccaccgccgtcgggttctcggggcaggtgaaggccggcaggccgtacaactcggaaaggtgctcgtagagggccatgcgggcggctcctgacaggcggcggcggacgggatctcgactgtgcgagcagttctaccaaccggcactgacaacgccgggcggcggggcggggccgcgcgccaccgcgcgccaccgcccggcgtccggcgggccgttgccggtggccggccgccgggccgctgtcagtggtggctcgtactgtcgtcgtcatggcccggggcgcggtgcgccgggcggagaggaggctgcccgtgtaccggcagggagatgtgctgatcgtgcccgtcgccgaggaggcggtgccgccgcacgcgcggngggcgccgatgagccgcggacgcgcgcgccggatggactggccctggcgaggtacc

SEQ ID NO: 67653 - DNA, 184 bp, Arabidopsis thaliana landsberg
aactacatccccctataactaaaaactaaacctactacacaacagcactaacaccccctttaacacaaactctctgcacttgctatcctcatcagacaatacttcaacgagctccaattcaaaaacatgacatagcatacaactaatttaaacaaacatcaaaaccatcaaaacatatcattta

SEQ ID NO: 67654 - DNA, 590 bp, Arabidopsis thaliana landsberg
aaacgagagattagtaaattcaatttgtttttgtgtgtttactttataatttggattaaacggctggctaacgaacactgtggtcagcaggctgctttccaacaccgttgcggggttgccctcataaacgtatttgcatgctaacagtgccaaatgccaattattgttttttaatttttgaccaactattgatttcatttatttattactaattgttaaaaatcaaaataaaattagttaggcaacactagacttacaaattctttggaaatgcttgtcggtggcttgtgaggaagagttgtgttgctattatggagtccttttacatgttctctcattagcttatcttttaggagcttttcctccttatgtttgtttgccctttaatttgggtcttagtctttggaggtttctatgtacccatcaatgttgtctccgaaaagatcttgttcttgtctgttttgtatatctctaccgcagctaatgaatgaaatctttagacgggaaaaaataacacttgacaagatgaaattaggttgatgaaatttatttctagaatttaatacaatttttctttctctttttcctcc

SEQ ID NO: 67655 - DNA, 338 bp, Arabidopsis thaliana landsberg
aaccccaaagaagggttgacttagagaccaaaacaaagccttttttgttttttctccatactctacgagctctgttcgggttatagggcggtccataataaattgcgaactcatacccgccctcaaggagccaacatgccctgaaaagatcacctacaacaaggtcacgaccagaaacagcaccacccatcaacctctccgcctctgaccacgcgatccgaaaccctctctgccgttgcttacatacactctcaattctaactgaagctacaataacaacatacagcggcaagcatactccaccctacacaagaatataacacagcggaaaccattct

SEQ ID NO: 67656 - DNA, 493 bp, Arabidopsis thaliana landsberg
ttcagagagaatttactcaagacaaaattataaaattaattattattaaatctaataaacttatgttatttttccgctaaaaatgcgaaatcattacgtataaatagtttcgaaccaaccaatctccaaactaggctaaatagagaaaactgactcaattctcatcactgtagaaccgagacaacaacaacaacaaaaacatttccccagagaggtgtctctatgcttcacatcttcaaagaatcctcactctgcttttcttcgtttcaagatttttgcttttcaagattcattgatacctgcttccttctctgagctcgaatcactcgctcgcggtctgcaaagcccgtctaagctcagaagccataacatgcaaaagaaccggtttctggatcataccattcatccccatttgcaaacatctttccctaacatgatcttcagtactagcagtcaaagctataatcaatggccaatgatgtccacaaaactt

SEQ ID NO: 67657 - DNA, 535 bp, Arabidopsis thaliana landsberg
  unsure (1)..(535): unsure at all n locations
gctgcgtccacaatttccgtggcgggccggccagctcgaacatttgtctctactggcaatccttgaggaacctgctgcgaaacaagagtagctagtttttgttcgccattatttcgcaactctttctcaatctggtggaattctcccaccacgtanggatcgtaaccggcgtagggnggnaccacatataatacgtncaccgtggcacaaaattncctngccatttggacggcgtaaagcagggctcttttcgaacattccgaaaagtccacgggcaccacgatttttttgatcttcatcagcgtgcttccgtgcgattcgagaatgctgagtccattggggcgatcgctctttgattggggaataactttaccagtgatttcaatagtggctttcataagagttctttcattttgacttgcttaagctctcttgatctatgcgtctaacatacggggccagtgcgctcgtcactacccggccctcggcgaaatgtagacatttcttgattaaagtcccggcgcgatcgttaccg

SEQ ID NO: 67658 - DNA, 1753 bp, Arabidopsis thaliana landsberg
ggttactaaaaattgttggcttgaaagatgggggatagagaatgttgcgagattttatattgaaaaagatgatcttaagttgtacttaagtaaacaaaaagcacgcattcgaatcaatgtctcaatattaatcgttcgcttaaggtggcaattttaatcaaaaagatgcgagtcaagcacattcattgtctactctaatcaaaatgtgtaatttgactaaatgtgcgaacaccacttgtttggagtttaagggctggtctatctgagggcttgtttctgtttttttgtattgaatttggcaagttctgtgaactaattgatgttgattgcttgtgtaaattcagggggtggaggagaaagctaagaaagaacaaaggaggaaggatagaagaagtgataagaaggataaaaaagataagaaggagaggaaggagaagaaggagaagaaggagaaaaagaggaaggagagggaaggaaaggaagttggaagcgaaaagcgcagtcataagagacggcgtaaagaagacggtgctaaagttgatctttttcacaaactaaaagaaagtgaagtcaattgtttggagaagagcagccttactgtagaacgtgagctgcttcagtcgacgtcccaaaactcttgtgatagcactcttaacagcaatgagatgttaccgaagcagaaggaggtccagcagcctctcgatggtagacataacaacaacaacgagaagcgtgtggagaagcagcagcctctcgatggtagacataacaacaacaacgagaagcgtgtggagaagcagcagcctctcgatggtagacataacaacaacaacgagaagcggattgagaagcagcagcctctcaatggtagacataacaacaacaacgaaaagctgatggagaagcagcggcctctcaatggtagacataacaacaacaacgagaagcggattgagaagcagcagcctctcaatggtagacataacaacaaggagaagcagaaagagaaacagcagcctctcgatgttagacataacaacaacgactctggtgagtttgtttgtgtttcttccttccccggggaaggatcttgtattcttgttgggtctaattaccttatcaggacattgatgacattctttcttcaaattgttgatatgaatttgaagaaagcatcattcggattcgattgcctattcgaaggcagaaagatcccgaggtgatgatgaccaataaggatcaagaaaaaccaggtccttctcggggaataaagttagactcgtcccaacttcctactagagagccggttaatcaacatccttgttccacttctgcagcagaacatgcttcgaagccacgagaagagaaaaggaaagatcccatttttagagggaaacacggtaaagagaagatatcctcatcctctactcgagaaacttatcaacctcctaaaagcctatgcaattgccctccatccatggtgttgcaattcttggacgtagttgagaattgggtccctaacacgatcgagagaagagtagacctcattaactctgaagatgaagaatgttggtggtccatgaagaagccgccaagtagcaccacagaaatatgcaaacaacttaatagagagaatgagatcaagcaagtaggcaatacaatggggtggccatgtgctcgccttttaccagaagctgatgtctacgccttaccttacacagtcccgttcagataacatcaaagagcaggaagt

SEQ ID NO: 67659 - DNA, 166 bp, Arabidopsis thaliana landsberg
cttgtttcgaggcaggtggaattttgagtggtttggatctggaagtccttttttactcttttctcgagttatattcgagtctgtacttatcattttctcatcttaaagctcaccaaactttattcaacgttttaagtgttttgccatctgattgtattgtttcagg

SEQ ID NO: 67660 - DNA, 479 bp, Arabidopsis thaliana landsberg
attttaacgacatgaccttatacaagtactgcagagagaagcaaatgacgatgcttggcaaaatatcaaattgtttgtaaacacctttcgggttcaaacggtgagttacaaaagacacatctataattccactaaaattagcgaggatagagacatttgtattttattggaagaaaatctggtcaaatttttcgatctaattaaggaacaaatagatcacactgttgctgttgtctttggaacaggcctttatctaccagagctagttctgtaatcggagaggccgttattacagttgcttacttcagcttcaggaaatctgttaccggaaaatcttatggctacacctgccatcattagaccttcgaacatattgatgccgtctctctgctgtgaagaagtcgcagaattcagttgtgctggaaaattataaccacctgccatcagattaaactgaaaagctgtcggaaaaccccaaa

SEQ ID NO: 67661 - DNA, 322 bp, Arabidopsis thaliana landsberg
  unsure (1)..(322): unsure at all n locations
gattggggtttgatgtggaggatcctttcactttttttncgcgccacagagggtttcttgaactggtgggatgaacaagtctctatggatccgcaatcgtctgtccgtggtaagaagagttagaatcatagattatgtagatttttttaaaaatttaatggtggttttgaaaacaatttctacaactagcttggagaaaaatcttattgtctaataatttgttccacttagaacaccttcttggcattgtccataacacaacaatttaaattcgcattagaagcaaacttggtttattgaaaaaaattaacttgcctttata

SEQ ID NO: 67662 - DNA, 525 bp, Arabidopsis thaliana landsberg
  unsure (1)..(525): unsure at all n locations
taaagcacggaaagaaactttcctctaaataatcttctgattttttaaaaaacaataaacatgcaaaaggggtatggtttctgcatgcacgtatattcgcgtttctgaggaaaagccaattcactagtgatacgaaggtgttctagatcaccattagtgcaagaccctaaaccatgnnnnnnnnnnnnnnnnnnnaagacgaggataatcaaaaatttggaaactatctaggctttctaaattctttttctcaagagtcctttgcttttcatagaatcacatgttaaagcagaaaattactctgaactcaattacctctgtttgggtgactcttgttcacactgtgactgccaacataacctggagatgaacttctagctgaaacatctgaagagagaacccctcctccaatcccatagctaaaaggagcaggcccttctgtctcaggagctggagatctccatgtatggtcactataaactgcaccattcccgttaaactctgcatgtactgctgtatcataac

SEQ ID NO: 67663 - DNA, 266 bp, Arabidopsis thaliana landsberg
  unsure (1)..(266): unsure at all n locations
ggcttgattcgggctccccaatttataaaatactgatcaggataacacaacatcacgattctagtaaggttgctatttcaggaaatggatcgaagagcnnnnnnnnnnnnnnnnnnnnnnnnnnnnnnnnnnnnnnnnnnnnnnnnnnnnnnnnnnnnnnnnnnnnnnnnnnnnnnnnnnnnnnnnnnnnnnnnnnnnnnnnnnnnnnnnnnnnnnnnnnnnnnnnnnnnnnnnnnnnnnnnnnnnnnnnnnnnnnnnnnnnnnnn

SEQ ID NO: 67664 - DNA, 667 bp, Arabidopsis thaliana landsberg
gggatctggtgcgacgccagccgtgggatataattcagcgccagccatcgcgtccggttcggcaaacgccgtcacgccgggttcgtgcagcacgacgccagcccagaaacccagcggaccgaacgtcgtcaccagcccggccaagggcaagcaggccccggttaccttcagcgccgacagcgtggaatacgaccagacgcacaatctggtgaccgccacgggtcatgtcgaagcctggcaggacgggcatgtgctgcgcgccgatcgcatcaccttcgaccgcatcaccggggttgccgcggcacacggacatgtcgtgctacaggaacccgatggcgaggtgatgttcgctgactacgccgagctgggcgagaacatgaaggacggcgtgctgcgcgacatgagcgcgctgctggcccataatgggcggctggccgccaatggcgcacgacgcaccgacgacaagctgaacgagctgagccgcgtcgtctattccacctgcaacatctgcgcccagcatcccgatcgtccgccgctatggcagttgcgcgcgctgtcggcggtgcaagacctcgagcacaagaagatcgagtacaccgacgccccgctggaaatgttcggcatcccggtggcgtatttcccctatttttggcccgtcgatccgtcg

SEQ ID NO: 67665 - DNA, 623 bp, Arabidopsis thaliana landsberg
cctaaccactttcactagaaaaatattctcccaatatgcatgagaagttcatagacgacgaattgctataatggtatgaaaataatcaaaatataattatatttgaatttggggagttttaatttcttactgttaatcttaataaattactgaaattagtattgcacaaaaagaagagaggctgaaattagttataataagtcaaagccaaaactaaatcctaaacggctgaatttgccatatttgcttatcataagagaacttgtgactgtaatttaaattaaatccaagccgtccaatcacataacatcgagagaatcgaacgatttagaagaaatatgacactaacgggcctcacaatcatcagaacagtatgcgttacctctgggagttctgaccttcaacaaacactatttattacatatcaccaattttgaccaaattttgatgtaaatgaacgaacacttgaaatttgtttttcttgtttttcaaccttttgaagattattttctgaccacctattttcaaatgttatttgaccaaaaaaaaatcatgaaatgaatgtctaaatttaaaccttttaaatctatttcaatgtaagacaatcgttttaacgggaaaat

SEQ ID NO: 67666 - DNA, 558 bp, Arabidopsis thaliana landsberg
  unsure (1)..(558): unsure at all n locations
attgtttgttattttgctgccacagaaattttttattgctttgatagaaattcaagggggaaagttatttcttgcatttttgcgcttgaagaatctcttatttgtgtggaagtggtgaagaatcaattaaaacgcacacagcttcatcatatattgtcgtccttcgccgacaatcttcttaccttattgcctttgttttgtcccatcgctttcaacacaatttccatttatagtaaactctcatcgtatttgtgttttttttgcattcattttgtaacactcgctttttttctgaaatagctcccattaaccaaatggaaattatcttcgagccgaacaaattaaaagttgttatcctagtggtagtggtctttgtattctataaaccaacaactaagaaaaacgaaacaaaaaatctgatacaaagaccagattaaacaaatcattattaagattaaaatcagtaacactgattaggcaataaannnnnnnnnnnnnnnnnnnnacttcaccacaaagtcttaaaggtgttttacatcccacatgttataaaacaca

SEQ ID NO: 67667 - DNA, 524 bp, Arabidopsis thaliana landsberg
cggaggaatcgccggcggacatgtcaatctcagggaagatttgatggccgttggtctgtggagccgccgtcatgtgagacgtttcttgttgcatggacatgagagaatcagagaaagagagagattccttttttttttgtcaaagaagaaagattccaattgtgttgtatcttgtttacttggttggtgtgtgtttaactttgatattatcgtgtattttataaactctctctttttgtgtgtcgattcttttttagtgaagggaaaaatgggtttaaaaaatcctcattttctctaaaaacatttacaataaccatcacctatattggtatttatatgcatgcatattgtacgatggaggaagaatcgcaagtgtatacgtcaaccacgggaaagatttgatcgatgttgaccggaggagccgccgtgactagagacatttattggtgactggtcagcttgtcaccaataagatttatagaggaaatgagttgattctagtaatactaattttcttgatgggc

SEQ ID NO: 67668 - DNA, 114 bp, Arabidopsis thaliana landsberg
ttgaagctcgtacaataacacccattttattttccaccaaagttgctacatcaacatgggcggggtgatgagtcaaacaacctaaagtccatatcgacctacctctaccatcac

SEQ ID NO: 67669 - DNA, 738 bp, Arabidopsis thaliana landsberg
gaattttaaaatgaaatgtgaattgtataacccatgtatttcggaaaagtataatttacacctagtgttataaagtcttgaataaataaatgggcaattagtggaaaacgatgttttggagcttgaagaaaaaagttgatgccaatagattaacagaacttggctattttgggtatatatatttgactattttgaaatttgaaatattaatgtatactacacccaaatacaatatatatagcattaatgctcgtatacatcttagctaaaacaaaataataattcggatgatgtttaagtactagacgcaaattaatcaagctcgtttggttcatagcttggtattaacggaaaaaaagagcaatttagagcagacatcagattatggaattagattccaaccacactattatgtttatttgtttgtttttataaaaggttaatttagtgacgaatgcgtatgaattcattaacgtgaacagctaatagagactattatgataaaattaggtaagctatatacatatatgtatgtatttatgttaacattagttgacaactaatgacgattaagatggaatatgatcgattgtggaaaacatattagcttattttcaaggcaaaagaaataacaaaacccaaaatataaattaattgattcattacttgctcgatatttacttccaccaacaaaattcagccaaaatccaactctcgtgaaacgactgattgaggatg

SEQ ID NO: 67670 - DNA, 129 bp, Arabidopsis thaliana landsberg
gggaaggaaacacataccccataaggtgtccaagtttctttataagaacacaaggatagaaattttataagccgacgattttagactttgggtggagtaaagatcaaacatacatgttccaagagggta

SEQ ID NO: 67671 - DNA, 601 bp, Arabidopsis thaliana landsberg
gcgccggtcacatccgcgtgttcggcggcggtggcggcaccatcacgccggaagaaatccgcgagctgcaggcctacggcgtcgagcgcatctaccaccccaacgacggcatgaagctgggcctggtcgagatgatcgaagacgtgatgacgcgcgcccgtggcgccgtcggcaagcgcgccgaagccgagccgtccggcgtgcccgcccgcgttgacatcagcgacgagatcagcatcggccacatgcttaccaccatcgaggaaggccatctcgacgatgccgatctgacccgcctgcgcaaggaatgggcgctggccggcaagcagaccccggtgctcggccttaccggcaccggtggcgccggcaagtcgtcggtggtcgacgagctgctgctgcgcttcctgcatgcgttccccgagatgcgcatcgccgtgctcgcggtcgatcccacccgccgccgttccggtggcgcgctgctcggcgaccgcatccgcatgaactccctgcgcagccatcgcgtctttatgcgctccatggccacccgtcggcagcacgccgtcaccagcgtggtgctgcacaactgcatcggtttttctga

SEQ ID NO: 67672 - DNA, 630 bp, Arabidopsis thaliana landsberg
  unsure (1)..(630): unsure at all n locations
ttacttgttcagtgaacctgatctacaaatattctctttcccgtacaattcgttgaaaatatattcagtataaaaaacagttaatcgatcgttaacggaaccacataatgttaaacgtattgctaagccaacaattaaacgtttagaaaatgtttagcgctaagccaacaattagaggataatttattttggttacccgcgttatatactttataaatgtgtatttatttgatgtaaaacttaggtatatgatgttaaatgtactttaagtaaataagactctcctcaaaaaattaacaaataatactcacatataataaattttacatgaaaatagttgtatatgtattaatcgattggctagacaaacacatttgttattttcaggtaatctacaattttgattgccttcagtcatagaaaataccatcttataaaaatagtatcacattaaattagcaatctcagctaattacttttcaggtttttttttggaagagatggtttagacacagnaggttaaaaacagtaaaattagtgataaagatgacagtatgatactatatgaggttcaaattatatataactggtaacatttgacagttgattataagtgatgaatataaaaac

SEQ ID NO: 67673 - DNA, 612 bp, Arabidopsis thaliana landsberg
tgctaaaaataaatcatcatttatagggcatcaaatacgggaaaattatatgtagcacagtgaaaaagttaagttttaaggttaacatgaggtcttgagtttgagccaatattttgtggtttttgtatattttttatatttaagtgttaaaactcttgctttaggctgctatgcactttgggccggccctgtcaatagtatgtaatggtttatagttagacaaaaactttcataagattatcacttttcacatcataattatcttcatactatcatatcatcatattattaacgccaccgtcatcgtcatcatcatcataccatatttttcccacaaaaacaaccttcataaattttacaaaaaacacggtttcacaatctttacccttacctttaccaataatatgattaaatatttggacacatctacttgcagtactctatacaaatatgatgaacattttccacaaacaacgattctacaatgtaactccatttctataagaaaaatgatatcatcgcccatttctattttatatcacctacaactcaagtgtattcatagcttttttttttaaaaaatcttatttttaattccaaaataatataatc

SEQ ID NO: 67674 - DNA, 437 bp, Arabidopsis thaliana landsberg
agtctaattgaacttatttgttcaaagtagttatgatttaataaactataattttggacttatttgttcaaaaggaatcgggttgactataatatggttcaagaagtgaagatgcaaataaaataaaaagtaaaagatcctgaatagacaaaaagttaaaatggagagtttgcttgttcatacggtaaatgcaattcggtgcatagatattgtcggaatcttcagcgtaggttatcatgtgtatggaagagcggtggtggagcagtggaggatgcggaggagtttaaagttgcaaggcgtgaatggtcctccaccgtcgatctttaacggcaatgtgtccgagatgcaacggattcagtcggaggctaaacactgttccggcgataacatcattgctcatgactattcttattctctatttgctcatttcgatcact

SEQ ID NO: 67675 - DNA, 391 bp, Arabidopsis thaliana landsberg
ctgtgcgtaaatctctgtttggtgattccgatgaggcttttggaaaggagaggggaggggcagctttgggtttgcagacacaacatgatctttttacggacgacttaagccaactggtggttcaggattatcctctctctgaggatccttccttgaactatctagatactataatggaggaaaatgggaaaacatctgagcaggttaatgaggagggagaggatcatggagggctggaggatgctaaagaggagggcgaaattactgtggtgtccaaacctgttggaacagagattgatgaaactggggaaaatgaataggatgcaggaacggatgatctaccaccggtaaacacagaagtggatgaacaacatcatgtaaaaaagaaatc

SEQ ID NO: 67676 - DNA, 681 bp, Arabidopsis thaliana landsberg
aatcctacgcagcttaataatgcacaacaaaggagctgatggggtcaggacattcacaaacagcagtcttcaactattggagcaacggttggttctcgctcgataatgtttcaagttctttaagagcttgctcgatcgcgtagatcaccatcttgtttatctgttacacgagcataaacaaaaagcagaaaagtggttagacctgtgattgaatacaaacggagaggagtactgattcgggtcaatccaaaagtctcataaagaaaggtcgtagcagaactaattgactttgattggtcgttgcaaaagccaaaacaaatagaggtccaaccctattatcaagtagaaagctcctttgataaattaattaaaatcattattacaatcctgtacatttcttagctgggtatttcttagtctcaactttttttttttcatctactatatcatcattagaaatatttgataatgatcaaccaactattattatttggattaatttatagtttaaaaatttcagtcactcttttactttttggatttccttaccagtgttcagacggtggaccatgcggaccagttaactatggaccgcatgatattcttactgggggaacatcaaccccgccattttccaccgatttgaaaccacatgaaattcacgacttctggttacccatc

SEQ ID NO: 67677 - DNA, 493 bp, Arabidopsis thaliana landsberg
taacatgtatcatgtatgatttgggcacacgtcgtgttgtggtactttacttcgaccgtctacaatattatagagttagcatactttatacttaaaaccataggttatgaaaacaaaaccaaaaatatagtagtggtaaattgatctttaatttcgttcaaaatagacaagaaaatacttcagatttaaggaaaacgttgtagtgatacatttatttatcatatcgagctttaatataggaatatttgtttttattgttgttacttaatacttattaattagtgttgggataattttaactgtttcaagtaccgatctatcacacttcaacgcagagcaatcggacgtatgaaagcaaaaagatttcccgcatctatgttagcaagtgggctctcatatcaatcaaagcctattgggcctccacttccgaaattcactcgttcgtcaatgggttatattattaattctacacatgtatcacaaaaatgtgcag

SEQ ID NO: 67678 - DNA, 3808 bp, Arabidopsis thaliana landsberg
tttgatcgaagagctggttactctggttcatggttgagtggtttttctgcacagcctaaaacaaatgggctgaaacttgaaaaatttcgaagagactcgcatgtcacgcggaagatgtttctatccgccgaaaaattaggattggatgataacatatgtttttctccatatggattcactcatttctctagaaagtatacaaataaggatgatcgaagctgtaagatttttcattatagtctgcagacgcatatgactgcgagagatgatagttatttgaattacgatgtcaacaagaattctattcaaggtgcagaggagaatttcataggagaatcagttggttgctctttccaaggatttctttttttggtgacttgtgatggtctttcggtttttctcccttctatctcaataacctcaaattacccaactattgaggccattgaatatctgcagccattccagaccactgtcatgggataccggggaagagacgatttggcagcaggggaatcacgttttccttggcaagttgaggtcatagatagagttatcttgtttgaaggccctgaagttgcagatcatttatgcttggaaaatggtacgaaacagtactcatgttggttaatgacgtttttgcatccgtaaagcttttaatttatagagtttaaccttccacagtttgtttatagattgatatttatctcttaaccaacgtggcttgtcatgccgaaagagttttaagtacaagtagttgataattagtaactagtttaccaaaactatgtcatacgggtttgtttgataagtcaatacatgtggaaactagcataaaactgaacttaactgtaactgaatgcatggaatacctaattatatgatgaaatcatgctgggccgtgcattttactttcaaaattcatcagctgtttgtgagcatgagtaaacacttgtttgcagtagttcagtgaatttgttatctctcatttcttcacaattacgttatgatttctgtgtatttgcttgttgtaacaaaataacctcacatattgagacttgaagatgtttatagattcgctgacacttaaattttgttcaataagcttatggtatgttaaatgaatcactgctgtcataggttgggacctcaaaattgctcgtttgcgtcgactgcaaatggcgttggactacttaaaatatgatgacatcaacgagtaagttgctagcaatcttttgtgcttaatctgagaaccgtagtcccccacagcaaagtggctttccttaaacaaaaatattagagaagaattatgtgtggtttgtatggttgggttgacaacttcggtttttgtcttatggtttctatggaaggatgtgactactttagaaaagaaagattgcttgttaaaaatttgtgtaagagtgtaaatatgtttaatgccatcaatgtgatttgtcttgtatcatgaattgattttgattaacatctcctgtgtgggtaggtctttgaagatgcttggtaatgtgaagctggcagaggaaggcatgctgagggtgctcttttctgctgtgtatctattgtcgcgcaaggatagaaacgataatgagatttctgctgtatctaggtgaggatcttctgagtaattagggcataaggatagtttgtttttcaggtctcaacttcaatgaggtggatcaataatgaaacagaagtagtgttctccctgctttgtagatatgtccttacacattagcatggtttttagatttataactatgctgtatacatacatctttatgactgtaactcaaatttaaattattcatacatgttacactttgacttagattgaaggcatgttcagattcatgcaaaagtttctccaggccccacagctttaggattttgtatattgattcattgacatgcaatatttcttagaatccagttttagcaacatcattatcttgtacggtttagtaataccattagctttagtgaccgggctgttttctcgctgacatattcatacttattgctacatggtgaatataggctccttggattggctacaatgtttgcgactgagatgattcgcagatatgggttacttgaatatcggaaagatgtttacatgtttgacagcaaacctaggacacagatactttcacttccagcagtttcacttaatatcgatgtaatggaaaattcaaggaggctgtcagagatgggttatctattggaaatcaccaggaatattcaatcccgtattaccagaaagtttaagaagctaggaaaggtagtatattatattaatacaaatgttagttttatattttttttgtttttgccctagatttgacttatgatatgtgtgttgtacagggaaataatgagaagtcactgaacctggtagacccaaattctttgcaggatgattctcagcttgaaattgttccagatccagcatctgcagagtcaagacaacttgacacttctttattcgataccaatgaggagcttgctttgacgcctatgggtatgatgacagctggtcaaatcattgacgaaagaagttatgcatctggccttgtaccccaagggatagttgaagaaaagaaagttcttcctctggaaaatcccaaggagatgatggctcgttggaaggctaacaatttggatttaaaaactgtggttaaggatgccttgctctctggtcgactccctttagctgttcttcaattgcatcttcaacattctaaagacgtggttgaagatggagagcatcatgatacatttactgaagttcgtgatatcggaagagctattgcttatgacctatttttgaaggtaagcctgcatatactggcttagacagagtgatgtacatgtatgatgtctagcccttgactttcttgatgtgtagggtgaacctggggttgccattgccactctgcaaaggctcggagaggatgtagaagcatgtctcaatcagttggtatttggcacagtgagaagatctcttcgatatcaaattgctgaagaaatgagaaaacttggtttcttaagaccatatgaagacaatgtactggagaggatatctcttatcgaggtataacatttcctaatcattacttgtcgtaagggtatcatggttctgtatgatgctaactttatttaacttcttcgttgcttgaccctgtgacaaaaaagaggctttatcctagcagccacttttgggaaacatatcttgctcgtcgaaaggaactccttaaagctgcactaccttttgactccagtgaaattagcttgcaccttggggggtcgtctttgtttcagcatctcaagattgagtgtggtgaggttgatggtgttgttctaggttcttggactaaaatcaatgagagtgcatctgagcatgcacctgatgaaaccgatgcagttgctggctactgggctgcagcagctgtgtggtcaaatgcttgggatcagagaacatttgatcatgtaagaagttttctatagtcattctttctcgttaccctctaaatgcctgaatatttatctaattgcaccatcccattatactaatacatccgtaccttggggacgttcgaattgatttcaacgtactctgcatgtattggaattggaccagttggattatctcttgatctgtatagcttaacagtgtttgtagtcttaccctggttagaggattttgttcagttgttttcttgttttataaagaacgagacaaatacatacgataaggcatctgtgcttgtttctcgaggagctaccctct

SEQ ID NO: 67679 - DNA, 1883 bp, Arabidopsis thaliana landsberg
gagcttctgtaaaaggtaatcaataaagtgttctacttttgaaaactctccatagaatctaaacgttgaagtatgcatatcatcatagaatcgaaatatctagcatccgagttgttaagcctaatccacagtcacttatataaccaagctgtgagtttaaactcagtaagatctttgctagatgcttttttactcactcttaagcttcttgtttactgcagcaccaaggtcattcttttcactctccaattttcgtagcaaagggaaatgattcgaaaccaaagattcataacagaagtcatgaggatccaagcgaatgaaaggtaacaaattcgcaatgcaggcacaacagacacgagtatataagtgaaatgttcggagatcgcaatgtgctctttgtttcggatcaatgtatcattgagaatagtccctctcttcaatatttctttgttaactttctgaagcctacattgtaaaatgtaaattgtatcaaacctgaaacatgtcatcgatgtgattttggtagtacactacaaacaaacagaaaggatggcaatgttcatttactattttgacccttcagaggaacatagtctgttgcttaataaacgtgattatgtgactgtgaatcatgtccaaaatgaaactcggaagcttttggatagacattaaagaaacacaaagaattaggttatacgacacgaagtttactacatttaaataatcatgattttgtgatgaaaacgtcaaagtgggacagataaggtaagattctcaccttccctaataacctttctccatcttcctcggaaagtgacgtgaattcgaagttgacgtaacacagtaagaaatccccaaaaagcccctccccataacctcacaagtctctattccgtcaatggcacattagtcattcaccccaaaaaagttaaggaaattgggacaagaaatcctcaagagcctaagtaacatgattacttgacttcaaagccaagtgaaatgtgatgatgttacttagctgacatgcaaagatagcgaagatgctccatcatcaaggaacaaagaatccaaccaaaaaacagaaacgtttctttattctctctgttgtaaaattcaatttcacactgttcaatttccaagaatggcttctcttacgccaagagtgttaatcaagttactcgagacgatgaacaccaacatcaaggtacgaggggaatataggtctgttctattgcaggtaatcagcattgtccctgctttagctggctcggagctttggccaaaccaaggctttttcatcaaagtctcagattcttctcactccacatatgtctcattgagcaacgaagacaacgaacttatcttgaacaacaaactgggaataggacaattcttctacgttgataagcttgatgctgggacacctgttcctgtattggtgggagttagaccgatctctggacgccatccttttgtaggaaatcccaaagatttgatgcagatgttggtaccaagtgagacaacacctcgggaagaagaatatcacaaccagaagaaggtgacgacaatatatatacactatcaccagaattttgagctattacttcttgtaagagatctgttctctaatacaaattctgcagcagaaagatggtgcaagatcaaacatagtggagaatataaaaaaacatcaaccttttgtaatcaaggaagagaagacaggtgtggcttcacgttatatgaagggtatttcaaattcaaaggcaagtggatcagactcaagtagtgggggtagcaacaatgaaggtgagactggatcgataatggtggctaagacagttggtgtatcggctaaaggggaaacaagggagcacaaagatcag

SEQ ID NO: 67680 - DNA, 2037 bp, Arabidopsis thaliana landsberg
catttgatctaaaacttggaagaaacattggaaactcttcctctgtttttggtgatacagagcaagtgattagtcttagtaagtggaaagatagtgctttagctaaaccagaaggttcaagaagctcgagttcaaagagaacaagagggaatggtgttggaaccaaccagatgccgatttgtcttgttgatgcatgtgattctgattttagtaattgtagagagtatcataagagacataaagtttgtgatgttcattcaaaaactcctgtggttactattaatggtcataaacagaggttttgtcaacaatgcagcaggtaagattgtgtgttaatggtttaagcttcttgttgggttggtgaagatgttaacatttgtgtctaattaggtttcatgctttggaggagtttgatgaagggaagagaagttgtaggaaacgtcttgatggacataatcgaagacgacggaagccgcagcctgaacatatcggtcgtcctgccaacttctttacgggttttcaaggtttctgttttaagaaaagttagttagtttcttgaatccaatagaccgttccttgttgatgaagaagcattgttttatgttttcaggtagcaaattgctagagttttctggtggttcacatgtgtttccaactacatctgtgttgaacccgagctggggaaatagtcttgtaagcgttgctgtagccgccaatggttcgagttatgggcagagccagagctatgttgttggttcttctcctgcaaagacagggataatgtttccaatctcttcttctccaaacagtaccagaagcatagcaaaacaattccctttcttgcaagaagaagaaagctcgagaaccgcatcgttgtgtgagagaatgacgagttgcatccatgactctgattgtgctctctctcttctgtcatcctcctcgtcgtcagtccctcatttgcttcaaccaccactttctttgtcccaagaagcagttgagacagttttttacgggtcgggattgtttgagaatgcgagtgcagtctctgatggatcggttatatccggtaacgaggctatccgtcttccgcagacgttcccgtttcattgggagtagtagaagaagaagtaggtagatagatagaatcagaaagatctatttgtgtctcttctcttctccctcatttttcaatgttctttatcatcatcattgttcttgtgaaatgttgaatggtgggtttttattgacatttgtttagttgatgtgtaggttctgttggtcttgtagcacccaattagcagcaagttaacagtttagagagtagataactatttatgtacacatcttattgcaactatagaatcttagaagaaccactattatccttttggctaaaacatatattaatgaaaatgaaatggctgctggagatgtttcaagctattcgttatatagttgtctatgtttgttgggatgtctattttggttaaaactttttataacatttgaaatattaatatactccaacatactaataacgtaacaacaaatgtataactagtcaactatccattttgtcattactaattcgaaacaagtttcttacgcatcgcaagtttgatatcattataacgtaaaagtaacaaaacattagcataataattaggtgaacacgggaaacatggtataactgataatatagaaaaggtaaaagcatagataggaagaaaaagtttttgtaagtaaagattacatagaattaagtgcccggaaagtggatgacgacggtgaagacagtgacaaggccaaagtaaaggaaggcgtggagaaggattgagtatccgctcgtttccatcttcccgaagtctacaaagttgttgtttcccggaacctgaaacaacaatcccgggctcagcaccacaaacaacggggtcgcgaccaccaccggaagacactcggctattttcctagtcttctttttttataccaaagaatgaagagagaagttatcttaagaaaagagaggagagatagtta

SEQ ID NO: 67681 - DNA, 661 bp, Arabidopsis thaliana landsberg
gtctatgcgccatcacatattctaaactttgtaactttaacatagttgttgacaatataagatgcactaaaagattgtcttttataactcattattcatgtgtaaagaataatttacaaaaaattggtgacaggatggatatcttttgccaatttaccaagaaaaaaaaaagaagagaatatcggacgtgagagacgtgtatccaccagccatccatgtttaatatcaagcttggttccctctattgcatgacatggcatcatccccatcgttctttcgatctcgccacgtcatcaacctaagtggtccatttatttcgcatgatacacaccacctgtttattactttatatgctctattattccctatacatgctctttgattaagatatatactgaccgaggaagcactactcctaaatagtatagaaatattttaagaggacagaaatataaagaattatattaaaaatcttaacattggttacaatatattaataaattcaacaaacaagctatatatagaccattcatgtttgaagcaaaacaaagtttaaaaacaaatattttcgcatgttactttatcacaaaaaatgatctaattatactaaaaatgataaatttatcgaatctatttaatattttgaaaaggattctattta

SEQ ID NO: 67682 - DNA, 1206 bp, Arabidopsis thaliana landsberg
tatattttcattgcctctgcactacctgtcattgcattcggcgagcagttaagcagagagacaggtgacagatagtatatctcaatatcttatattagttgcttccagagagcttgtctgattgttttttttttttttaatcaaactcttgctttagatcgaagtcttggcatagcggaatcattagcttccacagctctttgtggaattattcattcagtttttggtggacaacctctcttgatagttggtgttgcagaacccactatcattatgtatacttatcttcacagcttcagcaaatccaggcctgaattgggtcagaaactctacctagcttgggctggatggtatgtaaacttctcattttcctttctgttgttattgcggattcctctttcacttacattgaaactctttgtttttctcttttttgtttaacagggtctgtgtctggacagcagttttgcttatgcttcttgctatgttaaacgcatgcaacatcatttctaggtttacaagaattgcaggagagctctttggaatgctcataactgttcttttcatccaagaggctgttaaggtggtgatgggtatttacatggttatagtcatacaaaagtctttcaaacattttaaaacttaaaaggtttgtgttttccttatgcagggacttatcggcgagtttcttgtcccaaaatctgacgatccaagtttggaagtgtatcagttccagtggcggtataccaatggtctgcttgcagtcattttctcattcggtcttctttacactgctctgaaaagcaggagggcaagatcatggaaatatggctttagtacgtgaaaaatttgccttggctttttagataaaaacttgaaaagttcattgaacaatactaactatcttcacttttgcagggtggatgcgaggttttatcggggattatggaactctcctcatgcttgtgttgtggagcgcattttcatacacagtccctagaaaccttcctgaaggagttccaaggaggctggaattgccacttccttgggcatccgagtccttgtatcactggacagtcgtcaaggtactattactattacctaccttatgatttgtgattgtgacactttacaacagagaaactccaatcattgcttttggactaaatttgcaggatatggcgaaggtaacacctcttacgtgta

SEQ ID NO: 67683 - DNA, 437 bp, Arabidopsis thaliana landsberg
ttttccattgtacttaagaggctattactgtgtatcaagagctagatcacgccaagtttcagcatctgcttgctgagtttcctgatctgaaacaatcacaatgtgagggattatattagtcaagctgcttatatgaagattcataggtatcttggaagtgaaagttgttaaatctcagaaaccctctgaaacaaagctcaaatttgagctttactatgtttgaaacatacacaaaaagtgacgtatgtgtctccattactttccttatgacatttcaaggtctcaatatgggtgtttaacatcttggatcagaaatgcatcaccagtgtggattcacagctagcagttttaagaaaagactatattccaaagaatttagaccttaagaatcataaagctatgtaaactgtaaagcaaagcaaagaaaaaaacaaaga

SEQ ID NO: 67684 - DNA, 489 bp, Arabidopsis thaliana landsberg
actctcttcatacaagctgctttcgacttcccaggtactgcagctgcaatcttcttccatctcatagctgcctcctttggaaaagcttttaaagcattgagtaatgcaatgtcttctccattactccaaatctccttagtaccttcctcatctccaccagctccagaattttcagcgttttcatcaaccaatctaggatccgaagctttcctattcttcagaaactgagcgtaatcatcactctcatagattttcttctcaccaatctctttcgccttcttaatcacattctctgtcttgtaccttcctccgaacgcagaagccaccgtttcccatctcccaggcttaccagctggatgcttaatcaactgcttcttcaaaatctcgatatcttcagcagtccaatctttcggttcattcacagatccactctccttagacggcgggatcaccactttcctcgaaacttcccgcaccgaagaagcattt

SEQ ID NO: 67685 - DNA, 724 bp, Arabidopsis thaliana landsberg
ctcgccgcaaaccgccaggagaccttactcctaatctcgactagcttatcctgcaccaccacgtcctccatgtccttcttctcttgctccttcttgacggcatccctcttcatgttcgagatctgatttgcaatctcggcatatcgatcaccatccagagatcggaaggtcaggctcctaacgaaatgggcggaggcatcctcgaaaggctgatcatctttgcggccaactccctggcccggggacaggaagttgatacgcaggaatgaccattcaccctcgtcgctcttactagcgttcttgatggtgttgatatgatacgggacggggcgccccatgacaggaacaacgatggtcgcgttcttctggtcgacgacgataccttggtccctgactttgggcgggaattggttgtctcgtttgtaggactcgaatcgcttgaacttcttgatctcgacgccgttcttgtcgctcgtcgactcagcgaacatggcgaggccttctttttgcttccttgcggccagctccttctggtggtctcggcgccgcttctcggaatcttcgtccacatgcgtcgaacgctccgagcggagtcgagtgctcgtgatgttcttagtagcaacagcaccgactctcgagtccttcttgtccttcttgggcgtcggttgctgctcatcctcgtccttgaaaaagaacgacgtcgcgtcaacatccacaggggcat

SEQ ID NO: 67686 - DNA, 493 bp, Arabidopsis thaliana landsberg
cgctccgtaaaacttttcaaaaatataaaatttgaaaagtctccgttttttgttttttcacatcttctttattatgttaggctgagggatgggagacatgactatcatcatatccccaaaaggttaataaaccttagagatccctccaaacaagctaatctgctgggacactagccctcaatgaaattgcctgcaccacaacccaccgatctataggtattccctacacaacacatgcctaatattctttcaactaattatcttaacagacagaaactgataaattccccttatgaaatatctgaggacaatctttcttgttacctgcataaggcattcgaaaccttcaaattgggtttgttatgccccatggaaacctcagcactaaaactatagtacttcatgacattttgtcccacaccatctctctcatgattataactttcgccattggacagatcaatgtgtatcattcttacaacagaaacttttc

SEQ ID NO: 67687 - DNA, 496 bp, Arabidopsis thaliana landsberg
gcggtggtggacgaccagttgcgggtgcacggcatcgaggggctgcgggtggccgtttcctcgatcatgccgaccctggtctccggcaataccaacgccgcctgcatcatgatcggcgagaaatgcgctgatatgttgcggggcaggcagatggcgcgggcggcgtgagggaagtgttcttttttggaaaaaagaaccaaaaaacttctatccaccttgcaacagtggagagtggagacgccggagttttcactctccactgttgcaagggggatggaaagacttctttttgttcacaaaaggaagacttttcttgatttacgacactttgggcatcccgaccgtcatcaacgcctgcggcaccgtgacccggctgtctggcgggcggatggcggcggaagtgatgcaagcgatgcccgaggcgtctctggcctgtgtggacatggcgcatatgcaggccgacgcctgccgcgagatacgggcggtgaccggggcc

SEQ ID NO: 67688 - DNA, 527 bp, Arabidopsis thaliana landsberg
tcgatctagttctctcactttggtcgatcgcaaaagcttgctttatggttgcatttgagccatccaaacggagggggtatctacttggttccattaatcggtgttgttatttccacggatatttttgcattaaacgtctaccttaaaggcttaaacgtacatagaaaaatctgcaccgatcacatttcactaaaatatttttctgtcaaatcacatgttggatggtgtaactggtaagttattaaaagagggaattacatgcgagtccacttgtaacaaacagttgtgaggctcgacggcaagttgaccagaaacaacttgcactgcatctatacaatttttttttgctttattatttgacaatttttccatgtaacccacacaaatcatatttatttgaattaaaaaaattttgtatttatgttagccattaactcttctagatacaagagagaaatgtcatcaaatttcattgtttaaaaagaaagggtgatttatagacatttatcagaaaaaaaaaaacattt

SEQ ID NO: 67689 - DNA, 225 bp, Arabidopsis thaliana landsberg
ctagaccagtcggtacactgaggtggtacacgagcttgagctatttagctgttcttaatgtgaattactctattacatgtacgcaccgtgaggtgtataatacatgacaatgatgagcgaaacctaaccactatcaaaaaaacttttgattattggaacagcataaccctactggcttgaatggaagaaagagtatatacatatatatatatgtgcgattatata

SEQ ID NO: 67690 - DNA, 472 bp, Arabidopsis thaliana landsberg
  unsure (1)..(472): unsure at all n locations
ttctctctagtttgtgccagagtcttccagaccggttgaccacgagctatgtaaacggatccaaatcctttcgggttggcccatcttcttcttcctcttcgaaataccttcttctctccctcgcctgtatcaccaattcaattcagaagaagtaaactttcctgtgttttcttttgttcaactcttatcctcgaagatgaaagcattcgctgtccgattctccaagcttatcagattttctccgacatatctcctttagattaccctctcttggtttttttttttttttaagtgcatttcacactctgcaattagattgttcttcagctcgttttgcgagaaggtttacgagtttgatgattagagttttcattttcgtggaatttgtttgacttacacgttggntgttctttatttgagtgccaatactttcgtgtcaatgtatttgaggtacgaaaccgacttactcaat

SEQ ID NO: 67691 - DNA, 156 bp, Arabidopsis thaliana landsberg
aacttcgtaggtttcaattacttattcactaccctttcccctaaccgaaccaaatttatgtaatttattaacttctaatttggtatataacatatgaccagaaccaaaccgaattttgaaatgcccacccttagctttacctttaaaagcaaaaaa

SEQ ID NO: 67692 - DNA, 764 bp, Arabidopsis thaliana landsberg
atgcgtagttgggttggaccaataaaaatggcggctacagctggaaactctcgtgtctaatgtacacctactctctttactccctcacgtgacctctcaccctctccttccctcaatttaacggctcaaatcacatcattataaataaatactttgtttctttagtttttccaaaacttggtgacattgcctttttgggaggacgaattggtcccactcgtatttttttttatatttgttgttgttgtaaagatctgcttttttcaaagattctcttttgtatttttttctaaaaggtgcgacatcaaattcatgttaaacatttttgtaagttatctttagctttggttggttcctcttcattactgtgtcaagtggtatgggttggaagaatgatgacataatttaatgaatatgacaatcataattgagtaacgaagttttttaaactaatacagtgtcaaattttgttatccaaacattccatatattcaaatattgttatcaaaattattccaaaatatcagtaaaaagtttactacaaacaaaaaaataattcttaaaagctgagaatttaaattttttaggtttaggttaactatttttgatttaaaatattaagggttatttaagtggtatttttaaaaaacaaaacttggatgggatattttttttgagaattacccctttgattaaatagataaatttaaaaggtttaaaattggttagaaaaatattttttggaatttgatggccggtaaaat

SEQ ID NO: 67693 - DNA, 1703 bp, Arabidopsis thaliana landsberg
tttacacaatttcttaatgtcaattttcgatgctcccatattctccacggtttaattcaagattggtgggaaagggatattctcgcatcgattacaatgaaatatgggttgaaaaaaaaaaaaaaaaattactcaatgttgcaccaaaaaccagaaaactctaagttgcgctaataaaaaaaaaagttataaacccaacatcaaaccaaaaccgtactaaactgtcccatatgagatttagctttaaataaattagtacttctcataacgataactaaattaaatttccctagccaagacatacatatagttttgattgacaaaaaaaaaaaaaactcctctatttatagcttgtgttttgtttcctcatttttcacttaccattcaaacccaacactatggcaactctatttctcacaatcctcctagccactgtcctcttcctcatcctccgtatcttctctcaccgtcgcaaccgcagccacaacaaccgtcttccaccggggccaaacccatggcccatcatcggaaacctccctcacatgggcactaagcctcatcgaaccctttccgccatggttactacttacggccctatcctccacctccgactagggttcgtagacgtcgtggtcgccgcttctaaatccgtggccgagcagttcttgaaaatacacgacgccaatttcgctagccgaccaccaaactcaggagccaaacacatggcatataactatcaagatcttgtctttgcaccttacggacaccgatggagactgttgagaaagattagttctgttcatctattttcagctaaagctctcgaagatttcaaacatgttcgacaggtaaaacaattataaacggtattctcattttctaacgctatagctcactggcctgtaatcatgtcatttcaatgttttgactttttctttatatatacataattataatttataattgggatttcaaaccctatctctcactatttcaagactagaccggattggaatttgaacttttgtaatgaatattagtatctgcacataaattttatgttaaagttgggttttcttaaagtgaatttatatattaaaaatatataaacgattgggttttactcaaatgaatttacataagagctaggtataagtgcaaatatgcaatactgtcattgtcgtggatgtataaaagtatgatctaactttgatgatgccatggaaaaattggaaagttcagatccagaggaaacattgcttgaattataaaatgtatggaccacattgtttccttaaatggaaggtctcacgagtttctcaatttcagactactgataatatatgctattatagattttattttctgattattttttttggtttaatttaattagagtaaatttttaaaaagaaatatatggttttgttaaccgtgttttaaaatttgatagagcttttagatcataatcataattttttcgtattaattgtgattatgttggacgaaaatacttaattagtattcaagaaaactcttattctaaaaacagaaataaatgaattttacaggaagaggttggaacgctaacgcgggagctagtgcgtgttggcacgaaacccgtgaatttaggccagttggtgaacatgtgtgtagtcaactctctaggacgagagatgatcggacggcaactgtgcggcgcc

SEQ ID NO: 67694 - DNA, 103 bp, Arabidopsis thaliana landsberg
atgcattgctattggtgggttttaacagccatttgaaaatatatatatatatatataaaaaaccgttcattgtcaaaaagaattgtactttaacgcttaaaaa

SEQ ID NO: 67695 - DNA, 725 bp, Arabidopsis thaliana landsberg
tttcagttcggttgtttactgactaatatttgaacatgtatccttttttgggtaatttaaaaattgtttttcagaaaattaaaattcataaatgcaaatttaaaggaatacaagatgagtacactaaaagtaggtgagggaactattagagtatcaactcctatttattttatgttatttaagattttaagaatatatttagaagataattacaaaattaaacgaatagttttgattacaatttgattattaagcttaatttcgggtttagataaacataaccttgctatgctttcctatctctaattatttatatctataaaaaaaaacattactttttcataaaactatatatgtcaacatcagatctctcgcaccacaaaaataaaacactcttttatgataatgctcattattaactagaagccaatggtacatgcaacaaaaaggaccaaattttcaaaaagactcgaattcttaagggaaccatatacttttctatattaatgatatcatatcaataatatcatgcaatatccagtattaaataaattggattatgagggattagatatcatttttaaaaatcacaaaaaatttaaaaaatacttaaagattagtatatttcgtccagatttaataattttttttggggttttataattttttaagatataaacatagtatccaaattaaatacaatacgtataaagcggatatttagt

SEQ ID NO: 67696 - DNA, 359 bp, Arabidopsis thaliana landsberg
aataaactcgtcccattttgtagttaaaagcccattccactgttgtccaatcattctcagccgctggatattcggggatcatgactataacattgacgacatgaacttgactcagctcatgtcggctcggatttgacaaagtcttatacttaattatcattaattgctttcgttcatttttggctaacagaaaatttttgataaccgtatccaaacatgaaatgttcttcttcggcaacaccacgcattaactacccgtaggatgaaacatgtgatcatattgcccacataagatcgtggtctctgctttctggacactgctaggcccctgaagagctaaagcatctcatgcgggacac

SEQ ID NO: 67697 - DNA, 546 bp, Arabidopsis thaliana landsberg
  unsure (1)..(546): unsure at all n locations
ctaagctcggaggtataaaaatccaggttaagatggccattttcgtctgtttcaacagtagggaaccacgctggggatcggggaaatcaggcatcttacggtcatgttcgctttgaatcgaataatccggaagataaaattcgcgatgtagttgcaatccctcatagtcaattgccagtgctttagggtcaagcttgaaacctgccacatctccattgtaggtagtgaagcttatgattccattttgtgctggcggcccgaggaaaaattgttttgtaaccacctcaagcttcttcactttgcgtggatcaaatgccatgatatcgtccgcgtgactgacaggaattccatccaatagaatgagcggctctccacgaagaatgttgcctgtggcattgtcgacgataataaattcgcatcgatcatcatgttnnnnnnnnnnnnnnnnnnnnnnnnnnnnnnnnnnnnnnnnnnnnnnnnnnnnnnnnnnnnnnnagtcatccaggtagtatgtttgctgtgctttgccatagaatgaactgctgt

SEQ ID NO: 67698 - DNA, 1678 bp, Arabidopsis thaliana landsberg
cgcccactagaatcgtttgctcattttcttaatcggaaataagatatacatttcatttcatgtgcatatatatatacatcgatattatttatctattgaattcatcaaatgtacattgatttcatttttattgttatgttggatgagatcaactgggcagttggcagacataaataaattgtcctatgacaggtgaacctcatttaatttagtttactcaaccaatttatttttttcgccttcttacaagttaatacgtccggtttaatcaattccggtttcccacttttcctcacggttacgccttaaccaagcatttcaacctctgaaatagaataatttgagtatatatgaacaaatcaacaaactaaactaaaccggaattgataagaaacctagaaaaagaagaagcaaaaccggttatgtatgtaacgtactcacgagtggacgatatgtctatatatagaggtcaagactaagcttcactgacacaactactgtcttcgatctctctttcatatacaccatataaaacgaaccagttaattatgggtttaatttccgggaaggtgtgtgtgtttatctttgtattcgctctagtcgctgaattttcgttcggaaatgttgaggttaacgacgacaaacactttttccacaaacctcgtccatttttacacaaacctcgtccattcctccacaagcatggcatttacaagaaaggtttcggtaagggtttgggcggtggaggcggtctaggcggcggaggtggtctacgaggcggtggtggcctaggaggcggtggaggtttaggcggtggtggaggtttacgcggcggtggtggtctagaagccggtaacggtttggaagaaggagggggtctaggaggcggtagcggtttggaagcaggagggggtctagaaggtggtggtggtggtggtttaggaggaggaggtggattgggtggtgaagctggaggaggatacggtggtggtgctggaggaggacttggaggcggaggtggaattggaggaggaggaggctttggcggtggagggggaggaggattcgggggcggagccggtggtggatttggtaaaggcattggtggtggaggaggtcttggaggaggttatgttggtggtggccatcactgatgagtggtgaggctcatgctcatgcattcgtaacgttgttatattatttaattaaatggaaaatgataaattaattattgcaataaaatgatacattagcaattgtgtatgtcgttatttttattttgagtcgcattgtatgctgattccatatgttcggctttggtcggtttcaagtgtggttaataaaatggttattttacttttgccaacagttattgagtggttgtgtttatgttttatatacatgttcactcatctttccatatgatcttacaacacttgctaaaatgaattcggttaggtgaattttatgagtagatacactatgtaaataattagtaaagtaatatgatatttatttatcttttggaaacttttaaaacaccaaacttaatattacatgcattgatagtgatcactgtaaaattttgtactaatctaagtgcaaaaagtgtacatgagtatgtcttatcccaaatttagtctcaacaattgcaaacttttgagacatatatacagct

SEQ ID NO: 67699 - DNA, 1610 bp, Arabidopsis thaliana landsberg
  unsure (1)..(1610): unsure at all n locations
cattcacttgtcacagaccactcggctttattacttcctagctgcttcttatttacaacatcccagaaggcctgaaatataaccatttagaaagaatcgtttagaatgtcaattgctgacttattgtcacccgagaactgaaaaatatgaacaacacaagggatcgttatttaccatatcaccaggcaagttaccgaatccagccacacataaaactgtggaacatcgattgaaagttacaaaaacaggtatgtacagaaatcctctgtttaagaagaaacaaaaacgagaggacaacagaaaacagggatgaagaaaagcatcatacctctcccttttgggttccatcgaagagtgttataaggaccttcgccaagttccatcaatggtttacaattcttgtcaaagattgtcacacaagcaggcataactgaagtcggagttgagggaaagcaatgccagaaggagtatatagatccaaatcgaaataacatcttaacaagaacacaatgatattaacatgtcaatgaaaaaacattattcctaaatgaactcgtagataagtcgttatagctgatggaaaaaggatacagccatatacaacagcaaactctgaacccgaaaaggaccactgaacatcatgaactggtccttctttacctgttaaagcaccaaagagtcagtacaaccaacaatcacaacagcagnnnnnnnnnnnnnnnnnnnnnnnnnnnnnnnnnnnnccctcatgtgtgccgtctattgtaaggtagtgtagcttcgtttccccatagtaactttggttggtcttgtcaacatctgattgtacaaccactaggagtccagtggaaccatggttccaactaaactgcacagaggaacatcggaaaaagctacgtcgagcacttggctggctctgcaattcttccccacatccaaaaatctggacactgcctggactcccctatatatgaatgaattaacatgttagagttgcttgtctatagaggaaacatttatacacatgatgttctgcaacttcaggaatgaaaatagactactttgtgagagagaagactgcaacagatttaacatatagaagaaaagatgtctttttttgctattcaaaagtataatgcgatagcccaagcagtgaaaagtacctttgattctggaacaaacacagcaacatgggaagctggcgttttagaaagctcaaatgcagcaatcccaggaactctgatccgggatgttattcctttcgagaaatctttcgggtcaaagaattggacctcatttgtagctaaccggcacgcagaagattcatcaggacagaagcgaattgatggcctatagagcaaccacagaaacactcgttattataaaagcagcataataagcacaacgactatctataattgatgcatcatatatgatgccaataaagcactgagacctgcttaccatgaggctttagtaatggatttttggtaatgactgtgtgctagatcccctgtctcagtattccaaatggagacattcttctcttggggagtagtgggtttttgaaaagtctgaagataagtcccacatggagatagctcacagct

SEQ ID NO: 67700 - DNA, 2381 bp, Arabidopsis thaliana landsberg
cataacaaaagcagccaattcatgttctcaagttattgcattttaaaagccagaactcccttaatccagtggattttgccgtggtgtctcaacactttgattggctttcagggattcaataactggaccaggttctaagatcattgttgttgacacatctgcaaaccatcacaaaacgaaaacagttttgcttattaataaaactatccacaattaagacaagtttatgaaagctggagatgagaaaggtatactgaaaaataccaatgttaagcgagagtcctccatgagttggacgaaagctcgaatgtaaacctcgaatacctataacacctcctccaactttcatggggtgtccatcgctatggaaaaatgcctgtctgaccaaaaggcatcccctgcattatcaacagttttctatagtaagcatcgagcatggtcacaaaatgcaaatagttgtacattaattaaatttcaccaacaaagtgaaaatatgataataaaaattggtccattagaacgtagagtatctattttaataaaaatataaactgcacaaaagcaaacagatagaaagatttacctttcagctgcttgctgcctcagtacaatgtcaagcactctaagtgcatcctgagcactcttatctggtgtataagctcctctctgagtgccaagaacagtcttcaacggtatttctgcagcataatgtatctgaaccttgtaacttcttggcaagaaagaacgttttgatcgcttgcaagtaccggaagaactaccaccatcagagacaccacaatcactataaacttaacaagactgcgttagttagaagatcaacaagatctatcttgacaccttgaaacgattaaatatcaatccagataagagggacataccgttttgaaaatgacccttccacgatgactagaaagtcaaattcgttctgtggtagaggaccaacagtatataaagtcttctctccatcatatgccaaccttttaccatcaagatcagaagagtaagtcttgaatagttggtccataagctttctgcttattcctgtcccatcaacagcatcaccgttttctgtggtgatactaacctgcaaaaaaggtaccgatatgtcaaacatctcacacacgcacagacactgatgaaagaatgcagaaaagtgactaatgaatcttacagtgtactggtaaaatactacatccggctgtctcacagaaacattaaagtgattggtgcacaattctattgggttgcctgtggttccaaccccacgtctagttgtgatgtcataatctcgatggctgggctgttctggttctatacttatgggtgacagtggcagagatgaagatgtctccatccttccaggggaaaataatctgcaagagagaaaagtggaggttggttacagtgtgcaaaaaccagtccaaaacacaatgctcaggagactaagaaagaaaagaaaaacaccaaattaagaagacaactccaaaaggtaaaaagctaaaaactttaccaccattgtcgttctaagattttaatttctgggcatatcctgctaaatcgcgagaaatggtataaatttcagatgaggaacaaacttaatctggaaaaaaaatggcacctttaactgttggtcgccttcaaaattgagaaacattacacaaacaaaaactcattcgagtgtgtcatacagtagcataacaagactttcaagagagaaacaacgcagccaaaaccatacaactatcaacagacaaatcctagcttcatgcaaattctccgaaagagagacaaaaacaaaacctagctccgaatcaacaacaattacaacagcgatatctagtgaaaacagcgcacctttgaaagaattaagaagaggatttctagggttccggtgaatcaaagagaggaatttatttagctcatttctcttctccgtcacagtctctttgggtttcccagacaagcaaaagaatggagggaacgtttccagtgatgggaaaattaaaatatatttcacttttcagtcattttttacagtaacaaaatttaagaactgaaataaaaatggtttattccaaaattattaaaccgaatccttcaaaacttattctatttctagggttatgctccggttgaatggattgaaattcccaacttattcatttcaaatagtaagaaataaaatgaatggttgtaagaaattaaattagaccgtcgtggtaattgtaagaaatttcattgaaccggactataaattagaagccggataattaaaccgtaccagcgcttggagaaacgccagacacacgcgcgaaaagaagcgcgtagaccagaacgtgtaggatttgtcacctcaaaaa

SEQ ID NO: 67701 - DNA, 533 bp, Arabidopsis thaliana landsberg
caacggtctggttagcgtgtatcgcactgtgtcggcatgtatatcagttcgcgcctgtctagcccgaccttcttcccgacagcggcatcgtatcggccgacccgctgcatccagtcgacgtagaattccgagttcctgaagatcgatgccggctggtcgcgctcggcgacgatgatggccccgtttcgcgcattcttccagaagttctcccaggggttcaggaaggcgtaatagtcgaagaacgaacggatgtgggtgtcttcaataccgtcataggcgctgaatccgaattcgggcctgtccagactctggttgaggattgcagagtaactgccgggaaacgcgcgcgtcagaaatctgcacacttcgacccattcgacttcgccccacgccgcgctccgcacaacagcagagaggtcctggctgatggtgtccaacgcctcttcatccagccttctcatcgtcacgggctccctcatcgtgaccaagtcatcagcttctgcaacggcagtttgaattctccggttgctatc

SEQ ID NO: 67702 - DNA, 448 bp, Arabidopsis thaliana landsberg
tcactcctggacacaaatactcagacccggaaattttttttttacgattccaagaccagatcaacggtaccggggaacttattatatgccaaaacaccttctattactgctctgactagatctctacactatatgccaaccattgaccagaactcattctctctctacttgtactgctttcatcatactgaactctccaaagaatatcacttatcaaaatactaaaaagcaattaccttgaatcccattcatactaaggatctttgtctttctagaggatacatcttcagcttaacaactatctgacacttctatctccctaagcctccccaactctttctaatgctacatgtaagaatgatgacttacccttctcactacactacttcccaaccgtaaacccaacaattaattcatgccacttattgaacaaggctgtatggtcact

SEQ ID NO: 67703 - DNA, 600 bp, Arabidopsis thaliana landsberg
ctgctcagggcaccttgattggcaaagtaattaacaacctactatacctagtaggttgacaaagattttcacatagcttgcttgtggctttcgaataaaaatggatcactctctaaaagcaacgtcactttttttttattaacaacgatatggcgcatatacagtatactgtatgtgtatattcggtgttttgcgggccccaaggttgcgcccaactaggaatatttcttcgaagcccagtctctgaaacatcactcttttgattaacaacaggattgctcataaacacatacatcgtgatttgtagtccacaaggctgcactcaattagggatatttctgcgaagtgcagagccagaaagcccctcctctgcgacgctgctgtagggtagccatgtaaagttgcgtcacagccaagccaccccacgcagggctcatattcaagtcgctagggagtcctataagatcttgggcgtttagattgtacgggcaattgttcagcattggttgatcagtaactatcgatcgatcctactgcagtagtctatcggttaatatataagccatataatgccattgactcactcgccgaccgaataca

SEQ ID NO: 67704 - DNA, 584 bp, Arabidopsis thaliana landsberg
  unsure (1)..(584): unsure at all n locations
attcccactgatacaaaagcttccctcaaagatggagtaaggaaattgatgtaaaacaaacattttggactaatttaattttataaaacgattcaagttggaaaatacaaggaattaacaaaacgtgttttggacgtcaaaatttagacaagagtagtcaagaatccaactatggaactaaaccatcctcactgttaaatctagactctagtgattagcattcaacaaaaacaaattatacttttcgcacggaacatattctgaaactattcacatgtcagttttgtcatttcctcaaaactcatattcattttttttttaaatggacatcacgggacctgagttcctggccataaaggctaaaaagcagatccaagaattgattgattatatgaatttagttacaaagtacaaccagattgtattctatgaacatattaattgtttccactattcatggattcatgatagagaacaatatcactcagaactagttaatgtcgngatttacaaaaatcccacagcaccataacctcgcaatcgcatgacgtaatggaaaatgtgagagagagtcacangaacat

SEQ ID NO: 67705 - DNA, 532 bp, Arabidopsis thaliana landsberg
gcacacccccaacctgtcttgctgtctatcattcttctttctattaacaatttaaaggtcaatgtggaaaggggcggcaggaaggaaaacgtgaggcaggcacagagagggaaatcaggttccattccccacatgctcattcaataagattcccagaactgagtctggtcactgctggccctcaggacagaagctacactaacccaaacacagggcacgaccattgcaaagacccccacagtaggagggtaacactctacacagcttatcagccttcccaggaaggagccaaaacattggccctgtgtcagtcccatcagatcttctctaattgccccaaccagacatctggtaggctggatgccatccagaccaatgtccaaatcagcaccttaagaagtcctgccaagctaggaggagcctgggaagcttccccactgtgggaatactgggaggagttcatctgggtaagtcagagagataaatgatgaggactttgcttcagagttcttcaaagggtaactcttggaat

SEQ ID NO: 67706 - DNA, 330 bp, Arabidopsis thaliana landsberg
agttttctcacaatcagattctgtctatcttttgcttttgtctcaatttttcttatttctattaacataaaatcatcattcgttgtatattggttactaaatatattctactactattgttattcatcttttttttgtcatattcctgtttgatatttttacagcaccgttttcaatacatttactatggaaaaaattaattattccacttgtttatcaactctcatctcttttttatgtttttatatatcgatctaccaatgttaatcctttttatttaactaacaatgcgtctactcatattaatcccatttatcaacatttttattt

SEQ ID NO: 67707 - DNA, 735 bp, Arabidopsis thaliana landsberg
ctggggatccaaggtgactgagaattcgcaatagagtaccatgaatcataaggtctaaaacttgcaatatgcatcggccagaaaagatgacacaattactctagcgtttgtaatgatatcaaaatactaaagaaagatgggataattatgcattttacgcgctagaaatatgtgtagtataatttttttttggatttacggttgtaaaattcgtcagaaatgcaagttactaaacaacagcaacaccacagttgtattgttatatatcagtataaatttatattcatatgatataaatttagcttctagaaaagtagctagtcactaatcaataaaaatgcataaaacttacactatcaaatgatttcaatttgcataactacaactcatggatttcatggtaaagaaacttagaagctactacaatagaccgtggactatttctaaacaaatgcaataatgaaactgtttaaaagctattaccaaattttacccgcaaataacattatatttgtttctggagccaaaattaaaagtccatttcctatcttgatttatgcttgtacccatactatatcttcaatgtttcgataattagtaattactccaatataaatatatattttttaaactttttaactcactaatcttttttcttacaaaacctaatctacttttactctttaaatcggtggaccatatatatatatatatatattcccctcctctatgaca

SEQ ID NO: 67708 - DNA, 612 bp, Arabidopsis thaliana landsberg
taaaggcactatcatagatccggtaatagccaagcgtgccacccggcgtgatgcccgtcgtggtgagcggcgtgctgctcagggccttggagccggacgacgccgcagacgcccaatccgacgcgagcgagaattcagcgatcttgctgccggttgccgccgcagcacagttcgatggcgccgagccggtatacatccgcaataccgcagacgttccaatggtggtttcccattggtcaagcaaagcgttacgaacagtggttgaccactggactgccatggtattctccgatgatgtgaggaaggttagagtgtggacgcgagatgaatcagaacggacgcgccgttgtattttccgcgcttcacgtcgagcgcagagatcagcccaccagagcggcaggcgatattgatttcagcgttggcaacagagccgtcgctgggaaattcgatcttgctgatttgaacgcccgggtcggctttccattgcagatcgccgatggtgatatcttcttgcgcggttgtgaatcgctgcaccgtgccgttcgtgagcgtgatggtgataaaaaagccaaggccaagaaccatactgtcgagcgggaagctcaacagcct

SEQ ID NO: 67709 - DNA, 1523 bp, Arabidopsis thaliana landsberg
  unsure (1)..(1523): unsure at all n locations
gttggccatattattactacacctactgaacacggatgcaatagtcgttaagaaagttatactcatgagaaaacattgaagtataaatcaaagcattactaatgaaaatgttgaagtaaagtcgaggttgtttgttgtaaaattaaaaacaaccacgattttaagattaatgtcgaacaccggaaacatttttaatgtcgaacaattcaacacccgcatatgaatctggaatgtaaggagacatcaatcaattccacacaaacatcgaacagactgtgaacaactggttaacagaaaccgtaaataggtcctacgtgtcagacaggtttggccacgtcatatattcattatcggatacggaaatcactcgatgaaaagccaaaagagctttcctttgtttttctgtcgactgatattattatattcttttctttttctcggttgaatagttaattaatgtaatgtttatcccattctataattttattttgaaaataaagaacgcggaaaaaataaaataggtaaaaaattcacgcgtgaaagcaagaagaagagacagtagagtctagagactactaaagtgtttggtttactcattccctctccttttcaagtgacagagccagacactcactacctctgtgttttttttaatggtcggtgaagaaaccgtgatttgctcaaatcaccaaaataatactctcttcaatctccatcttcccgttatctccgccacgtgtttctctctttttgtctcctttcttcttctccctaatcttaatctcagaaaccaacaacatcagtagtcagtacccccacacacacagagagaccctttttcgattctccactttctcataaaggaacgatttttcgagatgtgggtcagtgttgatttctctcctcttggcttatgagtttcgaattcgaatctcaaactaaaaagctttttgaaacaagcaacaaatgttactgacacctaagatgtttagttcttggcttcgacaagatgtgaagaagatcctcaaacgcaaagacagtgatgctggtgaacgaggtaaatttcaaaacttttactttcaatttcgatttcgacttctatgattgataaccgtttcctttgaaacatctcttgttccttttaggattgattatccaatcttatcatagcaaacccgcattttttttaaattagggttttatcaccaaagagttgattttgattatgtaacaatggtttctctaattcaggaaaagcattggaggacttgagagcatcgttattcaacagattccgttcnccggaaactccaaagagacagcaacaacatcaacatcgtatctgtggcccaactgttgctcttactttcaatttcgttgttgctattagcattatcttcatgaacaaatgggtacttttaagttttaactaaccaacctctcattttaacatcttcattagtgttaaatacatcaaagtaatcagctttttttgcttctttnattccaggttcaaaaaaaaa

SEQ ID NO: 67710 - DNA, 517 bp, Arabidopsis thaliana landsberg
  unsure (1)..(517): unsure at all n locations
aataacaaaaatatttaggtaaaaaagattttcaaatatttttcaaatatatatatatatcaaatataaaaatggatccttgagatatgaaatagnnnnnnnnnnnnnnnnnnnnnnnnnnnnnnnnnnnnnnnnnnnnnnnnnnnnnnnnnnnnnnnnnnnnnnnnnnnnnnnnnnnnnnnnnnnnnnnnnnnnnnnnnnnnnnnnnnnnnnnnnnnnnnnnnnnnnnnnnnnnnnnnnnnnnnnnnnnnnnnnnnnnnnnnnnnnnnnnnnnnnnnnnnnnnnnnnnnnnnnnnnnnnnnnnnnnnnnnnnnnnnnnnnnnnnnnnnnnnnnnnnnnnnnnnnnnnnnnnnnnnnnnnnnnnnnnnnnnnnnnnnnnnnnnnnnnnnnnnnnnnnnnnnnnnnnnnnnnnnnnnnnnnnnnnnnnnnnnnnnnnnnnnnnnnnnnnnnnnnnnnnnnnnnnnnnnnnnnnnnnnnnnnnnnnnnnnnnnnnnnnnnnnnnnnnnnnnnnnnnnnn

SEQ ID NO: 67711 - DNA, 717 bp, Arabidopsis thaliana landsberg
gccccccccccccctttgaagttgcatgctccaattcacactactaccaaaaaaatctttaaaaagccaaataaagtttaagaaaatgtttaaacttttgctaaaataccagtttgtagtgattttactgtatatatatactaaaacttgtagaacttttgtataaaaaaagttctaatatttttaatttctttgaaaaaatgatggactgtactttggtttagacagacatatgggtgtctgaaatctatttttagcatgtgtacgttttacctgtacttgtaagaatcttttttttttctttttttttgtgtgtgtaactacttgtgagtatctattcgtcattatccatagtagaatacaagatttcagtactctacaaacttgagacagagcagtatagtgagtcatattgagaattacagatagataatcttctcatcattgacatataaatacatatgtacactgaaataattgatataagggtttcttcatcagatctcttaacccctgataagactaatttgattacaatatgaagaatggttttaatttacttgaaaaatggtttgaacacagctggaccgaatgcattatatagcgtaaacctagaaacaagttagtttagaagatgcgtgtctaattaattaagaactccattctaaacgctctcagttttatgaaaataagaattacataatttttattattaaa

SEQ ID NO: 67712 - DNA, 435 bp, Arabidopsis thaliana landsberg
tatcttcttcttttttttttttttttttttttttttttgctaaaatcctggtttagcagcaaagtttgagaaatatgatctttcttcaggttgtggaaagtccttgtgatgccattcttgttgcggatggagctccgttatcagcatttcagtattttgagaatgttaggaactttcttgttgctatacaggaaatggggtttccaacatttgaggcatctgatctcgagcaagtatgttgctcaagaccgattttgagatttctcagaatgttcaagaattgctgctcatgaatatgcatctctctttttttttgtagggaggaaatgcttctcgagttgtgaattgtgttttggctatcaaatcatatgatgaatggaaacaaagtggtggaattggagtttggaaatttggtggcaacattaagcctcctgc

SEQ ID NO: 67713 - DNA, 709 bp, Arabidopsis thaliana landsberg
catactcgtaaaaagacgaaaagagattgtatatatatagttaactaccttgggttaagttttgatcctagatatagtttccgttaggatagttaacagacgttaattcggaggtacggttttatcaacttaataaaaacgaagattttaaaaagcaaccaaaattaacttaggtatttttcttccaaatttaaaactagaggtattaaacagcaaaacttaaattaaatggcggttttttcggggtttttcccattatttcacatatatctttttgttaactaccaaactatagtaaactaatattttaatttttaattttttgttataggaaataccaaatgcttcaaagctctggtacaaccctgttgtcgacctcgacataatggataggctcttcggcactagacacattagtactgatgatggatactatccagatgttgaatttgattcagaccatatagctactaatatagctgcagaagataattattctgatgaatattcagagtaaaataatactccaatgcagtatatgaaagggattcgagatgaaatttctgcatcattatggaattcttgatgatgatagtagtttatgcaataacatgtgttttaatgtgcaataaatctatgtttgttttctatttggtttgggattacttatgagaattttattttaaacacaaaataaaaacttaaattt

SEQ ID NO: 67714 - DNA, 387 bp, Arabidopsis thaliana landsberg
cgagccaatttgaagcttggaaaagccaaatatgaccagaaacgactccgccactagctcgccgccacccagacctgcacgtctaaagaatgacttgctaataagtgcgactgacttaaccctactaccggaaactcagttcaccagaacccttcctctctatatttgctattcctcatataaaatcgagtcctgctatacagagattagaaagaaactgatcgcacaaaccaaaagatagagtaaaactggtgaagacaatcgtatgctcctttagttgcttcttccaagaacgctgatgcgacatttccaaataaggcagtatcattcaaaactgccaatgtcgctctcatgaaaggagaacagagaccggctgacaatttcgcg

SEQ ID NO: 67715 - DNA, 554 bp, Arabidopsis thaliana landsberg
actcgcggcttctgccgccgttcggcatccgcgccgaccgcgttcagatccaggagcgagtatcatcctcgtccaaaagcgtgtcgaccagatcgcgcacgttcatccaatgctgcagcgtggggagcgcttcgtcgcgcgcctcgagcggaacgagcacctcgcggacgccgtgctcaatcgactcgaggtcgcgcgcgaaggcagccacgcgctgggcccggtccgtgtggccgcgaaccgagtccagccgggagagttcaggcagcaccgtgcgctcgaacgagagatgcccgagcaacaccaccgacaacttccgcgccgcgttcgtcagctcccgcggccgtccggcgtgcaccgccgcagcgaccgagaagagcaggcgtttgatctggaaatgctcggtgcggagctgctcgatgaggagcttcacggtgacatccttccatcaggcgcgcggcgaacggcgcaagtactttcctgccccggccttgccgtgaacttccccccgtcgacgacgacgtttgctcgcgagatcacggtctcgcagagtc

SEQ ID NO: 67716 - DNA, 1475 bp, Arabidopsis thaliana landsberg
ctcaaacttatgaagagcttctcaagtttacataacaaccataaatttacagtatttcataaaattgaagagatcagaggaatgctgtaatcagtttttcaggattttgtggagttggttttaagcttcagctactgtaggagtttactctactactttgaccttggctttgccagttttcttaccaacctttggcttcttctcatcttcttctttctctggattcagctcgatccttgcaaatacgggactcgcttgctccattacttgtcctccctttagccctccccatttggtgtcgctctaaagacagaataagagttagatcaaagccaaaactcaggcgagttttgttaaacggtaactaaaatctggtgaatgaaatcgtatgttacccaggttatgctattgaattgatcctctgtatagccaagctgtgaatagatcctcagacttaggcaaggtgcaacgggggataacgcaaccgctatgactctcattacttccagtataatcaccagatcctgcaattataagcagaaaaccagtcactagctttgatatcctccaaccatcaaattggtaatagatcctttgttttgtaagaagaatggcaattagggaaacgaaataagaccttggctgcctcttctgctgagacaccaccttgtttgaacagaaaccatggtgctcgttgatccatgtaggtatttcccgcatttccaatctctaaaacagcttcacacgctgatgatagtgacagattttcatagtttgtcctagccttctcaaccttttaacagagaatggtgcagtttgagatgaaagattgacctaataaagccattttgagacgaaagtggtgtagagatgtcattagaaccttaccagcttctccactgtgtctttcaaaggaactccttcggctgcaactgtcgagtctaccactaaagtggattcacagttctttttaagaagaccaagagtacggttaagaagatttcctgaagagaaatgcattgataaacatttttcagaaacaagttctgtaccaaataaccaaaaggctgaacaactacttaagatttagttttcgtagagtaagaaacctatagtgttggcgagatgtgcattgacgatttttataaatcggtcttctgaatagtccccatcgtttccaaattcaacctcccgtaggaagaaatacctcacggcatctggcccaaatttctgaaccaactcaaacggttctagagtattccccaacgattttcccatcttcattccatcctataatttgataactatgggatatcagaaaagaaaaatccaattttcctctcacatgttaacatgactaaaggaagttggcaagaacaagatctcaacactgaacagggaatatgcagcatcaagagttttttggtcatgtacctttgtcagaaacccatggcccaacaccatcttggaagttc

SEQ ID NO: 67717 - DNA, 545 bp, Arabidopsis thaliana landsberg
  unsure (1)..(545): unsure at all n locations
cccggcgggtcagatatatactatacccggcagtataacatcttaaccgcatcacccttagcccggggacggtatggcccatgtcccgttccgcctggcggcctctcgtgctgctccccatcctgcttctgctgggctgttccgaaggcccggcccacgactcgacgccagcgcgtccggtgctggtcgtccaccctctcgccggtaataccacggccgccagctattttggcgaagtgcgcgcccgccacgaaccgaagctggcgtttcgcctcaccggcaagatnnnnnnnnnnnnnnnnnnnnnnnnnnnnnnnnnnnnnnnnnnnnnnnnnnnnnnnnnnnnnnnnnnnnnnnnnnnnnnnnnnnnnnnnnnnnnnnnnnnnnnnnnnnnnnnnnnnncccaggccgaccggcaactggcgcaagccgacctgcgacgctacagcaaactgctggcccgccaggttatcagccagtcacagttcgataccgtcgaagcccgcgaccaggccaccgaagccagcctgggacaggcccgcgcc

SEQ ID NO: 67718 - DNA, 569 bp, Arabidopsis thaliana landsberg
  unsure (1)..(569): unsure at all n locations
tcttcgcaccaaaagagaacatatgaataactttttagagatttacattttagaaaaccaaagttggctgggtgacctgtcaaggaaatcagcattcgttttagcgtttgaagaagatctctcaggctttgctccatatttacctttgcgaaattcagtatatgcgtctcttggattctctgttccctctgcaggaatgcattctagtacttttggtacattctccacaatgttattgatggcaccaccctcacaactggtaagaaagtcagagaaaacaaagtgatcgtcatattatctctattcctacaaatgaaaaaaactctagtagtaaatgaaaattgcttatacttacattaaactgtgtgctcatataagcaatttgtatttgttgcagaacaaaaaggagaagncaaacacaacctattatcattcctagctgacttctaactntattgagttccaacttcactttcaattcgttcagtcttctctttgattccaaaagtcttatccttcccttgggccgagaaaggtcgggtgtcgctattttcgaaggatcgacggat

SEQ ID NO: 67719 - DNA, 578 bp, Arabidopsis thaliana landsberg
  unsure (1)..(578): unsure at all n locations
tcagaattcaattggcatacccgtttcgatgtcaaaaacattgctgtggaattgcaggaaaggttgagctactggagcgggacaagcatgcccggtgaaattgtggcggttttcgatagggtctgtcctcccgatcaaacctggagaattcaaacgctcgagctggacctgtgacaagtcggctacaatgacctcgaaacagatttagcgtttaagattgcgcgaacagctgttgcagaaacnnnnnnnnnnnnnnnnnnnnnnnnnnnnnaacagcgataattttgagatcctgaatgaagatgtttcaaggatcaatatgctggagacatttttgaccagcggtatgatgccctggaattacaaatcggaatatggaacggtcaaccaaatgctggcttaccagctgcagcatcaccggcaggagatcatgaacgctttgcgtgagacaggttccagccacgaaaacgtgagaaagagaatggcctgncaattcaatgagcccaatatcgtcaagatcattgaaggcttcgagcccaatcattactgccagatcattggtttcttcaacgagctca

SEQ ID NO: 67720 - DNA, 701 bp, Arabidopsis thaliana landsberg
catgcaccaaacacacatgacatcgtcaatttaatgctcagaaagacgtaacatttgtattaaaaaacagacatcatcgtatacctactttatctatacatgtgcctaggggtgaatactcatgtttatagcaacttgattatgtttcaattaatcggataagtttaattcgatttcggttgttcaccggtataaaagagcgagtgtagtgtacgtaccttggtgacattgggatggtagagcttatgccacacagcaactacttgagtgaaagcagctctaagcgaagctatctctgcgtatgacctgtggccctcttctccccagtctaagagatatactgttatttttaacaatattttcgcacattaatcaagagttaccaaagaaaaaggcttcaattgaatacatccaaattttgctaattacactgataactgtaaagaaaagaaaaaaaagtgttagtatctttatctatcactaaattacggaatataaatatcaggccggcctttagcggattagcaaaaaattaaggtgtacatgttaaacatattaccaaacctagaagtaaaaaagaaaagaaaaaatcattacactaactaatgccatgttgtttaacttgatcatttagaaacctaaatttaagaataaaaatttccatgtaatccgattatgtatttacttttttcggaaagaaa

SEQ ID NO: 67721 - DNA, 487 bp, Arabidopsis thaliana landsberg
aaaaaagaaacagagggagaaaatccaattagatgcagcctccgaggctggctttggcaactcgcccaacgacgtgaccgagggcgagggccaagatattgtactggacaccatcaacgctgccgagggccaatactccgaggccgattacaagaaggttctctggaagatcgaccttgttctcctgcccctgatgtggctctgctatggcacccaacaggcagacaagacgtccatctccactcaggcaacttttggcatgcagagaggacactgggctggtcggccagcaattctcatgtgagtgatgcctagaaccgaatcttggcccttgacctgctgtgtatggcggagtgctgagactgacttgtcaactcccagggttgagcacaatcttctatatcgcgtacctgatcggcgaagctcccggaaactacctgatgcagcgcttcagcctgaacaagactctgttcgtctgcatgttctg

SEQ ID NO: 67722 - DNA, 687 bp, Arabidopsis thaliana landsberg
gaaagaatttagtttgaaaaacagacatggtccttataaatggaacctgagaaaaaatataaacttaattcttttaacaaaaagaaaagaaaatgtttataacatttggggcacaaatttgcacctgatcactacattttaatatgatgacagctttatggattattgaggtagtgcacctggtgcacggtagttggtgtgatagtaacaattggaaaaaaaaaaaaaaaaaaaaaattcccacatatgacttttatttgcacttttgaaaattgtttcctttatttttcttttaaaaatatatttttaatatgtaaaattactaaattaactttcttaaattaataacaattaatcaaaaacatatatattttaatatcaaatcaatttatttgtaataattaaaataattcaaaatatatatttagggtaataaatttttgaatttgttagtcttttataactaacaattccaaatctttattgccctaaatatgtttttctaaacaataatgactaacaatattctaccgatattaagtcatgattttttttaaactatgtgttatggtgcagattttaatattcattattattgtaaaacattaaataatttactttgcaaaaaaaaaaggagaattattgaattcaagccaagtttggggatatgttaagttgaaaattggg

SEQ ID NO: 67723 - DNA, 535 bp, Arabidopsis thaliana landsberg
  unsure (1)..(535): unsure at all n locations
ttacattattatacaattagccaattcaattattttacaccattggaattgaaggagactcgtgagaacatcccttgaaattgtggtaatatgtggttgaaaaacaaaaatgtagtaatcagtgtttaactgtactgtttttatatgttgtagtgttgtacgttccaaatccaaataattggcaagaggacgatgggtccccataaattcaagaccggtcaaaaagaccattgcagatttttgttttcggactctgttttgttatatggcatattgaaattaaatccaaacactttagtaaataatacatcaaatacatgcatacactaatatactntgtgtaatacttctttaggttcattatcttaccgtagtgtactttgtgtaaatgaatatatttctgtgaaatgaatatactatattatcttcttaggagtatcattaatccaaaacttctcttagtccaagacgattcctaagaacctgtattaaaactatatattatntttctatgtttacaatattggttaaactt

SEQ ID NO: 67724 - DNA, 561 bp, Arabidopsis thaliana landsberg
  unsure (1)..(561): unsure at all n locations
attatttgtgtgtggctatggttatgttgtttttcttcttttactatgtcggtctatattatggcataattcgaattgctacgaccacttgttatatatggaatcttgtcctcgtttttaatcttgtgggttcaaactaaaagcaaaactgaaattatgtggcctagatggaaacatcggtcggatccagaaacggaaagggttggggatttagggacctacacaattcctccataatccaaatcatttcctctcaagagtgttgcgaagtcggtattacatggagagactctgcaaatcctcggccaaaagcatatttatttaggatggtgatgcattactacctttctagctagcaatggagacttcgcagataaagaataatctaattataaaccgtaaaatatgggaaccttttggattaaatccacaagagtaaataaaatagttgcaagctactcgaatatgtgacaacttgcatactttacctaaactaccatcaccatcacgagtcacgaccaaacaccatcaaatggatgatacanatctaattatacgatg

SEQ ID NO: 67725 - DNA, 235 bp, Arabidopsis thaliana landsberg
gcgtggatacgatacatgttgggattgacattgactccatttaccacactagataatcccgggaggaggggctggggaagaaacagtgtcccacccttaaccaacgcctcttcaagccataggatcgatgtgatgagcatgcgaagcccatataaacgaatgtgcttggtgaagccggttcacattgagccgccacgagacgcatcccatgaagaaacaatccgcgtcactggac

SEQ ID NO: 67726 - DNA, 209 bp, Arabidopsis thaliana landsberg
taacactggctcaataacactcttaaattcagttgaaacagtcagtagggtagactatgcacgtatgaatgctcaccttcagaaaaccaatataggagtacgtgttcagggcagcattccatcgaccaaggatcactggataccaagcatctcctgcacaaggggctaccatccaggatatggagcacagggaatgagtcgcagaccct

SEQ ID NO: 67727 - DNA, 2227 bp, Arabidopsis thaliana landsberg
ggaagagaccaaacattctaaacgtagaagataactaaaatccacatcgaaaaatcacacaagacaacaaatagtaacaacagagaagataaaaagttcaataagaggacgataagataagtttccctacactacttaaaccaacacagagcatcctcttcaagtctttaagccatttaaacccacaaacactcattaactcatcatcatcatcattttctcttcttcgagggtggctggcgaacatcgtcatcatcttcctcatcatcgtcttcttcctcatcttcattgtcctcatcctcgtcatcattatcaccctcctcatcatcgtcatcttcatcatcgcttcctcctccaccattggtcacaggatcatcctctggatcagcttcttcttctccttcatccccttcaccccctgagaaatcttcatcattagcatcatcctcatcatcgtcgtcctcatcagcgtcttcatcatcgtcgtcatcgtcactgtcactagcatctttgttttcttcaatatggcttcctcttttgtaaccctccttgacagacaacctagagcaaagataaattttagattagtccatttagacacaactcttgcgcctcgacaatagaaagcgaaagaaaacgaaaggcgtgcccgtcctcacctctggtcaacagcaaccaaacctatcagtaatgattctgcctgaaatgatcaccaagaatgctagttaaaataggaagacagaaactaaacatctgaatgtgacaaagatatgatgcattgatgcaaaattcgtttaaaatagaaagcaaataacaacaaccaccaacacaatgtattaaatctaaacttgcaaagagaaacttttgattgtgtgtagctctataacccaacttcaagaacacattacaaagaaacacacaatcaatgcacaataaataaacagcaattagcaaaaccgacaaaataaaactgaccaattaacaaaaagagaggcactagacattgtttctaagctctattcaacttcattaacaacaaatggcaaaacccacaaaagataagtgaccagtcaacaaaaaagagtgacactggacattgttcctaagctacaattcaacttcattgttcaaagacttatctagagccattaacacataagactatagtcaaacatagctatattcaaacaatcaagctatcaaatacaaatctagaacacaaaaacagaaatctgaatttacaaatctataaactttggactaagacaattccaacagaacataactacacgacagctaagaaaaaactcttatgttctttgcaaatcaatacagtacaaaaactacaaatacaatccaaacagagaaacacgaagctaacaatgcaaatctagaccacagaaatcaagaagactgataaaaaactgttctttaccacaaggagaagacaagccagattctttccgacgaggaggagaaaagactcagtgacagagcaagcccatgtctcctgtctctgcgtcttcattgacccaacagcaaccacttccatatctactcaaaattgaacacaaaaacagtcttgtaagagatgagaagacagaaagtgttcaactttcctactggagaccaagagacagggagagagaataagaggagagaacctgagtagcttatgtgtctagatccggtcaaggtaaaccctagattttggtacgactagggttttttggtctatgaggtaagatttgatttatagacagattaattgctatgtcgaccgatgatagcaaatttttgattggtcaattttctttatggtttaagggaataaattaaaatataatttaggtttttttgggagaaattaaaaataaactttaatttaatgtaaaagactcttaagtttatacaagatatttataattttattatagtttcatataagattttaattattgtaaaaatttgtattcatatattaagttcaaaaccaaaattattatgaacaaataccaaaactttaagtttttggttaaatctttattgtatttattaccattaaatttttgtttttttattttttattaataatttttatttgtgcaaacttttaacgtccatcattactaatattagaccctagagctattataatttaacttttaaaaaatagataaatagatataaaaaaaaaattaattggtgaaattagatatattatctt

SEQ ID NO: 67728 - DNA, 453 bp, Arabidopsis thaliana landsberg
ccaaagatttcaagacgcagattaaattaattttagattggatcgaaaaatatattgttgcggtggatttggattccgactgaaacttgtcaccagtttatgagtcgaggaaagagatgaaggcagcgtcactggtttttgattagcaaagactgaagatggaaggcgttaacggcggacatgaggatcgacggtaggatatgtttttgatttgatagaacgctgtctaattttcgctacatcatgcaaaaacagatgttctatggcgattgtgatatggagcgatcacgggtcgtgtgaacaataaggtgggacgagagacagttcttcactggatattgagggtgagttgcacagacaacctaaacgggcatatgcccgttatccactctataagctcgtcaatggtgtgggaaaaccacctacttaaccctctcatgcttttgagcctat

SEQ ID NO: 67729 - DNA, 673 bp, Arabidopsis thaliana landsberg
taaaccggatccggttttggatttcagacaattgctgagacggtcggagattggtattttgggagaggagaagaagcgaaagaaattggttgtccatatccatgtgataaaacatgtcataatctcattccagcttctacttcagattttttggtaaatctagatatttaacatcttcttcaattacagtttgctatagttaattacattattttttccgcataattcactgtaaagattcgattaattccaaattaagttgtgtagttacatgtttttcttttgttattcaaggcttctaatgcttcaggttcaggccataactctcgcggtacacacttgacttttctttttcttcttcttaactttttttcttctttgtaattagtaaatttagtaaaaaagattatgttacgtagcatcaagcaagaacaaagaatccaactctcatttttttggttatgtttatataatcaggtaccttgactcgaagccaagttgatctaaatgatcttatgtagtgattttagaagttgagattagctaaaattgctacattggtaaaaacatgtccaaatgtgacaaataatataagaactacaataattcacatgatgatcatagcattaaaatgtttttattttgtcaatccatatttgttgttatcaaaaca

SEQ ID NO: 67730 - DNA, 333 bp, Arabidopsis thaliana landsberg
aaatcgtgtaaatatcggtttaaaatattcggtatagactctaatctcgatttactccggtttggttatcgtgtgtgtgatcgtaacttgccggtggatttgcgacggacacgtgggttgttgtaattgtctcacgtgactcatcgtaactacctttaaattcgctactgtgatttttcagattctcatgtacatttgtgacttattcggtctatttttgttatgattccaaagagcacttgaatgaagaaacattattacatcttttttttctcttaaccctatttaaaattgccttctgtacaatcttaactatttattcatctagtatca

SEQ ID NO: 67731 - DNA, 323 bp, Arabidopsis thaliana landsberg
gtgcgcgctatttcaatctcagagacaatttcggatttgttagggtttcgattcgaacagagagagagagagagatcagatgagaaagaagatgatgagtcggacaaatcgggaaacgtgatgtttgaaaaatgaatataaaaaatcaaaattgtaatgaatttaatgtctcctcaaatgacaaccagagaaattaggggacatatatgtaatattcagttttttcagtggctatatggtaaacttacactaacttgattcaaattaagggtgggtaagaaactcgaccaaaccattttaaaccgaaatttattcttttgtcc

SEQ ID NO: 67732 - DNA, 3564 bp, Arabidopsis thaliana landsberg
cccaaatctggagtgtgctatgaatcaattcggtctctttcacatctctcttgttggcctcattttcactcttttaagttttatcttcttctccttcatcattattaacttatccatgttactatttggttaacactatacaattcatctaccaactgtccgtcaacgctattcgttttcaatatcatttttttctcttgggaactatttttaaaaatttgaatatcttcccacgaaaaacatatcatttgtggtaaggtttgttgtaatgcatgcaggactgaatgtatgatacatataaatttgaataaatttgatagtatagttataaacttaacgaaatctaatttgcggtttaggtttaaaataacataaaattacgtatgattttttctttcttttttggtcaacaaacaaaattaaactaatatctatttcatgaatattcctttctacatcacgtagtggatacgtaactaggattccataatatatgtgatatgtccatgctttattgaagatgtgcagagaataacaaaaatggtcgacaagagagaagaagttatgcacgtagccatgtttccatggctagctatgggtcatctccttccttttcttcgtctctccaagttactagctcaaaagggtcacaagatctctttcatatcaacaccaagaaacatcgaaagacttcctaaattacaatcaaacctcgcctcctccatcaccttcgtctctttccctctccctcccatctcaggcttgcctccttcttcagaatcatccatggacgttccttacaacaagcaacagtctcttaaagccgcttttgatcttcttcagccaccgttgaaagagtttctccgacggtcttctccggattggatcatatacgactatgcttctcactggcttccttctattgcggccgagcttggaatctctaaggctttctttagtctctttaacgcagctactctctgtttcatgggaccgtcttcgtctttgattgaagaaattagatcaacgccggaagatttcacggtggtgccaccgtgggtcccgttcaagtcaaacatcgtgtttcgttatcatgaagttactagatacgttgagaagacagaggaagatgtaaccggagtctctgactcagttcggtttggttactcgattgacgaaagcgatgcggtttttgtccgtagctgtccggagtttgaaccggaatggtttggtttactaaaagacctgtaccgtaaaccggtatttccaatcgggtttttgcctccggttattgaagacgacgatgccgttgatactacatgggttcgtataaagaagtggctcgacaagcaacggcttaattcagttgtttacgtgtcacttggcaccgaagcgagtcttcgtcatgaggaagtaactgagctagctcttgggttagagaagtcagagacaccgttcttttgggtcctaaggaacgagccaaagattccagatgggttcaaaacacgagtcaagggacgtggaatggttcatgttggttgggttccacaagtgaaaatacttagtcacgagtcagtaggagggttcttgacacattgtggttggaactcagtggtggaagggttagggtttggtaaagttccaatcttttttccggtgttgaatgagcaaggacttaatacgaggttgttgcatgggaaaggacttggtgttgaggtttcaagagatgagagagatgggtcgtttgattctgactcggtcgctgactcgattaggttggtgatgattgatgatgctggcgaggagataagggctaaggctaaagtgatgaaggatttgtttgggaacatggatgagaatattcgttatgttgacgaacttgttaggtttatgagaagtaaaggatcatcatcatcatcatgatcttgttgttgctatgattttgacttgtccattacggctgccgtgggagaactcaatctttttttcctccaagtctcgttttattaatatttcacaataccatcatagtccatagacacgcaaggcacggcaatatatccacaaaagacacgttggcttacacatacatgacgagtgttctaaaaaccagtataaacgttaggaactcagatgtgaccgtttagaccgattataattgtataaatttcatttttttgtattttccaatgtcgaacgaagttttattttcatatacatagttataaatattcgtatatgtttaatataaattaaatatatatgttgtttaatttttatttatgatctaatatcttatttgtaatagatattttttatatatttattttacatatgatatcatattatatattgttttatatataaattcttaaatcgcttaaaatcaattatattttcgatgaggccttaggcactgggaaatcgcatgcttagcggcttagcgtctaagattttcttaaacgttaatacgagtatatgacaacgataaaaaggagaaaaagagaaatcagcatgaacactttttaatacaattttaaacgttaatatgacttgcttattagcgcctaaggttcatattaagggagagggggcttaaaatgatcttttcattttctattatgagttgaaatcagcatgtttgcatactgtgacttgaaaatcatctgttccttatctccttcataccgttttcttactcggtggaccttcgtgacttatatgtaacatttccttgtcttctatgtagttttagtcgtttcttttttaggcataagcctttctagtgaattttaatttattgtctcgaaggtgtgcacattattctttatcggagttctttttttcgggacagggtttgcaagaagcagatgaagatttggccagttatttgcctgttgaaatgttgtcagcatcggctgatgatgatgatgatcaggtaagatacttctttctaaaacaagtaaaagtaatgaacaggaggtacgtgggtgctgtttatgtagattcttgggattattgataaaagttttctttgatagcccatgttcatcgagtggcatcatagtaatgtagttttggggaatgcaggaacctcttgccaatctggctaatccatctgattcagaatttgatctaccttctagctttgattagttagaaggacaacaggtaggtatgatattcatcagacatgtgcttgaacacctgacttgtgagacagcttcatcagacggaacacacctttgtggaatgaggcaagatcgtgtagttgtgacaatagaagataaataaatacacaagttatggtgctagagatgtgtttgaaacgtctcttgtttatatatctggtcttgtgtatcagtttggtgcttacactaaaatgattcagtacatacatgacactctaacgtatgtctccaatatgcatgattcccaaacaaaaccttctttttttatgtgcagtcatatgtaataaaccagtcttatcaacactacgctagtaaaagaatgttgaccctgatgggggtaattaatttgcaacttttttaccaaaaattttta

SEQ ID NO: 67733 - DNA, 684 bp, Arabidopsis thaliana landsberg
actccttgtatacggcctcctccaccaggtcggtcaacgtgtcgaccacgtaactcccctgccacgggttctcgttgaagttcagccccagctccttgttgatgatcatctggatcgccaccgcccgccgcacgctctcctcggtcggcgtggtgatcgcttcgtcgtaggcattggtgtgcagcgagttgcagttgtcgaacagggcgtacatcgcctgcagcgtggtgcggatgtcgttgaactggatctcctgcgcgtgcagcgagcggcctgaagtctggatgtggtacttcatcatctggctgcggctgctggcgccgtagcgctcgcgcatggcgcgggcccatatgcggcgagcgacgcggccgatgacggtgtattccgggtccatgccgttggagaagaagaagctgaggttgggcgcgaagtcgtccaccttcatgccgcgggcgaggtagtactcgacgatggtgaagccgttgctcagggtgaaggcgagctggctgatcgggttggcgccggcttcggcgatgtgataaccgctgatgctgaccgagtagaaattgcgcaccttgtggtcgacgaattactgctggatgtcgcccatcatgcgcagcgcgaattcggtggagaagatgcaggtgttctgcgcctgggcttcctttaggagtttggcctgta

SEQ ID NO: 67734 - DNA, 329 bp, Arabidopsis thaliana landsberg
  unsure (1)..(329): unsure at all n locations
ctcggacttctaacaggagaagctagtttctgatgctgatgattatacttatgatgtttccttactctagtcaaagcattcttgagctgcaacgcttcagaaccaaacttcttaaccgcaacacgcctatcacaaactcctgtcgttctctgcatcatctgaggtcttaacttatcaacaccactatcttcttcttcttcttccacatcaaacaagccacatttatgggtatctcgaatctgggagaacaacgggttcttcttcctgttnnnnnnnnnnnnnnnnnnnnnnnnnnnnnnnnnnnnnnnnnnnnnnnnncgtgctactaa

SEQ ID NO: 67735 - DNA, 312 bp, Arabidopsis thaliana landsberg
atggtctttggtcagaatgtcagaacgtgttacttttcaactatccaaaaaaaagaatacttatcgtgtcgtggttgtggtggggaggggttgacgaccatctctaacatattcttatcaataacaactccataaattagcatgttccaaagtacatttcatgtttctaccaatctattattccattgtttatcaaacacaattattggaattagagatcgtcactggctatttcgacctttaaaagcggagtggcctcccagtggtatataagatgatgtttaagacaatgtgatagagcacggaggctac

SEQ ID NO: 67736 - DNA, 2139 bp, Arabidopsis thaliana landsberg
atgctgagctagatggtctttccgaagattatcatgtctcttgggtgtatcaaaatcaatgggatcatattggctaaatattttgcagttgatgcatgaggtgaaggaactcagggcatgcgggctggaaaattcaaccaagatatgttacttggaagagaagctggtaagattttgtttattgctattttgattttcattcttcctgctggaattctgtttgcatctgtaatatgaccacacccacacagatattcattatatcagtgataatgatcctctatcattttcagctaggggttcatctcggtatcattttcccttgtttttggaaccaataagctcaaaatatagtggtggagaaaccataacacttttacttttcgatatttggtatttcaggacaaagcacacaaggaaatttatagattgacagagcgttgcaacatgctggagtccatatcaggtcctttaatcaccaaagctggtggcagtgatttggagatccattcaccagatgataccagcttagatccaactgaggcaattcttcttttagggggatttgataaagactctgaaacatggttgtcatcagtgcagtcatattttccatccaggaatgttgtaaaggctcatagttcaatgagctgtatccgttcaaatgcatcagtggcaaagttggatggtaaaatttacgtctttggaggtgatgacggtggccgtggctggaccaactcaggtacggcctctctttttctcttgttcttaaaatgagttaactatttagtgcattagagcctgtatacaatacatatataaacctataaaccttccagatattcttaacagacaactaaaagaactagaaaacggaatatgggtgacaaaagcatactactgtgactttcattatattactaaaccaaatggctctagtatttttagcaaattgtgaagtgaggtgtattaatttagtgcacttcacttcggctgtgcatattttaagttaatgtctaccacttcacacttctttttctctctaaccataattatttaagcctgatctttgatttctgttttgcctcttcttttttctgtgaagctgaatcctttaaccagactgatggccagtggagcttgtgcccccccttaaacgagcgaaaaggaagtttaggtggagccactttggatggaaaaatatttgcaatcggaggtgggaatgggatggtatctttttcagatgttgagatgcttgatccagatatagggagatggatcagaacaaggtcaatggggcaggaggtaaacgttcttctctattcgcatgacatatggtgaaagccaaaaatctgaaaagttgtcaattagatccccactgggaaatttttgacagaagctcacagctaaaaacataaattcccaaagagaatccattgttaaaactactctatttcgctaagttataatttcaagtaaggagtgtcaggttaacaatagaaatgtagtttatgcttccactcacctactggttataagccttagcaagatgataccatgaccttctcctcggctttattctctgagttgtcactgctctttgatctcagagatttgcagttgcgtccgtggagcataaaagttcaatttatgctgtcggtggttatgatggtaaagagtacctgaagtaagaacatttaagccttgtgttctattttttcccctaatcttgacacatgtgaagctaacaagaacaatttattggaaacttacttttaacagcacagctgaaaggtttgatcctagagagcactcctggatgaatattgcatcgatgaagtcgagaagaggctgccattctcttgttgttctgaacgaaaaactgtaagtttcttctccccatttttcttcttctttgagagtaactaacagacaaattttgggtaagagttttaaggttgtattcatatgcactattgcagatatgcgattggtgggtttgatggtgagacaatggtatcgagtgttgagatatatgagccaaggacagggacatggatgacgggagaaccaatgaaggatttaagaggatattcagcagtggcagtggttaaagactcaatatatgtatcggaggat

SEQ ID NO: 67737 - DNA, 428 bp, Arabidopsis thaliana landsberg
acacaaaacgataatgctaaatattatgatcatctaactatgctttaaacataccatgtgatgaacgacaagaactgccaaaccgacacctctgctgcataaaaaacttgcaaatctgcacaaatgtggtgcagcattagtatctaagacacaaaacagcaattgaaaaaaatccaccagtaaccatctcaaagttagtctttcacagccattattatatgcctatagcaaaacctagttaagctagatagacaatcaaaactgagactttcaataaactctatccaccctagcttttcaaatcctatatcacattagtattgtaggaaaagactgatagatcatatccaaaacacaagaactaagtaagaaaacatttaacagatgactacaaagaacttaccatcatactctcagatgtgggtgta

SEQ ID NO: 67738 - DNA, 498 bp, Arabidopsis thaliana landsberg
caacgaaagcgtgtacagagcgtaaaattagcattctacattggaatgtgatcttttcttagatcatggtgtgtctttgttcgtaatgtattagcctattgttttacagttttctcttcatcaaacaagttcctaattatttgtgagagactgtgagtgtcgttccattttctatatagaactagtcatagagggctaatcccaaaatattgattggtattgacagtgatacttggtagtctactttcttttttctttttattgtatcgtataatcgtacaaattcaaaaatttaggttacatacttattttagatagttaaaggttagtatggaatcatagaatagtttgaagtttttttttcaatatttcttagcaaaaatatatatttcaacctgtgtctgcatttaaactctcatgggggttgttgttataaagtttttattcgttaaattataaaaaataaacatggggaaattttaatcccactttacctaa

SEQ ID NO: 67739 - DNA, 1559 bp, Arabidopsis thaliana landsberg
tgaaggctaagatttggtacaatgttctataacatcggttacacaattgttccatgcagatccacttctaatgtttcatctgggcatgatctgctttcacgaagagcatcacaggcacaacaccatgaagaatggcataccgacttactagcttgttgctcggaaccttctctttgtaagaccacactatttgtttacaatgtggctccactttgttttctctgttacatagatgattagcgtttcacattctatacttccttgttatctgcaaagttctcaaagattcaatgatggaaccgcaggcttcaagacattctttttcccgtgtggtactttggcaaagattgccactgcagcatccaacaggcacatctgtaagggatattattgaataccgtgactttattaattttcaatcttttagtaatacatgtgaaagctaataagtcaactggatttttttaattttcgctctcccagcttcagctgaagcatgtaatgagctaatggcgtattctttgatactttcttgttgctgctatacttgttgcgtgaggaggaaactccggaagacactgaacatcacggtattacattctcattctcttccactcgcttgaatccttaccattaatcccatttgatcccaaaaatctatatgcttccgagaaaatttctatcatttgcataccataaacaacaaatgaaatttcggttaaagattaagtagacacctgcaaaaaaattcagtagtaactatcatggttgagattgaaatggctatgtttatgccactcaatgtagagtcggaatgaatgcttaatgttttctgatttcgcagggaggattcattgacgattttctatctcatgtaatgtgttgttgctgtgcccttgtacaagaactgagagaagttgagattcgtggggcatatggtatgatttacatacaaacatattatcaatatttgtttcaatcttgaagcactaacaaagatctgtctctcatatctttgcaggtacggagaagacgaaaataagcccgccttcgtcgcagttcatggaacattgaaatcttctattatacaaaaggtgaacaaaaacaacgatttgttgtaactctggatacgagacgagattcttcttcgtactactcacttaatattattgtgttaaatcgtggagtcgtatgtaaattagtttgggattctcatcttaatttcagcaatttgtgttgtgtgtatcacatatagactaactaattcttatttcaacttttatcacaagatagggtattaggtttaccggatggccaattgaaccaaacttgtgttttgggtcaaaatagtagttttcttttatgaatcaaggagaacatatacaatttgctggggggtgaatattaatattacaatagcaaattaaggaaaattctttgaagaagaaaagagatgaagaaatgcatgtgaggtatcattaccatgactaaaaagcctaaaacattgacaaaattgatatgactgatgatgattctcttctattgctcccaaattggac

SEQ ID NO: 67740 - DNA, 588 bp, Arabidopsis thaliana landsberg
  unsure (1)..(588): unsure at all n locations
aaaaccgggacttcttattaatatttacttctgggccacttggcatgtttttagcacccaaatggaattatgtgtttcaagatattgcatacgtgcgctgtgacatcatcatgcggggtttgcttgtacgaccatcaacatacacacttaagagatcacaaaatccattactatagacagagtcatctcgatggattgctcatacagagatactgtagagaatggcatgccaacctcagaacctcatcggctataactagcaagtcggcccttcggagattgactctcgtgaacccccactttgaggccccatctcggtccaagttcctttattgaggtgatttcaaagcaatgtacgtcgtgcaggtgcccccagtcaacctgcttgtccgcaatcatttcaattttccctttctaatcacctcanacatcccatccagcttcgactgtccctcctaccacacataatggctcctcccaaggtctttctgtaagtagcagccacgcccacgcagcagctttgacctgacaaccttgtacaggactggcgctaccggatacattggtggggatgggttatacaccatc

SEQ ID NO: 67741 - DNA, 1707 bp, Arabidopsis thaliana landsberg
aattagaaaatataccaaacaaaagataaacaaacttctagtttttgtttagttgcaactaaaaagttgaaatcatagaagaaacctttttccttttcttctttttcatcttcatcttccgattcacaatctggatccattttgggatcagcatgtatttctggaatttcttctagcctgcgctgccgttcctctggagattttaacagttgcagtttctcaacacattctcgcagcgtaagcatagttaaggaataacgaagtgaataaaaagaaggaaactatatgctttctgccactacaaatagattcaatgctctttccctgaagtacaaaaacatgcacagagaggagcatttccaaagcatgggaaatcattatttttgacaagaacttgaaagtttcaacagataaggatattcttttctgcggcccatgtcactagcacgatcacgcaaatgactgaaacgtaggatctctgcttccagcaactgcattcatttaagtaataacttcagttctgaagcagacatacattttttttttatacatttcttaaatactatcatgatagctttgcaatattaagaaacctgagaacccaaaacctaatagagacgataaaactagaatcatgcacattccctagacagataatacagttattttccgtctcccagaccagcaagctcaattaccatacatataataatgaaaaaattagagacaggaaaatgcgtcagcaggaaaaaacgcaacttacgtttttgactctcacttcctgcagtgcaatggccttttcttgtatatcaccctaaaaaaacattgacattagaataccagaaatgcaaaacaccatggtccacagatttttagacataatcaaatgcaagagttcaagttatatgaagcataccactgtcagcctgtttattaatccacattttatgctctgcttaagacgcttgcattcatcctgaaattattgcataaagttataggttaaacatatagcacccttgaacaattacttcgtactaaccacagcctccatggcttgtcaatatatgcaagtgcaatagaaaatactatgttaggaccaaaaaaagagaacatgttttctcatttccagtgacaaaaaaggacattggatatcagcagtacgtcacctcagtgaaatcttgatttgatataatgtcaatggatatcacttccgttttgtccaagttcaatatctcaagtacatagtctgttgtttttttgccaactttataaggttcaggagctttgcttgtgcctgtgtttcaaacaaaaagagatcttagtcacccattgtatcaaccatattgacttagtctgtaaaatagaaaactaaacataccaacaacttgaaccagtcgatataaatcttgcttttgatttccagatatccttaacctaacaaatgcactagcaactttttcttcgaatgctgtagaatcttcaagtagatcttccaccaagctccgccttaagtatatcaaattaatgttgtgcatatcaacagcagcaaaatcatcaagattagattgacgtcctttcctgacattttttttgcgtgttttacgtttcttatccttcccacttttgactggatggtccaagttttcatcaacatccacatgattaggttcttctgtatcaactatgtcacctttgatatcatct

SEQ ID NO: 67742 - DNA, 656 bp, Arabidopsis thaliana landsberg
  unsure (1)..(656): unsure at all n locations
aaaaggaaatgaagcagttctcaggtttttgagatgtgttataagtggctaaatctttttactcaaagtgatagtagatctttcttggcacatctttattcttctagctcttttcattgccctacttatttactgtcaagtcttgatagtggtccatatttaaagcatccaaaggtcatgttnnnnnnnnnnnnnnnnnnnnnnnnnnnnnnnnnnttcttctatgaggtggacacaaggaaaagattttctgaattccgagatcagctacagggaattcttttccatgtaagttttccttcggtacatatcttaaacaagaagatacgataaatgcattactagatggtcgtacttcctttcttttttgtagtagtttcattgtggtttcagatgttcagtaatctgtactattacaagtaaaaaatgcaaaccatataatattgacttcagtagcacatacaacacaagtttctcatccatgtttatgtgaattaataggaaaagctggggacgatgctggataagatgaaccgcctcaaaaagatggtatctaaactttgtttggccctcaaaattgatgaagatctgcttccggttgtagaggatgctgcctcacttgctatgtcagatcttgcaactgctgtagttacaga

SEQ ID NO: 67743 - DNA, 217 bp, Arabidopsis thaliana landsberg
cggaagatgcatgtttgaggaagttgcacttataggtttagggacgttcgtagtgagactgacacctattgcactgttattttttaagccacgactaatcaagctgatccgtgactattgcctagctgcttactagtgttcattataatatatgggcatttaatcagggtttatgtacactgtgtaatgcttttgcatctttgttttacatataatg

SEQ ID NO: 67744 - DNA, 612 bp, Arabidopsis thaliana landsberg
  unsure (1)..(612): unsure at all n locations
ccacactcattcactacgacacaaccgagagtttgttcaagcgtcttctttattttggtctggaactttgtaatctggaaggatcagatccaacatctcatagctttttcagtattaaattccagccttaggtaatccttcagagtcatatcaacatttttgnnnnnnnnnnnnnnnnnnnnnnnnnnnnnnttttacatttgtgtcagctttattcacagcaccgttttttagccgcatcaactttctttctttgtataattcagaagaatgaaatcatccaaaatcatttatatttcataacaaaaatgttttaaaaaagttgaacataaaaaaaaaaaaaaaaaattccaaaacaccaactaaactctcaaaaataccaaattgtgaaagttttcaaaatataatctcttgtcactcattcatcatactctaaaagtttaactttcatggtttgtatgtgaaaaaataaattaaaacattaaaataaagcttttagaaactaatatgtatccacaatatacatatggatgaggacaatggtggatgtgcacaaccacacataaaccattcacgtgattgtatctgcaaaattcatcatcaactttctcc

SEQ ID NO: 67745 - DNA, 2729 bp, Arabidopsis thaliana landsberg
aacccggagaagagaagcttttaaagaaaaactctttaccgatattttttattatagctctgtccttgagttcttggggatgggtggttattgctcgttttgcgatactttgccaattcgttattagcatgggaaagaagcttctgagcgttttccagtctcttggtataatcagtatcagcaagtttaaatgacgctgtatcctgtttgataaaacgaaattcagaatcttagaatcaaccattgagttcttttccattatgattggtttcagccacatgcagtaagcaaaggcagcccgttatacatatacctttgttgtctgtggaacacgatggttactggcctgtgcattgtggactgttcgatcaagttcagctaacttcctcagcaaattgctcttgtcattctgcaaaacggaagatacaaagaatcagtgagttaaggaatagaaatatgataaatagaactggtggtgagaatataggtagattaaactcctaattaccttaagcatttcgttttgcatagaaagcaactgaactcgctcttgtagttggtctaatgatatctgtgtcgaaagaacatctgtatctttcttgttcaactctgacatgcaactgtccaaaaaaaggcaggaacatcccgagagaaaaataagcactttggctcgtgacagaacagttctagtataagtagaataggcctaacctctctctatccttaaatagataatcaatatgtctcttcaggttcatgacttcttgctcctaaaattgaaagagaaagaaaggtatcaataacaaaattgaataccaagtaacttaaatagatgccgtcaagtatatagtatcatcaccttggacaggatctcttcagcatgttgctgagccttttcaaccactctttggacctggtgctggtcaatcaactcctgaaatatcccaatgaagaaaccgatacattcagaaaaactgcctatgaagtcttttgaagatggcatatattctgatatacttacagcatagctggttatatccattttcacaccaagtaaatcccgaatcacatcatgagtcatgctatcagctgcagctatcctcgtgttcaatgtgcaaatctgttccatcgagaaaatattcactgatcagtcactttaaatcgaaatcaaggtgaaatgaaaatcatctgctggcaacacattcatttaaagatctgtgagcactccacacaaaaataacaatcaaatgaaggtaggctaaacctctttctgtttaacagctagcaatgactccaattcttcaacacgaacccttgccattgtcaattcctgatccttctccagtttcatctgttgtaccaacccaactatacatctgaagggtgaacttgaacctctactccttgttgagcttttttcagttttatgtgatatggtctctgcagctgacgaacttgaatcctctagtttgaagtctcgaatcatgacctccagagtcttatactgttgagattggaaacaaagaaactatatgagctacgaaataaggaaaacaactcttccaggtgctaatcgaaatatacaccattggtatcaaattttgcctccttcagatcatcacgatagaaatcagaaatagttactattcttgattcttttttcaaatcatgacatggcttttttttagcaagaacgccaacagagacacaaatatgagcagaatgtgtagcgcggaaactagtaatctgctggtgctaatttattcaacaatcaagccaagtgcagaggactgctaaagtctacacatctaataccttctcttggtaagcagatgattgggcctcagaatgcagtaagatctcggagatgtactcttttagctgtttaatctgtaagtgaggaaagacaaaggtagaagtaatgaaacaaagaataatcatttgcgctaatatcaggaaatgtcatggacaaattgagccgagcattccaataatataacacacctctttggtttgttctgctacttccttctgtaggacttgtatctgactatgcgcaccttgcagccctgtcgacctattttacatttatttttaccaaagtcagtcttcaccaagaaagatatgcaagagaaactaatattttgagtaggatttaggttggctgacctggatatgtgactcttatattcctctgtgctttcattggttgtgaccatagtgccagtgaagttttcaaatcgaaacaatctctgtctgagagcttgcagctctgtctctaacgaatcttgggtggtacgatgcctttttacttcttcatccatatcatacacctggaagccaaaatagctcacatattagtaggtataagagtttcatgcaatacctatcagatatagagaatgaaaaagaaagcaaacgaacccgtctttctaatatatttatcgtacgctcaagttcctcaacagaaatttctagaatcttgacctcctcttccttttgttcagcatatattttacttgcttcagattcctacatgagaacaagtttagattcttgtcaactcttcaatattgctaaggatcaaatgattcatctagaaacaaaaggctccaagttacatacctgatgagcctctacggcaattgcttctttttcatcagctatagcataggccaactcaagcttattatttaacgaacatatttcgtcaacatctgatctttctc

SEQ ID NO: 67746 - DNA, 146 bp, Arabidopsis thaliana landsberg
gacagtagatttattttgaaaactttcacaatttggtatttttgagagttaagttggcgttttggattttttttgtctcctgacaatgaccaacgctgttaaagcattggtgttatgcaactgtaaatggtactggatgatgtcag

SEQ ID NO: 67747 - DNA, 563 bp, Arabidopsis thaliana landsberg
atccatcaaaccaaaatctattaacataacagtaaactccaaattgtaaaaatccaaaagcaaaatttcagatttcagaggaacaaagccttcaagctggtttctgagaagagatttgagagtctcgtgattagtgagttcaggagaagataaggtcttgtctaatttgtctctataaccacagatctctcgtttcttctgcataatctcaagcttccaccttaaaacaaagaccaatccacaaaatcagtgataataatcaaaaccccccagaagaaaatcttataaaaaatttatgatctgatcaaaatttacagagaaaagagaaaaagaggattagcacagaaagtcacaaccttacggagttgtagaaagctgatttttttagctacgaggacaaaaacgtgaccgacaagacggagaaagatggtgagaacttttttgcactaattattttatctcgagtgaaatcaaatcgggtacgattccaggtaaagtcggagtttccaatataggaaggagatgagatgatgcgtagtgacaagataatggtgagattaaca

SEQ ID NO: 67748 - DNA, 250 bp, Arabidopsis thaliana landsberg
tttcttttttgtagttctcgtgattttctttttttctaagtgtttgattcgtagttctttttttccgtagttctcatatatcgaagagtcctatgtgcatagtagaaagacgtggaagaacaaattagttactcgcacacaaactctttgtgtatctaatcgtgatgtgatcatgttgccaaggtcggcaaaaggccgaagagagaccactacacaaggactttaaactaacaggctacacaaggacaag

SEQ ID NO: 67749 - DNA, 520 bp, Arabidopsis thaliana landsberg
cataccggcattgatactacctttcttggctcggtctttgtggctgtccgtgtttatcattccaggagcgtcaggaaaccgtcgccatgagacgttgtccgccgcgatgcttgtgcgggggcattgccgggcgtaggattgaacgacggtatggggcccgccggtgcgcgtggccctggcgcccgccggctggtcagcgtcgttcaatccactatcgccaaggagccgtcatcatgggtcaattttccctgcatcccgccgtcgacaacagtatcgcccccggcaagcccgccttctcgggtggtacgctgaaatgccattgcgccgagaaccccgtggtggtgcgggtgtcatcgcaaagcctgcacaaccatctgtgcggctgctcgcgctgctggaaacccgccggtgccttgttctcgcaggtggcggtggtgccgcgcgacaaggtcgaggtcctggaaaacggcgacaagctcgcgcccgtcgatgccagggcaaccataaagcgctacgcatg

SEQ ID NO: 67750 - DNA, 519 bp, Arabidopsis thaliana landsberg
gtggtcaagatctgtgatagcctggataataaaggcttgagacttccattgctagaattatgtccttgataaatattaccaatttctttagttatcttgagcactccatcattttcaagcaaacacaatataagcaatctgtcatttaagtaaaatcacatcaccacaggctaagagtatacaaatagttgcacgtgcttcagctacagtcaaaatatatcactggtcatagtgttataccgagataaattgtcaagatggagaattgctacttggtccattaagtaaagtgttatactgtctacatcttcagattttccagtggggtcaaatagaaaaggaattcttgggagatatattcagaagactcctatacatgactcaaatactcgaaaggtgaaaactttggtctacgctgacttgataaaatacacaagaaactaccaatgggtgtaaaatgtcatgaagcagaaattgttgctgaagaatcatggactttatgccttaacacttgttaaa

SEQ ID NO: 67751 - DNA, 1208 bp, Arabidopsis thaliana landsberg
gtataacattgggaaagtgtacgtataattataagactgttatattgattcgaaggtaaaaaaatccagtatgatccaagtcaaaacacataagaagcggaacagataactcacaaaggcagacatattaaaatgtctgcaacatataccgttacatcgcttacaatcatttttcctgtacaaagaaagaacaacaacaaaatcacactgaataatcaaagaaacagtgtatggtgtatgagtcgaagaaagtttctatctaggtgcaactgagggagcaactccactgacgaggtcagagccggagacatccatcgatgtataatgatgcttcatgattgaagaattcgatgacgatgatggatgagtcattgtctcagagagatccgctgtcttggctacatgagattccggcatcagttcccatatgatttctagttctcttacaacttctgccattgaaggcctcgcatctgtctcctctctgcagcatcgcagcgctaaagttgcaaacttttcgaggcattcgtctggaactgagctcattctcttatccacggttgataatatcgaaccagactcgtaggcaatgttgatctgacagaaacaaacattccacacaatttatataacgcctaaaaggaaaacacacgctcttattatctactcagaattacctctcgcacaatgttcttgccatgtgtgattggctgcattccagtaaagagctctaacaacactacgcctagactatatacatcacttttgtccgtcaattgatgagtcaagaaatattccgggtcaaggtaaccctgcaagtcgacaaataactctcagtcatgagtttgagaaaaaaactttagagaagcaatgcaggaatgagatcttacaggagtcccttttacaacagtagacacgtgctgaggtgagatgccttccatatcaggtactggggcaagtcttgagagtccaaaatctgcaacctttgcggtgaatctggagtccaacaatatgttgcttgctttgatatcgcgatgaaatatcgggggattagcttccgtgtgtaaatacaagattcccttggctgaacctaaagcaatccgtagtctcatcgcaaagtctagaggctcttttaatttaactgccaaaacacatatttgtatgtaaattggtattcacgaggaatagagcccaacttaaaagcacac

SEQ ID NO: 67752 - DNA, 251 bp, Arabidopsis thaliana landsberg
ctatcagcatttcattgaattatatggaaatcaagtttgaagcttgacgtgttttcttttcactatcagacagatcgcatatggctgcagcgcactgcggatttctaagagcagcaaaatagcaattttgaagaaatatctctatgttctttttttagatttcttaattagtgtcacgagttaagtcgtcaagcatttgctcattatcccgtaaactcttagagatgtttcctaacctcccacattgagac

SEQ ID NO: 67753 - DNA, 619 bp, Arabidopsis thaliana landsberg
gtataaacgatcgccactgtgttgtgagttatagctttgctttgaagccgagtgagaaacaagggaaggaatgggaagaggctcgttgtcctgtttgtatggaacatcctcacaatgggattcttctcatttgttcttcttatgaaaatggttgtcgaccttacatgtgtgacactagccatcggcattctaactgtttcgatcagttccgcaaagcttctaaagagaaaccttctttgtctttacttcgtgaggaagaggaaagtaatgaaccaactgagatggaagatgtggattcagactcaactgctgtaaatctgttaggagaagctgcatctgagataacagttgtggatttaagtgatggtgagagaggagaagaagaagtagaagaagaagaagaagaagtcgtagtagaagaagaagaagaaggaattgtaacaacagaagaagatcaagaaaaaaacaaaccaccaaagcttacttgtccgttatgtcgtggacatataaaagaatgggtagttgttaaagcagctcgatgtttcatgaactcaaaacatagaagctcgtcttgtgagacttgtgatttcagtggaagctattccgatctgagaaagca

SEQ ID NO: 67754 - DNA, 2075 bp, Arabidopsis thaliana landsberg
  unsure (1)..(2075): unsure at all n locations
tattgtcatacctatttaatcacactccgagattgggcggaagttgcaaattgccatatttttttgtatcattaacggtttaattttctattcattttgttaaaatatatggcaataatagcattggcaggtggaatacaataatacatcgtaaagacctcttagtctcgttagcggtaagcctccctttgatagagcgggtttgaaagacaatgcatgcgatgcgttgtaggatgttgtcttttcttgtgtggcagaagaaatagagaaacacaacacatttgtctcgctattcatacatttgtccctcccaaatttctcaacttttttttgttatgatgtttctttcctcaaaatcatcgacactgattaggtgacagatgtttcagaggtcaacctaggtttgtaaatatatattttaatatatacaaattgtatcattataatagtaataataacggatttagattggaagtggatcaaaaacttttgacatccaaatgacgtatatattctcttcatatatctatgtaatttacttttgtcgtgaagcaacataggcaattataagctcactgctcacatgttcgtttaaacgtgttatgtgccatattcggtgggcgaagcaccacactatcaattatcaaatcaaaaattgattgtattatatatagaatgaattgttgatttattgttaatactcacaattagagaagtctgattcaagatacaatgctgactgtttgttggttacgatgttgattataatatagtaagattagtattgatttaaattaaaaagtatatactatatactaagattagtagtgagctacttttttattttgctccccaaaaaaaaaatattatcgtccaactattaactcaacaaataaattatcctccataatataaaaagaagtaatattgcatgcgtatgatttttttctttaaattggctatatttatatactaacaactgtaatatttaattatctacatagccatagcttgcaggaatcatgtagctttggttataattaactttgtttatatgtgattcttatgcgtaccaatcataaacattttctaataatacggacaaaattaaactcatcatgtataatgtattcatctgtatttgaagctattggaggtaacatggattatgaatattatagctaataagttatcataacttagataataactttttttagaatgtactatgtcacctttagtttgaatcgccatagtttaaacaatttttaaatagatctgtaaaataaaacttcctaaatgttaacgaatttgggtatacgacatgcatatatataaagctcggggctaaatttataaaccacgaaaacattagggccgcaaaaaacttttaaaggtagaaattagttttgttatttatttttcaatttagatttacatattaaattccaaaaacaaatccttcaaaatcaaaattcgaatattcctttatatttattttcttccttcgtctccttcaaattcaatctttctccgtcattcagatttcgaggagacagagacagagaaaaggattcgtgtaaggaaaagcttttaaacttctctttctatttatccctcctttcttctatctctctctctctcgatatcgatacaagagagatggagaaagaagaaggagaaacaacaacaacgatcggcgttgttccggcggcgccggcgaaattaccgactccgatatattctctgagcttttgggaggtcacggcagcttccggcgtcgttttagggtttattttgggtcttgtttgcgtttatctcacaatgcctcaatctgattacagctttctcaagctacctcgtaatctcgaagatcttcagattcttaggtaaatttattgtttttagtattgattatttctgggtttttagtaaatgttcattctttgattcanagaccgtgagtttacgttttaggattctggaatctgtatatgcttgaaccatgaagttaaagctaatctcgtgtaggggtattgctaatattgggcatgttgaatctatatagaacatga

SEQ ID NO: 67755 - DNA, 437 bp, Arabidopsis thaliana landsberg
tactaggctttcttacaccaaactatattagtaattatttgttagcatatgcaagtacagacagccatcgatcatatattataacatgtttatatagaggtgcgtgttcgaggatgcatgggcctgtgtgttcgtcatatgcacgtatatacgtacgttccatgcttggttcaatgtatgaggtcgtttccaagagactatcaagtttagttagtgcgatgggtccatgtgcttaaactaacttatacttatatcaataaataatttattaactagagatatacttttaagaaaacgtataatcgaacttatttttaaaagtgtttagaagaattgaaaacgacacattttataagacagaaaaacatcaaataacaaaaggatacccagtgaaatccattctgcaccctagatatactaatttcttgagcattacc

SEQ ID NO: 67756 - DNA, 849 bp, Arabidopsis thaliana landsberg
  unsure (1)..(849): unsure at all n locations
ctctgtcattcttcttgcataactcattcaccactatcaaataagtatcaacatccggaacaaagtctaactcttggataatattgactaaagacgccaaatcttcaatgatattttcctgaaatagacatttgatcactgaattgtatgaaaagggtaagggtgtgcatcccagattgaccattttttctatacgagataaagctgcgatataatttctttgcgaacacaacgcagttgtgacaacagcaagtcccacagcagctaggttcgcatcttttctagcaatctccccaagcaaagactcaacctttacctcaatatttccaagatcatcaataactggtggattaatccacatccgttatctaaaattgattgtaagatcaccatagcatacttaagctcgtggcattttgggagcatcttcaagagaacaaagtaagtaatatggtctgggacaattccattgtctaacatcctcattaacaagtcaacagctttatccattcctcccttcttgtaaaacccgaatataagatttgtatacaatgcacgttgcgggatatatcttcactccctgtgttgttctcgaaaagcctcaaagcataatctnnnnnnnnnnnnnnnnnnnnnnnnnnnnnnnnnnnnnnnnnnnnnnnnncattcgactgcacacccttttttatcatttgactaaacattacccttcctttatcaagcatacccaacttcatgaaggcatgaatcaaagtgttaaaaatacaagccccaaccccaaaacttctctcgaccattcgcaaaaaaaaaaagcattgccatcgtcatactattgtccttacaatattc

SEQ ID NO: 67757 - DNA, 706 bp, Arabidopsis thaliana landsberg
atatacccatgccaccttaattagctgggccttcattgttgaactatttacatgatcttgattgatgtttaattaatattacaccagcaaacttcttgtcgcaagacccggtttgataccaccgagtatgatcttgtaccgattcagttttggtcattcgagtaacaattattaaactataaacgaaaagaacaagacgagggcgggaaaatgccagaaagaatgaaaccatcaaagaatggtcgggacgaacaaaagtcacatggagggtatttcccaacatgctacaaacgtcgccgtcttgacaataactgtattgttcatgataatgatattttgctttcaaacataatctcagtctaatcttttttttttcatcgagttttcatgactcctaaaattaatcccccatgatgaagaaagttctcttaatttggatggattttaagtttagagataaaaggatgtatccaaattagctagggctaatattttcagattgtttttctcttcatttatttgttgcagattgaatcactattcgtttggaacaacagacggtacatgggatgagattcatataaacgtagagcataagtaaccataccttggtaaagctttaagctatttacgttcaaaataatatttgcttgttgcataatattcgcctcatgcctgtttatttttggattattaacaaaggatt

SEQ ID NO: 67758 - DNA, 239 bp, Arabidopsis thaliana landsberg
gcttaactgcacagatatcatggcctctgacatgttaacacccgatgacttaagtgcttcagttagagcgttatgtaccctgttcacaatcaaaccaaacaagagttttcaatcaaatctctccatctttatttcctccagctatccgtttttagaaccctgagtctgttccaaatacagaagcagataggattttcagcttgaatgactacctactttcgagagagcaagcttattct

SEQ ID NO: 67759 - DNA, 613 bp, Arabidopsis thaliana landsberg
acacttagattctgcattatagattctacatgctgattcctaaaaccataattgcaggaacgtttcggcataatggaagaagagaatgacaagttgaaacagcaaatggagaagttaaagagtaagcacaaaacagagatgagcacaatgaagcaatatctagcagaaagcaaattaccagggtctgcattagaggcatggttcaaggagaatgagcaagaagaggaagaagagcatgtatcatcatcagaacacagaaccggtgttgtgagctatgacaactatacagacgatcaagcatggagatctgagtttggagccatatatcaagaccatgaccatcactactgattcatgttacaaatttatcatttcatttcaagaacaaaaaaacttctttagtcaaacccatcttgggcaggcctgttcttacattttattaaaaaatctatatatatataagtttctgcaatttcttcataacatataggcccaagtgagggcaaattgaggcccataatgaatatagtgtttggctacaggtaaaaaagccaactctggttctaatttttgaagattaggtagaaaacgaaagtgtgtctttaagcttcaa

SEQ ID NO: 67760 - DNA, 1190 bp, Arabidopsis thaliana landsberg
ggtaggttacattttcttgtttgagattcagtgaatctctccagagttgcatgtatagaaatgggttctttggaatctgggattccgacgaagcgagataacggcggcgtaagaggtggaagacaacaacaacagcaacagcaacagcaacagttcttcttgcagagaaacagatcgagactctccagattctttctattgaagagttttaattacctcctatggatttctataatttgtgtcttcttcttcttcgctgtgctgttccagatgtttttgccgggtttggtgattgataaatcggataaaccatggattagtaaggagcttttgccacctgatttggttggttttagggagaaagggtttttggattttggtgatgatgttagaattgagcccaccaagcttctgatgaaattccagagagatgctcatggttttaattttacatcttcttctgtcaatacgactctgcagcgttttggattcagaaagcctaagctagctctggtcagtagtttatgattagaaaatgaattgttctaatgatgcattgtggttgatcttcttgagatctgatgacttgcattgtggttaaggtttttggcgatttgttagctgatccagaacaggtgttaatggtgtctctctccaaggcactgcaagaaattggctatgcaattgaggtatagttttgttgtttctttttgctcttttgtttattagtaatatgtatgaagttatgatacaacgaaacctcaaacttgtcttggtaggtttactcgcttgaagatggtccagtgaatagtatttggcagaaaatgggagttccagtcacaatactcaagcctaatcaggaatcgagttgtgttatcgactggctctcgtatgtctcgcctatcccatgctatttgtattgcttggaaactctttgggaactagtagtaaagcatgtcttgattaattcaaaactgggatataatcttgaggctatggttaatttgatgtactcatgtgattaagtttaactggagaatgtggatctgaggttgatcaaatgcattatggctgctattcttctaatattatagtgcaaacttagttgacttcacttggtcaatgcattgatttttagtcgttgataatttcttttggttcttatcttgaagctatgatggcataattgt

SEQ ID NO: 67761 - DNA, 292 bp, Arabidopsis thaliana landsberg
gttcattcttccatgtgattaatatagcttatgattttaggccttcattataccggaaccgaaaatatgcaatttagttgtaaagaaagatttaaatttacaatagtagatatttttgtcgttaactgttaaactgttagagtcttaatacatttcataatatcatcgtaatttatgcgagtgtaatagtaaatgaattttatagagttggaaccaaaaaaatcttattgatcaacaaatacaaataaaaatcgtagaattctttgaaatttaaggacaagtcttcacgtcc

SEQ ID NO: 67762 - DNA, 542 bp, Arabidopsis thaliana landsberg
ctgttgaaatctgatatgaagacatgaattatttgaataactttcttttgttctgattaaaaatatacaaaatctttcatttaaaatataacgtcatagtattcgtcttaagtagctttgaaggataactagaattatattttcttagtaaatccctataagaatgtaacatgtaattagacgctagagaaaaagaatgtgacatgtaattattaatgcatcgtcgatgcatgtgttccacatgcagagaaaacgatcgtgttgaatatttattgtgtccaccaaagaaacaatctattggattaccttcttcaaatgaaactatgataaaatgaagtaaatatgatggattcccttattaattaccaacaagctaagttattatcaaataaaaacttaaataaaatgaagtaaatgtgatgggctcctcttttaatcacctaaagatctctataaatgtgtaatatgtagctagtggttgcttgcaattgtcttgtcattggtggagacataatatagtggctcacttgtttactacaaaa

SEQ ID NO: 67763 - DNA, 435 bp, Arabidopsis thaliana landsberg
tctctctctctctctctctctctctctctctctctctatctctcttatctctaactccctgcctttctacaatgaatcgcgtaaaccataaactggctctgatgactaatacaggccatgcttgaatgatggcatgggctttctcctaaagagacacttctaacctgataaaaggccatcctatgctccatccacagacctgactaacgactctcgcctgcatgggaaccacccagtgccatattcccctgccctctcctcccttctgccccgagtcccaatgccacccaggggcccccattttttattcacattttccacattgtccatcatactattaaatgttcaaagctgggaacaggtacctataacttccccttgtctaccacctgccaagaggggccagtggcttaacacagtcagacacccactctt

SEQ ID NO: 67764 - DNA, 661 bp, Arabidopsis thaliana landsberg
  unsure (1)..(661): unsure at all n locations
gcttactagtcttccgctttctagagtcagttttggatactctattaactttagaagtttcttcatctttctcttccaccaactcttcttcatccatttcattctcatcaaccaactccacatcatcttcttcactctcacaaacctccttcccaacattctttccccaatcctcatcgctagaatcatcaccgtcacttttatcttcttccacattacccatctccacatcatcatcactatccgtcacaacttttctcaaagccgaagcgcctcgtttcaatcgattaaacctatctcctgatttttccccaaccacccactcaatcttctcctttcccaaatccaaagactcttcttccccatcttcatactcaaccacatgcttaccctcacccttatcataaaacgtcacgctcccatcataccattttttatccaaaggccaataaaccctaacttgcttccccaccacctcgtcaccgtaagtaattaccaccgattgaggaggcgaaaggtgtctgtccgatgacgagaaggggcttcttaaacttggactgtacaggagagnggagtagcaggactaggactacgagcaggaagattagactagggttaaggttcaattgggggggttctcttagcggagnatggtgacgga

SEQ ID NO: 67765 - DNA, 581 bp, Arabidopsis thaliana landsberg
accatgaagatacatattgaatacgccaattcgccaaacaatatagtccttaagatgacctctgataaataaaatcgactattataaaccttatctactaatgacaccaactaataacacccatttagggtaatcctcatttattaaacatagcttactacctaacaacaatgacagaattattgctctattaatctactttcttaattctgggatgagtgatagaaaccaaccaccagacacgttgatacggaggatgatgataacgatttttaaagaaatcaaacagaacatagaaccctactccaatggcgaaaagaagaacagatagcgaacgaaaagtcttattactggaatcagatccttgtgagttttcttaagatcaaaacatataactttgtgattttgattattgggaattgctcatagaagacgaagcagaaagaaacattcgtaaacaacaccaatacaccaacccatacaatctaaattacattaacatcagagaaagttcaactttccaaatttaacgccatgaataagctctacaggataaattctttcatttacatatgaaatca

SEQ ID NO: 67766 - DNA, 549 bp, Arabidopsis thaliana landsberg
  unsure (1)..(549): unsure at all n locations
tgttgacctcttaagtatagccaaatctgctttctttactgttctgttcagcctttccttctctttaggactgctctgatgttgaacgcacccaacttctcacctcaaacttttgatccctgagtctgacttggcatcttctagactggccctgctgcgtcaagacccagcccctcccagcccccagcctgctccttccctttcctcacagtgctcattttctctctaatgctgctgctgctgacttctagccttctctcgagctgccgtcctgggccaagtcccaagcttgtcttttaaccttatgtctcatgcccaacagcaggtaggcaacttctgttgcctgtacctggggcagcatttccatccctttggctcttgttcatttggctcccagccctgnggtttatggtttgatgtcagaaccagccaagcagcacaatggccttgtttctttttatacccttacagatacagncaccttcttattagatctatccaataacagcattctaagagttttgtcatacttatactgagatctagcta

SEQ ID NO: 67767 - DNA, 453 bp, Arabidopsis thaliana landsberg
tcttttggcccaaaaaaaattgaaaagggaaagatttggccaaaattttaacaaaatccactacgtattaagtggatagtcatggacttatccaaaaaacacatagctaaaatagtggtaatcatgtttattcagtgtcctaagttacgatcgttcctcagagattaaccataaggaaacaaaatcactatgaattgcataaacaagagtcagatcaggaacagaattggagggtaggagctaaattaggcataggaaaggggttttgaagaaacctgccgacttcgttatctctctcaacttctccgacctcggcgaggaaggatttaagaatcgcatcgtcgtctactttcacctctcccatgactatgtcttcttcttatgattctcttgtcctctctcttcctcttcttccaacgacgacaagagtagagaacggagagaagaaacaaa

SEQ ID NO: 67768 - DNA, 1388 bp, Arabidopsis thaliana landsberg
tgaataacactatttagagatatgataaacacacctatctgaaaagaccatttatcaactatgtgttaattcaattgacaagtagagactgaaaacagtttataatttgaaaataaaaattgacaactttagagtgaaattcggttaggagtttaattttaactttaacggctttattgatttaaacagagtgttgttgttacagacaaattatagagattgtaacaaaaaaaaaaacattttttttttttatagagattgtagtaatgaaaagtcataagtgtacataatcattggatgggccttattgattgtagtagtaatgaaaagtcatatgtatttgttttaacttttaaccatgaaaaacccattaatcgataattggatgggccattattgggctattgagtaacaaaaatcaacctttcagaaatcatccactaaattgccgttttgacgatacttctgaatgagggagaggctttctgtatgtttttttgtttgtctccttccttcttcgtctctttacttctccgatttggctatcatcggtcttccgaaacgttgaccttggagcttgagggtaccaaatggcagccagaattcgattagatgcggtaatatccacgatagtaacggtgcacccgcacgagcttccggcgttgctccactcctcttcctgcttcttcttcgtataccgatctccttctctctgtctctctttatgtttaaccattcatttcgagtgtcctttaacttttgtttctattgaattagatattgagcgcgtatttcgtagttcttccactccgcgacgaaggagcaatatcgctgggattatcaaagctaccaggccttttcgttggatcattgtttctcactctcattgctgctcctctttccaccttcatcttctctttgcccaatttgtccaaatccaaggtactcctctttcttacattgtctgtttccaatttgtaaccttttgacaatcttatacacatgcttttcgaaatttgcaggctttggttataattcatagattctttagtctatcacttgttctatgtttccttctttggatggcctccccgacagagtctaattcaaaggtaagataagagacttgaatcattcataagcattctggaataagtcctgtctcatggtttaacacataccactgcttcaaaggatgcagttgaggcggcttccggccttacaaatgatggagctaatgctgctactggatgggacaaccatggctggttttacatttctgtccgggttggatttttcctttgggtatgatgtctaactctttggtttttttttggttttaatttcaagtcgtttgagtgtagctggatatatgatgcttgttcttg

SEQ ID NO: 67769 - DNA, 635 bp, Arabidopsis thaliana landsberg
  unsure (1)..(635): unsure at all n locations
ttgatttctcatctttgaaactaacaaatccatataccttcctcgttgtcacagagaccggaaggtcacattcgtagccgttttcataatcaaaatattcataatctctttcgcaaatgacctgtgaatcaaagataaacatattatagatgaaaaaaaaattcagtaccaatgagggaaaagtgaaaagaaaaccgaacattagaatgtataacgtcaccaaactgagaaaatgcattcttaagatcattttcttctgtgtccgactccaaattgccaacatagcacgtgaattcaacatttgtggaagctattttgaaagagtaagagagttcaaaaacaagtagtgatttctaagtagaaaacatagcaattttatgagtgacataaaatgagagacactttagtcaatttatagaaaaaggttagcggtaaatgcatgtgatgatatcgataaatgctattaactctaatatggtttgaaacaagtgtattttcttcttggaactagtttacactaaatgatgatacttttatagtggaaggcgaaaagtttatgttttttggtcatggcgcngatagtttgtttagatgataattagaaaaacagtcaaaacaaaactcatattttcgat

SEQ ID NO: 67770 - DNA, 1753 bp, Arabidopsis thaliana landsberg
cacaaaaagcaataacagtttttttagtatctggaccatcttgaaacacatttgggttaatcgatttgcagtgtgactaacctctttttcggcttctaactcatgggccaacctaagactcaagttaagggacgcatggtacatctcatccaacatttgagttgtcacaatcaacttgtttaccttccacaacagaaacggtgtatacatacccggagctgtgaccgccaatttctacaaaaatgaacagaagataacaacaatgaatctcgtaacaaccaattcgttttacttttgataatgatttggtttccaaactgtgaatacctgcatatgtaagtatccgtctttccacatctttaaaaggaattgcggtgtatctttcttttcagtcagcgcggcatcagcaatcttacagagagaaaaaaatgatgaagttaagaaatcattatgacttaagatgtttctatatgaatcataaagaacagtcattaaccttatcggtctcaacaaaacgcccttcctgtgataagtatctgaacattctgaaagcttctttcccatatcttctcatcactactgcctctatctggaaacatctcaaagataccgtttttagtttcagaaatatatcaagaaaagaaaaatatgaaacgcacctcatctttctgtgctacgctgataatggatttataatctgcaaaaccaaataacaaaataatattattttgaatacaagaatcatttgactagattttgaatggagttactataccaactatgtatgaatcattcacttcgttcacaaatgctggtagataagaagacgtagcactcaattggtcaaggcatgcttcaactcgctcttgtaacatagtgcgacctgcttctgtcttaataacttcttcataaatggaaccaactgacattggagctgtttcaaagattatagcaaattcagttaacagaacttcataggtggacttttggtggagagtgcaaaataattcacaccaaatacaattttaacttcagcatattatgattatgttaagatattgaatgaaaatgagtgagaaactcaaatattacccgaattgtctgttttcaccttcttctcttgcgatcttcctacttctaacattgccctcaagacaatggcacatccttcatcccggcgctctttcactatctccacacacgccttaaacaaagaaacaagtggttaatagattggaacagtaagacattcggaaagcaaaatttgaaatgccaatgagcttttttcctcatcaaacaacctcaaaagagaaacacggataactaaccttatgtctaaggcggtggatgaactcctcaaaattaggacgccaaattactccactgctcgaatctgatgtgtccacatcacgttgtttacgctaaaatattcggttcaatgagaaacatcaacaaaggtattcagagctacatcattgaaaaatgtatgattacaagattggttatggtacgaatgttgataccttcccctcagtgatgttgctattgtcatctgctaaagatgaattggaatcttcttcgaatataagtggaaaccttattgcgtcaactggagttgctgcttcaacaacttgttcctccaaggtttctggttctttaagaatctacaccgttccaagagatttattaatatcgaacagaatagaaataatatcaaaactgagagtcatgtctctgcaatttgtaggtctga

SEQ ID NO: 67771 - DNA, 648 bp, Arabidopsis thaliana landsberg
gtctgagctctaagccaacctcgttgatatcgacttgatcatcaaacccaagatttggagaactttgattaaatggagcttcccttcggctctccacattctccaacgtgaagtggccataaccatgcgtagcactagaacttgggagttgccacatgtcatgactacattcacctagttggttcacggattcacgtttgaatcggccagtttgcgtcttgctcttgttagcgtttacacgtgtggccagattctccgaactgtcgccgccggttgttggatctttagccacgtggcgtatatcgtaagtcctgtggggaggaatgatctggtgcgacgcggatgcacttggaagaggtgtgtgagttatgggtaagccgttgagcacggcgtcaacagctgcttggcactgagcccagttccctgaccacatcaaaccaaccgaaccatctacagggttcacgatccgaccacaagcctcgtacagaagtgacctaaatattgctacaaaacacaatgaaggtaatgtaatcaaccgggaaaatgaaaaacatatgtgtgatgtgatgtgtgtctgtgactgtgcatgtaagaattttatgttaaaatctataatatacatttagatcctagtttgatactactctg

SEQ ID NO: 67772 - DNA, 251 bp, Arabidopsis thaliana landsberg
cgggacgctcaacaaacaccattgtttacctataaagtgaaataggggggggttgtccccaagccttaatcatgcttacccatgaactggtcagctcactatctgaggaaactcgaggaccactactagaggtcattagtcttcgccctatcccagtagacaacgattgcacgtagttcgtgggcttcacaagttctctgctttacccctcagctgtcacatcttcgggcccgacggatgtacactcaacc

SEQ ID NO: 67773 - DNA, 539 bp, Arabidopsis thaliana landsberg
  unsure (1)..(539): unsure at all n locations
cggtgtgcggaccggtatgctggtcaattcgaattctgttttactgatgtgcagaagtgcttcttttcccgcgaggaaatcggttgccgcattcatggtctgaaaggaattggtggcatccaggaagtagtattttccgtcctccttgtaagtggtgatcatgtgattgtcacacattccacttggaaattcactgtatttaaacggaatatcacgtgatccgacccacgttaaatagctgggaatgttagctgctttcaccagggaatagatcagggaagccatgtctttgcaatctccgtaacgcttatccaccaccaaattctgctgacgtggaacaaatccacccattccttcctcgaaagcgatgtatttcacgtcgatcctgcacccaataatagattgcgcgcaccttgtcgagattggttnnnnnnnnnnnnnnnnnnnnnnnnnnnnnnnnnnnnnnnnnnnnnnnnngatcttcgtgttcaacttccgccacattcgatgcataattggtgtgtcagtcgtacaaactg

SEQ ID NO: 67774 - DNA, 104 bp, Arabidopsis thaliana landsberg
aaagccggagatatcatcttagggtgatccttttgacgacggatgcttttataacactcgtagcctctgaaggatgagaaccagggatgcagaagatacaacga

SEQ ID NO: 67775 - DNA, 463 bp, Arabidopsis thaliana landsberg
tggcatagatacctaacagcactcgcatcaatggaggcatgagacatccccggggaaatgaacatctacccaaccccttggttccccaatatgtcaccaggttctatccctgcggggccgacgcccactggcgacccttacgcctgtaatcacactgtgcgacaaatctaggcgtgcaccatgccctctaagctggcgcacccatccaacctcagcaagaccatgctgcacatgcttttgctcagccttcatcacttattcaacctgcaaagtatcatcccctgatgaccgccaaaatcatctatcatcctgtaagcctattctcagacaatccatcactgatctcaatcagactaactaagcctctaccatatgaagggctactcgcaaacattaccaaccgactagcgacacaattcacacccaagtgtaccgacgctcattgtctacactcataccccac

SEQ ID NO: 67776 - DNA, 601 bp, Arabidopsis thaliana landsberg
aaaaacacctacaaaataagaatcaagatatgaaaaggaaatatcagcatcaagaatccaacggttgaaataaatcaccaaaaaaaaaaagaaaaaaaaggaagggactatatatacacataaacatcccccattccccactttataaaagaccattctacttctatatatatatatatatatagtgtgagtgagacagagcctcacataaataaaaagtctcctaatctgaatacaactattactaacaataattcacttatctaaagaccatcatctgactgactctacgctgaatcatcacgaggaagacttgaatcgaccggagaagagatacgtgtagagatctgattggctcaccggagagaacaaaacaagaaatggggaggacgacgtggttcgacgttgacgggttgaggaaaggagagtggacggcggaggaagaccggaagctcgtggtttacatcaacgaacacggtctaggcgagtggggttcactgcctaagagagccggtacaaatctttacttacacctatgctacatacattgtgtacggtctatactatgtttctgagtctctttggaagctaggggctttga

SEQ ID NO: 67777 - DNA, 588 bp, Arabidopsis thaliana landsberg
ccgttctctaagtcttgaatcgtaatatactttataaatatgatagcattagtttgaaaaacttggtttggagtgaaacattctctatagtttttaaattttgaatatatctcatttttgcgtgttctaaaaaatagaatatatatcattttcattttaatagtcttatttttaagaaaaaaaatacgacaaatgaagtcaaaagagtatgtagaactgaattcatctaaagagtttgtattttttttttttaatttacatctatcgcttgtataagtgaattcatctaaaagatttgtaatttattatcaaaagatggttttcctaaatattaaaattttacaatatatcaaaactaaaaaaaaatgataacatgcacaacactaattttgtttagataaaaatttcttaattcatcttttaataaaaatttaacaattaattcttttaaaaattattaaataatagtagataaactaataatactataaattaataaaatatcacatgatctcaacatttttattttatagaggctttactgtatatggaaataaaaaggtaaaatattagtagaaaatttggaag

SEQ ID NO: 67778 - DNA, 250 bp, Arabidopsis thaliana landsberg
ggggtatgattcgcccaagcgccaccaaaccattactttcatttttcaagtaacactataacccgctcaggggaggatgctactatatacgacaaaaggcactctcttacctgctacacaaatgatataaaccacatgtgagatgaagatggcaggactttcactagcgagaggtatcacgtataaaacataagctgagggagcaaggacccgcactcattggacacgcctgacatcctccactaaacat

SEQ ID NO: 67779 - DNA, 1127 bp, Arabidopsis thaliana landsberg
atatatagttatatatagatccattgttacaacgccatattgttaaaccctccctgcgcatattccggtctgcaatatcttctatatataatgagttagcacctccttagctattgttacgtaccaagcttacctgagagattagatcaaacaaggcagatatgtatatatgttacatttcatctttggaaatagcatatgttaatgtcaatggtgtataatttggtcaagttgatcttataagaaatgcttacaaatcaaacaatatatacatacttaaataaataaaaatatacacgaatttacgtattaaaggtttcaattgtggagctagctaagatgctcatacgtctcttctacctcattttcttcctttttcctttattggctgtctttggctaaaacagaaagcatttattcctatgacctaacacattaccctcagaacttatcctacatgcttcgcgtagtacttcttgtaaatatgcttgtacatatactgatatacatacacatagacataagaatgatgcaccatgcaggacacagaatcacgcatatatacatgcaattgtgaacacacacaaaaggttataaatgtaaatggaaaagccatcatcgtgacactgagtggagtagttgagcttcggtttaaatatttgttgacatttctataaacccgccgacccattttgggctcgtctctatcatacacaagtaagcctatatatgccttatagcaagaggagtgagacaaaaggcactattataccagtgcttgatccttatacaatcactagtaaatatatacatatatatatatatatatatatctgtgtgtgtatttaaatatatatagagagaggcaatcatccacttattatatatgcatgcatcatccaactttataatatgttctgcaaaaatgaatactagagaaagaaaagactggcgcatattattgaggactaatgatcacaagaaatatggctgataatgattacacaacacgatttcgacctatattatagtcattacatagagagttcattgtaaagatgggaatttatccactagacatcttgatgggattttaacttggcctaaacaaaaaccgttatcctttg

SEQ ID NO: 67780 - DNA, 325 bp, Arabidopsis thaliana landsberg
gatttgctctggctctgctgaaatagagtagtcctgctaagaaacaagctgagtttacactatacttcttcaaggtgctatattgcatagccaaatcacatattcacaacacattcttaccaagatgaggtttttaagggttgggcagatttctagagaggcggagtgtcgactttcacaaagatgctggtgaacacaagcatggagatttttgagtttttgccattgggaatgttgcttttcccttttcaacttttgtttttactaatttttttcctttctgctgagtgctctttgttagggcccctattaaataattttacaa

SEQ ID NO: 67781 - DNA, 552 bp, Arabidopsis thaliana landsberg
  unsure (1)..(552): unsure at all n locations
aaaatgatgagatcccagtagtactctatcccaaatttgatcgaggaagacaaaacctgttgctcctttttgcttaaggggggcctgggttcttccagcgcctggactagcatagattcccgctctccagcctcctttagacgattctctaactctgacctcgcttcattgttggtacgctcctcagctaacgcttgagcttcctttgctgcagctaatgcgtttgagtaatagtctttctgagaagtaagttcagcttgatgtttttctatggtctcttgcagcagcttttctgtagctgtcttgtcccttttaatgctttcgaccttattttcttccgactggcaattgaaaggaaaaattaatgaagctaagaagcttaacaaactttgcaaatgctttagttctttagatattaatcctgcctacaagaagactgattnnnnnnnnnnnnnnnnnnnnnnnnnnnnnggaaatcaagaaaaccccttcaggcagtttcatccttaatgacgtgggttatggaacannaaaaaaaaaaatcaattacct

SEQ ID NO: 67782 - DNA, 703 bp, Arabidopsis thaliana landsberg
gttctctatgaatattaacgcttgctttatatttatcctagttaaacagattttatgtgagattcttacaagtctatttaagacgagaacgaaaatagtgaattgatttgaaaatattgttagaacacgagaacagtttatgaaatcaatcggactacaaaaccattaaataattttgaaacctctactcaaaagtcaaaactaactagtaatgaatgaaaaaaaaaagaaaaaaagaaaaattattcactatgtttcaaaatataagatgctttaattaaaaaagaactttattttatttttaaaacctttaatttatatttgatttaataaaattcaactaataatagaaaatactgcataatataaatggtcacaaattaacaaatatattaaattctctataaacttggaaaacatcttgtaatatgaaacacaataaaatatctaaaacatcttagattttatcagctataaaggatttaatttttttttgggtgaaggatctataaaggattttagttatgctatttgccttcgtatccgttattccattttacaagattgttcaagcttctttttactcatttcagacactgaccattaatgaagaccttcgcaataaacgaagcagacccacttgttaatagaggggaaaaaacattttatgtaatttactttattttatttttgggcaatttat

SEQ ID NO: 67783 - DNA, 584 bp, Arabidopsis thaliana landsberg
  unsure (1)..(584): unsure at all n locations
gcggccagcgcaatgctgccgtcatcgacggcatattccatcgctttggagaccgactcgttttcnnnnnnnnnnnnnnnnnnnnnnnnnnnnntcagataattaagcccgaactcgccattagtggcggttttaaccagtgcctccatggccagttccttgtcaaagccatccaggcctttgacaattgcatnnnnnnnnnnnnnnnnnnnnnnnnngcctaccatacagttggtttcattgccgttcagatgccagacgggcagcttaccctgctgtctgtatatggccagcatggaattgataaaatctgtcacccgcggtctttgtatcagggtgtaaagcggattcagggccctataagtatcccacatggagaatacagagtaattgtcaaaaggcgcatgctcatacacctttttgtcggtacctctgtacgtgctgtcatgatcattaaataaagcaggatcaatcatggagtgatacatggcggtatagaaaattcgttttttagcggtatnccgcgtttcgattttatagtggcaaggcttttctccagctgctttgagcactgtctttatagc

SEQ ID NO: 67784 - DNA, 340 bp, Arabidopsis thaliana landsberg
atcaccaactttgtctcgatggatctcgttgccaacacgcttttatccgccggtgcatctccagcgatggtccattccgtcgttgagattcctgatttcactcctcatattcacgcgctctgcgtcaacgtcggaacacttacacctgactggcttccgtcaatgaaagctgccgctgaactcgcttctcagctccgaaagccttgggttcttgatcccgccgccgtgagttgctccggattccgattaaaagcgtgtttggagctcatcgagctaaaacctactgtaatcaaaggaaacggatctgagattattgctctctcctctgcttcacgtggac

SEQ ID NO: 67785 - DNA, 1105 bp, Arabidopsis thaliana landsberg
  unsure (1)..(1105): unsure at all n locations
agtgagcccacacgccggagctccactcgttttgttctgattttgattccattctgctttaaccagtcgtgcgtaaatcacggattcaaatatatataagaaacacggtttggtctagattagattaaaaccgggattttataccggtttagacttcaaccaatgaaccgagtcgtttcatttctcagctttgagatggtttttctacaacaacaatggaacaaacactctcaaagtcacaggttacaatgtagaagtggaactctctctaaagatacagaagcataaagtaccgttatcttcttcgtgtcttggacaactatttactctattgaaagtgcggtgaggatcatccgatcattcaggtacgcattggtgcaatctgaaccaatcgtttgatagtaactcaacaattcgtctctcgagcctatcggaaccagaaccgggccgaaggatacccgagtcaccccagacggaacacgagctacggtttttactagaatctcctaaacaccaaccaccaggcacaacttcaccaggtttgcgtcccagaagttcatgatcgatgcgatcaaggacagtgtcgtcgtacctgaatcctcttgcaaaagctgctccggagtcaaccatttctgtgaactctttgtgatcaagctgatggtatctttctttagaagtgtcgttagaagctaggtagagtaagttgttgttcatgatggtctttttgaaggtatccgtgttgcagaggatagttgggaagtagttggaaagagaatcaggtgtgttggacaagtacatgagtagagtccgagggaagttgtcagtgcctaagacacagtgctccatgaaattccggcttaagatggagaaagatggacctgccaaatagagataatggcatttagtttaaatcatcaaagacataaacggtatctcaaacccttcttttcagatgtgtcaattctttttcctaattatgctatatttttctcaatcccctccaaagatttctttttcctcaatatgctatattcagtaggaactaaatataattatgctattcaataggagaactttgttgttaaacaaccgncatggtattcag

SEQ ID NO: 67786 - DNA, 522 bp, Arabidopsis thaliana landsberg
tgggatatttcgaaaatataaaaacacagtaaaaatgcttttaaaagtcatactacaataataataataaaaagtcatactacaatatttttaatacacgtaaatagtgtgagggtggcatagactagtaaagaaaacttattcgctttgtttcacgtttggtataaaaggttagaatcgtgtcagtttacgttacagtccaacatatttattaactacaaacaaaagtttttaacaaattaaaaagctatagtttttttagtatgccatatcactataatttatgtatttaatactcctccaatttctatatttgatgttacatatttttgcatgtaaattaaattattttttaaaaatattttcttatattaaacatcacataaatcatcaaaactaatacagaactaattaatctgcattaaaatttaaaaatatcatctaatatgtcaagaacatattaatttagaaaatcactctacgattgatagcccattttggaggaaaatagtttacaaataa

SEQ ID NO: 67787 - DNA, 348 bp, Arabidopsis thaliana landsberg
cgtcgccgcaagcgcgcaggcggcgcagcgtggacaacaccggcaggccggcgccgacggtggcggcatcgccatagtgcgcgcccttggccaacgcctcctgcagggtacgccagccggaaagctcgccaccgcccagcgacttgttcgcggtgaccacgtgatagccgcgtgccagccattccgcatggcgcgccgccagttcggcgctggcagtggcatcgacgatgacttttacggctgcgtcgctggcatccagtgcattgagcaatttcacgtcgtcgcgcgcatcaccctgccgcttcaactgctcgcgcaagccacggtcggcgagtgcctctacggccg

SEQ ID NO: 67788 - DNA, 600 bp, Arabidopsis thaliana landsberg
cggcttcgaagtggtggtcggcgatccgcagcgccgccaccgtcgtgcccatgggggatgcatccccgttgtgctggcgccgggcatcgatgcccaggctggccacgcgcaaggcggtggtcagcgactgtccgtggcgcacttcggatgaaaccatgtcgcgtgccaaggcggcagccagatcaccgtgggtatggccgcccatgccatcggccaccaggaacaggccggtcgaaccatcggcgcaatacgtgtcttcgttgcatgggcgccgcagtccgacgtgcgttccgtgtccgaactcgatcatgggtaaaaagccagaaagatgtgccaaggatgccgcagcgcagcagggaagtcactgtaaaacgccaacgccattcacggatgtgacagggatgtgcgtgctaggaattgcttgccggtcaagccatgtgaagacagcgccggcctcgaaaacaagacgcatcgacgttcaggaaccattcttcgtcagcgccgcagcattcgctccgtgcgcaggatagacggcaatggcgccagctacggtcgcgcacctcaatggcgggagtacacccgatgatcaagcagatatgc

SEQ ID NO: 67789 - DNA, 305 bp, Arabidopsis thaliana landsberg
aaatgaaaaattattaagggttattagaggcagtgaccaccctttgagtttctcaagggtttaagggtcaaacttccaatgtgaccaaaaccttcaaccaaaggtgcgagccattcatttcattaagcacattggttaaacttattaccatattcattgggcttaaggcgcccgagaccttattattatcctggagaggacttaccttattaaggtcttattattacctaacctacctttctgaccggttgggagaccacagaacctccaattggacccaaaacttactctccaacccaccaaaa

SEQ ID NO: 67790 - DNA, 454 bp, Arabidopsis thaliana landsberg
tggattttattgggggagtcgctgactccatgtcctacttgttcctacttgtacggtcgtacacttgtattatttccttaattcttggacaggtagtgcaagtgaagatagtaaaacaaatagtaaagaaatttctggtttgttatgatgattatgtgttcatgtttgcacgtaaatttctggtacagttgtacaattaagtcttcaccacgtaatatatatgccttaaaaatataatatctattgtttaaaatatgtacgcatatcatcaaaacatcatttgcagaaagaaaaaaaaacataactttcgaatctctcatgtattggaaacatctgtttgggttaacctgcagttaccaaatttgatgaaaccttttttcttgtgttgatttccatgaaaacctgaattttgttttctacctaccattgtatatctttcatcaaggttttctta

SEQ ID NO: 67791 - DNA, 402 bp, Arabidopsis thaliana landsberg
acgcaaccgccgggggtcgcccgcgtgctgaccgcggggggtttgcgtttagacggtcgtggacgtcacggcctgcctgcgtgaggaacgtcacaccctcatgtacgcgtacgccctcggtggacggatccggctgatcgtccccgacggagtcgaggtggtggtgcatggcaccaccattaccggacggcaccggggcgggacggagctcaccattccagagaccccggaccgtccagtcattgaggtacacgcgttctgcgtcatgggcgatgacctattcaagaccacgccgaagaccctccgctgtctccccctaatccgtctgaaccggtgcatcggagagtccaaaggccgcatcagggccaactcctgataaggacgtgcccgatgcgatcgccg

SEQ ID NO: 67792 - DNA, 370 bp, Arabidopsis thaliana landsberg
gtttcgccgagatccttctgtaggctccttcgcatcgcacactttacttacgtgaaagttagcagcgtcttatacggcacgtcatccggcagcatggtggcgattgctgccttaccggccgtgcccgctgcctcaatgaacgggttcgatatggccttgatggaaccaagggccgcaccggccgcagccgtaagggcgttagcacccgtgggcactgtcgtagcggacgccgactagccgccctgtggggatctcacaacatctccaacggtcatgaagaatcaaaccccagcaccctggacgggagagccgccaacggcctggtgacgcagcgcaatcactttcccgtgaccgccagcacccttgacct

SEQ ID NO: 67793 - DNA, 370 bp, Arabidopsis thaliana landsberg
cataggaatgaaactctgcattgggtttaccaatgcagtaacccaaactgtactggaatactacctacaagatcgatggggtgttcgatcatcgaagatactttggagtagctgacgccatttgacatcaggataattgggtcgccgaatctgatgaatagaatatgcaggttgcttaacggcttaatttttatctgagagtccccttatgctgttcttatacctgcactgagcatgggtagcagtaccacaaaactgtgtcatatgacacttctgatcaaaaaggcgtgacttatggagatacctaaacttaaaagtgctacttatatacgccatctaaatactacgaacgctcgttttggtggagtca

SEQ ID NO: 67794 - DNA, 548 bp, Arabidopsis thaliana landsberg
  unsure (1)..(548): unsure at all n locations
cacacccaaaagaatgagagacctttaacaaaaagaaacaacagaggtttattttaaaacagaaaatatgataaaaagagaggggggtgatagattttctctctcagttctgtctccatgttctttaacttcaaccccaccattgatgcacagcaacaccttcatctcttagtttgccataaagagccaaacactcccaataagccctaccattcttactctgcatctttcttccccttagccctaaaccctttggcttgcactccaagaaaagctcatccaccatttttatcgacttgctcctcatcatctcctccaccacttcagcctcggccttcatcaccacgtattcttcctccttcacattctctttcagccactccgacattcccattttctcagattctaggctcatctcatcgttcaccgtctcaatcttgtacatctcaaacttctgattccttgttgggtaattttcaacataccattccattccgctgcttccttttccgttntccacatcaatgaatacccgccttgagtagctc

SEQ ID NO: 67795 - DNA, 529 bp, Arabidopsis thaliana landsberg
tgccgccattaccgtcttcggcagccgcggctatggcttgtagctttatcaaggaaatcgccggagaggccggggtggccccggccgccgtgctgcgttacttcaacaaagagcaactcctcaccgaggtcctgcgcgactgggaccggcaccaggggttcgttgatggcgcggggcccggcctcgccttctttcgtgctctgcgcgagctcatggagtaccacatcgcacatcgcgatcaccttgagctgtacctgacctttgccaccgaggcctcggacgcccggcatccggcccacgacttcatgtacatgcgatacggacgctcgctggcaaaaatgcgccgtcggctgacggaagctatcgacctcggcgaggtgtcgttcatggacgaggcaaccgtcacctacgagatcgaatgcctacacgccatcctcgacggcgtcgaaatgcagtggcttctcaatcccgatgtcgacctcgtgggagtcgttggtgaatatgtcgaccaggcaatatcgcgctggag

SEQ ID NO: 67796 - DNA, 508 bp, Arabidopsis thaliana landsberg
ggccaaggccctgagtcccggtcctgcgccgtcgcggcctgatggcgtccttcgattttgcagccgatcccggctcaacggctgtggcgggattaagcagctgatcccccgggcacgtgatcggatatcccgacagggtgatcggaaaatccttccatgctgccgctcgacctaattcctattaatactatagatttagtgtgaaattcccatccgggtcacgctcgccatgcgggtcaccccggtgggaccttccgtcccctggagagctccatgtccgccgtgacgtccgcacgaccacgtccgctgcacttcgcggctttcgtgatgaacacaactggccacatcatccagggcacctggcgccgcccgggcgcccgtcaggccgacttcaacgacctcgggcactgggtgcgcctggccaggaccctggagcgagcgaagttcgacgccatcttcttcgccgacgtggtcgggctctacgcgccctaccggggcgacgagcgca

SEQ ID NO: 67797 - DNA, 492 bp, Arabidopsis thaliana landsberg
gctcaccccgaagccggagtcgctcccctggcccgaggcttttagttctgatgctgaccggcgccaccgccggggacgtgctcacctccacggtcgtgggcgccggcgaggtcgtgctcgtccacggcgccgccggcggggtcggccagatggtcgtccagctggcacggctccggggtgcccgggtggtcggcacggcgagtccgcgcaaccacgatctgctgcgcgagctcggcgccgagccggtggcgtacggcgacggcctgctggaccggctgcgcgcgctcgacggcgccggaccgaccgtggctctcgacctggtcggcaccgacgaggcgctggacgtctcgctcgccctggtcgaggaccgggaccggatcgccaccatcgccgccttcgagcgcggagccgccgagggcatccacgtgctcggcggtggcgacgaccccggcaccgagatccgcacttgggcgcgcgcagagctggtcggtc

SEQ ID NO: 67798 - DNA, 1639 bp, Arabidopsis thaliana landsberg
gttctctccataaatcacgttcccttgcggtggcaaaagggtgagcaaagggttttcagatccagaccataggaacggcgttggttgacataacttgacctttgggatcaagtgcaacgagcataggcctgttcttgaaaccccaccattccctcacaaaccttatcgcggctcgtcttaatttccgaggctctccaagaacgtaccacctcatgttcatgtgaagggcctcgaacttggcatcgtcagcttctgtccagaaatcttgaactggaacccaaagaatctcgaatgactgctgccatgcttctgtgtagagcgattccaggatgtaaagctctttttcgatgttttctaggtctgatatcagaagcagaacgtgcttttgggtgagcacgttgatcccgacctggttaatgtttgaaaacagatcagtcactgacaagagacttttacagatgcagagatataaggaggttttacgcgtctctttgaaacaccagctccgtggtaaagaaaatcaatgggtctgagaagacgaagtagaggaggaacaacgtcgacgtgaatgatagtagtgaacgtctgaatgagttcttgatactcttcttcgattataccttcctctgtaacagagtaaaaaaaacagagcttgagaacagaggaataaaaatactcttaaaaatatagaaacagagagagagcttaaaacgacgtcgtagttaccgatggtcattttactcttcttgaattgttctaacaagtaagcattgatcttcctaagcctttcgctattctcatgtatctccgaaacttccataaacgacatgatttgactgaaaacatagatgagaagcacatactcaacttactcctacttgaaaccctagaaatcagaaagaaaaacaacttactcctgcttgaaaccactggcgccactgatgtgagaaacacatatcaaaacacagcgaacaatccagtaaaccgcagtggggatatggtcggtaaacgcggctgtgatgtggtttggcgggagttgatagatatcgatgatggtagtggtgagatcaaccatgtcttgcatcagaattcgggtcttgtcgagacgctggtgtagagcgttctgccgggagaagatgctagggagctgtttgatgagagccagagattttgtgagctgatttgttgcgtgtgtctccgcgaggaggagaaaaacgccgtatttcacggccaaagcagataggacaaggactagcttagcatcccaacggtatttggagaccaaagacagaacagagaacgtcgtcgtgttgcgactatccaaatgaagccctgatgtcatcataccgtgagactcaccgccatggagacacttgcagtcgatctgtgtcagagacattgatacttagatactgactcaaacgttacttaaaacaagaaagcttcatatatacctcgcaagagatttgatcaatgagatccgcaaaagtttcaaaggaggtatgatcagcgtagtccttgaagacgagtgatggctgcaaaaagttttaaatttaatacgcttgtaaaaatcagtattaaaatggggattaattgttgcacaagtaaactaaaccttaggagcagagaagtcaatgct

SEQ ID NO: 67799 - DNA, 1201 bp, Arabidopsis thaliana landsberg
  unsure (1)..(1201): unsure at all n locations
atctaaatcatttttctctagtaaatatatatatatataatgagagcctattctataacaaaatcagttgccaacaaaagtctcaactttacattacacatatttcttttgaattcccccaaacacttcaatggagaactccgtaaacaactgcgtgagacaaagagtattctccaatcaccaaatcagaatgatacacgaagaagaagatcatgaagagagtagttggatagtctactttgaagatattgatcatgatgatgaaatggtagaaactgaaggagaaatgactcattactacgataatgattcatcgatgatctcagacgctgcatctcctgtccataccacaaagattaataatgttgttcgtcgaaaggctaataacattaatacaaaccctaaaaagcgacgaatcattcatcaacacaaagaagaagaagaagaagaactacaaaaaggagaagaagaagaagaagatgaagaagacactgcttcttctccttctaataaaaccaaggttagatatatatgagtgtatcttaatttgtagaattggttttgttgtttttgttaatttttctaacatttttttcttttttttaatagatttttagtgtcttggaccatgctaatgataatacaagatatggaaaaaccatggacaatgttacatccgaggtaataagaaaccctttatccaacaaaaaaataaacatttcttgcatgaaaactaatattttccagaaaaaactaaattcgattttccagtactaacaacaagttctttttttttccgggaatttataggaaattggatgcataacagaaacaggatcaaagataaaagaaattatgaatgaagaattctctgcagaattgaagaagagaggactttgtgtagttcctttatccatgttatctaactttattgcttgatgattcttttattttactctctaaggtttaactggtattattattttttattcttctgattctttgatgtaaaattgatactatgatagattgacacgtaaaacgtatagaaaatcaaatccttattgagagttaaacactttgcttttgttngtcagactcgttggaatgttagaaacgtcagagcttaaccttagagcttatgacacagattctccagaccgactattattacagctatgctatatacactacttactat

SEQ ID NO: 67800 - DNA, 595 bp, Arabidopsis thaliana landsberg
gtagagtttttttttttaacccacaagcgcgattgggtctcttccgttttgatggagagaaacagaacaattctgagtatgtccttgcttttggttggtaccatttccctctttagcttattgggtacaaaattgtatgatgattaaatcagaaaaaaaaaaaaagacggtgaagattttggttgaatttttatttctcatctgtttgattgtttcaaatgtagcatttgagttggcagtcaatatgataaagacgacacttttgtatttaacgtctgaagttatagagggatagatagaatataaagttccactcactttcttacatatttaattaatttaatatatatgtcgtaatgtattaaacagtaggcatgtatttatttgaataccgaaccagtttatcagtttatgtagtaattttgtactgtatacaatatgaaagtattaagatgtgaaaaaattactttttatggattttacgtttttgataagcaatttggagagagagaaagggaacaaagcataattaggtggaagaattaaagtgctaggtggtttgatggtttggttgaacatgaacttatgaactttt

SEQ ID NO: 67801 - DNA, 496 bp, Arabidopsis thaliana landsberg
cgataacgggcgcgtcccggcgggacgccgcggcatgacgatggggtgttgcgggctttttgggggcggatcgctcagccgggaaaatcggggagctgcaaggtgccgatgccctcctcggccagcatcaccgggatatcgtcttcaatgcggtacaccaccttgcggtcggtggtgatcagcccggcggccagcggactggcgattttctgcccggccacggtgtccagggttcccgcggcgatcgcgcgattcagcgcgtccagttcgtcgtggcgcagggggcgcaccggggtcttggtaaccgggtcgcacaggatgtccagcaatcgcttgtccatgccgcgtacaataaccgttttgcggcggtgaaaccatgcagaaaacgacgcgcgcaccccgtgtcggggtggtgatgggatcacgttcggactgagaaacgatgcgacacgcggccgagatgctggcggcgcttggggtcgaacacgaagtcgag

SEQ ID NO: 67802 - DNA, 2519 bp, Arabidopsis thaliana landsberg
acaagagaataatttagtcttacattataaaacactttcagctctttttctacgtatagtatgtttactttaccttgacttatgatcatcaagacgaagaccagatttgattttcttagacaagcgtacaacttccgcatgactaagcacatcttcacttattacacctttcacataacctctaacttgttttccactagaaacatctgaaactgctttaacatgagtcatattagttttcttcttagcaccaatccttctttgacgagctgaaatccctgaacaggtgataatcggaatcttcttcttccgtatagactcactcgacaccgccttctcaaacgaaagattccaacttttctctaacatagacttttgtagaagtaaaattgcctcaacagaaggaccaattagatcatcatcataacattcctcttccaattccttatcagttccattaggtagccatggcttctcagtagaagcaacatctacactctctttcaaagctttagcagattgtgtgtgacgattcgacgaaggaaaactcggactatagttcgacgcctttttcgcagttatcccgcttttcgttgaagcaatatgatactgtgatgaacaatgatcatttacagatagaaacttctctgtaacatctgagtgataaaacgatgaactcaacaatcttttgccagtgttgagtcctataacagctgcagtagccattatataacacctctttgcactcaattcatcaataaaggaacaatctttgctcttcaagatcgtattctgctaacaaaaatcaatactttagatatcataacacaatttcagacacaaagaatcaatatcaacttgtgggtattgaaaattacaaaagttaataacgtaatccagcaaaagaattgtactttattctagttctgagctcgaagccaatcattactacccaaatttgactaatccattgaaacccaattaagaagatgaagaatcacttcaaaatcaaattttgcatctatggatagattccaaagacagagattttgagtaagatcttaaagagcaaagccaataacgcacctgagagtattgtcgagacaagaatgtgcaagagagtgtgtgtggcacagacaaatcgagaatgtgtgttttgttttttcttttttctgtttctcagttttttttttatccagtagttttttggtggcctaattcaaaccaccatgcagaaaaaagaagagataaatataaaatggtttcaacaattggagaagtttagattatagtgaaagaaacgaatatgataattaggagaggatataaaaaaaaggagatatggaaagaagagatgggattggtggaagcagatactggctccatgtttctgtggtattcagctacgtctcttgtttcgctttcgctgccttctctcacccatttacatttcttcaccattaacgattaaggcccatttgagcccatgattcattagcttgcgcaaataaatgggccgttgaccaacatataaattggcccaaattcgtcacgctcacgcctccacccccactcagatccacatattaaaaaaaaaaaaaacatttttgtgcaatcaatcagacgagaagaagattatccatcgccatgggacaagtctttaacaagctccgaggtttgtaaaattgttttcagtttctcacattggttcatttataatcagttttatggtcaagtaattgtgcatatgtaataaaattgcttcttttgttatgtataatatgtatatggcaatgttaaattgcaggtaaagagtggagacataagcaggtacaagcgatatgtgatcgtgttttcgatcggttcaagatgcaaaccggaagagccaaccttacgtttgaagagttatacatcgctgttcttctcgtttacaagtaaaatctttggttccataacatttttttagtgttaatttacagatttagaaacttttatgtttaatctctcacattttttgtcttgttgtgtaatgttgtcagtgacataaacaagagattgcctggtcctcatttcgatccaccttctaaggatctagtcaatagcattatgacggtactttcacttccttgaaacgcttttaaaacgcaaacgctgaattacttcttttgcgtttgtggttatttgtgtaaagaaaaagtcaaaatgcaatttttaaagcagaaacggatgttcttttggcgattgcgtttagctttaaacgtttagtattaaccactgtttgtaacactacacttgaaatcatctggactctgattttggaagaacaggttgaaaaatcagataatgttactatttgtttttggtctaggcaacttgagtggtcataatggttgtgtgatgttcttgtaacaggactgtgatatcaacttggatggagaacttgatagggaagagtttgtgaagtttattgagcagattacggctgagacgtttaacgtggttagtcagggtgtgatcat

SEQ ID NO: 67803 - DNA, 469 bp, Arabidopsis thaliana landsberg
ccggaaacggccgcctcctcctcctctggctccttcggccactctacctttggctgactcagcctagtgcatctcaaatctgggccccatcggccaccaactgggccctggtcactggcggcacagacggcatcggcctcgagtactgccgccagctggccgccatgggctaccctctgataatagtcagccgttctgcggacaaactggccaccgtacaggcggatatccgccaactgacgcctcagtgtccggaagtgcggacgatcgcctttgacttttcaatcaacaccgtggagcactaccaggagctggagcggaagttggcggagatcctggtcaccgatggccaccgagtggacgttctggtcaacaacgtcggcatcagcttcagcacgccggagtacttcacggtgatcgcgagtaaacttcccgggctgatgggcgccatggtgcacgtccatgtggt

SEQ ID NO: 67804 - DNA, 452 bp, Arabidopsis thaliana landsberg
  unsure (1)..(452): unsure at all n locations
gcagccaattctatctcgctaagcaatgatgctagagttttgtgttcataattcaacatatgcttaacctcggggttgggctcaaaaccacacaagccacgccgcgcttgcatgctgtatcgactgcattattgcgagtgttgaatgaagtatcggcgctnnnnnnnnnnnnnnnnnnnnnnnngtaagatccttatcttattgttgagtttgggaaaacactatgaggcttactgagcgtacagacggccttaggactatccggagaagtcgatgctggtatgatacatgatatgaaggcttggttatccgatcttataaccgagacattcagttttctcatggtggtgcgactcatatactcttttattactagagcatatttagaagtgcatgctgatagtgttcttagaatcggagacaatgctcattacctgacaaggaatactgtt

SEQ ID NO: 67805 - DNA, 148 bp, Arabidopsis thaliana landsberg
  unsure (1)..(148): unsure at all n locations
ccaaccctccatccatccnaacttacaaaagattcctcaatcaaacacaattaaatacacacgatagagaaagctacgcatccctaaaaaaggccacttctcgctcaaagtcaccgaaccggcaatcaccttcaggacaagatacaaa

SEQ ID NO: 67806 - DNA, 144 bp, Arabidopsis thaliana landsberg
ccaaggcgctacgtcaattaaagacggacaaggaaaaagagaaagggcaaaagaaactcatactatgtgagatagaaccaacctgagaaaaaaacatctaaaggggcaagggagtacacaaagaccaaggaggacgcgcgcgac

SEQ ID NO: 67807 - DNA, 499 bp, Arabidopsis thaliana landsberg
  unsure (1)..(499): unsure at all n locations
agaagaccaagaagaagcactattaaaatatgtgcgaatcagttgatctgacttgtcatatgctcttaacacttttctttttatttgcatactgcaaccctttcagtctgcactagtttcatatctctatatcttctgtacttttttctttcaaccctccccccctcttttttttttttttccttcttctctttactttttttaacatttgtacggctactataatcgcagttctttcaatcattttttcttagttataatatccgcccccccccccctttccaaaaaaaaaaaaaaacgaaaagaaaatgctacaaatgcatctaagctatttccaatttttttctattgctcatggcagatatcctgcccttcatggttgtctgttcacgcatgtatttacatttcagactataaataatccctagcaccattattcgctgctcttggngaattcacgacgctcgcaaatttgccaatgaatttatgtaaatgtgtt

SEQ ID NO: 67808 - DNA, 476 bp, Arabidopsis thaliana landsberg
  unsure (1)..(476): unsure at all n locations
ataacagtgggttactgggggatatgaaaaccaaaaagtcataatttataatggactggggngcgtcaaatcattgtcatcttttagtattgtcgcacaaaaaagagttgcaaatctaaaagaatataattgcagacacaaagagagagaaagagagagagctgttggagtgtgaactagagaagacaatgagatgactttcattatcattttgcatccatttctcaggtgcatcggtgtgtttccttctctaatgatctgtctgggctctcactttgttcttatgatatgatttaatcgttcttcttctatccatttcggatctagaatacgatctgacactgcacgtgtaagacatgcggatccaatctactcaacgagtcgatagtgtgcctgcctcgcaggtaccgaagggacagaccgaaccttacgagattaacgagctaacgccaagggctcaatggctggtaaaatca

SEQ ID NO: 67809 - DNA, 443 bp, Arabidopsis thaliana landsberg
  unsure (1)..(443): unsure at all n locations
aggtgccgcgtcggngagaggaggaaaaacgacatacaatggccattacaacgcttttgtatagccacgtggtcaaaggcgacacaactttgagccaagtcatcccaagggaactacactctgacctcccactgctaaggccatcttaactctgtcaagaaccacctctgcttcagaagctgaacgaggtgcgctctcaagagcaacccgtggaggtctgtaaccccagttgctagacccacttgaggtactaatgcatgagccaaaacagggaatgcaatatgcgtcgtgacctatagcacaaaaacaatctggaaacccttgaaacgccaagcagggctacagaccggggcctagcatccccaagctcaccaacggcgagggcccgcatccacggccctggaactgcttcaaagaaagggcagccccacagatgcaagaag

SEQ ID NO: 67810 - DNA, 636 bp, Arabidopsis thaliana landsberg
ctcattaaacttgctgaagcctgtgcgcataatggatgatttcctaaggctagctcggtcaaacacagaacggaatttagatacttgtggagtacttgctggttctctggtgagtagatggaacctttgcatttataatttttgattccaatatcatgatcagctcgccattacttatattctgtctatttgccatgtttacagaaaaacagggtttttcatatcactactctcataatcccaaagcaggagtctacctcagattctgtatgttctttagttttcttaaccatttacatcaatgacaatctttttaattctccctggtatgcttctcacacttagttcatttgttaatgtacagtgccaaacactaaacgaagaagaaatattcgaagtacaggacagactctctctatttcccttgggttggattcatgtaagttctctcacccgaactaaaagatcttccatttccagataatgatgtaccaaaacgttactgagaacaattgtgaatccatatttccactggttgataagctttatcgattcttctggctaattacattttggtttcagacacaccctacacaaacttgcttcatgtcatcagttgatctacacacacactac

SEQ ID NO: 67811 - DNA, 581 bp, Arabidopsis thaliana landsberg
accaactattgtattgtgatcttgttcttattatttttaccaaaattataatattttaggtaatgttctccgtattttctttcactttcattttattatttcaatgatattaacattcataacataaaaaaagaaaacatatagttggcatcgtaatttgttcttggttttctcatcctaccacggtgtgggatggttcattagttaaaaaagaagaaggtagatattgaaatctaaagagaaagtgtgtacttgattataaatcatgtagatctagcaaacgaaactgtacttgagttgccaaaaaatcattttgattttataaatatgggaggcttcattattcgtgcatgggaatcgaatgggtcaaggagtaaaaaacaaagaacgtaatggtggtgaatggtgtgatacgtgggttttattttatttttaaacgtcaacattattgatatctacaacaaatctacaacaaatataatcattgtgtatgtataagaaacggtggtggtacgtgatcatttaatatagttacgctaaaaaaagaccgtcaccgacaggattttgtggagatacgtaca

SEQ ID NO: 67812 - DNA, 2486 bp, Arabidopsis thaliana landsberg
agtgtattcccggtttgattttctgacaaattatggtgatcaatttcatatttttttgcttcttgtagtacatgttgcattttttttgttagtacaatattctgaaaattttgatggaaaatgcaatcatataattatagcgaaaaaaggctgcaaagctaaaaaaaaaaaaaatcgaaacaaaaacacaacaaataaactaaaagagaaattcaactagcagtttttcaagaagaaacactgattctgaacgccgaattaaagatggacattcgcgtaattgtcacagttccaaaaatctcgagaccttatcgtcgttattacgaacaatctctaccctataccaagcttctaacctcaaagagacgctaactgctgtttcgaaaactaacacaaaacatgtcggatttaatttagcaatgtagctcttacgtggtcaaaattctcatttttgttccaatgtaaactagaaatgtacagatgttttccgaaatatacaaccaccatgattcaatcgttcgacggattctgcgaattcgtccatgatttgttgattttttttgttaatatatttttcaccaatgctattttcttttttcttttttcaattccctattgtcattttatagccataattttatgttcacataatcttttcttcctgtctcaaaaatataaaacaacaagtgatagtaatcatcgtctattgcataacggagggtgcaaattattgatttactaatctgatatcaaattaaatcattgaataaatctgattatcaaaataataattgaaagcaataatcttaaaacagactttttagggtaaaaaagggaaaaagggttaaacggtagaaacacaatctggaaaagcgtcgccgagaagctttactctcacctgaaacattcctcaatccgtcgtcatcataatcatcttcgatagagaagccataggtataaatagtactctcgcattgtgtaattgtctcttaccggagaaatggcaagcccacataagccgtggagggcggagtatgcaaagtcgtcgaggtcttcatgtaaaacttgcaagtccgtcattaacaaggagaactttcgtcttggaaagttggttcaatctactcacttcgatggcatcatgcccgtatgactctcttttctctcccagaatttggaactgtctctgtactatactctcgtgcttgttagtgtgcgttctaatgtttctttctgattttgaggacaaaattgattcttttagaattattgtcagacaaattgggtttatttggttgaaattggttatttttgagggttcaatcctgttctctctgcttccactgttctacattccttgcaaatttgtgtgtgtgtgtgtgtgtgtcaagcttgttttctatctcaaaattggaacttttttaacttcttaaatagatgttaaccttcctcacattatgttctttcctccttttgtgcctaatcgaatgtgataaaagagcatttgaagcttaaatttgagtcacttgtgtgtttatttagtacttgatgattgccaaaaggttcgtgcttttctgcaatgacgtatgtgaactcctattattccctttggaactctgacgttattctgtttggatgatcataatcgtttgttttagctgtgttttgatatctttatgccgccaatgctatgattgcaatcagctgtgtttttcatgagcttttatgcttgttgtttaatggaatggcagtggtcattcttctcttcttcttttcactatgtagttccttcttcatgctgcttcacttcaccatgttaattatatgttgcttttagctccagttgacatgaagttttcctagctgactatcctctttgtacttttatttttctcacacagatgtggaaccatgcttcttgtatactgaagaagacgaagcagataaaatcgtatgtaaaaccaatgtcactttgtacaaatatttaaagtgtttggctattaactcgtttttgtctcttgattttgctagagttgatgatgttgaaggcatagaatcacttcgttgggaagatcagcaaaagattagaaaatatgtcgaatctggagcagggagtaacacaagcacaagcacaggcacaagcacgagcagtaccgctaataatgccaaactagaatatgggattgaagtgtcacaaacttctcgtgccggttgcagaaagtgtagcgaaaagatcttgaaaggagaggtaaattgttgttctacttcatctgtcatggttgtagcgttttatatgaactggttcgatatgcattagggttttgttttgcatttttgttttccaggtacgtatattctccaagcctgaaggcccgggtaacaaaggtttgatgtggcatcacgctaaatgtttccttgaaatgtcttcctctactgaactggaaagtttgtctggatggagaagtataccagactcagaccaagaagct

SEQ ID NO: 67813 - DNA, 274 bp, Arabidopsis thaliana landsberg
gacctggccatctttcctcaccagttgcttgggtttgactaccgttgcaggcgattgaaatacttgatgccatgtttgaaattgaaccttgtccgggtcaaatgggatgccactggcctccgcaagtcccaaaatgaaatcacgatcaatattttcggataggattacatcgcattccacccctgcaatggtgttatgaactcgaaggcttccaaagaccaaatcgaaccaatcggaataaacaatggggctgcaatcacctggattccggttg

SEQ ID NO: 67814 - DNA, 589 bp, Arabidopsis thaliana landsberg
gaataatcgtaaatatatggaccctttttaagtcctctaagatacgttaattggggtttgtgtctttgtttgtttcacgagcaaggcaattagagaaaagcaataaaataaagtgaaagaaaataaaagcagaagaaggatcaacaaagaaagaagagagagacctgaatggttaggcttttgacggcttctttagtattgggagtggtgcctccacgcgctccatgttcgacttcttcacctccgtctgctttggtacaagctatgcaagaaaacatttttggtctcttttttgagttgttctctgccttttcagacctataaaaccagagagtactctattaaacatcatcacaaaccaaacctcacactactctactcaaatcaataataatactctacaaaacaaaacaaaaagtaattaagaacgttaaagtagagctcactctcacaatccgacataaaacacgggtaaagcttatgtaatcgtagtacacatgtaaacattagttacaagttaggaacatatagctagaaaagggtatttggatttcaattggtcgtttcttataacgcataacacaaacac

SEQ ID NO: 67815 - DNA, 444 bp, Arabidopsis thaliana landsberg
gggcaacaggagggggattggagtttgaacgaagggacccggggcgacaacctgcgagggggggggaaaaggaacaaagaccaaaggaacgagggcgaactaagagaagaggggaaggggggcgcgaacgagccacaaagggccccacaaagagaaaggatgcgggcacggcacacaagacgacaggggcacggcagcaaccgcgagacgcaccaggaagaagcccggccggccagagaaccaacagcgagaagaaacgcgcgcgggcgaagaagacagcaagaaaaggggacactcgacgcagaaagggaggggaccccgcggagcgcccgagaaacaacgcacaaggcccccgcagaggcaggaaaggggcaccccaaccgaggcccagcaggcaagcaagagacggaaaaactgcccaggaggcaggaaacaaaaaaaggc

SEQ ID NO: 67816 - DNA, 568 bp, Arabidopsis thaliana landsberg
ggatagcgatcttgtagacgtcaatgtgcattcttttctttccaaatatggtaaatcctcggggggggagccaaatgaaacaagacataatcgaaagtttgaatttgttatcgacaaaattacaacatggtgtcgaactgtagtttggttttggcttaatttgtgccgaaaacatttatgaatacattcaaacatttactgaaagtgtatggggagatacaaaatgagatgatcttttgattttctccaactcacggcaaaggaaagcatgcgagcatcctataactttaaaaatttgtcaagagactcaaagttaaactgttttagatttttaattagggtctcaaatattcgtctttttctttataataaaacaaatttgatgaaagacaaaatcaatcaaatccttttaatttacctgtagcacattttttatagcaattaatcattattgatagaaaagcatttgatttttattaatgaatttcttgacttcttgtgcagcatggttacatgttcatctttaagaatgcaatggcctttttttagatgggatttggatacaact

SEQ ID NO: 67817 - DNA, 625 bp, Arabidopsis thaliana landsberg
gacaaatgtaaagtatatgactataaaatattgactaaataactttccggcgattttgttagtaaatgttaagaaaatttgttctttttccttgtagaaaaggaatgattctaaattactatgccaaaaaaaaaaaaagtaataacttgtttcgaagagtttgtgtgtgagtcgtatatgccgcttaactcctatattttctttctctttctcacaacttcccctagaaacacttttttcggaattcgaacgcacagcgatcggataatggcgacggagcatataactcgtacgggagatgaatacaatgtcgagcttttacctagtgacgacgatgcgccgccgcttgaatcgtcttggcgtctcaacctcgacgcttttcaactcccttcttccaccggtggccgtcacgacggacgtactcgcttttctcgctattttcgtactccaagtaatttttttattcttcttcatgtttttgttatctgctctcaatccgtaaagtgtgcatagagacgtgtacgtaaaatgatcagcgaccatgacttgtgaattgtggatatgaactttgatcatgtgtatgaaaaaaaaaaaagtagttatacaaatgtgtagttgttgaaat

SEQ ID NO: 67818 - DNA, 1111 bp, Arabidopsis thaliana landsberg
  unsure (1)..(1111): unsure at all n locations
aataacttaaagatgtcacgaaacgaagtattctaggtttatagtggaatgtttttacaacgttataaggtgctattggttatctttacataagccaacatggaaagggaccaaaatgcaagcacaactgtgagtgataattgagccccgagactaagattgaactgtaccttatttctaaccaagttaccgatcttgatgatatcacattgcacctcatcttcgagaatcttaattgcctgtgatacaagtgaagaaaagctataaattagcataaacacctaaatatccgaaatttacagacttctaattacagtttattctaactaagctcttgaagtgaggctgaaaaaatacctgaggagcagggacacttctggaaagaagcttaatcaaatccctagctttgacaatgatgtatggatctcttgtcttcctcgtcgtcgaaacagtcatagaaccttcaacctacaatcgcagccacagaatattccacacagatcaataaaaacccagaaaagaagaaaaagcaactagaataacccctaatttctctgctctacaaagacttagtgaaaacgaagacgcaccaagttgagcttgcaggcgacaccgtactccttaagagcagattcaactctaggccaacactcctgaagatacttctctctgtattgaggaaagagtgttgagnnnnnnnnnnnnnnnnnnntaccagtggggttccatgccggatcaaacttctcgattgtccaacggtcgatgtttgggtcatcatcccatggcttcggcttctcgtgtttacctttcttcttctccctcttctcgatattctgctcctcgtgcgcaatctcctccacctccgccattgacgagatcagttaattcctattagtgacggcggcaaaaggtttatgatgtttgaccgtgaagctagaggtctttaaccaagtgaaaatcagagacactgcgttaccagaagggtggtggtggtgacaatcgaaaaccctatctctgttggcttgagaactcgccgttttaagacaatgcctgtattggctagagtcccagtgacataatgttgggctttagatatccctaaaaacatatc

SEQ ID NO: 67819 - DNA, 458 bp, Arabidopsis thaliana landsberg
acaaaaaaaccacaaacgggacgggggggcaaggggaaacagggcaaaaggcccccccaccccccgggcaaaaggccgaagaagcacaatgcaccgggggcgaagggccgagacacacacgcacaagaaaagaaggagaccagggaagaacagcaacgaaaaggaaaaaaacgagccagagccgaagcgacgagagccacagacggcccaaagagaggaacggacccggacgagacgggaaaccccctaagcgggccagacggcggagccacgcgaggacgaaagagcaacaggcggggggaacccgcagaaaaagcacggcccggcgagacacgcacaacagcagccacccagaaagccgcgcccgcacccagagaacaagacacaaaaaaaccgcacgccgaaacaggaaagaaagccggagacacaggagcccccccagcgaccggggggaaaaa

SEQ ID NO: 67820 - DNA, 3124 bp, Arabidopsis thaliana landsberg
aagtccaagtttcatgtacaattgtgtgtgctttgtgaagaagtatatatttggctttggattcatatctcgaacatcgaaaatcgctatgaatttgcagacttacatggttcatcaaaggtctttactaatttgaattcaaaaacataagtaaactttgatcttgccgatttaataaatactagattacaaaatcaaagataaaccacatgtttggacaattagtaaaaatcgtctctgcacttctccaaaaaagaagcaaagcagagggagatttcgagtttctttcagttatcagaaaggtggcctaagaaaggatccatcttcacacctaagatcttgacattaggatttgagtgacctttaacaaatacatccgtcacctgcaaaagagaaaagataggtttctttatcaggatatgtccgtttctttgcaaaggagacgagggcttttgggttttaaagttttttacctgactgcatccaaagaccttcaacactttcagagatgaactgttatcgacaatgtagcctaataaatcgttggacatttctcggcaccaggatatatccaaaatctgcagttgatctgaatgtttggcaagtgctagggctgtgttgtggccaacctgaacataaaacaaatgtgtaagtgtaacttaagatcgatctgtggattggtggcatagtgggaaagaatccgtctaccttcttaacattgtttagtgatagctccttcagagaaccacctgcggtttctacaaatgcagctacagcttcatcactatagagacataagaagcgtcggttaactttgacataaaacacagcccacacagttcacaagaacatgactatatgtgtattgatttgaatatagaaaacagataatgtctccaaaattaacatagtggcagatatcttaacaaagtaacaccataagttcttatatataacaggccatgtcaccatatcaaatggtaacactgtacggctgtaccagtataacatgaacatttggaatgagatagtaatcttccagtaagcatgaatacagaagggtatagagacttgcctgaaagggttgcgacaaaaaatcaatttctccaaagcttgacagccatttgcaaggtaacccagagaagaatccgtcagcttgcatacgttagccaggtcaaggacgcttaaattgggacagttttcagagatgactttaatagaagaatcagataacttcctgcaacagattcacaaagcccaataaggtaagaattcagagtgactgaatcaaagggggtgaacaaggaaattcaagaggcataccgagagttggtcaaaatcagctgcttcagggtctgacctctagcagtaacaaactccttcaagaaccgacccttgacagaaggaagatccgcatgggacaatacttccaacttctcaaactttttcaatgctgcgagaatatgcttcatatcaatgttttggcactcgatgatatacagttcccttaaaactgaccccaatgaatcagataacatatcaatgctagatgatgttagaagagagcattggttgagattaatagacgtaatcgcaggagcagagaaaaccagttgtcgtagccccacatcggaaagccggcatgcaccacttaaagataaagtagatagcatcggcaacacttttggtgaccttgctaaagtgaagggtaatatataatctggcatacaccgcccacactggtcaagttgaagaacctgtttcaaaaaggaggcgaatccgcgaatgtggacttaagttacaatgaacactttaatatcatcttatgcatgaaaaactttatcttaggtgtgacaagatgtttatcatgatttattcctgtcagtatcattattttccaagaacgggcagctaacctcatatacggttcaatatccaatctaagccaattaactacaggaataaaatggtactgaaaatgttgtcttcacaggaaaaaataagttaccatcaagttgctggtgtcacagttcttaaaacattcagtgaactcttcctcggtcagccatgagcaatctggaacacaaatttctgttggagatccctggacaagaagatcaagaaagtgtaggtccattctcctagaatcacaaagcaattgacaaagtttgaccctcaatgtgtctggaacatagtcaagagaagtgatggcatcagcattcttgacaagaactcgcaaggataattcttgcagagatggagccttccgaggggggaaactaaagttacttctgggaacccaaatagttggtgaagatctttctttgttggagacgccaataccaacatgcggagtcgtgtactcttctcggtccttaattattttcatagcagtagagaaaggacccggccaatcttcgacctgctgctccccctctttatctgacaaatcctcttcttcctccacttgagcatcaaaatgagcaaatctgtgagcaatcctctctgcaatgtcacgaaagtgctgagttcttgaatcgtttccaatctcattactattttctcgattctgcgcttgctcaacattagccatcgtcgcagccaattctgttacagagacatccgggggcttctcactgttaaccaagctctgggtttgcgtttcttcttcatcaacttcgacaatctcaaccgtaaccggagaagaaacatcctccacctgcataataccctttcccttctcctccctagtatatcttcttctacccatagaactactcggcttctcataactctgaccacaaatcacatcactttctccataggaatcttccattatcccctttcctttgttattgctctcattctctacttctactacataccacttctccgctaacgagtcacctaacacaccactactactcttatcttccaaatccacactatcctctgattcattcttcacaatagtttcttcaaccaaatccacacaaaccctctttcgtttactcccactttcactatccaaatcaaacttgctagtctcaatttcaattccataatctacacctctcttagcaactttcttgcctgaccgcaaactcaaaacttttctccacac

SEQ ID NO: 67821 - DNA, 2372 bp, Arabidopsis thaliana landsberg
ggtacaagacccgttggagaaccagagacttcacatgggttcaggccctaaatgtcatgttcgaaaaccacaagctcgtgatcacagccaacagagtgaatcaatgggatgaaacatctgacgcctttaccatcagatatgatggagaactcatcacactccctgaagacgaacaatcagaatggagggaaatttcaggacaaaagaaggatatcatcatcgaaagaactgatgagagaaacagcgtaagagtacttgtctctggtcttgttcagatggacatcagagtgagacctatagggaaagaagagaacagagttcacaactatcagttgccgcaggatgacgcttttgcccatctcgagactcagttcaagttcttagacctaagtgagctcgtcgagggtgttttggggaaaacctaccgtcctgattacgtcagctctgccaagactggagtcccaatgcctgtattgggaggagaagacaaataccaaacgccttctctgttctcgccgacttgcagactgtgcaggttcaagcctcaagaagaatcactttctgctgatatctaatgagaagaaggagaaagatggaaacttctttgatttttaaataaattcatggaaatttcgtgtttgtaactgttttgtttctggaaatattttatattcataaaaagtgatgtaataaaagccaaaaagataacatttggcctgtttgtgatgtttttgagggtttaagaaatgtaaaacatttcttgtgcaagaagcaaccccttgatttcttatcgttcctttgctgtattttgtgtacctatccgtttatcgaacaataaataaaaaaaaaactatatttgtgtgtatattcatgtatttgaatctgaaattaagtttcttggttccagtattttgtatattcttcactttgaaagcaagtgtttttttgggggttctcacgaacaactggagatgcttcgagagcactcttttcactaaaacttataaaccagtaggaaaaatcagatttaaataatcaaataagttggtgcataaagaaaaggtttccaattttctaggcatagttcatgtgatccaaggaaattaaactatgttactcatcacatgagtacatggcttcaataccatctaatcatatttctattgagtctatggaattaatatataaatgtcaactccacaatgatgattagttagtgcaaccactcgtagttttgaattgttttctaatcatgaatacaatgcatagatccgttatcgatggttgtcattagcttttcatcctttaattgtgtgaaaccattatttacaacaaggagagataaatgtggaaacaaattcgtgaaaaagatgaactgcacatttgtattatatttaattcaatgatgtccttagattaacaagcaggaaatgttaaaatatgtagttaatttttttttgtaaaattgttacagccgacctttggttaatgatttatattacaatttactctattttctatcggctgacttttccctgttagaaatgcagattttcaatttttgttaattattcatgtcaagaacttaatatttgaagctagtggtggttctcccaaagaatttaataaacaaagtcgaagctgtttctaacacggtcttcgattcttcatgtgattttgatcaactctggaccgtcaattaagccggtctctgctgcttacttccagcctctctggtctataagaacactccctccacttctatcaaatcaaaatccacagaaatatacaacaaaacactgtttctttcaaaaccacaaacaaaatgttgcgagttcttgtaactattatcgtgcttgtctctgtttcctctgtttctgctacagagaaagggaagaaactcaagaaaggtgcttatgatgcggcttcaacgaactataatgttttgtatccacttggctcgggccaagagcgagttcaatgcttggctagaggatcgtgtaaccagaaaatcctcacttgtcctaaggaatgccccgagagaaaaccaaaaatgaacaagaagaaaaaagcttgtttcatcgattgtagcagcaaatgtgaagtcacctgcaaatgtaagtctcaaaatctcaacattttggaacattttaaaagttccataatgcatgtttcgtatttttcaattatatttgtaacattttgtcaacgttagatttctaacacacttactaatatggttgatttttgttcttgaatagggaggaaagcaaactgcaacggttatggatctttgtgttacgacccgagatttgtgggaggagatcgagtgatgttctacttccacggaaacaaagaaaggaacttcgcca

SEQ ID NO: 67822 - DNA, 158 bp, Arabidopsis thaliana landsberg
  unsure (1)..(158): unsure at all n locations
aaaagnanacgcccttcattaccactaaagacagctattatctatttttccaacagctcattccatccccattgctccattgttacaccttttaaaaatcaaccccccttttcctctcattattaccaatattaatcaataaaaaactaactttttca

SEQ ID NO: 67823 - DNA, 548 bp, Arabidopsis thaliana landsberg
  unsure (1)..(548): unsure at all n locations
tgtgtggcttttttgtaaacccaacatgnagaagggtttcagcgtgagtggcgagaaagcgcggacgacatgcgcactgtgtagtttctgcaatatgacttttgcctctcaggtcaatatgctaatgcatggttttgaacttgttttatggttttttcccagattgatatgcagttggagtctggagaatacttcatgagtgataaaaagaagtcagagaaaaaatggcaggagaagcaagagaaacagtcagagaagagcacagagaacaaaagaaagagagatgcctcattcctgccacctgaggtctctcttctaacttgagtgtcacaagacacttatcggttctctgccttctatttaaaaaccttaaaatccgcaacactaacttgtacgattggttaattgcaggagcctatgaacaacagtagcaacgcaaacaaatcagaggatggaaagaatgatataaccgagttaacaaattccttgaaggtaaaatgaaacctatatctgtacacctctcttctttgctttaaggaattggcact

SEQ ID NO: 67824 - DNA, 565 bp, Arabidopsis thaliana landsberg
aaccaagcacctttcttttgtttgttcttgacgcatttgtgatgctaaatttcaagtttgttgcttaaaaataattaatgaaggaaaatggtgtaagtatttaatgcgtatcgtcggtgcggttcccacctatattggacgcatgttgtgagatttcacggcaaggacggttggaaattacggtccgagtgatcgtccaaacatgcaaattccaaaatggtccaaaaaaagtgaaacataccatcttgattgctacaaaaaagtgtgagcgaaccggtcttactttgagctagttactcacttgaagagatatttcagtcgaactcatcacattttgattttgatattttcttttcttttgtcggcactcacgttttgaggaaacaaggaatataagaaagtaaacgacccaataaacgtgatacgtcggagcaaaagaaaacaaaaaaggagggtgaggaataaatgttgtactacagctttgaatgtactacagtctacctgcggtaaaagtgcgatatctaatgatacgtgggacatctatatatcatctttgccataatag

SEQ ID NO: 67825 - DNA, 265 bp, Arabidopsis thaliana landsberg
cctatcaaactgaagatacgaaatatcttatggtacaaatgggcctcgtaatgttttcgtaatcgcagcacaattatttggtgataatcgtgttttcctggacgaagacactgagtgaggcgcaatgccgcgcacggaaggggtgacagggtcccttgcaccctacggcccacgacttggggtgttcgggtagccaattggcgaccaactcacggggggtgttgtttgccgcgactggcaaaacccctggggctacactcatgac

SEQ ID NO: 67826 - DNA, 348 bp, Arabidopsis thaliana landsberg
gggggttatatcgggggcctgtgacatgaaatcaatcgtcctctttacaagcttggcttctttatactatcaccatcccactatctgtgatacttctacatcaagactatggctcacatgaatccgtaagctctcaactcgcaggtcctcgtgacaaaatcaaggtctatattgtcatgctccatatgacataaaggtatattgtccacacttagtgtccctcgcccactgtacaaagatatcctcgagatgcttggggaacgtctgaatcgtaaaactagctctctcatcttatcgagaacggctccaactatactttgagtgatgctagatcacgcataacagatt

SEQ ID NO: 67827 - DNA, 623 bp, Arabidopsis thaliana landsberg
tgtatcatactgtgtgaaatttgtaacaaatatagttatctacataatattagtaacaaaataaagtattcttatcacaaaatattttgtatataatatttctctcatcataaatcaaagtacatgagattgcgtaattaataatacttatatgtcacaaaaagaatgacagacacttcttttctataagtttgacaaagggaagaaaagaaacaactctttgtgatcctgcccctttcataattccatggttcaccttcatgagggtttttgagtcaccttggaactgaaaggccaagttctagagcaacaaaacataaatgatcaccacgattaaattagggcactgaatgaggtgaagaaacaaaagatggatgcaaatggcttaatgaatctactataataatttagcttgacaaagcaatgctaccttaaaactagacaataaaatctcgacttaaataacttctcccaaaactaacttgtcagagatcattattcacagaacccacctttgaaaaaaactgcaaacacatctcacgtgccatcgactccatgtggacaaagagcactgtacattactatgttactgagtgacactgtaatgcacagagcacgaacta

SEQ ID NO: 67828 - DNA, 191 bp, Arabidopsis thaliana landsberg
  unsure (1)..(191): unsure at all n locations
gaaattcatggaatgaccccacaatcaagacataacatctaatgacatggcagacctggactagatactaacatactagaaggaacacaccctccgacatataggagaaccatcgagaggggaaacatccacgtttctggnnnnnnnnnnnnnnnnnnnnnnnnnnnnnnnnnnnnnnnnnnnnnnnnaat

SEQ ID NO: 67829 - DNA, 491 bp, Arabidopsis thaliana landsberg
caatctttcttatccttatctttctgatgactagaattagctgcatatatattgtttgtttgatattgacattgtatttgtacacataatggcttctatgtatatataagtgcatgcatgaatccgtgatgatggcacaccttaattacgaacataactttaaactgtattaatgatcgattagttatagatatataatatattgttgtttgcctccatggttagctagtttttgacatggcttgatatgctactgatgttttctaacgttgctgtttattgaattgtatatatcatatagtttaataatgttgatgaataagccgtgagtgatataaattccaaactcttttccacaagattcacactagattttgttttcggcagattccatgattgttgataatcttatcaaccaaaattagagagaaggcagatgaatatttaaagtgatggggaaaattcagtgtgtcaaaaaccgacgtcgtttt

SEQ ID NO: 67830 - DNA, 610 bp, Arabidopsis thaliana landsberg
  unsure (1)..(610): unsure at all n locations
aacccggcctgaatcatntgactgaaatcatctcattataaactctattttcatttgttttatcaccaattttctgaaatgccttaatcaatgcgtcatatatatctgcattaggctctatcaacctcttcttcataattttcaagtacttttctccggcttccactttaccacaagtgcagagtcccacaattagtgacctaaacacctcgaaaccaggagacatctttcggtattccatctcgtagaacagcttaagcgcttgatcgatatcgtttccttctataaaccctcgaatcagatgagagtacgtatgttcatcgggcacaaaccctttatctatcgactttgttaagatttcatttgcgcgattcacgttctcaatcttacttacactcttaaccatctcattgaaagccgaacaactaggcataagccctctcgttaccattacctcacaatactccaaacctttctcttcccacccgaacctcgcgaaaccaccgataagacaaataaacgtctcgtcatacggactcactccaaactcctccatcttactcaacaacctctccggttctttaacatcacccttttcacaacaaactct

SEQ ID NO: 67831 - DNA, 1257 bp, Arabidopsis thaliana landsberg
gattctatatatatattcagccttaattaaagccattctcactttccaagttttattctcgaaggccttcaagtcatccatgttggaagagggatcgtacggtgtaaattgacagtaacgcatcatgttttggtaaatttattctaccctttttctgttagttttttgttttgttttctgtgttcttttcatttgctggtgtttatgtttttccttcatatgattttaatgttttaattgcttttggtggtaaatttattctaccctttttaatgttttttcttttcaatgtgcattattactcttataagctagggagaacaaaacaatatccgaggacatttaagcaatatgttctagtatcagtttattacatgatacggtattttaaaataaataaaaattttatgtaataaagtatctttgatgacaaaacattgtttttggtcatagtattgacgaatgccataattgtattatacggttatattcagaatgaagacgggaccttacacactgcagcgattggggttctgatggagttgatgggagccatcgcgatctactcggctggaggatcccatacctcagttgatctcaactattcgttatactcgacagccaagattcaagttcgacctcttaattatgctaatatttgatcagatagttttaaaattatactagcattttcataacgtataaggaaactcacaaaatattattttgataaattataactgattttcttttggttaggtttgatagagtctgtcagtccggcttggttacggatttaatttttaaacaaaatatcatttagtttaaaaatgttagaaaaagaaatatatatatatatatatattatatatattgatcaattacttacttgagtttttttacgacaaaaaaaactcgttttatttctactttttcgatgaacagttgtttactcttatatatgggataaaaaaagtttgattttcgttgctttgtgttgattgaactattatggacatactgtatatatatatctaatttgatagaaacatgcaccgttttccacccagtatatatattttaatgtggtgaataaatctaggaagaaataaagatagaagcaagagtggtagggaagagatcagagaacctaaactcagcaataattgagattcgaagagaatacgaagaagaactcattgccacaggtagactatggatgagcctgttgaagacaccatttagcctaaatgtcaa

SEQ ID NO: 67832 - DNA, 435 bp, Arabidopsis thaliana landsberg
tggacgaacacactctatcgatacggtttagtttttaaccatgcagtaagagggatccggggtggaggttaccgaagggaacttcaaccacttgattccataattatatccatgtgggaccctgccaccctattcacatggtttgctaagcttgcactagtcattattactcgcgctcgaaaacttctttcccattttatatcccatcccatcgatgtattatccaatcagctctcttcagtctatgctagattgtccgaaccaccccgggagattatcataatgggcgatggccataagtgattatgatatagcctacatgaaccgagacaccatggaagctcatgtcctaacctttgttatgaacatgattaccggcacccccagcgattgttcagacggctaaccaaacttggaagctacacgttgatggac

SEQ ID NO: 67833 - DNA, 316 bp, Arabidopsis thaliana landsberg
tcacaagtaccacctctccagacacaataatccgaagaaggtgaagttgtccagtcataaagaacattgttcacatctttgaatgacttcttaatctccagcaacgttgctcctttaattttggtttaaggatattttattaacacacacgcacaaaaacaaaaaaaaatatttgtcagttcttgagaagattaaaaattcaacttccaagaaaacaaaataaaactccaaccctaatttattccaagcttcttttgattctatagaagaaccacccagttaaaaaaaaccatttccaaaaagcaaaatagaaaat

SEQ ID NO: 67834 - DNA, 580 bp, Arabidopsis thaliana landsberg
ccacagcaaccggagtagcgacacggtgagttcttcttgttgatgctattgtaaagacttgttagagcaaatggtaacaacagtttacagattctttcaaactcacaaattaaccaagatgagaacttacttgagtcaacattatctgaaacatagtcaacgttttcagagttagcctcagaaggagaattgttctcatcattgaacagagtttcactctcttcattatcattctgatccaattccacattttgatattgcaatagattactaaagctaaacctaaaacctgtcaaagaaacaacaaaccacagaatctcagattaaaccatcctacaaaattcagaaacagaccaaacgagttaagaattgttgttggaccttttctggagattgagaagtaagcaatagtagctaatacaacagcaagtgacgatccaacaccagtgattacaacattcctccactctaaactcacaaaaaacaaataatcaaatcaattgcaacacaaagttatgaaatttcttcaattttccactaacattcttcgaaagtactaaccttttttagttatcgaatg

SEQ ID NO: 67835 - DNA, 337 bp, Arabidopsis thaliana landsberg
gagccaaagcaccggcaagccacgggaagaaccaggccgcgcgcactactattacgcgcgagcaagacaaaaacgagggagcacagagcccaaagcacaacagcccgagaagaaacaacccagcaagctggagaacgacccctaccaggaatcaaacgcccgagcaagcagcccacggctgaccccaacggaaccgcaaagagcacggcgcggccaacgcgaaaagaccaaaacaaccacgacaagggaaaagaaccagagctctaactaaggactgccgaggagagaaggacacaaaattgagccagcagcgacacggaatgaaaaaacacaagag

SEQ ID NO: 67836 - DNA, 742 bp, Arabidopsis thaliana landsberg
acctatcagaaaaaacaaaatttctgaaaacagaacgtgaatttaataaagtagcacaaatcaaaactcgttgttttgagaagtaatcacggggataaagtgatacgcttcttataagatctatctcacaaagttgtctagtgggcttaatgagtaaagatataagcttattgttgaaacatacatatcctaagagggtttccttacttttttcttaacaaaagcttgttaatagtacagtttttttgtttgcgttcataaataacaaatgatgaaacttggagaatgtgaatgcgtgctacttttgctgaggaaataacattgtaaaaagtattcttattatagtttttagatgaccttttgttccctaaacctttaaaacaaatgatactaggcacccaacacataaaagccaagaattatcaaagagacagagatataacgtgactgttttgagtcaacatacttgcttcttcagcagttggaacgacggtctaagccataaggagatccaattcaacaaactcaaagaacccaaaactttttctagaaacccaagtgagaatatggtcatatgacaaaagacatttaaacaagattttctctatatggatgaagagatggaatcacattatacatgacaaagatatttaacaagattgcccctgctagcaacaattgggaaagtggatcaacacgacttactagatgagttttttttttgattatgtaataatcaaat

SEQ ID NO: 67837 - DNA, 567 bp, Arabidopsis thaliana landsberg
agaagatatacacagttaaaaaggctggtttggaactgcaccatacccaccagttccaaaatccactcaggaaatctctttcgtgcattgccattggaagacctttaatcaaatttaaatctcattatcttctttcttcactatgagagattcacaatccaagttaagaaaaaaagataccaaattactttcttaattaacaaatatattaccttatatttaaaacagtatattgtcttattttttaattaagcaatttaaataacaaactatcaaatgaaatataaaataacaaaaataatctctctacagattaacatagaatttcgattcatgatctattatgtaactttatcaagatcttaatattttgtatcatgcatattgttcgattcacttgttttagaatttgtaaaacgggttgcacaaatgtgagctttttttttttttttttaatagaaataactagtgattcagtatatgagaaagaaactatgccatataatgtgcgaaaagacaaaatttcaaactcattgaacattgaaagtcaaccggtgatgatagaaa

SEQ ID NO: 67838 - DNA, 626 bp, Arabidopsis thaliana landsberg
  unsure (1)..(626): unsure at all n locations
tcctgagaaacgccccagagaacgtacgattgatccttgttttcgtctttgccttttgatattacgtagcggccgtgatggtgcaagcggatatttgcatagtggccggttgcaataaattcacagtcaagcttgtctgcccgtttaagtaaagcttcccatttaatatgcgtattgcacaaaacgcatgggttaggggtgcgcccagccaggtactcatccacaaaattatcaattacgaagtcgccgaattcactcctgatatccagaatataatgcggaaagccgtagcccaccgccaatgcgcgtgcatcgttaatactgtcaagactacaacagccggtttcttttgagcttccaccggaagaggcatagtcccaggtcttcatggtcaggccaatcacttcatagcccnnnnnnnnnnnnnnnnnnnnnnnnnnnnnnnnnnnnnnnnnnnnnctcattgccactaatatcctgccatgcttactcataattntgcaaagataccatttatcaggctgaaattngnggtgggtcagaatttgaccgttggcttatatttgtattacttaagccccggggcanggtgactgatacgataataacaatataagcagcaccct

SEQ ID NO: 67839 - DNA, 736 bp, Arabidopsis thaliana landsberg
tcatcttagattctcttatctacctttgtattttactatttacgaaggtgatgaattataacctttgccatcagattcatcacgaagatctgtctaaattagacaccaaaaacaagaagatattttttagtaaatatccaaagttagaaaaacaaagagtcttcacttatctcgtgtatatactacatagtagcattcgtctactttattcaaaatttccaaccgaggaaataacatttcttggttacaaacaaaaacggacgaaaatatttcttacattcacataaacattttcaaacctgcactaaaatcaacatcaggagatgattctagtatgactatcagactatgacacaggagtagaagtatttgtatttgtagaggaagatgccgccggcgagttgcaacttctctccaacgaacgttttggagattgcgccaccgcaaccggagcatatacaccacccttgttggctacatcggacggtggaggaaaatcttgtgacgatggtacccatatgcctccaaccaccacaaattgcggttgttgctggttcccggtactttgtaccgccacggatgttgctgctggccttcttgtgtgaagtctatatttctgaaatattacgcaaaatggttaagaacttgagtaacatttcatttaattaccaatttcacgaacttgtgattataacataagaatcattaatcactaacctgtaaatggcttttaact

SEQ ID NO: 67840 - DNA, 703 bp, Arabidopsis thaliana landsberg
gaatgtgtaccaaaaatgacaccttaattcgtcgtcgttatcattttatcacaattatccgattaggagaattatgatttcaatttttgctttctgaatttgaatgcttttaatatatatatatatatatatatatatatataatatgatgaaagagaaattcattgagtaatcaagaaagatgatttgcaaaactaaccacttttgataatttaatttaaaatataaattaagaaaatttactattaagaaaaaaaaattattgagatttctcaaaccatcaatctcatcaattggtaaactactctctcaagatgccacgtagacaaacactctgatagctaattctcaaatgccacgtgtacctgcaaagctttcctacttctcaaaacgtgagaaggtttcattgaggaaattcaaaacgtcattataaacactcttcttagtttatgatcgtctcctctccatctatccctcacgggcctcacccttcttggtttataattttagaacattaattactagagtttatgatttctttcggttctctagggttttcacttcgaattgaagccgataacatattaaaatttagtcgaaggacgaaactttttggttttgaccgtctagattaacaaattttcttttctttatatcgttctcacatccgctattttatcaatcatatattttcacaagcatc

SEQ ID NO: 67841 - DNA, 564 bp, Arabidopsis thaliana landsberg
ctcaccatctcgaggatgactagaattatttatctctgttttattcttggacttttgtgtttggtttgatcttgtttgtcttaaagaatctttcgatttgtagttgttttgtcgacaataactatatccttattatttgtttatgaattgtctaaagagttcaagttctttaactctcttgtcatttcaatttttatttcttgtctttgttcgttttgtctttgtttagcccaaaatcttttgtaatcgtctttttgtggtattctaacttaaacgattgttgcatgtttttgtcatgtgtattctaatttttttttttggatgtgtttttattacttgtttgtgtgcagcttgttgatttgggaggaatgttacaatgaaaccgaatcgagctcgaatcctagaagactttgtggacttggtgttgatacacaagggaatgagaaagttcagttgcttacaaaccgaatgatgttgtacaatcgaatcattttggtaggtgaaggtctagttggcataacagcattatctgggcatcatcaatggattatagctaacagtttt

SEQ ID NO: 67842 - DNA, 447 bp, Arabidopsis thaliana landsberg
tgttccacgtcactgcctgttcggcgatgttgatgggagcgatggcggcgggccacaccaccatcttcatgctcaaatgggatgctgcacgcgcgatggagattatcgagcgcgagaaggtcaatgtgaccggcggcgtcccgactatcgcatggcagctgatcgagcatccggatcgcggccgatacgatctctcttcgctcgaggcgatctactatggcggcgcgccctcggcgcccgaactggtgaagcgcatctatgaagaattcggcgcgctgcccggtaacggctggggaatgaccgaaacgacggcgacggtcacgtcgcacggggcggaggattatcttgatagcccgaccagcgccgggccgccggtcgcggacgtctatctcttaatccacaaccccgacggggataccctggtgactgtggggacggttggctagc

SEQ ID NO: 67843 - DNA, 292 bp, Arabidopsis thaliana landsberg
ccggcatcttactgaaataatctccaaatgaactcttcatcctcatcacctgaaacaaacacaatctcaaaacctacttttgaagagagctcgttgtagacttccaccagctgtggtgtaaaccgctgacacggtccacaccaagcagctgaaaaatacaatccaatcttcttccctatcaagctgtcaactttcacctaaacatcatcaaaatgcatatcaaaccaaatcaataaagtccaagcacttcaattcaatgaatcttaacacttgaaagcaatcaattaaggtc

SEQ ID NO: 67844 - DNA, 601 bp, Arabidopsis thaliana landsberg
  unsure (1)..(601): unsure at all n locations
ccgacagcgtcgaggcgagcacgaagacgagcacccccaggacgtacgtctgtcgacggccccaccgctggctcatggggccggcggccatcagcagagcgccgaaggtgaggccgtacccggcgaccagccactcgacggcggagtcgccggcgccgaggtcacgctggatcgagggcagggcgacgttnnnnnnnnnnnnnnnnnnnnnnnncaggaaggtgccgctcagcagggcggcgagcgggagccagcccggcgcggtgcgcgccgcggtcggcagcgctcgtggagaggagagagtggtcatggcaccgttctcgggcctccagcaacgggagagtcaagagccggtccatcccgttgaccctcccccggggggagacagcagactggccggcatggacggcctgctcaccatcggcgacttctcccggatgacgttcctctcggtgaagaccctgcggcactaccacgacgtcggcctgctcgcgccggcgtacatcgacgacgccaccagctatcgctactaccgcgccgaccaggtctgcaccgcccagctgatccggcgcttncgctcgtcgacctgccgtcgagcagt

SEQ ID NO: 67845 - DNA, 443 bp, Arabidopsis thaliana landsberg
cccaccgcttggtcagtacttaatatttaataaacggttgcttcatttttggacggaaatggttgatttggtggtccaaggaaactcaggtttaaggtatggaagcgcataaggaaataatggtcccaaattcgctcttcattccggataatcgaggggtgggctgacccagccaaggtctccgggaaatgcgttccctctgcagactcccggggtgaatggcagactcggagaaaaacagtaagcttcctgttggttcctggattctggttaaggggatggagtttgtacacccgttcgggcaattgagagatacctatcgcttgtttgtttgcttgtttgttttagtaatttctacgtaattgggagttcatccagggccatcagttattttctgatcagttatttgccatgggagctctggaacgccctctactgacgct

SEQ ID NO: 67846 - DNA, 432 bp, Arabidopsis thaliana landsberg
ccctcgggttccatgctgccgcatcgcctcgctgatcgtttttccggcttaccccgaaaaccttttgtagctgggtctggcgaagcggggagtcggccttgatcgccccttcaagaatcgcttcgcgaaggccttcgacggcgatttccatcgcggtcttgaagcgggcgcggggtcgtgcggcaatctcggcaagggttggcattggctcgtatgtcgcctcggtcggtgtccggatgggtcggtctaacaattttcaaaaacgttcttgacacgctccggctacaccgtcaacattggatccaatgtatccgattgtggatttttaaggagattgccagtggaaaattcttctagaaagccttcggttgccgccatccagggccgcatttccgaccgtagccccggtggcttgatcggcgccggcttgct

SEQ ID NO: 67847 - DNA, 515 bp, Arabidopsis thaliana landsberg
  unsure (1)..(515): unsure at all n locations
ctcattgtgtactccatgcatctttgtagagggagttaaagtgtctttttgatcattaaataaaacacaggccatgggagattaaataagaaggaacaacttgcatgtagagatttcagcgaacaaatacaattctctagatataaacaaatgcataggatatacttaaaagaaatgagattatttatatcacaataattaccatcttcaaacttggttatcacccattctctcaaattagataaaaaagttgttataaaattgaagctatgtatcccataagcaaaagaagacgaagctctgatttnnnnnnnnnnnnnnnnnnnnngagttaaaaccgaaaagaaaacagtttaacaagaaagaatttatcttctctcatatcagaagagtttgcgtttaacaacaagatgcatcatcacaagtcacaagatacatcaaaagatacatgagacttcatatacttagtagataaccctaacttaattaggaaaatcaagcagagacaaacacat

SEQ ID NO: 67848 - DNA, 484 bp, Arabidopsis thaliana landsberg
atacaaatcacaggatagaaaaaaaccaagaaagaaacgaaaaattatacatattggcaaaatgacaccaatatagcaagggtaaggtatgattagacaattttaggatcctaaagagagtccatcgattgtgataatagttatgtatcattatcattcgaaaatcttaataaactatagtggaccaatacaagcacgaagattaaacctcctccattcaatttcgtattcgttcatactcaaaatttaagaaaataacaaaaaaatgacgaccatcggattcaatcttagctattcattgaaacgacgacgaaacgaggaaaaggaaacttatgatgggacaatcaatacgctgtcgtttaaaaaacaataattattacgaaacctatgaagaaaaacacgatcaaaatagagaaatattgaaattcgggcgttgagagaaaaacgttgaacgatgggagccgttaatggagaaacgccaaac

SEQ ID NO: 67849 - DNA, 163 bp, Arabidopsis thaliana landsberg
tctgaatgggattattggtggtgggccatcagatatcacctaagtacgaaacgtttttgtacagacagctggaggtcttttgaaacgctaaccagacggatccattgacgcgatacgatttccaaacatcctcatgacgcaaacgccatttactcctggggtg

SEQ ID NO: 67850 - DNA, 375 bp, Arabidopsis thaliana landsberg
  unsure (1)..(375): unsure at all n locations
ggctgggcatccgccgcctgtgcgcgcagcgtttgcgcttcgaacacgccggcgacccggacgccggggcnccggtcgccgtcgcgctggtcgccgaactgcggcagagcccggtggcgatccacaccgacgccgccaaccgccagcactacgagctgccgcccggcttcttcgagcagtgcctggggccgcggctgaagtattccggctgctactaccccaccggcggcgagaccctggcccaggccgaggaggcgatgctggcgctgtacggcgagcgcgcgcagctggccgacggccaggacatcctggagctgggctgcggctggggttccctcacgctgtggatggcgcagcactaccccaacgcgcgca

SEQ ID NO: 67851 - DNA, 268 bp, Arabidopsis thaliana landsberg
cctaaaatctcgatctatccccactgtaaaaactcggattttgtggccgtaaccaagacgaagatttcttttcttatgacagctttaatccctcttcaacctttgattgcaagattgtaaatctcctttgccatagatatatcgttatgtcatgaatcaacgcaaatcaaaatcctaactttggatcctaaccaaagccaatgaaaataaataaaccgatttgtgccttttcagagaaacccactctaaatcccggagcttgatcata

SEQ ID NO: 67852 - DNA, 297 bp, Arabidopsis thaliana landsberg
ctccatcacccctggcgactgcgcctggtcatcctgctcttcggcctgctttcggcggtgctctgctggcgcctgctcgaactgcatctgcatcagcggccgttcctgcaagcccatggcgacgcgcgcagcctgcgctacctgaagatccccgcccatcgcggcgagatcaccgaccgccggggagcgcccctggcggtgagcacgccgatgctcaccctctgggccaacggcaaggaactgccgcggcccccgagcgctgggcggagctcgccagcgccctgggccagacgcccg

SEQ ID NO: 67853 - DNA, 459 bp, Arabidopsis thaliana landsberg
  unsure (1)..(459): unsure at all n locations
cggcaagcggtagccatgacgcaaggcgagagtcacctcaaaacccttccataacagcgggggaaaggggacgtattgaccggttaggccgctctcgcgaccgtcacaccagaactagtaggcgatgtcagcctggtacaggttgaaggactccaggacgagggcgannnnnnnnnnnnnnnnnnnnnnnnnnnnnnnnnnnnnnnnnnnnnnnnnnnnnnnnnnnnnnnnnnnnnnnnnnnnnnnnnnnnnnnnnnnnnnnnnnnnnnnnnnnnnnnnnnnnnnnnnnnnnnnnnnnnnnnnnntgaagtcagaatcgacagcgttcggatccagtgcataaacaccacacatcctgggaccagatcctggcggaccagacacccttcattgcggtcttaccttgcgacttgccgaacccgacgcccagcagacagaccttggcaacttaccagcagc

SEQ ID NO: 67854 - DNA, 348 bp, Arabidopsis thaliana landsberg
  unsure (1)..(348): unsure at all n locations
nnnnnnnnnnnnnnnnnnnnnnnnnnnnnnnnnnnnnnnnnnnnnnnnnnnnnnnnnnnnnnnnnnnnnnnnnnnnnnnnnnnnnnnnnnnnnnnnnnnnnnnnnnnnnnnnnnnnnnnnnnnnnnnnnnnnnnnnnnnnnnnnnnnnnnnnnnnnnnnnnnnnnnnnnnnncaccctctcccacttctccagccagccacgtccggaactggacctgtcctgcgaggaaccacctgctcaatcaacccacaccattttcgccggcacccccaatccgtacccaatgcgaacatcggctgtcaacccttattccaagccatgtcaccccaccctcaacctgaacgacc

SEQ ID NO: 67855 - DNA, 1489 bp, Arabidopsis thaliana landsberg
ttctctaaaaccacaggaatcttcagcctctgaagctccttcttaggtccaatcccacttaacatcagcatctgtggtgacccaatagctccactagataagatcacttcacttccctttctattcgagagtaaagcctggtgttgattacctttctcatctttgaatattactcctgttactcgaggccttgttcctacatccaaaaccaaaacaaaagttaaaaacctcctcactcaggaatttcatcgaacatttggtagacacaaaaatttatcagtaccagaagtgtcaaagacgattttttgcacggtggcgtagatcaagactctaagcttctgaggattagcgtaagcgagaagctccgccgcggtgtgacgacggccgaatctgtcgaatattgtaccgccgattttggttccggaaacgtgatcgtaagtgaaaccattgaaaggtctgactccaacctctaaaagactgtctctgagagctttctgccataacgttaactttggctgatgaacaatctctctctccacccatggatacgactccttcaccagcttcggatcccatcctgctcgcttcacgaacctgaatgttttgtcacaatttaaatcatttatttgttcttaccttattttactgaacaaaaaaaatagtttttatgacagtaaatcagttttttcgagaattttttaagaaatcaatttttcgaaaagaaaaaaaaaatggttgcaatttttactgaagaaaagtatttgttaaaaatattgtgttgattagtgtgaaaaattaaagagaattaaaagtcttacggaccattgcccccaaaattattaagaaaacacaacattctcgctcggtgcgttttcataaatgtaacatatccactaggacacgaggcatcgattataccaataaatccttttagtagtatataataaacaacataattttcttgtcttaaaaaggtaaaaattatacttacgcagcatcggctctggagtaaaaaccggcgttaatacaggaaccgccaccgagaactctagcacgggcgttgtaaacgccgtcagtggaaacaaacgcttgagacgcggaagaagctgaaatgtcagcaagtccgatgtgaaaattcctgaggaaagaaacgtttgcgtttgtaaacggaacgccacctctctctaaaacaagaacgctgaaattctgcgacaacgttgcggcgagaggacaccctgcggttccacctccgatgactatgtagtcgtaggacgaatcttgaccgttggatgaaaatgaagatgaggaagatgatgagaatgtgcttgctttatcgatgaatgtgtatctgtatggattaaacttcgacttcttctctttacctacaaaatcattgttttttttagttgtactattcaataaataaaacaattttgggtagttggtagaagtaattacaccattaatgtgtttatagcagaacataacc

SEQ ID NO: 67856 - DNA, 468 bp, Arabidopsis thaliana landsberg
catcgtcaaaaatttctgtaggtattttattaaacttattctctttagtcgaattgaaggtgttattttgttaggtagtggttctttccacaaactaacttatcgatgtgtatgggtataatatttctacatcagaaggagatctttttagggtgttcacattaccaaaaaaaaaattacgttataaaaaaatgaacttatacactattttatcagctttcattcaaaggaaactattcagtgtcgaaaaagattatttgtattccttcctccccaataaccaaaaatataagtatatttcaagttaatcagtattaacatggattaaaagccaatattttggtgatataataatcaaatcgtttaaagtcattatgattttggcttttagtaatctaaacaattgaatataacaaaaaaaataagaatctgtctccaggattcgatttgagtatggagcattaatat

SEQ ID NO: 67857 - DNA, 555 bp, Arabidopsis thaliana landsberg
actaaacatatcttagtttcgttgcaaactcataatctctcaaagacagaataaatcgcaattgatttatagatcgaaatcgcacaagaaagactgatgaaacatattcgaaaagaacatactagctagtttgattggatcataaaccattaagcctcgatcaaattctgttcaaaaatccactatcagagaaggtttgttacatctcaaatttcatgaacagcaagcaagaatcgagagagattaggctcaatgaactcttggatacaacatagaagaagtataagtaaagaacagagtatttatacactgtttatctgttatccgatgtaacaacaaaccctctgacttgttcagagtttttttttttgtttttactttgctctcccttgaattgaagtcctctcctctacttcaagtcttcttcaccaattcctcttaaatcgcagataaccagctcatgtgtataccagaccgatattgattaaatacaatgggtacactagatccctaataaatgaatgtataatgctcccaattgaaagcgaaactgaa

SEQ ID NO: 67858 - DNA, 140 bp, Arabidopsis thaliana landsberg
gatgatcatttatatatatgtaggttctaggtaataactgctcgaacaaaacctaaaattcttaactcgctggccaataaacttattaagaagctcgtaccgttcgacttgagcaaaagatctttactggttggcctata

SEQ ID NO: 67859 - DNA, 469 bp, Arabidopsis thaliana landsberg
  unsure (1)..(469): unsure at all n locations
ctcgggcccccacacttgttttctagaactagcctaggctctttaagcttttcgacgaattcacatcctaaatgctcgttttaggtagtacataaataacctttttattctaatnnnnnnnnnnnnnnnnnnnnnnnnnnnnnnnnnnnnnnnnnnnnnnnnnnnnnnnnnnnnnnnnnnnnnnnnnnnnnnnnnnnnnnnnnnnnnnnnnnnnnnnnnnnnnnnnnnnnnnnnnnnnnnnnnnnnnnnnnnnnnnnnnnnnnnnnnnnnnnnnnnnnnnnnnnnnnnnnnnnnnnnnnnnnnnnnnnnnnnnnnnnnnnnnnnnnnnnnnnnnnnnnnnnnnnnnnnnnnnnnnnnnnnnnnnnnnnnnnnnnnnnnnnnnnnnnnnnnnnnnnnnnnnnnnnnnnnnnnnnnnnnnnnnnnnnnnnnnnnnnnnnnnnnnnnnnnnnnnnnnnnnnnnnnnnnnnnn

SEQ ID NO: 67860 - DNA, 281 bp, Arabidopsis thaliana landsberg
tcttcctttggtccgcacaagtcctatgcagacagtaaggaatcccggtggaaagctccctaagagagccgtgcctatataaagcctagaacggcacggatccacccgttgtggtcttgtagacgtaattatcactcactttactgtggagggtaatctatctgaagactactcacttagagcttaaaggataaacttttgctgaatcattggatgcatgacactaattctcgagttactatgtttattttacaaatatttgatcagcattattgcgtcat

SEQ ID NO: 67861 - DNA, 194 bp, Arabidopsis thaliana landsberg
gtatatacatttattcagttctggaagcaaactatatagagatactatagatggacatacaccatgataagactactaatactatgtgggcgactatatcatatggacatcggtagggacctatatatatatagattacttactactcatttcagaattcggataatttcatgtattatacaataagaaggaca

SEQ ID NO: 67862 - DNA, 242 bp, Arabidopsis thaliana landsberg
  unsure (1)..(242): unsure at all n locations
aaatattcttcggccactttaattttctggttggggtacctaaaagttaaggggttaattagctttaacacctaccctaaataatttaccggttcaatatatgtacatgtctagtttttttttcctgtgatcaaactataatcttcattgaagtagtcttaaaaggttcatacaaacagtagaattgcgcaaagaaaacangagctttctttgggctaattgcanttagcctggacacatta

SEQ ID NO: 67863 - DNA, 385 bp, Arabidopsis thaliana landsberg
ccgaacgggacactaatgtaatgactatgaatggcggagaaggtctagcatttataggttggacaactttacgaggaatgtgctaacggagatatgatatggcgtgctggaggaactcaaaacaggtgcaacagtggaccctagggcaaattttttacttgaatgcacaacagccgggcataatacatggactctccctgggttaatgctttcatctgactgaaaacacaaagagcatgcgtagttatatctacccactatagagatggagatacttcaaagtaggtagatatataaaagcgcccctcacagaccttgagatgaagagacaggtacgtgagtctgccacaacagatcgtttcacctgaactattagattttgcta

SEQ ID NO: 67864 - DNA, 1026 bp, Arabidopsis thaliana landsberg
actcaaaagaacccagaagaaagaagattggaaggatcggctgtattcagaaattgcgttggatggaaagaatcagaaatctcttgaaggtataaggatcttgctggcagaggatacacccgttcttcaacgagtagccaccataatgcttgagaaaatgggagcaactgtaactgcagtctgggatggacaacaagcagttgattccctcaactacaagtctatcaatgctcaagctccaactgaagaacacaaatcgttcgaagaagaaaccgctaacaaagttacaactcgggagactagtttactgaattcctcgccttatgacttgatcctcatggactgccaggtacaattacttttttcatttttgatttcaattccacatgtaaagaagacatgacaatttattaaacattttctcatggtagatgccaaaaatggatggatatgaggcaacaaaggcgataaggagagcagagattggcacagagctgcacattccaatcgtggcgttgacagcgcatgcaatgtcttctgatgaagcgaaatgcttggaggttggaatggatgcttatctcacaaagcctattgatcgaaagcttatggtctctaccattttgtcactcactaaaccatcagcattccaaacttcattgtccgcttgaagaatcgggtaaaaatctaacaagtgaacttttttagtaggttcaggatcttgcattttgtatatatgtgaatttgtagttgacgatgaggtttttgggggtaaagaaaatcctgttttttggtcattttttgtttactgcaatacgaagaatgttttgtacttaaacattgtatacttgttttaaagatgtgaagaagttaaacgaccaagacaaagtttcgcagcttttgcagcttatgtttcccttgcggaagcaaagttcagacaatgcatgttgtttcgatggtaagtaagagaaaatgtagttcagttgtaaaccggccaaataaaaagggttagctaaaatggcccatgca

SEQ ID NO: 67865 - DNA, 292 bp, Arabidopsis thaliana landsberg
acaaagcccgcggggacatcaccactctgctcgctccgacttttaaagactacaccacggcagaagtctatgttttggcggcaatcactaatttaagaatctgtgattaccctcaaattcttaaggatggaagacagtttaagtccactcaccttgagcgcattaaagaaatggaacttcttgctgaaaacggcgtcaattcacaaattaaaaatattttagataaaatggatgaaactggagcaaggctctcagctgcggccggaaaattagcttctcttccccgactggc

SEQ ID NO: 67866 - DNA, 380 bp, Arabidopsis thaliana landsberg
  unsure (1)..(380): unsure at all n locations
gnnnnnnnnnnnnnnnnnnnnnnnnnnnnnnnnnnnnnnnnnnnnnnnnnnnnnnnnnnnnnnnnnnnnnnnnnnnnnnnnnnnnnnnnnnnnnnnnnnnnnnnnnnnnnnnnnnnnnnnnnnnnnnnnnnnnnnnnnnnnnnnnnnnnnnnnnnnnnnnnnnnnnnnnnnnnnnnnnnnnnnnnnnnnnnnnnnnngataaccccacacatgggtgaatgagacatactaaaacgggacgtacatacttgaccaatttatatctttcaacttctataccaagaggaggtgcttgcaacgtatcagtctaagcctgcaggattgctagatactctagacttagagcattcagcgctgtgaactcctattcattacccaca

SEQ ID NO: 67867 - DNA, 653 bp, Arabidopsis thaliana landsberg
atcttaaatcatatatccaagaacaactatacccttttataatctttattttgttatttactaaaatataatttcctttcttaaatgcatttgtcaaatgatactttagttatatattattagaaaaagaaaaaaattagaaattaaccattaaattgtgtaattaaactgtttttgcttcttacatttcatctcattgcattcatttattattttaaatttctgtatagagctattcacatttagattttccatcaataatttataaggtttgttataaatctcccataaatcattataaacatcttgtgaaaaagaatttaaatgtacccatttttgttgtattttagtcttgtgtggatccaaataataaactataccaatattctttttttttcccgtttgaacaacaaactatactaatattctaaaaccaataaactaaaccgaaaagaaacgtgaaatcaccagtggagtgcatggtagttaaagggccttatggtatgagagtcctaccaagattattgtgtgcattttagactaacattgtagtgagtaacaacttttttttttttgtaaatgaaaacatcatactttgtaagtgagtgactgtaatacctaatttattaaaaaatgttgttcatgtgaagatg

SEQ ID NO: 67868 - DNA, 343 bp, Arabidopsis thaliana landsberg
tcgactgttagattccaaaccaaaccaaattgaattgttccaatttcgattcctacgaggtgattaggtttgacacagagagtgagagggatttaccttcttgagaagatcaaatctgatgattgattgattagatcgatggaaactcgatctggtcgatgagtgttaagaaaatttgaagattgatcggagtagaagacggtggagagaattggatgataaagagcgagctcgttcagaatcggacacgaagaagcctgttttgactcaaggggccagttcgttacccgacaagatcattaaactataaacgacgtcgcttgcttactctttgggttatttg

SEQ ID NO: 67869 - DNA, 648 bp, Arabidopsis thaliana landsberg
tagtttgctcgattgtaatttgagaatatagagaaatgcctgatccatttctctctattcggaatcgtcatttctttgggttgtcaaagagagtgtattttaaggagttgaaattaagcttaatttggaaccatgtcttccattatctccatgtataagtagcaaaagattatgtctttcttgaacattagcaaaaggcaattgtgtgaatatacatttgctgatggattctcttcatcttgtaggactatttttgcctgcggttgtgaggcctattctagactctctcgaggcttccaaacaagttaaagctcctccacttaccgatgtatgtattagaatatatttatctctgtggaaattccttttgctgctaaaatcgtcatctatttcctatctaatgaaatgtctctgatgtgggaactctgcatgatagttgttcttagtatccgtgtaggcgaatgtttggacgtttcttttttttgctatgtgatgtagcctatacatcatctcgatgttttgttcctcctgcgtcttcttgtgatttgagagttccatctttggttcatccatgccttaaaaatctatgcttttcatcattggacgagtgtcatgatcacatttttgttactgcccaaaaatggattg

SEQ ID NO: 67870 - DNA, 302 bp, Arabidopsis thaliana landsberg
ggaccacggaacttttcaccacagacgctaaaagttatttttgaaccgttttcgttctctagaagcatcccgggacgagattcagtatcagatgcagggacatgaatagaatgtgaccgtgggcaatctatttctgagaccacatcgcctacggcgcgaggacttttcaggcactcatgcttgagactatcagctgtgtccagcatgggactcagaatatagcgcctgttgcccctgtaagcttataaaatagactaaggatccgccgagcgaaacagggacatacacaactgtaaggggga

SEQ ID NO: 67871 - DNA, 229 bp, Arabidopsis thaliana landsberg
cggcttcaccacattgccaattttggataaactctagatgttattttatgtttttccttttactccgcagctctctataatgggagtgatcgatgtaggatataaaaaaaaaaaaaagtggttctcataggttagagtgtgtcaaataaaaagtcttaattagggtgaaataaaagaaacaacattgctcaagggcttaattcagctcaccacacatcttaatgagatc

SEQ ID NO: 67872 - DNA, 638 bp, Arabidopsis thaliana landsberg
acgaaaacgcgtacggagacatgtcacatcagatattcaaatccaaagcaatttaacagaagatgaataacgataattttattggctttagactttagtattgaataatcaaaatcaataatctgtatataaacaacaataactctagtcgaccaaaaattatattgagtatgataatgtcatcttatcaccacgttatatacaaaaatgaattcgtgcatcgagacgtacgacacagcattcctttgtacggaactaactttaattaaaagttaataccaaaattatatcaagttactcaacatatgtgtatactaaagtattagaatttgaatttcaacagtttatttgtaccttcggatcagagttgccttaagacttcagaggaaattcattagtgatgactgtttaattcttcaaaaataagaaaataaaaagatgtaataaagatatcccttgttgctgtgataatttatgttttcaatttttattgttggttataagttataacttaaaattatttcaaaattaaagggaccaacctatattaatatgagaacgtattcagttgtaaacacacaattcctttatactgataaaactaacagggaaaaaacttgttttggttaaacttatta

SEQ ID NO: 67873 - DNA, 422 bp, Arabidopsis thaliana landsberg
gccttgtttcgtctttatctcttgacatgggtttatctgtatcgttgagaaattacatgtctttgaatcgatgcctttgaacaggtctcgttgtttgggtttgataagcatgttcttgattttgggttttggctttgaaaattttcgatttttatcactttggataacttctatgtgggttactttgattttgtgtgtctgtgactgatcatgtctcgggtcttgtgcaatttcttttttttgctttggatctgaaatagttgatcttcaatgtatctttgcttatatgttcttatgtgactctaggctgcatcttgctaatatgatgttcatgcttgacaatgaatgaagcatgtttttagtagaccctgtagttgcctatcttttcttggttaatgacctattctttttaatctactctt

SEQ ID NO: 67874 - DNA, 1727 bp, Arabidopsis thaliana landsberg
  unsure (1)..(1727): unsure at all n locations
ttaattttttatagcacgagcaattggagaaccggacaagggttgatgaacgataatcgtaccatttttggatgccgagaaagatcgcgagaggaggattaagctcttttaccagactctggaggcgccaccacagcttaagctcaggtctgttataagcggcatatttagggttttccaacctaatatgaagctcctgtagttaattactaatttaccctttaatgttgtttttggaggaaaaagattaaaatactataaattatcttttgcaatattaatttttgctgttttaaaagtattcggaaataagtaaatttgtaaatttttcacttctatacattacgatttagaatccactgaagactaaacaccagacgcacaaaaaaaaagattgagctacttcgtcatttaaaatgtacagagaagaggttgagttatataagacaccgagcgagagcaaatccaacgccggtgggagtgattgcgtcagtcactcatcattacaacattacatacaacaaactatatatatattcttcttggtctacgtccaaatgttttgtctagagaactaaaatttaccaaaaacaaaagtgggtgctcgttattgggacaaggatatagtacagccgagttcccgagccgcagtgtcgagaaactgagtaggcatagttgtggagagcaagctgtgagcttcccagtttaaacagttttgaatatcggctttccagtctattgaggcggcgttgaagaatcgataggacggactattcattccgttcttctctgttgttggcagttttggagttactttgatgggtatggagctttggttcatgatatcacgtagtactgacgtgcttaaggcacgtacgtgtgcacttgggtgtgaaaggcaccgtatnnnnnnnnnnnnnnnnnnnnnnntagaagcaaaaagatgtgaacaaggttaagcactttggtaactggacctactactgatcatctacaatcgacgcaggaaaccataggctctgttcgattctgcttttaccttcaatagattggataaaccgtcgaccactgctagtccagatggcccccaagctagcaccggctgtattgctcttgccgtggcttcaagtagctgcaaaagtttaaaatacagtggaatcagaaaatgattattactctagcccgaagaagggcattgaagagcaatctataacagtgcagtacctcaagttgaggtaatgtacaagcttctccatcaacaagcattccatcagttgcccgcagaagaagatctgatgcacttgcgagaatcaccagtgactcaggcctgtcatgattgcgcatgagttccaccaacactttgactatccgttggttgattttccacattttttggccttcttcatcatctttggcgatccaaggctgcaactccctttcagcctgtaaataacacaagaccatttcagacaatagagcattagagtaaatccttcaacatatgagcttgaaacaagccattattttacacagattttttcttccttatttcctatccttggcatattaaaacaagtgttgcatataaattccaagcttaatttttataaattcatgagagatcaaatgagtgaaccaagcattataaaacattaaaacaggccataggttttccgcagtttaatctttacacaggtgttgcattcctgacaaatgaaataaaaagt

SEQ ID NO: 67875 - DNA, 1407 bp, Arabidopsis thaliana landsberg
attcgatctcctccgtcaggtttgttttacaaatcttgcttctgattttactaacatggatcggtataaatagatagaattgataatgatctacattgagaatagatagtctttgattatgctctcaattcaattctaggcagagactaaagtactcaaggggccacatgaggacctggaaagttatctggatgcaattgctcaactcagaaagattattcgttattttatgagcaacaaaagctttaagagtagtgatggagttctcaaccacgcaaatagtttgcttgctaaagcacagtcaaagctggaggaagagtttaagcagttgctagcttcttacaggtttgtgcttctgcgcctgataagagtttaagaagctacatgatttcaaacttgatgctcttgctataactatgactcataccttgtaacttcagggaacaaagctattgtggatttttagctactttttctagttagtatttttttgggaactggtcttcgctctatgatggtcttacttctttagttatctttcaaataacctagaatacttagaatgacctttttatctaaattatcggagttgtcacctgacaaagatttttttttgtgaaatcaaacacttgtcaatatacaagtttcctatgatacgagtgttccagacaactggttttagatggaagaatgctaaggccaactctttttttttgttataatcagtaaagcggtggagcctgatcgcctatttgatggccttcccaattcactgagaccatcctcagacggggatggaggtggaaaaccccacggaggacatcacaatgatgacgcggaaactgctgcttatacacttccaatcctcattccgtcacgggtgttgccacttttgcatgacttggcacagcaaatggttcaggctggtcaccaacaacagttgctacaaatttataggtgaactattgattcttggtcattcatcctgtatgtcgtacagttcattttcaaatcaggctcttagcttaaattttcaactaataattgtagcatgagtcaaagtactgagtcaaggtatagtttctttgaacgattgcgggtatacaattaacttacatataattctcaccagtcaccgctcatttacaaagtagtttttccatggtttctgcaagttgtgagtttatatttgactatccttctgctgtttcactagtaaagctaaagagaaatgtttttgaaatatgaatttctattgacactcatcaaatagtttggctgtgatgtgcacatcgtgtactccgctgtttgtgcttacctgatctgaaaacattattgctagatgcaattcaatatgtctcatatgtgtaatgcattggagaagctatgtcatcctgtggtctatat

SEQ ID NO: 67876 - DNA, 1264 bp, Arabidopsis thaliana landsberg
gaaaaatctaccatcgaagatgagagaagagagaaactgctttcattatttgctggactagtaaaatcaatcagcaagcatcaggtttgtcttctctcccgaaactatcatttctcatcttgctgttatccttgcttgcctcgtaactgttatttgcttttgttatatattttcttcaggatagttacgggatccaaaagctaaacgaagcagctcaaaagatggatttctgcaataggtacgatacttcacaacacttagctctctgcaattgattctttcaaaacctccctagtcctataaactcgaacatgaaaacccatgtggtatacttgagaagcagaaacgatagttgagtcggtgcttatttaaataactcatatgatcaaacttgtggattttcttatctggcagtaatgattcatgcattgtgtaactctggtttaaaatcgcaggttcccggttccattataccctgagctgattcacgaaagactagagaatcagtactacagaagtattgaatcgtttaaacacgacgtggatgcaatgctctcaaatgcggagttgtatttcgttagaagtgcacatatgctttcgaagataaagcgactgcgagataaattgacaaaaacgttaagaaagctgatctgaggataaggcaacaccggtatgcttcttttggtcctttcttgatcttgtaaacacgttaggctgcggcagttttttcattatatagcgaagagagtgttaaaaagaaaatttaaaagttttcactctaaacaaaagaagtcggttttgtttgtagtaacccgacacaggtttcatgtatagttttagtaccacatgtctgtaaccgaaatttactctgttgtcacaaaaatgacatcataagtctaattttattacaagaagattattatcatttcatttgcaaactaaattgtttttcgttttaactactaatattaacattttattttcgttttaactactaatattaacattttattttcgtttaaaaggtttgtgaaatcgaaaacaaacattacttgagatgaaatgtaataaaattaaattaaatgaaaaccgaccagagaaaagaataaaataaaaacagagtaggttgaatagaaaacacggctgagagaaagtaaagagaaaaaccctaatcttcatcttcatcttctcccgccgtcggccgtaagaggtttcgaagaagcaaagtgagcaacaatggcgggaggcaagatcaggaaggaga

SEQ ID NO: 67877 - DNA, 545 bp, Arabidopsis thaliana landsberg
  unsure (1)..(545): unsure at all n locations
gcgaccagccagcgttggtcgttatcctgcacgtcgccgccttgaatctgcttcagggtgaattcgacgcgcgcggcataggtcggataatccgtggtcgtttccgtcggctcgtcggggtcgccgccggtcgtgatgcgttgtagcgctaccgactgcccaaattcctgaatcagttcgtcggcgtcgtcacgcgattcgaggtagtcnnnnnnnnnnnnnnnnnnnnnnnnnnnnnnnnnnnnnnngtcgcgccgggcgttccggtcacaagcccgcgtaacagcccttcgattgccgtgtagcgatcaaccgccggcgcgccgtccatgtaagtcaccgacttgttcagcggcccgacgcccttgctgatgcttttgatctgcccgccgcgttcaagcgtgggctcgagcgtcgcaccggaaagcgcgagcagcgccgcctcgactgcggcgtttttgatttggaccggtaccgcgtccgtcgggatttcgaatccatccgggtcgatgacgccgtaaataaaaaacgtctgaccgggaaag

SEQ ID NO: 67878 - DNA, 779 bp, Arabidopsis thaliana landsberg
  unsure (1)..(779): unsure at all n locations
gtcttccatgaaaattacgatttaaagtataaataaaactttggttaaaaaaaaaaggatacatacaactataatatactaccattgacgcattgagtatcgactaatttaccttgtttagttataacttaaaaacaaagagatttctctatggattcacaatccgttgttaaaccgaaccaacccaagcgagttgaaaaaaagaaccaacccgtaagattcatttcgacaaatcacactaaaacttccattgaagaaatattatccatacaaaagccaagaacaagtctgagttgaagattagatgacaagaaccagtagagctattaaggatatgcttcgctttattcccaacttgtactggtcatattgccctgactgtaacaaacaaagttctacatacactacatagacctcacacccgaacaaagcaaacacagacaatgataaaaaattcaatgacactatgactatgagtaacaaaccaagttctaagttctatacttgctacatcgattccacaccctaactaagcataataaacacaatgataaattcaatgacactatgactatgagtaacaaacaaagttctacttgctacatcaaatcacaccctaactaagcatgataaacacacaatgataaattcaatgactatgagtgaagtatgaaaactcaagaaaacacagggcaaaaactgagttaacgcagaaaaaattgctttctttgtaattacagaaatgagcgtatcanaaacttgagctataagatagttga

SEQ ID NO: 67879 - DNA, 545 bp, Arabidopsis thaliana landsberg
accaaggttcctatcttacttagcggctccgttgtgggtatctgtatctcgcttgaatgttcccatttatcagtatcatgcgcctatcaaaatcttcgtgacgaagaccatgacactatggatgcatcgactataactctccaaaacggggtctttctacttgtgttacgacatttacctctgcatcaattgagcgttcttaatttgtcgcgcgttagactgtgaatcgcaaaacatttgacgtatatatgatttggatccagctcgtattttggctacatcatcagctatatatgtgattagaagagtcacttcagaacgtcatttgttactgcctgtatatatctctctctggaagatcctctcgttacatcatttctttgaaactcttatctgcatcaatcatatatgccatatattcacacatatactcgtgtggcagatgccatataatattactaagagcaaatcattggaaacgcgaacatatttcataccgatgatgaatatcggctcgtgactataggtccataacaggatctcac

SEQ ID NO: 67880 - DNA, 494 bp, Arabidopsis thaliana landsberg
ctacggcccgccgcctgctcataaacaccgccattccgttggttacaggcggtattgtggtactgaggctgttagaggggcgattgtttgaactgatcgctcccatgtgcctggtattttacggcctggcgctcattaacggcagcaaatacactttgaaagagatcaggtggctggggttcagcgaaatattggtaggactggtcaatctctggttcatcgggtacggtctttatttttggggagccggttttggcctgctgcacattctttacggcgccatcatgtggtggaaatatgaaaaagcctgatgcctgcccgtaaaccaacaacatgaagaatcctatcgaacatctcaataaggcattcgacagccgcgtaaggctgggcatcatgagcgcattgctgatgaatgagcaggtgagctttaatgaactgaaagaactgatacaggtaaccgatggcaacctggccagccacctgagaacactgga

SEQ ID NO: 67881 - DNA, 174 bp, Arabidopsis thaliana landsberg
ctaatagccatcatttatcaaacaatgactttttcatttaaaccaatagaccaaccgggagcaatgaacggacggggcttattctgcatacattcggagcgtgtattgaaacatgagaacccttcatactgtgtacgatagagactgatccatcttgggcactatctcaccatt

SEQ ID NO: 67882 - DNA, 236 bp, Arabidopsis thaliana landsberg
gcgcgcgcgcacgagcagatcccagtgtgcctcgccggtcttgttcgtgaacgcggtcggcaccaccagaatctcggcgcgcagcctgcgaggtcgcgcgatacagttcaggaaaacgaacgtcatagcagacggaaagtccgacgcgtccgaccggcgtgtcgacgaccaccggatgcaaagaacccggtgcgatgctcgctgattcgcgataacgctcgccctgagcctgcgtg

SEQ ID NO: 67883 - DNA, 294 bp, Arabidopsis thaliana landsberg
  unsure (1)..(294): unsure at all n locations
aatactatcaactgaaaatgacaaattaatcgggatgggcttcttttggaggaaacatattttttacgaatgttgataaggaaaaggaaaggccattcgtgtgccactctttgtcgcctctctttttatttttgtttncctaactattctttataaaatagaaattttctaaattggaaaagaaatagaattttcatagtaatgcatgttagaatttggatcctaatctgatattcagaaaaaggttttaaaacaaaagtttggaaggttacaactaactctaaaacttgtctt

SEQ ID NO: 67884 - DNA, 764 bp, Arabidopsis thaliana landsberg
atggtgagaattagggctttgaatgtgagtaatgaaagaaggaaacatggttgtttgatggggaatgaagggatcaaagaggtcatagccattggtatctagagaaggaaacattagattcaagagagaaataggtaatgaaaacagaatcttccttttcctttcttcactcaagccctttggttcattagtggttgtgtgtgcttgtgctataaaggttgatagctagaggaagatggacaaaagatattgtagaaaatattttttttaagtactatatgtttttcttttaactatacatcatataactctatcacttccgtaaatatcttttagtactatttaaatagaaataaagagagatggtattttctaatatggattggttcggtcgttactaatatggattagctccttcggttggggttaccctaccttctgcttcaaaaggttgtccaaaacaaaaggagggggggactatggctaatgcttttgttagattcactttcattattattaatgaaagttttcaatttatatttagttaatttagatatttcacaaaaactattaaaactataacatgatcgatgataagttttggtatatatcatcttttaatattgtggaacagaatacacatattcgctttgaataacatttactgaacataataccaaaatttatggaagtgaatgttacctaaattcactattatatatatatatatatatattgaatgtaatgataaaattaaatttaaa

SEQ ID NO: 67885 - DNA, 384 bp, Arabidopsis thaliana landsberg
cctcttcccgccctctgttgagatcaagctgttgccgtagctttacaaagcttttgctgcaataatttttcgatttcttggtctattaggggaacattttttttaagatcaaagtgggttttggcgactttacggggttttgctgagactgcggcatatttggtgagaattgatttgactccgctagtagcttttatttcttggccccattcatatgtgacaccactgtgttagcggtcaagtatgtacgagattcctcgatgatgattgttgcagaccatatgaagacccgctgcttaggtttcgtcagacttggaagccactaccgtggcggcgattacttcttctatgtgggacgtgtgggggcgatacgatatgaccgca

SEQ ID NO: 67886 - DNA, 656 bp, Arabidopsis thaliana landsberg
cgcccaaacccaagcaatccggcctcatcgaagtccgccacattctcggccatgtgccaggcatcgactttcatgcgttcagcggcgcggatgtcgtccgccatgcgctggtgcagcagatcatcgcggcctacgactcctataagaaccccaacagcccggccggcgccacctgatccatgtccctgctccagcagttaaccgccctcttccgcggccgtcgctcccgccgcacggccgagccctcggcggtgatggaattcctcgaatgcagccgcttggtcactgccttgatctttttcgtcacggtggtggcgatcgtgttcatcagctccgttggcgtgaacaccgccatcctgcccgtgctgcccaaccagccggccaccgtacgcatcaccgccgcggtgccgttttcttacgtgagccaggataaaacccggctcgcccgcgaacagatcctcgaccgcgtgccgcccgtttaccgactggaatcagagcccctgcaacagttcgaacaggccgcccgcgatctgcagaccgcactcgtcgcttacgaacgaaaatataaatcctccggatcagcagaccctgcccagcgccaggacctgcacaggtgcttgatgccttcaacgccgtcggtccgtatcatgccagcc

SEQ ID NO: 67887 - DNA, 499 bp, Arabidopsis thaliana landsberg
  unsure (1)..(499): unsure at all n locations
tggtcatgtagatgttaaaagataaattaatacaatggtctgttatgctntcatttgcttagtaagtacgtggaagaaaccaccaaaacaattactttcttagtataattagttntccttatgtatatatagcaagttatttttatttctatttggatatgattcctagacactagattaatagtttccttggacttggtaatttataggtttaaaaatgagctatcanttttgttttaaactcttattaattaaaagaaatattttggttcacatattaaaaaaaacgtttatacctgccaacgcactaatctcacanaactttcgtttaatcataagttactgaggaaagaatttataccacttgttcagtatggatgttttaatttttaatataagatgctttaattttcttactatttaaatattcatcaagtattaacatttttacattttaaaataatatttattatatatactactagcctaatccataagt

SEQ ID NO: 67888 - DNA, 557 bp, Arabidopsis thaliana landsberg
ttgcgcatgtgccctatccaactgctggcagttcgacctcggcagaggcacagccgttttataccaacacaccgttcggcatttcactgtctgacaacggcgacctgaccaactcggaagaactcaagcaggaactgtttctcgaagaccgtcgtcatctgaacactgactcggattcggaagtgctgctcaatgtctttgcgcacgaactgctgcaacgcggcgtcttgcgcctgacaccggatgacatcttcgccgccgtatccggcgtgcatttgcgttgccgcggcgcctacgcctgcgtggcgatgattaccggctacggtgtcgtggggttccgcgatccttacggtatccgccctatcgtctacggcaagcgcgaaacggccaagggcccggactatctgatcgcctcagagtcggtcgcgctcgatgcgctcggctacgaattcatcgacgacattgcgcccggcgaagcggtgttgatcacgctcgacggcaagcttcacaagcgccagtgcgcggccaatccgatctattcgccgtgcattttcgag

SEQ ID NO: 67889 - DNA, 574 bp, Arabidopsis thaliana landsberg
ctacagcacggactacacggtcatcatgaccatcgcccaggccggttccggcttttgcgcctccggcgaggccgtgcgcagcatctacggcgccctgtacggcgtgcaggccgacgggtccgtcgacaacaagaaggccctgctgcccaccccgatgaagggcctgccgaagatccagaccgacggcaccatccccgcccccaagatcaagggcgaccccgccaaggaccaggagaaggtcgccaaggaggtcgcccagcagggcaccaccaccgccccggacggcgaccaggacaccccggcgaccaccaacaacacgggggcgggcaaccgcgacacccgaaggcgcccgcgcaggcgcccgcagcgcggaggaaggcggaggacgaccgcatgaccggcgcgaacaacttctccgtctccgggtacggacccgagcgggccggctggacccggctgctcgcccgcgactcggtcacccgccgcctggactggccgatactgctgtcggcgctcgccctcttcgggatcggctcccttctggtcttctcgccacccgcaaccgcaccgagat

SEQ ID NO: 67890 - DNA, 884 bp, Arabidopsis thaliana landsberg
cttacttgttgtgtttgattcattaggaaaagacgaaatggcaacggaatcgtacgaagccgccattaaaggactcaatgatcttctcaggtacacactctctctgactcatagtaccatcattagaaagtgtcggcatattcctcttttttttcctcccacaatttctccataatcaacgccaaaatcaaagcgttgaatcggaaaaaaaaatcagagttttttgttttcttttgatttgcgcgtttgtgttttcttcatgaccaaacattttggaatccgtacacgtacgacagatcctgaccgttggatcaacttaccttgggaaaaaagtttcacatttccgcgttttttttacagtacgaaagcggatctcggaaacgtcgccgccgcgaagatcaaagcgttgacggcggagctaaaggagcttgactcaagcaattcagacgcaattgaacgaatcaagaccggttttactcaattcaaaaccgagaaatatttgtaagtatttaaattactaaactttttaacgttatttaaggaaaagaatataattaaattcgtttttgttctgtaaagaagaattttcatgacggtggagtggtccattaatgataaacctacctttattttttcttattcacttagcattactgtttttattcatgtgatagtgctaaaaaaaggtgattaaaagctaattaaattgtattaagaaggtatattccaattagtatatgcaataacagaaacataaaaaggtggttttttaaaaagaaattctgaattttttttaaggttgattcatggattttgatgaaatctctctgttcataattttttttcaggaagaatagtactttgttcaatcatcttgccaaggg

SEQ ID NO: 67891 - DNA, 590 bp, Arabidopsis thaliana landsberg
  unsure (1)..(590): unsure at all n locations
aacagcactgacctaatttaattacacacaaatttatttgactctcatactaattaccatacgtcgatttctgaaataaatcatttaaatttcaaatcttaattttatttcgtttttgttaaccaaatagtataacaagtacagtatcaaaagtttcaagtttccttagaatgacctaatcactattcgatgtaccaacgtatctactaaacataatatgcatgcaatggcattattgcattttttgcacattttacaatttctttctgttagtgactaacaaaatggtgtaactgtttagtatttacctcatctcaatgatgatctggtccacatgctgccgccatgtgacccttactccagaatattcccagtctccaaaatccttcgtggagaaaatgcggaatattctactaaaccgaatcctttcattntattttattcttcctactcttttctgattatatttaagatccaatcaactnttcatatgggcgatcgagaaaacatctatttaacttgtagaactggtaaagtgatataaaacccatgcatgtgtncatggtttgatagacatctgaatatatatc

SEQ ID NO: 67892 - DNA, 550 bp, Arabidopsis thaliana landsberg
aaagaagaaaatcgaacctttcttgagtggctttgtcattgatatcaggtgtttcaacctggaaaaaacagagtgttagattcgataatcttcacactctgaagagtggcatgaagaagaagaggaaggagaaggagaaagatgattactttggtgacggatttcttactagacttgcccatagatcctgatcacaagcgaaactggtgtagcagctaccagctaggtttacgagaagcttaaaagttttcgcgtgtagggtttttacttttttccacgggagatttgttatttataggtagagagagattggcttctgaatttttgggaaattgaagtgtcggtctttttattttgatattcctttttccttatatgtgaaacttaatctgaaccggccacgtttcaagcgatatgttaacttaccatttgttttttttttggacaaaagataacttaccatttaatgtgattctctagacacttgactccccaagttttgtaaatttttacatggggtaaaatttacattttacacggctggttaaaa

SEQ ID NO: 67893 - DNA, 600 bp, Arabidopsis thaliana landsberg
  unsure (1)..(600): unsure at all n locations
ttaaatttcggtcgttatcgagaggtctagtagattatgcattttgttgtacaagtgttatataattgggaccctttattactgggtataaaactgaattcttttaacctatagatcacccgcttgtcaattatatcaagggtcccttattaatcttggctattttaaaataccgataaaacaatccgcagaactgtggatatatatcgaaccatgacatagattcatagctgcactgttcgatcgatgatagagaagatcatctaatcacttccatgcaacctcacatacaattacttgcattgcatagtatgtagtaaaactatatctcttgcttccaatggatgcttgcttaagcttagagcttccaaatcgtagtgaattgattgaattgtttccgatcattcaagtcacccttaaattcgctttctagtctagtaccataatagttaaagataaaatccgcatgggctttaaaggcccataataagttaacccaacttaacaagatttagtaatgctaaggccttacaatcaacagaggatatggaccgtctgattatctgacttctttccatcgattanggtactgaatactac

SEQ ID NO: 67894 - DNA, 519 bp, Arabidopsis thaliana landsberg
gtgtgattgtgtttggagaattcgttcgttcccttagcatattttcatccatacacttctgtacatgaaatatctgtcatgtacgttatttacactttaggatcatgaaaatatacgtgtttatttacgtgtctaatagatgaagtaaatcgcttgtaatgttgtagttatgttcaagctttttgacctccatggaaccggcttcatcgagccccatgaggtactgataaaatgctatagatctcatcaattctactattaaaaaaatggagaaattaaaaaagaattttgaataaaacggtgaaatctttatacgaacaagtaaatagtaattgaaaaatcttaccttcaaattttcattttttggttcagattgcaaagttgtagaacatagattgcaaccttccaaaaccacaaaattattctttccatatcaaataagtgcatatatatatatattatcatatatgtctctggatgtttggagatgcatacacaaacattttgatgtgtaaaatg

SEQ ID NO: 67895 - DNA, 702 bp, Arabidopsis thaliana landsberg
  unsure (1)..(702): unsure at all n locations
ttctcttgagcgatcaatagacaatagtcaatctcaagtaatattaaataaatacctaaatgattgattaataaaggagaagggttggtttatattgtttttaataaggtttgtattgttaataaggtttatattgttctcggctataactcattgtgactcaacaaaaatttactagatttcgtagctacaatatattgaaaaatcagataaaatcacggatttttttgaaaaagtaactagatagacatcccgttgataagtcactggatcatgcatgcgcatttataagtaattttcgacagttgagttttttttaaatagtaatcctgtaaatctagcattctactcaatctaatgtcgataattatttttatgtacaattaggatacctagctcccacctagtcctttgaggattagcatcaaaaagtgttcatgagatttgattctgcactttaaattcgaattaagtntaatatctaattaggatcctctaatcgtntttaagtttcacgaccaacgaaaaacattataagtttccgaatgtttcctaccataattactaactataaaggtttagagctaattaagttgggatttcttgcatatgcattttgttagattttgaagtctctctctttctttctctctaaaaacggaatatgtaaagcctatcagaagcatcttatgagttggagaa

SEQ ID NO: 67896 - DNA, 728 bp, Arabidopsis thaliana landsberg
attttttaaccataaatttgagataatagctgatttcaaacaaagaaacgtcatagctgatgtaaaaatacagtacctccacatcccaatgtgtcaatgtgttaccccgcctaacgactccgtacaactaaaatggtagtagtatatattaatttccttaatgtttttttagcttaagtatcttcggcggattgtatcaatccacaacatctaaataaaatgccactagaatggctaatttatgctttgaacttcaatattataaatagctcatcctaacctaataatgtagaccaaatgatcgaaattcatcaaaaatcacttgaagatgattttacctcgttttcaatttgtaaaatgttataaccatttatttttgtttcatattattaattttttaataattatatgaaatattgaaatttactttacttcatttacccatatgattttagtcaaaataactgtaaaatcaaatatctttatatgatttattattttctacgtttctactaaaaacaaaacattcatggaggtaacaaaaaaataggaggatataataaagaatattagaagaagactagtaagaataaaccttgacttattcaatgataaaggtatgtggtttgtgaaaagcactcactgtctcacgtatagatgatagaaatggcacgaaattatcacaaagatgggcccgtgtccaattccccaacaaaatatgaaaagac

SEQ ID NO: 67897 - DNA, 343 bp, Arabidopsis thaliana landsberg
  unsure (1)..(343): unsure at all n locations
nnnnnnnnnnnnnnnnnnnnnnnnnnnnnnnnnnnnnnnnnnnnnnnnnnnnnnnnnnnnnnnnnnnnnnnnnnnnnnnnnnnnnnnnnnnnnnnnnnnnnnnnnnnnnnnnnnnnnnnnnnnnnnnnnnnnnnnnnnnnnnnnnnnnnnnnnnnnnnnnnnnnnnnnnnnggcgaatagaatgagattacttatagattgtttagcttttctaggatgaaacaaaagagagtcatcacatgaagaacaaacactcagttcgatataatatagatagcaatcaatgtaatgaggggcatgagtggtcctacctgtaaaaaaaaaagcatgttcactgttatta

SEQ ID NO: 67898 - DNA, 355 bp, Arabidopsis thaliana landsberg
ttgactcccgcaaaacgcaaccccaggggcaggtatccaacccacgccgcattcttactcccgggggggggaagcttcgggacaaagcccacttttaactcccaccactctggccggcgttttggggtcgcacggctgcccttcaagactggcgggtcactgcccacggaaagcggggtcttgtctgcaaccggccgggggaacctacggcctctcgcaaatactctcgcctgagcagactttatgacgtcgctcgcacgggctgtaaatcttcataaatatgctttttttaccaactaacttactttttactaatctgtcacttgttgttgtgaacgacagtatacctgccatg

SEQ ID NO: 67899 - DNA, 419 bp, Arabidopsis thaliana landsberg
tggttgcaggcagggggggcattgacgctctccatcgtagtaggccacaccctttcgacagatctgctcgcctttgctctaggctgtcactacactaccgcttagcgacctcggtacgctcttctgaattagcctattctttcggcctgttatatgcctaggcatttgcctttgatactgaactaccgcgtctctggttcactgcataggattcgtgaatcaatgtgctgcggactttcttattacttggcgacggatctagcggacatctttgctatttgcgtggattgttgatccggctagacacgcctttggattgcctcctacttcaagacataaattaattactctatagccatttccaggtgagaggtcctctatcaaaagatggtgggttatagtcgtcgaggactctatct

SEQ ID NO: 67900 - DNA, 676 bp, Arabidopsis thaliana landsberg
aatgttatataatataatactatacacttgaaaaatcaccttgaaaaaaaaatacacggccccaatgatatttagtatagtaaacaagtcttaaatatttcagaaaaattgttgtgtgaaatcaatctctttcgaaaatatttttgtagccaaaatggttaattaaacttcccaaatataaaccgtaacatcctaaacataacaaatcattaacaaaaacacaaaccataacttgttcataacaaagaagcaagattcaaaatgagaggtaagaggttccatacacgtctcatatacgcttgagtcaagtgctgaaagaaaatatttcatatttaattttatttttttaggacaaaataatttcatatttacatgttcttctttttggttttggtacttaaatttttgtttttttttttgttttttttgccatgtgcatgtgttccttgtcctttgtgggtcggtagactgtatctatagttgttttctaagatattaataattttaaaagcttaaaactcttttctgaatcttgaaaagcttctctaatatagaggttacacataacacaataatctctcattacaaaaaaaaaaaaaaaggtaaaacaatctctcttgagttctatggattccaaggtcataaaacttatttctcaaatacttaaacttttttt

SEQ ID NO: 67901 - DNA, 515 bp, Arabidopsis thaliana landsberg
  unsure (1)..(515): unsure at all n locations
gcgtccgccttggaagcgttgacgacctgcgtgtcgggtgcgctctttttctgttagaacgtttgacccgtcagatagacgagcggggctnnnnnnnnnnnnnnnnnnntgaccgcacccttgtcgtcgtattcgtggcggtatagcttgccgccgcgccggctgtccatcacgtagggcggatcggcgtagacgaactcggagccggtgaactggtgggactccagccaggccacggcgtcgccgtggtgcagctccaggccgggcacgtcgagctgctgccagacctcgatcacctcgggatcaacgtcgatgccgacgctgcgggcagcgggccgcttgcgctccaggatgttgccgccgcccaagtgcgtttcgatgtacgtgtcgtgaggcgggatgttgttgatgatcgtctggtagacgccggcaccgcccttgccgccggggtatctcatggcctttcttctggaagtaatcgggacttggccagcatcgtcagaaatggcgatgct

SEQ ID NO: 67902 - DNA, 2177 bp, Arabidopsis thaliana landsberg
gttcattgcaatcataagacttaaaaaaataaaaaatattaaatgcagattaacaaaaagaaattattagatgcagatttgtgtagatctttgaaaagacctattaaagcccatttaggcccattaaacgacaacctattaaacccatttaggcccataataacggcgtagtttcagaattagacagtgaggcaatggagcataaagtaacacccgaaagatccgacccggagaagagagatccggacaacccgacccaaatatttgacatttttggttcgatgttcttcttcttcctctattgatttttctgatcttcccgttcgatctcactctgtttcccaaaaaccttcgtgtaccttcgtattctctgcattggatttgaagcaaattgatgaactagtaatctcacacggatctaagagcaggtaaaaccaaaaatgaacactacaaagctatcaacgaattttccatttttttttgaaattttattttctttcgaagatcagatcagtaatcttattatcagcttctctcgttctcttgatcgatctgaatcgaaattgtgacaatgatcagccgtattttgtctttcagaagttatggagtgggcaacggtgcagcatctggatctgcgtcatgtaggtcgcggtgtgagcaagccactacaacctcatacggcggcgtttcatccttctcaagccgttatcgctgttgccgttggctctcacatcatgggtataatactctccgcaaattcttatcgattggtttcatagtttgtgactgtttgatattgaaacttattggtttttgcagaatttgatgcattaacgggatgtaagatcgcgtctattgatattggatctccagctgttagaatgttgtatagtcctactagcagcaatgctgttgttgccattcttgaggtcagtttcctctaatgttattgtagagattttgttttcaatttggaatagtagttttagcttggtgttcagtgttttagaatgatttgtgtttggaattgtttaggattgtacaattaggtcttgtgattttgaaacggagcagacttgtgtattgcactcaccggagaagaggagtgagcacatttcctcagatactgaagttcatcttgctgtgacgccacttcaacctgttgtgttctttggattcccaaaacgaatgagtgtcacaggttgggttatcagttcatgagttctcctatatgagtaggtgtgctggtttattttaccgattgactgtatttgttcttttctgtagttgttggaactgttgaaggtggaagagctccaaccaaaattaagacagatttgaagaaaccaattgtgaacattgcttgccatcctcgactacctgtcctggtatgataaaacattcacacattttcatgttagtgtgtagaatctgattttgttgtacacacgcgtaacttcttgttcaatgttttgtcttttcagtatgtagcatatgcagaggggttgatacgagcttataacattcatacttatgctgttcattatacactacagcgtgagtttaggaggatctcacaagtctcattgtttttattcttctcacttggggtatcctgagcaatagccaccagttaaagcagttctttgttatcctcgcagttgataatactattaaacttatcggcgcaagttcgtttgcttttcacccaacactagaatggatttttgttggagataggaggggtacacttttagcgtgggatgtttcaactgaaagacctaatatgattggaatgtaagtcattttcgttgcttttagatttctgtcagctggcatgaaattgctatcccttttttttctcgcaacaattcattcttgtttgttatattttggaactgcagaacgcaagtgggttcgcaacccatcacttcaatttcttggcttcctatgttgcgtgtacttgtcactgtgtccaaggatggatctcttcaagtgtggaagacacgagtaataattaatcccaataggccttcgacacaaacaaacttctttgagcctgctggtaagcctgatatctcttatagagaaaatatattttcctccccgacttaggaataatttccatggtttggtttggagactttgattacgcattgtagcactatccttttttt

SEQ ID NO: 67903 - DNA, 514 bp, Arabidopsis thaliana landsberg
ccccccctttgccctgctacctcacctgaacccgcacgatcgaggcctgggcgtgcttgatcacgttgtccaccgcctcctgggcgatgcgaaagacgatcaggcgggtcgggatgggcagctcgaccgatacccggacatccagctcccagggaaggccacccgcctgctgcagacgttccaggtgctcctggaaggcccagcgaagtccgtcgggggcctcgatggccgggggccggagatcgaagagcaggtgtcgcagccggttctcggcctccgccaccgcgcttctcacctcggccagctgaccggcctgcgcggcgtcggccgttcgctgcgacagcatctccaggcggaggagggccgcgtcgagcacctgcagggagtcggcgtggatgtcctcggctatgcgccgacgctcctcctcgtgggcggcgacgagctgcgacagcgtctggatcccggccctctccgcgtacaggaccatgccctgaccgagcgcgttctggatcgc

SEQ ID NO: 67904 - DNA, 2876 bp, Arabidopsis thaliana landsberg
atgggagagtgggttcacaatgtatggtagggccatatttgtagtatagctgtcctcactgcatgtcatttgtcaattagtaatgcctggctattgtcccacgtgaaatatgtcaagacaacgtgatttttatttcatggaaggcacatactcaaatcttatatgacataatagtcgttcctaaaatttaaaccaggcagcgataattaataatttggataaaattcggataggatccgatggaaaaccaatcatatacactcgcaggccctatcatgtcttttgtaagactatctcaaatatcacgatccacacaactaagatatgtaaaagagattactagtatagattttgggaattgagaagaaagattgcaacataattaatcaattttgatctcttgatcatgcaaaattcagttttgatctgaataattgatttagttggcctttttattgttttaatcggaacatatgaatcggttaataatgataaacagtagcatcatatcggagaacagcatcaccagtcttcatgtcaatcttatgtgtttttactttgacaaaacctctcgccattctgaatttcccacggccaccaacaatcgcgatttctcgctctccgacctcttccgccaccggattcctcgagaagatactgatcgagcttccattaaacttccctgtcgtgaaagccaaatcagcgtacatgacgatcgtgaatttgctcaagtctttgcaaccggagacatacatcccttgaccattcccgatctctttcgaatgtttctccggcccgacggtgagcggatcgtctatcacaaacaggcttccaaaacctaccggcgaagctgatccaccggttagatttgcatgtgcgattctaacggcggtaggattttggccactgagagtatcatggagataaaatctgacacgtgtcactttctcctcattcagtttagccggtttggtgttgccatagtaggattcatgacgcgccataaccgccacgctcaaacagagtgtgaaaaatgttattagtgtgctcttcataactagtatacttgagaaattgatatgaaagtttactatccaaatgaatctagaacatatatatatatatatagtttgatcacttgtaagtttaggaaagtttacaggaaaaagattttctcctataaaaagagggtatatgtcattatttagaaaatctatttgatatttttctatataagaaaaagaaaatagtaaatgcatatcatccaggtattaactttgaaattttttctgtttgatattgatgacatgttcaaaattgtaatagtgtttgataactttgaaaacatgtaaagagatttaattattttagaaaattatgattctaaaaagctttgagattctgccaaataactagcataaactttattcgaggtaaggaccaatgtatgtaccacgcgcaccttaggagcgttgagcgcgtgttatcaaaatgggtaagctattgtccagccaaaatgcctattattgatcaattttaatatattcccagctctaaagcgcgtggtattatcatattccccgtcccactacattctgtgtgtttgtacaggttggatttattcctcaccacatatatcttaagtggactgcaccgatcaagaagattatagaatacgggccagatctgatactgggtcgggttaagttgggccaattgggctcttaataacaaacatcactctctctacgcaccattgatcactgctcaactaaacgctcccaaattcaaagacagatttaaaccaataatgaaattgtacaactcgtaaaaaataaaagacaccccaaaaccctaaaaattgcaacagagtatgtggtaaaaaaaagagacagagagatattataaaaaaaagaccctaccaaaattttctatagagttcccccacacaacttaacttatccaaattaaacaacacaaattctcagaagctaaacttcaagaacccaaactatcacaatccacaaaaatgccttttgactctttagattttgtcctccgtctcttccttctttgcctcttctacagccggttcgccaccagtctcttccttcttagcctcttctacagcctgttcaccctcagtttcttccttcttagcctcttctacagccggtttgtcctcagtctcttccttctttgccccttctacagctggttcctcctcttgagcatcctcctcagagtgctccgtgcttcaatgttcaaagacaaaataatctaagagtaagaaacatgcttacaaaatttacaacttcccacaatacccaacaacactaactaaaaaagccattaccatcacgcagaaagagaaaaacatagctctctaaacatgggatgccatatccaaaacaaatcttcaagacatcaacttccatgtatgaatgtagagaaaaactaataacaccaaatttaacatatactaatgcagtgatccataacacatgaatgatcatccaaaatctcactgtctatagaatatatatgaatccctatctcccacaatattcacaatttcttagacccatgtcaataatttccacagacagtaagagataacaaccacgtactctgcccgactaagatggtataatcagaaaacaagcaggcaaactaaagaaacgaatcaaccaagttttattatagtcaaagaagatatataccttttcctccaacttctttcaatacgttcctcgtctttacggccattgccaagaccaaagcccatcttccctgtagatttctcattaggcttctccatggctgcagcaatgtccttaagcttttcagccgcgagcttctcgaaatctctttcc

SEQ ID NO: 67905 - DNA, 230 bp, Arabidopsis thaliana landsberg
gcttacacttaggtatagatcatatctattatttataaaaatggctctgatctcctgtttcatacactatgtatcagtaggatattgggttgtgatgtgggatgaacacattgattctttgatcatatcgctgaatcggataacctcaatgcatgaagaacttgttgtgtctagtatgactgaacttagaggactaaagagtgaatgtgaacagccatagcatgaaaata

SEQ ID NO: 67906 - DNA, 447 bp, Arabidopsis thaliana landsberg
caaagggtcacaagcacatcctttcaatctacaattactcttccgaaagtcaaacatccgacgtttagttgactgaagtaaatatcggtagagtctcttattaggcaatctaagcccatatatggtaaatgggctttttgattaacgaattcaaagaccaagctcgttgaggaataaaaccgttcaagcttttcccatagctcaaccgattaaatccaaaaagaccatcctaaaaggctacaacttaaaagagataaataaaaattataaaatcatgttttgcgtaataatctcgactacgaaacaatagcgaactttaatatgatataatttctgaaagaaaatgcgttttttttttataagacaaaaatgtatgttagcgaaaaaccttaatattcaattactcactctaacgaaataggacatatatctttattcctctgtcac

SEQ ID NO: 67907 - DNA, 416 bp, Arabidopsis thaliana landsberg
cataagctcgtccataaaagtgaggcggagactcctctccagagcggagacagcttttccactttcgaaagacaaagagtcgtcattctcagctccgtcgccgcgcttctgcttcctcctcctcctcggcttcttctccggtgcagaaattgagcatcgaatggaggatattccggcggcacgacgaggagttgggtggattgaattggagggaaacggaggattgaggaacaagagtgacattttttttttgccaaagtctgaaactttttttttactggggaatggataaagtgatttgaaatttaaatttttatttaattaaaatgtacacgatgatcatgtgcagatcacgtgaggttaatggattggaccagacagaacccaactagacccaaatgcattgaaacaagatt

SEQ ID NO: 67908 - DNA, 194 bp, Arabidopsis thaliana landsberg
ataattttctggctcaagattggcccttttactgaggactgtcctgtcgttcctcgtgtcaacgaacatttcctattgcatttgctttttgctaacatgcctaggacagcccccgttgatgtcgaccgcttatctatatgctatttatgcgactcacggactgaatcacatgcatatggcaaacacatgatttc

SEQ ID NO: 67909 - DNA, 539 bp, Arabidopsis thaliana landsberg
gaaccgggaaataaataaaatttcttaagaagaataactcgtagcattataatttaccgttgtaaaagtcgtagttacccaccaagtccatctgcatcacaggatatagacgtagagtcatatagagagagtgagcagtaaaacaaacattaaaaaaaaaaagcctagttaaaagagaagaagaagaagaaacgaagttaaccttccaagtgtttttgacgacggaagtgatgtaaggtttgctctcataagagatcttagaagccattattgacaacatcgatttgtattcgatgctaccaacatttatcttctcgtcaagctctattcgtcgatctgagcatcctataaaagaagtatacgtcgccgaagatttgtcaggcttgaccagctttcctgtaacaaagtcggcctttaggttagtcctgtaaaaatacttgtgaaacaccatatataaaaatcaaaaaagttggattagttgtcttagaattccagtaatgttcttaagacctataaagagttagggtgcaataaaaact

SEQ ID NO: 67910 - DNA, 603 bp, Arabidopsis thaliana landsberg
cttttacaaaacatctttgatctttatttaaaagaagatatatttattataaaaaaaacctttgatgagtaagagatcgaaatagagattttatacgtgattaattatgatctacatactgatattagaccaactaaaatccatgggcaaaaggattggcgaatattgtctgcattttatcatttcacatgtttaatattttattctatatatagtcacaataggaaagtatatgattgtcatgcaggttttgggagccaaaaacaaaacccttaggcttacattaggatgattctaacctctacagggaacaagttggcttgcattaaccttatctgtacggaccaagcgggtggaacataccaaaaaacagtaccaatcagatctaagagatacaaatcaatttttggcatgctcattgaaccactcgtaggttgttttcttagtgatcaactcatatgtaattttacgtaacaatcaaggaaaaatatgtaaaagctatgaagaaaagagaaaagaagccgaaatttctggaagtatgttgaaatgtgcgttgtcggtttgggaatctaaggtactgggagccgacaaaagtagagatgt

SEQ ID NO: 67911 - DNA, 439 bp, Arabidopsis thaliana landsberg
cccgcaccgactatggcatctaacaatcatggccacttgactcaatgcactacatcgacactcataatcgcttgacagttttcctcaccaagtcctcgattaaagtgcacatcaacgacaccgctatacgacactcacgcgactagacggctagagcacatactactgtccaccaccacaatgactggacctctctacgacgaagcatcatcaccgattgctccctcggtccaagggaaccacaagaccacgagcctctctatctcgcagccaaagggtcaccacctgtactacgtccctcaatcgcaacacctcaagcaccatagtcctctcagggtgcaccatacactcactctaggaactactcgatcgatccacctccaagccaccaagaaaacactcgactacatatgcaccaaaccgtagtaaaaaaaaaaaa

SEQ ID NO: 67912 - DNA, 769 bp, Arabidopsis thaliana landsberg
aactcatattccaatcccatgagtgattagttttatctttttgttatctcttgtgaattatgagtgctaagatgaaaaaaggtatggtgtgtgtcttgtggctcttgccaactctgtctttcttcctgtcatttgtggatttctcttttgaaactagagacccttttgtttttttcatttgtgttgactctctaaattcttcaacagatgatcaccatggagccaactggttcttttgacttgataagaacagcaagaatggccagctttgggttgatatttctcgggccgtctcagcatctgtggttcagttatctttcgaagatattgccaaagcgcgacgtgttgacaacctttaagaaaataatgatggggcaggttcttttcggacctgttagcaacacagtcttctattcctacaatgctgctttacaaggtacataacatagttaagcctatggattgaacggatttagctttttacggtttctctgcctgtaaatttatggtgctcattatgtgactggttctggcacgttgttggtcctttttaaggtgaaaattctgaggaaattgtggcgagattgaagagagatcttctgccaacattgaaaaatggacttatgtattggccggtctgtgattttgttacattcaagtatgtgccagttcatctacaggtaaaccaaatatcaatcttattactttctctattgtttgggatgtttaaagacacttcttaacttcaacttgtaatcttctggttgca

SEQ ID NO: 67913 - DNA, 656 bp, Arabidopsis thaliana landsberg
  unsure (1)..(656): unsure at all n locations
ctggcgtccggccaggctggcggcaaccttttggaattcgggccgactaaccggcacgccgtttctcgaaggctacaaggccctgctgcaacgctacggcaccgattacacccgcgtggccgaacgctacgccgacgatgccagcatgcgtgcatggttcggcgccggctggcgcggcggtgcccgcttcgaacacagccagcagctggacttcgaaagcctgcgcggccgcctgatgtcgtcgtcctatgccccccgggccggtcacccgcagcacgcgcccatgctcgccgcgctgcgtgacctgttcgaccgctgccagacgaacgaccggataagcttcgactacgacacccgcattttcaccggaacagtgagctgagcatgtacgactacctgcgccccctgctgttcgcgctcgacgccgagaccgcgcaccgnctcaccctgttcggcctgggcgtagctcaccgcagcaacctcgccagatacgtggccacgcccgcagacgacctgccggtggaagcgttcggcatccgctttcccaacccggtgggcctggccgccggactcgacaagaatgccgagcatttggacgaactgggcgcgctcggtttcggcttcgtcgaggtccgcacggtgacgccgcgtccaca

SEQ ID NO: 67914 - DNA, 546 bp, Arabidopsis thaliana landsberg
  unsure (1)..(546): unsure at all n locations
cgtccatcaaccgaacagttaatttatgtttgctacaattcgtttattttatttaaggtaaattttaattaaatttatcattggtttcttatttacgattaattaaaaatgactaatatgataataatttatggatacggtggtttatacatttacccgtgcatgatatatatcaaacgattgtaaaacttcccaaccgccaaaatcatacttgcttgcacactaaagcatattgaagacgtcttctctgctatatgcgtccgcgtttgctttaggcttgaagaagaaatgcaaagcacgtgcatgtaaacccccacctccaagtaaaatttttaatttgtttcggttactgtttctctcaaagatgtaacacctaaattgattcaacaagggttttaataggtttgatccgatgtttaatgtttttaaagtctctgttcgagattcttcttttggtgagaaagtggctacactctggattgatataataaagatgagcatttatagcctncagaattttgaggcatttcagaaattttcggatca

SEQ ID NO: 67915 - DNA, 655 bp, Arabidopsis thaliana landsberg
tcacagtctgcaattgattgaatgtgttttcaatacttatatactctacactctttctttctcttttacattgttcttgggtccttttgtaatactataaaagtctatacctggattcattggagaatttatggactattattgtatccctatttatactcggcattaaacttagttgttacaaagcctaacgttctagcactgtgagcactaaatgttgttatgatataatgcatcaatgattggagagggacatgaacaaaagtagatatgcttcattcataagggagatcacaaggtcttagaaatagaagaaaaacaaaccactgagctattatatatcagacaaggaacgtgttatgttctggctatttcaagacacaaactttcctccaacaattggtctcttgctaccagacagatcctgttcaaaaccaaagcacatcaacgctcagcaaaatccattaagagggtttccaagaaaacgaaaatatcgaaatcagtaatcacagtaagatatagagatcagattgtgtaccttttcaactcactctaacatgttcttgtgactaatcgattcctaatactcagtgcaaagggatggaagtgaaatcagcctaaatgtttcttaatcatttgacatattgcgtttgcg

SEQ ID NO: 67916 - DNA, 432 bp, Arabidopsis thaliana landsberg
ggaaagaaaaaaaagaagagagccaagaattaggattatgggagattgcttgtcttgcactatcagacatcaaatttacaacagtgtagaaacgtgtcagataattagtgggaagagtattgaagtagataacaaagagaaagtcataataaataacaatatctcatctttgttccaaaacattaaataactaaaaatttggtagtaaggtataataataatattttttaccatcttaaaatttaaaagtgtgagattgatactaattcaaaacgaaagaatgttctaaacattactataaagccttaacttgttaagctaggtaattaaaaacacatattgttcctttacccttcggccttcgccattaattatgtaacgtgtgatattagctttaagaggttgtaatgttcagcttgtgtaattatatga

SEQ ID NO: 67917 - DNA, 410 bp, Arabidopsis thaliana landsberg
ccaacccttggatcttcttgtttggtctctctttttactctttatacattagatgaactttttcttacgacaacgttcaagataatcaagactgatgatacactaattggttgcaccatagtggggttgtctctaatgatatatatggcaaactgatctatttttacatagacaccatcaacttataagtaattatatatatatatatatataaattattctacttttcaaaaatctcttgtgacaaaaataatatctccattttccatatggttatattaattaaataaatataaagttacatatatacaatcaaaaatatttaatttttactaaataatttatgtttattttggtcaacctgaaatatgagatatttgaattagtgtcatatattatttatttatttt

SEQ ID NO: 67918 - DNA, 2155 bp, Arabidopsis thaliana landsberg
gatacacgttacagccactacttctaaacttaacccgaatagcttagaccgatcagacccagcctaagcagaacatgttaaccgcggaagcaagcaacattacgctacacctacacgcctacactacataaacagaaactactacaactaaaaatacaacaacagagccagaaatgaagaacagagagagccttactgaagttgttctttttctgttccctacccgactgattttactcaatcaacctcaattactttttgacgttttggtttggttgttgctttagctttactctgcttcacattcttcctcctttttgtaccattcatcagccagtcatcatcgtcgtcgtcctcactaggatcagaaccaatgtatgaatcatcatcttcttcttcgtcgtcataatagtatacctttggagatggttttttgggtgctgatttgggtaaatcactcactgggattttagtatgtaaaccagtgactgggattttagtcaccacttctgagaatcctattggatagaaaccccaacagcaatagtaactatcttcttcggcaactggcggtggagaaggaactttcactgcctggtaagctctcctgcagctcttagtttggcatttaagcacgctttcctcgtaaatgacgggatactcgtaaagcacgtagcagtatggacaagtagtccagaaactcgaaacctccggttcagaatcggttcttgcagccccgctcttgggagtctgttctggaggtggggtttggttaaaaacgtgagttggctgagacactggcgcaggggcaggtggagaaggaatagtcgaggcttctggaactgcagagggagtagtagaaacaggaggtgactggaatgattgagttgaattgaagactggaggcagtggagagagagaactagaggctgcaggtggctgagagggacaggttgattgaaatgtcggtggtggctgagacactggcaacggcttagaggttgtaggtggctgagataccggcattggcttagaggtattgggtggctgagacacaaatggcttagaggtcgttggtggctgagagatagggaatgacttagaggccgctggtggctgagatgctggaaaaggcctagcagtcgatgatggttgagacatcgagaatggctgagaatttggtcttggttgggacaccgggagcgggttagaagcgggttgtggctgagacacgggaaatggcttagagtttgatgatggctgagacaccgggaatgggttagagttttgtaatgactgagagaccggcaatggctttgacctttgtgatgactgagaaaccagcaaaggcttagacttttgtgatgactgagacactgggaatggcttagagttttgcgatgactgagacatcggaaacggcttagagttcgatggtggctgagacaatggaaatgggttagaggtcggtggtggctgagacattgggaatggcggatgtggcttagaaacaggctgcggtttagagactgcatgtgactgattcgagcgagttggctgagatgcatgagatgagtcagaaacagaaggcagcagcgagagttgagcagcttcactagacctactagataactgatattgcctagccggctcagagtattgccacggtacaggctcagagtgacgtacaggctcagacactggagtaggcttagacgcccatgtcaattcagttgaaggagtcctatgagaagatccctcaaaggatctactaggcggccgctctggctcagcaaaacgacgactagattgaaccctttcagttgcattgttcaaattaatcaacctcacttcttccactggtcttttccagtcaccactcgaaccactactatgctcttgaccaacctgttgcctccaagatgcttgttgttgctcctgcaataactgctgatcaaattgagacctttgctgctgtggctgagactgagtctgaacagattgagcaaaatgtggttgatgaagctgaaatggtaactgctgattctgaaaggacactgtttggttctggttaggatgttgaggcgattgagattgttgctgatgatgttgaggagagtgagactgaaattgtggcccctgatcccccagctgg

SEQ ID NO: 67919 - DNA, 1647 bp, Arabidopsis thaliana landsberg
tcatttagcttcaaatctgactctgaagaatcatagatctgcgtggccgcataagtaatcttgtcaacagacaagtctttgctgcttttgtatacacatgttaacaggtaatataaagaacaacgtaaacatatatttaccttgacaagacaaggcagagaatctgcacttgtagcaggcggaataccagaagtttgtggaacctgagattctgaagctgatgaagtagcttcccccactttctgatgaacataaaaaacagtattaatcagaaattcttcatcagccaaaatctcaatgtctcatgattcttcccagtaacagtaaagaaaagtttataatatatggttttttccacaactttgtagcttatagtgttagactcataaagactttgaagaaagacttaagagactagagatccttaccattttcttaaaaggagaaccattacgcccagcttctaaagtctgcaatggtggctaaaataagttattgacaaacaacaccaatagatgttgctacaacaaaatcagtttcatataaagcaaacatgagaacctaagttgcttacactggagtccatggaatcagtcatttcttcatccaccctcacacgcttttccctgttttggccagttagatccaaaaaccggttttttagctcttgtgaagaacattcagtccactggttttttcccggaacctaaacattgcaatcaagtgttattatgtttaaacatatatgagagaccaacaacaaaaaagaaagatccgcatgagacaaaacatactggaacacagtaaagcaagcgacgctcccaaacttgaatttcagtggaagaaccctcaggaaactgtgaaacatcactgtacttgtttgttctccatgttgaatcatcctaaacagaacgtaaaaacagaaacagttactgatagataaagattgaattcttctttagtagaaaccatcaaaagtcatattcctaccttgtaagcaccagcatagaattcattcccaagcatgtcctgtatcattccacgaaaccgaacaagagtcttgggttgcacccacttaatacttgacgaatcaagaattggaacctagtagacaaaagaaaacactatcggttaattaagaaaaatatctcaaaacagatccttgaaaaaacccaaattaaccaatctatggatagactaaaacctaaagtaagttgatttacttagaaacagagccaaagtacacgaaaaaatcaacctattatgctaattgggtagtaattaatcaaaacatactcaattgccctaaacccaaaaaaaaatagaaacagagtaaaggttttagggcaaacctgggagatagcagattcgtcggagaagtagtgacggaacaaatcaacgacaccccagtcttttccgacagacgaagccggatcgtagcctgaagacagagcatttacgaaggagaatcggacggctcctaaagggttggtcagacaatcgtaagctggtcctcccatatctcaaaaccaacctttgatttcactctttaccaaaatactatgtagcgagaatcgcaagaatctagagatgaaagattgagtctttgctcaaacacgaattaagggcaatgtcaagtgtgtatag

SEQ ID NO: 67920 - DNA, 174 bp, Arabidopsis thaliana landsberg
aaccacaaacacagccaagacggaccaaaaaggacaagaaaagaagaacccagacacagagagagccaagggacaacccaccaagagagcgggaataaagccaacaggcggactccgaaacggccgaaaacaacaagaagcacctagagaagaaccgaagcgaccgaaagaagg

SEQ ID NO: 67921 - DNA, 456 bp, Arabidopsis thaliana landsberg
acaccgacgtccagcccttgccatctttgcccaggctttccgcccatagctgccgccatttgccgccgaaaatcgcaagcttatcggcataagggcataagatggtggtcgccaacttatcctgttcggacaatgcgaaatgcaacgcagcgccagtggcagcagggacatccgccggacttttagcagccaagacgcgtgacaatgtatcggcggcaccggcacgcagtgccttggcatccaatcccatcaacagcgcgggcaacatgccgactaccgtcagcaccgaatagcgccctcccacaccggttggatgaggcagcttcggtgcaccaatggaatcggcaaaatcggaaagtgcgctcttatgcggctcttgaataataatgaaatgtttcttcagatcgcaacctgcccgctgaaatgcatcggctgctgtcagcgcttgcatcatcg

SEQ ID NO: 67922 - DNA, 301 bp, Arabidopsis thaliana landsberg
agggggaagagaccgccgcgggccaccggaagacgcaaggaacaagcggacaagaaacacacacgcggaggaacgcacagccacgtgcaaaagcgcagcaatacccaggagggaatagaagccacacataccccacacgagccaaacgcccgaacacaagggggcccagacaaaacgaagcccacaaagccaaacaagggcccgacaccacaggagccaaggccaccaaccacgccaaagaacagcgaaacaaacaaccggaaggacaccagacgaaagaccaaacccggcgaaaagaacc

SEQ ID NO: 67923 - DNA, 352 bp, Arabidopsis thaliana landsberg
  unsure (1)..(352): unsure at all n locations
gatccctctgctttcttggatgtcacgtaccttcatcacataggaggaaatagacaaaatcaacaacgattagttgattaatgtatatactgtatgctttaaatatgcttaccgtgataatcgggagaattggaccaaagatctcttcattcatgatctcagaatcaagaggagggtccaacaagatcgttggctcaacatacctgttaaaaatatttaaggttaaaatgaccggtagaactgatttcgtgtgatccaagaaacattggggcaaacataaaataaagcgtacagcttatcttcgtctatagaaccaccatagacgagggaagcttggacacnaggatcncta

SEQ ID NO: 67924 - DNA, 542 bp, Arabidopsis thaliana landsberg
catcgccggtctggcagtttatgatggtcgatacctggtttgagggacagcggaaagcagctattcgctcgcaggaatcggggctaacgatcgtacggatgacagtgaagaatgtcccgaccgtccttgaaatcaatcctaatttctatgaaaagctgtttatcgaagacagtcgcttcgaaaacgtgagtgggccggcactggtgatcagcaatgaaaataatgcgtatacccaggtaagtttgcggaatatagcatgtaaaaaagtaccggtactggcccattttcgtgtcagcggcaagcaaattgcgggacaaggggagatttaccgggtgaagagtctgaaccacggcttgcaaatggccgctatcgatgcaaagccggtacatactaccacgctggacatcgatacgcttaaaaccgaaactacgccagccgcaaaagacattccggcttttcccgatatcagcacctgggtaaaccttaaagcattgggcgcaaaaggcgacggcgttaccgatgataccaaagccattcatgcg

SEQ ID NO: 67925 - DNA, 306 bp, Arabidopsis thaliana landsberg
cccacactatacctaattattccttattctttgaggaaacgtttttgaaaagggccacttcccaaatttgacgaggagcaaattggaaaacaaattaaacatgtatcacttaaaaatcaaatttatgaaaaatcagttctatgtggataaagttattaacgtttcaatactcgttatgatttgctctatgtcttggtcgacatatacaggtacacttactctatggccgctatacacacacacctcttcacaattatacaatcacagactactatactgtgggtgctctgtactcatgcctctatc

SEQ ID NO: 67926 - DNA, 613 bp, Arabidopsis thaliana landsberg
tgagcaaaaacattaattataattgttgatgaaatttttaaatgaattgccttacttgttccatgcatgaaatacaagagaaaacgaaaagggttgaggtttgtcaacaacttgctattttagtaatttagtaacaaaagaaagattattgtgagactattagtttaacttaaaactaaaaacagaatcaagtgataatttgtccatgtctccctctctcggaaactgtggtttttttttatctttctttaactatttgtgcgcattgaacaaagtgagtgttattggggttctcacttttccttcatagtccaaatcacttttttccaaatatggattgttttgtctccaaagtgatttttccatttctggtatatttaccaaattactaatccgaaaacggcacgacggtgtcttccagcatttaaaaacgacacgagggtctatctccaagttaagaaaacgcagacacgtgaatattaccagatgggtgaataaagacccaatagctggcggcccacttgtacattaaattagcccattattgtttttttccaaccgactaaattccgaaaagtaaattaaaccggagaatttaatttgaaagaagata

SEQ ID NO: 67927 - DNA, 2716 bp, Arabidopsis thaliana landsberg
ttttttttacgctctcgctttgcggtaagtcacattctgattaaaatagaactgctttttttttgttttggatcatcttttcatgccgattgcatcagtgcagatttccttatttactctttctcttctcaaatttccatttttttctttatctctcccactcccactcataaaattagttttgtctttctttccccaaaaatctttacttaaaatctttttcacccttttgctttaacttttgtttgctcctcctctggatcgtatcagtaaactggaagaagaaattgtgagaaaaaatggagaaaaccaagatgattacgtctatgacctgttgaagaaaccctactcagaataagagtaaaactctgtgatttttctgactaacagagagagagacacctaaatgggctcagagcaggatcaggtttctgtttaattctctctattttcgtttgatttcgacttcttgagcttttacttctctctgtctcagttctaacttcttcagattttaaagctttcgtttttttggcaagttgtttttttttcctacttagatctgactactccgactctgttcacactaatgttcgttagggtttatgttgaatctctcctttgatcattatgttattgtaaaaatcccagctttatgctaaatcgagctagtgattcttgagaattgaacaaaaaagttttacatttttctgaattgccattcaattagaagaagaaaaaattcaaccttttactggttatgatctagattcgatgcgtgtaagctataagatcaccatttcgtgctttagatccataatcattgattcactatatggcaattatcttcttgcttcacagatctcttttacacttacatgtcaagtgtctgagtgtgtgtgtgtgtccttttgcagaggaaaaggtggggaggttgtttaggagtgttctcttgtttcaagtcacaaaaaggtggaaaaagaattgtacctgcttctcgcattcctgaaggtggcaatgtctcagcttcacaacctaatggagctcatcaagctggtgtcttaaataatcaagctgcaggagggattaatctatcactattggctccaccttcctctcctgcttccttcaccaattcagctcttccttcaactactcagtctccaaactgctacttatctctggctgcaaattcaccgggaggtccttcgtcgagtatgtatgccactggaccatatgctcatgaaacccaattagtctcaccgcctgttttctctactttcaccaccgagccatcgactgctcctttcactcctcctccagagcttgcacgtctgactgccccttcttcacctgatgtaccttatgctcgtttcttgacttcctccatggatctcaagaactctggtaaaggtcattacaatgatcttcaagctacttattctctttatcccggaagtccagccagtgctcttagatcaccaatctctcgggcttcgggagatgggttattgtcgcctcaaaatggtaaatgctcaaggagtgattctggcaacacattcgggtatgacacaaatggagtctcaacacctttgcaggagtcaaacttcttctgtcctgaaacttttgccaagttttacctggatcacgacccttcagttcctcaaaacggtggaagattaagcgtgtcgaaggattcagatgtgtatcctacaaatggatatggaaacgggaaccagaataggcagaacagaagtcccaagcaagacatggaggagttagaagcttacagggcgtcctttggttttagtgcagatgaaatcatcacaactagtcagtatgtagagatcactgatgtgatggatgggtcttttaacacatcagcttactctccaagcgatggacataagcttctcagaagagaagcaaatttgctgagtcaaacaagccccaaatcagaagccgatcttgattcacaagttgtagacttccaatcaccaaagtcatcaaatagctacaaaggtgagaattgtcacattatatctcattcagcttgcatagataataacattgtttctttgtgtgtgtgctaattgtatcaaattgtatggctcagatcacaaacaaagaaaccggatccatgcggatgaagaggctttattgtcgagagtggggtctgtaaaaggaagcagaagctatcatatttcaagctctgatgcagaggtcgagtacagaagaggaagaagcttaagggaaagcagagagaacagacacaggaaagcctgatcaagaacaacaacaacaagaagaagaaagcctgatctgttcttaaagtcttctaaggtctaaaaagttgatcttgtgatgctaactcttgagataagaagtctagtttttaagtatatatagatatatataaatataattacagatggttttttagtagaatgatgttatatataagaagagagcaagggtgagaaagtgaatgcttgttttttagtttgacatggcttttttgtaagaccccatcttttatctaattgcaccaatctgtttgagcttctttagtctctttttaatgcatttgttaacaacaacttaagatgttagattggagaacttgtgaatgttgttaattcttgatttttctatatcaacacaaaagttttacattatgttttatgtattattagttgtgtctacattgacatgt

SEQ ID NO: 67928 - DNA, 480 bp, Arabidopsis thaliana landsberg
  unsure (1)..(480): unsure at all n locations
gggtcgcggccgcagcccgcctaccatattcttggagagcattttctncctcttttgtcgtgggcggccttaatgaccgctgcctagcgcaaccatcggaggcggacctgttccggcatcggacctcatccgaggcaccccggaccatggtcgggggtctggaactgggcatttcggctcgttgctacagggaccaaaggagcnnnnnnnnnnnnnnnnnnnnnnnnnnnnnnnnnnccggttgcgatcaatgcgtcggtcgtcgcactggtcgtcttactgtgcggcgcctctatttcttcggcgcggcgatgtcgggcgatacgcagatcaccaagagcgttnnnnnnnnnnnnnnnnnnnnnnnnnnnnnnnnnnnnnnnnnnnnnnnnnnnnnnnnnnnnnnnnnnnnnnnnnnnnnnnnnnnngtagtaccatgtctggtcgacacgcagtcgacaggtcgcagatgcattggct

SEQ ID NO: 67929 - DNA, 402 bp, Arabidopsis thaliana landsberg
  unsure (1)..(402): unsure at all n locations
cggacagaaccagcanaaggagaaaaaccgccaggatttgcgattttcagaagaaccggagtctcatcggagctgctgggaacccttaacctctacaacgccctccacccgcttatcgtacacactgaaaatccgacacaccgagctgctttcaccagcctaaaccactcgctctctgttaacactctctccatcacctatatgatattagnnnnnnnnnnnnnnnnnnnnaagttgcttcaggtttacgtcttgaaccaatcaggcaaatataacgtggaacatcttattcaagcttttcctattgtatgaagaagagactactgcatagtaggagtaacctttctgggttcgttgaatagtaggcctgacgttagcaacatcaccaactacaattatatt

SEQ ID NO: 67930 - DNA, 487 bp, Arabidopsis thaliana landsberg
  unsure (1)..(487): unsure at all n locations
tagctagagacactcattgtgggcaaaacatcgcttaaggtggaagcaaaggaatcgcctttctccctttaaaggaccaaattcaattggatggaccaattaatttactaaattaaagtttatccatatatataactaaaactcatcatgacgtcatcaaacaaattgaattccctaaggctattgatcattaattgatttatgacacaaattgtgttacacaataaaccgttaggctatttctagttcatttttagtttttgatgtaatcgacatgcttatatagaaatattttggtatgatttattcgatttagtacagccataacaatacagcattcgaaaaccattcttattttaaattgttttctacaaaataggtgtaagctagctagtgtgtgttcaaacatcatacatggaatcagttagaagaacaaccaatattangttattacttattaaatggcatatatgaaaagaccctaaaa

SEQ ID NO: 67931 - DNA, 590 bp, Arabidopsis thaliana landsberg
atcctaaaagggcgtttgaatcccattttcaacttgcataattggttttcaaatgcaataaactctaagaacgaggaagagaatgaaaggaaaattcagacaatggaacagtaaaacaacaacattcgcacttgacagtgaaacaagtaaatgataagattcggattcctccacaaagttatagcaaatgcatgcaagaaaccttatacaaaccttatgtaggatggctatctgtaaacgttcctattaagacaataactatactatcatgctagtttaacacacatccaccacaacaaagaactaatgcttaaaaaacagttcagacaggaacaaatgtccagttaacatgtagtatattactcacctctctaaagaagtaagctcagataaagttttaggccagcttcaaaaagatagaaccatactagaacgccaccaatagactaaaaatagggataaccaataggaatttcaggcttttaaaagcttaagctggaaaaataaaaaatccccaaatcagaagaaaccctaaccctagactccaactacccaaaaattaaccaaatcaagtatcaattggataagaa

SEQ ID NO: 67932 - DNA, 1029 bp, Arabidopsis thaliana landsberg
agcttagcatttagcactaagcacttgtatgggcctgaatttttattatgcaaacttatggcccatttgtctttattttttggtttccttgcaaacatttgccatttgatagtcgctgatagaatcgctcgcatatgaaggaaacagaaagaccggaccggagcatgtgcttgtggtaagaaatttacagtgagcttacgaagaaacacaagtaatttagtctattatagttcaagagcttctcctgcattcatgcaaatgcaagagtggtaaaatagcattatactaagtaaatttggttatgctcctgtgcgttatatcaggatattcccttcaagcaattgagcttcacatagcaatcactagaccgcaaaatcacaatctgtcaatcaccattttagccataattctttctacttgcgcaatccaaattttataaggttttcgacaatgcattgtttttcaataagtacaatggaaaacaaagagattagagagagtaacacaaaagcagaaaacaagttccctttttaaacatccttagcaatgagatcaccattgagaaactctctgtaggcagcaacgggccaaatgaaaccacggaagatgatccgactagccaaaggaacatcgatgatgatctctttcatcgcgggtttcttctcaccactaatagctattaagtagcttcttccaacccacccaatccatccagcaatgtagaggaaaagaatccctggagtaatgaactctccccaatgccgctggtctccgttcactatcaagtgcggtaacccgtctgacccgcataacaatccgtacttcccgtagttgtcgaacctaacatacattcataagcacatcaacttcaaaccaatccacagttccacaagctcctcaatagatcatatcaatgatcaaatttaacatgtctagcaacttcgaaaactcactaattcaccaaaaaaatcatactaaagcaatggatctagcaagtaattcactaaaacagagaaaaacttctgttca

SEQ ID NO: 67933 - DNA, 1592 bp, Arabidopsis thaliana landsberg
cgccagcccacaattctcacaacgtctgattttccttcattttctcttctttgtctgtcttgcttgtctctattggaagatgcttttgtttgacttattgtgaattgttgtaacttgtaatcttttgattgtctttagttttcttgggatgaattcccttctttatttgtgtattttcctatctctttgatgtaaataagaaagctagtaatggtttacacattgattattctataagaaacatctagaaaagaaaaaaaaagaaaaaaaacatctagaaatatatcagaacttctttcacaaaagaataatatatatcagaactgcgtgttattaattcaacgagttcaaacttcaaagtatgatgtggtaacacaaccaaattctcctctcggatataattagaccaaaaaaaaaaagacgaaatatttttgctataaacaatatatatatgggtaaatgtgaagaaatttgtttcttctgccaggaaatagacagctaatacattgaaaaaatggtaaaactttaaagaaaagcatatcttaagagatgaaaccctaattaaggtgttgagacttcagagacagatcaagagatcttatcagaagatatctgtgaagcatttcaaacaaacattacaaaaaatataccctcgttccggcggaatggtagaaggagttgtaattctgctaatgtttattttggtcatatatagatttaattctttgatattgcaaactcatgatcccattttcttattatgtggttaaccaataaaagactcaattttgcagtcttactaatcaggactatttgccaaaaaaaaactaatcaggactaaaaaactacatctcttttttttttgctacatatatatatatatatatatatgattatttccagcgtagatataatatgtatagatattaaaaataaataaaagataagtcgtgtgtagtccacatatcttgaacatcaaaatgacaaaactacaaaaatccgcggcaaaatctcttatccagtgacatgttacttatcaaccaatcacaacacgccacctcatcaccacaagaccacttctcttatcttcctctccctccactaatctcctcaagaatctaaagctcctcccataagtcttctctccacacttcacccaaaactccagaaccctagaattcgaaatctcccaagaacccgaaaaagcgccatgtcgctcactatcccgacgaatctcgttctcaacccgagatctaacaaatctctcactcaatccgtacctaaatcctccgcaagattcgtctgctccgatgacaaatcctcctcctccgcacctcaatccatgaaagctttctccgccgccgtcgccctctcttccatcctcctctctgctcctatgccagctgtcgctgatatctcaggtttgactccttgcaaggactcaaaacagttcgctaaaagagagaagcaacagatcaagaagcttgaatcttctcttaagctctacgctcctgaatctgcccctgctcttgctctcaatgctcagatcgagaaaaccaaacgcaggttcgtcttccatttcgatttcttcg

SEQ ID NO: 67934 - DNA, 683 bp, Arabidopsis thaliana landsberg
attcttgtgaacgtgtaaacctcgaaactacacaaatcatttttgttttctttactttatatcacgagatcctttcttttttcatatagacactcttttactttttctagaattagacttatcgacactccatgatgattcccatatggatggttctcatatttttaacattactttttacatagatcgaatttcggaaatgtatcgaaaaaagaggagagattcgattcaaatacccacatagaacggacaaggtcaataatgggcccactattctattgagagcccatctcaacaagttgaaccatcttttttgtgtactctcacttcaccttttgacaaaaagtcatggaagccaaactttggaacactactttactttgccaacatcttgttttgttgaatacctttttcaaattggaaaccaaagccatatctaaagggaaaacctgtaggacaataaaacaaagaagtgatatctaaagtctaaactaatctcaatatatgtaaatcaaagagataactaatgaaaaatatgaaatttttcgcgaggattaatgaacaaaggatttttttttttccttctaaatttttttattagacaattggtattacaatgacaactacgaagctaatacaaaacttcggaaaccaacttattacataagcaaaattatgtgtca

SEQ ID NO: 67935 - DNA, 1814 bp, Arabidopsis thaliana landsberg
ttctcagaagcaggtggcaaaaaatcaccctgtgtaagagcccaaaagtcttgctccatcaaattccaagtcggatcaacagcatttgaagtcacctaaagcaagtaaggccccaaaacaaaagctggttcctcaacacatgaaaaacagcatagaacatcgaggtcaaaatgcatctaacccgctttatccgccaagtggaaaatctgttattgtcgttgagtcaatgacaaaagcaaagattattcagggttatcttggtgacatgtatgaggttttgccaagttatggtcatatcagggacctggccacaaggtctggttcagtgaggccagatgacgattttagcatggtttgggaggttccatcttccgcctggactcatattaagagcattaaggttgcattaaatgggtacggtttcttgcctaatcactactttaaaaatctattgttgctattatctatattccttaattctagaatactttccgggtgtcaaagtgctgtacagctattgagatatgtggcttgttcaaacttgtatgatatgaactacttctttcctatggtttttcttattgtgcttatctatctcattatgtttaccttattcctcagagctgaaaatctgattcttgcatcggacccagatcgtgaaggagaggcaattgcctggcacattatagagatgttgcagcagcagggtgccttacatgaaagtatgacagtagcaagggttgtattccatgagataactgaatcagcaataaaaagtgcacttcaatctccacgagaaatcgacggggacttggtgcatgcttatcttgcacggcgtgctcttgattatctcatcggattcaatatttcaccactactttggaggaaacttccgggttgcccgtcagctgggcgggtccagtctgctgctttggctcttgtatgtgatagagaaagtgaaattgatggatttaagcctcaggagtactggactgtaggaatcaaagtgaaagggaaagataattcagccaccttttctgctcacttgaccagtttaaattcaaaaagattaaatcagctttctatcagctctgaagcaaatgcacaggacattgagcaaaggatcaaatcagaaggttttctagtgaagggcactaaaacaagtactacacggaagaatccgccaactccgtacataacatcaacccttcagcaggatgctgctaacaaattacatttttcaacagcacataccatgaaggttgagagctaaaacctttttcattttcattcactttttccttgaattcatatttctaataataagtactttgcagctcgctcaaaaattatatgagggtgtccaactgtccgatggtaaatcagctggtcttataacatacatgcggacagatggtttacatgtgggtttatctctttaattgtgtattttctgctatgggcattcattttgttttgattttcaaaaatatgactttctgactgattcatcttatctgttacaacttcactttgattttccttgattcatttgtttcgtttttcatttgtttctgttcccatcagatagctgatgaagctatcaaagatatacagtccttggtggcagaaaggtaaggcatataaatgcatctgtgaagttattctacgttggtccgtttgactcgagaaaactatagcagcaatatacttattatctgcaggtatgggaagaattttacatcagatagtcctcgtaaatattttaaaaaggttaagaacgctcaggaggcccatgaagctattagacccac

SEQ ID NO: 67936 - DNA, 149 bp, Arabidopsis thaliana landsberg
gacactaggggaaacgaaagacacgcaaccagccaacgcggtgatccaaaaaacaaaaccaaggataaagggagaaagacacgagataaagcatgacagcaaccggcaaaaccaaaacgaacaagagaaacagaccgacaagacgacac

SEQ ID NO: 67937 - DNA, 165 bp, Arabidopsis thaliana landsberg
aatattgaatgcgttgaaaacaatgggattcatgactattcttcggtttaatactggcggaagacctcatagtcgagccacttgtaagatgtctttataacggcttggactatgaggagctttccatgatttaaaatcagggttcatacaagcaccagaactaac

SEQ ID NO: 67938 - DNA, 203 bp, Arabidopsis thaliana landsberg
cggctccaccctcgccgacctgggcggcatcaaccagctggacaacgatgtccggagccgggcaccgcggcacgtaggaacagctgaccaccgaggagccgccacggccaatggagcccaactacttcggcgaggcacgggtcaccaaggccgcgctgcccacaaagcgggaggcacgcgccggccgggacatcacggggaca

SEQ ID NO: 67939 - DNA, 729 bp, Arabidopsis thaliana landsberg
actaccaaataaaacatatattccacgaaactaaaagataataaagtaaccgtcgaaactcacaagacacaagccaatgaaaatcaattttgtggacacgagattcctaacaaaaaataataattgtttataaatcaaaatacaaaacctattcaatcaaaacattttattatacaagcaaattaatattgtacgtaagaaacatttgatttccaactattcaattttgagcaaagaggttaatctaagaatagatttccgaatatatatcaaagtattgaaatcatttacgattaaccaaacatggcgccatgaaacccgattgacagaaaatattgatcttaaatgatgacgtttttgtgtttgtgtttgtgtaactgtgtttgccctattagcaaaaaaagtttagactttgtgtatgaactaaagtattattaacacccaaaacgttttgcttttagaattgctaaactctgacagttaccgttatacatttaatcaattcaaatgataactaaattaaacaacacaattatgaataaataaaagaaaaaaatatgaattaaaaactatataaaggcactgataatacatttttaaaaagttgtatagagttaaaaacaaatgtgtttatgagcatcgactggccaaaatacgaacacgttttggttttgcagcgctgatatagataagatttttcactcgaccaacaaaaatgaagaagaaaag

SEQ ID NO: 67940 - DNA, 617 bp, Arabidopsis thaliana landsberg
caccttccaaatgagaagctaattaagctctatagctagctactgccacacaacacatgaccactataccatctatctattgtttgcatattatgtgttgtaaacttgtaatgttttttattcttttttttgtctaagtttgttattcttttactgtcgtttgatgttatccttgttgttgatgttgttttcttttaatcagttgtttttgtaatatatacagcttattcttattctagtgattacaaactttcttgttcctcttaatctctgtaaaccaaacaatataaattatatacgaattatcattccctgaaatgtttgcatagacaactcaaattacatgagacattctgaaaaaattattaatcaacgtttaattcaataataactttgtctttttatcgtttaatcaattacctgagcaaatcacggacaccaccaacaattttagaagaaaccttaccgatgatcagatgaatgatacgacttgtccctggcgatgaagcccaggcccataactaggcccaatatatatgatcacatatggtccaagataacttatcggtatgcgcagtaatttactgaaaaccaaagaccatttttttatgtaatgt

SEQ ID NO: 67941 - DNA, 593 bp, Arabidopsis thaliana landsberg
  unsure (1)..(593): unsure at all n locations
cttcaatggccacacccaatgccaccgggtcgctctttcttttacattgaactgtattccaaactcaaaggttctacttcctggctgcgctgggccacattgcgcggactggnnnnnnnnnnnnnnnnnnnnnnnnnnnnnnnnnctggtcccgactaccggttcggctggggattgctgaatgtagagaaggccgctaacctgatcaatacagctgttgccaataataattctgccaccagccctgccctgatgctggagaatacccttgcacagggacaaacattcaccactaccgtagtggcttcaggcaacggccctttaagtgctaccatttgctggacggatgtgaaaggttctgtagaccaggtgaacaaactcaataaccgcaccaagcggctggttaacgacctggatatacgcattaccaaaggaagcggaacaagccaggttacctatnnnnnnnnnnnnnnnnnnnnnnnnnnnnnnnnnnnnnnnnnnnnnnnnnnngataatatcaccgataacgtggaaaggatagatattgatactgcatgggtaccggcactacctacaccattacgggtacacat

SEQ ID NO: 67942 - DNA, 719 bp, Arabidopsis thaliana landsberg
aaaccttaaattaaaaccaagtcaaacaaaaaatcaacactttgactccgctcaaactctacactgcaattcaaataaatctgacaaaatcacaattttatccacaaaacagagacaatagaatctatgagccctaaatgcttcactgaaacaacaacaatcagattgaaacaaaccacaacgaagcaaattcaaaaaaccaaactttcgccggcgagaatcaatttcgaaggaacaacaacactcacaaggatcacaaacaaaatttttctttagttgaaaacacaatcgaaccaagtcaaacaaaaatcaatactttcgacactggagcgcaattcaaataaatctaaacaaaatcataaacagaaaagagagagagagagactatgaaccctaaatgcttcactgaaacaacaacactcagattaaaacagagcaaaacatagaaaaattcaaaaaacacaaataaaaatcaaaactttcgttaattcaaatcaaatctcaaaggaacaacaacactcaccgggatcacaaagtcggaaaaactcctgaacatctgcacacacaaaagggtaatctcaaaattcagtttttttccggtgacaaaactgagatagtaataaggaagaaagaaaaaacaaattgttaccagtggttaaagccttaatcatgccagctctacgacccttaaaatccctaaacaccttttaacagtgcgt

SEQ ID NO: 67943 - DNA, 709 bp, Arabidopsis thaliana landsberg
tgcgtgagatgcaaagaatttccattctcttgttaatcgaattaacttaagtcacagatatttatttcctgattgatgtatttattttctagctcctataactctcccaaaacagttccttaatttaaaaaggtctaatattgcttttttcaaaattgaattatttgatacgaagattcaaaaagctcacaaaaaaagttttttaaaaggggaaagtgctaaaacaacctacccaagtggcgttacacactacgtatctttcttctcacacaaaaaaattgggaaatacatatactctttttattcttccaaattcttaaaaaaacaaaattttggttttgacgtagttttcttataattaagaaaatgaaatatcgcaatttcgtttttctccactccttgaaagttccaaactttatagctcatttggctcttttccctttatatattgctcttcatcttcctaacctttctccctaacttctctgatcatccttttctctctttatttataaattgatctgcatagtactctctgaatctatatcttcaaaaaaaaaaaacgtccaggatcaaatcaagaaacccattaaaaaaaaaaatcaggctttggtttcagttgtaagggtttaaggtttcttggggaagaaacgatggagactttttgtgggctccactaggacgaagagcatatggatttacctcgtgg

SEQ ID NO: 67944 - DNA, 580 bp, Arabidopsis thaliana landsberg
gcggcgataacgacgaggcgtttcattaggcggcttccccacagatttatgcttactctatcgtttcagtctgatccgtcaatgtggcaatgtttttgcagcgttttttgcaacttatcccggcaacagcgcgctcacggcgtgcccgacgatcgcgcaggcgatgacaagcaggatcaggctgaccgtgacgtcgaagacctgtttgttgcgcgggtgcgacagaaggcgcgtcagggtgaccgcgccgaaaccgtaagaggtcatggcgatgacatccatgccgatggtggtggcggcgaagacggtcatctgcaacggcatgggccggtgaatgtcgagaaacggcggcaggacggcgctgaagaacagggtgatcttgggattgagcaactgcaccatgaagccctgccggaaggtctgcgaaaagggcatgtccgggctgacgccttggctgagtgagacgccgagcccttcgttgcggatatcgagcgcgcggcgcagcgaggtcaagctgatccagccaagatagaggccgcccgcaatggcgatcagcgggaacataagcggcagggcgatc

SEQ ID NO: 67945 - DNA, 2232 bp, Arabidopsis thaliana landsberg
  unsure (1)..(2232): unsure at all n locations
gtttgtattttttttttgcttcctatcagcgctcatgcaagtgacctaggtcttctacaagctgtttttatcatccacataaatctcagtagttgtgctttcaagtagttttaaaacacttctgaattattgtttccctataatggaaaacttgatgtcctgtttcttgtttcctgtggaattacttctccattttatgctgtgttgaatatttcatcagttcatccttactaactatgtatttccattgtcttaattgcaggtggcgcaagtatcgggtgcccnnnnnnnnnnnnnnnnnnnnnnnnnnnnnttaatgctgaattagtgagtttaagggttggaaatgataacatgactacagagacagaaactcctttgctcgattttcctacaaggcctctgtggtcaaacatctatgtagataataatgcaaaagttttggtcccgctgctgtggaccagaatgcaggtcagtaaatttccggaatgtctttttttgttcttcttttgatatagtcttgaatcgtattttctactctgattcttttgtgttccttgtaaacctttataatatgaatggctttctatatttttctttttctttttaagagttgaccttgcaattttcagtactttttcttatcaaaggagcttctatgagcttaatagaagatccttggtctctcttcctttgaatacttagtatgttggcactaccccctatggttgttacttgttatttatttttctgattctgaaggtcggaggtcaaatcagtctttatcggggaagcagcattgttttcgggttatcaaaatatccaatttcagaatttgagcttgttgctgaagaacttttaatgagtaactccgttataaaggcaggttattgttcctaaccagtcagtaagaatcttgtttgtcttgtaccgtcctgtttttcctgtatgttatgttaagttatatgtcctttaatgaaggtttttggtgcattacgacttgttacgaagatgctgctcatgttgaattctgtgattcaaattgatggtgaaggaaaccctgcagtgccttcctctgttcttgaagttcgcaaccttgcagttctaaaggtatacttgaaaattttatcatgtctctttttcttaattggttggattggaagacagattttgactttttcttcttgtagggaaaatccgtcattacttctaatacgaacttgggtgtatatggtcaaggaatgttgacgctatctggtcctggggatgcaattaaaggccaaagactttccttatctcaattttacaacataactgtaagaagttattgtcttaaaatgttaataacttccaacttctgttgacttgtatacctctatgttattatgagatcatgtttccgtctgtttgttaacaaacatttacttagacatagtcatcggtggaatgcaaaactctctttaacagttcataaattttgcaggttggaccaggctctatacttcaagcaccacttgatgattatgaaagcaaaaacgcgtgagtaatacttcctatacgtttacataattttttttgtgaggatgattagtacttgactcaataattaaaaacgtttgacagggttactcagaccctttgtgagagcaaaacatgcccaatagatttaatcagtccgccggatgattgccatgtcaattatacactatccttttcccttcaggtatatttgatggtggttcaaaagtatctttctggcacgagttaagttttgtgatgtatagactttgtactacagactaggtagttacacgagtaaggagtctactatcaataaattattaggcaaattgaaactgtttgctaatataggccaaacaattgtgagttccaatatcctgtaaaacccagagttgtgtgtagtatccctacctgtgttactctcctggagtaaaagcagacttgagtgctacttaataatgattttctcttatatttagcgttgaacttttcatgattcttcaacattttaattttctagatatgtcgagttgaggacattcttgtgagaggacttgtgaaaggaagcataattcaaatccacagggcgagaacggtagtagttactgatgatggcttgataactgcatctggatttggtacattaattatgaaaactcacccttctattcccctttcagcatattcctatagctgtttgccttttcacca

SEQ ID NO: 67946 - DNA, 550 bp, Arabidopsis thaliana landsberg
  unsure (1)..(550): unsure at all n locations
ccgcacgcatctcttctatctaaccgagatctctgggctcatccttgccgttacctccgtagtgacgcaggaggattcacgcacctctaccatgacttcctttcctggagtggcgcggcgcttgtgcttgcggccgccgcagcgatcgctgcgctactctcggatagagaacgagnnnnnnnnnnnnnnnnnnnnnnnnnnnnnnnnnnnnnnnnnnnnnnnnnnnnctttgcagtcggggtaccagcggtaggaatcgcggcaggagtcgcacttctcgctgcggccgcgtacgcattcttacttcgaaatgcccgcgtgccgttcgcgagcgtggtagtcggagctgtgctcattggcggagtgctcttcggtgtggcaagtcccaagatccctgtcccggtcgagatcaagccgtcctatctggtaacgtcgaggatcgttggcacgcagtaccagaactctttgctgcacgcgcttagcggcagcggtccgaacggattctcgtttgcatggaaccagtatcgtccggtggaaatgaatgcgacac

SEQ ID NO: 67947 - DNA, 695 bp, Arabidopsis thaliana landsberg
tgatcgcgctgttcgacgccgatagcaggcagcgcacgccactgacgtagccgatgccggcgatggtgttgccaccggcaagagagccatccttgtcgtcatgcatgcgggagccggcaagcgatgcaatttccaggaacggcgagccgcgatccagcatcaggttgacccgctcacgcggcagcaactggccacgcttgcgaaatttctgcgtctgggcaatttccgtatcgcgcactttttgctcgacggcacgtacttcggacaggcaggcgagcatgtccgcgcgattgcgctggaatgcgccgcggtgctgtcgatcaacgattcgatggcggccatctgtgctctccgtcagccttcacttcttgcccgcgggaaacgtgcccatcagcttgctgatgatgcccagcatcacctcgtcggcgccaccgccgatcgaggtcagacggaagtcgcgatacgcacgcgccaccgggttttcccacatgaaacccatgccgccccagtattgcaggcagctgtcgctgacttcgcgtgccagccggccaaccttgagcttggccatcgaagccagcttcaccacctgcagatcatcctggttggcgacgtacagctcgaccgtgcgataggtcaaggcacgcaacgccttgatttaagtctgcaattcggcaaggcggaaatgcacactctga

SEQ ID NO: 67948 - DNA, 546 bp, Arabidopsis thaliana landsberg
tttgattgaactgactggaaacaacacaagcacaaacacaaatcaggtagctgtttgttcaatgcaagaacatctatcgacactgtagaagcacaaatcatggtgcgttcgatcagtttaacagaaaaataggaaacaagaactgaaggtcaattcccaagttgtttgattagtaaggaaatgaggttttgtgtgttctaatcatctggtctcaagggtcaattcaggagcatgaattgatcattaacaacagaatggcaaattcccattttccatgttttttattatctgaaactgtaactgtaagttgtgtgtttcagtcagatttctgaaaacttgtatattacaaacacaagtgtgaaggctaacaagtgtactagaccaagatattaacaagcaagcaagagcaaagtataaatgtaggaaatggaaatgaaatgaaggatgcgtaaaaagagaagaaagggaagaatgtgactagaagaaattcacctttgagataatatcattagtaactgcgaaatgtgtctgacaatacttgcagct

SEQ ID NO: 67949 - DNA, 3041 bp, Arabidopsis thaliana landsberg
ccccaaacaatatattataaaaacattaattaatttatgaccatgatgaatattctcttctctctttggtaggagtatttttgtttttggcaataaattaaaagaagcacttatttacctataagtctataaccaaattctttttcatttttttttgttaatctctctatccttgttttaataaatactttacattatttgaatatttctgacaatggtgggagtgagatttcaatttatgcattattacagattttatgtgaatggtgggtatatgaaaagaaatgtcctaatcttgaaactatgacgtttgagagtgtaattcgttgatgcctcctcatataaacaacaaaatatgtagaactcattacctggttttccaagaagagtgattctggatcccctatacatctgcagtataatcaaaacaatgaaaaaacgttttaaaaatattcaaattaataaaagataaaggtggaaagagcagtgtgatgtatacgaataaacagtacaagacaataaatagtattaaaaaagtatttttttagcattttctttgacctggagatggctcttgacgtgtgatatggttagtcccttgacatccattatcttcagaacaagttttggagttgcttctgtttcattcaaacacaaaaatacaaaacatttaaaaactggactatggcgataatgaatattggtatatattgcgattttatataactgcccaagtaaaagctacaaaaaccgaacttaaagatatctaaaaaaaataccaaaaaaaagagattggttaaatagactgactatattgaccgccgagcaaatcaacggcgtgaacgaaactccggtgaagctccggcgtccatctcagacgaggcaccggagatcgtacgtatggtcttactccaccaattactccgtcgttgcttcttccacacctacccattcgaaaaccctaattcttttgatcttgatttcttgaaagaaaaagaaaacgttttttttttttgccttctgtagaggaagaaagatgttgaagaagaagaacactaagggaggattgtgattttgtgagtgaaggttaaagatataaaaggacaaaaggtttctgtttttatagaggataaatgtttcttttcccctactatttattctcctttgtctctttttggaagaactcgtgcttatatgtgtgtgtatatgtatgtcagcgtgtgtatatattagagaagctaaagaaaaatcttaactcaagaaattaattgtgtgatgtgataacataagtaattcttggacgagaaagaagaaagatgataatattttaattattttataattagtaaccagctggaatgttgttatacttttatatagtttgaggtgacatgtgtttttgacctaacagaataaaatatattcaacacaaatttatcatccatttgactttccatgcattagtagaaaatagctctacaagaatcttttcgagttttggttggtatccataatacatggaccactcccgtcgaagaaacgtcattaaccagagaaagagaaccaataaagaggttaaaatattgaagcattatttcattaattaatcaccgtttatctttacaaaaatcagatgaaagttgtatgctttaaaaattacatataaatatgtgaaactttatgattatctatcatctttacttaatctcgacagccactaaaatatcatccagcaccaaatttgtattaagatatggactactttgtagaagaatctcatatttgcttttggtttgttttgtccaatcctaattgcttacaagaattaccttattgggatttgggatttacccaaatgaagaagtttcctctaggcgtcacacttttttcatcataggttatttagaccaaattaaaataaataaaaataagaaaaatgaaaaatagcccaactgctaagctttgaccttaggatcatcattccattctttttttagtttccttgttttaaaaaaaatcttgtttctgggatttcgtgttatgtaattatttactttctgattattagaaagtcatattaatggtccttcgtacgtatttgaaccaaccttttgacttcattcccataatttcctttttgcattttcgtccatttccaattcattccttttctttttgttcttctctaagactgacacgcaatttctgaaaagaattttttgtaatgataatgcattacacatgcccctatgcttctgcttctttccagtttgtcctcttactttttgatatctttctgatttcttgctgcgtattgaaaacaaatcaaaatcatttccctatgtggtagcccattaaaattactggctcgggattcttgatacttttaaaaatataaatctcttcaaaattcgaattacaatttgaaaaatataaccatatatatatacatatcacaaaagaagcatttcatccacatatggataatccaatccataatacattataccatgatgtaaccttccagaaataccggcaaaaaaaaaaaacattccagaaatattgaactcaggtaatcttcattgtttgagtttaaccttagatctaggtaatatcttctagtgatctggtcatctggctaactattaaagttaaaatgcttccacaaaccgataatattttgagcgctacattgctatacaaactttgtggacaacatacgaagacaataagctattaagcgtatggtcttagccatttgtgaaatgtgtcgagatcacttatacccaaatgtttcctatctcctaaatatagtttggatcccacaatattatatataaattatattcagaataaaagaatatgaagtcacaaaaaaaaattccaaaaaaaaggaagaaaaaaacgtaggaagttgcttaaagcaggagggtgggacgtaaatgtcgtcgatgacgaaatggacaaatgtgtatgtaagtagtacgcatagtcatcttcttggccataacccatgtttcgtttgtcttggttacatttca

SEQ ID NO: 67950 - DNA, 285 bp, Arabidopsis thaliana landsberg
acgcacctcttctatctaaccgagatctatgggctcatccttgccgttacctcttgtgagagacgcaggaagattatcgcacgtctacctcgacttgcttaacgggagtggggcggggatcgtgcttgcaggcgccgcagcgaacggtgacctactctgggatagagaacgaggtatgacccatcgatacatgaagcagttacggtcgtgacgaccggcattttcttttgcacatcggggtaccaacgataggaagaggagtaggagtcatacttaacggtgagg

SEQ ID NO: 67951 - DNA, 510 bp, Arabidopsis thaliana landsberg
tattttatatttctatattagttttacttacagacaaattggatatttttatatcaacaatttacattataatcctaaaacgacatctattttgcgggtcgaatcatatagactaattttgtgagaaataatactaatgtgtacattattttttttgcagctttcagtatttttgctgatgaaacatacattcgatgtgatttacggaaccgaagaatatccattctctgtatttacggtaaaaatgctattccttttgattatccaatcattcaaatccttaatgtatgtttgttttacatgtatattaatactgtatgatctgatggtaaaagaattgggtggatgaaaatgaatgcaggtactaacattaaaggccattgggatactattgccaatgttcattataattcgaacaatctcaactattcagaaaactcttcgtcgtcgtcatcaatatcctgtaagttcgtttccccaatccctttttatttaaaggttcattaaaac

SEQ ID NO: 67952 - DNA, 706 bp, Arabidopsis thaliana landsberg
aggtcggaatacgaattccagtatatcagaagtcgcctctgtctctcaaggataggagtgagagaagaggttgaggttttttgtccaaagtacaaactcgctgattagatgatcaagcgtgtatgttaaaccgatgtgaggtgcaatccggcaatcccatgagtcttatcacccaccgctgatcaaattgtgaatgaaacaaaaaagatggtctcacgtttcctcggattcactacgttccaatttccacatgaagatttttaaaaaattcaagattgtatccatatggacctgaaacttttactattgtctattggacatggataaaagcacaaaacatgtcattcgtttccaataaaatcctaaaacatatgtacaaactctgaaactagtagttttaagcattctagagtttgtcaaaaagatatatttggcttcctcctactcacgtacgtccattctaccattttactctactttcttcatcaacaacttcagtttttttctgcatcaaataaaaggtaatttggataattactatctgagttataaaacaaaccacaagacagtaagggactgaatatcacatacctactactaccattatgaattcacattccagaggaagatgggcggtaatcttcatacttccaagaacattttgcaccttaaacaacatccggctttaatattcctttaaaccaat

SEQ ID NO: 67953 - DNA, 426 bp, Arabidopsis thaliana landsberg
agaatctgtcacctctgttttgtttcttagaaatcagatgatgaggacatagacattctgaatcacgaggaagactttaccttgccgcagagtttctttgataaggaagaagaatgacagaggaagaagaaaagatgttttcttttcattcatcttctcccatctttttgtatatggttaggttttgtcttcagctcttatgataagcttttttctatatattctgaagttttaatgtcaataaaaccatcaggatcaatgaataatctttttgttactctgtccagagagttaataatcataacacgctttttgcggttttcgcttcttttcattgtttgccattttagaagcccagggtttggtgttttgttttggccaatttttttgataccaccatttttgatttggattcctggatgggga

SEQ ID NO: 67954 - DNA, 521 bp, Arabidopsis thaliana landsberg
  unsure (1)..(521): unsure at all n locations
aaagaacaagcttttgcaataagcaattgaaaagtgaatttaattaagatgatatgatactgatagggagctctaggggatagtgtcctcattagtcattacactaaagaaaaagattttgctaagcaattgaagttaccaattctttaagaaggacaatcaatttggtggagatgtacagagtccatccactgtggaagcacaaattgggataatatgaggatagatttattgtgattagcagcttccatataccccttagaattgctaatcaaattaaataaaagttcaagcttcaagatggaaattaagacagaaagatgtctatacaaatataaatcttgtcagaaatcatatggtgtagataaaataatttacatatctacaaataattaagaatgtgatttgaggaaaactttggaccatttaagaagaagatgatgtatattagcatccatgcgagtaccaactccaccccacactaacatgtcagccatgtctttaatngacgacccactcac

SEQ ID NO: 67955 - DNA, 464 bp, Arabidopsis thaliana landsberg
  unsure (1)..(464): unsure at all n locations
acttttttctttaacggcagcagttttgacaatatttaaaaagccttgttcctatcgtcccgctctcctatgcagggaaggaaacagacgggccaatataccacgagtttcaaatttgaagaatagtagcacaatggcataaaatagtatcagcttttggttctgataaactttaatattgtgattgatggaattctcgaaacaatgtatcgttcaggtaaacaatggtgtgattatgtttggatattctttactaggctcattcagatggatgaattgtacttttagggcccggcagtgcgggatcttacttgttttgatgttgctcgnnnnnnnnnnnnnnnnnnnnnnnnnnnnnnnnnnnnngaaagtaagcggcaaagtaacagacgacaaaggcgcgccgctgccgggagtcaatgtgctcattaagggggcaaccaaagggacttcgactgacaccg

SEQ ID NO: 67956 - DNA, 539 bp, Arabidopsis thaliana landsberg
  unsure (1)..(539): unsure at all n locations
cctacagccgttcacggaagtaaccctcgaccatgggccaattggtcatcagctttccgatttgctcgggatgcatcatagcgtgggcggagcgcatacaccagctactcttccacgtccattcatctggtgtaggccactcatgctcgatatcttcttggtaannnnnnnnnnnnnnnnnnnnnnnnnngaccaagatggcgtaaaaagacagaccaaactttaagccccgggatagacgctgtttaaagtgtgcgcgactttcggtagaaatcaagcgtccaaagtgctggcgcatgtggatggagagtggtgggagagagcgggtcggcgtcaatggtgataggaagggcagttgaagacggcctgtcggcggtgagagaagtagtctgctgcggtgggtgaatggttggagccgaacctttggaccaggtatccggtgtggaagcaccggtcgtaggtggcctggtattctaccgatggctgtgcgtggaggcagcattgaccgtgctggatggagagttaaagatgttcattga

SEQ ID NO: 67957 - DNA, 583 bp, Arabidopsis thaliana landsberg
actttccatgtgtctaccatactttggatacgtgtcgtccatataattatgatgattgatgatgatagtggtgatgaggggcatgaccatgggaggcaaatctttggcagagaatcaagtgaacattgccatgtctttgccactaccacactacctaactatttagtaaattttcttattcttttgccaacgaatctgatcgccaagtataatacgatgagcgcaaaacactatttcacatttaggttacatttttttatttaatactgtttgtagatgtaaaagcatttaaaaatagtatctataatacttagaatataaaacatcatttatactatatattttatattggggatttttaacaaatcccattaaaaagagatacttgtagcatgggaacttacaactaaattaccgttatactactattttcctctctaaattatacattcatctcttcttatttatctccaaccactaaaaactttgactggtcatataatttttatgttaccaatcatcataattaagatttaccaatttaacttcacaaaaaaaaaagatttatcaatctaatttactg

SEQ ID NO: 67958 - DNA, 531 bp, Arabidopsis thaliana landsberg
aacagcgaataaaatagacagacaaaaaaaaagatcatctctgcatacatccggttcaccgtacaacatatttttgaatttatcaccaattacgcattcgagctctttttgatagtcaattatgcacgggtaactaaaaaaccaaaaaaaagagcacattggggcatcctttggccaaactacaccactttgctccaattaaccaaggattttttttctagtttgatcccataatgtagagttgagaattgtggtctcaaatcatctatgccttgcctctataaaaagtaaaaaaactgatctggtctttcgaatcattagagaggggataagctcatatttgtgccaaagattaatttataaaacacatagtaaatcatataagttttaggaataattgattaaaaactgtaaaaacattattataacctgaaaatggaactcaaagacaaataaagttagctaatgagctttgctttttccatcacaaagctaaccaacccaacaaaagcccaccaatatctctctctc

SEQ ID NO: 67959 - DNA, 543 bp, Arabidopsis thaliana landsberg
ttccctagtatagaagacgcctttcttgagcttggattatttttagaactatccggttttgagtctccattctctgctacacccatttggttggatgccctgaaaaaactcacatgagatgtgtcctcaagaattcacagagactaagtatactactcaaatcaagaacctttccaatcacatattatgaccctaacaaaccaaagatagcttgttgtaattttagtgggaaactaaaggcagagactttttttttaagctgtgattttggcacaagaacacaagaactgtcttaacatcaaaacataacacaacatccaacaatcactagcaggagtgtttttcagaaatgtacctgtcaccattgtaggatgaagaacgcttaagagaagcgttactatccgctgcatccttcttctgtagcttagtctccactaagctcccactaaaatactcgtttttctccattctcatgcccattagactcggagttttcgacaaacggtcaagatcttcccttattaacgactaggagaaaaaagg

SEQ ID NO: 67960 - DNA, 583 bp, Arabidopsis thaliana landsberg
ctctctatttgcacgaagcaaataggattgattaccattactctctttttgtgtaccatattctatttcttttttgttattagtttttaaacaaaactgtttactagtctatgttctgttatgtttgtttgagtttttatgttaaatttcataacttattatgtataaaattatcgtttgttatgttactgtattttttaatttaatacattattgttgtatttttaaatttcaattaactggataaccatattagtattgattaaatgcccaatgtaaacctaaaacatatagatttgtttgtgtattactgaaaacatatttaaatttgaaaatcactatgaaaataaaaattttacccaaattatgagtattcattagtcattagtctattttgagagtggatttagtctaccattggaaatagccaaatagtttttttttttgtcaaaaggaataggtttacttaaaaaatagaattttgtagggcaggattttggatgtcccaattaaaaagaatggtgggtggccaaagaagaagtttattttttttcttcggaggaacctaattttttttcttcct

SEQ ID NO: 67961 - DNA, 541 bp, Arabidopsis thaliana landsberg
acaaataatatctatatatacttggaaaaccaaaaaaaaaaaaaacatatgtaaatttatgccatcagaaaaataaccactgaagtgattaatgttagatctatgcatagtataaaggaaaaaaaagtacaaatattatatgtgaacataatcaatttcctctattagtgggaattgattacatatcttttcacactaaatttttctttggtgctagaagaagaaaacacaagtaatcaaggttatgttagattttcttaatattcttatttattcgatgtttaaatcacatttgaaccttttattctataatagtttcaaattctaacatttattattcactatatataatggtaaaaaattactgaaatataaatgtgtgaagtgatcttatacatctccgggatagaatgacgagaagataataaacatcgtattgcggtacacgaagtttttaggatttgacaatctcgtttaatttttccaataactataaaaatgattcattaggttaacctaattattaagtgtgtgcgtacta

SEQ ID NO: 67962 - DNA, 520 bp, Arabidopsis thaliana landsberg
acactataaccaagcaataattcaatcggttatgtgtatcatcactagattgaactttccaaaaatcaatcaaccaacgactatagaatctcaataaccaaaagattggattattctttaactaatccatatcttctcaagaaacatgtagaatcctagaacattgaaacaaatctaaccaaagtaaagtaaacttacaaggttgtgacttagccttagccgagaaggatctgaagcttcacatctttggatttttttagcaaaacttgtttcagaaaaatgagcttacatagagactttatcgaaattgaagtcaatggtttaacaagtcaagagtcaaccttactcggtttcttggatactgctgccgactacgaaacttgtctcaatctactttagaatcttatcattgagtttagacatgttctgacctcataaaacaatatccgcatttcacttaggaaaaaaaaaaaaaaatgattgcactttctataacatattataaccaatacttgcatga

SEQ ID NO: 67963 - DNA, 844 bp, Arabidopsis thaliana landsberg
ttgccttttgttctgctgcaaaattgcagggaaggatccttaggcttgagtcaaggaaatggaaactgagtgactgactaagggtatgtgactgaaaatgatgaaaaacccctactctgttttcgattgatgaaagtgaaattaatttctccgttctgcatcatgatttgaagcacaaatttgagacagagaaggcagccaccgctctccttcgatgatgttgtgtgatcacttaaattcttaggcattctttaagatcggagtttttcttaaaagataatgaactctcatgtatttccgaagttgtcacttattgtgaagaagggagtcttttgcggctgattatctaagtttcagctaccaaatttgttagatctctttggagagttctctcatgggtatgaatcttgatgataaagcaacctctctaggtctgaaacagtgacttgcacttgaatctattgctttgacatagactcctttaacatacatttgcattttcatcatttaatttatagtttgggcttatgatcaagtcacgatgagccaaggcttttcatattcttcataaattatagccgtttttttactctgttttaatgcatctctgtcggtttgactctcaacaaatcattgatcctttgcagtcctgggcatgtggatattctggtcgggttcggttttccgggcttaaaatttttagattcgttaggttatatgtacaattttgggtcatgttctattcggataatttggatattggttaaagaacccataaataaccaaagttttttcttggaataataatctaaaataaaacataaaccctgttttgtccttattc

SEQ ID NO: 67964 - DNA, 563 bp, Arabidopsis thaliana landsberg
  unsure (1)..(563): unsure at all n locations
tcaacgttaaatgtattgctccattattgttaatagtttttatataattcgaatcttttttgtgcttcaagggtaagcaccaataataagtgagaaaatgctttctagacaaaaaaaaaggaaaatgagcctcataaaatcaaatgtactcgataaagtgagcctcagcacacattacagccaaattcccaccaagaacgtaattgatgataaacaaaaaaagtttgagattttatttggcaaaagaatatagcaaagtaaaaaagcctcatctgatagagacttaacaactcagaatcaatccaccatcagattcacttatgcgcagtagattcnnnnnnnnnnnnnnnnnnnnnnnnnnnnnnnnncggcttctttagcccagggaacaccatcttggtacctggtatgtactgcatcatataaaaaggccatcaatctcaatgttaacaacaacaactcatgaaacaatcatgacatgattatannnnnnnnnnnnnnnnnnnnnnnnnnnnnnnnnnnnnnnttttctttccattccacagctttgttcttgttagcag

SEQ ID NO: 67965 - DNA, 648 bp, Arabidopsis thaliana landsberg
ccggcgcgccgatcggtattggcggtgtggagtttggcggcgcggatttggctgccgcccaaatggcgcaactgcaaaagagcattgacgcggcgtcggatgctgctgccagcgccaagttcggcaagatgtctctcgacgccgatgcggtgacgcgctcggtcattcccgaaattgctaaaatcgagcaactggaaggcgcactatccaagctcaacgccttgaaggatgcgcaatcgtccgctggcatcagcaatctgccggaaacggaatccgccacccgcgctattgaggtgcagcttaatctgctgaaagagcagaccgccgaatccgaccggcacaacgccaaggttctggaaatctctggcagttatcagggtgtttcgacgcagacggcgctaatccttgaaaagcaacagcaacaactcgccgtggcatcggccataacgggtgaggggcggctggccgcgcatgaagcggcaacgagggctgatcttgaattgcgcggcgttgacgccactgaggccgcagctattgcggccggacagcgagagattgccgagacccaaatcacggttcacgttcaatcccaattgctcgccatgcaggatcaattgagcgttgtccgcccaataacaggcccggagc

SEQ ID NO: 67966 - DNA, 769 bp, Arabidopsis thaliana landsberg
atattttcttatatacagtatctaagaaagaaacttacacccaaagttaaaagaaacaaatcttaaacaaaaatctaggacaaccgaactttattttaacctagaatattctccatattatttaggaatctacaaaaataaatactaaagttcaggaagataatattactaaaagttttaccataaaaagaaagatattttacttaaaaaaaaacgtataaaaactttcattaaaaacaactaagccaaactaaactaaatttataacgactacggtgtaggttttacggttttgttcaatctttcacacaaattatttaattgaaatcataaattattcattcaaacaggaaatcttttaatttaaaactaaatgtagatatgagctaaatcaacaaaaaaacactcacaaaagtttttgagttttttagaatatgccacaaccattatacattgacgcatgtaatattcctcaaccacaaacaaaagggcatttatgtcatttcagctgacacaaactagaagttaacaaagagagaaataatcgacgagaacatttataaaagcagagagactcttcaaagacttctctcataaaaccaaaactccaaacaaaaaaaaaaagatacttcttctccttcaatggcgacagcgacgagaaagagctattaccaacgcccgagtcatcgcttccttccaacagatcggacttacaacgtcaccggagattcagaattcgagttcgacgagtctgatctatactctaacc

SEQ ID NO: 67967 - DNA, 2858 bp, Arabidopsis thaliana landsberg
tcttctctatctcgatagcttccttcgttctgtcggcacaattgaaaatcgaacttctcctcctcaaatcgcaagggcatagactgtaattcgagatggggtcaagggatcaaaaggtaaaatggagctggagctcagccttaatcggagcagcatcagcaacagcagcagcttcactcctaagcgccaagccaaaagatccaacattccaccttatctccatagaccttacctcactgaaactaaacctccctgtcctcgacgcagagctaatgcttaccgtacacgtcactaaccctaacatcgcagccatccattactcctccaccaagatgacaatcctctacgatggcacggttcttggctcagctgaggtcaaagctggctcgcaaccggcgagatcttgtcagcttctccggctaccggcgcgtctggacggtatggagcttgcgcaacacgcgcggcagttcttttctgacgtggcgaatagagagatgaaacttgaggctaagcttactattgaaggagcggctaaggttttgtggtgggatcatagttttagggttcacgtggatagttttgtcaccgttgatcctgtttttcttgatggtattgggcaagagaaaaagtctcagatggatttgtttcttacttaaaaaataattattgttgtaccatttttatttagtttactattttttcagtaattgaaaaagtcttttgaattctatagttaaccttaaattcgagatataatactattaattatacaacggcgatataaacgatgcagcaaaaagattttaattcaacatttcttccaaatgctaaccatttttgttaattatggaaaaaccccaagtattttttgaaattttttagaaaacaatttttatttgggcttataaattattattattaggattaagaaatctgcaacagaaaaagaaagataatattataccctcgtgtaataatattatccacttttcttttttcattagtaggttcatcactaccatccagcagcagcaccaccaccaccacaaccaccgaagtcaccaccaccatgtcctgaccttcacaatcaccatgtcaaccgcaaccaccgcaaacatcatcaccaccttgccgcgatcactagatattcttttttttttttgtaataggcgatcactatttttccctctttaattacatagttacatataaaatatttatatcaattcgattcaatatatttgcataactatttttagaatcatttatacaaataatgtaattttcgtttacatcaattataactgatatagaaaaataaaattaggatacaaatagcattatttgctgtaatgtaagacaaatttactatgttcctttgtaaactagataattacgtttactaatgtaaatttttgtaaactcttttctttttaatttagccaattgacctgtagaatttgtcctagtgaaatatgtatatgtaatgataaaaaaatattttttaattttttcaaattagtaatttattttctgagtctttgcctacataatttttgtttttgacactttggtagaatatgtatattatattttaatatcgttaattactgaaacacatgatttcaatttacaaatcaaatccaatgattaaattacatatattttaactagataaacacaatttacacttaaatggtcaatagtcaattaaaattttaccgtgaacggagttactttccacatatcaaagagctacaccgtacagttttcttcaccggaaatggcatttcgtagggttttactctctcacctccgccgatctcaccacacttgctcctctctctctcctcaccatgtctccgccacaacccaacctttaatcgcgctcgctcttttccaatcccgcttcttttccactccatctgacctagattctgagctaactcgattcagagacgattcaatcgctggcgttggaagcaatgatcatggcttagagttcgacgattcaatcgctagcttgggaagcaatggtcatggcttagagttcggcgattcaatcggtagcttgggaagcaatggttatggattagagttcggtgacttgagccaggatttgtcaaactatgattacttgactcaacctgtgatctcgttgcttgattcataccatgacatcactggattgccttggtaaatacaaagttctctgatttctgatttgggtttttatcgtatgattagctctcaatcgaaagtttcgatctttcacatcttaattaacaaattaagattcttgtttcagtttcgtagtttgtgtcttttgaaagttttgcgaagtttattagttttgttaatttgaatcagatgaattggtcaggtgggtggttattgctacgtctactgtggcatttagaacggctttgcttcctatactgattttgcaacggaagcaaactaaaaggatctcacagttcttacctaagcgtgagcattttttttatccctttgtttcttcaacactggtggttgttaaagcattataaagtgaaatcttttgttcacttgatgctgataatttgatagtggtttttttgtagtaccgcatttctggcctccacaaggttcaggaaggagtgttcttgatcaattgaagctttttcggaaggaaagaaaagatatcgggtgcccttcgtttttgtgggttcctgcttatttctccatccaggtgatgcttcgtatcttcttgtggaactagaccgtgatatgatgttgttcaatgccgttcatatttctgtagaaatttagaaaatattattttttcgcagccctgttagagcatgagtgaatcatga

SEQ ID NO: 67968 - DNA, 525 bp, Arabidopsis thaliana landsberg
atggcgcatatactcggataaagttccctatttcgatatcaacatccgtacaaactttcggtcttaaaataattgttgtttctgtttcttttgccgcaagagcttgtgtgttcttgagtaatagggagtcctacaaaatcgaatgtgactaaatcaattgcttaagggtctaattaaaggagcaggtttatcatatgcgtcaaagagatggagagataaaccccatagaggtcaatgacagagcatttgcagacgacaagctttccctccaagtgtcttgacatgactttaacatcaacatagcccgatgaatctgagttgggaaattggaacgagtaacagaggtatgaactagattctgttcatatgggagctacaaatagagtttcctgccttttcgattccgctttgcaatttcctcatgatttccatttccgtctctttttcttgtttcatgatcctgcgcaacttgccatacaggcttgagccactgcaaactggtgcaacccaaaatgggttttcatg

SEQ ID NO: 67969 - DNA, 295 bp, Arabidopsis thaliana landsberg
gttgaggacccggtttctattcctacagcgcgagcccgggatgttcgttctaaggtgctcatcattggtggttgcattagatagtcaatcgatgactcattccgtctaataggggaagggtaccatgtgaacggactatgctgatattgtatttaaggctgagggccgagggaaacccaggagatctggcgatggcacaaactagttagggggaccccttgaaaaatccggtccctaagcgtggatgtatagaatcccttctggaagagctgagacgactgctgaggcctttgtg

SEQ ID NO: 67970 - DNA, 445 bp, Arabidopsis thaliana landsberg
tcggttgccactcaaccaaccctgaagggctaaattctcggattcttgcagaacaattgcatcactgagaaggctgggaacaaaggaagagaagtcaaatggaagccctctgggagcaggaccaaagcatctcgatattcgctgcttgaatctgccaaggccactgcttgggtagatctgcgcctgcatgtgtgtcacacaacattgcagcgcttttccatatgtgaagaaaatagtgcgtttgaaatctcctagtattacaaacagaccttcccaacatgctatttacttgcactgctgaattgttcttggaggaaaatcctctacgtttggacactgccatggataaggggagctacaaacagagcatatgctaccagcctgtccagcagataatcgctaccacgctaaaaccagaaatgaacagtaactaggaatgacttta

SEQ ID NO: 67971 - DNA, 538 bp, Arabidopsis thaliana landsberg
cgaatgatggacactgcacatactaacttcactttttgttgtcactttagtaaatttataaagttatcaaaggtctttcgggcaatataacagcctaatatccaaaataaaaagtaaataagaaggccttttaacaaacaaacaaaaaactaaataacaaaccaaaaaatattatgtacttatgtagtacatgaaataacaatgttagagatttgcaacttgtctatctaatatatgtcaaatatatattacttaataaaacaaaattaaaaggctctctacaatgaaatacaaatgtaattagattgaaaagaaaaagaaaaaggaaaggaagcctaaaaaggcaagatatataagccaatatgtctaagacagaactttataaaggaaataacaaaaaagataaagcataactaaaccattgaaattgcagattacactcatatatatatattgaaaaacttacattcatattcaataacatagagaacaaaaccaaaaatgtgtagagttttctatttgcaaaactcttaatttg

SEQ ID NO: 67972 - DNA, 176 bp, Arabidopsis thaliana landsberg
actctctctttctatctctaaaaataaaagcttcagtcttttttctctcttttttttgatttaaaaggttgaacctttacctatttttcccggcactatggtaaatcgcagcgtaactttcgaaaggaagggagggacagctgataaggctattgactcctcttcacgacgggata

SEQ ID NO: 67973 - DNA, 151 bp, Arabidopsis thaliana landsberg
tggtttccgaatcagcgagctcaatcgtttggctgaaactggaccttacaagcctaggcttttcaattctaccaaacaaaagcctcaatatcaagcttacctaacaaaaccttacactcaaaaaggatttacgctacaatcacgagggctc

SEQ ID NO: 67974 - DNA, 2741 bp, Arabidopsis thaliana landsberg
ccgtttgcaggaaaatagtggatgcagaaacaccggtttccagtcttttttccagtctatatattgtccgaagaaacaaagtcaatatgtcgtcttcatggatttcccgaatgatgttaatgctgctcctttgcaggaacttccctggattcctgaacattgcgacatttccaaaggggatgacttgtcttcatctggtaatgagattggtccagtggctgaacccaacatttcatcaggaaaagttgtatttaatcagacaagcaaaacacagtcttcagagaacaaacgtgaggacaaagagccgaacatctcgttgatgtctcttagtaagtctaagccaaatgaagagccaaaaacatgcggtgaagctgatggaaaggttagtccatgtttaaccaacagaaactctggtcttaaaagtttgtggattagtcggttttcttctaaaggttcgttccctcagaaaaaggcaagtgaaacggctaaagaggccaatgcttcagcctcagacgcagctaaaacccgtgattcacggaaaatgctggcagacaagaatgttataagacccagtatcagctcggtagatgggcccgataaaccggacactgtccttcctatagtttcgtcaatgagaatagagtcatcagaagcaatggcttctttgtttgctagaagattagaagcaatgaaaagcatcatgccctcaggttctttagctgagaatgcagaggaggaacagagggatctaatttgtttctactgcggtaaaaagggtcattgtttacgggattgtttggaagaactgatactgagctcagagatctagtacagaacataagtgtgcggaatggaagagaagaagcgtcaagtctatgcattagatgttttcagcttagtcactgggctgcaacatgcccgaatgctcccctgtatggttcaggagctgaaggtagagctatgaagaacgctttagcttctacctctggcatgaagctgcccataagtggtttcacagacgtaccaagggcggtctttgatgctgttcaagtgcttcgcctgagccgcacagacgttctcaagtaagatctaattcacacctaaaagactgtttcccttgtcacattatgaggctttaacatcttttgacatttcatttcagatggataaacaccaagaagtctgtatcgggtctcgaagggttcttcttgcggttaaggctcgggaaatgggaagaagggcttggaggaacagggtattatgtagctcgcatagatggttggtacactttcatataaatcaatactcaaactcgcgtatttctcgaatatttgcaactgaaatatgtttgttttaaccaggggacacagagggacaaagctcaaggagacattcagagaaaagcttaatttcagttaaggttaaaggtgtgacttgccttgttgagtctcagtttatctcaaaccaagactttcttgaggtatataataaaatttgaccaattatgtcaaaagttttgaaatttgctaatttgctaagttttcatctgaatattttgcattaatttatctgagcaggaggagttaaaggcctggtggcagagcgcggggaaaagtgccggaacaagcggctacgacggcatcccgtcggcggaggaacttagtcggaaaattcagcagagaaaaatgttaggcttttaggacatttgttcaagtagataaatgtttttaagttataggttttacgattacccgtgtattttttcggttgaaaaggagagtgtaaatttcttagttcagagggcatcgaatgtctcaaaccatacaacaatctaaaactggatgtccaatctatttagatttgcgagttttattcggatctttatgtctcgatgactatttattgtgattgttaagcttgtatagtctatgtgtgaaggatcaaagtatcatggaagaacaaagtacattgatatcaagagagatattgtggtgtcttgctcatttttcatgaggtatgtttgatagaatttgatgtttgtcctaaatgaattaatctgttttgacatcatatttatgtttggtgttttatatcaaaacatattttggatttagtgtgcaatggtcattgttgtttggcatacagcttgcacaatattgtttttaaagtgtcaccaaattgaaaattggttcactcacatgagcaatcgctttagaaattttagtgcaagctgagacaaagtatgatggtttggtgctataggagtttgtcttgtaatgcttgtcagtgttgccttgacatgaagtaaagtagatgaggtaagcctattgaaataccgatcataatttatcaaaaatcatgaatattttgtagagctagataagtacactagatcactattcactaccacttaattatttgcttggatagttcatagttgtattagcctgaactttgcagtaattaaaaattcatcaaatcgaccttcaaacttttgagaattagacttaataaattctggaaactgatacattgttgggttatctagctattttttttatttaatatgtttattttctcttggccttattttccaaatatatgggcccaaatatattaaaaaataaagagaacataaagaaaatatttttagggttacaggatgcgctacctatttatttggtgcttaagttaagttgtttgtcttttgcgcatacattgttttattttgaggctttggt

SEQ ID NO: 67975 - DNA, 408 bp, Arabidopsis thaliana landsberg
tgaatgatgtattgatggtcctttttactctggtgtatatcttatgcaagcggaaagagtaaagcgggatattgcgggttaagcgacccaaataatggatgatgaacctccgacagtttaaccccatcttgttccggttgcacgatttattggttctcgacttgcttcggctcctacaccttcaccatttcagtccaatgatggaaggtctgctccacatcaaaaagttccacgtttatctccaggatccagtgttggtgctgttattgttgatgttgagaacagcctcgagtctgatgtatgtattcctgtcctgcaaaggcattatgtgattgtaacttctttgtcactgtgtaattgagagtgcttgaccttacataaacaaacagtcattctaattaatttact

SEQ ID NO: 67976 - DNA, 240 bp, Arabidopsis thaliana landsberg
cctataaccgagaaaccaaatctaaatgaaaccgatccgaaagcaatcgacctagtatttcacatatttacaagtgtattttcctttgtcaagttttatatttagtacggatcagtttatttatgggttaatacaatttgtgtttgtataaataaatgattagtcacaaacgtaaacgtgtaaaacctaattttttcacgcaccatgctttaaattggattctgctacaatggcacattg

SEQ ID NO: 67977 - DNA, 233 bp, Arabidopsis thaliana landsberg
cacgcaacttatttagaaaatccaaacctttgatctttctccagtctttatactttgtgctgataaatcccctcaggagggttttaaaacttaaccatttcttaataaatcacgatgtagcatgttttcatccactaaacgattcttccctttttactgactacccataatgccaaataactttcatgcctaatccaactgtctacagtacctttctatttctgactgttcta

SEQ ID NO: 67978 - DNA, 530 bp, Arabidopsis thaliana landsberg
  unsure (1)..(530): unsure at all n locations
gccctcagtgatagttggttcagaaacatacatagtttttggatacgatgatgctctttcttcatcgggggggttctataaaaatgggaggatccacaccttaagtaaagcccctagtatgtcggtggctcggattgacgcagtagttgttggacagtatcctaacatatatgtaatgggagggtgtgattcagatgaatccatgaattnnnnnnnnnnnnnnnnnntaaagactcaaacgtgggaacctttgccagaccctggtccagaggttcgtggccagttggttaggaaaatgaaaatgcagaagaaaaacgtctacgttagtagtgaaaagaaggattatatttatgatactgaagaacgtacatggaaagttacagaggcagtctttaatttcagttggtgtgtgatagagaaagtacgctacatatattataacaagaattgttggtggcttgacacaaagtctatagactggagaaagatcaaaggtttggattttctaaataagtttcgtgaaacagata

SEQ ID NO: 67979 - DNA, 512 bp, Arabidopsis thaliana landsberg
atgctggtggtatcgccagacagtgcactgttgcacaagacatcccaatacaggtttcatgtaccgtttccgtagtgatctgaattcccgcgtcaagctgctcaaggcaggagcgcttgcgtgcgtggccgggcttcatgtcgcggtgatagctgctattgtggctgggcctgcgtcatcggcccaacccgcgatggcggcgcttgaacaggtcagtattgttcagttgcttcctgcttcgcccgagcaaagcgaaaatacggaacaagaccggcaacaagccgaacccagccaggaaccaacgccgccacccgttatcgaacccgtggcggaacctgagcccgaggtcgaaccagagcgtgaacccgaggctcagcccgagcctgtagccaagcccgaaccagaggcagagcccgtaatacaacccgaacccgaacccgaaccgatcactaagcccaaacccaaacctgagccaatcgttgagcccaggcccgaacccaagcctgtggtcg

SEQ ID NO: 67980 - DNA, 544 bp, Arabidopsis thaliana landsberg
  unsure (1)..(544): unsure at all n locations
aagttgacaataagaacccgtacttcacaacctttttatgagaaannaganngggatcctattaaccaaattatgaccactatccggcctaacagncatttcttcaacctgaaataaaaaagtattgattgacatgaaatgcttgtaggtttctaatttatgtagcatatattctttctatttgtttttctgatcaaatatcgtagcatatatcatatttctctggatgtaatataacatgtaattttttccatcgtataatggatagttgtcgtaaactaaaatttaatttatgttgttcgctacgttatggactaaaccttctgattcaatatctaagcaaatcgaaagtagttctcatgttatcgattgcctttatgtgtgtgtaaaaaaatatatggctaatatctgtatactgcgaaatgtagaaatgtacatatgttatatatcctcatggatataaactttccttgacattacaggagatagatatatagattgccactnnnnnnnnnnnnnnnnnnnnnnnnnnnnnnnnnnnngt

SEQ ID NO: 67981 - DNA, 1144 bp, Arabidopsis thaliana landsberg
ctcccctcctgtaatcatagccatatccataacttcctcttcctctcattcccactcccacattcctatttccgtatcccacgtttccatttcctcttttacctgttactcaagcaaataaacaatcatcatcctctttctccacattaccatatcaacgttttgctactttgctcacctcttgatgtcgatagcttctcctccacaaaagctctcagtccaccaatcttcacaggtgaagcctgcatcattcagatgatttcatatcggttttctataatgctaaacaagaaagtgaaaattatattcaaggttagaatataaacctctattgctctgcgggcagcatctgcctcctcaaactcaacaaaaccataaggataaccaaggccctgccagtcatacagtaaattatcattgttcagaacaataattatgtaagatctgtgttcctttgtccccgaaaaaaggattcaagcttccaatacttaagtgttagttgattggtcaatcttaccctttgatttatgacttgaatcccaccattggtaatagctccaaattgcttaaattcagcctcaagcatgtcaatgttggcattaaaaggaagatgtctcacataaatagatgtaccctcagctaccgctaataaaaaagacaaaagaagtataaaaccatgtcatgaatagatatgagaatatagaccaccaaatattataattgaaaacttgaggatcagctatactgtgaactactaccttcctgattgtgcccattttcagaagcatcaacagactcagaaactgtatcagattctatcacttgagaaggatctgaagatgcttgttcaccttggtctttgagtatctggcctgtagaaggatctgaaggcgcttgatgttcttggtctttaggtatcgtctttggagaaggtaaagagacagctggaactccaaatttatctttcgtaaccttcaactgttatgaaagtcatatcaatagaaaactccagaagtgatatagtaaagcctaaaataagatgtaacaagatcgagaatgaatcctctagggtgactacttaccacagaggcataggatttcttgggaacatctccaagtccatcatcagggtcataatttttca

SEQ ID NO: 67982 - DNA, 1110 bp, Arabidopsis thaliana landsberg
cgatttggaaatttgtgtgtgagatatagagatttttctgttttttacaggattcttggattgttctgtgatttacattgattctgagttttgacagtcttctatgaattacaggtgttgtttattctctggaggttggtgatacaatggattctactgctgcaaccaaacgtgttgttgacccacttactgtatgttttttcaattatggggtttcttctcctttttactagttgtaattgtgattctttgtgtggtttgttctgtttttgttgttgttatagtgtatttttgggtttggttaatataggttgggagtgcgtttgtcaatcagtactactacattttgtgtaacttgcctgagcatctgccccggttttatcaagagatcagtaaagttggccgtgttggacaggacggagtcatgcgtgatttctccacttttcaagtaagtagttcttagtagtttagttgggttcggttgaatgaggatgagactatatcatttttatgatgttaaggattagtaaataacatggggttgggctggagtgtcatttggtatggtggaaattggatggcagtttaagtaacttgctaaaagtgtctctcattgatgcttattctttgtgcagggtataagtgaggagcttaagagactgacttatggagattgcaactcggctgagataaccagttatgatactcaagagtctcacaatgggggtttccttctcttcgttactggatacttcactctaaacgagagatcgagaaggaaattcacccaaacttttttccttgctccgcaagaaaagggtttctttgttctgaatgacatcctcagatttgccaatgatgatgctaaggataatgttccagagaccatagatgggcaagttgtttctgggataaactctacaacacccagtaatatcaatggtaagttaaacttatatttcttctaacgcacattctattccaatccttttcttacactttagctcctacaggcattaagggctcgcagcaaactgcatgtgttgcagtagatcctgtttgtaagaaagtgtccaatcccttgcataatgagaatgctaagcataatgt

SEQ ID NO: 67983 - DNA, 458 bp, Arabidopsis thaliana landsberg
tccgtaaaatgcatgtgatgccgggcgctcctcgttgccgcggtatcaattcgcgatttcaatctcaagtctcttgcccctcgtgcaagagagggggtacggttatcgtcttgaagggttgtcgtacaaatgctatgacgacgttgcttcacatcgcggtgccggggaaagaaggacggcatcgggatcttcgtcattcaacgggaggttttcgaatgatcgataagataaattcgcatttcggcagcatgaaccgcagatcgtttctggcaaccgtcgcggcgggcgcaaccgtcgcagcgctgcccaaacagctcttcgccgcagacaagccgacgcttgtcacgtcgatccgctcactttccaatccgtatcatgcggtctggaagacgggtgccgaggccttcgccttcgccatcggcctcgatcacgtaacgcttgtttccgaaggcaacagc

SEQ ID NO: 67984 - DNA, 382 bp, Arabidopsis thaliana landsberg
agggagctttgacttaggatttacatttacacctttttgataccacatccaatagattatgtcgaatggggattacacttgtaaccataaggaaacaacgtaccactatctactgtaaatcatctaaaccacgccgtgagaccacatcataaagcggtctaggcataaacgcctcagaggatctcatgtggaatcaagcataaacgccttaaaccaacttacctgcactgtgttaatataacaaagaccataatcggtttgaactaaactgagcaacgacagcatacggcgttcacgcgctaccatcgatcaatcccaactaaatacgtttgccgaaaaccactacactcattattccctcctgaataaaatgaataggtcc

SEQ ID NO: 67985 - DNA, 470 bp, Arabidopsis thaliana landsberg
gaaccagcgcgggcgcttgcctcggccggaccaggtttcgctgtctgccggattgcggtacttcggcgcagccttgggggtcttgccgccgcggcgcctgccgtaaacctgggcaaaggtgaccccctcggccttgagcagggcatcgaccttggtcttgaccttggcaatcttttccttgtcgatattcttcatgcgcccattctccttgcggatgagttcgcggagttgcttcttgctgagtgcgctgacatcaatggccatgtcgactccaatggtctgaaaggatgaaaaatcggtgatgtccgagaaaccggccaaaccggcgcggcgacaggccgcattcttactcaaatgcgacctggttgcaaaaggtgccgttgccgcgggttaatctgcgttggaaagcaatgccaataccgctgaccggtcaaggatgctgctgtcgctgtcgctgcgtacgagatatt

SEQ ID NO: 67986 - DNA, 207 bp, Arabidopsis thaliana landsberg
  unsure (1)..(207): unsure at all n locations
atttgcataaagtaagaaccaaactagaggagcttattccaagaagatgcattttacanttaatattgtgcatgtaattaatgtctgataaccgtaactcattaattattctaattcagctaaaagcgagcctaaacccattacacagagaattgcacgaatcacaagtacacaaattgatagaacatttagactttagaggctgct

SEQ ID NO: 67987 - DNA, 827 bp, Arabidopsis thaliana landsberg
  unsure (1)..(827): unsure at all n locations
gatgattacctgattcgaatcggattctgatgacgncgatgaagaagatgatgatgatgatgaggaagaagaagcagactctcttgttgatacagtcactcgtctactcaaaggttcatcaattttagtgtttaattattgatcttgtttgttctttgtttgcatcaatttagggtttatgaatcttttgatagactaacaaattaggaacacttgtttaatttttgagggaaatcattgaattggaattggatcattcaagttcttgctagaaattggggaatgttgctatatatatatatatatatatatatataacttgttttactaaaatctctgttgggatttggttttagggaaacaagattgactcgtacacatttcttagctgagaagctttttttaaggtaaatcataaagtgactactattagtggaacattttgttgttctatgttgttgttggaacagctccatgtttgtttggatctatctctctgttatatgatttcgttcttcttgtgatcgtatccttatcaggataaaagataggagcatgaaagaagcagtttatcaaagatcatctattgctaaggtaaatcatatactatttctatacatgctcttaataccagagatgtcgaaaacatttgttaatgcaatggagattattgttctcttcacacttatataagtttcttcagagggtttaacgattttagaatggctagccccaaagactatttgtaaacttgtgttcgaatcactcataagttcgcttgtcatatatgatcgtctgatgattgtactaagaatactcttagcgaa

SEQ ID NO: 67988 - DNA, 577 bp, Arabidopsis thaliana landsberg
tggatagattctccatgacaatttatgatttgttttattttgttttgtcatagatagtgtatcttaatggtttttggagtatatatcagaaattcaaatacttgtaaaacattctactcttattatatcagtgatcaatccatattagaactcaagatgaaaataaaagtaaattgatctcttcaaataattttagtctacaaataacatgcaattttcttactctagcgaaaatgttaataatttaaataaataaaaaaattaaaagtaatggaaaattgcatgttatttaactttccattacttttaaattgcatggaccagtgactggtccattatttatttttctcattttcactacttttctttctgctatttcactttccaagaaaatatatatatgaaaatctgacagtgctaattcatcatcctgacctatattttatctggtgaatatctatcagcctatcagattgctttcaccttttcatttaaattctcgttatttcacataatctaatcttttgaatcaatactcacacttatttcccaacttctttgtcactacgtcctcagc

SEQ ID NO: 67989 - DNA, 166 bp, Arabidopsis thaliana landsberg
ttaggttgatgcatagcatgtaagctgtacataaaacaatttaatatttattgggtatgttaaactgatattttatataccatggatgcatattgaaatatcaaatcgagttatgaaagtacttactcatgtaagaacaagaaagtggatgtctgttcaataatat

SEQ ID NO: 67990 - DNA, 442 bp, Arabidopsis thaliana landsberg
  unsure (1)..(442): unsure at all n locations
gtcgtaagaggctgggacatgtgattaagatcactgtcgtgcagtgtgttaaatgagacggcagaaaagagacaaaaaagatgcacgtgaatcacgtgaagagggcctgttttattatatgagaggtcgggttggcccattgggccttttccatatatagttctattttcgtatttatttatgattacgtgcaatcaaacaaatttcacgtttatgtgattttgtcctttccttaattagtagtactatatttcctataatatatatttatggtgtttaggagattttttagttagtagattttaaatacaaaaccaaaattatgtgtgatttgtgattttcccattgaacttgagggttttgttaaaattatgcnnatattcttctttcttttttggacaaaccattatgcattattcatctaataaatttgaagtatcag

SEQ ID NO: 67991 - DNA, 567 bp, Arabidopsis thaliana landsberg
  unsure (1)..(567): unsure at all n locations
ttcgttcggttgccagtgccccccgggccagcgacaaccgcctccggatgttagcaatgtgatctttgcgatagcaaccggatgcaaagcgctctgaacccgttacacaggaacacgcagaacatcatggctacgctggatatactggaatttcccgacccccgactgcgcaccgtggcaaaaccggtggagcaggtggacgaggcactgggcaagctggnnnnnnnnnnnnnnnnnnnnnnnnnnnncgcccaggggatcggcctggccgccacccaggttgacgtgcatctgcgggtactggtcatcgacgtctcggagcagcgcgaccagccgcaagtgttcatcaacccggaggtcacgccgctcaccgacgatctggcgccctacgaagagggctgcctgtccgtgcccggcttctacgagaaggtggaacggcccgccaaagtgcgcatcaacgcgctgggccgggacggcaagccgttcgaaatcgtcaccgacgggctgctggcgacctgcatccagcacgagatcgaccacctcaacgcaagctgttcgtggattaca

SEQ ID NO: 67992 - DNA, 529 bp, Arabidopsis thaliana landsberg
acatacttaaaaaggtcagaatcaaaggtagacagacagagatggaggtagaggtagaggtagaggaagaggtatagacttactgacagacatgggggatcaaaacatctgacctgtgtttacagggctttggtgaggatctggagggcagtatggggaatggctttttttttttccagatctgaaagaagttaacactttaaacaagatccacactaagggaagtgtaagaatggcaacagtgagatgatcgaaatgatactaactatccctgttagcaaaacatacctttgtccaactgcacaatgactgcttctgactctaactatttggaagtacttaacatgctacctcataagcttatttaaataagtgtggcttgtccctttagaaacagaagctggagagatggatctgttaagagacagagggccaatggtaccatacctaaaggagaaagccacccaggtagagatattgttaagaagaaccaagtttctcctcataggccacatgaaaagccaggccc

SEQ ID NO: 67993 - DNA, 245 bp, Arabidopsis thaliana landsberg
cggtttgacaaaaaaaaaaaaatcattagagtcgaagatgagactgtcaccttcactaaagtggtaactatacagagaatattagcatgacccctgtgcaacgttgacaccctttactcgataattggtctaattttttttttgaaaattttctagatcgacgatgtgcaatttgtgcattgtttgcaactccgacgattggaaacctaaatttccggtacaaatttaattaaaccggatggttt

SEQ ID NO: 67994 - DNA, 1414 bp, Arabidopsis thaliana landsberg
gtgcgcttccttaagggacctcaagcattctctcatttgttcagtctttgttgcctttctaattggcaatgtaacctgccaaaaagaaaagatgtctctataagaaaaagcatataacaagagatgataaaatataactagcttttgatacttttttgtttaccttcttctcctccacaactggcactgagggttttgcagctgcagttgcaggatcttccggaggcaatccgagttttcgccttctttcagcctgttaaaatgtatgagtcttcaaggtttttttgttgagaaatataaatgtaatgcataacgtacgtaaatctactgcattgaagataccttgtcttcttcaagcttttgacggatcttttccctagcccgtttttcttcttctttctcagctttacgcaaaaacataagactgaaacacacaaccaataagtagtcgattaagaaaaacaaaaataagaatacagctgataagcctgacattataaccagaaaagactaaccgttttctttcgtttacttcttccatccgctttgcttctaagagttccttgccaatcctaattcgctcctgaaccaaatactaacgtgttaaaagatgataacaaagtaatgcttacagtttcagcaatgacacaatatgtttcaagcacataattaagttatttaagataacagtaacacatttaaaaaaaggatcagagacagaaaaccttctctctttcacgttccatccggttttcttcctcttctttcttcttccgtgcacgttccctgagacatggatcaacgaatataaattgaagtgtagacattttcatggtctaggttatgcatgataaaagcgtagtgtcgatatgccattgggcacgctataaaagaaaacaaatagggacagtaaaacagaatactcatcgaccttaattcttgggcttttagcttcacttcttctggcgtaagatcaggtttggcaggcccaacattggagttggaaggcacctaggcaaacagtcaataacatagaaataacattaaggaaacaatggagtaattttaggaccacatacatgtcatataacaagatataagattgttgaaggtgatatatacagaaaattttgaccttcaaattgtcgcatcaagcaaaaaaccactttgagataagaactaaaaaccgagatttggaatgcaattatcaagaaacaaaacggtccagaacagacattctgctgaaaagtaataattgacaaaacacccacctttggcatttcatctacgtcaggatcattctcatgctccaccacccaattaactgcagcctcaagactggcattacctgaaggaatgaatttcaaagtgtgtaaaagaatttcgagattcagatgacattttgacaaaaaaa

SEQ ID NO: 67995 - DNA, 548 bp, Arabidopsis thaliana landsberg
gccgggggagtgatcatctgagcccgagatagagcgatctaggtgactccgaataatgttcttcgatctccaaaatgatggctgaggccggtttggaggaggaattatgtcgtcttgaattgcgctctttccaaatataataaactgaggcatgataggcaagacgaagaatcaaagctatattcttgtcacggcaaggattcttcaaccatctaactccatccaagaacataactggaggagaaacatgggccttctgagagaaataattccaaacttccgcagcgtacgaacactcaaaaaataagtcgttgcctagactcatcaaccaaattacagacgagacaagaagaaggagttgccaaaccccatcggcttaacctgtctctggtaagaagcctgtgacgagtattgagccatccaataaaggaatgctttggaattctgccaggaaaccaaattgactcaaaccaatctatctgagggctttgaggatgaaaaagatcccaagtttttaccacttgagaacacattagaggcttgttttt

SEQ ID NO: 67996 - DNA, 728 bp, Arabidopsis thaliana landsberg
atacttctttagatagttgcttcattttgttttattttatttttccttttccttttggcatctaaacacttttatttgccataataaatgtttggatgggccaaattgccaaaaaaaaacaatcgaaggaacagtcgctgccatatattatgctctgcaaaggttgttgagcgattaattggtctggtccaagctctgtttgtaatgggccctaaaataaagcccattctttaaatactaattatgacaaaatcaaattctcttgatgaaacaaaaacatcatcaagattggctgattgggacttccatgaccatctcatactacacacaaaaagaaacgtatttattttaccaaagatattgattcataaattaagctaattgaaaactaatactaataattaaaatcattcttacaaaaaaaacatttttaaacaattcgaataagaacaaagttacaagcatgagcgcgcgtgagtttgaaaataaattggtctaacctaagtagctgacaagttttggcatttatacttgtaagtacataacattgattaatgttatttaatccttaacactaatttataacctaactgatgagagtgggtgaacgaatatccttataattatgagactctcgttaaactctttttttttttctttctatatgagtgttgacaaaaaaagaagcctttatataagtaataaataaaaattaatgtatttggagg

SEQ ID NO: 67997 - DNA, 269 bp, Arabidopsis thaliana landsberg
caatctggctaatagcttataagcccgcctgttcttgacagagaatagaacatcaatgattttattatatatcaaccttttccccccattttattcatcttttcattatatctttgatacaaaaaaagtttagaacgagatttttcttggtttttcattctatatgtttttatacacaagtttagaacgatatttgaatttgaatggtataatcatattatttgtctcttacgtcttaccaataaatgaattcgccggtacactggaaa

SEQ ID NO: 67998 - DNA, 477 bp, Arabidopsis thaliana landsberg
  unsure (1)..(477): unsure at all n locations
agcgaaaccaccgaaggccccgccacaaaaggcctccaaacctcgacgacanaaaannacacacgggacaccggccaaggaaaagaaccgacccgccaagncnnccacaaannacacaaacgccgaaccgaacaaccaggggccggaccccccagccaaacaaccgagacgcgagagccacaggaccacagcccagcggaaagaaccagncncgaacaaacacccccaacaaagactaacattcgccagaaacaaaaaacccccccgcccagccgaaccaaaagcctgacgacagcgccgcaccctgaacgattcacccccccctcctttaaacacaccaaaccctacagggggggggacaaagcacacagccagcccccagagcacacccccggggaccccccagatgggacaaaaaaaaagcatccccgcacaacccgctccccccccgccactggtgacggacagaacaacccg

SEQ ID NO: 67999 - DNA, 417 bp, Arabidopsis thaliana landsberg
cgcgatcgcttccacgcgcaccggcttgatgcttcttggtcaccacggcgcgcttggcgtacaggtcggtgtcgacgccgtcgggcagcacgtcggcaaccggcgtgccggtcaggtggttgggcaggatgtgacgggtcttgtcgaaccagaaattggagatttgcgtgagcatttcgcccttgcccggaatcgggtcgggcaaaatcacgtcgaaagcggacaggcggtcggaagcgatgatcagcaggcgctcaccgggcagggtgaacacgtcgcggaccttgccgcgatagctcgcttccattcccggcaattgggcactgcgaagacacgtgggcacgtggggtttcccggctgggatggagacgcgcattgtactccgcgcacgtcggccgatggccggcgctggtagat

SEQ ID NO: 68000 - DNA, 489 bp, Arabidopsis thaliana landsberg
  unsure (1)..(489): unsure at all n locations
aaaaccgagaccatcacgaagccacttggcagtgttgtccgaagttctattttttgtttataatcggctccggttgtttttgccgtttgctgaatggcaaaaaaggcattgttgagcacattcagcagtacccggccaatattctgcggaataacgtttgctttaggaagctccgccgcgaaatctgttaccagcacaggatcaaaatttttatccttttcccgcaggctgtgataagccaggcgcaggtattcatcggctaaagcattcaggtctgtgggctccttctgaccagaagccatgcgactgtgctggagcatgctttttacaatagcatcagcacgctttccgtggtgattgatcttctgttcatttcctatcaagtcgtttatcagctcggcctccaactgctcatcccttttatccttcggctntgtactttctgcttttaactcctccagcatttcctggttcacatccgaaaagttg

SEQ ID NO: 68001 - DNA, 219 bp, Arabidopsis thaliana landsberg
  unsure (1)..(219): unsure at all n locations
acacacagacacccccaaacccccaaggagaaggcacggngggccaaaaacccaccggagcggcgaagaaaacagcaaccaggaaccgccggggcacgaaagggcccccggcagaccgacgcccaaagggaaccaaggcaacacaaaccccggacacaccccnncggacagagacgaagaaccccgaggaagccacccgagaagcagcagcccagccgg

SEQ ID NO: 68002 - DNA, 471 bp, Arabidopsis thaliana landsberg
gttgatggtgctgtgtcacattggccggtgcagtaaagaagaaagccgcctgctgtacaaaatcggttaggaaagtgcagcggtcctttacaaggttgaatactgtatccagcagggcatcatcatggatggttatattgttttggacaaacattttctttacctgcggcaggttggtacttgcaggtagtctcttgatccattcatggttgaaccatttggctttttcaaaatcgaatttggcgccggctttgtgtacgcggtccatggaaaatttctgaaccagttcttcgagggagaagagttcattatcggtaccatcgttccagcccagtaatgccagcaggttcacgaatgcttcgggcaggaaacccctttcgcggaaacccgtggtctttcatttgttttgggatctgtccaagccataacaaacacagggaacccccacctgtcgccatcgcgtttgttgag

SEQ ID NO: 68003 - DNA, 537 bp, Arabidopsis thaliana landsberg
  unsure (1)..(537): unsure at all n locations
ccgcggcggcgccccagacggctgctgccttcaatttcacccatanggttccaactcttttcaaaagcgccgccgcgggctaaccgctagccctgccgatggcgtggacagccgctctcttcgaagtggcgctcgtattggcattcttgacgggagcgtggttttcggaagcggcggtgcttgccgccgcctatgtgctcttcctcgccttcgcctttcatggaccgtcgcactggccggggnnnnnnnnnnnnnnnnnnttttacgtcgaccatttcaccttcatcgccgggcttctgtttgctgctgtccacggtccgggcgatgtcctggcattgcggaggaattttttcgcaagcaagcgtgccgcgatttaannnnnnnnnnnnnnnnnngtccgtttgaacgcgacgcgcttcatggcaccactatctgcccgatctttcaccccttgccgcgtaataacaccgtttgatcggacggtaggggcgcctaaattggccccttcggggacgaccccggatttccgcgctgtac

SEQ ID NO: 68004 - DNA, 599 bp, Arabidopsis thaliana landsberg
  unsure (1)..(599): unsure at all n locations
atcatttatcgccgtcaggcaaaagaaaatcccggcagatgctcagccgccgcgtgtcttttgatcgtaggaaggttacgcggcgcaaacgcggggggcgatatgcaggttccgtcacggccctttcagcacatgcagcaagccttccagcgcattcgacagcgccacgcccagcgccgtgccgccgatgccgacgatgccgagcgcgcccatgcccatcagcttccatttcctgacatcctcggtcaccggcttcatgtcggcgatatcgtccttgatggcggcgcccgaggtttcgagattgccgacgcgcgacaccagctcatccatgcgccgatgcacggcggcgcggttgatgtcggatttatcctccgagcggcggaaatcgtcccggagattggcgacttcggcaagcagcttgccgagcatcagattggtgttcgcgtccgtcatctcgctcgccatccttgccatgcctttcatgcactgaaatttcggaagtcacgtcgtcgaaacctgcaccggcgcccagccgtccgccgtcttgatcttgagttgcgcggtaacgatgccgtcagggccataccactngaacacga

SEQ ID NO: 68005 - DNA, 577 bp, Arabidopsis thaliana landsberg
  unsure (1)..(577): unsure at all n locations
aatatcggcagactaatgtaattttgatccgtcaggaacttttctgtcaattgcggcaagcacaatatcgccatcttgattggcaaatcccgttaccaaaaactctgacataaaattagcaatctgtttgttaggaaaatttacaacacccattatttgtcttcctataagctcctctttcgtataaagttttgtaatttgtgcactgctccatttaattcctaactctccaaagtcaacttttattttatacgcaggttttttcgcttcaggaaaatctagtacttcgagtattgtgcctgcccgaagttctaccttttcaaattctctccagcttatttgatccatagccaaagttataaaaaagggaatttcttaaccatgagaaatgattatagtaaatttgccggatatggatgcagttcgtttaggtaaaggcaaagaaaaagcagtgcttcagtttcatccttgggtattttcgggagcaattgaacagctatnccgaaggccggaaaatggagatatagtacgggttaacgattataaagggcaattcctggcctatggtttttttaat

SEQ ID NO: 68006 - DNA, 1786 bp, Arabidopsis thaliana landsberg
aatggtgaaaaagcctagacaaaaaaagtgggcaaggccaactcaagcaataccaaaagaaaaaaaatgctcacaaggacaaacgtctatataaagttaacagaaattcatatacttcttaggaatcgaatcccttaaccataaagctcgtgttgcatgcccatcacctgaagataccaacatatgcagtagtaacttttaacgtggcacatcaaattatgaagttaaagtgcaatgaattgatgtagtccctttgttgggtgatgcatccgtttgatttgcctagcctcttgaacttcctcaaccaatttctccacatcctaagaattgaaaacttgagttcactagaaaactttactactaactataaatctagactagaaaataatactaaccggcccctgagctctagaagcttcagaaatccgttcttgttcttcaaaagcctctccaagtctcagcacaacggcccttgcagtttcgatctcagcacaagagaatgacttttcttgatttaccagtttctttgcatcttctgaagtctgtcaatatgagagtaacaataatcagcttcctttgtagttgttactgttggaaatgtaagcaagcgaaaacagaacattttcggcatcaatatcaatctatactatagaagcgagacctgcttgaggaagtttcctagtttcttcacttcaaacttctcctgaatcaattcaccttcattctgagttaacttcacagctagagcttccacctattctcatacatcacagttttgacacaagtcacataaaaacattagtttcagagtgaacaaggaaccttatcttaaaatctgactaaatcaatcttaaatcttaaccatggagatagctgtctccacatcctgtttgttttgcccatccgtgcgtcctctcatgtattctaaagcatcccttagcttcttcaacataacatgtccctccaaagaagccacctctcttaacttagcctaaaagagagtttccaagaatatatttcaacaaaaagagagagtgagaattgttatatgaaatcaagaattgtagaaagtaacctcattagccaaactaacagctgcagcaagattcttgtcgaatttactagcgaggtcacggaccgaaagccgcttgtgctgatcagacaacaactcgctctctttctcgacagtctccttcacagatggacctttttcatcttcctttggttcctctactatctgattatcaggtcctaatttatatgttggaaagtgatcagaagcaaagctcacatctactgatactggaaccactgataaagataatgtcccttctatttcaggacacactttcgtcattttatctccggatctttatctgtttcaacaacaataaacaaagagcaaatcaaaaaatcattagatgatttgaattggaaggaagattactagattagctctaatctagttcataggaaaagatttaaggcagaacaagaaatgcattatactatcgattacactaaatgagaaagaatcagaacatcaaagggcagttaaaaaaacagaacaaacattttatatatattttaaaaaaagtggagaatttctaactcatgtaaccaaacattgatgtcatgaaacagtatacgacaaaaatcaggagaaatgaaagtagaatcaatcaactcaagaaaaacacaaacaaacttacggataaactcaagaccaagaaacagagaatctcaagagtgaagaaggaagaaggaagaagaagaataaagacaa

SEQ ID NO: 68007 - DNA, 183 bp, Arabidopsis thaliana landsberg
gcgcatgtatgatttgccacaacgagaaggccacgtgctagtacagtcgaccaaatctcattagctgattagcgctccggagaattaactaatagactgactgtatgcactcagtatatggactgcatgaaataatattaaccaaacttaatatgattatccaaaggattattaatctgccta

SEQ ID NO: 68008 - DNA, 2067 bp, Arabidopsis thaliana landsberg
gtagtgtgagctttttacttaaccgggggtctctttgactgataaaacaaaatctcttctggtttagtttgattaagggctttgtctgttttgggtacaattaattattctatttttttcttttccttgtttgtttacttcattgtatcatctccaaatccggtattttttattcaacattattgtcgaccaaaatttgttactagcttttcatattttattagtataatcttttacctcagctagactcatcaagtgtcttgtaaagttgttgctattaatttttcacttgttccttgttgtttgatgcttctgtcgtgaacagagaaatcgattctgtcatcgcaacaagagcaaaagtctttcgagtagacattgtatatttcggagatcttcataccaaaactcaaaagaattgagagcttggtctagacgaaaaccagacacaaaaatttgcatcatgaaaaacactcaaagaatctttacatgagatatctgagcttgagtttggatattaacgttggcaaatctccattgtggagaattgaaatactaagctttcattatcctccagaatcttcaaatatacatcaagatatgaaaacaaacagtaatgactaatcatctacgtcaataaatgtatcattaccttaacttattaatggaaaagtctgctaaatatggaaagtttattgattctctcccttgcatatataagatttaacgatgcctatgtacaatttctttttctccatctagttacatagtttagggtttgcttcttcttcttttcaccaagcttccttcaatggcgaacccaaaccaatccgtccgggtacttcttcccgtctctcaatctttcaatctatctctctctctctgtttttcagttgctaatgattttctgtgtatatttttgcagacgtgcatactaaaagtcgatctaaagtgttgcattggttgccaaaaaaaagcaagcatgaaattgcagagtatctctggtaaaaaatacttcaaagcttttaattgcgtggctcatatgtctttaaacatgatgatttaaatactttgtttccaatggaaataggtgtagaggaagtggagtataacatcgaaaaagggctcatgacagtcagaggtgacgtagaacccatggctctggttcgtaaacttaataaacatgacagaaaaacagagcttttctcagtcaagtaccagcttgatgatgatgatctaaacagtgattcagaagactactcttcttctgactctactaattcatcttatgatcctaaacccatggaacgtcaattccaagagaagatgatgcagcagaagaagaagaagtctgggatactaaaaatgctttctcttttatggtgtttcagcagtaaatcaaaggttgttcagcctttaccgatgcgaaaccgaaactggcatgtcccatcaaagtttgagaatgttcctcctggctttggcttcaattctactacatcgtcgcagttgcggcctccgcatccaatgatgccctatccaccaatgatgcaaccaccaatgatgcagcaacaacgaccactaatgatgcagcaacaagcacaagttccaatgccacctaatgttaacatgttccagtcagcaccccaaccgtttaagatgcaccctaagttgcattacggggagcagaaacaggttgtcacctaagctacttgttctgttgattatgtctctgatacatatactaagcaaaagaattgtttttaagtttcgtatcttttgccaattgccgatagtgaacatttctcaagtctggcaaacttttaaaacaaaagaacaagggtacattttgaattcatttatgtgtgattctctgcatctcccaaacctggttccataaacatttggataagatgagctttgtttgtgtcacggaacaagaatctcattcataacccaacagagaaaacataaataacaactcaaatctgtgcctattgctagtactagaatctattgtttttgatacagagatttctcttggagaatacttgtcttgagatttgtctgttg

SEQ ID NO: 68009 - DNA, 743 bp, Arabidopsis thaliana landsberg
attgaaatacatatttttgtcaacagataattaattaattaggaatacatatatacacaatattagaatgtagaataatggttcgatattttaatgggttgagagacgatcctcaagctctttattgtataactgtatcaaacctgtggtatcttgatgtggaagatcatgaagcttctcgtctaaaagactcttgtactcgttatctctatcttcccatttacgcatgaactctacctgcaaaacacaaaccacacacctcatcagtaagtcacttataaaataaaagagaggaagaaaaatttatgttagaaaacaaaaataaacggacttgtttctgaaacgtatcgaattcgtctgaactaagagatccatcgctgttagagtcaagaagctgcatcatctcctctgcgtcttcacctggagctccaagctcttccatcacttccattagttcctctatgctgatcattccgtccccgtttttgtccagaaggcaaaacactctgtctctctggttcgttgttgtcttgaagctttggtgtttatttgatgagatatctttgagacgaatcgctgcaagatccgctgctgccaacattatcgctctaagccgcttcgcctaaacatgaatttaaacaaacaactcaacctcctaaatttgccaaactaaaaaatcacagaagtgcttacctctttttggtcggttagaccgcctttatacaaagatgtgatgctgttcc

SEQ ID NO: 68010 - DNA, 569 bp, Arabidopsis thaliana landsberg
  unsure (1)..(569): unsure at all n locations
atatctttcttattttattacataataaatactttggttatttttttgtaagttgcgggcgcaagctgtttttttgtctttgaggggtctattccgtgttggagttcgttaagcgggttggttggtgtgaaaagacgaaactatcctttggatcaagtggggcttttaggtagaagcggaaatgacgaagttaccctttgcttgtggacatcgagaatgtgttgtatcgcgtctttcttcgttgagaggacacgaccgacacacgtaacacgttttatacgtaaccaatttcaatttcttaaatgaattttaaggtcaatattattttagttagaatcacataagtgtataactaaataaattaatcgacaaacaatgtgaatgtgtgtgattacaatgaataggttaaattagattagtatagttaaactcaccgaaatcgtgtttgacttgtatcattgcaatcaaatgtctttatacaaacttatttactaacaacatatcgncttctaagtatgaactcttaatttttcacaaattggagatccgtatatgttttaaagtcatat

SEQ ID NO: 68011 - DNA, 347 bp, Arabidopsis thaliana landsberg
aaaatgtttgagtttcggtgccgtttggagcttccatactgcattcttcaattctacttgtcctgtaggtggttcaaacccattgatgtgacctgggagatgcgtttctaaccaatatcctgacttgacagtgtacattccatgatccgtatagtgccatccaaggaagtccggtgattgttgagtggtgatgcgtatttgttgaattctatatgcatctttttcctgaaaaatttcctcaatgagatctttattccatcgatcggggttttgcatcatgatcttatttacagggcggtcatttggagtcggtccatccttgcatattggaggcattgggttgcgaa

SEQ ID NO: 68012 - DNA, 603 bp, Arabidopsis thaliana landsberg
  unsure (1)..(603): unsure at all n locations
aatttaagataagtggctgaaagatgattggaaccggattaagaagcctcaccagattatttgcgaaaaaccactacacatgcacataaaggatctccagtaaaaagaaagttcatgggagatattgaaggaggaagctaagtgaataggaattagaagtggttgttggaggaagaaatgtagtacaagggtggggtggtgtggtggtcggaatcttcaaaggaggggaggaggagcttgcggtattcttatgcaaacattccacattttcatgagtatggggttggaaatggtcaaaactaaaaaaatgttgggtcttaacattgcgttttaatattgggggtggaaaattgaattcagtgttactattcctaaatctatagaggtagttttgatcccattaactgtttcctagctcggctaacgctcaatgnnnnnnnnnnnnnnnnnnnnnnnnnnnnnnnnnnnnnnnnnnnnnnnnnnnnnnnnnnnnnnnnnnnnnnnnnnnnnnnnnnnnnnnnnnnnnnnnnnnnnnntccttctcccctaactcttgtaatttccgaatatttaaaataataaatagcattttgcttataattt

SEQ ID NO: 68013 - DNA, 554 bp, Arabidopsis thaliana landsberg
  unsure (1)..(554): unsure at all n locations
aagttctccggcgacgaccccatccaccccggctacggccttctgtccgaaagcccggaattcgtttatgcgtgcgatgccgccggcatcaccttcatcgggccgcggcctgccaccatgcgccagctcggcaacaaggtggcggcgcgcaacctcgccatctccgtcggcgtgccggtcgtgccggccaccgagccgctgccggacgacgagcaggagatccaccgccttgccgccgagatcggctatcccgtcatgctcaaggcatcctggggcggcggcgggcgcggcatgcgcgccatccgcgacccgaaggacctcatccgcgaagtgaccgaggccaagcgcgaggccaaggccgccttcggcaaggacgaggtctatctggaaaagctcgtcgagcgcgcccgccatgtcgaaagccagatcctcggcgacacgcacggcaatgtcgtgcatctcttcgagcgcgactgctccatccagcgccgcaaccagaggtcgtngagcgcgcgcncgcgcnctacctttnggatgcgcagcgccaggagctc

SEQ ID NO: 68014 - DNA, 572 bp, Arabidopsis thaliana landsberg
  unsure (1)..(572): unsure at all n locations
tttttttttgattttaacatactaatccacttacattttgaatttcaaataacctaacctacaacctttacaagtattttaggaattcaaagaaaaatttgaaaatgacataacataactttttgttttggtgaaacagctatttaattgatcactttggttccatacaactacttcattgatcacttcagtggcatagaagatatcaactgacaagtaatgccaatgaagatattaaattttgaccagttaagttgtttagggagacatgtataagagaaatctaatttaggttcattttcattcaccaactttccgggggaaaatagtttagtgagtctatatatacgattttcatcaataccattatacatgtgatttttgtgtttttacatacntattggttgttttcagtatatgcaaaacttgtgattttggagggaactcaaaacattaaatctctatgaagactgacaacatgtatgtctataattgatttgatcgctatcattacctatcaattaaagttgtaagcaaagcgttgtaattaagaaagttaaatccctttaatt

SEQ ID NO: 68015 - DNA, 559 bp, Arabidopsis thaliana landsberg
cgcgcgcttgccaaggatggccgcgaaatcgaagtgacgtttaccgtcttcgatctttcgaccgacaccgcgacgctcctcgaacagcccgcggatctcgtcaccgcatcggcttttttcgatctggcctccgaggcgtacattcgcacccttgcaaagaccctctccgagcgcgcgatggcgttctatgccgccctcacctacaacggcctgcggcgctggacgccacatcgaccggcagacaaccagatggccgccgccttccaccgtcatcagatgtcggacaaaggtcttggaaccgcggccggccctttggccgctgcgcatcttggagaccagttccgccttaatggatatacggtcatggagggcgacagcagctggcgcctcgaacgcagcgaacggatgctgatcgaggaactcgtccgcggtcacgccgtcgccgtatccgaaatcggcagcgttgacgcaaagaccatcgtcgattgggtcaaggtccagcgaaccggcgtactcgtcggccacaccgatgtatttgcgacccccgcgacttgatatg

SEQ ID NO: 68016 - DNA, 178 bp, Arabidopsis thaliana landsberg
ttatctctatttctataccacttgccaatcagaaccttcaaaacattccatgtttcccatgatcaaatttccaactaacttaaacaataatagctcataaaaacttgccaacccacaaagatcattcactcccatgttcccgaaattatctttaataaatcacctaaacacaatagtt

SEQ ID NO: 68017 - DNA, 401 bp, Arabidopsis thaliana landsberg
tcttttcattcttataaacagacatttcgcataaattttatttttatgaacaaagtcaatctaagaagtgattagtaaaaacccccatcaatattctactaatgtctgaccagaaatagcctaatgtgtattctctcgtccataaatatggacctgcaacaatgcattacttgccttttccccttctaatctctctcgcatctatacattttgagaacattttagagtgtcctctcttttattttccgggtaagcaccatgatgtctactatttccccggttttctcaaccgaaccgggtctatcaacctctggcctcccagctttagaaaccagtttcactccatgggacatttcacacctcttctcggtcttcgattcattaatcgatccaaacccggt

SEQ ID NO: 68018 - DNA, 221 bp, Arabidopsis thaliana landsberg
ttataactgaagaagtttatgaatactgttaatatacattttggatctttattattttctttactagcatcgactaacgcaggcgagcttagtagattggcaattaccttttttttgtcaaacaagtggcaattaccttaatattaaaaactcacatgcattaactcctgaaaaaaaaaactgtggacttctgattcttggccatggacaaacacgttgga

SEQ ID NO: 68019 - DNA, 1163 bp, Arabidopsis thaliana landsberg
agagactactcttgaatactcggttaggaaatcccaaacctagctccgaacccccaagaaacaatttttatttccaaaccacaatgactatataaacaccacatgaccatctcatattttattcacagagaaaacaaaaacaaacgagagacaaaactcaatccaaaacaaaacaaaagccaagttttttgtagtaagtaaaaaatccaaattatgggaatcatagttccagttttgacccttgtcttcctcttgtttgctaaagtgagccatggtgcctccaatcctagggtgattctagttggtggatctgtgggatcatggaaggttcctgattctcctaacaacactctcaatcactgggccgagaacaaccgtttcaaagtcggcgacttcatcggtactctatatatatctctctctatctctttacttctgatatatttatatgctttgattctcttgtgatcatatgttcataaaaatttatatgcatggttgaatatttgatatatatttgttgtgcatgtgaaatagtgtggaagtacgacatgaaagtagattcggtactacaagtgacaaaagaagattacgagagctgtaacacagcaaatcccttgaagcaatacaatgatggaaacactaaggttgcgcttgacaaatctggcccttacttcttcattagtggtgctcctggtaactgcgctaaaggcgaaaagattacccttgttgttttggctgaacgcaaatccggtggtggcagcagcagcggtgacgctcctaaggtttctcctgttagtcctacggctcaaactccagctccagctcccggtccagctgcagcccataacgctgcggtggggttgaaggttgcaagcggttggttcttgaccgcagtcgtggttggtttggctatggcttagagcttagaggggtttggtcgagagaatgtagtttttattgagttcactttttagcaagatttagttttatttttccagattgttgacgtttcttttgttcccttagtttttcattataaaagatctctctttctgttttttgttatgtgtttgggatattatattcactcttaaagcttataatctatagtttgttcttgccattttgaatctaaaatttcaaaacctcaacaaggcaac

SEQ ID NO: 68020 - DNA, 430 bp, Arabidopsis thaliana landsberg
  unsure (1)..(430): unsure at all n locations
cgaatttttgtagccggcatgagcgagtttctccgcgcccgcgacaaataggggctgaccgattcatcgctgattatcgatggcgcccgccgggccatgaaagccgcctaccagcgcgagaacgatcagcttgagcgcaacctgccgtttttggcttccgctggttcagtcagcccatacatcggtctgtttggcacggtgtggggcatcatgcacgccttccggggcttgtccaatgtgcagcaagccacactggcttctgttgcaccaggcattgccgaggcactggtggccacggccatcggcctgtttgcggccattcctgccgtggtggcgtacaaccgctttgcaaccgacattgaccgnctggccattcagttcgaaacattcattgaagaagttctgaacattcttcaacgtcaacactgac

SEQ ID NO: 68021 - DNA, 520 bp, Arabidopsis thaliana landsberg
tcacacttcttattgtttggttttgtattcttcccccattttctttattttcttttgacaaatatgcaatttccaatctcatcctacggtctagatctctccaatcatcatccttcttcttccaatattcactttaaaataaaaataaaatttagagataataatttccacgaaagaattattattattatgtgatgcctattcaacgtaccctcccttttttcctccatcatcttcttcttcttcttctcctctctctctctccatctcgatatcaaaaactcttgcttctgattctcttcattcatggcttcagagaagtagtttcaagaagagaaagatcaccgatgatgtagacggagtaggagtaggaggaggactagaatcccttcccgaagatatcatcgccgacatattctctcgcctaccaatctcctccatagctcggctatgttcgttgcagacttggagatctgttttgactcaacacggacgctctcttctcttcttcttcccgaca

SEQ ID NO: 68022 - DNA, 401 bp, Arabidopsis thaliana landsberg
atccgccacatcgtgcacttccgcaaagggaaatgattttaccagtattttttgtaacccctccctgatcagggtgtggtcatctgcggtcaagatacgcatcttctatcctgttttttgataaattcctgtaatgatttacttcaaaattactgcgccggctctttccgggcaaatccgggccctaacatagaacgcctgtatacccgggttattgcataggatgatggtatgaacaatatacaacacaatacggaaccccggaccgtgggaaacaccgtcttcggcggggaaaaacaccgaattttggggagcgggcacttttgcggaccatttacgtatctgcaggtatggatactgcccgttgatttgcatgaatgatgcacgtgatactttactga

SEQ ID NO: 68023 - DNA, 548 bp, Arabidopsis thaliana landsberg
cgtttcttcatagaaactttagtctcttctctgctttttccctcaatctgatctcttctttcagattacgctccaactcttccatctgtttccaagagattaaaggttgtctttgagtaaaacaaaaaccaaatccagatcaacactacaactactttgaaacaacacctttttggtccaagaaacgagaacagagtaagtgattctttcttggttcttgatcaaaccctgatatttttaaacaagattaatgaaagataggatttaatcaaagttacctttctagtaataagctctgcttcttcttttgcagatcttgaaacttgcctctctgcaagtaatcttcctcttaaacactccacagttctctgaccttcttccttttcttcttcttcttccatcttcttacttgcaaaatttgttcttaaccaaaaaaaaagaaaagaagacaaatataactcctcaatctctatattaaaggtcttaaatcacacatatatatctatatgaagagagaatgacagtacaaagagagaacgcccacctgc

SEQ ID NO: 68024 - DNA, 437 bp, Arabidopsis thaliana landsberg
ttagagtgtttaaaaaaaaataaaaaatcccatcttagatatatggactaaacattgataatccatttcttcacattttatgatgaatatgtttgaaccaatacaatgaatatataatttagtttttttttttatttttaggtatttttttttggtaaaaagtaaaatttcataccatttttgaaaattttgaccaaaattacaaaagaaaacaaaaaaaaatgagaaacctaaagctacataaaccaccaaaattactacataagcataaaacagaaaaacacacactagcaaacacggtaaaagacttttactaaaagtagagactcatgaataaacaccgattctaaacagtaaagatcgaacatttataggtagaaaatttgattgtcaagcttcattcatcaacttttcatcttcacatgctttcacgtaaa

SEQ ID NO: 68025 - DNA, 557 bp, Arabidopsis thaliana landsberg
ttgttgtcgcagcccctccatgtttgtaggttggattctttagcaaaatcaaaatcttttttagatatcatagtagcctctgaaccgataaaacatatagaactctcgttggattcattattttgtacatgttagtctgtctggctatatatgctgtggaacttaagctcaggtgtctgtactctttgcatctaagttggactaatcaaaatcctcaaaaagttctaaaccaatctgaaattatgcaactctactaccatttacgacttagcagtccaatacatggttatcaaactgaaaagctgtgttgttggtttatcagatattctatatgactcatggtcaccagcaatgacagtgaattcagtctgcatcagcattctttcgatgctatcaagttcacccgcaaaggttctttcttcttcttcgtgtttccctattgacaagttacccaaagtactgtgaattatgaggcctgaaactaaaaaatcaatgtgttttcatcccgccttattgcagcaacgccctgcggataacgatcgttatgtgaagaactg

SEQ ID NO: 68026 - DNA, 583 bp, Arabidopsis thaliana landsberg
  unsure (1)..(583): unsure at all n locations
atttgatttaataaacaaccatccctgattccattgtttagacaaaggatggttgtttaatgttttactatgaatattttatgggaaaatacctagttcatcataagatgtacctactttattaatggccacgatataggctgcagtgcgcatatccgggatggcgtcattactgttccagacctccagaatctctctggtagcagaaaccatcgtctcttccagaccactgtaaaccagatccacctcatcggctccatgttctataaatgctctttccgcactgctgactttcttaccggtcagatcttctagttgcgctaaaatctgcttattcatattttctgtgaagcgtttttccatccgtcnnnnnnnnnnnnnnnnnnnnnnnnnnnnncactcaaaataggaaacggttaccccgcccgcattcaggtacatatcaggaatgatcactacacctttggcattgaggatcgcatctgcctctggcgtgagtgggccgttggcggcctccccgataatcttcgccttgaccctgnnnnnnnnnnnnnnnnnnntacactttccagagcagcaggaa

SEQ ID NO: 68027 - DNA, 617 bp, Arabidopsis thaliana landsberg
ttctttgcctcttgtcttgtttgctgtatgcgtattaacagtatatatatatatatgctgtttgttttagttgctacacaacagcaagacctgaaaaatctattgcaggcttgcagccccgagaagaacgtgtaattgcgcgtctagggagattctcaatactccatgaagttgagcgtaagccgtaaggcaattagtctctctgcaggctgaagcttaaggttattgctgcatctctaagtctttgagactatagtcaaaagacgttttcagacttctggttatgtttgttatccagtctccgtgactccatacagtcttcttggtgatcatcaagtatagtcctaagctttagcaacatatatgaattcatgagttcaaataagtgtttactgtttcattcactttaccttgttttttttttgtttggtaagaattcactttactttgttaatcactgcgactcacttttttctctggtcacctaaacgtaccggttaaggcggttaggccaacaacataagtttttttttttggtaattaaacataggggactcagcttttacccttaaactttgaaccccactatctcaaagcatgaaaaatgtccgaaagga

SEQ ID NO: 68028 - DNA, 1517 bp, Arabidopsis thaliana landsberg
  unsure (1)..(1517): unsure at all n locations
tacggttccgaatgccaggctttgaacccataatgagcaagttacatacatatcattggagcttaaataacctgggtggtacaggagattctttgatattacatgaatttatattttacatatagactaatgtgtggtttttattatagacttgatattttgtttaacaaattttagggcaactttgcatatatattttttattttttaagaattcaattatgtaattggcatatagtttttcattaaaaagcgaatacaaacaatctccaaataaattacaaaaatattaacaaaaaataattccattgctaggttttgaatctggaatgagcaaagannnnnnnnnnnnnnnnnnnnnnnnnnnncagatttgaaaagtttacattacgttgtgttatcactatgttaatattaattattctatatatatatatatatatatatatatatatatatatatatagatgttagcatcttgtatcaaacacagcaatattatagaacaactcaaattatattctataatatttattaccatttagtgcccacaagcgaaacagtaaggtttattgtcgtcaactcattgtgatattttgacccgtttcaaatttttcgcttattcattggtaattctagggtttatcgctaggtctatgtattttttttgctagtctaggttttggctttcatgaatctgaaaccggataaagtcgttagtacaccccaagtcaagaacccaccgcaggctcaggaaatgagtaaaccacaaggcaaaagatgatcaaagaaagaagggatcacctcaggtcaaacgggtttaatggacaaggatggaggcgacagcgtaaatgagagagagacagagatagattaggaaagtattcatttcattaggttttccgaaatggcaaagtgccttacaaatacttagctaaaccggcagtaaaccgattaaatgtttcagtaccacaaaccggtacaataaaccataaagacataattaaaccaggatgaattacaatcatgctgtagcagaatctatgtttagtttggtctgcgtagaagtaattttttaatctgctccgatagaataatgtgctatagactccggatggtcttgccgtgttgggggttatgtagcttctttgtttctatatgtatcttgggtttagattttggaacccttgtgtatggagaaactaaagtttcatagttttaattttgatcttttggattcggtgatcgaagtttgatttcagcatggttatatgtcttaacatatttatggaagatggttatcacttctcaaaagtgaaaactgaacatgccaatatgccatggtgttgtattcttatttctattttaaaccgtatttaattttcttttcatcttttttttttttttgtaggatgatttccatagagggtatgaggattcttgatgcgatctttcacatcaaggaccaaataaacattgtccagaaagaaatcgattcattagggcccgcggaagcaa

SEQ ID NO: 68029 - DNA, 1165 bp, Arabidopsis thaliana landsberg
tccctagatactctgtgaactctttattgaatccttcaatgactttgcgatatcctgctgtgtgtgtaggccaatgtgtctgtttcatttcttcgagaagattgtgggccacatccagtgcaccatttttgcaacaatgatctatcaagaccctgtaagtaacataatttggagcaacacctttggaacccattcgctctaagagctcaaggcatgtttctattttaccaatcattccaaatccatcaatcatcgctgtatatgtcacaacattgggctgacaccctttttcttccatcatttgcataagcttataagcttcatcagttttaccaaccttgcataagccatcaatcatctcagtgtatataaccacattgggcgcacaggaattctcaagcatcttagataatacttttgaggctaaatcttggcgcttgactttgaaataacgatcaattagagaactgtaagtatataaggttgcagggaatccatgctcagacatctcagttttcacttcttgtgcttcgtctagtttcccaaccttacagagtccatcaatgagagcatcatatacaatctgattcggctcacaaccttccatagacatagcatccaacaacttacgagcttcttcgaccctatgcgacttgcagaaaccatccagtaaagctccatatgtaactacatttggcctctcgctgttgtcatcatactgcttgaagtacatatctacatctgggacatctttgctgccacacattctttcaaaaatctggcaggctttctccacttgtccagctttgcaatggccatcaattaaggcagaatatgtaacaatattagggagacacccttcagacagcatcgtttcaaacagctcatttgcatagctgaccttcttagccttaagataagcatggataagagcggtatatgtgacgacgttaggtgtacaaccaacctctctcatttcattgaaccacttacgagcctgttcaattagaccagctttacagaaactatctaccataatagtatacgtatagacatcagcaacaaggccaccccttttcatttcttcaaataacaaaaacgccaactccattttcgaagcattacataaataattaaggactttgaaaggtctggtatgtggtat

SEQ ID NO: 68030 - DNA, 567 bp, Arabidopsis thaliana landsberg
  unsure (1)..(567): unsure at all n locations
acgctgacaaaaaagccgaaggtaaaacagtttgttacgacctcgatctcgtaacctctaaaacaaangnaaaaaatgcttcgttttgtaaagtttgatacaaagctgctaccaatcatagtttaactatgtatctcatgagtgaatctttttcgggaacatgtgttttgtttccgttaatcacaccattgctgtttgatgataataattgacaaatgacaacattgcaattttattaattacaatatttttttttggacgaaaatattaattacaattaataacctaattcccttgtcgaaacaaaaggtagccgtcactacagttttcattttcattgatttgtatccgaacaataaatacatatttatctgatcatataatagtagtaaacaaagtttggccaaaatataaattaatagttttaactgcaaattttgacattttcatgacgtctcgtttgatctacacatattgtttgacctctctcttctctagtttacatattcgttaatgcgtgagctaaagcatccccgacagataagtgaaaaaaaaagacttcctttt

SEQ ID NO: 68031 - DNA, 595 bp, Arabidopsis thaliana landsberg
atgagctggccagggacgtggcgccgtcgtggtggaacccgacatcgagggcatccgtcgtcccggcggtgcactgactttcgtcgatgcggcaccgttcaagaccgtgccggacgggccgctgtcggtgttgcgtgaactgctcgacctggaagccctggagctgcgggcctggagcaggcgcgggttcgccaggtttcacaagcgcgccgcggtcaaacaggccgagcggatctgccgcgagcagggcagcgaagccgctgtggactgggtgttggccaatgccaccaccgatgaggtggatctcgacgagctgcgggaccggctcggtgcgcggctgtactccgccggcgggcgcgacgtagacttctaccgcgcccaggtagggcgctgcatcgagcaccgtcgacggcgccagctcaacggctgagccgcgactcagctgcgccgctgccgaaccttgtaggtcgacggccacgacacccgggtgtcgtcgcccagcagctgtgttcccttggtgccgacggtgacgttgtatgcctgttcgccgggcccacttacagttgcgtgtcggtgctagtagttagctgtcgat

SEQ ID NO: 68032 - DNA, 279 bp, Arabidopsis thaliana landsberg
ccacgacacattctttgaacccgtgtgttttatacacggaatttgaatgttaagaggagttataagtcttaagaatgaatgaaacagataggcaaattcgtatggtgcaatgcaccgtaacccgttctctaaattttgaaacttagagacaattgaacatatcttcaagctgtgactttattttctttgaatattttttttgtgtgtaaaaaaactgattaagatgattttatgtggggatgatcttaatacaaaaaacgagttcgaaacttattttgt

SEQ ID NO: 68033 - DNA, 363 bp, Arabidopsis thaliana landsberg
gctcgacaaaggcctggggaaggcttttgctaaaacaacttgcgacggatccttgcaacacaaaagtggttatcgatgtcctttcatcgattgtctcagctttgcatgatgattcgagtgaggttcgaagaagagcactctcttcacttaaagcttttgcaaaagtaagtgtaagctagaaaagtagtcattcgagtggattgattcgtcaatgatacgtgcagtagtaatgcaagacgttattttacaggataatccatcagcaaccatgacaaatataagtgttatcggacctcctctagctgaatgtttgaaggatgggaacacaccagtgagacttgctgcagaaggatgtgcttggcc

SEQ ID NO: 68034 - DNA, 832 bp, Arabidopsis thaliana landsberg
  unsure (1)..(832): unsure at all n locations
agtataaccccctaaaatattacccgctaaattaagtatgtgcaaagattgatagctaaatcacctatttgttttttttttgctctatgcttgggttatttcttgaataaaacccatgtatgtattctttaattaattgtgtttgtatacttgtgtataatatttaagcaattttattatagatgaaaaaagtaattttatataaaaatgttgtttagtaaattaatcaacacaaatcagtttttgctaaatatgagaatttttctcttcaccacggttaaaacttaaaactaaaactgtatttattgagataatatatgttaataatatatgttcatacttcatagctttgtggaaattgagaataaccatatgtaaaatattttgagaaatggttaaagggttcataaaataagagacaacacttatgagaaaaaaaaaagagcctttaaaataaaactttggtaaagtcaaaggaaaaggacgataaaaatcatcaaatcgaaagtttttatttttatttgacgatcttgcttcttcttcttcttcttcttcttcttcttcttcttcaactcgttaccatcaacgctcaaatcctgtatacaatctcttctcagctgtaatttctataatctcgtcaattatcatctattcaggggtaagctatgggatgtgcttcttctcttcaggcaagttttgttttctctctcattttgttgaatttgttgtcgttgatcgaataaaactgaggatttatagagaccctcgagaaatttcaccacccatttttccgaggtgtaatcatncgggtngaattagaagcttttaaaaa

SEQ ID NO: 68035 - DNA, 2237 bp, Arabidopsis thaliana landsberg
  unsure (1)..(2237): unsure at all n locations
cttacattgctcgatttcagtcctctgaaaaaatctccctgctttgctatggctctgaggtgttttcccatttgggtttgtccccaaacgactcatcatcgttctcctctcatgggtctcgctgaattcnnnnnnnnnnnnnnnnnnnnnntctgtctctgggagtgctcttcttcagcttctcagagagctgtcactgccattgaaggcgagattccttttagccgcgagctcaaaaagtcctctgatgaattgggtttgactcaggagactcaatctctttcttttcacagagacttaagtatgcttcctagtgagtcatctcctttcccttctcgatttcatcgaacatgttggtttatggaaatgctgattggttcttgtgttctgacgatcatttcactttcgaaatttgtaaattttggatcttgtttagctgaattttgatctgtaggatcctttgttggggtatatacgctcagagataatgtggctgatagattcttactgatagcctagattttgtgtgaagaattacaatgattatgtccttgcatggtttttacagaaagtctttgctgatttctgttatagtttattacacttgtattaaaatatcttgaacttttgttctgttgattgttgaaattaagaaatgattgagtactaaattatgccccttgacattaataatgtctgtggctatgttgtgttcttggatccaagattagtaaatgtcctttgacattagattccttctgcttaccatatcagtagctgcacttgatgtttcagattcgatcttttcttatcatgtagtcatgtgaatgattagatcactgtcatttgcactgcgatttgtgacatagggctttgctataagtgaatcgatctaggatacttgtatttcaaacattgttaatgaaaatggtgtacttaatttgtttatttaatagtagattctcttttccatattagtagcttcatttcatgtttcagatttgatctttcttgttgtgtagtctcataattatactaaccattgtcctttgcatcgcgacataaggctttctacacgtgtatcgatctgttctgaatggactactctatatattaacttaataccaatttttccaaattagttgctgcagctgatgtttcagatttagtctttcttgtcatgtagtctcataaatatatcaaccattgttctttgcatcgaggcatagggcttgttacacgcatagcaatctgttttgaaaatggagtatcgagctgttctgaatggactactctatatattatcttaataccaatttttccaaattagttgctgcagctgatgtttcagatttagtctttcttgtcatgtagtctcataaatatatcaaccattgacctttgcatcgaggcatagggcttgttacacgtatagcaatctggtctgaaaatggagtattcaatatgtagcgttaatattccatattagtagctgcattagatgtttcatagacgatctttcttgtcgtatagtctcataaatggatcaatcattgtcatattcatcgcgccttagggactgctacacgtgttatcgatctattttgagtgagacgatactcgctattccaattgttgttaatgaacatttacataacaagcccctagaaaaattatgaaactcaaatgcattgtctgtcatatcctcgttattatcgatcttattacttttaatcgcttctcatggcaagccttaacatttaaagttgattacagaaccgctaactgcaaacagtctttactcttctgatggcgatgattcaaaagtgcgaatttcgtttcaggtgaaatattagcttcctcacttacatgcaaaactgtttttctctttctttaattttcttgtgttacaaactctcgccaattgcaggggataccaggtgcatatagtgagacagcagcactaaaagcatttccaaattgtgaaaccgttccatgtgaacagttcgaagctgcgttccaggttttgatttatcggtcacttctaatatattctatccctacacaaaaaggtacggtgctttactatgtctttatatgattgattcttcaggctgttgagctctggttggtggataaagcagtattaccgatcgagaattcagtaggtggtagtatccaccgtaattatgatttgcttcttcgtcataggcttcacattgtccaagaagtccact

SEQ ID NO: 68036 - DNA, 660 bp, Arabidopsis thaliana landsberg
taagttctaaacatgaaaattttaacggtgaaatacacaaacgacatcggaaaataaacaatctcaattatgtccaaacacatgacattaaattgcgtaattttgtttacttttgccggtcatttgatgggtagaggaaaaatgtttagccgttgaagattggagaaaagataaaaccggaagcagccggtgaatggacattgccatgtgaacattactgacactagaccgtgttgggtcttgaaccatctctacttggaactcctcactttgactcgtacaagtctaactcttcttttaactctctttatcctttaaatactttaaacaccttcactaatttcttcttcttcttttatttatatataattttccctacaccctaagagtctaacctgtacttaagacaattttctagattatattatacagtaagtatatgtttaatctttgtcgtacgtttaaatattcttgcaattgaattaccgacatgtgattttactttggtctttctaattccacacaaaaggctaaaaggagaggatattcaatttaaagaagattagaccgcaattttagttgaccatttttcagcattttggccaatttatgggattattaagaaactattctatgtcattcatcacatattaaaaaaca

SEQ ID NO: 68037 - DNA, 188 bp, Arabidopsis thaliana landsberg
  unsure (1)..(188): unsure at all n locations
ccacattttaacattttttataancgaaccacaannacaagtattattgcaaaaatgtaagccacataacttgtgactcttcttccacttatgagttgattatcactatattgataaataattaccaacgaatgttccaaattaagcagactatgggtatcgatacactatgtattcatctacaatat

SEQ ID NO: 68038 - DNA, 460 bp, Arabidopsis thaliana landsberg
ccgccatttgtgttattattattcaatattatcaggattattctagttattttttaaaaggaacaattacagaaaagggaatccagtctgtatcctcacttaaaagaatgacaatcttttaagacatgatttagaacttaaacagaaactaactactttaaatcacaaatgaacaatgaaaattaatgaaatacaactattttagtactgatcagttacaccactttattttgcattttaagatgaaatcttaaaaatgaaaatagggaatgtcaaagtgtgtatttgacatcgcattcgaacattttttggaggctgcatctttcatactaaaacatgtcaatatccatgagacctttgttaaataatgatgtctagacaagacattaccgcttaattgttcatacaatttccatatacatatatgttaaattcgcgcatactgaacagaaaatgtgag

SEQ ID NO: 68039 - DNA, 416 bp, Arabidopsis thaliana landsberg
gaaagtgggagaataattattctgcaacattttgtaatatttttttcggagaatgcatttaaccgagacggataacatttatgtcaattcagcgacataactcataacatacaatgatacaaactaaacgtcacagatagcatagtatagacaagccggatgaatccaaggttaggaagatcgactatgccctgtatcattgctaggcaaggatgtattcactatcgacttatagaatatgggaaaaatgcattaaaaaaggaaaattaatatataagctatgttcttcttacagaatgaatagagaatccagaggcacagagtcgcaaagaacgaccgcaaaaaataaggaaaatccacgaaaagatcttcgcgacgacgtgcccttaaatctggaacccttaaatattacggca

SEQ ID NO: 68040 - DNA, 620 bp, Arabidopsis thaliana landsberg
ggaaatcattccattaactttaattggaagtgtgtggcttaaacacaatcaaccaaatcgaaatttatttaatagatttacaccacaaaatttattttcgagatgaaatgcatcttggacaataaaagatttaaactttgaagcgacaaaaatgtttggtcatgatatcatcaaatcttatgttgcattcatacgtgtcaagttttaagataaccaaacaagactcactagtttcattggcatttgatatgtaatctacctcaacattgatcgtgttaactgttacatatttcttaaagattcatgagacatgagaaacacccttaaaaaaaaaaactagcatataagacaccatttggaatggcaagaatcccaatcgatataagagagagctcgaagagtcatggtacttgttttgggataaaataatctttgttgtagatcattctttagatagtgtaaaaaactttgagcaatttagatacacggaacaaggtgatttcatgtattgactcacaaggtcatgtctttttcaaaaacaataatggtttgaatggttgggacagttaggacagacaaattcgttttgaaccgttttaatttatcattcataaattatg

SEQ ID NO: 68041 - DNA, 265 bp, Arabidopsis thaliana landsberg
tcgaattctaagagacagacaaacagtatctttacaaaaacaatactacatggttggtgcatatatattaaatatgatttatataccccttttaataatgatttatgatgaatacacatataccatccgatcctttctacattttttaaatatagacaactctcgtttgcttgaattatgtgtagtgaaaacttttctttcttttttttttctttgtcataatcgaaaacaattttgtttactccatattttagacttactttac

SEQ ID NO: 68042 - DNA, 518 bp, Arabidopsis thaliana landsberg
ctatacaatctatcctttgaatgagtcctatttcctaatctttgtgagaagaaacttaaaactcgttaacattggtgggcttggctgataaacaaagaagtaaatttgccacaccaaaatttgaaaatctcagaacatccacttatacaacaccaagtcaacaaaaagggtctctcacctaaggagattccaaagactaaagattaaccaatattttgtacataaacatatctttgtatgatgcaaaaacaaaaatttaacagattctttgctgattaaatatattcccgtttaacaaaagaataataacttttgttcaattatttcgaggattaatagttctgctccggtggcctctaacaaggttatgtgttgatagctttgttggatctagatgtttctttcgatttagttgtcaagacagttctgcgcctaagttagctggttaaaagctcagtatattgatgttttgtcctccatactcgtgattgccataatcggtgagaaaaaagaagatt

SEQ ID NO: 68043 - DNA, 291 bp, Arabidopsis thaliana landsberg
aactacgaggaacattgccctgaccgaagagagcgagcgtcatatgtatctatgccgccagattctagccaacatcgacgaggcggaaacaaccaccgcttaagcgcgagcaccatccaacaggctggttgcccaagcatagcgctgtctagcttaggccataacatcgtcgtgccggttgttctgcgataccaagaggagtataatacacttagagtctaaacggcgttcccactgggtgtggaggaaaacttgtcaggggggaggtcgtttctatcattgaacccccgc

SEQ ID NO: 68044 - DNA, 293 bp, Arabidopsis thaliana landsberg
aaaagacaatggatattgctggaaacgtacaacgtttgcatcatttctggaatcgaaccacatctctttgagcttgtttagaactagaaataatagcataacaaggagctcggctctacgtatggaaggattatgactatgaggaacagtgtgaacgaagcttaggctctgattaatcgaacatggggaattgcttgaaccagaaatcggtgcggaaggcattacggtgcggcgagatatgcgagatatgtgtcattgcagtacagcgggctacgaagcaatgcaaatggact

SEQ ID NO: 68045 - DNA, 498 bp, Arabidopsis thaliana landsberg
gctgattgcggcgttgatgggtcctttgctgccgccgtcggctgttaagtggctttgagccaacgcggtcaaagatctgctgacgaggatggcatccagcatgctggcggtcgccacgttctcgctgtcgatcatggtgtcggcgttcacggcggcgtcgaccagcacgacgccgcgcgcctccaccttgttgatcgaagacaaaaatgggccacgcgcccctgtcacctttatcggggccttcctggtccagcatcgtcggcctgatcgcgctggcgaccgacatctacggaccgaccggcgcggttgtcatgttcggcatgacggtgatcgtgattggcctcgttgtcgtgacactgttgaactggatcgatcagctcgcacgcttcggtcgggtcggcgagacgatcaatcgcgtcgaggcggctgcgccaccgcgttgctgcattgcgcgcgtgcgccgacgatggacgccatgccagcgacgcggggttccgg

SEQ ID NO: 68046 - DNA, 500 bp, Arabidopsis thaliana landsberg
tctgtcagctgagtgggctgagatgctcaacaacctgaccaggagctgctgcatgtatcagattagccatattagtcatactaataaattagctataggctacgtaaccaaattaagcttggatttgctagattgtgcataaaagaacctttgtcatcaaacctagttcagagaaaaaatcttaactaaaacatgcgatggaagaaataaactccagaaaatagttccaaaatattagttcaaacgaactcatgctacaaaaaatgatagaatgattacccatgtatcaacacccgctatgtttaaacacactctgtgcgatattttagtgaacttgcttcatcttggtacctttagcataggcatgatcttgacttggaggcatgtcatcatcggctttaacatcatgctcagtataaatgctcaatcctagcttgaacatactgtgagtactgctccccatggcggcgggctcatcgggggtgccaccataagtgaga

SEQ ID NO: 68047 - DNA, 857 bp, Arabidopsis thaliana landsberg
ctgactagtgactacttcgtcccatgctataacaatatttctattatttttttatgaccttttttaattgacatttgtcgtattttgttacacaatttttttttaatgttcacataaccccaataaaaattagttaaaacttatcacatatattttcaaatatcttattgaaaagtcatacgtaaacttacttacttacaagtgaacatatgaaaaaggaaacaaaaaaacttgattaaaagtgaacttataagacgtaagtccacaacaaggccagacatacacgatacgaacggcccatggcctcatcgcaaatcattcatatgtacattaggtagtagactaattgtagcatctcatattttagattacaaaattaaacattgttagaagttgatatttacatgttagaatattggaagttaaagttttatactcttatataacaaatgcttttaattaggaagacaattggcagtatcgactaatcaacacacaaatttcctcaaaacaatgaatttgtgtatactcaaggtttttttaacaaacaaaaaaaatagctagtcggttgcaagtgttgcttgaacagaaagtttctcgttggagacaatatgtactttttgttaagagtcgaattcatcgcgtcgcatagaatattttttgttgttacatcaagtcaaatttggataacatggggactgcgattttaaggatatgaaatatgatgattagatttttaaataaggattccgctataaataagaacataagttggaacaaagctctttaactagggttcctcatgatatatataaagttaagtcgtttgattgaaaaaaaatttttttttttagttt

SEQ ID NO: 68048 - DNA, 407 bp, Arabidopsis thaliana landsberg
aatgcgttgaagcactgaagaaatcttcttccttgagctatttgtgagctccaagtatgggtgaaagccgtcctgtgaagtaacataaaataataaatagaactcttcaccagaatatatataaacttagtgcaagtcttgtagtcagatcttcagctctaccttttccaatccttcacgggtatgagcatccaaaggaaagagctgcagcttcatttttccagaacgtggaacgtccttgctcgatggatataagggacggtactttttgagtttggtcttcagtatgtatcagcctttgctcttgagaagatgaaggctgagctgaacatttatacttctcctcttttccactattatgttttcctgatatatgaaaaatccaattacaatgccaaaaagatcgt

SEQ ID NO: 68049 - DNA, 478 bp, Arabidopsis thaliana landsberg
  unsure (1)..(478): unsure at all n locations
gtaatggtatgtagagaaggaagtatttgcaattacttattttaagacaatctgcaatcatggacaaaacgagctggctgcttttttcggattacttatgtgagtatatgttgcttctttgcaggatagtcatggaattgattagaagattgttcaacaaccactgcagaagagatttatctgctgttttggaaagcatatgaaagtgtgttacattaaccacatatagagagagggaaagagagtgttgtgttactgatttattaataccgaattcttgatgttttctagagtaggctctgttttggttttgaaaaggtttctatggctacaatgcttctttgacaagaagactatcagtgaaactaagagacatttcaaaccctttcaccatcattaaagaacgttacaatgatacacatagataacannnnnnnnnnnnnnnnnnacttaaccaatgtnagcaattgagtcgaac

SEQ ID NO: 68050 - DNA, 545 bp, Arabidopsis thaliana landsberg
tttttttttacacatgttggcctgagacagacgtacaaatacaaagcatcggcatgacataattgttatgttatgatcgccacgttttggttgaactgtgtttcattttaaatgattacattcctttctacttttattatcaatgttagtataatttggaatgctcgtgtatctacgtgatgcttagatgtatatatcgacagatagaaactcatattgacgcttggtggtcacccggagacaggagaaatctgtgctgaattaattatgtatcccccttaactgtgtataaatgaaattatgcaaacgacaatcacaatttatcgtagttaattcaagttacgtgttgtttctaatcagaaatatttaaatttttggttccatgcacacaaatatgaaccacactttcgtaataccaaaagatctaacacttgtgaggagctttgaaaatattcgtatattaattagtttgggtagtcggaaaaaaattgattactcttaatgcaaagtagtattagccatcacatgtgattgggaatagggtc

SEQ ID NO: 68051 - DNA, 364 bp, Arabidopsis thaliana landsberg
cttacaaagcctgataaggtttgaaacaagatctttatcataatttccttattaatattatctgtgtaagattctagaaggggcaaataatttcacaaccaaactctcttccttaagacacaaggtacatgtgatgataaacagagacagacacttgatccggaaataaaccttaaacccttttaaacttgccatagaaactacaaaactccacttagcctgagactaatacatacacaactaattaatcccggctctttaagaagtggttaattcctatttgatccgacctagaatttcagacacagatctcatcctaggacgcatatctggatccattttcgtgccgttttaaagcgacacg

SEQ ID NO: 68052 - DNA, 671 bp, Arabidopsis thaliana landsberg
tgccggcaatcacctttataatctagttttggctcattcatgcaaagaaaaaaacgaccgtaaaaacagaattggtccacttgagttaaaaacttaaaattaattgtctttggggttacttataaaattccaaaagatttggcaatcaatgagcacaactctagtgtctctgaaaggctattggataagagagtgtggataacattatctcccatgagacttagaaatccgttactgagataaagcaatcaaagttttacaagacacatcttgtaatgaattattacattgttaagttccactagttatatttatttcgtattaaaccattatggttataatttcaacgtgattagttaactattttattctatggttccgtaaaccgctccaataaacaaaagtacacaaatgaaaccggaattaaaagccaacaacaacatgaaaggacttcattcatttgttccaaaccgaaatgaaaaatctcaccgtgaattagatagatcatcacagggattaataacatccgaatccaaattaactagtcatcggataaaaattcactaaaattctaaatttagaaaagccacgaccacataaagacaaggagatagaagagagacatgacgggcttatacattcctattcacataaaagagagaaaattaaaa

SEQ ID NO: 68053 - DNA, 168 bp, Arabidopsis thaliana landsberg
aaaccccactggggggggaccccatccggaggaatttctcatccatttgacttttgaggggactgacctgcctcaacgggggccgggggaattttaaaatggggaacggactaggcctgcgactgggcgggccgggtgggggggatgaggggtaccggatagacgcgg

SEQ ID NO: 68054 - DNA, 187 bp, Arabidopsis thaliana landsberg
agagaaaaaacaaaatatgtagtataaacactatattaagaggctataaagctggtgccattgcgatttgcatcatctactcacaatgtacataacgattactggtgagctctttatgtacacaaaatttgacactcacacaagtaatccactttgctttcatccaaaactaaaaaaaaaaaaaaaa

SEQ ID NO: 68055 - DNA, 312 bp, Arabidopsis thaliana landsberg
ccggtaactatgcctagctgcacgctagcctagaacacaggtagtgtgacgtgagtgccgcgacatagaacacgtgatgcttgcttatatggaccataggtaaaaggtggtgttgtagatattgcagtggttgttggggactcaaaggggggatatgcgagcatgataacttatatgctgttctctgtcggcatgaatataggaacttttgcttgcgttatattaacaggtctacgttccgcaactgatcacataccatatatgcagggttgtacacaaaagagcctcctttggctctaactttagctctat

SEQ ID NO: 68056 - DNA, 226 bp, Arabidopsis thaliana landsberg
cgacatacatatgaatcattttagtttttatagttacttgagttctagacaacacccatattacaagtcatcaggttcttcgttaaatttaatcatgcagttctttcactgtaatgggaagaaaccaatttctataacagcattgcatggccacttgataaagaaaatttttggaaaaatggaaactggataccccaataattcctttacgcagattttgatcttt

SEQ ID NO: 68057 - DNA, 440 bp, Arabidopsis thaliana landsberg
ggccggggcctgcgcgaaagcggccgttgcgttgagcaccttgcttatcgccgcagagatgagcaagcgcctgggggggggggacgactccatagttttcctcccctgccccgttatcgaggcgatcctggcgtctggtcgcgccgtgcactctgccggcctttatcggaacacgagcagatagataagggagcctaatcaaaagaccccctactagacaaccccatctcgcactgcccgacggcaattcgcaagcagcgctaggcgagcgcgacagggagggttatgcaaggcgatcgttagggcaccttataaaggagctgaagggtgaggctctgccgtttcggcgacgaccgcttgggcctggcggacggcgaggccgtgcacgacgtgacggccattcgcgaggcccgtccgccgctcgacggcgcgggcgacgc

SEQ ID NO: 68058 - DNA, 642 bp, Arabidopsis thaliana landsberg
  unsure (1)..(642): unsure at all n locations
cgagtctctcgatcttcctcttaaccttctcatgtaagtctgtaatcttctttttttcctaagaatcatatgcatgtatatttacataactacgtgttaatctaagttcttaattcggattaatttgttttaaacattattgttatgttatgtgattattttattatttatgcaattgtggaatcagaaacaacgcaggcaagttagcacatgaacatgcaatatctgaagacgggatcgagatgacatttgctactaattatctaggtatagtagtattttcttaattatacgattcccttagtctatgacagatcttaattaccctatatactagtattactttattgttaatagccttcttaattntttaatccattcacaatgatcaggccattttctcttgaccaatcttttgctaaacaagatgattcanacggcagaggaaacaggagttcaaggacgtatcgttaacgttacgtccggtattcacggatggttctccggcgacttgatcgaatatctccgactcatttcacaacccaagtggtaagtttgtgtatgttctggntgagtcatgaggtataaaatgttcattccatacttaatngtatctatacatcannaactcaaagcagaagt

SEQ ID NO: 68059 - DNA, 1960 bp, Arabidopsis thaliana landsberg
aatatggatctccggtttaattggtatggttttaccggtcctaacaattttaaagattattaaaacaattgatggtatgaaatttcatgtagtaaaccgagtagtattaactattaagatttattagtcttaatcatattattttttacttatgatggtttagaattttaatcaatgtaagtaaacagagttcagatttaaaccaatttaacaattaaaaaagatttaataataaattttataaaatcggtttgggtgaaccgtggattgaatatcatcctctgtagaaatttgtattccccttttagtattataatagaagaacatataaaatttaaataaatataaattaagccttataaaggaaggctgggaagctgctgggcggtaataatgggtccctcccaaagcaaaacaaaggagagcaactcgaatctgtcttctagattatgtgtgtgaacacgccaaatattttcatctcattcgttttttaacattaataagagtgtgcttatttttaatcttgaatcctatcgatatgttgttaaatccatctagaaggttgactttttgaatcgctggctaattgttagcttttaattttgaccatgttgttttgcttgtcgcaaatggttcgtggggttgcattttatcatggaacaatgtatgtgtcttacgaactcataacgattgagccgttttccaaaccgaacaaaataataacgtaacatctttaaaagcatccacgccagtagataacatacacatagtaggaagtaggtgattagaaaactctaatatccctagaaaattagtactagtgtgggatgcatgcaattatctagtggctctcattagtcactaacgtgtggtaggttcaagtcttcctaagtgaagttttaatattggcagaaatagcaatatcttttaacaaacaaataaaaccagcattatatctctgcctaccttttctttctacttttttcttttgtcttttgggggtttagataatagattgtttctactttttggatttatcatggtcgttggtatgcttgtgagttgtgactagaaacgttatgacatgccttcataacaagccaaaatttaaggtaacgaaagcgatatgttgatgtatggatttcttatttttcgccacaactaaaaaacatggctttggtgaagagaggaaaaaataatataggtttaaagataggatatatagctgtagatatagctaagatgatgaaaaaggaacgacattctaaaaacaaaatctacaaggagatttgatttcgtatctccaaatgacttaaacaacattcatgaccaaaattttcttttacttttgaatttatgcgtattataaatttagaagatagctcttaccaaaacataaaagagaacaagtggtttgaaatgttgaccaatatatgggactttcattgcaagaaagatgatagtgaaaaaaattaaaataaaaatataataggagtcaaacataatgaggggaataatacttttgttgtcgctggtttgatatcacatgaaacattttactatgaatacatggttaatattttttatgctgagtaaataaatataagtatcgaaatagcatatatgtatatggggtttttggaagattttagtgtccatacactgaattattcttttaacaaaaggagtgaccaaaacttagaattagattaaaaccctgttaaatattgctttaaaaactgtctttgatcccttcttgtcattgttggcattctcgtacctatttccaaattcattcatgcatttggacaaatgatgatgtatgatatggtccatatcatatggagatagatgtggatggaagaacacattataaaaacaaaatcttaaaggagatttgatttcgtatttccaaatgacggaaccttggccacattcaggaccaaaaactttattcaca

SEQ ID NO: 68060 - DNA, 770 bp, Arabidopsis thaliana landsberg
  unsure (1)..(770): unsure at all n locations
actatataangcataaaaaaaatggaaacaaaggtcatgatgataatatagttaccactagttattattatgatattacaaactacaagtagtaacaacactcaagccagattagctacaaactcgcacatggtctatataattatactaattagggttatctaggtagctagaaaagcttctgtctctcccgtaatgatgaagatttttataactatagatgattgaatcatgcagccggagcgtaatcatagactacatcgtcgtcatcatcaccttcgttcttgaaagatgcaaatgcatagtgaacattgtaatagagaacaaagtcaaattctagtgacgacgacatctttcttcactcaacttagtgcaaaaaaattgtaattaaagaagcctaaagaaatacaacttgatttgaatatacattgagatggttacttgtaggtatttatagatggtaaaaggcaaattaaattgggagtggcgaactagctgaaactgagtcagggcatgtgactcgctgcttatcatgtgtgccagacacaagtggagtgtgagtaaactgaataagccacctattttgtgccctgacacatacttcgctttttgtacatataattggtccacctcttattacacgatttaacaacatttctcatttcattaggacataattttctgaatggaataataaactttattcaagtaaagaggagaaacattaagttttctttttctttggatttaggttgaaatatatattataa

SEQ ID NO: 68061 - DNA, 477 bp, Arabidopsis thaliana landsberg
gcctcccgaaccgaccagcgggaagactgcgcaatagggcctttttgttcttcacccaatcgttcatgcgagtatcgataaatccgggcgcgaccagattaactcgaatgccgtcgcgggcccagcgatcggccatggcgcgcgtgaagcccaggaggcccgatttggcggccgtgtaggcggggtaacccttgagtccgaggaagcaggagcccgatccgatatttacaactgctccgccgcgcgagcgtatctgcccgtggaagcggaagctgatatcggcgggcgcgatgagattgacttcgatgctctttataaagccttcgggtcgttcccttcctcgtcgtgagccgctcccgcgttgtttatgaggatcgacaagcccgatatgcgctctgccaaggcttcgcgatcctgcggccgttccattcgggcacgatgataaatatattcggagagaattttctcatagtcctc

SEQ ID NO: 68062 - DNA, 656 bp, Arabidopsis thaliana landsberg
atcgagcgcacggatatgctgaagaatgtcacgctgaagtaggggcggaaaagcgcggtcagggatcagggcgcaggggttgcggagccccgagccttcaggctcgggggacaagaatgccccgcggttcctggttcctcctgggcctgaaggcccagggctccagaatcccctgcgttccgccgcctgccgcctgatccctgtcagaatctctccacatgctcaccgtcagcgagatctatctgtccatccagggcgaatcgacgtatgcgggggagccgtgcgtgttcgtgcggctcgcggcgtgcaacctccgctgcacctggtgcgacacgccgtatgccttcacgggcgggcagaagatggcgatagacgacgtcgtgaccgaagtgggcgcgcgcgggtgccggctcgtcgagattacgggcggcgagccattgctgcagcgcgaggtgcacgacctgatgcagcgcctcgtcgatgacggctacacggtgctgctcgagacgggcgggcacatgccgctggacgacgtgccggacgaggtcgtggcgattgtcgacgtcaagtgtcccgggagccgcgaggccggaccgatgcactggcccaacctcgatcaattgtccgcgcacgaagaagtgaagttcgtcatcgcg

SEQ ID NO: 68063 - DNA, 380 bp, Arabidopsis thaliana landsberg
  unsure (1)..(380): unsure at all n locations
gaacaatacataaggacaaaccaccaactaccatattatctcatatataacgggacgacggccgcaggggagggtatctgtccttgtgatcatgannnnnnnnnnnnnnnnnnnnnnnnnnnnnnnnnnnnnnnnnnnnnnnnnnnnnnnnnnnnnnnnnnnnnnnnnnnnnnnnnnnnnnnnnnnnnnnnnnnnnnnnnnnnnnnnnnnnnnnnnnnnnnnnnnnnnnnnnnnnnnnnnnnnnnnnnnnnnnnnnnnnnnnnnnnnnnnnnnnnnnnnnnnnnnnnnnnnnnnnnnnnnnnnnnnnnnnnnnnnnnnnnnnnnnnnnnnnnnnnnnnnnnnnnnnnnnnnnnnnnnnnnnnnnnnnnnnnnnnnnnnnn

SEQ ID NO: 68064 - DNA, 207 bp, Arabidopsis thaliana landsberg
atatacctttcgtgtaactttagttaatgatgctttattcaggtgcgacctggggctgggcctcccacatataaagcctatgactcgggctctgtagatggtacatggtgactactacgatctgccctgtggctaatgccttgcactggaacctaaaaactttccttgacgaaccaaccaatgcgtgatctccttgatagctttgcc

SEQ ID NO: 68065 - DNA, 335 bp, Arabidopsis thaliana landsberg
accccttgtggctaaacctttatcaaagactcctacaaattttctcaacttttaaaggccccggccgcatctgtagggcggggggagaatattttggagaacacgcccaaaaaccatatattcaaatcaaaaataacaatgatactcacatgctcaagggaagatcgcgaatcattatataacaataaaaatcttcttgtttacacatttaccatagaatgctctagatattctagttcaagtaatattctgatattcgaatatcctgagaatatatgcttgctgcttgattacaaatctaaacacaaacattactcaagtcctaatgtgttttc

SEQ ID NO: 68066 - DNA, 555 bp, Arabidopsis thaliana landsberg
  unsure (1)..(555): unsure at all n locations
agggaacggaacctgcacaagattatatccaaccaatctgtatttctataccgctgattaatgaacggatggggtaaggggatattcttataaccattcaatgtgttcaaacttactatattatttttcaggtatgttcttgtatttaaaatgtctcttcttatgttcaggagccacctgtggatgttcttgtattttttactggtcaagaggatattgaaactgctattaaacttcttgaagaaaaagctcatatcaattaaaagaattcttcaggtataatatatacacataaataacatcatgtccatcaactttatcatttgcctttagtggttaagggccatagtgcaatttcatattcttatttacagtgacttgtctaccctctttccattatatttcatggactttnnnnnnnnnnnnnnnnnnnnnnnnnnnnnnnnnnnnnnnnnnnnnnnnnnnaccatccttttgtgagtatttgaataactgaatacggtaaattgtcgctttcttccctctttattattatgggaatacgatcctatacct

SEQ ID NO: 68067 - DNA, 474 bp, Arabidopsis thaliana landsberg
aacccgagcttattgctttccagtttctgtttccagttggaaacttaatattcttgagaacaaggggcagaagaacgggagggttaaattcatcactgtgcccacacacccaccaaaaaaggtaagaaccagcgcacagttgggctcgagggaggttcatcccccacacggatgaatactgctataacaaaacaaagtatggcaaatacaacgatgccggccgcaggggagccgtcgtttgcgctgctgttggccatcgcataaatgcctgctgctaccagtaacagccccacaaaaagcgcggcaaaccccggtaccgctttcctgatcttttccataataattagctcgatatcaaaatgatatcaaacctaaggaatctttctgatattcctacctctgcagccaattatttgtataatgaccaatcctccgaaaagatacctggtaacctcggcgctgccctatgccaac

SEQ ID NO: 68068 - DNA, 547 bp, Arabidopsis thaliana landsberg
aaaaaaggagttttgtgttgttttaacgacgacctcttctcctctctcctcctcctcttcttctatattactatttcacctctctttttcccagatcatcatcatcctctctctttctctagattttggatatttcctcgtatcggattcgaaatcttctgtttctaattccaacaatggcaacggtaagaacaatatccatctcttatatctacgaattctgattcatttcttgatatgatttcaaaacttccctcctttcatacaattttccaaatctcttatcttgaaaaaaagtctcaaactttggctagaaatctgcattttttttaatgatgaacaattctgttttttgctttgtttgctcggcggtgtgtagggaaatagagcgagaccattgccaaaatttggggaatgggatgcgactaatcctggctcggctgaaggattcactgtcattttcaataaagctcgcgatgacaagaagacgatgaataccgctgccgcaggacctgagagtattgtttcacctccaagaaatgaagaa

SEQ ID NO: 68069 - DNA, 206 bp, Arabidopsis thaliana landsberg
ggacacacaaaacagcaccccaaaacacgagcaaccggggcctaaaaaaaatgccagcgagccggggcttaaagcttacaagatacagtgaggagatgcaatcataggccaaaccgtattaaaatctgatgagtccaaacggctcacacataccattgctacttgaagaccaaacagagccaaacaaggaagaaacgaaaacttct

SEQ ID NO: 68070 - DNA, 637 bp, Arabidopsis thaliana landsberg
  unsure (1)..(637): unsure at all n locations
taattctatgtatgttaaatggtgaaaaattggaaataaatcctgttgaatagattttttttaatagtaaaaaatatttgacatttaagttttggatcatttggttatcaaaaaaaaaaaaatttaagctttggatagtcaaatatttgacgttaagattaatctaatttttctatttatgtatactttttgagaccatacaaaaggtaatgtacatgttgatggttgttggtggtgtccataagataatgcattttttacatagaaggtagtgacacatgtaatttgttttcacaatctcacaaatataaacatgtggtttataaatgtcagaagaaaaaaaaaatcttccttatactaaatttcatcatgttgtgtgagtacatgatgcaaatctaaatccaaaaaaatgtttagttgttatatgaaactagtaatggtcgtcaaaacaacattcctagtagttgattaaattttgattctgacctcaatcttcttaaccttttgacggctttttttgctgctctctgntgcttttttttgctcgtaggttatgattagtctcgagtaagtcttaagcaacccatggcttgtgctggagatacttattaaaccatgatcttaaaactttgaattc

SEQ ID NO: 68071 - DNA, 819 bp, Arabidopsis thaliana landsberg
gttacaataatgctaaaactcggtaaacgattgcgaacgacgaagtgaaggttgatcatgctccatattgagctacaaattgtaaacactgtttgaaaccttaacttgtaaataagagaaactgacaaaattttacgatgattgaaaccaagttcaggaatacagtgatgaggaatttaaactagatgtggcttactagaaaacaacaataccaacaaatgagaaatggtgccgtcacttgtgagctggacagatgcagttgttggttcctacctccgatgcaaggcaaggaggctgagatccatcctcgtaccagatcaatctgtgtttgacaaggtctttcaggaaattatcaagcttctcgattgtaacacttggcataaccaccacatgagctatatcaccttggcaagcaagctgccaccttctaacaaactcttcatctttaggccgttcaaagaccacagtgctgctaagctcattaagcatggcgctaatcccagcttcacgaagtcggtctttgaggtaatgcgcgtttctcaagcatttctgaacttctttctggaatcctttgtaaccttttctgtttaaggtgtaccagaggaacaaaggagcatgcccgttacgacttcccatgattgttggatcccttgaagcaaggtactcaacgttactggagaggactttgatatgttccattcttgttatctgaacaccacatggcattggacacccgaaaaatttggggcccgataccactcacactccctattggtttattaaacgtcacttttgtgcctacggaggagataaaacaac

SEQ ID NO: 68072 - DNA, 608 bp, Arabidopsis thaliana landsberg
gggcgaaaaacccgtagcaggaaccgtggccaagcctggtcgctattacttgttgattttgctagaactgacaatgccatacaaagggggaggttctctaacgaaatagtaaatcacaaattagtgacaagtcactattgttatcatgacacgagaatcaatcatcaagaacaaatttatgtaccttgtgtatttacgtctagccaaaagacgctgacaaggtttctggttataacgcccactcgcttcataattgacatagaactcgtctctctctctagcgtcatgaacttcaagaatgcatcctcccatgtcactaccattaagttttaaagcgtcctctgtgccttgtaacattacaatgaacacatgtctgtaaaaagaaagggaaactacattagcatttaactttacttgtcacaaaattggagtaagaaagtagtcacagactttaagacagcttcaccggcgtcatttgtttgaaaataaattcttgagatcattccacatggactgaaatgttcaagcaatgctctcgcgagatcattctcaccaagcgaagaatcatatccctttacgaaaatcgtgccacaatcatatctgaagtt

SEQ ID NO: 68073 - DNA, 579 bp, Arabidopsis thaliana landsberg
  unsure (1)..(579): unsure at all n locations
acaagtggagctacaccttttgcgaatccatccacaactccgtgagccaaacttgcagttagcaagagtattccgaaacctacgtaagcccagttcttttaacattgtgggaataacaggaacaaggatcagaatagcacctacgattttcaggatatctaattcaagtggaaaataatcgggaaactgtaagtttttggttgtctgaattaaatactccctcggtgcgaagtaggaaggcaatacaattagagccaaagcaataattgtgatgatccaataaacccgcttttgctttttgttcgggttctgtttaaagtcaatctgttttgtcatcttatatttaatttaattgttggaaatagattttttttaatgttacttgatatgtagtttaatgttgattgaaaacataagttatgcctgtgattttttcagaaacattccaaagtttttttgccaacgtcaaatcgtaggatttatcacttgattntatgagttccggattaccccgaagaacattcattttgttgggccaaatattctgagccttttaaattttttctgtggtgccctaaa

SEQ ID NO: 68074 - DNA, 540 bp, Arabidopsis thaliana landsberg
gacgacagggccctgatccgggcggtgctcggcgcggcgatgcggcaccaggagctgtttgatcccaaggaaccggacgagatggtctcggacgtgctgaatcagctcgacgaactgcacgccatggtgcacgacaccatggctgcctgaccagccggtgctgcccgccgggccattccggcgggcagcctggccccagttccggaaccctggttccggaactggggcgccgcgccgccgacgctccggatccggggctgggcaggcccggttacggctcgtagtatcgggagagggtttccgccggcgcttgcgagtcccgccttccattggcgtccggcggggacgcagtgctgctcgatgcgcagtgctagtcgatgtgcagcgctagtggaggtggtccgcacgaattcgcccgcggtggccaagttcctcgttcccgatgtcatcttcggccgcggcgtgctgtcccaggcgggccgggccgcccgtcgccagggtggcgaccgggtgctggtggtcagcgatccccgcgtgatg

SEQ ID NO: 68075 - DNA, 516 bp, Arabidopsis thaliana landsberg
actgctaatccacttttacaggaccattcaaaaaaaaaaactacattttaataacttactaatctctgtctcgtagttttgttggaagtgaaaaaaatgtcgaattttcgtaacaatttttctctatctcttgagaggttttctttaccaaagtttagttgtttccttaagaacttctaagtccaaattgacggcgtttttgtgctttaattacacgaaataattgcttctcttgcggtttaaatttatgtgcgctattcattcttaacacgaactccggaaagtttgaactccaattattaacattctttgactagatttcgtgcgagtatattaaggttgttctgcttcttccggatctacgagaataagcggtgaaccaatattatatataccatatattcactttaatcgttatgaaaacgttgcctcgtcatcaatgtcttgattagtcgtgaattcagattttcatggttataagaacaacctaatctattaacacatgaaaaactaaaa

SEQ ID NO: 68076 - DNA, 231 bp, Arabidopsis thaliana landsberg
tcggcgcaaactcgttcgttacttggtggacatgagatgcttctttggaccctccatagaccattcaggctgtgggtttcatccaacttacactgctattggtcaagatgagggaccaaaacaacatatgcagtcgttctacaccgtaacgggtgcgggacccatgcataaaaatttccctgcgaagctccttgaaacaaattcccggaagcccccagaaatattcttggg

SEQ ID NO: 68077 - DNA, 1227 bp, Arabidopsis thaliana landsberg
  unsure (1)..(1227): unsure at all n locations
ccttcatgttgcgccatttctaggatcccccactcgatttgacgtgatacatattggtatctacaaaggaactatacattttcattagtttaataatcaaaattgttagattgtcactatttggctgaaaatccagtttaacaaattgtctagtggcataaggcggcagtattagtttttggtaaggtaaaagacaacgaaaaatataacaatacattgcgaagaatagatcacaattagctaatatatatgtgaaagttttgatgtagtgatggtgatgtgtttcgaatattctctattatacaatatttgactacgagacttagtttagaaatagaaaaagatttgaagacgaggaataaaaaataatttaaaaattagtatagtccttcagaaatgtttttgggtatttttctggtcaaatagagtatgaataaggtttctgaacgagaaaaacaaaaatcatgatagatgaaattgcagcttcttttatcttgatcggatcacatgtcggattcgaggttttcagaattattgggtaattatgttgaccaggggatgttcaaacgtaccatccatactctaaacttaagttacaagaatgtatatatattttttccgtaactgtttgaattaaacatcacatgagttttattggttttataatcttttttttttgtcttttagtcgaacattttcattttgtctcttgtacaataagcaagacatggtaaaaaaaaatttttgatttatatttcgtttactcaacatataaatctagattcaagactgaaaaagaaaaaaaaaaaaaaaaaggagagaaaagaacataacaaaaaaaatgaaatttttttacctgaatgtagaccaatttgtttgcaaactatgtagatagataacttatctaagataagtacttccaatttggcgtgttttttggtgagagtttaagtaaatttgtaaccttgaaatagttggttcctccatgttgtcctattaacaaaatcatcccaaatttaaaataatatccttttttccttaggaaccatatatgcaaccaataatccaaaacaaatgaggtaaaaaaaaaggtgttgaattatgatttatttcttgatttttccttgtgaattgtcatttagaaattatcttctatgattttgcctaatttttgtaaaccaaaatttaatgatattnttaaatattattttctgatatgcatgctct

SEQ ID NO: 68078 - DNA, 595 bp, Arabidopsis thaliana landsberg
agccatatttctactacttatcgcagccatcaatttcattaacctgtcgacagcgcagtccatacaacgcactcgggatatcggcatattgaaggtattgggcagcgggcgcggcggcatccttatccaatttttaacggaaacatttatcctggctttgctggccgtggttatagccgttgttgccatcaggcctttactggggatgtttgctgaatacgttccggcgggcgtaaaattcaatttcacagattataccgcctggatatttttgatcggcattgcaattttcaccacgctgcttgccggcttttacccggccagggtactgtcagcatttaaggctgtggccagtctgaaaggcgaaaccggcgttaaaacggcgaataaaggctacctgcgtaaaagtctcattgttttccagtttacgatatcgcttattttcattaccggcactataatggttaaccggcaggtaagctacatgcagaacgtagatatgggtattaaaactaccaatatcattacgttaagaagcctgattaacagggctgggaaagcaaaagtgattggccgaaaaatacggcaaatgcct

SEQ ID NO: 68079 - DNA, 208 bp, Arabidopsis thaliana landsberg
tggcaacaaaacatatcaaaccggataactaaggttttacctattcaagggctggtcaaagttagttgaactacacaataaaatgactggatgtgtaattggtgagttatgttttggctgtgtacattctgctagatgtgttttaatgctttcattttcgcccctgtgaacctctgaacccagtcttttctaaattcttaaaataccc

SEQ ID NO: 68080 - DNA, 1823 bp, Arabidopsis thaliana landsberg
ctccttcttcctcacttcttctcgatcacctcgccgcgattgtccccgatatggataagcaggtccttcgtttttccgatctccatcctgttgttcctgtgtcgattctggagtcattttagttgattgattgttctttgattaggtttgtcgattagattgaagtgaaattatgcaattgtgtttgtcagtaatgagcatatcgatagatgtttttggtgatttattggacctattagaggagcatatgtttcttctgattaggcttctttatgtctatggatgtctgtggtggtttattggtgttataaagttgttgacatttgtgtgtggtagattcttgagagggcaatcgaggaatgtggagatgacgttgattcagccattagatgtttgaatcagcttcgtttagaatctgccaataagaattctgattctgctacaaaccaatctcctgttgtaatccaggaaccaaatgttgaacctcaacagcaaggtagttttgtgtcctactgatctctaaacagtttactagtttcagtgtattctgcataagtcgtagactcgctctacaaagttttaattatgaaacgggttttggtatttgtaggatcagccaaggaggaaccaaatgtcttgaacttggatggtacagagtgggttgagctttttgttagggaaatgatgaatgcttctgacatgaaagacgccaaagcccgtgctgcaagagcattggaagctttggagaagtcaattaatgcacgtactggtactgacgcaatgcaaaatctccaacaggtgtctcatctatctttctttgtttctttcttcactctttgttgataagaagtcttgttgccagagatgtatatctatctatgaacatccgatttttcaggaaaacatgatgctgaagcagcaattagaagccattgtacaggaaaacagtttactgaaacgagcggtagtgacacagcagaagcggcaaagagaatcggaagaccaaagtcaggaattgcagcatctgaggcagctagtcactcaataccaggaacagttgagaactttagaggtctgtattaaatgtcttcaccttatcttatacaattttgttgtctttttgtcgatatgattagatctaacttctaagttttgttttgattgctccttgcaggtgaataactatgctctgacgcttcatctgaaacaagctcagcaaaacagttccatcccggggcggtaccatccagacgtcttctaatactttgtgaggccctcgtatcattttgtttccagtgtatttttctctgttggtttgtgactatttatatatattcggggaatcaaaactgtgttcttttgttgttgttgttgttgttgttattgttgtatatattctctttcgagttcaatgatggattccacagatataagacttatttcaatcagttaacaaacagcgaatagagtttgttatgttgctagtagcctggtaatactagcgtcaatgagatatgttgacgccggtcgttcatcatcggctgactgtttttatctcggccatagccactttgctctgttggagtctggcggtcacaacaacttacgaacagacccataaagacttgagtattgttagaaaacaatcacaacagttcttgaaacaaaactttgatatcgaaccgaattggtattgaattattttggttcatggtcggttattctagactaggtgtaccgatcggcatatgatttagatgagctcggtttggaaatttaatcgaacatattggtctgttattctatccacggagagggtgatt

SEQ ID NO: 68081 - DNA, 553 bp, Arabidopsis thaliana landsberg
  unsure (1)..(553): unsure at all n locations
atagctctcgatgtcctgatcgccggtggtgggcaccatcattaccaccnnnnnnnnnnnnnnnnnnnnnnnnnnnnnnnnnnnnnnnnnnnnnnnnnnnnnnnnnnnnnnnnnnnnnnnnntgccggtgaggtcggtgacgtgccgcgtcaaggcgggcacatccgcagcccgcgccggcgccagcgccatccaggtcagcgccagcgccagcacgaacaggcgcgacaggtgtcgcatcatctcaatgcgccgaggcgggcgcggccggtgcgctcgtgccgaaatccaccttcggtgcagtggagatcgccttctcattctccacgctgaagttcggcttcaccttgtagccgaacatcttggcggtgaggttgttcgggaaggtgcggatcatcgagttgtattcctgcaccgactgcacgtagcgattgcgcgccacggtaacccggttctcggtgccttacagctgcgcctgcaggttctggaacaggccgtcggccttgagctgcgggtagttctcgctgaccaccatcagtcgagacaatgcgct

SEQ ID NO: 68082 - DNA, 172 bp, Arabidopsis thaliana landsberg
agcagacgttttcgtaagaccatgtcgtttcgtagagggagatattgggcctcaattgggcttcagaaaaaacaagaaattattaagctcgggtcggcatttctgtttaattccgggtccccgttcctctcaactcggttccatcattcaccccttctccatcagtctcctc

SEQ ID NO: 68083 - DNA, 290 bp, Arabidopsis thaliana landsberg
ttatatattaaggcacgtgttatatttatactgattaaagggaatcgtatttttgacaaagtttaatttattttttaaccgattcgaatatgggataaggtacatgaattattcatttgcgtaaattctgagttacgctgcaaggtttttcaaaggttgtttttatatttagaagaatttctgaaatgattgtgtaattatttagtaatagaagatgccaaaaaaataaaattatatagtgatagaaaatgttttaaaactaaacgtttattggtgtttacttgttagaa

SEQ ID NO: 68084 - DNA, 2449 bp, Arabidopsis thaliana landsberg
aagcccaaggcaaagtgaattgcttggggtctaagggattgcctgattttctactttaaacgatgccgttcttcacgtcggatccggaaaactacactctccacgtgcttgtaataaccaaatttcaccgatccgctaaacaagccccatactcatagtcacattgttacaagtcataactctttcttcttcttttttttccttcttttttcagttttatttaaccgacactgcttaatcttcggtacatgcacatttctgttctagacatttaagaaaaaataattggactatatttcaataaatatattgggaatagttcaacattacatgttcaacaagcctcctttagtatttgggtggcaggacatgatattaatgcaattcttcattcttggaataatcttccaaagtcattggtgttttctcaaccattagagaatgatgacttgggattttttagaaattcgtacaaaatggtgtaccaaaaaaaggaattttataacttggaaatgttaaaaaaaaaattataaacaaaagcttctagatctctgatgaacagccccgtttgttttttttttttttccgtttgttaaaaaaatcggcttttggaacaatctaagcattaaagatttcatgatgatactctggcttttattgtctttaagagtcgttaacgaagaatttcaacttgttgaaactaaaagtaattagtttattgaaaagaagagtacaaatagtcgcaggaaataataacacacttgctcgagagtatatacaaacatgcatctctctctattctatacgacgagttcatcttcaagataactgtattcaaatgtgaactcgtttttgatcctttggcacctacacagacatttaagaaaaaacattacgattaccatctccaaagaagaagaacaatgtgtaatcggaaaacatgaatgaaatcataccatcctccttcttgattctcgtctttcggggtttggaaatcgaagtaaacgtaggctccttgttcatattcatcggttgcaatctttggctctttatgtctctgaaaccaagtgttgaacttcctgtggtatctccatgactgtttcttcagctcttttgcagctagatattgctggtatgagttctacacaaacacagggaaaaaaagtcgataaggttgacgtgaaccggggaaaagaagataaataaaagatggaacagagcattgagattttggtacctgctgatagtagaacgcaaagaacaaagtatcggttccataagcatcgctgcctaaccgttcccagagcaaagggttgtttatgattggtgcttgtgtttggggaaatgtttgaggtgtgattgctgggttcctctgttcaaaatcataggcaatatgagatttaagcggatattatttaagtagaattcagaagaatgatgtaccggagaatagggtctaggacgttctgaatctgagggttgaggacgtttgtaaaaagcagcttcaagcatctggagattgtgcatttgatcatgcattggccctacagctgaagggtcaccaatggctcctaactcagagttacttctccgtccaatgaccccgaggctacttgaagattgacccggttgtataggttgtccaggagagaaatcaggaccgctagatacttgtactggatccaacatgtagctgggcattcccgactgaagataaaacagaaaacacatgaaggatcagaggccacccttagttagttgcttggtttaatagaatacagctgtcattatgtgtatccataaaccacattcactattgaattgcatatgagaattttaagcgaaggaatgacaaatcacaacactcaccaacactaacaaagacagaagttttttatccgctttaaaatctatctggtggaaagcgtatatcaaaaagttaccaacaagtaataaatgagagcacagaactattcctgcttaccggagtatcaaatagaactttagagtcatcctcactttgaatagcttttgaagctgctatggaagctgaatcatcaggtaagttttgctgggattgatcatcatttctgacatggtctacatcagcacaaacatcaaagacaaagccctttattttgctgatatttttatctgtactttctatactcgaatccaaaaactgaggctccaacaaatctagtatttaagtaattgccaagatgttaaaccccttaacaaagtttactttaatcaattatataaaacttggataatattttgccaaagatgttagttgctaaacccagaaatagtgtctatcaacaatcatatcataaaccacagagctaaacctaaacagtgaatgtacctgcaacagaaggttgctgacccaattgttgactcaaggcatttgattgctgctgtaaggaggcagaactcatgacat

SEQ ID NO: 68085 - DNA, 2632 bp, Arabidopsis thaliana landsberg
cagcttacacccaacatgatcaacacagatctctacaattatgtctaacacctcattgtagcttactctttaagcaggtgaaataaagctgccgctctgatggtatctggactacaaaatgtatcttggagtgtgcataacttttaccttgttcaaacctctgcgtagaagcttcagcttgctttatgacttctttagcatcaaatctaatcaaaaatggtgttggaggcttgtcatagccaaactcctctatgattgagattattctttttgctacctagcaataagcaacaaggctctctgttagtgccaaaaaagagagtaataaaactaaaaaagtcagatgaaaaacctgcaatggagttgtcagcttagatctataggcatatgcataatcacgaatcttgtagtaccggaaagatgacactggatctgcattcaagctacgagaaggatcatactgaggaagacatttcaaggctgtttccaatctgtctataggactttcatcttcgccaactataacaacatcatgctccggttctagtaaaaaatcatacacacaatcatctttttaaggtgtatatattgattactcattggagtaatcttacacaatatttcatgtaagcatacaacatatcattgttggagaatagatgacgagaagaagaatataccttgagatgggaactccggtctaaacatgggctcttctggtataactgtgttgcgaaaaatctgccagtcacgacagggaagagcacatacatgtaagaacattgaccatcaacaaccttgaggaccttaacaaaggtcaaaggcaaatgatgatgaagtcagtctgataaaaacagacctttgtcatgccattgtctttcttcaaagaatcaacaatcaaagagccaataagtggtgcttcaagcaaattaacgaacaacttgaacgaaaagccagtcaaatgaggggctgtaaaagtatagaaaaccatgtaaaaggcacattctcatgtgtatgaatgaaattaagcaaacccacatgcatttgtataaccaaacctttcatggttccagctttatatatgacagtagaaacatcaacctcacttgcacgtttcatgacctgatacttacccatctacaaacaaaacatcaacaaggatcaagacattaaagtttgaaactgatatcatagatcacatgtcactgttctatataagtcaaacactaaagaaaattgcaaccaaaaaaataaaaataataataagttaaatcacacatgagtcattgttatgaattttcttccactaacataagaatctgttatccagaatcagaacaaatcaaaaggagtaaaacaaaaaactaaaactaaaacacacacaaaatgacggcgaagaaactgatgaaatttaccggaaccacagcaaaagaaaacaaaacctggtaagacctaagagaatcggagaatccaagtaatcagatttcaaggaaaccacgacaaggcagaaatttcagaaaccggaatcacaaaagaaacgaacaatggttatggaagattcggattgcgaacctgaaagaagaaacttaaaaagaggaatctgagaaacgatgatccgatccggcgaaagattactaaatgaagaaagccgtgcggagatgagcggtgaagttgttgggaacttgaatgttatatgttagcttcaaatcttaagcttcttgtactgatttgtacataattcaagtgtacattgaactcgtctcatttgttgaaatgttccaaccatgttctcaaatttatgaaactacccctttattgtgtaaatatataattttggccccttaactaatgttttcattattacacccaacaatttccttatattttacgatgaactagtttagtcagtttgatttggtgctgaaaagtgcaaacactttcatttgcattcagttggattttttggtttccatatggagccatttcatatgatacttactaattcaaagctaggaatacttcatttatttgatttggtttcatttgaacataatttgatttatgttagtacatagtttcatttaaaataatattcgattccctttttcttttgtgcttattaaattcgaaaaaatttgattcgttataatattcaaatattactacaagaaaactatcaataatataactaactatataagaggctcttaagtaatcggaagtatggtcgacattcgtataatgcgaaattttagtatatctagtgaaatgaaaagttttgggtacgatgcatctttaccaaaattcggttgatggacgtgctctgccgagtacaggcaaccacgagacacgacttgatgtatgactgatcgagcaatatcggggcggcggcccgattagtccatatatatatagattatttaagaggatgagaaaataatgaacatttgtaagttctaacacaaagtaatatgggaagtaatcctaagcaatgcccgagtcttcgacaggcaaggaataaaaaaacacattattgttacgtgactttggtaatagaaaaattgttaatcgacggccatgattgcgccttcggcatgctagtgaaacccgtctattataagtctaaataatc

SEQ ID NO: 68086 - DNA, 573 bp, Arabidopsis thaliana landsberg
  unsure (1)..(573): unsure at all n locations
gcgaaatccacattcatcgtgaagctgtcattggcgtcgaggtcgtactccccgatcttgtggcccggggccttgttgaagggcttcaggggggcaaagacatgcgccacgtcgagaccggagccataagaggcgaagtcgacgatatggatgccgatatcgccgagcgccccgttcgagccgtgtttcttgctgaggcgccagagccatttgctctcgctcttccagtcgccccagtggcggccgaccagccagctctgcagatgcgaagcctcgacatgcctgacctcgccgatctcgccggcgagcaccatctgcctgcccttctgcagtgccggcgagttgcggtaggtgaaattcaccatgccnnnnnnnnnnnnnnnnnnnnnnnnnnnnnnnnnnnnnnnnnnnnnnnnnnnnnnnnnnnnnnnnnnnnnnnnnnnnnnnnnnnnnnnnnnnnggcaatcgcctgcagcgtcgtcgggtgggtgaatgcgaacggggcgttacgttcgccaccgcatcgaattcgccccaggtaggcgcgtcctcgagcgagctgaactgatgggc

SEQ ID NO: 68087 - DNA, 3095 bp, Arabidopsis thaliana landsberg
atatcatttaatagaatccaatcattcatatagtatgatctgtttcaaacaatgtcaaacccatttcttttgaaatattctctcctgatttcacggaccaaaaaccatattagtacaaggtcgatttaaaatatataacaattcaaaaccactaaactaaagccatttgaataaatttaaaacactcgtagatcggtgctcaaatacagttaaaaccgttgtgtcatatggttatatcgtttgcataagcgtgatcgcgatgtgttaccacaattattgcattagttcttataataataacataagaacacaaaaataattcatgatattttacatgtagacgtaaatgtcattaagaagcgcgatcatatcagatgatcctatcattaagcactacgcgttatataatgattggatcgttatcatttatcaaattcttcttatcgaaacgaaacttcgtggaaatttacaaaaggacaacacaagtacgtggtggtgtcacgggggctgtcgttactctaaggggccaacactcacgagcttccaacttcgatctatattttcttaaaaacaacaataactcatctcgacaacaaaaaaacactaataactgacgtggaattaatatttggttagtgatttctggcaaacattttttttttttggtcaggcctacaataatatttaattaatttttgtcataacaaaaaagatgatcacctcacatgtaaactgtttttggttttccgaagcccaaaacctaattgttagtactttaggaggcccaatttataatagttttttactttgcgtgtgtagtttgtagtagctcttcttttagcatgctctatagagcttcttaaaggagcttccggagttacaaagggggtatattaacaatctcctacatgagattgcgaaatgtgtaattgatgatcttcgacttccttaatatgctgcaagtggtggtctttggtgggtaaaagatctttctgattttggagaagacattaccgatgtgtaatcgttgctctgttcctttttttttttttttttcacaagttgctctgttccttggttatactaaaagacgataaaaagctctcctttttagcatggtcaaagtatttccgagtccaagccacattatgaagataagagtatttactaaattcatataaaaatagttggaaagataaaggtaaatagtagttctagaactagtagcttattatatataatagtcaactgtttcataagctacaaacttcatacactaaagtaaaaagttggttgcattacttaggaaactaaagacagacaagagcagaggaagaggaaagaaacctcctcattcttcatttcaaaccaacgaaacaacatatatctaaaaaaagttaacatgaaatgtcgaaagaaagacttactacctttataactcctctcactccatccttttacgtttgtttttcagttttgaaaacatttgctcgatatctgcagaagttatcgcctttgatggcccagcagactcctacaaaaccaacaaagaatcaagtctttttaaatgaagtggttcctgagaattgtaatcaaatctctttcatagaggtgacaatatataccattagaccctggagtccgtcttggaagtctttgattccgtgaaggagctcaactttggatacgtggtctagattgttcagaagatcaagtgcttcaccttcttgtttctccagtttctctgttcttttttccttcgccttcttctcgtattcaacaatcgtgtcctctgcatcaagtagatagcttacctttctctgcttatacatctcaaggcacttttcgcatctgcataggatgttcctccagtttttggtcaaaaacaaaggtttcttctcaaactcaggacacgagtttagatcagtcctaataacacaaccagttgcaggaacattttcaaagccatcgatcttctcagaacatttcagcacaacgaatttctcggcttcagtactgttctcaggctggcaggcttcagattcatcgatcttctcagaacatttttgcacaacagatttctcggcttcagtgccgttctcaggctggccaggttctgagtcactgatcgtctcagaacattttcctacaacagatttctcagcatcagtaccgttctctggctggccgggttcagaatccatgtggttttcgtctgactcaattgtctctgaacaagcattagcagaaccagtggaatctactttagcaacaacccacaagttctcaggataaagtgtcagaaacgaacaagctggggagcagttttgacaaatgaaatcttcatagatcgactcactttcctcatcccttggaatctgttaccatcacataataaattgcactaaagcgccaacaacaaaaaaaatcaatagtaaacaacaagattaagcactggccacaaacctggctaccaacactgtctgaaggtgtgagaccgagatgctcctcatgaaaccaatcctcacagagacaacactgaatcatctccacttgttcttccacagttgggtcagggtaaggtcggtcgcaagtgcagtacaagcctttgaaattatggttgtaagaatactcagagttttctacatctttgctcgggagaagcttacacgccaaagttccaaactttgagttcccacaatcacaacgaaaatttctcttagtccacagctccaaaagcttcataaccagaacaatgttcaaccattaggaaacaaattaacactatgaaatcagatttcaaaatacataacctggctatatatcaaccatatttacctcatggccatcatgacaagataagcaacaagcagtgcaaattccagcattcccctctggtgtacatgtaatgcatgagaaaattgcttgccttttcatgtaaccctttgggaaagtacactcatctccttcatctccacccaacaccaaatccgctgccttcacatcaagaatcacaaccccagttaaccaatattaaacccctaaacccaaataacataaaattacagaaacagatacacacaactgaaattaat

SEQ ID NO: 68088 - DNA, 213 bp, Arabidopsis thaliana landsberg
actgaatgttcatttgaccatcactaacttatttttctttatgtcgttctctaaatatttttttcattagttgcctaaccgtaaactttaaaaaatgattatttgaatatattgtatagatacaaaactgattatttacaattatttcatgtatttcaatatatctactatctatcactatttccattgcttcttttaacccttgaagaaaca

SEQ ID NO: 68089 - DNA, 521 bp, Arabidopsis thaliana landsberg
gtagcagttcaaacatataaatacaatacactatcatttatacattcttgtaataattaaaccacacttattgggagagtgaataaaaatataacttataaagaaaaaagttataaccgataatatggattcacaatccgggatatccaattgagagtagtccactcaagaactgcattatacacactgaaaaagaggaagccattttcttacttatcctcgtggaagttatcaaaaataaataaagaaacatatgtcgctgagaaaagtattaataatcggttctgacttctgacatcgtgtgttggaagaaatacataatacttacacagagcatttagatagttataactctcttttatacttatgttaaactaactctaatcacatgtattatgtatacaaattcatatttacgatcacttggtttaaaaaagcactccacatacttcatgcatcttgataatccaactatctatttgtttttttcctctgacatggaataactgtatcaatctaat

SEQ ID NO: 68090 - DNA, 404 bp, Arabidopsis thaliana landsberg
  unsure (1)..(404): unsure at all n locations
aaaccggtttttttttttcngaacngaaaangaccacccctggaggcactcttatgaaggttggttgtttaaactaaactncagagaacaaacagacaagcgatcaaataattgaaccaattttaaaacgtatataggttttatttctgtttgattcaatttggttttatttccctgacgaaaatttcgtccacccctaattatagttgtagagggaacaagataatcaggttttaaaaagtagatctaaactctaacctaaaaaataagagattggtagccattaatgctgttatttagatggtatggtacgctgctctaattgttgtgattgtatggcaaattccgggaagagatattgtccatattctaaatgcagcccgagaaaaacaaaaattaacagt

SEQ ID NO: 68091 - DNA, 611 bp, Arabidopsis thaliana landsberg
  unsure (1)..(611): unsure at all n locations
cactgggaaaatatttgcaataactccttcgtccttaattttgggaatttgcaaaataattgtcaagcggtttttaacaattatcatattcaatattaatacgatattttgaataatatgcacgatatataacacgttgtttaaaaacatgtacgattaaatgcatactgtaatttaattgaatgatacggagcgattttataatctttgctctatagatcgctatcaacctaataaaatcttcaattaaggtaaaatcaacaagaacaaatttaattagtatgttctgacaccatgagttggttaactttaattacttttcttttcttttttttgggtacaaaaatagacacgtactaggaatcaaaccgtataggaacattttctaaatcaggattatttagccaacatacatagtagtaattagaaaaatagatgattttggctatcaaacaaacaaaattagatgattttcgatatataatcttgtatggttgagccgcataaccncatcaagttttaagatcatgactattggagacgcatgcattcattngttgtgtttagttagggtttttaacggataatagaagtttgagtttaccaaacta

SEQ ID NO: 68092 - DNA, 461 bp, Arabidopsis thaliana landsberg
acagcacctaagttaattaaaaaacagatgaccactaataatttgtttatttttgcagacgtaagaaaaaacattatgtgaaagacaatctgatttgctgaacacacaaagttatcctaaaattggaaattttgatttgaacgtggaccctaacattaaactaggggaggtctctggtagtagatatgaacaaagtacatgacatagatctgaatagggatcctaacatataactaggtgaagtgcctggtgtagatataaacaaagtccatgacatagagttgactgtggatcccaacgtgaacatgtccttaggtcatgcttgatcatttgaggtaggatcttcaagtaactatcaagctcaatatgcaaagaaacctcgcatggatacatagttctttctatcagataaatgctaaaggaaaaaaatattgtgtggctccacatcagaaaaatataat

SEQ ID NO: 68093 - DNA, 480 bp, Arabidopsis thaliana landsberg
  unsure (1)..(480): unsure at all n locations
tagattaaccaaaaaagcacaagaaaactaaatgcagaaagagaggaaaagagacaaatgaagcagctggctccaatcttggccgtggtaaacttgatcctcctggttcatggagacgagagatcagcggttggagatcctgggatgaagagagacggtctcagagtggcatttgaagcttggaacttctgcaatgaggttggcttcgaagctcctcacatgggtagtcctcgagctgcagattgcttcgatttgtcatctaaatgcatcaaagcatacacagaagaccaatcaaacaaaaccaccagnaagttttcttcttctttctttctcctctgttttctctgtttctaactataattttcgataggtggatcttncttggtgcacaaggtatcagactcggataatgagctagggattggaaagcctanaccaggaatcatatcagaatcagcattgcataaccctgacctttac

SEQ ID NO: 68094 - DNA, 1448 bp, Arabidopsis thaliana landsberg
caaaggcggtgcgaagaggcttcacaaggtagtcagctgcacctagcttcaagcattttacaattacagggacttcgtcttgcctcgacatcacttaaattgagaatattataagattagtcagtataaagctaatgatcatgctgtcaaaagcactttgataagcagagaagatacaacttcacgaatagataataaaacgagaagagcaacaaagaacacagcttacttatcacagggattctgcgaagatctttgtctcgtgtgatgtacctcagcatcttcatacccttagccattgggagatcaatttccgccagtattatatcgatatcaggtccctctgcattaagtgcatcaatcacctgccttgctgatttcactgcagtcactgcattccaaaaagaataaaaacaattcatccaatatatcatcattgagtcttgaacaacaaacagttgagcatagtgtaaaaatagaaagcaatacacactagagatgcattcaaaaactatcaataaggtactaaaatcaacaaaggttaaaaatgtcatcttgatcacatctgaccatactgactcaaaaagccagacgacaagaacctataagagatctgcaatctaaagtagtaatcccaacttagcaaaaaataacaaagtaaaaagagaaactttgggaacaagacaaggacaaacctataaatcataccttgataagaacactctgaaaggagagtaaaaacctctcccaaactcgtggaatcattgtcacaaagcaaaatcctgactctgcttctatcaataaacccatctcctcctttacactcaccgttcaaatccatgatcagattaacaactaaacccacacaaaaaaaatatctaatcacagaacctaagaaaaaaaaggattatacaaaagtagaagaagtaaagccgacaatagtaagtgctatgatacttccatggccaaatcagaactagggtttttcggtacagtgtccctacaaagtcgcctaatttatccccttaacaaagtcaagtaatctcacaaccaaacaaaaactactcctttaatcccccaacctaatcctttatccataagaacaaacaaaaagataaatctaagaacaaagagctgacataggaaattcttttttctctatatcgaatcatgaatcaacaaaaaagctcaacaaaagtcaccggagatccggcgtaacgcgctgagtgagatgaggaggagagagagagaaggtgaatttccgacaagaagagtgagaagagaaagaagactcattgttttgttttgtcaatcaatggtcaaattatgagacgcgaaaaagagagagagatggtaaatcagagactgttgaaagaggatagaattggacggtggagattagtctttttcttcgcgtctgtgtgtacttaatggtgggcttgggatat

SEQ ID NO: 68095 - DNA, 511 bp, Arabidopsis thaliana landsberg
cctgacactgaaattggacgtaaaacatagggctagagttgtcattatatttacttcatttgagatgcgtggggctaggagcaagggaaggccatgtttgtattgctgcttggctacatggattcctcgactgaggatcggagtgagtccaaatggtgaacggactgcggaaatgtttgatatacaatagtaactcgtatcatcatacgatgcgaatttctgaacggctggtagttgaaagatcggctcggagaagtctgcgagatgaggcccacccccaatgcgtgggggttggtgatgccttaaaacaacctgcaaagcttctacagatgcgacgctcaattgatcctatataaacatcatacatcatgtgcctacagccccagtatgtcccagccgggttctcacttcatttttgctaacaatatatggtagcaagtttatcctcgtaacgggagccacaggcttcatctgcgcccatgttgtcgacaccttactggaacgcggcatt

SEQ ID NO: 68096 - DNA, 339 bp, Arabidopsis thaliana landsberg
cagaactggcgtaaaaatacattaaaaatatatatctacatgacaggggttatgcttctggattctctgtctggtaacagaatattttctacatgaatttaaattgctattgtgttaaaatatttctctaacctttacttttcttaaacatgtcggcaatgacaactagttatggatcaatttccgagcaatcagataagagaaatattaaaataattgtatactattgtgtatctgctataattatatttattttagagtataaaataaaaatgtctgtctggtaaaatacatgtaatgcactgggcatgcacgtgggaaatccccagcctatttttt

SEQ ID NO: 68097 - DNA, 315 bp, Arabidopsis thaliana landsberg
  unsure (1)..(315): unsure at all n locations
tggacaatggagtctattcaataagacaagcactggcctacattgcaaaggcagtgacaagtgtacttgactatgacacgaaatgtttctttnnnnnnnnnnnnnnnnnnnnnnnnnnnnnnnnnnnnnnttgattcagtaataaaatagcaatgagctttttcgaatgtttggtttgttttagacaacagacaatataatcaagtgctttactttatgcaacttatagaaacgttgaggtatctttagcaaatattcccaacttacaacaatagtatatgattagctagagtctcaaaagattgaaaagatgag

SEQ ID NO: 68098 - DNA, 174 bp, Arabidopsis thaliana landsberg
ggatcagatccgaataatccaagagagatgggaccctagctacgagtcattccctctgacgtggaatgatgctacttgcttggacttgtctgtggcgagattacaggtggactgcaacataccactccgtgggtttaagatcgcaaagaacgcaatcccaagtgagaagtctca

SEQ ID NO: 68099 - DNA, 1131 bp, Arabidopsis thaliana landsberg
taagctagccagtcatgggtatgattaagcatagccagaaaaagatgaagtgttcccgtgtaaggaccagaagctcctcctactgtactcttgacaccggcttcaccatattgatcatataatgctctcttttgctcgtctgatagcacctgacaatgttgtagttcagtaaccataaggcaaaatagctgacaactcatgttataaaagcaaagccttgtaatcatgcaagctaacaagtaacaagaaaagaaaacccaaaaaaagtggtgataggacaggaaaagatgacatgaagagaatcgaactggggggaccttagcttttggtgcatacctcataggcagcactgatttccttgaatttttcagttgctccgggttccttgttcacatcgggatgatactagatataaaaagttgataatcagctgagatcatagctcaataagcttgaaataaagtagaaaactaaagcagagcttgatgttgagtagattaaagtaataaaaattcaaataatatcatgttcatgtggaaacaaacaattgattcgttgactcgtcctagtttgcacaacacaaccgtttacagacccagaattagagaaaatgctaacataatctccggatgcataattacttggatgatcaggttttcacattggcaatttcggcggccgtaagtaatgtcataagcgggagaaattcacaaagcagaaaaacgaattacaaagaaatagaaaggatgaggaggaggtggtaaacctgacgagcgagccgtcgataagcagctttaatctccttgttattggcagatttagagacaccgagagtggcgtagtagtctccggaagcagcaaatacgacgagggaacggccccgtcgatttcgataaggcgtagacgaagaagacgaagatgaaagcgacaagaagctcttgtgatacctgaaattggaaccgccgtcggaaaaggcagagaaattagaagagagggaacggggaccatcggcggcggcagcgaagcagagagaagaggggatgagggagggagaagcgagggcagccattagagacaaaatggaatcaaacgagcttctcaagctaccaagaggacgcgcgacaagtaaaa

SEQ ID NO: 68100 - DNA, 426 bp, Arabidopsis thaliana landsberg
ggataacttatgatgagagaagttttgctctcccacttccatgttctaaggccaccagagtaaagcagtggcttctgtctttcaactgattaatactctctgcagattttatgtgagtttttggcaaagcaaagaagacactctctgataactgtcagcgtcgcaatctgtattctagttcccccatttgtcggagaagtgtatgtgttttctcttccacatttagagagactcaagaagtcattacaaggtgtggcttgttcgaaaatgcttaatatctgtggatactcatgttctgtgaatgaaaatgaccatatgagagaagagatttataacatatagtccacatgaggcaattacctgacgatgtgagtgcgaccatggtggaagacattaatcctctctgcttgttatttccactgattg

SEQ ID NO: 68101 - DNA, 459 bp, Arabidopsis thaliana landsberg
gagccgcgagatgcgccccgaaccgcatttgtgcgaacatccacttctcacgcgctttgattagctggccgggctggggcccgttccgggacatctatatcgcctacctgtgcggcaatccggccatggacgacgacacctacgcgcgtatggtcgacgccggcatgtccatccggtaatccgtcgagagaaatacgtcagttcgcgctgaggccttacgtcgccgagcacgattgattgaggctgtcgagcctcagtggctggtgttgcctgatggaaccgacaccgtaccggcgcgttgagtgaactggggcgacagtctgccgaatgtacgggcatttcgatgctcggacggagcattctggcagcaatattagaccgactatatgacgagaacttgatacaaatcatggaaaggtgtcaaatgtgatcgcaatgtgaatttgactgtggtgtcat

SEQ ID NO: 68102 - DNA, 310 bp, Arabidopsis thaliana landsberg
gggggttactcctgtgtattggtctatataaggtacatattcgagctactcatttctttaggctttttcaaagatttctacatggaaaagggttttcatattagatgaagattttagttacgatgaatgattattattgactaaggataaaaattgtcagtctgatttgacttctctggacacgcctgggtaacaatgctaaagctgctctgggatgaaattggctttgacactaattaaccagtgagcttattacgaccttattatgtaaaagaagactgacagcactaagatatgtaagatggcccat

SEQ ID NO: 68103 - DNA, 180 bp, Arabidopsis thaliana landsberg
gtctatgtaccaagcatcagctgaaatcatcaaatttatttatttactttactcatgtgtgcttacacatgttcactttagataagttgccaccgacctaaaaacaaagacgagttgatgtctttgtttttggcacacctcattaggcggagaagtagatttatgccattatactatcca

SEQ ID NO: 68104 - DNA, 110 bp, Arabidopsis thaliana landsberg
ttgaccgcaacaggacctatcacaagaatattttttttattgggacgataattctgaaaagaaagatttcctatcttttctttcatctcgggtgaaatacgatcgggggg

SEQ ID NO: 68105 - DNA, 604 bp, Arabidopsis thaliana landsberg
ttagaaaaaaataaaaatccataaaaatggatatgcacactataatatatgtgtttagagaattggtcaagcgtttttagctgtggcgtctttgcatatatttttttattttgttaacttataaaaaaatataatttaacatcatactgtattgtttgatttatattaggggtgaaaaagataataaggcatataagtcgagatattgtagaatttgggaagcgaattaaggaaattatttctctcttttgccgttcataaacatgggaagattgcgccggtgggaagactgcgcattaaatgctcgtaaaatctctgtggaaagattgcactggcgttatggggaagcgaaagattttaggaaaagaaaatgattacggagatatttctcgatttgtgggaggagcagtatacagagttcatatatttattatcgccgtagaggcgttgcccaaacaacaaaacatacacaccatataggttctgagaccaagttaatgagacgaagacaaagttgagataggaagaatctgcagatcattaaagacgatcaatacatacgagaggtatatatatatatatagtctcccctaaatcttcttaa

SEQ ID NO: 68106 - DNA, 113 bp, Arabidopsis thaliana landsberg
atggttactgtggcgacacgcacatacactatgccagctgtatagtttaacaaggtatgccaggttgcattttctctgatgttgtactagcaatcacgcaggtaacgataata

SEQ ID NO: 68107 - DNA, 578 bp, Arabidopsis thaliana landsberg
gataactttagtttccttcggaccccctccgggccctcccagaagtgatcatttctgtgggtcctatttcagattaaagaaaaatggataaaattattactgtcttgagcacaatctaacttctcttaaaagtatcttctgttcgatcagtgcattgacgatcttctctataccctgctctgtgactttattgccttcatcgtagctattatatgttttagtacttatatcccattacagtcaaggtcctgcaaacctggtaaaccttcaaaagaaaaattaccatgtaaaatcgagcttgaggaccttaagatttgataaatgaggtataacttcagaggctatcagttccatggcaacgttggtgataagagatgatctattcaaaaatgaattaaaatagagatctatgcaaacccagtgataatgagaccaaatgattcgagtttatccagattatgacggaagcaatagatgagaattttaactccttcatctgtaatttcttcacagctttataaataaggtaggcattaaggaaagtacttttgactagataatctcctgtctgagaatag

SEQ ID NO: 68108 - DNA, 1721 bp, Arabidopsis thaliana landsberg
ccaagctaatgatagttgaagtaagaatgttacttggtgaacaaagagaagctgaggaggcaagtcttgaggtgtgttgactagttccttggtctgtgccttgaactctgcctcttcttcttcatccttctctaaggatagatcccatatcctgtaaatacaacagatagccaaaaacaattaagacagagttttggtttttctggagagaatcggtgtgtattgtattcttgcttacgtgagctggttatcaccggaagtgactgcaagtgtcgaagcttcatgagcgctccattcaattgacgtaataggatgcttatggtactcaaaatgtgctaccacagcatctccaccctagttcaagatttatatgccaccatatcagaatcttgttaagagattgctaaggaaaatatatagctacggtttttaacttactttgatcagtctaagatcacggatggagaatgtcccgtcatcacttcctgaggccaacatgcaactagccagccttcatgaaagaagaaaaattaagactacaacattcgtgggaagcacaaaaccaaacagaattaagttatacagcatagtgggacaagaacctgttccatgagatgacattcacatctgcgttatgtgccttgaaagatagtgcaggggacttcccaagtcgaatatcccagactgcaacactcccatccacagaacatgaggcaaacacgttttcttcggctggactccactggaataaagaaacagattgttcagccaaaaggaaatggtacaagcaaacatattatttagctgtaaagtggcagttttacttgtaaatcttcaacacttgcagtgtgtccagcgaacggaataggatcaacagcccatgaaccagaagctggctcccacaggtgaatcatactcttgcagtcccctagccagtggagaaaaaaaaattacattgaccatgccgaaaagcatgtaattatttagtatcgcagaaatttctgagataactataccggaaagaagtcttccagcggttgcaggactccagtctatagcatagccttcatctttgtgaccagaaaagttaaccaagggtgcttggttaagaaccggtgaagttccatctttaccctctgtttctgattcggctaaagcattaagatgagagctcatgtcccagacctgtcaagaaacacaaaagctaatccacattaacaaagacacatacaaaaaaagacacccaagctgtgaaagtagacaaaaatataatcttacctgtacatgaccagaatctgcccaagagacacagatatgagagttttgtggcattgcacgtatacggttaacacatccatggtgagcaacccttcgaacctgtataccaaaattttgagagaaaatatcaaccacaaggactctcccgccttaggagacaagagatatgaatgaataacacaagagttaaaacgaatcaagaattacctgaatatttggagttttagaagcttcatctccgtcatcatcatcgctgtcactgtcatcttcgtcatcctcatcctcatcctcaccattgccaaatgtcttaggcacaacatcacgtctcttaccagatacgttggtgattttaaataaccctatggagttatgagctgctttctcagcctaaagaaaaaaagaaaacgtatacacaggattctaaaagcacaaatacatataag

SEQ ID NO: 68109 - DNA, 457 bp, Arabidopsis thaliana landsberg
tttcctcgagtaactcacgtcttttgaagatacttgtttttttctcacctgcataaaaaacaaaggtataagattgacagttatgagttttgtgtgtttccaattgcagagcttggagtagtaatcttttagccttacttgggtgataattcactacataattcttcccatgagattctcttcgcaccctgtagatacataaaacatagaaaatcagtaacacatgaggattaaaacatacaaatcagaccaaaagtattgagagataaaagaaaatgctttcatgtaatgtcttgaagttgctctaatccgcaatacgaatgcctttgccttgtttcttgttattaaacttctccttgaaacactgtaaaaaaaattcaaattaaaaacaagttaactcaaagaaaagttttcttcatccaaggactaaaacttttattaccagtatccaagtttt

SEQ ID NO: 68110 - DNA, 545 bp, Arabidopsis thaliana landsberg
tgttaaatcctgcaggccctggtaggtgaaagcctggccggccggcttgatggccttaggcgctatccggcaaggtgtcgttcggcaacagggagggaggcgagatacggccgacatgccacagttgcaggacgatcttgccgcccttagcatgcacggcgtcgaccactttcttccagccggcgacctgggcgtcggtatggatgccgggcgtggcaggatagccatgccccatctcggagatcggcgtcgcctcggtgatgatgaggccggcgctggcgcgctgcgcgtagtaggtgacgttcatgtcctgcgggacattgccctcgcctgcgcggttgcgggtcatcggtgccatgacgatgcggttgctgaggtcgatgctgccgatcttgatgggactgaataaatcgattgccatgtggatctcctgttaattgaagctgatatgtgttgaatctgaaaagtttctacgccgcgcctgaagcgcatcgtcgtcggagctgatgcccgcggtcaaggcttggcgcgcacaccttcgatca

SEQ ID NO: 68111 - DNA, 530 bp, Arabidopsis thaliana landsberg
  unsure (1)..(530): unsure at all n locations
tgattttgtctactgacttcctaatcattgtttgtttttgttctnnnnnnnnnnnnnnnnnnnccattctggttctacgccatgagagctgtcctctcgcgattcttaactcaacgaaccaagagcaagtttgttgtggctcgtcccgctaaggtcagagagactcttctcaagtacattccagctgatgagctcccagttcagtacggtgggttcaaaacagtagacgataccgaattctccaacgaaactgtctctgaagttgttgttaagcctggatcatctgaaaccatcgaaatcccagctcctgaggtataattagaaaaccaaaccctaccttattcctgaagttgttaaaccctatctttctaattatggttttttgttttgtggttgttttcatagactgaaggtacattggtatgggacatagcggttttgggatgggaagtgaattacaaggaagagtttgtgccaacagaagaaggagcttacacggtaatagtccaaaaggtgaagaagatgggagc

SEQ ID NO: 68112 - DNA, 333 bp, Arabidopsis thaliana landsberg
gagtcacaaataaatagagatgctttattaatcaattcggttacacatggaatctgggcttgtaatctaacctccaaatatatgcaagctctatgtttaatgtctccagctcgggactttacatccctccatctttcttatcttattcaacacatcatcgatcgcgttcgacgcttcctgcaatgaaatgttttagttttatttaaggtaagccttcaaatgataatcagacgagtcaaaggagaaaggctcgtttaatgaatgaggaacctctagcttatttctcaaaacttcttcctccccatcacgtcggtctctatcctctgagaatat

SEQ ID NO: 68113 - DNA, 2308 bp, Arabidopsis thaliana landsberg
ctgacgacgtctctaaacgtctcaaggcatgatctgacacggcggggagaagatttgaatttcgagacttgttcgtgaatgtagcggcggaggaagaagaggaggaggaggagcacggtggatttaagttgcgatatttctcaacatcctctgacattttagctgagctatcttcttctgtcatacaagtaagtgatgaaaaacaagaaagactctgactttgatcttatccagaatttatgagctcaggtgccatctttctgatacaaaatctgattcagatgaagaagagagataggtgaaaaaggagctggtcttggtgtttggactctctctctctctccattttcacctccattatttaggagactatgtaaaagaaaaaaaaacaaatatttttggttttgcacattatttttgttgatgaagaaataaaaagaatcatcaagtatttgtgaccaaacatgatttttaatcctattaaagatttgtacttctattttaaggtgtgacaggtgacatttagagttttatgtaagtggtaatcatgtaaacttgttgaatcttaaccaaaattaaaaggatttaaaagtgttttgtactgtttctttaaatgaataatactaatatctaaagtcactttcatccttttttaagttaatgcattttacatgaatttaatttttatcatacaatcaacttttcgattgtgttctcttaagaaggcctcaaggctttcgtgtaaaggaaaaatgtttgggcttattatatctcataatatggtggccaaaacaagatcaaaggtgattaatggttggtttactgccaataatgggttttgaagataagtgtagtgtatgccttattcgattatcttttcaaaaatgtgtttgcttaattttccacaaggcaaattgttatagatatcttcaaatatgcttcttaaaattttcaaaaggcaattatttagaatatggataaatttcaaataagttccctaaaagaagaaatttcgaagtcaagttttatagaataagtcacaacgacgttgtatccatagtcttggtcactaactactaataaatgggtcataagtctatagatatttttcaaaagctaggagtcgtattagtgtgaaattatggtataaatatactgaccttccattacaaagaatgacgtgtaaacaaccaaatattagaatgtggcaagtagtcgccgaacacgtctccttcgtcaaagtctctttttctgacttctttctttaacccccaaccccttgttactttaatttggctctacatagatttgtaatcaaacacaaatcacaaatctatatattttcccttaattactttggctttctattgattaaagcttctttaattccaatttgcaatttaaacacctatctctttcccaaatttgagactttcctaattaattaaaagctttgctctgtatatttgtcgttataaatttaattttaaaattcgaaactttttttctgcctttcctctttctctctctctatctatcaaacactagacttgaagaaatgcagtgaaattgaaattgagtagaagcagaagagaatatggtggtaaggaaggtgggcaagtatgaattaggtagaacaatcggcgaaggtactttcgctaaagtcaagttcgctcagaatacagagaccggtgagagcgtcgccatgaaaatcgtggatcgtagcacaatcatcaagcgcaagatggttgatcaggtcccgtctctatcttcttactacttactctcttcgatttcattttggctgagatatgattagattgatgacatgtgttagcagattaagagagagatctcgattatgaagcttgttcgtcatccttgtgttgttcgtctttatgaggtaagtgaatgttttgcttcttcttctttgctttataatttactgaaagattcttgctttccatttgggattttgatatttggtcctttttaggttctagcaagccgtacaaagatttatatcatcctggagtacattactggtggtgaactgtttgataagattgtgagtagctcttggtgatgatttttacagcgttttactctgtcagatattgttaaatgattcatttgtttcattgctactataggttcgtaatggacgacttagtgagtcagaagctaggaaatactttcaccagcttattgatggagttgatcactgtcatagcaaaggtgtttaccacagagataaaaaggtgaaaacatgctaagaattaatacatttctaccacttgtgcttgtt

SEQ ID NO: 68114 - DNA, 628 bp, Arabidopsis thaliana landsberg
gggtatttttatgtaaaagatcatgaaactttaacgttttcatttatcgttcaacgaaacgtatatttttagttatgttgcgttaattttttctttttgtcaacatatgaacacaagtaaactaattttgtcactacttaataaagaaaaaaaaagttacaaaactaatttgaataaaataagttcattcctttatcaattacaataaaatcaacaaaatttgaataaaattagtcttcacgaaataatactaaatttgatggatttaactatattagccaaaattcaaaaaattctcatagaattttaactactcatatgattaggttggaaatgaagtataatttataacaaatactcatttctaaatgtcttggaaagataagtcgaaatcattatgacattatcagtgactactgactatgaaaatttgatttatcttgctttatgaattcaacgatacagtagacagagtcaatttacacgaattaagtgatagttactgaaatgaaatctaaaagcgaataatgttatatccaaaaaataacagattacattaaaaagaaagtgatgattgattagtaatattaattgcaacaattaagtaaagaaatcgcgagacaagagg

SEQ ID NO: 68115 - DNA, 476 bp, Arabidopsis thaliana landsberg
aggcattccctaaagaaaggcttattatttatggatgtgcctacaccccataccataaattctaagctcacatataaaagaaaaagtaaatctgtgaatagtcttgggccaggatcagcccaaccggtccaacatcgtgccgaatcagcccacgacggggaagcccgcgcgcccgcagtagagctgacgtttttacagaacggtcctcggcttactgattataccgacaggggttcaaacactattgcatgagtcactgacagattcacttaggaccgtggggtttgattctttcacaaacgctcgtccccaacggcacggtcgggcgccggccaccctgtccctagcttggactcggcaacggcggggaagactagcaaaaccgaacgccttctcaccattgctgagccaagacgacgctaccccatgtattgattaaacgatcacacacccggaaatcctcccgagctcggtaa

SEQ ID NO: 68116 - DNA, 150 bp, Arabidopsis thaliana landsberg
  unsure (1)..(150): unsure at all n locations
ccctaatcgcactgaaaataatcaaagtcctatacattagattatgatatatgcgaaataccnnnnnnnnnnnnnnnnnnnatacgagctcacaaggaagatgctgtttggttctgacctttactagagttgaatcagcctcatctcctt

SEQ ID NO: 68117 - DNA, 107 bp, Arabidopsis thaliana landsberg
tttttgtgtatataaaatacattgtctagtaaaatttttgcttttgatcttacttcttatgctataaattaattactaggtagaatgttaactatattattaatgca

SEQ ID NO: 68118 - DNA, 2582 bp, Arabidopsis thaliana landsberg
agcgcatattcttgtactgattagtgattagcattggtgctaaatccattcccacgaggttgtctcggtttacaagattctatcactcacaaccactactagcagaatatgtcaatgcctatggaccatccaaatgaacaaagatattcagtgtgagaaatctatttcttggtctatcttttagaataatagctcactttttccaaggtatatactggcactaaagaataacgacgcaaccaaaagaaaaagggtgacactgtaaagccttcactttttgccacctggaaagggccagagatcaacttatttaccactaggatagcttcccacttcaacggttaagctgatgaattcatgtaccaaatcaatactttttagccataaatgagtcagttttagtatccacatgaatttacctaccagagtgttgtaaattatgttctttttgggccacttacatggatctcattcattcactgcagcgagttctcagaccaccagaaaatttattcagtgatctgttttgatcatgcaacataaacttataagccacacaagcaaaacaaagatatcccatgttgcatataatacgagctagcatatcataaagaaggaaacttgaagtagcaaagtttctactaaatttcttgtcaggaatttttaaaatgcaatgacaaccacttggagcactatgagtttcagagccaatagaatgttactatttggtgtggattcgagctagcacgtgaaagtgcataaaagtgattaccttttgccaaaggtcactgcacttttcctcagatagtttctcacagccatggaaagtggagaatccgcataaacgtacaattacaagctttatatggtccctcgactcttattctcttctcagtctttgcaactaaatagggttttcgttaatctgaaagaagcaaagtattcgcaaccacggaaacctgataaagaatgaaaacaaataagcaatagtgttttcttgaaaatctcgatgcaactttcaggatattgttacatatgatctattactcgtaacagttatccgaaggcctacacatgtgagagaagttccaaaccgctacaacaataaacttaattagagactgtcaacgagcaataataagcaaaactacttttttcttgagctacaagtgaaaaggccaatacacaatttactcttcatgaactcgaaccacgttacaatctccaaaaaatttcatcaccaaagcactaaaagccaaagatgcctcaacttatccaacttggcaggataaagatctccaaaaatgcttactaaagaacctagaatcttttctttagaattcaatgatcatataaccatttcataacaattctaaatgccattacattcatcgtaaaaccagtaaataacaagaacttgtatgttacgttccaattaccaagcaaaaaaaaccttttcaaagtttaaagttcaaaatgggaaagagaagtgcggtgtaagcaaatatgaaagaggaagagatgcgaaaagtgtatcctaggaccagcattttatacaaaaaaaaaaactcacttttcagctcttaaggcatagagtgaaggtagccatatgaatttggccactagagcgtccgtcaaatctcattctttttggaccacataatgggtatcatacattcactggacccaaaagcgtaactggagctagtcctcaaacctagagagtatcgtatcctgtagcttccacatagtaaacattatgagcataacaccaacaaggcaactccaagtactaatggttattagtacaggaaaacccacgatgctaaacacatgaatgggtcaccaaatagagtgaagatggttaaattgcatctatggatcatgtggactagtaaatgagtgtagcagaaaacttcacaattacctctgtgatcttagaaacatgtcctgaaaattccatacaagtgtcgtttgtattagattacttccacaggttgagatctaataaagctacaataaatagtatagagtatcatcataaacccaaattacagagatgtgaaaacactcatgagtcatgttttgtaactacttactataatggttaccaagtgcaaatttctacatactatatatgataaatctaattattgctcatgtggactccaaaatgccttttaagttttaacttgtgcgtcaggtaaatcctaatttgtagtctcaagactacttggcggattcgagtttgatcctagaaaatccaccgtctctatgtttttcatgtcacttttccgatatgattctcattaccatgactttatgaaccagattaaacattataacacttttcatcagaaaatccttcgaaagtttcaattgcaaatctttctaaatgatgcagatgcattcacaaataatggaacaacaactataccatattcacgagtttgtctaacctttgtataggtagtcaaccataacagttggtgatggctctgcactcgaagccttactcggagagatacctgaacagtaatcacaaggtcaggatgaatattcaccacttaaactttgtataa

SEQ ID NO: 68119 - DNA, 1227 bp, Arabidopsis thaliana landsberg
  unsure (1)..(1227): unsure at all n locations
aactcagaggaccctttacttcttcaactccatctctctctttctatttcacttctttcttctcattatatctcttgtcctctccaccaaatctcttcaacaaaaagattaaacaaagagagaagaatatggcgagagggaagatccagatcaagaggatagagaaccagacaaacagacaagtgacgtattcaaagagaaggaatggtttattcaagaaagcacatgagctcacggttttgtgtgatgctagggtttcgattatcatgttctctagctccaacaagcttcatgagtatatcagccctaacaccacgtacaccatctctctaaacaccactcttaaattaagctaattgagttgctttgttttcttataattaaccactacttttttggtgattttgttggttatagaacgaaggagatcgtagatctgtaccaaactatttctgatgtcgatgtttgggccactcaatatgaggtttttttccttcttagatctttcttcttcttcttgatatgtgtttcgctggttggttaaattcttgatgcgttttgctgcagcgaatgcaagaaaccaagaggaaactgttggagacaaatagaaatctccggactcagatcaagtatttgtttctctctcttctcttagatgaggagttttactaaaaaaaatgagtacgaaaatatacatatttttaaaattgtaggcagaggctaggtgagtgtttggacgagcttgacattcaggagctgcgtcgtcttgaggatgaaatggaaaacactttcaaactcgttcgcgagcgcaaggttctcttcatacttttcccttacctagggtttcaattaatcctatatacccaagcttcagttttgaattgaattattaaaaaatgaattttattgttgtatatatgttttagaaaaagaaacattttgtttactgttggataatatatgttaattgtattgtactgtacagttcaaatctcttgggaatcagatcgagaccaccaagaaaaaggtcacatcttctatgtccactcacttttccattttatcatatttatttgtctcaacaattttgtgacaattgaatttatcaacttactaaaactgttgataacacttttcttggacaattatanttgtgtgtgtgtgtgtgtgtgtttaagctaatggataaagaaaaatccaagcatactatattgtgatgtcataata

SEQ ID NO: 68120 - DNA, 349 bp, Arabidopsis thaliana landsberg
  unsure (1)..(349): unsure at all n locations
ctacaggctactcgtacggataccgggatcacttgttgtttgaacgtctacgctcctcgaaagggcctcggagaccatttcggatacaatccgtgtgagcactatgaatgctgatccatacccaaacacgcctttacnnnnnnnnnnnnnnnnnnnnnnnnngttaccaaagtagacaccgctctttgtatgggaagcgttgcgaacagagccagcatggatgcacacttgtgctgtgaagaataaaaacccgctactatcattgcagttccctgacattcatatatcgatacaagacacttgatgatatatatacatagattgagactgaatgctagaggatgttacc

SEQ ID NO: 68121 - DNA, 522 bp, Arabidopsis thaliana landsberg
ctaacaccgattcttcaatttcttttacgggggccacataatcagtaacgcaaacctaaagaatcaatgatcataacaccgaacttgcactttccaaaccctatttttacgatctgaatgaaattttatgaggacgaaaaaggagaaaatagaaacatacaaatggctaacagaggacaaggtccattttcgttctggagaatgataggtgtggttcttccaaggaactgaatcgatttcgtcttatacaaaatctcctcctccgtagtactttcctttggtaaatcttgctgctgcatcgcttcttgattcgtctgcgtttcttcgctcggagattctgaagatgaagcggtcgccattgacgatgatgatatcaaccaaagctcatgaaaaaacatattcgaaaaaaggtcaaattttcgatcgaagaagaagagagacagattattggaaattccgaagaaattttattttttctgatccagatcgataagaggaagcgagcgagagagcacagaggat

SEQ ID NO: 68122 - DNA, 545 bp, Arabidopsis thaliana landsberg
  unsure (1)..(545): unsure at all n locations
gcaggagttgaaagatcagaaacagctgctaaggtttttgatgttataatcatggctgtgagtgctgtcgagggctgggctgaataagacactgagcttctacgtaagatccaatcagacaaggtaggtggtctttgatagtcactttttctctatttttccctaatagtctcattttatgacctttttgggggtctcctttatttgaaacagcctatgattctggtgatgaacaaaattgactgtgctcctcctggtagctgtgatcaactagaagatcagaggaaaaaggaagaagttttccataagtctgtcttcacttctgctgtaactggtcaaggaattgaagagcttgaagatgcaatattggagattcttggtcttgatcgtgtccccactggaggacatcaatggactgtgaatcaggtctgtctcaattctacctgttattctgtttctgcccattaactattgactgttgcatttatatcctctctgngtcgttatcagagacaatgcgagcaattggtgcggacgaaagaagc

SEQ ID NO: 68123 - DNA, 529 bp, Arabidopsis thaliana landsberg
  unsure (1)..(529): unsure at all n locations
tatttttaattacatatttattttcgaaaattttggaagggattatttttggaaaccgttctcaaaaatacaaataagagaaaggtttttcaaaattcagtttttgacaacatatgatttgattaacagtgggcttcatgttacaaccgagcccgtgagtatccgggtccctgggtcaactcgaaggcaaacaaatatttcagtgaaaaatgtagttagactcaaaacttgttgagaaattttatgtagaagaatgtttttttctcgagaaacaaagggtttggtaaaaggagaccatcgtcaatggatcataaaactgtttgattctcattctttttaacgtttactgtttatctttatcgnttgccgcaaaaccactttaaaaacttattaacttcaagattctattctattcacatcataatcatttgttgattctctcaaaacagttaaacataaaagaaaattcaaatattaattacttttaccatttactaaaatataaaactaaacgaagntttttcagctt

SEQ ID NO: 68124 - DNA, 1465 bp, Arabidopsis thaliana landsberg
gcttttagccaattctcttgactctttagataccattagccatgaatgtgtaattatggattggtagctttggttctttcttttgattgatgacagtgtgattacttctctatgagtcattgtttgtgatgaatgaattgtgagtttctgggtaaaagagttgtctttttatattggtcatggttgtgttgatcagatctgctgcaagtttgaatctttaagtgtgaaatgatagggaatcagaggatatgatgtttggtgttgtaatgttcattcggtgttctgcatcttatgttagcggtattactggagttttcagttgtagtagattcgaatttaagggaaatagtactggcaagtcagatgtgaagaaatgtgggaatttagttaatagagtatgattcttctgccttagattgttctaattagaattcaggttccttttaagatcgaaactgtagtgaaggcattgccttgtctcatattgtttgaaatggtggtttcactgtattaaaacctaagaatacagttagcagcctctgtctagttgataaccaacctcttttcgtcgagaatctacatttcatgtatataactttgagattccactttcatatactggaacttggaccttgttttcaatggtcatttctggctcccttgacttcaaccttgagtattattatacagcctagcaccaacaatatctaaaaattggagatttactcgataacaatacatgcttttataaagcacaatacatggtgttgtcaacaaccttgagtagatgaatgccttctttttattgctttgtgtgtaacttgtaatattatctactcatctactgactaaggtcgttggttggttactctcagtagattttgtgatttgttttgtcatatgtgttcttatcagacttgttctctttctttgtttgactcacatctctctttcaatccataatcaaatcaaagtatttttggttgacattgtgttctgaagtcattttgttcttctctttgcatactgattcagtttacgccgttatcttctgcagatcgcaagcgaacttggctctgaagggaggggtctaccatcgctgatcaggccgataggaactcttatatctatcattataaatttatcacattcaatgtttgcataagacatcttggaaactatagaaatccatacagcttagttcgcggattttataatttcttttaccttagaaatgtcccagtattacaacttgaacacttaactttttattgaactacattacataccacgcaaaaaaaggcaaaaacatgtgtgttcactttatcatatggatcactcgctgcactgcctcctactaattgacttaagcgacgaatgaactgtgtttgctcacggctcttgctactgaggaagatagccggtgccattggcgtaggaaccgctctcctttgaataaatatca

SEQ ID NO: 68125 - DNA, 558 bp, Arabidopsis thaliana landsberg
tcttatcaattgaacaatatattcaaaactcatcaacatattggagcttaaaaatatataaattggaaattctttatgtgaagttcttcgtaactttttttttttttttttggctggtctttggcatcaacttttactttaattatttgaattttccatttttaaacttaaatttgggtaatttcttattattttttaaaaattaggttaaatctgcaaaacgcacgaagctgacaaattttctgtttagtttccgtacttgggataatttatcaatcttgtgcagaaaataaaccaaagaaagatttgaagaagaaaacaacaaatccttgagatccatgtcgagagagaggatcaaacgtgaattacctcctgttcaagaggtactactactcgcatctcctttccttcttcttcttctcaaatttcgttaatttcactcgataagagataacacagatccttcaaatttgacaaattcttaaagcatattgataaattgcggaaagtgatagaggaaggcaattactatggagctttgcagatgtataaatctat

SEQ ID NO: 68126 - DNA, 486 bp, Arabidopsis thaliana landsberg
aacatgaacggtttcgggcaactggggggggcgttcattttctgacagataagaggcaggctttcctggaattttatgcgcctgtattcacagccggtgcgggagcatctggttcggctcgtaaactcagacatgatattcgggtgactagcacagccgtccttaagagagtgcctatgatgtatcagttgtgcatggatatacaccacatcttatcacactggcgaacagagaatacaaccaaacctattctgagatggatagcctatgagaacctcatgcatcatccggaggcatccgtgagaataaaaggttccaacgaggacattcaactggagcagacaatacatggtgctatacacacacgtctgcaccagatggtagaggtggatgacttcagagagctggggcttttcgactactagactctgaatggtgctgtgggagctgtaagaactgcaatggtgatacatacatttacttact

SEQ ID NO: 68127 - DNA, 539 bp, Arabidopsis thaliana landsberg
agcaaggaaatccaaaagtttacatcctgataaagcattatatttttctactgcctttctgttttcccatatgtcaagcttgaatggcaaatcagctgtaacattatttggtaggccaccttcattttgtgcatcaaactttctagtctcttcaccaaagtttattgcacgtgaagggggacccgaggattggtttcccgcattgtatggattctgatacggaacatgagtgctcctaatcccatgcaaagctagcggatagtaacttgacttgttggcttggtaagcaaagggattaggagcagcagctggactgaaaccagcaaattgcgggaatgatttaagcgagcaaatttcttgaccttgcaagacccttggaaacctatccaggtccataacacctgaacaagctgggttcacgccagtagcatctacaaactcaccaaatcgatccttgactctactcgacacaagaactggatttgcatgagactgcatcgcataatccaatatccggcggttcataacatcaaacccct

SEQ ID NO: 68128 - DNA, 502 bp, Arabidopsis thaliana landsberg
  unsure (1)..(502): unsure at all n locations
ttatatgttgtgattacatttgacttttaaatcatataaattatcttatctatttgtttttccaatttgctcttttcttctttaaccaaaaaaccaaaaaaaaaaaaaaatgctcttttcttttcatttgattctactataggccaattaaagttgctggttaccgcaataacgcggtacgtttttccgtttgtagttaattcggtttacaatccagaaatccgaaccggaaaattgaattaaaccaaacaagagggactcttaacaagtctgattcaggttgagatcagagacttctcttttgcgttatcttttgcagtctatgatacaatattacaatctacctggtttcacatcgaatgttgagatcacgagagaagacacaccagatcnagagatctagaaagaaccatatgaaaaaagtgggataacaaacatagcaaaggtttgnagattaaccagatgaatgaatgttttggtttaaaactttaacccagagttc

SEQ ID NO: 68129 - DNA, 367 bp, Arabidopsis thaliana landsberg
aaacgccattggtatcaaatccagaatacctgactactatattttatatcaatatatggaaatgtcttgttccgggggtagacttgtaccgcttatttctcacatctacttatgcataaaaaaacaagtgtcttcaaccgcttgccactattgtcttatactacataaaacaaaagttttctccgcctatataaaatcaatactcactctctatgtaatatccaccggaacactgatatagttcttgataattattatccttacaaactatctcatgagcgcttgaatgtcaacattcatactaatggtttacccctaaaagaatctaattctccagatatataagatttcctgaacaatatacttc

SEQ ID NO: 68130 - DNA, 566 bp, Arabidopsis thaliana landsberg
tgggcgtgtaaagattttgcgaacagcaatacacggtgctctgtactagtgcttctaattgaatcatacctgttgagtccatcatttacttaccggccagagtaaagcagttacgtctgcctccaaaaagcactaagactttcggtcagacatgatctctaacatcggacgaaccctaagataaccaaaataaactatatcttatattcaaatctctgtttatcttatccatttatgttttctttctttcccataattttttttgtgtctcatcagactctcttaccaaactgaatttatcaacatggttttttttttggccacatcaaaatggtggtttataaagtagactaatacaaaagacattttctgttaatttcactaacaaaaataatcttagcagtactatagattggaaaaggaaaagcaaatctagcagtaagatttatcaaaactagcagtaagagttttagatatcatgaaaacatcacaaaagagtagtggtttactttacatttttaaaccaatcacaaggggtagttcccggtaagttggggaaaaatcgt

SEQ ID NO: 68131 - DNA, 2361 bp, Arabidopsis thaliana landsberg
tacctttcatctttgctgctgtttatacacgtgtagcaaagactgaggatatattatttgtttagcgtaagcgcgtgaccacactctcctaggacactctatctacaggcacatctacccatactaaacataattagcatgtgttgatgaatgattaaccatttttagtttaaaatttgatagtaaaccttgattacaagaatacctatcaacttttacaacttatatatatactgtacctaaaattttacttataagttataaactgacaaattcttgaaaggacaaaaacatacttaaacaacctactccgcaaaaatagaaagaaagataatccatgtaaaatttttgttcaacatgcgttaatgtgataatttattttttatcctatgataatatgaaatttaattatacaaatatttcattggtaaaatatcattggtatgtaataaaggcctaaatttaacaaatccgtttataggtagagtttgttgacccattgccatacaatagaggccttttaaaggcccatataattggtctataaggagaaattaattaataaactccattttttccaggaaatgagaaatataaatgcgagaaatcagacgacgaccagaggaacgaaagaaagtggtgagttccatgaactgcaaagaataaaaaggactagaattataaatagttaaggaacaggtgtacaaaagcagaccagcgggtctgaaccgaagcttcgattttttgttggccaaactttgctctttcctttttagaatttttctttctttttaaaaacatttcttttatttcttcttactttaaaacgtgtgagagatcgatttgctacgaaatttcaacccctggttgctttgtttgatccctagattttcgccgtgttatagaagaatctcattttttgccgtctgaatcgaaatttcgtgtcgagaactcctccactcctccacttctcgttttctctttttaatttattttactctgtaagtaaatttcagtttctttgttgtctgtttctcttgatactccattgatacggtacatggtcgtttattattgaaattaaagtcaaacttttgattcattatgtcttgtaagaactcatgttctgttgatggtttcttgtttttgattttgatccttgctggtcattttcacagtagggatgtggattttaggattcgcctagatctcgcaattgggcttagttttgaatcagaaagttttaattttgacctttatttgactgctaagttctctatggttgtcactatgttcaaagttgctgtcgcatttatgtatctattcatgtgaatcatgtgattgcatcgacgttaggtgaaaatcatgatgtctaagttttggggtttaagttttcgagttaaagatgttcaaagtgacaatagtattactaaagttttgatctttttgctaattttagattgtgaccattttgagcgttattgagaactcaaagctcaagaatgcgtgcaccatctttgcttgcacaatgcttgccgggtttgctgcctcaagaccgaggcggtgtgtctgcattatcagagaaggatttgcagcttccaacaccagctgttgagatcataccttctaagtttttttctcattgtcgatttttatcatcatcatcattttaggaatgatagagtttctttcattttgagaatggagtagactctataataccctgctatgctaattctcttttcgtttctttctcctgtagacagtagctcatcgcaggtattcaggggagaatctagatgcgctcggtttacaagttttcaaggtactacaaatgcaatttttgaatatagttcatcacctccatgctgtaaggaagtagtcatgaaagttacaaactgatgtgtacacttggctttttgagagcctagacaaagaaactttgcttgtcaaaccttttattcaagatttaacatgaagaagtgattgctggaaagatcaatgacgtggtaggatgatattctaatgctggttttaagagtggatacattagcttttcttggctaaaatgtgaatcagaaagcgatcatacttttttctttatgaaccttgtaagtaagtccgctatgttagaactagtatgtctagaagtgcccagtttgcttgatctttatatattttcattaaaaagtgaaaaacaagaatcgtttttggctgcctccatgctttataaattataataccacggacaagagtaaggatgtatagaaaatcctaacctttgcattgtaaccatcatcttgtttcagggaaaagtaagtgatgctgatatcattgggctctctgggtcagaaactgctc

SEQ ID NO: 68132 - DNA, 634 bp, Arabidopsis thaliana landsberg
agatagcaacgtctaaatattgacaggttaaaataacattacttttcttggcataacttaattcattatttaattcatagaaatgagcaccgcaacgtgtttaaaatacctgtttatttaagattttggacacgtactaacaattggatctagctagcagcaagcattcaaaaactttcgacgactagattagcaatcgtcatgtttctgcctaatttgaatcgcttttattgcagttttctagtcgaattcgattatggactacggttttagagttgcaagatttttcctaacaataataaattgacactaaaaatctttcgatagtaaatatatattcaatacttgcaaccattcgagaaaaatgaacatagtctaaaatacatgatcaactctcatcaaatataacatattacattattactatattagattacgacgttataaaaacaattggattagcatcatatttagtagcattcatataaaattattgtgacataaattttcatgcaatatttgtatagaataattccaatattatattgtcatacatttagctaaactattgtcggcgtaaataattgattctaggctttgggtctaggttatctacaaatatattaatactact

SEQ ID NO: 68133 - DNA, 577 bp, Arabidopsis thaliana landsberg
  unsure (1)..(577): unsure at all n locations
cgctgaacactagagccgttagaaaagaatgatgccatagtggttaagctatcccctcaagcacgacagcgacgtaggggggatggctcagccaacgataaggtccacggacgacgcgatgaaggccgggaatcacaatcacgcgcgtgttccattgggcgcctaaaacactgatacaccaccaccggagcatttgggttgcgatcaaaacgatcgtgcagacgactgcttcggaaaaataaaagggacgctgcagcaggtaagcttcaagcggacccccaactagcaacagtgtgtgaattaacaccatccaggggtaatgcccggagccaaattcgcggcctccatgggcaaggctccagcgcgcattgcgcttagctacgacaagttcggcgaggcgctccaaaccgataacacaagtgagtgcgataaagagccacactgttaccatgtaagccctaccaattccgaacagaagccagggcccatggataacatcacggcatggtccacaccttcaggtgggtaggtacgcanatactcttcgaggatcatcaacactgagacactggacaga

SEQ ID NO: 68134 - DNA, 631 bp, Arabidopsis thaliana landsberg
  unsure (1)..(631): unsure at all n locations
aaaactggggggaaaaaaaagaacacgatcatttttcggccttcattatttttttacccaaaaatctttttttcttcatgctttcgtgatactaaatattttcattaaaaagtttaaattcttacatgaacaaattgtttaggacatgtgtagtgtgactaatttgttgtgctgactagtttttgtttctcggaaatggttgaataggtcttttcggaatttaacgtttgatacataaaattctttacatattgcattattaaaattagctagcttcttattaattctagaaatatcatcagtatattagttgaataatctctctttttcttggaaatggttgaataaatccagaaaatcatggccataaatcctcatttcttttttgtccgaaagtaaaaatccattctataaaatatgagccgtcaataacacagttgaaaaaaaagaaaaaagatacagaatccattaattgttgagactntttccatgcgataacgtcatttttcactaaaagaatatatactatatgtataattagaaatggatgcaatggacaatgtgcacatggaatttaagatataaaagcttgtaccatctactttatcagaagtacatgtataaatctcta

SEQ ID NO: 68135 - DNA, 333 bp, Arabidopsis thaliana landsberg
ggaaataacccgatgctatatcacccttcaaatctttttcactttttccacgtatacatgcataatatggagaccggggatacttcaactagacgtaaattcatcaacccacttaaccatcgatatattggataactctctctgccattatttggaaagatttcccactatacacatgctaataattgcatacattcatctctcctacccatagaaacccgttctaaaacccctaaataaaaaaaatacattcataacaatactaatgccttttattacacatcaacaaatgcactttttctctctatcctatactaactcacatcacttaga

SEQ ID NO: 68136 - DNA, 574 bp, Arabidopsis thaliana landsberg
  unsure (1)..(574): unsure at all n locations
tgctggaaatgctataccaatccattgatcagcgtgccggtccagttgccataagcggtgtgaacgaccattcctgccggcttatgaatgagcatcagcacgtcgtcctcatacacgatattcagcggaatgttttcgggaacgatttcggtatcccgcggcggctccggtaaggaaagtgtgattacgtccagcggcttgaccttgtagctagccttcgtcggctgcccatttacctttacggcctctgcttcgatcccgttttgtatttttgtcctcgaagcattggccacatgaagattcaggaatttatcgagccgcatgaggctttggcctttgtcggcgacaatgcggtaatgttcaaataaatcgtcctcttcggaggcaatatcaacaagttctacggacattctttttggagttactagcaacaaaattatcaaaataagtggatttactgagcccgtcgattcccacgcctttgcagcggctctctaatgcggccaccgaaagagcaggagtacagctgtacatcanacgggatgacctcattcacgctacccgttcgggcaac

SEQ ID NO: 68137 - DNA, 465 bp, Arabidopsis thaliana landsberg
tctacatctttaaaatctagtaatcttgctctctctctctcgttttttttgttggataaattttggtttgatttcttgctttaaaaatattgttccaaaatcaaaccggcttttagttgaaccgaaaccaaacataattaaacacctctgcataaccgaattctctttacttcttcgctcacaacttcacagagagagagatatagcgaaaacctacaaatttcgtcacggaagcaacaatttggctataaaaatcgtaagtttcttctaatttcttcatgggtttttcaatcaatctttttattcgccaaaaatttcccctattctatgaattcttaacgtctagctaggtaaattgattaaaacccaaaagcgaacggaaccagtttctttgtgattctaagtctaatctgttctaaaatcgttcctttctctgttcttgaacttgtatacgctgtatcacat

SEQ ID NO: 68138 - DNA, 574 bp, Arabidopsis thaliana landsberg
ccggctgaaattatcttgttgtggccataaattataaaaattctaatttgaattgcattttatgttattatctttatttgttttatggacaattttattttctaaataaaacgtggaagttcatatatcattaataactgtgtctttctaccaaaaaaaaattattagctgtttcacacgacaaaatatatagataacatcttcaactttgaaatgatttgttttaatttagattaagggggaacatgagaattcgggtcacactgttttaatttccaactaaacagtatatatttttgttttaattttagtatggtagtaaaatggataattagtaccgtacaaaatacatatttttctcgtgtcatatttcttaatattatataaactcactgagggcataagaaagatttatctaaatacattttttacaaacccatatatcaatataataccgatttagatctatacaggctattacatttataattatatagtccacgggtctaacaaaatgatataactcttataaattaactacattgctaggtttgcatctttgtgcgttcgtgac

SEQ ID NO: 68139 - DNA, 572 bp, Arabidopsis thaliana landsberg
aacgaacatatgcacaaatgtgaggctcattacttcgtctaacaggtaattctgtagaacttattgaaaattctgcagaaacgtcaaagctaggtgagagcgcagttgcaaacacaactacaaacataaatatgtatctagtactagtacttttggtattgctgtgcagtatttataatggtaattgtaagagtcttccaagtagtcctcctgttttgccaaactcttatgaagcgctcatgctgtacactggcctgatgactttcaaatccacagagtattatgataatgtaacactacagtaaggaatctatacggttgtcttacaaatgctttcagatcaaaaagcatgtcatatcttactgatactaatatagtttggattactgattggtatgacactataaaggtaatacaattaaaaaaaaaagattaatttttcctttagaatgttacaactacagcttattatgacataacttcacttgacctcacagaatgcgatatcaaacctggaagtgaagattatgatggtgattcatggctatctctaagtgatgcaattctaaatg

SEQ ID NO: 68140 - DNA, 284 bp, Arabidopsis thaliana landsberg
ccttatccgaacaccgtgagggatctacagaacatagaacatctgactttcagtttaactaaggattgctgggcggacacgggtgacggggaccgcgtggaggagacactctacgcacctattatatcctttgctgcatctggagacacaactggctagctctaactcaaaggtgagctagactcggggccactcatcttgcacgacctggatcggtgtctggcttttctttactactgggtacgagactgtgttgctctgtacgctaaaaggtggagtgagaa

SEQ ID NO: 68141 - DNA, 945 bp, Arabidopsis thaliana landsberg
atatatatatatataaatctattatcacatacaaatttaaaaagtttttaaaaacattatcgtatctttagatagcgtttttcctaatgtgaaaaatacttgtttcctctagtgatttgatattgtattttgaggtaaaatctagattaagatttcatatggtattaaccccactagttcaaataaatatgaaatgagcttaaatttaaaatttagacctaaacagttttatctaaactatttcaacatactatttcaaccgtcagtgtcattttttctcttttaatcacacgattagattaacataaaattctatgattggttgtaataagagttaaacttagaagttgttttatggaaagtaagttgtaaaacacgtttatgattggtcataatttaacattttcgaaaaaaaatgaaaaaaaattcacaccacttaacaaaaaaaaaaacgacatcctaaattcctaatcaaatctgaactatccgtttcgaagtctatagtctatactatttatacatccttagggaaatcatagtgaacatggcaagatatgttaatttacatgatgtctacaagtccttgggcgttaaagttttatacttaagttataactataagagagagggaaacaaaagaaaaagagtgagagaaaaaagagaagtaaaatggaggtggagaagtcataggtttcgtcgcaaagagtctgatgatatacatgtataaattaaagacaccgaaacctgtgcatggagacctttctctgaaacttggctcgggtctttgcctcttcactatttattttcagacactgacttctcactggttttaatttaatggctgggggcagccgacaattctttaggtgacattgacccatctctcttttctttaaagaataaaatttctctattattgagctatattgattaaaaatatgttga

SEQ ID NO: 68142 - DNA, 887 bp, Arabidopsis thaliana landsberg
  unsure (1)..(887): unsure at all n locations
atagttgttactagttagttatttataggcttgttagatctgacatcaagtttggccaaacgcaagtgtggtcgttagtcttttatgcacaaggacctctggattagatatttgattgttgtgccttgttcctcatatacagaattcaatagtgcttgatcagaaagttcatcatgggaaaagttcagttattccttctggtatgttttaacttttcactaattttttttcttccatatcccatatagttgtcctataagcttctggtccgatgtttattagagttaatttaatattttttattcctttcttagttgatgatagctgctgctgaacttgtttctaatcttttgagtagatgatcatggagaacaatcaaactccagttcttctggagtcatgatggagaatgccttttccttgaggccaaatagttctcagaatcgtggaaatttgaactgtccaaaccccattatcttggatctctnnnnnnnnnnnnnnnnnnaattgttagacagtttctgttgttctctcggctaacataaatatcctgtcttctaaatcatttttttaatatatgatcatgcagcaatcaggaagcatatcctggtttcaatcctcatcgttatatccacaaagaattgtcagaacttggcaaggaacaaaccctgaaaagcagcacggattctgatgtggctaggatgacaaccaattttgatggtatagacttaatgattcatgccacaacttttaggacatttggtaacattaaatcatttggcaggctctgaagaaggaaacaaacatctgcagggtgcagagacatttcttcagttatctaaagctaggaaattgggcatactggatctgtctcctgaagatgaatt

SEQ ID NO: 68143 - DNA, 1602 bp, Arabidopsis thaliana landsberg
  unsure (1)..(1602): unsure at all n locations
aatgccattaccagtacaattttcagttaacgtacatcttgtattattcgtcgtattataacaaatgttgatttcatgtgttcgctctatagaaaatgcctttgctacagcaggatctaagatgtcagaatctagcatcactatgccttcagtacagatagctgcccgatgctcagatttagtagtggtcttacgttttaaatttttgcctttatccgaagaacccatgtgtgcatgctggctaagccatttaactactttgcctagtaaatcaggtaacaagtctccgtcctacaacagaaatttttgaaatcaatacacagaaactcacaatgagagcatagaggtttgaagcaggtagatgagaagttttatgcgttaccgtaagtttagccctcaaagcatcaggattaatcccaatctctgcagccacatccttcacatccactttacccaggtcgatcaactaaaaaatgtgaatcagtgagcaagagattcaacaggtatagacaatccagctaataagaatatacaaacctttttcagaatcaatccaaaactaagagacttggacagagttctttcatcttcgttgcttctcccagtcatccctgattctacattgtctgttgcagacaagttaaattttgaatgtggtgattctagctcttgtaagtcactgtttctcgaaatatcagaacctgtacccggtgttcctacatcaactcccatctcatcattacttaggtgaccttctctaacagattctgatggaagatgacatataggagaacgactttcagctgcattactttctcctccctctactgactttccactttcttgaatatctgaatgcttcgagcagaaagctcgcagttcaacctacaaggttttcttaaattatttatagaaaattcagcactcactacaattgcattctgtagatgaaacttacagtatcacaaccatgttttccccagacctctagcctattccctgcctcccttgcacatataggatggaaagatgttcggcatgttcctatgatcaagagattgtaataacgtatcaattactaatcttatattcaccaacaaatggagacaatataaattgaatcaaagagaagtgtgactagtaagaaaatgaaacactgccaaaaagaagaagaaaataaaaacactgcattgtgataataaatgccaacaaagcattttccagtgaaaataatccagacaattgggttatctggcatagacaaagtaaggacaacgactgtgagcacagcagtaaagccaaatgaaccccaatttgaggtgacaaactacccatgctcagaagtagactggatgcacagaaaacaacaatacataccattacaacagcgaatgcaagcaccagatttcaccttgcacaagttacacaataacttcctccgagtttcttttatcccaggaaaattcaagatgggctccatttttttcaagtcttctatatacacctcaggcatccacagagaacanaacagatgagcagactccgccggccaccattctcagttnttgagagaacaggtttaaggatgccacccttttttgg

SEQ ID NO: 68144 - DNA, 452 bp, Arabidopsis thaliana landsberg
ctatcaatgaagcgactatcattggctatcaaactgttttttgctttttcaggatgacccactatcttataatggtaagcatttcctggctgagggactttcctaaatgcgagatcaagcatacattcttctgttttcttcctcatccccaaccagctctcttctgatccgtgtacttgttttactatctttgccatcatacaacaaacgcctttcttttaagtccaaagacttgagaaatctctagagaagtattactcttttcaagttactccacttcttgggacctctctgatgaccaaattcatttcttatatgaaaagtagaagctttcacaaacaattgtgtatcatacctataacaggctgcatatccgagcaacttgaatcactcgaatccgttcctacatgttatgcccacattcccccctataaagcttaatccttcgccat

SEQ ID NO: 68145 - DNA, 444 bp, Arabidopsis thaliana landsberg
ggaaaaaattgagtgagcgccattgtaggagagcttcgggaaagaagaagaagaagaagccatgttcatggctcttgcttcttctaaagctttttcctcgatctttaatactttatctccattcaatcagtcgaaattggtgttagcttgctccggttcgaatcatgtaaacgccgttgatcggagaagaagaatcatgatcttcggttcgagtttggctctcacgtcgactctacttggttccaatcaacagagacttccgagggaatccgcaatcgcattggagcaattgaaagaaaaagaagaagagcttgaggaagaagaagagagaaatgtcaatctcttccaggttctgctctttgcaaagctttttgttttctttggtaacaaaaaaaaagaatccaattcttttgtcttttgcagaaaactccgccgcgtgctgtt

SEQ ID NO: 68146 - DNA, 550 bp, Arabidopsis thaliana landsberg
ggatgaaagatcaaaaataagcaatgcaccattaatatctatttttattcgtccaccaactcaaaaagcaagaaatgagagctatggcgacgaacatgacggcatatttatgaaaatttgatgacaggtggtaaactggtaatctatcactagttgtgattatgtggcaaaaaattgtagctaacatcacgtcaaaatagttatatcagaaaatggtgaaaaaattccatcaccgtcgggaactatacatcaatcgtgactcttttgtttcataagtaagaacattgaatatttttactcaaaacaatcgagtgaattgtcttccgctgacccataatattactaccgactaatgaactattaattttgccaaattttatttagctcggttggctgatgtcgatttacatggaaaataacatgtggagagttcaattcagcgttctaaaactcttatctcttgtcagaaatcaattttggtttctcattatttgactctgagtccaaaaattcttaagactaaacaggttgtaattgtatgatgcaatct

SEQ ID NO: 68147 - DNA, 562 bp, Arabidopsis thaliana landsberg
aattggcctgccccagtatttgttgtgcataatattcaaaataaaaccaattaaaccatactaaccgaattttaaccaaaggtcacaaaatgtgggtggttttggtaaaaaaataaataaccgaactgtaatctaattttgacaatttcggctttcaaatttcaaatcaattaaaaactaacaaatttggttcggtgggtttcgaataattgatctcgcatgcgcaactatttaccataaaaaaataccttataagctactcagatttaatgaaaaacatttttgaaaaccacgaactgagataagaattgtttaaaaggggtacgtacaccaaaataaacattttcaaaaatttcccactccatgttttctttatttttcacatttttttcattttgtatcatctttaaatggttattttgttcacaacatctttagaaacataatttaaattctacataaaaatagttggtcacttttaccttcagtacttaccctttactctagttctttttatcgatactgacgtaatgttctgattatggtgcatgtgagagagttt

SEQ ID NO: 68148 - DNA, 495 bp, Arabidopsis thaliana landsberg
ggcgcaatggcaacagcagaggtcagtccaaatccttcttcatcatgagacaaatgcagctgagcgtcatagcgaccgccgtccgcagcagtgataccaacgtaatagtgtgcaacaccaagtacaccacgatcatatgcagcagcatgagccgcagaggaggcaggtgacatcgcacggagtcgattggtgagcactgtaccagtgagacgttgtagtgccaagtaaccatattgtgcatccatacagcgcaaccgacggaacgcagcggtctgatcaatggtgaaacgagggtcatcagccaacatcgcagcaatggcggcagtattcttgcccaccacacatccaagcatgcggacactttcttcgttgatcgtcatgtcgcatcgattgaatttcgcgagcgcatcacggacgcagcgttcgctgatctcgtcaatgaggaagcatgtgaactcacatttagctgggttgactgacaggccaagacgggcc

SEQ ID NO: 68149 - DNA, 485 bp, Arabidopsis thaliana landsberg
ctcctaatattcaaaattactacttttttttgctgataacggttttctttttgtctgttgttagatcccacattatgaggaaaatgatccgattagccctgatcctggcgcttttctattcctatgccgatgcgcagcaatcatctggcccccgttctaaagtaaatcccgccaaaaaacaggtggcctgcaggtggcagttcaaaacctcagctcctgttacgggtactccggttatcaaagatcagctgctgcttatcggcgccgccgacagcagtttgtatgcgcttaataaaaccagcggtaaagtggtatggaaatttaaaacccaggggaaaatcacgagtacagctgcctgtgataacaatactgtatactttattagcgaagatgctcatatctacgcagttggactcacaactggtcaacttcggtggcaatttaaaacatacggggagcatgcgacagatccctgggattacttc

SEQ ID NO: 68150 - DNA, 598 bp, Arabidopsis thaliana landsberg
cctattacattatacactgatacacacgaccaaaattatagatttatacaaactttcaaaaaataaaaaaaggggtctcgttcaattttaaatatcattacaatccacactcttgcaaatataatgttacaaaatttacatcaaaactgttatatatatccaatatctttaccataatgctgatttttaactaaaaacaactaaccttaaaacattttgttctatgatatatctttgcttaacttatggatgcgatataattatataatcaagaaaatttgaagcttataatatcttctcatacatttgttttccaactatcttcacaaacatcaaaacttcctaccatagacaaagcaatatatataatatgttatatttatcttcttccatttataaatcttccgaattacatttcatttcgtgttccttttttatattataccaaaataatacccaaaaactctctatgattgtgataattaaaaaactatactttagatcttatataccttatattgtaaaaactaattttatgaaaattttaaaatattgttaacatttacaaaccaaaccccataacttttctgatttcttt

SEQ ID NO: 68151 - DNA, 297 bp, Arabidopsis thaliana landsberg
gggtggtggaggagtatacggcgcgggtggtggcggagtatacggcgtgggtggtggtggagtatactttgtttttggtggtggtggcttaaccgcagggggtggtggtggctacacttaaggaggaggctttggattcacaatttatggcgttgagatcttctcgtagagaataggcagtgtttcctcgattgccttatatccgttgaacgacggcctttccactcggaaccatcggatcactaaggccgactttcgtcccttcatcccgacaggatcctggacaaaccactaccc

SEQ ID NO: 68152 - DNA, 537 bp, Arabidopsis thaliana landsberg
  unsure (1)..(537): unsure at all n locations
caagttgctctttttttccagctttctatgcatacttgacacattaaatgcatctatttacgggcaagattgtgtgaaaacatcgaattgtcactttcagaagatcatttttaatggcaagttgtttgcatacttaatttaatcatttcttaccaataataatggaccgcctatggcctatggacatcttctgtgtgagtgtgtttgtgtggtccaatccacatcacatgccaatcaagcttatcatatcatatgataggaaatgccaaatttagtttatatacatatgtgtgtccacctatttatacacatgtagtattatcatatcatacgtcacttacacaatgaattcagctttcagttatatggccactatggttcaaatctaggaatataacaagattaacgagtcgagttatgctggttttgaaggatggttataagttttggtctcaaaagacatgaaagtaatttattggctccacaattttattgtatcgaacttttttttgtttgccgatcgccacattcnatttt

SEQ ID NO: 68153 - DNA, 158 bp, Arabidopsis thaliana landsberg
accaatcttacaaaccgtaacgttcattgaaggaataaatatcttgcttctacttttgattctttatgtcttatctatacctaaaacctatacatggatgggttatcttctagtatggggggggacgaatttcacaacttctattgactcagacagat

SEQ ID NO: 68154 - DNA, 533 bp, Arabidopsis thaliana landsberg
cctgcattaaccagtggaacggaggagttgaagccaaataacgtttatttgccacgcgtggaggtattattgcatatggggaggggttgatctgaacagtctttagatgataaaatacttcagtcctgagtttatcaacgaacgtgataaactacttacttatcccacagattggtgacaaccctgtaattccaaatgggacagtagcagaatggttcgctggggaagccaaagtctaaagagaggagggtgaactttctacaacaggatattgtgaagaagataattatgcacttcatggagagaatgacatggaggctctcagcaaaagtaaggataatgatgcaactgcagatgatgcaagtgctccaagatcatcagatggtagcggaaacacatgtcacaacggtgacgtttctggaactgactctggtgatggtgaagattgctatcgcgaagatgatatagaccataataaggtataaagtgaaggtgacgctgtagaacgtatgtctgatggccatgatgatact

SEQ ID NO: 68155 - DNA, 385 bp, Arabidopsis thaliana landsberg
cataaaaattaatacgtattttattcaatccatcgatgctatttgtctctttcgccatgaaccatagcacgtctgcggggttgcggaacatactttcgactgaacctttcattaccgactctctctgcggggacctgaaccaaaccacattcgacacagctgacagttactacagaatatgtattttatcttcccacatcaactgtacgagcattagcatctatccaacctggaatatgtcattgtatatcgaatgaggccattacccagagaatattatcttctttaagattatcatgatgggttctacgctttacaaggaaccgatggcaacaactgaaagaggatccgacccttcagaaatgttcagaaccacccaaggaag

SEQ ID NO: 68156 - DNA, 529 bp, Arabidopsis thaliana landsberg
gcaacattgccatggacggcgaacatgaaatcattggtgccgttcttggtcgtcgcattgacaacgccgccggtcgcacgcccgagttcagccggagaacctgaagtctggacatcaaccgtcttatagaagtcgaacggcacttcggcgccgccaacataggtgtccgggttggtgacattcaaaccgttaatatagaaggcgttttcagctgctgaaccgcctccgatcgacggctcgccaaaggcggtcgaattcacaaccgttggcgccagcaaggtcacggcttcgatgctgcgaccgatcggttgttgcgccgtcagcgtggtcagatcgacctgcaaaccggtcgtcgtcttgttgaagtcctggcgaacgcgcttgcccttaaccacgacggtcgtagcctgagcgccggtggtctgcatggcgtaggtataggtgacttcctgcgaaacgacgattgtcgccgtatcggtataggtatcaaagccgggagccgatacactcacgctatactgacccgctg

SEQ ID NO: 68157 - DNA, 2188 bp, Arabidopsis thaliana landsberg
acgtgcgatgattccttgtgtccgcaactagaaagagaaaagtctgtcgtatcaaattagatattgacttaaatgtcaaaatatatgaagaagtgtgaggggaaaccgttgattgaacgtaagacatttgaaaaatggatatgtagtagtttctagatttgcttacaaggaatgtcgagttgtatcattatctctaacgcaatagctaacgtgcacgacttttttttttttatgtaaacttcaaacaaaccacgatcaacgcgtttactatttattgcatggaaactatagcaagtgtgacaactcatatcaatttgtgatgaattgattaactacgtaggtagtataatatttgtaagttggttattcacgtaagaaatattgtattttactcttatccagattatttaagaactcgtttttcaatataatgtttgacattttatactcgagttaataaacaaattagctttacattgacaaaattctgttgtatattatttataattaatcttgactatgggtaattaaataatatttttttggaaaaaaatacattggattttctcaaatgatcacacttctattaaaaccaaaatagtacgtatacgctctagacgattctaaatagatgattaatttggctcgattcattaattcaaaaaataataatatttagtgttttaaattagaattaaaatattaaataattatcggatatttcagtgttttaaattattgaggatgatttttgtttagtaatgacgtcagattgtctaaggaatagtttgggaaaaaaatctgaatcaaatatgactaacaaatggttattggttattgaactggaccataacaaaaagacacacacacacaaaaaaaaaaactttttttatctggtttgctccatggataagaatatagtagctaggatatcctgatctttagataacggtagaacatgtggcatgtgtttattggttatttttattttattttgagaacaaaatagttacattgtttggttatatataaaaaaaaacagaccaaaaagacaaaaccaaagcttaaacaaaaaaagaaaagaaaaacttaattagaccggttaacactaaactggtttatgtaaaacggattcataaatgtatctagacattcacttacataaaattcatcacaaaatttcacccaattacggttttgattcggtatagggaccaccttcaaaattacccaataaataaagagtggataacaactagcataaaataatcaaagcatccactaagacacaaaacacaatttcataaagatgatgatgaatcacataactttaaataaacattctttcaaaaaggcaaaacttttaaataaatatcattcgcctgtcggccaagaaaaaaaaaaagtaaacaaaaataaatatcatacgtattgacaacaaaaaattcatacgccagtccaattacaaattacacaatatttaaaaatttaaataaggaaaacagaagaagatacaatttcaaattaaaaaacaaaatacgtgtatataaaattgaataaaaccccaacagaaacgtgacacaaaagaaaagattggggaagctgacctctgcctttcctcctccattaatcaaggaatataaatcagctttaaactcagtcctcttatggaagacaaaaaagcaaatatttattcgtaaatataacttcagaaccctttcaacaaaactctctctgttctttctccgtggagaagttaaagatgacgatgtcggagaactcaagaaacttggaagctggtttgctactgaggaagaaccaaaacgacatcaacgaatgtcgtatcactgctgttgtacttttcagtactttcgtttctgtttgtggctctttctgcttcggttgtgcggttagtcatcaaatcactcatcttttttttaaaacaatttctctgtttgttttgctctgtgatttgaaagtttggggttggattttacaggcaggttattcatcagttgctcaaacagggatcataaatgatttaggtctctctgttgcacaagtaagaagcaaccctctctcttttcttgaatctttactcaaaaagtgctagttttgcttaaattactctgtttttttgtttttgtttactacttcagtactccatgtttggttcaatcatgacttt

SEQ ID NO: 68158 - DNA, 533 bp, Arabidopsis thaliana landsberg
ttaaagatcccatagttggaacttaatatggcgaacaatatcaatctagtagagatgtttgcttacattaaagaattgatggaaaaaaagaagcgaatttcgatttacgcagagtgaaaaaccagcatccaaacaaagcaaaacatacaagaactgtaaaaaacaattaagtgtgggaattaaaatcaaagagagacaagtcttccatgtatccaccataccatggatccgacctaatctcccatgtcgaatcaaattcaaacgcttcccatgggacactcttgagatcttccaccgaaacccctaaatcctcaagcgtcacgtgttcataacccttattcttagtattactctcaccaacagtactctcgtctttatccttctccggtagtgatctcttatcctcgttaatcttcttgttctccatcgtctcgtgaaaatcagtagaagaaaaatatgaatccgcttttgatgcaacaccattgtcttcctttgccttcggcggtgatcccttgaccacgcaacataattcg

SEQ ID NO: 68159 - DNA, 581 bp, Arabidopsis thaliana landsberg
aggcggtggtaaggcccggagacatgcgtttgattgccatgactttcgctccttcttttacttcttttcctaaagcttggtcagtctctggtttgatcttacgcgctaacgaagaaatgttgatcaaatcgtctgtcattgcttcacgcaaaaacggacttcttccgataatttcttctgttatttttccaattgataacataatttggtttgaattaataggtgtgcaaatttaaacgaaagcaatggaaaaacagtgttaaactgttagaatttatacaaaatgaacaaactattgatttgaacgaagaaaacttaatgtttgatgaatattctatttctgtaaggttacgaactgattaaatcaagaaactttagttatagttagtattatgcacgcgtatgatttttaacaagattcatcacatattccaactgttctgtttcggtcatttcagaattatccacaaccaatgcatcctttgcctgtgtgagtgggctgatggcccgggtgctgtcaatacgatcgcggtgtttaagattttccaggatttcatccaggctggttatttcttcctttg

SEQ ID NO: 68160 - DNA, 554 bp, Arabidopsis thaliana landsberg
  unsure (1)..(554): unsure at all n locations
aatgggaaccactagagtcatgcccgagcctcttnnnnnnnnnnnnnnnnnnnnnnnnnnnnnnnnnnnnnnnnnnnnnnnnnnnnnnnnnntaatatcatatgtatatatagatgtggggaccagaggctgacattggagtcttcctcgactgtcctccaccttaggttttgagactctctgactggacctggagcttgtggactaggctagacagcatgccctgtagggatcctcctgcctccttcatccccagtataaggactataggcacatgtagccagactctagttctatgtgactagtaggacatcagacacaggtccttatgaccatacaaaaagtacatttgcttctgagttggaagataataaatgtgggctgttggaggggtgtgcttctttcattcagtaaatattcaataaatatttgttgaatgttggccacgttccagactcagcaagcaccaggaggcaccagaaggaagtgactgtggcgtatatcatgaacatatttcacagttgtatacagacatgcgcattctccaacccttt

SEQ ID NO: 68161 - DNA, 709 bp, Arabidopsis thaliana landsberg
  unsure (1)..(709): unsure at all n locations
tatatcaaatatcttgtagtcgtggttagttagacggtaggagttaagttgttttttcacatcgaaatcacggattgaganaatgttaccttctataagtttaggcttaaaattatgaagaagacatggttggatagattcttgtttaacattagcctatattaatagattttaaggaaataataaatttagatgtaaacagaaaatgaaaatataattgtggtagggttttagtttactacacattttcatctattagaagaaaatcaacgctgagaagaagattatcgcgtttgaaatcacgtactttccacgattaggttaagcgaacaacaatagtttgagagtcgattttgccatctacagcatcaagtgtggaatatgagaggggattctcgtttgttttcaaagtatttggggacattacctactctagggtttttaagagaaggaaatgatttggattgtagacaacacaaattggtttataataggattcgagcacattgaaattgatacacgcgattttaaaggaagaggcgagactgagggaatcgatagaattcgaaattgacagctctgggaaatatgactttaatcacattaaaaccagagtttttaatcggcaaagatcaccattaattccgatccgctcttcaatctttatgaaatttatggccttgtattgctcttacaccccataattatt

SEQ ID NO: 68162 - DNA, 524 bp, Arabidopsis thaliana landsberg
attcaaacttctaaaggcctttaactcgttcaattttttaacgtgagacggtcataattcagttaagaacggattgcgaggcttggccaaaccctaaaggtgttggcctgctcatgaaatgcaacattagttggatcttacgagaccgtacgtgggaaaccaagttccatggacaatgttcacgttttgaggccaatttactagtttacagtttacactgggcaattgaataacagtaaacgaaaacaaaaacaaaaacaatcgtatcactaattactagaatttgtcgagtagggattgaatgtttatatatatgagatattaatacaacggccaacacgtgtgtatctgaaagtgtacatactaacatttatggtagaaaggaattcgtgtcatcaagtcaagtaaaaccttttttgtccgttgtgtaacctacacaacgatatattcaaacaaaacatatgacacatataatcgtatgtgtcatgtttatacatatacaatatgaaaagcaaagagaacga

SEQ ID NO: 68163 - DNA, 522 bp, Arabidopsis thaliana landsberg
aattttgattgttgacaaaaagaaaaagtttaaattaacaattcgattaagaaaatatttttggggatgatatgggataatctaatcagtgacatatatatatggatgggtaacttttaattattggtgtgcaaaatgtatgagcagaaagaaagttaaataaaataaaaaaattatgagcagttgtagagtacgcaagaatctaatgcaaattaaataatgatttgatatgatgatttgatacccataacaacatgtttaacaaaatatttgatacccattggccatagctcgctgtctaccaaactttatataaaatggaaaaataagacattttttaatatgaattacaaagtgtaatgaaatatatggtgtgtggatttgtctaaatggtgagataaataaaaataatttcgcaaactttttttgttttgttttgtatgacgatataaaatagtccaaactccaaacactcgaatcgtttggaaaacaaaaaaaaacactcaaatcgtttccgagttg

SEQ ID NO: 68164 - DNA, 482 bp, Arabidopsis thaliana landsberg
ggccgagaccgaggccgtgctgcgccggcatccggcgacccggttcgccttggtgagcgcccgcgaggtggcgggagggaaacgcctggtcgcccacgtcgtcccggagccgggccggcccgtctccacgcgggaactgctggaccacgccgccgcgcacctcccgcgcgcggcggtccccgcggcggtcgagcttctcgacgtgctgcccctcaacgccaacggcaaggtggaccggctcgccctgtcccgccgggacctgcccgccgagccggtccgagcgggggccggccgggtgtccggtcccgtggagtccgtgctggcgctggtctgggcggaggcgctcgacctcgccggagaggccgacccggaggcgagcttcttccacctgggcggtacgtcgttgcaggcggcgcggatgaccacgcggatcggggcggtgctcgacctggacgtggacgccaggctcgtgttcacccacc

SEQ ID NO: 68165 - DNA, 504 bp, Arabidopsis thaliana landsberg
gcaaggtcgagtcgggcacctacagctcctgacgctcggtatcttacgaagaagaggcagcagagaagcgatggctaacaagcgcacattctgattcagcccgaaggtgtcccggcgcccgttcgtcggcggcgcggcggcggtggccggcgcggccggactggccggcgtcctgccggagcgcctggcggaggccgccacggagagcccgaaggccttccacctttcccaggtcaagcacatcgtgatcctgatgcaggagaaccgaagcttcgaccactactttggcaccttgcccggggcccgcgggttcaaggacccgacggtggccattcagtcgaacgggcggactgtgttacagcaggatgacccggcgaaccccgacgggtacctggagccgtgggacatgttcaccgtcaccagtggcgccgcggcggaccccgcagttgtccacgactggcgcgaccagcacgcccgctggaactggtgcaagaacgaccggtg

SEQ ID NO: 68166 - DNA, 571 bp, Arabidopsis thaliana landsberg
agtaactatagttcttcgagaatcgataaatataatttatcaattcaatgaacctgtaaattgttattgggaagagggatatcaaacactaaaacatctgactataaaaatgtactatatcatttcttaactatgcaagtatacaatgtaatagtgaattgatggagctaatgttattccattattgctacaaaagtacctctagagcgttttgttctttcttaattcaagtattttcacctgtagaaatctctattttctgcctaaagttgaaattgtaaaaatataaaactaaattatcagatggatgttgaaaattgaaattataactttatggctgctgctagaaatatggtaccttcctaacacttgtcaagaaaaaaggttcatctaattttttaaacggcgtttttctgtcatatgtgggatgttattgatctctaatcatttttcttttttaaacaatgtatcttttttatagaaacctgtcggcaaaaaaaaaataagattctaattattattagaaaatatagaaatgaacggcgaatatacgttgggaagagacatgaga

SEQ ID NO: 68167 - DNA, 1391 bp, Arabidopsis thaliana landsberg
tatctgattgtacttaaaatgtcatatatgcatacatgtgttcgaaacaagtcactttttcagcaagaattcagtcatctatgcatgatgtcttggattcattaagggtacagatgtttaaaaacaaaattgacatttctaataatagcaaacctcatatttcttaaaaactacttacaaacacaactgatattgctaggttgatcaacatatcatttttggaggacctggaaaacctgtaacaacaagggtaaatcatgattagtaacagatcctgcttttgaatgatgaaaattaataatgcgagtagactcataaagaatctctaccttggaccccatggtataatgggctgcttatcagcatatttaatgtccttggaaacctgaattatgaaaacttcacccaggattgagaaagaaaggtcatagagctcaagacagcatatgacaagaaagaggatacgatacctaccttaaacgaaccaaaagtcacaccctttttcctattcatcaactgggcatacatgagcttatcatatgctttctccagctatcaaaaggtaaacacaagacatgttaacaagacacaaacaaaaatcatcacgtacaggactccaaagaaagagagagaggtaacctactagagcagcagtggcttcatcaccgctcctctgagcatctttgagttttcttccataagtttgcttgatcttgtcaaatccctctatagggttaacaccaagaacctgagaaggtacacacactcatgtcatgagtaatgcacaacgaccaacaaaacaagtcctttatagggctctaacgatcaattacctcatacggattaaagtcagcatcagactgtggattaccagccgcagacgaagcagcacgtatcacaatcctgctctgtaacacctttccgaggggaagcctgagaatttcaatcatcctcattacaatgataacgtgtaccaaatggtctaataagcacaacaatggaactctcttaagtgaaattgaaagttgtaaactttataggcagcagtaagaagctcatccacaaattaagccgtcggaattcaattgacaatgtttatgaatgaagaagataacggtcacccacataatccgtaagtttatgaaaaccttaaaacaaaaggaactatcaaacgatgattcttcgatttaaaagcctccgaagagaactggaaaaaaaaaagcagcatcaaagagaaagtacctgacaaaagaaggcgatttgggagtgcgaagagagttcctgagagaaatttgaggatggtggttacgaagcgcgttggatgttgagaaagccatgatggagcagcaaggcacacaagtagatagtgcgggagccatggcagagaagag

SEQ ID NO: 68168 - DNA, 251 bp, Arabidopsis thaliana landsberg
gtggaagcatatcgcttaaatgaagtcgagattgactcaaccgcttatggactcaagatgggcggtagatagcggaatgcgttaagcatacaatatattgacatcataaatgcatctcgttagtagtctgttgaggcctagagatggaaacgttggcggcttgtctcggagctcccatgggatttgaaggagaatacagaatcgctcagaagagacccaagattttaggtggtgagagatattgaatttcg

SEQ ID NO: 68169 - DNA, 598 bp, Arabidopsis thaliana landsberg
ggttccgttacgttacggttccatgcgtcaccgatcatttctctgattccagagccgccgctgccgccgcgttgggagccgatgcgttgacactccatacggttgcgctcggcgcggtcccaccgctgctgctcttcttccgtcaagggccggtatctgttctcgtcgggcacgaaaatccgaaagcggtttccgctggccgtggtgtcttcatatatgtcgacaaaggcagaggggtccactgtccactcgggagaatagggcccgccttcggccggagccggttcctgggcaaaactcaaagctgagccgagcaatacggccatcacgatcgataatttcatgcgtccaaccttccgtttcggggttttatcttaagtgtttatcgggaagccgatttctaatctttaaattatttcctggactaacctccagggcaggagcctcaacgtctcaatctgagtcaattggtgtcaaatccacctgggtgatgcggaaacggtcttcaagatcatgcttcagccggtgtaactgctccgcggaaggtgcctgcttccagcgaatttcggcggacatagcgttttcgcccgactgagcg

SEQ ID NO: 68170 - DNA, 194 bp, Arabidopsis thaliana landsberg
  unsure (1)..(194): unsure at all n locations
cgtggcccggtggggcccggctgcgcctgcggtggttggcngggttctttcnttctttctggggccctggggaccttgtccgcgcttcccttggtttttctcgctgcttgggccgggnanttgntcntgggttgggcctcccnntctggctttttgnnngtgctgccctcntttttttttgcngcccggcccct

SEQ ID NO: 68171 - DNA, 3114 bp, Arabidopsis thaliana landsberg
tgggctttggcttaatctagctgatcttgatgctcctttcacttgctctcaagacagagaaaaggaacactgcgtatgttgatgcggttatgactgtcccggccaaggctatgctacccataagcggaatcaacattgcttttaaccgcgagttggtgggtccagctttggtgcctgcactcagattggctggagaagggaaagtgagatgggaaacacttgaagatgtttggtgtgggatgtgtctgaaacatatctctgatcatttgggttatggtgtgaaaaccggactgccttatgtgtggagaaacgagagaggagatgcagtggagagtttgaggaagaaatgggaaggaatgaagctgatggagaaaagtgttccatttttcgattcattgaaattgcccgagactgcgcttaaagttgaagattgtgtgattgagcttgctaaagcggtgaaagagcagttaggttcagatgatcctgcctttacgcaagctgctaatgctatggttaagtgggtccagctctggaattctgttaattctagcgcttgaagttgaacattttcttgaggttaggttcctttatcacttttaagcatattatcatgtctcagagatttacccaagtcgttttctttcttttagtatcatcatgtttattttctctttttatctaaattataagcatgtgtttttgagacactcaataatgtaacctgatgaaacccatctgctttgactcgatgatattaatatctattgcttagcttttttacttctggttattactcgcttttaccatagtaaaatcatcaaaagcgaaaatttgttactattagcaactaggtatattcacaaagatacaacaagcattagtcattcctttgttcaataaatgtggaagttacagggagtatacaaacaatacatgtcaaacaacctcgttgttctaggcactgcgttccacggttgaagatgatgatgctattggtttgggtgccaaagtattaagcaaagactgagtctctaaaagtttttccctaagcaatacattgtagtcgtaaagaagttgaaatttattcttgatatccattgcgtccacttctgaaccagaagatccttcaatgaactctgcaatagtgacagtagtggttggaggtttcaggtttgagatcatattactattataaaccaattaagctcaattgagatacatctattcttcacttctacttctaaaacctaaaccatatgacatagctactgctaccgaatcataaatcactaggtacaatgtggatgttaagttataagccatacccattggaggaggtggagggattgaaacgtcttcactatgagaaattggatgagttatactctttttatttgagaaattatctccatgagccagagaagaagccgaatcaaaagagctcagttctaaacttgcaggttgtgaaatcacattctggataaaaagagaaaattaacaactcaaaagggtcaaaaaaaaggaaaggggaacccaaaaacagatagttagctcaccttctcaatacttaagttaggcttcttgttcgccatgatcgattccccgtgttccgagctattagaagatgttggaggtctcgttaaaccacacattcctgatacctttgtcgttttgatggcatcatcgaccaatatgctgcaatcccatgtgtatgcaacatatcttctcagctaaatgaggattattgaaagagcaacttgtaataagaaaagaagccattgcaagaagaaaaaccaaaaaagagaaaggggaaaacaattactttatcccagtgatctagagctttacgacgattccttatcttcctgaaaacagtatcttcatttcgcagcttcttgatcctgtactcacactattcaaagagccaatttaccgccatcaggatatgcttaggaaggactagaaaactttcaaacactatagtacacacccgttaataatgcttaatgctctttcttatattcatagatcatgaataccaataaacattaagtaaaggagatgaaaaggtttcaaacctgcactagtaggtagaaaaatatgccaatactgatgcaatacaaaccaccaagatcggcaaggaagctaactgttaaacagcaaccagaaaaggaaaaagaaacttaagttagaactgaagctactctagtattctctacttgcacatactggaatgattcacaagaagtgattggacaaagtaaatttacttaccaggaccgagtatattttcatggtctatctcaacaatataagcagagagatagttgatgaacaatgtcgtattgagtatgccatctgttgaccttcccatagatgcctgaagctgagtagtgtctcggtaaacagagccagggataaactcgtgaaagagaggttggattagctttagatcatgcaaatgatggtaaatccgaggaaacagattaaacttcaatatattcccttcggttccacggaaagtaaccggactttcatcgagaatgcttccgtttctcagagtgccactaacaaaactcatatgcttctcgttaggtccattcttagacgtaaagttaaactgaaatccaacagcagcagcaggcgaatcaggaagatcaacgaaatgccacgagatatatatgtaatcgttggtgagacgacatttggtacatttgaaattcactgttggtcctgaagttgtattcttacaagtatagcttcctaaactagaaagagcagcaactttgaactcgctaaacccgggattacccatgaccacgttcccaataccgcgtaaattagagcaactcatatccgaaacagcggtgatgttaaactccaaatcgttctcgaatgagatcaaatctggagaaccagtagctctcacattgtgaacttcaattgttctcttggttatgatttgataaagcagcctgtgaagaaactgactaagttaacaaaaaccaaaggaagcactaaattctgaagttatcaaactcacgcagcgaataaaccaatgaaaacaatccagctcgcaacagaaaatgttccaccaagttctgttttacgttt

SEQ ID NO: 68172 - DNA, 640 bp, Arabidopsis thaliana landsberg
  unsure (1)..(640): unsure at all n locations
ttgctagcaaagctcctaatgttacgttttgtctaaaccctgtgtatatagtagtttctatgttgaaactttaaagttggggtttttgacccaggagtactgatgaaggaaccactttttgtcaccaattatgtagcactcaaattgctttagctaatggaatattgagagaaaggtgatcatagatattaacggataagtatatttacagtaacctacctagttgagtttttgtgggtaaaaaaagtagaattgcatggtttgttgcataaatcctgagcccgtggctcaatggctaaaacacatattgtcatgtgattggtttaacctaatgggtcccaagagccgtctgatgttattaagccaaaaaagaagaagataataatgatatatagtatgattcaactctcaggttaattataatctggacaagagaacttgcagaatcagtggttgataacaggatctaaacgctgatgtatgtattattttgcacgatcttgagtttgaccagtggaaaatttaagtatttgaagataataatgataatgattaaaaacacatgacangaagatctaaggaagagattctgagcatgaatgagaacaaactgaaatgtaccttattaagtagttatatt

SEQ ID NO: 68173 - DNA, 1468 bp, Arabidopsis thaliana landsberg
cacgctaagtattaaattctaattatactaaacacgaaataatttttacatggaacaaatgaatttctcccatcatagaattcatgacaattagaaaacttaaaattttcaagctgaataatgctatatatatagtgacgtggttttaatccgacttcaaatatgatttaacattttcatcaactgtttaaattgataaatcttattaacatgtattattaatggatacaagaaagaagtacatattggtcaaattaaatatctaatctaataataataataataataataataataataataataataataataataataataatactatagtctcatgtatatactttttggtttcactttttagttcaagaacattatgtaatgtctttaaaatatataaagatgagtcgatgacgcctagtttcttgaattttgacatcttttaagcaaggtttggcgaccagttgacttaagacaactatcttgtatgaaatatattcttatttagagaaaaataataatcgtaactactataagaatcttttttggttgtaaacttgtagcttttcgtaattaattgaccaacgcactccgtgactacaaatatctaaagacgagttataatcgatcctcctcaacattatataacatctatatcttcttatacatggtaaatcataaaatttggcccactatatatagatcgtatttatcaattgtaatgatcattgaattttcttagcattacactttttaaaaagttttagtttgaattagtagccgagccatggagaaagttgtttattaaaaaaaaaaaaaaaaaggtgttgcaatgtcgttacagctgaaatgtttgaacgttaggtagcatatgcgatacttgaatttatcatatttcatatctaactgcacacaaacaaaagcgtttctttgactcgattactcgaatataatgtattatttgtgctttgcaatcgactgacacttgactgaataaactgtttcttttgaaaaaaaaattccacaataattttgtgattagcaacaaacaagtaatgattttgatgattctagtcaaaaaaatgttaacaaccaaaaatgttaaaataggaagaaatatttatactcatagctagttttccctcacaatttcattcttcaacattcttttatatttgttacatttactaatcgatcacatccgtatagtactaacaaagatgtttttatttcccatttagaagtagatcagagatgttttgacttagaccacaaacagtaaacgtgatttcatttcctatttaacgggatgcatgcatgcatggttggacttggaccattgacaatcataatatccatatatatctgatgtatcattctcaatgttactgtataagtcgatttaaaacacttatttaacccattataactcatattttcactaaaaaaaaagaaaaaaagagag

SEQ ID NO: 68174 - DNA, 559 bp, Arabidopsis thaliana landsberg
  unsure (1)..(559): unsure at all n locations
tatcccgtataagagttaaaaccaagatttactcgacatgagtttctcaacgccgggccatggggccgctgtccttagggaagagcggatcaagtttgacgcgatgaatttacaggttggtggaaagctgcaactgctgataaccagggacatcaagcaggtacaactgttttccaatctgattggatacgtcaaagacgaatacctgctggtgcagattccgatggacggctcgacgccggcctcgatacgtgaaggcgagaaagtcaccatgcgcgtgttttcgggagtacacgtctgctggttcgataccgcagtcgtgagaacctttcctcctccctactcgttcatgcatgtcacatatccacgagaaatctacggaacaccactgcggacagccgtccgggtaaaagtggatataccggcgaaggcgcaactgcctatggctaacggcgatggcagtgaattcgacatcagccttcaagacctgagcgttgccggtgcgcgcgtgaaggcggtcagcgaaattcccgaatccngcgaactgattgaattgatc

SEQ ID NO: 68175 - DNA, 490 bp, Arabidopsis thaliana landsberg
  unsure (1)..(490): unsure at all n locations
gcttcatcacatcttcctcgttttacagtacatccttaaactgtcctttcggaaggtttctgtctggtcgttgaaatgcggggattgcttatcaccgctttctcctcctgcaagcaatgatctggccactactttcttgccgaattccacnnnnnnnnnnnnnnnnnnnnnnnnntagccatagcgtttgttggtaccattgaagctcctgctcacaaaagacggcaggcaaccccatgtagatgctgcaaaaccgcagggtatactgggccgggcatcatcaaaggtttcggtaagcgctcctgttaaacgctggtaacggttgatatccccccagggaatctgccagctgccgaatctttttgtgaggtcctggatggtgaccagcataggctgcagtaaagtattgacatctgccgtggctgcaaaacgttatgctttctctacctcgatcgcatcgatcgtaataccccagctgcgctgcgcctgc

SEQ ID NO: 68176 - DNA, 1967 bp, Arabidopsis thaliana landsberg
tatgtatgtaagagcagcctcaacgggaggtctaagtagggtactaaacacacaaagatctaaaaattaaaccatttgtttgtcgtagacgatatgtaatgaaccatttgttttccgtagaacaattgaatttgaaagcaattttacttgttctctttgatacgaaagatgtttaaactacctgtgtcaaagaaaatctagattgtgagaatgagacaagagaaagcaagtgctcttgaggatgaacctgacaagagacctgatgttacacaactgagctcttttacaatcttttcttgcctttacttggttgattttagtgcatggggttatctcccggagatcaattccacaagacaaaaagttagtagctcgtaagaacattaggcgtgattcttatctgaattagcctaattttggtacgattttcgaatggagaaagaaaaggtcggagatttcaaagcacaaccacgatcaagacgctctacgactatgttgattggcttgggatcttagaaagcaagagagtatagtttaatatcaaacttcctgaggacaatgtacggtaaagacaaactctcgatgtctctgaaagatacatgtctgcatcctcaggcgagtctcttcataagcaaaaaccagataattctcttttgtttcttcgtttttatgtttcgtatatgcatgagaatcttgagcgcttacgttagatataatgtagattggtactcatgaaaaaaaaaaaattggttgattatttttccaaacataaacgatatacttgtaatcttgaatgcacaacacatcaatatatgaaaaaatcattaaaatctcaattaaataaagagctacattatgattaaacaaaaaaaaacttcatggcgaaataccgataaatatagcaggagcgatatgctattctatagaattaattttcataattagatagttcataatagaaaatagttaagaagcagtaggatgaacccgatcatgataaccaatacaaccccatagagcaaacgcgatgaggatgatgaccataaggatggtggcaacgattgttacgatgaacgaagtatccatattgtttcttcaccgcaccaaattttttatttttttctaacctttcctcgtgtcttcttcttcttgaaattacatttatattgtaagtaaattggaaatagtggaagtaatttacattttgtcatcaagaaacatactagcaaattttttgaaattttacatttagtctcttaaaaatattacctaggagtaaaaattttgtaagtaaatcgggaaaagtggaagcttttacatttgtcatcaagaaacatactagcaaaatctggaaaattttacatttagtcacttaaaaatattaactaggaatatatataatagaaattttacatcttttggtattttgttggtcgtcaaagtaaacatgactatgttgattcgcttgtgcggttgtacgaagacaatgtactgtagagacaaactcttgatgtcgacgcatatctggagactgcagtcttagataaccttttcatcgagttggaaataattagagaaaccaaacaaaatgcaagaccaacttaattctcttctcttgtaattctggagcttaagttagagattgggtgttgtcatattaaatttgttaatcatactgattactttcactcacatttgttcttgttattgtttatgttaaatcgtcactcacattgtatgcacatgtcagattcagaccaatgttaaaagtgcattattttgtttggaagcgtgtgagaaaacaaaaagtttatgtacataacataaatccaaaagtactactcggataaagtacaaactttatatcttttaaactccacgtaataactcatttttgtttgttttaatcaaaaattcaaacgtctaaaatttcgtcttaaataagaaatgatattaagacaaatatc

SEQ ID NO: 68177 - DNA, 655 bp, Arabidopsis thaliana landsberg
  unsure (1)..(655): unsure at all n locations
cactgaaaatcagtagcaaaacccagagaattctcatttaaagtatcttgaatgaccaagaaacatgtagataagtgtacaacatccttactcgtcagagaaatgcaagtcaaaacaaccctgagattccatcttacccctgtcagaatgacttaagataaaaactcaaatggcagctcatgctggtgaggatgtggagcaagaggaacacttttccactgctggtggaagtgcacacttctaacactttggaaagcaacctgtgtatttatcagaaaattgagaatagttctccctcatgatctacctatatcactcctgggcgtagagtagagccaaaagacatcccagtataccatgggaatacttgatcaactatgtctatagcacctttattcataatacctagaaactagaagcaacctagaggtcccccaactgaagtatagatgacaaatnnnnnnnnnnnnnnnnnnngtaatattcagctatttaagaaggcatcatgaaatttacaggcaaatggatggaactcanaaatatcattctgaatgagttaactcagatccagaaagacatgtatggtacacactcacttataagtggacactagacataaagtatatgatgcatatcctacaatacacacacatga

SEQ ID NO: 68178 - DNA, 230 bp, Arabidopsis thaliana landsberg
ttaacatgtatggtgtatggtacgtcatatcaagcatatgtatctggtataggagatatattatgaacatagggatggtgaaaacgagattccctcgagaaaagaataataaagtttgttatgtatacaaaagttagaggttcgatcatgtgtttcttcctcttaatgataaggtttagtggacttctcgcgacgacgcgggcggctaacaacacattatcgtcttttat

SEQ ID NO: 68179 - DNA, 1395 bp, Arabidopsis thaliana landsberg
agtggttcaacgatactaccccatccctggctgtctctctgatcggcgatgattctctcatgcaagtccatcccaatggtatccgccacataagggaagatggacgcattaacgaatggagaactcctggcaagaggtcaattgttaaagttgggtataatcggcttcaagtggtcattgcattgagtgggggagagcttatatactttgaggcagatatgactggccagctgatggaggtggagaagcatgaaatgtctggtgatgtggcttgcctggacattgcccctgttcctgaaggaagaaaaaggtctcgctttcttgctgtgggatcttatgataatactgtgcgcattctatctctggatcctgacgactgtctgcagattctcagcgtgcaaagtgtctcttcagctccggagtctctgctattcctcgaagttcaggcatcgattggtggagatgatggtgctgatcacccggcaaatctcttcctcaattctgggctgcagaatggtgttcttttcagaactgtggtggacatggtgactggtcagctttcggattctcgctcccggttcttggggctgaagcctcccaagctattctccatttctgtgagaggccggtctgcaatgctgtgtttgtctagccgaccttggcttggttatattcaccggggacacttccatttgacgcctctgtcttacgagactctggaatttgctgcccccttttcatctgatcagtgcgctgaaggtgttgtctctgtcgctggggatgctctgagaatttttatgattgatcgtcttggtgaaacattcaacgaaacagtggtccctctgaggtacacgcctagaaagtttgttctccatcccaagcggaagttgttggttattatcgagagtgaccagggagcattcaccgcagaagagcgtgaagctgcaagaaaggagtgcttcgaggctggtggagtgggagaaaatggcaatggcaatgcagatcagatggagaatggtgcggatgatgaagataaggaagacccgctttctgatgagcagtacggttatccaaaagcagagtctgaaaagtgggtctcttgcatcagagttcttgatcccaagacagctacgacaacttgtctcctggaacttcaggacaacgaagctgcatacagtgtctgtacggtgaatttccatgataaagagtatggtacactgttggctgttggtacggtcaaagggatgcagttctggcccaagaagaatctagtggctgggttcatacatatttataggtttgtggaggatgggaaatctcttgagcttcttcataagacgcaagtagaaggtgttcctcttgctctgtgccagttccaaggaagactgctggcag

SEQ ID NO: 68180 - DNA, 550 bp, Arabidopsis thaliana landsberg
tctttccacatgcctaatgaattcgtcgctctgatctttttcaccatgattgataagcactagaggacgtgcgtgtatcgccattggattagggtcttattgttttcgaaacaatctatttgtcaaactactctctttttaagaaactacaccagttttcaaaatttccaactagatcaatctttcataattaagacaacgtttttccatgtacattttttcttctaaaactaacgtttcatttttccaaataaaaatcaaacaaagtctaaaaatcgatcataatttagttaaataaacgtttgctacaaattgccaaatgaaaaatcattaatagtttaatacacatatttaactaggcttgggcttaattgtgtcccttaaaatctgcttgggcttgtgtccctcaaaacttacgggctctgtctacctccactcccaagtattttctaaaaaccttttatacttcttacggtacgctaaccttaatattcactctccttcgtaatattcgcacattcctatgaatggaacgttctcctcaagactg

SEQ ID NO: 68181 - DNA, 572 bp, Arabidopsis thaliana landsberg
gcgaaacggcgccggctgcgcctcgcccgccagcacctagcccatcaaaccgcccatcgacgcgccgaccagcaccgggggcgcgggttgcgcggcggccatggcggccagatcatcgacaaactgctgcatggcgtaggcgccgtccggcgtgcgcccgctttggccatgcccgcgcgtatcaaaactgacacagcggcaaccgtgcgcggccaatgtccgtgcactgccttgccaggcctgtcgcgtctgcccgaaaccgtgcgcgaacaggactgccgggcggccatcagggcggacgcattcccacgccaacgcagcgccatccgggcgttgcagccgtccggtcgcgatatcaaacgggcgtttggacatttccatacggtcgagtatggttctgcgacaacgccactgtcaaccggcacttggcgtcatcttgccgggtcggcggagagcttgatgaccctcgcctgcccgcggcaaaaccggccaccgtgcatgcctgcgtggcaggccgtatggacgccgctgctttccgtgcggccatcgcgctaccatcgaagcatgagcac

SEQ ID NO: 68182 - DNA, 540 bp, Arabidopsis thaliana landsberg
  unsure (1)..(540): unsure at all n locations
atcccctatatgtttaatttcattccagttgaccgagcctaagtgtgatgggtgtgtttcgaagcccagatctccacgacactggctcgccctannnnnnnnnnnnnnnnnnnnnnnnnnnnnnnnnnnnnnnnnnnnnnnnnnnnnnnnnnnnnnnnnnnnnnnnnnnnnnnnnnnnnnnnnnnnnnnnnnnnnnnnnnnnnnnnnnnnnnnnnnnnnnnnnnnnnnnnnnnnnnnnnnnnnnnnnnnnnnnnnnnnnnnnnnnnnnnnnnnnnnnnnnnnnnnnnnnnnnnnnnnnnnnnnnnnnnnnnnnnnnnnnnnnnnnnnnnnnnnnnnnnnnnnnnnnnnnnnnnnnnnnnnnnnnnnnnnnnnnnnnnnnnnnnnnnnnnnnnnnnnnnnnnnnnnnnnnnnnnnnnnnnnnnnnnnnnnnnnnnnnnnnnnnnnnnnnnnnnnnnnnnnnnnnnnnnnnnnnnnnnnnnntgnnnnnnnnnnnnnnnnnnnnnnnnnnnnnnnnnnnnnnnnnnnnnnnnnnnnnnnnnn

SEQ ID NO: 68183 - DNA, 190 bp, Arabidopsis thaliana landsberg
tgaagaccactcgatatgaccagcacctgcgattaatcaagcacaaacctgaccgggtaacactgaatatgctttcttatgtgtatgctgggcgtgcaccatgcttttattgaacacattgaggtgatcaacgagaacagacagtagcgagctgtcattgcatggtcccatctttctgaaccttgactaa

SEQ ID NO: 68184 - DNA, 514 bp, Arabidopsis thaliana landsberg
  unsure (1)..(514): unsure at all n locations
cgccggtggccgcggtccggcgtgcggaccagcaccgaccgctttgagcttcgcgcgacgaagtcgccggtggagctggcggcgatgagctggccgcggccgatcacgatgaggtggtcggcggtgacggccatctcgctcatcaggtggctggacacgaagacggtgcggccctcggaggccagctggcgcatgaaggtgcggacccagcggatgcccnnnnnnnnnnnnnnnnnnnnnnnnnnnnnnnnnnnnnnnnnnnnnnnnnnnnnnnnnnnnnnnnnnnnnnnnnnnnnnnnntgccccatgccgagggagaaaccgcccgcccgccggttcgccacgtcgcgcaggccgacgaggtcgaggacctcatcgacgcgacgggccggcaggccctgcgtctgggcgaggaacagcaggtggttgcgggcgctgcggcccgggtgcacggcgcgcgcctcgagcagcgcaccgacccgctgcagcgggcgcttcaggtcctggtagggga

SEQ ID NO: 68185 - DNA, 1628 bp, Arabidopsis thaliana landsberg
tgccaatggtggacatcttaaaagtaaatcaattttgaatattgactcattaaaaccacattctccaatgaatggtctctttttcaccaccttaaccaaaataaacttgatttgcctgaaagtaggacctccacttcagtgaggttactttttaagaaagaaaaaattggcttagagttctccttttaagaaagagctcatagaatataataaagcacatgtaccacatgctggttgatttcttggccaaaggcgagaaataaagagctcaaattacagaagctagaatgactactttcccacgtttgtcatggcaacaagataaattagacaaagtacttgattgaaaatactaacctccactaagcatccttctatttcacgtgctttgctccacgcatagaaagttataatacagtctcccattgttatgcactgctaaaaacagtagaagtgggtcatatataggatacacatatgcttaacaatatggctgtaaatcaaatgaagcaccatgcaatggttgatgagtcagaaaatgttaccataaagatctaaagatgacaaaaatgaacgtcggtaaaatggataaccaattagagcagacccagtggtcttaaaagttgaacattaatcaccattcaccagagtggctggaagaaaattgacataaatttatcttgacatgaagtccaatcatctaataattgatttagcgataacgtaccacacaaagaagtggcaagaaagcgaattgtggagatcatgccattatcaagtgcaaactttttgacatccaatagacttaagccatttcattatcatatagatttcctttatttagtgtattaaatgatcaccaatgctgatcaagaataacggaataaataaacttcattagtaaaaaaaattggcaagaatttgaaccataggtccataaccataaccataaatagtgtgctttagatgatgattatgaatcaaaggcccattatgatatccaaggcccaagtgagtgagcaattaaggcttcataaatttgtctgcgccattcaagtagagttaggatttcagctgctcacggctagcctgctacacctccccaattttgtaataagaacacaccttcccctgtttccgagaaaccctaatctgaaaaactttgagatggggaaaagaggaagtagcagcgggagcgttcctattcggggatttacgaaacttgttacagaatcaagaaataagggattaactgtggaggagattgttgatgatcaccgttccaataaccgtgaatgcgttcggctgaaacgtcaaaccctcatgatcaaagtcaaacaaatcataaactcattgagcgaagaagaagaggaaagtgaaggaagtaggactaagaaaaaacagaggagagatgattcagaacagaggaattcggatttatgtatatcatcatcgccttattctgcttcatcatccggaaatgtattgacatcggaagataacatgcagtttgatgtcaccaatgatggtttacgtgtttcttactctaataaatccatgacgcctttttgtgccgatacaatgaagaaaatgaagatgaaaggtatatctagtgaagagggaagtaa

SEQ ID NO: 68186 - DNA, 281 bp, Arabidopsis thaliana landsberg
cttgcctggtgaagtggtctccggcttctcgcttccgccgttgaagttgaagattaaactagcaccggagaaacttacgattgtttcgaagaagcccttgaagctaaagattatcccaccaaagcccccacagtttaagaaaggtgggattaaacccttgaagttgaagattatgcctttgaagcctccagcttttagtttcgtttctgttcaatagtctgccgaaaattcttatttgtttctctagttacaattgtggttcacgtttcctaatgttacca

SEQ ID NO: 68187 - DNA, 555 bp, Arabidopsis thaliana landsberg
cggtagcatatactaattataataatagaaaaatagtaacaatactataagcttattcctctgtttgatttattcgtttacaacagggcattttaaaacttttccaatatcaaaaaaatcatcccatattcagtaattaaaccatgaaagttataaaagaaagaaaaaatgtacaacaagaaagtgaacaaaggaaaggtcaaataagaatgagtaaattattaatatatttttccatttctaaatcgttacacgaaatttacaattttcggttcgatgtagattaaaagaaaaacttctggccgaaacaccctccaggcatctactaatttaaaaagggtgtttatataaattaataatctactcaaaactcaggtgttatttgtgtaattatgttgcatgtctttcactcttctcccactgtcttcctcttccattctactaaacgttccagaaacttgttaacctgtacaataaaatggtttccaatttaataaattaattaacaataaacttcaaattatttatagaagagtaagaattaatttacctgag

SEQ ID NO: 68188 - DNA, 433 bp, Arabidopsis thaliana landsberg
tattttggatttattaaaacatatttaggtactacttaattgttttgctagttaaatccatcgctttctcatgaatagtccaaatatgtctatgtcatttatatactatactacaaaacatgagaaagtgatcgccttaccttgcgatggggataagagaagagagtgctcagttttttttttctcacatgaggatggtcccatcatgttttcacatcttttataagtgttcattgaaacttgtaccatcaacgtctcttcgttatgatatcattattaaaactttcattatccttttctgcgatcgattggaaactttggatcttgggtttagcgggaggccttatcacgttattaatttacttcattagagtaatgattcgaagagcgcacaaaatggagtatagtttttctttttctagttacctataga

SEQ ID NO: 68189 - DNA, 1734 bp, Arabidopsis thaliana landsberg
ttcgagaattacgaaaccagtaaattctatacagattgtttatccaattaagcccaaaccaatccagatttcatacagtgggtcaagaatacatcatggcagatttgatacatcataatgccgttatgatatcaagcccaaactaagcccagttattttttctttcttttcttgtcattccataaaaatctacataacggaatccagaatttgattaagatcttattccgttatgttccagataattagagtgtcagaggatccaaatctctataattaatgaactttatgttccaaattttctttctctaacttgaattagaaaaaaagttaaaacttttattaagaactaaatatatcaataacatttacagtataattttaaaatttagaatgacaaaagaaacattatagaattttaagaaatgatttgggaatagacaaatcaataaacctcagactattatgagattggttttgtctaaaaggaaatttgcttaatcaggtaataaactcaacaaagcaccttctaaacaaggagtcatccacgaccgtccgatcagattagtacatagaaacccttaagatccaacggttaaagatttaagacagaaggacgaaatctgtaatcatgagtttagtaaaaaactaataataaatcaatcagtcttctcccgatttactgcgactctgcgaaagctgcaaaaataaaatcagccgattcctaattttttttttatttgtcttcctgtgaagaatgaaaaagaagaagagtacaacaagtactaagaagacgaagaaggtttcaacaatagcttattcgcagttttttcaattctggtaaaaaggcttcattaccattttatcttctactcttcttcttcttcctgttttcgatcttctgtctttttcggtaatttccgaatttgtgtttcaagaccgtatcatcttatgctacgattgaatttgttggaattccagttttgggttcttcaccaagctcagaatttcaaactgtcagaattgtttgaaagagtcaaacttgaactgggattttttttgacttagggttcgtcagatgttggatttgttaatccttgcagagtcgtttaaggggtttataaaatgctttatttataatcctaaaaagctatctactttctgatttttttccccaattcttggtttgaatcctaaagctgtttcctgtgctataacaggtgagtgtttagcactacattgctcttgctctactggagattgcgtttgtgtgttacgagagctagagttgaattggctttggtcaacacaatggggacttgtggttgctgacttttgtgattttcagttttctacttggatttagatggatgtttcttccattgtgcgaaatacaaccctaactgatcaagatcctttgttaatggaccacggtaaccgcgagcacatcgttgacattacaagcaatgacgaggaggactcttcatcaagatcttctctcgatgagcttactcctcaaggtaactcacatcaaggtgaagagacagtattatcatcatcaaatgctacacaacaacacccaactcatgcatctcctcctcagcaaagaccaccttcttctaggagaggagataacgggaatggtcgccgtactaggagtccattgaattctggcctctggatctcagttgagttaagttgtcactgtcgctcagattgttgcagccattgtag

SEQ ID NO: 68190 - DNA, 167 bp, Arabidopsis thaliana landsberg
tgtgcggaaggcatacgaagtagtccagtaaggattcaagtcaggttgcctttgcatttagccacttccagattctattccactgatgcgaccacccggacctctctggctaacaccattcaaaacctgcctaatctcccttgcataccactaaccaacccaatcta

SEQ ID NO: 68191 - DNA, 528 bp, Arabidopsis thaliana landsberg
acgagagaccagtaaacagtaaatcctcgcacagaattttaaatgtggatgcacgagtatggacgttatcatgggtggatgggacttgcccccaagagatgggaactgagcagcatctccaatagctggtgcagcgtcattacggtaaccaccagattcgccactagaaacacctccacggtcacgaccaccacgtccacggccaccacgacctcctcggtagtagttcccaccctctgctggcttcagaaactcattgatgctcacagcctgtttacaatcaggaaacacatcaataagcaaacttactgatttctacaatatgtttcaattcagacaatgatttaaaccttcttagccttctcttctttgtcatctttgcgtttgtccttatcaggaccctgtgaaataggtaaaagggaaggtttacaatcattgacgcacgttaatagaccacaatgaagaaatgatacatgatatgtcttaccagctggatgaagatttcatcattagacttcttggttgaca

SEQ ID NO: 68192 - DNA, 550 bp, Arabidopsis thaliana landsberg
atgctcgatgccatgtgcctctaaagcatgctgttgaacccaaaatttatcatctttagaggatagatttaataattgtgataaaacggaacttttgttaagttatgaatatattgtgtataatacatttatgtattaaaaaattaagattttcttgtcaagaggtatggtcattctcttacattaatttaaactcaagaattttttatatcatttataccaaatatgataaattttattaaaacaatgtaatttcgatatcgagccttattaaacgatgaatagcttcaatcaacccataggattctaggaggaaggctgaaaaacctcgtcgtaaaccctttatcacatgtagatcaataattccatcatgaagttggaacagttaaaattaccggaaccaaaattatttctgctggctaaatttgaaccccgaatttatcattctttaaaggaaaaatttaatcattgtgccacagtggaacaccttgctaggtatgaatatatcgtgcatatatacaggtatgtattaaacttcttatgactcatt

SEQ ID NO: 68193 - DNA, 746 bp, Arabidopsis thaliana landsberg
aacaatttcaaaacatgagtgagcatcgagggcatctttaagatgtctatttttgttgaggtttttatggttctaataaaatttatgcgttagaagaaaaatattttgaccctgatggatagatttatgcattgctccctaacttctatctgaaatgctttatctaaaggaccccttccttgtcttttctttggatcagactcgcttgtgttaggaactttatagctcatatcataatcaagagaagaactacatgattttcttgatgacgaaagcaatgaaacttcttaaggagctgctcattttttcctcttcttacattcgttctttgcgcctagttttggtgtaacggctatatttcgattcatcaatcaacaaactttcttaggtgagttttttgttgacgagtgactttcaagcatcctttaattcccttaactccctcttgtaacaaatgagtcataactctactatctatgagatccaacgtataaattattgtaaattttgcattcaaatctctatgatccttctcctcccaacttctcaatcttttccacatagatccacataggtactttatcatccacagtagatgactcatcaatatttagaggatcttgaccttgagacatactagcgatatccttatatatctagaaaagaaaaattcataccttctatgcatttaaacagtaataataaactaccaacaagtacatatatattaagctaaaagtgaaaca

SEQ ID NO: 68194 - DNA, 220 bp, Arabidopsis thaliana landsberg
  unsure (1)..(220): unsure at all n locations
accccgggcaggagtacgaaggaggcggcgagaaagacaacacggcctccaaactccgaangcccgaggaaacagcncggaggganttccgtcaaacagggcaaaagggacacgcccccccacggccgcggngatgaccaccgtgacccaaaaccaaagaaccggccggaagacaccaaagggacccgaaaggaaccagacgccggtcccaacccggaag

SEQ ID NO: 68195 - DNA, 478 bp, Arabidopsis thaliana landsberg
  unsure (1)..(478): unsure at all n locations
aaagccggccattgcgccctgccattccccttgcagacatttcnttttggaatcgaaggcgtcgagccggaggggaccggtcatgcaaaacagggaatctcgcggccgtagccaggcgcggcaggaaatgctcctttgctcgtcgctgccgtaatgcaacaacagctcggccgggcccagcgaattgggcacggccacggtcgaggccaccgtcatcgagcggctggccagtttctgcaacaccgccgaatgcgccagcgcggaaaactccagaccaccgtagcgcttcgggatgatcatgccgaagaacttgttctgcttgaggaaatcccacatgcgcggcggcaggtcgcccagttcgagggtgatctgccactcgtcgatcatcgcgcacatatttttcaccgggccannnnnnnnnnnnnnnnnnnnnnnnnaaagctgcggtcggagctgcgccagcagggtctttcacttc

SEQ ID NO: 68196 - DNA, 447 bp, Arabidopsis thaliana landsberg
ctacaatatgcggcaaaaccaaactgggattccacgaatgcagcttcggctatgattgggcgtcactttcgggttttatcaggccgccgatcaggaaccgttgcaagttaccggcctggcttccggcgaatatcaactcaagatcaacgggcaaacgattggcgaattttccgccgatcaattgggcgccggcatcaatctggcggaactgaagacgccgatgctggagcagagttatgacgtcctggatttggtgtggcaacagacgcaatggcgtttcttcgcctggcgcggcatccagaatcagttgtggtttgaccaggatccggcggtgcaaaacggggccagggcgctcatcgccgcgttggaggcgcagaaggaaggcatcgtggaacaacaatacgccgtcgcccagccgcatccacgcattacgaattgacgcccgta

SEQ ID NO: 68197 - DNA, 352 bp, Arabidopsis thaliana landsberg
  unsure (1)..(352): unsure at all n locations
aaaaacaaccaaagcggagnngggcggaaacaggacaaaggnacacagacccaacgccaaccacgggngacgagaacaccaaacccaacaaggaagcagacaccaaacaaacnggccgggcacaccacaacagaaaaggaggggcgaccaaaacgaaccgacgacaccaaaaacgcgcccggacaacaaagacccacacaaaggcacgaaagccgaaaaagggagacgcggaaaccaaccaaaacaagcacaaacacacgccacgaacacaaacccgaagngaccnaccgccaccgggaggaccaaacaccgcacaagcccgagaacaacacgaaccncccagccaaaggaa

SEQ ID NO: 68198 - DNA, 2027 bp, Arabidopsis thaliana landsberg
gggatctacagcggctcgacattggttggtctctagctcaggagaggcatgagctttcctttgccaactaccatcaattcgaacatcaaagatgacgccgtgattattagaacctgtaacatccagatatgcaccagagtctggttatggattgttcatgacaaacactcttctaatttgaagattgatttagtaattggtcaatgctagtttgaatggtcagaagcaagcttacctgataggttccataagtctgtttttgttagttgtgtatcatctcagtctatgtgggatatattcatctcttatgctgtccataggtctagatcatcctcataattgttcccatcatgtgtagggccttttttcaacatatgactaaccaaatcttcaagaaccgggtagatggtctcaaactcgctctgtactattgatcctgacgagaatttgtactttttcttcttcacttcaatccaactgcttccagaaactttcttcaaatcctttttcttggctaaagcccttacatttgcagattcttcccatcttccaccagcagagtagatgttggaaagcaacatatagcttcctgtcctctccggttcaagaacactaagttgtgatgctataccctctgcaatgtccacgtttttatgcatccggcaagaattcaacagagctcccaacacacagaccttgggctccataggcatgttcttcacaatctcactcgcttctttcagaaagcctacacgaccaaggagatcaacaatacatgcatagtgctcttgttggggctctaatccaaatctcttgcttatggaatagaaaatttcgcgtcccttttcaaccagccctgcatgactacaggctgaaagaacagctaccaaagcgatcccatcaggatgaaacccagaacttatcattcgatcgaacatacttagagctttctcaccaaacccatgcataccataacctttgattatcgagttccatgagatcaaatccttatccctaattgcttcaaatactagactcccctcactgagtaacccacattttgcgtacatattcaccaatgcattctgaaccagaatgttctcgctcatcgaggtccgtatcacatgcccatggatctctcttccgagattcaaagctggaagctccgcacaaattgatagtatacaacaaattgtcactgaattagccaatactttggaaaactgcatttgccggaaatattcaagtgaatcgtctcctcttccttggacattacaacccttaataacagaggtccatgtaactacattagcctttacgttacaaacatgattcatttcctccaactcagaaaacaatgaaagagcctcgtcgagtttaccagcatccacaaacgatgttatcaaagaattccagctctctatacctttgtttcttatttgccggaacaagtgttctgcatctttaactttcccttgcttcccgtatacgtgtatcaatgcgttcctcgagggcaaatactcttcaaatccaccttttataacatacccatgaactttctcagcaatacttaatgcttctaattcagcacatacagaaaagaaaacagcaagagcttcaccactaactgcatttccactcatcctcataagatgaaaatactttaaaacatcttcaaacttcccacactgcgaatgacaagacaaaaccgaagtccaagtcacttcatctggtttaaactcttcacgttgcatccattcaaaaatcttaacagcactttcacaatcatactcttgagaaaaccctttaatcatgacattccatgacatacggtttctcacaggcatttcaacaaacagattgtaagcatctcccatccttcccgcctttggatacaacgtaagcaactcattaaccacatgaagattctctttcaaaccaatctgaataacttgagtatgaaaagccctacaccaaccaaaacgacctaagtacctacaagcacgaaggatcaagggcaaaatata

SEQ ID NO: 68199 - DNA, 590 bp, Arabidopsis thaliana landsberg
  unsure (1)..(590): unsure at all n locations
taataacgccaaaaacaaaggaatgtcgtttcctttactctttctctcctcannnnnnnnnnnnnnnnnnnnnnnnnnnnnnnnnnnnnnnnnnnttccaaatcgagtagctagaatatagtcaccgctttttatgtgtgtttgtcactttcaaacatcaagttcgtcatcacggtataattataccaaaactataagctttcgttacgttactatacatacccgaactcaagttttttcatgttcatacccaaaattgtagataatgtcgaaaatctacattgatcgatcgtcaaatcattatcaaaccataaacaatgccaagtcatctcctgagtcacatatatatgatgcgtctagctagagcattgttgttactatgttgcataaaaacggtcggttcaattcttcattcttctcttctactaatgttgcgttgctcaatttcttactctaaacacctagttttacaaaagaggtctagtaacctgttgacactaaaagaaaacatccacaactctatgtttttcttctcaagtcacacactcttgaacatngttactactatgcttcttattagacattccaag

SEQ ID NO: 68200 - DNA, 662 bp, Arabidopsis thaliana landsberg
gaaataaccctcgttatgtcttcaactgggctgacctattcagatgtataaacctattaacaaggctgcttctgatagattggtcaaatttgattgcaagtaatctaattaacgtttctacaattaagttcatgatcatttgatcattttgatttcagattgacacaaaccttggaaaaaaggagaggaacgaagccagaggaggaattgggaagcgttagttgatttaagaggggaattgaagaagcttacctgcgactgcgagtgaaggcggcgaagagcgaggaagaacaacaaacgccgtgaagctagcttttttgggtttgggccaaacgagattagtttctaacagatgtttttccggacccggaccggtaatacccacgatccgcttaattatttggtccctgtctagctctaaaatcccggtgcaaacgaaccggcaaaaccaacgacctaacggttcggtattttgtttctgaaatctgaaccctccgatttgttctttttttttttttctttttataatgcaaacaattgatgaaaaaatatattatgggtcccaaaggtactccccggtttttaatatttgggaaaaaggggttttaacatttgacgccaagttcaaattaccgggtttgtgccgaaaaaaaaattttttt

SEQ ID NO: 68201 - DNA, 322 bp, Arabidopsis thaliana landsberg
  unsure (1)..(322): unsure at all n locations
caaaacactgtaaaaactcccgaaaacccaataaaaacaacgcctcaagcttcaaagaaacanacaaaggaaccaaaagcgggctgggggaaaatagacaagtacccaacgacccacaaagattttaagaggctctcaaatgagatacaagggcccggaacaacccaacaaggaatgcaaaagagcccctaaaacaaaaacaaagaacggaacggcccaaacaataccccgaaaataaaagaacacaaaaaactaacgaagagaccacaaaacaagagggaccattggtcccaccaccaagaaaaagagagcgcaaccaaca

SEQ ID NO: 68202 - DNA, 466 bp, Arabidopsis thaliana landsberg
  unsure (1)..(466): unsure at all n locations
ccaaaacactagaccaacacagaccccagaccacacaaagtcttcatgtctcagccaaagnccgnaagaannccagggggtgggggggcaaacaaggaaacaccacccacgcccacaagagcgggatgcggttgaagtactgacacccaagcacacacatgacaccaaggcaaactcgaccccaaaacaccaaccaaccacctaccggcagcacaaagcccacagggagaagccaaagtccacaagacccccaggccccgagtcccccaacaaggagacaaatcccacgcccccaagacccggtcgcggggcaagtgcttacactcaaccacacacacgacggacacaaagggctgctgagacaatgcccaaaaggcacctgatgacacggcagcacgtaaggagccaagccaaaagggggcaacggcgaccaaacaggagatgagcagagaacaccaaggcaagc

SEQ ID NO: 68203 - DNA, 577 bp, Arabidopsis thaliana landsberg
  unsure (1)..(577): unsure at all n locations
aatgcactgcccttaagactccacattgccatgatcagggccgaattggacgatctgggtaatttttttaaagaagatgcgcttaagatttaccgaccagcagatggacaaatttattgcgttttaaaactgatccaggtattcccctcatttccaaatacaaaagtacccgggtnnnnnnnnnnnnnnnnnnnnnnnngcgtgctgaccgcatcagcaggactgtcagataggctagcctggtcatcaagcagatagacccggtcatattcaaccgaaggccatgttttggttaacagtgcaggaactgcgcccatcagctgcagcatcccggtaccaggctcataataaataacggccctggcagcagaaggatcatcctggggttctccccctgcggcaatgatcagttcatcaaggtcggngcagcgttcattnttagcattaagacagctgacggttaccttatccataaacttgatcttatgctgcacgatctctatccgttccgaaaaaagctccccgagcgtctcatcacccatctcatntatcagtgcatttaanaaagacataccga

SEQ ID NO: 68204 - DNA, 551 bp, Arabidopsis thaliana landsberg
tgtgcaaattctcctgttgtggggaacactcttcgcagtagaagttatctggctttttatcttcctctattgttgttcctatacaagaaggatgaaacctgagccaatgttagtttgctgtaacatcaaaggcaactgacaaagacattcgaaacaaaaaaccttaatcctctctttacaaaaaaaaaagtaaaaagattaagcttaacacttaacagttccaacttccaagatcaaacgatcactatttgtttcagtatgacttcatttacgttacttgtgtcatatagcaagctaacatgggtgaaagacccaaggcacaaactaagaagctgcagaaaaacccaaaccttaacagcgactcaatcagtaacgtgtaagaaaatttgaaaatccgcaacatatacattagaatgttaatcacagatattacaaacgttcagactagagtatcagcttatgtttctattcatctgcagtttcacaatatcagataggacaaaacatgaacatgagttaagaagagcattcaccgaagtaaagcatgacaa

SEQ ID NO: 68205 - DNA, 504 bp, Arabidopsis thaliana landsberg
cggagaaggtcatgccgaaacgtgtttccttgccttccatattgccgccggcctgattgtggcttggcatctgatcgatatgcagtgcggggaagttcggattgccgccttgttccatggcggcgcagaaaataaggagcggcacgaaaatgattgtcatggccgccagtatcgaccagccctgacgcttgtccttgaccatgacgccgaaggtgtaacacaaagccaccgggatcagcaggatcgacaggacttcgatgaagttggccaggggcgtcgggttttccagcggatgcgccgaattgacattgaagaagccgccgccattggtgccgagttgtttaatcgccacctgggaagccgccggaccgacggcaatcgtctgatcaacgccctgaagcgtatgtcctgtcacataggcatcaaaggtctgcacgacgccctgtgaaccgagcaggatcgcaacgaccagcgccagaggaagaagtatatagatattggcgc

SEQ ID NO: 68206 - DNA, 475 bp, Arabidopsis thaliana landsberg
gataaaataccccataaaacacttgatcggatcaaggggtccacaaatacacccaagcgatcatatgaatatccgtgtcccaaagtcaccgtgcggggatgaatagacgaatcggtgcaagacaagatgttgaccctattatgcgattcggaaaattcatcggagatgttggcgatatcaggcgattcggaaaattcatcgaaccgatggtagtcaagaacgacaatcatataagattagaattaattctaaagaaggaagacaatgtactttgattcattagcgaataaggctttcattgcaaaagcattgagtatattcatttctttaccactcatggttaggattaatagacattctccctgattgtttggtttgatatgaaattatgaataaatgtcttatacgttacatcattttattgtaactcttgatttactcattcggggttatcatagaagtcctttataaagac

SEQ ID NO: 68207 - DNA, 343 bp, Arabidopsis thaliana landsberg
accgggccacgagaccaacttcggtcgacgattcccaaacccgaacgccctcaccccccaaacaacgaccaggacgagcatggcgccgggcgggacaacgaaaacagggccccggcccacgactacaactcctggacgaccacccctcggacacggacgaggaaggcgcggacccggacaacgacaacaaccccaggccgaccagcccgcgaacccgacagagcgccaacgaccaagcaccggcccgggagacgacgccgcgcacccgggcgaagaagacgaccgacccgggggacgaaggccaccacaggaagacgaacccgccgaacccggcgcagagggc

SEQ ID NO: 68208 - DNA, 348 bp, Arabidopsis thaliana landsberg
aacattgggacctgctacactatcgaaacccatgttttacttttcatgcaacccgaggcccgattgcgcgggcgactcgatcattccaacaacccgcaccactaccatataaacattccactccacctgcacaacatggccaaccaatataactaatgtcaaacactgcaacgcccgatgcacgacgcccccgaccacattcagaccacaacgcaaagcaaccggagcgtcgccgacatcgccgccagccagcactacgcccatcacaacacataatccatgccgacctcacacccgcagatatcattatcactacatacagtcacatcaatctgatcgaatagaaca

SEQ ID NO: 68209 - DNA, 117 bp, Arabidopsis thaliana landsberg
tgttaacatagcctgtttacaggtagcagtgaaagtcaaaagcgttgacattccagaacgcgacaagtcaaactcagagaggttttctcttcacgtcatctataggtttgtatctat

SEQ ID NO: 68210 - DNA, 571 bp, Arabidopsis thaliana landsberg
gccttggacgtcaataaaacaaaaatatcatatcattacagggctttcatttttgcaattaacccacataattcccacagggttgtttaaaaggcaaggtaccaccaggagctgtatgcactaacaaagttgcgtcagccagtttttctctttccgccgcacttttgtatttgctttgtttgtaccacattttggcttccatgggcagatgatgtctgtgttatttaaataacaacgcattattataacacaacatcagttaataaagggggaaatacgcaatgtgactcaaaaacgaacaacattattgtttgattttccaaatttacccaacaagtatggcgaagtacgaagtatgatgtaattgtaatgtatccgaaataattagcgtaccataaacaaataattctgataccatatgaacatgtattataccacagaactacattaccgcgcttacctctttccaccaccgtttatatgaattaccgcttgggtttcgcgcgttaatttatcttgtagcccgttcattggcagaatttctgtattaagttgtgatagtagagtttaa

SEQ ID NO: 68211 - DNA, 333 bp, Arabidopsis thaliana landsberg
aaggggaccggagaccgcagaaagcacgaaagccagaccccggcagaacatgagcgcgaaagggggagaagaaaccggcatgtttttataaagactcacaccttttattgtggctctatgaccccatattgtaggggggatctggaaagatatgaaagagctaccttcaaaccgcacatacgactcttatcgattccggctttacagagaattatatatgcatctcgggcagtccttatgggattgcgattactcacgagaaaatagagaacccagatccccacattgactgctaggattggaaatgctgtattatacatatccatgccattg

SEQ ID NO: 68212 - DNA, 643 bp, Arabidopsis thaliana landsberg
  unsure (1)..(643): unsure at all n locations
ggttnataaaacaaaaccaaatgatttgtcaaataagccaaatattggaacggttcagttaaattgttgttattttattgaaatatatattagtaacggaaaattataatttataaaattttcgccgagagacgtgactatagataattaaatgttataaagttttatagaataaaccaaatttacaatagtttgtccagtaaactaaatattgcaataattcaactaaatggttataatagttcgtttataaaaagttacgataaaaagttgcagccatagaaaaaaattattttggattgcaattttttttaaaaactcaattgtaatatatttttgtagtttatatatattttcacgaaagatggtgatataaagacacaatacacaatacaaatatatttattgagattgttatattatatagattttctttctatttagatttgagtgatatatcttacatctagaaaatggccaaaatcaacctcaactctatctatagagtctttttagaaccctaactcttatttcttttattacacaatttaattaccaccttaattatgaactgttgccacctcccttaccggcttggacttcttgattttgatctgaattacaatgtcccttgtagcccttt

SEQ ID NO: 68213 - DNA, 486 bp, Arabidopsis thaliana landsberg
tcgttatttttagatttcactttccactcttacatattggtaagatttttttttgctttcaaaccattaaaaacctgttaaacgattaacttgactcaagacaaagccattgattattgactcatgaatctagtgactcatgatgaaggagacgaacagtaaatattcatttgattattttaggtaaaaggtagttcagacctagtcatatatcctctaaattcatatagtgatgcaagtattttgcattacttagaactttatattattgatcacccaacacatgatttaataaacgccatgaaatgcatgtactatatcaaaatgtttctgaagcatatagttgacatgagaattttggattggacttaagaatgtgagagttacctgaaatgtcaatttttttcctttgttaacgaaaactcattggaacaattgtatcccccttttggcagtatataaatatattgatgggcccaagtagct

SEQ ID NO: 68214 - DNA, 2430 bp, Arabidopsis thaliana landsberg
  unsure (1)..(2430): unsure at all n locations
gacctctctttcagacatgggttctgctcagacccatctgttaacctagaggagttgggacctgatttcttctccacattcagatctctcattatcctagaaaaactctcttttacagagttgttaggtacagagtacatgttactgacttgaggaggaggaacactgtcgttgcaagttggtgtgatgtcctcaatgtcggagtcatagtttttaggtttcttctgccgtcgtttctttgggggagatgtcaccggagctacagtctccatcttcttcnnnnnnnnnnnnnnnnnnnnnnnnnnccagctccgggacttcactctcttcccaatacactccattaaagcaaacacaaagatctgaaaaaagaaagactgttagaaatctagagaagacgacaatggggtctgtaaagaaacagagagagagaaaggtaacgaacctttagatgagaaaaaatcgaatctttcactcactcacacgggtctgagaagaagatgatgaagttcttgagtttttagagaaattttttattttcactggtttcagaaagtggaacagagagagatgggcagagagagagagagagaagggcatgaagaaagcgtgatggcaaagccaaaccatgctatttcaggaggtctctcataccgccaaaacggtactatttttccacacactctgctttttggttttggtcaaaaaatttcttacatttcgtaaaaaaaacagctcattaatcagtttccatttcaagcattgtttttttctgttctaaattacctttttgaccacactgaaattacagagtcaacacgtcactcaaaactgcaggaagagaagatatttcattacaagacaaacaatgtgtaataaattatgtcttattgcttctaatttttttttctgtgttttccttttgcttttgttttgaaatgtaatctttttagtttaccaatctagatttgttataacaatttaaatgaaaaaaatcgaatcatttactattttataaaagaatctcaaaccctttctttgaatgggattggagattggagtattattgaaatcaactaccttcctcttgctggcatttaattccactattagacctttatattatttttaaactaaagaatattgtgtttgaaagaaaaggcaaccaaaaatgattacttacaaacatatacaaacaaaggtttttagaatataaagtagcaaacaacatcattccaaggagagaaaacagagaagaatacttgtcattaatagagagaggtatgagttcttcacgcaaagtctttttgatattggaacttggtcattaatttacatcaccaacaagttctaaatatgatgaaagaaaatttatgtaccaacttcactttaagtgcccaccttttatctaatcgcagtaatgaacacatcacgtcctatgaggctttgacaaattaggaaaaaggctaaactgtgttagtcagaagataataacttacagaggggaccattattaatctcctaagtttatgtttttgtgacaagttacaaattcctcagaggattattagagaagcaaatatcgaaaactgtataacaaaactaacttcttaagaccgtaccgtcacataacatcaatgagccattaccatagccgaaaccagtcagctacacgagtacaagacttattatggtatgtagtcatctcatgatttaagggtataatgaagtatcaactgttagtcccccaagatcctaattgcatatgatcagaactctggactcgtttcttaagtgaggatttgcaaagctcaatctttgtcattgcgattatgttccggtgacgatgttcaaaatgtttccggggatttagttccatcactgtctttcttttctatttgtttttgtctttaacaatgtcaaagtcaaaatctcaccgattctgtaaattccaagttatatgacgtgtcattgtattattggtgcgagcgatagcacaacctttgcgtctgcgtcggtagcgaactcttcggaaatatataatctgtaattaaaatgagactaatcccaatttaaaatcaaaaacctttttatttatttttgttttcctatagagatttcttagaaaagaaataaattacttctcttttatttttcattcggtttagctcgtggaactgaatctggtgtgtttgttgatcagagtaatacggacattgcaatttttctaaatccggcgattaaatatgggtttcatagtcggcgttgtaatcggactcctcgtcggaatcgcaatcatcatcggctttgtcaagttggagaattctcgatccaagcttcgctctgaacttgtgagaccccactctccctttttcggattgaaaatttcgattttttttcttcttaatcgggatttntgttctgtttata

SEQ ID NO: 68215 - DNA, 1558 bp, Arabidopsis thaliana landsberg
atatcctatatatgattgaaaattagatatatagatggataaataaatctacagcatatgaaatctatcaaaaatttcaacagcaaacaaaaaaacataactgttaaacgccacttttaatttctatatcaatcattatagtaaagacgatctgcttcgaatatctcatatttactgtgtttttgagaaatgtatttatctgcgaccttggtttaaatcaatagctatagtttgcaacttaaaaatgacctttcaaaactatggaatgacgaaggtagactagttattagaccgaaaagaaaaatcatctacacgatcgtttttgtgatcgagtatccttggttaggtttacttaacttgtatttgacttgtaaacgacaacgacttgtgtgacaagatctatcgaataatgaaatttctgttattgtgagtcaaatcttagtaatatgatatgagataaatcgagctaacaaggatttggaaaatggtggctcatcatagaaattagggttgcgcgtcttcgaaattatgagtatggcgtaagtttacaacaaattaacgcattaaccgaacaaaacggaacaggttgtattgctcttggataaagaaaattagaaaaggattaaagagctttaacaataaattagtataaatacttcaaagatagttcgtgctcgtacaaacaagggccattagccacagcggcagcttgagggtcaaaactttttcaattgtacttaaatatacacaaaatacagttttaatactaaatttgtcgttttcgtataaatcaatttcggcgcacggaagtgggagaatttatgttaaacaacaataaattaaacccaccacatgggtagctgggaaaagttgtaagaaattggaaattaacaatgcaatttaaaattgtatatgcaattaatactataaaactatagtctaaagtttctctcaccagacccagttaagaataactgaagatgctttttgctcactgaggaaattaatttaattgtcataaacaagtatttttataagaaacgaaaataatgtaatacggcgtaccgcaccaaaatgcttatttttgtagtttacaaatgcgtccatgcttccatgtgagcgaatgtccccatctccagttattattatcaaaattttcttagcaataagcagccaacagaattttctattttatattgcgaaaaaggtaaatctaatgataaatgtgtacatttaattatctctgtatcgtacattttcatgtgaccaaatgcatgattaaccagtatcagcattgttactgtcggtctaatctgatatactcattactcttatccttaaacttttcagattatgtctactaatagattatgttcttttaattacattgtatagtttgtaagtatactataacccttattgcattgcaattagattatttaagtactgtaagaaatttatttcatcgcctataaattgttgaactacaaaaaaaaataaaaaaaatcgtgatcaatgatccactgtccacacctagagttcctatcactcctacata

SEQ ID NO: 68216 - DNA, 565 bp, Arabidopsis thaliana landsberg
aaacacatgttctggtaattaagaacttattcaagacaacctcatttttttttgtcatttagactacctctgttaactttaaactcaatcgagtaacattgaaaagaaaactcactaaatttaaatagagaaacttaggattatgatgatatataaaacaaagatttaacatttattcaatatagaaaaagtgttttactcaaaacgaaaccgctgtttgtttacaaaatattttagatgcattacaacaaataaactatcaactcgttctagcaagcgaaacttttattgctatacattgaccgagaaaattcattttttttctagctgtatactaaaagtcgaatactaagataaataaattagatgatgaaaaaaaactatgccatcagcccatcactcattaactttatttataacatagaaaaaaacaacgtctaataaaaaagaatgaagaactcaagtctcaacgtacaattcataaaacaaaacataacaacaaaaaactatatataagcaacccaagagatggcttcatggcctttcgtaaaggacgatatatcac

SEQ ID NO: 68217 - DNA, 493 bp, Arabidopsis thaliana landsberg
  unsure (1)..(493): unsure at all n locations
atcttcncgaaaacaccgggcagggagtccagcgccgggggtccgttatggttatccgccaggagcgccggtttccagggggagggcagatgctgccagacggcctcgcggatgtggcgcagggtgcctgccgaggcgaagccgagcaggctgacgccgcggatgatgaagggcatgacggtcgtggacaaggtggcgctggcggcgaggccgcaactggcgacattgccgtagggcgccgtggccggcagcaacgacgccagcatgttgccgcccacggcgtccatggcgccgccgaaacggaccgaaaccatgggcttgccgggggcatcgatggcgttgcgctccaggcaatcggttgcgcccaacttgcgcagggaatcgaagcgttcgcgcttgccgctgagggcatgcacctccgaaccggcgctgctggagatgcccacgggcagcataccggcgccaccccgggcgccggtgacggggatggggg

SEQ ID NO: 68218 - DNA, 602 bp, Arabidopsis thaliana landsberg
  unsure (1)..(602): unsure at all n locations
ttctttctgaggcgttttccacatcaaaataaaagaattctttttttttatcgagggccaaacccaacaccnactgcgagatttttggaaactgacaaacaacacattgataagaaacatagacattgctacaagagatcaaccaaacatgggcacagattccacctgtcgcaaatatgtggccacacgagtacatatggccactaggaatatctctaatagtatatctaaagcatatggccacttgtacatcttctttttgtttttttaacaaaaaacattgctttgcaaaaatttgaattttctttttctcaagagcaaatggatttttaaccatcggatgacatttttgcaaagatattcttttcattcttaacttacaaaaagcaaaaatttattctaaatatatgctaagatccaattggatcttaatcatcggagatggtataatcatcggatcgctaagtttttaatattgactaatgaatgacatacgtttggccacgattttttcctcatgctcgataataaacccgtagcatatttgacaaattccttgtaaagcgtggtgatgtatgctgggtcgttgtcatcagaaaaag

SEQ ID NO: 68219 - DNA, 417 bp, Arabidopsis thaliana landsberg
tgatgttttttgtttgttattaatagttaactacacgggggtttgtgatttccgagtctaatctacgtctaccgcacaacatgctaattatttaaaacacaaatcaaacaggtacacaataattaattaaatgtttagcgaaattattttcggaggttataactaaaaacgaataatctgatgcggaagccacgtcatacctgatggagattgttatcacaatgacgaaactacccttagaaccagcttgacttttttttttattttttaaaacacaagttggtacaaagaacatgtcttgtttgagaaagaaaaattgtggtctttgattgtttgtttctatgaagctttctcttatctcctacccccttaagacttgttggatgttgaatttccacacttcctccatttcatctt

SEQ ID NO: 68220 - DNA, 2645 bp, Arabidopsis thaliana landsberg
ctcggattgctatgagcgctggctatgatgggaaaacaatcatctgggatgtgagtttactttttggataggaatagtccttaatcttatcaatagcgatacttacctccttagatttttttttctagatatgggagggtataccaatcaaagtgtacgaaatcgggagatttaagttggttgatggaaagttttcacagtaagtacccaatgaaatgtccacgacaagatcttctatattttttttgtgtgtttgcaaatgactccagttaaacatgcaattgactattgagtctgaaactagaagaaacagtcatgttaagcatatccaattgggtgtacaatattcatatttctttcagtaaagacatctgcttctgaagcatttatttagtcacatgaaagtcttggaatcaattttttaagatactatttccctggcactgtgtagagatgggacatctattgtgctttcagatgatgttggccagatatattttctaaacacaggacaaggagagtctcaaaagaatgcaaaatacgaccaggtatggtagattttacatctcagatgcatgatcattttctagtatatggctgaagtctctattactttctgaccctttgtcttgctttgtattgattagttcttccttggtgattatcgtcctcttattcgagataccaatggacatgttcttgatcaggtttgtttcaaatacttgtttcttctgttttctttctaatttctgctgcgttcttgttaatagacctcaccgaactgtgcatactttttatatccttgcacctgcggtatttttgaataataagctttataattttcatggtgcaggagacgcagctacttcctcatcggaggaaccttcaggatcttctttgtgattcaagtttgtttccaaaagctcatctttatttcagttatacaagatgttgtttattcaggaaacatattcctggtgttttattttgatttttcaggtatgattccgtatccagaacctgaccagacaatgtttcagcaacgcagacttggtgcattaggagttgaatggcgtccttcctcgataaagttttctgttggccctgattttagtttaggtcaagattatataatgcctcctttggctgatctggatagactgattgagccattgcctgagtttatagatgctatgtactgggaaccagaacacgaagttctgagtgacgacaatgattcagagtataatgctgaagtttcctctgatggggctagggcaagcccatgttccaactcttcaaatgaacttgagtgcagctccgaggacagtgacgttgaaaatattcacgaaagtagctatcattggaaaagaagaagaaaacatcctaaggtatgttttgctcaactcatgcgattttgtttgtcagtatctattaactaactcccgttttctcaggtcaacgtctctacttcatctggaagacgtgataagaggattttggatgagaatgatagctcgaattctggaattaagagaaccaagaaccgaagaattgtcgtgaaggcttcaaaaagaaaacattctgatgtcaaagcatcacggccgcagagagcagcagctcaaaatgctcgatccttgctttctaaaatttctggaagctcttcggatgaagttgatgatgataatgattcatccaacagtgaatctgatagaagcatacccactttgcgacagttggacaaaccatctcagatgctggaatctctttcaaatgacaaacagaagaaaagattgattgtaaagatctctgttaagaagccagcagagtctatgggaagcaagggagatgtgataaatcaggctgatttagagcaactatcttccaaacctttggaggagaatcacagagtgattggtatatattccagagaacccgggtcaagttctgtagatgcaaaaggtgattcagggtgtcagagtattccctactctatgaatacgccacagagagaaaaggccgataatcagttgataagatcttcagatcaagaccagaatatgtgcaagtggagggaagagattcctgtttgtgaacctaccgaattaactgcgcctgagaacatagaagaagcccaaccattttatgggtagggaaatcagactataatgggaacgttatgtttgtattatatttccgcaatatctaattcatcgtattctcttgcagggatgaagctgatgagattcttccaaagaaagttcgacgactgaggttaaagcttcggcatcccaacagtcctcgaaaactagaacctgatgaggtggcagatgatttggcagatggtgcagatgggtttgcatccatagctccctctttcatgaatccgattatgcattctgaacctgtgatagatagcgttagagattcttctgcacataactttgagtttggagaagctacagctgatgtgatacgtagaaaaagatccataacaagtgaatctagtacaagaaatagcgcattacgcataaggttgggctctggatctgtagacaaaataaagaaacaagggattcattccacaagcgtgtatgatgatgcatcacttgaagaacggccttctacctcaaaagctgggtccc

SEQ ID NO: 68221 - DNA, 538 bp, Arabidopsis thaliana landsberg
  unsure (1)..(538): unsure at all n locations
atctcgttttttattggccatttcaaatttttgatttttttatactatgtattgagcttatataacaatggggcttgccgaaatcaaattacttacaagccacatgattacataatggataaaaaaataacacaaaaccaagtccgtaaagtatcgacaactaattataagctaagaaaaaaccaatcattttccaagcattgagacttccattcttaaaataagaatatgaggcccaatgggcttggcaagaaagttaaacaaaaaaaagaagaagacaattttgtcaagttttcaattgaaataaaccggttaaatcccaatttaaaccggatcaatcaagatatggtaatccccttctccttctccaaaaatcacaactctgttccaagtcttatcctttcatcatcatcatcacttaccttcttcacagagagagagcnnnnnnnnnnnnnnnnnnnnnnnnnnnnnnnnnnnnnnnnnnnnnnnnnnnnnnnnnnntcctctcgtcctctctcccttcccttcaccacaattt

SEQ ID NO: 68222 - DNA, 485 bp, Arabidopsis thaliana landsberg
cgggacggtgcgcgcttaagcccaccaatcgggcagatcatgcatctgaggggacacacccgacggggcacggcaagaccacaaacgcgctaatcgaccaacacctaggggacaggaagcgcgcataggcccgaacccgtgcgggaccccaagccgtctgcaaccaaaaaggccaccggagcccaaccggggacggtcaacaaagcccgacacgccacataaaagttggaaaggcgagggcgagcgcccccaagcccaacatggaggacccgaagaaccggccgagcccacagccgaggaaactcgggggaaccacacagagggcgatagcccacgccccaacccaggagacaacgaacgacggcagacgctgcgggcaccaccagaggagcgcggcataccccgccaggcaagacaccactatcgggcccgacaggagcacacaccgaaccctctcaaagatcaggtcgggcggggggcacccg

SEQ ID NO: 68223 - DNA, 611 bp, Arabidopsis thaliana landsberg
  unsure (1)..(611): unsure at all n locations
tttcgagaggccttccttatgaagaaaaatatacaaaagtttggtcttacatgaatttttttaactcgaagcattattcgaacgtcagcggatagggtgttgttcgatgttcgaggaataaactcagagttgacaagattttgttcttgctatcgcatatagntgaatattgtacatagagaaaattatagaatttgtggttcgtagcataacttatgagagaaacaactatactatgacaattacataaaccattagactacatataaaatcagttttctttcaaaagttttgtaatacaacctgctaatatcatccatttactttaacaaaaaaaaaaagaatcatccattttttaacattttcgtgagagtaatgatatgtttaaataatttgggaaaaataaaataataataatttggacatacgtgagtcaaatgagccccacacatttaaagctgtgagcgacacgttcgtgtacgtaatcgacttgtacggagttatgagcgatgaatagttgatcatactattataaagtatcggtttcacaatgggaaagaaaaaattcgcattctcgcacgcaaaccatattctatagcgttattacacat

SEQ ID NO: 68224 - DNA, 528 bp, Arabidopsis thaliana landsberg
  unsure (1)..(528): unsure at all n locations
gaaaaatggattcggatgttaatgaatgcatatatatggttaattttcggcatngntccttcagaagggattggggtgatatcatcacgtgtatgcttgtataggtaggtgagttgtggataacttcagccatacagtgctgtgggattggatactaatttaaagtaataaataaactattttacattctttgccaaaaaaaacaaaaaaaactattttatattataataaaaaattagatactaataattaaattatatctaaattattttacattaataaaacattaaaacttatagatactaaaatagagggattggatcctaattatataaaattgtaactaaattattttacgttataataaaaaaatatacaagtgaatttaatgaaattcatccaaaattagtatacttcatttaaaattatagcttataataaaatttatagaaactaaaaatagaaggattggatacggattttgtgaggattggattttggaattggtgaaactcttaagtgcatgta

SEQ ID NO: 68225 - DNA, 506 bp, Arabidopsis thaliana landsberg
aatgttgccgtcacgaccacttcagggagtcctcacaggccggcgccagcgacgctcacagagctcagccttgatgccgccgggacccgtcagagtgaaccgtcccggttaacctcccagattccgatccgctgtaggctcaacaaatggcggacgacttccgattgatcaaagagcgccgtttcctcggcctcactgagcgtctatggatctggctggggcgcacggctgcacttgccttgttggcattcgcgtgcggcttcgccatgtatcttggcgccgatcgcttgcagaatgtcgcatcccgcgcgttcggctgggcacaacttcagatcgtcgggacccggaccacgcccgccggcacattacgccggatgggattctgctacagcggcttacgcatcaactgcgtggttgatggcgacaccgtgtgggtcgcgggcgaaaagatcagactgcaatcgatcgacgccccagagatcgacggcaaatgcgcctatgagaag

SEQ ID NO: 68226 - DNA, 233 bp, Arabidopsis thaliana landsberg
aactatatggatacccatgaatcacgttgacaagattcacttttttggcaaagtttgacactccatcttttccgggccatgagggatgcactgagcttctttgcatttggcctgatggtcctcttgtgacccatgtacctactgtaaattcatactcataactgtgatgatctccacgcttgatgggcttagtatattaacgagcatgggcgtctacgcactacatgatcaac

SEQ ID NO: 68227 - DNA, 559 bp, Arabidopsis thaliana landsberg
  unsure (1)..(559): unsure at all n locations
ccccagaattaacagataaataaaaaataaattattattattaaactcaaaactatggtttcggtcttttggacatatcaattattaaacaaaaattaggtgtttttgggctttgtggcccatgtgtgttcacgagcctctcttatctgggcctggtttccccttgtgggcgtttcctctgttcatcatgnnnnnnnnnnnnnnnnnnttatatgttttcgtatgctcctaaaaaaatgaaaaccttttaataaaaataataataaacaacaatatgtttacatatttcttaacttgaacagtaatccttacccttaccttatagtgcctaaactttcagttgatttacagactattcgttaactagtattttggcaatgagagcagaattctccaaatttgagtttgcaatttgttataaaaataattgattttgttgatgtttagtaatattttttttcttttcaatgtaatgtttagtaatttctctatgtgtgagagagtgagattggccaaaaaaggagggaaaacaaaaactttgagatttggcacgaaaacc

SEQ ID NO: 68228 - DNA, 207 bp, Arabidopsis thaliana landsberg
cgaattgattcgtttttttgtttctctgagatttttcaatctctgggccttagagctttggctgatctgatagcagctctgagcattctcatgctacataagtttagccttcacagcccaacgccttgtgcttcttctagggcccaatgaacttgggaagaccatactcggaccatccttgtccgcctttaccatcggcggacacgg

SEQ ID NO: 68229 - DNA, 557 bp, Arabidopsis thaliana landsberg
  unsure (1)..(557): unsure at all n locations
aatggcgttggttgaagctctgaatatacctttatattcttcgaatcaaagctctgaggagaaagatgagataaaccgagattagatcatgacaacaaaaaaagaaaagcaaacagaaattggttgctcattacctgaattccaagatgaagcatgtatggaaaatctggattgactttaccactcctaaaccgcaaaagcatatcaataaggaacattgcaaaaagatcaatatgaacatatgaggatgaataagatattcatataaccaatacacacaagaaaaagaaaagagaaattacttgttataaggaatcaaaccccttgagaaatagatagcatagccacgattgtgcaccacacatttaactcggttaggatcaagcccgtcttctggtttcaatgatgtcaccgctgtgctaaacactgcatccggtgttacctaaaaaccacaaccataggaacactattcaacagcattcgaaagacttctaaagtagaggatcattatccacgatgaaacatataagnnnnnnnnnnnnnnnnnnnnnnnnnng

SEQ ID NO: 68230 - DNA, 540 bp, Arabidopsis thaliana landsberg
tacccctaattcacctgtagttttttcagttaaagctaatgaaacgactaacgagtgcccaactcttctaaatatgtgatccttcattattccgactagatatatcagttgattgctcattcattattaagtgcatggcacttgataccaaaaatgatattcatggtttagtgtaggattcaaaatttgcatatttgaacatagtgttgtattaattttctttgactcaaaattcaacgaattcatttttcatccaaaattaaatgcattccaactttttaattttgtcaacaaatacattcaagtattcaacttacattaattactgctttgcttataaagagttacctttttgggacctttaaatttaacttcataataaaattaaaaaaatatatatacataaaaaacacaaaagataaagtaaagttagatagacacagtacaagtaaagaagaagcagatttctcccctttccaagaaattagggtttttggcttcgatcgaatttgcggcaagtaggttcaatttcttccgaca

SEQ ID NO: 68231 - DNA, 447 bp, Arabidopsis thaliana landsberg
cagtaccagtatgtatgtttacacggctataatggaggccgatttatttttcataaccggcggaacataggggccgtagtgtgcctttactgcaaatgcggccaatcaaaatatcccgataacaaaacttatacgcacaaactgcttcatactgattattccgcgagctcataaagtagtcaaaaatacactaccgctcaaatataacgaacaccttcaaaaaggtacgaacccctgtctgccagggaaaaattgccactttcaccgactactatgtatcaataatactttactaccgtacgggaaacagccctgtcttgccaccttgcacatagccattagcagcttgctcccatagataaaatcggttcgaatgccagccgccgcatagaacgctttgatctaatatataagtcactgagacttcttctaatatactccgcgatg

SEQ ID NO: 68232 - DNA, 108 bp, Arabidopsis thaliana landsberg
acattgcgatggatgagatattttgatctaattgttctctatcatggaaaaaagtactgctgggtggtttgagtacacattgctgcctgagaagcggtaactagcttt

SEQ ID NO: 68233 - DNA, 2848 bp, Arabidopsis thaliana landsberg
cagaggtgacatgacgatcataacagatgccacgaataataatttcgtgaacttcatgcctattagctagttttcctctctaattgtatttatttataaaaattatttgagatttggtttataagtacgataaaactatcacgtactgtatactcattttaaatggtgttgagaaattttgtaacaagttctagaataattagaattgaaaatatttactagaaacacaatcaaatgatatactagtactatacgtgtaacgtgtgtggatttttaccataatagtttacttgcaaatttgataggaaagtcagacttgcagaaattcaaagatttgaaatttaagtaagaagatttggtattgataaagtaaatggaaattttgaattctatataaaagctacaaaagtacaaattagaaaaagaaatgaaaattgaaaggtttacagatattgatcaagatatgcaacttaaaagatggtagataatgaggcttgttgacttgttgtgaatatgatatgtttcgtaacaaaaaaaagaaactaaaaagaaaataaaacatttacaaatttatatatctatatctaaaaagatttaatttttgaaccatgacataataaacctcaatattcatcattatatgttataaatatttgaatttttaacaaagacgattaggaataccacaagactttaacactctgcaaatatctttgtggtagtcaggactaattaagaaatcacgttgtgggtctttcatcgtcatgcaacaatctgctgctggctgtttatttgcaaacaacgccacccagcatgtggagaacacttttatgacactgtaacctgtcttcatccgagattggttttgctatggtcggaactagagatggcatgataaccgtcacgaatacgattgcgatgaacactaatgatgtcaaactttatgtttttgaaaccctaacgaccacttggcctatttcaattccttcaaagaaaatatttgagattttgggttttgagggatggtaaaagctataatagatggggtttaaacgaatactgttttttttcattatgttgactaaaatttaatacaattatatcatcaacgtgatttatattgtttttgttattcatacgattttgacatatgtgtatgcatatttagatggcgacacatattagcaacttgttagaaaataataaatctctggacacatttaaatccattatagaaaacaatccaagacaaacaaatatttctctgttattcggtcacatccgcatagatatggaaaaagacttgaaattgaaaaagcataccaagtgatagataataaacgaatgaggcaatgactaaaactagaattgattccacgtacataatctcccaattcatgtgttacatggtaggagcgataggctaaacattatgaatgattatttccattgtataatatgcttttcgacatataataaaccatgacataatgaaacctcaaccatcctcactgtatccatcatgtgttaaaacaaaattgtacataagtaataaccaattttattttaactattcgggaagagaggtttatgatttgagcggaagctgctgagagaggaaaatcatggaggatcatcatcatcttcccgagaatttgaaacccttctttcacagagccactgaagctcaggttcttctctaattatctatccattaacatatatatctattgatctgggattactgttgaatctgggatttttgatctcattcaatgttattatgatgcgattaatctctcagttcgtgtttttatttggcaggagcgattggctaagcttgaagctgctcttgcgtcgaccaagacaggtttttttttttctacaggaccaataatctctgagttctttagactttagtcttgaagttatatgtattctttgttatcagacattccggatgctaaacttgtggaggaaaacaaacaacttcagtcaaagctcgaagaagctaacgccactgtgaagcaagaacagactaaggtattcctctttctcttcacatttttctcatcgccttagtttttgagtatggatttctactactctaggtgaaggacttgaccattgaaaacgccaagcataagtaccgtatattgcatcttgtgcgggctctaaaggatgctgatcagaagcttgagaggctctctaaatgatttcattcttctgtctcttttttttattccttctctttgacattcccttactgaggaaatgttatccttctttaactgacaagatatcataatggattgattgtttgcaactcctatcttattgtgtgtgtatgtgtgtgtgtgttttgagtttcataagcatatctgtagttaatagataagcaatgtccatacatgtgatcctgaggaagagtagattagcttacaccacattgttaatgagcttaggaacagcattggctattcaagtaggatcattcttcttgtgcacactgcatttactgtggttttgctctgaccgtaagtcattggtcattttagtcactttgctggtatctttgagtagctcagaatctgcctgccatcatcaggcctagatatctgctgcttcttctttattgagttgggcacatgttacatttaacaaggtgttgctttgtagccacacgcaatgatggctcgagaagcaaggtctagtttcagcttcatggtaaagaggttctttagcagcaatggtttcatccttcaatctctaggcatattcttttgtgaccgaactcataagaacctcttttcagctacagggagcatttgccttttttccccttcga

SEQ ID NO: 68234 - DNA, 623 bp, Arabidopsis thaliana landsberg
  unsure (1)..(623): unsure at all n locations
gatgtaaaatcatgagaactttttatttatttgatgcggtttggtttgaattttttttttgggttattgcctttctgattaataaaacgaattagttaacaaaaacaatttttgtttttttgtttacttaaaacattttagtttactttgaagggtttttcagctatacgttttctttttccaccctaacaaaaagacatatgccataccggtataatgccaattcagccacattttcgtataatttgaatgaaagcagaaaagaaaaatacgatcataagacaatgctattttattagagatctctataatgaaaaaggatctcaaagattacatgatcatgagataataaacagaaacaaaaatccaagagaagaagtaataatattaagaaagaaagaaacaacagtctgaataatcaaaccgttgaacctaatctttaggtttcaaaaaatgaattattgtttttattcgtgaaaaaaaataacataatgaatcatatgattattgtattcatttgttcatgccggtggcgttctttactgatttcggaagctcttgtgccttctccttaatctgcttgccggtctatacnaatgtttataaatgaaacaatttaatta

SEQ ID NO: 68235 - DNA, 574 bp, Arabidopsis thaliana landsberg
ccgcccaaccacctcaccagcgacagaaagagggccgggtcgtgcccgccgactgccgtttcccattgactgaggatgaccgataccgcctgcgtcgccaccaccgccagcagccagccgccgttgatcccgtcggccaggctcggcttctccttcttgacggtcaggatggtgaaaatggcgtaggtgatcccaaaccagaggatcaggccgaaaatgccgaatgccagcgccacccccgttgcgttgtagagcaccagccattggctgccgatgacgcaggtggccacgacggtcgtgaaaaacccgccgcaacgcgtgtggtccagaaagtccgcggcgatggcttggggatagcgggtgaggcgtccgatcgtcaacgcccacaacaccgcataagccgccaggttgaaccagaacagtccaaacgccaccggcgtcaatcccagcagatcggccgcgatcgacacgatcccggtcgccatcaccagggcgaaataggcggcgttgaggctcttctaaggatggcagtcgccccgaatgcccgggtagattacccggcagggaaaatatc

SEQ ID NO: 68236 - DNA, 126 bp, Arabidopsis thaliana landsberg
  unsure (1)..(126): unsure at all n locations
tacacatatcgatctgtcgacatacattacacattttaagtatgnatgtatttgcatctcccaatatgagattcggaaaggaaccctttttcaggtctcattgccactccctggcggtccagtgtc

SEQ ID NO: 68237 - DNA, 913 bp, Arabidopsis thaliana landsberg
  unsure (1)..(913): unsure at all n locations
tagattagatacgtagaaataatttatatatccgaattctctgcatatgttcacaattatagtattctgaatataaatatgtaataatatattattattatatagttaaatgatgtaacggtttggatacccggttgaacctgctcgggtattttgagattccggattcggatttggtgcnnnnnnnnnnnnnnnnnnnnnnnncctaatcgttacgtgtcattaagacttccataatgcataatgcagttagttcacaaaaagagaaaaagaaagttctgtaatcccaagtaaaagcaaatattcaaatgtgtaacacaaattcacataatcaaactgtgtaataagaaaatgaatatcacaatacacaaaaagaaagtttgaatgagctgagtgaatttgatcgggacaaagagaaatcactaacccaaattcattcattcatatagcattttacataacgttttctttgaacaaaatcaaaatattgcatacatcaaaaacatatacatacgaaaaggtttatcatttattttattttggttatattcttatgagatctatatgatatatatcgactttggagctgcgtggatgtggagatgcctttataaaggcaggtagcgtctatgcgaacggtataaggagttagggaacaggacaagcctcaatgttccaaatctctttcgcatactgagctattgtacggtcactgctgaactttcctgacccggctgtgctcaatatcgacattttcagccaccccttccggtccctgtcacaacatattatgactcacattaaagaacttgagtattcatttcagttcagttttttttataaactaaaatagagacttatgaatggataagttgggtttaagagatggacttacttataagcttcgtcaact

SEQ ID NO: 68238 - DNA, 607 bp, Arabidopsis thaliana landsberg
ctggttacgagcttatgagtttatttcgtgagctctgaaatgaacccttttgaaatcagttttagcagaagttttctactgtgacatcaatctggtgtagtatgtcatgtattattgctttttgtctttgtagattaggattcaattttatgctgcctttggatcattttattctcattgttgtcttgacatagtgaggctttgtttgaaacagaatttcccatattagatgatatcattaagaagcatgatgctgatagtgatgaagagcttggacaagcacaatttgcagaactactgcaacaagttctacaagaaatagcagatgtccttcatgagaaaccaataactattgtcctaaacgttgagattttcactggatcaaggattcgtaaggttagtccactctcttttgcttaagatacatgttgttcttgagataaagcatggatctttgaccaactcgatcaataatatttctcagattcttgctgatgagaagacactcaagtgtcttgtagagaaaacgactttggaagagtcgaacggaaaagagagccaaggatggttaaggacgttgataataaagaatgggaaagagttagga

SEQ ID NO: 68239 - DNA, 568 bp, Arabidopsis thaliana landsberg
  unsure (1)..(568): unsure at all n locations
agggcggcatggacgcggcgctggcgttcgacgcgggagacttccgcgaacgccgccgtcaccatgcggacatggggatgggtttcaccggcgccgccatcgagacgcgccgcgccggcatggcccgcatgggcggcnnnnnnnnnnnnnnnnnnnnnnnnnnnnnnnnnnnnnnnnnnnnnnagcttgtcgcggatggcttcggctacgcgcatgcgggggagggttcgcgggcggccggttaaagtcaagatattcctttccttgtttnnnnnnnnnnnnnnnnnnnnnnnnnnnnnnnnnnnnnnnnnnnnnnnnnnnnnnnnnnnnnnnnnnnnnnnnnnnnnaacccgataaggcgaaggccgccgcgcccaaaccggaagagcggctgtgtgaggccaagggctgtgtcggccccggcaactgccgggtttccaagtcgccgcagagcatggacgagtatctntggtactggcccgcgcacgcccgcgcccacaatgagaactgggactacttcaaaggcatggacgatgccgagatccagaagttccgcgaggatgcgctc

SEQ ID NO: 68240 - DNA, 377 bp, Arabidopsis thaliana landsberg
actggcaacgatactgaggtttacgcggaatgggaagaaaacctcagggatcctcattggcaaccattcaaacgggtggagactggaaacatagtgaaggtttttatctatgtcattgagattctgtcccattgtctctctctctctctctttgtctcatttgattagtcttgtttctggtgaatggtgatcttatgcaggaagtggtggatgaagaatatgagcaaacttaagaatctcatagatgagtggggagaagaggtgatgcacgcactttacacggctctcgaagaagatcccccagtttattccttttggccgacatgacatcccatatctgttgatttccctccgacgtcacagtctctaccttggag

SEQ ID NO: 68241 - DNA, 611 bp, Arabidopsis thaliana landsberg
acacgatcccattattgttatggtcagagtgaccttaccagcctcgctaaatacctgattttcttccaggctaaccttgggggcactcaactccttgccacttgtaactctgcaggctatttcttcttagctcagtgaaagaaggggaaaccagaacatcctcattcttaggtagccacgctggcttcgcagctgtggctccccaaagatatagactctacaacaatattatgttccatttatgccagaacatgctggcctctgtaatgctcaagcgagcactctacatctttggagttacataatcccataattttgaaaaatgacaattttaggtttggagaatagtggtccagtaatttaagcatgcattagtgcccacatcctttcctgtgctagctgactcatgctgtctccaaagacttagcaaccgaggatatgctctaggctgacattttgctctcacctaaaagagataagaaacttgtgtctactggaaaactaagcaggacttttggatgggaggttgaacatttactactttatttttcagaagataacagagaagtgaaacaacttaaatgaggacagctcccagctaggaaaagaat

SEQ ID NO: 68242 - DNA, 127 bp, Arabidopsis thaliana landsberg
acgcatcatgtttgaaactatcttcaacctcacttttttcattttcaagcaatctgcatcaaatgtttccgattgggttgcattacatatcaaaagctatcctcttcttgattaagaatgagacttt

SEQ ID NO: 68243 - DNA, 1995 bp, Arabidopsis thaliana landsberg
cctaaagtttcagttaaccacaatattaacaaattcagtgttcatccattatgatgaataagctatatatcatcaactcttgcataacacaacttaaacctgatccatgtcctcgcaagtcagtacaccaaatatgcatggaacgcctgcaaattggattttttataagctttaattactagagtcaatagtgcgtaaacacaaaatttgaagaagtaattcatgatgagggaatttaaacatccaaaatccaaagaaaagcaaaaatgaactacccgctcttttaggttcggaagtatacaaaatcaatctttcagtgtttccaaaacaatgtcaaataaaaatgtctaaagatgtatatccagcaaataagtatcgaggtaaacctgaatttatgctagcagaaagtactccagacgcagcagagttggcaacagcatcataatgtgtggtatctcctcttatctaaaccacaacaaggacaacagtaatatcaaaatccaactctttaagtatatgttatcaacataaagcaactactttctgaagccatatgaggagaaaaacaaatggaatagcctgagattctttcaaaacaagaatcataccacagcgccgatacataaaacagcatgaaattttcccgatttcccaagattttgtgcaacaacaccaatttcaaagctgccaggaacccaaataacctgaataaaaacagtgtcattagctttgtgaaagctcataactttttattctgttctacaagcaaaagacttttacttcaatgtcttcttctctgactgaatacttcttgaaagtctcaatcgctccttccaaaagcaacttagtcacaacctcattgaaacgagctaccaccttgagaaagaaaaatgaatcagaaccaagtcaacactgcaattgagctcaaagttttcaaatttcactgtaaatcagaaccaagtcactaaatctaagcagcgcacaaagtaagaaagcgattctgagaactcacgatggcgaatctaagaccttcgcctctgataagagaccccgtaacatggcgaacagcagccgtctgtacgaatgaagagcgtaatttcttctctacagctagtggtgacgcaaatcctaacaccaaatgttaacatctcaatcacgaaattgcgaaaaaacgatttgagttattataagagaagtgagagaaagcaagcttaccggatgtggatgaggagaatgagagattattggatttgttcacagaagagccaccgtgtatataacaggcggaggaagattgacgcgaattgagctgacggtgtgccgtcggtatcaggcggagacacggcggcgaagctaatgacttcatttttcgttcgtcggagttttagagacggttcttcgttcttcaggttaagagtgagactgtgaggtccattagcttatcaaatcggttcaaggcttccggtttattattttcattaaaattacggtttcattgaatctattagtttggttagagatttccggtttgatgaaaagggataagctaaaccctacatccccaatcactctcaccggccggaaattttcagacaaaagtgaaagatttaaacttttgactccgtcgtaacaaagaacaaaacttccgtatcctggagagtaaattcctttatggctacgaatgggtacgtttcgaaacctacgaatttcacgttttgattgacggagatgagctttaaactctttaagaggattctattgaatttaaacgatttgatcacaggttaatggcgtcgtccagtgtgtttcttcatcgcccgcgtatcgcatttgcttctagaacgaatcagcctgtaggaaaatacggtaaaggccgtgttagtttcatgggcattgggacacgtcgtcttccggtggttttatccatgacggcgatggcggattccggtgaggaggccgtgcaatctgttttgcctggacatggcatgtccttca

SEQ ID NO: 68244 - DNA, 536 bp, Arabidopsis thaliana landsberg
gagggtaatcgacccccgatttttgctgccagggaggtgcgtgttatcgtcgcagatgtcatgggaggatcgggcgcagatttgcgtttaacggtagtcccgccggaaggtggcatgcataagctggtgggttttggttttggccacttggctaaaaagattccgcttggcagcgctgtcgacgtagcctacgaaattgacgtgaatgagtggaaggggaaccgagagttgcagtttagaattgttgatattcaacttgagtgaagtttatgatcaaacgtgtccgcatgtacgccgatggaggttcgcgaggcaatcctggcccggctgctggcgccgcggctttgtttgctattaaagataacgatgacaccggcgagcggtttgggggaagcggccaagtttttgggcgtggctacgaacaatcaggccgagtacaccggtatcatcgaaggtttgaaaaaggctcgtgaacttggctataacgaggtcgaagcccggcttgattctgagctggctgtgcgccagctgaacgg

SEQ ID NO: 68245 - DNA, 1791 bp, Arabidopsis thaliana landsberg
tagcactcagtgccaaaatcatcgtccggattaccttctctgtgccatcctagtataccaaacaaacataagaatacatacagcagaaaagagccaagggttgtatggtactaagaaaaaaagaaaagaaagccactcacgttttgttttcttatctcgaggcttctttcccctgccaggcggagattttttcttcatatgcctatcccggataagcggacttggcccgaaatgccactcattctacgtatacagtacatatgaaaacttgagcaaacacatcctaacaaaaccagaattctatgtgacaacaatggcatgaagaattcacctgaagcggatcattaattcccctgtggaaaaggagtttatccacagtcttcttagcactggtacgacccttctcctttacggtacatgtaaatcttatggaggagttctggaatcaacattttcagcttcagaggagaactaactctcttatgaatacaatttttcaatatatacatcaacaaaggaccacacacacacaaaaaaaaaaatcaaattcatgacaatacaaacacaggttttaacatgaactcatcaatgcggatagcatttctaccaacaatcaatcctatctaattttgtacaaacccatgtaacaattcatattcctgattccaatacgatcaatgcattaaccataggatcataaaaaatttacctttgaagatcgttcgccttcggaatctctagcctgaaaccaagattaatctaagagcatcaatacgtctaattacagtgtacatagattcaataaggaagcaaatctttatagagaatgatcttacagaaccaaatctactcctcgatttttcagacagaacacttgtcgaatgaaatggagcgaaacgaattgcttctgtgacgttttgtgatgacaattctacaatcgaagaacttttcagcgacaagagacttctcaatctaaacatagttggattcaacagaaaaatgtaaactttcaataaacaattcaaaggttttaaactttcatttggcgtgaaaagagagatttgaggaagaaatgggagagacgacggagaagaggaaaggtaggcgtcacacgcgagggttttttaaccggaccggtttaattgtgattcgttaaacaatctggtttgagttcggtttgtttaggtttaatttttggtagattacgaaaacagatgaaaaacagagcatgtaaagaacagcataaagccaaagttgaaaaagcttgtcactttgattatgaatgtagacatgtagtagatacaattcaaaatcaaacaattttaatttcatgtttgagaatcgaatcaaatctcaagaatcatacacatacgtaacgatctaaacataacacaatttagtcgaaaaatatatgaaaaaaaaaaccaaccaatcaagcaatgacaatgcttttgcttaaagcttacattgctctactctcagagccccaaaatctcttctttacagaatcattgattcgatctcattttggaggagtagggctcttagttcccatatctctagaatcattactagatgttccttcacagtcactgactgggaattcttggctcgacaaagctatctgtctgaatttcttcatgtctgcattgtaagatgtctgactataatccgagcttgctcccaatgacccgtaaacgttactgtgtcctggcttcacaccttcgtttaaagcatctaaggacacttctccttctaacgctcttactatctgaaaaccacaacatttgt

SEQ ID NO: 68246 - DNA, 521 bp, Arabidopsis thaliana landsberg
cattggattccctcgtggtggaatcctcactgcacacgacccacatagcttcacacctgatcatcatctccctcctccattaccaaaccgttattattaccaagaactccttcatcaacttcacagagacaataatgctcctacaccgcggttaccccgacctactactgaagatacacctgtcgtgtctaatccaacagaggaaggcttacttggtgatattgtacctcaaactatgcgcaacccttgaggtaacttcttacatgttatatattttttttgacgcatttgttaatgttcgtgcatttatagtctcaggagtgatcaattatataaagagatcgaatatatacatctttggtatgcaagggtttaaaaactataaatggaccacaaagggataaacggcgtttcgttttaggccgaagctgaaaatccacatcaagggatgtcttaggtgggataaatattccatgctttgacagatacaaaatctaactgatgtacatgtacttatgata

SEQ ID NO: 68247 - DNA, 448 bp, Arabidopsis thaliana landsberg
  unsure (1)..(448): unsure at all n locations
ttcttgtgtgagtgtagattctggttgtattttcacatgtggcaatggctcgtttgggcagcttggtcatggtgataccttgtcattaagcactccagctaaagtctctcactttaacaatgacagtgtgaagatggtagcttgtggtatgcgccactcacttgttttgtttgcaggtaacatctcatatacaacactggtttgcgagaaaagtgtttttctccatttgaattatcttgtgttcttcagggaatcaagtgtgtggatttggatctggaaaacgtggacagttaggtttctcatcagacagaataaaatcagtgaatcttccttgtgttgtctctggattaaaagatgatgagggntgttcgtatatcagctaagggagatcatagtgcagctatatccggtaaacccttaactcttgtgtttcgtttcattgatcaat

SEQ ID NO: 68248 - DNA, 538 bp, Arabidopsis thaliana landsberg
  unsure (1)..(538): unsure at all n locations
cgacacttaggaagtgcgcttcgggcgatggaatgaacgtccagggactttaagaacacctttccctttgtcggtctgtcctgtgcaatcagcatcttgagaagggtggtcttgcctgcaccggaatgtcccacgatggaaacgaactcgttgggagcgatctggaaggttacatcatgaagtgctgtcgaattcccgctgttgtataacttcgaaacgttatcaaaatagatcatggccgtttgactattttaatctaagtccgatgaagcgtctagaaattgctgtatatctccgtcgagtacgcgctcgatatcgcgcagttccacgttggttcggtgatctttgacaagctgatacggatgcagtacatacgagcgtatctggcttccncattcgatcttcatggtcttctcgatagaaagcccattgagttcacgccttccgctgctcttctggaatgcatagaccttgcctgcaaggagtgcgagtgcacgttcccgattctgctgctggctttcgtctgatgagacatgga

SEQ ID NO: 68249 - DNA, 551 bp, Arabidopsis thaliana landsberg
  unsure (1)..(551): unsure at all n locations
gcggacttttcgtgaaaaaagagagaatttgtagtggaattttatagtttacatacaattaatatttgcagtacttatatatgaaataaaaataaacagaagaaggttagtaaacgaaaacctactactttactccttttattggtaggtactcatttaagcatgcctaggaatctctttcctctttcttgtttccttttctatgtcggcctctactctccaagaatgggtgtggagatgatcatatgatgactatgttgatgatcacatgatgacacaaccatgcatgatacatttctttgtctcatgagtcacggtgacatacatgaattttctaaaatacatgtgttacaaatgtcatgcataagagaagcaattgtacatagtttatatgattatagttttcattttctaagtaagaatagcattcattttcatttttcaatatgattntaattcatgtcactagctaataaaggggtattactaatcactggtatttatatatctctttgtttaaatcggcntatgtgtatgtgttggatattcat

SEQ ID NO: 68250 - DNA, 1616 bp, Arabidopsis thaliana landsberg
aacagaccgcagatttgcacaagcagttcacataaagccaatagttttcagattgtggaaactcgtgaccatagtactctcattggcttagccgtgcctctctcttaagcacctgtttggcatagaagtaaaacaactgtcaagaattaagtttttcccacaaatctagatgaggaaaagagatggatgtaggcattaacctcatcagcaaacttgatcaaaatagtagttcgaggacgttgttgtccttcaatgggtacaaaatgagccgttaccacagcaggaaaccctgcgttatccagaactccctacatagaggaaaccgtgtcaggctcattatcttcttcctctaccaattaaatttgaaccctattcgtgaatatgtcaagggagcactcaccttcactatgccagcaacaaacgctccgcagttgaatgttcccatgtcttttggaatcgaaatgaacctacactttcacatttgttatcagttttcttgaccttaaaaaaattacattatctcagagtgtttatggaaagagctggagcagtataaacctgttaacaagaagctccttttcactgatcatgtactcatcttcatgttctgttcctttttcaagtgaatcagcaacctatggcatgttcgttaagtgtgagttagaatccaggaacaggcatgtcgatagaaagactcaacaactaattgaatttgaaatcgccactcacctttccaaacaacactttccacacagtactgtgaacgaaagacagaattcccagtaaccgtgtctctcttctgtttccctgaaacaatgaaacaatatatccataagacatgattgaactctgcattgctcttccatgaacaaaactagaagtatggaaacgttcttttttttttccagtttttgaggcaaaacacacaagtaagaatatcagattgcaaaaataagatgtaccttttcccggttgcaaagaagctctagaactcgagatccaactgcatacccagcatcctctagtctgagagtcatcataaaagaaaacacattgttaaggatggaatgtaaatgaattagactaataaaaaaaaatcatatgtatttctaagaatccaatcagctcaccttctttcaagttcagctatattgtcaacctgggtttgattgtactgaacgagctccgagaataagaaagcaaatgcggtcaagctcacctacaacacaagtacaattccaaaacgactaaccaatcagcagatgctcgaaatcgaatgatcacaataaagagatcaaagaagaagaagatcaaaacccgacagatttgaaatcgaaccctcccacaactattagatccggatccaaattgaacaatgttctcaatttccatacttagttcagtgtaaaattttctgaggaaagctccgaaattggaagagaaaagtggatctacgtagcgaaaacgtacctcttgcttgcctttgctgagaggcttgtcaaggacgttggagtactgtttcattttcccgactccgatcatattcttcggttttccggtgagaacgagcttcccagaaccagaaccctaaacacagaacctttcttagttttcca

SEQ ID NO: 68251 - DNA, 1668 bp, Arabidopsis thaliana landsberg
tgttgtgaagcccacgcttcttttagcatccacgtcatctatttctgtattgctcccactatttttatacattttccaaattggccccattaatccccttcaaatcaatttcgtccttaaattgcaaattaatgatgatgagtaattcatcaattttctctagaaagtgaagaggaagataatacattgaacattcattcttatgagcaagaatttggactttcgtatatacaaattaatgtacataatctattgttgcatttgtagtaactctcaggaacaagcaatacttggatctcctggatgatataaacaagaccaagcttgttgtgttacggagcatcacaaaatggtctattaccactagagcttaagagacctctataaaccagttattttctgtctcagagagaggaagaatgtctaaacagtatgtgccatggcttgtgtcatccgctttaactccagcgtccatgaatgtttttacgttgttgggaaaattctgtgttgcggatgatgtgtgagctgctacgtaacttaccatataacagcaaaaggtcacaagtccctaaaagtcaaatgcaaaactggatgaggtcaatattgagattaagagatgtacatgattcatataaacccattatttgtaattgcagcaagaaactgtgaaactgcctcattcacttaccagatttcacatttcaatccgatttttctaactctttgaatctcctgtcccattcgtctgtctcatagttttgttccatcatatctctatctgtactgtacacgatccgatccttccctatgactgttttttgagccatatcccttgcactaagtagctgcattgcatcatttcaaggcgttatttcacaactcccaagttataagaaaaaaacatatatatgaagtttccaggaaaagaatccaagaaatgtgctttagtctggctggtgctagagggcaagaaaagagtcacataaagcaatcaaaagtgggtaatcacataaagagatctcccacagatatgcaggtatcatagacgattcagaacctaacccttgacgttagttggcaagagtttacccactagtggaaaatgtagtgcgaggctatctcctctttggaataaagagcatgtttgggcagaaaccaaataaacatctcccaagatttatgttactactgatgtgcctaccttacgccgtagtgcgatatctggagattcaagtgctcgagcaaattgtagccgagctttgtttctgttctctatctgattattctttctcttgattgaaaaccaccgaatcaaagggatggtaaagaatgaacctgcgtatatctgcatagtcgtttgcacagtcatgaatgagatcaatataattagtcaaaaagtttcaaacaaagaccagtcatctggattacgaaaataaaatctattaagaacttgtttgtgtcagtaatcatgcttagaaactcccataagattcatgtttaaagcgaataggaagaaccagaatgaggaaacaatttaatgatagtagtttgccatatgaacagaaactaaatcatacctgaagtagtggatatatgttcttaacaaatgtaagaaaaccacctagcctgacagacatctcgctaaacgaacacaaaaacaaggttgcg

SEQ ID NO: 68252 - DNA, 353 bp, Arabidopsis thaliana landsberg
ccaaacaaaaactttttcgaatattttagtaattataaatagtaattgtattacttctccaattaagttacggaaatgtactgttttctaaacaaactcaaagaaaaaggttaaaaaaattaaagaaacaaaaactataacacactaaacagtcttgtaacaactgagagataaaagtagaaaaacaaatgagttaaaatctatcaaaatgtttaaccatatataatgtcatgataatatctcgtaagtcactcgcatgtaatatcaacatcatctttactgtcatagaagattttattgctcaacacttaatgaccaagacttaatatactattgctgctactccatattgc

SEQ ID NO: 68253 - DNA, 2894 bp, Arabidopsis thaliana landsberg
  unsure (1)..(2894): unsure at all n locations
tactcttatctgaagaatcaagatcgtaacatttactcttttctctcgctcagatctaacaaacacagttgattgattcttgatcatgaggattgatttgttccttttgaatacaggtgacgtttggagtgttgttcaatgacgatcgatgtgccaacatctttgaagcattggttgggactctgagagctgccaagaaacgcaaaatagtcgcatttgaaggtgaacttttgcttcaaggcgttcacgataaggttgagatcactctccgaccaacaccaccgccaccgcnnnnnnnnnnnnnnnnnncagcctcctcctaagttcccatttctgcttttaatctttatactattgagtgtaatgaaatgataaacttgaagatcaatgattcctttgcttctctattgtcatgatcacattgcttgagctatatttttaagttgttgcatgtagtaacaaagtcactattaacaagaaagatttcttctctttttctgccatataaactgaaaatacacaaaggaaatacaacaacagctcttaccacgtttctacccaatatagcagcaatctcagagaaacatacattaatttacatatatatatatatatatatctataaacttgtcaagctttacaatctaagtttcctttctgatcaaagactctctggcgtgttaaatcttcccccaatttaggtacctttatccaagctccagaagaaaaagcgagaccgtggatctctatactggtccagaaagacctgaacttgaagtaatcttatcttaggcacaaccgatctcatgaatctgcatataattaaaccatttcagttatacctttctcagtaccgacttcatatctactgtgtatctaggagtatacgtacacaatggttacagccagaagaaaacccttcctcgattgtagagcagaatacaactaggcttgaagcctcaggcggttgaagaacatcacaaagtgatattcaggtgcccaatagacgaatccaactacaggtcctccttttacatactgcattaaaaccataattcaacaatcacacaaaacatgtcatttatttgagtttgaatccatggacaagtttgttttagtatattgagagacgaagagaggaaccttgccatcgaggataacaagctcgccatctacccatctcggattacgaaatccaggatcagcaagcctaccttgtcctttatatctggcaatctgcattttgtaagaataactctactatgaagctacacaaacaacaactctaaacgaaaaccgagcttaatgataaacttgaattagtgttgtaaggtaagcacaccactccaaattcttcggggatgagtcctttatgtgggagctcataacgtctaccaatctttgcccgaaatgcaacctgtcatggataagactgtggtaaggcactcatcatgatattgcaacaaaagagtattagggaagaagaaagatatcgaaaataagcgagtgtgcatttatagatccaagtgactattgcatgataatactcctttcctgtgtaggcagaaaagtaacagcgttttttttaactagattggtaacacagtcgtttgagtacgcaaatttttgacactgaccatgaaaacaacaagttttcatatttgtcttaatacctcatactagaacaaacataaagctaaccttcccagcaggcacatacggatctccagttaatttcacagcttcaacatattcataaaattcgatatctgttggcttcttagactcctttccacctttccactggccaaatttgcgttttaaatggattacttctgatgtatatagcccatgtgcgccaatataaagtcctggatagataagtacaaagataattaaaatccaattcatactgtgagaaaatttgtatttcaggtaagggttacaaaatttaaagtattctatcgagacgactcacttgtcatacccaacaaattaacttctaacagctgagaaatcaatactgataaatttacaatagcttaggagccatcaatgtcaatttctatgttctttcgagagaaacaaaacaacctccacattcaatcaattactcactcaccgtctaggggatctagtgatggtgtcacatcaatgcgacgaaattttgtcaaacccgacagctgttgacggttttgagcctggctgagagtgaggcttaatagctccccaacatccttaagcatcntgaacgtgaatttctagattaagctgcgactccttttctgcagtaaaacaagaagaaaataaacacagcaaaacaaaccttgacagaaatcttcttctctttctcaattgatttggccaaatcacccataatgttttcaatcctacgtctactctggcggctacctttccatcaactagtgtagtaccttctacacccttagactctttaacgtttaaatctttctctaaccgaagataaaacgaagaattctccacagattccagattggcaggggatcgaagtgactctttaagaggttggtttccagaaagtcgatcaacaatatcgcctatcacaaatttcactgcgatttcccttcctccggtggtgtcaaggatttcatccgtcacagattccaattcaatgtcagcatttttttcatcgatttcagccttagtgtcatcttccacatctatatcttctatatcaagatcgttctcttcatcttcttcatcagctatctgctcaataacttttgagatgaaatccttatccacccttccaggcgcagttactttcataaccttaaccttgaccccgggaatcatatctcgcaggaaactctggaaaccagaagattcctcacggagatcagagtcatcat

SEQ ID NO: 68254 - DNA, 113 bp, Arabidopsis thaliana landsberg
aaaagaacttaaatcaaaatacttaatagcatggcgatacatttatacaaaacttctaccccgagcacacgctttggagccgtagacagtgaggtgaaatccaatccgcgaaa

SEQ ID NO: 68255 - DNA, 829 bp, Arabidopsis thaliana landsberg
tggtacatttttactccttaaatcgttagttctctttaaaaaatatttacaatataaccttaacacatgtagatttatgtaataattcaaatatttgatataaccttaacacatgtagatttatgtaataattcaaatatctgaatatatatatatatatatatatatatatatagtcaaaaatgttttggttatttaatacaaaaataaaaaaaattgttaaaaatcatgagttctcccacgacatcgcgggagtccataacctagtatataaaatcattgaaaatcagttacaatctcttgttattcaatttataatatatgaaaatattcaaaatcaagtgctcttcaaaaattaacaagtattttgttgaaaacatcgaaattgttgtaaacgattaggttttaaggattgtttctctctgttattgatcacatgcccggctcaaacatggcctagactcagtgctactatatccaaaatccttaatgtgtattaaaaagaacaaaaaaaaaacttaacatgtaaaaaaaaaaaattgggtctttggatcctatgccccagcatctctgacacatgctctaagccggcactgattgatcaattgtacaaaatacgatatatatatatatattatatggatacaacagtagatattaagtctcctaaaacctactaatgtgtcatataataggcatccataacataaattaattttagagatttttaacactcgtttagttgaaaaataggactaataagaggtataatttgaagaggtttaagaaaaaaaaaatgttcacttaaaatattgaaaaaataatatct

SEQ ID NO: 68256 - DNA, 1009 bp, Arabidopsis thaliana landsberg
tgtgtcgtcttctttacgtctcatctctctatagcaaattatagtatatgcttaaaagatacgtgttaacgttttgaatagcacgatccatcgaccaacacttccataagtagatgttttatcacacacacgtcataagatattggttaatggcttatgtggtgtgtacagtgtacttaacgtgacctcctatcttttttgtttcatccaagggagagaaagagagtttaatttgaatatgtgtagttggacttgggacctcccactttttggaattagccctctttacagacacgcgtgaaggaggtccatacttgactttactgacttctattattgggtctatcggttactgagaacccccaatagcccgtttataaagttcaggcctgagtcctgcctgactaaaatatttgttctctgctaacaaatatttgcttagaactataaaacactttgatattttggcccaacatgaaaacacaatttttgtttagtttagtataatgagtaaagaaagagtgtcaaatgcagcatttgaaatgagtaaagaaagactgtcaatttttgttttgtttagtataaatacatttgaaatgcataaccctatagcaattagtttagtgaaaaatgcaagataaaaggaaacagtagcaagatttggtattggttaatccatacactaatctgattcacggtcaaaccggtttgaccaccataccaatctgaaatttgatccaatattggtaaatatactagtgtacatttgttgggatttttttgcggttttattggaaatattttgttgttttcgctgttctagttaataataatatctcattaataaaggttttattttatgtgtgtaatgaaaaattgttattttcgtgttttacggctttatggaaaactagatagggtcctacccacgtgcgtttaaaagagcagtggacaatgtttttctcttttctatgtgtcgtggacaaattaacgagtctctctacgcttt

SEQ ID NO: 68257 - DNA, 613 bp, Arabidopsis thaliana landsberg
  unsure (1)..(613): unsure at all n locations
tgatttcttctttgaacacagtggttttaaataccaattatattaaaagcagcgcatacatagtagatcagttcctggaatccgaattgtggaaggaaagtgaaaagcaccatccggacccgatnnnnnnnnnnnnnnnnnnnnnncttgaacaggtcaaaatcgaatttgatggtcgcaccattttggaattcccgcagctgtcttttgccaaaaatgaatcagttgcaattatcggggaatcgggaagcgggaaaagtaccttgctggcgatgctttacggcgatcttcccaatcattcgaccggtatactttctgtggatggaatagcaatcaatgaatcgaataaggaagcttatctctccctcatttctgttgttccgcaaaaggtccagttgattgaagggaccctggaagacaacatctgcttcggaattcctgtggaatttcgcaataccgaacgaatcaggaagtgatcgaccaggcaaatctccggccttacatcgacgctcttcactgggtttgcaacccttgtaaacgaacgcacaccaatttgtcaggcggacaaaacagcgtattgcaattgcacgggccttgtatcatggcggagaca

SEQ ID NO: 68258 - DNA, 348 bp, Arabidopsis thaliana landsberg
ggtgatgcgttggcaaactatcttccttaaaatccaaatccatttatccatcactacttttttttcttttgtttggtagtaaaatccttcactagttgattgcagatgactaataaagtaataatctttcattttggtggttcatcgcctaatttgttgtttacttgattgataaatgtttgaggatggaactgttcatttatttttctcaaaattgcttggttcatgacctatgtaatccatttgtttcatattagcatacgtaaattaaaaactttctactttaattggctaaacatatttttcaaaataatatatatccacttaacatagtttaaactctgtatt

SEQ ID NO: 68259 - DNA, 462 bp, Arabidopsis thaliana landsberg
ccccttttcgatcattgttgaatttctattgagttcccttttcttgcaggtttttgacaaaatgtccaacatgtaggcacaaaggcactgaaagacacccccattggctggaagctaagggcgacattgccacttgcttaacaaatctgtgtattcgatccagcgaatggcccctttccctgaagtttgcttttcctcctagctatgtaagtgcccttttcattctgttttgaaatattctctgggaaaagtcatgagatctcatgtgatgcgtttgatcaaataggttatcgtgaggcgcgatgatccgactaaagcagaacgaaaactttacaaacatctcaagtcactcatcaatgaagaatttgctgctttctttcagaatgaaagtttaagggagaactatgctcagattctcaatctcataaatcgcctcaacaggtaaaaattgtcagtacttta

SEQ ID NO: 68260 - DNA, 369 bp, Arabidopsis thaliana landsberg
  unsure (1)..(369): unsure at all n locations
ttgttgattccacagggtatcccacggccccctatgctttggggtaaaaaaataaactaggggttgtttggggtctcgggcccttccccttggggggggggatcccccccttttttttaaaaaaattttttttttttccccccccccnccttttggggggggggggggtctctttttcccccccaaaaaaaggaaattttttttttttttcccccaaaaaaaaaaaannacgggggggttttttccccccaccttttcccaaaaaaaaagagccctaccgggggggtggttttttttttttcccccccttgttgattttccccccccccccggtgggggggggggcccaacctccttttttttttataa

SEQ ID NO: 68261 - DNA, 530 bp, Arabidopsis thaliana landsberg
ggaaactcccggagcacctgtttgcaggtaccgctaaccttaatcgataatttatttctcttgtcaggaattatgtaagtctggtggaaggctcgcataccatttttgcattgcctttcgctatgatcgggtttactttgggtgtgatgagaccaggcgtggctttatggtatggcgaaaacccatttttatccaatgctgcattccctcccgatgattcgttctttcattcctatacaggtatcatgctgataaaactgttactggtactggtttgtatggtatcagcaagaagcgcggcgatggcgtttaaccggtatctcgacaggcattttgacgcgaagaacccgcgtactgccatccgtgaaatacctgcgggcgtcatatctgccaacagtgcgctggtgtttacgataggctgctgcgtggtattctgggtggcctgttatttcattaacacgatctgtttttacctggcgccggtggcgcttttcgtggtattggtttacagctataccaaacggttcacg

SEQ ID NO: 68262 - DNA, 593 bp, Arabidopsis thaliana landsberg
ctcttgaggaagatgaacaagaagatgagaaggatagagaccatgaaaggcttgtttttttgtctggggatggtggttttcatgctacttggttctgtttctccaatgaacaacgaaggttctagctctttcaaaatctcttttgtttctctattgttccatgagccaaagagatttctctcttcttttttccagagaacttgaatttttataaatttgtaacctttcttccgattttgaagatatcatatctgtttatctgtctatctaaacagtgactgttcctgagagagcaaaagtcatttgattcgttcttaaaaaaaacttactttagtgtttttggaaatatgataataatttgtgacctagctcacttcacagttgagtttattatactaatgatctagtggggttttagtttttggcatgtggctcatattttaccatttgactatcatcagtgtcaaatgattaaataagctttttttgatttgtctattgacttcaaaaaacttttgattttgcacaggaaaagcgttgatggcgataacggcttcattccacaacggggcgaatatgctttttgattggga

SEQ ID NO: 68263 - DNA, 403 bp, Arabidopsis thaliana landsberg
aacagacatgattagctgtgtgcaagtttgtttaatcaaattaaggcccatgatgaacaaagagcctccccatagaatgggatcggcgttgaggatcgctgccagcccgtcgcacggtaggtgcagcagcacgctgctctcataagcagtttagacataagggatcggcggctcggcagcacgcggacgatcgcaaggatttcgtgcggcccctgcaggctcagcacgaatttcttgcccgccgccgatgcgcggctgacctcgacctcgcccgcagcgatgacgaacgcctcgcgccgatcgggatcgcgcgcgaagatttcggcgccgcgcggataggactccgcccgcgcgatcgccgcgaccccggcgagccgcgcctcggtgccaagccgagcgaaca

SEQ ID NO: 68264 - DNA, 546 bp, Arabidopsis thaliana landsberg
acatttgctccgaagatcatcccgactagctgaagccacatggacgacgaggttgttcagcgagttttccaagaaggaggacgagatttcttccagcaacaaccttctacttcttcttcctcttcttcgattcttcaatctcttcctcttcacgtggtacgcttcttctccctttcctaatttccagaaaaatttacaagttgaagaacatcaatcatcgcttttgctgtaggctttcgatcatggctattatctgttggtgaagtccattcaagagcttagagagaagaaggacggcattgttactgttggtattggtggacctagcggctctggtaaatctaggtaatccattgtttatgtttagcgtcgaatttctcaagaggcatgctcgatttcatggttttttgtttggttgcacgaagcttggcagagaaagttgcatctgtaattggctggactgttattgccatggaagattaccgagatagtttggacgatggttctgagttggaaacattagattttgatgcttagtacagaatt

SEQ ID NO: 68265 - DNA, 728 bp, Arabidopsis thaliana landsberg
ttcaacaatgtaatcttgatcattaaagtatagatgattttagtggttctacttgacgtccctacagattgtaaatgcaattatcaaaaacatgtcatagttactaaaagaagaaggatgcacaaatacaatctttttgggttggatcagatcaaattatatttggcttaaagacattgattactacgtatatattaaacaaatgaataaaattgactacctttgctctcaccctcacctgctgattctatacctaattaattatataatacgatagccaacagtttcaacataaaaccaccatcgaaacatattactgatataatatgcatatgggacaaatgaaaaatgaaaaatataacggatgaataacgaaaaatgaaaaatatcattaatgatataatatgcatatgggacaaagcaatcttatccgttacggactatataacatatcatttcttaatcatatattatatacgtatatataatcgtatatcatcagtaatatatttgttgtaagaaaaacacatactgtatatacatgaccaaaaacatttcgctttatgcattgatgtaaaaaaattaaaactatacataaacacatcaaaaattacagacacttaacagatgtaccatgtttttttaagaatcaatagttacaaaaatttgagaaaaaagtgatatttttgtcatttcgtttggattgaaggaaccaatgataaaacatc

SEQ ID NO: 68266 - DNA, 559 bp, Arabidopsis thaliana landsberg
tttttcccttgtgtatatggcagtacttatccactttcaagcttttgttctgtaaatgtttctctgaatttgcatttggcctacttgggaatttcacagctccgttaatgaaaatgaagatgatggtactactgagttccggaaatgcatccgagtcctggcagacaaagttagcttcctctccaaacaccgggaggaattattggagaagtgccaaaatcttgaagccacaagtgaacagacaagaaaggatttggaggaaaagaaagagctggtgaaaacattgtacactaaacaccaacttgggaagcaggtagactcgtgttatctctagtaacagtcatggtttcttgcagtaaattttctttctccttttactacacattcataatttggagtgtcctcggctttgaatgagaaaattggtgaattcttgtgatgacaggcaaataaggaaaagatatcattcggtcgtcttgaagtccatgagatagcagcatttgtgctaaaccaagcagggcattacgaggcaatcaacaggaactggccaaattactac

SEQ ID NO: 68267 - DNA, 1642 bp, Arabidopsis thaliana landsberg
cttcttatttacattttgtcagtcttaggattgtaatccttcttaagtggtttaaatagatctgttctggatttttgtttcccttgcccagtccgtattgtagagttacacacattattcaagttttgtggattcacttttgttatatactatctagttaaatgtatttgtagacctaaccatctttttttgaggacgacagttttgagcatgattacattgaagatggtggagctgatgtgaaaagtacttccactaagcctttagctttgaaaactggaggaaaaagtgtttggaacgccaaggttggctgtttttttctttctcattgataaagattgcctctttaattatgtcattgctcatgtttgcacgatgtatcattgctgctattgtttcggagtatattgaaagaattgctcatgtgttatgggttttatgtgctgttcagatggttttgatgagcgggctgagcaggactgctctggaagatcttgcttcagataaattctttgaggatcgtatacctcatatatgcaacatattaaaattcgctgttcttaaaaaagatcattcgttcatggcgattggtggttcctgggatcccacagatggcatggacccatcagttgatcagtcttccttaattcagacaatgctgaggtttgtctcttcacgtattcttttgtcattctttgctgccgttttgttcattgtctgagacttgaaaaaccttttcctttgcagacactcaaaggataagcttcatcttgatctgagtaactgccgtcactggaatccattcctagaggtaggttttccttctcttggtttaagactgcattgagatgttggacgtgtggggacattacacttgagtattgtagctaagatagtatatataccgtacaatctctcttattttctataggtagaggtcgttgaagatgatatgatattggtttatccagagatttgctctatgaatacttgcaaaaattgttaatttgtgtcctgttttactgcagtttcacttttttgtcaatatggtagacctaggataagttataagctaacaaagcaatgttactttcttgccagtttatatggaaatctaagtagcttagctttgcctctcttttttggaattgacagatacattatgacagagttggtacagatggagtgtttagctacaaagagatcacagtactttttgtccccgatttatcagaatgtcttccttcatttgatgtttggagaacccaatggttggcacacaggaaggctcttactgaaagagatcgactactctctcaggaggttaagaaagatactgttgaagtaaccaaggatgcagagaaaaagtcaccaggagatacttccggcactccgacaactggaactaagaagactgttaaaaagatcattaaaagagttgttaagaggcctgtcaacgatggaaaagcaactggtatgaaaggtgagaagtcggatgttcctgaacatgttgccataccagagaccacagtcccaaaagaagagtccactggtacatcttctaacaaaaaaatagtgaaaaaggtagctgaaactggagatacctcagatcccagtgctaaggctaatgagcagactcctc

SEQ ID NO: 68268 - DNA, 400 bp, Arabidopsis thaliana landsberg
  unsure (1)..(400): unsure at all n locations
atgacgactccgggaaaaaaatattttcagcagcaataagtatgatcgcttatctnnnnnnnnnnnnnnnnnnnnnnnnggcaatgatgctggttattgtggtggaagttctttttatgcataatattttcccggctgatgccctgtcggattacacaagggccgctgacgctttcacactgtttacaggcggagcgctatgagtttgggtggaaccaacgattgccactgcagacagcgtactatatgaaggagcggataccagttgggatacatatcaacatgccggatgatcaacgcagttattcctacagcgatttaagcaaccattcaacctatcactgtgagcaacttttaaatgggcctatcgacaacgctactataccaacaacatggctta

SEQ ID NO: 68269 - DNA, 656 bp, Arabidopsis thaliana landsberg
tacgccatgcggagaccacgaaaatagatattttattataaataataggatttttttggacgtaatgaaacgagaagtggatcagaagattaattacataatcttttctatttataaatttaaactatttctttctaattcattaacaattttgatacatcatgacaatggtaacttatgttactataagacaatggtaatatctcaatataagtttttttttgtaaaatcgcaatatatacatgaattaataatgacatatgatggtcatttggacataatataaaaaatataaatatttggcaaaataaataagtaaatgaaggggagaggaatgtgtgagtgtgtgtgggtgtggatgcctttatgcctcctacatctcaacattgagcaaaattgcggctgcccaacaaccacccaaaagagaattagtcaaaattattaaaatcaatgcatgtcctaatctctctcacccaactctcaccttcatttcaactcccatgcatctttttggtcaattaatttattaatattataaatatattttttcaatgaattttgaaaagactgtgttgcatattaaaataatgcgttgtactatttagaatcaaattagaaaatgtactttttactccaaactagatttaacccgtggt

SEQ ID NO: 68270 - DNA, 175 bp, Arabidopsis thaliana landsberg
aagctctccgatcgcatctgtaatggcttcaccactgtctccgatgaagaacggaacatgcacttactaatgcaacaacgacggcgagtatgattccgtgtggcgcagaaccgccaccgcctccgcctcctacaacgccttgacgatcttgatacattagatacttagtgtgaat

SEQ ID NO: 68271 - DNA, 133 bp, Arabidopsis thaliana landsberg
aaaaaaaaaaaaaaataaaaaaaaaaaagcaaatctttttttttttcaaaacaaaacaaaaaaaaaggggggggtataaattaaaaaaccaacacaaccaatattaaaaagcacaaaaaactaaaccatcctc

SEQ ID NO: 68272 - DNA, 1631 bp, Arabidopsis thaliana landsberg
tatttatcacgccaaaaacaaaaagttttttataatgatcttaatgatcaacgtgtcatcaccacattggtagtttaatggtttttagattgtttttatatggattcattagagacgtatgcaggatgcagcctagcgtaatcaatgagtctgatttttttgagaacttttcagaaagaaaaaaaaaactgattttattaaagaaaataagttcaaatgttaggaaatttcgcaacggtgattttgtagaaaatatgttggactcttataacgttcacaatcccctcatataataataaatgttaccgtttggattctatccggttaaatatagaggatctattataggatgtataactttttctttttttcttttttaggatgtatgacttacttatatatacaagtcatataggatgtatgacttgtatatataaaacaacatctatgttataagttcaaagcatttcatttcgtatttcagatgatttcagtccgctatacgtatctatactcgatctattcattgcaaatattttgaagttcaatgttgaaaagtcaaaaccatggcaaaccatcgtacagagatttatcatgaaaatatgtgttggcttcttttaagagtcggcttttagaaaatgctcgcgagaagaggggcaattgattggggactcggtttgtattattgtaattaatcaaggaacactccaatgtttttttggatcgtttagtaataagtagtcaaattaaataattttttcaggttcgatgttccaagccgtcgacaattttctaacatcgcacttcaaaaattaccacatttatattttttggttaacataatattattatttgtgaagggcggcttttcttagtttcattaacataccgactttaaaaaaacaaaaaaacaaaccgacagttatctataaaaaaataaaatatatcctacaacttttttactcattagttccaaattcaaaaaaaatgtgtaaccatgtaaattaaaagatcctaattcaaccaattatttttccaactacagtgcaattccaatctaccaggttttttttttgtttttaaaagaaaattcatttttttttattttttttttgtcggccaattcaattgtgtggattcgtttgttaattacttgccaactttatttgaaccgcgtattaaccattcaaattagacctgttcaaatgtaatttacatatatataaaaaaattccaaaattgaaaatgtttggggaaaaagaaatgtatgcaggatgactaatacaaattttaatttgtaaaaggaaatgttttggtcactcatagtgttagaaaacatttagtcaaaatttgatggttccatacgctaaccagtgttacctttcgtatttatcataaatctagtgttttcagataaaggattaagtatatatgtaatgttattgcctaatttaacataaacagaaatactattcacatattctatttgacaaaattaattcatgtttcaccagattcgtctttaaataatttctctgattaaagcggttgtatatgcgttacgaacaaaaaaacggtagtaatatatactccatttaaaaaggctaaccattatggcgttggaatgatac

SEQ ID NO: 68273 - DNA, 1813 bp, Arabidopsis thaliana landsberg
  unsure (1)..(1813): unsure at all n locations
agagaactgttaattatatccaattttgggatagacgagacaaattatagtagtaaataaagaatcaaatggtataacgagtgtctaatcgaggaatccaacatccgcaaaaccttggaaagagcaaacatgttttatcctcggacagtatcgccgccggcactgatcttcttttgtaaagatcaaaacacccagacgatacggattaggtaaaaaagtaaccatttttgcaaggtctgattttggacgaaatgtcatgcatttcacttgcaaagatcagacccagtaagcaaaagcattgaattttgagaggattacagaaaagtaacagatccttacagagtggaactggagaacaagcgaattgagcacgaaatagaggaaaactaaaaccaggagagcagagagctcaaattaagggtttagggttttaactttcacactttctttgtatttgactatttgatgtttgcttaatttctgggcccctctagtttcaactgggctttcaaaacttgcaactatttatgacatacagttgtttaaagatatttttgataccgttgtaaagtttcttgtcaaaatttggattagattcactattcactcaagtatagttgaagattatttcgttttattcggtctgagagacttttaaaaggcaaaacccctttgtcacatcttataatgatgcaaaaacaactatgaatctatgtgatatcataagctaacgatggtgtttcatttagcttctgcggctttctcactgatacgcagactttcagctttacgcacaacctcctctgccacaagcttcacgtggccgcttagattgctctcctcaggatggtttaccgaacccaccacccatattctgaccgttccgtcttctgagcctgaggtgtatgactcccctcctggcgcatacctcacgcagtgcactggcccgtgatgacccttgttacaccctacattcaccacattggctttaaaggatacacacaggttcctaaaatgaaaacttcattcttttttaaaagaaacttaccaatctcttctccagtctggaaatcaaacctgtgcacccacatatcttctcctccagnnnnnnnnnnnnnnnnnnntttcggttccaacgatgccgattcaacattgcaaggcatgtcatagctcttcagcaatccaaaactaggagagcaggagaaaaagctcaaccatcaaagaaaaacgataaaactgtaactgaggatgcatttctatatttttaacttactttttagcgtcccaaaacttaacactagatccatcagcagtagtgatgtatcgcccatcctgacttacttcagcactagtaactggggactttgtttctaatgtatgaacaatcttgtcacttcttatgtcccataacctacagaggacatacacaaaagaacaatgaaaccaggaatactaaaggactgagtctaaacccaaggaacgacgtggtggcatacctaatgtcaccggtatctgtgcaagagcttaagattgtattatcactatgaagccattcgacagttctaattgaaccaggggaattcccgacttcttttggaggtgcgtctggccgattcaaatcgaatatccgaagtattttctccattccaccagtgagtaaacggtgagtgtcctagaatataaatagttatgcattaagaccacaatagtaacacaaatgacaccaacgattatagaccctcaaatgctacaagtaatcttagtgaatcccaccattatatccttaaaccagaaaactggcaacaggatcgaa

SEQ ID NO: 68274 - DNA, 1123 bp, Arabidopsis thaliana landsberg
ttgagaattaaatggaaagtcacaaaatgacaaaattgtataatttgattttaagaaatcacatagccacataatattattagtgccaaataataaaaagtgatccaattaaacgtgagaaaatagaaaagaaaaaggggggggggggaggtggtcaaaaggagcactaatgagagaggagggagcgtgtcagaactggcgtgcccattagccaatcgcaaattgcattcccttctctctctctctctatatatacacatgacaccgtggccttctcccttttttttttcttacattttacatatttatttatcatttctaaatgtttcttttaaaaaataaaaatttaaacagcctgaaatcatcaattttaccttatcgacaaaattttatcaaaataaaataaaatggatatgtagaagagtgggacccacagatggaaacagtaaaaaagaaagaggggccaaattagtcaccaccgtccgattggtcttctttcttcatttcataataatctctctctctctctctctcacctttgactctctctctctctctctcttgtttctctgtacttgtttgccttgctatcttcttttctttctccagctctctctcttttatatcttcttttctgggtttctttcaaatcctcttcttccatctccactgcttcctaattccccggaattcttcacaacccttcaagggaagagagagttattcactgctatgagttcgtcgtttcattgagattatacacaaaacaagattataacttttctgctgggttttggagactatggctggtggtaacgaagtcaaccttaacgaatgcaaggtaaactctctctcccttttttttttagattcatttgctcaacttttgtttttctcttaaaattgaagatcatatagattcacccgtacggctcaattttgttttacttccaaaaaaaaaagaagaagaggaaatctaagacgtcccatcatatccctctctaatgttttgctctctctctctctctctctctctgtagagaattgtcccactcaacacatgggtcctcatttccaatttcaagcttgcttacaaagtcctccgtcgcactgacggttcttt

SEQ ID NO: 68275 - DNA, 623 bp, Arabidopsis thaliana landsberg
gaagctcttatatagtatttttaaaatcctaaatcagcaatgaatttagcaacttttatatttttagatctgggttgttaacatataatagaaactgcagagcaaaagctaaatataaattctaatcgttttctatattttgtttgtaaggaaacattttggtgtcaagaaagtactcgttactttggaacaaagaaaacaatacccataaatataagataaggtttgagaatgtgagaatcgaggtggaatacaacagaagaagcacaatctcacgtggaacttaggcgtgaagatcctcttcctagaaatagtaagccaccaatttagaatctttctcactttcttattgtttataaaaaaaatgtcttcaaaaagtctttttggttttagcttttttcagcacatttagtccctttttcttgaaatcttagtatgcattgattaatctatatatggttttaaaataacagtttcagtttcattgaactatattcaggtcaatatctagtgtagttacaattgattagaaaagtgcatgcataattttgttttaaaaacttataattcaatgaacacatataatgtacattcatttcgaccaaagtaataaactcacttaa

SEQ ID NO: 68276 - DNA, 200 bp, Arabidopsis thaliana landsberg
tatggtgactgaactgatgaatcatatatatgtgtctacaatggtgtatgtaatttgttggtgtctcatatctatgtatataatgtttgacctattaatatatcttgatcaacgtgtataggacttaataactctcggcgcctgaccgcaattacccatttatacacgagtacctttctcccaagaggcttgactggcgg

SEQ ID NO: 68277 - DNA, 3180 bp, Arabidopsis thaliana landsberg
  unsure (1)..(3180): unsure at all n locations
aacaaaaagtaataaagacaacaaatccataagaactaaatcaaactaacatcgacatataatctcttaattaccttcaagtcgttttctgtttttttttaataaaaaaatagagttacgtcaaagaatttgacactttgattccaacaaattatcttttcttctttttgtttttcaacctgcaaggaacgtcccagtagataagttgaattttatcctcgtccctctttgaagtccacgtgaacttcacgtgcatagccgtcactcaatgtcggaatacattgtttttatttttcttcttctgtgaattattnagttcttcctaattatataccttcccatgattcgtgttcgttgcccacacattactatctctcttttactcacctaaaaaggcacactataaccttatgtatcaagtgaccgttttttaagatgaaaagtgttgactgctatattttatcatatactattttaaaccaatcagtcgtgtcaattctgtatatatgtttttttctcctttagaagctagggttgaacaccttacaaatcgaaagcaaggcattgtaaaaaaccacgtacccttctactaattaagccttccacaaatttaatataattttagtgttcgaatggtgataaaggatagtgcagaacatgatgctaaaaacgaaagcaatatatggttatgatagaagagattgaccaaaacatgttgaacaaacataatagaattattaacataacatgtgttcaactcattttattggttattttgtgcaagtgtggtgttttaaatttttctttaaacatgcattccaaattcatgtgagcgaaggtgtgaaagctttaatgtatttgctgcttgtggccaatctttaattattccaccacattattcattcccttaaatgtactaaacaaattgtaaggaatataatttaaggttttcggtacgaagtaatgaaggcatgaaagcgtttatgtctttgctccttatggccaatctttatcctcccgttgttgtgtctcaaactcggaaccttaacttcctccttgatcaagaaatactagttcaactataacagacgtatatataattctcatacaccaaaataggaccttaatctcaaagacctgcaacgtcgatgatacgtaagttgtcttgtgtcaacacattacatgataatctatggctgaagaaatttcgttaaaatggtacaaagagaagggtttaaaaatatgtttcgtatacgtacaaagtaaattaaagcaggctatgttcaattaatcgcatggtgtggaatattataacactgttgaagacgacaaaatagagtacaatgtttaaatataaagaaagaaaactcgggaagattcgtggttatagactcctagtcactggtgtaaaataataatctataggaaagatgggaaaaagaggagcacactgcttttcaaaggaaaatgagtggtctcgagctccgaaaacaaagaaaaaataacctacaaaattgactaattaacagtaaaaactaaaataaccaaagacaaagacagtttatgttatattatacatatatacccaatagttatccacaaatgatcggatcgcttgtttactacttcctccaaaatttggtcatcttcgggatccacaccacgtctcttgtccagaattgtcgtcagccaccttatttttatgtttacttattctgatgggatgcgacaatgttttcgttacatgaagttcttaaaaatatctgatcaaaaagaatgaagctcttaaatattttgaaacataaccaacaaacatttcttttatataaagttaaaatgaaaattttaaacatccaaaaatttccatcaaatatatcttgccttaacaaaacagatacatgttttcttgttggataaattatttcataatttggatcaagtgaaacaaaatgtttctccacttttaactacgtttgtacattgtgcaaaaatctagagaacaagtatatctggaagaaatgtaaccatgcaagtgtattctctcatttagggtaagtacatcccattaaacataaaaatagaaaagtatatgtatatccaattcgtctcatacatgcataccacacaattaatgattctttattcaattacatctttttacataaaaacagatggcataagtgtaaataaagggaaagacgacccaagaataaggggtcacagtcgttgagcttataaaaagcatctcataggactcaacctcaccaaagtcatatcctattgcatcactctcctttaaacacagtcagagaaaacagcaactcttgtctgaaaaactagagagagaaaatggatcatggtaggttaatggatgatcaaatgatgctaggctctcaagtgtacccctacacgacccaaccccaaaattcacactgcatcatcgttaaccagatcgatggaggcgaagaatcaaaaccggtgaagcggaggaggaagaggaggagtaaaggttcatcagccaccaacgaagaagacgtggcggagatcggagggatgttgaggaagaggaagttgaccgatgaacaagtgaacatgctcgaatatagcttcgggaacgagcataagctggagtcagggaggaaggagaagatcgccggagagttaggtcttgacccgagacaggtggctgtttggttccagaaccgccgtgcacgttggaagaacaaaaaactagaggaagagtacgccaaactcaaaaaccaccacgacaacgtcgtactcggccaatgccaactcgagtctcaggtataaattttatgttttttcactataaaacagagtaaatttggtgattcttaatttcatgttgcttgttttttcgaaagatgagtaattttatccgttcttagataattaacatatagtttattcgtcaattagtatattttgagtatttattacacatatgtgaaatgtagttgaatcgaattttacaactagtgaaaatccggtagctagctaaaaaacacatgtttgggaccacaccacaaatataataaagtgggatatttcgtcatctcattcttatccaccattaaaaaaaaaaaaaaaaagttccgtccgtacaatctcagttgggctcatgagtggcccatctcacacccgcccactcatttaatg

SEQ ID NO: 68278 - DNA, 354 bp, Arabidopsis thaliana landsberg
catttatttcctatctttgatgaacagtgtccaccggaaaaatcttaacctgtgatgcacatgaagcttgccttgggtggaaagtgtaaagctattatttctcactctctacctgtgaggtcaggacgtggagctctactttattcttaccaattgttcccttgctgaccaacggctagacacccaatgccgcttttgccatgccaatgtactagttaaaggcaatttactgaaaactcagaaagttggtattcttcgcgagactagatcagattaacttactcctaactactatgtctaatagttattgagctcaagcgataccttgggggagctatgttcaaatcagatgga

SEQ ID NO: 68279 - DNA, 1913 bp, Arabidopsis thaliana landsberg
ctctagaccttatgatctgaggattgctctagccttagtgtcgcttcggtgacttcccctgcggatttacataaatcttccacagcggcaaaggtagatgcatgagttacagctgaagtgatgacatgcttaaagattgagtcagctgctttcgcaagcccatagtctaatattccaatcacctagataaatccagaacagtcaaatgccaaaaagtgtaatctaacaaatgacttaacacagaaataaaaataaaaattgatacagaagtcaaatcatatatccatacctccattgcctctagaacagtactaagagcgattccagcagtctcaccaacgcttagctgatacttaatccggattctactcgagtctagctcaaaacgcactgcattctccatgaactttgcaagcacctcttgaatctgcaaaacacatacacgattctttgaaatgtggatgcaaattcgaagattaaagacactaagctagccattggcactgagtttaactaaggttgcacctcgtcaaagcaattagaccattccttcctaagtaaagcgtaagccacaggttctccatcttcctcttcaccaattctcaatacaactttaagttctctgattctctcagcggcgaatctgaaacgtccatttttcaaagcttccttcgtttcctgcaatgcctcacaaattcccacgatcgcattcactaaatcaagagattctcttttcaatttcacttccttagtcttttccgttatctcatctaccacactgcgtatctcaacatcaatcggacggtcagaaaccaattgtaggacatcggagacgtcatcggagatcagacgagtcctcgagacggtgtcttgacaaagagaaaatagctccgagaaatcagagtgatgagcgacgagataagactgaactttggacttgatccgcagagaatgagactctaagcggtttatgaggagacggagatccggtgcagataacggagttgtgggatcgtttagatcgtgtccggcgagaaggtcccgaacagtgatcgattcaaacaacgcgtctatctccggcatgacggagggacggtggtcgttgtcgtcggggctcttttccgattagagagtaattggcggtgatagatttggcggtgacgatggaccttattgaacacggacgtttttattttacttttactattgggcctatcaaataaaatgttaggctcaaggcccaagtcttcatcgggaacttgtaataatgtatgttttttgacatcgaaaacatgtcatttttttgttccttgtcactaacgtaccacttatttaaatgattttctttatttttgctatgaatattcaagtaaaatactgcaacagttacttagccttaagaccagctcaaaagaaatcactctactccattaatagtaaattccatttcttatataagcacaattgtaagagaaaagcataacaaaagaacatagtaaataaaaagaacaaaagcttttaaagtaagttggattaatctatattatcatttgtttttcagacaagagaaagagagatagagagaaagtgtctgatccatggctgcatctagagaatttattatatgttgcttcttaacacttctcctatgcaatttcttcatgagagtcgagtctggtgctgctgctgacgtcagtagaggaggatgcggcggcggcgatggcagcctcggggacgataatgagcggtgtgtggaggcggtgaaagaagacgacgacgatgatgtggatgatgtttcaaagtgatcacaagatgaggatatatgcttgatcatgcatgcatgatgcattctttatatatagggctatttatttattacttttttttcgttccattttctttcctcaagtttt

SEQ ID NO: 68280 - DNA, 2926 bp, Arabidopsis thaliana landsberg
atctgggatacgcaatcgaaaatagaagaattcgtcgaggaagaagattcagacctggtttcatgttgtgtcggacttggagtcgactctattctctgtgttctttctcatcagacaccattaaaggctaacatgcgctatataaatagctttaggtttcaagaattgaaccggaaacgtgtttttattcaattatggtttaaaatggaccggtttatgatccggtttacaatagtgaaaaacagaaaactaatacgtatatcctttttgttcacaacaaacaacttcaacattatttaaagggactctccacaaagctttttagttcttgtgctgtaatctcccactctcagcaccagcaaaaggatcaataataacatttaccaccgcgggttttcttgcggcgaacgactcagcgagagcggatttaagctcatcgggtgtttccacaatataacctttgcctccaaaggcttcaatgagcttgtggtagcctgcatttggaacaaatgatgttggtgctggatcttctttatgaggaccggagatttcttcaggtccccttcgatcaccgccgtagacaccaccattgttgaagactataatcaccacagcaagattgtatcgaaccaatgtctgcaatcatcattaaagacaaaagttcagacaaaagacaatttccacattatgctaataagtatgtaaatctttttactacctcgacttccatggcgctgaagccaaaaccagagtctccttcaacagcgacaacaagccgatcaggagaagcaacagcagcagcaatacaataacctaaaccaacacccatagttccccaagttcctgcatcaagccttgtccttggctctttctgaaccaaaacagatcttcctacatccattgtattagctccttccgataccacaacaggactcggtccttccacagccaaaatagcgtctctgattatcctcataggagtcaagaaattgaaaggaaccacatctttagcaagctgtatctccatcttctcaccattctctttcgccttcttcgaaatcgattccacccatgaattagacttccctaaacaaaaaggatcgtctttgatctctctattcaacaatccaatcacagttttagcatctccaacaatccccaaatgaggtttccttagctcaatctcttcctcagagacatccaccaatataaattttacatctttatcccatttaggcgactctccgaaatgaagaagccagttaagcctagctccaaccaccaacgcgacatcacatttcccaatagcaagagacctcgccgcagtcgccgagaactcgtgtgtgtccggtaacaaacctttacccatcggagttggtaaaaagggtattccagtaatttcaacaagcttcttcagctcatcttctgctctcgaatacgcagctcctttaccaaacacaatcaacggcctctcagctttcctcagcaacgaaaccgccgattcaatctccgatctcagagatccacgaatcggttcttccttccgtgatctctcaacctcatccaccaatttatcagcttccgattccgatatcttctgacgcaacacatcagtcggaatatccagataacacccaccgggtcgacccgaaacagctcgatccaaaaccctagaaacacaattagggatttcacgaacatctttcgctttctctgataatttcgagaaagctttaacagcttcgatctgatcaagctcctggaaatcccacgaccaacatctctctgatcacaagaaccagagatcatcaccatcggccatgtattaacccaagcgttggaaagacccgcgagcccatgaacacaacccggacccgaaaccgttaaaaggatacccggtttacccgtgaggtaaccgtaagctgaagcggcgtaaccagcggattgttcgttgtggaaggcgatgaaacgtatacctaaagccatagctcggctagctagagatgtgacggggattccaacgacgccgaacatgtgggttacgccgagatgagagagtgacttggccacgagaacgttgccatcaattgacggtggagtggtttctgatttatccgccatgttctcttggatttgctcaaagtttcagtttcttctacttgctttagtttctttatatagccttttgtatttgtgttttactcttactgtgattacgtgttttgcattaatgctactattagcctattattgacttctttatttgcattttgtgtgttctctgaaaattttatctacaaactgtacacgtaattatgtgtgttttgctaatttaaaagttatctacgtagcaaatagtaaaattctcaacaaattgattatacgaccaaactatacatgaatttctttatttttggcaacttacattattcaataacaaagtagtatgacagataacttaatttacaaaggtattgtgatttagtgattcaataaaatatatctttggctttggtcactagcgactcctacttacctaatcttctcaataatttggatttggatgtgataaaatgataaatttatgagttcatggtttggaacaagtgaccttgtataacccttgagggctgccactagaattgttttgtagttagcaaagaaaacaaatcaaatttggatttgttcttttacacaaagtgaatgattttgaccacgacaaaactagagcaccactcaaagatttctcatgagtctacaaaacaattttttttttctccaacggtagtgaattccacaatcgattgagctaacaatttatcaaataaacttggactcgtttaatttaatgaagaaaacagaagagcttgacaaaaagaaaaaaacaacaacgtgtggaaccattaacaatcaaacatctttaatg

SEQ ID NO: 68281 - DNA, 2739 bp, Arabidopsis thaliana landsberg
tttgatctggtgggttatatcatatacgatgtggaaggaaagccataccagagtgtcttctacaatggaaccatagaggtagttgaatctggaggtcttctcagcggcgaatctgttttccttttaacactcggaatcggtctcctcctcctcctcggtctatgggcatacagccaagttcagcgtctcaccaaggtaaaccattggatctctttttctggttcatcatttgtgcagttaaacattcctttgataatctcctcttttaccagaaaaccaaaaaggtttccaaggtggaagtaggaactaggtctaccgatgcatcactcgatgaatggctcgaggttcgcttctctctttgtactcttcctcctcttcctcctcttcctcctcttcagtgtgattgaataatctgattgaagggtatgtttttttatcttcagggaactactttggccaagacatcgtctgggaaaacaaagaacaagaagaactaaaagagagctgttttgctccttccagttgttatagactcagcttcggcgttttgaaagagtttccaagtttaaagttcagtcttgaggaaatttagggttttaaacgacactttttttgttccagcattgtactctttagacaatctttacttcttgtcataaatattctcctcatgaaacaagttaacttataaatggtttagatctgttttttgttgctaacatcagtaacttttttagcagtagattaacatctttatactaatgttttagttcatcaaaacatttacagaggaaagtattggactctccaaatagttaagttgaagatatgatcaggagcaagtacaagagaaccacactccttgggcttgtgttgttgaggagagactgagctgcgagttgcgacttacactgagttgtgattcacactaaagttgtgacttatctaagcgatgaatgcactatggctcaaggtttggagtgtggtatgtttgagaatcgaagatttttatctctctgtcaggactatcgagcacttagagtgtggcttgagatttgatttagattattacatagaagaaactcgtgagtcaagcttactcaaattgaaaagaagaatcacagcttagttacaaagatctttaatcaaagacccttttatctctctctgtcaaaccagagctcacgaatcattttttttctttctgttttccattattagttcaagaagaagatgtaagaacacaacaacaacaacaaggtcgctaacctcccttttatttctcatctcatctgttccatggagactagcgatttccgttactgatagttctcaatcaagcagcaactttcttcgacgtgactgagttcacaatggttgcaaactcaggaccctagagtcacaataaaggtgagtgtgagctgctttacttctattcatcaacaacatatccataaaggtctaaactttacttttaccttcaaggaggcaccaccaacaagaaatccatcaatgtcttcttctttggcaagctctgcactgttgcctccattgacagaacctggcaattgagaaggcaataatcaacataaagtttcattttgcgacagataactaatctaacgcacctccatatatgattctcgttttggaagcaacttcctcagagacattcttctttagccaaccgcggacagctacatggacttcttgtgcttgctgaggagatgcaactttaccagttccaattgcccatacaggctcgtatgcaacaactatattgtcccagctaggcccagcatctgaaaatacaaataacttactgctgttaattgagttcagacatgtttgggaacaggagagggtaatcaaagaaaatacaagagtgttaccagcaaacgccttcagttgcgcgacgaaacatcaaacgtcttgcctgcttccctctcttctagcttttccccaatacaagctatcactccaagaccctcactcaatgcataagcagctttcttcccgataaactatggttttgttgagaacagagcaaatatgttttcacaaccctttcttagtaactcaccagtgcttataaagtgttttatttttctgacctcatctttttctccgatgacatgtctccgttcggaatgcccaagaatgacccacttgcagccaaggtctttgagctgttccacgctgtatggtaaaacgggcaactttgaaattcagacaaggttcatatattacaccggaaagtcataaggagggattagttgcaacgctctaatattttcgtcaaaaaatttcaatcaaataaaaagagatatagtataagtgaaaaagagaagtcgtaacctgatttcaccagtgaaggctccacctttcccaacccaagagttctgacctgatatgtcaatacggtctgtcaacgaggatttgacctggtcgatgtagacaaatggaggtgacacaacaacatctacgcaaaaacgatcatttagaacaaatggtcaacatgaggtccattttcaaatcagaaatggaaataatgctcgaaatatagagagcttgactcattggaaaaagtagcagaaactcacctacatctgcttccaaggttgcactgttgagatcggagataagcttggcgatggagtccttcgtcccgttctaaaacaaataacaacatagacgttagtgtcagggccgagagacaacatcagaagaaaagaaaag

SEQ ID NO: 68282 - DNA, 1264 bp, Arabidopsis thaliana landsberg
attcacttattcagtctgtaaaacgaaatagatagaagccacacatcgatttgatattatttttgggtaaccggtgaagtgagaaccaaagtaaaccggacatatcgaaccaggtaaccatacaatcacaaacacattgattctagattcaagatcgcatcataaagcataaaccaaaccgaacagtagtaatcccaaaaccaatctcattttgtataaccaaaggcatatatatataaaccgaaacaaacttcaatgaatgagtgcaataggattgagtgacaataacaaaatatgaattctacttacaacttggaaactcttgttagtatatcagcaatttcccaaacaaaaacacatctacgaaggtaaatggtcagcataatgccaagaacgcaatccagggaaatcttaaacaatggataagaattggatctattgtcacactctctctctctctctctctctctctacaaacatttgcataaacttctactattactactactttccaatcaatacctgggaaaagaacacaaaaccaagctactcttacagagcacaagagaagaagttagataagaaaatgagaaacatacaaatttcttaccggattttatgatttttttcacgcacgcaagtggcttcaagtagtcactgaacctttgcttggtctttttccttccatggcgtctttctttttcttgcatattgtgcataggaagggaccttcccatcgtttagatgctgaggaaatgatggaacccccattgcttgataaatcttcactcggagattcatctatttggcatacagcacattttaagagcccagtttccgtatttgagagaagatcctttcccaatctacatttcaaaacacgagcaaacaaagactgatagtcaggatctgaagtttcagttacttaacgggttggataagagtttgacaatatcaactcatggctagaagattacctatctgcaagcacagcagaaccttcttcaaacaattcttctacaactccaacagcagaaagcttgttgccatttttgttgttggtatccatatggtttttccttgaaagaaatgaggtaaatgggttctgtttcttcatgggtgctggagccaagcaaagatgaccagatggcactatgtctacgcctacacaagtcgtatcatcgttcaacccatatgttcgcaatgcttcctggtaaaacatatgattcagaaaaaagaggaatctagtccagagcaagaacac

SEQ ID NO: 68283 - DNA, 788 bp, Arabidopsis thaliana landsberg
aaaatccatctttattccccatcaatacttcaatccctgcatgcttctccaggcacacaccattcaatttcaggaacttctgcaccctccctatccacatatcacaatcaccatagaactcaaaactcaaataagcataaagaagcaggcgttattaaacacattaaacagcaactaaccttacaactttatcaatgaggctatcccaatcaacaagcttcttatccatcatccccgtccatttcttcttcggcggctcaagtttaggaaactcaatgaggtaatcaggtagtagcttgttgatcttacccctaattgttctagcactgtactccaatttactcgaagcagcccacattggaactacattgtgagcatcaacttcatgtatcgctaatgaatcactcgttctcttgacaacctcatctttacaacgccggatttcccgtaaaggagagaaatcagtaaccagatgtgaagctccacattctgtgaggaaattagggattgtctcctttgcatctccctgaatcgtaaagttcatcttgagataagtaaagaacataactttacagctaattttcaataaacctacgaaattcaaaggtttattcaatgtctaaattagcttcatctaccatttcaattcctcatataacaaagagcgtaaaaaccctaacttttcctctatgattgctctaatttaaaatgggtttggtgtgagatcgagctatggactcacctgtaagagaaaaaacggaatttggagagaatcgatttggtggtga

SEQ ID NO: 68284 - DNA, 1947 bp, Arabidopsis thaliana landsberg
atgttagctcatgtaagttaagtttatctttagacttacttgtcaaggtttgttccaatttagttaaccttttaaggtggtaacactacgtaatagtttaattaggtttctataagtagttataggactgttatattacatgtttcatttgatatatgtacaccaatctaagttgttgtggtctcattctcataaaattgcatataaaaaagtaaagcattttggaacgaaattcatagaaaaatctcttacaaagaagaagaatatatgccattcatatttctgcacatatgtttggttgctttaatctttcgacccctttttccaaaatgttagtattatatgttaagtttataagttttaaccaaacaagaggagctaacagaaatcgaattaacgactcaaattatgttttgtatagaaaagagcaaattgactttggttgcatttgaatctcgtgactaatggaacggccttttttttttttttttttttcatcgtctctcaccttttccaagtagtttggatcgaaaaactttcacgagaaacctaagaaactttccaggaaagttttggttcacatacgcattaactcacaccattcaccaagctttctcgtgccccttaaccacaaactttgctttttttaacttagtccattgcatctttctatatacattaacatgtttcctttccatactagaagaaaaatatcttctcttgtgtttcaaattatcaaattgctctgatcaatggagaggaaacagtcaaatgctcattccactttcgccgacatcaatgaagttgaagatgaagcagagcaagaactgcaacagcaagagaacaacaacaacaagagattctctggaaacagaggaccaaaccgagggaaacaaagaccattcagaggttttagcagacaggtttcgctagagacaggtttctcagtgctcaacagagaatctagagaaagagatgacaaaaagagtttaccgaggagtggtcgtagctttggcgggtttgaatcaggtggaatcatcaacggtggagatggtcggaaaacagatttcagtatgtttaggactaaatcaacgctcagcaaacaaaagtctttattgccttctataataagggagagagacattgagaattctttaagaactgaagatggtgagaccaaagatgattctataaatgaaaatgtttctgcaggaagatactttgctgctcttagaggacctgaattggatgaagtcaaggtaacaactcttcttctttctctttctctcttcaaaacttaattatcagttagttccaattgtactctcttgcaggacaatgaagatattctgcttccaaaagaggagcaatggccgtttctcctaaggttcccaattggatgcttcggtatctgtttgggacttagcagtcaagctgtcttgtggcttgccctagcgaaaagtcctgctacaaactttttacacatcacaccattgattaacttagttgtatggctattttcactggtagttttagtctctgtgtccttcacttacatactcaaatgcatcttctactttgaagctgtcaaaagagagtattttcatcctgttcgagtcaacttcttcttcgctccttgggtggtttgcatgttcctagccattagcgtacctcccatgttctcaccaaaccgaaaatacctccatcccgccatttggtgtgttttcatgggtccttatttcttcctcgagctaaagatctacgggcaatggctttcgggagggaagaggcgactatgcaaagtcgcaaacccatcttctcatctttctgttgtagggaatttcgtcggggccatcttagcttcaaaagttggatgggatgaagtagctaagtttctatgggcagtaggttttgcacattacttggttgtgtttgtacactttatca

SEQ ID NO: 68285 - DNA, 556 bp, Arabidopsis thaliana landsberg
  unsure (1)..(556): unsure at all n locations
tgtcagcatttccccaatgagcattcacattacttttatttattccaaagtctggaggagtccagtggagaggcaagctcgtcccccggacaaagcatgcgccatatgtatctatctgtcgcgcattaagccaccgttcctcttcttcaacccctatggatccttgtacactcaaatccacatgtctacctgcaagcaatttatcatttttattaaacaaattaaagataaaatttctgaattattagttagatacaagttacaagaaaaattgcaaaattctagctatcgtctttttaaaaacaaannnnnnnnnnnnnnnnnnnnnnnnnnnnnnnnnnnnnnnnnnnnnnnnnnnaaaggacaacgacatcaaattaaaaagattacaaaactcattagccatacaaaagttaaaaactcacaagagtgttaaacacaaaattgacaagaaccatatagatttaaattgatatatcaaagagagaaggttcagctacgatttatgtgtcctctgtgatgagcaatcatgacttgagaagtagacaatagcatc

SEQ ID NO: 68286 - DNA, 487 bp, Arabidopsis thaliana landsberg
gaacaagccatcacaaattcaaccatgtcaaaacctaattgtatacagtggagattttaaaccaagcaagtatggatcatggcatgatattggatggaggaaacaagagaccgtttcacaatctattttgaacaagactttagaaaactaataatcttagcaaagagcatcaaacaagaagattctccatcgaacctaatttctgagtacaaaagattcatactttttgaaactaataaatgatcatatataattttgttgcgatgaagccaccacagttacattcaagattacaacacacagacacaaagattcataagaaagagagagagagagcacaatcgtaattacttgagaaaatcaaaattcaaaacaaagctcaagaagaagaaaatcacagtgaaaaagtaaaaattatagaataagatgaaaaaagaatcaccaccaaccatagacgacctgtgtgtacctctgcttaagccatctg

SEQ ID NO: 68287 - DNA, 543 bp, Arabidopsis thaliana landsberg
  unsure (1)..(543): unsure at all n locations
caggctcgaccatgcgcccgcgcaccgcagaagaaaagcgcgccatccgcgacgatttcctttcgcaggtctggccgctgctcgagggcgggaccgtctcccccgtcatcgacaaagtctatgccttcgaagacgtcgtcgaagcgcaccgccgcatggaaaccagcgcccatatcggcaagatcatgctgaagctctgagcttcacccgccgccgtcatgctcgggcctgtcccgagcatctgcaacggtcgacggtgggacttcaaaccctcttgtccctcaatgacagcgccgcaaccaccgtgacgatccctggcagggccatggccgcatagagccagtgcgccgccgagatgtttccctcgaccccgcccggatgcaccagtccggtgctgttggcgatgacgccggcgatcgccgcgccgaaggcgctgccgagcgactgcacggtggagatcgccgccgaggccttgtcctgttcggaattctgcaccagctgcagtaccttggtgacgagatgcgcccatncgagcccgacgcc

SEQ ID NO: 68288 - DNA, 622 bp, Arabidopsis thaliana landsberg
  unsure (1)..(622): unsure at all n locations
aattattaaggtttttggtgattaatttaagattttattcagggaataatcttcaaaatatttacacatgtaattgttactggaatatgtaacaatctctgcaagaagattttatatgtgtgtcaaacagtctgagttatataattgttactcgagagaaaatcaaaagataaatttaccaagtatggaaaatgtaaaagaaaaccacttaaacgacaccgtttttgaagaacacaaaagactacattaagattactaatcttagattagtcttgcttagtgctcacaaaaattagtggcttgtacttaaagaattacaaaacccacttttatccattcggttactccgtgtaaattacaaaccaccagagactttctatacaaagagagcaaaaaactgcgattctaaagaaacaagaaaacaacagtgagagagatagaagaaaacaccctcccaagcttttgaaaataaataaaatcacacagaccagtccccatcatgttaaaccttcttcatatacaaaccctntcccatgtttggttatggttactcacactaacacacnttgaaaagacacttttatgttatcatatgatgctctcaaacgccacttgcgtgtgc

SEQ ID NO: 68289 - DNA, 2354 bp, Arabidopsis thaliana landsberg
aaaaaaggccatcaggctcaagtgctagcttgcactgcagttatacaatccaaacccaacccaattattaatattttctcagaggacaaaccaattcacatacaccaacaaaagcaatgaaaacgagaaaacttgtatcatggatccaggaagatcatttgtccagtgaagccccaacgaattaatgatcaaatcaaccgaacttcacatacaacatatttgacaagatattagtaggtaatagaactctagtgagtcgcagcaaggggaaaaaaacaaagaaaaacaggttttacaataacgtccttgttacctctctttgactggcagaaactcttcatcaccaacaaagtaagaggtttcaatggagttatcgagtgaatcgtcttgagcatctctacatgacttaatcatgtcatatgaagtatccatcatgataagcttctcaatcccacctgtgcaacaaagccaaaatcatcatcaacaacactcaaaatgcagaaccagaacagtcaagagagagataaactaaccgcgaccacgtagtaatctcttaacagcaccaagagatcctcccaaacaaaatgcagtgggaaaactcttcttacaatccttaagaaagagcaaaaacaatatttactaagcttgattgaaatcgagaaatttagccccaagagaagctaaattgctctctcaatggcgaccatgcatcaaacaaaagagtacctctaagcgatcaagtagattatctgcaacagcgtcaacaaaagaatcgtttttttggcgagaaagccacgccgctcgatcacgctgcaaatcaatcgaacacacaaattataagaactcgaaatctggattaataataagagagagaggcaaatgtaagatgaattcgaacactacacatgtattcgcttgaggtctcggtcaaagatcttgactttggagctgttctgctgaaactcaccgtcaccgccataagcaccttccgtagagaaggagagagatgcgagaaatgtatgagcttgcttcgtagatttctcgggtactcgttttaggagaccaattcttccgtacagtgaattgatcctccgcatctctatctctggttcttagctgcaccggaattggtcggacggaggttctgggtttggtttgaagaagagacggtagatttctctgtcttgtattctttcattttgatccctgaagtttatctatattctataatgtttcccttattgtttttaattttacgttttaacccctatgttgtcattagaatcagatagattatcaactttctctggcaaaactgtttacgcctccaagatggttaagtacttgcaaccagaaacgctatggaagctggtaattggtaaacaattaatacaacagaggactcaagattctttgtaaagtccattaaatgtttacatgattgatcagttccttaaggacaatgtgaacgatagaactaacgaacatggtggatcgttgcgaaaccattgcagattcgctttgcagttagtggactagttatataagcattctagttttgttgtacacgtacgtaatgtggttgagagcgttacaagaacaagagttattgccactctcttccactttgcatcgatttggatgttgtcttatcgtttttagaaaacagaaacccggaacaagttgccactcaaaacacagggaataatgtacaagccaaaaccttgaagagaacttttgtaataacagatacactttaaatatatgagcaatgcacacaagacatgagtaaagagtgataccgatgatttctgaatttacatgatcacacacgaacatgttctttgtcgtcctacctcccattcttcatctgataatcccatctcactgcaaccaaaatcaagtttgtttcttggaagttaataacaaaccgtgggaggatcacaaagaaaaggaaacacagctaaatgtctctacaaaaccatgatgtgtaacaaagaatatatatatgtattgagtttgccgggcactacgcacatgtgaaactctgaaatctaaatgaattaaaggatatccattttgagccataggggttaaagctcaagactaacattcctatttgcataaaacaatggatctaattatacaagctcaagattcacaacaaggatcctattggcataaaacaatggatctacttaaattaactcgtattgggatttaagcaactcaataagaggaaaacatatcacacgtacctcggctcaaattctctaacttgagtgagttcactaccacaagcatcaggccactgaactttccgccttgccatgtcaccagtgagatcgctacca

SEQ ID NO: 68290 - DNA, 590 bp, Arabidopsis thaliana landsberg
tcttgcagaatctttggtacaattggagttatattcaaaattttatatatgtcaaatatggatcctaattcaggtttagctaagagaagtttcttacaacatgagttgttttcacaattacatatacctggaagcttagctttcgaagcatttagttgtatctctaagtttacaggagctttgctttgttggttttcacatggaaacttgcaaaaagaagtatctaaacatcaatggggattaacttgtaagagccgtgattctttaaaacatgtgtttgaacataggaacgtctctgtgttcccatttcactatgtatcaaaagatattagtcctggcttctttggaaacatatctaaatccactattcagcattttgttaatgaagctgagaggctacattcgtgttctttgctctctttggcggctgcgatgataccgtctttgaatgtcatgtaagtttagtaatattgggtagtgctaaaactctctttggcgaagtttctgattgtagatgttattacgtctgcaaatggacttgctctgccctagggagtatgatgtaaacttagggagaacatgacatagac

SEQ ID NO: 68291 - DNA, 117 bp, Arabidopsis thaliana landsberg
aaaccacctttctagataaaatgtctttttttgaatactacggacaatgcacctgggggggggggttatttatctatcgacacacccaccccactctatgaatccaatggtgagatt

SEQ ID NO: 68292 - DNA, 542 bp, Arabidopsis thaliana landsberg
caaaactatccagattggtgattatgctctgatgcacagtacgaagcccatttccaaagacgcactggactgccaaagccactttcctgctcgatggcctggagagtactattttccccattctttaccagtgcctcaatagaaggaaacatgtccattccagaaaaagggcataaagtcgcagctctccatgactggcaaaatagtaatttaaatcgacattatcagtacacacctttctaatcattacccttataaagaatttatatcccttataaagattacctgcccagcagacctgcagagatcacatgcctcttctattctcccagcccttatcaaagtccatacatcctcaagaacagattcatcttgtttctgccaaaaaaggtccaaatattgattttatttaacaacaataacgacaacgaaagatgaccttcaagtatagatataggcatccacatgggaactagacagacaaagaacagtcacgatgcttgattagccttagacagagaaatggtaactctgagatcaat

SEQ ID NO: 68293 - DNA, 209 bp, Arabidopsis thaliana landsberg
gcccaaaagactcaggtttgagctccattatcttcccttttgcttttagttagtctcctcgctttttcttaatcttctgtacatcgtatggtctaattaatgtgaaactatgtgcagggtgggagattcggtaaactgaacaaaagaattagttttcctgagacatttgatctaggcccttacatgagcggtggaggagaaggatcaga

SEQ ID NO: 68294 - DNA, 654 bp, Arabidopsis thaliana landsberg
atgttcacttaattgaagatcagtgttttctgtacttttaagcagcctcaggcttgccaaaagctgcttgtataaatgcgtttttaaattggctaattgaggcttggtaactcccggaagctttttcagcagtactttttcgtcgtattcgggcaatttatccagagcatcgaataactgaatgattttcaaatcctccttacccgaactccgctttatatatagtttaaaatgccttttctctgatttctgcaaagagcgaaccaattgaaataatgcatctgtaaaactgttgggcgtcataataaatttttcctgaaactcaataccacaaagggtttcaaaagatcacatctgcttttggcatgataaaaatacgaacaacttggtttgtacaggctattttcctgtactacttttacactgtcaacggaaatgagagaaaagcaagcaatcgtgaagcaagaaattggcaagtgttagaggcatcgactacagctaaactgtaaaaaagaccaagcaaaaagattattcaagatttttcatatgggcaagcatcggtagaggtcatctgtttctacagaagaccttctttttttatagagatgccaaatctacagtatttttttaaaaatgagatatttcttaattttt

SEQ ID NO: 68295 - DNA, 1545 bp, Arabidopsis thaliana landsberg
  unsure (1)..(1545): unsure at all n locations
tcttacttgcccagattgaaaaacgtgtgcatgaccatgttattaaacaaatactactacttcacctaacgtattttaatgtttgttttgttatacaacttggatccctctcaccaattatgatcactagtgagcccaaccaaccgggcccaatacgctttcatcttttgggcccaatcatttttttcctcaaacttcaaaattttcattacagcatatcgctggtgtgtgcacggcatgcatgacaagctaaaacgaatggtggatataactaacatatacagcttatactatacatggtatacaaacaaaaatgatgatccaagctaacctactcactcatagttgtccatttattctttctcaaaacaaaatcccatacaccagacctctaagttctaagtctacgactacgagcatagtcacaatgtctctcgccaacagtctcttatcatcaagtaagtttcattattttctccccaatatcactttgtcgcatgcatttccatcctatcatttccccatccaatctcctttaaaaataaaaaaaaattggatttatttctttcagtaaaaatgaaaaagttgtaaattatagtcttcattaatcttcatggaccttaattataaataaatgtcaaaaaaatgaaactagacttgagttggtcttcctcgtcgcccatgccgctgccgtccgtgacgccactccacgtcgacgcatttacttttcctccggctgttgagtcgcccgcttcccacaaaagacttttcctcggtggtgcaggttagcatcaatagtctgtctatacaattaatgcacacagcagcattatgtggctaattacctttaatcacgcagggatacgatggtttgatattaaaggcaagttcgtgattgtgacggtcatcggagtctaccttgaagccatggcactgccgtcaatctccgctaagtggaaaggcaagaatgcaaaggagttgacggaatccgtccctttcttcagtcaactcgtcacaggtggtgtacactttattacgtgctaatttaattaaaacacttttctatctcgttcacacttcacacgatttttgtagttattacatgttcaacttaaacacgtcatatattacaattgtttttgttcttctcttgtgggaaaaggtgagtttgagaaattggcaagggtgacgatgaaaaagaggttaacggggatacgatactcagagaaagtagtagaatactgtgaggagatcatgaaagcgtcagggaaatacacaagatccgaagccaaagccattgaccaattcttgatggtcttcaaaaaccaagatttccctcccggctcttcaatcatcttcgctatctgtcctaaaggctctctcacagtgagttaactttatttttcggattatcatttcgaagaatatttgatcgaatgaatgaaatgattaatagatattttaacaacttgtgatgcagattgcattttcgaaagaggagagagtcccgaaanctggnaaagcggttagcaagaataagttgtt

SEQ ID NO: 68296 - DNA, 716 bp, Arabidopsis thaliana landsberg
cttgataacattttatcttcaccaccaataacaaaagctagtgcaaatgttgataagtatatttattaaaaatttaagattctcttcgtactaatatattgaaaaaacccggaaattacatataaaattattacaaaattgttattatcttattatcatttaaaaccaatatatatttctcatgaacccaagatatcttgatgtggcgatatctgttgacccaatacgtcaagcaaaacccataaattatcattatatacatttttattttatttttattttttctaacatatttatgaaaaaaaagttaattagtctgtggattgaggaagtctgtgggatgtgtagccacacctgatggaaggtttaaccacgttgcctcaaattccacagccgtctatacacatttatttacttttctaagaaaaataataattattagcttattaaatattacacctaccaacaaaagtaatataatctgataccaaaaaaagagtaacataaacagttatattttgtctttaaaatttcccctgcgtaatttctatgtttttcaacttaactctttttctatacatttttctccataaactctgtctatgttataatcgtcgcaaaatgtgaataaaatgtatataaagttttctttagcaaaaaaaaaaatactatataaaagtgtaagctcatttaaaaatcgggataacaagtttaca

SEQ ID NO: 68297 - DNA, 1155 bp, Arabidopsis thaliana landsberg
aggattgattcattaccagaaaaacaacgacaaagcgaaaccggcgtcggtgatctctgcgttcaacagtcaattaccgggaacacaatcgatcgccgccacgctattcacagccactccggcgattccggatcacgttttaacgacgacgtttcaaatcggaacgaaagaaatcgaaaaaatcaaatctaagtttgctcccaagaaagtctaaaaatcgcgtcgttatatatatatattttaaattttattaattggtttttaaattttaataaaggaaaaaataaaccttgttcattagaataacctgctgaatcagctggagggttttaagcaatgcgtataaaggtacaaacctataaacagagatctctctacaaagcagacgaaggagaagagaaggctgtacaattttttatacactaaaagctctgtataaaccaaacaacataactttgcctagatttatacatatatgtatggacactgaaacccaaaatcacacttttatttatctatcctgaggttatgacagagatgtccaagttccggccgtgacttcatccaatccaagaatttcatttcttccggcgacgtgctatagaggtatgatctgaatgttatcaggtaaaagtagcgcctgctcatacaaaacaatcatattatttgtttggatatgggaagaaacgaaactcatggtttggttggatcgttttaaccggattgaagttgtaagtaactaaccttaaggctttaacacccatgtccatgatgtatgaacggttttcatcttttgtaataggaagtttgttcagctctttactgtagtaaacgatgtcttctcgcaaatgtcctgcaccagcacacctataaaatgccaaaacaagaagatgaaatcatgagcgatgtgtagtttaaagtgataaaattctcaaaagagattgattgattacatacagttcgactattccatctacgtctgatttgctctgaggaccatgagaaagcactcttatgagactcagtatgtcgcggtagtctcccatactcaacgcttcttcatcacaagcccctgaaggcgaatcatcttcttctaaggtagaagaatttgtggttggtgtagctgtgaagttctgaccaggttgaagtaggaga

SEQ ID NO: 68298 - DNA, 504 bp, Arabidopsis thaliana landsberg
  unsure (1)..(504): unsure at all n locations
gacactcacgtaagggtgcgcgattggcatttcatctgactttattttccacctaccattataaataaacttcttagctatattgaacattaaaacatgataaaacacatattttttcaaatagatgtatccatcagtataaaataactgaaacatgagaacttgagaagaaaataaacaaaacaaaacgatttaaaaatcaaaccaaccaaaattttaaccaaagtataatagatgattatgtcggataaggcagtgttcactaattaaaattagtcaaccatagtgagtgattagacaaacctataggagaggacaagatgatgaaggaagaaagcaatttggagcttgccaagttcaccaccaggacatacccttactcctcctccaaacgccgncgttttcttgttcatcttagccttatcctatttaatttaaaaaccaaaattagtttcacaatatttccgttttttttctttgcttaccatttgaatgttatttttg

SEQ ID NO: 68299 - DNA, 2703 bp, Arabidopsis thaliana landsberg
atttaatgataggcgcggaacacaactgagagtggtaggcaaaaggcagcagaggaagtttacaaggttcttcataacgcgaggcaagaggcattgcagaagaagaaagcagaaaagaagaaaatgatggaggaagcggaagcaaagatgagcgcagaagtgataaggaagaaagaggcaaaagagagagcaaggcaggtgaaaaaggcagtaccaaaaatgaagatgagccgtagtcactagctaaaagcttaatcaaagagagccatccgaattaatgcattaaaatcactctccagagttcaaactctaaaaagcttagaaaacatcggcacgtgttttactcgatggctgctttgcttcataatactctcccttaaagtagtaccatgtttgacttgataatggagtttttgatgttgaggtggaaagtcatgcgagagctttgtatagtatggatggcaaatggctaattgtacccatattgtctcatagaagaaagctgatctatgcacactactttgttctttgcatctatatgttgagccctgagagtttgtataacattgacggcaaatagcttattgcaggcttatctcatgtagcttacagtccaaagttattaatggcataagtcatctactgtatatagtttactttgcactagtagaatatgatctctatttttctacgagctttctgaatcttctcttaattgaaaacaaaagtgcaggtcctactagtggccacgtcgtgactatagcaatgtatgccaatagccaaatcgatttccggctgtatcttgaaagctgatccactctcttcttcaaaggaccgagtatattgttataaacttgaggattattgtccttgtgtagatgattacttgtctttacataaatttgagcattatcctctggttctgcatcagctcttgttgtgtccacttcacttgcagcagcaaccatcccgtgttctccagcatccacgaatggtccctgatcaatcgaagatcccaatggttcggggatgatctgcatatgaaatatatgatgcatgtcttagaagagactaagagtggataatgtcatggaaatggactaaaactcattttcatcataccttgtgtcttctgtctgcaaaggggctggagagtagcacttcaaaatattcgtgtacaacccttgtccacctatacattacagtttcacatttttcaattccactcctaagaaagtccttgtgaatagaaatgagagatgagtttctaagactgcggatttacgcagattgattaccacatgcttgacgctgtcaacccttcatagtaagctagatgaccaccatgtgttgtggtagccagaactatgtttttgtttgccctgcaaaagttgagacattggaacatcagtttcataatacagggagacccatcactatgcaatgcagaaagatacaaccaagaatcgcatcaaatttttcgccaacgatgcctaaagccgttcacttcttaatttagccatgcatggaaactcaatatgacagtgaaactaccaagtcagtttaacagaagaattaccaactcaatttagcaaccgtaatcttgtgaaaacttctagagcacccaagaacaaaaccaacaacaaaaccagataagaatgactttctagagcatctcctactatcccatatcaaaaccaattccccaaatactcggatcctgttaaataccctattcagactattgttccctctatctaacttctgaattttagtgaggtgacgtggcattacttaacagctaaatgtactccttctgaggacttatcagtggccctacaaggctacaacataagagaaccgatgtattgtgcaaattaatctagtccatcagctctagagttgaaaactggtggaaagaatgattaaagggtcgaagcatatggattcttacctacattcatcccaaggaatagcttctctagtacaaactggatcatccaaagcactgatgcaaaggagcggaacagcgacattttccacatattgtgaactgcttgaacgtctatagtatgtatcagttgtctgcatcattagagattggaagttttactgcttaaaaggaaagatgggatacattaaacaaagggtaaggagaatgtgaagcaaacttcacctcgaatttggcaacaagcctggtggcgtagttgtcaaactctcgaactgaacgtgactaaaacaagacacaagatgaatggtgaatcttttaagtcaatttacatgatttggcaaatatatagaaaatcaaaactcaccttcttaatgccttcccaatcggctatacgagaaatgatggaatggtgcctgcaggtgcaggtaccaccatgtgttagggaacaagaaagacgtaactaaagctagcaaaagtaggtatggaaacaataagttaacaatataagacaagaatttttggacatacaattgtgcataaccttgtagaccaatagtaagcattctgtcatacactttttgcacgagtttgcggttgataaatcgatcacatatctgcaaagaatattattttaaacagtaaggcatgattgtttttcttttctacattccatggaccaaaaatataactataagtatctcaaggaagaagaagagagattgcttcactattaagtctaaacaatatcacag

SEQ ID NO: 68300 - DNA, 621 bp, Arabidopsis thaliana landsberg
  unsure (1)..(621): unsure at all n locations
gaataactctacgacttccatggttttggcatctacgatcaaaataggaaactttagaatctcaacttttccttccaagtcaataacggagaaaaaattgaattcttgtgacttctttctctcaagatcagcagcagccactcgaagttcctttgaacaatcgtggttaaaaatctccaaatgggcaggatcatccatctgatatcatcaacataaactttattacccatcattcacgattatttaggtataaaaaactagtaaagaataacaatgtaacgatcgagacacaaacaataaacaagttccaatctcgttcagacattccatcgaacaggtcgcagacattgcatagttgattcaaatttcgcatcacttgttttcgaacaagcatacggagcaggaaccaatcaataaagaaatggaatttaattccgcattccgctgtagcaaaaactaaatttaaaaagaacgacgagtagcaaagtgtttacctttgtacactttccgtgggtgtaatacaagcacatgggtctccaccttgcattttcacttgtttccattaaccgaaaagtnngaggagaagaaagagaagaagaagaagaagaagaaagtccgagg

SEQ ID NO: 68301 - DNA, 568 bp, Arabidopsis thaliana landsberg
ttgacatactttacacaaattaaagaaactctgtaattttctactacattttcttctgcacttttattatcttctgattttcttctatatataaaaatatttgttgaccaaatgaaagacatgatatatattagtgtaatttaaatatttgtcttttggttggtcaatagaatattctatatatatatatatatataattcaaaggataataaatgtttttaaaataatttaatttccatttctcaatattcataaaactggaataatatatttaaatcccaatttttctaattataacattaaatgttgagtcagcaaaaaaaaacctttaaatgtcctagtctatttttgtaaaatgttttatttagtaatgttattaaagaaatggtagactgacttctaacattgaggacaaataaacagtaaatagactccgaataaaatgatgcacaacatagccaaaaacatgcaagatagttcaaataataacaaaactatactccatgttccttatagattgatattttagatggttcaaatagtataaacattgattatttttaatat

SEQ ID NO: 68302 - DNA, 1004 bp, Arabidopsis thaliana landsberg
ttttttaatttaattaatttgaaaccagatcctttgtttttttagtggtaaatttctaaggaacaaccacacccaaaggaccactttatcaattaaaaaaacatcgcaaagaaaatctaaggtttgggtaagtaactatagataggcaaaacatagcagaaaaaaagaaacatatatcgtatttattcatcctagcacgtcgtattccacggatgacctatttatagatacacagattgtaactaggatcttcggaagtgagcatggcactatttgggaaaaagaaaaagcatgaattgttggttcggccgtgttgtgcgtaataagaattcatcaagtatgaagcatggcttattgtagtattgggcttaaaacatgctccacttggtaggattggtctacaatcaactccattagcgcacgcaaacccgagattatcttctagctgctcatacgtcgctgtcggcattgatacacaccattgttttgagtttgctacgggaaggtggttgatcattatggatgataggaggattccgatgaacatcaaaaacggcgacatgtttgccatctttaaaaaaagtgaacaattctatgagatttttagtataatgacgtgatgatggtttgttactaagagaggtgattatacgtactttatagaagagtaatgtacgaaggaaaggaaagatgaatgtgtgaaataacattttgtacataataaatgaggaaaatttacaaaaatagtaatgttcctacgaagaaaagtaaagatgaaaaaataaggaaatgattaaataaatagtaatgtctacaaagaaaagggaatatgaatatatgaggtgatacatttatacataaatgaggaagatgtttaggagatgtcagtctaccaaatcttctctttacatatacgaacactctaatatattcgaatgatattcaaagaatattatttaatatttatgtgagtatgttgtaaattatgaatgttggtttttttg

SEQ ID NO: 68303 - DNA, 576 bp, Arabidopsis thaliana landsberg
  unsure (1)..(576): unsure at all n locations
cacttgaaaggaatgggctatagcgctgcgcggctgcctcgtgactgatcgcgtgctcgataccgtattccgcgaaggtcttgctaacgcgctccaagagtgcgtccgccttcagtgatgggacgtagtaccgacggaggattggcgcacgcagagaagcgatctgcttggcccaaccatctaatagcgcggcgggttcttttagatgacgttccttacttggtccctgtcctcgcgaagcgagccaatcgaagcgctccaactccgtnnnnnnnnnnnnnnnnnnnnnnnnnnncaccaatgccagttcagctagctccttgcctccaaaccaagtctggggcctcaccagcaaggcgtgcagcacctgcgcgctacgcccagtgaacagcgatcggatcgacttggccaggggcttgggtggtggcttctcgacatataaatagaggccacgagccggcaagaaaaggctgcctcactgtcgtagtaccccacgcgctcgcttcgcagtaattcctttgcgccaggtgaaatggactcagcaataatcatcggcacagactcggccacgaacgc

SEQ ID NO: 68304 - DNA, 306 bp, Arabidopsis thaliana landsberg
agcaatcacatgtatagatgggacgtaagaccgactgcagacgggtatgcgcatatatatgaaaagcgaggatatatcataatatatggctgtatgttgttttaaaagaggaacgttacttagcatctgtaatattaaagcgagccatttgtggcgctccagcttcaatagcatgtgaaatgttagagcttgttaaacatacgatatttaagctagctcacctgatcttatcctagattcatgacacagcaccagggtgtgcctccacggggaccgatggcaactgaacatagatctgaacgactt

SEQ ID NO: 68305 - DNA, 579 bp, Arabidopsis thaliana landsberg
aacccatttctcctttgtaaaaaaaagtagaaaagacgtaatcaatagatgttatacatgcgattcattgtttttggataaataagtattttggattgaaaaaaaaataaaaaatgagtagtggattttggtaagctgtcaattggttaataccagaacggctgaaactaaactgctggcgaaaattatcatgtccctcttaattaaacacccaacgaaaagtacttatgaatatatccattagatattttaattattacatttttaggctgttaaacaaataaattatatcggtttacctgaaagataatgaatgaaaaaaaaaaaatcttaatatattattttatgtgtttttaaaaataataagctgtcttgtatttttaacaaatagcatttttaatatagtacgatatttaatactatatcacttttttgtttaaatcatactaaacaacacctagccctttttaaaataaataataataataataataagaccacttatgtatcctttatgtatcatgtaaaatacaaaattccctaattatataaatctaagttggcatttcttctgactat

SEQ ID NO: 68306 - DNA, 1417 bp, Arabidopsis thaliana landsberg
aaatgtttctttatgtgaaacaagcaacagaactgctcagtttcaacgtggacactttcactatcaggtatctaatcgatacccttcaaaaactgctcaaagtgtctatcttttataagacaataagttgctaatatgtatcatcatttgctttaggaactaaacacaccatttgcaacagagagcttaaattctttattggcctccactgaagcgaaccagaacttatacacagtgccaccacataatttcggatatggtgagcccattggttctttatatgaaactagtaacagaacttatcagcttcaacgtggacactctcactatcaggtatcatcaaatatgatcttatccgtttcatctgctcaaaagtgtccatgttttataagactatgagttggtaatatatgttgtgatcatattctgtaggaactatacacaccatcagttgaatttcagacgttattcccactgccacctcttaatattaatttcaatgagcctggtggtggtggttcttcaattgctgctgattttagtcaacaacaattcagctcaaatctacctatgtggcatgaaaatcagttgaacataggttcttttgactctggaccttcctcttctacagaggtaatgtcaaacatggacctatccacattcggtaaattctctgaaatttgcaataaagcttacagatttgatatattaatcacacttgtcattaggtatcatcatcatcatcatcatcatcagaaaaccaacaagatcatcatgaacaagttgtaccaccaaatgaacttgatccattgaccatccagagaaatcaataccgagaggaagcaaaacagagatattttgagaagaagaggagtcgcaagtaagtgtttcgtttagctttctatttagggctgggatttcatcttcttattattgaggattttggtgaatctttgcagattcgtgaaggcacaccgatatgaaagtcgagcacaaacagctgcgaagaaaaaacgaagcagaggtagatttgtgaaaaacgatgacgaattcgacaatgaccccccagctatacagtgattgttctacttgtactttcgaaaccttggtgataaatttgtaaattatgggtgtcattgtcaagctttgtttttttttttttttgtctctgatggtaccttcaatgtcacggaacatagaacttatttactacttctccacttaaaataactaaattggcgaaatgacccctcaatttcttcatttactttcaatgttacccgaaagtttaattttcttgtactttcgactttttcatttctccaaacccaccaaccactctctaattatcaactctccccaaccacggaagttgccgccaacaaatccgccgcgaatccccaaatgtggtctctat

SEQ ID NO: 68307 - DNA, 587 bp, Arabidopsis thaliana landsberg
cttgacgtagcgcgacgacttccccgtcacggcgtcggtggtgagttcccctgccagccggttgagcggcttggacagctggatcgtgacgtcgtgcgtccccgtcggcggccactcctggtcggtcgaccagctcatgtcctcccgctggatgatcgcgcgcggctcgtcgggctcgccgttgtcgagaccctgcaggtagtagtccatccactgcaggagcggcgtgctgtacgccgagccgtacgagtagtagggctccacgtgctcgccttggtgcaagaagatgcgccgctgcacgttgttcttcacgagctggtcccaccacttgccgaactggatcgtcttgacgttctcgtcgttgagtcccgcgacgacgaagacgctcgccttgatcttcgacgcgtcgagccggaagtcgcgcaccgaccaccaggtgttgtagttgcccgtcgagtcgtcggagtgcgtctgcagccgcggcgacaggtccttgcagtgctggctgaagtagttgctcacgtagtcggccaggtactgcacgtggcccgcgtagaacgggatgccgttgccgcgcgtgtagtcgt

SEQ ID NO: 68308 - DNA, 140 bp, Arabidopsis thaliana landsberg
ttttgatatagtcgatcacatcgattttttaatacgctccaacttattcataaattggtacccaatgtaaaattgaagccattgtttagccaccattattaccattaggattatccttggtttaagaataaaccataggt

SEQ ID NO: 68309 - DNA, 524 bp, Arabidopsis thaliana landsberg
ctgcgcgccatgttcgcgggcagccatggcgttgagcactaccaggttagcgttttccacggcacagtcggcgtactcgaagccgcgggtgatcgccggcttgagcgggtagcccgggccgaagcgcatgctgcgcgaggcgcccaggcgcttgcgcttgcccaggtggtcatacaggaacaggccggcgcggatcatccaggccgggcgcaggtgcgggcggtgcggcagcacgaagcgcattggtttgacgatatgcggggccttggccagcagcacttcgcgctcgggcagcgcttcacgcaccaggcggaactcgtagtgctccaggtagcgcaggccgccgtggatcagtttgctgctggccgacgaggtgtgccgggccaggtcgtccttttcgcagagaaataccttgaggccacgcccggcgggcgtcggcagagatgcccacgccattgatgccgccgccgatcacgacgaggtcatagcagtcggcgactgggggctgggacgaaacgggctgg

SEQ ID NO: 68310 - DNA, 484 bp, Arabidopsis thaliana landsberg
atatcttcagaaagtagagatggcgatagagtcaaacagactgagggaaatatatttgtgaatcctgagaatgtgagaagatattatacgatttttgttttgggctctcaaatctagaagtcatataaccgagcaatttggatagcggttaccatgagtacatatatacatagttacataccattatatatgtaatcgtacatattatatatagttgacctggtaattattgattgatatttggtacgtatacattcttacatattggaagtatattgtctctaacgatttaaataaaattggcctctcgtcacatatgccacattagcatgttaggcgtaaattaattgtggaagaattaatgtcaacttattaatcaaaatgaatcagtgtatctagtcttctctaattaaggaaaaactaatccagtattaaatcgaccaacccacggagttcaaaaagaaaacttatttaagaaaaaaaa

SEQ ID NO: 68311 - DNA, 362 bp, Arabidopsis thaliana landsberg
ggttcaattggtttactagtactttatgtagcaagttatagaacagttcatatctgtatatacagtttgtgttggtggcatttccacagtctctattggtattgtatgtttatgagacaattcatgttacgtatatgaattgttacaaaactttatgttgtgaccagcttcaaaaatttagtaccaagtcaatatccatggccacgacaacacaatagcggccactatactagtgaacaaatcatcggtagctatacttcttggaaatgctaatgaatactacaaaaataaccccacaatatttttaagttttttgtgtgggttcacgcctacacttacctaatcattggttaaaagcgtta

SEQ ID NO: 68312 - DNA, 2436 bp, Arabidopsis thaliana landsberg
gcaaaaacatcaacgcattatcatttcttggctcgagaactctgaatcatccaaaacatttttcaatgtgtgctttatcacaacttccaaaccaaaacatcaacgtattatcactttcttggataagtgccaatcaaaacctaattcactagctggagaactctaaaaatatcaaaccttccatgaaaatctccaaaccagtaaagccacacaacaagatgaactcttgaaatcatacagatacttttaaagattgaagatggaaccgattaatatgaatgaatgtcactgagtcttacacacaccattgtacaaaataaaagccctaatgtatcctaattcaaagtctccagctttctctgggagacatttgatcaaacacgtctgaatatgaactaaaattcaccaagataaatggccaataaccgcaaaaaagtagtctttccttgaaccctagaagcgatatatcacacaaaagctctacgtaccagtaaaattgctatcaagatttagaaaatcagcgttcatcttccttcctcttgccggtgaccttactctgtcgaataacaatatcctgaagattcgtcaatgcacctttagctctcaacttggccgttttagctgctatgatcttcttaagagcttcttcctttaacagagccaccgctttattcatattagccaccgagatatttccagctgcgacaagagccattgccgatttcggagtgagaggcgtttcatcggggacgtcttcattgactcgagatttggggaagaaggtgaaattggggttagaacatggctggcatgtgaaggaagaagctggtggtggagcggaggaggaggaagatgcggcggaggaagacggcggctgagttgagcaagaaaggtgggtgcttgatgggcaattgacgcagatgatacgagcttgtggaggaacggcgttgtcgaagagattgaaacaaacagagcaaaagtgttctcggtactctttgagcaaacaatcggtgcagagtcgccggaaagcgccggttttgatgacggtgtggatgaacgacggctctttttcacggcagactatgcattcgcgctgtttctgttccggattcatggctaagtcaacgagattgagaactctctccctcaacggtaaccctaagcgagagagagagagagaaagatgaaagaagcgtttgtgttgttctcagaatgttgaagatcttgggcttgaagagacttcaacgtataattctattgggagctgaaaaaacttatatagaagattaaaaattgggtcttgattcttgttgaattaaaaacagaatcttttattttttgttaatacgaagtgtatatatttggaagatgaaaggaaacataataatcttgtgttttcctcattgcttattgcaaactcttaagcattgtgatataacaaatgcgagcaagcctaaattcctctatttaatcgttttcaaatcatacatccaaacaactaaaataagaaaaagacaaattcatctgcaaaaagctttagctctgtgattccttcacttccacagcttctttctggtctctaatcattgtaaaagcccaaataaagatcaagatcatgctgttttcatcactctgccaacataaatgggtcaacttctccaagatctgcaaccaacggttctaattctgatggatcttcatcttctggagctaagtaagttggaaacggaagctttgagatgtctggtttcttgcaccatgcatcttttatgaacacaaagtttccttctgcaccaggaacctgcaacaacaccaaatcacaatcatgacctactaataagagaagagaaatggagctcatgttttgtgacagacagatcctagccaaagactggaactgggattgagatacttacttgtcctctcacccacatgaggttcctcgcaggatcgatcttgtagacccaaacgttctttactgtcctctgatctgcacccattctcccagccatctttctgcccttgaacacctactcaagtgtatttatcaagtcagtagtgtcatttgctttggagaaaaattcccaagaatcttagcaatttgacacatacctttccaggagcatctctttgccctgtggaacccccgcttcgatgggacaatgaagcaccatgtgatgccggcattccactgaaaccatgtcttttcatgcatccctgcaaattacacagcaaaagacatcaataacacagccattactttgcacaaacactatttcatccgcactccattctatatatctgccacattgtcactagactattcaacttatcatcgcaaagaaaagataaaactttagagcccctgagaatggtttcacctgaaaaaccttttcctcgagtgatcccagtgacatcaacgtactgtcccggaac

SEQ ID NO: 68313 - DNA, 776 bp, Arabidopsis thaliana landsberg
tcattatctaaaaaaaaaatatggagaatttaatcttggttatacttaaaacttatactaaacaaaacaaaagaacacgaaaaggattcgtctcactattacaaatttttactacatcattacagtaaaaacaacactctcataagaaaaccaaataaaaccacaaactgatgatatgaaataaagaaatcaagtaaaaaacaactaaaaatgatgaagcgagaacctttaggagaaaaggttactcacaaacttcaactcatgcagccaaaaaaaagaaaaaaaaagactcatgaagaaccacgatgcaccaatcaaagacaaactaagtttaccatctctcaataatagtatcagataatgcatttacgatcactaccttaaaaaataaacatacaaacttacttttttcctatacaaattctccatttcagagtacaaattacatgtcaaacatctgtgtacgccgaggtaaaccaaacgactagaaactaagttttttggatatatatatatatatatatatataaaaaaaaaaagttttttggatattcaagttaatatgtcggcaaataatagtaaactacatttaacaaatggaacaatactaacattatatatttgtagaggaacaaagaaaagcccgacaaatgcgtcattcaatactattagtgaaaagagctactggaaagcttaaaggtacattggttataaacgatgtttcaatacaccaaatgatttactaccaaatctaatattatttttataaatattaa

SEQ ID NO: 68314 - DNA, 189 bp, Arabidopsis thaliana landsberg
cacgaaccattgaggaagctgggccggttcttcctacagctactttatggagaataggctaaccgactttgcgggagggcgctaaagcctaacatacgctcctgaaatcgtctctgaagccatatgcgttgaggggagcgcacattgtcctgagcatgtgtgaatgcgtcgtataaaaatgcagcggtg

SEQ ID NO: 68315 - DNA, 461 bp, Arabidopsis thaliana landsberg
ttagtattgacaaaaaataactgggaagatcctcaactttattttaatagtagcatttaaaaactgtatgggaatgaaaatttatactatgactatatctgttaatcataatttgttagttggtaaattcatagcttagataagaacatatacgcagtttaataaaattgctagatgttatgaacaaagtcttaatacaaacttttaccaaattatattagccactttaattgtttttgtaatattaatatgtttggttacttatttctcagtgacagtagcaaacttttggggacgactgataggatcggctccattacatgagttgctttgatttacattaacttatattattaaaaaagaaaattgaatacaacctatacgtataaattgtataattagaacccattacatatacgcagaaatattttaaaatggtactttataaataaatctctgta

SEQ ID NO: 68316 - DNA, 540 bp, Arabidopsis thaliana landsberg
  unsure (1)..(540): unsure at all n locations
gagagtctcaaagtactatacacgacggatactgcttggtacaacatagagttgtttattgcattgctttttgtttatggttttgcttcacgtctgatctgtgacggaacatacttgcaatcttctctcacaccggccnnnnnnnnnnnnnnnnnnnnnnnnnnnnnnnnnnnnnnnnnnnnnnnnnnnnnnnnnnnnnnnnnnnnnnnnnnnnnnnnnnnnnnnnnnnnnnnnnnnnnnnnnnnnnnnnnnnnnnnnnnnnnnnnnnnnnnnnnnnnnnnnnnnnnnnnnnnnnnnnnnnnnnnnnnnnnnnnnnnnnnnnnnnnnnnnnnnnnnnnnnnnnnnnnnnnnnnnnnnnnnnnnnnnnnnnnnnnnnnnnnnnnnnnnnnnnnnnnnnnnnnnnnnnnnnnnnnnnnnnnnnnnnnnnnnnnnnnnnnnnnnnnnnnnnnnnnnnnnnnnnnnnnnnnnnnnnnnnnnnnnnnnnnnnnnnnnnnnnnnnnnnnnnnnnnnnnnnnnnnnnnnnnnnnnnnnnnnnnnnnn

SEQ ID NO: 68317 - DNA, 713 bp, Arabidopsis thaliana landsberg
  unsure (1)..(713): unsure at all n locations
tggatattagtaagtgcctttgcttaaatgtcaatctaaattaacaactaaagttataaattgtcaaaagaaaatctaaccaatgctcttttgtggtctaattccctacctaacgtgatatagttaaaccaacacattcaggctagatattctaactttctaagggtgtaatctaataccaaaatctaattcttcccatgtagttcttctctcatctcccacacactttaatactttacctcttgatttgtgattttagatagatactctcacattttccttttaaatttgttagatgttttgaacaaagtgtatgcaatccaaataatccccaaaaccatatgtttgtgttcactcactagtcactacattctttaaccgaaccaaaattttcgcaggtttgtcagtcctataatgcatttcttttttaaaaaaatactcttcatttgatcaaattctataaaagtttagcataacacatcattgtttagctatttaataagaaaactccaaattaatattcttaataacttctatcctaatgacccatgtgaaattatactctntaattatacgctctcataatctcattacatagcatatcaataatacataaatcactaaactatagtatgttgataagtgataacaaaactgtcaaactttaattatagtctttgcgtgatgtaataaaaaaaaatcattaaatgtct

SEQ ID NO: 68318 - DNA, 607 bp, Arabidopsis thaliana landsberg
gcaagtggaaagattcgttttgcttactttggcaatatccttagccataagaagtgacataatttactaataatagctttttccatcattgttatagctaccaattcacttccaatatcttaccctggaaacttttgagactgaaagatccatcactaaatttctaatatcttaaacaaaagtggaatttttgaattgatgatggagagatttaggctttggttttaaagtttagctggatacacaaaatttgcagtatagttctaattttagctcagccatggcggattcactatttttatccaaatttattagagttgtattctttaacgaaaaaacaaagacagagaaaaatctttggcaaaatatgcttaatcttcgtgctttccactaatctcccggaaaaaaattgattaatatcaaaattagtcgaagaaaaaaaaagagagaggagggagacacaacgatgccttctcctccggaagaagaaacccaacccaaacccgatacgggtccgggtcaaacctccgaacgcgatattaatcaaccaccaccacctccaccacaatctcaaccgcctccaccgcagacgcaacagcaaacgtac

SEQ ID NO: 68319 - DNA, 130 bp, Arabidopsis thaliana landsberg
cccacggactgcccattacttcttcaacacccaccctcttattttgtttttatagccctttttccttttggcaccaacggagggttgaaatgtaatgatgagacacctgttctaaaaaaaaataaattct

SEQ ID NO: 68320 - DNA, 591 bp, Arabidopsis thaliana landsberg
  unsure (1)..(591): unsure at all n locations
gctaatgcctctcccccagtgtatgtcattgtcccatcatcatcagtcacaaatttttcgccagattgacaaatcaatataagcgtacctgttcccatacccacagaaacctgaggaactcgaaacggaagaaaaaagttacatcagatacacaagcaaattgtatcgtcttaagtaatatgcctaaactacaaccatagccggtaaaagggtcagtctagcaaaccgggataggacaataagttcattttagtaaatgtcaagcgtgcaaatgtttaaatataaacaaaaagcgcatataactgtaagaattcacaatcagtttgaactaaactgagacttgataacgtatagagaacacacgtagaatagcaaatcaccgcaaaagccaaatgtagctagcatataatcaaacccacacaaattctgagttctgacaccagataagcacaatggccgcaactaaaatgcatatttttgctcttcattaaccaaaatttcatcaaaatctctcctttttagtagataagagaagctngaatgttttaatcacaaagagttgctcatttactaaagggtttaagttttagt

SEQ ID NO: 68321 - DNA, 498 bp, Arabidopsis thaliana landsberg
  unsure (1)..(498): unsure at all n locations
cgtgggtccaaatcatgacacatcacaaagtttcttggacttgttctacatgttccttaaaatgattagttatatattatcttaataatcctgatctttaaatcgaacaaatttagatttagcttcttctttttttgttaaaatttagatttagctttacaagatgtacctttgattatgatagaggaaaataacagtatcccacccaaatacacggttataatgagattttcatgtatgtagaaaaatcatcaaattgtaagaaaacaattggaaaaattgagtgtgttgttttgagtagcaaaatatgaagaatccatcaaaccaagaaattagcaaagatgtagaaaggaagatttggtcgatagattcacggacgtattagaaatgcccactttccgatacaatcgtcccaactaggaaaagactcaaagctnttcgaaagaaaatgaaaaatcctctatgaaaaataggtcaagaaatcgttttaaaatattt

SEQ ID NO: 68322 - DNA, 444 bp, Arabidopsis thaliana landsberg
  unsure (1)..(444): unsure at all n locations
acccacatacattaatggaagtcatgaaagagatgattgatcattttacaattatttgttgcagagagatcacggacaagggacaaagacacaaaaatatgacttatttcagatctatgatccaaaaaaataagaaaaggtgttagaatgtcccacatcgaaaatggagtgtatctagcctagtataaaataaacataaacctctgcactattatctaacatttctatttctttagaactactgaaggagatatatagaatgttacaaaaaaagtgacccannnnnnnnnnnnnnnnnnnnnnnnnnnnnnnnnnnnnnnnttcatgtcaatattcgatcatattcaaacaattttgtgaacttgacgaaattggggagatgaaagaattgatcttgggcccgccagtatattaacattatctacccaataagcacaactcatg

SEQ ID NO: 68323 - DNA, 445 bp, Arabidopsis thaliana landsberg
  unsure (1)..(445): unsure at all n locations
gttgaacttgaagacatactggccaagttgtcgccggcggcgctggaagcctatcgccagcatcaggcgcacctggagcaaggcccgtacatcggcatcgtcgtggtgctgctcgtgctggccatcgcggagtggctgcttcgtctgcccaagctgtaatacacggtcgaggccgacgacagccagcaccgctnnnnnnnnnnnnnnnnnnnnnnnnnnnnnnnnnnnnnnatggtcgccatcttcgtctatgtcggtgccgaagtgaccatcggcagcttcatgatcaactacctggccatgctcgacatcggacacatgagccaggcgcgcgcggccaattacgtggagctgtactggggcggcgccatgatcggccgcttcatcagcagtgcacttttgacccgcatcgtcacgcgcaagctgctggtgatcaacgcctgcg

SEQ ID NO: 68324 - DNA, 794 bp, Arabidopsis thaliana landsberg
tctttgtctgtcccgtatcaatgattatgaaagaaaatgaacacaattgaattaaagaatgcaaagaatcatccaatctttgaaaagcgatcggacaaattggatatcccgtataccaaagttggcaatgtgtatatttaaaaaccatatgcacaaaatttctttatatataatcaatattatagtttgtttgttaggatatttgtgtaattaatcttggtaggtgagtcaacacttccctcctatttgctgcacatatttacgtataaaacttaattttggattttattgataatagaagtatacaatacatttcgaatatacaaatagggtattcatttgagagagggaatattttgcatttccatatacaatatgtcgtgacccaaatgggttttgctggcttttcatattgaacttccaaatatatgtcctgactcttacgtttttctaaaataattaatctctgaaccacgttatttctttttatatttgcctgaagaaaaagactttgttggtcgtaacatttgttgacaagagatgtaaaactcatctaaagatgggctataaagacaacctctgattggatcagtccagtttctgggctactggagtcatgtcatgtggcaaagttttgttggccactatgccgtttgggccagattttattttgcatcaaaccactatagttacataattttaaacaaccctcttaacctacatgaatgtatatgtataagtattgtctgacaagtttttcttctctttttacaaaactaaagaacatgacatga

SEQ ID NO: 68325 - DNA, 368 bp, Arabidopsis thaliana landsberg
  unsure (1)..(368): unsure at all n locations
agactcaggtgttgactttgtaaacaaacttgaagttctttttgntttttttcctaatcgncatgatcttggggtccggatggtctttttttgaattgaaaaacccatcctctgtactatcatttgtaattgctcatgttatttgttgtgtatattattatcacggaggatgggaagatgatgagactgttcttgaagctgcttctcgtgaagccattgaagaagcatgagttaaaggaatacttatagaaagtttacacctttattaaacaaaacactaataaagctattttaaagttttttgaattatattagttttggacatgttttttgtttattggaaccttcctttaggagtttgggaattt

SEQ ID NO: 68326 - DNA, 489 bp, Arabidopsis thaliana landsberg
  unsure (1)..(489): unsure at all n locations
aacgtcgacctggcgctcaggacgcccgcgaccaggtgatgcgcgagaccgggaccatccccaccggttaacgctccgggtcgaggaaggtctatgtcgccggccagctctaccccgacatccgcgtccccttccgcgaggtcgccgtccaccccagcgccaacgagccgccggtgacccnnnnnnnnnnnnnnnnnnnnnnnnnnnnnnnnnnnnnnnnnnnnnnnnnnnnnnnnnnnnnnnnnnnnnnnnnnnnnnnnnnnnnnnnnnnnnnnnnnnnnnnnnnnnnnnnnnnnnnnnnnnnnnnnnnnnnnnnnnnnnnnnnnnnnnnnnnnnnnnnnnnnnnnnnnnnnnnnnnnnnnnnnnnnnnnnnnnnnnnnnnnnnnnnnnnnnnnnnnnnnnnnnnnnnnnnnnnnnnnnnnnnnnnnnnnnnnnnnnnnnnnnnnnnnnnnnnnnnnnnnnnnnnnnnnnnnnnnnnnnnnnnnnnnn

SEQ ID NO: 68327 - DNA, 535 bp, Arabidopsis thaliana landsberg
cactcttaagtagttagcttggtcattatttgttatgtttaagctttctttggtgttttctacctatgggaaatgcatttataatgttggttctttcagattgtaggtgaactaaatgcagtgaaaaacgctttagccattgtatcatctcgtctaagggagagtcagcatcgtgatcggagtaatttccaagggcgttcacattcaccagaacggtcgtttgcagctgcgggggatgattacatgccacagctaagaagacaatcatccgataggtttcctcgtggtaattttagaaataacaacttcagttctcgccagtccaactatgcagaagaagctccagcagttccagttggtgagaatgtctactccgaagagcttgtgttccagattctctgcccagctgacaagattgttcgggttgttggggaatcgcaaggaataattgatttgcttcagaacgagatcggcgtggacgttagagtatctgacccagttgctggatctgatgaacagataatcaccatttctt

SEQ ID NO: 68328 - DNA, 1577 bp, Arabidopsis thaliana landsberg
  unsure (1)..(1577): unsure at all n locations
aaatttgatatattttcccanaaccgtacaagtgcttgttacacacctttccttcctgctttntgtttttttctctagaatggcggtaccacttgttactagaagcactcttgaagttgtcttaccagaggcggttgttcctaagctcgttacgaaatcaagaaacaagcttgcacaaatcagtgaggtagaactctttttaactggaactagattggtgcaaatcatgactctaatcaaaatctttgacgctttgtcttatctctttcccacttgatcacagtggtctggagctagtgtaaccatagttgaagacagaccagaagaaacacagaatatcattcgaatttcgggtacacccgagcaagcagagagagctcagagtttgcttcaaggcttcattttgagcagtaagtttctctctttccaaacttttatatccgtattgtactgatctataagtctgatttccggtccttgtttggtgcagtacaagaggatggaccgtgaacttggaccagatcatcagtcaacacagagatggagatcaagaaactgagaaatgtggagttatgtatgacttgttgaatattaggatttcagtaagcagtagtttagatgaacattccacattttgaccatcactctttggtttctatgttgtctattagtcttctttgtttacattgttctgtaacttatttaaaaaagtcattaaagtttaatccgaatgactaatcattaaagactcatctttaattcacaccacccctatgtatattggaagaacttaaacgctgcgtttcacttgagttaacatcattgagattggggtgtttttgcaaaactagataaagtttagggtgaaaacatagataaatcttaagtcgtattttacaaaaatagccactgctaaaacctcacctgcggcttcacctttcttcgagttcgtgaaaaagagacgtcgcatcgcaccgccgtcgccatttccaccgtcgtagcattgccgcttcactggtgattgattcttccttaacttctctttttgttttctctgttctcttatatccgtcgttttctagggttttctcactccttgttgtggaatctctttgtagactgtcgcactgaatattgttgaatcgagaaaatggcttatgttgggcaaagtagaaacgtgattcggcatgtagtctcgagaggaacagcttatcacaagtatgaaaatgcgattcatcatcctctccttttcgcttgtcaaggagttcgatacagaaaattagaagttattcttacaacggtgaggtttaatgattctgaaaggcatgatttttatcgtttgattttgaaatttccttcacatttcgttgggttgaattgaaatcagatggtgggtttgttttgatttgtcttgatctttatctgatctggttttgttagggcattgagaagcttggcaaagctggtgagactgtgaaggtcgctcctggatacttcaggaatcaccttatgccaaaacttcttgctgtgcctaacattgacaagtatgcttatctcatccgagagcaacgcaaggt

SEQ ID NO: 68329 - DNA, 349 bp, Arabidopsis thaliana landsberg
tggattagcaaaaaagaaaacaaccattattacgcacctacattaaaaatcatccaccaaagaagaaaccatcctcaagagggtcccaaaattggagaatattgaaaaatttaggaagaaaagagtcgagatttcgacggacaagcattctgattattacaaacatattttagatgaaattcatcaagatcattaaactagaaattaacaagaagcacactgagataactctctgtctcaatggaacgccggccagaagtgatcatcgtgattttggttaccatcttgataaggtcaatcgaggagtgtatccgtttcaagcaccacacgtccactatatgttgccaag

SEQ ID NO: 68330 - DNA, 500 bp, Arabidopsis thaliana landsberg
  unsure (1)..(500): unsure at all n locations
gctgtgcacgctcgatcgctcgtcgctgctcggaggcgatcgcgccggtgccgctctaccatgccctggcgcgcgcctggacgcggccgcgtcgccgcagtcccgccgtcgccaaggtcgaggccaaggtcgaggctaagccttgaaannnnnnnnnnnnnnnnnnnnactgctgttcgccagcgcgccgctgctgcttggggcgatcgccgtcagcgtcttgacccgcgatgcgtggctgatcctggcccacaccgccgggatcgtgggcgcggcggcggcgattatcggcgtgctgttgctgctcgtcgccggagtgcggcgattggcgccgggatcgtcggctctcgcgcctccaagtcaggcgggctcacggaagcccgatctcacgctcgctgaacgtcccggcgcctcgaacggctgatcatcatcgcaggcccggcgctcggcctactccaccagggccaggcagtcgtcgccgtcggcggtcaggaccgcgc

SEQ ID NO: 68331 - DNA, 712 bp, Arabidopsis thaliana landsberg
tagaaaaaacaaaaaaaaaaaagcaataaaaaaaaaaaaaaaaaaaaaaaaaaacagaacaaaaaaaaaaaaaacaaaatagaaaaaaactgacatacaagtccgtaaacgattagatgatggtgaactcagacacattcacgttccaactgaagatcaagtgactgacatcctacacaagactttgaatctcaccaagcctttgtaccacatcaacacactttggtaatattctatattattaaaaaaaaaactgaatttaaaaatccagaagaaataagtgaggggttacacagaacactcctcttcattttgacacattgtacatattgatcagtaattctcttatattataaaacagagtgtaccttaatcgaaatttctacttcacaatttatcaaacgatcaaccaatagaacaaaaacatagcttcaaatgtagtttatatgataagatattcaaaacaattttaagagaacacataattttagtgtttcagatatagtccaagtttaacattaaaagttctgatctacaaagaggtatctaggctctaataaggattaaaatcggattgataacacccttaggcttgacatagctttctcaaggtaatggagattcttcgtttctgatcaatttcttctccttcccatagctgaaacccattctgttttcgattaatctcgtgtttacatcgataccgagcttt

SEQ ID NO: 68332 - DNA, 572 bp, Arabidopsis thaliana landsberg
agaataacactcaatgagagcattgggtacataaatatcagaagaaagccccaatttttctatatgattatgcatcatcttcgccacaggtgaccatgattgaccagaacaagctttaagaagaaacgggtaagtgaaattatcagcaaaaagaccaaatctttgcatctctgagaaaacgaagaaagcttgataaggctgagagttctgggcatgagctctaatcagagaattgcaaagatgaacatttggttcttgaacctgattaaaaaccctaacagctaaattcgtttgacgacagagagaaagagcagagattagcttcggtgctatgtgtagatcttcatgaaggtttcgtcggattatctgagcgtgaagctgtttcacttggtttagattagcgcatttgggaaggtcttggagtctctcttcgaaaattctccgggaagagacccaggaaggagctcgaacaggtagtgatgacgtcattgtcaatgtccgatccagtggaggtagtgtgtggattaaagattgaagaagggaatagggttcgcattttgaagaagaagaaa

SEQ ID NO: 68333 - DNA, 349 bp, Arabidopsis thaliana landsberg
agcaccccggccttgagtgggccggggcggcgcacgggacccggtgacggcccgacgcaccatgttcttttccgcgagccgttgtcggtgaccgccacccggccggcgtggtcgacggtgaggtggacgtgccggtgcgacatccgtgggtcgttgaggacgaggtcgctcgcggtggtgcggtcgatgcgcatcacgccggcgatcggtagcgccaccctgtcggacggcgtcgggcccgccgaccacggcggctttagaccttcattgctttttacggtaatataaatacttgtcattaatcttttcattgttctgtgtttttttgctctgattttggttttggatt

SEQ ID NO: 68334 - DNA, 790 bp, Arabidopsis thaliana landsberg
gggatcgccgggtgatcgtcgtccgcgccgacctcgaacgtcatgaaatcgccgaggcggatgcgaccggcctcttgaagcttcacgagcacatcgtccggcgagcccacgatgcggagatcgacgtctttcgtcgtgcgtgcccgttcgagccgcagctcgagcacgagcccccccttcagcgtcgccgcatctccgagcaccgcgacgacgcgggcgaggaagcgatcgaagacgaggagctggcgcttgcgcgcgagctcggcgccggtccgagcgaacgagcgcagacgctgctcgagcgcctgcttgaacgcctcgggtgaggcgtacctgcgcgtattcatgccgcgagccccccgaacggcgcgagcgcgctctcgacgtcgccgagctcgcttcgggtgacgagcccgcgacgaagggcctgctgcgcggcttggcgcagcagctccggggacagcgcggcgttcgcgcagtcgctcagcgtacgacgggcgctcgtcgcgggcaccgggccgaaccacgagcgctcctcggagggcacgtcggcgtggtgaagcacgacgccggcggggacgcggaaccgccgccgccgccaggcctcgggcagcgtgagatgcacgtgggccgccagcacgtcggagagaccgtgcagcgacagcgcgctctggtgcgagatcacgcccgcctgctcggaccagagccacgccgtgaccagctcctcgtgctcgctcgcggggaagtggacgaggcggtagattccgcgctgcgcgcgcgcgacacggcc

SEQ ID NO: 68335 - DNA, 643 bp, Arabidopsis thaliana landsberg
  unsure (1)..(643): unsure at all n locations
acattaaaaaacgannnccaagagttacatctgatagaagccgacatactncattactttttaattttttaacaaggaaaaactccccactatgggctccgtgatcacttattcttaaccctactttcttacgatatcactttgtaatcatagtgggtcttgacataattgatggtgaacttgtaacaaatgctatattcttgtatataagatttaaataaagggaccttctaaattaatttactgtgcttctcgaagttttggtacatccacaagcaaatgaacacatttctcgttaagtattcatattgttgaatatttttttccaatcttgtgaaatgagattaagtgaatcagacatattgggggttttatgcatggtgccttggtgtcttaaaaacaacaacaataaagatatatattttcaaaaaatgtacaaaaaaaaacaaaaatcaagaatttctaattaaaattgatttgagtaaacttttacttctaagaaattcacaaatgagagcaatatgtggaggcgcatacattgacgacaaaaaagacttatcaagaaactatgacaacaaattagggaatgatattctcgatctttcattattaatgaatcatcccaaaaaaaaaatgctccaaa

SEQ ID NO: 68336 - DNA, 949 bp, Arabidopsis thaliana landsberg
atactgtaatcaccacttttgttatttaatctatgatcttgaaactctccatctttgttcacaatcttggccaatctctatgataaacaagactttagggctacacactgagttaaggttctacttgtaacataagtggaaatgtgaggacactacagcaacatacatgtaagacatatcttggaaagaaaaagaaaaaaaatagaaccgaagaattgtctttagaatctccattgtgtatatacaatgttatattatgaaccaaaacacaaggtgatagtctagctactgtgaaagcctttgttcaagggcaaaattctcagcaagctttagcaactccaaggggctaagaccgcacaactagttttgcagggaacaaatccgtgaccctataaaagataaacacaacaattaggttcatgcacgaataaatcgagaaatcaaacattactaagaaagatgaggaaagttgacgggtgtgttacatactattgctgtatctttctgaattccgagagcacggggtatatattctcaaaggctttgtaggtctcatctctcatctgataatgagtgatctcaggattttatcaggtgacagaagagctagagactagagagagacataacaagtattatcacaaaacctaaagagaagtgagatattaccttggctcctgttattacgatcttcccagagacaaagattagaaggacgatttttgggactttcatcctataaatcagccctgggaagagctcgggctcatactaaccacacgccaatatgagagagaggtaatggccatcagcacaacgtttttatctctaaaagtcggtccttgactactaaatgtataagttaagatcactcacacttgagaaagcagcgtgagagtaagcaagaccttcaagtcttatagggaatttgacatcacaagaacctcaa

SEQ ID NO: 68337 - DNA, 826 bp, Arabidopsis thaliana landsberg
ttttacattatagagtatgtttagcgtgattataatcaacattgtttcttcacctccatcgatcaatatgtcttcttcagttttgaccaccgacacacttaaacgtaggtttagtagctattagcttcttctttgctttatatgtttccttttttgttgtagattcattttcttcaatacaatctccgtcgggtagctagaaatatcaattgtctgcctaataaattacagatccattcaattcccaacgctacagaaatggcacctatcttgggaatgcaactcatgattatcatcttttctttacatacatatttcttgttggaccactccattgtttttataacaatgaatcataaatttaaaattttggaccatctaaccgaggaataaacagagaatatctaaggaacatgcatgtgacaagaaacccaaatcagtaaaacctagcaaatatgatatacgtactactctcaacaaagaataacactgccccttgttatattacagagtcatttcattgaatatttacacataacagctctttcatttatagatatatgtgtgaacaaaaaattgaacaaagcagagagacataaaaaacgacagtgacagagagactcactcaaattatacaaatgagtcaatgacacagcacgcatgtcatcttccctccggctgagcctgctccaccttattaaaagcatatagagagactagagagatggggaaagatatggagttgtctcatgtctgaatataacaatctctgaccgttcttgtcatatcaaaaaagaaaaactctcacgttcggtttttttcttca

SEQ ID NO: 68338 - DNA, 452 bp, Arabidopsis thaliana landsberg
atttatacccatactgatggattaaactcaaacgacaagaacaaaaaaaatcaatggtgaagccaacgttaacatgctcaatcagaaagcaaaaagatctgattgctataattggcatgccatctaaagtcaccgaaaatctaattgctatacagtagggaaatttgaatctaatcaaccttaattgtaaaagcacgaaaagagacatcagaaaatagatacatgtaacaacatccccgaaactaaagtggtccattaatgtcttcttgtaatgtttgcatgccataatctaatataactagcaaaaatatgtctaccgattttgatcgtacctgaaccatttcactaatgaatttcaatcctcctggcccaatgattgacccgcaagaagatatcaacaatgacctaaagcatatgtatacatacatcagaatagatattgacatagtgtg

SEQ ID NO: 68339 - DNA, 190 bp, Arabidopsis thaliana landsberg
cgaccttggtgccaggcgcaacgtactcgccaggatcaacggcgctttatctttttgtgtcctgagaacggcgcacgcgatgggcttcggggcaaccagagcctgctgatcagcaacctgcgctttggccgacttcaagttcgcggagcttgaatcgagcgccgcttggatcatcgcgttgactgcaagc

SEQ ID NO: 68340 - DNA, 110 bp, Arabidopsis thaliana landsberg
tggaaggtatacttagcgttaggaacggccgcgtgaagtatgcaacttagtgacacccacatattgtcgctgagagaatcacccacaaacagtatgtgattttcctatga

SEQ ID NO: 68341 - DNA, 823 bp, Arabidopsis thaliana landsberg
gtgtatgtgcatctcatctttcccaaaccccattttctgcatctgttggtacacctccttcaccttctccgtatttctttctctggcaaacgcatacagcaaagagttgtatgtcactgcatcagggaaaaaacctttaagctccagctccatgaagagcctctcagcttcagcagcaagcccacatcttccataaacagaaatcatagcattataagtccacaaatcaggctgacaccgatgagcttccatatcctcaaaaaccttcactgcaccatccaaattcgaatcccgcgaacaggcactaagaagagtgttgtaagtgatagcatcaggcctaagacccgaattcctcaccatatctaataactcaacagccaaattcggagtcaacccaccagatttaagcctagcgttgataagagtattgaaactaataagatctggaacacaccctctctgacgcattgcatcgagcagctcttgtgctttcgaaaacttaccactacgtgaataaacccccatcattgcgttgtacacctgaaccctatctccgacggttggctcagccctagtgaaaatctccaccgcaagggattcctgattccaccgtcccaaaacaccgagtatagcagccaccatccgagcgttaggagagtgccaatgacggagattgagccactcaaaaacctcaagagctcgttgccaactctcttgaccaactgatttcacgacgaagcagtaatcagtaggagtcatctgaacaagacgagcatcgagaatatcagcaacgaactgattagatttcaagcttagaaatcta

SEQ ID NO: 68342 - DNA, 614 bp, Arabidopsis thaliana landsberg
ccgccaatcaccgggatcaggatgacccagacgccaagatgattcccggccggcgacaacacgaaggaacccttgtgcgccgtgggcccgatcacatccgaaacacggccataaaagcacaggtcggtgatcaggttgatcaacagcatcagcagctgtgccacgtaagccgccgccacgccaagaatcacggccagcacgctgatcaacagaattcggcgcgtcaccagggtcgatttgcgcggcatgctcgccgcgtccagggacaggcccagggccggggcgatagggagcgcgtcggtgctgccgacagtacgcacgtctgcgtgcccgacgggttcgtcagttgctggcgtcatggaatcatcacaggagggtaaaaacgggaattttacgctgttgcagtgcaaaaccgaagggatcaaaacgcaaataacgccgtaatattctgcgatttccggtgatcggcgcgcatcgccccacgttcatcatccggacctcgcagaacgctctttcgtgtcgccatgccggaaacgcgaaaacccgccatgcggggggttttcgggcgatggcgcgaccggaatcacgctatcgacttgggtttggcagccccg

SEQ ID NO: 68343 - DNA, 1099 bp, Arabidopsis thaliana landsberg
gaccaaaccgaatcagaccgggttggttaaaccgaattgacgcacgagggttttctattccctttcacggcttcactcactctactttatatagtccacgtcagcatcatttcacgattgcatcaacgagtcattatcaaccgtacgatgcttaaacccaaactgatcaggaccgttgatgaacgtctcttatctccttccccgtcgtagtcgcaggctcgcagccggtaaagcgcatgaaaggatcttcacactttttcaccttctctctatttctctctctctctctctctatctctaacttctggtaaggcttctctccatttctcttcttctttcttcgtcttctttcttctgttttggttttcgtttcctgtaatcaacaaagttcttcttccatgtttggagatccctatcaccgcttagacctgtgtttaagcgatttggttaacttcaattgaattttagtttctggaattggtaagggataaggattctaggattcgtggtgaattaactctgatctaggtttcttttagctgtgtgctcgttttttttttttttttggttgttggaatttatgttgatggttaaagcgtagttggtaattggagtgatttctgatctctgattattgtatttgtggcttttgtttcccgtagcggtggtgatctagaaaatgggagatgggactgagtttgtggttaggtcagatagggaagataagaagcttgctgaggatagaattagtgatgagcaagtagtgaagaatgagttggtgagatctgatgaagtaagggatgataacgaggacgaggtttttgaggaagcgattggttcagagaatgatgagcaggaggaggaggatccaaaacgtgaattgtttgaatctgatgatttgcctttagtggaaactcttaaaaattctatggttgagcatgaagtggaggattttgaagaggcagtgggtgatttggatgaaacgagtagcaatgaagggggtgttaaagattttaccgctgttggagagagccatggtgcgggagaggctgaatttgatgttttggctactaaaatgaatggggataagggggaaaga

SEQ ID NO: 68344 - DNA, 507 bp, Arabidopsis thaliana landsberg
agaaaaaaacaaaaggttcacgatgtaaagaaataagatactctgaaatctcccaagaaaaagtagtatcactctattaaccttcgtcaagaagttttaggatcctacatttggtaattgcaggttaagaaaggggtgtggaataataatctggaacaacttttagcttttgtttttaattctctgtttctaatttttggtttgtttcgcttagatttgtctaatagttctttataaaatgttttcccttgtgtctgtttttactagctttgttgttgtaacttttctttggttggtttagtcttccgtattgtttgtaatgacattttgatcattaatataaattcatcaattgacctataataaaaatattccactacgtactcatcaatacaaaggaacaatgcaattcattattcaatacaaaggattaatgaaaaacaaaactcttaaaccaaaaggtgaaaaaccaaaccaaaatctaacaatcaaaaatgtgatagtctt

SEQ ID NO: 68345 - DNA, 561 bp, Arabidopsis thaliana landsberg
gcacctgcttctcttctagaggacccacatttgtttttcagtaccctcactgtgctactcacgagcctctgtaactccagctccggggaatatgagacctttagtctcagcaggcacctgcacacatgtgcatatacccacatgcagacctatacatccacccataattaaatactgttttaaaacatcttttaaaaaatacagtacaaataaaataagaacaactcatcctatcaaagctctcagtgacagtgagacaaaaccactgacttggaacactcaatatggatacttgctcccacatagtactctctccttaggctctccagggtcaggtagttgggcagatgaagtcattttctaggaccctgctctccccatctgaaacaaatgctgcgtgccttgcataccctgtcttatctgcccagttgttcaccgttcacacactttatactaggaagtaaggtggttgcattttgacctagatagtcattcaatggactcccttgttcaattactaagctaatgtcacccctgtgagatgaaagaactgaattgaac

SEQ ID NO: 68346 - DNA, 320 bp, Arabidopsis thaliana landsberg
  unsure (1)..(320): unsure at all n locations
catcttagcgtagacctcagcacgagtgggcatggtctcgaggnnnnnnnnnnnnnnnnnnnnnnnnnnnntaccttcgaagacagcgccggcaaagtcattggtttacaaagcttgcgttccttctggaagctacggcaaggtgtgatagcagaatggattgcaaccctctgctcgttcatccacgcgtacatgcatatcggacacagcttgagcaccggaaaactgttgactacagtggtagttaagaccccagtcgtattgccctcgagtgaactgtccaaagacgtcacgagcagtttggcagtctatgatcaggg

SEQ ID NO: 68347 - DNA, 1763 bp, Arabidopsis thaliana landsberg
cccaatttataaccctgttccagtttaactatttctagtagcacgttagaaaagagctaaatatagaagactttatcgatgggttttatcttcaacaatatctacgtaggaatatatttcctgtaaaagcatttagtcacgttccttattattaatatctttttaatttcagtgacctaaatattagattgtgggcttgacaatatccctaatactaaatagtagtgttttctctacatatattttgtattttcattttaacgaaaaaagaaatttcatcaaaagactatagctttttcttacataaagcataactttatcttgtacattataatcgccaaattgttgaaacatttcgagtcaagaattaattaagtaaaactacgacccgtgattcttttcttcctttgtcgacaatccatacgcgtgaatacgtgattagtcaaatgtaacctgcacaaagaaaaaaacataaaacaggaccataccaataccatattctcactataccaacttcgatttcataaacccaaataagaaaataaaaacaaaaactccacgctgtatttccatgtgtgcgagatacaagaatagactcgacatgcaaaataaaaataaatatgaccaaataatcatataatatcctagaataaataaattaaaaaatcatagtaaccattttataaatttcgtaaccttttctccgtcatcccccacataccactccctataaatgccaagcaaaatagctttcctcgatagttcctaaatcataactacaaaaacttttccttcttcttcctcaacctttgcttcaatcttcaacaactttctttttataaagattttgcaagttaagtgtaaacctacaaaaaccaaacatggtggttttgccacagccagtcactttagataaccacatctccctaatccccacatacaaaccggttccggttctcacttcccattcaatccccgtcgtcaacctagccgatccggaagcgaaaacccgaatcgtaaaagcctgcgaggagttcgggttcttcaaggtcgtaaaccacggagtccgacccgaactcatgactcggttagagcaggaggctattggcttcttcggcttgcctcagtctcttaaaaaccgggccggtccacctgaaccgtacggttatggtaataaacggattggaccaaacggtgacgttggttggattgagtatctcctcctcaatgctaatcctcagctctcctctcctaaaacctccgccgttttccgtcaaacccctcaaattttccggtaatctcaaaaaacaacgttacatcacttattttcacttaagatactgttaaaaacaaatctttgttctaaataaatcatcactccttttctttatacatttcaagaaacagagcactctgttttgtttttttcatcttctagctagtactacttttttcttcattgaaacaatctgacagttgtgagtaaacaaatataaacagtgagtcggtggaggagtacatgaaggagattaaggaagtgtcgtacaaggtgttggagatggttgccgaagaactagggatagagccaagggacactctgagtaaaatgctgagagatgagaagagtgactcgtgcctgagactaaaccattatccggcggcggaggaagaggcggagaagatggtgaaggtggggtttggggaacacacagacccacagataatctcagtgctaagatctaataacacggcgggtcttcaaa

SEQ ID NO: 68348 - DNA, 757 bp, Arabidopsis thaliana landsberg
  unsure (1)..(757): unsure at all n locations
tctaaggtattcctgcatgagagggagtgagagggtttgcacatatatnaaaaaaagtatatatttcaattctagatgaaaatactacaccgttatattagagagcagctgcggcatatgatgataggagtgttgatgtgagggttcttttttccaagctcacagttgggagactccatgtgatattagagcaagtggcaaattactggtagatgcaaaatattgtatttacaacttatacgctagataggatttatctacagtgatacctagcaacgcccttctatccttaacttcttcgggctcatgaggtctaacatataacctctcatcgtcaagttactcgatgccatccttcccatccaaccacgtgggcactatactctcacaaacccccttataatcattaaacacctccccctctcccgtctccactccctccgtagtccaaaacatcgtccacccactcccaggcaacctccacgtcccgcgactcctctcaaagtaccacttattcaccggattactactcctgctgcgccaacacacgccctcagggaagcaatcccgcaccatagccttgaacaccacatccgccacccctccactcccctggctccgcttcagcacagccagcttatccaggtacggcacccagcgcccctcgggctcaggactcccagggtcgatgccggggggtaattcccaggtgagaagcgcgccgcccttgtacttgcctgcgatgattaccccggcg

SEQ ID NO: 68349 - DNA, 223 bp, Arabidopsis thaliana landsberg
accaatgaagttccagggcttcagattttcaaggacgatcattggttagatgtccactacattccctcctctataaccgtcaacattggcgatcagataatggtttgttagtcgaagttgtatgatttctttaattaatgaaaatgtctctatcatttggtttttgaagttttttcttttggaatttgtaaaggctgagcaatggaaagtacaccaatgtgtc

SEQ ID NO: 68350 - DNA, 211 bp, Arabidopsis thaliana landsberg
ttagaagttaaaaatcacgtccacacactgaagcctgatttgcatcaccggagaaaagtaacttgtgttatgtagtgactgatacatagagagagagagtatctcgagagaggtgctggtttgcttgccttgtttccattgcctatacctttcgcccttcccctttcctacgtttcgactgttttctcacctacatctctcttgggttccc

SEQ ID NO: 68351 - DNA, 552 bp, Arabidopsis thaliana landsberg
gaatgcatacaccggagagtttcacagtctttaaagggaagcaaacccagaatccaacctttagccagccaaacaggtgcattctactctaggaacacaagagggcactcttgaactcagaaatctgattaacgttgttggcaattgctaaaactggaaaacgaaacaaatcaaaatgcacagaaaataacaggcatcgtattacatgaagaaaattaaattcaattatcttaaaaaaaaaactaaccatgaaataggaaaacttgagaactattgtttcaatctaaattaaataaccttaaatatcacttaataatgtgaaagggaaaaaaaggctttaacccgaaatataactcagaaattgacattaaaaaaaaaaaaaaactgaaacaacagaggtgtctgaaatcacaagacattggagaaaataaaacagttcagaaaaaacaaagaggaacaaaattaaatttgttagacgtcctaagggaatttttaatttaaatgtaaccactgatattgaggaaagaaataaagtaaaatcaagaaagcaat

SEQ ID NO: 68352 - DNA, 413 bp, Arabidopsis thaliana landsberg
gatcattagtttcagtccatgtctttgtctctatggtcggtcatctgccttagaggcgtgaaagtcttaaacaataatagaacttcattcggaaaaaagaaaaaataacccttaatatttaaatgtaatttagatcatacagtataaataacttcttataccaaactaaaatgaagatggtagctgattaacgaatttacatgcggaagacttaaataatcgatagattagtttatgaaaagacttgcataatcgatagattagtttatgaaaagacttacataatcgatagattagtttatgaaaagacttgcataattggtagatgcaaagttataagaaaactgataaatctgaaacgaggcttgagttcatcaaaatttcctgtgacagcgattattttaatgttacta

SEQ ID NO: 68353 - DNA, 482 bp, Arabidopsis thaliana landsberg
ctgaacatacctggatcctttatagaatttcacgtcatgattgccggaaaatcccgtttcggcttctatgaccgtatccgccactccattatgatctgcatccggcatggccagtattttcccggcgcccatatcggccacatgcaacactcccgaagggctaaatgtcatgaaccttggcttggtcaggccgccggcatggaataccgatacggtgtaatcagcttgcacactgagtgtttttcccgcaggaaatgcagccgtgtattttgaaggtaccgtcaccgctacggtatgcatacccaggtccgtaactggtgtcagggttgcagactgcgggtaggctgttccggcagacaggataaataacaggaggagcagggtttgtacaggctgcctgcgggcagggggcaagaactgcctgaaccaatttgcggatcgtttcaggcgatagctggagggtaattgctcgatcataactg

SEQ ID NO: 68354 - DNA, 524 bp, Arabidopsis thaliana landsberg
  unsure (1)..(524): unsure at all n locations
cacatttctgctttgttgttaattattgtgcaactcaaaggtgtttagatccagaccttattatcttgcagatttgtggggaggataaatgtttgaagttggcattttctttgtttgaggagatgaggagatatcagattaagccaaactgggtaattctcctactcgaatttgctttgtttctttttgtccctttcagctactaacgccaccttcgagagaatcagcagactgaaattatcagtgatgtgtataaaattatgcatataaagtccaaagctattattagagtagtctaaattgacggaatgcatttcctaaagatggaagccgtttcaaaatttatttcagcatttctcagtctagaaagttgtttctcacgtgacatataatacacttcttaaagcacgaagcaaatatggttctttacttgaagtgcggcaatgcttggctatatatcangacatgcgaaatgcanggtatgaacaatttntacctttatggnctactttcatttctcttcc

SEQ ID NO: 68355 - DNA, 544 bp, Arabidopsis thaliana landsberg
  unsure (1)..(544): unsure at all n locations
aaaagactaaagnctgaccaaaaaaacatcatttttttttttgtcgaccaggaagcgaatattcagagatcacgttttaataatttgacggatactcacaattccagtttcaaattagtaaacgataaagtagacgataatgaaattcatgtcatacccatgaacgaatgtaatgttaaaaaaaattcatactattaaacactttggagttcaaatctccttttgtccttacacaatcaaagatactactttcaactttttttacttaacagcattaactctttctcatatcttcaattgttctcctaaacgaacttatcattaacttgtttaaaaaatacacatttactataacatatatcacaacaagatatcttatatctatgacaaaaagacgtagaactacagcatatagaggcaaacaaacccacttaattcagtaacttggaacccaccaaagtcatctatcaataatgccccatacctctcccccaaagatgcaacaacactgatctttaccaatataagtttttaccaaacaaca

SEQ ID NO: 68356 - DNA, 211 bp, Arabidopsis thaliana landsberg
gcattaagtataatcatcaggtctgtactgtattcacatctttttgagtggtatttcaccttttctctttctaaccttttcattttttgccctgattcctccctcctagtgctattttggcacatttcttgttagacgaaaaacttaggaaaatgggagtttggggatgtgatcgaccaaatgcgtgttacgaaaggacggtcgtcaccga

SEQ ID NO: 68357 - DNA, 378 bp, Arabidopsis thaliana landsberg
aatcaatcttgttgctgtcatatatttttataaaacatttatggtagagcttcgatgtaaccataaaattctctcgttgaaaaattatgtggtatctttttacgttattgacctacttagccatcggttgttgaagacaatgtgtccctcattgtgagtgagactgtgattttcgggtagaatgatttcaagcaaaacttccataagagcatcaacataattgttgtggatgtcaaatttatatgatcatttctttactttatgcactttgaccgtaaaaacccaatgtcccacattgacatatattggaccacatgtatatgagaatctaactgcatgtcaatatagtctttatttttttttgtactggttacaggt

SEQ ID NO: 68358 - DNA, 232 bp, Arabidopsis thaliana landsberg
cttaataaccggggaggctttttggccagtcattaaccacccaaggcggggttatggttggaggtaaaccacccccaaccaattcccacccaggcaaggggtggggccttaggggaaattttcaaataccagctttttaaggggtggaggcttaagatttttggtccttatttcaaccggtttccaggacctttttacttccaaattttatttttaaggggggggggggggg

SEQ ID NO: 68359 - DNA, 200 bp, Arabidopsis thaliana landsberg
gattacagttcccccacgaccgtaaagtatggataagtacacgagcgacgctaggcctggtggatagaaccgggcggacacacggagaagttcgtccgatacaaggagggagaacattggacacccagcactgccctgcaaagtggggactggtaagactaggtacggatttgattacaccaagatgatttgtcgtttat

SEQ ID NO: 68360 - DNA, 3082 bp, Arabidopsis thaliana landsberg
tctcatcggaaaacatgactccacaagctaagtaaaagaaatgcttttatttatgtagaaagacgtatttaagttatatatgttacaaggataagcatttcattgctctggaattttcaaataaacatggcagacaaaactgaagtcaggaacccaacttgccttatcaaaaggaccatgtgacacttctcttcatgtaatgacagtgggcttctccctccctgtgaagtccttcagctttgatacagacaatgcaagatctgtagcatgacaatgagatgaatcattactaaagtcaaaactgggacatctttaactctcccgaaacaaaaccaagaacgaaccgattaaaggtttaagagctatttgtgcatccacatcatgttttgaaacgtctggctcaaattgttcaatgtatattcgcactgtagctccagctgagccagttccctggaacaaagaattctaagttagttcactgtgataggggccaatgtgtctctatacatataaaacatggaatttgattaaagaaaaaaagaaagaatctacaacatacggataaacgaaatatgattctggatccatccgtgaacacaaaccgaacaccttgcttggatgcaacacttccatcaacctaaacagaaatatataaacttgctcagtatatcgaaagtacatgcatacttgaatatcaactttttattattatcagacttacagggtctgtgtatgagaagtcatctgcaaactggaggacatagtttcctgtgagatgaaagttgttatgaacagtgaaaataagttattacgtacagaaaaatgaatatattgggatgaacctaaccataaacgtcaccggccttgctcttacacaagatttctctaagatactcgatcattttattggctccttcagattcacattcctgatcacacagtcgtaaaaaattgagggggttttcacattaaaattagttcccaagcgatctgtaacaaaattcatacacaatcttacttcatagtcgtatcttgaaaaaaagttccttccgtatgtcgcccaatactctttcacaacatctgcaacagacaccaacttgtcccctggtttcgtgtccttgttgcgatgagcaaggatcgaaagccacgccaacacagccctgtcatgtaaggttagagtcattctacagcgtaaaagcagagtagcatttttaaggctatggactgggattgaagaatccatatatgaagaattcttcttgaaaacaacttaagtgaaaaagaagtaaatttacaaagattgagtcgggaactattcaaatgacatcttaatcttagctatgagtttataggtaaatgataactaatgagagatttctgccatagaatatcaaaacttgattcaggtcaatgttaatgggagtttcattgactagattaccagagatcaaggtgtcgtaaaatttcttgaaatgctgtgagacaatgcataatagatctaaacaccattcgcaaacttatgtgtgatgatacaatcccattagacggaaacgttgcatatcgcataagtatccagttattagtgagcattagatttaaggaagattaccatattccatccttctcacggatgtgatcagaacctgtgccaaagctctcttctccacagattgacaattttccagcatccataagatttccaaaaaatttccatccagtgggaacctaaaacatacaagttgctttgtcaaaaagtttatcctcctaattttatctggttgcaaacctagaaaatacatctgttgactaaaaagggtgaacctcgaagaaaggaagcttcaacttctcggcaacacgatcaagagcaccacttgtcggcatagaacgtgccagcccctgagaacaagattgcatccagtaagtttaaacggcactatatctaaaattaaatagtgaacttcattttatccaaagcaatcccaccttaggaccagcacggaaatatggaattgcttcttgtgcattggctgcgatgatagctacagagtctgaaggagtgacaaagaatttgtttcctaaaaccatatttctgtcaccatcacctgccagaaaattgcactattatagtgactaaattcatggtcaatgtttcttagcctaaaagaacaagaacatttgaaagatatctctccacggtcataccatcacttgctgctccgaaatccggtccattgtcacgatacatgacatcaaccaaatcctttgcatatctatatgtaagaaagtttatagaagttatatactaagtgggtatgttgaaacttctcttcagtttatttcttacgtcaaattaggatcaggatggccatgcccaaaatcttccaggggaactccgttggaaattgaatcctacaaaacatgcctaacatcaatcatataaaatgtctagaagttcaaagttaaatctaatatatatcataatgtccaatacataccggtttggctccaaaattgtcgacaaaaattggtttcgcataagcaccagtaacagcatgcatggcatcaaacatgaacctaaaggcaaggaaaatgaacaacaaaaaatatcatcaaatcataggctagtttcggttcttagcatgttgagcgactctgcaaccagacagaaggcgcaaataattggaccatcaaaaccccaaaaaagacaaaagcttctagcctatttggctctagatgtaagaacatacccaaaatctgatcttgaaagaagacctctgatgagatcaaagtcgaaaacatcctgcatagaataccatgaacatatctaatgtctaacatacccaatatcataagacaaaaacagaagaatcatgtgagaaaattcttacctgcatgagctccaaatagtcggaaacaggatctataacttctacactgaaattcccatatttggtcactccaacttgagaaagatcaatattaggaatcttctggcaccttaatctcagagatctgaaaatgtggaccagagacgagaccattatacataaacattgacagaaccgcacaattgtaatgatca

SEQ ID NO: 68361 - DNA, 603 bp, Arabidopsis thaliana landsberg
  unsure (1)..(603): unsure at all n locations
gcgctggtggaccgtgctgtcggcgtcgatgtagacgccgttcgacgtgccgaataccgttggcacgatcacctgcccgcgcgcccgcgatggcgcggcgacacacaaccccaacacgacaaggaagccggcgacgcgtctcatgactcttctccgcaaaggcccgagagggggacgcactattcttcgctcgacggggtccccgcgtcaatcgttttccggcccgcgcgccggttcggggaggcaatttccgcgcgacattgcagatcagttcgcaaaagctgcgcgaggtttgcaacggtcccccgcgggtccaccgggcgccgccgccggaacgggatttggccatagatcgatacgtgcaactgccctctcaacgcgcggcggcggactgttatgggacgccgcaaaacttcttcggacctccccggattcgccttgattcttccggtcggtttctttacaagccattccggcactcaaggagagaataaatgcaacccaataagacacagtcaaacgacgcgttcgcccccgtctaccgngccgtnccgcagccggcgcaggagacgccagcgcccgaaatccagccccgcgagatcg

SEQ ID NO: 68362 - DNA, 658 bp, Arabidopsis thaliana landsberg
agacatttttcccagtattaaaaaaaaatgaaacaaaaataagaattaagaagagtagtaatgaactaaccatcatccaagaagtgattctccttaaccgcaccatgtcctgaagtttccatcatgagatgagtctcgatgccgtctttgttcagctctactcccttgtcaatcacgtttctataccctactctatacaaacaatgcctccctcctcgctccgttataaacctagttagccccatactcgttcttgcgtcagtcactactgtacttcctatacttaaaaacattatcttaaagtcacataagttaatcaatcataaatatggattaacaaacgctgatcattaatgtaacccacctggatgttctttaagcactatagctgacataagcgcaataagcttatctccgttgataggatttcctttgttatccaccactccactcctgtcaacatccgtatcaaacacaaccccgagatctgctgagttctcaagaaccgcggctcgggtgtgttgcattgcgattttggtttccggattaggaatgtgaacagggaaccatcccgtcccgggttagcatagagcgaaccgaatgcattggctcctcaccttgctagcacgccccccgtaaagagcctcctgccccctta

SEQ ID NO: 68363 - DNA, 415 bp, Arabidopsis thaliana landsberg
ctacatctctaagcctaaaacaacaatcaaccaaatttcaattcccacagagaattttacaaacattactaagatactacacaagagacggacacagggaacataatggatagggtttatagtggtaaaaccatagaggcaaaagaaggagaaaaaacctgaataggaactggcgattgagattagtaacctcaatacggtccatatcaatcacttcgagattacgaaaaccagaaagagctaaatccttgagaagctcacaacccaatccaccagcaccaatcaccaaaattctcacataatcccttatgtcatccctcagctgtatacagaaacaaacttagctcagaaaaaccacaaaaacgatacggaataaaacccgaagaagcgaattgagggataaagggtgtttacg

SEQ ID NO: 68364 - DNA, 376 bp, Arabidopsis thaliana landsberg
agcgatccagttgcgcgaaacttcgaatgccgtgtcgcgcatcggcagcatcgccgccgtgaggacgccgaagcgctcgcgatgacggccgacgaaggcatatgcggcgttgccggggccgaccagcgccgcgaggcgcagcagcggcgccagccagccgaacagcgccgaacggcgcaccagcatcgtgaatgctggccatttcagataggcctgttcatcgcagtcgatcagtacccatgaatagttggcttcgagcagcgctttggcgcgcggcgtgtcctgcgcgggcgagatctgcagttccggaatcaccagcaactgtcgcagcagcaggcaggatttcacgcagaagccgcagtcgcggtcgtaatac

SEQ ID NO: 68365 - DNA, 401 bp, Arabidopsis thaliana landsberg
taaatgctaagatggtagagattttttaggtgagatctaagatggtggagatacgagatgtttatagtggtgttacttctcttttatagagaaaataaagaaataaaagaaaataaaaattaataaaaaaagaaaaatatgactggtttactaaacccaatccacttttcgaccagcttatccactcttttcttgtgcatggttctgtccatacggcggaccttctttattacagtccacttttacctttttagttttttaatttttttttattctgtccactgtaataaggacaaaacctgaatggtaaataaattgttgacgaaaacacagaaaactacttcgtccgtagttcccattcatgccctaaggttttgaatggtacacagcggtccgagctt

SEQ ID NO: 68366 - DNA, 2599 bp, Arabidopsis thaliana landsberg
atcatcacattaagacataacccatatactttatcactgaattattaaaaaaggtcctttattaaataattagacccacggaaaaagatatcatcacaaccgttgatctttactaacaacaagcgtgttacgatggaagtcaacgagaagtcgtcgaatgtatgcaaaacataaactggcgcctctctctctctctctctccttcttcttctccacttcccagttattccgggacgagattttattgtctctcaaaatctttttcttctctccacccaaatataaaatcaataaaaaagataaaaactttaatttcgtacctaagcaaacagtatttcgactcgagttttgagaatatccttactttgaaatatcaattttactttttgttagcgccgagagagacttgtctagggtttattctcagattctgcttctcctttgctctgatcttttcttcatcgagctctaatggctgggtaagtactttatttcttctatcatgttctggattttgactctgtcatggagtttttagttgaggctctaaaccctaagtacgattcctgccgatttcaattccgaagtacaaactaaagtttcaatctttttttgtttgcgtttatatatcaaaattgagctttgtgatttcaatttctccgatgtgaaagttaagcgcgaaaggggttaatttgaaaatctgcatttgggtctttcactgctaggttggggtttttgaagtttccagtcctatgatactttttctcccagaaatgtgcttgaatttcgctttcttatgacatttacaagtattatgctgactctatgttcagcagacaaacatgtttggtctttcaagaaactggagatttagttttgttttctttctttaacctgtatttgggaatgtcactgtaaattgattctgaactgtagatatatgtgtttgatatcatctttctgataattctgctttgtgtagagtatatatgaaacttgtgtcttgactaatggatgattttcttgctgtatgcaggcgatcatggctgatcgatagcaaccggattgcaacgaagattatgagtgcatcggctagttccgatcctcgccaagtggtgtggaagagcaacccgtcaagacattgtcccaagtgtcaacatgtcattgacaacagtgatgtatgtctgctctttcgtttcatttgatgtctagtctctcatattatatttctatgttgttgttgtaaacacaagttttttacatttccaggttgttgatgattggccaggattgcctcgaggtgtgaaatttgatccatctgatcctgagatcatatggcatttgctagccaaatctggtttgtcagggttaagctcacaccctttcattgatgagttcatcccaaccgtcaatcaagatgatggaatctgttacactcatcctaagaatttaccaggtcaggcaatacatgtttcttctttctgttttcagtcatcaaagaagttccaaaaattatttgatctcacttaaattgactatttttaggtgttaagagtgatgggacggtgtctcacttcttccataaagcaatcaaagcttatagcacaggaactcgaaagcgtagaaagattcacgacgatgattttggcgatgtgcgctggcataagacaggaagaacgaaaccggttgtgttggatggtgttcaaagaggttgcaagaagataatggttctctatggcggaaaagctgtgaaaaccaactgggtgatgcaccaataccatttgggaatagaagaagacgagaaggaaggtgattatgttgtttctaagattttctaccagcagccacaacagctagtagtcaagcgaggtgataaagctgaacaggaagtctctgaggatatctttgctgcagtgactccaacagcggatcctgtcactccaaaattagctacacctgagcctcgaaatgctgtgcgaatttgctctgattctcacattgccagtgactatgttactcccagtgactatgtatctgcccatgaggtttctcttgccgaggtaagaatctttgtggttgctttctattgataagtccttgtggtagtctagtgcaagagcattgtgattaccgtaggtggtttgtactggattatagctgtggtgacagttcagtagctattgtagagatggttagctacagagttaactgatgaaatggaagtttaggcggagagagttgcgtattcaggatctttctaaggtttaggactgagattggggtcgagggtggagatttactcattaatctagtataagctcttactgaattgaataaaggagtttgccctcgacttggattatctaacagcttattgaaattgcactaattggcactttttgctttgtttccggtacctaagacatccgaggtaatgtgtatggaagatgaggttcaaagtattcaacctaatcatgaaagaccaagttctgggcctgagctggagcactgacttgaaaacggagcaaaagaaatgttagatgattaagaggagcaagagaaggatagagacaatgaaacccaggtgaggaagatccga

SEQ ID NO: 68367 - DNA, 415 bp, Arabidopsis thaliana landsberg
caggacaacaagaatgcacgcacaagggagctgaggctttcggtctgtgagagaaggacaggacaggacaggagaggacgagctgttggcgttaaatggggtacgtgaagtgaagcgctcctgctccttctcgacaacgaaaaacggcttgcataggttctcttggagggatgcatacaccagccggacgttgctttgcctcgcaacgcagggggaacaatggaccattaaaaaccacggtgcggttagagaggccttggtgttgggatatggcgagacatctgtggggagagagttattcaacactccgagaccaacgaggtctctgaaaataatcacaaaaggggactggcacgaagtgaactgaactcgacctaatccaagtgccacatccgacgagagaccaggggaacaa

SEQ ID NO: 68368 - DNA, 689 bp, Arabidopsis thaliana landsberg
tgttggtttttatagttttacttttttgttcgacccaatagtatacgattctttttgtaaaatgtgctaagacatagtctatgatttgtgaaaaaacagtcaacttgtggtttttaacaatctttttaatatggtatttacatggtaatatattataagcttttttgcttaatactagtcaaagtttacaaatagatacgggataattatctatatgatttcatgcatccaatttctatatttggaatatataaaactcatgcatcaaatataaatggcataagtttcattaggtgaacaattcaaatatagttaaacgcgttgagggtagactttacaacacgagatcaaatcaacttgcggctcggattagtacactatatctttgaaatagccagataggcccaaaaacgcccactatgattaaaaaaaactgagaaaactggtagccgacaaaaaaaaaaccggttgaacggaatttaaatctggttatgcatggttgtgaacttgtgattttcaaacactcattgttgtatggtccaggtaataactgcatgtttattccagtactaatggtgagatttgttttgcgtttctagcaaggaattgtttatgagagagaatatgcttcacgacataggtgtcatatattgttacgagatgataaaatgatcttggtgttatttact

SEQ ID NO: 68369 - DNA, 630 bp, Arabidopsis thaliana landsberg
ataatgttgaacgtatatactattaataaggaagtgatcaaactgaaacatgaaagtattaaatttattatatgtaataagaaatgaataaaagattgagtaacgtgctcacgagtaagataagaagcacaagttaaagaataataagtctgtatcgatggattacagctaaaggcagaaaagcaaacacggtttgttaaaccgcggagtccaacagctaatcatatatacacattacaatttacagaaaagtgtcaagtgtgtttaagagtacccattcaaattgagttaaccagaaattgaccaagtataccaaaattttttgtctcagttctaaaggtttgttaaacttgtcacattataatataccacaaaagacagatagaaggttatatatattaaattttaaaaacgttttcttttaagagtgtatcctagaaggctagaatatactgaaaaattgtctaaaactttactatttttgaaaagtttcaaaaataccaaagtttaggtttacaaaccatattatatcaaaatgttaattactatactactatttaccaaaccattacttaaagataacacgttatgaatgtattagtttcgtatacagacaagtatgtttttttt

SEQ ID NO: 68370 - DNA, 841 bp, Arabidopsis thaliana landsberg
cacgcaagtatgattaggttcgaccatttctctcttgagaaccagagtggtttgtctcgtttggaggcaaacgttgaagatgggtctgttcaatcgggtagtccaggatggatcgaacctagctccgatgttccttatggtccgaagcattttagtgagttatggtctgattcaagcagtgatcggcttgatgatcagaggttagtggatgatgatgtgaataacgagatgggtatagagagaaacgaagtgggtattgttgaatatagtgaaagtatagctcaagacatggatttgataagctctgatgagagaaaggaagaatctttacttcatccagtggaaggagaaggaaactctgtttctattgatcctggtgttaaatctggtggtggaggaggagaagagaaagggtttgtgtggtggaaaattccaatagaggtgttgaagtattgtgtgttgaaaattaatcctatttggtctttgtccatggctgcagcatttgtgggttttgttatgttagggcgtagattgtacaatatgaagaagaagactcgttccttgcagcttaaggttcttttggatgataaggtaactagcttggtttatttgattgtttattgttctttgagtatgttgattcatgagtcatgtggttactgtatgatcttttggtgtgatatgagctctgcttagttcaacttttactgcttagttagatgttttattagtgtcaattgttgttttgatggggaaaatgagaagatcagatcatcccttgtttgtcctgggaccagtttcttgttgctaagtagtttagatgcaaccagcgactcgaggt

SEQ ID NO: 68371 - DNA, 213 bp, Arabidopsis thaliana landsberg
tgcatttataaatttcccttcagtttcttgatttgttgccttttgattaggcttttgcataattactttaatataatttagatcctgtgtagatatgtaacacgactgaggaacaatttttttgttttggttacaaatccttgatttcgtgtaggtgcataatgttttttctatttcgatctgtcttcttaactattgtcttgattattttga

SEQ ID NO: 68372 - DNA, 830 bp, Arabidopsis thaliana landsberg
  unsure (1)..(830): unsure at all n locations
agttgctaggtctatgttattgtctgtgtttttatagaccgaatcaaacatagcaaaccaaaatttgagtatgttacgtgaagacaatgggtagatttatcttgaagttcgaattttggtttgctttatttccgttaaacgtcaatagttaaacttcatgagtatgctttagctttggatccttagttccttacaatactcacttgtgatttaagtatgataaatgagtataccaaactttggtggtacaatggtcaacgaataatagagtgaaagaagacaaagaaacaagaaaaagagacatatatctaatcacaattgacatcgtagagtttaggatagctataaagtgaaagatagactcctacatggctacatcaatcagaaacattgccctcttcacgtgaacttccctgttaatttgggtttttgtcttaacccttttcatatcttaaagagtcgtactttctaaataaacaaccaaaattccgttattggcttttgtctttgtacaatctctttacgacactgcctactaagaccagctcagaagcttatcaaggttagattctgaccgcaaccttccaaaactgcactatgattctgatccaatttgtattccaccaagcaagtaacaatatatacacacacagtacaaacttacaagcatctttttgtatgtttttgtaacatttttaatacaatcatatgatacatgcaccaaccacatcaaatcatataatctcacatatatgcattattttgccctcacattcacttaattntcaccttanactcatcatggaccactggttcatacccactgatga

SEQ ID NO: 68373 - DNA, 2702 bp, Arabidopsis thaliana landsberg
gatgattctgtaaactgattatgaaggccacataacattgtattgtatggtttctgtttatacgatgacctttgtcccttgtcctactgttattatacatcgcaaccataaccactagccaaaattaacaattacttctattttgtttccatgcatgtttattgtctcattaacatgttactctgataaaataggatttctgtaatcttttgatatatttatgatattacatcacgaaaataaagttcttggatcaacacaaagtcacaaacaacaaaacaaagccataatctcatggatcatttatatacaattctctacatatcatgtaacacaaatataaggttgaagcagattttgttggatcaatacctcttaacacacaaaaaggaaactaagtcatggatcaaaatatgaaccaagttgaagggatagaggaacactcaagtcttggcaaataagaaaacacgaaaacattgagatattttacttgtgtaaaagataagagactggccaaacggctggttcgggacacaatcctaccgttggacatgatttgagaggctaagaagaagatagagataaagagaaagacaaagtcttcccctccttataatgccaaaagatataacatacaaaactttacaatggtaatacgtacaaacataggaacgtggacgtgtcttaaatattctctaggacaataatgtacgtgtggataaaaacagagttgaaaacaccgacgaaagaaacttaaacatcttcccttttgaagatgaatcctaagcacactacacaacattgtattgcatggtcccgtttttgattataaatatgttttgcgtaacacttgtgttcacaatcgcagccatagccacaagccaaaaattattttatgttatgcccatgctcattaaacatgttaatcttgttaagtacttaatccaaggtttagaaatgataaaaggatttctgtaatccatgatattataagttcttacatcagaaaattcatgttcttggattacaacagacaacaaaacaagtcaactcgacgatacagatcataccatcaatatatatttctcttcaagttcttgtaacacaaatgtacgtagctttcttcaagcggttttagatccatacctcttaaccctttcatcgatccactctctcatatccttcaacacgatctcagcattctcgtcaggctctccttgaatcagcgagtgatacatcccttcatagatcttcaaagttttatcagcacttgatgccttttcgtatagtagcttcgacgatgtcggacatgttactccatccgctgtcccgtgcgcagtaaacaccggaatagttactcgcccaaaattctcctgaacgtattgagtcttcctcagtaactctctcattgttcccactctaggcttccctgtatatctataatgcaaaatccagacatttatagcttccaaagtaaagtctcaagctttacagttgatgagagacttgcaacatccataactccctagattatatcacagagtgtttgctaccaagaagtttgatagtacctttgcgggttagaagcgatgatcttaagctttgcagggtccttgatagccttcccaaccatcttattatccggcattgcagcccaagtatcagccaaaccaaagaggagaccataagcaaaaagatgagccttgctgggtttcatatcctcagggataacaaagagaggagccgaaaacatcaaaccggtccaagtatcaggttcggattgaaaatacatcaaaagcgtcacgagacctcccatcgattcaccaaatagaaaagccggaagatccttatacggttcactacaacgaacatgcttgaagaaagccaatgatgttgctgcaactttctccatatcacctaataaccataaaaatccaatctttaatcacctaaagatcgtaaattatcttatcaattacacaaagatggaaactttatcttatcaaaacagaggaacgaagtaaacgaacccatgtagcagcggataccatcggaacggccgtgaccgagaagatcggcggcgaaaacagcgtaaccccaagtagagaaactcatacagatcttctgaaacatccagcttgtatcggatccgtatccatgagacatgtacacagtgcctttgatttcaccatctaatggtaagaagctctgagtgaagagctttccgtttggtgtttcgaagtatgatttgctgttacgtactccttgtgaagtgtagtactcttcctccggcatggttccccagaaattcggtgatggtggcggaggagttgccggagctgaattcgctgaggtctccgctaccgacggcatcgttttgatgttttttttttggcagtgtaattttggtttttggtggtgataaagtgagtttttctagaggaagagaaatgagtttatacttaatatatacggcactaaatacaatttattaaagaaaatgtcatttatattactttaaattttgtataatgctaaaataatccattttgtcctgaagattaacccgttagccgtaataatgtatatcaaaactatgtgaatagtttggttttagtcaaattagattttattaattaataataagattggttagtcttctgattgctttagacaaccaattaatatatttctaataatgt

SEQ ID NO: 68374 - DNA, 532 bp, Arabidopsis thaliana landsberg
acgtcgatcaaagtgattttaccaatcaattcctgaatgcgcttcaaattcacattcttcaggagtttcaaaatttttatcagcaggtggatctgctcattctggatgacgttcaattccttgcgggccgtgaaaagacgcaggaaatgttcttccacatcttcaatcagttgcatcagtcgggcaagcaaatcatcatgacgagcgattgccccccgcgcgacatgaagggatttcaggaacgcctgttgtcacgtttcaagtggggactcactgccgatctccaggaacccgactttgaaacgaaactcgccattatcaatcgcaaaatgctggctgatggcattaagatacccactgaagtatctgaataccttgcttatagcgttgatacgaacttgcgtgacatggaaggcgtgcttaactctttgattttccacgcgacattgttgaaaaaggagattgatctggagcttgcgaaggaaagtgtgaagaatatcatcaaggagatacaatccgacgttagcgtaga

SEQ ID NO: 68375 - DNA, 474 bp, Arabidopsis thaliana landsberg
gagttgaaggaccggtctcgattcaagttacaaatctctaatcctatcttgggtacctaagatattattcattttctcattacaataagagatgcaatgctgctagagttctcttgtagcttagcctccactgcacagacaatctccatttgctcagcatcctgctagttttcctggaaaattctataggtttcccagataatacagtgacatcccacaaacaatttgcatcaagaaaagcacgtacttcgctgccaaaagcttctgtttctttctgctccaaacgcaattctggatcttggagtttgtcaatgttatgaagaagcacagtgtcctctgtgacagaagttggcagatcccttaaaacacttccacatttctctgacatccacttcatgacaagaatctcattcttcacagatatctgagatccagcgtaaacaaggcgcataactgacttgtcacgctggctct

SEQ ID NO: 68376 - DNA, 550 bp, Arabidopsis thaliana landsberg
  unsure (1)..(550): unsure at all n locations
gaaatgacctctaccacattgctgaaaataatattcaattattgttttagaggaaaaaaagaggaggcgagagagaagtgacaacaatattaaactcgggaggattttacttaagctggccataagatagaagtgaaagttttgcatctttgactcgtgtgattgcgtttggggttcttaatatggccttaacctcagagacaatcccttgcaaaccgctttctttgcaaagcttgatggctacgtctaatgagttccttctcacatccttatagatttcacatcctccatttgttaagaagaatacctgaaaacgtatatgagcatttccatgtacaaaaattaagccttaattatattgtcgaccatggagaaaattttcaccaaagaagcaatcttacaggataactcctttgcatattcctaatgagtcgagccgcgtcaggatgaaagctcgagaatataataggccggntcatggaatgctcatttacaacctgttcatctaaaagattgagattactgatcgagataagagatcaagacgggt

SEQ ID NO: 68377 - DNA, 728 bp, Arabidopsis thaliana landsberg
cggtgaggaaagtgtttatacattataatagatctttcatctccaaaagaatgtggtgaatattttctataagttccttttttcacaaattttttataagttccttatagcctctatgattacaatttgatctttccctgcaagcaaatctatcccaaggtagatgtggcatcagaaaatttccatgaaccataacctatatatatattttttatatatatatatatatgtttaacctatatatttttaagacgtactattcttctctgaaaagataatttcctcgaatttactatttggacttgtttgagctgccatccaaaccaaatcatcactaacggcatgattcaagatatatgggtttctggtgcaattctttggtacatttactataatttttgtattctttttaactatttttgtacctcgtttttttttatggttttggtttacatagaaggtgaaggttcctctcttctatttgtacaattagttattcggaccaatcaataatgtcacaagaaagtgaatgtcatttttcattttctcttctttttttttgttaatactggaaaaaaagatatatcgtggaattacatatgcaaacgagaaaacgttaaatcttcgtaaaataaatcttaagaaaaaaatctaaattctattttacatgaaaactaatcaaaaatatacaaagcacaaaaagacgaaagcaaatataattttttttt

SEQ ID NO: 68378 - DNA, 1186 bp, Arabidopsis thaliana landsberg
tataacgtccactgcttcattgtatattaaaactttacaactgtatcgaccatcatataattctgggtcaagagatgaaattagaacaccacatcgtaaagtgaaatgacaattcgggtaggaattttgaaatatagatttatggatttgacatcattcactgagtaacaacaatactttaagttagttcccttgtcataattattaaccaaagtaaatatcatcacacctatcgtcaaagtcgtcacatctcaaacgtgcttcaatctcttcatccttggttgcacactgaccaaccaaccctcacgacgatttttactttccgtcattgagccatgtctcctcttcaaaccaaagttgaacagagccatccaatggcaaaaccggaaatttgtgcaatccaggacatcaacaagcgacagcttctgcatctggctgagactcttgactatccgtctcagtaagcaaagggcttttctgaaacttattcctcagctgaccacaagcagcacttgcatcaagtcctcttgtttgccttacgcttgctgttatcttacgcgactccaacgctgctgcaaacgctaggacctgcacaatttgtatttttattgaagtttgtagaccaaaaccaatcccaaaacagaatgcctgtgcagctgtgcttaattgttattaacataccgctttcttgtaaggtcgctggtactctgatccctctatcgggttgtaaggtatcaaatttacgtgataagttttaccccattcacggagtagctctgcaagttccaccgcatgctcaacttgatcattgactccagctgcatcatcatttatgaacttctgttaaagtagatgatataatgagggagacgaacataaaatttgttcatctcaagtctcacatacctagaagggcatattcgaaggagactcgtctatttgtttcttggaagtaatcacgacaatccttcataattgcttccagcggataagccttggcacttggtacaattttctccctgaggctctgatttggcgcatgtaagctgattcaccaaaagaacagctcaagaacgagtaaataacatagaaacatgaaaatcaatgagacgagccctatccagagcatatgttacaggattagaacagaacatttcatgatatgtttggggtaagaaagctgagt

SEQ ID NO: 68379 - DNA, 1227 bp, Arabidopsis thaliana landsberg
agctccattaaaatactcgagagaaatttgtataaaagatcatttaagtaattgaacaacacatgaataaaatcagaaagtgatgacgcacctgacagctaaggtcgactgaagcttatgagatgcaagcttcttgattgtgtttggaacacctacagtcgatattgtaatcattcgttgtccgatttcaatgtcctaagtaaaggaaaagtataccatgagtgagtgctatgtcttattggtttaacaatatgcaactaacgtttgtgcatagaaataaatcatatatttgaacatcctagttgctaacttactatcctattaatgcttcaaacattacttttttttatggtcaagtctttgtcttagctttccaatttatttacagtgcctaaatacttagcaagaacttcaatcatttctgcacaaaaccatgttgaaacaggaaatggctattggcaaatgttaccttgttcaaacaacgatgagcatcaagtactgactttaggttcaacatcggctcacccattcccatgaaaaccacatttgtcaccctatgcttgaacacgtcctcgatagccaacaccttgacattcaaaattacacttgtaaacacaagccacattaacattttactaagaattcttcttccgggtcttaaatgggatcacacaactgcttctgaatactgctttatgcgtctctatgatgtaaaacaatatacagtacgatgatagtcttcttcgtattattgcataaggtattctacttaagatctgatcctacgtgtttcatcttggcatcaaaacaacaattcctaaacctgtatcatgctcttttttcattatcattctataagaatcttccctctaatagatttcattttacataatcaatcagatgcagaaaacaagaggcaatatagaagtaaacctgctcaataatttcatggcgctgcagatttcttgaaaagcctccttttcccgtggcacaaaacgaacaacgaagcggacatccaacctagcagaacttgaagatatcagtaataaaacttaactatgcaaaaccaaaaaaaaacaaatctctaacaagaagaaagtcaaattcacctgtgaagagacacaagcggtgaggcgcgttatgcccttctcatcatcttgaactggtataccaacagtttcgatcaatatgttatcttcaagcttagcagaagctataagataaacc

SEQ ID NO: 68380 - DNA, 1023 bp, Arabidopsis thaliana landsberg
gtaagcagttgtaaaggacacttgtatcgctgttgtttagcccatcaatgaagcaatgacctaggctagcatccaataacacactagcgctctgaatcctcttctccatgttctcaatgaaaggcaggttctgtactggcaatggcataacataaaaagtagtgagcatcagtcataagaccttctattgtcttctgaggctaacaagtatactgtagtttttggaaaacaccagagatttcacaagatttaactatgtagcatctgatgtaacctatttttttgtcagcaatcttctcaaaggcaataaattctcctagcagcacagcaatatctcaaaccctataccatagctagttttgatccccaatttactacttttaaatgcaatatactcaaagcttcttgtacgaggaaagagaggagcatttctaatgtaatctatattttgagatggacaaggaattgtgactttgcaaaaagaaaaaaagaagaagtaaatgcatgatggagacctgtgcatgagccatatagaacttgagccgattcatttcactagctattctttccaatagcatgctctgggtttctctcatggttgtgccatcttgctgcgttgaattctcatcattcatagaactccttcccatggaatttgcatcctcgttttgccaatcagaaggagtacttggtagaactttaataagtttttcaacctacatttacaatgattttacgtcaagcattctgagtatctaaccaaaaaaatgaaaaaagcaatgagaaacatttttgctcattttaaacggaactacaatgcaaaaccattaaggttcacagatagatcaaacttgcattgaggatattaaagaagttatcctgcttcaagcgtacactaagaagatcgacaagcttactcaaatcccgtgatctagatctatatcaatcaaagcaaataatcactggaatatgtcgccaacgaaattagaagcagacgcaagattacacttgcaaagtggaaaa

SEQ ID NO: 68381 - DNA, 566 bp, Arabidopsis thaliana landsberg
agatcaagatctaagaccggtcctgggggttcatggatttatgtttttccttgcttggggaattctgcttccgggggggggattatccgctagatacctgaaacacataaaaggtgatggctggttcaagattcatatgtatcttcaatgttctggactagccattgtcttcctaggcctcctcttcgcagtagctgagctcaacggtttcagcttcagttcaacccacgtaaagttcggtttcacagccatagttttagctcgcgctcagcccgtgaacgcttggctaagacctgcgaaacctgctcaaggagaattaatctcttcgaagcggttaatctgggagtattctcattcgattgtcggtcaatcagctgttgtagttggagttgtggcgcttttcacgggaatgaaacatctgggagaaaggaatggaactgagaacgtggacgggcttaacctggcccttcggttatgggtcttcctctgcggggtactgttgctatttggagtaccggaaagatgatgaagatagcgagcatctaagccatgaaattggttttggg

SEQ ID NO: 68382 - DNA, 201 bp, Arabidopsis thaliana landsberg
aaaccgatttagataattaaaacagagcagtacatcctctttacttctcatataaaccaaatgagtggccggtttggtttggttttgcatgtgtatcatatatcttacataacaagaaattttactagttctgttttatagctcttagttcatataaatctatgctgtcacatacactttcaccactttatacataacttt

SEQ ID NO: 68383 - DNA, 636 bp, Arabidopsis thaliana landsberg
gcgaatgtcgctggttccagtgtggaagcagaattctttccttcagatgtgtgagttgaacatttcccttcagaagtggcacacatagttttaatggaagagtctttgactcagatgtcttctatttatagttacatatcatatcttcctttggcgcacatatatgaacgtgcaaatcagattatgggggtgtatggtggtgttgctgtcggtttctatcagggggtatgtaagctcatgtcttgtgacatatgagattagcttgttttacgaaatcagactaatgtatatatatacttctttgacaggatgtcttgaagctgatggatgattttgctgtgttaagaccaacaatattctgtagtgtccctcgcttgtataatcgaatatatgatgggtaaaatcactttatacttcccatgtcaagtacgtattgtggaactatgtggtttctatgtgctgactttaatctccacagcattacaagtgccgtaaaatcatctggggttgtgaaaaaaaggctcttcgaaattgcctataactcaaagaagcaagcgatcattaatggtactaatagaaacagttagaaaagtgaactaagtagtatccgtgtttcaaagctttctgcattatatc

SEQ ID NO: 68384 - DNA, 521 bp, Arabidopsis thaliana landsberg
caatcataaatctagataatatatagatataatgtattaatgtctatttaagtttattcgtataagctaagaggtatgagtgtagtggcatccttatcaaacaattatcgaaaacaactatcttaatattaataatgtttatttattcatactaggccctaactcatacaagtcagacactcgactcatactgcataacagcataagtattaatttggagattctagcaataacagtgttttaacttttaaaggaacagaatacacaaatgtttttctttgaccccgaggctgccaagtgggtgaggagtagtgacgtcgcgtcgttgaattttctttgagcagtacaaactacaaacaaacaagatggatcccattttgcttgtccgttttaagtttggcggtatcattatccatgcacaaatcaaaatcacgcaactttttttataattacatttccataataattaacgatgaaacatattttccaagacataatgtaacgttaaattaagcaggtac

SEQ ID NO: 68385 - DNA, 532 bp, Arabidopsis thaliana landsberg
  unsure (1)..(532): unsure at all n locations
catgcgctcgccgtagcgcttcaccaccacccggcgatccagcagctttatgcgttcgcggtcattctcgctgcggagcgaggcgggcgcagtactgggtgagcagccgggtggcctcggggatggtcacctcgatgaacgggttgcgcccgcgcgactccagccactcggcgtaggtggcgccgaccggatcggtcggcaccgcgaacggcaactgggtaatcaccaccgtctcgcagaacttgcccggcaggtccaggccctcgccgaacgaggccagtccgaacaaggtgctgcccttgccggcatcgatgtcggcgcagtgttcggcgaccagctgcgacttgcccagcgagccttgcgcgcgcaccttgcgcaccatcgcgatcggcagcttctgcagcacgcggtcgagcttgatgcgcgaggtgaacagcaccaagttgccggcatcccagtcgaggttctccnnnnnnnnnnnnnnnnnntcctcggcgtgcgtttcgcgtgcattccgcagcgtgcgcatggc

SEQ ID NO: 68386 - DNA, 741 bp, Arabidopsis thaliana landsberg
tcatgctctcctaagaaaagtagtgatgctttaactgttcagtttagggcacttctcaagaaaatcgttacagctaaggagtctatgggagatatgatgaagacatcgtcttttgctcttaccgaagtaaagtatgttgctggtgacaatgtcaaacatgtggtcctcgagaacgttaaagaagctactttgaaggttcgttctcggacagagaatatcgctggagtgaagctgcctaagtttgatcacttctctgaaggtgagaccaagaatgacttgaccggtttagctagaggtggtcaacaggtccgagcttgccgtgttgcttatgtgaaagccattgaagttctagttgagcttgcttctctccagacttctttcttgacccttgatgaagcaatcaagacgactaaccgtagggtcaacgctctggagaatgtggtgaaaccaaagctggagaatacaatcagttacatcaagggagagcttgatgagcttgagagagaggatttcttcaggttgaagaagattcagggatacaagaggagggaagtcgaacgacaggcagctaatgctaaggagtttgctgaggaaatggttcttgaagacatctctatgcagagagggatttcgataaacgctgctcgtaacttccttgttggtggtgctgagaaggattcagacattattttctgaggtgggggctctctctctctctctctctctctttctctctctctc

SEQ ID NO: 68387 - DNA, 2770 bp, Arabidopsis thaliana landsberg
aatgaccagatttttcttggcatttcaggaagtttcgtttgttgaaacaagaccgaaatgcaatccttggttacaattaaaactacgagccgttttgctttgttgttgtattatcctcttcgagatacgggctcagtgaagcggatcttctttgcaaaagcccatttcttaataggtcggaagtggaatttaagaaaatctaactcagagaaaagaggacaaaatcaagatttaagattattagcttttcgccaaaggaaaactatagtaagttctcgcaataacagttggcactaaatttccgagaatgtcaacaatcttttaatggatttttttgtctccatatatacaagaactgagccacgtttttgttacaaacatagacaacatatttactaaacaagtaaactaaaaaaaaaaaaatctaaatgattcgattcaagtatcagttactgtgatcaaaatctcaacttatttattgcctgttcatgtcatgcttgaaccagaagaaatgaccatggaaagtaattgtgattacctttttgggaaacttggggttaaaaattgaaaatgtgatatgtcatggttttggtttctaatcaatagaacttgcatgaaagaaagaaagaaagagaaatgaagagaaaagctttacattgtaaagatgctactaattgaacaaacctacttgtcgtaaaagctgcagcaagcttggtctcttttccataagctcgtacttgataacaaaatgttcctgcgataaccatcaccagcaaaattcactcataacactgcaaattcgagaacaaggaaatagatattcctgcaataatcgtcggcttacctttctcactgttttgaacgaatttggatcaaggtattcgtatgttcctctttcatatgtagctgccctgactaaaggttccccgactctgaagaaccatactctgagttccttgtggtaaaaccaacctctttcgtaactgcaacatgtcaatcgaactcaaaagtctcagccaaagagagcggagtaaacgaatagatcaaagattacagtagagaaaaaacatacagttcatctgctgcgtacagctgtgcttcatcttttggcatactggaacaatatttagagcaaagtaataagtttaaaagcacaaggttaatttaggagttgggcaaatgtgacgctgaatgctgatctaataacagacctgtaaaatgtgtagaacaataactcgtaggagaaccttttgaaactagctcgctgcaacaaacggaaataatgacacatttgttaacaaaatcgagaaaatactttgttggtactactcgcaacaacagagggaacttacagttagaggcggaggttctgtggcgtagtaacaatttggtactgtgaactcgacctcgctctttgccggttcatttgtccaaggagacgcaaatgtcttgtagagatttccagttgaattcaaatccaatcctagcgtcgtcaagtcgatgccaagagcaagtgaggtcaattcagggttgctcctgtttagtacgtctaacaagccaagcaagcaaaaaggatctgcctctgactgtgtcgatttcatctcagaatctctaaattggttgattgatgacatctgttgcacagggaactgggattgattttgatgttgctgatactgctgaataagctgatcataaccaatactggaaactgcattaggcgagcttagaggtctaaggccaagaccctgtagcccaccagtctggtattaaataagaattaaatgataagatacggtagttggagcaagtgttgcccaaccacatgatgcagtatcataataatatgagatatgcaaattgaagaaagttccggcttgtatacatatagggataggagagactgccactcacagatgaagtatgttgtggctgttgttgtggacgatgtgatgaatatgttgctcccaagttgaaaccaccagatctacccatctgcaaatttgcaatatccaaacattaattcacatcaacaaccatatcaacagaaaaaggcaggacaacactttgttaacttcgaaacagtctaaagcttacagaaaagttttgagagtgcatcattgacatagcattgtcatgcagttgttctttttgatgcaaatccataggatactcagaattaccacctgcaacaaatctactacgcttgtgaatgatccagcaggtttagcttacatcattaagaagcacatcttatcatctttctcatgcaataagctataatatgaaggaagctaagaagtttatgaacttggaaacggactttcatgagattttggagaatagcatagaggaaaacttttcaagataggggaaactagagacgatattcctcactacgtgcacataaagtctgcaagacccagctttatgcacaatacaatacaaagtgatcgacaataaaagaccagctcctttatatccaggaagggcaggaaagtcttcattttggatgctgaactcctggttgtgttggacaagtggaactcctaaaccttgtttcctcaaagagcctaaaaacaccaccgcaagagtatgaggaaacaagacatgatttggaaaatcttttcaaaaacttatgttatattaagtatatgaatttcaaaagatcttcagataaaccgactacctagatgtccttgagtgccaccagcagacccaggacgacttgtcagctggggaaaatcgttgttatgtcaaatagagagct

SEQ ID NO: 68388 - DNA, 768 bp, Arabidopsis thaliana landsberg
tttctgtctctattcttcgttgctttcgtctgatttctatattgtcaccactcgctgtcatatcttccgtttcctataaatttttgtagtccagattcctcttaacttgcaatttttatgtacacagggaaagcatgagcacatatatgagcaatctgaggagtttcagaaggagctcaagttaaaggtccgagagatattaacagaccaagagtggcgtagaagaaaaatggcaatgagagtatgtagagtttctatccctgtgtgaaattttctcggtgagaagtctcacaatcattcattcattttttgtgttattacttcttgcatttagatatcagaagaagaggggagactgaagaaggatgaagcagaacaaaaggagatatggaagaaaaagcgtgagcatgaagaacagtgggaaggaacaagagaaaaaagggtttgttcttttgctaattgatgatcctaattcattacctgcctgtgaatgcgttattgtagaacatttagctgaccctttgatccatatggatgcttagaaatggctttagagaagaaaactcatctgagatctgtttgttcttttgtttgcccatgattctaattccctacctgcctatgaatgcagtagtttagaaccagtttagctcaccttttgatactaaaagttaatggctttagagaaacagaactcatctcaaaatagtttggaacccatttgtgtcaaatttcttatggaaccaaatactcttttaccacttgctt

SEQ ID NO: 68389 - DNA, 618 bp, Arabidopsis thaliana landsberg
gcaggagagtgaatatttctcaaggaggaaagagttggctttcattttccaagttataaagaatccattgagtggattgcggttcacaaattcattgctggaagacacggatttaaacgaggatcagaagcagcttcttgaaacgagtgtttcatgtgagaagcacatctcaaagattgtaggagacatggacgtcaaaagcatagatgacgggtgagagttttgattcttctttatacacacttaaattgttctataaagcctcattctcactgctaaacaaacaccctctattttttttttggctcatcagttcatttctgctagagagaacagagttcttcattggcaatgtcacaaatgcagtggtaagccaagtcatgttggtggtgagagagagaaatctccagctgatccgtaacattcccacggaggtcaaatccatggctgtctacggtgaccagataaggctccaacaggttctcgcagaatttctgctaagtattgtcccgtatgcacccatggaaggctcggtagagctccatctatgcccgactctgaaccaaatggctgacggattctccgctgtacgtttggagttcaggtacattccatcat

SEQ ID NO: 68390 - DNA, 327 bp, Arabidopsis thaliana landsberg
ggacagtccacaagatcgaatgtttggttccaagcaaactcattttttttggatgacattgctactctgggatgggtgtctttcattgcctgattcacgcctacccgtttgggaggaattggatgggatagggaaacaaagagattgagtctgaattgaggtcttctcatgttatttttcttgcaagttttcattgggtgttgactgaaagttttgacagtggaggggattgaagccaacgtagggtataacggacctatgttgtcgttgggcttgagatgaggggagtttatggctcttattaatagcacaatcaatacaaaaaag

SEQ ID NO: 68391 - DNA, 629 bp, Arabidopsis thaliana landsberg
cgtttctactgtcttctttggtgggcaacatggaatctttaaaagaaagagcataatctaaagagattagcaatcactttcataaagtataagctaaagagattagcaatttactattgtttccaatcaaacattgaacttttaacaacactcccagagtgattgtccatataagatttcactacagaaaatggatgacgtcgatttaccagcttcacttcgtaaaccaacgtaaaatttttaatatatgaaggtccattaaaataaatgtccactacataaatcagagtctaaactgtttatttgatttattagcttatgcttaagaacttttacgagcttctttgtaattgactttaaagcgagacaatattaacgtcatacaataatacgacggtctccaaactgacggtagaagttttaagtcagcttatatataactgacgttacacttaatattaaccgacgtaatttgccgtgttctctttgtagtgttgcgagaaagacatctataaaaattagatcataaaatttgagtctagaataacatgctaaacaatctcctgtactatctttttaaatcgagtagtcgctgatgacgtccacaagaaaaattgcggtcattttgc

SEQ ID NO: 68392 - DNA, 514 bp, Arabidopsis thaliana landsberg
tggtgcgtttagaaatgttcatttgtcttcttcttaagaacaaaaccaactaaatgaagactttcaaatgctttcacaacacaccacacaaagcttgcctttatagattctggccttgatttaagtaacatgcatgccattaaatccccaattctgtcatttgtatgtatttacggaggatcacactgacaacatgatgatgggttatagagcaacttgctttttgtatttaaaaaagttcctataaatagatatctttatcttttaaacacatatatatcacttctaaaaaaagaatgaatcgccttttgtgcttcttgattgttactggtattatatgttgggtcgtgtaatgcgcaggacgaaaagaaaaactctctacatttgaagagtattctgagtcccactccaggaaatgaactctgggcatattgctctcttaacaaagattctactagcagcattgatgcacaccctgtagaaacttaattaccattatagttttcatggacca

SEQ ID NO: 68393 - DNA, 548 bp, Arabidopsis thaliana landsberg
ttatgattgttgcaagaaaaaatatctttcaagtcacattctatggaagtttttacattgaatatgaacttctgagttcaatataatatcaaatgcagcgggttgatatcggaaaagagaactatgagaacgacacctgagtcagaaaagaagatctcattatcgtgccaatgtgcctcacctactacgacgtactaccaacatggttcggctcattgggacagtacatatgtgtggaaccagttgtcatgattccgttttttctacttttcaaattattgggatagtgcataagtattcattaaccaatgttcttacattaaactttctaaatctacaatacttctatctgaattggcactatagttgtacttacttttacaatagaatatgatttaaaagaagaagcactaatgcacgttactaattccaaaccacccaatccctctatcaaatatcaacgcatgtgattcacatttcacttaaatattcatttctttcatgggcagcaaaaaaaaaaaaaggagtttccgtttgattccaatgcc

SEQ ID NO: 68394 - DNA, 645 bp, Arabidopsis thaliana landsberg
cccgagccccaagtggacttgggacccgttttaatcccacatctgattcttctaatgacatcctaatttcagccaagaaacagttgcagatgagattacatctcccttatcctctacaaaggaatattacatccaaaggaagctccttggcaaagcggacaaaaatgactacacgtaaacctattagcatacctggcttcccgttatcagaaaggtacctgtgaaaaccaaataaaccaagatctatcaataagtagattcgttagctgaaatagtttactatgtgatgggcactcaatctgctctgagcagaacaaaaggatagctttaagaaaaaaatgtattcgttctatgctaaccaatcagatggaattagagagaccctagccatgatacaaatgttattctctccaaataaaaaatactaaagtgccccaccagagcactgccagccccatacgagagataaaaacagccgttacctatcaaggatgtggttgaaccaacctgattccatcttaagcttaaaagtcatcttattacaaggtcaatataacttcattcctgctgtcggtaaaagctggatttggccatgtcttgacctattttctggaactggtatatctcataccctataccctgacc

SEQ ID NO: 68395 - DNA, 558 bp, Arabidopsis thaliana landsberg
  unsure (1)..(558): unsure at all n locations
acgacacgatccggattcttccaaagctatactctaaaaaccataaaacactataatacttatacatcaggacattgttttgttaccatactgaaactcaactttctattgtttgtttcactaaaaagagcaatctctcttattcttattcttcaatgaaaaggtctctttgcttttcctttactcactcatcatccctctgtggttctttatgtgaagaagccactagttgccaaggagtgtacgtgagtcctcgtgagataaggtaaagtacaaacacaacataagcaattgcgaatatgatcactggcacaagcaaaatcacattcgttgcagctcctgagaagaaatccaccattagatacccattaatggctatcacaagagcagctactatccatgagattgtttggactaaaggttggattttgaaactgcccatgatttgctcattggagaccaagcaaaggagtgggatcacagcgaaagggatctgaaccgatngaagaacgtttagccattcgttgagctcatcaagcatagaatccgatgaatcaa

SEQ ID NO: 68396 - DNA, 2915 bp, Arabidopsis thaliana landsberg
gggcaaaacccctaggactcatatcgaagacactaggaggtggcggtggcagtggaaagacatgaggatttaagagattatggccgctaggttgcaatggaggctgaggtgggaaagagctcatcctctggtaattcatttgatcgaaatgaggcgcataactgctgtagcaatgggaatgcattgaccatcagatttggaggaggaggaggagctaacatggggtccaagtgcccaccgcactgatgtggatattctatttgaccaatccctctatcaaggtctgaacatcctcggaaatcaaacatatagtctggaccatttctcaatggaaactgaaccggggggaaaggaggatccggcattctatagcctccaccgaaaccaccatacttagcagcaagaccatcgtcgaaatgggacaaacttgcaccataagatggttcaaaagcttcaaacggtttctgacccgtattttctggcgatggacgaacagtgtagatgtcctctctagaagttctcacagagctaggcctatcccgactcacttcaggttttccagtgccctgcactttacaaccatgttctctaatattctttcccaagttactttttgtccttgttattgcaggcagagatgcttctacagcctcgtgagatctttgaggtgttgtagtggaaattgatgtgcagacagcatatatatcatctggggaagacctaacaggactctgccaatcagatgtcatttcgggaatttttactttgatgctctctggtgctctactcaactctccttgatcctcttccatgtcattgctcttccaatccacattattagaatccatagatttcccaagcttcctaccagagtagtctttggtctttccctcctttttcagctgacttctccgtgacaagtgatctgactgatgtacacgtgctacagtttctactgtgtcgattttctcagagactaagattttattaacgcattcagctacctcaagttcatccttttccataggaatatcatcacacatgccatcagaagctccaagtggatgcaaagatgcgtttgcttcttcttccactatctttaactttgagctccccacatccctagacaaatggtaatgcttctccgctattttcttgtgcttggctgcaaagtcggaccgactccagagagaaagtggcggaggaacaaggttccagtcttccaattgcttgtcttcttcattgacagaaccaggcaggtaaaatgactgaaaggaataggcaagaagcataacatgtaactgaaactcaataaaggctcaatctctcaaaaagcaaaattaaaagaaaagcgaaagatttacatttccagataggaacgtcttatcctcccatataagcacatatgatgacttctttttatctaacctgttgagaaaagtgatagatttacacaagagagggagagaggagtcgatatattagtgttatggaatggtacagaggagcagatgagatagatggaaactgaaacctttcagtctcgggaggaacaatgagaatgagaatctttgggcggaactcaagagccttggtgataaacttgttgtcgacaaaagcattgacgtcaaatggtggatttagccccataatctactcataattccaaaaatataaacagtcagatactactcaaactatttcaatgacacgggagtttacacaaagttcatactaaagcaaatttgtatcttaccagctttgaacctggttccaactcatctttacttacagtcatccaatcctttctctcaaaattgaaattattctgaaagtaagatagctaatcaatgagtaatcctagaagactgatgaatagaacacaccacgatctaacatatgttgcttccgtatcagtgataagactttacaacttacgacaatagtaggcacacacacacaagtcattaccttcgctggaaaaagatcgtaatttttatataagcacttcttccccgtttcttcaagcttcgcgttcatcagacagctaaagtcattagaaccacaacagaagtcgacaatctgttggaagagatcccagaaaccagacatcattgtttatgcacaagacattgatcattatactaacaagatcatacttcagaatataagaaaaaaacttaagagaggtaaacaaaataataaaattaaacccaacagataacgtttgtgagcaaatctcaccatatcaccatcatctgcataccaatgcagcctatcaacaatctgcacaaaaagtaataataggtctgaacaggaacaagcttcagatacaggagttaaaatttgacaagagtgtgtaaacagcaggtgatagtcactagtcacgcaggtgacagaaagtgtaaaccaacagcataataatcctcacagaagacagattaagtaagctaattggaaagacataacatcctacattttaagagtcatctctccttgaatttttttctttctcactaattgactaagtgtgaaccgaaaatccttgtaacatacaggatgcttagacctaaatcttgtttatgcttttaagaggatagattacctgttgaagtttttcaggattagtaaaatgacgaccaaatgaggtatagcgtgcaccatggagaaaaggagcaagataaactttgagcttatcctgaagcagaagaaataaacatctacaggattagcaaaaattactagttacaaacaaagataaataaaaaggatgtcgaaaaagctaagctaggaccttccacttgaggatttggctcagaacctctggctcacaaactgcttttgcatcctccatgtttcctccttcctcaagcttttttagtgctgttctgatagcctgaagaacgaaaattcta

SEQ ID NO: 68397 - DNA, 202 bp, Arabidopsis thaliana landsberg
aggcccgctggtgaaggagaagctagatctgctgccggtcgaagaacgagatttcctagcccagtgtatcggaggcgtcctggttctgattataccggtcgtcgatgccctgcatatggcagggacaagggacctgcttcatatgaaagacgcaagagcccatattaggggcgttgcgctagactatggcgagcagagctag

SEQ ID NO: 68398 - DNA, 630 bp, Arabidopsis thaliana landsberg
  unsure (1)..(630): unsure at all n locations
ccatgtaagtttatagttcagcccatgttaanagcccatgtanagttatagcccacgtaaaaaagcccagcccaangataagttgggataaataatattgatgttctcgattgctcgccgggatcgtaagaacagaggatttttctcggccaagttttctctagctcaggttcgtcgtcttctatcttctctttctcctcctaattttttttcatttttgcttatcttcatggagatgtagtaaagattcaattcatgttgttctagtttttggctggtttcataatctgtggttgaatattattgttaggttaaaattcgatttgtgagatctgttagttagattgtacatgacggtgcgaatttattgaatctgtttaaatctattgaacgtgaaacgcatttgagtattgtgaggctgaggaaatttctgaaagtggttttgggacgatgatgctggtgttgcggagtttgccataatcagatctgtatgtatgtgggtttcttgataaaagctgtatgaggaaggcattggagatttgtggtgaagaattgatgtatgggagtatgaaggaggtaatgctgttggtgtgtgaggatgatgtggttagaaatacccaatcaaacttt

SEQ ID NO: 68399 - DNA, 574 bp, Arabidopsis thaliana landsberg
  unsure (1)..(574): unsure at all n locations
acgtatgtctcngacncggccattttgtttaatcggcaaccncaaagaaaccctggtggttctatgtgctaaaacgtcacaacacccaaggccacatttatcagtattagattatatataggactatacgtatcttgtatgagaaaaataaaatacaaatgtcgatcgtattaaatgtgatatggaatataaggtctatgtgtgtgcttaacttatttccacgtaaattatttgtttgaattatgtcatttgtcacctacttttctccgacattgaccgatttttcaaatgaattctatactttccattagttattaattattagtattaagaaatataccaaccggcaaaaaggcaataacacaactcgtatgaagaaaaaagcgacgtccaaaatcttagtcgaagatagttcagaccaaaagagattggaagatggacgtgagacaaaagagagttacaaatatcagttacgtcgataattgatacaggatattctttatggttttctacagaaagacataatgctatgttgggttgcaaactaaattatagaaaaggctcgctaagaata

SEQ ID NO: 68400 - DNA, 523 bp, Arabidopsis thaliana landsberg
cgctcggctctccttgtcggctcaaatcggagatgaggttatcgcattcttcaatgaccgcgcatcgaagagtgtgggccggaaaaaaaacatgtcaattctgtcaaggtcgaataaagtcggattttcccctacctcactatcaagctgtttggcgagaagagtcatttgcttgatgatcaatctcggcgcaagctcggacaacttgatgataaaagcagaaacagatttacgcccacgggtatcatttgaattgaattccttgtttccaagctccctagtcgtatgttagtcagattttcaccttacagaaatcaaaccaagtaaacatactttaaaatctcatctgaaagttgcgggtaatcatactgctccgcgagaatgtgaaggaattcggccataggctctgacagatgctcaaagtatgtcaagctctgtacaatcgaggtttgcgcacctgtcgcatcggtcagtgagacggtcaagcgcaaagatggatatcgcgacgcctaccgaaagcatg

SEQ ID NO: 68401 - DNA, 326 bp, Arabidopsis thaliana landsberg
ttggattgagaaagaaaccaggtcatagcacaatcgagatcataagtaattcacttgatacaagatgagagatgtgggagatagatctagtttttttgttggggtcaaatcatcataaatgtagcagaaatatatgcgtctattacaatttgcaagtgttgttcatacatatacatgcacagaatcaacatatgttttgtagatgcacaccaatggtagattgagaatctgaaatcgtcaaaccttgcacaacttgagcttatgatacacttaacatcaactctatgcaaagtgatgattcccaaagtctagcagcaacaattcac

SEQ ID NO: 68402 - DNA, 732 bp, Arabidopsis thaliana landsberg
  unsure (1)..(732): unsure at all n locations
tttttggtcatcagcagatagtttaaaagaattttttagtgttgagatcgtgtttcgttcagatctgctgatgttcttttaaatatcattaatgataatcctgatcaactaaaatgatactttgttttggtattaatctctctgatgaacatataaggttgttgatcttatgttttttacctatatccaattggatttgaggaaatagtaggattcttaattatttttttaataaacaaatataatggagataatactttattcaggataatgagattattggtcaaatataaaatttgctgttttgaacaaaagcaataataagttatcttgctcgaatcaaggaacacaagctaggacaagaagctccaacttttctttgtaaaattgttaaacataacggcattagttgtaagaacgctaaatttttttttggattttaatttatatatatatatatatatatatatatatatttttaataaattatagacaagcaatctgtaatttatattatattcaaaaactaaaataataagttatcgttttgttgtattgtttcttgctgttaggcaaagtggcattcgtaaatatcttatgttaatctggttgttttaagaaaaatatagattngcttgtctaaattgttttgggtggtagtctataccgtgtataacacactattttttttttcgttaaaactcaatttaccccaaattaatttttttttta

SEQ ID NO: 68403 - DNA, 128 bp, Arabidopsis thaliana landsberg
  unsure (1)..(128): unsure at all n locations
ccaaaaaagacacaaatcttcacaactgnncagaattttttctcttttacaccaccactangactctnactgtatcatagtatactttaaaattcccctactcaccacaaaccaacctcattactaac

SEQ ID NO: 68404 - DNA, 192 bp, Arabidopsis thaliana landsberg
tccatgtcctagctattaggaggccaaattattcaaaattataactcaaattttcacgttggcaaattaattcctcagagttttcgttaccacgcaaaaacatgctaaaaatggacaaggttaacttctacgttttcttctttggcgtggacttttttcaatggtataaccaatttaaacttcaaaaattta

SEQ ID NO: 68405 - DNA, 373 bp, Arabidopsis thaliana landsberg
  unsure (1)..(373): unsure at all n locations
cgaacgcttttaatggacccaatctagaaaagcgcacattaanctagtctcannccctagaagcgccatctgtttgtttgtttatgagattaaaaacacactacaagataggctgttagaccatatcccaacaatgactagctcggctatcaactagattatctttgcaaagacctgtactcattgtttgtaaagccaaccaataaaaaacagacggtgtgttccttgcattgaagaaatgatatgagaaaatgatacattatcttcatttacataaactaaagaataaagatggatctctgtatatattcgcaactgaccatactgatctctataagtctatacaacttttccttctttttttctcccatct

SEQ ID NO: 68406 - DNA, 2609 bp, Arabidopsis thaliana landsberg
tgagagacatcctgtctttcacttctccattgtttcctgtaagaacctatcaaatgtcatggagggaaacacaaccataaaaatgaaactaattatttattggtcaacaacagaaacagaacctgctgaagatagtggttgatcctcactaccatcacgacgaggagcccacataacacgatcaggtctgtccttgtttcttgtacgcctctcttgcttctcactgatggtaccagaagtatgataatctttccctgcacatggaccatctattttgaattatcagcccaacttgggaagcaaacattttcacttaaattatattcctttataacctgctcgagtgttggctggtcgagaaggtcgtttgtagttttctgcttctgagggttccactctttgctcagactgcacaaaagtggaagactggctcggtcgagagtcatttctcagaagtattcccttgatcaacctcccaccaacatcactcttctggttttgtcttgaagccgtggagtttctagaaagattagtgtctatatgctgttccggttgtggtggagggttctaaaaataccattaacaaataagaaatttacatggcttataattctgtttacaatcaaacagtctgcacaactttcataaagaacaaaaaagcttacatcaggattgtctcggtcttttgatctcaggagcaaaatctttttcttcccagaatccatagtcaatgctatcccagggggagagctatcaatgatagcggctgcaattgagtagcaaaaagacaaagagttaaacgtggccttttaaaaatatgtaattagctagttaggaataacaacagctgttgattttttaccagtttcatttcctggtagttcctttccacttgaatttgactgacgataatctggcttagagctgctgacgtctgctgtagtcttccggggcacattctttgaactttctttttccacatactagaatgaaaagtataatggcaacagatgagtataatggcagacgacactgactattcactcctaaaaagtgagagacaaacctttttcttttcagagttacgtttcgagggccttggactcggcttgtttgcagagactactctggctcttctacctcctcttcgaatatcagataaaccctgttgcttgaacagaaaccagagatcaacaatagaagttccatttagaaataaataaaatagagagacatccgtcccaggaaagttctgatattcaactaggtagactaagtgaaaaccccgtaaaactgtgagcataatgtacctgggatcccatcacagtggcacgtttttgacgtatgaattccataagaggtgtaacaatgggagccgcttttgaagcacctaagaaaaataattgttgtgttagtaatttcgattaattcactagagaataaccaacctcttcagacaaaagaagcatcaaaatgattgcaaatacgaaacacgaaccagactgctcagcttctcttctttccaactggatttcagcactaggaagattctcaacaggttgagcaatcaccttaagaaactcaagataatcaggatctttactaatagacccttcacgaggatctttcttatcacacggttttggcacacgctgagaaggtgcatattcaactatagccttaaactgagcacctaaaccaaaagaaaccacaaaaatcacatccccaaatacacacactactaaaaacacatgcaaccatcagacaaagacagattaaaaagtcaaatacccttttcattaacaaacacatgcccgttgaaaaatgcagcgaactcataaacatcttctggtgccttgaaacttacgtaggcccgtgaatacttctgatttttatagctgaagaaaccacaaaaacacaaacacacacacatcactaaaaaaaaaaccaatactactaagtataatttcactacaatcaactaagtaacaagaatctctacaataatcttcaatttccaacataatcaaatacaatcttcttcaatttccatcatcttcttaaattacaaaaattcgtaaccctaaaattcatagaaaccaaaattccaaattcaagacgcaacgagaaaagagacaaaatgaaaccctaacctggacttcccaggacgaaacgaaacccaattgtaacgatcagcgaaacgaggatcaatttgagataagagatcggactgtgaaagagaaggcggcaagtgacgaacaaccaccttcttcttctgcaaaggttccttcatcgaaaacccaaaattttccttggagaaagtcgcaaatcaaacacgaacacgatgaagaagaagaagaagaaaagtgaaacacatcaatacgctaattttgccctaatttttgtttcctctcttccctttcctctgggaaaagaaaaaaaaaaaactcagctaaaaattaaaatacccgaagacaaatcaattcttcggtctacgtggactttttaatctatatgggcctctaatgggccttaattatatgtttcaaccgtcggattaagtttaaaggcatcggacggcagataattactctgatagtttgcgaaat

SEQ ID NO: 68407 - DNA, 592 bp, Arabidopsis thaliana landsberg
ccttttctgttgctagggcgaggaggttgctcgcgtttggtaacaacgtgtcctttgtttagccccacgaataagcctgtcgccaccattttgtctggcaatttcaataatcatgacatatttagttcaagaacaaaatctcagatctactcttatatggttctcttaagataatccaaagctatatatatcttctaatatcaccagctcaattccaaaactgattttagtgacgaacttgagtttctccaaaaaggattcaataagcaaatcgcgatgtactctagtagtagtaactcgtgaagatttgtcgattccaaaactttcacactaatcgaaagagactacatatgaaatcaataaagcgaaaagatctgatgatcactcacctgagtttgaatccctgaatgcgccgccactgaagtcgaaagagaataagatttgtgagagaaaatcgattttatagtattctccaaaataaagagattagggtttagtgatttttgagagcttctttctatatttccaattctacccctaccattgtgagatcgttgggcccaaacgaaatagtttataaattgggctttaa

SEQ ID NO: 68408 - DNA, 115 bp, Arabidopsis thaliana landsberg
atcctgatggtagcaacagtaacaatacagtttataatgctacggcaggagggataataagtaaaactttacgcaaagcacaaaggggggatacgaaagaaccatagtggctgca

SEQ ID NO: 68409 - DNA, 1847 bp, Arabidopsis thaliana landsberg
gctatcaatctttggctccaacgacgaacttgctgatagatattctagctagacgagagtgaacttatctcgtcttctctggtatataacccgtcttctttcttcgttttttgggtttgtcttatcgaagaaactgaaagcatgtggttagcttgttttttgtgtataccatctattttgttttgcagtgtaacatactttctatgaagaagatgggtccttttggtttttgcttccaaataactggattttcatgctgaaagtttttaaacctaaagtttgattattaccaaattccattatctcacaaatccactagaggactgacacaagaaagcagataagaatagatcagagtctgtttaactgtagatgtgcatgttaagttggaacgtagtttatctcaaaggatattttaacgacatccaaaagataacattcgaaagtcaaaaccatcctaggggagatatggctgaagctattagtttggtaaacatacaacaacaaaactatgccatatctctaatctgcgcaaaaggcagaaacaaaaactaacaacaaatctgccttctactatcctgcttcgtgcattccctattcagttttcccgtggttaagccgtatcatcggaaccaagtgatgggagtgggagtagtactgacttgaggaagctgcggaatcatacagttttgcgcttgctgccacggatgcaagccaaaaccataggtgtgctcttgctcttgctgctgtccttgctgagggaaagatagactggtgcttccagtatcctcttctatctcattggatgcatcatccattaccacatcctcacctgtctcatccaactcagtaatctctagtgtccgcggttgttggaaggttcctatggactgtgagtaagtagactgagacggattccagcaaacaacagcttgacacttgtttaatctctcatcttcatactgattatcatcagctatcgatacatcgcgaagaaatctatctgcacaagtgttaacattcagaattttgacacaaccgtctgtatttagtcaacattctggatcacaagttaaaggcaaacaaacaaaacgaaccagaacaaaatctgacactaagacacagcaaaatcctcataatatctatgataatttcccagttaacatgacaatctgttcaacatataaaactatatgagttcataccatataaactagattatctgcactgtttactgaaacttatggagatatctcaaaataaagaagatactcttaacttattgagctaagacattgttgtgacatagtagtttctaaagttaacttacaagccctttaacaatcatagactgaaacttatctcattactaaagaaagttcaaaagaatcatcactaatacacttcaacaacaacgttatacctaatcatgaaccattgcttcaatcacaacatgaacaaattgatgaaagttgaaagaaacttactcttaaacccagaaatcaagtgtcgatcaacaaatacgtttccagaagaaggctgctgataatgaagaggcttaaatagaacaattgctctctcatcgttcaccggctcaagttcgatttcttccgcgaccgtatctctgcatcggtaaatcaatctcttcttcctccataatcggtggcaaatccacatcctgaatcaacataatataacaccaattcatcatcatcatcatcatgaagacgaattctagggttttcagcaacttagaaagagaatttaccagacgacgaatcttcctggcgggagaagagagggaaaaatcagagaagtcatcgtttactctgtcaatatctttcctc

SEQ ID NO: 68410 - DNA, 337 bp, Arabidopsis thaliana landsberg
cgaaggtggttggggcacaggggtttccaaggtggcaaaggatcttttccatttaaggtgggagggggtggccttttttgggattccaggatttctgtggtttaaaaaccacttttccaccaggcttttttccaaataaaagacccaagggtggaggtggtttggttttttgttgaaaatcttataggattttttgaggaaagggtaggatcatcatttttcaaaaggccaaaacaaagttttttcaaaagcatggaaaaatgagttggaaaaatgagttctagttaagccactaagaaggtgaggccgtattcggaggaccaaaaagctcaaagtt

SEQ ID NO: 68411 - DNA, 915 bp, Arabidopsis thaliana landsberg
ttttggccaaaagagattatgtatcatttcttttttcttatgtgtgttcaattaagaatttttgaataacctttaacaaaaaaaaagaaaagaattttctcaaataaaattttagtttactcagaacctctaaaaacaagctaggtacgatctagaaacatatagtacacactatttgtgtataatacataactacagtactatatggtgagaaaagaaaggaagagtcacgagaaaactgtctgtttggcaaatgagggataatggaagggaagaagaagtactcggacatgccaggctagctagctatatataaatacacacgtatataaattatcttgtgatcaggtgtgtactaatgtgtgctggaatctgtacacattcttatatgtacatatgtatttgcatgcatgtggttgtcttacacatctttatgcattgtttcagcttctgtgcgtgtttgtgtatgtgtgaccacataccgttgttacttttcatagttggcgttctcttgataagtcactgttagtgtggcaatttgacaataaaatctaaaatgttattaattataacaccccaattcaatatatatatatatatatatatatatacacatataagaaaatgtatgtggaaagttcaaactataatccatgagataatagaaatatagatccgaattttattatggttttacagtgatctaatatattgtagacaaaaatggtttagaaaacacttgaatgcaaatgcctaaaaaggctaaaacacatgcatcaccgatcattttgctaaaatttcagttgaaaataagatgcaatactttatttttaaaaaaataaaattagagatgaattttttttgtattaattttttttaataacttttgatccttaatctctttgaaaaaaacaa

SEQ ID NO: 68412 - DNA, 481 bp, Arabidopsis thaliana landsberg
  unsure (1)..(481): unsure at all n locations
gtaaaagaatatcgcgaggcggtgatgaacaacaaaatgagtgttcttgagaaaagtctgtacaaaaaacggaagaggggaaagctcgaggtgaaagtctcataccggactttcctgtgtccttattgtcccgataataagaagaaggttggtttgtatgttgacattcttcagcatgcttctggagttggtaatagccaatccaagaaaagaagtttgactgagaaggctagtcaccgtgctcttgccaaataccttattaaagatcttgctcattacgctacttctactatatctaagcgcttaaaagccagaacatcattcattcnnnnnnnnnnnnnnnnngctcctataatttatgatgatgctcagctcgagaaacttgcgtggccttggaaaggtaatgatgatgacgcatactcctatgtcattacangtatccgaagttttagcactatttggatttatagcctctctacta

SEQ ID NO: 68413 - DNA, 691 bp, Arabidopsis thaliana landsberg
ggactagatcatagatgggggtttgttataagagatagtccaacagagtcacccagggtctaaaattagacaatgaatcaatgaacaacaaatcatgcattgaccttttctcagatatcgtaccacaaactggtgagcatcaggccaagattgcctagagaatcgcttgatagctacaagatgattcccttcaagcttccctctgtgaacgacattaggagctttctctccaccttcagagacaatgcagctaggactaaacccattggtagctttcctcaactcatttagttcaaattctttgaaattttggatttcctgatccacttggtccccatttactgtaaccacacaacaaaacataccccgaaaaggcaaatcaatctaaacaagagtttaattccaaaaaggaagagactttataactttttctctgctttaagcctttaacaaaccctaaccccacaaattaaagcaaacccataacaagaacagacgaaaaactgcagatttactaagtgagcaaacaaaatgtgagttttttagaatctaagagattagtattattacctgattttggtttgtttggagctgatggatcatcaaaagaaggaagattagccatttttggaaaggaatacaaccccatttgggctcacaattcaaatcaaaataattgggtcttccacaa

SEQ ID NO: 68414 - DNA, 252 bp, Arabidopsis thaliana landsberg
tgtaggtctccttattccttgaggtatgagccctcatcaagtataagcaacgttggcttcttaagctttatcagcttacaatcttctgaagctgcctcaaagttatcatcgcagatgatcctcgtaaactgttggtaaccaagaaacagaatgcttctctccttgatccattgccccaaaacctttagttgctgcttccgagatactgttctcacgctcgacaaatcacacacgggaatttacccaacttcc

SEQ ID NO: 68415 - DNA, 2225 bp, Arabidopsis thaliana landsberg
tacgcgattctatgcagaaggctggtctgttttttaatgtgaggactgtgaacataatggttgatgggctctgtaaatcccaaaaacttgatgaagcatgtgctatgttcgaggagatggattataaggtttgtaccccagatgagattacattttgctccctcatagatggcttaggaaaggtcggaagagttgatgacgcttacaaagtctatgaaaagatgttggattctgattgtcgtactaactctatcgtttacacatccctcataaaaaacttcttcaaccacggtagaaaagaagatggacacaagatatacaaggacatgattaatcaaaactgttctcctgatttacagcttcttaatacgtacatggattgcatgttcaaggctggagaaccagaaaagggaagggccatgtttgaagaaataaaagcccgtcggtttgtcccagatgctcgaagctactcgattttaattcatggactaataaaagcaggatttgcaaatgaaacttatgagttgttttattccatgaaagagcaagggtgtgtcttggacacacgtgcttacaatattgtcattgacggtttctgcaagtgtggaaaagttaacaaagcttatcagctgctggaggaaatgaagacaaaaggttttgagccaactgttgttacgtatggttcagtcatcgacgggcttgcaaaaatagatcggcttgatgaagcttatatgctctttgaggaagcaaaatcgaagagaatagagctaaacgtggtgatttacagtagtcttattgatgggtttggaaaagttggtaggatagatgaagcttaccttatcttggaagagcttatgcagaaaggattaacacctaatctttacacatggaactcattgcttgatgcattggtcaaagctgaggaaatcaacgaagcgcttgtctgttttcagtcgatgaaagaactgaaatgcacgccaaaccaagttacttatggtatcctaataaatggtctttgtaaggtcaggaagttcaataaagcctttgtcttttggcaggagatgcagaaacaggggatgaaacccagtactatttcttacaccaccatgatatcaggacttgcaaaggctgggaatattgcagaggctggggcgctcttcgatcggttcaaggcaaacggtggtgttccagactctgcttgttataatgccatgatcgaaggtctaagtaacggaaacagggcaatggatgctttttctctttttgaggaaacacgtcgaagaggattacctatccataacaaaacttgtgttgttcttttggatactttgcataagaatgattgtcttgagcaagcagctattgtgggagctgttttgagggaaacgggaaaggcacggcatgctgcccgatcttggtagacagtttatcgataatctcgtttcttgtataggaaaaccaagacattttgggttatgtctgatttcagttaagtgagcattctgaagcacaagtatcccaagttttctggagagggcaatgtttgtttgacatctgtcagtgttcacagatcgagaaagatgggtgttcttcactggaaatatgctcaataaacaccagataattacttctgtttcccttcttcgtttgtatcatttaccagaaccttcatggtaacttccccatccagatgaatcttctgcgttcttccttatgttggacctgcaccttccgattcttatcattgccatttttgcaggatttgaaaggagactattgctcggtctatatgtcgacttcggtatgagctcttattcatcacgaaggttgtaatttctgtgactcaagagccagcctcttattcagtgaaagcaggaatctttaaggagattgtgatttgaagtgaatttcataagaaagtgtctgttttgctctgtcttacatacactgaaactacacgagtttgatagagacgagataacctccttcaaattcatcttttgctcaccttttgactttaataatatgttctacgtctgtttccattgataaagttctcttacgattcttgctcgagtaaaactatcattttatcaaaccatagaactcaatttagaaagacatgttttactgataaatgaactagattcttgattcattgtttacattgcgtgtggcttttaaagataacataaataattgataagttgggtgtgaaaagaaat

SEQ ID NO: 68416 - DNA, 686 bp, Arabidopsis thaliana landsberg
cccgctagaatcataaaacataggtaccttctgatgttttccagccgttcatcgaagtctatatcaaaagatcgaccatattttccttcaaactgagtattcagaccacgtgcctctgcaaacaaatgcaggagtctcttgagcaaacctttcaattgaaaccaactttttgagataaactgaagaatgcacaaatgaagttatgttcgagacaccatgaaggagagcagcaacatctgtttcgtacaatatgctttaaaatcaaattatacttacttctgggtacagaaacagactggtcagaagatgatttcctgcagcaaagaagtccatatgaaaatataacaacagcattttaaaattctaaatgctttaaacaaacacaaaaactatttatacctttgctgcaatgccgggtctttctcttcctgtgatgcgatttcacatttttgtctcagtactttgaatcaacaaaattaagttgaacaaagaagaatttggaatcaaacctttttagagccgaagccacgcttaaggttagaatgcgagcaacgtattcgaaataggagaagcttcgagttaaatgaaacggaggtcgtcgccgctagtgtcatcaacatcctttgtttgtattgtgctaaccaaaacagagaattttctaagaaagtttcaaagaaataatgaga

SEQ ID NO: 68417 - DNA, 2751 bp, Arabidopsis thaliana landsberg
gctcttgagcagaaaaagacagaagtagttaaagaatttggtccaattgactatgatgcaccagtcaagtctgaccagaaaacaattggtcttggtactaaggtacgcatacataacatcttgcaagtgtttattttttattttgttctaaaaccacttgaggcctataagctactcatacataacatgacaaaacttgggcccatgccatgacaggttggagttggcatagctgttgttgtatttggtttggtttttgctcttggtgactttcttcccacgggaaggtgcgttaagtgaagtccaagtcataactgtgtcatttacaccatgttactgtttgtcattttccttctttttattccagtttgtaattgtttgtgtaaagattctgatgacatcatatgttcttaggatcagctgggttggtttccgtaatttcacatttttgtcataccaagtcatgttgtcatgtaatttagccggtgtcagttctaacaatgtttttaccacttttcagtgatagtccaactaagaacacaacagtagttaaaaatcaaatttcagaagaagagaaagccacgcttcaggtaatattaggggctgatcatgaagatttcgttcatgaactttgataatctgaataaagtaagatacgtagtaaacatctcgattttttttcattttgcagcaaaggctcaaagagtttgaaacaactctcaatggcacgcctcaggatcaagctgctctggaggtgagtgataacatgcgcatgttgtgcatactattaaatatcttcttcatcggcatttagccattcatctgtaggcttccaatagtaacaaggaacaacttaaactaataatcaggtagtatataacagttcttacctccacatcttaaattgcatggaacttttctgtttgcattaactgattcaccgaagttagtaatgtacacatagtatgctgaaaacaagataggctacctcttctgacttatttataatgctaaaaaaattcttaaagttggggcactatgcagggtgcagctgtgacactgactgaactaggagattattcacgggctgctgcgtttcttgagaaactcgctaaggtttgttctctcatgcttttatattttcttatggtttcacatgaacattcttgtacgagacttagctaatagtgtgtacaaagtgggattcttgctcttgctctgtaggagagaccaactgaccctgatgtatttcgactgcttggagaagtaaattatgaacttaacaactatgaaggcagtatcgctgcatacaaaatttctgaaaaggtaaatgctcttaaacttcgtggattaagctttttataacttttctcacttgcattgaactaatagttgatacagactaagattgtcagaagaattttctcgtggggacttaataagatatgaactgctactaccatgtatatgttgttagcagagttaggacagtcaatttttctatctataatagtgatgctctaagttttgttctaattaccataggtttctaaagggattgatcttgaagttacacgaggcctcatgaatgcgtatttagctgcgaagaaaccagacgaggtaaatctgtttccaccagatatgaatagaaatatgttacctttttgtctaagaagcttaatcttaaatactcgcaacttctcctccgatccatttcttttcactttgttatgattctcaggccgtcaaatttcttctagacactcgtgaacgtctgaatacaaagaaaacaagcacaactgacagtgttacagatgaaacaaatctagacccaattcaggtaacttggtttcctggtaatggactcttaacatattagtctggtcatgacaatacatttccttgatttgatagacatttcttcttgtttctgatggcttatctgtttcatattttacgtccgaagaaaccagatacaataatgatagcatactactaagatctgtactaggttcaactttgtgacttttatatctaaccgattttaaacgctggggggcaataaatgctcaggttgagttacttctcggaaaagcgtattcagactggggacatatcagcgacgcgatagctgtttatgaccagttaatcagtgctcatcctgaagacttccgaggctacttggctaaggtaaatatatcgtccccaccttaagaagagtcactcgatataatttgccaaataaactccatgtgaaatggttggtgttgtagggaattatattgagagaaaatggaagcagaggagatgcagagagaatgttcatccaggtgactcatttgaactcatgaaaccttttcattccaatacaagtccaaatgagtaaaaaagtatgacaaaccccacttaatttgtttaatgtgtgtaggcgcgcttttttgcaccagacaaagctaaggcccttgtggatagatactccaaactatgatcactatctgattctgtgtatataaatatacatgcacatgggcctgtgagttactaatatgagtcagattcatctgtgagacaactgtacaatacaaatattcccaatatgaagccacagaaccaagaagttcaggaactgttatctaataataaaaaggtagtaaaagagctacaccaaatatgaagacattaagttccaactgatcttcatatggctgggcattgaagctacaaaccgcaagagatctggtttatcaatga

SEQ ID NO: 68418 - DNA, 500 bp, Arabidopsis thaliana landsberg
  unsure (1)..(500): unsure at all n locations
taaagcaaatgtataaagccacttctaagncattggggtttgatcatcaacacccaattgagttacattgtgacagtcatgccacactccatattgatgctaatccggtctttcatgagagaattaaacacatcggttcaagtcagattgtcataaagtatgcaacgctgtggaagacaaactgatataactacaacacatttctacaaaggaccaagtctcaaatcttttcaccaaagcctttccaagaccgacgttcaaacgactcttatatctcaatcttctatttcctagatttactgaaatacgatcttatctcatataggaaactacttgtgtataaatacttctttcttctatttaagacaacaagccattacaacctattttcagtgaccatgcaaggcaaatcatatatatatatatatatacaaaaaaatccaaaaccctttgcctaaattntttcaaataagaaatggcagaggataaaaattcttatt

SEQ ID NO: 68419 - DNA, 663 bp, Arabidopsis thaliana landsberg
gttacaaagcattgcatgactcgataactctcaagtatctagattcagtctttgttcacaattggtccagattcttcattttgccctgagatgtgcatatttttaggccggtggggtttaatgctaacggcacacaaaaatgttgattcatcggttgcaggttgtgcaagacgcgcttgataaagccaatttgaccgagaaggatctctctgctgttgctgttaccattggacctggtttgagcctctgtctacgtggtaagttggagaaataagaatccactcattgtactttggaatgatgagtgttgttagagtacttagacacaagtgtttattttgagttatacagttggtgtgcgcaaggctagaagagttgctggtaacttcagtctcccaatcgttggggtgcatcacatggaggctcatgctctcgttgctaggtattgcttaatctgctcgcgttatgattttgttcccattttttgagatttgtgactggctcatcagcgtctgatttgtctatgtagattagtggaacaagaattaagcttccctttcatggcattgcttatatcaggtattgcaaaatcagttaagtttaatgtaagtgagagactatcatcttagtgaagttattcttaagcaaaatcagtttcaccgt

SEQ ID NO: 68420 - DNA, 489 bp, Arabidopsis thaliana landsberg
atccctttcttacacattaaaaaagaagaaaaaaaaaagaacattccgacagagaatgagtggattcgacacctctaaatgtaactacatatgcattcattagaacaaaacgattataattttattttgtatatcacttaacatataaaaagttcataaacaaaacgatcaaaaagtttgtgagtattatcttttaatctgaaataaacattcaattactaaataccataactatgctattacttctttgaaagataaggttccttcttcttttaagcgtgtcgaaggtcctgtaacagctgcatcggctgatttttgttacaagtgttcacgtggttgttatagaaggtatcgacgtcctgttttttgtcaaggctctatctgtcgttgttcttcctttattgatgatggttaatgataacttatataattaataaattaaataactttataaagtatatcaacccaattggcccccaaaaaaaaaag

SEQ ID NO: 68421 - DNA, 344 bp, Arabidopsis thaliana landsberg
gagcacggtcgcctaacattaacataagggcggggggtacggtaaactcggccaaaatatgacacccgaagggcccgaacgcacaatcctatcccatccgagtccgagtttaccccttgcacttcggacagccgaccgtagcatcataaggaggaccccctttcgaggtaaaaaaaaaaaaaggtacggtacatataggaggttggactttctcaacgtggtgtatagcacgaaaaacttttcgatacaagaaagggccgttctcacatgaaagaagagaagaaatcctttcttctcttctttctctttctcgagaaggaaagaaagaggatgggggggggggg

SEQ ID NO: 68422 - DNA, 1502 bp, Arabidopsis thaliana landsberg
cgaccctttatgcctagagataccttatttgcgcaccttgactgtgcgccacatgtactgttccatccaccctacatttctcttcttatctacactatcaatctttacattaccatacggtgtttcactttgtttgtaacctactcgatgacactctgcattcatataaggaacgccactaatactactctttttaatgcaagtttttcaaatgattaataaacctgttcctacagactatgatgaaacccacaacaaaagctaagaatgtactcaccacccaaaactataaagaacatagtagacggactagttacctattcgtcaaacgggatctaaggagcggggccgacgacggaagctcgggacggagccgtatgatgcggaagtctcacgtacggttccctgagaagggagtggctacctactggagcttcgaccaagcacccccggtcaattccgctttggggccaccccttactctaccattattataggagtatggggttcgagacaaagaaagatcaaggcagcatatcagtttttcctttatactttacttggatctctttttatgctattagctattctgttgattcttttccaaacaggatccaccgatttacaaatatcattaaccacagaatttagtgagcggcgccgaatctttctatggattgcttctttcgcctctttcgccgtcaaagtgcctatggtaccagttcatatttggttacctgaagctcatgtagaggcacctacggcaggatccgtcatcttggcaggaattcctttaaaatttggaacccacgggtttttaagattttcaatacccatgtttcccgaagcgacactttgttctactcctttcatttatactttaagcgcgattgctataatatatacttccttgaccacttcaagtcagatcgatctaaagaagatcattgcttactcctcagtagcccatatgaatctggtgactattggtatgtttagtcgggcggcggccgttaggtcacctattttgagttatggacacacaaggccaaaacatgtgtgtcgggcgtgcgacccatcaacctactagcaatgggggagaaaacatagcatgtcgcaacaaaagcttgattcgaggcgtcagcaaaacactgccgtctgttcccttcagtcccttaacgccccgggacgggagtgggggacggctctacgcgcaggcaacagcagcaccggctccacgaagtctgaatcgaatctttctgttggctttcccaaattcattcgtaaatcaaaatcaaagggctagaagcgagcgcttctagctgcttcgcctgcttcttcttattatggcggccatgttggcgtggcgaaaatgaacgaaaagcgagatgaacgtgctattttcaaatcggattgatagatagatctgttctgatagatctaaagagttgaaatcgatagcgaatagacagggaatcacaaataaggtctttgagcctatt

SEQ ID NO: 68423 - DNA, 1600 bp, Arabidopsis thaliana landsberg
gtcgacttggactgatcccataataatcttgttgtataataataggtgaatcgaagaacaagaaagtggtgataataccgggcccaaaaggagagcgtcctgatattaaggtggtagaaggcccatcaacagttgaagatgacttttgttacgattgtgtacgtcgttgtatggtaaagggtgtcggtttctattttcgtagttgtaaaggctttgtctgtcgttgttattatccattcatgggtggctacggaccgtagttacaaaaactttgtcattgttatacacctatagtttggtgatgattattgatcatcatttctataattaatcaaataaaagaaattttcttgttttcctcttttcttaacgattttttatgtaagttttctgtcatatattgatttcgatgattcaaccatctataagtgagtgctacattttctaatcttttgctttcacttatttctcacaagtttaatcttaaaattcactgtttgcgccaaaaaaaaaaaaaaaaaaactgtgattacttgtagaaatacttcggatttcgcaactaataaaacagttttgttttaattaacgtttgataggagaaaacaaaattagcagttttttggtcttataatgaaacaaaaggacacatcttccatatatcaaaatataaagaaacaaatcaacaatcgtcatgaaatgcctctctgaggtaattaaagtctcgaaagcagacacggtattctcaaacctgacacgtggcagcggtgcgccgctctgtttgatggcacatgccgttttgtcttctagaggacaacgagctttaagcatggagaagacatggttgttcagcctccgagctttcttcatcccttccaacaaaccttcccatccctttcgtacacataaagaaaaaagatattcaaatggagaatgagaggatttaaaaaaagatatgtacatgaaaacaatttagtgaaaatctacctgatggatttgtggattcctatgggtatgtgaagcagagacagtttcaacctcagagacattgagtacttggtacgagaaatcaaacaactcaaagtgaagttgctggccgagcaagtaaataatggtgcaaccaccccaagctattgaatcaccgaggacttcatgttgagctgactgtggagctgttatctcctctagatatccctgagttcattgcaaactttatataagaattgaaaagagagaaatgttgctgcgattcaaaaaagatgttttgataaggtttgcggttttggatggcttacaatctgaagaccaccgtatatacggtaaaaatcctttgaagttgtaatatcaacgaagcccgtctttggaggagcactccatttactgcaatatttgtcgagcgacgcacttgtgaatgcaagtgtgtattcaagaacactcccaccgttcatgtttgccttgtacaaaagatctgcacatataatataataccgaaaagattaaaactgtcacaaaaaaaagaaagagtaaaaaggaaacgggtgatgaatagctacagctcttaattaacctgcagcttctgcctgtttggacatggtatagaacg

SEQ ID NO: 68424 - DNA, 608 bp, Arabidopsis thaliana landsberg
aacataattatgatgattatcagtattggctaatatattatgtttttgaatcatagtattgatgtataataatgtgtatggagatctaaaataaaaggtatatgtaatgtaatcacattgttcatattcatggatataaaaaacattttttctatgcatagtaataaacttccatacacaacgtaaaattcactgtcacaaaacaaaaagggttacaatcatattcagagctgcagatttaacccgcaaaaaaatatcgaagtgctggaggaggtcctaaaccggacgtagcatccattgacaagctacattgatctatcatttcaagttacaatttttttaatatttttttgataatgtacaaaagttttatgttacgttgataaaagaatattaaggctgaccatcttaagaaaatgtagacatgtgtgaagagaatctataacgtatattcttttcttcttctggaatccagacttttgtctttacatttaaacttcacacttgtgttgtgtggtaacgttcaagtagaaaacaacaaataacaatctatataataaaccaatcgtagtggttaagaaacaaagacattgaatgaaagcgaatgt

SEQ ID NO: 68425 - DNA, 543 bp, Arabidopsis thaliana landsberg
  unsure (1)..(543): unsure at all n locations
agttttattattccccaatttgttaactatgaacactnnnnnnnnnnnnnnnnnnnnnnnnnnnnnnnnnnnnnnnnnnnnnnnnnnnnnntgatggttgaataacagattnnnnnnnnnnnnnnnnnnnnnnnnnnnnnnnnnnnnnnnnnnnnnnnnnnnnnnnnnnnnnnnnnnnnnnnnnnnnnngttttcattttctatcaatcaacttgagcgattccaacggcttacgtaaccaaaaagactaatatatttctattgtacattatcgtattttttaatcacatctctcgaaccttaatagatttttgtttgatacactttaaaaagcagactatttcttttttatccttaaattacacaggagatacaacaacatggaagcaaatatggaatcatggattcctacaaagttacaaacacatggaattgtgaaagttcaaacttctgagaagaagactaagtcttcttttattaaaataaaatggtcaatacgatttaaaaaaaaaacaaaggaaataggaatctgaacagaaacat

SEQ ID NO: 68426 - DNA, 540 bp, Arabidopsis thaliana landsberg
tggttgtattgacttgctggtcattatttgcctttacgctgttcagcagcctcaggaattcggcgggggatttgcggatgttgaggtcccagatgggattcgctgctatctctcctagtcgctgacaaactcccaatcgaaattctggatcatgctggcatggtgcctctcggattagtttctcaaagtctgcaaatcgaccttcctgaactagtttatcaagacctcgaagtgctggataccatgaacgtttgtgcttgaagttgaatccctctttgagactcgtcaataactcttgtccgtttttagccagcgtcacagcattcgagtaagcgtccctaacatgtccaaccgccgtttctacgccggctagactttgttggatattctgtcgtccttcaatgaacccgacgagatccagagcctttacagcgctcacaactcctgaaatcccatgtactattttccctgtccgtcgcatcatcgattgcagaattgtttcatcatcagggatatactggagtgctggatacgcatatg

SEQ ID NO: 68427 - DNA, 496 bp, Arabidopsis thaliana landsberg
agcacggggaagagatctggtatgttctgctatcttttggctcatgctgtggtaagtcaaaattcacaaatcattacgggaaatggaatctttttttctgggaatcatatcagacactatggttagtagtaggaagtgagagactaacctgaagggagaaacagtaggagatttagggttcggtctactgttttgtacaaagctcttgagttctccttgcgccattgatggcatccccaaaaattccacaaggtttcttcaaagtagtttaagctcaatttttgcgaacggggcaagaaattcaacaacagaagtagttaagatcgagctcaattcgaacagcacctttctcagagacgatgcttatgggggggtctctgggcctgtgctcctttcgcctccttattctggatctgagaaaataaaaataaaaactctcttaggaaaaaaagaaattaagctttgccacattttggttcgattcaatataccggga

SEQ ID NO: 68428 - DNA, 743 bp, Arabidopsis thaliana landsberg
acgaaccggatcatgccggttaatcccgttgctagtttcctccaacgcagcaccaatacccaaacttacaccaccagaaccgaaccgcttcgagtgaaccggggaggggaagttcaaatccaacggacttctcggactggccgtgtactcctccggtttaatagcagcagatctgcttcttggaaccaacatctcagacaatttacggatcattagatgaggtctcttgcttagtatcataatcaagaattgagaaactactgttcttgataaagaaaagaagaagaagagttaaactgttgttgattacaaagaaaataaacagtaaaagaattgagaggaagatagagaaagaggaaaggaagaagaagaaggcaaaggtaataggaaagaaagaatctgatagaagaagaagaaggagatggagaaaggtagagagactttagagtttagcccactgattatatttctcaagtttggaattttgtgtgctatgattaatgattgaagtttatagaaacggcccaccatcaccattattatttttgtatttatttatcttgtttggtttcttttatcgacatcatctatataattctatatatacacaattattgatatgagcaggctcagatattatttttttcttttcttatgtaatgattccttttcttctttttttttaagcatttcattggagtgtggtaggaccgtgaggacccacatcaagaattcaaatgtct

SEQ ID NO: 68429 - DNA, 525 bp, Arabidopsis thaliana landsberg
  unsure (1)..(525): unsure at all n locations
cctagctgcagcangacatcccacaaccctttcttttatcctgtttctgccacgttctgctgcgaggtagggtggaccggggcccctccttcgactgtctgtacctgctttctgttgttgctctctatcacttctgaagctcccctctgattcctttagagttggaagcttacttgaatggggtcttgccctgaggtcaccactccctttattccaactagcatcagacttttctttaagctttttatcttcttgagcctaggactggatccccctcacctttccttctgattttctccttatgctgtgcattcccacagaattctctttgccttctatagatggaaacagcctagatacccaccagctgatgaatggatagcgaactttgtggtgtagctggatcacgtggtacatctacttctagcacattgaattccacggtggctataccactataagggttccctgttgaccacatcattgccaacatttatctgtcctcttactctgagccattcttac

SEQ ID NO: 68430 - DNA, 544 bp, Arabidopsis thaliana landsberg
acccctcgcgcgatcgggataatctgacgtcccgtcctgttcagtggcttgagtgccccatcctgcccgtcgggggtccgtagcgcttccggcgtatcctgcttcgtcaactgtgcgtcccctctattcaggccgtacctaggatcaatcctgggttcggcagccgagagaaatttcgacacagaaatccactctcacaaatcaaatgacgtgagcgcgaattcgatcatcgcttgggaaacatcgctaatgagcaaaccgcttctgatctgcacatccgccttggttctcaggtcgctctgacctgatgagccgcagcgccgcgacgacttataaatacacgaggtggtggcgggtgcaacgggtttgattgcggccttatgcatcgaagatcggtttggtgagtgccgtgcgcatcggaagttttttctcgcaaaggcaagggtttgaatcttcgcgaagattcgatgctccgggcgagtgtgacataactcgcgcgtggccaaaaatatttcaccgatcggttacattcggtggcgcaccg

SEQ ID NO: 68431 - DNA, 223 bp, Arabidopsis thaliana landsberg
agaaacatgcgtgatgccgagcgactacacgtatatatggacttgattaacaccgaactaaggggaatgggcaattgtagtgttcctgaaaaagtcaccccgtatccccagaaccttcttgctcaaagacgaacacaacacgagacaagggaagcctcttcgtacacaaccaactttaaaacctaatgagaaaccagaagctgactcgggtaaacacacttgc

SEQ ID NO: 68432 - DNA, 772 bp, Arabidopsis thaliana landsberg
aagtaaatagttgtatgtagaagccaaagataataaaatagtaatgataattttcttttacgttcttgagataccaattcttgttttttttttctctcaaaactgaaatgcaaaaaaaaaactaaaaagtaataacacacgcttttttgatgtttgatcttgattaataaattaatagaaaatggtaaatgtgttacttacattaggttggaaaaacgtatggtttaacatatgtgtttgttggaaaagatacatttttagtgaacatacctttgacatgaattgatttataaaggtttttttttttttttttccatccctctcaaatgtttgttttaaaaaaactaagaattatgtataatctttcaaaatgtattgattttttttttttttatgttttctgtagaatatatatatgatgatctactctgttcaaaacatcacccttacatgcatttcagtgatttcacctctaatttcgtttaaaagtggagacacaattttgattcacagccttacggtaattctctttagtatctctcaataagaatagtggacacatttaggcattaactaagactcaaactcctcatcgctctcgctgtaaccatacacatcctctgcgtaatcatcaaactcgtcatcttcaaggacacttctcacatgtcgttttgaagtctcctcgtcgtctgattcatcagaggcttcactcttttcttcttctgattcatcatcatcatcatcatcttcttcttcttcttcttcttcttcc

SEQ ID NO: 68433 - DNA, 429 bp, Arabidopsis thaliana landsberg
  unsure (1)..(429): unsure at all n locations
tgagtttaatcaccaagctgacgctttggctttttaactctcgtattgaaccctaaattatgaagtanagtcagtttatttgcccaaaaaaataaaaaaaatacaccactcttcttgtttgtgttatgaatttgatggttatgtaatcatttttgaaatactgacttaacaagattgaaaaatgtaataagtcgatagatgtagacatttggaaaactctcataaaaactcaaggacacaaatctgaaactgaacaagatcgtgatactgaacatgccaacatgggcttgaaccacaatttgttgtgaaccggagtaaaatatgtaaattggtgctataggaatttgatccggtttaactgaaaccgaaaacggtgcgtttaaagtcaccaagacgaagaaaaagggttttagtttttgtgaggggaga

SEQ ID NO: 68434 - DNA, 107 bp, Arabidopsis thaliana landsberg
ctggccaaataacttgcgtctgaacttggctaaagttacgggctttcatcgggtttttctacttgcacgcgaacaggagactcaagggtacggagcttggtggaatg

SEQ ID NO: 68435 - DNA, 875 bp, Arabidopsis thaliana landsberg
gagatacgtcactgtgtattgtgatgatgttgctgttggtgttccggtgattattggtgaagggaagatggttggttcgtctaagagatgcaaaacttattgagttttagggatattatctttgactaatcttttgtaaatcgactatgtgttgttgattgattagtactattggtgatgataattgcaatgagaatagattgctactgttataaagatttcttttagtgattatgtttggatttcgactttttggctttggtgtgatgttaaagattggaacttgagagttgtggcatgattgagttagttttgagattgtattgtagttgaatcgtaaggttaagtaatagccattagggatggttagtgttattggtggaattggtgtgtttcgttaggtgattaaatgattcatagtagagaatgtttttgctcaacttgttatattttggtaagaccatactctggtttctgtttcatgtttttcttggtatttagagttgtggtgatatgactgtggtattaggatttgatggtgacatggttggacataatgaaacttgaaattgtctttggaacgattggttctagtcagttcatgttagttttatattgatgattctcaaatgataggttatatggtatttgtgccctgctatgatgttgaaagatgggaactcagtgtcatgattgagtcaattttgagaatggatcatgtttttatcgttaggttaagtactagccaatatgcatgcttactcttattggagaattggtgatgattcatagaggaacatgttctttttttctgcttcaatgattttttcttgctaattggagttgtggtgacacattcttgtggtgtttgaacg

SEQ ID NO: 68436 - DNA, 857 bp, Arabidopsis thaliana landsberg
ggatccacctgcattctttggatggtggaatttgcatgacgccccaaatttacatgttccagttttcaagtaaaactgccaggaaagcagagatcaataatatcacaaaaaaccttgtttcatcacttggaacatataaaatgactggtcggggtgggttacctggcatgggggttcaccaaaacgttcaggatactgcccggtagctctaacagttgcttcaacctatacatgaatcaacatgagaaaatagtaaactgtggccaagctaagatgacaaaatgataagcttttacaagagcatacaaaggtatcagtaaatacagggaaacaccgggtagagtcaatgcataagacaaaaaaaaacgtgacgtaaagcacaacaactgaaaccagtaaagcttaacaatttccccagtttagagagactctataaggccagtgatcacccacattgcggaaaaaacagagagaagcatttgattgtgtcctcctagtatggatggtttcagaacaataataagaaagaagaatgaatgagaggaagaaattaccgaggcacgatcgcgagggtgattgtaacgacatctattaccgtagccacagacaccagttcgcatgtagtaggcacagtcaggagcacctggtctctcagggtacgagtcgctacccaaccctaatcgccacatcgattctgcaaatcacaaaattgagcacagtcagggccatttagcggaaaccctaaagagaccgtacaagtgctgagaatcaaagcgcatgcgagaccttggagtccggtatcggcatctgcaggggtccagtcgggagcttgagcagattgtgagccattgaaggga

SEQ ID NO: 68437 - DNA, 626 bp, Arabidopsis thaliana landsberg
gacggacttatctctctgaattcatcatcttaatcattaccttctttttctcaatctcgattgttttcttcctaattcatgtcgatgatggcgggcatacaaggccagattctcgaggtcactggttcgtacctttctcacatccccaattctattatgttcttcaaccttatctatgatccgttgaaatgttaacttttaaaatttctgggattcttttgatttgtcagttgttgggtgccagaaattgaaagacacggaatggttttcaagacaagatccatacgtcgtccttgagtatggtggcagaagtcaccgtaccagaacctgcacaggttattattattaccacctcttttattcattatttgttcagatccagaaaaaattgaacaaagttaagatctttcaatgaatttgattgatgggtttgttttttcagatggtggaaagaacgctgttttccaagagaagtttatcttcactttgattgaagggcttagggatcttaaggttgctgtctggaatagcaacactctctccactgatgacttcattggcaatgcaacgtatgtgtcacttcttatcattgccttgttatgcttttaaatacccgctttggattt

SEQ ID NO: 68438 - DNA, 1651 bp, Arabidopsis thaliana landsberg
ttttccattgagtatcatgtttggaaatctcgattattgcatggtgcacatttgtctaactgattttggtgcttactttttgatgaggattctactatatagtgcttgaatatatagttacgccagttgctttgctttgttcttgtcatttacttacagtgctgacatggttttgttcactgatcagagtcgttttgtttgtttgtgtcatctttgatgttaatagaaatgcgaaactgcttgaattcaaagaacttgcacttctgttaattgttaatctgtgtgaactacttgttcgaatgttctgtttctacattgagcacactcacaattgatgtagcattcagattggctctctctggaacttatgaaagataactagacattttgagataaatggagcttctattgtatgttgttaggtcacctcagaaaatagatatgaagttctgtttaaacattgtagcatcaaattagaatttcttaaaactggtctcttgaggtattccatttttgtttttgaaaaagagaaagttatgtgttttttaatccatggctatgtgttttgttttcttaaattcctggaaaatcggttacaatgtgccaagattttggtagcttgtcctcagcgattgctccttgtaaaagattacttttttgattaaaagccttgtgaaaaacatcaacctttctgtcttgtagattcgctggagaagtacaactcctactgcattatgcgggagcaaaggtaagtcgagcctcaattagcaacattggttaacatgttccattataaacaaaaggctaaacacacaatccactcttgtatgcagaaacataattacgggtctgcgccatcagcaccgtatgcacctcacgtacctcaatactcagcaccgccttctgcatctccgtattcaacagcaccaccatactctggaccatctctatacccacaagtacaacaataccctcagccatcaggataccctccagcttcagggtatcctcctcagccatctgcctatccacctccctcaacctcgggctaccctccgatcccttcagcttacccacctcctccgccatcctcagcttaccctcctcaaccataccctccgcaaccatcatattacccacaaggtaccttcctttctttcctgttctatgctgcaattgatcgcatttgcttttctctaactatagtcagtggtggttgatcttttttcttcttgtttccaggtccatatccaggacaatacccacctcctccatactagagcgtttggcgtttagaatttgacgggaagtggtcatgatgtatagattatagttatggtgttttctagaatttggcagacgaatttctttgtttttgtttttttatatcatcttccttgtgctattgctagcgtgatggttaatttttgagatggtcagtgaaacttattgagaagtttggatcttttcatgtttaaccagatcgcagattatattgaattattactctaaatccttggttttgtgtgttcatcatcctcttaagttaaaattatgttaaaaacaaaaaaaggttttggttctgtctttaactttaagaaacggaacttatcggcgtataatcatcgcacttgtgatcagatgccattag

SEQ ID NO: 68439 - DNA, 653 bp, Arabidopsis thaliana landsberg
aagtacgattgaaaaactgtaggcaatgttattggtaggatgaagtaaaactgattggtagcaatgttatttcattctcaaacataaattacataaccttcaaaagaaaagaacaaaactgtattccataatgttagattttattcatcccatgacatgtctttatccttaagacttttagattataagattaatcatagtttttaaccaaaatatgctttacctgatgggaaatcttttagagcatttgacaagaacatacctcttgggtgatgaagacaagctgaaaagagatcttctcataatgatgaaatgcaccatcagcaactgatggggatattatatgtctcatggatccccagagagtagcacctaaatgtgcaaggaaagtatcgcgtgcaactgtgtaattttggaactcctgtacaatcgacatcacgatgcaatgtgtcacattttcaaccagcaaggaagatagcacccagaagacaaaaagcctggagttggaccaagagaataccccacgtccataacttaacaagttccagctctccattccgtctaacagcctccatggcttttcttctatgaattctcatcatatttcctctccgtcaaatgactggtcccggcctttaatcccgctttctttc

SEQ ID NO: 68440 - DNA, 788 bp, Arabidopsis thaliana landsberg
gttccccagaagatgtattaacagtaacttgtggctcatttgtagtcgatgaagtagtaaatccatttttccgccgtcgctgttgtctactttctctttcaactacaccggtttcacgcacatcaagtctggtaacagaactacaaattccgcgtgtgttactctcatccctatgattcatttcatgttccatatttaaatttcggttacgcgtactaacccacccctccaagccatctctactcgccaccctatttgcattaatacaaagaatagaaactcttatagcacaaaaaaagaaaagaagaagggatcatcctttaggtatctgttcaaacatctaatataagataaggaaaaaatattacctgctactagaaatttcaggtcttttgcctctagctcttccgtgaatatcactttcaggaacaatctctcttatgccaatcgaagatgcagtttcagaagctagttcctgttcaacactaagtgtgtcataggaattggtatcagcagcttgtctagctctagctgctatttcatgtggagaaatgcagccatgtctcaccaatcttttagtgcctctgttctgtggtttgccactagaaaggtcaattgtttctctatgaggaacagagccagaatctgctttttctttacctttattactgttccccggcagcacaaaggagttatgatcacctcgtaaaggagaacaaccattacttgtgcgcaactctcttatatcttcagatggttggtatcaaaatgcaaaaacatgaacatgt

SEQ ID NO: 68441 - DNA, 138 bp, Arabidopsis thaliana landsberg
aattacttctttaaataaactaatgtataaaaatctattttaaatcactcattttttcttaaaatttggattttttatcttataattcaattcacattatcaccaaattttagcaaaaatcaaaatacagttttatgt

SEQ ID NO: 68442 - DNA, 1693 bp, Arabidopsis thaliana landsberg
atagcaatatttagtaaggtccagtgtatgaaattaaactcgtgatctgaatacacgtgcatgagtccccaggtaaaaggatatataggctgctataataagatatgcacgttgctacgtgtatgggtgtatgcagcccatgcgtgttgacaaactttgttgaattattctatttgatttcatgatcttgagaagcctattgcttaccaaaattggaataacataatcactcattgtagaagttcttctaatcttgttactattttattaatttttctattgcttttggcagttgaaagtttgatatatagattttgttttcaagtaactgatttcttgtcctctttctcacaatatcttgaatataataagtacaagataggtaatggtacttttttttggtttaaatgagatagttaacgttgcaacgtgagactaattttgcaatattttgatggtttaatcattttatatattatacaggggggaaaatgttggatggcaaatcggtgaagtggtcataactcgcaagtcacatgaacaatatttctagtactccgtagaattcgtgtatgtccaagtccaacaactcgcataagacgtaaaatttgaaaatttcatcattgtgtattcttaacccgtgatttgatgtaacgtttactacgttcgtctataatctagagcattgtaataggcgtgtatgattgaatcattttaatagtgactatttgtttttggtcaacttctatattaatgttttacatgcatcgtgttgtatacttgtattgcacgcaattatgtgaataacgtcaatcgtgtacgaaattcactcttttgtcgtaaccatttatttacaattggtgattcctatctaaaatcccaattggcaattatttattactcggacaaaaaaatttaaattcaaaaagtgctagttacaggccttatcatttaagagaaagtatatagcaagcccatattcatttaaggcccatcctcgtgtaagaccacaccaacggtcgaatcagacacgacatcgaatagcgaactaaatcttgtcgctttatgtgatgacttggcgatttcgtaattgagatttccttttctgacaaaacaacattacacaacttaacaaataccgaaaaagtgaagaacgagaatctgtgtacgccacgcttcgcttaacgtttcatactcctctaactagtagccgtccgattagtttctggcttttcatgacctaaatctaaccgtcaattagagaagcttacaatacacttaaccgcaggaaagatattcaaaaccattaaaagcagtcaacacaaatgacgtgagtcttagtaattccaaccaaaacacgccacgtgtgcggatactcttcttccttgagagcgcggacgtcaaaactaactatcaactgaaactttgaaactacctattggggtccgctctctctctctctctgccatcagaagaaaaaaccaaacaccgagacaaaacacatcacgaagaagagagagatttgccattttcggcaaggaagtgttttattctagggcttctctagttgctgcgtagacaagatggtggagtgaaattgcggcggtgacttttcaggtatgacggcgccacgacgtagtcggcgatttactttttgtgtttgtttaacttgtttagcttgacgctgagagat

SEQ ID NO: 68443 - DNA, 440 bp, Arabidopsis thaliana landsberg
cgggcggcctcggagatctgggcggctagttcggctttgcgccttctcaaccagccgtggggcatcaccgggtgggggatgagcttgacgagcaccgcggggtaccgcaggtcgatgtctgggtggtgatttgcggcatccgccagcgcaccgtccctgtcgacgaactacagtcccttcgcgaacgagccggtcgcgaagtaggcggacgcgccgctcgagagcacgcgccagtcttagacgcccggcgattcatggaactgcttcgaggtgatgggctcgaccatgcccggaggctacagcggctgctctgaggcgctaaggggtggaggcgccgtcgctgctcgcagcccggccgtcggtgcggcacgaggggcgcgctcaggccagcacgatgaggtacccggcgactgtgatgaaccatagtgccgtcgccgtga

SEQ ID NO: 68444 - DNA, 529 bp, Arabidopsis thaliana landsberg
  unsure (1)..(529): unsure at all n locations
caatctatgtcctgcgatacctccggctgatttttggccttaactttcatgtctcctctgctgacggggatatcatctgggagggttatggagaccgacatcggcgggaaagcttccttcaatggccctccaaaggtatctatggatcgaatggtagaggccatgattctgatgaatgatgccttcaaacctgctgcctgccgccaccagtaaaagatcacccgccttcagcagaatttctcctatttttccacgcagtttttccccgttcctgtggacggccactaccgcggcatcataatgttcacgaaaatgaagcatcttcagnnnnnnnnnnnnnnnnnnnnnnnnnnnnnnnnntacagcttccattaagttggtatcgccttgccaggcgtcttcatttgactgnggaggatgcaagccattattattgcggattagatctgcaatattctgcgtgtctcctgcgaaaaacaaggcatcctgcacctgcaggatttcatcggggcttacagggctgataatc

SEQ ID NO: 68445 - DNA, 553 bp, Arabidopsis thaliana landsberg
cgctgtgcgggcgaaggccaggcagacccatcggcgcgtcgtccttgccgttttccttcgttttttcggtatcggtcatggtgcggcccccggctcgggctctgaccggcgtttgtccgtccggcccgattttgctcgcacgagcaacattggtgaatctcctagacgagcccgatgtgtcgatgcaatgccggcgacgctaaccgggagacggaaatgcaacgctgggagccttctgaggttgaggcgcgacaggtaccgtgtgcggacgccgccagcgtgagcgtcgcggggaggatcggccgcgcttgcggcggatgagtttcgtatgcgattgacttgaactcctgcgggaggcttgccgtcgcacccggctatgccgatccgcggcccctgcagcgggagctgttttcggtcctgctgccgtagtggctccatgtccgtttgcggcgtcggcggcagccgttggcgagacatcttcatcgcggacctcggcagcgatatcgcggagggtctgttgtgcggtctccctgccgctcgtcgatgccatgag

SEQ ID NO: 68446 - DNA, 583 bp, Arabidopsis thaliana landsberg
aatgcaagccctttcttcggaatagcaatatcgtcctgtccaatgctgcaatttgtttctcaaacattgagtgcgagggggatctcccgggcattctggccgtagtcctttacggactccagacgtttgaagccttctttctcgaagacatccgagacgtcatcacattgatcgaagccgatctccagtccgataatgccattctgccgcaagaaccttgccgcatccttggcgatcgccctgtaggcgtcaagtccatccgggccgccatccaaagctgccgcgggatcaaatttcttcacttcgggagcgagatcgtgaatgaccttggaggcaatatagggcggatttgagacgatcgcgtgaaagcgtccatcgatattgtcaaaccagctggattgtattgcccggaaccgctcctcaaacccgttccgcttcgcattggccgcagccgtttgaagcgcgtcggccgatatgtcgctaccggtccctttggcttgtggaagctcactcagcagcgccagacatatggcgcccgttcccgttccgatatccaggatatggagatcaccgccctcacttg

SEQ ID NO: 68447 - DNA, 1500 bp, Arabidopsis thaliana landsberg
agtgttatgaagaaattaacttgaaacgggagtagaagaagcaaatgttgcattgttcgcaagctagagcatttttatacaaagctatagaataccctttagcaatataaacagaatactcagagttcttttttgtttttgtttttcaacttatacagacagtgtggtaacatatgtaagtggtataagaaacgaaccaatacctaaacatcatcagagctcacacaacatgaacaccaaattttattctagatgatgtgtgatgagagttttttacacctactacaatcggatggtgcacataaccgtggtcctgaaatcaagttgatgattgaacggtggctttgagacaaccgatctccaagtcttcttctttggatcatacatatgaatcatcaaagatccagctttcctctgttgtctagtatgccttgtatccatcagattataaccatccaaaagaatcataacatgtaattccccattcagtgcaacgaaaccaaccggtttgtcgtaatgagctttcttcggcacgcttgactcctttctccaacgattcaaacccatctcatacctaagaatccaatccttatccaacatgaaaaacacaggcttcccacaatcaacagcaacaatcttccctagcttaggtctctcttcttctccccacatatctccaactaccctccatttctcaccaccatctactctcaaatccatcactaccgcgtctttatagtactcatcaacaggaagaatccccgaaaccgtcctcgatccgccatagccacccataacccaaaactctctcccttcctcctccttctccttctccttctcattctccaccaagaaaccaacacatcctgctctaaacctaggcaattcattcattactctccactcatctttctcaacatcatacatctccacagaactcattctacttccagcagcaccaaacagagtgtgccgtgatcctcctcccgccacaataatccgaccacaagaaccaggcatcgcagcgcaagcaaagctaccacgcggagacatcatcggagataaccgttcccaaaccgatttcacgaagctgtaacgaaacacagaagaagtaggcaaaggaacatcaagaggataagacctagtatcaaaagcagagccaccgaggacataaacgtaaggaccaagagctacagctacgaaattgcagagaccgtaaacgtgagggttacaaggcataagaggaagcgatctccaagagagagtcacgggatcgaagagaaaaggaggcgaaatcgaaggatcctgagggaagatacaaaggagatgcgagagattgttggtgtcgctgttgtctctgctatggcggagtgaaattagggttttggaagagaggaaagcgtaccatgatttacaggttgatttgatacgagagatgtgagggtaagggacgaaggagagaatcagtctcccgacgtcgttggataagcctggaattaa

SEQ ID NO: 68448 - DNA, 175 bp, Arabidopsis thaliana landsberg
cggtttgctacaaacacacgacctattcagagcacaaaacaggaaaaatataccaagattagattgaggcatactcttcgtgtccgcgcagtatcacgaccttttaaatgctgctccagctcttctctctccttttggtcacgcactctttcctcctctgacagcccgagcggac

SEQ ID NO: 68449 - DNA, 2475 bp, Arabidopsis thaliana landsberg
gcgattacgtccgcacttacagtggccagttgtgttcgtttttcccttttggaggaattccaacaccccaattgttggaactgtagctgaagtccagcctaaacttgttgccgttcatgtcgatcagtaggggaaatatattatcagaggaaatgtttcattacaagaacgaaaacgcaaacctattgaaccagtcaccggagttgtaagaatctcgatcaagtgatttcgagcgtagaatctcatccccagcatggaagaatggaataccctttacatgcagaataaaacatattaagatttgaacagaaatctacttggtgtaatagattcgagaatagtgcccactagccgtagtttgcagtcccttagtctacatataactaagttaagttggaatacagtagagaacctgagagagggcaatcatacttgacgccaaatgattgattcgacacctttcatcaacagatatttccatcggtgtctgcaagaacaaagcataaataagtctatacagatcctcaagtagaaatgtatgatgcaaataaatagagagtggatacacgtctgttggctcgcagatacaacatgcagagtgaagtgcttcagaattaaatactaatcaagcagaagaaaacattgagctgaagaattgaaaatttggaaaaagttcagacatcatatttgttttattaccttcaaactgataatgtcaaagagagtttcattgtcatgagcagatacgtaattaatctgaaaccacagggaaatgctggtatgagcatcgcagatttattggtgcttgtttcacttaaatgatgaaagtgatagaaaggaagttgcatacagtttctgttggcagtgaagcatatgcaacaggtgtagcatcatgcattaaaacctctgatcccttcacctacaaaatgagagccatacaacataaaaggtgaggcaaaaattctttgagaaagattcaatagtaaagtgcgactaattacatacctcctttccttcgtggttggtcagcatataatccttcaaatttgctgccataccagtctaatccatgatggaagtaaaatgataatatcagaaaaagactttctagaacttagtgttacaagatatccatacagctgtcacatttcaactagtaagataacataatgtagtaagaaaggagaaagcattgggaacagctatgaagcgaatatgagaacaagattgggttcgggcaatccttaagccttgatttcagaaatatgattaccatatatcatatgatatctaacggagatcattaccaggatgtgatttttcgcagtggaaagcatcagttcctgtgtagcttctgaaccatggtcatgagcgttaggctgtccataatagggaaggtaaagaagtgaagaaaagaattttacatatttataagcgtatctctctacttgaataataatttactagtggcaaataaggatacatgatgattactcatctctcaaaacaataaagccgtattgtagtgtctattccaaacaaaaccacaaatataagttgttggtaaagccatgaatataaatgtgatgatgtggagttaagaccatattcttcatttaacctcggttagagctaaaaaaatttggtgattcaatatcttgattggtaactgcacaaaaaaaaaggcaaaatacctgtaacaataaacctgtaatgaatccttgttgaagaggatgaccaaatggagatccaccaagagttgcatctcgtatacggtcgttaaaactgaatagagatttaaacaattcaggtaaaacaaaattgatcagggaatgttgtacaatcgttgaagaaagtgacaagatgtccaacggattaactaaaaaggtacaatttattaaagtaatgactttcaaaccttccaattcctgtcccgcctaaattgaactgtgacgcatttattccacgtccattttcagcaacttcaccaaagttccatccttcgccatatctgatgatgaagggatagcacaacaaattatatggccaaaattatttcacgagggaaaaggacacaacgaatgtcgtaaaacttgcatgcaagtccgaaaaatagccaagacttacaaataaattcttgaaccatcaactccatctgtttcctttctcaagctaccaattgcagattttgcgtttacctaaggaatatagatattacaactcatctcaaaacttttgtaattttacacagaaacctaatgaaataacatactaacttctgaagaaaagagtaaagaaaactaccaatcatacaaataaaatatgcagagtaacaaagctgcttacaattgtagctttcattatatgagccataagatcaaaacggaaaccatcaacctcccagaatcagcacatgatcaggcagataaaatatatagcaaaaaatatactttgcaggatataatgaacattgtc

SEQ ID NO: 68450 - DNA, 621 bp, Arabidopsis thaliana landsberg
ttcgcgtaataatattttgggctttaatgggcgctataggcccatacatttgaagataataaaataactcattgtctacgatatgtaggggcagtgtaagctgaagggaaagcctttgtacgttctggtggaaccaaaccagtttgatgaattaaccttataaaagccttttctattcaacgattatgacaaataatgtaatcggtttaatcgattttgtaactaaggatttgtttgttttctattggctccatgtggaatgattcatgctagttactatgaaattcggaatacgaaggtatgcagtattatgcaccactgttcttcagatgaatgaattcaagtcgattttctagtgatttacatggcagaatttataaataatatacatcatattgtttgttagataactttactaagggggcaaaaaaggaattatcagataaacaaaatatttgaaaaaagaaaaaaacgttggcagggagtttcacgcgcaacgcaacgcgcccatgtgattatcagaagtacgagaaagcccctgccgcttaaagatctgtatataacaagggtaaaataaggtctcctggcctggcccttaagataaagatagggaaacccatc

SEQ ID NO: 68451 - DNA, 1752 bp, Arabidopsis thaliana landsberg
tacctatgctcgaatgtctgttctgaaataattagttaagttttttttaaacaagtttgaagcaagtgtggttatacgtagaatataatgtcagtttgtctctgtgattgtactggacttatgaattctatagattgaatttatgaattgacaaaggaacccaataacaacaattctcttttgtggctcagattttatcatcactcaatggccttgaaagtgaaacgcgattggcagcgaaagctgagtaagtgtttcatctatcgaaatgttaggcatatattcatatcctaattgattgtgatacgtatttgtgttgtggtttgtttcatagatacctcttatcaagccgaaataaagttaagtgggatctggacgtaaaagatcttaccttaagtttccctggacgattggttgaatcagaaagctataatctggtatttcgcttatgtaaacatacgagtgtctgtgttttcttatttgtatccttctcagtatttattttatcctcctatgcattctcgtgtacaggttctggtattggaatctctttctatcacatctagtagcacagatgctcttagcccaattccaagattgcagtctgatgtggaccatgtggtcaatagcttacaaagttccgttgaagctttggatgcttttcaagtcaaagatctctatgaccattttgatatcaaaatctgtaaccttgaggtaagatatgtttatgttaatttttcgtattctttttgattgaagcttgtaagcaatcatatattttcttacatgtgcgtcttgtgcagatgaaactcatgaagattcatcctttccaagaacttccccttgtggagaaatcatctttacttatcaagtttgcgtcttgtataattccggaggagtcgattttgaagcagttggaggtattaaaatttatctcagggttgaggtggccatatctagtttagctgagggaatgataaacttacttattccttggtactaaatgcttgtactttaatagtggcatcgaccacattttggtattgatgtttttgccattccattcattttcaggttgaagctactctgcctatgttcaatgtccatttctctccgtcaatatttaaaggagtcatgtctgtgattgaatatcttgatattcaggatcatggaactcgaaatgctccaccttcccctgctcccatctttcacttcaccatcaaaatcgacttggcatttttaaggttgcacgtcaatctcgaaaataaaggagaaaatagcacagtgcttgttctttctatacagcagcttgatctctggtaggtaattgttgcaacggtaaaaggagcccattttgtgtctttatacagtatcagtggaaagttaacctttagcaattaaacgagcatgaatttagcatttttgttgttgtatatttgtatttaccatgatgatgtctgcttattttgccaagcagttgatatgttcacatgcttcttatcacacatatttggtcttacgatcactactataactcatctaatgatgcattgtcaaaaccaagtccatccaattctttttctattggttctttgttaaatattgtatcactgggggttcctgacaagttcccttgtacaatggtcattttcaggtattcacgtgctatatttgaagagtggtcagtccgtgcgaaaacatatggaaataacagcttgcttctctaaaaatgcagccgacggccatatttta

SEQ ID NO: 68452 - DNA, 354 bp, Arabidopsis thaliana landsberg
acgttttaaatggatcgaagcgagcgaagcgctaccgggccgccggcgtggttcccctgggcaagaccaacacctccgagttcggcatccccggcgtcaccaactctgaaaagtcgggcgcctgccgcaacccgtggaacaccgaccacatctccggcggctcgtcgggcggcgcggccagcgccacggccgccggcttcgtgccgtcggcccacgccagcgatgggttgggctggatccgcatcccggccgcctgttgaggcctggtgggcctgaaggtgacccgcgaccgcaatcccaacggtctcggcgactactaccggactattgggtcccgggaaaaatcaccatggt

SEQ ID NO: 68453 - DNA, 476 bp, Arabidopsis thaliana landsberg
  unsure (1)..(476): unsure at all n locations
cctggacgccttccggccccatgtcgttccaccagctaatttagccgggatgttacttctccagcgcgcgctgggggctcgtatgggagttgaggccgacattgttcgggatcaggccgtcgtaatcgacgttgacgatgttcatggcgtcatactctttcgctggagtggcacggcctatccactgtcattgccgggcttggcccnnnnnnnnnnnnnnnnnnnnnnnaaagaatgtcgtcgtcaccattttctggccagctcatcatggatgcgcgggtcaagcccgcgcatgacaatgagtgtgtggcgcgcgacagcatcaaacccgttccttattgaacgtcggcttgacgccgctgtcgtacagtttcagcgcgccctgctcgccgatggcgttggggcgctggaagatccagttctgccaggcggtgagccggccgaagatcttggtttccatggtctcgggaccggcg

SEQ ID NO: 68454 - DNA, 1006 bp, Arabidopsis thaliana landsberg
tgaatgcacggatcataaaggttttcaatttgtaatgttgtggtacaacgtgtgtttgtctcctttgtaacttatcttgtctcacattaatagaggctttgattagagatgtacaacgtgtatcatctcattatgtgtaagtcactattgagtgaagctgatgagttagtaaacgatagccataactaaatctaattgcaaaaacaatgtgtcactactctgttttccattgtgttaaggtttgggatttaatcatttggtatcaaatcacgttttggttttgatccgaaccacaatagtggtattagtaccgcacctaactttcattcttttgtttttagtcaaaactattttgtggtagacaaacttccatctattatcttggttttaattcggaccacaattgtactatcaagtctctatccggaaaaaataataattgttcaccctcgtgactacggcattctatttgcacaaggacagagagtcatgactaagtctttcttttaacttccatcaattgcaaataattgtgtcatattctgattcatataataaaggagcaagagtaacaatcatagttgtcttttttagttacatttgtctacatatactctccgcgacagagtcccaaatgaaggtcaccaacttggtttccgtaaacggaatggtcttttgtgcagctatacacgcattgtggttttcgtaaatctttctccagatcgttgaatctttgagacatccatatcaccaaaaaaagggcacagatttttctataaaaaaaatgtttgacaaagctctttacagtttcaggtgttaggacaaatacatattaacgtttctccaataagacctcttctcttggtatctgtaaacaactcggtaagaatgtctgcggatcatcatgagggtggatgagcatggagtcaacagttttgttatgttcatcatctcatggagacattactgaataactgaatagtaatgtctttggtatgttcatctc

SEQ ID NO: 68455 - DNA, 2974 bp, Arabidopsis thaliana landsberg
tagacttgggtgcgtacgtgtttaagaataatttggtttcagaccgggaatgttttattctcataattatcaaagctttttattacactagtagtatctaaatttctaagcaaaactactagaactttattatagtaaagcagaagttagaagaaaaaacataagactggaatatttctcattattctttattttcccgttttccttgatcatcttggaattgactcgtagcttaactaagcatttatacctgcacaacccaaaaacaaaacaaacaaaaaaacaaaaaaacctcagaaacagatatgaaatagaggtctatatatcattaaataaacacattactacattagccgagttagctagagctgatatatgaggttttatcctacttaatctacttggaatcttaggccaagtctttttggtttggccatatattaggccaagtctaaaatgttggtaactaaaactaaatatatattgagatttgttttattcatcctcatcttgggataacgagccaaatatcaaacttcttggttaaaagtaaataaatccgtaccacaatccacaggaggaaggttacaaagcgaaggaagagaggtggctgcacggagagcgttgcatagacaatctctattagtagattgaagtgcggcgcaacactctgaatttggtctgcctgaaccgggcagcaccatggcggcgcatacctgcacatttgctagatcgttgccacattcttgggcttgaactaccgtttctatagcagtcatggcaagaaaaaggacactgagaacggctgcgaaagacttgaacgatgccattattgccatggataagtttgtttctatagatatctgatgtagttctatgtatatgatatcatatgtttagatttatcatttatataatgttttgagtgtatattttgagtgattaattagatgagttgaggagacgtttggcatggtcacatggtctagttagttcacaagatttacatgtgaaagtaaatcactctgttctctatccaccacgctgagtgcaaggtttttttatttatttattttattctttagtgcaaagcaaaaatatttcatatacaaaattatgtaatatatgaaattaactatggtaaaaggagttgacaaattatctcttgtagatagtaggatggttggtatattgaagatgaaaagtattactgtattagtgcaagtagatgaagattacatatccgtatttgtggaattttgtatgatttaaaatcaggtcacaaatacattttattaaaatttcagagaaaaaaatagcatgtgtctggcttgtttgtgacgtgttaccgatgtttgtaactgtatcagctttaaataaacgaggcttaaaaaaagtcataagaaaaaacgtaaaatattgattgatagcgatgagttcctgaagaacagtcttttttcttttccagaattagtaacactttccagaaaaacctcttcataaaaagagaagctttaatctaagaagaagaaagaacaacaacacagtagacacgttaacattgaatccccctcatcagattcatatacctaagaaagttagtctttagtaactcgttctttacaaagacaacattggagctaactatcaaaatgcctctcatgacttccaagaatatcctcccatgctttcatcaacctcattgctaaaaaccccgttattcccaaagttgagcgatgtattagagataataccttccaggttttggctttggtctaaccccttgatgcctctgaatctgttggaggtgcttggtgtttcagctgctgcgggaacataatctgttctgtttcttcccatgttgctattgcaattcatcatgttctgaccagaaagtgactgttgttgttgaccggagcctccattgctgtttgccatctgttgccatatttgatgaatcatttgttgttccaatgtttggttaccgctactacaggaaggtggctgttggtggtattgctgggttgagccattataactggagcttggcatttgccgctgaggagatagatgggaagatacaccacttattgatgggctatgcacaaaaccaggtaacaagggactagttccttgatagctcggggatgcactccggtttcttgatggttcttgctggattgtggtgttgtttaggtctgaattcagatggttttgtttcatgagcatgctctggtagttggtaagcgcaaaagcggcagcttgtgcagagccgggaagagatccttgaccgctcatgttgttcattggtatgtttatcccggaattgcgcaaggccattagcttgttgagactgttcctatcaggtggaagccctcgggcagccgctagttgctccatctcctgcatctgaggtttaccagccttcattcgatatggatagctcttcaaagcctctgcaaatgtaaaaaggtagcaagaaagctttttataagcacagccaagtaaaaaaaaagcgttttgatgaatctcagggactctctgggatttatgtattaacttaccgattggacccactttttggtcacggcaaaagtcaatcatatctttcatgctgctgacaacctcagaaatctgtttaaagaagatggcaagagttaaacagtaaaaaggagacacgccaccaggaaaatgcaagaaagtaggcagagagatacctgcagacaccgaacatatcgttttgagaagcctaagtcattgagtgaatgtgactccaagctttttgctagttgacgtccagcagccatgaccctggagcaaaagacttggcatcagtacatcatatttgtatatattaagctaaaatcgctttgatcttctttgcatcagtgaaaaatcttacctaattaccgtacaagatgcacgaaacaatgaaattgaattgattgagaaatatggaagaaagagagtgaaa

SEQ ID NO: 68456 - DNA, 2062 bp, Arabidopsis thaliana landsberg
ctcattgatttcatcttacgtcaggtacagttcatcaaatgcgaattatttcttaaattttaaaataatagctacttcttttatcattcggattatttgttttggttggttgcaaatgggcttcaggagtagcgcgggataaaatgggcctgtagaacatttgatgggccacaattctcaaaagcttttcttcctctttttttcttttgttcactgctctcaaaagtcaaaagctttccttttggtctcaaaagctcattatcattagggtagaaaaaagagtacatataagtggtaagttgtagtactagtaacatattaaatattaattctgtgaaaagttatttgatcacagtctttttttaataatcattacttgataaattatctacgtggaaaacaatacatcttacccccatttcatttggaggatgtacaatgtgtcaatgtgagactagccgttggatgggtctactcacattcgttgaagaacattaggtcctgttaaaacttacaacctttttctcacccaatgtgcatttgcatgtgacatgcctagtgttactctttatctttttacacacataagtttcagtgcagatcagatgtttctctttttacattttgtcaacaagtttcacttttagctatcgtttacaaaagaaaaagtttcaaatatacaagaaaaatattaatcggtagtaaaatctctaagtccatttacggtaaccagagaatggttgttacactatgatcatcaagattaagaccaaacagtcacaagagatcttaaccattgattcaattttggtcaacgactcgaactcccaacataaccaaaacagtcagtcgtaataaaaagacgccccggtaggcgtataacagaacaacaacaccaaaagaaaagggaaaaaaaaacagaggaactaataaacggaccatgagctccacagagacatacgagccgttattgacacgactccactcggattctcagataactgaacggtcttcgccagagatagaggagtttctccgccgtcgtggatccacagtgacaccacggtggtggctaaagctggcagtgtgggagtcaaagcttctatggacactctctggagcctctatagtggtctctgttctgaattacatgctcagcttcgtcaccgtcatgttcaccggtcatctcggttctcttcagctcgccggcgcttccatcgccaccgtcggaatccaaggcctagcttacggtatcatggtacgaaggcacatttgagttcataaagtaaaaaacagagtgaagaacacgaaacaacgtcgtttaattctatatttattgtacacttcatatgttgatcggtttctccttatcgaacattcttgagttttaaaaagttttgttaatcaaattgactagttaggaatggcgagcgcggtccaaacagtgtgtggtcaagcgtacggagcgagacagtactcatcaatgggaataatctgccaacgagccatggtcttgcaccttgcagctgcagtcttcctcacgttcctctactggtactcgggtccaatccttaaaacaatgggccaatccgtagccatagcacacgagggtcagatctttgcacgtggaatgattccacaaatttacgcatttgccctcgcttgcccgatgcagaggtttcttcaggctcagaacatagtgaaccctttggcttacatgtccttaggagttttcttgctccacacgttactcacgtggctggttaccaacgtgctggatttcggcttgcttggggcggctctgattctcagtttctcatggtggctgctagtagctgtgaatggtatgtatatcttgatgagcccgaattgtaaggagacatggacagggttttcaacgagggcatttagagggatatggccttacttcaagctcacggtagcttcagcagttatgctatggtaaacataaagctgtttgatatgagcgttttgagtatatggtttaaagaaagctgataccaaatttgaaatgaaatattcttcagtttggagatatggt

SEQ ID NO: 68457 - DNA, 853 bp, Arabidopsis thaliana landsberg
acgatgaaaccttatacccgagccccggataacgaagaaaaggcggataaaatccaacagctaattcagcgatatctgagattctatagcttgattgctactgtttactgcacaatcatcacaaacatattttcaaaatctacacatatggaaacagaacacaaacaatgccatttcattagaaacaaatcatctaaaaaaatctttgtgaaacgtaaaattgaaaacagtctagaagaatctcaacaactttgctcaaatttttttaccatggaagaaaaaagtgtaaaccctagcaaagtagcatcaatgaagaaagaaaaaaaaaacacaaagttcttcgaatccataagatacggagatggaatcaaaattgtaccagtaaaacacgattcgaaaccagacgatcaatgtagaaacatcgagaattccacaggccaaaaatcaaactcaaaaaaacgaaattcgatggaaataaaagaaaaagattcttaaaaataagaagcaacactcaccacccaagagaaacggttcgccggcgagatccagagagagaggagctagaaacagcaaaaagagagaaagagagaggagacgaagaagattggtgaacggtgatggcaagatggatgatcggacggttgagatcgagtatttatttttctttttcctttggaatgaattttagtagcgcttatatgatggcatattcgcacgtgtgaatcatagcaagcgcgtgtgagacgagtcagctttggaagttaatagaatcggcgtttagttcagctttttctgtcgtcatgtaatttcaggttgaccgaacctaattgtacctaattgcatagattgagtt

SEQ ID NO: 68458 - DNA, 396 bp, Arabidopsis thaliana landsberg
  unsure (1)..(396): unsure at all n locations
atgtgaccgacattcagggcacccatattagngggggaaatagaacatcaatggagcgcaatggacataaactaaataccaatgaagaatctatgaaaaataacacaatggaagctcaaggaggtagcaatggagattcaacatatggggaaacagaggagactaaagagagcattgtttctatgaacaaccaaaatatgcaagatgtatgaagcaatgaaaattctatgaataatcaaacaacatgaacaggagaagacataatttttcacaacaacatatactgagagcaacacttgtgaagaagcaacaatgttgatatcaaaccttgaaaagaaatcttcaagtacacaggagttccaaagcttctttcaaaaactgatagactacatgaaa

SEQ ID NO: 68459 - DNA, 560 bp, Arabidopsis thaliana landsberg
tcctcctggggcatcgtgcgtacgggttcgctttcgcctgccgcacgtatttcggcaagccgctgtcgggggtcaccgcggccgagggcgccatgctggcgggcatccccaaggcaccgtcgcgcttcaacccgatcgccaacttcaagcgagcgaaagaacgccaggcctacgtactggggcgcatgaaagcgctgggctacctgaccgacgccgaatacaagaaggccatggtgcagcccatcgtcatcaagtccgcggcaggcacgccttcgggctcgtatgccgtccatggcgactacccggccgaactggcacgccggctgctctataacgtctaccaggacaacatctattcgcgtggtttcaacatctacaccacgatcaactcgaaagaacaggaaacggcctaccatgcggtgcgggacggcatcctggactacacgcgccgttcgcgctaccccggccccgcagtcgacatcgacctgccggccggcatagaaaaggaacccgccaagctcgacgacctccttgacgacctgcaggacaaatacccggac

SEQ ID NO: 68460 - DNA, 487 bp, Arabidopsis thaliana landsberg
  unsure (1)..(487): unsure at all n locations
tttttttattcctttttggaattaaatcctcttttttctttaatttattttccaaacccaaggaaaaaagggattaaaaaaaccggagagaaaaggcaacccacacaatatcctcttctctctctcttggttccgctgatagagagagcctctctctaagcaatttagctcgagcgagaaataatcctgagggaagaaaataaaaggaagatgatgaagaagaccatctttactttggttctctctctctcttctgttcgatttttttttgtagatgcgaatatcttctaaagattcatcaactggttagttctttctctcttcttttttctttcctgatttttttatgttgttttgttgtttttctgtgtagttagcttttcaatcggaagatttttgctattatgtgtcgaatctctcttgttgttntgagctttgtgtttagttttgcttaagaacaaagtttaaattcatctttctatttctg

SEQ ID NO: 68461 - DNA, 362 bp, Arabidopsis thaliana landsberg
ctaagacgaatatcaaatagtttagaaacacaagtagtaatattatttcaatgtacaaaggtattagctactagtactaatcttatctattattactttattggcataatgcattagtatatagtattcataattgcgtatttccgttctagatgtcagtactattgggtatgattatcattgataatttttagaggatttaaggcaatatcttaaagtctttcatactcacttgattctggatatgtaactaattgttattatctcactgtgttaagatagttaaggcagtatactttttgatcaaactgtatgaattattataatatttatgtaaatagattcaaacacaagggtaatgt

SEQ ID NO: 68462 - DNA, 2322 bp, Arabidopsis thaliana landsberg
gaacgatctgtattcaaaatcttctctagcactggaagcatgttaaggttctgtatctgatatggttagtgaagaaagatcttcagctgtcgagagattcccggaatcatcaggttttctgttttctattccaaactgacaatctgaggccatattctcgcatggtaatacttggtcagagctggaggtggcttcgtgaccagcaagaattgtatcaccacatggaagctcagatgtcttctcggagggggccgttccaacatctatgttggagttattctccatatgagcatttgtgatcaaatttggtggttgaacttgaccttgtggagatttgttggcggactgatacctggaaaattgaggaggcctatcaaccatgctgacaattgcaaaagcagagtagaacccgatattctagggtagacatggaggtgttaagttgcataaccatatacttaatgatgtcgaagaacttggtgagtttgctctacctcgttgtataattttctggccttggtggacgaaactcagcagaaacttgccccgaaactttgtctctggccaaaccagacaaatccaactgcagagagcagcacaagacacaatgtgaaccatatatataatgttgcgaataggtgaaggactttcctaacaatgaagctttaccttccggtctgaaataaagttgtacaaaggactctgcaaccaggtggaagaatgttatgaccatgtcacaaaacaagttttttggggtatacaaactggttaaggtaagattgtcctacctttggtgtacaattgaaatccccacaaagaacaataggcgcatcatcccagagttttgaaacagcatgagctttatctaagagtgttctgacctacgtaacagagataaatacatagatgataaatggaaacagttaaagaaaccaagttaagcaaggggcgaagcgtttggtttcaaaagttttatctcaaacacctaacacttatacatgttcatagcgtatagacagagttaaaccagagagtaaaactgtcgtttggcaaaagatttctacaaactagaatatggcattaaaggaaagtacctgaccaagtttaaagtctcctcttttaggattaaaaagcacgtgaatgttacaaatgacaactcgatgggaaccagcagagctgtaaaagaaattggtaattcacttcaacccacccacaaagtatagtccatacagaaaaccactgaaatctgaagaaaatcggccacttcctagtgaaattatccacccataaaatgatatgatagtaacatttacagatacttttaagttacctttcaggtggaggggtctcattttcttttgtatgtgaagtcaacaatgtctacacagagcaaatttaatttagggcaaagaggcaaatgtatataagtcactatcaacataaggtatccatattacctcaagcacacatatttgagcaacgttatctcggagaccaagttgattgaactggatgctttcctcgtgaaccaacttgaatctaatatgataacaatgaaatcctaaacaagattccagactgatccacacaaggaagagcaagggaatcaaacctattggatcgccaaaatattgcacatccgtcaacagcattaccagtccgcatctacagttttataaaatagagttaaccccacatttgaagcctagttcttatgatgcataccatttaatctttactccaagagagtccgtagagaatacaaactcaagacaactaaaagttttcaacaaacctaccttccaaatagcactatatccccggtgcttcatctcctcctctaagtcctgaaatttatcaacttcctgacatatacaaaataattttagattactatacatatggaagatacattctgtatacatatgataaaaaaatagtaaagcaagaaagttttgtctccttagtccctcatacaagcaattaccaagaagatatagcagaaactataacctgaaggcacattatatctgcagaccataggctaagctcgaacactaatttgctctttctccatgcccaactcaacatattcctcggtatgtgaaagtaaagacttctccagtgatcatttgcaaggtaatccgccaatatattatacgataaaacaacaaacttttctgtagacaagagaaagcagatcaaaaattgtataccggagcaaatgagatggtcacgcataaattaccggagccaggagacggtggcgttttggcatattcccattcacggtaatctgaaggttttgaccgtggcccgtga

SEQ ID NO: 68463 - DNA, 446 bp, Arabidopsis thaliana landsberg
  unsure (1)..(446): unsure at all n locations
acattccaccggttccaagcctgaacttttccagtgcctttcgtcggcacaggcccccacgcgggggctttgttggggaatcnnnnnnnnnnnnnnnnngggattccaataaggggacggcttaagttcattatgaatagctacattaatatgatattcatcacacagttctgatacataaggaattcgttcccgggtaggttgcgcggtaatgttctgcagccccattgctttggcaaaaacaaataccgaatcccattgggacaacgaaccaggggccgttacgccaaatgaaaccagctttacatcctgctttttcaggtaagctagaactttatgctcggtggagctgtctatattataattcatgacaccaggtaacccgccgccaatcttttgacccgggtaaacttcgatataatgcagccccaggcttttggtgctgt

SEQ ID NO: 68464 - DNA, 930 bp, Arabidopsis thaliana landsberg
gagaagactataagctggaacttatgtagggaatttttttcccgaccacattactacagtttttatgatatagagaatctgtgtttatgatctgcagagaaatatacaaaatgtactacattatatttcaggattcttaaagtaatcgtctaattatttactaaaattaaaatttgaactttataccatttataatgtcattattatttaaataaaaatagtctcattttaaactttcaattctaaatttatttttttaaaactaaacctgaaatcttaaacactgatctaagaaaattaaattctgaaacatataaactaactaactaagccctaaatctgaaaatggtgtattttcttaattttttgtaatattagtttagatttaaacatcttaatcatcgatcgcatatgcctgtttttttagttttttttaaaaaatctaacagtatatatatgtacaggctatctaaaataggaaatatttatatgtcaagaataatataattcaggaacacaaagttagcaccatgtgaaggacaaaccaaaaaaaaattgtttttagtctttggcaatgaaaatccacaaagattctgtatgatgaactttaacaatatagtttgaccctgaaagagctcctgaaaggttggacgattaacttgcaagtattgttcgtaccaaagtcatttattatgttagttcagatactcagagtacttttgtggattgtagaatattgttataacttacttgttgtatatagcttttcccgtatatatcacccatgcaagatgttgtgaatatgaagtgattgtaacttgaaagtaataatatgagattaagcagacataaataatttaataatcacgagattcatcatggatagaagcaccgttgatatatatcaagtcatgcgagttcttgttagct

SEQ ID NO: 68465 - DNA, 664 bp, Arabidopsis thaliana landsberg
  unsure (1)..(664): unsure at all n locations
gggaggcttcagagaatcagaaaaannnnnnnnnnnnnnnnnnnnnnnnnnnnnnnnnnnnnnnnnnnnnnnnnnnnnnnnnnnnnnnnnnnnnnnnnnnnnnnnnnnnnnnnnnnnnnnnnnnnnnnnnnnnnnnnnnnnnnnnnnnnnnnnnnnnnnnnnnnnnnnnnnnnnnnnnnnnnnnnnnnnnnnnnnnnnnnnnnnnnnnnnnnnnnnnnnnnnnnnnnnnnnnnnnnnnnnnnnnnnnnnnnnnnnnnnnnnnnnnnnnnnnnnnnnnnnnnnnnnnnnnnnnnnnnnnnnnnnnnnnnnnnnnnnnnnnnnnnnnnnnnnnnnnnnnnnnnnnnnnnnnnnnnnnnnnnnnnnnnnnnnnnnnnnnnnnnnnnnnnnnnnnnnnnnnnnnnnnnnnnnnnnnnnnnnnnnnnnnnnnnnnnnnnnnnnnnnnnnnnnnnnnnnnnnnnnnnnnnnnnnnnnnnnnnnnnnnnnnnnnnnnnnnnnnnnnnnnnnnnnnnnnnnnnnnnnnnnnnnnnnnnnnnnnnnnnnnnnnnnnnnnnnnnnnnnnnnnnnnnnnnnnnnnnnnnnnnnnnnnnnnnnnnnangatgactaaaaaaaaagtctgcttatgacttgttcggccatacttatcacttagccatactggatgat

SEQ ID NO: 68466 - DNA, 592 bp, Arabidopsis thaliana landsberg
  unsure (1)..(592): unsure at all n locations
ctaaggatcttcttgaggcccacatcacggcgcgcgagcgcgccgcagcgctgaagctgctgcgcacgcgcatcacgacgcgcaagccggcggcgtatctgctcgggcgcatcgaattctgcgggcttgaattcgaactcgacgaaaacgtgctgattccgcgctcaccgattgccgagatgatcacgcgcggttttgcgccgtggctggaagctgaaccggcgcgtgtgctcgacctttgcaccggcagcggctgcatcggcatcgcctgtgccgtcgccttcgagcatgcgcaggtcgatctggccgatatcagtccgaaggcgctggcgatcgcacgccgcaatgtcgaaaagcatgtgctcggcaatcaggtgcgcgtcatcaagtccgacgtgttcgacggcctgganaccgaggtctacgacctgatcgtcaccaatccgccttatgtgccgaacgccgaatggaaggcgctggccgccgagtatcgccacgagccgaagatggcgctggctgccggcggcgacggcatggacatcgtggcgcgcattctcgaaaacgcaacacgacatctgaacaatgacggctg

SEQ ID NO: 68467 - DNA, 320 bp, Arabidopsis thaliana landsberg
  unsure (1)..(320): unsure at all n locations
ttacaaaaccttcacaaagtttaagaacatgcaacacggggcattggggccgaacggatgggcggtctggctgcaactgaatctaaaacacttgcaacgatattggttcctcatgaaacgacaaagcatcnnnnnnnnnnnnnnnnnnnnnnnnnnnnnnnnnnnnnnnnnnnnnnnnnnnnnnnnnnnnnnnnnnnnnnnnnnnnnnnnnnnnnnnnnnnnnnnnagcgacgaagctggctccgggtaccgcacgcgtggctaaatcaccaagacccggacgaccgacatcggtgggaactgaccatacatttatcgcg

SEQ ID NO: 68468 - DNA, 586 bp, Arabidopsis thaliana landsberg
  unsure (1)..(586): unsure at all n locations
acaacccattcgtctgtttattgactgcttgccaaacattccttatagttttgtcaccaacttctttaagtaatggagacctaggggtgcataaggcatggagaaggaagcacaaactataaatcgatggctcggaagccaaagaatagagaaatagatgagagaaatcaaacctacctctccatcgcctctaggtaaagcaaagtatccccttaagtatttatctgtaaagaacttctgaaatatctctataactttaatcttccagttgttcgtatggcagcaagatcaatgattctcccgctgggtagactgacccttatttactttgaagtttgaacatcaatgggttgaccaacaaggcaaaagaaagacgctaagagaaaaagaaaaaacatactgagaattggaagacgcacgaacaaaaagtaatgttctgggtaacaggacgaaacttatgctcacaacatttcactcaaggggttcagagactcgaggaaaagacacagctacgaaaagtcataacttgaaaaanaactgattcatccttctttaacaagctctcataagaacaggatatggaaga

SEQ ID NO: 68469 - DNA, 482 bp, Arabidopsis thaliana landsberg
tatccttttttttttaaattcctttttaaaggaaaattaccggatttttggtgccaccggggttccttccaaggattattttttaggttattagaaattatttggaaattggtttgccttaattttggttttttttaaaaaattatggtccaaggattttcgttagccgctattcaaaggctcggccagggtggttaccaatttcctttattttaatttttttaataataatttttaaaatatcaggaggtttggggccgagacacgtattttccaaagcccgtaccatttttatttatttatctttcaaaataatgtacatgtcgagatatttccatgtatatcttttttttttatgagatgacaatgaccaaagagactgagacattcattggagttgggtgagatatataattaagaaaattaaaattgatgtggacaaactaatctttcacttgtgagatcagtcagtagaaagctgc

SEQ ID NO: 68470 - DNA, 556 bp, Arabidopsis thaliana landsberg
atcaaattgggacatgaagatgcaatgcacataactgatgcatcttgtagtttcgaacaatcggtaagatccagatgggtgagtcgttctgaggatctcaggatgcgagccgcgatttcatccgtgagcttgtcatagaatcccaaatcaaggattcttagggacattcttgatttggaaacaatcatttcaacaaacgagggaggctggtctagataacacggtcctggaatgtctggtgcgccaatccttagttcttcggtaaggccattcgtggctagggacaatgcccactccttgcaaacaagctgacacataaagcgatctgggtagactggcaagaaggacatgatcaccgacaaagcagcatggggaaaattatcccgtaccgctttggttggaacaagcgctgttaggagacgcggcgaacttgccccggaggcggatcttcgctccctggaaacaatggtctctgcatcgacattcacaaccgctccttcaacccattttaattcatactctcgtccatgtacaaggaaaaccacaattagctttt

SEQ ID NO: 68471 - DNA, 655 bp, Arabidopsis thaliana landsberg
tcaagagtttaaggtacaacatggttgctaatatctggttgctaaactctttatcaatgttttgttcaatgaagattacacgctctcgatactgcaacaaaaattgaagttacaaactttccagtgaccatgtaaaatgtatacacaagattatttacaagtcgaatatacgtacaagggcattccatatatcaacccattgccaagtgccttcttcacggtttctgtagggcactctcggtgttcctattggcatcatctttacccgtgacctgctcgctttgccagtcctgcaaacacacagaaaccacactgagttgtgaaagacaaagctaatgaagcatcacatttaacggcaaatgaccgttctaacgggttctaatatcagcaaaccaacctaattgtaattcacttgttatgcactataagtctttagctcgattttcacatctcatcaatcatttcaggaatttcaattacaaatcaagtattaagttatgtaaattctcagattggagcagcaaaagccctaaattttaagcaaaattgaacaagagaagagcctccaagcaaaaccaaagtctcgaatcatttcagtaaaagaagaattcacattacccagattgcagactcttatgaactcttccataggaca

SEQ ID NO: 68472 - DNA, 319 bp, Arabidopsis thaliana landsberg
agggggtatcaaacccataaccaaaaccactatcatccataacctctattgacacaaaacacacacacactcactccacattaaaaaacccacaagacttcaaccctacactgtatcccattctacataaaacaacctaccacacactccaacctacgcttcacaaaacaaaacctatcgatcccttcaacaactggacctaaatccatactaaaaatgtgccctcctcccataaaccaaacaatacaactccatctaagttcacacccaacccatatctcaccaagcaagctattacacatcatcatccctcatacta

SEQ ID NO: 68473 - DNA, 322 bp, Arabidopsis thaliana landsberg
agtcgaattgatccgtctagctagttaacgatatttctcaatttagtcatcaacaaaaattcgtgattaaattaaaaattaataaaaattagacattttaattattaggtaggatgatgctttaaatcaataaaaatgattaaaatgattttttaaaaatattatcattttatttatgtgttaaatttataaattaggaaaattaaacgcctaagatctagtcaatgcggccatagggatgggtcacctaatcaaacattgttctaccaatttcctcgaagaagaacaagaacattaagaaacttagaacaatgtcaaaatc

SEQ ID NO: 68474 - DNA, 1562 bp, Arabidopsis thaliana landsberg
cacagggacaatattccaggcatgtggcatgaaatttagatagcctctaacaagttcacatggtacaggaggctccatgcgatcacaaaggtactataaataaatataagaaacaagaattagcaattaactaaaacgaaaccagatggtcagatatccaatagcattagattaaactgagtaccttcataagtaaggccctgtgcctacagatgccaaattgcagtttacctagaggaaccactatagagttccgcttggacttaatagaacgcagagatttttcacacacatcagacaaaattgcatcttcagccgttgttgagacctgtttgttgagagcagccaagtcgtcttggttcccggtcaaacaggtgcaaataaaaggtttctggtagtttgtaccagacactgcctttcgggttctttcgataatagcagttctgtcactccccccaaagtgatccgaaacaaaaagggcaagaaatgatgcaacttgcaagttgtcaatggaaacttgatctacatctggagttaaacagttcaatttcttcaacctagctaccaaggctcgagcagagagagtgattgcatccaacacttcatcctttgccctttaacaaaaccaaaacaagggcaaagtaacatttagctcatggataaatgattattctagtcgatataactgaacgtgatagtaactacctgtccaagagtatgacttcacgtgaatcaagaggcaaaactttctcatatttactaagagtcataaagggcctatcacgtccagcatcaaaaaagccatcaggaagagaatcttctgtgctgcaaaatgagttgctgctgtatttgcgcgataaattagtaatatcggtagatagtttatggcatttagagccttttgggttatctagatacttctcactacatcgcttcgacttgttatttggcttctttctctctgaagaagaattatagtctacagtaccaggtgcatctcctgaagagggagaagatgtcttgatctcacaactttcatagttatccctttcactcgttaattgggtttccacacattgggaattgtcagaaacaacatcagctttaagactgctctcttcctcttcagaagtaatgacagaagcctcctcgaacagtttatcattctcatccgagcagctgttatcaactgaacctctgtcagtgttctgaggaaccttcatgccctgtttcccagtttcttcgacttccatcttcagacttaaaccttctggagggacttcccctttccatttcctgctgatgttcaagcgttcttgccttgccctttgctggaagtaatattgtctccgcttccacctcttacttgattttcgagccgaaaagcatctactgatggaagagattcccgttgacatatttaatgggttacggcgggagcctgcattcacgtggaaatggagaaatacgtagacgatcaatgtttaaacgagagaggtctcaaaatcttactgatatatgcatacacagtgtggatggcaaacgaaaaaaacattaaactc

SEQ ID NO: 68475 - DNA, 677 bp, Arabidopsis thaliana landsberg
ctcagaaaaccagtatactactaagattaaatgatatgctataagaatttggctcgccaaaatattttcgtggaagaaataatgtggggatgataaattactaaagcctcactaaaactcaaatatgtcatcatatcaatcaatatatgagtgttgagatttgccgtacatattatcttcccccaccaaataattgtacctacactacaccccaaacaagcatataagaacaagttaatttaggttaagcaaagctgacaaaagattagagggaaccatctctagtaagcttagcaagcaatgcattgataagtgaatccctcttctctgctctcatctcctccctcgaccgccgttgctcctctctatcccgccacatccgctccattgccaacctctccttctcaagctcctccatcttccttctccattcttcttctttctctgctctttccttctccctagcctcccatccttctctccactcgctctccattctcacttgatgtctcataaactcttccaacacttctcttacaccattattgctattactactattactaccgccttttcgcttctttgcaatgttctttttcggatttagaattttcgggtcgttgctgacatctactagctcttcattcacattctcttcttcctcatctgaagaatac

SEQ ID NO: 68476 - DNA, 463 bp, Arabidopsis thaliana landsberg
gggaaaggcctaggtcgaggcctccgacatctcttccactttggttttgcaaaccccttcacggagggcccagggcgggtccttggcgcacggatccgtcctcgcaccgggcccggggcggtggcgcagctccaggtcagcagagctgcccgcctggcgtggtggcgaagacgggaagcggtggccgttacgtctgtaaccgcatctgcgccccggggtgcggccgctctttccggacgatgacgccatcccggccggccaggaggacaggtcgggcagcccggtgacgtccgcgacccacgcgccgtccctgacctgcccgtctccgtcgtaagccggcgtccatgaagtcgcgggcactttgaggacggcgtcccagatgtcctcggtgaccgtcatgccgactgattattgcaagggccgggacctggcggtcagccaggtcaagaactcgtgcgtgccg

SEQ ID NO: 68477 - DNA, 677 bp, Arabidopsis thaliana landsberg
tctcatcggctcaaacattgacactctcttagttcatggactttttctgaagctgttttaagtggtagtgaagttgtatctggatgatactctttagataatctccggtacgcagattttatcttttctagatgagcatccgttgaaacacctaagaatctgaaaatgattattgttacatgttacaatacatattgaaaaataaaaataaaaagatatgtaatgagaatgtttgttttgctcactggtaatgagaatcaaaagagtctttgattagttctgcaaatttttcgtcactaaggagattggttttgtcctcatcaaccgatttggccgggtcggatcttcctccgatccagccttcgtccgggctttcccagtggattcttgtgtctactcctggagatggttttggcggtttagtcgggccttgtgacgatatacgcgtcactcttcttgctgttatccttctaaatgctttcgtgttatccgtgaaatgcgcgccgttttggattttgggtaggataatgcatgaggttcgggcataggtagaagttgcataagccatggctctttgttgaagatggtttgttcttttttctgcccttcatgtttttggatcctgttaccgcagaaacttgttccagaacctcaggggatcctctagagtcgacctg

SEQ ID NO: 68478 - DNA, 503 bp, Arabidopsis thaliana landsberg
aggacgatgcctatctatggtcagttgctaccatggttctagttccatgtttttggttccaccaacattatgtatgggactaggggggccagattctcttatttatgtctatggtttgtgatctatgcatgtatgtaggaccttgtttataagttgatctgcattattatcctttatactccaactttacacttatcatcaagtaatataaatttaaccactgggatataaaaataaaatttgactttgtaaggaattattgaatcatataaatatatatcttaatatcagatcaaaaccataaactttcatgtaatacattaatgcgatgtcgctattcacacatttagatccaagaaacttaaaaagtggtcctaaatcgggactttgcttcacttacaagaacagtactattgttgatgttctatgtatattattgtaacagatgattcacactgaatcatttgctaaacaacaaataaccaactgcttgagtacaacta

SEQ ID NO: 68479 - DNA, 695 bp, Arabidopsis thaliana landsberg
catacgtgaactggtggcatcttggtcatgagatactggcaaaacgtgttccagtcgcggcttttctgtgactcataacgacttagagtcggtggtggtccttatactatgcatttgcctttgtttctcgtgtttgtactcgtcatttctgaaagaaaaaccttcagaaccagagacgatggagaaagtttctacctttttttattattattccctttcaacttacaatgtctcggctctttatatagattgagcttacaatggttttacctacttgggcgcagctgagctgtccagcatatcacatcagcacaaaatcaagagggtgtcaaaacgacagttttttatttgcgcctccgtaccgtacgacatgaggataaggactggctctgcatatcctttgcttttggcttcatttgcagctgaccgttgtcatttgctggactgtgattttgttgagttttaattgggcttcactgactttttggcccattaccaaaacatcttcacgttttgagttttggtgttgtcgttttgataattgcttctcttaaaagtcccaaatcaatttggtttgttaattagattgttgacttccgcatccctaaattatttacgcagaaagttatgcaatgtgaacgcatagcacgagatcgttcaaattgataattttgacaatgcgttattgctctgga

SEQ ID NO: 68480 - DNA, 467 bp, Arabidopsis thaliana landsberg
  unsure (1)..(467): unsure at all n locations
cctgctcgccgtagtcaataaagaatttcatccacgttttaaaatttcctttgcgaacctgtaaatgcagggaacgaggctgttcatcatcatatccatcttcatatcccttcctgcgccaccatagagaagcgctgaacatccctacccgggtaaactcgcttccatggttccatacaatatccatcgcgctcaaagcgcccaatgaaaaaccggcaaaggatttatccctgaaagaaggaatgttatacgttttgcggataaaaggtatcagctcgtcaaaaataaatttggtatacaaacccgctttggcgccgcggcctttataatctgcggaataggcaacaccatattccagtnnnnnnnnnnnnnnnnnnnnnnnnnnnnnnnnnnnnnnnnnnnnnnnnnnnnnnnnnnnnnnnaatgaatcgagtatttcatcaaaaggcattcttgggaaggtcctg

SEQ ID NO: 68481 - DNA, 2181 bp, Arabidopsis thaliana landsberg
  unsure (1)..(2181): unsure at all n locations
catatctgaattggacaacagtctgcggttttacgcactgcacttcctcggatactgttttatagagtctctccagtaatctctcattgctatatccttcactatattttgttgttgttgcaaatgtaattgtgcataaaccctatgaatatttgccaaaccgatatctaaaccaatagaagtcaagagacataaatgcttgagaagtatannnnnnnnnnnnnnnnnnnnnnnacactcgagtccacacagttctccgagtatgatgaccaatctgtatctgtttctgcaaagagatttggaccagtgcttggtattggaggctgtcaacacagctttgtgtgattagttgtgtccagagtagtatccaagtcctggaactgtaaagaatactttttcctacttgtgattcccaaattcatttaaacgtataattgtaaaatacactgttacacattacaatgcaaaaaccggaaaatgcaggagattactcaaaactcagagagatttcttagttctgttaagcttcaagaactttgttttcctattccaccagcatggctatagtatattttactttgatatccttagtttgtatcctttcttgcttcgcctatcaccacgtcgagatcagtacctgatctactgttcgcatctaatcttgtttttcatttccctgagatgaattgctgctgctgggcctatcatctccaccatcacccttctgtcaaaaacatcagcacaatctatgttcagcactcttaactttctaaagcagagattcaagactatccaaaagaaatcgaatacaaatcaccccgttgcacgatttaccttgagtcttaaaaaggtcaggacactgtttacaagaaacttgagcagcttcacaggctttcttacatcgaaaggaaagtatctatacttgaacatgtgcacgattaagcgtttcatagttaaagaatacaaaaccaaccagtaacacaacaagatcggccagaacacaggcacatccaggaaagagaagaatgtcatcacaaatgcaacaacaaatgctttagtcgctgcatacctgaaaatcaaaattgacaaactttcatgagaattcaaaccctaaagcagaccattagacctaaatcagttctcatacgaattcactatcataacaatcatcaatcaaattgtctcaaaagaagaaatctaccagaactttaacaatgaatggtaaaaacacaaacttttcgacaaacctaaatcaaaatcatccatcatcaaaagtaaaagagaaattttaccagaacttgaactcaggaagacgacgaacaaagggcttatactcatcagactcatcaacaggtaaagaatcaggatccaaagcttcaagttcaggatcaactttaggggaaaggaaaccaatcaagagatttaagatataagtagctaagccataagagataacgaagtatccataaacagagtaaaccctatagatatagatcactgcagcgactaaagtcacaagccatcttcgaacaatgttaggagcagatctgtctaagtaattctgaaacgatttcgagaattcgattctccattttgcaagtggtgaagcaactatggtgtctgcttcattttcgcttcctggttcgtcttccatggaaattgaacacaaaatctgctttttcttcacctcaaaaactgggtctggttataaatcctaatcacaatcactgaacttcgaatcaacttcaaaaatcgattcaaaacaatctactcgatttaggatgattttgaaccaattaaattgaaagtttctcagtttcgtctgaatttttcttagtcgtattaaagtcttggtttttctggaaagaagaggaagaaactgaatgacgtggggagaaggaacatgacacgtgtcgcaaagtaagatacttttgttaaacatgttgggcttcataaaatatttgtttaagcccagtagggaaaatatgttgaactttttttggtttttacatggaacgattcgatattctgtgaggcccaaccagaaagaatccaaaaccgaatcttttttgtttctctgggaccttaaaccgaattttaacgctcttgcccatgattctctagacttgtaattctaaatgacaatcaccaaaaaaacactgctcgatggtcacatccatc

SEQ ID NO: 68482 - DNA, 598 bp, Arabidopsis thaliana landsberg
tactctcatctccttgttctgcagattcagacaatacggttttaagttacaagtgtcacgtttgttataagggcatgaggaaggattgacattgcaggtggaatctgttaactcatagcaattgacatggaaacacattaattgtgcttcttgatcattactatcttagagactgaacaaaattttcagttttgtgttatgaaaaggaacttattataaagttgtatgatttacaaaacaatacatttcttaaacagagaatccaaaatagaaatacattattgatattgacattacatcggtgttatcccccgatgatatcccaacctacaagtcaggttcccttagtgaaagtaaaaaaaaccaacaaaaactaactaattatctcatttatatattcaaaacactcaccatgagaccttctttcactgccaactctctagccatgtttacagaatcctcactactaacctgtttagctcgcacgtattctcaaaagtcaaaacataagcctttaagttgatagaatattatgataaacatggaaggtctagtagccttatacattacctcaacaactttgtccataacatccata

SEQ ID NO: 68483 - DNA, 601 bp, Arabidopsis thaliana landsberg
gagcgcggacgggcattgaagccaacccgagcccttcccatttcccgtttcgacggccatcacgtttttgagtggaccggcgtgattccacaccgacgacgtcgtcttgcgtgtacactcggaacgtctgtccgctgaatgcctgctgtgcaaggcgagcacgttcggcgtccgcacacgcggcgacaacggcggtgggctggccgctggcgacttccgcggcgaagctgggaccggagagcgcgatcgagggaccgcgatcgaagacgtcatccaccacgtcggtcatgagcgagagggagtgctgctcgatccctttgctggcgaccaccaccgccgcgcgcgatgacaggaatgggtgcgcagactcggcgaccgcgcgcgtgacgtgcgagggggcggccatcacgaccagatcggcgccggtcacgacatcgccgatctcgtgcgatgcggtgatggcggtgtgcaacgtaacgcccgcgagaaatcggttcgtgtgctgctgattgatggagtcgacgacgtccgtttcgtaggcccagagccgcacggtgtggccattctgggccagacgatccgcgagcgcggttcctcaggc

SEQ ID NO: 68484 - DNA, 527 bp, Arabidopsis thaliana landsberg
attatttgattgttggtctgaacaatggttctgattggaactcatagaccatgtcatcgaccattgtctgtagctcttccaagctgtattgcttttcctgcacgtcaatattatcaaaccgtttacttgtgtgagaagaaacaaaacaagatcagtgaatttatgtacaaaaatgagatttacctctcttttagtctgagacataagtgaaaccatctcttgaacaaaatcgaagtacccctattgtagtgaacaaaacacaaacatatcagctttttgtaataaacaaaaacaaattataaatatttgaaaacaatcacaatttgaagtaaccatgcatacctcatcttctccagaatcatagagtccaacgtcgtacgagcttcgtttcctctcatccgacaaaactaaacacaagaaaattgtttccagacaacaatgtcagtcatcggacaagaaccaaaaaacctcaaaacaaagtctgaacagatctttacctgaataagctttttgaatttgctggaatc

SEQ ID NO: 68485 - DNA, 325 bp, Arabidopsis thaliana landsberg
ttgtatatatattcgatgattaaatttgagcatatttttttctttatatatgaactttgatcatttagaacaaaaaatcaaaatataaattatacactgtaacgatgttgaaaatttgacaaatgattcttatttttttatttttttttttgctaaatatgatttctgttcatttttaatcttacaggttataatgacgttgaagttttgacaaatggctttgtctttggccattatttatatttataatctaatacgtctgtacctgacgtcatttctactattatattatacaataaccaattaaccataacagattaataat

SEQ ID NO: 68486 - DNA, 2178 bp, Arabidopsis thaliana landsberg
tcaaaatctatgattaaaacttgcaaagacgactcatttctcgtacagtaaatgacaaatacattgcaaacaagaatccaaagggcttaagacacactacattcatgaaagaagtattttgcagtcagttttaaatcttatcttaactaaacacaagactcttcaagatgagaaaagccaaggcagtgactcttcaaagattcatttccttatcaacaaaatgagccaagagagattcatatccaagaaagatcgatttagcttaagaaaatcattgaccagtattaaacacgattaacagagcactgattcatgatattataaaacttagaatccaaaagattcacagaacaagactcacaactaacggatgaaccctaatttctggaagagactattagtgttccgaattacgtaccattcagaaatctaggattcttcgtttcatccacagcttatttggatttgcgaagccgcagaggtggctggtgccgtcagagctctccgatcgctgcaaccaaaatgggaactcaatcaaaacctttgaggctgagctaaaccggttttaacgccaaccggttcaaaaccggttttataatttctcaatagaattagcaattggatcaaaccggtcttttcttatttgcatttttttgggtattagtgatgagaaggggaggaggtatccaagtatcttaaagagcttacaaacccaacaaaaatccacacccaaaaaaagagtataacaaaagaaacgaatttggattacaagttcttgaaagcagagtcatgagcatcctttggaggagtgagcctagccaacaatgccttgttagggcaatgatctgcatccacaaagtagaaattcccatcagccttgaagctcacatacggtctttgcgtgtctggataacgtatgtctgagaatttcagtgtctttgcgctaaatgtgccgagccaagtcatcatctcgacctcaaaagtgtctgaaccaggctgccacctcagcttgtgcacgtagggactaacaaaccagtggagagcagcggttgtggatgcgctaaggaagatcacagtagaggcaacagcacctttcatgatcacattcagtcccggggaagtcatgaaagtgatgaccgggccaagagagactgatagacagcaagtggagagtgagaggagtttcactttctttatggttgatgagattggtccatagtaaaccacacctccatccttctcttctttcttctcttggggtccgatgctgatcttgtgctcatcatcgtcctctctagtctttgctccaaatgatgcccagcttctctggctaagggatgaaacctggaatctgaccttcgggttcactgatgatgaccatgatcctgctattgaccggtgatgatatcctgaaaagaaatgaccataggcttgatgaatctgtggtatctcgtgaccacatactactgcttcaaacaacagctaaggctcacaatgcttcaatgaagtggaaaaaccctaacttgccatttctcatccaaatgaagcacaaccccagtttcaaatccgtttgagaccaagactacatattgcctaaccaattgctaaaactcaaaatgctacaagtgaacgggaaaaaccctagcctgccatttctgatccagattaagctatggtatataatgctcaagtcaatttcaaatctatttcagcttatcggatgcaaagtactttcaccaatcaaatcgaaaagggaaaccaaaatcacgagagtggtttgagaaaatggatatacaaaacccataaagacaatatatagcagccatttctactctaaagccgtaaggattgagcttttcccgtaaattgtataaacaccatgatcggacttgtttcccggaaaatgaaaggtgtatagtggagaaaaaaagaacctgaagtgaaggtggaggaagagagacgtcgggattgggagcgaagcaagtgaatcagagctgatcttcccatcgccgtttctgttgcgagattgcaaagattcaggtctcctcctccaaatgaatgttgtagggttttagagattttattttcctttatatcttactaaaacttgtagctttataaatttcttttaatggactagtggttactgtttctctcgtcaagcatgaagtctcgtgg

SEQ ID NO: 68487 - DNA, 640 bp, Arabidopsis thaliana landsberg
aaagttggcatcatccttttcttcctttacctcctaatctttgcgcgttttttgttataaccacttttatataaacatgcaaacttatttggtattagtattttgttaatcgaagaatgtcacataaatccgagttgtttttgctatttaaaatatctacaaatggtttaaggaaagcatctatcaatattaataagtcgtacataatacattaaatttaggcaatctcttacaactttcgtaacaatattaatggaatatcatatgtgctgtagatgattgggatgtatgagaaaagtaaacaaagtgaggccacaagacctttcggtgaagacatttttttttttttttttgcatagaatcaacttgattaatacgtcctaatttaggtgaaatatattcatacaactaatcacatgcatttcataataatatttaaaaccccattccttagacaaaagaaggtcaaaacgatatacaaaaatagttcaatcgaaaccaaaataaagcaaaatttatgaatacatgttaaaattatataaatcattctgaagtaactataatactaggttaatacttatgtttgtatataccaataagtgttttttaaaaccgaaatcatgtcaaaccgaaccaaatt

SEQ ID NO: 68488 - DNA, 186 bp, Arabidopsis thaliana landsberg
tatactagagaacaaaaaagtcacctaactccgatatatccttcaccactggagcaaccttccaagcaaattatcaataaggaaactcaaacagaacctatgttgccacctaatgctcaatcagagatcccaaatagtgttgaacaaagcaaaggcggtaataaactcgaaatcttgaaaagaatt

SEQ ID NO: 68489 - DNA, 536 bp, Arabidopsis thaliana landsberg
aggattcagcctccctctaatgtccacagcataaagaatcgttgattttctttcaagattggtttcttctcctgcctctgttgctacagagagtgccttgcacctccagaccaaagcggttacaacgtttaaacccgtcacgcgaacattaccgttactagtctctgaggctctctccttgagcttcttgatttgatcagaggatagcttgaagatcttgacgactaagtgctctgaagtagcttcgaagactgttgctgtctcacagtcttggaacttgacaagctcctggtgagggaatgcaacacttggaggatcacgagctttgataagagtacagtcgttgcatggacgtgttgataatggcttctcgcgaagtagagaagctaagcattcgaggaatgttctgaaactaagagcatccaacgtgagatggcttgatgagattcccattgcaaatccaccgcacttgaatgatgttatctgccaacatgtaataatttaaagtgcatacatctgcatgaaacttaactaca

SEQ ID NO: 68490 - DNA, 472 bp, Arabidopsis thaliana landsberg
gcatcagaccttaccctgacggaaaattggagcaactgaccatacaataaacaataaaaaggagactcgtatataattaggcgttatgccttcaagtgttcttcagtttccacttgttttcatgtttttttttttctagcttccatttcttgtttgtctctatgttcccatgttttataactctttctctttattttgcttctttttagtttgattttttgttttccatgtaattgtttataataatttcctgcaactatacttttatgttttctttaacaaagacaatatataataactcaaatataatgttataaacgtgtgattctttaattaaaaacataccataattaacaaaaatataagtgattaattaaaaccatatcatttatgatatttaaaatatattaataaaagagttgaccatatttaattaaaagattactttatagatatatatatatatatatat

SEQ ID NO: 68491 - DNA, 623 bp, Arabidopsis thaliana landsberg
tcagtatggttcacaggtacctcaccttatttgctcatgcctccattatatgtagtaactgattcattctttgacattgattgcttattattgttgtttgtggttctttctcttgctgtatatttttgcaggctcgttttcttctagcaaaactgaatccttgtgatggagatgctcatttttccggccaaagtaatgttttcacggatgatgttagcttgtctgtatttcttgatcatcttagacgactcattgttcattgatatgggcctgccatttagctaccgactttgctatttgttgtttacgtgagaaagtgagaaaaagatttaggcaagattcgttttttacattgatcatacgagatcaaaaaggaaaaacaccaaaaccttgatgaagaagtaaaacagatgatgttagctaaaccgagaaagtaaaactatcttaaaccttgatgaagaaggaaaaacaccaaaaccttaatcttaagtttcaaaaagaaaatcaccaaaataacttaaatgtaaaaaggaaaaaaagcaacaaaccccatactccatatcattcagccacaaaatatttgtataagcgaaaattgaagattgataaaagaaaaagggtca

SEQ ID NO: 68492 - DNA, 540 bp, Arabidopsis thaliana landsberg
tgcaatgtttgggcccgaggcctatgtttcggttgctcggaatacttgtgccttattattctctcatttctgagagctattggcctggcttgcctctgccccattctctgcctggaactccttgattgccttttccgtgactctcatcgcttcaatcccagaccggaacgcccagatatatcattgactgcaaaatagcctccctgatctcaatctctgtcaatccattccgcagtgctcccttggtgtgaagtgccagttctgggtacgctttttgggcggtcagaaaggccaaagctatgatggagtcagcgatgaagcatcaattgacggcctgtccacttactgagcaagctcctctgcttcctgtcaagcccagtgcgtgtccagactgtaccccaagcgtactcagtgatgagctcttgagccggcttacagtactcgttctggagcgactcgaccgctttggtaacgtattgctcgccgaggacctcgccacgcacctcgaggacctttttgaatgtttcgctaaactcttga

SEQ ID NO: 68493 - DNA, 218 bp, Arabidopsis thaliana landsberg
  unsure (1)..(218): unsure at all n locations
aaaacgatgaattttaaaacaantcatatttttgtgataaattttgatttgtagatcttctctgaacaacgtctgttaaaaaactttattttttgtcaactacctctattctttttttcttttaaaggatgtatcttttttctttctagcgaaacgacataacaccatactagactattacagctcatttacctatgtttgccacttccgactttaca

SEQ ID NO: 68494 - DNA, 128 bp, Arabidopsis thaliana landsberg
ctcctgatccacacattccttgggataggccagagacgcctgcgatttttacccaaaaccaataaagcaaaacgaacgagatcacgtaaacctaaaataaacgaaacgttggagaacaccgttttctt

SEQ ID NO: 68495 - DNA, 132 bp, Arabidopsis thaliana landsberg
attctttacttcctaggcgactctacgtttttttttaagttctttttaaaagggaagaaatgagatcttttgcgggaggtgcacaaaggaagtgagcgagccatcttctccaatccaataagaaaggagctc

SEQ ID NO: 68496 - DNA, 514 bp, Arabidopsis thaliana landsberg
aaccaacatggggtcaatggttatggctatagaacttctttttttgctttttcatatcaagaaactgtcagcatggggcagggaggagaatgcaaatgcaatgaaccgaaatggacgaccatttctaagcttatcagcatatatagttctattactatatactatattgtatgtgactatgtgcacgatatatatttttctaatactcgaatctcacacgtgacaacgaccttacgtgtatgtacgtgttgaatataattaagatacgttatataaacttctcttatctcacatattcaacatgtggatgaagatcttcgtattttttattttaatttttatgatacacccataaaccgaattattactagctagtagaggctataaatacgaagaagatatctatatacatactatctatcaatgccaaaaaaaagttcttcaatatatgcaaatatacaatcctatttctccggtgaaaaccatggtgaagatatatcctcacctggcgttt

SEQ ID NO: 68497 - DNA, 133 bp, Arabidopsis thaliana landsberg
atactgattatattttattactttcttctgaatttatatagaaatttaacataaatatattagaaacattggatagaacttttagaaaatatcaaaaaagcattttctaaatcagataaactattgaattaat

SEQ ID NO: 68498 - DNA, 499 bp, Arabidopsis thaliana landsberg
cgagccctcgtgcgcgacctccactccggacaggatccgcatgagcgtcgacttgcccgcgccgttgtcgccgacgatgggggtggggccgggcttgaactcgaccgacacgccgtccagggccgtgacgtggccgtactgcttggccaggccgaccgcggcgaggcgcgggggcgccgaggtgtccatcgcggtcatcggctcgctcccgccgcgcgctgtgctcttcttcgtgcggctcgcatggcgtgcagccgggcgcggtggccggagatgtcctgcagcaggaccgcgatcatgagaacgacgccggtcgccacgttctgccagaatgaggggacgccgaccagcagcagcccgttgtccagcgtggacagcacgagcacgccgagaaccgcgcccaggacagtgccggtaccgccgttcagcccggtgccgccgagcaggaccgcggtgatcgccgtcagctcgaggcccacgctgcccttcgtcggctgag

SEQ ID NO: 68499 - DNA, 1180 bp, Arabidopsis thaliana landsberg
aaagagccatgaggttccggaaattcttcatgttccgtctggcggtgattgtgttacgcagatccttctctatgagcttgaaaactgcggcaggagagatgatgatttgattgtgaagagcattgtttcgttgcctccaaagatggtacacagtagcttggctcacaagttttcttagaaaagtgggggacgtagcggtactcattcttgtccaagagatcagcgaggaccaagtggagaaggttctggcaattagacgaagtctagactgaattaggtcccaaacctgctttctgaatgaacaggacaagagcagatgatcttgagactccacatgggccgaacacaagcagcaagtcgtaggaacctgaagtccccaagaggccagacgggctcgggttggaagacgctgaagttgggcaatccacatgttaaacgcgtgttttggtgtggcccccttaaaccagatggaagaggcccagtctctagttgtgctccttggcctagtagcattccacgtctttgcggttggaaacacaaggtaacttttgtcttgaataacccaactgtagctatcaatctccggagcgcttggcggcgaaatttgagatagaagcgagtgaagaggcaaagcatgaatggatcttgatggctgaatagtccaaccatgagcatcacaggcatcggcgacggagctttgaagggggatgcgaagaagacttggcccattcacaccgaaagctttgattagagggccaagatggcaccaggaatcgaaccagaagcttgcacgatggccgttaccgagcttacatttcacaaaggcttcagctagagatctcaaattcagtaagcttttccagttccaagagtcagctggagaagcagtgatggaccagaagcttttacacgtcaagtggtgatggtgatgccaagcaacccatagagacccactacctgagaaaatcaaccaaaccagcttcaaacagagagtggaattccaaatacccaaacgtcgcagctctaggccaccctcagattttgggaagcaagcatttgtccatgatactttaactcctttagtactgtctaaagatccagaccacaagaacctagcacacatggactccataagattaatgcacgctttagggaggatgaaagtggaggtccaaaagtt

SEQ ID NO: 68500 - DNA, 586 bp, Arabidopsis thaliana landsberg
  unsure (1)..(586): unsure at all n locations
caatactgcaatttctcatttaataggagtacgcaagtaacgcaacgtttacatttatacatatgtccgtatattgtaccaggagaaggtttgttttgactaggaaaatgtcacaattcttaaccacaaaacaaaaaaaagtaagctaattaattatattatcccgattttgataaccaagtgaatgtaccctgagagagacacaagaagggaggcagggaatcatagagacatgtgagaagtcttataatctttgccatatatggaacaatggtatattgctaaaagggaacactacaataccgaaacatctagatgatattaaagaatacatagtcttgggttaaccaaaatattaaagctcttaaaagcttaaccctatagatccatgatagggctttagtttccaaatgctggaactctgttccccgtataatgttctctccctattatcatatatcctatggagatttcaaaagacaaaaatacatgtcgatacatgtgtgtgttgttagatagggaaaaattagtgatagaaggtggtaaaatcttgtttggngtataaaaaaaaacagtaacagaagtt

SEQ ID NO: 68501 - DNA, 503 bp, Arabidopsis thaliana landsberg
  unsure (1)..(503): unsure at all n locations
ccgaatgctcagtatttgcgcagcaggccgacgagccggctttggattttcacttggtcggggccgaagatccgggtctggtaggccgggttggcggcttccagcgcgannnnnnnnnnnnnnnnnnnnnnnnnnnnnnnnnnnnnnnnntggtcgtcgacgagggcgacgacgatctcgccggtgccggcggtatccnnnnnnnnnnnnnnnnnnnnnnnnccatcgaagatgccggcctcgatcatcgaatcgccgcgcacttccagcgcgtagtgctcgcctggcccgagcatttccggcggcacggaaatcgtatggctgtgcgtctggatcgcctcgatcggcgtacctgcggcgatgcggcccatgacggggatggcgacagggcgagagctgtcgtccgctgccggcgcactggcgcgcggaggtggcgcggcgacgcggccgagattgccctcgatgacgttgggttcgaaccgcgccttgcggccgccgagcga

SEQ ID NO: 68502 - DNA, 603 bp, Arabidopsis thaliana landsberg
aattatcatgtattgactggtgattgttcatatcaacgttttattttatgaaagaacaatctatgatggatgcggggttgatgaagcctttctgcaattatgtaaccttgaatgtttttctgcaattacagggttgatgatgatcgacttcctatgaagcaatgtgtggcgcctccctatctcatcctatcgcatgatacattatctattgtattgttctagctctctaactcttcattttgtgagtcttctttgctttatcctacaactatccagttaaagttgtgaggtctggttgctttcaaaatcgtatctcgttaacagatagacttttcttgacaagcttgctttaaggttggcggtctttataagtttatgatcccttccatcatggttgtctttctacacaatcttttataatcaattatttgttaagttgttaacaagaatgtacgactatgtctcagtttgttggagaattagaactcgtaatagtatttctatatttgcatttgattttttttctgtgtgtggctttggttctctttaattgtagagtatttgatgaagatggtactgaaccatcatactcttcaatgaaag

SEQ ID NO: 68503 - DNA, 497 bp, Arabidopsis thaliana landsberg
  unsure (1)..(497): unsure at all n locations
caaaggaaccacaccagattccaccacaacgcggtttagaatcattctagataagataaccgatttgtttgatgctaaatgggctttgatactaaatgggcctttatattaaatgagccgtttatgtccatttatctttcacacttgtgaattagcatgatacaaagccgaataagatgattcaccaattgacgacaaaacaaaaaacggatgactcaccaattcgttgtgtgcaagtaagtaactactatgaagatgatctttctagggctacgaaatagagaataactgggattagtctccacgtggattgacgagaccgcgcaatcgtaaaccgtctaactaaattgtactaatctttattattatcatttaattatagnatcgntacgaaactttataatatgaaaaatcgttttaaagaaaatgagaggaagagaaattgaccacttatatnttataaattaattatctttccttctttttttcccacatag

SEQ ID NO: 68504 - DNA, 1854 bp, Arabidopsis thaliana landsberg
atgctgtgataatggagtgcaagttaggtatggagtctgcactctcaattttcactatcacgtgtatatcagcaccactatctgcaaatatttgtaacaaacaatctcaaggttagaccaaaaaggaaagatcataggcaaatcattcacttaggatggaataggttccaagtatttactttgaaggtatttcttcaactcgtgtacaacttgagcatctttgacaaaggaaactgcataaaagtcaactttgttctccactccaaatttaatatcctcccaatccttctctgcggcaagagaataattacaaaaaataagcatcagagtaagatctttcagacttaaatatgcaacacttcaaccaaagcaacaagaaaaagtgaaaaagagggtaaacagaaaattcgaaccagtgattgaaggtaaagttgcactctttcctcggacattcaggtgtctccttgacttaagttctccaccatcaacaacttcacatttgacagagtctttggtctttgacttcaccataaacgacatcataccacctacaacatagtaaaagcgccatcaatatattggaaaagactaaagcagatgtaaaacccttgtacaccaaataataagatgtacataccatcaacaagaagcatgtcacccgcttccacgtcattaacgaaatcatcatagttaacactgacacaacttggtgtgctgactcctctctcaattgtaaaggtaaactcttgaccaggatctaacataattggctgaggtaaatctccactcctaacttccggaccctatgaacaatgaaactaatcgtcaaaggcgatacatggacatagagactctcaagtaaatagataaataggaaacaaaaacaaaccttggtgtcaagcatgatagcaatagtgttgtctttagtttgtgcattgtattctttaaccaaatcaataaccttcttatgtgaagcatgatctccatgagacatattcatcctagcaacattcatcccagcttcagccaatttccatatcatttctcgtgtgttggtcgacggaccaacggtgcaaacaatctttgtcttcctcctcactgtcggcttcgaccacatccctaccgatgtatcaccaaactgctgcatttccaacaacctctcaagctgctcctctctctaatccacattgtaagacaacaaatttatcatcagctcacataaagacaaaagaaattcaattttacagattgaaacagttacataacgcatcaaattgaaatgctatctcaattactacaaaactcaaaacccagaaataaaaaacgcagcttcaatacagaacataagcttacacatacgttaggcacatcttcaggagaaacaggaatgacttcagtctcaacacgagcggatctcacagtagtatcaaccactcttctgcttcttacagagactcttccacttctctttgcttcgtttccaagaaccttcactgcaaaactcgctggtttcaatagcttctcggatcttgtagacacagatccaccgttgggagataacatcgagccttgaattgacctggtagcaaccacttgagccatttctgattttgaagagaaggaattcgagaagtgagaagttgcaaaggaatgagaagagagaggtcgaaagctgagacagagtagtgaaggatttggttcttttcggcgggaccttacgaaggccggagaagaaagtggcttaatttcgtaatcgaaaaaagccatggacaaaaatcatttaaggtagtttgggaaaaattttaaaatttaaatttttttaaggaaaaaaaaaccataaatttagggaccacc

SEQ ID NO: 68505 - DNA, 409 bp, Arabidopsis thaliana landsberg
attcttaactttatgttggatttacctatgatggttggtctgatatagttactgttgcaactatttcttttctattctgtgatcgagacctcaatagtctttgctaattcgcaattcaacctaaggaaaaaaatgttaatgtgaggaagaaaatgaagttggaaattgaaaggtgtgtactgcttgttacgttttatgtgctagcgaatgactagcctgggattataattcttctcgtataccactttgagctgtgctcttatctgtgctcgcatagagtaatatgattcttttaaggggcgagaaaaagaaagccaactggctaatcctgcagtgcgagctggctcactgaccatcgtgactttcttcatacaggttcaagcattggtcgtctgtgcacatagcatct

SEQ ID NO: 68506 - DNA, 336 bp, Arabidopsis thaliana landsberg
gctccgccctctcctttgccgaagcggccatgctcgaagctgtttctgtcgccctgcatggtgttggcgtctccgagatcaagggcggcgagaccgcactggtcatcggcgccggaatgatcggcctgctgctgctccagtccgcccgcgccgccggctgctcccgcgttttacgggccgacatgaacgctacccgtctcaaactcgccgaagatcttggagccgaccaaactttgctgctctgcggggccgaccttctaaccgaaacacttcggatcattcagggccagagggctgacatcgggctcgatggctcaagaggctagcaagcctgaa

SEQ ID NO: 68507 - DNA, 563 bp, Arabidopsis thaliana landsberg
aggggcagattgttttagctctgctagagcggcgctgtgctcgcgtctcacccttcttttcctcgctcgaccgatggcaggctgagcggattcaggatgtactcgaagtacgggcgaaacgacggcctcagcaacccccggacgttctcacagatgaatgccttgggctgtatctgtctcaatgccttgaagaactgcgggaacatatttcgctcatcctcatacccccggtgttccccaccaaggctgaacggctggcatggcggtcctcccgcgagtagctccaccttgcctgacaggtagtcgaagctcaggtcctggatcggcccctcgacaagcagcgggggttcgtccggcttagggatagcctcagtctcgcgcgggatcgcgccattggcgcgcagagtctcgcacgcgcgcttggcgtactcgtttagcagtacgtgccggaaccctgcggcgtgaacgcccatggcgagtccaccgcccccagcgaacagctcgacgctggtaccgacctcctggatgccccgccgctgagtgatcataagataaatgtaccg

SEQ ID NO: 68508 - DNA, 161 bp, Arabidopsis thaliana landsberg
tctgctatgatgtatatagacaaagctaatctagaggaacaacttaagtgcctacgtccaaagcttttcatagtttgtttgtgaaccaaaaacagattgtacatctgaaggggccaaggaattatacagaaacatgaaacaggaattacggtcgttactag

SEQ ID NO: 68509 - DNA, 356 bp, Arabidopsis thaliana landsberg
  unsure (1)..(356): unsure at all n locations
aggtttgaaaccggcggctaaaacgatgccgttnnnnnnnnnnnnnnnnnnnnnnnnnnnggatcatttttttgtcgggactcggatcacttaattaacaaaacttttggatttagagtaataaaatntacttatttgggtaagaatactttagtttatttaatttacggatgaaacaatacatatcacataatgaattggtgtaagtgtgactcttgaaaattatagaaaagtttacaaactaaatttagcccatttttttaaaaaagattgtctatataacccaaatgatatttgtcaaaaaattctttacaaatttatattacagagctgatttcaatgagatagaataaaat

SEQ ID NO: 68510 - DNA, 525 bp, Arabidopsis thaliana landsberg
  unsure (1)..(525): unsure at all n locations
gaaaaatagcagggatgttctatcaaaaaaaatgcctgtgtataatcggtggagaatttacatgatataattttaaatacaaatcaacatattgataatgatatcaatagaatcattttcgtgctcttaaatttgcatatagatacggcggtatatttgttgcaaacccctgctttggccagcattatttttacggttaccaatgatcttaattacgaccagcgcatgcaccgtatctgcggctctttgcgcgaagcgggttatgatgtgctgctcgtaggccgcaggatgcgtcattcagtggtgctgaccgaaagacctttccggcagaaaagactgggttgtatgttcagtcgcgggtttcttttttacgcggaatacaacctgcggcttgccttttttctattatgcaccanaacagatatcctttgcgccatcgacctcgataccatactgccgatatacatggccagtgttatcaggaaaacaaacggggtgtatgatgcgcatgaaacttgttactga

SEQ ID NO: 68511 - DNA, 1161 bp, Arabidopsis thaliana landsberg
tcctcctactgatctgttcatattccttttcggatgaagacacggccgacttgagccatctgaattccttgtcagcatcagctacttcccatttggtggtttcgaggctgataacgaggtgacgatcttcttgaatcaatttataagcctcagaaaaacagcctttcatctgcgaacataagaacattagtaaaagacactgatgagagaagttttagagagttacaaaaattacacaagaactctcctctaacctgttcctcattatgtgcaatccttgctttaaaattctctacggatgcattaacctgatggagctgcttttccattacttgcttctcagataagtgagtgttgtaagcatgctttgtcttgacactttcggaaacaagctgaaatcatagatcaaatcagaaatctacaaaagatgtgttcaaaggctagatatagttaaagtcaaagattggaattgagaaaagatgaaaaaaaaaacaaaaaacaaatctcagtatcaaagtgtcctattaacactaaaatttaccttgatattataatcgtcccgctcagccacctgctgcaacaaatgttggttctgtgtctgcatgtcttcataggcttgacctatagtctagagaagtaaagtattgatgagaaacgagcatttcgactttcagatttctaataaactccttaagaacattaaaataggaaaaacgagcagaaggatgattgtacctccatttcagcaatggatgcctctgcctcctgctctttaactttaataccctccttaagttccaaaacctccctgcaaatgagaaagcaatataatactgattaatgcccccaaaacggtgaaaagaatataatgaatgaccttggatgtggtaccatgagagagcatacctctcagaaagatctaactgagtcctcaattcagcaatttcagccttggcggtagcaagcctttcttggcaagcactctcagtctcatgagccgctttcactctcaattcaagaaagtgttcatccaaaacgtttttcagctcttcagcctgagcttgggctttccgttgtgaatccttgatttctgccagtcccctgaaattgtaaagctcaaatctcatgttttcagcacaatttgaagagcttaaacacact

SEQ ID NO: 68512 - DNA, 1554 bp, Arabidopsis thaliana landsberg
aagcttcgaggtttttcaaacacgtaagaaagtcgtcatgggagctttagcggaagtgcggaaccaaatgaatgtaacttttttttttgtcttgttctcatcagattcctcacgagatgcatacagtatacatacaagtttgattttattgagccaagtttctaaaagtatctacatgcattatgcataagagtcaatttttacgtaagaacactttctggttggcactagtttctttctaaagcctcggtcaaatcttgaatggattttaattatttggcaaacaaatttaatcaagtggggaataacacaccaacattttactcgttcaataaatgtgtttatacgtttgaaaaaaccaagttcaatcttaaacttttgaattgaaaattgaagcctttcccacagtattaataatactaaaacagtaacgtagtcatatcaacatttcttaatcaaaggagattcactacgaaatgattatcgtagatatgaaggttatatcatcttcacgtgcatttagagccttaaatgttaccggttcattgggtctatgtatctttctacaagacattatctctacctaacaatagatagctcacaaaacatcactttactaatcccaattatagaatagtttcattactatcaaccaactattgatccaattttgttcacataattctatattgttttgaggaaaatacaaaaccaactatctccgtccatttgtgatgtctatgtcggtccccatgtcataaaaccaaggcataaatggaggtaacacaaacacgactgtcacatacctaaaacctacactttctccataaagaacccacctaatttttcatcaccctcttagctggaaaaaccagagattcagtgttttaaccgatacatatatgacatatctaactaacaattttatggaagagtgggaaggaagatgagactgtgtggaccttaattaagtttgttatgtaccaacacatagtgcatttgtgtgaatgttttgagttacattttgacaagccggacgtcattctggccaaaggcggtaccgcagcctggacatttccggtgtcggatctctaagctacgttggatgcattgctggcagaacagatgataacatttcacaattaccacctgcaaataatgtttgaaacaaaaagcggttgttgatatgcgctgaaaatgatatcttctgatgcatgatatatgactatcgatgatgattatgacagtgatgagaaaggattatcgaatcattatgtctgccttgacagtgagatataggattgttatgagcattgttacctctttaggccgatcaaaacatacaccacatttgaggatgtttttgcaattcttaacttcttcctggagcctcacaattgcagcttctacactctcagaacccaactcttcaagctctttgttcaactccataagctcttcctcaagcttcttcttctccctcctgttccatagatagaatttatatcactgtcataatatagtaattgggttcaaacaagagatctgttttta

SEQ ID NO: 68513 - DNA, 749 bp, Arabidopsis thaliana landsberg
cgtgctctgtgctctgagctgatttgtcagtggaaaaagagacagagaggtgggacccatctccgccatagccaaagacctctttctctcccacctcatacctctctactctctgcccatcattgcccccgacgaaactctctctctctctcgctctctctctaaaaagagaaacaaacatttctttagtgtctctctctttcatcatctctttaccttttgcttcttcgaaaaaaaaagagaaataaattctaagaagagaaattgagagcttggtttttctttattggcatgaatttgtaacttaccagagataataaagttagggttcttttttttcgttctcataaatatagtaatctttctatttttaagtgtgtgtgtgagtgttgtttgggaataatgggtaactgttggtgtagatttgagcccttaaaccacagagtttctgcaaacgctaaatcaggttctcttttttcctcttcttcttcttcttcttcttactcttaatttggatcttctttcttttttctgctgcaaattttctgttactattatggcactttttttaggcctgaaattacgagatttactaatgggttttatcccaaaaaccttgcgcaaacttggaaatatctgtcggttaaccgttatcaccaaattactttcttggtttgttctgattatgttctgtttcctctggttttttgggttctaaatctgttccattagttagttagagttttcta

SEQ ID NO: 68514 - DNA, 517 bp, Arabidopsis thaliana landsberg
atacagagatggccaagaagaatctttttgttaaaagaggttagctcaaccttgatgacataaaatggctgtattttatctatcttaagcattagtcatgttactgaagcatgtttgatacagttttgtgcatttatacggggtctcactacactctcccctttatctagttccttacttcctttgttaatatcacaaaccatatataacctttgaactcaatctttattctgtaggtattgttggggattcaaatgcttatgatcaaagtaagcgcctacgaactggtggtgactgcacacactctgtgtatagtccatctcctttccatcctccacctcctcctgtgtggggacctcctcatgggttaggcatttgcttctccttcatatttcatatgctgtgtagaaattggacgatgtgtatttggtacaacgttttatgttaagttgcttatttgacaagaagataaattggttcagatatatggcacctgcacctccaccatatgatccct

SEQ ID NO: 68515 - DNA, 398 bp, Arabidopsis thaliana landsberg
ccatcaccgatggactaaatcgcttttactaaacgagacacaatgcttgtctgacccgatcaaaaaatctgggtggacctttaccgatgaacttgcttctgatcttacttacccattggactatgtcacttatgtgtatagcgaagaaagaaaccttcttggtgttcaaaaacacattgggaggaccggcaaatctgccgcgtacatattggactgaagaccgtctacgtttgccggctgtgcatacttatatattatcattgattctattaaataattatgacggagcggtccggagttacccttgtcagggagtaaatctgatgatagagggactcgatccctcactaaattgaatgtgagcggataatcagagtactataacattcattgttgac

SEQ ID NO: 68516 - DNA, 592 bp, Arabidopsis thaliana landsberg
cgtctacgtgcaactcggttcgatctatcagacgtgctttttatctttaaatttctggaggcatcttgctaaagggtcgtggtagctcctcgagcatcggcctatctacaccaatatcaacaagttcagccattgctctatatgtatctgcattcgtcatactgtttgaaagaccctgtgtgtcgcctaggattgcgttcattaagaactttccactttcaggcgtaacattccatcctatttctttggcaaggtgatatattaattcgcccgtagaagaagtgtctgggttattgagtaagaccgtagcaaacggaacttcattctctactgtgccatgatgatcgagaacgatgcacggttttgacgcgacccaaccctgcttgcctgattcgctaagctcttcgagcagcgtcatggtggatgcatcgacaatgaaactaagatcaaagttagaaggaagctcgctagttacacgttgccagccttccatgtggtgtaaatagcctggcatatcaactgcacagtatagataggtgtttttaccaatgtcaccaagaatggcttccaggccgagagcactccccaagct

SEQ ID NO: 68517 - DNA, 973 bp, Arabidopsis thaliana landsberg
tctcttccctttcagcggaagaggagaaatcatttatcattttaagtgtatcgacgtaattccccaaacctcttgcgacgcgaactaaacttttcttcttttttctccatctttgagggtttcttgaggctttctttctttcttttaagtagagaaagagcgtgaacgatgatgaatatatatcatcagaggaaacacaaaaagacgttagtcacatcagcgctgacacgtggcctggctcgctcttgcttattttgaatttaaagtcctcgcttcttttttcttgaaaataaaatacaaaaaatacagaggaatctgatcaaaaacggactaagtttacatgggaaaattgaatgttcatagagtgttgttcctgtttcatggttctactaatgagtgattcttcgccttggtcattgtgaaattgaattatacattagataagggttttcatgctctctagtttagttttgtgtttccttacaaaagatcgatctcatctttgtgttatcttattgtgacccgttttgttctcgaaagttatgtgaacatgttgcattttgcagagcataattagccttcactagttctgtaggtaggtttcttgctcagacacccttagtacaagtgaagacgacacaaatgctgaatttgtcacctctatgatgaaaccaagtgatcatgcaagccattagagccagacacatttgtatcagagcatttccaaaccttatctttctttgattttccattctcgtgagaagacaataactatgggttgtgtcatagctcgtcagcttgggacagtttcttgcaaactcacttactcgcatcttgagttgttcatatttgcaggaggatgaggaggaggtcctcttagctcacttctacagctgtcaacaaacacttgtcctacattgcaaaaacaacctgaaactatgtccgagattgtggtctccagctgtctcaacag

SEQ ID NO: 68518 - DNA, 2447 bp, Arabidopsis thaliana landsberg
  unsure (1)..(2447): unsure at all n locations
ataagttatgtactaagaaactattatataaaatgctatgagctgttaatgatcctcaatttcatgttttacgcgtgaagtgacagataactttgccagaatttgatggtaaaaagacttgagcagctacaaaaaaaatatatactctcttttgaatttaaggttcttggattgggattagtcaccagatgcaatctactgaaattcctaccaaaacaagacatcattgaaagacacgacttgcacctttggatagtgaagtgtgaagataaaaatgtacctcatgttttttcttaagattcatgccctgtgaaagaacggtgctaagaggtaccatatccacgtctgcgagtatctgccaacagtcgaaaatgattaacctttatttagtctaggatctaaaaatactaatcctgaaacagcacaaacaggtaaagagaatacaataccgcctgtaaatccgcttgctctcgaggaaacgatagagacctcaacgtgtgaacaaattcctttagtgaagcaggccagtgatcctataatcaaatactataatcaatcatctcctttccaaactaaaataaaaatctaccctttctatcaaatatctcaatcatgaagactgagaccagaactttacctggacaccaccggagggaataagaagaatattttccggcttctcatcctttaagcaactcatccattcctcattaacagcttcccattgcttatcctggaatacaaacccatcaatcaactcataacccaactcgaagctgaatttaaaattgtttccgataatcgatcataccttgaagaaattgacaacgtgagcattgattaggaaagaaaacggtttaaggaaatcgataatggctgtgatccattctagggtttcggctctcgttttgcaagaaaacttattgctcttcattatcccgatgacctgagtagcagcaacgattctagtttccgccgccaaaagccaaccaaacagcaaacacttgcttttaaccgtcaaaatgttttctaaaaatacctcgtaaattttaatttattcaatttagcccacatttatttattctgttgtcaatacacccatattgtcacgtggccgagtcttcaagagactctaactgcaccggaaggttttgactcatgccccctcctacacttcctctcattctcttgtattaacactctacttcaccaaatacaattatcacaaaaatgatagcaatacacagtaaatcttttaaaccatgttccaaagaatgtagcagaaagcaaatactagtattcgtaatatttaaactaaacaactggttacataaatccaacatgaaaactgactacttaaacttaaagcaacttaaagtagacccaaattttagttactgatgtttgtcttgatcgtcgccgtcttcttcttcttcaccgttttcatagtcatcaacctctactgcgacttgagggaagtctctatattcgctacacatgttatgaccatatatgataacataaaaggtcctgtcgcggtcatagatgaactgcaaatacttgccatcttcgagattgttatcttttacaaaattctcccaaccaactgtaagaaacactttctctcctcttttcttcatcctaaccgtccaagatctcccactatagtccaggaggtccacagttattggaaatggtgctgggaagtattcgttgaatcccaaggggatttcctaatcaaacatttatatataaaaaaacaactctcaggagacattccaagagcagcaacgtagaaacaatggacttgctatttttcacttttcagccccgcagaaatgtttggttcaagcagcctataacaacaccaacacataaacttcattctaaatctagcaagattcagtaagctttcatttgctttttgctaatttaaagctaacaaaagcaattaaaggacctaagttattagctccatgaaaatgaactaaagcaatttaccctaaaccataagtctccaaatcagaacactaaacacatattttgaacttgttgaaataagaaaataaaaaagaagaaagatagagagccatgctcaccaatgatttagatgacttttctgagatgaaaggcttcataaattgaacctcaccagtgtcagccatggaatagagtgagaccaaatgtagctacaagcaaaatccagaaattgaaatgaagaaaacaaagagaagtgaaagagagaaaccttgaaaacaaacactttttgtaatgcagaaacagagagagagcttcaatggtcccgagtggactatttcaattttctctgtaaatcaaaaagatgaaatgaggaattgatgtcatagtcaaacaacttgccaccttttgaccaatcactgcttttctattctacaaggccacaccatacanaaagtacaaaaccaaac

SEQ ID NO: 68519 - DNA, 755 bp, Arabidopsis thaliana landsberg
acaacttttaattgattcagctcaaaacacttccatatatgtagtgcttaggaaaagagacggactcagatctccagctgataacaacggcttgtggacaataactcagatctctggctgaaacgagatggaagaggacttcatgtacaaaagaaaactataatccaaacataaatgcaatgacatactaataattaacatgacttattaattatggactaagccacatatcaaacaggtggcatgtaatttgtgcaggccgaattctaatactcttttcgaaaaaatctaattccaaaaattgagtcacaaaggctcgccaattgtttgctgtaaattctggactcctaaacccaaagcatatatgcaacatgaaatgtactgtatatatttgaataaatatttcaattgttttctgaaaacactgcacccaattttgtattattccaaatttcaaataatagtatatatatacataagaaacatgtcccatggatgaacattgtctctcatattatgtgggggtcgctttgtttgttgagacagagaataaagagggagtagaaaaaaacagctttttagataatgtattaaaatgacaacagtttgtaaagaattgagaagatcacaaaagaaggttttggatggattcatgaagtaaaattttcccacgaactagtacctgtttctgcaatcacactattagataagtacagttctcacgaattttccctatgttatataccaactttagc

SEQ ID NO: 68520 - DNA, 2431 bp, Arabidopsis thaliana landsberg
accttcctgcaatcatctaccgaaccatccgcagaacattttgcatacatatcaactaaactacattcaacatcatccacaagccctgatctaatagcccaagaatgcaactgctttcccaaagacaagttctccaactcagcacaagccgaaaacacagagcttagtgtgaacttatctgattcaaatccacttagaaccatatccaagaaaaacctaatcgcttccctaggaaaccccatctgcatacaccgagtaatcatcaaagtccaagtaacaacatttagttcagacattttatcaaacaccttatacgcattctcaaagctattctctcctttcacaaacatgtcaatcaaagaacaacccacacacacatcagattcaaaatgcccagtcttcatcaaaaaccctaaagtcactctaccaactccaacaaaatccgaattcgaacaagctcgtatcaccggggggtaacaataatcattaggcaccaaacctaactccagaaactcaacaaaaaccttaattgcatctaattctcttccgttgttaccgtaacaagccatcatcgcactccacgaaacaacatctcgcttaccaaatcttctcatagtctcaaacacatcttcagctttcgccgaatctccagatttcgaatacaagctaatcaacgaattgtagagaaccgaatcaggctcgatatcaaactcgattaatcgagcgtgtacgagtttcccgagacgaaaatcgcgtgctcggatacaagatttgagaagtgaagagaaagtgactgagtccataggacgaatcccatcacgagccatgagatcaagagctgaaaccgctccacgaagatctccggcattgagatgacggagaatcaaacggtcggcgacgttgatccgatttgaaacggacggttgagatttaatcggaagtttggcgggagatggaaacgaaaagcttatcatcgccattgttctccaatctaaacgatccgttactgttaattatcaatatcacacaaaatttacattatagtcccttaagtttgtggaaattaaataagacacaaaactattaatttatcaaattacatacatagttcataaaccctaatttatagatatcacaaaacccagacttggaatcagtttctcttttcttccctctttctctgagctatggagattactgtaatcgcttcttcctcaatcgatgaaggaattggaagttgggatctcaaaaccgggacagagcagcttcaattcaagccgtgtgcttctccggcgcatggtctcaccgccgtcggcgaaaaatttctcgcctcctctcagctctcggcgagaaatacttctggctcgattttttactggtcttggactaaggtctcattctcaaacttgaaatcactgtttttttgttctctttggatagaaagtttgaaacttgttttgaattgtagcctcaagctgaagtgaagagctacccagtggaaccaataaaggctcttgcagcaaacaatgaaggaacttacttagttggtggtggaatctctggagatatttacctttgggaggttgcgactgggaagttgcttaagaagtggcatggtcattatcgttcagtaacatgtttggtgttctctggagatgattctttgttggtttctggatctcaagatgggtctattagagtttggtctcttataaggttaaaactttgtgtattatcatgcttgtttttttgcaaggcattgtcttttattctgattctttgctctttgtggttagttaggctatttgatgatttccagaggcagcaagggaacactctttatgaacacaattttaatgagcatacaatgtctgtaactgatattgttatagactatggaggctgcaatgctgtgataatttcctcttcagaagatcggactagcaaggtacttatttggatcactaatgttatgcatttgttaactgcaatgaaagtttagctcttgtattgttaatgagattcattttgatatagctgagaaatagaacctgatatagcttttttatttgatgaccttggttggatttgtaaatccatataggtttggagcttgtcaagagggaaattgttgaaaaatatcatttttccttcagtcatcaatgcactcgcattggaccctggagggtgtgtgttctatgctggtgccagagacagcaaaatctatatcggtgccattaatgccacaagtgaatacgggacacaagttcttggttcagtatctgaaaaagggtacttaccgttccctatatttcaatcgttgtcaacaatcctagtcaatattcttcttacttttaacataatctaaatcataatacatgtatttgaactggagcttgtagtaattcttgactaagatggtatttataga

SEQ ID NO: 68521 - DNA, 497 bp, Arabidopsis thaliana landsberg
ccatcatcccaagttacatctcttgtataacacacgcccacggtttttcggttacttatttgataccaacaataaaattggtcaagccatataccaacaataaaaatggtcaagccatacactgacaatcattaagtactactatcataattttcgtttatttcattcactgacaatcaaagttattttcacaaacaattaccatgcagtcaaaccaataaaaagttgagtttatttcattaattttctaaataatcttaaatataataactggccatgaatgaaaattaaaaaattttgagtaatctacataagattgtgacaaagacattaaatacacataaataattggttttcattttcaatgagtctggaccgaaagtaacaagtgtattagtgtaacgtcaatattattattaaacaaaaaacataccgtgttgtaaaatgactaaagtaaccttaaccgacagcgatagttttaagaccaaaccagtaga

SEQ ID NO: 68522 - DNA, 481 bp, Arabidopsis thaliana landsberg
  unsure (1)..(481): unsure at all n locations
tactacctttgccaccagagaggagaatggcgccattctctatgttttccttgacgagactctcagctttttcgacgccggtggcaacagccaaggcaccaatggtagttcctggagcagcgccatggccatggaccagaatgtccgtctgctccttgagtaggcgggcaaactcgtcctacactcccgcctgcatatacactcggttcgccgtgatacatgcctggccaacctgccgccatttcagggtcatgagctctgacacagcgtgtccagatccgtatcttcgaagacaatgaaggggcagtttcccctgagttccattgtcacctttttgacaccttctgcacaatgcttggaaatgagggagccaattttggtgctcccagtgaaagtaacctttcttactagagggtgcttgcacanagggtcgctcattgaagtctcattcgagtgactcgtgggcaggacgttaaaaact

SEQ ID NO: 68523 - DNA, 1405 bp, Arabidopsis thaliana landsberg
gtttcccccgatcccttttctattcacagaatcaaggttttttctgaaattcccagactctgttttccacagaaaagaatctgattctgaatgcggcctagcagaaaccgatataggcatactctgtagtctaccagacctaatgcctgatagcttcagagagaagaacacggtgcaacccagtaaagcagcaacagatacccttccgatcaaactgctttgagagagccactcatcccatattttatttttgtgtacaccaaggttcctcttcagttgaacagatggcatactggcactggtttcatcattattcttggctgataccactgggctctgcaaatctgttggtgtcaactgctcgacagctgtataaagatgttgtgacgagttcacgaactgtgttgtggaaagtggtctttggttcgtcttatgattcatgatcgaaggtgaccccattttcttgttttctggatatttcttttcagcccggaaaaaattggcctgcagaaagttgtatatatgattatctttctgcataaaaatagaactgctatacagaatcttccagtagtgatctgattcttaccaaagatggagaacaaccccttgtgtctggaaagttagcaagcacggactccattagccacgcttcctggtcaattttataggtagcatgtatgaaggtcgctatcaatctttctatgaaaaaaaatcagagctagcgaagagatgtacatacttgcaaaatttccaaattaaatttagtgcatgaacccaagggcttactcaaacaaatattaagatttatgtgtatgtacaaccaatcgaaaaagaaaatgttaacggcaggcatacacaatgctgttaaagcatattctatgaatttaactaccatccactaaatgtatctatttccattgtttcaattacagcctgaaacatagctcaaacttattcatactccactagagttgatcatgccatttacatcaggcatagccctcgctctagtcgtagcaacaaatgaacacatattcttggtaaaaatcataaggtttaccagtgagggagtagcagaagtacttctcgactctttccccaagatcgaattacgaacggcagagtctgaatttgattccagctgcttaagtttttccagggcctctgcctcggaaccctgtgctatccaacatgtaggtccagtagcacttaactaaatgaacaacgcaaggatctttcgaagcaagtgaacttgaagtaaataagatgcacaagcatagttgatagggaaaaagaataaagaaagcaagaggaaaaatacctgttttagaagaaatgagcaaaaagcttcctcaaatttcagatcaacaccttctgatgctatgagacattggcatatcac

SEQ ID NO: 68524 - DNA, 758 bp, Arabidopsis thaliana landsberg
gattggtgtcgaagtttgcgttatatgcaatttctttagcctccgtgttattttccaaacaagccgagtcaatatttcatagccttttaaggcggaaaactttcgaacacagaatgatcatttcactccagattataaaatttaaaacgaaaaaaacaaaacttttttgttcaaagaagatttgcttgattagtcgtttccaattcgaaaaccaaattaattttcaaaatctatgaaaataggtactttcttatttacagtcttacaatacctaaccataatcaaaattgtagtgagaagatttgaatccttagttctcaaaccttatgatgaaatttataaccactggatcattatacattgtctaccaaagagagttttgtaggaagatatatcaagcttaatagaacaaataagattgccaatactactcaatagaatgtgttttatgtctcacaatatgtgtttttattactcgaattttcctttaagcttaaatgagagagttcaatattgaaaaaatatataataaatttaatataatgtgaagttaagttttgtgtaaaatatgtaagttctgactaacatcatatttaatatacctagatatgttatcaattatctattttgttttcaaatttgatacgtccacttttacatattttgaaggaagtttataagttattattttaatacgttcttttttatatttgaaaatagtgaaataaataaatgttagaaatatataatattatttt

SEQ ID NO: 68525 - DNA, 3044 bp, Arabidopsis thaliana landsberg
  unsure (1)..(3044): unsure at all n locations
gccaaacccgccttgtgaatcaagaatattaattaggccctccagtccccccattattgattcaataagagactcgacgtaaagcacagcatctcgcccaaatttggtaacctgtggaggaagacaagaacatgacatttccgtttaatagaaggtgtcactgatatagagaggtgagacatgacgggatagacaatgagaattcgtggttcaccaaaaaaagaaacattatgttgctttgtttaaataaaaaagatgcatactaaagatttgtaatccaaaagtagcttatggaatcaataactttgtctgctatagcacatatgcaaaactgataaaaaggagtcagattcaattttacaaccacttttattgtttattgtcatattgagagtactatggtgctcgttgggtggtcttaacactacaagaatctcatgatccacagatgttaatacagaaagagtgcaaaaagcactgagatttggattatagatttacctcctcaggaattattagtgaagcacattccgggaaactactagccacactgagccatgcacaacaatgctgaggacgtccttctggtccaaacattgtatttctgaaaaccttttacaaaactcaaatgttagattatgcataagatgacatgggaaaatagtagacagtgaacaacaacaggaagtatacagttgtgaggtgttgatggtagaaatataatttcttcagacttccatgctttgacaattgagactctaactcatcaacacatctgcattaatgaaattctgcaggatattagtcactttgattctctagctagaagttaaccaagtattggtatataaggccgggaacagtacctggaccagttatatgcagcatttccttccgatagcaagccctccttcccagtagagacagtggctttttccaaatgcctgatgtttatcgatgatcgagaagaagtggcaatcatcaaaatggacaaccaatctttccggaaatcctgtacaacaagaggcactgagcattagaaaatagattggaagattaaacatattaattgtgttgggaccagactacaactaggatttgaagacaggccaaatgggaaacatatggaaacatgagtgaattaactatatagtgtatattgattatctgtgaaagaaaaatgtaattgcatcatctgacttgaaaataagtggatatagtccatcttacagataggtcacatgtgattgcagaaacattttctccctgcgccttgggtatactttcgagatgttgcacaatacgctgaaaaaggcctttcaaggtaggatcaaggtccagagccacaattccaggagtacccatcaagtaacgaatccttccagcagatgaagaaaggtatgatagtgcataacctcgagcagctgcatttcaaataacaaacaccattaaggttaccaaattttgaacatcggtactgatcaatgagctgcaacgggtccaacaccagagtttcaagctcatatacttaaaaaccaatgttcaaggatgtgatatctaaaagtaacaaacctgagatgtacttgcgcactaaacagcagagacggtccattccatcgagcaggaagccaatggtaggatcatttggatcctaggaaataaggaatgataaatcagtaaataataaccaaattttgagttcactgaaagtcaaaagttacagtgttgagaggctttcaaagttcaagcaatcaacttactatgtctactggtatcactcgagcagctttggatcttgaggatgcaataccagcatgttgaaaataccagagaacctcagattgggccaaagccaacgcagagaataccatctaagggaagaaaagtaaataaatcaattattgggaaagtttagggaagggaagaactcttatgagtataatggatagatctatgcagagcatcaatgatacgtagttgacacagaaatcttgtaaaacttttcatttgacacttttggtagattaaattctatagaagcaatttgttttttcttctcaaacaaaccaatagcttcaaaccctaatatgaaacagactaaaccgatacctgaatgattggagccagcaaacttggttgatcagtgaaaaaataaaccatccgccctatttcctgcttcagcaatattctcctttctcggtgtatggtatcacataattgcaatgcttgctcatgcaccttactgaatttagcgaccaaacaaaagtaaatctataaattcagagctaaagtcacaaaaattctccagtatcagatgaggattacaaagtactgaactattaaaaattggagttacctgatcattttctcaacttgttttgctacactatattctagatcagcttccttttgtttagtccgtccagacttagccatcttctttgattctaacactcggggtaaaacatacaactggtagtcttcgtgcaacagaatgtactgcatagttagattaatagagtcagctgatgcaaaactaattccaataccaaactctttttcgcagaccatttgatataaactcacctcatcccggaataacgtcacgactaagttttcctttagcacgacctgaaatacaacaggacagtattagagacagcacgaattacacgcaatcttgatttgttttgagcatcaaaaacctaactccattactaatcttaagttaaacaaacactgaaaatgaaagcacttaacattttacaaacaaaggcagagagaggcagaaaatttctgatttgtgaaacaaatttatagaacctattattgaccagataagatagttttcaagatagaatccttggaggaaaaacttctttatcaagatcacaatcgagaacaaaatgaaaaacagattcataccagggcgatatcaatgctagtaacacgaagaagctcgtcggggcaaacgagatatccaagaagcacccactctcggtacgaagtaacatttgcaagatcttgcgctntctgtaggaacc

SEQ ID NO: 68526 - DNA, 1751 bp, Arabidopsis thaliana landsberg
ctaatatagagttttctctaaaataaaaaaaaattagtaaaaagtaagattcgtctatctttttctattttagaaaaatccattaaaacaaaatcaactcaattttctgtaaaataaataaaataaagaaaatagtatacgtttgaaaggttaatatttttggctgttaaaaatagcatttttattgtcctatcaaaaataaattgtacgtttttctattcttctatacaattatttttatgtctactttttttttaccgtggacccatcgaccgatcccatctaatgtatggatccactcacaggattcacgatccagtatctacccacacgccttgacctaaacattgcgacaagaaccacacgtgtcccatggttctatgctttatcatgttgtttttctgatgcgatgttcatcactagttgaccttttttgttactctcattttagactttcctttttccggctagttttaacgttgagatgcatacaaacttttcgcgtgattacgtcaattcaagtgggtccttcgtcacgacaacgtttaatattattagctaccaactcttatttcttcaaataaatgcttcgtcttctctttcttttccatgtagagattttggtcattcaattattaactctcctattctctattttgaattttgtgatggaaatcttcaagccttcaacattatttagtagtaaacacaatgaataatttcctgatgctagtatataccaatgtttcttaataaagcaattatgttcttcataagaaactgatatcatcataaatagcaacttatggttactttcataaattgcatattttccctttatgaaaccacaaagaacaaatatttgtgaaaaaggaacacacagaacttacctaaatctgatagatgagaaagcagcagagcatatatacgcacctctttgatgaatatttcttcttatatatgtgctaaagaaagtgtcagtggagaagacaccggagatcaaattcttctttcaattcatcatttttgttctgtttctaatttggtttatactttttggtgataactcccaagataactcaaacatacttgttatgaaacaatataaatcaataaaaagatgaattgataaatctcaacaatattatatatacacatgtaacataaatgtgttttaaaacaaaaacttatatataccatcatacatatgattccaaaatatttataagttttatagaaaatggcatttaaattttgtaattcggatctttacagacatagagaagaccctgatgacaaggacaaaaactatattcaagagaggaataattatttatttctcataaagtgtttagacaaaccgataacagaacagagaaaaaaattacgcagtttatttcatttaccgtatgcacatttctttcattccaatgcgaaataaccaaaatgctctcgcttcttaccatattatctatatattagcaattttaagcaaaaaaaaatacatactaacaaaatgaagtacgagtttataagaagatgggagaaaataaaagaatatatagaggctaaagacaggaactaactagttatgaaggcgatccggggaactagggatccttctattggaatcttcaaagcgagagttggtgttgtttaaaccaaaagatcttcccttgaaatacctttggaagaaccgatgaacatcctcgttcttgttcttgttcttggaggtcatgagggcatttctg

SEQ ID NO: 68527 - DNA, 484 bp, Arabidopsis thaliana landsberg
cttattatatataagtaattaatactatttattcgggactatgtaattaggtttgaatcaaagtgattttatacataagaaagtgctaatcaaaatacaatttcctctagtttttgttgggagtgaaaaatcaaaccttctcaattgactagtcattttcaaacctacaataacacttggtaccaaaaaaaatgtgaaaattaattcaagacggtgactataatgtaatatctgaagtcacatgctatttctgaccgagtctgatctgtattagtggtagaagaacaatatcttaagatataaaaacaaataactaatgctagatttgaaaaataaacaattttgatacggcctatatcatttttttaatgctaataatgctttatgtaacggctaaaagttaataaaataagaaaaatcaaagtgaacttacggattcgatgtcgactttgaagactaggagctttcgtctctctctacaact

SEQ ID NO: 68528 - DNA, 377 bp, Arabidopsis thaliana landsberg
aacaagcggagagaaaactaatgacgataactccaaacaagcaaaaattgatgcagttgacatttggcaactctataatccaaaaagagaaataatgcagggcattcgctctgaaatatcttgccacaatcaatgtaagtaaggctataattcagtatcctcacatatccgtcgataaaaacatatattttcccataataggactaaaaaaaaacatatattttccataataggatatcctcaaagaagcggacttgaggaccaagaccgagatatggaacattatcttgggcgtcaaatgggctttgctaaatgacaacgcaaacgaaaactagctatatatagaaaaagagagacctacgtcgaaaataaaaaac

SEQ ID NO: 68529 - DNA, 1313 bp, Arabidopsis thaliana landsberg
taaaaaaaaaaaaaaaaatttgggccaaccggtaagctacataagtttaaaataataaaattttcgaattattaacataagataccaagttccacttaaatcttgacaacgcgttaatcgtgtttagaccaagccagggcgtgataaagaaggcatatcttatctttatcttccccaaaagtccaccaataataccatcttaatcattacttaaacaaccccaaaggccatttatacatttaaatttgttaattttacctattagtttgtactcctattatgggaaaaaaaaacctacatcatttttttttggatcaaactggataaaaaatgtcaattaataaaaaaatggaaagtcagaattcaaaaataaaggaaatatacacgtcagctacgaaagtacagttctgacttcataactttggaaattttacaaaacagtgccattattattccgtttagctgctcgatgataaattataaccgtcagattaggtcagccaaaagaatcgcacggttaagattacgaaagtgtacaataaggaggtgtagaagaacacaacttaaaaaaagtgaaaaccgtagcgtgactcataccatataaatatatacacatgtatgttcctccatagttacgtgtttctgtttttctctaatttttctcttgttgttctcgattaacgaaaaagacttgtcgttctcaattcttatcgatttaagaacaaatcatctaacgaagattacttccgaagatcagaaacaaacacaaactgtgaatcgttgtttgttaattctctttaaaatcgccagaagaaagagatctccgttttctacaggtaaaaattcccaatctcctttgtcttgtgtatttttgattgattgattgatttagttgattctgtgtcttgtccgatctgaattagattcttgtgttatcttagtatttgtgtttcggaaactcagatctacttttttaattgcataatttgatgacgaaattgttgttatcgtagctaaaacaaaatcgatctgtgtcaataatatagttgtacttttgttatggatctaatcctcaaaaacccgacaaccttaaaagatcctctgacattgaggaatctttggtctgactaatctcatctattgtcttcttgtcgtgtatattgtcaataatcgcagtggtaaaattttaatttgaatttatgtggtgtaacagaagaaaagcaagagagtaagaatgggatcggaacaaaacgatagcacaagcttcacgcaatcgcaagcttcagagccaaagctatgtgttaaaggatgtg

SEQ ID NO: 68530 - DNA, 3817 bp, Arabidopsis thaliana landsberg
tttttttttttcccaaatggaatggaagttgggttattttcggattgcatccaagttggcacgtcaacttcgaaaaaatgacaaatcgttttttgtggttttaaatttgttttttcatggtctaaatacttaagtttcataggcatttagaggatgctatgcatatatcggtatcaataatatggtcttcaaaatgaaattctctatgttaaatcatttatgatgtatccttttagttacgtcataaccaatgtgattcgtttttcgtctccgattaaacacataaatttttcgaagttttcaaataaaatcttttgacattaaatattcgaggtgaaatgtgacaataatcttttcaaataggttaacttttgtcttttatacatttttaacgtatttagatataaggatcgagagttgtataatgtgacaataatttaccataactttaaatatacattcggagtaatgattgatgatatgttgtttatatcgaaaacaaaagagacttgacttgatatacctgttcatatattcttgtcatcttcggagaagagagacactgccatcaaattatagctattgatgtcattgcttatgtaagcatgaaaccccaattgcaaaagtgagaataactaaaaactaaaaacctttcaattcaacttttggtttatctaatggtaggtgccaagtttttcttgaaaaatgaacaatttagcatccatatatttgatggcagtgtctctatccattatgacaaaaaatgtatccatatattatataaaacaaaaattctgatataaataaattcactttcgatttacttaaaaaatttatgattctagatagccgattataattttttgtttagtcaaaaaaaaagaaagtttaaaccgattatgagaattcatgatttatcaatcaaaacacatatgtatgaggcccaaatattttatcttcaacactctgacccaatttaagcccacagcagactctgactcgatggttttggttagctttccggttcggtttggtttaattgattagtttcgattcgactttgaaccaaatttaaaccgtactccgacttcagcatccaccacctccaagtcttcgtcagtcgtcaccgtgtggtaagtgtaaatccttaagtctggaaaattagggtttttgggacttgggtgtgtttccatagcagagatatggggaagaagaaaggaaacaaagcagcagcttcaacagatgattttttacaaaccctcgaagatttcaccagcaaagagaattgggacaaattcttcactctcagaggcaacgacgactctttcgagtggtatgctgagtggcctcagctccatgactcgcttttacctctcctccaagattcttcatcttcttcttctgattcgcttcagattctggttcctggatgtggaaactcccgccttactgagcatttgtactatgctggattccgtgacatcactaatgttgacttctccaaagttgttatctccgatatgcttcgtcggaacattcggactcggcctgaactgcgttggcgagttatggatataacaaagatgcaggttttggttccttttgtgctctgtttttttttggtttctagctgatccttgttctgtctctcattcactaaatatttttactttttctattacgcagttggctgatgagtcttttgatacggttctagataaaggtgctcttgatgctttgatggagccagaagttggtaccaagctgggaaatcaatacttatcagaggtcttagtgaacttcttttgtttaagggattgcataaattggatgagtgttggatcaaacaatgaaagttatgtgctttaaatgcttgagcttgattcagtttgatcattagtaactcttttctcaggccaagcgggttttgaaacctggggggaagtttatttgtctaacgttggcggagtctcatgtcttaggtacacctccaacacctttgcttctgttattattattatgtgaagctatttcatagttattgttatcttcattctattgtctgttttagtgacattcttagtgtttttgcgcagcattgcttttttcaagatttcgttttggttggaagatgaatgttcattcaattgctcaaaaacgctcgaagcttaagacatatatggtggtggctgaaaaggaaaattccgttttgttgcatgagataacctctgctttcgaacttgtatctcttggccgcaatgatagtcaggtaattatttcctgtttagtttgactttaacacaattgtaaattcaaccacctttcccttcatatatcgattttttctagctctttaaacacttgtgtaattctccagtgtaatatatgattctgacttacaatgtagggttctggcatgcgtgaagccgtcgagagcgagaacaaaatacgtagagactgcaataatggctcagacttattgtactcgcatgaagatttgaaacttggtattaaaggagatttggcagagcttactgaaggtcgccgtataaaatttactttgggtggccaaggaagcaatttcagttatagggccgtgcttcttgatgctcagaaacaaactgagccatttgtatatcattgtggtgtttttcttgtccccaaggtaagctttgtcaacatcataaatccttaatatttaagttctggaaattgctgtgaatatattgtttaattttgtttgatctattaaaaggagtgttaaatttcagactcgtgctcatgagtggctgttctgttcagaagaaggacagtggcaggttgtcgagagttctcaggccgctcgtctcataatggtaagctttttatggtaaaacctctttatatacaccatgttaccgtgatctattttcggcatgagattctaaacacatcttaatttcttgatgaaggtttttctcgacagtagccatagtggagccaccatggaggatatccaggtaggtactatctacattttgagttgtctgatgcattatgttgtttacttattgatcgattttatctggtaacttattcatctcagaatgatttatctccaatggtgacacaactagctcccagaaatgatgatgaagctcgcattccgtatgtttatcggattttttttttactatattctccatgatttttggtgcaacagtaatcctaactcattttgtttccgccattatcgcttgttaattagtagttgaattgaattggtgctgtaggtatatgatggcaagtgatgggataaaaaagcgtgatactgtccacgaggtattattactagatatacccaattaatcacttaataaaactgttatttgttgtctcttctatttctcgcctttcacagatatgatcatcgtttcctttattgatctccgtgattagacttttatccaccactattttagcaaattttaatactactgattggttagaatacgtagttatggggatcttttttgtttcttactattcatttcgatttgtaggttacatctcctatgactgggaaagtggttgttgaagatgtggtttatgaaagcgctcctagtaatttagaagacttatctacttctagtgatttggcatttcgacgacttgtattcaaaaggactgagggtttgatacagactgaagctctgcttgtagaggatggtgagattcttgaacagtctcagaaagaaaaaactaaaaatgtttcccaatcgaaagcgaagggaaataaaaagcaaaaccaaggtaaaatcgtacttctgtaagtgtt

SEQ ID NO: 68531 - DNA, 2682 bp, Arabidopsis thaliana landsberg
gtttggctgattcgactgttcaatcggaagggtttaaggcggaagagattggctacatcgcggagcactgtatctcgatgtacctctcttctagactgaaaacgtggacacacgtttcggaaacgcaaacgcaagtttttttaacaactgggctaaaacatgagcaaggtttcaactttcagcgacacaaccgcagaaaatcacagattttgagcccaaaacgcataatcagtaaaaacacgttctaggactttcgcggtacaaagaatcatgatttgttttctcattatacagaacatcaatgaacatattacatcaaccaaaaataaacagataaacgaaaatggaatgacaaatgtgtctcagaacaatgtctggttatcgcatttggccagtttgttcttagttccacattttcgagtcgactagagagtgattttcgagttttctgttagaagaagctgccttttgactatagaatagtgaaagaaatggcagcagatcggagcttcaactcatcgtctttccatttggattccggtgcagctgctccagcgatataaaccttttcaagattaagaaagagacacagagtgagtaatgaatctcgaaatatgaatgtcaaggagtaatcaaatatgtgttttgcagcagagaccttccctctgttcacagaggctactagagctatgcgttcttcatctctaccaaactcgtagaagtagtaatttctgcagatataaatagcaagaatttcaaacagatgagtcctttggaaattctcctatcaagaacattgattcccgaaccgatgggagtatagtttgaagctacttgccttaaaccttcttcttcctttaccttgattgtacgagcagagtaaattgttgccgcacctgctcatgcataaagaatatcaaagacaggattctaagcaattttctaatatgtatatgatttagcgaacctggaacaaaaagtcttgcagctgccttcaatgatcccaaatcagatatatctttagcctatttgaatcagagatcattcgatgagcttagtgaacaaggcaaactgatgactgcggaaaatgtaaacttgtaaaggaaatgactttgcagtgcaaacctctaagaaagtgatcttaagttgatttgaaggacgaatgactacactcaaaacttctgatctgcatacacaaatgatttgtcacacaagttatcctaatggaaatccaaagggattataaaggaagaggaacaaacaatacccatcaggagtttggaaccgagcggcgaaagtttgtggctttgccttgtcaccatagagagacaatcccgcagagtaatcctagaggatgaggtaacacacaatgtcaataacaatgatcactgcatcccaaaaaaggaagtagcaccagttttcaattcaagcttaagattctactgatcttgaaacacagaacacaatgtaacactaactattaaaccccaaaatcaaattgactagaacaacaaccattgattcagacctaacttggcagctaaatacattgatcactaaaaagtctacaactttaaccaaaaggagcagtctttgcatcattttatcactcattgattcgtattcataagagattggtcaacagattttacacacctcaggctcattgacgtcttcaaagtcaggaggaaccctaatagcgaacccactaccaaagtactggaaccaagacttagtgttcgcaatgccgagtcgtaacggtttggtagacttcaaaggatcagctaatgactctggaatttggttttgaaagatgaaggagacgaaacagagtgatgctgttctaagcaccacatctctccgaaaggtagcagaagaagagagaattttgggtttataagggttttgaggtttagggtttggtggatgaagagagagggagtgaagtagaatggccatgagaagaggaagaagaagaagatagaagaagacttcattgcttcgaatggataagaagtggggagattctctgaagtgtttagaagacaaatgatggtgcaaggcgaagggtacaatagaaatttcgttgttttttgaagggttatttggtccttttgtatataggcccattagacccaaagtttgcatgcttttgatgtggctagtgatcctcggagcttgacacggtgaagtcatggcggcggagacggaggcagaatcacagtaccttaatgtactctctgctttcctcgccatcgaaccggtggactccgtcatcactctcgctaggtaaaaccaccatcattcccgccgccgctagcttctttgttccattagctccggcgtttgattttgcttctgtatgttcttttttgtgtagagggtgcactggaggatcaattactgagaacgcccagagatttttctgggaaatttgcgttgaagctgtaagtaaattctactcttttgaaaactcggagaaatgtggaagctttaagatatttgtagtcaagttattgatttgggacttgttagtgtttgcaaaattgaatcttgagttgtagtaatgtgtaatttactgtgaaactcgtgtattggtttaggctgcgaataataacggatcatacgcgaagaagttactgaagaaactcataaatgaagttgagttaaagaatggtctga

SEQ ID NO: 68532 - DNA, 482 bp, Arabidopsis thaliana landsberg
  unsure (1)..(482): unsure at all n locations
gacctcgaacaagataacactaacttgagaggcaagaaactttacaatgtcatcaaatcacgcacgtcttcctttggctcctgggcgtccctttcttcatctacagtcacaggaacaatcttcggataccgaaaaggaaaaatcaatttctgtatccaaacaccaagaaaatcgacaaaccttgatcttctcctcgagctagcagttccaacgacggttttagctcgagaaatgagagaaggagcgttgcgtatagtgttagaacgtaacaacgaaaaacaagacgacgactcttttttgttaaagccattttggaacatgtattgcaatggaaaaagagttggttatgcgagaaaacgcagtccctctcaggatgacatgacgagcgttgaccgctcttagtaaaagtggtggttggagcaagaagctgtgactgagaaagaactnngaccgttcgatgatgaatngatgtatttgagagc

SEQ ID NO: 68533 - DNA, 1394 bp, Arabidopsis thaliana landsberg
acaaccttagttcaacatatgtttggtggacgtctccgctcaaaggtgttttaatctcctagctcatgatctatctctactttgactttacacattctcattgtttctgctcccgtctttctctggaaaaccaggttaaatgcctgaggtgtgatcatgaatcagaaagatacgagaatataatggatctcacattagagatatacggttgggtagaatctcttcaagatgccttgactcagtttactagaccggaagatctcgacggagaaaacatgtatagatgcagcaggttagatccaaaaaccaaattacttgtccttttgtggtattgaaacaagactgtaatattgtgaaaatgtgtttaaaaaggtgcgctggatatgttagagcgaggaaagaattgagcattcatgaagcaccaaacattctcacaattgttcttaagcgattccaggtatcaattacttttaaagatgactcgaaatattactcttgggttgttgttgtctttagaaaaaaaattgaaaatacttttaaaactcttgtgtatgcaggaaggaagatacgggaaaataaacaaatgtataagttttcctgaaatgctagacatgattcctttcatgacaagaaccggagacgttcctccgctttatatgctttacgccgtcatagttcacttggatactctcaacgcatctttctcgggtcactacatttcgtatgtcaaagatttgagagggaattggtacagaatcgatgattcagaggtaaactagtttcatcctcctcttccattatgcgacaagccaaacggtttatgaacatatgcaaatttcttttttctgcagattcatccagtgccaatgactcaagttatgtcagaaggagcttacatgttgttctacatgaggtaagaaaataaaataccggtttggaacttataatggttttttctgcattccgaggtcatggattcttaaaatacattttttgcagatcgtatccacgtcctcaaagaggagagcacaatggtaaagctccggttcaccattcgcaaccaagaaacgagatgaaggaacagaggaaacctgttaaccgcttcaaaccgagagcggatcacaagaacacagagtcatcatcaagcgaatggtctctcttcacaagctcagacgaggcttctttcaccacagaatcaaccagagactctttcagcaccatagactacacagatgtttgccacgtcgtagactcttcttctcctttcgccatcttcaacaacgtataccacaacgtagagccatcgccacacaacactgtcgcttgcagaatgttctcaggtaccaaactcgaaacccggtatttcgtggagcaagaacaaatcacaacaacac

SEQ ID NO: 68534 - DNA, 543 bp, Arabidopsis thaliana landsberg
ctcaactactccgcggatagattgagtaagaacgataccaacatttatcatcgtcaggcaaatactgtttcttctgattttggctcaagtttcttgcggcggaagcaatgtgagcagccagacactggttttgttcataaaaaacagtcacagaatgtgttgcggaagatattgcatgatgtccctttgatgcgcacaaagagaatgttcccaagtcaaaaatctggtctgaatcaagatgatcattcatatagaagaaaagagaacgaaaagttcagtgtccttagaactatggttcccactgtcaacgaggtaatagctgtttttctctaaatccttagacacaagaccatgtttcagaaaccaacactctgttttgaatccttgtgcaggttgataaagaatcgatactaaacaacacaatcaattacctgcaagaactggaggccagagttaaaaagctagaaattttgtatgggatcaactaaattttgtcgaaagacaaaggaagaccacagagaaccttaacgactctgtgttgat

SEQ ID NO: 68535 - DNA, 592 bp, Arabidopsis thaliana landsberg
tgacataagatccctaaaatcactaacaaaataaaataaataatctcgagattaatgattcaaaattaacaaaaccactctgctttttttttggtaatgaaacctgtatgtttggagtttataacaaaaaacataaatatgataaaatacatttatttgcaaaaaataaaaaagtaaatagtactcagtaaactgaaaataaaactaataaaaaccttagaattttttttataaatatcatgtggttttaatctgcgaccttttgttgggcttgtaaaattataactttaactctgatttacgcttaaccagcgaacttccacccctaattgacacaatggcaaccatacaaccagaacaaaagaaaaaggtgaaataactaaaaaaaaattttttttttttttttaagtagaagttctcatccaagatcgatctttgcaacatgctaaattacttattgaaaaaaatcttatttttactgttacatttcattcaaggaaaatccccattaaagaaaaaaaaaaaagggcaaacaaagagccaaatctgttttcatcagaacacacgtgtttacacatacatacatatgaca

SEQ ID NO: 68536 - DNA, 520 bp, Arabidopsis thaliana landsberg
aacctgcagcctcttcttttgagcgcatgacaaccgatttttgctctttggtgtcccaaaggcgtgtttcttgaggtacacgctcaccattttctaaaagttctatttgtcgtgctgtttcgtattctatagcgtcgctaataaacttgaatgagttaatgttcttaagctcgcacttagttccaagagtctgtacgccttttttgcgcacagaaatgttggtgtctgctctgaaggcgccttcttccatgttccctgaacatatattgagatacatgacaatgccacgaagtgctttaagataagcgcgagcttcataagcgcttgcaatatcgggataggtaacaatctctaaaagtggcgttccggcacggttaacatcaacaaaactttcttgcgttccgctggagtggatgtttttccctgcgtcttcttccatgtgaatacgaatcaaccggatgtttttagttgagccgtctttcagccgaataggtacatagccattttcgctaatagggag

SEQ ID NO: 68537 - DNA, 780 bp, Arabidopsis thaliana landsberg
actctatctatctacaggattctcttggagggaattcaaagacaattataattgcttttattagtccatctagcaggtaaactgatacttgtttgtttatcattccatgacctttctgcctgaaacattcattggactgtatctcatgtttctgtcttttctattattcagttgctcattggagaccctaagtaccttgaagtttgcacagcgtgccaagcttattaagaacaatgtaatgaaattattccttgccattgtttactaagtcatggatctgacatagttggaaagtttagttgtattaattatattaaatccaacaggcaattgtcaacgaagatgcgtctggagatgttattgctatgcggcttcaaattcaacaactcaaggtagtgttttagcaaagactgttgctttttctctcatatgaacatgttattaagtgtctgaagtcatattttacagaaagaagtaacccgcttaagaggaatgggtggagtagacaatcaggacatggacactatctcaatgggttgccctgcctctccaatgtctctcaagtgggatgggttcaatggatcattcactcctctgacaactcacaaaaggatgtctaaggtttgtaattggattttccctgatagggagttgctatcggctaagctatttctttttcttaggaatctgatcctcattgttcagcatttggtttgtttttaaacattttcacaaatatggcttttgtaggtaaaagactacgaagttgcgctgtggggg

SEQ ID NO: 68538 - DNA, 520 bp, Arabidopsis thaliana landsberg
  unsure (1)..(520): unsure at all n locations
natcgtcatgagatattgtagtcgttataaatataaatgagatactagttttaaaaatgccgtaatcatttctaagagaaagaaaaaaaaaagtttaaaaggtaaaataattggggaaagagtaacgcacgctttgcctttagggttacgcgtttatcgagttcactcactttttaaccaactcctttgcagccttttttacaccaaacttttctctgttatactcttctcttgtccaattccacacctcttctttctactttcgaatatacagtttcatttaattattaaatagtactaccatagtcatgatttagaaaaatacttaatcatcttgcagttcaaaaataatactaaatgtttgcactaacattatcacttaccttagacgagtcatttagctttgtaatttacatttgtcgaattagatgaaatttgtagcaccagttacttattttattttatggtgtctctgataaactttacatgtgtatatatccaatcatatacaaacatttga

SEQ ID NO: 68539 - DNA, 1549 bp, Arabidopsis thaliana landsberg
gaagagagaaaaggttacctcttaattgagctcagacaatcaaacaataatttattgcagtgtttgtagacttttctcatttaatatctcaaattctgaaggcggaaagccaaaacctcaaggctagtacaaagctgagtcaggcgagggagaaaatcaagcgcaagtatccacttcctgttgaaaggagacaactttccactggctacttggaagatgctcttgatgaggtctgtttgattagtttgtgtatattgggttcttccattttctaaagcaaagattgcactagtaacgactgattgtttcttggaaccaggatgacgaggattaccgctcaaaccgtggctatgaggaagatctcgaagctgaagcgcaacgggaacgccggattctaaacgccaagaaggtaaacaaaacaaaaactcatatatctcggaatgcaaaaaaagcattagaaattgaactaatattcaactgcttctcactggggtaaaaccagagccacaaaggcattccggggaggtcttcaatgacttcggccagaccgtcaagacgtcaaatggagtattctgagagtgagagagaggaatcagaatatgagacggaagaagaagaggaagaaaagtcaccggcccgtggaaggggcaaggattcagaagatgaatatgaggaagatgcagaagaagatgaagaggaacgaggaaaatctaacagatactcagatgaagatgaagaagaggaagaggttgcggtacgcaaattagaatgttcttccatttttattgttgtcaatgaggaagttcattgagattgtaatgtgtggtgaaatgtggtttatgtagggaggtagggcagagaaggatcaccgtggaagtggccggaaaaggaaagggattgagtctgacgaggaggagtctccgcctagaaaagctccgactcatcgtcgtaaggccgtgattgatgacagtgacgaagattaatcatgttcgtcaaatctttcactctcctttcgtccatttgttataatgtagtctggaattagactcgttttaatcaaaataaagacagaatcatgatttttttaaattcatgtaataatggattttatttcccttctgtaactgtaatgaataattggtaatttgatatggagatagttcaaaataacgtaaacttgttgacccaaacaaatttaccaaacagactgtcacagagtaaacacatttagttttaatctcttgattaatttattatgtagtcatgtagcccaatttttttgtaacactgttctacataacgttatgtaaaattaacacatttaccttaagctcttcattatttttcttatgtatctcaaaagatctgtaacactgttttattacaaaacgtaaggtaaaatttggttttacattaagaagacgacaaaaaaaaaccagaattttaagaaaattttgacaatatataaagcaaatgccaaaaaaatatggggttctacaatccatcatctaatggctcatccgcgtcgtgcaagttgttcaatggagtg

SEQ ID NO: 68540 - DNA, 2763 bp, Arabidopsis thaliana landsberg
agagagatccaccactatccaaataccaatcgacacttcaaatctcaatattatcgatgaccattaaattttatttatttttatctcaatctcaatttcgtaactaaaaaatatatactataacctttttatctatttttgttaaagttgatgacattttatcaaaaaatagccccacttttcaaaactaaaaaacaaaatattcctaacttattttcttttattaggtttagttttcaagtacaaatccaaaattgaaaacagtaatttcacagaatgataggaaatcataatttatgttgatgtaatgatataatcaaaaaataattatacagtaacgctgctgattcaatatgttccactacaatttttgttacatacacagatttggtgacctcggtttaatcgaaggaaggacacttggaaaatcattattttattttggattacttgttttttgtttttgtggcagtgaagtgttacagacttgggatagtgatatggcaaaggagcgccactgtttttttttttaacatttattactctcatgattttttgaagtgactaatcttcagaaatacacgtaaaaagtacgtattttatacatgagtttactagtagtagtgttcataaataggaagatcatcaagtggtccggtccggtgatggtattgggaagtagatccagaaagaaaagaagaaaaaacattgataaaagtcatggatttgatacgttaaagctgactaataaatataatagacccctcaaattcattaaattcacacaatgaatgtctcttttgacttgtgtataatcaaaagtttgataggatacacgtgatttgtttttcctactgatcgaaacattacacacatcaagtagctctaatattgtatcaaaccaagttgtattagagaattggtttatgttggtttggaatccaacccaagagttcaggttttttgttttgtttttaagtgatggaaatggaataaaagaaaacagaggaagcaggaaagaggggagcaagcgaatatgcatggaaagagtcaaagtgggtaagctctctcatacctaacattccattttcgcatcaccattcccagctaaaccagcctattttatgcacacatacatactatctcacacttgtcgatttctgattcgttcggtatgagcccatcaaaatcaacattactacttcaatctcaaaggaattagatagatacacaaagtgatacaagtgtgttcaggtattgctgcttatccactatccatgaacaccttttgaaagaagcaaagttttcactttcacctgaaatctaactgataaacgattcagaagtgcatttgtctgatcacaattcataagtgcatttgttacaaaagcatatcaactttgcgttccattcaaacaaaacagagattgtattagttcgtctacacataaacattaacatgaaacaaaagaccgataatagacaagaaaagttttaaaaaaaaatggaggcagaggagtctacttgaagagttgattcaatgatatataaaactcttaacgcttggagaattgtggggctttacgcgccttcttgagcccggccttctttctttcaaccactctcgcatctctagtgagcaaaccttccttcttcaaaggcgatctgtggtctgcacttaccttcaggagtgcacgtgcgactcccaaggtaattgcttgagcttgacctgagagaccgcctccatgggctttcacaaatatgtcgtagctattctcatatcctaaagtcaccaatggtactttaacatactgaagccacaatggatttccctgaaggtactcctgaaaaaggtttacaatgatcatcatcagcaatatacgtatggattcaaatctttcccattcacaacaaaacagcttgtcaaaaccccccaaactttatcataatctctccttgttaacactttcttagccacttatcctaagtctaaacagcctagaatttatcatatgaactatttgttcagaaatttcttccagtttcaccttaatctataacgtgctgatgcagctcccaggtcacaaagaactacatacagataaagtctgatcacaagactaataccgatacagtttgatcactttctcagccacttatcctagtctaaagtctaaatagcctagaattcatcatataaactatttgttcagagagttcttccagtttcaacttaatctgtaacgcgctgatataactcatctatcaaaaagaagtacataaagatacagtttgatcacaagactagtataccctacataacagagaatatcttcataaaggtcaagactttctctcctacaaactgctacaatttatactactaaatgcttcaatcgattacacactatgcatgatgtcagtctcttgcaggtatcagatattcatataaaccaagaatatgttcaaacgggggtaagtggactgctttcatagctttagctgttaaaataccaatttcaagttcaaatcttaatctcatatgagtagtcaattctcagctgtataaactccaaattcaaggcctaagcaaacacatcaagcgactaagcaacagtgtaaaagccaataagataatgaaattagaaataaatttaccttggcatcacgatagttgatgataaccttcccagtaccttcctgaagaacaactctagcgattgcgcacttacgtcgtccagtgcccataatcttctgagcagc

SEQ ID NO: 68541 - DNA, 567 bp, Arabidopsis thaliana landsberg
gctatgatgatcgcaaatacggtggtgccttccacatcatgaacagttggacaccccaggggggtaccaacggcattgcctgggtacgctacggggattttaaaaactatgtgcgggaagcctatggtattgatcccctccccaaagccgccaatgtagcacccatgccgctggaatgcaatgtacgactggtcaacaacagcacaaagcagtacattaaattgagatccggtggttccaatacctttcagaccgtaacgcccataaaagtgggtacccgttttaaaatggaagtaaaaaatacaacggactgctatatctatatttttggacaggaaaccaccggcagcagctatgtgctgtttccttacctgaaaccggggcagtcagggtccaaacattcgccttattgcggcattaccggataccggttgtttcctaaatcggaatccatggaggccgataaccaaggtaccaaagaccaaatcgccattgtggccagcaaaaaagagcttgattataacaagctgaatgatgccattactgccagtacacaaactacctatg

SEQ ID NO: 68542 - DNA, 327 bp, Arabidopsis thaliana landsberg
tctttaaaccgattccttccatattttcatccaatgatctccttacttgagacaagccttcgatttcatgtatatatatgtaaagtgaacattaggtacatatgagatcatctaaagctcaccctccgaatggcctttattcatactcccacaattaccactaattttctattgaacagccacgatgattcattgctttctcttttgaattataaatcaaacgttatactagacatcctctaacgttcccaaaatttcaaaattttttttgacgaaattacttttttttttttctttgcctaatcaaattcctcttttttttttttg

SEQ ID NO: 68543 - DNA, 1130 bp, Arabidopsis thaliana landsberg
ctggatggctagaacaggccttacagtactacaccgagtggtataaagagaggcgttcgtccaaatgtcatgacgcacaatgctcttttacatggcatgtgcaaagctggtaatatagatgaagcttacagatacttgtgcaagatggaagaagaagggattccaccaaataaatatagctacactatgcttataagcaagaactgtgatcttgaaaagtgggaagaggttgttaaattgtataaagagatgctagataaagagattgagccagatggttacacacatagagccttgttcaaacatttggagaaagaccacgagtcacgagaggttgagttccttgaaaggctattactcagttgacgaggaagcaaagttggtgacttggaatgatcatttttttacatggagctggctggttccgtccctgagtgcatatggtcaaaattttatgactagtatgcacaatctagttgatggctcagcttgattggtatgtagaaactcttctctcagctttcacaaaggcttctacattatctgtgattgtagattgtaatgcatctatagctatacttctctaccaggggaaacacactctgagctatggccagaatcgatccaatgttgttgaaagctcttttaactcattcttacacagcaggggcaaagagaataggaataaagatgaccaacacataattgttgtttgcaaaggaagttcacactcagtgaagaagatttcctgtgtattgtttaattctttggaccattttttgggaatagagaaaaatgttgaaacatataatttcatttttgggaggaaaaaccaaaagtacaaagctctgcttctctcaagactctaagcatgttttaggtaaacactagattcacttctctctcttttgtaaccattgcctccgtgctctgtcacatttcatttccactgcatcattttgtacaaaatcattcgccactatttctatttatatgaatcaaataaatatgaaaataccgacttattcctaaattactaattttgggttttttatttttcctggatgtaaatgacccaaacaaaaaataaaaaattcagccgttggcttaaaaaattggttagggaaacc

SEQ ID NO: 68544 - DNA, 1354 bp, Arabidopsis thaliana landsberg
taaaaagggtcccccgacttccgggaacagaactgacacaagatttgaaccaagcccatcagcaaataacaaacttgcaacaataaccaaaaaatctgcaaatgacaattagaatcttaaccttgagctataggactaataaagtcatcaaccaacttctgaagcatgctatcaaagccaaaatcatcaaggacaacaccgaaattgttcatcgtattaggtctcattattgtggatcttgaatcataaacccatttctccatgtggacaacctgacggactcaatccctactctggtacgaagacagagaccatccttagctgtgtgcaaacgataactttaggacagattcatacctctgctagtaacatttcacaaaactggggttggaacatctcacaagtgaaaatcccaggattagatgcaaccacactacttctgaaattccgctctgacttccgactaaaagctccaagaaacgatggcgcaaagaaactactagggtcaagagtatagatctctccatgcagacgctgcaaaatcagattaacaacaagcaaaacagatttaaataaccaattcaagattaagactttgttaacccaatccgacaaagaatattacttggtaagaagacatgattttgtctctgtattctttatgcctcagaacctgaaaatgagacacaaattcaagctcaaattacagaaatataagctcgaactaacaagaatcggtaaaaggaagaaacttttacccgaactcgctcagtatcaggggaatatcggagaagaaggtctctcatgaaactagctttatcgattcgtgtggaattgagaagctgctcaggtaagtaacgctcaagagaggtgaacagagaaggactatagtccaaaggtagatcttcatagttctcaggctcatgttcttcattaggggttctccgaagcttcaatcttgcctcgccgtttccagaggaggctcgtggttgttgttgttgctgctgctcaggttgttttccggaagaatcgagagccatagatctaagaggagtttgattgcacattcaggtcaaagaaagcgatacgcattctagggtttagtttttttttgatgagtgaaaaaagtagatgatgatggtttgtttgagaggttagggtttcggctttttttttttatagaacctcctcaaagtaaaaaaaaaacgtggaccattttgatattgtttctttgtttgttcctaccatttttagcaacgctgatttttcctttttttggtcattacatcagtaaaattaaaaaaccaaaattagtaaattagaaataagtctgtattttcacattgaattattc

SEQ ID NO: 68545 - DNA, 575 bp, Arabidopsis thaliana landsberg
tggcgatctagatgacctgtaagcgatggatacagtcgttctgttcctccttcttttcaatcttgattcccggttgggaccgatggatttgatgtgtcaagcgtatttccgctgctccggggccgttgtcaggatctagccaaaatcggacattggagttacgggtccttttgtgcatacaataaactaaattctccacgattatgtcaagctacatggctaactagttagttagtggtgttttctgattttgacaaagtgagacctgctcgagctctctcggttcatttgcctctcacttacaagtgatagttgttaaggtcatctctcactttcccacaactttgattgtccattccagtctcaagctcgctgcgtcgtccgcagagacaactccaatcaagccaaaggacagtagtgcagccccaaggactaaccttacctgatggaccggcctgactaagttcatcgtccccctgccactctgtctcttttatgaccagtcgacgcaatacgcgctggcctggcgccgcagtggaatgtaccaccctgagcaccgctatcgcaatggtcgc

SEQ ID NO: 68546 - DNA, 378 bp, Arabidopsis thaliana landsberg
cattggtataagttgttacaacctaaagaagaaaatcaatggggagaagcaggacgaactttggttttgaagaggtgaacgtagagtttgtccattgagaaataaataaaacaacctgtcgaatgtgtcacaaacgacccgaaacttgatcccactatgcaatgccatgctggtccataccctttgtcaaactcctgcataaaaaaatttcatatctcacttacatcaaaatagataaacattttctattgaaaatttgatcctttttacaacaaaagatcttatagtcaataatccttaacgtgaagtttgagagagagagtgagacaaatgaggactccataataataagcgtatgaaaagggattagggtggaag

SEQ ID NO: 68547 - DNA, 514 bp, Arabidopsis thaliana landsberg
atcttgtgtttgtgcgggcacaaatggatatcatttcaaggtttaacggaaaagaaaaaagtaagtaaccggcccatgtgatagccttacaaatatatgtagtgtataagctaattgcatagaaatatacgcctgttagtgtcaaaaactaagaaatatatgcccataatatagattttgaatttaagaagatgatcgatcttaaccaagttcatacaactctttggaatctgaaaaagaaattaccaatatttactatatattataaatatataatagctaaccacatcaagaatgtactcataaagcatacaagcaaaataaagtaaatataaactatagtcttaaatcctcatcaagtcatcatcattgaccaaaagtatatacataattacatatagccttagtgtgtaaagcacgtgatcagcaatgtaattagcactgcccatcatttgaaccatcaaacttgttaataacaaattattatgtcaagactcgagagaattcactataa

SEQ ID NO: 68548 - DNA, 505 bp, Arabidopsis thaliana landsberg
gcatattgttgcgacttgcaagtagcatctcaaccattctttctttaactttattaagctttaaggcttagcttaattaaacaaaacaccaaaattagctaaccatatgttctaagagcccatggaaattatgccacgtgtcttcgtcggagttgttgaagtccctcctactttcatcctttttaagatcaaagtttatgtgttttgtctagtggtatatttttaaaattttagtacaaaatacaaaattttaaaagtaaccaatagataagacacagaatctcattacgagattctaacatcttcatggctttatcaaaaacatggttggccgagtgtaacaatattcactttgttctagagttaccataaaacagattaataaaacttggtgattgttttatcgaatttgaatttagaataatttccatcgccataaagtaattaaaatccttccatgttatgtaatagtgaaatacacgcacaagcgaagcaaaattaatct

SEQ ID NO: 68549 - DNA, 326 bp, Arabidopsis thaliana landsberg
cctactatactccaatcttatattcagcaatacatcgagtttcaccattatgaagatggacatatagggggtggggatgcttttaccaaagaaagagccattaatatcacttgcaacaacgagggggtgcttcataggaaatttcaatcgctaaaatctgatgacattcataaaaagatttaataagaatgcaaatgagtacaaaaaataactggggcgttgccatagcaacacttctgtgaagccaccttaaaggggagtaaggagaccagttgtctgtgcggatgaatggactatacactgatgactagcacctacgaatatgc

SEQ ID NO: 68550 - DNA, 612 bp, Arabidopsis thaliana landsberg
  unsure (1)..(612): unsure at all n locations
ctaaaagctgttgaaaagcttgctcaacagatacattcttttatttagaaccgggatccatctgcctatgacatgggggaggaggaaattgcctatgaaacaaaagaagggannnnnnnnnnnnnnnnnnnnnnnnnnnnnnnnnnnnnnnnnnnnnnnnnnnnnnnnnnnnnnnnnnnnnnnnnnnnnnnnnnnnnnnnnnnnnnnnnnnnnnnnnnnnnnnnnnnnnnnnnnnnnnnnnnnnnnnnnnnnnnnnnnnnnnnnnnnnnnnnnnnnnnnnnnnnnnnnnnnnnnnnnnnnnnnnnnnnnnnnnnnnnnnnnnnnnnnnnnnnnnnnnnnnnnnnnnnnnnnnnnnnnnnnnnnnnnnnnnnnnnnnnnnnnnnnnnnnnnnnnnnnnnnnnnnnnnnnnnnnnnnnnnnnnnnnnnnnnnnnnnnnnnnnnnnnnnnnnnnnnnnnnnnnnnnnnnnnnnnnnnnnnnnnnnnnnnnnnnnnnnnnnnnnnnnnnnnnnnnnnnnnnnnnnnnnnnnnnnnnnnnnnnnnnnnnnnnnnnnnnnnnnnnnnnnnnnnnnnnnnnnnnnnnnnnnnnnnnnnnnnnnnnnnnnnnnnnnnnnn

SEQ ID NO: 68551 - DNA, 2898 bp, Arabidopsis thaliana landsberg
aaacataggctagggtttctacagtgtctttcgggatatgttatgggtgaatgattgaggaaagtgataagcttttgatatcaattggttatttaggttaaaccctttctgattgaaaccattactcagcaaatttgagaaatttaggaggtttttgctttatagattttaggatactttagctcaatgatcatgagagaggtagatactgattcctgcttcttcgtatttaaaggtttgtgatttttagtggtcagttataccattgtgttcttttgtttggaaagttagcagattggattgattttgatggatttctttgaagtatgtttctccttttcaaatttttactttcgcttgtgtctttagtttctattagatttgagaatgcttgctgcatcagaacggtaccttttcaatgtgttcaaataagatcaattgtgaagtcaatgggctgtgttatgtcatttttgtggagggatgtatattcatagatatgaagttctaagccttatatggcggtctttttatgaaggaatcgtaaaacagatatattttctactacacccattgaaaaaggaaatggaagagggaggtcttattgcgttaatgttcatggattttcatattccagcagaattgtttaactgtaagattctgtgaactttattgtctttagtttaaggcttagacatcgtcattcttttgtaaagagaggcgatcttttgtataatctagtatagtttctcatggaattgtcactaagtatgtttgttattatggcagggggcgtgttcaatgggatgaagctaatatagtggagattgaatcgaacaaacctgttaggcagaagattactgaaccaaagacaccataccacccgatgatggatgatgatggtttgtctatttttctttatttggtttctcttagtatatgcacagaactttcgatacacgtttatatgcttatgacgtttttgcattttattgttgatacatacttgtcatcatctaaacatatatgtaaaaatggaatgtatgtcagacagaaagcaagagcaaattgtatgtgaaaattatctgctttttaattcatctacaaagttggacgattacttatctttttgggggaaatcttgtacctgcaattggttggttgatttggaaatttgtcactctagatgtaaggttaacttgaatcagttctgatctgttctaatccgtgattgattgtgccaggttctttgtctcctagaggaagagcgtttgatgaatgtgttgatgatatgcaacgagctgaagaactgaggaatgttctgaatgatgcagcagcttcttccagtagaaatagtagccagggttctggtggtggtggctggagctcgtctgatgaagaagaagaagaagcagatccaatggatcaagatgaagaaggtcctcctctaaaaccaaacaaatctactgtcatatataggttcttttgttaggtcatcccgatatatctattttttttgtgtgcaaaaccacaggttctggaagtggtaaaaatgaacgtttcaacgcacacagaaaagcacattacgacgagtttcggaaggtgaaggaactgagatcctcagggtcattctatgaagaagaagaggaagaggatgatggtgcaaaaggtagtaaatcagagacaacaacaaactcacgacacactaaaggcggaaacaaagagttagatgcaaccaaaacggtatcagggacgtcgtcatcttcatcccctgagttaatataaaacctttctgttcaatcaaatgtgtactctgctccatgtttcacagagagctctcaatctcaactaatcttggtttttatcaatttgaatcttccagaaatttaagaaggaaacaaaaactcccatcaattatgtgattgtcttttatagcattttgaatgcaatttcttactgtcacctctgttcttccatgttctatgttcttacatcatattccaaatttgtcattgtatttttgtttgatatgacattaaaaccgaaccgaaccggaattcaattaaccaccgaatcaaacggtataaatttgtaaacgtggtccaaaatgcacgatataagatgatgatgatgatgataagctgaattattcaacatcaatggcgaacgagaaagctcaagaaatggcgaatctatcttctcaaatctgcaaccaaatctcatctgtcttgacaaaaccaacctcaccatatccaccaccgctcgatctcctagtaacagagcttaccgcaatctcccgcaaccgcaacaactctcgtatcttcctctacggtgttggacgcgaaggtctaatgctaaaagccttcgcgatgcgtctcttccaccttggtctccccactcacttagtcttcgacatgacaacacctccaatctcatcttctgatctcttaatcgcttcagctggtcctggaggattctcaaccgtcgatgcgctttgctctgtagctaaatcgaacggtgctaaggttatacttattactgcagagccagcgataggttcttgtgtgaaacatgcaacggatgtctgttatgtacctgctcagactatggcgagtgataacggtggtggtgattcggtggaaatgggagagagacgtttatcgccgatggggagtgtatatgaaggagctttgtttgtgttgtttgagacggttgtttacaagttgggtgaggatttgggtgagtcttcttagatcgacttgctcgatatgctaaaattgagagacgtagccaccccgattaacctgtgctgttggtgtggtatttagctcgagaacgggatgctgttctccgacaaattgcatatattggactagcttaacgatatgaaccatacccggt

SEQ ID NO: 68552 - DNA, 435 bp, Arabidopsis thaliana landsberg
  unsure (1)..(435): unsure at all n locations
ccgcggaggcgagggagaaaacgactctctggacttcaaaaaatatgcatttttttccgnccaaaaatactatatataacgtgaaaatattcatacacacactagatatctacctaaatacaaatcacacacaccgccactnnnnnnnnnnnnnnnnnnnnnnnnnnnnnnnnnnnnnnnnnnnnnnnnnnnnnnnnnnnnnnnnnnnnnnnnnnnnnnnnnnnnnnnnnnnnnnnnnnnnnnnnnnnnnnnnnnnnnnnnnnnnnnnnnnnnnnnnnnnnnnnnnnnnnnnnnnnnnnnnnnnnnnnnnnnnnnnnnnnnnnnnnnnnnnnnnnnnnnnnnnnnnnnnnnnnnnnnnnnnnnnnnnnnnnnnnnnnnnnnnnnnnnnnnnnnnnnnnnnnnnnnnnnnnnnnnnnnnnnnnnnnnnnnnnnnnn

SEQ ID NO: 68553 - DNA, 575 bp, Arabidopsis thaliana landsberg
cggccatggacacagccggcatgggcatctcccaaaatgcgggtttaaactttgtctttttccggttccgccggaagagcccgggggacccggccgaaattcgaaggttttttccagtttggaacgcccctaagtctgaacccgcacaaaaggggggtcaaggggcgtcaggcgcgcggcctgtgcgggccgcgcagccgagccggtcagccggcgaactcgttggcgaatttctggaaaaagtcgtccgcgaccttcttggccgcgccattgaccagccgctggccgagctgggcgagtttgccgccgatctgggcctcgacattgtaggtgagcagcgtgccgccatccttgtcggtcagcgccaccgtcgccccgcccttggcgaagccggcaatgccgccgtcgccctcgccgacgatccggtaaccgttcggcgggtcgaggtcggtcaggttcaccttgcctttgaagcgggccttcaccgggccgatcttctgggtggcgaccgcctggaattcggtgtcggacaccttgttgagttcctcgcagcccgggatgcagcgcttgagcac

SEQ ID NO: 68554 - DNA, 590 bp, Arabidopsis thaliana landsberg
  unsure (1)..(590): unsure at all n locations
caaggacagctggctttatggattgacacgttgcaaaacgatgatttttggtttctgcgcctgggaaaaatatggaacaggtatggggcggacgaaaaaatcgatcctttacaagctgacgatattttgaaaaaaatccttgatgaaaataaacagcagtcccggccggtacaaaatacgcagactcgttatacgtcccttccggcccgcatgatgcgatggtcagtcgcagccgctgctgtcatcggaattctcattgtcatatccattattttcctgactaataaacctgtcataacaggagatacattcgctgctaatcacactgcccacgaggcagatatcaagccgggcagcaacaaggccatcctgaccttagccaatggatcaaaagttatcctggacagcacgcataacggttctttggcacagcagggaaatacaaagatcataaaattgaatagtggcttattgatgtacagcaagcagnnnnnnnnnnnnnnnnnnccccggaacttgtcgaaggataagccgtcagaaatgccatataacacgatcactactccgcgaggcggacaatatggagtcgt

SEQ ID NO: 68555 - DNA, 296 bp, Arabidopsis thaliana landsberg
tggagttgtttaccatacgacacaacttctaattccaatatatacaaaagtgcattattcaactcactattatttttcataaacacatgttatatacatatcattcataactttaaaatgttattacaagtttactaaacttgtcactatatacaaattcgaaattcattggtcactactcactacacacaagaactcatctgtgatggacaagtgttgtgcatttgcgatgttgtaaatgtgatatttttatgtgatgtgtgtaggaagaaggatgggtagtatgtagggtattc

SEQ ID NO: 68556 - DNA, 2792 bp, Arabidopsis thaliana landsberg
tcctcgaagataaacaaataaggagtcactcgtgttcttacattatgttcttccacttcttctctttcttcactagctgcaccgatctctcttcggtttttcccctctaaacgctgcttatagattgcatcataagcctccaagtttagtcccgcggccagaaagagttcaagttcatccacaaatcggtctgttctcgccattacaaatggacgtgctgcttctgagacaactgctttgaattgttcttgatttgttgtctctgcgcttcttgtttcttgtttgcgtctctgtttgattctgaatatgagagaaatagagactattcatgagcaaaacatcaaacttctactttgaccagttaaaactctagccaatcaaaatatatacccacgagttctaagtttttacattctccttaaaacaattacctgttgcagaaggattccatcacaccgaccaaatgatgcagaacaatatcaacatcttcctcctatagacaagggaaaaaattgaagcaaacaaagaacaaaatcatctttgcgaacaactgaacaagaagataacagcaaaaaggcagaaatatccatgaaagggattttgtacagaagcaaacctgcatcagagcttgaagctccctcctcaaccaggcttcaaggcaccggttcggctggagaaacttttgcagcttccaaaaccgtgcaacatcgaatacatcggcgaggaaacctggttaagaccacaaagagaccgagaaagagaaaagggaattcttgtaaaactttcattcttgattgataaacacatttgaatctactttctatcagtttattattccaaactaaatcgagtaacggattcccaactattgtaatggtattgaatattatgcgcaagtgtgttttgatctcaaagtaagtgcagagaagggaaaaacctgattcggtgtagtaacactgcaacctgtatctctgttcttttgttaatacaaaactgaaaacaagaagatgaaagtagagtaagatatcacgaaattctcagaacacatatatattcaaatcaaggaaaccacaagctaacctacccatctggaatattcgggtcgatataatgccgctcaaaagaacatccatcgtagttgtggatgatggataaattctctgtctgcataagttatggtcattcctgtaaacaaaatattcaaaaagagtgtatttgaaaaaaaaaaggtttttcaaaaacaaacctataaaaaaggaaagttccttaagaaagttgcttagaggccttgcttgaaacaactttgatccattgttttatacaattgaaacaaaacttgtctgcaacaaaacataaaatcaaaacaaacatatatgttctaatcagttcatggacgaaggtctcagtcattaccttaaccataaacctactatggtctatctaagatacacaagagctaatcaatctaatctctttttggaattaactaatcaatctgattaaattgttcacagaaaaaaaagattgaatctttgaatacacactcaaaacttcaaattctagatgaaatcaagaagcatctaaccacaagttttaacagaaaactgaaaaagagaagaagcgtacggaaacaggtatcaaggtaggattcacggaggaattgtccaaggcaaataggacatggatcaaaatcggatccatcgtcaatagaaccgctcccgccggcgatctccttcgccgccataccaactcactgactcaggtctctctccgcttggcgctgattcagcgttacgacgtcgttgtgactaaacacaggttatatttttcttttgttgaaactttcaaaataatccttaaactctttcaacattcaaaataaacccaaactattttaaattaccaaaatttacccgtcactttgatgagtttttgtttgttatggttccagaattaaaaaaaaaaacattgcctttgaatttcatgataatcaaagaatatgatgaagaagcactacaaaccaattctctctcagctagagaattgcagatcattggtggaactgaatcaactccatggtttaatgatcaaatcctcagttatcagaaacgtcattcctctaagccgactcatagatttctgcactacttgtcctgagactatgaatctcagctacgcgagatcagttttcgaaagtatcgattgtccaagtgtttatatatggaactctatgatcagaggctactcaaacagtccaaatccagataaagcattgatcttttaccaagaaatgcttcgaaaaggttattctccggattatttcacttttccttatgttcttaaggcttgttctgggttaagggatattcaattcgggagttgtgttcatgggtttgttgtgaaaactgggtttgaagtgaatatgtatgtttctacttgcttgcttcatatgtatatgtgttgtggagaagtgaattatggtttgagagtttttgaggatattcctcagtggaacgttgttgcttggggaagtttgatttctggttttgtgaataacaatcggtttagtgacgctattgaggcgtttagggagatgcagagtaatggtgtgaaggcaaatgagacaataatggtggatcttttggttgcttgtggtagatgtaaagacattgtgactgggaaatggtttcatgggcttcttcaaggattaggctttgatccatattttcagtccaaagttggattcaatgtgattttggctacaagtctcattgatatgtatgctaaatgtg

SEQ ID NO: 68557 - DNA, 2223 bp, Arabidopsis thaliana landsberg
agacttctaccactactaatgttgcatagatccgaagaagcactacgatctgatagtggcgaaggagtctcatggccaacacactcaacaatttgctgaaactgagagaaaccatcatcagatatttccttctcatgttctttctcctcatcacaaggagataaaagccagtgcactgacgcatccgcaggcaaaggcataacagaaatatcatcataactcccgtcattaccaaaatctccttcatcaaattcatcagaatcattcagtatcttgcctttaccaacctcaaaaccattttcacccacagtgagtatccccttaggcttgcatttcctcttatcactaacacctgagagtaaatgtccagcagcataacaagcttgtgattgagctgatgcagacagattcatagacgatccacactgtatctctggagacaccgaagcttgaacaggtggtgtcctatcttgataactactactgttgctacttagtctaccatcatcagtagcttcactcttccttctataaatcaaatcagatccagtttctaatttagaaacaggagtactctgagcaatactgtcatctactctaatcgtagtttggctatctttaagcttaacatttctagaaacagaagattgtttcttcaaaaccgaaactttctccggtttcatggtaatcttacaagttggtctctttccagatacaggatttgtcttgcatctatgagacttcagcaaattaggtttctcagtaagagtagatttcaacttaacctcctcaagagagcttggtttctttctaattaagggtttactaactaccggagcagatttggggtttttagctactgatctcactggtctacgaggaaaaactcccaacgaagaagaagatgatgaagaagacgatgagaaagaatgagagagcaagaacctgtgacaaccgttggatgcttcaccggaagttgaaccagaagcactctcattgctacaactgctgcttccagagcttcttgtactgaaatctctcaaagggttcaccggaaatctctcccttttcagttttttctcatttttctccggcggctgtggctgagactgaggaaatttcttcgtttgcgcatttgaagaagaagttattcgattcatcctatgagcattcgaccaaaaagcctaaagtatctctctttcttcgtgtctcagtgttctctcactgtttccgatctgcttgatctgatatttcaaaacgactttttttttttggcggaggcgcagagacgaacaacaacaaacattaaaatgagaaaaagatcgaaactttgacggagaggcttttgcttttgtctttttctctttaattaccgacttaaccctcaacttttatatcgtgctccaacaaaaacaagggtacatcggtcatttaccgaaagaacaacactttttccgatgtttaacggctaaatcaccaccgtgtattgatttattcttttgttcctcagctgagagagaagaagaacgatgaaaggggttctacttgacgaatctgtactgtttagtcctgagagtgaagattcttcgccaagtctgcgagaatcagtcccgtcgcttctcaggctgcttcgttattccatgatccgaacggtaacgactgatttgaattgctatctcaaattccaaaccatgattcttattatctgcattgcagatttccgaaattaaaccctttcatgcaaaagttatagatttgtcttcaattagtgaaattgtatagtgattcttcaattgagagctagatgagaaatgattgaactttatatgcaattcttcttttggtttccacttatcgttcatactgattttctgcaggggatttcatatggacttgatcttccggaaaacaaggtttgagactaactatttcaacttgagcctacgaatgtgatgactattctatgttttaagcaaagagttttgttcaagtcaaatctttgccttgtctaattgtttaactttgttatgagattgatttttctgtaacatgtgataggtggatctactgaggaaaacggcagcagaatactcgatcaattgcttgcctttagagacgtctcttacgagtgttacctttggtgatactctcaaagcatggtatagtgacggtagtattatgtatgttgcttcaagcagaaaggaagagatactgggtgaactt

SEQ ID NO: 68558 - DNA, 454 bp, Arabidopsis thaliana landsberg
tggcactgattttcttgtatcccaggagattcgtacatgggtcaatcggaatcgaatcttcattttgccgtcgattttggagatcgaaatgtgaatctctcctaaatttcttactacctaactagatgaatgatgatattaaagatggtgtatttgcacctatttaagtccaataagtaaaacatggttttagtatgggcctttaaccatctaaaattatatttactttatgggttttagtgtttgatcgaaaaaataattttcaatggcaacaaaaaaaaacatggtttggaagatagattgttatgatgttaataatgatttgctaatcaaatttcaacagaaaatggctttttaatttttcaagcttcactattatattcgttcatgtatttatgtgacttcattgttttaaacattaattcagctatttgatcattgagcaactgaggta

SEQ ID NO: 68559 - DNA, 513 bp, Arabidopsis thaliana landsberg
tcaacatgctaaacttaaaaatatatcacaacattggaaggattcaatataagacaaactcatctatacgcgagattcacatatatttcacacagatgcattgattttactcgtgagaattttttcggcaccttggattaatgtattataaatttttagttttatttccagcatggcatttttttttctaaagatataataaaattgaatgctttaagaaaatctaatgaaatttaataacaccataatgccatttccagaaatttagtggagattgagaaatagttttgtatttttctaaaaaaattttaaaaagtaaagatatataaactaataatatcattgacaaaaaatctcttaatattttgttggagaaaatataaaaattctcatctcttagtagtagctaaaatacatcaatgtgatataagtataaaacaacaataattactttccttactttttttataataaatattacttgcttatatatcattagtaggggtatgaatg

SEQ ID NO: 68560 - DNA, 702 bp, Arabidopsis thaliana landsberg
atggggatgtaattgagtcccactaataacaggagatgcaatcagaaatactagaagcaacataatttttgtgccaaattatagagaaatcgcaatgtttgcaaaattgacaaacgggagatgaacaaaattagtagtaggaaaatgatgtatcttaggcaatacctgcaactgagatcttctgcgtcgggatccgaagcagaatttgcgaattcttcgccggatcaacaactgtacagctgtgtccccctttcaagtactacgacgccctcgagaaggagtagaagttggcagaagtttccaagagaagtatggtttgactcgcttgacggagggtgggaaggaacgcgagttcgaattccaacgccggtaactccttgttgtcaccatcgaagtcgattaaaacccagatcacctgatagaggccagaaataagaacaatggcgatggtgtagagaaacaatggcacacactggacaagaactgggttgggtaattgcgtttgcaatcgaatgaagaaattagagagctatggcggaaaataagtgaagaagtaggttaagggtagagatttttattcgtagacagcaaaaaagcaggtgagagacatattgaggaacagtgtgaatgaccatagcgagagaggtgaaagagaaaattagagagagaaaaatactcaaatccaaaagacataagctggag

SEQ ID NO: 68561 - DNA, 558 bp, Arabidopsis thaliana landsberg
acggttttaaatagatcacggcgcgttcgtctggcggcttcatttggcacaaggagtttactagtctggacaatatgtccttaattgctcttatcggagaaggcttactctgtttttcaggcgaactctgtttatcttctccgagctcgtacgagaatattcgtaaaggtaaagtatttacttggatctcaaattgcttttatcctttgtttgccttatgaaattgcaatgaatatgtgtttgcaaagctgattatcactttgggtagaaatgttagggcttcttcttagactctgaaaatcttattacaaaagtaccatctttgctcgactaagatgagattttgttgtgaactgactaataaaaaatcgggttttctttgttttgacttttttggatatggttacctcaaacctaatttggtgttaaaataaaaggtttcttgtgagcttaaacgatgagtacccttgagaccacaagagctgagcttggtctggtagttgtgtatttgaataaagcggaggcgagagacaagatttggcgagctatttcaatatg

SEQ ID NO: 68562 - DNA, 775 bp, Arabidopsis thaliana landsberg
  unsure (1)..(775): unsure at all n locations
tgttaagacattaatggtttccagcgacattgtgcatagccacccggagagatccaagtagtattagtcctattgaaccgggaaaaagatatctttaaattaatttaatactaattatgtaagaaagataattgataattaacctatatagttgtgcatacacacacatatgtgtattcgagtgtttgtcggagtatctctgatcagacgaagccatatagatccgaccatgtacgtgtccatattgcaccattctttttacttatttattaattctttttgttggtcgacaattataacttatttctatgataattcaactacatatttaactttacatgataaagtacagatttgtgacaatttttttgataaactacaaatatgacttacgcttatgtgtgcatttacaaacacgcaaaattattgaataattcaaaatttgcacacaagaaaaaaataatatgagccaaataaacacagtggtttgaagtctcccaagtcagttaatagttaaattttgtttttaaaaaaaggaaaaaaaaagagagctgattatgtatttcttggcttggcaaaatttgattgaagattaacgcatatacatatactcaagtgggagttgaataagaaacagggcagaaaatcatccttggattctccattactataggcacctaacaattactgtttaatagtatatttagagaactatgnnctatatatatatatatatatatatatatatatatatatatggaaataaaatatactg

SEQ ID NO: 68563 - DNA, 201 bp, Arabidopsis thaliana landsberg
cttttgtttcaatggcttcagctgctcttgggccaaacctatgcaactatgttggtatcgcacgctcgtggcttttcacgcctaagggcttgacctgtgctgacagctacattcaagtgcattgtcgcaacaaggttcaggaacacaaggggaacttagactgggaacccctgaaaaaaagggattgtcatgcgtccgcca

SEQ ID NO: 68564 - DNA, 333 bp, Arabidopsis thaliana landsberg
ttccaaggacaggtttcccgtcatcactgtatgacgtcctccttctttggggggggggggtgtgcgcggggggggggggggggggggggggggggggggggggggcgggggggggggggggggggggggcggccccataaagcccaaggcccaagggcaaacccctttttaaagagggcaataggggcccccaagagtaggggggaaaaattcccccccggggtttcccggattttagggcgccgggccataggtgttaaaggttgagggggcaatagggcccaaaagtggggccccttttgaaggaataggggtgggccttagggtggggga

SEQ ID NO: 68565 - DNA, 374 bp, Arabidopsis thaliana landsberg
cctatttttgtctcctccttagctttttacacttattttcgtttgaacctttaattaaccaatttatttttactatttgaatcagataaacagatattattaagtcagtaagaaaaatatatatttggtgacgattatctcatacaaaacagaaagagaattttcaaatgacaagtggcctgtccaaacactaaacttttgtaccttttattgaccagctaactcactttctcatccaaattttagttagttaaaacaaaaaaatctcaatgcttttcctcgttttctgaatattattcggctaaccagaaaagaaaaaaaatacttgcgggccaaaccacgaaaatcaataaacaagggctttaggttggtaa

SEQ ID NO: 68566 - DNA, 600 bp, Arabidopsis thaliana landsberg
cgccttttccatgctgatggctttgtcatcgggcatacgctttcttttcctttacccacagctataaaaaggaggggcgggttcccgcttaccacagggcctggcttccggctatatatgcttttatggtggtattcttcggcgctgctttactgatcctgatgcttttgatcaactaagcccgcttcaaagccatgatgtaactcaaatgaaagccttcatgaaaaagaagaaacgataaggcctcatcaatgttatttatctccacaccaaaaggagccacgggagaatagtggataaatctcttgtcccggtagtccgattcaagttgatctacggtggtaaacactaatttccggatggcctccatctctttttcattcaaggcgcgctccggcttcgttcccggcttatacgcttcataaaaagagggctccaccacaatatctaatcccgaacgaacatagcagagactctgttgtacggcaatagggtgcgccacattccaaatgatgttattattaaatccttcggcgatcttattaagttgatcaatagtcaggtcagcgatcaaatcctgcacagaactcctgatatgcc

SEQ ID NO: 68567 - DNA, 101 bp, Arabidopsis thaliana landsberg
ggcgaccactaccttgtctaccatcgatagcgcgaccaccaacactacgggattccgagtctattatctccggagccggcatgaccgccctttacccagag

SEQ ID NO: 68568 - DNA, 664 bp, Arabidopsis thaliana landsberg
tatttctacaatttttatattattgaaagttgatacattcagttttacattatttttaatttatgatatgcattttatgtatctttactttacgtttcgaaaatttaatagcattttgtgggtactaaactaactgttataaataaatccctctttatcttcaccatttttaattctcaaccattcataaaacttttttaaaacactcgagcattcatctaattaaacatatgataaacacacatgtaactaattgtattatatatatagattatatatagagagagagatatggtcttacgcacatgtatgtgaatggtatatctgaacgctgattggccggtcggcgcaaggctaacaaaaagtcaagtgactcaggagcacttggatggtcccacacacagcacaataatgtgggcccattatcataaactcacggttgtttttattttttggttaattttagattggagctactttttaatatatatatatatatatatatatcacgtgcagcctttttttttatcatcattttgtccaataacatgggaataataaccccagccaaacaaaaatatattaaagtaactatataaaatattcttagccacttagaatatacccaactcatggtcagcggatatccataattagttatgcg

SEQ ID NO: 68569 - DNA, 378 bp, Arabidopsis thaliana landsberg
gctgacatggcaatatcgccagctcggccccagagcagcgccttgctggtgcatcatttccccacgctggatgcgttgctggcaggcggttcggcgcactggtccaccgcgggcgtgccgcaggcagcggtggccggattggaggcattcctcggcgaccccgcgggactggccgagctgcgtaccgccgaagccgccatgcgacgcctgctcgacgcgattcccgcatccgcttccgccacgcaggcgcccctggccgatcagaccttcgtgctcaccggcacgctggcctcgctcagtcgcgacgaggccaaggagaagctggaggcattgggtgccaaggtggccggttcggtatcgaagaagaccagcgtggtg

SEQ ID NO: 68570 - DNA, 384 bp, Arabidopsis thaliana landsberg
aagatatgatgaagaggattgtaaaacaaaatgccactaaatttttcctagtgatggccattttaattatattctccaaacttttgcttaatacgtttttatttacctagactgattattctatatatacaattaagaacacaaaaatgtttctattgttttcttttcctggtcaaagatgcacaataatacatcttttaatttatttccctatagaaaattacttttttaccttaatatgtttcaaaacaggtcagacaatattagtatttttcagcatattagttaagttttaaaatattatatataagttctgatggttgtaaatattcaaaattattggtatatattaattaatagtctgtatatataactcacaaaatg

SEQ ID NO: 68571 - DNA, 1320 bp, Arabidopsis thaliana landsberg
aaagtaatatccgggaatattataaaggcccattagtagaggggattggtccattatacagtaaagataaattaagagatttctttctttatgtgtcatcaacaattagtttttaagatttttttctaaaacaaagattttgtattagattatattcaacatatgtagtatctactataataagcctttctaataattataatgaccattataaagaaaaaatatatttatttttatttcttatttttggtattgattaaaatatacatatctaacgtctatataagaaacatatgtgttttacaattatcaaaactgattacttccaacagaaggaaacatacaaatttgttaacatgtattagctgaagctcttcaccagtaaaatcattgcaaagatatatgattcaaaattgggaaaaatcttccctagtagagaacaacacaatgacaatgtgaggacaaaagcagagaagaataaacactaaaagagaaaccttttgtatcatagtatttacaacatttaacgatcataattttgagcattttcaggattgatcaaaatctatatgtatatatatatatatatatatatatatatatatatatatgataagagacttcattttgaataatcaaataagatacaaacaaccttaatccgtataatagtcattcatttattagcttgtggtggaggtggtttttctgccacctataggattctcacacgggacaacatgcaagcatgcatattgtcagaaacatactcaagaaagccaaagaaatgaccggcctcgagaatgaccagtatgcaaggacgctatactatcctaagtcctaactcctaatccatagaaaaatactctgaacacgtggtacgtgacttgtcttcttaaacgatacttggctagaaacttgcagtttcgtaatatgtagccgtccaaacttttacttcaaagtcaatctcggttaagaaaacatgttctgtccaccaaggtaataaagatcaagagtacttgatcgactataatttcatcaaatatatcacgacttgacaggctcacctacttatgacggagggctgcgatattggttacaaacacatcctcgctgacgatcattcggttataacctttcaaataatttcaatttcttctaatcctttcaaatagatgagaaaacagtcttttggtgaataaatctttcattcataccaaaaaaaaataaaaaatatatgtagtgcaaatgtgcaaatgattgcatataaggaaaataaataaacgtacctagctattttaagtgacactttctaggatt

SEQ ID NO: 68572 - DNA, 761 bp, Arabidopsis thaliana landsberg
gattctagttcaactggggtctggtttatcttccctgtggtctcgacatgaggacccgcacaaagatcccaccattcattacctagatgggcattcgaactggcataagatggagacaagctattaccaaatttaatacgaacaaattacagaactgaaaagcaagcaggaggctacagcgtaccgatatgataaacggtgatgggttcttccttaataccatccaaaatctccatcttataaggctcatttatcgccatgatccttttcttcgcttcttctctagatacttcttctcttaaaagtggtaaattccgactaatgatacgatcctaccagataaagtacaaagaaaaccatgaatactcttttaaattcttccctcaaagactttatcagaaactcaccatctctttcttgatcctcttaaggtctttatctgttaaaggctccatatcaaaatcatagtagaaaccattatcaatccaaggacctatcgtcacttttgcatccgggaagagtttctgaactgccattgccattacatgcgcacactgaatccacatcaattacactattcagctcaacaacaacatttataccaaaatctcaaaactttctcatgaaattgaatcaaaattcaaactttagcaaaaacatacttcactaaaagcataaaattacagaactctcctaaattcccacataaacagaaacagagctctgcataaaacatcaacctttatcccaaaccacatact

SEQ ID NO: 68573 - DNA, 161 bp, Arabidopsis thaliana landsberg
  unsure (1)..(161): unsure at all n locations
caatatctcatacaaaacacagaatgtaggttattgtttgactttttccacccnccaacccaaattaagacagaggagttattcaaaaacttaactccacccccctctcccgttatttagacctcctctcacatctctcatgaaatctattacctaccttc

SEQ ID NO: 68574 - DNA, 489 bp, Arabidopsis thaliana landsberg
gtaattcctttaggggaacctaaaatgtggccagtccaaatgaccctggaaacaaacctaatattaaatgttatggtttcggcctttaggggattacaagattcggacaaaaacctcctgatattcaaataaataaataaataaagcttcataccgttttgcattattgttttggtgcaaggtccgtttttttgcactctgtgtaaaggaagaaattactactaattgtgatgtaaattcattccatattacatgttcgttttccgagaacttaagaaaatggagtggttgaaaaagaaatctctctaagtcacaaccactaaattattgctttagaaatatagaaagcctaaagccgtatttttcgttactcctttatttgtcccttatgtgtgtccctcatatacaaaaataaaaattgcctcattattcttcttttttccagaaactaatcaaaactacagaatacttttggacgatttgtaatat

SEQ ID NO: 68575 - DNA, 349 bp, Arabidopsis thaliana landsberg
  unsure (1)..(349): unsure at all n locations
acgggtccacactttttttacgtacttcaatggcaggaaatcttaaaattattgcagtggtcttatactgaaacaaactattcaagtatttatagtgcgttgacaatgccataatatacggcaagaattcggaatgttagtaaaattcgtttataaggcgaaatgccatatttatcttataaacaatgcaattgtgcttatagaaattatatttaattgaacaccagcaagatcaaaaatagggaggcatggaatgtctctcagctcttgattcaccctataaaaacaagaaaagcaatggatatctaaactgttnnnnnnnnnnnnnnnnnnnaagcttgggatctat

SEQ ID NO: 68576 - DNA, 2588 bp, Arabidopsis thaliana landsberg
aaactgttatcttacgagtgagccgggtgaattgtggtgtcttcccgtgtcctgacggctatcaggagcaacatgacaatagtcggaagcaaaatctgccaatgaataagagaaagaagcaaaatttgatcaacaattcgaaattttaagaacaaaaattgcattcagcatcaaggagaagaagacccattaagacgagcagtgaataagcatgaaaacgacatagttttgaggagcaaagaaaaagagagaaacctcagctgaagtaacgaagggatgacgagttttgaggagccaattcttgcggagcatggccttcaattgcctcttcgatgaccccatttttccttggaacccagaaagaactctagacgatagattctagtcttggcttcaataagaaatcatacttttatggttcttctttgggaaaaggcaaagcaaagtagcaaactatgaaagcagagagaggtggcgaagacttgggctcacctcactgacatttgtgcttcctttttttttttttttttttttttcctgccaatttatttgattcattaatcaatttgattatacaatcaaacaaaagaattttgcaactagctgcggataacacaagtggtcgacaaaaatagaagaattccgaaactgtttcatttatttacgggacctttctttttctatcaaaaaacccaaaaaataaggagaagattagattagttgtcgtgatattaagaagataatcttatattaaaccaaaaaaaaagaagaagataatcttataattaatatatataagtacttaagtacagttgctgatgttgacccaaatataaatctttgcgtcaatgccaagtaggggtggctctctcacgggctccacattaaaagcctagtgtagtgtacgtggaacatcctgattcgttttagagttgcgttacgccaattatattacgacgaaaacgacgacgttcctaagtttgacggcaaagtatacgaatgtttttattatttttccgaaggttgccaataaaagccgccattagaattattcctttcattgccactccccaacttgattcttatttttatttttatcagttgtgacacaactttaaagaaatccaccttcatattcaatcctcaaaaatgctgtttttttttaacacagaaaaaaaacaatttttagtaaaattatatcaaatgtagaatcaaaatgacactattttcttcaactaaaaacaatgaaactttttttttaataccattaacttttaataatttatctggattttttcaaaatatatgatcaaatttcaagtaacatctaaatatatgttaaagatgattttgtttgggctgtcgtttccaaggatatttttgttatccgccagagacaaaaaaaatctgttatgagaagcggggctactgggccagctctttgtggcccataatttagaaatattttaaaacttatgtattgtttttgttttttttagggtgcgattttcccgactaaaccaactctacttgtctgtacatgtgtgttcgactaaacaaagttacaatcgtcttctgctttgttgttcgtccatcttctacaatcgaacctacttcccttaacatccaataaaccagagaataaattgatggttttcgattgtctcctgttagctcgatttctccgccggcgacttttgggatcaaatttgattcttcacgattaagattgaattcgccattaggtaaagctgctgaattttaaatgtctagctcaaaatccaaacccaaaacaggtcccaatctaagaaaagtattcattcgtctttgccacctgtacaactttttaagattttcgtttttttctctattggtgaacaagtgattattttagtctacctttttttcgatttccactaactaaaacgcaagtaaatttttatcttttgttttaagggatagtggaggacaaaatcttgaaaactgtttttggatcccttcaccaggtcattcttattctgcttctgtagaaagtaataaactaaagtcataatctatcatgaatatgtgaacttttttgaatttgttgtcttagtatcaaaaagctatggttttgaagattacagctaaacttttcaaacagtgtctttaataagcattaggaatttctcgaatgtttacttgccacattgttcgattatctcttgtctctttttgcacattccttcatgtcttctttcttgtgtgtgtggctgtggcttaaaatatgtgcaggtggagcatcatttaagaatcttatgctttggctacaacgcctatggatacgggtcaaagcagcatagaaccttatcaagccaagtcttttagtcgggagagcagtgtagcctcttctttaagcttatcacgtagtttgcctcacctaattgacaatgacgtcgatagtgagagtgtctcagaggcaggggatattggggaccgctcacttcggagaaggcatatgctggtagaagcagccgtttgtctgctgatgattttatagaacaagggactcatgatacttctcgtcaagaacaagatatattacatga

SEQ ID NO: 68577 - DNA, 2735 bp, Arabidopsis thaliana landsberg
ctaccaatattacaaaatctttcagacaaatcacgacgaccgtttcttttgctaaaccaataatgcttcttcttcttcgacacatgggggatgaagatcataatcacaagcattgcaagaaaacgcccaaaacctgccttgcttcttacagaaatcacacacataagctttcgccatatccagttttagctcgtgttcatgcttgttatctttcactttccttggaagtgaatcaccttccttcttcaaacaagcttttaactcaacaatccttgattccgtgaacggaaaactccttgatccatacaatgataccatctctctcgcgtttgtggtcactgttttctcttcgggtcctatgatgaccaatgcaggtatgagtttgacgttgaagattctacaaagatcttgtcttgttctgtcctcataaggtattgcaagccatggcatgttggtcatgttgatgttaaactctcttgagtctctgtctgttgaaattaagatgacttcaaaggagcctttatctgtagtcgctagctcattgtacacatctacgagttgagaagtgaaagatcggaaaggcggacaccagtgtgcaccaaagtacaaccctatggtctttcccacaagtttagaaactagcacctgcataacgttcgtagacataatcttataggatcgttagatgagaccagatatatgaaatctataaatgagttctttttaccttgcttccatttctggcaacaacgtaatttcgggactcgtgagtaaggagtttctccaactgtcctccaaggcgtttggagtcatcgatggctttgagttcttcttttcgctttttagtgaaaggaaaggcttcagaaccatagtcttcaattagaccaattacatcttcagcgactgagatttcatctgaatatagaggaaccagtgacgggatacgagaaattccgtacttgtcccttaatttgttgagtaggcttaaattgaagggaactgcaagccatggcatgcaccagaaatgttcatagaatgaagtcatatcatgatcaaatgagacaaagatgatctcgagttcttctcctcggttctgaagattttcgtagagttttatcagctctggagtgaagtccttgcagggcctgcaccagattgcagagaagaagagacaaatcgtcttaccatgaatatattccaacggcacctgattgaagtgagcttacagagtataaaagaccagacaattataccaaaatatagtgcaatataataacgagagagcaaaagcagtacctgtccactatgcgacaaaagaaactcaatcccttcagctgctagtatagagtagagatcaccactttcaggaaacttaacttggtaatcagctgatactgggatctaaactgcaacaccactatgctctttaagctgcttctgatcagaaacctaaaccaacatgagaaaacatgcttcatcaagaacatgtaccttagccttattgtacgagtacatgctattacatatccaaaacggctcaagctaattccagctcgaaagacttctaaagaaatgagcatatgtgttgtagttaagtactacttgtgaagactgagatgttctatacagttctacagtaaaacctgagttcttattctggatcaaaaaaaaactaaggtccatcccttcatgaacacatgaaatgatcaaacatacagaaatacatatcaagaccagttacaaaacatcagaaacccagaacaaaacttgaaggaacatacaactttaaaaaactgaaacagagaccaattataacagggtttacagacgatgaactgtctcagatggcctgttgagaaaagtaataaacaaatcttaacatacctgataccagagagatggtggtataacctctgatacgaggaaactataccgaaacaagtatcaatacagagtagattgtaacaaaatttccacacaggtgtaatccttattgatgatatgcctctcggttgattaagcttgtaaattccaagaaaaggggataaatgaaatcacatggggacaaggaaatataaatagaaaaaaaaaagatataaacttaaactttattgaagtctctctcaaaagaacaagtaaaagtaaatcaaaatatcctcaaagaatataccatctacaaggttaggttacccaatatctaaagcaacaagcttgtgaaaaccattaattttatattcttgcttatctcaacactgcatcagaaagtggacaagttgaatacgaaatggacataaaagacattcttttgcgtctagatgataccaaagtatggcacgaaattaatattcacaaaatggggaaatagctgaaaagtgaaaaaatcaacaaaagaacaaaagcttgaagctttactcatcaatcatatctgttaaaactagggggaaaaaaactgaatgcgaataaataaccctggcaataaaaaataaaaagtaattctcattacctacaaacaaagacgcgaacttgatcaacaaatatcaaggaaacgagaattagatgaagaataagactagtggaaagaccagagagagatacaggcctttcaatggaagctattacatgagtgagaactcctcagtcatagctctagaagaccgatgacgaccatcactagcagtcacgtataaagatcgaacactctcttgacctccaccagcatctctatcaaccgcttt

SEQ ID NO: 68578 - DNA, 923 bp, Arabidopsis thaliana landsberg
ttcttctaacgtaccatacccgcctgacaatttaccaaaagattcattcgacatattgagatctgatccatgtttctaaaggaaatgagttttatactcttactacatataaagaattgattacaaaccaggaagggcaatgaatgcgtcggcttggcgagccatttcagctttcctgtgatgcatatcggccacggctttaacttctccgatggtctcaccggttatctacaaatttattattaacataacttttaggtatctttatttattattgcctctaaaatgtgaacaccgcaaaacatcttatatattatattgcatggtctttttattgtgggtttaacatataaaaatattagttggtcaaggagatgtatcgtgaaggaaaccaaaaaacgctccaagtctcaatcattccttttttggtcctaccactattttatgtagatcattacaaggcaatttctatctcaataatactatatatatataataccaagtccaacaaaattgatatttcattcaatagagctttatttggtgcatacctctcttggcatcaaggtttttggaatgaccctacaagagataagtgaatataccggttaagaatgatgtatataaaacaaaactggtatggatttcaatctacaattaactagaaagaaatatgacaattggctattttggtatagataggccattgaaacgagattctctgatagaacaaacaagcacagataataaaactagttgtagcttgagtttagtaaaataatttaaaaagcaaagagacagttttggacaaaggaaacatgcacagatcctttgttgacggtgtatgttacctctctaatgatactcagtatctctcatataaccaaagaagataatcacttatcaaatctatgcgacaaaac

SEQ ID NO: 68579 - DNA, 590 bp, Arabidopsis thaliana landsberg
aagccaatatccagcaatatgatgccgccattgccgactataaaaaggtcatcagcattaacccaaaactgcccaatgtttacaaatacctggcaagcgctttaagccgtggttcaaacagccagacggccttagcttattttggagatgccgccaaacaaaacccgaataatgccgatgtgtacctgtacaacggcatggtaaagaacagcatgggcgataccaccggtgccatgaccgatctggaccgcgccatcaggctgaaccctaaaaacagcgaggcctaccaaacccgggccgatatgaagaacgaccggaagaactttaccggggccaaggccgatgccgataccgccctaaccctcgaccctaaaaacagctatgcctatatcagtcgcgcccgcgctaagtttaacctgcacgataccgtaagcgcccaaaccgatattgagcaggccatacagctaaatgcaggcaatgattatgcttatgtgatacgcggcgacatccgggcggcgctgaaaaaatataccggttccctgcaggattttgaaaggccatcagcctgaaccccgcaataccgaaacgta

SEQ ID NO: 68580 - DNA, 521 bp, Arabidopsis thaliana landsberg
cgaactacaactgtcctcattgtgagaagtaagcaaatggaatgagattctgttgaggtaactatttagagggtagacaatgtctaatgttttctgtttgatatttatataatcagataccaaaagacaaagaagaacttgaagccttacaggcaagaataagaaaacgtttcccagtggatgcatacaacaaagcacgtagggagctggacccaaatagaatcctctccaacaacatggtggaaaagctcttcccagtctccaccactgcttaaatcattttcatcaataggtctttcctctttttgggatcatatacatctttttattgcatctataagtttttttaagaagaggtgaggaatgagtgaatccaatatatttgtcatatttgtcacaaaactgtacattgagttttaccactcttttcacagttcctatgaataaatatttggtctttactttctcattcttggtgagttattctgacttcttatctcatttcccaagttactggaaca

SEQ ID NO: 68581 - DNA, 511 bp, Arabidopsis thaliana landsberg
attaatccaccacgcaaaatcaaggaactcatatatgcacgacctagagaagagttgccttatttcttatctacaaggcgttaaagtaatctaagctaatttactttcagcatcctgttgagtcacaataaattatctcacgcatatctctgactctacctaagaaacctgaaaatatctaataaacagggaaatctgttgctaacagagggagcagcaagagcaagaaggaaccaacaagtttgtgcctatggaacttttccattaagcagccacattttgaggtcactcttgcaaaagaaatgcctaactagaaactccaatttcaagctataagatataggcatcaatgcaatggcgcgagtataactctccagtagatacccacacattcacaatgttatcgcaaccacactaaaaaccgcaaatagtccagtggcataaagacaacacggaaatcaaacaaaagggtaaaaagagagaaaagacgatacacacctcaatccaaatc

SEQ ID NO: 68582 - DNA, 380 bp, Arabidopsis thaliana landsberg
  unsure (1)..(380): unsure at all n locations
agangacctatctatttaaacttgagaaaataagttatctcttgaaacagtaatcttaccgaacatttggtttctggtattgtatcatgtgaaaatttgcatttggtctccctacaaaagaagaaaaacaagtgcatcatcaaacaaaactttgaaatccaaagaaatatttataatccaaagccgttgtgttgacctcatggcaccgccccttgagatagtgtcgacaatacttgataggctttggttttggagctactggtttcagtttcagctttttcacgccaagggctatacgctcttgagctctttttattctagctattgcctgcatgaaatagcttatcagtaagtaaacatcttactccacacacaaaatg

SEQ ID NO: 68583 - DNA, 513 bp, Arabidopsis thaliana landsberg
ctgttttcatcattttacgaaattcaaaggcttccactacacaatttgcacgacccagcatgtcaaccagacacacgtaatgttcaggccatggttccaattcatactcatgttccatgatcttgagaaaccctctaccctcgtcaagcagacctgcatggctgcacgcataaagaagtgccagaaatgaaatgtgatcgggcgagacgttttcgtgcctcattttatcgaacaactcaacagctgcttttccgcagccatgcattccatatgcattgatcatacttgtgtattgcagcaaacctttcctttctatccggtcaaatacagcctttgcactctgtaaatctccacagcatgcatacatgtcaacaactgcaactgcaatggacccctctaggcaaaacccctttcggagtaagtagcaatgaatttctctccctttatttagtgcagataaacttgctgcagctgacagtatacacaacaatgctacagaatcagctgacgaac

SEQ ID NO: 68584 - DNA, 227 bp, Arabidopsis thaliana landsberg
  unsure (1)..(227): unsure at all n locations
ccacgtccgtgccgccgcccannnnnnnnnnnnnnnnnnnnnnnntaagggcatggggcgtcgttgatgccgtcgccggccttggcgagcggtgaatccttcctgcttcagttcgccgacgatccgctgcttgtcttcgggcattagttcggcgcgcacctcaatgccgagctgttcgccgatcgccttggcggtgcgggcgttgtctccggtcagcatcaccacct

SEQ ID NO: 68585 - DNA, 386 bp, Arabidopsis thaliana landsberg
aagcacaaataaataaacacaacaacttactttgtgttgactatacttctctctaacagcaggtagtgtagagccgtgagcagtactacacaatcgttgaagatccttcacacatcctctcaactccatcgctttatattgcgtatagtgttgcaacgtcgagttctgatcaaaccaataatcaatcaccaagccaatttcagtgtaaacaacaaagtcttaaaggttgtttaaacatacccatggccgtcttgttgggtctagaatgtacttagccaagaaaatggcggaagcagctactagtgaaggagaatgagagagcatagtgtactctagtagcgataattccgcaatgtagttagccatacattctagctgcatcaatg

SEQ ID NO: 68586 - DNA, 545 bp, Arabidopsis thaliana landsberg
ggaaggaaaagcaagtgaaagagtgccagccagccagctaattttagccgctgttcaattgaaagcgtatttcctgtggtcttcacgcaccaacttgtgagctcggttgcgccgagtaagcaaatttcggtgccgggcagcatcattagaaagcaaataatatatactcacacttaacatcgaggaatactgattcgctgcttgccgagcccagactgttggtggccaggcactggtactcgccataatgatcgtgatttacattagtaaccagtagcgacgtatttcgaatctcaatgtccgccgtagtggccgtcgtcgagtcgagcaaatgtccattaagcttccaaccaacgagggtaacagatggatttgcctgtgtacagtgagagagagagagagatagacagtgagaggaaaaagtgcgatccttcgttagtgattattaagaaacgattcgattcaaattaagcgcaattatgcattccactgtctttcccgccaaatataaaagggaaaagaaggaaagaggcgtcggtaatgga

SEQ ID NO: 68587 - DNA, 460 bp, Arabidopsis thaliana landsberg
  unsure (1)..(460): unsure at all n locations
catcaggtcgaggtggttgccctggtcgaaccttcgggtgatttccttgtagggactttccggctcgttttcttccggggaacgtttacccgcactccttcttttcttgaaagaatcagggtcgggaaaatatcgtacaaagagtgagcggatggatttgtcgagcnnnnnnnnnnnnnnnnnnnnnnnnnnnnnnnnnnnnnnnnnatataccagctctatcttacctgtgatagcgggtatgatgccggagagatcgctgatccatacctgtgtctgcttttcgatatggatgatcgcacggcgttctgcgctgctcatggcattctcaaatgctgcgatggacaggcgtgcgctcacaccgcttttcttatccacgtattcattgctccttgcttcatacgccacctgttctatcagtctttgtacaagatcgctcacagtcactctntctttctgt

SEQ ID NO: 68588 - DNA, 379 bp, Arabidopsis thaliana landsberg
ccggatcgatcaaccgagtgcggtttctcatcaataacaaaaatgagatctgctggagtgacaccgggtccttggtttccctactcacggaaatatatcttcgttcctttcttacatactggggttatatctattttcaagatctcattgccaacgatctgttggcccacgagcaaatcttttaggtagaggtgatgggtccgaaacacgtaggaaatgatcttttctccaaaagaagatgaatctaacatggagtggattccacctcttagacatggatggtcataccgctcgtatttggagctattcacagactacttatgaacgcttggctgacaataacattatttaattaatgtgaccttgagttgcccacatg

SEQ ID NO: 68589 - DNA, 341 bp, Arabidopsis thaliana landsberg
tgcaatggacgctcaacgccaacagctacgaggaccaagaggtatttgatacgaaacctaatgacgaattatgaccttaatccttacccgtgctgcgctgagatatacaacgtggcctgggatactactggctagcgcatttttgaacaattgaaatctggagttgcacttggggagttcataaaggaacttgctgccagcacgcttagactcaagaagaatatgcaaatatgctcgactgggactacgtgttcctgtaaatactattatctacgtcaatacacactcctaataggttgcaggtaatgaaggtggtgaaggacttcttaatataaaacgtc

SEQ ID NO: 68590 - DNA, 459 bp, Arabidopsis thaliana landsberg
  unsure (1)..(459): unsure at all n locations
gaaaatgccctatttgtccttggtgtaaaaagtgcatggaaattgtttataaatattaaaatcatcagaaaaccaaaaaagcgtatggagtgtcttgctggaaattagagtaattatcgaacatttcaattttattgagccgatagaaaacgatatttggagtattcaatacgtgtaatatatttacgctgtcgggtgacgatttatatgtactgaagacaaaacataaagaagacgatttacatgaactttagataacttgtaatcttgtatgtttgtccaagaaaaaaagataaaaaaaacttgtatgaattctgtttttctttttccgtatagtatcttactacaataattccagtaaaattagatatatatcttcttctttcatgccttctaatactgtcacactagctntcattttttaatgtatgtgaactaaaatttacttataacagaatg

SEQ ID NO: 68591 - DNA, 3517 bp, Arabidopsis thaliana landsberg
agagcaaaattcttttgatttatgcaagaatttaaaaaataattatataagctattggtgctgaacgaattatgtaaagtagtgtatgccagtggttaggtgatagtgatacgaatagtgtattacaacgaaacgtgaaattacattcttgatactggaaaacatatacaattttttaaaaaattgttcagatatatgatacacatttttgttgatgttaatttagtaatatatgtacattacacacacatgtgtcgaattcttctatgtactagtatcaaatatattaatcggtcaaactacttgacagattaaaaccatgtgcgacttctcgtatagcttgtattttaaagttttgatctgatcttaatatgcgtttattggatcatataatataacatgtggtattttaatatcataaattttggtttcttttcctaaaaatacaacaaaatatctaaaactttttgggaaatctgttagaagattttttttttgaatcaattgtagtaaatcacttcttaaaatgaattttttaaataatataaaacataaaagagaagagaagaggaggttccatcaacttcacttacaatgagaaaagactatgcaatttgcacaatcatgactttaaccaatacacatttatcagaagaaaaagaatctatctttatctttaatctctttacaaattcttttttattgataaaatttcaaaaatgatgtgattcaaaaatacaaaaatgatttgattaaaacatcacttttcttcctatatgaacttgtaataataaacgaattaccggacttcataaaatgatttgatttcgtatttaaggccatgaaatcttctaactaaagtttgtttctgataaggtataggatgtatattctttgaattgtgacaattggtcgaatgtatttttaccttaaactgatataagattctgctaatctagactcaagtcatcaagtagtcaaagctgagaagtgatgctctttttgttttcaaaagcaatgttacctttaagaaatcattaaacttgatcaactatttgcgtcacaaacaatttttgtttttaatattatccacggatgattaaagtaatgttgttcagaaacttggtgccttcgtgtctcgtaccatcacttgtgtcaaaccggcgtcaaacgcccactctcgctgacctcagcccccaacaaatacacacatacggaaatgaacatgtaatatcaaaccatataatattcagtaaaaaatcagtatcgataatatagtaaaataataaccttcacgcattccttcttcttctataaatacacacatttgcctccacttactctcgttcaaacaattcttcgtcctattaaatacaaaaaataaaaatccttaaaaatatatccttatcttcaaccaagaatgggagaggtccaagaaggtcccaaagttgaacaagagaagaagccggctgccaccgtagtcccagttgagactactgacggcaagccaaagagcggcggaggagattccgcggcagcagcagcaccaccggtcgccgcggttgtctctgcctttgtttacaaagtggatatgcactgtgaaggctgcgctaagaagataaagcgaatggttaagcactttgatggagtgaaagatgtgacggcggatactggtggaaataagcttttggtggtcggaaagattgatccagtgaaactccaggagaagttggaggagaaaaccaagagaaaggtggttctcgcgaatccaccgccaaaggtagagggacctgttgctgccgccgttggagagaggaaagccgatggtggagataaggaggcggctcctcctgctcctgctccggcagctccaaaagaggtatagatctaattgaataataacaagagacaactatacttttgctactgtacgccaagtttttgacggtttacgttagcaacttaaaaagaataatagtagtgtggatcacactagttaattaggcagataagctaaagtctaaacgaaaaaagattaggcagctaaaaagtaaatccagattttattgtctaacaaagtatggtttatgaatttattgatttgacttttaaattgtttgttgttcagagcgtggtgcctttaaagatcagactacattgcgaaggatgtattcagaaaatcaagaaaataatattgaaaatcaaaggtaagaagggattaataaccaacgaaaatttattaatttttgtttttaataaccaagtaagttactaaatttagaatacaaaataatttaactatgctaattaaaattttattaattgaaattaaacaggagtcgaaacagtggctattgacggagctaaagacgtggtgacggttaaaggaacgatagacgttaaagaacttgtgcctctactcactaagaagctcaaaagaaccgtcgagcctcttgttcccgccaaaaaagatgacggagccgccgagaataagaagacggaagctgccgctcctgacgcaaagaaagaggctccgtccgccggagttaacgaagcaaagaaggaaggaagtgacggtggagagaagaaaaaagaggttggagacggcggagagaagaagaaagaaggtggtgacggcggagagaaaaagaaagaagccggagacggaggagagaagaagaaagatggcggaggtgtgccggccccggtggcgatggtgaataagatggattattatgggtactcagcttatccaacggctcctatgcattggcaagaaggacacgtgtacggtcagagttattcgatgacaggtcagaattatccagtgggaggtcagagttatccaggttcaggatacaactacgcaagtgagagttacgtgccgtacgcgcagccaaacgtgaacgctcctggaatgttcagcgacgagaatcccaatggttgctctgttatgtaataatggggttaaactgtaaatataagaaactataagggtttaaaacataattgtgggaacacaaaacttatgttaaaattttgaaagtctactttgagccagcgaattctgacgtgtaacattgttccttaaatagttagtttttttcaattattgaataattaattgttttactttaattgtagtgttagcaaacaagtaacgataagaataatgtaatattatgaaaaggaatataactatcttgcaaaacggattattaatttttttatttagaaaactccattgtaaaatcattcaaatgattaacttgtacgaaatatttgaaaagattatcaacaataaatgatttttttggtggaaaagctaattaaagccattttctcgatcaactaatgatattattatctccatggtaattattcttaccctttaaatataagtaaagtttttatctttatggcattcaatgaattattagtcctaattatatctaaattaaaaacatacaaaacatgggcgtaaactttgacgtacgtaaccaaaaaatcagatgat

SEQ ID NO: 68592 - DNA, 356 bp, Arabidopsis thaliana landsberg
aagccattacaggctaacacgattcttattggttggaactcccacatagctaggtagaaatgtaatgtcgttgtatccgccccagccaatcattgtttttccacaagggattgtgatgtctctctatgggatcacaggactattcattagttgctctttgacgtgcgctatcatgcgaaatgtgggtggtggttatgaactgttcgacccaaaagaatgaatacagacgttctatctgagtggatttcctgtaaaaagactgtgcattctttcacgagcctttaggaaagatattaatcccatccgactagagaatcaagagggggtttgtgcccagcgcgtcctttacatggaaa

SEQ ID NO: 68593 - DNA, 457 bp, Arabidopsis thaliana landsberg
cgccgcagatcgatctcgaccacggcatccttgccgaacccgatttgcacgatccgcccgcgcatattcaggcaggccgggtttctggcgaagaaatcgccggcgacgatatcgagcaccacatcggcgccaccaaacgccttgactgccgccacgaagtcttcggtctcggtatcgatcaccaggtcggcgcccatcgatcgggcaaaagcgcatttatcggcgccgcgcgccgtggcgatgaccctggcgccaaatgccttgcccatctggatcgtcatggcgccgatgccggaattaccgccatgcaccagcacggtctcacccgcttgcagggcaccgtgctccatcaggttggcgtagaccgtcagtatattttccggcagggacgcggcctcaaccagtgataatccgcgcggcagcggcagcagatggcggatatcgaccgaaacatact

SEQ ID NO: 68594 - DNA, 529 bp, Arabidopsis thaliana landsberg
gaaccacatttcaaacatatctcaggttctatatgtagggaaccactaggtttacttattaaactcgaagccacttccccaacatgagcatagaccttctctctcatctgtgaaacaacacagttacacaccaaactaaactatataggtgacgttggcgttaagaaacactgcctaaatccttatagaaaacagctaaaagttaaaatggacattctaccaaggaaatatttcatcgcccattccaaaaggaattgagcaacggaaagtaaaaattttgcgtttagtaagaaattagaactgcctaaattgagtatcatcattatcagcaggtatcttatagtgaactgcacagaagctaaaccctgatgaatcagtttaaaatatatcagaatacctgaacttgctgatccacgtttcttggagcagtaaaaaaatggtttagcttctcggactcacatgtggccacattactatctaaaactacaccagtacagtttgtattgacacagccatacccattgatgac

SEQ ID NO: 68595 - DNA, 374 bp, Arabidopsis thaliana landsberg
  unsure (1)..(374): unsure at all n locations
taaaacagagcgaccacacagggttatagaatcaaaatctgcgattttatttttgactttacatctagtctggggcgcgcnnnnnnnnnnnnnnnnnnnnnnnnnnnnnnnnnnnnnnnnnnnnnnnnnnnnnnnnnnnnnnnnnnnnnnnnnnnnnnnnnnnnnnnnnnnnnnnnnnnnnnnnnnnnnnnnnnnnnnnnnnnnnnnnnnnnnnnnnnnnnnnnnnnnnnnnnnnnnnnnnnnnnnnnnnnnnnnnnnnnnnnnnnnnnnnnnnnnnnnnnnnnnnnnnnnnnnnnnnnnnnnnntaagcaatatttatatgaggactactgactcaacactcgctgccgaactctgagtttttgcgaggtctt

SEQ ID NO: 68596 - DNA, 615 bp, Arabidopsis thaliana landsberg
  unsure (1)..(615): unsure at all n locations
gcaccaacataaaaggatataagaggtagcatatttatctcgactctatattttctacttccagatttaataattttgagatccatgacaattaggatttggtgagtgacaacgaaagccaattactgactaattgaacaagttttcccacccaataaaacaaatacaaaagatatagtgaatatatagcttattaggtttaggattattttttttgggttaaaaattagggttacgaattgggttgaatttttttaaaacgtaacgtttgtgatcagtggtnnnnnnnnnnnnnnnnnnnnnnnnnnnnnnnnnnnnnttatattttatttttttgtcactcaaaattgcttccacgtaaatctgtaaaaaaagaagaagaagggaattcgctctcccatgcactaatacttggtaagttattgaattcacatcagactccatataatccattttatctccgaaaacatctgagtacataaacaataatttaaacgtttatcacaaaaacacttatctatttctttctaaagacatcattttttttattggaactttgaattttagagaaaacaatttgtaattagctgacaactcttttatatcggtatatat

SEQ ID NO: 68597 - DNA, 369 bp, Arabidopsis thaliana landsberg
agaaatagagatttaaaacacaatatccaaagcccttaacgactggcaaagagaagcaacactttcttatgtgatttattttgaatccttgccacccaatcaattatcagacgtctccactttaatacccttttatataagttggttacttcccttttaatttccaactaatcataatagtgtaaccacttcataagatacggtgctgccttcacgttacactacatgtatttgatagattatgcgaggtttataaaagaatatggtttgtgttggatcccgaaatatatagggtaaatcgaacatccacatttatatacggcggatccgtatttattcgaatagagtggtaatgagaattttttccag

SEQ ID NO: 68598 - DNA, 487 bp, Arabidopsis thaliana landsberg
  unsure (1)..(487): unsure at all n locations
gatatcgtcaaatctaaaccgtggctctctataatagacttttgataggccttaaaaattcccataaaagggatcgggtgtatattttttcttaatttcttcctcagttagcagctctctnnnnnnnnnnnnnnnnnnnnnnnnnnnnnnnnnnnnnacacgctcgcgctcttttctcattttatcatcactgacattgaggaaagtatcgatgtcgattccttcttctctaagcgattgtaggaaaaccgtttttctatcttggtcccgctcgtaaatttggagatctgagggcaggcctatggnnnnnnnnnnnnnnnnnnnnnnnnnnngagcaattgagtggatagtcgaaatccagcaacggtcttgaacaccctcaacatcctctaggcgttcctgcatctcctcagctgccttgttggtaaaggtaagggcaatgataccctccttagtggtgtttaccagaatgaaccttattctttca

SEQ ID NO: 68599 - DNA, 528 bp, Arabidopsis thaliana landsberg
  unsure (1)..(528): unsure at all n locations
tgattggccttacgcaatccatcttctgggttactttttcgttgtcgattggtgagtttattttcttctttgatgtaggtgtttgcgttgtgaacctaaagttagttcctttatgaaattagagattgtttcgttgaactcttgtgaattttagcgcgtcaaagttgttcttactacttcgattgctaggtcctaggttgaatctaaggtctaaagatctgctttttacattaccttgtttctatccagtgatttgagaaattaaaacttgacacaagttagtagttgttgagacccatttaacatttttttcctttgtgtattgatagtgagtgtagtatgttgaaactattgagttatggttgtgccttcttgactatggatttggttttgatgttttgctgtgcttgtttggaaatactgcagtgatagcgcacgtttgctctggaaaaggatnnnnnnnnnnnnnnnnnnnnnnnnnnnnnnnnntgttgcagcttgggggattggtcagaagctgtggacaca

SEQ ID NO: 68600 - DNA, 562 bp, Arabidopsis thaliana landsberg
ggacataaactgagtcggcgtggtgtcccaaccctcggcaccaccgactttaaagttgcgtgtcatctccgacatgatctcagggtgacgtgggctattctcttctgcctcttcccttgcctggccctgctctaccctacgctggatatacctggctctcatgtcgatagtgtacttgataagaaatacccgggagatagccataatggcagagagttttggtgtgaaattggcatagctctcccaggtattatcgttccggatgctcaataccatcaggaagctgacgaggatactattgtactcagtggacttggtgaagtgatcaaggaccgagacgtaaaaggcaagtgcaggcccctccagctcagtgtgcaactccttgatccgagataatatcgacgcatctctggacatatttggcgtatctgcgagctctgctgcgtggtccatcatggtattgaaggctgcggactgctttcctgtaagtttgaaaggtggacgattgactgcgtctttataggacatgacccgaacgacatatgcgagaaactgaggcata

SEQ ID NO: 68601 - DNA, 387 bp, Arabidopsis thaliana landsberg
aagatcgacgcacgggttatcaatctaataatacgttaatttggaagtataatccaagttccaaccatgaaataagaaaaaaaaaaaaaacttatccaaccaaaaatgattaactacacatcatctaagacatgactttgagttctgagttataaaatcacttgatgaattaagagtatcagtcaattatgtacaatttcataaatgaaaagctcataccgaactttctgacaaaaatgaaaaatcaaatcttacagagttttctttagacttggtcttttttttttggtaaacggtataccgtattcgagtaagactagtctttaactctttatcagtatttctttttgtttgctcgaaaactaatatataattcattcgagaagc

SEQ ID NO: 68602 - DNA, 534 bp, Arabidopsis thaliana landsberg
actacaagttgatggttctttattgaaataaatagctacgaacgctgaattttagcacttggaaacgaagtatggacttgctactagagttgacttgctgctaagtgagaatgaagaggtggggttggtattttgaggattgtctctaaccagtcattacgaaagcacatgcctgaattcacccgctagagtacctgccccgagtttccgatcttatcatatacccccaaacatagccgtgaatcgttgggtctttaacatacgcaagagctgaaaacttactctccactgattacgcttagtcgtttcacaatcgcatcattgtgcacccctgcgttatctaaagagcacacaaacctaatgtcttcttcggccgatatgacgtgacccaacctgctgagagagccttcagtcgatctacatgacccgtgccgtgcccatctggattaagatggctgttgtctgcaacatcacacttaggagacgccgtgttgtcaaaatcgtaaactcaccacattaaagctgttttgctaa

SEQ ID NO: 68603 - DNA, 508 bp, Arabidopsis thaliana landsberg
gatagagcttaagtgaaaacattaaactataaccaagaatattgaattctctctctctctgagaagataatctttcgcatacactctctatctctttctctctctcctagtctttttttctctcttgctccgtaagcagataattttttttcttcttcttgcagtctttggcaatggagtcaataatactttcgttgttgattttgttcctttcttatggctttgcaatggaaccaccaaacttgcccgacgaagaatgtatgttttatttatttattttttacggttatggttgcttataaatatgttaggtctaatttcacattttctcagggcttgtttgttgttacttgctgatagtttgacttggtatatctatcaatggaaattaaagttttgttttagttttaggtcattttcatttatgctttattttctatttttgcagtggaggttttaagaattgctggggaaaaatgatggaacactaaatgatattacgaggcca

SEQ ID NO: 68604 - DNA, 423 bp, Arabidopsis thaliana landsberg
atagccttatgacatagatgacgcgacatataggccatatgccttaaatcagaattgcttatactataaatgaagagcataagagtccgcatagaaatctatcttactgaaagaagtcgcacgtaacatgaaaggtcactgaccccaaactaaaatgtatatacacagttttatattcctgcgtgtgagtgtgaatatattatggactccatgtggcctttttaaaacatgccacgcacgcttgctattactctctgtttttgtgggccacattgtaactatcctaggggttcaacgcatgtgcgacctcccccatattccagtggtgtacgagccgccgaaggattcatatcctgccccgaacgtcgacggtggtacgtattgttgggaagaacagagcggcgtcacgtggctggattctcg

SEQ ID NO: 68605 - DNA, 588 bp, Arabidopsis thaliana landsberg
  unsure (1)..(588): unsure at all n locations
atggccccatgaagcctctcttgggctctaatgggacagaggagtctgatttaacatctacagcagctttaacattctcacttctgtttgtctctttagcagcatctaagatttgattctcaattgcggatacaccagcatcagacttctctgctaggacagtcttgaaatcacttacatgatcctcaggagtgtcactatttagagcagcagcatgagcagcatcattatagttagagggcacattgttgacagttttactgccagaacctaagccctctaacagatcacttaggtctgtcattggtggtgtcatctagaactgaaagttttagcaagtcactatttgacagatgactcttangtggtgacagattactaccgacaactttaggggccattatctaccttcttttgttctggaccctcataaaagaggccttccatttctttctgaattgtggtgtgctactaaaaagattgaaagaggtgctagctagacttccaatgccttgccatgtggcagctctggtcatatcactagctgcatcattctcatagcctaggatagcctttcctgaaattatg

SEQ ID NO: 68606 - DNA, 559 bp, Arabidopsis thaliana landsberg
atcaagatttgcatcgtctcagacaaaaatgcataactttaacattatagtaatacagtaatttacgcacacgagttagcatttagttaactattatgtagttgtatatgatgtattagagactagaatgatgattcagtattcacttattattacacacatgcacaatgaccccaaataaaaaggtgtgactaaagtgatatatttttgtttagagattacgagtgtaccgaccaaataaaacgacctattacaaacccaaaaggtcaaaccaaacgttatccgtgcttcaaaactcaatttcgagtggtccaagttaccgagagagagagagagatacgtcgaggtctatatatgtctatcgcagagatcataatatatttcaataaataaatagtcatagaaaatgaaactgaaagtgaaacggagcgttttaaggtggtggaagggggtcgaatacgagaacttgaaaagtcaaacacaataaatcctgagcgagatagtccttggctcatatcatattagcccatataaatgtgacgcaatcacagcccaatat

SEQ ID NO: 68607 - DNA, 1266 bp, Arabidopsis thaliana landsberg
gatcttattttgttttcttgaaacaggatgttgctactccaaaattatggaggacaaactccaatgtgttgaaggcgctatgcatcacaattgcccggtttgttttgaggtataagaatcagattcacccatttcttaatgcaacataatggtttcttacaattgaacttgatgtggatgtatttgttctcagtatctgcttgattcaacaagagatatcactgtcctacgatgtggtcacactatgcatctagaatgcacgaaagatatggggctacataaccggtaaaagaactctcaaatcttttatgcaaccgatgaatgaagtcattgataaacaaagattaaaaaaattcttgatgctttgtgtagatacacatgccctgtatgctccaaatccatatgtgacatgtctaatctgtggaagaaacttgatgaagaggtgaggtttcttgatctgatgttcggtctccttgtatagtctcttatgtttcactaagtcttacatttaaaattttgcaggttgctgcatacccaatgccaaagttgtatgaaaacaagatggtaaaccaaaattaaattcgatatttgattctcgtgtgtgtgtgtgtgtttgtgttatgtagactttctgatttggattgaaaatgtgatgtgttgagtcaggtatggattctctgcaatgactgcggctcaaacacgaacgttcggtttcatttgatcgcgcataaatgcagtagctgtggttcctataatacaagacagacacagagaggctctgatagtcactcttgctcctctggaatgcctcaggttgttggttcaaccggttaatttttaaccagagctggttttggtgtctgaatttcccatgaggagattatttgtactttctatagtttggtatcagtcaatgcctttggttgttaacaattatatcatcacagattcaaaagctgctttgagccaatccaacttgcaagtctagaccattatagcccaaaacaaccatatcttgaaataaattatatatattaatgtttaaataagtaaaattttggtaaaatcagtaaaagaatgtacaaatatgccttatctttttaacacaaattgagatagaaatttttgtcgaatttgcacattttcatgaaatctctataactctatttcgtttcttgatcaagtgaagttaaaatcctttcttgttgtggacataataacttgaagctattgcccaaataatatactgaaaaaggtaaatcaatc

SEQ ID NO: 68608 - DNA, 475 bp, Arabidopsis thaliana landsberg
  unsure (1)..(475): unsure at all n locations
gattaggacaattttgttgtctaatagctcccaacatctccccctttttaatatttttataaaggcatattatataataaatttgtagccacatatttaacgaccacctaaacatctgtttgctcaccaggtgattctctaaaaccatgaaggacacaaggacaagtcatctatgaggcttgaattaatggttccagtctggtgggtataacctgggctagccaagagatttaggaacgaagcaagctctgtgggtagaggtagaggtctgatccccagtgtgcaatgttaggggccacatacaggattgactctcaggcccacagatttttacccagagtaaccctgacctgctccggtgtcgatattcctgggggaaaggaccctagggcactcagccttcatgcaatcagacatgcctctcagnnnnnnnnnnnnnnnnnnnnnnnnnntctctgtgcagcgtttaacctta

SEQ ID NO: 68609 - DNA, 1123 bp, Arabidopsis thaliana landsberg
atgggatcacctcttttcatttttatctccatttttttaccctatataaaaaaatttaagaaaaaaggtgtccaagagaatctactggcaatttttaagaaaggattcggatgcaacaaaaaggaaaaccatgaaatgtggagtcacatgtagcaatcattatgattagtactcgtctttattatttaagaggcgcgcgattcctcagggctcatttcattgaccaactttaatgcaacaactcttcctcacatagtcacatcccattcacattacattctttttcaacttgtaaagcaaacacaactcatttaatggataccattctcggaaattttcagactcactttaacattttactgtctgatacatagcctttgaaactcgtgttaatgccactcacatgagaaaccactaaattataacaacaatataagattaaagtggaaacctaaacaaattctcatctgaataaagggaaaatccaaacaaagacaagggtttcaagaagatgcagaatgaggtcgatcaaagtgaagaagctgtgctgcacatttaggacagtcctcaacaagcttaggaaccatgaagtacatgaaacaagctttgcaaccagcaaccactagcacatcttcttcttcttcttcctcctcttcttcttcttcttctttatgattctctcttgatgatggagatgactctgatgaagactcttcgctgtcgtaatatgagctatcttcttctgaacacacggttccatatgagtctccactgtcaggatctgcattcatcactttccttggatcctctttcactctcattccgtttttccagtttatgtagtaaatctctcctgtctaaaacaaaacaaaaagctcacctcatgaattcaatcataaagtgctcttattactataaagttttatcttttttctttcttggcaaattgcaatgcacctcccaaattttggttaagacaaaaagctttggtcctagatctatatatgagcaaatgactatgtacattttgtatgtatgtttagtggtagcgcggcattgatttctttaggcaaaaaaatgattcatgaggaacaaaaacatatgtttgtttgttttaattcct

SEQ ID NO: 68610 - DNA, 1533 bp, Arabidopsis thaliana landsberg
taactgatgccacattcatggactaacgggacagcagtgtacagtaaaattggaacatataacaagcatctaaatatcttttatatggatactcagatacaacaagattcgtagcattcaatgtgatagtatgaaagagctcaaatacactttaatggcaaggaaaaacatacatatttttacatgaatatcacaccaaccacacacattttacattaacactctactcttgatcactctcactcgtatctgaaagaaaaactaactataatgtggaggacagattgcctctatagctttttgcaaaagagaaacaacaaagaaacgaacgtacgtgtgaaagacgattgggacatgagtgtcaattaatgccagattccatctatgtctaataatcagagaagtattattattagttaccgatcaaccttttcccactaattaatcccttctttcacttctaaactgctttctttttctctggcacttacatagacggatagaccaaacttatcttaaagccatattctatgatgttttccttctgtcgcagatttatagagatatttcgtaattatgtacaaaccctacgtgcagctgtacccggtgtatacatagttacataattaacagaaaattcactttatacacatagttttgggtaacaggaacttgactacttgagtagtaaacttttcaattaaattcgagatatgttactatcactttaacttttgtagagaaaatgtcgtctgcaatggtaactggtttgaaggttcaactttcagcgaataatactgcgataccattttaaaataaagaaggaagatcatagagaatgacatttgtgtaactatctatcgcaagtgtaacactttttttggaaggtttgtataagtacaattgaacagaaaaacaaacaacctgatagaatactatattggtacaagtaactttttaaatacaaactgaatgaaaagtatgtttagtgatgtattaatttcgtataatagaacattttattctataatgtcatcataatcaagcaaaacgccaaaatagtgtaatgattctaacttccaaaaaagggacgaaactgtcctccccacactctcatttataagcgctcgtgtgacaaatcacccacgctctctgctcgcgcgtcagacatacgtgaacacaaaacggcgttgtttctacatcgagccaccattgcgacgtggtctacacgcgctcatggaggtgagtgcgatagggggagagagagagtgcgtatatttatctaacgtgtgcctaacacaggcgttgggcaatgataggatcgtactacactggacgagatggaccccacaacggagtgaaacaaatcttatcgatatgatgttatctgataatgtcacgatttaaccgaggttgatatatactgaatgggatctattttctcgtgatcggcctaaaatttaaggtagcactaccgtatctgtatgctaacgatggatatagttactaaagaagctctttctatgcatgtaa

SEQ ID NO: 68611 - DNA, 553 bp, Arabidopsis thaliana landsberg
  unsure (1)..(553): unsure at all n locations
agggcgtaacataagggtcaaatgttgaattttatttacacgcttgaatagagccaccaatacgggaccagctttgaccgtcataacaaccccggtttactaaaaccatactaattacggtttcgtcaaaatcaattttgtttctcgtcactcaatgctgcttataaaagccagtcccatgctcacttttattgcttctttgacacacttcttgagaaattgcagcaaattgcttcttctccgatttcgcagacgattagatctcaacaagcagttttcgaattcgagcgattcatcttcgtgaaccttcttcttcaatggcgatcgataactctcgtcctcctccggacgaaatcttttacaagacgaagaagattttgtatcgtggacaaaggtgcaatatcattctccaggataagaatggaccatgtcctctcatcgccattaggacgtatatcttctattctcctcccgattttactctcgctatggnttgggaacttcgattagcgaacgacattggggaaatgtatgcgttagtatctcgagatct

SEQ ID NO: 68612 - DNA, 2265 bp, Arabidopsis thaliana landsberg
caaaccaaaatacaaggtgaatgttctattacagttctttctgagacgtgcgtccaatttttctagtaatgctttgtttagcatttgactacagtcatcttagctacagctaaattaaatcttgctagatatatttcaatcatatacaacttttccttaaatttgcaggtagatatctcaagttcaaatccacaagctcaagacggagttgatgaggctcttgctttacaattgtttaattctcagccctcaagtattggacaaatccaggcaagagaagctgatgtccaagctctttctgaactaacgcgtgcgcttgacaagaaggtttggccagttaattctcagtctatacatatgtgatatgtttccgttcttaattctcagtcttctatacaattttaactctcttatattttctttttctatggccgggttgcattttatatctttccatattcataacaggcgtgctatcgttaatttttttgtttccttcacattatagtagagatttcattaggatgtggttgaatagaataaaagtttctaattgactaataagaaaatatgaaatcataaatattactaatgctttaatggactcataaaattttgaggttcggtatgtttattcactccatttgtatatagtttccttctcgttcatgcatgtcttccatgtttttcatgctctttcgacattattgtttccatttcaactaattgttgatctacaacactacaggagctagttttgagggagctaaaatgcatgaacgacgaggttgtggaaagtcagaaagatggacataataatgccctaaaggattctgaatcttttaagaaaccctaccagcagttctctttcagctaagcgaaatcaatgagcaggcatgagtttatgaaggaactatatgagtcatcttgttgtctttactacatacagcttctgatgtatcgcattttgtgtcttgctatgcacaggtttcattggcacttcttggcttgaggcaacgaaatacttaccaggagaatgtaccatattcatcaataagacgcatgagtaaatcaggggaacctgatggtcagttgacatacgaagacaataatgcatcagacactaatggattccatgtgtctgagatcgtcgaaagttctagaataaaagcacggaaaatggtatacagagctgtacaggtgtgtgtataacgagttcacctgtttctatgtttgggattcacatatgaaaaagcttctgagtggataatttactcatcattggttgcgcttcgcaaggtctaagttcaacagtttcggctacgtaatgattttgtctctgtttctggtgcaggcattggagttactgagaaaagacgaaaataataatgtaaatatggaagaagccattgattttgtaaataatcagctctcaatagatcaaacagaaggatcatcagtccagcaaacacaaggtggccaggatcagcgtcttccctctacaccaaatccacctagctcaactcctgccaatgattcccacctaaaccaacccgatcaaaatgacctgcaagtcccgtccgaacttgtgtcccgatgtatcgctacattgcttatgattcaggttaaaatcttaaacccactcagtaatgttcgtactgagagccatctgcccaattatattattaggctctacctttctcttcatagatttagatattagaaaaagttaagcccttattgctgttctttatgctctcactctgtggttgctgcattagtcatcttgtattggggttcttcttttgttcatagtttgtgatcctaacacagcaattttgtgaataaaaacacaatgcagaaatgtacagagaggcaattcccaccaagtgaagtagcccaggttctagactcggcagtggcgagtttacagccttgctgctcgcagaaccttccgatctatacagagattcagaagtgcatgggaatcataagaaaccagattctagccctcgtaccctcctaaagtaagaatcctaaaaccataacttaacctttgtgtctcttcataatgcttgtttctctttgtaaaatcaatatctccttatagaaaatccttttatataccccatttatttggagtgactcacaacagtttctcgatttcacatttatttatatgtaacacatcatttgttagacgggactgcgtcacggtccattgtcattgtcttattaggtactaactagttccattccttatcg

SEQ ID NO: 68613 - DNA, 699 bp, Arabidopsis thaliana landsberg
  unsure (1)..(699): unsure at all n locations
attaaatattaaaataatcctaaaactaatccctgaaatatgtttaaaatatgtttaatataattttaaaatattaaataaccctaaaactaatccctgattaatctctgcatatctccgatttttctgttagacgataggactattgcgctagtgatttttgaacaacgattatgacaaagtgttttgggtcaaaaccacatatacatttatacggttgaatttgttcttcttggtagcgagtacggacgaactacggagtactgtgggcagagctgttctagacagaagcatatcaaatatgaacttgcggacttgcgtaagcataagtacaacggttattttggaaacaaatcaatacttgaattggttatattgtttgatgataattattgtagagtttgaatattaacattcgcacgacacttggactcgtacgtggagactgaagattccatgcagagcagaagttaaaggtgcantttgttcttagccaaagaaaccaggtcacatgtccttagtgccacaattcgcattttttgccattttgcggtgtttacgttttttccttctttttgcacaggtcgttgaaaattagttgagaagaaagtgttaacatccttctggagatcgaatagtacttctactataccattaagttactatgccttatacaatagatttatcgaaaaacattta

SEQ ID NO: 68614 - DNA, 742 bp, Arabidopsis thaliana landsberg
ggcgtgccgcgcgtacgtcgagcgcgcgaaggcccgaccggcgttcgcgaaggcggatgccgaccagctcgcgcacttcgtcaaggccgacgcggcgaattcctgacggcgtcggcgttcgaggcctgagcgctcccggccacgatgcgcggggcttcgactcacctcaagccgccgcccgacgccacccaatccgcgtcggctcgagcttcaagatcacgggctcggcgctgtcgccgacgcgatcgagctgctccacatcgtagtcgggcttcggcaccgtgagggcgatcaacaacaagcggagcaagcgatcggcctgcgctccgatgggccggtccgtatgcggctgctcccagcgcgacaccgtcgcccgatgcacgcccattctcttcgcgaaatccgcgccagagagcccgaggaactttcgcaggaaccggacctcctcgggggcgagccgagcgggcttgtcgatgacggcgctcgcgatcgcgcgatggagatcttcgacgcgcgggatcacgatctcgtgctcgccgcagacggggcagcgccgcacttcgacccccgcgagcaccacccccgggaggccgcacgcgtcgtacggcacgctctcgcgggtcgagatcatgtccgattcgcactccgggcacttcatggccgaatatcctcgagtcgggcgcgcggcagccgcgcccggcagtccgccccccccggcggaccgcccgagcgcattccacca

SEQ ID NO: 68615 - DNA, 2641 bp, Arabidopsis thaliana landsberg
atagatcgtggtctctccctttttgaatataacatttgattgccctctattattaataatattaagactttctaacactgcacaaatgaaggcctaagttcatctgcaacatcaggaacgtttttggttgaggatggtccatattactattgcatgcttgaaatcctacttggaaggctatctggatctctatataaccaggttggtttgtcgctgttactttagaaactccttatactttttgttggaagagaagtatgattgcttgtatgttttaatctctcacaggccttgaaaaagatatcaaagtttgttcagacaaatatccttcctggtgcaattgccgaggttgggttgctttgttgtgcatgtgttcattcaacccccgaagaagcagttgctcaaattgttgaaccaatgctccttgctgttatatcttctctgaaagaaatccctgtcaatgggtatggaggaaaaggaagtgcagagacccttgtttccaataaggttcttgtcagtagtttttgttcgacattttatgtgttcttttcaatatgaaaagtaaataataattattttatttcgtatcaccttttttcagcaagacaaacaaacactttctccagcgcttgaggcagctatagattatcagctgaaagtattgtcagttgccatcacttatggaggcagctcacttcttccgtacaaaggtcttttgatcgaagctatatcttccgcatttaattcctcatcttggaaggtattattttttgctgaattgacatctatggactcagatttttcttttgtctttgttattttttagtgatgtgtacttttatctggcttctttgataatgtgatggtcttcttatggaaaggttaatggagctggggatcatcttcttcgatctctcctcggaagtctgattctttactatcctattgatcaatacaagtgcgtgataactcaagaatgtttattataaatatcttggggtttttttgcttgtctctttactcgagtactattctgtttttgacagatgtttgtctcgtcaccctgctgctcctgctttggaggaatggataagcaccaaagcttcttctaaggatgagcaggtggcgcattccaggtggcatgttcccacccaagaggaaactcagtttgccaatgagctcttagatctccatcttcagtcagcactagatgatcttttgagtatttgccaatcgaacatccactctgatgcaggtaatttcagtcattgctttgtgtgtttcagtcttatttcaaggatatgcatatttgtctatcgtatactagttgggtttgcgtgtttcatcttatagctaaaggcttacatttctgtttttcattggtgatattacgtacacttgtttgctctaaaaaatttacacgtgtttgcctcattgatgttatttgtggtgcaggagatgagaaaacacaccttaaagtgactctattgcgtatagattctacattgcaaggtgttttgtcctgcctacctgatttcaggccatcacctagacatgatatggttgaagatctacagttctttatagctggagcatcgggttcatgtgttggcagcgctgagatacgagaaaaaactgctataactattcatgcagcctgcaagtaatgtttgttcagtagctgctctgcttgcttctctccaaaacgcatatgcgtacaactggaaatattattttgtgatggtttgttatgtgatgtttgcagatacttgttagagaaaaagtcagatgacagcatcttgttgatattaataatccgcataatggatgccctgggaaactatggtactgcagaaagcctctggcgtgctccctttttgcagttgacaagccacatgtttttccctttgtaacacttgtcctttaaacgtttgcaggcagtttggagtatgatgaatggtcaaatcacaggcaggcttggaaactggaatccgctgcgattgtagagcccccagcaaactttattactgagtttaattctaagggcaagagaaggtaggtctctcttttgtcttaattgaaaacatacatatcttaattttaatttcttgcaaattgtattgtcttccaggcctagatgggcactcattgataaagcgtacatgcacaacacatggagatcatcacaatcgtcctatcatctgtttcgtacagatgggaacttctctccaccagaacccttaacatttttggttgatgatcttttgaccctctgtctgcacaactatgaaactgttcgagtgtgagtactttcgtgttcatctatgataacaatgcatgtcaatggttatggttcttaagtttgggaaaggattaaacaccctattcagtgagaattttctgtaaatttctctgcagggctttacccttctttcaatacattaattgacccggctttgctttaaattctggtgttattcaggcttgctggaaaatctttgataaaactgttaaagagatggccgcagttgctttcaaagtgtgttctgtcccttactgagaacaagcgaaagccggatgtacaagaatatgtagtccttggttcttgtgccattctctcttcacacagtgttctcaagca

SEQ ID NO: 68616 - DNA, 536 bp, Arabidopsis thaliana landsberg
ttctaaaccccgccgcgaccataattagtacgtctcatcatcactgctattaaatgatacgtggttaagagatctacggttataaagtgtgctttatgttttgttatgatagtgtttttttttcacttttttgaattgatatattatcatagggttttccaaattgtagactaagctaatcaagtccatttttttaaggcttttatttaaatatcataaaattcaaatacatttggagtttttttttttctttttgtataacttaagtttaagttactaaatttttcaatatggttaggttattaactctcgttatgcgtgagtttgtttttatcgatttttaatatttttttgggtttagtattcatttaagtaactatacacaatatatagtaatgcaaaaatactattttttatttatttatttattaattctaatatatatttttactatatattttagagtattaatttatatttaatgtcgaagtaggttttgaaaataaagaccacaagtttaatatgtttttaaccct

SEQ ID NO: 68617 - DNA, 389 bp, Arabidopsis thaliana landsberg
aaatagttttaaaagtttgtcattttttatttatcatttcaacaatgtcactctttttacagtcgccaaaacacaataatggagcacaactattatgaaatatatagtcaatgcaaatggtgggacttcatatttagtcgattttgattttgtaatgaatgatgtttttacgacgataacggttaggttttgatcttggctttcttaatttttttgcatgtatgaatacgactaatatggagctgaaattggaagcaattacacatgaagacttttacaagtttccctatttttcttgagggtacgtctcgatgagtcatattcacaatttcactaagactttcaatccgttacacagagatcgatatcaatttcttatattctgacct

SEQ ID NO: 68618 - DNA, 581 bp, Arabidopsis thaliana landsberg
  unsure (1)..(581): unsure at all n locations
tatataaagagatagccagatactatcatcccactaaaaaatgtattaaaaatcgatactatcatttttgaaactaggagggttgatgggagtaaccgagtaaggggcccattaatgatgaacatgaaaaaccgaagacactgtgaactttgaaccaaactcattttcttggtgtttcggaaaatcttggatttatttcagagcctgccacaataattgaggtgtagacaaaactcaattttgtcattatgtttcctatgtttctcgtaattattggaagctgtacacacacatcttttttgtttcttttgtcaatacatacacaataaagacaacgcgacgatcttaagtcctaacttcattctcgttaatttatgactttatttttacaaaaaaatattggaaaaatcaatcgctcatatgatctaatctaataaagtgtaacaggcacatgtattgtaatagtttgtgctaatacgttactgtgtcgataattctaattcaaatccgngtattgtatattcttaataaagagtgtagatgagatactacataatnttaatggataacaatcatactat

SEQ ID NO: 68619 - DNA, 136 bp, Arabidopsis thaliana landsberg
cgataagagtatgtaatgatgtgtcaaaatgacatgttactttcattttacttagaggattttatatagtattatattataaaaatgacatgtgacttttattagaaagcatatattatatatttatgtattgccg

SEQ ID NO: 68620 - DNA, 508 bp, Arabidopsis thaliana landsberg
actaaactacagccactgtgttgtccaatctataatattaataattatattccaatatgtttaattgctcgtcgttgtctcttcctttcttcttcactgcaattgctcgacgttgtcgcttcctttcttcttcatcatccccgacgaataagagaaccaaatggtcaagctttggatcgcgcgattcgttcatctgaaaccgggtctggatccgatgacccggttgcatctttgatccatgtgttccctaccatggatcctgaggttcgttagatattgtgtcgtaaagtttccattttttactgatgaacaatgctactacagtaattgctcttttcatatactttaagttcatcaatcttccatttaaaaagtgctaagttatattgatgtagttccttcatgaaatgaactaggtaacagttttgtgtagctattgattgatatgtcttcatctacagattaacattgtgataaccaaagccaataaccctgcattgcagagaaa

SEQ ID NO: 68621 - DNA, 517 bp, Arabidopsis thaliana landsberg
aactatatgttttgataaggacttaattacattttaaactatacataaaatttgatatgtgacataaaaattccatgtagatataacacacatccttttgttatccattaatgtttagggtctagcgatgcttagatcacattttcatctctcgcataagaattcaatcctagacaaaactaggaaagcttaatctctaattcgatacatatgcttataatcgtcgtttcaattaattacgtaactttaatttaattccacgaaactgattgtataatttcgtatgcgtattctaaaaccattgcatgtacccatcagctttatacaataacagctgggacattttcttctaagggaattaatatacattgcaaaaagacaatgtatatatatttaccaggaaattagtattatcttcgttcacaatctctaagcagagcatttgttcaggaacaacacattcaataggaatcttatctacccggaaaagccccagtccacttggtgccttcttttt

SEQ ID NO: 68622 - DNA, 266 bp, Arabidopsis thaliana landsberg
  unsure (1)..(266): unsure at all n locations
cgggagaagaaaacccatggcgagataagcagcgtttttgnnagtttttgagangncgacgnaaggggggcgaggagcggagacgaggcaaacgaccaggacgacaccaccgccgagaataagaacgacccagaatattgcacagcaaaatgcagctgaccatgtcattgcgtttgtttctcttgagggtggtggtaaccgtgggccacggcggtgatgctgaaatggtagtggagctgttctccatgaacttggttgggtattgg

SEQ ID NO: 68623 - DNA, 673 bp, Arabidopsis thaliana landsberg
acttctacaaccacacacaaaaacgttttaagatttaattgatatatgcgtaaatatttactaattacaagtatgaaagttggaagaaagtaccagcagcggaaatagaggaagccataatcacagatagagagaaaaaagaataagtgaatggttcttatagaaagtaactgaaaatattgaaaagagaatggtgaaacgctgttattgtatgataataattaatgtgataaatactcgattcgatctcgtgcggtcgatatatttatatacagttgttctgtatattataataagtcattatctaagtaaacatatcgtgtaataaacaaaaacaaaagtgtacatatcgtgcaagactgagaaggttactgaatctagatatgaacatattgggcctgattagtccttgtttgtacaaaattaatgatatacattccttatcggcaaaagagttcaaatattggtgaatggcgataatgcaactatgttggagatagattttaaatacatggcttatacgtgatttttaaaagagaataatgaaattcagtcaggaaaaaaaataatttaagagtttttacttgttttgtataccatattcgcttaatttaattagtgggatcgtgggcattcatttggatttgggaaccctaattcttatagcatttaa

SEQ ID NO: 68624 - DNA, 393 bp, Arabidopsis thaliana landsberg
gatgcgtgagatgagagaagctactgagaaattacaaataaagatcgatcaaagaggttatgtgtgatcgttgcacatcttcccaactgacatcgagtattatttatgtgtgcttaatgtgacgttttcttgaatgaaattaccttgtaatgacgtagacaaggataccttcctccttccatgtgcaaatctattttttcaaattaatgcatgacatttccatactaagtccatacatacggcctgcgtgtcctgtgattacatctgaactacgacccaaactttttactctaaacactttctccttggcggataggcagaacccaatggactaactcaaaattgtgcatatcaaccttggtcagcctaaatgtttgttaattacctatcgga

SEQ ID NO: 68625 - DNA, 634 bp, Arabidopsis thaliana landsberg
agtgtgctgatgaggtaggagatctactaatagaatcagctgtgaagaatgttccaaaagtatttgttgtatctactcttgttagtgtgatgcctgcgcaccatttatatttcggaactaccaggacaacacttctctttttacttttggttaattctttattctctgttaattgcgtatgaagtttttaccactttaaatttgtctgtctattcttcttgtgtgtatcatgttctctcttttctatttgcagtatcctgttggaacaccggaaatgtcgtatgcattttcagatcattcaggcggcagtacactaacttcatcaactgccagtgatcaagctggctactacaagcaaagtgcttttatgggaagttgtaagcatcaggtttggcaagcgatacgagcatcatcagctgctccatattatcttgatgatttttcagttggtacaagtctaccttctctattctccacacttatccatgactctttgccgtaagcttttacgctgatattatcttgtttcctttctaaatcattaagactcatatcgctggcaagatggtgcaatagtggcaaacaatcctacaatctttgccatcagagaagcacaacttctatggcctgacac

SEQ ID NO: 68626 - DNA, 589 bp, Arabidopsis thaliana landsberg
  unsure (1)..(589): unsure at all n locations
cctggnttgcgcaaaggtttcccataaatagctgtctaaaatttttgcaggtacagattgccagagattataaggattggtgcgcatggtgctgaaataaaaactgccatggtaggggtgcccaaactggttggtctgaaaattatcattatcccatgcccagttgcgtagcttcaggttgcgtgcagtggtttgccaggtaatactggtataatctaccttacgaatatatttatctattgtccaaggcgttaattcagctatacccagttcaattgcggcacgccccagtcgttttttttcgggctgaaggtgtaaattgggtttatgcaccgtatcggcctccataaatggctgcttgatcagtagttcctgcgcaagggacttagtattgatcgcagataggataagaaagagcaaacaaagtaccacccaccggtaacaggcggttttttttgaattggcaataggggttaagttcaatgaaatacttaaagcgggacgttgcttactgacagatcgatacctttaataagaaacggataagtgcctggttgaacatatttcaaaaatgaaccttgaaaaagcg

SEQ ID NO: 68627 - DNA, 746 bp, Arabidopsis thaliana landsberg
ggatgagaacaactagtgcattattcactgggagggtagaaatacattagatttgagatgaacgaaagcgcgtatacttgtggaaccagcaatctatgaacagctatgataaaaaattggttgatacccatcgggaccaggtgctttatacttccccatacttttaatcgctacctcaacttcagtggctaaaaacggtttattcagagacaacacttcctctcttgtgagctgctcaaacccgtcttgtggtagaggattcacgacttgaagaacgtcatccatagaatacagccgctgataatactgcaccgccagcgcttccaactctttagcatcagaaatccatgtaccctcttctgcgacgaataatagttgtggtatggaaataatttgtatttcgatccccaagcgcaatccacttctcccttgatttctgaaactaaattatttgctcttgctccaaaaccacgtaaaaagctttaattaaatcctcctctttacgcaacatatcatcggattgatgcccatccaaagcatcctgcactacttgaatctccctcatcaactcctctttttttttcttgacgtccccaaacacatctcgattccactttttaagctttaggcgtaaaacagtaagaacctcaagaggggtaattcctccattccccgagggtaggaaccaggtccttaaaggttggggtgctaacagccccattagccttaaaaacaaatgggtcttt

SEQ ID NO: 68628 - DNA, 303 bp, Arabidopsis thaliana landsberg
attttacaagagggaacaaccgagaaccttttccatacaaatcatcattatggcattcgtagaaagtgaccactgaaatatcagaccaatgcgttctggatatcaaaaaaacggagattacttgctcactttcagacaatcacttattcacaaacttcgcgtggggctagtagcagtcattttccgtctcgtggaaaacccttttcgctacgcttagccctattcgcctctaggagtattttagtgataggctctctctgaactgctcaatcccatgctgacaaaaaccgatcgacagactcc

SEQ ID NO: 68629 - DNA, 765 bp, Arabidopsis thaliana landsberg
ttacatcaactgttaaactatgatcaagaattcaaaatattctgtttttatcatttaagtaaaaggaaaataaaagcatttgtgatccagtgttgtctctttcatggtagtatatagatggtagagtcaattgaatttctatagcgtatgaacacggtgtgattcaacttcagcagctagaatacttcggcctttatttcaaagatgacatctacaaaatcttttatttattaatcgggaaaatatcaaagagaatcaaattagaactaaccaatatgttgccgagtttggggtgatgacaaaaaatatggatgagagaatgcctttgacctagcaattatttatagggatgattgagcaattttctttttaaagataatataaatttaaaagataggttacatgtaaatttgaggaaatataagagcattttgtttagattttagggttcaacattttaaaatctattctttatatgttggactattttgtcaatctaaaaaatttagactccttgcttaatttgctatgaaatttaccctctttaaagtttatcaaatatgataaatatttagcttatcatatatactcaacaatatatatgtaatatttaacatattaattccacccatatatttgtgtgtgaaattttctataaatctaaaaacagaaatacaactgccctcttttttgatgaaaggacttaagtaatgagaaactaacacacttcacaacaaaagcagaaattaaagaaatgtcatctga

SEQ ID NO: 68630 - DNA, 634 bp, Arabidopsis thaliana landsberg
tcctaaatgtccggtgttgaaaatgacagggcgataaaatcagtccattcatcctcatcgatgttctctcccgctattgcagcctttgtaaattcaacgaggtagtcatttgcaaatggcgtaaacggcaacaatccaaaatcaccatttcgttttctaagctctttgagattgtaagggaataccggtttgtctttaccagccagcttgctctcatacggactatcatcaggaccgctttctacatactgatctatcggaagcaaggttttccactcctgtgagaggtattgatcgggaagatttttcttgttgaatttctcaacccaatcaggcattgtctgcatatagtaagcgctcgtcgttaaacggccattaacgtaatcataccaataagcagcattcggcatgtgtcccgctggcagtacagcgccgcggtcttttatttgaatgcctaaaacttttgaaacgctttgccgtgctaatttcaattcatcggtgatcgtggttgacaagagcctgaatggagaaacaagccccactcctgtcttacttattgaccatgtaccatcggccacgcaatacacaaccttatgcgccgtttatcataccactcattgccaatgattccatg

SEQ ID NO: 68631 - DNA, 390 bp, Arabidopsis thaliana landsberg
caatcttaaccactataataaatttaaatgctttgccaattagtaaattccttgggctaaaccatatgatattgacatgggccttgattcttagtataaggtgcaagattccttaattctcaccacttctttgctttcatttacgttcattttgacagcttacgttttcaacacttgaacgcggaaataaatagcgctgcttaaatcaataccaactaaaccatttttacctaaaccatttaaactaccacacttgttaatataaaataaaaaaattaccatcaaaaccccaaaatcccttttattgaacaaagaacaaaagcggtagatgaacaactaaacgcttttttgcatgcatcggacaacatcaataatcttcctttgtatatg

SEQ ID NO: 68632 - DNA, 495 bp, Arabidopsis thaliana landsberg
  unsure (1)..(495): unsure at all n locations
gtaggctgggccggcctagccgtcgactgctgggggccagtagttcggttggttcgtttttggcgtttgggatggcgccgttgtcggcggctccggttgcgcatgctgatgagctggattgggttgttgatctggttggtgcggatttggctggggcgcttggggatttgggtcaggcgtcgtcgtgggagacgttgtttgatcaggcttcgtgggagccgttgctgtcgaatgtgggtttgtcgtttgatgcgtcgttggcgggtgtgccggggtcggctgctgctgatgattggtttgggtcgttgttctatgacccgtggcatgacttgggtcatgcgtggatcaatagttcgtttgggtctgcggttaatgacgtcatcaatatttttggnnnnnnnnnnnnnnnnnnnnnnnnnnnnnnnnnnnnnnnnnatggtggtacggcggcccaagctgctggtggtgctggtggtttgtgtttcgtgatggtgg

SEQ ID NO: 68633 - DNA, 536 bp, Arabidopsis thaliana landsberg
agtttctttaatctatagtggatcaattttacattcctcttgggtccatattttgatatatttttactttcgtatggggcaatttttttaattaattgttgtatatagtcacgttcaaaattatgtaggttgaaaaaacggcttgaatgtcgatctatagaaactttagtattaatccatatgtatgttactatagatgatctattgaaaagtagttttacatgtgagcataaacattagtatggaaaattcgtaaacattttgggtctgacaccgattttcaaactcaaacaattacatgtctcttacccaactttaggttagtagattttatacaagttcttgcgttgaagagaatcatggttttgattttctttttcaacgtcatctaatttttggacagtgactattatgttattcatcgatttgttcgcgaaagatttttttattaaccataatcttaaatgtgtcaaaatactatctagcttttgccttaaagctttcatagaatctacatcgatctattttagctatca

SEQ ID NO: 68634 - DNA, 306 bp, Arabidopsis thaliana landsberg
ggatcctctgtcttgcggctgatggacatcgtaaatgttagtctttgcattttatcatagatgagcgagagattatgggtgaggtgtcttcccataagactgcccaagaggtggatgttgtcgataccaactctctttttctggaccaacttggtgggtgtgtctaccacttggtcctgtgccggagtcggggtgtgaagggcaatctgccggagaaaggtgatttcagctagtactgcttgatggtggccgtttatgaccgggacctggccgttgaattccttcgaattgaacaaaacccatcgt

SEQ ID NO: 68635 - DNA, 435 bp, Arabidopsis thaliana landsberg
ctcagattcgactctctctctctctcacaaatttttgatctatttcactctccttgtcgtggctttgttttgaccggaacattattccggcagctacccaagacctcactcctcgactatttagtttcctcgctgtcactatctcaacgccggaggaaaaacttaaacaaagagtgataggtcgaagtgacaccggtgttgtaatcggtaaacccagaagaagccctaagagtaccgccgatttctgtgctcttatcttcttctgctcaatctatttcgcgcacattgtacagtggaaagtaacagtagctttgcatgagcctgattttcaggtaaacttaaaatcccctctctctcggcctttgtgattcgttatcccctaattttattatctaggccgcttcagctgagtctgagagcttcgatacttggatt

SEQ ID NO: 68636 - DNA, 510 bp, Arabidopsis thaliana landsberg
ttgaatgtggaagtagtgtttcctgtctcatcagactcgatgacaaaacttcttcagatagttcaaacttcattaaagttggtgatgtggcacctaccggttggacccgggaggagcaggtggtgaagggtgctctattcatggcggatgggccttatgcccatatatgaagggcatttattggtttattatcattcatttgatatagatcgcttaatgaatctatttgcttcattaaacctaaagcctgggtgattattgccaatgaaccttccttaaccttgcttttggaaggttggccacaaactacctgactttgaaaaatgtatatggaggattcatagcggagcgatttaaaagacaaactcctcaaggaaaactcatcgcggatgtcgggtgtgagccgatacttcacatgaggcacttccaagtgagtaaaaaatcaaacatctcttataaagttttgcagtaatgtggttaaaatcttgaatctatatcccgctttcgcag

SEQ ID NO: 68637 - DNA, 580 bp, Arabidopsis thaliana landsberg
tgaatctttttgcccgaacgatcttcatcacctaaacaaccaaacaaaagccaaaaattttataacatgagacacacaacaaatccacaggggtggggaacattacaatataacacatcccaaaaaacactaatttcctagaacataaccataaatcatcgttgattaagctcaataaatcaccagtaaaaccccccaaaaaaaaactctgcaatgaactcaatgataatatacaaattgccttctaagaatctcaatgattagattcatacattcaccataaaccaatcaatcgcaggagagaaaacaataatttgattgatccttaaataacttcaataaaaccaataaatcatcattaaaccccagaagaaaaaaatatcatctcaaaatcagaataaacacaaaatcaatctaagaacgagaaaaaaatcaaatcgaggatgagagaattcgatggaattaccagaaactgtgttgacagcagtcgtcatcttcgtcttgctttagacgagaatgagcaaattcgatggaatttagggattttgtaggggttttattgtgagagtctgaatttggg

SEQ ID NO: 68638 - DNA, 587 bp, Arabidopsis thaliana landsberg
ctcggcgctgatcgcaccattggtattgatgtccaggactttcttgtttaggttggtgcgctgctcgacacggggtgcggcgaccttgtaggccacgcgccgcaccggcgcgaaggaggcatccagttgcaggcggccgatcggactggcctcgtcatccggatgctggcgggtactggccggctgatagccgagcccgcggctcaccttcaggcgcatgctcagcgtgatgtccttggtcaggtgacagatcacgtgctcgggattgatgatctcgaccgtgtggtcgacggtgatgtcgccggccttgacctcgcccttgcccttcttggtgagggtcagcatgacctcgtcgccgctgtgctgcctgatggccacgtccttgaggttcaaaagtacctcgatgacgtcctcctgcaggccctccagcgtggtgtactcatgcaacacgccgtcgatctcgacctcggtgatggccgaaccgggaatggacgaaagcagcacgcgacgcagtgcattgccgagcgtatggcccgagcccggctcgagcggcttcaccacgacgcgagcatgattgggccccactt

SEQ ID NO: 68639 - DNA, 2572 bp, Arabidopsis thaliana landsberg
gaacaagaccaaagaactccaaaacttgggatacccattgtagagttaacacaatatttttcaaagtactttacacataagccaaaaacagacaaatcgggaaccaaaatcattctctaaacaaagtgtaaaaaaaatctgatttttggctgaaaaaaacaacaaaaatctgattgtcagtatcctacaaatcgataaatcgtaagaagaaaacataaaaataatattaaagttgtgtgctaaaagcaaccttaaacaaccaaatagcagttcgaccaatgccgaaaagcaaaaaccgtaaagcggtgctcgtatgaatgttgaatgggataaagagcggcgcaagatctgatatttggctggaaaaaacaacaataatctgattgtcagtatcccacaaatcgataaatcgtaagaaaaaaaacataaaaataatattaaagttgtgtgctaaaagcaaccttaaacaaccaaatagcacttggaccaatggcgaaaagcaaaaaccctagagcggcgctcgtatgaatgttgaatgggataaggtatatatgagattctcgacggaaagatgtatgggcttcgataaagaatatatgagattctcgacggaaagatgtatgggcttcggcccataactcttcgatattagtatagaaccataacaaaagaaaaaaaaataccttaaacaagtaaacactaaacccaattgattctttactaaatttagtaatcaatggttattgtgaaatgaaatttaacttttcttttatgagttcatatgaaaaataaaattgaaaccatccatggatggcctagttttatttagataactaaatatctatgttttgaaatagtaatctattacatgacataagaacgaagattaactaaatcgagaaagaaaaaaaagtgtagatttggtagacgctgaatatatgaaaaaactaaagtgataaaacaaattgtcttttttaaaaagtatggaattttcaaatttcccattctttcggtatatgatgagaaccttcacatggattttatttttaacaacaaaaatcaatgttgaaaagtgcatgtacctattaaacaaaatcagggtcttaactagctttttggtttggctttggctttaaacttttttaagtggccttgcctttttattaacccccattaaggaaaaaaaagggggagggccctcatctgccttggacggtttttttaagatgctgtgccctctctcattgagagatatcttcaatctctgttaataagctttgtaaggggggtaacaatccaaaaatacccaattacaatcttataagtacctatcatcttccatcctatggtttttcttttttaaacaaaatccgatataaaattaataaaaatctattgtattaacactaaaggtctatttacgaaaatttatagttacaatgatatgaaatgatagaaaaaatgaaagattataaaattgtattgaccgaaaaaagaagtttaatatatatatagggatactcattagaaaatctatatgcttagtgaaaaatgactccttcccataatattaaaaacagataaacgaaattgttaactaaatttattcaacaataataaacttttaacaatgacaggtcacactttaaatggaaatatgcattgatagactttctcggttgaagttgtaactctagatttatttttgtagaatttaaagatgtattttgttcctttgttgtgagctatgaaattaataccttataattgtaggttttagaacggttgatgtatagcatgtgcagagtaagctcgaaatggctgagacgaaaaaaagtgtcgccacaatgatttactttttactactatacttttgatcattgggacctaatggatgaatgttgtgtgttgtggacgagtttatgacacataacaaatattgtagacaaattgtctaatttgagtagagatactaaaatttatctccatataattgtatactgtatatgtataacaaataattcaattcattggcctaagatgttttattgtatctttgtagaattttacactttagagaaaaatcattgcaataactcgatgaaaaaaatgtttatcttatcctagttacaactaactatgtatctatctctttgtggtaggagatttgcatctgatcgaacgattcatatggtgccacgtaactatggtcccacttctattacgagatctactaagacatcagcacgtgtcggtgtcgtttgatccacgaggtcggtgacgcttagagctagttgaccggtacagtcggttattaccggttatactatatgtatgttttttggtcaaagatttggagctattttatagttaataaatcaagagttttttttttccacaactaggtcttaatttgtgattgtttttttcttccatttttccaaaattctcttatcaatttcaggttagtatttttgttactgtccctagcttttgactattgtactactgtataccctttttttttggcttgagaaattagattttgttatgtttgcgtaaaatatttgtg

SEQ ID NO: 68640 - DNA, 2560 bp, Arabidopsis thaliana landsberg
aagcaatgaatcatattccgattcttttacgtttttattctctcgattcgttttatacgaaatcgccaatcataactcaaacgaaagaaattaccattttgctaatctaagctgtgtctaattaattgtgggatacaatggaggaggaaccttatacggtccatggaatattctacacgtgacgtgatgagtattatgtattgtctacaaggctacaaatattactaaaataaaactgtataggtgtcagtatattacaaaatactatataatcactggtttatcaattcctatgtatacacattgagctttttaaaattcatttgtagaaagtggagacatacacgttatcgtttcaatacatatatataaaagaaagaaaaccaatctatcatctctgcaccaaaacaatgagacaaatgtgtcaacttgattaaaagatataaaagaatagcgtaagagtatgaaattaatgactttatatatagtccaaagatccaaacttatactcaccaccaaattgttcgtatatactaatactatagtataattacatgcactcttgctctcaagtgagagagtgtgagactattcagataagcaactatataagaccaacaaaagatgatttttttttaattcttgcccgtatgtgtttatttgtttgtttgtttggacaatatgcggatgacgacttactacacatgccattcatgcaaggtaatgcgtcttacgtggcataccattttctaatacatgtatgattaaatgtcaattattgctgactatgcagtaaaaaatgtgtacgttaatatgtcctttgattaatatattacatttgggtatacacggtacgtcaacacatttctagttctcaataagggaattctacgttctctcacatatagtatttcaaatatgtatataggctgaatcttccttcttccaatcaacttatattctcacgaatattagaaattaatttcaactatatatgatgatgtaacttggaagaattaaggagatgatgtaacaatctagaagccttgatagtgtattatagtgttatacataaataatgacaattttaatatagttgttaatgctgcgtagtttttgtcatttgcgtttgtttggtatagtaatggctttgttcaaacttttttgtaccactttcggtccatgccagctcactttccattatctttcgtttgcataaatacaaatttcaaaaaggtagcttttcttagatgaaaaaaaacagtatatatgttgctcagttcatgaacactgtatatgaaccaaatgtcgcttacgtatgcaaattgttcaattgaggaggacaaacaacaacaaaaaagatagtggaacatgcgatcttctttaagttcaaaccgtgtgtaacgtggataatgatagtggtgcgtggtcctttaacaaaagaactaatcatagtgtaatatacctaacacatttctctcacatgttatctatttgttttaggtgttgacatatgacctaaaagaagcctctgtattgttgcttaaacgcaggcactgcctggaatgttaacagggctaattgcgagttataaatattcagttgttgtaagtcttatcaaactattattgtctattgatgatttaacaaataccaagccaaacacaatttaattcctatcgcactattttggtaaggtgattggtgattggtgaatgtgaattcaatactaaatgatgttacagattgtacgggccaagttaggcccattgaatggcccaccaccttaaattcaactatggtactaagaaaagttctatcacttgtcgttttatttctcaccgacctttttcttacattgtcccccgctctcacctttcctttagactccggtgtctcagtctcaccgtcactggaatttattattcgactcagaaatttcactttaaaaaaaaaaatctcatgtgtgttaaatttgggcccataatactctctcatatacacacaatcgaggctcatgatagctattgagatcaaaccgggacaatagtattaaaccggtattcggttaacgagaggaaataaccggtatctgtccctctccctccaaagaactcgaagcttcttcttcttcttctcctgcttctgtcgtcgtctaggttaatcgaatatttcactatttgctttctatctttctgctgcgaatcaatggcgctatggatggacgctggagcgacgccgaccacggagaaggaaaaggctgatcttgaagctatttctgctctcaaagaatccaccgccatcgaattcaaagtacctctctcttctctggctcgttcgattttgatgtttgatgtagtatcgatttcattcctttgctgtttaaacacaggaagagggcaatgaatgtgtaaggaaagggaaaaagcattactctgaggcgattgattgctacacgaaagccattagtcagggagttctaagtgattcagagacctctattttgttctcgaatcgatcccatgttaatctactcttaggccacctatcggcgtgcccc

SEQ ID NO: 68641 - DNA, 3456 bp, Arabidopsis thaliana landsberg
  unsure (1)..(3456): unsure at all n locations
tctctaacatccacaaaatagaatgcgttgtgtgaatcgcgttgattgttcttggtcacggccaagcgaggcttatcgtatcatccccaccggtggtcgcctttcatctggattccatcaatgtcctttatcgtctctatcttaccgttcctctttcgtttgttgttcctcctccacatctggaccgtccgattcaaatcccgagtcatcttcaaatctctcttacagccgtagatggcagaatcctcttccccggcgtcgacatcccgatcaaaaaccgtcttcgcgtattgctcgtgattggatcgattcagatacaactccagtttcccaaggtagtttaatcatgattttatggaaatttttctgctcttacttatgaatttgtgaactagttagggtttagtaaattagtgttgtattagtaatagcttgagttactgtttgtccatgaagcatgtgaaattgtggatgcctttggatcttactagtgtgtctctatgtaatattagcttcagagagattcactgtagtgtcgtacaacatactgggagatggaaattcatcatatcacagagatttgtactccaatgtgtctgttccttacctcaagtggggctaccgcaaaaggttaatatgtgaagaactcattcgtctcaatccagacattatctgtatgcaggtaatgaactttaccttgttttatatcgtgttaagatagttaagttgattttgtttgtggatctttgtaggaagtagataagtattttgatctattcagtatgatggagaaagctggatatgctggctcctataaggttgctgtattttcttgttcaatgaaattttattttgcttataaaatgaagggtgtgacgtgtaaaacatcgtttactggttggtgttatttacttttttgtctgaagcctcaacaaaagttatgtttatatagaaggactacaaatataagctttgcaatggcagcggcgaactggagataacatcgatgggtgcgcaatgttttggaaggctgacaggtagcacatattgtttgacccaatctgtattagtgtgaagaaaaacgactactacaagtcaacattgtttaagatttatcttgttttgaaaaggtttcgagttttggagagggaaaacattgagtttagccagtttggtatgcgggataatgttgcacagcttgctgttcttgaggtagaaattttttttgaatgttttacgaacttcttttttcatgtatacgctttgattgatccagtttttttttgggtttcccgttagctccggaagtctaataagtcaagaaagatactgctgggtaacattcacgtgctttataatccaaatcaaggagatgtgaagctgggtcaggtaagcctcgacatttcaatttgtatatccgctacacgagcaattgactgtcatgaaagtttacaaaatgttgatctggccctttcacctttggctttaagacttcaggaaattgtactgaatctcagtcaagagatgtttactagcattagtttaaatatctaagacaagtctaagttactagtatatgtcatgacatgttcattagtatatgtcctaatgctcatgaaaacgtattgaattcgtggcttatgttttttcttgagttcctgatttgccttgttcctgactgataggtccgttcactctgctcaaaggctcacttgctctctaagaaatggggtgacattcccattgttctatgcggagatttcaatagcactcccaaggtacatatcttttcaaataaactcttccactttggtttgtgtatttgtttattcattgtttgagtttatcttattacgtgtagagtccattgtacaacttcttggcgtcctctgaggtatgactattcatagttttgcttcagtcaaactacactgtgtcctcttgtagtttctttaaataggattatgcttctatcctacagctgaatgtcatggaacatgacaaaaaagagctgtccggnnnnnnnnnnnnnnnnnnnnnnnnnnntcttgaaactggtagcaaatccagtaatacaataactttcaggtaagattggtttttgaagatttaatcagttctgtgaatggttgtcttgtgactgcctgctggaatagccattgtgttcacacactagtagaagtttttgtagctcttggacaaaagaagagatccgtgtcgcaaccgggcaagagaactcgtactgggctgcgcatcctctgaaactcaatagctcatacgcctcagttaaggtaacaaacaaagctttaatgtccctgtctatatatgacaagaccttaaatatgctcatgaacatggtacacaacagggctcagcaaataccagggactctgttggtgaacctctagcaacctcatatcactcgaaatttctcggaacggttgattatctctggtaaaacattctaaacacaaccaaaactcaaatggacaaatttaatatttggctgatgaagtaactaattagaaacacatgtgtggtctggttaaggtactctgatggtcttttacctgcaagagttcttgacacacttcctattgatgttctatgcaaaaccaaaggccttccttgtcaagtatgtctttctatcaaacagtttagatttggtgaggtcatttctatgattgatgcttgaagccttattcgtctttggtttgcaggaattgggaagcgatcacttggctcttgtttctgaatttgtctttgaaccggacggttaaaggcatctagtgccagcttagttttctttgaaccgaaccgttataaatgtgtttttattatatgtataagcgtaccgaaattacctgatcatggttctatatcaaaccgacttctcgataaataaataaaaattgagacgatcagaagcttcaatcttgtgtgcgtattgggtcactaggatattaaatcgacttcttcgaacgtaatttaaagtgagagaaccagtttacttgattctggatctaaaccgaagcggacataagcttggtttaaatgtaccaaaaagaaagaattgaaccaattggtacggttctaatcttggttccggtaaaatgaaaaggaattctaaagagattgagagctgtaaagttggaatcgaaggaagaagagacaagagcaagtgaggaaattaatggcgttgagctcaatgacatggggttacgcacggatcatagctggaacacttctcggcggggcgctcggattctacgtaatgcatcgcatcgaagttagctacaaggtctgtttcttcactctgtcttcctatgagaaagcttgtgctcgaccttagactgttgggtttacgcagatgaggatggaggaagcgttgaatcaatacgagaaggatatgcagaagagacaagaagaagaaaatcttattcagatcaatgaaga

SEQ ID NO: 68642 - DNA, 602 bp, Arabidopsis thaliana landsberg
  unsure (1)..(602): unsure at all n locations
tcctatattatcataaatatatgacaacagattacatacttctgcatgttgatgttacacgtgcctgtacacgcgtcatgggcttgtgggacctcatactccataggtttgctttgtacctggactaagaggactatggtctatgtaaaacgactcatatacttctttgcttgcctcttcgagctccattgtggctccatagcatttatttatagttaacatacttaattaagtggttgaacgaaatctttgtctctttgtaagtttagacgagaggacacgtgacattgacgaaattcgccacnnnnnnnnnnnnnnnnnnnnnnnnnnnnnnnnnnnnnnnnnnnnnnnnnnnnnnnnnnttctcctggatcaacacgacaacaattttaaaatatttcagaaaaaaataacgaataaaacaaaagctaataatgcagtttattattgattcaaacatccaatgtaactaacattgtattttgaaataaccatcatatgttcgtcatatgattaaatattttatcaaacaacagattagcataattctagtataggctcttttatatactatactataaatcaggaattttagaaatatt

SEQ ID NO: 68643 - DNA, 1336 bp, Arabidopsis thaliana landsberg
gagatgatctgtgagaacaaagcaggttctccctaagctcaaagcccttgcagattccatttacatcggggacttagtgtctgctgattccaaggcttcaagtgtgtatttgtatgtgtgctttctagtttctacataaatgtagaatttaaaagtgtcactgcaaaataagccatgattgtgaaagattcatgtgtaacgaatgtgttcatatataaatcatgaagctagaatgattatcacatctccttgcaaaaatatcttctttatgacctctctcccaaacagtttcaatcagagaactgcaacatacaacaaagcgaaaataagtagcagccaagtgggttttactgaggctgttccaccaagaggatgtaccatcacttcatcaatcacaggaccacaaacaacattctcttttgtcattgtaactgagtagctggtgaaacttatctgtgctgcatctttgtctgcttcaaacactaacccaaacttctcaccagagccagtcccattactctccaatgtgaagttttgagttacggagccagcttgagcacccaccacgaaatgtcctctgcacgcatcgttagcatcgcctaaggtaaatgtgaggttgtatcttgaaccttcacttgtgccttttgttgctgtctgtatgccagatggagctgtgttagacagaatttctattgcagctttgccttctgggacatggaagtgctccgagtctatgtatctgactgttcctatgacagaccactgccttaatggtgattgaatcaggcttggaaccgcgtcaatcagaactccatcggttgagttgggcaagaaaccaggtccagactcaaatccaccattgattaagaggttacctacaccaacaaaatcagaatatgagtctatgcagctagatttacaagacatcaacttatataaaccagacctgctttcatcatgttccatattgagctatgagttcagcattagcactctcgggatcaaaaaaaaaagcagaagggaggagaagtaacttaccactgtcttggaccaatgttacaccaacagtcttgataagcaatgtgtcaatgataggccaacatgtggagtttgtatcagaatcagaatctattgcctgactttcaagaactaagttaataggctcaccattcccccaactacccaagttatgactgtagctctgccatgaaaccttactgtagttttgtctgtaagaaaagaccgcattgctgtctggccccgagacactgagaccagcagagcttgtacagttctggcctgcgtggatcagtgcgaatgtgaggatgtagttcaa

SEQ ID NO: 68644 - DNA, 131 bp, Arabidopsis thaliana landsberg
accccccccttgggaacatcaatggcaaactgggaatatacccctttaaatccaccataaccaaatcaaacctaacaaaaatcattaaaaaaatggaatcctaaaccaatccattggaaaaaactactaaa

SEQ ID NO: 68645 - DNA, 541 bp, Arabidopsis thaliana landsberg
tttgccgtgactcgcgaaccctttttattaacgttttagtcaacttaacatttcattaatgaaaaaaaccatttcatgagtgatgattctatattagtttgcaatgttaactaaattcttcttacgtgagaaaacttaagattatcatttccagaccaccgcaagttccttgaaaagattgttatataacagctgcatatcttaatacggatttatgggctttaatttcagatcaattgtatcacataggtttggaaaaaaaaaatcgtatcacatacctttattttatgcgtttagtgtaagcaagcaacattaatgactgcgtgagtctgcaaaaatttaacccaaaaaaaaaagtaagcaactattttataaaaatattttgaagtgaacgatctccgcgctaattagtattcctaagagacaccaatcagaaattattggatagttcgatggtttaaaatttgtccagttgagaatggttttcaaactattttataaaattatttagcgaatttctaagttaagttgaccagcacat

SEQ ID NO: 68646 - DNA, 352 bp, Arabidopsis thaliana landsberg
agggttaagtttaaggggttaagggtaaaaagttaagggctaagaattaccggctccaagttaccaattaagggtccaggggtaagggttaaggggtaaaatttaaggtctgggaattaagggggaaaacttaaggttaagggttaaggaccaaccctcccttgatcccccaagacccaccaccgaccctgccccaccgttatcctactccaccaggccccacttccccgtgtggacctaaaccaacacccccacccccaccaaaaccctgaaaagaaacctacccctcccctgaaatcctatccctccccaaaacctcataaaacctccccctcctcctcccaacctttga

SEQ ID NO: 68647 - DNA, 311 bp, Arabidopsis thaliana landsberg
  unsure (1)..(311): unsure at all n locations
catcactatctgtcagaagacataaatcaataactagagagaccgtatacataaactataatatataaacgaagaaaaaaaactgattgcaaacagtaagagctgctatatccaacaaagctaaccaagcccagatgctcacccaaagataatcttctccttggtaactccctaggtagcggacaacattaggatgattacattgctgcagcatctcaatttctccccggatctcttcatacccctcctcctaataaaagtagaacttggatcacatagagtgctntagccactatgacatttgaacttat

SEQ ID NO: 68648 - DNA, 274 bp, Arabidopsis thaliana landsberg
cacttaaaacattaaacccacccatacacttacatttctcccaaatcaaaactatatgacacataccacaccatgataacaccctgaacagaaactctaaaccatgatcaacagattatacatacaactaataatcactcataaaaacttccataatatcctcaatcatttctgtcaagatcaacctcatacctgtctacaatgattcctaaccatcacatagaccatgatgttatctacacaacccatattatccataaatgcacattaatat

SEQ ID NO: 68649 - DNA, 524 bp, Arabidopsis thaliana landsberg
cgtacggaacatctccaaatgccaggccatcatcgttgcttttggccaagggtagcctcaaggtgcccggggcatccaggccttctcgctcaatgccctcgatgtcgaggcaaccaaggcgctgatccgcgaaaccgaatcgcagatcgtgatcaacgttggttccgccttcctcaacatgtcggtgctgcgtgcctgcatcgataccggtgtcgcctatctggacaccgccatccacgaagagccgggcaagatctgcgagaccccgccgtggtacggcaactacgagtggaaacacctcgaagagtgccaggcaaagaacattaccgccattctcggcgtcggtttcgacccgggtgtggtgaacagctacgccaagctggcgcagcaacagtatttcgacagcattgactcgatcgacatcctcgacgtcaatgccggttcgcatggcaagtacttcgccaccaactttgacccggaaatcaacttccgtgaatcaccgggcaggtgtggagctggcagac

SEQ ID NO: 68650 - DNA, 608 bp, Arabidopsis thaliana landsberg
  unsure (1)..(608): unsure at all n locations
gacacgagtgtcgctgctcttgggggtcatccgctgttcccttcgtttacacttgaggtcgtctcgcgctggacgcgcgcggccatggcgtggaccacggaacccaacgtaacacaccgggtacgtaactgcacggttacttgggagtgggcttcgcggcgcggtgcctactcctcggcgatcgtcatcgnnnnnnnnnnnnnnnnnnnnnnnnnnnnnnnnnnnnnnnnnnnnnnnnnnnnnnnnnnnnnnnnnnnnnnnnnnnnnnnnnnnnnnnnnnnnnnnnnnnnnnnnnnnnnnnnnnnnnnnnnnnnnnngttaccccacgaccgggcggannnnnnnnnnnnnnnnnnnnnnnnnnnnnnnnnnnnnnnnnnnnnnnnnnnnnnnnnnnncaggcagccgatgatgctgcgcttcatcgtggtggcgagcgcggtgaagatcccgacatacgcgatggttgccacaatgccgccgagcagtgcgccgacggcgacctggccggctcgccgacagcacgaatncgggagcagcatggcactgaggcaaatacgatgctgcgccagcacgatgcagctttgtggcatgatcgtacgcgaggg

SEQ ID NO: 68651 - DNA, 189 bp, Arabidopsis thaliana landsberg
  unsure (1)..(189): unsure at all n locations
cgggagaaaaagaaaaagggacagaaatanaggcaatttataatttacaagnggacagaaacaccaggggangggaagaaaaaaagaaacagcaacacggcccgacatccaggaaaacacaagcccgaacacccaagaaaaaagggacacaaaaaaaaaaacacaccagcaacccacaggaacaacaca

SEQ ID NO: 68652 - DNA, 341 bp, Arabidopsis thaliana landsberg
tgaatctaatttctctctatattcacgtgaaaaaagaatccatgagctctgtttctaagtcatagaaaaaaataggtggcaagatctgaagtggaaatgtaaggccttttcatcacatgggatgcaggaaaattggacccaagaaattattagatcagattggctaattttttcttgtacgatgatcaacagctgaatttcaagagggcaacgtcatggcaaaataaaaagaaagagagaaaacagagtggcacctagagaaaacgatcgagacggcagcaaaaaagattggactaataagctttccgattcattcaactgctaaatggggattgaggtac

SEQ ID NO: 68653 - DNA, 170 bp, Arabidopsis thaliana landsberg
cttctacgtgcctatcatcgatgatgctaagaaatgtcttggtattgacaagaaaatggagataactgctagcgtcttgcgctctttcactgatgttttttatggccttcacatcattttccagttccgcactggctttatcgctccttcgtctcgtgtttttgggagag

SEQ ID NO: 68654 - DNA, 1860 bp, Arabidopsis thaliana landsberg
agaggtgatatcatcgaccttcgaacaggccatagtaatgcagataactggcgagtctcaaggttcaaatgcgagaacattgtcctcatctggaacttcccacgaaaacttaaggcgagagggatcaaagaatgcatatgcaaagcctttggctctgcttctgtcacctctgtctaccacgtggacgactctgcggtttttgtcctgtttaagaactcagaacttgtctgggacttcttagcactcaagcggcagctggagtcaagcgacggtccagtctcagttcttcaccctttatccaagatccttgaaggaggaaacactggagctgcagactacgaagcatacaaagagatttgcagctcacacgtctcagaggtcatgttctctgaccaagctgaaacagttggtgtcaaatcaagaacaagacccaacgcacaatgcgagactgagacaagagaggagaacacagtcactgtgactcacaaagcatcggatttgattgatgcgtttttggccaatagagttgaagtcgaaactgctacgagtaattaactatgccatctaacattttttttgtcaacgtgaaacgcaataatataatacaagataatatgttttgcgatgaccaaaattttgataatgaaacatatgaaataatgtgcggataaaacacctagaactatcagtactaataaagtcaaacaattgatctgttggagatgtcaatctcaatcaagttatcttctgcttcaagttcttcccaaatctccatgatcatcatctcctcgtaataatcttctctactcagccaacgtttcttcacactctccaactttgcttctctcaccagacagatctctatcaaaccctcttcttcttcatgtaggttggtttccgtttccagacttttaagctcctcctgatcatgacgataagatttggattccttgttacacacggcaatcgtgtggagaacgttagagagaaacaagattgggatcatgcatagattcttcaagaaagaaagtgataagatcaatagtgtcttattgactccatttcttgccattattgggatcatgagaccttacacaaccgacttatttatggaaaaacatggatatctatgtttatcaacacttttgagttttccagtctaatgcattgaacatagacaaaatctaataggtacaaagacaaaatctgaatacatgtttcccataatcttgtaaggggccccattaggtcgggacttgtaaacaattgagaagacaggtgtaagatgcagttatgggagttttagaggtcagacacatgcattgttgcattgacattcttccgttgactctagacatagttgttgtcttctaatctgaagtcttaccaagaatatatcacccttaatctaaaacataatcaaaacaaaaccactgcagaccacccaggcttgattgatctgaagatattgtaacagatttgtagtttcactttatgccgaggaactctaatccgatagcggttggacttaacccgtataaattcaagtacttagggtcgtgaaacttgcttagatgtctcattccgctatcacaaagaatggtgacaattgtgtgaccaggaccaagggtctgagccacccttactgccccaacacagttcatagccgaggagcttgcaacaaagagcccatccttcttcagaagaaacctgggaacataatatagtgagaaagatatcaagatccaacttttacgaaatctttatcagtactctctaaaacagttatgtcaaaacatatgaaggaatgagcactacctcgacatctcaaccgcttctttatcagtcccacgaaaacca

SEQ ID NO: 68655 - DNA, 301 bp, Arabidopsis thaliana landsberg
tgagattcaaggtgatgttttgccatctcaaatattctccaagaattttgcttaaatgccaagaaaatttgtaaaaaaaataaatatatatgaagaccagagccagcggtaaattgaccaaaacatccctagtagtctacctcaaagcgtgtggaggttgaaacgctcggcggatatcacgagctcgggccacacgctcatctctagtctcttttacattggctttacaaattttaaaatgaaacacgaattttatcgatctacaaaagttttgttttatattctatggtacagttaccta

SEQ ID NO: 68656 - DNA, 382 bp, Arabidopsis thaliana landsberg
  unsure (1)..(382): unsure at all n locations
tgagcgccccggacgaggagacgnacgttttcctcgatgtccgaccgcacgcgccgaagagcgctgatgtggacatttcgcccgcgtactcgccgctccctggtcaccgacgagggcgccgagttcgacaaggtcttccacttggacgcgtccacgctgacgccgtacgtcacgtggtgcacgaaccccggacaggcgctgccactcggctactcagtgcctaacccgacgtctacgaatgacccggccgccgcgacgcgcgccctgtagtacatgggcctgaccgtttgcactccgctgcgtgacatcacggtggacaccgtgttcgtcggctcgtgcaccaacggccgcctgaccgacctgctctccgacgtcgaggtgc

SEQ ID NO: 68657 - DNA, 2229 bp, Arabidopsis thaliana landsberg
cctctaactctctctctaacattttttattttgctcaaaggacgggaaacatggtaatcggggagtgaagagatggtttcactcaactctgcaaacctaacatgtcccattgaggctatatcatctaaagaatcttcattccacacccactggtgtttcacctaaccaggtttactaaaccgaaatctcatacttaggccagggcactcatacacaccggatgcatcttaaggattatgtgtctcataaaagatggtcttaatatcattaactcaagttaagcatgatacaacatattttgagtgttgccctaagaaatatttatacatgtaaacgaaactcttcaccttgcatgtctctcttccctggcttcaagcgcatcaacttcctcacttgttagcagatccacaactggttcataaacatccaagtctttccttttcctgtcaagatcatggacaaaatttgttatttttggattctgttatagcttttgcttggtcttgcaagtcaaatttgttcgtgtccataaatcttattttttgaaaaactcccatttagtgataagcaatgcaggaagagaacttcttcaatttccacagagtttattttgtaatcaaacaatttgcaacctagtgattcggttttctatgttcaataacaacatgtaacatcaccagaaattactattagaacaatctcagtagggaccagctccaaatattgggataatctactatcaaatgatataatgcatgaagaggtggcattcaagagtatgtgtaagaaaaacgctcaggatgtgtcgcaaagttaacttatcttataaacgatctagccgctagaagtcagtcgtccaacagatcttaagaagacaatgcaacagagaaaatgtatgcattaagtggtaagaaaatcacttaccgaactacactggacttaaaactgaataacttcattaagtccattgacaggccacttgccttgctgcacatataagatggaaagttattttagaattttttgagctaggctctaatattaccacaaggtaacttggatagacaaataggggcaacgtgaacatacctcgctgaaccatgatcagatcctctgcggcctttcttgcttaatctactctccctagctgaagccacactttgaattgcaatctggcaagcaaaaacaacgacatggtaactcagtaagtttggcattcttgttcaaaatagaaaacatatatagagtatacagaaatacagagagagtagcttaaagttacaatcaaagttttaacctcgtaaagttgttcccttattgcaaaggcaacagcaggcttcagagagaaggagaaaccaaaaatcacttgtatcaaacgtttgaaacttaggttcattagttcagataatgaaatgtaaaaaattgagtggttatcttactccaacttcagggtcttcaacacctaaatccttgcacaaggttcttgcaaattcctcaggatcactctcaaaattgtttaggtcctgcaaaacggcaatcaagctgcactgagaaaaagagtacaaacaatagttgaaattgttcaaaatcaccaagtattctcacccataagaactgatccttgatgagagtatggttaactcggagatcaagctggcacaaaaaagaaagaaagatagcttatcagcttctagaacttctttttttccaacaaatcactcatggacaaaagagagagggataaggatatctagcgtcataaaaccttaattggtatgattttttcaccagtgtacatgtcttgtccttcataagcccgaaagtctgagagctgagactgataaagcaggaagttgaccaatgtaagtagagatttctgaagaaattattccaatacttacaaaaacagaacagaacataactgaagcaagagtacattcgtcacaaaagcacagtcttacagatatacatcccatagtacaatgctataaacaggcctcttctcgagtaaaaaaacctaaagagttaaaaacaataagtcgaaagtgtgattggtttaagactaataggtgaccttaaatttaagctcatctctatgacaagcaaaagaactaacaacaaaatcagagcagaagaaaaactccagactcggtcagtgtgaactagtttagaaacaacctgaatagattgggcaatctgagtgacaaatgcatagggaagtttcgagtc

SEQ ID NO: 68658 - DNA, 390 bp, Arabidopsis thaliana landsberg
acaaaagaccgtacttgtttcttttatgtttgaaatttctaagataatctcttaaaactctgtttgatctgtcctttcatacttttgtctgaaaatgtattgactgtaaaaaatggttacttataaatcaagtaaataaagagtttgtgaacgactttggattattggaatctctatatagtttttctttgtttccttgcgtaaaatcggagattattcgattattatttacgcgatgaaaaaggtttaaaatgtaaatttcttgatatacctcatagtttggtaactaaaaaaatgggattgttgtactttatgatataagtcaaattcaaaaaacttacttttgttttatttggagttaaattgatgagtaatatgctttattgtgta

SEQ ID NO: 68659 - DNA, 511 bp, Arabidopsis thaliana landsberg
  unsure (1)..(511): unsure at all n locations
cgcttcattcgcagccggcccgacatcctcggcgccatctttttggatttgttcgccgnactgctgggcggggccaccgggctgctgccggtgttcgccaaggacatcctgctgaccggcccgctgggcctcggcctgctgcgctcggcgccggcggagggggcgttgctgatgtcgctgtggctggcgcgcttcccgttcgagcgcaacgtggggcggaccatgttcacggcagtgggcgtgttcggcgtggcgaccatcgccttcggcctgtcgacctcgttctggttctcgctggcagtgctggtggtgctgggcgcggcagacatgatcagcatggttatccgcggcgccttcgtgcagctggagacgccggatgaaatgcgcgggcgggtgagcgcggcgaacggcttgttcattggtgcctcgaatcagctcggcgagttcgaatcgggggtgaccgcgcactggtttggcacagtgccagcggtggtgctgggtggggtgggca

SEQ ID NO: 68660 - DNA, 243 bp, Arabidopsis thaliana landsberg
cggcggctgccttttagcgctatgcatgggtccttggtaacttctagttcgatcagggaagaccacagaaaatgaatctgctaatgcaaggcacagaatctatcgagaagaagaaacttacaacattgtagctgataacggatatttaacgcgattgtgggagaagtaggtgagcttcaacaattctcgtggtttgcatttcttcgtaacgatttgttctggaaggggcgggatccaatgccc

SEQ ID NO: 68661 - DNA, 443 bp, Arabidopsis thaliana landsberg
gaagtcttgtgagctgtaggaccggattgggtcgaagtttctgcattttacataacacgtaaccaaccaggtgtctgtgtgaatgatagtcttgctgatcgcatactgcgcccaacactcctccattaatatggaccgggcctaatcacacgacctatgcctggtcggcctcacaagagccatcactataccacctggatggcacccatgaatttatgaatcatatgacaacagcccgggcccgatgcgcttttaccacattaccaggccggaagacaccaaaatcgaaaccaaaactgtaaagaaaataaactgactatgacctaagggaacctgactagcccatggagtagaacttactcacagtcaaaacacacacctatgatagcactgaagcgcatactatcatatgggatcccgtcggatataatctaccgcaacac

SEQ ID NO: 68662 - DNA, 484 bp, Arabidopsis thaliana landsberg
  unsure (1)..(484): unsure at all n locations
gcgcgcacccgggcgaccctcgataccgcgggcctgacgtttgccgttttcctcaccggggtcatcgtgaggggcgggggcctcatctacttccccatgctgattctcgggccgatcggagagcatttcacgcactgaaacgcggctatcctggtacgcaggtgagccgggaagcctggtcggcagtggtattccgtcgaccagaatccgggtgggatggcctttaccttccggcggttcgccgccgaatcagactggcgcagcgagacgctccgcacgaacctgtggctgattcccagcctggagagcatcgccgcggtcgtgctcttcatcctcaccatgaccgtcgaccgggcggccttccacggccaggtccggctgccgtcctgggtgatcagcggctcgcccgacgcggcccgggaaatcctgtcctcgctnnnnnnnnnnnnnnnnnnnnnnnnnngggtcgcgttctccatcatga

SEQ ID NO: 68663 - DNA, 611 bp, Arabidopsis thaliana landsberg
aaactatagtatatagataaaaactatattgttttaggcgtcatatataagaaatatgcccacgcaagagaggataaaaaaaacaccacacaacagaatattttcccttataggtaaaggtaaaatgtcaatggaacataatattaaaatgattaaatttgatgcaaaaatattattttgtatattttcatgtagggcatatgattctatctttgtgatattaaacgatagcatcgagtacccagttttaaaattatgtcaacgtaggcatatcacaagtgaaaaacaaaacgtagacaaatcaaaatattaaaaatgtaaaggtcttatcataagtagaatgtgaatttgttaatagaaaatatgaaaaagtcgttaataacataaatgtgtataatatgtatcgtgggttcgtatattagatagaagacaagtcacctacgaacaagaaaatgtactatgtagtaatcttggaatattaatgtaatttctctctaacgctcaattaatatataacgttggcacttgacttacactttatcttttaaccattcattttctggtgatttgtgtacccgaataacaatactgattaattaattatggtatcc

SEQ ID NO: 68664 - DNA, 106 bp, Arabidopsis thaliana landsberg
tatttgtatcaatgaatgtgttcttaacttttcaagttttcattcatttcttaaaaacaatcttgctatgttgatatgtcaaaaacagcttttttaaaaaagcaca

SEQ ID NO: 68665 - DNA, 467 bp, Arabidopsis thaliana landsberg
  unsure (1)..(467): unsure at all n locations
tatacctaataaacaaagggtccttgttttcaaatttcatcttataaaatatggggggtttaccaaaaagaatgtgacgccttactcacccttcttcattgcattaccattccaactatttcatttgattcaatacattcttctttgaannnnnnnnnnnnnnnnnnnnnnnnnnnnnnnnnnnnnnnnnnnnnnnnnnnnnnnnnnnnnnnnnnnnnnnnnnnnnnnnnnnnnnnnnnnnnnnnnnnnnnnnnnnnnnnnnnnnnnnnnnnnnnnnnnnnnnnnnnnnnnnnnnnnnnnnnnnnnnnnnnnnnnnnnnnnnnnnnnnnnnnnnnnnnnnnnnnnnnnnnnnnnnnnnnnnnnnnnnnnnnnnnnnnnnnnnnnnnnnnnnnnnnnnnnnnnnnnnnnnnnnnntttttttaattaaattatttttaacttatataaaccaaattcattttcttttt

SEQ ID NO: 68666 - DNA, 436 bp, Arabidopsis thaliana landsberg
cacatccacctatatatcccaggtaaaaagttattataaaaaccaccttaaaatatctgaatacaaaaaatgtcttattccctagattcaaattacttatatatccattaattttatttgaaccccatatcataaactgaacttgactatatagatactttgcctaccacatgtccaactattcataacaattgtaatatatactcaaaaattcgattctataataaaaattcttatggcttatacttatgacaaaaacttaagaaaaattcggtcccaaaatactgatgatgaaataaaaaattcatttattttcacaatgatccatgaatgaaccctaccatattactcttcttaatttattatactaaccaaaattaataaaaatatgttacgtggaaatacctaagaatccaaaaccttattcataatatca

SEQ ID NO: 68667 - DNA, 310 bp, Arabidopsis thaliana landsberg
aggccgcgctgatcgagcagcgcaccggagtgcgctcacgccggagtggctggaacagttccgggatcggcgaaaccgcgcgctggaacgcgaattgaccgagatagccggcgcgcccgccgcggtacgtacgctgtagcggatgctggacggacgcatcttcgttgtatttggtgctgactttgcctaagtgaatatgatactggccaagataggcttctttctactgttttggttgacatcatattacgtggtcatgattgatggattaatatggcatattctaatatgtttttttgcccccgcgatt

SEQ ID NO: 68668 - DNA, 587 bp, Arabidopsis thaliana landsberg
  unsure (1)..(587): unsure at all n locations
cgcaccacgagctgtccgtcgacgacggtgtcgctggtcaccgttagcgcttggtcgacgccgttggggagggtgagcttgcgcgtcgcggccgacagatcgtcgtcgctcaccgcgggggcggcgaaggccggcgcgtcgtcgggcgcagccgcggccacggtgctgatcggtgccgtcatcagcatcgccgtcgcaaggatggggagcagccgcatcgcccnnnnnnnnnnnnnnnnnnggtgtggcgagcgcaagcgcctggacgcttagcggctgcacgaacggcgcgccgatcggtgcgcggggaagggcggnnnnnnnnnnnnnnnnnnnnnnnnnnnnnnnnnnctcggcggtatcgctggtcaggacgaaatagatgccgttccacatcttcgcgaaggcgcgccgagagacgctgcgcaggccgagcgacggatcgccgatcagcacggtatcggtgccgatgcccttgacgacgacgaagtggcgatagccctcgatcgtgatcagcgcgattgccggcaggccgcgcttggcgatcgcgtcgagcgagacgcgatacccgtcggcgccgagcgact

SEQ ID NO: 68669 - DNA, 728 bp, Arabidopsis thaliana landsberg
  unsure (1)..(728): unsure at all n locations
gcttgattttggtgaagtntnactgacaacaaatcaatcaaatgaaaatctcattagtacatacattaattgtgttagaaccaaattttgacaagtgacttttaatcgctaaatttcagcgattttagaaattaaaaaagatatcatatctcgcttccgcgaattcgtttcaggattaattccgcttatcatacgttttataacgccattctacccgcaattctctaatacgaatttttgtaattttttgatcctacacattttgacaagtgactcttaatccctaaattacagcgaatttagaaatcatatcgcgctttcgcgaattcatttccggtttaattctgcttatcaaaatgttttatgacaccattttacttgcaatatctaatcctatttttttcgaaattcttgattctacaaattttgactagtgatttttaatcgctaaattacagcgaattaagaaatcatatctcccctacacgaattgattcccggtttcattccgcttattcaaaacattttataacaccattttactcgcagttcctaatcctattttcttccaaattttgaatttcatgacaagtaatttttaatcgctaaattacaacgatttttagaaatcatatttggcctccgcgaactcatatccggttaaatcccgctatcaaaacgttttatgacccccttttactcgcaagttttcttatccggtatttttc

SEQ ID NO: 68670 - DNA, 524 bp, Arabidopsis thaliana landsberg
  unsure (1)..(524): unsure at all n locations
ccaggnnnnnnnnnnnnnnnnnnnnnnnnnnnnnnnnnnnnnnnnnnnnnnnnnnnnnnnnnnnnnnnnnnnnnnnnnnnnnnnnnnnnnnnnnnnnnnnnnnnnnnnnnnnnnnnnnnnnnnnnnnnnnnnnnnnnnnnnnnnnnnnnnnnnnnnnnnnnnnnnnnnnnnnnnnnnnnnnnnnnnnnnnnnnnnnnnnnnnnnnnnnnnnnnnnnnnnnnnnnnnnnnnnnnnnnnnnnnnnnnnnnnnnnnnnnnnnnnnnnnnnnnnnnnnnnnnnnnnnnnnnnnnnnnnnnnnnnnnnnnnnnnnnnnnnnnnnnnnnnnnnnnnnnnnnnnnnnnnnnnnnnnnnnnnnnnnnnnnnnnnnnnnnnnnnnnnnnnnnnnnnnnnnnnnnnnnnnnnnnnnnnnnnnnnnnnnnnnnnnnnnnnnnnnnnnncgacatcacttcacatactgaattttccaattgagagaaatagtcagagacatcaagaacgctcactatttattagatccatggacc

SEQ ID NO: 68671 - DNA, 550 bp, Arabidopsis thaliana landsberg
tccccagttttgaatacatacatttttatctcacttaattttatatagtacaacagtcaactgtggtaaatgaaaaataagataatgtattataactaaaagaaacataagtaaaaaaataagaaaaataaaagtagaaaagaataaaaaaaacaaacaactgaaaagcccattacgaggcctttgatttgttattggtttttatgagaaaaaaaaaaaagtaaagaaaataacaaagtacaaagcaagaatgattaaaggtcaaaggacttagaatatgtacggtccggatttgaggagtgaatagagaacaccgtacaccgtacgtatcatataagcgccatcagaactctgctaaattataagttgcaacacattattattaatgtacgattgtttcttcttcgttctccagtttcgtcggataaatctaaaaagaggcaaaatcaaatcgaattctcgaagaagcaaataacgtctgcataaaggtttaaagtttatctcttccgaagaagttatgtctcttacatgcgttaatatgtccgaggat

SEQ ID NO: 68672 - DNA, 2786 bp, Arabidopsis thaliana landsberg
  unsure (1)..(2786): unsure at all n locations
tttgatattccagagactctcttggccgaccaaaatatgtgtcatttattcaaactcattatgttacacttgttttaaagataggatcacaagaaacgcttaaaactcgcccttcttgagattgacaaaatgttttttaacagtttgtcaccggtaaaaagaaaggagagcctccgattttcttactccccaatacattcttcaccagaagtttccatctcgactcatctttcttgctctgtttctccatcttctccttaaggtttctgcatagagggactcgacattgatcagaacctgcgcaaacacgtgaatgcagttcaaggagttgccacattctcttgcaatgcacgcaacctcctggaactcttagcttacagcctgcgaaatgccggatcagtgattctaatcccttgcaagcttcatagttacacgttgcatggttcggtttgaaatctttatcgtgtggccctattgttttacatccatctctgcatatatgaacaagtgcttccattgcttcgtatagctgcgaatatatcctctgatcattgcgttttctcatcctctctttccgcgtctgcgtttatgttcaagatttagaatttaggagaaaatacaggggaaaaaggaagtttattaaatcactacttacatttgcttcgatgatcactgagtctctaacttctttctcaagaaagggatggcttttcttcatagctgtccatgcttctgtcgcagagagttccttaaagtgtttcatgatcatacggtgagatatgaggctaagccgagggaaatcacacagcagcgcaagctggaacacatcaaccacattctcagtggtaagcaaaccatgttctagatgccattcacagacccgtttcagctgaggaaccacgtacgcgtgtgacagaannnnnnnnnnnnnnnnnnnnnnnnnnnnnnnnnnnnnctcatagctacacaaaggaaatcagatttcgtcagtgaaaagatcataagacgaatgttaaaagaggcagagcaaataagtatagagagcaagaagaaatggaatttattataccaagaagagtagaggaaacggataaaaactcgcacagcatcatgagggacaccacggattgagattgtatgccacttgccatgtctcttggcttgcttcaacatgcctttgatcacagtggaagcagttccctattaattttttaaaccgacaacgtcaatatcaaccaagtctagagctttatcatggaaagctttctaatcaaccgctaaagtctgtattctcctagctaaagatcctaactataaggagagcttacaaggatgttggcatgagcatagatgatactgccattatctgtgtagatgactacatcagctttgtatccgtcattgaaaagacgatcccacatatctcttgtggctgtcgaaacgctgctatgcccaagttttttcttgagtccatcagattttgatggaagaggaggaggaattggcacagaagatgaatctgcagatttgaaagattgatgaagatcaacacaaccagtcaccattctcttgtttagcttatcttctcttccctgcatcaatcaaatgaaaatatctattgtcgattctttagccacaaataaacttcattgtcatttctacacgaaatatgtgactcagacaacaattttcacagcattatgtaaccagatctcatttacgattacaaatcgaataggataagaacaaatctctacatatatattcacacgaaaatatcaatcagaaataacaagaattcttgaaacagatcgatagaaaatgtaagaacaacaatcaatcaatgctctaatttgttccgacatatataccttgaaaagattcagaccacagaatcaggttgcttcgaagaggcaagtcaaacaaaattaacgagaaaatcttctccttggtagaaagagcatgagaagaaactctctctatagagaagcttgagagatcagagatctcttaccattatataaacacacacactcacaaaaacaatagaagacgacaaaaaaaatcccaccgaaaggataatttattgttttaatttccttattatctcacttttttcttacttttgtgttcaataatttgaagatattttcttggttcatatcatcaacagagacacccacctgcgaaaattacccgagaggcgcgtggagtctacggttacgaaacggacggctgagaatccacgcgccttaacggctttttttcctcgttcttgaaaaagcttcgtcaagttggttttattatcggctttatcaattgaaacacgactctgcattttttttttttttataaatgatttaatttaagagccgtacaaaaacagatcagtgtgtcctttgttttttttgttcttgttcggcgttacacagctcataattagctgttcgttttttcaaacttttatccgtattattatcctttcttcttcaaacataaatttagattagtcttaattttaaccacatgatcagatactctcttcaaaaatgttaactaatcgtgaattatgtctgaggtccgcaaaattgcgtcataaatattttactggtctctcttcatatttcttaccttcgcttgaattgattgttacccttttttccctttttttctgtgtttactataatgccacgtttcttctatcgaataatctaaaacagaagaagaagaagtcaaaatgctttttatatgatcattttcttgtatttttttttagttgtggatcg

SEQ ID NO: 68673 - DNA, 686 bp, Arabidopsis thaliana landsberg
ccccctctccccccccctccctccctcccccccccccccccccccctcccccccccccccccccccccctccccccccccctcccccctcctctccctctccccccccccccccccctcttctcccgccccctccccccctccctcctcctccctccccctccctcccccccctcccccccccccactccccccccctcccccccttcccccccccccctcccctcccccctcctcctcccccccccccccccctctcccccccccattcccccccctcctccccccctcccccccctcccccccccccctcccctcccccccccttccctccccccccccccccaccccccctccccgccttcccccctccctcccccccttctcccctctcccccctcccctccccccccccccccccccttccccccgctctcaccccccccccccccaccctcccccccccctcctcccccctccctctaccccttcccctcccccccccccctctccccctttccctctccttcccccccccccacccccctttcccccccccccctccccccccccccccccccccccctccccccctcccccccccacctccccccctcctcctcccctcccctctcccccccccccccccccctcccccccttccccctccccccccccccccccccc

SEQ ID NO: 68674 - DNA, 632 bp, Arabidopsis thaliana landsberg
tgtcgatgatgaaccatcacgaatattgctgcaaagacaacaaaccctacaaagtcaacaatataaatctaatcactagacccgatcattactccattcatgacgtcatttccaagagatcaacgtcaacgacgacgacagagtcatgtggcacgttgccccttgtggtgcggagggtaagacggagcttgatggagagcgtgaaccaagtttgtgatgacgtggcatctggtcaacgaagagaggtcgctaaaatcggtttggctcttcatgatcacatctgtcgcgacttgatcgcagagaccgttcgagagctctccttctctgactacgacgacgacgagttttatcaatcgccggtggattcttctgtttgttacggcggaggaggtaaaggccaacacatccgacgtggcagcagcaactctctcccattcgacgcgtgtcgaagaagattagtgttttgatgcgattgatatctttaggttctttgtgacggttatggaagtcatagctgcgacaatttcacctatgacacttgttgtttaaattattttataatttcgtagctttatcagaatttaagacatatctttcaatagagtgcaattggttgtttagggtttatgaat

SEQ ID NO: 68675 - DNA, 283 bp, Arabidopsis thaliana landsberg
  unsure (1)..(283): unsure at all n locations
caccctctttattctgacctacaccatcttcatgcacacctcgataagtcctgtattcacacgaaaaaatgacttaccaccctaccctccacactgagttcaccacatggcaagaccctctactgactcggactaatttcactgggacccaccannnnnnnnnnnnnnnnnnnnnngtatgacccatctgaatctttggtcgccttagacaaagaacgggcttgactcttacccagactgctagtactcctatgacaaactgcttggtgcagtgacacgtaac

SEQ ID NO: 68676 - DNA, 266 bp, Arabidopsis thaliana landsberg
atgatcgacatgtaatgatgtaaatgccccatggctcttacattttcaatagcgaaaaatataaaataatactagtagctaatctacgtgactacatctcttctatctcacacgtgatatataatagttatattatatagttttaactatggttaagaggaatcctcgtctataaaattccaagtgtgaaccaataatttctagatagcgtcgcatcgtagagaaatattcagcagggtccatgaatcatggctattcataaaaga

SEQ ID NO: 68677 - DNA, 296 bp, Arabidopsis thaliana landsberg
ccccaacatgcaacaataataaaagaacaaaccattatttcttatcaacgttgatcaagtcaagcaaagaggtttgctacgtttggctgactctagacgagagtctaaccaaatcagaagctttgacttgtaggatttagttgaagacaagcacctaacaagctcgtgcactgtaatggcaatattgtaggattcggtacgaaaacgatgtgtccagaacctcatggcgtctagcgtggagatctgtgtatgcaggatcatttatcgctgagacggcttctaagtgaccagttatg

SEQ ID NO: 68678 - DNA, 316 bp, Arabidopsis thaliana landsberg
aaaacgaggcgaaccatatagcaccatttaaggaatttaagatagcatgcaaaccatggggatagggtactaggtagtacattctaaaatcaatcgtgcgtaaatatgtattcagttctactacaggaaccagaatatgtatggggcaagaacaaagatgtttaccaaatgagacataaggataaacaagtgtctttcattccttgacaacaaaaaataataaggatttgcataaaccgctctaccagtgctcaactatacatagtgttacacattttgaggctacgaaacacgaaaacccacattggctcactga

SEQ ID NO: 68679 - DNA, 135 bp, Arabidopsis thaliana landsberg
aagacgaagaaaaacacaacaagatactcttagatgtaaataattcgtcttttgactatatgtatattctaaaattagatagttgatcggggcttagtccatatagactaggagtctggaagcatatctcttccc

SEQ ID NO: 68680 - DNA, 334 bp, Arabidopsis thaliana landsberg
  unsure (1)..(334): unsure at all n locations
nnnnnnnnnnnnnnnnnnnnnnnnnnnnnnnnnnnnnnnnnnnnnnnnnnnnnnnnnnnnnnnnnnnnnnnnnnnnnnnnnnnnnnnnnnnnnnnnnnnnnnnnnnnnnnnnnnnnnnnnnnnnnnnnnnnnnnnnnnnnnnnnnnnnnnnntaaacactcgtgaatgacaaaccacagcttccagactaccaatagttagtactaataattcccatgagaatcaataaccttgattaatgaaacgtataactctcaaaaagatgacattgaacattcaatccactttcatcaatctggatcattttaatcacagaactttaaattcagaatgt

SEQ ID NO: 68681 - DNA, 2330 bp, Arabidopsis thaliana landsberg
taagaaatttttgtcggggtaatacattatctatttatagttttgaactcgaaccgacgatcattaatatgtagatttcttcgcgcatcacatctcgcccttatttatttctttctgtttccggtatttcgttttaaatcttttcgcgatcatctcctttcttttaatacgcggattcagatatatcctttaacagaatttgaaaccaaactctcttaatggactttaaccctattgagactctttttcaatcttggtcagacagcgttggcctacttctattatcttgtgattgagatctgcccacaatttcggattatccggattgcgagattcgacatcaacaataaatctatttatacattgatgcaattctgccaagatattgcaacaatttgacattagtgccaactaaccttggtgtgaaaaaaaaaaaaactatgaacgattgttttattggaacaaccatgatttttttttatgtctatgacaaagttggcaccacctttggacaacataaataagtaaataaccatcacccgccaaatattaacaacaaagaaggtcaacgtcgcatacttttgaaaagtcaaatcttttcgtttcgggttgtataatgaaaacgccggctcgtcgatcgaagcgggttaatcaggaggaatcggagacaaatgttacaacccgagtagtcctacggacacgaaagaccaactgttccaagacacgagcggctcgggtcagacccgattacccactgacccgcaccacctccgagtccgagatgaagttaatgcctccggagttctttcagatcgacgcacttgatcttgcgccacgtttgcttggcaagttcatgaggagagacaatgttgtgcttcgaattacagaggtcagactcagacacacgtttctgtttttttccagagaaaggatttagggttttaatttgggactgtttgatactctgattagatcattggtgcttactaagctaatgcaaaattaatggtattggtgcatcttgaaatactatgattgtaatatgcaacgatttaaccttgttcctcctttggtaggtagaagcttatagaccaaatgattcagcttgccatggacgatttggtgttaccccacggaccgcaccagttgtgagtttcttctttttacttgttagcatttagttacatacatacaagttgtgacttcctctgaaatgtggtttctttttttagtttggaccaggaggacatgcttatgtttatctatgttatggtcttcatatgatgctcaatattgttgctgataaagaaggagtcggagctgctgttttgatacggtcttgttctcctgtttccggtaaataatctgctcacatcggcaccggaactctgctcattatactctgtcttgtttgaggctcaaagttgtttgggttgttggcctatcgcaagtgttgaattttcatatcttttgcatgtttttactttatttattcatcaatggcattgcaggaatggagactatacaggagcgtcgtggcctgaaaaccgacaaacctgttcttttaaatggaccaggaaaggttagagcttcacaatgcatttcatatgttctttaatagttaaggaaaaaagttgaaagtatctccgatggttagatcttgaaataaacaatgagtattcttggtcaatcctcttgcattatcagctttttatctgtgcctctcgcaggttggtcaagcgcttggactctcaacagagtggtctcatcatccactttattctcctggttagtaggtcacagaccaaaatagttaatgaagtaagaccatgtctctctcaaacagtgtttaagcttttgtactaaaaatatatggacacaggaggactggagcttctggatggaggagaagatgtggagaaagtaatggttggtcctcgcgttgggatagattacgcattgcctgaacatgtgaatgccttgtggagatttgctgttgcagacactccatggataagtgctcctaagaacactcttaaacctctctaacttcaactcaaaactcctttgtacctcttctttgtaaatagacatctgcatgtcatattaactctttggtgtgtgtgttgtataaactattttgccaaagattgtgatttgggttttttggtttataaagaaaaaacaattggggcaatgttgtaaagattggaaactggaggtatatttaagctccccgaaactttctttatttattcttttgccctcctttgactttctacgattcctaatcaaagtgagacccgaacagtcaaatccaatctctgcaa

SEQ ID NO: 68682 - DNA, 342 bp, Arabidopsis thaliana landsberg
aagctctcttctcagaatttcaatatctgatccgactcatgaatcctatgattatggtctttttctattctgggtacttctgatgactttgttacctatcgtagacgagcaatctgtttacacagactatatcatgcatgattcgaagtatattttcatttatttatatcatgcaaggtaagctgatttcgatgaagcttttctgaccaaaatagacttttgcttcgattaagtgagatgtacatatttgcaactactgttcagaattaactcccttttagggcaggtgaactgtgcttctcatgctataaagtggggggctctatgagggcgtgcataaac

SEQ ID NO: 68683 - DNA, 604 bp, Arabidopsis thaliana landsberg
  unsure (1)..(604): unsure at all n locations
gagcaacatcccccttttaccttaaatntggtcaaaatacctcggaatttcttacttttcgtgtttggattacgatccagtgacctgggggtctatgcggtaanctgatatacgcacaatcatcactttaagctactcgcacnnnnnnnnnnnnnnnnnnnnnnnnnnnnnnnnnnnnnnnnnnnnnnnnnnnnnnnnnnnnnnnnnnnnnnnnnnnnnnnnnnnnnnnnnnnnnnnnnnnnnnnnnnnnnnnnnnnnnnnnnnnnnnnnnnnnnnnnnnnnnnnnnnnnnnnnnnnnnnnnnnnnnnnnnnnnnnnnnnnnnnnnnnnnnnnnnnnnnnnnnnnnnnnnnnnnnnnnnnnnnnnnnnnnnnnnnnnnnnnnnnnnnnnnnnnnnnnnnnnnnnnnnnnnnnnnnnnnnnnnnnnnnnnnnnnnnnnnnnnnnnnnnnnnnnnnnnnnnnnnnnnnnnnnnnnnnnnnnnnnnnnnnnnnnnnnnnnnnnnnnnnnnnnnnnnnnnnnnnnnnnnnnnnnnnnnnnnnnnnnnnnnnnnnnnnnnnnnnnnnnnnnnnnnnnnnnnnnnnnnnnnnnnnnnnnnnnnnnnnnnn

SEQ ID NO: 68684 - DNA, 443 bp, Arabidopsis thaliana landsberg
taatttggtaatttagttttagattcaataagcttacatgaactccaacactatttccgttttgatatgttttttaattcctttttgaaaaatctcatattccttagaattagacttgtctcttatattaacgttacatattctagtatataacttggttgatacgccccaacaataagaatccaattacccaaaacaatattcttgcatttgtttttcatcgttccattgattttcgtaaaaggaacattttactagtcaaaagttctttaataccatcagaagcgacatcagctcccttgtcttaaaggatcaaattttaacttacccataatccagtcttaaagcataatctaagatcgaaaacgacatgattcttacagctaatcacctgtctggccacttatgaatactctaacttatttcatgcaatattgaaacgt

SEQ ID NO: 68685 - DNA, 2170 bp, Arabidopsis thaliana landsberg
caaaagcccgtccacgtttttttaagggctccccaggccccaaaatattttagaaaaatggttttattggaccaaaattcgggccattttattgccgggttaccaaaaaagggtgggaatatggacttgttttatctcccactttagattgtcacaagactctattttagtggagagcagtgatataagatttgcaaagtcgtccagcgcttattaaattacaattgtttgaatcttctttgcattgacggcccaaaatgttgatgttgctccataatagtccatatccacattcattttcttattaaaatatataaaccgaagccttttttttgtggaaatgtagccgaaggtgcttttaacagtggaagcaaaaaaagaggaacaacaaaagttgtaatggagtttaaattgtaaggtaaggaatattgtaatgtgctttttagtgtgtaaacgaggagtataaagggggagacagtagacacgacatgagaaaagcaaagacataataatgatattaaaatgagaaatgtgcctgaaatctgaatcgtctgtaatttacactgaagtaactttattttgagatacgtttctccggaccaccatgtgtgatgagtaatgtatatgcattgcatggcttaaatgaatgagagtgtatgctcattagctgacaaaagtaaaacttaaaagttttgggagtaatgaaaatgagaaatgagtatgtgtgtgggacactccataactatacaataatgaaagcattacagaaaaagctcatgcttggaccctttgtgactttcacttcacaatggtggacttctctttttcgctttatggaaaagaacaatcaaaaagcctctgagtaatgattattttgaaacataaattaaaatttgtgacagtgcgagactctgagtaatgcttagtgcgcttgactgactttatgccatttcaaatttttgtacagaatcatattgttttctattttgcatcatgcttactaaacagagattcaaataacacgtccaaaatagcaaaccgagaaaccttaacacaaaggctgcattgtagttatatgtataattgggagttctttgaccaacaatctttttagtgtaacagaagttgatcttttggatctactttatgaaccaaccttcaacattgtgaaacctagtgtgaagattcacaacttaacaacattgtgaactcacgagaaaaacttctttatagaaaagacgaacactatattatgataatatgaaaattgaacaaggaatgaagaaatacaaacaaggaggattgattcatctgtagttgactaatcactctaagtcatgagagggacattgtatgagctctaatatcttcaccacttcctccatctccggcctattcgacggcacttgggacccacacaccaaccctagtttaatcaccggtattgcctcctccgctggaaaattccctctcaaccgagggtcaacgcactcctccaccctcccttcttctaacccttctctcaccgtctcacacaagaccacgacgtcgtcctcagcgtactccacgggtctcttccctgtcaccacctccagcaccaggatcccaaacccgtaaacatcgcacctgtcggttatcttgactgtccggcatgcaaactccggggctgtgtaccccaacgcgctctgtaccttgccactcaagacgcacctgtccagcgccgaagccaacagtctggccagcccaaagtcagagactttagcctcccctgcggcgtcaatgagcacattcgttgctttcatgttgtagtgagtgatgttactgctatgcagaaaagccagacctcttgctatccctagaatgatactgaaacgttgacgccaagttaggcaaacgctctcatctccgtggagatgtctgtacaagcttccgcctgaaacaaactcgtggatcaagagctgcagcgattgcgtccagtagtacccttttatctccaccacattcttgtgcctcagcttcccgagttttctcatctctctctcgaactcctcctgcgactttattagacccgacactgtcagtttcttgactgccacaggacgcccatcctgaagactcgttttgtacaccacaccgaacccgcctcgtcccagctcgctgtccttgttga

SEQ ID NO: 68686 - DNA, 542 bp, Arabidopsis thaliana landsberg
  unsure (1)..(542): unsure at all n locations
nnnnnnnnnnnnnnnnnnnnnnnnnnnnnnngagatactgcttttgcatctgttttaattgtggaatgtggttgtacggacccatcggcaagaaactatgatccaacggctgttcaaaacgacggatcctgtattttccctgaaccgagtgtaattgttccgaatatctttacaccaaatggggattcgaacaacgatgtgttcagatnnnnnnnnnnnnnnnnnnnnnnnnnnntcctgaaaatcaacaaccgttggggaaataatgtgtatgaaggttccggattagatccttattgggacgggaaaatcaatggaacgattgcccctgatggagtttatttcgtacagtacacggtgaaaggattgatgggtaaagaacttaccggtcagggattcctgcagttgatcagataatattaattccagtataggggggggnnggggantnctnnctttcnnnnnnnnnnnnnnnnnnnnnnnnnnnnnnnnnnnnnnnnnnnnnnnnnnnnnnnnnnnnnnnnnnnnnnnnnnnnnnnnnn

SEQ ID NO: 68687 - DNA, 313 bp, Arabidopsis thaliana landsberg
ctttacccactaaaaattttaatatatttattatttgaatcgtgattcagagacgattcaattcttttaccacttttagtctattcggctgaagtaaggttttttcttaaacggtatctgatcggtttattattatatagcgatatgcctttagagtacactatatttttactaggacgataactatagggttgtttttgggaaaaataatgaatattttgagagaggcagggtgatggtccgctgaaccgttagtataaatacttggggtcaatccttttcttgtggagattatttttttatgcttttactt

SEQ ID NO: 68688 - DNA, 210 bp, Arabidopsis thaliana landsberg
  unsure (1)..(210): unsure at all n locations
cctgtattgctaaacttccttgtctacggctgcccttaaagggcggggggatgcctccgtactgtacagctaggctgtcgtacgataaccaacaatgtcacnnnnnnnnnnnnnnnnnnnnnnnnnnnnnnnnnnnnnnnnnnnnnnnnnnnnnnnnnnnnnnnnnnnnnnnnnnnnnnnnnnnnnnnnnnnnnnnnnnnnnnnnnnnnn

SEQ ID NO: 68689 - DNA, 492 bp, Arabidopsis thaliana landsberg
gatgctcgttcaatctcatcgattcgtgaccaggcctctgctaaacttcgcgtttcttggtgcaggtttgatctgaatgcacatggattattttcatcatagtttcgggttttagcgggttgaaaggcggcttccatgctttgatgaagattgtcaactggcggagaatggtatagccgtaattccgactgctagattcgttactgcttctctaagcagcacacgccccgtcatgcaaaacggatgctacaatttgtataatagatgtactccgtttttaatcttcagaggcgatatagtatattgctctcgaatagcggctggcccagtcttttcgacctcttcgtcggtagggcggaaatttcaatgactgcgcccgatatggagtactttgctcttctcaattgcttgaccgtagtcgccggggatggatgcttcactggtaggatcgaccatgcactgcatagaggtttccaggtcgatggcacgttt

SEQ ID NO: 68690 - DNA, 476 bp, Arabidopsis thaliana landsberg
gggacaaacattcgtagaattatttttagtaaaaatatcccagtttcaacttatgttcctactaaatttcttttaggctttttctgtaggtttagaactctccaagggaaaaccaaaccaagttaagtttcaaaatttagttttatatagaagttttggactatgaataaacgaataagggaatctataacgatgacgtacgtagttcatctatatacatgcacatgtaacaaaatctgtatctagctagtttgaaaaatagaataaaatccgaaaatagtaacttacagaaatacaaacaagcatattgtctatatcaagtgagatgaagaatcatccaaaaaaagttaggcgaataacgatatgaacaaatttaaattgaagaaacaataatgaataatattatatttttttctcttcttccagtaacttttgtgatggatatcacagccaatttttgcgaatgtcgaaggtgt

SEQ ID NO: 68691 - DNA, 283 bp, Arabidopsis thaliana landsberg
aatcatggtggttacacgatcgcatgtcggggagtcaaaggataagggaaaggaagtggagattgcggagccgatagagtcactaattttatggttagaagagttggtcgcaaagcaaaacaaagcaatgatgaggcctatgtcggatatgatgggtgcaataagtagatccacatctcataagcttcatgatgaacagtcaaccagagattggatcttaccgaggtcatctacgtcaacagatgacaggtcgggtcatccagattatcggagggaaaatcga

SEQ ID NO: 68692 - DNA, 119 bp, Arabidopsis thaliana landsberg
ttgactcctgagagttagtaactttcttaacttcgtgtgcaggagtagtaccgtgaatccccagggttttgcgtgtcttaacagatcccacaatcatcgttattataacactacgcaga

SEQ ID NO: 68693 - DNA, 571 bp, Arabidopsis thaliana landsberg
ctgataggaaagaacactcaagataatcaattggaccttttaccaactttatttattaatgatttgtcttgggggaaatatttcaacaaggctctttctcagcagcttcttcttcttcttctttataaagacactctcttgagtctctctctctctctctctctccccctctctcatctctctctcagacatttgatggctgtactctcagcatgttggctaatgatagaatccatagtgattcaagatggtttcttgaaatcgtcttacatgaaattatacatgcaccctcttgttctctttctttgtcaacttcttatatggctttatctcttctttttatggcttctcccaccctttcaagctctttacaacgccttttcatcggtcttgttcacgttctctaagctagttagtagttctttccgagtcattatgtttaaaaaggacgttgcttgtcatattgagtctaggcaagagatcaagaatacccttgatagctgggaactctctacatgagctcagaccccggttcctgcgtgtagctttgcgataacccatcaagtggata

SEQ ID NO: 68694 - DNA, 357 bp, Arabidopsis thaliana landsberg
  unsure (1)..(357): unsure at all n locations
gaacctacttaggctaaaggacaaagatcacttttttcttcaattttaataaggatttaagaaattatataatattattatataaaatacaataaataagaatttttcttaccatcaatcctagaaagatagagattttaaatactcacctctacataaacaaagagataagctcatatattctcaccaaacaaagaaactcttcaaaatcaccatcattgcttcaaagtcattttattgataaagctttttttgggcctatttctcaaacaatattcatatgtgttattggtgtantattgataaagctttttttgggttacctattactcaaactatattcatatgtgtaatggg

SEQ ID NO: 68695 - DNA, 635 bp, Arabidopsis thaliana landsberg
  unsure (1)..(635): unsure at all n locations
taattgattctgccgaattcagcggttatcatttagatcatgttctgttagttaagaagacttttgagtgcattaaaatggcagttgtctttaacttattttgaagaagactatttctagtaaaaaaatatttatcgaattaggtactctttttaattattgacttaattcattgataagttctttgagtgcactaaacaattgcaagttactattaatccattattatttttatagtactggaagggtgaatttatttaataatcttttaaaagtacataatacttattgcaagaaaaatatcacgacttttgattgtaattggtactagtaataataaataaggacccgaataaaaaaataaagacctggtcgtttgaattatttaggtatgtatgacagactggtaagatttcagagtaagttggagtaatcaatgttagaaaaaaaaaagacttttatacttattgccaataagttattggtaactggtacagtagtggtaccaatagagagctatgttgncttattcatttttaattaattaagggagttgtatcccctaaattaatttactactagatgaaattgggaatagggagagaattgttctttcttgtttcctcggacatttg

SEQ ID NO: 68696 - DNA, 328 bp, Arabidopsis thaliana landsberg
aataacataataaagcccattaaatgtccttaaatcattgaaaagctatgaatatatattatttcaaagatttcgattagtataaatagaggcaatcgtcaccaccttttatcatctcaaacattgtggtgtatgaagaaaaaaaaactttcattcaaagcaaaaagaaagatgggtctgagccgttttgcgatatcaaatgcaacaaagcagatattgaagctaaactcattgacaaacagaaaccgaacctcatcatcatcatcggatcatgtccctaaaggacacgtagcagtttatgtaggagaacagattgagatggagaata

SEQ ID NO: 68697 - DNA, 580 bp, Arabidopsis thaliana landsberg
ggggtggcgcgcatccgtatggcgcgagaaggtgttgcctaaaaatctgttcagatggtaattagtcccaagccgaggacgcgcaccccgaggcgttgtcagccggggtgcgccatttgtccatgaccaaggaagagcggcttcgtaacgtccattctcgggcgctgaagcagttcgacaatgtcacgcaggctacccaggaagagcgcgcgcttgcgcttcaggatcgccgcttcgtctcgatctcaggcgcgcagtgggaagacgagtggtacgaccagtttgagaattcgatcagggtcgagatcaacaagaccgcagccggtcttgagaagatcgtcaacgactatcgctcgaaccgcgtcacggtcaatttccgagcgaccaccgacagcaagtcgagcgaggccacggccgaattgctcgacggcctgttccgcgccgatgtgtaccgctgcaaggggcagcaggcgttcgacaatgcgttcgaggagggctctgccggcggctatggcgcgtggcgcctcatcaacgagttcgaggacgcgtacgatcccgataacgattatcagcggatagc

SEQ ID NO: 68698 - DNA, 120 bp, Arabidopsis thaliana landsberg
catgagggcaggtacttggacttataagtgagagagctaaggacacctcatcttctaaaatgaaacacaagagaaagattttcaatccaaaaggaagaaattcttggttgaacttgtatg

SEQ ID NO: 68699 - DNA, 525 bp, Arabidopsis thaliana landsberg
cccattggcccaacccttttttaaattttgtcatttgataacactaaactttattataatctgaaaagtcagtaactcaagattttgattttttttgtttgttcaaacattttgaatgaatttctaaaattattaattcaataactcataacttttaatgtacgtaaactttttataaatattgaaccaataacacttacttttgataaagcatttataattcaagattaagttataaatgcttcatagttaacagagttataacttaagcatttcatgtacaactctttaagttataaaaccttcacagttgacagtgtcaaaagagatttgtgtgacgtgtgaaattgtgtgacacgtgtgaaagttgacacgtggttaaaatagtttcagcctatattgttctcgtttaattttttacaaaactgttcaacctcaaactttgttcgaactcactaagatgtgctttataaacataaaactctttctaacctttttggtaagaacgttgagtggtttatcctt

SEQ ID NO: 68700 - DNA, 613 bp, Arabidopsis thaliana landsberg
  unsure (1)..(613): unsure at all n locations
acgcgcacgcagagtgcagcagcgatcagccttgcgcccgaaactacacgatcatacatgcagttattgtaccctgtcgtggatgggggctagatgctgttgagcttggcgcgggtcatcggtcccacgtagccatnnnnnnnnnnnnnnnnnnnnnnnnnnnnnnnnnnnncttggaatttcttgactgcagcggctgtcgcggggccaaagtacgtggattcgtttccgggcgatccgacgccacttgcagcgacgcgggtcgacgcatctttgttcaggatcttctgcaacgtgcgtacgtcttccccggttgagccgatatcgagcggtcgtgtgagcgaccctcccgacgattgcgaagcagcagtactcccgctcgtggagccagcgctctgtgacacgcctgcacttgcgagggacattccaaatcccggatcttcgccgccgtcgaacttgaagatcgcgacgccgcggacaccgagctcttttgccagatctattttctgctgcagcgactgcgcatcangccaatccatcangcggaatgagaggtgcgagttgtactgtgtcgcgtatacgctcgcagcagcagcagcgagcgaagcggaat

SEQ ID NO: 68701 - DNA, 339 bp, Arabidopsis thaliana landsberg
aaaacagacatagcctatcatatattcagtatcacatatatataacgttttggttttttatttcactaaacttgaggtaattaaattaaggtctacatattattggcagaaaataaatgaaaagtctatataactttttcatcaatatatatattgatgaaaataaatgaagattagtgttttataaagagataaaaactaatttatgatgatcatatcatgatttttaggatattgatttatgttattgtcgtcgcggtgttacgacgtacattgaaattcacatataaaagaaactttaattatcaaaatcatctatatcatcacaatctttttgat

SEQ ID NO: 68702 - DNA, 299 bp, Arabidopsis thaliana landsberg
atcgctcagatagccaaatgtcagcttgctcgatttcgcgagtttcgacaccgccccatgccggcgtcgatctgctcgccgcgacgcacggcgcgcgtcagcaccagtaccggccgcaggtcgcggacgctaaccggcacatacaaggtccaggcgcccggcccgtcgcagtgcaccatgacgttggtcgacgcgccgtgcgcggcagctgcctttgcctgcggcttttgcgcacaggcggacagacgcaagcgttggtcgagactgttagagcttacttttgagcctgtcggtatgta

SEQ ID NO: 68703 - DNA, 123 bp, Arabidopsis thaliana landsberg
  unsure (1)..(123): unsure at all n locations
cccccccaaagaggctngnctattttaaatgtttgaattctgggacgagcgaagaaacaatcggggcagcgtatagccttataacacgcatacctttcctgctaaagatgagctagaagcacg

SEQ ID NO: 68704 - DNA, 705 bp, Arabidopsis thaliana landsberg
tttccagttgagaccacacaaaagatggctcgtagagcaacctttgttttaccaaagccaacatctccacagatcaatcggtccataggtgtttctctctcagtcaaatccttttcaacatccagaaaagcttgcattgaaaactcagcttgagtaaaggaatatgaatgatgaaaagtaaaagataagcagcaatacctgcttctggtcaggagtggcgttataaggtaattgagccgcaaaatcagccatgatggggttcttcggatatggatatctcttctgtctaagcctatgaagatatagctccatcaagtcaacgaccattttctgaattgctacttttcctttggtctttcttctttcccaaacactagtgtcactcagccgactcaaagtccgaggccgtttagtctcatttggactgatacagaacatgaacagagagtaagagataaagacagggacgccaaggaagatagccacaagcaagtcaaaaagtgtgagaaagagggaagacgtacagattgtatcggtagagcaaacgttaggcctgtttgaggggaagcttggccatgccatcagcatactctataaagacatattcgaggggctcagaggaatccttggggacatcaaacttgatcccaacaaaacgcccaatgcctactttcttgtgcaccacataatcaccggcaatgagac

SEQ ID NO: 68705 - DNA, 2366 bp, Arabidopsis thaliana landsberg
ttaaaatgatttccatggagtaaggctctttcccatatgggcgacgcaggttctctgtaaattgcattagactccacatatctttctctgctgctttttcagcttcatgaatgatctccatcggattttccaggtaatttacatactccgagggtagccggggatttatatttatgtcaatctggaaaacagagcaaaaacaggaattagaaaggcattaattgctacagttcgaggcataacaactgcatagaaatttgaagttctccacttctcttgcacaagcaacagacctactactaactatcgtatttagccttcatttggaaacattctgatcttgtgtcatttttaatctaaagcagcaccttttgttgaaatggaacataccttcacgaggtcatatggaaccgaaaaaatacggagttcctccacctagaaacaaccaacaagattgactcataagtcaataaccaagccaatttttaaaaaggataaacaaaaggctcatcagagtcataatcagtgagaatgtcgaagtagactttattcataatataccttggagagactctcaaaaagcatttcaaagaagagatcgataccgacatttccaacatcccccgtctgttgttctccaaagattgtcccaaaacctcttatacccatatccttctctgcaagttggaagccttgtccaagttcacggcactcttcaagagcgctaagcctttcctgcattgtcagcttatacattacatgccaatgtttgccaagggaagagagcaaataaagtcacccccaataccagtgcttgatcagagagcagcgatttatcgggataaaataggtaggcatgagcttctttatctgcccgaccaacccttccacgcaactgttgatcgcaacaagaggaagatatctaagaagctactcacaatttgttgtgaaagataactacaatagcaatgacgcaaaagtaaagtagacaagtaactttggcacctggtacaactgagcgagcccaaattgttgaacatcctgaatgattatggtatttgcattttgaatatcaagtccgctttcaacaatattagtacatatgaggattttgatctttccttgcgcaaatctctccatggtttcctctagttgtttcgagtattgctgcgaatgcatcaatgtagcaggatagcaataacagtgcttaggaggattccatgaatgaaatgtgctttatggtatgaatgagcatccaaatgtctagtactactaagaaaggccacaacatacctttccatgtgccatagcaatgtcaatatctggaaatgcttcttcaagaaaatccatcacttcttctagtcctgataaaggagaataaagtggtaaatcgataatggaaaaatgtaaaggctgacattgagaaaaaatattccatggtcaaaaggtttttctgattctactagtctctgagttacgaccaagagcaaaggtagtcatattaagagataacgtagagaacgacaaatcttttaatgcattctacctttaatccgaggcaagacataaaaaacttggccaccacgatccagctcattttttattgcttcaatcaccttttccttacggaatgacgaaagatgggtttttattggaatcctctccggaggcggtgtggagattaaactaaaacaaagaggaaacaaaggctcattagtctcatcaaattctatcagtgagcatataatctgaaacacatcatgtcgcaacctagcatcccggaatccagtcaaagctaagtacagtgtccttggtatgggtgttgcggacaatgtaagcacatccacggatgttttgaaagatgcaatcttttctttctgcttgaccccaaatctctgttaagtgaacaaagaatatcatcaactaatccaagaatcaatcagagattatggcataaacagcttattttcaacgagatagaacagaacctgctcctcatcaaccacaaggaggcctaaattactgtacacaacacggctcccgagaagtgagtgagtacccacaatgatattgagatgtccagtttttatcatttccaaatactcctccttttcagctttggtctgcacgaagatgtgactatggtcaattccaggtaaaactatgaacaactttacactcagcagacagcagagggtttctttctatgtaacccacaaccactaaagtctacaacaaaattgagttttctgcatatcctttacccgttttcatctattgtctcagaaacagtgatcaatacctgaaaccgacttaaaaggcccactttgatgtgtggatacaaggaaaaccgctctgagattaca

SEQ ID NO: 68706 - DNA, 552 bp, Arabidopsis thaliana landsberg
  unsure (1)..(552): unsure at all n locations
caatatccgcctgagaagaaggcgcaacttttggaattcgttttcgtttgcgatcgagttcccgtcaacggtatctggagcattatgttcgtgatccagaagaacggtgttggagatttggtaagctattttcccttttggtctttgacttgttcaacttgggttaatgactaattgtcttttccagcgccttccgactagtttaacgtgtttcggtcgtctattgctgcccgaatactcctcgaaagaggcgctggcggagaagctcgacaaggcacttgaaaacgcacgaggattcggcgttgcatagtagtgatacatttgggttgccaatggtgatctatacatacccattccttgttctatagtttctctacaaatgaacgacccttgatgaacagtcaatgcaatagnnnnnnnnnnnnnnnnnnnnnnnnnnnnnnntccaaaactctagatccctacctcgcagcgagctttgcgcccctgttcatattcataagattacttataaatttataagattatttacatatttattagacgtgactg

SEQ ID NO: 68707 - DNA, 209 bp, Arabidopsis thaliana landsberg
  unsure (1)..(209): unsure at all n locations
acaaaacaaccagaagggggngaaaacccaccccacgggcaacgcaagaaaaaaaaaaacnagcaaacngaccccgcgcnnagcacnagcgcgngcgacgngcaaaacnannancagacccagcaccacaagaacggacgagcnaaaannccncannccaagcaaacaaagaaagggggaggaaggaaaccanacgaggaggcacgaac

SEQ ID NO: 68708 - DNA, 591 bp, Arabidopsis thaliana landsberg
  unsure (1)..(591): unsure at all n locations
tttttctgataaaattgaaagaaaatatattgtatactttagttttacgtataaatgtaccacagcatatggagaggttagagactgagcctctgttattgatcaaaacatggttaaagtacaattccaatccaatagcttatgaaatgatacattttgaaactattttattataacaagataaacctagatactcccaaaaacatataggaaaaattcaggctgtatgttaatcacttcgacgtttcttataaccaaaaattaaacgcaggatatgttaattagtaacttttttttggtatgtagattgtcatggaaaaatcttcttaattagtaaattaacttgaaaaacttatagtacatcgaattgtttgttgttgtttttttttcaatcaaaacgaattgtttattgtttcataagaatagatggaaatattgatatttaaatgcgtgcattgatcgccattttctgattcaaccgaagttaagctgcaaaggcccgagcaccaaaacagnctaaacatatatcttatattttaattttaagaacaaataaaatactactatattcacataactaaaatatcttta

SEQ ID NO: 68709 - DNA, 283 bp, Arabidopsis thaliana landsberg
ggaacaaacagagagctggcacctcacctttttatctgttttaaaagatcgccacaaaccactaagcattcttggcaaactcaaaaaagtttaaatcagcatctttagcactatctgactttaacgtgggtcgaaaacacatacatctacaatggactgatactgcgggagagcatctggattacctaacgaataacctctcctaagggaatagtgcaacagacgatgctactctttatatcactggcatacattggatgatgcagggtcacaaacacataaa

SEQ ID NO: 68710 - DNA, 181 bp, Arabidopsis thaliana landsberg
aacttgtatttaaactggccgagtatttgcgccgaactaaacgaaaagaactttaatttagatgaattaatcgatttaaagttatcttcctcggttttttttttttttttttttttttttgaggtttaacttatctttctcggtcctatcttacttttacctaaacacaaatataggttag

SEQ ID NO: 68711 - DNA, 304 bp, Arabidopsis thaliana landsberg
aaaaaatgcaaatcactactacactcggaatcagacgtttttactttcttaaaaccgatataggggatgcggcggcgttctatataaaacttactgtcctcccaaccacaaccatctttcattaggtaaatgatttatcaatctaatataacttttattatcaaatcgctaattctaacgcttattataatcttggaacattcgaaaataaaaatttactatcccatattctatttagcgtttataataatcaatatataatttacacactcttaaataaaacttcgttattaaaaaaatatac

SEQ ID NO: 68712 - DNA, 608 bp, Arabidopsis thaliana landsberg
  unsure (1)..(608): unsure at all n locations
ttctctcacttccacataataattcaatacctannttaatttaaactnatcattaaatttgtgtaatatgtaaacatgttacccaccattatttacttcttattttttttcttttataattttgtaactatatattaataacattcatgatgaatgattcatccattgagtttaaattaaaatgattaaaaactacataatttgaaggccataactacaatattgttgggatctatttagatttttttaaaagatataaacaaaatgttattagaaaatgacttttaaaacttttaagaaaatgaacttttaatatcttcaaattaaataaatcaaatctctatttatagaaaactaaaaattctgaattttgacataaaaatataaacaaaaaaattgtttggtataaaataattgatttttaaataaataggagagagataaaaaaatctaaaaatgcatataattttttactagctcacaaacatctcatgatctccactttaggtttttaacatgttgaacaaattcaactaaattttaatccagctatttttttgttttttttcaacaagtccattgtaagtattcaactgttgaaaaaaaga

SEQ ID NO: 68713 - DNA, 212 bp, Arabidopsis thaliana landsberg
acagctattcagtcaacatttggcgttacagcatctaagcaccccaaacagatgcagcggttatgcttttcatagattatgcatattatttcacttgacataattacttcactgtagctcagcttgatattctatggcttcatatttctactgactgcttttaaaatctcatgagcacaacgtaacccaaaaacacctatagctatcatttt

SEQ ID NO: 68714 - DNA, 204 bp, Arabidopsis thaliana landsberg
acattaataaacacatttatatatttactttcacaaaataaattgttgatataaacttcacaatggtttgttaaataaacatttcccaccataataattagttcaaataccactataaaacacggtttttttcaaatgaaaagggccataaaaggcccaatgattgtcctgtaaaaatttggattgatgccaaagtatttttag

SEQ ID NO: 68715 - DNA, 332 bp, Arabidopsis thaliana landsberg
acatggctatgatatcaactaacgtaactaacgcttctaataatagactagtactttgttgatttgaacaaaaattagataatcataatcgagacaaatatacattacataacgagttcattggttcgagaatcatatagtgtctatgccaaaccgatgaatacgacgacgatttaaaaaaaactaacgctaaatcaatcattcatagtaactttgttgacattgcatatggtggaagaatattagtaattgttgtctataaccgatacgcgacaaattaccatcgacgggtgaaataaagatgggtcaacgaggttgattttcaaggtttg

SEQ ID NO: 68716 - DNA, 360 bp, Arabidopsis thaliana landsberg
catgagccgtatgtattcatggggcaagtcgaggtccgagaaagacgtgtgttccgggaggacgaagagcttgcatgtctttcgtgagcccctctacactctggggttggaacgctaaaatgaggcaggcccgcctttattgggagatgacagattcttgatcgcctaacacgctcgtgtctcgccgaggctctgtctgagatggatcggcatctttcgttccaatgtatggtacttgagcagatagcttgtgtggtgaagcgattctggatacattggagatgggtatgtgccactccatgagttatcgagccttgcgctatgattcgcctaagcacggaaacagatcctgtgtcgggc

SEQ ID NO: 68717 - DNA, 585 bp, Arabidopsis thaliana landsberg
ggttgtctattctagagaagaataggcaagagttggataagggaaagagaaatttttttagcttctatgataccagtcacgtgaatagttgacttatttaggttacttttccaggttttgggcaaaactttttctgaattttgtgggaagtacacacacgaggaaatgagctcatgtgatttcgaaacctgcaattacagtttgtttacgtattatgttgacctgattgaagttgaaaaagacatttaacaattctgtagctggtttactaaccgagcggatttatgctccggatttatggtttatttggtttatccttaaccacaaaacaaacgtgacaactccgtcaccgcaaactatagcagattatctggttttgcggcggtttctcgttatctactagagagtgagagaggaaatacctcggggtgaactcgctgcgtaggcaaagcctcttcaattttgctcttttgttcaattccggggcttaattatctgggtttgcgtattttgaagagtcagtttgacgaatttatgctgaaaattggatctttctctgttcatctttcagcgacgattatatac

SEQ ID NO: 68718 - DNA, 510 bp, Arabidopsis thaliana landsberg
  unsure (1)..(510): unsure at all n locations
gcgaggcgttgcatgcgcagatcatgttctcggagctgcgatgccctancctgcttcgcttcaccgagccgtgggttggggatactaactggactgcgacaacccatctctacaaccagagtcgcggctacggctggtactcgcgcaaggcgactggaggcgcactgacgatcggccgcccgctctcggaccacgtgcgtgcattcctgacgtaccgcctggaggacgtgggcgtgtccggcagttccagcggcacagacacggcaaacctgttccgcggcggattgacgtcctcggttcgaggcacgatctcctactacacgcgaaacaattgcctgttgccgaccgaaggaaactacgcgacggcgttcgccgagtacgcgggtcgcgcgaccggctccgagaacgaatacgttcgctggggtggcttttcgcggcactaccaacacatcggcggaccgttcgtgctccggcttaatgccgaacttggtgttacgtcttctctcgacg

SEQ ID NO: 68719 - DNA, 498 bp, Arabidopsis thaliana landsberg
cttaactaagcatatgctcttaacagtctaaagatcctcttcttaatgaatgagtcgggtgtggtgctaatttagatgagaatcataaccaaaaaaagaagttgaaagatgtgggagagggaaattgaatcctttcctctccacagaccaatactgaacctttcattgacaagaaatatattgccaccgaacctgatgcatctttcataatcgggaatgagagcaccgtcaaacacaccaaaaacataagtataagtttggaaaattaaaaacgctaacatactaaactacattgatgactgagtcaactcattaggtcttgcatttatgtatacaaacttgacacttgtatccttctaaaatgccacgatgataaagcaacttataagtcccccaacaataaaaaggtaaaatacatcgatactcctatatgccagatgaaaaaaatactgaatgaaaaccaaaaagttcaatcaaatcaggtcaacaagcgtaaac

SEQ ID NO: 68720 - DNA, 186 bp, Arabidopsis thaliana landsberg
gagcttttgggatggcttgttcacgtagagaaacaatagcaagaccaatctgagcatataggcgataactagtattactatagatatgaatggcacatcaagtattctagcgcctgatgtggcatggtacattcaaataagaatggggatactctatattatctctgcaggggcaaatgctgaaga

SEQ ID NO: 68721 - DNA, 179 bp, Arabidopsis thaliana landsberg
aaaagaaaaactagctgaaattatagggtagttgccgaataaaagactacggaataaaaattaattagtttataagattagactcgagtttatatgatctatacatgtaagcaaaatttcaaagacaaaaacatctacgcattgcatgaataaaaatgaaagcactaatgagaagagaa

SEQ ID NO: 68722 - DNA, 526 bp, Arabidopsis thaliana landsberg
  unsure (1)..(526): unsure at all n locations
tttgtattattcgctttatagataaaagattctacttaggttgtggccttgactgaacaatgtaaacatctggaccaaccaaacaaccttcaacgtcttgagcacagccaaagtttctttccaagaagaaaccaaccgaaccgagtctctgaccgagctgctgtctaaacaccgagtcaacagttaaacgttttttgctatagtccacggtcaaccgaacgtattttccatcagcaggacctgttcctgacacaagaagctcttcgctgaagtttgcgaaagctaaggtttgtacaatcccgtcgagcttacccgaagcgagtctccatggtgttcctcttgttcctgaagcnnnnnnnnnnnnnnnnnnnnnnnnnnnnnnnnnnnnnnnnnnnnnnnnnnnnnnnnnnnnnnnnnnnnnnnnnnnnnnnnnnnnnnntaagtccggcgaaagcatttcttgaacgagaacagccattgaagcttctctttgagagacaccagcagctctacggcttagaacagc

SEQ ID NO: 68723 - DNA, 137 bp, Arabidopsis thaliana landsberg
atagtaagaataatagaactaacctcaaacaagaactaatacaaatttaagaagataaaaaaacaatgaattatatatcattcgaagtcttattacatcataatcagatatactatatactatacgccccgcccccc

SEQ ID NO: 68724 - DNA, 129 bp, Arabidopsis thaliana landsberg
ttagaaccagcatgttagtcgaattcggaagagataccttctattttttttgacctgataacaaaccagcgagtaatttgggacaaaatgaataagaaaagttgaggtcatctatctatacaatgcaaa

SEQ ID NO: 68725 - DNA, 529 bp, Arabidopsis thaliana landsberg
  unsure (1)..(529): unsure at all n locations
gagttcggataataattcgaattttatcaacaacgtccatnnnnnnnnnnnnnnnnnnnnnnnnnnnnnnnnnnnnnnnnnnnnnnntgtgaattataagaacaagaaaaaatcacaacctcgcatagtcatatattccaaaaatagagaaaagtgaaaaggacatcttaattatacatcatgtattttttctttttatccatagctaattgacgtgctttaaaaccgtgagagtgttatatgccagtcataaattcccagcaaataaatcggccatgcaagaaaattcacaggacgctttaactggtatctaattcgcgtattgagaaagaaatcaagaatcaagggcagtgaattcagtaacgtgtcaattctgacagtaattttttctctctttttttcaaaaaaaaagaagaaaataatcgcatacaaaacaaattatggctattttctgttaaactttataaatgatagtaattttagtcaaccataatttaaaatgtgattttgttttaagaatttttcccta

SEQ ID NO: 68726 - DNA, 890 bp, Arabidopsis thaliana landsberg
  unsure (1)..(890): unsure at all n locations
ataacaatgggtgcatttatgggactactactactatttaaaaatataaatagtttttctttagtctaccactcctcgnnatcagactaggctacatccattgaaccataataaaattaccgtggaaaaaacagtacaccgnnnnacttcctatataaacacaaagatccatgtgcccataaacatttactactagtctactactatcgtattttttttccttcgtctatgactacactacgttgtttaattttggaatcaaattaattagtagacgacgacttcaaacaataattatttaacatacacgttttgaacaactgtatgcaataattaaaaaatcaacaagaccaatcaaaatcattaacaaatgctgtaaaaaaaaccattaacaaatgtcatttaacatgtttctaagaatatttaatgaaaaaagtatagaccaaagctctagtgctctaaataaaatattaaaaataaataaataataaaagaaaaagaaaaaaaaaaaaaaaataaaaaaaaaaaaaataaaaaaaaaaaaaaagaaaagaaaaaaaaaaaaaaagaaataaaaaaattagaaaaatagaataaaaaaaagataaaaaaaaaaaaataaaaataaataaaaataataaaaaaataagaaataaaaaaaaaaataaaaaaaaatatggggggggggggggggggagggggaataaataaaataaatataatataagaaaaatgaaaaaaagaaaaaaaaataaaaaaaaaataataaatataaaaataataaaaaaaaaaataaaaaataaaaataaaaaaaaagtatattaaaattaaaaaaaaaaaagagaaaaaaaataaataaaaatatagataaatataaaaaaaaaatataa

SEQ ID NO: 68727 - DNA, 362 bp, Arabidopsis thaliana landsberg
agacatctacagtttggggaagctcatcttgttttttacgactctggtcacatgaagaataaacttatatagggttcttttttttttttcttaggaaactcacatattaacctaaccggacgaacaatgcaacctactgcattcttgggagttgaacatcgctcacctctttattttcacaaacagaatctttactctgttacgttttcacattgacttttactgctttacacatatacaagggcttctgcataatccctttcttccttcgcattggacccagcttatttcactactgctctgaaaatgatccttcaaacattctgaacaaaattgccaaattcaccccaaaacacttttac

SEQ ID NO: 68728 - DNA, 238 bp, Arabidopsis thaliana landsberg
  unsure (1)..(238): unsure at all n locations
aaaaaaaactcggaaganacagannccattttttctaatatatacacncaaacaatatttactttggaatgttttatttaaaatacctagaccttcccccccatctaactactcttataacattttttttttaattataaataaatcaatacaatccatctccaaactaaactctcacactttttaaaacataatccacaatattcccataaccacatcttataaaaattctctatat

SEQ ID NO: 68729 - DNA, 195 bp, Arabidopsis thaliana landsberg
ttctctttctctctaaacttctacaatcgcttctaatcgtttgatcacattgcacaaacatgtaagttcctcaattcacatatatatctaacttttatgcatgttgttgtatgtatgacaatgttacacatttttggttttggctacaattggaattggttttgctattggtgtaattacagctattttggggaa

SEQ ID NO: 68730 - DNA, 304 bp, Arabidopsis thaliana landsberg
attccatcttctttacatgacgtttgtcttttaaccttctatggcagaaccaacctgaaacttgcttctcagttaatccaacttcctctgctaacttgcccttcatttcttcagtcggatacttatgctctgtagaaaaaccaaatcacacctgtaaagcatatacaacttggtataaaggaacatatgcaaacaacaaagccataatttaccattgtagaaattctcaagcgccataacttgcataggagtcttaagcttccgttttttgctgttttctgcacaagctctatcgccctcagcg

SEQ ID NO: 68731 - DNA, 2974 bp, Arabidopsis thaliana landsberg
gttgaggtcattgcgaaaacgtgatatcaatctgagaactcattgacttatttccgttttttgatctgacaaggataaaggcatcgcggtattgtgctgttagaattactagccaatcatgcagcaatgccctcccttctctgactccatcttccagagaggctaaaattacctgcagagaaataattatgaaaatacatacataattagcagattaataatggattcctttctttcgctggagccgagataaaaacatgaaattacttttaccttgtgaacgagcaatgagagaacaacttcatgatccacactgtcgtaaatttcattgatattgtgggcagttccaaattgcatggttctgatccttaatcgtctctgaagtgtgtgcttgcctctgtgtaacacagagaaaatcaaaccgagattgaaacactacaagatccacagtattaattatcatgaaagacaaatttgggttctgggattgaccgagtataaggtcattaatgtaagggaggttcgaggtttactatcaaccctaggctttgacatggatttgcaaggtatgaaattcatttctaggatacaaactactatgaatgttccaacgataaaaaattccaataataagcatagccccatttgactacaatcaatcaacagctttagcatggattgaatcttacctacttgaagatgacatttctgaatttgacagtccctcgggaggtacaacaactgtgtactgaaatgcaatttgcaccactggttgctctccagaatgcctggaaaagagcacaagaagtaagcatctttaagtgccaagtccgtttatcatattagttaaaagacttggcagaggattcaataatatagtaaaaagctctataatttttttttaagacaattactttattgcaggtcaaggaaagcatgacaatgactaattacagatgtattaagagtcacattatgacaaaatcaatgactagcagctttacaattgcatggaaacaatcatcatcaatatcgtcccttcgaccaaatcatgaaaattttataggaaaaagcaattattgttaagtttacctggaaaatccagtgttatctgcaaattcaaagtcatatgcatatgttgcatatgaatcacagcatatgatatgctgaaggttctcgtactgtgcatctggaaagaagtgaccaaactgcaagtaaggctaaactgttagctgaagcaaaaaaaaaaaaaaaagagatctcattatctgaactttcggttttcactaaaaccacatacagagttgccaggtttgaattcagttgacgtcctcaatctcaagacacaattgaatgcatacggccggttaagcattcgaaacctacaaaagaagatcatgcgattttgcttcaattaagttggtaacaagtaaagaaaacacagcatgctttatttctattggagtggaaatataatgccaagaatcagaactaacatgtcttggggaagagttgaatcatcagtgcttgaatacaaaaacagtgaaccgccactttcaatgctaaggaacttcagggatgctaaatctgtgtactcatttgtaactgcaaataaatctacacatacacctgattggacagcaatggtggcctataaaagagccgttagatctaagctcaaagaatatatccattccggagacagaaaatcttgaaataagacttactaggtctttgtagaatggtgtttgttcaggaagtagagcacgatcagcatctacccttttacttgcatattgttcaccatatctacttgtatccaattgtccacgtccataatcaggaggaccagataggaaagcaaacaccctagctgcacttatatcaagtcaataaaacaataccaactggccactacgactatgttgaaacatatagagtatgggcatgctaaataagttcacatacctaatgcaaatgtattcccaaattcagatcctagatagttgaatagagcttccatagctgtaccaaagcccctaccacccatcaacacactatccatcccttgacctgctccagctgatctctcccaagaagtaattggtctgagtgtctcaagtgcagcagcaatacgatccttgcaagtttctacctgcaggaagtacagaaagagaacttagtctgtcaacgggtattccaagccatgtgatccgacaatcaatttgaatgaccaaggaagtaggaaacaggaaacaagatgttaaaaaatgaccataccggagccaaaaattgtaacaagggcatgacatcctcaagttctagcgataagctgctctccccatcagggggaatgaatacattctttacaactggtataggtccttgaacatcatacagtcctattttgtgactgaacgtaacaagaccaaaaagagcccctggacttagagctgcatatacgaaaaaacgagagaattgttttcctcaggacacagtcacacagaagaaaaagtaaatccttgctttaaatttggtatgaaacgaccttccagagcggctagcaatgcactttttgtaagctccaaaaattcctcagaagctgcagataacaaaaataatcatgagcaaaaagtgcaacatttgaacaaaattcgaaacaaatttactgctaccacaccctatctccaaagtcatgacaaaatcacaacataagcaagccaaaaatcgataagaacaacaaaaaagcatacaaacccaagctagaatcataatccatagcaaaatgacacacacattgctttcaaaattcacaatcgaaagttcactaacacacaattcaagtacaatctacactgatcacaatgagcttcgaacacaaaatagaagaaataagccttacaagagatatcaatcgccgcaacatacacaggtcgtgcttgcgtcatctcttcctccgatccatccactagaa

SEQ ID NO: 68732 - DNA, 346 bp, Arabidopsis thaliana landsberg
  unsure (1)..(346): unsure at all n locations
caagggacaaaaaaaancgaattcctcangcacaaatttatactgtacaagaagataatgacactcnagatgacnatgtttaatttaaanatcatgatatccctaccccccagtataaaacatattaatcatccccttcacatgagatatttattcatttctacttcacaaactctttaaaagaaaacatacctaatccaaccagacttaacccatactattcaaaacaaacttaaaatattatgaaataacttctcaaacaaaaaacaagactaccctacaaaacaaaactgctctaaaactacacactttttaacacttattcaaacatgctcccattttcaat

SEQ ID NO: 68733 - DNA, 242 bp, Arabidopsis thaliana landsberg
attatacattaaattctaattaaattcctaaattttgttatattaaaaaatataaaacctttccgggggtgggtatttttcaaacaatttattcattttaaccatattaatttaaattaagttctttaactctcattttcatcactcttataattaaagttcattaaatcactcattaattaattcaacaaactattattctttgtaaaattagctatttctctttctcaatcaaaaatact

SEQ ID NO: 68734 - DNA, 412 bp, Arabidopsis thaliana landsberg
aatctttcaacagctgaatcagagattcttattccaaccatccttcccgattttgcattcaacttgcgatctttcgaacagcatgtttccccaaaacagatggatctgtgatctcattgcagtcgcttgttctgctgcttcctcagctgtgattgtctctgaaacctcttcattcccatctcctccttgcttctttctcctctttgaaacttcctctttcttgttcgagttcgggttttttaaatcatccatcctctgctcttcaagcttctcccacatctctgtagcatctttcatcttcgcctctgcactgtcaaagagatttagggtttccgacggatccccacctgagatatcgatcttctgagcaagcaagtgaggccactgtagcaatgccatatcaaattgctgc

SEQ ID NO: 68735 - DNA, 820 bp, Arabidopsis thaliana landsberg
gtaggctcaagcgcatcgagagagaatgtggagcagtcgtttcccgtcttaaaggctgttttgattaagtacaaggacaaggacggagattgggtgactataacttctactgcagaggctgaaattggcggaatctgctgctgattgtattttgacgaaagagcctgatactgataagtctgattctgttgggatgttgagattgcatgttgatgatgtgagtcctgagcaagagccgatgttgctcgaggaagaagaggaggaagtggaagagaagcctgttatagaagaagtcatatcatctcctacagaatcactatcggaaacagagatcaacactgagaagacagataaggaagttgaaaaggagaaagcatgttcttctgaagatcctgagaccaaggaattggagatggacgactggttgtttgattttgctcatctgttccgtactcatgtcggtattgaccctgatgctcatattgacttacatgagttgggaatggagctttgctcagaggcgcttgaagaaactgtgacaagcgagaaagctcaaccactattcgataaagcttctgcgaaattccaagaagtcgctgctttagctttctttaactggggaaatgttcacatgtgtgccgctagaaagaggattcctttagacgaatctgcgggaaaagaagtggttgctgcacaacttcaaaccgcttacgagtgggtgaaagagagatacacattggcaaaggagaaatatgaacaggctctctcgatcaaaccagatttttacgaaggtttgcttgcgttaggacagcagcaattt

SEQ ID NO: 68736 - DNA, 163 bp, Arabidopsis thaliana landsberg
cctctctccgtatcaaccccttcactgctttagctaacaccttaattatcccacctcattagtaccttctcaagaattaaactcaaacccaattttacttggtgcccccacaatctttgaaccatcttctttaattcccttcacatcgaataaccttaccatc

SEQ ID NO: 68737 - DNA, 336 bp, Arabidopsis thaliana landsberg
ggtataattgaatggtccatacattttcttttgttaattcaaatggtcctaaaattcagtttaatagagcctagactcatgactaagctggaagaaaaatacaagttatacaagtgtatcggctatactattaatctactctatatgcatgttacatagtgtattgatggtccctttggttagacgaggaatattgtggtccttggatggatcaccatcagcaatcttgtttacactatcgataatggcaaaaatctgaatattacaatgtccacacaacaacttagggtcccatgaaaacgccatcttgctctggccttttttcccattgcccac

SEQ ID NO: 68738 - DNA, 2472 bp, Arabidopsis thaliana landsberg
gactcactgtcagaaccttccggcaaagagtgatacgcatcttcagccttaagttttgtttctgaactggcactagtctttttgccaaaaaagttaatgaatgtcttatctagtttctcatcaacagaatactttgtgttctgcaacgactttaccaaatcttcaccaacatctctgccctttcctgccaaaagaaaaaatgtcacaatcagagatgctagagctacaaaaagtgagcaaaaactattgggtttctatcatggagaatgatgtaaaccaaatttaaaatatgtagaaattctttaaacatgaaatgagcaagacactcaaaagagactactgcagttacatacagaccaagcatatgacaataaaacaccataaaataacctttattagtaggttctccctttccatcgtcagttttagagtactgaacttggtgactatttatgttgatgtaaacagcatctttgtcatacacaagatctccaatcccggacataggagcatagaaaagcttatccctgtccctcagcccttttttcttgccagctgaaggtaaaggacaaggatcagttaaagcagtcaccccagctacaatgaagtcaccaactccagcaatatgaacctgataatcataagaaattatatcagatgcatgttaaacatgaaagaaaggtaaactgtaacagctaagataccattttgcacacaaaatcattccactagataaagaagcaaagaaaatttcagtacaacacagaaggtatacaaatttatgctcctcctcttagaacttcactcgatgagagaactagctacgtgtgaatacaacgggttactttaggtagttctaaatatatgtgaatcgctaagaatctatggacgaataccagtaaggaagaatgtatatataacatcaaattgacatcaaatcagctcatctctaggctcaatttaaaaattggtcttttcccaaaatattgagtattttgcgccacatactgctaagcaaacaaataggttaaggattcaggccatagaaaaaggttcagatgaaccagtatctaaggacagtgatgacataccttcatcctttttttgaagttacaaccacgtaggtaaccaaacacagtgatatttctatcgcatttcttatccatctgaactttctccggaggggtaacatcttcaaggcgatcaaccaacacataaggatgtgctgttcgccatgtcaatggctgaggcttgataacaattacaaagcgggcgaggttgtgaacttcacgcggcgtatacctaccaataaaagataaatcaaaggtgaacctcagacgctccttgcacatgtcattcatgttggtgatgcaccaattcagatacttacttcccatgaatgagaccagataaataaaacaatttagctccatgatatatttcagtccaaaaccgatgcttgagatgatgttttgtttttctcagcttcttaacatcattgaacttatcaaggtgagtgagaacacccataactctaggaaatccatgcacttgcataatattgaggaattcaaaggtttcctgagggtgaaacagattaaaagacagttcacgtgtcaaaccttagttgtttatcacaaaaaaatgtagatcacaaaaaaggcccaacagtgatcttgtatacataagaaagattcttcacaatctagatcattatggaaagaggagaaagctacagaaaaatagtgtctcaccatctcaaaaccataactcccgtctacaacaagtagggctagatcagcaacctttgcacaatccaccatcgcattgatatcattcgggcactccacaaattgaaaccttctctgtttacctaaatccatgaccagccaaaatgagagcaggagtaaattccaaccctaaaattcaagatagatgcatacacaaaaaaagaaaagaagaagaagcaataaacaaatacagcacagaaccttgtacaatggtaataggtcctcgaacctcgggtacattctgttttgtaaattccttcacaagagatttaatcacgagagactttccaacctacaggaacaatcaaaacttgtgagaaaataagcaaaaccgagagtgaaaatgcaacatcagtctcaaagacagtactcctggggggccttgaaccacgacgacgaaaggaggagcttcgccataattacgatcaattttcggaagatgaagccgcttttgctccttctccgcagcgtgatgttttgctttcttcgcatgaacaaccgatttaacaccaaacgcctgcagaaccaagtaaaatcgattgttcctataaacaccccaatcaacgaagaaactcttaaaagacattgacatagagaggacaagtaggagtaacccaccttaaggattttctgcttgtcaacggagattccacgcttcttcttatctagttcagatttcttc

SEQ ID NO: 68739 - DNA, 866 bp, Arabidopsis thaliana landsberg
aatatttccaaaataatagttattctaaaactgaataatcggaaaaatttaagattttttgaacgaaaaatacccgaataaaccaaatagatctgaaccaaaataacaaaaaaatattcgaactctgaaaagaaaaatatactcaaaacattttcaattctttgttattcagatatatagaccaaaaccaaaattacttcaaaatttttggttcctaatcggttcttgatctttcaactatcaagatatgtatataaaaagcaaacaaaattagacttgaattatcgagataagttcaatagtttgggtgaaaaaaaaaaagttcaatagtaaaaaaagttcaatagttttttttttttttcttttttttttgatgaaaaaaaaaaaaaagttcaatagttggggtaataaaatctatatctatgtggatgtgatgaaatgactaacatacttcagttgcatgatcatgattatgaatatagattcacccatgatatttatatgcattttgcaagaagagtgcatatcacattacatgtatcaaaagatttataaaaaaatcgttccctacattttctttaaaaatctcaccctcaagtaaaatattatgttaaaattgtcaatcacctgcatagagataattggcgatgaaagcttttttaaaatggcgatgaagtgtgataaaggttcacaggaaaaatattacttgcataatgttaattgatttcacttatgaaataaaaagaaaataaggtcgattaagataattatatgcaccgaaaaagagaatacaaaggaatgcttaagtaagggttttcggaatcgaataaaggtgacggttcggtctaagtgggttaatttaaatg

SEQ ID NO: 68740 - DNA, 434 bp, Arabidopsis thaliana landsberg
tggacaagaaggacttggcgttcgtcaacgaagcctgcttcaccgagcgtccgctcaaggtcgtgccgacattcgcatcggttgcagcctggggctccggtcccggcgacatgcagctcaaccgcctgatggtcgtcgacggcgagcgcgacatcacgtttcatacgccgatgccggtggccgccaacatcacggcggactccagcgtgctcggcgtgttcgataaaggcaaggacaaggggctggtgatccggcaccagaccgtgctcaagaacgagaagggcgaggcgttggcgaccttggtggcgtcgcgtttcgcgcgtggcgatggcggcatccgcggacccgcgcaggggcagccggaggcgcacgaagtgccgatgcgcgcgcccgacaagaccgttgacatcacgacccgtcccctgacaggcgct

SEQ ID NO: 68741 - DNA, 557 bp, Arabidopsis thaliana landsberg
  unsure (1)..(557): unsure at all n locations
tttattattactgtaggtttttgcttttactactagtctacattcttttattcttcttttgcccaataactacgactttttattttttctatatcagaagaaaaaactacataatttttgatgactcattctcgttagcatattaaaaccatcgttataacagtcaataaaaagtcttacttaacattttcaattaaaaacctgataaagaccaactaatgacaagagccgtgaacatatatagtgtcaagaggccggtcaactagcactgccttatctctgatgagtgaagatggtagacgagcctaacaatctgcgaagaccgaacttaccattgagcaacgccatcaagattaacgatcaaattcacnnnnnnnnnnnnnnnnnnnnnnnnnnnnnnnnnnnnnnnnnnnnnnnnnnnnnnnnnnnnnnnnnncatcacagttcatcaaaatctctatcgttcttcatcatcaccctccactccatctttccatcatttagtccatcttggatgatggcccatcacccatcatggattcattttcattttcaag

SEQ ID NO: 68742 - DNA, 1103 bp, Arabidopsis thaliana landsberg
  unsure (1)..(1103): unsure at all n locations
ttaagagacagtatggatatgaatattcagaaagttggatcggacatacanaaagaacgtgaaaactgggaataagtttttgaaactcgggatatataaaaagaaggttaattataaaaaaacaataacncaaggtgagtgagattgacatgcgtctgcttggagtttttcgttttggatctgtttaatatccaatttaaatgcttcataatatcttctttttttagttttgatatcttgctttactctaatgatctgtctatcatttcgataattaaattagtcaacttgcatttttggaatcttatttgctcaatcgatacccttctcttatcattttcgttttactagttattaatgactccgtttatatgtgtgtgtgtccactgaatttatgctctgaggtaaatttctgtttacttttgttgtctaaactatcgcttgatagacatctttgttaactaaagttatgattcgaattagattttatgctaaaaattaaatcgttttgatacaatattaggattttttttggggaatataacttaaatacaacatgcaaagtaggaaaaaaaaaactatgagaatacatttttctattaattagttgtaataaaatagtagatgctgcagatattatgcatgtatatatttataatcatgcagtgatgtggcaatagtaagaagtcgaccaaacacacaagaatctaaagaactaagaagcaaacttgacctaactatcccatccccaattaattaaaactaatttaactttttcactcgattaacttaatattaacttttcactaaaataaattaatataattacttgttaggatttggattcagatacgtttaaaagttgtctttcaaatgtttggctgcggtttcgcacgcatagccttaatttggctcctttaaacatgacccataagagacttaagagtaattaaattagtaaaggccaactaaaactaaaaaaactatatattatacgtgaggaatgcatgtcccactcttccatttatcttacctttatgatatatatatatatatatatatatgnggcttgcttggattttttgaaatattttttggtagtg

SEQ ID NO: 68743 - DNA, 542 bp, Arabidopsis thaliana landsberg
  unsure (1)..(542): unsure at all n locations
atcataattaacatctttgattccatatccataacatagaatctataaaccancgatgtgaagttatcatggtgagaatcttagtccctaaatccagattttgaaactatatatatccaggtgggaatgttttgtaatttttcccatgacttttttacgaatttcgtacaacttttcctacgacgatatattttgtaagattttcataggaaattccctacaaacttttgacgaatattttcgtaggaaattttgcttcgaattttctacgaaatgtatatttcgtagcaatatcgttaaaatttagtagaaaatttctcctaccaaaactttgatagaaaattaggtaaaaaaaactatattttcttgtagctgaagcctgaaattaataaccaagttagatgggatataattgaattaagttccgctaattctatctcattttaatttgcttcgcttccatttaaagaaataaagaaggaaaaaaaaaaaaatatatatatatatatatacatatttatctattaaagtgaagtcaatgt

SEQ ID NO: 68744 - DNA, 238 bp, Arabidopsis thaliana landsberg
  unsure (1)..(238): unsure at all n locations
ctgggcgccacttccagcgcacccgatggcgccactgttgtttctatggcgtacccgatgnccccactgggggggttgcaaataaatcatcgggcgccgcccatcacgtcgcaaaactggtcgaagaggtccgtcgcgtcatgcgggccgggcgcggcctccgggtggtactgcacggccaacacggggcggtccagcagccggattccttccacgaccccgtcgttgaggttgacat

SEQ ID NO: 68745 - DNA, 983 bp, Arabidopsis thaliana landsberg
  unsure (1)..(983): unsure at all n locations
tgaaaaatatcttccttggaaccctaactttatttccccaggatagagatagagataaactacactgacaataaatcgaagattgtcaaatgtgtcggaatccttgatcaacacacgaattttctcgattatcgattcgatcttctaatcttgcaattttgctggaaagttatcttcgtgtctcaaaactccaccagtgatcggtgagcaaacatcatttcaattctggttcccttcatatctatgttgctcaattgatacgattataaaacagtttgtgttgatttcattttttttcaggtatcaagctccatggacaccgaactgaattctcctccgcatnnnnnnnnnnnnnnnnnnnnnnnnnnntttcgaaagccttccaatgacgggactagcagaaaatatcgccgtcgagctttagctgacgatggctcatcttcatctgatggttagtctcatatctcgaaattttcattagcttaattattatatagactgtaacattagcttagttgattggttatagcattttaagtgatgggtcttaagacctgttggttatatagcatctcctcttttagttgtagccatagcttaaattagaactgttggttcttgttttgtaggaagtcctgaacgtaatcagagccctaatccaaagcattctaggaaagattctgaaccagttcatgtgaggaaagaggatagatgggaatctgatcgcagtcgttatggtagaggaggtgttgattcacatagacatgataggtactctagggatgataattacggatataagcgtgatgagtataacagacatgggagggatgcgcgttctactagccgtgattcaagaggtggcagacattctgaccgtagaagagtggagactgaatatagcaggttaagaaatgactcagacagaagttcccgtgataagtatagcaactctggacatagagtcaaaagtaacgagaaag

SEQ ID NO: 68746 - DNA, 170 bp, Arabidopsis thaliana landsberg
  unsure (1)..(170): unsure at all n locations
ctgcctctggacgataccnacagtgattctgttcttacgacgaagaccgctctaaatttgctgtgtgtggcttaacaactcgaaaggcgcgattttacattattgtttatcatttacaactttctagatatgattctaagggcataacgaggtcaaggatgataaatgat

SEQ ID NO: 68747 - DNA, 1560 bp, Arabidopsis thaliana landsberg
aaaacaaaagaagagattgagaagatcctcgccgctctttattagaacctttgaccaccctcatcctttaagacgacattgtgaatttatcttgcttagcttaataagtttaacactttagagtccacgaattctatttcattcgacaacaattctacgtctctctcttcaggtcggaatcaaaaaccaaactagggtggtctcaaaacatggttactgcacttaattcttacacacattgaggtaactgaaataaagggatttagcaagagtagtagagtacaaaaagaagatgctaaaagattgcttagaaggagacaagagtatgcgaacaatttaccaaagaggttcaaagacctaaccctactgttcgtccatctctcctccttaaccctgctgtgtactgcttctctagatccatctgcaactctttctgcttctcggcctcgacttcgcccaggttttgctcttggtttactaccttcgctttcacaccctacaatgatgcaccaacgcaacctcagactctgaaaatgtgttagtattactttatacacaaccaactctatgcaaaattctaagtgagagtttgcaaaattttggaatcatgccctacattatgatggtcacagaggtaggaaaacaatcaatagaagcaaaacatgtacgtagagaaggaaggatgagatttaccataagtttgttgaacttttcttgccgttcagggtcaccaattagcgcactcgcattatcccaacgatgagcagactgtttcagaggattataagcaaaagaagaatcactaaaaaactctgagtttaggtttatattacatatccacgaacagttgaattacctcttctgaagccgtgcttttcttttttccccacaataacttcttcttttgatctgttgtcaggtaacccgttccaacaaggtttttattcactggattcatcgaagcaaaacaacagttaaggtaagaactaggtaaaaggcagacatgagtaggcttttctgtaagcatttacaatagaaccaatattatctagataaagcatgactttcaattaactatcttcagatggcaagatcataagtatacaaaaacaaggacaagtcaatttagaatagcatcaaaacagtattacctaattcagcagcctgcatagctgcaacttttgcagcatcaacatcaccgggggaaggctttaagattgatgtctgtttctcttctgctgcagcatctataacttagagcaaggatctacataacacagaaagaaaacatttgtaaagaacagaacaaaagtcttaccattagtattgccagtagtaaacttgtctgatatgaaacccttcagtttcttagaatgagtatctcgatcctctgtagccaaacatttcccatcagaacggtctcttgaagatttgacatgaacctccttctccttgctaatctcaggggcctcatgttcctttctttaacacgggaatgacggtcaccaaaaccccagcgagaacctcttttctcattatcctccactcttgagtctgagt

SEQ ID NO: 68748 - DNA, 529 bp, Arabidopsis thaliana landsberg
  unsure (1)..(529): unsure at all n locations
caagnnnnnnnnnnnnnnnnnnnnnnnnnnnnnnnnttgcggtatttcagcttggtctggnaggcgagcgtgtaccacagcgtgcggggcgcattgtcctgccgcaactgcacgatggcataaggcttgacggttggattgcgcggattggtgagtcctacgggcttcagcggtccgtggcgcagcgtctcgcggccgcgctcggccatcacctcgatgggcaggcagccgtcgaaatagggcacgttctcccattcgtggaagacatgcttttcgcccgtcagcagcgcatcgacgaaggcgttgtattgtgcttcatccatggggcagttgaggtagtcggcgccggtgccggcaggccccaccttgtcataacgcgactgcgcccaaacgatgtcgcggttgatgctctcgccatggacaatnnnnnnnnnnnnnnnnnnnnnggcgagcgaatcctcgcccgtgagtttcccgatcgcctcggccaacgggttggcggtcagcggcccggtggcgacgatgacgt

SEQ ID NO: 68749 - DNA, 1025 bp, Arabidopsis thaliana landsberg
  unsure (1)..(1025): unsure at all n locations
gattttacatgagtgtttggtggagttgtgaaaaaccccctgaaggcgatgaattacaaagatttcagcttttgccgctatcaacatagttataaattgtaatattattttttgctgtgtaaattattttcttagttcttgcttagcatgaataagtatatcatccaatgtatacagaagatgagctttcttacacaatactatatagtaagataaagtttccagaagtgataactaaaacttgtaactcaaccattaatactcaacaaaacgcgaactctaaagtttaaatgaattcttacttagcaatatttttaagctaactatgaatataacatccatacctcaaattaaatcaatcataacatatatgttactaatcacatccatatattgcttaggccttagggtataaggcaaatacttcattcttataaagcaaattactttccagtaaaaatgagacaaataaataaatgtgtatcactattaagtatcatttgtttgtagtaacaccgaataatagcgtttattttcttttaaaaaatatctctctaaatctagaattaataaaatattattttactttcttagttgttttgattaaaaaaaatgaagggattagatataagtatataacatcacgaatttttttttgcggattgtattttcttgataattttgattcggaagttataattgtggcttaatgagtttaccattncttttttttttttttttctttttttttnggaggttaccatttcacttcacatatattactgtgttctgtaattttggccaaatcaacactttaatattttgtttgtagaaaaacgtatcttgaaaaaagccaaacacggtccacgttaaaagaaccaaaatattaaaggcctttgtttcttctctggtttaacactcacgtgaaaatatgcagtgaaaaagagagtttttctataaagattgttaaaaaggacaaaaatatactttaataaaaataaatttaattaatactcatgtcaaaa

SEQ ID NO: 68750 - DNA, 707 bp, Arabidopsis thaliana landsberg
  unsure (1)..(707): unsure at all n locations
gcggtaagagctgtacctgcaagtccagttggagtgttggaagcaacatgtttgagctataggagtgaagagagaacagttgagtcatgtacaaattcctcacagagtagtccagacaacaacaacaacaacaacaacagcaacaagaggaggagaaaacaatgagagagaataaaagagtcatacattgctttttacaacccaaaaccacaagtactcatgacatttgaggttcttatttatttttttggttttttttttctacataaattttctttttctttctttgatttctcattttcaatctgaaaattggattgaatatgagagttttgtgagaaaggaaaaaagaaaataagagagagagagagagctctttggaaggcggcaaaattaataagtcattattgatgatgatgagagacatccctgttcttgctccaagggacttttttttttctacataatgtcagagatataattaaaaaaaaaagaaatagaaagagaattaattttatgattttttgtgtcctcaaatatgcactatagnatatatcttttattttaacatatgtcagaaggttttaagttatatatatggcagtggagaatattttaaattttatataaaaaaaacttttattacagaaaaaactatattctctttattttacaaaaaatttggggggtcctataaatatgcatat

SEQ ID NO: 68751 - DNA, 480 bp, Arabidopsis thaliana landsberg
gcgcgcgcgcatgggtgctcgcgcacaacgaaacgctcgatcttttattgattggtgtgcatcaaccgctggcggggcggggcgctgcgtcggcgtggtcggttactcctctgcgcggcgagggtgactagaagacagcgctgacgttgacggcttcggccatgaggccgtgcgtgcgctcttcgatcgtgccgaagtccgtgagcgccggcgccgcgtagccgtcggtgtctgcttcgaaaattgcgtcatccattgcggaggtgcctcctggcttttgttacccaagggaacgcaggtcccggacttttatcgtgcaagttcccaacagaagcaacgttgtcgttgacatgccgtccgtaggtttggccggtgaagtgatcctgcacgaggaggcgcacgaagccttcctgttgcatgtcgcgagtggccggtacttctgactcaacgagtccggcattgtcatctggagcgcgatcg

SEQ ID NO: 68752 - DNA, 449 bp, Arabidopsis thaliana landsberg
catatagcggcccgcaacttcaacggaaatcgtggcgcgaccatcggtggccgcagctacggcaatcgtaactttgcctcctataacagcggcaaccacggcttctccaataacggccagcgcggtttcgctgcgaacggagagcacaccttcaactccaattatcgcaatgcctacaacggaaacaatcaccaggcgttcaacggaaacaatcaccaggccttcaacagctcacgcaattactcgcagttccagggcgcgcgcagcttctcgcaaccgagccagcacagttatggtggacagagccacagcttctccagcgctccccgtgccaactacggtggatcgcgcggcagtgaaggtttccgcggcggcggaggcggtggcagcttccacggcggcggaagcggtggcagcttccacggcggtggaggcggcggtggcttcca

SEQ ID NO: 68753 - DNA, 778 bp, Arabidopsis thaliana landsberg
gtatgagtacatgatttcagcccccagtccacacacacgtcaggtgatacaaatgtctttctttctttctttcttcttttggtttgtttcaaaggtgatattaataatatttagatttttcttacaggatatcaatatatatacagaggtagtttgctaaatgttctgtacttttctatttttgtaattgaaaagcaatatatgtatgcatatatgcgtaaaaagtcaattaagtgtgctgtttattacttatgcttttcggtgaaaagttaaaaaggtctcttatcgtgtcttctctttgtttattttacaccaggttatttatatttttttaaaagaaaactatactgcaggaaatgtgaatggttgcattacttttgggggttgtaatcatacctctatgtctctcttctttttcttttcaattccggaagtagctcaaacgagttaacaagaaaaacaaaaagtttactactcctaacctattaatacgcaattcattaaaatactacatatatcacttaagcaaagctatattttggtaaatattttgttgttacatttcacaacaaattacaatttcccactctacaaaatccaaatccaaagccggatgtccaagtttagttgatttcatcttcttccttgggcttttgacaaaaagaaaagtaagagtgtagagagagagagacaagtggggaaggcaaataagagcaaatgatggcgaagcatattaaattgagcatgatagtttcttttctcaggtagggttttctct

SEQ ID NO: 68754 - DNA, 508 bp, Arabidopsis thaliana landsberg
cttgttcaacagccttggcatcgggcatggccacgcgcgtggcgacacggccagtgtactttatgcgcacctccagatccgtgttgggttgcgcggccttgttggcgaggtagtaggggtagtgtttttgcatatccatatctccgaagtcagaggtggaaatggtggattgatgtttttatctttttatttctctttccttcttattttcttaaattctttttctcatatctcttactctatttcttattacttacttacttttttatatttatttctctcctctattatcttttttatttatcaatattctattaaaattatcttattaattttttctatacactctttaatactccttataagagggtgtttctaactcttattttttatccttattttttcacttattcttccaatttatttgtgttacctatctcatttattctttttatctttttatttaatcctttattccatctctttttttcctatttttacctttttt

SEQ ID NO: 68755 - DNA, 537 bp, Arabidopsis thaliana landsberg
  unsure (1)..(537): unsure at all n locations
cggcgcgccgaagaacactccgacgctgccgtgatggtggtggtggtctgttttgtccgccgcggccgctcgcgtcggggtcgctgagcggcgccaggacggccgccgccacggcgagcgacagcactgcgatgnnnnnnnnnnnnnnnnnnnnnnnnnnnnnnnngccgagcccggccgaaccggccctggaattttgttacaagacgttacgaacagaccccgggaagccgggtttgttcaacggcgcccccgcgcagggctcaggagagcccggggtcggacgcgggcgcttcgggcatgcgcgtaacgagcagcttgtcgacgcggttcttgtccatgtcgatgacctcgaagcggtggccgccccattcgaagcggtcggcggacttcggcacgcggccgagccggagcatggcaaaaccgccgagggtgttgtagctgccggtgtgctcctcgggcagggcgtcctcgatctccagcgctttcttgaaacggttcaccgcgacgccgccggtcatcagccacgagccgttt

SEQ ID NO: 68756 - DNA, 432 bp, Arabidopsis thaliana landsberg
  unsure (1)..(432): unsure at all n locations
agcaaagcccttcttgaaaggggtcatatatggcgggtggtatcggaaaatggcaggatttttctcgttaggacacggcggaggaggaaacactccagacaaccacagaacaaacactaataatccttcttcatcgggaacagaatcttggctttggtgcagaaaccctaactctaacgctgacggtggagaagctggtccttcttacaaaggaacccttgagctatggcaacacccaaacaatcaagaaatcgttttccagcagcagcagcaacagcaacaaaggctggatctttacacttccgctgcgggtttaggtgttggaccgagcaaccggagcttaatttgaaacttccnggacgggggtgccgcttgatcgatcatgagaagcgggcggagcggggaccaagctgcagattggggaatatctaa

SEQ ID NO: 68757 - DNA, 563 bp, Arabidopsis thaliana landsberg
agtccattatactaacctagataatggacattttcatagaataacaacgaatgtattttgtctactagtcattgccatgatttcatctgcataaccttactattctcctccgaattattgcgtgtacatacattaaaagtttggtcgtgtaaaacgaaatgcaaaagcacccaattccaagtgtttaaatttgtttaaaggcctttcattacaagtttgattgataacttgatacatttcacatttgacatttaccgtcaaagtaaaatctatactgctttgattgttgttagtcacataagcaagaggaattataggtaccaaaagcattaccatgattttttttctcttaccactaatttttaccattgattgttgttttttttttaaataacattttctttgtaccattgtccttttctttctttctttctttttttcttcaaccattatccttgtctaggagaactgaaagaatggagttgcataagaatatgggcatagcaacttcttgggaagaaagaaaattcatgattcttaccagactgttttgaaatccaaaa

SEQ ID NO: 68758 - DNA, 125 bp, Arabidopsis thaliana landsberg
aaaccacgctcccgtggttttgcctcaaagagttgtgaggccatcgctactaattaattagaagatatcacgagcatgccctgaagagaagagacacaggacattcttgcattaggcgacaccgg

SEQ ID NO: 68759 - DNA, 2189 bp, Arabidopsis thaliana landsberg
ttatcctcatacatgatattactttgtattcttttctttcatgattatatcatcttctaaagaagtcttaacgtaattttgggaatgattgtcttactcgaagtttgacgaggcccctcattgccaattatattttgatgcaggctttctctcaacatacggagctttcagttttgttcatggaacacttaatatccattctcaatcgtagttctttagttaaaagtgattcacataagggagagaatactagctcttcttctgaaacacatgtagaagatgatattcttcaagctgccatttttgctctcactgctttttttcggtagctttcataaaccatcaattttacttgagaatagatgatgcatttttgatgactaatatacttaattaaccaggggtggcggaaaaattggaaagaaagctgttgagacaagctactcttctgtcgttggggcacttactcttcattgggtagctgtcatggacttgcaagttctggtcagcaagacccattacggtagtcatcgacttctagagaactgtaggcagatatcgattgctactcttattttagtaaagcctttgtaatttgtttccctcttggcaggagtacttctaaattcatttcaggctttctgtgagtgtgttggtgatctggagatgggcaaggtaccttttaactttaacattaaattggttctgtttagtttctagtatgatgaactgatactctgtctttgcttagattttggctcgtaatggggagcaaatagaaaaagaaaaatgggttggtctaattggcgatattgctggatgcatttcaattaagagaccgaaggaggtaggtacctagttaatgcagttgtgttttcagggtctttgtagccaaactgttgtgtttcaccaattgatcattggctcaatagttgagtaatcaatggtggcaatatggattttcacatgaccattcttgttgggaagtcatgatatatgtgcatagtagtttaatacacatgagggattctttcagtctgaaaaaggaatgatctttttacgacaaagtaatataaaaaaaactctaaaccgtccacaaagattacaattttcctttagacttaagttttagtactggtgttacaggttcgacatatttgcatgattctaacaaaagcactaaaccgtccacaaagatttcaaagggaagctgctgctgctgcattgtcagagtttatacgctacaggtataatgttttcaatgtccttaaaactttcttttttttccattttgattttatttcctacaggtgtagttttatgtagtcttactcggcttagtgacacattgatctagatgcatgtaaccatctatctagtaagctctgtttggaaaaaaagttaaggtcaaagtgacaataatggttttagttctaagttatgtgtatataaaagataaggaaagaaagtcaaaggactgaagcatcttgcctgacatgtgttgtaaacaaagcacttccttggtaccttatcttcttaacttttctctactaatatttctgagttgcagtggtgattttagttctgtaatggaggagatggtcgaagcactctgtcgccatgtgtccgatgattctccgactgtaaggcgcctttgtctaagaggattagtgcaagtaagagtaattttcagcagtgtttatttacttatcttgattggctaagagtactagtgcaagaaagagttatacggatcacctttactccttatcatgatcttctagtaggcttaccataaagtatatgctcctgttggattattacaatgatgtcagatcaacagttaatatctaaagaaccctaaaacactcattatggagatgtgttatcttccactaagtaaaacaactttatacacatatttatagcatgtcgatgcaatgagagctacttgttacatatgctagaggatatctcatcacattttggactaaggaggatggctaaacaaaaacaggcgactgctgatactcttttttcccaaattcattattcctgagaatgatcacttatctgtgaccctggatatacctaacaccgtctggttgtatgagccacaacacaactcaagcaattggcgtaatattagcgtcacttgactatctacatgacactgtgcaactaactgg

SEQ ID NO: 68760 - DNA, 2057 bp, Arabidopsis thaliana landsberg
gaattgaaccgagagattgttgttgttttcagtcccctcagacgaagactatgcgttcaagcacttctttagggcttctaagacaacttttagctacatttgctcgctcgtcagggaggatcttatctctagacctccctctggtctcatcaacatcgagggaaggcttcttagtgttgagaaacaagtcgccattgctcttcgaaggttagcttccggtgattctcaggtctccgttggtgctgcctttggtgttggccagtccactgtttctcaggtaccaatcaacctctactcagctccctatttccctgatttcaatatatatatgctgtatcctgacaccatccatttgtttccccaggttacatggagattcatcgaggcactcgaagaacgtgccaagcatcatcttagatggccagattctgaccgaattgaagagatcaagtcaaagttcgaggagatgtacggtctccccaattgctgcggagccattgacactacgcacatcatcatgactctcccggctgtgcaagcatcagatgactggtgtgaccaggagaagaactacagcatgttcttacaaggagtctttgatcacgagatgagatttctcaacatggttaccggctggcctggcggcatgaccgtctccaagcttctcaagttctctggcttcttcaaactctgtgaaaacgctcagattttagacggcaatcctaaaactctatcccaaggagcccagattagagaatacgttgttggagggatcagttacccgcttcttccctggcttataactcctcacgacagcgatcatccctctgattccatggtggcgttcaacgaaaggcatgagaaggtgaggtcagtcgcagctactgcctttcaacagcttaaaggaagctggaggattctgagcaaagttatgtggagaccagacaggaggaagctacctagtataatactggtgtgttgtttgttgcataacatcattatcgactgtggggattatcttcaagaagatgttcctttgtctggtcatcacgactccggttatgcagaccggtactgcaagcagaccgagccgcttggtagtgagctcagaggatgtctgactgagcatttgcttaggtgaggatcttaaccttgggaattggacatcttcatctcttctctaaggccgtactaagcccgttagaccattcagcatcagtttagtggtagcccgagacatatcggacaaaagcaatgttatgaaacttttcttcaggtatcaacaccagattaacatcatgccagttggacctacaaaaatagattcatccttaagtgtgattaccatactttgtgaactactaatcttttgagaggagtggactatatccccaacggaactgtttgttttggcaatgtaaatgttatttttttaataataattggtgttttcttttagtattgagttgttgggttccattatattcgctctctgcgttgaaaagtttgtgattctacggaaaggaatatgctctggtggatgcgtctcggttttggttctttgtgctcacaagtaacgacggacgaagattcccaacaaattcacatgacaaactataaactatagtctataacaaattacgtaatctgatttatggctttattatgaattacacaattaaatacagtagtcatcttaaagagagattattacagtggaccttttggtttcgatagattgcgtcacaaaccaaaaaggttgttcatttctcgatgtacaaatattatttttaagtcgaatgtaaatttacaagaaatttgggggaaacgaataaacggcgacggaagggctgccactagaccgagaataagcaaagacagacgagctctgtttttgcaagagagagtttttataataaaaactggaaaagggcaacaaaacgactctttggccggtgaaactgtcaaaaagacattaagacttggtctctctcccactgcaccgccgatccttctctacttgtcaaactataaaagaaaaagagtttttttttttt

SEQ ID NO: 68761 - DNA, 937 bp, Arabidopsis thaliana landsberg
gtagatcaaagtttctttactacgcatatgaacataaagttaagatgcatgtggtcagtaattgggttatttatacatgtattatttgtcgaggacttttagtcgtgatttttagattctaagcatcattgcattccaggtttaaagatgactttttcctataggatttgtgaatagataaatatagtatatgttgacacaaaaggtaacctttgatatgatatgaaaatctgggtgttactcatttcttatatatatatatatatatatatatatattttttttttttaatatataccgaatcatttagatatatataataaaatgtccaaacaatatctataactactaaacatgggcggttgagacattacaagttgtctcttaatctatagtgtttgatacatgcaatatacacgttactagcttttgttgttaatagccaaaactgaatgatctcttcttggttttgttgtgttctttatcctaccacacaaaaaaagtcaagggttagtagattatcaatcaatgcagcaaggaaattttttttctcttttgtaattttttttttcttttttggttagaatgtgatgttttctcgtattttattttaatgcaatcccataacctttgattgaatgtggaaaacatgtgttaatggtaacccatctggatgaaattaattaacctataaactttattaaatacaagtagataaaagtattccactatactgaaatacacgtacacaaaggtagaggaattttctagttaaaaacaaacgaaatgatatatatatatatatatatatatatatatatatcaatctacgaggagaaagaaaatgatacgcaccctaccagatgtggctgccaaaatcgatactgaacattcacacctatagtagacattgtacaacaatgtatataaccctaac

SEQ ID NO: 68762 - DNA, 323 bp, Arabidopsis thaliana landsberg
ccccttcatcctctccttccaatttaggcctacattcttttactcatctcttatcgaatttctcatcgacaaaataaaaaatgtcacctttttacttaaatctttttaatcctcttatctctatataatctaacctttcttttctccttctttactactaaaacttccatctctctttccttctcacttcaactcaaaacaggcagtaccctctctattttctcgcattaccttctattaatcatctcatacattacctaattacactctctctttaaccttcacttttaaaaaatgtgattccctactttacaacactcttt

SEQ ID NO: 68763 - DNA, 355 bp, Arabidopsis thaliana landsberg
gtcagcaaaagatgtttgccgggcaagtatttgagctccatagactgataatggtaagcttttaataaccttattgtttctggtttgctttctatgcttcagattacttaatatgatgcaggttcaaaagatggttgcgaagtcgccaaacttgtttcttgaaagtaagcttaatggtgtcaaacatggtacaatgaggtcatcacatcagcttgcaatggcggcttcaaaggttagaaagccaaacactgagaatcacaaacctgtacctgaagaatatccagagcatatgaaaccaaagcttcctctaccttccataagcaaagaactcgtgactcctatttggccacaacag

SEQ ID NO: 68764 - DNA, 324 bp, Arabidopsis thaliana landsberg
  unsure (1)..(324): unsure at all n locations
aagacaaaaataagtcccatccatgcttattttaagcttttatcacccaactccaaacctctacaggttaaatgtaaactttatattcaccagcacccattcaaatctttcacttantctaggcttcttccttcattctctcaatcttcttcaattctctttttttctcttttcaaccttcctttcacatatatctacaagaacttgatcgaacaccttcatcaacaactttaaacaaatccacaaaatttaccactcttattaatctaccaaaaaaatctcaaacactctctttcacctttacatatttagaaattataattc

SEQ ID NO: 68765 - DNA, 497 bp, Arabidopsis thaliana landsberg
gagtcgttaattaacgataattgaaaaagcttgttccatggtaaatcaaacggtaataatatttagtcttcaacagtcatttttattgtataatgaaaatagtaattttattattattattaagatgtaaaaaaagaataaaaaaaagagagtatttgagctggtgatgcttcatcatcattgtcgtcttcacactttgctccgacaggtcaccacttaagttttgcttttctcacgaaacaaacaaacttgctattttcttctctttttccagaccatgagaaagcaaaataattgagctcattctctgcaaaaaaaaccatctttaatctcttccatttggattcggagagagaataaaaacgaatagacaatttgattctctgtttctctctcacctatttttattgggttccgatctgatcggatttaattatcacgttcattttcgattttaatttcgattcttttttttgctggtctcaacggagaaattt

SEQ ID NO: 68766 - DNA, 550 bp, Arabidopsis thaliana landsberg
catccattccgtggtatcaacttctgatggtggccgactaccaaaccactgttttcctttacctgaaggaatgggcgaaggaggggagggtcccaaacactcatcccatttggcatcggttggccgggaagaatcggtattgcacgctcgacttctggcctgatgttcaggctcgacagacacgtaagagctattcccatgagggacagggccaccgctatacggcaatcaattactgtttcggcaaggataattgtcagacagttgaatgccgggtgctgcccatgttcgatactgtggaacaggcgattcgggcagtgcagcgggtcaaggatattaccaatgcgtttctggtagccatggcccggaaggaagagaagctgacgtccgagtttgtcctgaacaaggatttcggaccattccttgagcaaagcgttgaggttgttccatgaaacgcttaccttgcggatgtgcctgtggctctgtgagaattttcctgatgaatatgtgtcttaaggccaaattcaatgggttctttgattggcttcat

SEQ ID NO: 68767 - DNA, 476 bp, Arabidopsis thaliana landsberg
gggccggttgcccactgaattccataggaaagggtggattttccacaactagtaataccctaaaccgcttatgggaacggtaatcttcattgaggaatatccaccacatggatttaccgactctgaacgtgtcaccaccggaactgtgacatactataggtaattgtagaggtccatgctataaaagtggctttggggctgaaggggtgtgttaatatcgcactttgcaactgagattggatatccatatcatgaacttatgaaaatgggggggactggcgaagactgtatggctcattgacgaacgaatgacaacgacatattgggatcgagccactaacggatgagtgactccgatccatatagctagagaaccgactgaagtaccagagatgcctacaaatggagaaggctcaacagagccagcagaatcaacgactcttggccaaaggatgggatcagcaagtcatgcaagc

SEQ ID NO: 68768 - DNA, 285 bp, Arabidopsis thaliana landsberg
ttatgttttgtgtatagatttggttttagaaacattgaatgatttttctctatattttcaaaaggctgctagaataagatcagatgatgtaatagactaaaaaagaaaaaacaagacacacattgaactgatataagatgatgatgatgcaatagtacctacaaaatctagtggacgccgaacagtactttaattcggaattagaacattctgaattgaaggcctattaaaggcccttcttgacacaatctatctacacgacttacgatggtgcagcttaggtta

SEQ ID NO: 68769 - DNA, 431 bp, Arabidopsis thaliana landsberg
ttcatattaaaatgaaaactaaagtaacttcaatgattatatttgcttttcagtcgcccctatggtttaattcccgagaaggggttattgcatgcaataaaaagaaaaaaaacaacacagtctttttcattggcaaaaactatataaagagttgtcatggaggaaagctaaacatgggcttggagcctcccatacaataactaattttacatcggctgttttgaaagaacttcattaggcgagttggaacgagcactattttttgaacataaaaagaataaagtgatcaaataattcccactttcacattcaatgatcttctgcctattagcatgcatgcatatacttcatgggtcatcatggcagcttaactccttttgccgttgatagatatcaaaaccaactctgacatcttctctagaccatacaat

SEQ ID NO: 68770 - DNA, 395 bp, Arabidopsis thaliana landsberg
cgggagcggacatctacacgtaacctgattctctatccgtttcctttttcttcgaagaagaaggctcactgagttgaggttacagtcccagtactgctctgtcacaaagctcattacctaataatataacatgaccaaacccacctatggggcaacagcaatcaacgtcagacaatgcctcctccttcggtgccggatacggatgtgagccaccgactggacactctaccaaacagacatacagataccttcatcagccataaaggttcattcacaacattgttctccacaaaaccacttgactcattaacttcatcttgactctcctggtgacgcatcattacagcttcgattatacgaatactagctctcctctcttatgcgactccaaacac

SEQ ID NO: 68771 - DNA, 2905 bp, Arabidopsis thaliana landsberg
  unsure (1)..(2905): unsure at all n locations
cttatctcttgttcagtgttttaaaaatggtgtaggtcgatgtattgtcattattaatcaagtgttcaactttaagtgaatgtttgggttggttattaaacttgttttaaagcttgtgagacgtggggtttttgtacttgtagtaaaataccaatgttggtttcattaaaaatttatagtcaggtttgttgtacttattatacgagtggagatacaaaacaatggaattgattatttgtacggtgagattcaacaataccggtaggtgagtgagtctatcccttaagtttggtgaaaagtgagccacatttaatgcatttctagcaaaagatttaacgcccatacgactcttatttattactatgagactatccaaagctcttatttaatgtataatgtaaaggaaatgtattataagcttgttgaattgtgtaatctatatttgaaaaagttacattaacattgaaagaaacatgtttgttaagtgtgaatttaaacaaaatttctttgtaaattgtaaatgtaaatgctaaacccaatcggaaaggaaacctttttgtttgtgtttgcgtttgacgtgtacgttttcacataaataaaccatttctccgataagtatacactgaacattacatattttatctgattaaaataacctagcattattgatcgttgaaagcctagctcgtattttcacaccttattggcttattggttaactactaatgagtgatgtgacaacgtttaatatatgtgttacaagtatttaaatgatttcttacgtaagaagaaatggttaagtgactcattggatcgtccgtcttttgtcgaccaatacatcattcgtgtttttggtagtcttaaatatgtgagaagacttatgtttttaacccatacctttcactaattaggtgaactgttcttctcttggagatactgacaattaattttaaaaggaggaacgaattaatatggttagaaatgcaactatagtcacgtgtccaatctcataaaagatatggttttttttcttcttctttctaatatcattactaggtttgcacgtttagaagttaatcaaattgtgttttgttcttgattacttttgaaacttttttttttctctacctttgtatttttcttcttctaatacttaggttatgcattgattcacaaatgatatgatttaactattcttgtaaagattattagtgaaaactgttatacatgaatgtttgtaaaacctcggaggccgatttatgatcgaattttcattgttggtggagcttaaggatgatttaatgagttaagttggttttatgtatctaactatagcgtaaaccctaaaggcttaaagctaaagaaaaacaaactgtgttctgcttttaaatcactaatatgggccgttaaggcccactaagagtacgtatgaatccaataatggatggttgaccaatgaccagtcatacaaagaaaattaaaaaggtcaaaatttaccaaaatctcgacaaagggcaatttcgcaattaaatgcaaatctgcagcgtctctttctctctctccgccggcgaatttctattgcttccttctccgtcaattttatcaccgaccgtctgtactctccgaccacatatacaccgtgactgctcgaaccattggccttaggttagtcaaccctctttagcttataaagtcaatttcttttttccgtcaaattttgggtttagaattaaaggatttgaattaaaaaatttccaaacagtgcttttgtgttatgttgaattgcagaaatgggttgatttgtcttgtctgggtttaatttgaatgtagaatcgaactccgtttggaactggtttgttgaatgttgttcattgagaaatggttgtgtgtgtttgtttttatgttttgaagctcctgagccacccttaagtaccttaaagactgaaactttgaagtatcactttgatggggaagtgagagatgatcactagttcggtataaagatgtcatggatgaaaggtaaatcatctggttggactgcgtttgatctcaagcagagacagaaacaaggtcttgaaagtgaggtcgagggtgatccattcccacctgtttcaactagtgttaatgcatcctttggtgtaaaaggacggttgagaagaaaccatgaaccttctaaaaagtctttttcgtccgagctcttgcctccttcgagatttccggcattgacagagaataaggattgcggaaaccaagaacgagggggaggttgtagaaaaaagccggacactttgagtctcccggtaaacagtcatgatttagccttcacgaagctgaagcaaatgaacagctgggcggatgataacttaataagggatgtattgttatccacagaggatgattttgaaatggccttagcttttttgaaaggaatggtttcttctggtaaggaggatgaggagccaacttcaaagattgaggggtattcatccgataacagaagatcggaatatagaacatttgagaaaacagttacaagttcggtgaagatggctgcaaggtccacatttgaggatgctggcaagtatgatctggaaaatagtgatggaagctcgtttctggtcaatgcatctgacaatgaaaagttccctgatgatatttctgaactagatagtatcattcagcggcttcagtccattccgatagaacctgaatgggaagaagatgatctatacttgagtcatcgaaaggatgcgctgaaagtgatgaggtacacaaaggcttaagtcctttttatactgtgttgttgtcaattgtcatctcgataatcatatttcgaacttaagtttcaaaatttatgcaaaaatttacagctacgagtagtcagtatctcatttcgnctttctgt

SEQ ID NO: 68772 - DNA, 422 bp, Arabidopsis thaliana landsberg
  unsure (1)..(422): unsure at all n locations
tgaacagcacaacacanagctcttttgaaatctgccaaattcaaaacccaaaagggaacctgcaactgacacagagaataatatccaccggttagcctgcgaggttatagttatcggaaccgttaagttacaagattcggattatctttttatttgtctgtcttttgcctgcttctgagatcaactttgctcataaatgatggttttgggttaatcagtttatagcttggtctaagactcttagttgctactgcccactggtggtgatgtgcttttagcttttttatgtgcaaattcttcgtgatgataaccacctttggtatataattcgagttgaagttagaacaaacacttccaatatttctcactcattaaggaatgaatcaaattttctccttgtattcaataatcagatcaggagt

SEQ ID NO: 68773 - DNA, 1286 bp, Arabidopsis thaliana landsberg
aaagtctgctttattttttgtcggaggtttagcgaattggccaaggagatggaatacggagctccgggaatgaaggctggtcgccgggttctaactccacttttcgttctagttttccttcttcaaggtgttcattctcaaacatcacggtatgtgctcttaacttctatgtattttcactgaatcgagctttacaaaatttgtgtaaaagattgttgaaacttaaaagaaataaaatctatttttttttcctcgcaatatttgtgtttattgaattggtcctatgccacgatcctgtacgtattattttaaaattttaaattttaaaatgtaaatgttaaacatattagatttatttccagtttgtatctatcacacagatgaatatctacacataggtcaattcaagtgaacattttttttttttctctctctcttaatttggaattcttcttattacagaaacaaattcaacatcgcaaaagcgggacataaacttgcatctcccccggttacgcttaagaaagttggtgataaccaagtacggttcaaatgtctatacgtataacgttatattcttttatatattaaaatattccggtccaagaatattgttaacttatatatgagatatgcatgcttgtgttgttgttgttaatttaaggtggtcgttgataacggtatcatcgatgttaccttctcgagtccacaaggattaataactagaatcaagtacaatggcttaaacaatgtgttgaacgaccaaattgaaaatcgggggtacagtacttataccttaacttatatagcatgtgatgagaaaagtatcataaacatgagtttcgtcatataaaattatcattatacataggtactgggacgtagtatggtacaaaccaggacaagtatcgtcaactgattagtgagttttcaaatctctctttgtatcttttcgttcatatatatatatatatatatatatatatatatttcataatcatacctactaaatatttatttttatttttttatattaattttatgttctaacagtttagtaggaacaaaattcgatattgtaaatcaaacaagtgaacaaattgaaatttcattttcgagaacgttctctcaacggggctcaggaatcccattaaacgtagacaaacggtacgtcaatttgccgaaaaaaaagagtagtcactacttattttcttttcttttttattggagaagtttaatcatatagattatcatataatcgagaatgtttctttaaagatatatta

SEQ ID NO: 68774 - DNA, 3078 bp, Arabidopsis thaliana landsberg
tatatgattaacataatatatcttcataaacaagtttcaaaataagtaaaatgagtcgagaatccaactggtgaaatggtcctacctacaatcttccctcaattggtaccgaacgaaccttacatctcctcgaaaagccaaatctccatatatattttttttcttacaaaacagtctttcattttccacttctaaaattggttccaattttttgtcgtcttcttgtcagaatctttgaccgtcttctttgtagtattgcttaaattacactgcctctcgtcaaaactaagtttgacccgacttttctttctttaaacaacttctttgagacgtcggctctttatttttattttcttgagttctctttctgatcaaacaccataatcaaatttggtcaagtggtacggtggcaggtagtaactgattttactggttaaactgattattgaactcaaagaatgacatctttattgattctgtgaccacatcattcatatatttgatttggactgatagtctaaaacatgtttatatcgagtttcgaaaaatattgttagtgagttatgaaataaaaaccttacatactctctgcttggaaaacaaaagcttatagtgctagatgaaacactctaataaaaattcgacacatcaaataacattgtgaccgctcataattgttgagaagaagaaagtaactaaagtaaaaccattcgacgaaagaaagttaaaccataaaataggctttgatcaacaagccaacaactttatgccacgtaaccaaatcctatggttagaatttcatattgatcgatgatcccacatggagcccatgtcgtcccacgagaggtccctctggtttttcttttggaactgagtctaaagaaaatgacattttattatatataaaaaaaaccgtcaccgacctcctcctctacaccagctgtgtccgagagcgacggcaccataaaggagccatctcacggtggcgggaccaaacctctattcgacttatccacgtcagacctgactcgactaaaaccacgctttgaaaccatctgccacgtgtctttcgccgttgttttttatagatccacatttgggcccccattatgatcggcggtttttttggaacctttaattaattagaaacacattagccacactaattaatttaatgttaaccaaccaccacatttaaatatatgaaatcacggcgttacatcacgcgctaaacgggatatcgtatatctcacgcgctattctcattggctgcgtatagtacacgtacacgtcacctgttttctcaaaaatttctggcgagtcaacaaccgtcgggagagaaaaaaaaagttcattttttttatttgtctattttcttctgttttttttaattagttagcttcacaaaatcttatatttatattttctaatttctgatatcagaattttttggagtttatttattttggggatagtttctctgcgattttcttgggcacttaaaaagacatttttattcacagttcgtctttaggcaaatctctccgtttcttatttttcttctcctttcccatttattttctgtgtcccttgtttggttccagagaaaccgcgagaaacaaaaaaatcagagaagaagaagagaaaacaaaaaaaaaatctgtcttcttcccgtcgtttaacgctttcagtttcgaaagttgtatctgcatttttctcaggtaatcatatcttagcttaaagtttagtgttttataccattttagcataaagtcaccatttttacaatctctgttctttgttatgagctgggattttttagttttggttcaaagttgaagtctttttgggatgtttgttgtatgatgaaatgtctgaaccaaaccagtttaagaaaaaccggattttgttttctgggtttaggaatttggtagtttgtttattatgggttggattttatgtgaagtgacaatgatttgtcaagctttaagcacaacacatttgaaatggtggtggtgggtcaagacaatgtttcattgtctattctctgcaagtgtgttactaaacttttggtaaaaatttatgttttcttcgataccatacaaaatcttctgatgtgcctgtctttgcttatacatttgtggcaatttggtattcaatatttatatatctgaaatgtagttttaccacagtagtttctctccaaaatgtgtttgttttttatgcttgaaatgtagggtttggatttttgctctatcctttagctttagatgtttggttggtaaaaattgtgaaataatcccaaagtaatacagagattttctatatcagtcagaaatttctatttggagaaataatcccaaacttttgttcctttgatagagaggttcaatattggctataatgcgatctctctggcattacccttgaaaattttctattacaaagtaaagtcatttcatgaataatgtgttttcttgattaccttttcgtacaactgtcagcaaactaaagacaaagaaatgttacaaaccttttgtttgtttctcattggctcatagcttaatgtctatgtgtgattttggtatccaatgttttcttgttatagcttgagagaatgttttcaaacttttttcaacagatacaatcttagtaatcacacttgagtatttttcttaactggttttgtttcttggcatcttcatttcagggtctatatttctctgaggaattggattcttatagaagttaaaccgcagagcttcttctatccaatagtcctctgagaatcgtcgatatatataaagtttgctgatatagttgttatggacatgaaatctggtcactcgtctcctgtaatgactgattctccaccaataagcaactcaagattaaccattcgtcagaatagacttccttactcatcagcagcagccacggctatctcacagaacaacaatctcttactaaccgttccaagaaagaaaactgggatccttgatgatgttaagtctaatggttggcttgatgcgatgaaatcttcttctcctcctccaacaatactaacaaagagtaact

SEQ ID NO: 68775 - DNA, 1385 bp, Arabidopsis thaliana landsberg
tcataatatgttctgctctaaaatgttttaagcgctaaatgtttttatgctaagtgctaacttcatatagtcgtaatcggcttatgctcataatcacttagactagggaatatgtaaatattagtccattattaattgtatttacatagttattgatagtatgtattattgaagctttgcttcttcttatgtgggttctaaactagtaatagtctcctttgatgaattcattcaaacgtttgagctctccattttgatggtccacaatggctttaaccacatcaaccatagagatcagtcccactatctttccgtcaatcaccggtacatgccttatgtgattctctacatcatttaaaaaaaacacaattttcttttgtcaatttcaaaacataatttacaatttggattagatatatatatatatatatatatatatatgtaagtatatatagtaaattaacctgacataagctgcattgctttgattatgtttgtcccagatgaaacagtaaccaacttgctctggccaaaatcatttccaattcttttacttaaaattacgaaaatttacaaaatgaaaaattaacttgagagttttatcttttgtttattctgacctcgtctgtcataacttctccaacttttgtaagctttgatgatcttcctgccccaatgatctttttcatatagtctgtttcattttgtgatgataattagtcacaaaatgaagaacccttcttcataaattgtgtttttaacttgttaactacaacattcaaggtattgggtgatcatatttataactcctttttttggtatttttcagtagaaagaacattagtaaagaaagcttatatatacctctctctgtgacaattcctgctatatattgttgggcttcaggtttcaacacgaccaaagatccaatattatgcttttgccatccgctttttgtttttaacacgatcgacgagattagagatctacgtatatatcttatatatgcatgacaaattgacataatatacaaatatgtgtgcttagctttaattattatacataaattagatatatctcgaaaacattggtctgattttcgatttgacaaatatatacgtgtatgcatgacacattgacataaactacatataggtattatattgcaccgaatatggaaattaaccacgtctttattagctgggacatagaacaacgtggagtaggcaacgaacctaacattaataagtaaataaaatagttcttgtataagtttttagttcgagatttatagatttatgatggttactaattgatgcgtatgtaacgtgatgagcaaacaataaaaacggagaaaaagaaggaagtttgaacgaaacattttt

SEQ ID NO: 68776 - DNA, 582 bp, Arabidopsis thaliana landsberg
tgacgattgaccattcacacaacccgatgaccctgctgcgcggtctggccgactacctgccgctgatggtgtgtctgatggttcacatctggccaggcgaagccaacgtgatcggtccggaattgtgtgcgcgacggcgaataactggcggaggccgaaatgctgtgcagagggaccacctgacgccaacgagaattccttcttttccgacgccattgacgctacctaccgcaagctgggcttccgagcggaggtggatcctgccgttgatcgagctgcccaccgtgtgtgctaagccctaggacgaatacttcgagcgctcctgcgaattgcacgacaggtttcccggctacgcattgctgtccaccgagtgaacaccaaacgcgccgaacaccgtttccgaagaaagctgcgcgcgcattcgtatgctgttcgaccagctcaacattccggtggacctacacctgcacgataccgttcacgaagaggaggaacaaaagcaaagcagcggcttgcgcccgttgcattgcctgcagaagctgggcctggtcaacgaccgactgatcgcagcggacatgaccc

SEQ ID NO: 68777 - DNA, 252 bp, Arabidopsis thaliana landsberg
  unsure (1)..(252): unsure at all n locations
tnnnnnnnnnnnnnnnnnnnnnnnnnnnnnnnnnnnnnnnnnnnnnnnnnnnnnnnnnnnnnnnnnnnnnnnnggttcgttggatgatcgacttattcgtcttgcggccgttgcttcgattacaaaccgccaaaggtaaggacatgcaacaacgtggatccctcccgaacgtggggcgtgctgtgctgaactgattaacacttggaacgtatctggttcctcataaaactcaaagcactgggtgaatgaaat

SEQ ID NO: 68778 - DNA, 572 bp, Arabidopsis thaliana landsberg
ggatacctaacacataaagtcccctcaacctatagtcctcttgcataaaagtacaaagccctccactttgagttgcatgctcaatgttctcatttctaaagagataaaaaagagagagataaactgattaaacgaaatttcacaaagctctctttaatttatccctccatcttcactctctcaagtctttatccttagtttcttctctcctgtcttcttggtaaccatgtatgttctctctttctctctctcctgtcctctcttcatgtctctctcattatttctctaactaaatctgattctaaaattttaaactgtaattttttttgcaggagagctgatgaaaataacactttagatcttaataacttacctgatgatccttctagagacattttcccattctttgaagaaggcttctcttcctcttcttcttctggtacacactactctcccttttcttttaattatttgaataaagttttgtaaatgattaaattaatctccccaccttctgctttgagtgactgcttgtactaataaatatgacattagagtcaacatcataatag

SEQ ID NO: 68779 - DNA, 453 bp, Arabidopsis thaliana landsberg
ttccgtacgtgaatcgcatcatatcacatatgtattcaatattccttatgaataactcttttaagggatatgtaattaatatcggttgacaaaaacaaaaaactaaagacgaaaaagagagagaacagtaaacttaagattattgttcgtttattttgggattaaaaggtctcctctatttataggcccattacatcgaggtacatgttcgtaaaactcgttaaatgatcttcttggccgaagtaactttgacattaccagagacaaagcgtgccttaatgaagaaccttaactagctagatctaactcatgtgatatgttgaaatttgaagacctttgttttggaattatgtgaaaaaaccattagaaaaacaaaaatagatttattatacagaacaataactttgaggggcgaatttacctctttcctaaatattgattctttaaaacaac

SEQ ID NO: 68780 - DNA, 480 bp, Arabidopsis thaliana landsberg
ttatccaaccgggcctactcatttattactaggataggtacatcatcaatccaaatagaacttttgttaatgatatagccatattaaattctaaagtgaaaatgtggaacgaagattaacttcatttgtgtaatcaacatgttgtcaatcaatttgagaaggtaattattggtgactttgatgatatggtactaactatcatatataagtataattaaatgtgcgatatatgatatatggggcattgtgtagcttacagcccacttgatttgtaatataactcgggaagtaagtgatcaatccacttgcgtttggtggttgtactgaccaataggggaatgagagacccttccttataacagtcttaggctaagataattgtgtttgaaataatgcgttcctgctgatggtctctggtttgatggggattatatgcggcgtttttatctctggttcaggattatatgcggtcataaataa

SEQ ID NO: 68781 - DNA, 2846 bp, Arabidopsis thaliana landsberg
gtggaatatgtttcattcatagttagtgttggtagttgaggtggggacaagttgtatttccatgttgcttccaaagtcaaacagatcaaagcagcctctttgaccaaaagaatccaacttttttcctcaactttcatggccgccaaaatcaatcactcaactttccaccaccaaaaaacctcagattctccaaacccatatcttcgatttcaccataatccaacataaacatgcctaactcgattctctttcttcttctttcattcctgtatctcacaaactgcgttgctcaatctccatcacaaacttgtcctttagatttctctcatgtcctaacaatcccatggaacacaacagattgtcaaaagtccgacaaatcagccgatagcaagaacagttgttgccaatctcttttaactctaatcggaatccctctagctcatcgtctcaaacaaacttccaatttccgtctcccaaatctcgctacttcaatctcttgtctcaacaatctccaaacgaagcttagttcactctctctatcttcgaatctcacctctctctgtttcgatccgaatcagttcgtcatcaataacgaaacctgtgctggaatccaaacgactcaagattgggtatctcgtctcggtccatctacggcgcttgactccgcctgtagcagtggtctcactgatctaacgcgatgcgacgcttgcgtggcggctgggtttagggttcaaaaacagctgatcactttggacggtaatagctctcacggtgtttattgttaccattttgtggttacttacgctgctggtattgttaacaagaaaggacctgagagtgatgatgctttgtcttgtctcttctctttgagtttgagatctccattgaactcaaagaagaaaagacacacggtggctcttgctttagggataaccggagctattttcggggctctggttattgccggtttgatttgtttgtatttccggtttggtaaagctgttaaaggaggagaggttggttgggaggatcaagggtctagaccgaaatggagaccaaacactggctctatctggttcaaaatcgaggaactagagaaagctacgaataacttctcgcagaagaatttcatcggtcgaggcgggtttggttttgtttacaaaggggttttaccagatggatcggttatcgcggttaagaaggtgatagagtctgagtttcaaggggatgcagagtttcgtaatgaggttgagatcattagcaatttgaaacataggaatcttgttccgcttagaggttgtagtatggtggatgatgatagtgagagtcagagatatcttgtttatgattacatgtctaatggaaatctcgatgatcacttgtttcctcgaggtgagactacgaagatgccattgagctggcctcagagaaagagcatcattttggatgtggctaaagggttggcttatttgcattacggtgtgaaacccgctatttatcaccgggatattaaaggtacgaacatattgttagatgtcgatatgagagcgagagttgcggatttcggtttagctaaacagagtagagaaggagagtctcatctcactaccagagttgcgggaacacacggttacttggctccagagtatgccctctatggtcaactaaccgagaaaagcgatgtgtatagcttcggggttgttatattggagatcatgtgtggaaggaaagctcttgatctgtctacttctggatcaccaaacacttttctgatcacagattgggcttggtcattggtaaaagcagggaaaacagaggaagctcttgagcagtctttgttgagagaggaaggctcagggctctcgaatccgaaagggataatggagagattcttgcaagttgggatattgtgtgcccatgtattggttgctttaaggccaacaatattagatgcattgaaaatgcttgaaggagacatcgaggttcctcctattccggaccgaccagtcccgctcgcgcatccttcgtaccgtatggacggaaacggattcacaatatcgcctgcgcttagcggactacaaatacattccggagatatgctcagatgaaaaaactaggctcatgtgagattttattttgtaaatatttgaaagcaacgatcacgtcttttgattacatcatgtaaaacaatttcagaatgttgtagtatatcataagtagggaaaacatatagttcattgtaggattatattctaaatcaaagtagaggcgaaggctgagatgcgggggtgagggcggtagctggtggaagccttccggtacaagtgcaaaagttattaaggcactcacatttggtgcagtggttcacagtcctgcaccatcttgacactaatggtcctctcgcctcagccaccatgtaaaattctgcaaccattcaaatttgtgtttatttttgtccgttgcaaaatttatatgtatataaataagaagaaattacatatttttttctttgtcaacaagaaattacatagtttgatacataatgatttgtcaaagcattttcaacagaaaaaaatcagatacatattttactattaattttatatttggtaaattctatattttacagtatacagtacattacacaatttcctgaatcagttgaatataaaatgctcaaactagcataaattttaaactttccagcattggtaatactcaaaaaaaaaaaatcaataacaaataaatgtttagttgtaattcagacacaacttgaaccccaaaaatcagactgtgaaaatttgtgtgctctttttaacttttaattgctacagttagttagtaat

SEQ ID NO: 68782 - DNA, 769 bp, Arabidopsis thaliana landsberg
gcaaactatcagctaactcccattccttcaaaagaactcacaaatgtttctgcattagtgcaattgtctttggcatttaatatttaagtaaaaataatcacaacggaatacctgaacggcttgcatactctcagcatcggagaagtcaatcccttcacgattgataaacctagttttgagacaaaaaaaaagcagctttctgtctttctctaatgaaggaaccatatgcagaattcacacatgtatacaggaaaagttctgtaaggtagtttagacatacactctcaacttagaaggacttgttccttcagggccaccaacaattgatatgctcttgatcttgacgtctgatgtaaatctacaataatgggacatccaaaaagtagtaaacaatttaatagtaagaaaacatggactgtatctagttctcccaagcttctttcaagtcaatgatctgaaatacactatattcatatatccaaaccaataatattagaagaaaattgaagtaactggtcggtaattaagcaaataacagacatacggtacaaaaacaagcaaattaaggtctccctcattgctctccaaatgctcctgtaggcaagaaaaaaaaaaaaaaaaactatttacttagacattatcatgcacatagctataatttaatttcactgcgtataaacatagtatttgagtaaggatacatataataaaggatcattcaccagccaaccataatattggttatgtaaaaaataaaagtacccccaaa

SEQ ID NO: 68783 - DNA, 2331 bp, Arabidopsis thaliana landsberg
gtgacacgtatctacgtattacacgtgtgataacccagtagtcgttaaattagatcggagagcatataaaccattaagccaaataaaaggaaaataagtatatagtttgataagaaaagtaagaagaagaagaaagaagatgcagtcggcgaaggaaaagatcagtgacatggccagtacggccaaggagaaactcaacatcggtggcgcaaaggcacaaggtcatgcggagaagacgatggcaaggaccaaaaaagagaagaagttggcccaagagcgagagaagtctaaggaggcgcaggccaaagctgacctccatcaatccaaggctgagcatgctgcggacgctcaggttcacggccaccatcttcccggtcactccacctaccctacccgagccaccggagctaattacccgccgggacagatctaaaactagctctatagctatattaagattagccgccttgtttaacaatatgatatgtacgttttttctaatataagatcagcagtcatgaaattttcttggttagtttcttttgatagtttatgcataaacaataatgtaatcttgcagaaataaacgtacttaaataattagtccatgtaaggtaatgaggcgagcgtgattatgcgagggaaaaaattggttgtgatactaattgattcagactacagtacgtcgaatgtcgatatataatactagttttagaaattagtgaaagcgatggattagatataatttccacacaaaaagttcaactaatattatttattagtcaaatagaaaatatgaaatacatatttaaaagatatccaaatttggttgcagtatagatacaacatatacaccttaatattttaaagtgatcaaatacatatctcgccaatatataacagtactaaaagaagaagaaaaataactagttagatagaattataagttttgaattttacaatggttttgtcaaatcagaaaatcaatattcataactcataagccatgcatactttatgttttaaaaaacctattcataaggcacaacgaacttctataacgacatcattttcggtaacatacttttagttaatgcaaagcttgcgtaaatgtctaggactagaagttagttggaaaatatctttctcttcatacaatggtatatagctggaaaattttcatactaacatacatgtgaaatcgtcctctgtctaaaaacaagtggacggagaaagacagtttagccggtgggtcagccatcgaactctagacaagtaacttcctattataacaaccaaccatagtttgccacgtattaaatcttggcgtgaaaaatctgtcatccgtgcatatacacacggtctttacatataaaccgcgttttaatctgaaaccatgcatttgtgttcgtattctttgttgtttataagctctgtgtttttatctttggtgaatgatctcgctcttaagtcttaacaactctgatccttctctcaaatgggttgtctgatttctcctgtaatgaaactccgtcgtctctcctcagccgactcgcggcgatttgcataccggaatctcgccgagaatatggaagatccagtcataagggtggtggtagggaaggagaagaaggagttcatggtcgaaccgtatgtactcgaagagtacccgttcagagtcttgataggttcagctagggatcgtgccaagaaccggttaaaccggaccggtagagtggtgtggcttgatcatgtcgactcgatcttatttgagcacttgctatggcttcttcggaacgatgcctctacgttttcggatttggatgttctcgatatcattgaattctatgctcaagattgttagggaaagaaatggattaacagtgtgcttttacagttttacttttcagtgaagatattatccattcaaaaaactgtttttactgcgagcaattgtcggctagatttaattgggctatcacgaaaaggcgcattagtttttatctaaagtagtagatatgctacatacgtgggcctttgagctggccctttattggctttttgaaattaaataagctacaccagcaaaaatagtgtggtctctctagaattctaagttttgtttcaactactgaaagaaaaagaaagggtcaaaactacaattttgtttactcctcaaagtaatgaagtttgaacaaacttaaaacactttggtaactagcagactggtaagtggtactgtggcaaatctagctaatttagttaataagatataggtagtatataaccaataagcattacaatatttaagtaaaccaaaaacatggcagt

SEQ ID NO: 68784 - DNA, 297 bp, Arabidopsis thaliana landsberg
gagtcaatatgactgatgatgtgttatgttaataactaaccgacccgcttgaagcgagaggatctgtgaaacacaagcaagactaatggactagtcacagaagttgaagagagaagggaggttgagcaattactgagatggttattgattacaactaaaccgacccgacttgtaagcctagaggatctgtagaaacacagcaaactatatggcttgctcacatgaaagcttgaagcagagaagttgttaggttgagcaatatgactgagcatggttgatggatagactaaaccgatc

SEQ ID NO: 68785 - DNA, 760 bp, Arabidopsis thaliana landsberg
gaacctaaggtgtgtttcgatgaatagaacaagtaaagtaatgatcactatgttagtgtctcaaaataggacatgccatttctaaattttcgtgtgtgttaagtgttaactaattaccgtcagaaattttggtaagaaccagacatatgtctacataataaaaggtgtggtttttttatttttttttatttttataaacgttttaaaattgttaatactctataaattaagggaattacctatcataataaatataactatttctgaaatatatataaaattatcaattagtactataagaaatctcgaccgctctatcaaaatacataattttccttgaacagctaatctccaatccatggttaaattttcttagtggaattgttataatgatgcatgtaaaaggcaaacaaaattaccgtaaacctgtcgtcatgcttatgcttgctaagctcagctattatcttgttttctcgttaaatatagtagcatatatagatatttaatatggggtttgtgtaaaatgtcgcatcataatcctaagtggggcagttttatgaattttgaaatgccttgatcatcttcttaccaaccaatcacgttcctacaatagaactcaaaataatgtatttctcatttaattaatcaaacactaaacgcttgacagttcaaccagcaaatatacaaaactttgtctgattacataaaagaaacagttacatgtttttttttgatgtatagaacaatgattgcaaaacct

SEQ ID NO: 68786 - DNA, 289 bp, Arabidopsis thaliana landsberg
cggtcagaccaagaagacgaggagagaccaggtgagctattactgtaactatatctctcttgttaacaatgtatctctgcatttgttgacatatgtctctgtcaatgaaaccaatttaggcaaagaggaaaaaaatggttaatttagacactcaaatttttgtttgggagagagagaggaataaacggcaatgtaagcgtagagggatgatgagaggctaagaaaatttccctctctccatctcttttgcatctcctcctttcaaaaatactctctctctggtttttcc

SEQ ID NO: 68787 - DNA, 533 bp, Arabidopsis thaliana landsberg
  unsure (1)..(533): unsure at all n locations
ccagttggtctgggcggttttgatcttgtccggccagtcaagatcgggtatctcctccagtagcgcatcagcggattcgggaatcttaaaaaaccactgtttcatcgattttttgacgacttcgttgccacagcgccaacattttccaccctcgacttgctcatttgccagcacagttttgtcgactggacaccaccactgcagagattctttttgnnnnnnnnnnnnnnnnnnnnnnnntttggtaaatatccactgtgtccaacggtagtagctcggatcagaggtctggacttcgcgcgaccagtcgatactggcgcccacacggttcagctgattcttgaagtttgcaatattgtcatgcgtggctttctgtggtgatacaccagttttgatggcgtaattttcggccggcaacccgaaattatcgaaacccatcgggtagacgacattctgacccagcgcccggtgaaaccgcgccacgccatcgacgatcgagtgctcaaagaaatgtccggtgtgcatacccgctc

SEQ ID NO: 68788 - DNA, 591 bp, Arabidopsis thaliana landsberg
tttacattatatattatacgaacacttttcatatgcatgatatgcacattgaattctctatgcaataaggccatcagccggcatgcatgcactttaaaaaaaaacagtcttttgactccttgttgtatttgtccattcccatttcccttatatataaactctattcatttatggaaatttaatcggatgacacaaaaatttagaaaataattttatatgtgagggccggatgaataataataaagacatggtcagtaaaaaatgaaaaatataattcaatcatttttattacagagttgtgtttcagatagttcaagcatccaaaagttttgatatgtctttacatcgtcattttggataacgataggttataaatggtaattttaaactacttgtctaatttatcaaatggtcaacctcgggtacaaagaaaagaaatgttgaggaactcctatgaaagaataatagtggatttgtgagtcagtttttggagatgcttttggcgatccataaatgtccaatttgatattttatagttcatattatgaatgccatttctgctggaggaatgaaagcaagtcagtaaatagc

SEQ ID NO: 68789 - DNA, 515 bp, Arabidopsis thaliana landsberg
gaagtatcatatgtctttttatagatttagatgatcttcacacaaaatttaaaaacttttttttttgacttaattggtcattggaatttcgtaggcaaatgctgtgttattaacatatccattatagtcacatactgtcaaagttaaattaccggctaatgagaatttcctaggaattgatttctacaaaaaaaaaagtagctaaaaatgaaaagcattttcaacaagtctttgatttgttcgtgcatttcttatttgtgtataatctatttatcttatatggttatgttatgactctttctggacgcagaagctacgaacccgtgtgatgaaaaagaatttgaatccagaatggaacgaagacttgacactttctgttactgatccaactcttcctgtcaagatcgtaagtgatttcgacattacaaccaaatcaaacacgatacattagattagaccataatatggattctttatatttggaagtttgaaacaagacttaacaagaaaaattg

SEQ ID NO: 68790 - DNA, 499 bp, Arabidopsis thaliana landsberg
taagaaagatatgtaatctacttgtctcaagtgagtgtcacttcctcttttttaatgatacagacttagagtagaaatggtgggtcgccacactcaaaattatgacattaccaaaaaaacctttttaataagctttagtgatatccaagaaacaatcgatttgggtctgtctttttctcttgccatgagatcttccggttacttttataaaaaagtaaaaatcaatagcattaataaactaatactagagctacctacaatttccagaaggcaatccagactttaacctaggatgttccaaaccctagaatccctacatccttcggaaatttggtttcaagcttcttaactaaacacgagccaatcactttgtcaattatattttgtatgcctatttagtatttactgtatctttctatttggtagatgacaaaatccttatatacaaaaaaagactaatctagtcatctttcttcagtttcgctcataatggcggttt

SEQ ID NO: 68791 - DNA, 2729 bp, Arabidopsis thaliana landsberg
  unsure (1)..(2729): unsure at all n locations
ccaaaagcattacacatagttcttaattccagaatcccttcgttgcaatctcgtggtcgtactcgtgagcgtttatcaggtcttaacgttagaaaaagtgacaaatggtttaatcttgtgatgggagatcgtcctgctgcgttggagaaattgcattcttggcataggaatattctggattctatgattattgatatcattcttgtccatccgatttcaaacgataatttggatgatgatgatgatcatagtgattctgttgttagatcagctgagactgtgattgagcgttgggtggttcaatatgagaatcctttgattatgtctcctcagagttctgactctgcaacgcgttaccagaaggtttacaagaaatctatcattctgttgcggtctctttatgcacagactcggcttcttcctgcttatcgtgtctctaggcagctgagttcttctcttgcttcttctggttatgatttgatttacaaggtttcatctttcagtgacatattctctggtcctgtgacggaaacaatgaaagagtttcgttttgctcctgttgaagtgcctcctggtcgtctttgtgcatcggttacttaccgttctgacttatctgattttaatctcggtgctcatatcacattgcctccgaggattataactgattatgtgggaagtcctgcaacagatcctatgaggtttttcccttctccagggagaagtgttgaaggccattcctttactggtagagctggtcggcctccattgactggttcatctgcagaacgtccgcatagctggactagcggctttcacagacctccagctcaattcgcaacaccgaaccaatctttttcgccagctcagtctcatcagttgtcacctgggttacacgatttccactggtcacgtacagatgcttttggtgacaatcaccagctttcacctcccttttcaccatcgggttctccatctactccaagatacatatctgggggtaacagtccgcgcattaatgtgagaccagggactgctccagtgaccattccttcttcagccacgttaaatagatacgtttcatctaacttctctgagccaggtaggaatccacttcctcctttttcccccaaaagcacaagacgctccccttcatcgcaggactctttgcctgggattgcgttgtacaggagttctagaagcggagagtctccttctggattaatgaaccagtaccctactcaaaaggttatgcttcttacatcttatgtgtcttgctcaatgcaagaaaaatatcacaatattttgtattgcctcatctgatattttgttgatttatttatatctactcttcagctgtcaaaggacagcaaatacgattcaggccgcttctcaggagttctgtcttcgagtgactcaccaagattcgcgttttctaggagccccagtagattatcttcccaagacgacttggatgaccctgattgttcatgcccttttgatttccatgatgttgatgagtcaagacttcagtacaggttggctttatcccactacctaacttgaatcattcaaaggaaatattatatacttggattagtttacagaaatctttacacatagagctggtcaatgacaagatgccatgaagaaaacactaatgtgttggctgttttgtttaatgtgaaattgttggcattcacactctatacttggcctttctcttactgtttctttatcattttttggtctgtcaagttcacttcttcttgggttttttagtctttggtagtaagaaaatgacagatattttgcaattttttcgatgcagccaaagtcttgaccggaggaaaacttcaagctctatatcgcagtcgctacctctagggagaagatcatcacaggacgcagcggttggtgttctggttcacatgctgaagacagcaccaccattacgacaagactcaagcacttatatggcgtcaatgtctggggttcagagagaaggttcagtgtcaggtacagaatctgaatttcgatggctcgtagcacatcaaatgcactaaaggaactgagaaactacaaacagctcaaagacttgcttctctccaaatccaaaagtgggtctggaccaactcgcgtccactgagccaaatcaaagagcgatcaagatatgagttatccgatggttgtttgtagatatgaatttgatgacgaatacttaactctgttgtatattgccaaagagcaatcacgttttggtttctgtaaaagaacttgcctttgaatatgcacataaaataaactaatcaaacttgaatcttttcattatgaagtagtgaaatttatagagggttttgttgttgttgacaaatcatgtgaaaaccttgttttctcatctggacctctttctagaagaaacatgaaatacacaaatgttgaaaaccggtcacctatactcttttaagatgagtgtgaaacgaagcaaagagtcacattgatagagagatcggatgcatgatagttcctactgtgataacaagctatttgggtataaggtcacaagatgtgcagcacaaaacgagagagagaagagttttaaacgcaatgcccatttagataaaaagtacaccaaaaacacacacacaaaagtcagcttcaaatagccatccacaataagcctttgcatctacacaaattcagcttgtgntagctttctccaaatcttggtt

SEQ ID NO: 68792 - DNA, 171 bp, Arabidopsis thaliana landsberg
gctctccgcctacgagaacattcgctccgtctctctccggcggcaggtgcatacgctccgtctgtctccgcctacgtaaatatccgcccacggaactctccgcgtccggatctgtatgactacgaatgtctccgactacggtctctccgcctccgactgtctccgggaccg

SEQ ID NO: 68793 - DNA, 760 bp, Arabidopsis thaliana landsberg
ggaattttgattaaaagacttaaatctttgagaattttgtcggctcttctcttctgggtttggttctgatcatagaaaaggatacgatggagtcatctttaattcatcatatcatcattgtgttgctgttactctggttcatctcttccttgaatcgatcccacgcctttttctatttcctcgctctcatttatctctacctggtactggaatttgtttctttcatgttatgtttcttataggattttgatagaatgtgtaaagattgttgctttatcttcttttttaaaaggttcacgaacggtatgtgatgagattgaagagaaaattgcagttcgaagagaggaagcaagcaaatcagagaagggtaactttttgtactcttctttaggtggaaagattctatctttgtgtgttaaccgttaatggtgtttatctagtttggttgagagagtgattaccctaaacaaaatgttattaagagctagacttataacttccaaagctcctaggttgcttttcctctctgtcatggttgaaatcgtatagtgaagctgtgaaagagctagactttagccagtttatggacagacttagttctaaggttactcactctttcgctttcgcctgtgtattagctgtatgcgattaacctcatgtggatttgtgttttcttttccgagttttccttaccctgcataaaagttttttgtttcattcgctctatctttcaggttctatctgattctgaatctgtgag

SEQ ID NO: 68794 - DNA, 461 bp, Arabidopsis thaliana landsberg
aatatccaacaatatacatacacagatacatgcatacttaggcagttagactcagagttttttcacaatgcatgcaactaataacagggatttcaaagttagagagatagggacaggttgactaacatgttttgcaaattattgaagacaagactatttggccgtccttgatccttgagattctgagaatttcaaaagattcgccagtttgatcaattcatttttattattattattattattattattattttttttttttaatattttttttgcgtttgatatcgttgtaaatagttaattagttatggtgcatgaatatgattttcggaattgaataatgtgttaacataggttataaatttaagaatccaaactaggaccaaactcattataatatttttgtgaagacattacagttttttttaactaaaaccaaaagaaatcgaataccaacacct

SEQ ID NO: 68795 - DNA, 534 bp, Arabidopsis thaliana landsberg
gtgtgcaccacagcctagcaggggaacttatacagaagaaagtgctcaaggtttctgaccaagaagccatggctggaagaagagatggctgtgagcaatctcgatgagttcacgtgggtcattcatcgtttcatctctcagcgcctcaagaatcgcctcacacgagaactctctaaaaacatcatcaaggtgtgaatcatgtttatgaatgaggtccaagttgatatgttatttacccagtaaagagatgagagtaccttgttataagaattctgtagagcatctttaagatgggacaaagttcagccggagttacaggcttgccctcttcagggtgttgaagacttaacgaggattggttcaacaactcgaaaaatgctttcaccgcagaaaccccctatgaacattacatcatccaaagcacttcatcattagcctttcatataaataatctaggaccacaagataacaacagtgtatgacagaattttgtattttctcagtggcgtttagattcaatctccaaaattcttt

SEQ ID NO: 68796 - DNA, 2447 bp, Arabidopsis thaliana landsberg
gatgcaacaaatgtgtttcttcaaatgaggagagaattctgaggtattaacaaagttgtgatgttattattaagcaatttgaaacacaaaacatttataagaaatagaaaaaaatctaactattttatacaaactccaaaaaggtacctaatggagcttgctattcatgatggagaatatggtgcaacatttgtgatttccgacaaagaaatgaggaatcttactaaccaaccagcaactacactcattgtagagcaaatgtttaaattatcataaatactacttatataaatatatttaaattatatttgagacatagtatggtgtgcaggagtttcgaaaccattgggtgagatagcagctgttttctctgaggtatctttttgcctccttaacatgtacttgtgtctcatactggttataggataggatatattgatagctcgacttcttggcagggtataccacaagctgatgtgattctaagactttattcagctggactgtccgtctgtgtatttgatcttaagtagagagaaaatggtaaggaacccatggaaagtttaggacttcgagcttaacttggtgacgctgatatatggaaaagcttagtttctttatttggtatgattaacacatacggtggtgagaagaccactaaaagaaagaagaatactaaagtccaaactaaacccaaagccgcgattgaatacactctacctagccttgatggtctgagatttttgtgccaaccgcttgccagcttgataaattttgagaagaaaaagttgatgtaggaaagagaatttgcatgttatactagtcagctatgtgtattgcaggatatgtttctccaattttcctatggtttacgcttccttaaaaggtacatatgtttttctctactataggtctaagaaatatcgaatgaattctgtcctcaaatactttgcgtaacggttcagatgtattctgagttaaatgttttgcttacctttcatttcccttttgcgagatggacccctgacaaggaacgccttggaactgactttgacaagactctgctaaacgtggttatggctgcttttatattttccatgagaaccctacgtaatgtagatgtcaaacgcttacttgcaattgtcacaaatcagtggaagttttgttcagactcttgtttttgcaaaccaattgcctcaaggtttcctttttttcatatcactaaccgtctagttgaggatgtaattgctagtccgtggatttcacctccagagctcaaatttttatttgcttcatttcacgatatcggtgtagctttctacaataataagcacctagaaaaggttgcatatcttagtgacctataattctgtttgccttgcataatccttccctgcatattgtctttagaagattttgccgccacattgatgatggtgtgtactttgcattgcaggcttccatggtgttcaagctatgtattagaacagtgtggacttgtgttagactcctctgtcagatatatgtaaataagtctgacctatctgaggattgtcttcccaaagaagcaattattgattttgtgagtgaagcatgtagcaaatctgcgttttatctagatgttctccagcaacatggtgcacgagaaaccgagaagttgcatgtgtttattctagaaaattggcctgaagctgaagacctcatcaaaaagttgccagaccctacaccgatagtaaagcaatgggttaaggtaccagttttggctctcattcacattacgctaaaaattaagtatctactttcaacttatttgaatgcttctgatgattgtgtcttaccaccagatacaacgcagacatcatgagactcagaatctgcatggctcagttttatactccttgcaatgatcctctaggagaatttcgaggagaggaaccagaaaaagtcttagagcatgatctttgaattggtgcgataaataatacaaaaatgtacgacgggaagaagtgacatgtaccatgcattctaagtttacatcagagaaagagttgtaatgttaaatgcagtactacgtactgagttatattagtctagcagatttagctagtacatgagcttttcttgggatgtgcacaaaggtgtagccgtgtaggtttgatctccctcaaccatgtttttgatgtccctgatataagtggcatactgtgaatatatatcacagcaatatcactaactccttgatatccaagtcttgtgattttgtgttaaggccatcctaagtgcctctacttcagcttcagcagacgtcttcatggcgctcgcagtagatcttcctctgacaatctcacgagtttttttgttatacattatccaaccaagtcccgcttgctggaaaggtgaactccatgaagcatctctttaacgcgtgcaatctatgtagagatttc

SEQ ID NO: 68797 - DNA, 278 bp, Arabidopsis thaliana landsberg
ggataatccgagcgatatctctaccggcgatgggttgtctgcctgcaactatcactcttttcagggctggatgcacaagtggcgtcgctagactggacaatgatgctactgtgtacaatactaaacctgacaacaccccccgggtactgatgaatatacactcacgcctcaaactcatcgtctttcatgtgtaccaacctttactggacatgatgaccaacccaactgacaatggtacacacgtgctaaatctaaatcctcattcaactttagaccat

SEQ ID NO: 68798 - DNA, 271 bp, Arabidopsis thaliana landsberg
tgctgaaaatttataaattacaaagttgatgtgtaagaactggaagaaataaatcaattttgcgaattacctttatattaatcaaattaaagtagcaactttcggtctcttcagatgaaaattctctgtttcaataaccactacaaatttaactagtaatgtttttctttagtctctgttatacaaataattactagacaatgacatgcatgttatcaaaaaaattgaatactgtgtctataacttggataaacaactcttaccttatagg

SEQ ID NO: 68799 - DNA, 989 bp, Arabidopsis thaliana landsberg
tatggtggggcctcagaacacatgggccgggcttggttacacatgagaaaattgttgtttttagttagattttcgtggactagtataaatggataaaagaagtcgttggaagaaaaccaaattgatagaagaaagaaagaagaaaaatagcaaattgtcgaaacagggacagaggctgtctttgaggaaaatcccgtatgattaaagtgtacgtaatcgattagtgttcctctgtaagcactaagtcaaaagtaaactctaaagccaaaggtttcaattttcaaacattgttaaagcgaagtctgtccacgagaattagcacatactggtccaccatgttatcaagaaacgccaaacctttttttgacaatttatagtttttgaaatatttagtagaaatcttttatcttaaggaagagattgacaaaaatagataaataaacaaataagaataaaagattgaatttttgaaattaacatatatttagccatagtggaaagaaaaatttataataaggttggtatatcaaaaatcaaagaacatgtgaaaaggtttaataaaataaaagctatagaaaaattgataagttttgtccttatgaaattaatgtcatgatatatatatatatatatatattattgtactttttaattaataatccctttttgaaaagaaaagaaaaatatgtataagaattttttgtagtgttcatattcagttttctagaaaagctaggaaagcgaaagtggcctggcatggttttgtaatttccttttttaatatgatcataaaataaaatatgtaaaatgaaaaaaaaaactcattaacaaggtaaggaataatgagttgacaacaaaacaaaggtaagggataaatgatgaactattcggatgaacatattattgcaaaattcagttatatactatatggtccaacgctactagcaaagtagcaatacacatgttggtcataattattgaaattagtt

SEQ ID NO: 68800 - DNA, 468 bp, Arabidopsis thaliana landsberg
agggccagccgcggagcggcgtgcgcaatcatcaggccgccaacaacatgaaggttatgaagaagggcgatctcggcttcttctatgactcgggcggcgagaaacgcattgtcggcgtcgtcgaagtcatcggcgaataccgccccgatccgaccgacgaggaaggccgcttcggtcttgtcgacgtgaaggcggtcgcggagatggagaagcccgtgaccctggcggcgatcaaagccgacccgaaactgaaagagatggtgctggtgaagaattcgcgcctctcggtgcagccggtcacggccgaggaatggaagcgcatctcgaagctgggcgggctcaagtgatcttcctctgccggatagaggagcttgccgacccgggcacgaagaacgtggtgctgggcgaaggcgaggacgagctcgatatcgcgatcgtgcggacggggggaaagccctacgcctatat

SEQ ID NO: 68801 - DNA, 3458 bp, Arabidopsis thaliana landsberg
  unsure (1)..(3458): unsure at all n locations
cgactgcaacacagtaagatagtcctgatttattctccttttacacacatctttctccaaatcccataaccttaaaacctctatcttcttccctaacctagcataaagcgtaatgagatgattgtaaccttcaccatctttcttctccaatctattctccgacatcttcaaaagctcaaccgctctatcacaatcaccaccatcaatataaaacttagccgcaaccgcataagtgttccaatccatagtaatatcctgtcgtctctccatatctctcaaggtcccaccaatcctctcaagatcatacatagcaccaaaagcattaatacatatcctataactatagttatccggagcaacattctcttccttcatctcctccaaaaccttaggaactttctcgtgctgaccaatattcgtgtaaagacacataatgttattgtaagtaagagacgaagtaacaaaacccatctccttcatcttctcaaaatgcaacagagacttctcaacattctgttgcctaacgtaacaattcaaaagagctccataagtcttatcattcttatactgttccttaagattctcaaaatactcttctgcagtgacaaatccataaactctaccaataagatcaagatgaaccgcgtgttctgtcggagagaacacacatacaccagtctcattcatccatttcgaaacctgaatttgaaaaattctaaagtttagttttttttctcggtgtaaagagggaaagagacttgatttgtatagaattacttacctcgagagcgtggaggaagcgtttgcgtctacgaagatcgtgaacgatgctaataagttcagcaacagagacttttttaccgcattgaacccagttttggagttctgggtaaacacttgattttgggtctcctaaaggactgatttttgagtaaagtgtcgtcttttttactctgtttgtgtagtaatatctgctcgcaatcaaattcgccggaattcgtctcagtacattcatcggttccggcgaagaagatagtcaaagattgagactttccaaaaatgaaaaaatacaaataaaggttgaaagtttatgataattgcatattaagcctcaaaacttttattattatctaatttacacctgaatctatctattgaacattttaactctcaaataaaagctatgttttgagggaaaaaaaaaaaaaaaagctatgttttatcaagcttttggtacacgcataaacttgatatcaagagtctgtggacttggagaagcagaggttttctttgataacattcccaaagattattgcggtcttttctagtcttcttagctgctaatatcgtaagctgagaagcttgtggaagccatgaaggaagcgggtgtttccatggacacacgttgttacaatcttatgatgaatatgtataatcagatgaatgtgcatggaaaattagatgatctgatgcttgaaatggagaagaatggagtctcttttgaccaatttactcttagtattcgtctcagtgcatatgctgcagctactaatattgaaggaatagagaaaaccatagaaaagatatcattaatgtttgaaacagctattgaatggatttcgcaatgttgagctcatcgataaggcacaatgatgatgaaagcagaaggaaacaaagtgaatcnccatacggatgccccatgagaataattaggagcagcaaatttactaaagaatccataaatatatcttataaggtacctttctagctttaagaattagtacagaaatattacacaaatttgtaaatttagtattgttacaaagctatgaccaagagagaaggaaagttcaagtttctacaaaatcagattgcaagctcctcactgtctgcctttagccgatttcaggtgtttagtgagcatccttggtgcaatagccattgacataagctcttgaaagagtaatttgcaagcatatggaatgtatacctgagaatatttagatgaaatgacatcagacaaatgagcatgaaagagataaagatgaatatgaaccacttgcacaacagtttatgtttacctgaacaatatctgttttgttcttgcaacctctgcattcaaaagaattcttcttcagatttgcaatggcaatgagcccgcagacttcacacacatgtaccctatacgcatcactctgatcaaacagcctctctttcaaaaagtgagcagcaccatgtgcaatcatgcaatcgcgctccatttctccaaaacggagaccaccatcacgtgatcgcccttcagctggttgtcttgttaagatttgcaccggacctcgtccacgcgagtgaatcttgtcatcaaccatatgcttcaatctttggtaatatgttggtccaaggaatatcatagctgtgagtggtctgcccgtgtgaccattgtacattctctcaaatccacgcatttggtacccacacttatgaagggctttgcttatattatccacctaacgacacaacattggtcaaaactaataataccaagcccaatgctaactaagcagctaaggaaaatgcaagttaccgtgacatctgtaaagggagtagcatctccttcttttcccatgtgagctgccacttttcccatgatgcactcaattagctgtccaattgtcattcgagacggaatagcatgtggattcacaataatgtccggagtgaccccttcaatcgtccatggcatatcctcctgcgtgtaggtcatgccaacagttcccttctgaccgtgtctactactaaatttgtctccaatttgaggaatccgcacggatctgaccctcactttcacaaacctcaaaccatctgcatttgtagtcaataacacctacacgaagttacaagaattgatcagtttcatatttcaatcctgaaactttctaaacccttaactgcaaggaaaaaccaaagttacctgatccaccattccagtttcactatgtcgcaagcttatactatgatcacgtctagtgtatcgggatgattgtccttgagcctcatcttgagatattggagtggttttcccaatgataacatcttcacctgaaactctagtaccctataccaaaaataaaagattgtatgatatgctttctaacattagtcacctccatatcagataataaataattaaggaacaatgcatgataacgtttcaggaggatgcaagaccataatcatacagtttatcataagaaccatgtcgcataccctgcagcagaaacccaagtgttaaacttcacttacaaaaagcaccactgaagtatgaaccatgtgtcaattattttctgaccattgtacttcctctgtctgggcgcccatagtattcaatatctagtgtcaccatttttttctcctcatctctgtcagcagacgtgattgcagtataaataaatggaaagatc

SEQ ID NO: 68802 - DNA, 439 bp, Arabidopsis thaliana landsberg
atatatctaactcgttcaaaacaatatcaacttttttagtttcaaccgccaaattaaaattgcatagtgtgaccattttattaaaatttccacccgactcctaaaattatttcaatcgacttattgtcccttacattcttttcgcgaatacaaagaaaaatgtaactaagataaacccggtggaacatcaacccatagacaaaactcctatatgctctgtatcatttaatgacatttatatgagacaaaattgatcaaaaaatgctcttatgcaaaacaaaaactatttcaaaatccctagcaattctaaataaacatatattttgctaatcgctcacgataactcaaaaaaattatcaaaacattttctttgatgcaccatactatatagctcaaacataaaataatttgctcacttacagttattaatctcaagatc

SEQ ID NO: 68803 - DNA, 589 bp, Arabidopsis thaliana landsberg
  unsure (1)..(589): unsure at all n locations
agccgcctgaacatcgacgcgcaattgacagcatctggcctgcttccggctttggcagacggctagaaacgagggtgatcgtgtgtgcgctcttgaaacccttccaccacaggggacactccacatttttcttcgtaggatgttgttccggttcggagtgcaaaagcgagtcggattgaagacgttggcttcaggggaggttgggtatacgtttcagcgaagtggtatattcgtcggtgcaaagggttaaagcatagcggccccttgcagcgccgcttttgtgggccgctcgcttcaagtgcaccctaaccgaggaaaccatggagatacgccgctttgaaagcaaggacgaactggcggtaaaggnnnnnnnnnnnnnnnnnnnnnnnnnnnnnnnnnnnnnnnnnnnnnnnnaggacattgcccggaagctccagattcaaactggatggtttctcgtcggagttgttgatgagcaagtcattgcgaccatcatggtaagctacgacggccaccgcggatcggttaattacttagcggtcggacccaaccatcgaagaaagggattgggcaacgcgttgatggccga

SEQ ID NO: 68804 - DNA, 290 bp, Arabidopsis thaliana landsberg
caagtcagtaacatagagcctcattagatcccaaattttgtaatcctttggcttttgctataccataatcgcaagtatcttcctaaaaatcactatcggtggagtgattaagctaaaatggagttgttaatttatctttttccataattcaaaacacacatgcttgctatctttaaataacacactattgaaacaattttggtagatcaacaccaacacattttattttgacttttggcaaatttatccttcacttgtaacaacaagacaaattggttcgttttttcgaa

SEQ ID NO: 68805 - DNA, 2868 bp, Arabidopsis thaliana landsberg
ttgataattacacacattacacttggtcttggtgctatctatcctactttctatgactaaacgtcggacctaaagtagcttagtcaacaagttaacgttggaatggagatttattcagttttaacgataaacgagagatattttctttgcttaagcggaaaacttttgtttgttattatcccttcaaatatatgtaacaatgtacataatctttcgtgcgtatatatataaccgaggattccaaaccaactcggctttaatccacaggatatgtaaaataattaagtattcttgtttaatagttacttcggatcatggtctctttataatcaacatggtgatttatttaaccattaaagaaaatacatatttcttaaacttttaagatagattcatgtcgttaggcgtaaacatcaagccgaggtgcattagcactaaagttaacaagtcgaaggaccatatatgttctttaaatataggaactcaattcttatttggagaaagactttgctttgtatgaacttaaaggccgggactcatggaaacatatttttttataagttgtaaccattaagttcttcatggaaacatgaaagcttaagattctatttccaaattcagtatgtcgaaaagtggatcctctccacaaaaacgtactctgatatctctcaaaatagaaaatactagtgcatttttttactactctcatgtgacacagaccatcacaatatatccttcagacattacttcttcgtcttttttcttttctgtttcctattagtttatttacctcctagaatatatatttgtaataaactccgaatgctttgtcacctcgaaactctcagaacgctgcaatagctaaaaaattcctcactgaaaaacccagtcattgggccttccatgaacctgtaaggcccaatcccatgagtgcatccatttccaggttgacaaggagacccaactttggtggtttccctctgcattgtccttgtctttcttcttcttcttcttctcaggcacgacctggacggttttcttcagcttgcgtttcaaattatctgtcacagacttgatgtccattgttcccatgactgttaccgtttccttctctttgtccattttgacttgatacactcctattgacaaaatcacatactcaataccattagacacagattaaaatggccgcaaacaagttctgtatgagtcaaaccaaatacacaaagtaatagtcaggaaaaattcttacccttggtcgtagagacagccttttgaattctcttgatgcaaccatcacaagagcaattcactttcaacaccactgtgctcacagcaacctaagaagaagaacagagaatataatgtcatagcaagtaatttcgaaagactaaagtacttattaacccatatgatcacctagaagataacggctatagtacattatctacaaaggaatggtacgagttaagaagattgttacttgaggatcaagtaagcctgagaaaatctaccttttgatactacttacttccttactagttatcacattctagtcatggtttaagtgtttgtgagaaacaaatgtcctaatcagagaacgtatgcaatgaatgtagagcttaccacagtctgagtcttatcattagcctttttctcattgttctctttggtgtctttctttggtttaggagatatcagctccactttcttcttgctcttcttctgaagtttctcagcaatcttcactggatccatgataaacccaatcagagtcagcttgttcgaatcaggatctgctctcactgtttcaactcctgatacagtacaacaatcagaacaagtcaatgagccattgagcatcgatagcaatttcttgtataccaacaaaaatcatgaatcaaagactcaaaaattgactaatttctttacaatcgctgtgttttcaatagcagaaacagagaatatttatgatcctgaaactagatctaagaagaagatcgataaacgtaaataaacgaggaagagaacaaaacttcgtcagggtttagggtttaacaaaaactctcaatcgctttcacgatgctcgaaaccattatcggagaagaaacgaaacaaagcaaacgattaacacggatgattcgactgagatttcagcaacgaatccatgaaaatccacaaaacagagaaatcgaacccgagataaatgcgaaacgagattgtgttaagaaacataacgaatccatggttcatcgatttagatttctagggttctgaacggagattgtaccttctaaacgacgagataagcgaacgattctagcgatacagccgtcacagtgaaaatcaatcttaagaacgacgtgaaccggcgacgtcgtattgttctgtttctttttcttctcctcctccacatctccgtggtaacattcacacacttgcggattctccattttcgtctctaacttcttctgcatacaggtttaaaaaaaaaacctcaaaaaaaaaaaactcaaaaagcaaggagacaaacacattagcagagacagagagaaccttgatggaggatagagaatagagactggagtatctgtctcggtttcttcaaaggaaaagtggagaagacgacgaaaatgggtttcagagacggctgcgtaacagaagggagtgtagggaggtggttcacagtgtacgtacaactttgttatagtcctttccttactcttgctttttctatttttgttttcattaagatcatttatatattcaatattcctttttttaaaaaatgaaataagttctattaaacaggttattaaaaaaaaaaaattgttagtaatttgagattcctatttttgtgttggttct

SEQ ID NO: 68806 - DNA, 434 bp, Arabidopsis thaliana landsberg
tcgcatcagctcttcctggaatgtttaaagttctcccggcgatgcccattaaggggggcagggggccgtttgaaatgccgaagaaccagtgcaactggaacagagttttttaacacatcgataaccttgtatcgctaccgcgttctgcgcagtgtgcattatgcctagatacgaaaaaaccccgctaactggaatgagcggttttctcggccaagacctaagaagtggaatttctcgctcataagggcggtacttcctggggcaacgtgagcataatgctgggccaagacctgatcgaagtaacgcttgtccgtcatgttctgcacgttgatctgcaggtttacgttcttggacaggcgataggtggccatggcgtcgtatcgccagtaagaaggcacttgcaccgagttggcttcatcaccgaatcgcgagtc

SEQ ID NO: 68807 - DNA, 142 bp, Arabidopsis thaliana landsberg
acgtggggggacctttatgcaatacaaatggcgctaaactgtagacacagtacacacattcttttttttaaattggataactatatatgaaccctaacctcctcttctttttaagcctttaaaattaataacaatatgatcc

SEQ ID NO: 68808 - DNA, 959 bp, Arabidopsis thaliana landsberg
cctaatttcatcactccaagccatctctctcttccttctcctcatgttatgaccccattgatgttcccaacctctagagaaggagatttcaagtttctaaccacaaacaacccaaaccaatctcatcaccatgataataaccattacaacaacctcgacattttgtcacccacaccaactataaacaatcatcatcaaccttcactttcttcttgtcctcatgataataatctccaatggccagcgttaccagatttcccagcgagtaccatttctggtttccaagaaacccttcaagattatgatgatgctaataaactcaacgtgtttgtgacaccattcaacgataatgccaaaaagttattatgtggagaagttctcgaaggcaaagtactatcttcctcctcaccaatttcacaagatcacggcctttttcttcccaccacgtacaactttcaaatgacttctacgagtgatcatcaacatcatcatcgagtggactcatacatcaatcacatgatcataccatcatcatcctcatcgtcgccaatctcttgtggacagtacgtcataacttaagcaaaccctattcatactcaatcaatgggattccttgacatgggtacgtaataaatacctatatacgtttgatatctatatataagaaggaacgagtgaacataaataatcacccatatgtgtttataagtttttttccatatagtataaggatttgtgatatgttacatggattacttttcatatatattgcattgattttgaataatggaggaaaacataaatgttgataagttcttcttaactattcaagttatagtcgagtgagttgtggaaaaatgttactacatatgcataaagttggtccttaaacacagtttaatgaacacgtacaaacatacatatgtatgtaaggacgtatatgtgaaggaagtacgatc

SEQ ID NO: 68809 - DNA, 719 bp, Arabidopsis thaliana landsberg
taagagtaactggctgttaaagaatatatgtctccattgatcagatatgattaacaaaataggacaacaaattgaatgaaggaaaaaaagaaccaagtttcataactatagatatggtgttatgtacaaagcgctaacacagtgaactagccagtgtggtatggtgatattcttaagaaattttgcagactaaacaaatcttcccaaccccattcgctatacactaccttcgaatgccatttcctacgtctgtgaacctgtcgactaatcattcttttgttgtttgcaccgaataacagtgtttgacaatgcaggagttgcttcatagttcctgtaaaagagtcaagctcttaggcttattagcagcttctgacttcattcaagtggattcaaccttggattatacagtgtagtctccaactgatccgtttcagatttatatgaatcacaaagaacctgacatgcttcttcaagaaggtctgcgatctgggagcagaagagcgccagttctttgaaagaaatagcatgaatcatctttcgccagcacaaatcaggtgagcatgttaccctttgacgtacacagccttcaagcattcctcttttcaacagttcatgacttcgagtcaccctttcgtggtattgaccctgtgaaaccatgagctaggtcggatgctctgagatctcaagtaacatagtatctccaccagtgtatgatgttc

SEQ ID NO: 68810 - DNA, 431 bp, Arabidopsis thaliana landsberg
tcctccacacttctttcaacattagcatcatttgcttccttcttactcgtctaaacaaagttgcgcttgaagcgattactaattttgtgattagtcacacactaaaatcacatatcttaacaatcttacccgcatgttacttgcagcaatcaccatcaaagccagagagtcagagcagctgttgtgtctagcctccatgcaaaaccaccaaactccattttccacacatcacacggcaccgttttggtatactttgtttccttccacgtgtattgcatcctcaccctacacgtgaaagcttggtagttacaatgcatcgccgccgttgcctcctccgccaccaaccacaccacaacttccggcgatactgacgccgttgaatcatcaccggaaacatttctccggtaagcctcgttgacccacaccacacg

SEQ ID NO: 68811 - DNA, 608 bp, Arabidopsis thaliana landsberg
  unsure (1)..(608): unsure at all n locations
cgctatctacccattttcagtttgagtgatggagtgtgggaatggttttccaggctcgttacacttcgcacgcagagtgcgggctggtagatttagatttgtctgcactctagctgtaacttttccgttggatgagcaaaatctggtttgtgtgttaaatctgtttctatctcctgttttgcagatggctcgcaccaaacagactgctcgtaagagcacaggtggtaaagcacccagaaaatctttggtacttaaatttcaaatttccctccgtttccgtaatcctgtgatctcgcgtctagggcaccaaagctgctcgtaaggcgcacaagatggccggttccctgtccagcggaggtgtcaagaaaccacatcgatttcggtaaaacaaagtctgtcgcattcttccaaatctgatcccatggttgtttagccctggcacagtcgcactcaaagaaattcgcaaatgtagctgctagccttgttgcaagcttggttgtccatcgttggtcccgatgtgtagatcaaaagtcaaccgaactgcttctgcganagctgcctttnnnnnnnnnnnnnnnnnnnnnnnnnnnngacttcaagaacgatct

SEQ ID NO: 68812 - DNA, 1877 bp, Arabidopsis thaliana landsberg
ctatatagtccaatctagaatcttaaattaataacttatcgatatatatatatatatatatatccatatatataatatgcaatacataccttttatttaaatataaatataagcttatcaaagagttacaatgtcaaaaatacgatgtagccatgaaattgtatttttatatattgataaggttataaacttattaattttatgatatattcacattttataagatatatatattattcagtatatatatattgattttattaataagtttataaataggtgcactctcatgggccatggctacattgtatttcagagacagtacctttttctatgtaaagtattcaataaaataatttgtggaaaaaataataaaaaaatcatataatttgtggataaaataaaataacgaacttattgggtctttagctttaagcttctcggcccatagtattaatacccaccagccttaaatgatatcgttttgaaaacaacccttgaagattctatctagcccaatgttcgccgtgtaagaagatgaccactgagcaaaaaccacgttaaaaccctccgcctctgaaattccggagggggatgaaatggctgcaatggctcgctgtgctttgattccatctataaacccagctcatagcttccgtcatcagtttccgcaacccaatgcgtcattctatttacctcccactcttccgattttttcgcgtgttcggagatttggaatttccggcggatatcgccgccgtgtgatcaccatggccgccggaactgatcactactcgactttgaatgtgaaccgcaatgccaccttgcaggagatcaagagctcgtatagaaaactcgctcgcaaggttactactcttcgagattcaagtttgtttttgttttttctttcttcccattttcggtttctctcgaattgaattgaagcttagggtttgtaatggtgtaacagtatcacccagatatgaacaagaaccctggtgcagaagataagttcaaacagattagtgctgcttacgaggtaacacaagttctgtcatctatcttttttgaaatttctagttttgattgatgaagttttgttgcttataacacctgggaatgaagcatttgtgtaggtattatctgatgaggagaagagatctgcctatgatcggttcggcgaggctggtttagaaggtgattttaatggatcacaggatacttcaccaggggtaagtcatcatctttgaactatttcttaggatatcagaacattttaattgtttaatgagctccttgattctattcttcattcttcaggtggatccatttgacttgtacagtgcattctttggaggttctgatggattctttgggggaatgggtgaatcaggagggatgggttttgatttcatgaataagagaagcctagaccttgacattcggtaacatttttactttgtttatgagctataaatacttttaattctgttttttcatgaattggcatttgcttactgtccttacttgtgtagtgagtgataatttgctataggaaatcagagattattgttatttacttttgttaggctaatattgtggtcttgtcttgtctgttagctgaatgtgttttattttcttgataatggaggaagttatctatctctcataatctttgtttctggtttgattgcggggacgtgtatactagatatgacctgcggttgagctttgaagaggcagtttttggagtaaaacgggagattgaggtttcttatttagaaacatgtgatggttgtggaggaactggtgctaaatccagtaactccattaaacagtgtagtagttgtgatggtaaaggacgtgtgatgaatttt

SEQ ID NO: 68813 - DNA, 642 bp, Arabidopsis thaliana landsberg
  unsure (1)..(642): unsure at all n locations
aagggggggttgatttatatggaaaatcatngacacttttaatgtgttttttccaagaaaatatgattgggtgttaatggcattttaattctatcttgtggacaaacaactttatccgtgaatttgtcggaaaagcaatttttacttcttttttttttttttgattgatggaaagacaattattagcgagaaagacataccttgaggagtacatttaacaaaaaaagggttattgaaagtgatcgagtgatccacctatcatataggtagaattctcaattaagatgttgaatcttacaatatgattaacgagaattttgaatttgtagaaacgaaattaaagaatttggtgagcaaaaattgatataataagctaaacaatatggttaacgtaaagcaagtataatagtaacataaatggtaatttaaaagagtatactaattatcaaactataaatagtttattgtttacattccagatggcttaaacaactttgtttgagaataattacctaaattgaaaaaacatactcaatatttagcccagcgtgaccattttcgtttctaacgatgtatgttgtaatgacacgaaattttgtattaatatgatgtgttgngttttatgtgatcaaacaaaaaaaa

SEQ ID NO: 68814 - DNA, 608 bp, Arabidopsis thaliana landsberg
  unsure (1)..(608): unsure at all n locations
aggacgtcgcttcaaacggcttggtgaggtagtcgtcggcgccgatttccagttcgcgctcgacatcctgcgtggcggctttggcggtgagcatgatcagcggaatggtggcgnnnnnnnnnnnnnnnnnnnnnnnnnnnnnnnncccgtcgataccgggcagcatcaagtcgagcacgaccagcgccgcctgcggccaacaggtcagggcctgttcgccatcggtaacccagcgtaccgcgtaaccggcttcgccgaggatggccgtcagcaggtgcccgatgtccggatcgtcttcaacgcacagtatgggttcagtcatgctcgtgtccgctcacgccgatcactttacaggtccgccccggggcgggcatcacgaaagtatccaccgcgcgtgactcatttgtgatgactgtctgccatggggctgtctagtgtcgtggtggaggttgcgtcatcccgatgcgactgctcgtcgcgccgtgaacccggcgcagtggcacaccatgagtaacaagaggattacaaccatgtatgacatgaaaaacctgtcgcgactgaagaagctcgacgaacttgcaccggacagcatgaaagcgttctggcaa

SEQ ID NO: 68815 - DNA, 650 bp, Arabidopsis thaliana landsberg
aaattccgtgaattcttgctaagaatcatggcccaaagagagtctctatgttaactactagatgtgcacacgcatatgctataaccacataatattaggagatggacggattgtttcttccttctggacgatgacggaacatagtccgaaactgtataactggttgttctataaaatgaaaagactatgattaaaaaaaaatggtgcacaaggcacaatgattattcataggacaagtcagggaccatcacataggacaaataagccaagaaaggccttatgaaaaatgtatgaaaaaacttacggacaaacggactatgagctatgttttgagatggaccatagcaccgatgattacgtctcagatgaaacagcccgaccagatgcagggcttatgaaagcgtgcaagtccagtacttgagtgcattgatgagcataaatacgcaaagctacctaacatttgagactttttattatttaatgcatggtaacacgaactatcttgggaaatgcttaaacataaatgataaccttgcggcaatcatctgaagccagacagcacatattagagtacacttaattgtcaactaactgaatataacttaaatttaactctgatactaactattaccgttgctacctgtcaatca

SEQ ID NO: 68816 - DNA, 717 bp, Arabidopsis thaliana landsberg
gataccagccatttactcgaattggtaatgtttgtcaacagcaacagagacatcccaagtgcaactcattcctttagggaaaacaacaaagtcgcctgcttcgatctctacgccttcatcggatccattagggtacactttcactttaccttgtagtaaataacaagtctcctttgcactgtaagtccatggaaacttgcttggaggacaaccccacctgtaaccatcaatttcacccacaaagtaagaaaaatcttcatcaactgctttatagcaaatgccaaaagaaaatcaacactgagaaacttgagctatctagcttctacatatgacaaaagaaagaagctaaaagattgttgattgttgaatacacttaaacaaaaacagaaactagagcaattgcagatgacttatacagtagcaacaacaaacaaagcttctttgagcaaagaataaaggtgaaaactttcggtcaattgatgtaaagatttgtctaatttaaccacacaaatatgagttttagcaattgaaagttactaatgccatgaaacttgcttggaggacaaaccccacttgtaccatcatttgacccacaaaatatgaaaaaatgcagcaactgcaaataacttatgccatggaaatcgataatgagaacctgcagctctctggcttcaacatatgccatgatcatggagattgaattccacaacacaacca

SEQ ID NO: 68817 - DNA, 271 bp, Arabidopsis thaliana landsberg
gatcttcaagatctaatctttttattgacttcctctttatacattgcacctctatgagagtgtccgacaacggtctatcccgttaatctaacaacaaggcgctgtgtggtcttacagttcttacaagacaacatactgagcgtaaccctaagataaatttttcggttaataaggcacttctgtataacgagacatacatcagtccctttgtctcctagtcgttggcaacatgcgctagcttgacaattgagtgggacaccccgcgttttac

SEQ ID NO: 68818 - DNA, 574 bp, Arabidopsis thaliana landsberg
caaccacaacttacattttagtcaatgtaaacttattatttggttgtggatcttttcaattgcatgcatgcagcaatgcatgtgatttggctgcattccttaaatgtgagaagtatattccaacaactaatgtaaatgagaaaactaaaaaaaaaaaaattgaagatggacacaaatgaaccagtattgatttatttttctgtgtggtagaatgttgagagttgtggccttgtattgtccacatgaaagtacacctggtcctcacacgttcttatcttgcaagttcataattaacacacatatatatatacctttgaaaataactcattaatttcgacaccatgcatataaaatacatgattagacctatatataattttcccaaaaaatgaaaaatatatataatcaagtgaaaaagcattaccaaaattacacatcaaattaagatggtctctatcgtgtgacaaagaaaatgcggtctccatatgtatccttgagaatactgatgatatatggatttggttgcattggttcaatctcattaaagtttcgcatacaatccatttatgtgtgc

SEQ ID NO: 68819 - DNA, 362 bp, Arabidopsis thaliana landsberg
tctcgatgagatggagggcgcggtggtggttgcaaatattagggtgcgagccttggcggagcggtcgctagtgcacatcttggtggtaggagcaaatattcaaatgagaacttcgaaggcctaagaggggaaaggatccatgtgaacggcacttgcacatgggttagtagatcctagagacggggaaaccccctattatgaatagcaggactaacaaggagtctcgatagttgcagaacaatacgtggttaatgtctgcatctgaaaagattgcaccaccgtctttgggttgatcataatacttctcaaaaatcgaaattcttgatcaatggaggaccaatatacccatttttggttaaaaa

SEQ ID NO: 68820 - DNA, 535 bp, Arabidopsis thaliana landsberg
  unsure (1)..(535): unsure at all n locations
acaagacctcacattgatggcgtgtcttcaatttcatcttcactgttactgtatcgtctccgaccttctgaacgacgtcattgcagagtaagccgaagagctctgacctgtttagactgaatattagccggaaattctcccagattcatcattaaaaggtctgttccactagtccatataatcttactttcttagtcgagcttattgtttgaatctccttcatttttaaagatttagaatatcagatctatatccttattgcttttggatcggaaatttcttcacccaattgaaacgccttactattagggtttacgcttgtgtacaagatgatcgatgttaaacatactgcctcttgcatatgtttacttctctgttattcccatgtttagtctatatcattgttaatagactaacttnttatgtntttgcagttctttttcaactgctaatctaatggcttcaggtcctgatgaagtgacagcggacgtgaggtaatgttcagcacatccttgttgggttccaatgattatat

SEQ ID NO: 68821 - DNA, 399 bp, Arabidopsis thaliana landsberg
ggcgtcgttgccggcctcgcccagcgcgtcgcggttatgtatgccggccgcatcgtcgagaccggcgccatcgacgaagtgctcgataggccggcgcacccctatacgatcggcctgatgcgcgcgatcccggccaatgtcggacgcggcgaaaagctcaaccccatacccggcatggcgccgtcgccgcttgcccgccccgccgggtgcccgttccgcaatcgctgctttgccgcaaccgacatctgcgccagcgagccgccgctgaccgaaatgcgcgacggccatgcctggcggtgctttcatccgcaactggtcgaggtggcgtgatgcagccgatcgtttccgcgcgcgggctttccaagcgcttcacccgcaagctcgattatgccgaaaagc

SEQ ID NO: 68822 - DNA, 592 bp, Arabidopsis thaliana landsberg
  unsure (1)..(592): unsure at all n locations
agaacgacagaggagacaaataggtcaacttcagagaataaagacatgggtacgtggacactagtagccacacgtgcactcaatcatcacagttatacatgcatatatgtataatatatgcttttatatttataatatatggtttttatattggtattataaaagaaactcaaattttcctctcaccggaagccgacgagtacttgaggacaaaccaactgacattctttaatctctttctatgggttccactctcttgcccttttgttactctattcaattactccttccaaccacataagcatttaccattaattctgaaaattatacaaattaaagggtatagggatttaaaattgtcttatggaatacatttttgtacttgcgtttgctccaaaacgaatataatttattttaagaaaatactaaatttgatatatcccaacttttttatgtttccattaaaagaaaaaattatcggctagaaagttgtaatttgtgttaaagaagcaatgataccaaaataagatttatttccttctcgttcctcgaataaaaagcatgcaacctatatattagtatgacattnttg

SEQ ID NO: 68823 - DNA, 636 bp, Arabidopsis thaliana landsberg
tttattatcatactcagggttaggcctcctagctagtcctacatgcaatggctaaccaaaataacacatcagaattcagaagataataagcaaccagaatgattaagcatgaatttcagaatcaataaaatgggatatacagattctatattgatgtgtattttgtatagagtttagctaaattaatgaaaattattaacaagcaaaaataagcattaagagatcaatttagtgcaagtggacaactgttacctatagatttttaaatacaatttatacaagataaaatcaattattctcaattaaaatttttattttaaagatttcttaaaaaaataaagatagataactaattattagaagttaaacatttaaagaacatttaaaacattgaccaacaatagatggaaatttctttaagagttacaacttttggaaagggttttatattcataatttaccttcattttggaaagggttttacattcataacttaccttccatgaaaatctaagatgagagtttgccacaggtcttatttaatactcgtctgaacaagctcttgatcctagggacgaaagaggacgagatctctaagaagagcatcgatatgaatgtaagtcattcttttttcta

SEQ ID NO: 68824 - DNA, 621 bp, Arabidopsis thaliana landsberg
aagtcttcggcgccttcgccaggcggcgccggaacgcgctaatggcagtccgtatgccacgatcaacgcgctgtcgctcgccggctggcgggcggaccacaagcgctgggtgatgttctgctttttcggcggtggtctcggcggcaatccggaaggcgacggcctcaaccacggcaacaatccgatctccacggcgaccattccgccagcggagattttggagtcgctctatcccgtcatgttcacgcagtgggcgctgcgccccgactcggccgggccgggcttcaaccgcggcggctgcggcgccatctacgagatcgaggcactcaacgagggcgacaccgacgtgttcctgcttggcgagcgcggtaagtttcccccgtttggcgtcaatggcggcaagagcgccgcgctcaaccgcttcttcttcgaaggcgagggcggcgagcgctcgccggacctcgtctccaaaatcaccgatgtgcgcatcaagcgcggccagcgcgtgcggctggagacgcccggcggcggcggcttcggcgatccgatgactcgcgagccgcgccgcgtcgcccgcgacgtgacgctcgctacgtgtcgcgtgacaaagcgcgagcgata

SEQ ID NO: 68825 - DNA, 256 bp, Arabidopsis thaliana landsberg
ggtctactattgggggaaccagaagtgggcaaaattttagagcgaggaccatgaatgaaactagagctggcttttagactgccgcctgtcgggccaaactcatgcttatcgctgaaaaaattaaataatttgtgcatgggttttttttcacaaaagttccttcggtacattgggttaggtataggggccaaattatcggatcacccaagaggccctaatccgcataaaagttttcttttcggtttcaaaaaaaaaa

SEQ ID NO: 68826 - DNA, 1636 bp, Arabidopsis thaliana landsberg
gggagtggattctgttcttaagtccgaagggcaatttgtgttgtagttagctatttgtattaaaaaatagaccgacagtagtgatgaacggtttcaggcctctacttgatcatatttgtacgaatacacacgaaagcaaatgcttcgttgttaatttgtaagtttcataaaaaacaaactcaacatgaagaaaagttactaatatgaatcatcaaaggaaaggtttcgatatgtgctcagttggggtagtcgtcattccctgattcttttgagaccatttggtttctttgaattcattttctcaaatcttcaaaacattcatgaggcatgttgtattattaagacaaggcaaacatgttccaagagtgagaatagaaaaagtttcaaaggcgaaagtctggaaatggatggataatcagcatttcatgttgttcccaagaagatactctggacgagaaagcagcacacgtcttcgttttagattcaggacctttattgagacttacgttcccaccattccatgaacttaacttgggctgccattgtgtccaacttgtagagttgcagtgtgtggttggcgacctcttgcccaaaggtccaaccaaaaacacctcctcctaagaaggacaatgcagcacctgtcgcaccagcagtagtttagaggtgtcaaaagttggaagaaaaataaacagcaatttagtattgagaaacaatgtaagcgccatgagaactgcataaactttcaaaccagtttccaagtattatcaatataggacataaaggtctaattgactcccaaataatcccattatccctgaattgcaagctttgtgtcttcgtttgaagaaacaagtgaggtttataaagagcaaatagttattcacagagagagaaatgtcattaccatgtggactcctggagtatttccaggcaaaagcagcagtagagacagctccaagtgcagctccggtaacaccaaacgtcacagcttccctagccgttttcagctggataggatgaccacaaatacacaatgagtaccaaacgtaagatcttcagtaagaataccaaataccaaaccaacagttcagtttttgctaggttttttatggcatccgacgacgatgcagtgggcttagtcctcttgtatctgtgcttccaaggactaaagccagaaaaacctagcctagtggaactttattatatcaaaaagtaacagaaactttccaatggaaaatcaaatgaagaagaaaaaaataaaccgatgacagcagagtaaaatcgagtaccagccgagtcatagataatggaccaacaatatctatagattccaaaacacagagcgagagaaagatagaaggaaattacggtgggtccatgaacgggatcggaggcaatgaattcctcgacgtcggaggaagaccaagaaggaagaggcgcgtcgcgtttggtgaatctggtgtaattttcgaaaaatgataacctatcactccagaaatccttcaatccattccaatttttcccaacaaatgactccgaatctcccatctttctcagatcgattaatcaatctccttctcactgaaactttttctctgattggagacgattattatttgcagaataaataaaactg

SEQ ID NO: 68827 - DNA, 2331 bp, Arabidopsis thaliana landsberg
ctccctcttttagggttctatttatttttcttttcttacctcaattcataaatgattccattgtagtatgtctggactatgtctatgctggtcatttcattttgaactattttcctccattgatggttgccattttttatgtttgctttgcttacaatgcagatctcaatcaagtttagctttttggcgcgtggataattctgttggcagtttcttacctgcggatccctctacgctcaacttattaggaagaccctatgagctacgccacatattatttggatccactgcagtcttgccaaaagaatccagctacttggatgatcgtactactcctgataatattattcagcccacacggccacagccactgaattctgttaactctggtcatcgatttgaagctgttgccacctttgagttgatatggtggaataggggctcaggctcgcagaaaaaagtttcaatatggcgaccaatcgtttttgaagggatggcttattttggagatattgctgttagtgggtaagtcataatattatgtactatgtcgtttagtgcatcctattgtacttgcaagttggataataatttcttctggggtgaatgtgtaggtatgaacctccaaactcttgtgtggttcttcatgatactagcgatcaagagatcctcaaagccgctgttgatttccaacttgttggacgtgtcaagaaacacaggggagtagaaagtatatctttctggatgcctcaggctccaccgggttttgtttctttgggttgtgttgcatgtaaaggctcaccgaaaccatatgatttcaccaaattaagatgcgctcgtagcgatatggtagctggtgatcattttgcggatgaaagtttgtgggatacctctgatgtctggcagagggtagaaccatttagtatatggagcatagggaatgagttgaagacctttattgtccgtagtggtttgaaaaaaccaccaaggagatttgctttaaagctagcagaccagggtttgcctgggggaactgataacatggtcattcatgcagaaattgggactttttctgctgcgctatttgatgactatgggggactggtaagagaaccaaacaaatctgtgtggcatatttatctgtgtgaaaataatggtgtatctatgtactttgcagatggttccattggttaacgtatctttgaacaatataagttttggattacttggcaaaaccgactacacaaattcaaccatcaacttctccttagcggccaggtcatataatgataagtatgaagcatgggagcctctcattgagcctgcagacggattcttaaggttttttttctaattgcagtgccattttaagtctcaatagtgtagaaatgtttatgtctaaacactttgtgggagcgggtgatttgctctgtttattctggttgttatataatccaacaaatgtggagtatactatatataatggctatgttccatcatgatgcaggtaccagttcaaccctagatcctttggtgcggtttctcagttgcgcttgacatctacaaaggacttgaacgtgaacatctcagtttcgaatgctaatacaattatccaagcgtattctagttggaacagccttagcaatgtccatggataccataaagagagagtgagaacttttcttttggtccttctgtgccactcccttggtgaagcagaggcttattcagctttaccttctcttttgaagaagtcacgttttctttctctcttgatttacacttgctattttttacagggagcacttcctttagttgacaatggaaaatctgtcattgaggtgcatcagaagaaaaactatttcataattccacaaaacaaacttgggcaagatatatatattagagccaccgaaatcaaaggatttaaggatattgtaaagatgccatctggggacgtcagacctgtaaaagttcccgtcttgaccaatatgttggattctcacctcagaggagaactatgcagaaatcctagaatcatggttacagttattgtgatggatgcacaggtacctttctgcttaaaacaaaggttacattcgttttggtgcccttatttatatattctacctcccaggcgctcctgcatctccttttattgtcttcttttacttctctatgctgataaagaaaggaaatgagtttaatgtgctttcagtttcttttatcctttatggcttacgcctctagtgacttttttactggggtaatgagttatttgactacacaaaagttttgagaagttgtatgtggagtaacctggtttctaca

SEQ ID NO: 68828 - DNA, 921 bp, Arabidopsis thaliana landsberg
tgcactcagaaatgtcattcaaccaagtcatcgtctctcatctcaaccactctctttgcttggccaatggtcaaagtttatatcaatttatatatgtaaaccattatcatataacttatttatctcattgtcataaatctcttttctcattaccattacttacacgacttagactctcatcaaactgaacttctgtaaacaaatagagagacaagggttgaaaaaaggacagattgaaagactgcacaatatttttactgtatttcaagtttcaaccaataaaatttatggattggaggcaaattcatcgaatctacaagatcacaaaattcacaaaattttattgaatgaaatataaaaatcattaaactattttaagaaattgatcacttaacatacaaaatacataaattgttatttcgaaaacctatagacttcataaaatatcgcaaagtagcatataacccattccgatttccgcatattatcttggtataagtaaatcaaccgatgcgatatcaatccatcaaaaaaggttttaaaatccatatttcgatcattagcaacgggtaaaaaatatatttgtttaggtctctggttcgaaagagattattaggaagaatctaaactttttttacaaaactaaaatccaaaacaatttaagtactagtactagaaaagaacataaatacacattggcatagccgcaacataaatggacacttgcaattgcattttccaatgtctcttctctgaccctctttgaccttcttcttctctttctcattactctccttctcaatgaaagatccgaaaacagaagagagatatatataaaaaaaaaaactctatatataggttttaggcctttattagccggatccccaaaaacttttatccctcttggcatttacctttctt

SEQ ID NO: 68829 - DNA, 626 bp, Arabidopsis thaliana landsberg
atatactggcacatctctaagtattttctatgcattattttatactatatagaaatgcatggaagaaaggaaggaagcaagttcttctaaaaaataaacacatgtatacataaattaaggttagatgatcttaaaatgtgtatctcatgcaatttcgtacgacgtcgaaaagattcgtgtgtgcggcttgcatcgtttggtaattatcaaaagcataatattaatgacgttccatgcacgttacaatcactgaaatattgaattatcccttatcatagaaaagaattctcgtttttgttttttggtaattattctttgggaattagtgtaattattaattcagggatcataaagttttactatagcgtattatgggtaagcgagcgcatatatgcacatatatcaatgattgaaatttgcacgagaagcaacgtacgtaattatagggattgaattccatttcattcatcaaaaataaatggaaaggacactttttgtttcatgaaatattcgactcgtaagattttaaataagtcagcatgcatatgatatgaagttactttactgtatccatcatttgggataataactagctctctagacgaagcgtgcgatatagctatagt

SEQ ID NO: 68830 - DNA, 438 bp, Arabidopsis thaliana landsberg
agacataatacgacccaccaagggaacaacgcaaccagagggcatggcaaaagagtcgagaaagatagagaagaagcatagtcgcagtcttatagatgatttgattgtggtgtgtagagaaccctatgtctccctttttttttttaaccaaatcaaaaataaaatcttaggagagaaagttggtggggtcattagcggaatccgcgggagtccatgtgacttttccaccttttactttataacaaaaaccaaaagaacctctaattcaagctaatcatgcactatgttcctattcttctcgttgcaatattcttatcttctagatcaaatatgcaaacatgtaacattgatgatattgcatgcaacaagacaaatgttgactataaaagtcaataagagaccatccactctaagtagcaagataaccacgcattagaa

SEQ ID NO: 68831 - DNA, 1601 bp, Arabidopsis thaliana landsberg
ccctgacacgtgtcaacagtcccaagaataggatcagatagtggatttttaatttctttaacctttttcttcaacctatatcaatcatgattgtattttcaattctcaacaattttacaattccttagagcttagctaatgaagctgcgtttacgtacttacaaaaatctaattcattttgtgttcaactgaagtttatattgaccaaacacattccggttctgtgactggattagcaggatatttttacaaaatatgtctctctactacgcccatactaggataacagttttagctaaacagagacacttacatggaacgtacaattgacacatccacaggcggacctccttctattgtatttattatctcctgaatgacatcaggaatgtcttccccctttaattgaaaggcttgcctataaagaaaacaatgagaactgtattacagcacgcaaattgaggttgcaatatgcaaaaagagtgttaaaattcatgtgttcttccgcagcattaaactatttcatacttgaatttgactcgagcttgagcatagcgctccatccgtaacaaagcaagaccccatgctttccacacggggaaaacatcaatctgaaattaatcaagtaacacacgcagaagttattgcgaatttttgatgaagtggcctaaccatggattagataatcaagtataaaattttaccttgcatttcttgcacatatacaccgccatactatatcgttcatcagatattaatctgtctcgtagacattcggatgacaattgatcagcaatgtcatcaagagaagtagaaattccagaccctaagaggctctgcagcaactctgcgcgccccaaccagatttctgtaagtgagagaacatccgatggttcatccgttgactgactgccaacactggagctgccagcatcagaagatatatcatcaacatctctacttctttcaccattgttattggtcgattcagtggtacctagaagctttctcagcaatgattttgcatacgacaaaccctgcacaaacaggcaaaaaatagttgctttaatcatccaaatcaggtaaatgaaatataggacaaacaagatcaaccacgtatctccctgatataaaagacaccctccaaatatgattcggggaagataattaaaataaaaactgtcatacctgcacaaatgcctccgttgcatgatatgctcggccaattgtttcaacagacgcaccctctgacaactgtttggagctcaatacgtttttcatttgactgatgcataggtccatggcacttcttgctgatactagctcatctgaacaaagtgatagtagagcctagaaggagagcagtgtcaaagaagtccgaaacttacacttatttccaaaagtgtaaataagcatagcaataccttaaagagaataatatctggggtgctttcatacttgtgagatgcacgaacaccttcatctttggttttgtcgccagttagcatccattcttcagcaatagaaacagaaggtagcctatcttgcccatctgccgaataagatgatcccggtctgcttaaaacctgtcatcgctaccc

SEQ ID NO: 68832 - DNA, 3135 bp, Arabidopsis thaliana landsberg
ccatgacatgtaaaatcacaaaataacgggtactaaagaaatcaaacagttccattattttaagaaaaattaaaattctagtgtaatggtacattgagggaagaagaatgagcattaaaaatgccatgaacattccactactattacaccaaatctgatcaatcatgtcaacaaacgatccatcaaaagcatgttctggtccagaattaatccccatggactgtgtaccgttcccatttctttgtcgggtcgtaaatctgaacaattataatgcaaaacaataagattcaaagtctagctgagaatgaaaagtgcagagaaaagattatttgagagttacctcccatctggaagcagggaatatatgcttgttcttctcgtaccaatgcctctccacaactttacccgcatgcgacttcattaacaccacattttacaatgctttagaaacaactttccatcatcaaactactctcttttctcatgtgatcgggtcagggaaacatacctcgtctttctctatcgttgcatctgctattgttctcacgtcttcatgcacatcaaagtgaaacagctgttaacaagaacaatgtaggagaagtgagtctcggttacaatttctatataaactgaatttcaaaaagtgtcgacaaggcataccggcccactcttccccctcgctttgttaatgatcagctcatagaaactgtgttgctacatttacaaaaaaataccccatgttatcgttaagtcctatatagtaaagggaggataacttggtaagtttaaagggttctcacatgtggaataataagatcttcctttacatatagtaaattctccactgatgccgtccgaatctcccggaagtcaggggcaagctgctgctgaacagcccgcagaaaattcccaattgggtcacccttgcggacctgtaaaatgggtatatatcataaaggtaagtaaatgatcacacacgtaaggctcaagcagtatgacaaaggtgtagtttgtgcttgcctgaataactcgtctatggccagtcccatcccagtaactgtaagtaatctcaagaggctcgtctgaaaaacaaaaaatagttagacaatcttccttgaatcaagtattacaactgaaattagaaggtaactagaaaatggacaacttttaatctgctcttgttcacgaagccactgcttcttcagcctttcacgttcagcttgttcctccgcctccctctcactgaaacagcaacctcaaaacaccacagctaaagttgagacttactgcaaaagcagacaaggaagatacagataaacaagagagctagagatcacctgtcaggcaggaaattcgtttccactgaggggtccttgccaagttttccgcagcgtaagttccctgtcccagaactctctgcataaatagtgtacatgatagaagttacaaaaaggacaacattagatgatattataaattcctacgcagcaagctatttgcatataaaatcctccaacaaccaagcaatattccaatctacatttgtagaattaatgtctgtaatacatgatgagattctttattactgcaaaagatggagactatattttgtcaacttccatacattttaaaaaggattttattaaatctgcgaaagatagataaatattttttcaacttttacaaaaaggaaaaaagttatagtggtttaattgaatgacagcatgtatcacacctaatcctaactataccacaattcaccattgatgtaacaacagcatattcaggaatcaagttaaaagcttaagaaaatctaataaaaacagtcgaggtagactaagtcctatctacgagattgatgaatgaatgcacttactgttttctccatcatcttcatcactgccattctcaaaatcttcagcaaaagataagcgggaagatcccttaatctttctcttcttgttacgcttctctagcgtgcaactcctcttccctgtagtttaaaaaaaaaaagtcaatcaagcttaatccaaagaataacaccaataactatgaacaatagacctaaaaacaaaactcactcttgctgtagcttctgcagtttctccttctcttcttcctcgaacttattacgaatattaaccctctacatatatcacatacagaattaaacaccacaatctagatgaatgttaaagttggagagtaatacaagccatgactccaattaccttcgccacatactcctctcgtgagactaaagccgctgtttccttcttgaaagcagtgtcaagaatctaaccaaaaacaaatgaattagtcacagcccaaatagcaagataacatttgtgattcgtaaacacttgagacaccaaaactgcaatacaatatgatgatctaatctttttctccgatacttctcagaactaatcgttagaattatactaaaccctaaatattgcggaagctactaagtcagagccagaacaagttctaaatctagtttctaccacaatccaccatttctcctctcgaaaccttagaaatcgattacctcgcacgagctggtgccgaattggagaagaccagattggtcattgccggaggcagacttgctcttgagctcttgtatttttttgcgttcggcctctctttgcttctgaagccgccgtatcctcaccgcatcttgagccgtaccaacgtagccgtcacccatacccgacatcttttcttctctcgcttcctttagctcaaaatcggaatcggaaattcactagattcttccgaccgccattgttgagtgagagagatatgcaatatacgctggtgttcgtttgggctttttatgtttccttatgggcctttcaaataatcttatcggcccaaatattgggcttttgtctaaacccaaaaatacttgatcagttctctaaacccttgattggtttgactatttctcaactcaatcaattgatttgtttctattgacaatcttttcaccatcaaattgtatgaaatttggaataatgatgtcacaatctactaattatgtcaattgtaagcattataaatgcaaacttgtaaaaataacctatttattagagatctaatgaataataggggttacccctaaaa

SEQ ID NO: 68833 - DNA, 548 bp, Arabidopsis thaliana landsberg
gatgatcgtctgatccacgtacacacacgagccgctaaggtcgtcgtatgacggtggattgaagccctgtccgttataggttcgtccagtcgccatatccagtaccgtcgtcctcttggtactggatctgagccttggaccagatcgggtgcgcgtcacggccggtgccgggacggtaggtgtctgtgtcgcccagcatgacgccgacactgtcgaacgacactgtgtcgtttatcgctcggtccttagcgcccacgataggccgaaccctcgttatctgcacatctgttgggatcgtgaacgtggctgcggacttggtccatgtggtcgagttgaacacgtcaccctcggccacctggctggagatcagttcgtttccgttgtagaactccatggtcaggtacggggtgccgccagttgagcccaggaacgagccgacgagcgaaaccttgccaccggccaggtcaatcaccgactggtctaccgttgacagaccgatagcagatgtgagcttggcctcgaccgtgctctctacgacaggatcggca

SEQ ID NO: 68834 - DNA, 1009 bp, Arabidopsis thaliana landsberg
gtccaacgattttcattaaacttcttgctttagcaccgtttcctcctttttctttgatccaaatcataatgcacaactaacgacacacacaatcaaaatggtaaattggtaagttaagtgtgtatgactattagaatgaagcataaccccaagaatgagtatcgcgcggaatatcgttgtagactaaaaccctacgcgtgacccaaagttctaaatctccctaaatattgactaaaagataactaattcttttttaaaaaaaaaaaaaaaaaaaaaaaaaaaatcttataaacgttattgtcaacataacgttatcattaatcctttttgaaacaattggaatctagacatttttagaaaaactcctaaattaaatcataattttttgtgaaaaagaaaaaataaataaacccgatttattcgtacatattgttacaagatagtttgacgtattttctctctaaagtaatatgatggtataaaattaggtttttaaaatttgtactaaaaataggaaaaatccattttctgtttaatttgccacaaactcacaataggagaacatcttataatataaattacttaagccatatttgaccagaaattttcagtggtcaactaaagcgttttggagtagtatatgatttcattgaataacaatgaacttaaatctggtgcgttttaattcattccagttcaccagacattttataaaagtcaatgtttctgaaatttgccatattgattatacacactttcttgaaaaatgcaaagaagaatccagataaaataaaagttacactgtaatatcttaattttattaatataacagcaagcaatatatactttaaaaaaatatatatgtctatgtttgtctaaatgtattaattttaaaggcagtatgatgagctgtaaattaaaatagtaatacaacttttgtttttttcccagttttgtttcttgtgcacatctaaaaatatgcctatggttgtggataacaacaaaaaaa

SEQ ID NO: 68835 - DNA, 2541 bp, Arabidopsis thaliana landsberg
catgaattctacttcagctgcccatgaactttaaatcaatcggtatcatacccaactcagaaccatatataaagctcatgtaaaactctatcctcagaaccatgaaaagataattcgaaatatcaaaggaccacacgaagttcaacacatggaaaggaatgctgaccaacctgccacatctgtatttgttctctccatccaatatctcagtccttgtaaatcgacgcaaagcatcatccagggtgctaatatctccatcaatctcaaccgttagatccatcattttctcacgcagctcagattttacttgacatttcatgcatttaatctggcagagatcataagtaccaggattacaactccctccaaaacaaagtaaaatgagtaaagtacaaatgttgtaggtaatgatacctttgaccggaggtatcccccaaatgtcaaaccaataagagttgtatcttctaatttgctactcttggtcatatcatattcagatgccttaatgcacacagactgcattgtatcgacaacaaacctgcaaattgcaaggaaaatgaaattaacacagatcttccagttataataaagatatatgcaacaaagtttgctcaatttcagaaatgtcagttcacctaaggaattcatgtgcatcttcttccttgccattcccaagaaagattccaatattctgcagctgagatagcaagccattaggggacagtggagacttctcttcttttgcctttacgaccagcttctcaaacccacaggtgaagcactgttctttttttgtacctatagttaaacgacttattaaaggcttgatatattgatgataataaaaaataaccttccaaaataagcagcaaaaagaaaaaagacttagaaccagtgacgcacatgctctggaatgaaattgctggaggaagtatgtcgtcagaggaggagtgaacataaggcattgaaagacaacattagcaaagcagctgcaagaaacagagtatattcttgcatcagcgagtgtaagctacacatttactttacattttttacaccacaagctgaagattataacagctaaaaacgactagaaaaagaggaaactggaattacctattgccaacgttgatgaggccacaaggctggaactcaattttatatgtatacagtttagcaaagacttcatatggaaagagcccctgcatgtcaccaaaagattgataagaaaaatagctttgctgatttgttaatgtaggaactaagtattgcataatgatgataacatcctagaactcagtgattaccttatgaccatgtcttcctgccatctcattttcagacttcggtctggtccactggtctacaactttcagtactgatgcctttaaaccacttcttccatgtagagaatttatatgctgaacgacagcaccattctgtttctgatgatcaagaactcttaccgattttgcacctaaaggagaatgcttcataagatcagcacacttcttggtattcgaggccttggatgccaaaagttggacttccccaaccttcaaaggggccaacatagagccattttcactactagcgctctttgacttcggaagggtcacatgggacaaattagaagagtccaaaggactcagcgcatcagtagaagaggaaattggtaatgcaatttcagcttcatcaaatcttttagcatttctttctcttaagtttactccatcagatatataaccagtccccctaggagcttcttttaaaatgctactcctctgctcagaaactttagcagctgaggtgtctctagaggagccagagccaaaggagaaatgcagagaggagttaccaggtctaccagatttagatttaacacaagaatcactcacacgttcggctgatccaagagccgtaccccaaaaatcagatgacttcagagatgggtcagctgatactggatgcctatccgtaactaatgagtgtaagctccttgattggctctggttctgcccagcatcatcctcaggtttatgtacacttaatttaggcagattagcgagattatctacagattcaaccaagtgcacaaattttggagacaacagtttggatggagcatcttcaatggtgctgaaacaggtgtcttctggctctacagagacatgagcatcaagtagggactctgatctctcggattcagatgaactgaagctctcacaacgagaaatctcgtcgccagagtcattacggggggaggaggagaagccagaaaacgaggatccagatgtttcagcaacagaaacagcttcttccttatctataaggtcatctttgattatctgcaatatctccattcccatcttcaggagatctggcacgattagataatagtgattccccgattggtatagtaactggttctggacccaccagtaaagtttcctcaggagtattttgtccattttcttctcctaatctcaaatcggaatcactctcatcttcactatcatatacaatggaagcaggatgaca

SEQ ID NO: 68836 - DNA, 2415 bp, Arabidopsis thaliana landsberg
aatcggccctactttaacggactaaaatcaaaactcgcagtacacatggaaaatgtttagtgggcttttgggcctaacccaaatttgttttcaattttagcattgcgccggtaaccttcctacgccgttggttgttcttcttcattccgcgccgccgtcccgcgttttttctttatttgactcttctcttcgaaacgaccgtggttttggtgtttattgaaacgacatcgttttgttcttcttcttcctcagttttgattctcaaaatccacaaccctaaatccacgcttcttctctgctcttcttactcaattcttctgcctctttcttggtccttgtccactaatcgtttgttcgtctcacggcacgaattcaaatttgtaagttgagctcgtcgaattagtgaaacccgagaatagtagaattcagcagagagatgaagattgcaattgaaggttgtatgcatggagacctagacaatgtgtataaaacaattcaacattacgaacagattcacaacactaaagtcgatctcctcctctgctgcggcgattttcaggtaatcgtttgttttttttaccttgaaaataaaaatccattcgattctgcttcctaagtctgaaaagattcgttctttgtggaaaacattaggctgttagaaatgagaaagacatggatagccttaacgtacctagaaaatacagagagatgaaatctttctggaagtactactccggccaagaagttgctccgattcccacaattttcattggtgggaatcatgaggcttctaactacttatgggaattgtaagttatctagtatttgagtttaggattccgaggcttaaaaaatgtgttcttgatggttgctggttgttgtgctataggtattatgggggttgggctgccaccaatatttactttttgggttttgctggagttgtcaagtttggtaatgtgcgaattggtggcctttctggtatatacaatgagcgtcattaccgttcaggtttgtttcttcttcatctctctgacaaagtaccaatttttcagcttttgaaatgggagaaagttggatttctgagttagtgtctatagtggaaatgtatagattagggaattcgtttgatttgtttggtgtcaataaagtgagaatcagtcatttgtgtgagtaggacactttgagcggccaccatataacgagagcaccatcagatcggtctatcatgttcgtgactatgatgtccagaagttgatgcaacttgaagagccgcttgatatatttctatcacatgattggcctgttggaatcactgattatggagactcagaatcacttatgcggcaaaaaccatactttcgtcaagaggtaaatctgtgggaacatgattctacttcttcattttggttttgagaggttttcaattgatttgaccaaaatttattacagatcgaggaaaaaactcttggaagtaaaccagcggctctactgctagaaaaactgaagcctcaatattggttttcagctcatttacattgcaaatttgctgctgctgttcaacacgggaatgatgggtcagtgacaaaatttcttgccctcgataaatgccttccagggaaaaagtttttacaggttctctttctttcctgtccacaacattatgctttgttcttttgaaacaaaaaggatatcttttaatttctttggatgttcattagattattgaaatcgaatcagagcctggaccctttgaggtcctatacgatgaagagtggctagcaatcacacgaaagttcaattctattttcccgctaacaaggagatacacaaacgtcaggtataccatcccgaacaagctacctactaagaaatgtttatatatcttccatttatctttctacctaccgtcccacttacgtattgttttactacaatagcactgctggaactatacaagagagccgtgagtgggtgaggaagaagctagaagaaaggcaatttaaaccttttgagtttgcgagaacagtacctgcatataacccatcacaacgtgtatttgattccattcctggtatgttaatagtgtactggatatagaggattataaaaagttgatgaatcgattaaaagtgttttattcatatggcattttgtagagatcccgcagaatccccagacgctgtctttgttagagctccttggtctcccatatctccttgattcatcaccagtaacaggggaaagaaccgatatccctgcttcactggctccatcaggtatgacgatagttttctttgtagatgaggacttggtttgggattatcagatacatattctgtgaagttgttcatttactctttctatctgcctattgccatgaaactgcatcaagcaccaatgacagagaatgtt

SEQ ID NO: 68837 - DNA, 533 bp, Arabidopsis thaliana landsberg
taaagccaacgacgatcgacagcgcgagcacgatgaggccgaggcggagaggccccttgctgctggtcagcagtgtccggagacgcggatggcgctcgccaaacgtccgccgcatggcatgaacgatcatcgcataaacgaccagtgccgacgctatgccaaaaaggacaagcaccgtcgccaccagccagctcggcaggatgctcagtatgtcgaagacgcgaagataggccctgcgaagagtatcaatcatggcgggttccggatggggttcgaggtcaacgcctcaatccggaagcggttcatgccttgcatcaaccgctgttgatgctggacaatcaggcccgcgaatgccatctagattcgcgctacgggggcctcccgctgtcttttgaacagtcgggcatgaaattgtttttctcaggttttcaccgtggtgagacgttccgacgttcgcacgcagctatggacccgccgcttggcgaagtttgtcggcccgatgagacgggcaatcgctactatcgcacccgagg

SEQ ID NO: 68838 - DNA, 2503 bp, Arabidopsis thaliana landsberg
gtccggactagaggttgctaaactgataaataatggttctctttatatatataattaggaagatgacagtgccctcctccgttttctgcaatgcaaatttgggaaaggacgagagaatggtcccgaatttttctatgatcccaaatatgcattgcgcctatgtctcaaggaaaggagaacccgtgcctgtgtccatatatacagcatgatgtctatgcatgaagaggcagtagcccttgctcttcaggtaagaaatccatttaataacaaaagaaaagtatttttcacttccttctcctacgtgcgatctttaacttaaaacgttttttgaaacaaaattgttactgaaagccatattttatgatgccagtgtgcagagagtttggttgatcatttgaaaacggtttctgttttacagattgatccggaacttgctatggctgaggctgataaggtcgaagatgatgaagacttgagaaagaagctgtggctgatggttgcaaagcatgtcgtcaagcaggaaaagggagctaaaagggaaaacatacgaaaagctattgcctttctcaaggaaactgatggccttctaaagattgaagatattttgcctttctttccggactttgccttaattgatgacttcaaggttagtcaacgtttcctcttttccagacacacacgctctggcttgggccaaacaagttgcttctgttctcttgtaattttcttcaatacgcttttgcaggaagcgatttgctcatctctcgaggattacaacaagcaaatagaacaactgaaagaggagatgaatgatgccacacgtggtgcagataatattagaaatgatattagtgcgctaactcaaagatatgccgttattgaccgcgacgaggaatgtggggtatgatcatcctaagattgagtagcctttatctagcgtctacctatttatagatatgaatcaatgttttccgaagcaccaaaatcactagcacacctgatccttttcaatgttgttaccaggtttgtaaacgtaaaatcttgatgatgagcggtgatttcagaatggcccagggatattcttcagcgggaccattggctcctttttatgtctttccttgtgggcactctttccatgcacagtgcctgatcacacacgtcacaagctgtgctcacgaagagcaagtaagtcttgaagcataagttcttgttatgagttccctctatctccttctgcatatagatactgcaaattttagcaatatttgttcgttattgtgattccattttttgattggttttcccaaaatctgtctaggccgagcatatactcgatctgcagaagcaactgacattgcttggaagcgaaacccggagggatataaatggtaaccgatctgatgaacccataacaagcacaacaactgcagacaaggtagggacattttcttttccttttttaatcttttctttaacatttttctgtgacctgacatattttctttacggtgaggcagcttcgatcagagctagatgatgctattgccagcgaatgcccgttctgtggagaattaatgatcaatgagatcactctgccttttattaaacctgaggattcacagtattctacttcatgggacctccgatcagagaccaacttagcaaaccagaggaccatttctttgcctgtttgattcatgtcaaaccgtgaattctttcttgtgtgatctcttcttcagctagctttgaaatgtgaatgtgatttttgggttctgtattattgatgtagtattactattaaacatgcttctggagatacatacaatatgctatctcacctacttttgtctctatatctaagtgtttttctgaactattatttcgatctaaaagatacttctgtattccatgattttacatcagtgatgcgactcttcctctgcttcaaaatctttttctgcagatattttcttcgccagagcctgcttggtccagcgcttcaagtcataagctcttttaaaaggcttcttctccctggtaagtttcctctttgtaatggcaattgcaagatcgtttgggaacaacgtttgccagacaaaggcgtggagaagcgtggagacaaacaaaacgcagaccatcgctgtggaaatgaaggaaagagtgagtgctagagcccggctcgggtaaccaggtactgcctctgcatactttattgttgctacggatgctgttgtcataggaaaagtatatgaccaccacgccactgagaacctgcaaaaccccgtagccacttagtatcatcaacatatatcttcaatcgagaatatttaaacccgagatggacttacttaaatccagtgaagaaattgatccgagcaactagggatatgtataggaagagtgcaatgaagaagcaagttcttgaacatccgtcgaattggccatatatcgtgttccaagcaatacttgctgctgatggggcaggcatgaacatagagtaaac

SEQ ID NO: 68839 - DNA, 593 bp, Arabidopsis thaliana landsberg
  unsure (1)..(593): unsure at all n locations
ctacggctgctgatattttgccagagccatcaaagcatataaaggacagggagttttacgaagctatcagctacagggataaagcaatgctatccgtttattacggctgtggattgcggagaaatgaaggtgtaatgctcgatgtaggggatatcaactttgaccgtggtatcgtacatgtgcgcaagggcaagaactataaggagcggtttgttccaatcactaagcagggattgcagcacttacaaacttacctgtatgatgcaaggccactactcctgaatgctgctaaaacacaagccctgttcatatcagccaaagcaaggcgcatggatgggcaaactatgctctggcggttaaagcagcttatagagcttacggagaatgccagattgcaacaaagcatgttggcctgcacaccttacgacattccatagcaacacacctgttagcaagagggatggaactggaaaggattaaagagttcctcggccacacttcacttgaatcaactcanatctacactcactttaacttagagaacgatggataacgaactgaaatttgattattacctgatgacacaacgcttg

SEQ ID NO: 68840 - DNA, 547 bp, Arabidopsis thaliana landsberg
gcaccccgaggtccgcctccagcgccgccacccgccggctgagccgcgacttgggcgtctgcagcgcgcgggacgccgccgagaagccgccatggccgaccacggcggcgaacaggctgagatcgttcaggtcaggcatctatcgttccaatatcgcaacagtctgtcgcgaaaggcctgactacaccgatcatcgttccacatccagattgggactgtccaatcgcgcctttcacgggaagacagtcatgagggttcttcacatcgacgccggcatcacgcccgagtccgtcagccggcggctctccgccgaaatcgtccaggccatcgtcgcggccgccccggacgccgcggtggtgcggcgcgacctcggcgcccagcccatcccccacctggaccacgaggcgctggcctccctcggcgacaacgccgtgctggacgagttcctcgccgccgacgcggtggtggtcggcgcgcccatgtacaacctcggcatcgccagccagctcaaggcctggttcgaccgcatcgtcgtggcggggaggac

SEQ ID NO: 68841 - DNA, 703 bp, Arabidopsis thaliana landsberg
  unsure (1)..(703): unsure at all n locations
aggagagagatcggaggaggcgtttgagttttccggcgtcgcctttggatgcagagatttggtaagcaaaacaggggagggtagagttggagttttggttggattcgaggggtaaagaagggatttttgaggaagtgaatagagtcttggtcgtggggatgatgtagagaagagagaagaggagtgaagtaagagagaaggagatcatcaacagtttctttatcgccatttttgtctctctgtaaatttcttcgaatctctttagagaagagagagggagagagagagtttaatgtggtttagtgataggtagtttgtagaatcacaaatatgcccccttattttgttttttttatgttattaccccacaatagtctgaagtacatacaaactccgtaatcaaataaacgtgttaatctgctgtaaatctatagtgaaattaaatttcatactcaaaaatattcataaacaacggttgtttgttataacattggtaccagcttatatggtacagtaccaatatttgaaagatgattgttaccaaacttgacatanagattaaacaaaccatttaagggaaaactttaacaaaagaaaaccaacttaggaaaaatcagaattttgggtttgtgttaatttagtaatattcaccaaaacataattttaaccgaaccatatcaatttttggttttaattagttttg

SEQ ID NO: 68842 - DNA, 376 bp, Arabidopsis thaliana landsberg
tctacgtgctttgttttaagacagaacatattttctggtttgaaatgctagaattgtaacgttatcgtttcttataaaaaaaagttttgtgttctcatactgattagctatggatgtaaaccacatttttttcttaatcaaagagggattgtttttagtgaaagaaaacaaaaatgcttatatgcatgaatacacgaaacgtgtgcctatgatcagattcaattattggttggtaggtgaccataatgagaaaaaataatactcaattcacataataacaaaaaaaaaacttataaaaataaatactcacacgaaccacatctaaatttcataacattcagtcattcactctatcaataacacaaacattgacaac

SEQ ID NO: 68843 - DNA, 603 bp, Arabidopsis thaliana landsberg
  unsure (1)..(603): unsure at all n locations
ctttttttcagatggttcgttacgacaattttggatttctacattaattttgtacctatagcggtaatgtttagattgggatatattatgaatagtttacttgttctcttttaaagttttaatctttgacttgtttattatctgaattcaggtttggattgtgtataaggagtctacatggtctggttcaatactttggaccattttgctcatcatttttggcaggtatcatcttgtgtgtatctgaattctttagcaagatcattactatgaatttgttgtaaaaaaatttttttgtcttttttttttggttttaagccnnnnnnnnnnnnnnnnnnnnnnnnnnnnnnnnnnnnnnnnnnnnnnnnnnnnnnnnnnnnnnnnnnnnnnnnnnnnnnnnnnnnnnnnnnnnnnnnnnnnnnnnnnnnnnnnnccattttgtttctgtgttttgaattcagcttcattagtatctctttaatcattaatagtagcttgattagtgtcagtaatgctctgttctccaggtttatgcaagtatgaattcattcaaatcagtagctgctcccaattttcatgagagaatcataagcataacctgct

SEQ ID NO: 68844 - DNA, 361 bp, Arabidopsis thaliana landsberg
gaatgcactctagtcggcacacatctccaagcctgacaaagaaatataaaatataagtatgtacaactatatatagtaggttacccaacttccaaatcaaagtggaaacacaaagatccccacaaaatccgttaatgtccttgactcacacccaacacaaataggtcactatataacaagcttatataggtaactatgccgcacaaggtcattgacatgcacttccacgaaagagaagaagaagaagatactggtgagagtagatcatcctcaagaacaccgagagggcatttcgtcgtttacgtcggtacgaagaagaagttggaaagattcgtgattcccacatcgttttttgaagagc

SEQ ID NO: 68845 - DNA, 1460 bp, Arabidopsis thaliana landsberg
gaagcgaaggaactcaatattccaaagagaagaagcataataccagacttaaactacacacattaccagaagcagacagatataataaaagaatgccatgagaaggaagctcctcacaaatggtggccaaaacctaccaaataaaaacagggttaacagaatgaagttccatagagccaataattccagatagacaagtaaaaaaccaaaaatcgacttacagccaaaaaatgtgttatggatggacgataaaggacagctttgcgagggttaggtggcaaagtaggatcattcatgctctgggagttaatacgagcaactccaacgggagcattctgacccattttagcaccagttgattgatatagtgaaccactcggttcccactctaagcattgaagcatcctaaaagaatcgagcgtgagctccgaatacttgacctggtggaaatcatacagcaagttttcaaatttcagagggtaagatattaaatatgcgttcatactaaacatgaacaagtaaaaaattacctcgttacagtaataactgctcaagatagcatccgtcaaccttaaagacctacttgcacgcggagtaccagcatccagattaggatccaatacaagactgtatcttagaggtctaatgttcatgaatgcagtgtccgatttcagaaatctaactatttcctgcgccaccaccttccattccttaaaatcggtttcctgataacatgaaaagttgtttatgtaacaccgaaaaaaaaaaaatagatagagacgggatctcttgtaaggcaggcaacctaattgttatcattgttccactaaaacagttacacctaaagatggagagaatagggtatcagaagaaaacctggaatgtcctcttgcattcatcaatcaaccgtttaaactgatcaacgagttgatgcaccatctcacggcggccaagaaccaaacacaccataagaaaccttgcaagaaaccgaagctgcttgtttgcaatattgagatcctgaaacaatccatctttgaagtactccctagtgagtattgcttcgtagaatacataggactcggataagtaaccagcatcacttgttcgcatataatgtccatagtaaagctgggcaatgcgagaagcgatctctccaatctcccatctcttaagtccagcttcaacaagcttctgcctattctcttgctgaaacttccatagttgtgtgtatactttgaataccttgaagaaatagttctcatacctatgaacaattccatcaacaacaatcggaatcaatatctaccaactctctaatcaacaattctaggtacggttatctcaggggaatgggaagaggtacctggagcgttcatagaagggcaagtctctgatcttggagaatttcttatcggctttgttaacgagagaccagtaaacttcactcagcgggatattat

SEQ ID NO: 68846 - DNA, 585 bp, Arabidopsis thaliana landsberg
  unsure (1)..(585): unsure at all n locations
aatcgccagctggatgccaccttgcagtcctcgggcctgggccaggcggccatccgcgacctggcggcgacattgccagtggtattcgtgccaatcccagccgatgtggtggaaaagatcggcaacagcgcctaccaaccggccgttcttccagccaagacctatgacgggcaggatcaggatgtccccaccgcggccatcaccaatatcctggtcacccgttcggatatcagcgacgaactggcctaccagatgactcaactgatcttcgacaacctccctcgcctggccaccgcccatgctgcagccaaggatatcgacccacagcaggcggcgaagaacctgccgattcccctgcacccaggtgccgaacgctacttcaaggaaaagcagttgcttccgtgagtccatttcaatgccgaggggtgtcatccatgagcgagcctacacagggcctgcatgccaatgccgaacgctggcccaggcgctgtncgcagtggccctggctttttccatcttccagatcgccacggcggcctttcactgattttcaccaggtgctacgggcgggtgcacgtcgcatgc

SEQ ID NO: 68847 - DNA, 192 bp, Arabidopsis thaliana landsberg
cttcttacggcttttaatcatcctgtgaggaactcggggatttaaattctccgcttcttgtggtgtttgtagatgaatattccagtattctgcccagggttaacagatggctctcttggggatatgctgtattttcactcttttcgaacctctggcctcatcatcgatgtagcacaaggtccttcttttact

SEQ ID NO: 68848 - DNA, 505 bp, Arabidopsis thaliana landsberg
ctaacggctcgtttaaaaccgtaagaaaacagaagaatgaacttttgataatttagtatttgtctataataatagggatttttcaatcatcaggtttatttctatatagtatcatccgtacatattatcgatcaaggatgatgaatcactctcgcatcatcatgatctatgacttaacttgataataaattaatcatgttttacatctttgagataaagaattcagcgttatataactgcatttacctaaatgatggtgacaattcgaattacaagtaaaataatttagaaactatattctataacgcatacaagattaaattttgtattgttgtctgagaattcttcaactgaagtatatgaattcatcttttacgttttgcattcctcctgtaaacggaagcgctagttcattgctgtattacttgactccgatcctgactaactttgtccaagagtcccattgcttatagctgtttaaacttttgaaccaatatcactttaa

SEQ ID NO: 68849 - DNA, 279 bp, Arabidopsis thaliana landsberg
ttatgcactgagtgtatgcgcattgaacatattatatagtgagcgaaaggtcgtgaatctcagaagcgtgaaccttcattgaagcgcggttgatgcttacatatatcacaaaactgtggtttttatactattgcatctataaaaggtttatgagattttgacgggacgacttggagaccaatacactccctatgcatccgtcacagacctccatagataatgtatctatacccccgctgatgacgatcctcaactagagcggatagccaacactgtctg

SEQ ID NO: 68850 - DNA, 548 bp, Arabidopsis thaliana landsberg
  unsure (1)..(548): unsure at all n locations
gatcggcgaaatgacgaaaatttcggctcaaatttctttccagccggagttgtccccgtacagcctgcagaaagatttttacaatgtttatgtggccaccggttttctcgattacacggtggccaaccaattccttgatcaggtgctgttgttctaccgaggcggcgattatttgtactcatcggagagcacttatacactatcgcgctttctggatatccgcaattaccgagagtggtcgtccgagcaattccgcgtggcgctgaatacgttgaacaaagcggctttccactatgaatcgcccagccaaggcgctccgaccggaggaaacttgatcacttacatggttcccattcccgtcaacagtcctcatccgaacggcgctgtactgtttctgttcaaggatacgggcgatcatccaatcgctcaaaaatattatggacgcccagggagggaacacgattattctcgaccgttcgggacatattatcaccgctntgaaggacagcgactatttgcatagcgaggcttttcaggcattcaatcgc

SEQ ID NO: 68851 - DNA, 661 bp, Arabidopsis thaliana landsberg
ttccttagttaaatatggagaagagcccattaattagcccaagtcataaactcatcttgactttcgtaatgtggtaggcgcaaaagtggagtcgatcctttggttgttaaacaaaattttataagtgtattttggataaattcgttatgaggattacttacaaaaatcagagtgattaccctaattatgtttctttttcgtaattgttagatacaaattctatatagaaatgtatgaatttgatcatcatatagttccctaaatatttttgttaattagttccctaaacttgaggatagatttgttgaaggatcctacttagtcaaaatatgtaaaacaaatcttgttgcaagatatccgcaacgaaattgaaataaaacaggataataatttccataaaatcaaacacggtatccgatatttgatacattgaattgaaaacgaaaatcgcatgcgttgtgtttggttagttcatgttttcatacatagcaagatcttaaaacaaaaaaaaccattgccaaataaataaaatcaccaacaaacgaaaaatgtaacaatagaaaaaaagatatgaatatttgtctcaacaatcacaatcataagatttggtggagagagatattaaacaatgaacgtgagtgtggagataataacgggaaca

SEQ ID NO: 68852 - DNA, 581 bp, Arabidopsis thaliana landsberg
ttctaaaagcactgataagcaatctctctggacaacagtccttgaagagttccctggtggtgcagacaatttcttgatagttgcgagaggcggttacggggctcgagtagatatcacctcgaaaaacttagtttccatacactgtgcagctgagtaccttgaaatgacaaatgattatggggaagataacttgatttcccaagttgaaacttttttgcacaagcacgtgcttcgcaattggaaagactgtatcttggcgttacaaagctctagtccggtgttgaagagtgcagaaaagcttcagatgataccaaaactcatgaacgctgtgtccacaatggtgtgtactgacccgagtttatttggatggccaatgatgatgtatggtacattgcagagtccatgtggaagcattttatggaatggaataaacacggtggcgcgaatgagaagctcatgttcggattggtgggatgaagatatttcttatcttagaggagatttggttaaaagactcatcatgacaatggaaacaaaaagtatacgtgctgaaagtttaaccgcgctatgatgtactatgc

SEQ ID NO: 68853 - DNA, 442 bp, Arabidopsis thaliana landsberg
cgcaggatgaagaacgagacgccgtcgacatagagcatgacgtcgcggccccacaggcgctgcagggccaggcccagaacgcgaagggtttcggtcacccaatggatcggatcgagatcgaggtcccggaagcgaagacggtcctggggggatttcatgggccggaaactggcctcggctgccgcttcgacgcaagctcgccacggaaaaaacgtggaattcccagacaaagacccgccgcttcagggaaagcggcgggcctccgcaggacgaacctgaaccgatcgccgcatcgagggacgggtggcgcgacggccggttgcaggatcaggtttagaccccctcggctgaaccgcacctgaatggggtcgtcagggacgacgttcaaagcgcgccctgctctttcaaggtcgcgatcgcctcggctgagaacccccagtcg

SEQ ID NO: 68854 - DNA, 485 bp, Arabidopsis thaliana landsberg
  unsure (1)..(485): unsure at all n locations
gatacagagagttatgtatattagtcaacaaaagtgaatattttgctgttcgtattgatgatatttactttagaaaaacaattcactgacctatataagaaacgataacaatacaaatgattttagcatgtcataattgtttttctactattttttatgctattaaatattgaatcatatttcaaatggttaaatttctagtaagttttagatttgtggttattacatttacaagtgttatctttcatgttccttgctggctcaggccaaaaaaaaaagatttttgatggaaaataatacagcaaanaaggtgttttatttgtgatgaaagcgaagcatatcaaacgaacactgaccgaagacattactagatcggatttgattgggctctacattgtagatgtgacattgacactcccatannatatggcttttctacttttcacttttactttttctctctggcatatatatgaccaaaggtg

SEQ ID NO: 68855 - DNA, 613 bp, Arabidopsis thaliana landsberg
agaacctcacccaagccaggcatggccacacatggcaagaacctgtctcaaaaaataacacacacagacagacagacagaccaagacagggccccacacaaacataaatgctgctcccccctgcttggcaagaacagaggggctaagtagtgacaagccaggacagaggttccagaaggccagtgtgggaggaagcaggtcgcatccactgggacccatttagtactacacgatttaaatgtggatcatgggtccttcatccaagagtgccgaggttcaaatgtggattgtgggcccccttgcccagctgctaaggtgcctgctaaaccctggcagcattttctgactgtgtatgatcaagtaggaggctatttaaggcagcaccttcaacagtgaacaccatcagcaggaggtcagcgagaggcccaggtcaccggggctgaccctcctgatttgggcagctcacacataacagggagccaacctggaaagtacacggtgatgtcctacaagtctttcttgccatcctggtatgctaatgatagcagatgtcaggacccagtatcaaactggttctaaaaacaagtcagaagtgtaagtggcttccgagctc

SEQ ID NO: 68856 - DNA, 285 bp, Arabidopsis thaliana landsberg
aagaaatgaccattttagttgttgaagttggaggttgttcctagtggattctaaattttatcgcatttcctttcttttgttgacgtaggtggtacagatgattctaaggtctcaatacctgcaacggttgttctgcgctacatgttcagtccagctgagttgatggtaggtcttgtccaatagttaatatgagaaatgttgctatttttaagagtagctgatatagcttgagcatttactctgtttgcaggctgatgaggatctggttgttgagttagaggaaga

SEQ ID NO: 68857 - DNA, 457 bp, Arabidopsis thaliana landsberg
aacgagtggtgtttaacaaaatggtctttctagctgcagtcaagattcgccttagggatcgttgtcttatgcggtctatgatctgattgaaaaggtccttcttttttctaccaaacattttaggtaggcccaagtattttcctaatcccttcaatttttgaatccccaatatttgctgagctttggccttagaaatctctgtggttttggcagagaaaataacgctgatttgactttatttatcatttagccagatgttgtctcgtattgatgaaggatattcgttatgattgagcaggatttggggtctgatcaacagaaaaacatagtatcatctacaaacatcatatggttggctctagaactgccttttccaactcggatcccaagtaacaacccatcattatgtgcttttctacacaaaccagacaaaacttcactgcataaaatgaaaaag

SEQ ID NO: 68858 - DNA, 259 bp, Arabidopsis thaliana landsberg
atgtttatattacaaaagtctgtaatttttaatcatatataacaattaacattcggaacaattgagacattaataaatatatttctcattggccgttgacaatgttgcatgttaatagaaagctagctctgaaaaactgaaatgactaaactaccctttgttagttaaattaaggtgatgcaagtgaaaacgattattgaagttatcgctaagcgtacccatagtgccggaagcatcaccgtcgtcgtaaaaagtggca

SEQ ID NO: 68859 - DNA, 171 bp, Arabidopsis thaliana landsberg
caacacagaaccattgcctatatcaagcataagtctcctcatacatttcagccgacttcatgctctaggtaaggcaagtccatatctaaaaagaaatctttgtgttttgcttcacattttatctcagtgaagtcgctactatatatttttgccggttcaggcctattcgaa

SEQ ID NO: 68860 - DNA, 1476 bp, Arabidopsis thaliana landsberg
ctatagtacagctgtctcttcttggcgagaagtcatcacgcgatcatagctctctcaagctagctttgatacagacaactgcaaacacaatatggagatatgatcagaatcattagatacatgaacacaaaagagattcaactaaaaaagataactaaacatgtaataattccagtggtacctggaggtcttctatcatatgacctagcaggtggtggcaagggcctggctcttgcaggtggtggcatgggcctggctcttgcaggtggaggcaagggcctagctcttgcaggcggaggtagaggtgggcgaggacgtcttcctcttgatccagaagctctctttgcactagaagatggggcccgagatccagcgcctctagcactccgagaggaagcaaggctacgaggtggaagacgagcaaatgaactccttccagaccgtccagccccatgcctagaccgctggtctgagcgactagattgtcggcctttacctgctttctgaagtggtctagacaggcgtgctctcacttttgcctggaaaaaaaaagagaattagaaagcaagaaaatacttcgtggataaggataatgcatttaaattatgcataccttgtcctccccttcgcctagctctgagttgttgatgaatttggcacaactcacagcagcttcatgagtatcaaaagttacaaagccaaaatctttcctccttgctgatggcatattgcgagcaagctcaactttttcaagtttaccatatggtttcagaaggtctctaacacgttcttcattccatgaaggtaacagaccgtcaatgaagattgtcttaacctgtaacaccagaaatatcataaaactaattactatgagcaagatagataagttagatataatagattcaccaacaatcaataattcagtatctagcatgttgttagagggccaaaaggaatatgtattctgactctgttttcatgatgggtttagcaagtattctaagtcaccatacagaataggtggcacccacacatgcccctataaactcctccaacgctctaaagaagacatggtaggatgaaagttgctagaaataattgatcctgcaatgtgagtacctgcgccattatctcatcttccaggtctaagaaagaatcagtaaaagagacctttgcaggcttctcaactccaaacatcacatctttcttgacgagacgcttgtgagcatccatggcatctgagcgagatgagaattccaaaaaggcataccctcgattcatgttgacattgttgctgtcctctaccaacgttatatcatccatattctcaactccatagtgtttaagcttctccctcaactggaacaacaacaaatacctgattgtcaggatcaccacgaaactgtggagttgggtttaattgacatatctacggacacccaaatacttacagcttctggggtccatatcttgcat

SEQ ID NO: 68861 - DNA, 438 bp, Arabidopsis thaliana landsberg
agatatgactatttaataaaggtgagctgttttgtagattaacacagataagacacttgaatcatcagtttgtaaaataaataaataaattttgtacttaatttacatgtttaataattaaattcagaattttcgatagcagtttttcaaagtttaattattgttaaatcacatcaggttcaggaaaatgagaggaataaattaacgacaaaaaaaaatgacaggaataattgtgtggcacatgttactccggttcatatttttaaaatggacattagctgtaatgtaacatcagatcctatttgtaatgttctagataaaaacaattttttaggtttttgtaacactaatcttttactttgattttaatgaattttatgtataaagaatttcagaattttgattacttacaagaagatctggtttgatcctaataat

SEQ ID NO: 68862 - DNA, 500 bp, Arabidopsis thaliana landsberg
ccgcgggcgccgacccggtttttttcgccacgttcgcgccgcatgccgcgtggcgcggtttcgttttcatgcgcgaccgcggcggcgacgagttctttcaactctactggttcgacctcgccacccatcgcgagacgctcctgaccgacggcgcctcgcgcaacggcccgccgctctggacgcatcgcggtgatcgcttcgtccacaccagcacgcgccgcaacggccgcgacaccgatctctacgtcgtcaacctcaagcatctcggtgaatcacaacgcctgctccagctcaccgggtcgtggagcgtcctcgattggtcgccggacgacacccgtctcctcctccgcgaattccgctccggcagcgattcgcggctctacgtgctcgatctccgcgccagctccctcatcgcgctcaatcccaagccgcccgacgccgaaaccatttcctacggccgggccgtgtgggcgcacgacggccagggcgtgtttttcatt

SEQ ID NO: 68863 - DNA, 2490 bp, Arabidopsis thaliana landsberg
tgctcgtggtcctcttcttcatcccataggtttgctttttttttttaaactcttcttcaattgattacttttaaatatagataggatacatttcattatattcttcaattatcatagatttgtttctattgagaatctttaattcaaccgtttgataaatgctaatcaatgaatcataagatggttcccatattgtctttaatgccctaggactagaaagttcaattcgttgttactcattaacgatagtctgaaaggcttgaatctataataaaataataagaataacttttcaatatgtgaagtcatgggttcaatcgtgggacacattcttactacaaacgtgggagttcaacgattgtatatacccgaattattgtcatcatttctatctatatggttattgtaattttgtttatgtcttggaactataagttatttagcgacgattatttatgttacatataagataatcaagttttgcagctacatttcatgcaaatccctcaacgagcaaagaaatggcgctcgtcgaatatactcctccgagtataagatatcataatactcatcctccttctcaaggttcgtacgtattatcaatatctagtatatacttgtctttgttctatgctttatatcatcattttatgacacaaaatgattaaggtcttagttaatgattatgtatatgtgaaacttatatttaggggcacaatttaatttcgtatgataattgtctagttagctttatgtacttatcataaaaaccttagtgtttatcgcaatacttttcaaatatagtgtagaatcataatggtcccactgtcattatgtttgatgcaaatctatttggattttgttggataataaaccgatgacgtggaccagaccagtagctataagatttggttcacatagaaattttttataagataatgtatctaggtttgcttatgattatacatgtgatatttaatacatggcacaggttcgtcgagtttcacagccataggtacaatagaaggcaaattcgattgtggttatctggtaaaagttaagttgggctcagagattcttaacggcgttctttatcattcggcccagaccggcccatcatcatctccaaccgctgttctaaacaatgccgttgtaccttatgttgaaactgggaggagacggcgtcgtttaggtaaaagacgaagaagcagacgcagagaagatccgaattacccgaaaccgaaccggagcggttacaatttcttctttgctgagaaacattgcaagctcaaatcactttatcccaacaaggagagagagtttacgaaacttatcggagaatcgtggagcaatctctctaccgaagaacgaatggtaacaaattatcttttaaaccgttaccgatttagtgatgaaattagatttgtagtaaatcgataactgaaccgagttttggttattgcttgtaggtttatcaagacattggattgaaggataaggaaaggtatcagagggagttgaatgagtacagagaaacgttgaggcttagggatggtgacatgacaaacggcaaggctttttaggtgatttatttaaaacggcaagtcgttttgttgtaggtcgtttctctcttttaagattggacgcctcgccgtttcttttattttctagcttattgtagttgtccatgcttgcttaactaggctcagtgagaggctagacttgccaaacttgaagagtctttatttatttaagaattttagatgttctaatgtattaatcctttttcgtaaacctttcctgttaaacaagaggtttatgttgcatgttaaaaaagaggtttaggttatattagcaatttagcattcgattcgttggttagtaactaagtaatataaataccacaagaacaagaaatactaatgaaaacttggaatgttcaaagtctccttatctacttatgcaacgttagacaaagctatcaaacaatgccacgtcacctcacaaaacatctagggtaaccaatcacatgcagataactctctcgctttattttctcttcaaatcttatcaaaaatcccataatgttttcatttctttacaagtgatcaacaaaacaccccaaaaagtaaagaaaatggccgcaattacatcagctaccgtcaccatcccttctttcaccggcctaaagctcgccgtcagctcaaaacctaagacattatccaccatcagtagatcctcttacgccaccagggcgccacctaagctcgctttgaagtcctctttgaaggatttcggtgtcatcgcagtggcaacagcagcttcgatcgttttagctggaaatgcgatggccatggaggttcttttaggatccgacgacggttcccttgctttcgtaccatctgaattcacggtggctaaaggagagaagatcgtgttcaagaacaacgcagggttcccacataacgtggtgttcgacgaagacgagat

SEQ ID NO: 68864 - DNA, 596 bp, Arabidopsis thaliana landsberg
cggccaagggcatggccgcgaagaaatcctcggcgaagaagtccgctgccaagaaatccgctgccaagaaatcctcagcgaagaagtcgtccacgaagaaggcagccagcaagaagacagctaccaaaaaaacggctaccaagaagacggcgagcaagaaggcggcgagcaagtcgtccgagacgaaggccacccgcagccgcgctgccacgaaggcgctgaagaaggaaggaagcgcggccgcttccaagcgcgcgctgtcgcgccagggacatcaggcggcagccaagcgctccgcggctgatcgcagtgccgcggccaagaaggcggcccgcaccaagggcgcgaagggacgttccgccgccgccaagaaggccgcacgaacgcgcgcacgtcgtgctaaggactaggccggccgcctgaggatgcacgccgcttgagcgtgaacgggtgggtgcgagcacttgactctggacctggatcaaggctctagagtgactccatgaacacatcaagcccgctcacatcggtgccgtcgccaagcgcgccggcgtgcccatcgacaccatccggtactacgagcgcgagggcctgct

SEQ ID NO: 68865 - DNA, 347 bp, Arabidopsis thaliana landsberg
caccttgaatactgatgcgcgagaactgaatacgccaccaacaatgacctggatgaaactttttataacagacacgttaaagctaggtcaacccaaacagactcaaggggatgcgagctactcatggttaaactgaaggcaaaaacatgaaatgaaaaaccacattgaaggatactacgccttgtaatctttaaagacgtctatctaatagattcgcaatactaactatggaagacagatccaaccccatacatgaaagacgggacatgtaagggttatgtataccatgtgatatctacaaacccataaatcaacaaaaccaactccacactgttcacaaaactttg

SEQ ID NO: 68866 - DNA, 1482 bp, Arabidopsis thaliana landsberg
cacaaggaatcgctaacggaccaacgttagcgaatcctttcttttcctcagcctcagctagaagccgtcggaaaatcggatggttcaaatgcttagcacggacaacgtatctccgacgattctcaccgacggaaacagcaacgtgaccaggaggtacatcggaaacaggatcgttgttgctagatccgatgtgagcttttttctgccattgtttaagcatctgacggatccgaacaacgcttccgatcttattgttcttccccattgatatcgaacaattgcttcttgtggatcgcttttgcgttttttggctcgcttttccccagaaaatgaaggggaagttggagagcaaaaaaaaaaaaaaaaggttagagaagagacatttttgctttaggcgttgctttcaccaaattttggaataatacggcaagcaggggaatattgaagggagcgttacggtatttaaaggttaatcatttaggtttcattttgcccctctaacgtttgctaaattacgattttactcttctctatttatggttttttgattatttttctctttttttttccttctttatcttataaataaaagattcttagctctgtttttgttttcattctttttaacaaacttttttcagaaacaaaattgggcaacttttcataattggtttgtgtgtattttttttggtaagagtattgaattgatgcatatatcaatttttttgtctttaatatataatatcttactcaacacataaaagaaaattaataaatactcagatatcttcttctttatttgattttccttaagaatttgaaagagcaggctttttacaaagcctcaaagaaaagcccatatggctttggtttgatgaattaagaattgcttttctctaattgtgtgcgcccgacccgctttgtatcaagccgacccgtttcgttttaaaaatgcattttgagccacagaaaaggggacccaccacgaaaaaaatagagattctcttctaaaatatcatcaaagtacaaagaatttaaagccgaaagaaaaattgtttaaaaagattcgcagaaaaaaaaaaaaaagggtgaggcggtcacttcactgacgacgtgtgctatacatacacagtcaaatacaaccctttccccaaattgaccccaaaaccaaaaacaaatcagaagaaaattaaaataaacctaaaagagcaaatttttattcgcattgctctcaaaaatcatccatggcggccacctctagcatctcttcttctctatctctcaatgctaaacccaacaagctctctaacaacaacaacaacaataagcctcaccgtttcctccgtaatcccttccttaacccctcctcctcctctttctctcctcttccggcttctatctcctcttcttcttcttctccttcgtttccgctcagagtttcaaaccctcttacccttttggcggcagacaacgatgattatg

SEQ ID NO: 68867 - DNA, 2290 bp, Arabidopsis thaliana landsberg
  unsure (1)..(2290): unsure at all n locations
taagtcgcatttatctcgaattaggaatcttgccagaccatcgccaccaccatttcacatctggagaaacaatagagttgttgtaaaaactaatgtttgatattgtttacctaaactatttgtcttgatccgccaaagaaacgatccattttctaaggtcacttaactcccaacatacaacaaccattaacagttttaaataaagtatttttgatgatacacttaacatttgcaaaatcagaaccttctcgtattaaaatatgagtatcagtgatagaaaattaatgctaatatttttattgtgttttgtacggtaatctttaagtatctacctcagtcctttttaaattgagggagtgagtgtgatacggaatcctgtatttaatacaagatatgtatctcataagtcataactatagcttttttcattgccagcaaacataataaatatgagctagatggcatatctaattactactagtagtatttagtatttttcttctagattctttctaaaaataaatctgatatcaaatcatcaatgatttatccaaaattattttgcattaatacacacagatatcacaagaagatcggcctgacacaaaaaagttttattattagtctctctaaacacaattttactcatccaatttatttataagcatccaatttacatattaaaatactcattttctttgtctttcttctaccatttagctttttgtacatactaaattatttatctaaaatgattccaaaacttgagcataattggatgtttcccactggtcttcggaacttcacctctctaccaatgtgtatataaatagactcagggatgtgtgtatctactattcaattccactttaagcttcaaaagctccctctcatcacttctttccatctgtacttctctcacaaaaaaatctgccatgcctgcccaagtgatcgctgagcagaccacctttcactccgtccacgacaccattatggaggagacgaatacaactttatatcctaagaggtacattgtttgtcccacgaacttgaaattaattaacaagaatgaactatagtccatgtcacttatatactatagtgttggttaattctcaaaaagtatacgacctataataatagtgtttacaccgtatataggttggaaggaaaagtagccatcataaccggaggcgcacatggaataggcaaagcaaccgtcatgttattcgctagacacggtgccacagtggtgattgctgacgtggacaacgtagctggctcttccctggctaagtcactctcatcccacaaaacctcccncgatggtggcattcattagctgcgatgtctccgtagaagccgacgtggaaaaccttgtgaacgtaaccgttgcacggtacggtaggcttgacattctattcaacaacgcgggagttctcggagatcagaagaaacacaaaagcatattagacttcgacgcggacgagtttgaccacgtgatgcgtgtgaacgtacgtggcgtaggactcggcatgaaacacggggcacgcgctatgatcaagagaggattcaaaggctgcataatctccacggcgagtgtagccggtgtgatgggtggaatgggaccacacgcttacacagcctcgaaacatgcgatcgttggtttgaccaagaacgcagcgtgtgagctaggcaagtatgggattagggttaattgtatatcaccgtttggagttgccacgtcgatgctggttaacgcgtggcgaaagacgagtggtggtgacgtggaagatgatgacgtggaggagatggaggagtttgtgaggagtttggctaatttgaaaggagagacattgagagcgaatgatatagctgaagcagcgttatatttggcgagtgatgagtctaagtatgtgaacggacataatcttgtcgttgacggtggtgttacgactgcaagaaactgtgttggtttgtgatcatcaaatgtgttttttttttgtctttctaattgatttaactggatttggtaaatctttttttcttcttgtttaaactttgaatagctggtgaattaataaaacagttatttgaattgtagatgtcaacggcaaaataaaataaaagttttgttcataaaaaatcatccatgacattaccatatatggcagattccgaatttttaactgatagttgagttatttatataattaagttacatctgtaattagtatatatagatatgtaagtggcttaatattataacgtcgaaaagacaaattgtcgt

SEQ ID NO: 68868 - DNA, 1087 bp, Arabidopsis thaliana landsberg
taactacaactcgtacaagaagaatctatcaatccctctacttgcaaaagtctacaaattatgttaataagattcacgagcgagtgattgataaatggaaatgaggaataaacaacatacttgattttttgccttttgcaaagcctcgacgagaatctctaaggaaatcgggcatggacaaatcgaattgcagatctcggcctcccatcatcatgagattgggtgaagaaatgacggagaaatcacgagattgaacaacaacggagcttcttctaagaaacccaatcgcgttacgactagatagagctcgtctcacgaacatagccatcatccctaaagacttcaactttcttcttcttcttcttcttcttcttcttttctgaggtttaaggaggaagacacaagaaaaacaagtaccttttgattgattccgtgtatagagctaaaaccctcgacctcgaatcgacgactgaaatgtaataaaaaaaatttagtttccttcatatataaagtcatttccttttcttttaatgagaaaataccaaaatagccctccgccttctaaaaccctttgttatacagctccctcctagatcttcccatttccaccgccgctgtcactttcggcactgtctccggtaaccggtgagtcatctctctggtgattctggtcaattcgttgcagacttctccatacgaatctgtataactgaaatcacattctcagttttgttttttgttttttgtctaacaaacagctgaagaacgatggcgactcaggctgctgctgctgcctcattcaagggcaacttaaaggtataaaatgattacttcttccttccatatctccagctttttgatcagttttagccaaatcaccttagattactatcaaccagtgagcgattcccacgtttaggtcttcttctacgtgttatgcattttctacttaaaatcatttggaacaatgatcacttcccattgcatctattctccattacggtcagagagtgtcacacctatgactatgcaatttagaaattgagtagatgctacaaacttattcgaaaatggacccctttctatt

SEQ ID NO: 68869 - DNA, 817 bp, Arabidopsis thaliana landsberg
tttctcagatttaccgtgtggttagccggaaagcgttggatataggagacgacccggctgctcttcccaaaggacagaccatcaatgtcggatcgaaagacgatgtctctgcggtgaaaaaggttggttgctgctcaaattgatggtacgttcgactttcaagaatcggtctcacggtcgatcttgttcatttcttttttgttgttatatgtgaagatcttgttcatttatttgtataatcacacaccttaaaccatattgaataccactgcgtttccatatcaaatgtatatcccaaacaacctttgagctgaaccataatgttctgcgtttctaaggaacggtaccgcctatccaagtgttacttaaggtgatcttgagactaaacacagagcatgagaagcaccaatggaaattgagataaccttgtgtggttgacactcatcttcttcggttaagaaattgacttcgaccggagtagtttggatctcagggagacctggaactcctagctggaaatctttagcgtttccccacatccagagttcacccccatctgtcaaaaaccaatcccatccttttggttttgtttgagttatttatcatgtcaaatgaacatatctatagctaaatatacctgttatcgctgcagaagaggaacctccactagcgatgaagactatctttttgtcagctaatgcttcgatttcagtaggaactttctggtttcgcagcgaggaactacccaactgcccgtggccaaagtggcccaatgagagtactttaccttcctctgttttcacatcaagcaattttc

SEQ ID NO: 68870 - DNA, 1402 bp, Arabidopsis thaliana landsberg
aagagagatccttgagacttttctttattcacagcatctgcatataacatgaaggttagcgaaaagtgttttcggaaagtaacagccaggggatcctaggtagaaaatcaaaaataatatcacacttaaatacacacaacatataaagatttcttaacctcctcacaaaaccatgtaaatcagactaagctttttgcgtaaaactaagtttaccgattgtagtcctcgatgatgttagaagagcttgactgtaggtcctgtggcaggatcttaaaattgactcaattgctgctttcacctttggtatgtaatggcctatcccatgacctattaagtgaacactaagaaaagttaagtgtatgaaaggaaaagcttattgagacctactaacaacctaattcaggttaacgggttacccttaaatatctccaacccaacatactggcttgaaggcgacataacaagggcaagtaaagcacggagaccaataatctttgcttcgcttggactatcttgctttaacagttctagtaacatgtgattcatagcaaagtcaaggttatgttcagctatggtcacacagaactcaacgagtttatcttgctggacatcctgagtgagcattccttttctcagaactgttagcaattgtgatgtcacactatccaagtaatcccatatacgatttggtggctgggacgaagcatagacactcaaataaaacctcaacacccggtgaagacaatcaagtgccatgtagcgatggttcttatcctgcatataaggcgcaaaattctctataatgaccaagaacaagcttgaaaaagaacaatgaagtcacaggtgctcaacatacttgaaaaaaaataagctgctgcagttacaactgcacatcagggtttgggacgtgataattggttccatgcattcttacttaatttaaattacgaatacaggcaaacttactctcagaagcttgtacagttgttccatgtgagagcttaaattatgatgaaatataagcgggtcaccgagacagagaagaagactcacaagcggatagccaacctattcatccaattatacatgttaaggactgtaatcacaaggtaggcatacaaaagtgatactaaatcagattgacgtacaccaagatgtttactctgtttctccatccactggattagctgcactctgatgcgtccaacagcctcataccagagtgtcagtgcaggttctgcaactgaaggaggccactggcttttgccaccatcggaaagtggcgccaagatgttagagagcatattgcaaagcgcatgataaagctcacttttacgtttgtgtatatcccggatagaagggttgcttttgctacaaggaggcagacgcattcagcccaccc

SEQ ID NO: 68871 - DNA, 613 bp, Arabidopsis thaliana landsberg
tggacggacgtcgatttctttgaaaagaggagatatacacatgcgacgaaagcattgatgtttgggaatgatatggcggataaatcgcaaactctaaagccccaaattcatgaaacgaggttgtttggtctagttactatgtttcctttctcgagaaatttaaatggacatgccattgttttaaaatgatttaattatgtcattgcgttaattttgattatatatattacgtgtcatttgattaagcatgtttacatggtaacgtaaggttcagtgtacacttgatttcgaatcaaatccctctttttcattatacatatttggggttactattgataccaaatgagaaactatagattttcaactcaaaatctatcagcaatgagtttattgaaaatgcaagagtactttggttttgggatattatccctaacatgcctcttcaaaatgatgataattctacccatttatttcgatagaaccttattatagaggatcattcccggtaggacaaaactctttattaaaactccaaagctcttacagaaacaaatgtggtcacattatgaatggaactagcaaaatgaaacccaaagctgaaaacggatagagc

SEQ ID NO: 68872 - DNA, 594 bp, Arabidopsis thaliana landsberg
aaaccactgcataatacacaagatagaatcactattctccattgcgctttatagttcttgagagaactagtgtgaaatgttatatgtaagcaatggaaaaactcacctgaaatgtagcacctataacagttgcggatttctcaccaacgccaattgcactcaaaagagcctgaaaatagtccaaatcagaaatgctgcagcagacaaattggaccaaaatagagaactcagaagctcaaaaactttagctttagctcacctgagtggaaagcatcatctttgtataagttgagaggccctgcaacaaacatagccgagagtcacaattcaaatttcacagtagctataaggcatacaagcatattctcacatacctgtaatgtgtcccataactgaaaccctacataatctggagttacactgccaggaaagccctgcactagacaaagtacaattcagccaaaccctaatccggaggacagattctaaagggaaaaagagagaaaacacttgcctctggtacaaatgcttgaagaactcgtctcacacatgattaaggcgatagcagacctatgaatcactcacaggagacga

SEQ ID NO: 68873 - DNA, 401 bp, Arabidopsis thaliana landsberg
gaaggcgaacaaccagctgagatcggaaactgctcgagcttggtccaacttgagctttacgataaccagttaaccgggaaaataccagctgaattagggaatttggttcagctgcaagcactccggatatacaagaacaaacttacttcttcaattccatcttcattgttccggttaactcagttaacccatttggggttatcagaaaaccatttggttggaccgatatcagaagaaatcggttttcttgagtcacttgaagtcctcacacttcattccaacaacttcacaggagagtttccacagtccatcacaaacttgaggaacttgacagtcctaacggtggggttcaataatatttccggtgagcttccggcggatctagggcttctttacaaatc

SEQ ID NO: 68874 - DNA, 768 bp, Arabidopsis thaliana landsberg
aaaaaaaaaattctcattacgttatctttagagcagaaaaatcattaaaaacagtctaataattaagatttacttagtagtaatctgatcagaacttgtatggtctcagaaatcaccacccgatttcgatctctatctaagggagtcagggttaatctatataatccaagtattcttgaaattcatcaacgtattagttatgtctccacagagattatacacactccttttggaccagtttcatttgtgtcttgttggtaaaaaaaaaacacagagaaatttctactcttctttttttttttttctttttttttttttctcttgaagagaaaaacttctactctcataaggtatagaaaaacaagaaccgaatctatacgatatattttggtcccatgatcctgtataacgcttcctcttcgatatcgcacctcctctagcgttcgcagtgcatctggaaattacaagaaaaagaagaagaagaaaaagaatttagggtttagtttaagaaaataaaacctaaaccctagagatcataaaccctgaaattttaattgaaaggagaagaagaaaaataggaaactcacctcgcttgaacaatgaagttcactgtcagggattcggggaacaatgacggcggagttttgcgacaatgtatgttcgacagcgattcctcattgtctccaattctctaatttaaaagttagatccaaaaaaaaaaaagttaggtcaaattggtatctttaagttttttttagcacttttcga

SEQ ID NO: 68875 - DNA, 1019 bp, Arabidopsis thaliana landsberg
ctccagttgatttggctgctcatatggattctgtctttggttccggaaaagatttactctatgcacaaccggcagattcttcaactgcttatgtttcaaaagctggcgattggttgcaagatgatttatttggtaatgtcactggtgaggcccaaaccaacgactcagccgtccatgacaagaatgagggacagattgtcggtggcaatggaaattcatccatggatattgattggatcggagatgatctatggcaaaccaatgaaaaaaaatccattgagaagacccctacagatgttaatgatgatgatgacgatgactggaatgattttgcaagctcggctaactccaagactcctaataatccactttctcaaaccatggaaagttcccaatttgagattttttatggacatgcgcaagataagaacggtgttaaagaacagagcgtggatgagaagcagaatactgatacaagcgtgatgtctgacataggcaaatgtcaagaagatgatctctttgggacttgggatagtttcacatcctcaaccattctgcagacatctctgcagcctcccaccattcatgcgaatccctctggtgaaaaaaatccggaaatgaacttgtttggggaaaataacaataacagagaccttgattttgatagcatctcacgttctgatttcttttctgaaagtagtggcggcaaaaccaactcagaggaagtcaaagtcataccttctggaacctcaaccttagacaggtttcttattttctagtcgattccttattctctaaactctctaaataaccttcatttcatgcttacaaggagctttagtaacatgttccggattttttttgtgtttttcgcttttgatttcagaccgagtgatcctgatggtagtaaagatcaaacagttgatcttgttgtaggcacaacgacaacagttcccaagtcaaagagtgatgttgcggaggagctgatgtcacagatgcatgatctctcatttatgctc

SEQ ID NO: 68876 - DNA, 613 bp, Arabidopsis thaliana landsberg
ttgttgacttgagaagagtgatttgagaatagagatcattactaagcaatcacggcataattaagtaattaagtacctttccaccaatttcctcttgaagtagaggtggttatgtcagtgcgatcattggtttctttgggctgatgagatggagaagtggaggaaccatcggttcgtggaggtgaatagtgttgctggcctccgtagtaaatggatgagctatagtaggaggattctctcttttcatggctgctcctctcatctttggaaacacaacaaaaagaaagaaagaaaaaaccataaatcatcaacaccttcttactttttactttttttttttttggtttctacttttaactttcgaagaaatgagaatcaaaaggtctataatttgcagaaagagttattgcaactaacatttctgtaaaacaacttggtgaaaactaagtgacgtttaaaaaaaaactcaaatagccttcttttttttgttagatcaaagattggccctgatgtgtatctttagtaaatgaaaaaatattactttcataattaaatcagatgatttcaacatataccctgatataacttattaatttatccctaaaaagaaaac

SEQ ID NO: 68877 - DNA, 642 bp, Arabidopsis thaliana landsberg
atatttatttaataaaaagaaaagaaaagaaaaaaactctgccaggatggcttctttgatcacaaccaaagcaatgatgagtcatcatcatgttttgtcgtcaactagaatcactactctttattccgaaaattccatcggcgatcaacaaataaaaacaaaacctcaagtccctcaccggttatttgctcggaggatcttcggtgtaaccagagctgtaattaattcaccggcaccgtctccgttgccggagaaagagaaggtggaaggtgagagacggtgtcatgttgcgtggacaagtgtacaacaagagaattgggagggtgaacttactgtccaaggaaagatacccacttggctggtttgtctttttatcatttttctatattgctccaaatatataacttatagctatattcgtggaaattttatacaaatatgtatcgtgcacactaaacacactcacactggcacatgcatatgtatataatacaagacaaaccccattttaatacatatatatcgatgcatcatgcattatttatagttattctatatattacgtatacaattttctttccttatacatgatttcattactaagaaagagtaagagctatttgtccaaaaaaaaaaaaaaaa

SEQ ID NO: 68878 - DNA, 528 bp, Arabidopsis thaliana landsberg
  unsure (1)..(528): unsure at all n locations
atttccccggtcgaatacatgctatcggttcttcgggatgaagcagccgatcccaaggatcgggcttgggcagcagagaaggcggcgccctatgtccatccacggccggcaccggccgcaagaaccatcgaactggcgttgcctgacacctccacggcagagggccttgtggcgggcnnnnnnnnnnnnnnnnnnnnnnntgccatcgggcagattgccccgagcgaggcgcaaagcctcatggccgtcatagagggccagcgcaaggcaatcgaaatgggcgacctcgaagagcgcatcgccaaactcgaagcggtcacgagcgggacacggaattgatgactggcaccatgcacaccagactgacccggctggaaagggtgaatccaccgcaccccatgaagggcctttcgaccgagcagcaggtttcggcttaccttgaaaagacagcggtcggctggaccgcgcccgatgagcaggatgcctggctgagcgacatgtcggatgaagcgctggaccatgcgattg

SEQ ID NO: 68879 - DNA, 540 bp, Arabidopsis thaliana landsberg
  unsure (1)..(540): unsure at all n locations
ccgacccaccatatctgacgtcacactcgccggaccggaggacaagtgaaacccaaccagcagcctgagccagtgttcgaaccgtcacccgacggttacgaccctgtcgcgatcggcgaccaactcgacaagaccgtggagatcctgtccgcatacaaccagaagctcgcggtcgccgggttcgaaccggtcttggccgcccagcttgtgctgcagctcggcatgggcctcgtcaccgcgcaactctcgaactgaaggaaggagggtccgcgttgcacacgtgttcgtgttcgaggcccgccggcgaaggagcgttcgcatgcaccgcatgcgcgcacgccgcggccgtccatttggaaacgatcnggcgtcctcgccccgcacctcgacgacaaacgcgcacgcctgtccaccacgtggcggcaactcaccggttacaccaccactggccagccgccacggtggcgactcgacaacgaccaaagagtgccgctacctggcgcgcaccacacaccattcgcgaccggtgacgtctcctac

SEQ ID NO: 68880 - DNA, 2346 bp, Arabidopsis thaliana landsberg
ttttggtttgcttatgtggtctcttgtttgttgacaggtattcaggtacaatctgatcgttcctttcggccgtcaaatgtttggactgaagtgggagaaagagattgatcgcttgaaagaataacatcttcagaagccaaaaggttggtcacactactatgttcttgtgtttgtagtatatctattgatagtatacgagtcaatgtggctattggtgcttaggctagatataaaaagaataagaaacaagtgtttgagttgtttcatgtatgttgtatccatcaaatactctcttgaaagataattatagctaagaaagaagtctttagggatcaaatcacgttctttaatttgaataatttctctaaatgagtaggctaatggaagtcaacgaatcaagtaagattgaaaagaaaaaaaaaaactcttttttgctgaaaaaagaaagaaatcgaatcttattttaagttttttccgtattaagtaaaagaaaatgagatgtgatagcgacgaaacatccactaaacacatggttcatgtccaaccacatgtttcttagagaacttaaacagaacaccaccacacaatttccatctcacaattctttctctttctctcttttctgtgtgagaaagaagactcaatggtctccaattgcttaagccttagtctccatctcaatctccatccccacaaacacaatcgtcattctctttcttctttaagatctcgcacaaaagctaaactctatcaacatgtctcattcacagattcaagccacaagagttcctacacttcttgtgtgtctacgttcgacattcaacgcaaaagtagcaaacactatgaattgggcaagcacagcttcagtccgatcctgcctggtgacaacttggttttgagccgatctggtgtcatccgcccacgactctcagcgatgaccggctcagaaattaatgaccacgggtacgacgagtcccaattcgacccatccctcacgaatgacgacttgaaaccgacaactccaagccagagaacgttttcatggttggatatgtcaagtttatggatcggtctcgtagttggtgtgcctacttactacctcgccgggagcctagtggatcttggcatggcgtggtggcaagggatcgccacagttgttacagccaatctaatactacttgtgccgctggtcctcaccgctcagcctggcactctgtacggaatttccttccctgtccttgctagatcatcatttggtatccgtggagctcacatcccgactctacttagagcattagtcggttgcggatggtatggtatcgagacatggatcggaggtgaagctatcttcttgctcttaccgggtcatattaagaagtctgctttgtctcatacactaccttggctcggcacttctccccttgagttctcttgttttattgtcttctggttggctcagctttgtattgtctggagaggtatggatggaatcagaaagctggaaaagtactcagctccaattctgatcagtctcacgtcctgcctccttgcctggtcctatctcaaagccggtggatttggtcacatgctttccttatcatccaagctaacctctgctcagttctggactctcttcttcccgtccctaaccgcaaacataagcttctgggcaactctagctttaaacatccctgatttttcccggtttgcaaaatcacagacggatcaaatcatcggtcaagttggtcttcctgttttcatggggtagtttacgtttgttggcgtagctgttacgtcctccacaagtatcatctttggaagagtcatatccaatccgattgagcttctcggtcaaattggaggcctcgccacaactctactcgctatcgttttaatatccctagccacactcactacaaacataggtgcaaacgtggtcgccccagcaaatgcgcttgtgaatctaaaccctaagtttttcacattcggaagaggagccttcttgaccgcagttctcggaatcgtgtttcagccatggagattgcttaaatcgagcgagagctttgtgtacacatggctcatagggtactcagcgcttcttggtccaatcggaggcataattcttgtcgattattacctgatcaagaagatgaaactgaacattggagatttgtactctttgagtccctccggcgaatattatttctctaaggggtataatgtcgcagcggtcgtcgctttggtcgccggaataatcccagtcgtgcctggttttctacacaagatcagtgctttgtcgaagatctcaaatgggttcgtcgttgtttacgacaatgctttgttttt

SEQ ID NO: 68881 - DNA, 366 bp, Arabidopsis thaliana landsberg
aattgagttacgttttacgtgtaaatagactttatcaaattgtctacaatatgtttgttgtaagagttttggggcatttaggcaaggttccgtacgagctgcagtgaaagtctatgtgtctatgtaatctagaagcagctacaatttgccaaaagatctatctctcgacatccatatcccattttccattttcctaataattaaataagtaaataactgtagtattttttttttttgttcacttctttagttagtttatcgcttattaagcaaaagccaagacaaaaatatgtgataagtcatttttttttggttataagcaaaacgcttaccaagctggttaagggataccagtccttattggga

SEQ ID NO: 68882 - DNA, 543 bp, Arabidopsis thaliana landsberg
tataatatggctatcatttatgctttaagaatataaaaagaaacaataaaatagattaaagtgattatatttgatttgattttttttaacgattctttaccttttcatcacaaataatttaaaactaaaataaagtattatgcccctaatacccttttttttttttttataaaacaaacacaacctttggatcatcgcagggcttatatgaaagagtgagactcttttgtgtagtatacctgaataggatagccaagacgaatgtgatagaggggatggcgttggtggtggctgccgcaaaggtggcggtggtgttctcgatggccacatagtagagattaagacttagcgtgagtctagatttttagaacaatattgttagatatttagttaataaattaactccatgaatcagaatttccaatttttagaaacattagtcatatatatatacccgcataaggagataaagaatattttgagcagcaagataaacgatagaggagaggactttgagctgcaaaacaacgttaagaatttgag

SEQ ID NO: 68883 - DNA, 173 bp, Arabidopsis thaliana landsberg
gaccgtgtccgaggagtggtcgagggtttgttcccactgctcaagaaaccgtcatttgcctgtccagtacttttttttttgcggtcacccatccgtccacccttgtgtgggtttattcaaaaatcctaaccaatgaaactaaagccgcttggaaaaactgtgcccatcttttt

SEQ ID NO: 68884 - DNA, 788 bp, Arabidopsis thaliana landsberg
tttgtcgaacatcaacttgaatccgagactccctcctccgttaatctcacgggagaatcagcacttgttgcgtcattttggtgataataatcagagtccaacaacttcttgggataatatggggataagatcatctttgcattcttctagaactgctctttcaactcatagagaggagcccgaggatgaggcatcatcgggtgaacaacaatcttatgcttctttggctggtcgtcgtaagagcatagctgatatgattcaggtacatggttccttattttattactaaaatattaattcattttacataaaggaagatttccctcttacactttcttctgtgttcaagcggcctcattcggcaggaaatcgtccaatagcacaagacatccatgccatttcctctgatacatcttcagaacacgcaagaagattaccggggtccgatataaattcggttaatctgctgagggagacagattctctctccagcgatgctattgctagtgaagatccctttaccactgatttggcctcacaaagttttactaatgcacagacagagagattgaacgcgaggcatgcgagccatgaggacaacaatctatctgtttttggtgcttctcctccatcctctgttgcttcaagaatgaggaggaaccaagaagaccaacaatctcagggaaggagaatgcctccacaatacacaccttcatcgtatcaggttcaagctagttcgccacagcaaatgagctatccgaggatagggtggtacacatgacatgatg

SEQ ID NO: 68885 - DNA, 970 bp, Arabidopsis thaliana landsberg
acctaagatctctctacctttgatgtgtgttcagatgaagacattttcttcttcattcaataatcccatatttgcacctaaaccagcttcatcaactatctcattctcaagcagtgaaaccgataacccttatagtcactcagaggaagtaatctcattttgtccccccctctctaacaatacacgtcaaaaggtcatcacaaggctcaaggagaagaagagagcaagagtgtaagtcttaaacaccgatgatcctaattcacattaaatagtatatcttaaacttttcataatgtaactagcattttcttaattcaggaaggagaaaaaagcttaatatggtcccaagaaaatggcagagtaacacaatttcttgcaatgcctttgtacataagacactaatctacctcttcatctattttacatggctcagtttcttgcatgtaactgtgaatctgaagattcatcacttgttgattattttccattttgtaaccacagacaggtttgcaccaaattcaccagaattaacctttttagaagtcaaatcacaaggtttaacttacaaaaacaatgatgagatagcaacagtgttaccaataaccataattggtgtttggcttaaatcatattgacaagacccattaaaaagaggttagttatagttgtgataaataagcaaaactcctttttttttcttttttgcttaagttccactatcttgcaagttttgtaaaacaaagaccaatcttatccctccaaaataatcttcaaaaccaagcaattagttgaaacaaatgattctcttaaccacaagctgggcctttggttattagtatctccagctacttattattctcaaaaaaatgaaacacacttctcttaatcatttctacatcaaatattaattttaatatatagttttcacacaaacacagtggcataaccgtaattactattagccttaaga

SEQ ID NO: 68886 - DNA, 473 bp, Arabidopsis thaliana landsberg
aaaggtgataatctagctgcacgaattcattttttggaaccaccatgtcctggaattatcagctcaactatggtgtctatgcttcttgattgctcaatagcctttcactttatgatgcgtctttaacaaatcgcgaccacatgtatttcttcacacattgaaaacaggtatttcgtttctgtatgaatatatagctgatctgtcctgcaggggacctcatgtgtatcttcggagaaaagcttgatgaaactgctctgaataggcttactgaatacgaattggcggaacagtgtgtttgggtgaaaaatcttagtcccatactttgggcactacgcatatgtgtcattatgaaacagaagttgtaaacatatttatcgtgagaggagctttctgatatggatggagagactaaacgattcttttaccatacctagaagacacgagagttagacttccttcttggagatatctac

SEQ ID NO: 68887 - DNA, 953 bp, Arabidopsis thaliana landsberg
gatataaatactataaattgagggttctcaagctatgagtttgagatgtgtctctagaagatcaagactgacctaatcatatccttctatatgggtttcacgttttctggaagataacgccaatgaaaacatattccgaacctaaggaatgggggtaaatgcctaacatcggaaagttggcctgcaaccgaacaaagaatggttaatggtctcttcataaattccacatctaggacaacaacatctatccggccccaacatgtctataaaccaactttccattttctgccattatgcattgtagtgtttgccacataaaatcgaacttttaatcttccaatccaaacatattctttaatcagaatgccacaacaataccattaatacaaaatcataccaaaacaaattatagactatttattcaacataatttttaaaaatctgttgaggttatatgagagcattaataatatgctcctgcttgtataatgaaaataagaaaatggtgcaacccacgtccatttcaggccggtggttttgtttattactccaaaacatgaactccattataacccaaatcgaaaccctttttaataaatcataatcaactatcaccattttcgaccaaaaaaaccaaaaatggtattgggtcttcggacaaagagccgtagagacaatggagtgtttgttgagtatctaatctcaatcaaggagctaaaaccatggccaacaagccaagtccctgcacaatgtgtccttctcaaatgggaacacggcgaaaacaattcaggctccttcatcgcggtcgtgggcaaagacactatcatgttcaacgagtcttttaggctaacactaacgttagaacccaaagttgggtccgacaataagttcacaagaatcttcttgaacttcatgtctacgacgcaaaaaagaaagacaagggcgtcaagaac

SEQ ID NO: 68888 - DNA, 371 bp, Arabidopsis thaliana landsberg
gaaaaactacgaaagaacagcaactagctagccatgtatgtctacaagaataaatccttaaacctacatgcagtggcaacttgaccactgggatgtagaaagggtgctttgttccagtctccgctttcataagttgaaaaacgaataaaaatgtatgacttagattctgaaaaatgtattactaagaatgtgcacgcattgcttaagtatgaagctctttggccaggaggagggagggatttctatctttatgacatgcttttcggtcacttatttaagaactatcgaattcttatgggaaattatcattattatcgaactatgacttgcattcaatggtggaaactgaaaaggtcaacacgtttgaactc

SEQ ID NO: 68889 - DNA, 1092 bp, Arabidopsis thaliana landsberg
acattagcattccatgactggcatgggatatgtgatatcttttcatgcgatgatgaatagaacggctggatatagatagcatcatgatttgaccctcgcatataagcatacctgtctagcatcttcctagaatctgtcctttccaactgccattccaacaagactgatgcactccatggatttggcacgaagcatccgcttagacttgtcagttgcattcatcaaaatagttttgagataaggcatgacagtatcatagtacttttgaaagtgttcctacaaatttagattatgttagacttagatcaagagttgcatgtagggaaaacaatagatgcaacacaacttctttacaaatacctgtgatgaatcagccactgaagcaagagcagttaaagctccttcttgcaccatttgtttaccattctgtacgaaacaccattataatccaaagttaatcatttaaaatcaatagagtgcaaaatatttgctcttttttagctatttatcttaagaaataatttacacaatggacttacttgtagtagcacaagtaacttgctcactactccgtctaaataaggtgacaatatttcaggagtacaattttcactgaagttgagtactgctgaagcagcatgagcctacatgaaaaggtcacaaggtactgctttagaaagtgttagaagattatattcacagagaaacaggggatcttacctgcactcgtggattctggaaatcatccatagcagcagcaagtgcggggagcactctctcatgatgttggttttgcaaatctggacccaaatctgtagacaactgtccaatcgcatttatagcagcccaccttacgcgaggatgaggactttgaaactggctcaaaaccattgacaccacttggtctagattttttatcatcacctacatcaaagttcaagatattcactatcagattgaaaaccacaaagataaatcaactcagaatcaatcattatttaacatccaattgaaagtaaaaacaatgaaacaattaaggaaaaagttcattaagacatgttattcactaaaaattatacctttgaacaacct

SEQ ID NO: 68890 - DNA, 2011 bp, Arabidopsis thaliana landsberg
caagtaaaagaaagaaaagaagaacccaagtaaaaaaaaatgcagagagttcacttctagatgtccctagctttgtctgaaacccagctataaacaatgtccatccccctgaatcctcaaaaacaagtcatgggtatttcatgactagtccccagctcattcttatcgaaacagagaagttagactttgacgctgattttgaaaactttcaaatatattatatagaagtaatccatcatcagttttacagtttcacatttctctcgcctcttttgtgtttttttttcttcacatttgttgtacatatgaatatgatacaaagagttgataaataagaatcttaaaatacagagactcaacaaatatatctgatctgtttatcacaccattatttgatgagttgtgttgtaatatttgatctgatgaagtataataatcctctcagcgtttgtcatgtgagctcagtgtatagttgatgttgtctgatataatctattactccatcttcagtcaagtatttaaccgataaccctcgcgaaatgcattgcctgaaagaagcagaggaatgagcaagagaaatcattttttagtgtatatgaactgttctcgggaaggataaataaatctcacactaccttaatctactcgaactgatttgattaggaacagtattgtcaacgattttgacgttagcctgcgaaagaaatcgagggggcactattcagtaaaccatgtgcacaatcacggactgatacagcagagtcagaacagaaacctggtaatacttacacagttttcgtttaagatttcgtcaccagagatcatattttcaacatcttgtccttctctacggatgcacacaatgccataatctttgcaaatagttcttaacttcaaaaaccaagtgttgaaaaaggagcataactgtgagtaaatttgataaacacatctacgtttatataacaatgctaccttggtttacctgttcagggatccaaacaccgggagtgcagaaagatagcagtaaatccgagccacatagtagcatgactttgagagattctagcattagaataaatttgtgtttgtcatttgcgtagtggctagcacgtatgataaaaacatagcaagcaacactattcagacgacccagcaattactcccaaaatgtaagtgagataaactttgaatagaaagatgctaaaggcgacacaggacacttcttgcagttatcttaccctcgggtacacgtcgatttgttgttaagaaagtcttgacccttgataaaaccgtcaaagttcgttggtagttgctttgagatgcctgtagaaacagcttccacatttttgtaaacaacgcattgttccactaaagagaactgattaaaagcttttcgaggaataagaaagtacctcccacggatcaaccattacaaagtcagagctttgacatgatacattacacatctctaaacgatgttgggcagataaaaggccctacacataatctgatgaaattattaattctaagggaaactaaacagaatagtaaacagaagaactttggggagctaaaaaagaaaaagaagctcttagtttcatcacacataacatgtccattagcataggttcagaaaaaaagagtcattatggaaagaaactaagattctcaagatgacaaataccttcttcttatatgcatcattaacaggagacatatatcctccaagaacatgaaatccttttgagcgtaattcatctctcgccagctctagcgacaaaaaaaaggaagagaacttatcagtttgatgtaaagaaacatatacatttgaacaaaaggtcacagcaatggacaagaatcaacaattgaaacctctaagttctgcagttcattcttgtcatatgccggctttataaaccaaaatatacaaagctaacacaatcatatactcaagagacggtttcactcaagaagtaaacaacaaggcatataatcttaagctacttttgac

SEQ ID NO: 68891 - DNA, 1145 bp, Arabidopsis thaliana landsberg
tgaaatatttatgtagaactctaacacctctctgcagaggcttatgaggtgggattctatttcagcctcgttgtaacccacaggctgatctgagatgaggttgtctaagaaggtcatacatgtttggaaagattcgttctccaggcgcagacgaggagcttcttgggattcaagggacgacccgagctcctggagcttggaacgtaagagtagatcagcgttgattttgtgagcgttggatccaatgccgtgcatagcgtcgaagagcatcaacatgtgattggctgtgagagacatacggtacatgtcgtagatatctgttaccgcctgaaaataaagagcaagtacacagacatacacatatactcatgagatcgattatgtgtgtatatatctatccatgcttcatcaccaaagagactgaagacttgactgacctgaatcacaaaaatctgaattgaagctttagatttggcatctgtgacgacagcatgaagctgcctgttccttcttctcagtgcgtcgttggaattatcgtttgtttcgtcctcattgcttacatcctccatcaaatcttcactggtaacgtatgagaagtcaggggatgtagcatctgctgcttctttgatacatgacacaacctcgagccattgttcgttagagaattgatgaccgacatctctcatcagacggacaagcgcagcaatacccgcaccagcaagactttggtgaggacgttttatcaagcttacaaataacatcagtaccttcttaaggagagggttaaccgtcttgtaaaaatttacaaagaggtctacaaccagctgtagagctaacgagcatgtctcataaagccaagactcttggtcgacttcaccattgtaacctctctgatctgttgaatcatcctcagatgggtcaacgtcctgacgcacatagtcgaatattcgaaataaaacagactcaaaaacccgttcccataacgccagactgaaatggtcaccatggttcctcagagtatcaaacaggactttcaatgcaaccttcctaatttctgctcttgggtcgaaactaagttcagataaacctgcacgggaaagaaagccaaaaatgtcaaggtgatgagaatgttgatttaagaagta

SEQ ID NO: 68892 - DNA, 476 bp, Arabidopsis thaliana landsberg
  unsure (1)..(476): unsure at all n locations
ctgcgactcctcggcggcggtctcgtccgtcgcggtgctcgcgccgctctcgttctgctgcgcggcctgcgcggcggggtagatggcgctgcccatcttctggctgacctgcgcggcgtgctcgctggccgtccggatggcgtcgatgtcgttgccctcgatcgccttcttcaggtcagcgatcgcggtctggacctcggacttgatgtccgccggcaccttgtcgtcgttctcggacaggaannnnnnnnnnnnnnnnnnnnnnnnnnnnnnnnnnnnnnggacttcggcctcctcgcggcggcggcggtcctcctcggcgtactgctcggcgtcgtggaccatcttctcgatgtcgtccttgccgagcgccgacccgccggtgatctgcaccgactgctgcttgcccgtgcccaggtccttggcggacacgttcacgatgccgttagcgtcgatgtcgaaggtgacctctatct

SEQ ID NO: 68893 - DNA, 567 bp, Arabidopsis thaliana landsberg
ataaactgaatttttgtttaccgtgtatttcgcttgttttttatattttggtattagcttttttctcgataggaatagttcttttttttggatgttaaatgacatatcttataaagagagttcccacttctttcctttatatacacatcgcataacatgtgaacttatcaaaacaacacaccaaatctctctcttcgtctctctctttttctatctctctttccttctctagatgatgcctcctaatgagcaagaatctagctttccgaaaacaccgagcgcaaaccgacacgaaactagtccggttcaagaaaaccggtttagctctccaagtcatgtaaacccatgctttgacgacgataacgaccacgacggtccgagtcaccaatcaagacaatcttctgttctacgtcaaatctttacgtcctataatcctcaaggtcgttaaattaatacactataaatatatctcaaattattatgtacagtaattttttctcacttttttctttaaattgtggatataatgcaagttgaggagttgacgtacagtttcaaatcacaaac

SEQ ID NO: 68894 - DNA, 521 bp, Arabidopsis thaliana landsberg
ctaactgtttcgccagcaagatttaacattgctagttgaattgacctgatctgattaacctgttcccattaatctgtattttgtagagagcggatttgcgctggaaccgtaaacttgaggacatgttagagctcactaaactgcaggatgagcttcttgattctgcctccaagtatgcactctgtacatacattttgatgagtcatttgattaattctgaaacactaatatgcgacttatctgatacttttatctgtgacactcttgattgaatctcaaagactggtgaagcacggtggggtgttggtatacagtacttgctccatagaccccgaggaaaatgaaggaagggtcgaagcatttctcttaagacatcctgtaagaatctttataatccatttgctttccttcagatgttgatattaacaaatagtctctctgctttcacaggaattcaccatagatccagtaaccagttttgtaccgtcgagttttgtaacctcacaaggcttctttttatc

SEQ ID NO: 68895 - DNA, 449 bp, Arabidopsis thaliana landsberg
  unsure (1)..(449): unsure at all n locations
gcatcccaggagccgcccagcacaccattaatgaagattatccgggtttcgctgtggcgctgatagaacgcttcgatgcggcggcgtcagaagagaaaagggaaaggtatcatccacgccgatcaccagttcgttttcccagccctgatgaagtttgatggcctgtttttccagttcacgaaccgtatggagaacgtcacgccccttttccagcagcatctgtccggttcgcgtaaaacgcgcgcgatgcccggagcgatccagcagttcaatgttcagatcgctttcaagtttatgcacggtatannnnnnnnnnnnnnnnnnnnnnnnnnnnnnnnnnnnnnnnnnnnnnnnnnnnnnnnnnnnnnnnnnnnnnnnnnnnnnnnnnnnnnnnnnnnnnnnnnnnnnnnnnnnnnnccccttacggtgtgcgatcgtctccgctgatg

SEQ ID NO: 68896 - DNA, 157 bp, Arabidopsis thaliana landsberg
  unsure (1)..(157): unsure at all n locations
ggaaaagcccccctttcttctcggtgccgcagagacaaanatgtaggaactggtgtctacatgtatatcacgngaagaaagganctcacgtgcgccaggcnatcactatactaatctaatacgaatagaaaactcctaatataatatgaaaagaaaa

SEQ ID NO: 68897 - DNA, 377 bp, Arabidopsis thaliana landsberg
gttaaattgtgcacatcaaaactagcatcaaaatttcttatgttttaccataccgatgataatgcccagcaatgcttcattttcaaattcgatcgggaccctccccgattttgacctaaaattagtatatcaaaaacccaatccttaacaccatcctcttctcttaaaacccatatataacgactctctctataattattgaataccacctcatttcttgctatacatattatccacatcaaacagaatatactaatttttttacaatcacatttcgacacgaactggaggaataacaaaatatctgaaaacttatcttcaaatttcaccaatttaccaaaggtcatataaaacatcttaaccacttgtacacctat

SEQ ID NO: 68898 - DNA, 453 bp, Arabidopsis thaliana landsberg
gtgctgatgggcggaatgcccggcatgatgatgggtggcatgctctgtttgatgatgggtggcatgcccggtatgatgaggggtggcatgcctggtatgatgatgggtggcatgcccggcatgttcgtgggcggcatcggtggcgtgctgatgggcggaatgcccggcatgatgatgggcggcatgtacggcgtgcctggcggcatgcccggcggcatgtacggcatgcctggcggcatgtacggcatgcccggcggcatgtacggcgtgccggccccgatggttggcgggatggtgggcattccccctcccggagctttcaacggaattcccggcggaatgtacggcgttccgggcgggatgtaccgagtaccgggtgggatgggtccgatgcccttcccgggtggcggctatccggtggctttcccggtggtggtttcccggcggtgggta

SEQ ID NO: 68899 - DNA, 553 bp, Arabidopsis thaliana landsberg
  unsure (1)..(553): unsure at all n locations
cagtgtgatttatttctttaaaaaacccggcagccacgccttgtttttatttcaatatagatgccgtcctcccggggtgtgcgccgggtaagttttgagataatacccttccccactggtattataaccatttttgaggcaatatttatagcggtgtactggacatacaatatttccatgcgcatctacatagccatcggccagatgacctcctgcatgcggacatttatgcgcaaaagcataaatcttcccttcgtgtcgcgtgatgcagagattcctgtgacctgtagttaccacccgtagttcattttcaccagccggtatataccctccgtgaatacgatgccaggtgtatttatcatcagtcattttaaaataactttggttttcgccggcagggattacattcctgctactgtaacaacatttctacatgcgggataccgtcttncaagtattctttattcgccacctcgaaaccgaacgaggcataaaaatcctttaaccggctgtgcgcggcgatcctgattcgtccggcaccatacatactgta

SEQ ID NO: 68900 - DNA, 579 bp, Arabidopsis thaliana landsberg
acctcgcttaaacttactaataataattttttatttctttaatccctcattaacatgtcaacacatttattttttctttattcatgtttcaagactatagaatttctcaattaatcccaattgatactaataatagcaaattgtaagtctcttgcatcttcggatcaatattttcacatgcaaacatgtgaaaatgaggagtaattgaaaaattgtaagcttgacataaaacaaacaattgaacaattttagctttgaatggtttgtacatggaacactgattaataagattgcggattaaaaccgcttctgtttcaccatttatatattctaatcggtagtcatgctgagatataaaagtaaaaataaaattgttgcagactgcattttcttccaaaattcacatcgtaataaaagaaacaaaagttatgtcccatattatgctgattcttatttagcttttactataaaatagaataagatttgtttttagtaacgctttaccttaaaaagctgctagagtttctaacttttagtttattatcatcagcacaaactcttatgaagatcttctattcg

SEQ ID NO: 68901 - DNA, 540 bp, Arabidopsis thaliana landsberg
  unsure (1)..(540): unsure at all n locations
gattgggcgtacaggcagtttacatggcnnnnnnnnnnnnnnnnnnnnnggagaagcgtgcagcggaatcgccagactcggcctttatccgcggtgtggcccttgtgatgagatcctattggtttggatattacacttccgcctggggcgacattccctacagccaggcaatgaaaggaactgagggtatcctgaagcccgtgtacgataagcagaaagatgtgttcaaaggcattctcgacgacctggaagcggccaacaccagtctgaaaaaggcggagaccgtgagcgctttcacacggtccggcgacgtgctgtacaatggcgacgtgctgaaatggcgggcctttgccaactcgctccacctgcggttcctgatgcggtctttcggaaaagacnnnnnnnnnnnnnnnnnnnnnnnnnnnnnnnnnngccagagttcggcagggatcgcctccgacgccgtgaactatccgcttatcgtcagcagcagcgacaatggcgccgtttattttncgggcacttcttccctcgatagct

SEQ ID NO: 68902 - DNA, 440 bp, Arabidopsis thaliana landsberg
cggtgctttcgacgtcgccggcctcggccggccgctgtgcggcgaaccggatctgccgaagcgtttgcttgcacgtgaagtcagcgaactgccgcgctacgaacagaacatgcagctgggacccggcgtgttcggcccgacaaccaaggtcttcttgttcaagctgatcaatctgctcggtcagcagggctggttctatctgcagatcttccggctcgccgatggcaagcccgcggacttcaggctcggcgtgttcggcgcgttctggcggtacctcgccgacgaatatcgtcaggcctggcgcgtgcatcgcgcacggcgcgcgaaacgcgcccgctagttcagtaccgacggcaccgccagccggaacggaccgatcttcgcgtcgaagtgtcgcttgccgtcgacgacgatcatgtcgaattcgccgtgcatggtgc

SEQ ID NO: 68903 - DNA, 302 bp, Arabidopsis thaliana landsberg
agcggttgaaaccgatgaatcaatgactcagctatagaagcgcaagatacgtctaatgtgaatcaatccctagcacaacatttgtacgcaaaaccattgctttctcgcttacaagcagtgcattgaaaataatcttcatgttcctcatccaccagtagaagaaggcgatgaggatgtgtcgcatgttgtttccacggaggaagatgtgcacatgtttgatggaggataaaatcacattgcatgcaactgtaaataagatcatcacagataggaaacgagcatgctcgacaacgtttattctc

SEQ ID NO: 68904 - DNA, 1730 bp, Arabidopsis thaliana landsberg
ttaaaggaagtgaaaataatatcatataactaagcacaaggtaggtcttttctttttgttcaaccagcaaagggtaggttattataaagaattagaacttgaaattgtaaaggcagtgcctactcactggagaaaacaattttaatgctacaaaacattagaattttcaaatcatgacatgaaaattccgactattacaatttcagcacagttctaacagtcagttggaagttggaacctatgatttccaggatcaagatgaaaaagtgcaagcaagacattcaaaatgtggagtattgactcactcgtgaattagagatattaatcttcttgtgcttcagagcaacttgaaaacccaagtcttctgccacattagagaagccctgcagagatgaatccattaactaataaactatcatcatagctagtcactgcaacaatcgatgcactaattttgtttacctcaaaaatttgttttatataggcattatccggaggctttgacacatggatcaatagttcactgtcccaagaaccaacactgttcaagcaaatggcataatcaatgctctcacgcatcctctgatcaaggctcttcagccactgcagaagatatgatgcttaatgaaggatacaaccaagtttacaaatgcaccaaacagaagaagcaggaaggatatggttttagtagaatcaataagttaggtcgagtaccttttgagttccttcgtagttgtagggtccaccagatgttagtgcaaaaagtaaattgtatttccctctcgtcttgggatttgagtacagaacggaaaataatctagccacttcaagaagcgccacaaccccacttccattgctgtcacttccaactgataatgcctacatacacaagtttgtcaggtatgtagttgatactacggtaagaagatccactactcatattacatactggagctgctccaaaggtatcatacgatgcaactacagcaattgttggaagctggctggaatctccttctgctcttaatcctggcagccatccctacacacaaaccacatcgtctaagttgttctgtatgtcaagcatcgaatattaacaagtaaaagagggtgaaagagcacatgtccagatccaataagtacagttactaatagtaactacaaggagtgggcagatcaatattaagataaagtaataatgttcaatctaggttcgacggtactaaacacgaaggaactatacaccaaattcctaattgctgaaaaacggaagatcttaaactgatctataaagatgatgaaagcgaaaacgattgctgcattgcaaggggatgcacatatgcatgctaccaaaaaccagacaatcagcgtttaacaactgaggtgtctacacaagctgtcatgctaatcctactcatcttaagatacagtcagccgaggttccaaaactaaattagcaaatagttgaagacacgacagatatatcaaagctagtcatggcattatcagaactaaattatatgtaatgactaatgaggtacctggatgtttgtgatggttggagatgcaattttcctaggctctgatacagagataacaagcttatatctgaaaatagtcacagaaagaaatagtttacacactcaaattactgtccatgagtacagcatttctggcaaatgaacaatatcgtagatagaatgagcatactcaaatattgatacacagtt

SEQ ID NO: 68905 - DNA, 1660 bp, Arabidopsis thaliana landsberg
aaaatgtcacaaaaaaccatacattaatcagaaaattacctccaatcttatataacctcaaaaatccaatcttataacctcaaaaataacatgtcacaaaataccataatatatcaaaacatgttctcaagattgcatctatattcatgtagagacgtcaccaaatattctcatggaaaagaagagagacattacccaatcatggcaggcggcaaggaaatgatcggcaccggaagttcgattccaaaaagggtatttagcagaaatgaagtctatatagtctttaagatacttaataagattgcggtgactgtgagagtcctgaacatatagagtcacctcaagcatccgggagctaaagggtaaatagaaaagatgagcttttgcagggtcctttgtaacaaatttgttgttgttggattcaataatattcataaaccagccttctgatgcataaatccctctgagtattggactatgcattattggtttatttccttctttgtaagcataaacctttaatatcttctccatcaactcatagctcctaatgaattcaatatcaactcaaatcagtatcatcataatatgagctttgatgcagttttcaactaaataaaccgactcaccttttgaacatggaaacattgcgataaagaggagcgtagaggaaaggatctttgtcatcgataggtgcattctcgatatcatattttgcttgtaaaagctctaagtcaggtttcgttacccactttggtttctgaaaaagaaaaaaaagaaacatgttatacaactgttacttcttaagtaagaatgtatcgtatcaagatcttgatgaacctttgctagacgattatgagaaatacggttttgacgcaactgcttgctcatctcggatattgacatcactccgaaaccaggcattttcgcattctgctttacatcaggaacaaatctcacaataggagaagcatcaccaacattttttttagttggattcctttccggtaccttgctagtggtaggcaatgtttcgtttttcattactggagacgggtttatactaggcaatgcacccggggcctttgcactagccacaggcgcggttgcattttctttaaccgtagacgggtttagaataggtaatgcaaccggggactttacgctaggagcaggcgcggtagcgttttccttgactagagacgggtttaaaccaggtaatgcagctgggggattagcgctaggagaaggcgcggtagcgtgatcctttactagagacgggtttaaaccaggggcctttgcattagcggtaggcgcggttgcattttcctttaaaataggtaataaaggcggtaaagtagcggtagtaggcgaaatggcgggggcagtggcatttccgctactatcatatatctgatcaacctcaacttcttcctcatctcccgcgggactcggcgctatagcggaagtcgagttacctataagtgaagttgagtttcttgaaatgggaatcttggtggaagaaaagatggaggagatagcgtacggtagctcgatgtattgaaaggtaacaatgagagcaaatgtgagtcctaatagccatagaagccgtctgctttctactttccatagccatggaaactcacgccgtcattttcaa

SEQ ID NO: 68906 - DNA, 683 bp, Arabidopsis thaliana landsberg
tactctggtttttgaagttcacataccgaaaaaacctatacgcagatctaatcacgcaccgaactaggcgttgtatatcctatccatttattgtacagctcaatttcacacttattagtctccatattctagtcaagaatcgcaacaataagtttcaagctcaagataggaaagtcattagtggttcacatagagaagcaacttggtgttgttgatcttccctcgggtacaataccggctagagtttcttcaattctaccttgtcttcttactcttcagagcgataagcttgtttcgacataagtggtatcatgctagatatattgggtggaaagattgtgttggaaacaaagacacgaaaagtcaagttgtttggaatcttcaagttgtaaaaccactactaacgactgtatttttcatccctactctctctctctctctctctctcgctatatctctcaattctaagttcaactccatctgaacatttctgattcttgaatagaaataacataagagagactaaatactacaacactcttaaccagaatgaactgaagcatcgatcgtttcaactctaaagaaagcatttttaccaattgaagctcacaaaacaaaatgatctcatatctgcatcaacaactgtttttcaatattacagagcaaaagtgaaacaattgagc

SEQ ID NO: 68907 - DNA, 751 bp, Arabidopsis thaliana landsberg
tggtacgtaaacactagccccatggccaatttaataatcgcatggcagtgaacttaagaagtttccatccacgctttctacgatcttattttttcttctcctttttcacttcaaattattttttattacttctcttcacaacacaaacacacggctcaatatgaaagtttctcagcgtaaaaagctgaatgtctttctccaagtccatatttgaatagtcttttctgcccttttagacttaatttgttaatttttgagtgatcttaacgaataccatgtactattatacacaaaaaatgtgaaatgtattttactacatagttttttttaatactctttatcttcaatttaactgatattaaggattttcccaaaatttatccaattttaagaaagtatataaaatattttaatatatattagaacaccatttattaacatcaaagtctctataatagaaatgctcattaaaaccaaaataaaaatgaaatgtttgtaaatcacaaatgcacttaaacaatatctagcaatagcatacattataaaataattctaacattacatagcccaaatgcaaatatctgtttggcaacaaaaaccttaaaaagtctcttgttggcaaagcgctacagagttacagtttataggcccattaaggcccatcaaaaggtttctgataaacaaagtcctcttcctctatcccttatccattcaacaccagcaaaatccgctttgttgcagaggatcacaa

SEQ ID NO: 68908 - DNA, 798 bp, Arabidopsis thaliana landsberg
  unsure (1)..(798): unsure at all n locations
catggggctagtgttttacgtacaaaagtctaaaaattgtcagtcaaacaggtccaaatctttgtaagaaaaataatataataatagcaaattttctaaaaattgttaaaaaaagaacaaaagggaaaagatgaggatgcagatgaaagcaaaatgtcaaacactagtttcagattttatcgggaactggggtttgacagttggtgtatgtatgtaatggcctctcatcaaaacatgtgcatctttttccttttttgttatttactgttttagctctacgtcttgtccaattcctctcaagtaaaatgcctttaatatgatactaannnnnnnnnnnnnnnnnnnnnnnnnnnnnntcttatccttgttttgtctaaatctttacttggattcctttatttttctcctctctttagattagtacggtttaaggaataccatctttctaattttagcacaaaattgcaagttggtgccccatcttagtaagcacatcgtaccacactttgattgtgtgagagacttcttcatcccatctctcataccaaacctaaatcaaatgactagtggtgcaacctgctgactccatatgaccataactaataaatcggtttatgaatccaactcatgtagctctatagaatagaaacccattcatttcacataatgaactgaatctgacattttatttacatcatttactactcaattttgtaattagcaagatcatctttttcattattcaacaattttgatattccataatttattaactctgtcatacatcataatattctg

SEQ ID NO: 68909 - DNA, 530 bp, Arabidopsis thaliana landsberg
  unsure (1)..(530): unsure at all n locations
ctccccgaccggcttgagccggtacggagccagaacgcacagacgcggagaataagagaaccatgtcggaagtcaccatcaagcaattggccgagctcctgggcacgccagccgacaagctgctggcgcagcttggcgaagcgggcatgcagttctccaatcccgatcaagtggtcagcaacgacgaaaagtcgaagctgcnnnnnnnnnnnnnnnnnnnnnncggcaagagtgccgcggccgagacgggcaagaccgccaccccgcacaagatcaccctgcgccgccgtcaggtgagtgaattgaaagtgtcgaccgccagtggtcggggccgtggcagtacctccaagaccgcaacgttgaagtgcgctccagcgcatgtatgtcaaacgtgccgcgcttgcccgatgacgccacggctgccagcgaacgcgaggaagcgcggcgcacattgcaggaatcgcaggagcggaccgcgcgcgaggaagccgagcgcctggaacatgagcagcggcgccgcaacaggcggc

SEQ ID NO: 68910 - DNA, 444 bp, Arabidopsis thaliana landsberg
cactgcttgctggcttgactcacataaagtacgtgcgtaactggcactatcatgtaggtgcgaaatctgtcttctcctatgtcttgttctcccagactgattcctatgtttcgaagtccacctaataagtgaaggaaagtggtatggatgtttggagctcaatccatcgaattcactcgcttatttgcgctgcgtggtagctctgagattattgggaggaggtcatatccaatgctttgtgaatcggaatcggttactgttcaaggcacgggttcttgaatcgtcttgggcttgaagaaagggtgtcatcccaaatctaactaaatagatggctaagaagacacgtgcgtagcttggctttgacctggcatttctcacatagcagatgacaagtgtgaagagctttggtagcgccatccgactcactacatttagtggaggcac

SEQ ID NO: 68911 - DNA, 1845 bp, Arabidopsis thaliana landsberg
acatttgaccttaacaatcatttagaactccactaaggattagataataattgggttatagaataacagaaaccttcgagaactcagaaggcacaaaaagcctgggatatcttttatctagtgtcacgtaatccctctccatgtcaaccaatcgcgaagataaaacctgcacataagtcacccaatagtttaataaagaataatgcacactgcgcttaagcactgcatcacacatacagagtgtaaggtaactctgcccctcctatctctgtcaccatcaatcttattaatgggaaatataacaaaaagtccttgatttgagaaagtggtaagcatcaagtgtctcatccttgtaaacatttccacatttaattcaatacgaagtccatcagaaaaaaaactagtaatcaggtaaactaactggagacacaaaaatgaggaacctgatatatgtcactaattttaaaagcaggcaaaataacacccagaggtggcaagaagacagaagcttggacaaataaacccacaaccaggaaaggccaagtaaattcgccacaaaaggaaagaggaagtataacaaccccaagtacaggaagatatcccgtcgacagaaaaagaatgagaaagctgaaaggattatcttgataaatggcaaggctgatatagtaattgaggagggactaagagatgtccaagtcaatcaataagaaaacaacgagaatgcaggaatggaaaggaagatgaggtaaccctgaggagtaggcaaaaaaatcactgaaagaggaatctcttggaacacttattaccttgcagacataatctcttcttattggcttaatcggtgaagaacgccttcaggtataacagaaataaggttagtgcctggtgcaggaacataaaatgccctgtattccagatgaagaacgtgacagagatcaaaaataaaacctaattgatgcttcacgatggtgtgcatcccgccgcaaagaggaactacgtgcatccctagaaatagatttgggcactggagtccgctcctttgtgtccttggacgtagcttttgctgttggagtccgatctcgttttatttcgagagcacgttttcgctcacgttctctttctccttgtctttccttctcccgtctctccaatatgcgttccctctcccggtccctagctctttgcctttctcgttccctctgacgctctcgttctctgtcatgttcgcgctccctctctcgttctcgctccttatctctggcgcgttgatcctcacgacgacgctcttcttctcttagatcaaactccctgagataacttgcccggtcacctttccggagatcatcaacacgaggagcagcgccagtaccacgagccagcatgccaccagggtagtccaagtcgagagacgctgcactatggatacctttcccggtgccataatccctgcctggaggtaagctaacaccataaccaggatttgaagaactctccggataaatatagtcatctaagtttcgccgaggaacagctcctaataacgatggggtatgttggctggcataagaagatgtgttgcgtactgataaaccgtgaggatcagactcaagccttcctccataatgcattgcttcttggtcagaatgacgcacagtagaacttcgttctgtaagataatcggtttgtctgccagaaatgtatgctactcagtgtaataagatatgttttttcttcaatcgttattgaaagttttgacaagaagttacagtagctttataacaaaggtcctgagagaacagatctgaaaacaatacatatacaagatgtaccaaaaaatacaaacta

SEQ ID NO: 68912 - DNA, 640 bp, Arabidopsis thaliana landsberg
ccggattatgctacaggtgaaactggtggtgatgccgatctcttctttctcgatttctagttccgtttcgccattgttgaggaaaaaaagtgatccgagactcaacaaatcgaagagaaaaggaaaactttgttgattcaggaactgtgaaacggaaagtctcaccagaaagtaattgcactctctttgaagagggtcttccctttgtaagcaaaggtaataaatgctcaatgaggaaagattatgaatttattctttcatttcggcttaacatctcttaataattgtttccctgtttttaatacaaaatttgaggtgaagccttctctaatgctacgtgtcttcatcttagcagatctctaaagcttggagcgtatggtaacggttagaagtgggatttgagccgctgtactgtggcagaaaatgacgtcgctgtacgttcatggcttcagctctggttttgttttaagtgataaataagacagaggatactttgggcttcggtttgtagacaaaactcgtcttgggcttatgtcttgtagtcatatgagagctgagccttgagttggcccaaatttggttcattgagggaaacaatgtcgtttttagttggtaccggaaattattttctttttccttt

SEQ ID NO: 68913 - DNA, 2622 bp, Arabidopsis thaliana landsberg
tcttgtgtcttctatggaatcacattgcactaattcactataaatgcttctgaccaggccgcagctgagatctatcttgcagcatttgaggcgctagcttcagtactgaatgcatttgtgtccttgtgctcagctggagctttcaaccttttagaaaacgatagtacattgttatccatggtagatggtgaattttggttacaagtttcggttccggctttcgtccgtaacattaaccatcttctcacagcaggagttctggtaagaagtagaagggcagttctgctaagctggaaggtaatgcacaatttgttttgacagagctatagctgtttaccagtggaatcatatatattacaagatcttatcagtggccttttgcttttggattgccaaaggaaaattctgagtctctgacctttttgtattttattcagtggctttgtgtggagtctctgttatcagtcatgcatattcttgatgccagacgtattccagaggatagaaagtcgttcttttcagatgatacagttaaaagcatttttcaagatattgtagagaggtgggatgtgtgataaatttgattcaagtagtcttaggatgcaatcatgcttatattttttgaatgacctctaactttccctttacgatttggcagccttgaaaatgctggggagggttctgctttgcctatgctgaaatctgtcagactcgctttggggatacttgcgtttgggaaatcatctttgtatggtttctcgggtgtggatactcaggttttgtaataattttgatctagattggatggaagttttgtgttcatcctttataataattaaaaaatatttcatttcttgttatgccttgcaagtagacgatgtggcagttggtcaaatcatgttggatattgcatatcagctgtaagaaaagaagggttgcacccattgctgcgcttttgtcttctgtgttgcattcttctttgtttagtaataaagatatgcacataactgaagatgagcatggtccgctgaagtgggtatgcaccaatccttcttaattaaattagttgagggaaccgatgagaaaaaatgtgtttatttgtaatgtcttgtttcacagttcgttgaaaaagtacttgaggaaggtcagaaaagtccacgcacaattcgccttgcagcgttgcacctatcaggactctggctcatgtacccaaggacgataaagtactacattaaagaattgaggcttctgactctctatggttctggtctgtaatggcttttatttctcttaagctgcttttgcaatgactttgtgatattgaattgctaaccgttttattatgattttagttgcatttgatgaagattttgaagctgaattgtctgacaataatgatgccagaactgaagtatcattattggccaaaagcccagaccctgaactgacagaagtaagagtttcagttttgacagatgatggattgatagatttgctaaaaaatttggctcagtaaagtgacaggttctgtattttttcctcagctttttatcaacacggagttgtatgcacgtgtctctgtcgctggtctgtttcagaagctggctaatttggcctatatggttgaaccagcaagtcaaaatcaagattgtcaggatgctcttgtggctggaaaattgtttctattggagcttcttgatgcagcggtacttattttttgttagtcttcacaaaatattgctaaaacaactagcaggcacaacaatatgctgaaaatctaattataatgatatgcacaggtgcatgataaagacttggcaaaggagctttacaagaagtacagtgctgtacgtgttgcatgtctttcctttatgttccttcattaagttttagatggacacttggtaaaagataaatcactacaagtgacagaccactttgacagtaatttctggtttctgtaccagatccatagacggaaaatacgtgcttggcagatgatatgcattatgtcgcgatttgtctgcaatgacattgttggccaagtaatggacagtgtgcacatatgcttacatgtaagtttacaagaacagactgaagttagtagcccacacatttatgcatgagaaaccattcagacagaaactgatatagaaatgattgttgcgttgatgactagacaagtgttggtgacttctatacaagtttttgtttgtcgagttaaatcgaagctgattgtttttgcgttttgtttgcttgcagagaaacaacctgcctgctgttcgacaatacctggaaacatttgccatcaacatttacctgaaatttccagcattggtatctaacttctctatgtgtttccaaaagcaaatttgtaatcaactataaaccgtttcgtgtcctaacgggctgtgttattacactttttttgtttatctctgaagtaaccactaattggttgttgtatcacaggtgaaagagcagttagttcctatactaaaaaattatgacagtaaagctcaggtaaatttacgcaaaactaagatgattgtatttggtatgacttttctgttcagtatattgatagatgttctcttgtaatctgcagcaagctctctcctc

SEQ ID NO: 68914 - DNA, 614 bp, Arabidopsis thaliana landsberg
  unsure (1)..(614): unsure at all n locations
tcgacgcatgggtgtctgctggttcttccatggtgacatcggacatgtcgggagcaggggcagcatccgctactggtgcggtcgcacgctcagcaacttctattgcaggtgttgcgggagtgacctctgcaagcgcaggtgtaccgaagagctgcaccacaaacacagtatccacgccttcaaatgtccccttcgcggnnnnnnnnnnnnnnnnnntatagttcccgttcatgacattcgcgcgatgagcaggagatttgagccatgcgtcaacgactgccgttgaatctgtgaagtggaccgcaagattctcccccgcatacgcatattgataccccgcttccttgaaccagtaccatggcgtgagcccttcaggactttcatgcgcaaaatatcctttcgcagccatgtcctcagccttcatctgagcagcgcgatcaaggacctcattggtcgtaaggggcggcaagtcctcccctgcccgagcctcgttggtttcggacactacgacagccggaagcacggtggagaccagccactttgagttggtccacaggaacgatngcacgttcgcgaccgcgaacgacagaaggaccaggacgaacatnccaagc

SEQ ID NO: 68915 - DNA, 726 bp, Arabidopsis thaliana landsberg
catcacacagcagctcttgcatacctttgcctttacgtagcgcttgtgagtttcttatgcagccctctgcttacagctaaacatggagttgcagttagccttgcaggtgtctgaaaaacgcgttctgagaatgcagacactatcatgtgatatgcttctacgtgactcaccagcggggattgtcacgcagaggcctagtatcatggatttagtaaaatgtaatggtgcagcatttctttaccaagggaagtattattcgttgggtgtgactccaactgattctcagattaatgacattgtggagtggttgcttgctaaccattctgattctaccgggttaagcacagatagtttaggcgatgcgggttatcctcgggcagctgctttgggagatgctgtgtgcggtatggcagtcgcgtgtatcacaaaaagggacttccttttctggtttcggtctcatactgagaaagaaatcaaatggggaggggctaagcaccatcctgaggacaaagatgatggtcagcggatgaatccgcgttcttcgttccaggcttttctcgaagttgttaagagccgatgtcagccatgggaaactgctgaaatggacgccattcactcgctccagcttattctaagagactctttcaaagagtctgaagcgatggactctaaagctgcaacaactggggcggttcagccacatggagatgatatggtacagcaagg

SEQ ID NO: 68916 - DNA, 127 bp, Arabidopsis thaliana landsberg
gtatacaggctcatgatggtcaaagagagtcaatactactagaccgaccggaatctgtaaacatctcaaacgataaagaagtatcgtgaatactcttcatgctcgtaccaagctcgaagaaccattt

SEQ ID NO: 68917 - DNA, 501 bp, Arabidopsis thaliana landsberg
  unsure (1)..(501): unsure at all n locations
ggtttgggctagtagctttgattgataagtcaggccactatctatacatacaagagccattttggaggtcgatccaaaatggctcttgtatgtatcagcctgattgaaaatctatttttccttatcagagtaattgtttaggttgtctttcgtcagagcgtggccatgtcgataacgaaccgggaacgcacatcactgttcagtaccctttggtaggcttcattgacataactgatgttaatgacttcaacgtcagaggtaatttggtgctcggcacaaaaatccagcatttcctgagtttcgggaatgccgccgatagaagatcccgtgatagccctgttgaacggtaacccttttaactggagccctcccgaggtaatcccacgcagatatgcacgccattgtcttttagtaaagacatgtaaaaatcataatcatgaggcgcggataccgtgtcaatgatataatcaagttagcgtttnnnnnnnnnnnnnnnnnnna

SEQ ID NO: 68918 - DNA, 3318 bp, Arabidopsis thaliana landsberg
taatatattagtcgcctgcaaatcgtcaaacttaaaccgagtaaaaaaaaactttgatggacggtggccgagttctctcatttcagtaattagtcgtctctaaaattggttttcgttccccgaggaggtttcttccctagtagaccataagatcgctgagaatatgtcgtggctgcgaacggccgtgaataaggctgtggaggtcggaaaccgcaaaaacatcacacgaaccgtcaaaaactatgccgactccgtcgtccagcacgctggccaagccgtcgctgaaggagccaaattgttccaagaccgcattgtaatttctcctttccttttaattattcccatttctaattagtatttgggtcttatttttctagattccagttttgattttggtattaagggcttttattacaatacagttgtaattatgacacaacagttgcattactttaggactagagtgaataatccggactgtaactttgcagggtgttggggcttataagagtgttcatcagacaattcagagattggaagaagctgcagtctcatatagaggtcaagaaagggcattgctgattactagatggctaagtgtgcttaaggagattgatagagctactgacagttctctaaaggataaacaattgagttcagaggaacaacttgcttctgatgaagcaaagaaacgtgaatgggtattatttttattcttttttttttttggataagaggaaaagaagaagttaacaattctcccacatcgtaaaatatcaagactagtaattaagtagagatgattgtgatccttagtgttgctgcgttagaatcttatatgttccttaactggttttgtcaaagagaaagaggaagatgtcatcatatcatcctcctgcattttagaatataaaaaaaaaagtattacttaaagtagataagattgctaatctgtagtagtatagggtaactttttctgctaaagggtttttcattaacagtgacttttgcattactattctgcgtcgaatttcatatgttgtatttatgacctttttccaacagaattctttctgaagatccctttgcatgtgtaggttttgtattacgatccagatataggcggtgagccacttaacttccgtgatgtttttctgcaaagtcaagctctggaggggatcgttctgtccatggtattcttttgcaacctaaatttgatcttttggtggctatctgataagtgataacagatacgtagtaccattttacctttatatttgggtgatgtgaaaacatatgtgccgtctatgggggttaaaggtttgactgttttattacagattattgaaccaccacatgacgaagaaatcacgctactcctggagatgtttgggtgagtctgctggcattccatattgcattgccaaaatttggattccaaaaggagtcttaaactgtttcttggaaagtcaacacaattcattgctattttcattcgtactgcaattattcatagaacttaacattgttttcagcctttgtttgaatggaggaaaggaagttcatgatgccatagttagcagtatgcaggatcttgctacagtcttttcaagttacaaggatgaagttttggtaagcgcttgatcagtaaaaaagtcagcatatgttaatttatgggcgtttggatctcctcctaacttttctattcttctgtgttgctttggctgcttttggacaggttaagcaggacgaattgcttcagtttgcccaaaatgccatcacagggttgaagattaatgctgaaatgctgaggtgataaatgaagataatgatgtgctttttgctcttgtttctctttattaatgaataatgagtcatagggcactactcatcttgcctcactgttgattgaattcatgttttcagaattgatgctgaagcttctgatttgagaaagaaactcgaaaagatgaatgcctctcaaattccacaggagagtgaagacaaggaacataaagagactcctttaacaatagaggtgaggataatagtatctccaagcctcttttttctccctaagctcatttcggtagctctgtgtgatagacttctcgttttgcaggctttcaaagaaacacttgcaaagattcgtctttgctccagattagaaggtcttctaattagaaagagacaactaagcaatggtgactcaccagatatacatgctcagaaagtaagtctgtgagctttattagtctcaatttatacaagttaattcgtattgttaattatcatcttactctactttttgtgctgatatggtatattaagagtttcatgtattccatgacagcatatacatttattgacttctggagtagaatgttacttatggaagataatagatattttgtctttgaaccaggtcgacaagctcagggtgttattagaatctttagcaaattcaacttccaaagccgagaaacgaatatcagagaacaggttaaacttattatcgactccagttagtttccttttatctgcaaaagactttttttatggttaaattttgatatgacatggtaaatttaccagaccggaagaataggtaataagtttcttattctttgtgttactatatgcatgttcagcaaatactactgattcaatgtgcaattctttccttgctatagtattttctgattaaagttagcttatgagtagcaaatttgaattatgggactgcaagacaatgccgatttataataaagcttgtcttgttatcacttatcccttagtgctattgagcggatgattagtcattggaaggaaaaataccatcaatggataccaattgtcatttgtcttttcgcagacttcagaaagaggaagcactaaaagctcgtgtggtgaaagcaaatgaaaccggtgaaaaggaaaaggtctttatctcccacttttatttgttcttttgagttttgattattgactgcgaaaaaaggaagattaaaaaaaacaaaacttaagcgtggcagcgttcgttggcatgtttatccagctgacagtattaaggttatgatttattatgtacaggagttgggtgccgaaattgcacagcttgagaaacaaagagatgagctggaagccgaactgaagagggtaatctatttttctatttatcgggtttcttgctttatcctggaggtttacatacacactttaaacagacgaaaattttgtcacttgacgtaattatataaacgtaagctcatcatgctgttgaactgaaatataatgatattattgattctatgtatg

SEQ ID NO: 68919 - DNA, 570 bp, Arabidopsis thaliana landsberg
cggcggccacattcgattcggagacacttgaacccgacatcgcggcgagcagtggcagcagaggtgtcggctgctgattcttcagcgcaaggaaaacgttggtaagggcatcggcccacgcagggcgctcttcagtcacgtgcgttagctcaccttcgactcaacgaattcgttgatgggatcgggcaacgcgtcataggtcagattggttagatccactctgtatgagacgtccgataggagtgcgaaattgggtatgaccggagcgactaggtccggtgtcatcgctgggaagtcactcttgacgtcgaaggcacggggctgggatcggagcgcccagtacgtcgagtagagatcagcgttctcgtcttgccatccgaagcgtgccacatcgcgtcgacagcgacacgatgtccgcccgcgagcctgcacacatgggccacgacttgcggcagtgtccttcccccctaggggaagttcttgtcacttgaatggacaacaaactgaggggaacaccacgcagcggaacagctggtcaggccttgatgacgtgccgcggcgttcgccatg

SEQ ID NO: 68920 - DNA, 234 bp, Arabidopsis thaliana landsberg
acgcaccagagccaaacaagaccggagaccacaacaaaaggaacacacgcgacagcaccagacacaaagggccggatgccacgccaaaaggatcgacacgcgaaaacaacaacagacatagcccaggggcaacccagggacggcgatgcagcaatcccggcgcccgagggagacagaagaacccccaaacaggaggcacgaaaccagcacgtagacaactctcgacgacagaga

SEQ ID NO: 68921 - DNA, 1450 bp, Arabidopsis thaliana landsberg
tattgtctcatatataaatggcatcgatacatttgcaaatatttatttttcctttgattaaaaaaaagtatcaaaggccgaataaaaaacatcattcggcaagttcatcgatccacgaataaaaagaaacgatgaggcttaatggggattcgggtccgggtcaggatgaacccggttcgagcgggtttcacggcggaatcagacgattcccgttagcagctcagccggagattatgagagctgctgagaaagacgatcaatacgcttctttcatccacgaagcttgccgcgatgccttccgacaccttttcggtacaatttttccgacaccaaaccaaacaacaacaactgtctactttaattgcttcatcgttattgtccaattaataactaatttttatcactcttaggtacaagaatcgctcttgcttaccagaaggaggtaatatacactaaattatatttgtctgagtttccatgagatttttgattatttgtttttattgtttttggatagatgaagctacttggacagatgctttactatgttcttacgacaggttcagggcaacaaactttaggagaggaatattgtgacattatacaggtttttgttactttatacaatcttccttaagtgtgcttctacaaaaccattttaccttctgatgtagaatgatataatataggttgcagggccttatggactctctcctacaccagctagacgtgctttgttcatattgtaccagaccgcagttccatatatcgcagagagaattaggtttcgtcgcatttcttattgttgttttacaaagaaaaatttgaatcttgtccgctgatattgatataattgtctacagcactcgagctgctacgcaagcagtcacctttgatgagtctgatgagttttttggtgatagtcatatccactcaccaagaatgatagatcttccatcttcatctcaagttgaaacttcaacttctgtagtatctaggttaaacgatagacttatgagatcgtggcaccgagctattcagcgatggcctgtggtaatgtatacccctcacgtttaattttccatggttcgttcacttgttttctgcgtagcaaatgttgttttatacaaggttttgtgccttttaggttcttcctgttgcccgcgaagtcttacaactggttttgcgtgccaatctgatgctcttcaactttaaaggtgaattttgtgagaaatatttaactcatgtagagcatgttctgaactagtaacctttgtttcttttcaggtttttattgtcatatatcggaacgtgcatccggggttcgttatgttttcataggacagcaactgactcaaagaccccggtaatggttcttttgtctaaatttcaaaaaacaactcttgacttttactatcacagagaaactgaactcccttgaatcttgttc

SEQ ID NO: 68922 - DNA, 2914 bp, Arabidopsis thaliana landsberg
atacaagggtaatatatacaggtgtaaacagccatggactcctcttgatcttcctttagaggtagaccttttaagaacactggaagtacctggattatataacttagggatgagtaccgtgtttcataaggtttcaggaagtaagcaaaaatacatgaaaatggcctagctcctagatcatacttgatttagcgggactagttgaggatgaacaacaatcatccttgcggtagcacctgctgcattatccctaacagcaaggtctggttctgaatccccgaaaagtggggaaattccgcgtagcacatcaccaaaatatctggtattgagtcaaagggagacaagtatcgcatggactgacaattctcatattcttccaaaacagaaggacgatgaatgagcatagaaatcaatggataaaagtctttacgactagagtagagttgaagcatgtaacacgaaaaggatacttaagagcagtttcacccccgtttttgcatagctctccaacacagaaagctgcattccttctattggttgcttctggtgaccccaactctttgagcaccaaaggcattaatctctgcaagagaattacccccaatagttggtttaataaggctcaaacaccaatcatagagaacatcagatgaggaaacgtacatcaacataggaagagattggaagacccatgtcttgagcaacctcagcaagactagcaactaccattgtcctatcctgtggaggacgtgaagctttctacagacacaagaagtgaaacagtaagtgcctaagtttcaatggaagaagatatgtcaatgaatactttattcactaatacccaccgcaaatttcatcaacggctcaaagaattgggcaaagacaggttcaaattgagaacccatacactttgcaaaggcgggaaggaggtcagaaactgcatccatgaggacctcatcatgtccagtatcatcatcatcaatatcactctcatcttctaactgctggcaagctgctttttccgtcagcagtagcaatgtcgcatcaacaaggggtgataaatctagaaccattgtcagcatatgatacatgagtaaggatcatttaaatatcctgaaaataatttacatcaaattgactccaacaagaatagatacccacacttttgaatggctgggtaaccataatccttcatgatatcggcaacactgatgcaagcctgagcaacaacctccttgtcgtcatcatcagtcatagttttgatataattattcataactgtatctgcgatggacaaaaacggtttcaatatcttcccgtcattcttgtgttaatgagaaaaaatgctgtgttatgtgttaccaagaatttcatttgcctttccagttccatcctacaaaagagccaaacattaggaaaaaggaaactaccatggctggaaattagataggattgagattcgatatatgcatgatcaagttcttacattatgagtctggaagatagcatgagctgcagccaatatatctgcaattcaaattagaatgacaagctgtaatgccacaatcattatcaagtctaacccatagattaggtaagcttttaaatactaacatagttcccacccagtataaacaatgacaattaatggaacagaatattgaataatcaatagattgaaaactcacgtttcaaaccagtaactgcttgaagccgaacatcttcatgaaaatatgcagaatgtttgtccataatcttcaatgattcctcgaggtagcttataagttagttaaggaggcataaaaaggtttcttgtaaaaagtccaaagaagaaacaaccgttaaagggaagttgaaggatacggtgcaaaagcagatttagtgtggagtgcaaacaggccaagagcttgagttgcagctgccttttcatctaaaactcctgttctaacgctaatgttcctaactctgggctcatcatcagcatcatcatcagaggataccccaccaaaatcattgacattttcatcatctgactcatcaatgtccactgcagatccatcatcaagattgcacgaagcaaatactaatggcataacacgaggcaaatactgcgggaaaaacgctatgtttactttaaacctaatcactggagtattatgaagtctatttgaaagaaatgtatgcacacctgggcaaaagtgtcatccaatatttctgctacgttgctgaagaatccatgagtatattctcgcaactcactgaactccaattcaaatccctggtattttgtgattgtgagctctttcttcctcaaaatagcatatatagttcaaagatacagaatataaatatatagtaaggcaattactgatattgcagcatcaatgaaaggtggcaaaatggcctccatcccttttctcccaacagacattgcaacaatccctacaagctcagtagacctggcacgggcacgaagatcctcgtctttggtgagcaccatgaaaaacttcatcaactctagaaccctctcagcgtatggattgaatgcttgctctgcagcagcagcaaccgacccaattgcagactgcaagcaagtagcacgacgcttaaatcaatatttcagatacaccagttcaaaagaaactctggcaaagattgtcagtttaccatgcatgtctcttgtagattacgcggactattttctagggctgccataagcttccccattaaatgatcaagcagcggaacaatttcctctcccatgttctcacagaatgctgctaaagcatagtgtgacttttcctgtagacaataataagaaatgttactaataacaaaaggtgataatcggcagaaaggtgtattttcaaaaagaagacacaaaccacactcaattggtttctttaagttacct

SEQ ID NO: 68923 - DNA, 1816 bp, Arabidopsis thaliana landsberg
ttgaataaaaacatatagaaaattaaagataattactatcaggtcgcaatatatacaagaatgtcaatatctacaattgattagtaacagtaaatgaaattagtaaaactaaaactacttagattactcaagtttgatcttttataaattccttatcaacaagataaagaaagtagttttttaaaaccttatttgacctaaattaggaatatgagtttggataacgagaccgacagatgaagcgatttttaaggacccttaaccctttctgccataaatgaatgaagctaagagaatgcctctgagttcaatccaaaaagagaaaatcaaaagcatattgccaaatataggatttagtcattttagagtctaactattagcttaacaaaaaaactactagtagatataccattggtcaacggaaaacaattaaattagtaaatcaaattttaaacacacagacaaaaccttttctttcgggtgtctcgagacgaacaccaacttcaaaacttctttctatttttatttatttttggtttaaatgttaacttctttctatttcctttctatgatcctcttctctatttttaggttttcaggtttctgagaaaatcttaaaagtgtcctaccaacactctttcatggcggtagaccaaagcaaagaagcttctcccgtgtgttgtgctcttccaatgtaatcattcaatcaaatcacttttttctctggttgttcttatatttgatttgagtttttttttggtagacatgatattaatgtctagaagtttatcttctgttctgttatgattttcattgatacttaacgaacgtttaagcagaattaacgaactttccctgaattttcaccgattttctcttaatttcccgcaaaatttacataagaacgacatgtttagtctgttcttttcttttgaatctcccgaggcaggtacaactctaaatattcaagttatgtcactgaagaagatccaaacgacataaatcatacgtcaaaacataaaagaaccaacgcgtttcttatgaattctgcttcagctcatggtaaaacctagctcctctgtttcctctgtttctatgtttgctctgttttctcttgtcctctgtattcttattcattgcttgtacaccaaaaaacctagcttcttccaacgttttctctcccttctcctcccagatctaagattactagaggtagataaagagaagcaagaccccaaatcaccaagaggagccctcgaagcctgcttaactcgttgctcaatctcttccgcttcatcttcatctgacgatcctcctccaaacagagaagctatcgacaacgcagatgcagacacagacgtacagtgcaagaatcacagagcatcttctaattggggaaaattcttcaagctatggaaacgcagatccatgaaacgcctctcttcctttcctccattaagtggcgccgccccaccgatcatcaaacaaaacaaaagtgcagatccaaacatgaatggcatggtccttcacgatatctacgatttccaatcatctctccaaaacttctcaatatctgacatcgaaattgcaactgacaatttcagtccaggtatcgagtttatcttcataacaatatactctcttcttttttacttgaaggactgtttggttgctactattactgcaattaaaacgacgcttctatgcagaaaacattatcggtagaggcggttacgccgatgtataccagggaattctaccggaaggaaagctaatcgctgtgaaacgtttgacaaaaggcacaccggacgagcaa

SEQ ID NO: 68924 - DNA, 465 bp, Arabidopsis thaliana landsberg
caatgcgatcatgccgttgcagatcggcgcgcccgacgttgcgtttccgcggctcaatgcgctctcctactggctctacctgctgggcggcatcgaggtgctgtccggcttcctgacgcccgacggggccgcggcgttcggctggttcgcgtactccccgctgagcggcactcagtattcgcccgagatcggcgggaatctgtggaccatgggactgatcatgagcgggttcagcacgatcttcgggtcggtcaacttcatcacgacggtcatctgcctgcgtgctcccggcatgacgatgttccggatgccgatcttcacctggaacaccctcatcacctcgctgatggcgttgatcgcgtttcccgtgctcgcctccgcattgttcggcctcgccgccgaccgagtgctgggagcacacgtcttcgacgcgttcaacggcggcgcgatgctgtggcagcatct

SEQ ID NO: 68925 - DNA, 697 bp, Arabidopsis thaliana landsberg
ttagtgtgtagataaaaaaattaatcaaatcccatgattctttccaaaaaattcaattaatagcagtgaccctttttatccatactcaactaaaaatattgaagtgtcttattgtttagcatgtcataaacattcagagcattaaaaattttcataaactaattagtttataagctaatcattgaatccttataacgtctcattataatacattataagaatggtttctttttattgctacggaaagtcactggcgaaggaggtcactagaaatatgtagtgaatgaagcgaaagatggagggagctattgcaaattttgagaaaagtatgaagaagagaaatgataagtagtgaagtgtgaagactttgaagagctttgttggatcattttatactagtctctcttcttttcgacaacttggttttctttaatactaattatgctttgtttagagagatacaattttgttttaagttataataattgtaagtagttggtcaatacccacgggtcaatactcaatactgatccacagaaaaagaattctattggttatcgagtactgcgtgtaaaacatacaatttcttcattgctttatatataatgattatgtcaataaagtgatttaatgaaccaagcttcactattgtaatcataatgtcaaattggtcactcccataatgagtaaagtgccc

SEQ ID NO: 68926 - DNA, 456 bp, Arabidopsis thaliana landsberg
gtgtaatggatatataaagagcatgaagtctatgacctcatatatgagatccactatgcctctgttggacacaatgtaagacgatggttcatatgatatgaaacaagaactggtcaagacttacattaggcatgtgcttggagacgagaagaaactcagtctttgggactgcagaatgcgaaaggaggacccgagtctctgtgggactaagcaacccatgctatgcgtggcagctacaaattgctttatccgtccgttatatcatgatcggagagaatcgatttcacagcatagagcttcctgaggtagagttcctaagaagactacttcgaatcctcctttaccaagaaaaccatctttgaggcagccttatggtgctaggaacagggaacggggagagtatcagcgtggaccatactgtcttttccattcatttgtaacttctgcatactagcg

SEQ ID NO: 68927 - DNA, 914 bp, Arabidopsis thaliana landsberg
tacaggtttaaactcccagtcaatctcggcgtggctctcatggagtccgatagaaaagaaccccgtctggactttacaggaagcaacagctataagaactcctctggctctcctcattcgattgagtcacacacagatctacataaagggatagctattctcaagaaaagtgttgcgagcttgactgggtattgttacaattcactttgccttgaagtacctcccgaggcgtcaacttttgaagcatttgccaagttactggctacactttcgtcatcaaaggaggggcggtctgttttctccttgaaaatggcttcttcaaggtaaagcaaactttatgttcaactcacatttatctccatatcttcggggaatccttttcacacgatgttgcttttttccgactttcgtatttggtatcttatatacctgtttagattcctggtaagtttatgtgtacttctgtgttctgatgatgcagatcaggcaagcaggctcaacaactcaacaaatccatatggaacgctcactcagtcatctcgagctccttactcgaaagtgctcatcttccggtacatgctaattcctccttttctcattaaattttccaaaggaaaacccaaacatgattaagaaccatattagtcgcttaagaacccatcaaactgtttgaaaattcatatagcttccacacattatatctctcgtccaaatcctttgaaaatggctacattttgtagatgttgatggttcatttggtggttactttatgaattgagcaattaaatgttgtgtttgtacacgatttctgaagcagttcatatgttttgtttctacatgattactttataacgatacctctaatatctttttgagcaaaggaacacaagtttcaaccaggacccggacttacc

SEQ ID NO: 68928 - DNA, 476 bp, Arabidopsis thaliana landsberg
gcaactcttctcccctttgggctggtcattactccttactgcagataaagtaattcaaaatgtcgttattcatgtgatagttcaacaataaaacagaatgatgcttcagggtgtagaaaagacaagtacaatatgtggtcgtgaggactaacattgttcttcttctgctcttctagcctttttaaccggataacgtgtggtttcttctggtactggatcaatccaagcatacccaggatgaacaagggctaatgcattcatagcagcagaaagtccattaagcctctcttgcaaaactagggacatgtgtttgtaatccttgcatgctccctcgcttctcaaacgggcagaaaactgatacatgtaacttgccgccattcgccaattgtgtcgtctcatctcataagcataaagcagcttgtatggatttggcttcatcattatatcagaacgtccggcctacaaatcatagagaa

SEQ ID NO: 68929 - DNA, 2733 bp, Arabidopsis thaliana landsberg
actactgctgaatatatgctttctctgaaaaaatttcgggtggacatattcaggtaaattgtctcttatttcctccatggtctgttttgattttacagtataggggcaaatggaactatgaataatcggtgtttagaactagtttaaaggcttctgcgattgtagtttacagaaaattcccaaagtatgttcaccccaaatgtgatgtgaggaaattaaagagcttgatctattgtcacttgatcctttttttatgagatagcttttgtccatcattgaattagctactgtaagaacctgtcttccatggcagactgcttggtggcatgactttgttctatgcaatacctaaggcataatttaatttagaagggtattagataccctgctgattgtttcaatgtcatttcatgactcatacacgcatttctataaatatgcattgctttcttcacgacaggaaaagaaaagccaccatcagatttggttgaccttcttgtccaggcaaacgtgtatgacatggcattcgctgttgttttgaaattatggaggggctccgctttgaaaaggtatatttcttgctttttatcttgagaagtcagattccttgagtattatgtaggtttaagaatgactgctttttctcagggagctgaaaaagatatttgagaatatggcaattatatgttgccctgataaaggaactctgtggtcatcgtgagtgactgttcattagttgcttggtatttcattgattacgtgttgacttacctgacttataaaaaatatcattaatatatagctttatttatcttacaaaaatgatgtcaggcctaatcttatgttaacatctaacgatgaagaagttactcattcgcctgatagaagccctgctgatcagggctctaagttggctggtgattgggaaattcttgaggtttatctggtcagtaacttctgaatccttgtctggaaatttcgtttttctctatttcaattggaatctattttcttaatactctggattttgggagcattgaaaagtgtttggaatgtctttgtgagcagtattaatccagaaatctgtccttacttgctctgaatttaaatggttatatgatacaccaaaatggcatcctaattagaggcatatctttttatcaatagtatttttggtaactgaaaccagagcagcagcccctcttcttgtcaacgagacctgcatgcattgtcactatcctttactaggagtgtaattggttcgctcaagtgtgcctgaagatttgtaattggtgcttggagggtttggaaattttcctttactgggagtgaattgtaaccttagcttaggatatgtgctatgtgcttgagggcttgcaggtttttcattatttgttccttgaaatgatgtgtgtattgaatatctataaatgcagaagaggtacatagacatacacgctagactaccggtttctgttgcttcaacccttcttcaagcagattcttgtatcgaattgcctctctggctgattcaaatgttcaaggtaatatttttggatatatgttacatattcttagcggatcacttttttgtatgcaatatagatagttcaattcatttaggtagctttgaaatcttggcatgcaactttgaatatgggtttgcgacatctttgatctaaataattaacatgcgtgaacaatgttgcattagtaagccttttaatacactatcaatatatctatatgcagattctagagtagatttttgtgttgttgtatatcatgttagatcatttcagtgcagagatgtttgacacagcatgtctgcttaatgctgaagagattgtatctaatatctcaatggaaatattgttgttcgcttgttccttttcatttacaccatggaaagaagcaatcatttgtaaggttgttatcttctggtttcattcaagttgtattgaccaatttcttgtgccttggacaggatggtcagaaggaaaaagctttgggaatggctgggcacgatgcaagtcctgcttccttgtttcagttatatgttgattatgggcgtcttacagaggcaactaatttgctacttgagtacatggaatcatttgcttcatcggtgagttatgatcaatctggggagactgtttgtcagattataagcatctcgccacaggatacgttgttatccatgttaggatttgtcgtttcgctagggttttacagcttatcatggtcaacttagagaacgtttaagatgcaagaatctcacgcaaaacagtaacacaaaaaaaggttgcagattacaccgttaaaaaacattagactaagcatgagtttgcatttgcatcgacattttcttgttaatagactgtgatgagcatgattcatatgttaggactgaattaaccttggtttttctctcttgttaaaaacagaaaccagcagaggtattgaagaggaaaaaggtatccggagtttggtttccgtacacaacagtagaaagactatggtgggagctagagaaaacaatgaactcaggacgaatggtggagcaatgccataagctgaaggaacaacttcatcatgcattactcaatcacttaaaactggtatggtacatacatttggcgaatgataataataataatcagtagaaaaaatgcaaatagtgtttgatcagtctaataagtgatattcatatttggtttgtttcagcttaag

SEQ ID NO: 68930 - DNA, 562 bp, Arabidopsis thaliana landsberg
gaaaagaagaccaaccacatctacccggcctcccgccaggcgttcatggacaccagcctcgacgcgggcgccaaccacgacgccgcacacccccaggactggccctacgaggagaaggtgatgggctgggccgcctggtccatcgacaccggccactcctacgccagtgacggtcgccaggactggcccggcgacagcggcttctcctccgcaggcttccaacccgcctggtggctcacccccgaccagcgcagccagatcaagcccccgctggacaccttctgcaacgagtccaacgactgcgacgtctccgacccgcccccgtgcgagaccgaacacaatcgaaggctgcgaccaactccactggtggcacgagccgaacaccgactggaagcccgactgcgccgacacctgcggccacgagagcatcaaatacctgaccctgcgcgccgaaccaggccgcggctaccgcctccaatacggcgaacccgactgcacggcggcccccgcgggcgccatggtcgtacactccgtccccaacggaacacccacctggagccag

SEQ ID NO: 68931 - DNA, 457 bp, Arabidopsis thaliana landsberg
tccaccaaaaaacagaaatatacgaaatggaaacttaaaagacaacataaaagaaaaactaagaacaaatacataaagtgagaggaaactacaaaaaaactaaaaaaagaggaaagagcgctaaataaaaaggaagacaaaaaaaggcaggaacatactaaacatttaataacaaaacaaacatggcacaaagccaaaaggcaagaggaaaaagaggagggacgagaacacataatgaccataaagaccaaaaactaaacctataaccataaatgtctagagtcataaaaatacttgaaagttataacaaaaggagaactcagtccaaagaaaagcacaaaagctaaagaaccagggaaaacaaaaaaaaaaaaagaaatcaaccaaaccggtaaaataaataaaaaaaaagaagaaaaggaataaaaaaacaaaaccaaagaagaaagcaaaaaaa

SEQ ID NO: 68932 - DNA, 193 bp, Arabidopsis thaliana landsberg
ctaggttagcataccgaacgactatactaaaggcagatagataaccttcctgatctatctaaccactgggtgattctaagtaggggcatagagaatttttgcccatcaaacttgtaaaaagccacgagaggggactgcgcctatcgtatgcgataacccgcatgaaattcagatgcccgcgggtatcgaggag

SEQ ID NO: 68933 - DNA, 132 bp, Arabidopsis thaliana landsberg
gtctattgtgtgttattgggtctccgcgatgatgacatctaactcaactatgactcgtccgatctttgggactgctaccatgtggtgtgctagtgcgggcgtatatgaaaccatgtctatgcatatctaatg

SEQ ID NO: 68934 - DNA, 608 bp, Arabidopsis thaliana landsberg
gcactacaccgaggatcttgagggtatgaactaaacctgagctccacgaatcgaatcacatcgacaatcggatcaaagtacggtaaatccatgaagagtgggatcatatctttcttcaacatcgacgagggaagattcagtcaggtcgatgagttccaatgcatgcctcacttctctagatactcttggggtttgtttcgacacagaacgaagcttctatgtcgcaaatgtaataattatatcggcaatgcttctcaggagaaggctcctgagtatgcacttgttacacaaaactcggatccgacatcgcctaggattggtagtgttacgaagtacgatatcagaatccgctcgcttcaaccttcttctgcggtcgctttgctgtgagtgcttcttctactactgtatatacccgccgatattctaaatcttcttcggagtttcggatttagatcttcgatgaagtgtttgctatcggcttggtactgttttgataaggttgggtaggcttttcagttgtatagtatcaacaacaatttgccttatgtttcttgctcaaattcataattggtgtttaccaattttattgtataaaagctgtttacaac

SEQ ID NO: 68935 - DNA, 564 bp, Arabidopsis thaliana landsberg
atcgcttcttcataccattgcgtgctttcttcgcatgtgaatcacgtccttgttctgcatcatcgcgtgcacgtttgccattcgcatttttggagttggattgtgaacctgaacctgaaccagagccagagccagaggttgagctcgatactgtttgttttgattttgatccgaacgacgacggcgaaacaattttcaagtcgtcatcgtcgcttgtgtccattttgtttttgttctttttctcatctttgctatctttgctgtctttactgtctttgctcgcgcttttttgtgctttaccagacaaaatgtaaccatcaggatgttgcttgtcggcgacgctttcgctgtcaccaacaagagcaatgagaaatgaaatctacgaaacaaacctatgtttgatgataacgttaacacgaaattcttgtgactcgtcctcaacaaccaacagcgaaccatcgcgaatctggtgtgtgtgtgtgtgttttaacgagcgagagtgcgttttagaccagcacttcagatgcagagagaagtttagcaagaaactttggtccgtgatcg

SEQ ID NO: 68936 - DNA, 633 bp, Arabidopsis thaliana landsberg
  unsure (1)..(633): unsure at all n locations
accccattccgagatttaagtagttattggtttggtcagttataattttttttttttcctagattcgttacaagttttttaaatgtagggagatgggctgccggagaagcccaacacaacataggtggcttgccaatttgcccagatgctttcgagtgtaggttatataagtttatcatatctccattggattaaaagtaggcaagatttaaacaaagtgattcatcaataatgatatgatatgtgtcattcatttacaaattatgtaacacataatagatattttgtaccctaaaattttgaaatttattgtacataaattttagaaaatctgttggactgtgactagttcttcaacttatagagagttgagtgtgtttataatcacatactgcctctttaaaaaacgttaaccaagtcgaaactcgaatatggtactaccacacatgacaaaatagaaaaaacacttgaatgtttaccaagtagtacttggtccattggcccaaaaaaaatgagaatttgtgctcctttgaaggagttttaactgttgacccacccaaaagatgtanattaggcacatttccaaattgatgtatgtaagaaaacttgaatttaagtttcatatatattaca

SEQ ID NO: 68937 - DNA, 553 bp, Arabidopsis thaliana landsberg
ccctagatcccttattgtgaggaatttgaccatgaaagttattctggttttcagttgggctaaggctagaagcgcagaggcattgaagggatggtaggaactttgcctgcagcaggcacctggcccttgtcactagatgcaggcccttatagaattgtgtttatcagtaaagtaagggcaatgcccaaagcccttccacatgtagcctgaacatctcagaccaagttaataggaaaagagatgtgacctgtggtcacttagactcaagacagatctccattctaatgaggtacctagaggccttgagttcttagccaataagctttccttctcagacattcctcccagcaaatggtatttaatctcaggcccatcctgagaagtggggtatggttttactcattcaatttctgccatgacaataaataccttaacaccatggactgcctcttttcattgggatccactgtggggagccacagagatggcccttgcctatagagccactgtctaatttcctgtaaaaagtctatttgcattctcaaccacaact

SEQ ID NO: 68938 - DNA, 510 bp, Arabidopsis thaliana landsberg
acttagattcgatcatatatataaatttacaattcataccatacatgtatcctctttttttttgtgtgtgtgtgtgtagccatgttgccattttgtagtacaaaaatgtctcatgagtcttgtaaaagacacgtgataacggcttccttcgaccaaccaaattactaatttccaaaatatagaaatcggtggaccatgcgtactccatacctcccatttattagttttatccgaatcctatgccaattcttcacttgtgttgcacgtatattaattaggaacaagtaaatttctttaaagcgctgaagctatatatgatctacactgaattgagaactaattctgcgatctataggcatacgttatatttacagttaagattagttatatcatatagcaagtttagattttgaaattacatcttcctcgtttttgtgttcacaaaaataacaaaagtgactagaaacattagtgatcatctcggcctcaatgtgtgcacgtgatctgacg

SEQ ID NO: 68939 - DNA, 617 bp, Arabidopsis thaliana landsberg
ccccttttatatgaataagggtttgtactttgtatcataaaaaattttaactttaatttgctgaaacaaacttacaagatctggagacttgcagccaaatgagcgcgagttcgtttcataagctaagagtagatctgaaaaagacattacaaagacaaaaagaaaaactatatattttcacaaattaaattgaaatggaaataaaaatgagaaccactaatcaaatatcaacgggagattaggaggccaatgatagaagtgtagtaggataaagacgagtccaaggcacgtgggctttggaatcgtttgtctatgttgcgacaaaaccattcttttttttgctaagaacaaaacaaaatcattcttatgcaaatccaattgacattaatttacagaaacaaaaccaataatcgcttgcgtagaacgcaacagtagtttcatctcaatgtattggccgataaatttcaaaataatatgttttgtttagaggtttggaaccaaccatatgccatgtttttgtcgtcccatatatttaatttgtttggctggatataagaaacacatttttagatgacagaaacatgtgaagtgtatcccacaaaaagcaccataataaa

SEQ ID NO: 68940 - DNA, 514 bp, Arabidopsis thaliana landsberg
gacaaaacccgatggatgccgtagaacccaggaacactccaaaccaaaagttttatgtctttacaccggcccacttcgcttcgatggattcgggaaaacgtttggcattttctttccccagagaaatcttcaaaacagggtgttctttgattcggttataaacctttttatgtttgatcttattggaaattgatcccgaaataatcccggacaaaaacaggaaaactcctgcaatcgccgcatgcagaatcgcccagaatgcaagcggattcaaatctgtcattaacacctcacttttgtgttcatcaacaatatgaaaccctgcgagtccctgtaaagaccagataagcaacatggcgaccggaaatgcaacgaacacgtttcccgcgaaggcaataaattgggatcggaacaaatgcgaaaataacaccgcaaaagagcggtacctgtctgcatcctgtacagaattggatagtccgttctctatcgatttcacgatcgttgcagctgtcat

SEQ ID NO: 68941 - DNA, 321 bp, Arabidopsis thaliana landsberg
actactggcggggattcgaggggttggtctgataacgctatctatgtgatgaaaaatcaatcgggggtcacttggtaaacctgggtaagctgccaccaagagtgtatttgacatgaaaggaaaacccaagaaactcagaccaaggaagaacgaaagatgacttaaaccaaggaagacggaaattcacttaaacaaagaagacggaaaacaaactgaaaaataatttagtcgttatgactgccacaactaaacatttaggaatgacacacggattgtaagacttcaactttggaaaagtaagatgtactgtttggttggatc

SEQ ID NO: 68942 - DNA, 555 bp, Arabidopsis thaliana landsberg
  unsure (1)..(555): unsure at all n locations
cgagggccttttgacggatggacagtggaaaaagcttgaaatagcaacttataattctggaagtttgncatcatcgcctgggtctggtactctctttgctgatctgaacattaaatctcccactggtggcaaaggaccagttgctgggattcctaataggcatgtgcgacgtactcactcagggaagcatattcgtgttaagaagggtattaaactttcttcaaccttttgtgcttgttatttggctaatacatccttttagtgagtgatatgactctttattagttcctttcaaatttgctttagtgaaaagacttaagttttcagtataagagttcaagtgtgtaggtgatatatggcttacttatgtggcaatgatatctgcagagggtgctggtggcaaaggaacttggggaaagcttcttgacactgatgatggtgactcctgtattgataagaatgatcccacatacgatagtggagaggtactttcatattttgcgccctttgtttcgtgttggatacttttccttgtttctttagtgtatttaacat

SEQ ID NO: 68943 - DNA, 556 bp, Arabidopsis thaliana landsberg
  unsure (1)..(556): unsure at all n locations
gaagacgtccttacgtgcatcctcgcggtcgagcataagactcgccttctcagttcaagttacgctctgcatcgtattgcttcttgggcttaacgttgtccttgataatctcgtgaactgtgatagccgggggaggcaaaataattcctgcatcctcacgagtacgctggacgaagaattccttaatcatgccagtgagcctactaagaccacctggacggaacttccaacggttcggtgcgtactgaacacagaaatcagtctcgaagtcagacttacgcgggaacaacttacggttcaccaagtagagaatcgagaacagttcctgcggcttattcaagataggcgtacctgtcatagcaagaacattcgctacagtagagcggagccgcgctccacacttaggacagtttgcaccatagaaatcaatcagtgcagccttctgcttattccaccatgaatcaatctctacgacaccacaagagtcgcanagattaggacgataagccaactgatggacacctctagcagtgatcttatcggctggcttgattcg

SEQ ID NO: 68944 - DNA, 271 bp, Arabidopsis thaliana landsberg
  unsure (1)..(271): unsure at all n locations
ttgatcattccaagctatctacttttgcagagggggtttgtacagtantaagaggaaggagaaacggggccntgtacatagatatgaagaagacttgcgatttatcaacctggccaagctttgcgagaccattgcagttagcacaaactatctgaggaagatccttccgagcggcgtaggctctcagagtgactcctacttttctcacacattctgcttcgtcacattccggacacctaagccacacacattttgagagcttaaattcaca

SEQ ID NO: 68945 - DNA, 2409 bp, Arabidopsis thaliana landsberg
ctctagcatttgatatattgtgtgagaagaagagcagctgccttgctttcttcttatcatctcaaggttgtataataaaaggattatcgcttgcaggaaagatgtgctgctgtggacacagtatctcttgtggctcgggtattgcataaatcaaaggctcatctccaatcaatgcttatgtcaagaaatgggtctctggttgaagacttctttggtcaactggtatgcacctcttcagatctgattttttaagaaaaaccctggttggatggagacttctttggtcaaccgtattgcctcgcttggatttgctgttgacaacatgcatacaatcttattatacagacacttctgtagcatccaatagtcttttgcctctaaaaaatattgaattatacaggacatgattagtaccttcattgtgttacgttgctaaactaatttctcctatataaaatgaagaactatctatatacaatatgtggtatcaaatacatttgaagtagtttgattaaaaggagtgattcatcaggttggttccgtacctgatctgacagagcacttacataggacaactgcgaggatactgctgcatgttaatgggtaaattgccgatcttcttatgagcttgtgttttcgaaagaagtgattagataaattgcacctctctcttcccttgcgccttctgttcgattcttactaacctcaggagttttaaaactgttacattgaatgtatgcatgttcattcagcttaaactaattttacagatatgtcgatcggatagctaattctaaatgggaaatcaaggagcttggaatggagcataatgggtttgtttaccggatgacccctaactgaatcatgaaatatacttaaatgtaataaactctttgaactaacaggtatgttgatttgatgctcggggaattcaaacactacaaaacaaggcttgctcatggaggcattccacaggaggtaaatttctctaagacctcatcaaccccagaagttgaccccctatcagtagttggaacctgttgagatttttggttttgtatgtttttgtatgtcataatcaaactaaaacataattctgctgcttaatcagtcaactgacagacagcatgcaatttaatttgataaagatatcagattgagaatgttttcttatcaaactatagtgaaatctcaaatctgtacacacttcaaactttttttcatgtacaggtccaaaacctcctacttgaatatggagttgaaatatttgcggagatgctggttgaaggcttatctcgaataaaaagatgtactgatgaaggacgtgttctcatgtcattagatcttcaggtacttttcctgatttaatccagtgttcttctcttttaacgggagatcagtaattgtatacatgaataataaaaatttcaatcagcattgataaacatcccaaaactaatatagaaacttcaaataaacaacaaaactgcaattgataaattgaatcacatgagtcgattttgacccacattatctatctgcttgtaggttctaataaatgggttacagcactttgtgccaacaaaagtgaagccaaagttacagatagtcgaaacatttatcaaggtaagcaaaacagaaactcatatgtaagtgcagactcaaaaacagaaacgtttgttacggcttaaaccaaaatcatcactcctctttgcaggcgtactatctgccagagacggaatatgttcactgggcaagggctcatccggtaaacaaacaaatctttttctttctggtctcgcataatccaaactgatatattttactgagttgatagaaatgtataaacatgggttgtaaaatatacaggaatatacaaaagcacaggtcgttggactggtgaatttagtagccaccatgaaaggttggaaaaggaaaacgcggctggaagttatcaaaaagatcgaatcagcgtctatgtagatcaatcttagaagcttgtggcagcttcgcgacatcaagtaatactctggtcttcttctgtctgttcttacttttgcatttgtatcgagtaatgtaaatttgaggataggccccccttcttggtagttttacctgttattacttataagtttgtctaaaagatcctcctgaagttgtatattcttgaagattgtaacacacaatttgtcctccatttaattacttgattaatgtcttaaatatttgttatatcagattctcacttggatttaccaaattaactgaactatagctcggctttactttttgttgttaccatttttatgagttgtagatatcaacatcttttttctgttttaatctcataatggcaattacagtaaaagaataaagagcaatagtgataaataaacaaaagcatgtgta

SEQ ID NO: 68946 - DNA, 1183 bp, Arabidopsis thaliana landsberg
tctatcttaccatcattgctactgtatcaagacgaataatgaagataccaaagctaaagataaaagaaccaaagctaaggataaataaagtaagagcattatcacttttattccacgtgtcattatactgatgacgtggcatattcctaattaaaaagtgttattaggatcacggtaacgttacttccctaacaaaaacataaatacgagatagatagctatttttattttcattgattatatagcctagctagtaatagttatagtaatcacgtgacgcacgtgacacatgacgggtgatgagaggggacgcttcgacggcggaagcagcggcggaggaaacgtcttcccatatttccgagaaggcacggacgatgatgccgtgatgatagtgagaattgaggctgaggaaacattgaagaagctctctaagttcatctttcgagtaaatctggttctctagtatcatttgaagcatagactgccggaaatctaggtacggatcgtcagaatctttctccacggcgacggatgcggtgccaaaggcgtggaggagggtgtggcggaggagatggaggagtggcagtgacggtaagtagacgagggacgtttaggctttttggagaaaaagttgaaaatagaggcgaaagttggttttatacagttgccgcagctgatgtcgacaacagatacagtcttcaggatcttcttcttgcttttagtcgccattgttctgactctgtatctgctaaagactaaggaggagagagaagaggtatagagattatggagggagggttgatatatatatatacagagatatagaaagtttgcatgaatatgtataaatgtatgcatgtgggtcataaatttataaatttcacaatgaatgtgtattagaaagtctagattttttattttggatttttgggtgatcaaaagaccaaatatatatatatatatatatatatatatatatatatatatataaaaggtattagtgcatataccacctagtttttttttgtatccttgcttggaaatatttttattgcagatgctattagaaccatgcatactttgatttcaaccacataattttgacaatctgaattcgaatgaattcaaatggtctttttttttatatataaaaaatgtattcagatgatgatacagacataca

SEQ ID NO: 68947 - DNA, 858 bp, Arabidopsis thaliana landsberg
tgcttttccgccacagctttctcttgctcttccagaattctctgcaattgtcaaagcttaaattttcttggacaaaacagacacattcaaacacaaacagtagaaactgcaccaatgttatgtgcataaaggacatggtgcagaaggacattgtcccatgttcagaaacaaaatgtatgctaaacataaaagctgcaccaggtaacaccgaattcgaattataattggaaaaagtgtgattcacataactccaaatcatggttatatgaggttaagctagtctatgtgatatcaaatagatgatgctaaaggacaaaagtaatgaagaatgaaccatttggaagaacaaagaagctacaaacctcggcttcagaagctctttttgtcttcaaggaaagacaatcaaagaggtcagagaacttcttagtacaatcatcaagttttccaacccggtaatactgctgcatttgataaaatggtgctgcaaaaagagattgtctgagttaaatctatgaaaatcatgtcaaaggaatcaaaaagggtataactaaggtcaatgaagccaagagaaccttatagatgaagtgaatgcacataaatcttaaaatcatttacaaaggacattcttttaagctgttctctcctaaaagatgaaacatttatcgactaagtcattttatacccaaatcttttcctgtgtcatcgccattgctggttatgttggaccatctagacatcccttcatcaaaacatacattgaggaaatggtttcagagatcctttaattggagtaaagctaatccatttctaaactctcaccaaggctttttattagtctataacaagctcgtgaacaat

SEQ ID NO: 68948 - DNA, 439 bp, Arabidopsis thaliana landsberg
  unsure (1)..(439): unsure at all n locations
gacaataacagattaacgccgtaacactaaataacatttattcatcaatttcaattcaccttcatgacgcacatctagctagggttgggtataaactgtaatgttatattcaacacttgataatatatatgcaaattgcattcaattcttatatatattataaggatattaaatagctgatcaccatctagaataccatgagcccatatattgatcatttagtaaaagtcattgagagagatattatcaacggagcccaaaccatcgaatgttccgaacttggagtaataattattagtaatcgtcgtatgtccacccaaaaaataaataggagtatccaaagacgtaagagccgccctgtctgatacaaaaaactctgtgcctgtggtgacatcatctatgactggataatattcatannnnnnnnnnnnnnnnnnnn

SEQ ID NO: 68949 - DNA, 132 bp, Arabidopsis thaliana landsberg
aaagaaaatgatggattaccttaaaaccaaaaaaacttacctcataacaaacaaaaaaacaaaccagggggggggttatttaatacaaacttacaaatccacctccaccaatttcttaaagacccaaaaaaa

SEQ ID NO: 68950 - DNA, 270 bp, Arabidopsis thaliana landsberg
caccgacatggtttggaaccatgactagccacatgcagtttcgttgtttttaagtaaagaggaaacgcccaaaggtatgctgaccaacaagggaggagtgaccaacagaaagtcctgtgtgatgtgtgtgtgtgtgtgtgagtgccacagagattttgattgagaactaagaacatcgcataaccacgttgaccgtgtgcagacgtggtaaaggaagttcgcgatcgactggcagttcaaatcatacgagagcgctttgcaactgagcaa

SEQ ID NO: 68951 - DNA, 388 bp, Arabidopsis thaliana landsberg
atggataaccttattgattgatatgaatatatagatggcgatgagacggcgctgaaaaattgagtaatagctggaaatagatgggctggaacaaagatttgtatgtggtctgtgatcttatgattgtatactgaattttcacagtggaaggacaaaggtctaagctggcaatgcatttgacttaggcgctgaatctgatgctttgagattattagcgaaactgaaacattgtacgcataacttatctctgcacgctttgcaatttaattcagcatactgaaggtcttctattacatattctttttttatgacatgtgatttctttgcatcaaattttgtagcttataatcttgaaaattagtataaacccctattttgattttttatg

SEQ ID NO: 68952 - DNA, 207 bp, Arabidopsis thaliana landsberg
catattttagtttgctttgaattaacagttgggcaggtcatacgacaatattatatttcatgttatatataaatataacataacaaaagatataatgataaaaaattagatttattatatgatcaatttagaaaataaatactatagctttagtataaacattgaggaatgtgtataaaaaaaaattttaaaaactgaccgataata

SEQ ID NO: 68953 - DNA, 1565 bp, Arabidopsis thaliana landsberg
ttactgtgtccccacttcctcctaaaaagtcgtctcatcaatcatcgtcagagcaacaaatttacctttagtgggttccaacttctctgaaacagaggaccaagtgtgtccttcaagtcttctgcttgatgaagttacagttggagacttggtaagcagagtaagacaagaccagctttgaacaaatgggatgtcggtaagactttcttcaatcttctcttgtttttttccttttgcaccttcaaaaaaattcttgatcgtatctttcgaatcatcaaattctcaaaccaacgaaatctcacctttctccctatttatgtgatctcagagtcaagaagaagatataggcacaagtgatacactaattggatcgttgttgaggtccatttctgaggtaatcacatccttggagtccttacaagcagaaacagagaggttcctcgaatgcgcttgctacttttatcgagtttcagttgtgttaatggagatacagacagcagagagcaacgtcatatgttcaattgatatttttgaatcactatccgatagtgtagatgttgccaagaaactggttgagaaatctcaagaaagcaacgaagccgaatcaactactgatctgagaagcattgaggcaggttttgaaggcgttgtaaagcagatgggtgaaactttgcagtccatacctgaatcaacattcgacgaggaagaatatataggagttgttattcagtctctttcaaatgagatgcagaatgctaccattggagatggtagtaaaagtgagatgatacacaatgggcagcagaagatttctgcaaagcatacaccggatattgtgtctgagcaaatggaggaagacctctatcccactgatcctgaattttcctatgaaagttacatgatgtatagtgaatcacaatcacaaatgactgatataccagatatcccaagcaagagcacagatgttagccgccagagaaagcatggaaatcatagtgaatcacaatcactagtaaccgaaataccagatatcccaagccagagcacaaatgttagcagccagagaaagcatggaaatctcagtaaatcacaatcacaaagtaccgaaataccagatatcccaagccagagctcgaatgctagcagccagagaaagtatggaaatcttagtgaatcattgtcaatgttaccacaggtgacacagttcatggaacctccataccaagctttcatctgcccgttgaccaaagagataatggaagatccagtcaccacagaaacaggagtaacctgcgaaagacaagcagtaatagagtggtttgacagttttggaaactccgatgagatcaactgtccagttacgggtcaaaagttgaccactgaattaagtgcaaatgttgtcttgaaaaccatcattcaggaatggaaagtacgtaacgaggcagcaagaatcaaagtggctcatgcagctttatccttaggcggttcagaaagtatggtcattgacgcgttgagagatctgcaaatgacctgtgaagggatagagtacaacatggtacaagtcc

SEQ ID NO: 68954 - DNA, 255 bp, Arabidopsis thaliana landsberg
  unsure (1)..(255): unsure at all n locations
tatcaatatgnnnnnnnnnnnnnnnnnnnnnnnnnnnnnnnnnnnnnnnnnnnnnnnnnnnnnnnnnnnnnnnnnnggatatactttaagaaaacgaacccatagattacaatgttattaactgacttttaattcatgtatattattaacttattaaaaataaaactcatatatatgtgtaatcttctttaatggaattctatctacactggataataatataatacttataaagtgagaatactttaattgatt

SEQ ID NO: 68955 - DNA, 4273 bp, Arabidopsis thaliana landsberg
  unsure (1)..(4273): unsure at all n locations
cggccttgtgcgtcgtctttttcttcttccgcttgagtggcttcgggtacgttgttaaaccctcaaaatgtcttctacatcctctcccacttgttttctcctctttggggttctctgtgagttctgattatcatttatcttgatttttaaactcttaggagatcgaatttatgtttttttacctgaaagatccaatttttcgtttctgattaagcccgccaagtgtctaagaagaatccataattgttgaattgtaaagattgtttccgattatagcactgagagactttatagaaagagtgtgactttcatgtatgaatgatttgggattgtttggtttcatattgttgaaggccccttgttattgttgattaacctaatgatattgttttatgtcatgagcggttccaaataatctatgttttggattagttttgcaagatgatgtacaaaatctgtaattcactttgcattggttcattgggtgatagatttagctgaatggtggtcggtggctacattttatattgtatttctttcttggttaatctttttatgtccttacttgttagttggtttcagagattgtataactatgctatgcctgtcatgaagcgtacctaaattttcttctgagtggtcaactttgtaggtcagattttaaaggaagtaaaaatgagaagacagggaaactttgcggactcatcacctgccagtgcatatggagctggacagatacaggatccccattctgatttccaaggtcaattagaggcattcacgcctgagagggatcagccatattcagattcacaagctgagggtcaatggagatgggaaagagatggccctaatatgtcaaggccaatggctactgccgcttacaatgaaggttagtctttacttcatgcgttggtgtttctagtcaggtctttgtgtcttagcattattcagaagagcaaccatcatctgatgggtttagcgtcttttattatgaccaacagttcttcccttaaatcgtgagtgttccaatgacattttacatgggatgagaggagtattagttctggttgagatatttgcagaaatctttagaggaaagatctgcatctagtgtctctcgagctttaggttttatcgcttgattccagtgttctgtttacacaggacaacaaggtgttgattcatcgaggacgtattaccgtggccaaatagatccaaaatcaggaatggagaagcaaggcagtgatccaagagctcaaccacaacaccaagaaaatccaaaaaccggttaatgataataaccgtggggtgcagacatttgaaggtcttgaacagaagttcatggatgatataacaagactagcaaaagatcaaatcgaagcagaggatgcagagatcgccagacatcgagaggttagcaacaaattggaaagttctgctactgaatcactctagtttgggttttaattagttaatctgaactctgtgtgcagaaaataaacactataaacgctagatacgaagaacagttagctacacttagagcacggcacacaggtaagagagaagagatcatgaggaaagaatcacaagctaggcagcaacaattcaagcagcaaaccatggggatgatggaccaataccatccaaacgtggttggtcaggccaatttaatgccatctggtcatccccaaggctacattggcagtgctcaagatccagcggctgtggcggatgcaccaccaagatcatatggctcagatcggtttgaagcatacggagagagagctaggtttcagggaggaaacagagatcacgggttcgagcctaggggtccataccctggtgggaatgtctatgacaccagctcacggttctactgatgtgatattacttgaacatattgtgttttaggggattcactcactcccactttttttgtggctttatagatcaaaatcaagcttttcagactatcctgaatttgaaaatgaaatcagggttccattttttaatcctgacgagagcattttagaattcattgttgaaccgtttaaagaaattgctgtacttaggtactttccaaataaaaatnnnnnnnnnnnnnnnnnnnnnnnnnctaatttaatagccaatttcacaaataaaaaccataatgtaatttagcattttttgttcttcgttatatcgactaatttatacagttaaaatatcatccatttcaattcaatggaaaccttagtctttgaaaaaatagatgatacttgtcaaaataagtaaataaagattattcaggaaacaggttaaatatgttttatgttttttttgtgtctgcaaagttaaatatgattttatgtagaaacataaattcgttgtcaaatacaaaaaaatgcgataatttacaaaataaaaattatgacaacaatagttagaactttgtgaaataaaactaatcatataaatagtgttaaaaataaaataaaaataatcatataaatttccctcctttccatatatcatcatcatcttcacaatcacaagagacaacacttcccacaaaaataaaaaacaaaaaaaaataaaaatttggccaaatctctctcttttttttgcttcttcgttgtagatgctgctggttgtctgaaaaacatttatctttcgctctgcgaatcttcctgtgcggaggaggaacaatgaacgggacatcgcccgacgaatctcccgattcgacaactcagcggatcgattcgttcaacggcgagcagagagtctacttcgttcccttgaggtaatctcatctccttcttcttcttcttcttcttcttcttctctctctatcgtaatcgtttgatttcatgtcgtccatcttccttttgattgagggaatattcggcgaatctgaatcgcatccgagtgagtttgattttgaatcttgtgggagcttacaaaaacttgatttgatctaaggattctggaacttatggatccttttcggatgtataggagatggttatccttgttttaagctttatagcgatgtattgtttcaaacatctagctgaagaatctaatgaatgtgatttcgatttactatgtggcgagatttgcttttgtgttctttattatgattaggtgatatatcttattcactttgaagaatttagtgctcagcaattcagatttcatagacaatgacagttgcgtaatcacttttgcttactttcttaagcctaagaggctatgttttgaggctttagtgttgattgaaatatatatggagtgtcctgatatggtttcgtgcacgatcgttgagtcaattaaagatctacgatatacgatactctttttttttttttcagatttatataagtactctcaaatggtatttggaaattagtcagttaagcaatgtgatatttaaacttggaattttcaggtggtggaaagatgcgcaagattcaatgccttctgaatcagttgaaaaaagagagatcttgtatacagcaagttgcgggtcgtcttatggaggcccaatgaagttgataaataacatttttaactctgatattttgttcgatctgaggagagaaggagatgcgttacagaatggtgaaacgggagaagcaagcgtctcaggcagggactttgctttggtctcaagtgatatgtggctgcaggcactaaaatggtaagtgttgttttctctctacatatctgatgcttccttctagaatggcttgggtaaatctgtcactatccttgtcatttttagtgttacatccaattgaactggaaatttgatctatctcagtatccgatcaaatgattcttttatggaatttttcgtattttctgcatctgttcattctttggagaacgagtttttaaagaagaggctgaggtagattaggaactttttgggtcacatttgtgacactaagtagaatttgcctatatattggacgtagcctgtttaaatcctatatgagaagttagtattaggatgtggagaaaataagtataaaattaaatcatggtaggacgtaggagaaaagtataaagtttaataaaagttattgatatgatgcaggattactaatcatgctacctatttctagtcttgcaatatagttggtagttggtaccttttgtatatatgcttgggtttccgatccactatgccatctaaaaagcgagagtgttccccaatatttcttcacaggtatcatgatgataaaaatactgagaaaggcgtaagaagtttctcggc

SEQ ID NO: 68956 - DNA, 577 bp, Arabidopsis thaliana landsberg
cggccacgctctctttgcgatcagaacggagtggcgacggtagtctccccagtttctaattatccgtacccatggcacagctacggtgtttgacccaccagggtaacggcaaattcggtaaacgagctgtttatctcaaccgccagcctggcaaagcttcgggcgtacctctctgataatccgaacgcgggctatgtgccaaaacctggaacgattcagaacggcaactggaacaaaatggttccggcgatactggtcagggacggcgttgtttacgatgtgcaggccagatacaacggcagtttttttaggcggtccgtggagcggcaatcgtacaagattgatttgccggactaccagaccattgacggtcaaaccagcattctgctgacggacaaagatttcatgacggtggtggggcacgcgcttttttgcgaggctggactttccacttccaaatcagaatggactgatctttacgtgaatagcggtacgcgcctgattcgtttggaactggaagaacacgaaacccggctgttctcgaacttccatgaagcgcaagccgccgtcacaggac

SEQ ID NO: 68957 - DNA, 416 bp, Arabidopsis thaliana landsberg
  unsure (1)..(416): unsure at all n locations
agcgccggcatccggaaagtacgccccgccgaggtcactctccgttgactttccgtacccagcgatcgcgagcaaacacgaggcgggatggcctctcgcctacagcagcgggtgtgccgcccagatctaagcgatctcgtcgctttgcgnnnnnnnnnnnnnnnnnnnnnnnnnaagctctgacagcgatgtcacggtcagcgaaacagtctggcccatccggcgagatttcgaaggggcctggccggtattactgatgaaggaccatgtcgcgcgacccgattcttcaaaccctgccccttggattcccttggcagacgttcgacccgttcctgttttgcgtccatcacgacgacgcatacccgtccggtaacgacaagctcggtcccgcggcgtcgcttgcgggccgcgacctc

SEQ ID NO: 68958 - DNA, 494 bp, Arabidopsis thaliana landsberg
  unsure (1)..(494): unsure at all n locations
acggatccagccggtggcctcggcgtgggcgataacccctgcgagctgggcgctcatggtgaccaggaaggcttcttcgccctcgtggaactggcggcgctccttttgctggatgaccaataccccgaccacgcggcggtggtggatgatcggcgcaccgaggaaggaggcgaatttttcctcgccggtttcgnnnnnnnnnnnnnnnnnnnnnnnnncggcagcgttttccaggttcagcggctcttcccgggtaccgaccaggccgaccaggccttcgttgggggccatgctgaccttgccgatggagcgcttgttcaggccttcggtggccatcagcacgaagcggttggtttccgggtcgagcaggtagaccgagcagacctggctgcccatggcctccttgacacgcaagacaatgatccccaacgccgacttgagatctttggcggagtttacttnctggacgatcttgcgcagcgtattgagcatgg

SEQ ID NO: 68959 - DNA, 559 bp, Arabidopsis thaliana landsberg
caacgcccagagagtagaactcttgtgccttcttgtaaagactagctttccttttcttgtaagatggtatccttgggggatcgggcgctatcctttgtaggtcgaccactttcggaaccatcctttgtaacctgagttattgttatatattacaaaaaaaaacatataaacatataaacctttttcccaaaaacaaaagtacaaataaattgaattgatatgttttgtaaaatactttgtttatatatgtttataggcgttttgtgaatagttggtctataaacactcaaattatgatcaaaacaacccaaattaaaggcgttttttctatgctgcctcaatgcccacacaaaccataggatagagcgaaagaattttaaaattacactcacgaataaatgagaaaacgcaaagccaatagtcaaaatccgagaagtaggagctagctaattctcgacaccctcaaaacgaaatcaatcccacaacagaacaaatgaaacatgaaataccttaaagccagagcagaattaatgaacatatgtaaaaatgtttatggaaa

SEQ ID NO: 68960 - DNA, 3550 bp, Arabidopsis thaliana landsberg
gttctggctctctagcactttgtttctcctattttgcatgaatgctttgaaaaagttgattcccacttctttaggtatttgtccatccaaaaagtggtaaaggaaatggctccaaggtctgggaaactgtttccaagattttcattcgcgctaaagttaatacaaaggtctgtatttaattgcatcactagcagaaagatcatttagtaattgtttttatgagggtaaaggttattctttgatgacaaaaaggcacacggattttgcttcttggagtagctgacttgattttgtgctacagtagaaaattttggaaaatttgatattgatcatgtgcttcattgtggtttatcaaagtcaatagttactaattgatttttccctagtcataatttatacttgcagcaaatgagcgtacagaaagtgttatatatacatattattttgctttagcagaaattgcgacatgacttccacaattttgccattcactgttgctttctagtgatgatatagcatcatgacacacaaatgttttcatttttcatgctagaggtccttagtttgatattcttgatttaccatttaaatcaggtgattgtaacagaacgagcaggacatgcatttgatgtaatggcatctatccaaaacaaagagctccatacatatgatggcatcatagctgttgtaagttgtagaccgctttttctatcttgcattgacccaaattatcttttttgaccgtggttgtagtgactgagatcagcgcatttgtgaaattatttctgtggtgtgacataaccttcatattcattacatctatgagtcaaaatatggattagtaaaagttgatgaaacttctccatttctgatgttagtagtcatattttcttcctcattccgcttttcatgatatgattgtttatgtcttgaaaaatcaacctatgtcagggtggggatggtttcttcaacgaaatccttaatgggtatctcttgtcgagacttaaagtccctcttccacctagtccttcagattccttcaattctgttcaaagtagaggtagctcctcagttccagaaccaggagatgaagttcatgagactgaccaaaaggaacactatcctcttcttcctgattcagttcaagaggtcatgaatttcagtatgtatttgatcactttatctcgtctttgttcaaccgcggggacaggtaactagttttaatatctgggtgttactgtttacctacagggacagtcaatgggtcatgtgaaggtcagtgattttagttctctacattgcctgctccgattgtttgattttgtcaccctttcttattaaattgcattcctttctgtttttcttgttcctttttgttgacaatctcgcaggaattgaagatcccgatcatcccttcagtagtgaaaggcctcgattcggcctcatcccggcaggttcaactgatgcaatagttatgtggtaggcttttttatcatcatttattcatagtcatccttccactagcaaaagttatcctgcaccatgaatgggaaaatgtttcacttgtatcagcaaataaactgtagttgattactaaataaataactactgcatatgcgttttcaatctctactgtctggtttctctttttctacatacaaattttgaaagatttggtgatagcttcaggaaagtaaaaatagcttctgataagcttcaagttttaaactactatttatgctcttgcgttacagcaccacaggagctcgtgatcctgtaacatcagcgctgcatatcattctaggtagaaagctcttccttgatgcaatgcaggttgtgcggtggaaaacagcatcaacctcgacgattgaaccttatattcgttatgcagcctcattcgctgggtaatggactaaaccttttttgttgagatgttctgtaacaaggaaaggcagattttgttaagtcatgaagctctgtttttcatccttcacttacaagtccggagctttagttccttattattaacagcatcctcaatatctttaaccattagtgcctgtgaaagaaaacttgatttctccaatctctaacagagttttgtacaattgattagttcagatacgggttttatggtgatgtcatttcagaaagtgaaaaatatcggtggatgggtcccaaacgctatgactatgttggaactaagatattcttgaagcacaggtatttccctaacatatttaccaatttaaacttccaaaagaaaacattagtggaatttcctccaaatgatctacctgttttttcgtccaagcaaagcactgtttttttgagttgttaatttatatgttaatgtaagatcatacgaggcagaggtaatgtttgaagaagctgaatcagagaattctaaagcttccctacatacgcggagtaagacatggccatttcgaaataccacaagatcagagaaaatactatgtcgtgcaaattgcaagatttgtaacagtaaggttggttggaacagtgcaagcacaacacttaacccctgtccagaaaaaacaagatggtgtagaacgaaaggacggtttttgagtataggtgctgcagtgatgtcaaaccgaaatgaaagagcacctgatgggcttgttgtggatgcacacctctccgacggtttccttcatctcatactcataaaagattgttctcgtcccaagtacttatggtaatgtctcgacttttcctattgtcattcattttatgagtaaggcttatatcagagattgtaatgggttacaggcacctaaccgagcttgcaaaaagaggtggagaacctttgaacttcgagtttgtggaatatcacaaggtttgtaaaacattttccttttctaatcttcttaacttggttgggtcctgatcaaaatatatttggtaatgcagacgcgagctttcacgtttacatcatttggggaagagagtgtgtggaatttggacggagagatctttgaggctcaccaattatcagcccaagtattgcgtggccttatacctctgttcgcatctggtccagagatataacaacatgcatgtgaatgtggttttatatgaagcttttgtgcatagttagtgacccaagtgaaaaagccaaatgagactggaaactagaaaagtcttatagtgaacatgacaatgttgccaaaaaaagaacatggcaaacatattatagtatccaaaaattcgagatgtaaccattggagattggagatgatattactctttctcattgtaaacatcattatgatgtaattaatagtctatacctttttccccataaaaaaaaaacgttacctttcagctctgatatgaaaatgtatcttcaatacaacccaacggtgtaaaggggcacttgtaacaataacaacagaaagaagagaccccaaaatgaacaacttaactcaaaagcaaccttagggatacaattagaaaggccctgccccctaccgcaagcacaatggggaccaaaattaggtccaggaatcggcccatatatatt

SEQ ID NO: 68961 - DNA, 546 bp, Arabidopsis thaliana landsberg
  unsure (1)..(546): unsure at all n locations
acaaatctctaatggcaacatcaatgtataccttcttttgtatccaatcgttactgttttccatgcttccaagagaagcgactgctgtggctcactctgtttcgcttttttgtccacatgttctgctttcagtttcctgtannnnnnnnnnnnnnnnnnnnnnnnnnnnnnnnnnnnnnnnnnnnnnaacaggttagtttattttatttatatagtatgcgaaagggtcattccccgtaaactaatatgtcgaaagttccatggcattttatatacgatattcaaaaagtagacataacaacttatacaagatataccttcgcagccaggagaaaaatatcattggtatctgaaaataaaaaaacgaaagatataaatatagttatcgcaagacaaaacattcaagtccaaagagactaataataattttaccattagcatgtttaataaactctccaagcgcctctctagatattgattcagacctctcaccagtacaaagtaaggaatgagaactctnccaatctgcctctgcgcatgattcac

SEQ ID NO: 68962 - DNA, 548 bp, Arabidopsis thaliana landsberg
gatatcatacgactcagaacaaataacgatgttctgaatcaaaacagagagattgaaggcattattctttggataaaagtagcgacgagccgactactacgaccacatgcgcatctagcgcagtggcttgaaactaagtacctagacacatggataccgaaggaataaataatatactgatcaaacgctgtaggggcagagacatgctctacattcagccacgccacagtgaccacacgaagcgatctgcgctcattgaaggacgaaatccggaagacaatatgctggctctgaataacaagcccagaaagaagttcaattgttacataacataacggggcggagatgcgcgcgagccgagtgacgtagatgcacaagagtacttcgagccacaaccatatattttatatacgaactacggaccgatgcctgatgcttcatctggtagaaaagaaatatagatatgccggacattagaaggaagaaccaccataaaaagaatactagtggataaactgaagcaaaactatgaacgggagctaagaaat

SEQ ID NO: 68963 - DNA, 305 bp, Arabidopsis thaliana landsberg
cacaagagattcgagacacactactgaccataaaaacactaaaaaagctatgcaccacttttaagcgacagagcgacatgaaacacacctcctattgaaagaaaatgggtataagaggaaaacaaacgctccaaatgcatgaaaaactctgctaacgagtcaaacgcgttggatactgccacattgtgacaatacagacactaacaacgctactgacagcgaacaaacaattggacgagggcttcagcctcatatgggacaaaacggacagaagcgatggataaacactgttaatccatcatcaa

SEQ ID NO: 68964 - DNA, 423 bp, Arabidopsis thaliana landsberg
gaagtgctcgctagccgcaggctgattgactatcttgatatggaccgatcgaagcccttaaggatagcttactatggtaaatagctagaccccgaacctattcccagtttccgagtaactatcattggtcaatttcctgtttcccatggtctatcattggtccggtccttcagaggcaggagaagtacaagatgcaagctcataaacgagacggtaggatggcgctaatgccaggcgatcattagacttcggttaatggaaagtggaacttagaaatagcttcttaagaaagagatatatagtagtgcttccccctccttacaatggtcatggatcgctcttcgccaggatcatattccggtagcgctgctgcgactgcgcctagaccttgtgctggccgattttggccagcatgaagggggg

SEQ ID NO: 68965 - DNA, 468 bp, Arabidopsis thaliana landsberg
aaaggccctcgctatgtgtatgcattagctcgacactataataatatgagcatgttggatatacattagaagtagtcggatacatttttgataagtaattcaagtcttaagcccttatgggtgtggatgggtccgatatgatagggcaatttaccacgttggagtatgtcaaaatagtactaataagaaatttaaataggaatgtacgtagcgtagagatgaattatattgaattgggaccaaaaattggtaatgaagtgtgtacagctaaaactaataaaaattggtcagaaaaatatacagcttcgtacaggctaccacatgggattagattgaatataaagaaatgttggacctcacattattggctattctacatcttctcggacacataaccaatatgttttcattgttattatatctctattgcaatttgtttaattcataaaagaaatctaggagttgaac

SEQ ID NO: 68966 - DNA, 1731 bp, Arabidopsis thaliana landsberg
ttgtgaggagccgttggattgccactagtaatatgttatgaattctgctcaatgatgcaaagtacaacatttgctattaggtgttaggtattgttacgaaacttagctgctgatcacttacttcatggaaatttgcagttttattgtttgattcaatcagattgatttgagactgtgggaggctttagcatcctaatgtagtctttatctgagatgacatttctgtttgttgtttgtctatgtttcttttcactcttcaactttttgtttatgtctacttgttaaatgaagattctcagaccttggccagtactaatgttttttcttttatgcagaatcgatatggtgttgatggaagccaaacacagaaatattcatatcagtactcaactgggtctgagagtgccccatggacagggcattctgttgaaaatcaggctgtggagaatgggaactattcaaattcaaactattaccatccacagccgacagggccagccacaggcaatgtgcaagagataccgaatactgtatccttcactatctcatcgacgtccggaactgcaaatgtggcacaagattatagtggatatacgccataccagacctcttctgacccacacaactattcaaacacgggatattccaattactacagtggctatcaacagcaacctagccagtcatatcctcagcctgtaggggcttatcaaaacacaggtgctcctcagcctctttcctcatttcagaatccaggatcttatgctgggactccaagttattcaggaacttactacaatcctgctgattatcagactgctggaggttaccaaagtacgaactataacaaccaaacggctggaagttacccaagtacaaattacagcaatcagactcctgcttcgaaccagggaaactatacggattacacctcaaacccttatcaaaattatactcctgatgctgctaacacacatagctctactattgcgaccacaccacctgtacattatcaacagaactaccaacaatggacagaatattacagccaaacagaagtcccctgtgccccaggcacagaaaagctgtctaccccaaccacaagtgcatatagtcagagctttccagttcctggtgttactagtgaaatgcctgcttcaaatagtcagcctgccccgtcttatgtccaaccttggaggccggaaactgactcatcccatccaccttctcaacaggttcagatattactttcatgagggagtagagtaaatttgcgcccttaagcttatttgagtttagaatgcttttctgctttcagctacttgataaaatgtgtgttattgtccttataaatcaactaagttgggaaaagagtgatagtaactgacctgttagctaccaagcaatactgcatagagtcaattcttaaatgttttatttgcagacagtttagacatgatctctgattgctttctttcatgggggtcctttttattgaatactaacttagtaatcattttatcatcattctctcagcctggtgcagctgctagtacatctaatgatacttactggatgcatcaagcacccaagtctgcaagttcattcatcctgttccacctcaaaataattaccagagtcctctggagacaaaacctttatacgagactccctttcagggtcatcagagagctacatatcctcaagagatgaactcccagtcttcctttc

SEQ ID NO: 68967 - DNA, 781 bp, Arabidopsis thaliana landsberg
gaacagacccttccaaggtccgcccggttcaacttgagtactccattcggggtgatatataaaggctaaaatcgtcagcagaatagcgagttttgaagccggttgaaggggcctctgagacaaggaagcccttgcttgaaagagtcaacggagcaatggattattttccgttacttattttataataaagtctgatgaccacaacagggcttgttgaatggcaggcttgactggcaatggaaaggagatggctcatccatctcagatgatcctcaatcaaagactccttctagtggttcgcttaaaagatctgtactaaaaacatccctccctaccgggaaatcacaaaaaaagagtacgcgaaaaaagcacctttaggtgccaggagtgcggcgtccagccatgcttcgaatcgagtaccggcaccgatgtcctatttcgtctgattcaacaagcctcctatcccggaccaaaagaagtggctggataacctttcttcccttctacttttagtagtcgatgttataccggtactaaagagaagtaattgatagtgttcaacatccctatcaatgacttctaacggtcagtctatagcgcttctagccagtctgacttaataaaagatcttccagccaagccttgttcagttgaaataaaagtcagcccttctctgggtttatatattccctgtgactggtcttactaaaaaccactactgggtttgcttactacagacccttcttaccactttatcgataaagggaatgactgctctagc

SEQ ID NO: 68968 - DNA, 167 bp, Arabidopsis thaliana landsberg
ggaaactggaaagttttaaaaccacacttgagataaatagagtgttttacactttgtaaggtactctataattcagtttacaacaatagcattcaaataatatacaaataaagattggataatatcactctatatgctcagaaaattggataattaagtctcttcca

SEQ ID NO: 68969 - DNA, 155 bp, Arabidopsis thaliana landsberg
aaagaaaaaatagaaaaaacaaaaaaaaaagaaaaaaaaaacaggaaaaaaaacaaacccaacaacagtaaaaaaaatcgaaaaaagcagaaaaaaccacgagaagaagaactaacaaagaaagaagcccagcgggataagagaaaacagacaga

SEQ ID NO: 68970 - DNA, 310 bp, Arabidopsis thaliana landsberg
gtttttgaagtgctgttttgtgtcgacagtttattttggttggatcagtctggggggggattctgtatatgacggtgcgtacaatcggggtcatatttctgtgatgcaaaacttactggcagggcttatttttcttgctgttgacgtgctttgactatctcacatactctactaagaccaaatgtccgatttcagacagctctattgatcccatgatgtcgctggcctggaatccttgcgggagctactctttatctttaaactacgaggggtatgatgactaaacctctatgtgaaaattgcagactgt

SEQ ID NO: 68971 - DNA, 758 bp, Arabidopsis thaliana landsberg
cttaaaacgtatcaactatgtggattacttaactttgcacgatagactatatactattcctctcataatattacatttttaactttttagttttgatggaatcaaatatatatacaggcaatcaaacctgaagttcaagtatgtggtttacattttctgtaattactagacatttggactgaaccgaaatcaaagcttgaatcatatatacaatttttctataaagctgttcctattaatagagtcaatccagttgaataattgattcattgctatatttattacttttatcagttttaagcagcgaaatattcttcttctttttttctgtcagaccagcgaaatattcagaaagtcaagcagctacatattgacatatcaaaattcacacaaataaactaataatactgagcaaaacatatatatttggttaaacaattgaagattcattctcaaaactcaaaagaaatcctcgtcaattcaatgttttgtcccaaaaataaaagttacggtatctagctagaaagaataactggatttttgtttctacatatgattaacttagcattcaaataataaaaagtgtaaatgaaataaaaggataattaaaactaattcgtcatgagttttgataaagaccatgcgtatgcgtcattttgacatattttggcttctaactaacgaagcttaaaaacgagttaatcatgtggaaagaaatacttcaaaatattgataaaaggaacaccataaagttgata

SEQ ID NO: 68972 - DNA, 1301 bp, Arabidopsis thaliana landsberg
tgcatacaccattacatatcacaagaattacaacttcttgataaaagtttttaaatgccaccgattataaaagtttttttaataataaatgtgaatgtggattgaagataaattacctttttatccacgtaccaagccttgcgatccggactttgttctattagagcagcatcctaaaaaacaaacctcacccggcgatgacctaggcatgtggtagtctttatcaagtttagacaaaattagttgcaagttggtcgcacgttcttgtttacaattttttaattaaatttgattagagattacatgtgttaattgttgaatgagttatgagtctttttttagacgctttctttcacacattatgtatgatttcaatttgtatagaaatgcaaaatatttcaactcataacaaacaatacataatcgaaactcaagtgaattctttcaaacttcattagtcttcatatctcatacttcaacattctagctttctaagctttaacatggagaaaaaaaaaaagacgccataaaattaactatgttttttaagactccttaaattgcggtaaaatggtgaaaaaaagattgcggtagatttagcatttatccagtttatcaatacataattagtagattcttttttttttactttctctaaacaaataattaggattgtttttttttgtcaacaaatattaattttgttataaaagcaaaaaaaaaatgacaatctggcaatcaaattaacgcgtctccttgtcccctaaccccacctgtatatatacttctccgtctcttcctcttctccttagcagatgctttttggaaaaaaaaatataccaaaaaaaaaaaaaatctgcatctgccttcgtcttcttccttgcctctaaatttaattacccattttttccgataaatttttgttgaggaagaatttttgttgtaaagagagtttaattaaattatgccttcaatagaagatgagctgtttccgtcaacgccgggtaaattcaaaattgaccggtcaaaccgtcagctccaccgttgtttcgcttctacgagcaccatgtttctttgggctctcttcctcatcgctctcaccgcttcttacttgagtttccaaagctttgtcgattccggtagccgttatctaaccgcttcttggggcggcatccagtgggagaaacaggttcgtacctccgctcagatccatcgctcaggaggtatctccgtctttgataacgctgactccggattcgtcggtagccacgtgaaacaaacattgaggaaaggcggcgatg

SEQ ID NO: 68973 - DNA, 642 bp, Arabidopsis thaliana landsberg
taacaaacacagaacacatgtaagccaccatgaatacctcagcactccttaggatttgcatttaaagtagttataaattattgaatcacctgctcaacctaagataaccaagagaagagagtcatgaattcgtaaaactaattaataaaattttggtcatctagccaattttaagaaaatactctagatgacacttttcctgttatttatccaccgtttttacgctctttcatgtcaattacaaagaaaatatgtttcgtccatgttccttttaaattttgagtacactgggttataaatttataataccgttgtatagattctatgaataatatgtgtcgtgtatatttagtttcgtcatggctcacgccgttcgttttggcttttcaaaaaatttatatcttcactcttgttgtatctcatgtaaactccacataatttgtttttgttttttttttaatcttttaagcacagtagcttttgtttgactgaatttttttgacgtatgtgtacaagaatctgaattctgaagagaggatagatcttaggagcgtaggacaaatgtcaaatattcaatgatatcatttgtatttttttgaactttgcatgtgcacgcataacgtattgttgatcatttgatct

SEQ ID NO: 68974 - DNA, 728 bp, Arabidopsis thaliana landsberg
ggcgttctcccggcacgacagcacatcgaccagcatcgtgcgcgccgcgacgcgcagcgtgtccatgtcgaaggcgagcttgccgtcggcatcgaacagcaccaccgcgttcttcgccaggcggctgtggccatagtagatgccaccgtttcccgtcgtcaccgagacgttctgcccagcgaaggcgaggatcagcaacgccatcagcgtgtcgtcctcgatcggcgcgcggccaagcgcttcgcgcagcgcgtcggtgcgaaggtcgccgatcatctcgacgcccttgcgcgtgacgtcgggacgcggcttcgaaacctcgccgacgtcgtccgcggcgttgtcgggagcggtcgcgcccttgcccttcggcttcttcgtcgccggcatgcggtagtgcacggtctgcacgcggccgtcccggtcgagatacatcgccgtgcaatccgacttcgccggtttgccgtagacgcgctcggccttcggcggcagcttcacctcgccccagttcgtggtctcggcgatgacgcccttcttcggaaggttcgccgtcatccactcttgctgggcgccgaggaaggcctcgacatccgtggtgtagcggctgtcctcgtccgcgggggcgaacaggtcttcgacccacgcgatgccgtaggcttgtgcgaggtcgtcgccgaagcttgcgtggcgcgcgtacatgcgcgtcttctgcagcgcctgcgcgacgc

SEQ ID NO: 68975 - DNA, 770 bp, Arabidopsis thaliana landsberg
cttaattagtggtgacaaaaaacgcaacaacaaaagtcgggtataaaagtaatttaaagcttattttcgagccaaacccgagctaattacataaacccacccacaaacacacatggattacctgtaatcgatttggactgggactcaaccataatccagttgcgtcgaattgcgatcaacctctttcagacaattccaagtatctcgcctataagaacaaaatatggaaccttaacataaaatctatcacaattaagaatcaaatatattaccctcctctgcaagatattgcataccctattaagttgtcgaacctatattctctaaatctgtatttacaaacttaggtttagattcctcgaagcatattctcttctttaagatctttaatttagatttagatattaattaatgaactcaatctctcttcgaggtttggcccctttatagtataaatatgtgcttaacctattcatggaaaacccgcatcacatttctattttagcacaataacgataaatggatttacttagagaatcacattataccaactctgttattccatcatcaaaatatgtgtatgttgtttattctgcatcatgtcatcacgcttctgaatcaaagaagttttgcattgacattgagaaaaaggaagggacaaacaagaagactgatgtgaaggtcaaggatgtgaagaagaagtgatctactatgttggttgagtgtggggggaatagtgtttgtgttatggaagttcatcattatgtttt

SEQ ID NO: 68976 - DNA, 3663 bp, Arabidopsis thaliana landsberg
cagcaatgtcccactcagaaacaatcagattctatcattgtgagatgctcaacagaaattgaaaccaaaaccaatgatataaggtaccacaaatcctatcaatatgaccaccattcaacaatcaatcacataaattgttctgttccatagatgacaaattacgcccaatttgatcatttagttgacaagaaggtttctctgcgcacagttcatcaaattgacaaagtgttccaggaaaaaatcaatcctttattgtaacaaacggtgataattaggaagaagtagagatatgtaccttaacattatgaagagctcggagctgaagacgcgggtgaacatcgagagtgctcttaatgaaagtattcttctcttcgacatcatagagaacagaaacgtgtttggaagtaaaagagacctgaggctgtgaaatctcgcgctgggaattgttctgaaacgagagtttaagcttggcaaggttatcgaagagcttacaagacactttgtttaagaaaaggagactatcgctgtcgaattcagatgtcacacggagttttggtcggttagcagtcttgagaaaggacaaggtagagcaaggcggtcgagacggtggcgataattccgaggttccagattgaatttgatgggttggtgaaggagaagaaggaggagggggagtggcgaggttagggttttgagaagatggatccgccattggaattggatttgagagaatctatcgcaaagtcgcgaacacgggattcaagtttaacaagtacaacaagacacaagtatgaaacggacggttcttgtttttcttactttttgataacatcacttgtctctctttattttcttttaattctttacatttcgtttattctaaaattcagtaaattagggatcgtttattactttattttgctatgaaagcattttattaacgttacttaggtaaatattcctcaattttttcgtttaattagttatggttagcacgatttttttgttcaagaatgtgaaactatactatacaatagtgaaaaatcgaataaaataacatgttgttaactttttttttatttcgatgatataataatacaacatgatgatattataacatgataataacttaaaaacaatgatacctttgtttattagtttatgatcagatgaacagtaactacaatactattaatattacatttggataattaaccacatctatattgtaaagacaatatatatagcgatgtactaattgagaaaattttaattttatttaatacacatatttattctaacaactttaatgttattttctttactcttctttatctacgtgtctaactcattataacattttttaaagacatctaattcatccaaactcaatataaaaactattgaaatcacatggtcatacaaactaaaaggtgtatgaagttaggttactaaaatttatttggtcaatagtacatacaaaatttagatcacaaattatactatccaaaattgacaaaatcacctcatagaagaggtggttgttgcaccattggatgtcgacgagcaaacatagatcctgtttgacgcagcggaagcctttcaggtagaggagtagactcctctatgtcaagaaaatactgaaaagtctcactaaccacaaaatcacgcctatcagtcacaagcttgttcaccacctcgtcctcctcaccctcttgctttttcttgaaagcactaaaagcagtgaaaaacccctcgagaacagcttccatacgagcgggcgggttactctctctcgggcacagtccccaaggttgtactacattaccaaaagcaagaagaagctgagagaaaagaagcattcctctatcatttccaggattcctcttcagaaactgaaactctgtttcagtactagacactctatcccacagagcatcccaaaaatcattcccataacgcaccacaaacatggctgtaaacttcattaaaccaagctccttgcgcatcatgcctccttgagggattccaactctaaacaagacaaggacaggtggcaccctgagtgtaccctgagaatcgtgtttattcagaggatgatgcatcctagccattgttttgagtttgagttcaagggctttgttctcgaggtcagcaaaatattcatcacaaacaacaaaatcatgcctatcagtcttaatcttgtccactagctcctcatcaccctctagcttttccttgaaagaattcaaagcactgagaaaaccgtcaacaagaacatccataccaaccagaggatattcccaagcccttaatagatgactatacccaagaaaaagaagagagaaaaagtgagcccttgaatctcccttatccagaaacttgaactcagtatcagtagacactctatcccgtagagccaaccgaaaatattgcccataccgcaacacaaattgggctgtgaacttaatgataccaagttccttgcgcgtcatgcctccttcagggactctaactgtaaacgcagacagttcgtcgataatagcaacttgctccagagggttatactttaaacagcattgatcaactaggcccggtgggagaggaggaggagaatgaagaggaggagacttggtgtactcagcaattttttgcttgtaaatatggtgatcacgacctttagggaacacaaagctgcatgatggaatatcaaggccaacaaatctggacttcagcttctcctccatctccaacccgcctctggcagcggcaattgaaagtctctccaacataatacttctcagctcatcatcatctggacgtggtggtggagttttattctttgttttctacaaacacaaggattaaaaaataacatagagaagcgtgtattacacgtttcaaaatggattattattggtttacaaaaattgtctcaacaaactctaagaaacaccgtaagcacgtacctccatagccgtgacgccgagaagaagcggatcgagagaaatctggcagaaataaggcttattactggttttaggtttaccccctccccaaactggaagcgttctaggttttctaatgggcctttactatttgggcttattatttgttacgcttattgagttattgtcttgttattgggtcatttagcaaacagtgtcttattattggctctgagtgtataaggatacccacggtcacaccatttaagtagattttttaaaaatatttaacttaattaattatgatcatatgttaactgttacttatacaataccttcttttttgtcagcagtgacaagataaaaatgtcattatttcattagaaaagcttttaggacaaaatattaactgaaattgctgtttcattacacgtacactatatgaggaaaatgtagttttttttttgttgtttccttgtaagagaagcgtaattgaaaagtatttcgaagtaagtaagacaaatataaagtctgcaaaactagccaatccccatgggaaggataaatctctctctttctctcttgctctctctctatttatctccctttttgaaccattcacaattccacatcacctccttttcaaaacagctctggatcactctgcctgaaccataaccggctttccccgtcccattgagaatcctcaggtccc

SEQ ID NO: 68977 - DNA, 433 bp, Arabidopsis thaliana landsberg
cgatcctaaatgggctctttaggcccaattactttatcatccttttttatccatttgcgtgtttcgttggtatggaataataccaaaacagattcggttcatatttaaaccaaaaccaataacccctccttaaaaggctttgattcatttgttcattcggttcagaaatttcaattcttcagttcatgagtgtatataataaagtcagggatgatttttgaatagaaatcaatcctagataaaattaatagttagtacaacaattaagcaatatgccttttgctgaaacactctgcttttgtccaaatttacatgtcttatatatgtaaatcttgtacaaaaccaaaatcgtagtgagaagaacaaaacgtcagtgtctttcttggacacaatcgaaacaagtttgacctgcaactagtggtcacagttgata

SEQ ID NO: 68978 - DNA, 539 bp, Arabidopsis thaliana landsberg
acatgccgatgtcatgctaatatcggttaaactattttttccaatttaactactattttctctttcgtccaacttatgtactgttattctgattcttattttcttctttttaatacctttttcctttcccaagacacaaataaaaaaaaatacagaaacgaaaaaaagagattttaaaaattcataacccacgagaattatgcacctaaattcagactaatcccccaaatttcagaaatttatgtatttttgcgatttaatattgtgttcacaatcataatggccaactaactaattgaaaagacaatggaatgactgaaaccatgcataatctctcaagtctcaacctatgaagaatcatgttaccaatagactatcatcatgattagttaatgcatgatctataatgtattctttgaacatagatatgtcatttatctggatataaagatggccttttaacctactttgcaatttattggtatatcttttcttctaatacatatggatcaatacacttgttggtttttaaaaagaaa

SEQ ID NO: 68979 - DNA, 602 bp, Arabidopsis thaliana landsberg
atatcatgttttgatttgatagttaacataaaaataaaataaaattttctatttggttaattaggtacaaggatggggccaggttttgtcttgaaaaccatttcgggtcattgacattctctgatatcattagtagttttgtatttgtccttttgaatgcaacaggaccaacccgtcataatcaatctcgtggcatctgttaattggagttacggtatgtgaatcacaacttttttcaagttcattgattgagatatatatagactatagaaggctgttgtcttgttggtattctttggattacctaaaagaaaagtttagaaataaacacaaaagtagaaaggcttgagaattttgctttgctttaacttcttttttatggtcttactcgaaattgccaggtaccagaaatagttattacatttagtacagatgagaaatctctatcgtaaactctacatctgtgtgtttatggaccacttcactcactttgtttctctctatacccttttgtcttgtccattgtcttcacttacccacacgcaccatattatcatcattggcatcattctaaaatttatacctagctacttattacccat

SEQ ID NO: 68980 - DNA, 401 bp, Arabidopsis thaliana landsberg
  unsure (1)..(401): unsure at all n locations
aaacgtaatttgaagccattctaaactgacttttaaaacgtttttcagngaaaacaactcgagggacaactatggcacttatataattataccatatacaaactaaatatattaacaagcttagaatatttcacccaaaacactatctgtatcagcacgcaaggtctatagctactcagataccaattcaatctttaacttctccaccatctataaaaactcttcttatatacacttatattccttggccccactcaatgctttgaaaataatcgacactctcgctctctgaagcactaaactttaatataacactttcaaaatatataacaccaaatcttgatcaaacccaacaacctcaccttcttggatattaactacctcattccacaaacctaaac

SEQ ID NO: 68981 - DNA, 4276 bp, Arabidopsis thaliana landsberg
taacatccaatagcctgaaaatataaatatatattttacattgtaagcacctaaatggctaattatgaatgagtacagaattagagtctgaatcaaatcattcaaagtaggttagctcagacataacaaagagcttgttgtaacaaaaagatattgagaattgatgtatcaataactgacctgatactgagaatctatcagacgctgtcacgggatcgataaatagatattccggaaccaaaagttacatcttggatgctctgtataatccatacatgtgtcttggataattagatgggaaagtagcttgttataatgttgccattgtgaattgttcctttggtagaataaaagaagcatctgaaaaactcaaatgccaagttccttccttggtctaccagaaacctcgtcagggtggactctgtcaaatgaactcctcttgcttttgtacaaatgattacgggatccaaacaaaatcctgaaatgccgtctgtgaacggaaatggatccagagcagcaaggcttcagttatctcttcactattataactttgcctcttctcagtttttgcaaataagttgcttcattgtttttttctgtttttcaccggttgttggccttcatagcaagcttcactaaacgtagcaatccctccatgtcttggaagttataatcaagggcgcttttaatagatattataccctctccttgttgttgggcctcccctgagttttcaatacaagctgttaatgccacacgtgatttcctcgaggcatccattgacagatttacgtcctgagcctacaaacagtagagagtagctgagattaatcaatggcctatgtttatgactttccattttaactgcatcacttcatcttccattcaattaacaaactttatatctaagtataattgtggggaatgaacttggaagaggcattaatacacttacaaattgaagcagacgtaagagattagaacggttttgtgcagaaatgacgtggttcccagcaactaaaggagaactgatgccccttgaggtaccaactctgtctactgctgctggatggttcacgttatcaacatccgaggcagatgaagaaggagattcacctaaaaggcagtgacaagaccattacaacgggaaagactcaaagacatggccaataaggaatttggctatcttcgactagcttacctggcggaaccatttgtagagaagtctgcaattcatttcgatatctattagcactggtgtaggaggaattaaccactctcatatacgcgacctccatgcatttgtaagccagggcagcagctcccatatctttagacttctcatactcatgagcacaaaatctatcacggaaaaaggtttcagtgcttacaaatggaaaagaaggaatgaacgacgtttttcctttatcctcacaaatgtaaattacccgcaaagattcgcagtgctactataaatcttcatagattggaccattgtttctccttgtctagcactctcgttgctactcatctccaaaagaaaagcaccgtgaagaaacttaaggcaagcttggaagtagagctcaatgtgctcaaggtttgatacagcattctgcagtaacatgaaacgtaagactatgagaagcaaatacaaaagagaaagagacattcccctgcaactgaattatgagacaacccttgagacggtcagctgtatgtttcaagtctttagcttcttttaaagtattatgggcggcctgcgcagatgttatttcctttcgcaaggggcttggagaaggctcgcttttccttcttatttgggctgttgcctttgtcacatcatcagcttggatattattatttccagctgatgtgctgcatttatcgactttcttacggacagaaagcatagaggaatccccttggacacctctagatggtggccgtgatggagaagctaaatctgctatattacacctctctggtattctttcggagtcgtgcggttttggaatgtttggtctcacgatcatatccgctctactgtcaggactaccatcatatatcttcttttcaatatgtctcggaccatcccgtgaatcagaccctaatgctttggctcttttctttggaccgagaagatgaaccttttcctgacttctttgccagggaatcattgctacgtctatgatgatcgctagactgttttccttcaccgagaatatgatccagtttccgcggtaaagccttgtggccaccattttcaaaattggcatcgagagaatgatcagcgcgctctttcgctttcaaagatcctttattatcccaaatatcaagcacagaagactcatgggatccatgtttatccttcatctgactctgcgatctatcactcccaccatcatcttcaccttcaccatctgagaattttttcaaactacctgctgcaaagacgttagcatcataagattcttctttctttttactcacagatatacgtttctccgggttggaaagcctcataggtgaggaagacaccgactcaacaggagaacatttagcttcgcgggagctgtttctgggtttatgagaatcagaaatcttagaagaacttgaggttgccgcgattgagttctgaacatttgcatactctattttcgaatgacttctatttttcttttccaacttcccattgccttgtgaataactaggctccttctcttctttacgaactcgagctttctttcgttcatgattttcgttctcactgtaaatcctagaaccatggctttctctcagtttcctctttttaatccccccagtgctattgctatttccagtgtctgaagctcctccttcctcttttggcattttggaggagactcggggctttggctttatatctgctgacgtgatagggacaccactactcgaggtaggacgtccatttccatattcagattcatcaggaaacagaaaactttcgatcttcatttttttggccagcatagaactctctagatctgtttttcttttgttattcgccttcaagctcttcgactcatcagagaggtgatccactgcttttcctttctctttctgtttctgtatttgcctctcatcctcggccaagtcgccaagtccctgcgaattttgaataccatttcttgacgatgtttggatggtcttgttagtttctgcagttcgagcaccttctttatccattccattgtctatctttttgaaaccctttttcttcttctttgtgttgtcatctccctgggtaaactgaggcttagggccactgggattactctgcatcgaagcctggttctcagggacagggatctgatacattgcatacagtgctttcgttgtttcatcttcaggaacattgcaatagttcactccaggcctaaaacgcacattatcacaaataaaatcaatttctctttagttcctcatcccgaaaaaagtaggaccaataacacagagaaacaaacacacgttatgccaaccacctcatatagcacaccaacaaaataacaggaccaataatagagaagttgaaaagactcacagccaattaagcattgtgcacatccatttctcaggaaggtcttctgggaagacgccaaaaggaagaagccgccactttccacatttgtcacaagcaacccaatgttcttgtatgatcacgggatttgctttcggaagagaagcatcagaaccaagttttctcaacatgggttcaggaccaacgttctgaggttctactagcggcaagctcgatttttcaggcatatcttctaagggcggaagtcccttttctgaaatccgcaaatcttttacgtcttgttcctcttcttcttcagagtcccctatgtctccaaaaaagtctttgtaagtgtcctcggcttttttgctatcactttgtggtttcacggctaccacttccttcttctcagcttgaccattcagcttagtctcacaaacaacagaggtttgctgttccttgaactttgatgaagacggtggctcctgttctatctggtcatacttctgctttctaagaggatgttctagctccactttatgaccacttttcacctttgatgcactcgattcctttttgactgaatcagaagctttgctgcctttgtatttgccaactttccttgggtatcctcccgcctcattatccccaagtttagcctttttatcaacacgaacacttcatgcagaaatagtctttggattctcatgatgcgctccc

SEQ ID NO: 68982 - DNA, 2925 bp, Arabidopsis thaliana landsberg
  unsure (1)..(2925): unsure at all n locations
gttatgttttcaaatattcaagtcagcaacgtagccaatccaataataatagatcaatattctgcggatggtggcggatgccacaatgaaacttcagcagtcgctgtatcaaacataaactacataaacataaaaggtacctacaccaaagaacctgtacgctttgcctgcagtgatagcttgccatgcacaggaatctcactgtcgaccatcgagcttaagccagccacaggaaaagcaagttcacttgatcctttctgctggaaagcacacggtgaactgaagacaaaaactcttccaccaatacaatgtttgaaaacagaaaagtcaccggaagctgcaagtcggtctaataatgatgcttgctgatattagagtaagaaattatgtagaaatgttaagataggccacacattatacgaatnnnnnnnnnnnnnnnnnncttcctttgtcttacactagtttttataaatcatttgcaaacacaatgtaatatctggcatgcaatgtattgcattctgttatagacaattggaagttattgagttagtcccaacccatagcctaaggaaggatttcatctgtgaagcaacaatctaacaattatgactatttggaccagttatgatagaacacatcacaagtaatatacttcttcgaagaaaagtaatgtcatctgagggatgcaaagaaaatatataaaatgagagctaaacaatatatcaaaagtctaattaccaacacatgtaaacaactaacgcattttactttgtaacaacggataaaccacgacatggttcaacttagtcggcaagaacattcttaacgcagttccaaagctcaagctaacagcacaagacagacaaactgaagaaatatattactcagaccaaaataagattctgaaatatatgatctgtgtctcaaccgtacatcctatttgggagatttgcatcacataatgtgatgtgctcctctaaatttaaaaagcaaacgtgtctcttgtcattgtctgcttcctataccatagtaaattcctgcagtggaaattaagtagaatttttcaggaaaaaaacccaagagaacaaagaataaaacctcaactcagaaaaaacagttgtactcatatcctacacgtagatgaaaggaatttgagcgagaatgtctcatcaacgtttgccaaaaccaactcctgctttccttttttgtcgtgcttctactctttcagggcttggcaatccagttttttcttcgtacttcttttctagggcctacagtacaaaacttgtcaggaatattatagaattacgatgataacaaacattttaagacaatagactactgaatgcaaagatgttcaccaaagtcacgagtcactactaacatacaaatggtaattttatccacgaaatttaactagtggttattgtagctttagactctgccctgctacagttttactcacctctagctcttcacgaatgctatcaagaacttgatccgtcattctgtcaaagaagagaactccctgtaatttgaagaatgttccatcagaccgaaatgaaagcttgaaagggatactcacatacagtaacacaaaatacctccatgaaaacaagtaaaagtgaacaaaagtactaaagaagataaggcccgtgagtaaatgatgacacttttcaatgtcgaaacatcaaaatataagtgactgcagccattcaactgtacatagatgtactttctgtgttgtcattgctatatttaatcaagcaaagttatcaaaataaaagtggagaacaaacctccagatggtcgtattcatgctgaaagattcgtgcaggtaaacttgatagactgattgaaaatctttcaccagtaatatcccttgcatcaatcttgacagattgtggtcgctgaaagcaaaaccaaccacataagaaccggtttccaagaaacaatgagcaataataaggtttaagtaattcagtcaagaaagggtggacatacaacaacttcagcatagatccccgggaaggagaggcatccttcatcaaacggtactaatttatcggaatatttcttgattttcggatttacaaggacaatttcttttccttctccaggctctccagctggattaaacaccatgagttgaacattgagacctacttgtggtgctgagagcccaatgccatccgttctgtccaatagccatatgtaatcacagtatcactctgttattaagtactaagttacttacattataaggaggacttacttgtacataacatcaaacatagcatcaaccaagttctttaaattctcgtcaaaaatatcaatcctcttgttcttagcccgtagtataggatccggatactcaacaatcttcaaaggcgtctcaaattgaacatcagtagcttcaacattatcacaaaattacaatcatacataaacagtacatgctcatagagtaatcaataatagataagcaagtctgttacctgaagctactttatcgtctttacgcgagacgcgctttacttctgcgcggaccgaagatgtcagaggactggtccggttcacagtagagcagaacgtgaccgtggatttgagccgaccataaccggcagagagagtagtagctcggcgagataaaaccggtaggagtatgcgagagagtggtggagcttggaggaagcagttacagacggccatggctagagaggaagagtaatttcagacgaagcggaaaaactgaattttgtgtggagagtaagtaaaagattgagtagaccattttgtaattctgcttttgtttaaggtgcaattccgaaatatttatattttataaggacgattttttaaaaccaatattctattattagagcttttgtgaggagagacattttctctttcgaaactcgcggc

SEQ ID NO: 68983 - DNA, 471 bp, Arabidopsis thaliana landsberg
gcgatgagctacacgacgatgaggcgctgctgggacttctcttcgcgtttcgaccctcgaccacatcggggggacactgggagacctcggcgccgacctcggaatgacgggcagtccaagcggggcactactgcacggagttggcgagccccatttactactcgccgtcgtcaatgactacagcgccgagatgggactctggatgattcccgagtcctcgatcgacgaccggctgcgcgacgccctcgcgaccatcaacggctgcacgtttgccggcagcgccgacctcgccgaggaggaatgggacgccctcgtactcgtgatggccgcgctcgcctacgagtggggggacccagccgagctcatcacgtggacgacgacagatgactcgagcgttaccccagatgacatcatgagctactggaatcgctggaacagggccgctgactagaagtggacagagctcgatcg

SEQ ID NO: 68984 - DNA, 1818 bp, Arabidopsis thaliana landsberg
  unsure (1)..(1818): unsure at all n locations
ggaaaattcatcagaatttctgacaaatttcgcctctctaagagcttcaatcacatcagaatcgacctctaaatccagccagtttccatatacataaattagtatgtcttctcgttcagattgagatctactttcaaactcagctaacccaaaccttactaaagtctgatgattatgtaacacagtgaccccaagggcttggagaaagtgacattcaactgaatctggtaaatagcaaaagcaacattcatcatatggtttaaggaaggaatctccagagattatacacaaaccgtgcctttgcaaatgcgtataagacccagtgacagtcttaaatataggaagtgaacttagtacttctagttcatatgcttgataacttgaaccactagaagagaaatcattagccaaaagggtgaacagctcatcacggccaaatgttgggaaggaagcaatatcagcaatgtagccagctcgtttgccttcagcaagcttggaggcaatagcttggccaagtgacacgcttggtgaaggcagacacttgcatctctcagcacaatcaatatatgcagtatcacaaactggtatattgcactggttcagcagtaaaatcagccaaggatgcttgctttgtgctagatcgaatcctgaaacatagcgctgtgttaactcagataagggaccgccacttactgatgttgtagatatatcactgtctgtctgatgcatatcagtaccacttctagaaactggctgcaaagctggtggtggaaaaaagattaagtgtctctcccttacacggcataaaattggtctgccaaggaaggcaggaataagaggccagtccgaaaagagggagagctcatctgctgatccattaaaattcttccaaaatagctgtatccattcaggcgagggaccactatcatcactagaacttgatgtactctcccatgaaaaccatggcacagaatttgattctgagatataactaacccagtggtcatgaaaaagatatttcatattactagccagtaaaggaagagaccagctcctcaacttcaaaaatgcttgaacagaagacttcaaaaatatatcagccaagctcgatctctcaaacacttttggatggataaatcgtgcagacacaggcaacatcagtgcctgttgctccttgttgcccaaccatagctcagaaatacccaagcgtgctaaatgatttgttgcagtcgggcatggtaatcctttaagttcattaactgcagatagaaacctcgggtcagcattactatatctattattactaattctttgaccaatcgaatctccagtacgaccaatatcttcaacaacaactctaccaaaatcaaacaaagcctttcccaggcttgtcatcatttcaaatgcatcactagagccagcctgagcttgcgtagacatcgacgatgaagtagaagtactgtttccttcatccatgttagcctcttcggggttaagtgcttcaataaattgaatatctgatagacaatattcaagaacatcaataaaagtatcaacagatcgaagatcgatagatgcagatgacttcctaagaagaacgcgaaccatctttggtttgacttctcgaactggaatccctactgcctggacttcagccaacaattcccagggcacggaaaacacagggtaatgctccttcacaaagctgcaaactgtaagaggaagcaaattaacagcaacctcactaccgggctgtgtcagaaacaaaccctcttcagccttgaccaaacttcctgagtaaagcnggcacagaggaag

SEQ ID NO: 68985 - DNA, 802 bp, Arabidopsis thaliana landsberg
ggatcattctaaggaaccccgcctaggatttgaagacaggacctctccgtcatcatactgaccgctctaccatcgatggtcaggcattgggtttgggtaaagtttagaagaatctttctttccagctttggtcacataagcttgaaccactccggggaaacatttggatattatacgatcggacttctagggcatgagctactctcttctagccttccagatctaagagcatgtcgttgttcttggaaaagaagagggattatatagctccttgtcatctacaataataggactccgacaggccagccagaaataaactatagaaggaggttgcttcgctagaccagcagccaaaccaacaatgaatatataatataatgatggtgattcggctcaataaaggaatgtagaaaagaaagggcggaatagggtctatagtagctgactatacgagagaataggatctcaacagggctctagctaggttagagacattcatcgtcataccgaggataccatagatggctagtgacaaggcttagcatttggatagacgtaggcctgttcgatatttcttcattcccgatagatccatctgttggaacatccgtgatccatcataaatccctccgaaaagaagtatccttttatgtgcttgacttatcaaccgaaagtgtgtggaggaaggaaaactaaaattgctacgctagggctgcttcactagtagaagattcaaaggattgccaaagagtgaactaatgtgctgcacaagctctgctcaagatttctaattatgaaactg

SEQ ID NO: 68986 - DNA, 2544 bp, Arabidopsis thaliana landsberg
actttctccgctctttagccctttagggtttatgacgttaaacccagaatccaacatttgacgattcgattcgaaaatctcagtgaagatcgaaaatggcgaattcaatggctacactttctagaagactctatcgatctcttctatcgaaccctagaatttctcaagcttccatgtctttctgtaccaacaacatcacttccccagaagactccgactttgacgagttagaatcgcccattgaaccaaaggcctcagatccagtttctcgattttccggagaagaacgcgttatggaagagcgtccactcgaaaatggccttgactctggcattttcaaggtatcaaacttagattctaattccaattgatacatactctgtttttgttgtttttcttaaatcgatcgttgcaattttgccttttgtatgatctttgttgagtcattttctgaacatcattagattctcgttctggataggttaataattagtgtgttctagactaatttctggtttaatacaggcaatattggtggggcaagtgggtcagcttcctctgcagaagaagcttaagagtggtagaactgtcactctcttctctgtaggaactggtgggatcaggaacaaccggagaccgcttattaacgaagatccgagagagtatgcgagccggtctgcggtgcagtggcaccgtgtctctgtttaccctgaacgcttggcagatcttgtgttgaagaatgttgaacccgggttagttctcttctgagatcatatttagcttgtaaggttatgtgatgatagaataaggaacaaatgtatgtatcatgtctgatatcgatcaagaatcggtgaaaaaggatgaaactttaggtgaatcttgcttgctagattcaaaatggtagcttgcttttgtgtatgtgtcataacaacttgtttcgtgttcattcaacagtactgttatctacttagagggtaatctggagacgaagatattcactgatcctgtcactggtttggttcgacgtataagagaagtagcaattcgtagaaacggtactaatggctcaacccctaaaactccatttcttacatatttcattgggaaacaattaaatattgatctctgttttctctccttacaggccgagttgtgtttttgggaaaagccggtgatatgcagcaaccgagttctgctgagcttagaggcgttggctactactgatttttaacatacaaaaaattgttgtcataaaggtacacaatttgctattgtagtatttctagtttcgcttttgttgtctcttcttgtaacttgaaggtttggtttagtgttcttcaattggcattggcccttttccatggttttcggcaaataaacccaaaccaaacccaatcaatacgatttagactaaaccgaatctaaaccaaaatctcgattttagacaaagtaaaaaccaagaccaatctccacgtgtttacaaacattgcatgaatgccacctcaaagctgaatctgtcctccatttgttttacccttcctcattctgttctctgtcacacacacacacaaaacaacaatcgctctctacaatggcggaaaggttctctagcggcgaggcccaatattggcccaattatggtagcaccgccaccaccaccgttagcaacagccccatctcgtcgtttttccatcagctccgatcccattcaccaacatcctcgcagctctttggtttcctcgctctctttatctccactggcatcctcctcttcctccttggtgtaagcgtcaccgctgccgtgctcggcttcattgtctttcttccattgatcatcatctcgagtccgatatggattcccgtttttgtcgtcgttggcgggttcttaacggtctccggatttcttgtcgggacggtggctttagtgtcgtggacgtaccgctatttccggggaatgcacccggttggatcgaatcagatggattatgcacgtagtaggatctatgacacggcatctcacgtcaaagattacgctagagaatacggtggttacttccatggcagggctaaagatgcggcccctggtgcttgacctgaaccggttggtatagtctggttcagggtagtattaaccgatcacggttcgatttatggaggaggaacacggttcatggtaatattacattttcttattttgtttccgtttatactttataagatgaagaagaatatctatctagttatgtgtaatgtaagctttgtgtccgtcgcttgaaatgtaatatttcattttgtttttgagttttttttctatacatttttggagagatacttatattataatcaaatgtcttccgttgtgtttgaattcgaagaaacaatgagagtaaataactaccatttttttctatcttcattgcttatttcagacgatatggaagagcatgttacatcctttttgtgttctttttctaataatgaaaattccttattataaatagtcatgttcaaagtttggaaaaaaaaaatccaataagaaccttt

SEQ ID NO: 68987 - DNA, 468 bp, Arabidopsis thaliana landsberg
ctgctgcgccgcgtcgccgacgagcgggcgctgctgctcggatcgctttttttcgccccatcgggcggctacgtcaacggtgggggtgccggcgaggcgtggcaaccgctgggagagcgagagggagttcaatgacccgaacagatcggctgctgcccgaggggttcgacttcaccgaccccgcactgatcgccgagcggatcccgcaccaggagttcgccctactgcgcaagacggagcccatctggtggaacgctcagccgttcggcatctccggctaccccgatgagggctattgggtggtcaccaaacatgccgacgtgcgcgaggtatcgctgcatgaccagacgttcttctcgcacgagaacacctcgctgatccgaacgaacaccaccagcaacccggaggtccacgaagcctaccgcgataacgtgatgctgttcctcgacggcccgaacacgcgaaatt

SEQ ID NO: 68988 - DNA, 539 bp, Arabidopsis thaliana landsberg
  unsure (1)..(539): unsure at all n locations
ccgacacggagggcaaggtcctgaccggcgacccggagcaggacgccagagttctattcacgaccaagggcaagtaagccggacagggggggcggcaccccgatgatgagcggcagggccgtttttcacggcgtatgggcgtacggcgccctgcacgtgtgggccgaagactccggcctgcctgaaacggccccgccccgccggggccggccctctcgcgcgccccgtccgcatccgttcgccgcccccgcgnnnnnnnnnnnnnnnnnnnnnnnnnnnnnnntggccgagatagcccgcaagtccgtcgaggacgagctgacgttccggctccccacgtcgggcgacgcgccgttcccgtcacccgaactgggccgggagccgtcgtcgggccgtgcgtcgctggcaccgtggcgggtccccgcgctcgtcttcgaggcgccggatgcgcttgagctgctgagcgttttgcccggcgaaggcatcggcgccacgcttacgtacctggcggtcgccgcgcgcttcgtcggggaactggc

SEQ ID NO: 68989 - DNA, 2451 bp, Arabidopsis thaliana landsberg
aaccctgcctaaaatttatccaattcattgttgatgctgcgccaagttaagccgccttatcctccagagccttgagttcttgcctccattcttccaacttagagaatttctctaactgctctgggtttaggtctcgggaagcagtcttctgctgttgagcttctgtgagtcggatctgcaaatgttaacagaatgaagcaattacacaaccgctagactgcagatttctgctaaacctcaaacacaattttgctgtaaactgaagaaaattgattgaaaaccatttggaacatacgctgttacggcttaccagccacaattaggaatctagacggtggagattatatcttcaaagccaaaggttctcgaatgtcttattttaattaaagcaactgagaaagatggaaatcttactttcttcttaagtgcgcggattcttttctctacgtcttctcctgtggttcctggattaggtgctcccccacatacatcattatttgacgaaacgtccaaagcctccatttcagaagccaatacattcaccgattgggatccattactagctgatccatcctcagagctgttagctttttctgcagtagcctgcagaggtgataattagaaagcatgttccattaaccgaagaccaagctagtagcatatgaattgagttgaaacacatacctgtaatcgcttctcttttttacgttcgttcctcttagcagctttagtctttggtttaggagctggatcaggttcataacctggaggcccttgtgaggccatctccttcttcatctattacaaatgaaatacaaattagaaaaaagatatgttctatctacatttttgcccttattcaaaccaagatagaagagcaaaaatttggtaacaatttctgttgagcactcgaacaaagaacataagggtggtacaaataatgaaagcaggctatccacaaccagtactgactactgagaaaaatcatatttaaacgattcatttccacgagaaacaatgagtccaagaacagaatagagtgttgagggaataaggattccataccagagaacctttggactgatatttgacaacttcatcttctggagtatatccaggtcgaatccgaatgggtttccggagagtaccatcaggtctacgtgtgggctccagaatcctctcaccttctttaagatttttgctcagttccgccattcgctttccttgttctccgcttctgcttcccatctgagtccttcaacttttcaatcacccttgtcacttctcttgttcctcagctatcaagtatactgttttctgtatcaaattttcagggttcattaaacaattcatggagttaaacatttagacaggaaaaggaatctagttttggtttaacggtgagttacaacagtttgttagaagaagctaaatgcacaacagtgtagttcacacattataaagctttctaaactctgaaacatgtaagctcgtgtatcaagaatgagtatacaagttatagcagatattcaaaagatcacacaactcagtagcaaacatctgatcaacaattcaaattcaacttaaaaattgtttagtgagctgcaagcattagcaaccacaaaagaaattcgccatatcaaacaccacttcctataaccacacaacaatcagttatttcaaaaccatgcaatacaaagtcccagctcatttttctgttttcttatcatcaaagtataaacctttggtgatagaattcctttggctgcatttaataacctcacaagcaaaatcttcattacagatcctaaaaccaaacataaccaaaaagacaaactttccagattccagtttcaatcacccttaaagctcaattcaatttcctctaatttcgtctcgttgctgttaacaaaaaccgagaacacaccaaatttagttaacctattttttttgccggcggccagagctccctacacctcggccaatcatacagagatatgagagagaggaaagagaagaaaaaaaaagaaagctgacctacggagatggtggctattctccgtcgccggagagcccaaatccggtgaaacgaaaccggtaaatattggatggaaaagatgtttttatgtcgaccgtgacctgacaccctaaggaatgggatcgagacagcttaatgtggtttaactatgttttgtgtattctgtttcttcttctttctaaagtataaaattaaaaagatatgtggaccaatcaaaatcaaaattagacaagttaataaatacttagggagacaaaataaaaaactttggaatgaacattttaattttgacgacaagctgtcttttagaccgacattaaggctttttatgttcacatcattccttggtttgacaatgtcacacgtcgactaaatcaagcgttaagcccacgagatatcattttccttttttt

SEQ ID NO: 68990 - DNA, 357 bp, Arabidopsis thaliana landsberg
caattatgtgttattttcaaagtatcacatcttcattctccttttttttcgcatatatgtcttagttactgtgggtagggaatatgtccacaagttcatgtttgttggtagctagcgacgcgtttacatgtgcctatgtgtatctttctcttgacctattatacttagatctattattaaataaacatatatcttgtgacaaagaaaaaaaagaagcgtattactttaagtgacaagacccatgatattaacaacaatttatcttatcattggaaacttatgaaatatttccaatacaatatatataacgttattaatgaactttaataccattggcttgttacacaatactctaat

SEQ ID NO: 68991 - DNA, 2181 bp, Arabidopsis thaliana landsberg
ctgtcgcaaccattgcttaaagcaaaaaaaggaatgtttgggggtgccatttaaacaaaacaccaccagtggcttaaagagtggcataacaagcataaacactgtgaccgataccaatcctaaacataggacctctgcattttcaaccctgaaaaagccaaggcataaggagcaaaaggaaaatgtagtcaagcaagaagacacttttattcatttagctccttcaaagaaagcgagtattacccgagcgagaggagccaagatgccagtatcaaacctgcactgaaaagacagcagcaaagaaaacttcatgttgactgtatataagtttgatgcaaaaggaagcattttcttttctatatagctttctccgattctgcttgaaatttataaaggcagagaggattaacacctgcggatggaatctgatatgacgtgcaagcaaacggagtgataattcatatcttctgcttttctgtaggctgcagcatattgcatattatgaatataagaaaaaaattcaagataacatgtggtttttagatatgtaaagaagggacagataatttcaagaagcaacgaatagtcgtttgacagatcagttacaattatgctgactctctctttcaactaatcctcgtactgattctatcttaaccaaacacccttacttctttggctttaaagcgaaaactgacaagggtggccaatttctacaaatgaataccaaagccaccaacaaaggctatatcaaaatataaagcagcgtatgagcatcaattcatacaagtctaaacagaacttaaaatgcagagaaaaacataccaatattgacacgagcataattccggaaaaaccaagcacctagtaggttcaccagcagatttgttaccgctgatacaatcaaataatgcctacataaaggaaatctcagtcaatcacactactgaaaggaacaagagggaacaagtactgtaaacttagtaagtgctagagatatatatagaaactcctaggcatgtcatttgtgaaaatatcaacttacttatgctctgattcatcttgtataaatgcatgaagagcttccacagctaaggagaatgacatgaacataaggaacagctgtctacacatatgtcaaatattaaacaaatcaaagtattaaccaaaaagataaactacagagacaatgaaaggcaaaacgaaaagatagattgtatggaagtccaaatctttttaacgagctgtaaaatactctattctatcagcaacagtaaaggaaagagttttaacactgagtcaagccatctacactaaagctggaaatgacatccaaaacacgttaagaacatacttacagcattagtgaaagcagataaaacttcaagtcttttgtacctgggaacccaaaaaaaagagaagacaaggatgcctaaattacaaccacttgagcataatcacattacagtctcgggagaaaaatagatcataaaatggattaaccaactgagccaatcaaattacttgtaactcacccgtatgagtaagcatgatcaggcttcttccttgaagttgccattgcaaataaagaaaatgtcaagagaccacaaccaaatgtcaaatggaatgcatcagagaccaaacctgtaagagtccacaaaacaattcaaagaaagaatatcaacaattcagagattcaatcctaaaacaaaaagagaactgaaaccaaatcgtacctacacgaccagtgaagataccaatagagagctctgttgtagaatacaacacattaagcgcaattagcagaaacagtctcttcatctgccgatttccacttgtcactactccaaaaacctcccaaaccatttccaaaacagacacttttgccatgtctacatctttcccttccccgaaaaacacatcatttccatcaacggagtaaatatccggcggcatatcgatgctcgagaccgtcctatcgagaaaaggcttagccgcttccgtgaccgccggcgttcgtggaccgtgagattgctgaaacgagcgagaataagcaagcctccgatcattagcagcatatccgacatcgctgctccgatcatcagggagctcgttatcgcctcgaggattaaaggaaatggatctctccattttcttctttgatcttaaagttccaacttc

SEQ ID NO: 68992 - DNA, 420 bp, Arabidopsis thaliana landsberg
atcttcttgggtttggttgggtcactcttcacgtttggtttttaaaaaagaaagaaagaaaagaggggtgggggtgttgtaacccctttgactaaaatctaatgaacttttttaacacaacaaaactccttcacatctgaaagggttcttcttctctcttagactctttgaccttttattctccgccgtccgtttcatgatctgactctctggtcttctctacttcttcttcttcttctattctttcttacttcgccactgttgtgtctgaacatgccacgccctttcttccataagttgattttctcatccactattcaagaaaaacgtctgggaacttactctctctctctctctctctctctggtctccttctcctcatctttcaaagttttgattttgtgccaaatgagggttttt

SEQ ID NO: 68993 - DNA, 1437 bp, Arabidopsis thaliana landsberg
tttttatgatatgtggggaatattatccatagaaaatgctatctctttcccaccccaatatacatagattttacggaatatttctcattttgaatatttatgaagctacctgagaaaattttctctgtttcctactaaaatatattttaggatattaaatatttcaaaatcctggtggataaaacaattaccaataaatagtagatacaatgcgttgaccatgcatactacctaagtattaagaatagttataaacccattaccataaaggcataaatatatagtctcttttaaattttattcaaattgatttaattctttaacaaagaaaaaaagagtcatattttttattttcgaaaaattgcaagtaattaatacatttatcaactctacacacacatatatatatatatatatatatatatatatatacatacacacatcttacaacatacacactattaacgctccatttactaagaaaaaagtataatctatatttttcattgattagtataaaaatggggagaagataaaaattcgcattttagttgatattgttttttcattgtttcaggaattttgttcaagtatatattgtctcactacttttaattttactagggttttgagatactgctctcagtgcttctaattgcatcataccatttacagtacggaaatggtcgaatgattctaaccatgaaagattttatatctaattctaactctacaaatgttgatcattctcaggtaactatttatacaagtttatttatttatatccggatgatcaattaaatatattatatttttgcagttaaaattgaatcattgcttgataaaattttcgaaataggcatttcaaaacgcatggagagcgttatgtggagggaaaggtggatcagcctcgtttgtaatacaagcccatgaaacatataccatacaaccacaattgcttgaaggtccttgcatgcctcgtaatattcatattcaggtataattcatacaaaggacgttatggatcttgtcatttatttgcatgcaacctactaacctctttgcttaattttgtgttcacattcatgattaaatcgatgacgacaccaaaccaaatgattggtacaaataaaatgttattagtttcgtgtacaatacaataaaactaagcgtaatcataattaaaagtcaaaacgaaccaaaattcatcaaagcaaaatcaaatcttctgactcgattggtaaacttttttggtactggggaatgattaatttattagttagaatgtgatcatgtcagcaaagtttcaagaaatctcatcattttgcaaacctctcatataccttggtatttttcccttggacaagaattgaagggaacaatttgaaagcctcccgaaagattggccaaaactaacatgggggaaaagggaattaa

SEQ ID NO: 68994 - DNA, 557 bp, Arabidopsis thaliana landsberg
  unsure (1)..(557): unsure at all n locations
aaagatttgtcattttaatacttaaaaatatacgtttttatgttttttcagatgtacaaatacatagggttataccagagactaaaaccttaaaaacagatggaatcgactaaatccaaacataacgagtaaaatacnnnnnnnnnnnnnnnnnnnnnnnnnnnnnnnnnnnnnnnnnnnnnnnnnnnntctgaaaaaaaatatataaactattcaaaaaatagtaaaattcatttaaaaaatattaaatccgtaattaattctaaaaaatatatattatattttcttgctttaaaaaaacgaaagaactaaaggaaaaatgtgtgattaccattatccagtttcgctaggccttaaagttttagtaaggaatctcatcaaccattcaattcatacaatcaatattactcattgaagacataactcatcaagcttaaacatccatattttcaggcatctatatcatataatctacacaaacaatttcaaacacatatacgactagctcccagggtgttgatctaaatttcaaataatacaaatcgattactagatga

SEQ ID NO: 68995 - DNA, 614 bp, Arabidopsis thaliana landsberg
  unsure (1)..(614): unsure at all n locations
tcctttgaatagtgctttcgtagaaagaagggtattacattttttaggagtatttctgtttcacagttttattaggctggttcaatgtgtgcgtttctattccacacagttagctcgctacctttacggttgcgttcagaagaataagaaaaccacatgcacgatcctcagatcatagacccgtctcaactgtactttcacacgaaatccttaatccaaacattctgtgccttgcattgtcgtgtctccttattgtgttacacattacagttcttctcacgatcagctgcagttacctatggaaanctcgtagactttctcggcgaagttacattattaagggattttcaattgtcttttaccgctactgacagtgagaaaatgtagnctatcttttacggttggttgatatctnttagacattgacatttgcagtgtctgtttatatcctacaccacanctataaatgcttcttatttgttgtccatactnagaaatgcagngtagttggctagttccagctgactttggtcaacagtgagaatgcaagcagatggtagattgggtgagccaaggcctgaaaccgaggtactcgggaccaatcgaggctttta

SEQ ID NO: 68996 - DNA, 694 bp, Arabidopsis thaliana landsberg
gtgtcttccctatctgcagaagcagcaggaatggggctctgactcaccgaataccttcatcatccacaagcacccaactgagggaactgttcttcaacatacgacaatcttccttcccaacaatcaagctagtcctttcttccgtacttttgttgcaagattcgattggccgcttctccttaccctctcatattctgtgtttcatatgcctctctcctccgctttgcttccttagggcctcgctgctttgaagtggaagatgaatagaccgaggctccggctactttaccaggaccaggagtctctgttaaccttgcagacctttcccacctatagttcgttgactgaggaactttcctacctatagacttcacagctacgacttgcttgctgatactgatgaggagcaagaggaccaatccaaacctatagacttcactgctacggctgctttagctctactatgggtcgggagtcctgctgatctgtccttcctcgtcttctccatgtcaagacatactggacttctcaatcagtaagagagaaagggctaaccactaagtaggagaattgttcgggagatcccgctgtctctgaacttgcttacctagttgacaaaggagggcagttgctattgctaaaccaaaggagaacactaagccttaccactaagaggagcaggtataagggggga

SEQ ID NO: 68997 - DNA, 727 bp, Arabidopsis thaliana landsberg
cgacggtgaataccggcaggccttccgacttcagcccggcgatcgtctgatcgatcgtcgtctccgcgttgtcggcaccgtcggtgacaacgacgagcccggcgacgggcagtccgctcatctgatcgcgcgcacggtcgatggcttcgccgagccgcgtggccgtgccctggaacgtcagctcgcccgacgaccggaggcgctcggcggccgaggagaagcggaacacgcgcggcacgaaacgccggccgagtgcggcgagcagcggcgcgtcgggaccgccgaactgggtcgtgacgaactggctgcgcggctggccgccctcgtcgggaatccgcatgctgcgcgagtcgtcgagcagcacgccgacgaagttctgctgcgggacggcgaccttgagctgcagcatcggctgcagcgtggcgaaaatggcgacgagaagcaggcccgtgcggaaggcgaacagcaccgtccggtcgcgcgccccgagcgcggcgacctgccagtacgtccacacggcatagatcagcgccgcggccgcgacggccgcgacgatccacatcgaacgggtggcgccgagtacgaactgaccctgttcgaacacgggtcgctcgtacttgaagagcaggtcgaacaccgagtcgagcacggacgtctcgattctagcctacgaaaaagaattgggcccggattcgggcgcttcggcgccctcactccgttcgcgagt

SEQ ID NO: 68998 - DNA, 178 bp, Arabidopsis thaliana landsberg
  unsure (1)..(178): unsure at all n locations
acaaaagaagagcacggaaaccaaaccgcaacacacaaaacaaaaggaaacgaaagaagaaaaggaaacaacgccaaaaccagacngaacccaaaaacaacaccagaaacaaatcacaacgaacgcagccgccgacacactaagaacataccggctagataagcaaacaaaaattcta

SEQ ID NO: 68999 - DNA, 662 bp, Arabidopsis thaliana landsberg
ttagtcagatatgcatcactggaatcgttattattgtgcaatacccactcgagagcctactgtaacacaaatattataatatgtttaaatgtgttcattgactgtaagtctactaacaatttaattaagatcaaatatataacatgattagatcattattatattaaactttggttacacctattatgagaaaacaaaatgattatgaacaaattgtcgcagctactattaaacaaactaattattgaatttaccaaatctctattgctcatagctctccatactaaataattaaagatattgaacagtaaaaaatgaaaggaacaagcggaaaaagatataattaatttggaaaaaacggaagaaagagtgaagacagatgacattttagattaaaaaattttatcaaacaagaggaaaaaagactattatttacttaaaagtaaacatatttcatcaaacaaatagaccacttgataaaatgataaaaacgattcagaataatcttttacaaaaactgaaaaaaggaataaacccaaaatgaaaatagagtaaagggtcaaaaaatgaaaaaatcctattttaaataaaaaaaattaaaaatggaaaaaaaaacctttttttattaaacccgggaagaaaaaaaaaaagcaaaaaaggaa

SEQ ID NO: 69000 - DNA, 278 bp, Arabidopsis thaliana landsberg
ctcaacactgtttttaatcatcgtgatgtttcttctctacctatttatgacccaatatatatcatcacacatacaaaaacaggctcagttcacatttatttttgggtttaatgtacctgagttcttgtataatcgttgaaggtgcctataaagaacgatattctgtaattaacccttgtttgggggcgatataattataccattttcacttcgaattattatgcagaaaaatatttgatcacctataaacttgttgaagatacaggtaatataattat

SEQ ID NO: 69001 - DNA, 1260 bp, Arabidopsis thaliana landsberg
tactgttcctatcattatgaaaaagaaaaggaaaaaagctatggtcctctctaattagagttgattaaaaatttgaataagaaataattaatttatttcactctctccagcttgttctttgtggtttggcttatactgaaaaattgaattcccaaatgtttggtcctattgagtaaatatcatccatttatctaaaatgataatcatttcaaacctaaacacaacaagaaggattttaaaacaatagacctgaactcaatcttactaattcattggttaagttgtcacgacatgtatatgttgataacaaaaggattggttacaatatgggtgcaaattgtggttgtggcttaatgtttttaaaattcacaaattttcaaatattgtctaaaagtatcccacttgtcataaattaccatccaagatccttccaatctctacatgcatatatgtccaataaaatctagctagagtacgagaaaaatatccaaaacttttgaatttgacaaaaagtcttatctttccaaaggaaaataaaagtttgtattatttatttccaccagaaaaaaatctactaaaaaaaaaagaagagactacgaaaacaatacatgcaaaatacacaagagacatgcgtgtctgagtgtttgtgtttttgggaaagccaataataccttttccctttagtgtgcacatgtgtgtatccacagaagcgtacgaaccctttctttaactcgtttcactctcatgggccacattactttcaccatcccctaaattaccacttcacccttcttccatatcattcacacaactaatcaaattacctcaaaaacgcaacaaaactaaatcgtgatcagtcaaagatgattacatagatttaggaagaaggaatctcttaccctaactagatccaggggtattttagtaaattatcataggtacccctaaaagtctctcgattccgttacactctcaatatctctccaatggctatggttactactacactcttcttcttcttcttcttcttcttctccttcttctcactgtaaaaaagaaaaaaaaatggcggaaactgagagaccccaccggtcttcaagtattaacagtagtagcaacaacaacagtggttcatcaaccgatctattcatttgtttcacatctcgtttctcttcttcttcctctatgcgtctctcttctaaatccatccatagcccagctcgttccgcttgtctcaccacttctcttagccgtcgtctc

SEQ ID NO: 69002 - DNA, 469 bp, Arabidopsis thaliana landsberg
aaggacggactgttgtcgtcggcgacgacgtctggtctactttttttttcccgctccctcacccctcccaggtgggcggggtgcgcatcctcgactccgtggtcgactcggtcgtccgtcccgcggtccagcaggccgtccagcaggcacagaagtcggtgcccatgcagcgccagatccaggcgctgcacctctaccagcgcggcaagcggctggtggtcggcgccgacgagccacgcttcaccgagcagccgctcccggacgtggccgacctcgacctcaccgagatcgacacgagcaacccgttcctgtggcggcaggggcgctgggagtcctacttccgccggctgcgcgacgaggcaccggtccactttcgcgccgagagccccttcgggccgttctggtcggtgacgcggtacgacgacatcgtcgtcgtcgacaaggacttcgagaccttctccgccgagcc

SEQ ID NO: 69003 - DNA, 699 bp, Arabidopsis thaliana landsberg
ccatacgtctaggggggctcatgcccgagcccatgctcgaggaatggccgatccacggcgacactggcgcgaggcgtgctgacgagtataatggcaaggtgacaagcatcttcgaggccatgctcagatttcgcgccgcgcagaagacccgcgaactgcatgagggcgcgtatcgcctgcgattaaccggtacacctcccaagggcaacaacccattgatcgatcggcgacggcccgaagacatgcagccgtacctcgaagcccaaattcaacgaccacttggcgagaccgccaacggagatcgggttcgcgtccacggcgaccagctcgacgtccgcggcactgacgcatcgaaccaggaccaagcacgcatcaacacacttttaaggtcgatgccggcgctacggggctttcagatcgccgcggaatttttgccggagtgaagtcagagcttcaaattttttgggactctggatggactgtggcaagtttaacgacaaaagtgtgcgattgggaccgaatccgcaagtgagtttcccgattttaacgatgaactgaccttgaacgaatgtctggccgatacgtaagatgtcgcggcctgacgcagagatgcgacaccggccctgattgaccggcaggcgaagtcttacgagaacaccctatggaagggggttggaacgtatgatcgccaacaaggaa

SEQ ID NO: 69004 - DNA, 1117 bp, Arabidopsis thaliana landsberg
  unsure (1)..(1117): unsure at all n locations
ggttgattcaaaagacagcgatgtttaaatgtgacatacagatataactctgaagtttgttggttttatataatctatgcagaaaaaacaacattatcatgtgagactcattgattatctttagcctcccagaagcatcctaaagtatatctctcacaatactttaaaaatgaaacttggcccaatacagactttgcaccacgcaagccctgttatttcatcaccggccatatacgtccttaaatggaaacatttatgtattccaaaagaaagtgaagacaagaaaataaagaatgtattgatgataactcatggagtcatggtcgtgtgcgtgtgactgtggtagaaaaaggtccacattcgacttgccccttcggatacacacaaactcaactcgtcctttccacgattacaaatttttaaattttattctgccaaaaccaaactaaacacttttgtctccttctcatgtacgtttggtctatttccggtccaggtgggaatttccactatttccactaaaaatttaatatccgttcccactttctaaagcactcaaacgaatctctttttctttgacatcataaggaacaacagaagaaaaattaaattggaaaaatcaaacaattagcacttacttgtggatattttcaattccttttgggcggcattttgattatttcaacacattaaaaagaaaaaactcgagacttattattctggtgaaccactctcatcaaagatattttgtagccaaaaaaggtaatggaggacacgtagggccaaatgaacagacagatggtgtgtgattaagcaactgaattctctctctctcttccatgtcctaaccctatgtctccatacatacacattctcttcaaaactcatttcttcgtccggtcccctctttaaatagcgcttctctcccttcattcatacatacattgatcacatccatgaagaaggagaggaagagacaagtacaggaggaggaggaggaggagaaggaggtggaggttgttgtngtggttgcgttgtctgctgctgctccggtggccgcggctgcggcgttggtggcggcggtgcccttgtgggcggtgtggtttttggcgggtgt

SEQ ID NO: 69005 - DNA, 639 bp, Arabidopsis thaliana landsberg
gaatggattgttctctttagggagtgcagaatcaactagggttaacctctctttagcctatctgtcctcatgctagtcaatctcaggtaattggtctatggcaaaggggttcctctttccttcacctgatggcaaatacaagaagagttcggcaacgcaaaagcgggcttaataatcaaataataagatcgagttaagagaactcgtcccctaaactatctagttaacggcggcgtgatcttgctgtagggtcagagctgcaccgaagaacagttattatcgactcgatggctctgatccgcgtgaatcagacggtgagttactggttcttgaatgggaatcccgagcaccaaagagcagagtgatcctctgctcgagataggaccgggtaaagggaaaaagacagaaaagaccatagaatagcaataggaatcgctgctatccgacaactttctccgtggagcccgcagctaaaggttaacaaaagattgtagaacccatggacttactatctaaacgatacgagacgggtcagtcaagggccaccaaaggcacaaagctggcgaatatccgtgagaagcgaagaaataaaaagtataggtaagtaagctctttaaagatcaagggcaataagacgtc

SEQ ID NO: 69006 - DNA, 1769 bp, Arabidopsis thaliana landsberg
aatttgatgttatgatgctaggtgaactgtaagaaagatatcaaaaccagaaaattggagctttctgattaggtaattgctcttaaagctaatataaagttataatttggatattaattttaatttaacgcaatatttggtggttggtccacccaatagccaaccttatttaaactcgagctcgttaccagttcaattttgaaaacggatcgattctgacgagtgatgatcaatatttttttttctaaaatttttttcatattcttataaagtaaaacttagtgtggtaatactaatgccattataaaaagtaaattctaaatagccaagcatagacagcatatgtcagtataatgtggttagatagatttcttgaatgacaccttgccacggtttcgatccaccaatgaaaacaacaagctaaccacaaaattttccaacagacacagaagtgtaacatttgttcataattttttgtttagtttgataataaattaagaataggttgtataacatgtgtttagagttaacaggggagagcagaaacaaaaatcagaaaacaaagagaaaaaataaataaaggttgaggaggttccttgttaatgttatgcatgagaagtctacgtgaagaaatagaataatgactagctttttaactttccttttttttctttttttttttctttttctttttatctatctaaaaaccaatattataatgttttctaacgtacatcactaatatcagtatgtgatttcagtaaaatttatgtacatacagtaatatactgatgatggagatgttaaatatgtgtaaattataagtataagtttatgtataatatctttacatacactctagggtgacattggaccttaacttctctttcttattttttgttctaccatatcacgtctgagctctcacagaccagcaacaacaccttgccccaaacttactccatctcatattcattttcaaatcctatacatttaatcagcaaattaccaagattaattgattagttataggttttattatctttactcaacattcaacattatacattggatatagagatcatcccacacaaactacgacaagacaagttatttttgttccatgcatgttattgtcaaaaaaggaaagattagctcacatatgtattccctcataagattttgtctttcatgttattttgtttgatcagtctttgtccatctctctctcacacaccatacatacatgccatgagcccaaccaaacttaaaacccaagcaatctttttttttctttccttcttggttattcatttatttattcttcaaaatatcacatatatgtatttttaagaataaactaaagtctattcaatttatatgtttttttcttaaaaaactgtttatgtacatgcacacttgtaaaaaaagcgaagaaaaatagttccaataatttatcaaactagtacatgttacaatgtaaaactaattaaggtttgaaaatttcatagttctttagactttactttcaagttgtaggtgggcatctccctctcgttgttacttaacatgtatgtttctacatacttgttaaacaaacctaagtctttaaataattatttctcactatacagtatatagaacatttgtacacattataaaaatgaggtttaaataatatttcttctaggattatctcatttctctttttcatggatggtccaaagtaaaaaccaattccaaaaggggcctttttttcactttaaaaa

SEQ ID NO: 69007 - DNA, 144 bp, Arabidopsis thaliana landsberg
actaattcagaacgtcttagcgaatcaagaagttatcctgagcaaaacaaaatctgatgtggaagctgaattggaatgtaagagcaaatcggtggaagttgaaattgagagcaagagacgggcttgggaattaagggaggttga

SEQ ID NO: 69008 - DNA, 3044 bp, Arabidopsis thaliana landsberg
tatggaaaaagttgtacatacagtcattcctcaactggttttagatattattgtatatttgggtacccatgataatttgtcggactcgcactgtcgaatccgataattatgatgcgtcgctcgtacatgcaaatgcactcttcattctgatgtaattctcagtcttatcgtaggagtaaagaagataaggcattgattgatgatgtttcttagcacatggctctgtcttttgtaccacgcactaatccatcatgccattcatatttctacctacacgttcattatgagattgcatggttgacttgatcttatttacatacatgttccattactagttagttgcaaatgtcaattgggtataataataataaatgatactatcttcacctatctacttttcatatatcaatatttacttctttttttgtcaacatcaatgtcacgtcgatatttaaaccattatacctactgaaaataataaggattatatttttattttataagtaggaggaatgtcagatccattatttcattcttaatcagtgttattctacctaacctgtcatatttgttgtaatagccaataaaatattcgaatttgtatatatataccattacctaacgatataataaggattatattttcttttttataagtaggaagaatgacagatccattattaatcagtgtttgttctacgtaacctgtcatattagttgcgatacccaataaatattcgaattcggataatatacgttgatgttttgcgttttacgtgatgagtttgaactactaccattaacaagtaaaaatggtttgtgtgcgtggccgtaagtaattaattgttttgcattgtatcggagattatttcattatatcataattagcttttccacagtatattttcattttgttaaatcaaataaaccatatttttatggtctaacatattaccgacatttttttttctatcgaaacacatttgtagctatatatatcgagttcggtgttttacaatttaagatacatcaataacaccataaaaattaacaacttcacaatcaatacccaacaaacattataatagtagcgtagtacatctacattaaaattgataacattactcaaaacattatacaaaccatgcatgtcactgatattaatgagttactcttttggcagagcaacaataaatttggctagcgacttggcatccccaaaagtagatgggaaaacaaatactaccccttttgagacacacccaacccaacatgaagtaacttcaagtctttccccaaacgataaactcttatcaagtactccatcatttgtctcctctgaatcacgaccgcaatcgcaacccttaatcacttcatcactcgaatgtatctctaccttcgtaccatcacatccagtactattttcgccactgctttgttccttgatgaataagaaaacatccccactcgttcttttgctagttacaatgcaggctggtgatattttcaggcatgttttggcccgaaaagcaataggttcgccgcggtcgagaaccgaggctgacctaaaaaattcagtgaggaaattaccaaagtcttgcttgagagaagggaggtggaatactggtttgagtgtggtttgagctaaagagctttggatttgagcccatttggttaagaaacctgtctcaaggaagagatcagctattaggatgctgcagcttatcccaattgagtacccaccactctcaaaattagtcacctattaacaaatatataaaaaaaatctcaatatttatatatgtgaaggaacatttttattttttagaccaaaccaaaaaaaagaaacattaattgtaagtctgaggattttaattaaaatatattattaattatagtgtatattaaaatttgatagatgacataaataattgagtttgcaaataacctgaacatagaacaatggagagtattgaggttcatcttcatcaatgtctttccagaaaacagtctctgcttcagctctgcttttgtctctcttcgccatttcaagaaactccggcagactcgccggaaacttagcctccaccatcctcacaccactatcattggccactaactccaaaccatcattccccgccgtcttcctcctccgtagcctaccggaaagcatcggctgctccgtcaaggctctccctaaagattccttgatccacccggcgactaaccaccctctctcaccaccactatcacctgcttctttgtaatacgtaactatgttaaccgttcgccggaatattcctactccgacgggatctacgacggatacggagcggatttcccggtgttgcgtcacttccaccggcatgacagtctgtactccggcgatcattgacttagggattttggtttccattttggttcgaattgtgaaattggctttagaccgtcctctgctatttataggaactcaagttattacacaacttgcaaaacataactttgtaataaaaaaaaaagtgctgcaaatatctagctagtagtataagaaatgtgctttaatgttataaatgaaacccaacagcgaatacagatgtgaataaaccttgaattaattgatactttattttatcaatgcttgttctcaatttgcgtaaaaggttaatatggagtcttaatgatcattgactattgagacaagcaagagtcaagatttgcggttggggtaattaatgatttgatttatgaattttatcaaaacataacctgcaattaatgatttgacctatgttactacttagtagcagtgtacgtagttgtgggtattcactcttgttttgtttgcatctacagtttactagtttagccgatacaaaaaaggggtcgaattaattactggccatccctcagatggcatgtgcttcatagttttgaaaaggaccaaacatatcctatcaatattgcacaaaacaagataaattaaaccattttgtagtagaatcagaaatataaatgtttgaggggatccccatagactcgacctc

SEQ ID NO: 69009 - DNA, 2468 bp, Arabidopsis thaliana landsberg
agtttctccactctgtacttcgtatcatcaagcgaaaccctaaagaagcaatcttaagtctcttctcttctttattttttctggggagaaagaaatttcacttttttttatccgatttctgcttcatctgggttttggatttttgcgatcgattttgagaaattagcaaacaatgtcgggttctggaggagtttcaatcgcacgtacagcgatccgtggtgagaatcggttttataatccacctccgatgcgtaggatgcagcaagaggcccaattgcagcaacagattagggagaagcaacgtcgtgatgatgaagatgaggttttgatggataaggaaaggagaaaggctgctactgttgctccgaggactactaggaaaggtcttggtgtgtcggagagtaagagtcgggttgttgtttcgggttcggaagtatgtgccggttcttctgattcttcttccgggtcgggtcgggttcttagtgatgggtctaacttggatcggttcttggagcatactactcctgttgttcctgctcgtttatttcccatggtaagcactgttttcaaatctattgggtcttgatacttattctgtgtctgttgtggctacttgaacttgatactatagtgttcgttgtgtttgtaatctctgtttggaattatagagttgaattggagaagactttgagttttgtcatgtgatttagtgtagaactcagttgattttgtattatggcttatgagcattgctttttgctgcaatttgttttgtgtagaggagcaggtgggaacttaaaacccgtgaatcggattgccatacgtattttgttttggaggatctttgggagtcatttgctgaatggagtgcatacggtgctggtgttcctttagagatgcatcctctagaaatgcatgggaatgactccactgtgcagtattatgtgccttacttatccggtattcagttgtatgttgatccgttgaagaagcctaggttagttgtttgatatgtatatgatttattgcgcggaagaactccaggattttttacatttgacggttttgattatggtcttgttgaatagaaatccagttggagataatgaaggaagtagtgaaggaagcagcaacagtaggactttgccggtggacttgagtgtcggtgaactgaatagaattagtctgaaagatcaatctattactggctcgttgtctagtggagaagctgagatcagcaatccgcagggacgattactattcgagtacttggagtatgaacctccatttggcagggaacctctggctaacaaagtaaatatcctcttaagcaaagacagttagatcattattaactttcaatattttctaataaagttttcatacacaccagatctcggatctcgcgtcaagagttcctgagctaatgacataccggagctgtgatcttcttccttcaagttgggtctctgtgtcatggtatgtttcatgtgaaccttcctgagtcttgactcttgggatcgttacattttggaatatatgtggaaatggatttgaaaatattgagttgtgaatttgttggtgtgtaggtatccaatatacaaaataccggttggtccaacactacaaaatctcgatgcctgctttctaacttttcactctctctaacagcacctcctcaaagtaagcacccgatgacgtaatggaacacaatatcctcttatgtcctcgtacttgtgatctctttctcagtgttgtgtatgtattggagcaggtgctatgggttgtagtgattcacaaccatccacaaagctaccgttgcctacttttggactcgcatcttataagctgaaagtatctgcgtggaaccaaaatagaattcaagagtcccaaaagatgacttctttgctacaagctgcagataaatggctcaagcgtctgcaagttgatcatccagactacagattcttcacctctaacagtccacaaatgaggtgaaaatgaaagatacattcttgaccatggatttggctctggtctgatcaaaagacccattatctgctgctcttacttcacatataaagtctctcttacactgaagaaccaccaaatagtggttagactcttgcgtgtttttcaggcgatttaagagtctctgctgtttcgtttccagaagatgctttgtgaattgtagcctaatcttcctctttcttcttctgaaacttagtcttttgattttccctgaataaggatttgaggagcccatatagtgaaatttgcgaggagtgtttttgtaatgttgagatgcaacactttttgtgatacaatttgattgctgaactgatgaaccacagggttggcttataagttttatactgaaaagttttaagcgttggctaattttacgagtcctgagtagagtgaaatagtacttatatatcttctgattatgcacataaaagataccc

SEQ ID NO: 69010 - DNA, 499 bp, Arabidopsis thaliana landsberg
  unsure (1)..(499): unsure at all n locations
gttttaatgctccatctattacaaaacaaatatttcattattcctctacccactaaaaatnggtttgggttaaannnnnnnnnnnnnnnnnnnnnnnnnnnnnnnnnnnnnnnnnnnnnnnnnnnnnnnnnnnnnnnnnnnnnnnnnnnnnnnnnnnnnnnnnnnnnnnnnnnnnnnnnnnnnnnnnnnnnnnnnnnnnnnnnnnnnnnnnnnnnnnnnnnnnnnnnnnnnnnnnnnnnnnnnnnnnnnnnnnnnnnnnnnnnnnnnnnnnnnnnnnnnnnnnnnnnnnnnnnnnnnnnnnnnnnnnnnnnnnnnnnnnnnnnnnnnnnnnnnnnnnnnnnnnnnnnnnnnnnnnnnnnnnnnnnnnnnnnnnnnnnnnnnnnnnnnnnnnnnnnnnnnnnnnnnnnnnnnnnnnnnnnnnnnnnnnnnnnnnnnnnnnnnnnnnnnnnnnnnnnnnnnnnnnnnnnnnttgtacttcttagcatgaataaaaaaattt

SEQ ID NO: 69011 - DNA, 631 bp, Arabidopsis thaliana landsberg
acgcccagcaaggcatcgcggtcttcgaagaaccagtagaagctggtgctcgactcattcagttttttcgccagcggcatgactgggacggcctctacacctgactccgtcaggctttcgtaggccgcatcgagccacccttccaacgagcttcggccggtcggctccgccattttggtggtcgctttcatgggtgatgcttccctgttcagatgcgctgttggtggtcgattgtacaccagtgtcaataatgttgacactggtgtacagccagcctattgtcggccaagcctgatgacctgtttgcgagaccgatatgaaaaacgatccgctacttcagccttatcgcctcaagcatctgaccttgcgcaaccgcatcatcactacgtcgcacgaaccggcttacccggaagacgggatgccgaagaagctctaccgtgcctaccacgtcgagcgggcaaaagccggggtagccatgaccatgaccgcaggctcggcggcgatctcccgtgacagcccacctgtgttcaacatcattctggcgtacaaggacgaagtggtcggatggctcaaggacctcaccgacgagtgccacgaacacggcgcagcggtgatgatccagctcactcac

SEQ ID NO: 69012 - DNA, 424 bp, Arabidopsis thaliana landsberg
  unsure (1)..(424): unsure at all n locations
aacacccccggacattatacggggctccgggatnnnnnnnnnnnnnnnnnnnnnnnnnnnnnnnnnnnnnnnnnnnnnnnnnnnnnnnnnnnnnnnnnnnnnnnnnnnaaatgcgtttgccacagtcttgcctgaaatggaaaaggctatttcgagaacgacaccgttaatggcggcattttccgcgctcggacggctgatgccccgatcatcgcgctcgaaagcgtcaactacaccctcgatgtaagtgaccggccgcttcatatccttaagaacatttcgctttatcgggctccagctcaaaaggtggccatcgagggaccctccaacatcggcattacgtcaatgctgatgctgcttgcctggcatagaacgtccgacatatggttccgttgtcttctgcggacaagacctgcgcaagctc

SEQ ID NO: 69013 - DNA, 290 bp, Arabidopsis thaliana landsberg
caaaacacaaaataataacaaagaatgataaaatagtaaaagttatgcttacgtgtgaaaaattttactcgctaaagaattaagaaatccattactttccttcgtaattgggcaatgggctgcaccatgttttcagttgttggacatctgaaccaatcttgtgatataacttcgaagtcccaaggtccaagtatttacaacttaaattagtagatctctatacactcaagtctcaagatgttctctacactataattaaggacttgcattagaattttgttcgttcgagt

SEQ ID NO: 69014 - DNA, 575 bp, Arabidopsis thaliana landsberg
cacggttcttattgtttggtgaagaaaaatttaatattggggacattttctcatattttatttggtaagatgttgagggtccggtggacttaattgtaaatttttcttttaaattattgcttggtttcttgagaaaaagaaaacccataacaatcaaatcttatgataaattgagttatggggtttgcttgagaagtaattggtttcttcgcttgtaaatttagtgttcgtttggtccactttcatgggaggaatctgctatttgccaatatgcttgctaatgtgagctgtataaaaactttatttgctattgtgaactgaaccaagggagagataccttggaaaattcggctaaacatttgataatgatacacattgcttaaacaaaacaaattgataccttaaaaattggtttgacttcggattagatatatggtccaaatttgtatccattcgtctatatattaatcaacatgtaaccttattttatattatggaatgttatatgtcatctattgacacttgccttacatattcatgaaaatttaaagtttgctgaaaatttatttactcag

SEQ ID NO: 69015 - DNA, 490 bp, Arabidopsis thaliana landsberg
ggactggtcccagaagtcgcgccgcgcctgcggatcaacgccgtctgcctgtcatcgagcatcagcattttcgggccatgcggggtgcatgcggccagggccaggcgctgtttccagccgtcggatagcgtgccggtcacttgtttccggcgcgaggttaaaccgagggtttccagtgttttatcaacgacctgtttcttgttcttaaggtcataaagattggcgacaaactccaggtttttgcggatcgacaggtcttcccagtatgaaaatttctgcgtcatgtagccgacctggttcttgatctcgcggctctgtttgaggatatcgtagcccaggcaagtgcctttgccggcgtccggtttcagcaagccgcacagcatacggatggtggtcgtcttgccggagccattggggccaagaaagccccagacctgtccgcgcggcattcggatattgacatttttgaccaccttgagcttgccatagc

SEQ ID NO: 69016 - DNA, 291 bp, Arabidopsis thaliana landsberg
cccatgtagcctaagccagtgaagagaccactaaatgctgtcatgccagcgagtaagtcgactaataaagtcttctattctattatcgagttgtcgctcaaaggcggtcaagaaaccctttgttgcgttcgaatgtcccgttgaaggctctactatttcttattgttgttgctgaaattcgagaaaagtgatcaggtcgacatctcggtcaaagaacaaaggctagtccctacacgagcaaaggcagcccgtattgctcaaaggctctcccggctcgactccgctgatggc

SEQ ID NO: 69017 - DNA, 1902 bp, Arabidopsis thaliana landsberg
gaagacgatgatgaaagtgtaataacattaccttttcaccaaccttgaaataccctttgaaaatttatagtatttatcttcacctgattcaaaccatttaacacatcaaggttacaaaactagagattcttaaaaagcaagatcaaactcactcctctagcataaacccaagaagaaatgtggggtttttgtaacacattgatcagaccgaagttggaaactaaagggtcatcacgaatttcactgattcctagagcataacatagttgagattgagaactgcaattactggaggaaaaaattatcgtaatgatgaaaaaaatgaacagtaaacaataaagctcgttcacttgcaagacaatcgaattctaatggagaaaaacctgaaagaggatcaacgggaaagagaccccaaaccattttgcttcgctccaagaaatccttgttcgaaaggggttttgatttctttcttcagagactttggtgtttgtttactgtgttttaaggagaccggtttagtaaaaccgaacttatatcgggttttttaagatcaaccggagattcttaggcccactaataaaccattaggcccctatggtctttgttatgagaaagatagacataatttgggaatttgttatgaaaggaagtacaaggatgtctagcccaagttaaaaggcttataaataccatatgaggcccatctgtccttgcataaaactttttaaggaaataatgacacccaagtcacccccactaacaaaccacctaattaattctgggatcatgcagaatctgagacccttcgatggcaaggtacgtacgccaaatatctgattctcgattttttcacgagtgatctgttgatagaagaattgtacagtgttaccgtggagggagatcgattggaaatcgccaatctcgcggtttctcttcatcatcatcacctaccaaaaatggtaccagatctacaaatctcggtcactaatcatgtctttgtaattaggatttgtggtttcttcttttgattgcagagccatcgatatggatcaaggaagtacatagcatggaattttggcatctgtatgtagagaaaaagatatccatatatattccagctaggacaaaaggctcgatacatgagggaggcactaggtaagaacaaaatcaatagttaagcacttgaacaaaagcattgattgctattctttctcatcttcttcgctgcattctctttgtgtgactcagatcttggagccgagttggcagatcttgcagccgcaacaggggaaaaagtggcaatttcagtcgatcttaatcttttcaaacctagtaaagctctagcggtgtattatgatgatctagctgatctagttgttgtgtagtacgtagcctgcctttggttgtgttcaaatttgtggataatcatggtaggtagaataaatattagctcgttctcgcgtttcttcagattaattatgatttgaggtctctgaaatatctaaaaaccaaatcatcagtcttttattaacaaatagaattaattattccaagtcaacaacgaattgaacgttgagagcattattgatctcctctcattgtaatttcttgtggaggaagcaagatgatgtgcttacttgtggaatttttgttatgtgagtgaatacgatgaatatattttaagggccctatatttccacaaccaagcacatcctcttgcttcctctccacaagaaattacaaaaccttggagttgatgatgaaaagatgacaaaattttaaaacattaggattgaaaccaaacgaagaaaacaggcatatcttaggcccaatagtttgattaaggacagaacaaaaccttgctgtcaaggtctttcttgagccttacaaagttatccagaa

SEQ ID NO: 69018 - DNA, 522 bp, Arabidopsis thaliana landsberg
cggagaagatggatactagcctggtgaggactgcgctatcccccgtttattccatgacggtctaccggggcatggtgggcaacccctccgccattacttcagcaaacccttccacttcttgatgatcttctgttcctcgtcctgggagacatcgtcatacccgatgatgatcaggttcttcttacccagcttggacacgatggactcgtaagaccgcggcgcctctctggcgggcagacccgaccggtacggcgtgaatccgccctggtacacactgacctgcccattctgcgacaggaggtagtccagcatcagcttggccgaattggcctggggcgccgactttggtatgcccattccgcgcaagaacatcggcgtgccatccgcgatgttgcttcagcccaacagcccggcgctcttggacgcctgtggaatgaccaccgtgctcgacaggaaatagcccgccaggtattccccggtctgcagcttgttcaccatcggtccggaccaccgttcaagccg

SEQ ID NO: 69019 - DNA, 1166 bp, Arabidopsis thaliana landsberg
aatcgcgtttataagaaacattgtttgaattttcaatgcaaattttaaaaccaaatttaaaattatcgctaataaaaataaaattatagggtaagacgtgttaattacaagtagattttgattttatttttcatcgaaaatgaacctttattaactttaatcgaatatcaaactagtacaaatgatggcaaatccatggggctggattagagacatccgaatagaaaggtgaatctacacatccatattagctaaatggtaagcggcaacattgttgcaacgttttgtgaaaaggaattggaactctttaaatttctgcgaccaataatggatatcttgacatgatatccttatgattaagatatcttaggcagtattataagtagattagcaaaaaaacaaaaaaaaaaatatatgaatccatcattaagcttgatttgtttttttaacttgtccaactaaaagtttagtttcaatataacaacatctacaacacccggttacatatgatacctcgaggtccacgacgacacactagtacactacatatacataaccaattcgcaccatatgatatttagatacccctttgacaatatcatgtaagggcttttttggaaagcatcactaacaagttaacaattggatttttacaaaaaccataaaaaatttactcggtttagtatacaaatatattttggtgttatcttaccatttacaccaaaaaaaaagaaaaaaaaactactagcagtattgattaaaaatttaaaacagaaaatatatatatatatatatatatataccaaaaaattgtaaatagtattcttttgacctttgttttggagtgaattggtagatgaagaagaagaagaacctggtccgattctaaacctttttttgaatataaaacggaataaaaatattctgtgtttgagtcgcctaacaacaacacgcaccacccgaaattataaagtaaaagtaataaaatcaaattatataaattggcaaaagtcgaagaagatgatgattgaatgtttatttggcagtgaatggaagagatagagaggagcatgggtctctgtgaagaagataacgtagagagagttattatgtttgattctgaagcgtgacgtcactcagaaaccgtggggggagggtctttcttt

SEQ ID NO: 69020 - DNA, 373 bp, Arabidopsis thaliana landsberg
gcctctttgcggcctgctcctggtggcgggttgcgtgcaggccagtgcgcggcatgcgacggcgcatgcatgttcgcctgcacaagccgaggcggccgacgccatggtggacaagctcgacgactgggcggccgtcagccgtttcttcaaggcctaccgccagtgcgatgacggctatatcgccgaaggcagttccgacgccatcgcacaactgctggccacgcaatgggaaaccttgccgaagttgcaggcactgatccggcaggaaccggcgctgcgttccttcgtgctgggccacatcaacagcacgctggacaccaacgagctggaccggatcaagcacaacgcctcggagttctgcacaccggatggg

SEQ ID NO: 69021 - DNA, 160 bp, Arabidopsis thaliana landsberg
ttgtttattaacgcactcacgccaagtgctaccggctcatcctggtgaggcatgccaagcaccctgccatatttttcttttctcgccctctcgcttagtccataagttgatctactaaaggaattcagtattaggatcacaagcctatgggatctcacga

SEQ ID NO: 69022 - DNA, 107 bp, Arabidopsis thaliana landsberg
aattacgatttcgagggattttttcgccggagccggagaacagtgatccctaattactttcagggtttaatgtttttgctagggcgctgacaaccctgccttaccag

SEQ ID NO: 69023 - DNA, 517 bp, Arabidopsis thaliana landsberg
ttccatatatttgtaaaagccatgcatgtaagctcgacatttcttcttttattactttcaccgaagttgcattattcaacatctatagcaatgacatgtactgaactcacatgttcgattaaatatacagactttgtatttgcacgttgccggacaaactttgttgcattgagagtttctttcgcaacgcgcacactgctcaattataggtttaggactaatcactgaagtagtaggaacttgaagatcatcgccacagtcgcagtaaggatttttggaaggacaaaagcacggttcttgccatcctctaggtatcgcatcagttaccgacaataaatctgcatccaaaagattaaaaaatttagtaaatgttgccagacgggtaaaatggatatttcacattcaaagctatggtatgtgtaacgtattcttacaagctgcaaggattagagcaaatacaaaatgaaagataactctcgccctaaattttaattaacgttttgcaatgggaaataaa

SEQ ID NO: 69024 - DNA, 422 bp, Arabidopsis thaliana landsberg
  unsure (1)..(422): unsure at all n locations
ggaaaaccggcagggatcatggcatgctggatcaggagagngaccgtttttacctttatcgcgagagcctcaacgcgggtggttttggccgtacatatgaacacctgcggcagcgacatttgtgtttttgccgaacgctgggctccatggttttacgtttggagctgctcggatacacgatggcagcggacaagtcggagtatgagaagcacgtttcgaccgaccacgacttattcgatgcttttgaagccaggcccgagcgattgacgtttgatcaattcgtcgacttcgttcaagactaactctgtccgtgagcttaacaacgaatatgtcagtgactactatgcccaacacgcgcaaggcctaagcccctttgccgctgatccactggtgccattcctaccaaccggagagtttgacat

SEQ ID NO: 69025 - DNA, 237 bp, Arabidopsis thaliana landsberg
  unsure (1)..(237): unsure at all n locations
gnactttgtcagttacgttggctccgatactgtgcgcgtcaattttgatgactagctcacaaaatgtgtgattaagctttaatgtaattactttattaaagacaggtttaatttaagattctattcatataatatgtaagcaaaaactggtgtctgtctctcagattgttccactaatgatctttcctatggtttctttgcgtcacaaatgcgattcacaatggatcaagaccctta

SEQ ID NO: 69026 - DNA, 211 bp, Arabidopsis thaliana landsberg
tctgattcggttacattttctctttattgagcgtaacggattaaaggtttgacaagctgtgaatgtaaaagtgtctaacgtacgtgtaatatactaaaccttattattatgtaattttattaatccaaaagatcatctgaataagaataacatgtcttaatcactattctacgtcaagtaaatgaaaattctacatcgccagctattcttt

SEQ ID NO: 69027 - DNA, 581 bp, Arabidopsis thaliana landsberg
gggtgtgcacgctacccgcaggcctgggcaagccactggccgcctacgcggtcggcaccatgcagatgtatatctacccctacgacatcgcctcgcggctgggacccaaaccggactgagccccatccgtccgccatcagctaacttcgagcgatccggcgaatgacagcgcgtctgtcgccgtcagcgccgcctcccttccaaaggcttcgagttcggccgtcacctggtgcgatttaactgtcaacctttcaattgatggtttatatggcagggttttggtggtgaataccaatttgccagttctctgcgaggagccgacggttgcgacttcaccggcgagcgaaccctcgatcgtcgacgccacaaaacaagtcgtcgcttccaacgaggcgacttttttggtcgtttccggtaatagcaggagcgcagccccagtaagcgattcggtgctggagccaaggtcgcccattagagtgtgggtaactatttccccttccgtgattgtccctacacttgttgctttagccgtacagccactcgccgctttgagttggcagccagtgaacttgacgccgacg

SEQ ID NO: 69028 - DNA, 2795 bp, Arabidopsis thaliana landsberg
atttcaatgtaagaatcacgtacacatgacattaactttttgttccatgcatcaatcaatatatctccagcatcaaactgtggctctgacatagctctctcatttttatttttgaaaagaaaacgaccacaattattccgaatgaggaagcatccaaggatggtgacaggtagattcacactaccagacaaaggtaaaggagacattatggggctggctgcatgaacatcaacaggacgtccatttcgagatacatgtgcagcaactccagcaacaggtgtcaaattgtacgctagatacttcctgcaaagtaatatttcaacaacaaaatagagacatgaggacctctaggacactcatcacatctactaggtttgagtaaatgaaattcttttatcttcatcaataaaacaaaataatttagtttctgtttactcgtatgaacagtgacatgccaattctttagttatcaagtatgaaaagtgacatacttgcacaaaactgaatgtattttctgcccctggttttgatcagaattggtaacatcttaaatttaaaagatagattaaaaatctgaaagaaactattggtatcgctttattctctgacatggctttcgaggtgatatgaacatcaaagcatataggttactgccaggatcttttatgttaagtaaatagtaagtaactttgtacctgccacgagccatgttttgtgattgtccagagcccttgctgagaactacaagccatcgatctagaagtttgttttcccctatatgtaggttaacctctattattcgtgatttaacaccagagtttgagctaccaaaaatcctcgaaagtttagacgttttcaagtttttctccgcaaagggatttctcatgatagctgatgctgaatcaatatgcagcgtgtaatcttgatgtggttgtgcatttccttgctcccatgtggaaaatgaaacctgaaattgacaaataatattttccacgtttttgggtttgattcatagaatagacatcaagttattaaaacaaaacacaacatgataaaacatgaatcattttagaacatacagaggtgatttactatgacatatgtatagagttccatacaatcaatgacaaaagtcaaacctcactcattcatcaaatttgaacttcaacttacaataatccaaaatatcaaaatctatatgcttctgtgccaacagatggaaaaatgccaaacacattttagtgcttctgcaaattaaaacaaaatacctagcaaaatatccaatcaatgaaaacggcctcagaacaatctaattagttaaataaatctatacttaacagtttaccaacagtatgatacactgtgttcaagcccagattttttcagtttctaagttgtattatgtattacagttctgaatttaaacgagttttactgccataaaaaagaattcaatgacgtccacagtagtgtagatatagattataatacctgtgaaactgacttcaagaaaataaggattctcgaggcattctccagaaattggtcagatatttgcttcactctatctaaccccgcctcaaatccatctttcaagatttcagttgataaaggcatccggataatggtggaatctgtcaatgaccatgccttatcttgaccaattagcatgggattgaattgatcactgaatcgctcaaccaaatttgtacctaaaggaacagtaggaaatattagaaggtaaacttatagaagaaacacgtcaactgaatagtaatatttgttgagttacataacggtaagaaaaatgtaaataaagctaaaatatgattctccctgatatgaccaatgaaccaaaaaaaatcagtttacgaggttgtttattcccatcaggaccagttactgaataaatatgagtcaactgaatatcatacagttttagcatggggaagacaggtaggaaagcaataccagaagttcatacctatcaaggagaacatctttccagcaggagcctgagtcgtggatgcagaaagggtcgctccttggggatcgaacatgtaaaagtagccaccagaaacaatagacagaagatcacacatgaagtaacagctaagaaggcccaacccatagttgagagtttcacccttaattctccactgtgaaagaagctgaagactacaaatctcctctctggtcaatgtaaccccttctaaaatggcaactatagctggtccttgaaattcacctgaaaaagaagagtacgttaataagaggatcaaggtatacatccctacaaatctacaaatcaaaacactcagcacatattcaaaactaagcaacaaagaagccagtatccagtagaagctcaaaatatcttttctggtagtgaaaatttaatccaccttagatatctccgccattctccaaaattttaaagagaaagcttaggtaaaaaccaaaaataacacaatatttaaagaatataatagagtcaattgaaaggctagtaataagctcaaaacattgactacctaaattatgctgcagcaaggtcttgcgagggtgctccctcttgtcaaagatgatatgcagctttttaaccttgcagcaatcagctaactcaagaagatcgaacaacaagaaatctttgctggcatatagtgatagaagctccttcaactttgtgaaatccatacaaggaagatcctgggtaatatcattatccactaaggagatacaacgaagagactgtatccccaatctattagccatgtcactgttgatgctaggat

SEQ ID NO: 69029 - DNA, 200 bp, Arabidopsis thaliana landsberg
caatccctcgcctctttttttttttttttttataatgacaatccataggtcctcctgcagaacaagtacgatttattatctaacctagaggacatgtgtgtgatgttttgttggctaatctgatcttgaaggctaagccatattcacttacacgagctacctattctggctgtgagagtgtgacttttcatttgagctct

SEQ ID NO: 69030 - DNA, 2560 bp, Arabidopsis thaliana landsberg
tcatagttagttacctcattaaaaattatatcactatcacatatttacatataaccttttttttacatataactatttatttatttcatgtagcatcttactttcataatttcacaactaaaatcactctaaaagattataaattaataatagggttttgtgcaaaaaaaaattaactcatcaatttatacaattttatcatctatttctaacaaatgaaaaaattaatcttatgaaatctaaaataatatgcaatatgatctttattgtgtttgttatagttaacttgagttgtgttaataaagaaaatgctctcaaagtaagtatttatctcagcgctttgttataagcccgttttgatacccaaagaatacaccaaatattatgggccgaactaaaaagcaatcaagcccattatttactgttaacatctcgattgttctactgacgcaccgaaccaaaaaaaacaaaatagatctccaccgttgatcgtgtcagggaggacgaaaccctaatcatcgaacgcctcttctctctcagtatatatagaccgcatcctctacctcttcataatcgtagcctctgtaattttgtagttgtctgtccgattcttctcagcgatttttgtattcatcgtttcaattgttactgtgtgtttcattgattagatcttgtgaatatagtctttatagctttggttagagttttcttattggttaatgatgataaatccaaaggcttgtttctcaaacattcgcagtggccgcctaagagctttcgcctttcgccaggcttgagagttaatgctgttttatccttccttggatgtctgaaacttttgtatctaaacttgtattgttttgttttctattcgggttttggatttgggactaagttattcaatgtcccattagcagaattgatttctcttagtgcttaataggattgaacaaagtccctcaaatcttgatccatctgtcactttgtcagcagtcttaattggtttcttgctgatcattatatgatgggaaatacatagtatctcagttttgatttcttttgttgtattggtcgatgaggataagatgaaggcttgtttctcaaaacattcgcagtggccgcctaaggctttcgcctttcgccgggcttgagagcttatgatgtttttatccttccttggatgtctgagaccaattccgttttagttagatgattgttgctgttagttttctgttgatgagaatgatattaaggcttgtttctcaaaacattcgcagtggccgcctaaagctttcgcctttcgccaggcttgagagctaatgcagctttatccttccttggatgtctgaaacctatgaatgttttaattctcgcttttatgtttttgtctgtaagaacgatcaatgatgataaacttaaggcttgtttctcaaaacattcgcagtggccgcctaaagctttcgcctttcgccgggcttgagagttaatgcagcttttatccttccttggatgtctgagatctttattcactctatcgattatcttgtctgtttaggttattccttctagtagattattatcgtctattttttgtgttgaattttcaggtaatttcttggtggtagcttcttcgctttactggcttttggagaaagagttccttacgtttcctgtaatttcctttaatctgtaaaaatcattgtcagatttatttacaatctgtaaagggttctttgttgtaaacaattttgtacattggtgatgaaattttgtgctcattatgaattttatttgtgatgaaataccgtgattcctttatttatcaactttgaaagcttattactgaaaactttgtttgagcttcaaagaatcaatgatctctgaaagctgtaatccacattcaacaaataacactcttatatacaaaaaaaaaaatactcgaaatttagaaattctatgtttacaagttacaatagttaggaaattgtaatttcaaatcaaataagctaagaagatgttattattaaaatgttcagacgaattaaaccggacctaatttgcttggtcttttggccgctgaccttgtctgattgatcgggatttttgtacggcgaatcaaaatccaccgaacaaaccggaagtctaggatgctcaagctttacggattgacttagagagagatcgatttgaactgtgtcattttgagcatggtttctagaagaggctccgagacaaaagcgattgtctgtgtcctcacggatagaattaggatctctaatcaatgggtttcgcatttgtctttcgctggtctacttggtgttgctggtttcgtatttgcccaacagcacggtctattccgcaacttaaacaacttaaaactcttctccggtagagaaaaagactccggagacgattcttttctcgtacctggccttcaaaatctcggaaataactgcttcctcaacgtcatcctccaggtaatactttgaattaattcttctttgagcttgcttttgatctttttgttataaatctttggattgtggatttgactttcagg

SEQ ID NO: 69031 - DNA, 474 bp, Arabidopsis thaliana landsberg
aattgttatgttaatatatgtaagaaactataatgacacttacaatgattgatatgaggtaggggatatcatattagtggcgcatatcatattagtggcgcaattaaagaagctttaatgtgtcgccgccatttaagcctaattcaacgggctgatggacataaaatattaaaatgatttttttttttgttttgttttcgtcaaaatattaaaatgaattgattttgctcttttagtaaccgaagaaaatctgtcacttgtctattattccctcaattttatttgatttatagtttaaagatttttcatacaaattaaaaaaaaaaacataaaaaccttctttaatatatctattttttataaaatattatcaaataaaattaattcgaaaatatactattaaatataattagttaaaactattaaatatatttaatttttgcataaaaaaatataaaagcaacatttattttg

SEQ ID NO: 69032 - DNA, 657 bp, Arabidopsis thaliana landsberg
  unsure (1)..(657): unsure at all n locations
tttcgttaagcggacgtaccatgatcggaaatgtaaacgtcaatcccacacataacccattctgtttaaaccaaaaacaacagaaaaagtgttgaattcaaatgattaacaagtttccacacaaatctattgaaaatggttatcataagcaagaacagagcatatgaatctataatcataatgaaatgcgagaaacataggttcccagaagaagtaaaaacattagaattggcataattttacctgaacagcaatggcagaccaattatttgggaggttaagagtgatgatatcctttgtttgatcaccataagccatataaccacaaaacccgaacaacacatagacaaacgtaatcccggcaagcactttagctaacaatttagggaaagcttctctttccctcatagaactctccaaagccaacgtcattgcaaaaccctcaaaacagaacaccgcaactcctccagcaaaaggtaaaccaccaatggtagacgaaatagcagttctatcactaaacgagaagtctccttcaatcaccatttccacattttctttgacaacaaaacacattgctatgatgttgcatatatcagcaaagatactgaaaggcgagagagctgataaagaagtgantcacgacaatccaacttcgac

SEQ ID NO: 69033 - DNA, 694 bp, Arabidopsis thaliana landsberg
gagaaaaatgaaattttgtcttgatagtaatcagactatggtaaaaaaaagaaagaagaaggtactatatatgtaaacaaagttgttataggaacatgttcattgcatattacaaaccaaatattaaagagtgtagatttgaagcttaaactagcaataaacatactagtttgatattaatatctaaaatagatttgaagcttaaattttcttgaccaacgaacagattatttggactttaattaactcaggggatattaaatatctaatgcaattaaatacaacttttgttttgattcaaaagaaacaattaataacttgtcaaaaaaaaaagggaagagatgtttgaccctcccactggcggtcaaacccaaataatgataatcactttctttccctgtcatcaatctttgacttttgactcttccttatcatccgttacgatttcgccacgtgtcttttcatctctcttcatataaatacttaacgccgttggatcatccttcgttgcttgctgttatctgggttccgtctccgactctctctgtttcttcgatctgtttttttttgaccaaagaaactttttttttttttggtcttccttattctttcttcaatgccgttgaacatatctgacgatacttgaatctcactctttcttcttttcaattctctggttttaggcaccaatttc

SEQ ID NO: 69034 - DNA, 503 bp, Arabidopsis thaliana landsberg
ggaaaacataattgagagttagttgtcttcaaaaaatgctgtaataaaattgttacgattatcaaatactgttctaattaaatcaatgtaagtgtaataaaatctacagttttaaaattcgttggttagtttggtggtgatgataagtagatgaagtaagaggtatcaacgttggtgtgtataaccgattaagagtattttgtaacacacacaaaacaaaacagatttaagttgcaagtaatctgtctcttcgtagttagtagtaccatacataacaattcaaccatcaaagaaagctacactatttcttcccacttactatatacttataaatagctaaaagaaagaaaaaactaaagatatgcgttgacaaaaaatttgttatttatatccaagaaggttatgtgtagaaaatgtctgatagctcaaatattaatatttacatacgaaaacgatttgatgaccatgaaagtcttgaaatcgaaagcaaaaaaaataattac

SEQ ID NO: 69035 - DNA, 253 bp, Arabidopsis thaliana landsberg
actcactaatccttgactggtaacaactacactcattagcatctatttcagttatatgaaattcaatgttacctcaatttaaattggttggggtcgcgagtaacttccgtgatatagtcattaagaatagggatcttcatcaggtcgttggaatcaagaaccaactgcattagcaaatgagaaatatatttataagtgactattttcaataactgagcacacgaaattcacattttttggaaaggttttctgt

SEQ ID NO: 69036 - DNA, 613 bp, Arabidopsis thaliana landsberg
  unsure (1)..(613): unsure at all n locations
cgttgcgaccaatgtacgtcttacccagtttgtccgaagccaggttgatctccgagaactatccacggaaggtgctggcgaaagattcctcctcgatatatttgaaacccttttgtagagtgcgcagtaattcatcatcttgcgttcgcgccatttcgacgatgctaccccagaggtattggggctcgagcacattcagtatcttacgnnnnnnnnnnnnnnnnnnnnnnnnnnnnnnnnnnnnnnnnnnnnnnnnnnnnnnnnnnnnnnnnnnnnnnnnnnnnnnnnnnnnnnnnnnnnnnnnnnnnnnnnnnnnnnnnnnnnnnnnnnnnnnnnnnnnnnnnnnnnnnnnnnnnnnnnnnnnnnnnnnnnnnnnnnnnnnnnnnnnnnnnnnnnnnnnnnnnnnnnnnnnnnnnnnnnnnnnnnnnnnnnnnnnnnnnnnnnnnnnnnnnnnnnnnnnnnnnnnnnnnnnnnnnnnnnnnnnnnnnnnnnctgtctccgcgacccgaggaaacaagtcggaattgaaagggttacgacccacacagtcgttcagaatttcttgaagtaagccttgttctcatcaagcatctgctgtggctcgtaaagtgag

SEQ ID NO: 69037 - DNA, 431 bp, Arabidopsis thaliana landsberg
ctaatcatgccccgggcaaggatcgtctgttaccagggcttttggctttttccggacagatgcgacagcgcctgacggcttagggttccatattcggctcgaagtcgctcgccgcgtggcgttcgtggagctgctccgtaagctcgacgatggtgcggtaacgatgcatacacgcttaacggcatggcgattcgccacgtctttcgtccaacgctgcacgtgagtgtacttctctgcatccaggaattcggcggcattataaacgctacccatcgccacacagcctaaccatggccagatggcaatatccgcgatggtgtactcctcgcccgccacgtaacgaccgcgcgccagcatgattatccagcacgacgaacatgcgcttggctttcatggtgaagcggccaatcgcgtactcaatcgacaccggt

SEQ ID NO: 69038 - DNA, 324 bp, Arabidopsis thaliana landsberg
ccacaaactccacagacccggtcgacaacaacccgcactggccgacgagagcgagcacccgccagaacctactccacgatttgcactacagaccgacaaacacgagaacccggcaaactgagaacgccaatcccaaccacacaacgagaaagcctagcaaccgacgtcgatccctcgacgacaacaacacctaacggaagaagccggcacgctcacaggacagacactaccgagaaccgcttgcataacatgaaaactatcagacactgatagaaacccaaccatccaatatccaagcatatagaacaagtgcgccacaagacg

SEQ ID NO: 69039 - DNA, 603 bp, Arabidopsis thaliana landsberg
  unsure (1)..(603): unsure at all n locations
catagagatacaacttttttttgagaaactgagtatatttgntttattgagtttaaagtatatccatagcataggtgagtataacgaccaagaaaaaagatcaaaagttaataaaacaaaacgcggttatgtaagagctggaagaatgattatttcaatttaagagttcaggcaaaatgaagtaatgtataattgtcaactatgagatctcacaagtcaacacaagcctcgacttttctcatttctttctttatgaacataataaatagaaagaacttaacatatattggatttagttataatttaataaactttgtttgatgtatttcttttttaaacgaattggtttcttgtgcaagtagaagattgcgatagttgagaggatctattggtaccttcacatttttacttatttttgggctcaacaacaacttaagatcctaattcgaaaaagtgatttcttcacttttgtacttggtgacattatattcgaatttatttcagtataggaaatattaaaaaaatattttctagtttagtggtgatgaccgaataatagaatgacaatgtacgtctcagaatcaaaactcgcaaaaactaaat

SEQ ID NO: 69040 - DNA, 2520 bp, Arabidopsis thaliana landsberg
catgtggttgtactgcatgtttaaccaacatgaaagaatatgtattcattttttcggaatgcgaaatattagaatcaatctcagttcagttcaagttcgaatctttgaacgacatgcggtttatataaaaggaactatagtatataaatatatatttatatatatgcctcctttaatagattttcttatattccttctttgttttgtaatttatggagaatatttactatgtattcttcatgaagcaattttacaaatattcgaattttaatttttccttttttgaacgtctgatgatcgatcattcgcgtgcacaagaatctcatcagggcatgatagattcgaaattttgatttgctcagttacgatatatctttgattattcttcctacggcggtttaaacctaaaaacaagttttcatgttttattcacctagattggtttcaagtgtattttctaaccactatttttttcaagaaaacgggaaacaaacagaaactatttctggtgcaaaatatagtctgaaaatagtagaatgcaatccatatcaatcttgaaagatatatttttttaaagtgtacttgagaagaatgtcagaaataagagattaaaaaaggtacggagaagataacgagaaaagcaataaaatgcataacttttgtagtcataacgaaaaaaaggagaaagaagatcatgaaaatagtggaagatcggtgtcttcgtgatgaattaaagtagaattgtgtgtacgtaacttttgtaatcatactttctttttcttcatcaactataagacgtgacaatgatgtctataatgcatgcatatagttttaaaattatctaggttcttgaccaaggcttagttagctcggtaagtttctaagaacttcgatttaccaataaatcaagccaaactatatatgatctttcgcgatgccaattgatgttctgaccggatcattcaatattgttgcttttcttgtatttatttatttgcgtatcaccgcaccgattcatatttattatagtatatagattggaaaaacaatatagagggactctttattaaagtaaaaccaagagaggaaataaaactgaataagaaaataaacaaacatgcttgtctttgtcgaacacacagatttttattacacaagtggttccgaactaattaagattcctaattttaaaataataaagagatttaaaaatgttatcttttgtgtttggtaggccattaaagctccaattatttgtcactaagtcagggaaggagactaagcataaagacgccactgcataaaccttatggtcccctcaaaataaacctaaagttgtaaaagaaagaaaataaaaacataacgttgataaaataaaatttgaagaaagaaaatcctacatctttgtaccacctatatgaacctaacttatagggaaaaagacattgattcttttgcagacccatcagcgtgcatgtccaaaaagatgtgaaaatggtttcgaaaattatggattggtcatgatcagttagacgataattcgggctatgattatgaatatatatttatatttaaaaggatgaatcttttcaactttagatattctaattatagtataaatcatgatcattttatcatttacgacatgtttaaatcgccgtaacatacatagaaacatatgaaacgattttacatatatgacaattcaatttatatatatactacaaaacgtacggttctatatacactacatttatgataaacttcgaacttgtctatagtttaagaaaatctgttgctgctgtcaaaagcactaaatctttgatcaaccaataaatcaaaagtttcccacgataccaaaatttaaagaaacgggggaaaagtatatttgttctgttaaaactatttattatttgaaccctaaaacataagactctttccaattctggaatgcaaataaattatacaccaccggaataatcgactgaacttggtacgtgtcgacatcggaaggtatttcagctcttggtagatgacatcacgtcgtgcgtacctgggaaattaaagcgcacgataaggtcaccttctcggctttgccaaagatgcatctctctcttgcgttttgtttgtcgttaaacgtttcgttcctttaaattgattgtgattatttcttaataaacttgattactattattaattctttaacttaaatattactctaatggtgatgccgtgatggtcacaaataaatgaaatagaaaaagaccaaaacaaaaaaaaaaaatccttttttcctctcttttacatgatgggaactctggacctttaagttttttttttttgtgacaggaagtgttcaaaggaacgaaatacacttcttcttccatttgatgtctgtggtccgaatgaaaattttctctgtattaaccagaaacgtgtttcatgggcatctttaactcttcagctctcaaattcttcatgaatatctctgcttatcgatcaaggttcgttaacttttcc

SEQ ID NO: 69041 - DNA, 640 bp, Arabidopsis thaliana landsberg
agatttgttttccaaaagcatatctgaaaatgaaggacaactttcctcttctccttcgattataaatattctcttcggttttgcttgtttaacctaaaagcctcagatctaactccaacaccttcaaagtctgcctcctttccaatcttctttcttctgttcgatctctaatctcagaatttgtgtcggtaaggtaaaggtgataatgagtgatgactgatgagggagttttgggacaaattttaagagaaacgcatagaaactgacagaagagagtgagcacacaaaggcactttgcatgttcgatgcatttgcttctcttgcgtgctcactgctctatctgtcagattccggctccgattcggtcccgttcacgttttcttcttctaattgtgttcccatctctcactttctctctcatgtgttcttcatctctcaaaggtaaattaaatacgatctgataatatctgtatgaagattgttcttatttgctgccattgatttggttcccaattgcatgcgagtttgctttttgtattttcctttgttgaactttatattttatgagatcattagtatcgaaagcctaatctatgagtttaaggcgtggttaagtgagattaacatgggaccattaacg

SEQ ID NO: 69042 - DNA, 386 bp, Arabidopsis thaliana landsberg
  unsure (1)..(386): unsure at all n locations
ctcaactaccaatgaaacaataagcataggctcgacctgagccccctgcattcatgtagcatatgagcagtttcatcttcatgcaggtctcccagcaacaggagcaggggctttcactgaatgtgttgcccatgtgcctgtgtatcccattcccctaactggggtgacttttctggtggcagtgggagagaatttacctagtcctcagtgacttgatgtgcaagagaatgggggtggggcaaggtgatgtcaagggtgataccctttctcaaagtagaagaggagggaggaatagggataacattttcatgaggagctactggcagagaggcnnntatgatatttnggatgtcaaccggataaataaattttaatatattaaaaaa

SEQ ID NO: 69043 - DNA, 284 bp, Arabidopsis thaliana landsberg
gtaccgcggccagcgcccacggcacccgggccgcgcgccccttctcgtttcgtatgcacggcccgagcgtagacgcatccggccaggacacccgtccattttgaacgtactttcagccaacccgcaggctgggctggcccgcccggccccggtagccgcgcccgctgatctcgccgcgcgcgtaggcaccgaccgcgtccagcgcccccgcggagtccaccggcccgtagtacaggccgtgcgggaggatgaccaggttcccgcgaagcggtggccgacgacgt

SEQ ID NO: 69044 - DNA, 547 bp, Arabidopsis thaliana landsberg
aaatcaaatccgaccaaaaaaaaaaaaaaaaaatcaaattttccttaagataatgttagtttctgtagctggtgaatgttatttaaccacattgtcgcaaataaattccaacgattagtatgaggttttttatcggatgctcagatgaaaagacttttttaaaaacttcaccaagtgattttgctttatccatgacatccattatctatatatattaccaaaaaacagtttgattctattaccaaaacgtgtttctaacttgcttgaggaaatgtacaaacaacttaacaaaaagccataagtgaagattgatgtttggagcttgaatgtcattgtcgggtcaataagtacgtaggaatatcatggggatggagatcagtgtttgcgttagcaattaacaattttcggtttcatcatatatagtagaaaataatgaactttatcacaaaacaaaacagtggataatccaaaaagcaacttaaggcatggcagagtttacatattcttggagtgaattgatttttgttgttaaaaactcaacatcaaa

SEQ ID NO: 69045 - DNA, 632 bp, Arabidopsis thaliana landsberg
cgccctttgcgccaactcgctcatcgaggacaaggacaccggcgagctgcgccgcccgcaccatgtcgatctgaagaccggcatgtacaacggcaagcagatcctgacgccgaaggaagactaaggtctcccatcgtctctgacggttcgaaaagcgccgctcggttcgccgagcggcgctttttcgtcgcatttacgtccgccagattggtgctagcctctccgtatagggaggtaagcccatgctcacacgccggaatcttacggcgggactggggttgtcactggccgcatcgtcggcctgggccgagactgcgcccctaatacccgccaatcaaataacaccacagccggccctggcgcccgccgccgaagatccggtcctcatcctcgacgcctcgctggacgccgacgaccgtctaactgtcgaagtgacggtcaacgggcaggggcccttcaacttcgtcgttgatacgggcgccgagcgcagcgttctgacgccctacgtcgccgagcgcctgagtctgcctcgaggccccgacattctcatccatggcgtttccgacgccatcacaagtccgaccgcgcgaattgacagcatgcaggccggcgtagccgcgatgggcagcacg

SEQ ID NO: 69046 - DNA, 2009 bp, Arabidopsis thaliana landsberg
accaaatatctcattcggttaatttggataaatcagaacccggtttaaatttgatatgatatgaaatccggttaagttccggtaccggtccgggttttggttttgtttaatttccactatggaaagagtgagagagagatagagaaaaaggtggggggaatttaatggaggagtaataaatgctctcaagcgctctctcttcccttctcttctcccacaacagactgtgttcattactcgtggggtcggtctctctcctctctatctctctctttctctgtgaagacgaagacagctgtttctgagtttcccttttgtttttgtgtctatcttctcaaccaagttttttggtgtccaaaattcgcaaagaaacgcctttctcttcttctccttagatttctcggactttctttcaatagtgggaaaaagacacagaatctcaaaaaagtcctctcttgtccaaagtccaaagcttttgaaagagaccataaaaacagagcttaatctctctctgtctctgtctctctctcttttggaggcttgaggatgacgagaagagctgaatttgagatgggtttgttcgtgattcttcaatccatgtttctgatatctctatgtgagtttcctttccttaatttggggagttttgagggaaatgggtttagaattatctgtttctaattctgtttctgtttgatagaaaaattcgtttttttcgttgagatttcgcttgttttggaacaatttgcttgtttatattgatgggtcattgtaaattcaccttctttatgtagaaattgatcgaatttgtggtggaatgttgaagtaagcttcatggtgttttaggttacttagattagggttttggtgtagttaacgaattaggtttctttcttcagagatatttaagcttttgcaaaatcaaaagtgtgatgatttttgtatcttatctggttcaggttcatcacagaaacctgaggagttcttacctgagatatcaccagatacttctcctcaaccgtttcttcctttcattgcaccttctccaatggttccatacataaatagtaccatgcctaaactatcaggtttgttcttgttttaacttgatcacttttctctattagtaatttgctttttgtaatttactaatcggtattagttttttcgtgtatcttcagggctttgctcgcttaatttcagtgcgtctgagagtttgattcagactacttcacacaactgttggactgtttttgctccattgttggcaaatgtgatgtgttgtcctcagctagatgctacactcacaataatccttggtaaagcgagtaaagaaaccggtttgcttgctttaaacagaacccagtctaagcactgtctctcggatttagagcaaatcttggtaggaaaaggcgcttcaggtcagcttaataagatctgttctattcactcgtcgaatctcacttcttcgtcgtgccctgttatcaatgtcgatgagtttgaaagcacggtggatacagcgaaacttcttttggcctgtgaaaaaattgatcctgtgaaggaatgttgcgaagaggcttgccaaaatgcgatactcgatgctgctacgaatatatctcttaaagcatcagaaactttaactgataattcggataggatcaatgactgcaagaacgtagtaaaccgctggctcgctactaaacttgacccttctcgggttaaggaaactctcagaggattagcaaactgcaaaatcaatagaggtaaaagcaatctggttttaaatttaaccttccattttgggtgaacatttcacatttttgtgtctattggttttcagtttgtcctcttgtctttccgcacatgaagcatattggtggtaactgtagcaacgagttgagtaaccaaacgggttgttgccgtgcaatggagagttatgtgtctcacttgcaaaagcaaacacttataaccaacttgcaagctttagattgcgcaaccagccttgggac

SEQ ID NO: 69047 - DNA, 324 bp, Arabidopsis thaliana landsberg
  unsure (1)..(324): unsure at all n locations
aaaaaaaaaaacaaggtgggaatgacccgaacataatcgncttattctgtatttgtgtttctggatttctgattagtggttcaaagccaaaactatttaggtggtgctcagtagaaccgtctgcatctgtgttatttaaaaatttcagtgttgcctagtgagtaccgtctaannccattttttgtgattgaatattataaagttgtgtgtatgcttatcttattatttaaaagcattgataaaattgaggtggtttgttatattaattaatatttgtagaaattaaatgcaaagtgtggttattcattagaaaatgtgtgatta

SEQ ID NO: 69048 - DNA, 376 bp, Arabidopsis thaliana landsberg
gttgcccattcgcgtattgatgtccaatggccaccgctcggccgcgagcacatgccgcagaactgctgcgtgacctttaacatcatatgaagcacacggtcgcgccggggcatgtccgttgtcgggccaagcctctggatgccatgctgcccccagtcgatcgccacgcccttggtcagcatcttcaccgctcctttactcgactcgcgggtatattcacgcgccgctggatctgcgcatcgaggacggtccgactccggaacccgaagccaatcagttgctcctgcgcattcgtgccgaattcgcggttgccgtcgagctgttgaacaaggggctccttgacgttaagcaactgatctccgacgtgtttcctttt

SEQ ID NO: 69049 - DNA, 132 bp, Arabidopsis thaliana landsberg
  unsure (1)..(132): unsure at all n locations
aggagaagnaccccaaaagacgaccgaaactggcttcgnaaatnaaccgaatttttctttttcctnnncgatatagaatnncacattgatcggagggctctcgagttgagcgtactcaacttcagtatcagc

SEQ ID NO: 69050 - DNA, 754 bp, Arabidopsis thaliana landsberg
cgagctgtcacagaagaccggacccaagggcaagcctgtgttttgcatcgacgcagagccggaaactttctttgtcatcaaacagcttcagcggaacatccaccgcatttacggggtcaagcaggcaaatcggcacgacctcgtgtgccagctccgcgatatgctcggcagcagctttccattcgagctggttcgcactgatattcagtcattttacgagagcatcgaccgcaagcggctggtcgagaagttggaccgcgaccagcttcttagcccggcctcaaagaaatacatcaagcaggtgctagaatcttatggcacgatatccggcactgcgactggcatcccgcgcggtgtcgggatcagcgcctatctagctgaactgtatttgcgcccggtcgataaggcgatccgagcgatccccggcctggttctctattgccggttcgtcgatgacattgttgccgtgtttgcgcgaccgcccgccggtgagagcctgggatcgttcaaggattggatcatcgcgattttcggccagaatgccctcaatcataaccctgacaaaactcacgaattcgcactggccgacagcgtgcccaaagaattcgagtatctcggctacccgtttcatctaaaaccgggagccttcgaaatcagcccgagcgcggcgaaggtggcaaaataccgcacgcggatgaatgccgttttttcgaatactggcgcgagaagccggccaattcaaagggtgccgttc

SEQ ID NO: 69051 - DNA, 3119 bp, Arabidopsis thaliana landsberg
aatagcattgtaaattatcaattctttcccatgatatgttataaaactttctcagcgggtaaaactagtccaggatctaagggtctagcaggattaacatggcccgcaccatgatcaaaatgattagatggaaataatctacttagctcataatactccgctgatataatttcaccagtactgtcgtattcgttagccgtggtggagatggcagatgcaatcatggccggagtccaagaaggattaagttgttttatgagcgcaccaatccctgctatatgaggagtcgccatgcttgttcccgacaatatcgcaaagctccgtccttctcacaaaatgatcaattttaaacttatgggagtaaatttcataagataacaaaaaatgagggatgtaaaggtagaacctgtcaaaataggatcaaaggcactagggaggctccaagcaccccaaatttggtgaccaggtgcaagaatgtctggcttaagtacatctaaaggactccgatttgcatcaataaaagctggccctctcgaagaaaatctgctcacaaccggtgcttgtccggcgaatatcgagtttcggccttcgtctattctagcacgtgccccaaattgtgtcgccactcctctcgtgtctctaaaggttttctcttcgtagtatctcaaaataatctaacataggaaagtctcaatatgtgtagaggaaaagtttgaaatataatttcgatgcaaatcaaatggttagtttgtttgtgaaccatgaatatagttacttacttcactcaagttcattgctacaaataaatgtggatttcattattgctaagtgacatactatgtaatagtcttcttcatccacatcaaatcacatattcgaacttatatatttgctagactatttttattgtgtcaaatagttgcacataaacaagtacaagagtatttttcgtccaaaaatttgttatggcaattattttcttattatatggcttttacgtaaagaaattacctgggcagctgatactgtagggattagaataccaggagctgaaaatatcactggttctgcaacataatcgccgaatctaggatttgcaatgagtataaaacccatgaaaccaagagtcctggcggtttgggtgatggcaagaacggtcgacatctgattgtagaagccatcagaaaatgtacatatcacgatacttccaaaaactgcggcagggtcaaaattctccggccgctggcattcttcaatgtctctggttaagggttgtagaaccgagccgtttgttctaacagcgtctttggctaagacaagtctgtgttgaactaatggagctccaagggttggacctttaatttcaagttgaaaaaaaggagaaacgacattcctttcatgaatatttactacaagtataaattgttgcgagtttgaaagaacatgatccaaatatttcaaatcgtttaggtcctaaataatttactagctactgctatgctataattaggtacacaataataaccaaataaagcatctatgaaagaagacaaacttttatagcgatgagtgccataattttatactaaatcttgcaaattttggtatttgaagatctaagatcatcacaaacactacattgttattattcttctattataaaagtcttgaaactttatatgtttatagtaattcttgttttacctgatagtccaacgccctgaacggtttggccaccgtcgaggatgagggaggcaggataagaccggtcagtatttccggcagcgacgccgacgacccacggactataagacaacacagaagacggtgacgggccattattccctacggcttgcaccacaaacacgccggcttttctagccaatagcattgcgagatcgaatatcccgagtaccgtgggcttatccaccggtggttcgtccggtccaaccgatagtgtcaacacatctacgccgtccataattgcctatgacaaaattaaataggtagataagtaaagaaaattggttaaagacagtaagagaaacataggccttaattagtcttgttctatagtattgtttacttggtcgatggctgcaattacgtcaacaagagttccaattgatggataaatcgccttgtagacggctattctgccacacaaaccaataaaataactcgtaaatattttattttatttcaaaactagagagtaacatttagtctttgaactttcagtatatgagctaatcaatatgagtgaggtgacaaaccgtgcacgtggggccataccgctggcacggccgtagaagaatccgtcgatgatcaccggaactccagcgttcccggctgcgatggatgccacgtggctgaatcaacccgaccaaatagtaaacacttatgcaacacatacaatgcacaacaaacttacaaagcaatgtatagaccattttacaaacaccaacaatataaagacatataatctacccccataatatggccgtaagagactttagaaaaacttattgtcattaccgcctataatttaaaaccattactgtgactctaaatatatagagtcaagtccacaacctcatttccatattctcaaaacataatatgaacatatcaatatatcattacagtttaccaaaaaaagacttagttttttcttctaagatatatagttgactacaaaataaagacatgtatttataatacattggctaagtgattcatcaaattcaaaaatggtatttcacaaaatcccttcaaaaagagagagccatttataccttccgtggccggacgcatcgaacggagagagtatatccaaggaggagctgagagcgcctgaagctcgagctccggcggaaaagaaccttgcggagataatttttccgttacaagatccgggtggaaaaaggggaccgatctcacagtcaccggagaaatgcaaacgtgagatatttgatgagtaagggtttgtgagatcaagtgcggcgaagctaggatgagtagggttaattccggtgtccacgaaaccgatcacgatgtcttctccagcacgtctgtaaattcgtaaagatctttggccacacttgttgcggaagttc

SEQ ID NO: 69052 - DNA, 1950 bp, Arabidopsis thaliana landsberg
ttcaagctttgtaaccatgctttttaagttccatgacattcatgccttgagtttgtgtttgttctgtaattggattgtgaattagaactgcaattctgtgagtcttatccttcttggatgtggacctttggtgcataatttggacgtgcaaattatcaatcaaaagttttacttatgtaagatattctatttgttgatagtattgatcacaatgcgtatctggatgcggcagcacctgggataaaggattcgatggaaggagtctctgaagccatgcccatggattttaatgaagagcaggtgcgtaccatacataatgcacgagggcatacctatagttgcttaataattgtcacctgagtcacagtgcttaatgtgatatattttactttgcattatgtctgaatgtacattgcagttacagactccaaatttacgatttgtttacacagatttattggcttacttttctggtaagactattggatagtattgttatcattatttcttgtgaatctctctttttgataggttgaagatcttgctatgaataatgagttcatcgaagatgctcaagctcctcaaactcctggattagttgaggtgccaaactcgtctagtgtgagagagcagatggcatgcgatgatcacatggaggtagaggatctgaatgcagaagaaggtataaagtcctctggggagctgaatgctaatgagatgcctaaacgtggggaagacctgtcttctgaatataatgccccagaatcagcagttactcctgtggaggtagataagtcacagatagatgaaaatgtcaacacacaaaatgagccggaggagagggcagagcatgtacatgttacatctccatgttgttctcacatcaccaccgagatggaggatcctggtcaagtaatgaatgaggcaggaactaatgttgtacctgataagcccgatgctgttcctccacttgaaacccctggagaagagaaccgaggtttgttggcaaagaaaattgcaaaccttatacgacatcttagtgcctgccttatgcttataatttttattgttgccagatcattttgccattgccactgaggtcaatcaggaaacagattctagtttacaaggagatgagcaagcgtacagtagaccagatgggcagctgaataatgcacacgaaactgacgaacagttgggaaatttgactggatttaccgattctgatttccctgcacctgagaaggtattagctgtacctaacagacagggggatggaaatgatttcatggttgaatctacaccagataaagaagaccctggcacatgtaatgatgatgcggggaataataacattactgggaaaaaacgcacttttactgagagcacactaactgcagaaagtttgaactctgtggagtcagttggactgtttcagtcaaagagaactgcagattctgtccctgatgacgatgatttgttgtcttctatcttaggtatcagtttattttggatactctgtctgttcttttatacattctattgctctttgagctagctttatggatcaattatcgttgaattttttgtttttttcagttggaaagtcatcctttctgaagatgaggcctacccctgtgcttgaaccagcaactacaaaacggttacgatctgctccccgctctactgccacaaagaggaaggttctaatggatgaccctatggtcttgcatggcgagtatgtttgtcttactgttttcttatatctgattttcttataccttagtttttttgttccactgctccaagtggacctttcatagaagttcttgttttagctacttaggttcaagacagctagagtcagaagtaaattaatgtgaatcttgaattcgttggactactgattttttctttactgtaattggagtttggtcttcttttaagtgt

SEQ ID NO: 69053 - DNA, 555 bp, Arabidopsis thaliana landsberg
aaagaccgactacctcgtacagggccacctgcaccacgcgcacgacacgcactgcgacaaccacggcgcgctctcggtaatctagcgccccgcctcgatctgccgggtggcccctgcgagcggcgtgctatagtactaccatgcacgagcgcaccgtgcgcgtcgcgatcctcgacgactatcagaacattgcccgcgagatggccgattggtcgatgctcggcgggcgtgccgcgctgacggtcttcaacgaccatatcgccgacgaaacggctctgattgaacggcttaaaccgttcgacgtgctgtgcgtgatgagggaacgaacgccgctgacgcggcggatcctcgaacagcttcccaacctgcgccttatcgcatcgaccggcgcgcgcaacgcatcgatcgacctggatgacgagcgcgagcgcggtatacacgtcgcgcataccggatacatcaagagcccgaccgtcgaactgacgtgggggctgattcttgcgggcgcccggagcatcgtccaagacgcaaactccgtcgcgcgcggcggttggc

SEQ ID NO: 69054 - DNA, 674 bp, Arabidopsis thaliana landsberg
tggaagtacatatcaatcatctttctaccacttcctatacgctagtctttttgacccttccactcaaatttattaattatggtttcgaccgttgactcgagaaactctgagatgggtcatggtgatgggaacaaaaactttacttcagtctctgttctctcagctacaaatcaaatattgagtggtcctcttctggaaaccttgataggtcttactcttacctcagtagctgctgaatagtcttcacaggtttttacgatcttagtatccgtttattggccataaccgatacggtgtagtagatttaagaagttctttcggaagtctcacacgctaaaggaataactttgcaatttactctagtttatcggtatttcaagaatcaaaagattactacttgatgtctagaagtttccgctatgtagaaaacttggttgtttcaaaatgtcgtttcgatggtttggcctaaaatttaaagtggtttatccactagtagtctctaagcgttgaaccgtagaacagattttccatttatagagagacaatacaatgtgtcatagatgagtggaccacaagatagaaccacaaaaaaaaaattggctcaacaatggtcacacgtgcatagtacacgtacagctttcgtggattcttatttacatgggatcaatcaaaaa

SEQ ID NO: 69055 - DNA, 467 bp, Arabidopsis thaliana landsberg
ggataaaatctcctaataatgtatacatcaaatgaaataaaatgatatctgttttttttgtctttgtttttaatcttgaacaaaatatcgaattgaagtagtagcaactaaatatttttcatgtgtatttcatatccaagttttgaagtggctcttttaatcgaaaatagtttagtgaatccgattgttttagatggcaagatcgattatgaaagccaaaagagcatttatttccgagttgagaatgttgtaatggacttataatgttgtagaaatatgactgagttgatggatgtcgtcagtgaagatcttaggttccctatagttgaaggccaatgccaaatttatgcccagtcacatttaagttttacaaaatttctattggatatgtgatcagagcaaagagggcttttaatatagaaagcctctatatccccgggtctcccttcttatgcccccagtctccc

SEQ ID NO: 69056 - DNA, 346 bp, Arabidopsis thaliana landsberg
gaacaacggtatatcattatcccatcaaaaattgatttttagctactgaaaattatgttaaatgtatacaagatggatttggcggtttccgatcaatcaaattaaggaagtagtcgtttgtggctgggaattactttaaggaaatatcgagatccaagtaaagtaagaactgactcttgtaaaactagtagaaacagcggattaaaaaccaaattttataacgcagagacttggatatatgtaaaagaatggtataccgtttgcaactaagatacaaccatcatatacctatataaaaaaaacagagataatcatcgcagtatcattcacttttatacgtttaaag

SEQ ID NO: 69057 - DNA, 563 bp, Arabidopsis thaliana landsberg
ggcaccgttttgatttctggttgggcttcttctttaatcattgaccacttggcaacaatcattggtaatccagcattgttccacattcctctgcgtactattctcgaacgtgtagctgaatctcgaatcctgaactttactgaagtagaatcgatctcataaacgtcaattttgattgctttatcaccaagagtccatatcttattaactatgacatggatcttagcaacatgcggggcttgtgaaggaaaacgtcctaccagaaaatcttcccaaagagggaccgaatcagagatgacttctttcggaactgcaatggtaggaacaccatcccgcatagaaacctcatattcaaacttttttagagaaggtcgcttggtgactgctgctgcataagacttttgttggacagatccagaaggggaacctactgttccgtcctgagaggagacttgaatgaccggaccggacatgagaaaccgacggctagccgtcgctgtaaccctagcttgttgagaaaagaaaagaaaaccctattccgccaaaagaatctccctagagct

SEQ ID NO: 69058 - DNA, 167 bp, Arabidopsis thaliana landsberg
gatattaatatttcataagtggagatagtgtttctaaactcaagtagtaccaaatctcttaatgttttcaatttctgaaaaaaaaataaagaacgaataatcgaaatacttctggtttggtttcttgttctggatagtcgggtttaattttcatgttgacactctta

SEQ ID NO: 69059 - DNA, 488 bp, Arabidopsis thaliana landsberg
accagcgagaggatctgcgtcaggttgacctggacgccgcctgctcatgaacccgtagttgtcggtcgggaggggcagggtccgggactggccgccgctggtggaccacatgaggtcgatggcgccgaagagcacgagtgccagccccagcgtgcataccgcctgtatcagggggccgcggtccgccagcgccgggccgaagaccgtcccgtaggcgagtgtcaccagagcggcgaacacgatacaggcgaggatcccggcccaggacggagcgccctcctgggtgagctgccacgagaggaaggcgcccatcgccccgaccgcgccgaaggccacgtacagcactcccgtcgcccggtacaggaccacgagccccaccccggacagggcgtacaccccgcccagggcgagaccgctgacgataaacggttcgaaactcgaccaggccggcatgtcaggcccgcctcattcgcgttgcttcgctcacg

SEQ ID NO: 69060 - DNA, 546 bp, Arabidopsis thaliana landsberg
agagaactcactttctttttttcttgcagatgatatttttacttacattgacaactcccgtgctgcaacttgagcaaggaaaatctcagctggtgcaagccgcgaaaacacaaaaatcaaactcctctctggtaaaacactcaaaaaagttttcagacaaaaacagtgaatgaatgttttttcggaaaccataagcttatgtgttgatcttgtttacacgcagacatgcttgctcttggtgatatttggcattgttctcctgatcgtgattatagtactcgcagcttgatttcgaacagcaagaacatttcgtttgtgtgtgttcattgatcttaaggcatcaatggctggaactacttggtatataatatatgttgaagagaacacttagaagttggttttgtgttggttttgtttggttcagttcggtttgaggttctattggttaatgtaatagtgtgtgcgtgtgtggcttttttgttgtgcaaacattttgttggagatgacagaaactctgttttgtttgtgattctcctatattctcct

SEQ ID NO: 69061 - DNA, 2385 bp, Arabidopsis thaliana landsberg
gtattgaaaatgcagaaaaaatcgcagcggcaaatgtcaaggcggaaacatactctgtatgacccctgattccggcagggatatcccagaaaacagacctggtttcagtcttcgatctgccaatcgacaaaaccaaacatcttctctgttcacgtcgctggttctgtacatggctcgagcacaagaacaagtctggctcgccaaactccactttagagtatccactgtcgtccagaggctgtggggataacagagaagtaaagatccaatcttattgacatcgaccaaaataagacttagttcaagtgatcatttacctgataccgagcatgtaaaggaagcttaaagctgatttcaccattttcataatctcttgagctgatttcaacatgaatctcaacgacggatctgttcgatctaaacgaaggcagctcaagatttgtgtcaccaaacacagatacgtcactgaaaactgcaaaaagattcaaggatccatcaaattcgaaagacaaaaaagctttcatgtgatctatctttctttctcgttaatatataacctctgcgttgctggagactctgaagctcaaaaggatcagcaaaaacacccaaaggcaaccgttcaacgatcacgagctcacgaaactgagactctgagtgatgaagaagaagcttgatggatgtgaggagattacgatgtgaaccttcaccagtaatgtttctatgttgtatcaatgaagttgcaggaacaatgtttgaatcttgagtaggaactttgtcagaacattgttgaagaagcaagtagtttcgaaactctgagtcgtctaatgaagtgtatgtggtgaaataagactccataatgtattgatcagagatacagattgtatcggaatcgaaaaattcatgagaatctctataatttgttccaacctgtacgaacatcgcaatcacaaggtttcaaagatcaaaaaaccctaaatcgtatcagagagctaccaaccaacacgaattgaagcactggagatctctaacctgatcagatgaggtagaagaaatggcgcagcagatgaaaatcaaagctatcaccgatcttcgtcgttggctacccattgattttagcttatctgatacgagttcttcgattctctaatcttcttcacgatctatctacacagagaccattattgccggcgaaggtactcgtcgccggagatcatctggatgagttgcagcacgaaagaagcccatactggtttagtatgggcctgttgagcccattaaaatccaaactagtaaatctcgtttccgtttttttttaatatttaacgacgtcgtttagttttcgtttgtttgtgtgtaatacgacgtcgtttatcttgtttcagtttttgtaagaccaaagaagaaaataaaacttcatcctaacaagattctctaattctaggccatatttggtctggactaaatttttaaaaccattatcaaagaaaaaaacaaacgaaagggaaaatgaataaaaagaaaagagaaaataatactaagaatgacactaaagaaaaagtgtcttcacttataaaagaatgaaaagtgaaagtgaaagagcccacgaccgatgtagagctatgatgaaaaaagcatacaaaatctatttttgcaaaagaagaatcgaattttaagctttagagagtctttgaatttgaattctcttcgttataaaacatatatgtactcactttttgttcacgctcatgaatatgttcatagtgtgtctacaagtacaatgttcatttgtaaagaaatgcttattcacattatttcccaagttatgaagatttaagattttggttatttcaaaccccaaatatatgtatttgcattgatatcatgtataaaacccttttacaatttgacaatgaacacattatcttaacttgtaaatactaatacaaacgcatacataaaccaacaaaaaagaaacaaaaacaaagcaagacctaatgggatatcaatttgatttgtccaacgctaaagttctggattgggatgaaaatgtaggtcctttatgctgatgaagatgattgatcaatggcccattcactctttcttttttataaattttcctttgtatgataccaaaaatctttataaaaaaactctccaatataactatttaattaaaagtaactcagcaggtttgcacgctatgtaatctttattacctttgacaagaagaatccttatttttgtttccaccttacaataacaatgtacatatattggagtttaagcaagtttataatatcttagaacttgaatattgaagaaataatacaatatgcatcaccattgtctttttctattatgtgctttaaaaagcaaaattcattg

SEQ ID NO: 69062 - DNA, 516 bp, Arabidopsis thaliana landsberg
gaagcccctcaccatgtccgccttgccgttcgccagcagcgcgagcggatcggcgttgaaactcgccacgaggtcgatttccacctggggccagcggcggcggaactcgtccatcaccggcatcagccagtcgaaacacgtgtggcactccagcaccacgcgtaactccccccgggtatcgcccttgagccgcagcaggtcgcgttcggccgcgctgatggcggccagcgcctcgcgcgccagcgccagcagccgctccccggccggcgtgaagcgcaggccctgccgcgtgcggtcgaacagcggcatgccgtaatgggcctcgatggccttgatctggtgcgagagcgccgactggctcacatgcacacgctctgccgccgtggccagcttgccggactcggcaatcgccacgagggagcggaaatggcggacttcgatcattggcgttgactacaccctgtgacttgaatgaaattcaacattgtttaaaacatgtcgcttgattcattctac

SEQ ID NO: 69063 - DNA, 584 bp, Arabidopsis thaliana landsberg
gagtataaggcacgggcgaatgatactcgccatcgctgactttcactttggttgactccattggcgccaatagcggttagttcgccatcaggcatcatctccagatccttttccagggcacatgcaaagagtgttttgcgatagcgctcctcattgtagggtagaccgaatagaatgttatctttgattgtcgcattctcgatccagggaatttgcgccacataagcaatagccgagtcgagaacccaatttgcgctcgttgccagatggtcgaagcgttctttgataggcggtggaacaggcactctgacggttccgtggaggacatcacattcacccagaatcgaggcaagtagcagactctttccagatcccgtccggccggagaccacactgaggccctccgaggggaaagctagattcagctcccgcagaaggaaccgatctttgtcctcttcctcatcttccgcgttgtccactggccagcccacagagacatcctcgaagaaatgccatccgagggaccggtgtgacaatcttttcgctgatgcatgtaacatctattcgtccggctacctttgctc

SEQ ID NO: 69064 - DNA, 103 bp, Arabidopsis thaliana landsberg
ctgtgacttttggttacggaatcataccatttttgagcttgtttgtgaatggttggcacgatccagggggtatggaaggcaatgtctattattcaggtttgat

SEQ ID NO: 69065 - DNA, 350 bp, Arabidopsis thaliana landsberg
cagcaccggggagcgcgaagcgaaacgggaagcgagttgcatggtctttctcctgacaagggttggctgttgaaaacctcaccggattcctagattcggagcccgctttggacttccggtggggtcggcgcagagacctgggccggcctcgttgccaccgtctttcctgagttcatcgcccgcgacggtcaggagcgcgcggacgggggccgtcaaggaggaaagcgtcgggttggtgcggcccgcaggtacagccgaggacacggtccggcgcgccttgacggtgcacggtcgcgcgctacagttgcggacaaggggatgaagttatgaaaggcggatcgacaggcact

SEQ ID NO: 69066 - DNA, 1473 bp, Arabidopsis thaliana landsberg
tggtgggacccttcaaactagcgttccaagtaacggtcagttgcatactacgcaaggtgtatttgatcactctgttcctcattcgtcgaattgggtaccaaccggtgtttcatcaactgtgaacactcactttagattgagtttagccgtccagttcctctcgatgatcttccgggaaacaactgcacccttaatgaattctgaagttgtttcatgtgagaaattctcacgatttcaacataagctacaaacagctttggagcaatttcaccagagattttcgctgtctgcatcttacctacgtaatatggtatgaggtctccactactactgcttgcacatcatattagttttctcagttgaactaatttgacaacgcagatactttgattgctatctgtaatctaattatttgtttttgtcgacagatgattctgtcagcatacaaccgagggttactatccatgggacacaatatatttcaggaaaatagttcctcaggactctcagacgacaagtctcacacagatgaagatctcctccagtattcagcgttgtctaaattgattctaaaagcgactgatgagaaatcattggtgttatcacgtatcattgctgcgtgcagtgtcacttgcttacactcagtgccatgctttgaggaaaacaaggtgtcatctggacctgatccaaagtggtccaatgctttgcggttttactttcaaggaattctggaatcgttctctaatttaagaacttctataaggctgtgcttgggctcctctgtggaagacctgaaaacaaaacttgcagttgttcttgatttagtcgaatattgtttgagactcgcaatggcttgggttctgggagacgtgcattgtctctttcgaatggttcagccccttgtgatatcatattttaatgggcatatgccttatgaggttgacctggaaagtgtgaagagagtataccaccaggaagcttctgttagtgtaccagatgcatcagatgtaggagttaattctaagttcagcagtgttgttgagaatcacggagttggctatccagtatactcaattccagaagatgaaagatgtctggtaacacaagcttgtttctggaagcatgtttcagactttgtgaaacttaagctggtatctatttcgatcaatctagatgatggtatttcgaatagtggttccgctgaaaattttgatgcccagacatcattggactccagtgatgacattgtatgcgtaacggagaagataatgtctgttctgggaaaaacactgattagcaccctagctcaactctcttcgtaccatgtaaaacaactagtattagtcttgaaacagaaactagagaagagacttcaggttcctaccttgttatggctgatcgaaagtcagggatctcaagcaaattttcttaatcgggatatcccagatgcaggtgtagagacggaaagaaacc

SEQ ID NO: 69067 - DNA, 326 bp, Arabidopsis thaliana landsberg
ggcacgcttaagggctagtaatacatcttgctttcaatttttataagaggaatgggaatctgatgtagcttgaatcaattaaccctttggtgatacaccataatcaatcttaacaacaatggtcagtttcggtaattaaccggaattgccattgtaattttgtcacgccacgtacaaattgccaagtgtgactcagagccacaaaaagaagaaagatgactaccgacctgccttgatccggggcacgtgactagcggaatatcccctgagctcagaaatcgtactaccgtggtatattttccgcgaccaagaccgactgatcaaat

SEQ ID NO: 69068 - DNA, 582 bp, Arabidopsis thaliana landsberg
acaccagacgtggcgaccgggatccagtggtatcagaactccggagatatgtatctgtcctgtggaaaggattcgttggggcgggaacaagcggtggcggatgcatatcgtcctatccaggaaatgtgtgccacctcagtttcgtggacggcttctggaaacgttgctgtggttcatgacaccatcaatcgccacgaaaccgagtacgttctttccactatcctccttctactttgagctgaccgctgttgttgcagaacgacaactcaggcacctccattttcctttttccctttcgcctctcctcaggcggcctcgccaataggtccacctgtggaagataagggagtggtgcggttctacggcagtccccaggaagccaaggacctgttcttcgacaaagaatcgttcattcacttagcaaccaactacaaaatctcaagcacgaacctagaggaatcttgtgaacataattatcaagcagcgaaggctgtggaacaacatcaaatagctcatacgtgggaggtcattaagctattatacggggaggagccggaagagtggatgcttcggccgaggcat

SEQ ID NO: 69069 - DNA, 520 bp, Arabidopsis thaliana landsberg
atgctcgagtcttgtgctctaaagtggtgtcatcatccgatgaaagttctgagattgtatttatgggtaccggaaccagtgaagggattcctcgtgtcagctgcctcactaatcctttgaaaacatgttcggtacattttcgcctttgtttgttcttttattatgattcatcttcggtttcaatacaatcatcccattgagaaaaatatccattttgattctctaaggtatgcacaaaagcaacagaaccaggaaacagaaataggagacttaacaccagcattcttgttcggtacattagaccatccggaacaagtaatatcctcattgattgtggcaagtaagtgctatgagattagtaatgtggatgtcattctatttatcacctttttttttgtatgacatttaccatggagcatctcacattcatgttggttattgtatgctgactttttaactcctttggcttggcaggttcttctaccatagtgcccttcgatggtttcccaccttcgggtta

SEQ ID NO: 69070 - DNA, 334 bp, Arabidopsis thaliana landsberg
aggagcgcaatgagagcagtgggacttgagctagtgagatagattcactttcactattttaatgttcctcttcgatttcgatgagcagaggattttcggacattagctttagcagaccatttgcggcatatactactatttccatgaagactataactgaagacttacttacttattaattaacttacactaggaatagcccggagaacccatagttgcccgctacgccccttctgctactttctttctaggtccaataggctctttgtcggtcttgatgccgagaactgagttaatcctaaatgcagccgtgatcttatatactatgatacca

SEQ ID NO: 69071 - DNA, 590 bp, Arabidopsis thaliana landsberg
  unsure (1)..(590): unsure at all n locations
tggacaaaatccgcagcgcactggaaagcaacccgaacacggagcaaaccgtatcccttacgccacggcggtaacgcagacggccctgacctggccccatcggacactgcaaagcgttatcgaggtaaatggcccgtcaggccatccgctccatccagggccgcagatccagctcatgcgtccaggcatcgcgcggctgctggtgcagcatccagtaggcgtcggcgatgtgctctggattgagaatgccgtcctgctccttgagttgatagcgctcggggaaattgtcgcgaatccaggcggtgtcgatggcgccgtcgatgatcgagtgggcgacgtggataccctgcggacccagctcccgggccatgctctgcgccagcgcccgcagcgcgaacttggcgccggcgaaagcactgaagcccgagccgccgcgcatggacgccgtggcgccggtaaagaatatgggancgcgaccacgcggnaccatcacccgcgccgctttccggcccgccagaaaaccggcgaaggcggccattttccacaccttccgatacactctgggcgtgggtttcccgatcgggaaaatg

SEQ ID NO: 69072 - DNA, 439 bp, Arabidopsis thaliana landsberg
ctctgtcttatatttttttctgcactacccctttttgtttcatgtgtctgggcgggggtgggttatctaagggaaggatggcagatatccatggagaaagccgttgtcgtttgggttggttaacaactgctgggccaagaagtctgcgcatggtgcctaagccatggtagcacatgctcccgaccgtccccgtacattagttaccaaatctctgtccgatttaacccgaggacttaagaaataagttacctgaccatcgagtccaaccagtcaagaccgttaaaaccctaccataatacccaatacatcgttagcgtatgggaataaccaccagtatatatcaagaccgccacacacagcaagaagttcggggagcaatggtatcagtggctgaagcatgactgatatcaaagcaaaggatatggtcttggtcagctct

SEQ ID NO: 69073 - DNA, 602 bp, Arabidopsis thaliana landsberg
ataaggtcgatttctttgttttacacgtattttattggtgagtaagatttattacttaatgtaaaacagaaaagaagagggatactatctttgcgtgtcatgataacgttagtttggtgccatgtcttatagtttctctatcactttcatgtattttgcttcaagtaagatatgatattttttcaacataatcaacttagaacttttttgagatgaattcgtaaagttgttttctatttacttaaccctgatttgtcttaatatccggaagcctaattaggatgattttgtactttcagaatctaatcttggtcaatggtcgtaatatttctttaattgttcatcagataataaacagtagaaaggtatgaaaacgaaagtggtgttgcgtgcattgaaaagaacacaagtgatgttagataaactgtcattgtgcagctcagttttgtctataaatcctaaactcagaaattatctagagatttcaacctttcactcatttgtattctattacaaatcattgagtttagaaataaaatttgcagctgagaatggtatcttgcgtgacgacgttgcccaggggtgagagatgctatcactta

SEQ ID NO: 69074 - DNA, 438 bp, Arabidopsis thaliana landsberg
catggcttacgttcctggcatgcgtggaagctgccttattgggttcgtcaagggagaccgcggaccgggggcgggggccacccccgtgcagcaaaatatgccccgcctcatgaaacagggagaaccagaacttgtcgttggtcttgccatacagcgacaactgaatcagcggacggtcggcatccagccagcgcgccacgccgctgacgtgcgagcggggaatggctggaaccagctcgaatatcacgccggaagcatgaaaaagctgcatcaatcgcggttcgaactgctccggcggcaacacgctcagggtgcgtatttcctgcagagccacccgaaacttcgcctcgtcgtagcgcggtccaacgtgtttttcagccacctgctcgcccatgcgcaaccaggcggcaatggcgcccagatcgcattggtcttcac

SEQ ID NO: 69075 - DNA, 579 bp, Arabidopsis thaliana landsberg
ctccatggagccgcctgaaccaccgcatgcacaacaagtcgttcatttgctttttacacggtagcgatcgtgggcgggggcagcatcggcgacgactactttgacgccggcgaaagcacgcacttccgcgacctggacctgatcgcgatcggcccggtggtgcgccaggcttcgcaggcgttcgacgagtactggaactgcgatgcggcctatcccgtgaaggctttcagcggcaagcatcccggtcatctggaactggctaccttgcgccagcagctggcccacgatgcgcgccagttcgcgcagagcgactacgcccaggccacgctggaacagctgccgcacgggccctccggggaccgcccgggtaagtggttctggggccacgccgtccttgtcgccgaccagcctgccaagatcgacgccgacgaggacgaccccagcctgcgcatcggcccggacatcaaggccatgctcgacggcgcccagcacgacgtgcagatgatctcgccgtacttcatcctcggcgacgacggcaccgcgttcctcacgggtctggcaaaacgcggcgtgcgcgtg

SEQ ID NO: 69076 - DNA, 389 bp, Arabidopsis thaliana landsberg
ctgctgaacagcgccggcctgccgctggaagctgcgaccgtaacgcatcttgcgaacgcgccgattcacggatgattcgggggtaatgcagacagcgccgtctgcaccgggccggccgtgatcgtcacgcgcataaaaacagagctcgcgtagccatggatctgtttccgcccgcgctcttttcgttcgagaacgaaccgcggcttccgtcatcacgggcgccaggattgaacgccggtccatgcccgcgaccgtgtcattacccatttgggtaatgatcaccgctgtttccacgaatagagtgattgtcgccgacgctccttttcgcgaagttgaagagaggggcgtgctcatctcggcgttcgacatctggaaagggcgatcatgtc

SEQ ID NO: 69077 - DNA, 610 bp, Arabidopsis thaliana landsberg
aagtgcaaatgtcattactctacttcaggtaattaacttacttttgttgttcaattttgtacatctataacaactggcaatgagtttgatttactaatcacaaaagtgttatcaaaacgttataatcagcattttaaatttgcagtgtttactattactgttttagctattatgttataatttatcttgttttacccgctaaaaaacttgtaccgcttccttttcatactctttcctttgtgttgcagatgctttctgcttgtttaattttatatgtgatgagatattttaagatcatatccttcaccaatgataaatcaaagagcgagcacaacaaaaatttgtttactcttgtttcgacaaaaagattgtttcagacgatccctctagcattcacatatctattttacatggtaagcattgattttttttttttgatgtaccttcttgtttttcaattaatctcatagataacatttttccctgtttttttttttaaatataattacagctagtaacaatggagtccgtacgtaatatcaatgttccaatgtacacaacgctacgacgaactactatattgttacgatgattatggaatatttcattt

SEQ ID NO: 69078 - DNA, 431 bp, Arabidopsis thaliana landsberg
agtatctaacttgtgtgtatctgattataattttcagtacttgtaaacgagcaaactgcaacggagactggggggccatgtgtgggtagttggctgtatattaatataatccattgcatccttattgggccgattggagcccataacttaggccgaagatttgttttagattttggatgatgactggacattccaagtatgaacccaagaatgtttcttaacatgagcttccaaatacagtgtgaatagtgtaagaacatcataccccacaattagttgaaggattttgaatatactgtatatatatctctttaattgtataaggactagaattatgacaactgagaaaatactatcccaaatcattacctcacaatttattgaatgattttgaatatttcatgataaataaataaacatattatattatt

SEQ ID NO: 69079 - DNA, 513 bp, Arabidopsis thaliana landsberg
acgaatggttaaattcatacttctttggaaaaaaaatctctctcaacgtgtctgaaacccatcacctccacctaaaaaatcctaaaatttaccacaggaccaacatgctgttggatatatagtgggttgcaatgtgatatgttgacgcactttatatacactccattaacacaatgcatgttgtgaagtttgtcaccgagtgctaatataaaaacataaatagacactctacaaaaagtttgatcatctatacgccattagaatgatatgaaaatagacctgaataatgaaagataaaatacatgcacggttaatgaatctatttctgcctcacatctattgacacatgaggggttaaatacccttatcctatcatgccaaaaccaactattgatgattaattaagaacctgttcaatctctctataattttcaccctattatacacacatactcttactacattcacattgacattcctcctctctctcatatcatattatctagaccaaac

SEQ ID NO: 69080 - DNA, 3014 bp, Arabidopsis thaliana landsberg
tacgtttttccttatatggtaatctacaacctacccctccattcactaagtcatgccgcacatatatgatagtcattttttatgcttgcctaattaggtatctgaagtgttctggcgtttccatgaaattttgggttttgaagaggctttctcacctgaaaaccttgaacaggagcttatcaatccagtgtttgatggtttgtttcttgataaacctgggaaagatgataagagaagtgagattaactttactgataaggattctacagctactaaacttttttctttgttcgatgaatctcgccaaccttttcctgcaaaaaatacctctgcttctgaactaaaggagaaaaaggcaggggattcttctgattttaagatttcagattcctctcgtgggtcgtgtgtgggtgcacttctaacaagggctcacatttcgcttctgcaagtgctaatatgtgagctgcaatccaaggtagctgcatttgttgatccaaactttgattctggcgaatcgagatccagacgaggacgaaaaaaggatgacagtacactttctgctaaaagaaataagctgcatatgcttcctgttaatgagttcacttggcctgaattggcccgtaggtacatcttgtctcttttatccatggatgggaacctcgaatcagcagagattgctgcacgtgaaagtggtaaggtattccgttgcttacaaggggatggtggtttgctttgcggctcgcttacaggagtggctgggatggaagcagattcaatggtatgtttttgttagttttctgattatttcctggattatatatcttgcttgtattactggatgatgggatcacaaattcagtttcacttttggaaacgccgcctatgtgctatttttcttttctcttcaaatgttctaaagcttatttgaagctatgttccacttgtaggtcactctagagtaattgacctttctttctcttcttggatcttgttagatgtattttgacatttagaggctgtttatcttgatatcttgaaggccctcttatatttatactgactggaaaattgggttactttgtgtttcaaatgagttcatgagctacctccactgaaagagaatgatcgttggatttacgtgtttatattaactctttatcttcagttacttgcagaggctattaagaaaatatctggttcgttgacaagcgaaaatgatgttctttctgtggaagatgatgattccgatggccttgatgctactgagacaaacacttgcagtggtgatattccagagtgggctcaggttttggaacctgtgaaaaagcttccaacaaatgttgggactagaatcagaaagtgtgtctatgaagctttagagagaaatccaccagagtgggcaaagaagatattggagcattctatcagtaaagaaatatataaaggcaatgcatcaggaccaacaaaggttcaaaatctctgaaaccaattctcttccctcctgaaatactgtacttgcaattttaaagtatttcttgttttctcaaattcactttgtttttctgtctcttgttcttgcggtgatgtaatctcagtctgatgatgcatgctactttcttagactcacattaattctgagattagttatttccctcttactggacacagaaagctgtcctctcattgctagcggatattcgaggtggagacttggtgcagaggtctattaaaggaaccaaaaagcggacatatataagtgtatctgatgtcattatgaagaaatgccgtgctgtattgcgtggtgttgcagctgcagacgaggataaagtcctttgcactttactgggaagaaagttactgaattccagtgataatgatgatgatgggctcctgggatcacctgcaatggtttcgcgtcccttagacttcagaactattgatttgaggttggctgctggtgcgtatgacggatcaactgaagcttttcttgaagatgttcttgaggttggattttccctcttatgtctgatttttctttgtgcaattgatggtatgatgctttttgtgcgatttaacaattagtttctgaatgcttatactaaaactgctattcattttgggcatttcatgtttctgctgttagtttaacactgctggtttagatgcgtaagtgtaaagtatcacaagagccagatttatattaggaatacttttactttctctttatgtcacagaagtatcaggttaaacggttgaacgccaaaatttttgctggctcatttgataactttagatttgaatgcatgcaacttgattttttatagatgacatgctaaatataactttctaatttgcagctgtggagtagtatacgtgttatgtatgcagatcagcccgattgtgtggacctggttgcaacattgtctgaaaaattcaagtcgttatacgaggctgaggtttgtcttctctctcctttttctgctatgctctgcacaatagatatattcattacttagtagcatcttgaagtggagacagtcgtttatattttggcacttttgtgaaataaatgtgttaagatttatcatttctgaaagttataggccgatcaaagaagcatctggagatgtccattaatgctatatgctatgctttagaagggttcttccttttgtctgcgtgtatgattttcattgtgttcgcctttcagaaattgtatgcatggtctcctttttctatgagaatagttgcagtatcggggtgctattattttctcaagtttcaagcctttatttatttgctggtataggttgtaccacttgttcagaaacttaaggactacaggaaattggaatgcctaagtgcagagatgaagaaggaaattaaggacatagttgtttcagtaaataagcttcccaagccccgtgggatagggggtatgtaaagtatgtggcgttgacaagatgatgacagtgttctcttgtgtgatacatgcgatgctgagtatcacacat

SEQ ID NO: 69081 - DNA, 235 bp, Arabidopsis thaliana landsberg
tatttgactgcaaaataataaaaaatttatttatgattctcaacagaagttcactatcatggggggcggggttttttttttttttgactaaataccatgccacgcctttgctacaaatttacaagaagattaactaggcttacctgaagaagctcaagagacaatatacgggtcttggttgtgacttcatcactatcttctttcatacccatctgatacagaacttaaaaaaatt

SEQ ID NO: 69082 - DNA, 318 bp, Arabidopsis thaliana landsberg
cgatgggactaatagaccaatcaatatcatcacaattttatatatataaaatgaatacatttcataattctttaaataaaaatatagaaatacaacggagttgtttttttaagggagtttatgttaaaattacatgttgtgaaagaacacgtatatataaccaccacatttatagagtttactggaattgtgctattaaccctttttatagttttgaactattaagagaaatccaataggttctttaaccgccctcctttttttttatctgcttggtattgaaaattgctcacctatgttcttggtaggaagaaaaac

SEQ ID NO: 69083 - DNA, 439 bp, Arabidopsis thaliana landsberg
  unsure (1)..(439): unsure at all n locations
ggccctgtcaccctcggtnnnnnnnnnnnnnnnnnnnnnnnnnnnnnnnnnnnnnnnnnnnnnnnnncaccataaggggggggggacttcattcgcattaacgtctggtgcgttcaagcccgcagagactggccggtggcgccgcatctgaacctgaccgcttccggcgtctggacgcacgcgcggattatggacgcttatgacaatccgcaactgaacgggttgcaacccgccgaggcgccggattacacggtcagccctcggccttgacggcggcgggggccgcctgccctgggccgccgacccggcgctggacggacgggcgttcgacgannnnnnnnnnnnnnnnnnnnnnnnnnnnnnnnnnnnnnnnnnnnnnnnnnnnnnnnnnnnnnnnnnnnnnnnnntgacgtttgaggctctggcgcgcaatgcgttc

SEQ ID NO: 69084 - DNA, 587 bp, Arabidopsis thaliana landsberg
aaccccccgaagggaaacctgcgctctgggagctggattctgattactatctccatgtttcagggattggagatgatattttcccagatatcgggtaagacttatatttaatgaacctagtgcttgtcagattgtggttcttcattatatgcaaataatattttgagccgtgccggatactggacgtcaagtttaatggacatatgaaccagttcgggcaataccaaagatgttaaatttaatttcccaagataatgagatatctaactttgggtgtatgcagggtccagtccattgctaaacctatgagtggtattggagtcaatcttgcaccagtgccagctttcagagacgacttctcgcggaagaagctgacatcgtttgacaaactgatagagcagacatgcagttcaataaagaacgtgaggctttgtagtgagacagaccaaaggccaggtggcaacactggaagcactggtgtggctcctgatgcagcgtaatgattctcacttgaaattttcaatcatcttattaggcctttgccttgagttttgggaatgacattttatccctttaagaaagtagaa

SEQ ID NO: 69085 - DNA, 545 bp, Arabidopsis thaliana landsberg
  unsure (1)..(545): unsure at all n locations
cgtccgcgcggcaccctggcgccgcgccgccacttttagtggctgattttgtggccccatatcgggcgcacgcccgggggggcgaagacgacctccagcgtggtgggtcgagcgggatcccgctccttggccgcccggatgtcccggcgtatggccgcgagcatgctcaatccgccacgtcggcgaacagcggcgtgctcagataccgctcgccgaagtcgggcaggaccacgacgacgagcttgccggcgttctcgggccgttgcgccacctgcagggcggtcaccgcggccgcacccgacgagatgcccaccagcaggccctcttcggcggccagcnnnnnnnnnnnnnnnnnnnnnnnnnnnnnnnnnnnnnnnnnnnnnnnnnnnnnnnnnnnnatatcgaggacccccgggatgaaccccgcgcccaagccctggatggggtggggccccttttgtccgccggacagcaccggcgacgcggccggctccacggcgatgaaccctgccgacggcttgcgttccttgatgacctgcgcgaca

SEQ ID NO: 69086 - DNA, 532 bp, Arabidopsis thaliana landsberg
ctgtgcggcgggagcctgcaacgcggccagctggtcgatggtttgttttaaagaacatatcgctacctttgagaagtcaggctgattgcaacaaagtgtcggtaatggctactagaagccgccttggagagtgaaattcacggagatgcgtgcccagcccacgatgggtttgccgtccttggtcgaagggttgaacaaccagcccttcgcggcacgcaccgcggcacgatccagctcgcgatagccactggatttgtccaccttgacctcgatggcgtgaccatccgtacccacttcgaccagcaacacgaccacaccctggtggcgcatgcgccgtgcctgtggcggatagcggggcggatgccgcatgcggtacgacatgttgctgctcgcctgcgtgatcgtcggcggcggcggcggtgaatgcggtgccggcggtggtgcggcaacagcattgctcgactgctcctgtaccggcggcggcggagcccgcggcggcggcatcggcggcggcttgaccatctggatgatc

SEQ ID NO: 69087 - DNA, 2027 bp, Arabidopsis thaliana landsberg
gtacgcacactgattccaatccatatccatcttcgattcccattgttatcgataatggcgcttcctacttccgtatcgggtacttttattccataaaccctaatttccttcttatcgctaactcacttttacttgaggtttttggtatttagtaattctcttccccaattcgtaaaaatcgtgttaaattttgaatttctcctgcgtttttttaggtgggcaggagaaactgagcctcgtgttgttttccgcaatatcgtgcaaagaccacgccacaaagctacaggtctttatttttttctctattttcccgcttctatgtatgtgtcttaattgcatgtttcgctgctagagtaacaaatttagccaatgatatgtttcaaagtactagagcagagttgcttgaagttttggctacgatttctagatatatataactatgctttatcctattttgcttaaaagttgctctgcttctaaattatcttctaggtgtgtttgtaatgttgttgtaatggttagttcttctctctagtacaggtgaaactgttactattgttggcgacctggatccttccatgatgaagtactttgattgcactcgctctggaccacgttccccttttgacagcaatgtggtttatcagtttgagatcatggaatatgtatggattctatacccgtttattcaataacgaattgtattgtatatttgtaaggtcttctgttccaggaatttcttgctctcatcatttctttgtattctaagttctttgatgtttatgctaattaaataatgcaatcactgaagaacccacttgtctaattgatttttctgctttttagattcttgactacgcctttgatcgtttgggtgctaatggatcaggggtacgtcctagaacttttttgttttcatcttgattttgagtttcatcttactacctgtcagaattttgtctcgtcatttaacgtcatttgatggcagtacagattgatcatccaatcctaatcactgaatgtgcatgcaacccagttcaatctcgtagcaaaatggcagaactgctatttgagacttatggagtgcctgcagttggtatgaatctgcgttatttttttggtttctgaatttgatcgtcttcttgaactgaatgtttgatactgtaattatggaaccttttgtttattgttttcattaattcattaactctcatgtcgtcacagcatttggagtcgatgctgctttcagctacaaatacaatcaactacatggaatttgtaaaaaagatggaattgttctctgtcctggattcacgacaacacactccattccggtatgtatctatgactactatgaatgcaagctggtgtcaaccctgtttactttctttcttcaaacaattcctttcctgatatcacttagtcattagtctgatagttcttatatgtcttattgatctggtacatggttcattggttatcagtttgtcgacggagaacctatatataaaggatccagccgaactaacattggtggatatcatgtcactgattatttaaagcagcttctgtcacttaagtacccttttcattcgtgagtcttcctctggatctatcttctcaatgtgattactcacatttcaagatttgatatgtttttcttgccatgttcaatgtctcaaaaggtctaggtttacatgggagaaggccgaagatttgaaattggaacactgttatatcgcacctgactatgcttcggaaattcggttattccaggtaagttgatttactcattctctcatttccttttttaggcagtttgggacggtagtaaactaaattcatgtgatcgttattgaccaggaaggaagaaaagaagctgaagagaaaacaaggtattggcagcttccatggatacctcctcccaccgaagttcctccatcagaagaagagattgcaaggaaggcagctataagagaaaaacaaggtcaaaggctgcgagaaatggctgaagcaaagagagtgtc

SEQ ID NO: 69088 - DNA, 454 bp, Arabidopsis thaliana landsberg
tgtctgtcacaacttgattgatacgtaagcatacacgatattttctatgttcctgtatactaagaatgggaaaaatattttttggacaagaaattcaaaatttcttttgtttcttctaatatccattcacttccggaataaatcaaagatccgtccattttattagtcaaaatggcacctcttaggaatattctgaatatacggaattggcaaccctgtattataataaccttttatatagctagttcattagatattcgcgaggctccataatttgactaatatgcaaaatggaaacgccaataattaagtctgggaaacatttgccttcgactgatcgtgttaatggtcaccctatcttcttttggcaccgatatctacaaaaacacaagtatttttaatccgttaacactttctgtttggtcggtaaactacatccgctaacataacctta

SEQ ID NO: 69089 - DNA, 376 bp, Arabidopsis thaliana landsberg
actcgatcgagtcacatctcacatgcatggactctcaggccgtagactttgtcataattacattctatcttcttcaccttttcctctcattttttcgctggtatcgttacactaatttaatgaaggatattactctcaaagacgagactttttgttgtctattgacatctatcgtgtttaaaaaaaataaaaaatatctgaaatctaaacttatactaattaaggtttatagcaagctgaatttgttttgtcacttaaaactgtgcagtgcctaacatgaaagtacagtggatgagatttgacctctgacctcaatatctataatgttttcaagatataaattacatgatatctgtactgtatatatgccactggg

SEQ ID NO: 69090 - DNA, 571 bp, Arabidopsis thaliana landsberg
  unsure (1)..(571): unsure at all n locations
aggcgcatgcgtcgatcacgacaccacacccagaagacagagagccacggccgaattaccgacaccgtctcgatcagtgagcggccggccagtgccgaagaccaggccgtgccggggcattgggaaggcgacctgctgttcggtgaccggaacagtcagatcgctacgctggtggagcgacagacccgctatctaatgctggtgaaggtggcaggcaaggacactgagaccgtggtcaatgcactgatcaagaacgcacgccctctgccgaagcagctgtaccggtcgctgacctgcgatcggggcaaggagatggcggctcatcgccgctttaccttggctaccgacatccaggtctacttctgcgacccgcatcatccctggcagcgcggaaccaacgaaaacacaaacggcctactgcggcagtattntcccaggtgatcaatctggccgacgtctcgcaggccaagctggatgccgtggcacgccagctcaacgagcggncacgcaagacgctcggctacgaaacaccagcagagcgatatcgacatactgttgcgtcgatcggttg

SEQ ID NO: 69091 - DNA, 514 bp, Arabidopsis thaliana landsberg
ctattcctatcatgactatcaagccaataggattaacaaatttgatagagaaatttgatgcatactataaactatggatgtgacgtatatataattaatcattacgggttaccattttgtggttcgtcaagcaaaaggctaaatacaaatgcagttattgagtttatggaaaccaaatcatcttccatgttctcagaaattcctgtgacatcgcaccctaattcatcaaaatgattttaaatacaaatgttaataattaataatttaaaaatatatatataattaataattttagaagacaatattaatagtctgttctttaacaaaaaaaagtgtttaaagccaactatatcttacaagcagtggttgcaattccaccccaggaagtaacgggacgtgttggtgcgaccggacaaatccattttacctatacgtagaaatcaaaatttcgtattagaaacttcaataaagtttccatttggctaaaacgaaaatcatcagaattaatggcaaa

SEQ ID NO: 69092 - DNA, 500 bp, Arabidopsis thaliana landsberg
ctgtaacccatatgttaccatttcttcggaatggtccgctcatagcacgatgatagtgtccgattatagcccgacgcgctgcttcaatggctcgatatgaaagacgaccagctttacaacttttagtgccatatcttccaaaacccagttttgtaccatccggtttgcaacccctactacatctgcctttacgatatttactatatttcgtacgtttcggatatagcacgtctcccttttttttgactatatgaaatccacactttgacacctgagattccgtaacgagtagatacttccgcaggagcataatcgattttatggttaaatacattacgagaagtttttctatgcttatagcatttagtttgagctttttctgctgcgtcttttaatcgaccggaaaaacatatacggattccctccaccccttttggaatctccttcactattttagcaaaaatggaatgaaatgatcttcttttgttcttcagttgaaa

SEQ ID NO: 69093 - DNA, 496 bp, Arabidopsis thaliana landsberg
tttgctgctctcgacaccgtctgatctggaagaaaaggccaatcgtggggccacaccgtcgttgatctgtgttgttcctctgattcgacgactggtaaactgttgtgcggtgcttttggaaccaaatggtggaagagaaagcaaaacaccgaagctgtcgtcgataattacaacaacaagaagaagaatatgttttgtcggatcctctctaagataaggattcctacaacaagatctagttcttcgaagatgtgattttcatatcttctttttctgtttttaatatttgtttgatccttcgtaaaataataattaagtatattacttgctcatgttttttaatttgaaaatttaatcgaataaactgtaatgaaacgggaaatacattttattgacttatggattaaatgcagagtaattagtttaagttgaagaatttcatggatttaatatccatcacatcatacgtctctgaaacgtttaggcaaagagtgaa

SEQ ID NO: 69094 - DNA, 526 bp, Arabidopsis thaliana landsberg
agcggccgggaaataatccagcgcgtccaccagtgccatcgcgtaccagccgatggcccgcccccagaaattgggggaatcgcccgtcgttttgttagcccaggactgctcgcgggactcgtcccagccgtggtaaagcaggcctgtgcgcggatccctggcatggtcttccatcaggatgaactggtgggcgatgtcggtaaaggcgctgtcctcatgatccagcatcgcgtactcggcgtaaaacggctctgccatgtacagcccatccagccacatctggtgagggtaaatggtcttatgccagaagcctccgtccgacgtccggggctgggttcgcagctggttccgcaaaaggccggctgctttccagtattttttctggcccgtgacgcggaatagctccagcaggagttttccggtattgatgtcgtccagcttataactttaggactgtagtggggcattcccccttcaggcgtgacaaaataatcatgctgtgctgatatagtcgaagtatgttttt

SEQ ID NO: 69095 - DNA, 928 bp, Arabidopsis thaliana landsberg
aaaatcactcaatttgttgttcatcaccgccttttcgttattgtggtacatctacgagctgcataatctaactacattgtaagtaaatgaatttagccatcattatctccacaggaaacaaaaaacacttgaaaccttacatacttggatctaagacaaagtgagtatgaaacattctgaatagtaagtctatgattcagcttgattagatagatccggaaaaaatgttgactcctctacttaacacactctctatgttgtatgaaacatgcatgtctgatttctgaaaaaattatgaataattggggtctaatgtcttacgaaatttcaaaactgaagaaaaaagtcggcatcaaaacgcgcatccccaaaaccaagaagcaaattgggagagaaacgatgaatgtcaaagcaaagcagacgtttaagaactgtaccagagaaatcgcgtgtagagaagaagagattcagctcgaaacttcagctgagtctggagatcgtcagatgttttgtttccaagtaatttcgatttcttttggttttttctaagtttgttcccattttgatagagaagcagcaaaagtacttggagagatattccaagaaacctctgtttgtcttacacgcgccattgtcgcgcgttgaagtcgtcgcgagaaagaatttgttaaccggagataaaaaattgtgattattcggttcggtttaggaaaggcttttatgatgggtgacttctgaaaaagtcaattgttcaagcagtgcttccaattccaaccattcatattcccatgttttgtcggaaacattgattccagtttcctatttaaaatttacctagaacaaaacaaagaaggcatgaaccagtttaattttctgcaaaattatttatctttttgttcactagttactaaaataattagacatgaag

SEQ ID NO: 69096 - DNA, 574 bp, Arabidopsis thaliana landsberg
cacgtggttagtcggtaccttgagtcctgcgtcaccattttcagacaacataaattacacaagtacccttgaatttttgcatataaaccatgaaattgcttcatatatatatctccggttttacctgaccgtaacgatcacgcattcatgcactttaacttacgttttatcaccgacactgacactgatgacattgctacagtcaaagtctcgtagattcgggtctaatcaaactttaaggaacaaataaagatttgttttataaacgaagaagaagaagattctatgcttgtgaaatgagcttgaatttttattaataatggagtaatgggtttacgataccttaatttatgacgaagagatactctttcaactcccacgtgacatgtttgattatataataatatgaaaattttgtatgtttttgagtctaaaaaggtatttctatttttagctacacataccaatcacatgatagttatgatccactataaacttttcaacaaaaaggggaaccaaccataaatattgctaagccaaaaatcatttgacatttcaacactctgcccatgtc

SEQ ID NO: 69097 - DNA, 2333 bp, Arabidopsis thaliana landsberg
aattaagcccttttaataagttttgctttataaagtggttataaggtgtttaattattgaaatagtactaggatgacgtaacatgttaggaccatactactgtatttgtctttcccttaaagactaaatagctaacatgattttgtaacacaactatgagtaaaacaatgtagctattagcgaatgtagcccttttttttgaagtgttttaaaagtcttaagatcaatatttatgtgcaagtgtttgatgattactcgatataattcttctaattttaggaaaagaacaagtttcttataattaataaagttaaaaataaattattatacagatagatatccatgatagttttctaaactaaaaataatgtaatacttattacaaaccaaaataatgaattatgttgatgggtttgcattataggtactacttttgcatgggtgcagcagttttactggcggtgacggttcttgtgtggatccaagataacgttgggtggggtctaggtttaggcattccgacagtagctatgttcttatccgttattgcttttgtcggcggttttcaactttaccgtcacttggttcccgcgggtagtccatttacccgcttgatccaagtgggagtcgcggcatttcgcaaaaggaaactgaggatggtttctgatccctctcttctctattttaacgacgagattgatgcacctatctccttaggtggtaaactcacccacaccaaacacatgaggtaactattctattcatgttcttcttgtctaagtcctaattcattatctctatataattctcggaataaatatcaaactatttactactataagataatgtaaatgttttgattatatatccagatagtcacgaggagacgtagtagaatctgaatctaaaaatgatatttctgtcaataggacctgagactaaatatcaatatagtaaacgtaaacaattgagtaatcgtacaacaacttgtccactgggtgaaaccagacaaattaaaagtaaaactacaaaatacatccaaaaacttacataataattgtaatcggtggtggttcattgtaaagaaagaaaattccaaaagcaagaagacaacatatcaaagttgtcactttttttttttttttttttggcatatactgtatatgcagaaataattggattattggacctatttcgaaaatagtaagatttagataattaatagtaatataatgactggcctaatcacttttcatttgtcacttacttgtcttgctcaatttgtaaaatataaaactaagagtagttgtagagttttcatttatttttattttctaaaagctaactatgactaaacattttcaccaaattaaatttaaaatggttgcacatttcttattattttgcaaactctgctcttcaatgtagtttcttggacaaggcggcaatagtaacggaggaagacaatttaaaaccgggtcaaatcccaaaccattggaggctaagcacagtccatcgagtcgaagaactcaaatccgtcatccgaatgggtccaatcggagcatccgggattctcctaatcacagcctatgctcaacaaggaaccttctcattacaacaagccaaaaccatgaaccgtcacctaacaaactccttccaaatcccagccggttcaatgtccgtcttcacaaccgtcgctatgcttaccacaatcatcttctacgaccgcgtcttcgtcaaagtcgctcgcaaattcaccggtctcgaaagaggcatcacgttcctccaccgtatgggaatcggattcgtaatctcgataatcgccacgttagttgccggattcgtcgaagtaaagcgaaagagcgtcgcgattgagcacggtctcctcgataaacctcacacgattgttccaatctcgtttctttggttgattcctcaatatggtctccatggagtcgctgaagctttcatgtccatcggacatttagagttcttctacgatcaggtaatgaaaacattatacatactctgttatataaacagagagttagttaaagagtctaactaacttttgttaactaacgacttctctaaccgaataactaactatttaatcatttctttaatgtcaggcaccggagagtatgaggagcacggcaacggcgcttttttggatggcgatttcgatcggaaactatgtgagcactttgctggtgactttggttcataaattcagtgctaaaccggatggcagcaattggttaccggataacaatttgaaccgagggaggcttgagtatttttactggttgattactgtgttacaggctgta

SEQ ID NO: 69098 - DNA, 1452 bp, Arabidopsis thaliana landsberg
aaatcatctatggtttggaagcatggaaaagtcaatcaattacctaaagaactcctctccgccaacttcttgaaaagcaactgtatcggcggtgcatttaccaatcagaagtaatagcagggtggctcgaatatcagaggttgcccctggaatatttcctctacctttgcttccaacggcgacaccaagtgcaatgttgtcagttgctgcacctgctagttgaatcagtggccaataaaacaaagctgctggcacacgcgcaaccagctgcataggaacaatggcctgtccacgaagaagcatcgctgccattgacgctgtctcacacgttgaaacagagacgttattgtaccgaggcttggtgtcaccttcatccacactttctttatagctgttacgatgagaagtatcaaatttgctattcctatccgcagaattggggactgcatcctcgtcagtagacaaaactttcaagcacaattgcgagaaaagaatgtcacacatctgcttggaaacaacagagaaagacacaagtgaaatttaacttcatctgggtgaaaattccaataagaggtatagacagagttatcttctacgccaattattcgacatatagaacagcagttactatatatatcagcaagctttagagtggctttggtaggatatttgacaaacagaaaggttctaaggaatgtacctttaagatgttaatccggtcagtttcatttatttgtgccatcaaagacaaagcactgctcattatgtctataacagcatttgctttctctagtcgtttgtctttatggtcctgagtagcaactccaccagttgatcgttgggtctcattctcgtctagtaagaacttggagcgcataagtagcctctccagaataaataggaaaccccatctgataacactgttccttgacttcaagagtccacataggagatgtatggaaataggtacatcagaagtaaccagagagtctgaggtaccacaatgggcaatcttttgttgcagatcttttatgctcagccatatacttccaccgctctcttcactaatttctgcaatcagaagatcccccaaccagatatacccattttgacgggatgtggtcctttctgaatgaagaagagagtgcaaagtagcccaagctagattcacggacatgcttatatcgtttcttaaatctaaaatgctttccatgaacttggaagatttggtaatctgtttgagatgcaagaactctttgtccaggtgagtaaacgaacctattattgtgtcaaacttttctgttatatttgccaaaagctgcaagaaggaaaaattaaagagttggaaaagagctttgactgacaagcaatttaagttttttttttcagatatcctcagaagatcatttgcaacatgattctacaagtttaaacctacctggataagtcgtt

SEQ ID NO: 69099 - DNA, 1506 bp, Arabidopsis thaliana landsberg
tcgatggatgtggctgtgagcgtcctaattaagcttgttatcgacatgtaagctctttgttttataatatgttatcttatcttatgtagtatgttaattaagatttttaatcattcttcctttataactgttgacaagcttatggcacaaccgttttgcaaaacctgttttttaggtatgtattggacgctagaattgctgctcctcttactttatccatgctcgaggtgtgactttcgacactcagatatattttcatgatatttatactgctactaacttttctagccatgcatgcaaatgtatttcaggaaatgctatgctccacaaaagcaccttgtaggattcgtgtatttgatttaattcttaatttaggagttcatgcacaattgttagagccaatgataagtgataatgcgactaccattgaagaagattatgcccaagaaacatatatcgacaatgaaaataggcttctgctacaagggacaagaacaaaagacttgcctaagatgtcaagcacttcttcggctattgagaactttgagtcttggatattaaaaatcttatttgaaatacttcttctcctagttcaggtgttttactctcttcttgcttctttgcttgacgtctacactagacttgtttgggattttataccttcaaaattgtttacgtaggttgaggaaaaggaagaatgtgtttgggcctctgccctcagctgcttgctctattttatctgtgatagaggcaaaatacggagaaaccagctaaatggtcttgacataagggtacgttagtattacgaggctgaatataatctttgccctctgctatgtggattattccttctttaattctcctcctattttcatttggatctgtcctttctctttgtttttagaccttcgtaactatgatttctgtttccagctgcatgttaccatttctcagccaagttgtacttgctgatgagccagttactttccttgaatcaggttataaaagctcttctgggaactagcaaaaggaattcttggtcagaagttgttcattccaagcttatttgtatcatgacgaatatgttttatcaatctccagaaccagaaggctctaacaaagcaatttcaagtgcctcaaattttcttatcgaccaggtcgatctgattggtggtgtagaatacattttctttgaggtactaagaaaatatagtttattagactgaatgatctttctaaacattatccaaatagacacttcgatccccaatggttttctagcatattaagggattcattttattggtacagtactctttggcaaccactagagaggaaagaagaaatctctactcggttttatttgactatgtgctgcatcaaattaatgaggcatgctcatctgctggtctttctgagtacactgatgatgagattcaacctttggctgttcggcttgctcttgctgatgcacctgaagctttctacatttctgttaagcttggt

SEQ ID NO: 69100 - DNA, 597 bp, Arabidopsis thaliana landsberg
  unsure (1)..(597): unsure at all n locations
gagcatatcttttacctgtaataggcacttaatccatatctaatcctaatttaccttttaagcttaaggagctgaaatgaggatgggtgaggctatctgtagcccgttgttatgatatctctctgcttcatatggtttttttactggcttgcaggacggaaaagctctgccaaccggtcctgtggtcatttcaccagatggcctatttccagcattgtaccgtgaaggttaatctttatacccttcaagatttcatttgcagcatctttacgcttttttcatttaataagaaatatctcttattttgttcttataaacattataactgatatgcagtgataagaagagcacctcatgagttcaagatcgcatgtttggaggtaaaagtttttctcatttttttctgtgaactaataatagagaacacttaaaaccagcggcttagatatgaacaacttttacaattgtaatatgcaggatatcaggaaactcttcccaacggattacaacccgttctattgccgatttggaaatagagacacagatgagctgagttacagaaaactcngaatcccaaagggaaagatattcataatc

SEQ ID NO: 69101 - DNA, 162 bp, Arabidopsis thaliana landsberg
  unsure (1)..(162): unsure at all n locations
caaagnggccaaaggtgtgggtncatgagcccacgcttatganncttacaannccngccaanaaccacggcaggaaaggaagaacanaaanccngnagcccaaacaagacgcccaaanaagaacaaccangcccagacnganaaacnanncanaccaaacgg

SEQ ID NO: 69102 - DNA, 498 bp, Arabidopsis thaliana landsberg
  unsure (1)..(498): unsure at all n locations
ggcatnacccgaagaaagttttgtttttttagaagaagaaggaagagnggggggttgganagaataagaagaagaagncgccttggtccctaaggaagatgagggaatactagtacaagacctctcaatcactagactagatgatcatgatgatgacgatgcgataaatgatagtttattaagttcagaagatttgaacaagaaatgtgaggatttcatcaggaagatgaaggccgagattccatacggcaagagaagtatataacttttttgagttttgttaacaagttaaactgtctttagtattcatattcggcaggagaaggatataattttctctctttggacaagtagattctgtatttttggtgcccacttctatgtttgtcatccatatgaatccatgcaccataatgctttctatatcaagcattatcagcttactatgttctactctcttaagctgaactgaattcactttcagctcagcattcgcat

SEQ ID NO: 69103 - DNA, 555 bp, Arabidopsis thaliana landsberg
  unsure (1)..(555): unsure at all n locations
cttgccgcccggaagctggagcttgatcttctttactgctttttccttttatcttgtggattggactctacgggacatggtcctaacctgcaaaaagtcgagctcgacgggggtctcgcgtccgaacatggcgaccatgaccttcaccttgccgcgatcctcgtccacctcgcccaccttgccctcgaggtccttgaacgggnnnnnnnnnnnnnnnnnnggatcgtccttcatgaggtcgatgcggtgcttcggcgcctccgcgttcatgcgcttcatgaggccctggacctccgccgggtccatggggaccggggtgacgccggaacccacgaagcccgtcacgcgcggggtgttgcggacgacgaaccacgagtcctcgtcgacgagcatgcgcacgaggatgtagccgggatagatcttctcctcctcgacgacgcgcttgccgcccttcacgcgtatcttcttctcggtcgggacgaaccacctcgagatcttcccctccatgccgagggactnnnnnnnnnnnnnnnnnnnnngctcgacggcgttctc

SEQ ID NO: 69104 - DNA, 1365 bp, Arabidopsis thaliana landsberg
tcttttgtttacttataaacgatatgaaagaaataaataaaaagaacatagaatcttattatgatctagaagaattaattaaagatatatatatatatatatatatatatatatatatatatatatttttcatttctactcatgtttcttatacattctttaaatttgttcaccattttgatttacttgttctcatattagtttgttatacaactcacttagaataatgtagattacatttcagccaaattcatgtaaaagatgcttttctttgtgatgttcttaaaatgctttcttttcactttttttctttcttaactataaatcttgatgcaatgcctaccttcttagaacataagatcttctttaaaatccaaaatcgtaggccactatttcattatacttatgtaatatatgtgatacagatacatctatatacaaattaaacacgaaaccatacatgcacggtgtgatcacacacgcacacacatagaaacataaacacgcaataatttctatacagtttaatttcatttttaacttacttctttttttttggtgaagattcttgagagaaaagaaatcgaagatggcaacaaaatctaccggaggtaccgagaaaaccaagtcgatagaagtgaagaagaaactaattaacgtgttgatcgtcgatgatgatccattaaaccgtagactccacgagatgatcatcaaaacgatcggaggaatttctcagactgcaaagaatggcgaggaggcagtgatcctccaccgtgacggcgaagcatctttcgaccttattctaatggataaggaaatgcctgagagggatggagtttcggtacttaatgatcttgattcttgatctgcttaccaaatagacaaatttaagtggctcgatcatcactatacttaaaaacctcctctttaatatagtttttatgttctttgttgattttaattagacaactaagaagctaagagaaatgaaagtgacgtcaatgatcgctggggtaacgtgagtagctgaccaagaagaatagcgctaggctgttatggaagctggactcaaccattgcttggaaaaacccttaaccaaggacaagagcttaccgctcattaaccacctctatggtggttggtggatgaaggctcatgaatgtatctatatttccaatgatgaaataacctacacgtgtatgatgacacaaaaatctgcatttgatgtgatatagggcatatgatatctatgtctgatggattctcttatcgcccgttgaaaaatcatgcaagtcgtctctttgggctaatagaatatctaaataaggttttctcttgacggatgagctaattcacttcatctgg

SEQ ID NO: 69105 - DNA, 270 bp, Arabidopsis thaliana landsberg
attaccaaccatttataaatttatgatactaccccaaaatattttagtattgtattatgttggttgttgaactttttgggttaccataagaaaagaatggggaagcattagcaaattgcaataaacgtctgtatatatggcttaattgaggaaaacttataattttcgctttgggaaataaaaaagatcttaagatgtaggttgtctgtcttgggaatgttttgccacttttcagaaacttggagtttaggataattcaatcagatatga

SEQ ID NO: 69106 - DNA, 104 bp, Arabidopsis thaliana landsberg
aactatgaaaatagatggcgagtgcctgatcgaatagattatgtcatgtttgaacaaggttcatgattaccatcttgaaaactaggaacaattgaatacatata

SEQ ID NO: 69107 - DNA, 518 bp, Arabidopsis thaliana landsberg
cgggcagaacatcgcattgttggcgcgcaccgcatgctcgcccatttgacgttcggttttggccgcgtcgaattgggcgttgaccgcgggcagcgcttttttcagttccgcactgatcatcgccaccgcaatgccgctggccacctcgccggcattgtaaccgcccatgccgtcggcaagcaccgccagaccggtcacggcatcggcggaaatgctgtcctcgttatgcgaccgcaccatccccggatgggtggcggttgcgatttcgatgacgttggacaaatcgttcatgcagggcctcaggatacagcggtgtccgctttgggtttggctgccagcgttcccagacacagccggatggccttcgccatctgttcgccgttctggtagcgctgatcgggatccttcgccagcgccttgttggtcactgcagcgacgcaggcgggcagttccggcttcagcgtgcggatgtccgggtgcgcttcgttggcaatcttgaacatcagctgcgccatgga

SEQ ID NO: 69108 - DNA, 600 bp, Arabidopsis thaliana landsberg
gtctagtagtatatagacgtctctataccatttgtctggtttatgacaaaaagttttagacggtgcagtaaaaaaaattagcggtgcactgatacaatagctctcaaattaaatgactacaagacagaacatcgacaacaaatatactcaatgtagttgttgttttctactgcttatgctgccaaattctaaccatttcggtggttaaaaatacattgaataaagggtgtgtataacacctttatatgtaatcgcagtattatttatatttcaattatttgtagtaagccattttaattttatgttttgccacgaaagttaataataggtcatgcgtgatttgaacgccaaaatgccaaaataaaagattaatttgggacattggtatcgacgaggcaaagaattattactgatacaaaaaacacagatgtttttttctataaactgagagatttcaaacaatgaaacacgtgaagttttctcaagggcaaaaattaaaagaaaaacaaaaatgtggtggatctaatctaaaagtggcacaagtaaagtaatagtacaacttcttctcactgctttcacctgcacacataatacaaaaac

SEQ ID NO: 69109 - DNA, 421 bp, Arabidopsis thaliana landsberg
ccctaacaaattggtttgtactcctctatcttcttttgatattttctttttaatttttaaaggagatgaagataataaatatgagagttggctttgtgtggaatcaagagacaatgatataacaacgattgcttttgtgtcttaactcttaacattgaagcaactttttatgatttaaagataatgaaagagacatacaagttgtcggattttcaagaacatttcattacagatgtcttggcttaaaatgataactcacctaatgcaaaatctgatactattaatcgggaagtacttatcagttttacagctaaaatatgtacttagttacatcattataccattagttttaaaactaaaacagggttcgaacctcttattttacaattttttagattaaaattgtacctttagaaaacta

SEQ ID NO: 69110 - DNA, 314 bp, Arabidopsis thaliana landsberg
cgatactccccggctttcgcctgctcgtcggcgtgcgagaaatcactggcgtagatgtggtcggtggtatcggccgatggcgagctggtgaccggcaccgtgaccggcatgaacgggatgtcgccgctggcaccagcacaaccggccccggaaagatgcgtgaggctgaagccgcgaatgcgcgtggcgtcgtattgatagccgctgggcgaggccgtgcgcgtgtgtttgccgcgggtgatttcgggactgcactgtagcatgccaaagggaaccaccgcacccgggtaggtgttgccgtctctgcgactgcc

SEQ ID NO: 69111 - DNA, 1170 bp, Arabidopsis thaliana landsberg
ttgaatcgctcattagttactcacttactcccatataactaaaaaaacaactttcaccaaatgtgaagcaatctcttaaacaatgtaaacaagactcatttatgagtaaatggccgcaagtttaagcacaataagccacattactcagaaagtaaaaatccgatgagaaaatctcttcatgaattttatctaccttattatctaatacttttaaactcttttaaataatttaagcaaactacatcagtaagggtactatttttttcttatttttttttttctttttaataacatgtagatttgaaactttaataaaatgaatttagtgctataaaaaagaaaattaatgtcgaatcatttaatcataattagacaattgaagttgttatatttataatattttttttaaaagaattaactagaaaaatctttattaaaattttttaaaaactttaataaaatgtatgtttataatttacttttagaccctttaaataatttaagcaaaaatcaaaagatatgatttatatagattttctaatgacaaggggtgtaaataataacaaacttaaagttgattttcaactaaaaaagtccttctatttataatatagatatataaatacatatatatttttttctttgagcaacatatcacaatctatgtaaagaagcaatattttactgaaacaatagtcaaaataaacaaacgttttcaatcaacctatactaatacaatattcctaccactccaaaccaaaaaaggataaaatctttgtaagaaaatggagaacaaaagattggtcacatttgtggtgatgatattgacgattggaaagcttgtggttgaatcagagggtttaaacaaatctaattctcaaaatatattaggttacctctcgtgtcttgaactttgtgttactaataaacttccagtcaaatgttctgaacaatgttggaagcctcctcccgaaatgaattgcaaagttggttgtgttactcatcgttgtgtttctactgaaaatcttagtaagtttttcgcaatagtcataaatgatatttttcatgtaaattataatattacttttgatctttactgcgctatgtttatgatgtatatatttacatatgataaacaattttatgactacttattaatctttatttata

SEQ ID NO: 69112 - DNA, 2140 bp, Arabidopsis thaliana landsberg
ctataatcacaactaagattatgtttgtatgcatccgtcaaagattgaagaccataagatacatatcaatctttatatgtttgatctcaattagtaatagtgatgtcaattgtaatattttttttctaacaaaatataatttcctagaaactaatgtttcgatatttatttctagattcgaaccaactctttatttctacattgaaaacacgatttccgatttgatatcttacatttttcatattccaattttgataccttaaggttacgggaaacaacaaaatcatttttgcagatctctattctctcacacataacaaaatctataagcataaaatacaaacttcgagttatgtgtgtgtactaggattacgtcacacacacacatgtgaagctccttctagttggggtagaaggtttgcaattcccgacaaaattcaacacgtacacaatgagaccagtcaacaacactttacttacatcacattcacattacgtcatccgtaatctaatccaacagtcaatttttcgccacgtcatcatccgctacacgtgtatggctcctaatcctcctcaactcctgaacaatctctttagcatccggacgatcatccttatccgtcgcaacacaccggaacgccagctcagcaaccgccgcaacaccgaatccgtcactcaccgcagccacatcatcgccgtctaacgcaagcaacgggtcaatcacctgatccaaaagacccatttgaatcttggatacaacaagatccgctaaagccatgtccctcttctcacgtcgttgatcaaccgctttcatacccgtaatcaactccatcaaaacgacaccgtagctatacacgtcacttttctccgttaaccgaaaagaccggtgataatccgggtctaaataaccgggcgtaccttgtggtccggtacaaacgtaatcagacgaagtagctgaattcacagtcgtctctgaaaacaccaagagcctagagagaccaaagtctccgactttgattttcatatccttctccacaaagatattcgacgaagttatatctctatgaacaaccggaggaacaatatcgaagtgaagatactccatagctaaagccgtttgcaacgcaatatctaaccttacacgccacgtcatcttcggtctccggccatgaagatgatcagcgagagtaccgttagtgacgtaatcgtgaacaagaagaagtcctctcgggtcagagcaatagccatggagcttgacgaggttagggtggttgattgaagagaggatcaagatctcattgcagaaagacttcattgagaaagctttgcaatgctcggtggcggcggcggttgcgccgtggtgatggtggaggaatttaacggcgaggagttgtccgtcgctgagttggcctaagtaaacagaaccgaaaccaccgtcgccgatttttcgcttggggtcgaatttgtttgtggcggattcgagttcttcgaaggtgaagactggtgggagaagagcggcggagcggtgatgacggaggaagagagcagccgggtcttcttcgttgatagaggataaaaagctagctctccgtgatcggaaaatcgctacggcgacggagaaaacaagtaagagacaagtcaaagcgaagataagagacaacacagcaatatgattgactcttttgttgttatctctttgagttactaattcggatcttgatttgtggaaacagaggaaatcatgattcgggtgggttgaattaaacccgcaaacaccattcttgatttgacaatctctgcatttaatgaagtgtggatcttgagattcgtcccattcaacttcaaaaccaaatctagtgaagaaatcttgaagaaaaccaagaagatctccttgacagccttgttcagataacgacccgtgggttgattcgcaaccgtggaggatccgacccggattctttaggagtttacagtcccaaggacaacgagaacagttggggagagttaaaggagagcaaggtcggagaagtgagagacgagagcaagaagagtcccagactcccaaaggtgaaccgcttaagtcgataaaccggtttggtgaggaggagacccggagagaagaacagttgtgtggttccgg

SEQ ID NO: 69113 - DNA, 1163 bp, Arabidopsis thaliana landsberg
tttgccatggtagtccctctggagcgttctcggaataaaccggatctatttgagtagctacgtttttaaatctacagtgggaacaagaaaaagagagaaactttagagacatcttcctcaaatcacatagaaaagaggaaatttttgaaaaagaagtaaactttaaactcaattcgtagcagaaacagagttcttgaaaaaggggtttaaaacctcgcaatggttgcgtttacggcgattgagccagaggaaaagacaatctgagtggatatacttgagagagcctttacacgcgcacggatgtctcaacggattgtctggttcctccggtgattggcaaatccgacaaatgtctacagctttgttatttatgtctgatacttcttctgtagtaacagcttcgccggagccaacgagtttgttttccgccggagaaatctccatttccgggaactagaaaccttggaacttcaattgtatctctctctttctcttcagtctgcactttcactttagcggcaaatgaaaaaaatggctgccaaaaagaaaaaaaaaagtaatttataaataatcaaaaaaaaagaaaaaaaaaaaagaaacaaacgtttatgattcgtcgtatgacgtatttttacctttgtttttttgacagcgacagagggactttcttacgttgcttccctaatttctcggtaatttattgtgtgacagccaaaaatttatttacttcttcctttgtctttctcttcagtctgcactttcccaccttaacttttcttttcctttcagagatcacaaaatctcaaaacaagaaaaaatacaccctaattcagtgatgcaatgataactttaaaaaaaattggaggagaacctttaaatttattcttccaaagtactaaacaccaataaatattgatcttctcacgcaaaagaaaaggaaagagaaagatatctgaaacatgtaattatgttttggaactaactataattttacgatattcaaaccataagcaaaacacaaatctaccgagcacaaagaaacctaatttaaaaggtgacctaaggaaagatgctttgggtgaccaagaggccacatatgagaatcacagcgtataagctaaaatccataagaagtgcatccattatcttcttcaccatcatca

SEQ ID NO: 69114 - DNA, 403 bp, Arabidopsis thaliana landsberg
caacttgacatattggatggcggccggcctggccgagaaggccttccgcgacgccctgaccgccctcaagcccggcggcgtgctggggatcgaggagcatcgcggcgaaccgggtcgggtgcaggacgtgttggccgccgacggctacgtgcagcaggcctatgtgatcgagatggccaaggaggccggcttcgttctggcgggcgagagcgagatcaacgccaatcccaaggacaccaaggaccacccgttcggggtctggaccttgccgccgacccgcctgtcggcgccgcgcggcgagccggccgagcccggcttcgaccacgccaagtacgacgccatcggcgagagcgaccggatgaccctgaagttcgtgaagccgaaatgaacctgaccagacgcg

SEQ ID NO: 69115 - DNA, 2600 bp, Arabidopsis thaliana landsberg
gattaagagttgatttatgtactggactatgatgctatgaatgatattgctaattaatcctacaaccatacaaaaacaaatcatttaatgtatttttccaaatcatctcataattgggataactgggagcaatcgggatggcattaaccaaaagatgatttttatatttcatgtatacgtatgtcaaagtttacttccctttcgaattggtttcttaactatgttgtaattgactcaatgacatcttgatgatatagttccttgtcgtgcgaatatcatctttccagtctacaatgtggattacagtggagttttttttattctatttatgtagttatatacggtaagaaaactgacagtaattgaccgtattctatttatgtagtttacaatagtgagttttcttacggcgaaaaacataagaaatttgtaagaaatagttattttttaccattttttaaccaaaacatttgtaggaaatgtcccgtaaaacttactatttaatcaagataaaatatatagaatgaaataaaattgtcgtactcattaaataattgttttgataaattttaagaaaatcgtacagatttgaaactaaatacacccaaaaaaaagtttttaaaagggttaaattacaaattacatgttaatatatatacatatataacgttttatgttttattttctaatcttttgtagaaatttaaaatatgaaaaccagcatataatttacgaattttttattagtatgaaagtttccgaaattctgatatttttggaaaagaataaatggttgttttcttatattgtccctatatatagcagggggtacgaacttgcctatgtgtttaaatgtgagccgtatgttgcttcgacatcatggggccaaatcaacatcattgtcaaataatggctacagtttttttgaagatttttgaggtttcattcttccatatcagtatgtgtttttaaccatcctaatgttatgtgtgtttataataacattaggattgtaaaacaaattaagagttgtgaattatatcatttttctgaacactacttattaaaattaaaatttgtctctcaaattattgacaaaaatataaagtaaccatgtatgtattaactaaaccatgttatttagtggtttatgatattttgttgttgtgtttgtactttgtagttcggtttaaatccgtgttttcacattgttaaaaagaaagctcatatctattaaatataataatatttaaatttgaaaaaaaatcaagtagaatttcacgtactaaataaatattattaatattgtaaggattatgaaaaatgaataaatatgaattgaactaataagtgactacagatgtaaatctctcaccaatagaaaagggtgtttgtattaatctaatttcacgaaaagaaagaaaataaaaaaagctatcctgtctgtcgtattgtttggatgaatatgtgattaaacacgttgatgtgatatatccaacgatgacgtctacaagctggagaatcctaggtgactagatccttaatactccagtttccaaaactagatcatcttcatctttccgtttttgacctactggctagataagtgaggtaaaacattttttcatcttatttttttttctaaccttttaaaaaatttaatgaatttactggaaatgtttttcttatatattttgtaatttaatgatttcaaacggtaattatttaattaacaacaaatgcatccacataagctatttagatggtggttcaacttgatttgtttgggttgaatttaattcgaatgtgttatgtgtcttgactttatttcttcaaattctataagtagataaacacaattatcccatatattaatgatgtacaagtgcaagtaaatgatttttatatacaaatatttagttttttttagacatgtataaacttgtaatttatattagcactggacacattataaacacaggattgcctacaatcatttatttaaacttacattcactttttctttttaatcttacattcatttatataccacatatagaaaaaatgaaaaaaaactcacgttattgttcgtgtacagcttcaggccttcagcatataataaaatgagaagatataagaggtcaaagtttctcttcagtcttaataagtaacggtttaataacatacgctcccgataccaaatctggttatgaacaatgtttactctcgtatgattcgtaaagacaacacattcgcgccattcgctcataggacgtttcttcacggttcaattggtgccatcatttattgattattagaacctgaaagaaaaagaaaaaagaaccactaagctacaaggctatccttacacgtctaacgtaatcattagtttggaaattggaattaaagggacacgctagaacaaattggagtgaagatattgtccctctgaattgtttccctttacggtaaaaaatcattaaaatagtatatatatcaaaagcgtgaaaagaagaaggaacgtacaaaagttgagagaatatcctacagatgaagttagaaatggtgggctgaggcacacgtgctaggttatgtccgta

SEQ ID NO: 69116 - DNA, 2897 bp, Arabidopsis thaliana landsberg
ctcttatataaattatttagaataatagttgaacataactatttttcacttgtatactaacctgggaagtatatcttcattttggatctcaatatcagtatagatctcattctttacattcttgcaggccattgtcattttctggtatgcagccgacattgcagatatatcccaaaaattgggctcgctgttgtttgcaacaaactcatctgtctcacccatgtgccttctagatctcttctttgctgctgcctataagtgcattgataccacatagatgagaaaaaatgactgatcaagactcaagagtaagtcaaggcaattgagaggctgtatgatatacctggaaataatgacaaagatgagtctgatcctcgggtgataagacatcgtgcagaagcgtgtacaatttcacagcaggaatgagtgctggcgctggaacacctgacgcagaattgaccacatcaatcattccagaaaatgatgactcgtcaagagatttgtaattctcaaagaccagttttagaatctgctcgatctggtccttgatttcattcaagatccgattctgttgaaagcaaaaataaaaagtagagctacataagcagttcagaagcagaaagtactattatgattccacaagagaaaaaaaaacaacaacaaacaggattaactagggtgatatgaggtattgtctgatgctgaaaattgccatgtgagcaactgcgtgaagtctaagtctgtgattcaccattgtattctaatgtggtgctctgagtcaagtattatgatcaaagtatactagctaactttagggtcgtatcctatctgtcgcttaatttgagacaagaaacacataactccggaaaccacacaaaaacagaaaccgcacagaaaaattaataatagataaatgcatatgtacctcttgatgactcaaggcgctcttgccatttcccttcatgatgacaggtgttaacaagtcatgtaccaaatggagacagtcggaagtcggtgtagcgacatccattacatatgacaagtatctaaaagcaacattacatgaaagatagagaaaatggagttatagcatatccctcaaatgataagaattaaaaaatgagttcagtataccctgagcttggtgtagacatctgaaatcccatagtaggtggcaaattcttccaaaagccatttccatgaaccatataacaacaagtttctttgctgaaatcgctgcattttcaaggccacttccaggactaggtcatatgcgactgtttccgcaacagaagcacactaaaggaaagatgagttacaaaatcaatacaccaacattttctagtcacaatacaatgagttttgtatgttttcagagacaattttgaaagggtagaatataaatcttgtttcaattaaagaacttagaattgaacgaattgaatgtgagatgagctgaatctacgtgcttacttcttagaaattcttttagtaaaattgctaataacaagtccaaaattaacaactattgtaagataatattttcaggttcaaacaatctaattactatgaccaagagaagatgctattgttgtacgagataaagttttaaagttgctaaaggaaatggactgctggagtgtctctcagtatactaaaaagaaacgccaatccacttatagagagcgaagcaaaaaaagagatcaccaaaggtaccaaatataatgagtgaaagatagttaacacaccttcaaatggctgttatcatcaaaacttgctgaatagtcaatatagagctggagttttcccacatgttgatgttctggctcacgaaaaacagaccaccagcgaagtttctcagcctgtatggtttcttcattagaatcacttgaaacgtactaacatataaaaaaggcaagtagaaatgacttaccgaatcttcagaaatattagctagttgcacaagtacacgcccaaaatccttccccattggatccaggatctcaacaatcagatcatctccatgactatcaggaaagctgttgaaattccatatacttcgtcacacttcacaaaaagggaaagctaccccaagtagatttgagagagtgaaaggaagaattgggaacataggaacatacaaaacatggctttcaccagatccgggttgcatcataatggcgttatcttcagctaagcttttcaatcttaacttacacgagtatgtttctgaatgacagaaccgaacgggtcaatcaatattataaaagttattgtacataagacagtgagtgtagtgtactgggaaacatggaaatacaatttctttcgaactatgcccacacatactgatataaatacatataagtgccatattatcattttaaactcagatgtcaagttgagttaattctcccggaataggctagtagttaataagtttcacatcccttgtacaatatcataagatgttgaattattacgtagacttgtgacaccggttttcaggagaccagaaacttgttttaagtactgtgtactggcatgaacatatgccagactttgacgaggaagagaagaaccattggctggtacacggacatggatcttccttagagcccgccatccagaaaataagcgtgttgacatattggaaaagtgaatccggattttctcaaactttatcaacgatggtttcaaagatgatatactacagccggttggaccatccataactgttttaacacgtcgtactgcaaaagcagacacatatattttacgactattgttatatgaggggtagccagatagcaaatgaaacaggactcaagtttaccttgcaccttcaatttgccaatgtttttcttgggttttggtgcaactccttcgtgcggagc

SEQ ID NO: 69117 - DNA, 1946 bp, Arabidopsis thaliana landsberg
gactcttagctcctgaaaaggctcgaagtacaagaattgtaatgtgtttttcttatttttgttatccaagtcatgattagattcagaatctttcttaaacaagattgagttacatgtttttttcagttcttcccggaagcaaatgaagtcaaatttgctcaaaagacagtctttggaggaacttacttcaagttggactatctaacaaaaccatctctttttgaggattttggtttctttgagagagtaaaaatggcagatcgagtgaagccagaagacgaactgtttcttgtcgcatacccgtattttaatgtcaacggtagttccctgaaaacctcttatcatctatactgttaaacaaaatccacgttctgactcattcctttgttgttcttctttttccactcagagatgcttgtagtggaagagctctacaaggaagctgttgtgaacactgaccgaaaactaatcatcttcaatggagaacttgaccgcatacgatcgggttgtatcctttttcttctcataaatgaaacaaagtagattcttttttccatttgcatcacaacttgagagccaaatgagaaagctgaatcaagagagagagactcttgttttccttaaaagaagacaaaacaatagactatccaaagttcttttatccgaaactggctgcacttaccaagacacttcttccaaagatggagacagtgtactacatccacaatttcaaaggacagaaaggaggtgtacttttcaggtttctgctataaacctgcaaattaatcttcccttgtttctttatctttagctgaacggtgttgtgtttcgaatggattagatgttatccaggtccatggcaagtactgaggagaacaaggaacaaatacatttgtgttcatcagcaagaatccatgccttctcttaaggaagttgccctcgacattcttgcgtccgcttgagatttttgtattgaaactttttcatgcatccacttgtaagtacatgtcaaaattaattgttttgtgctgatatgagttatagtgatccatactttatatacaattcatgcttgtcaagctaaaatttgagcaacttcttaaaaactttaattcggtatcttaaagtaattcctatcagaaaaattaaagaaaaaaagtattccaatgttttatcacaaatacagcggcgtcaatttatttttcaacttccagtcccgatttagcatccttagctatgtatcagagattcagggtaaccagattgttatgtggtccgatacggcgatacataccagaaaagaggccagcaatatatgacggaaactaatgttgttcatctacttgccatggctattcgactggtactcaaattgtacctttattctgcttttcttcaaaacactgcaatatagtttcccagtaggattcttttttacgatataacattgagccggtcactttaagggctaaggggagaaatccaacaagcttgattgcccgaactgatagctgtctgaaccgaaccggaggtgatttctgcttgaaagcgaattgatagaaaagttgaagagcttggtcaaatctcaggcccttaacttcaaaaatatatttcactccactggccagaagaaaactctcatctcgtgcagtcacaataactctacttccagggaccaaccaactggtgatcttgaagacttcctctaacgtcttgacgttatccacatcatcaactataagcagaacttttcggtgttgaatcaatgatttcattatttctggacagtctttagagttccttactgcaagcgcttctctttggatagctttggatagaaaccgttcttctagacaggatgaactgctctcttgagcattttctagaaaagcatgggtgtggaaaaaacaaagacccctctctcagtaagctatatcattgataga

SEQ ID NO: 69118 - DNA, 1343 bp, Arabidopsis thaliana landsberg
attttaaaaattagctcccttttcttttgtaaagtaagcatgttctttacttttggagtagaagattaaatctagagatattgcaaaatatacgtaaatagataatataactctaaatgaattatatcatttgtaagattttatttaataatacatattatatatatatatatatatatgtgtgtgtgtgtattgttagtttgttacgtatcgaccacctctttctatggatctacacgcttaaataatctcagtcattgaattcgctttcattctacgctcactttgttatgttaagaaactttaaagagttgtcaactgaatctgcatatcatcaaatagtatacattttcgtgtttgtcttcggtatcacattcatgaaagttatatccatatgtttaaattgttctaatcactcacatttcagagaaaaattaaatgcatcttaatgacatagatgataaaataagattttaaatacatttatcctacgctccatcatattttttatatcccgataacatgtatacataataatacatctacttaactttgtgtctattttatttcaataatatgtatcggctttaagtctttactgtgaaaggatacttttctaagcagaaacaataatttaaaaaggaaaagataaacatttttaaagggaaggaagccgacacaattgtcgtattggcacgacttgtgaaattaattatctacattaaaatataagttgccgtcatcgtttgtgaatttgtttacggatatgtgaatttctacttgaagtaaatatatgacgaaaataggccgtgtttaaacttgcaaatgcaacttcttactccattctcaaatctataacacacttcgtttattgccccatcaaatgctgttcgatcaattggattcttctgcgcataacgtttactattatgtatcccacacattgttaaattttagtacaagtccccccccccccccaaattagtcaaaacaaaaaagcgttttacctgaggtgaaaattgaagtgatgttaatagaactaaaacaatttaatatcaaatgtgtttgtaaagcaattatatgttttgttgtagaaccatgggtaaactctttcagttataattagcatctatgtttgaattaagtatatgtatgatttatctataattgcttttttcatatatgatttatctgtatatataattgacaaagaatttattggtagaccacatctcagtggccatagattattaaaaaatataattcaatcactctcaataattaacatataaattaaagaataagtgtgattaagctacagatcccaaaacccctaaaatcat

SEQ ID NO: 69119 - DNA, 128 bp, Arabidopsis thaliana landsberg
  unsure (1)..(128): unsure at all n locations
ggaaaaaaaaccattcaaccctttttttttgggggggggggggggggggagaaaaanannaaaaaaaaaanattttttttttttttttnnnnnnnaagaggggggggggggaaaaaaaaccccccccc

SEQ ID NO: 69120 - DNA, 608 bp, Arabidopsis thaliana landsberg
  unsure (1)..(608): unsure at all n locations
ggaatctgaaaaacaacatgttcaattacattgtgtcctatcactcgtttgacgatgatgctattccaatacctttacacagagcaagattctcttgtttctaattatggtgataaagagagtgtagggacctgagacgaaactaggtgctgttccaaaaccgaaaaggctgcaaacagttcattaagcggacaaaggaaatggcaaagacaaagagagagagagatagaaaacatttaaaaggataaaagagtccaaacaaaacaagtagaacagttacatttttgacattgtcttttaaaaaaatctcttatcctcttaagaaaaataccccaccaggatctctcagtgtaagtagccaaataaacatacaacaatcaataattcttacataaataaaacaaagctctcttagatctctctttctctctctccacttattcattgctcatgagcttgatggttatatgaagcagccgagattcaaattattggcgaccgagctctcttatgttcctaaaccggaacacgattatatgggatgatgaacaaagattaatganaaatgtacctcgtttctttgtcttataaaatcgtagtagtaatga

SEQ ID NO: 69121 - DNA, 526 bp, Arabidopsis thaliana landsberg
cggtggtcagctcgtcgcgatcacgttcgccgagaaggcgccgctcgtcggtgagcgcctgatggcggtgatcgaccagctcggcacgcgcctcgtgcgcgccaaaggcttcgtgcacctcgccggcgaatttcgccaagggttcgtcgagcgcgccggaatccgcacggagctgcgcctgctcgacccgtgggaaacggagccgaagagcgagatcgtgttcatcggtgacgacctcgacgagccggcgctgcgtcgcgcgctctgggcctgtcgcgcggcgggataaccggcgccgttagttccacgcggccgatcgcacctgcgtgagggcggcgtcgcccgcgacgagtcccgcatcgtcggcatcgtgaacggcgagcccgatgaggttgccgcccgccggcaccgtaccgaacgcggcgtcgatcgcgatccacctggcgcccgttcagctgacggcccaccgatggcgaatgatgcgcgcaccatcgacgcgcaggcccgtcacgatgcgggtcggaat

SEQ ID NO: 69122 - DNA, 556 bp, Arabidopsis thaliana landsberg
  unsure (1)..(556): unsure at all n locations
cgctgttcgccggcgagtccatcgcgctgccggccgagtgctcgggttttgcaagcgaagccatggctgtgcggactgtccgcgaccgcttcggcgccgatccgctcgacgcccgggccatgctggccgtccatttcccgccggcggcctgagatgaccgcccccaccgctcnnnnnnnnnnnnnnnnnnnnnnnnnnnnnnnnnnnnnnnnnnnnnnnnnnnnnnnnnnnnnnnnnnnnnnnnnnnnnnnnnnnnnnnnnnnnnnnnnnnnnnnnnnnnnnnnnnnnnnnnnnnnnnnnnnnnnnnncatcaccggcctctccatcatgcgcctcgtgcccaccccgcccggccgcatcgacgccggcgaagtcctgttcgaaggccgggacctgcnnnnnnnnnnnnnnnnnnnnnnnnnnnnnnnnnnnnnnnnnnnnnnnnnnnnnnnnnnnnnnnnnnnnnnnnnnnnnnnnnnnnnnnnnnnnnnnnnnnnnnnnnnnnnnnnnnnnnnnnnnnnnnnnnnnnntggccttacccgcgcccaggcgcgca

SEQ ID NO: 69123 - DNA, 502 bp, Arabidopsis thaliana landsberg
acctaactcaaaacttcaccaaccccatttttaagcttctttctttttttttatcctctgatcgattaagccaggagaaagcactttcatatttccctcgacgaaaaaaatggcaaccatttcgaatctcgctaatcttccccgcgccacctgcgtcgactccaaatcttcttcctcttcctccgtcttacctagatccttcgtcaatttccgcgctttgaatgcaaagctttcctcttctcagctttctcttcgttataaccaacgatcaataccttccttctcgtaagtctttatatccatttgatgcatgtcttttgtctctgtttctcgctcttggggttcaccaaaaattgaatctttttagctggaaacgtaccacgaatctcaaagtaacattttttataaaatggattaggaaaagcaactgtatttcccctttttggttggtaaaagtctgatttttttaatgattgggttttgcttcctttgtttaatttgc

SEQ ID NO: 69124 - DNA, 576 bp, Arabidopsis thaliana landsberg
  unsure (1)..(576): unsure at all n locations
gaaaacgcggttgccaagagatttcgacatcttggcaccctggttttccaccatgcctttagtgcgcgtacacccgggcgaagaccgggggcccctcgttcccgtaggccacnnnnnnnnnnnnnnnnnnnnnnnnnnnnnnnnnnnnnnnnnnnnnnnnnnnnnnnnnnnnnnnnnnnnnnnnnnnnnnnnnnnnnnnnnnnnnnnnnnnnnnnnnnnnnnnnnnnnnnnnnnnnnnnnnnnnnnngaaccgcgagtcccacgagggctcgccgggtcgttccgctagccacatcagcgggtcaaggggatccttcttgccgacacggtccgggtcgccgccacgctcggcggccagcgacgtcatgtcttccaccgagaaccccgacagggaccgcggcccagacagcgccccgaactccgcgttcgccagccgcgcgaagtagacgtccccgtccaggtcatacagcgcgccccgcgcggccagtcgctcggcgaactggtcgatgatcggcagcgccttgacggcgccgaccaggtgcgcgggcggtaccacgcccagtgcctcctgtcacg

SEQ ID NO: 69125 - DNA, 480 bp, Arabidopsis thaliana landsberg
aaattacaatactcaaaactaggagtagacagggacacaaatgggcctcatacagccataaatgagcctcaaacaatgaaatgggcttagacgtcattgtatccttttgatggatttttgttttctggatttaataatttgggagcccgagctagagtactaaacattaaacttgacaacaaaatcacactatggtaattgtttatttaattaatatttgaaaattttcgatcatttaaataggtggtaatttgactaatctgctgtataattgaatcagaacaaaatttaccatgaatattattacacgacttcaaccacttcaccttctttgcaaactgcaacactaatctccaaagtattgttcttctttgatttcaccctacaacaatttcttctaggagactgcagcgcccaaaaacaaaatttgaaatcatatttcaacaattattatttcaagcatttaaaataaaatgacta

SEQ ID NO: 69126 - DNA, 369 bp, Arabidopsis thaliana landsberg
ccaaacatcatcccagcttgttacttagttgcacaactaactatccctagcgactgagtaacaagagagatgggttggaatactccattttgctccagccacatgtacacaacaccggtcacgctactcaccaacactaaacactctatagtcaattaactcgaactgtgtatcgtgcttctgtttccaataaccgctcctactttctcaatgaaccctcaaagattaaagttagccactaacttgcatataacgtgtcaatcgacaccaccttgatggaaaatttctctgtttatttatttattctaattaaaataataatcaatatatattctatgatatagaaaagtcaaagctataagctctctc

SEQ ID NO: 69127 - DNA, 1355 bp, Arabidopsis thaliana landsberg
caatgaaataaacgaggcgtgtttgttaggtggattcttcttcaatcttatggcatgggagtcctggagttgacgaatcagatacaaacataaatatttgctcagagggtaccatatctgaattctgagtttgagtatggaaaacgttcttaaatctaaaagttctccttaagatttggtctcttggttaccacgtctttacgatactctctctaaatgtgacaatacaagtaacgaaaactgaaatacaaattttcgttagttttacttttgtattttagtaccaatcctatgcatgtcttaaaacaggttaattgttggaatatagaaatatttcttaattgatgaagttttgttattcacaatttcaacgataagttaaatccaatgtccaaaatctcctggtaatcgggtggtcatgactcatgagctgcctagtggtttagaatgattatagattattgattcattgcaaatttaattggttgactttttaagtcatcatttggttgattttgatttaaaattattgattctgatccaaaaataattagtctgaagatgtaaatatgtaataaattgaggtgtatatttttttggcataattgaagtgtatttatattgcattataatgtggcagtaaatggcagagaggcctcttgtgttggtatttaatatcctgtttctgcgtacatctcttatttaattcctcaccttgccaaatcacaattctcctcttcaagtcttaaccaaacccaaagtccttcaacaagaagatccaatggctgatccggcaacgagttctccgttgttggataaccatgaaggttgggaagatgaaagaggaaggagatcaagatcatcaactttggttcaaaaagtgatcgacgtggaagaagcaaaagctcaaatgatttactctctgccaatgatactcaccaatgttttctactactgtatccctataacttctgtgatgtttgcttctcacctcggtcaactcgagctcgccggtgccacccttgccaattcttgggccaccgtctccggttttgccttcatggtaccactatttccttttttctttagcttttgtaattcaaaatcttgttttgatgtctacttgcataagttactaaaacctacttatttccatgtcaataatagactcgaactcgaattcaagaatcaagattgtctaaaatgatttatcgacataaatgactagtagatggttttaggagttgtctaaatttttattaacgacatcttcaagaacatttggccaacggtatatatgtataagtgcttgtttatgacatacattaatgtctctttgttttcaggtagggtta

SEQ ID NO: 69128 - DNA, 177 bp, Arabidopsis thaliana landsberg
ttttaattcctagtattttttatagcttaaattaaaattaacttttgttgaaacagtgctcttttagttaccacaaaatcagtcacgtgttctcaattgtttattgaaagttggaaattatcattaccacatgttctctttttactaacaaatgatcaaaccccttaaaatttttag

SEQ ID NO: 69129 - DNA, 1858 bp, Arabidopsis thaliana landsberg
gaatattgtctacactttatctttacctttattttcctcaactatgcacactttatctttgttaatgtgaaatcttgttttgattcttgtatgttagataacgaaaatgatgaattacgttttctcttgtctggatgtcatatatgctaaacctttcgggtaaggtttcatttgttatataaggcaccaataaaacacatgatttttagtgttgcaatttgtgttttgatatatctttgttgccgtaaaaaaaacaatgtttggccggtttgattgtgtttcggttgagttgggaggaccgaggttcttaaatttcaattcatgttgacttggtttggtctatgttttttttttctttgggataatggtttggtctatgttagatgttattgactttttatccggattgacaaattagaaccgattaaaaccgaaccgtaaattaatgagagaattaatttgggcctaagagccaacgaattaaaaaagcccaacgcttcaaaactcagaaattgaaccctaaggctaagatcgacgccggttctcatcgccggccgaaacctcgactcgtgccatcgtcagtttcatttctgcttcttctctctcgttgcttgaccatttatgtggtttggttcacttcaggtcagcttctcctcgatcctgtcgtctgtttatcttgattcgacgattcatttgttcttattcaatcggagtctgatacgagcgacgcagcaagcaggcgaaataccataccggattttactggctaattttgtccggtttaattaaaatcgttagctaaaccgatttgtttccatttccaggtcataccaagcacagagaaaagcatttggggaagagtaggttttgcgatctgtgattttctgaggagaaacgaaaatggcgtttagagggaaggagatgatgaagaagctggtaaagaaagttggagcggagaatatcacgccggagctcaaggagaagctcaaggcttgtgttcctgataccaaagtcgtcatgggcagagccaaacgcggtctctacgccggccgccacatccagtacggaaaccgtgtcagtgaagacggtggaaacaagtttgtctctttctctctatgcctctctatctgtttatatgtgtatgcgtagcctgggcgccggacataaaagtattcattagaagaaaacattgttgttatgaaactcttgtaataacgatcttaacaatcaacagccaaacttaaagtgcttcaatcacaaaagtctatagctaaaagcttatcatctgtgatggttcaaataaaaatgaaacctttcataagatgatgatccaaaggatgcctataatcacttctcaataaagaatcatcttgacaaggaactaataaaacaatcaaatttcttgaacatgaagagaaacaattctcaacaataatacatgtgtctctctatacacaagtgattggagagaaacaaaaacagaacatgttttcattttttgttacctggtctaagcaaaagagagttacaacttaaaaatcgattcagaatcaagaacagtaacatcattcatttccaaaacatcacaaacacaaaaaaaaagtcaatttgtctcaaaacataaaaaaaaattccatgataaaggaagatttttagaagttaaagctgtttattttgttcgatgattacctttagcttttcgtccaatcttgttcctggaaattggaagatggagaaaatagaagagcgttttgttcttgttgccgatattttttcttggttttttataatgtaatataagaaatttatctttttgaattaagaataatcaaattttgttttattcataatgacctta

SEQ ID NO: 69130 - DNA, 2860 bp, Arabidopsis thaliana landsberg
agtttgtggttatttgattcttgtcattgtcgttcaacaatttctccaccgcacattttggaatcacggagaacacctcttgggacaagggaggatcatggagacaggaattgatgagcggaaaagggttagagggacgggaaggagaactgcgtaaagtgacacttccattgatttcgtctattaagcatctccgaaatttggcaagagagaactatgagatgatgaggtttgactgatctttgcattgatgtttactttaccagctctagtcttcattgtcaacaaattcaagcagagaaacaagagagagatgaaatcgtcagaagaagatgttgagatacaaaaagacaagcgattgttgatattataggtaacatactataatagaaacaaggagactttaaaatttgatttttcattaagtttctactaaaggaaacaaacttaaacgaatctaaattgtttcattattacatgcctaggcagcataagcagtttcaattgcattacattaataaaaacaagggtaagcatagactattcagaatctattatatgattgttgactctcttcgagcacaattctacggcagatagggcaagaattacacctccttaaccactcagagatacattctttatgaaatcgatgtgagcaatgtgccaacttttttattctcttaccatcgggggacgtaatcgatcaaaaaattctccaaacatataggacatgtcgattcgccttctacttcttgagtttcttctttaggaagacaagaaacaggaatcactgagaacacttcttgcgttaaaacgacgttaacgaacatgaacaaccgttgtagaaacccaacgcttaaactcgcttgaccagtgattacctcagcgatatattcggacaaggaaggatcatggagactagaatcaagaagcggaaagagatgaaacggagtgaatttgtagtttaagagattcaaacggatttgagagatggagaggaggtcctggatacaatccattaaaagtgatacttccattggatttgtcaatcacatatctcttgaattgttgacggagattgatgatgcaaacagtgttgtttaggctcaagggtaaatatgtggtttgactgaatatcttcgtagtgatatcgattttcatatctccagtctccattctcaacaaacttaagcagacacaataagagagaaatcgttagatgttgagatgagaagagacaagtgtttgttgatgttattatataagttttgcgctcaatagtaagtttccttttttgtttttgatttcatctacttatttcctttttcatagacttatgttaacgtttatctcttgctatttccttttttgtttgttatcctttccttttctttttgacagaactctgttttttgctgttgtttctatttgccttttctaattcgaactagtcgatttcggtgattgtattgactgtgatttatttgaagaggcaaagaaacaacaagagccttaagtacaatgcctagttttacttgtaccggttttcaaggatcatattattggacctacagataattcctacagacaatttcataggtgattcttcggttttgacagtttattattttgaaaactgaacatatgtactctttatttttctgtagatagatatctttctcacgagtacaacaatttttttaccttaagctgcttgatgatcgcttcatgagagacatgagtattacatacgcagatgcatcatacataggcacattcgttatcttgttccctcataagaagtttctcttcttgctccaccctttgcagccatttcagccctagatcgcaccctgctcttgcagcgatttggaactgttcttttgccatctctaatggattcatctccggattttccaggttctttcttgctctcttgggaggtgaaactcccacgacgttcaattttgttagagattctgggacttgcacacctgtatagttgatatcttaagcaagtaaccttgaaagcaagaaacataacgatattgttgtgttcctaagatctagaaagccaggagtgaccaaaaaacaaatccactttggatagccatgaggatctgatgtaaaagaagcaagataagtctgtgctgaaagaggattactaacctctaagtaaaagagatccatatgctatagcagcaccagcatgtccctgaacgtttacaagaagatgtcagactatggaaactacaagaagataccactttacagactcttacagattttacataaaattttgacataagacaatgcatgtttcgtcgatattcaaaagtagaacatatgatgataactatagcgcagaatttacactaatgaggcagtaatgaaacgaaaacagaagctggctctttgtaaacactgcttcagcggtacagatctacagacaaaataagaaagagcagtatcgccagacatgaagtttattaccttctctgaagccctatggaaacaccatatagctgaatccacatcttgcttcacacagtctcctgtcagatacactattcctaaaagatagagggcacctggatgtagctgcaagttaccaactcaaggtgagattactatgaaatttccgaattatacgttcatacaagtctctgagctgcaaaaatgcattcatacctgatcaacagcattctctatatagtgaaacgcctgttgatccgactggacatgatcattctgaaagaaagattgcaattagtatgaaatgctggggcagtttagtgatgagtgggagacaatcagacagatattaactaagtaaactttcgaattctgaggaacg

SEQ ID NO: 69131 - DNA, 617 bp, Arabidopsis thaliana landsberg
aatgccgacagcctaaatcaatattctgatttcttgcgatatgcaattttttttcactttatgatatatatatatatatatatatttaaaaagagaacggtaaattaacggatagttaaaaataatatgtattgaattttaaagttaattaactgttatagttaccataactaaaatattttctagttactggttacagttttttattattttgtatggttagagttttggtatggtccaaaatacggttagaatatgattatggccacgtccaactagatcaacttgcaaagttggtattttattttgttttttgtaacaacattttgttactacgcactacaaaaaaaagatcatattaaatcacttaaattgtatcacaaaattaaatgatattattttaaatcatttatttataactgaagtaaatatatatgtcttagcatcaattagactaaatgatgttataattatttgtttggcatcgattaaataaaatttaatcaattcttatcggtttttatcatttaagtttaattgatacaaaatttatgattttcatcatttggataagtgatgcatttcttaattcttggtaagatcattttttaaatgat

SEQ ID NO: 69132 - DNA, 257 bp, Arabidopsis thaliana landsberg
cctgtcgtcaaagctgtctgctccgtatcaggtgtaacagacatttcacgctccaaccgcactaaggggctgatttagcttattgggcttgtaaatcaaagaccgtgtcgtagccgacgcagagcttgatcatgtgcaggctcatcccagcgccccgcgcggttttaggcctgctctcactcgactgcccagcttggcttggcgcggatgttgaaggtggattcattacgaactgttgactttgtataccattcccg

SEQ ID NO: 69133 - DNA, 591 bp, Arabidopsis thaliana landsberg
ggaaaagtcatatctcttacgtcataatagtcagtgacgccataatactgtttaaatatttggcatatctttatcttaagaaaaaatctcaagagattactattctttctgataggagattgaatgaacggttgcttcttttacaagtagatcacatgtatttaaattagtcttctcatacgacgagaataaaaccatcgtgcttaatacttaaatttttttacaattaacggtaactagtaaaaccagaaatgcattttgattttgtacaaaccaacattctaattttagttttttttttcaattacaatttaaacgataaacaaaagagaaactggtttaaatttaataatgcaaaagcagaagaaagaaggtgagaggaaacagcggagagagacagagtcagagaggtgtagaagtagtagctggtgagcactaataaaagacctttcttcgctcaatcgccgccgtaaaataaaacaccatcacattctcatccaacgaatctaatctatccgaccaaaccaaagctcttaaaaaatctatttttattcttacttcaatctctgaaataaataaacataaaatatt

SEQ ID NO: 69134 - DNA, 306 bp, Arabidopsis thaliana landsberg
tctaaacgtctaaacaaaacattcaatactagttttgataaattttgttctagaattttagatcgttctatttttttctttttataaatgaaataacaaatttaataattaattcttgtgagaatgctaattattgatttttttaattaagagatacattttcggactgagaagtaccctaaaataccacaatattatgagcatcccaatagagagagccccctccagaggctctttccattttgtatgattaaaatttttataaaaggaattagagagttttttttttcatcattccccaacggt

SEQ ID NO: 69135 - DNA, 623 bp, Arabidopsis thaliana landsberg
cacatactgagaatttaggaccaagattagcctttacatattccaaaaccaacattaaacttacgattaaaatcctattgaacaaaagaaaagggacctaagtagacaaaaggaatttcactgagcaacatcattccactgaagatatcctccgtgaccgccttcatctttaaactcatagacagcaccacatgctgccaacaaaaccacaagcattagacttgttcattttgaatttcaatcatctttttaacaaggaaaaatgcaagatgaagaaaacagagactattttacctttgtagccaccttgaactggatcatcagccagaagaagcggagtgtccaagtcgatgaatctgtgtattccttcttaacttgttagaattatgatggtcacattagaaagaaatatggtgtttacaaatttgagtatacctgaaacatccaaagccagcagcaaggtgaccagagaaccccattgctaatctagtctccaccattccctctatcataagctcactgccagatgctctagccaattttataaccttaggggcctctacgattcctgttttggcgagttttatattaacaacatctacgataccaccttttatgatttt

SEQ ID NO: 69136 - DNA, 536 bp, Arabidopsis thaliana landsberg
aaagcagatccatcgcaacgtgccgcaggtgcacctgatccgcgaatggaatacgccgcaattccgcagccatgatgacgccatgctcgacctggccgcctgggtgctgggcggctccaagacctcgcgcctgtaccagcgcctggtctaccaggacaagctggccgacgacgtgtcggtgtaccagggctccagcgagctgggctcgcagttcaagctgagcgtggacatcaagaagggcgtcgacccggccaaggtcaaggccgccgtggccgacgtgtggaagaccttcctcgccgacggtcccaccaccgacgaactggcccgcgccaagaccgatgcccgtgcgggcttcgtgcgccgcatcgaacgcgtcggtggcttcggcggcaaggccgtgctgttggcctccggtcaggtgtacaacgatgacccgggcgcctggcgcaagagtctcgaaaccaagatgcaggccactccggaagccgtgctcgccgcggcgcgcacgtggctgtccaagggcgattacaccttga

SEQ ID NO: 69137 - DNA, 626 bp, Arabidopsis thaliana landsberg
aggccctgatcgagaccacgcgtgcggcgttgccgctgatgcggcgtacgcgcggcggccgcatcgtgaacctgtcgtcgggtgccggtctggttggccggggtggacgcggctactacaacgcgacgaagtttgcggtcgaaggcctgtccgaagcgctggcggaagaagtggcgcccatgggaatccgcgtacttatcgtcgaacccggcccgtttcgtacggaatttctggggcgctcaatcacgctcgccaagcaccagatcgacgcctacacctcgaccggaggcgcggcccgcagctatcgcgaaggcaacgacgggcgccagagcggtgatccacggaaggccgtcgccgtaatgctcgaggccatcgacgccaagaatccgccactgcacttgccgctcggtccacgtgcccatgcgttcgccgaaagcaagatggcatctttccgcaaagacattgatgcatggcgcacgttgtccatcgccaccgactttgattgatacaccatggctctcggaaaagccggagcggttcaatgctgtcgcgccaaaggttgcattcgaaaagacagccatacattggacctactgtcgaaatggtggaccgtttggtagccccgt

SEQ ID NO: 69138 - DNA, 134 bp, Arabidopsis thaliana landsberg
atagtgggactcaaagacatgggcttcattttttagctttttattacccgcaggagtcctactgccgttagcaccttttttagtactccttgagctaatttcttattgctatagcgcattaagcttaacaatac

SEQ ID NO: 69139 - DNA, 591 bp, Arabidopsis thaliana landsberg
gagcccaccgtcgacgccgtcatcgccgccggccgagcccaccgcccccacccgttcatcgccgtcgacgcctcccaggacaaccccatctgcgacgtctgcggcgagctcgagaccgcgccccgccactccgcccaagacctcctccctgacgaggaggacgacgaccaggccgagctcgagcaggacgacgagcaggacgaggacctggacgacgaccaggaggacgacgagggcgagcccaccgccgaccagcgccccagcttctcctccatccccggcggcgccgcctgagacccgcgcctggggagtcaacgccacccgcccggacctggaacacccggacggaccgaaggacgaccagccccacggcgagcagctggccctttcacagccgcggccgccctgctccccaggcgccacccagcaccaccgcaccaccagcaccacccggccgcaccaccacggcaccgcggcccggggaaccacgcacctcgagggaaacatcagcgtgaaccacgcgtgtaccccaccccgtccacacctccgggccgtcctcgacgagccccccttcgaccccgaccacgaccg

SEQ ID NO: 69140 - DNA, 326 bp, Arabidopsis thaliana landsberg
ttgccacattccacatttattgatctctctctctactaaggtttgctccaattgttccgttttatacaaacttgggtactctattgaacatggggatgatgatttgatttgaatctgtgattgcgcagcctaagcacatcggccacgatgaatgggatgttgctatggaaagacgcgacatgatagccgtggagacagctgcagctactctctcatgatgcgctttatctcttttgtgtacctcaggtgcgtgctcattctctccttaattattcgttccgctttctctgagctctttcttagtatagtcctctccgatcgccatg

SEQ ID NO: 69141 - DNA, 626 bp, Arabidopsis thaliana landsberg
gttcttcttcgcgcgtcccttgccgcacacgctgttcagctccgatgtctacagcggacccgtgacggttagacagttcgccgcgaaagtctcggacgaaatcgccagacgtgtccaacttctggaggagaagcggtgcgtcagtatcggagaatatcggtcggaccgctcccaacactccgaagacgaaacgtggccgccgcttcctcacttgatcgtggtcctggatgaatgtgacctgcacattctcgacggctccgggccgctcgttgaattggtcagacacatcacgcgggttgggcgcgagatcggcgtgcacgccgtgatcttgtgccagcatgtcagctccgagttgctgtgtgccgacttcaccatgaacctgacagcacgaatcggcctgagcaaagtgaaaacgcgggagtccatcggcatgttcggagttgcggggccacgcatcaccgacagcgtcgatatcggagaggctgcgttcgccattgttggcgagccgccacggcacattgacctgctcgccccgccgcgcgagtccgagctgctggaacggctcggagggatgtctgaccggcgcgtcactgcgtctggggtagcccatgacatcgacgcgatgc

SEQ ID NO: 69142 - DNA, 183 bp, Arabidopsis thaliana landsberg
attttgtgtcctcactggaaagggagtgaaagccaccgttaaaggtagagagattatggtggtttacaagaatctgatgaatgatcataaagatattgttccagatgatgctaacgagttgttacctgactctgaaaatctgccccagaccggaattcttgagtccctcaaccgtgaactgat

SEQ ID NO: 69143 - DNA, 1936 bp, Arabidopsis thaliana landsberg
  unsure (1)..(1936): unsure at all n locations
gtcaggatcatattggtaacgaatcaacctcggaatcaacagtcgcaaatgtggtcgaagagcatctccagcttgcttggctatcttggagaacccaaaagcagctcctctctttgagttaagagaagcttggtgattggctaagtccataaatttgtaaattaaatcaggttgccccatttcatttgcaagattacaaagctccttgtaagtgctannnnnnnnnnnnnnnnnnnnnnnnnnnnnnnnnnnnnnnngaaacacttcagactcctcaacaagctggataacaaaaattcttgaggaacaaatacaaaaactgaagtacctgaaggaaggacctagatggatagattttaccttaatagctcgttttcttttgcttgtgcctgttagagtatttaccagagcatctaccaggcttttcttcattgatgcatcaccaagttcatagatgatgctcatgccctgggatgccagctcctgtgtaagttcattctggtcacctaacaaatgtgagaaagcctcctgcgaaaaaatattttagttaaacagcggtttgtacaagcttctacacattgtagagttgacaacatagcacaagtcatggggcttttgtgataaaatagtaagtgatataacagttcaaggctccgaatgggtaatgcatataaattaactggaatgacaatgctcataattttccttataggtgtgatggtgcaggggcgggttacaacagcaaagaatcttcccattacagctcgctaacctggatttttggaagcattagttggattgatggctgctggccacagtacatggtcaaagacagcatccacacagttccagcacatcgttcctccttcctgctactatacagaagagtgtcaaagagttttccagtaattgtttctctggttgtggtacggctatcttcctcagtatcagttttgacatcagacaaagatttaacttctttcatcagaaaatttgagtccgtcgaaagagaagtataattagttttcagaatcatatcagcagtaactggtacaccaccccagaggaaagatagcgcctcaccagcagcaaacaaaatttcttcagcctggccaccaacaaatgtacaaaatttagaggtttactcagttctacttgaattcttccggatctaataaaaaggacagagggcagtggctttgcgaacaatattacaaacccacctttgaccgtgaaaggctaaataaaagatcaagcgctattttcaagtgcgaagatgacgtttcatttgaacagatatgtccaagagaaagagcaattttctgaactgattttatatcatcaccagagagtagcttgctcaatctttcttgaagaatttccagcacttgagtccctgatagagcaagtcagtcaatcaactgaaaactcgcatacatgttacagacaagttcttggaataaactgacctggactagaatcattaacaagaaagggtaatgcgccacaaatcccaatatgacccagagcttccatagcaacagaagccagtggtgcagtctctaaattaacaacttccaccaaatactttaccgcattttgagtaactgctttagaaacctgcttcacggaaaatcctaattttgatactataaaatattgaaaatatgtagccaattcaaaaacagatgtaaaaatgtgttaagctggaatgtgatttgacattaacacagaagatttagcccgtgattggttggtgtcaatatttatagacagacaagtgcagattatcaataaattatcacattggactgacatccactaaaatggaatgcaagatgaatcaagacacctgaagtaagacatatcggacttctgcattagctatgttattgatctcaagcaaattttgaaaggtggaaatggagacaacaaa

SEQ ID NO: 69144 - DNA, 425 bp, Arabidopsis thaliana landsberg
  unsure (1)..(425): unsure at all n locations
gaaaaaactaatccggtcaagcaccaacggctgaaacattcatgttcaaatatgaaaagtaaaatctttttttcgttcaatgtttctggtgacgtcatctactacaaggaaaatatnnnnnnnnnnnnnnnnnnnnnnnnnnnnnnnnnnnnnnnnnttggggtcgctttattcctctgtgactcctctcttttcatcttgacatcttctataaatcagacaacaactaactctttccctctcgctctccgcataaatccctttgaaacaagatcatatcttaactttgtataaaaacaggacaaaaaaacagaggatcatggttatgtatgaagaggttagtgtctttatatatgtttccaagctcatttagagctctgggactgcagaaaagtgatagttatccctttctttttttgatccta

SEQ ID NO: 69145 - DNA, 439 bp, Arabidopsis thaliana landsberg
ggcccctggcggcatcatggccgcgacgccaggcgccgagcggaatcccgcgagcgccgccgccaccgcggggtgcaggggcggtcccggcaggcgtgcggcaaggatggcctcgaaggcgtccagccggccggtcgcgtcgcccgcctggaagatgcgttcgcaggcgcgcatggcgtccgcgccccacaggtcgtccagggccgtgtgccgtcccgccagcaggccggccggcacgccgaacaaggccatgcaggcaccggcgcgcaattcggcgccgacggaaatgccgcctgtcgcgagttcgcgcaggtagcacccggcgcgcgcgcccccgaccagcgcgtggccgaaggtctcgccgcggtccccggcgccgctgaaaatccgcaagggatgcgcggatgacctgaataccaggtgcatggcaccggtgggc

SEQ ID NO: 69146 - DNA, 389 bp, Arabidopsis thaliana landsberg
  unsure (1)..(389): unsure at all n locations
gatcacnnnnnnnnnnnnnnnnnnnnnnnnnnnnnnnnnnnnnnnntgttcctcgaccagctctacggtccgctcatgagctttggccacccagtccctaacttcttcgtctatgatagcaccggttttgttgctgtatggtttagagaagtcgtagccatcatcccttggtggaaacgagagtagcccaaccttgtcactgagaccatacacagctannnnnnnnnnnnnnnnnnnnnnnnnnnnnnnnnnnnnnnnnnnnnnnnnngttgagattttacctatcagtagctacgttgagataggaccaggaacttaaaacgtcttggtcaacagccatcttatattttctgtcgaggataattcacattagctagcacttagggatt

SEQ ID NO: 69147 - DNA, 610 bp, Arabidopsis thaliana landsberg
agagaccataatcagactaaagaaaataagacaattaattgtattggccctgttgtgtgatcccaatatcaaacgcaaaattctatgacaaataggggctatgacaatccatttataagtacttcaggtgcagttatactgacagttttcatttgtaatcttaaaaaattgtttctgttgtcaaatatcacttgttattaagttcctatttaatgtgtgttgattctgagtcatccaagctcagcagcatcttcctcaccgccgagctctaaggactagaactgcctgacttcaacctttggctttttattgaaggtttgcttgaattctctttgtactgatttttctgccattaatactgtttgtatttcatccccaatgtgggccagagaagccaaaacctgctgccctagctataaaacaaaacaaaacaaaaattacattaacatttcttccatcttgctgtactagttatccatatagaaactaagggtcctgacccacccttggaatgaaaactgtggcagtagagaagtcaaggaggttggagacaggcaggcctggcttggtctccccagcgcagggcttcttgtgtccacgcacgtggtgg

SEQ ID NO: 69148 - DNA, 480 bp, Arabidopsis thaliana landsberg
gggcccttttatgatcatgtggtccgtcttactccccgccacgatcgcccccgaagtggccggccggcagtggcgtgatgccgccggctaccagcgtcgcgactgatgagccccgcttcggcggggcatatttttggccacgcgtcggccgttaactatataccggctatttggttgttccgggtacgttcttgattgccaagttgcgtctgagcccgttatgccagggatgcgagcaagacggcaatcctgctcgcggcaagcggcatcgatcgggacggcaatcccggccgatgcctgacccgaaatccttgtatgagaaggaccacaggctatgagcagccataccgacttcgcttacgttctggaagcaccttaccatcttaccctcattgatcgcataaagcacacgtcgtcctgtgcgcgcgttcagcactgacaaggggtgatctcatgacattgacctccgattgcgcgctt

SEQ ID NO: 69149 - DNA, 3247 bp, Arabidopsis thaliana landsberg
aaaggtttttggtatgggcttcactcttcatcaatcagtttctccgatttgcgtcgtcgtcgtcttcaatggcgctgaaatagtaccaacagatcatatcagaccttctcgaggactctaatggcggattagtaatcctttcctccggtctctccctcgctaaattaatcgcttctctcctcatccttcactctccgtcgcaaggaactctacttctcctcctctcccccgccgctcaatctctaaaatccagagtcatccattacatctcctctcttgattctcctactccaactgaaatcaccgcagatcttccagcgaatcagcgttactcactttacacctccggttctcctttcttcatcacgccgcggattctcatcgtcgatctgttgactcaacggattccagtttctgcactcgccggaatcttcatccttaatgctcattcaatttccgaaacctccactgaagcattcattatacgaattgtcaaatccctaaatggctctgcttatatacgcgctttttccgatagaccgcaagctatggtttccggtttcgccaagactgaacgcaccatgcgtgctctcttcctccgtaaaatccatctatggccaaggtttcagttggatgtgtctcaggaattggagcgagaaccacctgaggttgtggatattagggtttcgatgtcgaattacatggtgggaatacagaaagctatcattgaagtaatggatgcttgtctcaaggagatgaagaagactaataaagttgatgttgatgatttgactgtagagagtggtttgtttaagtcctttgatgagattgtgaggaggcagcttgatcctatttggcatactttggggaaaaggacaaaacagcttgtttctgatttgaagactttaaggaagttgcttgattatcttgttaggtaataatagctctgtctctcttctctgtagatcagtaatgttcttatgcaaaaccttcaagttggtatttctgtgtaggtatgatgctgtgagttttctcaagttcttggatacactaagggtatcagagagctatcggtctgtttggttatttgcagagtccagctataaaatatttgattttgcaaagaaacgagtgtatcgtctcgtgaaggcaagtgatgtcaagtcaaaagaacatgttaagaataagagtggtaaaaagagaaattcgaagggcgaaactgactctgtagaagcaggtaactaattcttgatctataatggttgtattttgcatctagtgacatgtgtgttataagcattcgaaaaatttcctgataattggacttgaatcagttggtggggagacagcaacaaatgtggctactggcgttgttgttgaagaagttctggaagaggcaccaaaatggaaagtcttacgtgtgagtgactgagtgagtttcagtttcaatgccgtttctctgttactgttctttcagtgatggaagttggtttagctagtgaccatatatattttctttgttttttgaccttttgatttggccgccacactctatgattgaccaacatgttttcatggattagccatacgtcacattaaacctaatggtatgcctgtgtttaatacaggaaattttagaagagacacaagaagaaagactaaaacaggctttttctgaggaagacaatagtgacaacaatggaatagttcttgtggcttgcaaagatgaacggtcctgcatgcagcttgaagattgcatcacaaacaatccacagaaggtccagccagataactacgttttgtcagttttacatcattcattaacaaccgatatgaaccctgtcactactaaccataactttagaagccaacatccaatttcagatcttctctggcccacgcaattcttcttattttacctacacttgtgcaggtaatgcgggaagaatgggaaatgtacctgctgagcaaaatcgagctccgcagtatgcagacaccacaaaagaagaaacaaaagactcccaagggttttgggattcttgatggagttgttccggtaacaacaatacagaactcggaaggtagcagtgttggcagacaagagcatgaggctcttatggctgctgcgtcttctattcgcaagctaggaaagacaacagatatggcttctggaaataacaacccagagcctcatgttgataaggcttcatgtaccaaaggaaaagcgaaaaaggatttaacaagtctccagagatctttaagaagttgcaataagaaaacggcaaacagtaaacctgaaatcttaccaggcccagagaatgaagaaaaagctaatgaagctagcacgtcagcccctcaagaagccaatgctgttcgccccagcggtgctaaaaagctaccgcctgtgcatttttatgccttagaaagcgatcaacctatactagatatcttgaaaccctctgtgatcattgtctaccatcctgacatgggttttgtcagagaacttgaggtgtacaaagcagagaaccctctcagaaagctgaaagtttattttattttctatgatgagtccacagaagtgcagaagtttgaagcaagcatacgtcgagaaaatgaagcatttgaatcattgatcaggcaaaagtcttcgatgattattcccgttgatcaggtttgaaactcaattcccaacatttcaaatgaaacgaagcctgtgtgacttttgtttcctgctttaaagtttacagttttgatttgaaagtacattagaacaactcaattagtggtagcgttgctaaaacaagttaatattattaaactgaatcagaccaagtagatgaaacgattaaccagaatttacgttatcttctggattccagtttctttttcctgctttcttctcatccatcctgtgctataaacttggaattaggacgggctctgcatggggtcgaattcttctacagagtttccagcttcaagtacacaaaactcattaacccgaaaagcaggcggaagaaaggaagtggagaaagagacacaggttcgtatctcaagaacgatatttttccccaagattaactagatttggtaaagacttcactttatggaaatgtgtttttcaccaggttatagttgacatgagggagttcatgagcagcctgccaaatgttattcaccagaaaggcatgaagataataccagttacactagaggtcggcgactatatcctatctccttcaatacg

SEQ ID NO: 69150 - DNA, 110 bp, Arabidopsis thaliana landsberg
  unsure (1)..(110): unsure at all n locations
ggggggggggggttttttttttggggggggggggggggggacaccccacccccccccccccccncccccncccnnnnnnccnccccccccccccccccccccccnncccc

SEQ ID NO: 69151 - DNA, 184 bp, Arabidopsis thaliana landsberg
atttgcaaaccatggttttgggaacaaatctgattatggaattggcaggcagacgcccgctcactatggctctaacaagctcaattattttaccgattctgcaaccattgcgtatacacctcagattctcttgttctctactggtcatattctttaagtctctcttgcttatgttgccaatttg

SEQ ID NO: 69152 - DNA, 2693 bp, Arabidopsis thaliana landsberg
cttggaattactgtgttttgaattcgggtgatgatcatgatatgaaattgaaactgggtcgcgttgtcgttttagctaccacatgtttagttatcttctttgtaacgttcattttgaaatggttagatttaggaagctgattagaacactgacgtttgggaatagattattttgagccgttgggtcattattgttgagtttgatttctctctatggactacagagaaaaggtgggttcgtgctggcaagcactgtgagcttgagagggagagaagtttagtgtctgatgctctttctttagagaggaaagagagcaaaagtatgaaacttgcgatgcttgctagtggtttaggaggtattgtttgttactactctcttctcacctccttcattctgttattgttctgtggcatgtatcaaatctttgagtcttgaagtaaaagcttagtttatgaggatatgtgttttaagaagctagccgattatcgttaattatgtttccaaacatctgatcatgaacacttagactttatcttggttttcccagtggcgaacttggtaactcttttctcagcaaaagccgcagacttgaagatgattgtcttggtaaggtttaatcatagattttgatattattgtttatatacttgtgtgctttcttcttttgtttctgttactgtaggctagttcaattatgttccacatcttaacctgaatagtttattgagattatgtcaataagtttttttttttccttttctccttagaccttggttagggattatatctcaatatttttgtttggaacgaatttgtgcctatgcttttctgccttgagatacgtctgattgcttgtaaaatcagaaactaatttccccttaagacaggatcaagccatttccatttacatcttggctgaaggaagccttggagattcggtcgggaacttcttgtattcagctaaccaacaggctaacgaagctgttcaagatcaactatcagctctcagtgtaacaaggtatgtttctcgggttctctctcaatgaacgcgtttctgagaccttgaccatcaggttatcctgctaatttatccctgttgtagtttggcagtaatatttggggcaggccttgtgacaagtctgtctccatgtacacttagtgttttgccgttgacacttggttatattggtatgataacttatctcaagattttacatttctcacaagttatatagaatcttagtttgatgttctaattctttcctcacctgtccttcatatggctgtaacatataggtgcatttgggtctggcaaaagcagaggtcaggttagtggctcttcagaacagatttttagataatagctgtcgccttaggagttggttggatcattgtcgttgcagattgacaaaatttaaaagaagttaaagttgagttcttgtaaacaaatcaaagctccgttaaaggaacaatagacccagtccaatcaaatgcatcatgttttcattcacaagtatagtagtttttagtgacctttcagttcttcatgcatttaggttattggagatacagttgctttcgcactgggattagcaactaccttagcccttcttgggatagtagcttcttttgccggaaaagcctatggacaaataggacaaggattaccagtagctgcatccggtctggctattgtaatgggtctcaatctccttgaggtaatttttgctacaatcactcttttttcatattgcatcaatcagaatgggaaaacaatggccatgtctaacatgacgtatttcctacagataattgaacttcagcttccttctttctttaacaactttgatcctcgtgctgcagcagcaaacttcccatctagtaaacctcctagcacacaaaactttcatggttttttggtcattaaatcttgtttcttatacttggtaacaaaatgttctgtcaggtgtacaagcatatctagccggtctcacattcgcacttgctgcctcaccttgtagtactccagttctagccactcttcttggttacgtggctacttccagggtaactccatttcgtctccttccatttgaaatgtcattatctcaaatatgaacatgaaagctagttaactttccggctttgttttcaagattttaagaaacggtttaagtttagcaaaaagctgatatggataatatgtgaaaaacaggatccagtaattggtggaagcttactcttaacctatacaacaggttacgtcgctccacttatcgtcgctgcttcttttgccggagctttacaggtagtttcttttaaaaccaaatagcgaaatgcaaatttcttagttaagtttcttacagtaatgaaactgcatgcgtatttactcgtcttaaaatttcttcagagcttactttcgttgcgaaaggtctctgcatggatcaatcccataaggtatgttaaagataaatgattataggctattgctttttcatattggtgatttactaaatctcggttccattttttcctatgttttggttcagtggtgctcttctacttggaggaggtttatatactttcttggataggctttttcctgctgctactatggtcatgtaaaaacttaacttacaaacttattttcggccaaaaacaaagtggttgttataggaaaataaattatattt

SEQ ID NO: 69153 - DNA, 541 bp, Arabidopsis thaliana landsberg
cttgttcagccaatactacatcttatttaggacgtattaacgttacacatgttcacattgaacgcattttttgtgactatatcagtgtctgcttttgatgcttaggtagactcgacattgacatcgcaccattcgatagtttctcctactttagtagcttttatctttatgataacgcgatactagcaaacaaaacctacttttgtcgtccatggaagattgaaaaggagtaatgcttagtcttttattttcttagaactttttgatgagtgtatgcaagtgtgccagattcattgcgaacgcttgttcatgtagtgagagctcaagattgacatctatcataacatggtttctttacttactagctaatcatattgagtggaagatacagaagcgctgagcacctagatgacgttgctgaccaacctaggatggagctcatttgaaccctggaagattctacagtcatttggttcgcggctataacaattgacctgccgaggcgactattctaccacaaaaggaatgacagcttagtgag

SEQ ID NO: 69154 - DNA, 641 bp, Arabidopsis thaliana landsberg
ctgtaaatcatctcttcaccgccattgattaactctgaagtgagaaactttgcgatgagtttcccagctccctttgcagccaaactctccgggaccacgtcatcgtgactctttcttctccgactaatccccgccaaaacgatgccgtttgttttgcagtgctttcgaatcacttgcctcacggatacgttatcaaccaactcggtactagtcagaatctttccggttatagggcacgtgatgttcccggatccgaaccatttagtgatggagctccgatcataagtgtggcctgtttctataaccacaggatccgtcataatctctagtgaaattggacaaaggagatcctcaactttcaatcctcggatcaagtcatgatctttctttataccatcttcatgatgattatgatgatcatctctctcgatccgtccaagtataatgcatctgcaataacatatgaatcccattaaactactgagaagctcgacttgatcgctactcttcttcttcttctcatctaaccgttctgcatctatctcttctccgagaaagtttatctctttaacgcaatctccccattttctgatccctacgtgatccaagatcctggtaatttcatccggatccgggacgac

SEQ ID NO: 69155 - DNA, 639 bp, Arabidopsis thaliana landsberg
ccctccctatcccacgcgctttttcactgtcgtaaggtatacccgcaaccatcagcatagaaccaaggtttgcataacctaaacccagggtacgatgatcataagatagtcgggcaacctccttagacgggaattgcgccatcagaactgatatctccagaacaactgatcagaatacggaaggcatgttcgaatctcttaaatgtcaaataccagcgttttctcattaaagaaatgcgccaggctgatagaagcaaggttacatgccgtattatccaggaacatatattctgaacatggatttgatgcattgatgcgaccgccttcagggcaggtatgccattcattgatggatgtatcatactgcataccgggatcagcgcaagcccaggccgcaaatgcaatatcctgccatagcttttcggcagagatcgtatttactattttcccatttgtacggcctatcagatcccagcctttaccttcatttaatgcattgaagaacgcatttggaacacggactgaattattggaattctgacccgataccgtacgataggcctcgccttcataatcagatgaataacacgcagcgattaatgccgctacttcttttcttcttctactttccagtttaca

SEQ ID NO: 69156 - DNA, 555 bp, Arabidopsis thaliana landsberg
actgaggtgtgctggcatgagggcaatactagcagtatcgggcttgttaccgtaggcttattcagattttagtgaggaaggaacaacccagcgctgtgctagagaaagcacaggaacaccgagaaggagagagaacttgcttcgctaggaaaggaaaagggagagatggatataccttccctataagaactaagggttaccaaactccctagccatctatgaaactagtgatactatatacttccaaacctgacaaggaaaaggaggactgaagcatgggactaaagctgacgaggagctagaggaactgcctacccaagaatatagaacagaagctggaaacagtacaccttggcatagctgatcgagcgagaatacgagctaaacatgaaactgccaagaataagggttgtactggaacgaactaggagtgccataaatcctgggaaaaccttaggagaggaaaggacctactattactataaaggcgcactcctagattgcttcggtaggacaggtccgctcagaaaagtccatagcttgctgaggtgggag

SEQ ID NO: 69157 - DNA, 550 bp, Arabidopsis thaliana landsberg
ttaacgtttgtgtcctcctccttcttttccagcttctcgggaacagcctcggcgtcagcctcttcctcctcggccggcgcaggtcgcttatagagtctaccggatcgcgcggctgcgagaagttcctgactatgcggcgggagcaggttggagtctttgggcatcccgtggatgagctcgatggaccagacgtcgttcttctgaggctgttcctgctggggaggcggcacgacgttcacccactcctggcgccattgccgcacagggagacctttgacgagttagtttgtgttgaatatagcgatcggcgatatcgcaccttcgaagtcatcgtgttcggcgtatccagaacggttggcgcgtcgcgtctatcacgttagtcgagggttgcggcaggtagcaattagagggcaacatactcccggggccatcgcggcggatgaaagagcgcaacggctcgtgcaatgacgttaatgcaggcaagttgggacggttttccgtgggtgggtggcgtggcgctgggtgagagtaaactgcttctgggtctgta

SEQ ID NO: 69158 - DNA, 567 bp, Arabidopsis thaliana landsberg
gtggggacaccagttgagcttgacgagtgccacctgctgctggcggatgccgtatgcgggggacaacggatactgctccagcgcgggcagcgcgaggtggccggggtatctttgccggatcgacgaatgccagagccatgcgctgtgccggatgcaccgacagccacttgtcgacatatctctgcaatgctccatgtgggatcgtgaacttactaactcggctacctgcttccccagcaattttgggagctggcgcggatggtcgagcaccgtatcggcacttcagttggtcggttcgacgacatggagataggcccagcgcaccggctccgagtacagcccggtggcacggtcggcctcgacgtcgcgcgcgtcgtgacccacgaacacgcaacgcgcgttgtcgactccggctctgttcgcaggccacaagtaccggcgcggtgacggagcttattcactcggtatgttgtcttcgcatgaccacagctgctggcgcgcaggtcccaatccatgcgcttgatcagttactcggatagaaagacgtacttgttggtgactatgccc

SEQ ID NO: 69159 - DNA, 408 bp, Arabidopsis thaliana landsberg
  unsure (1)..(408): unsure at all n locations
aaaccccgattgggacaatataacatttcccgtggtgataccagcttttgttatttgtccgtcaatctattagattaacacgaggaatgtggttcaatatagtaaatattagtggcaagtagaatgatgtnngaagtgtttgttctcttgatgagacnacttacgtctgtggnntttcttggcnnncaccacctnntgagagcnnncagtgtctgtagaagaaatactcagctttggtttacctcggcganngtgctctgagctccttctcagagtctcactcggttgcattcnncaaaaaggctttttgaaccctgagcagctcattcattaccannaatcttggtnntgggaaactnncaaagaccaaacncnncatcagctttttcagcttagcttttcattcgg

SEQ ID NO: 69160 - DNA, 493 bp, Arabidopsis thaliana landsberg
  unsure (1)..(493): unsure at all n locations
ccccatccggttcccctccgcgagcgcctcggcctgggcggcctttttgctttacacgggcccggtccagcgccgcgagggcgggcgccgtgtacccggccagcagggacgtggtcgcggacgccgccaccccggtcgccttcagcgccaggtccggacggacctcgaaccggatcacgttgcctccgtcgggcggcgagtcaccgctggcggcgaccttgacccaccggccgctgacccgctcgagcagccgggcgtagccgccgtgcgcggacgtcaggtgatcgagcacatccgtgggcgtatccgcgccgccgagcacggtctgggccagcccgagcagcgacgacgtctccttcgaactccgggaggcgtcggccgcccggcgcgcggccaggtggaccacgctgctgaccgnnnnnnnnnnnnnnnnnnnnnnnnnnnnnnnnnnnnnnnnnnngtgctcggcgatggtgaacgtatggaacggcgc

SEQ ID NO: 69161 - DNA, 338 bp, Arabidopsis thaliana landsberg
cagatatggcatactataaatgacaatttcagtcaagattgagattccattctcattctcttttggaaagtactgagcctttttcttttgtgatatccctttcggacagaacacgaagtgacgaacgcaaaaagaatttagatttctcagcctaagttcccatgctttcggtcggctcaagtgctacgctccagcatatatacttgcaacacgtggcaattttgtgtggggcggcacagtcgaaagacttatggataaaaactattgcatgtagactgcttctactcccgatttaaacgactccgatagagctccggtttaagttatataaatgtgac

SEQ ID NO: 69162 - DNA, 147 bp, Arabidopsis thaliana landsberg
atcaacaattctaagtgcttcaattgcgtatacttgataaaccagcgtctttatatagatctatgaggatccgtttgggaagtacgaagccccttggacataacttcatatgcaacgaattctcgacgcggaaacacagatacaaag

SEQ ID NO: 69163 - DNA, 562 bp, Arabidopsis thaliana landsberg
gccagataggcctgtgcagcctggtcaaactgaccctggctggccagtgcggcggcctgttgcgcggcggcggtttcggcgggcgagggcggcttgatgcccggtacgcaggcgctcagcgccagcgagaacagcacggtaatggccgcggcgcggtacgaacgcatgtacattcctcggtcggtatcgacaggatcggcgattgcgcgatcatagccgatcacattgccgcttcgcggcgaactggagcgcacgatgtcatccaccacgcccggctgcctgtgggtggtcgccacgccgatcgggcatcgcgacgatttttcggtgcgtgccatcgagacgctgcgcagtgtttcggtgatcgcggcggaagatacccgccacagccggccgttgctgcagcaccacaacatcgccacgccgctgattgcgctgcacgagcacaatgaacgcgatgtcgtggatgccgtagtgcgtcgcttgctgaatggcgactcggtggcgttgatctccgatgcgggtacgccggtgatctccgacccgggttttcggctggtgcgtg

SEQ ID NO: 69164 - DNA, 668 bp, Arabidopsis thaliana landsberg
  unsure (1)..(668): unsure at all n locations
gagtccacacctatcaatatactgcataaatgagaaatgtttcattgtaggagagacctggagtagtcaaaaaataattcaattttctttataaaaaaaaaaacattccatagggtaccgaatagggcataggactgtgcaacatagtgtgtggatggaggtaaagaaagaaaagccttgaaatcacacacattcaaaagactagattcgtcagactcctcctatttaggttttgacccaaccctacgtaccctctcctaacacagcacctactgttctatttctgtattcaacagtgtcaattccaatctctctcagtcaatttatttgcaatatctatccaccctttttcttaccatttgaaatctcccaacgcttaacaaaaaaaacgacatattgttacattttcgtagattttagaaagaaaccacaaatctatagaccataatagctacgtccctcagtagctagctaattaaaataatatatatatacacagagagaatttgatgcagtcttacattgtcagaatactgtaaatatagtagtacgtagtgttaatgtgtatgtgtngtatattaatttgtcgacatgtatatatatacgtacacatgtgacatatatnattgtatggnttgactatgatgacctcatgattagagagatca

SEQ ID NO: 69165 - DNA, 382 bp, Arabidopsis thaliana landsberg
taatgcagtacacatcaggatttgtgcccccggaagcagtgacagccacccaacaccaacaccaacagtactgttatcattgtcccagaatttcatacacgtcgtacctggggcattgcagcagggaccactgctggggctgcaaccacagagaggagtggagcagcaggcggcggaggggtaggggatgggagaggtggactcgggtggtgaccgaaggtgcagggttgggataggatgggtgctggatgaggcgtcaacagtggcagtgggtggcacgacgggcagtgtctggcacggcgcctgtaagggccagtacacgaggtggtgtcatgatcgtgcaaccatggacggggtgtggtgagggagtgggggtgggggt

SEQ ID NO: 69166 - DNA, 651 bp, Arabidopsis thaliana landsberg
tgctccactatcacatattctgaataatgttcatttctctgacacattaaagtatggagattgaacatcatggttagaaatgtttatctctttggtaacattattgtatggaagtacaacatcctacgtggagtttctttgagaactgtcaatgtatggagattgaaaattacagcttgacatcttttacattccaaacggcttaacttttttttgcttctttctagagtatatataatcttacgacattcaacaaacacattgaacattgaattagaaaacaaccaaaggttaatcacaaaaatttgaaatgtttcaaacaacttctacatatttttggataatcgaacgcagaagatacaaggaagttgctttaaaagtatacagatgaagtatatctatatgtcagaatgtcttctttccgacgatatgcctaggttatagagcaattagattgaaactctgtcatatctagattaataatgcgactttatatattaaaaaatactaccaagaggataagttcaagaagagtttcatcataatctgaagaacctaacaaaaatccaaatattcaccttctgttgtttgccagatcaatgttcaaggaccacacatggttttaatcttgtcatttttctgcaaatttca

SEQ ID NO: 69167 - DNA, 526 bp, Arabidopsis thaliana landsberg
acatggtgcgggaagagacgatacaaaggcggccagtttttgtttgcactgagggcctgtgaggtgagggtatgggggcccatctcggtaaggatcttgcggaggaagactggaagggaagagtaggccatgtttgtgaggaagaacatagcgctagtgatccatgcgacggggtcacggaacacggcgagcacatcgcgagctcggaggccagatgacggcttggaggttgcatctgtcgccatcgcgggcttctcgttgcggagacgaaggcgggcaaccttcttctcccgcttggttaggtacggagccgtctggggggagtcagagatgatgttccaggcggcgacggcggctatcaccgagggaaggccctcgaccatgaatagcaggcgccagggggctatggagctgagctggggcgatttgaccatgacccaggcgagggtcgatgcaaagctcgttgcgagaggagcacctattaatcatgtaagaagtctttatctgctttttttttttttttttt

SEQ ID NO: 69168 - DNA, 638 bp, Arabidopsis thaliana landsberg
  unsure (1)..(638): unsure at all n locations
ggccccgtggtacacattgctcggcaggagtagccagcaacatagcttcttagcaagcntgggatcntggttacaagaaactccaataagcagaacggttgtaccgcaacgcgagtccgtgaccgtcaatatcctgtcctggttcaanaatacactaatatctnnnnnnnnnnnnnnnnnnnnnnnnnnnngtgaacccagattgtttcttacgttcatacatcagatgagtgtcantccgaattgtcttggaggtacccgtctggcacagcactgacagtcaacagctctggattatgatacctgtngaccgtgggtctacatacacttatccggggcattcgacaccacgcgaggtcacacttcacggactcagatcnaagtcgatgttatcagcaaagtncgttccgccctaccatcagctctcaggagnnnnnnnnnnnnnnnnnnnnnntcttcgttgctgacatctttgctcgtcttgttgaagaaggggtcctggagaacaaacggcgacctcggactatcaacctgcaccatcgtcatgaaggacatgtaaagtcacggcagagtcccatccctcatggcaaagcgttgaatgaggagagtttgcttgacttgccaaagacctcctggga

SEQ ID NO: 69169 - DNA, 287 bp, Arabidopsis thaliana landsberg
  unsure (1)..(287): unsure at all n locations
caaagtaacaaccaacataatcagaaaatttttcctttctcgaaaaaacataattaaccgtgtccctgtacaaaacaacaaccaactacacccccacataaaacattctcaacacctaaaccatatcttaactatattggatcacacacaagggttggaacatggacacnnnnnnnnnnnnnnnnnncatacacaaacgacgttatatgcctcctccctcaccacattaataacagccacacactctccccatccattatctcttcatataaatcccttctactttt

SEQ ID NO: 69170 - DNA, 579 bp, Arabidopsis thaliana landsberg
  unsure (1)..(579): unsure at all n locations
cgaggcgatagcctccgcggcggtgtaccaatgatcgttcttgtctcctcgacgatgcggtccagcggggggccggggtcttctgagatcaggcggagcacggtgtccatcatctgccgcaggtcagccgcctgcagcttgacctcgaccgccgacccgccgatcccggccgacccctggtgcatcaggatccgtgagtgcgacagcgcgtaccgcttcccgggagtccccgacgacagcaggaactgcccggcgcnnnnnnnnnnnnnnnnnnnnnnnnnnnnnncgtcgcacggcaccagccgcatgatgtctcggatggccagcatcgagtacatcgagccgccgggggagttgatccacatggcgacgtccttgtccgggtcgtcttcggccagcgccagcagttgcgtggccagcagcgtgccgttgtcgtcggtgagctggccattcaggaccaggacccgggactggtaaagagattgcctgtggcgttcggtgaaatcttgctgtcatctgccatgtgaccagcgtgcgagacagaccggcgtaaccgatgacatgctgctgtgggcggat

SEQ ID NO: 69171 - DNA, 2190 bp, Arabidopsis thaliana landsberg
  unsure (1)..(2190): unsure at all n locations
tattgctttattatcataaattaataaggttcggccattctggtcagcactagttggtggctttaacttgaatgtacaacaacctaagatttaatacggtaacaaaaagaagtgtacttgtacctgacccaaattagcaagaaaagatttgtagtatgatttattttgatggaaccttgaaccttcgaataagtaattaaagtgaaaagctctattacgtatgggtcaattcatgttaacatctcaaataaaattttaattagtgatttttttcctaatatcttgcggattgatgtcaaaatggctttcgagtttattttttaaaatatatttattcctaattccaaatttaagaacatgaaatcaattcaaatgaggttgtacacttcaaaattcgtaataacatcactagacggaaaaagagtgataactgataagaaaacaacatataataagggatgataaaggacaacaacacgatgacaaaaataaacttcattattccaattaataatgaagtacatttccaaataaacaattactaaaacttatacctaacggagaattaatactttattcttgaagtttgaacaaaaataaatatactttatttactcaaatagtagataaataaaaatcctctgttccttccttctcccacaaatcaaacaagtgactttttatatttatcttattaattctgtagtctcgagattcgctttttctcctgcttacttctttttatcatcttctctttgtcggtttgatttggaaaaactttctgcaaaaaaaagagagattcttaaactttttatctcaagatcctttcaaaaaatctgaaaagagaagatttttaataaaaaagaatggttgaaactggtcaccatcatcaacatccaccggcaccggctgcagccggtcatccgccggttccatccatggcgatggcgcgtaacatgggaaccacttggcctccggcggagcaacttcatcatcttcaatattgcatccactctaacccttcttggcgttagtctctctctttctgcttatactactttctttatttttgtttcagatgtaaaaaaaaaaattataatcttttcagtcaaaagttgtattagttcagttctgtctctctctctctttatctgctttatgttgtgtcttaatttgtttaccaaaagattagtttagatctcagtatctgattcgattctttatatttttcctctgtgttgactatattttagcttgtgttggggactaattagctttaaatctaatgataaatgttgtataattgttcttgagacacactaattgattaagattaaaataaactgtttcgttattacttgtttatgtagttggtgaatccaaaatgctataagaattgaatccttagcagttaaaagtgtggggttgggtttatgctaacactggtcatggaaaatgaaatgcaattagtgttttaccattacaagaaatgccatttttaagggattttgtaacaaaaggattgtattattgtttccttttaagaattgatgtgtctcatttccattaacaatgaatcattttacagatgagacggttgtactggctttccagcattacatcgttatgctcgggactactgttttgattgccaacacactagtgtcaccaatgggtggagatcctgtatgtgatgtttttggtttttggatccggttgtctaatatttatgttattatatgattctgaaatcgaccgtttggtattttgaacgataatagggtgataaagcgcgggttatccagactatattgtttatgtcgggcataaacacgttgctacaaacgcttatcgggacaaggcttcccacggttatgggagtatcgttcgcgtatgttcttcccgtattgtctataatcagagattacaacaatggtcaattcgattccgagaaacaggttaaagctcgttttatacttgcgcggtacggatgctataatttcttttttttttttacttgacaaatgccattttccttgtagagattccgacatactatgagaacggtacaaggatcattaatcatttcttcattcgtcaacatcataatcggatatggtcaggcatggnggaacttaataaggtaatataaaagatcaattttaacattactagtttagaagctgatgg

SEQ ID NO: 69172 - DNA, 666 bp, Arabidopsis thaliana landsberg
catcttgcaatgacaacacgtctcaccacccaaacttggttttcgacggcgaatcagcaatgtgtgtcaagcaaccaattctgctcctaggccagttctgatcttaggaattccctgatccagaatatctgagccggaaggtggcgttcaaagacttaaacgagtagtgggccaaagggctctataatgatagttcgccctcagcttttgtccaggattggcattctcaaaggagaaagatctgatcagggaaggattgatcgatcaagatcaggaagaggagaacgaggaacaattaacgaaagaaggggaaagggctaaagcatctgcttccacttccgctgcagaagaagttgggggaggttacaaagcccttatttcaacagactgttaaccactttaatgcctttatccggctttgcaacaaagtgatcttcgatcgcactaaggcgcataagacagtacacttcaccgagattcaccaagtaaccctacggaattgatgttgtgacacttgaaacgcatgaaaggaatctaggaacaaaacaaagaattgcactccttgcatttgaatgccggtatactgctccgccactcagggcacactaccaaaggactccaatcctcatcattgggcaattcaagacgcaagtggtgtgtatcatc

SEQ ID NO: 69173 - DNA, 123 bp, Arabidopsis thaliana landsberg
acaaatcagctccaaaattggcttggttccaagatgtagaatctatgttgaatcaccatttagcagggctactatgactcgggtttttttcttgcgcaggacatcaaggacatgtttcttcac

SEQ ID NO: 69174 - DNA, 353 bp, Arabidopsis thaliana landsberg
aaaaaactgaccatgtccaaaatttgatatcgcaaaaatattgtccttatcctgctagctagaatatttgatggggaggttgtggctatataaatcccaaacaccctgtccctcgtagttatctcagcgtttattttctcttcacataatccagttattgaaatatatgccctattatatgtggtaatagttagctggcagtgtaaatagatttggaccatttcgaaatctgctctaatctcttaagaaaagggttttagacttttaggttaaatcaaattagttcctctcacattggtacgccaaaagcttcctgaccatctaaagtgtcttttaaaggagggggggggggg

SEQ ID NO: 69175 - DNA, 538 bp, Arabidopsis thaliana landsberg
  unsure (1)..(538): unsure at all n locations
agggngggctaaagnncccccaccgaattttatttattaatcaacnccaaagatctcggagagagcggtcatattccaaacccgaataccccctcaccccacaggcagaacaccannnnnnnnnnnnnnnnnnnnnnnnnnnnnnnnnnnnnnnnnnnnnnnnnnnnnnnnnnnnnnnnnnnnnnnnnnnnnnnnnnnnnnnnnnnnnnnnnnnnnnnnnnnnnnnnnnnnnnnnnnnnnnnnnnnnnnnnnnnnnnnnnnnnnnnnnnnnnnnnnnnnnnnnnnnnnnnnnnnnnnnnnnnnnnnnnnnnnnnnnnnnnnnnnnnnnnnnnnnnnnnnnnnnnnnnnnnnnnnnnnnnnnnnnnnnnnnnnnnnnnnnnnnnnnnnnnnnnnnnnnnnnnnnnnnnnnnnnnnnnnnnnnnnnnnnnnnnnnnnnnnnnnnnnnnnnnnnnnnnnnnnnnnnnnnnnnnnnnnnnnnnnnnnnnnnnnnnnnnnnnnnnnnnnnnnnnnnnnnnnnnnnnnnnnnnnnnnnnnnnnn

SEQ ID NO: 69176 - DNA, 2921 bp, Arabidopsis thaliana landsberg
attgtttcctagacaaggtataaaataacttattattatacagagacttagaatccaagatagtaaccaatatgcaggggctaaacaagacagaatatgaatgtaaagatcattcaaatactttaatatcaaatcattaccagtcaaagctacgttagatgcctattacttgctctttgttgtgagccatctgactctttgtaactaaattattatatttcatctgatacttctgtaatttaacaatagttttctgttgctgacctcaagaaagtacttagaagagagccagaggcactaaaattctcatcttttccatattacctacaccactttatccaccagagctatacctagacataattctaatgcataagtcaaatgtctgattcacaatacctcgtagaacttttactcaggaaaagagcaaccctttcccatcggaattccttctttcggttaaggactgcctacagacaccaacagaagttaagaagttttctctgctatttagctttatgaaacagaaactataaaaagtcacttaaatggctctagaaactgtgtaataccgaatgaagaatcttccttgttgcagctgaattttcagtgatgagcttttgaaccacaaaagggtatgctgcctcaaatgtcttaaaatttggatctccagctgcagccagacctgggaagacaagaatagaaagcaaataactaaaggatggaaacaaatggattacatattcttctacgatataagccaacaaaaagaatgacgcaaaatgccaagtaaaggaaaccaagcatggctagaaagaaatgacaaataaagttatcaaacaaacaatcaaggactcaatcacaagtaccttccaagcaagcaagagaacggaggacaagtgtgaagtatggtggcatgcgtagctgatacttcagggccacattgactattttactaagcaccttgaaaaaattagaagcattggaagaaatattaatgaattcaatggtactcacgcagaagataaaactataagaattttagattggttgcattctcccatgtacgagctacaagatagaagttgctgccatataagagtgcagatggaacttcttagcatcctagcactttaagtaactaggttcaaggatactaacacagagaagaatgcgacagaattgcaacagaaaccaaccactatactaatcaggtataccatgtgttagagttaaaagtcgtaaatataaacaaacttgcctctctaatttagactaaaatgcatgtctctaacaacaatttttgaaatacatgtctaaccttggtgaactcgatatcaggaatcccgtttataagtttaacctctcccaatgcatattccagatcctgtattgttgttttcaagaatcataagatatgagaatactaacatccaaacacattcagctatatattaattgaagatacactacactatctgagatcagaaattatataattaccagagtaaaacgacgggtattaacgcctggcgtgatgacatccatatcaatcaacgattcaacaagacaggcccaatcaccatttacgatatgcacaattgatgcgagcatggcaagctgatgttttctttgcatccgacaaactaaaccaaagtccaaaaaccttgcatagagacacgtggttatcaagttaagatcatcttgtcacagtcagaattttctgagtaacgctgatggatggttaggagataccctatttgtcttgatgttgtgtaacgaaggtctccaggatgcggatctgcatgcaaaatacctgtatcaaggagttgaactagagttgcctctacccctttgttcacctacagtggaaattaaaagaaagctaagtcattagaatataaaatattctagcaaaatggtactaccaaattaacatggattataacaaattacgttaaacatgcagttcaatataaacaactgaaggcatcagtaagattaattctacttttttttcagtaactgcattgaagtatcatcacagtaaaattacaaacagtcacacacctttactaatgaacatcaaaatagaacatcatgagatgttttatcattactacaaagcatatgttaacctaccagatcaagaagacgccttctcgcttcaattttttgtttctcatgactctcattgtcatgatcagagtaaccagaagatattgcgagtagatcggttgggctttcaccaaccatccattccatggtcaaaactcttttgcgcgttagatgctgatatacttttggaacccggatataggaaaatcgtgcgtgagcttccttcaaaatgaagtacttcagtcagtcaaagcatactagatacttgctgtaaacttaaaccacaaaattaaggaaataacatagatactagcacgaacagagagtacattgtgaaggaacagcataacaacatttaaactttgattgcacaagctatataagccacaattttatgcatggacaaataatgagcacatcacacttagagggaacaaaagcgacatatctatcagaagaagcagaaagcaataatctttttttctgttgtcaaactttttttcattttgtgtttgtcaaactacagaggcattggcaacctctcaagtattatgttttctaaaaacctaatgccgagtacctgaaattcagaggcattggcagcctctaaagtaaagtccaattttccagccaaacccattccaagctcatcagcatatacacgaatgtcattttctctctttgctacctttcgcaatacacctaactgcaacaatcaaaaggaatatcatataacttatgacaggatttaagccgaattgatttgtcataactttggtgggattttaacaccaaacccccca

SEQ ID NO: 69177 - DNA, 520 bp, Arabidopsis thaliana landsberg
  unsure (1)..(520): unsure at all n locations
acattaattgatccatagagacaagtaacctcacctgaaagacaatgataaannnnnnnnnnnnnnnnnnnnnnngaggccgttttcatcaggagagagcagagaccagaaaactgtaaatgttcacagagagatattcaacaacctttcacagagacatataacagaaatctgcagtttatcgacatatgctcaagtgttcatcacctgatggttctcgatcattattgaccccggggcaatagagacaattctgcctgtgtaaacaacagatttattacaactcatgtacaagtttaacaatgctatataagtgacgtacattgcgtatgagcttacctcgctcatgtcctgagatacattgcggagatattctgcagacaatatttgaaaccatgctcannnnnnnnnnnnnnnnnnnnnnnnnnnnnnnnnnnnnnnnnnnnnnnnnnnnnnnnnnnnnnnnnnnnnnnnnnnnnnnnnttcacagctagtgtcaagccaagaaaacattcttcag

SEQ ID NO: 69178 - DNA, 438 bp, Arabidopsis thaliana landsberg
gacaccagatggatactcgttgagttatattcatctatagccaccaaacccattccttgctcacaagcggattcttcagcagaagagatattcaaatccatacagaaagaccatatcgaggataattcggcactcgagggacaaccagaataacaattgatggcttgccttttatgatgtgaagtagtagtagaattcttgtcgtcatggcctgaccaatcacagttttgacatagagaaaccctctcatcactacaccgtacaaaatctggctgtgcattacacgtgtgacataccaaagttcgtgaatgaccttttcatagagcattagcagaatgaacattacggtcacacgaaagacacaaacacgcctgcatcacatcgacaatacaccattgatcctttgtcaccacagaaatcacacatataacccattct

SEQ ID NO: 69179 - DNA, 576 bp, Arabidopsis thaliana landsberg
aacaccacggctgcgatcatgcgcggaacgcttttaattctctctgcgctttggtttctattttttcttatcggctcgtttggtattggttttgacaacctcctggatcgtgttttttcgcaccgtgtgcactcaaatgctggtttgttttggttcattctcgcggcgttgatcacttggtcagtcggatggctctgggcgaaaccgcgtcttttctcccgatttcgcaccatcgcttctgaacaataccagttgaaaaaaagcggcgaatagggttcaactgaagcatcatcatgaattgctcgaaattgctcgccgccttggctatcaatgttgctctggcactatccgccatgtctcaacaacctacgaattcatttccgctttggtcgaacggcgcgcccggcgcgctgggcacggccgataaagatgttccaactctcacgccatattggcccataggcgaggcgaccggtgccgcgttggtgatttgtcccggcggcggctacggtggcctggccgaacatgagggcaaggactacgctctttggctcagcgatcatggtgtggcgtgct

SEQ ID NO: 69180 - DNA, 755 bp, Arabidopsis thaliana landsberg
  unsure (1)..(755): unsure at all n locations
aacttncactcccaggcgtcgcgccaactccggaatcgtgtagatttcgttgcgactgacaaatccggatcgctcgaccggagacagtgaccgccggggctccggcatttgacaggggacatcagacatcacacaccccatttcaggctgtcgactcacgacgacccggagatcccgggtccgattgctacagacgcacaacttcgcgaagatttccggcgggcacgtgcgctgccgtccgaaggaccgaggcacgttcagaaatcgtgtcgcgactcgcccatgcggtgccggaaagattcggcggaaatgacagcatggatcaatagttgcttgtatctaacttatatagagaacttccaatttcaagaaattgtctctcctaattttgagattatctcaagtgatgcctggttgtctctcaaatgtcctatcgttgactattgctgcgcgatgcatccgcaaggcatgcgcagcgggatcgttacccgtgacatctttcggccccggatgacagccgggtctgcacaccacattctcttcacaattcccggtaaaacaggggttaaaaccgtttggccacccgcaggaatttccggctcgttgccacaacattccgcagggctgccagtcctgtttctgccgaatacgtcgagtggccgggggatgaaagcccgaaagcagggcccttccctgacagcagaaaccaccacgcaggggcaatgtaccgattgaataatttacgggagatgcag

SEQ ID NO: 69181 - DNA, 639 bp, Arabidopsis thaliana landsberg
  unsure (1)..(639): unsure at all n locations
ccccccccccccccccccccccccccccccccccccccccccccccccgannnaatcccgccccccccccccccttttttttcccgggcccccccccccccccccnccgccgcgccccgnattttttttttcccgggggggggggcgggacccccccccccccccccccccccnnccccccccccccccccccccccccccccccccccccccccccccccccccctcctccccctcccccccgcccccccccccccctccccccccccccccccccccccccccgcttttttttctctgggggggggggggggggggggagggnnnnncnccccccccaaacagcccaccaccccgaccccccaccccccccctcctcctccccctcctctccccccccccnccccccccccccccccccccctccccccgggcccccccccccgcgccgcgccccccccccccccccgcccccccccctctacccccccctccgcagaccccgacgcccccagcccccgcccactccgcccccccgcccccccccatgcctaccccccccccccgccccccccccgcccccccccccgtctgcccccccagccgctgccccccccccccccccccgccgcccccccc

SEQ ID NO: 69182 - DNA, 815 bp, Arabidopsis thaliana landsberg
tgcccaccatggatgatgaatactaactttcaaaactcgactcctacaaactgattcactcaaatgccaaaaaatgaagaatggatttatatacacctttggttttgatgagaatttcattggatttggggcggggaatatgaaattcttcgatggttataggcttattgggctctcgatacacggttccacgcatgaatccgccggggctcacgtgatacccacccatcgattgagaatcatcgccggaggctccggtttgaagagacctattggagagggcagagccaacggggagtcttgttaaagacaagaggttcttaacggcggaagcgcggcggagaatcggagcaaacgccatgcaaacacgacggacgaatttgatcggagatttgggcaacgaaaaagacagacacttgacacgatagactgaatctgttggacactttgattgaattacacgacgcgcttaatctgaatttaccaaatgagtctgcgcaggtggtattcacgcgccgatattgcgtgtggggatgatttgtatcaatttaaggatgtattcattgggtcaatcatccacgtgtatatcttatctacgaaattaagatattatatagacaattaggacggaatgctaattcccgttagttattttctataaaaaaatttaaattaaaataaataaaaatacactaaaaaaaatctttagtttcaaatttaaaatacgtgaaacatattaaatttatgacaccataaaatgtacagaccaaataaaccaaatgttaagtgcgtttcttttctatgcttttaaaact

SEQ ID NO: 69183 - DNA, 262 bp, Arabidopsis thaliana landsberg
  unsure (1)..(262): unsure at all n locations
acacacaccgaccaggctgacaaggaaaacccgggacaacaacgcgttcctgttttgccgaggcttggcattgnaagcgaaccggaaagcggaagcaaaccaaaaaaggccactcacaaaacagaaggcactctacgacaaaccgaaggtagcagaactgctcaaatttaaaaaatgacaacgacacacgaaccccaaagaggataggacgacaaaagggacaaaaggggaaagccaggccctaagaggcgacacacatgca

SEQ ID NO: 69184 - DNA, 289 bp, Arabidopsis thaliana landsberg
  unsure (1)..(289): unsure at all n locations
cctgtgcacccagacgcgatcattgcgctggcggcgtcgaccggcggcgaagcggccaccaaggaaanctgggatttaaaggtgggctggcttccgtggcagcgcccggggttcgatctcggtctgaagcttcgcgattatgtcgccgccaatccgggtcttcgcggtgtcatgctcgccggtcacggcatcatctgctggggggatgccgcccagtcctgctatgacaatacgatcgaactgatcgccgatgccgcgcgttatctgaacgatcggctcgcggcgggcg

SEQ ID NO: 69185 - DNA, 152 bp, Arabidopsis thaliana landsberg
aattcccggagacgagcttattctctggatttcttgaaatggcgaaacggatttggcttttgcattgcttggctctctcttttgaacgtgaagctgagatctttcgagtacctaaaggttgtagattctctgaagtgtatatgaagagtgta

SEQ ID NO: 69186 - DNA, 521 bp, Arabidopsis thaliana landsberg
  unsure (1)..(521): unsure at all n locations
aaggaaagttatcgctcagaaacgttggaggtggctggttaattcaaaactaataaaacataagcttcactattgactggttaaccaatgtacaatctctaattagctaaaccaatctaactaaaccggaatgctatatacaatctaatattcactaatgtaggcttcgagcagataacagaacagattctgaagaaagtatctcgacgaaatttaagagtgactgatgattttgtaacttttgagaccttatgatatgagctctgaatccctgaacaattttttgattggactttgattttgtacttttggtttagcaaacatagaaatttctatttggtttggttcatttcaaattggaaggaggaaacaaagatacttttgatgtcttataagaacttttgataaaatatattagtttgctcccaagtaacgtgtaacacaattaccagaacanaatgctatcaagaaaaaaaaaaaaaaaatgctaagccagcagagtaataaagctcaaacgagac

SEQ ID NO: 69187 - DNA, 560 bp, Arabidopsis thaliana landsberg
  unsure (1)..(560): unsure at all n locations
ccccccccccccccccccccgnggngcggcgcgcnngggtttttttttttggggggggggggggcccccccccccacccccaccccnnncccccccccccccccccccnccncnnncccnccccccccccgccccccccccccncccccccccccccccccccccccccccccccccccccccccccccggcgccggcccccccccccgaccccccccctttttttttttttttgtttgtggtggtgggtggncccccnccnnnnnnnaaccagcgaacacccacaccccccccccnnccccccccccccccccccctccccccccccccncccccccccccnccccccggnngggcggcggccccgcccccccccccccgcccccgccccgcccccccccccggcgcgcccccccccccccccccccctccctgtccccctcccgtcccggngccgcccccccgccccccgcccccccctcccgcccccccccccgtctccccctctcctccccccccccccccncgcacccgcccgcccccccccccccccccccccc

SEQ ID NO: 69188 - DNA, 449 bp, Arabidopsis thaliana landsberg
  unsure (1)..(449): unsure at all n locations
tacctcggtcacttcaggcacggagcggtggtgctcaaggcggatataccctttcgccaggctactggccgggtccaggtcgtggggatcgaaagcaccttcgtcaatcaacagaaattgctgattgggctggaagcgttcgaaacccggcggcgggnnnnnnnnnnnnnnnnnnnnntccaccggcgcgtgccagcgccgtgcaccattgtacagtaccaccggtagcacggcaggcaaacagggcttcccgtccggcttcttctccagtttcctgccgcgtaccaagtcctgatgcataaggcatgtatacgtcgtcacccgcagcgccatcatgcgctccaccgaagactggaactccagcaacatgtacagatacacccagtcctccccgcagtgcagccgccacatcatgtcgttgtggcgactgcgcacatcgtcggtcacat

SEQ ID NO: 69189 - DNA, 259 bp, Arabidopsis thaliana landsberg
atggaaaaatgtgttggagaggaatcatatatgaatcccacaaaccagtcaagattattagtcgacgcacaaagaacataattgggaattttttgtccatgaacactgatcgcgccagaactatgggattagggcaagatgggcttagtcaggcctgaactaacctcaaggcccagtcacttgatcctaatttatgtgatacaaagacggttatgtccctgatcaatcagatacatgagtatgagaaattatagatacc

SEQ ID NO: 69190 - DNA, 446 bp, Arabidopsis thaliana landsberg
  unsure (1)..(446): unsure at all n locations
ggggttaccgctggaaggcccgcgtaccctgaacgttctgatcttttaacatttcgaggatatccccgagccctggggcagcatcaagannnnnnnnnnnnnnnnngagatcgtgcatacgcaggatcgcaacgtcaagagcgtactcgtttacccgtaaaccgccggtcgatcgataagccgacgagcggctatattcacactcagttcgggcttgaaaatttctccattcggctcaaaatagacttcagatatggccagtaccaagcatgatgaaagtgtggtgtccgcaaccgacaccgcgcgccccaaacctccctccatgtacaaagtcattctgctgaatgactattacacaccgatggagttcgtggtggatgtgatccaacgcttttttggcaagatgtgcgaacaggcgacccaaatcatgctcaaagtacataccg

SEQ ID NO: 69191 - DNA, 398 bp, Arabidopsis thaliana landsberg
gataggaacccgaaacccgaagagacagcaatagaaagatcgccgagcgagagccgcggtgataggatatacgcggcacaacccccatcaggaccgggcgcactggcggcacacagggaaaagcaacacaaaagaacccggccctggacgaacgaggagtcataaggcaaaattgggagcacgagcccgcaaaccacatgcaactgcatccataattgggggagacgacgaggtaaacagactcacaaaaaaatgagcagctgaatagcctgagcaacaagtgaggggacgctcaaaaccactctcaccaactaccgggctcaaggaacattgaactacattggacgtcacagaaggccgggcaaaaatacagtccaaaaacccagcagacatgcatc

SEQ ID NO: 69192 - DNA, 360 bp, Arabidopsis thaliana landsberg
  unsure (1)..(360): unsure at all n locations
ccccccccccccccccccgcccccccccccccccccccccccccccccccccgcccccttttttttttttttttgttttttttccccccccncccccccaaaaaaaaaaaaaaccaccccccccccccccccccccnncnccccccccccccccccccccccccccccccccccccccccccctcccccccttctntgttcccccctcctcctttccctgcgcccctcccccccctcccgtttttttcccccctcaccccccccccccctctttttcctcccccccctcctctccccctctacccaccccccccccaccccctctcctcccctcccccccccccctcccccgcctttctc

SEQ ID NO: 69193 - DNA, 425 bp, Arabidopsis thaliana landsberg
gaacccaataagataacctttttttagttgtagaacttgtaacataactgcattgtgagtgttttcttggtttgatcattctgtttctgtttatctctactctctaggccattatcgagtcaagtcttcgtcatagataaatgctattctttgagtgatggttgctctgcttctgtagaaaccagtttgactaggtagatcaattggagtgtaatcttgattttgctcttgtacctttccttaaaactcaataaaaaggttatgttttttttgcattactctttagtgtaatcacgaagttacatcaatcgaatctttatacttatgttaggagtagcaatgtcaatgggatctgtacagatcattatatgggcacattgttaaatgttaaggaacataaaggattgttcttggattttgacggc

SEQ ID NO: 69194 - DNA, 2350 bp, Arabidopsis thaliana landsberg
aactcgaacatgttgtcaggaccccaaaggcttatgctggttaggccacatgctatgtcttcggagcggcaacagtagccatatctttaccagcagcagctacagcagcaacttctcaagcagaacttccagtcagggaatgttcccaatcccaattcgcttttgccaccacacattcaacaacagcagcaaaatgtgctgcagcctaatcaactgcattcatctcaacaacctggtgttccaacatctgcgactcagccctccactgtgaactcagctcctctccaaggtctccacaccaatcagcaatcaagtccgcaattgtcttctcagcagacgacacaatctatgcttcgtcagcatcaatcgtcgatgctaaggcaacatccgcaatcacaacaagcctctggtatccatcagcagcaatcttcattgccgcaacaatcaatttctcctctacagcagcagcctacacaattaatgcggcaacaagctgcaaatagctcaggcatccaacagaagcagatgatggggcagcatgttgttggggatatgcagcagcaacatcagcaaaggttactgaaccaacaaaataatgttatgaacatacaacagcagcagtcgcagcagcaaccactgcagcagccacagcaacagcagaaacagcagccaccggcccagcagcagttgatgtctcaacaaaacagcctccaggcaacgcatcagaacccactgggcactcaaagcaatgttgcaggattgcagcaaccacaaccaacagatgctcaattcccaggttggcaattcgagtttgcagaataaccagcactcggtgcacatgttatcacaaccaacggttgggctgcaacgaacacatcaggctggccatggcttgtattcttctcagggacaacagtcacaaaatcagccatcacaacagcagatgatgccacagcttcaatcgcatcatcagcagctgggtttgcaacaacaacctaatctgctacaacaggatgtgcaacaaaggctacaagcttcaggccaagtcactggttccctgcttccacctcaaaatgttgtggaccaacagagacaactatatcaatcccaaagaacccttccggagatgccatcatgtatgcttttgatccttttaatactttaggttctgatattttccataatctctcagcaggatatgatgttgaacatattttcgtttttataattcttagcatcgctggattcgacagcacagacggaaagtgcaaatggaggtgattggcaagaggaggtttaccaaaaggtagttctctctttttgtgtttgctatatatctttaccaattatggctacacttattaaatcttcaagtgatagatatcattgtaatgagtaatcatatgaccatattgcttgtctttgtagatcaaatctatgaaagagacttacttaccagatctgaatgaaatctaccagagagttgcagcaaagttgcagcaagtaagttacaattttcttttcttttttatactaggagaatcgtttgtacgtctatgtcctctggaacagtagtgagtaccttctgagaagctttatgaattcaatgcaagttcggttcgttattgcataagaacgtcatcaactttggagtcttgttacccatttaacaaagaaaaagaaaaagaatcttgagactcgtattcttacagtttactagaaaatcaacctgctgatatttatgtccttcccaaacctacagaagttgtagcttgcatctatgtatttgtttcttttttatttagtaagttatttttgtatctggagcaggattctatgccacagcaacaaagatcagatcagcttgagaaactgagacaattcaaaacaatgttggagcgaatgatacaatttctatctgtttcaaagagcaacatcatgcccgcattaaaagataaggtggcttattatgagaagcagattataggtttcttaaatatgcacaggccgaggaagccagtacagcaagggcagcttccgcaatctcagatgcagcctatgcagcaaccacaatctcagacagttcaagatcaatcccatgataaccaaacaaatccgcagatgcaatcaatgagcatgcagggtgctgggccaagggcacaacagagtggtatgacaaatatgcagagcaatgttctatcatctcgtcctggagtttcagctccacagcagaacattcccagttccataccggcttctagtttagaatcaggccaaggaaataccttgaacaatggacagcaggttgccatgggatctatgcaacaaaatacttctcaactagtaaata

SEQ ID NO: 69195 - DNA, 119 bp, Arabidopsis thaliana landsberg
tttattcgagaactgtgaataattagtaaaactatctctccaaaatcctcaagcaaacgttttgaaggagaacaagacgtatatgctactattgtacatcatactatatgtcctttctg

SEQ ID NO: 69196 - DNA, 265 bp, Arabidopsis thaliana landsberg
gaaacatcggaagaagaagatcgccgggaagattattatgccagatcccaacctatgcggaatcccagctggagacaggagaccaacataatcagcatgtcttaccaacaattcccacctactatgccttcgtggaacgacctctgctgggacaagaccctgatgctcaggtatcaagtgcttactaaggagagcatatgtcccagaaaattcacagccatccacagggcaagacctcggtggagcaatcatgaatcttcttgca

SEQ ID NO: 69197 - DNA, 663 bp, Arabidopsis thaliana landsberg
  unsure (1)..(663): unsure at all n locations
gaggactagcgcgaattgcgcgtgctgcacggtatcctggccgatgcgcagcgcatggcgatgcttgtggggaatggcgggaagngagtggaaagaagtgaggagtgaggagtgagatgaagagctgtaggctctctcgcctttttctatcgtcccgtggattcttggagacggtctgattgatcggtttttgcgcgtcattcctgcgggtntnaacggncgagtgagctttcgctgggatgacgagtaaaatcagaccttccttggttgaggcttttcagcagaagcgcagagcagagacgaggcgtgaggaagccggaaaacctcgcaagctcgcgggctttctctcacttntcactcctntccactcacttctcgcctagcccgtttcctcgtcgccggtttcttcgctcgtcggtgccggtgtgaccagcagcttgtcgatgcgggcgccgtcgaggtcgacgacttcgaagcggatgccgcgccattcgaagatttcgccagccagcgggatatgccccagcgctgtcatcaccatgccggcggcgggatggaaatcgtgctcgtcctcgccgggcaggctgtccacgcgcagcagttcgcgcaggtcgtcggtgggcaagctgccgtcgaccagccagctgccggccgcgcgcacca

SEQ ID NO: 69198 - DNA, 601 bp, Arabidopsis thaliana landsberg
aggccacctacacggtttactggagtgtcattgcccacgacggccaccacaccgaaggccatttccagttccatgtgaagtaggagccggctacgcccattgccatcgccctgagcggattggacatcctggcgctgcttttcgcgctcgggatcatcgcctgcggcttggccgtcgtgccgacgcgcgatgccgtgctgcaacgtactcttgcacgcgcccagggttgggccacgctgctggtcacattggccagcttcggcatcttggtgtcgcgcacaatggagctcgatggcggtgttttggcgacgctgtggacggacatggcgttggcgctgaaggtcacccattacggtcacatctggctactgcgcgtaccggcgctggtggccctgtggatcgcctgtggcggggcttggcaccgacccggcgcgcgctggacgggttggctggcgctgatggcattggcgctcatcgtgctgacgcgctccgacaccggccaccccgccgaccacggtgatttcactttcgccgtctggatcgactggctacacgtgctggccgccggcgcatgggttggcagcctggttggcatgacgct

SEQ ID NO: 69199 - DNA, 640 bp, Arabidopsis thaliana landsberg
  unsure (1)..(640): unsure at all n locations
agcgctgagcgtatgaattgttgcgcgtaactgaggtcagctgagaaaatgactttcgtttggctgctaacatttcgtttcggacctttgggttattacaaacattaaaacgatgattataattatattctagactatagtttttgatattttcaactatccaattatagtttaggtatattaaatcgaggaagtggaagtgtagtgattaaagaaactcaattgttagagaaaaaaaaactaaaggaattagagccacaattacaaactatccactttgttttttcgttttcaacgtacatcaacttacgctgcaaggcacaagtcataagtaggttattcatatacattgcttgactacaaagtttgatttgttttccctttttataacaatttcatatggtgcgatgttactattttgcctttaaacgcaaaaaagtaagatgattcacatctatagcagttcacttcatatgtttttttgttcaaaaaataaaaatcatgatgtagataaccttttctattagcatgctgattntataacgcgtttctttatcatagtaaacatataatgacgtgaaaaaaaaaagtaacatattatgacttggaaaaaaaataaaatgaaaagacctcaaaatga

SEQ ID NO: 69200 - DNA, 484 bp, Arabidopsis thaliana landsberg
actactgaacgaaatctaagaaaccccagtttttacatcttgagcccatcgaattccttgagcaattgtgttgtgattccgcagtcaacatatcttcctcatgagcaagtcatccacagtatcttccataactaattgtaatattgtgttttgatatccagtaaaacttgccttctatattgacaccattaatattatttaaaaacagaaccaatgtaaatagaatagatagcatgatcgaagacatatataatcagaaagaataacttctttgtctcaccttaaccaacctcttctatttaactgaaacactttatcaacatagaacaaatttggcacactgacattgggtggtattcactgcgatgaaaagcagaggactacaatgctgcaattaaaaattgactattccaaaaatgtatgctaataacttacaatctctctggagatatgcatcatttatgatccttcaatttcacgtgcg

SEQ ID NO: 69201 - DNA, 969 bp, Arabidopsis thaliana landsberg
  unsure (1)..(969): unsure at all n locations
tatttacaaattagatccatttattattagattatttttgttagctctaaaatattattattcgtgtaaaatgtttttgagataagtgtatgttacattaatagaaaaaaaaagaattcttggaccaaagttgactagttttctctgccacacgaccaaagtgacgcaagcaatgatatatagaaaagcaaatgccgccacctaaaaaaagacgtctaggttcaatgaacctaaatttcagctgcttcttttataatcccatttctctcaacaaatcttaagagaacacaaaattagaaaaaacacaacacaaaaataaaaaaaaacttaagaacattgtttcgagagatttggtttggagtgaaaatggcactagcaatcaacgtttcttcatcttcttcttctgcgatctcaagctctagcttcccttcttcagatctcaaaggtaatttatttcattttcaataccaaattcgtggagaatcttagaaatgccttgattggtcattgtgttttggttttaaattcgttcaaattcgatcaatgtcgaatcttattcaatttgtttgtttgattcttcaatacagtaacaaaaatcggatcattgaggttnnnnnnnnnnnnnnnnnnnnnnnnnnnnnctctgagtttgtccgggaagagatcctccgtgaaagctcttaatgtgcaatcaattacaaaggaatccattgttgcttctggtaagttctggtttgatttttcaattgatcattggttaatttgattaaggtttatgctaatgatcttgtgcttcattacaaaacagaggttacagagaagctagatgtggtggaagttgaagactttgaggaactagcaaagagattagagaatgcttctcctcttgagatcatggataaagctcttgagaagtttgggattgacattgttattgcctttaggtaatgaattgaatcattgagatac

SEQ ID NO: 69202 - DNA, 1814 bp, Arabidopsis thaliana landsberg
gatctgcagtgtcaaacaaactaacaaccctaagctttctttcgccaacaccattcatgatcgccaacagggtcggtccaccaaagcagctgcgcagttgttttagtcaattcactaactgtcaattattctttagttataaatccacaatatttaacatacactcgtacaagtatattggatgtgtcatgtgtgttgcaagaaatttcatggattcgtgtttctaaaagtacttctcgctttttaatcacatactagtatatcaaaaatcgcaaaaataagcatgtttagatggagagtaaaataataaagcaaaatattgtcacatatatattccattttgttcttaataaattgatgttctaacttttttaattttgtttcacaaattaagattgattttctagtttttttttctaattgaatgatattaataacttataaacttcaagatgcaataattcaaaataatgaaacttatcagattactattggttcacaattatataaaaatgttttgtaaaaaaatattggatataactaaataatgattatttttaatattatatgtgaaaacgctagaaaattattaagcttagtatagttattacaaatgtcgtgcccatgaggtaacatacatggagagtagagaaacacacgatatatacaaatacattaatacatatatattatataaaacatacatgtccaggataatatatacatgcaaacatgtttcttcttcacgctttcaccaacttatctttattcaaacagtaccatatgaaacgatgacgtctattacgataacatatgatctagtgctcgttctccgacgaccagagaaatgctccgatggcaaatttcctcttctcgtaagaatctccgataaccggcaagccgtactctctcagaagccgatccaattgccactctggcattttctcataatcactctttgtatactttggataatgaagtggaatctgaaagctacttgattgattttgaggcttgtcatgattgatcttcgtcgccgtctcgttcctttgatcctcaccatcttgatgacttctgttgtgaatggttgtattcgaaggaccttggctgaatttgattcccattttctatatctaaaaagggtttgattgtttgacaagacaactataggtttatcttgagattttagttagggcttgaggtttcttatgaggaaatgggagatgtgtttatataggcaaaacaatatattgtggataggcgaagaacttcgtgggatcatgtagatgcaagcacgtactagattttgaaattttcttttctttatttcattttttgatactatgttaattttattagttttgttcttttgtgtgttaatgtttgtcttttttatgtattttgttcatttgattcatctcggtcgtcgactacatcaaatgcgatataaatttgtaatagacaaatctaattctttctatatgtatgtctaaaagtatgtgtatttcacatacacttgataatgaataaaaataccatgacttttatatatttcattactaacttttaataacattttctcacatagtaaccaaatcacagctgctttttgacaaataaatgaaaagacacaacccgagaccccagttatctcgaccttatgtctcatggtttatgcctaaaacacctctaattcattggtaaacacacaaaccttcgtcgaaaataaaattgtgttttaactatgaattacagccccgtttttttttttttttagaaacatgtccaaccaagaacaaaaggttaaccggctt

SEQ ID NO: 69203 - DNA, 2563 bp, Arabidopsis thaliana landsberg
  unsure (1)..(2563): unsure at all n locations
gaatgaatactagtaagttgttaagagacagaccaaccataacccaacgtaaatcaacctcatctctttctgtatagatatggaatcgtcgcgggtcattttaacgttttctatatggagatgaacaccagaatgtcttagcttaaccttgctaccgatcaaagctgaaccacatgttgcttgaacagtgctgttcacgtagatgttgatcctgcaaccactttgactcgctatgtctacatccctaggcgacaccatcaccgcaccaacatttctcccgtttaagttgattccaccactgccagattcgggttcgggatagtctccgtcatcttccattttgggacagactgcaaaaatgagtctatcctgtctctccagagatgatatttgctctatatgctttgcttggttcttggggttccctaaagttctttactttttctatagccagaagcaaagtgaattattctacgatttgcataaactagattccttacccacccctaaattaaggataccgaaggcctcaagatgggttaatggacatcaatgtttcattactgggagataacggagtcgaaataccttcttgaccatgtaaaggaaacttcaaattaatcagggtttaacctctattgcatacagatgcatgttgatacgttttgtcgtaagtaaaacatacaacaccgagctatatgtaatgcaaagatgaaagcatatggctttagttttactcaagagaagtagtacatggagttcgaaacgaaccagacattgcataaatcctaagggaccaaccacatcaagaagcatattgtcccctctctaacttataatgatgttgatgtgtttttttcaagaacacaacatagaggaggacccgtttattattgacagaagtaaatgaaagtcatcaacatagcaaatctggtttccgcaatctcattgtgacacttgcatgaaaaaattagtccaggaaatgacctttgagcagagaagcagcatcaagggtagaagtctgttggtatcttttcactgacagtagaaccgaagttaggaccacccttgcgatattggataagaaactcgaccggatatcccttcaatttatgggggacaaggtccagatcctgaaacttcaaggctgaaatagccattgttgtacaataaaaagtgagactcaattaactcaaggaaaataactcatttcacttctatgaataatgactaaccgttgtcagatacaagtgtatcggttgtaagtgcattgatttgatccaggttgaagatctgaggagagggtaaggggaacgggactttgttcaccatgaagtctcgaggagccgccattgcctggaacagattgtgacatatgtgaaattagtattacagtatttcaagaggaaaacaaaaattctttggagtttcttccatggacagtgcacgattcgatcttttaccttggcaattggaaacggaagcttcacataccgaggccattcacgaatcatatcatacatgatctctgcctgcaagacatacttggaaatcaaacccactgagctaggatagtgacacagagaatgaaggattaaaagaatttaccaactcgtgagtggtaaagacatctggaccacccaattcatatgttttccccatgctggagccatcatcctttagagcagcaacaatcgcagcagcaacatcaaccacataaacaggctggaatctgcagtagagttatcgttagggacggaactaaatctacatttcaagttgctatgaaccagtgaaaagaattgcacaaagaattcaagacgtacttggtggttccaccacctatgagcgggaggaaaccatattttttaacgaacattgaccaggggttcaagattctgtcttctgtaccaatcatggttgcaggtctcatgatggttgcctacaaaacacatatatatcatgaactgactagaagcagcatgctgatgacaaaaagtttatattaaccatcccaggttcacttttgctttcaaaatttataaggttttagaatttaataataacatcatatacggttttcccagttctgcacaaaaaaatctaaaggatctttcttttctctgaaaaagaagcaggaccatgaatattgaataaaatattacgatgataataattacaacagagagagttatgtgtaccgaaagccgggtaagtatacctcaggcagtgcgttcaagacagcttcctcagcagcagcttttgccctcagcattcttgaaggagatgacacagaagctcctaggcaagaaacttgaatatatctcattatcccaccgtgttccttggccacctgaaacaacatatccacaaagtccaatctaatcagaaataaccaaaagagcaaaccatagcagatcgtatcatcccaaaggttaaaaatgtgtagctcattgcagatgtaggcaacattctgaggggtaaaaaaatggaaacctgttcaccggattttttggaaacaattcaaaagatgattcngcatttgtcaggattcaaacacata

SEQ ID NO: 69204 - DNA, 451 bp, Arabidopsis thaliana landsberg
tatctcaactccgcatcatacggaaaatctgccgcacactgacaatatatcatacaactagagactacgacgaacgcacgcgcacataaaaatcaaagtcaaatatcgatcatgctcacatcatcaatgacacaaccagacagaatcactggacgatctcaatcctagcacgaccctctgtacctgaggaacaccgctatactaaaaaaggcgtgtgcacaaagctgcccataatgatggacaacctgaacaaggaaacgagccactgctaagacatattagacaatgtcgagcatccgattgatcagcatatatacacgatagaaacaggcccagcagaatctcacggcgctaaccatgagacaggtaaacagacgagtatacatcctgaaaacctacacatgatatcacagactatacagggagtctacgacatgctttatcaagataa

SEQ ID NO: 69205 - DNA, 305 bp, Arabidopsis thaliana landsberg
  unsure (1)..(305): unsure at all n locations
cttcaaatgaggggatgaaacncnncccgtttggtaaatcattggcctttacgatcgatcatgtaatcctttcaattaggaagggggtcagcttcatccacttttacaatgataacctggcaacattcatagttcaaagggagatgaactttgtgatanttcttctaccttcaanaatcaatgaaaaactgggaacctttcgaattcaatcaagggaattcaacanagagaaaaatccccaaatttcaactgttgcttaccgtcttcaacgtccacatcatcatcgtcgtcttcgacgtcgtcat

SEQ ID NO: 69206 - DNA, 560 bp, Arabidopsis thaliana landsberg
  unsure (1)..(560): unsure at all n locations
gcgcggatagaagaaatgggtccggttcaggagagaattaaccgccgccaacttccgcactgacttttcgacggtaaaacggaaccggagatctttngagagatcgagagagagaagagagagagtggatgaattatcaagtatggcagagatggtctataaaaaggcgcaactggtatatactattggcaaaaataaatcgatcatcagcggaagcgcgcccgtaccgattggcatagtttaatctgcatcccagtgtaatacgcactgatgcgacctaagactaacctaaaagcatcatcaaaaagtataacctaataagtaaataggagagccactaaaacacatgagaaatacagtgtaaaactccactcactaagcaaataccctaatcagagataagacgagcaagacagcagcacagtaaccaaagtaccaaaccatagagtcacgctatgattaaacgttcctgtagaatgaacggccgaagtaactggatggcggcgaaactaacgaactagcacgatagggatagtcagaaacacggctctatacaacga

SEQ ID NO: 69207 - DNA, 612 bp, Arabidopsis thaliana landsberg
  unsure (1)..(612): unsure at all n locations
ggaataacaagactctatggctcaattccttccccaccaaaacccttactcgggcctcgacagggtgagagtatanggaaatgagcgtctcctttgnttgcgaggaggtggcgttgctttcaagtgaagaggacccgcagacggcataatttgcttatgttaataaggatatgaggtggtgggatgccgaatggtagtcttattctgtggagtcgatctaagtcgagctagccctagtatggacggttttgagtgccgggacctttaccaattctgatctacgataggggtattccagtggtatgttaatttgattttcctccttcacacaggccttccaatgtagattcttccaaagatatactgactaaaaggtatttatggattcggattggaggtcttgggaatgaaagtcttatagaggagactggcttcgtaagtaaaggaaattaattttagatagatagctcggagaagctggagaggcacggagtcgagaacaacatctgttctgtatactagtcgaccagaaagaagccgacttatccgacaaggctaaaaaagaatggtttattgaccagtttccacggactttcgataaccggcttgtgg

SEQ ID NO: 69208 - DNA, 963 bp, Arabidopsis thaliana landsberg
gatttatattttacgtatttaatttatctattttagaacttttttggtcattcccttcgaatggccaattgttgtgtgtctggagaagacaatatttgaacagttggaaattgaaaaactttaaaggattcaacggacataatgccaccataaatgcaaaaagataaggtggcaattcattaaagaaaagagagcttataaagataagattgctacttcaaaagataagtaattgatatagggaggagattggtgattagaagattcaaaatttcatattaattactttcaaaattatatacttatatataggtttcttttcttaaaggaggatatatatatatatatatatataaaggtggtttgtaaaccgttgatatctatagcttcaattttatttatttattttacaataaatggactagcaggagaggttgggtgatgtcgttggcctaccttattttgttcatcaattttttttgtttgctttcattttcaaagcccacgagaagattatggtttgggaatctcttagtgtaattgttccaactgctactcactcatgctttgatccgaataagtatgacctttttggccaattatttcaactacatttttataagcttctttaaatgaattaattaaagatgctaatttttcaatcattttgtagccactcatcatatatactcctttgtaactattaagtataactcacccatcagattcttatcttgacatatgtatctatttttttccatcatttctttatagtattttatcaagatgagaatatatgtatatcaagcttacgaggtttatattgaatctagatcagatcttgtaaaacaaacgaacaaaatgctgaactaatctatccaaaccgagcaaacaaaaatctatcagtaaactaaaatgggtttggtaagccccattctgaatttttaaagaccattgtctaaa

SEQ ID NO: 69209 - DNA, 752 bp, Arabidopsis thaliana landsberg
cccaaccgacccaatcacaccttactctcatcaccaccgaaactccgaccagaaatgactcttgcaacagctcttttcaccaccgtcgaagatgtaatcaacacgttcatcgatccaccttcacgtccttccgtggatccaaaacacgttctctctgataacttcgctcctgttctcgacgagcttcctccaacagactgtgaaatcatacacggctctcttccaccgtcacttaacggagcttacatccgtaacggtccaaatccacagtttctccctcgtggtccttaccatctcttcgacggcgacggtatgcttcacgccataaaaatccacaacggtaaagccactctctgtagcagatacgtcaagacttataaatacaacgtcgagaaacaaaccggagctccggttatgcctaacgtgttttccggattcaacggtgtaacggcgtcagtagctcgtggagctttaacggcagctagggttttaaccggacagtataatccggttaacggcattggtttagctaatacgagtctagctctcttcagtaaccgtctctttgctttaggtgaatctgatttaccctacgccgtccgattgaccgaatccggagatattgaaacgatcggacggtacgatttcgacgggaaattagcaatgagtatgacagctcatcctaaaaccgatccaataaccggagaaactttcgctttccggtacggtccggttccaccgtttttaacata

SEQ ID NO: 69210 - DNA, 1976 bp, Arabidopsis thaliana landsberg
tgcttagatcgatttaacgactcctaatgtctaacttgtggtaataagttcagttcagaaaatttgattaccaaataaaaatgtttaccctaatgatctctatttcaataggtttggtcaagatttacatattgattcttgttattagtcgcatcgtataacttttttttgtttaactggtctaatgataatagatctatagtttaggtacgattggttcttaagactcgagtaccatagaaaacatttggtctgatcgattcaaaattatgtgacgaaacgagtctgtctcaatagttttcattgccataaatgtcaatattgttttttatcatcaagtctcacccatctcacgtgaaacttgatcacaaaatttggacagacatatatatactcgaacaaatgtaaataattgtaccctttggtctcaaaacgaaaggataaatctacatctatgtcagtgtcactctcgttcgtttattgctttggccactcgtttgctttgattccactacacccaacaaaatcattcacaataatttcaaggttttcttaatactactaaaattaaaagatttaaatttgttttgagaggttacatttctaaaggtcgttgtatatgctataaatgacgttgggccatatccatatccatacctcatgttttgctcaaaataatgatgtctcgttggtcccatcactaaaacacaatctttttcatgttcctatttatttatctaaaccacaaatctttttctgtgcattaattttctttatccgttaactaatcattcatatttcgactgatagttgtctcatgatcttattaacaatgtatgcagtttttatgcttaagaaacaatattggcatgacacattgcccacattgtcatattcgagtattaaaactcagctcagcattctcatattagtatctacatcttccagctttgttattttaaaatactaatatgaagtagagaaatatattgtgttagatttataaaatttgatcactctcggaatgaatgaataatttataagatttattgccaaaaacagaagctgcatatttaaaagaaaaaaataatattcataagctttggtatgttttatatacatcgaccaccaccaaactatgtgtactttacttaaatgtataaagtgcaagtgtgcaacaacactatgcgttttgttttgttgtacgggacgtaattaataagacttaattattctattaactattttagttacctatatagttaaagcttattaaggtcactttccttgacaaataacccatggaatccgtacggaacccttcgcggcaacctcacggcggcgacgatttcaagctccggcgacttcgcatccatcaccagaaacttcgattctccagtcacttcatcgtgaacatacgtaaccacataaccattatcctcctccgcctccggattaccaggatccctagctacgaaaaacggttctccgccgtaacaacctgaaccgtacattctacgcgccactgtacaatcatcccgatctcctttagacacatcaagcttcaccacaccggagatcttcggcatcggatctccaatcgccgcgtaaacgtacctgctacgtctcccgagaaacgccggattaatcacagcgaaatcgagattcctcgctgagatcggatgacgtgtcacaatcccggtgacgagatcgatcgtcaccttctccaccaaagcatgaaccagatccatcctctctaaagtatgttcaatcgacataatattcggtgcaatcaaaacgacgctgtttccatcatcttcatcccaagcattaatggcgtgaatgatattgaatccaggaacttcaaaccatttcatctccgactcatctccggcgtactttggaatcactccaagccttggagtttttccgttatcagtaccaaccggagaaccaccttcgagaaccaaatccaa

SEQ ID NO: 69211 - DNA, 486 bp, Arabidopsis thaliana landsberg
  unsure (1)..(486): unsure at all n locations
tttttttttggggggagaaggggccccccccacacaaaaaaaaaccccccccccccccccccccccccccgccnnngnccgccncccccnccggnccccccccccccccccccccccccccccacccaccccccccgccccccccccccccccccccggctcccccgcccccccccccccccacttttctctttttttttttttgttttgtgccgccccccncncaaaaaaaaaaaaaaaacaccccccccccccccccccccccnnnccggtcccccccccccccccccgccccccccccccctttacctgcccccccccctcccatacggccccaccccgcccacctcccggcccccccccgcccccccccccccccgcctccttcgcccccgcccccccctcccccccgcgcggccgcccccccccccccccccccccgccccccccgccccccccgccccgcccgcccgccccccacccccc

SEQ ID NO: 69212 - DNA, 1826 bp, Arabidopsis thaliana landsberg
gaggcgactccaatttaagcctcattctctccatcccggtagctgttgagctatccaagaagctataaagatatttctcaagttcattgaagctctggactctccaattagaaccaggatctgagacctcaagatcatctgtgccaaccaaagaagctgttgaaagcttcgcctcaagagcagaccgtgcggacaccggatacaatatcacattttctgtattaagcaacttccgtgtattctctttaacaaatgaaatagcttcctcaagctgcagcagtaaaattaatctttagtcaagaaaaatccagtaattacagagactatcaaggaaaagacataaatattgtttctgataaacctcacgagcatcacgatagatatcagatttattcagaataaacacaaatttctttttccactgctgtgtgtaccggagaaacgcaacctgacaaacgcaatgagatgtaaatcagcctacagtaaaatcaagacagcaggaagctccagaggtagagatagaaatgacatgggtatgatgacattgagaagcttattccttcttttgaaactttttcagattttcaaaataagaaccaaatattcataaggttagtacttcgtagatgatcatttacatacaatttgccatggacgtaaaatcagttttgctgtaccaataacaactcacctctcaaatgtattggcctaagctttaccaaaatatggaccaacaagacatactggttccagcaatagctataacactcattactttgaaaataaattagtctagtttaaatttataatcaacaaaaccttgatatatgcattcaacctagtgacaactttcccttcctacacaaggtcttgatggtctatacatgacttaactaactactttcgtgaaaaatagatctaacaagctacttaggcagatacatattgagcaaaaacaacaacaactaacatgccaagtaaaacgataacttctacctcactttcagttaaagggcggtcagcagaaagaacaaaaacaagcaaatctgcacgtggaacaaattcttctgtaagacgctgttgcctttgaaggatcacattggtcccaggtgtgtcaacaatatttatctgctcgaaaggagaacaacccaaatcaattcctccaaataattagtaaaaattcaggactgcgatggtagaattttgaattactcacatccttaagtattggtgcaggaagatagcatacatattggccatctggatgtgtttggcaacgttgttgctcttcggattccaagtcagagtagcacagaaacgtgatttcattggtagtggggactaccccttctttcaggtatctcttcccaagaagtgcattgataaccgttgattttccagagttaaattccccctagtaccagcaaattgtggattccaattaattatccatacaaaaactattttgaatcataaaggcaacttgtcccacttaaaacatcttccaagaacggcatactcacaagtcacaagaaagcgaaaaaactatgtccacaagcagatggtacagttaagaaatatgcaattcccttataaccagatccataagcaaattaagaagagaagcatagacagaacaaaagaaaaagcgaaacatcatagtcataggcgacgaaagaagatattgagaagcactaaaggacaagtgactagaagcatgcccattgtatctcaagctatctagtgctggcaaaagtgtgtaactaaaatgtttctggaatgaatatagagctaataccaatgcaaattcctggaatcacaatttg

SEQ ID NO: 69213 - DNA, 459 bp, Arabidopsis thaliana landsberg
gggaaaagggaaaaaaccgaacaaacccacccccagagcccgaaagcaaaagatactcagcgacatccggcgaaaaaaactgcctaccaggcgccgacagaacgcccacagaaaaaaagaatgacacaaagcgcgaaaggaaaaagccgcagctgtgaagaacacagaggaaggagccgcagaccaaacacaaagagaccaggacctcgccaccacaaagcaagagtgagaaaaggaacaccaggcagcaccacaaaaaaagaatccccatcccacgccaaataacagccacccgccccaagctaaccggcccgacggccgaccaaaaaaccgcgcaccaccaggaaagagaccaggagaagaagacaaacgcggagagacacaccgacgagaagacaagagggccggaggaacaacagcaacagacaaggaaccgcgagaaaccaaaaaagggcaccg

SEQ ID NO: 69214 - DNA, 637 bp, Arabidopsis thaliana landsberg
tattcatttacagattgtgacatatgcacaagtgttgtgcattgttttgagagatcctcttttgttgtatgtgtaagacattattagttttatcgatcaaagtaattaaagtacatgaacaattttatggtatctatgttgtggctcagcatcatgtgtttaccaaatgttcacattttcttaaacatgctctttttcacactcggatcaacttattcaatcttaacttaaaatggagtatttaaaacacttactgagacaatgttgtgtttaaacagaaatgatatcaaacaactgaacaagcaaatgagagacacatatttgcataaactaataaatttttatgttactactcccaaatcagtccatgatggctaattctttatcctcatatgtattattcaagcagctgtataaacattaattctttgactcagaaagctaattaaaattttgatctttacagttttcgaaatgcttacctcaggataaataacatgagtcaataaggattgcttgaagttcaagccttcaaggtgttggactcaaatatgtgttggattgaagaatttggaagatcgtctctcattggggttaagcaattttgatcagttggtaattatccatcttttgggac

SEQ ID NO: 69215 - DNA, 694 bp, Arabidopsis thaliana landsberg
tcttccagcgtcgatgaatggtttacgccttggagtttgcgtgaggaagaaggaaactaaagacggtgctgttcagacgatgccgtgtagggtttctcagggttctgctgattttgaggagaccttgtttatcaagtgccatgtgtattactcaccggcgaacggtaaaggtagtccagcgaagtttgaggctcgtccgtttttgttttatctcttcgccgtggatgccaaggaactggagtttggaaggcatgtggtggatttgagtgagttgattcaggagtcggtagagaagatgaattacgaaggagctagggttaggcaatgggatatgaattggggactttcagggaaggctaaaggaggtgaattggctttgaaattagggtttcagattatggagaaagacggtggagctgggatttacagtaaacaaggcgaattcgggatgaaaccgagtagtaaacctaagaatttcgctaattccttcggtcgaaagcaatcgaagacgtcgtttagtgttccgagccctaaaatgacgagccggagcgaggcgtggacgccagcgagtggtgtggagtcagtttcggattttcacgggatggagcatttgaatctggatgaacctgaggagaaacccgaggagaaaccggttcagaaaaatgacaaaccggaacagagagctgaagatgat

SEQ ID NO: 69216 - DNA, 722 bp, Arabidopsis thaliana landsberg
atatttcacaagacttctaccaaccacaaacacaaaggttagagaactaacgattctaaaacgttgaacgaaaccataccgtgacaataaattagttgggaccataaaggttggtgtctctttcagagttgagagaaggccacgacattctaaatcctgatccaatcgcttcaccaactaataaattttctcaattttggacagacaaaacaatgaaacctatcgataataataaccacacaaaccccaaataaaccctcagcttccttatcccttcttctggggaccaaaaaaaacacagaagagcttcttcttcttcttcttctacatggcaggagaatattccggtagccggagttctaacacacagcttctcgcggaacttgaagctctaagtgaaaacctttaccagaaacctcaggtttcagttggaaacaggagaacaaactctctcgctctccctcggagttctgttccgtcgcttgttacctctgctgatgaagtgagtacagcacgagctgaggatttgacagtatcgaagccgcgggctcggcgtttatcgctgtctccgtggcggtcgagaccgaaacttgaggtagaggaggaagagaatgttactcagagcaacaggattgtcaagaaaccagaggagtcgtcatcgggttcgggtgtgaaggaagagaagaaagggatttggaattggaagccgattcgagggctgg

SEQ ID NO: 69217 - DNA, 593 bp, Arabidopsis thaliana landsberg
  unsure (1)..(593): unsure at all n locations
cgggcgagatcgcgggcaaggacgccggcccggagccgggacgcgaggncgccaacaccggcaagtattcgcacatgctagancacgcggngcaggacaacagcccggggggcagcgaggaaggacacgcaagaaccccgcccaacaaccgcagcaatcagaacggcccagccagcaagggctgccgcgggcagtcgcagaacctcaaccgcaaccgcgacgacatcaaggccgacgcaccggaaatgcgcgcgaggcagaagaagtggcagacgaggctgccgaaaaccctggtcgacgcgcatgccaccgacggcgccgactaccagtacgacctgaccaggtacaccgaagacccgcacaagcacgaacccgccgtggcgaccaggcagcagcagctcaccgacacggagacgccggccaacgacaagcgcggccatctcgcaacgatctaactggagttcaaggagggacgcgacccacgcaagggcaacgcgaacaacggcgccggcccacgcaacgccaccggctacgcggcgcagcaaaaccggcccgcgctgcagagcgaaacgcacaggcacaagcccaacagc

SEQ ID NO: 69218 - DNA, 577 bp, Arabidopsis thaliana landsberg
acctctctttagtctttgaatgattggtgaagagtgttttctgggaacttgccttaagctatagctagaaagatacacaaagagatatccatctcaaagctcctgatgtgaagagtgtttgttctgtttttctaatccaagtgagtttttttttcttcttcattttctggtttttgcatgggaattgaacaacatactttgttatattttgttttcttttgtgactgatggaactttgggtgggttgtgatgtgtaatgtatgctgatgatagtattatctaaaatttcaatcttctttatctttttttcttttgttgcattgattttgattctttttgtttgtatgtccatatcagattgggtataaggaatttgattgaatggacatgaacttttcttctggtggcctctgtttttctgggtttctttcttttttttttttcccatatatctatatatctaactaaatcactcaccagtcaccacaatgacaaatcctctatagaaaagaaaaaaaaaatctgatttttttctcctaagaaaaaaaaaactctcagacaacattttgatttgttt

SEQ ID NO: 69219 - DNA, 651 bp, Arabidopsis thaliana landsberg
  unsure (1)..(651): unsure at all n locations
aagcatgtggtttaagcggaaaccccgctacctgaaattctaattcgaggactgtacttgttcgaagcatgtgtaatgtgttcatattctaaacttatactgtatatgtttttcttgagcaattaactaatattctaaacttagttattatataattttttgtagatagcgatagacatnnnnnnnnnnnnnnnnnnnnnnnnnnnnnnnnnnnnnnnnnnactagagtgattgtttttaatatctagattttagaaaaccacaatctatatttggagtcttgtgtaatatatttcattcacaatataagctcaaaacaaaaggagaacaacaagaatattttttgataaaaagaaagaaagaatattagcgatagtatttagtttgagatggcttgctgcagctggattagctcataaaactcactttttatactaattttgtttttgttgaagaaaacacggtttggagtcttgaacccggcccattgcctcatagcctaatcctttcatgcattaccaactcatttgattgttaaacttacaatcctaattaatcctcaaggtgtttacaaatagtagtcataatatagtggtataatatatttttcacttcattcgaaaatataaggaaaacatatatatctacgct

SEQ ID NO: 69220 - DNA, 545 bp, Arabidopsis thaliana landsberg
tacatgctcctttcggttattctggtttcctatttttatgttgcttgcttattcttagataagaaatctgtacaggttcatttcttgattcatgtgtaaacaaagaaattttgtttcagcagttttccacaagccattaataataaaaaggagagatagtttcatttttccagaaattttatttgaattatctcttatcaagcttcaaagcttaatctcttggttatcagtgacttatcagttatcaatcttccaaacataacccaaaaagcggaccaaagataatacgaaaacgccaagaaaacagaatttattttggctctaaccaaaacgtactaactttttatttgagtcagcaaactttcgactccaacaacttttttactattttgaatatatgaaagtctcaatgaaaggaaagtactctgtttccggttatgcacataaaggttccaaggtacaaatgacaattatatatggatgcaactctgcatccttttataacttacaatattttgcatcatacattgaaaccactccttacc

SEQ ID NO: 69221 - DNA, 1897 bp, Arabidopsis thaliana landsberg
caggccaagaattctagttttagcgacggcccctcatgttctgctcaaggcgccactgacaggggattgttttatctgcttgaaggttttctcgcagctcttcagttccaaattaagatcagggacaaacttgaagctatagcttccaattttgagtcctcggttgccatgcaggactctgaccagaacgggcaagtactggatggtgattctagtgatgataccaacttagcaaatgcagcaaatgaaatggccatggaggtctcctcggaacttaaaagtgtaacacagttgtataatgagtatgctgtcccatttgagctctgggaggtgagtcttaaaatcataaactatcatctttatatatatattctcgttaatcaatgtatttttggaccatgtttctgggtaactggttttctagaagtaaccatagaaaaaggagagccactattcctctatagctgtaacttagctgatattctggaaattcgtaggttctattcatgctaaacgtaacttaaagtcgataatgactgttttaggtcatgctgagaattgttgcaccagtatcctagtttaaaattggaaaatcataagattaaactattgaattggaaagattcagtgctagtatagtcgactctctgtgtatgcttacattgcttgtttgctgttctggcttcactctgtgcagatctgtctggaaatgctttactttgccaactattctggtgatgctgattcaagtataataagggaaacatgggctagactcattgaccaagctctttcacaaggcggaatacgtgaggcctgtgcagttcttaagagagtcggatctcatatataccctggcgatggagttgttttaccgctggatgttttatgccttcaccttgagagagctgcacttgtaagcccatccttctagtagagttgttgactcatttcattgggttatgaactgaatttgagtgcatcttgtggaaaattttacaggagagatcagaaaggattgaaaatgttagggatgaagacatagctaaagctcttctagccgcttgcaaaggcgcagctgaacctgtgctcaacgcttatgaccgattattatccaatgcagctgttgtgccatccccaaatctaagaatccgcctccttcgttcagttctagtggtactccgtgaatgggcaatgtctgtattgtcagacagaatggggtcgagtccaaccaggtcttctctgatactaggcggctcgtttgcgctagagaacaaagctgctcttaaccaaggggcacgtgataagattgcaaacgctgcaaacaggcaagtttgtctctgtcattttgtttcgatttggtctgcttttcttgcccacccctaatttttaagtatactttaaaatcaagaatctctgaaaacacgaagatatgtctttttacgaacaggtatatgacagaggttaggagactagctctgccaccgaacaagacggatggtgtatacgcaggttttaaagaacttgacgagtctctcttaagtccattctccttctgatccatcacttttttctttctttcttaatatgcatccaatttcacttaatagggtttagcggctttcttgtaactttaaattgctctttggggaaatttccccttcaaagagaatcaaaaatacgaaaagagaaaataattctgtagttccctcttatattcggggccttgtctgtcaattctatctgtattatgtaatttcttcatcgaggtgttgttgttggctaaatacttcttgttttcctttagtttttcctttaaatttagttaacttattgtatttgcatgctaaattcttacaaacttgaaaatgatgtatcagaagtttttaaagaaaac

SEQ ID NO: 69222 - DNA, 621 bp, Arabidopsis thaliana landsberg
  unsure (1)..(621): unsure at all n locations
cacccacaccacttgcaccacccacatccaccannncnnatataccgttatatgancncgagaaaaccccgacggaaggggccgggcggagcccagcgaaaaatgcaacgtccccgccaccgccttctttttgccccagaaggtaaagactcagaactctctgcgcctactgcaccatcagaatctgcagttcctctccgacgttacaatcggcaatctgatctactgactgacatgggtatcatcaactactctatcgactacataacattccgctcatgtccctactacctacaagcaggcagcagaactcgcatgttggcgcaaagccatagatgaagagctccaggccctagaatcaaatcacacccggaggccctcaactcccagacagctcgaaacacatcaaaccacgcaccagcgtcacaatccatacagagatgcacgaagacgacaaacgagaggtgcctccgcttcctggtagccaggaggaggccgcaaagcatataaacagactcctcaagaagaccacgaagaaatccaccgggaacgcccaccagaagaaaagacccaaagagaaagggcggaacagccaacgggggaccgaacagcccaacgggg

SEQ ID NO: 69223 - DNA, 1004 bp, Arabidopsis thaliana landsberg
cctgtacacatattcatagaattatttgagaatacaaatcatagcaatatctgtcaatccatacttcgccttgttctattgtaaacagagcatatagattcacactcaaattttgaagttcctataaacctaatagagcgaaacagtagcaatcatctctatggagcagttctaaaacaccaaatggggtttctttcctaatcgtactcagcaaaacccaaaaataagaattttcaaacttacttgctctagtctcctcatagacagattcggagcgcttaaaatcgacaatgtaacgccgaaaactaaggatctgagcactggaactattggtctcagctaatctccagaggggcattcgtatcgaaatagccatatctctaacaaaccccagagccgaatccgaagtggcatgaaaccgtgggagagagttttctctatccaagtaaggcgaatcaatacgcggctggcaagaacaccataacccaaacgagatgttccaaaagtaagctcgcagagctcgattcacaaagcggcgaatccaccttgaatctgaaatcaaggttttgaaatcgcgatcaaagcttcgtagaaatggttttggaacgtatcgcggatccattaggccgaagaacgagacgagaactcctaacgattcggatggatcgataatccgacccggaatccatgtattcgaaaagctcacgcttacccaaactagctcccctttcttccacatctttgaatattagggtttaagctttctctctgatatcatctctgtgacaagacaagagagaagaaagtgtagcgttgcctgtaacgtctcctctagaactttttctactttaattgaattacacttcatgctgttttcaactctcagatactaactacctgccatttaatcaacgttttgtcttcagtaaagacatcctgctgttgtcctacttatagagaaaacttcatgccgcttcatttactccgccgttgccacaaaatcc

SEQ ID NO: 69224 - DNA, 1695 bp, Arabidopsis thaliana landsberg
catagtcttgaacctgttggatcagacttgggttgtgctttggatgacttcggtttgaaacttatggtgatgcataccttgaattccactgagaagggactgttccacaaagacataggatcaaaatcatcatcatttcagcagttttatagaataaactaactagagagtcatttgtttcaatcaactgcctaggtttatagaaaatgaagcaaagaaacttaccctgcgaaaacggaaggacacattaaaagccgaggtagtaaaacgtaaatgggtagagtcatgttacggcacacatctccatccgcaatctgaacatggtctaaattagcaaagcattttgatattacaattactacattaacaaaccagaatggtcattttaacacctgtgtagactgaatcaaagaggtctcagtgacaatcctttcccctacaattatcgactcaactcggagtaggtgaatgtcaatagaagtaataggaactgaagatgcttccactgttaactcaccactgagtggatcctgcaaagagcattgggtggctaattttccagtaactcggaaaccacccttgtgagatcaattgtcctattagttttcacattaagagatgatatctccgaaactggagtgaaaatgttggaagaacaaacctgtcttaatataggcagcaacggatgtctctgtgtgtcttgagtgatgtagaagatgacaatttccggtggaataggccgctcgggaaggtcaacttcaaccaaaaaccaaggaaaaacatcacaaaacaatccatgtttattctataaacaccaacgaagcaagacaaagtacctctaccgctctcaataataaactccattgttgcagacaaaggtttgtgcaagtatcctcgcggtatatctgcagttagtagatactgtcacagatttttgcatcaatgttttcccaattcacagacaaaaatcctaaaatccttattaaaaaaagctgatcaaactactgacttggatgttgatatttgttccatgaaatgtctcatagaacttctctacaatgccttccccaggctccctcagattcaaagagaatggtatctacagcaaaaaaaatatccaaaagcttagcttactcaatgttgcagctatatgtgatatttctcaatgggactatgttctttacctctgtagttcccggagggattttgccagaagacttaacttcgatcgtcttcttgctgtggccaaaattcgaattatttgcttaagctcgagtaatttcaacatcaaggaatcaattcaagaaccagagaagaaataaatgcttacacgatttgaataggcttgatgacaccatagaaggactcaataactccagctgatcctccacgaacctgtaggagtgaggaagaaatttaactaacttggtggaaccaaattgaagaaaagcttcaatagagagagaatctgaaacctgcaagttgactgatccattgacggataaacgtattgcttgatgcgaaatcgaagttgcagattttatcacaatttttccttccactggttcctgattaaattcaaaaactagagatttcaaattcgtcttcaacgtaatcataattcataattaagagattcgatacatacggaagagcgatagatacgatttgatcgagaaagtttgacattcaccg

SEQ ID NO: 69225 - DNA, 2713 bp, Arabidopsis thaliana landsberg
gtggacaaaaactcaatgaagaagaagagaatagacaagggtaaagcttaaacgaagaagtatggagaggaggacgaagaaaaagataagcttgaagagtagaagaagacattggagtgtttagggttttttgaatcctttatcttcttcttccttcttctcttactctttttatttcagagcaaaagagaagactttacttggagacttgggagccacaagatcctcctctctttatctttctcttcctgtgttttttttttcttcacttgagttaaaaaaatcttatccagtaattctaaccaatgtttcacaaaatttggccaataataatttttcacttgtacatgattagacagagttttgataatgaaaatgatatggtgagtggcgagagagagacatagatagagaaatcaagagcttctaatacatttctcaaatggttttatccttaaaaaaacatcttttggacacaagtacaagtgttccaaactttaaaaaacagagctaagagaaataaagagagagattaaacatctttctttgtcttcgacttttgagggactttcttttctctctctaatgcattggaccaggaccaccataatgctgtggaggcatatgaccacccggaccttgatgcattgagcttgaagatggtggtgccatgtaatgattgtgaccaccaccacccattcccatagagccttgccctcctggttggacccatccaccttgtggctgctgctgctgctggtggtggctcccacctgctgcgtggtattgctgtggattgccggcgtatggattctgaacgggttgttgaggcattggaaccggtgggttgggcattgtgtagtctctgcttctatcgttgttcacctttatgctgaggtcggtgtggcgtgaataagtaatgtggagcttacaaaaaccaccatcgtagatacaatgtccttccaatgcttccttcgccaccacagccgtttgaacatctggaagaaacccgccagagtcatttgagaatttgctctttacagagatcaataataactaaaacagagtatatcatacaagatgttacctgagtattggatcagtgcctgtaccccaccattcttgtcaaacattgcaatcttttgaactttcccaaaagccgcaaaaacctactcgtcaatatacaagagaagagaatcaatattttcagaaccaaagtttcaacgaggttttagaatagagagccagtattaccatgtgtaaaacatccaaggttactgcatactgcatgttttcaatagatgcgagaagaacattactttcaggttccatcttcttcccgtctacacccacagccacctagtaagaatgacacattaatctttcactttagtaactaaaccaacaaatgaagtctgcattttttcatgcatctctttgtataaaataaacatcaccagtaagagattcaactaagtagaaagcagatttacaatcataaatgcattttccagtaagagactgatctcaaattgctcacctgaccagtactatcaatggctgatggagcaacgggaaggtaaggattagtatagtccctgcaagatagagagtaaacaattcagtaattttggtcccagaagtatgtcaatcaccaagtaaaccaaaacatgtttcaacacaaagtgtgaatacacatacatacctgctccgatgactctgaaatttgacagtcagatctgtatgagctgaatatgtgattttaagtgagcattgtcccacggtctcagcgagtagatacctaatgcccagaaagataagtcagtaaacaagtatgcctctaacaaacatatagaatcttataacgcaaagcctgtatggtttgtgataaaataaacagacgatgtttccaagaattctacatggaaaaacaatcctaatctaagtatctaccattgcctacagtattttcccaggttcctacatgaaaagactcgttacaaattcgttttcctacatctattaacgctattagccatacatcactagggaacaagccattagtgctaaaactccaacagacgcttgaaaggctccaaatgtcagaccctccaaacaaatatctagaaccatgcagcccttcacagttagactaaataccatgtcaaaaatttaatacaactgtcacctagggatgcttcttccatcgagggcaagttttgcagcggttgcagtttctgcatcagtaaattgaaccagtgcctacgagcaagtcagacagtaaacattttaagtataatagatattaacaataaaatacaaagcaaaatagcaaattaatggcttggaacatacttggtatccggctgtcttctcgaaagtagtaatcttgtggacaaacccaaatgctgagaatacctgcatggcaaaccagcaattagaacaacaaagaaaaaaagagccagaagagttaactataaagactccagtgtagcatctgtaattattttgcccttcagcaacattccaagaaaactttagttaatgccaactctctaagtataaaattcatacagcatgacaaaagttaagatagcaaattaaaccaacataatatgacgaaacaagcttgatttcaggttacgctctctggaaggcataagatttgtcttccaacatatcaaacaatcacattagacacaaggaacagccc

SEQ ID NO: 69226 - DNA, 234 bp, Arabidopsis thaliana landsberg
  unsure (1)..(234): unsure at all n locations
ggacgccagacaccccggagaagcgaaaccggggggaaacgaaaaaaggacacaggacccccgnaagacggagtgaaagcgaacaccaccgaccgaccaccccagcgggaactgggaagcggcacgcaagggcccgacacgcagcccccgggaagacccaacacggagcaacgacagagccacccatccgcactaccaaacgccaccccaacaccaagggcaccgggcccggca

SEQ ID NO: 69227 - DNA, 585 bp, Arabidopsis thaliana landsberg
  unsure (1)..(585): unsure at all n locations
tggcgctgcggatcgtgtcgggcttgactgcaccccagatcgcgcgcgcgtttctggtcagtgatgcagccatggaacagcgcgtcaggcgcgcaaaaaaacgcattgccggggccgatgtgccgtttgaaacgccgggcccgattgagcgtgcggaacgcctggcggcagtggcggcgatgctctatctgctgttcaacgaaggttacagcagtgccagcgatccggcgcgacggcctttgtgcgacgaggcaatccgcctggcgcggctactgttgcgcatgtttccgaccgagccggaaatcatgggactgactgccttgatgctgttgcagcaggcgcgtttgcccgcccgtttcgatgcggaaggcgaagcggtcctgctggaggatcaggaccggcgcctgtgggatgccaaactgattggtgaagggttggcgctggtggacaaggcgatgcgccacaaccgtgccgggccttatcaggttcaagcggccatttgccgcgtgcatgcgcgcgcgcacgctgctgccgtgaccgactgggaaaatatcgacgcgctttatgcngcgcttgagctgatgc

SEQ ID NO: 69228 - DNA, 455 bp, Arabidopsis thaliana landsberg
taaaccaacggctaagtaccagcacaagctcacaacgggaacaagaatgattgaaaaccaatactctggtagacaacgcgcaagctagattcgaacttgagggggggcacatatgagatcagggccagagggcaacaaacaaaaacgacctggcccaatacagaaaatgggaaacacacgacaccgaacgggagcacgaacaaaaaaaaactagcaccaaaaccgacggaatggtcgatcacgaacacaccaggaaaaaaaccagcgggaccggcacccaggaacacggccaaaacaacggcaagaacaggaacaaaggaagcacccacaggggatgcggccaaagaggatgactcggcccgtgaaccacctaccacacagacactggtagagggcagacagggccaagcggaaccaagaggctgaaacatgagacgggaaatgaaaactatgag

SEQ ID NO: 69229 - DNA, 1328 bp, Arabidopsis thaliana landsberg
aaaatgagcacgagtatattttattgtcgtgaaagtaattaagtagagagcgagtcatgtcgtgttataaatgttgaaactacaatcaacctgttcagaacttcattatacgatgaagtacaattttatagtcttttatattatgattttattttcgctagtaggaaccaaatcggtaggttgaatgaataaatatagatggcgacttaatcaccactatgctccacacgctctcatatggtacatgtgcatacacacacgtctcagtttcatgaatcgtttttgttgaagctactactagcaacttttcttttatcacgtggatcctacgtacgttctaactcccaaaatttcaaaaatgtcggatcttgggtaggaatgagacaacgcttttaatatttcgaggtgatttgttttttaacttcactagatgtcgaagcaagtagtttgaagaataaattctgtatagaataaggacaaaagtatgaagtttggaaacgctaagttggaagctgaaaatgaactcttcccttgcttgtgattcactaattaagcaactttagtttgattcttgttaatttgggtaattctttcagtaccacgctaaagaccaaaagtcaaacacggatgataatagtaaggataatataaggaaataccaagggaaaaaaaaactgaaatgtgaaacacatgtgacagtttccaagatttgtggaagtttcgtaagctagtttctatagaagatttttgttcctatcactaaaatggcaattgcagaatctatataataatttcgtaaaatctttacaaattttaaaattctgtaactttagtttgctatctatgtaatgtacccctattatacgtaaacagcaatgtaagttatgtaagaaataatgtaggttaagaaacagtgatgaatgtaaaaatgtatacccaataaggggcaatgataggagcaggagcggcaaaaactggctcgttacggataagcgttggaacggaacgggaagacgaggaggaggaagatgaggaagaagaagaggcgggtgggaggcaagcgacggtggaagaagtacgaagagagagtttctggagagaagattgagaaggagaaagtgaagtgagaaagaagccggagagaggagcggtcgacatttgttggcgaagagaagcggagatcagagagagtgagatatgtgtatttatagttagaactaagactcttatggaagctactatatacttaagtgaataatgggattggttgacagatttgggagtttacaagaccggagtctcatggtcatggtgaggctgtgggacga

SEQ ID NO: 69230 - DNA, 369 bp, Arabidopsis thaliana landsberg
tattggatttctaaggcttgatgaaccgtccgccgcgggtccttcttttcatgtagggataccccatgtaggggcaacgtgctttgttgcacgaaacatactcgcaaaccttgctagacagagggatgatggacccgaaataggacacattccaccaaaatgctcgacaaggcgcgctctggtcaaaattgggagtcgacaaaaaggcagtggacaggtttcattggactgcctctgtcgtaacagggctatctttggggtttccgacccggtgtcacatgccaaggatgtgttcacggcatagaagggatgcactcatgttgtcttaaccgatctggcctctcggtacagtgggatgccacacgagga

SEQ ID NO: 69231 - DNA, 1317 bp, Arabidopsis thaliana landsberg
caccaacaccactatcgttgttctctttactacactggtaaaacaaatactaccttagtatatggccctactggttctggtagttttctgtgttaagatcaaaagaatgacttctttgtcatgtaacaaaacaggtctttggtttcctcacaaaaccacttgtgaattatctccttcctcaagatgcaagtcacaacaccggaaatagaggtaaacgcactgagccaggttctccgaaagaagatgcgacacttcctcttctttcctttgacgagtctgcttccaccaacttcaatagagctaaagatagtatttcccttctgatggaacaacctgtgtacaccatccaccgctactggagaaagtttgacgacacatacatgaggcctatcttcggtggaccttgtcgagaaaaccaaccagaatgctaggtataccctccattattaccacacaaatttatacattttgcagcaaacgcacctcacttgatcaataatgtgtaaccggaattaataagtacatccgggaagaggtgcctacaatattcatcatgataagcgaacaattctctctttttgtgttgcagaattgatccgggttctccgcggggaaatcatgatgagttagtttttttgatagtcaagaaagtaggatagttggtttagctaaaacagtttcttaaagtttttgttaaatgtatacaacaaggttcttctatatacacaagctgcgattattactgcgagtttgtaatttatttggatcggaacataagacatattgtaagacttcagatcagttgcaggacaagttcgagtgaagtctgctagaacggtctgtctccatctcagttcctcaaagctgcacttacagaacagcaaaacgtaagccttttttacttcatacttcatattgggatcctactagtctaccggtttttagtatcttaatggtattttgattttaccttggcaagcaggagggattgttgtcaggccacatttgctcagaagagcctggactttagatgggtaaaccgctaaaacggggagaacagacttgaatctgcagatgcatttcagattagcggcttggaggagttcacaacactctttgattggagatggcgggttgtctccaattacggctggacgacatttttccagatggtttgcgttgatgttacatgcggtaatgctcgtaggttcttccatcaacaccaaggcggctaaaactattgcaagagctgcaaatttcacaagggttctggtattgttcgtatccattctctcttgactattccatagacttaga

SEQ ID NO: 69232 - DNA, 1588 bp, Arabidopsis thaliana landsberg
ccaaaatgagatataatggaaatgttactaattcaatgtaaaagtaatacaatagagattagagataatatgaatgtgcaaagagaaaaacctgcttgaaagccagagcaattgagacagcacctcgcattagacctgcccaccaaatgatcacctataaagtatacaaagagagaattatataacagaaactttcccattctcggaccattattaattttttattttagtgcttctgataatgtaactgtaacaaacaagagctaaacctgatgcttaaatgtgatagactcgtttctttcagtgtgcctgttcatgaaatttgttaagaccgagagtggaaagacaaatgctgctcgtccaagcaatactaatgcggttatgacaccggagacacccagagtacccccaaagctgcaagaagatgattaatgttacaagtcttcattgggaagagatttcagaaacaacgagtcaccaccacagcttaactaacagttaattggcgattaacttcgtgtcaagagagaagaagacatagaggatgtctttgggataatcttgattctaggtatgcatttaagaaatacacgaggttcatatcaaaatgctgtgtattgttttgacaaaacactctaaacgctctaccagctgataaatggatacgactttataccttaagctgcttgtcttccactttgtaaaatcaagagcatctgttccaacatacagaaatatgaatgtctccgcaataaaggacaacattgcaaatacatgcctgcaaaatatagatgcacagtcagacaaaagcaattcctgcaaattgagacttcagcgaataaacaattgtctgatacattgcctggaagtgattcttgagctctctgtcacgttatatgatgcataatgcgacattaaaacaccacagaagaaaacagtaagaattccacttaatgagaagagctgcaagagaacaactatattgagttaaaacagagaaatgcagcacttcaattccaaatgaaaactaaaaagtagcgttcatgaccagtgtattacctcagccaacatatatgaaaggtaagccattagaaccatgatggcgagttcgcgtgtagtagaatgtctgtcagcaaccatataacaagatcaatataaaggcacatcttatcactaaaaaaaaaaaacttaagcttgagatgaaaaatttgcaagtttggtgtacttttaccttccaaaatacaaggttttaagaacaaaagatgttattagccccacctgcaagacattcacagttctaagattactcatgatatgcttcaaacagagtaaaaaactatgccaactcaatagcttacaccaattccgagaagtgtgcttgttgagaagaggtacaaaaagttcccaaatacttgcagcgccgtccaaccggttaggctttcaaattgaatcttttgcacggcgttgaacagtacaactgaggttgcaatattcaccactccttctccaaagactaagctgtatagcaatggtggttcatcttgatggagaatctgtaaagtttaagatgcatgtaagaaaaactttt

SEQ ID NO: 69233 - DNA, 1717 bp, Arabidopsis thaliana landsberg
atggaggctttgtcgatgaaggaaaaatatgtttcagagcaatgatcaaagagtttggaatttctccaactttacagcattatgcacttatggttggcttgttgggaagagcatgtttatttactgaggcattgtatttaatttggaagatggatataaagccggattttgcagtatggggtgctctacttagcgcgtgcattattcacagagagttggaggttggggaatatgtagctaggaaaatgtttatgctggattacaagaatggagggctgtatgtattgatgtcaaacctatatgcaacagaagcaatgtgggacgacgtagttagagtcaggaatatgatgaaagataatggatacgatggttatttgggagttagccaaatataataatttgaatctgtgaaacaacagaacaggttacttatacgttctgttaatacctcagtatttttacctgattgctttgcgatggtgaggagagttaactggagtgttcgaacataatatttgttgttcaagcttcattgatgaaggtttcttagaatccttgataaagccttgaagaatttattatagatcatcgaccatatctctatccggctgaaaacgagtatagaaactagttgtgattgatttttagatgacttcttgtgggagctgcaaatacatagaacatgcaggactacttagagctattcactggaattggtgaccaaggcgctccagttagtgtcctactgtccttgagcataatgtgagttttcttactgtcctcttgagttcttatcttcgaagcttgaattgtatgtattctaaaagacctcaagcattgacaaaagcaagtatatgttagccctttaaagatattagaatgatttttcatgttctagttttgttttcctggctagaaaaaacattgttgcaactggtgaagaactctctcagcatatgcagactcaaaaatgttgtatttgcatatctgttgggttcaacatacgaatttgatggctaggttagttacataggtcattctcagaatgttgcattcatatttagttttatggttgccatttatttgacatcagtctctctattgtgacactaatgggcttggagtttcttgagttgtcatgaattttctttatcagtcaataaggtagtagtaggtaatactgatattaagcacaatcttcatgactcagccgcttagtacatgcttttgagtgtttattctgaatccaaatgatctttctcaagttcaaacaatatttatgccgatttcctgacgtcatttgtttagatcattgtcttgatgtttttgttgtagttatcttaaaatgtgttcatgtaaatctttcgaattgccatttcaaaggggatggttatctgtattaattggctgatatctccttcgtctgagctctacatatgatgcaaatgatggatccacaactttaggtaagtcaactttgaaccaacaagttacattgtacatgagggtactaagcaaagatatataaatgatattgtgtctctttttctgtcttataattaggacccaagacctaactatgactcccactgcatctatcgacaccggtcaaaccatctctcttcatcttctcctctttagcctttcgacaaaacacaacccacgagttaactttcatggccacgcagacaccaaccagcgtcgacagacatagaca

SEQ ID NO: 69234 - DNA, 300 bp, Arabidopsis thaliana landsberg
ccgtgacaaacagagatgcatatcaatatggtttaaaagactaatgaaagaaaaacacattgttattgtatccactgctgctggacgcttggccactatacactgatggtcctgttcgagaaacaaaaacacactaggcgatcaattactatgaaaaccatgctagtgggaacgactagttgggcgagtaaaataaagctattatagatactcattccatagatgataggccgctccatcttaagcctgcaaggagaaggctaactatttgaagaacactccaaccctacatagggcatg

SEQ ID NO: 69235 - DNA, 574 bp, Arabidopsis thaliana landsberg
caggatagtatgggcctactgcccaatcgagcgaccaaatagttggagcaaccggtgcctgacagaagaggaacataaaaccaaacacaatgatatgaaaatatcacgaccggcgtagaccaaaagtaacatgtaaattccaagacaaggcaagaactgacgacaggacaagcaacgagaacgaacacaggtgccaacgaggggaagctcatagatagaataacaaaaagagaccatttgccatagctctaccaacactatacacagataatgtaggaactttatagccgtagtacccacacaaaaacgatctaaataggcacaaggtacaccaggcacaaacatccaccgagaaaaacatatgaatacataacagaagatagacaaacgtcatcataggaaggcaaaaataaggtcagggcctgagagatactaaaataggctaaacgatcacctgttataaacagggagtccaaccgccggaacccaaataagaggagcaaacgagcagggctctccgaaactacatgaactagggggcagataacgggcacagaattactatcctgacctc

SEQ ID NO: 69236 - DNA, 757 bp, Arabidopsis thaliana landsberg
  unsure (1)..(757): unsure at all n locations
gcacctttncgaaagcatgatcttgctattcatttactcctatgttacttcaggcgattgattaaaatatcctcattttctcttggacaaatgaacagaaagcatcataatatgttatcctctaaagattggctaaaagctaggcctttcacaaattattcttgattaatgactcgtgtgtgcttctgttaggtatggacttgtctggatctgcactacgcttgtgtttgtgcttgcttctctcggaaattgtgctacatatctcgtgaagaaacgaaccgacagtaatgctccttggatctttgatgtgaactatatgaatttggcagcatctataatatatggatatgcaataattgtgcctctgggattttattttgcactccgttatatggggtccaaagctgatcttctaagattctggtgcctttggggatactctctcttcattttcgttccaacctctgtaagtatcttcagtaacttcggtctcttttgctgttaaaattaatcaattgatgatcagtaacactaaagacaaatgcatatacttgatacacaatggtttggtaacttcactttcaatgaccatgtacaatgacataaatcaacctaacttgatatcacaactttatacttcatactgtttaagcataataacactcangatgttctattttgcagcttccattgcttattccagtagagtttctgagatgggtgattatactcttagctggtagtgcatcatcgtgtt

SEQ ID NO: 69237 - DNA, 494 bp, Arabidopsis thaliana landsberg
aaacaaaacagcacaaaaccttgccagccaaggaaacgcgaaccaagcataaatatatatatataaaaaaacatatacataaaacaaaacactaaaaaaaaaccacgccgataaagttctacaaagcaactactaagcttgggaacaaagagctaacttataatgagacctaaacaaacacaacactttcaacggagcatggaaagaacgcgaaaaaccaacaaagctaacaagccggtacaagtgaccaccaatgcatcaatcagcataaaaacgcgaaccaacagccacaaaccgataaacccacgacaaaacaaactctacacaagggccctaaacagaaaatcctgagtaagaagtacgtaaaacgacaaaaaaacaataaagcacacacacacaatgtggaaagcaaaaaaattcaagaaatcaggcaaaaaaacgaaacttaacaaacacacagactattaggcacaaaactggccttaacgacagag

SEQ ID NO: 69238 - DNA, 1835 bp, Arabidopsis thaliana landsberg
tggcatacatgtctgatatgttcgagtcaccgtcacaaagcttctctttccaaaaccattacagctacttgataagcggtagacatctgctaatcgtcttacctgagagcaatctcgattatgcatacgttggaaacagtgcatgtccacgttctccagatcaaatattctctaactgagaattaatatcagcaagatcaacaccacgctgcagcattctctcacggcgcttcaaagcaatgtattctttacggtgtttcttgttctcaccaggaaaactacgggaattcttgctctttggtgcccgtgaaggccaagactggggaaacttagccacctctttcttcttattcttcttccccgaaagacttcttggatccttcacaaacataagatcatccattgccaatggattagtagacttaccatgccccgagtagccacttcttgttgtcttcttcttaccatattccattgaagctttttgcagacgaataccagtcaactttctcgtttttcgatccgaagaatcgcttgaagaactatcatcactcgacaaatctaatttatccaaagactgttctgctaaccaatgagcatccaacataatctcactgccaccaataccttccaagtaatccttggcaacatcatcatcaatctcggaataacttccaaacatatcttccgagctgtcactctcagataattcagaagatccactgcttccttcatctccagattcatcatcatcatcatcattcatctcttcttctccatcactctcttcaccagatacatcttcagtgtacaacttcatccctcctatagaaatgaaacctgaattcctccttttcggtgttttcacaacatcaggcatcagttcatcgtcatttccaccagattcgtcaacagcatcaccctcctcctcatgggaaaatgaaccaccttgatctcccaaagcctttggaatagaaaggctaccacttggtgtagcatcagaatcatcacaaaatcccaatcctttatgagaatcatcacccaaaacgtaactcggttcgtattcgtaatcataacttaccttaatccctttcgatgacgaaggcgtttgatccagaaatgcaacaatttgagtcgcctctgacttccccaacaccagtggactttcattcatttgatcactttcaactcctgatcttcgatccaaaccttcctcaaaatcaatggaaggatattgatacacataagtattaccactgcatttccttggaccactcgtggaagcagaagcttttacacgctctatgcttctagatctcaatccctttcccgaagagcttcctccacgagatggcgtcgaaaagttaggatcttttcggtagtcggagagaatacctccttcaacaaacaaagtagtattattctgacgtcggtgacgaccaccggaggaagaccccgccgcggaattatgattggttctcgtgctctgtcctggagatttagccttgtttttgccagaactaccaccaccgtttgaccttctcctaccaccgcctcgcataatttaatcaacctaattcccagaaaaccctaatttggggaagacgacgatgtatcgaaaggaagaatcacagatcttcgttattagtgtgtttgccatttctgggttcttcccaatgaaatgtgccacgtaactaaaacgatgggtttcgcgtcgtttttggattcctctcttagaggatatctaagtgttggatattcgaaatatgtggccctaagcgaagaagcagtatttctaaatggatcctcaagttttatgttatttacaaatgggt

SEQ ID NO: 69239 - DNA, 777 bp, Arabidopsis thaliana landsberg
  unsure (1)..(777): unsure at all n locations
gtgccgcctacggcggcctgtccccacacgaacaagagcagcacaacggtgtttgaagcctttgccatgaatgaagagcgcgtgctcgcggttgccggcctgttccaagccacggcactggcgcagcaactggccaacgaaggtcgctgcgacgagcaggcgctggaagccagcctgaagagtgtgttccgcatcgacgcgccgtccgtcgtgggcgtctacggcaacgtctccggcgtgcggctgggcctgcgaacgctgatcgcgcaactcgacgagaacggccgcgacatggcggtaacgcgcatggcagtcacggtgatgcgacttgaacgcagcctgtcatcccgccacgaactgctggatcaactgcaacaaggcatcgtcgccgcgcaacgacaagtggaccacttcggccaagactcgccccaggtgatcagccggctggccgccgtgtattcgtcgactttgtccacgctgaaaccgcgcgtgatggtcaccggcaacccgcaactgctgcaacaggagaccgtggtggaaaaagtccgcgccagcctgctggccgcggtgcggtcggcagtgttgtggcgccaggtcggcggtcgtcagtggcagttcctgctcaatcgccgccagtgcagcatgctggctcgcggcctgctcaccggcaccacgctggacaacggctgagccttttcgattcggcgcgattcccgctcctgcgggctcggtcggcgcgccgtcaacgccgncagttggtctgggccagctcgacca

SEQ ID NO: 69240 - DNA, 101 bp, Arabidopsis thaliana landsberg
  unsure (1)..(101): unsure at all n locations
tgggggggggggggggggggggatataaaaaaaaaaaaaaaaaatttttttttttttttccccccccccttccccccccccctccnnnggggggcgggggg

SEQ ID NO: 69241 - DNA, 680 bp, Arabidopsis thaliana landsberg
actcccttctttattttagacgagaaggcaaagttttagctttctcggcttaacgactctttcttcgaaccttttggtatgtattgccccataactatagatcagatccaccagacgagaaactcaattccgcactgctgctgagtcgtcggacttatccaccaagggattcgtggaatttctgtgaattgcgttgggggaaatctaccaaagctaggcagatagatagactcctttcccgctgctaagggagagcaagaaataaaataaaattcttgttttttaattagcgcctccttttgagtatgccgatactaagagtcctctcactaccaaccagcagacatcatctggctgggtcttgccggtatcaacaacgagaaaaaaacaaccaaatggaaacagcaactaactatgactcttggcccagacaacgtcctaggcgtagggtagatcggagcaagagggaacgcctagacgacgtttttattcctgggctgctgtaagtagatcgagaggacgttccgccccttgtccccgaagatgggtgatatgttctcaaaaaatgttgcttcaatctgacctagctggcgagcgatcccagttcgcggcagagaacaagacagcaagcgagcggacctttgttcgcttcttctccaccaagcccggaagtttaagga

SEQ ID NO: 69242 - DNA, 444 bp, Arabidopsis thaliana landsberg
  unsure (1)..(444): unsure at all n locations
agggtctgcaggaaccgggcggctagggcgccgtttatgacgcggtggtcagaggagttcgtgtaccgcatcttgtagcgcgggacgatctcgccgccggccacggcgggctccttgaccgtgccgtcgacggccaggatcgcggccttcggcgggttgatgattgccgtgaagtcctccannnnnnnnnnnnnnnnnnnnnnnnnnnnnnnnnnnnnnnngttggtctgttcgggggtgagcttgcgctcgcccgtcagggcggccagcttcctggactcggcgctgatctgggtgaccgtcttggcgttcgtgtcccggatgaccggtacgatcaggccggactcgggcgcgaccgccatgccgatgttcactcggtcgtggacgagcatctcccgggcgtcgtcaccgtcgtaggagacgttgaccttcgggtgctcgcgc

SEQ ID NO: 69243 - DNA, 778 bp, Arabidopsis thaliana landsberg
ctcatgtctgatggaagtagaagaatatccgggattgatgaaatctgtatcgccttacgagcgagtgaggaatcataagggaggctctcgggcggtggatacagcggatagaacctgtttcatgagaatccaatctctgagtatttggtagctgagaatctaaatggatctagtgcacgcaaaagttaccttcgctgactgaggagatggctagcgagtctggacatgcgatcagtggggactccactaggattttttgacatctcctccccactcagctgtattagtacatccaccgtgcagcaacttaccttcacctgagaatacccagttcacattctatgttgcacggactagacagaatatggcttctcataagagaactgtcacagcgattttcctaacctggttatgcctcataggtccccggtgttgacagactagtcatctgtaatgtatgatgagacagatacatgaaaaaagcaaatatatatccacctgtgcacagagagagctgagtgaaggaagggagacttgtttatgagaagaatcaaatgcctgatgttcgagatcatgtgtgtgaatgtcgaaaggaggctgcaaacacaacaagaaacttttcgcactctacagagaatactaatgcgtaaactctagaagagagatcttaagaggatatattatagagcacctgtgggaatatgaaatcatggttagcatcacgaatggatggcaccagaaccactcttacttctgaacccatgaattccacgtaatc

SEQ ID NO: 69244 - DNA, 577 bp, Arabidopsis thaliana landsberg
atggatccaaatgatccatctaaatgtatccattgtatgttgtttgtttttgaatttggcaatccatctagttgaagcatttgaataaagctttgttagtttgagtaaatttgcatatgcatcacgatttatgttgtattaaaatgacttagaaaaaaaaattatcttcatcttcttcttaatcatattttaatgatttaaaattacatttacaactaaataaattttaatactttttttgttacacctataaccttttataaaatagtaaaattagcatctcattttcagagcagtctaaaaccacctaaaactaaatcatagaatctgatattattgtactgatgtttctcttctacttaatttcaaaaccatatacagtacctgggctgtttaaccgaaccaaaccgagattttcggatttggttcatgatcggttagtagtctaaaaccgatcggaaataattatgggcttagcccactaacattggtgggattattaatctgtaaccaatcaaaatccaagaatttcgctataaataaaaagcatattcctttttttaaattttttttccta

SEQ ID NO: 69245 - DNA, 583 bp, Arabidopsis thaliana landsberg
aacgtgctttctggggatgtcaccgaagctgatccaggcccgcaccggacggcgaattcttgacacccggacggccccgatggaatcgtgatctggccgactggctagtcggccctgaatcacagtcggctcagaggagcgttcgtggccgttagcccggagccggtcagcccagcgcccgtgccggccagcccggcagccgtgccggccagccccgtgccggttagcgtcacgttcccggcgggggcggaggcgttccggcagcgggtccgcggcttcatcgccgagtcggtgatcccgctggagcaggaggcgttcgtctccggcgtcgatgacaggctgcgggtccggctgcaggacgcggcgcgggccgcgggcgtgctggctccgcaggcgccgtcggagttcggcgggggcggggccgacttcccggccaccgccctgctgctggaggcggccgggtacagcccgctgggcccgctggccaccaactgcgccgcacccgacgaagggaacatgcacctgctggcgatggccggctcggccgggcagcagcagcggtatcttcgcccgcttgtggcgg

SEQ ID NO: 69246 - DNA, 791 bp, Arabidopsis thaliana landsberg
gacacgcagtcaagcaagcagaaggttacaggcaagcggggtagtgtacttttatccgcaaagaatgggattgatgctcagctaaggaatcccctactaatcgaaagaggggattcaaaagtgtctattcaatattccaaggtgcgaagggtcgatgtaattgagaaagaagcgctctagctctcacttgaagtacaggaaggataatgactcgagcttttccgaatgaaaggcgataggggacgtaccctaaggaagcaagaagggaggattttctttactttaccgctataacctttctttcacgagtgaacccgggcacgagcctaccttgtaagaacccaagaatgggtacctagggaatgaaccgagttagaggcgtatgcttccttgaccgatagtttgagtttgtggaacaagttgtagagatcccatactttctagtacttgtggagaatcccagtaagaaatagcttgagttgttggtggaagtgacctatacatatttatatttataggtcctagcccttttcttccgctaggtaagttgggaagtccaacataaggcaggtcaattacatcgaacctcaattccatcgagccttgcttagtctgcctatggttgatagtgaacagcagatatgctacatcaagcactcactttctgtctattggccttagaacactccttcttatgttgttttcaatgaaggggaagtgattcctgagttccttcgcacagggtttgaattaaattaagtaagttttgtctacatcttctctgcaataca

SEQ ID NO: 69247 - DNA, 538 bp, Arabidopsis thaliana landsberg
aggttacaaagctttacttcacgctcacgatatctctgtttttttttaacagaatctaaattttggctactttttttttgcctccagcaagaacgcggctacccgcaagcgctccagaaacaattggagcgggtgttttgtgggatgaagagttcgtacaatgattaaagaatcgtacatagtataaacagaatttatttgagatgccatgtaatagtagagaagcagatttctgtttatgtccttacctttacttgttaaattcataggtagaaagaaagaacctctaaccaaagcttccatgtcataagcaaagtttttgtgattttcgattttgttctttatcagtatttaaacaatcggtcaattggtgatttcacaacaacaaaagtaggattgtattgccaaatattgactacttttgtctgctttctactgtaagtaaaaatgaaatgactgtttatcataaaaaagagattattttctaaaatcagagaatctcatgggttactagtgccggcaatttacaagtgctaaa

SEQ ID NO: 69248 - DNA, 1230 bp, Arabidopsis thaliana landsberg
gggaatgcaataaaagaaaacacaataaaactctgattcctatcacacattatgctaagtgaatagataaatagataagaaacaaactctcaatcatttgaaaggagaaaatatagtagatacgaaccaagtctccaaacattttttgcatctaaaagtccttaaaacctctcttgtataatctaattttaattttttttttggaaaagttacgtatcctaactttattttttcttgatcgaatttaatattagattagaaataataataggaataatcacaaaatctaatttgatcattcttaggtgggtaggtacacttattttacatacagcctcgacggcaccaaaacatagaatatatatatatatatatatataaatacaaatattccaaatataacctctctcccaaagtcctatcatatcagaaaaaagaaaaatcaaaatccaattcaacactctcacacttcgatatctccgccttcattcttctcagagccaactgtcctgagatttcgatttctccaatctctcttcctccgtcgccggcgaaactatgtctcagtctatccaattctccagtccttcacacactcctcaccttctccatctccctcactcacaattcaaccgtcctctctcctctatctccttccgtcgcttccctctaacaaccatcaaatacacttccatcagagcctcctcgtcaccatctccttcaccggatctcgattcatcgtcctcatcatcatcctcgcaagtacttctctcacctaacggtactggtgctgtgaagtctgatgagagatccgttgtcgctacggcggttacgactgatacgtctgggattgaggttgatactgtgacggaagcggagcttaaggagaatggatttagaagtacgaggaggacgaagctgatctgtacgatcggaccggcgacttgtggatttgagcagcttgaggcgcttgctgtgggaggtatgaatgtggcgaggcttaatatgtgtcacggtacgcgtgattggcatcgcggtgtgattcgtagtgttcggaggcttaatgaggagaaaggctttgcggttgctattatgatggatactgaaggtagtgagattcatatgggagatcttggtggtgaagcttcagctaaagcagaggttgtttaatctcttcttatttcgattcgagcttgatgtagacattgttgtgtttgtgatttagatgtt

SEQ ID NO: 69249 - DNA, 1299 bp, Arabidopsis thaliana landsberg
gtgtgtagttgtggaaatttatgtatgtttcttgaaaaatgtgtattggattgtgtgtttatatatgcattgcggctttgcttaagttaagacattatttgaagaagaagaaattacgaccgagtctttttcgagagacttggtaaaaagaaactcaaacatagttatttcgagagtcgtgggaaaagtcttcagtactcatactcggattcccctcttcgcatgtttgatcatttttatggatgatttctatatattaatattcaaaataaatcatttgtctaaacaaagtttttaacgttcatagcagagggaaattagtcctgatagatagatttacgttaacacattatcacgacaagattgcattctttaattcaatatttagaatgaagcaccgaatcaatatttttatttttatgcattgattatgtaaaagtactaaatatttggtcagaaagttccagatatggaaataaaatatgtgtcaaatgttattatgttagttacaggaaattaccaaaagtccagggttttactattcactttaattatgaagcatgagctgttcgttgactgaaacattgaggatcgttgacatttctactaaattgaccaattcctgcagtcaacctatcaaacaaacacgtatttttgctaataattgaaccctttatttattgaattatagaatagttgtcattaatatttataactctcttgatacacaatctcatctcgtataatcttttaataatgtaaaccaatttttctggaaaaaaatatatcatacatgatacatctcaacatcatttatttattactcgaaaaacactatcgatgcatgtttggacaactaatccaacaaacacataattgtactactcaataatagaagtagggttttaaatacacgaattctcattttacttcattaaatcatatcaacacatttgtttgaactgcaatataataatgaaaaggttgaaaaatttatttttgataagcctggaaaacagtgtaaatagtctggataacggacaagaccaaaagaacaagagcagcaagagcagagacaaaagaccaaggagagttaaagtaagtgaatttgaaagtagcccattccacgtgccaactactcttgtaatactcattcacttcttcaaacaagtctttgagataacactgtgttatgtcgaacgccacatctctgcctaaactgttcacgaatttcgccagctctgtatctggttcgaaatagttttctatgatgttttggtcgcatagatacttaacgtc

SEQ ID NO: 69250 - DNA, 610 bp, Arabidopsis thaliana landsberg
gagttatgagggagttcactgagttcatgagtgagtgagcgtgaaatagtctatcgatgtcagacctatgcggtggagaatgccagcaatgttggcatcgtcagggccaaactcgagctccgtaatgaggagtgcgcggcggccacactcagtggcctcttcgaagcggccttgttcgagtgagacgcactcagtgacgaataactacaaaaaggtaccttgcaactcgtacagagtcaaaaggtgtttcactggtcggagagtgagtgattgatcgattgaaaagatttgagagagtgagcaaacaagtgactttgcgaatgaataaacgatatgcaaatcgaacgtacgggtttgaccaacgcgggagtggttggctctgtcggtgatgaacactctcacacagacacgaatccacgcaagcgtacccgagttgcgactggcgaatggcggtggaacgcttcagattctcctccgcttcttcaaagcgattgaactctgcgtgagagagctgtgaggaagactgcgtcattaagctgatggaaaggtgggtaactcaccgatgtagagggctcccagtcggaggtacactcccgaggactccaagctg

SEQ ID NO: 69251 - DNA, 2630 bp, Arabidopsis thaliana landsberg
ctagtcctactctgcagacattgaccacaaactctggacgtataaatttagcaccgttttaacatgtaaatgtgggacaaacgcaagtcagtaaactcatatgattaaatcatcccaggcataagtctgataacctttgaaaaagaataataatctgctaagattggtattctgtaagaaagtaaatctcgactttttggtagtgatcaaaatagaggaaaatagagagtttttccctaattcaatatgttgtttctaatttatgaagctaacatatatattctaaacatcatttgacttatcaacagttatacttcatgtcagaccattctatgtgcattcaagctaataaaaaacaatagtcttttgatccagctaaattcaaagggcaaatgtaaaaaaagagtaaaaatgtaaagcactagcaagcagaacttttagacaaacaattccaatatgattccacttacaaaaaccctaggttggttgtctggttttagtcacaatatatgcaaaatggtaatacctgctggagtttactaactgccatcctgagcatctgatcgcccacaatatctttcatatgtcgtgtgaacccctctttggggatttcatttttctgcaaaaaaagtagcagaaggaaagaaatgataatacaatagctttggaacagaatgtcatatgatttcacagatagacataccttaagtctagcatatagggtacggagctgcagtgctctatctttatcgagttggttcattaaagtaggaagcaaagcagcaaatggtacttgcttagggttgcggtttatagggttaacaggtggatccactccccgagcctgttgactactcatcttttgcagtttcatatactgagattcactctcttgattatgggatctatctgattcattaccagtaggattcttttcactaatcggtaacccagttgattgggggacctgcgagggattctcccagagttgaccagctcgatgaaggtcttgaggctggttgtgttgtaaatgaggttcatttgcgcgtttcaaatcatgttgatgttgattttctaaagtcgatccttcttgctccttcatctgagtactttcaaggctatgctgagtctggacattgatattagaatctccaataccattcttccatgtcgaaaactgctggctggaagaatggttgtttcctataaaaataatagaagcaattggttgatgatactcaaatcacaagttaaactggaggaaaaatcatataatacccaaaaaaggacaaaagacaggattttgttgtagcagattaatgcatactcagtagctctcatacacctatccacaaatcacaacctaattgtatttcaatatttaatggtgtagtaagaggaaagagatcacttccagcaccagagacagaaaataatgatttaaggagacacgtaatcatcgtcaagattgcagtgaaccaagaacaaagcctaacactaaaatagtatcagcatcaccaacctatgtctaccctggctattaaatcccatcacactgatcaattttaatgactcaacaatcaactagtacaggctatattggcaatgacaaagcttatcccgatattaacatacagaaaccctaacaaactaatatttcatgaccttaactattgctttaatacaggactgaaacttccaaacatgtcactagattagcaaggtttaccaaggtatcttcttaagttatccatgttccaagagtaataacctatctgagaaaactgtatatattaaaaacaagcacaactttgctaacatgtcaaagcttcccaaagcagccaatccaagagaaaaccaaaagatactatctttacattaaacaatagtaccacaaaaattaaaatctcagacataaaatttaagagcgaatttgtagagaagccaaacctgggtttgtcacgaggggtattgaagttgtcatagaaccttcaatatcacgattcagagcagcttggaacgcgtctacgtcagctcctgaatgcatcgattcatcctaaaacaatacaattcgaccggaatcaaaaaccacgaagacgattccagatacatcacacaaaattggattatgaaacgagtgagattagaaacctaacctcgtcttcttcaaggagcttgaaaattgaaggatccattgaaatagctggggaaggcaaagagagaaagagagctctcggcgaagatgaattaataggaaacagatgttataagattagtcctaaactaacctcatgtcgtttattagctttgttttagcactgtatgtcgtttttaattttgatcggaaaacgataccgtttacttttctgttacggatgagtaacctcatgttgtttattggttttcttttaaaactggatgtcgtttaatgaaatacgaaaaacgctgccatttgctttattgcttggagagatatatcaaactttatgtcgtttattggttttggttaagcactgtttgttgttttagtgtattgagacaaaattctggtacagtcacagaagagaggtacatcaaaaatacagtgtaagctgccgccattaacgaagcatcggactaaacaggaccat

SEQ ID NO: 69252 - DNA, 435 bp, Arabidopsis thaliana landsberg
cgcggcgatgtccgcgtccaggtggctgagtccctcggcaaagctgtgggcgcgggtgtcttagatcatgccgcgctcgtcgagggcggccttggcggcggcgggcagcttgtcgcgggccatgcgcttgctggagatccagttgccgagccggaaaccgtcggtggtgacatgaccggaggggacggcggcgtgcccgtggccggcgatgtatgcgtccagggcgttcaggccccgctggatggacgcctgcagtctcgtctgcccggtgacgcccagggcccggagctgggcggcgtgggcggggctgagcgtgcccgccgtgagctggccgcagaccttgccgagccaccggtacaggctggaatcgtctctgccggggtccccgggcgggacgttcaggtgacctgggacggcgcggtatgccgccgcgcg

SEQ ID NO: 69253 - DNA, 513 bp, Arabidopsis thaliana landsberg
tcatactatccacgtctatattttaaatatattcgtatcaaaatatccgccgcgacatattttgaattcatgttcatgtttggggtcaatcgcattaattttagttttgtcataacacgtagatatacataaataagtatacagtatgtagtttagtaatttgccaaaaagtttttggacctactttacaaaactttggctactctaatctaaaaatgataccatgacaatgatcctaattaaggtttaatataatacagggtttggacaaattcttaacgtttctaaacgtttctcaaaatggaaaaaatcaattcaatcctcgtatataagcaacccaaatatataatctagagtaaaagtaaaatacttggtaaacactttatctttgcttcgattattgtgcatcatgcatcaggaataagctcaatgcgtataccatgttcaactctaaagagattagcaagatagagcatacatcatctccaacatgtatatataaaaaaatatacg

SEQ ID NO: 69254 - DNA, 607 bp, Arabidopsis thaliana landsberg
  unsure (1)..(607): unsure at all n locations
aaagagggttttgggnaactgccatggacctgcagcatatgtcagattgggccttttccccagaccaagnnnnnnnnnnnnnnnnnnnnnnnnnnnnnnnnnnnnnnnnnnnnnnnnnnnnnnnntttgagcaaactaattgcctgaaactcttacctgtctgctagctaaactgcaaagccatcgagcctaaaactacaaaagtagtgggtagaaccttgcaactgacatagtctgtaataacacatgacacccaaaacttcaaattttcatgtatttttttttctgagtattggaggaagaatggtattcaatctgtcacagggggaagatgtgaggaaacccttctggtcatgtttgaattctaccatgacaggatagcttctctgaattcagtataaaatggaggattacctctaccatcgtgggtttctccttctcttacccttgtctcgaaaatcttaaccaccacactctctacctggagaagggcctaatctcatttttaagataaacttttttgatctctagtgagaacctgcaaatacctgtgattcctacaatgctttcccatgccaagggagtattcatagaaactttaaacctt

SEQ ID NO: 69255 - DNA, 597 bp, Arabidopsis thaliana landsberg
acatttattaatgtgttgcatttatatcaatttatcttttatctctaagttttgttttgcacaacattattataatcgttaataaacataaaaacactattatcattgatttttactttttggaatgtccaccatcttttcacacgtatcgatttacactagtttagagatagttttggaggaatccaaatagtttagatatgaaatgtatatatgtataaatgatttttttttttgagcttctaacttgttgctttaaaaaaacttattatatccagaactattatttatacctaattaaaaaatttacctcattagatttggcatcgaaatttggacgcgggaaaataaagttttctaacttcagagagtgagtcacagctaggattccgtgattgaaaactaggagcatgatgtatgttctactcttcaagaccacatcgtccacatgataagaatatcaaacaaattatggtcgttcttttccatagacacgaagagaatgtctgggatttgataagttgggttatgcttataccttacgtcagatgcattatgatcggctactatcatgatcacaacaaaatggataaattt

SEQ ID NO: 69256 - DNA, 499 bp, Arabidopsis thaliana landsberg
actgcttttggcggtcctgaggtgtcaatagtagataaatagagttatgtataaactatagggtgtgttttgtgatatatcgagttttatttaacccgaattatgttagtgtaagtctgtagatatatatttgtagcacaatgagaggacaaatccacaaggattgaaagattgcaaaattataattttgagatccaaagtaatctagagataatagttttgaggtttttgttttgatctccaagacaaaggaaacaataagaatgcagagaattaaagtgtaactagtaaataaagcattagacaaaagaaaagttaattattatttttatatattaatattatgcaataaacaaggccctgaacgattaagcaattaaagaaactactggatcattgaaaatatgcatggaagagttataaattaaatataatagattttttttttgtcataaaatataatagattattttatgaaaacaacactaatataaattag

SEQ ID NO: 69257 - DNA, 262 bp, Arabidopsis thaliana landsberg
  unsure (1)..(262): unsure at all n locations
aaacctacatttttagttcgtctcttacttatcgtcacgaggtcactacatctttacgagttgctcaggatactgctggaccattggtttggattgagataacaaaaattctaacccgaccttcaactannnnnnnnnnnnnnnnnnnnnnnnnnnncattattttgcattgcagaatttatttacccggttcctacccctaaatgtgttgtacagacaccaaaaacacatcgacctgttttccttctcttgcagatcgaaa

SEQ ID NO: 69258 - DNA, 645 bp, Arabidopsis thaliana landsberg
  unsure (1)..(645): unsure at all n locations
cggcgactccaacagccgcagctcgtcgagcaggtgccccagctccaggaatttttgctgcggctgcgcgccgctgcgcacctgcgcgcggacccggttcagccagccgatcagcttgaggtcgaactcggtgtcgcggccgaagtggtagtacacgcggctgcggccttcgagcaggcccggcaggatctcgtcgaggtcctcgatcggataggcatcgtcgagcccgaagcgctcgaccgcgccttccgggccgctgcgcgggccgtcccagccctcgcctcggggtcgcgctcgcggcagaacaggatcgcctcgccgtgcgcgcgccccggcaccagcaccagcactgcctcgggctccgggaagccgctgaggtaccagaggtcggaatcctgccggtacggatagtgcgtgtcgcggctgcggatgcgctcgggcgcggccggcagcaccaggatgggcgtcgtctcccgccatgcgcatcagctggcgcctgcggcgcgcgaattccttgccgtcgatgccggtgagcgtcttcatgggccccaattcagtttcgacatccagatcagtgcatgccggctcagtgcangcttttgccgtgcgccggcccgagcacgcaatcgccgtgcatcagcagcg

SEQ ID NO: 69259 - DNA, 368 bp, Arabidopsis thaliana landsberg
  unsure (1)..(368): unsure at all n locations
aaagaccacaccgganctatgctaagatcatttatttacaacgttaatggtatacaaagccaacagaccgnaaagaanacaaaacaagaacnacggcnacacaaaccgaagaagacaggccnagagcggggccaagaagcacaacagaagggaaganaccgaaaccaacgaaaaccgaaaacggaaaagcagcgcccggaaggggaacgacccccaagacgggagcagcaaaggcacnacaagcggaaagcccaaccaacacgagggagaagcaaaaaacaccagggccaccggaaggaaaaccagcgaacaagaccgagaaaaaacccgaaggcccagccaacagcccgacacaaaaaagcaaagga

SEQ ID NO: 69260 - DNA, 548 bp, Arabidopsis thaliana landsberg
  unsure (1)..(548): unsure at all n locations
cccccccccccncccccccccccccccccccccccccccccccccgnattttttcatgacggggcccttttttanggccccccccccccccccccttttagagggggccccctttttttcccggggggggggcccccccccccccacccccaccccccccccnnccccccnnccccccccccnccnnnnccccnccccccccccccccccccnccccctcttcttctccccccccccccccccccccgnnnnccccccccccccnccccccccttttttttttttttcggggggggggggggnaannnnnccccccccccccacaaaccaccccccacccccctcccccccccccccccccccccccccccccccccncccggnnngggccgggcccccccccccccccccccccccccccccccccccccccccctatatcacccccccccgcccccccccgccgccccccccccgcccccccccccccccgcccgggcgccccggccccccccccccccacccccccccccccccccccccccccc

SEQ ID NO: 69261 - DNA, 575 bp, Arabidopsis thaliana landsberg
agaaaaaaaaaaaacccaaattattaattccacttatcaagactaatcttaagatacatttacaggcgttggggccaactagtaatcatcaggggccgtagcccgtaggattaattactacgcggtttttgcaacatatgcttttctacaattgatgggtccccatgttcagaggtatgttcttccctactggaagtaccaatttatagtttaatcaaatttatttttttgtatcaaaaactttaattttgtaaagcctccacgcgaaacttaacttctaataaactctctcaattctctatttttttttcccaattatgcataaacttattcattctggtttctggttataaacagtgtgaaacaatatattttttctggttagagtgtgaaacaatataattgtactgaattacagtaagaaatcacttttttgtattttttttttcaagctatcagcttttcattttctttatttttttcctttttattttttatttattttatcaaatttttcttagcttttattaattttataatttttccgccgattttaggttaaagaaaaaaataaa

SEQ ID NO: 69262 - DNA, 555 bp, Arabidopsis thaliana landsberg
tatgccccctatcacgggtttaaatgtgtagagtggagggcctggatggagagttttattttgaagaaaagatggattggtggcggatcagatcagtgcaaacaatctaccatctccttttgaacctttagacgccattatcgccaaattcgtagccgtaaaccttaacatcaccgacgtcgtagctttatcaggtttaacttagtttcttcaaaccttagttggtattcttttattctaagtacttatcacttatgtaagccctttttcattacaaaggagctcacacctttggacaagcgaagtgtgctgtcttcagcaaccgtctgttcaactttaccggcgcgggaaatcccgacgcatcacttgagacatcactcttgtctaatctgcaaacagtttgtccgctcggaggaaatagtaacataacagcacctcttgacaggagcactactgacaccttcgacaacaattatttcaagaacctgcttgaaggaaaaggtcttttgagttctgatcagaatctgtttctgagtgacttagccgggaacacca

SEQ ID NO: 69263 - DNA, 486 bp, Arabidopsis thaliana landsberg
ctaagtctgatatatttattttagcttcctaaattttagtaacaaaattgattttttttttttgccgtctgatattttattaaatcaagtaaaccaaacagaatacacagaagtcccgataataaaaaacagagcatgataacgcaattataaaccaaagataaggtgtaaaaaaaccaacaatatcatcgcctcttttcctcttcaattctggaagataaccacacaggaccaccacgagataggtaagatcttgttcttccatcccttgaaacacttagagcaatctcccttgcgatcaagttcgccttcgaggatgaagccatgaaaataacccgagagaaacttgaaatgattctgtgaatcttgtcgagatacgtagagtaacgaggccaattagaagagtcaataatagcttctattgccgcaccacaatctgaccaaacttcgatgttgtccaagtgtaaatcccgaagactttgtaaa

SEQ ID NO: 69264 - DNA, 393 bp, Arabidopsis thaliana landsberg
ctacaagaagcgcgaacgacaggatcacccgatcctgtcgctgatcgactagatccagacgctctgggacggcgatcttaccgtgcgcgccagcgtcaccggcgagttcaccgggaccatcaccgactcgatcaaccagaccgatgacacgctgcgcgcgctcgttggcacgatcaacgaaaccgagggcgagaacaacgccgacggggcctccacgcaggagaccgcgacgctgatgctctcgggctcggacagccacgcgcaggaagctgtccagatcttcggcccaatgaaagcgagcaccgactcgataaatacggtcgccgcgcgcgccgaacagttattacaacaagcgaacaactttgtgcagatggctcacaacggggcctcgaa

SEQ ID NO: 69265 - DNA, 602 bp, Arabidopsis thaliana landsberg
tggtactgaccatatgactttattagtggtgagtttgcgacatttttctcgtcagaaactcttatttattcttaatcactatgaattatcggctgttaaagcacaactgcagtacttacccaaaaaaagaaagtcacaactgtttttacatattttctaggtgtttcaaacatcgactgaataagtatattactatatttaaatattttttggattcttaagtgattataatagtattttaatttttgttttgaatacaataactagaatttgtcaatcagtgataattacaaatgaatttttctggatcatggttgtactgattcgatgatcatcatcgaatcagtattatttttgttgttgtttatatcttaattacaagagaatttgaaatagacagtgtagcaaaaaaaaaaaactataaatgtaaacaccctgtatgaacaaaaactagaaatgtgttgttaaagtacaaatgtattaatgtatatatacgtatacgtacaacacgcattttcatatgtataaatgtaccgttttagatgacccatgtgaacattgcggcacgtgaaaaaaccaaactcaagagacagaaaagggaa

SEQ ID NO: 69266 - DNA, 491 bp, Arabidopsis thaliana landsberg
aaagccggtccagccggttgccgccgaacgcgtcctgcaggaaggccgagagcggctgctccagcgtggcgaactgggcctttaagccggcgatcatcgcccggcgctcggggctgcgctcggcttgcaggcggtccagcagccggtcgttgaggcgttgcaccagggcctggaattcggcagcgaaactgccgagcacgccgtcttccggcacatcgcgcacccgggccggcagggtgaaggtggtgccccagacctggttgcggcgctcgcggtcgaggtcgtcgaaaaattcggtgaagccggccagcaggtcggccttggtgaacatcgcgtagaccggcaccttcaccgtcagccggtcggtcagctccttcacccgggtccggatcgcccgcgcatgcgccagacgctcgggcggcggggcggcggtcatgtcggccaccgagatcgccacgatcaccccgttcagcggctggcgggtgccggtg

SEQ ID NO: 69267 - DNA, 1233 bp, Arabidopsis thaliana landsberg
ctttagactgcccagccagcaatatatatagagaggataatcgcaaagatttgatctttgaacataacaagacttacaatgtttaatcaccgcttcttacgattcaattatccaatctttgtgcataatttgacaagacttacagtgtttaatcacagcttgccagccttacgattcaattatctaatatttgaacataatttgacaagacttacagtttttgatcacagcttgcctgtcttacgattcaattatccgatatttgaacataaatctgacaagacttacagtgtttaatcacagcttgcccctgccttacttaggcaacatcgggacaaattttcccaagttagaaaccggacaaacacaatcatataatgtgtagttccctttcttttgggtttgaacaaaacataaaactttctttgaaacgaaaacagagaatcgatgatggggtttctaatccagaaaaacgaataacaaaatctttaaaacacgatccgtattagaaacccaaacaatctttcacaaacgtataataagaaatcgcagattttaaaagagggtttctgatttaaaacagaccaaaaacaaaagaatagaaaccctaattggtaaccacaaatatgtataatttgtgaagaggaatacaagattgaaattagaaaccctaagacaaaagacgtttttttttcttagattagcgatataaaagaaatcaattgaaactatgattctgaattacaagtttttggaaaatcaagaacctcaaaaatcagatctaaaagagggttttttcgatttgcacaaaaaaaacaaacataaaatcgaaacgcaatttggaaattaaagagaaagaacttttggataaaaattcaaaatcgaagtagtgaatctggaaaaagggagtttcaaaatctaagaaaacgcaaacaaaagtctccccaaatcaaaagaaacacacgaaatcaaaagaatataaaagaacaaacgaagaatcagacaaataaaagaagtaagcatcgcgacgagcgagtataaataaccgttgtgaaatagaagaaagacggtggtctctgtgttgggcctaaatgaatatgtaagcccaaatacaagttgtgttgttttttccctcatcgtaatataaggcccacatatgtttttttttgtcgtcgaaatattttataaagcccaaacaaaggcccacatatgtttaactgaaagttatggatt

SEQ ID NO: 69268 - DNA, 163 bp, Arabidopsis thaliana landsberg
  unsure (1)..(163): unsure at all n locations
gaagccaggccgcgncaaagcaaaccacgaannacaaacgnccggaagagcncaaaagccaccacgcgaggcaanccacagcgacgnaangaaagcgaaggcccaacgacaancaccgagcgccccgaanaaacgacccgcnncccaagcagagncncgcgaa

SEQ ID NO: 69269 - DNA, 527 bp, Arabidopsis thaliana landsberg
tattcacttacaaaaaaaaaaaaaaacttgagtgtaaccaaaaaaaaaagttgatatactttctggagtgaatcttaacttttattctttacaaatccattccccttagatctgtttatttcccgctactttgattcatttctgttagtaatctgtctttcgtatagaagaaaactgatttcttggtttgtattttcttaaagagatcaatctttttttatttttgatcttcttgtgtttttttttctttgtagaattaatcgtttgtgagggtatttttttaattccctcctctcagaaatctacactgaggttttttattttataaaccgctttttcgaatttcttgaaaacaaaaattcctgttctttacttttttacaagaacaagaattataaatgacaacttctatgaatttttacagtagcaaaacgtttcaacaatctgatccattcggtggggaattaatggaagcgcttttaccttttatcaaaagcccttccaacgattcatccgcgtttgcgttc

SEQ ID NO: 69270 - DNA, 461 bp, Arabidopsis thaliana landsberg
gaaaaggcatcacacgccaagttaggccccacggcctaaaagacatggagtgataaattatcaaccaaaacaaaaaaggtaaaacatgagagagggaggcaacacaaggactgcccggcaggacacccagccaagaactactcgcgcccaagcacagatgactgcggagtaccgatgggacccggcgcacaagagcgggaatgaacgcatccgctagaagacgcaaagcaatcgcacatagactttagcgaaaaagcgcagaaccatgcccggcgggtcccacccgcgacggggagaacccccatgccggcctaacgagcgtggatgcaagaaaaaacgagaagacaaggcaagcacaagtaatgaaggggccaacagagagccgagaggcacgaaagcgccctaagaactactcaaaggccaaaatcaggggcccacagaacgccaacggaagagcgcca

SEQ ID NO: 69271 - DNA, 610 bp, Arabidopsis thaliana landsberg
  unsure (1)..(610): unsure at all n locations
ctttcattatgcacattttatacaattttaacacattaaaatctatatattcatcttataattaacatatgatgtgcagtttcattttctttctttaactaagaaaacaaaaataaaacagaaaaatttggagcttaattttaaagatttgaacaatattcgtttttaaagtatataacaacatttattatgaaaaatggagtaatacttagagaacacttataagttatcaactatacacatatataccatcttttccaaaagcaagttttcacacaaatttgcggatataaagatgtttgattctccactaaggattatccttaatccttatgactaaattatttttaatatgattcttgttaactctaaaccaatcaatattatactatatatatatacgtgtacttttcaggcttttagcttcccatcttaataacaaaactagaccagaattagtgaatacacaaaattaagcaaatgaagagtgaataacagttatattattatttagtnttgctatctgaacaaaacatttaattagtcacatattcttggtggagccgaacggaataaactatggtcaaagtttgnggggaattcgaatttc

SEQ ID NO: 69272 - DNA, 525 bp, Arabidopsis thaliana landsberg
  unsure (1)..(525): unsure at all n locations
gcccaattttcaccatgatcttgaagattgcggtgagcatcgttttattctgtnnnnnnnnnnnnnnnnnnnnnntcgcggcggcgtcaaatgagaaagtcgttcttcaagggcgcattgtcgatcctggcggcgtcgcggtcacagacagtnnnnnnnnnnnnnnnnnnnnnntttattctcccaccacgggctctcccggctctcactgtcttctttatgaagaaacccaaattttggacatgagctcttccgccggaaccttcagtcttcaagttggaacaggaacacgcgtgggcgtcggccccactttgcgcgaaactttcacgaacgcctcggtggcatcatttggatctctgacttgtggagtggggacgtcttacactccgggtgccattgatgatcgaacaattgaaatgactatcagctttggcgccaccaacttggccttggccacaattcccgtgaaggctgtgccttatgccttttaagccaatcaaatcggtggctatggcattaataata

SEQ ID NO: 69273 - DNA, 424 bp, Arabidopsis thaliana landsberg
ggtgactcgattgatactctgccattctttgaacccttttttacttcttttctcatatatttgtctgacaggtcacgtgtatatactctgcctcaaagatccttctactacttaccatataagaaaaataaaatactcattatctttacagagaaacatgctgtgatcaaaaaaacagatatgaaatcactatataccattcatacctacatcatctcaacaactatatataacatcactacagtttatcaattccaacaaccctttccatcactattccactcttcacacattgtatctcattatgcttaccttgccctagacttaaggaacaaatccatgaatacctgctcataatccggcacactttccataccctagagcaatttaacggcacactcatcgataacattactcatcaatc

SEQ ID NO: 69274 - DNA, 444 bp, Arabidopsis thaliana landsberg
cacgcgtccgctcgccgctgtcgcgtgtccctcgtcgcgttgcccagcccgcctcacctctagggccgggcaccatcgcatcgccggacatccgccgtactggtgatccccggagcaggagcagacgcaatggaccgcatcatgctgtctcgcccaccccttcccgccccgacccatgccgctgcgggcgccgacggtgacttcctcgagctcgacgtgctctggcccgcctccccttccgcggtaggtctcggcctcctcgccgcgctcccggaggatgagggcaagaagaagaagcgcgccgcggccggtgtcggggtctgagtctgggtcggagcccccgccctatccgccgcgcgccccgtcccggagaccgtcgcaccgtccgctatggcgacgtcggcgccggtgctgataccgtcggatcccgcgcggaggggaagg

SEQ ID NO: 69275 - DNA, 549 bp, Arabidopsis thaliana landsberg
aatacatttacatgagtcatcaaggttgttttctcttccaatttataattttagttcatcatatacaggttcatgcattggagatgctttgggacaaatttaaaagatatattccttaatatcataatttttttaatatacttcttcttttaacaaaaacattaggtgccttttgagtatatacaaaaaacaaattgtgtccatcttgtatagatttttttttttttgtgccctataaatttatgtatatgtagttatgtaccctataagtttatattatcggcccctatagttaagccggcattgactatatatttttatggaaaatttaagagttttctttttgttttggtatttttctttttaattgtttcatcaagttaagtttcgtttccaattcctcttagaatgattttttatctcttgtgttaggtcacgctttactagtttacactcctctttagaatgatttatctcttgtatgagttctgcttttgtctttttgttaagaatttaaatattccactaaaatgaaaagtgttaggattt

SEQ ID NO: 69276 - DNA, 365 bp, Arabidopsis thaliana landsberg
  unsure (1)..(365): unsure at all n locations
gcccaagccttatttgtgagaaaactaaccattcgattgtgatgtataccgacgnnnnnnnnnnnnnnnnnnnnnnnnnnnnnnnnnnnnnnnnnnnnnnnnnnnnnnnnnnnnnnnnnnnnnnnnnnnnnnnnnnnnnnnnnnnnnnnnnnnnnnnnnnnnnnnnnnnnnnnnnnnnnnnnnnnnnnnnnnnnnnnnnnnnnnnnnnnnnnncgagcttaaatgacaatatagtagcattttgtaaaatgacacaccaaaccctcaagcccaacctcatttgctaccgtgccccctgtggaacgcttaagggttgtggtacagtgctatgccactaacgtcggttttatataactgagaatatt

SEQ ID NO: 69277 - DNA, 326 bp, Arabidopsis thaliana landsberg
  unsure (1)..(326): unsure at all n locations
caggattctttccatggggatgaatctcggcaccaggtcgaagatgctcaaatgcgccggaaatgatgacatcatcaccatcaaggctgatgacggcggcgacaccgttaccttcatgtttgagagccccagtaagtttatttgctaattgactgacttactctaatttctggtttctatgggttaagcttgtacgaaatggtggaatgattgatggaatagaatgatttagttctcttaggggttgtatatagtttcaagtttcaaaaacttggtttagacctagctgcttttaacttggttntgtgttggatgatttacagcgc

SEQ ID NO: 69278 - DNA, 679 bp, Arabidopsis thaliana landsberg
  unsure (1)..(679): unsure at all n locations
ttttcattcttacataagcacatgtatttgtaccggcagaagtttaacgttagttttgcggaagtaaatangtgttaggtaaaggtgtaactgtgaaaaaacttttaaatctagttagaaaccctatagttgtcgttaaatttcgaaaaaatgtgaaggttttgaagactttgttaggattggatccttctttacacaataaattaaaggaatgaatcaaacgacatgtacaatttattttggttcctcttggcacgatatagaattatctatagtcagattatggatacgttctaatatccattgctgcgaatttcataaatactaaaatttcagcaactatatttttgtttctcttttcttcactcgtaaacaaataaaacgcaacgataataatgaaaacaaactctaataagatttgtttttgcaacttctttttgggtaccttcttgcatcgtttatgaaaagcatctaactaataacttttaaaataataaaaaaactttaactaacctagagagtagaagctgtagtcaaatcgcgtttcgcgtatctatatatgagttaagagtgtgaaaacaacactttttcttcttaaaagaacatgattaccatgtgaagattgtgggaagaactagcaggaacaatatgcccctaaattaaattttggccccaattt

SEQ ID NO: 69279 - DNA, 326 bp, Arabidopsis thaliana landsberg
agcgatatgctcaaccgcgcaaaactggtgatgacgcgctcgggttacaccacgctgatggaactggcctaactgggcaaacgcgcactgttcgtgcccacgcccggccagagcgaacaggaatacctggcgcaattccatcacgacaatggccacgtgtactcgaccgtgcagcgcgaactcgatcttgagcgcgatgtcccgcgtgccatggcccgccccggcctgccgcgcaccagcagcacgcgatcggtggaacattttctggccgccattgccggcgcgtaggtcggcttggcaaagctggaccgatctacagctgccgc

SEQ ID NO: 69280 - DNA, 388 bp, Arabidopsis thaliana landsberg
ccgagatatagcggaggctcgtgtaactgatggcggctatttgtccttacctccacagctgttgtcgattgatagagcaatgtgttaattcggataaggggccattagagggtatactgatgctgggacgcacgacttactgtcagatcgtgcaatatatgaactgcgctgaagaggaacctattctgagctgtggacaaagatatactcagaattgtgcttattttacagcgccactacgactatgagggttctttggggactgactcaaccggacatttgatatcattatgcccttgtcaatctatgacgatcacacataatgacacaacttttccatagaatgtctatgtacactttattgtgattggtatatacaagctgttgc

SEQ ID NO: 69281 - DNA, 574 bp, Arabidopsis thaliana landsberg
  unsure (1)..(574): unsure at all n locations
agaccgcgaggcggatttgtctgagttcatgccgttgttctcggcattgagcagcaagcccgaaccgacgaaaccaccgttgaccgaggtcttgtagaaacgcgcaccaagcgagacttcaagatcgtcgatgcccttgtagctgtagtccatgaagatggcgcgttccttcgatcgcgcgttcgacgtgccattgagcagcgccgtggtttcttcaagcgagcccgaggggagaccnnnnnnnnnnnnnnnnnnnnnnnnnnnnnnnnnnnnnnnnnnnnnnnnnnnnnnnnnnnnnnnnnnnnnnnaggtcgggttgtcgatgaggatattgaagtagaggcggtagttgaagaagtaggcaccgaccagccattggaacggaccatcaccggtcgactgcagtcgcacttcctgcgagaacgacttggaattgtcggtgatgatgtcctgttcggtgagcgactcangatagccctgcggtggcgtgccgatcagaccggcgtgaggtcatgcgcccaggcggcattcttgccagccatgagctgagcgaaacgaggcgaaccgatcgaag

SEQ ID NO: 69282 - DNA, 419 bp, Arabidopsis thaliana landsberg
  unsure (1)..(419): unsure at all n locations
nnnnnnnnnnnnnnnnnnnnnnnnnnnnnnnnnnnnnnnnnnnnnnnnnnnnnnnnnnnnnnnnnnnnnnnnnnnnnnnnnnnnnnnnnnnnnnnnnnnnnnnnnnnnnnnnnnnnnnnnnnnnnnnnnnnnnnnnnnnnnnnnnnnnnnnnnnnnnnnnnnnnnnnnnnnnnnnnnnnnnnnnnnnnnnnnnnnnnnnnnnnnnnnnnnnnnnnnnnnnnnnnnnnnnnnnnnnnnnnnnnnnnnnnnnnnnnnnnnnnnnnnnnnnnnnnnacctaggggctctagaggaaccaactacaggagagccagcaacggtaagcttatctcccctgaacccacccaactctttcaaatgctctttttcagaaagagtgactggccttctcctgcccttactgtccaacctgtgagcggac

SEQ ID NO: 69283 - DNA, 556 bp, Arabidopsis thaliana landsberg
  unsure (1)..(556): unsure at all n locations
tccagtctacggaactcaacatttgcattcacacttgttctccattttgaaaccaaacacgttggtgtccaaggcatgggctccttctaaacacttcctcaagaaaatctatcttcaactgagacttcctgctatcaaagtacccggtaacagcactccgaaacacatccaagatcttctccaattcagcttctgagaattttctcgagtcaattatcttcataacccaataagttgagttctggccaaggtgggtgatcatcttgtatcggttccacgcagctgactgcttcttcttggaagggtcaactcctgacttcttactcttgaatggttccgcagccagttgaagattcttctccaacaaagaagcgagtgcagaaaactccattgattcatccttgggaaactctttagccttgaagatcttcttctgaatgatgccccatatacgtagtgaaagcggcagactactttatgcagtgcttgggttcagcattgcctgaacttagtntaagtacactgtcataactcgtggcttatctgtaaaagatca

SEQ ID NO: 69284 - DNA, 605 bp, Arabidopsis thaliana landsberg
  unsure (1)..(605): unsure at all n locations
acttaaatatccaacacataaacacataaaccaaactcatgcttaaatataaatatatagaatttacatattagtggtattacacatccaaacttaattgacgatgtgcatcttacggattgaatccttcgactcatttgaacacatgaagataaaacacacacgaattcacccactagtctaagcgtttagccttgacactattataagttatgtgtccttatcctttcttgagtgtatacaaagataagtccgagctttttgaagccgctacacttcaaactcatataggtagatcttttaatcttttgcacctgcaaaatgtaatttttcaaaagatctattaagaagaaaagtttaacctaacattttcttggagatcgaagcacttactttgggatgatataaaccagtgcttcaatctctaagtatgggctttccgaattgaacttagcctctaacgttgtattagaggggaattgggtattccacaattaaaaagtctaaatggactntaatcccactcctttagcctacttgatcaccatgtctctagctaatccttttttttaagtgatccgctagattttgaggctccgaacaaa

SEQ ID NO: 69285 - DNA, 488 bp, Arabidopsis thaliana landsberg
tatttttaaaccatattcacacataaatcaaaatatacattttaaagtttaacatacatattattaaatccgtttaatagttttattatggaaaattaaaaaaaaaatcatttttacaagtaatttttttacaagtaaattgattatagaacgtatataagcttatagtagataataattgtcaaaatttctaaaagcattgttatgtttctatttcctgtaattgcattttcatagtttttaattaaataaaacaaactagctaagactggtctttatctctttctttgtacccggtttatccggtttagtttcctctattattgaaatcaacattggcacaaaaataataatataaacagctgttaaaaaattaattgatctctttgttggaatgcacttttactttaaaaccgctagggtaaagagttttttttttttttttggaaaaggcgtttcccaaatggtaatttgtttcatttttggaa

SEQ ID NO: 69286 - DNA, 1797 bp, Arabidopsis thaliana landsberg
  unsure (1)..(1797): unsure at all n locations
gtatcccaataatcattaatgataagtttgagaagaacaacacaatgcataagtgagattgtccaaattgatgaaaactcatgtaaaatgatattagtagaatgcttttttttttgtttgtttctttcacaaaatctatggtttaagacaatgtttctaattataattcgacaagaatctactggattctaccaaaacttgcatcaaaattaatgtcagctcacaatttttcaataaacactaaaaatcagctcttattctgagtcctcatgctcttcgtctaccttctgaggttcctgctttccaatctgtggccgtctcatagctgaataaacatagagaaagatgaacaaccataatgtcacaacttgtgggagtttgtttattggctttgtatggtttagaaaaacacattctgaaaaataaacttacatttaagagctgacccggcaagacaagtaagccttgatttagtatttgtctcggctaatggttttgtattttctttagccgccattcgcacgtcccaaacacgtatgatcccatcagacgatgcagaaccaatcaagtatggatcttccaaggagccgtcactatcattcctggtaannnnnnnnnnnnnnnnnnttcgagctgggtgagcatcttctatggaatatgcaagcttcccactatttgtatcccaagctgttatagcccgatcctcaccacctgtgaacagagttccactctgttgcaaattaagcaaacatttgtaagccaaagaacaaatcctctaaatcaaatttatcaccatttccacaaataaaacacaagcaccgcatcaataaggaagagaaactctattaagcgagataactctcagaggctttataaacttaaaccgaacacacagttgagcaaaagaagcaacctttagtttatctgattataacacttttcccaaaagagtaatcagagtctagggttgcatactttgatagtattaaattaacctcttttaaggttccaaggtggaatcttctgcaatatgcacacatgggtaacataggactaagcattaaaagagacaaaccaaatcacgcagctctagaacaatttaatcagcaatcaaagcaaaaccaatacacaacaagctaagaatctcaaagttactcacagagaaagcttagtaaaccaatactcaacaacaagccaacaatctcaaagttactcacagacaatagtttgaacatgccaaatgttccaattaagagactaaagttacaattgtgggttccaaagagtaagaaacacaacctctccaggagtagcacagagaatacgcttgcggctcggattctcgagctcaagaagaagcttagcatcttcagactgatgaactccaactttattactcacaaccatgtaaaacctttcaccactaggatcaaatttcacaagactagcttcatgacctaacctacaacaaaaactcctctttcctctaactaaattcaacatcgcaaagaactcatcacgataaacagctaaagcaagcttccctgaaggatgaatcgctaaatcattaaccgctttcttatgaggacgaaacgacttaagcaaaacaaaaggatcagtatcgaatatagcaacggagccatctgcggcggcggagattagattacgagggaaggagagtgaagaaggtgtgtagaaggagagagcggtgattgaagctgcgtgattgtggtcaaggagagagccgagggaagaagcggagggaaggtcgtagaggtggattgtttcttcggagcc

SEQ ID NO: 69287 - DNA, 361 bp, Arabidopsis thaliana landsberg
  unsure (1)..(361): unsure at all n locations
aaaccaaaaaacacgggggcaagagccaagangcaacatataatatttnccccccccccgagcccaggnacaggggcggcccaaaaagagagccttgacactacaagaaaggcacccacaccaaacaaaagaaagggaagacccaaaagggagggcaaccgatgccgagcgatccatacagaaccgaaaaagggaaaagagccgccaagaggagcgggccccagaagggcaagagaaaaaccgccaaagcccaaaactgcagaagaaacaaagcgaaggactccagaaacaaagcacggaaaggggcccataactgcgcccccaggaccaaccccccaacctaaagaggctaggcggggaa

SEQ ID NO: 69288 - DNA, 1426 bp, Arabidopsis thaliana landsberg
ctcacacaaatcactacaagtcatgatcacaattccacaaaatcataagattgatcataaccattttataatttaatcatctattagaaaaacatcatatgtaaaaaaaaacgattcgacaaagatgttttaaaaataataagcatcaacaattaataaaacttaataaattacctaaaagcagctttttcttttcttcaaaaaaagccctttttcttcctctgctttagcatcgtctctttatcatctaaatgtttcaacttacttacttctccttctccattcaaactcaaaaaacctccctccaatgactacttcaccaatccgggttcggatccggactcggatccaaatctccttcatcttcctccttacccatctctcacaatcttcttcctccgaccaatcttcactcaaaacggactcattatcactcctctctttcaaaaccatgatccaagacgatccaaacaacattctctcaaactggtcacctcgtaaatccccttgtcagttctccggcgtcactgtctcggaggaagagtcaccgagattaatctctccggtagtggcctctccggaaccgtctccttcaatgctttcacctctctagattctctctctgttctcaaactctcagagaagttgttcgtcttaaactcaacctctcttcttcttcttcctttaaccctaactcatctcgaactctcttcctccggtttaatcggaaccctccctgaaaatttcttttccaaatactcaaatcttatttccatcaccctctcttacaataacttcaccggaaagttacctaatgatcttttcttaagcagcaagaaactccaaacccttgatctttcttacaacaacattaccggtccaatctccggtttaaccattcctctttcttcttgcgtctccatgacctatctcgatttctccggtaacagtatctccggctatatctctgactcactcatcaactgcaccaacctcaaaagcttgaatctttcttacaacaacttcgatgggcagattccaaaatctttcggtgagcttaaactcttacaaagtttggatctttctcataaccgactcaccggttggatcccgccggagatcggagatacttgccggtcattacaaaacctccggctttcttacaacaacttcactggtgtgatccctgagtcgttgtcctcatgttcttggctacaaagtcttgacctttcaaacaacaacatctccggtccgtttccgaacactatcctccggagttttggatctcttcaaatcttacttctcagcaacaacttaatctccggtgactttccgacttcaatctctgcttgtaagagcttgagaatcgctgacttcagctcgaatcgattcttcggtgtgattccaccggatttatgtcccggag

SEQ ID NO: 69289 - DNA, 609 bp, Arabidopsis thaliana landsberg
tcgagctgtcgccgataggtgccatgctggaaatcctccagctgggtgcccatcgcctttcagtacttgccgacctggtcggcgttgccgccgatcgtgcccagcagcagcttgagcaggttgcggcgggtgcgcggggtcagccgcgcgaccatgcccagatcgaacagcgccaatcgccggtcgtccatcaacagcacgttgcctgggtgcgggtcggcatgcaccagaccgtgcacgaacacctgatcgaggtaggcgcgcatcagctcggccgcttcggcacccatcggctgctcgatccgccgcaccgcgggtatgtgggtcaccttgaccccgcgcacgcgatccatggtcagcacgcgggtggtggtgaagccctccaccggctgcggcacgtacagccgcggataacattccagattggccgcgaagcgtcgcaggttgtccgcttccagctcgaagtcgatctcgttggcgaggctgtggcgcagctcgctgacccagtcgacgaagccgtagcgacgacccatctcggtcatccgctcggccgcaccggccagcttgtccaggatcgccaggtcctcgcgcagggtctgcgcgatgtgc

SEQ ID NO: 69290 - DNA, 766 bp, Arabidopsis thaliana landsberg
gtttcgcatttgatatagagagtgctttcacattagtagcagttttacatttttctatctatcccgttttactaataatcaattttcgaataattcatgaaacttgaaaaataacatctgttttataagtggttcagtctcaaaattgcttgttaaatttaaatttgtcacctttagtcaccaaacacttcggtatcggaatattggtagttagatattatccagcatccaactgttgctgaatggtcaccggttcacaacgatatatttttaggcaaatttgcgagtaaaataattcatcacaaatttgcaatggaattacaagcatcggctacaaatatcacaaattaagagtttctttgagataacaaataacatggcaagaagacaatttggtctaagaaaaatttatattgacctattcaaaacacaacaacttcttgtctctcaagactcccaaatctcagaaaacttggttatttgattcaattgatcctaacctcagcgtctacaccaatcagtttacgtagagtcttactaggaaatgagaattaaacacaaaacattattgaaaccttctcacacaaaatcagtctataagaagcttctttgagatcacaaatatggcaagaacaaaaccattgcataatatatatcatcaaacctaaaacacaataccaaattgaaaacacaaagatgggaaattcaatgaaaaatctattaatatccacgtgtatattaatttacagtgtctaaaaaaaaacag

SEQ ID NO: 69291 - DNA, 487 bp, Arabidopsis thaliana landsberg
ttctcgcctggctccaccttcctgcccccggctaccggtctggcctcagccagcggcagctgtaccatttccgctgccgtccctcatggtgacccggttatctacaaggttcagtcgctcagggatcaggggttcaatcgtagcgaggccatcgcccgtttcttgtacaactacaagcctgcgctatgcatgaagtgcgcaggcacccatgctgaagcaggttcgaacagggtcacgttccgccactgccggaatgccttcgcttctgatgccaaagtccgacaggctcttccgcagtgcccgggttgataggggtgcacggggatggtgggaacaattgcagctcagatcggggtaactgtttctcactctgaaccagctctgcagcccgacttagctgagactatacagacagcacctcatggcccttcgaccatgtgcatcgacagtcatggcccttccccatgtgcatcgacactgtaagtca

SEQ ID NO: 69292 - DNA, 587 bp, Arabidopsis thaliana landsberg
  unsure (1)..(587): unsure at all n locations
tctttataaatcaatctcccttcttatcactctccgaaacccacttccagctttttcctctctctttctctctctagtctctcttttgtagctctcccctgctaagctgaccactgcacgtttccatagagaggaaagatgagtctctctccgagagattttctctctatcatcttatcttcttccgtgtaatgctctgagccaaaacccaataactaaatcaacaacaatatagaagagaagagaaagatcttatctttcttctcattcttgagtttagtcccccacaatggcgattcggaaggaggaagaaagtagagaagaacagagcaattcgcttcttcttgatgctctctactgcgaagaagagaaatgggacgatgaaggagaagaagttgaagaaaactcttccttgtcttcttcttcttctccattcgttgttttgcaacaagatttgttctgggaagatgaagatctggttacactcttctccaaagaagaagaacaaggactcagctgtctcgatgatnnnnnnnnnnnnnnnnnnnnnnnnnnnnnnnnnnnnnnnnntctgagagtcaacgctc

SEQ ID NO: 69293 - DNA, 679 bp, Arabidopsis thaliana landsberg
ctaccttgtcatttgggctgctgtaggtcaagactgggatacaccagatactggctggatgtgagttattggctttatgatgtaagagtactctcatcatttcattcatcttcctgccttacaaatatttacttgttagttgatactctcgtctttgcttctgcagattaaagtcttggagaaaccccaccgttatgtatttcctggctttacaactactaacatcattggttgctttagctgacatatacagtagtagattcggcttcgctagatggcgggacacatggtggtctcacttctcaggaattttcgaacacctaggtttgtaattaatgtactaggcccatacggcttgtccaaatacttactgtaacgttttctcatcatgtgttcatctggtcttggtttgacgttatctcctcctttattactcaggaagtcatcttagggttgcctcctgcttgttgttaccagcagttcaattggcagtgggaatctgcaatccatcatgggtttctttgccattttttattggaagctgtgccggtcttgtggactggtccttgacaagcaatgtttcaggacttttcaggtggatagattattgattattacgcaaagttaccacttccaaaccctgcttctctgaaatctagtcgttttttgtctggttaag

SEQ ID NO: 69294 - DNA, 516 bp, Arabidopsis thaliana landsberg
ggccaatgatctttctcctctcattgatcatcgggtgctgtttcagaattggaaccagtgtatcctggaaaagtggctttaggaatgtggcccttgtatctgaaaggctgggcacatcggcatacatggagcccttgccaaagaatacgccccatttctcaggcaatccttcaaatgtatcgaacccgtaaaaacgggaatcaggatggttattgcctttgacccaccactcaaatgacttacccccgaaaacgccgaactccaggtaatccacaggaatgtcctgcagggaacaggaatccgttacatgccgatacaggtcatatcttttattgtaatcgcgtttcagtaccgggaaatcgttcattgccacttttggctgccgggcaatacagcgcgagagggccagtgtatatgaaaagaacagcatatggcttcgcaaaaagcccagccatgcatgcggccgcacaagaaggaccaggtgtttacagaatgcattcagcgcgataagggtgt

SEQ ID NO: 69295 - DNA, 665 bp, Arabidopsis thaliana landsberg
agctaccacctctcctgatcaattgacttactatcgcacctctgtctgtgctgcatcacatctttcaacccgagcatgccttcttagggttgggactctctaaagtcctggggttccgggaatccattaagctcagaactttcattcagatctctaaagatggacctcccttatactccgaaaagactttcgaaagcataaccctactactctgtgctgggcaaacttccaatctataagattagcgaaacaaacataaaagggctctttcgctcttgtggatgcttcctaatcttagtcccctgtcagtcagggctatccacctcgaattatcctggtggacctgatagtctcgtaacaaactaacttatttgagcacaccgccttcgcggatggaagaactcaagcatctcttctgcgtagatggaagatcaggctcctccaatgtctctatataagatacgttgggaagtagtacgcactaaccaagagaaggagacaggataaacgggagacttcgctgccctcaaccctactacgaggatataggggatagcacagaaggatactatctatctccgttgggatttgggaatagatgtatgctgttaaccactcgaatgcagcacacgccgaagtattagtaggtatgcctcttgtatgac

SEQ ID NO: 69296 - DNA, 646 bp, Arabidopsis thaliana landsberg
ttacaaaatagctttccctaagaatatttgttaaaaaataacgaaaagaactagggtgaaaatattattttactgaaaacgcatgtgatagcaattatatcactctgccactcccacactatttgactcccaccaagtgtgaacacagctatgaaatataccatagctaacaaaatgttacatttactggtcaaaaagcctaaattgagaaataacacgttaagttcatcataattcataatcatgatccttaacccactcgactactgaattcttaacctaatcatgattttcaataatagagataaccaagaacatattagcttagactcctgagaattacacttaatagtcaataataagatgggaattatgatgcaggctgatgattatccctaatctctccctataatattaaaaaggtagaagtacaaaaaacaaacattatttctcaagttaaaattacaaattcaagattctaaaactttgtaaataaccacgaagcaaggtaatatagctctcgggttataaaccacaagctcctcaagattcgaataaactccagcattgaccgccaccgagtcaaacgtaccaccactcgaagaaactccaaccaccgaggtatcctccaccgatgacttcttct

SEQ ID NO: 69297 - DNA, 347 bp, Arabidopsis thaliana landsberg
  unsure (1)..(347): unsure at all n locations
taccttttttnnnnnnnnnnnnnnnnnnnnnnnnnnnnnnnnnnnnnnnnnnnnnnnnnnnnnnnnnnnnnnnnnnnnnnnnnnnnnnnnnnnnnnnnnnnnnnnnnnnnnnnnnnnnnnnnnnnnnnnnnnnnnnnnnnnnnnnnnnnnnnnnnnnnnnnnnnnnnnnnnnnnnnnnnnnnnnnnnnnnnnnnnnnnnnnnnnnnnnnnnnnnnnnnnnnnnnnnnnnnnnnnnnnnnnnnnnnnnnnnnnnnnnnnnnnnntagagcatacagagagatgacagcccccatcggaaagctttacctacctacctctgcccgattctggtacatgctccctttaag

SEQ ID NO: 69298 - DNA, 133 bp, Arabidopsis thaliana landsberg
tagaaatagcaggaaggcgacacagagaaaaaacagagaacccaaaaggagacaaaacatcattttagaggaaaaaaggagaaagaaaaatgagagagaagagaaaaacaaaaaagaaaaaagaagaagaaga

SEQ ID NO: 69299 - DNA, 380 bp, Arabidopsis thaliana landsberg
  unsure (1)..(380): unsure at all n locations
ctattattaatcaaaacacctaaattaaaaaatcaaataaatcgccaaatcaacctcaagctgtttagacactatcctcactgcaacgtaagtaaagaagtcatgaagatgcttcgctgccttagcctccggcgaagcttctccaaagcctaatcnaaattatataacaaaaaaaacattagaaaaataggcattaatctatatagaacaattctgtatgaataaaaaccacattttgtgatgaatatgtcatattgatacataccgggaacatacatcttgttagaacaaatgcgagtttgtttgcattttcgcgaactctgcattaatggataagaaaccaaaggtctttttccaaattttggattaaggtaagagag

SEQ ID NO: 69300 - DNA, 2806 bp, Arabidopsis thaliana landsberg
ctttgctcttggtcagatcagcaatcaacaaccgatgttttggtgttcttaccacaatatgctcctgaaacggctgcgggtaataaagagaagtgaatcaacaagatcttatgatgcagtaaccaaactaagaaatcaagaaagaacgtagttagtacctttctttctcttgaatctccatagaagcagagcaaagattcctatcaagatcacaccaacaagaaccgcgacaatcactgcaatctttgttttcctgttctcccctacttcggaatcagcaagacggatatgaagcgaagaaccaccagcttcaaactgttgtaaatccactaaatcttggttccaaatcatgcatccaataccaccaacaagagaataagcattgcaagaacaattcctcagacacctctctctgcaatcctcaggatcaacaagattatgttcaggaatttcaaaatcaggcaacttcacagatttcaaagtcaagaactcatcctctccaacactaatgttcctttcacacttcaacggtgttcttcttctacaacctctactccaattcccaacagaaacttgctcataaccatgaatacagctacagattccattagagcccttcatatcacaaataccaaacttgccacaacgattatactgatcacactcactatctggctcagactgaaacttagtccacttcttcaaagtctcattccatctcaattcctcttcggttccattataaagaaccttaaacctaagtaacactgatggatctgaaggaacatacgtgaagtacacgctacctgtttcatctggaggagatgaaagcttgaatccgtaaagataattcgtcaacagagacatattcggaatcccggtaaaaatcgcagagttccattgcccgcttctccatttcctcgtcttgttcccttcccaaagcacaatctctggtgctccagagggatcaacccctaatgagtaattaccaggggaaggatcagtctcagatctccatgagacaaaagcgtgattgtctccggtttgtggattcacacgaactctcatctgcggtaagaaggtatctgttgggtgattgaaactctcccaaataggtctatctgtgtcggtttcagacaaaacaaagttcccagtgtcatgtatagaaacgactctgttgttgttgttggtagtgcttgactcgatgtttgaagaccagacagtgatgttcttcccgtctaataacacgagattaccatcgttgcttatcatgagaactccagattggtctgaaattggagttgctctgtttgctacccataccacagctttatcctcgatgttcccataccaaatccctaggaaacgatgcgtagagcttccaggactgaagaaacctagctcgaatgtcttttgtggagagactaaaggtttgtgattgattccgtctcttaaagattcgcctcttctgattgtatttgcagccatggaagattcataaagaaagaagtataagaagagagaaagataaagtgaggttttgcggaagaatctcattttcttggggtttagtgttggagaagaagacacaagtgaggatcttcgtaataaaggattggtttttgaggtttgcttaaagatgaaagaagagaaacagaggaactgtgtctgtcacaatggcggaaacttcctattgataaaaaagtaagaggagaggtgacaaaggagaagggatacaaaaaggaaaggttgctgttttattgctgttgagaagtttctatatttttgtctcgtcaggttggaaagttggaccagagaattgaaataaaaaggtcaaactgtttgaattattatcatctttataaggtattattattattgtcttttaattcttttttgtcatctactttttttgttctttttcaagattatacaacctgcatagaaatatgtgattggtggctgacctaattgttttgaaactttttcttacatctctaagaggattttggacggtgtcagttgacacatgatggattagatactttagcggttcaatttttattaagaaagaaagttaggttttcaagttacatgatttagtaaaaattatattacaattatatagtttccattgattagaaacgtatattaatacaatgacttaggacgatccaaccattcatatcttgtatggactacttctgacgtccttagttcatagtcaatgtttaagagtgatgaggatttatcaaatggttgatgataataagaacaatgagaaggtaatagtatattcctattgtataaggccatcgaagaaaatgtataagctataggtgtggttaccaaatttgaaaataaataagtatgtcaggcaattagtggagcagttggctttgtatactagtttagtggaatatttgcttagttatataatacttagattagatatgcttgttgcctttggccgccacattgactcatatggtcaaagtatcgcacacttgatttggatgggtcttctctttattttattgcacgtgacatattttacgtatcttgatatttcaaattgtattccttcaaagtttaaatgttgtttgctcgcctaaaatcccataataaccctacgattatttagtaatcttttttttgcatgacgcttaagtatttatattaatacgatgcagccaacctcaagtggattgacagcgagtgcactatagaatatccaatactcaacaatgcagatgattctgaaatacattattattctttggtggatagtcattcaagtaagttt

SEQ ID NO: 69301 - DNA, 277 bp, Arabidopsis thaliana landsberg
aaggaccatattgtgatgaccaagagaaactggagattgcacgtgttcaaccagagctggaagagaatacggcccatggcgggaaaatgattaatgcgatgcatactcatcatgatgaactccagatgcgattgtccaacataacacgatggatagaccaccgactgtgcatgaatccgaattctgaaagcgctgcctataattgccatacacagagactgtaggctggcggactgattatgagactataatgagagctggtccgcttataaggcag

SEQ ID NO: 69302 - DNA, 533 bp, Arabidopsis thaliana landsberg
  unsure (1)..(533): unsure at all n locations
attgggntaggatgctcattctccgtttttagtacctattaactgttcttctcccaacagcacgcacataatgttgaaaatcaaacgccaactgccataaaaaaatcatacttttgctttttaatagattcaaatatttatatcgcttgaaacatcgagaaactcgagcgggtatttcataggacacatctcctgattatgagaaatgaacggcgaagcgctgtcgacttcttgagcttacccgataagggttaggtagaacaataaaaggatcttggatgagtcaaaatagatctgcacgaaaataaatcttcgcaaatatattcgataaatgttttaaataaaaaaataaaaccaatctaaaagttaaaatccatattgacataaatcttttcccaagtttttcgaacagttaaacaatctttatctgatgccaaggatctctcgccaagcaaaccagggcttctccgcgtgattcattataaatgcattggccggtcatatctgtacatgcaattcttctttgctcatac

SEQ ID NO: 69303 - DNA, 1960 bp, Arabidopsis thaliana landsberg
gagattccgttcagacatataatgagctgaggttgacgtaattgtttgtacggaagcaaaaacgtattataattatttacttgtaagtttttagttggtagtattagtaagttatacaaaggtgtaaataaactaataattggattagaccaccattatcaatattgttgtatgtaacaaacacggaagtacataaatcgttgagccgtggaaaggagacaaaacatatttttagtctggtgataaaacgagtcgccacgtgtccacagtcgggtacgtgcatgagatctaacacactttataactagcttacgtgggactcttgacttccataaaaacgaagaagattgaaatgaatttaattcattgtccccgattggtctctgtctaaagtcagagaatcagagattcgttttaaagtaaaatgattttgcattggtccacttaagagtcttttacattccaaagggtgggtggacaaaacatgctccaaccctttcttatccaattggccccctcttgtctctcgggaattaaaccctaccccaaagtttttcacatgatttgttcttgaaagtgtctctctcaatctttgctggttattattattatttgatgtgaggcgactagaacgcgtacaaagaaaagaggggagattgaggattaacacgatcgatattccttttggattagatacgtgaagtacccgaaatgtataagttttaacatacactaaattagtgtcagtaataatcggcgtaaatgagaggagtctttcaaaaacatacactacatcttatatgtcgatcaatagacatagttcatacccaaaaaaatatacaattcgatggtataaggtgccatgatttccaaattgagtttttgcttgatatcagttcctatacattgtttatgaggaagaagttatgtatatatgtctataattttatcatatatatatatatatatatatatatatatgataaaattagtgattatttattggttgctcaattatgatttaaagagccataattcttctttagccaaaaaaaaacaggaagagatagaaccataattctttcattaacaacaaggcagataattgcgttgatgatgggtagtgacctttttagttaatattggttcattactgaagataaaatgaactggtgtgctacagctacctgttcagttttattctcaatctatgacaaaagctatgcccatatgttctccaaggcccaatatatgtaaaattaggcctatgaaccaaacactggtttaataagaccggtaagcacaagttggattcggacattatttagaacaaaaccggttcaagagaatctacagaacacaacaagtacagagtctttttgtctttgacatttcataaaccttctcttctctcgataaacttcagatattaaaaaacccaaacttttatttcccccaatcaaaaaccctaatttcttcttatcttgtttggatttttcatttcttctgtttgattttattccacaaacacaataaaaaagtttgcattttttcctcttctaagctcgtttcagatcttcgatttcaccatttttataaactattatgcgaacttagttttgttctttgtgattttgtatgacaatgatcttcttctctaagcttaatcgctccatttctcgttcaaaggttagttgttattttcatttcattgattccttctcagattcgttctcaatttgttttttttttttgcttacctgatttttgtttatatgtgaaattagggatttttgtacggtggtggtgttagatcggcggcaaggctacttacttcgccgggacttgaggcggcgtctgtgaatgaagtggaaggtggattagggtttataagaagacactttgcttctttagcttcacggaagggtttagtcaataatgatttgattggtgtttttgc

SEQ ID NO: 69304 - DNA, 625 bp, Arabidopsis thaliana landsberg
cgacgagctttttcagccccaaaactcaaaatcaatggaatgtctgtccatttacatttattctatctgcatatataggggatctctctatacatatcaaagtcttttatggcattgatatgatcgcctagctgtagccgcatatcacagctgcactcaatatgcggatttctgttggatcagatcttttctttcgctttgacggaagctttttgacctagcgaaaagcactttcgcgcaagcaaagtagaagctttgccagaagcaagacgaggaagtggagctgtcgtataagcggtagcttcccccgaccgactaaaatacaagagtcgcggcctactttgattgcgaaggggtttggcaacaagcaaacggctttctatcatagttgccagggttcaaaaccttagttcgctgcttttcccagtaccagagaagggcttatactgctcgcctttgcttggtttgatatattcattcagtcaaaatacaaactacaacaaagtggaagtggaagggccgctatagaaagcagaacttgctttaaaagtcgggctaacccaaagcgcacgaacaccaaaaaattaatccttatgaatggaaatcctaaagaagggggggggtt

SEQ ID NO: 69305 - DNA, 635 bp, Arabidopsis thaliana landsberg
  unsure (1)..(635): unsure at all n locations
atccatattctccttcctctttcttttcttgttgttcttctttctctggtttagaacttaccggagctttcaccgggatcctggctttaagcgacttttcaggaaaatccatgactttgattcaagaaattcaacaagaagacctaaacgaagatggttgttgaatattcaactgattctatatataagaaattgttaaattttctcttaaagaggaaaaaaagaaagaaacttttaggcgggaaaggttgttttcttgtgtttcttctcgggtaataagtaaaaactcccaaaactttttctcggaaaagaaaaaaagaagagaagatttgagtttagggctttctcttattctctgtgattgaagctgaagaaactccaaaaggaggagtcaaagaagaaaagaggtttggaaatttttatactcggctacaattntatttaatcatgattggataagtgctatactttatttaattatatttcttactttaaaaaaaaaatgtaaatattgacggcggagaaagtttatattaaaggaaggaattctattggatgcaaatattatcgtatataataaatcattcttatgatccttaattccttattcctaagttttataatatgataatgtt

SEQ ID NO: 69306 - DNA, 463 bp, Arabidopsis thaliana landsberg
  unsure (1)..(463): unsure at all n locations
gtcgattagcttcgcctatccagtcagacgacgatagccttcgatcgtgggcttccaccagagtttccttggctacccgtaggcatagtaccatctttggtcccgacggatgctcacactgaaccctctagagatcaggcggcgggggccccgcgagggacccgcaatcagcttcttgcgccttacggttactacccgtgactcgacacatgtagactctggccggttcagacgtcgaaggggccacaggccgccccgagccctgtccgggcacgccgtggcgcggctgaaccacgacacgagcgacgttccagcgatcaagcccggcttagcgcaccgatncggtggccacgccgatgacggggccgattgctcgtccgatcgacagaccatgcggcccatcgttcctcgacattaagcactcttgacttttttaagtcttttatttactgcgtactgtcgc

SEQ ID NO: 69307 - DNA, 537 bp, Arabidopsis thaliana landsberg
acctcacgccgacaatcatctacaggtttcagaatcactgcgtgggttttatgagacctcaacctggatacccagtaccgcagttaccacagttattataacttcgcataaacatggttacttttttacagtcattctttaatcagcccactgctatagtcagatctggtctggaccgtcattttatcatcatgaatactctccgttctcacttcaaccaaggcgtgcaagttgtccctcaagaggtgatgttgtgcatttctttagataccacggtcgcgttcaattcattctagatataagaaggtatgatgctttgttataccagcctatcagtatctacggccagcagctaggtcatggagtgttcaccagcagtggctggggggcaggacgcgaacaagtatcaaggtcgtgtgtgtgtatctctaaaaaaaattacatgaaggcagcaatattgtgtaataatccatatgcatctattgtgttgagtctgtccctttgtctacatttagggggagctgagattgacagata

SEQ ID NO: 69308 - DNA, 2107 bp, Arabidopsis thaliana landsberg
aaacctattaatagaaagccaaaatccagaaccatagaatcgttatattaaccagaataggttatagcatatcctataatagaagattctagtgaaggatggattcggattcactatcctaatcaaatcaaaatctaccaaggaaagttactacttactaatcatagcaatatattcagaaaggaaacaaaaataacaaatcgttgttttgtttcccagaaaaggaaaaaaaagagagaagagtgtttatatatatacttcaccttcgaaatgctcctctaagaagatctcggagaaagccaatggggcaagagttagtacagagacgaggaagaagaagcagaaaaaactgagcttattttgaggtaatcccatttttcagaatttctcacttcatcatggttactgaaaaattgtgcttgggcctttatagcaaagcagaatgttgactcagtgtcgtttggtttagttacaatattgcccctaaggtttggatttttctttttttctctatgttgtttttctcaagtcgtcgtcgcagtgtggagtggactgaagaatattcaaagtcgtttatcatcgtaagaaatggggcaaaactggtctcaaataataattgctatgtttcttgctctaatctcttatattgccattatgatttataacaaatcttgttctaactaaatctagccgaatgttttgtacatgatacttgtagccaaatgttttttatacgaatatgaatcataaataaattcaattatattttctttattttatgagagcgaagaatatattttttttgtagtcaaaaaataaaggttctacaataattaaatgtgggataacgaaatccaaaaagctccaatctaaaacagtacaacatgtcattaacagcatgttcagtccagtccagtccaggcccaataagcacgaaatttctcttctccgaaattaacttaatccttgagtttatttggaaacgacatttataccccttgttatctcaatggttagagaacacgtgtgttgcgcgtgagcatcctccattattacaccaccgttggcctccgacgacggctcaagcctatcttcgtcgccggcttctccgatggttaccaatcgcgtagacgtcttctggcacgaaggaatgctccgacacgacgccgtagaaggcgtcttcgacactggatacgaccctggattcctcgacgtattggagaagcacccggagaacgccgatcgcgtcaggaacatgctttcgattctccgacgcggtcccatcgctcctcatgtcaattggtttaccggtcgtccagcaatcgtttcggagcttctaatgtttcacacttcaggtacatcgctctaaggttcgcagaaaagaaggaacttttataaaaacctgtttctgaatttggtagttttgacaaatcttaaccttaaaaaattcgactttgatttgtgattattgctttctcatgtaatccattgtgatccttgtacagagtacattgagaagctagtggaggcagataaatcaggagaaaggtgtgaaattgccgcaggtactttcatgagcccaggctcgtgggaagctgctcttcttgcagctggaacaactctttcagcaatgcaacatattcttgattgccatgggaaaattgcatatgctctggtacgcccaccaggtcaccactcacagcctactcaggctgatgggtattgcttcctcaacaacgctgctcttgctgtcaagctggcattgaattcgggttcttgttcccgagttgcggttattgacatcgatgtacattatggaaatggcacagctgaagggttttatacatctgataaggttcttacggtgtcactccatatgaaccatggatcatggggatcgtcccacccgcagaaagggtcgattgatgaacttggtgaagacgtgggattgggttacaatctgaatgtccctttaccgaatggcacgggtgaccggggatatgaatatgccatgaatgagctggtggttcctgcagttagaaggtttggacccgatatggttgttctcgttgttggtcaagactctagcgctgtaagttctttcttt

SEQ ID NO: 69309 - DNA, 2988 bp, Arabidopsis thaliana landsberg
  unsure (1)..(2988): unsure at all n locations
acttggtaaccagtttgtgaagaagaatgacgtcattctcgagattgatggtatgaccgtagaagatgatggcaaagttttctatgaaaacaggttgtggatgcacttaaatggtttcattgctttgaacatgtgaatattcggtcccttaatcctttgatagcctctacaaaattttgatctttatagtcaaggtaaaccaacaacgttgattgtgaaattcaagtggtaaaaccgttaaaaacaacatcgagaccttgatttagattataaccattcatgggaaacattttgggtttaagtgacatgaaaaaagattgctttagactatgtgttactttgttatgatttttggaagttttaaatatccactaaaatctattaaatgagaacttatttcacaattaaatgataatatttaatattaaggtctgattagagaatgtgaaagagttgagttgacgcgattaagaaaattcggtgttgtattcttaaccctgcagagaaacatgagattataacactgcaatgcaacaaaatatacaatgcctttactcaattagtaaaaacccaaacgaaataaatctttatttctattttttgcctgcttttttccttttttttctcttttttttttgatgaatgaatagagagagttacacgaaaaaaaaagattacaaagaaacagtccatggaaatcgagagactgttgataatgaacattacatttacaagcatttacagaaacagatgataaaagaaattgattttaaatgttattttttcagggtattaaagatcatcagtgagtaaaagttgcagcaaacgggattagtatgtgaccccttctccattagagctttctttggccatagtttaactaaactcaacctgtaacacatccaaaaatgttgatgatatattgagataataccgttagaagaggattcaaatcatcgaaaaaaattacaggctatgggatgtattcttcttaccttcttcggagaaagcgaaaacaccaccaagcatgtcatcgtcctcatcatcatcgagttttccatcagatggagcatccttatgctcagtttctgtaacagtttcattggagaccacctcctcgaaaaactgctcgaagtttggggagccgtcaatgggtccttcaccctcgtctgctgcattcatgctcatatcagaacggttagaacttacatttgaatctccacttatcccactgctgttttcaatttttgtttcagcgggcagggaggcgttctttggcaagacatgagcgtcgtcgtctatataatcagtgtctttcacagcagaagaaatggaaactacaggctgtttaaatgttacaattccggtatgaggattttggtttggagttagtgcaaaatgggcactccctcttctttcctcatcttcggggtaaaccatacctgctaaaacttcagttttaagatttgacatatcttataatgcatggattaagaaagtaaatttgattaccattgaatggatgcatttctttaacttgtccagggtcagaagaagaagaagaatctgaatctctttccccagaaaatcctctacaagcaaagaagaaccacttcaaaattggatcaatgacagacgcagtttataagatgtgatgcagttagcgaggtaacttacctgttgcgcatactggtatacacactgtgaaaattatcatataccggcagaagatcctttcgcctaatgtcaacctcgttcgcagatactttcccgatttctgtctccccaccaccttgatgcgaattcaggttcttgccatcagagtctggtggatacatcggatagaaagatatctggaattgataaaatttaagggagtgtcagccattgtacattctatatagtaagaagacatgaccagcagagacgtagatggcacctctgaattttgccagattggtttttttccggagtttatcagcacctctgcattggcaagataaacatggtgtttctccagaggctttgtttgatcttcactatcagaagtatcaacagttaactcagcattttttcgtccaccataagtaagcccgcatatgttctcctccctctctggccaatccgctcttcgacagacatcccaacactgaactggttcaactttcactctcagttcctcttcagaggtcagcccagaagttgctccatttcgcgtattgctctcagcctggtctcctccaagagatggaatgagtttgtattgaactacatgacctgatggagtgtaaaccagtaagtagtccaaggcaggagatgacgactgcgattcttgtggcacagattgatggaaaacagcagcaagacagccagaggggaaggtgggttttcctacaacggaacttgcagcatggaagaaattgttgcatttgattcggctaaccacagaaagagtaactgacgctggtggtggatatgaaaaatgggtggtcataaacgacggacttgaccaccatggcagggataatgttggagcaagcgtcggtccatcgaattgagagtttcgtatttcaagaacattttctcccccgaacggggacaaaacataaatatggcaggtgctcttagatgaaacaattgcaatccactgactgtagctactaaagcaaatatcttgtatcacctgtgggaatatagcacaacagcgtttacagtaacataaccatccaaatgaactatagctacaagagaaaaaggaataagaaacatannnnnnnnnnnnnnnnnnnnnntagtttgtaaagaggcacatgggaagagctccaatcatagctttgagcacccggtccattctttgtaggtgtcggcataatccggaaaacgttaatattgttaccgtggattgaggctgttactagtaaagtgccactagggtcgtaacagagagcagagattggactagtgtgagcccttgattgtgctataata

SEQ ID NO: 69310 - DNA, 325 bp, Arabidopsis thaliana landsberg
  unsure (1)..(325): unsure at all n locations
acaaagaaggaaacacatttataaaggccacggncgctttccaaaaaaggacaaattgtcaaagccaaacagaaccacccaggncgaccatacaacgaaaaccaaatacacaaagtcacgaaagacaaaggccaccccgcaaaacgaaaagcaagatgcacattgttactgggagaattttgaactgatcggaaccgatttatgcgaaactactagggatatatgcggtaagggaaatcaagccagatccacacaccaggtgacggaaaccgaatatctgaaaaacacatattgattggggggaaacacacagccatacaaatga

SEQ ID NO: 69311 - DNA, 941 bp, Arabidopsis thaliana landsberg
caaccaatcagaatgaaccatctgagtcagccaaagggtttaatagtcaccatttgccaattgtattcatactctttcctttttggtgcgttattctaagagccctagtcagaattcaaacatttggcaatgaaatcatacaaacttaataaccctaatctactcatctccacgcacacacataataaactcttcttatcctcttctccattcaatctcttattctcttttccttccttcatataccttaaacagcaacgttctctgttcttcttcttctttttcttcctctgtttttctttcacaacttccatgttggactcggacacagacacggactcaggtcctgtggttgcaacaaccaaactcgtcactttcctccagcgtgtgcagcacacggcacttcgatcataccctaaaaaacaaacgcctgatcccaaatcctacattgatctatctctcaaacgtccctacagtctctccaccatcgaatcagccttcgatgatctcacgagcgagtcacatgaccagccagtgccagtggagacgcttgaaaagttcgtcaaggaatattttgacggtgcaggggaggatctgctgcaccacgaaccagtagatttcgtctcagatccctccggcttcctctccaacgtggagaacgaagaagtcagagaatgggcgcgtgaggtacacggtctttggagaaatctgagctgcagagtctctgactcagtaagagagtctgccgaccggcacacgcttctaccgttgccggaaccggttatcattcccggttcgagattcagagaagtctattactgggattcttattgggtcatcaagtaagtcattgtttccaacttttaaatcacaaatcaaatgttttttgttttttggtattaaattgatttcctctcctttcgtgttgactacgtaacaca

SEQ ID NO: 69312 - DNA, 718 bp, Arabidopsis thaliana landsberg
tctcatagattcacagttcaagatcacacgaattcacggtgagaactcaacctgtacacactctagaagaacacactgatacacacacactgaccagtaaaattacttttaacagatcaaagatgcttacatgctcaagtttttcgagagtaatgcacgtcgttttcccaaatggtgcaatgacaatgacgttgtgaaacttccgtactgtcaaatacttgggaaatacaggatggaacttcccggttacaacacaatggagccatacccacatatgaacgagcactgtccgagtctgcctccaaaataccacagaccaaagaactgctagaaccgaaaagtcaactgtattgtctgggtgttaggaatgacttcgagatatatgcacgatttttttttttttttaatatagtgactttaaatagacatgaaaaaaaaaaccattgataagattctggatatttttgtatatataagacacagacacatattttctgcggcgagaaaccctgagttatatggactctgactcacataacatatctcattgatccaacaaaacccaacaaactcatgtcattaatattaccaaaattgattgatgctggatgatagcaattctgcaatacaatgactaagggactaggtcttcaaactaaaactttttttgccattccaaaacattaagacatgtcaaaacttttacgaagcaacacct

SEQ ID NO: 69313 - DNA, 595 bp, Arabidopsis thaliana landsberg
gtaaacaatccgtcacttccgtggtcactgaatccgagttgggtattactcccatgtgctgcgttgcttggattcatggtggcaatcactgccgcatcgtttaaaaaatacctgtaatcaatccaaacacagccgacaagcacttgaggcaccaccacacaccagccattcaataaacacaagtcaatgtatattcacagatagtgctcaagccgtaaactctcatcggacccaatactcacagcgcttagctggtcccccgatgcagtgcttccagttgctcctggaactttccgtctatgatgcgaccgacaccaaagtcggcaaaatgtacctctaccccaagcccgtagacttccgacactgcggtgacggtttgctcgtatacccagccagaagtaagccggccaaaaggaataactggcagtcgatcttgtcgttgaaaggaccagttccttgtcgatgatcaaaatttcggcagcgcacttgccaccgtccgtgcgcccctgctacaggcggctcgccgcagtgtagtcagcctgggggctggcttttggctcacccacggactgctccgactaggcagggcgcacgc

SEQ ID NO: 69314 - DNA, 748 bp, Arabidopsis thaliana landsberg
gggcggactaccaatgtcgaataaaacccaaatttcagaccgtcggattctgcagaactggaaggatgttttgaatccaaggagcgagacatccttattgtatagcaatacgtcattgttgccagttttaatagagaaggaagaacagagtaatagcttaccgaccattccttctgactctttggggcgaactgttagatcaaaggaaggaagctcaaccttccgttctctgacaggagtcggtattgatacgatcgctctctttctgcccttgcatgagtgtcgcattcagtttcgcgacgtcttttcgatcatcatggcctgtgacacatcgacacccaggagaagggtttttgatcagatactctttaccgattctaacggcaatatggcctacggggtcaaggcatattgcaatgtgaatggttttcgaatagacatcgcgccccgttggcgtggaaggaactgtaggcacattgatatccgaattgcttttgagggtcccaaattgtctggtcagtcctcgaatctatatccgaccgatttatgccacacagaggaggtattccggtttgctgagtggcgtttaagcgaacttggcctcatttgtgatctcatgtcagcgcgactggctcgggattgatctattccgcaatctaattctcaagaaccggtagaccgctatatgctgctttgaaaggtatttaatggtccccggatgaaactgtctgagcataaccaacctcat

SEQ ID NO: 69315 - DNA, 492 bp, Arabidopsis thaliana landsberg
  unsure (1)..(492): unsure at all n locations
cgcgtccagcagcgcggcggtcgctttgcggtcggccacgtcgctcgccgcgagcgtcaggtccgccccgagcgcggcgagttcgtcccgcagctccacggcccccggcgcctcggcgccgcgccggcccaccagcaccagacgcgtgacgccgtgcgcggtgaccagatggcggctgacggtacgccccagggcaccggtggctccggtgaccaggacggtgctgtcgggggtgaagacggctgcgggctggtcgctctcggtgggggtgtgccgggtgaggcgggcggcgtggaggtgcccgccccggatcaggacctggggttcgcccgtggcgagggcggtctacaggaaggtgttcccggcggaggggtcggtgtcggtgtccatgaagaagaactgtccggngttctcggcctgtgcggagcgtacgaggccccagacggcggctccggccgggtcggtgacgtactcgccggcagtgccaccgcc

SEQ ID NO: 69316 - DNA, 423 bp, Arabidopsis thaliana landsberg
  unsure (1)..(423): unsure at all n locations
cccaccacaccctgnncgacagcgccggccgtttctacttctagagctgctacatccagggcaagatcgagttcatcttcggcagcggccactccatcttccagtgccccgagatcttcgtgaggcctgaccggcggacggacatccgcggctccatcaccgcgcacgtgcggcaggaggaggacagcagcggcttcgtcttcctcaagggcaaggtgtacggcgtcggggaggtgtacctgggccgcgtcaccgcgccggactcgcgcgtcatcttcgccgacacctacctctccaagaccatccacccggccggctggacaaccataggctacagcggcagcaccgacaaggtgacgctcgcggagttcaactgcactgggccgggcgctgacgtgacgaaccgcgtgccatggtcgcgga

SEQ ID NO: 69317 - DNA, 514 bp, Arabidopsis thaliana landsberg
  unsure (1)..(514): unsure at all n locations
gaaaaagcggacggcgaggtctggatcggcggccagatcatatccttgttccgcggcagcgcggcgttctgaagggtggagcgggtagcgggaatccgctccactcctgaaccgttctgaaaaccgcagaaaaccgtggttttctggtcaagtgattggagttgtatcccactgtgtgggaaggtcaagatgtcgtcggagccgaagacttggtccggagctggcccaaagcggactggcgcatcatgaccatgaatgcgcagctgaagctgcaaacctttgcgttcgccgtccgtcagcagctccgtttcccgctgcnnnnnnnnnnnnnnnnnnnnnnnnnnnnnnnnnnnnnnnnnnnnnnnnnnctcacgaggtcgctcgaagtgagcgtactcgcgcaggagatggcgcgcgacatcatctgcttcgggtgggccagcgttcaggatgacgaacccaccaccatctccatcgcctatcgcgagcaagacttcgtcgactggatacagga

SEQ ID NO: 69318 - DNA, 482 bp, Arabidopsis thaliana landsberg
gcgaggagatctgagccataaagtctcttcttggggaatgattcatgggaggaggaagaaggcgaggcagtggaggactattagccggtgcataacgatgcctcttgcatttgtagcaggactcgcgtctcgcaaagttcaagtttctgcatctgtattcatgacaaaacaaacataatatgggatttagaaacttctctaggttctgagataccaatattctatagagttcatatagaataacctgagattgtagaaatttagaatagcagggatacttacaatggatcaagacagtaccaatctccttctcttggttgcacctttgatatattatttctgctcatgccatcccttccatgtgggaggttcaggcccatctaaacctcttcgataaggacgagcaccagctccacctctactaagggtggggaatagtctcctgtgtctcccaggtgcttcccttctgctgcttaactcac

SEQ ID NO: 69319 - DNA, 459 bp, Arabidopsis thaliana landsberg
  unsure (1)..(459): unsure at all n locations
ttttgaacccaaacacaacacaccgcggggggttganattacttaatcggtcatcccctgtccccatgtaaccactataagtgtaccattcaaacatcacaccttcctattgtaaaaacataagattgtaattcgacccaaaaatataaatattgaaatacatgacagagaaaaaaaaattgctgattcaaggaaatcgaaaaagaaaatatgaaannnnnnnnnnnnnnnnnnnnnnnnnntttagtaattaggcatgcgagcaaaaaaataattaatgaaaattgggggggggggcacggcagggggtttttatccctaacttctcgcaatacaaatataaaagcggataacatgacctgaaaaaattggactgaacccgatcataacacttatataaacaatactttttaaaatttgttcggttggggtctatattaaaaccgcccaaaaaaaaaa

SEQ ID NO: 69320 - DNA, 3251 bp, Arabidopsis thaliana landsberg
cgttaaacttgacatcatattggcgtttagtgaaaaaataaaaaatatatattggtgtttagtggttaattgtagtttggtggtacgcatgtccagataatcagtccggacctaaatcttaagaaaataaaaccaaatcttgacctttaaactaaacatgtcacagacgaaaataacacaacatttccatctctctatacataatataatattttcatttaaattcgtttttttcttcctcctaagcatttgaaagtgttaatactccatagcacactgttgctgccagaattatcaacagcaacaacgaaatgaactagctaaacaagtttcatctaaagtaatctaagaaaaaagaaaaaaattataacagaaataaaaatataaaattcaaaagcaaaatttagattttgttaggctaaggctatatcctttgtttttaatggcccataatgcaagccattcagccgtaaactgtacatactatggtgagtttgtaacataaggcattaaccctcctttggttaatttgaccggagattgttcagattttctccaccgtatatacgatggtagttttgtagggtttgcaacaaaactataaaagtagattcatgtagtagcgaggttatataggacacacaaagacaaccacctaagtgattttattttaagtattacatccaagtacttaatttagtcactcttagaagcgttactttcttcagagcaagcatatcatattcagtcgctgtcgctaccgctgctgcttccactctcattaccactgccatgcccatccttgttcttcttcttgtgctcacttttcctcctatgtttcttctcaccattgttaatgaacattccaaggccattaagaccactgattgtctcatgagttttcttctgggcatgttgccccaagagcttcccatgtccttgactctttttagcctcttggctcttgtgttgccctagaaacgtgcctagcccactctgacccttttggccattttgacccttgaagagcccatcaagaaacccaccgtggctacagtggatcaaagtcgggctaagcccatatactgggcgactctggctatggctatatccctcacggttttggttataaccctcacggttatggatctggccatatcccccacggctctggctctggccatatccctcgtggttgcggctctggctctggccataaccattgcgttggccttgagccacctcgtagtagtctttctcacggttttcgtagtactgcattgttgtaaagaagatgtgattttatggtttgtatttgcgttgtttgcggattttcgtatgagcttttgatgtctatatatactattgatattttcataagagttgctgaaatcaaatagctaggctacatttgctagcggatctgtctttatcttgaaattgttatttagtttaaagttagctaaaattgaatcaattcgaatggcattttctttttacctaacttggatgtcaattacagaattggttcccaattataggtgtccaagattcagattctttgattcatattgatcattgcaatctagaagactataacatgtggaattgttacaatttttttatttttgttttggtgtggtgtggaattgttacaattgttctcatctcttacagtattgtaaaagattaagcttttttttatatataataatatgttcataataatagaagtataggtagagttatgtaacatactcattccataagtgctttgtataaatactgcatgaaagcacaatgagactataatcattgatatgttcatgcgtcatcatccatccttggattcttatttattacattcagacatagtacataatttatatgggcattatttaactagctagtgagcctgcatgtcttcgtttctcacttttacgtagccctgcccatctgaaaaacataacgcaaaatatgtaaaattaacaataattgatatatctacgaatttaaagcatcttttaaatcttgattatagagttcaaaccgcttacatgattagtaattagggaagtgtttgcggctgaagctattgatgggaccagttccttttgcggtgccggtgaggttataattagaacggctttgccagaataaaccggttcgtcccagcagatgtcgctgcgggcaacgaattcagtgtaacctccaacagtcatgggggctccttcgttgtccgaatcagagtccgacttctcgtgggtcatgtttcggcccatttcagttggtttcttctctacttttctaaacgacattgtttcacctgctaagtgtcttttttctgttctcttaggtaaaatgtattgccttggtgaattcttatccgagagttaaggttccatatttatagatgaacttgcatgttgtattagcgtatgcacattgtttggattcctcaagcttctgttacatcattttatgaattagattcatttcaagtggatgagatttacaatcttcaccttttgtgttttgactatatgtgtgctactatcagtatagttaagtattcgttacaacaaaaattcacttggaagacgatttttcttttgtgtcgtttatgttaaagtcgtgatgaccactacattctaccaaatatatgtcttttttgttgttgttgtgatttgtatacttggatcggaccaaagaaatgttcagagttccttgtatcatatgtattaatttttatgatgtgtaatgaactagtttccaagtttcatgcaactttttctttactatgcaaaaatctttagtatcagccgttgatgatcctcttctaccattcatctccataatatgataatagtaaataccattcccaatatggttttggcctcaacaaggttcttctcttttgatcagagcttgttttaaggttttttgccaacccctatcaatgataatgggcacaaaaatgttttcttattatgtgttaaatgctagttattgcaaaagaacctcaaccttttcttctccatcaagctttgaacaagattctaatagtaactaaatgccatttctcaatcggatttatacctccacaaaatgttactttagcatattaaggagaaaaagaccaaataagaacaaaacacatctaactagcgccgaactcacgcatctaaaatgggaattagataagcgtaaactatatataatttatcatctaattaaaaagcaagtgggtt

SEQ ID NO: 69321 - DNA, 534 bp, Arabidopsis thaliana landsberg
aaattctttagatatatatatatatattattattctcatttcttgaaccgcatcatattttatccgcgggtgggggtatatcttcatttggaatctctaaattccacctaatatcgtttaaagggttaacaacttaacattcgatacgaaaggggcaggtgtgaccatccccacgtgtgatttcccatgagagatttttaagcaaagtcttccatagacacatataattagagaacacattgtaaaaactgaaaaataccaaaaagaaaactttgcgttgagtataaggacaataataagagccaccataaatgtttaggtatttaaaagtatgtgaccgaatgtatcaccagtaccttttaatgactattatgccacatcactttggccagaaccctaacgagaggccacacgttccacaatgcattcaacaactgaaacacccatgaatgacttcgcataattttaacgtattctttcttttcttttattgtgaactggatcctacgttgagtatgaacgacaatctctgat

SEQ ID NO: 69322 - DNA, 466 bp, Arabidopsis thaliana landsberg
tgatcatcgtctagctgtctcgatcgaactgtccaaggtcctgtcacagtaggtaaaacgggggcaaagcggcgtattttggtggtgagggtgagcgttgaatgtggttgggcgggggcggcgttggtggtaaagattcgaaaattggtaacaagttattatggttagttaccgttgacaccgtatggtttagaagaccccaagtggtagtaatgacagacgttggtgtggtagcagtactgagcgtagtgtgtaaccaaagagcctgttgggaggggtttggtaaggcccaggaacgttagttagacggcgggttgtgttaaaagccgttaaccaccgaagcaaccataagcattggcacgcatgcgccatcattgaaaggatgacgttaatacaaatgaattgagaagcccggacatagcccaggggttgtagatcagacggaggccacacaaagtacaaaaag

SEQ ID NO: 69323 - DNA, 239 bp, Arabidopsis thaliana landsberg
  unsure (1)..(239): unsure at all n locations
ccgatgccggtatcttccaccacgaatgccagcagtgcaggattattttcatagaggtctatgtgcagggatacctgggcttgtgatgtgaatttgatggcattagataccaggttcttcagtacctgctccatacgcatacggtctgtacggaatgatgcangtacacccgggcctgccgccaccnnnnnnnnnnnnnnnnnnnnnnnnnnnnnnngccggaacaacgcactgatgcc

SEQ ID NO: 69324 - DNA, 603 bp, Arabidopsis thaliana landsberg
gtaaccgaatcgtgccggctcaaccaccaaccgcttcggatgagctctgccatcgtcccgcgagtcacatcaaagagactgagacggagaaggagaagaagaagagatatggccggacttctagcttgggctgccgatgtcgtcggtaaaaatggaaaagaaggagacgatgagaaggatcggatcccattggttttcacggaggagcagcagaaatacgtcgatgagcttggccgaaaagcgacaaacctcagccgttcgatccaagatctgcgggtcagattgcctccaccggatatctcccagcgtctacctgaccttcatgctcactcccttgcgtgcaatgccgctctcactcttcagcttgattcgcactccgcttctcgtgaacaggttcgagttattgaaatactattgctgatttgggaatagtgtttttgcgttataggattagtctttaaatggatatggctttggctgatgttgaagtgatcctaatggttattcttttggtattgcaactaggcacccatgagagagcagacactgctggaagaaaatagagcctatgagaatgcaatatcaacctgggagacaaaaatt

SEQ ID NO: 69325 - DNA, 510 bp, Arabidopsis thaliana landsberg
cggagtgtcccgccgccctcgcggtggtgtcgtgctggtttccgttcaccattgccatgagaggcaattggaggggtggggtagataatggcggtcgccccgggggttcctgggtgccccaccagcccttccgcggtgcttcggcggtgccgcggcggcgcgaggacccgggatcgtcatggagtacgcggcggattccgagccagttttcaggatccggcggcatcctgctccaagcgcgccgcggggattcctgatgctgcggggatacctggttcagcgcgcatcggtgttttcgtgacgaagtcgttttacgcactcaggaggtcaggatccgtgccgggctatcaggaacgtcagcgcaagcgcgcacgcgagcgttttgagcgtcagcgggcgatcaggctcgagcgtcagcgcaagctccgcaagtgggctgggatctcgctcgccatcgccgtgatcgtcgcgctcgccatcacccttcccctgaccgtgctcagcggatcg

SEQ ID NO: 69326 - DNA, 368 bp, Arabidopsis thaliana landsberg
tatgatcaatcccaaaccgaacattgtattatttgtctgattaatatggtatgggccatacagacctctcaggaaggtaaaacccacgtattatcttgactggagacttacagctatttgacttgatttgccggccacacacagttggttatctcagttgacatggatgtctagagctaggttacctcatctggaaaaaggagtgttacctactacgatgctctaagaacctgaccgccatatgcagagattgctccgaaggggaactgccccagatttaaatattaagtttttaacaacttacatgatgttaacaagaactaaatcattgtatttaaagcgataccgatgagtaacatggccttatg

SEQ ID NO: 69327 - DNA, 2349 bp, Arabidopsis thaliana landsberg
ataaaatgttataaactgaatgatttctgtttatattttaatattattcaaaaatgttgtacaaatacgaccaagaatattaataggtgttaatcatatactatacgatcataatatttaccctcaatctaaaaggtaaaaaaacctcttgaatcatcaggaccaagtacagttcattgaccatgcgaaagcataaattatatttttccaatgaaatatttttcattcaggaaaagactctagttttcaatttcatgtcgaaatgctgtcaaacacatttttcttagatagataaactaaatataagtttgatttgagttagtaagttagatacattcatacatagattggttgttataaatgaccacactcttgattttactttcttgacaggtggttgtaatttcattgaccacaagttataatgcagatatcgcttaacttattaaggtacggtatcgatattttcatttagtcaccatcataagttaccacgtcttcttcttcttttgccttatcttccatacacctacttggatcggttgagagtaaacatataacataacaaggagtcaagggcatatagtaacgtgtgataataatatatatttcactgaatcaggtatatcatgttaattaccttacgtaatgacaaatgtcaaatgttgtatggtagttagcaatatagaaaaacttgttaatattccattgatacctaaataagctatcaacttagtattcacgtaatgtcctaaacaattcaattctaaccaacattataacttaatatcgttgaattgttagacgaaaataaaatttgaaccctatataaattgctaagttcttgcgtacatgctttgtagacataaattattagagagacgaaaggaaaagcatgtttaaactctgtctcgttctcgtcttggttattgcagtagatgcaaatccggctaagtccggttcttgtagttgctccgggaatatatcagcgagcgatgtcgatcgagttcatttcgcgatgaacttggagttcaccgaggccgagttcttcttaaaaggggctaccggaaaaggacttgatgcctataacgcgacacttgctaaaggcggaccaccgccgataggggccaagaaagccaaccttgatcctataactaatcgaatcatcgaggagtttggttatcaagaaatcggtcatcttaggtaaaacaatcaaattcaaattttccttcaatagttgttgtgcatgacctttaaaattttaaaataagttacgatgatattgaagggcgattacggatatgacgggaggaattccacgtccgctaataaatctgacgagagagaatttcgcagtgtttatggatagagcggttggacgcaaatctaatccgcggtttgatccttacgccaactcactcaactatctcttagcttcatattatatcccttatgttggccttaccggttatgtcggaaccatcccttaccttgtctacttcaatatcaaaaaggtaatcaactatgattgtgtatatatattttcgcaggagaagagtaatatggtgctactgctatttacggatttatatttgaaaattctggcaacccaaaaaccatactatataatatgtatcaaaactaaaagtagttgaaagaaatatattcataatcttactttcaaattagtttagatttaaaatagttctaatagcttacgcatagtaaaagctttactaaactctataaaaaaacaggctaatgcaaaaatacatgttataacaaaacatttacatgttatatatatacacgttacaaattatactaaggtacacgttaagctacactatatacacgatcgacataataattttctattagtgattattaagatattaatgtatatcagctagtggcgggtctattgggggtggaatcgggtcaagacgcagtgataagaacgcttctgtacgagagacagaatgagaaggtggaggaatacggtggagtcacggtggctgagctgaccaatgagatatctaacctccgtaatgaactcggtatgtgcgggatcaaggacgaaggcttgtgcgtgccgttgtggctaggagcggagaatcgcaccaccagcaacatcctctccgctgatccttactctctctcttatgaccggacagcacaagagatcctcagggttatgtacggcaccggtgatgagcaccgacctggcgggttttggccgtgtggtgccaatggaaggatcgctaggatgtttcttgatgaagggtgttatggtgaatattgcgttgtatgttcacatgacaattaaaagtttccattgatacaatt

SEQ ID NO: 69328 - DNA, 404 bp, Arabidopsis thaliana landsberg
aaggttcaatggcagtccattctaatgatattttatggaggacaattcaggggcacgtacgattgtatgagccattcactaaacagaattgactgtagaattgagacgataaaagtagaagacgactgaaatgagactctacttacaccttgatctacttcagtttgtctgatatttgtacaagataattatgagttgggattagatctacaacactcataggatcagagcataatattatgaaagtgtattccatctgatcttgtaattgactaactttatacagtacgggatacacactccatcatatcacagaaaaatatttaggattaatgctgagtaatgaaacaaggaagggaagaaaacagatcttaagatttagtacggaacatttttatataggg

SEQ ID NO: 69329 - DNA, 565 bp, Arabidopsis thaliana landsberg
  unsure (1)..(565): unsure at all n locations
cgaaaaacaagctattagactgtgtaaggatacgtgaaccatcatcactgtcaacttcagactctggaggtacactatcaggtataggtcattactgtgggctctctctgcctgcaccagatacacaagtgtcaaatggcaaatcgcaagcttctaggctgnnnnnnnnnnnnnnnnnnattaagccttccttatgtgggcacaaatcctgtaaatgcctcctagggcatagccacacattgttaaccaaggctttgggccagcccagagcttctgaatttagatacatttagataccatgctgagagatgctgttaactcctggaagtacaagctctcaggcatacttatcagaagcccatgtggcattcttgataccaggatgtggaaagcagacagccaagaacccacctaaggaggtagagttgaatgagaggtggaggttcatgtgatccacgcccgcagtccccagactctgttccctgatcccatcaggcttccctcaaaacatgcaatcccaacagaaaaggatgaagtctctgcaggtatcagtgatagagccaga

SEQ ID NO: 69330 - DNA, 550 bp, Arabidopsis thaliana landsberg
ttcttgaatttttcttttgccgggtcccattcgaggggtcttccgagttagtttgcaatattggcgagggcgcagacgcgtgctggtgcgatggcctgtttccacatcggcaacgggttgcctgccggctttgatcgcgtccagccagtcctggtaatgattggtgctgttgtaaaccctttttgccccgggttccagcgtggcggtaactatattggcagggttgctgtcgagaaactccctgcttacatcaatagagcctttttcgccaataaaacgcacggcatatttcctgccaaaatccacatgcttcattactacgccattggcataggtcattgcgaggcctctcagttgcgtaccggcaggagggtcaaattttacggggccactcccgtccatatccaatccccactgggctatatcaaacatatgtgcaccccagtcgctcaacaatccgccgccatattctttatagttgcgccagtgcgggtaaatatcctgttcaatgggtggcgatagttctgtatgataaggccgcaccacggag

SEQ ID NO: 69331 - DNA, 398 bp, Arabidopsis thaliana landsberg
  unsure (1)..(398): unsure at all n locations
gcgtgtccgtcgtgctgctggttttttatggatccgttatgacgtggtcccaatcgactgcgcgatcatgtcgatcaaaggatcgagcatgaaggtctcctgctcgtcctgacatgcagtacgctcagggtcatcgtagttcaggcactgaggtgtacgcagggtgaaggtcaggatcatgagggaatcatnnnnnnnnnnnnnnnnnnnnnnnnnnnnnnnnnnnnnncccgctgccccttcagtgatctgtgttacgcagtattccctgccttctacggtccgaagcttggtctttccggcgcgagcggtctcattcgcctgcagccggacaggagaatggttcatcgaggaccttgaattgcggaggccagtcaacaagagcgatataagaggtt

SEQ ID NO: 69332 - DNA, 1110 bp, Arabidopsis thaliana landsberg
taatactaataattttgttaagatcagtgtgttcaactgtgtgttatactgtataacttatacaagaatcaacacttacaagatatacaatgaagaaaaaagagagttttatggagcttatctttcaccaatagtctccacaggagcaagttccattcttgaaacgatgaaacctcctaacatctctcaagatgatttctctatcaacaatctttgagataaacttggttgcaagatgacaatcattacaaaccctgaggtttttagccaccctaataattgtaccgggtgatgtgttaagtatcccaaacgcaattgctagcttctcactgtgtccacaaagcagaatctctttttcatcttcctctacattgtggagtacacaagatgtgtcaggtacatatccttcttttctcattctctcccacaatgtctcgagatatccactgagcttttcgctttgcgggtgagatgagtcaccggctacaaatttatgtacttcatcgccatgctcaatccagctacatccaggttcttttctcacgccttgctctttcatatttcttcttacctctgttgctttatcccagaggcctgctgatgaataaatattggcaagtaacacatagtgactagctacatttggttccagttgaatgagattttgagcagcaatttctccaatttctaggttattgtgaatccgactggcaccaaggaggctactccatgctccagctttgttgaaatcacgaggcatcatattcatgagttgatatgcttctttaattctaccagcccttccaagcaaatctacaacacaagcataatgatctgagcttggttcaaccccgtagtcgggtttcataacatagaatatccttaatccttcgtccaccatgcctgagtggctacaagctgcaaatactgagatgaatgtaacctcgtttggttttactccctgaaccatcatcattcttagcagatctatggcttcttgaccgtttccatgcatcccgtaagccattataatcccattccaagtaataacatttttttgtggaaactgatcaaacacttttctcgacatctgtaggcagccgcctttgc

SEQ ID NO: 69333 - DNA, 724 bp, Arabidopsis thaliana landsberg
cggacgacgaggcgaccaccggcgttcacggtggcaccgacgaccgcgtccccgggcccgacctcgaccggtaccgattccccggtgagcatcgaggcgtccaccgccgaggtgccgcgttcgatcacgccgtcggtggcgatcttctcgcccgggcgtacgacgaagaggtcgccgacggcgaggttctccacgggaatcctggtctcggtgacgccgtcgggctccagtacggcgacctccttggcgccgagctcgagcagtgccctcagtgcggcgcccgcgcggcgcttggaccgttgctcgaagtagcggccggcgaggatgaaggtggtgacgccggcggcggcttcgaggtagatgttgccggcaccgtcggtccgctcgacggtgagctcgaagggatgggtcatgccgggtgtgccggcggtcccccagaacagtgcgtagagcgaccacccgagcgctgcgagggtgcccagggagatgagggtgtccatcgtggaggttccgtggcgcaagttggtccatgccgcccggtgaaacggccaggctccccagacgaccaccggtgcggcgagggtcaaggacagccactgccagtactcgaactgcagggccggtgccatcgccttcgcgatgaaccggcactcgccgagcgagcgagatcagcagccgttgtcggagcgtccgcgtcgggtccggctccttggcggcgtgcgcc

SEQ ID NO: 69334 - DNA, 1512 bp, Arabidopsis thaliana landsberg
cattgagagattaatcgatggaatccaattccagatgggatcaagaaattgagtgtttgaaaattgttttagcttccctcaattttcaaattcccgcttgtccctttggtataggaggatgtcggagacacagtacccaccaaatggagtttaagtagttcacctctcctagattttgttgtcgagaaaaccctatatagacagaggttccagaagaaataagcaatcaaataacctaaatatacaattaccaaaccggattttaaccgtagatttaaattggtataaatccggcttagtgtaatttcatcaatcgaacagtttatctccagaatcaaagataaacggaggagaagagagcttcgtcgtcttcttcttcttcgcctccatgaatctcctcaagacgattcattaccagtctaccattactcgattttaccgttttgcccctacacgctcctttgcttcttctgtgtcactctctccacagagacacataatctctctcgtttctatctctaatcgtggaaggtgcttcgcattctcgagcgtctctggtgcttcgctttataataatcaagaggatgggaagaaagaagaatccgagagaaattacgcttcgacgaaggaaggagatgaagtggtttaccagaaaacgctgagattagtagaatgtgccatgttcgctgctgtgacaggcctcgtttactttctcagcaattctctcgccattgaggttaatttttcttgccttataattcccataaggacattggagtattgaggttaagtttgatcttatttttcatagaagacattgccaaaaatgtcaactttggaaacaaaggatgtgtgtgagaatcatcgttcttttgtgtgtttgatcgttagtgtgataaacatttcatacttacttgttcctttttaatgagtatgagtttacatttttgaacgcagaactactttgggtgtttcttctcactaccaattgtgatttcttcgataagatggaacattgcaggtggcaggaagacaatggtttgtaaaagaacattctttttctcattaataagaatttctcaagttttttttgtgaatatgtgcttcaagtcttttgtggtgtttgtttgtttgtttctcaggttgctactgtcatgctgttgttcatattatcaggtccggtcaaggcattaacttactttgtaagcctccgctttcctagattgccaagcagagttttatctcgtgaccattgcttaacttttggagattttatttttgtagcttactcatggtcttgtggggcttgcactgggatcattgtggaggtagttgaattcatacactcctctctatctttgcacagtttctactttctagttctctactgcaacaaaaacatacatcttactaattcctgtctttactgttgaagaaaatgtctcagttgtttattttcttgcaatattattctgttctcagtatgggggcaagctggcgtctctcgatttt

SEQ ID NO: 69335 - DNA, 597 bp, Arabidopsis thaliana landsberg
gagctatgacgtcgcatgcacgcgtacgtaagcttggatcctctagagcggccgccctttttttttttttttattcgatttgggttttaattaataattaatctaatcgtctttgacaagtatataataacaagaaaaatgcttatgaaacgaaaatgaaatatttatgaggaaattttgtagctgacgatagaaaagcctcctagatcgatgtcttattatctcaagccagtagctgataatgccattagctacgccgtccaaaatccaaatcatcaatgtccgttttagcgctgaagcgaataaagtatgtcaataccttatacgaggcaaacaacctaattctttgtcatattttcgtatgaactatgaatcttttttattttgtgtaattcttaaaaacaaaatagagttccgatttttcaggtaatgaagtttaagacccattcgaaatttataaatttataaatttttttaagttcgagtcagttaagatatttacattcaaaactggttcccgttctaggtaaagtagtcaaactatcccaaaaaattgtaattgcaacaaaacttggtaaaaaatgtatttataattgc

SEQ ID NO: 69336 - DNA, 134 bp, Arabidopsis thaliana landsberg
atctggcatcctgtaactctactctgtgtctctttacttacgcaatattatcattcatctgcgtgcatgtctgcgagcctgatgtctgagttgtgactgagaattcttacggatgggatagagtagatgtggac

SEQ ID NO: 69337 - DNA, 586 bp, Arabidopsis thaliana landsberg
ctgggttaaggcctgactatgccaccggtcgttctagcatagtcactgatacccaacttgcgtcctcggattacttcaggcggcccattggaaaatatacttttaccaggcctactcaatcctatcttaggaagcccgcatctctgtgtcaaacctttttgaaaaggctctacttgaattgaataatatttctttattccgacttcgccaatgaaagagggtagttgaatagaccgatatatctagaaagtgtggagtgagtgaatggtggaaaaaaagtaactggcaccgccccttgctggatagaatatcgagatgcacatgggattggggtgctctctaagtgaggggccgtggaactatagcttagatagaaaggttttttaggccggacaaaggtctaggttaagtcccgagagaaggcttgatgaacaccacctcctggttagtgattgggcacatgcttcctttacggcgtagaatcggcttttttttttgacgtatcagagagggccttttttttaccggccggaggttctatttatgcaagtatcttcactttaaatacccccaacctatacatttt

SEQ ID NO: 69338 - DNA, 533 bp, Arabidopsis thaliana landsberg
tcaaatacatgaaactgtggagagctatttacattggcatcacatggaatgagtgaaatgttagatgtttactgagaagaacaagctgaatccgcagtgacagggacatttaatcagttcgtagccatgttcgacgatccagattggggatttggtataatgtctacgatccttaaactggaggctaacgatataaaccgccatggaaaccaaggatgctcggattgtcggtacccggcaatccgatcccgggttaaggaagagagagtccggctcagtttgtgacgcccgtgttactatgcaatggaacgaccaccactttcttgatgcaggctgcatgctttaatacgagcggtctgatattgccatagaaaccatgcaatctggctgagaatgactctcgaaacacactggtacgagagcactcgtctcttacttgaagggtacaaagactctaactaagctagtgtacgtctactccgatgttagctaataagttgaaaattgtgacactgctctttttaacttgtgtg

SEQ ID NO: 69339 - DNA, 420 bp, Arabidopsis thaliana landsberg
cttgtcgttggaggattacttgtaattgcctttgtagttcccatggcacaatactttgcttatgtctccaggaagtaagtaagtaaactcggttcactctcgtaaaccaaaccgatcaggtcagaactttgatttacctcggttatttggttatggattcttggtaaattggtttatttgaacaatataagtaaataataacagaaaactaaagaatgaatgaaaccatccgattgtaacggcattgtttaaaatttcaaggttagaaaaaatggcatttgatctgaaaacggtggatcggaatattttccggttaagatttgagatgagacgaactcgtttgcggcttcggtataatgaattccatcccagtttatgtactcggaactatccgtgcaagctctggctgttactgatatc

SEQ ID NO: 69340 - DNA, 2183 bp, Arabidopsis thaliana landsberg
aagtaacagccctttgttgcttctagaaccttgtgctagtatcactttaagcgtcataatcttgtatagactttttcttaacatcatggtgttcatacttcatatcatgagtacaatttgtggaagttcggttgtcagatcccacatatttaatactggcttacatttgcagggtgaaaggaacaagattctttgagtgccctcggcttcaaggtggtatggtcaggcctgacaaagtaaaggtattttttttctttaaggccttagcttctccgttgcctaattcattttgcttgtgaaatgatttattacatttcatagaactggttagtcattctacatcatccatcgtatagtagtatttgctgtttctcaaatagatgtcaatgcgggttttacctttccaagtttgatattaggagtctggagtcgagtatgggttagctatagaactagctaatgcctaagggtgttatcactctcaagctaacgtttgggcgagtttgactttctggacatggtttggacctagtatggattgggttcttagtagttaacctagtttaagtgattagaaaaccattttctgctactcatgaacttgatgttggcttgcaggttggtgattatccggaaagagaccctttcgaggaagatgaaatataagactttcacgaaagcatcaaatattaaggagcggaaggagtttgaaagatttgcttttgtgttcaaaatccactcttttatcttattacattttgcctctagttttggatttacaagagttggtgaaacacaatgcagcacaaagtattaattttaatgaactagtagtaacaatttgatttcacaaggattcaggttatgatctgtggtttatacacaattatccaacgacttgcaatgcggatatactactggtcaagaaccaaagaacagatgtacttatatgtctaagtttctggtccttagtctctatcttgtaccaaattgttgatcatcttagcaagaggaacagtcccctttgtcatgatctccaatcttgaggtattggaagcgtgtgagaagagcgacaacccgaagaccaacagttccgggagaaacagcctggaagacaagaatccgtgccagtaatgaggttgcagatcaaagaatgcatcaaagaaccttctagtagcgtctaaatcgagtttcagcagaatatccattccaaaacagaagaactccctctgtctacgccgttcgataggccacaagtctctccaaacctcagcagagagttgatctcctctcaggctattactacttggtgaaccgaggtatctcacaatagcatttgcaactattggtgcagctgcaagagtcctagcaaccatgtaaccagttgaaggatgaaccattcctgctgtcccaccaatccccacaacccgttgaggtaagactggtaaaggaccgcccatcgggatcacacaacgctcgtcttcctcaatcctcttcacattgatccccagatgtttcagtctagcagccattctttcttggatatcttccattctcagaccaggtctagcaactaaagaagtttcttcaagaaatattcggttggaagaaaatggcatagcgtacaagaacgttgggatcttgctgttccgttctttcagctcaggatatgagtccagatgtttgtctctccaatccatgaacaccattttgtctacatcgaatgggtgaccatcaacttcagctacaatcccgtaagctacttggtacccagggttgtaaggtttgtcatactgaaccaagcatcgggaaaacccagtggcatcaagaaccacggaagcctgaatctttacaccgtcactgcagaccacagtggagtttgcctcctcgtgaaccacattagtgaccttagactgatgaaatttaacaccgttggtaatacatttctgaagcattttggatttgagctgtttccggttaactctcccataaggccggctcaaatccttcttgacaccttcatcgacatagacaacagcaccagaccatgtggtatccaggcagtctagtaaatccatagcctcaaactcatcaacccaaactccataattgttaggccatatgagcttaggagaaggatcaatggaacaaacagagagtccagcttcagaaacctgctgagc

SEQ ID NO: 69341 - DNA, 528 bp, Arabidopsis thaliana landsberg
caactttaataaagggcaattttaaaaagaagtagcttaagtgctttcttttattgataggcaataggttggtgaaccttcaatatgacaccatttttgtgctgaacataaattacggactattatatatgtttttaatcgatcagagcttgtaattttcgtggttatgtttgatagtttcaatttaaacccaaaatacgatcaatgaataattagtgcatattatgttactatagttctcagttctcacctagtgtttggtatgcgatttttaaaatgtttttgctataataatgatttttccgaccaatatcgaatcaaatttcgttatgaaaccactctacttgatttaacctctgaacctcatatttgtttttggtttgtcaaagaacctcatgttctaatatcaaatcaagaaaacctattatacgcatctaggttttttgacaaatgacttaagcaaattctatagactacaatatccattacacattagtacatgttatgatcaatgatgtaaacaaataa

SEQ ID NO: 69342 - DNA, 633 bp, Arabidopsis thaliana landsberg
  unsure (1)..(633): unsure at all n locations
ttgattatacagggctataaaaactatatgtagtataatatatatattttttttcttaaaacaaagacaataacatttctagaggagttggctttaaaacatgtgttaataaaaaagggctattttgtttttactggattttgattttaaagataaaaaaaaaaaaaaaaaaaaaagggagatgagataagcttcttcttcaccactaatctcgttcttcctcctcctcgtcgttccatcttcatccttcttctctttacgtgactgtcttgttctctaatatatggaagctccaacgcctctcttccttctcacaaacaaaaccttcttcaccacatccgaagctgacgacggaagagcaatggtcgctttagctaattcattcaatccattctcgtcagattggtcttccatcactgatttctgctagtgttctggcgtataatgtaccggaattcgagtcaacaataaaatgtaagtcaccggcgaatttggaaatcgaaatgtctgttccacttcctatgactcttttcttttaaatctcttcagataaatgggtgcaggacaatgttgataccatagaattagagcattgacagctanaagttctcgagcatgaattcattgttgata

SEQ ID NO: 69343 - DNA, 1011 bp, Arabidopsis thaliana landsberg
tggtaatcttatttttagcaaaatattgcgttagtaatattgttcatggtcgtgagtcctgacagtgagtaacctccacattaagaaaaccttgttttacaggattgttacccagagagattagggaaactctatatagttcatgccccctacattttcatgaccgcatggaaggtcatttatccttttatcgacgccaacaccaagaaaaaggtacattgatttgctctgcttcacaatcactttattagtatgttttaagactgtgttggaaaatttgattgttaatttcgtgtttttttgggggggcagattgttttcgtggagaacaagaaactcactccaacgctgcttgaagacatagacgaaagccaacttcccgacatctacggaggcaaattgccacttgttcctattcaggagacctgattataggtcttactacggcccacctctatttccaaattattacttactagtattattttttatttgaataaaatgaaaaacatattgagtgtcgccaaatgccaacaattatatatttactgtcaaagaagctaaaagatataatattgaaaacacctttaaatttcatgtaatttttcataattatctatctactgtgatctagccataatacttcggcaactatacaatttcagtctagcttgctgttgctcttccctgcaaatctaacacacaacttgttccaactagaattctaaaccaaaacaacaaaataatataaaagaggtttaatttatgaagggtacattgaaaaaaagaaaacaccttgaattgataatccataaaacaagtctttactaatattttcactcttattagaaagaaaagaagaaaccatcaaatcccctttggcaagtgagatcgatccacttacacaagctgtttgttcaccagatgcgtgggcgagtattaccatttagaggagctccatgatctttggctttggctttggtctctctcagataagcccgagtgatctcc

SEQ ID NO: 69344 - DNA, 2671 bp, Arabidopsis thaliana landsberg
tttatcataaacattggggtcatgatatacctttatatccgcatttgcgcatcatctttgacagattttttataaaacaaaatcgcttgaacctggcaaaaaaatcttataatccgacattctggttcaatttaaccttatgtccttatgctttgtgtctgtttaatgtggtttgcaattttttgaagaactcgtagatcgaaatatacattacatagtctagtaaatagatgagtgtgaatgaatcaaatgtcttcagagaaatcagggtaaggttgcactaggtagacaaatggagacaagatattgtttagaaaaagaattgataactgtagggatgtgttttcaggtgatccatcttatcattttcagtaataaaaaggaaacctattatgataagtaccttaatctaatgttaaatccgatcaaaatcgtgcaccgttctgcaggtacgactggctggcgaacaagaggctaaagtcagggtacttccttgggacaatgtctgcttatggtctaggtatgatccctcacgtaggggagaaacgaataagaaatctagtaaaggttttttaatatgattcttgacaatcacaggtcttctcataacatacatagctctaaacttgatggacggacatgggcaaccggctctgctttacatcgtcccattcatactaggtaagaacactgaacccacaacagatgttttggaaccaaaagctatgtatgttttgaaactaagaatggtttgtggtgcaatgtgtcaggtactttgttcgtgttgggtcacaagagaggtgacttgaagacgctgtggacaacaggggaacccgacaggccatgccctcacgttcgtcttcaacctcaatcgtcttaaaacaacctgctatgtatcagatgggaacagataaaaatcagatgatcctctagtttttttttattgtaatacaacacaccccttcttaggtcaatatatatgtctctgtacgctttcacacaactagacaggagagcccataccacatttgccttaaataactcttttaacctctcttgctagtttctctctattattagacatgaaaccatgaatagacttggcttcttttcctgagtcatgatgatcagattttcttctataacatacatatgtccaactagtattttacagattactaatgtaaaagggtcacaagttttttagaggaattatatatagtagcaactaaaatttttcattaatatgactgatagtaataaaaactgatgctaacacttctaatataaagttgatgttgataaaagtctagcttaactgaaaagaaaagaaaaaaaaacgagtcttgaaaataaatcagaagttgttgttgttggtttgttatgggccgataccggtgacccattagagcacgttggacctatagttaaaatgctggaaaagatcttaaaaaaattctagtgatatttcaaaatccgatattcacctaaactttcgctttaaacatttgcttttccgaatttttttgataataaatattgctccactaaaaatataatcttaaattatatcgatatcacaagtaaagtaatcatcaagtcaagttcagagtctctcagatcatcgtaccgaatctatagaggaagcagccgatctcgctatcagtcggtaatatacactatcattctactttcctaatttctcttcttctttttgttttctttgagaattgcatgacaaacccttggaaaagggttgttttaaaatcatcatgaaatttgagaatatgatcggtggcttgattgaattttcgttttgtgtgagtggtctttctgtttgagttttaaaatttcggagagtggcgttttaagattcgataccatatccttggataactattagccagaacaatactttcaaattttaaagctttgattagagttttaaagcttaggggaggatcacaaatttacaatattgatcttatgaatagagaacctctctactactactcttaagatttgttgattaaaataaacaattgtggcatgtatggttaactttgatcttcttggtatttcgttctctgtttggccaagtaatactacatactaaagctttttggttgtgacattagtttgaataaactaatgacagaagcagagcaaaaggcggctttcctcggtggtcttgttgtctcattcaaggagcaaatgcatactgatgttctcgttaaacctggtgaagaagctccacccatacctacccacaaagccgttctggtaacagatgatttacattttgcttttatattaatgtcacagttctagtctcaagacattactatatttagatatgatatgataacactggatcatgatacgactgaataaatctgtttttgttctaggcggcaagatcaaaggtcttcaggaacatgttagattctgatgaatgcaagacctcccccgaggaatcaatcactctccctgatttgtcccacgacgaactcaaatctcttctcgagttcctctacagcggtaacctaaaagctccatacaatcaataccgatccctatatctggctgcagataagtacgacatttcatatctgcaagacgtatgccgtaaccatttcatcgcatctctgagctctaggaacgtcctaga

SEQ ID NO: 69345 - DNA, 1534 bp, Arabidopsis thaliana landsberg
tcatggatgcctataattatgtttccttaaggctaaagtttatctttcttgttattactttcgcattcgacttcttaccttgtttcattgtgttctcattttcagctgattgatgttttgaaatttctcccatcccatgtggcggtaaattccattatccatttaacatcgcatttctttatatctgtgatgatcgaatgaagttcttgtagttttcttaatgttggatagcccctactgacttaattaactgtgtccatgcaggtggtgttcgaccatgatggtgagtcctaatgtaatagtcttctataattggttaaattcatggacgtctatctacttcatgtggtgatgtaggaagaattcaggtttttggggacttttagtgtctatagttaaccactttgagtgtgcctctcagatgatttaaactaattcattgatataagcccttatttcaaactctatagttatggcctctatacttcctgattttaattactcaagtatgtgtatgatttccccttatcaattgatgctaattgctcctctagtcatctataattttgattttcatcatcctctttcagatgaatagataaataattgtcttcagcttgttgaatgttgttgcccgaaaacttagattatgttgagtgttgatgttttcaacttcatttgtatcatagtgaatggataaaagtttcagatttcaacttctggccactactgagaacatttattcgataggcctaagagtaagcaggtggagatctagatggtgatatattgaccaaaattgattacttaatcttgataatcattactgtactatttatggaatattccactaagttatctagaaaagcttctagtaatgcataatagtggtaatctgacaaatatcatgtagtaatcatggttatgtcatatgtgaggcaagaagattaaatgctttctggacctatacgtctctagttactcttttttaacaaaatagagcctttttcaggagttccttatggcactacttctaattcatctacaggttatcgttctgcaaaaggtaagctccatgtccttagtcaaactaaagtaatttaattgacagtataagaagtggtcatttttgcatgagagtttagttagtatgctgactcgatggtgatgtatgtaatatcatcgccgatgatctccaattgctatacaagccttcagtatattgcttctaaatatataaacttgcagtttgaactgattttctgctgtgtgcctaggagaaattattccggaaattatggcttacttgccaaggatgatatttgaagtgaaatgccaactttgtcttcctttgggtgttttgcttgccgcttttgggcagtcataaactttggtgtagataacagagggtcggtcatatgcgcttccatggcggtctttggctatttgtaaaataaacttaggtcatatccaatgatgaacgtaggtccagtatggcttgatgtcttttgttggatccgttctgtacatactg

SEQ ID NO: 69346 - DNA, 1544 bp, Arabidopsis thaliana landsberg
tgccaagacacaaaacgcaaagacataagttcacttaaaccgtatcaagaacactaagctatagctacgttcttgtttgaatgtaaaacctatcaatattcaatctttgcctattttggcacaagagattgtgtacccatggataagtaatggattctcatgaaactaacgcagaatgttgattgtcgttttaccataaccaaaacaacaaagccaatgcaagaagacaatctcatctaatactagtgaaagcgcaattataatgaaagataagggtgtggatgatcataccaggaacatacctaagcaaactcaaccacggatcgaaccgccaatccgagcttcctcggggtggaaaacatcggtaatagacaccgttgagcagaaactaacaactttgtgaaacttattaaccggagaaggcaaacaaggaactcttctccaactacatatcccattctcaccaccaccaatctcacaaacacaagctggaaatttcttatgacaatcatcattaaacacataaacaagattcccagagccagcacatttcaaactcctaaacttgtcatcctcatcatcactatcaactaatccaaacaacaaatcctcaggcataaccgcgatttcgctaaattccatcgagccttcttcaatactccaaagattaaacgagaacccacacattccaccaagaacaagcataccattacaagaattcaagtaagcaaacgagagtcctggtggtttaagagtttgaacatcactccatgtatatgaatccaagcaaaacgacgagataaaacacgaatagttatcgaaaacatagaatcttctcttaaacaaagctgaggtcaaagtttgatgatcctgaccagatctgaaatcagcagggagtggtgaacaaagctcccatgaatcgagaacaggatcgtagatttgaacagctaatcgttcttcgatatcgactaatccgccgatacgcgaagatccaccgacgaggattagtttggatgagttagatagagttgtgaaaacggttaagagaggattgattcgaggaaatcgaacaggggaagtgaatcgccaattaggtttaaggattggtgagaaggagaagcgaggagcggtggtgaagaggaagcgattagatccgacgagatgatcggaggaagaggaggaaggagggagacggagccaggtgttggagagaggatcgaaagcgaaggattggttgtggaaagaggaagtgttgtggataccgaagaggaagagccatggtggtgatgatggagaaggagaaggaggaagagaggtgatgagtgaacgccattgtttggagactagagagatactgactcatgatgggatggggagaagatttaggatggattatgtaactacgatctgtagattgtccaaagtagatgctaccgtatgaggctagtagaacagcatgtactcaggggtggggcaagcgcttttattatggttgatggagactcttgaggatatggtacataccgtgctgagattgagctttt

SEQ ID NO: 69347 - DNA, 508 bp, Arabidopsis thaliana landsberg
gcaactcggcgacgccgtcgggcatcggcaatgccggcaacgtcggcttccagctcggcggcggcggcaccattccgttgtcctcgctggtcagcgcgcaggtcaccagcgcaccgctggtggtcagccatcagcagcaactgccggcggtgacgctgtcgttcaacgtggcggccggctactcgctgtccgatgcggtggacgcgatccacgaggtcgagcagcagctgaaattcccgccgcaggtgcgtggcgagttcgtcggcaaggccgccgagttcacctcctcgctgggcgacgaggtattgctgctgctggccgcgatcgtggttatctacatcgtgctgggcgtgctgtacgagagctacatccacccgctgacgatcatctccaccttgccgccggccggcgtcggcgcactgctggcactgatcatgtgtggcatgagcctgtcggtggacggcatcggcggaatcgtgctgttgataggcatcgtcaagaaaaacgc

SEQ ID NO: 69348 - DNA, 617 bp, Arabidopsis thaliana landsberg
gtcccacattataagaaaactttgcaaacaaatccttaaactaacaattgtttttgcatacaccccttgacttaaaattcttaacttttttttctacactaacttctttaacaattgaataacgagagtgtcgaaattcgagtgtacaacattttaaaactgttttttttttgtttttaaatccttaacctcttaaatataatatcaagtgtataattgtttaaatctttaaccttttaagaacttaaaagataggtgacgttgaacataattaaatatcactaaaaagaaaaaatcacaaatgcggctactaatcgccacacactcaacttcaccgctgacgtgcagatttttaatcaaatgaagaataatttcgcacatttcgaagtaaaagggctattttacaaaacatgattaagtcaaggggttggtttgcaaatatttcacaacagaaatgtgccattaaaacggcgtcgttatgattcaggcttaatcagtaggttgtgtcttttggcttttataatcgtcgccgggacacaacacaaagaggggcttagatttgtgctttcgagaagagctttgatctcttttttccattttcacttctaatcggagat

SEQ ID NO: 69349 - DNA, 2166 bp, Arabidopsis thaliana landsberg
taggatgatgtgggctgaaaatccctcatttctcaacttcctcgtatctgcagatagaaaaatactgggtcctacagcctccaggacctaggaaaatagtaacgttgttagtactgctgtatcagttgcaatattagctcgtaggatacccgtgatttgaataaaatattaacctctccaatccttgggctgacaaaattcaaatcttcttgtaagcctttcaatgggggatcataagagtctatgaattgcaccaagctggatgcaagacgaggagtgttaatatatgatatcagagtctattgattatatacaaattaaaaatgatactacacggaaaaaaacatccataccggtgataaaagtcacagtctcgatcatttcttgatagcgcatgcagaaggttgtagacttgcaacaacattttcctaggaatctactttgataaaataaacactcttacatattgataataatgtaatgtctcacatgacatgtgtaatcaatccaaataaacaaagaactaagaaaaggaacaagctcagcataccttctctgcgaagagattgactcggacaaatgcacaaaagagatccatgaatgcatgcagaataagtgagttctgatgaggctgcaaaaagctgaactaagttatgagctaatcatgaatactcaacaattttatcttcatcctacacagacatttttgacaagtaaataataacttaatgtaccaaaacatttcatgacctccacctaaggtacgagttcaaaagaaagctcaaagtttcaacccagggcaagtaaatactttccgcagatgagagactttgacttaccagcaaggtaattacagtgctgcttaagtccaatataagccgcagtgcctgttctcgaaatgccatcaagtcgagcagcagctgattcaagaaaagaaaaatgcatgacgagaggactatgaaggcaccccttactgaaatgctacacacgaactaaggaaagaaggctagcaaataactactcgtttacattttaaaagttaaaaccatgtattaggtaaatcatatatgcatgcccagatatataaagctgactaatggtgagatggaatagaagattgaatattgactatatagcagactgaagattgaagattgactaggtacacaaagaaaactaatagaaagattgactatatagcatgtaggacttccgagatgcttcaccattctcgaacaacaagtttcacaacaacagaacgtaaacccaacaacatattacatagatagtttcttattacctgtatccatggctctaagctctgtaagtgaagttcagcaccatcatgcaagctatccagtgaaaacttatcaatctgcataagtattgcagaataaatcttttttcatttaccatcagatcaacaaatcaaacagtaagtctaataaaaaaagaactcatgacttacacgttcaagttgcaatttgctgaaatgctcagggaactttttagagagcaaagtgcatatccgtggatggttagggaagacacccgctttccaaaatgcttcagagaatacatggccaacaggatcaggatactccaagatttgattcagtctatacattttagccatgagaccgtcagcaacctcaatcatttgaactacccattgtatgttcaaagcctttgtggaaccaccaacatgtccatcaatttgcttagagctcctagtagaagacactgatgcagccatttcaggtcccaagtactcagtccatctggaaggaccttcccattcccttgatctcacagaagtcggggacattgattcatcttgagatggataatattgacgagaattcgccattaattcagtacaataatctctacaataaaggaaaatgtatttcaaaatcacgttacacaatctcgtccaacataatttacttagctctctactcttgcattcatcttccaaaaacccagtaatactcaacaacgagtgacgagtgagaatagatatcccctcgtcaatttcccagcaaccaaacatggagctaaaaccaagtcaagcaagagtctcgtgaagattgaaagttacctgagaagctctaaaggcgaaagtcaaatcgagcaaaaatgtctcagtaagatcggagcctc

SEQ ID NO: 69350 - DNA, 617 bp, Arabidopsis thaliana landsberg
  unsure (1)..(617): unsure at all n locations
tcaacgcaacccacgttccgaggtagagtgtgagcaagaaagtcgttgtagtctttgcaaactgtaatcgcatcaatacgcatatcagcgttttccctcatcacggttactatatccataagtcgtgatcttcgtccagccgagaggtacattcttttcaagaatgttttccacaaaaatgatttgaataagcagggcggcaaccgtgtagtcgaacggcaaacccattacgactcccatgcttaagtgaaataatacaagagcatacgcccagaatttttttaaactctgcttccacacagctaaaaaagaaaaaaattggagcagaacaaacgaaaagaaaatccatggtacggcacttccaaaccgcaacacacgtccggtatgctccgggtttgccgagccggaagcgagaacataagccaaatgatccagtggagaagtcccaaacgcatagaccagttcatgccacgaacgaagggtcaacaagtgaatgattttncacaggcccgcgatggtgtagttggttaaaagaagatcctgccncagtcgaatgaagaaaaattatttctttcttcgagaggtttcgacgatccaaaaaatcaaaataaacgatc

SEQ ID NO: 69351 - DNA, 562 bp, Arabidopsis thaliana landsberg
  unsure (1)..(562): unsure at all n locations
cagctcgtgcgtgcaaaaagatccaatgattttattatagttatgaattatttttttatgatttcttggattaaccacacagcgtgttcatttccgtgcctctccttttcttatagaaaatagcgtacttcggatcaataatatgttttggctagcttattaacataaaaaaataaaacattattacaattatgcatcgtttttattaatgtaaaataggttatcagttagttttgttttccaaattagaatcataaggtttaataaaagtatcaccagcataagatttactaaaaaaaatgcaagatctagaaagagatcctaaatgactttttgaatctagcctaagaaccttctacaaatctacgataatttatttagtatatgaagaaaattagagaaaagttgtattctcattgtcttgtgacaaagccttgataaacctagaataaaagaatacaganactagatttacgattttaaaagaacatcaacatatgttcgatgcaatgcattggaaaataaaggacaactttctaatacaaatcattatcattagctc

SEQ ID NO: 69352 - DNA, 673 bp, Arabidopsis thaliana landsberg
agacttagatcctttatgtaggaagatagatggaaagcagctctctagcaacagtacggagggaacaactgacctcgaactgacctaacactgaagacctaaccttgaagctgtctgggtctttggtagtccaactactaaatctatagagatgccttcccaagatctcttcggtacgggtatggatacactcctcttgccacttttttcttcctgacaaagacgaaacgcaccctaagagctctatcttgcattagggagtcggggttctcctacaccaccctactgtttgttcatagggggtctccaaccatgcggaaagccacacaatcgcaacaggcacgatgttctcacaacccggagtagagttatatggatttcattatttatgactgacattccttgcttgttggacaggaactctttgattcaagatccccttctactactggccagtaagataagggactatctagtttgatcatttacgaattgcgtagataatcctcaagtgatagaaaggttagaagacagagaattcgtggttgagctcccaggcaagcaagctattgatgatggcttctgtgctactcgagtaacttgtgctgaggtggctgtgactcaaaaggttatgtattattttcccaaaagaaatgaaatttacgtgatgcgg

SEQ ID NO: 69353 - DNA, 1496 bp, Arabidopsis thaliana landsberg
agcaaagcaacgcagcaaatctatataatgtaaaaccaaagcttaaatcttttaacaaacccaatccaaaagagctaaaagtttaaagatgacttacaacaaaatggcttgaaacttcctctgatgggtaaaagaaggcaggaaaaatgtaaaaccctaaattcgtagcataagaagaatgaaacaattagagagacaagacaacaatcaaaacccagtacggaagattacaaatttatcaaatttccgactcaaaatagattcttcaacaccagattttactctcttaagacgaagaagaaaaagaagaacgcaaaccttaaaaacgaaatccagaagcaatggaacggagagagagtgacctttggttgaagaattctaatcgagaatgaaagataaagcggacattgggaatttttctatcccgtcattacaaaaattgggaattttggaaagaggaggcgaattctagggttcttgttcgtcgagtggttttgatattggggaaaaactcgaggacctgaagtgataatgggtcgcattgtattgtgaaatgtctaaattaccctttttctcaagtaattttgtacggcgtcgtttcaatgcttttggggttttcagagaatactattattttactcaccggaggctccgagtcttctccgtccgtcgtaacatcttcgctctctcgttcggcgtttgtatcaccagagacgcgacgcgataatgcttcggaagtatgtttcctgaaccctaagtttattatctcaatccatcttgttgaattttggcttctcttgttccatcaatctcgttgcgtagctttcgggtctgattttattgattcctctaaattgagagctatttgtgactttgattctcttgtgaatcataccgaatgtggtttatgttgttgctcttttgcttaggtcggttctcgagctgtcttctcgtttgtcaataaagagattcccgaggaatttgggagctcaggtgagttatgaatttagttgtgattcttagttagcgtcttgtgagtactctcttggattgattgtgttatgttatgcatcagaggtttcatttgagctcttcgagaaatgcatctacatctggtaaaaatggtctccctggagctaaacccgttgggaaaccagatgcctcaaaagttgatcctccaaaagtgactcctcctcctcctcctactaaaggaaattcttcgaaagtggttataggaggtgttgcaatcgctggggcttttctggtagcgtatcagactggctatttggatcaatatctggggaaagaacagcagaaattaagtgagcgaattcattctgatgctctaactgaaaagctggaggaggctcatcatttgaatgtaccttccggtgttgaagattctactgaaaaagatggaaaagttgaaacgcaacctcaagttactcattctgaagcttccgagggagtgcagagtgacatagaactgcaacccg

SEQ ID NO: 69354 - DNA, 505 bp, Arabidopsis thaliana landsberg
tccattcttttcagcagcgcatccacatccccgtaacgggacatgatcccactgaaatttttttgttcaaaatcctgagtgtcataaaccacggttacattataccaccgggcgacttctttcataatggccctgatgttcgtattatcaaagtaaaacaggccgttcttccaggccagcgcctgatccacgttgaccggttgtatttggagatccccggtctcccggtccatgccggcctgctcccccggcctcagcaactggcttttgcctctttccgatattcgtacaaggcccctggccagggtcgtcctgatcgtcttctcattgtcatatgcgttgacattgaactgggtacccagtacttctatgttcaggtcacctgcttccaccacgaaagccctttgaggatctttcgtgacttcaaaataggcttctccggtaatttttacgcgtctttggccgccggtgaacgcggtgggaaaatcaatggaagaacttgcat

SEQ ID NO: 69355 - DNA, 411 bp, Arabidopsis thaliana landsberg
tgagttttttaatattatacatactgataaagagatacaaaacaatatataagataataaagaatatcgatctaacgatactatggattaaaacagagcagcaagaatctgtttagggtaaacaagcggaacaaatatttctcattagtcccttaacgttatactcaccggcgtgcatcacagtactctcacataccaggatacacctttccatagactcagacaagccgatccagcctaagcgggccgttaggccctggtatatcactccgaacgggtcgtgccgcgagccatgagactgcaagtataccatccgttaaccaacgtgtgttgggccactgggggcttgcgccgaaaccgcgcgggaaggcaccgcatgcctgacatggttttgagttcaaccaagtagcg

SEQ ID NO: 69356 - DNA, 445 bp, Arabidopsis thaliana landsberg
  unsure (1)..(445): unsure at all n locations
aaattctttcatatatatgattagtctgcaaaagctttaatttactgaaagccttaacacaccaatactaagcctacaggctttagtaaagcccaaatcaatacaataaaaatcctaaattaataaacaaagagtcttcttcttcttctaaatcccaacggaaaaagaagaagaatagagttttcgcttaatctctactcaatacgttgaatttgtgaaagcggagatctacaaagcgtaaaagagttcttctgggtttcttctttctccgatcgatctgctagacgatgacgatgagtttccttctataaaaccagtaactacgagatttgatttataacaatcatgaaactctggtcatgtttgaaaatccagcttcaaatagtcctcatcttcgtaaatctagtagcanatctgtcttcattgatcctggtaaatcccaatt

SEQ ID NO: 69357 - DNA, 496 bp, Arabidopsis thaliana landsberg
aagtattggcagcagtgcagaggtccgcatgtaccagggcctgtgcgccgtcgatgcgaccgacgcaacgctggccaatctcgatggtgtgcgtcgtcggtgatcccgtcggcggcgcaaaggtaacggcaatacgatgtttcgcggcggtcgccttctcgaccgcaggtgcacgcacggtcgcgagcgtcccggccagcgcttcgacgagcccgggctggctcgcaccgatccactcgccaatgaccgcgccacgcgtgaaggtcttgccgtcgatggtgatcgcctgaatggtcagcacgtcctcgcgccaacgcgtcgtatcgcgataggcacgcgccggtcgcgcgatcaccgcgacctgaggtgtgcgaatcatgacgggctcgcctgccctcgcgacgccatctttgaagagctccaacgtgacgccgtcggccgtgagcttgccagtcggtgtgccgctgcgcggtgcgagctcgcccggagtctgcaa

SEQ ID NO: 69358 - DNA, 560 bp, Arabidopsis thaliana landsberg
  unsure (1)..(560): unsure at all n locations
tattgccattataattccactcttttatataatcttatcaacaaataatttttatgctattttctgatgttagacgtataatgcaatttattaaacagtcattgtgttggcaaatgatacctccccgtgtatcaatctgtagggattgtacgtatgtggtgacgttttttttttctgctcgtctaattgacatgccaagttctgaagttacacgtataattgaatacaataattaaaacttcttatcatgtcaagtgtaaacgttgacttctttgtactatacatatatatgatatatataactattatatacatgaacacatatttttaacgctatacttctttttaatatatatatatcaaaactttaaactgtaataaaatttatcataaacttttaaaaaataatttatcgggaaaattggagatcaatgaaaatcaacggtaaagatgatcgttcaaaaatatgaaaatcataaaaaattaaaacaattaaaaaattgtcatattntaaattatanaatattctaaatatattacttatatatatctttatttta

SEQ ID NO: 69359 - DNA, 538 bp, Arabidopsis thaliana landsberg
  unsure (1)..(538): unsure at all n locations
ggattctgtgtcgagtatatagaagggatgcctcccatgccactgcccgtttatcatgactttngattgtttctgtcgattatccgcgcacgcaaggtgctggtgatcggctatggttcgcaggggcggacacaggcgttcaatgcccgtgattccggcgtgacgcagatcaaggtggcgctgaaacccggctcgccgacgcgcgccaaagccgaggccgatggctttgaggtggtaagcgtaagccaaggcgttcagtgggcggaagtaatcgtggtcctgacttcggacgaggcgcaccagaagctgtttaatgatgagattaatccgcnnnnnnnnnnnnnnnnnnnnnnnnnntttgcgcatggcctgtcttgcaatttcggtctggtagcgccgccggccgatgtcgatgtgctgctggtttcacccaagggcatcggaccgcgcatccgcgatatctatgtggcgggcgagggggtgttttgcctgttcgccgtgcagcaggacgcgacgggcaatgcgaaagcgctggggc

SEQ ID NO: 69360 - DNA, 418 bp, Arabidopsis thaliana landsberg
  unsure (1)..(418): unsure at all n locations
cgtctagctgtctcggtcgaactgtccaaggtcctgtcaccgggggcacaaaagtgacacaaatgcggaagtaatgcagtgtgagatgaagtgcaggtaggaaaccgtgtagcagacggtgccatggaagcgtgctgccacagcagtatgaagcggtgcaaccacacgtgtagggcgcccagataacgttgaagcaacaattaggttgggtaagcacgtggtaaatagggagccgtagtaaaatggggccaaggctcatggaaagtgaccagtgggaggttaaaaccaacactaagcagcccagcgtgacagcaaatgacaatttgacaagagcngtaacgagggcggtacggtgtgaataagacgtggtacaagtgagtgcagcaggggggggtagagcagggcttaaacaaggaga

SEQ ID NO: 69361 - DNA, 442 bp, Arabidopsis thaliana landsberg
acaaacaagctcgatttccctttggatcagtttttgatcgatgaatttttatgtgtgcttcattgggatgggacgttgggggttactttgaagaatcacactttaatggcttggaatccgttttcgaagcaattcaagatcgtaccaaatcccggtatataccaagattcaaacattctgggtttcggttatgacccggttcacgacgattacaaagtcgtaacgcttatcgaccggcttgatgtttccacggcgcatgttttcgaatttagaaccggttcatggggagagagcctacgtatttcttatcctgattggcattacagacacaggagaggtacattttttggaccaatacctctattggatttgcgtacccggactaatgtagaccgggtttatcctctgctttaaatctctcaaccccatgattaccgaaaat

SEQ ID NO: 69362 - DNA, 581 bp, Arabidopsis thaliana landsberg
gggcgaggaaaccgtgagtctgcgatgataagattcttactagatggcttacttcccaacactaatttgaacggttttatttaatattttgatttactgacctcatgaaatatattgctggactaggcaataacttgatctaaaaatacaaacagaaaaatgtctttttagttgatttcctctctattccttattcatacatatacattgtatattatatggttttcatatcagggagaaaggtcggtatcgctatgctggtcaatggaagcacagtcgaatgcatgggtgtggtgtctatgaagttaacgaacgcatcctatatgtgagtagtaagaaatattggtcgtttacatcataattctatctaatctgatcatcataaaatagcttagatatatggcatctttgtacttcatgaaagatttacattagtgaatattcatgtttctgacactagttcacatcttaatggtaacgcagggtagattctactttggggagctattggaggaggagcatggctggcccgtaaatatttgtgccggtagttacccattcttgctctctatgataccata

SEQ ID NO: 69363 - DNA, 2566 bp, Arabidopsis thaliana landsberg
ccccggaacggctcctgattgggcctccgatgttaatgaggtttgttggtttgatcagctgcgaagattgagaaccacttgtcaataagctttctccaatctcgatagttgttttcgtttaagatctttctcaatgttgttcaatgtgacttcttttaaacattcaatataaaaaccagagaatttcaccactctttaagtaacactaaccagtgtttttgctatacaaaacctttacttgatgagtatagtatgttgtatctgatgattcacacacatatatacatagatacgtacatagagttcaaagtatggcctcgctcaactgcatctggaccttgtctgaaagactgaaaccttctgatgctttattatgtgtatgatgacaaatacggtgataaagtttgaatcttgaacatgagagtctggttcttttttttaaatgtaatctgcaacctgaagttcatgaagtctgtcacggttgctccttattactctagctttgtcccctcttatctccagaacctgaagaaacaattccagtttcagaatctctgtgtggacttatgtaagaaagacatgaaacgcgacgagtcaagaaccaatattgctagatacctctggtctagagtcaagaacaccactggacattcctacatcaactctccatatgccgcaaccatattcactatcaacaacaaaaactcatgtttcaagattgtcgtgaagtttctctattacaagttttggggttgagtttgataaatgtaccagttaacccctgataactggggagtatgcccgaccaccatcgctttggcacctacagcttcaagagtgtcgtgaagaattttatttacctgataagaaaaagaagtcaggaaacacattaaaccaagctgatgatgatatctgtcttagcagttttgagattttggtgattaaaattctacttgcctgttcaatttgatagtcctcaagctcagaagtctctcttgagtaaagtcggctccagactacactgtcatatcctcgagtcgcaatgaacggcatctgaggactgtcttcatagttagtagggcttctcatccaagtagagacttctctgtttatcctctctatgccgtatgcaactgtgcaaggacattataagcatatgatatatcaaatccaaaagatcaccgagaggaaatgttgagatagatttgactgtccttaccatggtgaggaaggagaccaccgtggcagaagagccagttattaacacggagaataactccgtgacgcgacaattcacatgctaaacgaccacctggtctgagaaggaccgaccttgcaattactcccttttgcctctgtcctaatggttttcccaccgacttttggttaaccaacgaataccaaaactaagaaaactcagagaggacacggcaaaatgaagtacctttactacattccattgatcccaataggtttgagaactcctcctatcttctttccattgtcttgactcaaaaatccaattcctaaacgctttgtcccagtcttgtgcatagtcctccaagtagtcaagaaaatcagtacactcatcaaatgctctcgcatctacatatctgaaatccccttcaacattcattgtctcgtggttcccattaacctttaaaatgtgacaagaagttactctttgttagtcctatcaattatcatcattctagaactagcaaattaaaatgtgtagagtgcaaaagcttctctgtgtaaaatttacttatgaaattcaagtatgatagcaatcaaaaacctggaaaacagctccaccattagccttggcctgatcatcaagtgacctcaataaggagagtattgcgatttcatcatcaccgcgatcaagtatatctcctacctgaactagtacctgtattttcattatgatttcacaactcataagcatttaactcaaaagaatcagtcatcataatgaacctcaagatgcgtaatgttgaactctagcagatactgtcaataatatcatcaagcaaaccatttaacacgatactgaaccactaagagataatgtacatacggtgtcttggccgacccactggtctcgtccgtcggagctcaagacgccagccaactgaagtgcgtctctggctttacccagatcgccatgaaggtctccaactgtgagtgcatatccaaaaccaaaacctactcaattttgttgtcaaattatcaaaaagattgaaacttttcagattaatggtggcgaacctgcaacgatacgacgagcaggagcagagacgaaagtgggtggatctccattgatgacaatcggcttcagagcaagttcgttaccattagaagtgctcaacaaagaggaagaagaaggttctaaaagtttctgggggtgagaaggaggaagtggaagtaaggaattgaggtaaagggaagccattggtattggtggtggagaagcaatgatccaccagagctttgatgaaatcacttaacatttgtgttcgtctggtctataatttgtgtgacttgtctccattgcatgctc

SEQ ID NO: 69364 - DNA, 194 bp, Arabidopsis thaliana landsberg
caccgcgtccttcgtctcattctattctactgttaccgtgacccgcccgcctctgttttccatggcccgcatgcggacgggatcgaccaactcgttggcgagcagcatgtcgtctccgatcccgttcgctgctagcccgactatcttctcgctgtgtctcctcacataatgaccgattcccctcacccgccata

SEQ ID NO: 69365 - DNA, 545 bp, Arabidopsis thaliana landsberg
ctgcaggtcgactctagaggatcccctgtttcaattttctttgtattaacaaacagttcattaatttagaacatttctatttttttctattttttcctaaataattttagtaactaaacgtataacctttctattctattaataaaaactaaatggtttaattttaatttgtttattgaaaataatggtgtcacccttaaatttggaagttggaacaccaaacaataacaataacgaaaaagaacctttttctaacaaaagtgaatcacaacgcaaaaataaataagaactggaattggtttatcgttttattgaatctccttcaatacatatccatcaaaagattcatctttttaccatcaacactttgattttataatttcacgagaaaatgtcattttaaagcacgcaaaaacgaggttattgtagcaaaagcattgtgttttattagagtcattccaagatgggttgtggacaacaaaacacgatgttgtttcgggaaacccacgaggatcaagaaccttcggtagctgaatcagtgatgg

SEQ ID NO: 69366 - DNA, 382 bp, Arabidopsis thaliana landsberg
  unsure (1)..(382): unsure at all n locations
tgtaggtgaattcttatatgttactttctattttgcaactttaatttcaggctctgcatgggggaaaaacaagggggataatcaaacttcgcctgttatatagtctaggaaaagactaatggttagattctttagaaaacgtnnnnnnnnnnnnnnnnnnnnnnnnnnnnnnnnnnnnnnnnnnnnnnnnnnnnnnnttttgcctcgatcttaagagctgatctttcctgtattgtaaaattgttttccgtatttatggacaaaaagaaaaattccggcgtggtgagaaaatgtatctcgaacgcttcttttacacacagacaaactttaatcgagcgtttcgtagaatctcatgggcattgtgccattcatgaattaactt

SEQ ID NO: 69367 - DNA, 492 bp, Arabidopsis thaliana landsberg
aaggaacatcttgtgactagttattgttacttttatgatgatccattcattaaaaaaatgttgaaccttttcttataagttacagtgttactacagtgtgaatgttattggtaagatcaaactgcatggctaattttgttattaattataattactaaggtctttactctttagaattaaagtaacaaaacaaatcagacatcaacattcatttcgttaagctttggatactcgtttaattaacttaaaatcttattgaaaggcatataaattattcattaatgtatagttaagagtctgatccctgaaatgagactaattaaagcattgtttgcgaggagaataaatgaataacagttggtgttacgttttgtcgtttatcataaacctagtcaccaatcacgcttaattagaatccaatttacaacaatcgggagatatttgaccatacaataaaaataaattaaataacgtatttaattgtttactaat

SEQ ID NO: 69368 - DNA, 478 bp, Arabidopsis thaliana landsberg
ttgaagattacgatctggctatggagcttatgccttcttatggtcttaattttataacttcacaagcaaataaggggatcgcttttaaatttgagactaacaagctcacatcggatatggcgtattttcttccggtgaccacataaattgaatctgatgcaagatgttatggatcttcacaatcttaaggtcatgatcgttaaagcttacactacttctttaattgaattatgaagtccattcaaaatagtgtgcatgtatagctattgaagaatgatatattctgaatttgacatgtatctagcatacatttcctttgcatgtaaatgaattttgttcttgtgcattcataggcatgtagcgtagtcttttgatattttgatcatcaagtatcatcgtaccttcgagcatattttgcaacactaactttgagcatattttggaaccacaggatgatggaggagaacttgctcgttga

SEQ ID NO: 69369 - DNA, 2773 bp, Arabidopsis thaliana landsberg
ttcttaaattattgtcaaagcgtatgcaagatcgctcccatgttatgaagtatttggatgtcttgctgtctttcttgaataaaagtgttaaagatcctggtatggtgtcattgcttttattgctaaatggtaaaacttacaacttcaggtctcttgtatgtgactgttttattgcttttacagatatccgtcgtgaagctttgctagccattcaggacatcatagcgtatcttgggatggagagtaccagcaagattataaatacagtctctcctctacttgttgatgctgaacttgatgttagattatgcatttgtgatcttcttgagtctcttgcaaaaatcgacttttcactggatgatgtggtacgtatcatgtctctgtttgtagctgggtcatttgcttctcttgtttctgattttgcaattgtaacaaacaattggttcctaacctgtaggcaaagcgtgtccgcgatatgaatgccatctcagctatggaagttgatgaccttgactatgaaaagatagttaatgcctatgtggagattaatgcagatttctttattaaatcctcagagcagcatacgatgattatactctcacagtgtatatacaacgtatcatcagaatccattatgttaaggggtagcgcacagaagctcttgtcttctttcattgatttttcagcctcaatactttgccgagaagctccagctcactctgaatttggaaaagaggtcaaaaacgctgatgtaagctggacaggagatcgtgtactgtgcattttgagaaattttattttgaaacacattggagatgcaataaacagagggggcattataataaaggtacattaactcttctaaatcatagatatgcctggaagaaagaacataagaattttactaaacgcaaggtcaggtttagtaacttgcgaatttatgatgctgcttatggttagctcattgtcatgacttgaattttacatcatattgtaatatggatattcatggccctcttcttgctctgacgattatctgaaacatattattctggcacaggaatggattcttttgatacgcgagatggtgaccaaacttccagatgccgcaaatctttctgcattcagacctctatgctctgaagacgagaatgtagatttttttaaagctattgttcacattcaggtaagttattttttatatgattcctgagtctatgatttgtattcgagcggtggtgataataaagtctatatcataaccacacaggaaccaatccaagttccaagttttgattttgttttgttcttctttttccctctaactcaattcagtaggtttgttaaggccttattatagcatataaaatgaagtggcatgtagctcatgcagatgctagaaaccttacggtgattaatttcctttcaatatcttgcaggcacaccgtagagctagggcaatttcacgtttcagtaatgtggttaaagatagcagtctgcctgaggtgaccccttgaatttcaaacatttttcaatgcaactgctgtactgtgatagacttatccaaatgttggtgttgcagggagtagtgagaaaacttttggtctcggtctttttcaatatgttactcgaaggacaagatggaaaagataataatgtcagaaatgcatgcacagaagcccttgcatctatatctgctcatatgagttggacatcgtactatgctttactgaatcggtgtttccgagagatgaacaagcacaccaaaaaaggaaaaattctgctgcgacttatctgcttgattttggataaatttcattttgcaaaagatggctacccacatgaggctgaggaaattaggacttgccttcagaaaattgtgttcccgaggatgcagaagctgatgaattctgattctgataatgttaatgttaacagtagtgtggctgcgcttaaggttctaaagctactccctgaagatgtattggactcaaacctatcatctatagttcacaaaattgccagttttttaaagaaccggttggagagcacacgtgatgaagccagattggctctggttgcttgtttgaaagaacttgggctggagtacttgcaagttgtagtcaacattttacgtgctatcttaaaacgaggatctgaggtgcatgtgctggggtacactctcaattctatcttatcaaagtgcttgtccaatcctacatgtgggaagttagatcattgtttggttgatctccttgctgtggtggaaaccgatatccttggagaggttgctgaacagaaagaggtggaaaaatttgcatccaaaatgaaagaaacaagaaaacggaagtcatttgagactctgaaattgattgctgaaaatgtaacgttcagaagccatggattaaagttactttctccggtcactgctcagctgcagcggcatctaactccaaagatcaaaacaaatctggagaagatgttaaaacaaattgcagctggtattgaaggcaatacatctgttgaccaaggagatctttttctttttatatatggcctagttgatgatggtattaataacaggagtggtcttggagatcaagtgtctttaccaccctccaaaaagaaaaagaaatcaagagatctgaaagagacttctgggttgtgttttggtccgaagtcatgtccacatctaaaaaccgtgtttgctctggacttattttataaccgaatgaaaaaattgagactcgacaacactgatgaagagctctgt

SEQ ID NO: 69370 - DNA, 530 bp, Arabidopsis thaliana landsberg
atcaggtggccgaggttggtggtcgatgacctattgttttggtgcaacacgtgatcttcttatcatgttctaagcttccaacgttgggtgaagattatccttcaacatctctcttatgttgtcgattccagttggccccacgcattgggatctaatctttgtagaagcccattaatatttggactctatgttgtacgtatcatataggcatatacccagttaggcttttcttcggccttagtttcagggctgtattttcttcatcttaagctttgacccttttttttttgtcaaacaagctttgacccttttagttttagtttatatgctttagtaaagtccaaatgtttgactcaatagtagtagtttatttaaacactgagtgaatgactaataatgagcaatgccatttgtatcttatatttcagattatggtgattataaagtcgtaagtttactataatctcatttcataatataaaattttgctattagtgagaattttttttctcaaattaagtcgggtggtt

SEQ ID NO: 69371 - DNA, 293 bp, Arabidopsis thaliana landsberg
ggccattactatctccgtatttataccaacgtctccttacgcgtggacccaaataaagcattttaatatagacctaatttctatatatgtacaagtgtgatattaccaatttctaagaatatagaaagagatctaaaaagtatatggcttcataaagttataaaacgaaaaataaactcttcttttattgaaagaaatatatgtacatatgatttaaattgtaacttaatggtttatatactaatgccatcgttgtattatcacatgaattcatatccgcatagtacatgttg

SEQ ID NO: 69372 - DNA, 262 bp, Arabidopsis thaliana landsberg
ccctgtctttgctaccctgctctaaaccccattacatactttaatcgaccgacctgttcatggtgtgaggggggtgtgcaagcaacatgaaccataagctgatgaggcttctacgtttcaacctgtaaagcttgacgacaccgtacactagactatgtgttgggaggggcgctatcatacacaggagatgctgaatgggatatcaataatgagtcacttctacgggcaatactggaataaagcatattatattggctgctgg

SEQ ID NO: 69373 - DNA, 360 bp, Arabidopsis thaliana landsberg
atatacgtattaaaaatgacagatggtaaagtttactattctttcatggatgcagacgtaaaacggggtattggctgctttgagcgaatgatcaccatggaacaaccgcttaccttgccgtatgctgtaccataaaccagcagcatgttgcatacttgcttcaatgacatatcatccactaatgcctgatgcttccccaccaatgctatatctttacttcacacattagcacgacactgcacaggtgttctagatgagagatcttaacacttgccttctttggtagaggagaagaactatgaatcgctatctcttgagtctaccacaagttcctgtcctgctggacgatactcggtcatt

SEQ ID NO: 69374 - DNA, 616 bp, Arabidopsis thaliana landsberg
catccgccgcccagcccggcatcggtgccgcgatctggctccacgccaccgacgtccaggccatccacgacgctctcgtcgccgacggccacaccatcgtctccgcaccgatcgacggccccttcggcaggaccttcaccttcgccgatcccgacggttaccaggtcaccctccacgaccgcgcctgatacgcccgagaccctgagccggggcgttgcgaccaccagtacgtcggcaccgaggcgacgtaggggcgcaggtcagcgatcgggcccgcgcccagcggactcggcgggcagcggccgggggtgcgcggtgcagccgccgaggtagtaggtgttcacgccctggcccgtgagcaccaggaagtgcacgcacacgtagcggcggagcgcacccgtgaccggcgggggcgtgacggtgtaggggaaggccacggacaggctccctgagtcggcctgcaagcgcagctgcgtcagtacgccgccgcccgcgacggccgaccgtgcctcctgctcggtcagcgaacccccggggtcggcctcatccagcgcgtgcgccgtctgctcggcagccctgtaccgcggatcgcgtcttggcactgcggggcttcgcg

SEQ ID NO: 69375 - DNA, 267 bp, Arabidopsis thaliana landsberg
aacatccactggggttatcaaatttgaagacgccttggcaggaacatttaaaccattggccttgacaccgtacgagacagatgaggtgtgttcaattcttgcacgaactgttcactgaacctgacgatggatttaattagactgtctgcatgacactttggcttatccttccctagctattcactgtacctgcatatggtgctttcttacatgtatgacctctatgtgtatacaccgtgattagcgcctgtgacatgcttactgcaa

SEQ ID NO: 69376 - DNA, 313 bp, Arabidopsis thaliana landsberg
taagcagtcatgcatcagtctcagaccatccgcaaagacgctgaaagaagactcattcacattgtggttttcaatagcgaaagggctgaaatggagcctaacaaagtaattcccttgagttataccttcaaatgtatagttcaacacagcgtcgaaaacacgagcagtcttatatatctcagcgtaaacagaacttcctttcgatgtcgaagcagtaatggcatcaaatccttgcagggtcacactcttgttgggagataaatcaccaacccatgttcttccatctacttcggttgtagtatttgagccacaa

SEQ ID NO: 69377 - DNA, 609 bp, Arabidopsis thaliana landsberg
gcctgcaggtcgactctagaggatcccccctctgatttctctaccacaaagtatatccacgttttccttgagaaatcatcgatgaagcttattaagtacctcttttggctgtttgatggtggagaaattggaccgcacagatcagagtggatgagttccagtttttcggttgatctccatttgctctgtttttgggaaaggaactcggtgatgtttccctttgacacatgcttcacatgtgatctgcactcgtccaatgtctggtaatccggtgaccatctctttattacgtagagtgagaagacctttgtagctgagatgaccatatcgatgatgccatagttcttctttgtttgcaacatcaacttgtaagcatctttcttcccttgccttatcgcttgtctcacctagcagaacgaacattcgatttgcgctcataacagactctgctatctttcctcttgaggggtgataaatgctacaagttcttcgttctcctcctttaaacaacacgtccagctccttttcttgaagttgccaacactcagcagattgttctcaattcagggacataataaacgtcattaacacatagcttactcattgagt

SEQ ID NO: 69378 - DNA, 3569 bp, Arabidopsis thaliana landsberg
  unsure (1)..(3569): unsure at all n locations
attaacacacaatctacgagtttcaaatagcacaaatttaatattaaaaagactaatataagattttgattgacgtttcatgcgatcatattgtaatcgtgattgctaattgcaattaactttttattttacataattaggtaaaaatagttattttgtatatttacttatgctaattttagagaatgtgtgctataattatccacaaacttgttttattgctattctagggtatttctcattttaaaaacagacctaggactaggagtaatgtaaaaagtagctctcttaacaaataaacaaaaaaaaaagaagaagtaaaaacaacactgggtcctttgatatgtgatatgtcacaaaatataataacctaatattcatgtaaatcttcgttttaaaaaaaaattattatattaatttgtaatttaccgatatttagacatgcataatatatcctcgtaaattttatcaaaatgtcattcggttcattctaattaatgaatagaaaattatttggttgtagcattttattgctttatggttaactataaattttagatccgtcgaaataaaaggtaataatgaacgggatcggatatcaaaggagtctatggactatggtccccttcggatttaaccaaaaaggtttggaacaatctccaacgttcaaaatatatctagctaggttgataggtttgtggattgatgaatgatgatgagtgcaacttttcaaaggaagtaggaccccaaaaggaggttcacgtgatgcttaagaagcagtgtgtccgcactatcataaatttcacgtccttattttctcacccatctttcttctttccctcttttatatcccattttgctttagatcgttttcaaattcatttttcacctcaacaggaccgttttattgtccatattcccattttacaccgaaactatttttaaatgtcaatagattggtgtgcatgtgtatatgtataaatataaattaaactaacaaagagagtgtgagagaaagagtgggttcctcatgctacattgtggttaattaagcatgcttcaaataatcttatcatgattatgggcattctgcaatagtccaatatacaattcatggaagcagtaaactattaatatatttattatcaaagttatattaaaacaattatcatgggcagctatttatgattaccaataaagctggtacatcattggttgaatgtgaaataaacgcaaacctttataaactcaaaacctgaaatagttagccaaacacgtaattccaaatagaaaaaataaacgacctaacacgatataggcaggcaggctaccttttattaaaattataataaggactctcaattccttggtttaaacagtaaaagataatacatatgaagacaaaaacatttagatcttgttgtgtataattctttgcctgatgtcaaccaaaaaaaaaatctttgtctttgtttccttcacttcaccacaaaaaatatgaccgttgagacagaaaggtaaaaaggaccaccttagtacaagtacatatataaaacctatagatcctccatcgtaatttacttactccgagcgtttcctttctcacaagccaatggcgcaatttactaattccatcaattatctcttttctgtttctctcttattatttgtatcgttccactgcttatgttttcgtttttcattggttgcagcttgttcaaactccaccgacgaccaacagattcaacaccatcaccaccggaaatgggttggtccctcaggccacaaagtcatcaccgtctcacttaacggccacgctcagtttcgctccgtccaagacgctgtggattccataccaaagaacaataacaagagcatcacaatcaagattgctcccggattttacaggttgatatatatatataattccctaatgaatatttttcctttttgttttagttctcctttatttgttacatttttttttgtcttgttcatgcatacatgcaaacttaattaaggttaaaacttaacttttcataaatacattttccagagagaaagtggtggttccagctacaaaaccgtacataacgttcaaaggagctggtagggatgttaccgctatagagtggcacgaccgtgcgtccgaccttggcgctaacggtcaacagttacgtacctatcaaaccgcttccgtcaccgtctacgctaattatttcaccgctagaaacattagcttcacggtactctattcaattctaacgcaattatatatatagggaaactttcacaaaaatgcgagtctttctttattttattttaaattgtgaagaatactgcgccggctccattgccggggatgcaagggtggcaagcggtggcgtttaggatctccggcgacaaagctttcttttccggctgcgggttttacggtgcacaagacactttatgcgacgatgctggccgtcattacttcaaggagtgttacattgaaggctctatcgactttatctttggtaatggccgctccatgtataaagtaaggaaggactcctaaataatacttactatatagcattaattatgaatatagtaacaaaaacaaaagttgaatatattactttttgtgtaaccagaatatccgaggaggaatagaccaagtattgggacttgttaaataaacttgttaatgtgtgttacttgttggtgaaggattgtgagttgcattcgatagcgtcaagattcgggtcgatagcggcgcatggtaggacatgcccggaagagaaaacgggtttcgcgttcgtgggttgtcgggtaacaggtacgggtccattgtacgtgggccgggccatgggacaatactcacgtatcgtttacgcctacacttactttgatgctctcgtcgctcacggtggttgggacgattgggaccacaaatccaacaaaagcaagtacgtactactaaaaacaaaaatgtgtaagattttagttaatccgaagaaattaatgactctcaaaaatgttgaaaatcattaggacggcatttttcggagtgtacaattgctatgggccaggagcagcagcgacgagaggcgtgtcttgggctagagctttggactatgaatcggcccatccatttatcgctaagagcttcgttaatgggagacattggatcgnnnnnnnnnnnnnnnnnnnnnnttcaaaccttggcggggtttcttttcctaattcctcggttcctcccagtcccaagtcctaaaagcttactatatttttatcattcgtttatttcttttattgtttattttttccaatttatttatacattgtgtgatagtacaacaaagtattgcatcttcttcatctgtatccatttcagttaaatgttttgagcttacacattcgtttttatttctactttatcgttttttcctatttattaattgaacaaatgtattattatataacctttgctatagatatacttaaatcttacactttttatacatttatatacttacaaaacggatatatacattttatttggctggaaaatcgactagttc

SEQ ID NO: 69379 - DNA, 653 bp, Arabidopsis thaliana landsberg
tttttacacatggcataagtctgagttgatcatacttaactttatagagtaaataaaaagcaatccctaaacatatccctatacactaatgtattacatttatttgattctataataatgatgtatgaaatacagggtccttttggttacatatactaaaaatacattttctattaagaagcttttctaaatatttatacgaagctgatccgatgggatattcatagtatcatttacgaacaagatgggagctattatgcctaccatctggcattttcgacttacagacttcttaagaatgaaaacgtaattcgatttaaaagtgagattatatttggctaattttcttattttaacctcaacaataaagtcaaaaggaactcttcatattaaattgaccatatcgagctcactaattataaaatacatgcgattaactgggaatgaggtgtcgctctacatggacgagttccattagatcgtgcatagtatccttatcgaaatagtgggtacatctgagatgcgaaagcaatctcatggtacatatagtagagcgcgaaccgaggtttaagatgttcccactagcgacactggaatatcaacctgaaaactcatagagcctacttgtacggtccttcccgtacggtggctac

SEQ ID NO: 69380 - DNA, 2618 bp, Arabidopsis thaliana landsberg
gctttacagccctactccgccttccatttaagctagaaggaagtacaaacagaaaatctcattattacaacctggaaacttctgtctctccatcgcatgtaaagtataaacagcaggtgcagccatcgaacaaccaattacaaagcaattgcaaggccttgattggttgactaatcgagctgaagacaatgaacacataccactattggaaaggccgtatgttagatgttcatgcctgtcaaaagcaggagaatataggatctcatgttgtatttcctgttctatatctacagcagagggaataatgctcagcttcaaatcaaggcgtttgtgtattacattttgatgtatgtcgatatgctgctgacaaagtacggatgcgtgacattctgagctgattatcaataacagcctttatctcatcaaaattactacagccttcataccaaatcacccatcgccgaacaagtcctgaataccaatcaattatttgggcagtatcttgcaaaataagcatagaatttgaacgagcataacccttggctgttattaatccgtagcgataaagacgccttcctatggcattagtcggagcgacgacatcaccaaagaaaacaggtctatcatgagatcgtggacatggcaaaagcgcttccagattagccgtctctgatgaaacatatgccgcagcagcgttttggaacttgtaaaacgcatctcttagttcttgaggaacagtaggttctacaacatgcttggacaagacaaactcctcgcttctatcttcagaggttcttagcacgtcctccatccatattctaagcaagatcttataccaatgatctgtttccatgcctgcctttctgtggcaagatatttgactcaaggtagagttactatccgccaaacctttgatttctgactctttgactttcttcaatccatgtcctaaccatttctttccaattctaactgtacctaaggtccaagcctcttctttctgcaatgcaaagagcctaaccttctcctttaacttgtgaacagctttgacagtgggactctccctaacatttttcctaaccaaggtacccaaaacacgaagcccactggtcgcttgacatggtgacgggtctgtttcatctgtgatgtccaaatgcagtgagttccgtaagaaacctatagcttcagatctgatatcacttgcaactttcttgggaccagacacagagaaatatatctcatccataaatctgcagcaataaactgtgagcgcaacgtcctgctctgtagtacttttcaaaccttgttctccggcttgcctcctaaaccaggaacgaagttttgagcctgggctatcttcatcagtctttgaatcaagaccaagggcttcatgcctcattgagattctataaaattcatgatcaaaccgatcaagatatatgttcattaaaacacgggacaacaccccttcttgtggaagaccatggcccttgggaaatcctccgaactcgagattgagcacccgggcttcaaacatagaacggagtaagatgcttaaactgctgtcttctactttttcctccattacagagagcaagttctcgataacagaaacatcaagttttttgttcaggctcaaagtgaaacaccaatcagaacgagaaatattgttgttgatgtacttcaatgcagaggcacgtccccttccgcttcgacaactatgtgaaatcttagaaaaatgaggactgaaaacaacttcaagaactattctgatagcctcttggacaactttaagagctacactaggcaagacaaggacctcttttgttttatctctagccacaatcgaaaacgtatttgaagcaacatcaaacaccccactagagaggtcttctgcaatagaatcaaacgcgacactaccatttctttctgttatagaaacattggagttaagcctaatacaatcataagcatcccggagagtttcaggccttgcaatcaccttcttcaacagatcactaaacttcccattgatgcactgctctttgactcttttcttcaaccggagttcaagagatcgttttagttccatacgacttctaggtttgctatcatcatcaacatgagaagaagattcttctacaagagaagctaattccccagctagtgaaaacattccagtttccttactagccatttctgcattatctgttgcaagcagagccgatttgggaaacgtggagattgtgcgactccataagccccgtgggattagggtttctatgtaacatcggcgcaacaaatctaaaactaggttccgtttcctaaacatcaagttaaaattccgattcctaattctaaaacctatgcgattatatcccgactaagccagtacaaagtttctacaatgaaacgggacgaatcaggtttttatcaatctctttgcttaaatcaacacagaaatggaaggaaacttacgttcagggatgcgaaaagcacgattggtctgagagagagaaatcgaagaagctcttgctttgcacagtgaattactcgagattgagaagaagaactcgtgacttgagaataggatggaaggagggactatttataaatct

SEQ ID NO: 69381 - DNA, 511 bp, Arabidopsis thaliana landsberg
ataatcatatttgcgtgcataaatacattaaaaaatttatcattagcgttttttcaaatggtgttttcattaatctataaagttatttaatatattgtcttttttactaaaaggccagagctttgatcacatattcacatctatagtacacacatatctctttttgggaaagtaaaactttagaagcaccatgacgtatatactttgtcgaaccactaagtgaaagtatttttatacatccttctttctacattaataatggattcttataatttcttgattttattaaatgaaattttgttgttatgtttcgtagaatcgttggccacaaacggccattattcttataactccgcctccaatagacgaagaggcccgcctcaggtacgagtcattaatccaataatcccaaactttgttttatcaaaatcaaccttgaatttttcaattccatagactctcatgtttatcactttgaccatgaaattttagatctaattaagacattgat

SEQ ID NO: 69382 - DNA, 572 bp, Arabidopsis thaliana landsberg
atttgcatttagtattatactatgtggtgggttttcctatttttattcaactattgggcaatagtttttaggttttaatgtttatttatttactatattatttaagtataataaatagaaaccacaaaagtaatatgttaaaaacaaatagaaaaatttgttcaaagaagttaagtcgacggtgacctagtgcatccacctaaaacatctaatataaaccagaagacgaatatgtacaaaagaattaaaaaaagtgaagacatgtttaaaaaagcgttaaacgctacacaggcgtttacctagttcatgtacctaaaacatctaatagaggcctagacaattttacttggtttaagcatttataacatatttatgaatatgatattatacataaaataatgtaaaaatatctattataatagaaaagttttaatttgtaaacacaatttagataagatatctatttaatttatatccaacgatttataaacggttataacaatgtatatatatatgtagacaaaatttagatgaaaattagtaaaatacaccaaaaacgagtcatatgcaag

SEQ ID NO: 69383 - DNA, 541 bp, Arabidopsis thaliana landsberg
cgtccaatttgaattttgaaaaatgcatgccactcgctcgtatccgcctataaatcatagtttttcccttttagaaaattaaactaagcattaagaaaatgtaacttaagtaaaagtcaaatttaaacgcaaagtaaatcaggaaaaaaaaacgattgatttgaaagtttgaaccaacaacctccccattaaatcattgtagacacttgcatgtacaaacgaaattcataatagtttcaaggggtagttgtgatagtgattttaaccaagttggtgtacggatgataagagactgactccacagttaaaatttagaactctgcaaaactattgcatccctcttatttgatttttcataagtttacaaggctgtttacaaacttttaaatgtctttaaagtgaaaatggatagaccctaaaccgttagactctctgattacttttcaatattaatacgtgttacatgcctttgctaaacacaagtaaattgacatatgtttttttttacatatacatgtcattttctttttgacatatgtta

SEQ ID NO: 69384 - DNA, 586 bp, Arabidopsis thaliana landsberg
cggtcccctagacaaaaacaaaggaatctgggatttaataagagtcttctcaaaaaataaactattaaatctcgtcatagcaggtacaggcagcgaatatgttccagcattgcaatacatcgaaaagcataatatagaaaatataaaaatacttggatttcaagatcaaaactctctgcgcaatcttatttcagattcaatttgtattcttgtaccttccctttggaacgagaccttcggactaacgatcaccgaatctttctcatatgggaaacccgttatagcctcaagaatcggagggatccctgaggtcgcatcagacagagaagactcaatcttaattgagccaggcaatgagaatgagctaactaatgctttacacttcatgattcaaaacccatctcaagctgccgaaatggggcgtcaagccaggataaacgttgaaatgaaattcaaccctgaactccattatcaaaagcttttggctatctataaaagattcctatagatctaaatcaaactagacgtaaaaatgaaaatctatatatttaggaacaagagggaattccccgctcagcaatggcgg

SEQ ID NO: 69385 - DNA, 707 bp, Arabidopsis thaliana landsberg
ctcgaaactggcaaacaagtataacaatatgacaaagcaaatcaatacaaagtcttttgaagagtccacacaaggtctatatggatgttcctttcaacgtacctggcaatttccatctccctccatttgcaattccgctaaaccatatgtggccaacctgaacaaaaaagagagaccattaaagatgtttctagattgaaaacaactagctattctatcgacaatgaacaatctaatcagcatcaaatgaagaatgcagtcaaggaaatgaaagacgatgacactaaaggaaacgttgataagaagatgagaacctcccagagagcagctcatggtctaatgttgcatcatttatatcaggtatctccctgttaacccgaggagtgtgctgccaataaaaaattccacaagatattcaaagaacttgtcaccaatagacactaacaacaacaatgaatagcacagatccaagcctaaatgtgaagattaagcaaaagaagcttatcatactgggatagaatccaaatgagataatctcttcccaagcttgccttctcttctcaagctctcatcttcagctaatatacgtgcaatggtctgatcatcatctgtatccgccacactgctactaaaactcgagtttgagctcgcacttgtactgccgcttgctctagcacttgtacttgcatttgcaaatggaatcctat

SEQ ID NO: 69386 - DNA, 390 bp, Arabidopsis thaliana landsberg
  unsure (1)..(390): unsure at all n locations
tttattaccattatgttttcattagctgtattaaaatttctgttctttttgcgtgatctccagtgccgagtgcgctgttggcacgattatnnnnnnnnnnnnnnnnnnnaagggagatcataccacttacaccatagagcctggcttcggtgaaaaagcctatgcgctgtaccctgatgacacgtacactagtttggatgcgtgctctagacaactcacttgagaacagttgacaataacatcttactcatcggtagaccctgaatcttgtacgtgagtaattgattaatcacgctaattgtaaagctttggggactcaagctcttatatgacactagaatcgattactttctatatactcgtgagacactatcaagatctatgtacagg

SEQ ID NO: 69387 - DNA, 409 bp, Arabidopsis thaliana landsberg
cacgcgtccaaccagaagcagtgggcaaattcctgtcagcacgtcaaaaaaggccaggtccaacaacacacagaagcccacccgttcacgacatgcccgctcgcccgcccggttggcgctcctatggcggcgcggggggccgcttctccggtgccggcctcgcgaatccggagctgagcgcgatgggttctgcggcgaaggcggcagcggcgcggccccagaagtgctcggcgcgggggcgagtgcacgtggacaggcggaggagctcggctgaacggggcggcctggcttcgagactcgggcggggacgctgcgcacgaagccgaccaaccggtacatagctacccgcgctgcgcgcggaccagtgccgtgaacaagccggccggtcctactacagaactgcgagcgc

SEQ ID NO: 69388 - DNA, 394 bp, Arabidopsis thaliana landsberg
  unsure (1)..(394): unsure at all n locations
tgaagttataggtcaccactttcagtccgcaggcggcaacatngtgcattctttgcttataattttctatgtgccggcggtgttttcctctttgcatcttgatctctccatgtacggtcaggctttctatcacctcccacaccatgccggcggtctctacttcttttcttctcttgactatctcttctactgtacaaatttcgccgacaggtacttagaggagagcggtgacaacaccgctgcatccggccttgccaatgtattaaaggctgaccggatcactgtcaccattccacctcattttctgttgcatcatattcataatcccattctgctggcaaccaaattagcgagaactcaaattaccctttacattttcccacgaatttatcta

SEQ ID NO: 69389 - DNA, 538 bp, Arabidopsis thaliana landsberg
  unsure (1)..(538): unsure at all n locations
ctatcatttagcaggaaaattgttgaagttaaaaatatagtttttgtttcaaggttacaaatgataaaggcaatggacggttgcatatggcagatgaaaggcgaaacatcaattgctagctatcaagatttatccatcaatgtcagaggttaccaagtcgtttgaagcgatttcagatcacgtttctataatgtaaacacatgcaaatgtagactgcttttaatattgcaacaaatgcttctgtcaacgtagtagtaaattcatggagggcagctactttaatttcgtagtggtagtaaattgccttaaagatcaataagaaaatacccacgagtctatctttccattaaaagaactaaaagagtaacagagcttggttagataagaatatagtttgctaatttaacatacgaaatcatatcatataaaccaaggaaatccttcaataacaaanagggggatttcacaatagtgaaaaaagtcttcaggagtttctcatactcctcattatctgccctggaaatagtaaaaagatttt

SEQ ID NO: 69390 - DNA, 397 bp, Arabidopsis thaliana landsberg
ggagtgatctcgtaacggacgttgggaagctttgcagcaaattcaagttgctttgagctcgtgtctgtagcaattacgttcttgtagattccggctagctgaaaagaaggacaagattaaaatgatatagaattttgaatcaagattgaaagactaacatgagttatttggagatttgaacaacactattataccgatcgtgaggcttggccgcttccggcgccaacgtcccaggcaaggtcgtggcacggtgttttcgatgccatatattcgaagagtttggtggggtaactgggtcgggctgctgcatattgctctgcttgcttgatgaataatactgccattgttgatggcctcgagtttctagcatactcattttaccttgtggctaagaagg

SEQ ID NO: 69391 - DNA, 558 bp, Arabidopsis thaliana landsberg
aattctgaaccaaacaaaaaaagagtttgaagtttacacacaagtattttgagtataattttatcatttggatagggttggttacctagaataagacgtaaccgaaggtaactcattaacattacagatctggagattaccgacttctcaacaaaatctggaaacagcagaaccaaaatctatagcttcattcttgataaaattgtatagatattttgaaacttctcaaacaaagttacctggttcagaagttggtttgtagccaagcccgtataccgcatatttcgcataagcgagtagtctcacccgttgtggagcacctaactttagagtgattgaccgtatgagtccactgagatcgatcaaaaacaaggaggtcataaataatattctttccagaatcaattactaaataaccgaggatcgaggattgtactctgttcgcagaacggttagaaagtcaggtggaagagaccccatgaaagttgtacgtctttcaatctcagaagtttgagctcctgtttcagtttttgctctcttgtatagacattctttttc

SEQ ID NO: 69392 - DNA, 118 bp, Arabidopsis thaliana landsberg
cattttcagatcaatcccagtgaatcattggatattacattattgagtcctcctaacaaggtcgagttcctcccttgaatattacattattggacccgttatatatataatttaacaa

SEQ ID NO: 69393 - DNA, 732 bp, Arabidopsis thaliana landsberg
cccttataagtggacagactcatccgcattctccgctttgaacagagtttgcttcttcgttcgccttccctcacactactgagctacaaccaagctcggcagaagcaggacagagatttaagaaccgtgaagtgagcccaaacaaggcagaaacagcagctgcaaccaaataggctgaaaacagtgcggcagcactagccgtcccagtaacagcagcagtacgagcattccttagccgcttcaggagggtcaaacgaccggactacgtcctatcctcaggtgaatacttttacttcagttggatactttgatagttcactactacgataggggaatactaggctagggaatgggaactacttgggaagtcatctctttacttaacgaactaaccactcagggattcaaatccacgatactcctaccatctgcttgatccagttgaaaactttactccgacttcacatcagcccttagggtcaacacagctcctcttatcctttactctttctatgcctggattcctatgcctgttttacctcgagttggaattcagtgggagaaattccaacaaaattcagtgggagaaattacaacaaaattcagtggtagaaattcttcaaaaaacgaaaacggcgattccaactctacaatcaaggcagaacgcagggagggagagagaattgattatagacggcggaccggacccaagctagggctgaagcaggactt

SEQ ID NO: 69394 - DNA, 564 bp, Arabidopsis thaliana landsberg
tggaaattccccactaataacatatcaatcataggtaatgcaattttgttttctcttttttttttaactttttataatggtgttaaaacggtttttgttgttttttttggaaaacttttgacctagtgtaaagtttggcaaaaatggtttgatctaaaactaggtttcatcgagattttacattttgcagaactctgattcgggtttaatgagtttatggttagagacatgggttaggttaagctttactcgatttagagttttgaggttcgctgcatcttgctttcatgctatcaaagcatttttatattgttacattctcttgagtcttttttttgttttgtaatccttttctatttctaattaaaaaaactaaaatttatagctaaaaccattaaaaaaaagtaaccaagagttccgaaactaaagaaaacccaaaaaagttagtaacttcaaaaaatttaactagtttctttcatcaatctgtatttatatatgttctaactttttttatcaaaaccaaaccgaatctaaaccgtatgtcaaaataaattaaaccaaaat

SEQ ID NO: 69395 - DNA, 604 bp, Arabidopsis thaliana landsberg
  unsure (1)..(604): unsure at all n locations
gcccgtgatttagccttgggacccggaatattaccgtctcnngattggggtttttantatcccaaaccaacccgacgtcggtagacaggcggccatcgtggtggacgacagggctccgggcaccgcacggggcttctcacacctcttcttggccgccccttttacaagnnnnnnnnnnnnnnnnnnnnnnnnnnnnnnnnnnnnnnnnnnnnnnnnnnnnnnnnnnnnnnnnnnnnnnnnnnnnnnnnnnnnnnnnnnnnnnnnnnnnnnnnnnnnnnnnnnnnnnnnnnnnnnnnnnnnnnnnnnnnnnnnnnnnnnnnnnnnnnnnnnnnnnnnnnnnnnnnnnnnnnnnnnnnnnnnnnnnnnnnnnnnnnnnnnnnnnnnnnnnnnnnnnnnnnnnnnnnnnnnnnnnnnnnnnnnnnnnnnnnnnnnnnnnnnnnnnnnnnnnnnnnnnnnnnnnnnnnnnnnnnnnnnnnnnnnnnnnnnnnnnnnnnnnnnnnnnnnnnnnnnnnnnnnnnnnnnnnnnnnnnnnnnnnnnnnnnnnnnnnnnnnnnnnnnnnnnnnnnnnnnnnnnnnnnnnnnnnnnnnnnnnnnnnnnnnnnnn

SEQ ID NO: 69396 - DNA, 503 bp, Arabidopsis thaliana landsberg
actcatacaatatttttcttcttaattgggcaaccaattataaaattatttttcaattaatatgtgattaaaaaaattactcatgtagtcatattaatttgccgtgtaaaactcttgtttcatggattgtaactatggcccgactctgattatgtcccttaacatgaatataagcactttatcgatttgaattcggtttggtcatggccggccttccgcataagccacataagcggcagcttagggtcacatttttttcccctttgattttaaggtccacttttgatgaatcaagaagttacattgcactaccatgtcatatatattcacatttctgattttttctacacatatttatataagtatttatcttttttctattaaccagtttgtatttcatcgaatagcaagaaagttcaatactattcgactctcaagtgtttttccaaatcaaacacgcaaatacgacatattaattgaagtggataatgaaatttgaattc

SEQ ID NO: 69397 - DNA, 569 bp, Arabidopsis thaliana landsberg
  unsure (1)..(569): unsure at all n locations
gggggcggttgtaggggaggaggcccaggctgatgcggattcggttacagagactgaaggcgaggcggaggggnaggtcgattttcgaggtggaggtcgaggcggacgctgatgccggtgcatcgtctgcgaagaagaaccgtatccaggtgtccaccaacaagaagccgctctatttctacatcaatctcgccaagaggtacatgcagaacnnnnnnnnnnnnnnnnnnnnnnnnnnnnnnnnnnnnnnnnnnnnnnnnnnnnnnnnnnnnnngatcctcaagaacaatggtctctccactgaaaagaagatccttacatcaaccatcggcaccaaggatgaggcgatgggcctgcttgtccgttaagccaagatcgacatcctgctgtgcaaatcatagaactttaacagtatcatgtgcagcaagaagttcgagcgcccgaagccggccgcctaggaagagatcaaggtgtgatctatcccaccaacgaactttnnnnnnnnnnnnnnnnnnnnnnnnnnntagggcctttttccctagctagctagctacctaagcttccctgtt

SEQ ID NO: 69398 - DNA, 472 bp, Arabidopsis thaliana landsberg
  unsure (1)..(472): unsure at all n locations
taaattgcttgccgcgtgctacacacttaacgttaaaaagttaaatttaatcttgattcatgtttttgttttgtatgcggtgaagagacttttttgccgacctaaaaagaaagaagagatttcagtcttcgattgtcatttttctttctttcttatcgcatttggaatttaatctggttgttgttggtaaaattaatcttaaaacatgccaaaagagaacgaaagaagaaactcaactaaacaaagaaagaactttaaacacatggaataaaaatagatgaacaaatgcacgtttagacaacgaaggtagtaactaaaatagaatccatggttttagactaaaccatgcttaaactcnnnnnnnnnnnnnnnnnnnnnnnnntacgattcagtggcgtgaataagaatcaacctagattacttcatcactcaaatttgctctgaacatcttgaatgatggtgatacaatcag

SEQ ID NO: 69399 - DNA, 508 bp, Arabidopsis thaliana landsberg
gtgcgaaccagacgctttgttgcagcgtcgatctgtttatctgcgttgggatccggcacgagttggaccgggaccacgatcttcacgtggagatatgacctcctcatacgcgtgggggagaacccggcgccattagggttggcggaagccgacccctgcccgggccccatatattatttttatcagaattcgatgcgctggtcgacgaccaaggccgtcccgcgctcgtcgggcgccgggccgccggggatcgacggcaaaccgaccaggccgaaacggcgaagctgcaccagtagctggcggccgtgcccgaaatcccactgggcgccggcaaacgccacgccgtagatcccttggaccggcgtggtggaccagaagccgttcgcgctgtagcgcccgtatccgagtgcggcaacgagccgcttgcccgaacggtgctcgacgctggcgacgatctgcggctcgttcatgctcacgaagtcgatcgagtcgatcgccggccggtatg

SEQ ID NO: 69400 - DNA, 459 bp, Arabidopsis thaliana landsberg
  unsure (1)..(459): unsure at all n locations
cactacagnntcttctaatatcgatcatcatttttagagtgtttttatcttccttctatngatttatattagggctacgcagaaatggttttattattgaaatattctccatcatctactgaatattcctacaagtgagtcatacttaggtttattgagttatttggatgcaaatggatagtaaccggaaaactaataaacaatccctagacaataagcaacccacaaatctaaagcgacgcgatacgtaacaacccccgtaaatgttggagcgtgatttccacgtcactccgaggagcgtcagaaaatcataatcagctaaaataaaacatattcataaattaaattaaatcaattgcttgtcgcaataacatttttatttgtaatgtaaatattattttcaactaatcattcactagtatttataattataagagatgaataattttacatgagaaa

SEQ ID NO: 69401 - DNA, 775 bp, Arabidopsis thaliana landsberg
ttacttcatccttgctatacccctctcctttgttctcagttactcatcaaatggcactcagttcatatctttaagttcgatcattgacaaggttcaaagaaagggtaggccgtcggtttgaatccaatattatgcactttttttttttcaaaaatacggaattcacaactagaaagggaaaggtttccgccccccgccatcaacggtaatcaattcttaaagagtaagctcaccgctttctcgctcactctttcttctttccctttgtggctgacctcgcttgacggaagcctgcttatttagcgacacaacaaaagaaagcacctgttggttggtttcacgattgtcgaaggcggcgtaacaactctttcttcccttttgtcagctcaattatttttttttatagactatatctatagcctcacactcgccagctgagttcgttggctagttttgatcaccccgaattcgatttctcatgcgagacagaggtagacaagataaaggtcaatcgcgggttaactacttatttgattagaaagaccaggctattccgctcgctctcaggagcttgagtagaccgttcgttcaactcgcctgaaggagactagacttccttaaaaagaaaaactcgcttcgctcccttcgcactcgtttaccgcttgctcttcttattcatgattataccgttcgcaggcattcctggtcaaactgactggcttggggcctgggggggaagaatattaattcaatagccaaagcggaccagagaagg

SEQ ID NO: 69402 - DNA, 602 bp, Arabidopsis thaliana landsberg
  unsure (1)..(602): unsure at all n locations
agcgtgtgtgagccgtgttatgtaaagggagaggttagatttaggccacgagtgcaagagggaacagaagaggggctaataattagaaggttagggagagactcaagaaatgaaaagaagagacaaaagatagagagagaagagagacccacaaaacaaaacacacacgagtagagatgcagcattagacacgactcctcctttttcctacgcacgcaatttggagctcgtcctcatattggaggtagggactctcctttaacacttgctctttcccttctcagttttggtcggattcatttcataaatctctctctctcccccattttctctcttatccaacttcttgtctctatttccaattctaaagaaacaagcaagatttggtagagattatatgaaagatttatcttatatacaataacttgtgaagtagagactcaaaaaccttagcaattattgattgttcatagntgtcacattttggtcaaacttagccatgtatctagtatctacattggaccgtccaacttatgcatattaatctaggtatttttgaataattggtagccatgttaataaatgacanaactcctagaaga

SEQ ID NO: 69403 - DNA, 416 bp, Arabidopsis thaliana landsberg
  unsure (1)..(416): unsure at all n locations
atcagtatccagacgatacgcagaatagacgccgcgacctgttatgttttcgattagtcgtcccaggnnnnnnnnnnnnnnnnnnnnnnnnnnnnnnnnnnnnnnnnnnnnnnnnnnnnnnnnnnnnnnnnnnnnnngctttcagggtcaggccatgccgaagattcttgtagtggatgattccgcgattgatcgcacacgcgcaggccgcttgctcgagaagcaggagggtttgcaggtcgcttacgcggtcgacggccggtccgctcttgatgaaacccgcattcgggttcctgatctcatcgtcacggatctgcaaatgcccgaaatgaacgggctggaactggtcgaggcgatcaagcgggaagctccctcgatcccggtgattctgatgacggccctaggcagtgaaaaca

SEQ ID NO: 69404 - DNA, 295 bp, Arabidopsis thaliana landsberg
  unsure (1)..(295): unsure at all n locations
gcgctgtgcttcccgtacatcttccgcggcgcgctggacgtttgcgttaccggcatcaacgaggcgatgaagctggggggcgtgcgcgcgatcgcgaagctggcgcgcgaggaagcggccgatctgggtggcgcctacggcgaggagattccatcgttcggcgccgagtacctgatcccgcgtccattcgacccgcgcctgctggtgatgctggcgccggcggtggcccangcggcgatggactccggtgtggccaccccggcgatcgccgacctggacgcctattgggaaaagc

SEQ ID NO: 69405 - DNA, 237 bp, Arabidopsis thaliana landsberg
  unsure (1)..(237): unsure at all n locations
gagagagggcggaggcccctaggaaacaaaaacctcaggcctttcagatgggcgagcaccgganaaccagtgaacacaacttattgaccgcaatggcgcaagggtcaacgagccaaacgcactagctggaggaccattatacaaagcagcccaaaacggcagggacaagatgagaatccacgtgaccaccattagcagggcactaggattgggccccacacggcaggacatcaagac

SEQ ID NO: 69406 - DNA, 175 bp, Arabidopsis thaliana landsberg
  unsure (1)..(175): unsure at all n locations
ccagcaaaaacaacncngaagagggcgccagcaccacgccaaangngnccaaagaagaaaaggagagcaaacgaagcagggccaaaccgaaaccaaccncnngggcngcnacgaaaaacaccancagannncaaagncgcacgancnaanncaaaaancncacccaanngagccc

SEQ ID NO: 69407 - DNA, 214 bp, Arabidopsis thaliana landsberg
  unsure (1)..(214): unsure at all n locations
agaagaaaaaaagcaatgacgcatcagacagcgtggataacaggcgcagggaccccaacangngggagagagcccaaacagaccagggccagcgacgcaagaacaaggggcgcgcaaaaccacngggcgaggagcccagcagcgcgccacaccggcngggggcccgaaaggccaagacaaaagcgagggacaccccaaaaccaaccnnccgggc

SEQ ID NO: 69408 - DNA, 117 bp, Arabidopsis thaliana landsberg
  unsure (1)..(117): unsure at all n locations
aacaaaanagaggcaccaaaaaagancaaccgaatttgacaangaagccaatnccatccaacagaacatacccgnnncngnangangngggacanncnngcaccagcannngaagag

SEQ ID NO: 69409 - DNA, 2759 bp, Arabidopsis thaliana landsberg
  unsure (1)..(2759): unsure at all n locations
attttaagcctttcttactaatttcgccattttttcctaacaaattggattttgttttcacattctatcattaattcccatgtatcgagatggttatgttatgtacttatgtttatcatcgtagtctttgaccattttagagatatgtcatagaaaccaatgtttgaactcttagcaaaaaaanaatgtttgaactcaatgtcgttgttaagtgtttccaataagaacaagtaaagagacttatcaaaacactttgtgccatataaatgctcaagttttagtggaatcaggtgaattcatactgtaagtgtcacccaatctgttttttgatcactacagattacattaatgtgattcggttttggtgcgtctacgcaaatcacacttgttaattacttgcaagggaacacgagtagggggtggtggatatgttggaaagcggtgactatactaatttaacttaacactagtaatttcatgatatgacagtcctatatacacttaggtcgctcgcttgtacacctaaaacgcattgccatttgaggcattagtgttgcgcttggacatccaacaaacaagatcgatgctatatccaaatctagattgcataagttatatgaattgcatagtaattgaaacgaagaagaagattgttggatgaatagtcaattaatattgaaacaaccatcaaacaaaaaaaaattaaaattaatcgaaaagcagacgaatgaacgaatccccatgcacgcagcagcattatccaaacaaagataaacaaatggatcacgtagatttattaaactattcaaaccaataacatatcataagcaaaacaaatcagacaaacaaaaacagagagagtggtggatggtcgtgcttagcacgattcagtatattactgaggtcagagggtcaaatcaatgcaaggtgtaataaggttgtcatctccattaccattttttattacaaagagaaagagaggttcgtatttactctaaattaatgtcttaaaatttattctgccaagactgtaagacatattaagtagagcatataatccataaaactatagagtagagagtaattataagagtgttaatataaattcggtataagagaaataatggttaagagaaataatggttgagagaagagggaagaggtcaaagggggagaaagagggaaaatttccctccaagaaggaaggggggaagatgatgacgtgtacaactgccaaaataaaagcaaaggttcctcttttttcggccatttttttcgcttcacctcttctcctctaacgccgttgaactcatcaatcaatccattcacaaccaaaatctctctcaccatttctctccctaaaacaccattttcgctatttttatttttaattgatactttttttttactatcattcccagatcaaggtttgtttctcgatcgaattcatgcttctctgatctgagatcagttagatacgactgcgttttcctcctcgaatttgatcatcggacattctctttttgtttcctgggtttatagtgccgcacgtcaatggcgtgaaccgcggtcatggctaacaaaaacgcagaatcatcttcacagcctcctcctcatgtgcagccaaaccaacaacagcagcagcagccaccgattgccaatgaacaagagcaggagcctcatgtgcgtctctctatttttggaaattcatctcgctccagacccgattgttgttcttcttcttcttccaatgttgctcaatgtttgtttttgttctgatctcagggtgacacctgcagtattcctcctgcgcagtctggaaacacagactcgcgttcccgtggtggcaacacggtaatttcttaatgagatatttatttgctttttgatcgaattgcctctgtaatggaacgcgaagcaggagaaattacttgttcacaatcccacttctgatctcgtttttggctacaattacctgcattttctgtcttctccattggtcattgttgcgcgatgatgagcattcatgtaatcattaggcatgtcctggttttctttcgagcaaatctcattccgatcgattaatggaaatatggaattgaattattgcatcattgacttaagacttgagagttttaccttttcaggttaaaccattatgcttgcttctaagttctaatgaaacacacaaaattctagtcactgttctcctacaaaaagtgttttttaaaagaagctaagatcttattgtatgaaaatgaaatgtccaatcatgtaaatgcaaatacaaataaacagtgaatgtgcttctgctgttgatttcatgatacaactctcatggaatttgtttttgtcgactctaattactctgtaggttttcaagagtggaccgctatctatatcttcaaaaggtatgttttatttcttaggatgatctacttagttcagtgtagcctttcttaggatcatgagagttgctcttaggatgagatgttttcttatttctgactggggaaaactgttactggcagatagtaaggacatattatcacctcacgtgggttttgtaggctggttgaacccagatagtatgatacaacgtcagcactagcacaattcactaggctacatgtcctggtctgtggctatgtcttaaaattgtctctcaccactttatatttcgtttaatacagggattggctggacatcatgagaaaaaagatggtttattttgacgcgtacttcactagttttctttc

SEQ ID NO: 69410 - DNA, 202 bp, Arabidopsis thaliana landsberg
  unsure (1)..(202): unsure at all n locations
ggaccgccggcagcccaaccacgagaacnnncacnaccgnanncagcaccagccaaaanganggcgncgcgacccacggaccaacacaaccgggacagcacgaggagagaacaacccggacaaaacaaagcaacgaacggcncaccgaacnccaacggaccaaancagagaagcaaacaacaaaaggnccacccccaagaca

SEQ ID NO: 69411 - DNA, 662 bp, Arabidopsis thaliana landsberg
tgtgcgactaccgcgtgcgcggtttcacccgcgacgtgaagggcaagaagcacttcatcgaccacaagatcaattcggtacaggattacctggcacgccacatcaagcagaagtacgagatgttcgacgtgaacgtgtaccaggagaacatgttccacaccaagatgcacatcaaggacttcgacctcgacacctacctgttcgaggcccatgccgacgatctctcgttcaaggagcgccagcgcatcgagtcgctgctgcgacgcgagatcgaggaactgttccacggccgcaacctgatgtgacgaaaaacccgccgcgaggcgggtttttcctttgggcatggtacccgccgatcttcgccctttcccctttggggagagggccggggtgaggggcgggtgctcgcgaaagccttggctgaaccagacccccgtcagacccgatacgccaccgtcttcatcaccatcgagctggcgtgcatcagttgcgggatcgggaacggcaggtcgatgccgccgcgggcctgggcgttctgggcgtggcgcacctcgtcggcctgcatttgccgcagcaccgcgcgcgagcgctcgtcctgcgcgggcaggcggtccaagtgctcgggcagatgggcttccacctggtgctcggtctccaccacg

SEQ ID NO: 69412 - DNA, 1098 bp, Arabidopsis thaliana landsberg
  unsure (1)..(1098): unsure at all n locations
tttgctcttgacccgtcgctatatactcttcatggttgcctgaaattagatccattagtttgggaatttggttttaagaatattgaaaaacatatgtctgttaacatcattatgaaccaaaaccaaaatgcttacaaggaaattgatctcatccaaatatatgagggtgcattggttcaatagttagtgtctcttaattaatttggaaatgcaaatggattacttgattgtaaagtatgcttataaatcaatatcaatatagtttatattgatatgaacttccacataactctttaaagtcctacttgcctttcagaataataataacaaaacgttaaataaattttttaagatcatattacaaagaagaacatagttttgataaatttaaaatacattaacaataacacaagattttagttggattttccaaagcagtatacatttttttggctcttcaaacttttgtaaagtaaagaccaatgtcttattagaattgtacttgacaaaactccttttcaaaaaactaaaacaaacttcatataaacaaaaccaagtacaaatgtgttaaaactccttttgctacagaatctttttcgagtctgaaacattcaaatacaatacacttcatataatcatataccctcaaatcatatcgggtcttttgtattaacagacccatcataccataagataaaaaaaacaaagagggcgggtcgctcagggagaaaagaaacagactcaaagcgcgaccactgccaatgatatttcatacaaaacaaaaaaaaaaacttaaaactgaacgttggaagaataaatctgtccaaaagaccaagaagaaggaacaacattgagaaagactctagtagcaccatcagtagtggtaatggagaaagagagagcttgaccatctagataagcattcgattgccaattagctccccagttacgagacatggctaaccaaccagtctttgatcctttgatggatacagatttaatagaacctgctcctcctacattttgaatattcactagctcgaagtagtctcttncgtttattctgaatctaactcctcctttcttgtaacagctact

SEQ ID NO: 69413 - DNA, 112 bp, Arabidopsis thaliana landsberg
  unsure (1)..(112): unsure at all n locations
agaaccatcgttttcggtttactttaccaagctttggtgatgcaccgcaacaccaagaaccagancacggagaggatttcggcaangaagcccgcagagccagagccagaga

SEQ ID NO: 69414 - DNA, 183 bp, Arabidopsis thaliana landsberg
  unsure (1)..(183): unsure at all n locations
acaaccgggcagaaaagcagccccaacacccccaaanggagannagaaannaaaaacagacacccagangagaagcaacggagcagaacacagaagangggcgcgggaggggccgacaaaaagaacaacggacccaaacanaacacgaaggacagngggnngacacaaagacgaacaaaacca

SEQ ID NO: 69415 - DNA, 127 bp, Arabidopsis thaliana landsberg
  unsure (1)..(127): unsure at all n locations
agacaaagaggggaaggtttgagcagncggacgcaaccacgcagaagacgnnnnncagagnngnancggcgagcccccaagcaaaaaccgngaannngccnnnggcccccnccaccangaaaaacac

SEQ ID NO: 69416 - DNA, 216 bp, Arabidopsis thaliana landsberg
  unsure (1)..(216): unsure at all n locations
accccnggcgacaaccacggacccggcgcgaaccacgaccggcgacaaaccccgaccacacacggacacggcgagaagcacggaccggcgacanaaaccccggcgacaacccgaacccgaagaaccaacgaccaacaacgccaggcgacaacccggacccggcgagaagcccgaccaggcgacaaacaaccccggcgacaaacccggacccgcgac

SEQ ID NO: 69417 - DNA, 410 bp, Arabidopsis thaliana landsberg
  unsure (1)..(410): unsure at all n locations
caaacacgccaagngcaaaggaagggctttttttaaatgtcaccgtctttctgtcccagcacaatgagactgatgntgttacccatgccacctctatgactgtaaatattactggattcggggaaatccacaaataatatttgtgccgtctcgacgttgcgtacagtaatgctgtactacagcaggtccgccacttccatattgttatgatacagtaactttccttgagattgatgttgttgctgctgatcttgaggcgatactatgatttcatattactctcgcttgtacctgtttccctcttctttccgcggcagggcttacatgatcatgagcgtggctgtgacaatgaaacataaagtatgaaactactaaacttgtcatatgtaaatgcaatattttattgttaa

SEQ ID NO: 69418 - DNA, 186 bp, Arabidopsis thaliana landsberg
  unsure (1)..(186): unsure at all n locations
accaccacaaggnaaaaaagggagaagcnccancagcaaaaccnggagaaaggngagccaaaagaacccgaggcaagaaaaacccacgaggaagcggnaacacnncaggaacaacnnccagcgcaagaaaacggnnaaacggcaaagaaacacgaaccngacgnccngcccaagaaagggacccaa

SEQ ID NO: 69419 - DNA, 217 bp, Arabidopsis thaliana landsberg
  unsure (1)..(217): unsure at all n locations
gaaanagaaagagagatttattgaaacgacacccctgatgccaacgacaccaaaggganannaaangaanggaaccgggacacgganggaacacaacgaacaagagccgcnncgaggcncccnannaaannaggcanggaacggagccacnacgaagaangaccgggggnnacgaaggaaacnncgagggcaaaaaggncangggnggagaacggga

SEQ ID NO: 69420 - DNA, 577 bp, Arabidopsis thaliana landsberg
cccgatttaacacagcagcttttttccttctccttgtcattctgtttcatagaacttcccaaaagagtgctcgtctccaatagctagtagctgcacaaaaataactgccctcaagaccatttgctacatgtgaagaagatacagtaaacaaacttcatccactatagtcttatacatattgaaacgccaaagtggtgataagagttagcttagctttatgtgaatgttaacatcacacatatggagaggcaaagactctgctgtactttcttgtttttgctaagaggatgtgcacattccaatatgatttaaagaggcttttacatcatagaaaaaagcagaaaacaaatcaatgaaaatctaatgaaccattgaaaaaattggtaagcgcaaaaaaaaaagtttcttaactagggttagcaaaatatcattgaacatacgctagaagagataatactcaatactaatctgccattctgacagatatatacgagccataattcaggtaactgacactttcaatacatacgcttcaagcgttttttacaccattcctctaatggatatatcttcaaag

SEQ ID NO: 69421 - DNA, 559 bp, Arabidopsis thaliana landsberg
  unsure (1)..(559): unsure at all n locations
atgatcaatccatatcaaattttatgtacaattcatcactgntatgacattctagatgcttggaggagaaactaattcactaaatatcgatatgtttttcaacaatccaaatatgttcaattatcttgctacattttgacatacatagaagagtcagataaacaaaaaaaaagtcagagaagaagaaaataaaataaaattaagtcattgacaaaaaacaatacatacaaatgaataaccaatgggttacatgttcatggtaaatgtggacctaccaagagggtcaagtgggatgggggctcacatgaacctatcctcacttctttttttggtatattttagttcatccccctttgaagcaattgttgtatgaccatattttttttcaccatctttatatttttattggttaaatgttttgtaaattgattagaaaacaaaaaagagacttttggataggttggtcgcaaggattatgatcttatctgatactgttgtctcatacactcatacaaatatcgtaacatattctgctttttattataattttcagtttcct

SEQ ID NO: 69422 - DNA, 323 bp, Arabidopsis thaliana landsberg
aatgctggtacacctgccggtaccggtccggaatttccgggttgacccacgctttcggttgtattctgaattcgccgagatgtgagttggtgatggtgcctcccgcgttcgtgatccttttaagaaggcctaggagaatgctgcttgcatagtggtcgttgataaaatcgatgcagttcataggtaaagaggaacaggtatcgtgggtgggaacgatgtaagggagcagactctctatcaggtacagcctgtgatcgatggttttgagggcaacactgccatcattgatgttgctgtccccaacagggatgactattaggatt

SEQ ID NO: 69423 - DNA, 727 bp, Arabidopsis thaliana landsberg
tgcgtgcagtagacagagagaggaacagagaactctatctaatccaagagtaatccgacaaaacacaaaacagcaatccaacaaaaaaaactctaaaaagtaaaaagaaagaaagaaagaaaaaaacagagaaaatcaaaagaagatgagctgttgtttcttcgtcgtccttctcctttagtgcaaatctgaaaacccttcagaatgttctgtcccctttatctctctctccttacaataccccactctctgaatcagcaccaccgcctccaccactcaacttataaaacaatctttattaaactatacaagagattaaagggaaaaaaaagctgtattttggtaaataacccaggatttgtctcaatcgaagaatacgtgtgatgtgtgtttgttgcttttttcttggaagcaatggttaaagtagtagtagcaagtagcaaaagattgtatgcgtatacataaattcagtcacgctaatatctgacaagttaaactgtggtttccactttctgacctctctctctctcttttcttttgcaaaaataaaaatgaatacaatataatatagcactagaaaaataatagtactagtttttttagtgaatgagtcaaaattttgagtcatcttaatgcaaattgtgtgagagtcaagtcagtcttttcggtatgttccatccacaaggatttgttccattagtttgggttgaccatggaaactcttttt

SEQ ID NO: 69424 - DNA, 239 bp, Arabidopsis thaliana landsberg
  unsure (1)..(239): unsure at all n locations
ccnagaggcgcgacattcaagacagaggagcgnnaccacgcanccgaangcnncngganaccgccagcaangggaannnccagaacaaagangnngacgaaggcngggaangggcngagaaccnnccncaancagannggaancaaaacgagganggcganaggacggncagaagcacaacngacncngangacaaacacangaaggagancaaagcgcnggangacaagcnggacaag

SEQ ID NO: 69425 - DNA, 308 bp, Arabidopsis thaliana landsberg
  unsure (1)..(308): unsure at all n locations
gcttccgtaaactccaataccgcgatttngatctgcctctttgtttctcttctcgcctcctctctttctaggctcgattctcccttctcgtagctcttcttctcaacttccgacattgtcttttgatccattgtccctatagacagactaaggctggtctcatcagcacaattcctcgatggaagtagctgaagctcgatactaccattagtaacgaagggatagagcaaagaggatggttgttgttccgacggnggggattgtcttcttgtaaaggatgtccaggcaatataggaccaatggagagg

SEQ ID NO: 69426 - DNA, 559 bp, Arabidopsis thaliana landsberg
  unsure (1)..(559): unsure at all n locations
gacaatannnnnnnnnnnnnnnnnnnnnnnnnnnnnnnnnnnnnnnnnnnnnnnnnnnnnnnnnnnnnnnnnnnnnnnnnnnnnnnnnnnnnnnnnnnnnnnnnnnnnnnnnnnnnnnnnnnnnnnnnnnnnnnnnnnnnnnnnnnnnnnnnnnnnnnnnnnnnnnnnnnnnnnnnnnnnnnnnnnnnnnnnnnnnnnnnnnnnnnnnnnnnnnnnnnnnnnnnnnnnnnnnnngggggtggggggggcccaaactggggggtaaaaaaaacgggggtgtgctgttgggggggataaccccaccttttggggggggggggagggccccccctttgttccgtttccagaaggccccttttattaaaagattcgggtttaaaacccgggggttttttttttttaaaaaaaaaaccccccccggggggggccccctttttttttttttttttttcccccccccgcgggaaaaaaaataaaaaaaaaaggggggggccccccccccacttttttttttgtggggggggggggggggggtgatttccccccccccccctccttt

SEQ ID NO: 69427 - DNA, 2627 bp, Arabidopsis thaliana landsberg
atgtacctttcggtgtggaaagctgtatcctggcgtttacgtctcttcgagttgtgaaaccagagaagttggatacccctgaagttattgatctggaatcagagaagagttttactcatgtgaagacagaaccggttgaggaaataaaggtggaagctgtgaagttgagttctcaagtggaagaaatgaaatttagccgtgagcagaaatctgtgtatgtgaagaaggaaccagttgaagcaagaaaggtgaaagtggaagacggagattttccggtggagaaagattggtatttggttgggaggtcacttgtcactgctacttctacgagtaaaggaaggaaattagaagataatgagattgtgaatttcacattttcttctgttgcaaaatggaaagtcccaaacattgttcgtttctctaccaaaagatgtggagaggtaagttgtttttcatacttaacgatttgtgtttctgtttcttaagattctgacatctttcatgttgtgagatactgaaaatttgtgtagttttaaggaactaaactcttccagtcatacttttgttttggtttattaaattgactgcatttttttggctttatggtcttatagattggtagacttccgatggagtggtcaaattgggctgtgagccttttaagatctggtaaggtcaagatgttaggcagatgtgtagcggcgccaccgtttcttacaatgatgcaagaaattatgctatatgtcaggtaaatattgtttcgtttatgttagtttgactgatagttttgtttgaaacttacatatggcttttggattgcagtttttacattcacagctcgatattcactgatgttagcaaatcaacttggcggattggttcttccccaaaccttgagtccactcttcatcctcttctccagcttttcaaacacttgacaatcaaaccttatcaaaaggcatgtaccacatacccatgttacaataccttaatgggattagaatcatgtttcctatccattacttgtttgtttctcatttatatatcttcaaacaggcggagtttactcctgaggaacttaactcccgtaaacgttcactgaatttggaggtatgtgttccacttcagtccctccttgaaactcatttaatgtatggaggattattatgcctgtgcgaatcttaagttctttgttcttttggtggaaaactaagttatgcatttcattggtcaggatgactatgatgaaagagcagcattgttggccatagcaaaaagaagaaaaggttgtcaacagtctctggagcagaacaaagatgaagaagaggctcctgagtcatatatgaatcgggttgtcggcgctgcagattcatacaaccttgaggtatgaaaatattcaccggaaattttttcttgtcctctttaaaaaaaaagcttattgtaatgtcatcttctcttgtcaatcgtttaggaaatggaagctccaagtacactcacgtgtaacctgagaccgtaccagaaacaagctctctactggatgtcggaatctgagaaaggaattgatgttgaaaaggcagctgaaactctacatccttgctgggaggcttatcgaatctgtgacgagtatgtactatctcagatgtttaaaacaagatgcaaaatgtatatgttatctgatattttattgttgatttgcatgcattttattcaggagggcaccttcaatttatttgaacatcttcagtggtgaagcaacaatccagtttccaacagcaacacagatggcaagaggcggagtatgtttcttgatcacgctgaatcttcattctaacacttgtattcctctctagtggcaaatattctctgcttgtggaacttataaaaatttgaactttttgtttgcagatattggcagatgccatgggacttggaaaaactgtgatgacaattgcactaatactagcacggccaggccgaggtaacccggaaaatgaagatggcttggcggcagatgttattgcagataaacgcaataggaaggagattcatatggcactaacgactgtgaaggcaaaaggaggcactcttattatttgtcccatggcattgttaagccaatggaaggtgattgtcttgacagttgtgtcttcttaaatcttttttagctttttacaaaagtctcatggattttcactttattccaggacgagcttgagactcattcaaagcctgacactgtgtctgtgttagtttactatggaggggataggacacatgacgcgaaagcaatagcgagtcatgatgtggttttgacaacttatggtgttttaacctcagcttacaagcaggttagaataatattatgtgttaattttctgttccaaaacatgtttttctatgtttagttgaacttaaaattctgagattcatgacatgcaggatatggcaaacagtattttccacaggattgattggtataggattgttcttgatgaagctcacacgatcaaatcatggaaaactcaagctgctaaagctacatttgagttatcttcacattgcagatggtgtctgactgggactcccttacaagtaagatagtaaaaccaactcatggatagataata

SEQ ID NO: 69428 - DNA, 313 bp, Arabidopsis thaliana landsberg
  unsure (1)..(313): unsure at all n locations
aagaagccaaccaggagcacacaccaaaanagncancncaggaacccgcgccnncgcaacaacaaccccnncacgaccaccaagnaagagccccgcaccaaacnnaggaaacnnnccnacccganncaaaacaccgaagggcngggccgccaanncccnggggggagananaannanacancccacaccancgncaggaccccancncncccaaaagaaccccnccagaagcnaaaacacacaaaanaaanccaaaagcancaaacaaaaancaaagcngancaaganacaaagccacacacacagcaanaaa

SEQ ID NO: 69429 - DNA, 2612 bp, Arabidopsis thaliana landsberg
atctttcgctaagaatcagcagatgaatcggttaccggcgtcggagacgaagaagaagcttgagaattttccatccgacgaaaggaagaagagggagaagggcttaatcgaaattgtctgggaagagagggacaaaaaggaactttcgcagttgaactgaagagatgaagcggtcggaggtagaagaaagacgacggacaacacacacgcaacaacatttcttcttcctttttccctttgttcacatttttctattggaacttgtttaattttcgattttggaccgaaccgacattctttgacttttgcggttcagaacattttcacaatgtccgtttatttattattttgtcgtttttatttgcagccaaatcgattcttgttggtaaataaaactgaattataacatgcttttttgagattaattattacacagacaatctgatgttaaaagcaaaaaaaaaacaaaaacagaagtgttggtatgaaagtgtaccgaagttcgggtttaagacagaaccaaaagagatagaaagatgagagtgaaacgacaaaacttgccgtcgttcgtgtaactcaaaccaacctatcaactgagaaaaaattagggcacaaaataatgtgggtttcacgtccgcgactcatagatccctcggaaaattcatcacgatttgttctgtaattcttcaattccacggcgttctttctgcttcctggagatctaacgttggtgaattcggattggagccgagagattgcctataagaatcgtcctttgttcggatcttctaatttatagatttgtgttgtctgctttctcgctcaaatctatatgatctttagggagtaattttctcgatggctgttcgaatttttcgagaatagatccaaagaaggtattttgcttttcgatcttacattctttctgcgcaatttaagttttgttcatcttgaaagctagcattgatgtgctaggtttcgtcgggaattttagggtttaggaaagtgttgttctttaattggaaataattttttcacaagtttagtagaaattcaatttctgttgtttaatctgcagaaggcaacatgtttgtctgtttagcttgagtttaagaactttgaccagtgttttggatagtttaattttctgtgtcaaggtttaaagttcaaagttcttgcttttcgtcttcgtatgctctgcatgtgagtgaatgctttggctttttcctcctttgaagttgttttcttggtcttgcagctcgtgctttggtgcaactagacaggccacatcccacgttttgatttcttaggttcactgtaaagaataatcaggagagtacacagatggattaccgaccttctgatagtagtggtgagtcttatgtgctttttcagttagaagcattcgttccttctctaagtttattttacttccgtatttgtttccgtgtgttttgtgatatgtttttttatgcgggaactcaggtacagatgatgacctgcctccatctcatcaaggtagatatcaaagaaacgccagacctaccgggaatggaaggccttcagttctcaattctgctcctttatcacgggtgcacaatgaaatggaaactcaaattcatctcattgagcaagaagcttatagctcgatactccgcgcatttaaagcccagtccgatgctattacctgggtactattttgcttgtcttcttcattagtttagtacatgtttatgtaacttcacaagcttaccttttgtcctttttttattcttgttccttcggctggaaaaaaaatattcaggagaaagaaagtttgatcactgaactcagaaaagaacttcgagtgtctgatgaggaacacagagagctgttatcaagggttaacgctgatgaaatgatcaggcgaataaggtctgttggatatgtaattgatcactgataaatctctgcaatcaatcaaaagtaagccaacaaggttaatttaaatcatgtcagggaatggagaaaggcaaacagccttcagtctagtgttcctcagctggttcatgatgctccgagtccggctgtatcaggatcacgtaagaagcaaaagacatcacaatcaatcgcctcattagcgatgggcccaccatctccttctttgcacccttcaatgcaaccatcgtcatctgcactaagaaggggaggtcctccaccaggtccaaagaccaagaagccaaagacagtaagtcatgatgctgcttgattctaattgttggtaccgtcaatcttgttcttatattcttcattgactaaggtataagaatatttcattctttgtgctcgatgaagtcgatgcagtacccatctacaggcattgctggaaggccccaggctggcgctttaacaaatgaaccaggtgaatcgggatcatatgacccgttggttggaaggaaggtatggacgaagtggcctgatgacaaccaatactacgaagctgttataactgactacaaccctgttgaggtatcttatctttcattgctatatattagtgttttagtgccaaatctccgttttctgatatcaaatatttccctttttcaacctttattaaggggcgtcatgct

SEQ ID NO: 69430 - DNA, 182 bp, Arabidopsis thaliana landsberg
  unsure (1)..(182): unsure at all n locations
aagaaaagggaacnnncgccggagagaccngcaggagaagaanncngganncagnnccggggcaagaacacaaaacaaagnacaaggnngancncaanncacncanngaacnaaaagccgaggaagaanacagcaaanacancaaaccnacgagggaagangaggganangcgnnaagggca

SEQ ID NO: 69431 - DNA, 809 bp, Arabidopsis thaliana landsberg
tgatctctgaatcctgaaaatgtcacttactctgcattacagaactatgtgtagcagttttatcttatgtctgaaccaacaagatctagaactatgttgagcagttttatcctgtgtcagaaccactacatccatcattcccgacaacaaactcaatctttctccaaagttttatcttatgtgtgaaccacaatttaccattataagcttttgtgtgacttggatttggtccaagatgttaatctctgaatcctgaaatatgtcacttcctttgcattacagaaatatgtttagcagttttatcttatgtctgaaccaacaaaatctaaaactatgtttagcagttttttcttatgtctgaaccaacaaaatcagtgatttggatttggtcttaacgacaatctttagaagttgatctctgaatcctttcatatgtcatttactcagcattacaagtatatttagctgttttatcttgagtcttaacgacaatctttagaagttgatctttgaatcctgttgtttgttgttgaatgttgatgcaggggtgcgatgaagatcaagggtagtctcagtgctgcgcagaaattcacccctgacatcttccctaaaccttcaaagttgtgaacaccaaaaagagtggtatgcagcaaaccctaaactcaagctcaatttatgttttcaaaggggttggctttttagtacaactagtcagaaataaagttctctttcaaggatctttggattctcttttatctttggaacaaaaatattggtattgggttttaataatatgaatcttctctttg

SEQ ID NO: 69432 - DNA, 713 bp, Arabidopsis thaliana landsberg
  unsure (1)..(713): unsure at all n locations
tttgtatttaataaactaaataaatttagccaagatgaacgttgtgcatgacttattcaggtagntttttctcttttttttttctttcttccgcaatgactttttcagttaggtttagatttttgcttttggatttatgctcatttaggtttagacacaaggtttactaattagatattaattatacaagtaattatttattactattactgaatacctgtgcatcttagacagagatactaataatacttgaaggtccctttaattttaattattttgtcgttactcacaatttagatacagtgcgttacacaagactttgaccaacgcagttcaacttacattatcagattacactgcataatctgtaaactaacaaatgtattaaaattaaacctcaatctagttaaaaacaaagacacattgacaacaaaacataaaaaaataaagacaatttcgtttgccaaccagtgggctaagacaaaactctgtaggctgtatgtctgtatcgcaatatatatcacaaaattggaccgatttgggtgaaactcaaggacactgtattccacctgttctgcgatacatgaagtgaaaccgacataggagaaagttcacatgacacaattagtagtactatttaagttctagatcatattaagtcacgctcgtttcacgagggtgtgtgcatgtatggtacctggcgaactctgtag

SEQ ID NO: 69433 - DNA, 725 bp, Arabidopsis thaliana landsberg
gccgctcgctcgcagttccggggacgctcgcgtgacggcgatgtccaggcctatgtcagcttccttatgaaggagaccgacctcaggctcggggtctgtgactggggttattgcgtctaccgtgtcgaaaccgctgcctgcttcggcgacgagcggggaccgaaccctgtgctgagaaccgaaagcacctgtctgtcctgcgccaactttgccgtcacggccaggcataggccggtctggcaggcgcgccgggatcgcaatgctggcctgctcgatcaccccgggctggaccccatcagccggaaagttgccgaaacgcgcattgctgaatgcgatcgcatcctcggcgatctcgatcacgggaaggatggtcgcgatggtgcgtaaatccagcgagatgccggcgctgacgccgcacgaaaaacgcctgcgcaacacggatcgcaagctgcgggaagctctggagcgcctggttaagggactgcccacacacccggacctgcaaaagcgatcctaccgtctgaccgttgccacgctcgcacgtgaggcgcgtgtcggccgcaacgcgatctacaccaatcatcgttcgatgatcgacgagttgcgtcgcgccagcgatcgcaggatcgtccccgagaagctggcggcctgggaagacaaactcgcccagcagcgcgctctgatccaggtcttgcagatcgaggagcggcgtatggtgacggaaa

SEQ ID NO: 69434 - DNA, 310 bp, Arabidopsis thaliana landsberg
  unsure (1)..(310): unsure at all n locations
caaccaaaggggggagtttttaaagannccccgcccgggagccacncaacccncccgaacgcagcanacaacncnccgnngnaccgcgcncnccaagngngcnngnncccccccncnnccnaaccaaaggaaggannngngaaanaaccncgangagaagaaaaaagagggcgnnaagagacccnacnggccnaacccnagacacncnaaganccnnnnncaaaccngcncccaaaacgaggcaagagaaaganaacangaaaaaaaggcncgaacgngacgaacccnccgncaccccagaangaaaggg

SEQ ID NO: 69435 - DNA, 597 bp, Arabidopsis thaliana landsberg
gttcttggcactcgcggagtggttcaagctaagccccccggaaattgaaagaagctccggttgtcggacccagcttctggctctcttgatcaggccgtcgtattttgggtgctatcacatagccctgggagccactcctatagaccagcagaattagatgaacgagctaaaagtactattccctttatgacctaaaagaagccctacctaccattatatttaataaaatgaaagtcaagcatttttgctctttatttaattttatctgtcgccccattcttcctccttatctcgaactcggaagaaagagtatctaaatagggtctttagaggactatgccaagtaaccccagaaatttttttaggtggatattttccgtggtaattcacttttatttttcatttatgtaaacgggtaagaataatgaaaatataaatggttgctctacccgaactgagtcttattcctcggctttgacttcgaagatactcaagtctactctttagcgagggactactttctttgccgagggaaatgtgcctactttattgtttattggctgagggattggagtagacctaccttcatccataact

SEQ ID NO: 69436 - DNA, 597 bp, Arabidopsis thaliana landsberg
tgtagtgacaggaacatcaactcatgttgttagtcatgctcaaaaatactctgcacatatcaactcagaggataaaaagagaaagaggccaatcattcatgacatcactattgcggaaaacaaaagtatctcaacaaaacaaagaccaatcacatggcaaaaaataaacaacaatggtgctactgattccaacactcaagccaatcaaaccactttgcaaccatcacttgacattcctatatatggtacacacaacaacatatggaatgcacaagccactcaagtcatttcacagccatcacagaaccatcctacatatgatgcacccatcatatggaacacacaagtcgctgcgcaaccatcagccaatattcctatgtatggaacgtccaccataagtcaaccaatggttggaccaatgctctcaccttttggaacagacttgaaccacttggctccatctcatatgacttctggagttcaacatgattcaataccttactactcaggtcctagtgcaccgatcaacatggattcaataacatacaacattgacttatttaactagaactcaaagataggtcttaaacttcatgt

SEQ ID NO: 69437 - DNA, 348 bp, Arabidopsis thaliana landsberg
cccgccgtgtgtaggtcattgtgcatgctggtgagcccgacttcgatttcgatccgctccttggccaccacgggtccggcgcctaggtggcgcacgatcatgcccttgttggccaggtaccctaacgcagaccggaccgtcggtcgggacaggcccaggtgcgcggccagctcggcctcgatctccagccgggctcccgtcgacagcgcgcgggactgaatctctgcctcgaggagctggtcgagctggaagactagtggcaccggactctcacggtcgatggcgatgtcaccgaacgagcgggccgcctacgggcgtgcagcgctcacggtaggctcactgacatgc

SEQ ID NO: 69438 - DNA, 659 bp, Arabidopsis thaliana landsberg
ttctctaaccaactgcaagtttatacatataatttttagttgattgtgaatttggaatttattaattatacacaaaattttggatattaataacagttttgaacctaaatatgcaatcacaaattcacaatgtcgtaataaaccgtggaccgttgtgacttgtttgtcatggaccacagacaaacaatggtccaccaaaattatgatcacattaatttccgatccttatcacaataatttaacagtagatcagtttctaaacccttatcacatcaatcttatcgtttaatgtgcataacccctaccgatctaatgataaacaaacatattattagtatgataaattcatgaatatattacattgcaacttacaagtagacagacagacatatatagtgggtgcatttgtgaagaaagcatccaccgaaaggagacatttccctttaaaagtctttggccctcatttgctttttccacgaaagagacgaggtcgtaatagcgtccattcaaggctatagaaggccatgagccaagtaactcagtttttgtttccagccatagaaatagtaatttagtgcaaaatatggaatttaaatatgagtagtttagtgaaaattgctgaataataacactttttcttccgtatgcaagtttttttt

SEQ ID NO: 69439 - DNA, 154 bp, Arabidopsis thaliana landsberg
  unsure (1)..(154): unsure at all n locations
acaggacaaggccagggcggaaaagaagaccagggcacnacaganaagggagagaccgcccangcacccaaccaanncgaagagnnngangcccacncncaggaccaaaaaagcaaccggannagaagngncccaccacagaaggaaacaccaa

SEQ ID NO: 69440 - DNA, 261 bp, Arabidopsis thaliana landsberg
ggtttaggagttagtatttagggtctagggcttaggggttagattttaggtttgggcattaatggtgtccacctatgagctcatagtattaaaggagacagagccattcccttctaccagcactaatgctgaacacaaaagtttctccctataacaagacccttccatcctcaaaaataaacaacagtggtcccctgcttcctacactccaccctatcaaaccactttgcaaccattcctggccttcccatctaatgccca

SEQ ID NO: 69441 - DNA, 384 bp, Arabidopsis thaliana landsberg
  unsure (1)..(384): unsure at all n locations
nnnnnnnnnnnnnnnnnnnnnnnnnnnnnnnnnnnnnnnnnnnnnnnnnnnnnnnnnnnnnnnnnnnnnnnnnnnnnnnnnnnnnnnnnnnnnnnnnnnnnnnnnnnnnnnnnnnnnnnnnnnnnnnnnnnnnnnnnnnnnnnnnnnnnnnnnnnnnnnnnnnnnnnnnnnnnnnnnnnnnnnnnnnnnnnnnnnnnnnnnnnnnnnnnnnnnnnnnnnnnnnnnnnnnnnnnnnnnnnnnnnnnnnnnnnnnnnnnnnnnnnnnnnnnnnnnnnnnnnnnnnnnnnnnggtctgttcacccttgcctaacgggactgcgtggctatcactcacccaggaggatttagcctggcaaggtggactaagataattaacacgggatt

SEQ ID NO: 69442 - DNA, 264 bp, Arabidopsis thaliana landsberg
  unsure (1)..(264): unsure at all n locations
aaangaaacaaaaaggaatcaacaattcnagagttggaatagcaaccacccacaacggcaggacagacgaggggccaagagaagngagaacccacgacaaacaccganacggaagcgagcgcgagcaagaacgccaacgcgagcagcaaacgaggaccaccaaggacaaccagaaaaaccaaaaanggaacacgaaaacgcaggaacacnncagaaagagcgccaccgcgagcaccaaaaagcaacgaaggcanacccccaacc

SEQ ID NO: 69443 - DNA, 364 bp, Arabidopsis thaliana landsberg
  unsure (1)..(364): unsure at all n locations
acccggaaaaacaggcccgccgaagcgaaagcacagagggagcacccgcacaacggccacaagaggcaacgaagaaggccagagaccaagaaccgaacaaaagcccaaccagaaggccgaaacggcggngcaaacacccgccaggcgcacccgaagagaaccaggagaccgccaggaccagcgccaaaaaccgaaaagaaaggcccaagcacagaaacaggacgggacaaacccaaaacaaccgaggagaaaactgggcatccagacatccacaccgaagagcacggaggagaacacggagaaaggcccactacgaggaccacccgaaaacacggaaaagcaggaaagaggagcccccccaaga

SEQ ID NO: 69444 - DNA, 668 bp, Arabidopsis thaliana landsberg
  unsure (1)..(668): unsure at all n locations
aacaaaattctcttgtcttcttcatcctcctcctcctcctttctctctgcaaaccctaatttcctttctcctaaactctctcatcttcctctttctctctcttttcttcctaaatgataaggtaacttcaaaactacgacaattcaacactctaaaggacacgccaaggtaaaaccgaatttgcttgttctgttgttcatcgtgttatactctctttttttaaaatttgttttatacatgtgatttatgattcttcttctttcaatgctgtgtgattcctattattcatcgatcaccttatgatcgagtaattcagctcttcttgtcaaaaatttctgcttttaaattatgtaatttttgggatgcttatttgatttatgggtttgaaggatcgattcatgttattgcttaaaatatcgttctttattgaaaacggaattggttttttggactcttgtaatctgaaatgattcagctgctgactcctcgtgatgtattttactctgatttgttgttccatagtgttatcatcgagctgatctcatccataattcgaattccgatccattttaatccgatattaagacacaacaacttcgngttcttgtttctcagatntaggtttttagcttgattcacaaatggagacgaatccgtgtgacatgaat

SEQ ID NO: 69445 - DNA, 761 bp, Arabidopsis thaliana landsberg
  unsure (1)..(761): unsure at all n locations
ttattttacgcgcaaagatgaaagattggttatcctgctggctggcggagataaaagtacgcagtccaaagatattgagaaagcgaagacactattatcggatttgtaatgggaaaatatcatgagcactaaaattaaaacaataactattccctacgattctgccgaatttgtagagacggaagaagatatggcggcgtatttggaagcatgtctggaggaaaatgatcccgctttgatcgcgcatgcgttgggggttattgctcgtgccaaaggaatgacgcagctttcgcgagagaccggaatcacccgcgaaggactttatcgtgcgttgtctaaagatgggaatccggagtttgcaacagtgctaaaagtattcaatgcgcttgggttgcgcctgcatgcttcggcgaattaacatctaataaataagtagtgagggaaaggtcttcgtgcccaataccgctaagatttatcttttttcgcaccgaaggtgcagcacgatgttagcccaggccaacggcctgggtgggaattctcccctgttaccaaagccctgaaagggcggcgcgaaacattcggctgcttcttcaagcataactttccgtcgctcatcccgctttcgtgccgccccgttggggctcatctattntataacccaatttcccagggtttcaccctgggctaacatcgtgctgccccgtcggggcgtggggttccaaaagtacttttaccccttcctcgcaatcccttgcgccaca

SEQ ID NO: 69446 - DNA, 753 bp, Arabidopsis thaliana landsberg
ttttgtttattgcccacaaaactgtttaaaattataagtcatttaaatgttcgcgccaatcgtttgtttttacgttgttaacaataaattaataaatgttagtattttattagttctaatttttggtagaagtttatgaattgttttttgtgtgtattattattaacaaactagaaacaaaaagtagctagcttaaacatcttattctatacttctttattattaatattattcttattattattattatatttttcattttatactaattttataaattttatttacttatatcatatttttcgtttttggtaaagtaattgcatttttagttccttttttatgatataaataaatgagtcaagaacatcattttctatatcaaaaagtttttgttttctctgattcttgataacaaacacattccaaacaaaactaagaaaaatttctgaatcttctgcttgattcaatggatgctaatcaacaaaatccacaaaagaaaggtatggatcattgttatccaatattatatgaattcatacacaacacacacacacacacattgtttgctgcaaatgcagatctgattttgtttcttctttatagatatatttatgatcttgtgtctacatacaatattctccattctttttaaagaatgtcctttttcttattattggttttcaaaaagttttagaaattaaagagatgttcttattttgtataatccccctttctttttttggtttttca

SEQ ID NO: 69447 - DNA, 511 bp, Arabidopsis thaliana landsberg
aagtaaagacgttgtttttatataaaattgttcgctgcttattcactgaaacttttcaactaattttttgtgcaggtcgagaacaataggagcacagaagcttatgtctttgaccactcaaacatggcgaggcgtgctttgaagaacacagctctaggtttgtgtcccagagccatcctttaatagaaggagatgctctcagctctagtcactaacttgactttgttttgctttgttaaatactccagcttatcttgcatctctcgaagatccagcatatatggaacttgcactgaacgaatacaagatggccaccaatttgaccgaccaatttgctgctttggcagctctatcccagaaccctggtaaaacccgtgacgacattcttgccgacttctataacaagtggcaggacgattacttggtatggatcttaatatcataagttacattcttctacctccaggattaatatgccgtacttagatttattggcttctgatctcaggtt

SEQ ID NO: 69448 - DNA, 1032 bp, Arabidopsis thaliana landsberg
atcaatcctttttcaggccgccacaaaagaacctacatttattccagtggttgttggtcttttggactcaagtgggaaagacattactctttcctctgttcattatgatggtacagagcagaccatttcaggcagcagcacaatacttcgagtgactaaggttagctaagaattccttctataaaccactaaattatgtgatctttaaaaatgatgtattcttagattacatcattctctgctctgttctcgcatccagtgtttttaactttttaataccttttgtcctgatcttccttatctatcttttcctgactttatgtcttggtaatgtacagaaacaagaagagtttgtgttttctgatataccagaaagacctgttccatccctatttaggggattcagtgccccagttcgtgttgaaactgatctctctaatgatgacttattcttcctcctagcacatgattcagatgaattcaataggtatgtggctttttacaacatattagttcttctctatgctctttccgctttttcaatcattcatttttctgtatcttaggtgggaggccggtcaagttctggcaagaaagctgatgctgaacttagtttctgatttccagcaaaataaaccgttggctctaaacccaaaatttgtgcaaggtctcggcagtgtgctttctgactcaagcttggacaaggtatggttctacattcccttatctccccagtaatcataaatgtaaatgtaggatagggttttgaaatctggtttctttatgtattgtgtaggaatttatagccaaagcaataacactacctggggagggagagataatggacatgatggccgtggcggatcctgatgctgttcatgctgttagaaagtttgtacgaaagcagcttgcatctgaacttaaggaggagcttctaaagatagtatgtcttcttctctctacatagtggatctttcgggaatggggaccaaagtcataccccgccgagtgaagacgttgttttatataaaa

SEQ ID NO: 69449 - DNA, 691 bp, Arabidopsis thaliana landsberg
ttttttgtccaaaacaaaaaaaaaaaaaaaaaacgaggtgtagttttatgatttatctatgccgagttcatcaattatccgattttttttggataaaagagttaatcgaaaaataaataaagatcaatatatgtctaataaagttcgtacgaagagcaaaaacaggagactgtaaatgtgaaaacatttacacgagaactctgttgaaattgacaagaaaaaaacgatggagacgagtgaagtgacggaaaccacaaacgcaccgagacgtaactgataggcccaaatccatattccattatttttttccattatttactctttttggtcgtttcattattattcaattaatcagattataatcgttatttatatttaatggcaattatgtaaagatgacggcatgacgacgtaaagaacgaactataaaatgaggttcgatgtgatattatttgaagggtaattcttacaaatagctaattatcaggtttatatattgaatggttaactacattattgcagatgtatataatatatatttttgttaaaaagtataatgtttttttggtgtatttaaatcgctaaacatgttaatttgcaactttggaataaattctaactaagtacaaatatgagagtgaccaaattttttagattagcaaactaaacagctagataaagaacgcttaaa

SEQ ID NO: 69450 - DNA, 2300 bp, Arabidopsis thaliana landsberg
catcgaatattaaactgttctccatatactaaaactaatacacagtccacagaagtagagttaaactttaactatgaagtacgtaactaatttacaaaatattgattgacataatctttttcgactgctataattgacatgttaaaagtttcttcttcattttttaagtacaactcacatatatatgcatttggtgtaataacaaacgaaatctaagccagtttcaaaactcaattcctatactctatacagtatattgatagcaatatacaaataacaatatctaattatccatgttataacatttttgatatcaaatatatatatagtgcaaattatacgtcacaaagaaaacagtctaccaaacagtagttgagcccaaaatatacaatgaaagctatcactttctattctaccgcaacttcatatacacacgtaaacatcattgtaacttcacaacaaagtcagctaaacacataattcacgaccacaaccaaattatattccaacaaagattacaaacaaaacaacaacaaattacatcaaaacatttggtgggttgtcaatttccatcgtatatatacatatacacacatactcttatatataaatagaagtattttaaaaggaaaggcttggtagaaaatgagagatagaatggagagactagtggtgcttcctttctccatcggatgtatctccgactcaagtgttgccgttttatctcctctctctaagcctcatcatcatcactctcgtcaaggttcattccctctctctttttaaatatcatgtatatatatattgaattgatatctcatgtatcttctattgtgataccttgatgtgttttcaaaagtgattcgtgaacaagaggaggaagataacatgaagaatgtattcaagttccttgcggtttctaaaccggagatttctaccggtattaaccggcttttcaagagcttcaagaccatttctcaactctttggtaatattgtactctaataaatgttgtctaattatcagtatgttacgaaataataccatttatacgtattggcaaaatttaacaattgctagaaccagttttacatgttcttttggttcatatagatcctagtacatgtgtcctcactctttaacatttataagttggtactatcttttcttccaaaaatgttagctgacaaagaagaagagaaggaagaagtcgagacatcaggaatggagataggagttccaacgaacgtaaaacatgtatcgcacatcggttgggaaagcggtctaaccgcggctacaggtcctggtaaaggatgggaagatctcataccgccggagttgcttgcagccgctgcttcaaaaaaagatgttaatcctcatcttcatccaactttataatccactccatctatttaaattttatttgatgttttgtttaagaatctagacatattttgatacataatgatatatatggtgaatctgatctatgatataaactatgttatgcggtaaatataatcgttatgtaaatattttgtatgttaatcataagatatgatattagtaccatacattatcaacattgatatacgttaatccaaattaaattttagaaacagttgaatcatattgtggggtcatcataacgaatctttgatctattaatagaaaattctaaaaattgactcttttagtcaaaataggaaatttcccaatcggttcaacgaaaagttgaaggatgtaacaacgtgtcataatctggtgagagattacagcgaaaacaaaacattcccttaaaaacctgaagaggatccaacaagaacaatctctaatggcggtttttcaaaggtttaacaatttttttccaaatccgaaaaaatctcttaacaaaaaaactccttaatcttcgtcatctttttgtctctttttaaaaaataattaaaccccacttgatgattatcccattaatcatttaaaggtttttttttttctttttgttcaacgaatctctatctctctctagattttggggattttgctctctctccctctctgtctctctttggtgctcgtagctttctgtctcccaattgagagaaggagggagatagaaacgtcgatgggcttaattgtggatgatgataacgatggagaagttttgattccgccgccgaatttttcaatggtagaagatggaatttaccgatctgggtttcctgagctggagaatttcggattcttaacaaccctaaatcttcgatccatcatgtaagattctcttctttcattcttctaat

SEQ ID NO: 69451 - DNA, 585 bp, Arabidopsis thaliana landsberg
tgtggctttatctagctctggttgaacgagaactttataattaagcctactaatcatatccttcttccccccaacacagggtaaaattctggggttccaaagctggcaggctaggatcccgtttcttcctcttcttaaccttctttcccttcacagctctaatgcctcgccagagctctttgacgaactcactttttagcacaagttcttccaggatcaaaggatgccaaaaatcagatcttattaacttcctggtggctgatctcgtaggtcccatcttctccgcttgtttcagctgcaagcggaaacgtgtttatgaggaagatccttgacaatctaagatccttaccggcttcctgattccctgtaaacccaattcatgaagctctcccattagcttcagaactctatcacgactgtaaaccttccctacccagtcccactgagcttgttcaggcgataatccacccggctcccacacatggttagctcgtccaggatcgcaaggtcgttcactcgctacacgagcgctcttcagcgacatactatcgtaaccaagatcaagcagaaattcccatgtccgag

SEQ ID NO: 69452 - DNA, 563 bp, Arabidopsis thaliana landsberg
gatttagttatggacggattggtaggcctcttttagtttgcgtggtccggggtatcaaccttggctaccgtgacgctagaggcagcgatccgtatgtccccctacggcttggcaagaagaaactgaagacaagcgtgaagaagacatccgtgaaccccatatggcaagaggagctaactctgaccgtcacagatcccagccaaccactgaagctggaggtgttcgacaaggacaccttcagcagagacgaccccatgggagacgcggaggtggacgtggcgccactgatggaggcggtgagcatgaacccgcgggaggagagtctgaggaacggcgccatcatcaggtccgagcggccgagcgccaggaactgcctcgccgacgagagccacgtgtgctggaggaacggcaagttcgcgcaggacatgatcctccggctcaagaacgtcgagagcggggagatacagctgcagctgcagtgggtgaacttccctcctggtcctgctcctgctggtgcaacaaccaggtgacctgatgatccatggtagctgctgttcctgtcg

SEQ ID NO: 69453 - DNA, 271 bp, Arabidopsis thaliana landsberg
ggcgagaccgagccaacagacaaaaagccgaaacgcagccgcccaggggcgagacggcccgagcggcgcaaaccgaagagcccgcacatggctgaagactcaaatccagccgcggacggagaggcgccgggcgccgactagaccgagcgcaaaacatccaagggcttaccgaaccagggcggcagccaggagcgccgtgaggacgcgcagcagaaggccggcacggataactcgttcgatcacgagcccggcgaaacacaggggccggacg

SEQ ID NO: 69454 - DNA, 185 bp, Arabidopsis thaliana landsberg
  unsure (1)..(185): unsure at all n locations
agaagaaccaaggcacgttttcttgggaggagatntttggtcctgtagctccccttattcggttcaaaaccgaggaggacgctttcagaattgctaatgacacaattgcaggtttgtccttatttaatcttggtaacctttttcttttacatggggagtcttaggctaacataataagtggaaat

SEQ ID NO: 69455 - DNA, 330 bp, Arabidopsis thaliana landsberg
  unsure (1)..(330): unsure at all n locations
aagcataattgtcgccgnngagactaggggtccgcgtgtcgttggtgctaagtacggtggagttaagtcgtgggaacctaatgcttgatctgcggttttcaaaatttccggttatcgagccgtatatgaagtaaacaaaaatttggttttaaaacgaaccgctcgaaaatgctacaatttgaaaacgttgtttctttttggaagtcaacgatcggtatagtaatatgggggggtaaaaatacatctttattattacgggtttaaacattgcaaggaaacttgtgtgtattaatttaaattattactcggtagaattataaacttttttag

SEQ ID NO: 69456 - DNA, 1368 bp, Arabidopsis thaliana landsberg
attttttttggagtagacatcaccgtaaactctaataaacactgagcccttgaacattgatattggagtgcaacactcggaggttgaagatgggattcggagaccatcacttcaagagttatcctagggttaagctcgaactcgaatcccatcgccacagtggacgggagtgatatgcgccagaaatacagtgatctcagctcagtgagcgacacaaatctcgggtgaatctgatggcgggttgaaacaacgtatctatcagcctctctgcaaagaggaaacatattcagaattcaccacacaatgcttattgttctataagaggtggaggaatcaacgttttaaaactactaaccgtctaatctgcacagaggcgttccctgcaatgagagtgagcccaacatgccacttatcgagcttgtgtccgttaatgtcaacaatactcatggaagtgagttccaaaccagagagtttaccgaggtgtctaacagtaccagtgaactgagccataggacgggatgatttggatatcaacttagcacctatttccccatacttaagcttatacaagatcccaatctaacaccaataacgagtaaaagagtaagcaagcaagcaaaatcgtgaaaattttcgtcaatgttacttataacacgcacgcacgcacctctttattgaaacaagtggatttgatagagttgaagtcatattcctgaagacgctctgatgtcagctctagttccagaccctgaatgtttttagctttgatattactgacctcatttctttcaaagtagccatactctgcaaaatacaaaatcgaatccagattttaacaatcaatcaaatctctttgtttcgagacaagacaaattccaaaggaaacataaaggtgacaactttcgagacttgccttcacagatcttcacaatcttatcgcctacagaggataagaatgaaaacatcgccgatgatcgaaattttgcgagtttagggtttcgagcgaagaagaagaagaagaccaacgtaacaaacaaattgctactaattttgcgattctctagacccgtcgttatgtgttgcaatatgggcctatctgtaaaagacggactaaggcccatttgttgttgtaactcaaaaggttttaaaattcgaaaaagagttacaaataaataattacgataatgtcatattgcgtatatatgttgtccgaaggaaagtgacaacaacatcatggaataggaatcggagaagatagatgaagagatcggagaacattatcggaatcggagatatttagcggcggaagtgagaatgcactgtaagtcgaacttcctcttctcatctctttcatagtcaataaggccg

SEQ ID NO: 69457 - DNA, 807 bp, Arabidopsis thaliana landsberg
atcgatgagacaggtggaccgcatagtggaagcgattgacacacattcggttccgggagcgcgcaaagaggataatattattggagttttcaagaaagacctgccataccagtctccaactgaccttggcagtcggacacatgtccgttacagaaagctccttatgacaccgctattaagaggaattatacctgtcgtagcgtgcatagggtacacggatatttctcagcaatcagttccagtcaatgcggatgacgtcgttttggccctcactcgcgagttcgcaggccttgggtttactgagcctccagcgctagatgaagacccaaatgagaccgcagagaggctgaaatctttacgaaggcaggtacttctagatcgcctcatcatcctagacccattgggtggaatccccagctcacagcggccaaatggctaccatgtattcctcaacctagagcaagaatactctgtagtgaaaaacgatcttctgattgctcgcgacttgacgagcaccgagcaactcgaggatacgccgaaatcctcccatatcacagacttaggaaagagtaatcctctgtcccagtttgtcgaaaccgagttcggcgcaccgatcccatcacccgaggccatagccgtttccgacctttctcatgcccaatcaacaaccagcgcaatccacctccggaacctcgaacttgtccgcaaaagtctctgccttctgccggccacctcgttcgtcctcctcacaactccaaccgaaactgcgaattcaagaaaccgaacgcccttcccaaccctaaaaca

SEQ ID NO: 69458 - DNA, 340 bp, Arabidopsis thaliana landsberg
cacgtgggtggagcatgcagaatacgacgagaaccaaatccaccagctgtacaggccgtttctacggtcaggccttggttttggctctcaaagatggctcgctacacttcagagacagtgcgagtgtctcgccatcctcatgtcttcctccgttacatctcacgacaacacatgtccgtttcttacacacttgtcattatgcttaacataattaatcttgtcattatgttacaaaacttttgaccattttacatgcaaaagcagcaataacgcctggtggtcgaaaaagcatgctgaagttagctcaacgcatgacgttcaacttctgttcgggaatctc

SEQ ID NO: 69459 - DNA, 337 bp, Arabidopsis thaliana landsberg
  unsure (1)..(337): unsure at all n locations
agacaancaaatcaganacaacagtttgatggcancaacgccccancaacccaagcagcgggaaagctacgggccagccggccgcagcaacaacaggaaatactgtcgcttctacagcaccaagcccacaagggggaggacaccatggagatgcaaagcaagcagctgcagggagaagcggacctggcatcgatccaagctctctcttgcccaacgaagacactgtagaactccgtggacccaattggataaggaacataaaccgtaaacgtttcgcagcagacatgagaaggtttgctggagatcaagcccggttgcagccagcaaccccacccaa

SEQ ID NO: 69460 - DNA, 188 bp, Arabidopsis thaliana landsberg
cctcatattcttagaagtacttttaataaacaattagaaatataatatttttgaaaagcggtattcgaaaagatgtttttgaaattcttcctttatttagcttccaattgtaaacatttgaactaaactattcgatctctcaccataaaagcttatctggattgtcacctcgccacctatgctcccca

SEQ ID NO: 69461 - DNA, 157 bp, Arabidopsis thaliana landsberg
tttccttctggactgttaattactttgactctcattctgtaagcatggagtaaaatatctcatctttgtttttctgataacaggctacatcttaccttggtcattactgcgacggtctgctgtcggatgatgcacgccccccccctcccccccccct

SEQ ID NO: 69462 - DNA, 692 bp, Arabidopsis thaliana landsberg
cagaaatggctaaaactatcaccgaaattgaattgaaaactaattgtttcataaagtaggattgcacataaaaggaaaagaaaaaacattcgaatgcattagtcattcctgaaaacaagatgaaagcgaagacaaaagagaaagaaacaaaatgaaaatattagtctaatggttggacaaaaagaagaaattaaaaaaacaaacaagaagatggacaaataattgacgacactctacatagctcactttattgtcaccttttaggtgagaaaaatcaaagtttaatcttctagataaaaaaactgtgtccggcacacattgttatcaagacttttttgtctcacctaaaagatgacaaatctgatgttttgggttcaaactcttaccaagtttttttttgcttgaacccttcatcattttattcttatgagctatccatcgctcatgtatcgttgtcaccctcttctcgatggttgtcaagactggtttccctattaccggttagctagagctcattttctaacatagcttcttccatggcaagaaagattggaacggaaataattttctgtttgtgataagaaaaaaaaaaaaacagtcacatggtaacgttttacaaaattctgtcagttttttgtgataaatttcaactcgtctcttttattggataggcatgtgtagatacatatctt

SEQ ID NO: 69463 - DNA, 131 bp, Arabidopsis thaliana landsberg
gaaatgataagtacgtccgtgattactacctcgggatatcaccgacccacatttcgtttgcctttttcgtatatgtattattgccatagtctttgccgagttaaacatatcctatttgaattgcaccacga

SEQ ID NO: 69464 - DNA, 736 bp, Arabidopsis thaliana landsberg
caataaaaacgcaatgaaaaagggtgaacacagaatttaatactacaaaatttcaacgaaggagagccacatattctctgatgagccccttcgcacgaagtagccaactagtaagcgacaaaaaaaaaataaaaatacatttaaaaataagtgatcttggagaaaaacaaatcaagacaaggatttgtgtttatttaaataagataaataaatcattggcacctttgaacctaactgctgcgaactggcgtcagcaaatgtccacatcaaaacgttggaaactccatattgaattggaagatttaattatcatttatattataaggtaaggctatatggttaaaagataaaaagtataaatgataacaatttgggagaaatggattagatccaaaatgctttaatcatcccactatttctagggtttaatccttactgtctctttgtagggtttaatgcatggacttatgcccagacatgttaaaagaaaatacttaaacctctacagggctagctactagataattctattaatattatagatgaaattagtagattacataaccaagctggattggtatataaattgtggtccatgttaacaccttgaattttcgaacccacctcctttcgaaataagagttttagtgggcagtggcatccaaagaatgatctaacaattaaaaatactttaaaaatatatatgctccattatattattccctttgcgaggcaa

SEQ ID NO: 69465 - DNA, 229 bp, Arabidopsis thaliana landsberg
gagttgtgccaccagcatgagaggtgactgagaggccatgcgtctagtttgtgaaatcaacaaaagcttttgtgactgtaatccaatgatgatcagtagcgccacagaaagcggtagagaacgacgacaacggccacagttggggaaagaaaacaagccccgagatcatgtggacaccatgtggtagtacgaaacaattcatggccgaagttaaataggatgtggttat

SEQ ID NO: 69466 - DNA, 453 bp, Arabidopsis thaliana landsberg
  unsure (1)..(453): unsure at all n locations
aagataactccatttcaacgcataattatctctttaataaatattgtctgaatttgatttttttatataaaaacttcatttgccagcatgattggctctaaactcgagctgaggacatctgtaggagttgtgtcgtggtcgtctttggttaagagaagaagaaatgggttcaatgttcagtggaaaccgaatgagcaaggaagagatggaggtggtggtgaacaaggctaaagagatcgtctctgcttatcccgttgttgtcttcaggtttgttctcgttgaaatctcccatctgggttttactctttttttcgtgattatgatgaatttgttgaaaacttctagttgaggggttttgaattagtaaaaaagtttgagtctttaccttttgngcgttgagtctgcttttgtttcacgcaggggcaccattggatcattgtgtgcttgttctgt

SEQ ID NO: 69467 - DNA, 673 bp, Arabidopsis thaliana landsberg
catatccaaggatactggtccatggtttttttaaaaaaaatatttctttccaatgaaagaaaaacagaggcattgatattttgatatagctggcacatttaaaattctagacatattaaactcttaacgctggaagttgaggcaatatataagaggggtagtaattttatatacaacattttattgtcataactatataagaggagtgtgtatttttacatataaatgttataattaattatgtcgtagaatgtatgattgaggaatttgatggacctaagtacctaacactcatttattcacaatcttatcatttaattttgtttgattctaatatcaggtttgatattctatacatggccaaggaatttgtgattcacaagtttaccatcttttcaaaatcatgtaataatttatgctacgaactaaatgatatatttaaatagactttagttatgttaattatataatatgataaatatagctaattcttattgatactaattatattgttcaggttctatcattaatttacgtggtgaaactgcaatttgatttgcggaaatgatcttatatcattagaaggaacaactaggacactgctcttttacatatgtgcgaagtttaccaataagatattgactaactacgagacgaacattagtattttgct

SEQ ID NO: 69468 - DNA, 596 bp, Arabidopsis thaliana landsberg
catcggggatagcaggaaagccatttaggtgaaaataaggacagcagcagaaaaggaataaacaggcccatgttggagggtcagggaacaatagctcaagacggttcggaggggcgtgaacgcaggcggcaacaagcgttacatggccctcaaagtcaagaaaatccaggtagcgcagtgcgtacacagtaagtttcaagtgcctcaaggaggttgggggtggagagagcaaagagcccagggtatgaacttaaggtggagcaaagtggcaagtaaatttgggcgatggatggtaatagagaaactatgcattgttgtcacacaagaagggggcgtttaaggtaacatgaagtaacggtcaatgaaggcaagatggcgcgtacaaaggttgcacggccagggcttagggttagaaaccagagacggcaaaatgtcaacggcaagaggagttggggtttcaacacagtggccccaacacgcggcttaagggagatgcgttctgaggtgagacggcctgatgccttcaattgagtaaaagatgggggtggcgcgccacgaagttcggccatagaaagttaagggggaaagggggccca

SEQ ID NO: 69469 - DNA, 198 bp, Arabidopsis thaliana landsberg
gcaaccaggagacggagcgagggcggaagccgagcttttgaaccgaagcgcaaaacagacaaataggcaagggagaactcagggaaagcatcgacgaagaacgcaacgaaaggcgatacgcggagagaacggcagaatcccgcgaaccagcaagcacgcgaacgcaaggggaagaccaagccaccaggccgagggcac

SEQ ID NO: 69470 - DNA, 229 bp, Arabidopsis thaliana landsberg
gcgtcatatgccaagttaggcctcttggtctaaaagtttttgcgccataaaggcttaaccaccgaaaaaaaggttgaacataaaagacggcagagcaccttggactgcccggggggtgacacaaacgactggtaaaatggatcagacggtctaaccatggggggagccattggtctcaatacgcgagggcagccggcatcaattacttttaacatacgcatggaggggc

SEQ ID NO: 69471 - DNA, 437 bp, Arabidopsis thaliana landsberg
acaaactatttgtttatcattatagtccttaaattattatatattcaaagcatttcacatatatcttataattttaattgttacatataaaatttaatatatagacctttcaaataaattcaaaatattaatatttaaaatataacatagaattaaaaacaaatattacaaacaaactattatattaaaaatttaatacaaattcaagcaacacaatgataataaaattacatgaaaataaaattatatgaacacaaaaataatacacagatgaaaatattacaacaatactaatattcagggtaaatgatggattgttcaattttatttatatgtaatttatttataaacgtattgctttgttaattaagaaaatgtggaaaaatttaatggatggtttagaggtagttataaaaggtatgattggtttaaaatta

SEQ ID NO: 69472 - DNA, 446 bp, Arabidopsis thaliana landsberg
  unsure (1)..(446): unsure at all n locations
atggatgggggacaaatgcggcctcaacataaacacagagccgaataacaaacgcgggacaagccgtggacacagctaaagagcgcgtgtggtgcgtgttgtccggcgggcgtgacggccgggcgggctcacgccgcacgagaaccacgtggaaacgtcagagtcacnaccgggaacaaaccgacaaatcgaggatcggtgcacgggccgtcccggcctgggcgtcgcctacagggcccgtccgtccgtggagaccggccacgtgggagcgggtcacgcgggggacgaagaggcggtagagacacgtggtattatggagcgtgtggaggcagcacagccataggcgaggggagtcagcacgaggggacggccgttgacaaggccgcgtgggcagaccgagtacgaggcgctgggaccaagtggagtggtgatatgtggtataaaac

SEQ ID NO: 69473 - DNA, 450 bp, Arabidopsis thaliana landsberg
gcaaagctttcgatcggtccggcttaagaacctgataaatcgatattaatgacacgacacttaggttcttttccagtaagattgaatgctattgaaaatggagagcctaccgttataattgatgatattattcttgctcgttcgcaacacaactttatctcaacgcatagccaaagccctgttgttttcttcaagccaatttaggcttacggttgatccgtgtacgatcactttcacataatcataactggtagcgccttggttatccttcacggcaagcttcagtacgtatgtaccggggtgcatatttgttaaggtaacttttgatgttgtcgaatttttcattgacagaatcgatgggccggagtactttgaccatcgccatgaaacaatggttccgtctgagtcgctgcctgttgcagacaacgtaagtgattcatatggaagcgt

SEQ ID NO: 69474 - DNA, 380 bp, Arabidopsis thaliana landsberg
cctaccttcggatgattcccgattttaaaattaagacggaactgtaattttattaccggccggtttaaataaaaccgaaatttcttgtcttgtccgggaggactgtttctctcttgacttaaaagacttgggatcaaacaaactcgagagatcattttggaatgtcaataatctgcgaaagtggtcgctcggaaatatgtcgcgcgccatgaatactcaagcttcgatgtacactacagcactgaagatggtgttgcggtttacctatgtctctatctctctcaagttctatctatctctctctctcaatgtataattgccgcgtgcgaaacgattacgtgatgctccggcattgaatctatgtttctatataggcacca

SEQ ID NO: 69475 - DNA, 532 bp, Arabidopsis thaliana landsberg
  unsure (1)..(532): unsure at all n locations
gatcctgctcctgtaacacatagtcaggaatcggttgagtttttcggttgcgggggattgaatccaggacgataaagaataatttgaccaggctcactagtgatcttattaggatcaacagaaccaatctcagcagcaagttgcggcttagccatgcggttcttcgactcaataatctgtccgcgagtacggttgtactcacgttgcagaggaattaagtcgacgatcgtggaatctccgtagaactttccagtctcgatgtgacggatatgcgcgaagggatactgtgcgtgactgtattgaccagggaaccagtgaaggatcttattatccgctacagtaacaacaccaccctcaggaagatagtctaatgctccaggcttaaagtggaactcaagaacaagagttttgtcgtccttctttgccttgccggagtttagatccatcacagcgcaagtgacgcttncgtatattcgtcctcgctactggacgagttaatctgaagatcatagaacttacgtaacatttgggt

SEQ ID NO: 69476 - DNA, 659 bp, Arabidopsis thaliana landsberg
  unsure (1)..(659): unsure at all n locations
aaagcatgcgagctgatggtatccttagctgtattcctatgaaatggaagggatgcaaataaagtcctattttcaattccgagatactcagatcttaaagggtttctcaaacgggaaatcttaacagaagaatgtcaatataaacaggatagtactgttccgaatcctcgatctagtaggtattcctactgtaacactatacagtaaagctcctttttaagatcacaacccagcacagaggagtttgttgcgtgggattaaacgcataattcgtgcatccgagaatgggatgtcaaaccctactttcctcaaatacgaggaatggataagccaggctagtatgttctgctaactacggaaggaataagaaggtaaggactcaaccttagctgtgatcttttatagcacacccctgatacacgctggtgtgcttgtgctgcagtttagaatgctgattcctgggtgggtagttcctactcttgcttcccttggttttagcaggtatttgtttctagcttcggtagttaaccaactattcccttttcagcacactctttggcgtgcgataatagtacacttttaggaatcccacaccaagtgaacagagttatncgctgatactttccttgatcctagggttgaagcagaagttggttgac

SEQ ID NO: 69477 - DNA, 730 bp, Arabidopsis thaliana landsberg
ccttgaaagcaaccctagagtgcgagaagaatacaaagatgtcgctggcagagttgtacgaactatcgagcgttactatgaaacctggaaaacagactctttttaacatatatacactgtttttgttcccttcctagatttcaagctcatatgtcatgttattaagttgtgttgttgatttcaaatgttcattacaaaatgattggttttagatatcgaaacattcttgatacattatgaaagaggatttatctatggctagtagtgtatctttctcagttcatattattgacttgtattcctctcctttttgtcttctcttcaattttggaaaaatgtttgttgtctttcaaagatatttgtttatctgtattatttgaagacgtgtttgaagatggtgtcgacggggaagacttttttttttttgcatagtttgggaagacttgataatgtctgagataagtttaatagatttctttgtggtccgaattatgtaatgttatcttgttacatttattgtctgactgtgtaaactttatgtagtacacatggacaagaaaagagacgtgattgctttcggggctgtggattaatcttctaatttcgacttaaaaccttatatcaaccggtagtattttgatggcagtgtgcatgatttactatttaccagtcctactttagccaataataataagaacttgagttttaatatatgtaagtaaaagtattc

SEQ ID NO: 69478 - DNA, 559 bp, Arabidopsis thaliana landsberg
aaagacaagcaaagcatgataaacttgaacaacaactggacttggacatcaggagcagtggaagataatgacaaaaatacccttcacttgttactatcgaaagaaagacataatgatgtatgtctccgaaacgaaacacaacgacaaagagaggttttatgcaatttgtgaaagaatgtggattgtagactttgaagggacgtgtttaatcgttgaacaaccaaagatttttcttcctttttttgtgtggactatgtacttatctaaagatagctttaatttccttttattgaatgaattattgcatgaatgacggttccatagttcatagactgtgattgatgttcccaattcattgtaaacatgattgggaagaacatttgtgaaacttctaaatatctgttcttcttttagcatgtaataatactactagtttgtattactattagtgtttctgtttcatcatcaataatattaaatttcattttcctttagtccatttggtcaaaatatatcctggcatgtgcactcataaatggtcaaacttattagagaaaac

SEQ ID NO: 69479 - DNA, 2177 bp, Arabidopsis thaliana landsberg
  unsure (1)..(2177): unsure at all n locations
ctaagcggctcgaaacaggaagtcacctatgacatttcttccttgttgttatcattcaatttgactcttgagacctgcttactattttcattatgggagcaggagactggagctaaagcacaaatattcggtcctaaaacaggaggagagactgctcattctggagttctgtcattattgttctgcttgctcattatggtccctagaacgtatcagtatgggtacagcgagggtttatgagtcgaaagctgcttcgtgcaggttgaaccctctgcttcggatgaaaatgagattcagaagtcatggcaagagttatattttcagatatcatctgacacttacgaaaaagtggatgcagctattgctgtagttgagctacttatgtcttcagtatctgtgagttcctaaatcttctctaagagagttataagtatgatatgcatctagtattaaaagtctcaaattttcgaatgattctcagattatgtcatttttccttgtagggaaatacagattctggtgctgctgctccatcttccatatctgaagatatttcaactataccaggcaacagcatcgcaactgctacagccccgagctttgaacagacaactgaccatagccaagtcctacagcatggttcctcctttcctttggctacaaatcaagctcctcttcatccacctcttgaacactttgtttcaggtcttggttatagtatccaggagcaagaactgcctacaaattctatgaacctcaatcctctttttgctcagcaaccacttccagttcctcatgacacatcattacctcctggttctcacgtccctcgaccaccggattcgttctcttttagcctttccaatacaccaagggcctattctgtgactgtgcctccatattctggcagtcagatacaaccaataggaccacgttctactatgaggccgtcgaccctatttactttccatcctgtacatagaccaacactgttaccggacatagaccaatcagtacggcctttggctcctaacttcagtccacgtcttgtagctcatcagccagctactgaaataccatcaattccttttccctcggctagcagtctaatagcagaatatggttctggtagttctctgcgtcccatgtcagtgtcaccacatattgctagtaggcctgctggtcttgttccgacttatcctccaataaatacagcttctaggccgtttcacggggatttcggtttccaaccacaacaaccaaacgttgttaccacaccacagatatcccctagacccaactcacaatcagctcatctccctcatctgccatttcaaacctctcaacattttgggcaaaatttcacaagatcgcagcacttcgacaggcagatggatcaacccttgagccacccatctgtaccatttcatggtaacgcgagatcgaacgttggacctccattgtctcagatgatgcctagaaacttccctggagctcaattccaacagcattctgctcatttccctccaagaccagtgtttcatcatgataacctgataccacgtggccagacacaaattcgccaccgattcaactctggtgtccatcaagtatatgaccctttttcacctagtgatggttaattcagtagtgtggtttcaatagccacattctgcaatagggactgctgaactttaatagggagggactgtccgtttttgctagaagtgatcggtttgtcatttaccatgtataaatgcaattgcaattagctcgactcccttttgttattgcctgagaaaattcaaaattctattcggtattttttttctgttacatcgaagattgcctgaagaaatcattgactatcttatccaatccgtaatacaaatccttgtgtgtataaatttgagattttacttatttgcagcaaactcttatctgcaactccaaacctaagaacgatctttagtaacatgcttaacaaaaaaggaacactttcatagagtctaaacatttgaacgtctgcataataaagacatcgtagaagtatgtacagattctagattttgacacattgtaaaacactttctctatatgccagagtgttcaaatgttggggccagacaaaagnatcctctccagcttctcaaccttaaggtaatcattctccgtaa

SEQ ID NO: 69480 - DNA, 127 bp, Arabidopsis thaliana landsberg
ttttcagatcataatatgcctggatattgcattcgcctagccagtattctccaatctactagataaatttggaatcttccatgttttattttccttttcctcaatttttttctttggcggcctttta

SEQ ID NO: 69481 - DNA, 811 bp, Arabidopsis thaliana landsberg
ttggtcgttcccatctatacaaagaaaacttaagtttaactcgaccaaaattgattgatttagcaagtatacgatgctttattatattgaaactatcaagtttctcaacatcaaagtaatcctaaatgtaaacattagattttactcattcatagttaaattcactaacaaagcaaaaaatcaaaaagaaaaaccgaacaagtagacacaaataaaaacttaaatccaagcatcgaaaatcctaaattggcgattgagagagacatagatatatataatgaaagagatgagaatttgtgaaacaataatggcaaaatcacaagcacttgtggtggtgacaatcgcaaactccgtcgcagttgagaaaacccaaagaaagtcccaaattacaaaatcttaatctttgttgctttaagacttcaacgtttcgactagcacaaaaaagaaggacgtcacattttaagacaagtgaaccaaagagaaagatgattttgtatttgggttatatgtttatgggctttattataggtaaagtaacttatgtttgctaaatattattggactttatattttatgttttgtaaaattaaagcaatacaagtataaaaacatcgtaatgtttttgtgagtaatagagatatttatggatccaaatatcccttattgatttttctaattatccggatctgtatccaaaagcccctgatatctgtttttccggatcgaatttcggatacggatacagagatccgaggataatggataattatctcaagcctacacattggactatgtatgattcaacaatacc

SEQ ID NO: 69482 - DNA, 359 bp, Arabidopsis thaliana landsberg
  unsure (1)..(359): unsure at all n locations
ctgtaatcgattgctaggggcccattcttaatccatgaatacatgtataatacacaagttatgtgtttaccgaaaacatagtagttnnnnnnnnnnnnnnnnnnnnnnnnnnnnnnnnnnnnnnnnnnnnnnnnnnnnnnnnnnnactctatatcactgaactccataaagatgataacatacggagatacagagaagataacagagtcagtaaaggatctacgatatcttttcactgttcatatcatcagctggctggatcagctttacctatacgacctactacaccactatcattacaatctccgcaacagaatgaaacccgttgttcttctacgttatctacaccaaccattact

SEQ ID NO: 69483 - DNA, 2295 bp, Arabidopsis thaliana landsberg
aaagtacggtttgcttcattgaaaagtaattgcatactgcttgagggagcatggacaaaaacacaagcagcaccatcaaaataaggtttccagctagcaagtagctcttgaatatcctaacaatagagagaaaaatgacaaaaattacacttcaaggctatgaattatctttcctagaggtaaaaaaatatataaacattttttctttatgttttccttcctatgatcctgatcccggttgataatcatcgaggaggcggccaatgtttccacccgtttaagagacctaaatcatgtttacaaaactatacaccacacttccgagttcagaattgcctttacaaatggacagagccgcatatattattataaaaaatcaacgaccttttgtaatctcagctgaaaagagaaggaaacagtagcaaaacatgtccagagacaaaccttttttaaagcaagttcattgtaacgacgaagtgaggctccggcagagtgtatacttctcccgcttgcatcttttgtggactgctttttaccagccttggctcttacaacatatctacacatagggaaagggaattagaggacaaaaagaggcaaaggactgtgaataaagttttatgaactgagaggaaatgagaagagaagtacctgtggaatgtcttatgagccacaaccgactttccattaaagacagtaccggcaaagtggccaccacttgcaagcaacacgacacgcatttgcctatcatccttattctctcgaatcaaatttctcaacctctcagtaacttcattctcgaccaagctaccacaacagtcaacagaaactcctctgtcattctcgaacgaaacactttcagcgtcgtccatgattaagcatttccagatagaaactttgtcaccactttgaagacggaaaaatagtttctttttatcaatacccttttgagcatcaaagtggaaagagggtggtctagtctcagcttcgtcctctgaacctgatatgctagacacgtcatagtcttggaccgactcagatgtcaactcatcaacatcttcctcttttaatatagccttgccagcaacactcagcttgatctacaaatcacagcaaccacattaaggcattggaaaacgaaattgtgacactttttttttccatataattgctcgaataatttagtcggaagagagaaatttgtacgttaaggcgatgaatatcggacttgaagtggtagcgttgatcttgaagagacaggaactcaattttacaagtattacaggtccatctgtccaaaatcacgccgtccttggaactcttatcctcctccgcctcctctggatcgaaagttttgggtggtccgaatgccgattgagtctccgaaggattcgacaaccgacacgagtcaaagaaatccgccgtcaagtcaaatatcgatcgaggctgtttatattctggattaccaatctcggtggtggccgccgcgccggtggtcgccattaattatgaattggacggattgattttcctaacaccggtaccgataccgataagtgtggatttgaaagctttgtgagataaacgattccgttttgttattttcttaaatggatccataatgtcattaaagtggcccatataaggcccaataatacaaggcggcgatgcagaaagatctcgaacgaacaaaagcgccaaaagcatcctagacgcgactgagaaaataaatatagaagaaagcctctctgctcgttttgcgtttccgagcaacaatggtgagtcgtttgtccattgttcgttcgtttgtcctttgttcgttctagtcagttttttttttaatatagttctggcgatatttgtatttatatgttcgagtttcctggttttgattattgcagtcggtaactttgcacacgaacctgggtgacatcaagtgcgaaatcttctgtgacgaggttcccaagagtgctgaggttagttattcactcagctcatgtttctcggtttcgatttgagctgttttctttgaattgtttacaaaatcagtccagttgaggcaaataacaaaacaatattcactaggttatctagtgtccaattagctattacctggtgctgggttcttgtattgtatggatgatttttcttctccttctctggattgtttttaatctttaggcgaaattagggttatatgaatgtcatgattggggaaattatttttccctcaacagtgttggtgtataggttcattatttttcaatgcgtattcattggatcactgagctattt

SEQ ID NO: 69484 - DNA, 663 bp, Arabidopsis thaliana landsberg
gatgtcatctactaatatatatctttttcaccttttgttaaattggctttcactatatatacacaagatgcaggatataacgtcaagacaaagagatgcttatcatttctagtagctatagttagattccttgtcattatggcatcttgaaatgtaggtagaattgtcatacaatctagtataatggtttatatatatatatatatatcttatataataaagtaaggtttcttcaaaacaagctttgagaagttgccatttggcattctattctttcgatatttgtcattttttaaattttagtccaatctatatatataaaatcaacaacttaacgagtgcctatattacaaaaaattggtagactaatccaaggtaggcggagaaagtttcagaataagacagagaacaattgtccaagggatattttggatgtctatctacttcaaaagaccatggcattcattaaatgtaactggaatgtatttattgaatgaggtttttttttgctgttcaccgtattgaatgaagttcatttatatgacaagtacacacacaaatattctagccaatatttattttaagacggattgatatgaaccaattttagcataagttaatacaactatgcacatacgactcttctctagatattagtatatg

SEQ ID NO: 69485 - DNA, 596 bp, Arabidopsis thaliana landsberg
tctaatgtaaaaataaagagtagcctgatccaatttcattttttctttattttttggttttgtggaaggaccttaccacctaagaacctgacgaggaacgtctgttgtggccgacccatttaaacctatttaattttaaggtttattagggctacccatttaaactcatacacccatttacacaatctacctcacaacttacacatctctttctctcccacaatctacctcacaacttacacatctctccctctcccctagctcttgcaaatcctgaacctgaagaatggtaaacgttttgtcacttcctcttctacttgtacgtagactacttacacatctaaattgatcatttaaatcctcttatgtctctcttcttcgtttctacgtacgtagaccacttctttaatggctttattccaaattacccaaatagcagatagaatcgaaaacccacattgcataactagctataagcctataactaagcaaatcaagtgacgtttaaacaacatatcttcataaactaagcaaatccttaattcaaattcacaactgaaccaatccattaccaaattgaaaacaatagagaggag

SEQ ID NO: 69486 - DNA, 430 bp, Arabidopsis thaliana landsberg
cctttgcggatgtggttccgtatatgactcttcctccattcggtgtaatctggttcttgccatgattctccaccgtaatagttctcctcctcgtaccaactctcaattggctcggagaagctttgcattgtggtacagcgtactggtggctcagggtggaagtcgccagcccctggttaatcatcaaaatctgattcggaacaatcctcttcctaccacaatggtgctccatggtcggtctcattgacgtataagtctcgttcatactcttcactttggttctggtaagaatcatataaggaaatttcttctttctccaacaaatatgataccatggttcagtttctccttaagagatcttttaccaatgatgcaaacctcgcaaaagagagtaaaacaaaaaaacaatgaatcaaaacttaattaactg

SEQ ID NO: 69487 - DNA, 895 bp, Arabidopsis thaliana landsberg
accacaaacgctgggctgagggatttgtgagtctccccataagggtaagcgagttctcttggatcagctccgagttgtctagggtgggtgctcttattcgcttcttaggtggaggtgagaagcttctttctgacctcctatcattttcataaactgacatagctctttccccagagtcccttgagcggttttgactggcataatttgagtaagatttttgactgtgagctatgccttttccttttgcagagtaagggattctttggtccatacttaggtcctgggaactcagcaagatcacacgtaattcaatggttattctagcgaaggcgtatagggcagagtcttgtcgatacaatttgaaaaggttcttcacactaggtgagagagtttgtcatcatggttgttgagaaactgaacatgacataagtttgaaaaggttcttcacatatagtgaaaaagttcaagagataggaccacaaggttagacataaatgcaagagtaaatgctcaagactttttgtacctcaaacaatcaagggatctgatagttgagctcttaaagcactatgaagccaaggggagagaggagggtttggaggagaagttggtgaaagctcgaagtcctctgttgtcccacaccttgtgacatgacttctaaggggccgtcaacaccattggtcggtaagggcagtcatcgccggggatttggccggagggagatgccgtctatttgagaaatggtgggaaactttctgtttttggtaatagaaagtagctgagatctggttttttaaaaaaccttagctttttttaggacatagggaagagtgcctgggaaagaaaaaaaacatacgtccgtacaccttaagaggggcttcttacacgttgttat

SEQ ID NO: 69488 - DNA, 522 bp, Arabidopsis thaliana landsberg
tatttctacatgttaaactagtctgtgcccgaggaattatcatcaagggtgttagaaccattctatttctacatgttaaactaggagcaaggtcgtgaagtccgaacaggacgtgttagaaccattctatttctacatgttaaactagcggtgcatgggggtccaaccgaagaacgtgttagaaccattctatttctacatgttaaactagtcatctcacggagcgcggcgtcgaagtcgtgttagaaccattctatttctacatgttaaactagagaaggaatcaagccgcgcgaacggaaagtgttagaaccattctatttctacatgttaaactagagtcaccaccgcgaacggacagaatccagtgttagaaccattctatttctacatgttaaactagcaatcgtgggagaccacgcatcgtcctcgtgttagaaccattctatttctacatgttaaactagttcgtctgtgtccggtggtgggtgtgccgtgttagaaccattctatttctacatg

SEQ ID NO: 69489 - DNA, 116 bp, Arabidopsis thaliana landsberg
ggctatgtacaacggtggtccaagctgggttgacgttttgggcttccgaatataaatgtgttttagggaatccgttatggggaaagaaggacaggaaaactcctggtgaggaatcc

SEQ ID NO: 69490 - DNA, 431 bp, Arabidopsis thaliana landsberg
  unsure (1)..(431): unsure at all n locations
aaagacaggtatttataatggacaaaagaatcctcatcgttatctttcagactgaaatacaaggaggactggttgaaatttgcaattaaaaaggtaacccgcaattattcgctaaactatggcaacaagtcctgacgttatatattttcatggaaaatgataaatccttcaggattatggtgcacattggatcgcgacttataatgcggagggatcgatttatggttaaagaaaacatctaaccttgttataaataaatggtataagagaaatgattatcacatagatcatggcgaagggatggatgcctacaaggtaggcttcacacttggagcangaaattctgctccgttaaccgagaaggngtttatattntcaaaatattattcagattataaaatattggatcaaggtgcattgcgtattacatt

SEQ ID NO: 69491 - DNA, 267 bp, Arabidopsis thaliana landsberg
  unsure (1)..(267): unsure at all n locations
accnaaacgggaaacaaatgctgaaaaaccgattgtagacgcccgaacagacgacacgacgaccgggggaaaagaaaacgnanacggcgacacaacccaagaancagancaacaaaggggggcaaaaggaaacaaaaagcgggacaaaagcacaacgaacaagccaanaacgaacaaaaaagaaaaaaacgggcccgcgancaaaaaagcaacacaaagggggaggcncaaaaacaaaaggacnaacagaaanaaaccaaaagccca

SEQ ID NO: 69492 - DNA, 240 bp, Arabidopsis thaliana landsberg
agccgcgggggtttattgactcgatcgcgcgctttcccacaatgaccatcctgcgacggaactccgccaggcccagggaactgtgccagatggaggcgtaacggcccacgagcggaagcgttcgcttctcgccggcgcccccgatgagaatcgggatatcccgcacgggcgccggcttaagcagcttaagccgggtcgtgacgcgctcaaggcccgaggcgaacagcttcatcccggacc

SEQ ID NO: 69493 - DNA, 190 bp, Arabidopsis thaliana landsberg
  unsure (1)..(190): unsure at all n locations
aatccccggtaacacagtatgacgtacgcagnggaannacccgatcccttccaaacccaatatcagacgttcctttgaagccactcgttttcttgtcggtcctagtcagcacattgagggagcatcgatggcgtcaactttcagtaagcaaagtaacaacgatcaagcaacacggcataatctggtcctt

SEQ ID NO: 69494 - DNA, 364 bp, Arabidopsis thaliana landsberg
aaagcaaaaagaaaccccggataaaccccccaccccaagtgcaacaggacaggacaaccagcaagagaccaaaccaacgaggacgccgacaaaaacaaaccaaaacccacaaaaaaaaaaaacaacggcggacaaaaaaaaaagagccgacacagacgtaccaacaccccacagggaaaaagagaaaacgggaacaaccccaacccccaggaggaaaaaaagacgaagaccccgagaagaaaaagaccccaaaaagaccgccggacatcgccaacaccaggaaaagaaaaaaacgggaaacccgagaaacaggaaaagccgccaaagaggcaaaagaaagaaaaaaaacccgacagaaaaaaag

SEQ ID NO: 69495 - DNA, 496 bp, Arabidopsis thaliana landsberg
  unsure (1)..(496): unsure at all n locations
cggcgccgcgccgggttttgttggagacaacgagatgcgatctgctctggcggccgcgctcgggcttgcgctttttgtgggcggcgcctcggccgaaggcttcgagcgcaacatcatgacgggcggcccgcagggcacctatatccagatcggccgcgacatcgccgcgctcggcgccgattgcggcctgacgctcaacgtcgtcgaaagcgccggctcgctggaaaacttcgtcggcgtgcgcaaccgccgcaacacgcagttcggcatcgtgcagagcgacgtgctggaatatctcaagaccttcgaggcgaacgacccggaggtgcagaaggccgtgaagggcgtgcgcatcatgttcccgctctacaacgaggagatccatgtcctcgcgcgcaaggacatcgccagcatgaaggaccttgccggccggaagatcgccgtcggcaagaaggacagcggcacctttctcaccgncacgctgatcatggatatc

SEQ ID NO: 69496 - DNA, 432 bp, Arabidopsis thaliana landsberg
gtagccgcaaataaccgcctccaaagtcctgtccctgataatcttgcaaaatctggtaaactttatgtccatcctgtaacgtatctatttttaaagcggaagtgcctgtgtgtccacaaaatacataacgtacgttgggatttgttttaactactttatcaaaaatatcctgtgggctaaaatctccataacctccattcttttggctgatctcacctttagctgtcagatacgaatgggttaatatgatggcattataattaaaatattcttttgcaacatctgccgcccaattgattgcgcccattcttggacaaaattccaatgtaattacaatccaggtggtatttcctactttaaatgtgtaataagcattatcgctcttgcccacctcccacctgccttgctgtgatgtgaaacgacttacaggaa

SEQ ID NO: 69497 - DNA, 2570 bp, Arabidopsis thaliana landsberg
gagctatatgtataccttcaaaagtggaagcattgtcaatttagcttataaatgtgtcaaggtaatcataaaaggagcaaggagttcaagaaagcatacatagaacctttggtggcatccagattatcgtcttttccttttctccacaaaaagtttttaaattggtttttaagacctttccttgttgcagaaatctagtgacacaacaaaatgcaaactaaacgataaggtaagagaacaacaaaagcctaagtaaaacacacagatgacttgttagagtatctaaagctaacctgttgattaagttctcgaactttctgctccatgtaaggaattatatgccttgaagcaaactcttgcatcagatctttgatctgctccaaatatgccaggaaacgaaatacgataggttaaaacattcaaaactgttgaaaggtgtgaatctaatcagtaagagaatgttactccagagctagcagccagaagccttttaaaatacctccacaatatcatcaccagtgagagcacatccaagtttgtcggccgaaacacttgatttcttttaagaaaaattgatgatcaagataatgaacttacaaaaatgacatggattgatgtatgagacttgaaattatgttgtataaaagttcggatgagtgacttacaaatgaagcccagggattagcctgatgttccacgttcccctctttagatgaattagtgcaaagtaagttgcattcattatttccaaattgacttctcatctctgacagaactttagacgttctacagaagaaatatcatctagtcaactataacattacatttgacacccataaacttatgacgaaaatcatatcataaacttatgatgaaaatcatatcatataagagggaataaggaacaactacctctctgttgttgcatcttgattgtcatgcaccaacaagtaatgcttcaaaatgtttgggtccattgtaccatcagtaggtaatctattggagttgaaaagatctacaaatttttttataggttcttcatcttttgatgaaacgaccaatagacctgaaagcacatttcgaattacttggaactcaacagaaaactctatgagacatcatagatcagaaaacctagtttaaagacctgaaaacaactattttctaaaatccatttaatatcttacatgccacaggatgatcaaaagcttcgtggtctgaaaacgacaatgtacgtataagttctttattgtaaacctgaacccatgagggtgcaatttcagactctggatctgcagggagcgaaatacgacagcattagaaaagcaacgagttagagaattcggcttctcaattatttataaattgttagtgcacgatgttaagagtttaaaaaacttataaaggcattttccgctaatcacagaaacaaaatttggagtagtgacttactagagagtatatcagtaatttgaggagggtcagatttcaaatcctgaaaatccttctccccagcttgagtaataacatgttctagtcgttgcttagcaacctagccatgaagtaaacataatcaaatttgagctcaacaccaaacatgcagaatggaagaacatctaccacaacaacatgtaatgatttcaatatgtttcaattaaaggtgatccagctgagttagaactggttatcaagtgccttaaatgttcaaacatcaaacattcacatattcaaccgaagcaaatttacatacctctacgtttggttgcctgatatcggaggcataaaacaatcttaatgtaaacttctttagccgatacagctgatcgctcgatgtccgaacaggcactgcaccgcaaaatttcgcaattggaatcgtcaaattagacgtttcagatagtaaacgcagaacaaaatcaacatcaaatcaaggaattcaccatcgatgttactaaagttgcagaatggcttgagcgtttccacaaaggataagccgttcctgaggaaagtatcttcaacaagaggcgtacatagaaccatgaccactggactaatttcctccaatagcattttcccaagcgaagagttcaccggctccaccattcttccgttcgcttaactagtctctcaaacctcttcactgtgtatctaatccgatttcaggtcggatagattttggaggcggtgcgattcaataacctagatctccacctttttaagccaatcggagctacgacgccgtcgtcggcagctgccggagttgatgtaggtaggaatgaagatatcggtaaatgatggagtatgtagaatggagaaagcagtcagtacggcgtattaaccggagaatgatcggatgatcgtaatcgggatcgagatcgacgtagagggagagatgtaggcaaagttcgattggagatttggaggagagtcgacgagcaacatgagaaagaaaaaaaaaaaaaaaaaagaaccaatttcatctatttaatttatgccgttggcccaatatttaggtaacatttcaatataacccaaataatttaaaaatgtgctcaatgagcttcaagatcgat

SEQ ID NO: 69498 - DNA, 239 bp, Arabidopsis thaliana landsberg
aacagtaaatggcttcatgaattccattgagataaaaattccgccgcgctttcaaaacgtaaagactctcataagcttcgaccattttcttacgaatgtctgcgggaggatttgatccattcttcgtatgcacaagaagtgcaatattaatgatggaatgttgtatgtcaatttccaaattcctttttacttgatcccaatgaacaagtcgcagtctgcttacagaggccattcttata

SEQ ID NO: 69499 - DNA, 486 bp, Arabidopsis thaliana landsberg
aacaataggttatcatgactggggctataagctagaacctccattagaattacatgtgttcacaagaactgtaaccactctatatactgcatgaaaatgatgtataagaacacatacgttggaaatgatgtgttcgtagaggatgaacatgttccacacaccaataaagcggtttagtaacctaattatcaagcttgcttacaaactatggcactatgaatgtacagaggacacactagatactcaggacgtaagaccacaaaaagtctgtttaaacgggaaaaactgtgcccagtaatagtaacgtcccaacctataaacaatttggaaggaattagctcttatagtgggcatgcgtgatgccaagtacaaaatttgaagagaaaaaatatcagccgactagataaggtacacaatggtacatactccaagactgctataccagtcaccctcgacattcgacatgatggcgcttaagaacttgga

SEQ ID NO: 69500 - DNA, 3249 bp, Arabidopsis thaliana landsberg
acatgcttgctcagttcttggagcttacaaatagacagcaggagtcagttttatcgacacctcagccatcaccaagcacatcaaaagcaagttcaaagcaacgttctttcccgcctctcatgctacaccaagttgtacagttgcttgagcgtgtccattacgctttgcactaggtcatcctcttccgagcccgctttcttaccaaggcttgcaacttaaaggacggcagtttcatggttaacgaattcactaatttgatctggtgcgtaactgagtccaaagtagttttagttggaaaatgtatatggaatttattaaataactggtagtgaatattggatgtttacaagcttattgacactattgcgtataggatgcaaagagttggaaatacccagtctcagcagctgccttgtgtacttaagggcgacgagtcttaacaaccaaatcctctctctccctgcaacagtttgtagaggatacttcccgcatgtacagaagttggtgagtgaagtgggttttaaattaatcataggactcggtattgttgtgtacatagagacgataacccaagtaatttgaaattaaaacaaagggatactggacacaaaactgtagtgataaatcataaactcgtccttagtttgaatagtttctttttacctcagtaatttagattacacaaacatcagacaaatattggttactcttgtgcaaaggaacaaattttgaaactggtaaaggcgttgcaagttcttttatcaggaaaaaaatgatccaagtacaagagaagaacaatatttttagagttttcagtagccttgtcatttaaaaaagcttaacaagagctcacaaaattgcggttttacacgagtgtcaaatttaacaggaagtggctactgattgcaatggttgcttctcaaaattttagtaattttacaaaaattggtgctttgttacaacaaaatctcaggccaaggtactgtttgcatactccatcgccctctgtttcacgtattcgactctctcctcgtcaccaacagatttctcatattccaagaacttcttgaacaaaaactgagaacacaagagaacaaaatggttaaaaatccgtagtaatcaaatacacttaataaagcagatttagagaccaggactatttggcaccttcatcttcttggggggcaagctcaagctaatggctctctcgaataaagatctaattacatcatcttctccaagccggatctcctgtacaagataaacatcaagttataaattaaaaaagatgacaatgaaatataaattttggagaagcagaatataacgaacttggtcaagataaacgctccacaagtctgttctttttgggtattccctaagaacaccttcaaacagtgatctccctctatccgcaactccacatttgaactcaaggatggcagtctgtgatatgaactttatgtgcttatggcggggaagacatagcaaggcacgattcacaacggattgtatggcttcctcgttttgtttcagagaactttgtattttccttaaccaaatctaaaaaggatacatcagataaagttgttaacagagtgagtgacgagccaaatttctctgctttgagaagataaagatcaaacagcatgtaccttgcaagattgcttgaactttttaatcatctcatcaagcagcttatcagccaatttatattgctctgttctctcgtacacgcccaagagtgcgaggtaaactttctttgggtcacagtattgacgggccctttcaaacactttcttaacagattcctggagatgagaaatcaaacacgagtaaaattgcaatatataagcctattattggtaatatctaaaaagctttcgttggagtcttctatctacctctggtggatttccatgttcattttccaaattgaagtaagcaacccatatgtttagcttctcttcttcctcacgaatatttatagtcctcaaggcccttcagtaaagatagttttagacaggataaacaaaccgaatatagcgactatcacataaaacttcaatgctttatcaagcagatattagatccagacggttatctaattatataatatttataggtcccaaaaactgtttccgctctcaacctgtatcagtatgtatccctttgaatgatacagaggggttaggaacaagtacctctcagcaatagacctggctttctcaatatcagccaagctgagcatgaacgccatatattttatccagacaaagctgctgtttggagagcttctaaccaatttctcaaattcatcagcattctcaggtgcatgatgctccagcaatcttccttcagcagcttgtattttcttctctctacacaagtataatttttcagtatgagttgaaaccaaatataaagcatctttgtttctaaagaaataaccaacctttcctctttgtctttttgcttttcccttctcttgctcttttcatctttattggctcccagtagtttctcctgattctggctgctgtcaaagtccgtctcctcaatgtcatcaaggtcaacctcaagcggagggatagaagcccttgattctacttgggcaagaaccagagaagttccaccgcttgtttcctggaacccaaaatcaccgactgctgcaagaacttccgacttcggatcattgattggatcacattccatgcttgtgttgtcttcggaaagtggttgtgccttgtcatcatcaccattcataagataggaactcttcattccgagtgatatacgcttcttttcctcgtccagctagagcaaacaccaaaatgaaaaagaacagcattaacattccagagtaacatagatcatagaaaagctatgttcaagttaattttccagatactagttactgggctcttagcataaggctaataggaacagtggtagtcaagaaaaatactacacagaactttattattcctgacaaaagaccacctaccttcaaaatctttgcgcggacgctctccccagccttatatctggcttgtacattctccatacgatcatcagaaagctgtgatatgtgacataatccaacctaccacaaaaagaaaggtagatagtaatgaagtaaattattgccagtctagttactctattaggataatttggcaaagtagcatacagtttggatttaacagattttaaggaattcacaaaagtagatcattaccatgccag

SEQ ID NO: 69501 - DNA, 2938 bp, Arabidopsis thaliana landsberg
tgttatgattcataaaagtaaacgtatgatacgtgtctattaaagacatatgaaggatattaaggaccattttttcttctttttttggtagagactctcatattttatttacttctcctttaatttatctcgtgatctctttttcactttacagcaccattcctcccctatctctttggacaactgttcctctctttttaccttttttgcaacaaccaaaatatttctcaattgtttcaaaggtaactcatgattttgtcgattctgacacataattaagcaaatgggcaataagttattttggcttcaatagagtattattctatcaagaaactgttgtgactggaaaatttggaaatgcaaaaaatcgttaatgtgttttgatgggatgggtccaatctttgacattataaccttttcatgagctatttgaattcaaatgtcacactttgatatataaatcactttacttctgcttcttgaacttctctgtttttgtaagtttgggagtttttgtgtcgagtggttctcttacgatgcgtacggccttgtttgtgatgttcccactcgtgtcttcctcttagtatcttgtttccacaagcctgctttcaacaaatatgtttcagtatttagggatgacccatttgagttttaagggaaaatgagagatacctcgcaaacatattgagcccatagatctctttcaatggactttcctgaagttggatcccgacccgattcggtttctgtctccaggaaacacctgatgatctctgaagcaggtttaaccacttgcgcattccatgattcttcagatttgcctttaaagaacaaaaaacacaccaacaagagaaattttaaagtttgttctccaagtggctagctatatggtatttgcttgaaacattgatgaaacacataatgcatacttaatatgtactctgttgcatcaatgtaatgaatattccagccaaagaccgtttctagccgactaattctccttttctgaaacacaacataaaattgaaatgtatcagaactgataggtcaattccaaagtttgagagtagtgcattaaggacttacttgacgacgaaggagccttctggtatttaacttcaccctatcaattgcttcctctaaaataatcctcaacttatcatcttttggaaaattcagaatcttcctcagattctccttcataaccttatcatcgttacttaagcttgttaaatgaccagcacatgtctccgagagatgtattttcaggaaatcttcaaactctctgacacctatggattgccttaggcctctagtatagtcggctcctggtttgtagatgtcatatacttcatcaagtagtccagcatctaccatagcatctactctttgttcaacatatctgtccagtactgcagtttcagcgtccatgcatatcaaacagtaatcaaaacgagatgcattgatgcagccccagttctgccctgccgaaacacattagttaattaacttctcagagcagttaagcttaagggtcatcaatactctttaactttaacagataatgttctacctaagagagatacacacatctaattgcatatttataaaatgaaattaaactcgaggttaagaagaaagaatctacctctgcagtctttccctgatatagcttgcttggaagaactcctctactagcatgcaagctaaggtattgattaatctacaaaacatcaaaccagagtgaataaaccagaaatcgcatgaaattgtgtaaagaccagcgaagcaacataaattcaggatcattgtctatctacacggaagaaaatagcatatcataaatctcacttttctgtgattattggggtgaattctgttagctgccacaggatcagagctctttaagaagttcatagccatggctcaaatcatctctcccaaagacagactcaacaaccatgtcctggtcaaccactgtcggcataaaatttcttattatccagttaaaagatattcacaaaggtgtcaagttgatagagatcctagatacctgaagcaacatctgcacaacactcctcggtatcctctgctgcatcgtcaagaagaaatttacttacaacagcctacattgaaaacatgaataagataagattaactgcgttagcaaggtaaattataaactggtctaaccacaaaaccaacattgactagagcagtaacaagatcacctgtatataataatgtgttcctccaacaagaactggaatgtgattgcgagaaacgatctcctcaataagctgaaacaaatcaatcacaactatatcataccaaccaaaccatcacttagaacgtgacttgtccatattacaaaaaccatatgaacactcatataccagtacatagcagcattaatttgattacttgaaacacttacatacaacaacaacatcacaatgaaaagatcctaatcctaacgtataggacttcaaaattcttaaatctctctctctctaacacaatcctccaatatgattatcagattcttaatggaacacacacaaaaaaaaaaaaaaattgaaacttcaaaacaaaaggaggtataaatttgtactcacaggaacagtgaagtctcgaaaatccctagctgtgaactccatatctgagctcaccgtcccaagtaaatgatgaggcactcctaaacacaaattcccaaaatcacattaaaaacaaagctaatcaattccaattacactgacaccaaagtcatctctatctacaataaatttacaagatcagaacttccaaacctttttgttcatcgacggtgactttattggtgagaacgtcgagaccagagtatatctgcattgagtcggaattaataatctccaccggaaagtgagacgccaaatcaacggcaagcgttgatgttccc

SEQ ID NO: 69502 - DNA, 342 bp, Arabidopsis thaliana landsberg
taaagtttgtcgttgaagaacatactttcaattttagagcttcttgaaacttattttcttatctggctcgatcttgagagttttgagattctgtgggagagacaatcttagggtttctgcatctagcaaaagtttgaatctttaaatatcttttagcgtttgcgattgtgttattgcctctgttctgtgttcaatgggaatcttcccttttgggacagaatgattctctgtggtcgttttagtattcctcggttcatgtccttataataaggcttttctgttcctcaaaaccaggtctcttctctttggggatttttttcattggaattgagcatacacatg

SEQ ID NO: 69503 - DNA, 479 bp, Arabidopsis thaliana landsberg
ggataatagatataaatacaaacctagcacaagaatgtataagatttttataacagtgaacgagagtgggatgagttgcttcatcatagatgatataaatgaattgactgtttttaaacttaaaagaatgaacaaaataagttttttttttatatagtttttttaacttaacaaaatgtggtgatatttataatcaattggatgtttctattttaagctatatgtctgaatttagggatctagtttgaccttaaatatttcttatataggttagaggcttagagctttaaactcgctcctgctttctccttcactataaatattttttaattaaattaaaacaacacactacttatatatatatatatatatatatatatatatatatatatatatataatctgatgaatatatatgtatatgagtatagtatccacccatcgaaaagaacaaaaaaaaaatttatttttttgaaaaaa

SEQ ID NO: 69504 - DNA, 433 bp, Arabidopsis thaliana landsberg
gcgcgaccgccaccaaacaggatagaggaacaaggccccagcaccgccgccgcgaccgggaccaaaacagcgacaccgcaggacctcctaacacaaaagcatacaaaggcaggaccgcctcattgaccgcacagagaaacacctctcacacagacgactcaaaacccacattaaaacagaatgacacactgaacacaacaaccaaagacccaatgggaatagcaaaaccctataatatacacacacgcacgcacgagaacgactgaataccgcgcagcgcagaccgggaaccacacacgcaccccaaccagcaggcacagaccaaaacaaaccagcaaccaagcacggaactaatgcccccacggaaagcacccaacccaacacacaataaaggaacacacataaaaccccaagaaaaaacaaaagacagaga

SEQ ID NO: 69505 - DNA, 446 bp, Arabidopsis thaliana landsberg
  unsure (1)..(446): unsure at all n locations
tggcccgctaggggttacactgccactttgtcttcgtcaaaatttgtgggattccaaaaccagtagtccctaaaacagaatggcgtggttaacgtagtaataattcggataaatttgaaaagttgtttaacaaaagttattcagatggtggtgtaattaaacaaagtgcatgtttacaaattttaataaaacttaaaattacagcacaagtatttgtcaaaagtagtccaagttcttacaaaagtagtgcaggttgtaacaaaagtcagggtcgtacatgtagtacgaatagacacgtacgacaggtgtatggaatcctcggagcccaaatagtagcgcgaaattatagttcgttggaaaatgcatgcatatacataaacngtcacccacccgaaattcgaaagtatcatgtcagttcacatgtgcacaaaacccaaataacacga

SEQ ID NO: 69506 - DNA, 354 bp, Arabidopsis thaliana landsberg
  unsure (1)..(354): unsure at all n locations
cccgcaaggaaggcggaacggggaacttacgctgaggactgacgaattgcgtatacggctggcaaccgacgcatgggaaccccagggcaatggcgcggagaccacgctccgccgcaccatagaggagagcgagaaactcggtcacgaagagcacgtaatcgactataaccagttcaagaccaggtcatggacagactacnnnnnnnnnnnnnnnnnnnnnngctgctccaaggaatgcgcgaaaacatgctcgaatacgagccggacgccatacatatcggcaccgagggctatgtacgcatgggggcacagcgcgtgtgccacgaatataaactgaccatcaccaccagctat

SEQ ID NO: 69507 - DNA, 2694 bp, Arabidopsis thaliana landsberg
acatgttaaacgttgggaaacaacgagctgctgagagaggtgaaagatcagatgtttgtttgtgcaacaaatttgtatcctctgttattcctttatgttttttttctatgtatgtgtgagctcaggcttcatttactatcttgaataggtctaagagataacaagtcactcgtatgggtcgaaggagatgcagaggccttgagtttcgatgacaattcaatggatggatacaccattgcatttggaataaggaatgtcacacacatcgaaaaggctctagctgaggcttataggtacctattacaaattacttacaccctcttctattcgggtatattttcatgtgtcagcgttttgtgtatagtattctaaaactcttcccattgttagggtactcaaacggggaggaagatttttgtgccttgagctcagccatgtagaaattccggttttcaaaaatctgtaagttttgatgattagacatgttgtggaagtaagtccctaagtcttttttgtttcgatgataatctcactttgtttcttgtgttgcagatacgatttgtattctttccaggtcattccaaacttaggggaactaatcgccggggacagggaatcttatcagtacttggttgagagcgttcgtcggtttccccctcaggttcaaacattcaaccttttgttacctttgttgaaaatttggtatacaatatacacaatttttagattagttttcctgtgttttcgtgattttgctgcatggcttcttcaagaccattagtaataaatgtcatggccgaatctttcaattgaaggttgtgttagattcatgtaagataacttttaagttttaacttgtggacttcgtcaaaaccattagtaacaacaacttgccgtgatcaataccatagcttaaggttgtgttagattcctgtaagaagatcagttttaagttatgatagctatgattatatgagcatcgtgtgtgtgatcaggtgatgtctagtctataagacgtttttttagtcggaagcatgttttgtaatcactagatgcatgaaatgagtgcaggagcgatttgcatcaatgatcgcagatgcaggatttgagaaggtggagtacgagaaccttgttggtggagttgtcgccattcactctgccataaagctctgactttttttttccttctcttttgcttcagctgtttcaaaacccaaactgtaaaagttggtaggtaaaataaggctctgcttaagagcttactacttaactgttgattcccactatttttgaggaaattttgttgattttatctgattacttgttgtattactacatgtataagtataacaatcaaaatggggtatttgtctcaattcaaattaaactgaaacacaaacccacaatactagaaaggacctgctttccaagtacatacgtttcatttcatcatatatcatggagaaaagctatgagggctctttatgtaaataattcaaatgtaagacatatacctctcatgaaaagcttgtttaagtaaattttcttgatgtaaatgcagagagaactagaagatctgaaactcgtactcttcgatggttgttagttgttaccatttattgagaaacagaaaccttcgtatacttcttaagttaaacaagtgtggcatgtttgattttttgacccagaaaaacagaaaatatgcataatttgattttaagcataaataacgcaaactaaaatacatagcacgagtaatgataaacacaagtttttgtcgataacgataagactaatagctgtagaaatgaagtgtggcatgcatatttttgagttactactatgagtctattaattacgcttccaatttttaaaatgggctttgtgtcaggcccatcttctataagcccggacttattttagggttctcactgcgtcgtgaaatcaaatcatatataaacaaaattacgcatttttgccatgagactttagtttttttcacagttgagaaatctcgccgccgtttgaagaaagaagaagagatgggagttttctcattcgtgtgcaaaagcaaaggcggagaatggaccgcaaagcaacacgaaggagatcttgaagcttcagcttcttccacctacgatctccagcgcaagcttgttcagactgctctctccgccgattcatctggcggcgttcagtcttctttctctcttgtctctcctacctccgccgtcttcgtggtatctctcagtctcatctctttcatttctggatcgtgataaagttgtgtgtttactcgtagatagctagatcttatagatttagctcgaatctagtgatgcttgtgatcacttaattttgttgcgatcataatttgtttagctaactagttgtgatagaatcttcaattatgattccattggtgaagaagaatctgaaaatttgatttgtattttaatgtatattgttttttagctacattgtattgtgtgtgtcattttgctctaatctcattttcaatttggtgaagcatacatgatacttgtttcattgttgaattgtatgatgagttgttgaaatgaatgatacgaagcttaattattgaaatgtatgatacacatttatcgaaactcattttttctattgtttgtgttatatgagtaggtggtcattggtggtggtggtggtggagga

SEQ ID NO: 69508 - DNA, 3021 bp, Arabidopsis thaliana landsberg
aaaattgtaatatctttctcagtacagctaagaaatgacagtaacaactaacaaacaactcattatctcttttaatttgcctcattaacaagacattagacatgaaattatttttagaatggtttttcaccaatgtaattaccaggaggatcatagttgcatgtaataaaagtaccaccactgttacacacaactttagcacatcccaaacgaactgtgtttttccaaacaacttgcgtgtaatgtagacaggtgccaccgtttggatcattacacgtgttactatcgtaatcgtagtactgtttctcgttgatccacatttccgcagcatcttcagccgacatttctccactactcatcgctatgttctctccaaatggtccattcgaatggactaatgcacaatcattgatcctctggtttgcatagcttgccgcatatgcagcgacctcatcgtcccaaaccaatgggtcgagcccaacctcgtttcgggcttcgttgtgggcctctaagaattgttgttgcaaatcttcggctaaagagccatagaaaagagcaattgctaagagaaataaaatgttggttttgagtagagacattgttttacgtacgtgttggtggtgaagcttaggagttaatttgagtatttatatttcaaaatttagaatagttaacaactttggattgtaacaaaaaacaaattctgttattttgtttaccaaaattaaaagaggatcatatttacataccctccatattaaaaagacaggctagtcaacgttacattctattctttgtattcattggattttgctatttttgtgttttgaatattttgtacacgtctccggtctctcttgataacgatttgattttgaaatcttcttattttggaaaaaattaaaatataatattctgctagataatcacttcactaatcagtatttatttcccaaatttattggtaatgtatccaacggatatgattcaagtaactaaaggaaataatttcttcagttttgacttttgatttcttaccgtcacgttgccttccataagtcaaatcgggccttttctagcgattctaatacatagcccaacacaaccattggcccttatgttgtttcgcctacaatgaccattttataattaaagtttttacttcatttaggtactatatttcattcaatgttcacaacaagaacacataaatgataaaaacaaaaaaaaagaaattaggacgaaaaaagaaaaaattaacttggaaacaaaattatatgctgatgcaaacgtgttggtgtgcatgaatgtaagaaaatccatttaaggaaataacataaaatatatttgaatgcgaaaatttcaaacgccacggctttttttttgttaatccttccgacgtagagaacaatgctccggctactatttatcgttcgccttctctttttaatgccactagcttcatcgagatccaaccacagtgaagaagtcgagaatcttctcaaactgaaatccacctttggagaaacaaaatccgacgacgtctttaagacctggactcaccggaattcggcatgtgaattcgccggaatcgtatgtaattccgacggaaacgtcgtagagatcaaccttggaagtcggagtttgatcaaccgagacgacgacggtaggttcaccgatcttcctttcgattcaatctgcgatttgaagttgctggagaagcttgttctaggaaacaactctttacgtggtcagattggtacgaatctcgggaaatgtaatcgcttgagatacttagacctcgggatcaacaatttctccggtgagtttccggcgattgattcgttacaattactcgagtttttgagcttaaacgcttctggaatctctggaatattcccatggagttctctaaaagacctgaaacgattgagtttcctaagcgttggagataaccgattcggttcgcatccatttcctagagagattctaaatctcactgccttgcaatgggtttatctgagtaacagcagcatcactggtaagattccagagggaatcaaaaaccttgttcgtctacaaaacttggagctctctgataatcagatctctggtgaaattccaaaggagattgttcagctcaaaaacctaaggcagcttgagatttatagtaatgacttgaccggtaagttaccattgggttttaggaatttgacgaatctgaggaatttcgacgcctctaacaactccttggaaggtgatttatcagagctgcggttcttaaagaatcttgtgtctcttggaatgttcgaaaaccgattaaccggtgagattccaaaagagtttggagatttcaagagtttagctgctttgtctctttacagaaaccagctcacagggaagcttccgaggagactcggttcttggacagcttttaagtacatcgacgtgtctgagaacttcttggaaggtcagattcctccttatatgtgcaagaaaggcgtaatgacgcatcttctcatgttgcagaacagattcacaggacaatttccagagagttatgctaaatgtaagactctgattcgtcttcgtgtaagtaacaactctctctctggaatgattccttcagggatttggggtcttcctaatctacagtttcttgaccttgcttcaaactattttgaaggaaacctcactggtgatattggtaatgccaagtctctaggttctttagatttgagcaataatagattttcaggttctctaccgtttcagatctcaggagctaactcgttagtgtcggttaatcttcgaatgaataagttttccgggataggtgctgaatcttttggtacgcttaaggagcttttaagtctcattcttgaccagcactaatctatctggtgctataccaaggcataggcttatgcacatctttggttgatctaaactttgctgggaactcactctctgacgaaatgccggaaagttaggatcttagagacattgaatccctgatct

SEQ ID NO: 69509 - DNA, 152 bp, Arabidopsis thaliana landsberg
cactttcttctaaacagacttctctcaatcctttggagaatcctaatccacccgtcttccccagtccctgagtcttagcttgtagcaagccaactgtttgactttgctaggagaagagagagaagggaaagacagaccccaaaaagccttag

SEQ ID NO: 69510 - DNA, 3323 bp, Arabidopsis thaliana landsberg
  unsure (1)..(3323): unsure at all n locations
aaattagatgacaatatgtcaaatatatatacatggaaaaaacattatatagagtatcagttctcttgtacctgtgactgcatccatgaagagtacgaaaggatccacttcatcaattggagattctaattcctcgtcatcgctaaaatcatcgtctgaaaagtcatcatcatcgctgtaagagcggaagtcctttgcctaatgataatacacaaaggaagtaacttagtgagctactacgactagcaaatttcacatgtcatgagatcagagtagaggattagtttagggtcaaagaagacagacctgtgctgctaacttgcggagtgtacttccatcagtttcatctggattctcgtcatcgccgtcctcatcttcatcatctgtttggaattcatccatgtcgtcatcatcaccatcttcatcttcttcttcctcttctgcctttgccgcttctgtcacaaatgttcaaataggaatatcagcgaggtctgttataagaaaaatgagagatatgaaaagtcactgaccagcaagttgatccttgtatgccactaaaagctcgagaagagccctgaatacatgtggcaagacctctccaggcaattgaccagctggaaggctgaaaagtgatgtcaaccccaagatgcaaactttcttatcatgttctctgcatgtgaaccaaggaagaatgttatcttgaaagaaatgtgaggagaagagagaggagagagtgagatagaggttaaaaaaatttagattcacccacctcttgaagttagaacgtgcaccactcttcttcttttcttgcagcatttggaaccatagagtaaaaatttctgttgcgataccaaatcgttgcagtatgccaagtgccaaaggggtattgtagtaaaaggcatttgcaacctgcccaagggtatcaaagcagtacattcagcaattaatgccaatccttagcttaactcagtgacagacagcttaaaaaaagtagtaattaactctatgaagctaaaaataactgccgctactttccttaccacttcaaccagaaggcagttgaaggaagatttctcagcaccgcgtagccgatcaagtgtgattctcaggtagggttctacccattgatccacctggcccttgcatgtctgaagcactatccctaatagcttcggagctggctcgaggtcactgtcatcaatatttttattcgccataagctgcacatgagaaagatttaacaagttaaaccaacataagtatgtgtacggtggaaggaaaaaaaggatgaggccatctactgttttgtttatacgagtaaacgtacagaaactatcagatagtgagcttaccacagatatcacattccaaagattttgctggtaatctggttccttgcaagtaagataatgcccagtccccctggatatatagttgtgcaacgggaccaatatatctaatattatccaataggacgatcaaagaaaaaggaaactaaattaggaaaataaaatgaaactttatgaaaatggaaacggcaaaaaaaaacccactaccggtatcgtacttgggaaaaagtcaatagcccaatccacgagtgcttccatcattaaaggccatagactccacatctccaatgatattgtaggtgaaaaagtagtaatatatgagacgatctccagaacctcttcaaacacatctggccataatgaatgaatgaccatgattaaaacaaactccacatgtggcataaaccacaatgcgttcaaaggaacccaagaaatgactaacatgtcaaaatatatggagtctcttaaaacattatgcataccttgaccatcagttgtcagcattttccgcattattggcagtaactgtggttcaatctgaccataaagatgagggagactactgatagattcaagaatggtactgatggcacggagacatcccactgcagccaatgcaccagcatcatcagtttcatcatcaccgttgtcagtgtcgatacacctccagaaagcactggcctggaattaattaacaagaacaaggtatattagtgccaaacgtaaaacaacactcaaaatggggacacaacagaatattatcttaccaagttttggcacaaacccaaagcatacggagaaatctcctctccaaacttatacacaatagtctctaatgtaaaagcaaggtcttcgttttcaacttccttcattagcttgaaaaattctgcacagcacaagtccacctcaattatttcagtagattaacatgatgtttggttttagcaaatcattcgtaaagcataccatcaagaagttgaggaagaactgggcggatttcatctaaatctgcagggcaaatacagttagttgaatttctactaatccacgttaatacaaaaaaatcaggagaaggaaaaagggcggngaaatcttaagaagagatagaaacatatttttggtggggccgatacttacctttgcaggcttcaataaatggaacgcaagcaaaaactgaatccccccgaacgggaagtttagatcacacatttccgggataacacaatgcaatgcctctgaataatcgctctggtcttagaaatcgatattggcgtactgccctgcaacccacgcagcctacaaacaggatcaatgaggagaaataagctcgacaagttatagtatccacgtggtgatagcaatatggatgatgcaacatcgtttaactcaagttgatttgtcgcagcagcgtctaagcaggcatttcatataccacatagaatcttccttcaagaatctttacatggtagtgatgtacaagtatttcagttgcagcggcttctcaaagtagttatagagaaatgcaagcatttggaaggatggagaaaaatcttaaaacatcttcaagcacatgcataaatgataatgaataaaagtataatttgcataacagaaacggacaagaagggggcttaagcatcaaaaaagaagtcaccaaaaccttagctctaagatgaccagctgggctgctaaattcaggaaaaacatgttgcactaacatattctccagctcagatttgtagggttcagtttgcctaagtttatcacaaagtgtcccaacagcaagcagagcaccatccttaaggcgataaggcttgttttccagagatgcttcattatatctaaaacaaataaacaaagtaactatatcatgtgatgatgtcacaattatataatacccttttctattatttgtagataaagtttgaaggtaacctcttaaaaatgtccacaacgaactgtataaatttggga

SEQ ID NO: 69511 - DNA, 566 bp, Arabidopsis thaliana landsberg
ctagcaaaggggcttggagatagagggttttctggggggatttggcttctttggaaagctgagttggaggtgaagattgttcatcgccagtatgttcattttagtgtttatcggaataatgcttttctgtcctgggtaacggcagtctatgctagtcctaatgctactttgcggcgtgctctctgggagcagttgagtagcttggcatctatgatatctgatccttggctaataggtggggggactttcattccattctgtgtagttcagatagccggggtggctcagctagtggtaatcggccgtgtcgtttgagttggttccattcctctagtctctatgacatgaagttcgttggtccgaagttgacttgggctcgcaagggtttgctgaagcgtttagatagagctacacttgagagtctttctattacttccttgcttacctggctcacttcgcaacaaagagaagttgttcatttgcttgcttagctagaatatgccaacttcgttcacttacggttctctttcacttgttagctagccctattcctcacctttgctttg

SEQ ID NO: 69512 - DNA, 194 bp, Arabidopsis thaliana landsberg
  unsure (1)..(194): unsure at all n locations
agccaccacagccaccggggaataaaaaagaaccgccccgcgagccccccaaaaggcgaaaaggcgggagagcaaaccaaaccagcagccaccggaccccgagagaagaacaacagcacgcaggcgaacgcaccaggcaccggaggaagggccaagaaccgagccancgaccacgganncgaagncggcaagaa

SEQ ID NO: 69513 - DNA, 1747 bp, Arabidopsis thaliana landsberg
gcttttcgcgcttgtggtattcccgacggatcttaatcctttgatccgcatctccttttttccatggtggccaccggaacctccattgaatcggtccccacgaaacccgtaagaaccttgccctctggtctctgatccacgattccactcggctctgtatcgactccattactacaacctttggtcaatacccacctctaaatcgaaagtaaagaccggaattagtttggagcgtttgagttttgagtattgaaaccgcgtcgaaatttgaaaatgggaatactcagggtgagatttgagaagatgataaaattaaggaagcgccttaaaagagagtaatgtcgcgaacgtgaagcagagggatgagagagagagagagattttgagcatcaaaacgcgcatatgcgtctccttgttcgaaactgtctatacttcttgggtcttgttacttatcttactattgggctttaggcccaaattattttgtatagatggtcccgcgggaacaagttttaggattttatttatgttttgatttagcaaacataattcgacgaaaactttggaatactagtgaccaaatattttaagagttgaaaattgaacgtttagttcattgatacattcagtggcaagtttagctagctaaattaaaattaaacactagtaaacttttctagttttttcttctaaccaaggatgaaaacttcgttgtgaaattagaacgttgtcagcacacttttgaaccaacaataacaaaacgaatatttctttatcacttatggatgtttattgtggacaacagcaaatagaacaaacaataactttttgttccaaagcttcaatataaatatcaccaaatgaaataaaagaaacacaggatagaatcgggtgattttattaccgaatgattcacaagctagagagtctaatgttgccctaatcagacataattacagaatatttgattgaaataaattgacataatcaactccttgattgtctccttaacaaggaacacggtagtaataaaaatttcttgtgttgtttggtttgtcaattgaattatttattttttcaaatacatgtcgactaattagattaatgaaaatagtacagtggatggcaaatagatattttaagaagataagatgatctcaatctcatgatagtaatggtccatacaatccaataactctaagtaatgtggtgaaacaaagtaaatggccctaagactaaaacagtacaaaagtatggggctccattattgttcgaacaaacaaaaaaagaaatagagagagactcaagaagagaagagagactagagagagatccccattcagaaaataaaaatagaacccaacaaaaccaaaattcccaaattgaccccaaaatttacgttcctcgtcaatgaccccgcgttccctggacctcccgccgctgttcctggggtagtcgagccactggtgcccggcgccggagcagatcccggcgaaggagcagagcccggtgctgcatcttctgtgaaactcaacacacggtgggagcccaaattatcaggaccgaaaggatgtacaccgggacgaccgttggtaacattgccgccgatctgccatacctgattcacactatcagctcccgccggaaccttaaccgtcgtgaaaatggcgatcctaccgccgcttaacgactcggcgcgtagattccaaaaatcaaaagcaagtttaccttcgacgagactgctgta

SEQ ID NO: 69514 - DNA, 2578 bp, Arabidopsis thaliana landsberg
agtgagcgagataagagattcaaaaaattgtaaagaaaaagtgaagagaattggtgcttttaatgcaattaccatagtcctcatgatccactttctgtggaagcctttaaggagtagtcttctctcatcaaatttcatatgagccttgattcacaatatttgacatgttatattcatttaatcttaagctgaatggttgttgtctaatatatgattttgtatagttattagattacaaaagtgaaaatcacataatgaccagtaatcaattattttgtgtagttatggtaattgtttagtcatttaatcttagttgtttagttatggtaattgtttttatataggagtaattcaagttgtgacataaaaacaattaccataagttcttaacatagaaatcaattatttattttgtcgcttgataatataaacattttttctttgtaatataataaattcttatgaaataattgagttctgcctagctaagctttacttgagctcaatgctcatcctcattcaatagagattacatagaatatatgagaacaaaaaaagggattaagtgctggattaatcatgttaacctcatgggaccatcttcttttgaaagatgattattatgggcatgcatcatagttagggcatttattagctttgacatattgactaatatttacacataatgaaaccattatcttgatttgggattatgatgtatatatgcatgtccatcgaataatatatttacaaagtccttgggtagttttggttataataatgtgagaaattcaagcaagagggtttgtgagttccatgaagttgcttcaaacaagtcatagataattgagaaatagatagtttataaacaatcatggttctcaattttgatatcgtgggtggtgttatatcaagaaccaagaacctccaaaaagctgctacaacattatgattggtcttgttggttttgtaaattaatctaatttattcaatgcccaacaattatttaaacaagcaactagtaaagctgaaatttgaagctttttctattattaatttttttttttttttgttgggatgatcagaatcagatgaatttccacttgaggtagggactttttgattatcacccaccaagggcacatgatagaggccaccaaggctacacaaagaatccaccttcatactttttcatctcatgaaaatataataaataagttccaaacattttattcaaatattggatcgcaaaaactcgtgaaacagtaaataagttctctatattcatcatcaaatagaattaataatagtgaaacgaagaagatgatagaactacaatctaaagctttattatacacagtttgtgtcttcactctaacttttcatcatcataaaacagaaaagaagctaaagaagaaaatgatatgaaaaaaagaagaagtaaatgttctctgtgaacacacagattctgcagaaataaagaaaaatctaagagaatgttcagaaacaaaatattgaagtagaaaatagtagctgtgatttaagggagattcaaagaggaaagactctgatcatcaaaagcttactgagtttttttcatcaatcactggctttcaggatcgctgagatgtttcttgcaccaagaacttgccttacgttctccacctcttgtccttttgttcctaggaacaagcatttcagaggctaagcatgatctaagaaccgaatcttcacggccttgtagtaccaaagatttctcttcttggttatattcttctgtttcttcagtttgctgcaacggcgggacactcgttccttctccttcctctgctttctcggcttcgtcatggcaactagtttccatcaaatcaccattcatttcttcagccactccatttcgaatcaagatgttatccaaaatctgcagtaagttgaatcagaaaacatggaagaagacgttgaaacataactcaaagtatcaaagagaacttacatcttcacaagaatctccaatttcgtgatgatgtaatgtaacatcagcatctgcgaaaagaccaacagtgctttcaataatgtcaggaatatgaaacgcatccccatagctcgaaatcactccttcggatgagaaaactatatcaccaagaccataatctgccatatgctgtgaagcattgtaaattgctccaaaggagatcacatctccatttcctccagcagaaaccgttgggctaggtgcagaacttgcagcaagaaggctcagattctctgaggaagagaaccttgctgtgttcttggacaaaacaacatcaacttgggttttcaatctatgaacttgtgaatgcaccagctcgattttccagagaacttcttctaagacactatctcatttggggatgaaaagtgaggcaacggcatctaagtctaccggttcatttgaaatcactcgtggatcttttgcatctgtcccaaagtacatatcattacaccaaaaacattaagagtctgaaaaaatgagatattattgcagttttggtgaacataccaccaaagtcatcagccaatcccattccatctgagc

SEQ ID NO: 69515 - DNA, 700 bp, Arabidopsis thaliana landsberg
gtgcaccactggcacctacgctatgcatccaatgatgtgacatcgattgtcttctatttctaatatctcaaatacaacatggaaacggtattatcttatatcctatgttatatcaactctcagtgttaccttattatacttcaaagcgaactcaacgattttacgtcaaaatgtaattagatcattataagtgtttatatggttttacaaggattgtcaagtcttatatacagactatcaagcgatttttttgaaaagcttttctcttaatagcagatctgaaaagcagtatcatatttttcaaaattcctattgtttattcacggataacctaatgatgtgtagattaggttaaaaatgtggacaatatgaagaacattcaaagaattagttcatgtgagcttttgttggtttaggatttggtagtagctagtcggttccatatgcttttattggttttcttcaattctcttacttcttcacgtcatatatttgaccttgttatgtttgattgattccatgtgtattatcctacactttagtttattttttgggttatgaaatcctaaactcttttgacgtcgaaccccaacataaaaactcctctttgcatgggcaccaaagacaagtccttaaaaagcatggaagaaaaagaagctacacaatgtcatctatacattacatttttcatatatttaga

SEQ ID NO: 69516 - DNA, 516 bp, Arabidopsis thaliana landsberg
  unsure (1)..(516): unsure at all n locations
nnnnnnnnnnnnnnnnnnnnnnnnnnnnnnnnnnnnnnnnnnnnnnnnnnnnnnnnnnnnnnnnnnnnnnnnnnnnnnnnnnnnnnnnnnnnnnnnnnnnnnnnnnnnnnnnnnnnnnnnnnnnnnnnnnnnnnnnnnnnnnnnnnnnnnnnnnnnnnnnnnnnnnnnnnnnnnnnnnnnnnnnnnnnnnnnnnnnnnnnnnnnnnnnnnnnnnnnnnnnnnnnnnnnnnnnnnnnnnnnnnnnnnnnnnnnnnnnnnnnnnnnnnnnnnnntaaaaaccctaattttagggcctgggaaccccctttaattttttgggccccccccctattgggtttagggaaaaaaccaaaaattctttttttcttgtgtttggcataaaaaatgggttattataaacaaaaaaaaaaagggccttttttttttttctattggggaaaaaataaaaaaaagggggcgggggggttcttttttttttttttttttttttataaagaaaaattttttttttttttt

SEQ ID NO: 69517 - DNA, 356 bp, Arabidopsis thaliana landsberg
  unsure (1)..(356): unsure at all n locations
accggaaaagcggggagggacacacagaaacaagggggaccgcccaacaacccaaaagancccaagggaaagaacaaccngcnacaccaaaagaagcggacaanacacccagaaccacaccagnaacccaagngaaaccgcgaggggccagaaaaccaccggngaggnacacacgaaagacgngcaggaccaccacnaggaccaacacacacgccgaccatcgangaacngancggacnaaccaaccaaagngacgcccagccacnaacaagggaacagaagcaaaagcccccagaaacgggnggacgggaacaaaaagacaaagcaaaaccccgagcaaccgggaccaaaaaaca

SEQ ID NO: 69518 - DNA, 550 bp, Arabidopsis thaliana landsberg
acttcttacgcctagctctacacactcgactcccgcgatctcactctacatcagggatggtggctaccaccaggatctgcctatggcgattgttcaaaagctccctgggcctctctcagctgccacaagagaagacgttgcaatgaaacaagaacaaacaaagaccataatgtctcattccagatgaatcaaatccgtaaaactcaatgaaagaaacttacatgttgatcatgaaaagaagaacagatgcaccttcctcactacaagtccaggtctgtcaaacctacttgacccgccagaaaaccccatgtccttctcttacaggtgagctctccttacctgggtccaaagccttaacttgattccacagatccaatatatgtcgcttaccatgacaaacaatggcgagttccactccatgatgacaagtaactaaaattttcatttcttgatacataaaaccaattttttaaccaatgaaactaactatgattaatgcttaaatcttttttcactctactatttacagcttactgtgttaaccggagct

SEQ ID NO: 69519 - DNA, 213 bp, Arabidopsis thaliana landsberg
  unsure (1)..(213): unsure at all n locations
gcaccgcagcaccagagaaaccgcagggggggggaataggaagcaccgggccaacccccacgaacgcacaagaagccaggcacacgcaaaaggcgagggcaagacaacggccaccaccgaccaaaggagagcaaccagcaccaccgccgcaagcccagaagaggcacgaaaccacgccacaaaagnacgcaaacggaacacccacgcaccaga

SEQ ID NO: 69520 - DNA, 139 bp, Arabidopsis thaliana landsberg
aaacaaagaaggcttccatccttaagattaactcagttgcaactcccttcttttggggagtgaagctgtgtcaattttaaatacccacgaagcgttacctctcgcagaaaaggaggtgacccagccgaaccttccaggg

SEQ ID NO: 69521 - DNA, 256 bp, Arabidopsis thaliana landsberg
cccagaacgacacgccagtcgtgcgggccggaaccttctcgtcaaggaaagacgccacacaaggaccgaggcagaaacggccgccgaacaccggggcgccggccgccggaaccccggacaggagggcaccaactaccctcaacgcacccgggaccaggacaggcagcagcccccaacagggcccacacggggggaacccgaggaggggaaacaagcgcccgggccgggacacggcgacccccccggagaggaggca

SEQ ID NO: 69522 - DNA, 598 bp, Arabidopsis thaliana landsberg
tcccgtctaaaaaacggtaacacggaaatgctcctcgttctataaaatcgtgacgaattttggtgtcatcattccttggaccatcaagagaccgatacatgtataaagtctcgacataatccctattgtcatcatcatcatccgatccaattacttccacaactagattcggcattgctcgtgcaatatccttgcagcatcccttagacaagctacatgctgacatccaaacaaacctcatgttgtaataacgatgcataccagaccgtaatgcaacatctccaaagggactgtcccttatctcaagtttctgcagtctagggcaaccttctaggacatgtctcagagccatgtcactgtcccctgcaaaagctactgaaagcgtacggaccaatttcccatactcacccatatacctaaaagcttgatctgtcagcaatcccgacactgcaaggcgagttagcttcttgcagtttttaacaatggcaccaaatccctcgtccataggctttcctgttacatggtcaggcctatgtcgacccattatgcacagtctaaacacagtaagctctggacagttctctgacatggctatcac

SEQ ID NO: 69523 - DNA, 710 bp, Arabidopsis thaliana landsberg
gaatgggaccacgatgaactcatagaagaagcgtacaacgatttttcaaagaagaagttgattagtgttgatccttcttattacctcgaaaatggaagatgatctgcgccaatagtgccgacttgtttttcttttctggtaggtgggttgattccaagccttcaataaattgcaaaactattgtaagctttacagtttacaaaaaaaaacaaaaaaaaaaaaatttgtaagctttacagaggagggttagctataatgtataatgcccttgttgttttaatttattttttacatttgtgtttggctttttgatcgtttagttttaaatttgtgcttccatttgtatgtgatttgcatttttgagcttacgtttacacctttttttttttttttcaaacaatagtattgggttcattttaaaaaaaggaaaaacttatttcccattcacgactttaaactcccactgaatccatacaattcgactaacgataaagcaaggtgtggccaatatcggctttttagttattcttggtgcggttagtggggtgtaacaacccgtatatttgactttttgaacaattttatgtgacctttattttgactaatgtctcttttttggtcgaccactaatttcattataggtctcttttacaccgttttataaatctctattctaataccaaatggttagaagatgcagattggattga

SEQ ID NO: 69524 - DNA, 2830 bp, Arabidopsis thaliana landsberg
ctttactctcgactacccaactaaatattataagatccaagtaaactgagagatctttgtgaacacaattaaggttgtgagtgaagacggcaagaaagttaagcgtacaagtcaatttactgatagagacagagaggaattgcaggtaaatttgaatatcactaaagcttcattgtatttattatcaactatatatgagttcttgttactctttactgttctgcagggccggactgtcgttgcagagaatttgccagatgatcattcttaccagaaccttgagaagatctttggagttgttggaaagtaagaaggctttttactttcattttaaacattttctctacatcaataaacaacaactctggatgcaatttgtctcagcgtcaaagcgattcgtatatgtcatcctccagaatccaactcgtctcgtccaaaaggcgatttcttgatgagcaacaaagtaagtaccaagtcctgtttctacttatcacgtcaacttaaagagcttaacatatccatcttgttttactctaaagattcacgcccttatcgagtatgacaacactgttatcgcggacaaagcagtgagtaaatctctactttcaactatcttttgatccaaggctctgtctattagtttctgagatatatagcaaatgcgatcttaccaggtagagaagctaaacgatgaaagaaactggaggaaagggcttcgtgtgaggctgcttcttagatgctcggttgatttctatattctcttcttaagtcacacatttctctctagacgttctgagattaatttcgttgatatactttgtgtgctacagccaaaatcggtgctcaagaaccgaagaaacttcgatggaatcctcatcgatgatgaactcccttcttatgaatcaggagaagactctccgcgtctccatttaaccgaatcacagcttgataacgatgttagtactgttgcttaagtcccacgaaatgtttttccatatatatatagaaactaaattttcttgctgtgcacgttagggtgatgacaacaatgtttggtggactgtggggtaaagggagaggaaaaggacgaggacgatccccaagaagctacgcagtaggaggaggaggacgtagcttcgggattgggctcggagtcagcctcgggatacccagcctggggtcacacgaatcttcgtctcctaaaacagcaacaaagggaccaagaatgcctgatggaaccagaggcttcaccatgggacgtggcaaaccttccatctcactctcacctaacaatctctaaatagttacccaccacaaggactgctatttataattgatttattataatagaggtaaaagattttagagttaattaaccaaataatacatatggattggttttcctaagatgcattcaaaagaagcaaggcacatgacttgggagaagatagtgaaggcacggtgacgttttttgagggttcgttttatataacttttttcattttttgaggcaatttcttttctgtatgtctaatatgttatatttttgtgagattattatttgaataataaaggggtaatttatatagcacaagaattgcaaccctctcaactctttgttttgatttagatgagtaatggatttgaataagtgactgaaagattgggtgaaacttgaaaactaatcaattttctttctaaagaaaaactaaaaagacatgatgaatagtttataaaaagcacaagcacaagaaaggaaataatcaggtaaaatgttactatcttcttgcatcctaactaattccagtaacttgtatctattgacattcccaaatggttttttaaccggtttgatatatattaatttttaagacatattcgacaattctttaacaaccttgaagaaggcggagtcacttattgaatccattattcatctcaatcaatataaggaagtgggttttgtttacaataattgccatttttcgattggattttgtttacaaaacccaatacttgaaaagacatttttcaatgaccttagattggattcaatgttgtgaaaaaaaaaaaaaaaatggattcaatgtacaatttttttctaaaaataagtgaaaagacaaatgagtattgagataacaaaagttcttgccaaggttgtctagtaatttcataacctatggtagttgtcaaacaaactaatttatagtatcatattaattataataaatgtataatctttaattgaaacaaaacctaattttactcccaaattaatagaaaaccttcaaaggatggaaattgttggacatgtatttacatgaaaccaaacatgcaatatcagtaaaccaacttcatagtctatactaaattacgtaccgattggtagatagaaataatgataactaaactgatcttaacgattggtattggagagagattttcaaatcaagagttagtaagaaaaagaaaaaaagaacttagagatgtggatcaaatattttgaaaatgatgaaatcttattaaaaattgaaattgatatacgacctgtccagatacaatgaagttgttaggttacaacatcagcatgtttcaaaaagggtcaagcaggtacatccaatcaatttatataacgtaaatcctgattttcagagcaatattatttgtatcttttataacctccctagttaattagtaataaaatatttaatttagtagtatcacaagatggagctttaaaagttatctttaattcccactgttgaaaatgataacgttcataaatacatttcaaaacgtttttattctcccaataagatatcagaaagac

SEQ ID NO: 69525 - DNA, 425 bp, Arabidopsis thaliana landsberg
cgttgaaagcattcgcgcgcacgcgtctttagccctagtcatattggctcctgaccaatgccaatcacatcccgactaaacagggtcacgactatggtagatgattcgccgcggggggaaattggttttgacgggacgtcagcggaggttcagaaggactaaattcgaatcaacagcggtggcctaattagtggggcagcccgacgttcatgcggtgaaacattccttaacccgcagcaatcaaagcgcaatttggcgtgtcttgaccggccacccatacgtggtcggccaaactagcgagttgttgacgtgcgtttcaacagagtgcgcgtggcgatcatggccgtgctcaggtcgttcgtggtgggtggtggagttcacgatggctcgacaggacggccaatcaggcagcaggggcacggaag

SEQ ID NO: 69526 - DNA, 189 bp, Arabidopsis thaliana landsberg
  unsure (1)..(189): unsure at all n locations
tttgcggacggaaacatgcgttgtttttaaatataccaaaattgaactccggccaccgataacgatagngactaattcttcaatgattaagagattgggttggattgttttggagagtaattataaaaaatcttggcttgtaataaaatgggcaaaccatttggaatattctgtctacctcaacggagt

SEQ ID NO: 69527 - DNA, 586 bp, Arabidopsis thaliana landsberg
caggccgctatcgcttcggcggatgaaagcaggctctcgatcggatcggtcacattgtgcgactggtcgatcatataagcggggttgaagccgccgcgtggattctgctcggcctcgaccagttcattgaagacgaggaacagctggtgcggatttatggatccgctgtcgagatcgtcgtcaccgtatttgctgtcgttgaaatgaaagccgccgagttttccgaaacgatgaaggcgggcgacgatttgctcgatattcgtgtttggcgcgtggtggccgagatcgacgaggcattgcgccttgtcgcccagttcctgtgctgcgaggatcgagctgccccagtcggcgatcaccgacgagtagaaagccggctcgaacatcttgtgctcgagcagcatccgccaatcgtccggaagcgctgcgtagatctgggcggcggcttcgaggtagcgatcgaacgagcggccgagatcttgctggcccggaaagttggttccgtcccccacccagacggtaagcgcccgggaacccagcttcctgccgatctcgatgcattcgacattatgttccactgcctgcgccc

SEQ ID NO: 69528 - DNA, 476 bp, Arabidopsis thaliana landsberg
agaccaagcgggcagacaactcaactaatcgaatgtatatggcgggtatgaacggcagtacgtgtcggtatgaagcctgcgtaaagctgttgtaagtgttgttcggcgtaagctatccaaggttccaggtgtgctgtgtattatattgattgagtagggtattaaatccgggcagaacagagagaatttataaagcagataagaaatggcttagtagagatcacaacacggggcgagattgtaagtgtacgagttggcaacgtggtggcaacaatagaggctaaagttcagaccatacgtgataaatggagaaaaagagtaatcgcaccaataacgcgtagggccgatggtagtaacaagaggaagacaggacgagtgataaacgaatagtatacggaagtagtagtgaaagcaatagagcggattcgaggtcaatagaagtacccaaaagagcaaacagaaggtaaagaagggat

SEQ ID NO: 69529 - DNA, 318 bp, Arabidopsis thaliana landsberg
atgaccgtgattataacaacaagcttattagtataatgggttgaagactccgtgcaacaagaacaagaagttaaattagaaagtattaacttagaaagcatacacataagaaagaagtaaataaattgtatcttacatggtcaatagtgtagtaactatatgttaggagaacccgagcagaaattggagacactttgagatctcttatcatagttttctcgggttattgacttgattattgctcttagcaatatttagattgataaaaatatgtgtaataacatgagtaagtagattgtactacctgtctcgtttatg

SEQ ID NO: 69530 - DNA, 1706 bp, Arabidopsis thaliana landsberg
aagattgagatttgagcgttacttatggttcttatttccaatttcttttggtgttgtgggccttttgaaacgaaagatgtgtagattttattaatcatcatctttcttaaacctttatgtgatttgatttgatatgttgggagttaaattgatggtttagtttttgatatacatgtagtactcacatttttttctccagttttttctttcttgtacacatatttgttcaatcttagagaaactactaagtaacagtgttattcttgttgttctatgtacctttaaaccgtggcaaatatttatgataaatttaaactcaattttaaataataacttcaaacttttaaatttggttttatgaaatatcactgaaattagtttgtgatgtattttatatataatatttcctgtaatatatatgtaaataaatactatatactattttgtggtaaatattttattttagcaagaaaataaatcaacttaaataatgctatacacgcccttctttatttaatggacactaatcaaagcatatggcaattacattattgattgtcctatatacatatcatatattttcaaaatcaaattaaaaccatataatagtatatataataccttctcttttgtcggaattaaaaattaataatttaatacttttaaagatctaatttctggatgaaaaactttggttttcagcgccttacaaagtgcaaaggtccacaaaccaaaaattaaaacagagagctgaacccaaaagaaaaaaaaaccgaaacaaaaaaaagttctctctctctctctctctccattgatttcttctacacagacatctctacgaacccccaaactcatctctctctctttgctcttcatcggatctgactttttcccgaaaacccacaatctcattcttcggatttttcaacgacaaaacccccaaatcacaaaatccccaaaaagtttcaatctttttgacttgagaaaccaaatatatttatagaatttgctttataaagtctgcgttttttttgttttgtttctgtttgatcaaattcaccggcgaaggaattttccgatgggaatgtcttcgctggcttcatcacagctacgaccatgagctaccaaaacgaggaagaagaggaaggaggagacaccaacgattgcttctacgagtctcttgatcgtttagcttcttcctcttcttgctcttgttccgcttctaactctgattacgattccgaatcctctcctcggatctcctccgccgcttttcatgactctgaagaactctacggtggtggtcgccgccgtcgatacccattccctgttcctcggtttccaatgggagcttcgaagttcgacgtttggacctctgaacctgcttttgtctctgagaggcgttccaagcttttaaacgaaatgggtcttagccgtgacccggttctctcccggttaaaacccgtttcagattcttccagctccaaagataccggagccgccggcttcgagatttctcgatcgatctcgtgtaatcaattggctcggcgagatcatggagagtgttctgaaagtgtcggcggttgtgcttcttgtatcgtgagatcgaaatccgacattaccactagccaatgtggtgatcgtgaccgtcgatatacgtctcctggtaatccttgttcttgttccgtctctaaactctctgttca

SEQ ID NO: 69531 - DNA, 317 bp, Arabidopsis thaliana landsberg
ctaatcatgcagataatcgcggtgtgcgtgtttgaaaggaaaacatagatggttcttttctccacccctaacatagactttagtcttatgagggttcacacatctattaatctttagtttttgtacaaaggaaagccttaatccaatctcagaccacccaatttacttttaatagagttagtaagatacgccgatctctgacccctctatatataattatatttctgagtattataattgctatagaaaaggttattaacaacgtgagtgggtgagatttacgacgtcaatgacgcatacgtactcgagagtcatgg

SEQ ID NO: 69532 - DNA, 411 bp, Arabidopsis thaliana landsberg
  unsure (1)..(411): unsure at all n locations
cactcactcactcactcacttgcgactgccctcacatgtactttatttcctctgcacacttctgccccgctgatgttcgaccctatgagcgagtccatggcgggctcgagcgagttctccgcgctcgcctcgtcccttgactttcagaatggaccttttggactcgaggttcgttgctttttcactctttttcaccctcgcactctcattctttcactcacactctcacactctcacactctcacaccctcacaccctcacactctgacactctcacacactctcatacacacacgctctgacccacaaaaacaaacacagctacacaaaccactcgggctcacatacatcacagatcgaagatcctctctctcgcccgcgnnnnnnnnnnnnnnnnnaaccgctcgacac

SEQ ID NO: 69533 - DNA, 1261 bp, Arabidopsis thaliana landsberg
  unsure (1)..(1261): unsure at all n locations
gcaatgtagaagttgttccggagaagaaaaatgaggaagatgaagatggtaagcctgatgaagaagaggaagatgaggaggagatcactgaagaggtatgttctcctaggaaacaagagttggaacttttggtgtctttcatctttatgagtaatgggaccaattgattagagtttgagacactgttctttaggttgacaagtttagttttactggttgcaggatttgcaagaaatattaatgaaactgagagctgaacattggtattgccttttctgcgggttccaggtaactgaatgctttgaaatcttcttttatcgatgttttttctgaatcttgaatgttgagtttgtgtaagtatacactaatatgaaatttcacgatatgtgaatcagtatgaaacgactgaagctcttctatccaactgtcctggcgtaaatgaggatgatcactagataagccacactagtatggaagcacacaaacacaatccatgtctgcagaagcttcaggttgaaaatttcctgatgtggctgaagaggaagcaagatacagaaggaagactgtgtttgcagttgaggtacacacttagaatcttaaggacttgctaattctcatgcttttaaatagatagtaggatgataaaagcatgtggaactctgatttgataagacaatatattgatgataatgttgatgtttcaatttgatctccaagtatgtaacctgagtttctgttggatgcaaatcgtaaactatcgtagagatcatcaataaaaccaaagttcttaaaaagataaaaagccatgaaaaaaacatccaaacggaaaggcattatcgggcatcattgcctggttttaaagtagcacacaagagatagttgataagattttagtaacaaactgatgaagatcttaaaaggtgaaagagattagactcaaagagaccaattgaaatgttgaggagaggagtcataagctcttgtgttctcgggttccatgtannnnnnnnnnnnnnnnnnnnnnnnnnnnnnnnnnnatccacccattgtggtgccattgcttatctggaaatctgctggctccgagatttgactcacaggagacatataatgtgaattgctcttttcgcccgcgatgacttcccaagtttggctgaggtactgctgatgtgttgagatgggcggctgatgggttgaaatgggcggtggctgagccattgtaaccttatcggagaatgagatcatcgagtcgaaaccagaa

SEQ ID NO: 69534 - DNA, 514 bp, Arabidopsis thaliana landsberg
tttgtttttattttgaattattctgcctgttaagaccagcttttaaagagataccaccaaaacaatcttgaattgacaatagacgcatcatgagaaaatttgtaaaatagagttatttgtgaatctattagacttgtgatatagacccttgttaattacttgactcatcaaacaagagtttttgaacttttgagttatcagcaaagtcgattagcgacacgggaatgggttaattatacttaaatggtccattagaatgagttcttatcattgtcattgtattggtgctcgatcattagtttccgttgatcgtctagcttttaccttgatataatagatttatttattttcttgtcttacttctctatgcttagtttattgctttaactcacctagatatataaaagtgattatgattgtataggcccatgaacaactaatccgttacaaagtatgaaagttgtcatacaaaggggtctaataaaaacatctgagttcaatatttgatcactat

SEQ ID NO: 69535 - DNA, 383 bp, Arabidopsis thaliana landsberg
  unsure (1)..(383): unsure at all n locations
aagttacagatgaattgcatgtcagttatattcatctagtagatatgacagattaaccaagatcagagtaacattaccatcaaaagtcaaaactagtcatttcaaatccagcagacaaaatatctgttaagcccttttttttgttggaaataagaaacatcatgtgttatccagattcagaatcaattcctgtgcggattaaaacagaaattacctctttctcgtttccaatttccaaagatggctgcttaaaggcccaagaagttcctccagaattcacatctccattgcttggaaaggaaatcgagccattttccatctttttcgtctctttctcaacactngattgaaaagagttgggtggttcaaagttagaaacgggt

SEQ ID NO: 69536 - DNA, 453 bp, Arabidopsis thaliana landsberg
  unsure (1)..(453): unsure at all n locations
attgccgttcaatcagaatgtctctgaccgaagccgacgcctgcgcggtccagcggttagtgtaacgcaacgtcgcctgcagcgccgtccatttcacgttcgaaacgacgtagggaatttccgtctgcggaccgccggcggcggcttggccgaacagcacggtgccctcatacacgtacccgtggcgcgctttaaagtaatnnnnnnnnnnnnnnnnnnnnnnnnnnnnnnnnnagttcgccagcgcatgatcggtcgcggccccacgatgcagagtcacctgctcttgccagctgaaatacgaaatgctccacgtcgtgatatcgcgcgcgaccctgatcgccggcggttttggcgccgcggtctgcgtgccgtcttgggcgaatgcggcggttgattacaccaatatctagagagcaaacttacagagaaacatgcaatttgccccttgac

SEQ ID NO: 69537 - DNA, 307 bp, Arabidopsis thaliana landsberg
  unsure (1)..(307): unsure at all n locations
atgctcgagccaatggtgctctaaagcatcaatggatccagcagttgttggaaaactggaacaactctcatacacaaactcttcctccccggcttgtaagagcgggtactacaaatataacaaaacagagttcatatcacaaaacggaaaacgactgttggtgcttcaacaaacaaatatgttgttatcttgaactaaaagcaaaactacacctttcctatgacagcttctccattaacattatctatcacttcattatcagctcggataacccaatgtctccaatacagntggcaagagctatgat

SEQ ID NO: 69538 - DNA, 555 bp, Arabidopsis thaliana landsberg
  unsure (1)..(555): unsure at all n locations
aaatacatataaacaagttttttcaaatgataggccaataaggccatgattgtctgaaaattcgagtgatgtgaagatttttaggatatgtaccatctacatttataaggttttaaagagttataaacattataattcatatatttaaaattaagaaaacgtttataatattataaatatttgaacatataaacggttatactgtaagataagtttgtatcaaaatacatttttccaaaatccactaagtaatatttgttcttccatatatgtaatcagacatatatatatatatacataaaacatgccaatatctatggatttatctcttggctaattcacctcacttatcttagtagattttgtgtgttttgtttggtccataattttcattcaaattaagtctcagactcagtcaaaagaggagcaaatacaatccaaataaagggaaaatataaggtaacaaggcaagaaatgcctaacaatatttcaaaagaagataaactanggatagatgcaagatacaacacaaaggaagctaagcgagaatgaaac

SEQ ID NO: 69539 - DNA, 404 bp, Arabidopsis thaliana landsberg
aaacattactctctcaacccgtgagtttttggagtatacaagggctctaacctaacccctttcacacgtattagcaagtgtgcaaagctttatacttattttgaatggtggagagtctggtcaacctcggcttgacaatgagaaagcaactgaagcgttgatccattctccaacatatgctttttctttttggtttggggcttatgacgtcttctattattaatctagcactccttgtggtatttggttagagatctgtagaaaaaaattacatttgctaatgaaattaagccacttgattgcttatgatgtctgcagctaaacatagtaaatgacttttctttgttcttccaagtcatgtgattgttgttaatcaacattggtgcagctatgtatttgtgcag

SEQ ID NO: 69540 - DNA, 541 bp, Arabidopsis thaliana landsberg
  unsure (1)..(541): unsure at all n locations
atgaaaacaaccatatgggggtttattatattcccttgggcggtttttatccgcgnntccaaatgaaccatcatcgatcaccaccacaacagccaagatacgggaggctaatgtggacgcctgagagaataagatagagttgaattaaactgagagcgttgacattagatttaagaagattatagagattgatagggtttgtaaaccggaaatcagatttgaaaattatgccgcaaaactcagtatccaattcagatttgagatagtcttccgagacttaccgatttacgatggcgaggcgaaacgacaaaacccggcgaaaagaaaattctgggtttgtgactatgaaggaaggcggcgcggaaaaagaaagaataatattttaattaaactaatttaatatttaattaaattttagaaagctatttgtggaattttagaaatgtaatgttaatttggaaaagaaaccttttagtgctattttgaaatctccctaatatatgtattttaattgactaaacaaattatttctattttaaaa

SEQ ID NO: 69541 - DNA, 1343 bp, Arabidopsis thaliana landsberg
aactaagagtgtctgcaacaggaagtgcgtgtacggttttctgggttcgacaaccgacacgatgagtgggtaaacgtcaaaacatcagtgcgtgagcggtctattcctgtagaaccatcagagtgtgggagagtgaacgttggagacctgcttctatgtttccaagtaaggctgactttgatctaattatgaaggatggaacatttaacaaaagaaatttgaacttaaaaatgaaagttggggtggttaatgagcaggaaagagaggatcaagcactctactgtgatggtcatgttttgaatatcaagagagggattcatgatcacgcgagatgtaactgcgtgtttcttgttcggtacgagcttgacaatacagaggtaagaagattgatctcagcctttttgttgggtgtgggaactattgacgaagttttgtgttaagtgtatgttcaggaatcgctgggactagaaagaatttgccgccgccctgaagagtaattttttttggttttgaagtcatatttggaagatgcagtaaactatgactatatagtatatgactgacccaaaaatggaataacatgctcatgtatagacttccactactaagtacctaccggccctaggattctatgttagtttttttctgtcaactatgtggaataaagtgcaaaagcttagaattgtaaagggaatggtgatggtacaatgtaataatacccaaatgcttaaccagttaacaccctatgtaatgttcaacatacagtctcattcttgtgagcaagactatttctttctgtttactcattgcttcttgtatatacaatacgcaggtcaatacattttgtgagcttcggcttattaagataaagatgtggaaaaaagctcatttagcacaaaaactatttggaaagaaataaatctttgtgccgaaagtaatataactatcgacccgctctctgtattcaatcacacagcaaaggtacaacaagtatcacactttcaataatgctttctcgatacatatctcatcccaagatcttctacagaagaatccatttgcttgtaatggatgcaaagcagtccctatctgtttctccaagacaatcaatgtgtactcactcttttcaacacattgtttacttgttaacacaacaagattcgagccaagaacaagagagctaaggagacacgggaactaccggttgagccatctcctcaatcgggaaacaactccctgaggaggaggggaaggtggaataagaacatcaagaatggtaactctctcttttggagtcaatggtacacctctaataaggttcaacgccatgatgtctacatttt

SEQ ID NO: 69542 - DNA, 519 bp, Arabidopsis thaliana landsberg
  unsure (1)..(519): unsure at all n locations
gtcttcgtgagtagaggggaggatctatagtatggtctctggcgtttaaatccgnggaacttattaagatacaaaaagatgaaagaagaacttgaatagtcgatatatatgtacgaaactctaggatcgcaaggtaaaatctaagacctcgatacattataaatcataattttacacacacacacacgcgatatagaatagatgataattgcaatcctccggttccaaacttgttttttgtatttctttaatctcgcatgcgagtaatttctgaacatatttgtaaagcccgttaaacacgtttgcatggtttgttattttcttcatagacacttttgtaccggtgtgcgtaaaacctcaatccgtgacgaataaaaatttctcttgcgtttgttgcaaaaaagaaaccaataaaactttattgatattgtccagggatattaggtataaaattttggagtttatgtgtttaataagagtctagtgtgggtgggactttttatgttggtattcataagt

SEQ ID NO: 69543 - DNA, 402 bp, Arabidopsis thaliana landsberg
tcccgcgagatcgaaaccgcgcgcgaccgtttcctcggtccattcgcaatcctgctcgatcgcctgccgcagccgttcgttcgaaaagccatggatcaggacacgggtatgcccctgcagattgcgccattcataggtcgtcgcggcgggccggaagcggatcgagccgctctgccggtaatcgagcaggcccagttcggggcagcgcccttcgcccggattcattgatcccagcggcaggaacatcgccagctgattgtcgggcgtgcgaatgaccgactcgatcggctgctccgtggagaagcgagtgaccttgacggaataaccgtccgcctcgtgatatgcctgtgtctgcgccatgactaagcccggattatggaccgtggtggcctttcggtcaaa

SEQ ID NO: 69544 - DNA, 319 bp, Arabidopsis thaliana landsberg
cagtccaggccggcgtgccggggtacgtttgtgacgacctgacggatcgtgacgggaccggccgtcccgacatggacgcgatgctcggcaagaacgtgttcaagtcacggttgagcgaagaccggcagcggtgggagcaggcgtcgacgatgagccacgtcggcccgcacgcgccgcccatgttcatgctgcacggcaccaacgactcgctcgtgcccgtagagcaggcgcgctcgatcgccgagatgctgcacaaggaatcgacgaaccacgtggtgtacgccgaactgtcgggcgcgcaacacgcggtggagatcct

SEQ ID NO: 69545 - DNA, 456 bp, Arabidopsis thaliana landsberg
ctcttctcctatgaataagacactgaaatgtattagctcttgagaactattcatatacaaaaaccaatttgcaataaagaagtaatgagaaatgtcctttcattttaagatgaaagatccatcactttgggtaaagagtttagtaccaccaaaaccatttggtaaatagtggagcgattattcctttgggattcctttttgttacagtttcaccttttgcattttaagcaatccttgattaagttcttttttttccttttatgatcattaataacgtcattttggcttttttggttgttcatgtatatactttagtttgcctggaagagcttcagcgacgggtgagaccatatggctctgcaacgctcaatactcggagaacaagctcttctatcgttctttgttagcaagagtaagttctcaaagaaccttttaatttcttcttcttgaatcttg

SEQ ID NO: 69546 - DNA, 533 bp, Arabidopsis thaliana landsberg
aggatctggctcctacaaaatggaagggaagtatctagcatctcagaacatataaagaagataacagctctgtgaaaccaaacaatagactcgcagagacgatcatctctaatacgtctgctagtaataaacatcggttaatgcataataatcaacatggttaacaactcacctgactagccacgctttgcaaatcaaaaccaagcctgttcaaagcatcaccataagcgctattaagcccaaggttacccacggcattcgataaggctctaccctacaatgtaaaatagttagataacaaccaagaaacaaattcactcaaagaaatgagtcaaaaaccaaaaactgcaaaaactccattggcaaataatacgcttgtttcacattcactctgttgtaatactcataagttgcattccaattcatgatcaaagcatctttaacactttgcgcagtcgcaaagaacgcctttggcaactcaaacttatccggtgaaaacaatggcgtaaactccgcgtggtacttgatactcg

SEQ ID NO: 69547 - DNA, 471 bp, Arabidopsis thaliana landsberg
  unsure (1)..(471): unsure at all n locations
tttttataatgaaatttagtggggagttttgtattngatacacggttatgaaactatgaccaatgatagatgctagttcgatgtaatcacttcaacatgctcacgtggttatttgtggaaccatccatatataacatataaagaaagaaggtgagacattgaatgaagagttcaaaaatatggttgatctatatttggtgctcctttaattcagtgttcctttacttaccaaccaacgaccatatcatttgaattattgctcataaatctctctctctacccaatctctttatttagtaccctattcttcttgactttgtttctttccaaagcttatacaagagatattcattcttaaactaaagtttttcatatatattgaaaaagaaagagaagatttctcatcattttgcttttggaagagagcattttaagtaaaaatattttgagaacataaagagaaactagaat

SEQ ID NO: 69548 - DNA, 1704 bp, Arabidopsis thaliana landsberg
ccgctgttctgactaaagcgacagagacagtgtctatttctggaaacaaaggatcatcacagccggtgcaaggagtaactgtgagcaagggtgaagcaacagaaaaaccctctggggctggggtcaatgcttcttcaagctcagagagtgagttcaaggttatggcggctgatgcatctgtgttctcatttggagatgaagacgactttgaaagcgattgaagaaagataatcaaaagcaggaaggatgtgtacataaaaacagggaatggtaaatcaatcagatgatggaatccatttattgtgttgtggtttcgtgttgtgatgttgaattctacggtcttttttggctttaccgtatggcactgttctttgttttagtaattactgcacaaaattatacattggttgcttacgtcgttgtgttatgactttaatatttggaatcataaaacaatttatagattaatatcaatgatttcttggtttagaattaaagaaaatcaagttacttaaccaagcgacgtaagtattgcgcttcctaaaccatctttatgaagtgagacgatgtttccgtcgaaagtgaaggagtgtatccatatttacgtatccttccatctttatgggagcatcacttcatcataaatataaatttagtgaataatttatccacatgctacttttgttatagcatattttgttgtccatgttttgtaagaaaaagaaactcatttcataacttagaaaattttgataattcaagatatactgctttctgtttttttttgctgttttttttttgaattatatataaattaactgttttatggtttgtatcaactttctttctatctctaatctttccatatacttttgtcaaactatgtctcagctaagagatacgctgacatggatataccagctttgatgctctgacagctatctagtttattttgacatacattttacaaaattttgcttttgttgtcaaaatatattacaagtttctcattgtatcactaaattttgtaaagcaaacaaaaagaaaattaatataaattcacattttaataaattcaggaaaaataaaattacatgtatatcattcattacatgtttcctttctcgatgatattattgttattgaaaaaacaaccctgttacacattttattaagttatatataatattatagttttaccaaattatataatggtatattgtagttattaataaaatgaggagtgtcttatctcttgcaaaccactcccttgccacctaagccactggcacaactcatctcagggagctccaatttgctccggccattgttgctgtctccgttaccggtgaaccttgcggctgaacagtcaggtgcaaaaagtccggtggtctgaaattctctgtcaccacccatcacaggcatgtggactccaatcttaactcggctaacgtagttagacctataagtctgtcccaaaacaccatcgacattatcgctaaggtcttggaacttgaagcctaggtcaaggtgagctagacagtcgtcttccttcacgtcgtagccatggattctagaatcttccatcgttattggcaccactcttgctgtgatcctaagcaaaccctctacttcaacctgaattataaaacatattaattgactggtatcagggatatacattatttaggtatatacttaaaa

SEQ ID NO: 69549 - DNA, 316 bp, Arabidopsis thaliana landsberg
ttataacaaattgaattagaattgtcgttcaattaataagaatcgacatttgattcaagattccccttcgatgaactatatcttacctgcggcttatagccttaatatccatgtaggtgaccttctactgagcgaaatcattaccttctcttcgctcttagcttgaggttcttcttggcgctactgcccagccggggtgaatgtactggatgctgctcgacaaagacatagcagggattatggcacgtaagagatccatcgtacgtcaagagagctttttgcccctagccatctctatactggaatactacgccct

SEQ ID NO: 69550 - DNA, 559 bp, Arabidopsis thaliana landsberg
agaagtagaattttcaaggttaatttataaaaatatgcgatatcaaatcaaatgctaattttgtatgttacgcttacggttaaaaaagcggtgggaataataattcgcgaaaaggtgctctctgacgactgattcgttgatctagattctagccgcacatggtgggccatactctccggcccagtatacacacatccatgacatggcatcatatattatatcataacatacatacacataaattgattagtgaccacatgattagaaagagacaaaaaataattgccgcccgataataataacttctttataaagcaactcttcttcttctttctctcttcactttctctctttttaacctttttctaattaccactttcttctccatatacaaaaaaaacagagaactcacaatgtgcgattcagattttctctctcgttgctcttcctacgaagcagacgttgattccgacagcgagatctcgacctccagtttcagttcttgttcgtacagtgaatctgaggaagaagagatcaacaatggttttggtgttgttca

SEQ ID NO: 69551 - DNA, 467 bp, Arabidopsis thaliana landsberg
  unsure (1)..(467): unsure at all n locations
tgaggacattttattctatgacaagtgtactcagaacaagtctctcgacatggagggatatataggtgctagattcaaactctattacaatatattttcttcgtaaatttagctcatgacagctcaagctaaacctacattaaaataattccacacggaaatatacaaattctacaatcatgattagcacgaaatatgtatgaagaaaagtctgaccaaatatttttatcttttagtatatactactacacgtgaaggttttttttttgtaaataataatgctaacgtcaattcatatttaaatgcttggtggttttggattttttccgctaacctaatttttttgaaataatgacccaaaacaaaaacacagtttttacatatattntgactttntcgaaaaacttcaaatttcgctgatgaaacttaatcacgtattacggggttttactatttaagacactaga

SEQ ID NO: 69552 - DNA, 2984 bp, Arabidopsis thaliana landsberg
aactgcaggttatgcaaataaggatgtcaacctcaaaatcatgtagttctaaggacttgaagattaagaattccccagattctaacaattttacaagctaaacagttgaagattctctactaggacagtcataggtttttagaaacatcgaacaaacgtaaacatattcctaacaaatgccctttataagtccatatcaatatcatatcagctgccactaaatccaaaacatctctttcgaagttatcactgacaacataagctaatgaacacaaatatctctgttgcaaagtagaagagaacctggcgggacaattcttggtggtacaatgcaccagcagattcctttgtaactggtgagataataccaacgctcaacatccactgttgcatttcttctttggaccccatttcttcatcatcagttgaaccgttctgactactaggagcagacaaaagcttctgccgcattttctctgccagactcaccatctctttagccttactctgtaaacccaataagtggacaagaacttagacacagtttgtcttgatcacaaaacccataatcaaataacaagcctttccttctactgattaagagtaatcctataacagttgcaaataaactcttcaagatcacgcatcacaaagagcaaactaaccaccaaaacgttaagaaaatcatgttccagacttatcttctatccataaattttgtaacttggtataacaatacatgatttacatcggtaaaaaggaagaaaaagagttgtaccataagagcattcaaatcctgaaaagcatcttgcaagctcttatctgtgctctcccactgatcttgctccttcctcaaaatcccagccaatcccaccatcctcaccgttccatcgtttccatacaaaccttgcgcaactgttccagatcctgactttgaagtctcactctcgctcttctcctcttcttcccatgccctacctctccaacattcccacaatttcgacaaaaagccatcaaaatcccctttccctctaaacacaatcgttacaacaatcgaaccgggatccgcttgaaatcggattctaggcgaatggaacatagacttgattgatttcttatgggaatagatgtgagtaacggcggagagcggaatcgaagaaggaacagattcgtttgattgagaaggaatccatatgagacgatgagtggtaaggattagatttccagacctcaaagctgtgaatcgcggcggatcatcttcggaatctatatcgatggaggagaggaggaaacattcgacctcattgcgacgaagcactggtctaccactcgtagtcacctccgcgttctcaaacaaaccaccgattgcgatgctgctgcttccactagccatggagactcaattcggaagcagatatatcatacagctgcgtttctctctagtcaaatcaatagatcggttgaccaattcgaagcttgattcaattttaatatctccgatgaattttccggcgacgattgaaatgcctgaggtcaaagagattcaaccgaagaaaacaaaacaaatacgcagcttttgtgtagacaaccaaacaaaaaattaataaaaatactcggttttgtagaatcttacctcaccatcgcagattttagtagcttacaatacagaatctactagacttcttcaaaatttggcttgaatcttctccactaacgctatagacatcttcgatttctcctcaattaatcttcttattcattttcggctctcgtatgaagaagaagaagaagaaatgaaagcaaaatacgaaatccctagacttgtagacgtgtcgttttactaaatccaatcccatggattttatttgtatataaagagttacaccagtaattgtgtcaataatgtttatatggatcagtggtaaaagctgaattaaacgttcccaagatcaccggttcgagattccactttttaatttttttcaaaaaaatgaacaaaatagcaaaacgacaatacacacgtgtcaactgagtcatttgtaatgattttaggtataaatgataaatcagcactaagcatttgtccaggctgaaaaacgtactttttgtatagttcagataaaaaaaaaaccttctccccactaaacacgtctagaatcaacctcggtttagtaaaattatatttcagtccttatgagaaaaaacatattacgataatagctcatactttttaatttaacttttgaatccagatttaagtgatgttgtagtttctgaccattcaatccttctttacaccatacaatattacaatgttgaagataatacgaaactaaatgaagaagtggagaagtttcatactaagaattaatgacttttcaaactagacaagagtaagtatgaagtgattgatgttgtagtttgtgatcattcaaacatatccttctttcaccatacactgttgaagataacatgaaactaaatacagaagtggagaagtttcataccaagaattatatattttcaatcaagataagagtagatatggccatctttgagatgtgagatagaggagaagacttattatatatatactagctaaagacttaagtatgaggatgatatatgaatgagaaacttcaatggttgattaaagcgttggacacaatgcatgtgatgacgaagacgttggaatcttgagataaggagttttttttgggtttaaagaagaatgtgttgtactattgttattgacccatattttgtgtcaacgaaacatcaaaaacatctttaagattcaatttataattatgtagtttattcatgttgtgtgtgtgataaaattaaatttataagtatataaaatcgatactatcacatgcaaaacatgaataagtttatcgttataatttataaatggttagttgctaaaatatgttcttttttttttgtcaaagctaaaatatgttcacggttgattactt

SEQ ID NO: 69553 - DNA, 717 bp, Arabidopsis thaliana landsberg
acaatatttctccaatattttattcgcaaaaattaaactaaatttttttttatcaaaaataagttttgtttgacttgctatagtcaaagatatataatccaaatatgtcaactgattaaatattaacaatataataagaaacataaattcttaacatataaactttaatgtagatgcaaggaaaaatatctatatgtcaatgcatgctagttttttttttgttttatgcatgttagtttgctccaaaataggacaatgatatacagtataccacattggtgcaatcgatgcaaagaatacacatgctgatgatagggccaagataatggacgccaactctctttaaatataaatctcttactcttaagcccaaaaaatgtagttgcatgatcgatcttcctcaaagcaaaattcgaaacattccgatattcatataacgaaaagaaacaaaaatacactcatatcatatatactagtaacacccttaaaaaaaacctacaattacattaaaaactccaaatacaaaaaaaaaatatatatatatatatatatatataaacaatcacaccccaatcctttgacatttaacatcatgaccaacatcaacactaccaacatcttcgaaattgaccatattaacatcaccaacgacgatcacattatcccctactgtcttcctctttggctttgcctcttgaagaatcaacaacacatctc

SEQ ID NO: 69554 - DNA, 895 bp, Arabidopsis thaliana landsberg
ctctacggaaagactacaactgttctttgtctttacatttcttttgtattcataacttagaatgatccttcactttccatgtttggtgtttggtacatgaatgttacatgtttgtgcttataattgctggtcgttgctactaatcaattactttcaatcgtataataattcttcttcaacatactaaactcctaattatcggtttcttattagtataacaaaactcgcaagggtataatggtcatttgaatagcactatgtcatttcttttacatttttagaaaattcttcttcataattaagacaacgttcatctccaagatttctctccattgtcgaccttcacaaaataactatctctctctgtgttgcatgcgttagtactttcaatggccacagaacaagaattcacacgcgcatcacgcttctcacgtgactcaagcagcgttggatattactcagaagaagataacacggaggaggaagatgaagaagaagaagagatggaagaaatcgaagaagaggaggaagaagaggaagaagaagacccacgtatagggctcacgtgcggaggaagaagaaacgggtcaagtaataacaacaaatggatgatgttgggtcgaatacttgacccgagatccaaatgggttcgagaatggaacaaagtctttctccttgtatgcgcaacgggtctattcgtagacccactttttctctataccctatcagtgagcgacacgtgtatgtgtctcctcgtcgacggttggcttgctcttaccgtcactgccttacgctccatgaccgatcttttgcacctttggaacatttggattcagttcaaaattgctcgccggtggccttatcccggcggagaaagcaacggcgaataccaaca

SEQ ID NO: 69555 - DNA, 541 bp, Arabidopsis thaliana landsberg
taggccacaattttgatgccagcatatacatttcaaaatcttattacttactaagcggtcaacatacgtgcacggcacaagaacgcaaggcccaactcctctttctccgcatcctaggcctcaggagtccagtcccacgagctcgccgtgaagaggccttttgatagcctatcggtatacatagctgcttcgtaacgaagacgctgatcgcttgctactgctctagtaaagacgaattttgtttcttcttcgtcctctctaagccgacgatctctcagctgcgtccacgacacctcagatcgacgcttcttccagtcagcatgagcgatggaagtgccgcttgcgctcaacatggtccggatgtagtcgataattggatccatgcggattttaagcccacaatttgtgtggtgcttgtcgatttgatagttggggcactgctttagagtgtttagggagatcatcaatgttgatcatagcaccgtctggcacagcttcaagagacggcgaagtgtagtcgacgaggaacaatagattcttt

SEQ ID NO: 69556 - DNA, 532 bp, Arabidopsis thaliana landsberg
ataaaacacagtcagaatcgcgaagaatgtgcgagatcgttcagcttcgagagcttctttgttcatcttaaaaacttttgcaatatcaatctctcaaattaataacctttttataggtatgtattaagggattaatattgaaaccagatcctaattcagttctaattaataatccaaaaattcgatagattaaagaaagtattgggtctgaaacaaagcccccagggcccaaaactagagcaaccacaagttcgttcttttaaagatacacttcccggttttgtttatcattagtattttgggttgtagtttctctcgttttcaatgttttccaacatttctatttaattgttactcgagcttgtaaattactaattaaacaaaaaaatagaagatgatataataatttaaaaataaatgtggaaacagaagcacgtggctgtgtctgctattgtagacattgtaaaaaaaaagcctcaaaggagaaatataatcccaacggaaccatgcaatgatgagattaaccttttta

SEQ ID NO: 69557 - DNA, 548 bp, Arabidopsis thaliana landsberg
caagggcctccatctctaataatcttccttttccgactttgacaatgatcgtcttacatgctcctattggggagaacgggccaaacacatatttacttgcagctggtttcgattcctgctctccgtttacctcgccatgtttcttatatccaatctgcttgcggattgacgaacaatatgttgtgttactctttgccctcaagtttgtgatctctgttccaactacccgcttcggatctccggaattaaataaccttaatcctctttcagctatgcttttggaccctaaccacctatatgctggtttcctagtcactggtatatgagtctggagaaagcaaaaacaataatcatactaactacaagatgatacactggaaatttgcaagtattacaatggtaatgttttggcttacgaacaaagctcttaccttcttgattaaattcatcgaggcaaatacattcgcaatgtcgaacagccttctaactttagctgttaatgaatttcagaaatttggttggttaatggtactgcatacttgtgagaa

SEQ ID NO: 69558 - DNA, 417 bp, Arabidopsis thaliana landsberg
  unsure (1)..(417): unsure at all n locations
gcctttattccaattcaagggtttgacttgtctctgctctttagtataaagctccaaacactttagacgattttttctcggctgtattattactttgttttagatgataaggttttggctttcttatcttattgcaggacacatatgaaataacattgaaacattagatggatgatgactttacagatggatgaaactactgcttcctcttaatgggagcgagccaagtccatatatgatgaggttctctctctactacacttacatngataaatttggtttgtactagtttttggagtcatttaacattcctcatatggatgtaatcttaagttaatgggaggggcatgtttaggtcgatctggaaattactaccctatatcattgtaagattttgggaccgaattgaattgacta

SEQ ID NO: 69559 - DNA, 722 bp, Arabidopsis thaliana landsberg
cccagtagcccttgaatgatcatccactatggttctttttttctaaaaccttctgttctgaggtttcaactgaaaaagggcccaaaatgtcaatgtgaatcagatcaaaaggttcatcacaaatgttattatgagatttaaaaggtaagtgtttttgtttagccaaaggacagattttacaaatggtctgattgacctttttattcttatgagtagggagtcaatctgaaaggatagcagttttagaagaagaaggatggcctagcctgttatgccaagtgtgagaatctgcaataacagaggcactaaaaaaagtagtacctgaaagagatggatcagaatccaaaacatagaggtttgatacttcacataaattttcatttttacgaattcgtctttctaaattcaactattagcatagcattaagtagtaaacattttacactaggagctgcgcccataccacacacatacatgcaaacataacaaatcaaacaaagacaaagaaaagctatttctagtatacttcttcacttcagataatccaaccgagatgtgattgcgatgatgctaccagaaggaggtgatgtcttcgcgctacgatcgaaagatcaagaatcaaataatgacttttcgaggaatcatgttaacgaaacgaatccaacaggcttgaccgcatacctactcctgaaaggagtcaagcttatttacttttagttact

SEQ ID NO: 69560 - DNA, 547 bp, Arabidopsis thaliana landsberg
  unsure (1)..(547): unsure at all n locations
ttgacttttgaatagagatgcaataattactctttaccaaaattacgtgtgtattcatcgtatttttagaagattttggattattcctaaaattacatgttattcaaaggataatttttgaatctctcgtcaaatcctactatgttattgaacttgaaatttatgtaaaagagttcaaatatttacttatctatattaacaattctaaaactcatatcaaattatttgttattcaaaatatcacaaattttgattttaaaaagttaatgaaactgattctaatttctaagagatgttttatacgtttttagttatgaaaaagggttttgtgcaaaaaaaacttttaaagttacatatttttgcaactttaccataatcttatgaagttcaaataatatgcaatagtttatttttacattttttggacgtagatggtaagttgcaaaatatgtgattaaagaattttttggacttataagattattaatcttaaattntattataaatcttcgcaaatcaccaatcatattttgnttttaaatataaa

SEQ ID NO: 69561 - DNA, 642 bp, Arabidopsis thaliana landsberg
  unsure (1)..(642): unsure at all n locations
ttgcatgcctgtagagaggatcccctcgagtggtctcctagcgtgcaggatccttgtcgagcttctagagtgaaccggtgcttgcttcctccttcgcctgtgctctctaggcttgtgagaagaatgcctcgctggtgtcagggaagtgtcagcttcccttggttcataggcggattgcctgggcacttcgtagacgacttgactcggctcataggtggagtcccttggtgcatccgaatcatagcgtctggagggcatctcttctggagggtctactcttggtgcagcggtgccagaagaggaacagctcatcttcttgtgtatggacgtgatcatcttgaaacacttatcaatgaccttgtcctggaacttacaccaggcttgcaccttgctgagcttctcatgacactcagtgagactcttgctctgtcttgatggcggcttgtgctctacgaagtaaaatctcctggtgttgtattctccatatccaggtccacttcttcctcctcggcttctacttcttcggcttcttcttcttcagcgggttgctcattgttgtcacgccatatagtatctcgactggtggtttgaagtcgatgttacctggtcagcgatcgttgtgacgtntggtaggggaggaga

SEQ ID NO: 69562 - DNA, 516 bp, Arabidopsis thaliana landsberg
  unsure (1)..(516): unsure at all n locations
cgccacggcgggcgctcgcttgccagatgccatctctaccttgtcagattgcgatttgttcgcatcgaccgcacctgccgccagccattccggccgcgggcatcgcatctgcatcatgcgtcgacacaacccgcccatgtaagagcacttggccgcgcgcgtacagcgccaaaagtcacagatcggcaaaaccgggcgccctgccggtcgccacgatccagatcaaacactggaaagcctccatgcatggttgtataacacacgttataacgtaaacaggaagagcaccatgaaactgaagatcaccggcatcggcaattccgccggcgtcatcctgcccaaggaactgctggcccgcttgcgcctggaaaaaggcgacgagctgtacgcgctggaaaccccggacggcatccgcctgaccgcgttcgatcccgaattcgcggcgcagatggaggtggccgaggaagtcatgcgcaaggatcgcgccttgctgnnnnnnnnnnnnnnnnnnnnatc

SEQ ID NO: 69563 - DNA, 169 bp, Arabidopsis thaliana landsberg
caaacagacagttagaccaaacaaaaccacccccccattaccaacaaaaggcgacaaaaaacgcgcaaacaccgaaaacgaccatcaaaaacaagaatactccaaggaaacaaccaagcaagaagccatcacactaccccgaagaacaagaaggatttcgaaaaaaaaa

SEQ ID NO: 69564 - DNA, 491 bp, Arabidopsis thaliana landsberg
gtgctggccttcggcgccgtctacgtgatgaacggtcagggcatgaccatcgacgccattaacaccaaggccctgccgcagattgttgaacttggcgatatcaagtcttccatcaaggaagccaatggccagctttataacgccctgaccaagaaggcgaccgacccgacggctaacgcctcagccaccgtcacccaggtcaccgaagatctcggcaagatcgaggcccgcgtcaaggctgacgccggcaagacggccgatccggcgcagaagaagctgctcggtgatctcggcaaggaagtgaagacctataaggaagccgtcgagttcgccggttctgtcatggatgtcgatttcgcctcggtcggccccatgatgtcgcagttcgacgatggctacgccaagatgtcggacatcagcgaccagttgatcaaggccaatgtcgccgccgccacccagtccgccaaggacgccaaggccgctcaggccac

SEQ ID NO: 69565 - DNA, 750 bp, Arabidopsis thaliana landsberg
  unsure (1)..(750): unsure at all n locations
cgtccatccacaagtatcctacagcaaataaagatttacagagaataactgaaagaacataaaaccaaattagttgccattttttggaaagtttgtctataataggaagcgaacaaaaggaatctaaaaggacttttatgctgcaaaagactgggatgggaaacaaaacagaatgtacaaaacggataatacgtgtaaccagcaaaccaaagaccaaaacttcagtacggtccgtgcgccgtttttcttctctaccatgacgaatcaattgattaaacgtgggcattattctctttcctttctttttccccccattttgtgccctatcactttactcccgatccgaagcaccccttttccattcatatagaaatccaatcgtcaaaataaataaaaagagtccatcatggaccaaaatctgcccgagacaaagctgagctgtcaaataagaccaacaagggataagatagggaggctcctctaaagctggaacctcttccaaccccagcacggctcttccccgtcgactcctcgtacgcgtatcacaggggcaaacacgccttcaaaacatctggatcatacaaacttctcattcagtggaaaaaaccttaccaagactagttgcctcaacgaattgatatgcttttgctttttgtgacaccggcgcgaatgctgaatacggaggaatacaatgaaatcagaacanagcaggtagaccaagctagcttacagaaattcgagggaattcaa

SEQ ID NO: 69566 - DNA, 120 bp, Arabidopsis thaliana landsberg
  unsure (1)..(120): unsure at all n locations
gggggggcgggggcccccctatcattaataaaggggggggggggggggggggnccncccccccccccaacaaaaaaaagaaaaaacaacacccccccccccccnnccccccccccccccc

SEQ ID NO: 69567 - DNA, 433 bp, Arabidopsis thaliana landsberg
  unsure (1)..(433): unsure at all n locations
ttgtttgggcctatataaacannacttntnaaattatactgccatatacgtcgattctctggacaattggaactttttaaccgagagcaataaataataacgcgaatggggaaatgaaacaaaccaaggtcacaggagacaacaacaaaaaattccagatatacacacacaacacacaacgggaatacgactgcgataatacaattaaataagccatacgtcgatataattaaaaatatgacctaaagtacatcatcaatgaacaaaccacccaaaagaaaaatccagacaactactaaacaaggaccgactagcatctataccggcaccagagaaatattcaagaagaaacaaatgaggataggcgacacgaggtctcattgagtagactaacccatttctgacctccaaccaaactgtaaaaaatgcaacg

SEQ ID NO: 69568 - DNA, 480 bp, Arabidopsis thaliana landsberg
  unsure (1)..(480): unsure at all n locations
taaagtataatnctatgcactatggtttgtgaattgtgatcattactggctatgtcaaataactattgatggatcggagtaacatattcttgttatatgtttaaatattgttacagaaggatggcgctggtttgatgagaacactaagaattgggggtttaaagacatgattcccgcagtcatccttaataacgtaaatgttgggttcttgttgaatggggagatcacgattattgctgaagttgaagttcatgaatttattgacacgttaaatgcatcacaagttgaagagcttagtgatgattcctctgaagatttgcagaacaaagataatgtaactatcgaagtcaacggctttcaggttcttgattcgcaggtaattaataagctcttttgtttcaatatttgagatagaactcgatttgacattttttgtcttcattatcatcacaggttgatcaggtcaatgcaatctttgag

SEQ ID NO: 69569 - DNA, 391 bp, Arabidopsis thaliana landsberg
  unsure (1)..(391): unsure at all n locations
gggcggcatctcggcgctgtcattctccttctganncggcggaattttgtttccctcgcccttaccaccacctggccctcttttttcggacaagtcaatcaatgcataaaggaacatatccannnnnnnnnnnnnnnnnnnnnnnnnnnnnnnnnnnnnnnnnnnnnnnnnnnnnnnnnnnnnnnnnnnnnnnnnnnnnnnnnnnnnnnncaagagtctccgggaagacctggaagtcgactcactcacgacgatcgaggtcgcggtagcgattcaggatgagttcgacatcgaggtcgaagacgagaagctgaaggaaatgcagaccattcaggacatcgttgacctggttcagtccgcgggagtcgccgcggcttcctgacgaccggga

SEQ ID NO: 69570 - DNA, 381 bp, Arabidopsis thaliana landsberg
  unsure (1)..(381): unsure at all n locations
tttgctgccaaaaagaaaaacaaaagcacgatttattaatgcttaacgcagagagagagcgatgtnnnnnnnnnnnnnnnnnnnnnnnnnnnnnnnnnnnnnnnnnnnnnnnnnnnnnnnnnnnnnnnnnnnnnnnnnnnntacaaagagtaatcaacgttattcgtcactatcacacattttatgctgcatgtagaggtaacaggttgaacgcacgttatacacatgggtggttcattttttctttgaaagaattgatatgatggattaaaaaacacatctacctaacaaaaatgaggttatcgctctacaattgtcgttcaccattcaacacttttactggaggacgacgtattacatacttacgatgtcaattacatc

SEQ ID NO: 69571 - DNA, 522 bp, Arabidopsis thaliana landsberg
atgaaggaagagaagcgattttaatactttctagatatttccacgatcaataccgacttccttatcttttctcttggaagtcgaacctttatctgtatggaaaagagggcttctacctatacttggttgagaaagggctgaatggtccaggacaagaaaaagccactaaaaagaactgtaggtcatacagggtagtccactttatctttatccgtgactctgagtacaagatttccgggatcaagaaagtcgcaaataaatatgctgggctggactcttttctcgtatgcccggaaaacgttgtttcgatagaactcagcttgctgcatagctcgtctaaacaaaacactccagatccgcacttccctttaaatatactccaaagggactaagcttgactaagaagggctttgctccgcatgagacaaagttatcaaaaagtacttattccaatttagataaccctgattagaaacacacttgaccgttttctagcttgaaccagaacaaacattaaacgcc

SEQ ID NO: 69572 - DNA, 644 bp, Arabidopsis thaliana landsberg
ctcaagtgcattaaaagttgacttttgatttttgaatggttggttcaccagacgttggatgagaaagtggaatagtgaaaagatctatgtatcttgtagacgtgtcatatactaattggacacatcaaaatacagaatgaatatatctaattatgttatgtaattttaattgttcagaaagcataacatattattgtagataaaatagctaactgacaaacaagtgaaaacagaagttgctttgacttgtgttactgctacaaggagcaaagaactagcgtttttcacatttctattatttataaaattgatattaaaaatatgtattgattaaaatgttcagtaacacttttaaaaagttggaattattggacgaacattcttattttttttaaaatgaagagataacttaacaaaagatggggaatggtagaattgttgacctgaccggtaagtaaagaatgagaaaatggtttggtgtaatcaggagaagaataagatgtttcacatttgagttattacattattgatgttaactgctagccaagtatcagccactagccactataagtttccgatttaattaatatgtctataaatataatgtagtagatctggtatcacatatcgagtcatcgatttgg

SEQ ID NO: 69573 - DNA, 536 bp, Arabidopsis thaliana landsberg
gctaaggggagagagaagcatcctaatgtggtgaagttaagagcttattattgggctcctgatgagattcttttgtatagtgactgcgtgaacaatggaagtttagctgatgctcttagaggtattacattacttcttccttcttctttttctgctcatcgaatgagactactaactaaagtttgagatccgggtctgttctattgactttaagaaatctatgtagactttgactttgtcaacgctagattagacattactaccttagtgagagatgagattagatctgagagatagtttgtgggattggcaaagcatgagtggaccaagatttctctctctttttaaagctagtttgggattttagacagccaaaatgtagacaacggacttaggaaagagacatgtgttgtgagaaaattcgacatgatcgaaatgttaatctctatagaaagcattccaatgtgatgtaagggtggtggactcttagagtttaggtctggagaaaaaatcgcttacggatgaaacacagatgg

SEQ ID NO: 69574 - DNA, 394 bp, Arabidopsis thaliana landsberg
  unsure (1)..(394): unsure at all n locations
ttttggcgggcgacggcgagccctgggacgactttctgtcttgaccgatcgagctcgtcgggcggcgtcgccagctcgccgccgatgtcgaagatctcgttctgcacgaccgcgatccgcgccgtgaggtcgtcgaagcggngcgagtcggcggtgagcgtgtcgcgccagacggccaggaaggcgttcagctcgtcgaccgtcccataggtctcgatgcggagcgagtccttcggcactatttgtccggaggcccagcatcgttggcctttgtcgccgactttcgtatagatcttcgtgagtcgcatagcggtagggatactagaccatagaaaaacgccgctgtcctcatcggccagcggcggtacttgtcgtcgatagttaacctgggaaa

SEQ ID NO: 69575 - DNA, 183 bp, Arabidopsis thaliana landsberg
cacccgggaaaaaacaaaattggaggtgagagaccaatcacaaaaaacagatcggaagagagggccagcacaatcgagagaaaggcgagacgaaagaaaacaaccaaactgcaaacacgtgcgctatagcgaacaacgaagaacgggaggatggggagataacagaacagagataagaaaaag

SEQ ID NO: 69576 - DNA, 498 bp, Arabidopsis thaliana landsberg
gcgtgatggtattcgctaacgctggcagcgctacgcgattcgcgacgacgacagcatcgatcatcgttcctacactttctgcgtgctcgacgaattgcatacgtcgttacgccggcgcgacgtgttcgtcgcccccagttggaagtatgccgacccgcgcgcagggctgttgagcggcaacgaatgggagactgcgcgccccatcatctgccgcacgctcagcttgtctccaacgccctcgtcggcactcgtcgcgatcaccaaagaactcgatgagacctaccgcgcggtagcgtcccgacttccggacaatcctgcggtgcggttcgaaggcgagaacgacctggtcgtcagctccctcgacaagcttgaagaaccagcgtctatgctggccttgcgcgctgcggttaatgagcgttcgccacgcgtggacattgaagaggtattgttggagattgcagccggtaatggttccaccgatgcctttaccgatttaac

SEQ ID NO: 69577 - DNA, 379 bp, Arabidopsis thaliana landsberg
ccccccccctccccccccccccccccccccccccccccccccccccccccccccccccccccccgcccccccccgccccactcccccctcccgctgcccacccactctacagccatggcctcgctcccctcgctcccctccgccgcccgtacgcgccggacgtaggaattcatagtctatagggcgcccaccctgtcgctcgcttccggcaattgctgtaggcagccgctttataccgcaccgcgtcagactgttgtgtacgaagtatctagacttcggccgccacccgctgccacacgggcccccgctagcgctcggctggcgcagtcagctccctgcagaaaccacgtccggacattgaagtcaccaaaggggcggg

SEQ ID NO: 69578 - DNA, 477 bp, Arabidopsis thaliana landsberg
  unsure (1)..(477): unsure at all n locations
tggtgttgccgtggctctcggtctgcgcgcgctctatctttagggtagcgcgctgnggccgggcgagtgggcctatttgggcgcaggtcctgctttcctgcgcgattctngacctgggcctgtactcgatgcaccgcgccagtcacgctcacggtttcctatggcgtctgcacgcgatccatcacagctccgagcggctgtactggctcaacggcgggcgacggcatccgctgtcggcgctggtcctcgcggtgccgggcctgaccgtgctgctcgcgctcggtgccacgcccatcgcggtcggtgcctggctgagcttcatgagcgtgcacctggcgttccagcacgccaatctcgactaccggctcggcccgctgcggcatctgctgggcgtcgccgagatgcaccgctggcatcacaagcgcgagttcgaggacgcgcaggtcaattaccgcgaggtgttcctgctctgggatc

SEQ ID NO: 69579 - DNA, 1788 bp, Arabidopsis thaliana landsberg
cttgctcctgtgttgagagcctaatccaagattctcttccatggcttctattttcagaccttcttcagcttcacttgatttacgaccaaaggtatcaaacaaataagcttctttattcactcctagcgttaggttactcgatttccagaaattgttgtttagggttcttaccttttggatgatcttgagatagtcctagacgctaatcttgtaaatttggcaattaagggcttcttttctttagttttcaagtaattgagttaaaaggagaaattaggattgtgagtatcattcaaaatcgattactttaccttggattgatcattgatgatgaatcttttttggtatttggaaggttatttgcacgaatctctctacgaaagagcggtttgagtttcagaagaagagtgtgaggaaagaaaggatcaatgttaggttttatagcttgaaggctaaggcacaaggatcgtcaattgaagggattagtgttgtacaagagaaagagcttaacaacaaaaccggtaattaactgataataagtaattgtgttgattgtctgctggttagtggttacaacattttaagcaaatgtcaccatttatctatagacactaagctcggattaccagttttgattgttgattgttattgtagattatggagttgttggggttcatcatgtcggtctgctctgcgagaacctagaacggtcactcgagttttaccagaacattttaggccttgagatcaacgaagcaaggcctcacgacaagcttccatatagaggagcatggttatgggtaggttcagaaatgattcatcttatggagcttccaaatccagatccattaacaggtagacccgagcacggaggccgggatcgacacgcttgtattgcaatccgtgatgtttcaaatctgaaagagatcttagacaaagctggtagtttatatttttttattctttcttcttagtttcttttggcttaaaggatgtttcctttcgttctgaagaagattttttgattttgtaggaattgcatatacaatgagtaagtcagggaggccagcgatatttactcgtgatccagacgcaaacgctcttgagttcacccaagtttgatttgagtctatttgtagatgaatcctctaaactttcacttgattatcagttgtaaatgctcttcatatagaactgcaaaaagcaaaccaaatccttgttgacttattatataataccacaatacatattcacagagatgatacacccgattcaaacaagttcagggtatttagtcaatatacgaattagactagactgtatatatattagtgtgatcagtaggagccaagagtagtggagaggtctaagcgtgaacgagatcgccactctcgtatagccgatctgagagtgtggttcggtgtaagatcagaatgtttgagccgatgcttagtaacaggagacacatcttgatgtttttgaatccattcttttatcgcttttcgttcgtatgtgaatccatctgctgctatttgtggatcttccattatttcctacaatcaaccagaatcaaacattttaaaacctgagccatcgagaattgtggttggtgtgcatcggttattcgatttaccttaagaattggacagtaatagtgagttggtgctcgtgcgttagcttgttctgtcttgagtctactatttgcagattcaagaatacgtttgagagcaggcaagacttgtgtgctaagatctggtctgtctctgcatttgagctgcgaacacctga

SEQ ID NO: 69580 - DNA, 207 bp, Arabidopsis thaliana landsberg
ctggcggtgaaggcgacttcgccggcgtcggccatgcgtgcggtgggcgtttgccacaggccggctccaccccatacgctttgcgtgggtgcatagccggttggggtagtgtcggccagggccggcgcggcaatcaccagcccggccaacaggcaggcgcagcgacacggggtggaaacgcacaagcaacgcgtcggacaggtgcgg

SEQ ID NO: 69581 - DNA, 431 bp, Arabidopsis thaliana landsberg
  unsure (1)..(431): unsure at all n locations
aacgacacctttcctttacagnnctncgcggatcggaccgatgggcggtnnnnnnnnnnnnnnnnncagttgctcgaaatactgatataagttcttgtttttattggataaaacggccggcggtgaatcgttgcccatggagccgatgggttcttcgccattggccgccatcggcagcatcaggaatttcaggtcttcctgcgtatagccaaaagcctgctgacggtcgagcaaaggcacgctgctgcgtaccggctgtgctttctggctttcgacgtcgtcgagtttgacgcggatgcgctccatccattccacgtacggtttgctcgaagacaacgactccttcagttcctcgtcatcgatgatgcggcctttttcgaggtcgaccaggaacatcctgcccggctgcaggcgccactttttgatgattt

SEQ ID NO: 69582 - DNA, 498 bp, Arabidopsis thaliana landsberg
tggtactttctgtgtggcccaagggctcttttagtttctggtcaatatgggatgcctctatggaaaaaatgacttgtagtgtatattaaagttacatagatttctacatgagcacagatcctaatacaattcatgtttatccagaaattccaaatgatataagaactcactcagtgtcaaaggaggagattatctacagatagggtatatatgaatgtttttttgttgatgttgttagaaattatggcaactaagccagacatcatggcttggtcctctaaacctagcatcgaggaggtagaaaaaggaggactgacacaagttcgaggttagctagatgtctatggagagttctaggcctgccagggctacatagcaggattctgtctggatcttggttacgtaaaatacaattaatgatactaaaaacataaggtcttgttgcaatccctagagatataatccattaagcttacaatcacgatattagtgtatacc

SEQ ID NO: 69583 - DNA, 476 bp, Arabidopsis thaliana landsberg
  unsure (1)..(476): unsure at all n locations
tggaacgcgtccgtgccaccggcatcagcgatatcgtggtcccggcgacagcggcatccacatggccgaaactgcacgacatttgcgcaaaccagaccatgctgcatgccgcctacggcctgcatccgatgttcctcgacgtccaccgcagcgaccatctcgaccagttgccgcgctggctggaagagcatcgggccgtcgccatcggcgaatgcgggctggactttttcatcgacaatccgcgtgccgacgaacaacgccactacttcacgcgacaactnnnnnnnnnnnnnnnnnnnnnnnnnnnnnnnnnnnnnnnnnnncgccgcgccgtcgaggaagtcatcctcacgctgcgccgcattcgtccgccgggcggtgtcgtgcacagtttttccggcagccgcgagcaggcgcggcaactggccgacctcggttttctggtcggcctgggcggtccggtcacgcatgcacgc

SEQ ID NO: 69584 - DNA, 221 bp, Arabidopsis thaliana landsberg
aaaaaagatatcaattgcaccgcccattttttatcccaaaaaaaaaaaaaaaaacccgcgggggatcatctgtcaatcaaacgagtaactactagtaccgacgcacgcagacactgtcaactaatataaagaatgacacccatggctgtgcatccctacactaaatctaacaaaaatgacaagaagcaaatgtcctataactttacaacaaactatacaca

SEQ ID NO: 69585 - DNA, 3085 bp, Arabidopsis thaliana landsberg
tgatgaagtgctctcagcatcgctaagggatttttgatgctcttcttcagtttctccttgaggcctatcaagatacacagttgcctcttttgtatcagacaagttacatgcaagattctaagtaaaccgattctgagacatgttacataaagattttgagtaggctaaccagttataaagccgctggttatagccacatctggtataatactccgaatctttttaacaagatccaaataagcttctctggtgtaacctctacgcatttgttctagtattctgctattaccagattgtgcaggaagatggatgagattgcagatattatgtctatctctcatcaaatacagcaactcgtcagggtaatctttaggatgaggcgatgtaaacctaaaccgcatctctggaaactctacagagagtcggtccaagagatcagcaaatcgcaaacccatgtttttaactttacaccggctcgagaatccctcactgtattcccagttagcacctgactcacgatcagctgaatcatcgttatagctgttcacattttgccctaaaagcgtaacttctttcacacccgattcccacaactccccaacctcgcggattatagattctacaggacgtgatcgctctctgcctctggtaaacggaacaatgcagaaagcacacatgttgttgcagcctctcataacagaaacaaaagcggtaattgagttttcagagattcggacaggggatatgtcagcataagtctcttctagagaaagaagagtgttgattcctttttgaccatagtctacttcttccaatagcctcgggagatctctatgagcatgaggaccacaaacaacatcaaccattttatcagaatctagaatcttgtcctttaatctttcagccatacatcccaaaacaacaactttaggaggtttgagagattttgctcttcctgtagcagcatttactttccattctcgttttaagaaccaaaagtagttaagtctttgccatactctttgctctgcattttctctgatagcacaagtgtttacgaaaatgacttctgcgctctcaggatccgtcactacttctttataaccagagtttttcattatcgcaaggactatctccatgtcgtttatgttcatctgacatccatatgtttcgtgataaatccgaccttttgatgcaatgtcagaatctagtgtgcttctaagagcaagaatgaatccgaaaagaaaagtattagcatctatataagctatacagcacaatccacaatttgagagtaatcgcttgtaaaagatagaactgtgactaacataatcttctacaatctatggattgatgagcaaagagattgactttaatggttcctggaacttaattagcactctgattccttaaatttctaaactttaggttctctaaccaatggccaacaccaattaagttataaaaagaacaatggggtttgaaaaacagaggacttactcagattcagtttcgggagtggtaagagaagcgtgtgcttgagcgttggagacgaactggtgaaggcttggaccatcaaacttaccggaactagcaatttgagaaatagagaagcttctagaaagatttaaggaagatcccttcttcctattgatcggtttctgtgtgagacgatgggtgctgctacggcaacgagggagaagagcagaggaagaagatgaagaagcatgggttgcttttgaggagaggaatctaagagcgaaacaacgttgtgtagaggctttgaaacagagagagcaaccatgagggttactgaggattgaggagagagacgagagagaagaagacgccattggagagattgaggagctccaaagtctccaccacaacaacgggaggctctctcaagcttagggattttacaaaatctactccacaataaaacgcagcgtttagttatccaaactcaggggtaatattgacattcgctctcagcttctgctttatcgcttttaacgaacattttgttggtaagaacgaagaagacgtggagaagtagaagaatgatgatgcagaaattgagaagatcgggggagttcataagatttggatgcaaatctctaattagtagccgaccaaacaaggactcagtgtcacgttctgtgtcaggtttgatctccaatttgacttttgtaattagattgagagaccagagatggaaaaaaattgactttgcttttgtaattagaatgagagatgaaaaaaattgaactttgcttttgtaattagataaaaaaatattgatcttttctttagaaacttgacattttaggataagattatttttcttttggatatgtgtatcttattggttgaattatgggtttaggctttgtgaatctctccaaatcaaaaggcaagctttttgagctaagtgatgggaactataaggcagagcttcatcatccatgtattagtagaaatgtggggatgcttcttcagcagtataagtgttttggatcatcagcagcttctttaattcagagaaaccctttgttttcgtcgttggattcgaaagatgttagctactttaaggagatattaggtgaaaaaaacgtggttgaagataaagaaaggcttgagactgctaatacagattggatgcataagtacaaaggatctagtaagctgatgctcttgcccaagaatacacaagaggtgttttatttctctctagtctctaccgtattactttgtttggattgcgatgactatttgtgttaaacatagattatttttaatgcaggtgtctcagatacttgagtactgtgattcgaggcgtttagcagttgttcctcaaggaggaaacactggtcttgttggtggaagtgtgcctgtctttgatgaggttctatactgtttctctactcatgttgattggtgactgtcaaaaatcttggataggtagtgtagaaaagcgagcaaagaaaattttcaggaatgtgagagatatacaaaaagaaataaaatcataaacgtgactaatttgtggcatcttttcaggtgatcgtcaatgttggtctga

SEQ ID NO: 69586 - DNA, 2919 bp, Arabidopsis thaliana landsberg
tttccggtgggtttaagaatcttcgtcgtgactaaatattcagtaccaaaacaggcccatttatggcccaatataaaaagcgtcgtccgtccacttaaactcttggcgatctttcccacttaaaagaaaagcgattggcttatccctccgttgaaaagacgaagtaaaatcagtcaaaacacatctccaccgttcagtcgcttcatcacatatatccaacggctgaaaatcatctaagcctgtggacttggaagcaaagagataatgctgaggcgcgtgaggcacagtcgccaacagaaaatcgggatgtttttttttaactgcaaagccaaagagacaattgtatggtctctggtaaaggtaaggcaatcaaaaaaaatatggctgcgtctcccaagataggcatcggtattgcctccgtctcatcgcctcaccgtgtctccgccgcctcatccgctctttctcctcctcctcatctcttctttctcactactactactaccacacgtcacggcggctcctatctcctccgtcaaccaacccgaactcgctcttctgattccctccgcctcagagtctccgccaccgccaattctccgtcttcttcttcttcaggaggtacttgaggagttcctctttgcttctttcttaaggtttttggcagtgtaagtaatcgagctctgtgttggttttttaataattaattgcaggcgagattatcgagaatgtagtgattataggctccggtcccgccggttatacggcggcgatatatgcagcgcgcgccaatttgaagccggtggtttttgaagggtatcagatgggcggagttcccggtggacagttgatgacaactactgaagttgagaattttccgggattcccagacggtatcacgggtcccgatttaatggagaagtgagctataacatagtctgattcttttgttagtttgtggcgtttcttatatgtttctgatgcaattatttattgtgtgaaaattgtagaatgagaaagcaagcagagaggtggggagcagagttgtatccagaagatgttgaatctcttagtgtcacaactgctccttttactgtgcaaactagtgaacgtaaggtgattatctttctttgttttctcactatttctttttcaaattctaaatagttttttttttttggcttcagctctcttctgatgtttccattttttataggtcaagtgccatagtattatatatgccactggcgctacagcaaggaggttaaggttacctcgagaggaagaattctggagtagggggataagtgcttgtgctatctgtgatggagcttcgcctttatttaaggggcaagtacttgccgtggttggaggaggagatacggctacagaggaagccttgtatctcacgaaatatgcccgtcatgttcatttgcttgttcgcagagatcagttgagagcttccaaggctatgcaagataggtgagttcttatattcatcacgtctgccttatattctactcctcttctttgatttctgaagataaacagttaaaactagataaatgctatgtccaaactaggaaatgtgttttgtcatagctatgttgagcgttctttgttgcatgtattgactgctatcccctgttccctcgcaaatccattggatatatctgggaaagcctttggttatgatttccgttgcatgtaaatttataaccaaccagtagagtgcttttttttttttgctggctatcggaattatagactaatgagcacaacgtaagttgagtcttttcaacaccctgagtgtttttttaacaggttggttatggcgaatgtttcagagtgatcaacaatccaaacatcacagtgcattacaacacggaaaccgtggacgtattgagcaacaccaagggacagatgtctggcattctactcagaagacttgatacgggtgaagaaactgagctggaggcaaaaggattgttttatggaatagggcattcgccaaacagtcagttattggaaggccaagtcgaactcgacagctccgggtacgtcttggttcgggaaggaacatcaaatacatcagttgaaggtgtatttgctgcaggagatgtgcaggtattcttcggaacttttagcaatttttcggtgttggtattaactcttttaagtcatattggttcgataattgtgtttgctatattctcctatttgtcactctaggaccacgaatggagacaagctgtaactgctgctggatcaggatgcatagctgctttgtcagccgagagatacctcacaagtaacaatcttcttgttgaatttcaccaggtaggaaatattcagaaatatcttatctcttaagcacacgtcacaaggcttactctctttcatgttcacgttacagcctcaaactgaagaggccaagaaagaattcacacaacgggatgtccaagaaaagtttgacatcactcttacaaagcacaagggacaggtttgttaacatatgaaccttaacttgttacctacaagcattttctctgcctcacatctttctccttatgttttttcccctgctttcagtatgctcttagaaaactataccatgagagtccaagagttatattggtactatacacttcaccaacatgtggcccctgtaggactctgaagcctattttgaacaaggtattcctttattagtcgaaatgaaactcatcggaagagatctttttggactgatttacttgaccatttgttcacttctccttcattttgtttcaggtggtcgatgagtataaccatgatgtgcattttgttgagattgacatcgaggaagatcaagaaattgctgaagcagctggaattatgggaaccccatgtgtgcagttcttcaagaacaaggaaatgctc

SEQ ID NO: 69587 - DNA, 1072 bp, Arabidopsis thaliana landsberg
gcaagacagtacgtgacttcttagaagcccttccaagagaatggatatcagaggatctgatggaggcactattaaaaaggggagttcatctatcacctacaatgtgagggcgacttcttaaattattttgctgatatgtacctttctcagttaacttacgctgatttcaaattgtcagctatgaggtaggggattgggtgaaattcaagagaggcataacaacacccttacatggatggcaaggtgctaagcctaagagtgttgggtttgtgcaaaccattctcgagaaggaggacatgattatcgcattttgttctggtgaagctcgtgtgttggcaaatgaagttgttaagttgattccattagacaggggccagcatgtaagactcagagcatatgtgaaagagccaaggtttgtaagtgctttccgtgtgcatgcacattttctaggccagatatcatggatgaaacattttctactgtgaatttttcctgacttgtaaatgctttctctttgtcttttctggttctaaatcggccaaaactatcatgttggagcgactaaagctgttatggtataatttatttaccaaagtcataaccaaatttggtgttgattgattctattttaggtttggttggcgtggtcaatcacgtgatagtgtcggtactgttttatgtgttgatgaggatgggatcttacgagttgggtttcctggagcatctcgaggctggaaagctgatcctgctgaaatggaacgtgtggaagaattcaaagtcggggattgggtccgtatccgtcagaatctgacttcagccaaacatggttttggatctgttgtccccggcagtatggggattgtttattgtgtacggccagatagcagtctccttgtggagttaagttatcttccaaatccctggcattgtgaacccgaggaagttgaacctgttgctccctttagggtaatatactattatgtaaatttcttacaaacagttcttacttcatatcagaagttcaatccaacaagtttcttaatattatatagattggtgatcgggtgtgtgt

SEQ ID NO: 69588 - DNA, 2186 bp, Arabidopsis thaliana landsberg
agaactgtcggcatgaatggatgaaatgtgccttggaggaaggcttctgtaaatggctccaggacaaggacataaattaatccaatgaacttttttcattcttgttctggtacgcccataatctgattcataactcggtattttaaaatagaatctaagaaagtgcttattgttttaagcacatccgacttggttcccattcccaatgtacagtacttcaaacagtaatattatatgctaagcctcttcaaaaagatttgttaatactaaggaaatctgtccgtacatgcgattcattattttatacaaagaagaagaaaaacatataaacaaaaagagatctgagatatgaaagtggtgtctagacataatagatgatacatcctaaatatctcctaccactctatagttttaactttattaacaaaaatattaataaatcatcatgagagatagatatagattacctgagctgttggcacaagggctctgtgagctttatgtcttacaatggacagagcagcctcatgcatagcctaatgaccaatcttccagattcaaaacataatcatacattgggagattcagccagaagtttcatctagaactatatccgcaggatcaccaatccagggccgcccttccctccacaggaattttattctcaatttcccatttgcatccactcccacaacatgtcctttacttgcatgggtctccattccccaaccccaccgaggtgtaaccagtccatcctttatcttaacccggtctccaattctaaatggtcttatgcgttccagttccccggctttacatagccatagcctgtctaggaaacagaaagatacacataaatctccatcctccattctgtgaaccacccctgtgcttgaaggattgacctctccccactggtaagtgggtgttatgatgctcgcctttaccctaacccagtccccaatcttgagctcttcttcttctatggtttcaacttctgatgggtcaagcatccacgttttagagccggctggtgtgtatatccgtagcttaccatccgcatcaatggctgatattgttcctacacttccatggctatgacctgaccacccaaacctaggctgtttcactgccagtttgacccgagttttttgtccaaccacaagcttctttgctttctctaggtgtgaagtgggccccgcccatctttcttgctcgccacaaaatgaaacggaagtggttccatcccactcgtctccctcatatcctactccatgcactacaccaacacttcctggtccaacagatttccaacaagaaacaccttctctaagtcttacccattctccaacctcaaacataggctccacttccaagtctgctggatctcctctccacaacccaggcaatccaaagaaagcaacccttacctctccatcagcatgaactgtggttatgatgcctcgtgaatcgggcttggctgctctccagccccatcttggttctgttattcccttctggaaatgcacaaactggcccactttgagagctggaatcttctctaaatctgtgtaatgagtactccatcttcctttccggaaacaacaagccaattctaagtaacctgtttcctgtatgctatgaacgacagcaatactctcccttcctacattagaccaatcatagcttggtctgtttcccaggctcggttttgagcgcacccaatcaccaacttcaaaacctgaaagcagctctgcatctccaggtgagaccctccacaacgtctgtctaccagtcacctgtgcctacaggagaacaaaaaaaaagaagtccaaccctcgattttaaatatatgctgaaaacaaaaagctgaggacagcccaatgaatccaggggaaatgatccatttcagaaacttacactcagagtcccgtccatgtcgattctcattattttaccaatagttgctggagtctcatttgaccatccaagtcgtggttgggtgattgatggtgtcatatgaatctcttgtcccacatgaaagggcgtaaccttttcaacatctgtcacagaacatgaaaaaggtttactcctgaaacagaaagctatacccacatcaccatcttcatctaagctgtgcataacgccaatactatttcgagtaatgtcttcccatccatatttcg

SEQ ID NO: 69589 - DNA, 360 bp, Arabidopsis thaliana landsberg
cacaaatggctctgtactcgctgctcctgacccactggccgtacttgtatcgattcacagctcggtgtatcaaccggcatgctatctagattgggtgagaaagaagatacataaatgagagagatatagaggtaggtatattaataaatagatgaatttaaaaggcgacaaaaagacataaatatatggtataatgtaacgttccgttctagtggccattggggccggtggtgtccttcttttttattcacttcattaaagaagcgaacccaattcattatttttagtagtatattatttcctttttgacatcaaacccaacttaatagtattatttttaggatttgatatacccaaaca

SEQ ID NO: 69590 - DNA, 454 bp, Arabidopsis thaliana landsberg
  unsure (1)..(454): unsure at all n locations
ggtactgaagaatcaattttaaaagaaaattactaagtttgtccctggaagatggtacaagtaatacaaaatataccagattaaaccatcactagatttgatgaataaaatcaacaaaataatgataaaacatgcagtaccatgtcaatttaaagtcgacgatcggttcctattaaactagacggggtatattgtcgtttatgcaatcgtattcacttctagttaacgaatacaaatttatgaggtcgagagaagaaacacacaacacaaaagtagttgaaagaggaaagaaacatgttgttgttgttgttgntggaaagtttttttttttnnttttttattttggttcgcttttttgtttgttatgtgtgttttgtttattgtaaattatatgttttatttgattattagtaaaattattggttaaattataatttttaaatattttttgaat

SEQ ID NO: 69591 - DNA, 504 bp, Arabidopsis thaliana landsberg
gcctgaccggctccttctggtcggcggctaatcgtgatcaccctcgtcgccaacggcaccgccgtcgtcttgctggagtggcgctttttcgtcatctccctggtcctgctccccctgttcatcgtccccgccaagcgggtgggccgccggctccaggagctgacccgcgagcagatggacctcaacgcgtcgatgaacacgacgatcagcgagcggctgtacgtgtccggggccctgctcgtgaagctgttcggccgccacgactccgagacccgcgacttctccgcccgggccgacggggtgcgctccgtcggcgtccgctccgcggtctacggccggacgtttatggcggccctcgggctcattggcgcgctggccaccgcggccgtgtactggatcgggggccagctggccgtgtcggggtcgctgacggtcggcacgctggtcgtcctcgcacctccgtcggccgatttacgggcccctgacctcgctgccaacgtgcgt

SEQ ID NO: 69592 - DNA, 482 bp, Arabidopsis thaliana landsberg
tcgctttttctcctaattattattttcgcgcgttattcatcagtcatcatccccaagaaacccctctttcggtggtaaaaactctctctctctctctctccctctgatttctgcggagatttctgaaatagaaatgccggtagcgagaccggaagcatcggatgctagagttatcgctcatgtcgacatggattgcttctacgttcaaggtccttctctctctaacccgaattgtattcagccactagacgctttagtgagagaaagcaaagctttttaacactttttttgaactttttagctttgttggaattttgggtttcaatcgaattttaataacggtttcttttctttttttttctcgttggcgtttgttttagggatttgggaaattaccaaataccaaaaagtgcgcttttttgttcctattttatcaaaatgactcctttacttacctggttaagggatttttttatgagtga

SEQ ID NO: 69593 - DNA, 3913 bp, Arabidopsis thaliana landsberg
ttaaatgtattttgattttaataattgttaatataattcagtgattgatatggaagttattaatttcataattatatggtttttgttatcagcacgacaaaaagaccagttcccctagagcattgtcttttttactctggagaactctacaaagtttgtgagaatgaagttcttctttcaaaagggataaaggatgctaaagattcacaaaagaagaagaattcaaatgcagttagtgttgcacctaaacaacaaatgggatcttcagctcatcaagatgggagcaaatctcagaaatatgaagctcattctcgtggcaaacagaataaacactcaagtgcaaaagatgtgggaaaatcctcttacagtggtaacagtcagaacaatggggcatttagacgatcagcagcttcaaattggttactgcttatcaacaagctttcaaaaatgtccctattacctgtatgttagatgtagcttctgttctgtttcttatattcaattttagtcttgtccgttctggtccgttatgtctaacttttaatatttcttttcccgttaggtggttgtcttctgtttctcgaagaattattgtgataggtgtgccgacgccttgactgggaccgacctcaccagtagctctgagaaaagtgaaatccgtgtcttttgcgataaagcgttttcaagattgaaagggtctgatcggaatttacctcaggttggttatcttaagactttcctgactttcctgtcttctcacatattagatttcctactcattaactgttggggtaacacattttataggttctcagactccaaagcttacttcatagaggaattggtgttcatcatgctgggctgcttccaattgtaaaggaagttgttgaaatgcttttttgccgtggtgttattaaggtaggcttagaaactcagggacctgtgttattatatgagcctaccccattaatacaatgctggagttaatagttatctatgcttatggttgctgcttttaggaaatctaattgccatgttttcttaatctgaaatgcttcaggtgatctatttttattaatcttcctgcaggtgctattttcaacggagacatttgccatgggggttaatgctccagctagaacggtgaggctattttgatttttattattaatgttaatctggtgctacaatgttaagtgggttattctttacacataagtatcttcatatcatgtgggggaacaagtgtgggtattctgataagcatattattcatataaataacttctcgacgatattcgctacaggtcgtttttgatgctttgaggaagtttgatggcaaggaatttagacaattgcttcctggagagtacactcaaatggcaggacgtgctggcagaagaggacttgacaaaacgggcacagttgttgtcatgtgtcgcgatgaagttccagatgagagtgatctgaggcgtgtaattgttggaagcgcaacaagactagaatctcagtttcgactaacctacataatgatcctccatcttttacgtgttgaagaattaaaggtatctcaatgtccggaccgttgatctgccatgcgttttgctcaccaagcctttctcttggctttttctgactcgccagttttcaaatggttgttattgttaggtggaggacatgctgaaaagaagttttgctgaattccatgcccagaagaaactacccgagaaacagcagcttctcatgataaaacgttctctaccaaccaaacatattgagtaaggacaaagcctcattttacggatacttgaaagactgaaaatctactgaatttttatcctctgatggatcgccaagctttttgtagtctcagtagaattataaagaactcctattctattgtctcgtttgtgtcacctctgtattcaacttctctgtagaattgatctattgatttattcatccagatgtattaaaggtgaaccggcaattgaagattactatgacatgtatatggaagcaaatgaatataacaacaagatgtcggaagcggtcatgcagtctccttatgcccagagttttcttgtacaaggaagagtagtggtcatgaaatctggaatggtgagaccctgtctctaccactcttttatctggttcataaattggttgctcatgcgtgtaatttttacagggcatagacaatttactcggaatcgttctgaagggaccttccaacactaacagacaatatgttgttttggtgataaaatctgaaataccgccaccagagaaaaatatggtcagcattggcaagaaaagttcagatccttctcaaggttattttattgcgcctaaatcaaaacgtggttttgaagaagaattttatacaaagccgagctctcgtaaaggtcccgttgtgataaagatagagctcccgtaccatggggtcgctgctggtgtaggttacgaggttaaagggtttgataacaaagaatttttgtgcatatgcgatagcaagataaagattgatcaggtgcgcctactcgaggatgggaacaaggcagctttttctcagacggttcaacagcttctggatctgaaatcagacggaaacaaatttcctcctgctctagacccagtaaaaggttaattaactaaattatagctctgtattagtttttccggctttaagttcatttccctcttatattcatttcatggttctatttcagatttgaagctgaaagatgctgagcttgtggagacatactataaatggaccaacctattgcaaaagatgtccatgaataagtgccacggttgtgtcaaattggaagagcacatgaagttagctagggagattaagaagcataagacggatctcaaagatcttgaatttcaaatgtctgatgaagccctattacaaatgcctgcctttcagggccgggtacgttcaaatgagaaagtccacatgcatctttgtttactctttatgaatgataatttagagtaacatgtagagctctgatctcttttttgcagatcgatgttctgaagaacattgggtgtatagatgatgacctcgtcgttcaaatcaaaggtcgtgttgcttgcgagatgaattctggggaagaattgatttgcacagtgtgtctgttcgagaatcaattcgaagaattagaaccagaagaagcagtggctataatgtctgcctttgtcttccaacagaaaaacacttcagcgcctacacttactcctaagctggctaaggctaaacaaaagtttgtttcgatcactctctgtcccttctcataattactaacagtaattgatctgacctgattaatctaatctttgatcctcttttgcatagactctatgatacagcaatcagacttggtgaacttcaagctcagtacaatttacaaatagaccctgaagaatatgctcaggagaatctcaaattcggtctggtcgaagtcgtctatgagtgggcaaaggtttgttgtaaccagagagcaaactttctttaacactttgcgattcagacatctttttgatcatatatgattgatttttgcaggggactccatttgcagagatatgtgaactgacggatgtcccggaaggtctgatagttcgaaccattgttagattggatgagacatgccgtgaattcaagaatgcagccgccattatggggaactcggcgttacacaagaaaatggatgcagcttcaaatgctataaaacgtgacatcgtctttgcggctagtctgtatgtgaccggagtgtaagatttgatcataattcatacatctgaccagagacgcttctcacttaacttgaaattcaaatcactaaacatgtccacaaatatagtagttaaatttttcgttacgactattacagaa

SEQ ID NO: 69594 - DNA, 449 bp, Arabidopsis thaliana landsberg
accaaaacatagaaacacggcatgatttaaccccccccaacaaaactatcataggaaggggaggaaaggagaaacctccaggcggttcaagaagacgaccatggtcaacggccaagaacatcatcaagttagaccccactatcattacaaccactggaactcgaaaacggacacgaatcaatcccgagacagaaagagaatctataccaggtaaaaagaaaaaagcaagatcaaccatagtcactgagcaaaaacgagtgagaagacgagttgcgaatgagttaacgagagagaaatcgtatcaggagagacatagggagagagagagaaaaatggcatcataaacaacattgaaccaatacttcaccttactaaaagagatttattttaaaacaatatccttctagcacattcgggtcacaaaaaagataaaaccaaaacaaaaccca

SEQ ID NO: 69595 - DNA, 497 bp, Arabidopsis thaliana landsberg
gagaccggttttctctatggtttgtctttggtttacatgtgtcctgttcaggttgggccattcagttttgttttgtatgcttttgcgaccatttcattgtgtcttgatctaaaaagtgacttgtttatgtcccagtctcaagcctttcctctccgtggcatcattagagatggtggaattttgtgctcatgctcctcatgtgatcgggctaacgtaagattttttttttccactctgcaacttagaatgtaggatgaatttgatgatctctagtgattctatcagacttactctcgtatataaacattctcctttttgtaggttatttcaactcccaaatttgagattcatgcttgtaaacaataccgaagagcatcacaatacatttgctttgagaatggtacgagcctgctagatgttctaaatataagtaggaacactcctgtacatgctcttgaagcaacatttctggatgctggtgattatgcatcttaaga

SEQ ID NO: 69596 - DNA, 3411 bp, Arabidopsis thaliana landsberg
atagcaacatgaaggaaatatgtaattttgtttaggttttagggattaggattattactgttagttttaagacttataattgcttgggaatttaaatttataatctagaattaaattttaaaaaacttctaccatcaaaaataattttgatttgtcattttttttttttaattttgatagaaatttaactaattttatattaaaaattttgaatgtggataaattgggaaaacattttttaaactttaggatatttagtttttaaaacacacgatttaattctcatgtttttgggaacttaacactaatatttagtttagatttacactattttgttaataaaatttagactattttcatagtttctatttttggaacaatctagtgtagagattaaggatactaatttactctgtttatgtgaaagattcggagccggtcttaccggaatcaatcagccggcgatgatcgggagcttctagagagaacacaatggcttgatcggtggatggctacaaagcaatgggacgacacaatcaccaattccacaaacgttagagatcctatcaagactcttgaggctgtaacaactcatcatcatcagagatcatatccagcgactccaccgtcctgcagagcttcaaggtccgtcatggtgagatcagctagtccaagaataccatgttcgccttcctcgatgcagccaaattacatgtcggcgacagagtcggcgaaggctaaggcaaggactcagagcacgccacggaggagaccaatgacagcgaagaagcggctttgttatgcggaggaagagagtttgaggagtccaagctttaaaagttgtctctggggagatcatgaatctgattattcttgttgttacggtgatgggttcgccggaaaaatctcaccttgttctaccactgagctccggtggttaaagtgagactttcttgtttttcgtaatatttacgatcatgggatttatttagggtctattgtttccttgtgccaaaagcttacttagataacaaagctacaattctcctttaaacaacttgacatcgattctttctaagccgtagatcacacaatcacataatcttttaaaggtatgtcgtaagatttggctagagcagagacatgttctaaagtgtaatgtccaagtctaccagttctataaagattcactatcttagaagcaactctgagatcagcaaactcacttgcgtcttctggaaccctaagaaccgttcttaaggcagcgaattgcgtatctataagatttccaatgctggtttcgtcttctaagtttccgtcaaatgctgaaattgtctcgtatagaactcttcgaacctcgtgcactataaaatcctacaaataaagaaaagaaaggaatttgatacaactaatgaaagactactgattagcagataatgaatcctattgtcttgttctggtacctgtgtatgatctgttgcgtattgcctcttacgtttggcatcagacttggagctctcatcggataaactttctgttaaatcctgagatttgcacagtttagcccatttcttgtattcatggctcgagtttagtatcatcagaaataaccgcgctagtttgagctccccaactatatcatccggtatagctcctgcattaggtaacccacccgataagctctctgcgctatccggggatgagaatagagaaataaaaccttaacgggtatataatcaatctgtgtgtttagtgctgatcaaacctgttaacgccaactttgcgcagatctcagcgtcatacagattaggaggaaaaattccaggcgtgtccagtacatagacgttgggatggctaccgatctgaaaacaaatgaattctcttaaccttactaatactaatagcagtataagcgaagacatgcaagtatcatgtcagcgacataatgtctttaacagcgacataatctcaagtattctgataaactaagggaacaaaccttcaagctcataatgtctttagtatctcctggctgggaactaactgttgtatgctttagcttacctttctctgtaaataaacatgttcaaatccatcacgaaaaactgaaaatcaagcaaagaagcaacaatacttgatgaaagaggagtttacctgcagcactaatccttccgatatgatgaagagaattggcgagagcggactttcctacattaggaatcccaagaaccatcatagtagtggtatgaccagaatggccagccttatgcaattccctaacttgactctgcaaaaagttcagaaactgaacaaagaaaaagtcttcttaagtttctttcgccataaagaagaaagaaccgaaagatgaaaatcgagacgactatcggataaaatgttacttgcttgacacaatctttgttatgtgaattcactgcatacgaaagatagtttctctcttcaaagtaatctatacacttcttcaactccaaaggaaccgcgagttccattttgttcaacacaatgatttgttttgacggtaaaggcgaaaactttctcaacaactcatactcagaagacaacggaatctacacagaaaagagaaaaaaaacaacttagcttcgttctctgaggcaattaatcgaacacttggaggacaaagaaaacgaacacgagcgtctcgaatctcaagtacgaaatcgaccaaaggaatacgttcggagattgctctaactgctgcggccatgtgaggtccgtaccatctccggttagggtttctcgacgccttgatcacggcgtctccgatttccctcgcaatcttccaggttttagccgttgccatttttcaacataaacatccgcgcgttgaagtctaaataaagcccatttagctccattgggccctttaatgcttcaaacataaagcctcatcccatcgaaaatacgaggagagaatcttaagattatcattttttttgtataaaataaaatagaattgtcactaaactagtattaaaaagtaaaaagtaaaattggtaaaacgtatcgtattttaacatggtgaaaaagtagatgaaatagttttattttaagaaaaattttatgaacacaatattatattttttaaaaattatatacataatatttatatgttttgatctatatatgtggataaacatgaagccatttaaggaaggtttatatttctttaatctagaaaatttcaaaatcatatttagaaacgtggagatcattttaagacttgtctacacgtcttaaggtataccacgcctcacttgattagacggaacaaatttaaacgaaatcaaatcacaacggctatattatgatgattttgaacgctttttaaagacgctccttcccaaaactataaagatacaagaagttttgaga

SEQ ID NO: 69597 - DNA, 454 bp, Arabidopsis thaliana landsberg
tcctgtaaccgtttctcctaaacccaggaacctttttgtttcggcaaactttatgaacaactgagaatcaaagaaaccactatgggattgtttaggccaaagatacaacacacttacaaataacaattgtctttttggagccggattttttttttttgttctctgttttctcgcttctttgatgcaacatgcaaccaaccaaatagtgttgagagactaagcaaagatttaatctaaagagaaagagtaacaacaaaagtaacaacaaatgggggcatttcctccacttcagtaacgagaagttgaagaagaagaagaagcagcagcagaatctgacacggtagaagttcttgttttcctctcttcctcatattcagcatcatcagtctcaagctggaatctacagacaggccaagagttccttgttcctgaccatggcacaatacaatctccg

SEQ ID NO: 69598 - DNA, 578 bp, Arabidopsis thaliana landsberg
tgtaactaaaggatatttaaaattttcataaacgcattggttttgtgcatcccaatttttgtaagtgatattttcaatatggaaactataagattcaacggttgtacttatgcatgcttagcttttaaaaaataacataacgtaaaaatgaacgataaattaaatacagtagtcaactggtcactgttacgctttttttattttcgttaaagaaaacaaatacatgggaaaatttacaaatagtataaatggaggcttaagctttccataatcttcacaactaaatcagaagattactactaaacagagtcttttttgacttgccaaaaacacatctgtctctctctctctttgcggatctgaaatggcgattcctgtaatcgatttctccaaactcaatggtgaagaaagagagaagacactgtctgaaatcgctagagacttgcgaagagtggggattttttcaggttcggatctaactaacaaaaaacagaacacacactctctctgtctctctgatttcatgtgcttatctgcgtatgtatgtagctggggaaccatggtattccattggagct

SEQ ID NO: 69599 - DNA, 182 bp, Arabidopsis thaliana landsberg
gtggctgcttcaccgccaacagcgcgtcgaacgcacggcggtcatgcggatcgcaactctttactttaaaccgcttcggccggataggccagtaccccgccgctgcgcaacagcgcggcggcggcatccagttgcccgagatcgaaccgttgcagcatcaggcgtcggcctcggatgccgcg

SEQ ID NO: 69600 - DNA, 807 bp, Arabidopsis thaliana landsberg
gaactattagcaaatgcaaattccaaaataatcaaaataattactcatctcctaataggaaatacttgacggagttctgtgactcatgtcttgtgcagtcatttttatggataggaccggataataaccagagtacaagaattctaagttttctaacagtacttctttacatatttggatttattcttgttgttcaatttgtgacttagtctcatcgttaagtaagatgttacgtaggcataaattatgtgaatttcttttcggtcaaagtaaccaataatttgcatggatgttctagtatggctctaaaacattcatccaaactacatcattggtattatgttattgccatggtatattcagatggatgataataattgtcacatatatagcgttattgtgaaataggataccaaaccaacttcatacaagaactacaaattatatacataaataatcaacaaataatatatagactactaaaattcaaaatgcttcagaaaactaagaattttcacataaaataaattctaggaattttccaaacgagaaccattctaaaagatgtgaaacaccgaagctcagcaacctcctccgcctccgcctcctcctcctcctcctcctccgcctccacctccatccccaccgccaccaccaccaccaccaaaacctccaccacctccatcaccggcaaagccacccccagccgaaccgactacacctgcatccccttcccctacccctccatcacttcaaaaagaccaagacccttcatgacccgcaccgtcttcatcaccgtcaacacca

SEQ ID NO: 69601 - DNA, 2720 bp, Arabidopsis thaliana landsberg
atttgtaagaaaatggtaactcttcttctctattaacaaccgtttctctttgtgtgtgtcgatatagttcctcgggtttcgtatttacttcgtgtgtgttcgccatttgtgttttgtgggatttatcaagtatttctgcgttgctgattctcttaatcagtcttgtatcacgaggtttgtgtttcatacagtctgagctaatatgaatcattttctgcaatctttgtaagctttttatttttttctaatttatggtcaatctttgaatgtgaatgttgagagagattttgtgttagtaccaactacttgtttgttgggactgggtacgagtaacgaccgtgagggttttgaggaatactctcaaacattaaactctcgtgaagattggattgtgttggtctttacttggacaaccctttatttcaggtccattagccataaaatggaaccacaccggaagaattatgtcaggaatattagttgttaccaaacccaaatttaattagaatacatttttcaagctatgtagtagtagtaactaattttttgattacgtgtaaaattcaaagatcaattttcagaagctgcaatcccttgttatttagtaactatatcataaacaatgtgataaataccaagattttgttattttgtttatcgtcttccaaattctgaaaacaataatggcgaatcacgagacagaaaggaacaaaatagctttttgaagaagcatggttatgtcttataatttcagagacaaaacaaaaaccactttcaactcgaaaacagagctccaaaatgtcttctcttcttatcctcatcttcattgcttcaaccataacattcagtaattactcttcagttgctacaactctacctgacactgtccaatataacaacaataacctcttcacagtctcaggtatcatcaccaaaaacaagttttagtatttagaaacttttctcctttctgttctgagaaagttttgtcttcttctgagtggatttgtgcaggtcagcttgattgcagacaagaagaaccaagcttcagacccgagacaaaaagttatcacagagaatatcaggtatatgtgtcctatctctgaggtgagatgtgcaaagactcgacggattctgaaacatattaggcaaacaagaagaagagatcatcaacacaaagagaggagctcatcaagatacgtgcaaaacaaagcaaacataattacgacagacaataagttgttttccccacatccatggtttcttcctccaaacccgtttgcgccaccacattcgatttttccgccaaacccatttgcaccaccaccttcgattttcccacccaatccatttaagcccccaccaccctcatttttcccaccaaacccgtttcgaccaccacctccttcaatctttcctccaaacccatttcagcctcgtcctccgccaccatcgatatttcctccattatttcctaagccacctcccgctcctcctccatcaatatttcctccattatttcctcatccacctcctgctcctcctccctcaatattccctccaaacccgtttcagcctcgtcctcctccgccacctcccgaacctccatcgatattccctccaaacccatttcagcctcgtcctcttcagccacctcctgctcctccatcgatattccctccaaacccatttcagcctcatcctcctcagcttcctcccacacctcctccgtcgttcttccctccaatatttcatcagcctcctccagctccagcttctcctcctccgtcgttcttccctccaaacccatttcagcctcatcctcctcagcctcctcccactcctcctccatcgatattccctccaaacccatttcagcctcgtcctcctcttcccactcctcctccaccatggtctctctttcctccactgccaccgatctttccaggcctaaatccaccaccaccacctcctcctcctcctcctcctcctccacctccgtcgatctttccatttcctccattcccattcctaccaccaccaaacaaacctggccctcctcctgcttcatctccttcagcaaacaaacagcctccttaatcgaacaagagtatcataatatatacatatatataccaaacatttagtcgagagatgaactatctgttgtatagacagtcatatttacataaggttaaagaataaagatgagttttcaacttctacagaatattgcatctgttcttgaatctaaagatctagatactctagctcaaatcaagcttgagacacaagaaaacaaggactcctttctgcaaatcaaacgcattacttgatacagacatgtcaacaagcacgaaataatttcccggttaatagtgtgagaaatagaagggcaagaagtaatatatctaagagaccatatacttaaaagtaccattaaatggagcaatctcttgttatagatttgcgaaacttgctacatcattctacttagtttttactatatcatgaaaaatagttgcagcacgataaaagtagtatctacacctactgatcctgactcaccgaaagtaacaaaattatcaaacagttgtcataacatagaaaattgaaaaccagaacttatcggcttattctcttctgggaatgatcaatatcattggagaagcttttagtttcaggaggagagtccccttgttcattagggaagctattac

SEQ ID NO: 69602 - DNA, 3222 bp, Arabidopsis thaliana landsberg
ccttctcttacaattacctagtttgtagtatacaaaataaaaatcgagaggtcttagctttagaagttgtttccatgaataatttcacagtaagtagtttagttatatgtattaatgtgacaatttgttttataaaacattagattaagaaagtgaaaaaacaccattatatttgctaactcacaaaacatttatacatgtctatcttaatctatcagtatgcaacacctaaggcctaaggtgagagagattcaagcccatgggctgatttactgaattcagatgacggttaattttcaattcgctggcaataatatttatagttctctgggaaaatattctgcaagctaataaaaatctgtgtataaaaaaaaaaaaaccctacagctccgtcttctctccagtctcacaattttcctcatatttataaatccttaagggaaattttctagaaactcaccaaaaaaaagtattctttgaattcaaagagaaacccaaactagggtttccataatcccttttctactatatctcccactcataaatccgatcgctaaaatcgccacgatccttactttctggtaagctctcaagcgaaacccactaaaagtttcgtctttttcttcttcgcatcaaaatctgataagggaagagaacagtgaaggagagaagctagctgacgatactaattcaaggcattgtttgacttgtatgcaacaaaccaggactggattttgaaatctcggtttttagggtttttgtagtggggttaagttaacactatggatgaccttgaacaggcaatagtaattagctttgaaactggtgctgttgattcggctttaaagtctcaagctgttacttattgtcagcaaatcaaagagactccttctatttgtagtatatgtattgagaagttatggttttctaagcttgtccaagttcagttctggtgtttgcaaacgcttcaggatgttttaagggttaaatatggatctatgagcttggatgagaagagttatgtgaggaaatcagtgttttcaatggcttgtttggaggttattgataatgagaatgctggtagagttgtggaaggacctccttttgttaaaaacaagcttgcacaggttttggctactttgatctattatgagtaccctttgatttggtcctcggtgtttcttgatttcatgcttcatttgtgcaaaggtgctgttgtgatcgacatgttttgtcgggttttgaatgccttggacgatgagttgattagcttggattacccccggacaccagaagagatatctgttgctgctcgagtcaaggatgcaatgaggcaacaatgtgtccctcagatagccagagcatggtatgacattgtatcgatgtacaagaattccgatcctgatctttctgctactgtgttagattgcatgagaagatttgtatcttggattgacattggtttggttgccaatgatgcatttgttccactgctgtttgaattgattttgtctgatggattgtctgaacaagtccgcggtgcagcagctgggtgtgtcttagccatggtttctaagcggatggatccccagtcaaaactgccccttttgcagacccttcaaatcagtcgtgtttttggtttagtatccggagatgttgattccgatttggtatcaaaagtatctgctttgcttactggctatgctgttgaggttctcgaatgccataagcgtttgaactcagaggacaccaaggcagtctccatggatttgctgaacgaagttctgccatcagttttttatgtcatgcagaagtgtgaggtggattctacttttagcatcgtccagtttctcctgggttatgtttccactctcaaaggcctccctgcattgaaggagaagcagctgctccacattacacagattctcgaagtgataagaattcagatttgctatgatcctatgtatcgtaataaccttaattcactggataaaactggattggaggaggaagatagaatgtccgagtttagaaaagatctctttgtcttattacgtacagtgggccgtgttgctcctgaagttactcagcatttcattcgtaactcactagcaaatgctgttgaatcttcatcggagagcaatgttgaagaagtggaagctgcgctctcgcttttgtattcattcggagagtctatgaccgaggaggccatgaaaacaggatctgggtgtttgagtgaactaattccgatgctcttgaccacacagttccctggtcattcacatagacttgttgcactagtgtacttagaaaacataacaaggtacatgaagtttattcaggaaaactcccagtacattcccaatgttcttggtgctttccttgatgataggggtttgcatcaccagaatttctatgtgagccgtagagctggttacttgttcatgagagtcgtgaaattgttaaaatcaaagcttgtaccattcattgacaagatcttgcaggtaagggtttgattttcattttctcttatctacagctcgtttgatctgaaggctagttatccatttttgtatatccgatgtattttcttgtttaatttttttgtctaactatctttttatgaaaaatcagaaccttcaagatacgttgccccagttgacgactatgaactttgcatcaagagaactttctggaactgaagatggcagtcacatttttgaggtttgactaccacttgaagctgctgttttcatatatgtacttctgcttggaaaaaaggaaattttttcagtactctaaaaaaaatctctcaactcctaatacttttttctgtaggctattggcataatcatagggttggaggatgtcccggctgaaaagcagtcagattatttgtctttactgcttacccctctctgtcaacaggttttcgtttctaccattctcttgttcatgaaactttttggcaataattatggtcaggtgtactcacactctttccatgtgatatgattgtaccagattgaggcaggacttgtgcaggcaaaagttgcaagttcccaagactttcctgtgaaaattgcaaatatccaatttgctattgtggcaattaatgcgctcagcaaggtttgtgttcgtttattctagtttctgcacgtgagatttgttacttggtacttcaaattttaccctcttctgggcttgtccttacacttttgc

SEQ ID NO: 69603 - DNA, 440 bp, Arabidopsis thaliana landsberg
ccgtacgtataacttaaccatttgaacgtggcttgtttggctccatgtctcttgggaatgggttccatcacagtttttagatatgaaaagtcaatgtatcattaatgaaaataatataaatatttcgtcattcggtagatggacttttcaatttgtaataaccagcacaacttattgataagccatattgattatgaccatttggttttccaaacaagtggctcgatttggttgatgagatagacggtgggcaacaactccaaattgtttttttttttttttttcggatactagcagaaaaacgaatttataaaactttattgttacatcaatcaaacagcagcataacaatgagttttgcatgaacgaaatattaaactttttgacgaaagctgtattcacatttaagcctcattattgtacgtttgcatttgcgtatt

SEQ ID NO: 69604 - DNA, 479 bp, Arabidopsis thaliana landsberg
ttcaacaaggggtggagccggccgcctttaacccagggatagaaaggcgcgcggttccattggagaaccctgtccaagctttggtccaaatcgatcgttgcggcggcctcggcccagattccctgggaatcgggaagcgagcggcgatgctcttcctctggccggaaggccaggaggcgaatcctccccgtctcctaagcgctttggctattatcgtgtcgcaaaacgcagggcctgccaagctgcgtaccaaggcggaggaacgggatgaccaacccttacacagccgatctcgatcgcaacccggccaatcacatgccggtgacgccgctcagtttcatcgagcgcgctgccgcggtgcatcccgatcgactcgctgtggtccacgggacgcagcgttacacctgggccgagacctatgcccactgccgccgtctcgccagcgcgctgaagcgccgcggcatcggcaagaacgacac

SEQ ID NO: 69605 - DNA, 471 bp, Arabidopsis thaliana landsberg
aatagaaaaaaaaaaaaaaaaaaaaaaaaaaaaaaaaaaaaaaaaaaaaaaaagcaagaagaaaaaaaaaaaagaaacacaaaaaaaaaacaaaaagaacagaacacacaaaaaacatagaacaacaaaagaacatagaacaaaaaaacaaacaaaaaaaaaaaggacgagataagaagaacaaaaaatctataacataccttgaaaaaaagtcgagtgacaatatatccaataaaatagacacaaatagctacaaatactcgaaaaaaaagacgagataaattatacaaaatgaatacaacaaatagaaaatataaataaaaaaagaacactcgaaataaaaaaaaaaaaaaattgacatgaataatgaatgaaagctataagagaattattaaatagaaaataaaaaagaactagagaaaaaggcagaaaagaagactaaagatattaactagaaatatactagaaaaa

SEQ ID NO: 69606 - DNA, 544 bp, Arabidopsis thaliana landsberg
tggagaatggtggaggcgtatgggtataccggggtgtctggtgcggcatgttgatagcaagggctaccgagccgtggactggtgagcggtaatgtcacaggctgaagcggagagtagcggtggcgtaggcaggggggaaatacacacgaagaggggaactggaaaaggattagagccgaggagatagagatgagagtgggaccatgcaggccggtgttggtaattatttgtaaatgtacgtcggggatcccgccgagtccgagaggagtgaggcttattaagtagacaaaatgtgcgagattcagtgccattgtgtaaaagtcgtacagggtaaacgtgttggtttctacgtcggcatcgggtccatcgactcggaccggaaaaaaaaaagacgtaaggaccggaaaaaaaaggtggggggggaggaaggaaaagaaggtgactggttatttaaatttgaagtatgagaaggaacagaagtgaagaggggtgagagtggaggtggaggacaaaatttgaagtaagagaggcgaatgtgaggtgt

SEQ ID NO: 69607 - DNA, 1614 bp, Arabidopsis thaliana landsberg
gtcaaaaggagggtattctgttgcactgtttagattgccttctcaagtgctcagctgttcttgttcagcctctcagcaagcatgatcttgatagctctggaaagaattgttactttaaatataccattacccctaaagaactctgatggttccattcctcattttggtgatgagcttggacttccccttgaggaaaatacaaagttgaactcccttttaactaagctggcgaacaatatggaattgaagacagtcggttacattcgccttttgaaactctttaaagcaaaggattcgttaaagcatttttctcccgacgatgatgagaagtatgaatgggtccctttaactgtggagtttgggtttccacttttcagtccaaagttatgcaacaatatctgcaaaaggattgtctcatcacagttacttcaagcagattcgctcatggaacaacacgatgcaatgcaatgtataaggaaaaggttgaaagatatatgtgcactgtaccaagcaacaggtccagctgctaaacttctttaccagaaagaacaagcaaaggagcctacacgtactaataagctcatgaactacgcaagtggaaggtggaacccacttgtagacccgtcctccccaatatcaggagccacaagcgaattccaacggctgaaactagctaatcgccagcgttgtcggactgaagttttgagcttcgatggtagcatccttaggtcagtttatctcctttccatgtttcatgaatttttattttctttgcttgattgttgagaagttttggggtgtggtcgcagatcctacaccttggcaccagtgtacgaggctgccacaaggagcattgatgagaatgcacctttaagtacaacaaaagcagatgctgatgaagcagatagccgagaagtgattcttccaggactaaatcttctctatgatgggtcagagttgcacccttttgatattggcgcttgccttcaggctcgtcaaccagttgctctcatagcagaagctgctgccgcgtctgcatccctcgccccgaagtagactagtactcaaaaagattctaatccagatttcattggacatcaagtaaaaggtaaattaattaactgaaatcttgaatctttgcatgttcaatgtctgtaacactaggatatagctctgagaatttggtttgcatctgcatatatgtatatagaagtggacattcggttatttcggttttactaatccctgactaattgttttcggtttggattcggtttggattcaaccgtttggtttgttgaatttatagtattaactctgtttgattcgttgtcattgcggtttggttttcggtttcgattaggttctgttttacactaaaaaaacttactttgacaactattttttgtttcttactatgtagtttgtacatataagtataatttctcaattagtttcggtttattcagtctggttacactaaaattggtttcgatttcttggttttaaaataattcttaaccaattttgttcggattaggtttggttttacccattgtacctttatctatctttcgtttgatgtattcatagggtctgttttttgtatggatg

SEQ ID NO: 69608 - DNA, 1168 bp, Arabidopsis thaliana landsberg
tcaagataaccgacaaaggcccaatgcccacggttgaatacagtaccagtttcatccactgtgtcatggatgaatgggagggaggaccgaaatgaactgggcctgacggtccaggaagaacagtcgtaagtggaagaggaatcattgaaacaacaatatcatagtcacgggaaaacaaacgatctagagtagctggtgttagagaagccagactttcacaacggagaatatcaacgcgatattttttccttttcttgtttcctttaccggtgtcgggtccctctacaggaattggcttcccctcattctgaaggttaaggttggaactgaaggtctcagtcaaggcagtagtatcgacagacggtgtactggaagctgcttcatgcttagtgctttcggggacatgctctgtcgacaagggatcctcttgaggggcatctgaaaccatggaagcctcaatattttggctagttaaagaatctccggaattatcaggtaaattaacatctgcaagaagagtaactgcctcatcattggacaacgttcccgaacccattgtatcaactattgtatcagtagcaactccaccagatatcaaacattccaggacacaacgaaggctaaaggcatgatttgcaaattcttgcagttcaccctcaaattttgctccctctaatgtgctcaaatcctggcaaaggtctgggatactagtatgtccgagttttcccgcttcatagagtgtcacggcatgagatttcaatcctacaacatcgttcataaacatggatggaacatattacaataatgcaaaaagtgatccttcacaacaatagtgatattcatcggctgctactagttataagttagccatcaaacagaactaagaaagtttacctggtgacacagaacccatcattagatacgatgttatattagcatcaactatgaaagcaacccgaacatgactagaacgtgatccagagctttcagtccctaaattatctccatgttgagcctcctcaccatcagcagacctgtaggcagagcttaaactagcgcgagatgcatctttcgcatcactgaggacggcatgtggagacccaatcttgtcatgaagcacaaatgaccgatcaattaacctgacaggccattccagccggcaaacaaa

SEQ ID NO: 69609 - DNA, 496 bp, Arabidopsis thaliana landsberg
  unsure (1)..(496): unsure at all n locations
tctatctatgtaatcttaaagatatatcgtcaaaaagataaatctagtacaagtcctgttttaattttttaacgtcttatcttgaattccactctgtgcatcatactttaaaattccatgtattttacttattaattttacttttagtagattagttaatatgctanggctgctatagtttggttatttggtggaaaacatgtcgtaagagtaagacttaatgttatggcatacaaactattaatattatgaatgtagatactttgctatgaaaaccccaaagtatatgatgtcaaaattgtcaaatataattgactgatagaaaaaagaagaacatgtatatgtagttggtgttggtaaagttgcattataggtttagaaaataggaggctaccaataatttatccaatgagaatattatgtagacatgatgagaaaaatgttcaatctctctcaaagtagagcccaaatttcacaatatgaccaaatttgtgag

SEQ ID NO: 69610 - DNA, 600 bp, Arabidopsis thaliana landsberg
tggtacacgtttttttgtttaagtggtcctcttagggataagatttatacatcaataattatgggtacttacaaatgaaataaattatcttcgaaaacaaaaatcaggatagaatctcaaatattaaattgtattacagaaaaaatatgaacgaaataacttgagttgtcattctttcaattatgaaacttaaattctacctaaaaatattaatgtaaaattaaatattcacaagtacatatatacttttatcaaaatttaaatctcgacgttgttcttaaagatgtcattttatggcatgcaaactatatactttatgttagtctaaaaaaattgaaatcagtattgcttagttagttcatgaaaataatttccaagcaatgaaaataattatatttgatatgggcctcaaagtgaaaaacaagaaatgtgtttttttatctttttctcgtaattaagatcagagaagatttttttttgttatttggtaaataaaagcaaaagaaattagtcaaaactgatcatgattcatgtgaattctaaatatattatcttgctaactaagtaatttattaggatacacttataaacttacacttc

SEQ ID NO: 69611 - DNA, 453 bp, Arabidopsis thaliana landsberg
caattttaattccttgtcctggcatatcccgaaccactttccctaactcattcgcaataggttctattttccttattactccccgaggatcccgcgtttgcctcaatcattgtgttttccaaattctcttgcagccttccaaaactattcgataatgagatgattcccaaatcttttctttggtctaaagctttacggttatttcctaaaccaccaccagcatttccgttaggattaacaactttccttctttgttgctccaatctcttcccggatttttcgaccatcacgaatccatcggtaagcggatctctctctcccgagttcgtcaccggagcttcaggctgtgtaacactaccactgcttttggcgcattcactctcggacagttgtgcgcgagatgccatacaagtcgcagactgagcagatattcgtaagaccctcatatgacac

SEQ ID NO: 69612 - DNA, 1481 bp, Arabidopsis thaliana landsberg
tacaccgaaatcttctttttttcttcctccaatttgaatgtttgtaacaactttctatatttttgactgcgccaaaaccctagggcatcttatctatttatacttttaccaattcactgttgccactcacactatttcgtagtcattgtagctctcttgtgacaacaatatgactaataaacttcgctcagaagaaacaatcacgtccctttcttctttcatggctagtacacttagcattgcgtcaccctctccttgttctattccattgtcggtcacaaaggtctcgcctttaaagagaaagagacctacccacttaaatatccctgacctcaatcctcaacaaccgatttcaactgattacttccgtttcagagagggtgacgcaaaggtctcgcctttaaagagaaagagacctgcccacctaaatatccctgacctcaatcctcaacaaccgattcgaactgattacttcagtttcacagactttgctcaccaaaacggcaccgtaagcttcggtggcaatggttttggtgtcgtctccagaaacggtaagaagaagtttatggaagatactcacagaattgttccttgtttggttggtaactccaaaaaggtatctttttttcttcctcttcattgaattaataggtttgagatcttaagtgtgttttgtggttgatgggtttgttatcgttttttgtagagtttctttggagtgtgtgatggtcatggaggtgctaaagctgcagaatttgcggctgagaatttgcacaaatatgttgttgagatgatggagaattgtaaggggaaggaggagaaagttgaagcctttaaggctgcttttttgaggactgatcgtgatttcctagaaaaggtaataaaggaacaatctttgaaggttacctgtaagaaagattacaatctattttgaacttactggttgcataaaaatattagggtgttgtgagtggtgcttgctgtgttactgctgtgatacaagatcaggagatgattgtatcaaatttgggagattgtagagctgtcctgtgtagagcaggtgttgctgaggctcttactgatgatcacaaaccaggaagggatgatgaaaaggaaagaattgagagtcatgtaatgttgtcaagtgtcaagaagtttgtatttttgctgattgtgtgttgagagagtagagtttgatacctttcatgacatttggtttacagggaggtcatgtcgataatcatcaaggggcttggcgagttcatgctatacttgcggtttccagaagcattggggatgcacacttaaagaactgggtggttgctgaacctgagacgagagtactataactggaacaagatacggagtgtcttgtcttagctcctgatggactttgggatgtggttagcaatcaagaagctgttgataccgagttgcatgttctagctcagagaaagacacctaaagaatgtgaggaggag

SEQ ID NO: 69613 - DNA, 260 bp, Arabidopsis thaliana landsberg
ctcagagacagagagagagagaccgtggcgattattaacacagagtagggtatgccagacgaaaacacaaaggtgcaagaaacgaagggtagtagacaaatcacattcataagacaggaacgtcattagaagagagacgagtgaactcgagtcggcacagactgaaagcaaagacaaaagacgcactaaaaggaaccaactagagacattaccaatcaacaaaaacgagagacccgaataagaatgaaaaagggagaaga

SEQ ID NO: 69614 - DNA, 273 bp, Arabidopsis thaliana landsberg
  unsure (1)..(273): unsure at all n locations
aaattaaaattttacatttatatgttcatttgaatatttagtnaattgcacaaaggacaaaatcacattttagtataaattctcggaattaaaatttaaatatattgtagactttaaccgaggagtttaaatatattttaacactccatgactccattaatgatccacaagagaaaacatcagatcatacccaaacttctagggaggttgggacatagacgggcattaaaaatttacatttaagccctaaaaccggagttcttaaccggtttt

SEQ ID NO: 69615 - DNA, 641 bp, Arabidopsis thaliana landsberg
tttttttttatgtacaaaatatggtaagacctcaatgtcacttttgtttccctaataaaactgtttttttattttttgttggagaacttgggatagatatccttctgatccagtttccaagcaatgactggccaacacattctgcaacacaaatgaaaagcgttaggacgagcaaaggtcttaaacaaaggaaaagtgatttcattctcttcaatgcattgtcatgtaaacctcatggatccaacaacatctggttccaaaaacccgaccacaaaggtcttcccaaaccttgaagtgtgataagtattagccagaatccgaaactcaaataacaactctgttgcttataagtggttgtgtatcaactgcatcaattaaatatttctcaaaagattcaaccagaactaacttatcgatgacccaaaagtctctgaagtccactatatatgctactctcggactcttatctaactagcaaactagttctttagttatgctcaagtgaacatatgcagttgaaactcttatgcattccttgatgactactaaacagttttaccatttccaacaatctttgcatagaaaacaagagatgcttttacacttcacaagaacaggttatttttatcatcacgctaagc

SEQ ID NO: 69616 - DNA, 221 bp, Arabidopsis thaliana landsberg
  unsure (1)..(221): unsure at all n locations
gccccacaagcgacaagacccccgggggcttcacgtgcagccagccaacctccacgaaaaacacccgacaggcacgaagaccaccaccaagaacccaaccaccgcaaaggaagacaaggcgagccaccacccgccgaaacccaagagagagaaaaaagaacccagccccgccggcaacaagcangagagcagacacacaccattgatgccagacacacccc

SEQ ID NO: 69617 - DNA, 403 bp, Arabidopsis thaliana landsberg
gtcgttttcgtttttcgttagcactgacacgacggcgtttagtcaattttcttctcttttcgtgtttttctttatcattggttcttttaaaagatttaatgaatagaaaaacattgatagactacataaaatgcagcttttcagatataaaaaaacttagcattgtctcttttactttccaaatccctaggaattaactaattagaaattcaatctaattttataaaatttataagtaatagtcactaaatcccacttattttatttttttgtgtggaaacttttgaattttgatacttcatgtttttgagcttaagattctataggacaacatgatgaagcatgtaaacaaagcggacccctcataccacccacacactgaccatcatcaacaaaatcacca

SEQ ID NO: 69618 - DNA, 2738 bp, Arabidopsis thaliana landsberg
tgtgatgtaaaaaagagaaacagagaaggggatttatatagcagctggtaattgaaagaagtagatatttacaaaaactcaccactagaaattaattagtactgtttattgaaatcttttgtaattatccagtcgacatctgtagaatactaggggcgtatttggttttgccttgttctctcgaacgctctttccacttggcgttgctagtattcgtccacgtggcatttctcgttgatctttttaattacaaattgtagtaattattaatagtttttttaaaatgtggtcttagttaattagtcttgatggtcacgccgtggtgttgctaaaagcagtaatcggtgtacccatcgaatgcttttggtttcgggcggtttcatcttaaatagctctttaatagtattattcttggtcatcaagttggaattttttttttctacttttgtgagatttttaaagttatgaaagatcactaattggctcttaattgtattcttggccgtcactttcaagtcttaacgatacaattatgagtgtcattaattatactttttcctgatttaaaccgactaattaagggatagtagacattacacagaaaatacaatgacccaagttataattatcagtatttttgtataattattttgctcgtaatgcataatttggtttaatattgttcttcatgacaagaatctttatgatgattcctatatatgaatcatatgcgttttactatacatcacaaaaaatcattcagctcgcgggaatcaacgttgaaatagtattcacgattgattcctaacctaagcctctacctcactacgtacgtacgtcgatcaatgttggatatcaaatacataaaattaaattattcacctaaccatttaccagtaatttgattcaacaatgtaattaaccgttaattaatctttctcacaagctcctcaagaacaactcttaagagctcacagagtttctctatttccagacctctttattcatagatcatttaatttctccggtgtaatctttttcttcagtgtgttgtgtgaatcataggcccaagaggacgtagtacaaaatagttactggtaaagatactatcatcccaaagataaccctgaaaacaaaacaaaaaatcaccaagaacagagatttcacataaaccataataccgcattttgaaacgttcaaccgtaaatgtaaatgaagaacaacaaaaagaagagcaagagactcacaatgtactgagtaggtctggatgcaaattgtactccctcgcaaacacaaatggtactatcccttgcggtagagcagcctaaaagaacatatcggcttcatcaaatttagatgtacatatctctactataagttaatcgaaaacttttataagaaacgaagtttaaattatagccacgggtaatttatattttgaaatatttaacttgattttggattagttataattatgtgtcaatgatccaggtatcattaatttcttggaccaaacgcaaaacttgaaacaagttaaagagtctctttagaaccatcttaaaatattaatacctccttagactaatacaggagaattgcatcatgtaaaatatctagatattttcataatatctagatactttgtaacatataagtctagatataatggtagactatattaggtttatatgagatagatatttgtacttttgaaagctatgaacatatctatccttcatttttttttaactaattagtcccttctatatgttaaacttcctaattcactcccaaaatcttaaacactttctccatcaccaagtatgttttctttaattttccaacaataatatatatgggccaaatcaaggtaaactctgaatagtttacctgtacgatagcagcatgtaacctagaacctcttaatccgacaagaagggaagcaccagccatgaaaagaggacctgagatgaacctgatcaacatccccattgttgcctttttcgccccacaagggatcatctttggctgcagcgccataaacaggcctatagtttaattttgttagaatacgttatacataatatccaataattttatttattatgcaggtttataagaacatgttcatacctaaactaaacatagccatcccaagacctgcatctgaaatgatctttatcgagaaatccactatatttggcatcggtatattccatctgctcattatttagcaaaataaaatatgagttaaagttatataacaaacaaattcaatgattatagttgaaattttgatatttgagttattttttgactcacttgaaggatataagtgaccagacaagacctaagaggctggaataagtgttagggtttcgagaaagcttgcggcccacgactgttagtatgaggcgcatcattacaattgcacttggcatttcttgcttgccaatcgcagccaccggagttgtgtcttttccggcggctccttcctccatggaagcaccaccaccggctgccgtagcctgtggtgcagccttaagtgcgtctctgaagctaatctccttctctggcactgatccttagtgatataaaatacacgtgagcagatacagagtgatagttaggacaaaacttgatattttgaaagcaactaattagttataactcgttttgtgaataagggttgtggctttagtaatggaagaaaccaatagaaatccatgcgtcggttt

SEQ ID NO: 69619 - DNA, 111 bp, Arabidopsis thaliana landsberg
  unsure (1)..(111): unsure at all n locations
atacaaaaaaaaaaaaaaaaaaaaaaaaaaaaaaaaaaaaaaaggaaaanacaaaaaaaaaaaaaaaaaaaaaaaaaaataaaagataaaaaaaagaaaaaaaaaaaaaga

SEQ ID NO: 69620 - DNA, 404 bp, Arabidopsis thaliana landsberg
gaaacaaccaccaatccgcaggaacccacagagaccccacctgctgacgccaaaacaagccccgcaaacgcacaaacacaccaagaggaacccccagcagacaacaccacagctcacaccaaacaaaaaacgccaacccaacccagcacgaccacagagaacagaaaacaaaaccggaagccacaaatacaggcgccccagaggaaaaaagcaagcggcgaagaaacccggagaacccgcgaagagaaacaagggagcaaccgcccccggagggaggaaacaaaggaaccaacgaaagacgccaaggggaagcaaacgaaggaccaaccgcacgaggcaagagcacaccaccccagaacagcaaaaaagcccccccaaagcaagacgacccgggaaaagaaaca

SEQ ID NO: 69621 - DNA, 571 bp, Arabidopsis thaliana landsberg
  unsure (1)..(571): unsure at all n locations
atgacttncttctcttcctttgaaaaccttattgagaaaatcctccctagaaagaaaaagagagaagaagcaaggatatttttcaaaagaaatgtgagcaagatggtactcttgatgagtcggtttggtttcttttgttgatgagtagtggccacagcgacgcaagattgcgttgaacaccctaacgaaaaaggcaatatcaataatcgctccatccgatctttcatctctttccctcgaaatgtatgtatttatgtatggatgctacaaatatgttatgcgtgtgtgagtgaatgaaatgatggaaaagtagggattttggtagggcttatattgcaatgtcgtgtatgctttataactttgtaagcaagttagtataattatcttcttgaagaattttgttatccctaacccattaatgattagacagtgggagaatgagatcataagtgtcattattgattatacctgggggttgctcttagtttggcccacagttgccacttaacctaattgcaaaattaaagattcatgataaacccccacctcttcacttttttttcttaccaat

SEQ ID NO: 69622 - DNA, 623 bp, Arabidopsis thaliana landsberg
  unsure (1)..(623): unsure at all n locations
taactaacatgttttctcttttcttgtactgtaaattacgtttcttaaaaagaaatatgtagttaaaaatccttcaaattcattatattgaatcgaaaatctcgtccaaaaccaaaaacaatcatagctcttaaacgatatcgtttaatcattgtgagagggtccactttaatgggaacagtcaatgtctattgaccctcttctctctctctagctagtctcaggtcagagaagccatcatcaacattcaacaagagagccgtgtttgtgtcttgactgattcttctctcaagcttttttaatctctctctcttttcccacgtaattcccccaaatccattctttctagggttcgatctccctctctcaatcatgaaccttcttctcttctagaccccacaaagtttccccnnnnnnnnnnnnnnnnnnnnnnnnnnnnnnnnnnnnnnnnnnnnnnnnnnnnnnnnnnnnnnnnnnnnnnnnnnnnnnnnnnnnnnnnnnnnnnnnnnnnnnnnnnnnnnnnnnnnnnnnnnnnnnnnnnnnnntcctcgataccgatggtttgtggattcttttcgtcttcttcttcttcatcttcttcttctttaatttggattgaattt

SEQ ID NO: 69623 - DNA, 566 bp, Arabidopsis thaliana landsberg
aagaacttgctcagttgttctgtccttccagttgtgaatagagctatttctaggtgacgtggctgctgagtttgggaggctgcagctcacaaacttcgtcttcatttgatgatccaattgctgagacgacaccgtgtcatcgatgtctctcggacgtgagactatcatatcgaagctcccattcctcgacaatagcgattgcggatcaaccgagatccgcctctcggatacggattgcatactcgtcttcttgataagaatcttgggctcgtctccaccacctagaacctcaaagtcatgccagtcctcgagactactatcgtccctgaagctgagaacatctgtcaccatttgtttctctttggcctggaatggaatgaggactaataagaaaatgaaaatattggcaaaaagtctaaaacagattgattgatacttaaataccgagcaggatgggttgcacgtcggtgactagctacgttagtcatgacttgcacgtttaatataatataacccaagtgttgttgacttcatctcctaaaaaatgaaaaatgtatcatgttttt

SEQ ID NO: 69624 - DNA, 416 bp, Arabidopsis thaliana landsberg
attctccgtcagtcgtcttaattatagccagctacaaacatagacattgtaaggttcgttttaggaagacaaatatggcaaaacatgtttgatcactaactagggttggttctctccaaaatttgacattgttctttcattataggcgtaagaactctgttgaattggtttgtagttaaaagtcttttgccttgagatatgtctttgttgctcttagagaaatctgattttgaagtttctgatttgttaagcacatacagaatcaagcaatgagatttgtgctgaggagaaagagttgtcagacataaattctcactatagatggcgtctaggccaaaggaatgatcacaaagctattgataccatgacatataacattcttttacttatagaaatggtcgaagtactgttattta

SEQ ID NO: 69625 - DNA, 512 bp, Arabidopsis thaliana landsberg
tggcgggcctacggtagctggtgcctcaacgcctacgtctgttgaggcgcttcctcctcctctttatccagcattgatgacttcaagagacgaatatgatattggaaacagccctatcccttccattggtaaattgttatattttacttctataaccatttttatttattatattatccattgacttgtctaaagtccattattatttaatagtcacattgtgccatactgcgttgtttggactcgtagactatgcttagtacgttcgtttattggtcttattgattagaattgaaggaacttgatattgtgtgatggcctcttattttaacacgtaaagaggtggttagctcaagtagattgcgctctttgtaggaagagggaagcgttcggcattatcactagctggagatgatcaccatcctgaatactccgatgctcacatcattgctagaggatcagggttattatctactaaatcagcatacaacccctcggttgagatgatggct

SEQ ID NO: 69626 - DNA, 327 bp, Arabidopsis thaliana landsberg
aaaaacacgactacatcgacaacctcgttccgttcaactggcgcggatggtgtgctcctgaacaggtgcgctcggtgatatgggatgccacattatcggcccggttttcaaaatcctcgacctcggctatcccacaagcgtacacgcatccgcgagcaccatctacagcggcatcttcgaagaagcttattatcccaaaagtggtcccgtttcatccgtgctgagctttaattacaaattgaaaaacggaaaagacatcaagcttacctggatggatggcggaatacaccctgaacgtcccgatgagctaaagcccaatgaattgct

SEQ ID NO: 69627 - DNA, 365 bp, Arabidopsis thaliana landsberg
  unsure (1)..(365): unsure at all n locations
caggaaataccctgcatccttatttgcccggtgtnnnnnnnnnnnnnnnnnnnnnnnnnnnnntgagtgctgggtaaaataaaaacaggcccccggatactgaaccctgcgacggccataaaataccctttgcaccgggttatagggcgcccggaaaaaaccggtctgcggcagacggttcatacacttcgcgcacagaaactgcccgcgccctatgactgtcaaccgcacaccccgcacaattatgcggatacaccaaatgcagtaacccatgcagtataccagccatcttcatactgcaagttggtgaagaaagaaatagggagattacgtgactgcgacagggtgtgaaggtcaaaagtgaa

SEQ ID NO: 69628 - DNA, 1271 bp, Arabidopsis thaliana landsberg
tcagcagagaatcaaacaatcatccaagtcaagtgtctgtatccagcccattttgcagcaagtcggacgccaatggctaatgctgcagccaacaacggcattggtggtgccctccttaagatctgactctcttcttctgaggaggtcttcgttgaattgtgatacatggctagagccagataccctgtgatagccaccactctcacccatggctcccctactcctgccagaacagctgcagaaggaagagccgaggtcacatcgtctctcttctttatcaaccgcgagtacccatacaaacctaacaagacagtccagaagaacggctctgagatataactctgcaccgctgcataccccaccagacccgcaatagttaccacatacggctgcttgctgattgactctggtgcaactgcttctcctatagcaagcactgaggatgcaagaagaattaccgtggttaactctctcacaggcgtgtaagccacaatcccggagtagaacgccctaacactgtacattgcagtctctacaaggctgatgagagaagtgatgggatcgcctataaagtggaagacaagagccaatgcaaacttcgaaaggtctcccacaaacgcaaggatagcgaaagccgcttttctccagttggatagctcaaacaaaacagctctccacgcataaacgagaaaccccagcgctacaacagaagatcaagatgttacttcatttatccaaagcttattcgaactatgcaacaaggtatacaaaactcgaattcactagactactattcaaatgctaaaccagagtatagtccctaaattccaatctcagggtcttgagtcagaaatgcttcagcgattgagaacaaaaacagcaccaataatgaatttcaaatccaaaaatttgattttgctacaagacttatgattcacggtaactaaaacgaagccaaaagtaagcagaaacgtaccaacaaaccatggccatataattggactatctggagcttctttggtcaaatatctgaatctatcaggcatcgtgctctctcgtctcgcaaatcgctccgcgtcatcttcaatcccacctttgggtgcattttctttctcgcacctcgtcaaaaccctaagtctcacacttggaaacttccccggagccacaaaacgacggagactcgcgccggcatttaaaaactgtggcggagaaatgtaagcttattatcaccattaagagaagacatacgcgacacaggagagaaacgaata

SEQ ID NO: 69629 - DNA, 335 bp, Arabidopsis thaliana landsberg
atcggtaacagatttttgccagcgattataccgagctccacgattcctaccgccgggttccatacctgcctccccgtacgtcggtgatcactgcacacgtgcgccgcctcgaccatcactgtgataacctccgtctaaacagagtctcaggtgtgctctagaagggttcactctcttgtcgaggtgtggagcttagaaaccggaccatctcggagaaaccaaacgatcgtggacgcgcaactcgattgcgctgtgtggcacgcgagccattccgacggtgactggtccttacgatgatcgatactctaatgggaacacaggctgatcggagaaag

SEQ ID NO: 69630 - DNA, 285 bp, Arabidopsis thaliana landsberg
gtgcaccgatcacctgacggccggcgcggttccggccagatgtaccggtcagtgggtcagtcggccatctcgccttggcgaacgatcacgtggtcgatgatgccgtagtccttcgcctgctcggcggtgaaccagcggtcgcgatcggagtcggcttcgatctgctcgaccgtctggccggagtggtgcgcgatgcgcttggcgaggagcttattggtgtgtgctcatttgctcgggcagtatcgcctagcgctgtcgcctggccttggaagccgccatagggct

SEQ ID NO: 69631 - DNA, 145 bp, Arabidopsis thaliana landsberg
gccttttataggcgttacagccagacgggttggtgcgccactacacattcctagcatggtacagacagtttaagaccagggggacgacccgacctcgtcaacaatactcgggactgttgcgatttacctgccaagaactagttta

SEQ ID NO: 69632 - DNA, 2102 bp, Arabidopsis thaliana landsberg
agaaacatctcaacctctgtctagccaaataaattttgtatcaactcaagtgcttggctatgatctttttctggttctgcaaccatatctgctgttcttgcaatacagattgctgatttacccctccattttctgaaaatgtctctccgaacccaaaactctcaaatgttgtaaacgggtcacatttcagaggcaaagtctccgtggccttaaatgttggtgtagaagacggctcaaaatcatcaggaacgttcacctgaaatgtcggttctggctgaaccctgtcaaagccaagccaccgaacgtgatcattggttctccggctgtagctaactgcgcaactggttcttccaagaatgggttgtattggtccgtggcggcttgaaacgcaggcatcggatcatctaacccgaacggtactatcgcgatcgagttattaccctgcacctgcgtagcagtttcttctaacgcaagcaaccaattccctgaatctctctgatgatcctcagcggttgaaggttcctcctcaatcgtttctatcttcttcttcggatcatctctcaacatcaacgcctcccaaggatcgaaagtctctgcctttgaatcgtcttgcttcttcttgtcttcaacatcttctgcttctgccgtgttacttacgtcatccaatgacaataggtctaatatgagattggaagcagaaacagagggattattgggaagcgatttagtcgaaaccgtatcaaaattattcccattaggatcatctcgtcctcctccgtatggctcagaatgacaagacattggaggactactagtccctgcttcagtcctgctcatcaaatcctccaacgaagtactacgaaacgacccgtaatctgaatacctctccgacgtatcaatcgtggaatccccaaaatcaagcgagcttgaaaccgctgaatctttggacgatggaggcggaggaagaaaactattcggtgacggatacaaccctgagctcgctggaaacgacgattgatcttttaaaaactcttgcaatgtctcaagaagctctaaagagatcttttgaatgctaggatactccgatgttcttcctataccgatcgatttggaaagatcgtagaatgcgttaagctcttcgaactgtttcgaagctcgaacacaagcttgaaacgcattgatgcaagattggtattgcagatggaagaaactgtctaacaaaagcgctaatccatcggaaatgtctctgtaaagatcgaaactctcttgcatgacggcgtaaagcgacattttcacgagcctgttggctttcgcgtctcccgtcggccgcgtcgcgattgctctgtctagtaatttttgccaatacgtgattttgtcaagaagcattaccggtttcatatctcgaaccgccggttcgtgggatttaattccggctttgggattaaaccgggatcttgttgttgagttggtgctgattcttccggtttgttctcggtttgtgtaccgtctctgtaattttccggtgaggaagcaatcgagacgttcgtcgaggtaaagcgcgaatgtacggacgaaagcagtgaaatcccaagggcaagagttcgaatcgtcgcggaagctggagagattgaggattttggcgccacgtttcatggcgtggaggacttcgcgagggaaataaggatcaccgtcttggaaaatcctgaggacgaggactagggatttgagcgcgacgatccaattccgtgtacgcccgatacggcgaccgatcgcggcggcgcaagaggcggcgtgagatttcttggaggatatgattccgaggatttctgttacgagtcgatcgtcgattgggacttcctcgtcgtggctcgtagctttcaagatcgcaacttcgagagtcgtgagatcgccgcctccggtggctccgttagcaactttgccgaggctaatgctcgtctgatctttaaccgcaccaatcgcttttttaagcttgctcggcattgtcctcgtcgtcgcgctttccatttcacccaaacgtcttctttgttcatcaaggaaaatttaatttcttaatcactctggattagcgattaatcaggaag

SEQ ID NO: 69633 - DNA, 614 bp, Arabidopsis thaliana landsberg
tatcaaagtccttttttagtgcacaagtatatacatgattaaaagcaacggttcatttcacgccataactacatgtcccccgtgttttaaaaacttccgaacaacacgcagttcctaaatcaatgtcacccatgttattgaacactttccctaaaaaatcggccttatgattcggccatatttataagtaggcccatttttagcccaatgcaaatgtcgcatttatccccacatcgccacaggtaagtcttataaataaagatctaatcctcactatccacagaagtcttaccattacattctcaacaaaaactcgctgatttgatctctcgtcgatataacaatagaggtgtcttacgcgtgatctgaaacctagattcgattcagtcagaacttttgtcgaagatggaaagacaaatcatggcttcttctaaaaaggtacaacgggaagagaatacgaaagaggaatatttaccaaacaagcaagtttcagatgaatcagaacatcttgagaagagttgtttgacagaagaagaagatgcgtgtttgtctgatgctagttgttgatgactaacacactaggtcgaaaatgggatctctagggaaagaagaag

SEQ ID NO: 69634 - DNA, 406 bp, Arabidopsis thaliana landsberg
cttatatcaactatggggtattaattatccttaacatacgaaatggatgaagggtcgagaagaagcatggatcaaacctttgagtttatcagattcaccatcagtgcaatcgtttctttcacggactgaggacatatccaaatgcctagacgttttggaagcacttagagtagggtgaatcttagtcgcatagagctgaaacgtcggcgttttgacgtgcttgtataacccattaccattgcttcgttaacttgcactcatggtatgccttaagtcccaaaatgcaatccacaaccttggtcactgatccagactttagattaatttctggtacattacaccttatacttcaattattcattgcttaccaataagaaaaaaaatttcgaaatgtggttaccttttc

SEQ ID NO: 69635 - DNA, 556 bp, Arabidopsis thaliana landsberg
gctaagctgatcggaccgcgtagttcgcgcagcattgtagcttttttgtgcaagagcgcgcccgcaaagcggttgcatgcgtcttccttctgctgcccagatgctccatggtcgtaaagcatctcggcaatctcgtgggaggcggtaatcctttggcgatcgccggaaaccccgatcggaagtgtaactaccgggcgcattccgttgccgcgagaagcccagccagcaaatccgtcacgattgttgagcacgagcggcaacgcctgaacaacaactccgcaacgttcaaacacgtgcaagagccgagcgatcgggacatccggcgaaaccccaagctgagatcgaagatctagagcagcctcatcaacatcaccacgaacccttcgtaaagtgaatggtattggctcaaagtttcgctcaagtgtttcgaacacttcataaactaagcgcgcgccttgataagcttgatttcgctgcttggcggtcatgtcgcctttggcttcggactgcagtgtgccaagaccgaaatgttcggtaatcggcctttgaaagaatg

SEQ ID NO: 69636 - DNA, 485 bp, Arabidopsis thaliana landsberg
  unsure (1)..(485): unsure at all n locations
atatncgtatagcccaaaggtaagcaacagctaagagaagagttaaagtgataaaaagggagtattaaacatgaataagaagacaggacaagaaaagagattggatatagaattttataaacgctttagaggtcgaggccttatttaagttccttcgacttctaaagttggaacatccaatgctaatttagtaaaaaggctacacgaaaactccttaagcttcttcctttttcttatggatcttcaaaatctttttttctttttttttcctcactaatttttgtttctttcttttgctgccgctatgttcgtttcgtctatgttactctctttcttttatgtagctttcggttttgttgacctgtctcctaatttgttaattaattgaccatttattgttattttgattccagcttgaatgaaacagtatggttcttctgattcaccaaagaaaaattttgggaaatagataaaactatttgaga

SEQ ID NO: 69637 - DNA, 330 bp, Arabidopsis thaliana landsberg
  unsure (1)..(330): unsure at all n locations
taaggcctccagcagaagctgaagttggtttagtgtatcttgctgattatnnnnnnnnnnnnnnnnnnnnnnngccctagtgaccaatgtgtcagagttacggaagatagcagacttcatgaatacttggtagcgatagggtggatccttcattagacatgacacgttttgcaaacccgaatggatatatggtttgctnnnnnnnnnnnnnnnnnnnnnntggctcttactctgtggcggaggacaagaacatgaacatgattttctgatcatatattgccataggaactttgacttgagcatggtctccaacccatttgaaaccactgg

SEQ ID NO: 69638 - DNA, 461 bp, Arabidopsis thaliana landsberg
  unsure (1)..(461): unsure at all n locations
tgccagaacgtggatgttacggccagctaatctcgcgtagctcttttcctctactgggaaagtctaccttcacgagggatcttttatgacgctctaaggatgtctgccagccctcgggccttataccaaacgnnnnnnnnnnnnnnnnnnctggtatcaatttgctccataagcacgctgtctactgttcctgcaggatcaggcgaagacgctccccgcccaaatagagatcagctcggactccgcccaacatggctaccatcatctgtggaacggcaatctctcgtcaggtctgccgttacttgaaaggagaagggaacatgggtgactaagtcggctaatttttcaaggacgattacgtatcatcctgagctgaagactccctctccccagataggggctactggtgaccctgtgagggacattgactctacaaaacaagctaagggtgttgaggctga

SEQ ID NO: 69639 - DNA, 2145 bp, Arabidopsis thaliana landsberg
ccacgttttccgtctcttggctctgcaacattccaatgagatatcatactccgaggtgggaggagttctgaatatccaatgatcgagtcaagctcatggtatacaaatagtctataatattcattaaaattttcatgattttgcatgccttatatgcagatatcatccaatgaagtaacgaacctaactatatttattcgctttatggaaatgacaacagtaggtaagttttaaatccttatttacttgtcccttttttggtctaacaagcttctttttgttcttgtttcttatttccgtcctctctaaccttgtaatctttatgctgaaagctgtttcacaatcttgttgcttaacttggtccaaaacctgtttctgtccctctgtttctccccctggtttcatgtagagtaaacaggttattgtcttaatatattatacacgtttagtcacagatgattgtttaaagtatatgtcagtaattgctgtttatcagtttctgagcttggtttgttttctcctcggtttaacatttatgtgctgtgtgactggtttaaagtagtgtgttgatctttgatgttatcctcagtgaattttctaggaacaagagctcctaaaaactagtcgcagtctcgcgggctctttgttttcccatacaagtatactttgctcatatatgaatgatgtattacattgtagaaattctacaatctatagaaacttttacagtataatatataaaagttctttgatagtcttaggaaacaggaacctatctacaacctatgaaggctacccgacaacactgttttttaaagctcgacaaacagtccttcattgaaaacgaaacaaaactaggcctccgtctctaaagttaaaatatgatgagctatcttatttgcaatgcgattacattctcggggattacaaaaacagtaacataacaaaacaaagttaccatgacatgttcacatgaatgtcatgcagcataggttgaactgcagtcaagtatgttattgcccatcaaatctctaccacttctgcttttaacttttgaggctaataaaaaccaacggcaatgcacggcacgaggcaacgagccactccaccaaacttaagtgctcacacgtgagacatggaccccccatgaacatgagaaccgtccggatcaaatagagtctttctttgtttcagtaaagctgggattttttttggttgttgttgcgacattcgtcgtatccattgcttagggagagaagagataatgctgagagcttcgctgctctgttcttcgacctcaatcactttcacaccaattcaactattcaatcccaatagttcccatcgtttcccaagattcgaactatctcgtcctgtctcggctttgtctcgtaccaaatgtcacttgagtctcctgagagctcgtgggaaatccagcttcctcactcgcagcaccggtaactagttttttttattgggtttatccttgttttgtgattctgtggtctctgtctttttctcttccaaggtgtggaaacttaagaagttttgggttttgagaagctgttagcaactgtattattgaattgattctaatttttgtttctttggctctctttgttctttgatcttcagctactgatgaagctgttgaaactagtagtaacagtggattggatttggttgaggttggattcttgtctggtgttcatggccttcaaggcgagatttgcataaaaccaaacactgattttcctgatttacgtttctctaaggtattcaaaggatagaaatttgaagaaagtttgtgttttttttcttctcttttcttgaaaaacaaatatgtataatttgacatttttttttaccattggcttgattgtttcattagcctggtagaagatggttaaaacaacaattgttgggacaagataagattgatgaggttgaattagtcgaaggaagacctcatcctgcgcagaagagttggattcttaagtttcgagggttggacgatgttgatcaggtagtgtagtgatccatgggagattttaaaagacacatttgaaaatgatttgttacatttgatggggtttccgtttccttcaggtgagacaactcgttggtgcaactctgcttgctaag

SEQ ID NO: 69640 - DNA, 433 bp, Arabidopsis thaliana landsberg
gcccgccgccacatagagggcgatgcgcgtgcgcttccccagggttattaagcggacggcgaggagggcgagcacgaggccgaggcccgcgagcatggcgaggtcggtcagggagccgacgatgctcgaggccggcgagaccgacgtcgtgataaggcccgcgatgactaggcccgcctgcgcgacgagcgcgatggcgaggccggccgagaggacgcgcacgaacgagaggtactggccgcggcggcgcaacgtgagcgcggcgagggagccgagcgccgcgatgagcgccatgaagccgaacgtatccggctcaagctgggtaccgtaaaacgcgtcggcgaagcttccgcccgagaacagggccgaaagcgcgtacgcgagcgggacgagccacagcgcgcccacgagggcgaggggcggcacgatgatg

SEQ ID NO: 69641 - DNA, 487 bp, Arabidopsis thaliana landsberg
aagccgcctcacctactctccattggaataatcatacttacgtgtttataaataagtattacatcaacccatatcttcttcatccacaaataaccattggctataattatgacaaaaactaccaaaaccatgaatcctaagttttacttagttcttgccttaaccgcggttctggcctcaaacgcatatggtgcggttgtagacatcgatggaaacaccatgttccacgaaagttactacgttctccctgtcatccgtggccgaggcggaggcctgactctagcagtgccgcggtgggcagccatgtccttacgatatcgtgcaggaatcttcagaagttgatgagggcattccgtaaaatcatcaaactggaggcttaaggttgcgtcagttccgaatcacagaacctcaacatcgaaacagacgtcggagcacgatctgcatccagtcaacctactggcgggtcggtgagtttgtcacgagagga

SEQ ID NO: 69642 - DNA, 1747 bp, Arabidopsis thaliana landsberg
agatgagaaatcagaacaacgaactgaatgagacctactcaacacagactgatatgtatatggaatgcaaaggagaaactcacaaggatgtaagattcgaaagattctgcatggaaggaggtaatggtccactcagattgttgcttgacaaatctctacgcatgtgttgaatgttcagttacacatatatacagaaaacaatcttaacacagctgatttagaaagcagacctacatattgatcataaggccaaggtcttgaaagacatcgggtatcttgccagacaataggttattgttcaaggacctgtaagaccaaagaagtcagtcttaaacgcttatcaccggtagagaatggatgtgatgacagagacagcagagacttacatgacagacaaagattttaaggaggaaagagattctgggatggttcctgtaaagttgttacctgaaagaaacctgtgaaaaggcaaagattgtaacacaagatgttgaataagaaaaaagaggggatttgcgagttggaaagtgggaaacatacaagttctgcaatgaaacaggtaacgtggatgggatacttcctccaatgtgattgttgctaaaatccctgagacaaaacatcaaaaggtaaaaataaggagagaagcagattaaagaagcaaaagtcatcaacgcaagagaggataaagtacattgctttaagagaggtaaacatgtttaagccaacaccaagctctcctccaagattggcactgatgagaattctgtaaaagggtgagagtgttgttagaagaatgataaagaaaagtaagaagaagaagatgggaggtgtcgttttttacattgtttctacttgggaagcattacatagaacaccttgccaactctccccacatgggtcacctccagatgcaacccaaccggggagaagaggagactccagtgcaaggaagagactgttaatagccgcaactaaagcaaacaatcagggtacgattagctatactaacattaccattacacaaaagggaaaaacagagagaattaggggcttaccatcgtcaggattggtaagagcaagtgacaaggagggaagggagataagggcaaaggacagaaaacccaggaagcagatgttgttgtctctcccagatctcatcgatctcattccgaatccagtagacactaagagagatatgtgagtgaacagtcgtttaaaattcaaaagcaaaacttagcagccaagaatatgattcgacagacgaaggaaaaaggtgagtaagagaactttatgttatcttaagagaaaagggaatgtttttttgcaagtgagtgagagagagtgtcactgtgtgaatgcgattgttcttagttcttacaagcaaatctaaacttgtgttttcaaaatttgacggacagacgaaagagagaagacgacaaagaagcttttaatgggcctacatttatttatgataaggaatataatgggctttagtttataaacaataggcccaaatgagaccttcttgtagaagaagagggttcatcgtcaccttaaactcattaccgtcaccggtgagattcctccaaaatcgggactttttctcaggacgtttgagatgcattcgcgctccgccttgctctaccgattcctccgcccggcgttgagatgcttctcctcgtcgagctcggctgtaacttccgtcactgtaacgcaatctcccaagagtcttgaggctcttcgagct

SEQ ID NO: 69643 - DNA, 218 bp, Arabidopsis thaliana landsberg
gaaaaaaaaaaaaaaaaaaaaaaaagcaaaaaaagaaaaaaaaaaaaaaaaaaaaaaaaaataaaaaaaacaaacaaaagaaaaaatcaccataacaatatcgggaaacaacataaagagtgcaaggaaagaacctctaagaagggggaacgagagatggaatctcaccatagtgtcaaagaggacccattcatctatagccgacgatctggaatgag

SEQ ID NO: 69644 - DNA, 654 bp, Arabidopsis thaliana landsberg
tgctttctacagcggtttctcattcgaattctctcaggaaaataacgctcctgcttgacaacaaatggaaagagttaaacaggttttgttgctcaaatgatgatacagaggaggatgcttacacacactgcatggtcttcacttgagagatgcgtcctcaaatctttcaaggcttttgcaatcacaaagacacaacatgcaagaaaacattttggtagacggttcacccctttgactttgactgcacttgcgaagaacgtggtttcttgtctctgaaacagagagcgtaattatatagctcagaaacagagtcattagtggatgatgatgataaggagaggagaaaaaaacacctgcaacaagtaagcttttccaaagccactctgcagaagtgagcaggacagacattttgtaaggcctgtacgaataagccagaaaaaggttgtacttcgtctcttgtagtaagtcggcgattaaattttcgaacatcatcaccacaccatcggatatgagcatgattgtagccggaggaggattacgagctttccactgcttcatatttataaacatgcgactgtatatgacttctgttgtcagacagtacagaaaagcattttcagtagaattccagagagatggatataattaccgaat

SEQ ID NO: 69645 - DNA, 657 bp, Arabidopsis thaliana landsberg
  unsure (1)..(657): unsure at all n locations
cgttaatgccatcatcaatgatttcttttctcttataaaacgccagagtggacaattaaacggatcacacgttcacgcgttctgtacgcggagtagactnnnnnnnnnnnnnnnnnttctcgctgggtcctcgagatctctctcagtacagatgtctgtttatgattggcttcgcttttgaatttaagtagtcctcctcaccattgaaaacaaataattagtttcttttattgttaacttaagtacaatatcaccggcaaattaattagattagatttcgttttcaaacaatcaaaatcacttcaagatataattgatacgtctaatcaatttcttaataaattctatgattaaattatgtatataaggtaacctaagaaaggtatatataaagagaaaacgatcgagttttaaaatataggatgagttattaaaaaaaacattaatatctgtatctagatgaatatattgtttctgattttgttaatcattcatttatttaaggaaatctatgtagtactagtatatcatgaatcatcaaatagggacatttttatattgatgcaaatagtgtacattcattaaccctaacaaccaattgcctctattgcagatatgcttaaatctgaatagctagaaattataaatgtttaacac

SEQ ID NO: 69646 - DNA, 449 bp, Arabidopsis thaliana landsberg
  unsure (1)..(449): unsure at all n locations
gaatgccacatccttgaacatatcgcccagcggcacccctttttcggaagcttcttatttgggcattttctggccaaggaacatcaaaccgtacgcaactgttggaatgagatacagagccagctggactttccaagccaggtgcattttatcatccagcacccagcccgcgatggagcccaggatcatcccggctggccaggaagcatgcaggatgttgaggtaatgcgcccggttgccggggaagagcgtcgccaccagcgggtttgccacgccattaagcgtgccgttggccaatgcgaaaataaacatgccccaatacaaaacnnnnnnnnnnnnnnnnnnnnnnnnnnnnnacgtgactaccgctgaaagaacgtgaaaaacaaacgccgcgatcaccagcttgccgtatccgatcttatcaacaataacggcaccgatgatga

SEQ ID NO: 69647 - DNA, 440 bp, Arabidopsis thaliana landsberg
caatgaggtcggcccatgaagggcgattatagtcctgagattacgcctgagatgattcaggcgggtattgaggtttttgtcgaattggagggcgaggtttccaaagcaactctggttcgggcaatttttgaggccatggtgtgtgcagagataaaccaaactcctgcatcaggccgcccagagccatcagatgatagttgattgaccggatttcgtccgcgacccgccgaaggtcttcgagagagcttgaaaacggaatcttttcagaatcatttattcttttgctttttctagtgagcgtgaaaccgctcgaagcatacggtgcgacgatatcgaaatgtgttagttgatttctatttcgccggcagatttcgtagaccgccagcgcattcttgaccgcctctttaagcggctcattgtgagattcagtctctaagaac

SEQ ID NO: 69648 - DNA, 547 bp, Arabidopsis thaliana landsberg
ccaaaattatcaaaatcattccatttagtcagtcgaaatggtattattatccattagaaaattcagttagttagatattcgactcagttataaaaaatccagtaaaaatggcttacatacttgttataaaaaaaccctcttttttttggagaaatatagaaaatattttaaattttcaaatgagtgaaaatattttaatctttgaaattagcagtattttttgctactaatgcatactgatatgtatggaatattaaacacagctaggaaaaaagtgaatgaacctatgttgaaaacatttacctctgagctataatggtcagtaagaaattaagagttattctctcacggattcacagtacacccattataacaaaagactagtcttctctgaccttcttttgttgccacaagaaaaaaaaaggtttcgtcaaaaaatttcaatttcatgatgatgaaattgaggaattacctgaataaattgtataaagaaagcattatgattttgatattttctcaccataaaaccaatacttgtaaaatgata

SEQ ID NO: 69649 - DNA, 221 bp, Arabidopsis thaliana landsberg
agaaaaaaaaaaaaaaaaaaaaaaaaaaaaaaaaaaaaaaaaaaaaaaaaaaaaaaaaaaaaaaaaaaaataaaaaaaagaaacaaaaaaacaacctataaaaatgaactcattaaaactctcaccatcacccaaacaccgaaccgaccccaaaactgttgaacatgaatcagcaataaaaacctcaaacacaaacaacaccaaacaaaacaagaaagaac

SEQ ID NO: 69650 - DNA, 461 bp, Arabidopsis thaliana landsberg
  unsure (1)..(461): unsure at all n locations
gatggtgcatacatgtgtcgaactgggaccactttcgggttgcttctcatgcgccaccttctctcggattcccattacagccgccattgccacttctctctttcccggccttctaaaagcaacaagcgcacgtgttaaatgttcacacgtgtccttatcttttctcgtagatatctaaattattatctaaaattaacaatctgttctcaacaatcaacatacaacaatcaacgtcaatatataatatagttatcaaagccaaaatcaatgattctataatccaacaaagcaaagatattcgtgtgtgaaaggccagtattccatttacaaaattgtaatgccaattcattccttttttcactccaattcaattactatngttctgcttttttcttataaagagaatacttgaaagataagtttagaattaacatcgaacatgcattgtttgtatttttgga

SEQ ID NO: 69651 - DNA, 461 bp, Arabidopsis thaliana landsberg
gaaaactaataaaaacattagtctttattatgggtaactcaagatcttaatgatcttcttatagcccttataggaaggtccggatatttcagtccaattgacatacagattttcttcagtcaatttacctaatttaagatctataacttcagaagttggactattttctactaaaacgggaaatgtttgtcttaacagaaataaataacaagattggtacataattgcaccttttttagctctacttatttttggtaaatcaattcagggcttacatttatataaagtttaagcatgtttttctctattttgatcttctataaattactctgttttaagccaaattaaaaaaccaaacacacatacataaaacaagtcataagaatcaaatggagttctctatcaatccttccactctacagcgaaccgttattttaaaacaatgggcagcctgcctaaaa

SEQ ID NO: 69652 - DNA, 990 bp, Arabidopsis thaliana landsberg
ctcattgtaattatgatatttttttttagcttgacactcgtttccttatgagataaaaactaatggacatacactttttatcaaacaaaattggatgaaaatagtatttttagtatatccatttccatgctctgttcacaatctcatcttctacaaacgggcgcaatgaccacatcagactgtaagtctctagctcaccagatgatgacttcaaactaagcgatctcacaatcttatcctgcaaagacagtatccatttctcttcagtaagttttgagttttaaagaatcaaacatgaagagaagggctttcaaattccacacctgcataacataattctgcttcatcatactgcaaataactgcaataagtgcagcgtactctgtaacttcaggtccttgaggtaattgtacagtctcgttctcctaaaacaaacacatccatactacattactcttctatgaaaccgtttttcaagttagtttacccgtgaacaaacttatggtgacatcttacctcatcacatgtgtacttgctgcaatccatcacttgagtctttatctagctgtgtggcagactcaattgcaagggcggcctcatcagtgagacgttccagctcaatcaacaagtttttggctgcaacattcacatcttacaaggttcaaaaggtacaattgcttatagaagaaaccgaagatatgataatgtgggatgagtgatgaaatgaaacagtagctaatacattacctttgattaggtggtcagaaagtcctgatagagatgtatgcacttcttattccggtattttttgttttcagataagaaacggaagaccaagtcgggaagacgaagaagaagagcaagaaaaaaaaggagcaacatgttaagcacaagagaagaagaatgttcctaaaacatgaaactaaaaacataacttttaagccaagagctgatcagtaacttacaagctcttgtggtttgtgcagcatc

SEQ ID NO: 69653 - DNA, 386 bp, Arabidopsis thaliana landsberg
caaagattatataaagcagcggaccaagcaaggagagagggagtaaagcaaaaccgagaaaagagtacaagaaacaatgaagcagaaaaaaaagagcttaagaacgtaaagttgagaaaaatgcacattacggcggcttaagataagaattaagaaacacaaaaaaaaaaaacgcttagaaaaaagaaaaagatgatcggagagagagttaccgaatttggcagagacacaaggcgacaagcacaagctggctcctaaccgcacacggaaacacaccacaaagacaagactgtaaaccaaattctttggagacagaactaaaaagaaataagacataaggtaaaaccatatttatggtgaagatgagaagatgagactcctcaaag

SEQ ID NO: 69654 - DNA, 518 bp, Arabidopsis thaliana landsberg
agggtatgcttgaatcttttggttactgcatgactactctaactgaattggcttaattaaataaagaaaaggagaaacgtcacactagatacaaaaacgttgcaccaaatattattattaaaataatacttatacaaggagtgaaagagtaggcgaaccactcagtaattgcttccaagtgccgtatctctctttctctttcgctctcggttcattgtttcatttggaagattcagctctaaatttgaccctaacaagtcagccacgatttttaatatatttagaaaagatacaactgaaaagaaaaaggctactacaaggtataaagagagacactgccgtacagagctgtgtgacctgaagccaccacgcaaagggtctcttcctcttctttagcttccttcttcttctctatatattcatgctattttcatttctttaacaaaatacaaagaaaaacaaacaaacctcttttctttgtttttaacgatgggaagcttcttcatcatccgttgctt

SEQ ID NO: 69655 - DNA, 265 bp, Arabidopsis thaliana landsberg
  unsure (1)..(265): unsure at all n locations
aaagaatggagnttgatccaatccgaaggaatcaataataaaggccaacccccaaggaaacaccagaaccggctcggaaaaagacagagcgaatagaaccgccacaccaagaaaacccacacaagacacgaggcgaaacgagnacacccccccctaccgaacatggaatagacgaaacaaatcaaaaaatggacccatgcccaagaaagaaaacccaacggaactgaccacaaccagatcatcctccggaaccataacacaaccc

SEQ ID NO: 69656 - DNA, 243 bp, Arabidopsis thaliana landsberg
aaaaacctcctaaacaaatctcgtgatatctaaaacctagatttgtattaagagaatatagatctttcattcttgtgtcttctctatctgtgtgtgtgtgtgtgtggatgttatcccctacatccaaaccacctgaactgccaactaattcctattgacccacccaaaaaaacctaaaccgaacttacagccaccccatgtcgatatttcctgcactcccaccaaccccctcccccataaaca

SEQ ID NO: 69657 - DNA, 184 bp, Arabidopsis thaliana landsberg
tgtccctcctctctcgtcctatcggcagaggcgcttctggcatcgtctggttagcatctaaaactgttgtcttttttttttgagtatttagccctagagacgaaacattttgagaaaggctaagatagcgctcaaaacttctgatctgtcaatactagagaacaacctaaacattacctatgag

SEQ ID NO: 69658 - DNA, 977 bp, Arabidopsis thaliana landsberg
aatagtctcatcgtcatcttcatcatcatcatcatcattatccgcttcctcacgctctctcctcatcgcttccctccttctattcagcatctcctccgccaatctcttccgcttctctcccgccgtctcatcagcaaactcatcttcatcctccacttccccatcaactcttctcccatcttcatctccgccagtaaatccgttctcttccgcatcagagtccacagactcgatatcgtcgtcatcgtaactgacttttctccgtttcttcggctcttcctcaaaaaatggatccctttcattcgaaccctttttacctcctctcttaaagcttcctcctttcttcttctcgttgttgtacttcattcttctctctctcactccctcttagggtttaacgattttacactttgactcgtctaggtttagcctcagggtttagtggcgacggaagaagctggaaaacgattttgtttatttggtcggaaagtttacaactttaaaccttccactaggttttcttcaggaatcgggtctaccgggttgacccggactaaccaagcccatgacttacctggtctatggtttgagcccattaactatttcgttcttttaaagcagaaacttgggcctttaatttgtagagccgaagactaaccggaccgtcaatttaagtttggttcaatccgatttctgaatttttggttctgatttctgaagagtagtacgtaaaccgaattgggagattctcttatttcagtaacagtttaatacagtttttgtttagtgttttcaatttcggtattttttacaaactcgaatcggatgattccggtttaataaaatcaaatgagttcggtttagctgaatttaaaactgtttttaatcttatagtataccgaaccggaccatccatctaatttcaattgtctaccaaaaccgaccgaccagtctttgtcgaaagttgtctttcttct

SEQ ID NO: 69659 - DNA, 319 bp, Arabidopsis thaliana landsberg
ccctatccacccctcccaatccgaagattcatttcactaaacttcaactgttgtgaaaatgtatatatagattttaaatcaaaccgaaaaaattcacaattattcacgagatcatggcggttttaaaacacggttaagcttcacgtaaaacaaataggtcttttatcgtccaccacctctcctaaattctaccattctggttaagctcacgcttcaagctttaacaacccttacaccaggggattctgccacatacgtgtccacagctggccctgaggctttctgtttgcaacggatgtttgcttggatcatgttttca

SEQ ID NO: 69660 - DNA, 212 bp, Arabidopsis thaliana landsberg
  unsure (1)..(212): unsure at all n locations
gggacgacgagtccncgtaccggccgacgattcctaggccccgagcgacacaccgcgacgagggccacaccagggcgacaaagccacggacccggaaaaccaaccacgacgacgccaagcccggaacgacgaaaccccggaaccgaaagaacccgcgcgacgaaaacaagaccaggccgaggaaaccgggacgaacnccggaacaaacacca

SEQ ID NO: 69661 - DNA, 533 bp, Arabidopsis thaliana landsberg
actcaaaaggcttgttgactaactatgcttattaacacaattaaaaacacttccaatgggtcgcccacatgaaacttttataactaaagtatggttatttatagatctttttcacagaaagagttacattaaacgagaagtgaattttagtgatataactagtcaaataaataattgtaagcctttcttgtgcaccataatttggaaggaaatcagggggagtacaataagctacacttatagggtacatcatccttaactgaaaccaagaccgaccattaccaccacatgactcccacacttctgatggttcatggatcccaccctcatatgatagcaagtgcgctatttggagagtccacaaaacttggcgatatattctacatatcaccactagatattcgttcgtaatttgttttcactcatataatacttaaaataaatttggagatttccatctaaattttcttttcttttttttgttaaaaccatctaaattttcttctaactcattgtggctttttgaagatgat

SEQ ID NO: 69662 - DNA, 101 bp, Arabidopsis thaliana landsberg
aattcgatttgattttctttgcattttttatattaattttaccgttaatgaggataagccttcattataacatttttcttatagaatatatacacaaaacc

SEQ ID NO: 69663 - DNA, 439 bp, Arabidopsis thaliana landsberg
  unsure (1)..(439): unsure at all n locations
cacagagaacaaggaaaagggancanggttaaatacgccccacaagagaggacaaaaaaagagggaaagacggcggaggaagcaaaagacgccgcgggacaataagcagggaaaacaaacaacaaccacacaaaaccggggaccccaccaaccaacacaggaaggagcacaaaaacggaaaaccacggccagaggagaaggcaacaacacacccaaaaaggaccaggaaaagagactcgacgagaaaggaacgaaacaccccaaagaaacaaacagcgcagaaacaagaaaaaagaggccaggggaacgatgagcaaacaccggagggggaaagcacaccgtgaaacaaagagcgcaaactgggaaccgagcaacaaaaggacagccaagacccgcgaaacaggggtgcccagaaaaaagacagggacaacaacgagag

SEQ ID NO: 69664 - DNA, 311 bp, Arabidopsis thaliana landsberg
tccagatctccacttgttcaccaatgatcgatttttggtgcggggtgtttcccgcatccccgtgcatagggtgaaaccttattccatggacttaccatgacattgcgtctctcttattcttgctcgagtccataaaagggcttaattgatccatggcttctgatgcgtctttgctttcctctaccatcgtttggagaaagagacccatcgattccgatgaaaactttaaccattgatgcttgaacgctcgcgatgtatggatccatgcctgccaggtctatatagatgctgaccgtggattgacgcagatg

SEQ ID NO: 69665 - DNA, 325 bp, Arabidopsis thaliana landsberg
gatctattgattccaatatttataggcctgcttgcgatacacatctcagttgaaggtgttaagcctagaaacgtgattgtgcaggatgacttcctaaggatgagagacatagagctgaagatagaggcatgaaacgatgttacgcgtatccggctgcgctatcttgaatgttctaagtaccgggctgatgaccaacgaatattgtgccagcactagagcctcgattcatggccacttgttacagcatatgcgtgattatgcttacattgacaccattagagtctactatactcattccaatgattgcttattcgatttgacctat

SEQ ID NO: 69666 - DNA, 457 bp, Arabidopsis thaliana landsberg
cgggcacgtggggggcttatcggatggggggggacttcatcgggaaggcgatcgagcgggtcagcgggcgggacctggaaacctatctgcgcgagcacgtgctcggcccgctgggcatgtcgagcaccagcttcgaccttagcgacgacctgcgtgcccacctcactcccctgtaccagcgcactccggaaggcttcgagccactggagttcgaggtcccgcaggaccgcgagttctacctgtgcggcgccggcctgtacgggtccccggctgactacctgcggctgctgcgggccctggtcaacctcggcactctggaccgcgtcgaggtgctccgccccgagacggtgctggaagcacggcagaaccagatcggcccggtcgagatcggtccggtcacctcgctgaacctggatagttccggccacgtcaccttcctgccccggatgggcagcaa

SEQ ID NO: 69667 - DNA, 507 bp, Arabidopsis thaliana landsberg
  unsure (1)..(507): unsure at all n locations
gtggcttggtggggtgttttttaaaatgcggtttggaccataccgcatggtctnnnnnnnnnnnnnnnnnnnnnnnnnnnnnnnnnnnnnnnnnnnnnnnnnnnnnnnnnnnnnnngattacttggcctgtgttattcagttgcaccatgcctataaggacggacttgtctaacttttttttttttttttaattttattttgtaaagttgaatctttttatttttctaatgtggtttccaataatgaaaatgcctcaagacggatgaaatttagtatgatgacttgatgatgagattaccaaattttaggtaatttgtcatcggaaaaacgtgttttcttttctcaaaagaattttaaatntgtgtgtttctctcccaaaaaaataaaacattccttacactgttacacataccaaataggcaaataaaaccgaactctgctgtgtaagatttggttttaaccaaaaaaaccacaaagaaaaaactatttttggtggaatttgaaga

SEQ ID NO: 69668 - DNA, 187 bp, Arabidopsis thaliana landsberg
cacggaaaagcaccgcaccgcccgcagcagcaaaggaaggcgaggaagcacacgacgagacacccaaacaaacgcgccataggacgacgcgccagaaacgcaacgaggaggcaaagacccgagaaaacacgggaaacagcaaacaacaccaggcagcagatgacgcgacaggagaaacagaagcgag

SEQ ID NO: 69669 - DNA, 291 bp, Arabidopsis thaliana landsberg
  unsure (1)..(291): unsure at all n locations
aaacaaactactcagtactcacacttagccataagagatgcataagacctcaacagacatacccccagcaaagtgagacacagccacctgacattcccacataaatgagcagactctgagtaactgtcccgataaacctaatactctctccccttaaactaaagcctaaagactgcaattctctccttcccctccagcatcatgacagaaacaacaagtccaggaaagcaagngcccgtccaagcacaggaacaaccaacgctaacaagaaaaaagggcataaccggagaa

SEQ ID NO: 69670 - DNA, 192 bp, Arabidopsis thaliana landsberg
tcttatcctgtagactcacctgaagaagcatgggctgcggcatccgttggagctatttactgattcatggacatctgtgtggaccgatgggcttgccatccttgatcgtgacaaaggacgatgctcccacattcaagaccccctccaggaagatgaaaacatcaatttattgagaccgtagagcactcattt

SEQ ID NO: 69671 - DNA, 423 bp, Arabidopsis thaliana landsberg
ttactaatttttctgaaacacatacgttcacgattggtggttctattaatattaccgtcacgaaatttttttgttttttgttttgttctttgacatttaaacgtagcacacaaaatggttacagaacgtcggaatatgcgataagattgcacccagatacttaaaactaatacattccataaaagtcaaatccaaaatctgaggtaaaaacgctagagattattcaaccactgatcatcaaaaggattcaacaactatttccatattatgatttatgatcaacaatattatttttagttttaattaaacacaatactttttgtttacatcatttgaaaggagcacatgtttttagatgtgtaaaccaaatcttaaaaccacatacactttattattgcatagaacttcaaaactttgacacaa

SEQ ID NO: 69672 - DNA, 509 bp, Arabidopsis thaliana landsberg
  unsure (1)..(509): unsure at all n locations
aacgaggccggggaaagggggggtttggaaaaagngatgcagccccacaaaaaaaagagaagtaagtggtcgctctcttctcttatcgcctggcctggttacccctcttcttctcctctatcatcgagtgttccccgataaagtcatcatcatcagtgatcgcacttcaacgactgaagcaaagtgtgtgctggcttgcttgctctgaccattaccatcatcgatacaatgccgtacaatggccgcccattgaggaggacaatcacactgtttcgctgctgctggcgctctgctggtgcaacagagatagcactcgctgctctgatattcggacacaactttggctgaaaaagcagggctattgacttgtcttcaactcgacaaaaaaaatgaaaactagccagcttcagcagcagcagcaacaacaacagctgaaaccatttgaacctaccattttgttgaatatgcttgcaacaacaacaacaacaacgacatngacatcttcaaac

SEQ ID NO: 69673 - DNA, 467 bp, Arabidopsis thaliana landsberg
  unsure (1)..(467): unsure at all n locations
tcgcgcgttgctggataccgattaccacaagatattggggttgcatggccacgtcaacacaagggaggtatttttaggcaaatcaggcggttgacaagattggcgaatccggccttgccgggtgtgttgccgagggcttttgcgtggatgccggcctctgccagtgtcacaacgacgtnnnnnnnnnnnnnnnnnnnnnnnnnnnnnnnnnnncatcttcgccaaacaaccaccaggtctggcggttggcgcggcccacacgggtggccaactggcggttgatgcacgtgcccatggcctgttgcggcgcgaacaggcgccgatgcgcgggatcggcggccagccaggcgtaggcgctggcgtcctgctggcgccaggagcgggtgaagcccaactcggttttcgggccgnnnnnnnnnnnnnnnnnnnnnnccttccaagccaccaggccgatggtggtcgcgggg

SEQ ID NO: 69674 - DNA, 540 bp, Arabidopsis thaliana landsberg
  unsure (1)..(540): unsure at all n locations
caaccaanccctcctggcngggggattttttaaccaaagggggtgtcttacatacacaatcctttccttctctttctctatagacaactatacacaatctttacattttgctcgttatttaatttaggcctctcaaaactttagaccggttctcaaaaagagaatacaaacaacacaacgacaaatactacagatatttctatatatgcctatatattgtagtgtgtagtactctttataatgaatagatagtctactggaaacaaagacttcttacaagttatcccatctaaaaactttatctcgtggaatttgatattacaaagaattggaaaacaaaatcatgggaaaaattaaggtcttctttcgattttgtctttttagtttctcattgatctaagggcctgattagttttgttgcaactctctgtgcaaacgttatatatataattaaataattatatattaaattaattatatagttatacatgtttaacaataatcatggaaacttatttataccgcttcataatgtttata

SEQ ID NO: 69675 - DNA, 360 bp, Arabidopsis thaliana landsberg
ttcagcctaatcccctcgacgctttcttggtcaaatttgtgtaacgtgagattctacctaggtcaaactctacattctcattttaacccctgagttcataggcttcacttatttaatgacaattccatgtcaatgctcatgaatctcgaaccaccaacgcactaatttcctacgagcccatgacaatacaaataaaactattttgctgcgaatatctcttagtctcttacattcccatgagatacattgtaatactttatttgggttttgtcgaagtaacaaatttttgtaactttacattccatattttaaaactgcagagtaatccaactttaataatatatctcatttgaatttaag

SEQ ID NO: 69676 - DNA, 124 bp, Arabidopsis thaliana landsberg
atctgcattgtcaagaagccattcagaacttgaaacgagatggacagatatatctcgagcaccagttaatactacggcgcaatgtgaaaaccatactaggcacctagctgctaatcttagcaga

SEQ ID NO: 69677 - DNA, 360 bp, Arabidopsis thaliana landsberg
tataggaaaaagccaaatatactaacaacaactataatttcagaaacgtgaccaaaaaaaacaacaacaaatttccattcgaaggaaaaaaaaaaaacaaaacgaataattctttgttatcacaaaaaaaaatatattaaaatatcttgcttgctctctcttccagagaaaggggaaaaaaataatctgattcctgatattttcggcttcgctttgctttgggtttgctttgctttttatctccacaataataatattcgttaacctctcctcgttctcgtcgctgtttcttcccgatcttcgctatagttttgattcaaaatctctcttccccaataggtatacgcgacaaaaaaaatc

SEQ ID NO: 69678 - DNA, 671 bp, Arabidopsis thaliana landsberg
  unsure (1)..(671): unsure at all n locations
tcatcctcagccatgttcacatcagcaaattcatcgtcatggggagcgggtggatgaatttcattaccaccagccaaggagctcagattcgactggtcagaattggcaacttctgctgttacagccggtggctcagctgtattgatacgcttcgtagatgtagcagcagcagtttaaggcttcttatttggtggaggggccatgatagttgcgagacggcggtatttgttcgattcagaacaaaaattgtgaagagcaaccctggggtctcaaaaaaaagggaaaagcgtactagcagaacttcaacaacgtacttgaacaatttcacctaaactaactaaaactcaaaaagaacaaaaatgtcaactgaaaagttaacataaagaacaaaacgctgacgtatacaaaatgcgatgcgtaaaaaatgaaaacaggataataaactgggaatagagcgattttaccagtggaaatacactaaaacgatactgtaaaagtgtaatggaagaaaagtgatcgtcaatcaaagacgcggacagtacgaacagtcgaaaacgttaaatattaccagcaacaaacgcccagacatcctttaaaagcatcatattnttaaagagcatcaatgaactcaacaaccaaaaccttaacgaattcctctcatttatatgatt

SEQ ID NO: 69679 - DNA, 545 bp, Arabidopsis thaliana landsberg
  unsure (1)..(545): unsure at all n locations
ggaacaagcagtgggaaaagcaacgagcaaaacaccatcaaggaagaggagaacaaaatacctgagtatggtggttgcaacggttgcccaggatgcattcgatgcggatgtcgaggatgtagcggtggctgccgtttttgccccggttgctgtgcgtgccagtactaatttaaaagaaattcaccgtaacctaattatcattctgttgtagttntaaattattgttttttacttttcttttgtcttaaatgtatttttttcgcttttgtttcttgtgttatttagtactagtattgtgtaatgttaatttgcattatactattactcctctaaataatcttctgacacaaacaattaaatttaaaaaacattataacaaagtcaaaacaacatagtcataatggtcttttaaacaatgtaatatttcaaacaacaaatcaatttaaacataagcctttccaaatgggcctgacgaactgaagcgcgtggccggtatgtagttgggttctgcggaaaaaatgagaactacatatgaaaagctttca

SEQ ID NO: 69680 - DNA, 514 bp, Arabidopsis thaliana landsberg
  unsure (1)..(514): unsure at all n locations
tttcgttggcctggcatcgatttcagggctggtgcgctgacgcaccgaatgcgggcccttcgcagcgggctgggactgccaacaagcgcctctacttctacactggtccgcacggccagtacagagccaacgccgccgtactggtgagctgttgttcccgaaacaactcctgatccagctctctgcggcattcagaggcgcagtccgctgcttgcgacagcaatatacagtattgcagaacagcaacggctattaggcacacccggccacatcacgtcggacaccgcatnnnnnnnnnnnnnnnnnnnnnnnnnnnnnnnnnnnnnnnnnnnnnnnnnnnnnnnnnnnnnnnnnnnnnnnnnnnnncaagtgcagaacacatggcagagctctcgtcccattctgcatccgctgatgccgtgactcggcttttggttcactgcacttggtctatctgcaattgggtttaacctaaacggtataaacttcaaccaatcaatccttgatggtcgct

SEQ ID NO: 69681 - DNA, 282 bp, Arabidopsis thaliana landsberg
accaaaaggcattctacaatgcaaaatgacatcagtataacggatcaaaacacacacaaaaaaaagatttgccatccgacacaagaaagcaattacataatctccaccaggatatacaaaaaaacagttccaatatcaaatatttatctcaatgcatcaaggattttttttaagcaccaacctgaacaattagatccttgaagcgctgattgtaggcatactcatcgcgactaacgttcagaaaatccctagctgctaggtctttcatggcactgacaatat

SEQ ID NO: 69682 - DNA, 343 bp, Arabidopsis thaliana landsberg
atatctaacatcgtatatccgtttatctatctgataagcaccataactaatctggttcaggtatgaaaaagctaaccagtccggttagagctggtttgttcttgtacagactgttgctgtaagtaagaagaagggcttaaacgttacacattcaaataaggtagtcgttaaatacagtgtggaagttgttgaagtggacaacttctgaacatatattttgaggacttaataggtgattatatttctaccaaacctttttgtttttacatgaccttaacattcaatcaatagtttactcctgaaaaaacctctttgtaaagaacttttttgttattattgtttt

SEQ ID NO: 69683 - DNA, 147 bp, Arabidopsis thaliana landsberg
ataaacccacaccgttagaaagaaggtcttacaggcatgcagatatcctttacatcccctgatgatgagagatgcaaattcactgtgatttgttaactccagtgccatgacacgtacatgcgagtgagcacttccttttccaacgtc

SEQ ID NO: 69684 - DNA, 594 bp, Arabidopsis thaliana landsberg
gggcagggctggtattcacgaattgaagtcttaattatgttaaacgctggactcataaaacaaatatatcccagcacatatttgtatgagtgcatggcaatcgcagcaaactccgaacacaattctattgctcaacatatatattgtataatacccaagaaaggatccatgaattttgagctaacactattaaaatatgttattcacaacacaacctacttcattgcctgttaaatctatctattgatatcccaattaaagtttacatcaaaaataccaaactaatctaatctgttaaacagaattatatctgcaatataatactcatatctcttgatctttttacacattacagtcacagccattggagttataaacttttaagagctattgggttctcctctgcacaaatgttttaaattaatataagagctatcataatttagcaaacgtaatgtagtgacggcaaacaatattgtggatgaaacatacaatattcacgcaaagtgaccataaactggaaaaaatcatttgaacgatttatctttgtcaaaatggtgttactaaaatatcacaagcgatcatatttataat

SEQ ID NO: 69685 - DNA, 5442 bp, Arabidopsis thaliana landsberg
ggttcagagtcataaggtgatcaaaaagaacttgtaatcttcttatgccaaataccaagaaggaaaaagaaattccagatcaattacctcacaaagaattgaaagcatatcccgtggattgcatgcttccacaaaccgatcaacgattttctcatctaactgtaaacatctgcttgatatgtctgcaaacttggaagttacttttggcaagtgaaatgacagtgcatctataacatcctgtaataaaatgaatcggggaacaaaatcataagcttggttctctaaacaaaatccttccgtttggctttcaaagcgattcgaaaactgaaaagtacctgatccatttgaggagatgataaaactttcaaaatttcatctaatacttcttcaataacatcgttctccagttcattgttagcatccaaagctacgttctcatacaaagaatccaaacagctgacaagttctgtcacaaaactctcaaactcttgaaatcctccggcttcttcaactgactgaaaaatcacaaaattagcggcgaatttttcattcgagctccaaaaatcacgaaacagctaagtattcatcgatctcaaagcatctagaaattccacccagaaaacaaattacacaaacccgaaacgaggagaagaagaagagagaaagcttacactgaaacacaaagctaaaagttctcgtacacgacgcgaaggagaagtagtgacagtagttgactcggagctcccttcaatggacgattccataacgccaaaccttttcaatttcgcccaagtttcgttcacagtgagagtattaatgatcgcgaattaaaaccatatcgtttggttatatgaatagagtttaaccccggatagtctaattctaactaagaatagtttaatatctgtacccaaacagaccacgttctctctctcaacactttctcgttttcgtctccttcagatccggtgcactcacgctcaccgaaagatcctcactctccttctctgatctcgccatggaacctgacgtcagtatcgagactttgtcgatcattcggatcgccgtccttccgatcggcactattccgccgacgcttctccgggactaccactcgatgctgctccgtcatcacacgatcgcgctctcagctattagctctttctacactgaacatcagaaatctccattcacgaatcagccgtgggattccggctctctccggttcaaatttgtgcttggtggttctcctccgagtccttgggaggattttcagtctaatcggaagatgctcgccgtgatcggcctttgccactgtccttcgtcccctgatcttgattctgtcactgaaaaattcaatgtcgcttgtaagagttattcctcggctcttgtccggcgctgcttcgctttctcccctggcgattcgcaagtaagtatattagtttccatgcttcttatctgctatggcattcttagctcgatgccgatggatctagctagcttttttctgatttgtctctacagttgatagtgatgtccattttttgtaccagtgatttagttacttgcttatggatgcgttagattgacgatttactgaacaatgtactgtcttttgcagcttgaagatggagacaagaagggtgaaaatttgattttgtttcctccatctgacaagcaaactcaggagtttcatttacaaacaatgatgcaagacattgccgcttcgctgttaatggaatttgagaagtgggttcttcaggcagaatctgctggcacaattttgaagacgcctttggattcccaagctagtctcaactcagaggaggtttatgtctaggtgtcctataatttggtctacgtttcatttcttcctctggaagcttataacttattagcatagtcttctaggctcactagttttgtttaatgcaggttattaaggccaaaaagcgtaggctgggacgtgcacaaaaaactataggagactattccttgttggctggttcacctgttgatgccaatgctcattattctactgctctggaactggccagattgactggagattacttctggtatgccggtgccttggaaggcagtgtttgtgccttactggtaaggctttatgcaaatatatctctaaatgcattgttcttacatttttaatagtattatagtccaaaaacatggatagtgatgtgctgtttatcgaaagtgcactgattatgaaattgctctcatctgtccctctttaattaagtttgcaatcatcttagttttccgttttcttaatattaggtagatcggatgggtcaacgtgatgtggctttagaagatgaagttagatatcgatacactaatgttatcttgcactacagaaagtcatttattcaagaaattgctcagaggtaattctaccaacctgtttggctctcttcttcgataaacttaagtaatagcaatcaattctcttccttgcagagtttcgcccctaagctttgaactcgaagctacccttaagctggccagattcctttgcaggtatcattgtatgctctctatttctttaaattatcatggtgtggtttcctttcttgccttcagtctcctgcttaagtttaaggttgctatggtatttttgtctagtaggaagcttatcgctactaaaatttgaatataaactcatgggatcttgtgtgtgtgtggctttgatcctctaaaactatctgcaacattcaacttataataccaatatattgagattactattaagtattaagtggcctagtggaggatggctgtatgttaatgttttgtgattgatggtgatgttagctgggaaaagaataattattacgttttgaaaaagctaaaatacatgggttttccgtttagtatgaaatgatactctctggttgtggcagcttttatgtttttttaaccttctggttgcatcctcatttttctcttggtatctttgatcttaatcattcttacaatgtcattttatgtgttgtgcaggagggaactggctaaggaagtagtagagctattaacaaatgcagctgatggtgcaaagtctttaattgatgccagtgataggctcatattatatgttgaagtagcgcgtttatttggagcccttggttatcaacggaaagcagccttcttctgtaggcaggtcgcccaattgtatttgcttcaagacaatcgattggctgctatcagtgccatgcaagttctctctatgacaactgatgcatacagaattcaaagtagggcatccatgtcaaaagtgtcggttaacaatgtgagtttgccagcataggcattatttttcctctcttgtgtttgattgagcatggttttctggagttttttttgttatcatcacttttcactatcttggtatttatccatgtatcatactttgataatatattgtatcttctcttgtgtttgttggtaaaggaaactgggcgcctacctgacgctgggaaaatgcatcatcattccattgtctgcctgttcgagtcccattggagcactttgcagatgggtgtgcttaaggagatactcctctctgctgttcgtgctggagatcccttaactgcatggagtgctgcagctaggctattgaggtggcattatcctctaattacaccttcaggtcaaaatggacttgctaattcccttgcaaattcagcggatagattaccttctggaactcgctgtgctgaccctgccttgccttttgtaaggtatgtttatcagcagtcaacctttttgctctcagagatgttttgcttgtgcactctcaccatcatgaaacaacctaacttggtcatgttatatttcctagcactctaagtagagcaacgagatcagaaaaataagtaataatctcttttaatccatctcttgggcttcatatatgcccaatatgtgtttattttcaggaatgtgttccatgtttggttcttagctgactctggcaaaactgtgtatgttatggcaaattttaatggttcttctaagcatgattattttaatgaaatttcaggctattctctttcccactccattcctcccaagtggacatcgtaaaacgcaatccagcaagagaagattggtggacagggtctgctccttctgggccatttatttacactcctttcagcaaaggagatgccaacgaaagtagcaagcaggaattgatttgggtggtcggtgaaccagttcaggtcttagtggagttagcaaatccttgttgctttgatttgcggattgatagtatttatctctcagctcactcgagtaactttgatgcgtttcctgtcagtgtggacattccccctaactctgcaaaagtgatcacattatctggtattccaacagctgtaggaccagtgacaattccaggctgcacagttcactgctttggtgtaatcactgaacatgtgttcagggatgttgacaatctgcttcttggagcagcacaaggacttgtattttctgaccctttcagatcctgcggatctgcaaagctacgacatgtatttgttcctaacatatcagttgctcctccattgcccctccttgtggctaatgttgtgggtggtgatggtgcaattattctgtatgaaggtgaaattcgggaggtgtgtataaattttgcaaatgctggcacagttccaatagtacaggcgcatgtctcgctctctggaaagaatcaggatgctgttatctcgatcgcagatgaagctttacagtctgctcttcccttgaaacctggggcacaagtgactctgcctgtgactttaaaagcttggcatgtgggtccaactgattctgacaatactatgagcagtggcaggaatgctgcgggtaacacaggaagaccaaaagacggaaccagtccatcattgcttattcactacgcaggtattcatttttttccttgacgtatgtttctatgtatcttactttttcagtgcttcatgtatcctcacgatgactaattactaaaagcatttttgtattcatatttttgcagggccattgcctaacaatggggattcccaagaaaaagaatctatcgtgccaccgggcagacggcttgttgttcccttacaaatttgtgttttgcaaggtttgtcgtttgtgaaagctcgtttgctttccatggaaatccctgcacatgtgagtgacaaccttcgggatgaagacattgaaagagagagcaatgcagacagccttgtcaagatcaatccctttaggggaagctggggactacggtttcttgaacttgagttatctaacccaacagatgttgtttttgaaatcagcgtcttcgttcagctggaaaactctgccaaggaagatgattcttcaccagtacaagattctccagaggatggatacccgaaaacaagaatc

SEQ ID NO: 69686 - DNA, 351 bp, Arabidopsis thaliana landsberg
aaggttccagtaaattacctttgggttagtagcggacagaatggtattagagaagtggtgaggccgttgggggctctggaaactcatcgcagcagccgtgcggcgactactggggcccgttcctggcaggccaactggggccaatggggagactcccaacactccatcactgtccccatcgacccacttttccttagcctgatggatttattcactatgttgttaggtccaactgtatatttttgctgacctcgactatatcctgtaccacgagcttcgtgctcatatctacattgtgcatattagataattccatgaggcagtgcaaccacccaatcccacaatacaaga

SEQ ID NO: 69687 - DNA, 99 bp, Arabidopsis thaliana landsberg
gcggaactgaaacaaacgaaatccatattctatatttagttttacttgcagattttacacttgtaacaaaaactcgtatattgagactgtgttcctaag

SEQ ID NO: 69688 - DNA, 106 bp, Arabidopsis thaliana landsberg
gatatcaatttgtgatttatattctagttgcaccttgaaacatatatatgtacccactacccagtacacgtcctttagattttatttctttcccattaagcatctg

SEQ ID NO: 69689 - DNA, 478 bp, Arabidopsis thaliana landsberg
aaagaacgacacaaaggctgctgtactatagctagcggcacctttcagctacataaaccgaagaagttatcttttcattgtgttgctcctcgcatgcgcaattttaagccggaataccagctagtagtacatatgaaatatcatactcttgggggcaacaaatagtttcaacatataatctagtatctaatatgaccaatatagctttcgttttaagaaattaacaattgtagaaggctaatgcttattgtaaatagatatataagaaaagtagagatatatttatttagatcattaggtcactcatcttacaatcgatcatcgaatttgttttcttgtaatcaccacaatatttttcattattcaagctactagctagagtttatagattttaccacaaacgaaaaaacgcccattccataaccaaccaagaatctcccaacgtcaagccaaattgcaaccttaatagacaaaaacc

SEQ ID NO: 69690 - DNA, 440 bp, Arabidopsis thaliana landsberg
  unsure (1)..(440): unsure at all n locations
ttcttataaattgcaaaatagtttcatcacaattcggttgtnggtgctcatcaaaaatctaaaaccctcccaacggttactttatagagtgagatactctcgtaagacctctctgaaccaaaccaagccggatcctcaaggctattaaattacaattctactactttcactggctattatactcttcataggaatcatcacttataacagacacaaacctctcaagccaaggaagttgatgaagacctttcatggcggcttcaacatatgatgactctgtccatggaggcggcggcgactgataagtagtatggtgatcactgagactaaaccctccacctgctaagaacctttggatcagagcaagctgagatctttcttgctctgagtacgcatccattacagttggaattgagttaaatgtgtcccaaggccattgc

SEQ ID NO: 69691 - DNA, 522 bp, Arabidopsis thaliana landsberg
tggggaaaataaatattatatgtagtatattttcttccgggttctgtgtgacctcgaatattataaatgaagtgaatctttaagtcaattccatgtattcaacgtaaaaaaaatcgaaaagtggctaataaaacataatttgccttctataataaagtaacaaagtctgtgtcctttaatgacttatttgagagttacagcgattaaacgactaatccaagaaggttacatatattaaaaactgttaaaaggttgtatgatcagacacccttaacatttactctcgatacttttaaaaataaatctattatttattatacattatagaattttttaagcttcttaatacatgtaaattgacatgattggataaaaaaaacattcaataacgccttaattagtagcttctctttcagtatgtgtaaactgcaacgatacataaacttttttgggtccaaatattaaattacaagacgaataatttcgggaaatagtattatttatattgggtatgttgatttt

SEQ ID NO: 69692 - DNA, 630 bp, Arabidopsis thaliana landsberg
tatctctagtaacgtgccgccagtgtgctctaaagctacatcgctcaccgtcgagaagtgattttggcgcgttcacgctttgacaaagaaaaggctgagaaacgtctccgtatcgtcgaaggtttgattcgtgtgatttcgattttggatgaagtcattgctcttatccgtgcttctgagaataaggcggacgcacaggaaaacctcaaagttagctatgattttacggaagaacaggctgaggctatcgtaactttgcaactgtaccgtttgaccaataccgatgtggttgtcttgcaggaagaagaagcagagcttcgtgagaagattgctatgctggcggctattatcggtgatgaaaggactatgtacaatctcatgaagaaagaacttcgtgaggtcaagaagaactttgcaactcctcgtttgagttctttagaagacactgcgaaacgaattgagattgatacagctagtcttatcgctgaggaagatacctacgtcagcgtgaccaaggcaggttacatcaagcgtaccagtccacgttcctttgcggcttccacttggaagaaattggcaagcgtgatgatgaccgtttgatttttgttcaatctgccaagacaacccagc

SEQ ID NO: 69693 - DNA, 639 bp, Arabidopsis thaliana landsberg
tctagtaacggtcgccagtgtgctctaaagatatgactttcaaaaaccgtctaagatcccttacctcgaaacaactggtatgccttctagaattctccttagaaaacgccgtttcaagtgctatcactgttcaaaaatgatggttactgagactcccctggtaaagaaaaatcaccaaatccctcgtatcatcaaccaaaaaattgctcaaaagttaattgaaaaaatttctatgactgatattgcccatcagctggccatttcaacttcaactgtcattcgaaagctcaatgacttccactttgagtgtaattttagaaatctgcctgagattatgtcttgggacgttgaaacagtccggggagtgactgtttcaatcgggagatggagatgagcttcattgcgcaagattttaacaatcttaatattatcactgttcttgaaggcagaacacaagctgtcatccgaaatcactttcttcgctacgatagagccgttcgttgtcaagtgaaaatcattacgatggatatgtttagcccttactatgacttggctaaacagcttcgctttcaaatttctagggctcaggctgaaacagtctcccagactgttgcactcccgaatgctaaaacggtctag

SEQ ID NO: 69694 - DNA, 293 bp, Arabidopsis thaliana landsberg
tctaagactcgttgaggctgtagaagtacttacggaatggaaatcatcggggaactgttatgattttcgagtgcctaacactgtgattcgtggttacattggaaaaagtatggaggagaaggcagaagcgatgcttgaagatttagcaagaagagggaaagctactacaccagaatcttgggaacttgtggctactgcttatgcggaaaagggtactttagaaaatgctttcaagtgtatgaaaactgccttaggtgtagaagagatccgctttatgttgaacctatggaggt

SEQ ID NO: 69695 - DNA, 150 bp, Arabidopsis thaliana landsberg
  unsure (1)..(150): unsure at all n locations
aacccacggccgccgatggtaggacaggctagcgaattagacacaaaagactatnnnnnnnnnnnnnnnnnnnnnnnnnnnnnnnnnnnnnnnnnnnnnnnnnnngcggccaaaatggctgaatatagtttccactcttgaagccgaatg

SEQ ID NO: 69696 - DNA, 1405 bp, Arabidopsis thaliana landsberg
  unsure (1)..(1405): unsure at all n locations
catgaacgatctcgattatttgatggcagatctcaattctatctatccagtgtttattcgttgacaaatttttcgaatcttcatgtctcaaacaaaaatcagtgtgattaacatatattatcgattatcggtgtaaagaaaagaaaaaaacctagcttctcatctaacaacaacaaaaaacacacatagattctcaaatgaaataacgcacttcaatttcaaaattgagatttataactaattagatcatattctctctagttcgctattatttgttgagctatataagtgcctctcttaaactattggtctctatgagttttataaatatagatatggttcattcgttcatgcagtacgtatactttgtaaacaatttatttatgaaaccaatgagattgttttgtttaggggttaaggctaagctgacccttcaacgaaacaaatccactacctgacccttaaatcaaccttaagggttttgataatttaatatgaaaaatgttttagaagaaagatagaggcgtttttttgcctacgatgctgtctcacgtgtgtgaccaaatcaaacatttcttttctcctttacattagctagtaacaaaatcaaatatatgatgaacagaagatctacaacaaaatgatattaataagtcaaagtgtcttcttctactttcctatagcaatgcggtgaaacggcgccgttcatggcttacgtggtgtgcttacctacactccaattaggcaaattttccactgaatgccgccgtctctttatatttctttattcccaattacttcagtccattagtaatttaaaaatgcattattgtttcgttgaacttctggtgcctaaagttcatttgcttaattagtcgacacaagacacttgaacgcgacagttttgatcaacaacgacataaaattggtgttaaacagatgcttagatgttcgataaatcaactacttatttttacaacggtattcctattttaaatatcaatcttataacataatttcaatctcaatttttgaaaattagtattgttttgtggcccttcttccaaaaatttattctctgaagtgaatgcaacaagatagattttacctttatatatttagtaaaatcaatgttataaaatagattataagttagacgtacggcagaacacaatagaaaaaatattatatatacttcaatgtttatgatgtacagtgggaagtcatattgcatacaatagaaaaaccaaaactattcctttgaaaacagaacaaaaacaatgtatgagaccagtaaactattgagaagaaatgaaagaaatagtcaaatagaggttgcacaaatggcattcctacttacattcattgatgttcattatattatgctatanaacctaattacatg

SEQ ID NO: 69697 - DNA, 276 bp, Arabidopsis thaliana landsberg
ggttccgtgtctgataagaatgattcatataggggagagagaaatggatgaatcaagaattttgattttgtaggaactaagaaccatacaagaatgggaatgggtgagacgaccacattaaacaacaaaatatgggaggaaataaaagaagtcatataaaacaaaagacagacggtttctgggtatataggaaaaatcaccggattcggaaaacacaagcctcatagaagaattggtacagaaaactgggaccgagtatacataaatggggagggt

SEQ ID NO: 69698 - DNA, 3906 bp, Arabidopsis thaliana landsberg
  unsure (1)..(3906): unsure at all n locations
agggaataagtgagaacaaaaattcaaaatgaaaccattcattaatagtagtaggaacatagcaaattacccacaaaagcgagcatagatatgctcgtccctgcagtcttctaaagggaactctgggtcatgtgcaagaacatgaattaggaacactgtcatgtaaactggactatcagtgagtgattctctttgatctaaatcccgacatgtccgagattctcttgtagccttgttgatgaatccattgatgtatctaaacgactgaacaaaaagacaagaaaattttcagagaacctaaagggttgaaacaaccgaaatatttccttcttagagtgaggagcatgagaagttacatcatcgtgcagatctctgcatggactagataaagaaaacgaaaaagcacatgcatatctactgggtatcatatgttccgtcaacagcttgtacaacttggtgagaaaagtcttggtaataaaggcgttggaatcctggaagatgataaacgtaaacagtcaaaaagacgatcataaacaaagtaaatccaactttctaagcacgtatatccagtacatgaaaccaagagaagcaattaaaagccagactgcccttacaaggttaacactacaacaaacaccttttcttcagaaataaattaccatacacccaagcctatacaatcagagctactttgggatacttcctatatgcagttgcaaggacagatactctcagaagtgacaaaaatgcaggatgcagtatgtagcaactgtaatagtcgactcatgacttgctatcagttaacaacgacaaattgaaaaacaatctgttgaaattattaggataatattcaaaaatcttttctagattgtttggttgttggcaagatggaagtccctttacctttgccatcaaaatggtaagacggaaaacttcaggagaaatatgaaggtcccatttccttgaaagcaatagaacagctttagcagcagccagtctaacattagctcctgtgtcctcgctacaaatttcaaggacaaataagcaccttcgaacatatgacaagtcaacaaggatcaagactgtaccaagagaaactgataatggaattgtgaaagcacataaaacttgtggcttcgtgttaagagcatgtacaacatgattgatttgtatagctatccaaaaagaacataccatgatttgatgccatcgtgtccttgtgattttaatgttttattcaaaatgtttagcaagtcgtcaattttccttacgacttgaccatgacgaggcaagaaacttttcacaagtgttttgagcccatatatctgccaaagacaacaagtcaaaactgaatatacctcatctttgtaagcagaatttgagaacttcattacgcttatcacaactcaaaaatctaaaatatcttatggcttacattcaaatcattgcctagctaataaagggataacaccattcttaacaataatgtgattcacacttatttctatatgcggcagcattattcttaaaaattctggagtaaagtatgaaaatgctgaacttcttcgaaagtacacaaataactggcaaatgttgagcagaggcatttacacttgggtcacacttggtttactttgggtttaaatggtaaagtaaatattatcagaactaataaacgggaagcaaaagagtttctttctccagcacttgcctttagcttgcaagagttgcaacaaccagaagactgatcacaagggagttgattgtcagatggttccgcctgtaaatattaccatcaacaaatagaaaagttaaaagaaaacagagaattactagctggatatctccataacgaagaatagcacctcttgtcacttacttgaaaaacccggtatatgtagctggtgatatcttcatatatattgtcatattccaaaacagaatattgcccaacacacgccaaagactgcaaagttgttggaatgttccgtccacacagcaaagaatccatgagcatctgagtaaaaggaaggcaaattaaacaatgtgtcattgctcaattttctctaaaaacggaaaaccatcacatattcaaaggaagtactgtgaaagatatgtgcacacagcagactgtcacatgatcaacttcaataattctacttaagccaagagtagggttccctagaatataaagcacaataagtttatatcctaaggattttcccaagttagttacattaacatacacataaatgtgaacaagtaaatgtggagtaaaggaaagtaacaaaaagttccggttgctgaaaaaataacctcgcataactcagaaaagactgatttttcagatgatccagccaatgaactgatggcagaaaccgcacatttggcctgagaacgagtaccctccagacaaaccttctccagaacagggtaatagtcactgcaaaggcaagagtatgtctagttctcattaaaccataaaaaggatattagttgcctaggcatgctataacataagccatttttaagaagaaaaaatatctagaacaaacttatagcatctaatcaatctgaaaacaaagttaagaaaatgccatgtaaaccaagttctctagcaagaattttgctttagcaacacagattttatattttaacctaaacccattgtaagtcaaatagtgctgaagagattacccgaagttgacagaaatataaggagctgcctttgataaaactacaattagctcatcagcagctgaatcattctcctctagcagcttcagaaactgcttttccgaacctctcaggtaagaagggaacatgttgagaattacctaatttaagaaatcagtaacagtgtctcatttgcatattcgaagacaatgtaagcaaaatactaatgcatacttaagaacgcttatatacctaaaagaaaagttcaaaatttataatacaacaaaagttaacaaggaacacctaaaatgaacaaaggatagatatcaattggaacaaaataacttaatgaaaggataataatcagacgatgctagcatgtttcgcaacatctttccttaccagaagaagtttgatggaaggagccttcaattgcgtgttggcagaggtgctgccacaaagctgattcaaaagacactgaacatgctctgagctaaatatactaggcgaacattttgtagaaagtatgcgcaggaactcgaaaagagaatgtttaacaccaatcatcttgagaaacttctcctgaaaaataaaaataaataacaacaatgagaaaatgatcacttctctaatatgtagtaaagttgaatatatccaatatactaaagcgactatttattttcttcattctgattaccaaatgcattttctgtaaaatactcttgctgatactactaaacagaaaagtttgaacttactttaataatctgggcatttgtggatgacagttcctccagcagtaaagttaagacatcaaaaattgatgcatccctcattcggtctaatttttcaaagagatcttctgcctcagaagcatctggaaagcatgctgacagcttaacgaagtagctctttttctttctttgtgcttcttctatattgtctacctaaaacgagtatcagttaaattaataaaatgagcaaagtaaggtttgcgaatccctcaggatctgtgaaacttcaaaacttaagagaaaagtgtaaaacagaccttagctttcctccagagggttaggcaatgccgcaattcattttgcaacctggaaacatactgagtgaataacaagaaagacttttaaccaagacttgatgctgaattattatctctaccttcttttctgagataaaattgaatagagtgactntttagagtcacatggaaacgagcat

SEQ ID NO: 69699 - DNA, 444 bp, Arabidopsis thaliana landsberg
gaaattgaatttactgtcattcggagaagaagctgaagaagaggaaaaggaactggctgttgtaaagcatatagattaagagcagtcatgacgtattgaatgatcctcgacttttgaaggcagaagcttcagataaagagagggtaagaatacaatttatcttgtttgtggtgtgaactttcccatctttaatctcccctttttttcatgtgtgaaagtgtaggctaagctgtattaaaaaaactgaggcgacttattttatctgccatattgtggaatactagtggagagttcctcgtggttgctatatgtaatgatgcgtacagttctttaactttcttgctgtgtagtctgcctagcagtctatcagtgtgcattagatagttttttaactttatggatgtcgttctttattttaacatgcaatcttgcctttctgatgta

SEQ ID NO: 69700 - DNA, 540 bp, Arabidopsis thaliana landsberg
gacaatatacacaatttcgttttacggtagtaaatcaaattttgatttttcatccgtaaagagaggtaaatatttctagcttttgattagtttcatgcatggtagaaacaaaggaaacacgttttaaaattgaataagtgaatacttttcatcactatgtcattttgatagtagcaatttgatgttccattaatccacaggcaggattttagttgatgtagtagtgatttgactattctatgttgattaaccaattaatggagtcgaaatgttgcagaaggacgaaagtggtttgataagaaagctccggaatggggttgggaagagatgatatctctaacaaaacttaatgatataaatagtgggttcgtggtgaacggagagctcatgattgttgctgaagtagaaacttttgaagctgttagcacatcacaagttgcagcggttcgtgatgatagtgaatggacacttcttggctattactcttcatctgaagaggacaaggatgatgtaactgttgtagtcaagggctttcatgtt

SEQ ID NO: 69701 - DNA, 543 bp, Arabidopsis thaliana landsberg
catcgagatacacaccaacactattaaacaccacccggctgcctttttgtgcttcagcatcaaagaacgaaactaagtttgtaactgcgtctggtatataacacgcattgaaaagcttaaagttagtaccaggaatgactactgtaccacgaccatgactcttgctaggagatccttcaaaaccacttaacagctcttcacatggtgtgtaatcaacaaagtacgcacgattgttacatatatgttgcgtcgcaccactatcaaggaaaaacagatttttataactggaatcatgattagctactgttcaagtcttactttagtagcttgatagttcatatttattatgtctaaacttatttactaaacaatgatgataatcccttaaggaaaacaagacagggatatcatgagaggaatactcatatttataatgataaatatgagtttttacataaattatataaaattaattttagcacatctttggctgtttagccaatcagattattgagtatgagtagcacctcatcataacctgag

SEQ ID NO: 69702 - DNA, 515 bp, Arabidopsis thaliana landsberg
aaacgttaataagtgatgtgaagtgattattgtgatgaatagcaaacatataaagctataaacattttatttgtaatcaatccgttactaaatgaaataagaattacaacccttcttagaccatcaacgtaggccatattttgctatgtttaaagtttaaaccaatctaaacttgtcacggtattattttacgccccacgataatttccaaatttaagcaactcatgggctggaaaaagcaaggcccagatgtgttagtggatttgaattctttttcaacaatctgccagacgcaattatttgccacattttgtcatttcgatttttagatgacaaaccaatagatagatcatagatgtggcaaccaatgcaaatgcttcagaattagaggccataaggagtgaagaaaactgaaaactcttgtctacaaagtatgaaacaaagcccgtttaaagcaccatgtaaccaaacacacaagagttaatacaactaaacctatatgaaaccttttattt

SEQ ID NO: 69703 - DNA, 138 bp, Arabidopsis thaliana landsberg
caaagaagaacgccacttggcattcagcagcctgctccatctaccacccggagcgagcaaccagatcgatccgggcccccaaaagcaaaaagcagcgaaggccaaccgacaccaaaggggggaagacagcggcaacac

SEQ ID NO: 69704 - DNA, 534 bp, Arabidopsis thaliana landsberg
  unsure (1)..(534): unsure at all n locations
attacctaaggnnnnnnnnnnnnnnnnnnnnnnnnnnnnnnnnnnnnnnnnnnnnnnnnnnnnnnnnnnnnnnnnnnnnnnnnnnnnnnnnnnnnnnnnnnnnnnnnnnnnnnnnnnnnnnnnnnnnnnnnnnnnnnnaccaagcacttcagagaaattgggtattgactcggataaacgaaggtctaaaaaatctgactcaaaaaaggcagctcctccacatacagtaaatggtagcaacgaacacgttgttgaagattcagaaagatcccaaaagtgggctttgcagtcacatgggcagaaccttacaggtacagatactgaaatcagctcacagaataaaaatttagaagatgcagcttataaatctagacaaaaagatagtagagcaagagtagggaacagtgtggaaggttatggagaaacaaacaaaaaaacgcctgttgtaaagcatggctccaaacgagcatccacatcccgctcttcaagggagagcaaaagacattcgtctgtctcaaattcaatcaatggaca

SEQ ID NO: 69705 - DNA, 941 bp, Arabidopsis thaliana landsberg
ttcgaatgagcatagacaaaaaattctgctcagtttttgacaacctcgagtaagttattttagaatcattttcttgaatcacatctactacaaattatttatgaaatatacaactacacgttcattcgtttttatttaaaatttaaatgttgtaatttatttcgagggacaaaaacaaatacgggcctagtgatttttcatgtattttcttctttgaattatggagtcaaacttgtttgagtttctacagagaaaaaaaagcaaattaaaataaatattgaatgtcatattaaagtatataatttaacaaaaaatcaaagaaataagtcttctcttagaacatcacctgttaaaatataactatataactgtgtaacacacactttgagataaatacatcgatcactcccaatctccccccgtattttgtcctttattcttccattcttcgcgtcgtcatcatttatcattatcatcgagaagagattcaaattcaaaccctaatcgataagatgagaatcacacaaaacgtcaagctcttactcttcttcttcttcttcatctccttcctcttcatcgccgtatccgccggcgagtctaaatgcgagtgttcacacgaagacgacgaagcaaacaaagccggagcaagaaaatacaagatcgccgcaattccttccgttctggccgccggagttatcggcgttatgtttccgttactaggcaagttcttcccgtcgcttaaaccggagacgactttcttcttcgtgacgaaagccttcgccgccggcgtaatcctcgcaacggggtttatgcatgtgttgcctgaaggttacgagaagctgacgtcaccgtgtctgaaaggagaagcctgggagtttccgttcacaggctttatcgcgatggtcgctgcgattttgactctttccgttgactcttttgcc

SEQ ID NO: 69706 - DNA, 494 bp, Arabidopsis thaliana landsberg
caaacaaaagcccggagcggagaggcatttttcaataatatcctcattttttacggaccacacagtcatttaggatttatgtttaaaactaactattttctcccattatcaaaaatcaatatatgtatatataactaaaataaaatctctttgaggcccctttagaatgggggccattgtaatgtttcatgttcatgtgctatggtccggctcttagtagcatcgcaatttcaataggttcgattgagtgattcaaaggttatggaattcaaagccacataacctttttacaaatctgattttgctcttgatccacttttctctttcatatatttatggaatgggattttttttgatccaactcttacggatgtttagctggtgagtaagtatgtttaaatccacttgtaaatcaagtctaaagcgacagaaccttgatgtttacgttcttgtgaacaaattagctgatcttaaccacattcttcactgatttt

SEQ ID NO: 69707 - DNA, 588 bp, Arabidopsis thaliana landsberg
gtggcgacgccggacgcggtgctggtggtgccgcgcgaacgcgcgcaagaggtcaaggcgctcgtcgacaggctcaaggcggcgaagcgcccggaagccaccgaccatcgccgcgtgcatcgaccgtggggctattatgaatcgatcgacaatggcgagcgcttccaggtcaagcgcatcgtcgtggcgccaggcggcgtgctgtcactgcagaagcaccgtcatcgcgccgagcactggatcgtggtgcgcggcaccgccgaggtcacggtcggcgacacggtcaaagcagtgcacgagaacgagtcgatctacatcccgatcggcagcgtgcaccggatggccaatcagggccgcatcccgctcgaattgatcgaggtgcagaccggcagctatctcggcgaggacgacatcgtccgcctggaggatgtctacaagcgcagttgagcgcgacgatccgccggcattttgtatgacggcaggtggaacgcatgcgccgctcaatgctggcaatcagccagctttttattcttaatgaatccttaacccacatcaacctatcttgggcccgcgggagggttggaggat

SEQ ID NO: 69708 - DNA, 573 bp, Arabidopsis thaliana landsberg
gaagtccttttggaagtggccacttggtatggccaagtctctggtgtccaaattgtaccttatagatactgtctgtgggatgaggtgatgcgaagatcggtgtgggtacgtggattgatcgcattcggtgctgcttgggtggtatcggagttagtaggttttgtattcggctgcttatatgctgtctggatggaattcgaggcagggtatggtctatcttttatcaaaggaatggcgtcggggcaattcgaatgccctgcttactttgttctttgttggtagtgttatggcgcaagcagctttcgttataggtgcgttatcgatcatgtttatcgccgctcccgtatatgttttacgacgtaaaatgggatttgataagaaaaaactttactggattttgagttttggcgttcctgtatttgtaagtataattttgctgattctacaaaaactatatataaattttccgcacgttgaattgtggtttgagtttgtggcgttgctggtggcagcgttagtcagcacgaaaggtttgttttccgtaatgaatggaaaagtgatacgcgggcgtgc

SEQ ID NO: 69709 - DNA, 521 bp, Arabidopsis thaliana landsberg
  unsure (1)..(521): unsure at all n locations
ccaacctcccatacattatttcaaaacttactagtgcaattgcttnccacgtcattagagcaggcagctaaataacgcccgatcctgggagatgagaggtagttgcgaacatctgcaaatctcattgttttttgtaaaaagcagtacctttgtattgtgatgcttggtcaagccccttgcccttaagtaacgtaaccaggtttaagattgtaaggcccgcttttaacaaaaccggaacccacggatttaatgcgatcagattttgcagttgttcagaacttattccgggatccttcggggcaaatatcctccgaagtccgctcccggtaatcccggtagaacctcagtaggtccgcagtagaacgaaagcccttctttagtagaaccttagtagaacgaagtagaacctcagtagaacaaagtagaaccttagtagaagaaagtagaaccttagtagaacagaatccccttttacccgcccgaaaccatccagcacaggctcatatgaggatacatgatat

SEQ ID NO: 69710 - DNA, 776 bp, Arabidopsis thaliana landsberg
  unsure (1)..(776): unsure at all n locations
aataacttatttgtgtataagaaatgtatcaaataatatacaaaataaataaacattaatcctgaaaaagaaaatatttactttaacccttttcagcttattgtactggtaaagatggaaaatatatgcataaatgataaatgttgtatgcttggatcactattgaaggcttttgctgatctttcgacgtttggtattttgttcttttggtttggttcttcacgaggtttggttcttcacgaggtttggttcttttggtgcagttaaggttcgtgggggttctcttagtttggtttagtttactttatacgaactttattcttcctttgcaatagccaatatgaataaaaaaaatgataaaaatccaatggtgagcatgcaaaattcgtataatacacgtaggtcgtatttatacacgtttaacataaagggttgtaaagtatagataaacagtttgatatatattgtatacaaaaatattgtacatgtgaaatgggccatgttatgtacctatcattgaaactataaaggtacatactgacatacataatccaataaagattaaacatcgattgagtgtactatttcaaaaaagtgaattaaataatcatcaatcacacacaaatatctcaaagagtattgattgttcgaatgttattgtaaacgagttattttatgcaatagacagctcatataaaaaagggttgattggtctagtttgacttcgttattacaccatgattatggcttcnaatagtgatccatcgcacattacg

SEQ ID NO: 69711 - DNA, 488 bp, Arabidopsis thaliana landsberg
  unsure (1)..(488): unsure at all n locations
ttttagcatctatcaccagatcaggggnccgtttaggaaactaagccttcaattgccgatatggatgcctaacaggcgccgttgggccttacgccggtggtccgaaataccaaggccaccttaattatatgccccctcagcaccattactaactgggatgagcaaatcaagcagcacatagctcccggtgagctttcttatcatatttaccatggacccaatcgtatcaaggatatagcgcggctcgcctcatacgacatcgttctcacaacctatggatctgtctcaaacgagctcagcgctcgtcgcaaagcaaagagtggcacttatccgcttgaggagcttggatggtttcgcattgttctagacgaggcacacatgattcgcgagcagtctaccatgcaattcaaggccatcgttcgacttcaagcccagcggcgatgggccgtaaccggaactcccgttcaaaaccgactggatgattttgc

SEQ ID NO: 69712 - DNA, 715 bp, Arabidopsis thaliana landsberg
agtccttgctacctatgatagtatgctcatatatcaactgtaattcgttttactaggggtacctgaaatggcttgcgatttctgccagctggtttgtcgttttgtttgcttcagttgcctgtagtattcaagtaggcgggtaagtcggtccttcttttaaaatgtaccattgcgcttattttttgcattcagatcttcagctccatcctggcaaggacctaacaaccgttttatttccagatactttagtggtgtgaccaaaaaatcagatggaactccaatgtttatctacggaattaccactgccgatgaagcaatagaatttgtgatcacatccctgagttttggggtacgtgaatgctgaactttaccttcgtggctacagtgatgatatgtggtcttttcttgtaacctcgtcgccaaaatatgaatttttcagattgcgacaatagtagtggcagtgcctgtaggactttctatagccgttcgcttgaagtaagtctcttttccttctgaaagtcggtttaaacaaaacacatatcagaaaaagccaagtaaatacccaggtttcttgtaaatgtggcaaagtagtctggtaataaggttgcaaactctattgctgttcaaagaatggcaaaaccttaaagtatgcatgcttcgttgcagttcaattttttttacaggtacttctgtttgattctcatcttatcatttt

SEQ ID NO: 69713 - DNA, 567 bp, Arabidopsis thaliana landsberg
  unsure (1)..(567): unsure at all n locations
cctgtcgcggaagtccgccggcgccgattcctggctggaacgttacggcatcaccgcgctgacctcattgccgtcgagggctggcgcagcgacgggcggctttccgtggacggactcttcgaccacatcgaatcgaagttcgtcgaggcctggcagaacgacgccgggctgatgacgttcggcgacgccgtcgccgagatgctggacttcgccgaacgtgaaggcgagccgaaagacatgaccgccgcacagtggcgggaattcgcttcgacggcaccgctttacaccgcccgtgagaaggccgccgaactcaatgccgacccgggctgggactgcgaacgggccaagacacccnnnnnnnnnnnnnnnnnnnnnnnnnnnnnnnnnnnnnnnnnnnnnnnnnnnnnnnnnnnnnnnnnnnnnnnnnnnnnnnnnnnnnnnnnnnnnnnnnnnnnnnnnnnnnnnnnnnnnnnnnnnnnnnnnnnnnnnnnnnnnnnnnnnnnnnnnnnnnnnnnnnnnnnnnnnnnnnnnnnnnnnnnnnnnnnnnnngacaccaccgggatgacc

SEQ ID NO: 69714 - DNA, 734 bp, Arabidopsis thaliana landsberg
agcatggtttgactagtaatatgggaattatataggtgccccttttcacagatgatgcatccgaataacaaaatcatattacttcttatatcctaccgtccatattaattatattagattacacatttaaatataatatatacatcattagatctaaaatagaaaatcttattaaaaaaaaatccttatataaagaaaaatcacaaggttaacacaaccttatcgataaataaagatgttaaaactgatttttatatatgaagcaaaagtaaattagggcttagtgatgtctagttaaagtacttgtgttttgaaaaggtaatgagtcatgactcaacaaggtacacaaggcgtgcatcgggtaaaccacaaccttttgtaattgtcgatataacagcatgccaatattcacatggaccatatactgtgtgtatattatatattaccatatatgtgagttacatttcatattgtagaaccaaggactaaatttaaacataatataccatattcttttaattagattattcataagatatccaatttaaaagatgagttaaaatgatcaaaaaaacgctaccctgaactctaaagtctaatctttataaattatagaagtggtttgaaacaaatcaatacccggttaaataatgatggaggtttcattttttttttttttaagaaaaagaaaaggggatggaagggggtttaaacttaggtcataaaataattta

SEQ ID NO: 69715 - DNA, 513 bp, Arabidopsis thaliana landsberg
  unsure (1)..(513): unsure at all n locations
aaaaagcgggattctttttgttcatcgatncagctgtagctggtaaagnnnnnnnnnnnnnnnnnnnnnnncccaggtagagatacgattctgcgagattacgtagtctttgaaaattgcgttggcgcagctgcaacgatagcgccgcgaagcgcttgccagcctcaaagatcaccggagaacgcgcgaaaccatcgttccaaccaattgccaagaagcgccccatctgttcaccaannnnnnnnnnnnnnnnnnnnnnnnnnnnnnnnnnggcttcttcgttttgtgctgcatgctgacagtgcttaatcacactgtcggcacaagcgatcaacgtagcaaggtccttgccctgccagtttctgaaatacaaattacgcaggagcgttttaccttgaacatggcgttcatgggcgtctttcacggtttcgagcgactcaatcaactgatttgcccggcttgactcagcctgcttttgccacacgggccacgctatatcactggactgatagc

SEQ ID NO: 69716 - DNA, 335 bp, Arabidopsis thaliana landsberg
gacctttgcgaaggactgtaagagctgctctcgatgataaagttggtatgttacgagctccttgctatctttgtccctatctatgtggtatggtcgacctgcttttgctcttctttaatcctttggttttaaggccaaatgttgatgatgaactgattgcaataaggatgcacaccttgggtatgcgtccgcaacaaaattggaatcggggaaggaaagcagtactttccgcttccggaaacgtggcatagagatgaattttgctacactgggtctttatctatgagttggctgccatatatgctataacaaaaaactaaactttggatgaacat

SEQ ID NO: 69717 - DNA, 125 bp, Arabidopsis thaliana landsberg
aacctttcatgttttgagaatttttattttttaaagaaagacctggtttgttttcgggaccagatccagaattgggtttgggatttgatccagaattgggtttgggtttgggattgatccagcct

SEQ ID NO: 69718 - DNA, 123 bp, Arabidopsis thaliana landsberg
agcccaaaacgaacctaaaccaggaccgacatagtcatcaatactatagcacatgcacaatatacttctcgcattgtaacacctaacctgaaacctcttccgctccatgagataacctcattc

SEQ ID NO: 69719 - DNA, 524 bp, Arabidopsis thaliana landsberg
  unsure (1)..(524): unsure at all n locations
taattttgttttattataaaagtaataaacgaaatatctacagnctccgttggaagtgctctaagatcccaagcgatatagaatagataagagataatgtaaaaaattctaaattaataaataaacaatataaaataagaaaatttttggtctcaaatcgtattagtgtcaaaataacaaaaatctataagatactaattattttacaaatatatatatatatatatacatataatttcattcataacataaattaataatcatttaatttatgtaggttacatataaatataatatatatcaatgtcagctttcagttttactttttaaaataatattctgttaaattacatcactaactttattctataaaaaatattatgttatgtcttacactatcttattgtagaatcgtctataaatctttattaaaaatagccaaaattttctgtaaagtttttaatttttctgatatgcagtcattttcatttgatagtatcatagactgatcaaatacaacaatt

SEQ ID NO: 69720 - DNA, 150 bp, Arabidopsis thaliana landsberg
atataaaacatatatggcacgccctgttgaggtgctgcatacaagtaaaccatgagataagattttccggctgggataattgaaaccatataaatcccaaagaggaagaaaaaaggttcaaaatgtaaaagggactaattttgaaaagcg

SEQ ID NO: 69721 - DNA, 362 bp, Arabidopsis thaliana landsberg
caactgttttgtaacgatgcggcaaggttcgttctaaaccgctcgcgttcgtcgaggccgaatgggtagtgctggagatgctgccccgccagtgcgctgatcagcactgcctccaaagccaatttcatgagcatcataaaggtcggtatgtacctcgtcgcttcctgatgacaccggtactccgcacttcttcttccactgatgaggctctccttttccgtagggaccgggagttgtcaacagttcgtcactgatattgtcatcaaagatggagtggaacccatccgcttgatttctcccagtgggcaggcaatcgctttttggttagatgaccagtccccattttctaggatgtactggtg

SEQ ID NO: 69722 - DNA, 562 bp, Arabidopsis thaliana landsberg
  unsure (1)..(562): unsure at all n locations
aaagcatnataaacattccatctgttcgcatttgacatttcataacttttcgactttacttcttggtgactatataatatttcagcgtgccctattattagaaaaaaccagaaataataacaaataaattagatctataaaattcaaatgttgctaacaataatgctctcacaaaaatattttcattgataacaataccttatttccaatattcccacccatgtaacgtaacaataatcaagctaagtaaatgacttttgcaaatgattaactattttatgttacgtttcctaacacatgatttcctatttcttatgaaaataaatttactccaacaaaattattaataaaataagtattggaaaaaattatgaatttaaataaaaattacctggtggattcatagtagaatcatgaagagttgaaacacttcaagtcatcatcgaagacacgctttcacttggattctcgccatttttagaggttgttggtgtttgattcaagtcaaaagattattattatttttctaaaccacacattattaaaaaattactcttaattg

SEQ ID NO: 69723 - DNA, 2220 bp, Arabidopsis thaliana landsberg
  unsure (1)..(2220): unsure at all n locations
caatgaaacgacataatagtattaaactatcagtgtgcttaaacaatgaaactacataatagtatcaagagaataatacttgccgagtcatacccattatcatctactgatatatatatttttgtcttatgttaagatcagtctactagaaatgagacttcattattttttataaatgtcaaaataacatagaacatcagaacatataaactaaagcttaaagtttacacttttttttttttttttttataactttattagatgcattgataaattatcatttcatttactccacagctctcaattgaacataacccatatccttggccatctttctcagaacattctttcgaatcttcccagtgggagtcttaggaacatccgagaagactactgtctttggaatcatcttcatgttcttattcccaagctttctcttgcagaactcaatgatctcttcctctctcgcttcagctccttctttgagcttcacgaaagcacacatcgattctcctaaagtttcgtccggtcgacccacgacccctgcgtcataaaccgccgggtgactatagagaatcccttcgatctcctttgatcccacgatttctcctccgcatgttataacatcttgtgacctatctttaaattgtatgtagcttcgcatgtggaaacatcataagcataaataaattcaaagtaataccttcaaagtaatgcatgattcatttacttacccatcaggatctataacacccatgtcgcgactccagtaccatccacctcgaaaagccgcttcagtggcttccttgtccttgaagtaaccgctcatgactgtatttccccggagagcaattaccccgatagtctttccgtcgtgtggaaccgatttcatggtggttgggtcnnnnnnnnnnnnnnnnnnnnnnnnnnnatggttgagaccatctcttgccttgagccttaaactctcctcttcaggtagagtctcccactcgggcatccacaaacaagctgttcctagtccatacacctccgagcatccataagccatcatcactttgaatcctagcttcttgagtttcaacatgacctgtccaaataaattaatatctttactatgattctatgttaaatattaatgtactgtgacggagctaacgtataaagcaagggattgattatatataacctcaaaatatggaagttcaaccaaataagcctgattgaacaaacatgtaattcaaaactctgtgatagttagttttacctcaggaggagaggatcctccgctcataacctgtacggtccatggaaacgacttcttgaccgagtctcttgcattagcaatcatgttgagaaccggaggcgagccaccaaagttagttaccttgtgcttcacgatactatcaaatataacttcgtcgttgacttccctgagacagacgatgactcctccaaaagccgtaactgtccaaatatagcaccacccgctacaatgatacataggaactgtacatagataaaccggcattggtttcatctcattcataacaccaacagcagttgcgttcagataggcaccgcgatgactatagacgacacatttgggagtcgatgtggttccagatgtgaagttgagggcgattggatcacattcgtcaactggtcgtattggtttgaaattagggtttccagtggagagaaaatcctcgtattgttcatattttgattgctctgttggattttctgtgattgtgatgatgagaggtttttcttcaatgtttgagaggagactgagagattcttcagcgacagagaggaactcagagtcaacgaagaatacttttggcttcgttttctccagcgccatcgcaagcatctgagaatcgaatgtcgtgttcaacacgcaaagtactgctccagccatcggagctccaaaataaagctcgcataacgcaggaacatttggcgctaaagcagccacctgataaaagaaatagtttaaacaaaagaaaaaagtatgaccaatatataaaagtcgtttaaccacttacaacgtcatggcgagagagaccaaggtcagagagagcagatgcaaggcggacgcaacggtcacgtgtttggtgccacgtgtactgaatatcaccatacacaacagaggttctggcgccgaagacaacaacagctctctcgaaaaagcttgatcggaaaaagcgggac

SEQ ID NO: 69724 - DNA, 289 bp, Arabidopsis thaliana landsberg
acaagaagagtaaggatagggataaggaatacgagaaagtgaaattggttagggagaagggtaatgtgaagagaagagagagtggcgtgcgtaaaggggttgatagagttgcgaagaaagtgagaagagaagctctgaggattcgggaggctgagtatgaagatgtgtcacgtataggaaagatgatgctgaggataaatgggcatggagaagttaccatgatgatggtgactatgattcaagaaattcttgagagggaaaacaagggaggacatgaattgaatcaggc

SEQ ID NO: 69725 - DNA, 467 bp, Arabidopsis thaliana landsberg
ttgaagaaccgcaatttgtctgcccgacttatgtagccatctttgttgtcctcagtgtcggcaatattacctcctggaattggaatttcagcaacgggcataccagtttcctggaaacaccgcccaggcaacagtaccccactgtgatccggaccaaagaatttccggtaaaattaatggttgaaaatattacgggatgcaaagacacgtctatacagatgctgaaggtgatcaacaattgttttatcgcggtccccacagcctttacaccgaacggcgacgggatgaacgattatttatatcctttaaatgcctacaaggcacgcgacctcgatttcagggtttataaccgttatggccagctggtcttcgagaccaaagactggactcattaatgggacggaacctttcacggcacctcccagccgacaggttcttatgtatggatgctctcttatatcaacacg

SEQ ID NO: 69726 - DNA, 326 bp, Arabidopsis thaliana landsberg
  unsure (1)..(326): unsure at all n locations
ttaacattcttgtttgtttcaaaccaggtgatgctttatgatgagnnnnnnnnnnnnnnnnnnnnnnnnnnncgcataaggcatgtgaagttgtgaacacaggtgaaacactcacatttcaagcctatcttgtggatatatgcgaccctaaggacggaagtaaagcttctcctgagccaaaggttgaaccaagtgatcaaaaatgtgcacgcaaaccatttacagttctcaggccaaatttcaagaaaagttttttccgctgtggtatgatgatctgttttccaactctaccaatttattaggattgatttccctttgaaaagact

SEQ ID NO: 69727 - DNA, 655 bp, Arabidopsis thaliana landsberg
ctagtaacgcccgccagtgtgctctaaagctgcttcttgagttttaagtcccggagcctgaccgatgatattgatgcgagcagtttttggcgctgcaaagagaagctcaatgccacgctctgtatagctggcattctgcgaatccgccatgatagcctgtttgattctttcgatttgagacatctactttccctccaaaaagaagtccaagcataagatctcagacttctatcgttttatttgatcaattcgtaaatagcttcggcataaattgctgctgctcggaagagatcgtccaaggcaataaattcattggcttggtgcatggtatcaattgagtctgggaacatagcaccataggcaactccgcgctctaacaagcgaccaaaggttccaccaccgatgacttgttcatgaccttgtaggcctgtttgtttttcatagacattcaacaaggtttgcacaagtggatcttccattggcacatagtgaggggtatgaccatgttctgatagactgacagaagcaactggcaagttttctaggattgacttgatttgttctggacttgttccttttggatagcggatgttaagggcaatggtattatcagcacttgtttcatcgaagcggaagacgccggcatcatagaaag

SEQ ID NO: 69728 - DNA, 353 bp, Arabidopsis thaliana landsberg
cacaacggttaatataagctctattcttatgattcttggataatatgatctccatcttgttttgcagaattttaaccacaagattccttaacaggaaaagtgagagagagaaaagatgagacaatcattgacacaggtatcagatatctaatacataaggcttgagtagctatcttttagtgtggaaatcccaacttatggtttttggctgctgttggaagctgaggggtctgattaatgcttgtgaatcatatctaactgattaccttgtcaatgttatcggttttccccatagtatctcaatccatcagtggctgtgattgatattgcggaatcatatatctagtctgacc

SEQ ID NO: 69729 - DNA, 122 bp, Arabidopsis thaliana landsberg
cccggtcgacgaaacctggaccggggcgacaaacccacgaccacgcttcggacacgggcgaggaaggcccggaccgggacgacaatagcaaccccggacgaccagacccgaacccgtagagc

SEQ ID NO: 69730 - DNA, 451 bp, Arabidopsis thaliana landsberg
  unsure (1)..(451): unsure at all n locations
aacccgccgtcttctaaatgttcaccgcaaaaaaaacaatgcctggctaactttgttcccggagaaaaaatagatctccnnnnnnnnnnnnnnnnnnnnnnnnnnnnnnnnnnnnnnnnnnnnnnnnnnnnnnnnnnnnnnnnnnnnnnnnnnnnnnnnnnnnnnnnnnnnnnnnnnnnnnnnnnnnnnnnnnnnnnnnnnnnnnnnnnnnnnnnnnnnnnnnnnnnnnnnnnnnnnnnnnnnnnnnnnnnnnnnnnnnnnnnnnnnnnnnnnnnnnnnnnnnnnnnnnnnnnnnnnnnnnnnnnnnnnnnnnnnnnnnnnnnnnnnnnnnnnnnnnnnnnnnnnnnnnnnnnnnnnnnnnnnnnnnnnnnnnnnnnnnnnnnnnnnnnnnnnnnnnnnnnnnnnnnnnnnnnnnnnnnnnnnnnnnnnnnnnnnnatagcacactggact

SEQ ID NO: 69731 - DNA, 2019 bp, Arabidopsis thaliana landsberg
agctttgggtaaaggatcattaagctaaagtattttcttttgttattacagtatccagatgaaccacctcggattagtctgattgaatccaagggtcttgacgagcaaaggcaaaagcttttgattggcatagtgcaagagaaagcttctcaactatcatcttctttaatgcttgtagaactttgtgaggtaactactctatatattttcttctattctactgtactgtatgtggagcaattctccttcattgcaccatgctactgcaaatctcagaatgtgacttcttttccttgatgaaaaataatcgactggtagatttagtgtaattaaaaggaaataagtcgtatgcagaagaaaaagtagagttttctgaatcacgagcagacgatgtgtgtatgtgcgtggatttacatatgcaatcttgattaagattagaatgtcatgtagtgtatactaaaaatatatgtttctaggaagcagtggagaggctcacaattatgaatcacccggagggagattgtccactgtgtttgtatccgttattccctgaggatggcgggagtaaacaaatgccatttatgaagctgatgtcttgttttcattgtttccactggtaatgaatagttagcctcagttacaattctctttcttatgttgggattgtattccaaatgtttaaggtgtctaattgttctttaatgatttcaagtgatcagtgagtgcatcattaggtggtggaattggcttcatgcacaggaagaggctgattcgaaatctggtgacactttacatatgcgtagaggatcaactgctcgagaaggtttgtatcataaggtctttttttgacggaaactactgaaaaagtaatctgaatgaacaagtattgcaggtaattctggatcagcagataaaagcttgggaaactgtccagtgtgccgcaaaatttttcactcgagtgacattgaacatgttcttgacttagttggtgctcaatcatctctacaggtgagtgagccatcaacttcggattcaatccagtgcctttcattgatctaacccctcaattcacaatttggcttacacgtaggactctagtttaataccaggcaaggaccaagacccgctgctccagtcagattcagagaacataagaagagagcggtttgagtctattctaaagacgcaggaagaaaagggtggtttggttcaaccgaagaaaaacatatcggtggtgcccggtatgtatcttcctccaccagctcatgcatcaacgtcacgaaacgaagaagaagaagctggtgaaagccaagaacaaggagaagaggaacccaaagaagctgaatcagagacaaactctagcagctccaccaacaggagaggtcgagggagatggagaggcagaggcagaagcagaggccggggacctactgtcaatgaaaggaagccgaattcgcaagatccaagaaaaccgacgagacaatgggtgcagagagccagagaaggagacaaataatttatgctaatcttgtgtgatacatcaaactcaaactcaaacacaagatatatatatattgtgagcatattaccaacgaaaatacatttctgtgagcatatttgtttctgataaagtagctttaggaaaatagcaagtacaaaaatacaaaccgctttaaaaaaaaagatggtgtcgtctcataattgggcctcactatcaattgggcttgggcttaatatcttacttttttttttttttcgtcaaagtgttaattaagttcatacttcataactactcatagctcaaccggtttatgatctgagtgggcattacaaatatttggcttaaccggttccgagccatttgtaatttccgagtatctacatcgccggcgattgattctgctcatcttttcgatgccctctccgtctgcagtcgccgatctcttggccgctcttgcttacaggcttcagaacggagatgaattattcgaagaagaagaagaagcggaagagtctact

SEQ ID NO: 69732 - DNA, 174 bp, Arabidopsis thaliana landsberg
gaggacaagggagcaagacaagaaggaggcggggaaaccggcaatggagacggaaccggcgactggaaacgccgaccaagaccgatagcgaaagccctcaatgaaacactcagaacctggccgagcgacccccgccgcggaaaccgaaaccaaaagagcaagacacaaaacaga

SEQ ID NO: 69733 - DNA, 153 bp, Arabidopsis thaliana landsberg
aacactcactgcagggaacggaccaccatacaactcaagagggccgcctactcagggaacacggaccttggaatgagcccggcaaaacgggacagagcgaggacagagccattaccagctaccgaacctacacgaagcgatacacagaaaaat

SEQ ID NO: 69734 - DNA, 609 bp, Arabidopsis thaliana landsberg
agacaccctgttatgtaaatctgctactaaataaatatattattcttttatcaacgaataaactacttataaatttatttatgggatgagaatagtggagtgaactagatctagtagttggtacaattacgaactatatttttaagctttccaatatacggttaatatggttacggtaaattaactgttacggttagtatattcttttttctatgtcaagaaacattttacatatacatacaaaatgattgaactcatttcttaaaagtattaaacctacattcaaatataagtatcaaccatatactacttaattatccaggaaactacacggaatagttatgctttgatgatgaatataattcagaagaagaatataattaataatattatattgcaacaaaaaaatttatcaaccaatttactcaagggtcgttcattaatattatcttatgtagcataacaacttatgggtccatcccattttttaagactctaaaaaagtttaaaacaaaccaaagagaaaacattcgacttttcactattgcagtattttgacagacaacgatcttcagtactttgaaaagtggtttctgaactaattaaact

SEQ ID NO: 69735 - DNA, 723 bp, Arabidopsis thaliana landsberg
tggcggagctgggacgatgaagacggcgaaacgctggctcttccgcctgctgccgctgctcatggtggtgctgttcttcgccgcctgggaattctatgtcgtctatttcaaagtctccgccttcatcctgccgccgcccgaccgcatcgtcaccgcgatgatccgcctgctgcagcagcgcaacgtcttcatgcacgtcgaggtgacgctggtcgagacgctcggcggcttcggcgcggcgatcgtcaccggcgtcgcgctcggcacggtgatggcgaagtcgccgtggaccgagcgggcgctcaggcccttcgtcgtcgcgacgcagatcatccccaaggtggcgctggcgccgctcttcatcctgtggttcggcttcggcctcgaatccaagatcgtcatcgccgccgtgctggccttcttcccgatcttctcgaacaccttcatcggcgtccgctcggtcgaccgcggcctgcgcgaggtgatgacgacgatgaacgccagtgcctggcccattttctggctgctcgagatccgcgccgccatgccctttatcctgaccgggatggaggtcggcatcgtgctcgccatcatcggcgcgatcgtcggcgagttcatgggcggcagcgtcggcctcggcaatctcgcgatcctgacgctgcaggaaatgcagggtcaccagctcttcgccgtcgggctgctgctgacgctgatcggcgtcat

SEQ ID NO: 69736 - DNA, 3994 bp, Arabidopsis thaliana landsberg
tagtcaaacatgcctctttgtgctcgcactttctttactctcttctccactttaatctgatcctattatattatactaaacctcattacataattagccccaccgaggcttaattggggtccatactatattgactttatataattttgaacactatcctcaatatgacaacaactatataatgatccaattgttagagcaattagatgtgacatcaaaatcaaataacacagtttatgcatgcatgaaattgttagagcaataagatgtctttatcaatatacttttatttgtatataccaaaatgatgagcctgtcttccactattggacatactcatgatttcaacaccaccaaattaaagagacaactctttggccttcccattctatcttcactctttattgctactttagttgacacaatgttcacttaagtttactactttaatttatttattttgaacaacaaaagattaaaatacaaaattccctgataatgtgctacaaattacggaccacatcaattctcccacattttaatatgaatttttctttcttgatttttgttaagttatcaataaataagagaagtttttataagtgaaaaaaaaaaaaaagagatgatttcgacatgtttgtattaaacgtataagatgaccaaaacactgacaaaaacggagaaacgtaccggtgccggagaatttaaaattctcacgtgtggtcggcggagaaacctcaagtctcttgtgaagaatgtaagtagttttaatgacgtcgatggttctacttagctcctctaagtcccgatcacatttctctagtgctccgactagactaactctcgccgcatctccctctccttcattgtgcggaagcggtggcgcaacgattcctccgccttgtccgtttgatgaatcttgcggaggagaagcgtaaacgacggttctttgttctcgctttttagatcccaaggtgatggatttgcggcggttgaaggtggagaggaagaggttgaagaacccggggaggcagccggaggagacggcggaggagtttgagtttctccgtggaggattatggttttcccgccatgaagatgaaggagaaagcaagttctctcgtttactcttcttcatattcctcctcttagctgtttttgtttttctcacctctttctttttctctctatctaaaaccttaaattcccatttagtcaaaagaaattattcatttcaacggtaaaattataatattataccctttttgtgatttaggtctccatgctttatttttattttattctccttttcacttttgttttacgtttttttttttactttaaggttggtccatttgcacatggcaaattccaaagcattgacactttacttattagctatagacattataatgtcattttttggctagacattatagtgtctttcatgttttgtttcctatttggaagtttaattagtgcttactggcttacaaagtaaattatcactcaactctagataaacttcaactagaccttcgaatacaacatgatggggattccattaacaaaattaagaaccctaatcaaatactaggcatttaggagtttagcacaaggctctatgagaaacaaaagggcattattaagagtgttctttaagattcatgaccttgtgcatgctggacagagaaaacttttagagctttttttatcaatcctataagaattagatattttttgtacgagtaattgtaattgcatcattaatggcactctgttttgagaccataaatcatttacacgtttgaagaaaacaatttatgctttaatttaacaattttcggtaagcagaaaaactaacactgctcacaaattttacatgtagagatatatttccatctgtcaaatataattgtgattgaagtttttaaaatacataaaacattttgatcataaataataagacttcgtaattgattgattacagtgctgagttggcaaattgcaataagatttttttagaaagacatgcattgcacattcagctgtgaagaaacaacaaactctacatacgaattgattctcactgatcagactaatcttaccatcatatcaatgaacacaacattggaagtttcaggtttataatctcagtaacaatatgactgaccagtcaaaacaaagcctactctatacaaataagggctcgaaagaaagaaaagccaatgaaaatttgaatgaacaagagaaactaaactaacccactttggtttatagatcattccatactttgtagtcgctagttgagctgttgttctgcatatggtcttggcagcctatgaagaaagtagaacgcacaggatctacatttactagagcatgagccgtgccactctgactaacagctacagctacctcatcctctccaattaacacttcggcgtaacctttatcgacttcgtggttttccagctgcattcatataggtttgtccataaacaatgtttgattgatgattttggttcatcttgacccgagagcagtaaagaaatggaaaaccagggcacaatcatcacaggaaaaaggttcaaacaagtaagataagcccacttagtcacattactaaacatcttaatggaagaaactcgatttttcattcttagacagtgattagtggttcagtgatccgtgagtaaatgactgatgatattagtccaatagtcaagaacatctttatgatagattcagaagggattttcacctttatctaataaaaagagtcccaacgcagaatctaagacaaaaaatcagaaaaccacatcaaaggaactgaaatctagagtttgtctagacaccttaaacactcccaaaccctcaaaccaaccaaagataagcctgctcctgcagctgttcaaacctctacttacacacatcatgtcacacaggtttagttaagttggcatagcattaggaaaaactctgaactctcctttccaccttctttaccaagagttatcacataccattcaatgaagcattggatacttagataagcaaaaacagaaattcctttctgttagaggtgttcaacagactataactcttccattatgtttcaatcaatgagatggatgatgagacttaccctgaattttgtcttggctccccatatgacaaacgtctcattacaggtatggtgtctatggtttcccctcaatccaccaggccgtatttcaccaacatgaatggaaacacacgatgcggctccaccttcaaacaagtgaaaacatgaaatgtgaatctccagtaccgagaaaagagaaacttaggattacacaatagtctccttcaaggttaggcagtcactccaaagattatcattcctagagtgactaaagacatagatacttttctcgatacatgcttccaaaattattttaacctcaatacattattaatctcaggaagaaaatgaaaatgataatttaagctacagattttctcagtttcaatatactcaagaaccctatacgaattgctgtttatcaacttcctaattaacattcgtaagaattgatcagaacctttgagctcagaatcacgagcaaggataacgggatcaagcaaccaaccacggtcgtctttccgagcaggagaaagcgacgccaaaccgaaccggaccaaattagccttatcgtcgtcgtcgtaaactttcaaatcgggatgactatttaccgtcgatttcggatgtgaagaggacgaagagacgtgtgattgtgaagagtgttgtaacctgagggagatccatgtgagcaagaggaacaacgagagaagcagaggaatcgcttgaggcttcttcagtaggttgattaaaggtgacaatctctggttctcgatcactactcttctagggtttgccattttccaactttctctatcttcctctgttcattttgatttggtgttaattaattaattttgttttatagag

SEQ ID NO: 69737 - DNA, 106 bp, Arabidopsis thaliana landsberg
tggttttaagacaacctgatgggtgagtctgcacgcctacctcctgtagcactgtgcggccattgcacggccttaggtgcggactggagacgacgacctctggacg

SEQ ID NO: 69738 - DNA, 466 bp, Arabidopsis thaliana landsberg
caaaaaacagcaaaaagtataaaacagtctgggagcaagcatatgactttacctgacatccgataagccggtaaagaagctgttgcaatgcaggaaactgatctaacaaaacatcaccagacaacatccttgatcaatgcgtctacaaaaaccatattgaacaaaagtttctgaaaatgagaactgtaacttcatgatgagaagttaggagacaaacctttgaagctgcacctgaagctttaggtaaacgctctgcctcgaagtcatactttaaaacccgataacattcaagccgctcttctagaaagagcgcgtatgttctaacccaagcagaacaatcccacgctgcatcaagaaacaaaaatatgaaattgggcaagttcacaagaactgaaaacattggcatatatcaaagaaaaagaaatagtttaatcaccaagaggacttggggcatctttgaaggtag

SEQ ID NO: 69739 - DNA, 1612 bp, Arabidopsis thaliana landsberg
ttacttagccctgcagagataagtgatctgttttcagatatccgttttgttcgattgccaacaataaagtaagttgttcacttcttagatagataaacattacttactactcttgggaagcagaagagatttaaaacaagtttctgtgtaggaacttgctaatgggtgacaaactctctggctgctgggcgacaatgggagtgataacagagaaaggacaacccaaaacaagctccattggccaggcttatggtatatggaagatcggtagcttaaatgaaaacaatgtctccttgttcttgtttggtgatgcttacaaaaagaatcagacagaaaaggcaggaacggttttcggtctgtttaattgctcacttcgcaaggacaatggggtaagtatatagcatcagcttttcctgtgagtagccggatggcttaacttaatctcctttttaaaaaatttatgtttgtggcagggacgtgagttctcattgagtgtcaactctgctaaacaaatggttagactgggggtttcagctgattatggagtctgcacagcaaagcggaaagatggaacaacgtgtacatctgttgtaaacaagtaagtgtaccttagcgaggcatctctctttgtattgtttcctgaatgttgagttacaactttgaatttggtttcaggcgccaaggagcattctgcaagattcataaactggtacattttggtaatactttggtcttgttttctggcgtcgatgcaatgaaccatgtttttcactaactatgaatttttcacagaatgcatcagacaaatttgctacaatgagaactgaactcaaaggagggtatgctaatcctacctagtcgtgttcataggttggtcataccacgagttggaaattttcatgattcttgggatgtttttctaattcaggaacttgagaacagcgttcagagatctaaaatcgcaagggatttacacagttgagccaccagcagatagaagcggaaacaaaaagaccactcagcctgttcgagtgctatcagtggaaggtctccgaaaggctctaaggttggaaactctcaacaagttttttacttttaacataacgaacggaacccgcttctcagattctaaagccaattgtgattatgcagtggcgcggataaagtgacccctaatgtacactcacaaggaatacgtttcttgaacgagatggccagtatgcttcttctttctcatttgacacaatacaaataaagcttagaaggtgaaatgtgtgactgatcttgaaattacaggacaaaaggcatcaaagaacgtaaacaagaaatctgaagctgtgaataagtcgacagagaagaggtaccatcttcctgagttgttactttttttagttgtactgatgtataaaagttatctcaaaggagatgttctggaatctcctcttcaggaaagcatcaacaaaagaaacacaagtaaatggtgagccaaagagaaagaaaacagagcacaggaaggaaactcccgagatttccaccggaaaaatgatgctcctagatttctgcagctctgacgaagaatgactcctcaatagacagacattgtcaaacaggt

SEQ ID NO: 69740 - DNA, 1691 bp, Arabidopsis thaliana landsberg
gagagaaaagcatcaaactttacagattcttgagcgaattaggtggaaacaagacacacccagatcaatattcgaatcataagatctattacgcaagtgattgatcgaatcagagatgcaaatcggaatcgcacactggatttaagaaagcaaaaaacaaaaccctaaaaaagtgagagagaaactcaccgggtgcagcagaaggagaaccaggaggagtttcgagaaccctatcgtcaagagacagaagcaattcaagatcctcttggtcgttttccatttttcaatttcacgatccaatagcgatgcacaagaacacaaaacaacatctcgtgggcgggagactgaatttcgttgcccgccgaaacgcataagcgacgccgtttcgttgttaataaataatgtttcataccacccggttttaccggttcgtgagaaagatcaggatggtgaaataaaccggaaatttgagtgacgatagtgtcggcatggcatttttttttgtctcttaacgagagagagtaaataaaatagtcagctgtcttacgtggtccatcaacaaccacagggccctaattgccaccaacatccacttaaagtgtgccacctgtcttaatcatgggcttcttatcaacatgcgatggcccaatataagatacttacccttctctttcaataattatccaaatgtgcccaaatatagtttttagaacaaatgaacaattatatatgttttcgtaaacaaaatactaattttctttgaaaacatatacgtaaatttcaatattgatgtatgattatgattgtgataggatcaaacatgcttaatgtagaaagttatgaaaaaggaataagattttcattaattaatttattatagtatcatcagaaagcaatgttattattcgaagagagaataaaaattaaaaaaattaaattaaattgctgatattttttatttttaaaaataaaagacaaaaaaagaacaataaaataaattggtccgtgtctttagcagcgaagcgcacacaaagtttgcttgccttctgggcttcacgattctcacgacatctgtttatcttctccgatttccacgtccatggatctcagtcaatgttccttaatctctcttttcgattagtccaatctccactaatctctgacctcagatcgcttccgacgccgctgaactgtgtccgtcttgatctgtgtttaggagaaagcttctagggtttttgttttggttgctgagtagaatttgttggatctgaaacggaaatcaaaatgggctttttcagtacgatactaggattttgtggatttggagttgggatttcattgggacttgttattggttacgttctcttcgtctacttgctccccaacgacgtcaaggttcgtttttttcactgagatttgtggttcaatcctatgtccacgcttgaccgttcataaactacattaggattagcaaatggaattgaacttattgctcacttacaacaacatttctctaggcttgacatgtttactcgaagtcttcttggctgtgttggtgtatgtgtctaaattagttattcatcccagaataggaatttcccaaacagtgttatgtggtgatacagtcattttacagctcaagtttgtgaccctttcgctcttataggatcctgaaattcgtttgatagctg

SEQ ID NO: 69741 - DNA, 1847 bp, Arabidopsis thaliana landsberg
  unsure (1)..(1847): unsure at all n locations
agatatcacttatttaagtgaatctttttcttcttcaattttgtctctagattttacgatgttgttgccgattccatgggcaaaggcggcacttgttgcagcaaactcttcttccttcaattgagtgtagttcacctttcttataatccaagtttagtttgttcaaaaaagaaggtgaaaggaatacagcaatatttatggtaaaattgccaaatgcgtttggaaaacaataaacacatcaatgaaaccaaatatatcgcataattaatcctttcaccaaccaaacccaataattaataagttttgatgactcgatacctctcatgacaacgttgcttcgagtttgaaattcgatactctagatagttttagagagatcgtaacattgaaacctccgtgcttaaatgtctctttgtggttgatggataaaagcaactaagcaagtaggtagtaggagtggagcatccatctgtcagttagtcccatacgacatgtatcttcatcatcattcacatctccaatgttttgattaattattaacattatcttattttttgggtcgattttttatattatatttttctccatattttcaacatttacgtagttaaattgttttcaactttcatactctatactatacattatacactataccctactccatatccaatctattaaaaattaggtatatccaccaatttatttcgattggttgtgatgatatagtaacaaatgagtaatgtctcatgacccttttctagtttatttttttttcttcaattccagcctgtcacatatttactatggtgtgtaactcggccttgtattgcatcataagtcataacattgtgatgtatatttgtgacaaaaaagattatgaaaccattgtactaaaatttgacaaactaatcaatgctaggctagtggttcaagtatttattatgaaactagggttttaaatttttcattgcgattattatttttatttttttcgatttgcgatttcaactatggttggccattgtgaacattttaaatggcaaacgatatcctttaaaaaaaaaaaaacttttcaagattaatctgaatttagtccggaaaaccttagttacccaaaaacaaaataaatttgatccatataaaaaaaagtgattcatttccctttaatgtatctatttatattcctttccacactatttgcagtgaaaattaaattcagttataaagcagtagtcagttacaactgcaagggataatagttctgattggttgtgaattgtgatgattcaaacttttgtttcacctcacagttttgtcttcaaattcagcctgtgacgaagttatttattcatctgttcatttactacactatgacanaattttgtgaaagtctagtgaattaagtcttttttttagctccacagtataattattttctagtattaataacatatataagcanaaacatttaaagaaaattataaattctgttgtggttctcagactccaaattgaccaaaacttcaatcgaatcactatcccaaattgtgtgtctctctctctctcgctgacacttgtatgagtaatgtgatcgaagaagtagagaaagacatatcaaaagaaaaacaaacacttgactcgggttccttcaacttcgataattaatgaaaatcaagctaagccaatggtaaccaaacataaaccatattaagttgatttgatcgtaagcagctgccaatccatttgaaccgttttacaccactaagaatcagttcagttttaaactcaaacataccaagttattttttttatcgtcatggactcagcaaaatcaaaggcggata

SEQ ID NO: 69742 - DNA, 476 bp, Arabidopsis thaliana landsberg
  unsure (1)..(476): unsure at all n locations
catgccgcacttctcggtcacnnnnnnnnnnnnnnnnnnnnnnnnnnnnnnnnnnnnnnnnnnnnnnnnnnnnnnnnnnnnnnnnnnnnnnnnnnnnnnnnnnnnnnnnnnnnnnnnnnnnnnnnnnnnnnnnnnnnnnnnnnnnnnnnnnnnnnnnnnnnnnnnnnnnnnnnnnnnnnnnnnnnnnnnnnnnnnnnnnnnnnnnnnnnnnnnnnnnnnnnnnnnnnnnnnnnnnnnnnnnnnnnnnnnnnnnnnnnnnnnnnnnnnnnnnnnnnnnnnnnnnnnnnnnnnnnnnnnnnnnnnnnnnnnnnnnnnnnnnnnnnnnnnnnnnnnnatctgctgcgggagaacccgcggccggacgcggccgaggtgcgccgggccctggagggcaacctgtgccggtgcaccggctaccagaacatcgtcgccgcggtgctggacgccgccgaggcggagcgggccgccggagcccc

SEQ ID NO: 69743 - DNA, 508 bp, Arabidopsis thaliana landsberg
taaagttgagtccattctgcaccataagcaaagattgaagaaaaagacaaacaagaaaaagtctgttgtgggaggtgtgatattatatatcataatggaaataaccaaaactcatgtatgtgtgaatgtataatgtgtcatgttttgtaatcataggtacattcgacaaaagaaagtctggttatgtcatcaatgagttccgataatttcggtagaaggaagtcaggggggtgaaaagtttgtgatttatgggttttaagcttaattagttgtaaactggtgattattggttttttctttaagaatatgacaccaaccgaaacattttgttaaaaaataattataataatactaacaattttttaaattattttagtttctttttttcacaactcatgaatgaacatttatccaacattttggactaactaggaatattattgtatattcggtacgtggaggaaggttcctcattcctcaatgaatattagtattaatatacatattg

SEQ ID NO: 69744 - DNA, 1025 bp, Arabidopsis thaliana landsberg
aacccgtcttgttgccttttttttgctcttcggatttaaatgatgtgtataaaaataagcatgaccatattttgctagcaaatgtatccagagttgtttgaatagcttcctactaatcttggttctatcagctcatacttgattttgttcaatatctaattttaatgatataagaccaagtttctttagccaaatcacaccttaataaaaggttactaccgcaacatcttgcttcatggagaaggtctatggtattattattggccaaaatttaagccaacttgaagtaacaaagaaatggttgctatggatggatacaagatgaataatacacaacgagaagaaaattaagaaacataaaatttagttatttcttttcaagtgagatttaagaagttgattttaaacatttgaaagaaagagccttcgtaatttgcatgtgagttgtgaatgaagttgctgaacctttattgaaatatttgggtggtcataacttcatcaggctactaacttagttagaaaccatactctcagtctccttcacgaacccatccccggtccaatctttatcagatttcaagcctctcttctcagcttttctctgctcaactgcttctttctgtctcttaactaaatctgtgtgtgttgtaaagtactgcagcgaatgcctaagccaacaaacaacacgaagaacttgctcagcaagcaaccaagcaagcgaaaagaatgatataaaagtctaaaaggaaagttgttcataccctctgaactcttctattgtagagaagttgtgttgtttcatgaaatctttcagctcagcgcaaagggttttcacatgaccatagccgtgcatcatcacaccggtgcataccttccaacaaaaagcagtaaaactaagtttctctcaaggcataaagtctaaaacaaaagagtgaggatagtgttgagtttagttacctgtacagtatttgatccaaggagaatgaattcagcggcatcatagccagtttcaactcctccaatac

SEQ ID NO: 69745 - DNA, 500 bp, Arabidopsis thaliana landsberg
ttgaaacgctgctgatcaatagaaaaaaaagcagatcagcaaccagcacgagcggggtaaaacgggaaaactgaaactgaggagatgacagaggcaaggacgggtaacgtggaatcggtataaaagggaacaccatattgaagaaagaaaggcacaaacaacgaggcttacgcaaagaagggaaaacagcgggggagaggagagaagacggcaccataatggggagaagggaaacgagggggcgaggagtgaagacggcgcgaattgcgagagttatggccgtggcggcataaaggcgagggtcataagggccagggcgtgaaaagggagggcacgaagcggggagtagagcagagggcgatggcagaaatggtagggaagaagacgaagacgcatagaaagggaataggacacatgagaaaaaaattagggtcaattaaagtagaacgccatttaagccacgatagagagggggagggggacgtgatggggagggaata

SEQ ID NO: 69746 - DNA, 354 bp, Arabidopsis thaliana landsberg
ctaaatgagcaagacaggatcctacatttgcagacgctgcaacgcaagggggagaatttgaaccattatgccggctgaggggctcatataaatacccaattgatgatccgggctgtgaaccttttgacgataaaggctataactctgcaagcgacaaaaacattaatttctaataaacctgtctttgggtaactgtaacaagtttgtggaaaagaaattcacctctttttaaacttttgtgcttgaggatgttcgtaattgtaccacagaacaaggacgttcggtttttttttaaagtcgttagctaaatcaatgtccaatgttaaatgctcaacccaacgtaaaggcaatttt

SEQ ID NO: 69747 - DNA, 311 bp, Arabidopsis thaliana landsberg
ggatgtaggagcagttaggacaccggcggaaagaacttgaatggaacgaaactacaggtgcacagagagcatgtctaatcttaaatatgttttaagccagatcccacaaccaattaaccacgtttaatcttgtggtgtcagtttataaccaaatttatccttagcattggtatgcgtttaatctattcccaatttcacaccattttaagaggtgaactttgaatgtaattttgatcgttggccaaatttgttatgggttatgaccttattgcaccgttttttaatacgcccttttacaaaagaattgggcc

SEQ ID NO: 69748 - DNA, 454 bp, Arabidopsis thaliana landsberg
ataacatacttagcaaaattcaaacatcgaaacctaaggcacaggtatatttaaaggcgatatgtcataatgtatccaataatgtcgattgttgcaatacacacgcaatgtaattaagcaaagacaggttgtttcgaacccatatgccaaactcaaatttcatcaaggttttaaaatgatctaaagtgtgagaatttatgcagtgtagtagagaacaatgtaaattgagcagagttaagaagaataaaaaacctggaggaagagactgcttaagcttgtcggctttctcttggtcaaagacgcatagcgtgtataggtacctcaagcatctgaccttaaacttgacaatatccttgcttctcttgatcttgacagatcgtgcatgtttccttctagctatcagaaggaagtccttgatctagtgtatatgcttacgctgcaaacattgatcaaa

SEQ ID NO: 69749 - DNA, 575 bp, Arabidopsis thaliana landsberg
  unsure (1)..(575): unsure at all n locations
catgacttgcccaagggcaagtgaaagattggcattgngngtcngagatctatcctcnttagcagnaaancatattttcttcccactgtcgattatccaatcctgcaaagaaagagcttaggtacataagtattaaatccattgttcaaaaatattctgattttggatttgcgagtgggctagaaattggtagcccttgatgatggattccatgaaattgatagctatgcgtggtatatcgagcttttatatccatcatcatgtcatggctccacataacctgacctgtaggtgctcatgttttgttcatcatcttctcattggctctaatctgctttataagagtaagactcctctttctccatgtaggccattaatgctccgttttttcttgcaaaaagaacagaataagcatattaagttcgcaatcaacaaatatggaaagaattatggatttgttttcttcttttcttttaaaacaaaactcaaaaaacttaaataaccaaaaaaaattcagnntttttttctgttttaataaataagaacatttagtaggtgattgttttggtttaact

SEQ ID NO: 69750 - DNA, 466 bp, Arabidopsis thaliana landsberg
  unsure (1)..(466): unsure at all n locations
aaaaagagtaaaaggaaaaccccaaacaaaacagagaccgggagagagggatcagaacctccaccctccaaacaaaggaccaggggaaggaaagcgggaaggacaggaccggggcccacaaaaccaagacacaganaaggagccaacaggaccgaccaggacaacagacccacaggagcaaccaccaccgcgcacaggagaaaccacagcaacaaaaacaccccaaacaccgcgaccggcagagaacccaagcccaaccaaacaagcaacccggccancaaccaaaaccaaccagaccaccccacccaagaaagaacagcgcacaaccacaaccagagaaccgacaacacaggcaagcgaaccagcacccacaggcgaaagcaacacccggcaacgccggagcagcccacagcancagaccccgcacaaagaaagaacagacgaaaaagcccgaaccaaaaaacaa

SEQ ID NO: 69751 - DNA, 613 bp, Arabidopsis thaliana landsberg
  unsure (1)..(613): unsure at all n locations
ttatcatatgaattgatatgtaaagctgattcatctttcttcttcnnnnnnnnnnnnnnnnnnnnnnnnnnnnnnnnnnnnnnnnnnnnnnnnnnnnnnnnnnnnnnnnnnnnnnnnnttatgtaatgaaaagaaaataaactttcatgccttgctttaatttagcttacgaaatatatcaacattattggtacgtataacatatatataatcatcttctaatgaatgattggtcaaccataaaaaggttgtttgaatgatatgagatccagttatccaaatgaagaaacatgtcgtgttttgtggagtcatcacacgtatcgttgaatgtaggttttcaaaatactaataacagattcaaaatcacacacaattcaactaatagtaacattgacaaagaatgcaggagtttaaaccgaaaaccccataaaaactacattgttaatattgttagtttttcagtgaaaacaaaactggttttgtagaatccgccgcagatagtatatggcttgaaattgctagtcaatttttgtattactattaataaaccctctatatatagcgagaagctagctagatataatacatattcgtgtaagatacagacgacact

SEQ ID NO: 69752 - DNA, 353 bp, Arabidopsis thaliana landsberg
atggagatttatctcacccattagcttccataagtttacatcctagttaaacaagtactaaagattagattttgtttagatatataagcaacaaaaaccgtgagagaaaggagttaacaacaaacctttggaaatgaattagttttatcaattctttctgcatgaggagcgataatatcttgcgcaaacttggatacactttctttaaactgcagtttcaatggtagtcacaaaaacaattaggtcgcaaaatgcattcaagataaaatataaacgacttatgtcaaacagctgaaacaaagttaaatcaaatgatgaagtgttgttcccaatttcattttccacaacacaca

SEQ ID NO: 69753 - DNA, 423 bp, Arabidopsis thaliana landsberg
aaatttagttatttagaataatgttacagttttaataaaatgatgctatatcacagacagctgtagtcagagtcattgcacggtccatatttgctgctttattattttctggctataggatgaatgcaaagatgatgaggtaagcgtgaatatctaaacgctacacccatctgcttcgaaactgcatacactctccgacctaagaaactacatccactcggctatgtagactcttgcggcactaaacatttcatgaaactactcacaaaagtccacgaaccttgcaatcggccacgaaatttaaagtacttatctgcgtaacgacaacctatccatatttgtctttctaacgatccagaactgggcacgcttggactccatggtgatatgaactaaggaagtggctgatggcaaacaagtgct

SEQ ID NO: 69754 - DNA, 4193 bp, Arabidopsis thaliana landsberg
ctttttttttcagatgaaacccaaaaagagttgcttgaagggcggtaacattttaagaccagtaaaaggaaacccaattctgttcttcaccaggctcttaaatgcatctttggatgggaaaaacactcatttgaggtgccctgtggtgaaaggagaactgttagtggcaacaaaactgatctatgcgaagaaacaagcaagaattgaggagagtggggaatgcagtgatgaagacgaaaactgtggacgatgggctaagcttggggagtgcaagaaaaaccctgtctatatgattggctctcctgattactacggtacctgcagaaagagttgtaacgcttgttgattcttcaatcttatcgcaaataattgaacattttcatactcaagtacttgagctgtttttggtctataagatagaataaatagtgaatagttaagggtcgtggtggtaattaattcctcttggccataggagaaaagaatatactcacttagatcttctttgatataactagaagtctttgtctatgttgttatctatgtttctctcgaatcataaatttgcatcttgctgtttcttacgcagcatagtccctttctcttgctagttccaacatttttaaaattgcaatttcctataaataccagatattttaaaaacatatcaaccagtgtacttgttggctaaccaaaaaaaacaaacaaatgttttatcacaagttagagcactattgatgaaaagttggactagtttaacatgttatggtcccatcgaagagattatgatctaagcccaaaatttcatagtttttaaaaaatggtaatcaaaagttaagtagttaagtatacaggaaaaaatttaaattgtaatattttttcctataaaaaatggatatttatctggagaaaataaatactccatttggttccatcaattttgaaaaaaaatcagaagaaagaaaaaattagaaattgtatcactctcctatcatcggaccaacaagatctagacaattgttcatgaatcataatttttgtatgtctatcccaataactttcttcaaacataacagtctattctaatatcttacatgttaagaaataataaaataaaggattgataaagaaaaaaaaaggttttttctttcttagttatttttaaaacaaaaatacaaatttactgatcaaatatttgctggatttttgtgatttgagcctcaagggttgttttttgtttgcccgtactaggcctttataatttttcttccagagctcttttgcctcctcctcctctctccgaaattttctctcatttttctttcatctccttttttgcgtcccatcactttctctgattttctcggcgactttcttccgtcccaagctcctctgaatccccagaaggatcgctctcgattcttctcttcctcctattctccgcccgatctgttactgtttttttttttactggtacgtgatcggactaaccattctcttctcataaacacacactaaatcgatttgaattcattccttcgtctatacatcactggtatttgattagatttcagaccgcgaatactatgatttcaattccgatttttctctgttaggtggcttagtcatggaggaaattaggcatctgtctgtgttagtgattttgacgctatttgaatcgaatactgttgatttatatagttgcttaggggaagaatcggttcagtatataggtgctttgtttataggaatttgtgttttgtgaatgtatgttgcagtcgaattcaatggagcttgtgaaacaagatgggaatgattctctcgatatgcttatcagacgtgcggttggaaaggatccgtttctttccttccctagacctgaaaatactcctgtccagctttttcaacttctccataccttagaacgtccaggtaatgtctcattgtctctcatcttttttggatttgacattttcactgaccaaatactttggaatttggtggattgagtactctgtggatatatcgttttggtctcgaggggtttatcatattagcttattgagttttttttagatccaagtgatgcttgaattacatgtggcctagggtatggtacatggactttatttgatgttctatttcgttcccaggctggccattgctgacccctttgaagatacaaatgcagaagtgtgaaaagtgcagtagggagttttgctctcctgtgaactttagaagacataaccgcatgcatcgccgtcaaagaaagccggaaaaggtttgcttagtctgagcttaactatactttcttccttttatgtctttactggttgctttactcttttctttgaagtcatctgaagtttgtgtttaaatgttaccaggattttggcaaagagagggatgcgctgggagccttttggaataaggtagttttccctctagtagtcttctcacagttattgccaattcgattagtttttccatcaggtactgatctctgttgttatttcagctctctgcaactgatgcaaaggagattctctcagtaaagagcatgatgcttgaggtactatgattcccattgatgctttcccttttacctttatcttaacttaaaacgcatggtgatcctcacatacgagtgtggcataacatgttcttcaggcccaattctaatttcattgttgtttgtcacatcttgtctaagggtttgactttttatgaatgctttatcgctcttttttcttcattagtgaaaggtgtgatacataataagcattgtcataaatgtttcctagaatgccatatgacttcatcagggttatgggattcgtttccaaataaatactttttcattaaacaaaagtaagagtataccataccagattcgtatacatacactcacaggcttgttgagtatgcatatctgatccatgatgtacctttcttaccttcttttctctcgcattatgcatcatggacctgtgtcctgattaaaatgatttgtagactaactcgagatgctttgtttggattcttgtaagatattcctggggcatcagtggagtcaggattaatgtcacttatcgaaaaaccaggctatactgctctgccacaatattatctaagagctggttctggccttttggtatgaattgcatctctctcttgacagattctttttccctgtctagataaactatcctcaatgttcaacctcatggctgatatatgttcctctttctccaggatcttctccaggctagaccacctagacttccaatttcttcgcaggaactttttagttttcttgatgatgcaagcgaaaaaactttcctgtctagcgaggctgcaccaatgcaaaagtacatttttgacggggaaataggaaaaactgtactggaggcaaaaaatgttgttgcttgcgcaagcttccttctggtacagcgattgttttttttttccttcaaagtttcaccattcctctctagttggtaaagcgaagtgtctaatacgagaactttacttttcatgtatccattacacgcgatttatctttatattcttaatgtgaagattaaagcatggcttgctgacaaagatgctgaagctctgaggtgccaaaatttactggttgaagaggaagaagctgctcgaagaaggtaagtgcttattaattgcaatgccagtaatataacgttgctgaatccactaagtgttgagtctaattcactggtattatgttcggagcagaaaagctgagctcttggagaggaagaagaggaagaagctaaggcagaaagagcagagagagaaggaccagaaaaaagatgctaaggaagacgagagcaccacatcagaggaacaacaatatccagctgagccatcaagccctttatctgtagcttctgattctgaggcacagacaccagattccttaccaattgatgattcttcatccctcgaggaacctcaagttttggaaactaataatggaagaaacagtgaaacgcaagtgccaatggttgatggcttagacaatggccaaaacatggaaaggcgaagtggccgtaggcaaatgcaaagatcacaacagggaatgccgaatgggttccatgctgatcatgcaccaaaccttggaggcatgcgaaagaatggaaccaacagagacgcaagagccaatacct

SEQ ID NO: 69755 - DNA, 387 bp, Arabidopsis thaliana landsberg
agcattttttacggctctctgaggaaaataacaacggagcagagggcaagagccattcccatcttcactttttataagatccttcgacgatcggaatgtcccaactcgcacaggtttgtgatcttgcggaaacacatatctgagtattcattctgcgagagaagcctctctctgctttgctgatgaaatggacccattttttcccctaaattactctgaagagaacctttgctgtgtacattaaatagaaagaaacttttcatttgtgtcaatggattaatctatacgtacgttgcaattacttttcttttccattattccattaatgcaatactttaccacatcatctctaaaaaactttgtaaggtttttgaattttaccctttt

SEQ ID NO: 69756 - DNA, 152 bp, Arabidopsis thaliana landsberg
tcaaggagatatgccaccctcaaccaaattggtcacaacatagaatggcctatataagttaggcgaccccccacgacttattttctccaactctcacttcacaagagggacttagtttcccccaggagaaccttctaggaaacttcgtggag

SEQ ID NO: 69757 - DNA, 444 bp, Arabidopsis thaliana landsberg
  unsure (1)..(444): unsure at all n locations
accgtccttattgccttgacttannnnnnnnnnnnnnnnnnnnnnnnnnncatacttatgttcgtctgcgaattgtcagttgggtgaccagctgatgtcgctctgtattgacaacggggcgggttcaggctccttgcttcgagagctagacataatggctttcgtttcctgttttcactggctaggtgtgatgtttagctatcacaaggagttcttacagtggtcacgttagggagtcaaatttgtgtgcgatagccaatggttatacagagtgcttctgcagattgatttggctgagacatcttttgttgtctcgtccgggacccttattttgtgttaatgcatgggactactgactattggcagtggggcctcacggactttacacctgtctaggatgcaaatgacgtatctgggtctgtctgaccatgaactgaaccaact

SEQ ID NO: 69758 - DNA, 102 bp, Arabidopsis thaliana landsberg
aggggtgccacctaaaaaagggggtcgctgagtccagagcggggacgtagtgtataccaaaaacacagggtttcacgagtggtatgaacatgatggtggctg

SEQ ID NO: 69759 - DNA, 164 bp, Arabidopsis thaliana landsberg
cttcatgcgattgcatcggaaaattctcactggggagtatcacagatcacccttacttgtcttgagtggtcggacaccggataaatcaccgaaagagatcaataccactgcgtgagctaagtgaacttactggcacttgaaatgatggatctttaatgacacca

SEQ ID NO: 69760 - DNA, 356 bp, Arabidopsis thaliana landsberg
agcaaaggccacacaaacgcgaagccggaggaaccaacgcaccagcctccaccttccccaacacaaaaaaaccaggaagggaagggggaagaaaaagacccaacccgacacgccgcgaacaaaggagagaagagaagccgaagaaaccacgcgaacacacccgcacgacagggacacgaacgcacgggagcacaagggcgcgggaccaaccaagcacgacggcaccgcagcgcacccgaacgcaagacggagcccccgaagcccaagaagagcaacgacacacccgagcaccgggaagcacaaaccagcccgacggacgccaacgacacacgcggacgcaagaacacgacgagaag

SEQ ID NO: 69761 - DNA, 680 bp, Arabidopsis thaliana landsberg
gttattacggaaaaagaatggatgagtcagacgagtccccctccttctcttcctccgatgactctttcaatgcaaacttgcccacaccacgttccactttacatgggaacgaaactgccccgggaatcaattggctccccatgtcgccttctttcgctgtgtattgcaagaaagattgtttctcatcaagggtgagcatttattctcggtcagtgttatctatataaactttgttaagtgcacatcttttggatgtttattttggctcttgttttcgatgtgaagatcgatcaccgtgaaggtgaagctccaattcttgatgaaatgccatctaagactcggcttaagacacctctaagtcctgatactaggccaaggaaatcagaacacaggacaagaaaccaaggaccacgctcaaagactccagaacctagaggaagttaccttgaaccacccaggtctaggatcccacaaactcagccggtaccacacagatcccttgaaagtgctggtctcaaatcacctcagaaaggtgaaactcggcctcatatcccccaaactcagccaacatccttcaacatcggtggtaactatcattacgctgctcaagcatccaaatatcatgctaataaagcggattcagtgtacactaaatacaaagacaaatgcgttatacgtta

SEQ ID NO: 69762 - DNA, 814 bp, Arabidopsis thaliana landsberg
caatcatgatgtactattccagacatgccactaccctctcagagacttggagatcaaaacttagaacctgactaattaacagagaagcgtatatctttctctctctctctggaaagatcctccacacgaagaaagtgagaagttgttataaaagtgagggtttacgctaacaggaaaaaagcaaagaagtttacaaccaaagacagagtcaaaaggtttcagaggaagaaggaaggaaattgagatggatgattgtgatggaatgaataggtctgagaacacgacacagaattgacttgaaggattcacgaaatgaagaaatttcagaagtaaagaacaaattgttgaaatctgaggctgaaaggagacggatgttttgttttttctttgcaatgcatacaagagactgagagagtactgctatagtttgtttgtttgctataacaagtgttgaccaccaagtcaatcaagttttgatatcacagaagatataaacaagagtaaaatgcacttacataaatatatagcttgaaacacacgcatgcatattattacaatgtattgagatgcttgactctgaaacaatctacgcttctgcaatagctgaccttgactctcaacattcaacataaaagctttttaaatctttttaagaattacactaatggccccaaactttaaatttataaacatttcatgtcaatagaaaataattgaataatgagatccaaaacggaagaaattggagacggagctaaaggtggagaaggacggcttctccttggaatttgtggactttgactgaagaggtccg

SEQ ID NO: 69763 - DNA, 552 bp, Arabidopsis thaliana landsberg
cttccaacggttacagtaatgctattggtggaactggttcctgaccatcctccgggcaatgtccaggtgtaagatgtggctgaaggatcatttataaccgaatacgtttgtgatgtgcctgcacacaccggagtcgcccctgagatagtagatggcaaagaaggcatggtgcaatcagaaatttttaccaggaaggcattcgaggttcctcccccgtatgcactctggtgactgccggttgtggctattgctgcgccggtattgctggctgttcattcggccagatacaaattggtaccagacgcattgctggcacaggaccagctataatcagctcctgttcctgcataataggtaccccattggcgaaccccactactgttgaatttcactaggaaggcatcatagcctccacccgcgtatgcggtctggggactacctgtggtggcaatcgatgtgcccgcagagctggaagtatatcctgccgaatatacattgccagatacatcggctacagaggaatagccactttcacctgctgtacccccataa

SEQ ID NO: 69764 - DNA, 606 bp, Arabidopsis thaliana landsberg
cttttgaaataaactgctacatggaagggtgagcgagataaactctttcctctgatggctgcttttggttccatcacagcaattgtaacctcacgggagagataactaaatacaggcgcatgtgagctaacaaacacaaatgagacaaatgcccagtgtagaaacccaatcgaagctgaacatgggtatgtagagaaaaatatcccattgagtatttctggggtgtttttggatactgtgaattctagacgttatttcctttcaactactaacctatactgtaaatcactaatttcctgtcaatgatattacaaaaaaaaagataaatataggaaacaatagttttttcatctttgtttgaaatccgctccctttatattcctgtagaggtacaggtgtcagatgaagccccaaacacatttttagtttagaaggaaactgatccttgcctgatcagactgctgtctaaccccccacccccaaccagagacggctttacagaaacacacttttcacttgtacaaaagatggctgctattgcacttctgatgcacatgcacgcgagagcctgaacttacttgacacggagaaacagcccaggccctg

SEQ ID NO: 69765 - DNA, 618 bp, Arabidopsis thaliana landsberg
tagagatcggagagaaagacgaaacgaagaagcaatcaaaggatcctgagttcttaagctgtatgatgcagccaaaaacagctgattcagatccacactacatcggaatccgccggattcttcttcatcggaaagctgattctggcgttatctctcgccgttatgtgagcatcgatttaagctttcaattacttgtttcttatagagcttgttgttgatttttgtgtttccattgaaggattggagatgcaatggaaaaggatatgttgcttatcgtaatttcattagcaaacctagaaaatgggagaatctgcgaacgcctagtctcttaagtagtccaggaaacaggttttagatccttattttacttgttttccagtatacaattctgtgtgtttttggttgcttatacaattctgacgtcaggttaatttactggttgatgcttcagtggtcgatggttaccttctccaagtcctctctcgcatcaatttgaagctgaaagctttacttctagtagagtaagtagaatttcatcacttctttatcaatggactttgttttgttctgcaatttaatttattcaagcgtttgttgttcctacgatttaaggagtgt

SEQ ID NO: 69766 - DNA, 490 bp, Arabidopsis thaliana landsberg
acaacggccaggcctgctgcgcgatgtctcgattggaggcctacacgccccaagcgtagatttacagcgacccctgagggatgagcggggctttgtagtactcgcgccaactcgccatcgcctcgagtacggcgacgttccattgcatttcccgacgaagctgcttgtccgtttcagaagcgaagtcaggtacgaccttgcgccactcgctaatgaacgccgacgatcgctcatcaacgacggcatcggaatggacattctgcgccagctgatcgatcgtcggctcggatacaccgcgcatgtacccaatgacgcagcttatttcacgaacttccctggccttgagcgtcagacgcgaacgcacgccgatcgacgaccgcccagccgcatcggtggagccgaacggctgcgccaagtcatcgctattgacgtgaacgaagagcgaaggcggatattgttcgaactggttcatctccccggcggggggaaa

SEQ ID NO: 69767 - DNA, 423 bp, Arabidopsis thaliana landsberg
  unsure (1)..(423): unsure at all n locations
caacaacacactgatctccattaannnnnnnnnnnnnnnnnnnnnngaagccctgcctggcctattatcttgctcaatctggatcagcaaatcagcattcgcattcatttcattaaccagagctacctcctttggacccaattatgttcacaacatgacccgtnnnnnnnnnnnnnnnnnnnnnnnnnnnnnnnnnnnnnnnnnnnnnnnnaccaacggaaacaccatgcaaatgctgcttatttaaaccagaatgccacataaattaattggccctatcaggagcaggcaatcctggaccacctaatagatcctacgggagtaattgtacatacgatacaatcgtgtacaccttgatcaggggcagactttagctaagaagctggttgggtaacgtatagttcgaatggagaagacatactg

SEQ ID NO: 69768 - DNA, 777 bp, Arabidopsis thaliana landsberg
caccactcatgataggagctgatgtatccccgcacttctcaagatgctctctaacagatactaagaagttcttcgttgtgattgacctaaaataaagagagagaaaggattgaagatttgacaatgctgcaaaactcggtgtatcatcatcacaaggatttgtgaagtattaacctgtagttatggtagatctcaggtgcagtgaggagaaattgaacatctctaaggcttatgttgcctactggcttctcgctattcctttcaatgacaggtatgcctccgattctctttctcctcatcagcttgaatgcctgaagaactggttcatcctcatagatctgaaagagaaataatgatctgttaaaaaaggaaaaaaaaaactctcaatggagcaatgagttagattacaaactgacctttatgatatggtcctttgacataatgggaagaccgacttcagagagagttttgattccccaatcctcaaaccagagaagccccgcgcattctgccagcatatgtataactcctgattgtgtgataatgttctcgatttttgctacacctaaatcaaccaccgggatgctcttcattttgtatttagaaagaagtaacagcatggtcaaaaaggagttctctttctgcagagccaggaacggtgcccagcggaatgttccagagatatctcgaacctgtcagagagaatatccaacgcatttcagaagccgtaatcaggagaaaaaagtcaactgaaatcaggtcctttataaaaaaaca

SEQ ID NO: 69769 - DNA, 470 bp, Arabidopsis thaliana landsberg
aactcgcaatgttatatattattataaaacaaatgatcaacttgcttttttccacaaagctattctataacttgcgacgtgattaatggtttataaggataacaaacatcaaatcactcgcatggggacatcttagcttcttcaacatttgggtgttatccatgattgtcattaataagaaagacgtgtatcatcgtcgcgactcgtttatataagacggtggtgaatatatcattttccatgaagcaatttctgctttttattaacaaagttcacatctacgtaacaacgttcttgtatacaagtgtataaaacaaacacaaatccgtaaaatacacgaaattttatgagacttcaaaagaggcaaatttatatacgttgtttcgatccgtttatacaaaaatcacacggttctgatttaatgtgacaagtttcttatgtcatatgcctcaacacaaaaacaattgtta

SEQ ID NO: 69770 - DNA, 407 bp, Arabidopsis thaliana landsberg
  unsure (1)..(407): unsure at all n locations
aaagataaaaggaaacccccaaggnacatacacgaaagacaaactgatcaaacgcccgcnaaatacaccacagacaacaaccaccaaaaaagggggaacataaagacaacataccggcggcgccaccagccacgaaacacggcaaccaaaaaaaaaaaaaacaagaccaagaaccgggaggcggcggccacaacaacgacagaagaaaaccgcaggacgaaaaaaaagaagcggcagccgccagaaccgccaaactagacaccggagcaccgcccaccccaaaacagcaaggggacggcacaacaagaaaaccacccagaccagccnngccctatgcctctatggacggcggcgtccacaccccgaaccggatgatagggaaccaaaaggcgagcacccccccattt

SEQ ID NO: 69771 - DNA, 597 bp, Arabidopsis thaliana landsberg
  unsure (1)..(597): unsure at all n locations
gttaatagtggtctgcctgatccatcaatgcaaagcagactactcttacccacccctaatcatgttcctactatacaaangnttaaatttggtatgaatgtgcagtctccattaaagtctagaaactctttttagtattagtaaaatatcagaagaatctagcttccttatactgtaagaaaacatatacagttaccatgaaaactcccttcttcaagaaaaacaccccataaaaaaaaacctatttacagaaacacactaaaaaccattcatattcaccaaaccaaaaccaatcagatctgcttcaacatcttaactcttatcttaagttcttaacatatttgtcttcttagatccttaacaagttcctcaacaagatctgccatgatcataccttcaacttctttccccaacacattaactttttcaccaatcaaagcactccatggaaacctatccatgtcccaaccaatgatcccatccaatgaacaaaaaggtctctctggctgagaatataaatactccgacatgatcttccatgttgattctaacagatatttacctcgtatagtcgttgattcagacacagatgaactc

SEQ ID NO: 69772 - DNA, 540 bp, Arabidopsis thaliana landsberg
atctcctcaattataaaccattcgttgaaaaatctagattttattttttgtcttttggacaaaaaaaacaaaaaaagaatatctagatataaatagaaatatcctcttaaaatggcataacataataggctatttacagtatcatcctttaccttatctgaagtatgcgtcccaatgcaatttgtaaattaaaaacactcgacaacaaccagacattgactaaaaatagcatatgagcatatggatcttaatatgcgctatatttaaataatacacttttttcctgaaataaacaaataataatagttttggtgtgacaactggcatcttacgagccacgactactgaggaaagtccctggtttggatcaaaactgctctgacaagcccattgttctgtcgttctttatttatttatttccccatatccatacgtttacttcaatttaatgaacaattgatattgataataaaaaatgacattatttttggttgcatctgctgcttgcttttgtcttctaggctatttttgttgatagca

SEQ ID NO: 69773 - DNA, 262 bp, Arabidopsis thaliana landsberg
attgtgctgcgacatcctatgaccaaactgctgttgctatatgaagattcatactagcgatttatattccctataatgttcaacatctgatgcacaggtggcaagttgctatatttagtcacacccataccaatgcctcctatatcatagcctgagaaacttctctatatcatgtgtatgataatagaggaaaactcatcgtgcctactgctgttgcagtgatacgaagctgcaccagaaactgcttatgaacctcaccatg

SEQ ID NO: 69774 - DNA, 1189 bp, Arabidopsis thaliana landsberg
  unsure (1)..(1189): unsure at all n locations
aaacaccattctttctcagagaagtccggtgatctttagattggggatcttcgggatcatctgtgtggaaagacaaaaggcacagcattctttagcatcaaagattacgaatagggcaagaaacaaaatgcatacattggcctataatatttgcggttccaaatgcacgtaaattttttactctccacaggtgagaagttctcagtacaagtccacatgagataattaaacgctcacactatcccatagatacaaaacagctacatcctactggtcatgcccttcgtcgtcactgaaacttataatgatcaacattctaccagagtcttgaagcttacactcaaggcacccgaaaattttcatgaacagttgatcccctaagataatctccaggatctgataattgttgaccgaaactgcagtaaaaacaagaaatgctgctcattacataaaatccagaagcttaggtaagaaaaaatgatgttgagatgtaattactaactgatttctttgacaatattgaacatcatatgaaggccatcaatatctttccgattctcacagtcatcaaatacatcgatcaatttctgaaagaaagcaccctgctgtaagtgtgaaaaaagtaggttaaggagggtgtgcttggtaaaagttttcacagagagagagaaagaatgaaaactcatttatttcttacaaaaagaaacattagaactttggaatgcacttaatacttacattcttcagcataagttcggttaatcgcatctgatctgtgttgccatagtcagcaacaacctgcagggaagagtgaaacaactacattaagtcctcgacaaaatagagacctataatgaaaaatcaggacaataaagggcaccgcttaacacaagaaaatttctacgtattcacgtaaatgcattgagagcgtaaataaagatgagaacaaacaatcgcagttctgggagatacaaactatgaaaagaaactttgaaaaatcggtagcactctggacgatgaaaagacaatgagagtaatanaaaagtaggcattcaaaagcaatcaagagaaaaatataaacttatagtcgaaccctacgatagatatacagttanggctgtaagtgcaatatcacacaacgagctctaagctacacgacagagaatcacagatcatattatcttgacct

SEQ ID NO: 69775 - DNA, 1570 bp, Arabidopsis thaliana landsberg
cattcatcatctctctacaatagtcaaatttttctcagagacatgtctcttcttcgtcaagtctcaatctttctgagttttcgtaaatcatggcttttctctttgtatctactcctccatcttccttaagtcttaaatcctgtcacagtttgcatcttcgtcgctttgacagagctatatttccgaactttgggaaagcttatgtgaatcagacaacgagaagcagacattttttgagatgttcagcggaagatgatcgtgttcgtgaacctgtgaacgaagcttcttctccggtggcgtttgcggaggagcaaaaagaagaccacgataacaataatgcgccgccttctccagagagcagtgaagaagaggaggaaaggaagtcgaagcagcaagagatggattggaaaacagacgaggagttcaagaagtttatggggaatccatctatcgaagctgcgataaagcttgagaagacgagaactgatcgtaagctcaaggagctgaacaaggaaagcaacagtgagaatccgatcatcggaattttcaacagcttggttcgtgatagtttgactagagagaaagaaaggcttgagaaagcagaggagactttcaaggctcttgatctcaacaaggtaaaaaatgaattcatttctcttatggtatgattcttctgtgttttgttggaatgcattgttttttaaagtgttttgtgatgatgggacagttgaagagctgttttggattcgatacgtttttcgctacggatgttcgtcggtttggagatggaggaatcttcattgggaatctgagaaaacctattgatgaggtcacacctaagcttgaagctaagctatctgaagcagcagggcgtgatgttgttgtgtggtttatggaagaaaggtccaatgagatcacaaagcaggtagaagaaggccttcaatattctctgatctttgatgttcttgatttcaggattaaggctaaagatgttggattgtttgttctttgtgcttgttaaggtgtgtatggtgcaacctaaggcggagatcgatctacagtttgaatcaactagattaagcactccttggggatatgttagtgcaattgctttatgtgttacaacctttggaaccatagctcttatgagtgggtttttcctgaaacccgacgccacttttgatgactacattgctaatgtagttcctctttttggcgggttcctttccatcttaggtgtctcagaggtaagccgaagcaaattaaaagaactaactccaggttcctttgctgtatacatgtaactaaacctgttagttctttgcttcagatagcaactagagtaaccgctgcgcgacacggtgtcaaattaagcccgtcgtttctggtgccatcaaattggactggttgcttaggagttatgaacaattatgagtcattgcttcctaataaaaaggcgttattcgacatcccagtagcccgtacagctagcgcgtacctgacctcgcttctgcttgcagcagctgcgtttatatctgatggtagtttaatggaggtgcaatgctttgta

SEQ ID NO: 69776 - DNA, 595 bp, Arabidopsis thaliana landsberg
ccttgtgatcatactcatctacatgagaggaaggcttggaacgagtagtgagtctctcaacaggtaagaactcagtgttcctatctgaaacaccagaggtattgaatcccctagagttagaatttgaagaaccttccatttaacatccaccaaaagctaaccagaaaccaacacgtaaccaatgacttctctgtattcccaactctaactggaatcatttcggattcaacagctcattgcttaaagatcgttacacattcgccaagaacttagactctcacaatgtaaagccccttttttaagtgatcccactcaagaaacaaaccctaggctataaacagaagaaaactcaagaacctaggagacccatttaagaacaacaacactcaaaagataaaaatatatacaagaaaaaatgcaaatcttttgatcatgtaaagagccaaaaaaaagaaaggaagcttctttaccgcaaaattagtgagagggagaagataagaagtatctaaaggagagaggcccacccgaaataatttttcgagatgaaacagagcccacaacatacatacaccaacacagtttaaactcggaaaaa

SEQ ID NO: 69777 - DNA, 124 bp, Arabidopsis thaliana landsberg
gagaacctcgttcgttgcaatgataccaagactgctgactttgaaaggaagataatagctggtgctgggtaacaaaaaccgatggtaaacgaacaagacaaaactgatacaaatcgtaacttgc

SEQ ID NO: 69778 - DNA, 640 bp, Arabidopsis thaliana landsberg
cgccaacttcgtcttcgccacctcctcgccgaccaaccaggcacccgtggaggcgacgccgctgctggaccagaatgccaccgaaaacaccccgttcagctacgtggtgccggccatcagtttcaccgatccggataacgacagcctgagctacaccgccaagctcgccgatggcagcgccctgcccaactggctgaccttcgatgccgccacccgcaccttcagcggcactccacccgacaccgtgtcgggcacctacgccatccaggtcaccgcaacagacggcagcaacgccatcgtcagcgacagctttaccctcgcggtgcaggacgtccccaccgccattgtgatcaatggcacgccgaacaacgacacgctgaccggcaccacagccaacgagcaactgttcggtggcgcgggcaacgacaccctcgatggcggcgccggcaacgacatcttggtcggcggcaccggggtggacaagctcaccggcggcgccggggccgatgtgttccgctacaccttcaagctcgacagctaccgcaccagttccaccagcgccagcgaccagatcctcgacttcgacgtggccgcggacaagatcgacgtgtcggcgcttggctataccggcctgagcatg

SEQ ID NO: 69779 - DNA, 538 bp, Arabidopsis thaliana landsberg
  unsure (1)..(538): unsure at all n locations
gtatccatctcaagttcgtcaacgccgagccnnnnnnnnnnnnnnnnnnnnnnnntcgtgttttctgtcgcgtaggcggcgccgccacgatgtgccgagatcagtggtgtaccaggcacggggcaactggctgcatcgtccaccggctccgagcttgcggtgcaagcgccgagcgcgccggtcatcacccatgctgccagccgcgttgccgcggcgccgtgtctgatcatttgcgtccccccggacggctcgctacgatttgtcgtacgcgtactaaaaaatatcgcaatgagccgatcggcgtcaaaccgaaaacccgacacgcccacctcgcgtggtcgcccgcgccgcagcgtcgagcgtgaagccgagctgcgcgcaaaggcgatcgccgcggcgcgcgagctcttcgccgccgagggtttcgaggcggtcagcatgcgtccaattgcgcaagcgaccggctgcggcgtgatgaccttgtacgggtactttcagagccgcaacgagatcctgcggcacatttgggatgatttct

SEQ ID NO: 69780 - DNA, 429 bp, Arabidopsis thaliana landsberg
ccatggtatcgaccatcttcgcattcagcgtggcccacaggtcatgcgtcatgcagcgcggtccattctcatgctccgggctgtggcagttttccttgccgccgcactgcgtcgcatccagcggttcgtcgacggcgatgatgatgtccgccaccgtcacctgctccgccgggcgcgccaggttgtaaccgccaccggggccgcgcaccgattccacgatttcgtggcggcgcagcttgccgaacagctgctccaggtaggaaagagaaatttcctgacgctggctgatgccggcaagcgtgaccgggccgttgtcctggcgcatcgccaagtcaatcatcgccgtcacggcaaaacgacctttcgtagtcaaacgcatgagaatcccgacctcaaaatccgctcaaaaccgggagttgtgatcatttt

SEQ ID NO: 69781 - DNA, 435 bp, Arabidopsis thaliana landsberg
cttgtaagcttatttccaagccgtaatttacatcatttggaaagagaaaaattcgaggcttcacactaccattgctaaaccagcagctaatctggtcaaaggagattcaggtcaccatttgtgctaaattagatcgtctagatcgcagcaaaataatattacattcaccttcagctggtccaacccggcagtctcaagaaagacctttcaacctgatttcgatttattcaaccttaaatttcttgggtaactccttcacctatggtcttgtgtttcactttatttctctcttcaaaaaaaaaaatttaagcagtgtaatttcaaatgatgtcttctttagtaaagaaagatgaataaaggttcttaaagataaacaaattgaaaagaaaggattgttattaggagatttcggggattatgtgattgattcgtaag

SEQ ID NO: 69782 - DNA, 291 bp, Arabidopsis thaliana landsberg
aaaactttatgactacataactcattttccgttttgccaaactagacatgatatagggttaatgagaacccaaaaacagcccacctacgaaagaagcatgactatggaactcttgcattgactacccatccacccgaaaatgtgacctctttgtactccttctggcatctacgagatatgcgctactctacagacgcaaaattacttgcacaagcattagttctcgaatcttcacacgccaccaagcctgcaaagactctatggggaatccctccatagaggaaggaaccc

SEQ ID NO: 69783 - DNA, 345 bp, Arabidopsis thaliana landsberg
acgcgcgtttttgttcaccagcagcttcaccgcgttttcgcttgccgtacgcatcatatccttcataggacatgcgggcgtggtaagcactatggtaaaacgtacatcatcacccgatatactgatattcttcaccataccaagtgttaccaggtctttacccaggtccggttcctgcacattgctcagtgcctgcaatatatcagcttcagtcatccccgaaagtttttgttaaaaaagaattccggctgcaaagttaaccccttgcagccttacttttgttgaaaatagaggggattggtacgcattttttgcacagaagggcttgtattttttaccgatgat

SEQ ID NO: 69784 - DNA, 5575 bp, Arabidopsis thaliana landsberg
tttttctatttatcttaagaaatgacaaagatagtttggtgccgtagctaaatggtcagacccatacagaataggacatgccattttcaggctcaaaagaacagaaaggacaacttatcagtttctaaaaccatggcgacgatcgagttgaccaaagaagaaagaaagaatgttaagttatgataaatctaattaattagcactgaagctgatatttttatttatcccatgaagccagctccaggcatgttaggctgccctccaccaccaccttgttgtgatcttccaggggcttgtgcaaaagcttgaccacccattaccatctgttgaggctgctgttgctgctgcatctgattcagaggcgaagtctgttgctgcatctgattgagcggcgaagtctgctgctgcatctgattcagcggcgacgcctgctgctgctgctgatgatggtgttgaagctgtgtcaattgatgctgctgctgttgttgctgctgttgttgttgttgctgctgatgatgttggagctgtgacaattgatgctgctgttgctgttgctgctggtgttgttgttgttgttgctggagttgtggcatctgttgctgttggaggtgttgttgttgttgctgctgctgctgctgctggatctgctgttgttgttgttgttgctggtggagttgttgttgctgctgctgttgctgatttggaatttgtggtttaaacacaaccatatcctaggagtaaacaaaacaaccctcaagagtcactaatgtgaagcaaaacatatatagacaccttaaacttagtacttccttacccctgggaaaagcattccaatcaagcggcaagccttgtcagagacagagagaagaagcgtctgtgatggcaactggatgactgcacactgcaatacggaggatgacaaagttatcatatacaactccacaaaagctaagcgtgaaaatgacaatagtatggcacacgattaggctaatcaaaacaaggctacatacaagcgtaggcatcgttaagtgtatggtgaacatagcaagagattgatagattcaccgagaacatgtttacagatgtaagtacatatattttttcaaagattttcattcttaacatctaattcatcctaatatctaataaaccagtaaacaccattcatcattttgttattaaatttgtagtgaaacaataaggaaaaggagacaagtggcataaattatcaacaatactcacaagctttttatcctgaagttgtcctaagaacccatgttgactcatggctcgaaacacaaggaagtcagctttgccaacatattgcctgatgcaaagtcaggtgaaatatttagtggtatgaaatcaacatccacccatgagccatttggaataaggaaggatatagcacgaagatattacttgttattcatatggtcctgggatatgagacgaacaatctgcatagttggtggccagtttgctgccaacctggggagatgcacaaaaagagaaagcaaaaattagtttagcagctacaatcatttcttaaggagtcgactgctctcctgacaaggtttagtaaggaagcagttttcatatttcaattagttataaacttacgaatcagaggcagaagcacttcggtaaccctgtcaaatataaacaaagacgttagttaatatctacttggaacaattcaacaaagttctacagaggaagatgtgcttaagcatgtgatcccagtaaattcacaaaaggggaaagaaaagtgcatagtaagtgcccctaaacacacctcaagtctggtgataagaacaggctgcccttgcctttgcccagataaatttccctgcatgaatttgaaaatgtaagtaaaagttagcacaagatcaccgttattttagacaagataaactgacattacctcccagactttcacatatttggattgtgaagtctgcatagcccccgatgatggctgtgatagctgcatattaggagctgagctgttactgccaccaagttgttgtattcctgattgcgcttgttggccaactcctggagtaggcatcattccacctgttccagaggagacatttccttgaccaagaccactcatcatgttttggttcatggaaattccaccttgcatcattgctccagaatgacttccttggttcatcccttgcattggttgtgaaacaccaaggtttgaagcgacatttgacgttgtttgaggactaaaggcattattaggacccgggctttgtcccgtttgtgcagaaccattagtgcacccgaaccagccattgaagtaattccctgctgtccagttgaaaacacagtttgtgaaggaggcaaagatgtagccattcctgttgatatcatatttgacatatgcattgcaaccgcactttgcccaaccgatgaggctgcacctgccagagctgcagagctcatgacttgtcggacttgagaaagattattaagcagatttacattggctccaccaggaggaccagtacgcaatggtggcgtcattccactgaccaccacaggcttaatatctggtgcattctcggcgttgctgaccatatcctgagaaactggtgatgctgaagatgtttgaatcgaaggaattgcttgtgtagcaggccgagctacagccgggatatggggaaaactaggaactggtgccatagaagttacggtgctaggctcctgcaatttcattccaaaaatctgattaacaggcttctactaatgtgaagatatgttatctaataagctgattgagtatacaatattatttcacaaatgggatattcatatgaacttaacattaaatctagttgattaacacataaaaatttgtaatgtcttatcaagcaccagagaataaatttacaattcattttcggctaatatctagtaaataattcttataaaacatacaagagtcggttgccaaaagatagagctgactcctccaactgactaaaaagatcaaatagacttacaactttcacagtagcagttggaactggtccaacagaaactggttgccgattctgaataggtccattggctgaaaatcatacaaaaagagatcttcatatagagaagcaggatagaatccaaagaagcacaaagaaaaatcaagatagttggactaagaaaaatggatgttgtcagtagaagaacctgatgacacaggagctggaggttgcccagtgactggaagagatggagcaacagtggccctgtccactttcacagggctctgagtctgtggcaaatttgtagcagaatgacttaaggcagcacgtgcctccacaaaattctccgagatcaggacaagatagaatgtgttcttagccgtgtcaattgacaagtccgcactttgttgattgggctttccctgcatttaaaacagtataaaacaaagattacaccagtttatagcattgagaataaagacagcctttgaaagagctgtctgacaaaagaaagacttttgatagatgtacatctagtgaatagcaaatagacacgcagtctcaccgcattgtatagtgctctaatttttggaagctgctttggacatacaacagacaaagaaacagaacactgcacaccaatatggcaggttagtaatttcccattaaaaggagtaattatagctagttgtaatacctgggggaatcagttaaaaaaagtaccttagcaaaatatgaagccactgtctcggcatctgataatcgactctcagcttgcgcatcaccattctcattccgttccacattttgcaatcgtggacgatatacaggtgttggcaatatgtgaggattgctggctgtgattaggatacagtgtcttttcagatcgttacttggttgagcttggcctgaaggaggagaaaacatctgtgtcatgaagtcagagaaaattgtgaggtttaaggatcgagaaaatcgctgacagaagcaccaccacataaaatgaagccatggaaagaaaaaagttaattttattgagaaagtaaattagtcaaaagtagcttgaaagaaagtggcccaaacatatgtcttatagttgtgtcacagatgaaaagagatcaagtttcccaccatcaatgcttcggcaagcccttcagctgtggcaacctcattgaaaccaccaccaccaaattgtatggaagaaagccaatgcaagaaaatatcaacatcccttgtccagccactccgttgtaccaagcaagctaagaagaatgaaagataagaacaacattactaaaacaaaagctaatgtaaccagggccatgagaaagcacccaaataatatttgtatttggatatcacaagatgaagcacaacacgtaccacaatatgaaccatgagaattgaagatcaccagtgatagctcaacagtagaaacagggttcctctgcaagtttagtgaatatataaagactcgatcagacacatcaaactaccaatttgctctgttattttttgtgtcgcaatgatttgacagataacgaatgtatatgagtttgctcaaaaacattgattaactgtttgctcaagaatgaaaacttgagtaaacttaaaaacgaggataagtcagatatagtacctctccatttaactcactgccacagaaagacctggacaaatgcaaagaatgcatagacagattatgtaattgaaattttaacatacaaaaacgctactttgaaatacaataatatgttgagtggatattaagaatagccaacaatgtgattagttacaaactatacaggcaattatatactaaattctctgtaatcacatattaatatcaattttacgtgatcgaagtgagaaactacaaattcattgctttatgaatgcgttgtatcgaaaacaatgtcctaacacaaaaaaagaatgtaggaaccataaggtaacgtaaagtgattgctcaatatgaaacacagaacaatcaaatacataaacacagtactaacaacgaacaacaaaacattgtggaatcagaggataaacaaaggtttgatctaaccaattgaaattaaagcctgattcgaacggtatcagctaaaccctaactccgaatgaaaatcaaataacgaggattaaaagagatacaaggttcctaaaaagaaaaacctgatgattttctcgagatagtcggagacgatggtttgccaataaggacccaaagcggcggtgccttcagcaacgacgatcagctgtttcacctccgacgacatagtctctgagcgttgttgttacgtgaatcaaaagaaaattcagtctctctccccttggaatttggtgattcttctcgagcctaacgattcgccgacggtaatttctttggaaatttttattgaagctcgttctttgtaaattgtaagtttccttcttctccgggagaggagaagataaattagattgaaaaaatttggtttggatgctccgaatagaaaatgggatatacaaaggacttggtcgttactatctttttatttgtgtaaattgggcaatgaatttaattttatttt

SEQ ID NO: 69785 - DNA, 581 bp, Arabidopsis thaliana landsberg
aaaaatcagcttttgtgcgtccacaactgttgccccgcttatagcactctttctctgttatgccaccgttgttattatcaatggcacccactacagacgcgccaccacccagataactgagtccgtcctctatctgaagtgcatcatgttgtagtgaagctgcttttacagttccggtgaatactgcgttgcctttatcatcaaacttagctactacggtaccgttactgtcatatattacaaaacttccgtcaggttgtagagtaagtcctgtctgctgttcacctgcttctagattattaaagctaattgtatcggttgtgattctaggtgttattaactctaatgaagcggcgactctatccgtaaagatatcagacgtatccagctcgttaaccatctgaggtgtctgtgtcataaactggtcaagtatttgtttactagcaagtttagttcctatctgtgactggtccgctagtagctccctcaaattagaacctgtatagttacctgatttgacaaacatcattatttgtccagtttcactaccatcataattatccatagctataccaataatg

SEQ ID NO: 69786 - DNA, 312 bp, Arabidopsis thaliana landsberg
ccatcccgagtcaagaactcggacaaatagtgatcggatgtaggattcggaacaagccgaaagaatttcttttcctaatagacagacggattaacgccaggatggtcaaaaaaatgattcaagattgctgcagtgccagtttattcgggaccaccaacggtattgaacctcatggggatctaagcgctcggcaaggttagtcagaggcaaggacgtcaggaaggccataaatcataaagactgttacaagcgaatataatcgaaaacaagacactggacagtaaggcgtcgatatgaaaagaaccagcaatg

SEQ ID NO: 69787 - DNA, 506 bp, Arabidopsis thaliana landsberg
cagaacattgtttccgaatataacatatctcatgttattttaaactgtttataaatattaatcatatcttaaacttttgattgattttaaatatatatatatatatatattatattatttaatcatttttaaaaattgaaacttaatatatccgataaaaattaaacttaatatagaacttttaaatttggatacttaataagtcaaaattctttttcattcatatttggattcattttaacttatttataatataattttgagtaatgttttaaatattttagatgatatgagacattgaacacactttttatttaattgattgaaaattattgggtcatttttagggataaatcctattattcactttttcttaatctaactaaccagaatttgccacctaataaaaagagtattttttgcaactaggacgtttttgaaacttaattagaaaaatagtacatatactttttataatatctaatatagtcatgataacgtttttt

SEQ ID NO: 69788 - DNA, 601 bp, Arabidopsis thaliana landsberg
  unsure (1)..(601): unsure at all n locations
agttaggatgctaaaaagctttgttagtaccatatgattgttatattgtttattggttccttaataatgtatttagacgtcaaaaaatgtttttgtattgatatgtgacctcataactggttagctgcttagggccattagattagagttttgattgtttcaaatgtcaaatcttacagtccgtcaaattttatttgatgtgaagtaagtgagttgataaatgggactactttctccagttggctagggtcgactgctaataacatttctccaaggaattaatctcaacgggcttgttgctcaggcaacaatttataggaatagagattgaacgaaataattaacagattacacaacaatgtttcctctactttaagcaagcaatcttcaaggctatattgatcgactgattcgagacgcaatcgtcttgtcaagaagaaccacaaaaactatgatgatatgtaatgcaaacttgactcgtctttgagtaacacttcttcatctagtccaatcgtcgcagggtttcttttaatttatttatttattatcttctcttttggtaagaaagagcntctttaatttggttaaacttttttttttt

SEQ ID NO: 69789 - DNA, 140 bp, Arabidopsis thaliana landsberg
agcgataagaaaagaacgacggaagggcacacagagcggacacagaggaacgacgaaacaaattagattagtgggccacgggcaggccaagacaaccgcaacacaacaaacagggacgcaccacaaacaaacaaggaccc

SEQ ID NO: 69790 - DNA, 582 bp, Arabidopsis thaliana landsberg
aggcgcccgcgcccaccaggaaggtcagggtgttggccagccagaaggccaggaacagcttccttaacaggcgccggcgcatcattcgacgatcagcatgtagcccatgccgcgcacgctctggatccagctgctgccatcggcgcgcggcccgagcttttgccggatgctgctgatgtgcacgtcgatgcgccggtcgtaacgggtcagcggccggcccagggcattgagcgacaggtcctgcttgctgaccagctggccggcctggcgggccaacgcttcgagcaggctgaactcggagccggtcagctcgaggatggcagcgccccaatgcgcctcgcggcgaccgggccacatcttcagggcaccgctgcgcacctgttcgggcgcctcgggcaccatgccttcgcccatcagttgcggctgaacacggcgcaggatcgcccgcaggcgcgccaccagttcgccgggagagctgggcttgggcacatagtcatcggcacccagctccaggccggcgatgcggtcgatgttgtctgcacgggcagtcagcaacagcaccggtacctggctgcgcgcgcg

SEQ ID NO: 69791 - DNA, 547 bp, Arabidopsis thaliana landsberg
gcttcagtatacatcaaacaagagaactaatgtgtacgtataattgtacgccattacatctctaattaaagcatcaagaccgtttgacacaatactagaaatcttgatcgttagaagactctccatcgttaaaacatcttcatgtatagcctatatattatgtataatactttccattgttcagccttctccgctccaatatataccttcttttaatttctatgcaaactttccctgcttttcttatgtactatattatttcactctgaacaattagtctcctatatagcagtttgaaactccaaacgcttcatattgtgctatcaattaaatttgatactaaaaaaattacacgtttaagggaaacaaaaaataagtgataaaaaattataattttgtacaataaagtttaattatatatattgcatatcaacaatattggatttctggcattacctcttaagatccacattgaggattgacctgttattcagaagaaatcaatattgacacttgaaaagataccttgacgaagaagaccaatttg

SEQ ID NO: 69792 - DNA, 518 bp, Arabidopsis thaliana landsberg
ctacttctcacactttaggaacatgatataaagtaaaagtacacacatatacgactctattcccatccatataaatattaggacattttaccgcaacttatctaattgtagattcagtattgtatttttacattatatatatatatttttttttacattatatttgcaacggtgaattaatcgtgaatttgtgatacatttatccctcttccaatccaaaagtttacaactaaggaacttaaccatagccaacaactcgtcatctataatttctaaagattaattacctaagtcatttaaccaatttggtaaaatcaacatcctctacatttgttgtgggactaaaaatcgccttctaagggactacaaaagaacataaacaccacgtttaatgggtaaatctagaatatgattttagccgatcgtgtacattttttggttgaaatttttatatatcctatttgatacgtttcatttttttttgttcttgtcaattgagcccaaggaaacatgatctt

SEQ ID NO: 69793 - DNA, 465 bp, Arabidopsis thaliana landsberg
  unsure (1)..(465): unsure at all n locations
agtaccaggtatcttaccgtttccgcctcttcattggcgttggcagagaaataatgcactttggatttttttgttccttttgtgagatcatattccttatcgagcgtaacaccggttacattaaaacgttttgcatagctcacaccggatttaccatctacatagatcatgttataggtggtgcgttcatcgcttttctggaatacggctgcatgcaatatgtctttgccgatgaataccttatcggaaacctttaccacttttatggtgcccgacctggtaaaggcaatgatatcatcgtaatcagaacacnnnnnnnnnnnnnnnnnnnnnnnnnnnnnnnnnnnnnnnaatccttccgcgcggttcatgtatagtttggtattggcaatagccacctgttttacctggatggtatcgaactccctgatctttgttttgcgttcacgccccttgccgtatttt

SEQ ID NO: 69794 - DNA, 458 bp, Arabidopsis thaliana landsberg
taggtgcttcagattaataattaggccctcaagtttgtccgatgaaattgcgttttttaaaggctatgaatcataaataggcttagatctgagttttcttttttatttttaaagtttcactcatcaatgtaaattctagtgctagatttcataacgatctagcgcgctagaaatcaatttaaattctagtgctagattagcctcttgttcattctctccaagctgaagttatccagcgaggtaaatacatgctcgaaggtacacttatttacatcaaatgcttgggctttgatctaaagcactgtcaaactctgctttgtgttgaatgaatggtctagcttttaccttacatggtggtgtaaagtttgaaccaaaagttacaaccctttcgtagcaggttctatagcaagcagtaggcctataccggaaatagccatatcttgtagctgttggatatt

SEQ ID NO: 69795 - DNA, 3505 bp, Arabidopsis thaliana landsberg
  unsure (1)..(3505): unsure at all n locations
tctgatagtgtttgttccaagaaggatgcagcaaagttcaagctaaagtcccacgagtttctccatacttccaggcatcaactatttcacagtgtgattctgacattgtttcttcttctcaaagtggaagaaattatcggaaaggaagcagcaaacgtcaggttaaagtcagaagagtttcgccatatttccaggaatcaactgtttcagaacagccaaaccaagctcctaaaggtttgcgtaactattttaaggttgtgaaagtttcaagatatttccatgctgatggaatccaagtcaatgaatcacaaaaggagaaatcaagaaatgtgaggaaaactcctattgtgagccctgtactctcgctttctcaaaagaccgatgatgtatacctgcgaaaaacgccggataacacatgggtgcctccacgatctccatgtaatctgcttcaagaagatcattggcatgatccatggcgggtgctggtcatatgtatgcttctcaacaaaacatctggtgcacaggtttttcctcatttctatctctttttattccatatctttggtgaacataagtaattagcatttgagaccaattagtttaagtggatgtgtttagtgttgccattgcttgttgcatattttctcagttagttacaggaattattactcgaaaatcattcttgagggaagtccaaaatttgttaggaagtaagaagttagacctctgtgcgcttgaatctttcaattttaactgttgcagaagaagtagctgcagtttttggtttgataagtaattaattatcaatgatttgaattgcttggtcttgttgaatatggtagaagaaaaggctttgtaaatttattttaaaaggtgattgcagacgcggggagtgatatcagacttgtttggattgtgtactgatgcaaagactgcaacagaagttaaagaagaggagatagagaatctaataaaacctcttggattacaaaagaagagaaccaaaatgattcaacggttgtctctagagtatcttcaagagagctggactcatgtcactcaactgcatggcgttggaaagtatgcagcagatgcgtatgcgatattctgtaacgggaattgggatcgcgtgaagcctaatgatcatatgctaaactattactgggactacctcaggattcggtataaattatgaatgagaaggtacaagtatatatttgtcctaatttgctctgttttttgttgttgtcaatgtgtaaaagttgtaaatgaaaatcttgtcttatactagtttgttatatcatatattggaatgtgttttggtatcatctatggggttttctgtgtttaatattgtcgaacacctaagatggggcatgattgttgataatgaaaagctatgcgactttctcaggttctttttctgtattaaaaattaagttagttctttgttagattaggcaccaactatataataattcaaagaatgacaatgatgaggcaactacttctatgagccaaatccaaaagtatgaactctttaaaataacgtcaatatttaataatggtaaaaccaaacacaacctaatgcattttattgatttatttgtacagccaatcacaactttagtttctaaattaagagatttttataaggctgtttttgtaaaaaaaagaagtaattaaatgttgtgataattgttttaatgacgtgtcaactacaatatttgcacgaaattgaaaatcacaaaatcgaaaatccacttttttgttttgtttctctctctggccgacaaataaaaaaaaaacaaaaaacacaactaatcataggcttctccatcttcttgcctgccagatgatgcaatttttcagacaattttctttccaaatcttttcgtaattctgttttatttttcaacgttttaggtttttaccaatcccccgtagttatatccaacattaatttttttccctcttctcagaaaaaaataaaattcaactcatctctagagtttttaggttcttccaagaaattgaatttggaaggaggctttgatgggtttgaattttccataatcgtcccttgtttacggtatttttctcaaggaatccctgaaaaactatttcttggtctttgtgtaattgtctggtgcaaatcaagttattgtttttatcttgtgttgttgattcagactcttgttgtttgaaaatgctatggctcgtgaggggatgttgttttgattttgggaaagtcttgtttgaatggtcacggcttttctgaacattcgcgtgttctttcttgtctcggctctgcttcgaaatgtctctcggccaagaaaatgttgatcctgttgaagtttcaggtaaaatcctacacaatcctttaataattattatccaccaagtttttaaacttgtaaaggtttcaaatttttggctttttgttttatagggtcgcatgcttgcttatatgaacttttatgttctgagacacccaaatggactcctcttagggttgaagatttgcaaacatcttcttctggtaattattacttaatgatggagataaacattcttaagatatgttttaagtgttagttggagacaatctcatgtcctgtttgttttgttttagatcccagagatcggttggagaagttgctgaagcaacctgggaataaatattgtgctgactgtggctctcctgaaccaaaatgggtgtaagttgattaatacttctgtgttgtttgtacatttcttttgatgaactggattgattcatttcatttcgttttagatcgttgagtcttggtgtatttatctgcattaagtgttctggtgtacacagaagtcttggagttcatatatcaaaggtactttcttttcataaacaatcttgacttttctctgcttctgtgtgtttctagagtcttttatcgataaatttgattgaatgatgatcgcaggttctatcagtaaagctagacgagtggacagatgatcaggttgacatgcttgtaggttacggtggaaacacggcagtgaacgaaagattcgaagcttgcaacatcgaccagtcaaagaaaccaaaaccagattctactaatgaggaacgaaatgatttcattaggtgacattttttacttaacaatttgtataatggtattgtatgtataatcatcttgtccctaaatctttaaatctttcagaaaaaaatatgagcagcaccagtttatggatccaaaggatggtgctttgtgcacttatcagcagcctagcagaacaaacacttcaccaccgtctttatgttctgcaagccaccgttctacaaaaaaccgtattggtcatgcatttaggaatagctggggaagaagagaatctgatcacaaaggaccaaagaagagcaattccatggtaacaatcactatacatacatacatacatgtttgngtagttactgttgccaacgttagttaatttttgtgggtgttttataggcaagtat

SEQ ID NO: 69796 - DNA, 531 bp, Arabidopsis thaliana landsberg
gtttccatcgcgtttggcctggttgtgctttttccatgaatcggcattgggataatcgatccttatgttcttggaccaggaagcgtgcgggtaacgcgttctaatggcaaatttaccttcaggtgtacaaccgtctccctgtttgagcttatcgtcaaggggattgaaaccaaataccacggtataagttttcagccaggtagtatcataataaactttcatggtataagccgtactttttgacctcgacatgaattttgttgccattcaatttcagtgagacgatgagccggttaagatccggaccttgtggagccgtaagggtagaagcattttttttgtgctccggcaaatggcgctcactggtgaattcgggtccgtaggaaccgaaaaacagtacaaatgcgacagttaaaaacgaaaggggtctattcatggtggtgtggttaaagaccgttgtacaaatcatgcgccaaaaggatcattgttgaatgtagattgctgattttaggttgaagttagattgcattt

SEQ ID NO: 69797 - DNA, 535 bp, Arabidopsis thaliana landsberg
  unsure (1)..(535): unsure at all n locations
gcagcacatcgagcaacgtaaagaactgcatggctcgcttgaggttgcggaccacacgcggcgtattgccgatgaccggcagatagcggctcgccacctccagcaattcaggcgcagtgtcgaaaccgctaccgtagaccatgccaacgacattgtccgtatccagcccttgcagcgcgcgttcaaggtcagccgcgtcaaagccgccgtccgcatagccgatacgcaacgtttccgcggcaatcgcctgggtatcannnnnnnnnnnnnnnnnnnnnnnnnnnnnnnnnnnnnnnnnnnnnnnnncggtctgtacgaaaggccgggaggagactgccgcgatgacgatggtcttgattatttgatgctcttgcgtgccatctcaaatgcggagatgaaatccagataatgcttctggtcggtctccagcatctgtttcagcaggttatgttgggtggtgtacttgacgttgccgatggccagcgcaccgataccaaatgcgccggtgcccggaatggcgacgccgttcgcgaca

SEQ ID NO: 69798 - DNA, 149 bp, Arabidopsis thaliana landsberg
gagaacaaggcgtggtggataaacaaacttctacatctctctgcacttcctcacctggaattttattttaactttcatatgaaacgtgtgctctcgggtgggtcttactgaaggttcggggtcgctactaatgatccgcgaaagaggac

SEQ ID NO: 69799 - DNA, 570 bp, Arabidopsis thaliana landsberg
tgggatgtttgtgaccttttgtctcttcttctctaaaattctctttctccctaaaactaaaaaaccaaaaaaaccaaaaaatgtacgcaatgaaagaagaagactgtcttcaaacatttcacaacttacaagactatcaagaccagtttcatcttcatcatcatccacaaattctcccctggtcgtcgacatctttaccttcttttgacccactccatttcccatctaacccgacccgttattctgacccggttcactacttcaacagaagagcttcttcttcctcttcttcttttgactataacgacggttttgtctctcctcctccttccatggatcatcctcagaaccatctaaggattctatccgaagctcttggacccatcatgcgtcgtggctcgtcctttgggttcgatggtgagatcatgggaaaattgagtgcacaagaagtcatggatgctaaggctttagctgcttaaagagtcatagtgaagctgagagaagaagacgagagagaatcaacactcatcttgctaagctgcgtagtatattaccaaacacaaccaaagt

SEQ ID NO: 69800 - DNA, 525 bp, Arabidopsis thaliana landsberg
catcttatccactccatgcacgatctgcaccatgtattttattcatcatattataactttttccactgtgtgggaaaaaaaaaaaacatatcggtaacaatttaaattccttaattcagttaatgatccgaagaaaaaaaaagtgtggatgtgtttctacgtgcatatatgtgtgaaagttcaattacttacaagaagaagaaaccgatcgaggagggacattcttgcataaatctcatggaagtctttgtggatgaatttaagcaaaatagaagagattagggaagtaattactttcattctgttaaatttcttggggttattgtagatatatcttgttatgtgaaacgtcacaagataaatgtttaaatagagttgcgagggttgtaagaaaaccttagtgtgttagttgcctatttataaagcataaaccatgatatataaaaaaaaaaaaagagaagactattcaaatatatatatatatatatatacactacttaaaatcaaattgagtgttttgaaaaa

SEQ ID NO: 69801 - DNA, 2121 bp, Arabidopsis thaliana landsberg
ccgtgataaggcagctttaattactctctctgctctctttttttttctttattggcttttttctcttcttcccaaattcactcttcttttaaagctacaaaacctaacaaagttgaagaagaagaagaagctcgtgctctctcactttcttctcctacggtggtttttttccccctgagctgcaacattcttcgtcggaaatcttcccggagaaaattcttactaggtgagaattcctcatttccagatcgtaactgtccaatgactcctttacttaaaaaaacttttttttttcgctcagcatttacttcaaccattcacttgaaggttgaatatttcttcaatttctatgaatttcaagtaaactgtagctacttctattcatataactagcctttgtttttccggatttttcttcattgttttttgcgttgttttgcttcctccgctggtcgaaatgtagccgttgagctagatttttgttcttttcttctactcaatctagcgcctaagaatacgaacaaacaaagtttttgttttgagatgtactgttgttttttttctcttgtgttcaccaatttttcttctttctaatttcagctctacataactgaaaatggaggtcttcagctactaaaatctgttcaacggagaaggggtttgtggaaagatgtacaaagcactgatttttacggtcttgttggtgtcggcggtagctccggtgagatctctagacccgcctttaaacgacgacgttttagggctcattgtcttcaaagccgatttacgagatccagagcaaaagctagcttcttggaacgaagatgactacactccttgtagttggaacggtgtcaaatgccatccgaggacgaatcgagtcaccgagttaaacctagatggcttctctctgtctggtcgaattggtcgtgggctacttcagcttcagtttcttcataagctctctctgtccaacaacaatctcacgggaatcattaaccctaatatgctgctgagccttgttaaccttaaggttgttgacttgagtagcaatggcttgtctggttcgcttactgatgagtttttcaggcaatgtgggtcattaagagttttatctctggcgaagaacaaactaacggggaagattccggttagtataagctcgtgctcgtctcttgctgctttaaacttgtctaccaatggtttttctggttctatgcctttggggatttggtctttgaacactctaagatcacttgatttgtcgaggaatgagttagagggagagtttccagagaagatagatagattgaacaacttgcgtgcgcttgatttgagtagaaaccggttatctggtcctattcctagcgaaattgggagctgtatgctgctgaagactattgatcttagtgaaaactctctatcaggaagcttaccaaatacatttcagcagctcagtttgtgttattctctgaacttgggaaagaatgcgttagaaggtgaagttccaaagtggataggagaaatgaggagtcttgagactttggatctttccatgaataagttttcagggcaggttccagactccataggcaaccttctagcactgaaagttctcaacttttctgggaatgggcttattggtagcttgccggtctcaacagccaactgtatcaacctcttggccttagatttaagtgggaattcactaactggaaagcttcccatgtggctatttcaagatggttctcgtgatgtgtctgcattaaagaatgataactctactggaggtatcaagaagatccaggttttggatctctcccacaatgcattctctggcgagattggagctggtctaggagatcttagagacctggagggattgcatctgtccagaaactctcttaccggccccatccccagtaccattggggaactaaagcacttgagcgtccttgatgtgagtcacaatcagctcaatggaatgattcctcgagaaacaggtggagctgtttctttggaggagttgagacttgaaaataacttgttggagggaaatattccatcttccatcaagaattgcagttcccttcggtctttgtaagtctcttttggtttagg

SEQ ID NO: 69802 - DNA, 528 bp, Arabidopsis thaliana landsberg
acgaatggttccttagtaaacatctacttactgacatgaacattttgagatgtcatttgtttggcacaaaatctgaatctggttgctatagtttttaaaaagagattttaaatcaaacctatgaaaattagaaaccgactccaaaaatctagaaactttaagattatcaacatccatacatatacgtaatcctcgtgacaaagcatgttacatgtacatacactcacatgcacatggctgatggctgccacttgcatgcatgcatggttttgtcttggtcactgcgactcactaggtatgacactagatcacatttatatatatgtatcatatgtatgcatctgcctatgttttgtttttcccaaagtcataaataattgaatttcgctgcttggctgcgtatttaaactcttgtggaaagcctagatgagctaatttggcttgttggctttttttcgctaattcaaaatttaacaactaagtttgtattgctacaaaataattttggtactatgtacttctgactca

SEQ ID NO: 69803 - DNA, 543 bp, Arabidopsis thaliana landsberg
agaagaatggatcagaatgctcctcttctctgtatttggctcgctttatcatctctatttatttcttctgttttttcccctctttgcgaattatgtagcaattgcctcttagttcctttttcagatcatctatcctcttatttcactttttgggttttcaggtttaggcctcgagccccattctgatattttacatattcgagtcgagaacaggttgcttctgatccgaatccgaaactataagtaacaaacaatcaaaaaatatttgaaagttactaaactatccgaaaactaggttaaaatctaccataaatccctaaaaatattcgaaaatatatgaattagctggaggtccactagttcgggttcggctcatatattccccaaacccgaaataccatatcaccaagatccattagggtagttctcaataaaagttcagatcaggatcagatttttcggttcgagttttgggttattgccaggccgatccacaaccttatcacggttttacttcaggtttgaggttttgggttaatgata

SEQ ID NO: 69804 - DNA, 546 bp, Arabidopsis thaliana landsberg
gaaagacatgagaagagtatcaattatctgaaaatgtaaatttttttctgttaataacaataactaaagagaatcatatgtttttttttcatgatttaacatatatatgcatacagtacagaaatacattatgtatttaatatacattatatatatatataaagctaattagaattccacatgttactagaataattatggttgaaatcattcaaaagatataccagaacaatgctatttgaaatagagataaagatcagtcgacattctcattgttagaaaagtacttcagtgattcaacattctgttttgatctgttttgtttccgctcattctatccgattgtgtttgttgtgtaataatcgtatgtgtttgattagttttttttattacgtgtgtatcaacatagataattttcttttttttggttgccgccaataaacattttactgtaaattcgcatatacgtatatacaatttagattttttactagtatcaaaagtttattaaatagggaaaaatcgctttcaaagggatagaaaaaa

SEQ ID NO: 69805 - DNA, 1198 bp, Arabidopsis thaliana landsberg
caccgaccaactagaccaggtcctccgatcctaggatgctgcaaacacatgaagatacattagaacgaggaacaacaacagtttcttagatattctatgtgccatgaacttgacaacgaaaagggtattttacatccaaacctgtggtgctaaagaaagaaatctgtatttatccagggcatagcgaaccacggcctcattctcgctagggttaattgtgcacctagcaaaatggcaaacaaatattcccaggtaagcttgcagtaactctcagttactcatgactatgtgactgaggacatgtctcattatgttgttaggcctcatccgcttaacttggagtcttggataatgcaaaaattcagttcagattatgtttgcatacttacgttgagtatacaagaattccaccaacgcgaaccaattgaacagcctggtccaacattttccgctggtaccatccatggtttctcaaagatataacagtctcctacaagaaataagcaaattcattccacaagtaccaccctctgaaaagccttggaaacacagattctactctgaattactacaaacactttagattttggtctacatgtataacagtatatatatattgcttcaagaagttactaagaaatcatatttccgccacatagaactgtttaagttaaggctaatccacacatgttgacacaaatactagaatgtgtacatgttaactcgtgcgaattagaacttaataaagcaaaatcacaaaaaagtagaagttcccacaagacggataagtcttgaatttatcttaccagtccagcgaaaagacgaggtctcaagccaagggcagaacaaggagcatctaaaaggaccctatcgaaactattaggcgggaaaccttgtgattttccagctcttccaccttggcattgagttcttccacgaccatttttcaaccttcctttattcttcctgatgtaagcttggctaacattatcccctccatttggctgttcagtgctgtctaaaacatgggtgataatgggaaaatcaaccttctgcttagtttttgaaaacaactgaaatatatattttttgaatttatatatacatgcataaacgtgagataatgggctacagatgccaatttagtaaagttatagttctgtatttgtttgatgccaaagtgataactaaggtcctt

SEQ ID NO: 69806 - DNA, 261 bp, Arabidopsis thaliana landsberg
acacactggtattgatagacctaggaattaaggtatgtactttcgtgaactaaataaaagaataccggtatttctacccgaatataataaaacatgcccagtcaaatgttaactatgaagaaacagggagatatatatcggctgaatcgatctactgtacgaaaacatttgctataaatataaaacgcagtgaatcctatttactatagaaggagtttaactacctagcgaactgtctgcattattatgagtgtatacccg

SEQ ID NO: 69807 - DNA, 556 bp, Arabidopsis thaliana landsberg
tttgaaattcttggtaattatgttgtaatttgatgttttctttcaaaatagatactttaaatctcattttagatgtgttttcaaaagtcgtcagaaattcatcaaaaaccacaattttatctatcttcatattttggacccaatttaaatatggttctaaatccttcagaaaattagtcggaaatcgcaaagacactcagtgttaatatacatttagttttatgcggtgaatttttagtataaatttaaagatttgtgacgaattttcgatgaatttgaacatattcatcataattacatatttacacctcaactatttttccgacaaatatatccaaatccataatagaaaaaaaaaaaaaaaatcggtcgctcttttaatttcaaaatcatctgaatttagtgttgtttttgtttcctacaaattaaagatgcaataggtcgctcgaacttctttttatatattgaactacagctccgaatattaacaggccacacgctgaatttctttttttggcccgactaatagcttaactttagggagaaaataaataaa

SEQ ID NO: 69808 - DNA, 465 bp, Arabidopsis thaliana landsberg
caggtggagaagccgtggccgccccattgctggccggcgtggcgcacgttcagcgtcacccggccttgtttgttttcgccttcactggacgcatcgacgcgaaagttggtcagctcgacggcttgggcggtggcgcgttgcaacgtgcgcagcacggcgtcgaccgggccgtcgccgatggcggcctcggccaccacgcggccgtcttcgtgggtcagcgtgaccgccgtcgaggcgccggaaccgaagtgcgcggtggtgtgcaattgtgtgatgcgccacgggccggcatcgtccggattgagcccttgcgccagcgcttccaggtcgccgtcatagactttgccgcgacggtcggtcagatccttgaagcgcttgaacagcgcggccagcgccacgttgttcacctcgaaaccccagggtggacaaacgcttgcgcagcgccgcgcggacggaatgcttgcc

SEQ ID NO: 69809 - DNA, 281 bp, Arabidopsis thaliana landsberg
ttgagttgtgacttgtgagtgtgggtatatggtgaattagctaaagccaagaaggaacattatatagggaagcttgagtactatttttgattattaggtattgagtttttttttttttttttctccttttttcgttttaagactagcaggttttgttttaaggcattatgtattttactcgcgtggctgcaggtttttaaaactctgtctctttcttaattaaccgagccttttgacaccgctaccctttatgtgcacactatctacctcattcttctgac

SEQ ID NO: 69810 - DNA, 401 bp, Arabidopsis thaliana landsberg
taaagcaacaatttcagccagtacacgatttggttgcgagattgctccgtcataccagtctactcattcagaatttgcaagacactggtttttagctcaaatcaacagaaaaaaaaaaacaatgtcttataactttcttaccaagagttgttctgtttctgacccttttgtcatatctccagatgctttgattagcaagaaacgcaaaacaagagttatcatccacgtttatgtgcgccaagaacgtggtctgtgtgtagttttgagggtcagatgatagcgtttcatcgatcacagcatccacagtctgaacaatcgaattgtagaggctaagcaaaagaagtttgttttttggtcatcaaaaagatgaaagcaaaacaagtatgaccagcttacacata

SEQ ID NO: 69811 - DNA, 298 bp, Arabidopsis thaliana landsberg
  unsure (1)..(298): unsure at all n locations
aaatatcttgttagcatcactgctcttttcgtgacaagccttggactcccactttttcanttttcaatgtgtattttgactctgtttgcatgaagggttttggtttaactgacttgctgattactgaatctcttgattttattcttcccctatcggcttcacacttgaaccattttatcttacaggggggtgctttaaaccaaaaactgaaatcatacttgaattccctggggtattcaattgtagtagaacaaaacggtggctggcctggacccaatcgcttaaaagaaaaaacata

SEQ ID NO: 69812 - DNA, 405 bp, Arabidopsis thaliana landsberg
ttagcttactataactcccagttttccaccagtacgctgacgaaccacaagcattcttttcagcattggtgaaacatccagagttgttaaagccttgaaaattagccttaaagggagccaaagaccaattaatcttgcttttaccaccgtctgtcgcccagttttcaccgttccacaagctaaccacaacttgcataggttttgatgggtagttcatgccttggcttgtggtgttcttgaacacccgtactggaatgttgtccacataaagcctattggtaatcaacacatgctttgtaaaatatatagataagtgatatataaataatttgatttcttaagggtgtagaagtttcttttttaatttaaatggccgatagaaaaaaagtaaatggtttttctgaa

SEQ ID NO: 69813 - DNA, 2987 bp, Arabidopsis thaliana landsberg
ttttcggatattgtcaaattatcctatttcatgtgataggttgctgattaatatggtattagagctacccttgttgatggtgggaagattcgaggagcagggaatgcttggatctgtccagaggtatgttatatgtacttccctacctttccttgtataatcctacgacagttgaccttgcatcattaatgtatccgggttgggtgaggactgggttgagggaaaacgagacaccaagcagttggattaacaatatgaccaagtaatgtgggtcaatctgcagatgcatacttactctttccagataattttattaatagcctgttaggtgtatcaattgactacatcaagccccatctatcatccaaaaaatggttgtgatttttttgttccacattaggcatgaagagtggtagttgtgtctgagatatagacttttctctttcgaatgaagcatatggtatgcttcccttcataagtaacttggtttgttaactgaaattttttgtttatgtttcacaacgaccagcctgtctcaccttactccattcaccaattatatggaagtttcaatttaatctcctagagttgattgccatttccttgaataatagtttcacgactcactagctcacttgacatactgttttataaggttaatttgatggacaatatgtataacatcctaaaatttagtgtctttatttcatcatccctgatttagcaattttcctaattgatgctgaaattgtatatacgtttacagggggaggtggatgataccgcactggatgtgaacttttcaggaaatatatcttttgataaggttttgcatcgttatatgcctgaatattttaacatcgggatgctgaagttgggtgatttaactggggaaacaaaactttctggggccctcttgaaaccgtaaggtttccttgccatcctcttgggctatatttagtgttctttgatgtttgtgcttgacttgttgcgcttcatttgaattttgaatgcaggaggtttgacataaaatgggcagcccctaaagctgatggctccttgactgatgctcggggagatattgtgatatcacatgataatatcattgttaattcatcctctgttgcttttgatctattcacaaaattagatacctcataccatgacccttgtttgtcgcaccaagacttcactcaaggggaggccatgccatttgttgttgaggggcttgatttggatttacgtatgcgtggttttgagtttttcagcttggtctcttcctatccatttgattcaccacgacctacacatttaaaagcaacaggaaggatcaaatttctggggaagataaaacgacacagcactacaaaagatggagatgttgggtcagacaaatgtgaagatgcagctgcaatttctagcctagatggtgatatttccatttcaagtctcaagcttaatcagttgattttggcccctcaactgtctggacgtttgagcgtttcacgtgatcatgttaaggtaatgtactgatttcttgcttctacagtgaaccgtatcatcagtattagtaacacacagagcactggtagcagctatccttgcgatggtggttctgaaaagtagttgcaatagattttttggttcggcaggaaaagatttgtaactgatatgagatttctaactgttgaagctttttcttattttattttttttgtcaatttattgaagccatgaaggctatcttgtcaaatttgtgtgactcgtctcatatatctgattttaacagttctagacaatttgtagttatagaaaggttagcccatgatgtttatactaatatttttgtagtattgttgcatatctagcttgatgccgcgggccgaccagatgaaagtcttacactagactttataggtccactacagcctaattctgacgaaaatgtacaaagtggaaagttgctctccttttctcttcaaaagggacaactaagagctaacgcttgttttcagccacaacagtccgctactttggaggtattgctttctcttgtgtgaatatatgctttaatttgatatttcaaagagaatgagaatcggccatagatggtttacattttgtccccatttctggtcgcagatacgcaattttccacttgatgagttggagttggcctcactgagagggttgattcaaaaggtaagcaatcgatatgagtttgtctattctgtactagtgctgagtgaagttcagaaatagcagtgtattaacagtattatcagcttcagtgttttcaggatattttcttgcatgttcactgtcaatgaagattaggatcacttaataaaacattcttaagatgacaacctgcaaatattatgtgttagttacttagttatagcagaataatggaatttgaagttctaatgtggtttaatacttctcatagaagcttataacttagaaaatcagcttttcagaagttacaggggagggctctctttataaaattataatatcgtactttccatattacttgcaggcagagattcaactaaatcttcagaagcgaagagggcatggcctgttgtctgtaattcggccaaagtttagtggagttctaggtgaagctttagatgttgcagtaagatggagcggtgacgtggtatgtatttcggcctaagattagtggagttcgtttggtttagttttctaagaaatctagagagtgatcatagctgttatatagtttcattatttcatagcacatcatttgccaccatatagttggccataaataaatcaagcctatttcatttatatgttttattaccttacttttaagtgtttcatgttgtccggaagactagaggttatggtgagattgaacaatgaataattgataagtatgtttagcagtgaagttaatatgagaatatgcatgatggtatctctgcttatccttttcatttttcttcctgaag

SEQ ID NO: 69814 - DNA, 563 bp, Arabidopsis thaliana landsberg
  unsure (1)..(563): unsure at all n locations
ccttccggcggggcgacgggcccgcatgccttgcggtcgcatgcttccagcgcggtgcggacatcctctaccgaccacttgccctcgcccgccagcttcagcgtgccggcgaaggagcggatctggttgtgcaggaagctctgcgccgagacgcggatctcgatgaggtcgccgctgcgcgtcacgtccagccggtcgatggtgcgcacggggctgttcgcctggcactggnnnnnnnnnnnnnnnnnnnnnnnnnnnnnnnnnnnnnnnnnnnnncctgccgcatgcatcgcctcgtggtcgaggtcccgggcgacgaaccatgcgcggttcgcctccagcgccagcggcgccttgcgcgagatgatgcggtagagatagtgccgcttcttcgcggagaagcgcgcgtcgaaatcctccggcacctcggccgcgtcgagaatggcgacccgctctcccgccatgccgagatgcgcgttgagggccgtgcggagcgtgtgttccttccattgccccgacaggtcggcatgggcgaccttgcccatggcgtggacgccggaatc

SEQ ID NO: 69815 - DNA, 232 bp, Arabidopsis thaliana landsberg
acattatagaaaaacagtgaccacaacgacagtgaacacgcaatcttaattaataaaccgccaagtatatcgttattccttcccgtctctaactataacggctactaatccaatattctgcttaaaaaaactatacacacgagacatatttggacaatctcagaagctacatggctggattttgataaaaaatattactatttctaaatacaaaccagacgaagttgaacat

SEQ ID NO: 69816 - DNA, 520 bp, Arabidopsis thaliana landsberg
gagcggatccgggatctcactacataatcttttttttttccatgataatataaaggtcaggcagggcctcagctgttgattgcctatttcagcggaattgagagggaatagcaactcctttgactttcgttccagcttgtagggactagtcgccaaggtttttttcacgctgtcaacgtttgcgtgtctttcgccgttacgatggtcgcgaatgcgcgttccggatagttgtagcgcgccttgttctgctcataaaaactacgctgcccggtggagtccgaaagcgagcgctgccaaacctgttcttccataatctgggacagcagtacgccctcgcggatttcgttcatcaggctgcggaattccgaattggtttcctccaaatgctctttttcatattccacgagcgattcggtgaggtaatcattatagtagcgacgggagacaatcgccggagaggcgtctttcggacgaggtgactgcttgcgtttcacgtagttcaggaacgacaatgcgtcgt

SEQ ID NO: 69817 - DNA, 212 bp, Arabidopsis thaliana landsberg
  unsure (1)..(212): unsure at all n locations
gagacacgacccncancagactcggcaaaacaagccaacggctatccnagttcacgtttatcaccacgcgacggaagagggcaagggggaacactggaaccgaacacgccaaacgaagacaccgaaagcgcacgagacgaaaacgacgggacacgccagcaggnacggggacgacaaccacggcgccgnaggaccgaggcccaaggggaaga

SEQ ID NO: 69818 - DNA, 551 bp, Arabidopsis thaliana landsberg
acctttgcccgttgcaggacattgccgatcctgccggcatttcgtttaatgatcctgcctgcatggatgggggctgggtaatggtgcataatacatacgcaacaccacccaatgcctttgtataaaaatcatctgtataagtaataccgccggatcgtgaagcatatttctgccacctgaatgtttttccccggaaaccgatcaaatctcccggcttgggcgctttttctacaccgtcaccgccatagaggaatgaaggaggcctgccattttccgccgcaaaaggtccgcacatcagccagttctggaaataggtatgggtagtggccaccacgttcagcccaatagaagctttatctgctgccggcattccctgccgcaacctttccgcctgttttccgatctcatccgcgatagcagataatccttttatattatcctggtagggttgcaaagctatatccagtgaatacggctggttctctctaagccatgctgtcttgaagcgtgcgcttaccgctgtatacccttctttcaacgggtcaccatct

SEQ ID NO: 69819 - DNA, 215 bp, Arabidopsis thaliana landsberg
aaccggtcgaaaaagagatgtgaaaggaagatataccaatggatcaaaaggggatgggcctttctaaaggaacctaatggggatgtgataccaacaaaaaaaccaaacaccactcccacgattgtggttatgataagcttcgcattttcatttgtgcttctgggagcccactgccaaagattaacaatttaagtaatggggggaactgaaagcaa

SEQ ID NO: 69820 - DNA, 555 bp, Arabidopsis thaliana landsberg
  unsure (1)..(555): unsure at all n locations
tgttgaagacgggattgccgatgctgtggatgccgacaaagccgatcaccgacatgacgaggaggagaaggaaggcctgtgaaagccttccgacgacggttgcgatcatggccgtgccctcacatctgcgaggggacggcctgcatggccgtcgtccagccgcgcggatggacggcataggcgccgaccttctggccgtgcccgacgatcaggtggaagtggtagagcggcagcatgggatagtcggccatgacgaactcggtcgccttggcgattgcggcattgcgctgcggcccgtcctccatgtcgagggcgctcgccagcatcgcatcgaagtcgggattgctgtacctgccgtagttgagcgagcccgatcccgtcttgtcgtcgcgcgtgccaagaagggccttgaggcagaagctgaccgcctcgcccgagcagccgccgtaccagacgggatactcgccgttggagcgcttggtggaaagacggagaagggggcgaccacgggctgggcgaggacgccgatccgcgcccagntctgcgcaatcgact

SEQ ID NO: 69821 - DNA, 339 bp, Arabidopsis thaliana landsberg
gtacaccttcccgaccgacggcgaggccgatgccgtgaccagacccagatgcgtttgtttggcgtattttgcaaacgagcaggcgtggtcggaactgccgagcgcgcatgtcaccaataagcgcggcggacgcgcgcgcagctcggccaccagcatggagggagatctcgtgattggccgcaactggcgctccatgacggccggtgcttcgacggcttctgagtgcatgctagcggcctcaggggccgtcgacggtgactgttaaagggtctgggtcacggggattactgtggagtgaatggacgggcgagtcagttgactcgccgcttgggcactaaa

SEQ ID NO: 69822 - DNA, 543 bp, Arabidopsis thaliana landsberg
  unsure (1)..(543): unsure at all n locations
gttgtttgcttactgaaaactatattgacgcactgtttatggcaatgagcagtgcaactgcaagttccatggtcattcaagacatcatctgaaccaaatgacccaagttttatgtttaggcctgagtcttcttcaatgctgatgacttcgacaaccactgttgctgcggtttcatggacaaattatgcgcaaacaattagcttcactcccctcccaaaaggttctattctcatttacaagcattatgcaattactggtactctcttaatataatctgtgtttcaaattttactaaatgaagcatattgttgttccacgttgattgaaacagcaggagcttgagctaataacaattggtctagtaggtctgaaaatactccaagaccacgatccaacatggacgcaagaaaccatggaaatgctggccattcattaagaggtaaagctcgntacattgagttctgttaataattttgttagaccatatttaccatttcttactagacaggggcgccttttttttttttagtttaccggactttg

SEQ ID NO: 69823 - DNA, 352 bp, Arabidopsis thaliana landsberg
gagagaagagagatcagtagtagtggtccattccatcgaagaagaagacaaagtgaaacccaaaagagccgttgaagcgtacaatctaaggcagtacccacaataaagcttaagactttattattgttgctatctctttcaatttcagtttcaagatagaaagagcaagaaaggcgcagtctttgggggtttctcgggtcatggtgggtttaaacaacgccgtctcactcgacattgaagagatctgcaatggtggcaaggtttgttttacgctttgagctaccaaatttttttgcttttctccttttgccttcactcttaagcactaagaacagtcacattaccttttctt

SEQ ID NO: 69824 - DNA, 572 bp, Arabidopsis thaliana landsberg
gaggcttccggtgatgcgccccaactgaaagctcctgctcattgcttgaccgcagcttacgcagcggttcaatcgcttgcggcccctgaccgttagcccaccgtcgcaggcgctgcatctcggcaatgcagagagctttagcctcttcctcgctgtctgcgatccagcccatctcttccatagatgcggagacggtgctatcgctgctttccgcacccacccaatagcgccacttccccccaaaggcgtcaaatactgcgcccatcacgtcgcctggccctgacttcccgtcaagccaagcaatctgaccccggtctttggggttctgtcgtgcccaagtcaattccatctgctgttctcctgacactattctaccgtgttctccggttttacacaatatcggttttatggtatactggtcttgttaattaccgcgtaaccacagaaccggaaaggcgttgtataatccgtgttgatgagaagacccaaacgagagcgaaagcctgtggaccatcggattgacgcctgcgtgcgcgaagagacctacaacgcactcacggatgcagcgcatg

SEQ ID NO: 69825 - DNA, 486 bp, Arabidopsis thaliana landsberg
acagttggggccgtccgacaaggccttggccggatcgggatgggtctccatgaaaattccggcgatgccgctggcgaccgctgcgcgcgccagtaccggcacgtgctcgcgctggccgccgctcttgtcgccctgcccgccgggctgctgcaccgagtgcgtggcgtcgaacaccaccgggcaattggtttcgcgcatgatggcgaggccgcgcatgtcggaaaccagggtattgtagccgaacgaggcgccgcgttcgcagaccatgatggtgtccgcgccgccgctggcttccttcgctttctgcaccacattcttcatgtcgccgggcgccaggaactggcccttcttgatgttgaccggcttgcccgaggcggcgcatgcggtaatgaaatcggtctggcggcagaagaaggccggcgtctgcagtacatcgaccacggccgcgacttcgggcacctgttcctcggtatgcacgtcggtcag

SEQ ID NO: 69826 - DNA, 423 bp, Arabidopsis thaliana landsberg
ataaacattaattcttccatgttttaacttaatacctaaggagtaggtggaatgaatattatggaaaaaacgtacaagaaatgatcggctcggttaacaatgcaggcatagatttgtgtatccttgcccccaagtacttttagtgttcgtcccactttttaacggatgggggaaaatcattagaaacgctttatggactgaactttgatgttactttgtcttacttccttacaactttctgggttctctttttacctgactaagatgtgctaatgctacatgatatgtgatcgcttaagtagataacatcttaccaaacaatattatcttgatgaaaaaaatatgattctatggcaattcaaaaatggtctatttgcatgtgggagaaaaacgtcaattagagaaaatatcggtgatggtgtt

SEQ ID NO: 69827 - DNA, 406 bp, Arabidopsis thaliana landsberg
tttacccaggcacctacccacttgtttttcgggtgtaactatctctgaaatcgactatggcgctctgtcagcggcaatgacatgaccaacctgtctggtcgtatgctttataggtttatgatggcccgacatggcctgtgctttacgagctaacgtgctgacatgactttgtacctatccaacacgccaacaaatatcttaatggctaccatccacggcctgtcagagtgcacgagcatggtaattctccatgcgattccgctggtcgaaagctagttacggtctgatattttcaaaacgctcacaatgtcaccccactcacatttattacatttctcgacatgcttatcacgattgcattgcgcctatgggctgacgaaaatatataaggcacagcgcaacacac

SEQ ID NO: 69828 - DNA, 573 bp, Arabidopsis thaliana landsberg
atgatatatgtttacttaatttactgtaattccagtttttgtctagattttttcctataaaattccatgttatatttgaattattacttaaagagctataaacccagtttacatcaggattattttctatcatatcacatgttacgtttgggttaatacttaaaaatctcgaatgaaaatatccccttcagatatataaaatgcggttttaatgttctcggacaaacaagtgtaccatgacttatctggatattttttaatgtttgggtttttacttaatgcagaataatcccatggtttatctggattaatttttactatatcccatggtttatctggattaatttttactatatcccatgttatgtttggatttatacttaaacaagaataaatccatggtttatctggattttcttttactatatcccggattacatttgtattctcacttaagtgatgataatcccatgatttactgggattatcattaatgaacttaaaccaattttctgttccattcattttcatattcttcaaaaacttttttatcaattcaagtttttaatcatc

SEQ ID NO: 69829 - DNA, 606 bp, Arabidopsis thaliana landsberg
agagcatggttgtgttacctgtgcagtatatggtcctccaatttgtggaaatgtgatgtctgagttacccaactgcatgcattaggcaaacatttattaagcaaacgggtttaagaaataaaatagcacaagattcaaattactcaagactgataatctaaacaatttcaaccgatctattttaaatggcattcatcattcgtcatctctagcagcaagtggtccagaaaaaaatgttcttctccatatgacctttttgttgataaaagattcaaattgcttcctgtattaacctcatttataatttcttaggtcacctttgggagaaacattggaacatagaatatcactattctattagtgataaccaatgcactaaaaaggataaacaggaaatatcatcagaaccgtaaacatatgaaaccatcacctctgaggagccaccagctgaagaatccgcatcttggtccttgtcattaactctatattcaaaactcaactctccatcatcatgcacctcagaaccatcgttctcattgttttcaatttcatcatccccgtcatcatcttctaatccgctgaaatggtatcaatatgctgtgactc

SEQ ID NO: 69830 - DNA, 108 bp, Arabidopsis thaliana landsberg
gaaacttttccaatcgccatgtatggatccatggatctatttttccattttgcgcccccccctggattaacgggcacatggtaaatctttaatcccctctgccattcg

SEQ ID NO: 69831 - DNA, 622 bp, Arabidopsis thaliana landsberg
accgggaccgcgtactcgatgacgagcagaaaaaagagcttatgatttacggaaagaacatttgggctcgtaagtatgataagagggagtgagggacaaacttacctaattgatcgatcaaagctaaaagaagattttatttttcgtttcgacacatttggaattgtaatgttaaaagtatttatcttatgttgtagtctatatataattattaaagatcatatgtaagcccaaccacgtttggctgcttcaatttgaagggattataaaagatgttacacttgttagcaatatagaactttttgataaaaaagaaataggagcgagtactttaaaccaagaaaatatactacatcatttgaacctcaaaatcggtttacactaatccaaactaaaccaagcttctaatcactcgtatctctctcaaatacgaaccaatcgtgcaactagtagtcacaagcatcatactctaaaacaaataatatttctttcatatagttttattttaaatatatttatttgctgagattagattttttttattttcgtgtactttggggagctttcctaacattatggggattacttcattttcgtgcccttttttttttttttacccacc

SEQ ID NO: 69832 - DNA, 1034 bp, Arabidopsis thaliana landsberg
acaaacttttcagtggtttcttaaatgtgacttagttctataaataagtacgacaaagagaagcaagtgagggatctgagtgacttacatcttgttcaagctcacatttgtaccatagtttggtctttccatcaaatctaccactagtttgatcaatcatcttgctttcctgcttccaaaaaaaaacaaaaatgcaatttcaaaacctttggcgtgaccataaacccctcaaaaccctagatttactaaatacattccaagaaatcagataagaataaaaggcagagatatatgagagagagaaagaggtacattacatcgagatcaggaaaaaacaaagagccatcaccagaagagtaagatcttctcgagaatgtaccagtcttcttcagatatctccggatcgagcttcccctgtatcagaaaacatcagcaaaccaaaaaaacaaaacaaatcgggagcatagagagaaggaagaagaagtatagatttagagagagtatatataccaattgatgggaagacgaaaagtggcatttccgaaggtgcgatcggtgctaggagaagaagaagaggaagcaaggttttgatcttcatgaagagcttcggctttgatacagagcatcgtttgtcacggagcagagaagaagaagaaagactctgaagaaagaaaggttccaactttgaggttttttttattattgtattgaagacaaaagagtttggttgggttctctcactgctcacacttcactctctttcctttttttggtctgtcgcttttatgattttgtaacataaaattataagtagaaaaaagctgaaaagggaaacgaaggaatttattcgtgtctcgcacaatttgactaggtgctcctcattttcataatttcatttaacacacttttttttttggtcaaacatttacattgtctctatattttctagtagtatattatttaatagaaaaagagaagaaatttcggtttcatattattgcttttcatttcataatattccatttcggtattta

SEQ ID NO: 69833 - DNA, 570 bp, Arabidopsis thaliana landsberg
  unsure (1)..(570): unsure at all n locations
ctgcgattggaataaccggaatggcttctgtaccggtaattttttacatcaaggcctggtaagccaattcgggtaattctgtgcgctcttcccggattacactcttggggaaagcccttttcaaccgaatcgatcctacttccgaatcttcaaaagtcacctggcaaatcccggattcatgactcgctataaagacatttcccaaaaaataagggtaaatggaataatacacctcttccggggattcctccatgatgcggatatccaaatcaaggtaagttgagggaacttcgtgcatttcatacaatgaatcaaaaatagaaagttgtgcctgttgtctcccgacttgcgtcaaagaaggggaaaaagcatcctgcacgaaccggatcggatcttttcccaggtactcctggaacaaatgctgcgtttcccattctcccaatcccagctgtttcgatagttcttcgatagtcaccccaatttgctgagaatcaagcatccatttcagtgtcttgaaaagcaactccatgcggngagactggtatgaaaaatccgattccattgcggaac

SEQ ID NO: 69834 - DNA, 520 bp, Arabidopsis thaliana landsberg
  unsure (1)..(520): unsure at all n locations
gtggaactggtggtgtgaagagcatcacaaactattgtcctgtaagttttaaaaatatacatcaaatttttataattacatgactaaatgattgtaatggaaaaatttctcgttgaaggtttggataccattggcagaggcgaaaaaacaaggtttctctgatattttgtttttggatgnnnnnnnnnnnnnnnnnnnngaagaacttttcgcagctaatgtttttatgctcaaggtaaaaaataaatatacaaatttattgaaaatgcatgttgaggtttatacatgtgttatagaatattaagatggttgtgatgatatttttgtatatagggcaatgttgtatcgacaccaacaattgcaggaactattttgcccggagtcactcgaaactgcgtaatggaattgtgtcgtgatttcggctaccaggttggaatatttcattatcatacatatatcaagttgatcttgtaatttgcgaaaaaaatctccttactaataatattcatcatgcatgtat

SEQ ID NO: 69835 - DNA, 302 bp, Arabidopsis thaliana landsberg
  unsure (1)..(302): unsure at all n locations
gcataagcgcgcctctttagattgccccacgtaaacactcgaatatttcatctgtaatcatcgaataacccacgtatcgggacaagtaatccgtcttatctagtgaaacgaaagcgaactgtgatcctcttccctcttctcgctttcatctatttaactagaaaccttctctctcatcgaagaattggaacccacagaaaccaaatacacaaaatatctggatattttaatagaatacggaaatacatgtgacagtaagaaccgttcgatgaatgatctatgatgccttaccgnnacggtgg

SEQ ID NO: 69836 - DNA, 645 bp, Arabidopsis thaliana landsberg
ggtagagacttgtgtcagtgtggcattccatgccttgcctctatacttttttgtgtatagaggagctgtcttattgggattttgaatctaaaaaacatgcaggatttgggaaaagcttataatgaattgaaacaaggagagccagcgatagaacgtttgtttgatttgacctctttggaatctaaggtactacaccctatctttcctctgatcttctcttcagtttatactcctaatgatttggttttgttcgttgtctatctcaaaatatgatgcaaagtgcttctggccctgtcttgaaaattaggtgatcgagagacctgaggccattcaattggaaaaagttgctggagaagttgagttatgcgatatatcatttaaatatgacgaaaatatgcttcccgttttggatgggttaaatcttcatattaaagcaggagagactgtagctcttgttggaccatctggaggaggaaagacaacactgatcaaattgctcctccgcctttacgaaccttcatctgggtagaaattcttacttcttaacttaatcacaatattaagaaccaacggtttgacatctaagcacatatgtgggtttgtttttttcttccctttaataggctcttatcatcattggacaaa

SEQ ID NO: 69837 - DNA, 466 bp, Arabidopsis thaliana landsberg
gcggggggccggccaggcgcgaacggcaccacggcattgctagccagcgcagcgaggccttgggggtggaggtttagtcgatcgcgccgccatatgtctcgtatcgagccgcgaactgggcctggaagtcgtcggtgatcggcacggacagctcgccgaagccggtgatcacgttgctctgattgtcggactcgttgccgacgcccaggaacatgaagggcccgttgcgctgcgaaccggtgcaggtggtcacgccgaagtccggcgtgttcacgcacggattgatcgccgcgttgctgatgtcgttgtagtcggccttgaagtaggtgcggcgatactggacgccggccgcccaggcgacgtcgccgacaggcagggtgaatgttggtcttgccgttaagtaccgtcctgccgactaacagccgctaggactgcttggtcgacagcttcttgaagaaccagtcga

SEQ ID NO: 69838 - DNA, 565 bp, Arabidopsis thaliana landsberg
tacagtacccatgcgcgtcagcaccaggtagaagatgtagctgatcagcaggatgatgaagaaatacaagatgccgtaggcgcccgccttgccgtattcgaactgcttgaccgccgaggtctgcagcatttcggtcatgaacgtggtggtcgaccccggcccgccgcccgtcaccgtcagcacttccgcgtagatcttgaagctgtagatgaagcgcagcaggatggcgatggtcagcacccccctgagcttgggcagctgcacgaagcggaacaccgaccagcgcgaggcgccgtcgatgcgcgccgcctggtaaaacgcttccggtatggcgcacagtccggcatacgccagcaacgccaccagcgaggtccagtgccacacatccatcagaatgaccgtgaaccaggccgacagctgcccattggcgtagttgtagtcgagatgcagcacgttattgacgaactcgccgaacagaccgatgtcggcacgcgcgaaaatctgtcatatcagtcccacgacatttcatggaatgagcagctgcagcgacagcaccaccagcacg

SEQ ID NO: 69839 - DNA, 446 bp, Arabidopsis thaliana landsberg
aacactgctatgaactttaggccaaccctgaagtctcctactacgttagctagaacagcttggcatatttcatggtcactcccacattgggttatcaggccactgcatagcgcatcaaccattcttatacttgcaagagcatcttgtctaaacctaggatctttgcttttccccagccaagttatccaccttctgcatgtatacggcagggttgggtggctcaccaacctgccaaactgggcatattcaccggatacatgggatttataatagaacaagcacttgctcacatcttgctttattagttctacttggtgaaaatcatcatccctgcgttgggaccacttcacttcatgctcatatgttacacttgggcccaatatacatcctattgtgaagcactcaaaggatcctttgacaggcgaccttatatatactatagaaag

SEQ ID NO: 69840 - DNA, 487 bp, Arabidopsis thaliana landsberg
aaaaaacactataccaacaatgtaaaaacaatgtgtgtgttcaccatcattagaacaagatctactcaatgtttaaaatgtatatataatatgttttgcgcaaaaaaacgtatatgtaatattatatatatcacgttcatgataatgttttcaaattctcatatgaaattattggagcaagttgcatttacgatccggagaactgagccaagaaatgggcggttctcaatttattatgggtattattaaccagtggtagttgaaccaaaattaatctattcattttctctatcaaactttttgttactttgatggtttgtctcaatcgattaaaatagtaactagttattttgttttggcatgtcactgaattgatgttgtttcttctaatttatgatccgctatatccgcagcatttttctctcctcctataactctaatggaaacaggaaaaagaaacaacacgaaacgattagaaactcaaatg

SEQ ID NO: 69841 - DNA, 544 bp, Arabidopsis thaliana landsberg
  unsure (1)..(544): unsure at all n locations
cttgaaaaaatcacaaggcgtacacaattttgatctcccaattgtttgtttacatatgcgtaaagccctttctagtgcctaatattgttgtatctagatttttgtttatttttattttatttttggcaaatgaacctttgatgctacgaaaagatcttctaataaactgttccttttggtaaataacttcacattttatccccaaaaaaacatatagaaagaagtgtaaaaaataaaataaaaaacaaaaaaaatatagtaagattgtttttttgcactgagttaacatgagcatgtaggaacaaaaagtaagtaattattggacccaaaaaaccagaaaaaaaaatggagaggaaagggcaacacaaaaataacgagataatcattctcaatagaaaagatagaaatatcaactttctatgtgtcataacgcactactacaacaaaaataactctcgaatatcttgggtaatttaattannnnnnnnnnnnnnnnnnnnnncgaatttgcaagggctattaaatcgattttttctaaagattt

SEQ ID NO: 69842 - DNA, 149 bp, Arabidopsis thaliana landsberg
atccggtttggttctttatataattataaaagctgttacctcatcaaaagcatttttaatttatagccatagagggagcttatagtctgcgcgcatttgaatgacatattcatggatacatgcccttacactagatgaggtgaaggcac

SEQ ID NO: 69843 - DNA, 557 bp, Arabidopsis thaliana landsberg
  unsure (1)..(557): unsure at all n locations
ccctcgaaggcaattcagttttgccttggtgggatgccgttcatcctgacgtcttgtcgccctgaagctggatcagcaccgccgaagccaggatgttctngccgttgcgcnaacttgacacccttgtagcccaccatcagctggtccggcttgatgtcagtggctttcagcgcagcctggatttttgccgggtcggtcgagccggcgcgattgatggcgtcagccaggatgaagaacccttccatgatccgggccgaagtcgagtcaagatcgtgacccgtcttcttcttgtagatctggttgatggcgtacgtcgacgagcccggcttgccaatgctccagaccgaccgattcaggacaccctgtgcaatggaccnnnnnnnnnnnnnnnnnnncgggtccgagaaaccggaatcatccccgatcatgacgggcggcttatagccaagcgacttcatggtcttgacatacaggatggcatcagacgtgtagctgatgnnnnnnnnnnnnnnnnnnnnnnnnttcttgagcttcaagacggcaggctggacgtccga

SEQ ID NO: 69844 - DNA, 527 bp, Arabidopsis thaliana landsberg
  unsure (1)..(527): unsure at all n locations
nnnnnnnnnnnnnnnnnnnnnnnnnnnnnnnnnnnnnnnnnnnnnnnnnnnnnnnnnnnnnnnnncgggggcgtcgagaccgcaaagggtctgggcgaactcggcatcaccgtcgtcatcggcgcacgcgacctcgctaagggcgaagccgccgcgaagcaactgcaagcgcaaggcttcagcgcgcatgccgtcgtctatgacgcggaccgcccggaaacggcagtgagcgtgcatgactacttggnnnnnnnnnnnnnnnnnnnnnnnnnnnnnnnnnnnnnnnnnnnnnnnnncagggaagaactcatgaccaacaacagcagtaccgtcacacaggatgtactgaagcagaccttccagaccaatctcttcgccgtcatcgcgctcacacagaccctgctgcctctgatcaagaaagccccggcaggccgcatcgtcaacctgtccagcatcctcggttcgctcaccctgcacagcatggccgaatcgccgatcgcaccggcccaggcttttgcctataacgc

SEQ ID NO: 69845 - DNA, 478 bp, Arabidopsis thaliana landsberg
tgaaggactaacactttgttggcagatagaaaagaacgaaaaatgtaaactttagtgtaatttccttttttttgatactttagcaggaaaatatttgataaaatgagaagagaaaagagtaaacttttgcattgggttccattttatatcatagagttggcctttttgtggctgcttgtgggcctttctcatcagttcaccgaccttcttttacttccattgcatacttaaaaccattgagatacaacagtgattaatgatataccattcacaacatctaaaaaaaaagtgattaccctactttttactatccacaatattgatcaaatgtttatgtatttatgttttcttaaaactgattcgatatagatatgatgcattttttaaaaatataggtaaaagaagtgaaaaatgataataaccgagatctttagtatagtattttggtatcacgaaatgcagtttcaatattttcgat

SEQ ID NO: 69846 - DNA, 199 bp, Arabidopsis thaliana landsberg
  unsure (1)..(199): unsure at all n locations
aaagcgaaaaacaagcggcanaaacanancagaaaaaaaaaaaaacggccacaancaccnagggaagcggggnncaccagacangaaccgacnanccccacnaacgaagcnggaagaaaccggacagaagnccgaancacgggaaagggagaancacaagaaaaaacccnaggacgcaggggacaaaaaagagaagaga

SEQ ID NO: 69847 - DNA, 604 bp, Arabidopsis thaliana landsberg
  unsure (1)..(604): unsure at all n locations
gtgctctcagctactccacaaagttgtaataatgtcatcctcacatagctcaatccctggtctcgaaccaactttatctatccacaagtaagttactgacacttcaagttatctcaataccatcaatcactgcataataattgaaatctcctttcttgaaatctagggacaagttgttttttgctccctttggaatggacaactcaatggagaaagacttgtgnnnnnnnnnnnnnnnnnnnnnntatacttccattaagaacctatgaaaatacaaaatgatgaacaagatgaatgattatttatcatattttcacattaaaaaaaaaaaatgtgtccttgtgtttagtgagaatagttgtatctacttaaatgtttttccaactaacaaatttggactcctgaattaattaaaaatagattttatgttgttaagcaaaaaggaaattacactttttttttttgtttttggccaaaggaaaattattgtacacctttttttttgttaacaggaagatattgttttgatttttgttattaaaatgataaaatagaactaaaattcggataaatcagagttttgaaagtacagttcgtcagaagt

SEQ ID NO: 69848 - DNA, 547 bp, Arabidopsis thaliana landsberg
gtacttgttttctttatggacaaccgatatgtagtttgtaaaatttgtttgctaaaaatgaaaaaaattggtccgtttaatatacaatgcccaaatgactcgcttctgagctgatgcaataccagttgatgatacattgtggtcactacacagtgtagaagataccaatttgttttgtcaacgaaatgtagaagatacgggttttgcattgaataaaagacattacatattaggtggcgacaaaacagagaagctcaaaagataaaagtgtagaagataccagttttttttgtcaaccgatgtagaagatacgatttacgcgtatagagccaccaccaaggcattgaccaaaacctaatcatctcaagtgggaacgtacgttgatatatgtcatataataatttaataagcacattgacatgacatgtattgattgactacagatttaataagcacattgacatttcacatgtcacatgcagggttgattataaaaatatctaggatcctaatccataccgaaaacaggccataaattttatttgac

SEQ ID NO: 69849 - DNA, 160 bp, Arabidopsis thaliana landsberg
attaataatctccatcgaagcatgtcttatacccagtttaaagcccagcggggtcttgtaaactagttaaattggatgccatgttgcggtttaaccgatgttatataactttgttgtatggaatcatctcaatcttatgctttgctgaaaaaaaaaaaaa

SEQ ID NO: 69850 - DNA, 585 bp, Arabidopsis thaliana landsberg
agctttttgtgtcgcttccatatcactcggaagtctacgttcatataccttcccctgcaaagctttatttttattaaatcacatgtaccatcaccaaacaataacttgcatggcttggtttagctgatgatgatgaatataccagaaatgagtcttggaccagactgaattcggaaaagctggacttccaactccgtgcattattctcgcgatggctcttggtgtgaatttggcttggcgattactctgcaaaaacacctgttttgacacacaatagttaactggacattctttggatacatggcaaacaataaagtatgaacaacagtgtggcttcttggatcttcacctttatgtctgctcgtagaaaggcgctgcatccacaatacaagcgttgatcaatttaatggaaagatgactttgataaacaaataatatgtaacaaccccagttttatatttccttattcgctatgcaataatcaaaatttggaatctatgaaaacaagtaaaatattttggtagtaccaattttgagtagccttgctcggactgtcacacttttcatcaccattgaagtaatcaa

SEQ ID NO: 69851 - DNA, 302 bp, Arabidopsis thaliana landsberg
tatatgcgtttgacttgaagaagagtattcgaagtagacaaacatgctaatctattacaagttgtgtgaatatattaaaaattcaactctctttttaattgttttttttttccacacgttagctcttttgtttccttgtatatacttgtaggaaaaaagtcattgtattttgatgatatatcttcaaaacatattatattttatctttttaaaattataattaacaatgaaataatgactttttctcatttaagacatttggccttttcatatctcactggatttggggctcatttgtttta

SEQ ID NO: 69852 - DNA, 529 bp, Arabidopsis thaliana landsberg
taatatttgataaaatctaaaaatcaattaaattgaataactctagtatgtagtatgtacgaatttaaggtgttttgaaagaataataccatacccttgattcaataccaaatatatttcaattaatttcttaactatctaatcagataacactatacatatgttgtaactctacatatgcaattaaaaaattcgtgtaataatattagaatagtttaaagcttgataactaacatcagccataagaaaagctcatgactaaattataatttggaaatgtctatatgtattataaataaattttaattaaatggttgttctgaaaatcaaaatgtattaattaaatggtagttatgtttttcatggtttgatgggttgtgaatagtaatgaagtttttctgaggcaagtagcagaacccacaaatgtctcatcctctctgcgcatttactgctaactttgggtcatcagattcttcttttggtcccaaaaataaaatcacagatcctttttgctaccttttttttccta

SEQ ID NO: 69853 - DNA, 415 bp, Arabidopsis thaliana landsberg
  unsure (1)..(415): unsure at all n locations
aaaaatgtgagaggtactaatanactttttattctccaagagncacnaactcanangggagacgagtccaatttctccactaatcaagattttcccctttcactagccttgtccaccaatccatggaagttaggcattgacatttcgaatacttgaaataaaaccttggagatgtcgccgattattttttttttgtctagcaggaatttgaattcaaagacatggaacagtagcacttgtcctatacacactccatatacttttcctttaaacatgttcgggacaccatctccacctacacggatccacctcagaatcaccatagacgtgtgcagccgatgcacctgcgttattannnnnnnnnnnnnnnnnnnnnnnnnnnnnnnnnnnnnnnnnnnnnnnnnnnnnnnnnnnt

SEQ ID NO: 69854 - DNA, 546 bp, Arabidopsis thaliana landsberg
  unsure (1)..(546): unsure at all n locations
ctgatgatacgtttcaaaatccaaactttaagaagagaaacgaaaaatgaacaaaaaaggactcctgattttaatnnnnnnnnnnnnnnnnnnnnnnnnnnnnnnnnnnnnncgtggaatagcattacgcagcgacgacatgttggatttgctcttgacgctgcaatttcagtcacaaaactgtttagagttaagagagcttaaagatgatcttaagctactcaatttcatcaacttcacgaattgaaactgaaaccctaatctgaagtatgaatcggatccaacaatgcaacattctcaagtctaaacctaactatgcattcgaacagacgaaacgaaagaaaaaaagaagccaaagattcacacgtgaaatacaggggaaccctagaaattagacgacgccgagaagaaaggtgaaaagtagaagtcgccgggaacacaacaaatttcaccgatgacctgaaacttggtttctggaaaggagtagagaagtcggcgagaagagaagttagggttttttggggataaagaaaactcaaaccgaac

SEQ ID NO: 69855 - DNA, 321 bp, Arabidopsis thaliana landsberg
tggcaatacattatctagccaaacaagttgtttaattgctcttgtaaataaactctcacaaaattttatttgttttgacattgtcactggttatttttggcgggatcactcgtttatttatattaaaaacgatgaaaaacattcatatattttgtaaattaaaattattattaaagcatgtacaagtcaattcttggtaggtggaagtaggtggcattactgaaaggaaaattcaagtaaaattatactactatctaacaattaataactgcattagtaaaatatgctaaaccctgatgatcattgacgatgaaccctact

SEQ ID NO: 69856 - DNA, 467 bp, Arabidopsis thaliana landsberg
accacattttcctggaaaaaaaattcagattcaagaagatggttatgtaaacttctgaaatactcaatatatgagacttttagaactctacaaagctaatttgtggactggtttgaatataatcatgtggattcttattctcaagtacattcatatgaaagtagatacgcgagttaccatcatatatgcgttgatcagattagttataagaggctatacatgccataaggagatgataagcttgcagtcttcaaccaaaacgcaaagcaagtcccaacaactgcctgtgatggatgcagatggatcaagttaagaggatgaaaacgttgaaaatcacaagatacagatgaagaattagttaaaaaaaacctccaaaagaagctgtatctttgcagataaaccattattattctcactgtagaggcttaaggagtcatcaattagcccaatggctgcaaatgctacaa

SEQ ID NO: 69857 - DNA, 578 bp, Arabidopsis thaliana landsberg
ctctgtcattaaggttactagaatatatcaagaccactcatgctgataaagaactatcctttagtattatgaactaatcactacaaaatttgtgaatcgggatgcatttcattttatttctcattgaatgggcacgtcagaaatcaagagaaaaatatatatgtaacagaaattgaacgttcaaattttaagtgaaaaaactctcgactgtatctcgaccgtctgaattggagagacaaacacacgcacaaacaaaaagaaatagaacaggaaaactctcaaaaatctacgagttcatagcagtaaatgtgaccaaatcctacgtcttggacaaaatctttccagcaatccgttacagaacgttacaatatacgtcgaaatcaagctcgtgaacaagactaatacagtttctaatacacgaaaaagtgtattcacactcttctatctctaaaatggcaaagcccttacaccccaacagtgtgtgatctcttttgtgcaaactatgcttcctgaatagacttttccacttatccttaagcccccaaaaaacagagaattgcgatttcatggtgtactct

SEQ ID NO: 69858 - DNA, 479 bp, Arabidopsis thaliana landsberg
  unsure (1)..(479): unsure at all n locations
tcataggttacagtaccgtcggccaccaccgacagatcaatgctggagcccattgtgatttcaacattgtcggcgaaagcttctataatgggaaccgcggccaccacaatgttttgtgtagccgcatcgctgccaaaagcgctaaaagcaatcannnnnnnnnnnnnnnnnnnnnnnnnnnnnnnnnnnnnnnnnnnnnnnnnnnnnnnnnnnnnnnnnnnnnnnnnnnnnccggggaacaaccacaaatatgaattaccatacatggtcacattgataacggtaatacacnnnnnnnnnnnnnnnnnnnnnnnnnnnnnnnnnnnnnnnnnnnnnnnnngcgagcagattattcaccacaatggacttggtcatgctgatggtccccgatgaatcgctcactaccagagtaacgctgaacgaaccaacggagatagaacaaatgctgcttgcattttgcagggtggatgaacctggag

SEQ ID NO: 69859 - DNA, 349 bp, Arabidopsis thaliana landsberg
cgtgagctagaacatctcttaaacccatttctttaatttaattaagcccattagcttaagtaaaattttggtccaacacaactcagccagtcagccctcactccactagctctcataaccatgttctgattgttgatgtgcatcgtttcaattaagctttttttttttatatatataataataatttaaccctttggatgcgaaaacattattcctcctccagaaattgtaagcttatgcaacatttaatgtcagtttttttaaatagttttttttcaatgtcaattccggtaattatttttcaactatagggtttttaaaatgtattgatcgatgttgcccattggtg

SEQ ID NO: 69860 - DNA, 556 bp, Arabidopsis thaliana landsberg
agatgccttgatgtggaatgctatcattggagggcttgcgagtcacgggttcattagatagtcgcttcaactgtttcacaaaatgcgagaatcaaagattgacccggacgagataacattcttgtgcttgcttgctgcttgttcccatggcggattagtgaaagaagcgtggcatttcttcaagagtctcaaggaaagtggtgcggaaccaaagagcgagcattatgcttgtatggttgatgtgctttccagagctggtctagttaaagacgcacatgattttatatctgaaatgccgataaaaccgacgggttcaatgttgggtgctttgcttaacgggtgtataaatcacggaaacttggagcttgcggaaacagttggaaagaagcttatagagttgcaaccacataatgatggacgatatgtcgggctagcaaacgtttatgcgatcaacaagcagtttagggcagctcggtctatgagagaagcaatggagaagaaaggagtgaagaaaattgcagggcacagtatacttgatttggatggaacacgacat

SEQ ID NO: 69861 - DNA, 525 bp, Arabidopsis thaliana landsberg
tattttattggcctttgcatgcccttagagaataattttataggcctttgcatgttgtccacttgtacataaaagaattttaattcatgcttaaaacttggcttaaaaatagcatgtttgtcactctactttttaccttaaaacacagcatgtagtccataagtttcttatatatatataaacatagtatcacaattattacaagtaaaacatcatatattatgtagtcatttaaaacaaattctaatgatagaaaagatttaagatatatatatattcctttttttaatttatttcttttatatatttaaattaaaaatatataatttgtagagaatctatatttctcaccttctatgtaacaaattcaaattttatatttgtgtgtgtgccttttttttttattggtattcctaaatgtgtgtgtctttctgaaaaaaaattgttagaggtggccatctctctatacaatatactacatataactccctctattttttttaaatgaggtttagtccaaaaaaa

SEQ ID NO: 69862 - DNA, 446 bp, Arabidopsis thaliana landsberg
taccgccaccggcttgattatacaccctggcgttccccgacagatctttatcgcttgccgtattctttccggcatcggaataaagtgcgtcgcttccggcattaacagaacgcagacgaggctatcaactgattgtttcctgatgccgtgtctttaaaaggatcacttgccgtaatgattttatttccgtcgtctgtcccccaacaggttttccaggaagaaatgcctgctaccaaacagcttttaaaagctggcagtcttatactattgactgatcttgaaccagaaggagcggtcggtctgtttacaaaacctgtggaagaattaattgccgaggaagaggaatgattgttcattgcgtcggcctacgatttggctgtattatttgagatcggggcattcactaaagactgtgaaaagaggtgaatatacatttcgccggcata

SEQ ID NO: 69863 - DNA, 581 bp, Arabidopsis thaliana landsberg
  unsure (1)..(581): unsure at all n locations
gattgaggcgaagctgttcgacggcgcgggcgcctccgaccgatccatagcttacgaacgcgactggtttgttattccattcctggtacacccagtcgagggcgttcttcaggacgccggaggtgcctcgattgtattcgggagtgacgatgatgaacgcatcaccttcagcgatctttgcggtgaatcgcacgacggcttcatgtgtgtacggctcggtcttggaagatggggtccttgcctcgttgaagaatggcatctcatagtcgcggaggtccaggatctccacgtcggcaccggcctgcttgctgagttctccagcgatccaatgggctgctttgtcactgaatcgcccttctcgagtacttcctgcgattatcttgaatttcataggtggtgtcttttctgattatggatagttatgcgcgcggccgtttctttttagaaggcggattaagcgctcgggtgagaagggaaaggagctctatcatgtgttgtgcatcaagggtatagaacacttnctgaccgtgtcgctcatctatgacgatgccgctttccttgagtacccgaagatgctggga

SEQ ID NO: 69864 - DNA, 541 bp, Arabidopsis thaliana landsberg
atgccgagcatgtcaatcacccggtcgaaatcaccggccccgcctgtcttcggcgcgaaccaccggccgtttgtctttttgctgcgaacgctcaggtgcggaaagagccgcgcttcctggaaaacgtagccgaagcggcggcgatggcgggggacaaaaatgccctttgcggtatcggtcagcggctcaccgtcgagcagcaccttgccgtcttcgggccgggtcaatccggcgatgatgcggatcatcgaggtcttgcccgagccggagcggccgaacaaggcggtgacgccgttttcggacgtgaaggcgccgtcgaggcggaaggacccgaggcgatgtctggcttcgacggtcagcgtcattccggatcgatcctccggccggcaagataggccatgaattcggaggccagcatggccgccatcgaaatgacgactgccaccatcgtcagcctgaaggcgcccgcatcgccgcccggtacctgtgtgaaagtgtagatggccgccgacagtgtctgcgtctcgccgggatgttggag

SEQ ID NO: 69865 - DNA, 239 bp, Arabidopsis thaliana landsberg
cagactttcttaccaaaacaaaaagagtctctatacagacaaataattgaaagcatagaataaaggggtagcgaaagaataaagaaagacccaaaaatcaattatcgagccacatggattctttattccaacttgcaaataaatcgaaatctattgtggtctagttgatcaggtgacttggctcttatcggagagattcgggtgcaatttctagaatagatgggggggggataaaataa

SEQ ID NO: 69866 - DNA, 555 bp, Arabidopsis thaliana landsberg
atttacttttctagttatttaggcaacctattaatatgtaaattaaaaaaatatcaacaaattaatgttacataaacatgatatgcatttaagtttagttaataatgagataagatatatttattgactctagatcacacgatggaaccatataaaactccatatctccaactacatttataatataactctcaccatcaataaataaaaaacaaacaaaacccaaatctcaattattcttaaaaccaaaaataaaaaaccaatttgtaagacatgaagtttacaacattgacactgctcgtgctggtgacagtaatccaattgtctccaactttgatcagagccacaatggttgaaggtccgaccggagatgtgacatgcaatccaatggatgttattgtaccatgtttgctaccgttgaccaactctaaaattctaccgactccacattgctgtcaagtaatggtagaacaccaaacgtgtttgtgtcaatttataaaaggcgtgtgggacgtacaagcacttttttaattctccaatggtcaaaaaacttgc

SEQ ID NO: 69867 - DNA, 221 bp, Arabidopsis thaliana landsberg
tttggaagaaatttgcatgaatcggaaaaggatcttcttcaaaatagtttataaatcgtttgtgaattgaaaatcacggaaaatctgaaggtctctctctaccaatcatgattaaagaatacattagtgtcttgtggatgaaccaaccgtagcatctctcacaacagattccaaagaaccctacttagggtttatagttctcctcagaaacccattcctcc

SEQ ID NO: 69868 - DNA, 481 bp, Arabidopsis thaliana landsberg
ggtagtcattcccgggggccatgcggaagctgccattatgcctgttgtccaagaggtggagcgccttccgtgcctcgatctccagtggagcaaacggcgcgacagtgtacgctggaggatccaatatattcctcgaagaagccatggaaatcaaagaaatattaggatcgtagtcggcgcgtcaagaggtgtgcgctggattcacgttcttggggcgctgcgtatcgctgtcacgtcgagattttgtcgatgagatagatgtagataattgttctgattcgtcatcaaatattcggtcgcaggtgaatagaacaaggaaaaggattgtcaatcgcatgagacagggcactaacccaatgaaaatgctatgcgatttcaatctttctcagaggtatattagggactgagcgcctgataaaaacaaaaaaaagccgtacggctgagtcgaaatatgccttgcagagaggatacaaacaccacc

SEQ ID NO: 69869 - DNA, 345 bp, Arabidopsis thaliana landsberg
actttgcttcactggatgtggctgtgccgcacctggtgtcgcgtctgtactacttaccggtggaggatttacgggattgtctaatccaatagctgggagggctgacaggagttgaggatcaagaaaatcttccaccgatacatcggccaccggttctggttcataggatgtagaatcttccaattgagcttaaagagttttggcgatttcaaactcagcttcagcttcctgcattataccttccctccgaagcttcatggcttgacattagtgacttagtgactcttgctgcagcttaacacgtcacgacctgacattgcctttggagctgaacttgaacgacta

SEQ ID NO: 69870 - DNA, 584 bp, Arabidopsis thaliana landsberg
ttcttttccctgttttctcttggatcttgtttcttcatgtgcggactatacaaaaaactgattcggttaaattaatcagctttatgctctgttttgttcgctttcaggctggttttgtgagaattatagttgcagcaagaaagcgtttcagatattttttaatggccgctgaggtaataattgactagagattgatgaattaagagtagttattgacgcttatagaagaagtagattctatatgaagaaagtttctttttttggaagaacttgaagtaaaagccatttaatttcatttcttgtttccacttcaggatcgaagtgaggaactaagcagcaatgtagaaaatggaagttgcaattccaatgaaggaattaatcctgaaaccagcagtcattggattgaaaacgttgtcaaggtactatatgttttgtcacaactttggagaagagacaaatttcagattttgccagtggatcttacctctcctctgtgtattgttcttaaggttaggaaaccgttcacagtaactaagcacagagagaagtggagtgaggaagagcatgataggtttcttgaagct

SEQ ID NO: 69871 - DNA, 603 bp, Arabidopsis thaliana landsberg
tcgtgatgaaacgcgtcctgttgctgctgttgtgccttgtcctgcccgcgctcgcttttgcttgcacgctccagctgttgcaaggcaaggatgtgccggccctgctgcaaccgccggcgcacggcgagcgcgtcatcgcgctgtggtcgctcgattgcgtgtactgcgagcccaacctggcggcgctggccaaactggcgcgccagcacccgcgcacactccagctggtcgtggtatccacggacgcgccgtcgcggcaaaaggcggtcgcggcacgcctgcaaaaaatgcatctggcggcattcaccacctatgtgtacgccgaagccagccccgagcgtctcaactacctcatcgaccgcgactggggcggcgaactgccgcataccgtggtgattccggccgacggcaagcacttcagcttcagcggcgacggcacggccgcgcaattgcagcacgttgccgacggcgccagcaaccagcactgaccaccttcacgaaaacggctggcgaacgggtgaagaccgttcgccggccgcgtgcgggtgatgggatcttgccttgaatcagcatctggccatcgcgcgcgggcgcgcttctaca

SEQ ID NO: 69872 - DNA, 675 bp, Arabidopsis thaliana landsberg
attgtgtttgtcgatgcaagaaggagaaactagatagttatataacatttttatgcatttctatgttattttatttgaccatgtaataaaatagaaatgcataaaaattgtgtttgataatgtattaaatcatactaggtaacatagaattctttttattacatggtttatttgtttaaataattcatctaattagataacataaaatgctttcctataaatgctaaatatattttttatcattttctataaatttatgtgtaaatgccaagtaaagagatggaacaatttttggtcatataatgatttttattttaatttagtttttcaattgttacaaaacaatgtatccccatatagattcgaaatgtctaatttgaaaataaaaaacattcaaaatatctaaatttggtataaaaatgtaatttttttgacaatttacaaagttacaattttaactgttatggtaaatatggtaacttaacatataaaaaactgttaaccaaattttttttttacgattaataattacaatttttaactgtttaatttgattatagtctaattacaatttaaaaatggtacagttatagtcctaaatacgattacggtttgattttgatatgcctaagtaaattagaaatttcaacaactagacatctattaaaatatgag

SEQ ID NO: 69873 - DNA, 391 bp, Arabidopsis thaliana landsberg
taagagctgcttgtgctcggcctcgctgccccacgacgacgtcaagagcttttcgattttctcggcgagcgcgccctggctctcggccggcgcaggcaacagcgcgatgcgcttgtggatcttgtcggtcacctcgggcgcgagcgtcgtgggcggcgccgtcggcaccagcgccgccgccggcaccaacgccattgacgccgtcgtcgacgacgacgacgactacgacggcgacgacgactacgacgacggaggcggtggtagccccgccggcgcattcaccgtaaccgtcgccgcggcggcgccgacgttgacgtctacgtgggagccgtccaccgccggcagtcacgaggtgaagcggcagagcggacatacgaggccggtgcgggtg

SEQ ID NO: 69874 - DNA, 560 bp, Arabidopsis thaliana landsberg
cgacgatttatagcatgtctccaccaaatcccactaaaaatctagaggcctggaacttaaaatgtttagattttgtcttatcagtatcccttgtatatgaaagagaagacagaaagagaaaaataatctagatcaaacaaaatagagacgctaatgcgattatttaagaatgagtttataattctttttggatctgagttaataaccttacggctgtgtaaagagtatttgcagtcctaaatgttgggaaaatccaacgaaaaaattagattttcatttagttgtttggctcagaatgacgctttcctaagattctattttattttaggtttcttttgcgcctcagctcagttctatattttcttttggggacatgcattataatagttgcaacgcccgaggtgacaaaatgacgattattgatacaaaccatcaggctattaaatatcactatttgatacatacaaaccagctggctatcaaaattttaaagttgtttttttttgataggggaaaaggattcatgcttaaaaggtaaaattagtaggctatcggcacta

SEQ ID NO: 69875 - DNA, 744 bp, Arabidopsis thaliana landsberg
aggacgacactgtgtacgtgagagagagagagaaagagatttatttttgaaagagatgtatcacaataaaggaggggatttagggtcacaggtggtggatatatacgtatgcagggccgaggctctaatctcttcatagccctattgattttgtccctctctctctctctttcttcctctcttagctgtatgcattatgatgcgtcttttaattcactgtttcaggcttctttaattcgtggtgtctctctcctttttacccaaccatctctttaaatttttaacatctgttcctcaaatcctctctcatctctttctataagtatctatagcgcctcttaaaccacaaagcatcacctctgtcttctctcatctcctttctgtattctctttcattgccttcacgtctgttgcaatttctccacttcttgagcttccgttttttacaattattgatccgtcaaatatgtgagatttgcacaacttgttgctcaggtattttgaagacaagtccacaagggaacaagtgaagctgccagcatgatctatctttggttaagagatgaatgtggaaacatattgcttaaacccaagctaggtcatgctctgacagcctcactccttcctggtttaggaccattcattgatgaagcattccacatgccgattgaaagaaaaataagagtcccgaacgcacacagttgactacacgaaaccggtgtaaggctctctgttttctccctg

SEQ ID NO: 69876 - DNA, 1113 bp, Arabidopsis thaliana landsberg
tactataacccttatttcaagacagggtacttctagcatacatacttagtttaaaatgtacagacgacgtagctttaaaatgtacagacagtgtaatttacccttgccactgctgtaagtaaataaaccaaaattacactttactattcaccaatggctaccccaaagctcaaattcacaattctttttcctttattttcctaagccatcaacataacattttgaaccaatttagtagtgtcgtgttatgtttccatagacgtgaactgaaaagccaacttgttgcagcagtttgaaagaactttgaagccagtgaccataacctcgtgttccacgactcttttgatcagaagcagaagcatctcttggtggggaaccatcaaggtttcagatttgacccttttgatcgttcaagggagctggaagttatcttatcagacgagtcccactctgtgctcctgatcatcaattatccagccatccgtagagaactgcatctgctatggtaggcttctcaaggtttcttgagagatgggcttcttgaacccttaaataaggatcttggattcttaaagtaactgaggaatggtgtctcagaaacaggtatgaattttgtgaaaaagccgatcggccatgaaagggatgcaagtgctatgcaagttccccattgccacccgttaagccttactgtatccgcaaacttctttaggaattccaccataatgacttgaagcacaatagttatcgctattattccaatgaacaacctgtttctgtgaaggcctttgaacacatttttcttctccatctccctcgcattgaattcgttaaaaacttgacagagcacgaaagtgttgaatatgagcgtgtccttcacttccttgcgaacactgaatattgacatacccttgaattgtaagatcaagagtacggctatttgatataatgactgaaccaggagattcctccacatgacatttgttatcagggcctctgttcggccaactggctttctcttcaggagctcgttagtgggtcgctccgtggcgagagccagagctcccaatgtgtccatgatgaggtttacccacagcagttgaactgctgtcaaag

SEQ ID NO: 69877 - DNA, 2698 bp, Arabidopsis thaliana landsberg
gattcgttgcctgatgattcattgggcaaaagagaaccagacatattttcttgagactctgagtgaaaagcctatgctatcatactagagtcaatatcaagctcttccagagatgctgttttaccagaacttcgagctaagaatagctgtttaaacctaagtgtgacccaaaatctacacagcagaaagaacacaaaattccatgaataccaagcagcataaagtatcattcaagaagcaaagcgaaaaactgcccccagtactacaatactctcagatcaatatttggtaactaatgtgaacataagaagccgcaaaccagctagatttttttttttctttctttttttgaacaagggagcaatgtggccttgctaattaaacataaatgtgatctttcagtctttacaggttaaaggaaaatacgaacatgctcaatggaacatatttcatggaaaacaccatatttcattggtatttcgtaaactagaattaaaaaagtttgaagaactatcgtaccttctcccaggttcatcaagacttgcatagacagacgtagaatgtgggttactaatttcacaaagaaggtcaacaattgcaaaatattgcaatttttctatcctggaaatatttccttcatctgataacttcttgagctgctcgcagaagccactaaattccaagtctgttgcaggtgaattgggactatacgattccatattaaattttgactgcaaccctgactgaaactgcgaatactgtagcattgaaccagacgtcccaccccattggaaatccttaggatttgggccattggagagagatccttcataatattttgacaaaaggatatctggacaaagaactgactttacagcatatcccttctcggaggtatcacttgaagtaatatattcagcaagatgtctaagagctgcacttgctcgtttccaattgcctgaacacatcagagttaacaatctttagctaaggtaaaattaaccgcatgacacagattatgctcctgcacgaaggaaaaataagacaggaaagctaaataaaagctaaacagcttagtttcagaattgactgaagaagggaaaaccagaaaacactagcagcattttacctgaacgtatagctacaaggagggcatgaggatgataaagtggtaaagcacctcctaacttctccaccatatgtcccatgctcataatgtcatcaatagtatttgagccatatgcggtcccaatcagtgacatactattgacttgcccgtcatcaattgcattactagttgaaggtagaggaatacaacctctgctagtagatgtggtatcagcttcgttgatatcattagtaccagaatcagataagaattcagagtctctgccttcttctgtagcatttactaagttgggaagattggatgcaaatatttctggatagttatcaatcttttgcttcttatcaacaacagccagccattgaccatgtagactaatataatcattgtgaacaagacaagtcatggctttgggtccccaccataaatcatgtatagccgaaaatgtacgagtaacagcgaagcattgccaaatctgtgcctctgaagaataatcataggccgcgaaactggtacttttgcaaggctgccgagcaataccatacacccgcatctcaatctgtgtgcaaactccaagtaatagctgatcattacccgtagttgaccatcttacagcaacaacttctgcatcaacatgtaccttatcctctagtatgaaaacccctgaatctataaggtgtacaatctcccatatactaactgcgcgggcagcttttgaatgactctctgtacagagggctgctatcttgtgtcccgaatcagtcagagatatagcactgacaggattttggccaaccgtaagcatgccaactagctcccacagaccggaaggtgttgaactttcctgaaaactacttctccaaagttttaaagagccatcagcttgaccagttgcaatagtataagcttgactttcactgttcacaccattctctagatccctcccacttggattgaccacagcaaaactcgtaacttcatcctcacggtgagattcaggtatttctgaagagcatgatctaatagcaaggcaattcgtcttgccagcaaaagtatcttcgaacaaccactttcccaatccaatactatcaaaatcatgaaaatgacaatcgcaggtacttcctgctgtatcaaaatgatgtaaggttacactccatgacagagcatcaaaccgtttctctttcatccatacactcaggagcaaaaatctgttacttttaaatgtctttccacaagaattagacagaggttttgcaaatatgctggtcggaccactctgcaaagggctattaaccgtaaacggtatggtacatatataatgggttagataaccgtcatcacctttcccacaattccttacactaaagcaatcgacgcctcctacatgtcccacaagtagaaatctctcatctttcaatgaagaaggtgcccaaccataacttgtgtactttaatctgaactcttgattttgtagccgtccacaaggcttccaagaggcaacagatataggatgctcaatagtccggttcaaataaacactagaggagcagattattatcagaccattagaat

SEQ ID NO: 69878 - DNA, 613 bp, Arabidopsis thaliana landsberg
aaggtgcgtccggatgggcgatgtcggtaaaggcgccaaagaatgatgttttgaggttggtaaaagcgagcagcccgcctggccgcagaacccggctcatctccgcgatgactttttccggttgttccagcagctcaaatacgccactcgagacggcgatgtcaaagctttcatccgcataaggcaggccatccgcctgcgcatcgacgcatttcagctcatcggcgatcttcttctccgcgcatttatcgagcatggcctgggacagatcgactccggtaatggagcaggaaggaaacgcctttttgaccgcttcgctcaacagcccagtgccgatgccgagatccagcatcttcatattttcacgggagccggaagctttattgaagaaaagtgaaacccgcttggcgacctcgcccggtcctagccatctgttgctatagtttgcgtcatagctttccgcccggctttcatacagcgcgatgatctttaaagggctcagctcagacaggcggtcctcattagttaattaaccgcagaattgttaacacaatgtcctggttaaaatcaaataaattgacataatatatgaagctgaatatagtccccatat

SEQ ID NO: 69879 - DNA, 213 bp, Arabidopsis thaliana landsberg
aagcctgcacgagggctcttatgtgttactgacatatcatattttattttgtaaatactttaatgcagagttgagaattgatgatgtactttatttactcgatgtagcttgagaatcgatactccatttccttttaagtataaacaaacgaaaatttaccttattactcacaccacattaatatcatatcaatcacacgtccaaggggtggct

SEQ ID NO: 69880 - DNA, 500 bp, Arabidopsis thaliana landsberg
cagcagtttgcgcatggccttgaccatgccttccggcccggccagataaaagcgcgaaccgtcgacgtctgccacgttggccttgatggtgtccgcgttgatgtgaccctgtttggacgtatagacggccaccagattgaagttttcgttgtcgcgcgccaactgctccagctcgtcgatgtaggcggcctgctcgcgcgtgcggttggcgtagatgagcgtgagcttgtgtccggtcttgtcatggcaggcttgcgcgatgatgctgcgtaccggcgtgatgccgatgccgccgatgacgaaaaccgccggcatggccgtgcttttttgcagcgtgaaatcgccccacagagccagcagctgcaccatggtgccgtcgggcaccttgcgcgcggcgttcttgaacggcgtgtcgcgcaggcgcgtggccatgcgcaaggtatcctcgaacggtgagctgacaaacgaaaagccgtgcttgttgttgtcgccattgacac

SEQ ID NO: 69881 - DNA, 368 bp, Arabidopsis thaliana landsberg
ttgccgtttagaaagacatgtttatgcgcaattcgacaacacaaggccaaggaggcacgaggggcgccaatcaacccgcaccccggaaaagaccagagaccaacggccacgccggcaaagaggggaggggggaagacacccacagcccggagcgggcggacacacacaccaagagacaaggcagaccgagggcagcccaaaccgaccgaaggggaagagagaaaaccacccgcaagccgaaaaagaaaaaaggggagcaaaacacacagcgcagcaagccaggcccaccaaggcgcaaagaggacaaacaaagagagccgcacaagaaccaggaagacgggccaaagaccagacaggagccacaggac

SEQ ID NO: 69882 - DNA, 446 bp, Arabidopsis thaliana landsberg
cgatgagggatttaggcttttttaccatctaaaacgagctatacatggcatagagtatttgagaaaaatggaataaatgaaactcccatccaaacctgggaagtcaaaaccagaggaagagtgcgttcggtatatatgtcatacatgactttggaacgaaaagcttgtttttgaggtcatactaggaactggcggatgaatacaagaatctatggggtatcgcagactgatgaagttcaaataggtggcgaccggaacctttatgaaagattatgaaagagtggttgactcatagtaaccaaccatatgggacattaatactgatctattgatgatattgagggtcaaacaggtcggcataatatacaaaggcgatgtgattcagacagggatagctacatccccaacctaacgtcggagagctgatgaaccgaggcccatgggct

SEQ ID NO: 69883 - DNA, 633 bp, Arabidopsis thaliana landsberg
tatataacatggcttttttagtcgacatgaaatggccactttcatttcattttgttttcttttgttatttttgaaagtaaatgtttcagcttcctttcataaaattttgagatttcattttagaaaattagtttaacaagaaatgagatctatgactatcagatttaatataaaagttataggagtattattttgggtaggacggatattattgcttatgcctaatgcttccttccttcttgttgactatagacttttctttcttgtttgttttactattgatatttccaacatgtataataaatataataacgacaattataaatattaatgactatgaaaaaaaatgagaaaccagtgcttttttctctaaaattataaactacatcaaaaaaaaaaaaaaaagataagatacatacactctttatcaataatattgttaatgttttgcaagaaaaaactataataaaaaaaaatggttgtgcaagaaaaaataatggtgttgacagaatgtgaaagtataaatctattgtacaatacggtattttaaataccgtaacgattggtagatttattcatgcctttgaatttgctgaataggtttataatggggtcttgttattatttataact

SEQ ID NO: 69884 - DNA, 1756 bp, Arabidopsis thaliana landsberg
tcaaacaggtactcaggccttagggtttgggccagatgtgatgttatatgaaaccatagaaaccggtttttttgtggcttttgccggtttattcaatgttgagatagattttgtggttctcaagattagtcttgaaaccggcaaaacaaatatcagtcatgcaaaaaaccttccatttcaaccaaaatatatagatggacacatttatttaatgcatcaagcagtaccatatatatatttcctcacagttgagaacctaaaactcaatagtagcattgttaactgcaacatgtttattctctaatcatctgaacagtagtgttgttggaactgcattccttgcaggcataaccaaattgcaccataccaaaaaactctcccattcctatatcaaataacacatgattataggtaagttaacttaattggagacgagataaacaatgatcaaaacaaaaacaagcaacaattaacaaaaccagggttatccaaggagaatatagttttcaaatcaacaaaataaaaactgcaagaaagctagacacaatagagtccaataaataaactagatatgatcgagatacatgtgacggagggtagtaatatagtcgaagttgtcctcctcccattgctcgatccctgcctccaccaactccaccgtcgcacttgagagctcctctgcggcaatctccgcctcaaacgccagttgttgcacttgctccgctcggtaaatccctcaacgtcctcgcctcttatcacccgtctattgttttggttgataaggtaggtctcgtgagtcttggcttctttgatggtttcttggacggcaaggtatgtctcgcggagttggtcggccacagatttaacatctttgtttagatcttgtctcgaagctttgatatcctcatcgactttagatctcaactcatctcggagctcttgccatatctcgtcaacattgaggcgcatgttgtccctcagagttccaatttgtgagcagatcataccatctaattccgtcattgtcttcttcccatctttgctcaactcatcaagaaattctccccactcttttctttgagtttcaagaactgagtggattatgttctgcataactgtcaccctcttcttcccatcttccactaactccttcatcttctccacttgctcgcgcacttcaccttcagagaccgcatacattagcataaaacaagaaacgagagaaaaacaattgctagaccgatttatataattaccgggagtctcatcactcttagattgaggtggaggaggaggtggtacgacttgatgagatctaaggaaatgctcgaacatgtaaatcgagtggatcacaacggagaggaaaacggtgagacgccagaggaaggtaagctcaaagcctcgatccaatagtttataatactcataggctaagtaaaacgtagagcggtccaatataaacagccagatttttccaataccctaatcagacagattaacatgtttaagtagttaggttcttgttttaatacatacaacatctgagaagagatatacttactgatggtccaactgaagagagactagtgcaaaagaagaagaatggtaatgcgaaaagagtagtggcgagaatgatagggatgataagatctaagaggtatgttgggaagatgacaagtagaaacagaaacaaacgttctgtccaaaacaatcaaattgctaaatagtctcctctttttttcttcttcttcaccct

SEQ ID NO: 69885 - DNA, 3255 bp, Arabidopsis thaliana landsberg
gaacacagtttcatgtggatgagaactgtattgaccagcattctctggtcctttaccccagaaagtgaatcctcgtgactttgcttccttttgcagactcaattgcgaatatttgtcataacactgcaataggaaaaatagtaaattgatatgttaacttcactagtcataagttagaacttagaagtaaagttcagcaatctgaaaaatacctgaaactcaccgataccgggataaatccaacccatcctttctgggaaagatgggtactttagttcaccagaagctccaagaccaatctcaaccgcagtaattagtccttccacaaacaagtcatcaaactctgaccggaagcttctcataaaatcaaaatagacctggataatcaagtgttgaaaaggaagaaataagaatctagacagtacaaaagaggaggaaatgagacataatataccaaaatactgaacaatttctgagcaatgagtgttctttgagtacctctataccagttcgtcatgcaatacccgttccttgtcaatgctccaattcaaacactcgaaacttcttcttccttcacgatcagtgaaaaaaatgtctggattgtctttcccaatcttcaacacccactgtggcaacgaaatcatcacattcccagatgcattccctccatactcatgaaatgccatcaccaccttcaaacaaaccatatactgattgctaagatattatgaaaaagacggtcctttatagggaaagtcacagtttggtcacataggatgtatttaacaaagctctacaagtaaaaatattcacacctgtagcttaagtttgaagtctctgataaggttaaagagctccctatagccagaccatacatatttctgagggttccatccttcaactattccccaccaacaatctattactactccatcgacatttaatgacttcatgtaacttaattcttgtcttacaccttcaggatcaaccaactggccaaagttgtctataatgccaacctgaaagacaaggtacagaactttagcacaggaaaactaaggatcgcggcaaaactggtaagaaatatatgtacactcttttttattgggcaacatccatatatatacacttaaaacacaaagttctctcatcagaagctcactggaagcatggcgtacacagggacataaaagctctctgtgaagtcattacattgctctgcggaatgaacatcttgtataagctgaaagaaaaacaaagtggttagatgaaacaacgtccagcttaaagtcaattctcctaataaggaaatgaatttatcattcacctgattggcttccaagcatccaacggaggtgataggactaacactagtataccttccattcccgggatgatcactctcggcaataccaatagaatcaagagacacaggagcaagtttttcatcgttcctaagaactgaatgctgctgagattcaattgcagccttagcacagttcttcaatgtactagaagaaagtggactctcaatagatctcgtcggaaactgtacctaatccaataatattaaacaatctatgttacattaataacagaacaaagcttataactttaagagcttcacacatatttgggatcaaatttatcatctttccactaaaccctaacttaaatagcttaatatgaaagtttgaattttgagagagagagtttcgaagtttgaaccacatgatttggttgctgtgattgccgataagtagtaccatcggcttcaacactccaaccagcttcacgagccaaagcagcgattacatcattcatatcagcacgcgccggtaacggaaaattaccgtactgtcttaatccggcgagcattctactagtgattgctcgtctatgtctttctctaagcttcgttctctctttttccttctccctctctctcttccctttccctcctccacctcctccgccgccgctgcttccttctccaccgccgattccggcgatgtttccgttgtttacatcgttttccgttggagctatcgacgctgctgctgctgcagcggcgaatccgcgagggcggcgagattgtggttggttgcggttccggttgggaaattgatccgggtctggaattgggtcgagattcggatcttgcgaaccggtggtggtggtgatggtgttgttgagagtatgcatttttgtgcggtgaagttgctcgcttctgtgctgttcccacatttgagatttttttgtaactttatggatttacaaatcaacgtcggtaattattataaattacgttaaaagtctctcattatcaaaatcgtcaatattaacccctccttttttttttgggtcaaaaacctctctttttattttgttcaacaatagccaatgtgaccagttttgacaaagtgatactgaattactgatgggtttggaattaggaatgacacgatgggttttacggttttgtttccaatcctttttttcatggttttattagtttagaaaagaaaaactgaataacataaatacataatttgtcttttgatttgattttggtttagtaaatcaaaccaaaatcatgttaaaattagtttacatattttgactcaggtttttattttaggtaggttttagtaaaattaacaatataattataaataaaatgttaatgaatttccgtttatttgattcgattttatcatgttaaaattagtttttgtttggtctttaaatcgactttacagggccggtccaacaaaaatcttctgaagctagaatgccactatatctaaatggtaaaatactgaaaacaatcacttcataaaaaaaaatgatttgtatatcttagtttattgtgatttacttttttcaactcatttttttttctatttttaatatatcttttttctttctttttttgaagttagtctagttcaattatattttgatttttgagaatatagattcgattttggttcgattttgtatctctgcttcgcaatttataaaaccaaaaggctttgtcaacaaaaattaagttttgagtatagtttgaatattctagtttggtttggttacaactatttttcatctaagtgatcactgttcaatgaccatttcaaagcttttttctcaattatagtcctcaatgaagtggtctggaccgtggagccaataggaaaatgtggaggattggcgctgttttcaaaaaataatgtggaggtgcacattctatgc

SEQ ID NO: 69886 - DNA, 354 bp, Arabidopsis thaliana landsberg
cattcattgatgagagtctcttttgagtttcttaaaattacaatatttaatattttaatattaaaaaaaaattaatcagaaaaagatatatcgggccagagtctctcaaacatgtttttttttaatataatgttaaacttttttttttttaaataacgtttttacaattagtgcatcttgtgtttgaaaatcaaatctaaaaaaaacagaatatatgaattgaacacacaactctaattattaagaccgactccgaaaccagctttggaagcaagcttcataacgtcgatcgtttcttctctcaaatacgttttaaagtctcctaaacaagacacgtctatcattttctctcat

SEQ ID NO: 69887 - DNA, 230 bp, Arabidopsis thaliana landsberg
caccgaccaaaccagacagtccacaaggagcacacacagagagcacagagcccggggcgaagagaaaaagacgaagccccagagagaaagcaacccccacgggagccaccgcggaaccaaccaccaaggagacgccacaacaaggacaaaacaggggacccaagaccctggagggaccaggaccgtcaacggcagacgaaccaacacgatgcgcagggcaaagaaccgcc

SEQ ID NO: 69888 - DNA, 462 bp, Arabidopsis thaliana landsberg
  unsure (1)..(462): unsure at all n locations
gaacgcaaacaacccaacaaaacatgccagccgccggtcccacatggctaaccacaaagcacaacacacgggggagggggaagctcaagcacganacacaccaagaacaaaacaaggagnaggagcnaaaaaggancacaaacacagacagaaaccacgcaccaaagggagggcgggacaaacaccancagcacggaagacagcccagaccgcaaaagccgaacaaaacccaacgccgcaggggacaaggcaccaaacaccggaggacncagccgcncaaaggccccaacacaagagccaaaaaccgcacgcaggcccggcgcggaaccaaacccaacacaggcncgcgaagaaagagcccccacccacgagcaaggaacaaacgggaaaacaaaacaccaccccagggagacacgaaacccccgcaagccacaaaggaaaacccaaagcccacaaaaaacc

SEQ ID NO: 69889 - DNA, 421 bp, Arabidopsis thaliana landsberg
tttgattataaaagagcatgttactaataatgatgatctagctaaatagccatatggaaggaaacattttttttttgtactttgttgtttaagagaatgcaactgtttttaaattagttatgtaggagacgataagattgtaaattttcaattaaataattttagctttataatatatatggaatttgcatacaaatttgatttcattatatatgtttctaatgtaaatgaaaagttagttagtagagtaaatgtgcattttaaaaaaattgcaaggtgaaaagaaggtacggtaaacattaattttgaaatgtacatatctgatttttttttttttcttttttttggagatggaatgagagattttccgaacgaagtttttatttcaggtgtgacttattcttcttcgccgatcttactt

SEQ ID NO: 69890 - DNA, 1563 bp, Arabidopsis thaliana landsberg
agtggtgagacgaattttttttttttgaactgttataaagacaggaacaaagtacatttgtagtttcaaacgtagtcagcgaaaaactatttctagttgttaagattatattccaaatgaaggtataaacaaatatgtaaaacctgagtataatatgaggtgatagtaagccataccacatatagtttgtacaatattgattccacatcttcaccaacataacctgcctggacaagaagagtagtagtttagttatgctaagagcaagacttgtgttaggattcctctaaaaagcaagaaaaacatcatcacttcatcattcaaaatatttttcgaaatgagggattgtaaggcatcatcttagtgggcctaatgcttccctaatgtacaacatactaatgttctgagtacccaaaccttaagaatgataagtgaaacaacttgcctgagttagtgaagtcgcatcagcaatagcgaatggcacattgacaatacgcgccaaagtttttgccagtaaagtctttcctgttcttataaccaagcaagaaacatataggccaagatcattatcatactaaacagtagctccaaataccctcaaaaacattatgccaagcaacaatatgcacctgaaccagtaggaccaagcaacaacacattactcttatccaactccacatgatcaatattatcatcctccatatcaatgttatatgattctgaagcagacctggaattaaaaaaagagcaaaagaatcgagctttgttgtaacccatataaagtatcagaatgataagagcatggaagaagacataccctttttttctagaggcatgatatattcttttgtaatgattataaacagccacagaaagcacctgcacaaaaggaaagatatgtaagcaagaatctaatttagaacaacaagaagaagaagctagggaccgaaaccaaaccttcttagccttctcttgaccaatgacaaactcatcaagcccttgacaaatctccttaggtgttggaagcttaatcacagattgcttctctttatcaccaccattagtttcatcctcctcctcatcagcatcctcaccatcttcatcgcttctaagaccttgaattttccaattccgagggaaagatttctgatcatcatcatcatcatcatggtcatcatcagttcctttaactttcccgagttcaataaaactcccttgtaaaggagagagcttgaacggtctaaagtaaaaagctgttttgcattgagaacagaaattaacagcttgatagatccctggttctcttgctgttagagacaatggacgatttgagaagatgacgtgcatctgagcagagcaacgaggacaattgacgtcacttctgatgtgatcataatcatctccgccgccacctccgccgccgccgctgcaggagtcccaaatacggcgggagaaggaagaggaagggattagggtgttggaagaagggcgtagaagagggatgtgaggaggagaatcaacggagagaaggaatctgaaactgcgagagagaagagatgatgt

SEQ ID NO: 69891 - DNA, 320 bp, Arabidopsis thaliana landsberg
cactatcgtaactaaacatacgtaatttattatagtattacaatgtgttcatctaattttttagatttcatactaagtaaaaaagatgaatgtaacaatcaatgtatatacataattcaataaatacttaattaaaagatataaatacaaatataacactaggtcaaagttggccaataagaataattcttttgtggcaatcatatagactacggcatggtcttatgctattggtgtgagattggagttgatttgttcgtgcgaagtttgctctgactataatattaaatgttgaccacatattatgtaagcccatacgt

SEQ ID NO: 69892 - DNA, 388 bp, Arabidopsis thaliana landsberg
ggaacggttggagacacaacgtgaacaaaatactgagaggggctgatgcataatagcacgctttatactaagggaacaattgattggaagaatgaaaaacatatcaagattgataagagctctgacatagaaccagcatttgcgctggtgactctaggatccacaaagctctgatctaccaagagcactataccagggaaggatgattcacaaccgaccaacggtggcgcaacgatacaaagtccgggggaaggaaagtctgaccatcgtgagcgtaatgaaagctcgagtatcaatttccgcagagtgacgctgcatttgatcatggagagacgaggacttaaagggcatcgcacaaaagttttggctagctgtgatgtttgctcat

SEQ ID NO: 69893 - DNA, 579 bp, Arabidopsis thaliana landsberg
  unsure (1)..(579): unsure at all n locations
gcgactacatatggattggactatgaagggaatgtgtgtggtagcaagcatcgtcaccgtgaccttactcaacttgagcttagatattggttaaaccctaaccaagtttatgaaagtggtttgaaagatggggaacttaaattggctaatgctagaactatttgtctcttgnnnnnnnnnnnnnnnnnnnnnnatactctcaactgggtatgtgactatcctgacggcgagattcgtctcaagatgaatgattggatcgataggaactatgattattttgagtttcttactccagaaatgaggaattcctctcttcagcttcagggtccttgttaccctgtaatattccctagtgtgaatggtaagaggcacacaaagcttattcttattttctattctattgcttttttgtaacaaggtttgttcttttgattctttagtttattggagctgccaatatattgctcgtgcttcaaattcatccttacgccactggcagcagatgggtggtgttaatattcaagaggacatgatcatagacaaatcaattagaaggtcaatgaactctcgtgcctcagt

SEQ ID NO: 69894 - DNA, 591 bp, Arabidopsis thaliana landsberg
gtttattctcaataattcaccttcccgccttggaatcttcctgaaacctttaaaatttgttacttattctttcatcaaaccataacccgtattttctgtgtcaaagaaagaacaatttattgcagccattcagaaatcttatcaaactgacaaacctgtaattcatttggggtcggccattctcgacggcgagatcatcggcgaggcccgcgtgaaccttcccttgcgcatgatgaaccgccacgggctcgtggccggagctactggatcggggaaaacgcgtacattgcaggtatttgcggagcagctttcggcagccggcgtgcccgttttcatgtccgatattaaaggcgacctttcgggaatcgcgcagccgggcaagaccaatgcggacctggaagagcgcgcccaaatactgggcaccgttttcgaaccgaaaggatttcctgttgaactatattcgctcagtggcaacaagggagcacaaatgcgtgcaacggtactggaattcgggccgatattgctctcgaaaatctttcaactgaacgaaacccaagctggtgtactcgctatactggtcaaatatgccga

SEQ ID NO: 69895 - DNA, 235 bp, Arabidopsis thaliana landsberg
  unsure (1)..(235): unsure at all n locations
agggaccaggagagccagagaagaagggaaaaccgagaaaaaacaaagaggaagaaccaacncaagaaaagagaagcgaagccggggagaaacgaggaaaacgaacaaaacagcaagcaacgaaaagggcaaaagaaggacgcaagaagaaaaangggggcacagaagaaggaagaaagccacaagcccagaggaagaagacggggaaggaaagaaaagggagccccaaagaaaa

SEQ ID NO: 69896 - DNA, 2645 bp, Arabidopsis thaliana landsberg
aactgcccattttcctccgtatgttcatcaactgaaagacgaggtaaggaaaaaaaccgaagatttgaagaaaaaggatgaggagttaactaaagagagatcagaacgcatgtctgttgagaaggaagttggagactccttgaccaaaattaaaaaggttcaaactttatactgcagaatctccactttgaaaaccttcaccctataccttgtatagtcatacgttccctatcatctgtttctcaggagaaaacaaaagtggacgaagagcttgctaagctcgagaggtatcagacagcattgacccatctctctgaagaactggaaaaattgaagcacgcggatggcaatctccctgaggtatcaagttttatatcatttggatgtaaatgtgtgttttctataattttatgattattttaccggtatgttctaaactctaatgtttttcgtagggtacttcagctgtccaggttctatctggaagcatactgaatgaccaagccgctgcttacgtgtcagctgtagagtactttgaacgtgtggctcgttctattgccagcaattctcaagtcagcactaagcctactgatatggtgactgaaccttcctctggcattcctgctggtaatctaaaaagcaaacccaaaaacctaccaaattgtgatttttttttttaccccagtctaaagtgacaaattaatctttggcgcagctgagccttcaaccatgacgagagtcccttcttcaacacctttaataaaatctccggtggcaactacccagcagctacccaaagtagcgtcagacaacaaagagaagagattgatttcacagaaaccaagcactgagttccgtagaccaagtggtaggaggattgttcgtccccaacttgtcaaacctgaggaatctcccaaagttgatgttgatatgccagaagctgagggaactggtgatgaaggaaaacagcctgcagcccatgaaccagagagccaagtgactacatctgtacggcctgttcaaacacttgtccgtaaacgccaggctgattcgttggtttctgagccacaacaagatagtctgactcaaggggaaaccagttctgagattgcacctcctgcatcgaagaaggcaaaaggatctgagtctcatcctgatacttccgaaggtgaaaaccttgcaaaagagccagccatagacgaattgatggatgctacaactacaactgatggtgacaatgaagaaacagaagccgagaatgcagaggagaaaacagaggaatatgtggaagcacaacaagacaatgaagctgatgaaccagtggaagaaagtccaactgagacagaaaccattcctaccgaagaagagtctagggatcagaccgaagaagaaaaccaagagcctcttacagatatggaatccgataaggaagaaggagagctcgatctagatacacttgaagatctggaagagggtacagatgtagcaagcatgatgaggagcccagagaaagaagaagtgcaacctgagacgctagctacacccacacagtcaccttctaggatggagacagcaatggaggaagctgaaacaaccattgagacgccggttgaagatgataagaccgacgaaggaggtgatgcagctgaagaagccgctgatatacctaacaatgctaatgatcaacaagaagcaccagaaactgacatcaagccagagacctcagcagctacaacctcccctgtttctaccgctccaacaacttcctctactctagcttctgctattacttcaagcggagctccagaaacagaagatccaaaaagagcaccgtcaccaggtggtggaagttcaactattgtgacactagctgatagagcacagatgaaaagacgagaaagaatagccaatatagtagtaagtcgagctcctaatccagccaccagaggagctcgtggtcgaactgtaaaccttcgaggaggaggccgattgttgcctcgtggtggtcgagccccacgtggtggacgtggacaatccccgagcccaccatgatttttagtgggtatggttgaacaattagacttatccaaggaggctccttgaagagagaattaatagcggtagagaaactcattttatgtctaaacctcttttctttttgtatcccggttttcttatatcactataaaatcaaacctatcatttttgccaatgattacaaattgcaaaacatatcataaacacaacacaaaaccaaaaaaaaaaaagtgaagaaaaaacccaacattacaccatacaacgaaacaatagaagaagaagccatctcgcttgtaataaaatcaaagcaatccgaaacaatcggacggtttatattgatccttaaaaaaccaaaccaaaaacactacatgttcttctagttagctcactgtcccggttaactctgtgtttccctcttcgactgttttaaaatcagcaaccaagtcttcttctttcttctgttatcaaagacataagatcattctcgttagaatacaatacatagaacaaaaatagcatgattgagagatataaagaggagaatactaaggacctttaataccggagggaaccttagcttcttctgtaccataaccttctctctgttt

SEQ ID NO: 69897 - DNA, 332 bp, Arabidopsis thaliana landsberg
tttatttcgctgcatatctttgacgaaaatcataaaaccacatgagatgaatatcttcgacaaccaatacaatcagcgtaatatacgtcttggatgatatgactatagatctttcatgtatctatttaaagaaaaaattacgaaccaaaataaacttcatgtgttaattaagagattattattttttcttagataaacgaaagtcggtggatagaaaaatattaaatgctcaaattattatggttggtttagtcttctgaattcgcagaaaattgagatgagctaagcataaatgttctttatccttgcgagctgctccaagaagtggttga

SEQ ID NO: 69898 - DNA, 1193 bp, Arabidopsis thaliana landsberg
gtgccctttgatgatagtgacccattgaacgtatttaaactttagctttgggttttggaagcaaaacattttataaatgactttttcaacagttttcatgattttgagattgcaaccacattcatctgacagcagaattcatgctttgatataacattagcgtgtcatgtaatatttatctaaacctactagttttgggttatataactcgacaatatgattttaaaattttcttgagttaaattcaaagtatggatttgcattttcaacacttttatgtgacatgacgttacatatggaaagtcataggaatatcccaatttttttttaaattattattagaagtaaaattctaatagaaatatttgtgtctaggattttcactacagtctattagataatattcatatctttgattatagcaatcattagtctatttatctatagtcatatattcacatttactttgattgtaataccctagatatctctctttgtatataagctcatctctgtattataataaaatcatcacttctataatcatggaatcagagcaataaagctcctagacctaaatttttcttcttactcgtcttttctctcgcagccgtccaatggcaaacacaaacaccattcgtgctaatgatcattatgaatatattctaatacagtctatatatattatattgtatacatttaactatatataaacaaaaacaaaaaaaaactacttgaagttagtaattattatcacttgacaaacaaaaaaacactacttaaagatatacacatgcattgaatgtgtataacaagcggctccatcttactactagttggttagttaaacttattaagaaaatacaaaaaaggaaagtgaggaaagagcttattggcaaaaagtaagtccttaaatagtataatccctgagatgagcaataatggtgttccttatattattgcatgtctattttctcttttcttttttcttcttcttcttcttctctttagtcgaaaccctgaatctattcaatttcactaaacaaaaatgtcaactggagagaggaagacgtctcttacgtaaacagacataattattgtcaaatcatcaactttttctacgaagatgtcaaaacgaagcttttgaattatttgttactttctaagtacaggctatatatgagctttttcat

SEQ ID NO: 69899 - DNA, 583 bp, Arabidopsis thaliana landsberg
  unsure (1)..(583): unsure at all n locations
cagggctgttggcgaccagcggcgcaactccgtgcgattcatagtaagtgaacttcatcgcgccgaaccacgcgatgactatgacgaggccatagcgggcgacgagcgccgcgacggcggtcgttctggtgctcctcggctcaccaaccgcgatgtgtccggcctgatcgtgtgacatgttcgctccattcgtatctgactgcaccgccgaggatttaccgaggcgtcaccaccgcctcggcgcgtatggcgtcggggtggtgccggcattatcaatcgctcggatagccaccatcatccgagcccgtggggtgaattgtcctcatccggctcagtaattcacccgggtgagtggctgacaacaatggagcccgctgaggctcacccccgcacatcacagtgctgcgacggctgaccgcatggcacacagatgctcccagcacggcagaagcgagtgatggttatcgatggaccggaaccgggatgcgccaagtttccgtgccgtccaagtcagccacacgccagtcgcagtttgcaccgngcacacagggatgtggtcgcggtccgggcagcgcaccacggt

SEQ ID NO: 69900 - DNA, 619 bp, Arabidopsis thaliana landsberg
tacctgtttaccatgaccgacaagaaagttataaagattaaagcttttctctatgtaatctctgaagaaccccagttaatggaattttctccaaagggggcaaaaccttaataaatgagataactttccttctccaacaagtcaaagaaccatagttatggagtttctagtaaaaatgttgatgtaaagaagaaaactttccccgaaatctcctcaagaatctaacaaaaacgaatgaggaagaagaatatgaagtttaccagcaagtttaggaagtgttctccagcttccatgtccatttttcttgatatgcgcaacaagaacctcattctctttaggcgtccaaggacctttcttcaaaccaatcttgtcacaacaaggtgttctttccatttgttcctcaccccactaacaagcagggaaagactctttttgaatttctttcggttttgtagaagaagaaacacagaatgactaatcttttgaacagcttgttgacttttagactcataataggagagaccagagtaatgcccaaggtgaaattaagagtattatgattggattatagagagaattttttaaaaaagggaaaatgataatagttttggtctggtct

SEQ ID NO: 69901 - DNA, 387 bp, Arabidopsis thaliana landsberg
  unsure (1)..(387): unsure at all n locations
cggaatgcaggaaaaccccacagggggaaacaccgcaaaaacaagaaagacccaacaacggttttccaaaggccaacacgcacacacccaccgggcaaagcacgcgganaacgacagacacaacaaccacgggaagcacacccggggaccaacgcaaagcaacacgacaaacaggaggagaacacaaacacgcgggaacagaagcaggaaaaaccagaaggagacagggagacaaccccgggcaaagaagaaaaaccgcgcgaagaaaacggagaaaaagaacgaagccgcggaaacacgcccacacaagaacggggcccacaaccaggagcccagccagaggcaacagggggaacccacgaaaggcaaaagccggcccagaccgag

SEQ ID NO: 69902 - DNA, 329 bp, Arabidopsis thaliana landsberg
tttctcctgtttgcctgcaaaaaaacgactgtggttggcatatgaacatgagaaacacaattgcttattccaattactgtaagttcactttaaaaagttttgaattctggaatctggatagtgcgctgtttgatatttgatcgtttaagctaaaggtgttcgacgaattagatttttgtagttatagagtcggattcggtttggaatgtttgtgttgatggcttttctcaaaattgcagttgaggatttccttctgcatgatctctacgaacttactgcattttctcaacggcagacaaatgcagatagattgaaagaggcttttagct

SEQ ID NO: 69903 - DNA, 209 bp, Arabidopsis thaliana landsberg
agactaccaaacttataacatatgcgagactatcctgctgctaatacgcagattttcactaaaatcttcacttttgtcaaaaatgatcaaattttttacttatttcttaaatcaaacgaagtaatacaatccaaagagaaactcttaattaagctgatgcaaaccattttttttttcaaaagatgaaaagagaactaaatgatcatggc

SEQ ID NO: 69904 - DNA, 469 bp, Arabidopsis thaliana landsberg
  unsure (1)..(469): unsure at all n locations
tacagtgattaaaacacgagcctcgcttctaacatagtctctcaattggtgtttatctaatattgtcatttttgtgggcattcagtcttagaggatttgccggagggattcatattatacaaccataaacataagattttgtaaacacctgttaattcattctataaaaatatggattcttttataaaaacaaaacaaatttttcgtgtacacgtttttgaataatttggtattgatgttacacattagaacctctggtgtttttcttttcttttttgtacgctaaaattaaaataaaattgttcacgatgaaaatgaggaaaatgnnnnnnnnnnnnnnnnnnnnnnnnnnnnnnnnnnnnnnnnnnnnnnnnnnnnnnnnnnnnnnnnnnnnnnnnnnnnnnnnnnnnnnnnnnnnnnnnnnnnnnnnnnnnnnnnnnnnnnnnaattgttagacataaaccctgaa

SEQ ID NO: 69905 - DNA, 382 bp, Arabidopsis thaliana landsberg
  unsure (1)..(382): unsure at all n locations
aacaaaagcaacagagacaacctaaccagaggtttttagaaccccagaacaaggccggaaaggagggggaacaaaaaacaggacccgaacgcagacacaagccggagcgggagacangaacaagacaaaagcaacgagaaaaaccggaccaacacaagacgcaaacgccaaaaacggaacagaagggaaaaagaagacaggaaaaacccgcaagcgaaaccaaacaggaagaaacancagacaagccgcagacggggnccacacccaacgagccaggaacacacaccangcagcgggagaccaaacaccaagggggaaaaacacaaggaaaacaagcgccgaaacaaaaagaaaccgaaaccccccaagagaaagcgcaaca

SEQ ID NO: 69906 - DNA, 500 bp, Arabidopsis thaliana landsberg
aatgataccgtcaaaatattttgtttttgttcaccaatcatctatacgattgctcgatcatagggtggcgagagtgtaaactagatataactcataccagtttgtttgtataaactaaataactcatactattcaatatagaagaaaaatgtgtcggttgatttggttgttttccaaatgaaattattgcacaagccaacaattggagatagagttcaaagggggggcgtaccatttcatatagatgtggcaactttagcacctttccgtctttttgtttccttggttagactagtctattggatttattacgtcaaaattatattctaaattcctaattaaaagttttttccattacaagaaggaagatttaactttttttttaagaactaagattaatcaaaaggtaaattacatacccgattaaaagctttcagaattatatgattctgaaaataatttccgaagagtgacagggcccatactggccatgcactcat

SEQ ID NO: 69907 - DNA, 3223 bp, Arabidopsis thaliana landsberg
tcttctgaatcgttacctttaccctcctccaacttcgcttcgcttccgattatggcgatgaaaaggagaatcatcgacaaaatcctcgagaatcgtgtctctctcatcgtcggcgagcctggatgcggtacctgcgctcgccttcttctttctcttattctatttttcttccttcgttccgagacgacttactctagttagtaatctgcatttccgttggggtttttgtttttgttttgtcgtcttcgtcattttgattacagaaatgctccgttggggtttcttcctgtatgacaccagattttgaatgttttctgtgagtggatagtccatttgattcgtttctatcttaacgcgttaaacggaaatagtacaagttgggccatatttagcttccctgcgcctttgaactgttgtgattgttatggatagctggattttcgactcatgtcatacgtagtgtggttacttacttgtccttctttgcttcagggaagagttcacaagttccacagttccttctggaagcaaacatggctcccattttgtgtacacagcctaggagatttgcggttgtagctgttgctaagatggttgctaaatctcgcaactccgatttaggtggagaaattggttaccacattgggcattctaagattttgaccgaagggtaactatcattatcttcttgacttatagaacaatatctcctttcagtttcttctactgtgtccgagttttcaggacaatatttggctttttcccccttattgatgacttttatgcaattatcctgttgcatgcaggtcgaaaattctgttcaaaactgctggagttctgttggatgaaatgctagacaaggggttgaatgcactaaagtacaaggttatcattcttgatgaagtgcatgaaagatctgtggagtcagatcttgttcttgtctgtgttaagcagtttctcatgaagaataatgacctcaggttataacccttttctacaacatgatgtaattactttaaggttcttaaattgtttcgcgtggttgtgtttgctgatagaagataagtcagttttatactattccgattcattacttcaaccgtgttatcatcgataacgtttgtattgaggtcatggttattaaagaggtgatttgattaattacagggtggtcttgatgtctgcaactgctgatataacaaggtacagagactactttaaagaactaggcaggggtgaacgcgtagaagtagttgctattcctagccctgaccagagaacaattttccagcgaagagtattatatcttgagcaggttaaacttttttagatttgttgctctttatgaaactatattattatccaattgattttcttcttttctgacggcaagtatttccaagctaattaatatgacactgtttgtgaagcaggttgcaggattgcttggtgtgagttctgatttgtcagcttactgtcctggtccaagtccttcttcagctgatactgaaatcaaacctgaactgcaaaatcttattcatgatcttatcttatatattcatgaaaaagaaccagacattgagaagagtattttggttttccttccgacatactactcccttgagcagcagtatcatcaattggaacccttttttgcatcttttgaggttcacatattgcaccgaagcattgacaccgagcgagccttggcggctatgaagatatgcagatcccgccgcaaggtttctcttttacctttccatgtttctttgtccttgagagatgagcattattattggggggacatcaaactcgtattgatgcaatgagttgcaactaccattttgtgacgtcatagttatataaattttccaaaatactgttctcaggtaatattggctacaaacattgcggaatcttcggtaacaatacccaaagtagcatatgtcattgactcgtgccggtctctgcaagtgttctgggatccgtccagaaaaagagacgcagtacagcttgtttgggtctctagatctcaggtattgctagaatttaccatttatggaataatagtggatgactggatgttctaaatttagcttcttatgtgggttataggctgagcaacgtatagggaggacaggtcgaacatgtgatggtgaggtgtatcgcctggtgccgagtgcattttttaacaagcttgaagaacatgagcccccatctatacttaagctgtcattgagacaacaagttctccatatttgctgcacggaatccagagccattaatgacgcaaatggtaataatattataattgtgtagagaatgtttaacttcttttataatagaagatgtcaaacttgggttacctgtgaaatagtaaggacagtcgggtttgctaggtcttctgctactgcataagtacctatcacatgagttcctgtttggtgcgaagatccttagatgaagctaaatgcttatggtgggagtattctttcattattcttaaaaattgggtgcatatatgctttagaaatacaatagatcgaatctataagatagtgtccaaaatgttattgtgtctatctaatcagactccgtcagttgaactgagtgttattatattctataacttagcattgctggcaaaagctatggatccaccagacccagatgtcgttgacgatgcattaaggatgctgttaagcatacaagcattgcggaaatcgcctaggggacgttacgagcccacattttatggacggttgcttgctagcttcccattgtcctttgatgcatctattctggtcgtcaagtttggtgaaatgggaatgctaagacaagggattctattaggtgtcctgatggataccctaccacttcctatccatcatccttttggagatgattcactggtatgtcctattggtgaatttatctacagttctacacgtctttttgatcatgatgttaatcatctacttcacctttgtcttcttttacagtttctagagtatgttgaccactattttggtggcagcaagaccatttctggtgggcggagggagatggtactcatggcaaacttttgtgcttttcagttttggcaacgtgtctttaaggtaataatatagtttcgccatattcccaagaaaaaccagcttctcttctcgaagatcttaccgatgtttctctccttgaaggataagcatcgtcttgagaactt

SEQ ID NO: 69908 - DNA, 2463 bp, Arabidopsis thaliana landsberg
gaaacaaaagagtgagagaaacaaaacccatcgaatattttcgaactagacaaagaacaagaaactctatcttgcaacatatttgctatatgatcttatctgtctgataagtaaaagagaatttttgctgtgaagctacaaaatataaagagtgggagactaaagtgtttttcactcagaaagaaagaaaaaaagtggacataagcatgtggtttagatggttataagaagaagatgcttgtctcttacgacttcttctcattcacacactttgaacttttcttaaattcagttatccattactaatcgcactctcattttcgtattaccctctaaaactataagaccacagtttctacactattctctcaaaagaaaaaaaatacgagatgattttccaaaaacaactcgaataaacacagcctcgaccctcgagaaagaacaagtgtggacaagaatattaaaacgttttatgatacttaacctaatcgaatcaattgaatatgaaaggaaagcttgaaagtttagtacaccattgtagcattcattgattcgaatcagaggatttgcaataaccatggaagaagaccaggtcaacttgaaaccgctctgtttcggttccaggcgcagtataacataacgtttcaagtgtttggacctaatggtagtaaaatacataatgaacaacgaaccgattggactacatgtgagtggtcagagaaattgaagcaggagtaatgacattggaggactgatacagtaaattaaccaatcagacatcagtaggacaacagactacatgaaaagtataagatgttcatcactcaaaagactttcatatacacacaaaggggaaacaccatccacatgagacaggacaagaacttattttgatgtgatcaaacccaattcaataaccaaatgaaccaaatctcatacttataattgatatatatgtcaagcaaaaaagcgggtaggaagatcaatgtgcgctaacgaggaaagggttttggcaaactccgcactcaatggtctctgatcctgagactggaacctggacctgcaatttaaatggcaatgctctcataaacgcatactatcaagagacactacaaacaagccaacttcaaattccaatctgcctcgagttatctatcaacttgctttaactatttattcagatgattaagcgacaatctccatgatccaatcttaatagaaaatcacatcgaccatatgtaactgtttaatactagaggtctcacgtaagacataaacatttctctagctattctatttcgtcaatgtagtttgcaagatgatcatacacactgacacaagtgattatgaggacctccctgttttccttattctagaaaaaattgggtcccaaaatcatacaacgaaagacatgctatcaaaggatctaacctgtaagtgcacagtgcatgttggacaagctacttctttcatccgcctcccagatccttccctcaaacctgttagaatcatagctatcattgtcagcaaccataaaataccagaaacaatatatcataaacataagtatattagatatgaaaaattaccagacgaagacttgcggtttctctccatttcctcctgtatcaaacatatccgccatcagaaaacaattatatactttgcccaagatattaactcaacttgtaaatcattaaacttaataaagaaccaaggacgattagctcacctgtaactttctagcaaggtcttcatggctctgcaggctcacattcctgccagtggtttccttggcattactcaacctttgtgacacttctgcctgcacatccagaaacagattgaacttagaggcatacgcataaaagacaagataccagttcaaattaacttaaagctacattctcaggaatcaacggaacatgatttctcaacttaaggaaaaataaacagacagataagcataccatgcaccggtcacaaacacggacttgaggagcattatcctcagcagtgagagcaatcctgccttgagtacacttgtcacagaagacgtcaccacaattcctgcagtggtgctagaaaataaaaaatccataaggtttgatagtcccaacatggccaaaaatttaattcagattgttagatcggggaaaataatacccttcgtataaatgcaccgaaatctgaaccacatgatgtgcacttagaaacagcttcatcaggtacctaaagccaaaaataacatggaatgagaacaacataccacagctaagcaagaaaataagaatcaagtgatgtaactaatcaccaaaactaccctagcccttttactttgactacaagagaaatgtgtttttcttccaaaaaaaaaaaacctacccaatgatctttctcctcattaacaggctttataatgttcatccaatcacccaatcctttattcttctcagcagtttg

SEQ ID NO: 69909 - DNA, 174 bp, Arabidopsis thaliana landsberg
tgtagctcctctaaacacgtttttcatttaattgtacgtttggaaataaatatgttacttaatttagaaatattgtgtataatattacctcctcttcgtaaaaaattattaagatttgctatgaaaaatactatttgttaagagactagcgaattcggatcctcccacgggatg

SEQ ID NO: 69910 - DNA, 379 bp, Arabidopsis thaliana landsberg
  unsure (1)..(379): unsure at all n locations
gaaagtaacaacagaaaacaccacaagcaggccaggcaaagaaacagagcaagagcgtgccgttgtggacaccaccagacacgaaacaggaagaggaaaaacccgaaccggagcccgcccagccgaaacaaaaaaagcgaaagaacagagcagaaaaaccccgcgaagaaaacagaaccaaagagcaaccaagcacccccagaagaaagcaaaaaacaccccagacagccaacggaagcaggccaggagaccccggccccccccaaaggcaaaagacaccaacagccaaggcccacaaggcacaagcgccacaaaagaggangcgcacaagagaaacaccccgggggaaacccaaccaccncaacacccacaaagagac

SEQ ID NO: 69911 - DNA, 268 bp, Arabidopsis thaliana landsberg
  unsure (1)..(268): unsure at all n locations
aagccacacaaccaaagcggaggccggagacccacggcaaacaccagcacagagaccagcaccacaaccaggaccaaggccacagcgcgcaacgacacaagagccaagcgcgacagcgagcccaaaggaccagaaacaagcagggaaaaaagggcacaccaagaaagaaaaagagacacganaacagaaaaggaaacacgcaacaggagcagagaaagaagaacccaaacaggggacaacacgaagcccagaaccaagacaaaagaaa

SEQ ID NO: 69912 - DNA, 606 bp, Arabidopsis thaliana landsberg
ggttattagtttaattcaatttcgaaaagtgaaccaccttatgattaaaaagagcgtaaggtattgttattataagtttgtgatgtgagcaatcaacttcctctcaccagccactactcgaccactggagtgggggcaaaagccaaaaagattaaaaaggcaaagtttaattagtaatatacgatctacgtgtttggacttatgctaatccatgtggcctgcagagattagtaataaataatggcaagggcttaaagttaatgctaatcggtcaattggttttggatcctcttctcgatactacgaaacggcgtcgttgtaacatcaaagcctacttgctaaaaacatccttccaaccatcattgtcttctgaccaaataacgagcatccaaccatcattgtcttctaagttctaaaccaaataacgagcatcgttttagcaagtttgctgcttctgaccttagaagaactgggccactatgcctcagcatgggccggatttagtacatctagctcttcattcaaaacgtaatgtgtatatcccaaaggatcaccatatccacacaacttaaccccaaaataaaaagaacctttgaaaagattaaa

SEQ ID NO: 69913 - DNA, 480 bp, Arabidopsis thaliana landsberg
  unsure (1)..(480): unsure at all n locations
agctgagttcctctctcagatactcgggattctaatcttatcctcactcattaggggagtgggggtttccatcatcatactcaaaagccattccataaaaagggctaaaaaagtatgagttttttcttccattcatgagttgnggggctaagagaaattctttcttttgtcttcaaggggcagacccagatacataatcttgggtttgtctcccggggggggaattcttgattgggtggtttcttgatactctgtacagaacctatattcttacataaaaaaaaaatagaggttttgttcagagtgtaaactaagggaaaaagaagaaagaaagaaacttccgagagagggcgtgtcgccctttcttggtacaggaatgggaatacacagaagaaaaaggagtaacaaagtttttcatatgggttttgtagccaaacattgtagggggggttgtagtgtattaccttctaatagggttgg

SEQ ID NO: 69914 - DNA, 154 bp, Arabidopsis thaliana landsberg
tcgcgtgttgttaagaaaccctataaaccgtcagtacctggtccctaacgcttgcatcattgtttcttgtaaatttcctcttttggactggttcttgagtcttgacttaatcaccaccacacaagccaaaaccctgtttatattctaacactaa

SEQ ID NO: 69915 - DNA, 614 bp, Arabidopsis thaliana landsberg
taagtcccgatagctctttcgctctcatatgggtggtcatcttcggtcatgtgttcataaggtgcgatgatgttgagtatgccaacagcagaagctcataactttcttccttgcgttataacgaatgattgtgaataccatcactgctcaagcgggacagttctatgtgtaaacagacaatgccattgtagtcgttcatcaactcatcaaacaaaactcgacaacttaaagaagatggactatgcgaagaagtgcaagtggacaaaagattgtgatccccgtatgagatttacatgtgtctccggttcttatatgtgttttgatggcctatgtacgtgtaccaattaatggcacgtgccatgaaaagatgcaatcacataaagcatttgtttaaattaaaaacaaaataatattcttctaattatcaatattaaaattaaaaatttaacaaaaagttaggacgaaaaaatgtaactatataaaacatttattcaaactgaaaataagtaaagataactacaaacagttgcaatgaaaagatatttatttagattgtcattattatataggttcccagcttcttgttttaactatatatgaataaagttacaaac

SEQ ID NO: 69916 - DNA, 630 bp, Arabidopsis thaliana landsberg
  unsure (1)..(630): unsure at all n locations
tttttctttttttacttcatatgtttaacagtttacatgatgtttttccgttttgtgtttggagattaggtttcatgtgtcctaagaattccacctcatcaatatccacatccacaactactattgtatattgcgaatattaaatacatatgatccaaactctatgtcaaaaaaaatgatccaagctctactaaagttatggtgttttcttttcccttgtcttgtacataccatttagtttcccacttactttcagataaagacccatataatattcaactgtgagaggatttaatagatttgttgaaagatttacatacatctttttctttaaaccatatctgacgtttttggaatcataattgacaatatggataaatatacccattttgtcaacaaagcaagtacttttctttttctttacccatttcaacatctttcagtcgtagaaaatctaacattttgaaaacaatgatttactgttaccgatntgacgaattcaactatcaaatacagttgttataggttaagacactttgagtctacaatcttcgtacgggcttttgtttactctaaaatttcttttaattcattgctcatcaacatttagactaggagaacttctaaaca

SEQ ID NO: 69917 - DNA, 541 bp, Arabidopsis thaliana landsberg
tcagaaggaagctggatgcttgtccccgtatatgaggttatagccatcattgtaaacttgagtgttgcttggccccaaggccagacacatcggaaacgtggagcgcataattgtctccaccaggacgcgcacctctgtcggccaactggaaaattccccaaggggggttgccgtccattccgtcccgcgtaacaattctaagttatgcattttttacctccacacgaagccactcatgtacggtactgaattcctgtgaccattgcctataggcaactcgtttctcttttttgccaaatcgaagaatgagataaatcgactaaaatcacattatactaatttatacatgctgctaacctctcattgcgtaaaatgcggcaccctcatccgacacatgctgaggatgccgaaggtatgaacaaaaactatctgtggaaggccgtgtctggagcagaacgccgatcatacgaaaggtttaagtgcaacgcagttgtccacctcgtttatcgccgcgtaagccaaaagatgagccagtccagtc

SEQ ID NO: 69918 - DNA, 2233 bp, Arabidopsis thaliana landsberg
ttctctaatattgctaacttggagatcttatatatatgtatcaggtgcaacgttctctagatgtgatgcttttaattcattgataaagtggaagacggggagtgagtcttttgttattgttaatgcaacatctgagatgatgatgttggacgaactaagaagcatggactccagccctccttgttcacgggcttctatatatactgcatctcctggccgcacagtattacaagcaactctggcaaaagagttccattattttgataagtctttgagtgaatcaatagatttgaaagcaactttaactatcggggcctatctgccactttctgtcagacaagatagtgacgggaatcatcatggtggatattggtttgataaggcacaagaggaaactgattttggtgttagtaagctatatcttgtacctggtacatatgttgacgttatgcttctgggtggacctgaaaggtgggatgacaatgttgagttcaccgagactgtgaagacattatatgaagatgaggaggatcttacaagcagagttaacgtccatcatgaggttgaccgccgtgctaacatgtatagaatttcatgccagaagcttggctcctatgtaagttgcaggcattctatgcgattattttgtatatgccggcattactttttatatctaaagtgaaatgacactgtcacctcttccctgcttgtgctcatccagaaactggtcttcttgcgtgggaatctgctgggtatagaccatcctgtacctgcagttgcagaagctttattgtctgttcattgcagcttaccatcctctgttgtgctcattgttgatgaacctggtatgttgaatatttccaattccataggttggatctttcaggagttcctctagaggttatttaccttagtggttaaggtatgccatgatttgctcatgacatgaggtatacatgtcattttgcagttaacaagcttgatgtgattagagctgctagtcaagctgacagggcaccaggacgacttcgtgtaactcctgtgactgtggcaaatgggcaaataattcgtgtggctgctgttggtattagcgagtttggagaagctttttcaaactcctcaactctttctctcaggtgggaattgaccagttgcaacaatttggcatactgggacgatgattataactcaaaaatgacaaagtctggctgggagagatttctggctctacgcaatgaatcaggattggtaaatatattaaccaattccctcctcattatttcattcttccgacgttaaattatttatcattttctatataccatatactgttttgacagtgcactgttcgagccaccgtttctggtattgattattctttcaaaagccaatactcaactctgcttccacaaggttctgaaagtactctcactgatgctgtacgcttacaggtatgcatcttggtatactaatagtaatagcttgattcattactcccacatttccttatcatctacgcttaaggatcaaattagactttccttcagttaactgaattaccttgttactatttcagatacaactgtagttgtttcttatttctgtaaatcggttgaatatgcagttggtttccacactaagagtcacaccagagttcaacctggtctttttcaatcctaatgccaaggtaaatcctactcattagcaagcgtttcacttaaaaaattggtaaacaatagattgatagtttgatgtatacttggaagcatggatgggttgcaatgagtatttgcatttccccgttttttttttttttttttttttgtgtctctggttctacatgatttgagagcaccataactaggtctgtagtactaattcaatagttttccacccgaaggtaaacttgtcaatgactggagggagctgtttgtgggaagcagttgtgaataattctcgtgtagcagaagttattcgacccccatctggcctgcaatgctcacgaatgatgctatctccaaaagggttggggactacaatcgtgacagtatacgacattggagtttctcctccactttcagctcttgcgatggtaagtatgtgctctacacatgataatttgattccgtagacatgtggcacctcattgatttgttaatgtcgatgcacatgactatgacttctaacataagtgggggggggacagtttatgtagatcagtgttgggtgtccc

SEQ ID NO: 69919 - DNA, 607 bp, Arabidopsis thaliana landsberg
ccattagctgttgctggaaagcaggctccacgggtggggaatgttggtcatatctcaagaatcttaaacatgcttgttcagctgtcaactaacagtaaccagataaagactttacttgaggttcgtttttcagtaacagtaaccttttattgtaacaatgattgcagatttactgttatctgcagtataccatctttctacataaattgatttgagttgtgattattggtgtttgtcaatatctactctattgtatcactctgttatgtactcgttggagtaaaaacagcgtaaattactttgtattctctttacagaacccatcaagatgtgtccataatgaaatatactatgtctaactaattttctttctaatatttacgcatggttttacgtcaaatgttgtgtacgtgtatagctgcattatgtttggtacatacaacattgtgatacgttctgtttttctttgttaggaaaataacgattggggtgagtgggaagctaataccttgcctgatcgatatgcactttagaatgagtatagctggttttgcgggtacacctcttatcaaacatttttggcttgttgtgacactattgatgcaac

SEQ ID NO: 69920 - DNA, 174 bp, Arabidopsis thaliana landsberg
aatgatgaacactctctgttgcaactgatgaattggtatggcttacaaatttcttcaaggagttgcaggttccactgagtaagcctactcttctcttctgtgacagtgacgctgccagtcacatagccaacaatactgccttacatgagctgcacagatagcactattagtaat

SEQ ID NO: 69921 - DNA, 2585 bp, Arabidopsis thaliana landsberg
gaatctgatgcgtgaggtcaagatgtggaaccatgtgaccggattgtggaaacggtatcaccagaacgtgcggcttcttcgttgttgttgttgtcatgattgatgtttttttctttctttctggttttggagtggagaaaaattgaaaagtggaactccttttatttttagttttactgccgacaatggaactcttatttataaaacagatgcagcatatatatctctattaaaaaaaaggaccaaaaccccaaacaaatatagaccagtcgataaagccatacctacttcgacgtaattgctacgtggtggtttggtttggtgccttattaaaataaggttggacagagccggcccattccctaaacaaaagaaggtaggtggtgctttagctcgaaattcaaaataaaaactaattagacaacaatttgagaatgtacgtctttgtagatactagtcactagatatcctctaatttttccgttagaaatattttttaaatagatgtgatttcatgatttttaatatatattatacattttggatgcgatttgctaaaggaggccaaatggagaacatgcatgattgaggtaatgatgttgttaacttaagagcagtgtgtcaccaaatgaagagggagagatatgtctttattgtgtagcaactctttttcataaaaaaaatcaataccgcaacattataacatgtgctaaattcgaaatgatgacgtcatattgattaaaaacaaaataaaaacttcgttacaagaagacggccttacccttagccctagtgaaatcaaatgataggttggtttaattcgggttgatgataccagtttaaataacccggttctaataattaaaccagatagattattcttcttccgggtctctctctttcatttgacatttcgctcgctgggttcttcaccgctctcaagctctcctctgggtctttctttgaatcgtgaaaggtatcgtttttaaatctctctaaacttgtctgattctttctctggatccgtttccgtctcaaaatttgtcaagggaactacattgactattcgatttgcttaacacaagcagttctcattttagagttaacgaaagtagcaatcggttttcgattttgtaaactttaatcgccagttacagttactgaaactatgtactgagagatttagggttcggtttctaatcaagggttttgaacagctgggttttgtaattttgtttctcgtttatctgaaatccgagttcttgaggctctatgtgttgggattagactcttacgagattgttataattgggcttcgattatttttgtgatgtaaattctggtgggagatgtttaagcaatctctaaacccttttttctgcagttatatcttataatcagtttctgcttactgcagtttgatctctagtaaaccattttttctcactattttgtatcaatgagggaaccaccaaataatccccatctattgattgaatgattcttcttgtttagtttagattcgtcacaaagaaacaaaaccttgataattggtctaggtttctgatcactggttagccaaactgtagtctggttttagtttgtcactctgctaaaaaaagttggaatgaaatttgtgatgctaggaaatgggaagagagaagagccctggcttgaagatcctctgggtatggactatcggcactgctgctagtatgattctctttctgtcattctttgaatttgtgcctgtatatatatatatatataccggtttatgtactctatagagattgaaatcatgattcatgagatcatatgtatgtgttgtactgaccagtcttgtactcgtcttgcagtattggtgacaagtgttgtccgcacaagaatgcaggatatgcaaacaatgatgaaccagaaccaggaacaagcaccgaaagaaaaccagaacggaggtgcaggtgattcttccgtcttaatggatgaaacagttttgcctgagtcggatcgagagattgcagaaaagctttaaagaaagaagagcctggttctattgttgtcttccttttcttctcttcctttttcagctctccatgaaggtgatgaaacatgttttaatggttttggtaatagtttccgaatatgagtagatgatgctagtctctagatgtttctaggaaaataaaacttgaaaagtgaattgctcaggaagcttgatgaggagtgtttagcagttttttcgtctgtgaatattttcccttgcaaggatgatatatgataaagaagctaagctatattttattttctcttcttatgttctatgttaatcaaggctaccaaaaggcatgcaaatttatttagttcggtctgtgttactatatgacttataatcatttttttgtggtaaacaatttttttttttgagacatgaattttaggtcaaaaaagtgagtgagagaatagatttaagagtgctttgttcttatccactatatatccaaagtttgaaattccatgatcaaccatgtagaaatgttgaattgaacctaaaagctgtatcactacaatttttgtttttggtagga

SEQ ID NO: 69922 - DNA, 335 bp, Arabidopsis thaliana landsberg
tcaatcttggaatctttaaactaggaaagtcatttgtctttttatggaaaataggcaagtcgtttcttttttatatcaatacgcctcattttactcaaaggtaaaagattaaaaaaacatcctatcttctagctttatcgtaatattttttttttttctatacatatttttaatacattcaggcacacccatcaagtatagttttcttctgtataaataaaaatgtaatggcaaacacgatgatatttattggaaaaaaaaagttcgacaaactgaaatgtggacattgctctattgtctatatgtaacaacaaaaaaacttggattttcaactt

SEQ ID NO: 69923 - DNA, 3513 bp, Arabidopsis thaliana landsberg
gattcacactatttcattccttaacttttggattgaaattataagactaactatttattagaacacaaaacacattagtaaaatcaccttaagaaacaaaaaaaaaaacatgatatcacaaatttgtatatgtacattgttttccttgtccaacacatcaaagcctttaagcttttcaagttagtcccaataaaagaccatttacagaaactactaacaagagctcttccttgttttcttctttgcatgcaacttcacaaaatctaaactattcagttattcactcttgaaacttcacaaaatctacagacactattaaacctctaaattcacagagatgttcttgcctgtctttcccctctcaaggcaatgaaaacaaagtgtcatattccatatcagctatgtcgaacaacccatcatcgtcctctccaactaatgtctctgtttttccaagctcagcctgcaaatattcaagcatcttcattattatcatataacttgtgacaagaaacactaagagcaagtccactatgatgatttataactttgattcatctcttgtaaactactaacctttgtctgacaatatctcttgagcactcggtggtattgctggcgagcctctggagagttagacatcgatagaacacgagagaaagcctcgttcactgcaacatctactttctgtttgcggaacaccttgagaatgtcttcgtcttcactgtcctctgtactctctacgtcttgtctgaaccctcttagtccaactccttttcttctccacctgagtacaaccttatctaaaattcttactgcccaacagattactttgtaatttttccttatttggtaacctcgcacatgagcctgccagaattagaagagaataaagagctgcacgagaagccaaaggctaatgggaaacaactatgttcatctcactaaagctgttaaaatacctgaatctttacaactttctggcgaagctctagaaaacatttacgatctttatagccacgaaaattcttctgaatagataaagctgctgaattgtagttcctgccctttccaaacgttagctttgacatggccgagatcccttctatatcttcacaatacatcccatactcttgtaagcaagcaaccaaagctgcttctctttgttttcgctttctgaatgaatgtgcgcgaaaagctgcttggattcttgcagctgcttgagctgcatttcgtactgcagccagtgtgtctttcaatgacacttgatcctcgttaccggaaggactttgttctgagatggaattcaaagttttctcagtttgcacttgagcagtgtcttttgaattctcggtttcttcaagtgtgagcgatgagagatggtttgttaacgccacctctgacagataacctgcaagacccttgtggccattagaggcagctattgaagctgcagttttgccatttggatcttgccgacttggatcagtcactgctccagccgatgcccctgaagctataagggcagccaccattttttcactgccacagcagagaacacagtattggttattttgattcatttgaagctattgtctaagaaagattccatcttaaactcctttttacaggtgaccaagtgataacattcttttacttatgaaattatgatgctaaaacatcaagacactattttctactcgaatcaacaaagttgaaatgagactgttagtctactctttatcggctactcaccttccaaattgtgcagcccaatgaagagcgctccatcccttaatatcacgaaaatctacattgactccatgagcaaggattggataaaatgcccactcgaagccaaggcctgcaaccatatggataataccttgttcctgctttgacaaagaacacgttatgtaatcttcatcacatgatcttgaagacagccatgtatccagcttgtctttaagcagttcctgtagaagccaatcaactgtacttgttgatgatgcactgccatctatgatcgttcctatgacatgtctccattgatcatcatcagctttcagtttcgtcaacagcttatcattgccagactctaagttactttttctttccgacgatcggtctgatagaagtgtttgcacaaaccttacaagtaatataagctcatttggacttgtggacatatcagaggtctgtggctcactgcatttagggcaacatgtgtcaggcttctcacgatactcaaattcccttatttcactacacaagagtccatctccagaagtaatgcataaattgacttttccaggaccacattgaggggcttcacaccgtataaacccttctttaatgatctcaaaaggaacttgagcattcccaaacatgcaagaccatgtagattctgttggatcacaaagaaatgatccaatgattatcacctgcattgtcaaaatgaaatttcaaaacggaaaaatctaactgatcagtgatcaccaacatttgttctaaccaggcaagaagatacccatgagagaacatttatgcacttccacataagtctcaacgaaatattacggatggtgtaagtgtaagagattagacctttgtagtttcattcgcgtaaccccagtctggtgatatgtcctggatagtaaacttttgattatgagcacctgtaactctcatttcttgctcgaaaggcagaccgattttcattccgtcctccatcattccacagtattcaccattattctcaggagctaccagtgcagaataagaagcaggaagttggaaagaaccaagatcttgaggcaacaaaaatgtagctgaaatttaagacaacaggaactttttatcagaccgctgttatactatatacgaagcccaaaagtattctttagcaaagcagataacatacattggtcaacctgattgctgtaactccaatttgagtcttcctgcaatccagctagcaatccttttgcagaacttggtgtgcttccctgcttccacgaaaagtaaataaatttctagattggaaaattgttacttattagtttggaaaatctactcttaaactactattagagattagaaaatcataacacatatggttcgttcaccgtgttcctctgtatgaagtaactgttaggattctttctgttcatagtttatagatacaagatagtcatccgtgtttgattccacaaagtatatgagagagttacctcagagttaagaggtatagaagcctcacatgcctccaacacatctttccaagattcagacccttgatctccactccctcctgtaccacctgtaaacagattgcttcttactcttcctaaaaactatataccattcttcatttccacgcatacacgagacaagcaagactacaagggcatactaaagctacttcatatagatgaataaattacagatcgtccataaagtttgctacagtcaatgaatgaccattgaaaccttctcagacagactagtaaactc

SEQ ID NO: 69924 - DNA, 541 bp, Arabidopsis thaliana landsberg
  unsure (1)..(541): unsure at all n locations
atactccgtatcgctcttgcggccaaaaccctcgacacgcatttacaattcggcgggcattttagtttatattccatcgcacagtgacgctcccctttattgatattnnnnnnnnnnnnnnnnnnnnaacccgatcctgccgggatttcatcccgacccctgtattatcaggcatgacggctggtattatattgccacctcaaccttcgaatggtggccgggggtgcagatcaaccgctcccgcgatctcgccaactgggaaatctccggttatgcgctcacgcgcaccagccagatagaccttcggggcgtgccggattcgggcggtgtctgggcccccgccctcagccatcacgacggcctgttctggctggtttactccgacatgaaggcctttgccgggccgaccaaggatgtgcgcaactatctcgtgaccgccccggtcatcgacggaccgtggtccgaacgcacttatctcaacagcagcggattcgacccctcgctcttccacgacgacgacggccggcaatggctcgtcatc

SEQ ID NO: 69925 - DNA, 618 bp, Arabidopsis thaliana landsberg
  unsure (1)..(618): unsure at all n locations
ctatgtaaatactcatttccaggcaactatgatttatggagttatctaaaaaactcttatttcagttgtttagagaaagtaaatttaatcacgccatatcgatttttaaatgacattttgcactcaaattataacttgtttctattgttttcctactccgtcaaataaaatgtatacactaaaaacctaaacgacaattataaccaacttgtgataactcattgttagaaaaatcaatcctgaattgagaaggatttgaattttctattacaattccaatcatagttgatcattgatatctcaaatgacaagaatatccgacttttcacatgtttgaagataaatatacatgatggactttgttcaagaccacatgataattataatagaagttgaccttattgacccttataaataagctatatatgtaaacatatacatgtgagattggtaaacatgtgaatgttggtgggtgaaatgctaatatgcttgaatggcataatccttgcatatgaaaaaactaaaagcaaaccaattatcaggctgtaattgggtccacacttttggctctccacaattattgccaagtcttatatctttngtatatataacagtttc

SEQ ID NO: 69926 - DNA, 333 bp, Arabidopsis thaliana landsberg
gaggagattgaagatatcaaggacgacgaagaagaagaagaaagggacctggagtcttgacgatacggtgctggttcgatttggtggcgtagctgtgtcgcgaccggtaaacaagacgctgcaccattttcgcctacttttctcttttagggttttcggttggaacgaataatatcagggtgagactccaaacctaaactaagactacaactatatgggccttgtctgattttggactttaattatgctccaggtaaaggcccatgttcaaataattaaaaaaaattcacttgtaaaaaccaattctattattagctgcacttagaataagtg

SEQ ID NO: 69927 - DNA, 332 bp, Arabidopsis thaliana landsberg
tatttcatattatatattacaataatataactttaacatattgatatataaacaaagtattatcatatttcttatctataaccatatagagttttagagatttttaaatgtataggattttggctattctaactgtgtctagttatatagcttcctaactatatcaaatttaggttgttcctaattgtatcgaattaaatatttaaaacagtaaaaaaagactttacaaaaatttatttatgcttatttatggtttacttagtaaatgttttcatttaaatcttgaacctatttgcaaacacttctcggtttttgtccgatctatgtcacga

SEQ ID NO: 69928 - DNA, 600 bp, Arabidopsis thaliana landsberg
ctgacaattgcacataagttgatgattctctcgatccaagggccatgagcttctttcctgcgtaaactcctagctcacatttcccatggttcttacatgcgcttaatagtatccgccaaaggcataaaccgtgatcaatattagctgattcgatgaactcttttgcctctttgagctgtcctgcacggctcagcagatcaaccatacaagcatagtggtcaacttttggatcaagcccgatctgatctgacatcatattgaaataaaaccagcctctctctacaaaacctttgtggctacacgctgatataatgttcacgaaagtgacatcatctggttccattccttctgctaacatctcctcaaacagttccaaagcctcatctccttgtccattatgggacaagcctgagatcatagcgttccaagacacaacatctttattgggagttcttctaaagacgaggttcccatcttctaaactcccacactttgagtacattgtagaaagtgcgcttcctattggaacttcaagcccaaacccatgcttgattgtgtggccgtgtacttgctttccgagctccaggtagctagagaaga

SEQ ID NO: 69929 - DNA, 325 bp, Arabidopsis thaliana landsberg
  unsure (1)..(325): unsure at all n locations
agccaacacgagagagggagacaccgagagngaagcgacccgccaccgccacaacgacagccccagcgacaaaggcaccgaaggcgccgacggcaagacccggaccagctaacccccgcgagaagaaaccggccgaggcgaccgcagccgcgcccgcgcaagggaagccacagaccccgagacccgcaaaaaagaaaaacaagaaagaaaacagaaacggaacccgcccctaggaaaagagaagacagccaagggcgccgcaaccaccagaggnaagaccagcgacgcagagaccccgaagcacgccaggaaccgcggaggagga

SEQ ID NO: 69930 - DNA, 648 bp, Arabidopsis thaliana landsberg
aagttagtacaatgacagaccggtcatgttattcgtcatgtacgagtagtaatccccaattcacagcattctcttttcaaaggaagtatacagtcaactattgactgactaccatgacacacatatatatgaagtatgaactatgaacactgtaagatatgtgcttccaggtcgtttttttcaatagatatgttgttttgttactatgctgaacaactaaacaagaccaaagagagtgtgcacttacaatggaagcataactcatctttgatttttcaccaactggttcctctactggtgcagcccgatgttcatgtaccacatcaactgcaacttcttccctaggtgtttcctcaatcgcaacttcatcttcatagtcttcatgctgaggttgatgttggtcctcttgcagactgtacttatcaacaagatcatctttgatttggactgcgttcacataatcgcttgcctcttcctccagcacatagtcagaaactgaaaagtcaaaaccagtgatatcaattttaagttttaacaaattcatcacactgaatcagtcgaaacaaaacatgacaaagttgacaaacaaaccttggggttctggatgacgggtacaagtgatcctggtggagctcaagatcgacctgc

SEQ ID NO: 69931 - DNA, 2130 bp, Arabidopsis thaliana landsberg
ctcattctaaacctttattgggttcaaagttttatgtgcttcaaaaatcaaacgtataaattgattgcttaaatgaattttctctcgtaccatgcgaataaccatgatccggtcttgtcatttgtacctaactttagtattgtctcatttgagatatagaaaattatctttttaattggagatgtgctgattctctttttctcagttaaaagttgcaaaggaagcagcaactgtacctgtagctgctacacaaccatcatatcacaagagctctcaagatattaatgagtgggatcaaccaatgcggactccttcccctcaggctcgtgcgcctcttgcccctattcagcaatcaaactcatccacatatgtttccgactatggagcagaggcagaagatggctccggttttgaagactgtaagtttcttggaccattaaaagttttgaaatttctcatatgctcaaactcgcactaggatatgctatttggagttatttgtcatatattcatttctttctggtatgccttgtttcagttgagttcaaatcagtgtacgttaggaatttgccttccgacatatctgcttctgaaatagaggaagagtttaagaacttcggtacaatcaagcctgatggtgtgttcctcagaacccgcaaggtaaataatcttcatttcgtgtttttttttaatccttttctctatgtttatcttaattgatatgaagagccaaaactaacaatcttatgcaactaaacatgtaggatgttatgggcgtatgttatgcatttgttgagtttgaggacatgacttccgttgagaatgcgattaaggtctagattctattccacagttacctcactagattaattttcatcttctgttcccctttcgctttgttcttatcattttccgtttgtgtaacaataatatataggcttctcctatatacttgggtggaaggcaagtatacattgaggaacgaagaccaaatcccgctggtgttcgcggagcaagtaagtcttcttttgaaaccgtgctctatgaccaacaaattttgtatcataaaacttcttaagagcgtcttgtgaaagcctcataagaaagaaagtgtacaacatgtaactcattctgactttgatgtgtattgacttggtcaggaagaggaggaggacgtggaaggggtggttacccaacagaagcaccaagaggccggtttggtgggcgtgggtctggcagaggaaaccaggatggaggtgactacaggccaagaggaaatggttactaccgcggtggtggtcgctaaaagaaaaaagaatctcgtcaaagttttagtgctaccaaagaatgaaatgattcagttcttcttcctttatctacggaagaagtagtttgtaatttctattttgttgggtttggtttttggctcaaagaaacaaagattttggcttatatatgtttttctttaaatttgttatagatttagccatttagagcttttgactgttatctccctttgggaatggtttagttttggtataacatttcaatttttggtttccttactggattgaattccaaacttcatcaatgtgcttctgttcctttgtctccgagctttatgtactgctctgagacatcagcttttatggggcgacagaacatattttcactctgttttttttatgaaaaagaaattgaagaattattatcagaaaaatcgaaatatctcgaagattaaagaattgggacccaacaaggtttttgatatatgtcggtgtttgattgtaatggtttcgcgaagcatcgtatgaatctttcagagagacagagggaatgtttggatgcaaatgtctgtattggaacaatctcaaagaatttccgccattgaaggaacctgaaaccttctctctccctgcttctcttccccagtggccttcaggtaaaaattacataattccaattgttcatcatttcaattttaccttttcagatcggaattcgaattttcccccaaagtttctggatttaactctttagtttcgatgtgatttgatccaatccatggacaagtcttaggatttcagattccgttggatttatgttagctgagtacaaaggtttttgatg

SEQ ID NO: 69932 - DNA, 771 bp, Arabidopsis thaliana landsberg
aaaatcttacctagaatatattttaccactaggaaactgcacttgaggacagtcccaagccagagaaaatgtgacaatgcgtgactctcccggtaggactgttacagaggctgctactgctgctccaatggatgacccgtgatctgactgcattgacgcctcagaagcctttaagtgatcgaaagaaccattctgttacaaatacaagggcggatatcaaatctcacggtgaagaataataaaattatatccaagacctcttaacaaatggaaggaaatatcgaacctctttgatagcctgccacatatcttttgctgtgattccatcctgctttccagacactatgaaaaatgggcaagctgagacactaacaccatcggtggcctgagctgaaattgcatatgacaatcatggtaatccgtttgctgttctgtattagaaaaaaatagattaacaaagttggaacaatcagagtctgatacttagcaaccacaaaagattagtttcttgtcctagtttggtgctttacgcaaagaatatggaagaacttacttatgatgtaagagcacaccctgaactccatcattcatcctattatagtcatcaacatcacaaaaataaagaactttaagaaacatgcgagttcatatagtaaagccacaaattcttggagtagagaattataagtatttaatgtatacgttatcttggagttgtagtggccacctgagaactcagagtcttctccaacatgattcttgaccaaaaaa

SEQ ID NO: 69933 - DNA, 423 bp, Arabidopsis thaliana landsberg
ggcccctcgctcggttctcattcagcgcccgtacttccactactcaaccgagccatatcgaaagggctcaagatcgctttttgcagcctgcatcgatcgaccccggctgcacgaacgatggggtccgcctccgcctcagtgatgacgaccagcctgctggcgctggcgctggcagcgctggctttcgtctccagggccgcggcgcagggcaacggctgttccagcgtgatgatgaccctggccccgtgcatggacttcatctccagcaaggcgtcggagccggggatctcctgctgctcggtgctggctggagtcgtgcagaccgacccccgtgcctctggatggtccggacggcaccgccacgtccttcggcatcggcatcaaccagaccagggcactggaactcccccgcgtctgcaaggt

SEQ ID NO: 69934 - DNA, 578 bp, Arabidopsis thaliana landsberg
  unsure (1)..(578): unsure at all n locations
ttgaatcaatatcaggagtcaaaactgcatgcttgtacacatcttcaacctgacaacagttcttctgctctgtgttaaccaccatcacatcttgtgcaaactcgctcttcaaccctgggcttacctacaacatcccatcacaaatccgagttagacttttactacgattaaaatggtttcactttttctgtatccgaaccaaacccgtaaaaccaaaaacatggattgaacacccctactagatattagctagtattatgcccggtaaaaaccatattgcaggatctatggtcatagaatacttagtaaacggaaaaagaatcactcacatcataaagcacttccccaagtttcatcttgacagcaccacttttgtagactaacagtttgcccatgtaaccttctggcaaggcttttaaatcaacagtcttcttctcaacggggcctttgatatttggccttgtttcaaggttttctggtggtgttgatgccaaaggaacagaaggtagcctcataaaatacattttctgttctccactatcctncttgccacangtgatccacattatgtaactata

SEQ ID NO: 69935 - DNA, 796 bp, Arabidopsis thaliana landsberg
gaacgcgccctttaaaataccaactaacacaaaaaacttgtgtgcctcagacgctgtctgtatatatgcccacctgcgcgcgtatcaggagcggcctctgcatccagaaccgtgtgacgatccgcctgatcgtcgagggcgcgtcggtgccggtgctcgtcgatgccggcgtcagcaccgcgagcgatgcggcggtcgcgatggaactcggctgctacggggtgctgatgaacaccgcgatcgtctaggcgaaggaccccattacgctggagcgcgcgatgaaactcgcggtcgaggcggggcgcgacgcctatctgtcgggccgcatgggacagcggcgctatgccgatccggcgagcccgatgatgggattgatctgacgcccatatcatccgccgggcgcgctgctatggtgtcggcatggccgactccgccgagctgacccggcatttgtgggatcttgccgaacggcatccgacgatccgctgcctgctggaccgctggcacgcgatcgacctgcccgatgcccgattgtcgggaagccttatcgcgcaggcgcactggaacgaggtgttcgggttcgacgcgcatcatgggatcgatgatgccgacatcgtctatttcgatggcggcgacctgtcgcaggagaccgagcttgccgccgagcgccggatcgccgcgctgttcgccgacctgccggtgcgtgtctatgtgaagaaccagtcgcgggtccacctctggtatcgcgcccagttcggctatgcgatcgaaccctatcgctcaatcgcgggcgcca

SEQ ID NO: 69936 - DNA, 326 bp, Arabidopsis thaliana landsberg
  unsure (1)..(326): unsure at all n locations
acgccaagaaggacaccaaagcccccactgggaataccaacccggccccacgcccgccggcgaagccaancagacgaacccgggccgcccacaacccgagacacaagaacaccaaccgccccgcggcaccacccacgaacggaggcccaaacaaccgacgcacgcccacgggcgcgcaacacaacggcgagcgacaagcccggccacacaacgccacagagggagacacaccaagacgagccagaaaacaataaacggacgcaaaccccaccaaccacagaaancccccccagagacccccccaagccaagacgcaagcccacaac

SEQ ID NO: 69937 - DNA, 748 bp, Arabidopsis thaliana landsberg
taataaatttggttgaatttagcgtcatttttttttgagcaaatgtagctttttttttttgtcgaaagcaaatgtagctaagttgttgaatttgctaactactgaaacttttcaaaataaattacgaaaactataattgtatatctttattggggcaaaactatagataattaagttaattcttttaatccattttcatgccctactattttttcgtaaatatttcagaattttgtaacattgaccttcgatgtaattttgctttctacaatatctttttaatgtcaagcaatcttcttttcctttttttttttttttttgattggttaaaaggtttgctttctacaatatgtttcttgttgacatgaatgtgaatttcattaagaattgaagagggtttgtcaataattacaaaatactttaacaagtcagaaggcattacgaccatgctaaggataaggccacatttgtttttttttttggacagcggataaggccacatttatttctgccacttaaaaaaaaaacaattctgttatattttaaattcattattaacaaacaaaaaatgttacatctaaattaattctcaacggtcgttatcggaaatagctttgctaaaagaacacatcaaacatgtgggcacgtgtgaaaaaatctcaagaagaaaacgatagcaaatccacgaaacgattgtgtcaatgtacagtcttaggttactaaaacttgaaagaagacctaaaccatt

SEQ ID NO: 69938 - DNA, 447 bp, Arabidopsis thaliana landsberg
  unsure (1)..(447): unsure at all n locations
aacggccaacggaagcgcaccaaccgcgaggaccgcgaccggccctccaccctccgacgcgaaaagccagaaccagaaacggcgccggcccgacgccggcgccgccgccgcgcccaccacgagccacagcgcccaccncgcacggcagagaaccaagccgcgcaacacaaagcagcggggaccgcaaggcccccgccgagagaccggcggcgaaaacccaacaanaaggcaggaaaccgccaanggcggcccggaccgcccccaaccagcccgagccagcaagcgagcacgacggggcgcgcaccgcagcagaggcagcagacgccgggagcacccacgacgcgcaagcgaaggccgcccagcgccaaaccaaaagacgacncncgcgcggaaaccaccggcgcggggcacacccaacgaacgaggaaaccgcccaaccccgggaag

SEQ ID NO: 69939 - DNA, 2229 bp, Arabidopsis thaliana landsberg
tatgagtaagaaataaagattggttttatagttacgaacttgtctatagaactctctaggtaagatagaataaacacaaaattattgttatcagtaagaatgaatcagcctaaaaaaataaaaatatgtatgtatacttttcgataactttaaagtacaagttctcacaatcagtggttaatggaatcgtcttaaaagtaataatctttcgagagacgtataagatatggtgatatcgccaagaagaaataaagatggaagacgacagccggagaaaattatattattggtcgtttacctttttttctttgttctttttggatacgtaaatcaaaaaatgcaacgtgtgtttgtttttttccaagtcaataatcgcaataatttcgatttctaccacccgcccacgtggctactctgattgatcaaggacgaaaataataaatactattttgttacacctctagattttgtacttcataaatttcaaattcgtagatacatattattgctgttgcattgttatcgaaactcaaattcagtaaatgtgtgtaaattgagatgtgtgatcatgtttaaacataacatttctattctctagtctattttactctcttttttggttcaacctctagtctatatatacttaaaagactaaaccatatgtttgactagttactaatcattttcatctaaaaactttgttttactgattaagataaaataatcgatttaatattttgataatgtataatcgaattttattttaatcgaaacgcgtacattagtacaaactagatctcacccagcaacttcccaaaaatcactctctaattaaagataagttgagagtcgtggaaatttccattcttgtttgtttgtttcacaagactgttgagttgtttgagaaatcaaccctccaaaattagaaaaattgtaaaaccactaaaagctttcatcattcacaatacaaaattctgtttcttttcattgttcattgattcttctccgaggttgcagagccaaacaaaagaaaaacaacacaatcgtcttggttgtgggtgttttgtgacaaagaagacatgagataattcatgagtattatattttccttgtgaagcaggttattcaggtttcttgggaagcaagattctaacatgtctgcaagaagagttagaaggacctcagaggactatggcagtatcacggcgatcgccattgataaggacaagaacagccaacacgccttgaaatgggccgttgaaaatattgttaatgatgctccacaatgtgtccttctccacgttcaacgtaagcatctctcgctcttctcttcatcattggaaccaaaacgtcaaagagccaccctaattaggagtatgtttcgcagtaggaaacacaggaggacattttcatcaggacaatccggacgaggcacatgaattctttcttcctttcagagaattctgcgcgcgaaaagaagttagtaatcgatcatttccgatctccttgcaacaacatatcacacttacaattcatcaaatatgatcatgacatttttgtatatacacgctttttagatcatagcaaaggaggttattcttcatgatattgacatctccaatgctattgtcaactacatcaccaacaattattacattgcaaatcttgttgttggcgcatctgcacgcaattccttcatcaagtctctctcctcttctctgtttcatgcttggtatcatctcaactttggttatacaaaatgctaacattcaatttttctttgtgatcagaaagtttcagagtccagatgtaccaaccactctgcttaagacgactccagagacttgtgccgtctttgttgtgaccaaaggtaagcttttaaaaagcagatccgcgagtcaccgtcataaactttccagacaacaaaatctctcgtctttgttgtacaactcaacaaactccattgactctgacaggtaatctcaactctcttctaaccattggccatggttttcttttcaacaggatttagtgaagtatgccttttcattttgtttacattttttacagcgcatcaatatcatcacctgtatctacacaaaccaacaaaccaaattcagattttttccaacctaattcacctcgcatctcaaccccgcaatctatgagtgaaatctctcaaacagagactgacaatggaagttgtgatatggtatcaactgtgaggtc

SEQ ID NO: 69940 - DNA, 691 bp, Arabidopsis thaliana landsberg
ttgaattttcgaaatattaagaaatatgcatttcactcaaatatgtgagttggccaagaacaaatctcctatttgatttaatgttaaagttcaaatgagggatcgattttggctagacttagacggtaatcaaagaattacaaaaatgtttatatattgactattgtttctggtaaaaacttagttaatattcataaaatatgaaaaaaaagaaaattttaaatcatctaatcacttccacttcagtaaattatttattattttctcctaaaaatgataatggtataaaacttgtacaatcacttatttttgtttcgtattgctaagttttaccttcttactaattttaccctctcagaaaaccgttgtcccaaaactggtacataattttcctcaataatacatgtcacaccaatcaatatctctacaatagtttttccaattatttcgtattgacatatcatagcgtgaaagtttgtaacatatgtttctcacttgtattaatttgctcaatcaaatacataattccggccgtgagagttctttatgtgtttatacacgcacatttataaaccagaactagatcgcgtcatatgtttttaagtacaaggttatcttagcaaataattacattgacatcatcagatcgtacataataaaggtaaggggttttttatttctttctttcttt

SEQ ID NO: 69941 - DNA, 577 bp, Arabidopsis thaliana landsberg
ctgcaactatctgcgatattttcaatataaatcacatttctacacaaaacacatcgacctttcatatctctatcaaaatcaaaacatctcacgatctgtttgttatccagccgtatgtgtgtgtatttgtatgtatgtgagtatgcgtgtgtttcgtacaataaatggaagtatgatagacgagagctgtgagatgttgatgggagatgggcctagtgggcccaatgatcacgtgacagaggtgatgatggtataacgatctaggacccatgggccttaagaagactttgctatctcaaccgaccaccgacgactgaaccttgagcattgatggtgacctttccacttaactcactgacatggctcgtcgttttagcaaacactcttcatatttgataagagtatagtatctctgcccaaaaatagtatgttactgctcttactatttttatatattctttttatttttattttattatagctctaaatgctaaacaaatcactcataaaatttttctagatagatgctccgatcacacattttggaatttattatttagataggatgaaaaagtgg

SEQ ID NO: 69942 - DNA, 420 bp, Arabidopsis thaliana landsberg
  unsure (1)..(420): unsure at all n locations
accaataacaacggttgccaaaggtcttcgaacttcaacnnnnnnnnnnnnnnnnnnnnnnnnnnnnnnnnnnnnnnnnnnnnnnnnnnnnnnnngtcatcaatacaggccgcaaccgcagtcttgtgccattcattacaatatgataaaacatcggtataacccatattctttttgacgattgaattcaactatcaatacaattccattcaatacggcaacaccaaataatgcaataaacccaacacctgcactgatactgaatggcaatccacgcagcgctaaaaaatatacaccaccaatggcccgaaaaggaatggctgtataaataaannnnnnnnnnnnnnnnnaaattaatgcaaaaaacaatagtaaaaaaatctaaccagggaagccaggcccggcatactaaaacggtat

SEQ ID NO: 69943 - DNA, 509 bp, Arabidopsis thaliana landsberg
gattgtttgtgattctgatcctgagctcgcatcacaggaatcgaagctaaaccccgtatttcctatatttgaaccaaagctaatcggatcacgcaccgaggctcgcccaaatgatatctcgacgttgtctgaagactcaattctaaaggaaagcaccagagccacgacaccgcagactgctcccaagtggtccgacgaggtagctgccgaagaagaggaaagcagggtgtcagagggcggatacaagaaggcttcctcgccaaaagaatatcctgaagaggactccaaccatcaagactcgtcaacaataaagaatgaggggagacacaaagccttcgaacacgttattgaccgcgctctgaagaaggaagagcatgtctgccggacaaaggaaagtagcgtcagcaattctcaggtttcggatgtgggtggtgattgtaaaatcgccacgtccacctccaaggactgtgtcagacaagtaggacgcgtctgaggtcgaggaagtcccg

SEQ ID NO: 69944 - DNA, 774 bp, Arabidopsis thaliana landsberg
gtattgggttagctacgtaacgttgagggcgatggtcgttgtcgaaaagcctgaattaatccctggatcgctccggtggcactatatgcagttttctaaacaggtgcgaagtttaggcaatattgtttaaaatacacgtagtaaaaaagatactatgattttcatgatccgtctgttgccggtgcctaatacggcagcttctccacgatcagcgtttttttgaagcgtccctgctctacaacctgccggaatataaaggccagcttacggtatgctttcacttccctgccaccctgagtggccgattgccagtaagggcaggaaagctttaccagccggacggcctctgcttttgcggccgcagttttatataacaggattctgatcccggatattcctccacgcggatgcacaatgaatctcaatatgaccgtgtccgcaaatgggcttcggcttgcagtagccggaccaaagcggggaaaaaataaatggctgttaaaaaaatccgacataacactgtctcccctcataaaggccggcaatctttttgactttgttaatacttacggcttttttacagccggtaccccaatgcgctcctgcgcccgggttttcttaaaaattgtttttttttccgaaaacagggatgggttttcatccgaaaataaaataaaacggatggttctggcctttatattacattccggcactttttaaccctgttttcatgaaattgaattggcatttccttcccaggggaagaactttttttta

SEQ ID NO: 69945 - DNA, 2791 bp, Arabidopsis thaliana landsberg
  unsure (1)..(2791): unsure at all n locations
taaactttatttgattatctaaataaatactataacttcgcaatattaggcatatagttaagtgttatttcatatcctattatcaaaaaaattaattttttgttaatatatttgttaattaaaaatgacaacgttcactataacaataaaacaccgtcgtttagctcaattaaattcatttataatattaataaaaatagtaagttcaattaatttttctttgattttgttatgcatcttcttaataacatcagaactaatcagaacatcggcgtcacgtgagaagaaaaaccacacgtgtctttttgtgacatgacagaaaggggcatgggctaacatacactgatgtgcatcttcttaacatgcgctgcatcggcatgtctaaacaaaaccaacgcagcagaagaaaaaaaaagaaacaaacgagagagatagatgagagtagagaagagggattagcaaaaaccgataaaaaaggaaagcgagtttatgctctgagtcggctcaccgattctagctgtcgaagaagagcgataaaaaagggttctttgagcttcttttttttttggtatatttttttttgtgtgtgggttgttggtgtcgaaatagcaaaaaatggtgaaggaggagataataagtctctcacctctttactacttgtcttcttacgctttcttcttcttaattctttttattcccaattcttcccctaaccctaattcttccttgcttcaattctccctttttcccaacgattcttcttatcatcatcgtcgtcgtcgtcttctcgattctctcaattcgtctttgctgagcaatcaaggtattcttcgtggcttctctcttgacttggttttggttatgtcctgttgatgatcgtattgtttaaagtttgtatttttctgtgttggtttaatcttcgattcgatcgttttagtgttggtttcaattcgtatagagttgtggatccgctatctctaggaaagtttagtgcttgtttgtatgttcaattgattgatctgagattctgatgatgcactcgttggatttcaaattgacaatctctgtttgcttaattggtgtaatgattctacatgttttgtttctcagtattggagattggggagttctcagttcatcagttaagtaatctgttaagagcgaagagcgtttctatgcctatatatgctctacaatggaagataatggtgtagcttattgtgatggtatgacgaatactgtcaggaagaaacgtagcctcacttgtcgtcgtcctcgccctgagggatccagtgttttaacatcttcagatcgtttcagcaagatctcgagtgatgatatacctgcttttgatactaaccctagaaggaaagagtttagtcttagccattgtatatcgagggctgaatctatagcagaatctgaaagaggaaacaatgattttaggcggagagagattatcaatagaaataagcgttcgactgaaggtgttcttgcacctgccagctcgaaataccctagccaggaagttgaaggtaactgcatgatcaatggaaagggaactgattcgggtgaattagagggagaaacaaagagaatgaagcttaagattggtggtgtgagccggctagttcatgctaatggttcatctagaaagtcttcaaaaccagtgactgatactattcgctccaaccatgatttacaggtgaattgtcttaatgtggatatattgacaatgcttaagttgttgaattgtatcgcatccgataagatttatagtactttgtatcatcctattgcattgagtatctttttcggtaaatgctacgctcttttcgggccttacggcccataatctccccgcggttggagaccagagttaggtataattagtctatgatccaaggcttgggctcaaattagtaaatgtttactgtttatggacaggaatctgaaaatgttttcttatgcatttcgcgttggtgctccagtggagaggatttaatcgtgtcttaatttctgtggtgaagagctttcttgacagtttagattctgtcaactttgatatcttcttacattaaattttatttaattgcaggaaagttcagaagattgtaattcccctctagataagaaggctgatcttgaaggagttacttgggatgctgagatagacggatctatgacagggaggagaaaacaagaggaaccatctggcttggttcgcaagagcaaacgagccccaaagaaacgagttttcgatagcgatgacgacagcgatgatgagatccggtatttggaaaagttgaaatataagagagtctctgtgtgtaatgaggatactgagtctggaaggaannnnnnnnnnnnnnnnnnnnntacaaatggagaaaattccggcaagaagaaagctgtgtctgaacaggcgtccgaagacatggattgtgcggaggaaattgaaacggcgtctgatgaaaaagagattggtaatgataataagagggaatcaaccatgactagtcgtcagcgagcccttgcttctggcagatccagcgcgattgatttttcagatggattacctcctacatctagaagtaagattttaatcctttgctactgccacataaatctttagcaattaggggtcataatgtattgtggtaacttgtgttgacaaatagggaaaaaggagactctttcagaaatggagcagcaattgaagaaggcagaagctgctcaaaggcgaaaagttcagattgagaaagctgcaagggagtctgaggttggtgtg

SEQ ID NO: 69946 - DNA, 147 bp, Arabidopsis thaliana landsberg
taaaacacaacatttaatgtaaaataattgttctttaattacagctgtcgtgatttgcttaccgtttgaagaagagtcaagttatcgtcagtcaactgtagaaaccaaatttccggtagagaaatcaaaatgcttcagctgttgtgt

SEQ ID NO: 69947 - DNA, 529 bp, Arabidopsis thaliana landsberg
ttaaaagcaacaataaatgtgtccttttgctttacttttaatatagatgacgaagcaatggtaaagttgcatgggatttttttttcccattgaattgtggatttttttggttagtatatcaaatttattcaatatacaaaaggttatttacaagaaaagagaccaaaaatttttggaaaacattggaaagaatttaaggaggcgagttagagacttgatccatcgtgggaggagtgcaagctgtcatggtaacaaagggaagtcacccacaagttctgttacaattgggatggccttaggtaatttctgtcattcactttctttcccatacctttacgaaaccaaaaacattactccgccttgttctataaagtttctctactcacatagttgagaataagtttaatttgtagcttaataaattcttcatagatgattggatttgaaatccctctatgtaagataaccctagctcttgatggttagacagtcaatccctatctaaaatatcttcgtcatacttaatatc

SEQ ID NO: 69948 - DNA, 545 bp, Arabidopsis thaliana landsberg
aacgaggccgcagaaccccagccacgattgcttatcgttgacggccacgggagtcataaaacctacgattttatgtgggaatgttatgtcaatggtatacatattctatatttaccggcacactgctctcacctcctttaaccgctcgatttaacggtcttttcagagttgaagaagttatatcgcaaggaggttgttgaacgcaatatccattgcaccatcggcaaaagtgaaagataccttccaacaggtaccgagataacctaggtcttattgctgcacgacagaggtccaacggctcgttgaaatcacagatggttcagccctaggcaaggcatacttcttgaaatcttatcttaaggcacgcaagcacgctatgaagccggagactattcgagcgggttggaaatcgtcaggaatatggccagtttttatggcaaagccccctctcaacccctagtttattcaccggaacggcgagaaattaacgctttccacacccctatggcccataggaagaggccggctaccattggcaatgtgat

SEQ ID NO: 69949 - DNA, 153 bp, Arabidopsis thaliana landsberg
acacacaacctccatgtaccaacttttttctttaccaacactactggttatgctaacgagcttgagcttacttgtatagtaccaccaatgtgtattttttcaacatttatataagtttcatacttatgatgaatagggatgttgatttactgg

SEQ ID NO: 69950 - DNA, 387 bp, Arabidopsis thaliana landsberg
  unsure (1)..(387): unsure at all n locations
aacgcccgacacacaccgggaagcacaccacaagggccaacattccaacttgaggcacccaaaaaaaacaccggggacgcagcagaaagagaagccacacccccaccaaaaggggccaggagagcgaccccaccggaacacccggcgcaaggaacgggagccacggcgcagcacccccaaaaccagccacaaccaaaagcgaccgaacaggaaagaggcaccaaaaggagagccgagaccgacagaacggcaacagggccaccagcaaacagagaaccaacggagaaataaagggagacggacacccggcacgacacgaccacagagaccangagggcagaccgaccagacaacacacacacacagcagaggacaacaacgcaaaga

SEQ ID NO: 69951 - DNA, 146 bp, Arabidopsis thaliana landsberg
ttccactgtgaggggggctgattgggattgccgcagcaactcacgcacacgccgacctctagccaagtttttttgagcagacacagcgagcgcagacgggactggaaggccgtgagctaccgtcccgaagttacccgcttggcaaa

SEQ ID NO: 69952 - DNA, 619 bp, Arabidopsis thaliana landsberg
gatgacaatgtaaagagacaaggcagcaccgtttatcatcagaccagtttcgagagtgttcctgcatcgttgggctccctcctcaattttgtctacgtgattatatatcatatcgtctacaaacaaaataaatacaattctatcatatgaatatgtgatcatcgatgatcgatcaatatatgttttcgaggtgacgtatatagtatatttccgtagagacggcgaagaacatgatatctctgcatgcctccaatcaaatctttacacttcatccttcttcgttacttgttcagttgttcctttctaatcccgacaacccttaatttgtatttctatattagatcgaaatatctcatttgtgataaataaaataaaaaaaatcaaagaaagctatagagaagctgcgtgcatgcatgggttggcgatgtttggcttgttatgtttggcttgttatgtggcattatctgtatgtatattaccctaaatcacatctacgacattttcctcgatcttcacaatatgccagcaatcctcatgttccctcatatctcttaacattggaaaatgtcttttgacctcttttgatgtattttaaatacttcgagctattctatattac

SEQ ID NO: 69953 - DNA, 224 bp, Arabidopsis thaliana landsberg
  unsure (1)..(224): unsure at all n locations
aaagaaagacaanctcagaagacgaggaaaaagacgcaaaaacggggaaaccggagagaaaacccgcgaaaccaaaccaacagacagaaaagggaaagcacggaaaacagggaaccacaccgagagagaaaagaagcaccaaagaacgaaaccaaaacggaacggggaaaaaccgaaaaagaaaaccaggaaaacaggacgagacacaaaaagaccaacaaaca

SEQ ID NO: 69954 - DNA, 348 bp, Arabidopsis thaliana landsberg
gagatggatcatcacaaaaagatggtagatcaagagggttttctcaaacaaagaatcgcgaaagcgactgaaaatttgaggagacaaagaaaggatagtagggagctagagatgactgaagtcatgttccaatgtttgattggaaacatggagatgtttcatttgaatattgtggatcttaatgatttgggttatatgattgtgcaatatctttaagattgtaatctgcatgatttgtgattttatcttatttttgttacgtattattgtttttatcttcttttttttttatacttttttgttttccttttcgtttcttgtcattatttctattttttttccttcttt

SEQ ID NO: 69955 - DNA, 269 bp, Arabidopsis thaliana landsberg
ctaccccagaaccaccctcccctacctagcaccacccagacagccaacgaaaaaaacagacacccccacacctacggctctgccactaagcatgcgcgcaggctccactgacggcaaacaacctgatcattcaagcactgaggagctaactccacgtaaggacaacacggcgccaactgcgcaaagccgctactcaacgggaactgccattctggctggttgcgccagaattaccccgccctgatgctgctgaacatgcagattcctct

SEQ ID NO: 69956 - DNA, 230 bp, Arabidopsis thaliana landsberg
cccataacccttccaattccacaatcaaattcaaaacctgcttagcattacgttcatgagctttatcccataaagcaggaactttagacttcttaatccacttctccttttgctgaacacccttcactcacaaatacaaaaattctgactttcgaaaatactctagaagataatgagagaaagagattagaaaacagagaatcagaaagcttaccttataatcgaggtaa

SEQ ID NO: 69957 - DNA, 697 bp, Arabidopsis thaliana landsberg
aaaagcaactccatcaaatcaatgacctagggtttcaatacgaatctccttcatatgtaactaacttactaaggataagcaaataacacatactacagaaaaactgaatttcctcagcacaacaaagcaaaattgaagcatcgtagaagatataacgaagacgattaagtatctccaacttacagatcgatttatcacagtgaaatcaaacttcattatcgaatcatcagcttttctagggtttcttaaaccggaaaaattgacgaaactgatcgagatcaataaaatcggcttgacggagtattgaggaaacttgacttctccaaaatgggttctcgtatagaagaagagagaaagaaacaaaagcagaggtttaatggcggcgagaaaattctacaaatcttagtgcaacaaccatctggacgagaaagagaaacagtacggatttggaaaatagtcatttactaatttgcccccatcatttatccattctctgattctcattaaacacaccacttaataagccttgaagtgtaaaaactatatccactagtttcttctgtgcttgatatttcaggtttttatttggttgcacagatttgaagtagaagtgtaaaacataagccgtttacacaaaaacatcatataatccttgtcaatgtccgagaaaagatgatacatacatagctaggacact

SEQ ID NO: 69958 - DNA, 2716 bp, Arabidopsis thaliana landsberg
  unsure (1)..(2716): unsure at all n locations
gaccacctccacgaaaactaattctataaatttataaatggaacgtgtgatactatttaccaaacagagtacatcttatcagatgaacagagtatataattgcatgttgtttttactcgaattgattaatataatgtcacataacttgtgtggatccatgtcctacaacaatataacattttgtctttttatattatacggagttcaaaaaagaaagattctggaatacgaaggaaaaaaannnnnnnnnnnnnnnnnnnnnntcaattacgtacaccaacaatttcttggcgggtcattattaatttcaagggtcctaatgggcaatggcccatattacatactcttctttttttcttcctattatttaaattatattagagagctttgagcccaccatagtgcaaaatatattgtttttaaaaagaccactagctaattgtcacagtctctcacataccacatgctgaaatttcaaatactaacaaagaatcaagatttgtagaaatacaaatgatgttttattcatttattgtttttgtcagtttgatttattatttttgtaaaaaaaacaaaaaacaagtgagatagtgtatcggtgtttagttagggacttaaatgtgattttggttcatatgtactttttgctagcctaaattaaactgagtttagtataaattgttctgtacaatcttggtcttggtttctgtctgatacttttttaattatttattttaagtttcttaattataaagaaaagaagttcatttgagcctaacatcaacaaactatatggcccaaaccattgccaacactaataatgggctaagcttcactgaatggaactacataatgggcctcacgaaaaactacattatgaatttcttctttgtggtcctgattatgacattgccttcttttgtgaacagaaaaaactaatgacattgccttctttgatgagctttgctaaatcgaaacccaatcagaaaaaacggggaggttctccgtttccgttcgatctaatattttattttgatataaaacgagaaataggtgatgattagtattaaattagaggtttaaggtgacaaaatcccggggataaaaaccgtactttaagatagttgacgcgtgaaacacaccctgtgttatgttatgggttttaatttacttagattccacgtcagcagatacgtgaaccagaacaacacttaataattccgtctaataacctcgcatgccccatgcatcgtagttcacattcttactcaactccttcctcatttatcattccaataatctttacccaaatggtttcaaaccgagatctaaacgtacttgactttgaaaatcgaatgctaaccatttacttaccgaaccaaaactaaatttagtatagtttatcaagaataacatttttaatcaaatggatttcaaaattatactcagttatatattgaattatacatagttaattatgtatagttactttcattagaaatagttatctaaaaccgaaataaatcaaaattttcaaaccgaatcgaaccaaactaaatcattttttctgtggtttcgtttggacatactttgacagcaaaatcgaaatacccaaaccggaaaaccaaattgcacacgcctatataaaatgccttcgcttatagaaaatgcctaacaatctctcatagtcatatatagaaacaagtcatacacgtatcaattaaatgcaagcatttggaaaaacaagaaagatcaagaaatggggaattttcttaggagaagctgcgctgtgcacccggcttccggcgacggaggaagaggaagacacgtggacgagccgccgcaacaacgtccaagtagtgtgcggattaaagtgaggatgagaagagatcaactcgaagagcttttgtacttggcgcgtcgtggtgatcaatcggacgacggtggtaagattggtttcttgattcttaaagaatgtatggaaggtcgcttaccagcgagtgttcttggctccggtggcgatgttcgatctcaacggcgtggaagttacatggtgtatcggagattgggttccatcaccgaggaataattcattaatatatatatatatatgtgtctttcaatacatatagttttaaagtttagatagacgacactttaataacgttttctagatcaacaattatatgtaaggctaaagaaacaaaaaaaaggagtttcgttatcaaaaaattgaaaagaaaaatatataaaagtagtatgtttgtgtcacgcatttaattaaagatataagtgtaaatctcaatactttttattcgtcaacaaatataagagttttgatggcgttttagcatcgcataattgtggacatctcaaaaggtaaacttaaagacaaacttcaagtctaattgacaacttcaaattattctaagagccataaaactatctggttcatccaagtcgtttatcgacccatagaatctccggaacgtagataagtttttgcgcttggttgctctctttgggcctcttaagatctccttggcgccatcggaaggctttaaaatgatcaaattctttattcttgtaccaaatgatgtaaaacagaattaggataattaataatctttatattttatttctctatttttaaaataactactatggttatcctaattgaattatgataatatttgaatattgtgagtgggtacat

SEQ ID NO: 69959 - DNA, 548 bp, Arabidopsis thaliana landsberg
gtgccgcgttcgtgcgccgcataccctttcacggtctcgacgagattcggaatgagatcatagcgacgcttgagctgtacatcgatatcggcccatgcttctttcgtacgttgtacgagctttacgaatctgttgtacgcgaatatcgcccagaggacgagaatgacagcgacaataaggaggatcattggaaatgacataacatacgttttagcttgatataaggcatattataacacgaaaaacatctggccttgagccagatgtttttcgatagaatataggtatgtattatcgtcggaaaacacattatgaatagtgtttttcgacggagtcagaaaatatagtcgcgtgtgctccttattttctggccacatcgctccggctcatgggaggcgtagatatctacatcatacctcccatgcccatgccgcccatattcggcatggaagggttttcaggttccggtgcatctgcgatcgggacctttggagtaggagtttacccactggagatactgcgtgctggacacctgcgcgctttatttt

SEQ ID NO: 69960 - DNA, 493 bp, Arabidopsis thaliana landsberg
cgccaagggtcatccgcacatccagttgccggtgctggtccttgccatcaaggatgcctatgccgggcgccagccggccgtttccatgcaagcgatggagcagcagatggaagcgctgggccggcagatgcatcgccgggcgctggctgattttcggcatctggcggccgtcaatgcccgccgaagcacggcttttctcgaggccaacggcaaaaaggccggcgtggtgacgctgccttcgggcgtgcagtacaaggtcatccacgccggccatggtgtctcgccgacgctggccagcacagtggtgatgaattaccgcggcgaactgctcaacggcatgcagttcgacgacacgttcggccacggcaagccggtgacgtatcctgttgaccgcatgctgccgggctggcgcgaggtgttgccgcgcatgcacgtcggcgcgcactggaagatttcattccgcccgcgcaagcctaccgcgagcgcgggcagc

SEQ ID NO: 69961 - DNA, 377 bp, Arabidopsis thaliana landsberg
cgtattggttccgttgtttggatatcttctgaacgacatatcaaagcttattctatacgctctgtttttaagcattggcaagctatatagccacgtatgcatcgtgtgagattagagggcgtcacacgtcaaaaaataaaaaagcatattgcaacaggtctactttatccattggtacaatgctacagatcttacagatgtcccaaacaggcctcgagagagtggaaactcaagtttattcttgtacgtacataactaagacctgggaaaatttgggggatggagagaaatagaccatctttacatcaactaagtcgcacacgctatattgacacatgccgatatatctgtctacgaggtctatgcatgagcctatc

SEQ ID NO: 69962 - DNA, 483 bp, Arabidopsis thaliana landsberg
gtatcaagcttaagcagtttctggcgttccagtaaaaagcctgctacttaaggatctatgctggcctcaatacttttgggcagggtataacagtcttcaaccgtataatctagtcagcccagctacctgaactcataatccctgaaatttttgaatcctgcgttgagagctacctggggtaagaggcgtacaaggttgtccaacaaatagatgagctcctctacttaatcaaagcgagttcgaaagagcacgctaaatacgttcctgcgttctacgcgatcctcgcttttaatgaaaatagcggcctggggcaggcggtaaggcgtaccattaaacgagacgtgcaaaccgcctgccctggtagagaaacgctgggtttatttattgatctcgacgcttacaggaatacatatacaacagaacatactgagcagagtgtggatgttgatataaaaatataatattgatggcccgggatcggaa

SEQ ID NO: 69963 - DNA, 549 bp, Arabidopsis thaliana landsberg
cgagaataattaattgtcataatatcactctttgtcttgacaacaaagagacacttaaacctcggagtcaaacgtcacaaaagaccaaacaaggaatcaaatatacaataaggaatacatttgacactcttcttttgcccgctgaagaatctgatgggttgttgttactcactatcttcaacagtagatcctgttcaagaccacacgaccgatgcttcttccgaacctagaaacggcggaggagaagatccaccattgacaaaattctctttttccgctctcaagacggccacaaatcattttagtcccgaaaacatcgtttcagatcaaacctccgatgttgtctttaaaggacgtttgcaaaacggtggtttcgtcgctatcaagagatttaataacatggcttggtctgatcctaaactatttttggtacgtagcttttgttttgtctgaaaatgcttatcatttttgtggcggttattgatcttatttgatggggttttataggaagaggcacaaagaggttgggaagttgttacacctttgact

SEQ ID NO: 69964 - DNA, 771 bp, Arabidopsis thaliana landsberg
gacatgcaatccataaaattaacctatctgccaaacacttaaaaaatcaactcttgagatgggacttttgacaaaaccaaacctctcctttgtactcatcatcctactactcggcttctttgcagtctcttacgcttccgttcctcggaaactaaatccacatcaacgcatcggtttcttgaagcccttcccgaaagtcttcaccttcaagcccttaccaaaagtcttccccttcaagccctcaccgaaagccttcctccccaagccgatcccggttactccaaaaccagtcccagttaagcgaccacgaccaccaactcctgagttcgatcctccacctgacgtagccccacctcctccccctcctcctccaggcttcttcaagcctcggcctccgccggatactccaacaccaatcaccgtcaagcctccaccagatactccaacgccggtcattgtcaagcccccaccaacacttccaacagtccactaacctctgtcgtagtaaaaggcttctcgtttacaaggctttcctagatcgatctctttgtgtgtgtacaatagaatcaaattatatatgtctcgagatctaagtatcataattgttcttaactttactttgcaagtattttaagtgtaatagtcttttgtacgtcgaatagttgaccaaatatattttacatttaaagctacgtgagtgaaaatcgcttgttcaaaaacatcaaaccagcatcagctcgagttgcttgatctataccaaatctttgagtg

SEQ ID NO: 69965 - DNA, 552 bp, Arabidopsis thaliana landsberg
cgaacgcgcgtccgccacgacgatgcggaataaggccgcttcttggagccgccacgcgacagtcggagggaaagtgccatagtcttcagtcctttcgtctaaatcactttttcttcaggaaattctcgaaaccgggtggaaggttgccgggcatgggcggcatcgcaccgcccaggccaggaaggtttccaggcggccccttcagcatgtcgcccatgccgccgggcaggccggccgcgcccgcgccgcccttgccgaacatcgcggccaggcccttcagcccgcccattttcttgatcttcttcatggcgttcgccatttcctgatgcattttcaggagcttgttgacttcctgcaccgtagtgccggaaccgttggcgacgcgaatcttgcgcttggcgttgatcagctcgggcttggcgcgctctttcggcgtcatcgacgagatcatcgcgtccatgcgcagcaggatcttctcgtcgaccgcgcccgaggccatcgcctgcttggccgccttcatgcccggaatcatgccggcgagcgcgccgaggc

SEQ ID NO: 69966 - DNA, 1218 bp, Arabidopsis thaliana landsberg
acatagaataaacagtgtcacatccttaagagaattcacatatccagcattgacaacaaagttccaaagctccaattaccacgcatgcacgcataaaagctttgcgcaatttgtagacgttagacgaatgagtggcaacacatagtcctcaacttgggtaatagaaattgaaacaggcttttagaattaagaactaatctacatatatgagctcacgggatcaagttttattcatccgagatataaaacaggcttttagaattcactacaattgaaataaagttacaaattttgaaacaatattattgattacatgcaagttacaagcttttacatgtcttctaatctctactcagttattgtttaattctcccaaggctcaagtgctttttattgatagactccagcttggtttattcttcaatcgtatcctcacttcacctgttttaaattctcagttgtcagttgtatgtttcttgcctagtgaactatactggtaaatactaaatagatgtagaatctataaaagtgtttagggcctttagagggtgctattataacatgggacctcgttgaagcccaaactgttattaggagaaaacccgaattgggtcgtcgcaacgttgcgtatccgcatagctgtacaaaggcataaattggtgattggttgaattattagagtagtaattaagtttacatttagggctcaaagtataaaataatgttattcggactagacttagacggttagacttaggctgattgatttaatattaaatatgtaccaaactgatgattacgtgaaaagacagtttttgcacatccacaccacatgttcatgcaatgtattagatccatatctatgattaacgaaaaatctgagtctcttacggccataggaaatgtaggagatttagggaggaatgtataggttgtatttgttccgtttacatttacagtttgaataataactatatgccggtcgagttactaatctatgtaaagctcgacttgtgcctcacggaatatggtctcaagtcttcttttcagttcaaagatatatattccatttttggtattcatgaaagaaaaaaagattgtttttattaaattatttacagactatttttacatgttttaactaaatcagcaggcaaattagttcaaatattttgaaaaacaaaaaactgaaaatcaaagtaatgtagaatcaaaaat

SEQ ID NO: 69967 - DNA, 245 bp, Arabidopsis thaliana landsberg
gggccgcctcaagagagcatcgatttcatcctgtttgagtgtcttttccatttcgcctctcgctctgactcaccggccgtctgctctgctgcccgcgcaccgtctgctgtggccgactgctctgcgtctgctctggccatctgctctgcccgactgctctggccgactttgccgcccgcgccgctccgcaggtgggagaaaatcaacccctctgctcgctcagcccggagcgccggccggccgcc

SEQ ID NO: 69968 - DNA, 310 bp, Arabidopsis thaliana landsberg
cgacctaaccctaatacaattttcaaattttactttaccaaacctaattccctcatttttcttaccaacatggtacgttactcgttaggccaatattcaatcaatgtgtttttagatgtaaacaactgcattcaatattcatacatgcaaatccaacttaaccacaactaatttcataaaagaaaaaagaaaaaaaagtatatgttttcttctgatacttgttcgtcttgttaacttttaacctacaaatgtagcttctatttgtaaccagcacagttttttttccagatttttttatcttttttaatat

SEQ ID NO: 69969 - DNA, 566 bp, Arabidopsis thaliana landsberg
  unsure (1)..(566): unsure at all n locations
cgatttcttctaaaaccaggaccaagacaacatgtccactctcagatttcttgatcaatacagtgctcaaagttccgagtaattaaaagaaggtggatataaataagaaagtaagagctcaaaggatccctgagatagcagcataaatctatactgaaaggacattaaagtttctttcataaatctcttccagaaactcttaggcctgataaaacattttcagtaggtagtagaatacaaaatcagcatacaaaataagtagtctttcaatataccaatagcaaacgtgtaaagaaagtagtcaggcttcagagagctcattcatgacagattttaaacatacaaagtaatggtaaggataaactaaacaagaaggagcaaaacctttnnnnnnnnnnnnnnnnnnnnntgaagaagactgagatctataactccagcacttggctgttgaggcagaaagatatggagttcaaggtcatcctccactacatagcangtttaagaccagcctggactacataggacaagaaagaaagatgaggagaccggaaaggagaagaggaaac

SEQ ID NO: 69970 - DNA, 986 bp, Arabidopsis thaliana landsberg
  unsure (1)..(986): unsure at all n locations
ttaagaaatgtctttacatttaatattattttatgtgaaagacatttgtgaaaagttgttgaatgtggatggtctaagaagaattattttgcataaaaaaaagaaaggtcatgtagcacggtgaagttaaggtgtgatagatgtgatacaaaacttattgaagttaattaatgaagcaaacaatctcacattacataattagtcacggagaagtactaaaacatctagctggagcagctcatggtatgaatgatcgtagaaagcaagcatctcatggcagtggtactaatagattaatgtcccatccattattcgctaaaaaaccaatcaaaattattatcgtattcgtgttcactgctaacataattatagaaattggtagaactttgttggtagaaaaatggtaagagtttgttaatagaaaagtcgtacaaaatgttatttcttaccaattttcctacgatattgatcgtagggctttgagcatttcctacaatatatgtaactaacttttatataatatcaagtggaagcttgaatgctattccaaagaagactaaaacaatagaggtatgtatcattaacacaaattttaactctcttcttataatttgagttacacatcctaatttaatttccaaaacttcatatttatttagataggactacataagcagttacaaaaaaaaatgaaacgaaaaaagaggattatttgaacataaattatgagattatatagatgatgtgtaaaaatactctatagactaatagtaataaaagcgtttagataaatgaaatttaaattgtaaatatatattagaaaaaataaatttaaacataaataaaactgaacaactaattgtaccatacatattttgttttataatgtaagatactacatcacatgatttntttgtatatattctaaaagactaaagattattaaataaatagtaaactataattatacgggcgttccgatatcc

SEQ ID NO: 69971 - DNA, 497 bp, Arabidopsis thaliana landsberg
  unsure (1)..(497): unsure at all n locations
gacctcgggcgattatcagcgctatttcatgcgcgacggtaaacgctactgtcacatcatagaccccgcgacaggttatcccggcgaccaggcacaatccgtcaccgtgctcataccgcctgccgccaacagcggcgtggtctctgacgtagcctccaagccgatctttctcgcacccgccgatcagcgcgccagtgtcgcgatgcgcatgggtatcgacaacgtcatgctgatcgatgcggccggtaatatctacagcagcgccggcatggccaagaaactgcaatggatggatccagatgtccgctggcaaaccctgttctgaacacgcgctactgtcggggnnnnnnnnnnnnnnnnnnnnnnnnnnnnnnnnnnnnnnnnnnnctttccgcatattctggcatcaggaannnnnnnnnnnnnnnnnnnnnnnnnnnnnnnnnnnnnnnnnnnnnnnnnncagcctcgaacaggatcgcacgctcgatatccat

SEQ ID NO: 69972 - DNA, 561 bp, Arabidopsis thaliana landsberg
gcctatgaatgaaaccatgatattattattcaagatttcttcatttgtttcaaatgttgtttatcataaagagtcatttcccattttacctctcaattgagcttcatgtctcaggaaaccctctaatgcaatttctactaggtgagtattataaattaaataatataataagtatacagcattttatttctggcttttcactactcatttggcatttgtcccattgacgttgtagaaaataattttgttttattccattttcttagacaaatttcttggtatcagtacattgaattctgtttcatctacctgtaatgtaatagtgtgatttgtgtacttataaacaaatgtagcattaggagagacctctctataaataatgtaatttatcttggacatgcacctgaacatggaaatgctgaaacattagaagtatctgttgtttacattttaaggaactactaacatttaatttccttaataagcttcaaaataccaactcttactataatataccaaattctccacatttgcatacaatactagactcttgattagata

SEQ ID NO: 69973 - DNA, 144 bp, Arabidopsis thaliana landsberg
ttgttacgccgaccaccaggccgtgaggctttcccaggcgatgttgttatgtacatcgccggccattagaaagtgtgggtgatctaaggtaccagccaggggcaggaatgtttgtaccgtcttaaatccaactttaacacacaa

SEQ ID NO: 69974 - DNA, 3220 bp, Arabidopsis thaliana landsberg
aaaaatcatccagaacaccattccttacttcacacagtgtgctaacaaaccgttatgatttgattaggaagacgaaataaaaacatgatttaaagctgcttattgtctggctaataagcaactaccagaaaaatcctaatttttcactgaggttgaaaaaggatacagattgtcctcgtctaatccttttttgattgaacattgcaatgaatgagactccaaatcatcatccgaatgctttgaagcttcatgaccaaatgctccaaagacagattcttcatctctaccttcatcaatctcaatttctaggtccacgaacaataaactctgaaatgattagacagtaacatacgagcaaatgtcaacttaaagtcgacaaaaaagagtaccaggaacatagccgaaatctgtgaggcggtcctggagatgcaaaagatctttttgattattcttgtagatctgactacagtgacccagaagctcttcgaaggagactgtaccaaaagacatagattccagaaaactgagctcggaagctgcggtggagattcgacgattgagacccttgatgaacgtcgatgaagccgaatctgccaaaatcgaaaaattcaatttttagggtttatgacaaaaatcggaggagaaatggggaaaaagagagagagaaaaagagaccgagaggaatagggcgacgctggagagagtgattgaaagcatcacagctactttgaagatgattgcagaatcctcctaagcttttgctcaagctcttgagctcttcctccatttctaaagttttcgtctttagattgatctctcttcccactttttgtctccgactttgttttcggcgggaattaaaatttcccggtttaacatcattatgttgaaccagtgtgtttgatatttgttaaccggagacataatcgatttaacagaaatgtaatttcttagagatgaagaagaaataaaagtaatcaagtcttgtccattctcaatctcctacgttgtgaaatccacaattccatggctttcgcttcaaaattcgctcgttctaaaactattctctcttttctccggccttgtcgtcagctccactcgacgcccaagtcaaccggtgacgtgaccgtactttctccggtgaagggacgccggagacttccaacttgctggtcgagctctctgttcccattggcgatagctgcctccgccacttctttcgcttacctgaatctgtcgaatccttctatcagtgaatcatcatcggctttggattcaaggttcgtcttattttttaatataaaaatgaatgcttttaaagtatccagaattgtttgattgcttcgttttcaattatctgcagagatataactgttggtggaaaagatagcactgaagctgttgttaaaggagaatacaaacaagtccctaaggagcttatttctcaattgaaaactatcctcgaggtgctgcaaaatttgaacaaatccgtcgaaatttttcttgatgctgtacacaacttatattgatcatcaaattctgtttccttgtgttttaaggataacttgacaactgactacgatgagaggtacttccatgggaagccccagaacagttttcacaaggcagtcaacattcctgatgtcgttgttttccctaggtgagactctactatattgccaactacatttatatcaatcacttgttgagagtggttctggttgtaagactctggcaacttagtgccttgttcttcttttttggctcctcgttgaaattataagccaaaaagaatgcattgatcttgagcctctcttaaaatatgtttaggtccgaagaagaagtctccaagattcttaaatcctgcaatgaatataaggtttgtaagaagatttagtgctcaagtctttttcaatctagtcttggccaacatgctatgttacttggcatatatgtagcttcctcgtggattgatatatcatttgctttttaattaggttcctattgtaccatatggtggggcaacatcgatcgagggtcatacccttgctccaaaaggaggtgtgtgcattgacatgtcattaatgaaggtatgtgctatctgacatcagcgtccttgattttcattttaaacatgtctttttggtgtcatgcaaataacaaacttggcgtttcattccatgaacctgctacgtttgtataggaagacaatttgaaatgatgtaactctgttttctttggcatgcatatccaacctccgccttgtttacataagaaaacgtaaacttagaaacattctatgaaaagttaataaaaaaatgtatcctaaataatatcataaaatcaggaaatagaaagaatgtgcatcacttatagtcctcatacaaaggttattgaaatttctcactcctgctcacacttcttcaaaccttagagggtgaaagcattacatgtggaggatatggatgttattgttgagcctggaattggttggctggagcttaatgaatatttggaagagtatggtctattctttcctcttgatccaggttagccaacattgagatagtaccttatctctcagatcatagctttcatatttaagcttttatttggaactcacacatttttagattaactgatcttattttatgtgaaaatcaattacccttaaaagatattttttggttgttactgcatcattcaacacctttagcgttgtgttcaattgactctcgaagttcaatttccatgtgcctaggcagcattcagcaatttgataaaaataatttggtgcaggacctggtgcctccataggaggcatgtgtgctacgcgttgctctggctctttagctgtaaggtagttattctgcactgttactattcccatctttcgaataattgtggggttgctttaatccggttggctatgataattctgctactagcttgtaggtatggaactatgcgtgacaatgttataagcctcaaggtttgttgtttcttccactgattcatactccattgtacaattcatttttatttatgctatgctcatctcaggtggttcttcctaatggagatgttgtgaagacagcttcacgtgccagaaagagtgctgctgggtttgtcttcagtcttctactattttcttgttctttgtttgcatttccttttctctcggagatataaactatataaaaaaaattgaatggtgtgt

SEQ ID NO: 69975 - DNA, 454 bp, Arabidopsis thaliana landsberg
gatggagtcttcacatcatatagatagagtacgaactctttatttacaaaaatgaggatcccacgttacatgtacacacaacaattggcttgctttgtctttacattattgagtatcatagttgcgactatcaagatcattagggtgatcactagttaagtcacacacaggcatctaaaccggctatgcatgaatcttgtttgaggaccatatattaagtaccttagaatgggtaaccgacgatgcagaaaagacacgagagcttttccgaccaatcgctaccgcaagagttctaggagctcggcttttagggaaagcctttgagatcccgaagaaaaccgttctcgttaactgcattgccgccattttaatcaatcacaaaaacaatttcttcttacttcttctttttgcttaatttaagctttaccaaaatcttgttttttggaaggtttgg

SEQ ID NO: 69976 - DNA, 4239 bp, Arabidopsis thaliana landsberg
  unsure (1)..(4239): unsure at all n locations
gatgagatatcgagtttgttcaagaatctcaattagctttgtagcagccaagaatcagggaacgcggcgggtgcgacaaaacatggtgctgtggatttaacttgctcgatttgttccaaaatcaagatatctactagaagtaatcgtgttcttgttccttgctttaaggctttggctgtgttgatccgtggtatgacttctgttcttgaattagtcgttcttgtgtgttttaactttgatttgtgttgatcatgtgttattcaattgcagacattcagagcacagagagattcaggaattgtactggaccaaatatcgttgttgatctcttaaatgattccagctccgattctgatttgttagatgctggttttgcggttgttgctgctgcagcaactggtaatgaagttgtgaaacagttattcatggaactgaaaatcgatgaacttattctgcaagtgttgaatagagagagtaaaactaccattagagctttgtacgatgctatttgtgctcttttgactccagatgacttccgtgttgttgcttaccaagtaagtatggttacattcgtttggtatatgccacttttgactgcgtgaatgaaattaagggaaaacagcttatatagcacttagcaaacatttataatcgttgttttttgtgcttattcatggacatgctttgagaattcaaatccactagacttttgcttccatgtgtttcaggtttatggttatgcacgaacttttgccaaattagggattgcgacagccctcactgaagcattacaggcagggattggctctgatagtttggtgtcagcaagtactgcgttaaaagcaattgctgtcaatgtaagtctcctagttgaaatctctgtgtgataacatttatctggttaggttcttgcaagttcttcatctggttttgctgtaaacaggatgaaatatgtaaatctattgctgaatccggtggaatagatacacttcttcggtgtattgatgatagcggtgagcaaggcaacaaaactgctgctaagacatgttgttccctgttgtctaaggtaagtagcttctaatatgccctgcaggctgcctctgttgtcttcattgcctttggttattcaaaatccttctttaaaactcaggctttcaagtattttccgcaccatattaaggagtagcttatgttcatgtgcttctaataaatgcatgttctcaaattttaagcttttccaaagcctattactgatttagattagcattgtaaccacgcataataaatgtttatctaaaatgtgtattttgatctctagttggcaggaagtgactctaacaagagtaccatagttgagaagcaaggtctggacaagctaatcacactcgcactacgattctctgatgatcctctagtcatacaagaggtaagtatataaaccaaacgaaaaccctcttatgacactatgtcccatgcgcaattttaaatcttcctgtctagagaagatacttgtgactacaggtcacgtctttggcagttttccactagatagaacgtaatgtcgtgtgaagaatgtttcttgtagcactagggtctgagtgcataatccttgtggttgatccaagatatacttgattggttcaggtgatgttgataatctctataatctgtctgagatcaccagaccacgcagccaaggctatagaagctggagctggtgatctagcggtccaagcaatgaaaaggttcccagtagctgctcaaatgcagagaaacgcttgcaacatgatacggaacattgctgtcagaagtgcagagaacaggtttttgctctgtttccaattcttgtcatccaacaatatgcacatatcgcaaactcttttataatatcaagttctgtctgcatgcacactacagaactattctgcttgctaatggaatcgagaagctgataagaactgctaaagccaacaatgagacatgcagagccgctgcaactgatgcactgagagaccttggccttgataactacaataactaaggtcaatctttctccattggttggtactcgcaacaaccggaatgaatccagtttcttttttcaaaaatttcataaacagtttgcattgagttctctcttttgggtagaaagcattccgatctagtcttttttgcaacgattgcttttgttcgaatgcttgaacatgtagtaaaattgaaaggaattgattgaaaatatcggtgaaaggtactctaaatagtaaaaaagtaaatagagaaacagaggcttcacaatgataaattttcattcattcactaaaatcattcgtttagtcaatgaatttcctttatttagaagaaatcgattttagtttaaacaaggacaaaatgtttgtttgactaaagggaagagaaacaaagacaaaatgttcacgtccatggaatgatcgagctctagaagagtgtattgggaatattaagtacggatatatgtttttaaaagatgattaaaaaaaagtttgcagcaaaatcgtcatgtggatgcgcataaacaaaaactttagataataaaaatgatgggctatagtgatgatgagtgcaactctatcggtttctgcttttaggtgaagatctgacaagctagccaacaatatctcgacatttgtggtaacttgtttttctttaattttccgtttttaaatgcggaaaccctttttatataccgaaatagaaagtaaatctttttagtggtcattaatacatggaggttcccatgattagccataagcttgtttaatgcgagtatatgtttcatcagctccgtttcaggacatatttaaggggcaaattaatccagtagccaaaaatgtacatatgtaagggacatattacgatattaatatatagatccactaacagaaaaactaattgttaatttaaattatttctatttcatttttcactgtgtttgattaaattaaattgggatataaaaatcaattcaaaatctgttattttaaatctcataacattctagtgctatatttttgaaaacttagatatttttagtaactgttctaggcataaatttaatcaattaatattttcatattttttgctatattatttacaataagacatataataaatcggaaaaaattaatgcataatattatggagagataaaacttactgaaaaataaagagtaacaaatcacatagtttatactaatactttgccaataaaaagaaagtttatactaattaaaatattattttctatactagtcacggtaaaaaaaaacatttctaaaaactacaggccccattgtttgtcagaacgttgtaagtagaaagggtaaatccgtcatttcaaactatctcccatgctttgacaaatcacaattcaacagttcacagaaaaagcgaaaacttcttctatctctctcatctttctgttttgtatagcttacttcaagctgtggtttaaacagaacagagaaagctgtttcctttttatattgacagagaaaaggaaagctgatagagagagagacagagagagagaaacagagttcaagatcacgagccttccttcttcttcttcttcttcatcgagagcgatcaaaggaacaaaaaggatctcaagaaacccacttgtgttgttggttagatacttcacgggtctctgaaaacgtctctttctcacaaccataacttgatcacccaatactccttttctatcttaaaggctcaaattcatccacgtcacaccgttgttcatttcctctgatgtcttggtgtcgttagatattgtctcccaaaaaagaaatcttcttgacacagaaattgaagtcgcaaagagacagaggaaagagggggagaaaatggatcgaccagcagtgagtggtccaatggatttgccgattatgcacgatagtgataggtatgaactcgtcaaggatattggctccggtaattttggagttgcgagattgatgagagacaagcaaagtaatgagcttgttgctgttaaatatatcgagagaggtgagaaggtcagnttattttcttcttgctttttctccttagtccaattttattttatgtttcaattcactaggttcttgaatcaaaagacatcattttcgtgtgttcatcatccaatgagagaagggcgttgggtactttatggtatgaatggttaaccctataatttacaaaatggatgattttatg

SEQ ID NO: 69977 - DNA, 172 bp, Arabidopsis thaliana landsberg
agttcttgtgaatgttcttagggaagcaggacaagtagtgccagctgatcttttgaagtttggctcacatgtaaagaaaaaggtttgattttcttccatctcttttttgattctccacacattgtttcttcttcatcatcatctggattctggagtgattgatgagtgcttt

SEQ ID NO: 69978 - DNA, 529 bp, Arabidopsis thaliana landsberg
gtaatcctaatatttataacattgtacacgtaaccttctagttttatattagtctaaatactttacgaactcaacataggcaaaatccaaactagttcgattttgttttgttctatagttttctcttttctaagcaagtatattccctaagtgttcgtgattgttcgatagatttattgtgatcgtgcgtgggtgtagtacgataaggagaatacacgtgatggttgtgcgacatcacacgccaaaatcggaccatggggacgcatcacagttgaagagaaaagacttctcctttgaattgaattggatcctatgttactctaaatgtgcacgtgttcatcatctccacctctcattatcattaccaatccttattcttgatttaaaacggattttaattttcaaagaactcaatgtttacttgcattgactactaattattgaggacatctaaaatatctaagaaaaaaactcttgttattcaataaaaaagatcccatatgtaagaaatttaattctttgcttttta

SEQ ID NO: 69979 - DNA, 419 bp, Arabidopsis thaliana landsberg
cttttttgtatgaacgtaaaattttagaatgcatgtggtacatataatgcatctggcttgtagacgttttgaactaaagacagagagaaaacacatattaggtgttattgactgaactgaaaccacatgtagaggacgtcatcaagctcagctaaagttcttgtggtagaggaaggctacgtcatgataatcaaactatcaaagacaaatatatgcctatgagatcaccgtcctctctttgcatttgaaggttccagcaatttatggatctgatgtataatttaaacaacaggtattcaattatacagttataccactcacacgataattctaatgggttaacctatccttggatccgggattactaatcaaccgctccaccaccataccgagctacacggaactcatatattgagtgt

SEQ ID NO: 69980 - DNA, 585 bp, Arabidopsis thaliana landsberg
agggccgactcgaagtccactaccaaaacgtcttacaacttcttgataatcgccttctgctttaaaagtttgcaaattaccaggtattagaccgttaaaatcggtgctgggctgcggtgcaagaagtgccttaacggcatcttcactctcatgtgccaaggctgcaaggagtggaaagccatagcgttcacctttgatatcaatgtgttcaagtcgcttgagttcaagttgaatgagattcggcagattcctttccgcaagtatatataacagattcgcatcggtagtgtgatgacgcaccttgaatctctcgagaaggttgtccaatgctatccaatctctgagaaagaaattctcaacaaagtcatcctgagaaattccaaaaagttgcgaaatatcagcatgataaagcacgttccgtactgcatattctagaaaaggaaacttttctaatgctagcgaccgaagattcgagacacccggagaggatgaatttgatgctggtgttgtcgactccaaatgtcgaaagacatcaatatccatataatttagacaacacactttcaatcgctcatgactcgatgc

SEQ ID NO: 69981 - DNA, 593 bp, Arabidopsis thaliana landsberg
gatccactgatatctggggagaaatctggggtgactcggtcgtttgctttcatataaacttccccgtctcctcgctctggcccctctctcaggagcataagcacccgtcaataggtctcgattgttcaattctgggcagctttgtcggctgaaacccacgtgtcggcaggccctctcaatacgttgttttgaagttataggcgaagccatgactggctccaagaattccgactcgacgaagaaagaagacgcgcaaaaagatggagagatcatcggaatatgcgaccaatatacccccgaggaggagaaggcagttcttcgcaaaatcgaccgagtcattttaccatttgtgagagcaaactcctccctaatatccacagtctgtgagcctaatgcgaccgccatgtagatgtgttttgtcttctttctgcagtatcttgacaaacaaagcctgagctatgctgctgtattcggccttacccaggaccttaacatgaccaacccgcaatattcttgttccagttccatcttttaccgtggtcagcttggtctggaatatcccttcattacttgatgagtcgggtgccactcac

SEQ ID NO: 69982 - DNA, 1076 bp, Arabidopsis thaliana landsberg
tgaaaaccacaccctgcaatgagtgtgccccatgaaacaacatctttccacgagatcgtatcgaaacacctctgtgcagcttctaagtagccacatttcgaatacatatcaaccagagctgtatcaaccaaggaacatggcctgataaagcttctgattacaatacagtggatcagtttccctacagggagagctccagcagatgaacaggcttgtaaaagcgagacaacagtaaatgaatcaacttgttgcacggttttgaacttcatttcttcaaacaataacaaggccttacacagatctacgttctgggcatatccggagataatcgcattccacgaaactaagtctctttcattcatccgttcaaagataactaaacttttatccaaatgaccgcactttgcatacattgtgatcaaagagtttaacgcaggagtgtctagtgtatatccttgcctcagtacatagccatggactgaagcgccaagatcaaaggaacccaattgagcacaagatgctacaacactagctattgcttcactcgacaggtctgatcctgattgtaacatttccgagaaaacaatcagtgccttttctgctctacccaaccgcataagtcctgatatcatgactgtccagcaaacaacatccttattgggaatcgtttcgagtacccgatatgaagcttcctcctttccacacttcaagtacattgttatcaatgccgtcttgagatgcatatctacatcaaaaccagtttttacaatttggcagtgcaacattcttcccatttcaagatcacacattgttccactcactgaaagtgatgctccaaatgtctgctgatcaggtcttaaaccatcacctttcattctgttcaaaagcttcaagatttcagacatattacaaacagaagcataccctgaaatcattgtgttccatgaaaccatatcttgttgctccatctgatcaaaaaaattccttagcatctccaacatgatcacacttgccatacaaattcaacatagaggtcatcaccagttttttacacttcaaacccattatatcacccg

SEQ ID NO: 69983 - DNA, 528 bp, Arabidopsis thaliana landsberg
gccagcgttccctttaataaccctattccttatttgtcttttactctctctattcacaatgaataagccagtttcatacgtttgttatgatacccaatataaaggcgtgtgtgtacactcacttatggtcatcacttgaccagatgggtgcatttcttaactactaatgaaaaatgcatgaaacttaccttgccatggctcatgagtcttaacaacatatatatgcataacagacatatattaaattacagaaaaattgctaatcttacatacactcttaatagctctttttcatcatcgtgatccctcaatagatagatagattatgcatattgaaaacaggcttaaacacttccacttatgatcttcttgttcttccatggcatggctagctataatcccttgcataaactatcctgcatttccccaaccaaatcccgtttagcgaaagacaagacttgggaagatgaagaagttatgaagaaggagcggagaaacacaaatactttacccataagtgagatcctt

SEQ ID NO: 69984 - DNA, 287 bp, Arabidopsis thaliana landsberg
aggattccgtgtgtgcgacttatgcaagttgtacacgggaacagaacccataagtagtcaatgatataattgataaagatgttttaatgaccagagaaataaaccgatcagttcgaaccaaaaccaaagaaaattttaaatcggttttgcaaaacacgtgatgatcacataagaggtatttccctttctaaaaaataggataccaaactgtattggccccatgactaaatggctggattagagtggggaggacaattttatctaggtgctcatgtgtagttcttatt

SEQ ID NO: 69985 - DNA, 521 bp, Arabidopsis thaliana landsberg
ttgttttctttctatccacaacaaaaatatttgacttttacgttttaattaaccaccgattagtttgttcttataatcgcgactataaaaaaatatgtgacgtagtgtgatagtaaaattatctgttttcattcgaactcagattcgggttgatgatttttataattatatatgcaaggatcattatcaaaccatttgatttaataatgtttatgtgtcaatgatggtaaattggaattgttcgagtttgtaataaacaattgtaatatattaatatccgtcctcgtgatttattgatgacactccaaactccagagtcccatacgcacacattatacaatcatcaacctttgtttatcttgtcttatgcgctgtcttttactccctcaaattttgtatagtctcgtgtgcgttgttgtccacaaaagatagcaatagtttattattacttatcttttggcggcgattacaataatttagtacacaagctcaactaattgtttggtttcaatttatgcata

SEQ ID NO: 69986 - DNA, 2537 bp, Arabidopsis thaliana landsberg
gatcttccattttgccctttcacggcgaaacaacctgggttcgggaggaaacagcaacgtattacctctgatcgcttcacctttcgcggtggtggtggtggcgatgccgccgccgtcgtctcctcctccggcctccgtgatctcgttttcgtcgtaaatcctcaaggtgtgtttgcccttttactcactggatgaaaaaaaactgagattcgaaattcattggatttaaaaatgatgtttttaatatgagaatcaatctcgatgtggaattgaggtttagtattatcgtctcttgattcttttcaatgtcttttatatgagtctaggtgctaatggtagaacagctaaagaatggaagaagttgctacctcaccttcgatctcgtcttggtaaagactgtaatgtgagtttttgattcacttgcctttttgtgcccctgtgttagtgatgccatctcctttcgctttcttcagttccttcaactgagtttacgtgtcttcttgtttgtttctccaggtaagtgaattattaacatcgggtccttctcatgccattgacattacaagagaggtaaggagtagtgaaagtaatatactactttgctgggtacagtattctctgtcttgtcgatttggttttatgatgatcctctgttgcttctaattatcctctcaggctataagggatggagcagatgctgtcattgcggttggaggtgatggaacacttcatgaggtacgaattgccatttttggctgctagaactgcgctctggagattcttagctccactcattctgtcctttttttttttatctacaggttgataatggtttcttttgggaggggaaacctgtcggatatctcagtggggaagctagccgatcgactgcacttggtgtgagtagcttgagttgactttttgacttgtttttgtgtttatctcttgtggagttacaacatacaatcttagtccatcctttttattttgcagctgattcccttaggtactggctcagattttgctagaacatttggttggttagtttttgcaacttctgtttgttgtgattttttttgaaacttatgttgagccatatgttaagtgtatcctgcattctttaggaacaatgatccttgtgaagcagtggagcgcattgctagaggtatgtcactgaattcatttgaggagttaggacttagttactactgaactgtctatctatgtctcatatatcacataaccagcattttctcagggatgcgatcacggattgatgttggtgttatcgacaaggaaggaaaggatttgcattacttcatcaatgtagctgatgttcatttgtaagcatatcgtggaaattttcatctgtgattgatccctaatgatgcaaggttgtaaatctgtccttttgttgctcattacttgcaggagcgcaaaggcaggattttacgcttcaaaatacaagaaatttggaaacttgtgctacgtaattggtgccctacaagcgttcatgggccatcataaccaagatatgagaatcagagtaagcaaatttttttctgcgaaatcccttctgcaccgtagcaagtaacttaaaagcattctgttattttctcaggtcaatggaggcgaatgggaaatatatccccaggtcactgctctctgcgttggaaacgcaaaatactttggtggtggaatgaaaatcacacccaacgccatccctggaaatggaaatcttgaggtgcaactattcgttttcttcaatctcaaatcctatgttgggaatatggtagctcttgagtcttgacttcttccctgtaggttgtggttcttcaaaacttcaaatggtatgatttcgtacttaaacttcataagctgtacaacgggactcatctttcggtcaacaatgtgacttcaagaaggtaatatttttctttggcttcttctcattttgtcctttaaacgaccttagcactagaaaagtcaccacctttatgctacctctcttgtagtgtacaaagcatcgaagttgaagagattacagacagtggaagtatctatgtgcagtcagatggagaacatcttggattcctacctagaaagtttcaggtattacccggtgccatagacataatcagctgatcaaaaccgcagatttcttaggataaacttgtcaagtaaagtgtagaatacttcaactttatattcttcctgtaatatgattcattgtttagcgaatcagatttatgctcgtgttacttgtgtaactcgttactatcactatttattgtgtggtctctgttaaccacaaatagatactttaaaacattttaaagcaaaaagtcgcatctcctaaatcaatcaatcacacaaaattgaatcctaaaaatggtagcttctctttcctttcattccatcgccaccgttaatccaatcttctccggcgatggtggtcgttcaatcttccggactaatcgccgattcgaagcaactggagtgagttgccgaggacagaatcctactgacgagccgct

SEQ ID NO: 69987 - DNA, 347 bp, Arabidopsis thaliana landsberg
ggaactggggactgatccaagaacgtacgatcatgacgcgacagatatgtgtgagtgttggactttagaacatctgacacgagcgcgtttaaaggatgattcacaaacgacaaaggacttagagagatttgggatactcgatgaacgtgtagcttgatgactaaaagaccaagaggtaaatggggattgacttcaacatatgcataaaggccatcctgtgctatggtgattatgaaaacgggtaggctatatagagaagacgtccgacgtcttgcagaggcaaaatagctttatcatacagaacaaatctatctgagctttctgtcacattgtgctcaacttaaatt

SEQ ID NO: 69988 - DNA, 574 bp, Arabidopsis thaliana landsberg
  unsure (1)..(574): unsure at all n locations
gggaatgacctcccgctcgagcaccggtgcgtagggaatcggtgtgttccgggcgccgactcgcgcttccggcgcacgcagcacgtcggcgcactcctgcgccgcccaggccgcgatctccgcgccgacgccgccgcgctcgaccccctcgtgggcgatcagcagccgcccggtcttggctatcgacctgcgcaggccggcgtggtcgaacgggacgagggttcgcgggtcccacacctcaaccgagatcccttccgctgcaagcgtttccgctgcggcgagcgagtcgtgcaacgtcttcagataggagacgaccgtcacgtcggaaccctcccgatgcacacgtccgacgccgaactggatcggctcgacctcgacgacgtcgccggccgggccaccacggtcgccatacacctgcttgtgctcgaagaagatcaccgggtcggggtcgcggatcgcctggcgcagcaagcccttggtgtcgtcgggcatcgacgcgaccacgaccttgatgcccggcacgtgcaagaaccaggactccangctctgcgagtgctgtgccgcggtcgagccg

SEQ ID NO: 69989 - DNA, 517 bp, Arabidopsis thaliana landsberg
gcggtggaaatcttgcttttatgtaatcagcaactcctttagctctatcttcgtctttgctttgactaccgcaaccatctttataagttgaaggttcagggctatgatagccagtaacttcaatttgatagtcgataaacttaaaatattgtgtcgaattaaaataacccttcccgcctttaaggtaatttacaaagtggtctaactgggcttttgattcagtaaatgttccttcttctacgtcacctgctttaaattcagcttcatccattttatatttaacctttagatcaaatgacacatatcgaacatctaaaaggccttctatggcagggttatcatccgttggtttatgatgtaagtaatcgccattagtagtgtgagtatcatcccttacattcattgctacagcttgagtaacccattctgtagattttgtagatacctgatacatacgaatatatttatgattcatcaggcgctttttagggttcctggctaaaaacaatcaatgttt

SEQ ID NO: 69990 - DNA, 536 bp, Arabidopsis thaliana landsberg
  unsure (1)..(536): unsure at all n locations
tgcctggagtatgctactgtttgatgagtgttgggaaggggcgaggtgatgttcaggacggaagcgtgtgtatctgttggcgggacccctgcccacccctttggaccccttcggattcgtgtggcacacggatgccttgcgcttacaagcgatgcataccgttcatggatgaattcctccaattccagttttctggatgaaaccctcaacccaagctgcggcgctgatcctgctacgtgatgaccccctcacccccccacccccgggggttgccggcccgctaatccctatgcctgccggttgcctagcgtgtgccgcgcaggactgctgacacccattgtcgcccccactgctggtagctaccgctctatgctagctcccgctaacctgcacagccacggtccaaatgcagcctgcctactccgagccagctgcagcatgttctnnnnnnnnnnnnnnnnnnnnnnnnnnnnnnnnnnnnnnnnnnnnnnnnnnnnnnnngatcatgccgaacatcaagctagagaccgcaacgg

SEQ ID NO: 69991 - DNA, 484 bp, Arabidopsis thaliana landsberg
ggcgattataaattacacacatgcaatgaaacattggccaggcgaaatgaatcctattgaaaagtttagaaagtgcacacgagaacagattaatggaaaagaaattataaaagccgctatattcatataaaaaattaggagcttactctttgttgtggttgagataacgaaagtttagaaactatcatttaatgtcaattgaatatttgggaaaagtccaccattatgcgctatgcatgttattgcggccaacgaatcttacaaaacgcaagactgggttgatattctcgtgacacgagatccacccaaattattgtgtacccaaaataatgactgatatatgatcttcattgctcttacaaaagaaataagattgctttaaaatttactcgacagtcagtaggtaattgcacaaatcaaaacagagaaaatagtgctcgtaacggacaaagagtgtgagtcacagcgctttaactttatcggt

SEQ ID NO: 69992 - DNA, 536 bp, Arabidopsis thaliana landsberg
  unsure (1)..(536): unsure at all n locations
aacccgcttctttgtgttgtcctgctacaataaattcatgatttattttaccaacaggatcctctaagagcggggggggggcctttaacaagctgtggaccttacaaaatgaaagaagacgatgcaatggtttatcgaagaccttatcttacctcaggttcttctggttttgctcttaatgccataagcaggtccatgaagaaagaacttaaggttctcataaagcctctctttcttcattcatactgtcaaaaatcaagacttcaagttgatatctagagaattggcatttcattagaacttttacctgcagaaatatgcagaagagatgaggacatcactaatggataaaaactggaaaatcccgatcaccgtgtgctggggacaacgagataggtggttaagctatgatggagttgaagagttctgcaggagttcgggacacaacctcgttgaattaccacatgtaccggntactttctgatatatatctgtgagacattgctaaacaataaagctaacttggaaactgattt

SEQ ID NO: 69993 - DNA, 654 bp, Arabidopsis thaliana landsberg
  unsure (1)..(654): unsure at all n locations
tcgagctngctctctgacgttctaactactactcttctttaagttttgtctctttgctttttggggctaagcaaaacatttaacacatttgtttttgcttttcaatcagggaaaagcagtagaaaatagtttaatatgaaaagcgattattaatgtcacgtccttcatatatgacaattttgttttctttcttttttccgaaactgatactccctcattttaatgtaagaatgtatttattttgaaatgagaaagtatattagggtatcttcgacaagaaccctaactttaaaggtgacacatcttcaaaataagagtttgagaatcacttgttctaatagtgcatcctcaaatccatttatttgcattttgtataatggttttcaatattaataattaattataatgagaaactttcataaatatttataaatcattatgtgatataataattttcttaaaagtgatatgataacataaaattacatatctataattatgaacgaaacataaaatatatcataaaattatatctaacataccaaatcatatatataactagtatttccgcagagcctacataaatttgctcaatgtaaataagttttaatgtaatgtaatattcttatacattactaaatttaattctaatct

SEQ ID NO: 69994 - DNA, 259 bp, Arabidopsis thaliana landsberg
  unsure (1)..(259): unsure at all n locations
ggccgtggncggaacaaccgcgggacacccngacgacggaagaggaatttatgaccaacaatcccacgaagaccgagggcaacgatgacgggggcaacggggaaacgggccggccaccacagccgagaaggccgcgaccggggccaacggggaccccgccaagacggcggccgacaaggacgacgccgaaaccaagacccgccgcacggccaaccgcgagcgacaaacgaagagcccaaggcagaggccaaggcagacc

SEQ ID NO: 69995 - DNA, 523 bp, Arabidopsis thaliana landsberg
aaacccctattcaaaattaatttccgagagacgaccatatatatgctgtaatatactaatatacatacatattcttatggtttatttatgcatgatttgtcactagttataaatcgcagttagttgtttgcataactaaattagcaacaataattttcactcacaaaatttgttgcattattcatgttgacaagtttttttttattattatacaaaacttgtcgcgtagtttagtagccggatcatgtaatttgagacacatatgatataataataccatgtatgcttgactgaagatacgtggagacacatatgcagatgacttataacattatacatataatgatgtcttatcattatcactctgataacatgtggacattgacaaaatgagcttagagttagtggtcggcacacatgttttttttccattattgaatcaatgtgttctttacatcaagctgtcttcacagcaaaacagttttttttttctataaaacaaaaatggttaactagtacaggc

SEQ ID NO: 69996 - DNA, 254 bp, Arabidopsis thaliana landsberg
gagagcgaaaaaaagaaagcgagggaaagaaagagaaccagggaggagagaaggggcacgaagggacaaaacgaggaaagagaaaaaagtccaaggccgcggcgaagaagacgaagaagagagaaaggaggaaacgagagcccaaaaggctaacagacaaatcagaaagccaggcgatgggggcgaaacaagagaaagagggtggatgtggatcaggaccagctagagccaaagaaccaaaaaagagcggaagg

SEQ ID NO: 69997 - DNA, 510 bp, Arabidopsis thaliana landsberg
tgggtcttgccgcgggaacctccgagccaatggcatgctgggctctgatgtttctttcagccgcattgctcccttcccgaggtggcggcacttgcgatcggtccagttatggctgtgcatttccaaacacgccgaactgagggcaactgcgatttgcagcacaatatcggattgaccgagaattgacacgcccgatcggtggataaaacttcccaaaagcatcacaattgtaacgttagccaggatgcgagctctggtctcgacgacccatcactgctgaaccgcaacgcacagcgcatgtacatacattcactcactcatttttttccgaggcatcattactatatatcttatctagtaacggcgagcaaagtgcatccatcaacgtggtttgagcctatcctttatctggtttcaattctactccataccattcctcttctcgtcgacaattcaagcacgggggaagtcttaaagtttgtgttgagccgctgatacccggtgatgttg

SEQ ID NO: 69998 - DNA, 762 bp, Arabidopsis thaliana landsberg
ccctgattaacagacgtgtgtcaaccccaaagtcttaccattcataaacagaaatccacttacttatccatattccacataattagcctaccgataatgtactaattagcaacaagtggaaacgaaaataagtgattaaacattactattatggataaaatggataaggttacagaagacagttggggaattggtcggattctatgaacgaaccttccagcgccgatccagcccacttcaccgtttctctcaaccaatcacacagtttcactcatatattttaataataatcatctctaaggtattcattattttattaacaaaaatttagtggagacatatacaatattattattgcggaaactcggagttttgagggagaggtcagcaccgttacacatggcatgattcagcttcaaagattgtcaatttttgaaaactcattttggtgagaggtgggcagatacaagtggataacaaagttttttgttggatgataaaagagacagagagagacgacgcattttcctttattttctcgggaaaattcaaagttttcgaattttcttcctttctgggttttcgtcaaaggagcatcttctttatgttcttttgaaagaaagctctcttctctattcgtctcccctcttccggggagtttttaaattttttgattttttaggataaaggagattcctttacctcgattttttgcttttcatttttattaaatctccgatttttgatttttgggggaagaag

SEQ ID NO: 69999 - DNA, 514 bp, Arabidopsis thaliana landsberg
taaaagaaccacgcaaggcagaaaaaataccagcccctccatccagcgtcctataactgaagtattgaatgaaaaagctaaagaacaacgccaccgataaagctattattccaaactttatggcagaaaacttttttcgcccaaaatccccatatacccacagcataaaaaggataaatgcgccgaatcttccacgcccccccatgatcaaatacataaaggaataggcaaaaaacagcaagatatatctacgtttcgtcgcgcggtccccatatgccattccaataccaagaaaaacatataagactgtaatcaagagcgaaacgaagcgcgaatcgcccgtcccactttcttggtaagcgtaaagcgccaaatagccacctttgagtacatccaaaaatttaccataaaccatgaatccgacgctcagcgccagaaaaacccacattacattgagggaaagcgagagttggcgtctttccaaaatgtcaattttctcgtggcgcacccatcg

SEQ ID NO: 70000 - DNA, 508 bp, Arabidopsis thaliana landsberg
atatatcaccatgtgatacccattaatattaccatcatgattggaaatattatgatgctaccttactccaagaactaaaaatagagatattattcttttgggagcccaaaatagagatataactttccttaattacctccacttaccggtaatggtcatttctatttttatccccctttttatttccatagaccttaacttgaccaaaaggggaccttaattcaactcttttggtgatcccaaaaaaaaatacctattcaaggttaaaggtaatttttggccatttttaaaccttttaccgaaattgtgttttccttaattacctaaatttcaagtttttaagaattattttaatcaataccttctaatttacccgttacctttattttggttaatttattggcccctctaaaaagaattgaaaattaaggaattttaaattttaaaattcaaaaaccaaatccctccgaatttttggttattcattaagaattaaaaccattttcct

SEQ ID NO: 70001 - DNA, 602 bp, Arabidopsis thaliana landsberg
  unsure (1)..(602): unsure at all n locations
nnnnnnnnnnnnnnnnnnnnnnnnnnnnnnnnnnnnnnnnnnnnnnnnnnnnnnnnnnnnnnnnnnnnnnnnnnnnnnnnnnnnnnnnnnnnnnnnnnnnnnnnnnnnnnnnnnnnnnnnnnnnnnnnnnnnnnnnnnnnnnnnnnnnnnnnnnnnnnnnnnnnnnnnnnnnnnnnnnnnnnnnnnnnnnnnnnnnnnnnnnnnnnnnnnnnnnnnnnnnnnnnnnnnnnnnnnnnnnnnnnnnnnnnnnnnnnnnnnnnnnnnnnnnnnnnnnnnnnnnnnnnnnnnnnnnnnnnnnnnnnnnnnnnnnnnnnnnnnnnnnnnnnnnnnnnnnnnnnnnnnnnnnnnnnnnnnnnnnnnnnnnnnnnnnnnnnnnnnnnnnnnnnnnnnnnnnnnnnnnnnnnnnnnnnnnnnnnnnnnnnnnnnnnnnnnnnnnnnnnnnnnnnnnnnnnnnnnnnnnnnnnnnnnnnnnnnncccaaaaggtaaagttaaccccccataccccccctcttttggggggccccggaaaaaaaccccccttttggggcaaaaaaaataccccccccctatttttcctctttttttttttaaaaaaaatttt

SEQ ID NO: 70002 - DNA, 634 bp, Arabidopsis thaliana landsberg
tcctgttctttatttatgtatgtacactgtagatgtagtatatgtcaatatggattaaacatgaatttataatctttgataacatgaaaaaaatcaaaattagacatctatagatatttcttaatctgatgttttttttttttgtaacgaatatgaattccaaggccaaaaacagacgaagtatccaaagtttgaaagtttaatttacgtgaatggagaatatgtgaaaatggtggagaaactattgtgcttgttgacctttttctcttgtccaaaagattggacaaacgcatagaaacacatgcacgagtcctaattaacaatttaaaaagaatagagaaaacaataaaacaaaatgatgggatcacttaaaaacatctaaatcacaccgtctttctttgatttgtatggaacatacttttctttcaaccaagaacaagtaaccctacacatttcatttcttttgattataaactctttgtgtactcattgcctacatttatgctattatcattgctttttataggcttggactatattatttgcatattgccattaatatatttgaaaatcaaacatctcgcatataccatgaaaaagtttgttgcctactatacgctgttatgtatgatca

SEQ ID NO: 70003 - DNA, 372 bp, Arabidopsis thaliana landsberg
ccacgtgcatgtgtatcttaaatatctcaacacgtaattatgtatcaatacttgaaaaaaaaaccaacctcatataagttcctccatttgaaatcatttactttattccactccaggtcctctataagatccttcatgtcctcttctccatagtgcttcttatagaatcccttccaaaacttatcggtgatcggactaagatctgtgtctagcagaacaaaaacaacgaaaaagcataacttacgattaaaaaaacccccagcaaaacatacaaaagattaatcgtgccatataatgagaaaagcttgttacgtcagtagcatcctctatgtgcttcagctgttctagtgtacagtgttgcagaatctgctc

SEQ ID NO: 70004 - DNA, 615 bp, Arabidopsis thaliana landsberg
  unsure (1)..(615): unsure at all n locations
aaagtggctgtgacattataaaatactaaagaatgcgtgtacacggnnccgagatatttaatcctaatttacaggcttgctacaaatgaattcaatacactgctatttaaatattctgacaaacaaattcaaagttacgtacgcgttaggttttcactttgaattgtactctctaacttatgagatatttatatgaacttttcccaaacatcaccaaacattcccttatttaatccatatatattggtgaaagcagtgtaatagagatattagtacattatagcattgaaatatctagacctataccaaactcttgaaaacaagattgtatctttgtgcttaagtcctaaatgtcttgatgctttatggcttcgagaaaggtgagcacaaaatttacatcatctgataacaattcgtccattttgcacaaacgttttgacggtgtacggaagaaatgatgtttgaaatcaatcatgatagagactaacagtttttaaaatcggccaagatggatcaaacaaatgatatgtacactttttctctcttatacaacttaattaaatcattggatcctcttctaatattgcaaatatcatccatcttttatattaatta

SEQ ID NO: 70005 - DNA, 518 bp, Arabidopsis thaliana landsberg
ttcttaaattttggaggagggagccacctatttattttgaagatcgaggattttaaacaccttttttaaccaaggaaaggttaaattagttccacacttaaccacatttcttccaaaattgacaaccttcaccttatttttttatttggttttaaatgaacttaaaaacataaatgggaaaatggttattaattaagaagacaattctaagtgtaaaatagcgatctgtagctgcaatggttttctgaaatggtggaataattatttggttcgtatatatgatgaatagcgtacaacatacaaaacaatcagctggtttatatattaaaaataaaatgagaaactaagaaggccgcaatgggtaccagcgactaattaattaactttttaagtccccttcctaattttctttaaacagaaaaattaaaataattttattatctcatttatgtaaattagagttttttgttttctcaaacgcttgatgtcttgtttttttggttctttaattttattta

SEQ ID NO: 70006 - DNA, 595 bp, Arabidopsis thaliana landsberg
tattcttattctgtatttattttattgtcctcttaatcagtccttgattctgagagtgtcaataaacctatccccttgagaaatgtcatttttgacaagaaaatcaagaaaatcgttaaagctgctctctttataccgaaccggattttcatcgttaaccaattcgcgcggtacactcatcttatcgtccatacccaagctatgcaagctcgcgagagagattctcgtcttctcttcattcaaagtgactttatgaacgatgctcttgtataatccattgcttagaacttccacatggtcaccaatatggacctaaataaagaaaaaagagcgaagatgcatggtgattacattttttgttttggatctaaacgtttcaattatttctgtttacgtctaaaccggtacagttgaaacgcaccttaagtacacctgtgacttgtgggacaccaacccaacggccagatccaccgtgagccattggatcgaagatcttgagaccgtccaagttctgtagaaggagggtgatgcaactatagtctgaatgcggcggcaggcctagcgcccgctcagggtccggacaggggggatagca

SEQ ID NO: 70007 - DNA, 747 bp, Arabidopsis thaliana landsberg
  unsure (1)..(747): unsure at all n locations
agctgcttattgttggcgatcgactgctgctgcacgaactcggtggctgcggtgcggcgcttcagatcgtagagatcgaggatgcgatcggactcgccgtcgaggatgacgcgggcaagcttttcggagagattcgccgcgtcctggaaaccgccgttgagccccatgcccccgatcgggttgttgacgtgcgccgcgtcgccggcgagcaggacgcggccggtgcgaaagccggcggcgacgcgctgatgcgtcgtgtagaggttgcggtggacgatctcgtaaggtgtgtccgaggggaagaatttctgcagccgtgcctgcaccgcctcgtcgctcatcagctccgcctcggagagactctgatcggtcgggaagacggtgcgccacaggccgggcggcccgtcggccgagaccttgaagcaattgcaccattcgtcggggtcggcgaaatagttgcgcgggcaatagccgcgcgaggcgccgaaatcgaatggcgtcgtcaggacgatgaagcgctccggccaggtgaagccggcgaactcgatgccgctttgcttgcggaccgtgctgcgcccgccgtcggcgccgatcagataggcgccgctgtgcgtcgtcgtgccctcggggcccttgacggcaatggttacnttcgtcggcgcccctgctcgaccccgacgaccgggtggtcgaaccgcacctcgacgttgggcagtccccgccgtcgctcctcgatgagccgcgcgg

SEQ ID NO: 70008 - DNA, 770 bp, Arabidopsis thaliana landsberg
aaattgctggcacagaaattttctcgcaacaccgataatttcctgaagatccggcagtgggaaatctatttgtttagaaactaagtttacccacaacagaacttgagaaataacaataacaagtcttgactcttaaaatcatacctgtagtgcggacggaaatcatgtccccactttgatacgcaatgcgcttcatcaattgcaaaaagagcaattccatgagtctttgcaagcttctggagtggtttaatcagtctgcgatcaagttttcatctttctttaagcaaggaaaataaacaaacaaatgcacttgagaaaattttagaaaggttgtgttgtgtaccggaccactgtctcagggcaaacatatatgatctgatacattccctgcattgccttctcttctatgcaattatcaagttggcctgaaccaagaaaacaagcagagactttgtgccttgatagcttgaggcattgatcatgcatcaagcttatcaaaggcgaaattacgacaacaacttttcccgttaataatgcaggaatctggaagcaaagagatttccctgcgtgataaaaacatagaaaacacaattagaatattgttaacatcatgtaagaatgacgacgacatcagcgacgaaaacagaaactaccagatcccgttgcagctagaacaagacagtccttgtgcgcaacccatgttgacaaagcctctctttggaaacttctcagggatgaaataccaaacccgtttcgtagtatagaataac

SEQ ID NO: 70009 - DNA, 1376 bp, Arabidopsis thaliana landsberg
  unsure (1)..(1376): unsure at all n locations
agcttcttgttctgtcgccatcgcaaacaaactattgttttgaagaaattggtcgtttcaagatttaagggagttgcgtatgaatgttgtggaaagatctagaaattattaacgcagaagacttttcttcccatgggcctaaaataaattaagttgaagacaatgattgatgttatcgatatgcttatccattagcaaatatctatgttatatttttctctgactcaacgttatgatttgtctaaactctcctcattccagagagttatacttcaagacgacgaagggtgtttttgggaattttgaaggctgttgcacatatttatatgcatgatggtggataagaagaaaagaaaaagttccactggtttcggatctttacttgaagtgacacgattcactccctagtggattacacgtaaacatttgtgaagagtaagcaatgacaattgattcatatcaaattctcaaaagataaaatatgctcctattgttatttatcagttgaaagttttagtacatctttgtaatatacacacgtaaaagtaaaactaaactgcaaatctagtctacttgtacaacaaacaaacaaaatcaaatattttgtgaccaaagaatgaactcttttcttatgtacctgtggaaggacacgtgaaccaaaacgcaatggttgaaatatgtgcgttcacgttttaccattcgcggcagcaaagagagcgtttggtttcttggtatttacgccaaaggcaagtcatttcggcagggctttggtaatgagcaaccacataaccatccttgcatccatcactaatgatccttccatcgttttcgtaatgaggctcgagtccatgttttgtcagctcagctatccatatccccattgccacatcttctagcttaaacatctattcacaaatttcaaaaattttcacaatccatttctatgtgaatccggaaatgtgattgaatggagttagcatagagtagtacaatacctttaggtttccttctttgaaaagcttaccaaccgattctgctatgtcacgagatacaatgtagcctggaccatgcgcccatggtggatatttctcttcaggccattcctgttttttgagtagaaacttcgttaaatgaatcagaaatcagtctatttgcaaacatagctatgtcagattgtgttgtacctcataactgatgtaccatttgctatcagggtttcgaataggttgagagtcggaattgatcagtccgtatattaacccgcgagtgttgttggtcattgataaagaaagtaacacttcatctacacgaacaaaggcgtcatcatccgttntcatgatgaacttggctgagtcaacctctgtctgttaaaatat

SEQ ID NO: 70010 - DNA, 598 bp, Arabidopsis thaliana landsberg
ggcttgcagtcattagctattatccatcctatactctcagcaggatcaaccttatatccgtgccttttcttagcatcaatgatattattaaggaaccaaacactaacccttaaacccctttctttcacttcactcaaaagtcgatcactcgccacaaaatccccttccttgcagaacccgttaatcattgtaccaaaagtttccaaagtaggcataaatcccttcaacttcaactccttgaaaactaaatacgcattttcgatatcgcccagcttgcagtatccaccaatgattgtgttgtagaacacaatattcggaatacaacctttaccccatcgaccttcaatcagctttctaccttcttctacctttccttcattacacatacccttgaccaatatacaagtactgtaattatcaacactatcacctctatcacacatttcgtcatacaccttccgtgcatctccaagtctcctacttttcaccaataaactcaacaacgagttacaagcaataacatcaggcacagaatcatataactcaacaacataatcataaatctccactgctttacttaaacttccagattcagcat

SEQ ID NO: 70011 - DNA, 3981 bp, Arabidopsis thaliana landsberg
tttgccatccccgaggaatgtgggagtttatctagcaattatcattgctgcccccatgctctaatctaactcctttctacttgtttatatggataactcatatgggtaaaagctactacgacactttcttgaagagatatcatgaccgtgcaaaggagaagggttggagatatccacttatgggtatagaccacaatcaaattaattctacagaacgttttcaatagaaaatataatctaagcactgttctcttttccctactgcagttgcattgtcatactcgcctcaaattcttgaggatggaagtattcctgtaacacctaatgatgttttgatcgatgcccttgtgacaccttctggtgtggttcccatcacccctagtgctaccgagaggtacgccacaaaatgtttttagctgtctcttagatctgttatttatagctgactatgttgtgtgattctctctgttcttagcatgtgagctcaggagcttgtgtttggagctgaccctcagataatccgaaggtcggcgcttgaaggctacattctggaagttgctaatttagtatcagcttctgtagttgccactcacttcagtttttttactaaactcgatttgagtcttgtatgataaaatatgaaagaagattagtccaatggtctctcacctgtttattccatatcaagttttgtcgggtaataacaatctttttaatcgcataaaatgatattggctcttgggttcttttgttgagcttctcatggaaatctatatgtactcaaatctttattcaatgtaaaaacaaaatcctgaaaacagcaaagtttttcttgtctctttaaagcattacagccaatacacatataagagagtattacttttttctcttcctttctataaatggcaaaacaaaagcaggaaggagaagaactaggaggaacaagaaagcatgcagacgcctggcctgtaagcccaggcaggaggcaaccgagcatatttctccatccccggctgttcctcataaggacgtttcattagacggatcaaattgttgacttctgagaaatcgccttgttcagctgcatctattgcactttggcacagatagttcctcagaatgtactttgggttcactgaatccattcttgcttttctttcttcatctgatacctcactaccacccacctgcaaattcaaatccacacacagctaggagttgcatcaaccagaaagatacagggataaacagtgtaattgaactttgtggaaagtaaaatcatagtttaagaagaactgaagatgggtactttgggaaaaatgtaagaaaagaattgcatacctcttgtatatagcttctcatgcatttgatccatgcttcttttctctcctttccgatgtccaagagcacagcctttcaagggtttcaataactcattttcgggtgtgttgggatttgcttttacatttgcaagaagccggaagaagttggcgtaatcaactttatcaacagacatattgttcaaaagtttgctaatgacctccttgttatacttggtaagaccaagctctttagacattatggcttgatgctcatccatgaatttatcaccgtacctgaatcacgattcacgagtccctcaactacttggtagttcctcaaatataattaagaatagtgctccaaatcaatagggacaagcaaagttacctctccatggcgtaattcgcctccttttgatttatcagttgagcaaccgccagagtcttagaaaattgagcaatattccacaagccgatgtcaggctgatttgcaaaacagtatcttcttcctgggagatctgtcgtgtttggggtgtaacttggatcaaaagcatccaagaaaccaaatgggccatagtcaatggtttgacccaaaatgctcatattgtcagtgttgagcacaccatgggtgaaacctacaccttgccatcttgcaactaaggtagctgtacgctcagcaatttcaacgatccatgctaatataattaaaaaagcaaaagagttagttcgaatattggccattaatgtaacaactggcaataacaaaagtataataggtgatacaaatgaaaatagtggcgtttcatgcagcattttgacaaatacttcattagggaattacctgcatacttgttggaagttagatccacaaccgaatcatcttcatcaccggttttgaaagataggctatcgcttctatccatgctctctatatgtgggaaatgatgtttaatggcatagtctgccaacttacgaacaatatcaagatcctcttttcctctagaggcatgtatttggtatgacccaaagcgtagaaatgactgagaaaccctgcaaacgattgcgccgggttcttccttcggattgccactgcaaacgcacaatgccaaacaataggagtagtcaaccacctagaagcctaattttatagacaaaaatttctctactagaggcttagttcagtagattaaaaacttccatgtagatcatgcgcatgtgcagttcctaatcctatgaaacctaattttctttatatttggcggggacatgaactttttacacagaggaagaacataataaaggaaaaaattagacaaggtttggaatgttttggacatactcataaaacatgtcgcgagtcacattttgacctgtggtgagaagacaaagggcacgcgtggtagggatcccaagacaatgcatagtttcactgcaaaggaactccctgatgctactacggagcactgcaaggccatcagcaaaacggctatatggagttctacccgcacctttaagctgaagttcccatctttcacctttggagttcaaaacttctcccagagtaatggcacgtccatcccctagttgtccagcccacatgccaaactggtgtcctccatagcattgagcataagacattctgtagaaaaaagtatcaataactgcgattagaaactttggatttaagaaggttgagactaaaatttgacttgggtaaggaacacatacgctcctggtaaaggtttagcgccggacaacatgagagggaaatctggcctttcaaatctgaaagttaaaaaagaatttttgccataagtcaaaagcagaaagacaaaaaagagtttcgaaatggcagcagatataaagataaaacactcttaaaacttgagtttcacaatattataaagacagaaatgaaacaacttcttttgagaaacataagaatgtaaccatgaaggtgaattggaaacaacggtatcaattataacgaatacttgctatatctgtctaagaccgtgaaaacccaattatcttctgcaccaaacacttaagactttagtctgaccatagagaatcaaactcactctttaggatccaaatctaatagctctgcaacagagacagaccatgctacaagctgaggatcatccacttctactgatggggaaacttttgaatagcaagcatgtaatacctacacagtacaataaactatcaaaatccggatgctcaagttaaatagcttaatgagaggacaataatgagcacacagagacatgacaaattcacacataaggctttcaattttgtagtcttaaaatgagcaataagtaccaaaaataaaactttagcctgagtataatccactctaccaacaagtataaatatctacttcatgcttcgagaataaaccacaaaaacaaacaaagtattgacagagaaggaaaaaaacaaaattaagattgctcctattatctccgttgaagatcgaaacaaaaattgatacctcacgcgagataacatcggttctaggatcaccaggcaattccttaacaaaggaatggtcccagttaaaatcttcgagcttctttttaatcttaacaccttcatcaacagctcccagactttgattctgcagatctttcgctaaagatcagca

SEQ ID NO: 70012 - DNA, 382 bp, Arabidopsis thaliana landsberg
  unsure (1)..(382): unsure at all n locations
gccaagcagagaagcggcgcgagcacacgattttcccaccataatgcgaaagccagagagggggagaacaggacgaaaaaaaacaagcnaacccaacggcgcagggaagacnccgagcaacacgcacacaccagcacaaagcacaggagaagagcgaggaccggaacaccaccaaagagccccaaggggcagcgaaccaaggcaaagacacagggacacaagcnccaggaaggagcccaccccagggacaccggcaccgaaagaaggggaagacaccggncgaaccgcacanaggagcacacaacaaaccgccgncncaagcagcggcanaccacacccaccaaagaaaccngaagggaagaaaacaaaacagaacaacccc

SEQ ID NO: 70013 - DNA, 557 bp, Arabidopsis thaliana landsberg
atacaaaaaaaaaacgttttttccccataaattattcccactttaacaaaactatggtctatggctacttaattgtaaatactacttactactactggtattatagtaacccaatgatttcataagtttacgtgactagctctcttgaaggtaagttggatttagcaaaattagtaacaaaatataacataaagtctgtatttttcttagtaatactatatgtacagtttgaaaccaactatttaaaaatgaatttcagattagtttagatttgaatacatcattagattacatgcttaaaagttcttaacatcataagtttatgacccattgaaactaaactagcccttgttaagtgaaatatagcattgtaatttacttttttgtttaaatagatggttgagtttatatgaatgtcggcatacgtgtattttagagagaaagttttgattgtaaaaaaaataaaaaataaattagaaaactatttaaaacatagaaagatgactatatcagaataaaattctaagatgacaattaatttgctttatttacaagct

SEQ ID NO: 70014 - DNA, 526 bp, Arabidopsis thaliana landsberg
ggactgaacaatcgggtgcagccattgaaccactgcaggcgtgcccttttacttctccggagcatagatgaggttgaaagggcgaatcggcccacccagcaggtgacagctcacctggctgtggccatcgaaggcgaacgcatcgaacggtaacaatggccgcgatgcgacaccatcgacactgaggcgcatgccgtcaccctgcaacaccgtgatgatccgctggtagccggcgaagctggaaaatccgcctgatgcttcgatatcggcaatggaaagccgccagccgaaaccgtccagaccatcccccgaatcgcgggtgatctcttccgtgaaaccgccaccattcttccaaggcatgcgcgggtaatcccgagcgcgtaagcactgcaactggctcatttgctgaaacgtccttccaggcgatgacgggaaccggggtggatcaaccgcgcagcggtcaccggtagacgacccgaccaggtacggcggcggatcagcaggcaaggctcgccacgctcgatct

SEQ ID NO: 70015 - DNA, 511 bp, Arabidopsis thaliana landsberg
gaccaaccaacaaaactgcaggaaccaatggccgacgacaactatatggatgtgtacccgaccaaaggcacgcgacatggtcaaaacagtttcctttccatcctcaggaggccgagtaatatggtgtgcatcgcctatttatcatgaagattcattcttaatgaattcataatgggcttcactattattatctacgagagtaaaattcggtttactatttatctatgagcttaacctgacatcccatatccacaaagctcagcataaatttttgctcctcgtctttttgcatgctcatattccttttgtcataaccagaaatcaaaaaagtgtttggattaagaccaaaaaacggctgaggggatgactatccaagattccagagtttaagtaaaggaccataaaatcttacctctaatactataacccctgaaccttcccctatcctgcaacaccaaatcaaaaaagatggaatcaacatatacacaacagggtttattttcacataaac

SEQ ID NO: 70016 - DNA, 560 bp, Arabidopsis thaliana landsberg
cgtacatgcccccgccggcacgcgccgagcggtgtgcgccggcatacgcggttggatggtgtccatcagttctcttccatcgcagggtgtgcgccagcctggaaaaccgccggcgcaggctctgtcagacgcggtaagccgcactgggcatgggttgccacttgcaggggcgccttgacctcatcgggtagcggaatacggtgcacgttcagggtcatggcgaccagcgtgtagtagccgatcaccgatgacaattcgaccacgcccaccgtgccccagcgcgcatgaatgcgctcgtacacgtcttcctgaacgtcgccatgcagctgcatctgtcgggcgaaggtataaatgtcccaggcctccgactctgcgaacatcggtgcctcccctgctgcgatggcgtcgatgatcgtgctctgcaacccggccttggctgcgtcatcggcgtgaatatgccattccagctgcccattccagcgccgcgcagtgaccagtatcgccagttcactcaagcgtttgggcaaaaccgtgtcgtagcgcagtacttcgcccaggcg

SEQ ID NO: 70017 - DNA, 254 bp, Arabidopsis thaliana landsberg
aggaggatggcttgggataataagagactggctaaggaagttcagtctcataagatgaaggaacgtgcgattttgtagaaggataacattgtgtctgtgaagaagtggaggaaacagaggcagtagagtgggtttagtgataaagctggtgagcctgaacttgatttccatagtggaaagacgctccagagaggaggaggtaagaaaagaccatgtgtgtctcccggagatcgatcaggaggtaatggaaggcc

SEQ ID NO: 70018 - DNA, 449 bp, Arabidopsis thaliana landsberg
tttcccatggttatcattacaaattacaatttataaacagtaaacaaaagggtctattcagtaaaacggttttgtccacctcatccactaacacttctttcttatcttctccacttctctcctttagaatttactcgaaaggttggaccaagaacaaaaacaagactaatttcaagtgttatctagagctttatttctttggtttcaattttaatgtaatggtttaattttgggtctttcctcttttaacagccttgaatatattaagagtggagttcaacgaacagatcaaaaccaaaagagtcagagacttctcatgaaagatatacccaaggaccaccgacctgctaacttcctggagatttgctcatactccggtaccttatcattacccccttcttagtgatttgcccccgatctcttaaactttttgcttccattttactaga

SEQ ID NO: 70019 - DNA, 549 bp, Arabidopsis thaliana landsberg
atgctgcccacatgttgcgcagggccatcggtaccaccggttcgtcttgcccgcgttcggacgcgcgctgggggatgttctccaccccggacttgaacggcgccatctgcccgtccctggtcagcgcgccctgcgggaagatgcagaccagctcgccctcggccagcgccgcgtccaccgcgtcgaacgcgcgctgcatgatcgcggggtcctcgcgcgcgccggcgatcgggatggccttggcggtgcggaagatccagcgcatcaccgggacgttgaacatccggtagtacatgacgaagcgcgccggccgtgggatgctggccgacagcaccagcgcgtccatgtagctcacgtggttgcacaccagcagcgccgcgccctcgaacggcacgtgcttctcgatcccgtgcagctccagccggtacagcgtgcgcaccagcagccagctgaggaagcgcatcaggaactccgggacgatggtgaagatccacaccgccaccagcgtgttagccaccggcagcgccaggaacacctgcgggatgctcc

SEQ ID NO: 70020 - DNA, 470 bp, Arabidopsis thaliana landsberg
  unsure (1)..(470): unsure at all n locations
accgggccggggacggagaacccgggaacacaaccgagacaaagaaaaaagagacgagccaagaagattgagattacaggcagaaccacgagccacaaggcagcnnnnnnnnnnnnnnnnnnnnnnnnnnnnnnnnnnnnnnnnnnnnnnnnnnnnnnnnnnnnnnnnnnnnnnnnnnnnnnnnnnnnnnnnnnnnnnnnnnnnnnnnnnnnnnnnnnnnnnnnnnnnnnnnnnnnnnnnnnnnnnnnnnnnnnnnnnnnnnnnnnnnnnnnnnnnnnnnnnnnnnnnnnnnnnnnnnnnnnnnnnnnnnnnnnnnnnnnnnnnnnnnnnnnnnnnnnnnnnnnnnnnnnnnnnnnnnnnnnnnnnnnnnnnnnnnnnnnnnnnnnnnnnnnnnnnnnnnnnnnnnnnnnnnnnnnnnnnnnnnnnnnnnnnnnnnnnnnnnnnnnnnnnnnnnnnnnnnnnnnnnnnnn

SEQ ID NO: 70021 - DNA, 457 bp, Arabidopsis thaliana landsberg
catgcggaatacgaagtgattgtagatgctgaacccaaatgtgttctctgtgtcaaacacatagcctacttaagttttttatttaatataaacctttctatttatcgatcaaaccaacaatatcaaactggagcaggaccacctaaaccaaaagataatatgtgaatatgattacaaaatgtatgtaagcctttttgaattagaagttatgtctttagctggtgagttggttgtatgtgttttcaacttttcatgcacaatctggtgattgttcaaaattaatattaactcttttatttgtctcataagagaaatatgcactcatgatagtaaaactgaaattacagctggaaaaaaagctgttgctattctacttcaaatattaatcatgtgtcatctaccggtgctatatcttgtcactttgattgacaaaaattaaaccgtaagtgaaagtcat

SEQ ID NO: 70022 - DNA, 578 bp, Arabidopsis thaliana landsberg
cttgaggatttaaagtcttgattgttcattgtaatatattagtagtaatgtatttgattaaccaaagatgacttgactctaaatgatacgaatatatattactaaatcgggattttgaaatgattttaggcttttgactctttaagtcataaagatagaaagacttagttgttaagatttcataagttttgtggcagacaacgactttaattactagacattgctgtgttctgttttctgtgttgaaattaattacctactgtcataaaagtcgttagtataaccgtcacctaggaacagtagaaaattatactagtattactttttttttgggtatgttaagcttgaatacattgtccaaaaaaaagttgaatacattttgacaaatgacaaatcttttcaagcactgcagatatcctgcaacatatatgtttgtaggaaaattggtagaaaaatagaagatattcattaagaaaaaataaccattagaaattttgtagaaagtttcttaccattttctaagagacgtaaatttataagagaaattcaaattattttcctacgaaatgtaattcgta

SEQ ID NO: 70023 - DNA, 461 bp, Arabidopsis thaliana landsberg
  unsure (1)..(461): unsure at all n locations
gcaggttgntattgtacacgtgtatattgaacaaaatctttggtctcaatctaaaggacaagaaaaacttaacgacaattaatccctaaattaaatgcgtatttgttcatgtgcttggtatacatgcatgttggattcaatcttgatcttataaaatacattcttatcggaatcttgcaatcatttcatgtatatattgcgaaaattgtaaaaatgttaagtagattgactataccacaaaagttttagaatgtatgaccctaaaaagagttttttttgatccattacttattatgaatttgttttttggccaacatcttaaaattctttatgttttccaataaaataagatttattatctataacacattaaattcctttaagctatgtacatactatattgtatactaaaatatttttgatgatcacacatttaattatacaagatagatgcatactct

SEQ ID NO: 70024 - DNA, 549 bp, Arabidopsis thaliana landsberg
ggccgatcggcagaacgtctataaccagagggcagagtgggcgccttgttacttctatgccacccacgtactgtccgggtacgcaatttaccaactgccctttggacgcggtcagcaattcggtggaaatagccgcaaggctgtcgatgaagtgatcgggggatgggaagtgagccccatcgtctccatccgtactggctggccactgcctggacctgggggggctgacaactccggtaccttcggtcgtggaccccgagcggactgcttctccttgccgcccatcgtcaacacgccgttaccaggaataggccaacagtggttcgtcaacaatggaaatttcgctaacgcggcgctcggtaccttcggaaactgcgcagcgcaactcggaggtctgcgaacgccgcgttacaccgatgtggatgccagcatacataagaacttccaaatcacgcaacggtttcgagtgcagttccggaccgacttcctcaaccttttcaatcaccctcaattcaatgctccgaacatgggtctgggatcgacgatggg

SEQ ID NO: 70025 - DNA, 412 bp, Arabidopsis thaliana landsberg
  unsure (1)..(412): unsure at all n locations
cagaccgaanagagagaccgaaganagacagggcgatttccggcagatgaggacgcncgagacagcccgagcaccgacgaacnagcacagggcnaagaaaagaacgcccaaggccgaccacgcccancaaggggcgagggacgcacggcggagcccggggcacacaaaaacgggacacaagcacggccgcccagcgaggcaacccagacccgcgccacaaagagaccacggcacaaaagcaaccgcagaagggaaaaacaacacgcccaaancgccaaaccaacgcaagaaacaaggcagcacagacacacgcgagaaggccgaacgcgagagggggaacgccaacaagcccaccggagacnaacaccccnccagagaanaagccgagacgggncgcgaaagaaagaacacc

SEQ ID NO: 70026 - DNA, 465 bp, Arabidopsis thaliana landsberg
  unsure (1)..(465): unsure at all n locations
tcttcggtgattccgtcctgcgacagccttttctggacttcatgcagcacctccttgggagcgacgactccggggcgnattgcccagattctctcagcgttgctggccaaagcgatgattgaggcaaaaatcagcggccagatcggccaaccggccgcgacaataatttcccacacgagcgctgctcctaaagatatctaaagtggcgttactttagcgtgcaaggcctttttcagcaagacactccgcgcaatccgcggtcacatcctgccaataacgcttgcgcatcacgcgccatcgatcgatatggattccgtccacggcaaaatcgagcaggatggcaccgtctcgatccgaacggtatgtatggatccccctggtccgataacgctcgaccaccgccggcttcggatgcccgaagcgattgagataaccagccgtgaagatcgctacgccgggctggac

SEQ ID NO: 70027 - DNA, 185 bp, Arabidopsis thaliana landsberg
tcacgtgtggtcatgtatggtgcgatgttgtcaggtatgactggttggcgactgccgttaggaaatcggtcaggaatggtcaggagtggtgcgatgtttgtcaggcatgggcggttggcaaatgccgccaggcatgcaacattggtagaaaacgggcgcatcccggattgtaaaaatgcggtgag

SEQ ID NO: 70028 - DNA, 596 bp, Arabidopsis thaliana landsberg
  unsure (1)..(596): unsure at all n locations
gttgacctgaccgtagacctattaatttctccatcttcttcttcttctgcgtaatttgctcatatgtgggtgactcactcgtgaaggtccttgtcttgtttccatccgtaaacaaatgtggttgatctttgacggttctctcggtgagtgaagctaacggcctaattctctattttcgagaaacagaggacatataccctagaggcagattttactaggacttatccatggctagcttactagaaaatttaatctgtcaggagtcaggactacaagagaagaatgaaacaatttgtgaagtctctaagtctctagggggtagtggatggttacataatacgtaagcacacggacggtggaaactaaagtttgatcattcctataatcatactagaaaactgtagaaattatccttatttgcatttcataatgtggatttggcttcatcttgggttttatgtaatcaatgtgtattgggatgtggttgctgtgcagaatgcagaccagatccggaaacatngcagaatggtgctgttatcatcttncctagggagacaagcatgctagattgacatagactataccacgcgttcgac

SEQ ID NO: 70029 - DNA, 521 bp, Arabidopsis thaliana landsberg
gtaactttttgagggccacagcttttcttaattaaaaaaataagaaaaataaaagctcaagtgacaatcagtttttgaaaatgatactaactaagctcttaacatttttacgcatgtatataaacattaatcttttatttggtcttaaatacaaagcatatatatgatgctatcaatctaaatggtctatttgtacataattaaataaaacttctttaaataaaacataaaattaaagcctgcgcatacaacatgtctacagccaaaaactacgttcgtttatatcaaaatcaacatccgaatactacatgttctcttctcttctatttggcacttatagacgcgaaaggttagaaccggcgggaaagtaagacaccataatcggagctctcggggatttgctttttggtttctttgaggacaggactttcaagtcactctcatcaggagagctaatctttgagtctgattttggaacaaagcaatcaaagacggaggcaaagagagaacacatgatcata

SEQ ID NO: 70030 - DNA, 498 bp, Arabidopsis thaliana landsberg
  unsure (1)..(498): unsure at all n locations
gttcttcgctgtttccttttatccactcttgcctgttcccagattcttgaatgagatactacgatgcgtttttcattgcggtcgaattcgatcaccatgaactgcgcagtttcatcggcatttacagatttgccatcttcttttccgagatgacggtttggcgcgaacccttccaaaccatacggcaattgtacgattgcacctttatcatctttgcggatcacagttccttcatggatgctgcccggagcgaatgtatcctgaagcgtgttccatggatcttcttcgagttgtttgtgacccagttgaagtttcctgttgtccttatcaattccaaggatgatcacgtcgatgtgattacccactttcgtgtattctgagnnnnnnnnnnnnnnnnnnnnnnnnnnnnnnnnnnnnnnnnnnnnnnnnnnnnnnnnnnnnnnnnnnngttcaacaaacacaccgtaaggcgtgatgttcttaacgaggccggagtgg

SEQ ID NO: 70031 - DNA, 419 bp, Arabidopsis thaliana landsberg
catctcgtctgctgaatgccaaaagaactgaactagcatcgacaatggggtactattacatctttcgattactatgtacagtaagattattattgtggacatcattatacaagatgtataagattttcctttccttgacatgtccaaaacattatcttcacgtattcttatcgtgatgatatttaaaagagttatgtgcttatgaaagctagaaaattcacatacatattaattatcagacaaaccccttatttattataaatgtaagtgaaaaactatctttataagcctagggattgatattagatgtcattggacgactacacttgttggaaccattttccctacaaatatgtttactattgtattctgtaccaaatctgaaaactgctggatctgtggaaagacttaatagcaag

SEQ ID NO: 70032 - DNA, 103 bp, Arabidopsis thaliana landsberg
aacgaacacaaacccccccgacacagacagcggcacaaacgaaaacagaggcccccagacagcacaaacaaaccccgaaagcaaaagacaccaaaggaacaag

SEQ ID NO: 70033 - DNA, 560 bp, Arabidopsis thaliana landsberg
  unsure (1)..(560): unsure at all n locations
tctacgttttatcggtgaaagtcaacggtttcacacatccctttacctaaacagtttttttaaaaggggggaaatggttttgctgaccaatatcgtcttcttcccgatctctcagcttcttccatttacaattctaccctttgcctcttggaacctttgaacgaaaatggcggaaacgatcggctcaggtacatctttcttttacttcttcacctttcttaattgaatctttcgtatgtcaacatgcgaatgttctggaactaataatgtatggacgatatcgattgattttgtatagtgattgattttagatatcgtcaaaacctttagtctttaatttcgcagcgtttttataattgtgcagaggtttcgtnnnnnnnnnnnnnnnnnnnnnnnnnnntcgtcgcgggtcatcgtggtttggttggatctgccattgtccgcaagcttcaggaacaaggtttcaccaatctcgttcttaaaacacacgccgagcttgatctcactcgtcaagccgatgttgaatccttcttttctcaagagaagccagtttatgtaat

SEQ ID NO: 70034 - DNA, 278 bp, Arabidopsis thaliana landsberg
tttggcataagagctttgtatacttccttgtgatcatcatcaaggctaataaatgaccccattatctatactcatctctcgtctccttcatatttatagaagaaaacaagaaaaagaaaagtagtgacgaatgtgtaccttttttttttttttttggacggtgcaatatttatgcagctgtatatgtaatttgactgtgatttaaacgagtcattttgctctcattttcatttttctgtaaaatcattgggaggtgttcatggcctactggggtgggg

SEQ ID NO: 70035 - DNA, 296 bp, Arabidopsis thaliana landsberg
  unsure (1)..(296): unsure at all n locations
ggatcaggaaaacacaccgaaagagagacgccaccaacagcaccagacctttccacccattaccaaccagccccgacaaggaaacccagaggaccaaacacccaagcgccccacacngcccgagaacaaganaaaaagagacgcgaaaacgggcaccggagcggacaaagccggaagccacaacggcacgcagagcacacagacccnnaggcccagggcaggaaaccaaaggagaaagacccagaaagagaacagcaaaggggaaaagcccccgancaaaagccaagaacaaagga

SEQ ID NO: 70036 - DNA, 816 bp, Arabidopsis thaliana landsberg
aggacccagctgccgtaaaacagtatgcaaatgtaatgaagaccatcaggcaaaagtaggcctcttattactcttttctagatgtttgttatttagcttgaatgttgtatgttgtggtctctatttctgtttgttaggattgattttacttttcgattttcctgaatcgaatttcacatatgtgccaatgctgctatttaacctggttaatttggttgcttgtcatccgttttttttggtatgcagggcagacatgttctcagaatctcaacgcattaaacatgacattgatactgagactcaagacattccagatgctcgtgcgtacttgttgaagttgcaggaaatccgcaccaggtaggtgttacttcgaattatttgcagtcatccttttgggtcacctgtcaacttgctcttctaatgttactggaattatttccctgtaatatcatgaatgtgattgttaagcagttatttgaaaactgcattaaactatttattttttcatctcccactttgctattgtttgcaacatatgaagaattgttggaagcagtctttaattatcctcccacttgtgatatatcttgcaggagggggcttactgatgagcttggtgctgaggccatgatgttcgaggctttggagaaagtcgagaaggacataaagaagcctctcctgagaagtgacaagaaaggaatggatcttttggttgcagagtttgagaaaggcaacaaaaagtgcgtcatcattcttcgaccacccatacaaaacacgaacaaatgattctcattgctccttgtatatatgttgact

SEQ ID NO: 70037 - DNA, 869 bp, Arabidopsis thaliana landsberg
  unsure (1)..(869): unsure at all n locations
ttggatgagctaaagagtgatgctgctgaagctatggaatcacagaaaaagaagtgagttttgttttgttttctttttttggtttctcaatttatcaatcattgatcttactcatgtcataacgcgatggaacttgcggattattcagagaggaattccaggatgaggaaatgccggacgtgaagtctctagacatccgtaacttcatctaaggtttgatccttagaaacatttgatttgttgtaagaaaaggcaaagatctctcacttgattgtctttgaaagagaagatcgttcccttgctgctgttttggtttggcgttcaataaggtctctcacctggatttgagtctaactctctctgtggttattacgcttgagattcttagacacaaacgttgtttcatgtttttttgataatggtgataactggaatttgagataattaataaagtttatgttaatcgaatcaaaagtgtggcaagcaaaatcaacccgaaaaccaaagaccaatcataatcgaaccgagcccatttcggattcttgtacattctagatgaattagaccaatcataatcaaacacgtggcttgcctgtgaacaattataatgggtttgtctgagagacgttaacaactgttttcttcgccatggcgacgattcctctcaaagctccttctcttcctggaacgagagagtgttctcccttccttaaccggttcgtcactcgtcaaccggttaatttcatcggaagtttcatccttccttagatgaagcatcgttctccagacggngacgaaccactgttgttcgcgttttggagacggagaagagtacgaaatagagaagcctgagcctccggtgaaattga

SEQ ID NO: 70038 - DNA, 327 bp, Arabidopsis thaliana landsberg
tacagtaaattaaagtggaaaaataaaaatatgatgtgacaatgatgagttagattgtctgtaccaaacctgcaacttgtaactgtaataagaaattattaatattcttctttttgttcaccaacaaagattgctaatatttatcctaatgaatagtaaatcttattttaattaatcacatgacaagacacggtggaaatggattcggtagcctctctactagttgattttgcgagactctgagacaaaattgtgagcaacagaaaagaatttgctttatcctgttctcgttattggtttaagaaaaaattatgaaccttagtattt

SEQ ID NO: 70039 - DNA, 600 bp, Arabidopsis thaliana landsberg
cgataaagtttgcgctttccgttacagaccgaatatcgttaccgatgatagtcagggcgattatctggcagttttggatgtttgagacagcccgagttcctactaactagcacagtgctttgaaaagaatgtttaaggctgtccacgcccttcaaggtgtgagggacgcatggtggtgtccggggtatataaaattgtttcacaagttttgcttctcagcgtggtatttctgatctgtgccacaaagagtccacggcacaatagcaacctcagtatgtaaaatcaacatgtttaaatcgctattccttcgcaagattcatggcagcactgatacatgcgagatggctgaatgcttgaggggtattgccaacttgttcaccggagacattcacctcctcagagaatatgccgagatggtttgcgaaagaaagaacattgtcaaagtaggtggaagctttgtgatgaagctcgatgagaggcggatgctctctcagatgcactttcgcccgtgaagcctgtttaaagtatgccatgatgagcttggctttcttcttgatcacttccactattcactggggtagggataaacgtacccgactc

SEQ ID NO: 70040 - DNA, 333 bp, Arabidopsis thaliana landsberg
  unsure (1)..(333): unsure at all n locations
atcatataaccnaacttattgaaagaaagaaaaaagttatttggtaagctacagggatatgtgtctgtcaatgatgtcaaacttttctatgtgagaaaagataaactagctggatagatgagggtatatttatgaaaagagaagtgaaattaattgcttgacactaatgatttgtgtatttttcatgtcaacttcgcgccaactgtggaatttcacggaaaatacagttcactaatcacactttctcttgttcaaatttattattatgaaaatagaaaacaaaacacggccccccactaggcatcttcttggattttcttttatcaccttcta

SEQ ID NO: 70041 - DNA, 390 bp, Arabidopsis thaliana landsberg
  unsure (1)..(390): unsure at all n locations
cccgaccaccgagccacccgaccgagccgaacaacgagttaacccccgtgttaagaancacggcagcagcgccgaccaggggcgtcaaggcgggggcaccagaaggccccggccaggaccgcgcaccaccacaagagagcgaaggccaaaaaggcggcgagcggcagcaccaaaaagcgaccanaaggcgcgagcagaacaacggccagggcggcggncgggaaaaagagacgggcaaagccgaaagacaaagagacngagccacaagaaaacacggaacgagcgggaaccacaagggacgaccnggcgaacccccgnanccggccaacagaaccagggcgncgggaaaaggaaaaaagancgccccggggagcaccaaacaacgccaaa

SEQ ID NO: 70042 - DNA, 323 bp, Arabidopsis thaliana landsberg
ttgcgccgttcattgccggtgccgtcgatgtccgacacaccggtgagcagcaggttctccagattggcgcccagggtccaactgaccgaggcttgcaccgtatcgatctgcgatgccgaggtgttggtttccaccacactgtcgaaggcattgtcgaccacgtagatgtcgttgccgtcgccaccggtcagggtatcggcacccaggtcgccatccatggtgtcgttgcccgagctgcctaccagggtgtagtcctggtcggtaccggcgatcatcccccctggttctgggcgttgtccaaaatatcctgcacgctgttgttg

SEQ ID NO: 70043 - DNA, 548 bp, Arabidopsis thaliana landsberg
  unsure (1)..(548): unsure at all n locations
tattcattgtctttcttgtttttttttaggataaattatttnnnnnnncgnnnncacttcatgcttagcttagtttaaacgtctcatctataccccacccgctgtaaagttatatagttatatacatccattcaatgccttggtttttttggtcggaggctgatagctaataatgtgcctatggccgatctgataccccataaaagataatgtcatcttttattgtagacaatggatcttaaatatttgactatagctataaaatatgatcttaagcggatttaatctgtcgacatatttcatgaatatgccatgatgacaacgttagtgaatcccaagaactctgcacatattatatacgtcaagaatgatggtcagattgtacttaaagaatgatctgagaaaaaatatttgttttgacacagatccaacatattactctatatcttagttatggactcctcatagctggtagaagtatagagttttattctttaattagttttgaattcttttttttttttttttttctaatccgaaatttagaa

SEQ ID NO: 70044 - DNA, 2606 bp, Arabidopsis thaliana landsberg
catgtgagcttgtatctaattgaaaatgggagatagcaaaataactataaccaaggtcttcatatttaccttctcatctgtttcaaaatgttcaagcttggacaacttccctgttgtcacaatctcttgaatctgccaaattcaggtagaagaataagactttgttctcacagaaatacatcaaaacaaaggttataggtatgcactaggaaaagggtaagtgtttgcagttttgacacccacacacagaacctagacaaaacatttgaagcatttctcaacttacatgatctctcattgcctttccgattccagggaggtgtttgagctgatcaacgctttcaatcctagtggggaacttttcaatgacggggatagctttgtaatagctaaaggaccgtctatcttcacccaaagcttttgaaaaaaaagaaagagtattgttacttacttactataagcgagtagtctagaatacaaacaccagagattgtacctctatatatgttaattaactttccaaatatctcagtgatatttctgttcaaatcgggtggtttgtacaccgatgtggactacaaatcaaaagaagatcaatgagaacttccaatatcaacaacattatttctttctgaaaatgcagatatagaaaacaggtttttgtttagttaacttctaagaaccaaaaggatgcatcagcaaaggagtcactcaggcttacctctgattgtggactagtgagagtctctacgatgccttctccaggactggcgctagtagagggaacactgcaacttgttggtgaatccggtgatccttgtgtattgctatgactttcaacgcctttgaagtcaccagcatcaggagaatatctggttcttttttgaggtgaagattgatcctcgctaccacttattgcaggcaaagacttattcggcttatcaacttcttctgagtcaattttgagaacatacaaatcttcattagccttctctcctgaagttaggctatcttctaaccactggtaaagcataaggcgctgcaaggaacaaccaatgtatataaacttgtaacactggataatctctattcgtagattaaacttgtacccaattaatctaatcgtagagaaaactcatgaacaacacaacagatagttataaaagattgttttttctatatgacgaaatccattttttagtaaaaactgaaaagaacgaaaaacgaacttactgctgtaaaatgcgagagacgttctttcccaaatttgtggagaagagcttcgagattcatggcaagaacatgagtgactttcttcgttacccgatcttcttcgatcactgcacccatttgaaccagcttctgcttccagatcttcattcaaatagagagaaaatgacagacatagcatgcaacaattaaaaagaagatgttaaggaaatttgtcgaagatgatgcaagtaaaataacactgaacaaaattttcagagtaaaacctgcaatcgacgacgctggactccgatttcaaccatgaaaactaccattccggcgaacatcccttccgggtccggagacggcgaccggtttctccctcgctttgccgccatttttctcgctttactcgtaactcactcgagttttgtccaccaaactagtatatgtctttcaaagcaggaataccccaattaggcaattacgctcgtttcaacgaaccgaatcggaaccaaaccgaaataacctgttctaaaccgaatgaattttttcctcattcaacgaccaactttgacttaaaatgcctctcttttgttagtcaacaccatttttcatgaaaacttccttgaattaaaattaaatctcaccgtaaggaacaacaaatgttttatctctcgcttgaatcatttcaacgtcataaataatgaaacaacaactaatggtgcaaaattacagagtgacaaagtcttcttcacttcaatgtctctcctagaagaaaatttctacttccttttcagtcatctcaagaacatgatctctagcatccgtgagcgcactctggataacacaaaagggaaatttctcagcaatgtcgagcgaaagatttgattatctccattgcaccatatgtttcttacctgtccaaacttggtgatgaagttgttcccaaggtttatcgatgtaactgtgacatcttcattggccttcaatgcttgagcaatggcgaatgctccatcatcctacaaatgaggcaaaataataagattgacctgcttacaagtcttaaaagaagacacagtattgataaacgaagtagggctttttttttacccgtatttcattgaatcctagatccacagatgtcagagcttcattaactactttcaagcttcgagctaagcaggaagctccctgcaaataacgtaccacatacattatgaaaacatatagttcgtagctatattagaagtacaaatctgatactcataaaatctgtctgcaggaacctcatctctaagtccatttgcccgcaagtccaaaaccgagattgtattgttatatctcaacatgtctgcaacatgttcagcacccttggcagctatctgcaggagata

SEQ ID NO: 70045 - DNA, 264 bp, Arabidopsis thaliana landsberg
  unsure (1)..(264): unsure at all n locations
ccaannnnnnnnnnnnnnnnnnnnnnnnnnnnnnnnnnnnnnnnnnnnnnnnnnnnnnnnnnnnnnnnnnnnnnnnnnnnnnnnnnnnnnnnnnnnnnnnnnnnnnnnnnnnnnnnnnnnnnnnnnnnnnnnnnnnnnnnnnnnnnnnnnnnnnnnnnnnnnagaacacgcgacgcagaaatacgataagcacagatgaattcaaaagaggcagggataagtaggagtaccctgagcttccaaggcagtagagacatgcaagcg

SEQ ID NO: 70046 - DNA, 316 bp, Arabidopsis thaliana landsberg
acacacacgcactagtctccatccactatatatatatttaattcgacagtactcactctctatttgtgagtgtgcacgcggacgtgtacatgtcgtagtaaaacggtacatatggtgcaaatggtgggtcactctcaacactattgtaaagctttcttgtgtgtgcatgtgtcaacaactggctagttctaataaatctacgtcgaattcaatattaatcaagtttctatttatgaatgtatatatattatatatagcgatgaatgatactttgctgaaaggcaataattcagatgaaagtgttaattaatttgag

SEQ ID NO: 70047 - DNA, 263 bp, Arabidopsis thaliana landsberg
ttgtgtaaaccagagtgatccacatgtttatttcatatatatgagtcgatctctaatacctctatagtgatgtaccatatatttagattaaacaaaatgataacatatatttataaattatctttaaaaacaaaaattaattatttttaataaaattataagtctgcctaccgcagttaatatatattttttttgtcaaagacaaagttgataactattccgttattattacactgttgcatgtcgatcacatcaataaacgc

SEQ ID NO: 70048 - DNA, 395 bp, Arabidopsis thaliana landsberg
  unsure (1)..(395): unsure at all n locations
aaancaaaaagacgaacccccgagaagccccggacagaagaaccaaaggtccaaacaaaagctcccgagaacaaaaagcggaagccgaaagaagaagacccaagaagcaaacgcacagagcacaccaaaaaaaggacgaaagacccccaagcgggagaaagaacacnaaggaaccagcaganacaggaaaaacaacaaccaggggcaaccaaggaaaaccacacgcggcaaagacaagacacaccaggaccaaagaacgcgaacccaaaaaaaanaganaaagaaaaaaaagccaacngcnncgagaacgagcacgggccaagaaaaaaaagaaaangcaccccaaagccagccaaaagaggggcncgggaacgaagcaaaaagccagacccaca

SEQ ID NO: 70049 - DNA, 269 bp, Arabidopsis thaliana landsberg
aaagggggattagaaggaatgaaaccaacactactgcgaggctggggggaaacataaatataaataagacagacgaggagaatgaacaggggcaatacacgaggatagaaggagtattttacaaatggaatcggaaaacacaaggggacatgcattaattcatcgaaacaatgaaaaaaggagctgaacaaataagaccccatcggacctaaaaaaaaatactaaggggcactaccttcaaaatctaaaaatcaaggactaatataaaa

SEQ ID NO: 70050 - DNA, 311 bp, Arabidopsis thaliana landsberg
ttattgcacggggggggccgttttgttgaacagaaaagatggcgatgcttgacaaaaataaaattgaagatgtcgagatttttagtattctaaagtggagctctgggtgctaatagcagccatataagaaaaaacaaaagtgagcttttatccgtgtttcacgaaggtcaaatgcgaatggtaacaccaaaatatccggttttcatctacgtttttatttttgttcatgcaccaaattgacccacaaaaacatatatacaacaatcgatatgtacaagctgctgtccattgattctaacttgatatataga

SEQ ID NO: 70051 - DNA, 143 bp, Arabidopsis thaliana landsberg
  unsure (1)..(143): unsure at all n locations
agcggnccaaaacctccacagccgtgaacaaccagagaagacacacacatgtcaacacgacccacagattttgcacaacccgnccacatcaccaacagcagacgcgaatttggcgaacatacaccgccccaaagacgcctaaa

SEQ ID NO: 70052 - DNA, 598 bp, Arabidopsis thaliana landsberg
  unsure (1)..(598): unsure at all n locations
cgtgaatgatcttttttttttgaaacatcgataattgaatgtcaaatctcttaagtataaaagacatgtcaatttggcggcaaacttgtgcaaaggaagaagttggcctaaaagattgattttgggtcgccctcatctaacctcatctgtggttgacctcagcacacacccacattgtcgaccaccaaggtaacttcataaatcataaccaagcctgttgtacaagctaaaatcttaattgagaaccgtgctacgagcgactgcaataattgtctagactatgacatagcggtttagatatgtcacagtttttaccacttttgactcttatcgtctctatgttttcattagggatgtgcattttgaccgaacctagccaaactgaaccaaacctagccaaactgaactgaaccgaattaactgaactcaaaccgaaccaaaccaaaccataatttacagtaaacatttagttatgtccctatttaaaccgatcaaaccgagaactgacatctagtattatcaaaataaaacatttccaagaanttagtaagatatttgacttttttggttttttaatttagtggtgagaattaaaagt

SEQ ID NO: 70053 - DNA, 2717 bp, Arabidopsis thaliana landsberg
aggtgttactctcccctcttcttttccaaactcccctgatgattcggaccgtcgcagttcttcttcttcttcaaggtaatgagaatcagaaagttccgcttttaacccctggctttagtaattgtcagaacaaaccccaatcattagggtgtattcttaaacaatcttatagtttaggggtataattaatttctgagatctttttcgttgtaaagaaactttttaatcttcctaccacgaatttatgtttgggaaattttgataacaggagaggattgtcgaaacattacaaaggtaaatcacaatcgttcacaacgttggcagaagcgctaactgtggaagatctcgcgaagcctgagaatccattcaacgcaaagctgaagcagcgacgagagagccctcactgtcgtagattatcaggatgcggcggcgcatcggagcgaaatttaagtgtccacgacgtttttctcgctgggaacgatagaccgccgcgactttccggtaacagaccgcctccgagagcccagacgctctcggcggctcatatttcggctttgctcactcgaacctaaaccggaagagaaccgggtttcgtttgggacgatgtttttcaaatcttttgttttctaatcttgtacaagttgttgttactttaaagtgttttgactcttttgataattttgtaagtttcagtttaatttagagagcacttaacagtatatatacaagtaactgaccaattgaaaatgttctgtatttttagatgtgatgaactaagaaaattaaaataatgttctgtatttttagatgtgatgaactaagaaaattaaaattgatgaattaagaaaatgaaaaatctaaattcttagagattgatgggctggactagaggagtcgcagttatctatattgggcctacaatgggctttcttaatttacagcctcttttttttgcggcaaatttacatgtctcttagctttcatatttacaaattttacccactgatactaactagtacaaattccatcatgtattttctttgtcattaaaatacaccttactttttgttttatccaattcatggcagaaattatatgtagaatgctaaagtctagaaatgttttggggtgtattccgaaataattaatagttaggtggttcttttgaaatttcttaatgattattgtataatgctgtcaagatgacgtggagacccatgggatgacgaagttttcactggcacgatccattcttcatcgattcaaactcttggattgactttcagagatcaaaagataacactttctcagatcttaaatttgtttgaacttcctgctcttaaaggttcttgattgtgcaattttttcggtaacaatggcttccttggagatgaatgacctaaaaagtaagtgttcctatcataaactctttgaatagggatgtgataatgaactagtatccattgatcctgaattgctgaatcgttaaggaatttgattgatgtggcagagatagggctaggtttgactggatttggtgtgttctttacattcctgggagtgatatttgtgtttgacaagggactcatagccatggggaacgtaggtctatttataccatctttggtgtgtgttctttacaattttagcaaggctttttaagggtctctgtggtctctttggacagatcctcttcttagctggtgtgactctaaccattggaatcaacccagcaatccaattctttactaaacggcagaattttaaggttctttcatgaatcccttgtgcttccaatttgatgactattattaatacaataatacatcttcttgatatacatacagggtactatatcatttggattgggtttcttgttggttgtgtttggatggcctattttcggtttgcttcttgaatcatatgggttccttgtgctcttcaggtgggttttcttctcctcaacaacatttaatggttttactaattcatttctagttttgatttgctgactcatgtctttcctttattcttctgtaattttaaagtggtttctggcctacacttgccgtcttccttcaaaggatacctctattaggctggcttttgcagcaaccatacatcagatcggtacattcattgcaacttctctctgttttactatttagacttatttgccttatccaatcaaacttttaccaactatatatattggtcactgaatcagttgctggatcgctaccgtggaaggcgtgtccctgtctaaaccttctttgcctttctttctttctttttgtgtgcgaattgaccactatccaattatgaagcttaacatggcatttagagttcttaacactctctagtctcttgtatcatatttgacataattggactgtacaaaaacaaataccttttgtattttattttaaatttacaaaattttacatatatgtaattagaaacctgatttagcaaattagagcaatcagaaacattcatgaatgccaaaatatatacgcaaagtaaccttcaaagtttgtttcacatcgacacttattataagttaactgtaattaaatgttggttcgtctactgtacacatctccagtactatagtgaaaaataattcacagctcttgtaaacgttattattcacaattttaattagaacaacaacaaaaaacatttaaaaaatcaagaattccatcccaaaacca

SEQ ID NO: 70054 - DNA, 637 bp, Arabidopsis thaliana landsberg
attaagataagtttgtttgtaatttattataaatcgtcatttgctccttgcacaagtggtaatgtgtctatggccttggcaaggtcaaaggattccaaattcgtctttgcaatattgttctttttttgttttttgtccaaaacaaacatagttgcattactctaacatatttagcagcacaaatatacaattttgtactgattaaaacacaaaatatttttctgattttcataaactaactcaaacttggaaaatgatcttttaattcttaactcaaacaattttgacatgactgatcgtttttttggatacgtaaatattatgatagaagtaataagaaatgtgagaaatttttagttttaagaagatgaaagacctagtaaatagatgttcaaactttgaatacatcaaacagatgagttaatgctagtgagcaaaattccatagtcaagtcttccaaaaaaaagtcaaaacaatcatgttataaaagtttgtaaccaatatttacatttaacacatttataaaatgtgacatcaaaaacgcggctataaaataacgttacgatattaaaaatcaaaggactaataaaactcagaatttaatttggggaaagaaaaataaaccctgcaagatttg

SEQ ID NO: 70055 - DNA, 279 bp, Arabidopsis thaliana landsberg
catgatgctgcatctggacggcgttgcactcttctatatcctgtataacgcctcttaaggaataagaaggcatttgcccactactaagatctatttgatggggtcacattcggggagctcacaagtgtgagaagctaataaccttgttggctattcaggagtaaaaaacaaaattgggcgaaaagactactaattgatggctctggaagctacttattatagggacttgagaatggtgcacctatgcaactattgagtactttactttaatgatggcct

SEQ ID NO: 70056 - DNA, 324 bp, Arabidopsis thaliana landsberg
ttttttttttgaagattataaatttataatgcaagtgcgaccaaatcaatatgatgaaatcgagtagttcttttgtatctcttaataaataataaaaccgaattttaaggcaaaaaataaaaagaaaaaaaaggaagagagtgaggagaggaatcacatgttgtcacctaatattccaagtcttatgtcaaagtggataagtctctcttcacatctcctccgtgtctctcttttcttttctctttttttttataaatcttatattcgttgacaacaacacaaaaatatctaacattcacctatacgtaatttaaagagcaaaac

SEQ ID NO: 70057 - DNA, 1961 bp, Arabidopsis thaliana landsberg
taaccgcaaagacttgcatcctaagaatccaagagtaaacaatcagtagtttttcagaatgggaataaaaagggaaggatatttttttaacacttgtgcaacataaaccttgagattagtgtagtccctttcctggagcttctcaacatctgtttcctgggagaacaagtaacaaaatgagaagaggagagcggaaccaagaacaaaaaagaaagtgaactacctgtcttgtctctttagcattttgaatgaggccatcaaggcaatcgtttataatcttcagatcgctttggaactttcgttgcctcggaactatccatctagctggaggaaagttccaataagggaagtagaaagtagaccgatgctctgcctcgaaaagagttccataaactgcctgtgatgtaacagaaaatatcaatggaccagtgtacctcagacgactggtggagagccagttcaatagtagaatgattaccttgatcacaggggactcttttgtgacagagccaaaatcgtagttgaacacgctaagacctataatatcaagagccagactcgagaattctgcttccagatccaactcaatggtgtcctccccgcttgaagtttctttctcccttatgagtttctcagatttcaatatcattttctccgaacagtcactaaatactttgaccatggcctctagatacaatttatggaatgcgggagtgatagctacaacagagattaaaaagaaacaatcatcagtggccacggtactgcaatatctgaattctgaaagatagagattacaacgtgcttttacctcttcttcttaacttccacgtatctagatcagccggtattaacccttttcccataatcggctctaagatctcagcaagaactccctagagaaacacaggaagttacttgatgataccaacgaaaacaaaagaaagggttatttcagttaccttgtcataagaaaaagcattttcccggaggacatgccttgcaataatgggatctgagatgacaacaaaggcttttggaccaaacgcaagtttataaattcctccatgctttagataaaaacatcacagaatcaaacaaagataaacttcttcaagtaaagcactgaaataagttgtaatagtatacctccaagaaccagtcgtaaagagataaaaagagaggctttccaaacaaatcagagacagagccttcagcagtaggcattgaccccaaacttccaccacttaaaaaatttgtcaaaaggttgctcgcattgtccaatatgttaccattcgtctttggctccgtagattggcacctaaatatgtcccaccacaaaaatcaaactcaaagtttacttcaattataccatcaccaaagctctaactttatcttatctggttctgaatttcacaatccacattaaaaagctttcgaatttaactaattccgcagacatctatagatacgtctagattcagtaaacagtaaacaaaaggccccaactttcatcaaacccagaacctaatcgtaagggtataatcaaaagaagagaaacccacttgatggaaacagaagctctccgagaattcacagaggaaatggtttgagggtagaaaccgaagaggcaatgatcggtcctacccagatgaagagcgccgccttggaaatgggtgggataagtagcagcggcaggaaaagccatggctgctaccatcttcaaatgaaaagagaagctctaaagttagatgaaggagaagaagattgaagaacattcttatctttttgcttgaaaatggccacttcaagcgccaagcataacggcgacacagatgcgcttggaccaaagatttttttaattgtgacacgtgtcatacacgttcgcggtttttaaaaaacaaagaacttatttagttgataagtaaattagtgtcaaaagtttaagaaaatgagaagat

SEQ ID NO: 70058 - DNA, 269 bp, Arabidopsis thaliana landsberg
  unsure (1)..(269): unsure at all n locations
caacccgcaagcaaccaagacattacagacgatatttaccccccaagccaaaggaaacgagagggggcttaagcagccaagcgccccacacccacanaaggcaaaacgcagaaacgacgcaccaagacccaacaagcaaaaggaccgaaaacacaagagaaagggggaaaaaccgcacccagcaacaagggaagaaaacacgcgaaacagcgggacacgcacaaaagcgacgaaaacancagccggcacaccgagcaagaagaaaccac

SEQ ID NO: 70059 - DNA, 226 bp, Arabidopsis thaliana landsberg
aaaaaaagatccaaaacagatctcatcacaaaagaaagcgcaaaaaggggaaacaagaaagaaaaaaaaaacgacgaaaacaaatggagagagaaaaaaaccgaagaatacaacaggcgcaaatacaactggagcaaaactttaaagaaaactatatataaaaaaacgaacgcacaaatatttagaaagaacaaaactagaagaggcgaaaaacaaacagagcgca

SEQ ID NO: 70060 - DNA, 1804 bp, Arabidopsis thaliana landsberg
aaatcatcgtgttcatcaggtaaagagacataagtggcgtgagaggaatcagagactttgagataaaagccttgattcgggaatagctcacctccggctaaagcgggaacaatactgatgacttgtaaaagagaggacctgtgttcgccggcgattttgacgtcggtgttcatgtgctggagaagcttgagtaaaacgccggggacaagattcgccatctccgcagcgcatcacctaggagagagatcagatctcagaagaagcaaatggagtgtggtggattccaaggaaggaagagaatcaaaaagagaaaattgcgaaaaacagagaagcaaagagaaagaggacaagttatattaattattttagtaggagatgatttatacaaacaagacaataaaagagaagagtgtacaggtagattttgaagagcaataagcaagaggaatgtgaaagaaaaaaaactaatgtaattctctttctctgttgtgttgtgttgtgtgtcttggtctacactctctctctctctatctgtactagcagagcccgtacttattagattggaattaagaatgagagagagcagcaataaaagaagtaagtagagggtcagactcagtttcaggagttgcgataaagatggctccttctttgttgccttccgcccctacttatgtggctacaccaatgcatccttccatttacttggttttttattacattttgtaaattttcttgtggttttatttattatactttaataatataaagttgaacaatttttaaaattaaaaacattaatagtagaagatagttattttgagtaagaaacaaaattaacaataattagcatagtaacaaactattgctttttcaagtacccaaggataaagttgcagtatcctaatcagattaagtaaagaatattgttttatttgttaacatttatgatattacattattactaggccataccaagcagctcaccaaacccgatctgagagctacggtgagcataatttctgaaccttaaatcttgtgtttcccttgttttatgcagatttaactattgccgaatgaacatgaaccttagatctaggcttgaaaagtagccaattaatctgtggactgcagcataactggctacaatttctgaggttcgagcatgagagttgatattttcttgattttggtgaatttttttttatagcattgtgcaaaaaattacaaaatgggtgtgaagctgcaacagtgaatcagactacatagattaagtgaagtgcagatgattatatcagttcttcatcgtagtaaagatgatgagaccattacagcgagtaccatcactgctatgctgaggttaaccactgtatcgacattttcaagcttctccactttctcgtggaggtctgcccgcatttgtgaatatgggcatttttgcttctgcaacaacaacataacatggaatctcaattctgttagtcgaatccagtaagagtacgaacacaagccagaaagcaaatacatcatctatcatgctcaaaaccctaaccctgcttaaattcatatatctaagtaatgtactcaatccaaagtatgataaaccagggaagagagtatagacagtaacctcagctatcaactcatcgattggtatgtttgtattctcaagctcttctttaagatcgtgttcggaaagttgattgaatggcatctcagaattgatctttctttcggagattttacttgagaaagctttgtaagctgaatcagtatgaatggtctccataactgaaccgaagaa

SEQ ID NO: 70061 - DNA, 449 bp, Arabidopsis thaliana landsberg
cgcctacgtgccgatcttcccgctgggcgggttcacgccgttgcagtccggcactttgtcggccgtggccgaaaagctgggcgtgacgccgatgcaggtggcgctggcctggttgctggcacgcgcgccgaacatcgtgctgatcccgggcacatcgtcactggggcacctgcgggaaaacctggccgcggccgagctggtgcttgcggacgaggtgctggccgagctggacgggattggcagcgagggcaagtaaaaaaaacagagtgtggccagcgacagcttgccatcagctggctacaacctatcgtgttcgtcatcccggcgcaggccgggatccagtagcgaccacgcttgcacagacccgacggctactggattccggccttcgcccgaatgactgtgaagagagaatgacggtgagggacccattttattcaagccctact

SEQ ID NO: 70062 - DNA, 597 bp, Arabidopsis thaliana landsberg
tatctactttattctttcttttttaaacattaaaaaattaattgggctttttcaaacacgaaaacaagggagtgcaatagtgtgatgaagatgagactcacacattgaatttctgatattttagcgtcaggtgcgttgaaaacttgaaatcaatgtgaagattctcttttaaaaatagatgactcttatttcatgagttaacatgatacttaaagaaagtggatagttaagtctaaaccaattcttttagtatagaaataaaatttcaaccacttcctttaaatatgaaaccatgcaaaagtagataacaaacgaaaaagtgtttcattttaagattcgatgtcacgatccatcacattgcaccgttggttgataaatatctctcatctttgtttatttattttcacaatgttgtacttctatttctataacattttcgtttgaattcaaataccaaattaactctccaaacaattagttcatcaagtattttgttcacaatgatatgttaacaacaaatcattgattcattgtccatgccggattattttaaagatacagaaacagtaaacctaagatacaatgaatgctaaaact

SEQ ID NO: 70063 - DNA, 523 bp, Arabidopsis thaliana landsberg
actgaaggataaagaattgtacctttttgatcttaacacgagattcccaaactgcttggtcgataatttccaatcacggatactacagttttaggcaaatttatttcgagctctaacgttttcggttagtttggagtctttagaagacgagggatcaataaagtactgcattttaggtttggttgcggttttacccttttagggtttggttcttagacattcaattttcaactttcttattaatggaacattgtattcacgaattaaagcttctctgtccattataggtttatgtttttctttacaaactagtagtagcactctattgtaaaagtcaaaactcaaaagttattaagaacaaaatatggagggagggagttgcggcatatattgtactatttttcttgttacgtacagttaatctttctgcaggttcaccataaagtataacggaacttttagtttcataacccgggttcatatatatgagagtactatgtttgtgttagttatagggaaaaaa

SEQ ID NO: 70064 - DNA, 1803 bp, Arabidopsis thaliana landsberg
tgacataacaataatcatgcgttaatagcaagcgacggttgatgactattatgtgtaggatacagaagaatcatagaattcttctttgttacaacagagataattctaagcagataggaaaaaagtatcaactacgataaaagcagccgaaagaacaaaaagaaaagaaaattcggagtatgtgattggttcatggtacccaaaccaaaaaaagaataaaagagctccgcaagtcgcaagatctttctttatccatttatacagagaaatataaaactctatatatatatattatcgaggaagatatttgttagaagaataaaaatactaataaatatgcaagaaaatctaggaacaaataaataactaaattggtggaaagaacatgcgaacatgtgacggtgacggagtgacggctaaggaatttaaggataatactaacttctctgacctcaaagctcgcgttactctacgtttcgagttttgtgcgttcgtcaccgtcagattccgttaatgtccgttatatatcttctttttaaaattattataatcagcaaaaaatcatgatatttgttttaaatattattattagtatagattttatgaaaatttaagagccgcaacttgcgaaagtttgttattactctctctgtttggaatcgaagacttcaggtctgattccgacaataaagaaagaaaagaaactaaacttcactctgaagcacttctttgccgttcttgaccactcatttattcatttactattcaccctaacttttatatagttgaggtgcgccgcaatttatttcataacaatcatgcaaccttctgatcaataacaagaaaagaactttgttttaatttcttggttaaattttattgttatattgccaattctatagaagaaagtagaaactaattaatcaacaaaacaaaattgtgtgtaaacgtttatctatagagcaatatcaaaaacgtcacttacacccatatgtgagtcattgtaacaaaactatagttgggataagatatttctaacagtacatatattgctctgtagatactaaaaatgtagaaaccataaagcaaagggatatatgaaagattgaaagtatatgtaaaatcatgatagagtattatttttatatgattctcatgcaatcatgccattacgacctacaaattaacggacggccaagcaagttgttgttgttgtgaaaacttctaaatcaagcatttttttaacgataaaagtaaaatgtatcgtaaagtcgtgactaataaaatattagcaagaagaataatgattggaagaattgtcggataaagtcatatgttgaagcatcaaaatctgttgaattgctattggaatttgtaagcaaacaataaaatacaaactatagtacaattcacatgtgacaacttcattgtattcagcattttttcgtctatcaatattagtatttgaaaataaacatgcaaattgcagctgctatttaactatctatttttatttattagtttatacaaaaaaaaaattatactgcttttttagtaataatcttcttagttattgttttagtggatatcccgaaaagacattaactttgaactgattttacataaattatatatacaagaaacaattacatataatcaatattatattatcgttttacatcattgatctataactaatcatatgctagtagttgttgagaaaaataattatttaatgctagttaaaaaatagttatataaagttaaaaaatgatgtatttaacaaaaatgcgtgtggtttat

SEQ ID NO: 70065 - DNA, 2522 bp, Arabidopsis thaliana landsberg
attctacgggtaataacaagcaataactttatggtcaactttggttagagatcactcaaaactgtataaatacataagtcggatattaattcaaaacaaagacttttgggtcagtatgagtatttcgtcgtcttctaatttataaatggatcggaacacccaaattattatcgggaaaaacgtacggcaacttgtttatagaattcaagttgctactaaatcatgcgccacttgatatatttgcagtcgcaggtccactcttcctagtttagtaccccatctaggcacatatatcgaaatagtttaataaattgaatcaaatactgaattgttactgatatatatactctgtatgtttctcgaaaatacttaaatttggtgtcatggagttgataaatttctgtaagaaattgaacgtctacagttcttatggtttagggtttctaagatggatccaaaaaaatgcaggaaccgaactatatacggcttttgagaacttaggttatcctttagacgtgactttcaaataagtatgtcgatgatttgataagagatgtcgttttatgatatgtagggacagggaaataaaagcacaatgtgaattaagactttagattcaaaaagatgcttcatgcttgtagaaatgatgacgattgcgacttgggacaatggacaagtgctatgtcattacatatactgatacacctaacctaatgaccaaataaggactctttacacgggttaactaaacaaatatatcccaaataacatttccaacaaaataagccgataaatgtaacatgtaccgaacaaaacattattaatcatcgtaacttttttttaggtttgaattaatcattataatttaaaaccctaaaaccaacttataagaaccataattgatcagaatccagtttaagtaaataacatagaaaattttgagtcagataaaaaagaggaaattgtatggttagcaacatttacattttacagaatatggatatggtaaatgagaagtgtgtggatcacaagaagtgaatgtgctttttctgctttttaaaggatgaatatgaaaacgaggctaccctcgttattttatttaatgtgaccactgtttagctggaaatcacttggagacgactttaaagtaggctccaaaatctaaagctagacaccagacaaaagactttctatattgtttgtcttaagataattctaaaaatatcagcatcgttactttattgaatgaatacttataagaattgacagtgaaaatgaaactagtgttgaaaagagatgtttggtcattaaaatcaaacaccgaccttaaactaaaaaagaatatcacttcatcggctcctccttttttcacaacttatatacaatatacacacacacaaactgagaattagaatgtacatgtgaatgggctggggcactaaatgcattattacgtgctaatgtacatgtgaatgggctgggatcaaaaaacgcataatctcaaaaccaccggtcaccgatgcgtgtgcaagtttcagtcagaacgtgattggaccgagtctcggggtataaagacacacagtccatcaccgctaaataatgaccacacggatgggcccatcaatatatcaaatttgtgggtcttttaatcttgtttcacaagtgaattattcaaatgggcctttatttatacaccataaatggcccattagtccaacaacatacaataatgcaagtggtcggggtcaacgcactagaaattccacaagaactaaacgataagaacaaataatcttcatagtctctcatccaatcttacaaactttctgatttcctttctacattcatcgaccaatggcagcaaacaaaactcttcctacgtatttttgcagaaactgcgagaatccactagctctcggtgaagatctcatctccaaaaaatttgtggtaacaaaaaaaaaaaactaaagaatgttatagctttaccaaaaaaaatcactttttcatttcttatcggatgattttctagagatgatcaagtctcttcataatctccatcggttataaaatgcaaaatgtttttgaatatggattatagggagcttcagggccagcgtttatgttttcacacgcgatgaacgtggtggttggaccgaagattgggaggaaactgataaccggatcgtatgtagtggcagatgtgatgtgcagtaagtgtggtgagacgttgggttggaaatatgttgagacattcgatcttaaacagaggtataaagaaggcatgtttgtcatcgagaagctcaagttgaccaaaagatattgaaacctagtcaagaagaataatactcttggagggttaagttaataaataaatgaaggaaacttgaggattgtatatgtatatataacctttggtgtataaatgtcatcactatattggttgttctctttaaggaatttgaaaacaagtaaaaagattcaatctaagatagatttttttttttttaactatatagaattta

SEQ ID NO: 70066 - DNA, 140 bp, Arabidopsis thaliana landsberg
cacaaaaaaaacaacgataagcaaagacgcgggaacccaagagaacagaacccagaaggaggagaagccgaggcaggaaaacgaccgccactaaccagcacgaagcaaggggaagaacaagggaggcccaagaagcacac

SEQ ID NO: 70067 - DNA, 556 bp, Arabidopsis thaliana landsberg
cggtgactactgcgccggcacatcttcttctcgacggatgaagcccgccgcgatcgatcgcgcgccctgttgttggaaagccttgaacttcagggcctgaagatcgcgggcttccgcgttgtgccgactgacatgtcggcgctgggcgacgaggcgatgaaaagcgtgccggtagtcgagcaggtgtttgtcaccgccccgaccgacgcacacaagttcacctttgagctgaaactgttcaaggcccgccgccgcaccgagaagctggtcgccgccgaaggcgacaacgagttttatgtcacgcacctgtcgtgccgcgtgctggtctataaaggactggtgatgccggagtatctggccaagttctacccggacttggccgatccgttgctcgaatcgtcgatgtgcgtgttccatcagcgcttctcgaccaacaccacaccgcagtggcgcttgtgccatccgtttcgttatctcgcgcacaacggtgagatcaacacgatctccggcaaccgcaagtgggcgcaggcgcgcgccaagaagttccagtgcgagg

SEQ ID NO: 70068 - DNA, 1716 bp, Arabidopsis thaliana landsberg
cgcgtttcttgtgttttcatcacttgcttattcccctgaactcttccctacatttcattatcctcatttatagacacaattgcacatgtcaagtgtcaggactcaggaaaagatgcatctttcacttacaaatccaaccatttacattgaatagaatggaagatgttagattgaatgcaataaacatgttacaaattagtctcaataccacacatctagaattataacataagaagcatgacttatattcatattttatttctggatccgaagatgcacgtggtcaattggaattaggtcgaaagtccaaatgaaaatttggtggacaagatgttttggccgttttgatcactctggaatctagtcggatatgcccggatcacacatgcttgaaaagaagttcactcatttccctatcaaaaaacaaacccacataattagatgactaattagaaagataaaatattgtaaaataacgcattcaagaaacctaataaataagataagtctatttacatttacgcaaattgggagagacgtaatattgaggtgtataaactacttatataacgtggcacatagttggataggtgatttcccacacggcaggcaaaggaatcatatgtaacgttgctgtctgatccaaagtttactcattaaatatccacttactttttgttaacacaatctcacaattatccacttttggttagtactattttaatttctcttcatgataattcgctcgttttcctcgttacaaagcttataggtcggtacataatatattggtcgatccacagctatatttagttatttaccaacattaccataagggacatatatgccgtttacacatccaccgtatctcctcctatatataaagcttagcgatatcgaggaaaaccaaccatatgaatactaccacccaggaccaactctcacactctatatagtacctgtctcgataatagagacgtacacactttcttacaagtatgggatctttcgtgaaagaagaaacgtcgtcgttgatgacagattttttggagaagtgcggtggttatgcggtggtggatggagggtttgcgacggagctacagcgtcacggagctgatatcaatgatcgactttggagtgctaagtgccttattacttctcctcatcttgttacaaaggtcacatatatgtagaaatttatagctcttattctaagatggttttagtcgtacgttgacaaatatttatttcttctatgaaactaattctcatgttaagcaaaacttagaatgatctaattattgaatgatggactagattaaatagcatcaaaataacgtattcgtccaaacatattttagttggattcttgattccattaactttataaacatggttttatttctttgcaacgatttgagttttcattttttcagttttcttaagttctgtgtataggatgaaactcatatgcaaacaaagagtaagttgaaaaagagctactcgacccgtttatattactgcaaaaatgtagataaaaacagtaatatgccacgtagtaaactagtaaagctgagccgctaacgtgtacgtcataccacgacgtttactacattatcactccattttatctagtaccgcttttaattgattcacaatgggtcttacgtgtagagtagtacaaaagaagaattcaaagaaaacaaaggaaaacaa

SEQ ID NO: 70069 - DNA, 1993 bp, Arabidopsis thaliana landsberg
ctatagccaagtttttctcatcacctagatgcaaccacgtagatcatacttcatacaagaacgaaagtatcttaggaataccatcgagagtacagcataagtgttaatgacttgcctgatctataatgaactcaaacagaggtcgaaggtggtggctgatcaaatgcttctctttgacaagatggtacgctaagtcacatgcttgaaaactagaatatacaaaagcaaccacgttcacagacaggcaaaacctgtcacagatatcagaagatgacacatagataaatcagtttagtctcaaaatcaaaaatcaaatcatactaaactgacttcaaatgtttgaccaaaacaacaaaatggaaactgcaaatgaattcttacgatccaacaaatcaaaatcaatgtcaaaaggaacaaactttacttcttttaaggacttcaccaagttcaaccaaaacatagacttggaccacgcaagtgttaaagacaattcacatgtactaaaactaaagtaatccaaatttcttatcaaaaacccaacactagtgatactgataaaaccctaaaccctaaaataaaccctgaacctaaattcaagaaacatcactatctgcgaagaaataagcacaaacacaacaaataattacctgtactccttgtaacgatcgaaagaatcaccactccaacctttagttttatcagcagccataattgagaaagatatcaaagccaacacaacctcactcaaccgaaaccctaaagctgaaaactttaccacctcttctctcctagaccttctcaaaatagccgaaacagctccagatcgttggccactacttctcccagaaccaactctcgcactctttctcgtcggaaccacttctttcacagagcgattgtgattatgaaccaccacaatcggagatggagtttcctcaaccttcccaggattcttgtttcttctactctcgggtttacttttcgcatcttccttctccgattcactggaatgatcaagagaatgtggcggcgatggagaagaagagaagtgagtagtggagttatcgaaagctactatagccattgaagtatctgacggaggtggagatttctccgtggaaactgaagaaggtgacatcgacggcatcgtctttgctggagatctcatcagaaatatcaaacctttgtaacgaaatttaaggaatttgacaacgcaaaatcgaatttaggaataagcgttgaattgaagcgacaaagaacaaaagtgaagtctttgatgagaatcaaacacagaaagaagacttgcaagattctttgtctacttctccctgtattcttggttctttcgtataatgccccactattttagttttgacaattcgcacctaaaactttgatttgatctttgtggcccttggttttgactctagactagagtctctagcctaataattattatttaagtgggtattgaaataatctttgtatgcattgttatgaagacaattgataatcatcatatatcattagaatggagaattattgcatattgatctagttgatttaaaactgtgaatcaggaagaagaagagaaaaaacagaacgccatccttgatcactgatatgaacattgtcccaaaagaagaatgattttggatcatcgcaaagagtgtacaactttttaccactcaagcttctatctccacaaaaggtacctcgttttgttgcacaacatgccttaaacggatccggaaatgtcgaaactcctgcccaaatttaaacatttatattatatatcccatctatttaggtatatgtatttctgtttaatctatcaaagacgtgatcggttatgtttggtcatatacagtgttggtatatatcttacgtacctgaaactcctttgttctcgaatatggtcacaaaggcatagtagagatctaacgtcatgaaacttttatcattattgttaatcgccttatcgttgaatttt

SEQ ID NO: 70070 - DNA, 905 bp, Arabidopsis thaliana landsberg
acaaaacatgtacttagcagctggacatgaaggaggtggactttcgatggtaagtaacattcatcctaatcttctaacacctttctcaagaacccaatcatgattcacggtttcttgaaatcgtttaggctctagcaacagcggaaatggtaacggacatggtactaggaaaaccatcacaagtggatacttcaacgtttggggttaaagggcgtcgttgttgctgatgaaatagaagcagtttggtttagttaagagagtgaatcctcttaagcattgtggttgctataaacggggtcttaaaggaaatgtctatgagctacataaatctagtgttggtttagtccggttttagtatactaagaccaattctaattctacgtctttaaaccagactttttctctagctttcgacatgcatgatctatttttattacggttgattacaaatatgttccattcaaaatattctcaaacaataatttaaccatttatacgcatattagcaaagatatgtcattcgaatttgaccaaaaatgcgcacatggttatcatatcctagaaaactttcaaatcagtgattatcacattccatattcaaactattgctattttaattgtcagcaaacatataaaaccacaagtagtgatgctagttgaagttttttttcttcttattaacgtataagtcttttgagtctatgaccatctacatccatcagtagtttttttaaatttatctatcaacttgacatacatataggactggctttgcctaaatgtttggccctgctatgtcaacttgacatacatatagtaatctttctaaatatatatatcaagctgttctggtcggaccgtattattgtgtgtacaagttcgtacatattaacgtgtgtgatgtc

SEQ ID NO: 70071 - DNA, 575 bp, Arabidopsis thaliana landsberg
actaagaaatatcatgatcaaatattttactataaactccatatttcacattttgaaaattttaaacaacaaatcacattgaattttcgtgataaaattatttaaaattgaaaaatatcagctcctgatttcaatgtgtgaatttatctttatatggtttatgtctccaacttattttaaaaaagagagaaagagcacccaaaaggtgaccgtttgaaattcgaatttatttccgtttgaaattcgaattcaaaaaaagtaaaccgaaccgagtctcgttactgactggcacacattgtttccctaaaagctaattaacccatacgtggcgtaatataacaggtcagtgatcaatactaaataacagacatacacctttaaaattcgtgcacgctccaaaacaaaatctaaacttcaaaatcaacggtcaggatcattcctcagatttcaaaaaattatttaacctcacttccttcactttgtttttaaaacctctctcttctctctttctctttcgccattaaaactctgtttcctttttcagagattctcagagaagattgattctaccctaa

SEQ ID NO: 70072 - DNA, 123 bp, Arabidopsis thaliana landsberg
caaggggagccggaacgaccgagagaggcggcagcagagaaacccccaaaagaaccccagaaaagagaaccagcccggacgagaacaaaacaccagacacagagcccaccaggcgcggaccca

SEQ ID NO: 70073 - DNA, 231 bp, Arabidopsis thaliana landsberg
tgatttgttatgaatctttttttcttgttattacctttcctgacgaatgtgaatttttggatcttacttgataaggtcttgacgtatgtgttttggagagacccaatgtgtgttcttttaaaaagaggagttgctccaagttgagttgttccttgacgaagaagagaagaagtagcaaggtgatgtccgtggagatcttcgaggatgagcatgacgtggaggagttaaagg

SEQ ID NO: 70074 - DNA, 511 bp, Arabidopsis thaliana landsberg
cggctgggtcgcggcgcggcagccgaacaggccgcgatgcttcggccccgggccgttgtctgttgatggaatggcaggccccgcaacgtgccgtgtacagctgtcccccgcgcgttgcgtccgcagcgccgaacgccgtcagcggcagcagcggtgcgcaggccagcagaccggccgaaagacgggcgtgaatcccaggacgcatgaaccttttccggtgtccgcgcgatggcgaccgatgccggccaccatcgcgggtcgtcgagacgcgtcgcttacgcgccgaagctcaaggtcggcttgggcaacggttcgccgagcgcctgggtgagtgccgtccagtgcatggtttcgtcggcgatcaggcgtccggcgacctgcgcaaggctgcgatcggaaaagctcggcatcacgccgatgtaggcattgactgcaccgagttccaggcgttgcgccagcttgaggacatcgctcgcgctcttgatgccggcgacgttgagcttggcgctgg

SEQ ID NO: 70075 - DNA, 3027 bp, Arabidopsis thaliana landsberg
  unsure (1)..(3027): unsure at all n locations
gccttgaaaacctcaaccctccaacataactcgctgaacctaaaccgaaagcatagaatggcttgttcttccagtatatcaagttgtgtttgcacttgaaaccgtctctcgagtaactgctgacttcataatgttcataacctgcaccacggagcatcgatgatgctgttttataaaactctgcagactgtgtttctgaaggaagaggggactgtcctggagtgtacctacacaagttcatgaacccaattcgtttctgttcagattacattcaagttcttaagcatcagtaagcaaacttgaactacgtacacttacaaatttccaaactttgtgccttgttcgacttgcagatcatatacagaaacatgattgggctgtgattcgatagctaatctcaaactctcttcccacatctccaaagtctggtgaggcagagaagaaataagatccatactccaattctcaactccacattctttaacaaactctattgcttcatacacttgagagacaccatgagctcttccacaagctttcaaaagctcatcttgaaaagcttgaactcctaaagacactctgttaactcccaatttcatcaaatccttcagcttctgaccatcaaacgtgcctggatccatctccattgatatctcagcatctggactcagcccgaaattcaaactcaatgtttccagaatcaaagaaacaagcttcggaggaacaagagaaggcgtcccaccaccgaaaaacaccgtttctagattcgggttcgtatcaaaccccggccttgtcgttgttatctctctaacaagcaaattcacatagttcgtgattctcgggtcatcttcttttccttcctcgtagacattagacggtctggctgaagaagaagacatgcctagagctaagataggaaagtcacaataatgacagcgtttgcgacaaaacggaagatgaacgtaggctgaggttggtggacctttgtgtaacgtagtaagattggttgacgcatttcgtcgagcacttggtggagtatcttgtagaacaaccttactaaaagctcgaaaaaacaacttcgatgagcacttgggtttacctgtaaacgatgagaaaattggagaaatcgttgttttcagcataattaccaaataaaacgagagaaaaagaaagagagccagagagacgaagagagaaagctttcaaagatcaaagttcactggtctcgttttatatgcttcaacgtcgtcgttttagtcagaaagtagactcactaaagacttgaccatctaattaacacactaattacaattgaaaaatattataataagaatgaaacgattattcacttattcagacggaaaaaaaaatggcgctagaatcgatagtctctctctcggagcttctctcttcccttctctcgtcgaaaccaccgtctccgtcgagtctgaaacctatcacgcttccgtcttccgtatccgcgagaacgtcacagcatttgtcgatgacgacgaagattttaacggccgagcacgatgacgtcatcaatcgagtggcgtatccttcgctggcgaacgcgaatctcgtattcttcaagtccagttactacaacgtcgaggtggtgcctaaagacggcgaatcggaggagcagctggttaacgatttcaagaggtcgtgtttcagagcgggtgtgttgcaggaatctcgaagacgacgcttcttcgagagctctctggagaagaagacgcggaagaccaaagaagctgcgaagaagtatcggaaaaggtcagatttttttttcactttttcttctttctttcgaaaaacacttggagaagttgagtcaatagattttgattttacaggagaccaaaccctaaaccaaaaccactatcaacttcagagatccgcaagcacaacagaaatgcatccagagaagacgaacaagacgatcactgggaacttcctcctgaggacattgagattccatataccaaccggtcttagaagtaaaccggaatgatattccggtacactgatctgagcaatcttaatcacgcagcatctgcgttttgtaaagccactcttttgtatgttcttttagcttgagattagaaaattttcattgctcggtgtagagtgaagatgaatgattttggaggtgtctgtaacgtagaaccaaatgcagatgaatctgtaactagttttgattacatgacaagtgatcacagatatgagaagaatcaagccatagattggcagttatattatattgccgcccaaaatcaggaacaaaacaccaaagctcatcatcggtaacaagaaaacaagtaaggacaccattataattgactctgtcttctcaaggatcactcccttagccatgtagctagagccgaatcccacttgcatagctcgccctctttgaaccacagacctatgccacaaccacaagagccaaaatgtcagcaaatgaaaactaaaagtttagcatactaaggaatgagagtgattggtcaaactaagtaaatgaagaagtgatagtaatggtttaaaacagatatattgaacctaacaatttcagtaatcaagtatgatctaatctagttatgttatcaagttaatttgaagcagtttgaaccacgttgatttgcccctaaactggacatagtcaatgtctcaacaatgaaagatgggtgaatgatttgaacaaaaaacaagaaatctcaccaatctcacgcttgccgttttcagggctgtcactaccatgcacaatgttcctgcaaattgcataatttaaaaatatcaaaccatgagaattattttaagtgcttacttccaacaattttaaagatgatagaagtccaaccttccggtttgcacagcaagatctcctcttatagtaccaggttcagcttgaagccgatctgttttccctattagcttcctggctgaagcaacaacaccaacacctttccaagcctttaccaggtttaaaacatcacatgncantaactcatctaatta

SEQ ID NO: 70076 - DNA, 372 bp, Arabidopsis thaliana landsberg
ctactaaagtactaattgccaaatcctttgctaacatctagtttctaaagattacttgaaatgaatataaaagagttgtatatatatagaacatatatttactaagtcaagatcacttcagcatctagcaaatattatataaataaattatttcttatttatttaccgtcggtttgatggtcacttgaaaaaagtactcggtttacacttagcatgataatgtgtatctaacgatttaagatgtttgatgtaggcctcgagatgaagcctacatgatagatatggtgactagcaaactggccttcacactctcttggtaatcagtttgataagattacgtacacgattgttcacaccatatatttgatgata

SEQ ID NO: 70077 - DNA, 454 bp, Arabidopsis thaliana landsberg
  unsure (1)..(454): unsure at all n locations
gacttggccagccacaggccgaacagcatggcgccggccaccaccaggacggtgaccaggccgataagatcgtgatgggctcgggtttccattgctcagcgctcctgcccggcacgggtggcggcctgctcggctgcgcgcccgcgtgggccatnnnnnnnnnnnnnnnnnnnnnnnnnnnnnnnnnnnnnnnnnnnnnnnnnnnnnnnnnnnnnnnnnnnnnnnnnnnnnnnnnnnnnnnnnnnnnnnnnnnnnnnnnnnnnnnnnnnnnnnnnnnnnnnnnnnnnnnnnnnnnnnnnnnnnnnnnnnnnnnnnnnnnnnnnnnnnnnnnnnnggtcgaaggcggcggcgcccatcgggtccaggccggcggtgggttcgtcgaggaacaggatgtccgggtccagcgccagggcacgggccagcgcggcgcgcttgatcatgcccccagaca

SEQ ID NO: 70078 - DNA, 535 bp, Arabidopsis thaliana landsberg
  unsure (1)..(535): unsure at all n locations
tcgcgcttcgcgtccgcgaaagccttgcggcaggcggccaggatgtcgggccggtgccgtgacagttcttcgatgtaacggctagcgcggaacacgaacatgccgctgtttcagagatagccgccctgcttgacgtactgttgcgcggaggccgcgtccggcttttccacgaatccttcgaccttgcggacgccatcgccggttgacgccttgatgtagccgtaaccggtttccggcccggtcggcacgatgccgaatgtcaccagtgaaccgtccgccgcggcggcagcggccttgcgcacggcggtgtggaaggcggcggtattggtgacaacgtggtccgacggcaagaccagcagcaggggatcatcgccctcggcggtggcggccagcgccgctgcggcaattgccggtgcggtgttgcggcccaccggctcaagcaggaatcgggcaggcgcacaaccgaactggcgcagttgttcggccaccatgaannnnnnnnnnnnnnnnnnnnnnnnnnnnnnnnnncggatac

SEQ ID NO: 70079 - DNA, 541 bp, Arabidopsis thaliana landsberg
ggcgccagcgcacccacctgcgcatagcccggcaacaggccgatcgccaacgtgggcaatgccatcaggaacacgctgagcgtgaacatgcgcttgcgtcccgagcggtcgccgaagtgcgccatcacgatgccgcccaacggcctcgccaggtagccggcggcgaagatgccgtacacctgcacctgggccagccagggcgcggtgtccttcggaaagaacagctcgctcagcggcagcgccaggaatatgaacaccacgaagtcgtagaactccagcgcgccgcccagtgcggaaagcagcagggtgcgcgcgtcgcgtcgatccagcgcccgcgtcgcgggtaaagcagtggacaacgtggaagcactggcgtcggtcatcgtgggctttccgggtggcggcgcgaaacagccggcacgatagcgcaaatcgccgcgacccctctccgtttttgcggaacattcctatggacatccccccgccatcgcctatgctgcgtctgccccgcgggatagccggtgctcagcatgacgggcat

SEQ ID NO: 70080 - DNA, 396 bp, Arabidopsis thaliana landsberg
  unsure (1)..(396): unsure at all n locations
taagggacaagacacaaagggccggaagcccacagaaaaaaccttgcaaacagacactcaatgagaagcaaaaagggaccgataaaggcgccctccaggaagaccaccacgacgcacgaaggcacgagcggnagcaaaaccaaaccaaanacgacgagcagaggggacccgagccaagccgaggccaaaccanggaaagcnaaaagccagaaagcccaacaaaaccaccgagccaacaacccaccgcaagaagcccagcaaagaagaacgcccaggaggaggcaaccccacccagaaggaaaagggggacgccaacagcacggccccgaaaaaggcacaaagcacaaggccgagnagcaggagcaacncccaacccacaaagagcccaaacaacgg

SEQ ID NO: 70081 - DNA, 535 bp, Arabidopsis thaliana landsberg
ggaatatgaaacgcagcccctcgtgcgggcctctggttcgggagaccatacccacagcctcgggtctgttcaaatgctccgatcctgtgattctctagtcaaggctttctgggatctacttgtatctatttagatcggtagactgtcacccaactgaaccagttgaaagcgggaaaaggaatgagatgttgtgacatgtcaatggtgccggtgttgggtgggctatttacccgaatttgtgggtggaggcacaaggtcaaccccccgccgaagatgtttctcgcggtgtgcctactcgcctctgtgggtgatttcaagaaccagaaagactaagccaggataccgtgtgtgctacatagggtcggacacggaggatagtaggagctagggatagaattttctgcatctttggggcatcacgcacgatttgcttctcctcttcccggcttgcagggttgtggctgccaacagagaagttgcagttattatctatcgcatgagcggataggcgtttggaggtaggtttagactgatg

SEQ ID NO: 70082 - DNA, 558 bp, Arabidopsis thaliana landsberg
tacgtagcaatgaaaaaaacataccaatagaactcccaagttatgctcaggtgcgcttcgaccatccttcaggtactgtttcatagaacaaacaaaggtacaaaaagtccaatttagagttttaaatttgaaagtgaaagaattggaattgtgaaatttaagaaaccacttggaccttgagaaatgcaatgagcattgcaagaagtgcatatgaaccaattccaccactgtacacctgaacaaaaacattaaagacaattttgtgaacgtttggcattgtgaagaaggacggaaattattaaagaaaagcagactagtatttccagacctcattaagttctctctgctgtagaaatactttcagaattagacataatggtcgtagaggaggcaactttgatactgcatcctgcaaaataatccgagaattgtggtaagataacatagatcaacatgataggttgctaaggagtattattcagctgaaaaataacaaattcatgagaactacttggggcagcaaaatgtactatcacaaacctgtataaactcagctgc

SEQ ID NO: 70083 - DNA, 2952 bp, Arabidopsis thaliana landsberg
caaacctgtataaactcagctgcctttggtccattctccatatcaaaactgcaaagccagtgacatgcttaatactagctaaattcatataattcattcacaataaaagtcatttgtgcgtctacatatataattcgtatagatatctgctgcaattacagagctttctaatcgagcctggaccacaaagcttttgttgaggatatacataatagccaaagttcaaagttccttcaagaattgctatgtaattaattagtatgttgcctacaatccatctatggtaaaagcagactgtatctaaaagggaagctactaggtcaaatgggaaaataaaaaaccttagatcaaacgcaatgttgcttttcttctcaacaaacttgataattggtacacgagccttagcaatcacctgaacaatcagagagataattatgagcgacgatctctttaagatactgccatatggtaaaagaaagtaacaaataccagaagattcttcgcaattcccctttgtgataatgccctggagagtgcgcgtagacctaactgaggattagtgagacctgattccagaatgaccaccttcataaacaaaaaaaaaaagagattaagacatgaaaaatctctccaaacactaaattagatgtctctcaaatggatgtggagataatcgtttgtgttaagctctaaggtattcttacatctatatcacttgttggaagataaagccctgtcttgtatgacccaaaaacctcaacctttcaacagagaataagcaagaattagagattgcagtttcccaaaattgaacaatactcagagagagatactgaagtctccaacgtttgtaccttgcaactcggccagatatacttaataacacttgaaacactctccactgctgcatcacgctcagctttctcggcttgtgttggtaacagaaaatcacagaaatctactatttctgcaataaccaagatcaaatctcctcaacaagtttcttatgaggatgcaacaccaaaaggaattctcatatataatcaaactaacaaagaacctaaattcaatacccacattcatccagaattagcaaagactcaaactttgaatgaagaacctaaacttaatagccacatgtatcaaaaactagcttaaagactaaaactttgaatgatttttgagctaattacctttatgcaattgaagcattggaatcttagagaaactattctcactaaaccaattactctccaatctaggttcttcatctttcttcctcttcttactcttcttcttcgacgccacaaccaccggcgttacaggttcgacgccgttctcagtcgtctcaccttctacatcgagtgagaagaaatccaccgtagctgattccaccggcgttgtgtcgtcgggaaaatctgaaatctctttgcggaaaacagagtattggtgtgattcttcatgagttggtggtggagattgattcgaatctgagaatgaaagtggaggaagagtatcgtatacgaaagcaggagcttccgttttagcatcggagtcctccattgacggcagcttaaactttggggtttagggtttcgaagccgtcgaggaggagctacaaaacttaaaagttatgtcggaaacagagaacccaaacaaaggtcaagataattaattaattaatttagaaaaatggaaaaacaaaattatgagtaaaataatttaaagtaattctttttccaaatttttaaccaatgtagaaaagttttatttcttattatacctctttttatctccatgatgatttataaatcttagcttaaacaaaaggtaagatttggttttggttctaacaaatttaaatgtttctcaatattgcaatataatttttttgtagagcacatacaaatattagtgttgctaacacttgattgatgtaagttttcaatctatgttcatcgagacatacttgttttctactgttactcctacgaacttatttatattcagactctcttctcacttggcaaggaagacgatctcgagagtgtttccataggttctgatctcaactctatggtcgttgttggtgaagaaatggagagccaaggtcgaagaagaggtgttccgactctacttgaagtatcattgggtacacaatcattacgaggttggattggttgcaactcaagctcagtagtaccttgttcttgttgtttccgttgttgttcgaaagaagtttcagtaacgtcaagcacttgatgatcatattcttcaagtgatgcaattgtgcttgtttctgttctaactgttgaatcatcgccatataacccgtgccttcttttccttctcgttgctttaccccaaccgcgaatcgtctctcttattctctgaggtataagagccgctttatagttcgttcccatctggaatcaaaacaatatttcgttatcctcctaggagtttacggaagctgccaaaagtcgaaagctcgataaattacctgagtgactagtgcatatagtggcagtgtactgtagctgcatagaaactgtccagcaaacctacaaagaggaatgaattacattacactatgaggcagatgcacaacagtctaaatcgagacgaaaaacgaaggtttagttaccctaaaagaagtctgaagtaaacaaggtaatggttcttaaggaagcaagagctgtacccaaactgccactgaagaaaagtaataacaaatgcattgtaagttccaaacccgaatcgaaagtttgcgaaagattaaaagaatatatggttcatttgtcatacccagaaccagaagaacgaggccagttcaaaagaattctgttggaaatgcaaatcaagtagctgttagttttaccaagaccgagaaatattggttcggtgcaatggtggttagttaagattttgcaaccttgaacagaatgaaat

SEQ ID NO: 70084 - DNA, 3856 bp, Arabidopsis thaliana landsberg
agaggtccaggtaactacatttttcgccatcatattgacaaattcatggcgggcatcactgatgcttccacattttgcatacatgtctattagacaggttgatacgaacagcggtactgcattctgctggatgcgcaacgcataagcatgaatctgcttgccaattcttagtgcagccaaactggcacatgccacgagggcacatgatatggtacaaagcatgggggctcgatcggcgatcttgctcaaacagctcagataaaagttcgagagctttatttgcatccccgtgctgggagtatccacctatcatcacagtccaagtcacaacatacctttccttgggggaaagtgaatcaaacatagcacgtgcagtatcaacctttttgcacttagcgtacatgtcaatcagttgattgattaccatattctcatcaccatgaccgttcttacgcaagtctatgggatatttgatggcataacaatgaatctctttaccatgcatcaatgctccaacagaagcacaacccgaaagaaccgaaataagcgtgacttcatttggttttatcccagaagacaacatctgcctacacacacccaaagcttcatatccaagtccccgttgagcataccctgaaatagcagcactccaagtaacaacatccatttttattttctcttcctgcatcttctcaaataacctaacagcatcttcaaaccttccaatctgtgaatacccagcaaccatagcattccaagatactacgtccttcactgacatgttcgaaaacaccgtgtttgcctcatccatcatcccacactttgcatacatatccaccaagcaattccctacaaacatattctgtatcatctcacttgtgactgcaaaacaatgcaattgcttccctagtgaatgagttcctagggaagcacaaggaggaagaacattcacaagggtaatattatcaggtctacatccgaattcattggtcatcctgctaaacatttcaagcgccaccttaggtttgcctaactttgcataactttctattatagagttccacgatacaacatcccaaacagacatttcgtcgaacaccttccgtgcatcactcaatgaacgacaacgggaatacatagcaacaagcgcattcccaacaaagacattggagataaatccagttaccagagaaagcgcgtgagcagattctccacaacgaacggaggatatctcgccgcaagccttgaagacgaaggggaatgtgtaattatccggcgtccatgacagagaatgcataaggccgaacaaatagagacatttattggcgcagccattgtcgccgtagctgcgaatgagtgaattccaatggtagacaccagcgtcagatggaggaaaacgacggaggagagatacggcatgagataagcaaccgacggagatataggtggaaatgaggtgggaagtgagattcaaggttaggattccgaaagagaggagtttctggtgaataagcttgacctgagagatggttttgcatttgtgaataaacggcggtgttatctccggcgccgatgtcgagaagagagagactttaatgtactggtgagattttgcggcggcgttggggatgagaaggcggcggatcatactactgtaactagagtggcgggtgatttctgcgtttaaactaaacaaatcaattcggttatatcccggttttagattggaaatttgaagaaagtaatgaaaccggatgtgaaaagaagaagaaagtataatagaccgattaaaatttaaagcgaatttcggtttcgtttatgtgctaagcgacctgcgtttgcggttgagtggacgctttgaatagcgtttgtagctcagcattaaattgtatagaaattatcaaaatcgcagttaatagattcgagaacccagaagacctttaatctcccgcctctatcacgccatcagactccattatcgaagctcgttcactcttctctctctccaaattcgagagtaaggaggaggaaggtgtaatgccgcgtaaacctagacatcgtgtaccggagattctatggaggttattcggaaacagagccaggaatttaaacgacgcaatagtagatctgattcctaaccggaatatccagccggagcaatgccgatgccggggtcaaggttgtctcggttgcagcagcgataaaccggcgtttctgctgcgttccgatgatcccattcactaccgtaaacttcttcaccgttgcttcgttgtacttcacgaacaaacccctccgcttctggatttctctccaacatcttggtggtcacagagagaggtaagattcttcttcccactgtactatacattgctttgagtgcttaatttgagatatttcaagacgtggctactccttataaaatgcctctatgttatcttattttgtatgatgttgctgatttctaaacattttgcttcaattgagtttatcagattgttgaaaggattattgaaatgatgcaatctggatgtgattgccaaaatgtgatatgtgccagatatgataaggtgaattcttcttcttccttctcaaactcaatgtagagtgctgattttcttagcctaatgatttctcgtctcctttgacagtatgatcagtcgagccctattttggagctattgacaagttcatcttgggagtttcttctcaagcgggtttgttctcaaaccctttagatgatttactttcaatattcgagtttgcggtcactaatattcaagttcccttgtttataggtcggtccatgacgtcatggtttatcttctacagcaaacatcaatattcttaccattactagggaaaaaacaccatcaagtgtctggacctcctctatgtatcaagcataagcgtgagtctcagaattaaacttgtatccgagctcttctgttggctttcttttgaaacttccactttcttgttggttctctgaatacttatgatttgtctgtgactgcttggttatcgattatcaacttctggtttttagttcatattaacttagtaaagttttccttctccatggtatagggacattgtcagtccatgaaaacaaaagaaagagggatgacaacgttcagccaccaacgaaaaggcagtggctttcttcagctgtcgatgactgtcctaaggatgactctgcaactattacgcccatagttggcgaggatgtagaccaacatagagagaaaaaaactactaagcgttcaagaatatatcttaagcgtcggcgaaagcagagaaaggtcaatttcaaaaaagttgactgtaatgctccttgtataactcccagtacaaatggtaaagtctcaactggtaatgacgaaatgaatctgcacattggtataaatggaagtctcactgattttgtaaagcaggtaatgttcgtaacaatgatattgatcaatcaagtttaagttgaaaatgcacaagtttaaacataaagttattgcttaaaattactaagagacgtgtataaattgctcttgatttatcctcagccttgagaaattgatgggactatttttgtagttgtactttggtgtattttaaaaactgtatcatttatcttgttgtattctggtggttattaatattcttcctgacacttcattaccttcaaattcgacaatctgttcttgtatttgtaagatttaatcactgttttttgtaggctaaacaggttaaaagaaacaagaatttcaagtttggcctctcagaaacgtattcagttataccaccaaacagtatccttcagtggttttgacatgttcaatgacttgtagcaacgatagcttat

SEQ ID NO: 70085 - DNA, 671 bp, Arabidopsis thaliana landsberg
gtgatcgatgatgtcagcgatgccatctccggcctgctgggcacggaaacgcgtgagcagatcctgtgttttgcgcaggttcgcgaagtgttccgttcctcggtgcttggcaacatcgcaggctgcctggtcatggaaggccgtgtgcagcgtggccagccgatccgcgtgctgcgcaaccagacggtgatttacgagggcgaactcgaatcgctgcgtcgcttcaaggatgacgtcaacaaggtcgaagccggcaccgagtgcggtatcggtgtgaagaactacaacgacatcaagccgggcgaccagatcgaatgcttcgagcgcgttcaggttcgccgtaccgtcagcgccgcctagttcgatccgcttcaatgccgaaggaatatccccgcaagctgcggctcaacgtccagatccagcgcgaactgacggcgttgattcgcagcgagttgaccgacccgcgggtggcgggcgtcaccgtgaccacggtggacgttgctcccgacatgcgctcggccaatgtcacggtcagcctgctggggagtgatgaacagctgcagacagcggggaaaggattgaatcatgccgctggcaagctgcgtcaacgactcggcgtaaacctgcgcttgcgcttacgtgccgaagctgcactttcaagccggacgttg

SEQ ID NO: 70086 - DNA, 384 bp, Arabidopsis thaliana landsberg
atcagtcaatgcgctttactaaacgattctttgtgaagattcgaacctcataacatatttttgaacttttatccacaccccatccggatagagcattccagtccaattaaagaaaatgatgcttatggggcttttaacgaggttgccataatgtaacctcgtgataaacttttctcgaacaatcctccgacgaagattcataaaacactgactttctataccatatgagtttattaagagcctttgacaaacgttagaaatcggtatatcgaaaacatgtaccaacatacagtgcatataataaaaatgaaagggtttataaactgtttggaaaaccaagaaaggcattgcgtcaaagactagtccccgtggaagcacgacaat

SEQ ID NO: 70087 - DNA, 547 bp, Arabidopsis thaliana landsberg
atcctttcggagacggagacgagcatgatgttcatgacgccgatgccgccgaccagcagcgagatcgctgcaacaccgcccagcaggacggagaaggtcctgttggtcgagttcgcggtctcgacgagcgagtcctgcgtggcgatcgagaagtcggcctcggcggtggtcacgccgtgccgcgttgcgagcagagcctgcacctcctggtaggcggcggccagccttgcctcgctggcagcctcggcgtaaatcgtggagaccgaggtcgaggtgctgtcggtcagccggctcgccgtgcccacgggtacgacggcgaggtcgtcctcgctcgaacccgaggacgatgctcccgaggacgtgagcaccccgacgatcgtcagccgggtaccgttcaccgtaacctgctggccgaccgggctctggaggccgaacagcttcgaggcggtgtcggagccgatcacagtgaccgtcgagccctgcgccgcctcggtcgacgtgaagaaccggcccggcgagagctcccgggtccgaacgttgcgccact

SEQ ID NO: 70088 - DNA, 508 bp, Arabidopsis thaliana landsberg
  unsure (1)..(508): unsure at all n locations
ggatatactttttcatgatttaagtaattttaaacttgattaaaaatcagcgggcaggctaaatgaataaaagcgggttgaaggataccggccggtatccacccctaccattaatgtattgctatattgaaccatcccgacttcaggatcatagcccttataaccggtaaaagtgtacaggttctgaacgctggcggagagttttaacccggtcatggaaagtttggaaagcaactgatgtggaaaatggtaactaagcgtcacattcttaatgcggacataagaaccgtcctcgacaaaccactggctgagtcggttattcccattgggatcccctggtgctatgcnnnnnnnnnnnnnnnnnnnnnnnnnnnnnnnnnnnnnnntgctatcggagataggatagctactgggtctggcaaagtttatgaccgaagtataatagttcccaaaggttcctgtattgcccggaatttccatggaatacctgggataattaaccacgtaa

SEQ ID NO: 70089 - DNA, 361 bp, Arabidopsis thaliana landsberg
atgtttgttgaatttgtttgtaaaatgttgttttgtggccaaatttattttatatttggaccattttggtgcaacttcggctcacgtgacgtattatggattgtctagggtgcaacaaaacattagcaagggggtggtctcaaaagacgcagagcctaccaaaaacaagacgtatatgttagaaattatatggatacactcgtatacgaagttagaaatcttcatgacccatctaaaaaagaatataatcttggaagcttcaatcaaacaacttatttgtggatgacagaacgctagatttcgacaggacaacaaatgacgacctttatggccttattaaatttaccaaaacgatcctttt

SEQ ID NO: 70090 - DNA, 515 bp, Arabidopsis thaliana landsberg
ggatatcgggcacaaacaacaagatgccgtacctctgtgtccattctgtatcgagggcgccgatcctgtcagaccattggaacgggtgtgcgggtgtgttgacggatatcattttgagtgtatgtgccgaatgctagcgaacatacaaaacaccgacaataggtgtagtgtctgtagacaaatgtttcagcacccgaacctcagatatctggaacggtatcattttaatccagtatttctcgattacaatgagatgggttggccggaggccattggcgtaacgttgacaggtatattatttgtggccaatttagcactggtaggtatggcaatcatattttgggactatattcataatcaacaaagttatagacaatcaatggccacaatcatgcaatcggtgttgtattcactaatcggttgctttattaccagtgctgtacttcgtctaagacgaacaccgagaaaacaggtgctcgacatcaagggctacaatccaaacactgggcaattag

SEQ ID NO: 70091 - DNA, 181 bp, Arabidopsis thaliana landsberg
  unsure (1)..(181): unsure at all n locations
accggagcataggaggattccaccgccacttgaggggccaaagatccgatacaaacaccaccggggncaacccacgagccgagcaacacaagaccacaaccggccaaaccccggagaaaacgacccacgagaagcggcacaccccaagcgagccaagcaggacccagggaagccacacgcg

SEQ ID NO: 70092 - DNA, 769 bp, Arabidopsis thaliana landsberg
ctctgtaggtcattttgtccattcatatagaacaaaatgagtgagcatttcaagaaccattgaagaatttacatgccttttgagagaatatgcgagtgaatgaccatttcaagaacctacatgccttctgagaattaatctaaagcttaagttagcttcttagatccttttaactaactaaactaattattggtcaatcctagactcgtaaatgtgataaaccagtactgtgatatatcaaaaaacaaatggcaaaagcattgacgttgcaggttaagtcaacagtaagatcgacaaaacgtacatgtctaagcatctggttctcgttctgaagagtagagagtcgctcttcaagttcagagtttttgttctccaagtctttcactctgttttccaactcgctcaagtaagcctttttcctctctcttgcttgctgagctgaaactctgttcctcaacaaccttttcaccacaaaattaccaaacaaccccatcacgcaaccgttatttaacataatcaccttccatataaagggtaaaaatgtaaattcaatgaatagagaaaaagacacctcttcagccgcttgttctctttctccgccggtgtcctccctcgcttcctttgactttctccgacagtcgcctgtgtccgctcctgaccggtcgccgatccagattctctaccggaagtttctttttcgacagcttctcctccaaaactccgcactcgccgtattttctcatcgctttcaattcctttaaacataaaa

SEQ ID NO: 70093 - DNA, 1592 bp, Arabidopsis thaliana landsberg
ccgccagaacttggagtcgtctgcgttgaaaatcccttcagcttccatagcgtgatcaaatcaccatagattccagtggtataataaccaccaacagttaaaagataattttaaggagatagtgcaaaaatacacgaaatccacaaaaatcaaaatctgaatagggcaagtggtaagagctttagaaacttgttccaacccaaactcatatcatctacatagataagagaaaaatgaagcaataacctgtattcagacccatcagccaagtatgcaccgtagctaccaactgatgctgcaactaatataggccgctttttgagaatcttatcatccatggaagagctagttccgcatttgtcataatacgagttccgagcttcacacgctatttctacgctctttttaagcaaagattcgctctcttctctagaaaatccctttgcttcaaacccatgaatcgtggcctgttcagaattatcatcaatccaagttgttagtgtccaaaaaagagatagataaacaaagaaacatagaatgatggaggtaaagaacctgataagaagcgctggagatgatatcagcaccagcttcaaggtaatcgagatgcacctgctccatcaggaaatacaagcagctaagtaagctacaatcaatcatatctaatagcaaagcgatcactgagtagcaaacaaaatcttaaccctgtttcccgactcagaatgcaaaagaaaccatggaactgaatctggaaatagcaaataatgagtagatattaccacacaatggagcaacatgaacactagaaaggggtttagggttcacaagtttacagctttaaatattgtcaataacaacagttgaatcagtaatcttctaaatctgcttgaaacgtccaaggagcaaccaaccattgatggaaatgagaatgctttacttcatccacctttagagtacccatggcatttactcaatcaatcaaagtaaacctaaaaatcctagggtttattcacacccaaaataagaaaagcacaaggccttgtcccgcagctggacgttggattcagatttcactgacaacagaagaaaaggatttactgcttacggtgtgaatgaggtgaggagaggtgacaaggcatttggcgctccagagaggatcgttgagatctgctccatgtctctcgaactccgttgcaagccctccgtctattaccgcatagccgcctgtctgcttcaggaaatctttcatcgagttaaaagagtttccggtcatcttgtatgtcgcctcggaccgatcacccaacaactcccactgaagcgtgtactgtgtgaaacatacgataaacacaaaaaactgtagagagaaacactcaaaatctttagtactaattttgtttacaaattgtaggtttagacctttatcttgaatactaataacagtatcggcccaatccttttctatgtttccttcagacccctcttgtaagtaagttttaactctctgtttttttcttatcagatattgatgatcaatttacatgtgtgcgtcgtgtatatatgaaattcgaatcaacatcaaaaaataaaataaa

SEQ ID NO: 70094 - DNA, 452 bp, Arabidopsis thaliana landsberg
ttctagataaggtgcaagatgatcaaatcaaatgtatggaaattgggaattaggatcatgatgaaattttctggagtacagaagcgagtctagtagccatctcaatgttcttcaaatttgctgggattccattctttttgcatagagcttgtagatccttcctcttcattccatgaaaattcattttcaaagatcgaaacaatgagaaattcttctctcaccataaatcactaaacaccacacaaatgttaattttggaagagtttagagaatcgaaatcgtctcagataattttgggcataaatgtttcaatttgaatttgctaaacccgctcttggaaacgcgagtacaactctttaagtcaaaccacgcgctctttttgtgtactcgcttttttacccgtccaatgcaaaagattgatagcgcgtgtagttatgacgtggagggatggg

SEQ ID NO: 70095 - DNA, 537 bp, Arabidopsis thaliana landsberg
  unsure (1)..(537): unsure at all n locations
aaagaaactcaaacctttttatatgatttaacttatagaatatcttgttacatatgatatgtttgggtgaaagagggaaaagagaaccgagaaaaataagagaatgaaaagatgaaagaacagagaacaatttcaaagatatcttatatagtagagaagttaatggataacttggttttattaaaatgtcgaatgcaacatttctaatattctagttaggctgcctatgtgtttaacttcatgcctttcatgacatttcatctcagtacttggagtttactattcaagcttcgtttgcaaacgcannnnnnnnnnnnnnnnnnnnnnnnnnnnnntactacacagtagccatacataaaacaattcgttctacaaaccagatcgaataacatgtgtgaaatagattcatctgcagtacctttttaacgcggctagctatcaggaaacagagtgcttcacttgtatataaaaaaaagaggttcaagcagaaatacaaggcatcgtaaaacccgatatggtctaaaagatataactaag

SEQ ID NO: 70096 - DNA, 534 bp, Arabidopsis thaliana landsberg
  unsure (1)..(534): unsure at all n locations
aaccattgccctgaggaccctaccctgctgaatattcgctatcctggtccatacgcccgaattgctgaagaactgcataacttaggcgcaaaacgatcgccaaaaccgtctgcgttatgcttttgtggtatatgataaaaacgccaaccgttatgccggcagcagcagttttggcagcattagccggcacgactgcaggctcgagatcggctggacctggattggcnnnnnnnnnnnnnnnnnnggtctcaaccggcacatgaaactggtgatgctgcaattcctgtttgagaccctcggcctcgaacgcgtggagctgcgcaccgatgagcgcaacaaggcctcgcgaacggccattaccggaattggcgctaaatttgaaggcattttgcgcagccacctgttaatgcccgatggacacaggcgttcttcggcttattacagcatcctgaagcacgaatggccttatatcaaaacaagtattttcaagcggtaagaccatggtaaaacagcagattcggttcaaattgtttt

SEQ ID NO: 70097 - DNA, 586 bp, Arabidopsis thaliana landsberg
gaacaaccagtacctggtacagcggacgccaaacatcggttacattttatccttctaaagacgagtagggggatggccaaagaaagttgtacagccttttctaagatcttcccataagttttactcaatcgctcgctgatgatggaattgaccccaacctgaaggatacccatgaggttcctatagagagctttcccactcatgaaatcctggtaaaagaaaaacgtggaaccaattatatactgcatactgcatgtctacttgagatgagtccaatgtggtaagagaaaacaaagcaacaaattaaattagtacttttagtaattctataattggcagctgcgtttgcagtgaaaatgtttcaagtgacaccagaaaatgtggatgctcagtaaatccatcaagatcctcctcctgaatatcatacatgcttaagatcctgaagtgaaatacagaaaaatgttaatcaagtcttcaacataaatagtgccctaaatgaaaagtgatgtaatttacaaaaggtaggaccactataggctgtttaaaaagtagaaacatgtccttaatttcttctaaaatcaaagtt

SEQ ID NO: 70098 - DNA, 416 bp, Arabidopsis thaliana landsberg
  unsure (1)..(416): unsure at all n locations
gnnnnnnnnnnnnnnnnnnnnnnnnnnnnnnnnnnnnnnnnnnnnnnnnnnnnnnnnnnnnnnnnnnnnnnnnnnnnnnnnnnnnnnnnnnnnnnnnnnnnnnnnnnnnnnnnnnnnnnnnnnnnnnnnnnnnnnnnnnnnnnnnnnnnnnnnnnnnnnnnnnnnnnnnnnnnnnnnnnnnnnnnnnnnnnnnnnnnnnnnnnnnnnnnnnnnnnnnnnnnnnnnnnnnnnnnnnnnnnnnnnnnnnnnnnntataggcacccacgtgacatgggatcccatatcggggtgatgggctgatcacatctttaaaatcatatccctctttgcagaatttttttaaactaaatggttgctgccaattgattactaatatagcaatcaaaggctaatgatatataggcgttgtgaatggg

SEQ ID NO: 70099 - DNA, 688 bp, Arabidopsis thaliana landsberg
  unsure (1)..(688): unsure at all n locations
tttggtnaagcattttacggaaccttttatagaggagtagtggcaaagcttatggcgaaggattgtaaagtgaagcccccccgcaattgcaaaataaacaaaatggcgaacgagtgaaattatattacgaacaaagttagaggaaaaaaaaaaacgaaataagaaaagtcaacataggtttacgtgagtttgcctcttatgccaaacgcgtaatggtctaatggaataagacagaaaaattataattttgttttggttaacgaaagacctcattaatacgtcaaataaataacggaactatggagtaactgaataatgacggagcgaattgaattagataaagtttttatgaaataaaatgctgaaaattagttttaagtatatactttttgcaaacgtaaaattatgtaaattaaactcgatggaaatttcgaattacagaatataggggaatcatgttttcaaaacctgaattagtggtgtaccgattcatcctttaggttgagagaagaaatttccaggaaataaaataacattaatctcttagatacagagaataccatttataaccaaaatgtcaaagtttgagttgatatcaaaagaaaaaatgaagaagaagacaacccatgatcctttttttctaatttgaaaaacctttacatgacccaaaaatttcttatatgcatgt

SEQ ID NO: 70100 - DNA, 450 bp, Arabidopsis thaliana landsberg
  unsure (1)..(450): unsure at all n locations
nnnnnnnnnnnnnnnnnnnnnnnnnnnnnnnnnnnnnnnnnnnnnnnnnnnnnnnnnnnnnnnnnnnnnnnnnnnnnnnnnnnnnnnnnnnnnnnnnnnnnnnnnnnnnnnnnnnnnnnnnnnnnnnnnnnnnnnnnnnnnnnnnnnnnnnnnnnnnnnnnnnnnnnnnnnnnnnnnnnnnnnnnnnnnnnnnnnnnnnnnnnnnnnnnnnnnnnnnnnnanaaaagtcatatgaatattttacccctataaaaagatataatcaaaattgttcccttgttagcattgagaatccatattatccgaaatgtatttaataaaaactaacaaatcaaattaaacctccaccgatctgtnnnnnnnnnnnnnnnnnnnnnnnnnnnnnnnnnnnnttccgtaccacttttgggaaggcctaccgccccatcagaaactggactaccccgagac

SEQ ID NO: 70101 - DNA, 303 bp, Arabidopsis thaliana landsberg
actaataaatatgaaatatatatggaagcccgtttatcctttttctttggctctcattcgtagcgcagcatcagttatcgacgaaaatgtccaaaaccactcaagtattttatttttttggttagttgtttatatctgaccgccgtttgtttttgtctagaccgcagtttaatgttcggcaattaataatggactgccaaaatatttggagatagtaaattttgaaaacgaaattactagagggtaaaatggtaaatagagagatgagaggtttgaatttcaacgttcgcatgcaagcgcaaa

SEQ ID NO: 70102 - DNA, 418 bp, Arabidopsis thaliana landsberg
  unsure (1)..(418): unsure at all n locations
caccaaacatacgcgagagcacagggatgcaaagaacgaaaagatagggcgagagcgcacaaccctgcccaaagccangggaactaccaaaaaacccagccaactcgccgtttacttgaaccgataaagttgctgcggaaatacagagccttgatccaatgtactaaacgttgcctggaaaattcaacgccttcaagaagtattgagcgagaaattgccacttgacacagagtcaaaaggcttttggaaatgtcctatttacataagcgcacactttggagtaaactgattcacttatggatagtccttttacccaatttctgattgcctaggaagaacaatttttccactcaaagagatcttttccttttaaccaaaagccagaacttgatttttgccaagaataaaaacctagggc

SEQ ID NO: 70103 - DNA, 508 bp, Arabidopsis thaliana landsberg
cagatttgcagtttcatcatcacgaccagggtgatgaaggcgactaaggtgctgaagcctgtgacgaaatgcgctacgtcggtcgcgaagggcagggcgacgcccagcgcctccagggccagggccagcacggtgaaatattccagcatgtgccattgctggcgcttggcgaacaggatgttgcgcgacgcctcgttatacagcaggcggaattaggcatgggtcatgtcgtcaagttcgctggcctcgaggcgctcgactttctcgccggcatgggcggtctcggccgggccggacttgggggccagcgggcgggggggcgcgccgggctgggcggtgggtttatgctgaggcgttgccatactgggagcctaggccggcttggttaacaaaccgtaggcgctgtgcgggccgggccgactgggccggccggaggtaaccgggcaagtcccggcagattcttgcgcccggcaagggcggagaccgttccgggcgttcggaaaatctg

SEQ ID NO: 70104 - DNA, 436 bp, Arabidopsis thaliana landsberg
cccaccacagccaggggaacaaacaaatccccagccaggattattatcgtcctcaaacataaatgggggatcaaaaaagtgatatgatagcgacattaagctttctgcatttcgatcaggtggacgaaaagcgcttcccaacttccaggtagaacagataacgagatcaagaatgagtggcacacctcatctaaagaaaagactggctcagagctcaggaactgcagatgaaccggcctcgccttgttcgagtgattctgtttctcgagggaaagatgataagccatctcacgtagaagatcctttgaacagagagactaatcataggaatgagtcgactacatctatgtcttctgggggttccaaccaacaagatgatccaaagatagacgacctcaggtttgagtatatacaagaagcttatagcgagtttaac

SEQ ID NO: 70105 - DNA, 283 bp, Arabidopsis thaliana landsberg
  unsure (1)..(283): unsure at all n locations
aacaaaacgaccgcccaggcctcgagacaaaaagttccagacccaaaagcaggcacgcccaaagggacgccccaaggaaacgacccagaaagccccggaacaacacacaagagcgcnccaacaagcacaagaccaccaacgacagcagcccccgcaaccnaagcaccccccgcaaaagcccccccggcaaaaaaagccacaaccacaccccgaacaaggaagaccacccccggcacaagaccagcggcaggcaaaaaaagaaacccgaccaaggaccacaaag

SEQ ID NO: 70106 - DNA, 137 bp, Arabidopsis thaliana landsberg
  unsure (1)..(137): unsure at all n locations
cggacgcggccgacggtgaccagcgctgaggttttgcttgcaattggcgacttttcgttggttcaggaagagggacccccgagcacaagccgtnatatgaaggcaggttcccgaagctacgggaccaannggaaaaa

SEQ ID NO: 70107 - DNA, 440 bp, Arabidopsis thaliana landsberg
  unsure (1)..(440): unsure at all n locations
taccgatngaagccgtcccacacccccccccccccccaatgggtggaccaccggccgtctgtcggcccagtcgtacaggcgccttcccccgacgagataggcggccatcggatcgccgatcagcagcccccgctggtccagttcgacgacctcttcgggcatcaatccggagtcgacccgtaccgggacccgcaccgctcgcagcatcgccgcacccagctgacccggcccgacctgcagccgagccccttcgggaaccagccgggccgcgtgttcgcagatcgccaggtgcgcgggccccggctgcgtgaaggtgacctcgcgcggggcgtcgtcggtctcaccgaggaccgtgatctcgtcggtcggctgcggtccggcggagtcggcgtgcggggcggttctgcttgaccaccgccgtggtcggtgtcccggacttt

SEQ ID NO: 70108 - DNA, 102 bp, Arabidopsis thaliana landsberg
cccccccccccccccgtttataccttttttttttcggtttataaactttatgacatccataactatttagacctctgaggcacaaactttgactatgtgaca

SEQ ID NO: 70109 - DNA, 185 bp, Arabidopsis thaliana landsberg
  unsure (1)..(185): unsure at all n locations
ccccccgaacacccccaaagaacccagcaagccnaaaaacagcccaaggaacaccgggcgcaccgccaaaagcgggaccgcgaacgaggcccaagaagccgacacaaggcagaaaagaaccaccaacagccgaggcaacaggcgcgccaagaccgagaaagccacacggggaaaggcaggccggg

SEQ ID NO: 70110 - DNA, 557 bp, Arabidopsis thaliana landsberg
  unsure (1)..(557): unsure at all n locations
tcgtttgcatcgccgcttgagccccatccccgactggtctcacctacaaataaagattcgtctttagcccattcaaggcgaaatacccctgcgttgaaaccggtgcgaaagataaaggatgcaccctggtattcgccgttannnnnnnnnnnnnnnnnnnnnnnnntcatactcataccttggtctcctaccagtacttgtcctgcaaaagnnnnnnnnnnnnnnnnnnnnnnnnnggttggctctgaggtggaaacaccgaggaagccatacggcagccatacagccggtagacgtaattccggaacttgttttttcatttcgaaaagggtggtgaacttttcgttctcaatatttcgcggctggataaaacggccgttagcatcttttgactgacggngatcgatctttntaaaaagctcttcgggtgtcagtttaagaggggatccgggcagctttgtccagtttaaaccggcaggagttcccaagaaatcgcccttgcnnnnnnnnnnnnnnnnnnnnnnnnnntccagtcgccctgattgtctgtataaaat

SEQ ID NO: 70111 - DNA, 290 bp, Arabidopsis thaliana landsberg
  unsure (1)..(290): unsure at all n locations
aaacaccatgaaaaacagggccaaaaagacgcggaaccaacccccccagacttcaaaacaaaaagtccaaaagcaaacaaaggaacaaaccagggggagagcccgaaaaaccgccggaaccccccngnnancaaagaccgagccaagaacacaccccacagaccacaagaaacaaaagcngcgngagaacggccgcacaagaggccaacgccnnncnagcccaagaccaaccganccgancccacagaacccagaacacacggcaggcaacacaacacacccnagaaaca

SEQ ID NO: 70112 - DNA, 514 bp, Arabidopsis thaliana landsberg
cacatgagtaaacaaaaattaaaatttgatgactcatatatcattagctaattaattattattaattaacaggcataagaggaaatgtgagagaaagatgtataggagaatgaaatctgaatgtttttgttgcattgggtaaggtacagattttttcccggccgggatgcctcttctttattatagatggattataatttgctcaatttattttcaggatataattaagatgtaaatatcaacaaataatcttcttgaaactaaagtaatttgatttcacattttcatctcttgttcgccaaaataaatttcaggcaaaccaatatttcatacagaactgatcagtaaatcgaatttaagaagaaaaagtactagaaacgtgattaaaaaaaaaaatggtaagaaaaatattaatgttctgttaagagaaaagtaaaaacaatgtattttgtctaaggcaaaacttttcttgatgagttttgcttctctttccaatgagttatactttctacct

SEQ ID NO: 70113 - DNA, 3566 bp, Arabidopsis thaliana landsberg
tgtgatcataactttggataacactaatcattcacacgtacggatggagtttaaaatgtaaacaaaacttcgattcacatacgttctaaatttattaagaatacagattactgtaaacttatatgcctaaatctatggttttaacttttaagtatatcatgattcatgaggtgttgtactgttgtttttcttcattagcatgaattgaaatttaggtagttcttcatacaaaaagttaaagcaaaattatttttgtaaatttttgtgaatgtgtcatcatactaaatactatgaatttttgtgtttccgtttatgggtatgatttttcttagttaatattacgaaaatatacaaaatcttgaaataaaaatgtaaaacctaattggtttaaagtaaaattttgttaggtttgtattaaagtgtgtacactgtgttgtagggttaatttacagttctcatctacaaataacattctaaagaataaaatcacccataaacccaaacacattgttcttggctaattgcatatgttgatcttcacaaaaagaaaaaacttaagaaaaaaataagacaaagccgcgatggctaggatcaggttcttgagaggtcccacatggtgactcattccattcgtcgtctcaaagcctgcgacgtgtcatcacaatcattaaacgaaccccactggctaatttagccgacatatgaaggaccaaaaccacacttctacttccagaaacttcgtcacaaactcttggcttagatttcgtcataaacttagtggttcacattttgccacctgtctgtttagtccccacgtgatttatcctacgtggctactctcgttcctaaataatgatacttttttgttggaaccaaccccaaacttattgatactttcgtaactcgcccctattctttgatccaagtataaactcctttgtcattccttatcaatcattcgtcaatagaattaaggtcgtgtcttaacacactttctaaagggaaagcctatttctggaaatatatttttagataacgttttaacaaaaatggatttgatcaagtgaaaactttggtccacatactccactgagatatttacttggcttacaacatatgtcacaagatatatattccaaagagatattttacttggctcacataattcccaagatatttcatatgttttggttttgttttcgatgaagataagatatttcaaatgcttctccacctaaacccaacaacttttgagaattccaaattctgatcaagatagaaattttttatattgtttttcgaattaattgtttttcatatcactacaaaacaaaaatattatattaattaaagtataaaaaatggtactaatttaaattactcaaaataaatgatacacatatacatggtgttatatcaattacaataattgacactattattgaattgtttgacattgatttattaaaatcgatacagattcacattaatttgcatctttttccaaatattattacaacaacatttaaatcactatgttcttaatcgtcttttcgtaataataattaaattttgaggtttttcgctttttagataagaaaaaaataatgtaaaaaaaaattgacgagatcatagtttggttgatcacaagtgaggaaaatgaagttattatgtgaagaaggattctataatcgattgaccaacattcctccaaagaaatatattttatgttataaaaaaatctaataaataattggaaataaaatcatcattcaccaaactttatactgttttacaaatctacgttttagtcaatttcttccccatacttgacctcatgaagcaatgaacacaaatctatgtttcgattttaccatggaagagggtcttagtgatatgaatttaaatgtcgggataaaatataagattataaaactataaaggtttattttgaaatacagcacacacaagaaaaaaggcccatcaacctcgcagtcctaattagataaatacacgtcaacttctctgggaacaaaaaaactgatattttctgattcgtcgtttcctttctactttcttcttcgtcaggttttcaaaactgagaaaaatgaatggcgagggaaaattggagactggtggaactagcgccgccgccacaccaaaagaggagaaggaagaagaagaagtagtttcccagagagtagtgtacatgtggggttacttacccggagcttcaccgcaacggtctcctctgatgtcaccagtcgaagtaaagattcctccggcagtcgaaagttcatggaaagatgtctctggtggtggatgcggtttcgcaatggctactgcaggtgatagaatgttttcaattgaaaagttcttcacatttcgaatcaatttcataaaatgttatctgatttgaaatcatgagtaattttttgaagttgaatgatatggtttttgttaaaacagagtcagggaagctaattacatggggttctacagatgatctaggtcaaagctacgtcacatctgggaaacacggggttagattttcttaacttaagtgtgaaattttgattttcttttctttgtgaaatttgagttttagttagtttcgattttattggtttataggagactccagagccatttcctcttcctccagaggtttgtgtacagaaagctgaagctggatgggctcattgtgtggcagtaacaggtaacattttcatgagcttacagagacatttgtgtccaagttcatagctttaattgtcttattgaatacagagaatcaacaagtttatacatggggatggagggaatgtatacccactgggagagtcttcggacaagtagatggagattcttgtgaaagaaacatatcgttctcgacagagcaaggtcaaattttctttgactctttcttgtaaatctatcttcttttttaacattgaggatgaatgtgaaggatggtgactctttttgcagtgagttctagttctcaagggaaaaaatctagtggtggaacgtcttctcaagttgaaggtagaggtggaggggagccaacaaagaaaaggaggatttcaccgtcaaagcaagctgctgaaaattcatcacagtctgacaacattgacctctcggcattgccttgccttgtatcgttggccccaggagttaggattgttagtgttgctgctggtggtcgtcatactctagcattatcaggtgagatttttagcttttcacacaccatgtcactaatgaggtacattggttatcaattatgaaaaaaatatcagtggcggtatccattaagctaaagagcttttggtgtgctataataatcacttgatgcatcctaattttttttctgaagtccagatattggacaggtgtggggttggggttatggaggagaaggacagcttggattgggctctcgtgtacgtctagtctcctctcctcatcctattccatgcatctcagccttctccttatggaaaagccaccagttaaggtgtaaacatgagttcagtagtgcaatgcggccgagttctggaagt

SEQ ID NO: 70114 - DNA, 257 bp, Arabidopsis thaliana landsberg
  unsure (1)..(257): unsure at all n locations
gcacgacgacacgacggcttccccaccaacctccggcccaccacttacataccgagcagggcgccaaacacaacgggggcaacaaaacacgagggccgcgcacgccgcgggacaaaacccaacaccgaacggcacgagcggacgacagccaagcaccaccagngcccgcgaacccgaaggcaccccacgcacacaagaggcaagcctcatctaaggcacaagacagcgaccnccccagnaacacacaaaaaaaaaac

SEQ ID NO: 70115 - DNA, 3250 bp, Arabidopsis thaliana landsberg
ccaccgcgttcaacactatcgacgttaacggccaatcagaattaatccctcttagtttctccaaatacgtctcaggcatagatccgatcgattcgaatttcaaatgcgattcgtcagaatctataactttccacagttcgattcccgtcggattatattcatctccgatgatcccagccacaattaaacgattaccggagaatccaatcgaacgtgagtataagctacactcgccaggacagagatcgagaagcttcgtccacgatctagttactagattgaaactacacgtaacgcctgatctcttctccgtcacgtacatcttctccgaactcaccgctacggaaagccacgtggacgacgcggattcgtagagaaaatccggcatcgattcgcatctctcccacgctccgtctccggattcgatgtcgaacagctccacggcgaatctatcctcctcgaaatcgcacacacctccggctataatcaggctccgtccgactacagccacgattggatcgatcctccaaactctcggcggtgccacgtgttgccaagtcagatgaaacgcgtcggttgagaaagagaatctcgccggagataaagcgtagagcaacgtggagtgagaggatcgagcaacggagacgtgttcgacgggagatgatgcggtgttgagctcgatccaggcctcggacttgggatcataagccatcgccatcgtcgccatggtgtacggcggagaatttctctggttgtagacgaacaaccacggcatggttttaaggcggcggagggagtaaaagacggcgcggttccatgatttggagacttggcaagcggaatcgaggtctaggagtggtaaataggagaggattgactcgagtatgtctccgtcaatggaactttcttcttctccgaaatctcctccattgttgttgttcttcttcttctccattttttggataatgcacaaagtctaaaggagggaaagtctttatatatagagagagtgacacagcgaagttggtgatcgactcttattattgcacatggaattaatattattttattttcttgtaggttaatatgtgacattcatatacagtaattattattgttagtaacttgagattgggactaaattagatttggatggtattcttaagcattcaagttaacagagttaactcaatatgtatggagtattaaagttttcaattaacaatccgattattggttatgaataaaatgacatatgtcattattttagtttttttattcaacttgctcaaattaggaaccaattatttacaattggttcaaatgatgatgctacaaggattttaccataaaagaggtgacaaaacacaactactccactacactgtatattttcgagtcaagtcaatgaaacgatagtactatctcaataataagcaagcaataaaatttgcaaagaagcaacaacacaaaaattcaggtttgtgtttatatagcatactaataatagagagcacatggtttgtgatatttctataccaattgattacacaaccaaatcattagaatttagaaaataaactaattcaagattattaaccttttaacttttaagtttaaactcccaactttctttcacccaatagactcaaagttaagtcaaagtaagcagaaattatatatatatacatcatatacatctatatatcttatccaaacggataatcttatctatccaccaactcaaatcataaatgtagactgaccaacgcaccagctacttataatgacttttgtgtcccggtatcaattgaattcgagcaggacgatgaccttagttcagacaggagccagatcaatgtcactcatcttgatacccattactaagttcatgctcacaagcctaatcatgttaatcttgcaatattagagacagttatacaatgcttaattattattatgtaatagtatatagaagaacctgcttgcttctaatcttacgttttcatatccgaaggaattaatgaattaaataacacaacctgaagataaatatcaaagccaggaccatttgcaacttcccccaaggaccttatcctactctcactctgtggctccaaattctctatttaacgtacagataaggagatataaagaacaatgtgtataaaccacaaatgactagaggagaaagatatttacgcaaaaagaaaaataacagtaaaataatatttgattagacctataatctactcataacctactacgacgtgataaggcttgagaatgagatgtgagatgtcatcaacacgttgaattttcatgcccaatgaaatttacaacatattacaagactacttaaagttgatgacggttctgcaattcaaggccatttttaacgaaaactaaagcattctggggttttctctagaagtacttcgttatggcacttgggtttttagtatgtatgtttacaacatttacacaaaacaatgatgagaatacagtaacacttttgctctattttagtctttccctcaacttcctaactatcttgtcaacgggtaaagatcccactggaccaaccggatctagcgactcatcatcggaacactcgtcatcaaagtcatcgtctatgtcactataatactcttcggaccggtccttttcatccacgtaatcctctgctgcaccatcagtatttgacaagaccatagctgtgtaagtgtgttctgcagccagtgaagtgccttctaactcttccaccttcttcaatagatcgtctggaccgaggtcaagctcttcaagaatcacagccttcgacgattccaacgctcgttgccagagcgagatcattttggggcttgagatcgttgtacttggattagccacagtttgttcttcactaggtttgtctgaaaagaaaagaacaggtaaaaggtatatgagaagcattcttttgatattattagcattggtcagtggttgtccttaacttcagatagaacgatgtttgaaaactggaaacacgtaagaggtttctgagtatgcaagagttaataataataatacctgagggatcaagttcgttcgttgtgttggtctcagaaaggcttggaattagaggattgtctacaaaccgcgacttccattctcgtcctctccgcatgagtatttgctcatcatcgaaaggcagaagcacacaaggaactaactcctgcaaaaagataagtaatgaagagaaagctta

SEQ ID NO: 70116 - DNA, 298 bp, Arabidopsis thaliana landsberg
  unsure (1)..(298): unsure at all n locations
gagcccgcccaggagccgcagacgtcgcaacccgcacctcagacgccgganaacggacgcgncgacgggaagaagcagggcaacaccccggngnacacagaacagaggggggcaccagccgagggaccccggcgagcccgcgaacaaaaaagcggacgacgacagaaagaaccaccacccaaacaccaaggggacgggcaccagcagacgaaacacanacaggnccccganggagacgcccccgaaaccaagaaccagggaagggacgcgccaaacgannaacaaccggnggaacaca

SEQ ID NO: 70117 - DNA, 219 bp, Arabidopsis thaliana landsberg
  unsure (1)..(219): unsure at all n locations
aaaaaaaaaagaggcggatcaggttccgtttccctgaccacaataaattcgtcacgcgcgcaaccaaacagcgggacccctagcagaaacaaaacaacccgcaccaaacccgaaaaaacaaagaaaaaaggaaggagccccacncccacacccggacaaaaagaacagcccacaaagacagaacggacaaggggccccaacgancaacaagcaaaaatt

SEQ ID NO: 70118 - DNA, 433 bp, Arabidopsis thaliana landsberg
ccaccaaatcaagtgcgatgtctgcctgcttggccagcacgccctgggaccgcagaaaaccggtcagataagcggttgatggataaggcgtgttgagctgggtcattggcgggatcagcgccagcacccttgttgaataggtctgcatgccgagattatccggcaaatcgactggctgcggaagcgggtgccgggtcgtttaatccaatattcccacttgcaagtacaagttgaacacctctgcaaactcaccccggagatttcatgctgaatcccttgctcaaacgcctgggactgaccttgttggcgaccgccttcctgctggggctaggtggcttgtctgtgtccccgacggccaggcctggcgacgtggacattgggatggcgcaaagcatgatcatccatcacaaccaggccttgcaaatggcccagt

SEQ ID NO: 70119 - DNA, 494 bp, Arabidopsis thaliana landsberg
cattatagtagaaaccacctactaatactctaaaaatgtaaactttgaatctatcagactttaaagaatggatctttctcctttcctttcacatactaaaatgggtcactaaactaaatcatgtatcttcagatcaagctgatcaagagcagcaaccaaatcttaccaaaaacaaaaacaggaactgtctctcaccatatcccggctcttaggccacggaaccggcggcttataattatcaggcaagggaaggagacatttaggacttggttcagggcaatgacgttctcgatgctccatatgtctccttgatttgagctgcttgatggcagcgtaattatcaagacaaggtatgtaatcaacagattctgcacctttacatagatcccatttcagctctcccacctcgagggaagtgtttagcttcatcttctgtggagttcgatctgaagaaacgtcgacgattcggtgaggaattggggattttgggtttg

SEQ ID NO: 70120 - DNA, 435 bp, Arabidopsis thaliana landsberg
  unsure (1)..(435): unsure at all n locations
ccgagggaaccggacangataaagggggagcatccggcacgagcacgaaagaaccaaacnaaangaagacacacaaaaaagacaaaccaacacggaaaaaacaacaatccgacgccaaagagaacgcaacaaaagnnnnnnnnnnnnnnnnnnnnnnnnnnnnnnnnnnnnnnnnnnnnnnnnnnnnnnnnnnnnnnnnnnnnnnnnnnnnnnnnnnnnnnnnnnnnnnnnnnnnnnnnnnnnnnnnnnnnnnnnnnnnnnnnnnnnnnnnnnnnnnnnnnnnnnnnnnnnnnnnnnnnnnnnnnnnnnnnnnnnnnnnnnnnnnnnnnnnnnnnnnnnnnnnnnnnnnnnnnnnnnnnnnnnnnnnnnnnnnnnnnnnnnnnnnnnnnnnnnnnnnnnnnnnnnnnnnnttattttcttttgtttttttagtcc

SEQ ID NO: 70121 - DNA, 557 bp, Arabidopsis thaliana landsberg
  unsure (1)..(557): unsure at all n locations
atattnttgggnccactatctacacgacacaatggatcattcacatacggccgtcatcaatttattcgttagtcccggcaaatgttaataaactatttgaaaaagaaagagtcatgtgtcccgtcaattcaagtacttatttattgtgattttttgcacatatatagattaacatatattcatggttaaaacttgttgatgctgcaaaaaggataattatcacccacgtacattactcatatgaatataaaaggcgcataatttttttttttttttttgtaatgttttatgtatatacacatatagtataccaattttttaacaaaacaaattacatattgataacaaagaggtgaatagtttcgatcgtgaatattcaggttgatactaattagttctccttttgtagattcgacaagtgtgatgaggggataaaaaaatggatgacgtcttgagtggattgttcctatacaaatagataatgttagtgcatgctttttgattttttcgaactattttgggtataactttcggatattcttatgaccaaaaaaaaa

SEQ ID NO: 70122 - DNA, 1286 bp, Arabidopsis thaliana landsberg
gagaattgccaccggactgcagataagaactcaaagcatcatttggaaatcttaagttgtactggtatcagctggaaatcataccatcacaagtagcgctgtaatgtacgtcgaagaatgaattcaaagcttactttcacaaatggagttctaagcgcactgttcttgaagttttgagttctatccggagagcgagaaggtagaacccaatttctgacatggaaaataagaaagatagttaactataccatgtgccataacaagctattacctaggaaagttgaacatcactagacaaggacatactctttgttgtcaagaattgcaccccagtgtaggaacaatgtgtcacttgtataagctatctggatatttacttctcttacagttgtagaagtgacttcaacctattcaattacattcataaaacctaccattaagtctacaaatgccaacaagatagaaatttccattatttgtaaggatatacttaccagtaaatcgatatttccgtcaagactaaatttctcggctgcctgttaaaggatgaaactttttagcacacatgtcgataaaataactatcttatgcattcaattggaagaacaatgcatatgattcaggtcaatgaaaaagttttggacatgaaacgtctaacatacattgagtagttggaaccaaaatatcacattccaaacaatgtcaatagtggtgaaaagtaaatccataagaaaataacctgaggatccatggcaaggacagctcgtggaacaaatgagagaggtcttcctcctgtttcagtgaccagactgcgtcctgcctgcttaagatctttcccgtaaagttttgatctgccaatcttgccaagagccggatttgctgttgaagtttggtacacagaggagttgagcttgttttgatgttcaaagttaagaggacgaatcaaaccccggttaagtaagttatgcactacagagttactcatgctttcttgtcactgaatcaaacttgccggatctgttaagtaaagtagagattatataataagataataaggaaaacaatgaagcttttgcaatagatgagaaaaaaaaggaacaagttatactatttgtctcaaaaagaagaatctgacagagttagacaagagaaccacacttgttatttttattttattttcactttgtagagaaacagttacttcattctgcgaatggaacatgtgcaatatacactaagaagaaaagaatcgtcttttatagtcaaaacgaagatatctatcacaa

SEQ ID NO: 70123 - DNA, 2580 bp, Arabidopsis thaliana landsberg
tctaaaacatatgcaggtataaaaataatggtcagaattttcatataaacttaccaacggaaaggaatgtgaaacaaaatgtttctgttcctgaagatcttgtacagatccaagcatatcttagatgggaacgtaagggtaaacaaatgtacaaccctgagaaagagaaggtcagtcagacgttgtacctatacaagcatatcttcaaggattatttttcttcatatatttttaaattcttcaccttttatgttgttctacaattcacataaagaggaatcatgattctcaccagccatttagttgattccatcaccagtacaaatttccaacaattttgatttagatgcagattctggtatattggactgatcagcaaattgatgataggttagctaagttgaaaatgctcttgattgattttttggtaatagcgttttagttggctctggtggctcttgaaaatatatttgttgctttatctgatgaacctgtatatatctcagttgcatcaatatcaagttctctgcatttttgtgtaaatccattattttatagctaagcagaataatttgtctctgatcaataggaggagtatgaagccgcccggacggagctacgggaggaaatgatgcgaggtgcttcagtggaagatctcagagcaaagctgttgaagaaagataacagtaatgaatccccaaaatctaatgggacatcatccagtggacgggaggaaaagaaaaaagtttccaagcaaccagagcgtaaaaaaaattataacactgacaagatccagcgcaagggaagggacctgactaagcttatctataagcatgttgctgattttgttgaaccagaatccaaatcctcatctgaaccacggtccttaacaactctggagatatacgccaaagcaaaggaggaacaagaaaccactccagtctttagcaagaaaacattcaagcttgaaggcagtgcgattttggtcagttgatagcatcactatcttgctctcttttctatttctattccggttagatatacatccatcagtatcttctaatgccaagttattactccctctaaataggtgtttgttactaaactttccggaaagacgaaaattcatgtggcaactgattttaaagagccggttacccttcactgggctttgtctcaaaagggtggagaatggttggtaagataattcttttttatttcttaaacaagaacatactttaacatcagctccttctcaatcggatgtctggtctggtctcatttggtctgagtttgtgagtcattgacactgcaggacccaccttcagatatactgccaccaaactctttgccagtacgtggtgctgttgatacaaaactgaccatcacttcaacagatcttcctagtccggtatgacaagtcgaatctattaatactactataagtctactagcatttggattcagagatggtatgtaaaagctctcatgttaaccaaaaatgtaggttcaaacttttgagctggaaatagaaggtgacagctacaagggcatgccgtttgtactcaatgctggtgaaaggtggattaaaaataatgacagtgacttttatgtggactttgctaaagaagaaaaacatgttcagaaggtttctcttccttcttggtcttttaaaattcgctttcaattgcatcttattgtcccctagaggctgaatctttaattgttccttttgaaaggattatggcgatggaaagggtacagccaagcatttactggacaaaatcgcagatttggagagtgaggcccagaagtctttcatgcatcggtcagttttatgctcaatcatcctggttcttagttcatgtttcagacttcgagaagcttaatccatatatgatgatcacttatacaaattagagtcattcatccatatttaatacattgattgatccatgttctgtgatcaccaaatttatattcccagtgatacatctcttttgtgcatgagttgatttacaacttccggaactctgatatctgaaggggtggatcttgccattttttttcttttctagattcaacattgcagcagatcttgtggacgaggcaaaaagtgctggtcaactgggctttgcagggatcctagtctggatgaggtttatggctacaagacagcttgtgtggaacaaaaactataatgttaagccaaggtacagttcaaataatgtgacattaattggaagtttagactctgtccacctttcttattcggccccaagggaaatattagcaaaccttatgggagtcttataatatgttttgacatctgaaaatgatatttaaataaatatacagcatcgtttcagtaattttcacaccaatttactgcagggagataagcaaagcgcaggatagactgactgaccttctccaggacgtttatgcaagttatccagagtacagagaacttttgcggatgataatgtctactgtaggtcgagcaggtgaaggagatgtcgggcaacggatccgtaaagagattctagtcaaccaggttggactttagatttcgtatta

SEQ ID NO: 70124 - DNA, 213 bp, Arabidopsis thaliana landsberg
  unsure (1)..(213): unsure at all n locations
aacaccaaaccnaaaccccacaccctaaagcccaaaaccgaaaagccaagcccgaaaanagaacccggaacccgaaangcgaaaacccgaaaccggaaaccccnaaccagaaacgcgnaacccnaaaccccaaaaccgaaaccgggaaaccgaaacccnaaacccgaaaaccgaaacccnaaacccgaaaccagagaacccaaaccncaaaac

SEQ ID NO: 70125 - DNA, 149 bp, Arabidopsis thaliana landsberg
  unsure (1)..(149): unsure at all n locations
cagacaccaaagaacaaccacggacaggaccaaccaagacagggattaagacatttccacacgnacagaagccacgcgggagaaacgacgccccagaaaggaacagacagacccccccccaccaacaacccaaaaagaaaaaacccccc

SEQ ID NO: 70126 - DNA, 2745 bp, Arabidopsis thaliana landsberg
cataaataaaaatagctaattattcagaaagatgaaagttttgtagcaacgtttgtgcattgatagtcttctactttcaggtttgtaaaacattggaccagctttagtagagctaagcaatgtacgctacaaaacgtaagaaagaagcctaacgacattaacatcgataattcgtatgtgtgtcttccctttgaaagagtcatagtacaatgcatacgcaataacatcgatcattttgttgcaaaaatataaagtgcacaagaacagtgcacgctcaataatcttgactccaccttcatatctaatatacaaacaaatccctcgctccgaaatcacaacattcataacgcagcagcaacaacaacaaaaccgtcgcaggctaatgatctcctggttacttttagccgtgcataagtccctaacagtaatcagaatgagaatcatcgtagtaatcgataccagaagaaggtgacatgacttcttgctcaagcaactgagccacctggttcatagccggcctgttctccgggttagcatctgtacatctctcagctatctcgagcaatgcctcaacagactcttcgtcgacatcggtgcatctcttgtctattacatcctctaatcgattctctttcaacacagtgttcatctgagagaaataacactttattagaacccaaatcttaggaagtaaaaacagaaagtttcttctcggagacaagatttgaggtgtcttcttacccatccgacgacgttcaagcctcttttaacgaatatcgggtctgttggtctttttccggtaacgagctcaaggagaagaactccaaagctgtagacatcagacttctccgtcgctctcccattttgcagatactctgtttccaagattcatcaaagagttagaaactttaaaaattattgtccaagattcaaaaaagaagttagcaaagaagagaacctggagcaagatagccaaaggtgccagctaccacggtggtaacatgagcatcttcgtcaacaagaagctttgcaagaccaaagtccgagactcgaggttctagtttatcattgagtagaatattgctcgattttatgtcacggtgaacaattttgggactacaatcatggtgtagataagcaagacccctcgcggaacctagcgcaattttcaaccgagcattccagttcaacaaaccgtcttcttgagctcgttcttgatagataaagaaaccaaaaaatagattaatatgacgcatcacagaccaaaatgaagattaactatgtataactgtatttaccgtgaagaagatcgtctaagcttcctaaggttagataatcatatatgagaagtcttgaagatggtaaacggcagtatccacgtaggttcactagattgatgtgtttgacactacctaaaatctctacttctcgctcaaaaactcggtctgatccttgtcgactcctatctatctttttaaccgcaaaggttccaagatcgttcataaccattcgataaaccgtgccaaatcctcccgaacccacaatgtcttcctcgtcaagagactctagcttctcaatcagctcagttgaagagtatggaagatcaccatggaaagtaatcagctttttacctttttttaaagacaaatgaagaaacggaatttagaaaaatgataagcaggatgaaaagaaaactagtttttctcttttatgcaaatgttatacttgtttcggatggatccttttgtttcttgacttctgtgtacttctttactgttctttccttctttgagagcatccaaatccataggaaaacaaagatcacgatgaatgcaagaggccattgtagacattgcgccgatcaagattcctttaatcaagcgtgatgatcgctttggagaatctgtgtggattgcaaaagagaaatcaagaatcagaaagtttagtcaaggagcctcaagacgtgatgattggctttaataataagatcttgcctgattcatcagcactttctgcatgaggaagaacaacagggaaacccattgatgatctacatggcttgcgaatttgccggccacagagatccaaattaccagtgaaactaaccataaagacagaaaacaactatcagaaaataacatcctagtctaacataagcaagaaagtttttcttaagttcttgatgatgttcaaacaactagttataattatatagaagagaaatctcacgtttcgaccccgaatctgctgagaactccaatatccggtatttcaccagagaaaaagttggttgacaagttcctgaatcaaacaaagagtaaatacattaaactgacacatcttgcacaactacatctaaacacgagattctgtttgtaacttacaaggagcgtaaccgcgtcaatcgactaattgaagaaggaatagcacccttgagtgtattgcttgatagatccctgaagatatcccaaacatcagaaattcttgaaaatgatcatattggaaaagaagtaaaaaaaataaaaaaaattgaatcttacaatatagtaagaaatgtaaggttgcctaaatccggtggaatcccgccttggagaaaattcgccctcaagtacctgaaagcatgtttaaccagatatataaatggctaaacactaaccaaaggcttgatattcccaattgcaaaattatggcttacatagctcttagctcagtgcagttggtgttgcattaggaatgatcccatgt

SEQ ID NO: 70127 - DNA, 2278 bp, Arabidopsis thaliana landsberg
ggaacgactaaaatggaaaattgtttatagataaaaaaaataataccaaatatgaattgttaacgacatttcaattttgtatgtccactcggagatcttcctttggttttacaaacataaatcaatatcagaagtcataagattagtctatgggattggctattattttgttgtcaggtggcaatacttaccccaaaatgcccatcgttggttcaatatgaatatatgatcatcctatatagctctttcctgaggaaaacaaccaaatatagctctttccattgatctattaaagatgtcatctcaacaaacctcaatactattaggagatagcttgcaaatcttatatcatgtgagatatcatgaattcaatttgaaaagagtgaataaatggcttgttaactctttaactttgacaatgatgacttgattttgtgttagtttgctaccaatatcaaagccattcatagtggatggttgtaaactgcccattttttttctgtacaaccttctctccgttaacatctttgcaaatgaacccattgaagtatagtacaatatcaaacaaacacataatgtttgagtattcccattaaaagaggattgcaatcagataaaaaatatataaattaccaaatggaatagatcttaaaagaaaataattaccaaatggtattttaccatattatagatttttttataataagtaaaataataataaaatataaaagaaaaaaaagagtctaaaaaggcccaaaacactaacagtcaaaaaaaggcctaaaacacaaaccgtctaaaaaggcccaaaacatagttcggcttaaacgacccaaaccacaacaaaaaccacccgattatctttttctctcggattggcgttaaaaattttactggcgagatttcggattgaggaaaagaaaagtgactggaatttagggtttagactccggcgaagaaggagatttcaaagcttcgaagacagagaaaatgtcgtcgactctcctcgagcaaactcgctccaatcacgaagaggttgaaaggttggagcgattggttgtggaagatctacagaaggagccaccgtccagcaaggacagattggtccagggacatcgtgttcgtcacatgattgagtctattatgctcaccactgagaaacttgtacgctttctctcttcttctcgtcaatttttaatcttcttttctatttcccgcatatgtttttatgtctcttctcttttgaatacgttagatcagagcagagaaacttgggttgctgatttttttttaaataacaggttcgtgttgagtgttgcctctttttctgttaattgctttagctttttaggttatcattgtggggtttaagttagctttgaatcactctggcttgggtgttaaattgagaagaaacttcagagattggtgttgaatataggttatagttggggtcttaagtgtgtatgtagggattctaagttttgagctaagcatgcttcagtgttatttcacaaatttgagttaatttttgttgttgataattaactcaaacttggattaatgctaaccttgattcttgtttgttgtaaggttgaaacctatgaagataaggatggggcgtgggatgatgagattgcagcgcttggtgggcagactgcgacagggacaaatgtgtttagtgaattttacgatcgtttgaaagaggtttgttctttatcctttgcaccttccttggtcttttttccctaaaacttgcctatggttctctataccaagacttggctttactttagtttctgtgggttgtatattagagattgagcagctaactttaccggactattagttaatctagacattgttatttagctgttgatcttttaaaaaaaaatagttttattgattgccttgaaccactgtgatggagaatcaagaattatgtacaaaatctcagtgaaagtgtattagttctgttccatcaacaatttggttagctgtataaggcttgctttgcataagagtattaaggcggtgaaattttcatgaggacaccctgaataagattcaaattgctaattcgttttttttttattgtctgaattatttgattttcttgtaccactgatgaaagcatcagagctgcaactatttaacttcttttataaacttacagatacgtgaatatcataaaaggcatccttctggacgtcttgttgatgctaatgaagactacgaagcacgcctgaaggaggaaccaattattgcgttcagtaaa

SEQ ID NO: 70128 - DNA, 258 bp, Arabidopsis thaliana landsberg
  unsure (1)..(258): unsure at all n locations
ccccaaagggagagnagagagaaaaaccaaacccaacacaagggccaagagcgaaggacgaaacacaacgcacaacccgcccacccggagcccaggaaccacaaacgcccccaaaagagagagccgggaacaccagaagaaaggcaccgacacccaacaaaaacaagggaacacccaaaaggggggacagggaaacgcaaccggnccacacacaaccgagaaagggaaaagaccccacaagagaaacgggacccagaa

SEQ ID NO: 70129 - DNA, 113 bp, Arabidopsis thaliana landsberg
  unsure (1)..(113): unsure at all n locations
agaacaacgcagaccacggcnaagaaaacgcgcgaagagacacgcaagacaaacccaaacaaaacaaaaaaagnngccacaacccaaaccccaacaaaaagaaaagaggcaca

SEQ ID NO: 70130 - DNA, 2455 bp, Arabidopsis thaliana landsberg
tatggtttaattcagaagcgaaaattgatcaataagagagaggtcgagctttcatttgaaacaataaccagtcaataaaaaatagattttgcaagggtttttttagattttcgttttggttctttttcagttttcagaacacacggtaaggacggagaaggcaaaatagaaaactggtaagagagggcgggagttaaattagttgctttcttacacatgtttccaaagattcttgttttcttacacttttaaccacattttttactagttcagaaattgacccttaaagttcatggattttgcatctcatatctctttcttcaaaagattgggctatcttcttaagcccaccaagacccatcaactgtctgtaaataacatacactattgacacttcctaagttttctagctaatccttttttttagcaagttgttaacagatttgtgtgagactattcatgattttcaaaaccaagatgaacatcaacgcttaaagcttataatagccactctttcttgttaacttgatgactaaagtcaatctttgttgctcaatcttaactgatacacacacaatcaacgttactcatgatatctaatttcactccttactccttcattgagagttggacacaaaatcagtatgacaagaaattgaggatgatctcttaagaaaaactctaaaagtaaatacacatttctcttgttgtgacacaaaaaggaaagagaagacctcatcaaggagagtgagaagatgtactcaagattaaactcataattaagccacacttgaagcaattggaactacgggtgctactcattcttaagcttcctctgacccttcataacacaaacaaataattacttttccatattaacacatcatatttctacctcttcaagaaattaaaaccagacaaaaacgatcaaacacaacattcaaaacatcaaatttcgacaacaagccagttcctttcaagaaaacactaaccttccgtctcatcttcatcgtcatcttcttcctccaccgcatcaacaccgtacctcgcattcaagaactccacagccgcaggagtcagaacaagcttatcagcgttcaaaatatcaaacagattcagtgtcctaggcgtcaacatcctcaaggttccaatgttcctactcgatttcgccacattctcatccacatcaatcatcaagaacatagctttctccttgggatccaatccccacctttgcatcgcagctaagaaatctttagtcttgggcttctcaaacttctccccaaattcctccaccactatcgcaccaccttccgcagatgccgcactcgataacgccgtagatatcgctagcttcttctccttcctattgattttaattgaccaatccttaggtcttggcccaaacaccacacctccaccgggacgtaacggtgttctctgagatccacgcctcgcgtggccagttttcttctgtgagtaaggtttaattccaccaccacgaacttcaccgcgagtcagtgtggaagcagtacctcgccgcttgttattcaggtccgtcacgatggctcggtgcacaacggcacgcgcggtatcctccggcgccgctttgaggtctagatacgtctctccgaccttctctccttcgaatgatagaatcggtagagtcgctagctgggaagagacagaaagcggcttcgagactctgccggagccgagttttgaaacggaaatgtaggttttagggatttggtgagaggaggataaaaagagagaagatgagaagaaagatagcgaatttggtgctgttgcagaagaagccattgttgttccctgacctgacctatcacaacgaagaagaagaagaaagactgagaaagtgttatccactcttcaaatgcctatcttgtgcttggtgagaatttatgcatctgtttggacataaggatataactatcctgttcatgaataactccagctgtcgctagtaagaaagagtcaaactccaaaagtcaaaagcctcttatatagccagcaggttttttgagacataaaactctgtgataaaacgatgatagttgatgatagctgagactttgatacagatatttgagatacgagcgcacgttagctaagaccaccgcgtaagccaccgtctcgtcttgaaacgcaccgtattcatgacttcgtcggagccactcgacctggttgtcaccgtcgtctctgccaagcacctgaagaatgtcaactggcgtaacggtgacctgaaaccctacgttgttctgtatcttgaccaagaccaccctttctccacccgctccgatgattcctccttcatcaaaccggtgtggaacaagcggatactctttctttcacccgatctgtccacgaatcggacctcaacatccagggttttcattccaattctttcgatctggccaaaccctactcgatc

SEQ ID NO: 70131 - DNA, 1811 bp, Arabidopsis thaliana landsberg
actgcttacatccaagagttcaagaaactagccacagctttagttaacggtctaacactcccacgtggtccgcaacctcctgaccttttagacaaacagatcagtttactatctcctgtggttgtagactcaactcctctaggagtcaaattcggtgacgtcaaagctgatgtacctccaaagtcaacgttcaggagaggtcaacaagttaacgcaacgttttggtcaggatgtcctcgaaatgatttgatgactgaaggatcattcgctgtggtggagacgctgcgtgagggagggaaatgggctccggtgtatgatgacgatgacttcagtttgaagttcaagtggtcgagaccggcaaagctgagttcggagagccaagccacgattgagtggagggtaccggaatctgcggtagccggagtttatagaataagacattatggagcttctaagtcgttgtttggatccattagtagcttctctggttcttctagtgcctttgtagttgtatgacatactattgtatactttatgaaacaaaaagagaagaaaagagatttgagtcgatttgtcaacgaaatgaagaagccactattggtgttttacacaacttggagaaccaactccactttttctcacatcatttagttatctcacttgtacaattttacacacttctcttgtgagttttagttacaatcaaacaaaaatcttcatctcgctataactttgaggactttaagctaggaggctccttggaaaggcattaacaaggtatcgaaaatagcattctgtacaaacgtcttcctgaatctctcaagcaattctcctccatcatttgcctgagctgcgcaatcagccgcttcctttgccattccaatacgagcataagcctgagatgccacaaaacataaaactcacactaaaaggtttcgatatattttatacatatctaatccaattatccaagtacatgttttatatgcaggacatacctcgcctctttccacaagatcagacagtttggggatgtattttagagcttccgctttctcatctgcatcaatgcatgcctccacaaatggacgaaacccttcacgatatatggcagttaaaacaagagaaaaactagaaatgaatgtgcctcccctctaagtcttaacatcagatgggaacattgtaatcattagaggagctgtataaacttacccattggtggtctcttttccttcgaaaacttttcaagcgctgcccagtctttgattgtagcgagagcaaatgctttaagccaataccatcttttatcactgacctgaaaattcaaacagtacagtggtgagatcgcgttcttacagtcatccattgcacagaaggggttaaaatccaattagaaccttgaattctgtcttcacttttattgcagcacggttattacccaggacaatacatgtgcgtatagtatcattgatgcttgaatcaacaaagatagcctgcttcgtactagcttctagctcatgttgtatcctaaaggacgtaaccaaaaaagatcatgagaggaagagcaaagaaacattgaaaatcaagttttggcttgcaattattacttcaggagttttgcatgttcctcagcagccttagactcgaaagtgtgttcctttgtttgggagaaaaggtttctagccttctctattagttttatgcgcggaccgggcaatggagatcctttgctagccattggggttttccccatatcccatgaattctttccataagaaaaaaagcttcccccctgaagcaaccccaaaaaa

SEQ ID NO: 70132 - DNA, 633 bp, Arabidopsis thaliana landsberg
tacagtttaattgatatgtaaactacatcagctattgtttacctttttgaaaggaaatagaaggagtttgattcataaatcaaatgtttactctctattataccatagaaccaggcccgtctctagggggtggcagcatgggcaaaaaccaagggtctatgacaaattttggaaaaacaaatttaaataacaaatattttttaaaaatatgcccaaaatttccttaggtaattgtgatgtatttcttatatgtatatcatattttcgtttaaatggaacaatgttcgaagtgaaataatacgcataaccacataaaacaagcttaaatatattatttatctatctaatgataatgcacgtgttaattgatttatatactattaaacaatgacttttagaactctaatattctttttgaaaatatattaatattatgtcactaattctctttttctgccaatactgatattatgtaagcactacttatctaaggaacaagtttcttaatactaactaattctttctctatataatttggtaatttggcatagtggcagattattattattttttctgacaagccgcagattatcttctatgatatagttgcttgagatatttaccatcactcta

SEQ ID NO: 70133 - DNA, 138 bp, Arabidopsis thaliana landsberg
  unsure (1)..(138): unsure at all n locations
gaaagaagcacaaacaccaccaaagaccagacacacacnaaggagcaccgcancagcaaaaaggaaacccccccacggcacacaagccacnaagnacagagaccccaaagcgagaaccccaccaacaggagcagcacc

SEQ ID NO: 70134 - DNA, 232 bp, Arabidopsis thaliana landsberg
tacagataaaccaaaaaaacaccagagccggggccggccttggccggggccaggcaaaaacccacccgggtttttacagaaacaggaatgggcacaataacaagggacacaaggtgcactgcttgggggggagctaaacaaagaacaaaccgggcaatccggccatcgggatacgcctgataaaccccgcgaggcgtgggtaagggaagagaaaacatcaacccggccctag

SEQ ID NO: 70135 - DNA, 117 bp, Arabidopsis thaliana landsberg
gcacaactgcccatgcaatactagcgtatgcccttttgacccaccccacaatgcacttttctgagctatctgccgagaatgcaacgggttgaatgatgacgggttatacgctgatca

SEQ ID NO: 70136 - DNA, 425 bp, Arabidopsis thaliana landsberg
cgcctcgtctgctcgccgcagcgccgactgatcgaccaggcccttcggtgccgcagccgcaccggtcgacgtcgcgtcgatcttcacttccacgcgcgatttgccatcgactttgccggtcttgccggcgtcatcggcgaccgtcgcctggccggccgtggtctgcccggcggcctgggccgccagtgcctgctggatcgccgccagatccttgggcgaaagggtctgctgctgggcctgctgctgcgccagcagggcagccgcagcggtgtcggttttgccggccggggtcgcggcggcatcggcagtgacatctgcagcggcggcggacgacttgccggcagcctgagcggcagcctcggccgctttggccagggcgtccttgccggccacgttcgcgccgcccttctggacaccggccgcat

SEQ ID NO: 70137 - DNA, 563 bp, Arabidopsis thaliana landsberg
cttagctcatcgtttgaactattagtctattaacgattggtttttgttagttctttggttttttccatttggtttgtagtctcatgtatcaagctcatcatctgtaaaggaacgaataaaagctgcgtgctctgacctagataaaataagaaagagtcttcctttgatgcagttaggattgatattctaggtactgacacttgagtttgctagactgaccatagcatagaccaatctcaagcacttgttacgaagtgttggcatgagtctcaaagagtgcttacattatgagaaacaaagaattgcagaatgcgtttggattgattaaacatgtgtgaaagactaaaaaaacatcatatggttcacgttcactcagggaggtggtgacattgactctccggagtacactcttgagtaacaaaagcagtatcttaatccaagaaaagacacaaaggcacaaaggtatgacacgcttctggattgaattttgtatgtttattgtacttttggtagagaatagttgaaaaaatagttttgcaataaaaatgttaggtggtttagtg

SEQ ID NO: 70138 - DNA, 447 bp, Arabidopsis thaliana landsberg
gtggatcacgcaaagacttattcagagcttaatctgaaatcaactgtgatatgtattctttgttttgctcaggtcaatgagtttagaggtacgctaaaacttatttcaagtagttcgtgcgtggtgtaacacatctttttttaaaagtctcgtttatatgttattggcctgtcgctaatcattatatgtttgagataactggaatgtttctaatgcattcagctttaccatgatacttttggatccacagattatgattgtaaaaaccttcccatccaagtaattaactatattttgctactattgggcggttttgcttagatggcctgtgttaacgtagaatcatggtttgcatattacagaatggtgattgtgaaccaatccttatctaagactggataaatacgcctactgtcgataccattccacttggtgatgagttctttg

SEQ ID NO: 70139 - DNA, 2591 bp, Arabidopsis thaliana landsberg
agcagaagctattaatgtatttaggggtcggatgaagaggatgaagggatgatgactttggcagaaatgcaagcggtgataaagagaaataagtcgaaggtgaattcgaagatcactgagaaagatagcagtggagaagaaaacatgggaagggaaacgcagaagagatctttagctgatgcctccatgactgaaacgttaagggagatgagtactaacgcagtgaataataaacaagaagttttaaagaataggaagaatataaagaagaagaagatggcgaaccacaaggatttaactgagatagtggatttagaatacgtgcctcgggttgataggaagagggatcgtggtaagttaagccaagaaatgtatatggaagacgaggattttgaactgtatgattttgataaggaccggatgccgaggagcttcaagaaagggcagatttgggcgatatatgatggtggtgatgacaaaatgcctcggagttactgtttagttagtgaagtagtctctttgaatccttttaaggtatggatcagctggttggattttgagagcgagaaactaatctcttggatgaagattagttcttctcatatgccttgtggtaggttccgggtttcagagaaagctttgatagaacaagtgaaaccattctctcaccttgtcaactgcgaaagggctgcacgagaaatataccaaatatatccaaagaaaggctcggtttgggcagtctactcagagacaaatccaggtcttcagagaagaaagaccagacgctatgagattgtcgtatgcttgacaatgtatactgatgcatatggattaagtgtagcatatttggagaaggttaacgactatagcaacctgttcaagagacgggattacgggtataatgcagtcaggtgggtcgagaaagaagatgttgcagccttgctctctcatcagattccggccaagaagctgcctgaagatgaatctggagctgatctgaaagagtcttgggtgcttgatcttgcttctgttcctcctgatttggtttctgccacttagtgaacatagacacttctttgttttctgtttctcatcatctcatgacaaagagaaacaagcacttcatgtctatatttgtctaacttaatcatattagtttagatcaactatatttagtgcccaaacccaaagtccaaagactttcccacaagtttataaattgcatagataagttaaatattgtgttatattaccaaatcttagtggcaaaaaaataaattttcaaagtttaattatctaattgactatattgtaaacttaagaattttatattgtttaaaatatatgcataaatttcgcgtggggcaaaaagaaacggagtttaaaaatcggtgagccctagaaattctcaaggcctcaaagtgaattatttcgtccatcagaggtttgagagagaaagagtgcgcagagtgagcgagagcatagcggtggagtgtcgccactggtaactccgacgatttttctcgtttgcgtaagccgaaagatcactctttttttggtgtcgactctgtttctgccgtatgattcttttggaaccctagtcacaggtttttgattttgcatggtttattgtagcgagttaattttttccgcatatgggtcttgattcttctttcgttaactcttctgggtttgccgattttcaatcaaacaatcttgaaagatcaaatcttttcctctacgtatgtagtctttatatctctgttttatctgttctgactatctgggtttcaatgatcaagtttgcttatttagacttatgcatatcagattctgtcttgtaaaatctctgtcttttgattgaaaactgatactggaagtaaactatagattatattctctgtaagtagagcatgtaggttgcttctgcatctgtgtgttgcttaataatgttagtacttagtatcaattgttgtttggaggtgttggctcatcttatctgcttttgaaatgatgtaggagctgcaacgcgaaggtgtgatctttccactgaaactagctatcaagatgaattcatttcctgcacaaaaccttatgctatctgctacaaacgcaaacaaggactcaggcttgcgtacgtctaatgctcattggttacattcatgtatcgccgttccaaagaccacaggcattgatctttctcaggaacctcctgctgaaggtgtgatggtgcctcaatctcatttgtttcctcctcctattagagattccagaaacgatactgaaactgtgaaacagaagtccgtaaatcagtctccttcgaaagctttgaagccaaaaccgcataggaagaaacgctctgtatccaacaagtcaaagaaaacacctagcataccagaaacaaaacgtgagaaaaagaatctggacatcaacattgacatctcaagctttgatacttctggggttcctcctcctgtatgttcatgtacaggcgtttcaagggtttgctacaaaaggggcatgggcggttggcaatcctcatgttgtaccatcagcatatcgacatacccactacccatgagcgcaacaac

SEQ ID NO: 70140 - DNA, 284 bp, Arabidopsis thaliana landsberg
atctatgaagttaacctctcaccacttgttgcgcttgcactacgcagggctatacatatgaaagttttttcaaaattgttgcggtcggcgaaacagttatcctgggttcatacggaggaacgatcattagaatctacgcacctgacaatgtgctgtgcacaatgctatttaaacctcttactggttggtgcagagtagacaccgctgtcaccctttaatgtaagaattctacatccaggactacaagggcggtactcatgtctccacaggccactactaccagc

SEQ ID NO: 70141 - DNA, 541 bp, Arabidopsis thaliana landsberg
  unsure (1)..(541): unsure at all n locations
ttagatgtatcgctcgtttttacagagatacgcaccggatcgttgaggaaatcaatgatcaagtgttcgatnnnnnnnnnnnnnnnnnnnnnnnnnnnnnnnnnnnnnnnnnnnnnnnnnnnnnnnnnnnnnnnnnnnnnnnnnnnnnnnnnnnnnnnnnnnnnnnnnnnnnnnnnnnnnnnnnnnnnnnnnnnnnnnnnnnnnnnnnnnnnnnnnnnnnnnnnnnnnnnnnnnnnnnnnnnnnnnnnnnnnnnnnnnnnnnnnnnnnnnnnnnnnnnnnnnnnnnnnnnnnnnnnnnnnnnnnnnnnnnnnnnnnnnnnnnnnnnnnnnnnnnnnnnnnnnnnnnnnnnnnnnnnnnnnnnnnnnnnnnnnnnnnnnnnnnnnnnnnnnnnnnnnnnnnnnnnnnnnnnnnnnnnnnnnnnnnnnnnnnnnnnnnnnnnnnnnnnnnnnnnnnnnnnnnnnnggaatgctgccgtcttgccggtaccagtgttggcgatgccgacgatgtcgcggccctcaaggaccacagggatcgcct

SEQ ID NO: 70142 - DNA, 159 bp, Arabidopsis thaliana landsberg
actataaccttgaccatttcagtgaaggaggggccagtgcatattgtaatcactaggcctctctactttctgggatcatatttgcatcttctacagtattgagcagatttcttagtcaggtctgatgcagctgtacggagatctggtgagcttgaagct

SEQ ID NO: 70143 - DNA, 361 bp, Arabidopsis thaliana landsberg
gcgtgaatttgattcaaatggcgtaataggtttagtgtctctagtatctacaggagagtatcacacttgctctatgttgatcctatgaagcgcccttcttcatctgaagctcttaggaatccctctcagaaaagaaaagtcttctgagcgggtaactatgtgagaccttgtcgtatactatttggtgggtcatagcgtctcgtggacttggagcctcggttatgtttcggagggtgtgtacatatctccttgataccatgtcaggctccatggcctgcaacttctttaagttccttgaatgttcgtcgagtgcaccttgttgcaaccggttcattttgtcaccttctttaagtttttttct

SEQ ID NO: 70144 - DNA, 339 bp, Arabidopsis thaliana landsberg
caaagacgacaaattctagggtgagagacatagaataatgcgtgggttcaacagcatccggaccttgaggatataaccagacaaagtgtacatgtaagtcccaccagcaggcgggacatggaatctataccaaacacactcggggaggtaggttgcaccatgacgggggctagaccaagaactactatattcactgctacgtggacaccatcgcggaaaaaggggttgcattagagatcccgatgaataattggcggctgttgagcgttaacatatctcatacccacgactatctgtcccgcccaaaacatgacgggacccaagttcaccgtcctgtgt

SEQ ID NO: 70145 - DNA, 429 bp, Arabidopsis thaliana landsberg
tgctggtcgcaagttcctgcgcgcgagggctgtgatggctgatgcggcttcggtttttgattacaggcgcggctcggcgggtacgggggtacatgtcgagacgcgtgcgtcgacagggccgggcgcggacgtcgccagcattccggcgcccccgatctcgccggatgcgagtggtgccggccgaggccggtccgaccactgctggccgtacggagcgagtggccaccgtgggacctgtacgcacggacggagcctgctctctgggaaccctgctgcactgggccgcatgtggtgaaggtgactgcgtctgggtgcgtagcacgcacaggatggcaactgcccggactgctggactcgctcgggtccgaggggttacacatggtgggcaccgccacgggatggaccaggggccggagctcgcggatctgc

SEQ ID NO: 70146 - DNA, 434 bp, Arabidopsis thaliana landsberg
ggagaccaacctagagaaacaacaagaccctaacacacgagtaccgcaaatcaaaaaaggtttcacacccacttcatataaggcaccaatacgccacacccacaaagcgagtaccggaccaagtgaagcaacaccaaacgatgaaaataggaccaaatgaagtgcaacgaccccgacgaaccagagggcatggaagcatacaagaaaaagaggaggagcgccgagacctacccaagggcaagcccaaagcaacacccacgcccgaaaaaacaattcacccagagacaggaaaaaggattatgcccccgggaccggcaaaaaccgggaacccctgaaactaaagccacgatgacgctccaacccagtaccaacaatgcactatcgggaccgagaaagcggaaccgccagacgacgccaactaaaccacaagaaag

SEQ ID NO: 70147 - DNA, 551 bp, Arabidopsis thaliana landsberg
gcaacacgtttttttacctataaattataatcacacatcaaactatgacataggcaaaatacaaaaaaaatgtagatataatttttcagttttttattaatagatataaactgtagatagaaatctatttttacgtaaagaaaaaaatgatgagaggggttcaagatatttcaaaatccactagaaaatgaaatgagaaagataaacttgaagatgaaaggaggaggcatgcattttcgtaaaatggccatccaatataattcttaaaccattttgtgaattagtaaccattcgttccacctaatttatcttatatctaattggtttggtcaaatgtgatttttgtctagggtaaaatatgaaaaaataacaaagctagttggcttgatcagttagatgtaaacttatgtacgttatgtatgatacaatatgattttgtacggtagaaaagtatcaaaatgtaaacgtcaaacccacccaaactcacgtcacttacgtctataaattaatctttgtcttcccaaccaaagaaaactagagacaagccgaaa

SEQ ID NO: 70148 - DNA, 589 bp, Arabidopsis thaliana landsberg
cgacttggccaacaaaacctatgttgcatatacttttctcagcagtaatacaggacagcaaaatacacacgtcttattgatattgtgatcacttgatgatcttaatcgggacatgatctaaacgtttttttttttttgcaaaaacaagacctaatcagctttagtatttgttacaatgtctataccctaaagagtttcacattgtcacctatcagaacttcgctaacacattttgggaaacgaatcagtcgacaccatcctgcgtgggaattaggaaactcattttgacattttcttggtacaatggattttttcgttttggttcgggaatcaccagcaactaaaaaaaaaagaacatcaattgggttcttcactaaacatttccttcacgatcatttatcttttcgagggatttcatcaaatctatgttaaagagtataccaaaaaacgcttcgacatctttctttgtacaccgacaagtattgttctctctcccagattggctacgaaagcttatctcccgaaaactcttagcgcagatgaggtgagagcagaactgaggaacctcatgcctgatgatccaccaggg

SEQ ID NO: 70149 - DNA, 393 bp, Arabidopsis thaliana landsberg
gtcatgggcggcgtggactgcggggaggcgggcctccgcctgagcgttggcggattcgtttagtgtctgtatctggaagcggttcatggggatttaggtgccggaggctcgctcgagcgggcgcagcacagcgttcaccgggcctgggggcagtgtgggttgggccactttacgggcgcgagtgtggggcagcttgacctggggagaggcgcccgcacccaggagcgtgttggtgtgcagccgggacagccgccacgggcccggggtgtttggatcgaggacgagcgccagcctgtatagctggcaacggcggatctcaggcttatcgtcgaccagcgtgttgaagagcgcgaagatgtaacacactgaggcgattcgctgcgggtgggccac

SEQ ID NO: 70150 - DNA, 544 bp, Arabidopsis thaliana landsberg
  unsure (1)..(544): unsure at all n locations
agcgcgtcggcctgaaacacaaggattcggtttatgggacgctcttgttcgggtcaggatacatctttgtcagcggcggaaccannnnnnnnnnnnnnnnnnnnnnnnnnnnnnggcggcgccgatccacatgtcgggcgtcaggaacgcgtggtacatcattccgtagctgccgatgtgcttgtccacgtcgcccacgctggccagctggctgatcatcgacggatcgttgcggtagatcgccatccagctgcccggcaccacgctgagcagggcgcggccgaccaggctgccccagaagaactcggtgccgacatgcggcaagcccagcatggcgatccagaagttgagcacgccggcgatgatcggaatgaacaccgtccacaggaacggcttgctgcgtacggcggccgaccagaacaacagccagccaaccgtgggcagcgcccacacggcattcaccgggatcgccgcgaccatgtgcagccaggtggcgaacgggctggcgtgggcccagatcagcctgaacggattcagcccgtgc

SEQ ID NO: 70151 - DNA, 380 bp, Arabidopsis thaliana landsberg
  unsure (1)..(380): unsure at all n locations
actgaacaggcccgcgcgaaggcgtccatcaggcaacctccgtctngttgtggtcgaagatggttcgttcgattggatgggcttaaacagaccaattgggtgccgaccgccgcccgaacagttcgagatacgggccggggctggtccgttctatgaaagagcgaacctgctccggcttggcgctgtggacgccgcggtcgcactcaagccaactgcggatggaatgatcgttgaaccgcttggcgttgccccgaatggcggtcagcataaattcatggctgttccgccagtagttgccgatgcccatctgccccttgacccagactaagctggaccggaactccaagccccatgcctcgaagaatgcttggcaatctaac

SEQ ID NO: 70152 - DNA, 525 bp, Arabidopsis thaliana landsberg
ccgggagtgttgacaaattttcttaaatcatcaaaccatctaagtttgttcttgcatttggctgccagtatgtttaatattctttagttaagatatatgtttaaaaccgaatgagtaaattagagatatttagacaaaatttaagggatttattttgcgttggattattgttaggtgttaataaatttgtttgttaaggaaattaagcaaatgattttgtttgtttaggtaaattgaatgcctacaaatattaaggtatattttaacgaaatctataatattgttttatttaggagataacagattctaaaattttataaagtcaatgatttgaagataatatatgttaaaatcccgcacgtacatgccatcaataatttatttttaatttttaatagatttgtttgttatggaaactatatgtaaaaggttagatttgaatatggattcgaatatatatatgatagaggtaatatttacagctattataattggtaatgatagaatatgaattaaatttattga

SEQ ID NO: 70153 - DNA, 511 bp, Arabidopsis thaliana landsberg
  unsure (1)..(511): unsure at all n locations
gtacccctgggaagctcccgttatattctggtatgatgaaaaggaatttggtggtctctgtgatcattttctgtatggcctcaaactcagtgctgcgctttccgtaaaggtcagaggatatcagtgtttttggcaggtcnnnnnnnnnnnnnnnnnnnnnnnccattccttttaacaataaagtccggtgataatatttagcaactttgagcgtattacttgagggtctgttggtacctgaaatgatcgtaaccatgtatgaattgctaataagatgtgtaaaacacttgcagctttaatgctagttttgccttttagtttgcatcttagctacttgttaaaatgtgcctgaatcatcgcaaaaatagcattttttatagatttaccataagtaaaagcaagccgtaaacgaataatttaaattattaatcagataaatgagcataattattgcactggcaaatcagaagggcggagtaggtaaaactacctcgtgtattaacctggccgc

SEQ ID NO: 70154 - DNA, 629 bp, Arabidopsis thaliana landsberg
  unsure (1)..(629): unsure at all n locations
aggccccatgccattgtaggaatcccaagcatgttaatcctcttctaaacttttatnctctaaatgccggaaaaaataaaaaatagcagtgcgtgttttctggattaatttgaggtgtgtgtatattttgatccaattttttttctaaaaactaacctttttgttgttgtctatattactctatatgtttcggaactgtcaatatactgtatttaagatataaaatgttcgttaaaattcagatattatggagccttcattttggaaaatatcatatttatcgtcttcccctctcctcctctgccttgactagaagaagtctagaacccaagaggtatggagctgagcccttaaaccaaatgaatcgacttttgttatataaaatgagtccatactatacgatgtggcgaataaaagataaaaggcaacttagtgatgatacgagagccgcatgaaaccgaaatccacgggcacggcctaattgtactatagtatataaaagtgtacatatctatataaaaatatttttttttgtagaataggatgatggtcacaagatatacatngcattataaatatgatcaaaatttgttctctactataattttaagtaagagtctagaaattta

SEQ ID NO: 70155 - DNA, 577 bp, Arabidopsis thaliana landsberg
  unsure (1)..(577): unsure at all n locations
ctacaaatactcgctatataaataaatgagatactcgagcctttatttccggccttgtagcacagaagaacctttannnnnnnnnnnnnnnnnnnnnnnnnnnnnnnnnnnnnnnnnnnnnnnnnnnnnnnnnnnnnnnnnnnnnnnnnnnnnnnnnnnnnnnnnnnnnnnnnnnnnnnnnnnnnnnnnnnnnnnnnnnnnnnnnnnnnnnnnnnnnnnnnnnnnnnnnnnnnnnnnnnnnnnnnnnnnnnnnnnnnnnnnnnnnnnnnnnnnnnnnnnnnnnnnnnnnnnnnnnnnnnnnnnnnnnnnnnnnnnnnnnnnnnnnnnnnnnnnnnnnnnnnnnnnnnnnnnnnnnnnnnnnnnnnnnnnnnnnnnnnnnnnnnnnnnnnnnnnnnnnnnnnnnnnnnnnnnnnnnnnnnnnnnnnnnnnnnnnnnnnnnnnnnnnnnnnnnnnnnnnnnnnnnnnnnnnnnnnnnnnnnnnnnnnnnnnnnnnnnnnnnnnnnnnnnnnnnnnnnnnnnnnnnnnnnnttagagggggggtgcgaccttgggacttgatgaaatttgataaaagatt

SEQ ID NO: 70156 - DNA, 496 bp, Arabidopsis thaliana landsberg
tgaattctaattctggagagaaactgctacagtccaactatatggggcatgtttttcgagctccttatgaactatgtcaaatcattcaggtagggaatctgaggcacaatgcgttatttagaaggtttattagcgctcttacacgtggaggacctggagggatgcctagacccatagaagttcatgcccatgaccccttaagatacgtgggagacatgcttgggtggctacatcatgcttgtgaccatattttcttcttcaatggtacccttatttaatccttatgctactaatgtaagagtgatgatttgtttgctacactcaacaatagataatcatgtttgtgaattgagtaccggataatcatgaacattactacattagactaaatatccgtttattgttatttcttgcctaatgtgaaatgttattttggctgcaggctttggcatcagaaagagaatagttcatgctttatttgatatagactcagctg

SEQ ID NO: 70157 - DNA, 2664 bp, Arabidopsis thaliana landsberg
aaccccgacctgccccagctaatctagagaccgtatcttcaaaagcttttcgattttcaatcaccaaacggttagtggcgttagcgttaaagagattgtatagcttctcagggtctcgctcagatttaagcttcacaagggcaggttcctcgagcggtttcaaaccctggatctgattggactctgttgaaacatatgcaataccggtggctgcagaggaaggaaaatggcagaatctgcgaatgtgtcgcagagatagcatgatccagggactccctcgagcctaaacatacccgaataacatgtagcttattcaaatcccccaaatctccaatctttgcaatttgtaagatctactaaccaatctatagaaccagcttcaaagataaggagagcgaagagttgagcaaaccctcgacatccatttacctcaatcgacaataacctaaatccccatgcgattcaacaacagccatatccgtaaaatccctccgacggcgaatttaattaacacagccgaactttatctcggaacgctatagtcgtaagccggagcagtgaccggaaaagggagaaattgcgatctgagatggagattagcaggaggctaacgacggaacacatacggaggtttaaggttttaggttttttgggtttgagaaaacaatttcagtgactattgggctcatatctttttgtttgggcctgcattgttatacaggccttttaactaaaacattgttgtttattccaatatgacccctgcatttacatagtaattcaatttacaccccataactttacaaattactaaatagttagaaacaggataaaggtcgaatgatgccttgtgcggagccgtgagcaaaagagcagagagaggagacagaatcaataccatcggccggagataagtcaatgtctctcatgaaaaggttggaacatggaacactctcccctgaacactcgagtttcatagccacctttgtcgccgatgttccactcatcttcatgtatctcactttctctatgtgaactcccttcatctgatacattacattaaaacattagctcatttacatttaatattaacttgaaagatagaaagaaaaaggttctcacagtctcaacgcatgtaggggcacaaccgtagaactgatcaatgatgatggggttttgtacagacgagaaacggatatcgaagaactcgattcctcggacgtaaccagttcctccaggccaagtcttgattcgagctccgtttgttgttccagtgaagttaacgtgcgacacacgtatgttttccactgctacctctgttcctcctctacctaaactcccaatgctgtctctaatttcttattagttctcattttttattatgaaaaatataagattacgaggtcgataaggagatggtaatcacctcacaccgtgaccaggtccgcaattcataaaagtaacattcaaattattcacttgatctccgatcgacacacaatcatcacctgtttaattaattgtgagaataaataaacaaattaaacttttgtttgatcttttatatggttaggtaaggaaatataccagtggcgatgtcagaatgattgatagaaacggcggtggaagatgtgatgtgaataccgtcggtgttagggctagcctccggtgatgttattttgatatcatcgatatacacattttggcttcccatcacaagaacatgtgtttgtgcactatttctaaatctcaaactctttaatgttacatttccgcagttgctaaatgtcatcatctgcgagaaatatatctatagttatagagacgtccaagttattatatacatactacgtatttccttttgtaaatagcaaacttaccgttggtgcaaggcagatgcaattctgtgacacgttataggttacaaaatgtattatcacatagagatggtttgttaggatacattataacccaagaaaaataaaaagttaaaaaaaaaggaaacttacgggtccgggatggtctctacaatgaatatcccaccatgatttgccttggccgtccaacaagccgcgccctacgattgcaagtccatctacttgatcgaatatgagccatggtattaccccgttctcaccatttccccacttctgtggatcactctgcgctatcatctctccatcgatctatatatacatatatcagcaaaagtaactttataattaacttggaggagtaggttcatattcgagtattcatgtaatatcaatcaagtaaagtggtggagggatttacaatgaaaaggagaggtttgggtatgcaaggacccgtgaagtgaagggagttgaggaggaacaccttccctgctggtacgtttacacttcccattttggagcttcccttacaagcatcctcccacgccttttggaacgccttgtttttttttgcccacatataccatgcaaaagttcaattttttttatatgatgactaaataattatgctgcttgtactgatatataatatatatacaccaataacttacagatgtatcatcgacaattccatccccgaccgctccatatttcatcactgattcactatagcttaacccggaaaaacctaaaattgcaacgagtacgatcaaaaaccaatcctacacat

SEQ ID NO: 70158 - DNA, 576 bp, Arabidopsis thaliana landsberg
  unsure (1)..(576): unsure at all n locations
ctacaggcgccggcgcccagtttttatgcatcggttatgggtaccgggccccgcgccttttggcgcagcccgggcaaaggacgacgggctgctccccgaaatagggaagtgctgccggtcggcccggtcgcggcgaaaactgatcttgtgatgactgaagaggtaaagattccggccatgcgcttcgtttcgtttggccaaacctaatcgttcagatcccccgtgtcaagctttttcaaaatgatatttttggaaaacgttaccgaaaacgttttcttttctcgtaaacgtttccgaaatgtgaaaggcggttctgaagcggcgaaaggaagcgtccgcttgccttacggcggtacgtctcccggcctgtgaagcgccctgaagggactaacccgggaccggaggtggtcccggcgagctgaaaacaggtcggatacgattttggggaccggcgcatgaaaccgtctgacgagggagatcgccacggcgtccgctctccctccttcccttcgaccgtaagaatccatcctgccgctatccgaaacacgccgaagcgttcggnggcgacgggaacca

SEQ ID NO: 70159 - DNA, 494 bp, Arabidopsis thaliana landsberg
ggtgtgcattgagtacatgagatctcaaagcccacccccactgtgacatactttctataacacaacctctcctatttcaacatggccaaacctcataagagagtcaatgcctatgagtcaagagatcaaacacacgagattatgggagccattcatattgaaaccaccatacctatatactgtgtccacgtatgtaatgatggtctataagcctcaggaagtcactgccctatgtataaacagacacttacgaagtgtgttatgagcctgtagaatcttggaggtggttatagaaatttggaagacagcctttaaaagacggagaaacaaatcacttacacatccactaggccgtgcaaacactgagaagtacatgggatgaggcccaatactcctaatgcctgagcatatacctgtgaaggatgccactgggggccaagacactaacctttgctcatgttatggcatgtactccatctctctctttcatatat

SEQ ID NO: 70160 - DNA, 545 bp, Arabidopsis thaliana landsberg
agtagtgattttttgatatgtgccaaaaaaattaatagaagtaatttactctagtgaaattactataaaattacaaacatctaccgtttgatgttggcatgtggccagctccaggttcattctttgtatatcaatataattttattttaatcatttttaatccaagtttccaatgaataaaaatttcctgagattctggttggtgaatttttcactaataaaaaaattgagagaaaagaagaagaaaatgagctgttttcgttgaagcgttattttagtctctagagaaatcatcaacaaagctaaaaatgtgaacgtgctttctacaacgtcactcctcttgttctaataaaccgcgttattgtgtatttgaattcttattatttaatctaatgttcttgaggtccggttgtttaatgttaacaatttatatagttgaagaatgatatacgtggtcaaagattaacttgaaacaaatgtaccacttgatttttagatgttgatatttttagtttactattaagtcatgttttaacattatcaaa

SEQ ID NO: 70161 - DNA, 2436 bp, Arabidopsis thaliana landsberg
tagtcttcttctatacaaaataaaagtgaagattcgtatacagagcttttgtaatccaaagaccaacaacggccaaaaaaattttcctcttgtagagctccgtcgtgtccttcagatgattcaatggttgtttttagcaacagccttagcggaatctctcattcttgtatacatcagaggctgaattgatcctctcgaactgcagttgattcctctgccactgaataaccacggaaaaatagaaaacaatcgaagtgttaaagatcttttagctacaagtaatctgttttaactccatttgcttaccaataggacaatgaagtatgttaactagattaattacttatggcacttatgaaggcatgcatcatcatattttgtggtttcagtcattttctggttagaatcgagaaattagctacagagttcaagtgaaaataaatacaaaaaccatatccaccaggatgatcaacactacctattcataaagatattacggccagatataaagatcacatcagcaatttactcaacaaatgaaacgatttgaagatagcaaccaagtgggaaattttcgacttcgtgcaaattcaatgatgcaaagaaaagagaatcagagaacaaagtgagaagcttgcagtagacttaggagctaacaggaatcttttaaaaagctttattatgaataattgaacatagaatgcttataaactaaaaacaagcacatatcacatctaaccaagaggaggaatccgaaaaaataaacctggctttgctgcaacccatctccggatccttctgcaatctacataaataatggctaatgaacaaatactccaaaaaatccggtgatgcttcgaacaaaaactatcctacatagcacccgagttcacctacgcttgaaccgcacaaatcccctctcgtgtgatcatgaactcgcaagaactcccaggcaaataaggtgaaaacactatgtcaagccgtctcttagcacttctggacacagaacttgaacaactctcgtccttttcacttctatctttaacaatactaccatcacttcgtgaaataaaaaatctggaattcacacaattagcccaagccaagcctaaagaaggaacaactcgtcttccagacgaatacaaatacctcaaattcccaatcctcagcccacttaacccatcagaagtttcaaccaaatccgtaacctgattcgtaatcacaatagccaaatcaaacttgctagccaactgcttcaatttcccagatatcttgaaaaacaaagaagatctcttcttaagatcagacggagtattatcaaactccgatctaaacaatgccgctacagaatcaagcacaatcaacttcaacggaaacctagttttcgaattcccaacaaacccatctatcctaggcattatgtcgaacaggtggtctacagaatggacattttgtacaaacacatgatcacaaggattatcattgtaattcgcgtaaatactagggtttgattgatgaaacgtgtgcgagagctgatggagacgacgaaacggaaatgggaactctgaatggagataaagagaagaaccgttgagtccgccgtgtgaaatcggaagttgggtacagagcgaaagctgaaggcagagctgtgtctttccgcagccactctccgcaacgatttcggttaaagaatcgcaggaaattccgccgcgaagacatccgtcgaggatttcacagcctgtggttagtttacgattcgtcggcgatcgtcggaggagattctccggcttaattttcccattttgcatttcaccgccaaaagctaccaattaaaaaaaaatcgcaaaagttataagcgctacaaaatttaaaaagacctaatcgcgttaaacgacatcgttttatcatattattgggcttcttaccttgacattaggcccaataagttaagaataaacgtctactattgggcttattttcaaaccatcgcattaggtccatgcaggtaggatacgagtaatgaaacaaacgacgtcgttttcgaaagaaacaacgaagatctcatttctctttctccttttcttctccgacgattcttctcagttctcagatctgatcgatttcttcatcagatgtttcaatctaaccattgagattgaatagtcaccattagtagaagcttcgagatcaatttcgaatcgggatcatgtcgtgtttagccctagctctgcaaccagcaaatggatccgacattttgctccaaactagagaatggtttccaccagccagagccttaatcgctctctcgtattttcgtcaaatgcgtcaagcattagcgtcctcgaagcagcagcatcagcaacaatcgaatcagaaacagaatcaaagctcttcttcttcttcttcttcttcctcccgtgcggatcctgacgatgc

SEQ ID NO: 70162 - DNA, 620 bp, Arabidopsis thaliana landsberg
actactaggtcataaattgcggaccgcacgcccagattgtatgaggcatgcgggggctgacgagtagaacgggtggactatgtgtccgggctgatgactggttgacaagaaatgggagtgatgcatccacggtcctatttacaccggttcatgacaaataaagagaccttatttcataggctgaattgtattcttctactccgcgaggacgacgagctacttcgactgatgactgaaatcctctatgaagctaaggggcttgatatcaccatactacgcaggactgtcttgctttaaagccctacttgaacgcttctagaatgcgccaaatggaatcgaggtattagaaaaaaccatggcctaaaacccctatcctctgggaactgcaaatactcttttgactgtaaatcgcggctcttcttaatactacctaccgagtaagaaaatctcctttaatttaggcgaaattatgactctattcagcatacctggactaacagggctttgctttccttcacctgttgatagggagcttggaatatcgccgtactatgtggataatataaaagtgaccttgacactgtgattgatagtgagggctggctttgtaggaacacatg

SEQ ID NO: 70163 - DNA, 588 bp, Arabidopsis thaliana landsberg
  unsure (1)..(588): unsure at all n locations
cttctgggggataccgtcgatccgggcgataccattgtcaccactcgtggcgtgaccgctgttctggatctcatcagcggacgngtcgtacagatcgctttcgaagaaacggtcaaattcactgatgagctgatctttgccacagaccaaaccgaccccaccgaattcgccatcgaccttgccacgatccagaccatcatcaaagccatcgaagaggggcgcgacgtcagcgacgtgttgtctgagacgaccgccggtatcgatggcggcaatctgacgaattacggtttttctttcgtcgaactgtcgcgcatcagcgagctcctcaataacttcacattcgatttcgatcgtgcgttcagtaatttcaatccatctacacaaacgccgcttggcctgacccgtccgggagatagcgccgaattcatccaggtcggcacgggtctcgtcggcgatacgccaaattcggcacctgttgcctccgcttcagtcccggcgcaaggatccgaggatggcgccttgctctcggngagtctgtcggcaagcgatgcggacggggatgcgcttactttccgggtgctgtctgct

SEQ ID NO: 70164 - DNA, 527 bp, Arabidopsis thaliana landsberg
ccatggctcatgggagaatgtatccaagcttccacatgcacttggattgacccaagtttatttgttttaatacatactatattttattacctttgcatttaattcatatttcctttgatatattaacttgactgcaatatacaaaaacgatgtaaattgatattaagcaaatattataaccaaatcacgtcacatgcagactatgtgatatgtaagatggataagtggtcgaggtttggaactttggattattgatccaccattgtttttgatatttgtctggatcactcccacagtttattttaaggtgagagtggataattgttttttttagttactggaatattgtggggtctatgtaattggccatattttatcccataaaaatgtacgagttaagtataatttgagagacgatcagattcaagtctattgagagacaatcatcaagtttatactttctccaaacattaaacgagaaatattttgggttctttgttggagatgaaacgttagcgcacatggcg

SEQ ID NO: 70165 - DNA, 168 bp, Arabidopsis thaliana landsberg
tgggagacagcacaactttaaaacggactatgtttgacttgtttctgccgcttacggggggcttttgccagagttgtagatgttcacttaccctcggtattcctgtgaatactatactggggcgcacgcgttcgatttaaagcgactccctctccattcattagaaga

SEQ ID NO: 70166 - DNA, 7913 bp, Arabidopsis thaliana landsberg
tgcggttggcggaacagaatgaggctggcacgagagagaacagcgtagagaaggaaggaggattggcatttctgtttggatccgccatctaatggggtctggtaactgcatccgcgaaagctcattctgcattaattgacaaccaaaaaaaacaaaaaaacttcaagaatcgtactttgcagccaagaagacagacttttaaggattttttaaactttgttgacaaacctgtaagctctctgctgcatcgcgatcaaacaaggtaaagtctttggatgattcattagaggaaggccttggctttagccattttggctggtgattgcttaacagcccatggagtacaaacagtaaccggtcaaataagacttcactagagagatctgccatggaagaaggatctattgttgattctgtttctgcctttgatagctcactacgaggagaacatacagcataatcttcataaactactctgcttccaagtagacgaactattgtagacgcaagtgcatgtctggtgttcttaaatgaaggttccctgaaaaataaattgccatacaaaaagataactcaggctttaatagtttcattcgataatactgcatggaagagccatttcatttgacttttcaacaaatcctgttaaacggaatggggaaaaagaagatggaagagaatcagtacccgcagatgacaggcagtaatcttagaagaaattgcaaccgcaaagacatagaagctctcaaagcagcaggggaaggcggcggcgaagtgtcagtagtattggctgaggatcttcttgccaaactagggctaccaccgcgaaggcccttccgggtacttcctttatttgatgaaatctcagacccagaagaagcagttcccatttgcttgttgcttgttgtactgcggttggtaactgaacttaattgctgctcaatattgctaaactgtcttaccaactcattcacaaaggtacttcgagactcatcagagctttggtctatgcatggaagcactagctgaacaaaagccctctcagttgtaatcccatagccaacactgggactattctcatccaatacccggggtaataatacctttcttgaacctgaaccttcctcaatcacttccccttcttcgatagaagtaatttcaaacttccttttcttccctgccttgtttgctgtaatatgatcggaactagagctgttgcaccaaccccaaggtttccaaaactgaggtttcgtggggagtcctttgctttcacctacaataatcagtttttgtctgattgtttttcgtccaaaaagaacatcttggcctgctagaaaccattcagcttgcttcaacattgaatcctcaaccgatctaccgaagagatgaaccacttctgagaaaagagggaccgcatcaggtctaaccaataaccttgtgaggaggatttgaatgaaatttttctcattctcagaggcatcaggcttctcagaggtaggacaggaagatcgtattgcatctgtcaaaggcatatcatgattttcgagtttctcagcaagtgcttgctcgtttagaagcagcctgagttcaacccactgccagtgaaattttgcaggctgcaggcaatctaatacagatacaagcttgtccacaagctttgttccatttccctgatgtcggttttttgcttcactaactccttcatgggaataaccagaggatggcaccttacaatcaattagggaatttaagaaaagacgcgctcgaagaggagcaaaggccacagatttcaagtgcatatccaatccatgcgattcaaacaccgacgcaaattcagcatctgtggaatcagcaactatcagttcataaagtccctgggtgtctctgaagcacacgtctcggaaaggaagatgcttaataacatcatggaaggccattgtcaaagactgataaaggcggtgagtgtcttcatggacgctggagttagagttactatttgaaacaaaaggcctccacagaacaaacgcaataattgaataggctggtgggaagaccaatttcagcggaagcatacgctgcatgcgtgatatagccaccacggaagattctcccacaagctccaaaaccagcccttccgaaacagttttacagttaccaacaaggagtctgaaccaatgtacatacacttcaatagggctttccactttagaggctcccatggatctagcactgccattagaactcgattttgtacgccttacaaactgaacgaaatctaagtaatcctttagtctcagtagaccaacaatcctctcaagggttataacaccatgtgtgatagaacctataacaagtgcagatacagctgcagtaatttttgtcgctctgctcagcgccatttttccagtaccattcgacatatcgattgttgaattgtttgcatttgaatcataggattcaggagatagctgatgctgacctcgtgatcccttcacaggagcaaaaactccagtaagcgcagtggaactttctgttgcaagtgctatttcaaacactcggctttgacgctctccaagagcttccttaagaaggcacagacaggttatatggattcgtaaaatgtatcgtgcaatattagatgaatcaacgccagaaggatgattctgataaatgtttcccaaagagaaatctgtaatccttgccactgaaaggcctacactgtttataatcgcagaaaccgcagaagaaaccaaagagggatcaccctcttgagctgcaccgccagtctgtctaatgcagtccattagtccaactacaatttgttgagccacctgatacccgtcatcatttttctcagcgagagaggctttcatagtaccagtcccaatgagttttttgagataatgagtcgcctcttcaacatgtcgttgcaaaacatctcgcatactcaaacccactcttgaaggacgtgcaccgccaatgctgatttttttacgtaaatagtcatctggattatctactcctgctggaaccccgagggggttcccatactcaccatttcctgatcgcgtatgatctagttcagaaagtagcttcttttcggatgttgctttgaaattgttatgccattccacaacactggggagacttccatatcttttcaaaatatagcgagtataaactaaggctgctgatccagaaatttttccattactagacataagtgatgcagcacggttcatcaaagctgtcatggcctcaggaacaagatcagctgaaagtagaatgttttcatacctgaaagaaattaatgatacaaaccgattaaatttctagaaatacaataaaaaatatatatgaatagtgtttacttattgaaggaagtaaaaaccaccttctcagtgatgatactagaatcgcctcgcctatttcacacatgttgttttcaacattccttggtacagttacaaggtttcttccaccctgtacggcaaaacttggggtactgttggcctttggcaataaccaaagaagaaatttaaccgctgaaaccaagtcaagagagatatccaagagaaataatatggagtatagctcgtctgccccaagcttccacctaattgtgctcttctcctcaactggagcacctctattgaactgcccaactctcacactgctcttttggggctcttcaacaagttgccgaactgcagtagtaagccaaactgcaatagatcgcttatcaacaaactgtagctgcttcaaagagtttccaacagataccatatccacaggggtggaagttctaaacacatcaaccaccttctgattttctccttccactccagggccatgatgaggacagcttacgttattatcacaaacatgactcgttgaagcgccctggctaccttcaattctagcagcttgtagttgagccagcgactgtgtcttacgcgccatcttctgcctacctcgtggtacttgtttagttatctctatctgaggatcaaccttcagagaagactccacagttttcgatcctttcttgatccaccagttatcttcttcatctgatgcaattggtgaattcccttgatagcaagagctcttttcatcattcatttttggtctttttgctcttctacagtcttcacaccctggtgtagcttctggttgatccatcttgctatacacagatccacttgatctcttaacactattttggaattcatctcgcactggggtttccacaccacatgacatacctggaaactgcagtagagctgatatgcgctcctttagttctctaatatccacactactcttggtatgtttgcgaggtcccttactattgctcttggcattacacgcccttggaaaaataacagacgaaagggaagtggaaattttctttgacttctgatctgagagaactaaattattccagtatttacctttctcaacaagcagttctcgaagaagaaggcgccgttcattagaataagttctcacagcctcggaaagcttatcccctccaaagagttgagcttcctctaaggtttcatgtacaaaacacccaggtagctgtttcaatatgcgatggtgcctcattctcctttcaggatcaacagcaggttgaatcacatcgatcatcccgctaactatgagttgcctcacatatgctatgggattaaagattccagaacgtataagttcaaaaacgagtaattgcaagcgctttgctcctcccttgtgtacctcatgctgatcaatccaacagactatgatatcatgtaatgggcccgggctttcaaatgcatccatcgaaccgctaggtttagaaacaccaagaaaattgttgcgacaattctttcctttgcgagctgtgaattctccacccagaatcttttgcttcagaagctgaatgactaaatacacctgagaacaatcttttctgccagagaacttgatatctttaggcacaccagcacggaaatctctaaaatcacatgtagcccattctataaggaaaaaaacggagcaaacaaaggatgtgctaatagcgccaatccatctaagggatgatcttaaacatggactgacgtcagtaatccaggcctcatcaacggctccattgcaaaggtcttcaaagagataactgtaagcagctctgatatctccatccgacaaagctttatccaaggcctgaacagctttagccacgttatgttgagggtaaccagcgctagctatctttgccaaatcatctgcacttctttgaatggttgaaatggtataatcaaaagaaaggaactcaaaccgggaaagaactcctcttccttgaaactgggcagaaatctccgcagagttacttctcagcttttccagattctcataaacaaatgacgtatagctcacatcattaggtccacatgctgctacggaaggaggaagaggaaagaaatctgaagcaacaaatgtgtcgggtgcagcaagtaccaagtagcgaaccatctcaattagagcagatagagtataagctcttcgagagttatcaacaagatcagatccaccaggagcaggttcctgaatgaaacggacagcaatagctacaagactctgtacatatgtctgagagagaacaatactctctaaaacaccatacacaatggggagtagcagctgcaaaatttcaaagacctccttttcctgcagtaaagcaaaatggaaattcacaaagctgaagaaatgaaaattcatcttgaataagtcaattaatctaacagcatacctgtaagagcttgagaacccaatcaacaatgagattaggaaaaagaagcccttcagcatggtgccactgtagaagacgcaccatataccaccatttaaaatgtagagatgtttcctcgccgtaaaggcttgttgatgctggactattcttttgcattgatcctgtataaagcatctgtggtgacctatctctagtttgctgagcaggaaatgagctattccgtgacaaaagttcatccaagaggtattgcaaatattcaataacatcttttgtccattgctcacaccgagaagcttgtgtcttttcaggtgttcctgaagaaatagcagcaggactaggtcgcacctgcaaattataagcaaaacttgatatcctccaacacctagagaaatcaattagagataccaatttattgcccaacaatgtacctgattgagataagtcacttttataaaccaagtagctctcaatagtgggacattgttccttataaggacttcaaataaggtttttctcctatatccaaaaaagttatcagccatagagcgcaatcgtttgtgctgttgtgataaactctgtgaaaaaatgagagcaagaatgagttaagtattcttctttaagaatatatggcagttatgccacgagtcagcaacaaacatggatcagaggagaattgttaagaagtttagataagcataataataggccaggtacctcgatccatcttttctttgtctcctccccacatgacctttgttctggaaatccaggcttacatagaagcgaaccagagagaggcaccccataaacctgaccagcctgccagttaattgaatagggagattatcaattataagcaatatgattgggaccgaaaccctgaactctgcacaaaagataaattgaaaaggattggagtctgagagtctcttgattaccttgcgcttcagtgcacgagattcattgatagctctaagacactttctgactgcctgcgggatagaaattgaatttaacttcatgtgaaacacaaatgaactccaatagagatcacaaataagggagacaacattgtctataatttctagtaccgtacctctttgcacttatggacaacaggctttgagaaagtatggacctgggacaatataatttcttcggattcctgtaaaggccaaaggttcagaacctcaattacaagataatgcgcgaaaactagtggaataaggaattaaaaactctaacatcggaaaagatgaaacttataataatgtagactttctgagttgtaagcatcttatatgactacattgaagaaatcatcattacaacctatcaagctacaatgaacattcagcctcagtaagaaactattcttattttactgctgagcatctataggaaaatactataggcatggtccaaaataagatctaagatatttattttaattgcaaacatgtcaatgataattaactacgatactacaaaaaatttaaaagcatagctgctaaattcagttgatcgcaccttaagtccatcaacagtttccttgtatccaaattgaacatactctttggtcagattctcttcgggagaatttgatgttggaggatgaaaatcaggcggccctaatctgcaatagagaaaaagtataaatcatctagggaagtaaatcaaaaatggaaaagagtgccaacttcatccattaacaagtactccaaggacttagcctatcggagataaaagaatgaaatcccaagctacaaatctaaaacagcaaaatttaaaatcatctatattgtgtttatcgaatacctaaactagggataaggtgaaagaggaattaccgggaattcagaccgtccttttcacacttcaacttgtagggtgtcaacggtggtggtctcctgcagtaaagaaagtattcaaacgtcttcaaatgtattaacatataaaataactatgtaagtacttctttctatcgacatgcctggagtttagtgaatagtttccaatcgaagaggaatcagctcgtcctgagtccctcgcggatgcaccacctatagcactattgttgactgcactagtgcagttggcagcatgatacctttgcatt

SEQ ID NO: 70167 - DNA, 4046 bp, Arabidopsis thaliana landsberg
  unsure (1)..(4046): unsure at all n locations
taagttgattaggtttccagacactctagatttggctccatatgtcagtggggcaagtgaaaaatcacatgactacaaactctatggagttattgttcacttgcatgtaatgaatgcagcattttctggccattatgtctgctatattagaaaccaaaataagtggtacaaggctgatgatagcacggtaagtttctcatatattatcaatggaatgttgtttgcgaattagtttataagtaagctcgattttttgttccctttttacttgagtttgttatttgatgaactttggaattaactaggagtatcttacttctatgacagcattttaggtttacaattttctgcttcttccttttcagtgatgagtttcttagtttgaaattttgaatggataagtattatataattttccccttccttttatatgctgaagttgttttctagaaaggatattctagctggttccattggggtttctatctttgttgtagtctgaagagtcgtaggattggttttgtgagagaaaatgttttggcttctactcattgactggtctcttctcgtcatcatccatatatctgcatcatacatttgaagaaaatttcaatgtttaattcctctgttgtgcattgattattgtcaggtagtaacttcggatgtggaaaggatcttgacaaagggagcgtatatgttgttctacgcaaggtaaataatattataatgcatctctcacactctttaaagttgtggattatgctcgatctggttacttatgatggtatatatcgaatgaattgactgcaggtgcactccaacgcctccaagattagcagtatgtaccaaaactgaagcatccaataaaaaaagcagagtgccactacctaaggctaatgagaaaagtaccatatcccggtctgtgtctacttcaagtcctgagttgtcttccaacacgcctggtggtggtcgatccggcaatatacagtcattttattctagtttccagaggctgcagaagattttagaagaagactcggcgagtgacagttcatctctctttgacagcaactcagatgaatgctcttgtagcacagacagtacaagcatggacgactttgctgatttcatttttggagatcatcagggacgggctcacggacagtctgagactccctcaccaacatcatcgtcttcctcatcttctccccccttcacaaggcgttcgccgctcagtcgttcttctccagaaacttacggaacctcaagacatcagttgcccttgggaggagaaaggtaagggaaacaagatggttttttgtccacttggccccaactaagtcaaaagtagtagaagaaagtagatttgattacacgtagattgagtggttttattaacaacccgtatttaggcttggtgaaagtggttaatgagagaagtggtggtatatagtagtgtatagtggggaagagagtttttgcccatgaaattgtatcacgtaatggaacggaatttacctttgttaataagttgttttgacttttattataatcaatcaataaagctaatctaatattgtctcatcgttgcacctttatttcttttgcaatttgcttaactttgaatctttggattcagttcagttcagaaattcaagaaaaatcccaaaagatgcaattttgccagttccaagaaaagagatcatatgatgttttcaggggcaaacaaaataaaagcatatagccatattatgttgataccgaaacaagaaagtatccaaatagaagagacaacattcaacacagtactgtgaagcaagtgtgatccgaaaatgaaaagagaaagtacttagacatacaagtgaaggataaacattatctgaaaacaggtcatatcctagccacataagaattcgcctgtgtcacatatctcacccaacgatatggattataactacttgatttctttgctatctgcaagtatttgacctgcatcacccaattcattagcgttaatgatcgaagaggacggttaatggcaatgcaagaatcggcatattacttacctgaagtttataaacattgtacataggtatcgtgaacgtcatgctgactggccctgcttcctttgtgatattacctacaacgaattgagaattatcagtaatgctctattttcccctgagagaacaaacattacaaacttttgtcttatagggtaaccatgaaattcctgtgaaaatgtaagctttgcacgcagtgtatgctcacccccgccaacaatctggaatgccacagttagctcatggaagcaacatacagttcaatatatacctaaactagcaaaccacgtgagagatttaacacttgccttttttaaattccattcaagcattttgttggattccttgaaatctgtcctctgtccagcagcaccgggttctaactcaaaactagccctgtcacaataaacataatcgttgattctatttcttgtgtgattcagaattcggtatatcactatagctggaatttaaataaattcatcgtattctcttcctcatgtacaatatctcagtgatgcacttgtacaaaccaatcaaaaagttatgtacctggaagtataatttggcaatggcatctgaacagtgattgtgtttgcaattatgtctgaagggaactcagcgcgtattttaataatcacttcagcctaaatttcagcaaacagaaaaatatttatagagcaattaagaaatatacgcagtttttatctgactcagaagacatgtacgcatgaaatttcaccttaagacgtccagcctcttcaatcaaggtattaacatgaaaaggaggcttgaactcctgagtcatacggtaattcattactggaaattcaccatctggtggaacctgaaaacagaacgcaagttaaagactaatacaacatgctattacaagatgttttctgtactaaatattttgacgctcaccagggacaaagttctatctgaatcgaagctatccagacgaacagactcatgaaagttacaatcatcaagtatcacccctgaacctgaagaactcctataatctgcaacatttcaagtgtgatgttaccaagggttagattgtattaatagatcaatccccagttgatactgatgtgcctcaaagatgcagaaaaaatgctacaagagtaactacatatatttacgaattgggttatgacttatgagggaagtttgtaagtggaacatacagcttagttgacatttaagcattgtcaacgccaaatgtcacagaaagagacaccaagatttcaaagagtgagacaagatagaatatgacgttgattccttccaaatataataaagatgatttaaaggggtgaaacaagaaataccatatactgatctccctcctcttcctatgtttaggtcttcattaagagctaaacggatttctggattaccagaaagatagctcttcatttgaatggtgccatcaatctcagaagtcagtatatatccctgttcagaaatcagaaaaataatggatattttccatgaagaaaactaacattaagatgcacctacatgtattagtacataatacaaagcattgatccgcagaaatgggtggtttgatatggcaagaagagaacatgccaagacttctgtacttttgatataataaactagaagcaagtaactactcacgcttgaactaaaagtaacactgattttctcgatgatgtccacaaaaatttcctctcttctccgacccccaggatcattagccacaaccgattttgtaactgcagttccaggcattcttttggctccttgctgcatagcataaattaaaggggnnnnnnnnnnnnnnnnnnnnnnngaaaatgaaaagcaatcttactgtgaaaatggcagcaggatcaataggctgaaggcgggcaggagaaaccacaatcggctcattaaatatataagatttcaaaacttcggtagatgtagtttgcacgtaaccaaaatcctaatcaaaagagc

SEQ ID NO: 70168 - DNA, 254 bp, Arabidopsis thaliana landsberg
  unsure (1)..(254): unsure at all n locations
aagagcccgggcaatgcaggcacacagcttcacgttccctaccccccgaagccacaggcagaggcccagggagggagacccaacccagagcgaaaaagaaaccggggggaaagaaccanaaacaacaaaaaccaccgcgcaggaaaacaacaaagccccaaggagaccccccggcccccacaaggggacccaccaccggacccgcgcgaaaacgaaccccaccagacagaccgaaagccgcagccagcacacgg

SEQ ID NO: 70169 - DNA, 489 bp, Arabidopsis thaliana landsberg
tgatgttgcgtaattacatagtccgccaccatccgtctggcgtttcgtttttagaacatgcggggaaagttctcgggggctgtgaattcatccctcgcatagccccactgagcccattccctttgcaactgcggcgccaggcttcctacttcctcgtcagtggccaggaagtagaaaagccctttggtgaatcgctcgtgatagctcagtatttgtctgcgtttagcataagatgcctgtggatagtcggtattcaagccatacaaattatgggagaggtcgtgccaggctcccaggtcggtctttccgttcggcaattgggcgcctggcgaatacaattcgccccccgctcggagatagcgaaggtaaatctcgtattcaccgcgccggtagccctccggtttgtagaatgctacacgattatgcgcattctttgtcaggcataccctgaaacaataggcctgtaaatgcttgtcagcagcgcccggc

SEQ ID NO: 70170 - DNA, 353 bp, Arabidopsis thaliana landsberg
ccttcgcaatcgggttctagaagttggaccgccccaggttgcccgggttgatcggcgttgccatcgccccgggggtggcggttagcccggcgtggaagacctggcgacccgcctcgtcctggtagttcaggatggcgccgaaattgccgatcataccgcccagttcgggaccgtacggggccatgaagcgcagcatcgggttggcgtcctgcaggatgtcgcgcgcgtccgggatcaggtcgtccttgagcgggctggcgaaccggtgcaccttgtgcagcgtgttcggggcccgatccaaggcccggtccaggtgcggcagcatccgccgcaggtcgccgctgacgtccgga

SEQ ID NO: 70171 - DNA, 421 bp, Arabidopsis thaliana landsberg
  unsure (1)..(421): unsure at all n locations
aacattataaccaacttttgttgcaaccaaatggagaaacaacagatggagcgaccccacaaaccaagattccaaaccaacattacattccccatcattgacagcaaaatagtattaaagagaacaatttattaatactaatttggttaatttgattatttatttacttcactatatatataataaaccctcacgcatgttttcatctgctgccaccaaattacacaaaccaaccaacaaaaaacaactctctttcttttttctcttacaaagttttcatggagagttcaatgaacaatgcnnnnnnnnnnnnnnnnnnnnnnnnnnnnnngtttacagacgaccaaaatccagaagaaagtagctggacgatgtactttgaggatttttttcgaggcttcttcagcatagttgacgtcgg

SEQ ID NO: 70172 - DNA, 419 bp, Arabidopsis thaliana landsberg
tataaaagggctgtctaatactgtgctccacgtttaatacaaaacaagctaacaacaaccatggttgtaatatgactacccgagaaaaaatcacaatcattataagaccagtgcgtgaaagtaacacggtctactattagcttgcacagtctatgtatttgaaaaaaaccacatgtatgctgagaataccacagtgagttagacataattattagaaagagaatgcaacaaacattctctttcttttgacttacgaaacaactgaacaagatgcattcggacttgacgaacatgctcattaataggaatcttcagatgaagaagaagcaccttaatcataacaaaggaaacctgtaacttactcaagggaaagacttatcccaggtttctacgcgtgacaccagtgcttgttacataaa

SEQ ID NO: 70173 - DNA, 565 bp, Arabidopsis thaliana landsberg
ggctctcaggcgtcccaggaccaagcgatccttgatttccaaatacggctggagatcgactgggttttttcggtgacctggtgaattttctttttcaccgagcgcagaacccggcgataggtcgaaatcagggagaacagcgcattgtcttccaaaacgatttcgtcttccttcggctgcaaagtctgacgttcgccccgcgcccacacgtcgcggcccaagagagggcgctcgtagagagccttggcggcctcttggtatttttgatactccagaagtttttgcacgagttctttgcgcgggtcttcctgctcgacgacttcgccgttgtcgtcatactgaggcaacagcatccgcgatttgatgtgaatcaaggtcgacgccatggcgatgaattcgccggcgatttccagatccagttccttcatcagtttgatgtaatccaggtattgcttcgtgatctcgtgaaccttgatgtccatgatgtccatctcttccttgcggatgagatagagaagcaaagccagaggtccttcaaatttaggaagctgaatatttaaactca

SEQ ID NO: 70174 - DNA, 309 bp, Arabidopsis thaliana landsberg
attagatgggagcctacactattgggcataagcttgccacacatcaaaataccaatggatgacattgctaatagaaccggacaagatcaacaagagtgagtcaccggatcgatatcttaagagagagtgtaaaaatgtcaatggtgcgaatgaacgtgactattgaaagaatctaacattctgcagcaagtggaactaatgagaatgaccgatagttaggatcaccacacggccacaacttactaattaggattaatgacagaaatagtaacctgatggattcctcctaaggatgcctaagcttgcatg

SEQ ID NO: 70175 - DNA, 385 bp, Arabidopsis thaliana landsberg
ttcacatttattttttaatgaatatatactaggctttgtggttcagcctgtcagagatggatttttagtgtttaatgttaagaaatgtttgaacgatccaacgtatgttgagagaggcggtcttaaacataaaaggacatgcaaatttatgtattcaagcgacggttcgataaaactgtaaaatatgacaaacacatgcaaagataaacaaggattgaaaccacaaaccaaagcacaatgttagaaacatgcacacgttcacacgcattcgaagctagagtgaagtcaatgaccaggttcgagtgtgcctttgaaagacctgtggggcggaggagaaggtaggttttgtttcttttcttatggtggttcgtttttttcttactta

SEQ ID NO: 70176 - DNA, 573 bp, Arabidopsis thaliana landsberg
tcggcctgggcgggatcgtgcacttgccggccctactgtcggacaacggcgtgtcgcccgagatggcggcggtcggtgccgcattttccgccctcggcctgacggtgggacggttcctggtgggcttgctcctagacctgattccagcgagagtgctggcttctatagtgttcctgttcggaggctgcggcgtgatgctgctgggtaccgcaacgcacgaaaccccctatctgcagcttgcattgggagcgatgctgacaggcatgttaatcggcggggaaggcgatctggtgccgttcttcgtgaaacgttactttggccttaagagcttcggtgccatttacggcctactgatctcgctgttctgcctgggcacaatgttcggccccgcgctgtatggcttggccttcgaccgctttcatagctacgacctcgtgatggtaaccgccggcatcgtgtgcttcgcctgcgcgctgggaattctaatgatcggctcctatcgttatcccgatccgcatccggtcatccgtacctagcacgttacagctgttccagatgttggggagtccaccg

SEQ ID NO: 70177 - DNA, 439 bp, Arabidopsis thaliana landsberg
ttcctttttttagaattttctatgtttatcataaatataccaaactatgctatatttgttaaaggtttttcttcttctttttttgggtcaaaaacatcttgtctatctttttaatcaaatgcacattatattttgagtctttattaaactgaatcaaatcaaattaaaaaaaaggattaatattgttgtctttgtacaaaaaaaaacaatggtatgaatccttggaaatgagtggaacaaagagaagtgagagtctttttcatggtaggccattaagataagcttccttgttctcatgtcctaaccaccaatcactcatatctctcacacacaaagccgacccgaattttatagatctgtcctgtttttggatagagttcaagctaatctttgttttttttgcaattaacaacaataaggcgaataagaaagaaatcat

SEQ ID NO: 70178 - DNA, 701 bp, Arabidopsis thaliana landsberg
gcagggatcgagtattgccctccagatgaaagacgtcgatgcgattcgtaaagactgcccgacggtttccgccgtagcgccttaattgcagcgttcggcccaggtcaagtacggcaacaaaaataccaacacgagtatcgtctgcacgacgccggaatttctgggcattcgcggattctccgttgccgaaggcgatttcttcaccgaccgcgatgtgcgcgctcgtcgtaaagtgtgcgtagttggcaacaccacggcgaaaacacttttcggcgatgcggccccaatcggtaaaaccctgcgtattggcggcattgtgttcaaaatagtaggattgttggccgtcaaaggctcggcgatgttcggcgatcccgacgaccaaatcgtaatacccgtcacgacaggcatgacacaggtcttcgggtccgattcgctttccaacatctatgctcagacacccagggccgaagatgccaatacagcggctgaggaaatcagcgtcgccctgcgtaagtcacaccgcctgacaggtgagcaggaagatgatttcagcgtacgcacacagcaggagttcatggagatgcagaatcagtcaagccagaccctgacattcttactgacaggtattgccgctgttgcgctgctggtcggcggtatcgggattatgaatatcatgctgggtttaagtgacggaacgcacc

SEQ ID NO: 70179 - DNA, 682 bp, Arabidopsis thaliana landsberg
tctgatgcaaaaaaactaaagaaaatctcacattgaaatcaattaaaataattttcttatggtatatacaagttgatgcaaaattgataaaagaataaacaaggcaagagacgtgtggtcatgtgtctcggcaacccatgtgagggaatctgaatcacttttttttttttttttttaatgtttctcgaatctgagtagcacaataattgaattgtgtttcgtaactaaattagggatttattaatcatgaaaaattatttgatgaaatcaaattgtggtccgtctagttgacttataccagcccaaattatttagcgaatataaagcccaaactaggcccacaataacaaattatgcgtttcctcaaacgaacaccaccatgtcatgaaccattctagccgaatccaaatagaacgaaactaaaattgctttaatccatatgtgaccagataaagtaaaacactccttttggggaaataaatatccacttttcaccatctttttggtaaacaataaaacaaaccaaattttgtgtgcttgagcaacaacaactaccaaccagttactgtcaaaaaaaataaatgaaaacgtaatcgaagaaaaggtcgtgttttctagtgttgcagaaaatggcaactactagtactactacaaagctctccgttctctgctgctctttcat

SEQ ID NO: 70180 - DNA, 454 bp, Arabidopsis thaliana landsberg
gtttttagtggagagggtttagagaatgcagcactgattgctcggtgggcacagcagcatggaaagatggctgttataagtgctgcatatgaaagtggcctaggtttatcagcatatattttatttgcatcatatttggagatggagaacgtgaaagcatccacagagcagaagcaaggaacgcccccttctgtagcccatggtcttggaacttaccggtggcttagtgaagacgtaatgatgaatacattagggatatttcgtagcccttacagtggatttgttgaaggatttattgctgatgctagtagaaatctaaaggatgttaagataaacaacgatgttattgttagaaccagtaaaggaattcctgttcggaagtatgaactgagggtggatgtagatggtttctctcatttcataagagtccatgacgttggggagaatgcagaag

SEQ ID NO: 70181 - DNA, 666 bp, Arabidopsis thaliana landsberg
tgatgaccatgaactgggccgcggcgatgagcgcgagcccgagccagcggcgatctgccgccggtctggtggtggctgacatctgacttctccttcgttcacgttcgcggactgtccgcaacttctggttgtgtgaaatactgtaggggggtaacgtattccaacgagggcggacgctagcacgagataccggaggggggtaccctgaaaatgaccacgacgctcgatcagaaggacagcgcaatgccggagaccgacggccaccagcacagctacatcgccaacaacaccaaggcggactacctcaagcggctgcgccgcatcgagggccaggcccgcggcctacagcggatggtcgaggacgagaagtactgcatcgacatcctcacccagatcttggcgatgactaaggcgctcgaagcagtcgccctcggcctcctcgacgagcacatggcccactgcgtcgtcgacgcggtggccgccggcggcgaggaggcgcagatcaagctcaaggaagcctccgacgcgatcgcccgccttgttcgcagttgagccagccccccagagcccaccccaagaacagaaggaaccagccatgagccagaccagcacctacaccgtcaccggcatgacctgcggccactgcgtcgccttggtcaccgagga

SEQ ID NO: 70182 - DNA, 454 bp, Arabidopsis thaliana landsberg
  unsure (1)..(454): unsure at all n locations
atttacttggggcncgcccaccacagaaatagctaccgcaaaaaaaaanaaagnacgccgaaaaccnnncangggaanancncacnnncnctatttcttaattatttctaatttatgatcatgtttggtgatagtaaatacttattaaagtgtttgaaagtctttacaagatatcaaactaatattcaaagttccacatgttttcttatttacaaaagatcttctttaaagagacggatccattagatgataatctacaataaatttcttaacaatatagatatctcatattaaacccaatttttgatctttaactatattatttattagcccttaatatagaataatgcatacaaattttttgatagagaaaatcatttttatgtccatctgtctattcaatagccaaaagtcctattaaactacatgagataatatttaacttcataactta

SEQ ID NO: 70183 - DNA, 631 bp, Arabidopsis thaliana landsberg
caggtgagtcatcattgatctttatactgttttttttttacaacaagatcgaataagatgtttgtctctcctagttgggttagagttaactgttgataattttaggtgatgattgtatatctattggtgatggttcgaaatacattaatatatcacggatctcatgtggtccagggcatggaataaggtacttctcttccattggtctggttacctatttcaactttaactatggtcaaattagtataagtgatgtgatcacgttatttttcctaaacaagtatcggaagcttaggtcgatatggaaccaaggaaacggtcgaaaatgttgttgttcgagattgtacttttagagaaacaactaatggggttagaatcaagacatggcaggtaaaactgatttgtttttttttctccctaatttatatattggtgttaaagtaatgacaatatcattttccatatgtttgtattatttagggaggaagagggcatgtgccaaatgttttaattgaacgtataaaactacatggagcaacccgacctatcatcatcgaccaattttattgccctcattcacaatgcaaaaaccatgtccgaaaaaattttcttcttcttctaaaggattatg

SEQ ID NO: 70184 - DNA, 227 bp, Arabidopsis thaliana landsberg
gggcggcttataccaaacctacagaatactcccaccggttgggcaaaccaaagagaatgatgactgcgggtagcaccacgtcagaaaccaagaggagctaatatgcggcccataggcctccactacgatagggatcacagcaggcaacacccctggcttcatcgatgcacccaggcaccaataaagccattacaacaccggggaatccgggacagaaggacatatct

SEQ ID NO: 70185 - DNA, 608 bp, Arabidopsis thaliana landsberg
acccttttatgttatttacttcaacatatattacagtagtgaactcctgttatttggtaagtgattagcaaaaaaacgatagaactacttggtgatccttatacagttatacatatttgcatagattcgcatcaaagtgaaccctaacggcatagaccataaacagtttatactatgatataaagtaatataattaatatggtttaccaagaaaataatttaaggtggacgtacgaaaaatcaaagcagaaaaagaccaacattgtgaggcagggacttggaatgggaaagacgaaatgatgaaggcatgtttggcatctggccttctaaaagccaaaacccatcctatccaaatatttaattatttttgtcttttttaaagcaaaagaatccgtttcgatattataactacaatgactatccatgcatatactatacaatatatgtatacttatataaaccaatcgtagattaaaatagtgtatacatgtatacagtcattgtcatccaacgaaattaaacgtgggcgtctttttcagataaaattacacgtttgttaagcagttgaatggcaaatagatgtttctacaagaagttgtaagaacaaa

SEQ ID NO: 70186 - DNA, 477 bp, Arabidopsis thaliana landsberg
acaatagacgctttcgagaaatttgctgatgcctgctctcggagttataagaaagccgagtttgttcttgataatgttgcaaaggtcaaatcgtgtttggtgatgttggacttggaatgctatgacctcatcctacaaatgtttcggaacttcttcaaattcataaggtagattagatatacaaaaagaccttatttacaatacttgagacaaactctttagattatagactgaatgggggttcttttgggtgttcatctaatagatctgatcatcctcaactggtcttttcgtcaatggaattaataatgattgcaataatagatgaaaccgaacaagtgtccacggatttgcttgatagtctcttagcaactgtcaaaaaggaaaatcaggtgaggtttcttcttatttcaagttaattatttcccagtcaatgaacttgggattttgatttttaatctcttcctgtcttaaaat

SEQ ID NO: 70187 - DNA, 357 bp, Arabidopsis thaliana landsberg
cgtcgttcaactatataaaatcagttaataatttattgattgatgggaacgcaataagaggggtttggagtgtgatacatccttacacgagctaaggaatacgtgcaagcaaatattttaacacgatgacgtcgtatacttgcgtaaggctccgatgatacccaaacccacttgtttgtgtttcaatcctctaactaaaacctacctatttctttttcaaatataaagcgtctgaaaacctacctacttgtgtctgcgtacataaaacctctatcaccaactatttattccatcatctgactctacttcaaatcactaatcagcctcctcatatatattgtcctgacatcctgactc

SEQ ID NO: 70188 - DNA, 592 bp, Arabidopsis thaliana landsberg
ggggcggcggccgtggtcacgatggcgttgtgtgtgctcgttgtcctgggcctgcgcgccgcggtccgttctacgtcggcggattctacgtcggtcgattctacgtcggcggattctacgtcggcggattctacgtcggcggattctaccgtagggaattatacatcgttgaatattgatcggaagaactctacaaacaactcttctacgaagtcgcgttctacgggcgagaagtcatcgacgtacagctccgccgtgtagacgtccacgagcgcgaagttcccgaaccatcgccgagttagcctatcgctctctagtcgagggcgggttggagcagacgacgtgaccaccacccggccggtccccaccctggagttcgaccaccactcaccccgggtctcgcaccaccgcgacgacgtgctcgccgaggtccgcccgcatccgatcttctggaccgacgcccacggcggctactgggtcgtcacctcgcacgagctgaccaagcgcatcctgcgcgacccggccgtgttctcctcgcagaagaccgagcagatgaccggcggcgtcaccatcccgaccgtcatcggcccca

SEQ ID NO: 70189 - DNA, 985 bp, Arabidopsis thaliana landsberg
cacttctcatctgatttggtcaatccatacgcggcatggaagatacatttagcttcccaggagctttgtttccccttgctcgtaaagcatatcgcctattttgaaaccagttccagatctgtgatgcattaaaacaacattcccattaacttttaaaagcaaacccaacagactctgtctgataaaacttaagaatcaagaaggaaaaagccagtacttgcttgaactgcacaacaactttccccttccggtcaggtgattcactgagacaacagataacaaaaagtaaccacattttagatgataaagacacaaaatcactttcaggccaaggaattgagcaacaacaagtaaaatacctaaacttatcagcaagagcttcaagaatatgtcgacctggcattgctgtattatgctgtagcaaaattgcttccatctccgttaccttcataacaattgaagattagctataacaaacaagataaaacctcttcaaaagaagtcacaaaaccatagaacaacagatagatagaaaaacttatgtattatcaaatctaaactcttaaacattacttaataaagtaaagccaatggatttcagaacatacatcgaattgtcttcaagtttctactagctaattacaaaaattcaattggacttcaggatctaaaccctatcatgaacccaaaaagaagacctaaatcctaaggaacaaaaccgacacaaaaatcagatttttcagctctgggagctcaaaatccgtgaaagcaacacattacaaagaattgagataaacctcatgcaggataaatcgaaacgccggaccgccattactgggaggtcgacccatggtatctttttcgctcacccaataaaaacaaaaattggcggcagaagtgaaatcattcgagcctttctcactaatatcgaatcacgggaattttttagtcggcggtgacccaacacactaaaccggtttactta

SEQ ID NO: 70190 - DNA, 1885 bp, Arabidopsis thaliana landsberg
ccgactccgtcgcttatataacttttcacctgtgtaatttttttaaacttaacatgtagtaatgggcttttaaaacccattaaaggcccattttcttaaaaccgatacaaaaatcttatccgtatggtcgagtaaatccagcttatccgcctgaaacttatttctcagtatccaaaacgatggcgaagaagacacttcgctgaagcttttttttccaaaaaaatttcttagtgtcgtcaatggctttggctccacttaattttacggaaatgccactgagaagctctcttcctctgacctctagctctcgctattgttcctctccttcgcttcacgcattgctcttctattcgttgggtgtgaaaccctcgcgtcaacaaattgttcggccattctcttcgctgcgtacaagcgagcgtagcaacaacaggagcaataacaatcgtcgattagatcaacgtaatcataaacctactcctccttggatagataagtggcctccgtcatcctccggagctggcggtgatcatgccgggaagaaaggtggtgaaaacaacggcggagatagaattcggtctgcggaggaggaagcggaagcgaaacttcggtatttggagaaggataaaggacaaaacgcgattgagaggattgttcttcggctacggaatttaggattaggttcggatgatgagagcgatgtggaagatgacgagggaggtggaattaacggcggagatgtgaagccggtgactggagaagagagattgggggatttgttgaagagagagtgggtgagacctgatatgatgcttgctgagggagaagagagtgaggaagaggatgaggtattattgccatgggagaaaaatgaggaagagcaggcggcggagagagtagtaggagaaggaggagtggcggtgatgcagaagaggagagctagagctccatcactggcggagctcaccgttgaggattctgagttacggcggttaaggagggatggaatgtatctgagggttaggatcaatataccaaaagctgggctaacgcaggcagtgatggagaagatttatgatacttggaggaaagaagagcttgtgaggctaaagttccacgaagtgcttgctcgtgacatgaagacggcccatgagattgttgaggttcgttagttctcttgaatacttcattgattagaacagtaggttagcgaaatttgaggtgcgagattattccaagagagagcggttttcattatctattggggataagctttgcggaagtgacatgatctttataggataataagagactctgaagtacctaagctctgaaatagaatggttataaagcttttataataacagtaggaaatttgtgaaaaacgttagatctttcttgggaacgattatatagttgtgaataaggtgaatttgaggtgttgattaactagagtggatggagctgagcatgctgttagaattctttgagtaacaagactgtgcaggagatgcatgtcttaactttaggtttaaaaaaaaactgattgaattactctaatgggcagcgtcgaactggtggaatggtgatatggagggccggaagtgtaatggtggtttatcgtggacttgactataaaggacctcctgtgatctctaatcaaatggccggtcctaaagagactctttttgtcccagatgtatcttctgctggcgatgaagcaacaaatgccaaagataaccaaagtgcacctttggtaatcaaagatccgatcatcaagaaccctattcgcaaagagaatatgacagaagaagaagttgaatttaacagtctattagacagcttaggtccacgttttcaagagtggtggggtactggggtactacct

SEQ ID NO: 70191 - DNA, 804 bp, Arabidopsis thaliana landsberg
caattatcttaaatatatttttcaaagcttggagctgttgatatgagtccatacatacatgactccaagattcatagtatgtaaaatgttcaacttgagatttgagagacgtataccacactgcctctacatagacctctaaagactccaactgttctaaagctggagcttagttgtgctcaagatctctggtgattatcattcatcgaccactcttttaacattcaaaaataaacacataaccctaaaatataatcaacgcttacgttctttcaaaaggtgatgaaaacattaaaaacagaagcatcgcagaaacattattaagagttaaaaactcaacacacacctagagaaaagcaaagacaaataaactgtgtttgggaaaatattcataacaaggcacgcagaaacaagttcataacaaagtacgcaaacaacaagcagagtgacattaactcaagcaatactctcggggttagtagctaaacccgacttgttgctgctgtggtggctgttgtggtggttgctgtcctgcctgtggtgtctgctggtaaccaccgctgtatcctccaccagagtagcctccgtaatatgcattagggtcttgaggcatcgtgtacccatactgctcctgtccttgtccatacccaccgtagtaaaactggctcggatcccccgactggaaaccaatatcaaaaaagcatttcagattataaaaagctacttgaactcaactattttaagcgattctgctatcatctaaaacaatagcctggactacatagttcttagaacaaaagccga

SEQ ID NO: 70192 - DNA, 111 bp, Arabidopsis thaliana landsberg
aaaggtaggaggaacgcatgaagggagacactcttactcaaagaatttttgtttattagaaacaaaacagacaaaaaggaaaaggctcgagatccattgaaagaaaaccgg

SEQ ID NO: 70193 - DNA, 557 bp, Arabidopsis thaliana landsberg
cgcggaacattgccttgcacgaggaaggccagtcgcaacgcggcgaccttttcatcctcggatttttgtacggcgttgatccgggtgatgggagcggggagctttctgggccactggcgtgcgccaccggcaagcagcacgatcccgcgcacagcctgtgggtggtcgctggcgatggtctaggcgatccactggccgacgcatgcccggcaacaattgccgggccaccttcggcggcgatcactttggcgaagtcgtccccgaaatcatggaacgtcacgtttttcatcggtcctttactgcccgccacacccctggggtcgggcaggaccacgcgataaccgcggcgcaccagttgctcagccagtggggcgaattcggcgctaccacggccagtggaggccaggatcatcaccagcggcccctggccctgtactgagtaggcgatggtcgcgtccgcattctggattgaacggtgggcgacgttgtcctgcgaccaagcgggcggggcgagcgcaatgcgcacaagacactcatgggggcgactaatttcgaca

SEQ ID NO: 70194 - DNA, 796 bp, Arabidopsis thaliana landsberg
acacaaatctgttttctcgaaaaaaaaaatatcatggaattttttaatagtttattcgattataaagtcataaaaaaaaccaaaatagttaagattttaataaaaatacatatagcttaaaccatatataaattataatcaacaaaaaagtgtactcaagaaaaagatacatgtaatctaaataaaaattaaatagttaaattcggtggtgcaaaatattagcattgattgaaataattgatgcattttgcatcggttaaaagaattatttgaattaatgttaatatgtatcagctgcaaaatatgaggttaattttacatcagttaatataaatgatgttagtatttacattaatttattaaaataatcttaatatttaatttcattaatattaaatcatttttataataaccaatattatttaatttcattaattaatatggaagcaaaccattaaaattattttggaataatagttgctaataaactttcttacaccataaaaaaaccaaagtcgcttatataacattcttaaatgtctcttttttaagtgaaagtgatgtgggcgtagataaattaacatcatttgtttttacgacatagtcattaataaattatcgattggtattgattaaaaatttctattattttctatatgacgtaaattcatatatttatattaaaaatcctgaaagtaatgcaacatcatcggatattggatctggatttgaactataacgaacgtgcggggatttaatattttatttaaaaaaaatctaaacctatcaaaacatt

SEQ ID NO: 70195 - DNA, 801 bp, Arabidopsis thaliana landsberg
cccgttctctaagaacctaaccaagtttaagtgaatttgcttcaaatcatgagctactttctctcttttgcattctattctcaatgcaagtagcaaacaacgctaagcaatcgcataatcatgaaactaaaccaaatgatacagaacatataggttgtggtactggatatgatgtaacaggatctagtttaagaatcaatagtttcaaaagagagaaaaatcagaatgcagaaatgttaccatcagattctgcaggtaagctagtggccagagatggttgaatctccaaatcttgacttctaacagacttatctgccgaaagaccgtgttcattatcgactataacctctgaatcattacttttaacagaattaaccactgtcagactctgttgatttttggctttatcgtctttctgacatttttttttggagatgagtttttctacttcacctggaggagaatcacttgactttacagttccgacatcatctttcatactagcatgatgaaccattgataaactacttgagtttacagttccaacatcatcattgacacgagcactatgaaccattgataaactacttgagtttacagttccaagatcatctttgacacgagcactatgaaccattgattaactagtcaagtctttctggatataaggcctgataacttgggaaagctcccttttttaaatatctgtttgcggcccaatcttgttcttcggaatggaccttcataactatactgccttggagaagtacagatatcataatcatctgcattaagaccacg

SEQ ID NO: 70196 - DNA, 106 bp, Arabidopsis thaliana landsberg
atgcgtgcaacaggggattgattgggatcatggctgatgaacttagtctttgctgggtatctgtacatattcctttttcatgtgcgggcactcacaagctggcaga

SEQ ID NO: 70197 - DNA, 555 bp, Arabidopsis thaliana landsberg
  unsure (1)..(555): unsure at all n locations
tacataaaaaaatcacgtcattgtataaaatccactaaggcgcgacctgaataaactttagaaaaaatttcaaattcgtataactgcatttcgtctcattcacagttgcatgaactcttatcatacgattgtgccatgccatattaacatcgtttatcatccaacaatagtggtggagttactttcttattgagttcaatatactaaaaaggaaaacacataatataattttttcttttaaaaggcattcttattattatatgtatattattagaaaaaagtacgattaaaaaaattaaaaagaaatgtaagtaacaacatttaacggatttttgatttattaaagataagcttcggttaggatacaaaatacaaagatttgccaaactaattcagatatccttcaatcttttgatgagcttcaaagtaataattactaattaatttactggatgaaaacagtaattngttaaattttaattacttngtgacaaaaanatataaaaaaataattattaattaaattgtctatatgtatgggagttttttttttta

SEQ ID NO: 70198 - DNA, 2849 bp, Arabidopsis thaliana landsberg
aagagactgcttgaacttctcatcgtaaattcttatacaatcaaacaaagtgggccatcctatactgcgaaatgatgtaccccggagcaactcataaactttagaagcaccttcctgagtggaagcctgaaattaaataaagatgccagcaaggaaactcaatgagtgaccaagtaaataaggtcccaccaaaataccaatataaagatttctcataccaaggtacacagcatttccaagaaagccacaagagttttaaaatttgtgtggtcctctccagcaaaattcacaaaagtccacaagacatcattcccggagagtagctcaggttccttctgcaaaaggttgtaaatatcaaaaaacacaaaaccaggaatgtagtataaaaatgagatatgatcgagatggattctgaatgctcactatgtgctatgaaaagcaaaataaggtaccaaaaaacatatgaacagaactcaacttcaagataccaagcaaactcattttccaagattttttgagaaatataacagaaaaaaaaacaaagataaagaactcttgataaatttttatatggtagtaattctcaacctgataaattttgcttacaaactccataagagaaatgaagggcagtggcctgtcagactcttcagtctgcatacttccatcaagcggatcagaagttcggtaagaatttagaacactcatagccatatcctttgattccttcacctgcacaataatgatgtcaggcttgacacaggagataaacaagtagatacgctattgtatttctcatcttggctcatacattcaactaattagacactatcaaaacataagaaaaatagcaatgatctaacgtgcagccattaatgaagttatatgccactcagattccctaagtgatccagctgaaatactcagaatctgtgactgatacatcaacaagttactccctctaaatggaaagtagatactaccaatttccatcataattatcagaccatgaagtagggagaaaaaattacaagctttacatgattaagttgcagcgttcaaactttggtcaccaacatataatcaatacacaaatgctaagtagaaatacgttaatctccatatttaacaaaccttatctcttgcgatcgggtgagataaaaaacaagaggctaacttgtgcagataagcattatatatgtagataatgtcctcctcatcattctgcatgtagcaactaacaaaatgtcaaacaatgatacaccaatacaagggggaacgtgggctgagtcaggaaaaatcaaagatcacaaggtaaacctggaaagagacttgaaattgagatctgacttagcgagcaaaatcctagagactaaacaagaatgaacaaagcatctaaagaggacccgccaaacaccaatataataaaatcacatctcaaataatgaaatcatttatagatatataacgtgtttagaagcagaaatatcagcttaacgaaatgagaacactcttacatttgggaatgactaatcaagtaaaaatataattcatgaaaaaataaaacggtatccataaaggccagcacataaaaccattttcatgaaacagacaatatacactacagttgtcatgacggaaaatataaacaccataggaaccattacaaaatagctcattcaatataaaattctactagccaaggtagagatcaatatcagatctcaatcttcaagaaaagttaacagagccaaacatgtcatccactagctgggaaatcaaagtaactcttccactagctcgtcaaatgatatcaagtgcacagggaatccagataggcaccccgcatttgatggacactaactgagaacataaaattcaggatgatgtttataatgaaagtacctggtaggctgcagttcgaagaacattatccagcaaaaattgaaacacgttttttgagaagatggactccaggcaggagcatatatgccccatatctgttgttgaagcagtggaaattgtatccattcccgatattccatcatgtatcagcattaaatgtacagcccaggcaagccttatgccaccaatgaagccatcagcagtggggtcactgccagaagccatgacctgaaaggtgattaggacgtaagcaagacagaagtgtgtttgcaagtgtcagtagtggaaggtctttggtgacagggagaagaacgaaagaaaaatgtatcaactcgtcttacaatatcctgaaagtctgtcctaaatgaagcatcttgagatatcatagatgacttatcagatagtctgctgattgcatctgatacgaaggtgatgatgagagaaaacagaagactaaaagtaatctgcaacaaagaaaataattatttatcagaaactaacacatttcaaatttaatacgcagggaagaaagaaaacttcaaaagcctctacgtcatgaacaggactagcatgaacctgagaacttatggtgtcatttccttcagttaattgagctgcattatcttttaaaatatagtatatatccttcacatctttcgaacctgcaataaacaaacatgttcgaagaatgaaattgacatagaaaatattcttcgagcaataacgagatatgtgatgacaagagtgttttaatcctatatataaacaacttaatattcattataaagtaatcaaaattttcaaatttttgataaatgagatcagagcaacggaggatgaataccaaacaccataatcacatatgatactcaagttcagtcaaacatgttcaatgcataattacacagacatagcaatgatatatatgattacacaatatatct

SEQ ID NO: 70199 - DNA, 582 bp, Arabidopsis thaliana landsberg
  unsure (1)..(582): unsure at all n locations
ccctatnttacaatttgtgccaattgtttataaaacctaactgctagtctaagaaactgcgctgctttttactctgcagatcaccaaaaacatctattaaacaagctcagttagagttaatgagaagcagatcagtgagaagtgaaaacttacctttgaggttcatcaaaacaaaggaagaaagtattctgactgttgactcatccattgagtaaagggcttcctcgagaaccaacccgactgtgctctcagtatcatcgctgagatggatgttcttttgagagaccacataaaagttctttagctactttgtggcccaatccatgtcaactattgctgaatcaatagactgtaatatacaagaagttacggaagcactagttgactggtttatgaccatgtttgactcagacacttctaacgtatcagatttgtctaaacccatgatattttgcatctactgagccacttccacggctatgcatagatcaccaggggatgtagtaaaagagatggctagtttcaaaacgctctttgccacagtgggtgtagatgttctacagcttttgcagatttgatgag

SEQ ID NO: 70200 - DNA, 570 bp, Arabidopsis thaliana landsberg
cgatggttaaattgagaaacatcatcattcatatataagtttgttggtaaacatatacgatcactagtctatggtacttgacccaaatacacaatcaaagaaaaaatatacaatgttttcttcatgaaaactatttcatcagtttataacaaaacaaaaaaataataattatgcttcttctaattatattggttcattttcattttgctaattttatttgttcctcaaaattgaaagcaacttaagaaaaaaaaaataacgatctaaacgacggagccttcgtagatggttgaaagttttagcctgaaagatcgaaccgccagcttagctcgtttagaagtgtatcttctcaaattacgaaccgaaccggaccggtttatcccactcgaagctttaaccggcgcagttttactcacaaacggccgtccctttttaactgtcgtttcacttccatttccgttaacggaatcgttagaccccgtcaacatcataaccggagagattctcaccttcttacgccgacgagattctttcttaacagagttttgtatcgcgacgcttgctttaacg

SEQ ID NO: 70201 - DNA, 536 bp, Arabidopsis thaliana landsberg
agcccgagatgcgcttgcccctataatttcctacgttttgattgcgattttgggcactttatgatcttctatgggtacgaatatcagtgggactggagtgtgagttagaacctttacattcgtatttctcgcatctgatttttcttgttttcgcgagtaaaaacgtgctgacgactatcttcattaggtcaccgtcattgttggctatacgtgcgctggtattcaggtggcttcactacccgccactgcaagcacctacgcggttgacagctacaagcctgccgtcggctctattttcgtcgcaatcacagtgaacaagaatctatgggggctacggctaagctgacaggagtaatgtgtgatttggtttgataaagattgtggtaagcgagtccaaaactatccattcacggacttcgtgtgcccgcttacaatggtcttcaagtttaacaagtttatcacgcattgtaccgagtcagctagagccccccccccccggctgccatcatgacaaacatgtgtatcactgtattctg

SEQ ID NO: 70202 - DNA, 114 bp, Arabidopsis thaliana landsberg
  unsure (1)..(114): unsure at all n locations
ctgttctgtttttcctctcctcatctctctcctatttaagaaagttagtacagagaatgaaacanaaatctcagtcgttgttaacaactattgacagatggcattgctcaaacg

SEQ ID NO: 70203 - DNA, 565 bp, Arabidopsis thaliana landsberg
  unsure (1)..(565): unsure at all n locations
gctggggctgttcgtggtttgcgtggcggccgccggcagctatcattgattgatcctcgcccggcacttttggcctcgcaaaggcactgcaaccttcgacatctggaaaacactcgcgtttgaggactattcaatggctcagcttttcgtcgttcattcacagaacccgcaggcccgattgcttcggcaggcggggcagctgcttgcgggcgggggcctggtggccgtgcccaccgactccagttatgcggtgctggcgcggctcgacgacaaggcggcggctgatgccctgcggcgaatcaggggcctggacgaacggcatcaccttacgctgctgtgccgggacctggcggaaatcggccatttcgcgcgtgtcgacaatgcccagtaccgtttgctgaaaaaggccacgcccggtccgtgnnnnnnnnnnnnnnnnnnnnnnnnnnnnggtcctcgccgcgtgttccatccgtcgcgcaagaccatctgcatacgtgtgcccgatcaccgcattgcactggaactcattgaacacgccgggtcgccgctatgttcacgacgc

SEQ ID NO: 70204 - DNA, 584 bp, Arabidopsis thaliana landsberg
ctaacgcctgatgatacggcctgcctttcttgagtctttggtcggtccgacaatctgtgtgttttgtgttcactctctgtttttctttcattattttcttatcgtttatttacttatatttcggttatagtgtttctcaagctctagctcatatatcctataactataaggggatgtgatttaaagcaaattttggaccaatcactatgaaataaaacattactaattttgatattttatttccctgatagctacactccttagttgagctttccgtaagttgaaagcaaagacgacttgcagagcaactttccaagttgcaaaccacacatccatctatagagacatatcatataaacaaatttatttaggaaaaatcctagaaattgtcaaggtttactcattagatgatactctaaattacacccataatatattggcttgctaagttgcagactatccatacatctatccatatacatcgtaagaataatttatataggaagacctagaagttgtaaaatgtgtatgaataaattccaaatgaagacctagagcttgtaaaatataaattctaaatctag

SEQ ID NO: 70205 - DNA, 578 bp, Arabidopsis thaliana landsberg
acaccttcatgtaacctctccctccattgccctggcataaaagacccgacctagcccttgcggcatcttttttcctccttctccttctcccttccttcaaattctctatcatgcatacgtggaggaaactgatttttctggcccccaattctcggctatctgaaagacaaatatgggacgcaaatgctaggaaacacaggaatacgtacaactcagcaaagtataaaatttatcactatagaagcctggttcctaaggctaatcactacctttctttctgtactcggcgtgtttaaattgcctcatacctctctggtaacctaccttctttcctcatgcttagctacgtagtttaatactaccactcatcgataccttgtgcctgggttgtaacaatactttgttctatttccgctcgaaatcatggatagaggagcattgagagatggttgttaacaaattatcgagggaactaatgctaataaccttcgttcaaaataatgaccaagcttttgtatatggattatataccagtacattttattcccggtatcgagctaacgttgtaatagggactt

SEQ ID NO: 70206 - DNA, 465 bp, Arabidopsis thaliana landsberg
ccaaaaaacgtggagaattgggtaatgtaccgatttggaccagatcttgaaggaagcgacgattctaaactcgccgtcgagtagattcaatccccggacatcgaatttcaacacatggaccgttttgcccttcgttaattgaaaaagaaacacattaaaaacgtcatcactaaaaagctgaactgatcaatttcttttttatctacctgagcaatgtcaatctgttgaagaagatcaccaagagagacgaaatctcgaagacccaatttagttcgtttagaacccaatacagtgattgtactgtaaatgagtttccagcaacctccgatcttgtctaactctccagtcggctccggtgtcggattccgacattccaaaagcttcaccagtccctcgatctctgtctttgtatccgacttaactccgaatatccctctattgatccctttaatccccatacaatca

SEQ ID NO: 70207 - DNA, 481 bp, Arabidopsis thaliana landsberg
ctgaagccttttgtgtataaaactataaaagattcttctttttctttgttaatacatatcaaagggttcactgctcagggtagaggttgcttcttgtctgacctccttctaggctatcataaataatttatacaaaaatatcttgttttgtttacttatatcgatggaaacttacatattggattagatgaatctgatatgtacatttcttcgtaaaatgacttgttacttatagtcacaactattatttactcaatgtcacatatttggtttaacacaaataatttcaacaggtgacatggatagaacattcacagtacgaagagagtcacacccactcactttaccaaccgttgctcacttctttcgttgggttaggcgcaaccaaatggcttgcgactcttcaaaagcaatgcgagagcttcacaatgcttttgtcttctgaagatcacacaagttttggctcgttctctttcttttt

SEQ ID NO: 70208 - DNA, 591 bp, Arabidopsis thaliana landsberg
gacacagcagtatatagtaaagatacataaaacagagtggtgataggtttacttgaaataggtttcttcacggtgtttaaaagttgaaggcggtatctcagaccaacttccgctagactgcttttctctgcccgaggaaggaattgtgaatcccgcttttggacggtacaacaacttacgttgctcagtaactttctcaccatcacacgacctccttttgaaagaaagccgataaacagcggattttcgtttctgagatgtgggtgagtttagagtcttgtcattaaaactgactgttggcatcaaccggctcaggctggttctcagggttttctcttgagagttacgttttggatccttcaagcctttaaagcttgcatggtccatcagtttcttcttgttgctcccagtaagaacagagagaccactcggatccttgtacataccttttgacacaaacttctcggctgtactcccgtctatcttcaaataagtctgatggtattcttcgtactttcctttaccatccacgaagcacgaagacgattcaaactgaactacttgaccattttgtatatttgtaccagtcgc

SEQ ID NO: 70209 - DNA, 581 bp, Arabidopsis thaliana landsberg
  unsure (1)..(581): unsure at all n locations
acttttacatcggcaggaatttttgcgcttgcggctatccagtataacgcggtggggcttacttcttatgccagtacccttcaaacnnnnnnnnnnnnnnnnnnnnnnnnnnnnnnnnnnnntcccaatgtcatgttctataacagcggtttgatcggtgccggagaacaggagctggatacctcgcagacttttacccggaaatttgcagcagcagtttacctgtacgcgcttacaggcaacatcacttacaggaattatgtggatggacattatacccacatgcatttgatcgcctggtcgtttgcctacccttttgaaggaagcgagcaggacgcgcttttgtattatgcgggtttgcctggtgccaccagcagtgtacgtaacgacatcctcaacaattattcgaactcaatgagcgcctggaatgcagataacctgccctcttacctgggcaataccgatgcttacagggcctatctcaaagacgataattatacctggaacagcaaccagaccaaggccaaacaggccaatatgtttctgggcatgaaccagtatggactcgatgcaggaaatgc

SEQ ID NO: 70210 - DNA, 410 bp, Arabidopsis thaliana landsberg
  unsure (1)..(410): unsure at all n locations
aactaccggaggagccggaggaggctctnnnnnnnnnnnnnnnnnnnnnngaacagcagcatctaacggagctgggtcgacaggaggggcacccggaagtgctagcgacttttcactcttaagccgacctcctctcatttgccgctggaacacccgntaacaacgccggggctgccgataacatgcgtatcccctcacagaacggaagaggcggaggaggagcaaggtctgccgcatcttactctgctcccgtttactccctggaaatcccggtaatgaagtcagctacctataacggcatggactctgctagctcgggagcaatctactccactagtgatagtgaattcaaagaagcaggcacctctgttcctaccgggctttactacaggcacagccctttgcattgc

SEQ ID NO: 70211 - DNA, 431 bp, Arabidopsis thaliana landsberg
  unsure (1)..(431): unsure at all n locations
tatcttcgacgtcatctacatcntctatcgcctctaccggccggaaggagacggttctgttcggggactccatcatggcgcttggcttccgccacgccttccaggccgtcatctctttcggcaaggacgacatgatcatccccgaaaccaatgagaaggaggtcgaggagacccgtcttgtggtgaaggacttcgagcagcagtatcaggacggcctgatcacgcagcaggagaagtacaacaaggtgatcgacgcctggtctcctttcggcgaccgcgtggcggccgagatgatgaaagacatctcgggggtcaataagggccccgacggccgcgagaagcccatcaacgccatctacatgatggcgcactccggtgcccgtcttagcgccgcgcacatcaagcagctcgccggcatgcgcggtctgatg

SEQ ID NO: 70212 - DNA, 130 bp, Arabidopsis thaliana landsberg
tcgacaaattctcgaccactcctccggcctggactgacgaattctcggcacccggctcgactcattttcacacttttggttcgaccacttccttcgaactccgagtagatatttcactcgccctcattca

SEQ ID NO: 70213 - DNA, 281 bp, Arabidopsis thaliana landsberg
aaaacagtttaacatcaaatacataagtttttcaaagacaatggaaatcaaatattttttttgcaaaatttaaaaatattattatttaatataataaatgttaagtggatccctataatgtgttgtatacccttgctaacggtcaataccattgtcttttgatcgtaacttacatatttaatgtgtaattgaatcaagcaacatctgccttaatctaataaattagtatgttaaagatatcaataacaatgcataaattatccatgaatttgaacaaaaat

SEQ ID NO: 70214 - DNA, 463 bp, Arabidopsis thaliana landsberg
accgggaatggccgccacataaggaacgatggactttagtgcggggtgcagggatttggtagctgcccattgcgcaaaaccggaatagctttcgacatacatacccacgcggccatcactccagggtaggtgaatgacccagccgatcacggcatttacatagtttgcttcacgcacatacgggtctatcggatcgggacttaaccgatgtccacgcgtggctgtcacaatacccacatacccatgggacgcggcggatctgactcatgacaggctcctgtcatgataggaatagatgaagaacatgagcgctggggcttgccatgacgaagaatatattctactcactcacaccccagatgatgtggctacgtacgaagtatgacttaatactctgcctagaattacataatgctgtgcccggtcagtgtgcattatctgtacactcatcagacataaaacg

SEQ ID NO: 70215 - DNA, 264 bp, Arabidopsis thaliana landsberg
gaatttagttcgcgcaagaaatcagttcagattgcttgacttatcccatgaatttgaccaatgatctctatacggcacattcagtcgccgaacttttgttattcttctttttgtttgcagtaaattcatgatgccttagcagccttaacatgaatcataatctttcatcgtattcagagtttatcaaaagaaaagcagctgagctcggcttttcattttgtggaatttttaaggcggttttttcttgaagtctaccttcgtcat

SEQ ID NO: 70216 - DNA, 479 bp, Arabidopsis thaliana landsberg
ggccagttgcgcggcgagggcggtgatgctgatcgcgccctttactttccggcgtcgaacaccggagcgcggatacagcggacgttcggttccgcttcaccgtcctcgatcgagtatccccgcgcgcgcacctcaccaaggacggcacggaactgttcaggatccgtgatcgtccgttccgtgaggcgcaccaacccggcggcgagaacaccctcgaggtcttgggccggtaggtgtgccgccagagccttgccgagactgctggtgtgcagaacctgccgcatgccggggtaggtggagaaccgaacaaacgaatggggttcgatcttcgcgatgaagaccacctgtccccggtcgaagacggccaggtggacggtgtgtccgaggcgaaccatcagctgttcgaggtgtggacgtgcgaccgtcgcgagatcgagccgattgaggtacgcgcccccgagctcgaagaggcgtacgcc

SEQ ID NO: 70217 - DNA, 555 bp, Arabidopsis thaliana landsberg
cagctcctcgccggagaacagcccgtcgtaggaggctttctgtatctccgtgaggtcggtgtcgcactcgcggatcatcaagttgatcattcccggcaggcccaggcgctgaccgtcggccggggagaagatgcgggagacgccacgggagtgcagcagctcgatctcctcgggaacgatgacgccaccgccgccgtcgtacaccttgatgtggcccgcgccccgctcggccagcagctcgaccaggtaggtgaagtactcgacgtgtccgccctggtaggaactgatcgcgatgccctggacgtcctcctggatcgcggtgttcaccacctcgtcgaccgagcggttgtgcccgagatggatgacctcggcaccctgccgctgcaggatcctccgcatgatgttgatcgctgcgtcgtgaccgtcgaacaggctcgccgcggtcacgaaccggaccgggtttaccggcacatgcagttcggccatcgcttcggactccctcggaacgagatgtggatcatgttcacatcgaatactgttcgacatcatactatt

SEQ ID NO: 70218 - DNA, 453 bp, Arabidopsis thaliana landsberg
  unsure (1)..(453): unsure at all n locations
agggccatgcccacagaacaatcctttttatcaagttcagaagatcccatttgtttctctggacttggttgttggtacaggaatgggtttcaagtattcatctttctattcctattgtttgatttttagagttatatgcaccatatcttgtttagtccaaagaaagcgataacctaagaacttttctttttgttgctccattgtttcttacattttaatcataagcctcagaagtggatcttcccatgttttaaacttcttgatttgacaagaaatcttcaaagctcagaagctctgtaattgggtttcatttgcctctcctaactccacacatttgcaaaaaaatgcaggtgtacaatgtgaccaagtttcttgaagannnnnnnnnnnnnnnnnnnnnnnnnnnnnnnnnnnnnnnntctgtataaacacatctatcaccatgctcccggc

SEQ ID NO: 70219 - DNA, 981 bp, Arabidopsis thaliana landsberg
agttttggcttatataacagctctaagaagctctgcaatcatccaaaggtaaaactgttcgccttttccatttgcgtacaagtttttccaatattttcttctgagtcatctttgaaacatcttacggcgctattatcaagttctgatattaagacgctagcttcataaattctagtggtctttgatctatttgatcggcaaaacctttttcatcattccccatgtatgcttaatgatagccctattcttttctgtgtagctaatctacgacacaataaaaagcggcaatcctggaactgttgggtttgagaattgcttagagttcttccctgcagaaatgttctctgggaggtaggcttctattgcatgtttgcatgttgtcactagttgggatctaaatggaactatcctttcagatctggagcatggacagggggtgatggtgcctgggtcgagctctctgggaaaatgcatgttctctccagacttttggccaacctacgtcgaaaaactgatgaccgcatagtccttgtatcaaactacacacaggtatgctggaaaatgtcaattcgagttggatataaagttacttttatatttatttgaaagggacagtgcataatattggtcatagagaatgaagtatgaaatgcctccacatggattttgaatagattcagctgctggtcgtcattagtgatgttactactgtcctaaatttcaattatggatgttgcaatctcttttgaattttgaattagtcataagctatgtgttatgctgtcctgagttttatgagccatcatatttttggaacttttgcatgtgatatcggagaagctaagaaaatcgtcaccgtaatttgtctatatgtattcaaaaggcaacgctttctaccaaatatcaagaagtgaactctgcatgttgtttgattgcataaaatgacatgatggtgtgttgcatatatatagccatttaaaa

SEQ ID NO: 70220 - DNA, 163 bp, Arabidopsis thaliana landsberg
  unsure (1)..(163): unsure at all n locations
agagaagcagagcagggcgagaaacaaaggagaagaggcacgngagancangcaaactaagagccnggggggccgacacaaacggaccgcagcacgagaagaagacgaagcgagccgagccagagccggaacagngacacccacaaacagggccccaaaagca

SEQ ID NO: 70221 - DNA, 551 bp, Arabidopsis thaliana landsberg
  unsure (1)..(551): unsure at all n locations
caaccaaacaagnattttttcctttttccgcccaccacagagcaccgccaaagggacaactgtgcaaatgaaaaaaaaaatacgtaagaaattttaagtcaaagtgtctcaactagatctaaaatctgccaaaagtcaatgaattcattctgaaagaaaacaccagccacccaaaatgttcttaagtataaagataagcccttcaatgtatatatacaagacttaatttgaatgaaataacaatttaattaacaagtatatatatattctctaacatatatagatccattaactaatgtatatatgttcaaaaatataaaaaggtttcctttatttgggtacctttgttttggaaccaaaatttgacctgaagaggttccaaattcaattcaccggtttacctggtttcctttgcttggcaacctgggtgaggacccctctttgaaaaacctatttaacaaccaaaacaaaaaaattgtcacaaaacaccaccagaaaattgaagtaagtgagtaaggtaaacacatacgcttccatctcctggatctgaa

SEQ ID NO: 70222 - DNA, 405 bp, Arabidopsis thaliana landsberg
  unsure (1)..(405): unsure at all n locations
cggcccattacatttcttctctgttttccaggttctctttatgtttccctgtctgtatgcggaggagaagggctggcttcatagacagagtcatcattctgtggtggatatgatgattctgacttagactcggtgtcattctctgcttgagtttcccactccgagccagagcttgaccctgtttccccagagtattcttgactagttgaaacttcttcgtcttccgactcagaacctgtcgcagacggtgtttggtcagcttctgtttcagannnnnnnnnnnnnnnnnnnnnnntttcttgatccatcaaagtaggtttcataatcggcatcttttgtgacgctctattactttgatttggcttcttgaaaccactcacagcacgaggcggtaatggctgcggt

SEQ ID NO: 70223 - DNA, 344 bp, Arabidopsis thaliana landsberg
  unsure (1)..(344): unsure at all n locations
aagcaaagcgcacaaggggggccccagaggaagcnacgcaacgccccaccacaacacaatgctcgaacaggatttcaccatctaacaggacaaccgaaaaccaaaccaagcagacacaaagacgtaccactccagagactaccgaaccaggcacagccgggaagatcagcggaccgtgccctacaaaaacacaaggatataaggccaaaaaagaaaaccggcgggcccaagccatagaggcccatgagagtacaactaagacgccggtcgaccctgaccataaggcagaccatcgacaaccgacaggggaccaccactcgatctctcccccaaaagaaccgaaa

SEQ ID NO: 70224 - DNA, 252 bp, Arabidopsis thaliana landsberg
catcttagaaaatcacagctaaccattttgtcttgattttattgatcttgctccatcgtgttatttttgacatgtgacaacttcgatgccccattctggaatcttgtggagcttcaactaaccaaatagcatcatacgaaaatcttcgtgtaatccaatggaactaaaaatctagttaacttccttcttaagaagaagcttacaggcacaacggcatgatcaagccgcgggagcctccttgtttaattggag

SEQ ID NO: 70225 - DNA, 259 bp, Arabidopsis thaliana landsberg
ccagaaacacaaaaattgacttgcaagaaagaaacaagacatattaacctgactctaatgggttctgcaaccagtttccgtggcaggagctgggggaggagcatgtttagcatcacgggcacgtccttgttgatattccgttgtcgaagtcgggacagttgctttaggagcttccagacggatgcatgggaattacgggcaatcagcaggcgagggagctgacccctcttttgctgggacctaccagacagcatagatt

SEQ ID NO: 70226 - DNA, 631 bp, Arabidopsis thaliana landsberg
gactccccctgtaatatatttaccacaaggattgcatttcacattggttttttgatatatagcacagcacaaaccggccattattaaagtaagagctacctgtcaaacattggctcatcctactgatattgttatgtttatgcaggtatgttgtgtgtgcaaacgcgaggtttattaatatattaatgctcattctcatcggacaataatgatcaattaacagttaatgtaatttggttatggaaacgtgagtttccatagagttttcgtttggacataatgattaattaacagttaatgtaatgtaacggatttaatttcgcagtatttagtttctttatattgtattaaataaattataatggttttatcgtgtttaaaaactaaatacaaccaaaaagaaacgtgagtttccatcgggtttctaaacagaaaaatcttaaaaaaacgtttttgaatgctattatcgagttttcgagagtttccctttccccaaaagtttcccaaatgggaaacgcactgcgggaagaagttccatgcaacaaagattggatgaattaaacttggctgaatttaagttactcttctattggatttaataaattatacacctatcacaattctgaataat

SEQ ID NO: 70227 - DNA, 572 bp, Arabidopsis thaliana landsberg
  unsure (1)..(572): unsure at all n locations
cacaccttcctgatgaacaacacagagatgaagctgcattcattcagtgcactgactttggccaggaactccgggttctttaatgagatgctggcaagcaagaagcaatcttggattttctggataaaggaacaagacatccttcctgtgttacagcccctgtcctcaccatttttttggaaccaaagagccaccatctctgatattactgtggagctcttgtcacagcccttcaatatgcaaaaattatcatccagaccagagcaccatccatcctgggtatccagactcatctccacatctccagagcagagtatggcttcttctatcatatgctgaaggaggccacaaagcccccacatcagttttctcttgatgctactnnnnnnnnnnnnnnnnnnnnnnnnnnnnnnnnntatttgccaatgtggtccagcatggcatcaagtccagccagtggtgaggtagtttannnnnnnnnnnnnnnnnnnnaactggctcacaattatgagggtgaagaagtggacccatttcccaagagcacagagcagcccacactcatctcttactac

SEQ ID NO: 70228 - DNA, 347 bp, Arabidopsis thaliana landsberg
taaagctgatttcccaatttttatcccctcgttttaaatctctatattgaagtgtatctttgtcaaaatggtggcgagccaagttcttgaggatattattgtttaagagcagcaagtatatctttatttgtcgagaagatcctttgcaagcttcttgaatggactgctttggtattttttaaaattgcagtatccaactttgccttgcaggggcatctgcttgtgggagaggctgtgattcattccacttaaatcatgggataatggaggctggttactcgaatcatcaaagtgcttcagtttcaggattggatgtcgatgaacggatgctatctattttcatgaca

SEQ ID NO: 70229 - DNA, 2532 bp, Arabidopsis thaliana landsberg
cctaagacactgaaccctttaatactggacgatcatttcccagccgagggcgcgagcacctcgggacgctgatcaactagctgccccatctgcactatcgcctccccacaagtccgcgcttcttaatcagctgcagaataataagcagagcatgctttctcctatcaagacaaatctaatgtcttctccaaagaatgtggagcaacattctcttctgcagcaagcctcgtcaccccgaggcggagagcctatttccccaatgaatgctcgaatgaaacagcagctacattcacgcagcctaagctcccgtgattttggatctagtctgccccgtgatttaatgccgactgattctggttcgccattaagtccatggtcaagttgggaccagacccatggaagcaaggtggattggtcagtccaatcagatgagttaggtcggttgagaaaatctcattccttggctaataacccaaacagggaagcagatgtttcatgggctcagcagatgttaaaagactcttcatcacctaggaacggaaaccgtgttgtgaacatgaatggtgcaaggccattgactcaaggtggttcgagtgtgaatcctcacaacagtgacactcgtgagagcgacattcttgatgcgtggcttgaacagctgcacctagatcgctgagcctcagctgcgagagagaggttcacatttctgtgaagctgtgaaactgatgattcgtttatttattattcaagaaagcaaacggaaacaaaagcaaactccgggtaagcttttttcgattctaataaccctaaaaggctcagttttttcaggcttctttctgaaatttctttactttcttatttttatcacctcattaaattaattattgtatcatctctgttgtaacaatggccaaagtgcgcctctattacttcccggatttctgatttacattttttgtatcctctcagtttgtcaattgtttctaatatctccttcatatttgtcaaagaacactgtatgagaaataataacatattgtttcagctaataagattcattcatttccgattgctttctctgctttcctgttttttccactaaactttaaccagcgattcatagactaatagacattaatctctcaactaacacgtttatggaagttgagtaactatcaagtaaagtggtggtctcactttgaaacagtaaagttagaaatcaaacaaaattgacgcaagttaagattgcttacacttcaaaatgtgtgtgagtgagaataaaaattgcagaaaaactctgctcaatccttataaccctgatttcaatccttctcaaatctgaatctcaaagccgttctaagagattatatatataagtaaggaaaagaatgggaagattggtgtatggtggtcctcaccacaagccaatgaacttccaccaggcaccacctacaccaagccagatgagaatgttgactattgaaatcaggaatccatagccccaccatttagccagcggcacgtagttagctccgtagaagataggcgcagacccgataccataatgggtcaatcctcccatcaggttggaaaggaacgcatgtatctcaaggctgcaaagtaaggtggagtgcctagagcggttgaaaccgataaaaaggcagtgaacatagcaccaatgtgggcagctccactagcaaagaagtagtgagtgtagaaatacaagaggacgaggattccaaaagatagctgccatgacaaacccaatcctcccacaaactgcaatcaaaacccaaacaatgtcaaaacatttcattagcatgctaagtcattaggcttattaagcattcatcaaatcatttaacaaaccttgactacggtctggctgaaccactcaatgagaccatatttgttaagataaccagccatcgcaatgagagcagcgaaccaggtgagtgtgtcccatgcgaccgactcagctaagcactctttccatgtcacaacacctgtcacaagaaggactgataatccaagaatggctgcagtcacagcatctacacccaacttagctccaaagatccagagaccaacctgtgtcaaggagaacacttttttagaaaaggaaaaccttctctgtaataaaacaccaaaaccacaaacattttcactcaaagcaaatgcattaaacagaagcaaagccctagcttaatctaaggagctacaatagctaaaatctctcaatgttcaatactgaagcacctttcaaatcaagctctcaccataagtaagaacagagccgatgaagcagaagcacacttaccgtgaggaataaagtggcagccataatcaattcgttcttagacataggtcccatcttgtcaagcttttcctgagccagcttaggagcatcaggactgctcttcaccgtaggaggatagatgagatacaaaagaaacggaacaacaatcaaagacacaagtcctggtacaatcgcagctttagcccaatcagtccatccaatcgtctgcttactcg

SEQ ID NO: 70230 - DNA, 326 bp, Arabidopsis thaliana landsberg
  unsure (1)..(326): unsure at all n locations
tctcattcattctacacactgcgatgttacctcctcgtttttctgtgatctcttaccccagattctctaggaatcggtctcctcgatacagaagaagctctcacacaagttctatttcgctctctctctgtnnnnnnnnnnnnnnnnnnnnnnnnnnnnnnnnnnnnnnnnnnnnnnnnnnnnnnnnnnnnnnnnnnnnnnnnnnnnnnnnnnnnnnnnnnnnnnnnnnnnnnnnnnnnnnnnnnnnnnnnnnnnnnnnnnnnnnnnnnnnnnnnnnnnnnnnnnnnnnnnnnnnnnnnnnnnnnnnnnnnnnnnnnnnnnnnnnn

SEQ ID NO: 70231 - DNA, 255 bp, Arabidopsis thaliana landsberg
gagtatatcataatttccttcgttaaagataataattttactgtaaattacgtattttttcttctttggtttagaggcaatgtgtattcatatctggaaattatctgaatgttattacctgaaaattatttttccatcaaattagtattttttcttcttttatttaaatcaatgtattcatatatttggtcaatatttctattagtcagagtatgtatactgggtaaaaacacttcttgttcataataatcccta

SEQ ID NO: 70232 - DNA, 364 bp, Arabidopsis thaliana landsberg
attatgatggggaggggaaacactatgacctggcggatttctgactggccatcgactcggtgtcgtagaggccgattcgtagatctttctaggcggtgttcgttgttctggctgtgtactgtgggcgagattcgggatgcgatgatggagacaatagaccctagtggggttactgatagaacatatacgtgtgcagctcacgattgaccaattcatactgtatttgctattcgcctgcttgatatacggagacaccgcagataaaaatgttgcgatctctaccttatttgatttcaagatcgtgctcgggtgaggactcgcatcctcacactttgcggcgcgagaggttgagtctatcgcgtgt

SEQ ID NO: 70233 - DNA, 461 bp, Arabidopsis thaliana landsberg
tctactacatgcaatattagaatgagtttgaacaaagatacccatccaccttatctaattattcatcagcactggatccttagttatttattccggtaaacgctgaataatatccaacccaaaaataaataaatagaaatttgcgttcgatgtgtgtggtccgcggatataggtcgccactcgaattattaatgcatgatatggatttgtatgactgacaaatttttggaaacttcactgtcaggtacgtgtgtactatatatgaccacaaaagtgcattttatcatatatattagtaaactaactgtaggtaatttttttattttaaaaagtgtacgcaataatgaaaattgaaaaaatgagagtgttatgctgcaaaaaaacattatagtaactggagtatcattgcatctgcaatcaacaaaggcttaattacgaaaataagctggctgtatgactcc

SEQ ID NO: 70234 - DNA, 567 bp, Arabidopsis thaliana landsberg
aacatataacaataatatgggggttccttaacatttggaatatttgttgcgatataaagaggttgtatgactgaataacaaaacacattaaaaacaggaaacaaaagcagtattttaaaaacaaggcttggcaagggtggtttgttgtggtgaggatgatggtggtgagaggcaaccttttgaaaggatacataatggccaatatagacaaaattattcattatcgctagttaccatggaaatgaaacttaaagccacatcgagatacttcttactgtccaaaataccatttactggctaaaatgagaaaaactgattacagaaatttacaaggttgttaggaaattcaagtagggaattggaactttgtcctcagtttcaaaggatgtttggatgtttctgatacaaaccacataccttgtaactcaatattatctataatgaacaatcctactccttcatatttacacaggaaaatgaaagctgtgtctataaaaatatgcctatttagagctggaaagatggatcagtagttataagcattgactgtactttagaggtatttag

SEQ ID NO: 70235 - DNA, 512 bp, Arabidopsis thaliana landsberg
aacatgatgaaattgccccagggtttcagtccggtgagtcattatgttgtgaaaacggtagtatgtctgctgctgggacgatccgccacgcccaatacagaaggagacaacccatgtcgttcatatgcatgcgcacgaaccgtgtcgcctgggccctggcccatatccttgtcggcgcttcgttggccgcggcatcccaggccgccagcgcgctttccaaggatgcgcgggaatgcagggcggccggcggcgccctgctcgtcggccaggtggtgtccgcgccgaaattcaggcacggcatgtacaagaagggcgtcgagctgtcgcacacgcacctgaaactgcagggcagcgacggaaatacctacgatgtcgccatagacaacgtctttgcttcgggctatcagccgcattccaggaaagtgccggagccgtagaatgccattcgggtgggagaccggctcgaagcctgcggcattcccttcagggcgggattactgggccacataact

SEQ ID NO: 70236 - DNA, 613 bp, Arabidopsis thaliana landsberg
gggaatgcctgcgttatgctagtgttgggatcaagcagattagtcattatcttctcagatattagcatctttcagttgatcaggaattaaaaagttttgctcagtctttggggggtcagaaaatgcacgtgacataactctgaatccaaataggatctttttctgaatctcaggagcatcagcagtctgcattgagacagaatataaggttctagatagtgaaacttaaaagggaaaaattccaaccaaaaaatttttaaaagaaaaattcttcaactatctttggtcgaacctgttgtgtctgcttgattgacaaatatctttgcatttcttgttgtatcctaaaggtcaaaacaattctccacaataaatcttcagtatcgaaaagacagcatgacaacgatccttcaaaataatttaagtgcaataaaaaaagtcatcaaatacacctttgtctttgctccagtatcttctcaaaagctttggtctccactttgtcaaacccggaaaagatttgtatccaatgcttaactttatctcttactgagaaatcactaggaaacagcgaactgcatagaatatactcaattgtatctgacctgcaacacatata

SEQ ID NO: 70237 - DNA, 487 bp, Arabidopsis thaliana landsberg
  unsure (1)..(487): unsure at all n locations
gtcccagagagaatgtgcagaagtttgctgttgtggcgactttattttcattcgatgagccagaagcatacgcgcgggccaggtaattactgttataaggactctcggcacgtccccagactccgcgttgcataccaccatatgccatggctggcatgttggtccgcccgaggaggaccgcgccagcatcccggaggatctgcacgcatgccgcgtcttcatttgcaatgagattctcaaaggcgggcgatccgttggcgattgtcatgcctttgactttgatattgtctttcactagatagggaatgccttccaccgatcgctgcggtaatcctgcggcacgtctggcatctgatgcggcagcttcatcaaaaacggactgattgagaattggaatagcactgagtttttntccgttggcatcatagacactgatacgtcgcagaaagcgcgagaccagtcaaccgctgtaagccatccagatgag

SEQ ID NO: 70238 - DNA, 522 bp, Arabidopsis thaliana landsberg
  unsure (1)..(522): unsure at all n locations
gccgagaaaatggcttcttcttcttaaatccttttctttttatctgcctccgtattgaaatgtgagggggtcgaaggagaagatgatgcaatacaagcagaagatcgtcgacgcagtgtaaccgatagagcttactggagaagacggatacacagtatctgcgccgtacggaggaatcctgacgaagctcttcggattctagacggactctgcctccgtgggtatcgtcctgattcgcttaacctcagcagtgtgatccactctctttgnnnnnnnnnnnnnnnnnnnnnnnnnnnnnnnnnnnntttactcttcctcgcttcaggttttatcccagacgagcgaacctgcaacgttatcatcgcaagattgttatattcgagatctccggtgagtacgttgggagttatacaccgtttgatcggtttcaagaaggaagttgtgccatctgtgacgaattacaaccgtttgatgaatcagttgtgtacgatctatagagtaatcgaagcgcataagctagta

SEQ ID NO: 70239 - DNA, 255 bp, Arabidopsis thaliana landsberg
aggcgccgacggctcaatccaaatcaatgtttctttcgaattgttacgatctgccaagtgccttgttctcaacgtattagcgaatttcgaaactgcaaaggcccggatttctccgagcctcgcgaattttccaacgtgtggactcgatgcctcagttgttctggcgccgcaggaaggcggggatgtcgaattccttcgattcctgggcttcgggctgtaccggaacctgatggccctggtcgtccagattgcccc

SEQ ID NO: 70240 - DNA, 741 bp, Arabidopsis thaliana landsberg
cgctgtgtcctgtagaattacgaccggcgtaaatagtgtttacctttagtagggtactaaatttatatgctctggacagtctacaaaccactcaagggtcgtatgggacactaacaccatcgtactggggtcgcataaacaatgaggctggccgtaggctgcaagaccaccttatgcaccccatgcatgcatgactctgtaagattgttcgtacactttccgcttgcaggttgataaccatttgcgtcaatgcttgtatatatgatatgctgtccataaactgttatgctcgtcctggttgcaggatcttgtaactttgcagtgactatttgctggcaataagtgatgatagatgtaagagtgcatgggcagacaagctgaaacatatgccatggctgcaagtgcatatttatgattacaggtgcataaatgaaatgaccattgaatcaactaccattgcagcatgcaagcaatcgtgggttctaacatttttaaatactgcgcaagattttgcaacacctgcaacccatagtatatggggtatataggaacaaatacttgctgaattaacagcaacaactgcataggggtcaaattggtcgtatgggtggtgaaaacggtttctgaaccatttgaaaccatttgtccaaaataatgaatgcacagtccctctactaaatttcaaaaatgttcacttacattgaggtgccaacaccattgacgacccaacagtattcacca

SEQ ID NO: 70241 - DNA, 459 bp, Arabidopsis thaliana landsberg
aagatagtgtttatgttaaagttttgaataagagatttcaattagagaattcctcaatgtttattgtttatttaatagtatggtccattatgaaacttaaactactgtggatgattgatctattgcccaaaaatataactgaaatgcatcttaattaataagtaatcaaaggatctcacgaatgggaatacgactaatattatatatatacgtacatcatagaaacatgtaaaatttcgaatatagaacctaaaagctaaacgttgatactataccaaacacacctttggaaatgaggcaaatatatactagtaaaatgtatgtggacacgaattttcctgaaagtgaaaaagaaagctatagattgataaaagatacagttcaagagaaatattctgaacagaccatttcacgcttgattaattactgaatttaattcatgttttcacacagttttct

SEQ ID NO: 70242 - DNA, 478 bp, Arabidopsis thaliana landsberg
  unsure (1)..(478): unsure at all n locations
gacccacaagcttaagaactctcgtatagttgttaagccttgcgaggatgctgaagggttaataatcgtctanaacacaagagtggtaggtgacggagcctcttcaattatttggacggcttagatataacttgactgtatcatgggctcgaagatcacgataagattcaccgtatcgactatcgttgttgttattgcactccggggtatgatttgacctcagtacccctttaccttaccgtacggtacttaacggacggatggacttttttcgatttacgtaattaattatttctataactcattggaccatggagattaatctaattatttatacaaatctaattttgaccgtttgatttgatttttttttttttggtcttaacaacgtattaatagaacggtttgaattcttgtagtactactactgacacaccgacaattttatcataaaacaaactactacccactaatctta

SEQ ID NO: 70243 - DNA, 484 bp, Arabidopsis thaliana landsberg
  unsure (1)..(484): unsure at all n locations
gattgatcaattttatttaaaacatatccatcgtttctattatactgtatcgaatttgatgcataaaccttatccccgattcttttggctttcggtacttcatagatcagctcataagaatcagttgaagggaactggccaaaacaatccctgcctaaaaaaaacaacacaataattgttattgatctcatttcaatttctaatgtttagcctgtttctccaattgtgttatccactctttcgtatttttaggaagccagcctctgtgaccaacaacgtttttgaatcctccctttttaaacacatcaaatacagaagtctgatctttataactaatattggcatcagnctgggaatgggtataaacttggtgatcctggtttacccgaatctacattttccgatttagaatattcttcgggtggcgctccctttcaatctggagcattcccttcttcattaaaaactcccgtattgttaaaac

SEQ ID NO: 70244 - DNA, 733 bp, Arabidopsis thaliana landsberg
ccgcgtaatcggattgggcctcggtgatgtttgcaaccaccacctgaaccggtgcaagccaaagtggcatgttgccggcgtggttttcaatcaaaatgccgatgaaacgctccatggaaccaacaatggccctgtgaagcatcacaggcactttgcgctcgttgttttcggcgacgtattcagcacccaaacggccaggcaacatgaagtccacctgaattgtgccgcactgccatgaacggccaatgctgtctttcatgtggtactcaattttggggccataaaaagcaccctcgcctggcaactcttcccactgcacgccacatgcagtcaaagcgtcacgcaaagaagcctcagccttgtcccaaacgtcgtcggtgcctaggcgcaccgcagggcgcagggccagcttcacggcaatgtcggtaaagccaaaatcggcgtacacgcgcatggcgtcctggttgaagcgagtcacctctgccttcacctgttcttcagtgcagaaaatgtggccatcgtcttgggtaaagcctcggacccgcatgatgccgtgcaaagcgcctgagctttcgttgcgatgacacgcgccaaattcaccgtagcgcaggggcagatcgcgataagaccgaaggtctgattttgaacacttcaatgtgacccgggcagttcatgggtttcagcgcgtaatcgcgctttttcgactcggtcgtgaacatgttttcacggtaag

SEQ ID NO: 70245 - DNA, 747 bp, Arabidopsis thaliana landsberg
ctgcatgtttcgttcgttgggttttcaaacgaaattgctccctcagcccagggcagttgtcgctgtggtatttcagtttgtgttctgtcagtctgttgatcgcatttggtttttggattgcaggctattgggtagtactcccctttgccggttttgagttgctcgtggtgggcgcagcctttctgctgtacgcgcgccacgcggctgactatgaaatgatcgagctaagccggactgaactccggctggttctggcagagggcagcaagcttacagagacatgttttgtgcctcagtgggccagggtgcgatacgatggcaggtacaaggcaccactggtgttgagtcagcgagacaagcaggtctttctcggaaagttcatcaacgagcaagacaaacctttgctgcacaaggaattgcgtgtggcactggctcaggcggcgcactaagtgagaccaccaagtgcgttgttgaacaatataattattttaaatagaggatcgccatgttgaagacgtccttgggtcaacgtcaaattgcggcagctaccttggccgcagcgttaaccacctttggaggagttgccactgcggcagaaggggggcctcagcctcttcagctgaatcttgcgccacccgtgaccgagattgcacgccaaatctatgacctgcattcgatgatgttgatcatctgcctggttatttttgtggcggtgtttggcgtcatgttctattccatctttgccca

SEQ ID NO: 70246 - DNA, 588 bp, Arabidopsis thaliana landsberg
  unsure (1)..(588): unsure at all n locations
ggatttcctcgcctcgggcggcaccccgcttccgggctggaagttcgacacgaccggcgctgacgatgcgcttgtcaagatcgccaagcgctaaggagggcggggcaaatgaacgctatcacgaatttctacgacgccgccgcagggcgcatcaccgatcccgcgatgttcatggtggccgacgccgcccttgaagcgccaggtgatgtcgctctggacggcggatcacgcgcgtctcgccaagaccttcgaggacaaggtggatgcgttcctgagcgacgcgcaggtcggcatggccttcctgacgccgcagctttatcgcatcgagaccgaagtctacatgaaccggtatccgagcttcgatatctcgcgcttcttctcggtcgatacgaccggggacatgtgggatatcggcacgctggtctattccatggaccaggtcggggaggccgcgttcatgcacggcggggcgttcgatatgccctacgcttcgaccaagatggcgcaggccacccgcaacttccacctggccgcgatcggntacgaatggaacacgcagganatggcagcgcgccgccagctcggtcg

SEQ ID NO: 70247 - DNA, 502 bp, Arabidopsis thaliana landsberg
ggacatcccgcgcatcatggcacaggtcgagctatcccgctataactcgcgcgcggaattcaatattggcttccatggcatcggcctcgccatcgaccatgcggcggatatcgttgatcagcaccagcttggcggtgccgccggggacggcgaggcgggcgcggtagaggctgtccattatgaccgcggcgcagcggctcatatgatcctcggcctcctcgatcacagtcgttccgctcttgcgagcgtcggcgcggatgtagatcggcaagcggatgtcacggcgcttacgatgccccgtgagcggacccgagatcgcagtaccaggccttgcaaacggcttagtcgggctcgccggagccttccggtaaagttgcgtcgccgggatcaccgccgtcaccgtcgggtccgctttagatgcgtcagcgccgccttctttagctcgagcacgagatcacggggtttcttcttcagtgcgccggcagcacgcgcggcgcgttcg

SEQ ID NO: 70248 - DNA, 321 bp, Arabidopsis thaliana landsberg
gcccatttcatcatctatgaaatagcgaaaaaagtacatcagaatgtaagaacagatcataactcaaatcaacaatcacaaaacaaacctctgaagataagcaatacagttttccagttcctcctatacatccaatgagaagaaaacaaaatcatttatgtgctaaaaagataacaaaaatagaagatgataaaggaaaagatcaacaagtagttgagccgaagaacctaagaagtagaaaagcttcaaacttagaagacctttttttcactaagatagtttaaaacactaataatcagctcgtagaaatttctcgtactc

SEQ ID NO: 70249 - DNA, 568 bp, Arabidopsis thaliana landsberg
cttaacagttcttattccatatttccatcttccacctgctatactatttaaataaacgataaatcattttataatatcttggtattatttctttattatatatcatttttctccattgccactgtgttgcatccaatcactctaattcatttcataatgactttttctcttttttttttgcactaaaaaaaagtctattcatttttttctctaaatgttagcttgctcgatgtcaattattttcaatatacataataaattttttgaaaatttttattttcatgaattttctttccaatcaagaattatatcttttttctttttgtgaaagctatatatttgcacgttaaccctaattgtatgattgtacggtcatgagatgtcattttttgtttgtttgttgatgcttttatgattttatccatttattagaccactcagccaacttacgcacaactagatttatttccaaaatacgtacacccaacacttttacatgttttcaaaatttaattcgaggtttactcaatgcatgttgttaattaaatgaagactagctcatcactca

SEQ ID NO: 70250 - DNA, 466 bp, Arabidopsis thaliana landsberg
cgcgctgggtcttctcggcgcgctgctgccagtggacggcttggtcgttcggcgagtgcacccagaggaggcgcgagcggttgttgaccgcgagcagccgagggcggttggccttggggaggatgtactggagggtgtagagttcgtcgtcctgcgggagggccttgagctcgaattcggggaacaggcgtttcgcgagctcgcggacgtagacgttgaacgattcggcgttcgtgtcggcctgggtgaagagcatgccgccgctgtcgacgaacgcgcggatcttcgcgacgtcgcggtcggagagcttgaggccggcgtgggaggcgaggtagaggatgtgggcgtcggaccagtcgtcggcctcgcggtcgatcgagacgacctgccagttgaccgggcgctcgagctcgcgggaggcgaagcgggcgatgttggccaggtcgcggggcggttgtttcactcg

SEQ ID NO: 70251 - DNA, 339 bp, Arabidopsis thaliana landsberg
aattaaaaaacccaacaccccacacccatatcgtaacaaaataaacacttcatattaacacaaaatacatataattccttttcttgaacaacaaacttacggaaaatgaataaaaaaaaaactctaaaaaagagaaaaaattcttctccatgtcctcccttattaaataccaaaaaagcacactcccataccaacttcattactgaaaaataaaaataacacagaacacaaacttaaaaataaaataaaaatccaagacaggaaaataaataactaaaatcactcaaataatttccacagctattctttacattaccattaccccattcatagacttac

SEQ ID NO: 70252 - DNA, 944 bp, Arabidopsis thaliana landsberg
ccacatacaacaacaacaacgacaacaaagaagagttcaacaacaacaacaagaacgatgaaaaagtcaacagcaagacggtctccactgcaagcctgagcgagaccgaagagtctttcaacaactacgaggaaaattacccgaagaagacagagaactacggcactaacggttataacaatgaggagttcaacaacaacaacaacaagtacgatgcaaacttcaaggaagagttcaacaacaacaagtacgatgaaaattacgccaaggaagagttcaacaacaacaacaacaactacaactacaagtacgatgaaaacgttaaggaagagtctttccccgagaacaatgaagacaacaagaaaaacgtctacaactctaacgcttacgggacagagttagaacgtgaaacaccgtacaaaggttacagccacaacttggagagacaaggcatgagtgacacaaggttcatggagaaaggtagctactactacgacctttacaacgacagaaaccacggccattactaccggaagtcacacagtaaaagccccgccggttactattcttctcccgcgaccgagactaactacgaacagcaatcgtactcgtacggaaacaacaacgaggagaacagttttaaggatccgtacaactccaagtgggagaagaacttgatgaacgaacagcctgaagagtttgttgaagagcaaggcactaatcagttcaagccttgatgaagattgttatttgatttcctctcaagactactacactcttaaaagtacttttcttttatttcaactaagttatattacttatcgttgtttagtcaaactaaatcgttgttatcattgcaaaaacttaaaagtgaaaacaaaaacaaaaaagagaaaggagtttttttttttttttagttaatcggtgggtttgcttttctatgg

SEQ ID NO: 70253 - DNA, 420 bp, Arabidopsis thaliana landsberg
  unsure (1)..(420): unsure at all n locations
cgcgctcgaggtcgccgtcgccctggagcaggccgccctgaaggagctgcgcgagcgccgccccgaccaccccatcgagaccaacgtcgagttctgggccgccgtcatcctcgacttcgccgaggtcccgccgcacatgatgccggccatgttcaccagtgcccgcaccgccggctggtcggcgcacatcatggagcagaagcgcgagtccaagctcgtccgcccgtcggcccagtacatcggccccggcccgcgcaagcccgaggacgtcgagggctggaccgagatcgcccacagctgacccccgcacggcggccccggccgcccacgccgtgaaggtggtctggctggatttcaccgnccgccaggccaccaacacgttgttccgggccggcggcccgcggcgggatcagggggtgg

SEQ ID NO: 70254 - DNA, 612 bp, Arabidopsis thaliana landsberg
ctcctcgatggtccaatcagctccttgacctcttttgcttttgcggtatgaagcggacactgtgcttcccaagtttaaatgtcttgatgcttccatcatctagagaaaccgacaatgtggatgtgtctccagaaacgtctgtcactgttcccttatgcctttaacagtaaatgtattattcattttagacatttagattaatggatgcaataagcaggccaaccacaagagctttattagttaagacgatcaaacttaccatgagttttgagatccatggacttcgactctctttcctattgaatctttacccaactttttcaaaatccagttagcatccatcatctcgtcgttccttgaattatcctgatgagaatgtgttgtagcttcaccgtcttctttcaatgaagccatgtccactaagcttgaaggtctctttctctttgatctttggccctttgcagaactcaatttttcatcttcagactgcgttgtaaccgaagatgtctgatctcctgaattaggtttcctgagtttaaatttcagcagaggtcttgcttctttctgtaatgctggtgagatggatgttttgtcatccacatgatttccttc

SEQ ID NO: 70255 - DNA, 753 bp, Arabidopsis thaliana landsberg
atagtatatcccgaaaaataaaataaaacaaaatttcactttttatttacgaaattcaagacataagtgtgaccaacaagggtgttaattccattcatgaacccgcatgttaagtataaatgtcatgacaacatgttagaactaaagttttaaaggttcaaaaaagattaggtctttcgagttagtccatcatgatggatgattttaaaccgctaaatccacactatcggcaggaaaacccgcaatcatgatattttaccatgttgcgaagaagattagatggagcaggctagttcgttttaacgatattaggtaccaactctatcataaagaagaatgaaaaaaatctaccttgaattagtttttggaggagtaggaccaccacatttgatcttacaatgttcaaagcaattttcatcgtactcgctacagctgcgagaacaatacctaaagcaacctatccaagtctttctatgtttatgtcgtgcttctcctcctattgcagcaatcatcaccaacaatattaccattatcacattcgattttgtcattttcttttttttttcaaaacattagtttttgcatttatcttacaggagcttttatctgcgtcacgttctatttataaattgtttagtacatttctatagaaagttagtttgctagtcaatttgaatcggtttactaacaaacttggatttgaatatgtcttaactgatttggaatttctatttagtttaacaaatgcaaaat

SEQ ID NO: 70256 - DNA, 3483 bp, Arabidopsis thaliana landsberg
accactatttcttttccgttaaaactcaatttacccaaaattaattttttttttaattaaaatgaaattttgtatatcgatacttatatgatcatttcttatttaattttcatttttgccaatatggaaaatgaattgtacggttttcattcttagattataatatttgttatcttttctatatatgaatgtacgattttttatatgcgaatgtattttaactaatcattgaacaaaagtatattatagaaaaataaaacatagatattgtgtcttttaatatatctaaataaagagaaagtcatttatacatgtatagttacttatttctcctaacccataatttttcttttggacaaactcctaaccgatagtttatacacgttttggtaggaactataaataggtcgagtcgtcgagaggttagccatctttcagatactaatctttggatttcctctttgttctatatcagtttggggaatggaaacttgttggggaaagcctgacattagatagaggcggtagtctcattgctaaaaacataacgtctgattatcggctgcaatcctatatggatactggccatttcttatggttaaatgttatgttctgcaatgagagagttttgtcctctatgtgagtatcaatttttttggcttgagagattcatagggagccttattttttgtactggccagagaaagcttgtatggtcgatttgtatgggtgaagttaagagtagtgtagcatctaactgtcttttgtataagtcggatcaataatggcaaaatgttagatgaatacagtagtccatgagtataggtttgctcgatatatatctcatttccatatacatactttacctacaatatctgtatcaacgttaacaaaactgaacttggacctcgattgctaaacagcccatcaattcttttggcccaaatattaatgtttattgctcccccccccccccaaaaaaaaaagattactgtcaattgtcaacaatgtccattgcctttcaattatcttatataatataactagatttcaattagcttatataatttttttgacagaaataatcttgattttcttagcctatcagttctatatcaaatctcaaaaatccttcattttgaatttgttgattctcggagatgaagaaatcaaatgggatacataaaactaacgattagttcctcttgaatttttttgagctaaaggaataatttttgaagagattagccttattacctaaattcatgggttaaataggcacacaatatactcacatagagcaaaaagttaaaaactcagaaattgtaaaccagaaaccaataatttccaaaaccgcggatagtttgttgggacttattttggacacatatcttcgaaccatttcatacacacaaaaggcattattgattataaacctcaaaaattgatggtcggccactgccgccacactttcaagaaaaatagcactaaattgttataagacttttttgtttgttttgtcaaataattatataaaccttaggtttatgaaaacgacaagagacacgcaaggaaggactaaaataaacagttaagcccatataaaaaaaagtaatgtagcaacccaaagttttgaattgatttttcactaacacaagcgatatcatgcggcggcgcgtggggtctctttggccaatttggtaaattcagttgcaccgcagaaacacatgcagaggttcgtcgtcatagcgaacatatgtttaaattcagattatacaactggtttattaggcctaaaacataaattttttgttaggttctaaatatttcttaaattataaaatttgtcgctaaactctttttgtctttctcttgctaaaagctacatgaggtcgattacaaatcgcttatgaaatacgataaaaagaagttgcaacgaaactgttagaatttgatcttttatgaaagcaatatgcataatgcatgatctttgtttagtcaatacatatgtctaagtgtctaacacatgtaacagttctatgactgttttatagtctcataaaactacacgattccggttctacatataaaacataaacataaaatcttcacaatctgcatgaaagttttgatttcgctacgtgagatctcctttagttaattaatttgacttcttatgatatttgattatatcaaacatgtttgtttcatttactactgaaatttgcgttattttaagacttctgtagataaatttgttatgtgaatttgatatttatctatataggaccgtcaaaatttttatttattttatatttttagatgcttctatatatatgtatacacgcataacatatatatgattggtaaacatgagcagaaaaattataggacaattaaacttcctctaattttatcagaaaacttttgttcgaattcatatgaaaattttcaaaataaataaaaaaatacaatttatttacaaactcaagactcataatacacatatcttgtccgtaagtgaataagccagtccaaactcacacgcttgctcagcatttacgtctctcattagtctctatctcttttgtttgtttccttcttttctcagtccgtcttttgtcgtgatttaagagagaggcgcgtgagtcaaacaggacactagcaaagcaaacagctgcacaagtcagtccgtacttcacgacacgccatagaatacgataagatttttaaaaccccctcgaaaccgacataagcgacggtcgtaacacgatccacaaacataattagatccacgttcagacgttgttaagtttttgtgttgctaattaagaagtttcttgttttttccgcaacatatggatctcacaacaacaatcgatctccgactcttacataacgaacaaaagaaggattaaattataaaaacaagtctactaactctaacaaaaagatactatttgctaaaaaaagaaactaaagtagttccaccgaaagtggtctcaaacggcgccgtatagaaaagtaggcaaaacggcgccgctatatccatctttatcgtttgttttcaaagccaaagcggcggaggctcgttgaggtcaatggctaagccacgtctcaccgtaacaggggaaggagaagaattcatcatcggaaacccaaccacttgataaccaggcgatgacgtggctgtgttaggcgaggaggtgaagtaaagcggcgcttctgtagaagagtaatctgaagttttgtcgtttagcacaccggttcggagaaaaatgcggtggtgttggtgatgatggtcggagcttggaggaacaggaggaggcgcagcgaaccagagctgttggtgttggtggggttggttatttgcggcggcggttgcggctgagggagcggaagggaggtggttgaggtcgagagagagaggagaagggaagcttgttttggctttgataccacagaggaaacgagcagtgcccc

SEQ ID NO: 70257 - DNA, 341 bp, Arabidopsis thaliana landsberg
  unsure (1)..(341): unsure at all n locations
ctgggtctcacctacttgacatactactcacctacgacggtcttgtttaaggcggtaccgatcaagggtacacagaacatagttccatcnnnnnnnnnnnnnnnnnnnnnnnnnnnnnnnnnnnnnnnnnnnnnnnnnnnnnnnnnnnnnnnnnnnnnnnnnnnnnnnnnnnnnnnnnnnnnnnnnnnnnnnnnnnnnnnnnnnnnnnnnnnnnnnnnnnnnnnnnnnnnnnnnnnnnnnnnnnnnnnnnnnnnnnnnnnnnnnnnnnnnnnnnnnnnnnnnnnnnnnnnnnnnnnnnnnnnnnnnnnnnnnnnngctattacgctactatacaattcgcc

SEQ ID NO: 70258 - DNA, 467 bp, Arabidopsis thaliana landsberg
actcttctttgtagctgcaacagccaatgctatcataatctctcttctgatttcacttgctgtttctgttggcttcttggcactcttgtttctgtgcttgactggtgttcacattggagccttatccgaagctggattggtcatatctactgctacagtatctgctgtcgtttctgccttaatagcttcaggttggatatatactctgctctgatactgatttggaatcttgtaatgagtgacactccaagctacttcctatatggattgaaaaatgaaaagaatccggtattggatcaggatggattggaaccatctatgcggtgaggttgggcacaagaggaagcctacgcttggctaagcagacagatacagtggtgggatcaaccatttgatgaaacactatcagacgacatccacaccaagaccgggagggaaacatccaatcaaccaaccgagaatccgtc

SEQ ID NO: 70259 - DNA, 549 bp, Arabidopsis thaliana landsberg
gtaaaatttcttccaaaaaaactttacaataaatggagtttttttttaagcgcttttaacatatgattatggaatgaaaaaattagaaactagcttctttcttgtcttgatacaagccaaaccgaaatacaaccttcgtatcttctatcccattgctttcgtatagaagatatcatgttccaaacttttgaatctagtcttcatactgtcctaaaagcttttacgtttgaaattaagttagaaaacacaatcaagtattacgagttttctaaactcaacgcaatcttaggtcttgaaaaatatacttttaggaattcactatcaacgtagttcagacagttacaaactaaagagaatacgaattctctaacttaatatatcttccattaatgaaaccaaagcttccctctcacctaaacgtctctcctaagaaacccaaacctcacacttaataatctccttaagaatatcctctagtcaaacattctattttctttcttattttaattgaaataaaaagatcagacaaaacttaaaagggaagggtga

SEQ ID NO: 70260 - DNA, 470 bp, Arabidopsis thaliana landsberg
  unsure (1)..(470): unsure at all n locations
gccccgcttgtttattattttgttcggttgatcgtttggtcaattaaaaactttgaactaaactagtccgtaggggccagttgggggacgcgtgagtatggcctacagattttttactgctgttcctcgatgtccattccaccacggcccatttcacggaacctttttttccattcggcacgttcctcttcgctcatacgnnnnnnnnnnnnnnnnnnnnnnnnnnnnnnnnnnnnnnnnnnnnnnnnnnnnnnnnnnnnnnnnnnnnnnnnnnnnnnnnnnnnnnnnnnnnnnnnnntccacgagaacatgcacaccagcatcatgaggccggccgtttgtccgaaagtgatccgcgtaccgtggaaaatttcatggatcaaccagttccacagcgactgggttgcccacaaatacaagctgatcataatggtgccgaagatcagcgcaccaaaaacccaaaatatctt

SEQ ID NO: 70261 - DNA, 2807 bp, Arabidopsis thaliana landsberg
gaaactaaaaatggaaccattagagggaaaggagaacatcatggctaacgttttgttggccaataaataaatgcggggagcgatcacgttgagtcacgataatggtggtgagaacaacgcctagtagctctagtagcatcggtgtgatgagagcatccgctggtcaggagacagttatgagtatgggggagtttaggtaagcaccaaaccccataatcacaagagcagctacaccaacattcaccaaaggtatgtcatatgtccgactctcttcttcacccattcctcttcctcctactgcaagaggaggatccatgtcgctcttcttctgtccttctttgactagtaatggaccggtttctggttccacgacttcagcattatcctttagatcgcctctatctttggctaaaccagcttcgtctatcttcttctgctccactctgtcttgaatctctccttcactaaccatgtctccaaccatctcattattctcatcctgcttgtttctcacgccatcatcaacatccagtttgattctttcatctccctctttcgtttttagcttaggctctgcttggtttctctgagcaacattcttctctattcttcttgcctcatcaccaacaactggttttgtaaatttatcttctttctttggtcccaagttaatccttcctccctccagcttctgacctatttcaccatcttcctttttctcaacaactttggcatgttccttggattccactctagcatctatggtcggcgttctgctaatctctttttccttcaccttctgtccagtcttaagctgacttatatcatcatctttctttctctcaattactttctcttcttttgcctgtaccttaggttttaagctaccaccaagggttggtgtacttttagcctcttcctccttcaatttatctcctatcttttgctgaactatgtgagcagcctcctttctctcaaccaccttctcttctttcgcacgttctcttccccctaagctagggattgcctctcgcgctttaactttcgcttcagacttctcttgactgcccgttggcactgctcttttaccctcaaccactgatttatacgttttgggtgcttcttcattcaacgttggagtggttttctcttgacttgttcccacttgtttctcctcctccaaagctttctttcgtcccaaggtactcccattaggaccaggccctccacttttctcctgattagacctctgtccaatcttctcctgatcttggactgctttctcctgtttgttagcttccacgattgctggaaactcgatggtcaagagtccatgtgagaaggaggtgctcaatttggtcatgtcacaggtatcagggacacggtaagcttcactgaaacgagccttagtctgagcagagagcggtcgctggccttgaatctggacagtccttgtcctctcatccttttttatttctatttgatccctataaaaccctgccggttccacacaataaacgagaaattcataaagtttgttatcaattaaagtttgatctcaagaaacaaaaagaaagaaagagagaagaaaaaagaccaggaagattaacgtagaggaaaatggaagatccggagttagtccattgagctctcggcttgaaactactcactgtcggagccagcggtggcggatgacggccacctcccggccttggtctcttgaaaatcgccgccatatatgtttatatatagatcacactatatcaggacaaaaagttcaaagcctttacgaaataaatgaatcaaactgtatatgaaaacataaaaaatgtttgaatgatgtatataagatagaaagagaggtaagaagagattttgagattacggtatgggtttaggattgctttagggtatggactttgtctgtttcttcatcccaaggtctcatatgtgtaaatagtttcttgtacttcaaggacagaagctcttaaggttttgaagaatatgcgtatcaacacaaagtgatgtcgttttatttgttatttccattttttttttgtttccattttaattaagctagtagccgatatatatattacgtggcattcaacatgtgaaattaaaagaatccctggacctaactaaccacatcacttcaccggataaaacctccaccgtcttcttccgccgcaatttctgtctccatggccggcgttaacctacagctccgtcacgcatactccatagctcaattcgttccaactgtttcttctcctcctcctcttcctactcagcgagttcgcctcgggacttcaccctctcgtgttctattatgcaatctccgagctaattccgccgccgctccaatcctgcgaactactcgccgttcagttattgtttcggcgtcttccgtatcctcagccgtcgattcggattcgttggtggaagatcgtgatgacgtggggaggatcccgttgcttgaagttagggatttgagagcagtgattgctgaatcgagacaagagatactgaaaggcgtcaatttggttgtctacgaaggagaggtgcgtattaatcaatgcaattttatggttaagacttgaaatttaatttgcagaaagctttgcctggtagtgctgtctcattatatgataaagttttgagtttgatatcataacttgtgaattctatttgtgtggatttgttttgcattgctgccgattgtaatccatagattcttttgtggttgctaataggttcacgcagtgatggggaagaacggttcaggaaagagcacgaattcgaag

SEQ ID NO: 70262 - DNA, 474 bp, Arabidopsis thaliana landsberg
tgagatccttgtccaattcataaactcagatgcacgtagcagtactaatgagagtcgaatgatctctgatacctatgaagaagtagatgaatcgaccagaatcaatgatgagtatcggcgaaaacccaaggctcatgcaagaaaagctcacgaccattcattggaacacgacctgcagctatgtcctcttgtcgattccttgctgcttcagcttgatcgggtaataactcagcattcttacaagtaaacaacaaacttaggttaatcaataatgatgattcttttgattaattttatgtaagattcattcatgaaaataaacagcgagggcttactaaagattatgcgtttgagtagagatatcaaatctagggatgttcaaatcgatatattcactaggaatcaacatgtcaaggagaaagagatagagagataccttttggcgcttccaagcgaggaacagatctttagaaa

SEQ ID NO: 70263 - DNA, 884 bp, Arabidopsis thaliana landsberg
actgaagagtggagattttcctcaacaggtacgtttcctacaccaaaatggctactatcatcttaaaacttccaaattctgtaatagctttactgatagaagtggaaaaaacaaagctaaaagctaattgtagtttgtttaattactttttcagcaagcaaccggagtgtttttgaagaattgcacattacactacgctgcatatagaaacattcatccgttgtgggcactcgcagaatatcgcgcgcgagtttcgttgccatgacgacacttttcataaacttttctttatatcagagaacatgtgaatttattaacctatcatcagtctattacaagaattcgtgtatgcgatatgtcaatgtttttagtcaatgttttctttttgtgtaccgtccattggaaggcatgtttcacatggtgaagatacagagatgcgtgatcgtctaaatttagactaggccatttgttacacttttttttttatgtttcttccaatttttcaacatgttgaacaaaagagtcaaaaccacacaaatgtgttattgtttctttatcttttttttgtgttatagaatctgaaattagattatcagccaaaaataaaacccttaaacaacaaccattagaaaaagaggaaattctccaacccattaatcttgcatctctacttcatttgcttcctccataaagaatctttgatcaatcaaactctattttttttttgtcaaatcaaagtgaagttttctcttttgcatcataaagactcaagagagggaagagatacttttcttccttttgttcaatacccataatctatatatagagaagaagagaatgtgaataccaaaagcaaatggggcaaagaaagaaacaggaagtgg

SEQ ID NO: 70264 - DNA, 485 bp, Arabidopsis thaliana landsberg
ggggggcttcatttccaacccccgcggttgaccggggcccgttcgaccctttcccggggggaggggggctcttcttttccctgccggggaacggccgggaaccggtttttttgggaccttccccggggcgtcaaacactcatctaaaaacgggcccggacaaggggaaccccactgtttatttaaaacaaacctttggaagggcccctggggacgccaccccattgggatttttgccccgggctttgaatgtcaaaggaaaaaatttcaccccggcccgggaaaacggggggagaaactttgccttttttaagggacccaagggcccttttatttaattaggccccccctttaatggattaacaattttccccctggccctttttcatttccaggaaacccccccccaggggaccggtcttggcaaaatccgggggaaaaaaaaccccttttgaccttgcctctttcccccctttggaaaatgac

SEQ ID NO: 70265 - DNA, 182 bp, Arabidopsis thaliana landsberg
ccaacaccaaagacgaacaaaacacaacaccgcacacacacgagccataaacacaccacccaggaaagcaaaaccgcaacccgccaaacaacacaagaccccagccacgccacccacacccccaacaccgccaaaacaagccaacgaccccaaacaaacgaccaaagagaagcaaccaccca

SEQ ID NO: 70266 - DNA, 353 bp, Arabidopsis thaliana landsberg
ttatctatttattagtttctacttgtttttactaataaatttatcattcgttaacacacttaccatttttatttcataatttatcggttaaagtggtcgtaatggattattcacaatgtaagaatgtactcccctaaaccgaaagtgaaacaaaatgtagctcagaccatctcatatgagtttagttcaggttcagtttttgtatataaaggtaatctcgattcaaagggtttaaaactcttaataaaatgtaagtctaaggttctatcgaaattcgtttttctaatatagaaacacttaaccgattaaaccaaaatatgatctgattaattttggttcaattcggttttggg

SEQ ID NO: 70267 - DNA, 251 bp, Arabidopsis thaliana landsberg
  unsure (1)..(251): unsure at all n locations
caagaaagaaccagcccacacacaccgccccagnnnnnacgaacccacaggcnagccaccacaacaaaaggancagccaccagccacaggagaaagagcaagaaaccaggcagccaaaagaccaaacagaagagggcagagaaaagaggcagaccacccaagacaacaaagagagcccaggacagaccagcacagaaacagggcacancacgcgaccacacaaagaaaccgaaaagaggaacagcacacag

SEQ ID NO: 70268 - DNA, 3042 bp, Arabidopsis thaliana landsberg
tctccatttgaaacgataacagaaaatcaaaatgggaagatcctttttttcaaaactatacaataagctgcatcgaatctgaaaactgcaaatggagattaaatgaaacacaacagaaatcagctacaaaaacaaattgatcaaaggaaacttctgaaattaaacctagacatttgaatactgtagaggtgactgaatatgaaaagctgcaatttgcataaaattgaactcaaattgaaacaagaagagcaactaaaaaccccggagaaacgctacttcagtgaagtacacaataagcgatacagattccaaaatctgaagaacacatcgccgaattagcctaccatggtatacgaaaaagatgaagaagaacgcacacacctaactatgctaacttgagatttggtctttaaggcgttggattgatttggcacgctggtccataaactctaaaagagcttttctatcatctgggatttgagtcgagaacgttctcgcttctgcttctacttctacttcttccccttgttcaattttaggtttattcatcgccgtcgtagccattgcagactcggttcgtcttcttcccacccttttattcccgcccgatcgtgcgtagtggggattgctttttccctctcgtcttttcaattttggaacctcatgtttttaacttttccggttttgccgcttcacttactagggcttatgtagtcgtgtgcagctcccgtgctctcattgacaaaaccagagtgtgtaaagtgtaaacacagattcgcaaaaattctttgtggaaaaaaaaaaaaaaaaaatcgcgtgtcctttttttttgtttatattaaaaaaaatcctatagtttattcgagtatagaggtctttgacggaagcacagtgatacatctcttaaacaaaacaacaaatacatgttcagttacattggtagctgtgattattgtactgaacataaaagagactgtgttctatgaactttttttttttttttttttgatcaaagttttctatgaacttaaaactctcatttcagcatacaacaaaatgaacaatttaagaaataaaatcaaagtatgtttgtataccaaatttggcatgcaaaaggtgaaaatctaaaacagtctagtcaagaaaacaggttggtagcttcatcattcagaaaatgtacacagaagcaatggaagtcagaaaagatgtcaagagtatggagacaaagttcacaccattgttgtcaagaatgtccacacctgaaatcttctttacggttggacccggtttccctacaacctgcaccatgcataaattcagtcaactactcttttccctcgatcctacatatgtatttacatgtatgttcttttagactttaccttgttccggacagagcagaaaccactgaattgaatggttgctcctagtatagaatcaataagactcccacatagtccagctagtgcagagagtggtatggctaagagttgctttagagctacatcacttgcacaactcgcggtaaagagtccgaagataaggaatgttaatccaacagtggtgcctgctgccaaggcagctaagagtcctgcctttgtaactccaccatttgtgcccttcttcaccggctgtgagtgagaccaaacgttaagcgaaacagacaaagttcattagcgacttgcaaaaaaaggaacaggacaaaccttaaacgttgtgattagtcgaggctgggcatcactaagaaccccaagctctgaggaccaagtgtctccattacagcaggcgtaatgaccaatgatcccaccaataagagctgttacaatttctgactgcttcgagtccaaacacttgtccttccaacccgttaaagtacaagcaattacaactagaactgaagcaattccactattgcatagcacttgaaccctgaagcaatatatttgaggaatcgtctgtaaaaacaaccttttgttggtcataaataacaacttctgaaagtgaaatcatttgctaatatgcccatggaaaattaatttcatgttaccgaccaacacgatgttgaaagtaagactaaatgctattcactatagactctcaaagatctagagttcattccctctccttgatcaaagactctcaaagacaattcacaatttcaaaaatcggagcctacaaaaaaacgaagaaagaaagaaaggaaatgtaccagttcctttgtccaccttctttgaactcaacatcaacgcgtctttttttatcttcgccaactttggtaagtttcgaggaagtaagaaagaatacaagcagcagagctccgtacctttcagattcagcagattaatccgatcaaacccgtcgggaaacgattgaaaacaatttctcaacgaaaaaaataacagataaaatctcaaaaacaggagaagaaacctgaaaccggcggtgaagtgaatggtcataacgaggaatccagcaattccaccggagagatcgagcgacttccgcttgtacgatcggaaagcgatgagagaagaaatgattacggcgaagataagtctgaattgcggcgacgtttccatttcttccagtggcggagaatctgttgacgacgaagattcagttcagcgtcggggagagggtagttgaccccaacgtcttcactgatttgatgtatttcaagtgttggttacatgttagttacgcaggctcggacctggtctcaaaacatgggcctcaaatgggctgacccaatagatttgctaaaacaaatattaatctaatctagaccatgtagtcgtgggccatttattagatttgcggaatgggacagacgagataacgcgggagagaatccaatcaccgattgagctatgggccccagtatcgatttctactatgacgtggcaccacttaaatcacaatatccgcattccctctctctctccctttctatctgagcttctctctcttactctctccagagcaacaatggctgcgactgcttcttctcttacaatcgcgtcgtcattctccgaaacacgg

SEQ ID NO: 70269 - DNA, 414 bp, Arabidopsis thaliana landsberg
  unsure (1)..(414): unsure at all n locations
cccaacgggccagcaccaacagaacaacgacccgaagaaaaccattcatacacaccacacaagacnccggagggggggaagcagaaacaccggaacagccacaccccgcgangaagaaaagggaacagcccaaagcggagccaacaggaaaggagagaaancaggaaacaggggggcacaagaagagggagagcgcaaggagagcaacaagggaaagaccaacacccacggcgcaaaaggaagagccaaaaggaaacgaggaaaaggacaagaagcgnaagaaacaacgaaacaagggcgaagaagagccagccaaaaaaaggcaaagacaacccggccgccagcaagaagcaacacaggccaacgacaaccacggaggacnccacagcacgaagcgacaacaggagagcgaaa

SEQ ID NO: 70270 - DNA, 554 bp, Arabidopsis thaliana landsberg
  unsure (1)..(554): unsure at all n locations
cgaccttaaattggagctctatcactttttgtgtgtttcaacactctcattctaatctctcaaaacattaagctaaaagatgcatttattgtaccaaaggtttttgtttgaataaaattttacatttattaaaaacaaattggtatttttgattggttgagtgatctatgacatctatataaaaccaagtatttagtgagattgggctagagttttggaccttgaattgtggtcattacaatatagtttacgaaataaatccaaaaaaaacaaaaaaaattttgtcaagagctgtatgtttattgatggataggtggagccaatataaaattagagcatctctaatatttttttctattcttgcttttaaaataaaaaatcctataatagagctggattttattctattgtctttgtctacttttatctaattttttaactaaactatataaaaaatatgtattttagaggtaaaaataaaagtaatttgaaatatattttatttttaaatagagtatataaacacanaatagaggtatgttggaaatgctctt

SEQ ID NO: 70271 - DNA, 421 bp, Arabidopsis thaliana landsberg
gaaacggcataccacatgacaagagagagaaaacgcgcgcacacaagactttatccggacgcgaagagcgcgagacaagaaagaacagacccagctcaaaggagacagggaaatggaaggacaacaaagaacctctccaaagcgaagatgcaccagagggcacaagaggagacaccgccccgggtaactccagagccaacagcgtatgctaaaggggaagcaacaacaaaccacagagttggaccgtgcgaaccgtcggacggaccgtctcactggcgcagtcgatcaccacgctccgtcggtcgcgtgataccctccgggccgtaactggccggaaaccgccaacagcgcaaatacgggaaacaaaaaagagcgctgaaagcaagcccacgggcccgatacataaacccgagacagcaag

SEQ ID NO: 70272 - DNA, 109 bp, Arabidopsis thaliana landsberg
gggaaggggaaaaaggaaaaagggaaccaaaaacaaacagagggagaggaagagagagagagcaaaaaggagaacagggaaaagaaaaaaggaacaggagacggaggga

SEQ ID NO: 70273 - DNA, 318 bp, Arabidopsis thaliana landsberg
  unsure (1)..(318): unsure at all n locations
agaggaacgcggaacgcgggaagtggaaggagccttgcggcaaaccacacacccgaaacaggaacaaaacaagaaaccccaacagcgaaagaanggaaaagaacagccgcccccagaaagacaaggacagcccgaaaacccaaaaagggcaagacccagacccgagaaaacagcaacaaaagaaacagaaaaggaaacacacacgaacaaaaacgaagacacgaaaagagaaacagccgagaaggacaaagaaaacagagaagcaagcaaacaacaaaggaacacggaaaggaaaagggaagaaaaagaggaaaggcc

SEQ ID NO: 70274 - DNA, 400 bp, Arabidopsis thaliana landsberg
  unsure (1)..(400): unsure at all n locations
gcgtcatgactgtcgcgatcgcggtctggccggtattctccatgaagatacggatctcggtcgcgccgtcggcggctttcaccagtccccgctcgatggcgaaggggcnacaccggcgaggatgttgccgcaattctgccggtcggtgacgatcggccggtcgacaaagacctgaagaaaaagatagtcgacgtcgatgcccgggcgttccgagtttcggaccagagcgaccttggaggtcagcggattggcgccgcccatgccgtcgatctggcgggcgtcgggcgagcccatggcggaaagcaggaaggcgtcccgcgctgccgtatcggcgggcaggtcttcagcgaggaaatatccgccctttgaggttccgccgagcatcaaatgcatcgtatgc

SEQ ID NO: 70275 - DNA, 327 bp, Arabidopsis thaliana landsberg
gatgcttagctcttgcatcagccttttcacatatatcttctgcatgatgtagctggtgctgcacacactgggcagggatgctaaccagaattatttgttcaaagattctgtaactgtacacagaaccttagcaacctgccaataaccatgacaaataattcggataggaacatctatcttcacaaagaatgttacgcatactgacaccaactgagaaactgtactggcatcacctactctaacaaacttttgttttcttcctgtggcatatgccacctgagatgaaacgaacagtcaaaaatgtatgaacttaataaatataatata

SEQ ID NO: 70276 - DNA, 579 bp, Arabidopsis thaliana landsberg
  unsure (1)..(579): unsure at all n locations
agcgttgttttatctctttactagtaaacagtattgagctccctaagctatactcaacttgttggaattgatggaaagtcttcttaacgacctccccccaccccgccccccagttttaacaacattctaaattgatagcatttctgttaccaccagacatcaacaacttccaataaaatgaaccaaactgtctaagttttaggacaccttagcacatatttgattaaagtattttttttttttttgctaagtgaatatagataaaaatctcaattgaattcaacactagaaagtatccagttatttcattaatctaagcctgcctaagtacttaaaatgatggtctgtgttttctttcatgcctctgaggatcaagaaattgtcctcactgtctaacaaagtacaaagcacagagcagagaataaatacgcaacttatgtaaacctaaaagaaattaaaccttaaataactntagaaatgtgttggtctggtattatttgtacttcatatattatataggaaaataaatacattaagctccacaccaatngaatattttaaaaattaaaagaacatcta

SEQ ID NO: 70277 - DNA, 473 bp, Arabidopsis thaliana landsberg
ttctccagaaattcttactcgttggggggttatccatggttttaagactctggcatccaacaggaggaagaggaggaaaattgggttgggtcataaccggattatctatatcggtgttgccaaatactctcattcttggaatcccaatcttgagtgccatctatggagatgaagctgcgagcatcttggagcagattgttgtcttgcaaagcttgatttggtacaccatcttgctctttttgttcgagcttaacgccgcaagggcgttaccatcttctggagcttccctagaacatacaggtaactaaaaatcattccgttttttcgataaaaaatgatttaccctaattaaatcttggtttcttgtaaaacaaggcaatgaccaggaagaggctaatatagaggacgagccaaaagaagaagaggacgaagaagaagtaccaatagcgagaacaagatctgttggaactatg

SEQ ID NO: 70278 - DNA, 375 bp, Arabidopsis thaliana landsberg
cacaattatgatgtgtgatcatgtttggataataacaaatttacaatcttagatacgtttttagtcaacatcatgatctctggagacaaaaaaactgatgatgccggcgtataaaccaaatatgtagattagatgtaacattttcctaattgttttagtagtttgattaatttaatgtaatgaagggattagagtggcaatgtatgattggagggagagtctgcgtgatgccagttttaagattatgtgctgcattgctcatacatacatgtcttggcctagctcctttccttgtgcttttggtttcttgctatctttctagtattcatttgtgaccggtgaggtgtcctagaacctatgtttttactcaaattt

SEQ ID NO: 70279 - DNA, 532 bp, Arabidopsis thaliana landsberg
  unsure (1)..(532): unsure at all n locations
agcaactacagtttcctaagccttattttgaatcatatgcatgcttttttcaccaatcgttaaatcgttaaatgcggggtagttagaattttgaagtctcgaatgtttggatttggcttgaattttgtagaccgcaagagatttcgattagaaaaaacacatgcatagaattgtatataggaagattattataaaactccaagctagcctaccaccaatgacacatataactttcctcttccctttgtttactacaagtaagccatcagccatactctcatgaccataacgaacaaacgcaaaacctcaaccaaattgaatcgaaaaagccttaaagtaaatcacttttaagaaagaacagaggaaactgtnagaggattttctctaaacatgtcgtccaacagctttgccacagagttgaagattgtcaggaggattgtattcattggcaagactctgtacttgattccatactttgagataaaaactgtgtcctgaatattgtctttcccatatcgctgatctcatattc

SEQ ID NO: 70280 - DNA, 189 bp, Arabidopsis thaliana landsberg
acggtgccgcgccttgtacacaacgtccgtaacactatggtatgctgctcatgcccgattttgtaaccttaaccttaaggagtggggtgcccaaagcatggctagagactggcgagaagtctctacatggtagtcgtactggaaggttccgctggatcacctgcttttcaaggagagctaacgattctt

SEQ ID NO: 70281 - DNA, 592 bp, Arabidopsis thaliana landsberg
ttgtgtatacaaaaatttattagacaaaagcccaacaatctaacatggcccattcaatctgggtaaatatatttccatggtttattaagtttttatttaaaagtttcttttcatcattttacatatataagaccataattttctatagcattttaccttaccatgggttactatttatttttttattttttcttctaataactttattactttcaaaagttgatatcgttgtgtacaagagatgcaaggaagaaaggacatgaatgatacaattcccaaaaagttgaagacccaactgctcgtttagctagtgtatcggcacatctattttgttggtgaggtttaaaactgaagacgacctgtgtaaaagctctttgccaatcccaaattgtttgtaggtagtgctgtagtcgaggagtagattcattgttattcagaagccgggttatgttgcaattgtcaccctcaaacactacgtgacgataacctagggcccatgtagattgtagcgcccatagaagtgccgagcactctgcttcttctgctgagattcgaccctgaaatttgccctgtccacagtccaaacatacac

SEQ ID NO: 70282 - DNA, 506 bp, Arabidopsis thaliana landsberg
  unsure (1)..(506): unsure at all n locations
tgcgccgcggcatctgctgtcttcgccagcacgatcatttccgtagtatttttatcgatacgatgcacgagccgataacgcggcagggtatcttcannnnnnnnnnnnnnnnnnnnnnnnnnnnnnnacgcaactccatttaaaagggtgccactgaaattacccacgccgggatgcaccaccatattggcgggcttgttgatcaccatcacggcatcatcctcataaacgatattcagggggatatcctctttcttcagtaccgtatgctcgggattgatcaggctcatcagtatgacctcatcacccggctttaccttgtaattgctttttacagacttcccgttcaccgttacaaagcccgattcaataccccgttgcactttgttacgcgtagaaccctccaggtgcatctgtatgtatttgtcaatacgcagcggctcctgtcccttatcgatacgaaaaacccttcgctcatacagcgattacgtgcttccttctgtaac

SEQ ID NO: 70283 - DNA, 670 bp, Arabidopsis thaliana landsberg
  unsure (1)..(670): unsure at all n locations
ggaaatcctttangaaancattttccatattaccatttgcaggaacagcaatgaaactggatgcactcaatacattaacccagccatttcaaaaaacagaacaaatgcccatcctgtttcttggaccatggcagctccccatgaaatgcctatttgaaagaccaatgaatttactaaaagggcctgggaaagaattaaggccaaaacactaccaaaggccaacagctggattatgtatatctgcgcattgggaaacccgtggaacattagtgacagccgttacaaaacctaaaaccatacatgagttcggaggtctcccgaaagcattatttgatgtacgctacccggctccggtgagacccgaactggcaaaagaaacacaaaaaataattacaaaaacagcccgtggccatgatgagcaatggggggctgatcatggctgctggagtgttgataaacatatatacccaaatgcagaaataccaattattcaaatgagcccggattatacacaagggccgaataacactatgagctggcaaagagctggcttcactccccaaaaagggtcttgatattggcagggaaatttagtcacaccttggaaggttgccgggacaaatcaagaccaggattggggagacgggccataaagccattaaaatgaaaa

SEQ ID NO: 70284 - DNA, 452 bp, Arabidopsis thaliana landsberg
gaaaaactcaggtgcaatgatattgggtttttgggcccaatgaggcccattataggtgataacaccacggccaagaatggatttaaggcgtttggtgacgtaagagactttgccaaggttaagagtgttggcttggttaagttctttcaccaactccgggtggttcatgtacaagtgttgcttcacccccgtcgaatacgtgtacactctccctgaacatatcaatttttttcaataaattactcatacaaaataaatatacaatatatgctcaaaaccaacttagaaaacggtgaaaataaaaaacttaagatttcctctcaatcaatatgaccgatcataaactattaaacgatccactagcgaagcgacaactactttggtattttaaaactaaatttagaatatatcttacgatttattactataaaaaaaagggaatcaaaatgaat

SEQ ID NO: 70285 - DNA, 192 bp, Arabidopsis thaliana landsberg
catcccttaaacggccctcaaatctacaccatcttcagccttggcgccaacaaacgaataaacctttatcgacaaacccggaccgcatacttgaacccttgtacaccgagcgacactacaaggcataccaacacctacgagaaaaccagggatccttgaaccacactcatgaaaccataggcacatcactac

SEQ ID NO: 70286 - DNA, 602 bp, Arabidopsis thaliana landsberg
ttgatgtcatatctatcctaattataaatatgtgacttgatcctgtgaccttgagattatattatattgtggttatattcattaccgctctttgatattatatagtaaaagtattaattagcaagaattgatatataggcaagatcataaagaataaacctgcatattttcttcagaaaccggtttggtgctgactcgatccttagtatgcctcagataacgatctatggtatcttgcatactgtcaaaaacatatataattggaacattaaagtaaatcatcagagatcaaatttagatcccaatggtgttctcaaaacatttcttattgaagatatcactagacttaatcaaggacatagcttgaaaagtcttgtactttttccccctattttagaaaatcaaaaacatgtgaggtcttatctttatatttagtaggttcgagagaaagaagtactttcccaaatggaccaaatgtctgaaacatctgatcaaaagctggcattttcatttacagaagtaatgattcatcaaaagtaagtttggtttccctactacctaacagtacaagataaaactcttttgattctcaaaaacaatca

SEQ ID NO: 70287 - DNA, 384 bp, Arabidopsis thaliana landsberg
  unsure (1)..(384): unsure at all n locations
tggagatgctgagaaacaagagaaagctgctgatgattaggaagttggatcagtgatttgtgtatcaactatatctgttgttttatgtcaacttttagctagcttttagggagaacaattgttacattcctgttttatcctttctgtcaactgtgggattattcagatgtaactttggatttagctttgagcttcaattccaccttttatgagatcatatcatatgtttgcaatcttattttgctctctctatcattggtgaaaagtcaaacacatttctgaaaagttaagaaattgtttctctgaaggagaatattgnnttggtcttatgttatatattggggttgnctttgtcatcttgtgggatctctgaaggagagattg

SEQ ID NO: 70288 - DNA, 430 bp, Arabidopsis thaliana landsberg
  unsure (1)..(430): unsure at all n locations
catatgacggcccatgcctggaatgcttggtttagtttcctccatttccattttaaaaatgttattctcttctcaatgattgtgcatatatggtgtaatcattgaaatggtaaagagttagtgaagcaaccaacaatccagcttcaatactcaatccaaatttttatctttcctttgcctgatcagccttacgattgtagaagtttgtgtttgtgtttgaatgagcaggaaaagaggaaacctcccccagtcaagcaaaccgaggtgaagaggacgaggagagatcgtggtgagcttgaagctataatgttcaagctatttgaaggccagcctaactggacattgaagcagcttgttcaagagacnnnnnnnnnnnnnnnnnnnnnnaaagaaatactaaactagctgcgcgtgtccaataagagaggat

SEQ ID NO: 70289 - DNA, 375 bp, Arabidopsis thaliana landsberg
  unsure (1)..(375): unsure at all n locations
agttagtctgactccttactatgtggacctgaagtccccggtggtatannnnnnnnnnnnnnnnnnnnnnnnnnnnnnnnnnnnnnnnnnnnnnnnnnnnnnnnnnnnnnnnnnnnnnnnnnnnnnnnnnnnnnnnnnnnnnnnnnnnnnnnnnnnnnnnnnnnnnnnnnnnnnnnnnnnnnnnnnnnnnnnnnnnnnnnnnnnnnnnnnnnnnnnnnnnnnnnnnnnnnnnnnnnnnnnnnnnnnnnnnnnnnnnnnnnnnnnnnnnnnnnnnnnnnnnnnnnnnnnnnnnnnnngctgtcctgtatatactcgaccgaggccacacatagacaaatctagagtatcatgctagatcaaggagctgttggcact

SEQ ID NO: 70290 - DNA, 569 bp, Arabidopsis thaliana landsberg
  unsure (1)..(569): unsure at all n locations
gatcgatagcttgtatatacatgtcactataccattatcaacttaagacgttacccaaacaattatattgttatatctctntatatactattttggaataattagatctcttgagtgatatatatataaacttaaatcactcatagatttcagaaattaatttaagtttggacctggaattgtttattaaagataaaaacacgtaaaggaaatcatgataataaacgactgaactatgaattgtattagcgaaaataaaaaacagaaagatgagtttagagaatttagacctggggttagaagaacgctgaggcagatgaagagaaggaccaaatatttggtagaagccatttcacttcgatggatcttaattttgatttagtttcagttcttttctcggagtgaatgtttgaggatgaatcatacacacaaatatatatatgaaggaaatacatacagtatacgctttatcaattttgtacagtcaatattctaagatattcatttactattacttttctcataatccaatatatatggttaaaccaaaaacaaatattgacttgata

SEQ ID NO: 70291 - DNA, 134 bp, Arabidopsis thaliana landsberg
gaataaatatttcttgtcggaactgccttttatggctattcgatcccgacagatcctgcaggggcttaggcagatagcatcaagcataactcctttaatataacctcgttcatagtgccgccactttgcctatg

SEQ ID NO: 70292 - DNA, 538 bp, Arabidopsis thaliana landsberg
cgagccgttttcatgttttccactcacactgtagtgataggttaactttgaaccacgaaaatgtgtaggagtggtaaacgacacgatgtgcaacagtgaaaaggaggctaatacaatgaggacaagtgtcgaaacaacgatcgagattgtaggaaaagacgggcagatctgaaaagctgcccgaatatgttatcgattgttcaactccactagttttgcctgaccctacttgtgcccgttgccctcaaatatatctttcgttgtgagtcatcaaagaagcgtcggtatcgaaaccgaagattccgttcgcttttggttttgttcgaatttcagagacattaaaccagctttggtatttagattggtttgacttcggttcagtgacaaaacaaaacctacttaaacgaacgagtgatgagtgacttcagaaaaaaacagtacatgatttcataataagtaacttattatttataaggttcctaaaattttgcccaaaaaaaaaaaagaaaaaaaaaacttttctaaaaatgtatttgct

SEQ ID NO: 70293 - DNA, 216 bp, Arabidopsis thaliana landsberg
gattcttctatccatgcatacatatcataaaatttttatcaactttgtaagctaacgttatatactttgggaacaggtgagaaatcaaaacttacgttatcaaactattcatacgaaatagggtagagtaaattatatatgtccctgcgatgaacttattggcgagtcggcatattgacgcacacttgctctgcacactttcaaacgcaatccgcc

SEQ ID NO: 70294 - DNA, 429 bp, Arabidopsis thaliana landsberg
gaccccgtgggcgatgaccactatgaacttttccaatccattgatatttttgtttttgttggagttgaaggggttgctgggaaggcaaaggttggagaactttctataaaagttaaagattttattttacttacgaaatctctgcgtccacttacagacaaatttcatggtttaaaagatatagaacagcgttatcgacaacgttatttagacttgatcactaatgaggatgcgaaggaaacctttgtcactaggagtaaaattcttcgctatatgcgtgagtatttagatgaccaaggataccttgaagttgagacacctatgatgcatagcattcctggcggcgcatcagcgcgaccatttgttactcatcataacgcgttggatattcccctttatttgagacttgctattgagcttcatctaaaa

SEQ ID NO: 70295 - DNA, 149 bp, Arabidopsis thaliana landsberg
taaccagaatgtagatgatcataatcttctactcatatctcttatgtaccctaatgtctatactgggattagtgccacaacaaggtttgcacatcctaaagttccatttttttgatttcatatattaaaaaagactttcaaaattggtt

SEQ ID NO: 70296 - DNA, 571 bp, Arabidopsis thaliana landsberg
  unsure (1)..(571): unsure at all n locations
tagaaatagcgccggatcaagtcgggcgtgatctccgatctcgacgcgctcgaaagtgtcattcgcaacgccgtggacacggcggagcgccaggcgaagctgacggtcgacagcctgatcgtcaacgtctcggccggccgcctgnnnnnnnnnnnnnnnnnnnnnnnnnnnnnnnnnnnnnnncaggaagtcgacgaggaagacgtcaagaaagtgctgatcgccgcctgccagcagtcgcagcgcaacgaacgcgccgtgctgcactcgctgccgaccggcttctcgctcgacggcgaacgcggcattggcgatcccgtgtcgatgttcggcgataccttgggtgttgacatgcatgtgctgacggccgaacgcaccgccatcaagaatatcgagctttgcgtcaaccgcgcgcatctctccgtcgagggcgtggtggcgacgccttacgcgtcgggtcttgcggcactcgtcgacgacgagctggaactcggctgcgcggcgatcgacatgggcggcggcatgacgacgatctcggtctttgccgagggccggctggtgcatgccgatg

SEQ ID NO: 70297 - DNA, 595 bp, Arabidopsis thaliana landsberg
ctgcagacgaaacgcttcttcgacgacgcgcaacgcctcctcggtgaccgcgaccttgccgatcgccgtgacgtatggatgggtttgcggtgacagccgtgcaaaagccagcgagcggcgcgccgtggcgcggcacatctcgacccggcgcagcatctcgccgaggcgcaggcgcgtcatctggtgctcgatcagcagtgcgccgccttgtttgcgctcgtggcaatacttcagcgccagctcgaaggccgcgcgtgcgacgccggtgaaaacctgcgccatgtgcgtgccgccgtaggaccagaccgaggcgaagctgccgtagtagccgtcgcgctcgccgatcgcgaagcggcgcggcactttcacgttgtcgaaatagatctcgccctgcggcagcgagcgctggccgatcttgtccagcggcttgccgtgcgagacgcctggcaggtcgagcggcagcagcattcgctatgccgttggtgcggccgtccttatcgacgaagccgaaaccgtattggcggtcatgtacgccacggccacttgtgccatggggcctgtcgacatccaggccgaggactgggccttgaatcac

SEQ ID NO: 70298 - DNA, 2295 bp, Arabidopsis thaliana landsberg
  unsure (1)..(2295): unsure at all n locations
caagcccgaaaaaaggaaagccccacacatttcgctttatttaccagattgtccttctttggggaaaaaaataaaatatagaacgggttttggaaattgtaagatttgattgacagagaatttaattcttggttacggagagactagttatgaccattaaatcttcttcacatggagagagtttaacacgtgagaatcatagtcacgcgtgtgaacagaaacacacaaaaaaacctcaatttatcattattaccttaccgttacggggaaaatcaaaaccctttgacttattataaaccctctagtcaaatctgaaaccgatcgtacggtctaggtttcatcagacacacagtacatagaaaagggtatattcgtcatttcaaatatgtttacgttactgttttgcgttaattacgaccataccactttccttgttctgtcttcaagtcctcaacgctcgtttctattctctcactttctctgcagagagcaacaatggccaaaagctctttcttcaacaagcatttgcttctctctcttctcattcttctccaaagctgtctactctcttcttcttcaagtaccgattcagaaactctcttgaacttcaaactcaccgcagattccaccggaaaactaaactcatggaacacaacaacaaacccatgccaatggaccggagtctcctgcaaccgcaacagagtcacacgactcgtactcgaagacatcaatctcaccgggtcaatctcatcactaacctcactcacatcactcagagttctcagtctgaaacataacaatctctctggtccaatcccaaacctctcgaacctcacagctttaaagcttctctttttatcaaacaaccaattctccggtaacttccccacttcaatcacttcactcactcgtctctaccgtcttgatctctctttcaacaacttctccggccagattccaccggatttaaccgatttaacccatctcctcactctccggttagaatcaaaccggttctccggtcaaataccgaacatcaacctctccgatttacaagacttcaacgtctccggtaacaactttaacggtcagataccaaattcattgtctcaattccctgaatcagtctttacacaaaacccatctctctgtggagctccattgctgaaatgcacgaaactctctagtgacccgactaaaccgggtcgacccgatgaagcaaaggcttctcctttaaacaagccggaaactgtaccttcatctccaacttcaattcacggcggcgacaaaagcaacaacacatcaagaatcagcaccatctcacttatagctatcatcctcggagactttattatcttaagctttgtctctcttcttctctactactgtttctggagacaatacgcagtgaacaagaagaaacactcgaagattcttgaaggagaaaagattgtctactcatcaaatccttacccaacatcaacgcaaaacaacaacaatcagaatcaacaagttggtgataagggtaaaatggtctttttcgaaggaactagacgttttgagttagaagatcttctccgagcatcggcggagatgttagggaaaggaggattcgggacggcgtacaaggcggttcttgaggacggcaatgaggttgcggtgaagcggttaaaagatgcggtgacggtggccggaaaaaaagagtttgagcaacagatggaggttttaggaaggcttcgtcatactaatcttgtgagcttaaaggcttattactttgctagagaagagaagcttcttgtttatgattacatgcctaatggtagtctcttctggcttctccatggtacgtcgtcgtttttgtttcctttttcttactaattccggaaattattcactaattagttgacttaggtttatgtttccataagaggagaaattgtgaaaatggtaggagtaggaccaaaacatgtgattcatggtacatagtagggttaaattttttggacttagtgagaattagaaaccatactttatatgttagaaaaatggttggaaaatcattttcatggggcattattattactatatagataatgagaatttaagtctttggatagatattagcattggcaacaagttggacaaataaagttatgatctgtctcatttaactcgctctttttgggatttttcccttttttgtttagtttctagtgtttgtctttacctaaccattggtttattcattccattcactgattttagnaactaataaagcgactaattacatttttt

SEQ ID NO: 70299 - DNA, 2549 bp, Arabidopsis thaliana landsberg
catctctttcaatctcaataatgggttttgctctaagctaaaattaaccaactttgaggaaaacaggaaaaaaagatcgattgatcgaattttaagttataataaaggtcaagactttgagagagtaacaaaaccagccttcattaatccatcatcactttctttagacctccaaaataactcctttttgctatgtttctttctgtcttagaatttggttcgtaagtgatctccttttcttctatactttattgcatcatacttggaacaatatcattcatcatcgcttcttgcatgccccacaagtacatctctccattcccttttccagtgactgcacatatataacagataattttaaaaaatcatattaatttctccatatgcatacttagcttgaataagacattgagacctagacatgtgaataaacgggacatcagaatctaaccgatcaaacatgacgtagaccaagtgtatgataaatatatagtatataatgtataaccatctattatgcatgattcttaacttagattcttagaagagtctactgttaacgacttaacgtattctattacgaaagtttttaacaaaatttaagatgcatgtatgatcagttttatttcaactgggtgaaaatgatataaatgaacataacgaaaacattttcatgagaccaacgcaaaaacccttttgttaagagatcatgagaatgtaatattttaatttcacgtgcatgacattttgatatgtcatgaaattttctggaagaaaaaaaacacgtccgagtaaatggttgatccatggttatgatcatattggacaataactaaccattatattaatataactattttctaaaatactaaaatttggctttaaggtaacattttcccaacatagaaggaatatgatcaccctttgcttcaatttgagaaaatgtcacttttgcatatatagattcattttgtatctaaggacgcacctctacttggtgctgaagacctttgatatgctcaacagccaaatccaacatatctgcgtagctcgtttgctgccaaatttttcaaacttattatagatatgtaaaaccacaccaacattacattaaaaacagaaataatatcacttaccttgtccatattaggcacaagttcttgtagcttcttcagcttcccgcttatcctcgttcttctctcctatataccacaaacacgcaaaccaaatcatatataaaacctaatttttactcttgttttctttggtttcaaatgaattcaccttttaagtttgtatctagacttatgcaatagtaatcaccataataatagaataaactaaccctttcagcaatgctgcgtgggtgagtcgcgaagccgcgcttggctctagccctacaaggcaccgagtcctctgggatgttcatcaagttctccattgtcgccatttccagagttgtttgcggcatgctatactaaaagtcaaaaccatatatattgagatgaaaatcaatgtataaccactcaatgaatatcataaccaaaccaacatcagtgagaatgtttacacaaaaatcatttggtagcaaagggcttgtgaaaaatatacataaattaatcataacccttctctaagctatttatatctattacacaaccactcaactctggcttctacacacagaaatttggctatttgcactttattggcatttatttcaacttggaattctgttgtggatatggaatttaaattgggcttgtagaattcatattgtatatgacgcgcactatataataacacttgttagcatacaacttgtggaccatacatataattaaacacacaaatcatttaattgccaaggacttgtgaaaagttataaaccttctccaagcagtttatacacatgaacctgtgacatagacattgctgttggcaatatttcaacatggaattctattgctaactttatggaagttaattaaactgatataaaatttcatacgatatgataatatactttcttagtatcaagttgtcaacctattatagatcaatcataaaccttctccaagcctatagaaactaataatacacaaaacaactaacattggggatattcactcttttctccctttacctagaagaatccgagatttattaactttgttgtataaaaaaataatctaaaagtattgatacacatacataaataacctcaaattaaagttatagaaaatacctgagtttctaaggtgaaaaagtcggagttcttggaccgttttccgggttgatcaatggtgaaactgatatgagaagacgagttgtcccaattgttagtacgattatttccaaaactcatactacttgatgcgacaccgtttctagccgctgcagccgcttcaacctccgagattcgcggtagagaattatgttcttgatggctactactcccactagagaatctcagctccgacttcaacctcgacgagccttgctctcctcctccgcgtagctccgtttggccgcctagagaaaaactg

SEQ ID NO: 70300 - DNA, 131 bp, Arabidopsis thaliana landsberg
aaagaatttttttttgttttgacgacttctatttcaatgtatatatattctcagtctcattggcatccgagaaaataatcaaagagatatctattcttcacatactcatttaacaaaagagactattctga

SEQ ID NO: 70301 - DNA, 2998 bp, Arabidopsis thaliana landsberg
tatccacattcttttcgatcgaattcttgttaatttgtgcatgaaggtactttcccaacaataaagctccaacagatggacacgctctaagaatgctcgctactgtcaaattgttagcaatcaaatgccgcctcttcattatccggaagaggctgatagcttcctcaccaaaaccttcccgagcatgagcagctataatcgaagtccatgtgaccgtgtttctattactcattccatcaaacacttttctgcaatcagaaatctccccacacttagcatacatgtccatcagcgaagttcccacaaaaacatctgtctttatcatcctcttaacaaccaagctgtgtacttgccttccgaatcttaacgctttctcctcactacaagccttcaaaatactgcacaccgtaaactcgttaggcaaaaaccagtgattcaacattccgataaacatgcctatagctttaattccatgcccttttctcgaacacgccgatataacagcagtccaagatatcacatctttctcctccatcatatcaaaagctcgtaacgcacttgtcaattcaccgcattgcgcataaaaataaacaagagaactctccacaatgagattccccactccaactttcaccatattaccatgaacttgtctccctaactcaaactctgctctcctactacacagattcaacaaacacacaaacatcctctcgttcgtaaaacgtattccatgcttcacataatcctcaaacagtgcaaaagcctcatcctcaagaccatacttcaaatacccatcaatcatagcagtccaggtaacagtatttttctcaggcatactgtcgaacactttacgtgcataaaccaaatcaccaagtctaacacaagaactaatcaaattgttcccaaaatagataacttgatcatcaaaacacttcaacgccatcgcatggatccttttaatgagtcgcatcccattagaagactgtagccactccgctaacagagcataatcaactctttcgctatcgaaagaagacgaatcatcctgattcacattctctcctttgaaaccactaaaacccgaatcgaaagatgctctctttccagaaactaatcgaaacccaggtaatctcacgtgtctctgttcctctcgcttagttcttgaatcgctactgtaacatatcgtcggagatttgtaggattgagtcaccggaatctctgaaatccggagacgcggttggattaacgataacgaaaacattgtcggcgatggagaaagagaagaagcttcacacagagatctcccgccggaaaaaaaatcagataaagttctcttttttatttattttggtaaagagaattaaaagtttataatctgatctgctaattatgacgacaacaaataatatctcggtcggtttcaaattcctaagcgagagacaaatatacagtacacacacgacttaatatcaaaaccaataaacgtaaaacacgtgtctcatcacttcccactttcctctctgcatttgctgtctctctctcctgaaaacccttgaattttgctacacgatctctgaaacgtgtctctttgactgacttcaatcttctttatcacttaccgcttctgggttttatgaagcaactgagctaataaaaagcttcttcttagactcggaagaagaacataaacagaatctttattgtttaaagcttccaaattcgagaagagaatttgaaacgaccaagttcaggatattcgtttcttcgtctactttggtctcttcctcttctctttcgaaaagggtttattctgtcttaaaagaaacctttttgagagggtaaaaaaagcttcaattttcagagaaacacaaaaggcagaaacagagaaaaacaaatcatctaattcatgaaacaggtgagaatacatattttcttcttccttggtctcttctttttttattgatttcattcatatatccaatttttgtgtctattggctgtttaattgttgacgatgatgaattcagttagataattatgtgcatagtttaggaattttttagctatatcttcttctcatgtgtaaacatagaggaaaatctaaaaaaatatctgtcaaattattgtcttttccaaattgtcctcattgtcctattgaatcaaataagattttttattactgatgattcaaatattgttaatagtttataaccttgctcagtgttcttctgatgtgtgatttaaaacctcttgtctctaggctctgatctatgttttcgtctcaaagtcttattatcaattctctaaattgcagggttcaatgaatagatcgtgtctctgtagtgtcttaatcaccactgctctgatttgtggtgcttacttcatttgcaatgcttatcttgctaaagactttaaagaggtaaacttctttgtatttggcatcacttaagatctatatgtgttctatgatactgtcattttggttaaattgttcagctgtctttttgtgtaatcagtagtgtttttttccgacatgtaaataacatgacattgttgaataattctggttttatagtcaacattagaacaataagtttagatttctgaatttgatgtataagattataaatctgcagaagttgctgaagtgggaaatcactgataagatgcataacagtactgataagatgcagaatgcaacaacaaccagtacatgcaaggtttgtctttgaaatattctttgaggtttgttttatgagattctttgatattaaacttacaaatatatatatctttcactagaatttcaataagccagtgggtactgaagcactaccgcaaggaattatcgagaaaacatcgaacctggaaacacaacatctatggaactacgatgacacaaccaaggttacctagtagttacatgattcctcaaagatatggaaagtatcattgcttttttttcgtgtagcttaatcttttgctggatatttct

SEQ ID NO: 70302 - DNA, 566 bp, Arabidopsis thaliana landsberg
  unsure (1)..(566): unsure at all n locations
ccagcttagccaaatcatgtgattggatgatgattaatattaatacattattaagtttgtttagtttattgattgattgagtaagcaatttgtttaaatgaatttccaaccactatcttatcctcttaaaataagtggttttcttcagcatgcccaattccccaccgctaattttgttgtttataatctaattgcattctattggattgacggatcttacttacatatataacataaacaagatttacattaaatagaatagtagatgtaaaacgatcttaatagtcgtatactgttcaaaaacattctctactctgttntatgtattttgcacatttgagaaatctttgaatagatttcttttgatgattaatatatacttaatcttttcccgtattaatcatgtaagaaattaataaacaatttttctttgagttgaaacaattttttttgatctattaagaaatactttcaccactgtctatttgatgttcaaataccaaaagtacttcaggattagtttacttttaatttaaaaataatcttcatatcaaaaatgaaccgtg

SEQ ID NO: 70303 - DNA, 256 bp, Arabidopsis thaliana landsberg
tcacaaaaaagacattcaacaacatcacaatttttatgtctaagagacgtttagaaaactgggaacaggttttcctaaacttaaaatttgctttctgaaattctaagagtttggtaaataatcctggaaaacatacgatatagcataccccttataacctaataacaaaaatgtaattcagaaaatatcacaactcaagaactttaacaagctttaccaatctaagatgatcatcttgcaactttttccgatctgg

SEQ ID NO: 70304 - DNA, 430 bp, Arabidopsis thaliana landsberg
tttatactgcaggttaaggaattccagatgagtggtccaaggaagggcatggggtgacaatgacaatgatgttatgatggtttcgatgctgtaagatctgtgatggagcagaacatgtgttctcttttattcagtacatgatcaggtctagatataggtgctttctatgtatagacagtttagcgtatttctatttccaaatctatggatccatattatcttgagttattgtataataactttctgtacaacacttgcgcatactatatactggcaaactcccccgatttgcgactaaaggaagcgaaaatctactgtttgacattgaaactcattcgggatgcatacgaaaatcttactacaaggtatctaatttttatatctattggctttgatcatatcacacacttttacttgtttcttatatcta

SEQ ID NO: 70305 - DNA, 2808 bp, Arabidopsis thaliana landsberg
tactagctaggggaactactaattaggtttatatctacataagaatattaaacaaaatctgtgaacagtgattggtttgaagtcattagcagtctatatatatatatatatatgtatacgatgtaatatacaccgttgtcaagtgattgttatagatagtcataacaatatattttacatatatttaacaaagaggtatagctttgtcacatgactgattatgaaaaacagagttgcgacacgagaaagaatatatggttaaatggaaaacaaaatgcagagacaagctatgtattttgcaaacacctgttggagacacggaacatttgttattccaatacgaaaaactggcttgtgaaattctcttatacaaattcttggagaagtggctagatgtgatgaagaagtttgggagcaaagatcatgacaaaactaaaaaaattattttcaggtttgtatttcagaatgcgatccattaaaggaaagaaatgacagaaggcacgaagagcaattttcgacaacagagaagattgtcaagttaattgctaagaacattagaaatcgcttaagcactctaaagagacgagaagttgagaaatatgcgggtggaatccaaatgtggtttacatcaaaataacatcgcggataacagatctctttaatttgttttaagaaaagttcgtatccatatatataaacgtttattttaaaaaatatataattagattaaaaaaaatttctactatagatatatttcatagatttttttgttatatattttcaataattaaattacattatgaactagtttttgaaaatgatgttgattgagttataaacatagcaaaattatggaaaattggtcattgtcttcaacaattcttaagcatgatggctattttctgtagtataatactaataaataagtgatatttctaattaacttacttcaaaacgctggcgaaaatgacttgactagtcttattaaaaaaaaaaaattcatcaatgcgaaaactagccatgaatgatacaaagtttgaaaagactaattccacaaaccaaagagtagagaatgagaattactggaatataatgggccgacctcatacaaggcccatatcaacattcacatttcacaattcacagtggtgattttttttttcaaacataatatttgttgtcttcaatataatagaatatttttcttaccaaaattaataaaacaaatatgtcactaaactttctatatttgcaataaatactgtaaagaaaaataatacttcagtttcattattgatagcaaaacattcaaaagcctccaagttacatgtaaaagactccaaagtaactaatacaaaataattttttttaattcttacatttttttataaaaataacctacccgctcccaaataatgaatgaaagaataaaatcaatattttccctattttctttgataaaaaaaaaacattttcccctttttctaaaagtctttaaaaccctaaatgtataatttttttttttttttttcttcaaactttaattccctccggtagtccaagccgagatcgtataaagtggctgctccgaccaccgtaaagtaactccaccgccgcgtccgccttcaccgccgttgtcttcatcgctcctctccacattgaaaaacccttcattatcagatccgtacatcctaagcaacatcttactctgcaaaacctctctctccgagactccaagactccgaaaccctaactgctccaacatcctcctccaatgacgaaaacccacgagcctatcttgtctatgacttccttcacacgcaacaatgttcctgatctctctcccaaacaacatctcctcaactttgactctcattaagctatctgtagcaagattcgtgtgaattgcatcaaacatagctgaatagtactttagcgagttacaaactcgtgtctcaagttgctctgagttgtgttctgcttcttgctccgcaagaacgagagctattgggtttgtgcttctgattaaacccaaaaaatccctaattgctgctccggttccatcgtagagtgtcttgtgcatctgcatgacacagtttacagctactgattcaccttctttgacgtgaagcatccatagtctaacgtcttcgagtctatcaactacaggatgaaactcgaattgaagattcatcgcctctgcaaatccgtggaggcgatctccggtttcgtttagctcaagtttcgattctccgatcccagtgattcgtacatggtgtggtggatttattctcgaagctaagctttggaagaagctaggccactgtaaaccttgcttgatgtcgaagtcaataatgtgaactctctctttcccttcaaatgctctgagtaacatctcgttggctgtgaaatgaatgaactttggaattggggtcacttgattcaagaacctcaatgcatttcctgattcatcttcgacagttctatcgaattcacgagggggtgcgatgtggaagatgtgaggccacatacgcgccactcttagagccaaagcttcaatgtagtacgctatgaggcgagtcattggtgttcttcctctaggagaagcaagatcaccggttcttgcaatgaaatggttaatcgctgctatgtttcttgatctgatcgcgtctaagcatccggtaagcaaattgacaagctcgaaatccctctgcaaatcgttcctgttgttgttgttgttgatgtttccggtggtcctttcctctgttgcaccgcggtgtgagtacggattccttgagccatttgtag

SEQ ID NO: 70306 - DNA, 563 bp, Arabidopsis thaliana landsberg
  unsure (1)..(563): unsure at all n locations
taaacaaaggacttgttatgtaagtttcagcgagggaaatgttaatccttttttactaaggattttgatcatttggttagtgtattctccagttggaatctcaatcataatgtagaattaattgatattttcgatgtcacaatgaaataatttgacattgtagctaactagttttatggtccttatctatctacaattgtatgaagtttcttcattttgcttgtaaatttcagctgagttccatgatggatgtgggcagtgaagtccaagttcgtgttagtggtggtcttcttgctatattagaaagcgaacgaattgtagaaaccctggaacaaaacgaatctgggagtgcatcaatcgcaattgattcagtcatggaagtaccattggatcctttactttttctgttctgtttcttatgtcttgatgatctatactttcctgaatnnnnnnnnnnnnnnnnnnnnnnncaaatcctttacaaaatttataacaggaacaagtttcttaaacttgatgctgctgctcacgaggctctgcagatttttagacagataaacatc

SEQ ID NO: 70307 - DNA, 123 bp, Arabidopsis thaliana landsberg
cattgagataggtttttcgattacatgtgtttatattttgtttgcacaaataccctcgacgggtgcctggtcgttattacatatgagtccactatgcatatcttgagttggtaccgaaatggg

SEQ ID NO: 70308 - DNA, 107 bp, Arabidopsis thaliana landsberg
ttgggaaaggggacttgttcttacatttaccctttaaccccggtagcaaagggcgagggacttgtcttgttttcacaaataccaccgggctccccaggtgaagtcta

SEQ ID NO: 70309 - DNA, 296 bp, Arabidopsis thaliana landsberg
  unsure (1)..(296): unsure at all n locations
aggatcaaaccaaaaaataaattgnnnnnnnnnnnnnnnnnnnnnnnnnnnnaatacaggcagggcgccgaagacaggatcatgctgatgcggcttggttcggaactattgaaagcaccggtttcggcacattgaatatactttatggatcgagggccacatgccaaagcctaaatcacggtctgatcctgcatcggggcatcatccaatcacacatgcagcttttttaacagtttacagtaagacatttttcaggttggcaagctcgtttcttttccctttatcgagtgttatat

SEQ ID NO: 70310 - DNA, 589 bp, Arabidopsis thaliana landsberg
tatataactatataatagttcccgtctaaacgaaaaacttagcatcttgatgtaggattaaataccacatacccacaaggccacaaaatagtcttacttaatactttttgttactcggacaaagactcaaaagtatttaatagctaaaaaattatgagagtaggctttctttcagacgtggtacataattgaaatatatgaaaagtcgtcgagggagaaaaaaacaaaaagtgtagctggcctatttaaacaagtcaggtttattgcgccatcgtgaataccgatcatcttcaaatctatattttaaacattatcttatataattagattcaattacaaatattagtgcaaccattttttatttcgtatttttgttattatgtgggtggccatgtggggatatccagatctcccgaagtcaacttctagaaaagcagatggagatgcatcatcaaagttttagactatacaaagaatgtgaatgcctgagaagtaactcggtaagtaaaaagggagtagaagaagatggtatttacataaggcgaatatcatcattttacaaatatttaagtggttatgatttatataa

SEQ ID NO: 70311 - DNA, 617 bp, Arabidopsis thaliana landsberg
  unsure (1)..(617): unsure at all n locations
atatgatacatcaaagtacatagtacaaatgtacaatttaattntggaagatgtaagctcccattggtgatatatagtagtacaaatgttttagcttttattggtaattttttaccaaatagtacaaagttgtataaaacaatggtacatgaaagctgtaaaaaaatattgaggataacgtttttaataataaaaaaaataaaaaaattgatatcgtttttgtaatttggttaatgtcaaaaccgtacattccttattaaaactctacgaagttaccattcaaatccgtagtattctcttttattgaaccgagattttcacgaaacaaacactaattaatctgcaggaaacattaacttccatctcaaattatttaggtaatgctttaaatgttgtgatgctgtatattgtgggtattcattaaatttatgactacatatatctttttttttttgtttaaataatttatttcgagctaactatatattaacgctactacatgactttatacctaaaaatggatcaagtgatttgattatttcatcaaggaatcaggcaaacaatcttttacaggtattangtacacatttaatagtgacatggatagctcataacta

SEQ ID NO: 70312 - DNA, 977 bp, Arabidopsis thaliana landsberg
attgattttgaaggtttagtagaagacacagatccctcacaacttccaatggagcttcaagaagaatacatattggatcatcaagatcaacacttctcaatggagcaacaacaaaacaagattattggacaagccacacatctctcttcacagcttccagttatgatgaatcaagccatagatgaacgacattgctgtcagccatatcatcaaaacaatgatctttcagtcgttcctatggagactcaacaacaacacaatgtggttggaaacttggcttctcaacaacaacttgaggaacaaaacaatgttccggtgatgactatgaatcaaaccacagaacagcagcaaccttgtgaaacagccactactcacaacgaattgtttcaagagatggatccagagattgctagtttattacttgtacaaaacacaacagaagaagatgctaagtttatggcttcattaggaaacttttagtttaaaattccattcgtttctttatgcgttcattagtagagtgttatgtcctactttttaattttaataaataaccacatttttgcatctcatgatgaacatatttatatatatactcggtataaagttgaacaagaggaggcaaaagtttaagcagatcttaaatatttctcagagactgagaacaaacaaccagaaagtaagtaacagagttaatgcacaacacccaaaaatacagttttttttttttttttttatcttggtgatgcttcacttccatcttgttttatcacatgaacataaaacctgtcttgagatgtaactttccagctccctagagacttcagttagcttcaagtcaaagttagttctgtatttttgcttcggcgaaggcacagttgaagatgaagagcctgagaaccttcttcgtgggcttgagaatcttccaggtgaaacctgaagctttactgctgcagttgttgatggttgcaacacag

SEQ ID NO: 70313 - DNA, 3121 bp, Arabidopsis thaliana landsberg
tgtacaagaccaaattcagtagtgtctttgctcaaaggtttataagatgttatttgttactcattagttatttagatgtgtacttgtgcagaaaactgtctctgctagagttacgtccactttctcaacattttatttgttctgcaattttgtttagaggaagtagttttccttcttgctctctgctgaaactctatgattggcaggccaaggtggtttcggccacgttgtgttgtgcaaaaataaactggatggaagacaatatgcagtgaagaaaattcgactgaaggacaaagagatacctgtcaacagtcggatagttcggtaagtgagaaactgttcatagtgagtacatttggaccaacatatatacttaaagcaatttaaagatctctgtgccatcttggggtgtttttctgtgttaatattagctaaatgttatgccacctggcaagggcttcttggaaattatctatgctctttaagcaagtggtggagatctggattaacatgttcttcatctgcgtatatatgtgctctatactttttttacttgcaactgtgtttgctgcaaaccaggctttatggcctcggctttaaaactctagtgtaggctgtatctggggaggataagatactctataactgatggtttagatcggtttagagtataatgctaaatctgtttttacatgtgctcgttatgaggtactcagagaagtagcaacactttcccgtttgcagcatcagcatgttgtacgttactatcaggtaaaggtcctttctgctcttctgaactttctactgattaatgactacattcagtgagatatcttcaaattggataccagccacgtgtacctacatattgtcattgaatttctgctgcttagtgctattccttttgcctatgttctgtttgttaatgatattaattttcatgaaaataggcctggttcgaaacaggagttgttgatccctttgctggcgcaaattggggatcaaaaactgcagggagttcaatgttcagctactcaggtgcagtgtcaactgaaattcctgagcaggacaataatcttgagtcgacttatctatatattcaaatggaatattgtcccaggtaaagattttaaaagccctatctaaactcattatttcaccccacacatatagtgagctgttaaaacacagatgtagcgtcattgatttttgacattgtgagttataaattatttctaacttctaagttcccctgtgtcccacgcttgtccaagaaaaacttagattaaaatgatccaaaatgtctgatattttcatgaaatcgcggatcagtacatttctcctcgatctgtatagtattgttattttttgttgtcttagctttgggttctttcttgtcttctcttcttactttttttgttcatgttatgttcaaggactctccgccaggtttttgaatcatataaccacttcgacaaagactttgcatggcatttaattcgccaaattgtggaaggcttagctcatatccatggacaaggaataattcatcgggattttacacctaacaatattttctttgacgctcggaatgatattaaaattggggattttggtcttggtatgcttccctacctaatgctattatttgcttcaatttcttggtatgtctgttgttcacatgcttttctgaatagacttaaacctctctagtaacataacgaaggtaggttccttgccatgcttgatttctgctttttatcattttaaagtcgtgagggtattttgatgcatgaattttactatgttgttcaagtctttaaataaaagaatcaatctaatcatctcattatactgtgagtatttaactgtggtatggaaaacaaaaacgaaaatacatgcattttcttactttatcagcaaagttcttgaagctggaacagttggatcaagatgggggtttctctacggatgtggctggaagcggagtcgatagtactggtcaagctggtacttacttttacacagcacctgaaattgagcaagattggcctaagattgatgaaaaggttagtagctgttggtgccttaaatgcttgtatataccttttcttttggtcctcaggtttttattatttcttcttatatctgtgtgtttctaaatgatgtgttgaattgcaggccgacatgtatagcttaggggttgtgttctttgaactttggcatccttttggaaccgccatggagagacacgttattttaactaacctgaagctgaaaggggagctacctctcaaatgggtaaatgaatttcccgaacaggcgtctctactgcggcgtttgatgtctccaagtccatctgatcgtcccgctgccacagaacttcttaagcatgcatttcctcccagaatggaatctgagttactggacagtgagttctttgcagttctctatttgtgtcaacttcatatgaatgttcttggtcgtttgaggttttcatctgatctgtgatgtttttctagtaaggctaacaacacatagtcttgttctgtctccattccgctaaagttacaattcgtaaactggctgactacaattgctattaattcggacctgtcatttgctcataacgtatacaaattttgagttggtgttagtagtgtgtatgttctcttttatttgatgaaatgctgattctttcttaacaagtaaccctttcttttctaaatttcagatattctaagaataatgcaaacttctgaagattcaagtgtttatgatagagtagtaagtgtgatatttgatgaagaagtattagagatgaaaagccatcagtctagtagatcgagactctgtgcagatgatagttatattcaatacgcagagataaatccagagcttcgtgattatgttgttgaaataacaaaagaagtctttaggcagcattgtgcgaagcatctagaggtcataccaatgcggcttacttagtgattgcccccagtttagcaggtatccttgttggtatccattatctgtcactcaaaaaaccctctcgctctatcttttatcttccctctaaagaaaaacagaaaagcttttgaccaatggaggagactatgct

SEQ ID NO: 70314 - DNA, 444 bp, Arabidopsis thaliana landsberg
  unsure (1)..(444): unsure at all n locations
agaagagacgaaaatnnagctcgagttcaggatgatacgtaaaacctctataaattgcttataacccttttgccctctttatatactaccataccttggggctcggcatatatcaactgcgnnnnnnnnnnnnnnnnnnnnccgacgataatcacgagcaaaaagcaaccccaggctgatttacacactggagaaagaggagagccacacaagcaaaacgacataggttcaaaggattatattatccactcgaccgaaagcaatgactatccgaagaaaaaagtgaaccttgcagagaagctccccgacgaaccctcctaaaaggatcagattttcttggactgccatgccgctaacttgcaccctagagagtggctcagaaaacaatcccaggagttcctgaaaggaaaaaatcaaaccaggaaccaagaacaatctggaaaa

SEQ ID NO: 70315 - DNA, 392 bp, Arabidopsis thaliana landsberg
  unsure (1)..(392): unsure at all n locations
ggctatgccaggagattgtttaccaatctcagacattacctcgcacgattcccatcaaaatttttgctggaattgttataaccaatatcgcgcaccacttcgcgagtgatttgttcaatatcaacccaggcggaagtggtaatttcaccgcccactaaaaccatgccgngtttaacaaatgtttcgcaagcaacacccgccgggggatcttgtttgaaaatagctttaaaacagcatccacacttggtcagcgattttgttaggatggccttccgagaccgattcggaagtgaaaagataatcgttttgcataaagcgtcctgcagttagagatggatcataatacgcatttctgggagtgggaaaaaagaaaattgttatattttcacaca

SEQ ID NO: 70316 - DNA, 619 bp, Arabidopsis thaliana landsberg
  unsure (1)..(619): unsure at all n locations
aaagggtggtacatcaaagagagtttctctaacgcttcagtctaagaataaagcatgtggtgaaattagcagctagactacaataagacttaggggaagaagtgcataaaaccaacctctttttctctgaagacactctcaccgaaatgctcaaatatctcagctacagaagttcccttcatagcctgctcgatcaaagtgtcactggcacatttacaaaacaatgtttaagatcagctaaagttgaaccaacatccagttgaaaatgggcagacaatataccaatcaaagaatgtataaccaagcgatcttgccataatcttgcctacagtcgttttcccggaacccatcatacctaacgcattcacgaggaaactgttcaactaccaaaatgcaagagaagctaaacaatactgaaacaaaggatgagacatagaaactgaccaacaagatacatcgatcgtccatttaaatacggtttaacctcttcagcttttttctgcagaagctaatgtaatccactgtctacataagaatttacgtagagaaaatatacaggaagacaaaacaacatcttaaccgactgtctngatgtaatagtagatgagtatttagactg

SEQ ID NO: 70317 - DNA, 187 bp, Arabidopsis thaliana landsberg
tggccggccgaacgggccgccggtgatcatgctgagcgccatgggcgaggagaccgaccgcatcttcggcctttaactcggcgccgacgactatctgcccaagccgtgcaatccccgcgagctgctggcccgcgtgcgcgccgtgctgtgttgccgccaggagccgcgcggtggcggtgaaggcgcg

SEQ ID NO: 70318 - DNA, 130 bp, Arabidopsis thaliana landsberg
gtgaagcgtggatcagtcaaaccttgtggctgccaggagggcggcaattgggcgttctattttggcgacagaggcagtacgatgcccatacatgacagtaacgtgaccaatgcgaaggttactgacccgc

SEQ ID NO: 70319 - DNA, 577 bp, Arabidopsis thaliana landsberg
  unsure (1)..(577): unsure at all n locations
ccctacaagactgttttgaaacgacttttcctatcatattattacaccatgtacttttcgttttgtgggaaaattaataaaatgtaatggtatttctgtttaactagatttattttcctccaacttgtttttgtctttttcatctagacttaacatttacaaacattgttttttacaagtttaaatttcaaggttttctcttatttgttgggaacatcagtcaggaaacaactttttatactattttcaaacagattgttttgaagctaatccattgatcactttcttctctaagttataattacgtcgatccatcaattttagaatactccaaaaacaaaaattataattggtcatcggactctgctattccaccatatatagtccattgtaattttcatttaaatccaatatgttggacttatataagacatagaagtacgctgatccacataagaagtacaaaacacacctgaattcaatatataaactctttacacttactttattcaaaagaaaagtgcttaataagagaataaatatgaatagagcttaatangagaatagatgaagatat

SEQ ID NO: 70320 - DNA, 548 bp, Arabidopsis thaliana landsberg
  unsure (1)..(548): unsure at all n locations
gagcagcagatagtaggtgatcgacagtcgcacatcgccagcgagggcgtcttcctgcgccttcgtcgtttgaattggagccgttctctcgtccgtggtggccagttcgannnnnnnnnnnnnnnnnnngcctgcacaggcacaaagcttctcaaggacgcccacagttataccgcgccccgccatgtaccgtttgatggacttttcgctgacgcccatcaaatcggccacgtccacataacgtaagccatgggcgcggaataaccgtttgatctgtgtgaccaggcgagccgtcagcgtttcggatacatgcgcctcagtttcacgcgtattcgccaccatattgcgtcctcccgtccgcgccgtaatcaccacgccacgtgcaatactttaggggtcatgttgcgggtctttttcttgggcccccgatgccgtcgttttccttccctctactgtatatcttacctgttttttgccgacgggataagggggcaggggacgtgatctgtccccaaccctctgtggaaaaccacccgttgaagtgtccc

SEQ ID NO: 70321 - DNA, 597 bp, Arabidopsis thaliana landsberg
agaaggctgttacaagtgtgttttatgaccgcgtaccggttcactgggtaatggaggtggcctttttgttttctgcttaacaagcttttgagagttgaagagaggaatcatcaggggagattagaaggacatggagattcgacttatccgaaatactgcctattcgatgatccgttggtgagtgatggaaagtacagagatgcagggttgccatcctcttcccacatggaggtaagaccgatcaatataatttaggaaatctatattttctgtgcaacttatcgccctctttgccacattgctattaggtccctcatgtacatcagttagcttcatgggattgcggtctcgcttgtgttcttatggttctcagagcaagtggcatcgcaagctgcactcttgaggatttggctgagatatgctccacaaataggtttgtatataccttaataaatggtcctcaacagtgtaatcccattatatatattatgtgccctatctgcttcttcaagatgagaacattagatctcaatacgatacttatcatcgacttttgacatttctgcagcatttggactgtcgatctcgcatatttac

SEQ ID NO: 70322 - DNA, 197 bp, Arabidopsis thaliana landsberg
ttcggatcggaatattcgtttccatgcgcgacggagactgcgtaccgatcaaaaagtggaagtctcatcacactatttgcattagtacactacgtgaagaatcaacaactgaaacatggagagtatatgcaatcaacagtcaaaaactcagtctcggcggattttttaccagatcggattcttcttcttatttatct

SEQ ID NO: 70323 - DNA, 608 bp, Arabidopsis thaliana landsberg
  unsure (1)..(608): unsure at all n locations
aattcatacaattttaatcattagactaaaactgttttcttatttctaaataatatatataaaatgtttctaaggccattgttgcggggatgactttcgtgaactatctacctaacgtcgaagtatggaaccttattacttcggtcagtggacaacgtttcaccgtcctaagatgtgatctgtttttaacttcacctctctgtttttgtctttaaagttgggttggcattgtccataaatttcagtttccatatcatttttcataattactttggtttgatttatatatttaacatttgaacatcgacaacaagaaaaactttaaaatgtagtttgaagtttcaaatccaaacttcttatgattaaattttatgggttgttcgcataaaattcaacatagatttgcatacgattactataaaaccccattaaattttcttaggagttgaaaagatcaacacaataagtaaattaaaaaaatcatcataccacacaaggttaatcactatcagccgaaagttatgtttctttattacttcgtacaagtatcttcttatacacgtaaactaaatntattatgtatctgaaaatagattgccttaaaaaga

SEQ ID NO: 70324 - DNA, 508 bp, Arabidopsis thaliana landsberg
gacggttaaaaagtgaaagcagtggtggatctttgctggaatctccaagtcctaagtagtagtagtagtactattatatataattctgctgtttctgcaattgacttttctctggcttttctttgccacgtgacgattccgttttttactttctttcttttttttttatcaatttctcagacacatttgatgaacatctcgctctcatctaatcgttaactatttttattggggtaaatgtctggatttgtcttacctaaacatgttttaagactgatgtttatgcagagtgaaaacagtaaataatttaatgctttattcaatccctatgcaatggatctaacttaacggcgccaaccagagagttttactaactgttttttgctcttagctaatattcctaataaataaaaagactgccaataataaaatcggaccatctttattctcctaataaataaaagaagctcaaggtaggtcccctcctacacttttctgactcccttat

SEQ ID NO: 70325 - DNA, 521 bp, Arabidopsis thaliana landsberg
atacatactataatatattatatttgctggccaagatatagtataatatatttaaactgaaaaatggagtagaattggtgaagtttaagtcaacgaaaaaagagagagaaaggggaagctaatcttcttcagagtgcgagtattctcctgcgatttaccattgctcatatggacgacctgattcttccacgttctataatctttctactactttaggagtatattgtactcatagacttaagcaactgagcattgatctaagaaaactacatacttgattaagcacgggttatgaataaattgaactgaccgctttagagggtctgtagttactaaccacaatcttgattcttcatataaagatgaagaggacatatggagtacatacctaggatttgaacttgcgcatattttatagatttcgtgccaaagggtgaatttagtagttactttcacttcatattttccctacctgtaaaatcctgaatagaacaagggtactgaagacattatagaacaca

SEQ ID NO: 70326 - DNA, 330 bp, Arabidopsis thaliana landsberg
  unsure (1)..(330): unsure at all n locations
tattcgaagtctacttttatacgatagaagtgtctactttagttatagattagttactgatctatctgtctatgctatgaatttgctattgagcaagtctaccaattattatgtaaaccaaccattacgtacgtaaaattattgtgttattaacattttgtattctttnnnnnnnnnnnnnnnnnnnnnnnnnnnnnnnnnnnnnnnnnnnnnnnnnnnnnnnnnnnnnnnnnnnnnnnnnnnnnnnnnnnnnnnnnnnnnnnnnnnnnnnnnnnnnnnnnnnnnnnnnnnnnnnnnnnnnnnnnnnnnnnnnnnnnnnnnnnnnnnnat

SEQ ID NO: 70327 - DNA, 615 bp, Arabidopsis thaliana landsberg
ccttttgtcttacataagaacattgttgaaacgatgctaaattttaatatggtatttggttagtgttgtaaataatatataatactaataaattgcatattcacaggactgttttttcgctttaaatctgcattctatatatataggactataaatcttaataatctattcatattttactaaaaaacattttaaaggcttgtttttttaccgatttgaacaaacctgttacatcataatgacaacgttggacactaattaaatctaacatctgattaatttccgacaaaccttattggctgcttcttaaagcactaatatatagctttttaatttgtatttccagtaatatatgcttaagtcttaacatacaaaaggtaagagcactgagcacacatattcatagttgaataagagatccaagtaggatgcatacaaagtgattaaaaagaacaattcaatcaatcgatactgtatttactttgataggtgtatagaaaatatatgcgagtcgataatatatgcgattcgatgtaaaggtgctatcaccatccaacggtttcgtcgaaagatcaaaacaaaggtgattctatatatacactatttcccctaact

SEQ ID NO: 70328 - DNA, 1160 bp, Arabidopsis thaliana landsberg
ggataagccccttgatcaagagccgatgcttgcagctagagtgtacattgaggatggtctttgtctcctccttgaagttgatgatatagatcgtttcttggagtttaaccaactccaggacggaggacaccagttgaaacaaagacgacaagcattgttgcagagccttgcggtttcacttcagctcggtgatcccctcgccaagaatgggcaaagccagtctcttgatgattttctctttctaagggttatctctcttccaaagggtcgaaagctacttataaggtatcttcagctaattttccctggcagcgacctaatgcggatagtttgcatggccattttccgtcatttaaggtcattgttcggagtcctttcatctgaccccgatatcatcaaaaccacaaataagcttgcaacagttatcaacttgtgcattcaaaacatggagttaggaccggtaagcacgtgtctagcagcggtgtcttgttcttctgagcaggcaccgctccgccccttaggcagtcctgttggagacggagcttccacagtattgaaatcaatactcgacagagcttccgagcttatccgggctaataatttcaacaacgcagggatagctctatggcgcgcttcctttaatgagttctttaatatgttgatgaggtactgcatcagcaaatacgatagcatcatgcagagtttacaattgccaccgcattttgccactgagatatctgaagaagctgcaaaagccattgtccgcgaaatgccaatagagcttctacgttcaagtttcccacacattgatgagcagcaaaagaggatactgatggagtttttgaaacgatctatgctcggaagccagaaaaccgagccagtcttaagttgataggatgaagattgaaacagtaaaatcaaagaaactgtatggtgaagtctgtatatgaaggcataaagatcaggcagataccgcgggaagaaaggtagagagaatcgattcaaactatttctatttgcatcagagagttaggattcttccttcaaatggacaatactggttttgtgtcttataggtaaaagcagcggagaagaagtttggtctctgtacagagaaaaaagtctttaggttttgcagaacttataataggtttcaaaca

SEQ ID NO: 70329 - DNA, 1801 bp, Arabidopsis thaliana landsberg
tcttaaaccaaagtggggagaaacggcaaatgaaatataggaagaagacaagttgtaagtagaagacaaacaagcaaagtctgcagacaattgtgcaactcaagatgagaaaccacgttcgtaatcatgctaaacgttgctgctcgcatgttgatattttatagaccaccgatgcaaatcatgcaaccgtgaagtgatgatgaagccacacgccatttctgattttgacccgaatttatatttttaaacaactaggacatttcgtcgagacgtccacgtcagcagccaaaccgcgtgccaccacccctaggattcaaacaaaacagaagtcacaagtcgccacctttctctatgatgtttccctcttaaaaaggccgatcctttcacaagtttttagatcaaagtctacgagaaacagagagttttctaacgaacccaaaatacagaaatgtgtaggtcgcccgatttcgagcgttatgtcgagaaagagagcttaaaggttaaagctttcttcgtccggttcacaggtttacccacccgaggattcttaccggattctctcactcttctctacccaccacgaatcaacgaagctgctttcgagcttgatgggtccaagatccgacccgattccccagctttcgtgacgcttcacagagtcgtgaaaggaggagacgtgatttacgggtcaagagaacgtgttcgggtctgggaagggatccgcttcgaggtgtacatgagtgaggagagggtgataaaaggtattttcagaaaagacgaaggagacaagtggaaacttgagtgcgagtgtgagatggaagaggaaggagcggcggaagttgttgttgcggcggagggacacgtggcaacagcgacgatggcgaggaaacatagaagaaggagaaagcaaaagattgggtttgagtgtttggaggagataccggaggagagagaggaagggagggattctgacggcggcgtgtgtttttgcacgtgtagcggcgaatctgacgacggagagggagagtgggaagaggtggaatggacggctgagatggagtctgaaacagaaggaatgggatgggccgtagatttggggatttgggttatgtgtttgggtgtgggctatttagtgtctaaagcctcaaccaaaaccttgacaagtgggagaagaagaaggacaagaagaaccttcttctaattccttgtgtaatcaaacaatcagtgtaattgtacaataacgttggaacataaatgtaaaaaaaccatgattttgattacaatagtcgagagttcatttttcttcgaacatagagcaatgaactttctagtttcaaattttcaattgaatcctctcaacttgaaaaaataaggtaaaaccagaagataatgtttaagaatgtgatgaaaacacaaaagtacgtcaatcaatttgcatttacaaattacaatacacaaagaacccaaaagaagagctttctcctttatctcactagtaaattatgatacaccaaacaaaataaaacaaaaaatgatcaaaacgtgtgataataaatatataagcaaatatatgtggggttgagaccccccaaaggaactttcttctccttttcttttatttctgtattcgtttctgttgtcttcaactagtagtttacatcagaagcagacatcggtcgtatcttgttttagtcgtcattgtcatcgtctggaacctacactgaaaccaactaaagaaattgatatgctctatgcctcactgtctctaagctcttgtctggttattactggtataaccaaa

SEQ ID NO: 70330 - DNA, 478 bp, Arabidopsis thaliana landsberg
ttgaacctagactgtagggtagtctagccgatggaatagagagagtcatctgatgaatattatgaatttgagaaccaaagctgatgcatcgatcaagccaaacgagggtaatagtctctgtaggaggtgattctgttgcggatagtacagtcaatcaggcgaagcacagtatcctctgatctgaaaagtattaccgatggagccgattgtttagatcaccctagaggaagagccggagagcattgtcaagctagaagacaaagtcttctcctatcttttggaccttgaagggcttgcatctgggagacagaggcagaccatgagcggagaggttggaattggggttctcaaagcaattgatgaccaaactatccaagacagatagctctggcagaaaacgtgatcacggctttcaggagaggagtcacagagcatgcaaactggatctgtgtgaaagctccagccaagtataccgcct

SEQ ID NO: 70331 - DNA, 459 bp, Arabidopsis thaliana landsberg
aaggggtcctttgggggtctttcaaattagaaccacatatgatttttgactaaaataaaataatatcagcgaatatgtcggctacaccaaaatttcagcgtgtaatttttgagttgaaacaaaaatttatgtggaaggtttggatcgtcaacggacggttctaaatatacgacaatttcgtgatggacaagctttcatcgtaacactcaagaccactaccaatgattttgcatgcggcattctgaatctttgattagttctgcacttcaagaatttgtgttttctaggagttgaaccccaaacctagagtaaaaatattaatccttgatcaaccactggaccatggggatttccatgtttcctctgatatcttatataacttcttcttattattctggggtttagtcttttagatattcatttttaccttaccatcatattatcatatgtaatattttg

SEQ ID NO: 70332 - DNA, 2393 bp, Arabidopsis thaliana landsberg
  unsure (1)..(2393): unsure at all n locations
aacctctgtgtaacccctgtgccagtattggttcttaatgaagtccatcaacctgttatatacacgagtgccgagtggaaggaagaaataactcncagggctgaagctcaaggatggagaatagatattagtaaagtgaaacacaaagaggaaaccacagtatattagcaatgaagtacctgagttgatgactaaagaagagttcctgcttttggcccaatagtctgtggtcatactttttggcttcttctagaaattggagatatttctgtcgaccaaatgatagatattatgcatacttatgacacagcgtagctgccataataattaagatattttgagtaccttcagctgcttctgatcaggataagatatcccataaactctctgtaagctctcacggtctttgtcacccttccagtaagctgatgaggcctgagaaaaatatattggtcagcataagaaaacaaactagaatctgtagagatgtagctcctagagatacagtagcaaatcaccctcaaacacttgaacgctttcacaaaggaagtatttggtatgtgcggtccacgacacaaatccaccaaagggccacatctgtagacagtaatggtcatgtctgcaggcaaaccattgatgagttcaacctacatgattaacagcagaataatgagtccaaacaacaacttcatagaggacagaaatgaatgtaaggttgagcataacacaatccaatgatatttatacacagcttaacccaccttaaaattattctcagaaaacatctcgagtgcctgatccttcgtcacttcaatcctttcaaatggttgtgcttcctgagatgcaaatagaagcgaatcaatccaatagaaactatggctaagagttgggagacatatatcaatcatttttcactaaaaaggtttgacaaaataagcaaatatttaataacatacattgtaagaaaccttaaaaataatcgaatcaaaaagaagaaacaacaccttagcagcttttgcagcacctgcttcgatgctaggaaagtgattgtcactcaggcccaattcaccataaaatccatcatagtagaaaccctgcaataacaaattcactactaacatcagcgatatcttatttacacacaacacttcattaaaataccaagaaacacccaaacagagaaaccaaacttcacaaatgatggaacatgatatacaaacaagtaacaattagcacaaacaagctcctcttacctctcctctcgttgtgcatggtccaatgcacagctgacacccatactcctgctcgagagcctgcaccaagatcaaacccacacccacagtaaagaaatcgttcgttcaccacaagcagaactttcacaaatcagataagatcaaaactcctttacctgaccaagaatgtgcgcactagaatgccaaagagtgtcacgacctttatcactatcaaatttgaaaagctcaagcttacaatcaccttccaatggcctattcatatcccagagaacatcatcaacagcagaaatcaatgcagaattagccaaacccttagaaatctgagcagcgatatccatcggagttgtctcccatttctttccttctttcacatttccatctggtaacgtaaccctaaagcacacacaagaccaaaaaatcgaagtcaatcttcaaggaaacaaagtaaaaccgtatagatacaaattacagtgatacataaagaacatcggcatcgtattttacttgatcggatcgtgtggaagagacttaagattctcgagttgattcgcttggatctgctcgaaaagcctgatacgtttggggatgacggcggagagatacgctacatcctttggatgattagctgccattgttgaaacagtacaatacgaagacgatgagagaaatggtaaggacgaagaagaagttgtgaaacgacgaatagagcgagccgtaagacgaaggagcatcaaaatctcttgtcaaaggtttatgttatctgagtgtgactaggttttttttttcctacggcaggggtgaaagaaaacaaaatcgaaccaaaccggcctaaaattgggtgatttcggtttgctggtttttgaaattgattgttaaattatctcgttaattctcggtttagaaaaataactaaggtttagccagtttagtactttttgtttagagtagtaatggtggaagtggaatacttcttgaatttttcacaccaaagtcaaattttttctttactttaaataaagaatttatacactgaaagtgaaactactatacaaatatttcaatgtaaaagctccaaatcaatttgagagagggtcgaaggagaagagtcgtctttgttcatcagtgggaattctcagcaat

SEQ ID NO: 70333 - DNA, 587 bp, Arabidopsis thaliana landsberg
  unsure (1)..(587): unsure at all n locations
tgattcaatgttacactcttataaacctaacccccaactaaaaaaatctgattttcccagaaacacacaaaaatttgagaaacttatttgactaaccgagaaagtgggcattgcgagaacatgttgagaggagactttccttgagacaaagcgtgatcaatgagtcctaaacgacaccgtttgttacgagcgtatgattctacgtctccggctaaaacctcgtgaccagtctcgacacatctgagccgtccgtttccaagatcaacgaacgtcggagacccaaacagactcttcccttctttcgccgtcttcttcatcatcgtcaccgattcacttaagcttaagcaagcatagactctctctattgttcgnggacaacaaaattgaaccgaaccgacacgaaccaaattgtattcaatttaaaccaaccaagttttgttttggtggaaactatagctctaccgaataaatttaaccgaatgcaaccactagacattttaagtccaattggtaacacattacaaattttttggtcattaacccaagcgggaaatttttaaggaatattgtaaaactatgtaaaaaaa

SEQ ID NO: 70334 - DNA, 647 bp, Arabidopsis thaliana landsberg
tatctaaggatgtttatctcgatcgattgtaattgctaaatcatgaatgaaagtttagttgttaggaaaataaccccaataagataagatcgacggcgtttttagaaagaaaccatattatagcatatcacaaaaccataacatacaccacataaataattaatatattaatcttttcacttattagttgtttttagctttatgaaaagaagtaatacgaatctatattatataggtttaaatgacatcttatgtacattgaacttcaacaagtacaaaaaaacattgaatcgtgtcccgtaaagtgtaaattctatggaagtggtaacatggttatcatcatctaatgtctctccaactaattaaaaagtataattgatattaaaatatggataatatataatcataagagagtcgattcatattggaaaaagatatatatagacatatgacgaatttgatgtaattattaatatctatagaattttgatactatttcgtctgttcctgcacctaaatgcgccatatcccatacatctccatctagaacctttatagaaaagagaatagattcaaaattataagactttaaattttttgagattggaagagttataaaaaatgattggatatccaattatatcaca

SEQ ID NO: 70335 - DNA, 371 bp, Arabidopsis thaliana landsberg
  unsure (1)..(371): unsure at all n locations
gnnnnnnnnnnnnnnnnnnnnnnnnnnnnnnnnnnnnnnnnnnnnnnnnnnnnnnnnnnnnnnnnnnnnnnnnnnnnnnnnnnnnnnnnnnnnnnnnnnnnnnnnnnnnnnnnnnnnnnnnnnnnnnnnnnnnnnnnnnnnnnnnnnnnnnnnnnnnnnnnnnnnnnnnnnnnnnnnnnnnnnnnnnnnnnnnnnnnnnnnnnnntttttaactaatttaatctattaataatatattaattttataatttttataaaattaatattattctatataattatttatttttaaatataaaaatcaatatattactattttttattttttattaattttattcttaataatatatataatttattttaaattt

SEQ ID NO: 70336 - DNA, 141 bp, Arabidopsis thaliana landsberg
aaatagttagtttatcttcagttttctgtatattgaataacattatcaataaaattagccttgttggttatgaccaatataacagagtatgataaagaattatcttagccggactcttatatttaattatagaatctataa

SEQ ID NO: 70337 - DNA, 566 bp, Arabidopsis thaliana landsberg
ccgcgtgcctttgcgatttccgcgatctacactatcccgatctgtggaaatgtagctgctcgtgctgtacaatggacgccacgacttctgttactctggcagtaggcagggcctatttaaaaacgctagcgattgccgtggcaactgccgtatcggtgtctaaaacaaaagcactgctcagcgcactatcgataaacgcggttacttctgctgtgttgtcaaaggctgtaaccaagacaccacttgttatacccgtcgcatcagtcctattcgttgcgaaaagaggggtaaaggcttttgccatcagcgctgttaccagcttggcagccaatcggtataattacagagcgtttactgtaactgcagctactacggcgtcgctggctaaggctagatcagttgtaaaagcgttagccgtagcagcgacaactgcggtatcgttatccaaagcgaaaatactgctaaaggcgctgtcgattaattccaccacttccgctgtgatggcgaaggctcgcgggaatgtgggttccattgatgtcctttacttcgtagttcacaaacgtgct

SEQ ID NO: 70338 - DNA, 487 bp, Arabidopsis thaliana landsberg
attgctgattacattttgcagcaatgtttcagatttgttgatgtaatttactaacgcgaatatcattttgtttttcaaacgcaaaacctaaaacttacgtttgtaatcatggggtaaagtaaggaagaacaagtcgaaccttgattaggtcggatggacggaaaccagccatccaaataaaacaacgttcggctggggacattcatgtcccaatgatgaggtgaaaaacatcggctttcgctgccacggcttttaatcggaatatctcatctaaatgagcaatgtaaccgtcaacgatcaaccttaaatcattgtcagataaatgagcctgaagaccggttcgaatctccgacatatgccgggtatgatcctctagccatctcccatatttcatgtcaaatattgcagctcctacgtacattcgattttcaacattttgataataatagtttaaccattattgtacttattctaatacaataataca

SEQ ID NO: 70339 - DNA, 794 bp, Arabidopsis thaliana landsberg
atcataatatatcatctatttctttaaaactcgattaatgcactattagcggtaacgcaaattactggcaaaattcaagttattataatgtttctctcaaatatttttgtttggctgaatgagaaagatgtattagacattgtcttctttagacattatatatatttactagtactaattatagtaaatatacacacgtatacaatcggagtagatgcgcatgttaattaccaaaaaaatacgattaagtgtgccatcatctccgttaatctagggttagctggataattatcatttacgttttgatgatgacaaaaaggataaagaacaaaaaagtacatactaatatatacatatatgtaaggttaaagtttgtttgatgagtgcttaaattcgatattctatttaaaattatatctctattcgctaaggattcaaattcaaataagagaaaaaaaataaaaagtaaattatgcccaccccaaactttgctatatatacaagaaatatcaccttctctttaaaaccaattaaagagacgcatttaaaagcaaatgaccaacaagcgacttcaccatccatctcttacaaccctccaagaacactggctgttttccttcactttctagacaaaacaaaaaccctcttcttgagaaaaataaccaacctgggagaagacagaacccagggcaccaaactacttaacccctagatatattatctatactaatattatcggcccatgggtaacggagacaaagtcatgagccactggagctttcacatcccacgtc

SEQ ID NO: 70340 - DNA, 356 bp, Arabidopsis thaliana landsberg
  unsure (1)..(356): unsure at all n locations
acttcacatccataacattgtatgagcttgaaactttacctagctcccgattctatggcagctttatgcacttttataccataaagacctttgcctccgaaagccggaagaagagcaggatgaatatttagaatccgtttaggaaatgcttggaccagctcgaccggtataagtttcaaatacccagctaaaagaacaaagtctacaccatatttcctgttcatcaagttgagagacatatagtgaactttcaacaaagaggtaaacacattcacttccaagggtnaagataccaataaagaacttccaagagatatgctaacccttagtacatctacaagctcttgaaggagaga

SEQ ID NO: 70341 - DNA, 601 bp, Arabidopsis thaliana landsberg
gattttctacaactcctataataaacagtggattgttttttttttctctttttttttcttaaggtaaagaccacggtccgtgtctgtatttgttttcaaattttaaacatactccgataatgaaagaatggagtataatactatctcgtgtttcacgagatacaactttatatgcatgatatcggatcatccaatgaatcatattatatcaataatttccccaaaaaagtaatcgttataactgaaaagaaaaaatgtaatcaacatgttatcagttatggtggtcaacagttggaaccatggttgtatcatcttagagcatatttcccaattaagacatgtctatcagataagctgttgcttacaaatgtattaatgctatctaacaagtaacaagggtgactgggtgagcgacaccactcctctttatgtggatactggatacgcctttaatccatatcacatgtttcagctgcagtctagaattttcagataatataaagaaaaagaaaaaagtcaaaacaatattaaactgtagtactgaataaatctttttgattttttttttttttttggcgactaacagaatgaagttatcttt

SEQ ID NO: 70342 - DNA, 3677 bp, Arabidopsis thaliana landsberg
gatactcgatacattaacatataacatagtggccacctttttttatttcgaaagattttgtctctcaagggcaggggccgagaataatgtttaattacaaatgtaatagactaatacatgtttatgtacattattcattaccattgaccaatatcaaatcgttacagacgaatatttctaattaattatttataatttattcatctttattattttcgttataggttttgttaagttttttcgtcttacttcacacccacttataccatcgccttgtccatgaaacaatttatgagacctttagtagtttagggcaaaggcaaaccgcgtgagcatattaaattatagtaaccatgtcaacgtgaaatctatttttctttttataaaaggtcaccaaattatagagagacgttcaaatccactactttgtaccttagaaatgtgcaatcatattgcagggatgttcattgttcaatcccatcaacttgtggctatatcctcgtcttgtcttttcaccgtggtcgtattatagaattttgaaactaaagatatagatagaatagcactccttttcttatgtagtcattgtttgttttttatatcgattaatctttcattttcccaaaatgtactataactaaagaaagataacttgtttacattaccaacaataggaatgagactatttgtaactaacatgttaggtctttatctgagaaaattctgactttgacctctttagttctaccggttgctaaaagaaaattaattgacctacatagtttttgttttataaacaaaaaattcttttaagctttaacaaaacaaaattccattgtgttgttgttaatggagtgatcagtaattcattaaaagatcggaacaaaagttctagtacaacaagagggcgcaaaaagcccaagatgagaatttaaagcccaacagttttaaaaataaaagataaaaaattttggattgtcccggaagttattccttttgctgctcttgacttgaaagttataaaccctcacgattcatccttaaaccctaagcctaaaccagaaacgcagaagccctgataatggcggatccgatgaaccatagcaccgggcatcaactacagcagaagtaccgtcagtacaatccttaccaacaagtcaatcttccgtaccgtaagctctacgaactcccaacttctcctgagtttctcttcgaagaagaagctacgaaaaaacgcttaacatggggagagaacctcaccttcttcaccggttggggttattgcactggatctgttctcggagccttcaagggtacaattgcggggatgcgagccgccgaacgaggcgaatccctaaagatccgaactaatcggattttgaactccggtggactcgttgcaagacgcggcgggaattgcttaggatccgtagggttgatgtttgctgctatggagagcggtgttacgtatatgagagacggagacgacggttcgttgacaactgtgatcgctggtttagccactggtgtgctttacagagctgcttctggacctagatccgctgtggttgccggagctgtcggaggagttgcggctttggctgcagttgctggaagacgcatcgtcaagcgattcgttccaatctaatgaaagtttctcaacctctcaaggttagggtttaagaactagtttaaaggagcgggcttttagatagtgaatcattggtactggatttagggtttatgaattcaatttccactgtataaaagttgacatttttattgatctaattgctcaatccgactcaactttttgctgattttgtcgaattcacgaaattgaaatgatctcacataaaaactcaattgataattttacaaaggagaaaaatttgtcaatcaaagaagaagagaaagattgaacttttaacctcacttggtcataacttcaacgccattctttccagcgataatgacagaagtagccattccgagaaacagaccatgctccaccactccttgaaacttcccaatctctttagccgcagcgaatccatccttcaaaggagtcttaaaatacaaatcaataatgtaattactgttatcagtcacataaggcttgccatcaccatcaactctaagctttgattcacatccaaattccttgaagagatcttgcaatctaatcaaattaaagttccagcagaattgaacaacttccaccggcatagctaatccacttccaccgagtcctgtaacgagtttggtatcatcagccacaacaataaacttgtcagccacagcttccaccagtttctcacggagaagagcacctccacgacctttgactaaatcaagattcggatctacctcgtctgctccgtcaatagcgagatcgattctcggatgtgtatctaacccaacaagaggaatccctatcgaccgtgcatgttcctccgttcgtttcgacgttgggatcccgacaatatcgtagagttcaccggaatagagtagtttcccgatctgatctctagcgacaggtgcggtggatccggttccgagccctagaaccatcccaggtttaattgcctccacagctttctccgccgcgagcttcttcaaatcgtcctgtgaaagcgcgacggattgagccttgacggagaatgaaacggaggttcgaggagaagagccagtgctgcgtagggcaatagaaggagtgcgtagcgtaaggtgagaagaggaaacgaaggataaggaagccattggagagagaggattgagaatggttggagaagaaataaaatgaaatcgaaaggtttggtttttgacttttgagtggaagaggaaggtttagtggcaagttatagagttttgtagttggtttgagggtagtattggaatactagttttaaggttgttgtatttgggttggtgaagataataacctgctagaccaatcagagtgttaagtatacgatgtcgtttttgtttctttgagaacagagttatataaaaaccttttttggtttggtttcgtggagagtctaattattttcttccactttctcgatctttgagatttctttcaaaggaagaaaaaaaaaaaaactcgcgatgtccgccgaatcagctagccaaattcctaagggacaggttagttaacgaaactttgttggtttcgatggttttcttcaatgaggaattcaattcttgggtgggaagattatctagggttcttatctgttgttcgaatcttgatttgaagttttctgatgtgtctatatagttaatcgattctatctaagttttggttgttgtgtttgattatcaggttgatctactagattttattgactggtctggtgttgaatgtcttaaccaaagctcaagtcactctttgcccaatgctctcaagcaggtttgttattctcttatgttccatatctttatgtagttgtatgtctgtatacaagtttttgttattggtgagttcttgaaactgtttgtgtttgctatgattgtctatctgtaaaaaacttatgtgtgagtttatgagatttgatatagatgattgagtacaaacttaggttttcgtggagtgatattgcgtgccagcctgcttttgaatttatgattacctgtttctattggtgttttatgacctgagaaggatttac

SEQ ID NO: 70343 - DNA, 604 bp, Arabidopsis thaliana landsberg
  unsure (1)..(604): unsure at all n locations
nnnnnnnnnnnnnnnnnnnnnnnnnnnnnnnnnnnnnnnnnnnnnnnnnnnnnnnnnnnnnnnnnnnnnnnnnnnnnnnnnnnnnnnnnnnnnnnnnnnnnnnnnnnnnnnnnnnnnnnnnnnnnnnnnnnnnnnnnnnnnnnnnnnnnnnnnnnnnnnnnnnnnnnnnnnnnnnnnnnnnnnnnnnnnnnnnnnnnnnnnnnnnnnnnnnnnnnnnnnnnnnnnnnnnnnnnnnnnnnnnnnnnnnnnnnnnnnnnnnnnnnnnnnnnnnnnnnnnnnnnnnnnnnnnnnnnnnnnnnnnnnnnnnnnnnnnnnnnnnnnnnnnnnnnnnnnnnnnnnnnnnnnntttatttttttatcttttttttttcattctttttttattttatttttttatttactttatattttattttttttttatttatttatttttaattttttatcttattcattttttataccttatattttattatattttatatttatttattattctttttatttatttaatttttttaatcactttttatgtatttcttatctttatatcatttctattattatattttatattatttatttatttagatattctttt

SEQ ID NO: 70344 - DNA, 123 bp, Arabidopsis thaliana landsberg
tgggcaattcctgcgggaacgatatcacctgaccaaaccatcgatcgctaccaaaggccgaaccgaaaaagggttttccaaccttcttgaccagacacccaacaacagcccacccccgctata

SEQ ID NO: 70345 - DNA, 415 bp, Arabidopsis thaliana landsberg
  unsure (1)..(415): unsure at all n locations
tgtttcgtaacttagcctcgcttctatgctctcgtttatcaggttaaaagaccgttgcaatcaccggtgtaaaactgtcacgtgtgtgtaccatagactttttcttaccatctagaaagtttattgagagtataagaccgattttcacaacggccaacgccggttagttgcaaacacccccggaacaaaagcgagcgtgataacgacttgaaagagttcctacgcactactaagatctaatagagttccaggaagtacagatgggataatcggatattagtggtctgagactgtgtaatctgcaatgggcaagaggtatacatcaactaannnnnnnnnnnnnnnnnnnnnnnnnngtacctctttagacgcgttactattggctatggtgatgatacatcagttcacccctctc

SEQ ID NO: 70346 - DNA, 158 bp, Arabidopsis thaliana landsberg
aaaagacctaaaatcttgggtcactaatgtaatcatatcatacaaatttcccatttctaaacataacattagaattccttggatgagtgttcggattccggactatgtgtcgtatcttcctttagtatttccttttatcgtactattcaactatcgtc

SEQ ID NO: 70347 - DNA, 257 bp, Arabidopsis thaliana landsberg
catgaattacaactgaaatatattacaagctattcatatcaaatgacattaccaatttcagttaatgacatatttatctataatatacaaatgatatgatgagttaaaaacgttagatacacaatgtagttgtcgaacatcacaattcacaagcaccataaaccttcaataaaggacatatgtatctatccttgtggttgaggtctgtaatagagccacatcaaacattgtagaaaggaggaacaaacggatttcgt

SEQ ID NO: 70348 - DNA, 609 bp, Arabidopsis thaliana landsberg
tttgacgagtttcatctgcttattagacgcttctgacattttgattttaatggattcctagctcactagtttagagggttcggaaaagaaaattatggtttggctatgtatcttttttacaaaggatgaatttgttgctttctattgtagcaaaacaggtgtgtctaaacttatttatattaatcaattgttgtttctgggttgtttagatgcagatatattttgaaaagtattgaatttcttaataaagaaaaaaatatttttggctatgtaaggtatatgtaaatgttcttctccaaaaatatatatttgatttaatctatattttatgtattgttatcaaataattaattaataacaactttaaatatttgtttccttaatcttacatttgctttccaaacttgacaaaatagtagatttacttcttcttttgttttaaattatgaattgttgccagatatgtgatattattaccatttttttactaataaattatatttaaattgacatagaatttaattaggatttgggaccaaatatgtcatattatttaccaataacataattgttttttggtagattttgaatggctccatttctatcttt

SEQ ID NO: 70349 - DNA, 1218 bp, Arabidopsis thaliana landsberg
ttttcggctgatgtcatgaagttatttggttatcctactgggcttggcgctctccttgttctgtttggtgcgtaaattgttccctaggtttatctccttctgtaaatcttcacaaatcaaatctgactgtagttcagaaacattctcgttaaattcattacttagatcagagtatttctgttgttaagatctccaatattgttttcattttattcttattccctttgagataatttctcaaacaagatcaatatgtatcatttaatgaaacaaatattgcaaatgctagcttctgacatgatttttcccgttattataatctacagatgcagccaaattgctcaaaaagacttattttagtggaggtatgcatctcatttagttgtgtaaaatggttgaatttgtatggcatttgatgaacataatacttacaggcactgttgctgcttcaattgctgacatcgactttgtaaaaagaagggaaagggtggaggagttttttgaggatggttctgcttcattcctgagcatagcagccatccgtcatggcttcaaattactcaagtcgcttacaccttctgcaatttggatgtgagtagaacttttgctccgtgcagggtctccaatatttaaattagtcgaaatttttaccttggaagatagtctagtaggggcattgtctttttttagagactccatggtgttgatttttctttgaaattttcataagtttaaagttccctccaaaccatctgctattgtagaagctaaagtgtattctgtatctatttactaggcacacaacttcactttccatatatgtgaaaaagaagcttcaggctttacgacatggaaacggggctgctgtatgtgttctgtatggcagtgaaaatctggaggtcagttctttcatgattaaaaactagtttttttctctcatattccattagttatagggcttcatctattgagtgaaatatatgtttcaacaaaaaggatagcaaagagcataggaagaaaacaagtatctatcgtttcatatttgaaaaatatcatatcatcatttactttcgaagtcacataaattacttcttcgtgtgaccataatttgtgactgattctacgttatatgttacagttatcttcacataaatcaggcccaacggttacattcaacttgaaaagacctgatggctcttggttaggctactatgcggt

SEQ ID NO: 70350 - DNA, 463 bp, Arabidopsis thaliana landsberg
atgaagatgatggggaaagataccgtcgtaagcaggcattttatctttcccataccatccatctgcatggaaaaccggctgccgaggtccggtaaccaggctgcgtcaaaaacaagctggtgactgggataaaagaacacccctgcaatggcgatggccaggcttaccagtgatgacagcacggcccatccttttacggttgcgctctgcttcatgagaaacgctgccaggccggtgatcagaggggtcaatatgagtaaaacagggatcatctgttatccgttaaaatattttactgaaaaaacgggcgatggtagcatcgttgaaccatatcaggataaacaccaccattgccagtaccattacaagtatatagttgcctacctgcccgctctgcagcaagcgcagctggcgcgaaccatagcttaccagtttaccggcgccattcactatgccatcgatg

SEQ ID NO: 70351 - DNA, 161 bp, Arabidopsis thaliana landsberg
tatgtgtctttgaaaaggttagtgacttattatatcttaatcttaaaatcttaagaacagttttatgcttctaaaatgatatcttcactgctgggggcctttggtatgaactctccctctgcactctgccctactcgctcactcccctttactctcccctc

SEQ ID NO: 70352 - DNA, 740 bp, Arabidopsis thaliana landsberg
gaatacaacgatggccctgagctctggccaaaccttaacgaggttcgttctattcttataggttaagcgaacttccggtagagaagcagaccaaatacatgatggaccagaaggatctcatgaacaagatgatccaagacgcagagaagaagttggagaaggagaagatgcatactcgtgcgatgaaacttgggttaatggctgggtctaatgatctaatcaccgatactgattgttcggaggaactggccagagcagctgatgtggttgataagaagctcaaagccatcagagagagaatcaaggctgttgaagcaggagcaccaatcatcaagagagactaggatgatgttttcaaataacttcttatcatttttatttcatggtttttaattattttcagattaagatggtttcgattgatggtgtttaaagttctgttcaatgatttgcttttgcactctaggaaggattaggagaatgatatgaatctctttggcctttgtatggtgtaatatgatcttttcagtttatgaccagatttgttttatattttaggaagattttctcccttatatgtttgttggtttaattttatttctatcttttttagtcagcctaatgttctatatgttacataaaatcttttggcttaatttttaccaaagaaaacatattatcttgattatctgcttttcatatatctcgcttatagtcgatgaatgaaaaaactatttcgc

SEQ ID NO: 70353 - DNA, 560 bp, Arabidopsis thaliana landsberg
aatttacgcatgtcctatgataaaataaaacctcttagaggacataaactatagaaaagttatctggagtctagctgaaaattaatgagttgtgtcctattcaactggtttatgtgccaaaagtttactaaactactaggtttaataatattagctagtagcatctctatcattatgtatatgatgcgcttattctctaaactagataatgtggcatataggttcaaactcaatttgatggccccagtcataaaactcaagtgcatgctactgcactattttgccaccaagccatagtacctcggctgcagtatttttctataatagtgcattctttcatctcttatggttcacgttgatcctactatttctcccttgagccatactggacatgtcttagaaaacttatttgacaggcttatttggggggcaaagttgtggtgccaacactttcaggcaagatacagctagatgtaagattcgtttcccagggagattcatataatattttggttggttataattgagtcaagttggttttcatcctctgacccaaagga

SEQ ID NO: 70354 - DNA, 386 bp, Arabidopsis thaliana landsberg
caactttacgtttatttgatttatagaaatttataatatatttatacatttaaatttactcttataagtaattctttcttgggtgaaagtgaaactatcagaggtactttaacatttatttacatgcatgtatataaaaagtgaacagttaatatatggagacatttgccaaaaaagtattaatgctcgacatttggcgattttgcaaagccaatttactacgatgaaatcaagtagcatgtaatggaatcatcattaggtcttcacagttcacactaatgagtaatgacacgtttagatttatatcttttggtcaatttggatttttttttttttttttgtaacgcatatcctcctctattaacagtaagcaaactcaaagctaa

SEQ ID NO: 70355 - DNA, 424 bp, Arabidopsis thaliana landsberg
  unsure (1)..(424): unsure at all n locations
tgaaacctaattgtatttatccgaatctcagtaaatcctaatcacaataggatccctacgaatgggnctttctatggttactattttcctcttcacaattgggctttcactggaacattccatttttgctttttttgaaaaccttcgcataaaacattcttgaagatttttcattatactatatttgtcatgtgattatatttttgtcttatttatcctatttatactttatttctttctccttttattcctttttttttctccttttatttattcttttttttttttcttctcttttatttacttctcttctttactcatttctttattcattttttcttttattatatttcttttttttttatcatttccttctcttattttttaccttttttatttttctattttcacctttttttttctt

SEQ ID NO: 70356 - DNA, 528 bp, Arabidopsis thaliana landsberg
attcctagataaccactaatatggattatattctagagttttatgtatattcttttaatacaaatatttttggatgagctagaggaccactaaaatggattatattctacagttttgaggatacaccttttttgtaatatatatatagtctggattcaaatatacttatatagacaggtgcaaacaaaaaaaaaatctattcatggtcaacaagtgaaagactacaaatctaaaacttattaagaaaagaaatctacattttgatatcatactgaatttgattatatttcatttaattaaattttttttttaatagcgtatgattaagaagtaaagttaaaattaattataatttaggggccacattttaaaaaattgttttagaccaccaattattgagacgtcccgcttaaatgttgaaactaaatctcatatatctagagttttgaggatacacctttttgtaatatatacagtctggactcaaatatacttacttatatagacgggcacaaacaaaaagaaaaa

SEQ ID NO: 70357 - DNA, 397 bp, Arabidopsis thaliana landsberg
gagaagaacgacttctcatctatgagtcctttaagaacacaaagcctcgaaaggttcatatctggtgctttatttcactaaacgccagcatttctatctatagctactaataaaaatgagcttctcatacttatatcgttatgtttttccagattctgatcgaagaaggatcttatattgggaaacacgggataggatattctcaagtgatgctggaggttttatctctctccatgacgacccttattccagagtttacatatcgatatgagggctagcattgctttatggtacaatgctgcggactcaagaaacggagagaaagagatggctcaacttgttgaatactggccaatctcgtgggaccatggttacaggctaggttgcgggatctgag

SEQ ID NO: 70358 - DNA, 276 bp, Arabidopsis thaliana landsberg
actcctataattagcggcgcactcagttgataaaacaagctaattttcttgttttttattgaataggattgcaactatttatgtaattaggaaagtaaaaatttatttgaactatttgttatgccatctaacgtaaaaataaagcatcatttttgcttgcggagatccctctaatatacattatcgtatatatatatataataattgatcttacataggggaatgtcatcatcaacaaagataataattatatcatatatccctgattttgtatct

SEQ ID NO: 70359 - DNA, 745 bp, Arabidopsis thaliana landsberg
ccaccaatccctcactttgctgatcaatgaattgatacttgaattgtttaacgtgatatttatttttacacgcacctacttatctgttcagtgatcagcttcatggttctctttatcaatccatcttaattggcttgttattatctgtgtgcacaacaagtacgtatgtgactatgtgtttttcttttgacgccgtaattctttgaaagttttgtgatatgtgtttatttttcatgtcacgagaggggtaggaagaagatccatatgtactgtgtctctgtgtatatgagagagatgggaaaacaagtagtgtgtatcaaagacagaaaacactgcaaccttttatattgtgtagtagtcacggaaaatgtaagaaagtcagagcacaagtggacactataccgggaatgataaatgatagttatacagctctcagaaatgaaagagactatatataccatttcttttttctcgacatcagtaacggtttcagtaaggcgcctcaagaaagctaggacagagagcctatcaccagctgcaagtctctcttgtacccagatgcacgcattcatctgaaaaatcagagaggactagttacaagaatcatatgccaacagaacgataacgaatttgagccatgcgtactttgcttagtctatattttaatgtttcatattcatatctccttcctaattgtgaatacatacaaatctaatgaatgtgaataaacaagataaattcctgc

SEQ ID NO: 70360 - DNA, 513 bp, Arabidopsis thaliana landsberg
cggccggccgatcggaagttttcaggcggtcaagcatcattgcgcgaacatggcgatcgccgtccgttgcgcacgcgatcaggtcagctttgcggcggtcgcgcttgatgagggtcgcgccgatgcggtgctgcaagtggagtcggccttgttcgtcgccggtacggcggccatcgagaacgccggcaagaacatccagattcacggcggtatcggcttcagcgacgaggccgatccgcatctgctgctgaagcgcgcaagagtgcagatcgccatcgccggcggcctggaagcggcgaacgcgcgcattgcaaacacgaaaacggagtggtgacatgcaggtagcaatcatcaccggtgccagcagtggcatcggattcggcacggccgtcaaatttgccgaatccggcatcgccgtcgtcggcgtcggccgcgatgcgaacaagctggcggagctcgaaaaggcgatcggcaatccggatctgatcgagacgctggccgtcgacgtcaccg

SEQ ID NO: 70361 - DNA, 483 bp, Arabidopsis thaliana landsberg
atataacttgcagaaggaacccagagtcaacaacaacattatgtgggagccttcattaacataattgagttatcaataaatcctagaaaaataaacatggtatatcaatatgctgcaatggcactaactaaaccatgtttcatttgaaccagaaacaaccaaactgattgactatctaagatgatgagacatctaaataaggttcaaagtgtcagattcagcagctaagattatattttcttttagatcaccaatgaacagacatgagcctcgagttcccaatgacccagatctaattctaacctgaagaaaatgtatatggttttacttcaaatggttcggtagaaattctatggcgcctaattcagttgtcaaaggccaaagtgtctttttctaaaaggaaagcaatagcatatcaaaaattgaagaaatatatacgtttgccttcaatttcagacaaacttttgtgatgtgctcgaaatt

SEQ ID NO: 70362 - DNA, 225 bp, Arabidopsis thaliana landsberg
  unsure (1)..(225): unsure at all n locations
gggcccgccatagggggacacggaagggacaaccttgatttcaaacaacngcaacccgggggagccaccaggaatagagcgaacgccaccgcagcagaaccacaaggcgcccgacagcgagccgggcggcaagacaccggaaggaggcccacaacgaggggactggccaaacccaggggtgacccaccagaaccgccgggcagcacaatgagaacccgccaggag

SEQ ID NO: 70363 - DNA, 381 bp, Arabidopsis thaliana landsberg
gtgggctctctcttaaatactacaaaccatttgactaatttggtcgtaacagatctagagtcaaaatcttctatagatatatattcgcaagactccatctttccaacagatctaatcttcttcacttcccaagtgtaaaaacctcaactttcagccaacaaaattagggtttcaagctgagattttctacttctgttacacaaaaatacccaatgagtaaagcttcggtgatcctatacattacgcgaggaatcctggtgctcttcctcgtctcttattcaccgaagaagaagggtgaccacgatcaccaccatggtggtcacaatcaacatcaccgcttaaaactccggtcttctttcaatttcaaacccactcgtcacg

SEQ ID NO: 70364 - DNA, 287 bp, Arabidopsis thaliana landsberg
cagcgacgctattaacgcttggctgctaaaacgctgttcagaaaagagtaacatatatagtatatatatatatagatatatatctgagctatggtccatccactaaagctttttaaaacttgaacccttatttcgaacgcagatgacacttattagtataaactatttgaacttacgtgtcatatgctcgcaaattaactacactattcctatatatatgatcacttaagaaagagtagttgaaatgaagaagttaccaaaacaagttctagaaagaaagagaaaaa

SEQ ID NO: 70365 - DNA, 540 bp, Arabidopsis thaliana landsberg
ggaacgtggagagggtgagaagatgccttcctgaggctattgacctggctcagctagaatctcttcgtgtaggttattcccattcagctggcagccatcatgtgcaaagtcacgccctcgtatgactgaacaaaagcaaagagatccgtcgatcgctggtccggggccgaggagatcacatgctccaccacgctattctactttcggcttgtctgatggtcccttgcgagagtggcttttcttgattggctggaatgtcaccgcttgactctccgctttgctctccgccttgatggggtccttctgatggaagctccctttgatctgaacatgagtgtcatattatcagaccagaggctctatcatattcgtatctcaactaactatacactccatttcaaaatcatctctgctactagactaccacacgccgcgctgcgcttatttgtcgctaggtcactttgggtagctgtttctcattgattacagagtcccgaaacaatataaactattttcaactcatgctcgaacacattcacc

SEQ ID NO: 70366 - DNA, 589 bp, Arabidopsis thaliana landsberg
  unsure (1)..(589): unsure at all n locations
agcaaaaacagatttgtgatataaaaacttcacaatcaatgataaagacagaatatgaaaattaaatccttttatataaaaccataaccattcgtgtgtgtgtaaacatcatcctccatccatgtccatgcaatacacaagtatatgtataaatctttacccacacaattacaaaaaaaaaaaaacaaattcatatcttaatcactatcactctagctgtctcattagcttgacgagtcgacacggatggagactcggcagagcggacaactcgactcggttttaagccaccgatccacacattcgcagtggtaacaatggctacacggaggaagcactttcatcttctctccttcttcgaaaccacctagacatatacaacactccttctcctccttctcctccgccctttctctccggcaaagcaccaccggcaagctccgaatctccgccggatcaagccctccgctacggcaacgcgtgagttgatcgggagaggacgcgtggagattgatagaatcccggnggaggcagttccggtggatgtagagagtgagtagtgcgaagaaagcacgacggagaataagct

SEQ ID NO: 70367 - DNA, 463 bp, Arabidopsis thaliana landsberg
cgctgttctcatcgatgatggtctatctgatgcacattatacgtgtgtggcgcgtattgatgaatatgtacgcatagttataggctgagtcccgagtgatacttttttcctgtcttttaattgtccggtagttgtatccatctggaagttcaaaagatggccatcttcaagagcacatagcacgtaagatatctgcaacataacatatgtcaaattcgaccataaatttaactcggttctcagctcatctgaatcaatgcatggtcgttgtaacaaggtccaatggaatcataccccttcgaatgcacaaagaagaacagatcggggaattatttcccctgcaagatggtcttttgtaataatagtcaattctggcagcgagaagatcctcacacttatatatgtccacattccaaccgcaactagctgactgcaattaggattgtcaccgatagggtttata

SEQ ID NO: 70368 - DNA, 536 bp, Arabidopsis thaliana landsberg
ttatcaagatcagagcaagatgtagtaatacgcggcaaagactcctcctcgtgaagcatatcccaagcgttttttgctcctttgtttagtcacaaaatttcataaagagaatccttgagtgaaccatttaagaaggagaaaaaccaccaacatagctccaaggaggagttcatcaagttaccatttatgagtgaacggcttccattgcaacaactttgattagccagcttcaaaatctcaaatgcttcctcctctgtgatatttgcatctactcacacaccaacgatatcaaagatgactcaaaacacacacacacacatatatagaattattccagaaataagccttaaacaagagactaaatagaaccctaattatcaacccaaggactaatcaattgaggtgtactgtctgtgctaatcagagaaaaacgagcaacagattctaatcttctaagattagggtaaagcagaaatttacctcgagcgagatcagaagaagagacggaagcaatcgaagacagacaagtataaccg

SEQ ID NO: 70369 - DNA, 1090 bp, Arabidopsis thaliana landsberg
cgaaacatactaatgccacagaattcaccttcaacaactgatgaagatatgtaagagatatgtaccggggcgacaaaggtagcttgtgaaaatataacagctttggaaattttccctgctttcagctgatcaggagttaagttcatttcactgctgggaggtctcatttctattcaagaccggagatccagcagacataaaacccgaaatattctgatcttctggctttttgacactgtttgtctctgtgttattaaattgaagttcggaagtcttaacagtggggaaagaatcaagaggagtctttaaattagtagcagcatcttctattgcagttacataagactttacagaagactcagaacatgtagaagcacgggagtctcctagtacgattgcatcacctgcaatatcatcaaggacaagtacatatttcgatgagtgtgagaaattaattgcacggatcgagaaaaagagaagtcgttccaagataaagatctgataaacttagtcatgagttttccaataagtgtatatttttaataaagagcctttttactaaaatattactcagagtgtatactttatcagtaatataactgtattcatacatgatacacctaatataatatgtatctccctagtaaatccattctaaggaaatcagaagaaactgcaagaaagggaagtttcttgctgctacgaagatcatacaggcttacctttggggtgtgtaacaggagtcccagctgccataatcccaccagaagcagcagtattatcctcttcctggccatcttttccagcttcactcccaagaataggcaaggagctagtaataggcatttcatttttgttatccttgtccagaactgacagagtctctgcggagtaagacagcaaaagaaaaaaatgttgctacaacatgaatcaacccatcgaaaggtaaacaaatctggtaaggtctccatggcggggcaatatacaaagaagcaagctagtgcaattactatggcccaaaatagaaaaatcgttaccaggagcttttacagcttctgttactacattctcttcaaaaattaattcctca

SEQ ID NO: 70370 - DNA, 1571 bp, Arabidopsis thaliana landsberg
ctggctgccaatggaaacagtagagcctggtcagacatcccatgaaagaagtctttccaaagaggaaacggtgaacttacaacccaacccctctgtggatgatactccaggagagtcctctgtggtaaagacagatgatggacaggagcaggttctggttaaagatgactcaccaacggctgtagaagaggcatctgtggaggaaaagaattccatcttgacttctaataccgcgacggtagaggctatagatactactgatcttggtaaaataggaactgagacgacggataatcttcttgaccaaacagaagagaaagccaatgtagaatcaaggatggaagatgattgtagcgatgggaatgtacagactattgttacttgtagcggtgagttgaataatcagagcactttacttccagagacttccaatgatgaaaatgttatcagcgaccacattcaaagtagttataaccgcaatgatctaactgcagatgcacggtcaattttggttgaaggtcattctgatagccatatagactcagcttccgaagttgaaaaagtggaagctaaaaatattggcaaaactgcaaagcctgatttgaaggagatagagctatctgatgtcacagtactagaaagaggggaccaagctccctctactcttgaggtaggtggacaagatgtttctgggaccgaatgccaagatctccttgtcagcactgttcatactagcgtagctgttgaagcgtctttggaacttgctggggaattgacaactataacaaacagtgtttccattgagaagcccgagttgcttagtcatcaacatatggaagttattacaagtgaacatgagtctacttttcagatagagactgagacacatccgcagatacacgtatttgaaacttcagagagtgtttatatttcaacgatggactcaatggttgaagctagagaaggtggtgtgtctaagaagagtgacaatgaaggtagtgctcgcacttctaatctcgagcaaagcatggaactgcctgtcaatgccaatgatagagatgaagatgtcaagaactctcagatcctatctgaaagcgttgtgtctggttctgttggctatgtttcaggaggctctacttcagagttggcggagtcagaatctcaatctgacagcattccaacagacaagtcaggtaaacatattttctaatccttttaatatactctattttcatactgtgtacttttacgttttgccttctcgttctctaagtagcccttgttcagcttttttttttgcttctgtcggggtcacctttccactgtaaatgtatatatcatgattacttcaagtaatttacttgtttccccctaaatgttttccacagagactatgattgacagttctctcaatctcgaagaattacaacctctaagtcaagatggagcacctgctgtcagtctcacatcttcaatagatttacatatggtaaagacatcctctgatgacagtgaccaaggcagttactctgaaaccaagaaggtttatggtgaacctgaaaatggtcaaa

SEQ ID NO: 70371 - DNA, 322 bp, Arabidopsis thaliana landsberg
aaaaggactataccctaattttgtgaaaaaatggtaataatttaatttttatcccttaataactatcatagggattgggggtgatagaggaaattctatgaatcatgcatcaagaaaagcatatatacactataaaaaggcttttgggtcattttcaactttaataactatacatctcccatccacacgctttgcacgtgtaataaaagctcttttttgaacattaaaatgaaccaaagagagaggctttatgcatgttaatgtcaacgtcatgactttctttgctgacattttataattatcttaccacttttggtgagca

SEQ ID NO: 70372 - DNA, 571 bp, Arabidopsis thaliana landsberg
agccacaccttgcaatgctttgtgcggtcctcgattggtgcatgttcgaaaatcttgcgagccatccatgtcttacttatttcaccgtcagtaccatgcatgactctcgaaacgctatcatattataatgatgcctacatcttttggtacgcacaggctccagatacttccgatgaaacactatgtgaagccatgactggtaagcaaaataaggaaatgaaaatatgtaaagtcaaactggaaacatcactaatgtatcatcatctctcaatctttcctaagaatcgaaatagttctctaatcctagaaaatctgtagataatccacaagctcatccggagaaaaagatgaaattaatcaacacatatatgtttggtttgcgaatacacaagcatcatcggagaaaatgacgaaccttgatgaagcgaactcgataatcgccgttgtttcacttcgttgacttgattttgatcactcactcttcacattttacagattttgaacttaagaagagctagggaagcacagaaaaaagttttttttttctcttatcaaacggaagaaaaagttc

SEQ ID NO: 70373 - DNA, 556 bp, Arabidopsis thaliana landsberg
gggcccagcagcgtccaagccctctatatatccaccagtcctataccaacgacatcccgtacgagtctcacgccgttatagtttgagcgtctgaagaacgtcctcttaatacccccattcctggagcgaacgctgtactttggtgcgctggcttgcctggatgcctggctgcacaccttcaccattctccccatcaggttcaccatggcccttgccgtcttggtgcagtggtggatgtatgtcatctttaaggaagtcaagtggctgattgggtttgtctggtacggcctcggtcgcttatggcgccgagcccgagcggtccgtggccgaagaattagcgatgcctccgacagtgcccgatcgcgcagctgtagtagagccagcgaggtctctgtggacggcacatcacctggcattcggcaacgttccaatgtaagggtccgtaccgattcgcgagcccgcggcgcaagcgatgctgccgggcccaagactccgtcgctcccggctcgcagcaatcccggaccgaagtcgggcatgtttcggcaccgacggacaa

SEQ ID NO: 70374 - DNA, 199 bp, Arabidopsis thaliana landsberg
ctaggtataactacgactgaacacaatataaataccttagaggacgtatttgttcggagcacattgatcacataggttccgataaactaatgctgcatttctctacttttccgaagacttatcctgtgacaataattcagaagaacaatcacatgtgaatcgcagaccatgtttgatgatgcgatctagcgtgaccaat

SEQ ID NO: 70375 - DNA, 1221 bp, Arabidopsis thaliana landsberg
ttacttgtctcatttggcatttaagaccaccatatatttaatctttaggagatataaaaaaaatcatattgaggagtggctaaaataatgaatgaatcattatgatagttagttaccacgtcgcttattcacatggtaattaatagtaattcagacaacactcaaccactctagaggctaataattcaatacgcataatcacatgtttacttaattatctatatcattagtcatttattctctcgtttaccaccgaaactaaagaacgacggatttatattttgtctcgactactgcgacacatgctaagcttaagcttgtatcggtgtaacaatggttctctttggtagtaaaaaaaaatgattttgcgattcatcagcattttacggtttttaccatctttgtgaaatggaaatttctattctatactagtaagccgtattgtcgttattttagtaacataagtaaaatttgtcatttcgtaaactttcacttaaataagttgtgtgtcataaatcataattctacaaatccatttcaacatttaatactgttgtacgattctgtcatttctactgcaaatcagaacgtatgtgttatatatttggcctcttatagtaagcatacaatgaaagtgaatgaaaaaaaaagtgaatagaaatagataattaccaaattagaaaaaaaagaagtgtatgtgtatattttccagtttccacactagtacaagcgcttttgacacctaaagagattgctttgtaagaaggcaactggatctccattctaatagtacaagataatgaagcaacataggctcccaagaaagtaaatagctttagacaatcacgcacacatgtaactcaagaccaagtttgtacttacctatgcttgtgtgagattgtcgaatcaacaaacatcatagttcgtctctagacctcactggaggagccactccttacgagagaagcttgtgggttacttctcacaatcacgtctttcaagcgcgagagaggttcaagtactctgcccagtttctgtgtggaaaaaaacattcaagagtcgtcaatgaatggcttaggttaggtggttaccatttgtaaaaaacataacgattcttaattgaagttttttccgtgattttatagattattacctcgctactgatgcttgattgccacttgagttgcaaaacctgccacctctcttgttgccagcgttgac

SEQ ID NO: 70376 - DNA, 518 bp, Arabidopsis thaliana landsberg
cgcaacttctgggccttccggacgtcctcaaaaacggcaaaaaaagcaaatacgccaactggttcgtcatttgcgactggggcgattccgacacccccaccccgatagccgggacgcaacgcgtccccggatcccaccccatcaagtacatcgcctgggacaccggcggcacccccacctccgacggcgccctccccgtcctcaaaaaagaccccaagacaggcctagcccaaggcccccgcaaccacatcttcgccatcacccagcgctggctcgcccccgacggcgaccccagcaggggggtcgacggcttccgcctcgacgtccccggcgatatcccacaccccttctggatcgcctggcgcaagctcgtcaaacaaaccaagcccgacgccttcatcgccggcgaaatctgggacttcgcccaaccctggctccgcggcgaccagttcgacgccgtcatgaactaccgcttcgccaataccgcccaacaattcttcgtcaccagaagcgcgccc

SEQ ID NO: 70377 - DNA, 3191 bp, Arabidopsis thaliana landsberg
ttttatagccaggtaaccaaatgaacattaattgataaaattttgatataacctcaggaaaactgtatttctatatttcacaatcatgatataactggcatatactgtagagaagctgtatggttaatcctttagtccatgaaactgatatttgaatggtctccatgtgcagtttatgaacaaagtcctctatgccagagaaggtgcaaggagtataatggacagaacattcgaagatttcccttggcaagttcgagttgaggtggatggtgttgacatcgaggttcctgaggtgagtcacagataccttacagatacgacccgcatgataattaatgctctaacttctctatgctaaatctctgaaggatgcggaaggaatactggttgcaaacattggaagttacatgggaggggtggatttatggcagaatgaagatgaaacatatgaaaactttgatccgcaatcgatgcacgacaagatagttgaagttgtgagtatatctgggacatggcaccttgggaaacttcaggttatatttgtactcttatgtcttatttgtatacatttgactggtaacctaaaaactaacataaattgatttttgttttgttttcacatcttcaggtcgggttgtctcgtgcgagaaggctagctcaagggtcagcagtcaagatacaactttgtgcgcctttaccagtgcaaattgatggagagccttggaatcagcaaccatgtaccttaaccatatcgcaccatggccaggttcttctctccatttccctaacttagattctggattcaaatcaagttttctactgagaaaaagttgcactagattgtaaaagtttgtggtcttctgttttttcttaactcctctaaaagctcgaaccattttttgtgaaactgtttttagttttctcacttaccttcacttgcaccaggctttcatgctaaagagagccgcggaagagccactgggtcacgcagcagctataatcacagatgttctagagaatgcagaaaccaatcaagtgataaacgcttctcagaaacgaacgctgcttcaagaaatggctctacggctaacttaaaacaggggaaaaaaaaagaaaagacagaagacaaaaccttccctcttcaacaaccaatcaatcatcactggttagttacaaatatttacaaatgcgtgtattttacatatcttgtacctctgcctaatgaagggaatgttaaatagtcttgaagatcgaaatccgctgattgacaaagcgggttctgtgtggaagtaggaaaaaggaaccaaaaattggaatctggttcctagatttttggctgttctcatagtgaatgaaagcaaaacgtgtttaattatctctgtctttctcatattttattattatgggttccttttctatatcaaatagaattttgagaagaatcatgtatgtacatatagatgaaccatgttcttaatttgtgattattttctagaaatagtattattaggcttcttacttcctgttctttttgctgcgtgtttgttcctaatgtttaccattcataaaacttttgaaattatgggctgagttctttgatattcagtatataatacaaacgatatcaagtcaaaagacttcacattttggcttttcacatcaacttcataacttggttgactggtcggtttcgaatttgagttattagtgtttttggtttgaaatttaacgagatgggtatgagaataaaataaatggaaaagaaaaaaaaaaattagtccgaccatgctgttgcttgaggaaggggctatatatcaaaagaaacctcgttttcttgtaataaaacaagccatttttctggttaatatcatatatacgttggtttaacaacactatcattagttagaagtttagaaccaagaaaaagacgtttaacaacgaaagttttaaaaatagaaccactaaaagaaagattttgcaaacaaaatgtttaggtatgattgaaaggtaagaggttatgtaagaaacaagacaggtaatgtggtcagaagacaagtttaagtacttcaaaaatgagtctttggtaacatagatatctgaaatttccctcgatttgattagtgggatcaccaataccaagatacaatctgaagtttagttcattgactcaatagtatttgagtcttggggctcgaaatgattttgattttgatttcttaccgatcttcgagtttccaaagctaagcacttttatcaaatttagggtctttttacttttccaaattatatttttctgtttttggggacgaatttggctttctttctatataacccgcgagagagacagagaccttgaccctcacctaaacctcaaaaaccaaattttgaccccaaaagccatctcttttagcaatcagattactttgaaactttctctgggtatctgagatttcttcattatttatataaatcatctaatcgaaatctactgcgacgatcggcgaagaatcggaaacacaaaaatggggtgttgcgcgagcaatacagctggtggttcaaaggctaatcggatctcacgctggcgatctacaggcattgttggtctccgcgactccaaattgaaggtatacttgtctccacttggaattgatagacaaacttgtttctatctgtctatatgactttgtagagatgtttatactatgtgtgttgttgttattgtctcttgtttgaatgattgatagagacgaaaagcactgaactttgtgattgtgtcatcaatgcagcatacgaatttgttctagggttttgttaagactggattggctgattatctcttgattggtgaattttctgtttttttgatttgttttgttgagtagacatttcctgatgaagtgattgaaatggagagagcagtgcgaacacttgatctaacacacaataagattggtatgccttctgcttcattttgatttctttcttcattgacgtgttaagagtaatagctgagggactttgtatttgaccatatttatgcagctgatgttcctggagaaatcagcaagttaatcaatatgcagcgtctggtgaggaaactatgcctctctgtgtacattatctgcatatttcgtcgtatcttgtattagctatgatcacagtatttgactcaatggaaatgctagtggtac

SEQ ID NO: 70378 - DNA, 245 bp, Arabidopsis thaliana landsberg
actgatgcggatcggttatgcctattcttttgaactgcctcttgaagggactcattgatacatatgcgggaccgaccagctgttctgggactatctaggcgatgtctgttacctatatgaccgtagtgggacatctatggatgcctagttatcaacactaggagatagagatccttcaggtaaaaattactgtgataaagaaggagtaaatgaaatctaaggtggacagcttgttagcttacaat

SEQ ID NO: 70379 - DNA, 3650 bp, Arabidopsis thaliana landsberg
tactgtatgagtaaccaaaaaacatttttctaatattgtttttaaaataactacttacaacttgattaattacttcgtttaatcatgtaacttttttttcttccaaattctaatctctctattaaattactgcatttataagatctaaacatcatgtgatatgttcaaaatatgaaaagagaagaatatattacatgattttactacgattaattttttttaatcgcaatgttttgtttttgcctaattttattagtggaagaaattttaaccgcaggcctgtaatttaggaaactaactattcacccccaattaaaaaaaaaaaacaagaagacgacaaataacgagaaattaccaatttttcctcaacactttcattatttcctacaacgaacttctccctcctcctctcactttcaccatggattccgtctccggttacgccgccggagcaggtcagcctcgagtcggtgggaaaattgttcgaccacgacgcaccgctgttgtcaggacgccgtatgagcgccccgttcagagatcccgagatcctcctcagcaaaaccctagttggatctccaggctcgtttacaaacccgccagcgtaatagcttccggcgccggaaaattcatttcttccgtcgtcttctccgactcttcctcatcttcggaggaggacgaggattcatcttcaggtttgtaccatttatttcagtttagataggattaatttgaatttttggtttattgtctggtcgaatctgaaagctaccgtttcgtttgaaatgtgaagtttgacttaaagctttcccattttctctttcctttaatatgtgggacttaagagcagttaagcattgttgtactctatttagttaggttacttctaagctataaacttcatactaattctaaagctctaatttttattcatataatgtagttctgggattgagaataccaaccagctttgttgtgtcttattcttttaatgtatggatttttatatgttttcttctttgtttgcagatattgatggtgatgaggatgttgagaagaacaatcccgattttactgaagaggtactaaccaccttgttcgttttggtgattgctatgccactgtagtcctatgataattgtttgaagtaaagttcgtgaagctaacacgttttcaactgagagttttttttataaaagcataatttcagtttttgtgcttgtgtgaataggaccttctgagtgcccagcaaccaagcattcaacgactcagttctaagcgtgtaattgagcagcttctcttgcaagaaacatttgcaaggtatttctctgcctggctttttggacatcataagtagcagcctcctcgactattcttattatttacacctcatagcttaaagaatctttctgagacgtgtgtagttaccaaatctaagctgatcttgtatcctgcttattcattcatgtgtatgttgtttcagggaagagggtgataggttaatagatatcatcaaggctagggttgtagatcatcccagcgtcccctctgctattgagacgagtcatgatgactatggattgacaagcggtatgttactgatggtagactgtgcaagtagaccggattagtctatgtgataacgtcttcttttctattttatttctagacgtgaatgtgggtgaaatgtccaatacagctgtcatggaagcaagaaaatggttggaggagaagaaatcaggatcaagttcaaagtataaagtaagttctggaaacttgcttcttaactgttctaattgctgcagcctgcaggtatcaacttttttgtgatatcttgtctccgtgctctaagccattattattatagaaggagacatcttctgtttgggtaaaatgatttgattgttatatgccaatccatgtgatcagcaacttaaagctctcttgcaaaagtaggttgttcagaattctgcgtgtggccatctggtgacgttaatcctgaaatgtcctgattgggaaatacctttttgtccgcttaaaatgcaaaagatccatattgttgctcttcttttgactatgaagaccatttacttacatgattttggtcaacttctgatagcttcgcttcacagtattctttttccattgtgctttaaatgatgatcaccatctcagccattagtttaaatctccaggcaactgaagatggtgctggatcgcctgtggacgtggccaagtcttatatgcgagctcgtctgccatggggatctccagctgcgaataatttagattttcgatcaccatcatcagcaagagtgcaagggacaccccttccttatagcgctggaaacttttcctcatccaaggttagaattttaagttctccagcagtgcatacttttcttttggtcaaatgttgtttgaaagtctgaagtcgtttcatcttggtttatgagataaaattctctgcttaacttctattgtttatgttagataaccacgaggaatttgtgggacactatttccagctattcctaaagaaaagttgcataccgttatatgtattttcaatggctctctcaaatttacccttattcattctgacattggttaccaaatgcagctgaaaaggaagtccggttctaatcagtcatggaatattcaagatgaaattcgcaaagtcagagctaaagcaaccgaggaaatgcttaaaagtcccagtagtgtagcctctttggaacctaaatacagcccctatgttttagcgactgatatgctcaaaggaaatgcttcgtctttgaatgctgatggaggtgttttttttctttctttattcacacgtggaagaagtttttcagtaagacatgagttgaaactgaaattaactcttcttttctgttctttcagctgtacggaatgaacaaagcagagctctaccaaattcagccatacctacctctgagcacaatcaggtatcaagcactctttacactatgtgtctctcattaccaagaaaaaacttgcagttccaatctttcttgttttggtgtccttgtgtgttttacttgagtgaagactacggaagctaatcaagccgtcaaagaaacaggagttttacacactagatctcgttagtttctcccttaatccttaatttgtatacactctctcatcttcgctttttatactctgtctcatggatttaatgtgttctgattaggtggagttggtttggaggagacatttatctccacacaaggagtcaagccatctgaagatacgaataccgctcctcaaaggttctttttattgtgcttatccttccaacacagattgtaccttgtttctttttgacagatatgttttttagtatatcaatcttctgaagtttttcaactgtatgcgacagtggaactgctgtagatgacttcaatgatcaagatggcgattttatccaacctacttctactatcggaaacaccacaaatggtatacattggatgttgaattcctttggttctgatttttagttgggttctcttaatttacttgcgctcctattgatgcagctgtcttggctcttggggcaactttggaacctactgggaactcttgcatccctaaagatgtgtttaaacatcaaaaaaagctga

SEQ ID NO: 70380 - DNA, 316 bp, Arabidopsis thaliana landsberg
aattcacaaactttaattgatactttggtgcttatttaagaatgcaggtttcagacttcgcatagagaaaagaagaagaacttacagtgttgttcgaaaggacgcctcacgtttacttagcattgatcaagaattgacgttgtcctggctcgtaaatagattgctttcgaacaacttctttgcctaattgtcgatagtaaggagtgcatctcgattctaccattctcgaatttttggatgagagatttatcaaccaggacttgaagtccggaactaacatatgtgtcattgttagctatgatcatctggctcaaat

SEQ ID NO: 70381 - DNA, 509 bp, Arabidopsis thaliana landsberg
cgcaattcacacagtgagcagccttggcggtggccttatctccatcccgtacgagcgccgactgatgttggtggctttggatattcaacagaggaattgcagcaaactatcggtataaggcagctttaacttcatctagactgattcgtttattgatatcttggttattacggtcccgcatctaactctgctctaggaataatctaatagagattgtcaagctcacaaacacaagcatatttaaccgcatatttgaccccagtactttttaccctcttttgaatcgtcatcttcctcgaagaggaaaaagaagagacacacattgtgccaaattcgctcgctcgtccacattacgtttcctcgccccctcccccccccctagatcgtattcgtatccaagtaaaagcccattacagcattcgtcggatctcctgctcgttggtgtacttgtccagaccagagtctaagctctccaccactggagagcatggagttgcagatcaacctga

SEQ ID NO: 70382 - DNA, 474 bp, Arabidopsis thaliana landsberg
ttttttttttagaaccctttttttgtgaattttgaaccccatatcaaataatgtgggttaaaattttgagctgatttaaaattaatcacctatctggtatactaaattgaatatccttacctgccttagtttttctgaaatttaaaacggtaatataaatcattaactttaacgatcattatatatttatttaggcgaaaatataaatcaccatttatttattacggttccacctacaacttacatggataggggttggtgatatggaagggtttcaatgacctttaaataaatgaaattattttggttcaaaaattaccaataccaaccttttttcattacccctttttcctaccattagaattaatttattaaaggtatggttaaattaagccccttaatattaatatcattggtggaaaattggggggggccgttggtcaaaatttttcaatcgaattaaggaaagccaaa

SEQ ID NO: 70383 - DNA, 221 bp, Arabidopsis thaliana landsberg
ctcttttaggcccctgtccgccatacgcccggtgccgggccgtatccatccctgactgatcaacgccttctcgggtgttgccagcagaagcatctatgttggtttccatcttgggcttatgcaaaccccgctcctgtgttaaagatccccctctgcccctatgaatctctcttttggacctggcttacttactatgtcctgggcaatactcatgaacctta

SEQ ID NO: 70384 - DNA, 598 bp, Arabidopsis thaliana landsberg
ctcgacgaataccgcgcggccaagctgacaccggttttcttcggctcgggtatcaacaactttggcgtgcgcgagctgctcaacggtttcaccgagtgggcaccgccgccgcagccgcgcaatgccgagatcgcgggcaaccatcaggaagtggcgccggagcacgaaaagttcaccggcttcgtgttcaagatccaggcgaacatggatcccaagcaccgcgaccgcgtcgccttcctgcgcgtctgctccggcagctatcgcaagggcatgctgctgcactcggtgcgtctcaatggcccggtgcgcatctccaacgcactgaccttcatggcggcggatcgcgagaccgtcgagcaggcctggcccggcgacatcatcggcctgcacaaccacggcacgattgcgattggcgattccttctccgaaggcgaaaccctgcacttcaccggcatccccaacttcgcaccggacctgttccgccgcgtcgtgctcaaggacccgctgaaggccaagcagctcaacaagggcctcgaccagttgtgccaggaaggcgcgacgcaagtctaccgcccgatgaccaacaacgacatcattc

SEQ ID NO: 70385 - DNA, 414 bp, Arabidopsis thaliana landsberg
  unsure (1)..(414): unsure at all n locations
nnnnnnnnnnnnnnnnnnnnnnnnnnnnnnnnnnnnnnnnnnnnnnnnnnnnnnnnnnnnnnnnnnnnnnnnnnnnnnnnnnnnnnnnnnnnnnnnnnnnnnnnnnnnnnnnnnnnnnnnnnnnnnnnnnnnnnnnnnnnnnnnnnnnnnnnnnnnnnnnnnnnnnnnnnnnnnnnnnnnnnnnnnnnnnnnnnnnnnnnnnnnnnnnnnnnnnnnnnnnnnnnnnnnnnnnnnnnnnnnnnnnnnnnnnnnnnncccgaattgagacctttaagtcctttatcgggcataaaccagatctgggctattttactagacccagaattacttgttaaagcattgcatgcgaatcttgttatgcttcaaagctcgatacgactagagggggggtccgtacatagggggttgggatcc

SEQ ID NO: 70386 - DNA, 393 bp, Arabidopsis thaliana landsberg
  unsure (1)..(393): unsure at all n locations
nnnnnnnnnnnnnnnnnnnnnnnnnnnnnnnnnnnnnnnnnnnnnnnnnnnnnnnnnnnnnnnnnnnnnnnnnnnnnnnnnnnnnnnnnnnnnnnnnnnnnnnnnnnnnnnnnnnnnnnnnnnnnnnnnnnnnnnnnnnnnnnnnnnnnnnnnnnnnnnnnnnnnnnnnnnnnnnnnnnnnnnnnnnnnnnnnnnnnnnacggcacgagaaagcacactggacgggccgccgatataacaggcgggacgggaaaaacagaactgccggcctccctatagagaggcgaaaaacgccgaccagccaggacaaccagcaataatgaaacggccaacgcacggggagaggcggtcagcgtatggggcgcactaacgaagactggctcacagactcga

SEQ ID NO: 70387 - DNA, 686 bp, Arabidopsis thaliana landsberg
tgtattgtattaaaaatgtggtgattggttccacaagatcatactctacaggtttggtttcaaacccaggtcagctctttttatattcttaactctgcaaagtttggtacctttgcacaatctcactgccttggggaaccaaaacaaatacgcacttaactctttcaaaataaagcatccaacttcttaactcaacaccaagtttgtttcttttggtttgcagatgaactcgataaatgcagcaatagacagacgaatctcagagagtaggcttgctgggcggatggcgttttagaatttggcaccaaaccaaaccagcgtcaaagaaaaggcgatatggatgaaggctttgttacaacaacaagtcttcactcacttttgttcagatactgaatttatgatctgattttaagttattaactttccatctgttgtattctttagccaggtgagttagtttaccattacattgttttagggatctcagagatgttttttctcagaagtttagtcctttttttttttggtcgttggagacttggaggaagaactttgtctccttttcttctgaattgatcaaagtattatattatacagattcacccaaaatgtttgcaccatgttgttcaatattttgccaaaacaaaattgactaatattccttccattaactggatactcaaact

SEQ ID NO: 70388 - DNA, 2727 bp, Arabidopsis thaliana landsberg
agaccaataacgagtcttttgagagattcgagatttcaattttgagatcaaatcttgaaatcaatacataggataaaggttatttggtgggtctgaagaacaacaaagctaccgagaaggtgtggtgttattactgcgatagatagtttgatgatgagaagattcttgtgcagcatcagaaagctaaacactttaagtgtcatgtctgtcataagaagctttctacagctagtggcatggtgattcatgttcttcaggttcataaagagaatgttacaaagtatgtgccttttcttttaccattttcccttatggctctttttgttgtgttaggttgatttggaatattagggttgttgcctctatgatctttgttcaagttctgattttttttttgctctagttgtgtgattgtcttttgatttctgttagattgccctaattgtgactgttgtgttgtgatttgaatcggttgattgtgcatgtttgctggaaaattagggaatttgaatcgttttttttttttatagctcttgaatgggtttggttaattttgtatatgtctggtcataaaccctaatttccgtttgaaatttttgtaaagaaacagtcttttgcttttgcctgttgaatttgtaatttgattccatgacactactaactttgaaattatctacaattttcacaccagggttcctaatgctaaagacggtcgagattcaactgatattgaaatatatggaatgcaaggaattccaccccatgtcttgactgctcattatggagaagaaggtatgcatttgagatagtgagagtactgtttagattatgagcaattgatttagagaagtaaggcgataaatttgtatgtctcttcatcaagtgttgtagatctattgcatctagtggtcatgaattcgttttgattttgcatgcggctttttaccttatcaaagttattatatattattgttatgtttgcttgtttcatatggtaccttttgaactgaagtcatgttttctgcagaggatgagcctccagccaaagttgcaaaagttgagattccttctgcccctcttggtggtgtagttcctagaccatatggaatggtatatccgcctcaacaagtacctggtgctgtacctgcacgaccaatgtatgtactaattatactatactctctctatggccgttacttgttgaattcttagatgttgtctctgtttttaaaaatccgatccatgctaaatgatggggaactttttttcttttagttctcttgatgcaaaaggttcttggtttctttagtttgtctctgtcctagaacttttctacttttatgctgctataagaccactataacacccgtagtaaacattttttgacatagatcgttatctaagatattgttgcacttaaccaactgtgacccataaggttcttagtttccctagcttgttctcgtgatttttcaggatagaactttgtcctagaaccattcttttgctcctcttcaagaccacaataacacctgtagtaaacagttttttgaaatagttcatgatcttagatattgcaatatgtatggctattgaccatgataaaatatttcgtgttagcaggtattatccgggtcctcctatgcgtcatcctgctcctgtatggcaaatgccacctcctcgtccgcaacaatggtatcctcaaaatccagctctttctgtacctccagctgcccatttagggtatcgaccacaaccactttttcctgttcaaaatatggggatgactccaactccaacctcagctcctgccatacaaccatcaccagtcactggagtaactcctcctggaattcctacatcatcacctgcaatgccagttcctcaacctctgttccctgttgtgaataacagcattccttctcaagctccaccattttctgctcctctgcctgttggtggggctcagcaaccatctcatgcagatgctttaggatcagcaaatgcttatccgcctaacaattctattccaggttcaatcccaagttcgtagaatcattgacttacatttggtttagctgtttcgtatcaaattgtaatatctttttcatgttttgttgccgtaggtgggactaatgctcattcttatgcctctggcccaaacactagcggtccttcaattggtccacctcctgtaattgcaaacaaagctcctagcaatcagcctaatgaggtctatcttgtatgggatgatgaagcgatgtctatggttagtttattcctaatttcttatgcatcatgttggaatggtaacaattggaaaagtttcgagtaatgaaccatttggttttccaatctgacgcaatgtgtctgtatctgcaggaggaaagaagaatgtccttaccaaaatacaaagtgcacgatgaaaccagccaggtaagttctgatttaccctttttaaagttaagaagagtttgcttttgcaagtctaacccattcggtaggctttatttatacatttctgttccagatcctattgtttctgtgctaagaggtaccaccgtattattcagtttataatttcttcccttagaatatgataagaaggacttaggcaagaaacttgagcattttgaatcaatgttcgaaaggtatcatttgtagcttgcaatagtaggtagtgagaaacatagcgtttgtatctgtttggttttcattatatttcct

SEQ ID NO: 70389 - DNA, 442 bp, Arabidopsis thaliana landsberg
ctttagagccaaactttaaagtgagactaacactaaatgtaaaacaaggaggcggagccaagagtcaattctatcttctcgacatcggaaggctgctggaaaaacaacggcaagccctgcgacggtgacgtaaccaccgacgttactcgttactcggagatgatcataaaccctgaaaccccactttggtgcatccccaagagtcttcacaactgtccaccgtaccacacgtttcggaacggctccagagttcaccgtacggaccaccggagcttcccttacgaggcttaccacgtttactgtgcgccgggaaacgccgagcatcttgagcttccggtggggacttgtgatgcttatagtaacccacaagctcaggagattcttcagcttttgcctcacccggtttggggtgaatatggatatccgacccggttgggtgatg

SEQ ID NO: 70390 - DNA, 585 bp, Arabidopsis thaliana landsberg
cacctgaaatgggacttctcgcaggtgccggtggcgtttgatgccaatggcctgatcgtcagctacatgtgggctggctttgtcgtcggcgggccgccgatcgagcgcttcttcgtcaaggcgctgaagccgacggtcgataccatcaaaggcgacgccaagctcaagcaggacgtcgaggacatgatcgcccaggaggtccagcacgcggcggcgcacatggtcgcggtccggcacctcgaatcgatcggctacgacatcaagggcgcggcggcgtacatcgacaggatcttgcaggacctcacccacggcctgagtccgatcgacatgctcggcgtggtggcggcgggcgagcacacgctctactccatcgccaaagcctacgtcagcacgagcgcgctgcggcagggactgcatccgcagatcgaacgcctgttctcgtatcacctgctcgaagaagccgagcacggcgcggtcagccacgaccagtaccgctacttcgtcggcgacaactactggcaccgtctgcgcatggcctggcgcgcgcggcacgtgttccgcatgctgtccggcgtcgtcgacatt

SEQ ID NO: 70391 - DNA, 615 bp, Arabidopsis thaliana landsberg
  unsure (1)..(615): unsure at all n locations
ctaactcttgcaggtgcttcaacgatgtcaggacacttgtcaaggcagaatcagatatttcctggtataccaaaaattagttcaagatcggagactccctgtcctctaataacactctttgaaatttaaagaaccagaacaacctgaaaatggaggacgatagactctagcaaaggacaagttgaaggtagaagctttaaaacatcttcacctaaggaagcacccaaacccacacttataactcgtaggaacgaagctgcaggtctcaaagactcaaaagagaaataagaaaacccccaaccaatctcaagctcctccaatccactccccttgcttaaacatttaaacacctcttgaccagaaaccaacggagagaaattgtcagttctgccgtcaacttctaattggagtagaattttacatcccctggctttgagggtttttagattaggatttctgctaattacacgagcatgagccatccaagatatctgtaaaaatctccaagcattagtggngctaaattactatggactactgaatcagagcatcacatgaatgtggctttgtcctgtggaagtaagatatatatactatactaacgaatgatgactg

SEQ ID NO: 70392 - DNA, 193 bp, Arabidopsis thaliana landsberg
ttgcgcttgcagcgtagtgcttgattgctaccaccccgaggaacgtgcattgtgatataatgcaacaagggtcgaaagggggaggtggtagggctgaatatcttctatgaaaaaaaaagctggcacgtgctaaaacctagcaacataattgactacaacagcggtctagacggtgacagggatatacccgcga

SEQ ID NO: 70393 - DNA, 1571 bp, Arabidopsis thaliana landsberg
agccaaggttattttataccaacatttaatacatatttctatttacatgtcttttggtgaagataaaagggtctagggatcaaagatagatgattcttactttatcttaaaagaagattattctcatatatattttatagtttgcaaaatattttgaaaatgctatatgtgtttgttcctttttttatattctttttaattctggtttgccaagttcaccgaaaaaaacaaaaaaaaatatggtttgattcgaagccaatgccaagcttcttagacaatgacttgtttggtcctttatctattgtaacccgaaaaagtaacaattttcaaatcataaaatttcggtcaaaataggcttagatattttgattttcttccatagatacaagagagtatcacgtggttgtgaagctttttgtattaaatttgtcttagtcgaatagagaaatatatttgttttctttgcaatttgatcatatttgagtttcttttttgtcaactttgtatattttagtttgtgttcacataattctgtgtatttatatcattaagtatatatgcatgacatcctcctcctgcatttgctccctatattcctcattattattagtcatgggaagagagaagacgttatgcaagtcgtggagcgacatgaagaaacacttaaacgacaccgtttgcaagagcttcatcggccgtttcttcaagctcgaagcaagaaaaacaacgttcacaactgaactacgagctgcgaccgccacattcctcaccatggcttatatcattaccgtgaacgccaatatcttagccgactccggtgccacttgctccatcaacgactgttccaccgtggccagttcttcaccacccggtccagaatgcgtcctcgggtctaaccctggctacgaacaatgtatttctagggttaaaaaggacctcgttgtggctacttctttatcagccatggtgggttcattagcaatgggtttgttagctaatctcccttttggacttgctccgggtatgggagccaacgcttacatcgcatacaacgttgtcgggtttcgtggatccggttctatctcttatcataccgctatggccattgtgctccttgaaggatgtgcctttctcgctgtgtcggctttaggactccgcgggaaacttgctcgtctcatccctcaaacggtgagactggcctgcgcggtcggtataggaatgttcattgcctttgtaggtttacaaatgaaccagggcattggcctcgtgggaccggataagtcaactctagtgacattaaccgcctgcgcagagacggatcctgtcactggagcttgcttaggaggtaaaatcaagagtcctacgttttggttagccgttgtcgggtttcttataacgagtttcggtctaatgaagaacgttaaaggatagtttgatctacggaatcgcgtacgccacggctactttttggatcagaggccctctagcacaatctttcacacactccttctggggactaaactacaactacttcacaaaatttgttgactttcacaagatccatccacctt

SEQ ID NO: 70394 - DNA, 627 bp, Arabidopsis thaliana landsberg
gctttgtgcgcttgcaggcgtgcgatgatttcctggcggatggtggcggtcaatgcttcgttatacctttcgtcgctggtaagcaaatcagtttctttcaggtcttcctttacgacgaagcggttgtcggcagggtaggcgagcatttgtggcgaaacgccatcgagtaccggcgagcggtaaaccggcgctttgctcgtaatgtcggtataaagctcgatcgcgcagttgggctttgtgaaaatggcgtctttcagtgccagcccgattttacgttcatcgacctcaaacccgcacacgaattcgatgttcgccgcacggtaaccaccgatattatcggccatcaggccagatgttttttcagaatagcgtgtgtagtattcgacgccctgcacgagcgagctggcgcagtgttccacgcccacgatcgccacttttatcttttgatcaatatttgacatttccaataatctgagtttatgatgaaaatttatttttaaaatatttttaataatataaaataccttaatatgagtcaaaataaagcattgattgtcggacatacaactgttagcgaatgtttatgcaaacgcttgctaatattttttggttgatttagatatataa

SEQ ID NO: 70395 - DNA, 2380 bp, Arabidopsis thaliana landsberg
aaaatgataagactgatcttctatatatcatcaatgttataatgtgtttatatgtatgttgacgtgatatgcggaaacagatgttccaaatatgaaatcttcggggaaatcttgcttgtggatgtcaaactcgggtccaatgatggtgcccaaatcatcatcatttaggttggtctgcggtccaacggtggtgcccatgtccatgtcaatgtcttcgtcatctacggtcgcatgtggtccaatcacgatgcctatctcgtcatcgaagctagtttgatgaggtccaatgatggtaccaagatcctcatcacttggttgaggcctagcatcggcgttgaagctaagtatggtactagttaaggctaagagccctaggaaaagagtgagagtagctgtagccatatgagtgttttttcttgtgaattttattagttttttttttttttttatgcttcttccatttccaatccattctatttataggaaagaagcttcaagtgtgtgttatgtgaaagggaaattgtgatatccttgggtcgcactcatatttggcggggcatctttagtttatttataggattggttaaaaaaagtttataatattatgaacatttacttcctttatatttctgaattcgtcaagcgtcattgtccataacaaagcacgaagtgcattttaatgactttaataaaaaaaaaagtattctaataccttgctcaaaactttaaatattataatattccaatcgtctttactagcatatatccatcattttcatatatttcctttactcacctcattttctacttattaacacaacaataagagacaaagcggcattcctggtgaatatccacgatactacattcatttaaaacaatttcgtcaaagtttacatcaacttcacattaatcccaaaatagtccaaagacccaacaaaaaataaaaactgagttctaagaagacatgggcttgttaatatcattttcatgggaatagatagcgccagtttagtttttttagaagctgttttcatataaaattcagagaagaattgttgaacatagtcaatcttaatgctgaatgcaaatccttgatgcacaacatttctcttaagataggttctttaaggaatgacattctgaaatccaatccaataacattacccctatgtccgcttgtgtccagcatccgtacgtcggtttctacagcagtggttggctggcttatgtctagggtttcaccgttcgtctcctgtatcttgtctagggtttattttgttttattttttgttttggttttggtgaagtggtgttgtagatctgtgaaagtttcgacaccggtccctttggtgatgatcaataatgtgctcaagccatcgataatctaaagttacaataagttcaagctttttttttggaagaaaaaccttgtgttatagctttgagtaaaccggtaaatgtccctcaagtctccttccgagaaccgaattctctaatcatttttcagtgctttttattaagttcaagaacccacatgtcgcgatttgattgtagccaattctgataagaacatgcattctagaattagagcaaatcaacaagtgtaaaattgtaaaatcatctctatatttgcaacagaaattacctaaatgtatctcataacgtttaaaatacaaactttatgataaaatgtacaaatgcgtcaacaaatgtgaaataatcaaataaaaataggtattgggagggtcacggtccacgttcaggttcacgtcttaattttacggcttattatacaaaaccataaccaaaatgttcttatctcactttcctttctattcccggatttgccgctttcttcttcttcatcatctctctctcaaaatcaccccttttaaagttgtttcctttatacgcaaaagtgaacgcagatcttaatgcagctactgtgatttcgattcttagggtaaatatattcttttactcattggattggcactcctcagcatctgggtttttgcaaaggtacaatttttattgtctctttcgattggatttgattgatctgccgattctctgtttctcccgagctttgtgggttaagatctcgattatctatctgggaatctttagattttgtgttcatcggagctgttaatcgttggactcgctagtgttcttctcttgtaaaaactttgtggaggagaatctgattgtaggtatagtgtgaagtgagtttgagctgaattctgtagctttacatggaagtttttggttgatgataacgtcttgtactttgataccatatctgaccatagtcgccagattcttaatcggatctagttcgagttataagactcttcaatagtctctccttagg

SEQ ID NO: 70396 - DNA, 333 bp, Arabidopsis thaliana landsberg
atcgatggacaagtacacccaaatttacactgtatactagacccaaggacatactcctacgtagatccaatcttcaggttttgcaatctgaaaaggataaggagggaaacgggatcttaactcaatagcgttctaccttattctctaatctggtgacatagagacatatctaatactgaggaaagcctgatccgatggaagcctaatgtacggccaggagggagaactttgagatgtttatagaccccccctaaaatatgtggtcaaccagccaagatatcaaaaattgagctcacatgtaaagaacacacatggaggaaaacctggacgctt

SEQ ID NO: 70397 - DNA, 460 bp, Arabidopsis thaliana landsberg
agtatcgtatcccgaaagcccgacttcgatgcattcatcggtaacactcctaatttcttgttgtaatcttgtgtcatattcggcttgatcagtttaacatattatcactggcttatacagacccgcaaaagcagtacgcggatgcggtcatagaagtgcttcctacgactctgatcccagatgacaacgaagggaaagtgttgagagtgagattgataatgaaggaaggtgttaagtacttcagcccggtttacctattcgatgaaggttcaaccatctcgtggattccttgcggccgcaaactcacttgctcgtaccctggcatcaagttcaactacgaacctgactcctactttgaccatgaagtacattcatattgcataatgacatattgtgagaaatgaatgaaaatgcatgtgtatgaaaatttagactcattgcatatatctccctttttggt

SEQ ID NO: 70398 - DNA, 132 bp, Arabidopsis thaliana landsberg
caaaacaaggtggctcgtccatggcctgcgagcaaccacatttattttccctctgaggaacgcgcccaactgggcgattgtcttatatcatccgtcgcgagacaattcttcattttgtggatgtgagcggat

SEQ ID NO: 70399 - DNA, 151 bp, Arabidopsis thaliana landsberg
gcggagaggaaaaaaaacccaggtgacagctggaaaacaggacacgacaaaaaacggccaggcgtttggactccagtaaccagagaaaagcacggggaaaggcgcctgatgacaccaacgagggcacggaacaagagctcaaaaaaaccag

SEQ ID NO: 70400 - DNA, 3661 bp, Arabidopsis thaliana landsberg
  unsure (1)..(3661): unsure at all n locations
tttcttgcggacattactagtgttggaaattcccttttctttttaggtagccggttggttgtcagtttactggtgcaattttcctgtagatctgggcctgcagcatcattacctggcttgagagatgaggcgatagtttaatctttcttaggctggtcagagtaactttttttaaaaattgttaatccagaacttgaaaatttcctaaatttatgcaggatgaagacattgaaggtgagggtcatcaagcaaaacgtttgaggatgacttctgatactttccaagatacaattggaaatgaggagctttcattgtttggttcaactccaaataactctgattcagcacaggtaacaagttctgtcttggttagagtttcgtacaattttctgttgaggttcaatcttggaaaaattagatggctctactatatgaatttctcctttccatgaagtttctcatattttcttttccaataaatgcagaaatcgttttcatttgcagtgagagattcactagttaatgttggcccagtgaaagattttgcgtatggcttaaggattaatgctgatgcaaacgccactggggtttccaaacagagcaactatgaattggtgagccgtttgggtagaagttcttatattatactagccatggaactgttttatacaaaatataacttgcttagggttgttatttagtaatgtctagttttgaagtattcttttacgtaacaatgaaatcctttgttccacaactttatttgttgacatgcttgcctcatatttgtctaaaaactgtagcccccaaactaaaaatctgaattttggcgtttaggtgtgctgttctggtcatgggaagaatggtgctttatgtgttctgcggcagtcaattagaccggaaatgattactgaggtatgcgtatatctcaaattgtgtctggtatatgagaagattgggaatcgtccatttgttgatcttttagtttaaaacccttactcccattactatggcatggagaggatttcatttaaaattcattagtttgtagtgagctctgaacagaaggcattgttaggacactctcgcgggtttatatctttcacaattactatccaccactggggtatttatctgtttagtagtgatatagacagaaaagtggaaattgttatgtgaaaagtacaagttagaacttagagggggagctcactgtagaaaaatggggatgtatccgatctttcctagtaatgctctgtatgtgacctagtctctttaatccttaagcacctctattccggatgttcttgtgggtaggttgaacttccagggtgcaaaggaatatggacagtttatcacaagagctcccgtggtcataatgctgattcttctaaaatggctgctgatgaagatgaatatcatgcctatttgattatcagtttggaggctcgcacaatggtatattttgcttctgtgtgttggttgtttttcattagatccttttattatccatagaaatacctacaatgtttgccttttcaggtacttgaaactgctgaccttctcacagaagtcactgagagtgttgactattatgttcagggaagaacaattgctgctggaaatctatttggaaggtaattagctgccatattatgtcttttgagatatgcttttcatagaagtatttttttcctttacacccatctatcttattataatccccatgtaagctctatccatggcttcttttcagtcattgagctgtttctactacatgcagctgtaagatataccaatattgtgtaatattaacttccatctttctttttcaggcgtcgggtaatccaggtgtttgagcatggtgcccgtattctggatggttcttttatgaatcaagaattaagctttggagcctctaattcagaatccaattccggttctgaaagttccactgtgtcatctgtttcaatcgctgatccatatgttttacttagaatgacagatgacagtattcgtctgcttgttggaggtatgttatggaaagatgaacatcttattgcaattgttgatcgttgtaatctattatgaacttgagcatcttgaaatgttttactcaatctactatgaactttgaattgcagatccttccacttgcacagtttccataagtagcccatctgtacttgaaggctctaaaagaaagatatcagcctgtactttgtaccatgataaaggaccagaaccatggctaaggaaagctagcactgatgcgtggctttcgtcaggagttggagaggctgttgatagtgttgatggtggacctcaagatcagggtgacatatactgtgtggtctgttacgaaagtggtgcccttgagatatttgatgtgcctagtttcaattgtgttttctctgttgataaatttgcctctggaagacgccacctctctgatatgcctattcatgagctagagtatgaactcaacaataattccgaggataatacttcgtcaaaagagataaagaatacaagggttgttgagttagctatgcaaagatggtctgggcatcatacacgcccatttctctttgcagtattggctgatgggacaattctttgttaccatgcttacctatttgatggtgttgatagtaccaaagcagagaatagtttatcttcagaaaatcctgctgctttaaattcctctggtagttctaagcttaggaatctgaaatttctacgtatccccttggacacgtctacgagagaggggacttcagatggagttgcatctcaaagaattaccatgttcaagaatattagtggccaccagggattttttctttctggctcaaggccggggtggtgtatgttgttcagagagcgactacgatttcattcacaggtatgatattctctcgtagagatgattttgtgttcttgtgttttaaagaactgaagcactgattagtatgaattcaatctgttaaaattttgggtttttctgaatcaatttcgttcatttcatgctatcacttttcagctgtgcgacggatcaattgcggcctttactgttcttcacaatgtgaattgcaatcacgggttcatatatgtcacagcacaggtttaataaattttctacacgtcatttctgttgttgcttttgctattcttattattgtagcatcttgactatcaatttcgttgacaagatggttcatattcatttatatcagggagttttgaagatttgccaattaccttcagcatcaatctatgataattattggccagtgcagaaggtaaattccagtttttttaatcatctttgcttactgttgattagatggaaaataataagtgtacaaggactgatcacgttgatacctgatatctttgtctagattcctctaaaggccacacctcaccaagttacttactacgcggagaagaacttgtacccgctgatagtatcatatccggcgagtgcattagcatgataatatactctaaattggtctacctgatccgaattgcatctctntggctgccttcaataaatgaggaactctattgtggttgagatggcagctgcgatgccccagctccccgttttcctttatagctatcgcgatttttatccttaattcatattatc

SEQ ID NO: 70401 - DNA, 161 bp, Arabidopsis thaliana landsberg
ccgtcaaagcacagtcgggatgcatcgactgtcccgtcatgtatcgggctaatgctgcactgaccttgctcaccttgaacagcatcatcgatgcccctctgggccttacctttatggcctattaactgctccgggcataccatacttgcctgatgtcgatt

SEQ ID NO: 70402 - DNA, 553 bp, Arabidopsis thaliana landsberg
tgcgagtctgaggccattgttaaaactatgctgagtaccggcagaaaattcaataccattgttttccatgataccctggttttcgtcggagagtccgagtccatattctatcggcactgttacagcaggaggcagcagcatccctgttctgcgctcatggaaatagtctgctgagaagttcagcaatccattcaggagggtcacatcgaagcctatatcacttttggtagaaatttcccaggtgatattagggttggcttccgtaacaatgttggagccttgtaccatgctgccgttcccataggcgtaagcgttgccatagaggttataaccattcaggtattggaaagcagaacctgcaaggttacccgacttgccccaggagcctctcagctttaaataatcgatggtattgctgttccctttcaggaatggttcttcagaaatcacccagccagcggagaaagcagggaaaaaaccccatcttttaccaagtgcgaagtaatagtgtccgtcgtatctgccgggtgctttcaacaagtatttattgcgg

SEQ ID NO: 70403 - DNA, 4006 bp, Arabidopsis thaliana landsberg
atgaagcgtagcttgggttcaaattcttcaaacaatagtggcagtggaagtaacaagaagtctaagaagaataataatccgagcaatcagaaaaccctaggcgcggcatggggcgctgcttcttctcgttcttctttccggtcttctcctttctccgatttcggaaggtctttctatcattctctgccattttagtgttgggtagtggttagattttgaaattcccatgtaaaagttgaaactttccctctgaaaagtgatgttctgagaaagattgaattttggaaattttatgaagttagaatgaagtaagatgcgttaagcattgttatactatcgtggttgttgattatttttttatgtttttgatgttagttacatggaagtgaaaaataggaaacttcagaaccaatttgagactgaggcttctgctgcttctcgtggtgtttcgggttctgagaaacttattttccaaggggtttcaatctttgtggatgggttcactattccttctcatcaggtttaagctctattgctttggtttctacccattttcaattttgttggtttctagttctttcctgatttggaatggcttaactcttatatcgtacaaactgttgcaggtgaataaaccttagaatttgttgtagtgcagttttgctggtgggttatatgtgatttaacagtgtctagatctgtgtaggagttgaaaggatacatgatgaagtatggtggaagatttgagaactacttttctaggcgttctgttacacatatcatttgcagcaaccttccagatagtaaagtcaagaatcttaggttagttgtttctttaaaattcttcgctaatttcttgcaagttcgtgtcttataatggattgttgtttccaatcaggacattcagcagaggattacctgttgtgaaacctacatggatagtggactctatctctgccaacagacttctgggctgtaagtctatacaagatgatttagtttcagttaaatcatgtatacataagtataaatgtttggatttgatcattcgtctactgtcaacttcgtatgcattcatttatcttgcacacaatctatttaatcatctgattcaatgccatcgcatcacaggggttccttaccagctagatcaactaaatgatacccagccaaagttgtctgccttttttgcacccagaagccatttgacccctcagatggcttcgccggttacatcttttcagcctgatactggatacagtgaagctgaagaaggaagttcaattagagcagatgattcaaaggaagcaagggaccacatcgatgatgaaattgatggcgtttatatcgagaacactactccagaactgacagaacaaacaggaactggtgatctgaaatcttctgaaatgaatgcataaggacttggtaattatgacatagaagaaaaagaagttagtagtgaacttcaatccactactaatcttcattccacttcagacaacaagtccgttcatgcaaatgggaagaatggtggcaaatcaattgcaactgctgctggatcttctacaaggcgtcattcaactctcgaggaccctaattttgtagaaaactactttaaggtacaacttacaatagattcattatctgctggtttcttctgaaaaataaacaatgatctctgcctgagatagtacgcctgtattaaaagtcctttcagctgaaagtaagagtctcattgccagtttatataactacaaataattggatggatagtattgttccaatgaagattctgaagatgctttctctatatgtattttttttgttctgcagaattcaaggctgcattttattggaacatggaggaacaggtaccgtaaaagatttcatggctcttccaatggacttaaatgggcagattcaggccagaatacagctgaaatggccaagaagtcaaccattatccacattgatttggtaatttcctcaatctaggctattttatttatcttctgctttctaaaagtaaaggaaataaaagaaagctgtggtcatattcttcgattctgcatttttccgcagcacaatagctatcttagcatgaaattggccataaaagacagtgaaataaatgcttgaagtttgcgattctaggattgcattttttttgttctgactttcatttgttgcattctagttatttgaatctgtgaaatatttccaggattgcttctttgtgtcagtggtaatcaagaaccgtcttgaattacacgacaagccggtagctgtatgtcactcagataacccaaaaggaacggctgaaatttcatctgcaaactatccagcgcgggcttatggtctgtcttatacgaaagtaatctctcttaagtttggttgcgctcggggtcctgacctttctgtttttatactaatttgatgtcattttctttatctaggagtgaaggcaggtatgtttgtaagacatgcaaaagacctttgccctcagcttgttattgttccttacaactttgaagcctacgaagaggtacttgttagaattgagtgcctattgtatattgtcacatccgtccagcttgtttgacattgtaaatcaattgcaggtagctgatcagttttatgacatcttgcataggcattgcagaaaagtccaggtcagccttcaaaaagatattttttcagttgctggtgtttatttattgttaacatttatgtttattttttggaatttaggcgctaagctgcgatgaagcgtttttagatgtctcagatttgagtgatgtagaaaccgaagttttagcctcgacaataaggaatgagatccttgagactactggatgcagtgcaagtgctggaataggcggtactatgctaatggctcatcttgctaccagagttgctaaaccagccggtcaactttatatttctgctgagaaggtgcttactgctttctataaacagctttctatcttttggtatatgtgtttgtttctgactcgtaatcagtggaaagaggtatatgagcagtggttactggttagtttcttgattgcagaatccattttgtataaatttcggttagctgatagtgtctgccatttttgcaggtagaggagttcttggatcagcttccagtcgggacactacctggtgtaggttctgtgttgaaggagaagctggtgaagcaaaatattcaaacctgtgggcagttacgtttgatttccaaggtaaaacccatttttgtggttatggacatgtctggttgctattcaattgttaacattatcgttttgttgaccagtaattgttgggccacctgtgaagccaaaatatttttgatcgatttggtcttaaaagagcatgtggttcttgtataatatgtagacattatcaatcgctgttaagaagaaattttctatgaaacagttcggcaccaatttctttacttaagctttatattgaaattggttctgaagttaagcaaaacaccataggtagttttatttaatatgatacttgcctttgaagactactgtttcttcttagttaataattgttatctacagacaactttgttaagctataccagaaatatcctatcgagttttgtaggattctcttcaaaaggattttggggtgaaaaccggcgagatgctttggagttatagcagaggactagacctacggtcagttacagcagtgcaggtctgcttagctgttgactcgctcacttgtttcacattcatcgtttttctctctgtaggtgatatttttcttttgatatgtatattctcaaccagtaactttaagattttatgtgtacaggagagtaagtccataggggctgaagtgaattggggtgtgcggttcagagatcagcaagaagtctttattctcgtgaataatgtcttgttgttttttcccaaacattattcatttgatgttagctaagaatatgtgtggttgttgatggttgcaggttcaa

SEQ ID NO: 70404 - DNA, 377 bp, Arabidopsis thaliana landsberg
  unsure (1)..(377): unsure at all n locations
aaacattgcttagttcttctatccaacacctactcagctgctgagagatgggaagatgcagctagttttagaattatacagaagaaacgagggcttgtcaagactccgggttctagctgggtcgatgtttgattaatgatatgaaattagggttttgcagtggaagagaaaaacgtcacccagaaggcaaacagaatggcctactctgttttcagcttgctacttgaaatcacagccgannnnnnnnnnnnnnnnnnnnnnnnnnnnnnnnnnnnnctggatcagtttgcgggtaacatatatatagcaatcttattgggccaaccgactatactaataacgtttcctagtattgtaggtatatggagaagaatatg

SEQ ID NO: 70405 - DNA, 612 bp, Arabidopsis thaliana landsberg
atttggttttattttgaaactgagtttcaatggaaccatgacactaaagaattcaattgtaatataagtttgctaactaaagggggagatcgatggtcaatttgatgctaagaaatttcaaaagttcaatagtagcattcatggaagacgatcaattagacctagggacgttttgattttaaaaaaaatatatttgtgggcttcgaatcatccatacacaaacactgaattgatatctctatgttgtttctttattgacgtgagtagcttgctgacatgactttctctaagagttttttatttgtttttgctgatttggacacattgagaagctttaatgagcatcttttattagtaagagaccgtaaaaaacacataaaatatcttcaaagtaacaatcacccacacttccaaccttcatggttttgaacccacacaaaccatcaaaatgatgattttgttactttaaaacttcaaattgacttttgtgtttgcggatcaacataaaataaaaaaattggattcatcaatacaatatttggtttttgggataaattaataagtatttttatttaatagaaggttaatataaaatatttttaaaattttgga

SEQ ID NO: 70406 - DNA, 438 bp, Arabidopsis thaliana landsberg
cactgattctaccagctctggggcagcaccatgtatggaaagacacagcgtaaaatcatattcagatatgggtttcgtttaatattgaatgacttcgctattgtccttttagtgttaccgagcttgctaactttcttgggcactaaatttgaagacatttttgatgtagatcatttgattgatgacttgaaggacgatgtcctacttgttagagacatacctgactggcatcactgacacacccataactatttgtctagtataacggctagcttgacaactcattattatgttgatgatgcactctgatggacgatgttcaaatgttagcttgtggaattatggcgtcactgggtgccccttgtgtatatgtccgatgcaataatagatcaggattttataattggatatgaagatgaccgagttatttatttagca

SEQ ID NO: 70407 - DNA, 578 bp, Arabidopsis thaliana landsberg
  unsure (1)..(578): unsure at all n locations
ggacctatcccaggcatgcaagtgagtagctggctctccggatatcgcgccgccttcttttgtgagtaccgccgcggatcgtggcgtgggcgttacaactaatgatcagagggacgcccagaatggataagcagaacgaggcgattggaattatcggtgttggcctcatggggcatggcatcgcccgcaacattcatgcgcacggacacccgctcgtgtttcttgatcaccccggtaaccaaccgacagatgacctcatcaaaaagggggcgacgaagctgcatagcgcggcagaaatcgcgcgtgcagtcgatacggtagtgctgtgcgttaccggcacaccgcaggtcgaagccgtgttgtacggcgagacgggtgtgctgtcgggtttgaagaagggcggttcggtggtggactgctcgaccgcgatgcccgcgtcgaccnnnnnnnnnnnnnnnnnnnnnnnnnnnnnnnnnnnnnnnnnnnnnnnnnnnnnnatgacgcgtacgcctcgcgaagccgagcttggcaagctcaatctcatcattggcggcgagcgcgcggatttcgaacgcctg

SEQ ID NO: 70408 - DNA, 521 bp, Arabidopsis thaliana landsberg
aactcatcaaacggtctttcgaaaccaaatatatgttgtcaaaaaagaaatgcaaaataattgactattttttttaaaaaaagagagagttgagctaacaaatgtgttagttaagtttttggtttcgtactactttaagctatgctttaaagtttctaaagagaatgtttaataaataaactggtgtggttgaaaagaaggttcgaggataatttctattggtgataaatgggtttatggtaagcaatatgaaaataacgatgtggcaaatgaaaaaaataacaatattaaaaaacacaaatcgaaaaaaatgttacaaataaattcgtattttttgatatatgaatatatctttttagaaaataaaaggtcaaattgttttttacgaaaattaaagtgtccacttttattgttgctgtcttgctgattatcaaaccgatcatttaattattcccaattaatcacatacttttaccgtcggtagatgtgattgacgaatgtttcgctttctaaacactata

SEQ ID NO: 70409 - DNA, 568 bp, Arabidopsis thaliana landsberg
ctttcctagacagtaaatctaaggtttccaatacgttcttcggaaaaactttctcgccatttctttctcgaagaagattatatccaatagatttaactggaacaatcattacatcactcagtgccaaagaaaaactaccaaatggacaacagagagagctcataaacaaagaacaagcacgaggtgtacataccatctaacgcagacgagacctgacccgcaagtgccggttcaccaaaatctacacaaaggtactaagattcatgatgaaccaaattgaaaagagacaacttttaaacattatccaggcctaaaaaagcaagcaattccgaaaatgattcctttattccactagcagagacgaaagaggtaccttgaccaatgttggaagaatcttccggagacttaagcgatgagagaaaatccggtattaaagacattgacactgttccacaataacaaggaaagtctcaattttgaaatggctcaatgggagaaatctgcatagcagagacattacctggtccagtgtctgaaatcagagaatcttcggctacggctttggctt

SEQ ID NO: 70410 - DNA, 596 bp, Arabidopsis thaliana landsberg
cagtcggacggtggtggtgagctgttcgcccagcgtcttgggggcttcgtcggccggccaaggataagtctcccggccgctgatcaccggccagcgggtttgtggcggcaggtagaagcgcaccaagctggggtcggcatccagcaccgccagcgcggtgtcgcgttcgccgtaggtttcggcaagtcgctgcacttcgtcatcgaacacgtcggagaggcgcttgatgaacagcagcggcagcaggtaatccttgaacttgggtgcgtccttctcgccgcggatctggcacgcggcgtcccacagcatctgctccatcggcttggtgcccagcacctggctgtgcgccacgccgcggcgacgacgctcgggtttgacttcactgggcggtggcggcgtgtcgccgatatcgttcggcacaagacccgcctcctcgacaagctgcaggatggcctcctgctgggccttttgcggtctggacttgcccagctcccaacggttgatggtggcgaacgccacgttgagcttcgctgcgagcttgtcctggctcacgttgagctgggtgcgcagcaggccaatgagtttggaggtctggt

SEQ ID NO: 70411 - DNA, 519 bp, Arabidopsis thaliana landsberg
  unsure (1)..(519): unsure at all n locations
ggctnnnnnnnnnnnnnnnnnnnnnnnnnnnnnnnnnnnnnnnnnnnnnnnnnnggttcttttcgtcggcgccgggttccagcccgannnnnnnnnnnnnnnnnnnnnnnnnnnnnaggatcttcagcgagctgtccttggggaattgatacctgctttccagggccagtgtgacgctcgcgcggaaggtcttgtcgtcgaacgtgatggattccacacggtcgacgacgacgccggcgcttttcaccgcggccttgggcttcagcccgccgatgttgtcgaagcgtgcattcagccggtaggtcggctggaagctcaacgtcagcaggttcgccggctgcagggccaggaacaccagcgcggcggtgccgatgaggacgaagagccccacccacacgttcttcttgttgcgctccatgtttctccctctttcaaatactgaacatcatcgcgggcaggacgaagtccagtccgagcaccggccatgaggtccttaccccccgtgcgcgtggtcgcgcg

SEQ ID NO: 70412 - DNA, 451 bp, Arabidopsis thaliana landsberg
  unsure (1)..(451): unsure at all n locations
gacacgtcgctggcattacagagtgcccgggctcgcgcggacgcctggatgacacgctctcactgagacgggaacagcctcgatatccgatcgatctgaaccgagtagatgtacggcccctgcttctccacagccgcgagtatcgcagtgcggttagccacgaaacggccaaccatgtcagcggacgagaggtcacccctggtgatcacaaacagcgagccctgtgcgtaatgnnnnnnnnnnnnnnnnnnnnnnnnnnnnnnnnnnnnnnnnnnnnnnnnnnnnnnnnnnnnnnnnnnnnnnnnnnnnnnnnnnnnnnnnnnnnnnnnnnnnnnngctcgtcggcgggtactccgtagtgctcggccagcgtgaccaggttccaatcgtctgcgcgcagcgccgcaggtacttcgtgcggccgagactccggtcgagaaagaacttagga

SEQ ID NO: 70413 - DNA, 604 bp, Arabidopsis thaliana landsberg
  unsure (1)..(604): unsure at all n locations
aagnnnnnnnnnnnnnnnnnnnnnnnnnnnnnnnnnnnnnnnnnnnnnnnnnnnnnnnnnnnnnnnnnnnnnnnnnnnnnnnnnnnnnnnnnnnnnnnnnnnnnnnnnnnnnnnnnnnnnnnnnnnnnnnnnnnnnnnnnnnnnnnnnnnnnnnnnnnnnnnnnnnnnnnnnnnnnnnnnnnnnnnnnnnnnnnnnnnnnnnnnnnnnnnnnnnnnnnnnnnnnnnnnnnnnnnnnnnnnnnnnnnnnnnnnnnnnnnnnnnnnnnnnnnnnnnnnnnnnnnnnnnnnnnnnnnnnnnnnnnnnnnnnnnnnnnnnnnnnnnnnnnnnnnnnnnnnnnnctttgattcatctatttgatcaatctactagaaaaggtaatcaataatctgttgtttgcggatgatagtctctatatgtgtaaagctgataaagatcagagtttgtagatgttaaattgtttagataaatatgagaaaatctctggtcaaaaaaatggattgaagataaaattgagattcagatagaaagtgaacagggaattatctttgatgaccaaagtgttttagtggatctaagtagaaacttttggaatatattacagtc

SEQ ID NO: 70414 - DNA, 530 bp, Arabidopsis thaliana landsberg
  unsure (1)..(530): unsure at all n locations
ttttaactgcaacaacttatatttctctttttacttattaatttacattattataactacttttcacttttaatacactctctttctcacttattcttgctgaaataatnnnnnnnnnnnnnnnnnnnnnnnnnnnnnnnnnnnnnnnnnnnnnnnnnnnnnnnnnnnnnnnnnnnnnnnnnnnnnnnnnnnnnnnnnnnnnnnnnnnnnnnnnnnnnnnnnnnnnnnnnnnnnnnnnnnnnnnnnnnnnnnnnnnnnnnnnnnnnnnnnnnnnnnnnnnnnnnnnnnnnnnnnnnnnnnnnnnnnnnnnnnnnnnnnnnnnnnnnnnnnnnnnnnnnnnnnnnnnnnnnnnnnnnnnnnnnnnnnnnnnnnnnnnnnnnnnnnnnnnnnnnnnnnnnnnnnnnnnnnnnnnnnnnnnnnnnnnnnnnnnnnnnnnnnnnnnnnnnnnnnnnnnnnnnnnnnnnnnnnnnnnnnnnnnnnnnnnnnnnnnnnnnnnnnnnnnnnnnnnnnnnnnnnnnnnnnnnnnnnnn

SEQ ID NO: 70415 - DNA, 279 bp, Arabidopsis thaliana landsberg
acaccagcgttggctacacatccttaacctctaatatgacctactgcaggttgtagaccactcctttatcactccggtgggatggcatataaagccattgatggactccggttcaaaatggaaaccgcatatggaactgattttgactccaaacgcccagatgctaccatctccaacaccattccccatggcatgcccaccatggttcaatggctaatatatacaattccgtaccgccgaagcacataagcggatctgaacaggcattttaagccatac

SEQ ID NO: 70416 - DNA, 551 bp, Arabidopsis thaliana landsberg
cgataaacccactgatgatactttttctagtaagcatatgtccataacaaagtaagaagttgaatccaacatattaaacaccatctatatctacaactaatgtgcaaaatttcatctcaaaaaaaaaagatgcaacattgtgaaaaaaatgttgaagacttacgcagatacaacctccttgccaattctacagtatagcttcgccttctttgaatcttgagcgccctgtaattcaccagaaacttcaatctcaaaagttcttaaatacaatcttcgtcttgaaaaaagagttttatctttctgctctgctgtaatatgtaattctcatttacaaaaacaaaccacaagtttcaagaggaagattgttattcacattctgaaattcatactacacgagcaagagaaacttccactataggcttcacaattcaaacatggtgaattagctaatagctttcaagagtgacataacactgaaagctagactctttacaataacacaattaattgatataaacccataatcaaaacaactctttctatctgaggca

SEQ ID NO: 70417 - DNA, 138 bp, Arabidopsis thaliana landsberg
gcaacaggcagaattcattcatcaactttaatctttaataggaaagtaataatagtacaattatgtcggaaaatcattcccatcccatctgtctttattatgtgctaacctaacagctcatcgagaaatcgaatctca

SEQ ID NO: 70418 - DNA, 1490 bp, Arabidopsis thaliana landsberg
cataagatgtttaaggtaaaacctcctataccatctcatacaaaatttaaaactgtggtaatcagtcttgtttaagctttcatctggttgaatatttcagtaaattctccgaactttcttcggcttccaaggtggggaatccattgcgaatcatcaacgagtttttgaaaatctatgaagatgtcatgaaatacagtaagatagcttcagaaaacagtttcagcttgtcatctgatcaacaaaacccaatctctctttgggttgaagctgcattagctactaacctcgaggtggtgtcactagtgaaaagccatgaatcaccatcgtctctgaagaaatcaatgcctactcgtctctctcctagaccttctagcaagacaggtttgttcttgaaattgaaacatatttccattacaaactaacatacataacaaaaatgcagaaaagtaagtttctatctttgtggttgttttcagacaatattgttgggatgtggacagacttagatggcttgaaggaaacggctaagtttgcggtgaatctacaatctgaaatgcaagtgtggttcattgagttcgtggaagaatcgttagacaacaaaaacgcagcaaaacgatctttagacggtagttccatagctgcagttttgtctcagctgaaacaagttaacgagtggctggaccgggtctcgtcgaaccaagaaaacaagatcacaacaatggacaagatcgagcggctgaaacgcaagatctatggattcgttatccatcacgtcggatctacatatgacaactctgcttcttcttgatttcatctttttttttttgtctgcaatcacgtttcaatgctttgtaatacaatggctcatgtttttaaagataatctgcaacggttcaaaaaaagtgccaatttattgaataggttatacagtaacaagcttcttaacacatggctaaagatttgtttttattcatagaatactttggtggacagttcttaaacagagaaagcaaaatgagaatcagacttttaactcttccacttctggacttaatggtttaaacagagcttccacttcgttttcgtctacctcttcaatgcttgtcgggttccattttggattctgcacaagatttttatcagagaggatcacttttgttttaattgagctagagagctaacgatttgagtggcaatgaacaaacctgatccttgtcaatcaaaactgctctaacaccttcagcaaaatcaccacgcagggcagatcttagtgcaatgcgatactcagttttcattacgccattaagcttcacgaagaaaggttaatatgtaaggttaatagtcttctttgcctcctgaaacgaagaactataatgaagttctaagagttgaaaaaactcactgttgctaattcggtttcgggtttactcttggcacatgcaacattggagaaatacttttgtgttaagtaaagagaaaatggtgctcct

SEQ ID NO: 70419 - DNA, 318 bp, Arabidopsis thaliana landsberg
ggaaaacaagacattgacggctgcagcagctgcttcctgccttggtgaacgttgaacataacacaattttagaatctttatgaacacaaagctgtaggagactcccgagcatatatgagcgtacaaaagtcaggaagtaatgggctttactagcaaacatattgggctgcggaagaaaccttactttcaatgagcctattaataacgatgggcgaaccgggatgagtcttgcatgaaaatggtgcgtaattttactgctaaaagaagaatgggaaatcgggctcatattcggaccctacgtaaaaatacattataggg

SEQ ID NO: 70420 - DNA, 456 bp, Arabidopsis thaliana landsberg
  unsure (1)..(456): unsure at all n locations
agactgagaggatggtccctgtcgagttgacatcgatccaggcggaatattatcgtgcaatgctaactaagaactatcagatactacgaaatatcggaaaaggggtagcgcaacaatcaatgcttaacatagtgatgcagttgagaaaggtttgcaatcacccatnnnnnnnnnnnnnnnnnnnnnnnnnnnnnnnnnnattggagtttcttcacgatatgagaataaaagcgtcagccaagttgactctgttgcactctatgcttaaggtgctacataaggaaggccatagagttctgatattttcacagatgacaaagcttctagacattctggaggactacctgaacatagaatttgggcctaaaacatttgaaagggtagatggttctgttgctgtagctgatcgtcaggcagctatagcacgtttcaaccaagacaaaaatcggttcggtt

SEQ ID NO: 70421 - DNA, 155 bp, Arabidopsis thaliana landsberg
tatgcatttatgttttgggttcgatgtaaatgatatgcatcatctattcgagtattaagaacaacttttacatatcaaatccaagtgctttattgaatcttacttacatggggatcactggacgtgttgttttttgcttgcagagaatcaaatat

SEQ ID NO: 70422 - DNA, 483 bp, Arabidopsis thaliana landsberg
cggcctgctatgtaagtataatgtctctagaaatccgattgactggggagagacgtgagaactgacactcatgactggccccgactcctatccactgctagttaactccctgcacttgttccatcacctactatgcggtgcagcagatgtcgaacaccagtcgagtgcacaggggcgagatgcacggcgacaggacctaagatatgagccaggacactggcccaagtctactcttcaggactctgatacgagagcctctagttctctatatagccatgctaatcggataaggatgatccgacttagccacatctatggaactatgctcgttccagagcacatagagagaagatggccaattggtattacaccctgccattggagattatatagccatctactaaccatgctggtgaacaacggaccttgattgagatcgtgcgtagctagctcatgatctgaaccaccaagttcgagaacatt

SEQ ID NO: 70423 - DNA, 1056 bp, Arabidopsis thaliana landsberg
ggcatataccaagctactaccaattcattgattactggataaacttgaaacaagagtcgtctaattgatattcaatcaacacattgtgctaaaacactacgaccactacatagaaaagctaagtaaacaattttcgtagttctacgaatcgcgagtcttaaacactaaacgatgaatccatacgaacatggcgaacgagggatccagaaaacgccattaaagatacataatccaactagcaacgagtcaacatcaaagcatcttcatagacattgattccgaaactttttcataaagaatagatcaaagcatacataccagttcaagcgaccaggaagacgatcaatcggatctaatacaatcttcaatcactgcctttttcctaggaaatttttgtttctctctcggccccaattttacgaacgatgacactaaagaacgtgtttggctccttgtttaaactaatcctctctcggatatcttcaccgtttcaaggatagtagtataaacgacataacgttcggtcaaagagaacaaaaaacgtcaggatgttattctattaaacgtctgatatatctatacggcgtagttttgaagttgtcgactattcttcatcgttctctctgctctggtaaggagattgctgctacctactgatgcaaatctgccattgatacatctgcttgcggttagggcaaagatgaggaaacgcgatttggctattttgatgctctctggatttgctatattcttcactcttcaggtgattttacacactaatcgtcttcttattctttcttagttcaatcaaattgtagctgaacttctagaatcattgatcgatctgttacttgagaaagctttgaattttcctttgtgggtagaacttagactgctaattcgatccgtaagtagtgtcatgttagcgaatttgtagaatttccagatggaaccaatggattcaattttcttattaatggtgcgtttacttgatatgtgggacttgatgacttttgcagcacgagggtgattttgcgttcaaagaagcagggtttc

SEQ ID NO: 70424 - DNA, 568 bp, Arabidopsis thaliana landsberg
gaggcgtcaaacctgagggggtccttttttaaaaaaccggtcttatttggccccttttttattccaaggctcttttaccttgaggccgctggctgtgggttaatttctaaatgcctcagacctttggatatatgatttaagtagatttatattcttctgttggtttttttgaattttacatctaatttagcgattttgttttgttttgttttaaagccattccagcatcctaatgctagctccatagatttaccccgaggctttgctccacccatgaactttcaggtaatgttttatgtcatatatgtatctgaagactatttatcagctcaaccctacatgtgttttgcatattttcattacagtttcttcctaccattcaagctcctcagtctgagcaagttgctcgattgtcttctcagaactttcaatgtgttggcagaggtggcacagtattgagcattggatatccacctcaatcttatgcacctcagttattacaatccatgcaccattcacatgaaagacccagccaattaaatcaggtgcaagtgcaacatgtgccact

SEQ ID NO: 70425 - DNA, 461 bp, Arabidopsis thaliana landsberg
acatgagttgagctaaacttaacactatctagaaacatcttaatgtccctttggaccttaagcctagctatgatgatattgaaataaagacaatatcccaaatttagctatataaatatatacatatgtatatgttctaattggaattatactattagatttctctatgattaatgaattagctctactttaaaattcagctgcgttacgacttttttttttataatatgtactttgaaattctacctcatataagtcataaaaccttggcaaaattagcaattctcaactaatgtttaacaaatagttgttaggttcaccagcttctatttaattatttagttcgatgactaaaaattaaaaaaaagaatctgaaatatggattcttgtagagatattccagataattatctttttctttgttggctctaggtgataagttaccatggtttagaaaaaaa

SEQ ID NO: 70426 - DNA, 278 bp, Arabidopsis thaliana landsberg
ggtcgagacacttgctcgttggacaacaatcggaaacaaatggttggggtttcacttatcaaagtttatattcagatgttgcactaattactttcactcgctcgcggagatacacacgatgttgcttgctgagatataaaagtgtcatatgtttgaggctacctttgcttggaatactgacaactgcctttggacgatcgtttaaacgccaagctcttgctgagatgtgatcctcttgcggatatcatcacattacgacaacattgacctacgactgc

SEQ ID NO: 70427 - DNA, 559 bp, Arabidopsis thaliana landsberg
aaccggaacgatcaaaggcaacgctttcgacaccggcagccaaggcgcgctcggcgacggccttgcccaccgccgtggcggcagcgatgttcttggtgccgtccaggccttcgctgaccgacttctgcaaagtcgaagccgaggccacgacctggtcgccggcggcattgaacacctgggcatacacgtgctgaccggtgcgatacacggtcaaacgcggcacggtctgacgctgaatgcgggcgcgcgtcgacttggcgcggcgctgacgggcttgtttcttgtctttcatgttcaatctccggaagcggatcgacgctgcaggaaccccgacgggattccttacgccttcttggcttccttcctgttgatgtattcgccggcgtaacgcacacccttgcccttgtagggctcgggcggacggaaaccgcggatcttcgcggccacctggcccacaacctgcttgttggcgcccttgaccacgacctcggtcgcgctcggcgtttcgatggagacgccctccggtacctcaaactcgaccggatgcgagaagcccaac

SEQ ID NO: 70428 - DNA, 384 bp, Arabidopsis thaliana landsberg
  unsure (1)..(384): unsure at all n locations
agtgagaatttttaaatgtttatcgaaacttatgaagtttgatctctctattgtgaagtttttgaagatctgtgatcgctaactcaaaagtttcaatgcgtccttaatgtatcgactaataatccatacactctgaaattatcatataaagannnnnnnnnnnnnnnnnnnnnnnnnnnnnnnnnnnnnnnnnnnnnnnnnntgagtgttaccaaactaccttacgactatgatggccgtgatacaagacactagaactactacatatatccggggtacatcagcgaatttggtaagagtacatgcatatgaatacacctcggggcactagttacattacatgttgacagctgacttgtcactagacagactacatgtaaagga

SEQ ID NO: 70429 - DNA, 379 bp, Arabidopsis thaliana landsberg
ctgtcccgagctcctggccgagcgagacaacgagcggctcaaggcggtcgcgccgctgatgttggcggcgctgcgctggatcgccggcgccacgccgggcagcggcgagctgctgcggctgatggacggcaccccggtcccgtgcggccagaccgtggtcaccgtgaaacgctctgacctggccggatacgccggctacggctattgcgcctcgcattcgcgggtctactggggctccaagctgctgctcatcgtgacctgcgacgggaccgccaccgggttcgccctggccaacccgaaactggacggggaacgcgagaccgtgcgcgtcatgctggacaggcagaccgagaaccgtcccgaccccggcactcaccct

SEQ ID NO: 70430 - DNA, 651 bp, Arabidopsis thaliana landsberg
cttgtgaaaactagttgtgaaataaatggtgcgtgttatgacataagaggtattatgcttataatatttgatagatcattactttctttgattctttaaggttgatagatgctagcttttatatagaatatagttctttaactgatttctgctttataaacgaagaacagacgttgaatctagaacatgaaaagctccccttaaatgtgaaccagatcagtggctaaattaatgtgtttaggaatgatttgctgtgtcggcttagttgtttgttttaacaactctattttaacatagaaaagctgtgtgtagtgctctgatctcgtgagcattcttgtgcgagactaagcttgttcttgtgagttgattcacgtagtggactgctgggacagaacatgacgattagggaataacactccgcgattcttgttcttcttctgatctctcagatctcgaattcactctgtttactccatagttggttaggtgcttccacattgctagatagatgcagattgatgcttaattggtaatattccaaccagggacccctagggatgacttctagagcattacttgccccgtcctttggcttaaaaacagacctcaaataacctctccctttgtaaaataaactttttcaacaatgta

SEQ ID NO: 70431 - DNA, 1088 bp, Arabidopsis thaliana landsberg
ttaaataatatacattgaggcccaagaagtccccgtcggctaaatacatggcatgggatgaatctacgtgacatttgggggatgaacttatccaacttttggggatatatgagtagccttaaagagatggacacttatattttagtcgttttattcaatcgcattttcatttttaaaacgaagaattatggaatgttaaaataaacaattcaagtggtgtggtggtggccaaatagttgacaattaaaaaattattttctgtttttttgattctatatggaactggttatcactgtttttgagtcaatattttcaaaaaaagttgtgtggaattaaaaaggaaaatatgttttggaattgaaacttaggaaagcaaatataaaaaaagacttcttactgtagagttcagcaaacaatgaacactctatgggcctgcggtcacattttctgggcctggctgtatacgtgagctttaatctatctaacatttagcaaaagtctcttgcaagaagttgcagagctcttgagcaacaagagaaggatactcttcttgaggtaagagtgcaccttcaacttccacgaatttgcttactcctttcgctcctcttaatgcttccatttctgctttcgatctttttggagctccttttgttgacataaccataaccggtaatttcccttccaaatcagcaaacagttggagaaattcttcccgggatgataccgggtcgagtaaaccagtcagaaaagctgcagggacgtagcgtgatcccttctgttttgttaactcgtatctgctttggattatggcatcggtcacgttggtttggtctgcataaacatgggatttgtactgagactcgattgacttctcgttgctcaccaacatgttgtacatcatccaaccaactccaggtgctcttagagttcctcttagcataccatacctgttgagaaaaaaacagagcgatcaagagaggaaagtttttatcttcttcttttctcaatgaaaagatgtcaacggacctcgacaccatggaagaatcacggccaaatacaatagggagaggtccagcccatgtaggtgc

SEQ ID NO: 70432 - DNA, 445 bp, Arabidopsis thaliana landsberg
tctccactcttccttcattgtctcatcaccatcgtcaaattcaacaatttggtctttttcagtttcagcttcaacatcagacgactctgtttcttcacacacttccgatcggatctcgtcgcatgatgatgagttatggctgtccgaattcagagaagaggttttgatcaagagatcatgcttctgcgccaaagagcgatgtgaacggtataattcctcgagcaattcaatgagctttggcttattctcgtaattaatctttgctcgtttcatcaaggaatctccttcatcttcaacctcatcaatcacgctcagcatttcctttgtctttgaatcaagctctgttattttatgttacaacaaccaaattagtaagagagcttttgcgattagggttagaacttgaaaaaacgtagaaagataagtttttgagttaccagagaga

SEQ ID NO: 70433 - DNA, 569 bp, Arabidopsis thaliana landsberg
gctagacctgatcatcgcttgttcatgtatctttttaatgaatgaaatttcttaaatgttctcgtagtaatcccaataatccaaacatactcgtattaatataagctttgcggtcatgtcggccatattgttcgaatttaaatgagtttttttttggtataataaacgctgaatacttttgatataaaataagtagagtggatctgatcttttgaagaataataattttagataatatataatttatgaggaagaagacgacaaaaaacacttttagaggaagaagatatggatgatctctctcgattctcgaatctttcccctcgttacttattttttttttgtcaacttcccttcttgcattaaaaatctatacattcattttgactgactctttgaagaaaagttttaagaatttttgagtttgggtttcaacgaagtaacttcgtcaggacttggtactaaaaaacgatattgttgatctcattttttttttttttttatccaagctgctgcgtggaatcatatcgtcttttggtttgcatttgatgtacataaagaaaaacaaa

SEQ ID NO: 70434 - DNA, 559 bp, Arabidopsis thaliana landsberg
gtccctaatatatatatcatacacctacgtagatgataagtaagagagggtaactaagaaataccattctgtttttggatagaggaacagttcgcgagggcttctcctgcttatggttaaaagaatcattctgaccgttgaggtcaatagagattccatcagacgataaagagtgtaaagatttgttcgcttctggaactggcgtcttcttcatagctactggtgaaggtcttgattgacgaacctttggggtattagcagcaccattctgatagttccttgtactcaggggtgacggtggctgtgactccgtctttttcttaccaaaactccccggaaggctaagaatctttgaacctgtaacaaccaaatcacaatgagaaaagaaaggaaacaactttgcagatccatcgaaagctaaaaagccttgatcaaactataactgtcataacagacaaccctccaagaattatccttgaagcaatacataaagaaggacaaagacagaaatatccatcacaacagaagcatactcatagagtaacggatcaaacatagt

SEQ ID NO: 70435 - DNA, 303 bp, Arabidopsis thaliana landsberg
accaaaacaaggggcaccgccaagaaaaaccaaatttggcacctccaactaaccgggcgggaaccggggacacagccaaagacacaacaagcaccaacacccccggaacaggaggagccccggacaggccgccacaggcggcaacgaaggtgcgacaaagaaacagccacaaaccccgcccgaggcaccccacggctagcagcgaacgcaacgaccaagggcacgggcagcacccaaagagcgacgggcggcgggaacaaggccgggaaccgaagacacacggcgatggcgaaccggagagaa

SEQ ID NO: 70436 - DNA, 389 bp, Arabidopsis thaliana landsberg
cgtgtctgtaacacaggatacattctttaatcttcaattgattacagggtttaatattttcttacaatgcctaatcctccgctgggctctgagtgcgtggacatccatcttcatacctgtatgctgaacattgaacatgaatctgcgtctatctgtctgctggctcgtgcatcttgcctactaggtacattactcagttgatcacgtgacttagagaatattcattctagacttcctttgagatgtttaaagacagttattgtgttctctgcagacggatgttgtatgtgtaacacctgccatgtagctcggagcttgttgagggcttctatatgtgtccacttttatgcgaggcgccgtaacgagagccgtgctttaaagatgttaag

SEQ ID NO: 70437 - DNA, 130 bp, Arabidopsis thaliana landsberg
agatatatggagctagtcggatccttgtttggcggccatggatgctatcgagaagatacaagaagcaaggaatctttggtccaaaatacatgatcttgtattggacccttctagagtttaaattaattaa

SEQ ID NO: 70438 - DNA, 227 bp, Arabidopsis thaliana landsberg
aaacccaaaccacaaaaaagacccgaaaaaggacaaaaaggtcaaaatggggggcagaaaaaacggcaaaggaaaaagaccaatggacagatcataacgtcggagggcaaaatgtgggctacacgaaaaggcatcacataccaaattgggccaaacggaaaaaaagctatgaaaacataaaaccataaccaaaaaaaaaaaggtcaaacataaaaaagggatgcaaa

SEQ ID NO: 70439 - DNA, 538 bp, Arabidopsis thaliana landsberg
  unsure (1)..(538): unsure at all n locations
tgatttttttaactcataccttttaaaaaataaaagngtttaanatcnntaacagaaatgtatattcttctaaaattgaaatattaagtaatggaatcatattttaagtaatgtgtgattggaaaaaaagcagtcaattaatcaataattgagattaatgcattattacaaagttcaataacaatctaggcatctcacacaacacacactcgaaaatttagatactactacaaaatcataaccaatgttattcgacattacactactaaattaaaaatctctggaaaagtttgaagaattactaattttaagagaccacttaaataaccccataagtttagaaattaagctagtgagtctaagcaccagcagtaatagtcggaacgagagattgagagtatttcatcaggagacatcctctcggcctcactctgcctccaagccacctggttgctacggntctgcgcatcggcggctaaagggtaagcttcatcttgngtttctgatatctcattctcgtgtaaagcctcatcgtcgc

SEQ ID NO: 70440 - DNA, 938 bp, Arabidopsis thaliana landsberg
cccgacaacaattgatcttcacatgcaccgaatcctcctggtgatgagcccaggctggcccactaagcctctgacttcttcattgtctcttagccggcgatcaaatcggaaaagacctcgattctttcgaacagcagcatccaggtaagtaattagaggccgatggtctgaaccttcaaaacgtttatacacgcatatgcccgtcggaaaggcctcgaaccagctacaatttgccagtgatctatccaaccgcgacttgataaaaaggtcaccccgccagcctctccaagagaaatggtttccggagtgcttgacgtcccacagtccgttctgggcaacaaaggatctgaaagggataaacgatccttcacaacgagctggacctcccactttttccgtgttatccagtgtatcgttgaggtccccagttatgagccagggcgaaattctattctcccccagtaaggagatagactcccagaattcagctctattctccgattgagggagtccataaatgaatgaaatgaaaagaacctggttctcaaacttaagttgagcgtcaatcagattaggagaggacgagagaatctccagattaatcccgctcttccagaaaagtgctaagccgccactcctcccttgcggaggtaccgtgaaatgatgcccataccccatccaatcaactaattgaagaaccttcgcatcctgatttttagtttctatgagaaacataatgtccggaaaaatagtgagacgtatttctcgcagacgatgaactgtcgggttgcttccatcccctgacagttccagcttgctatggctaaggaagggggcttaatgggatttgaaaatcccctgggcccgtggaagaagcatgtatgagattgattggtggcgcacttgattgcccaaatctccaatgtcctgattgagag

SEQ ID NO: 70441 - DNA, 517 bp, Arabidopsis thaliana landsberg
ttaaccactttttttagccacttacggtaacgttggtctcttttggcctgaaaatggcatctctggcggtctgctccctcggcgccggtgtaggactgatatcctcttgacctgagctacttccttacgagcccctctcgtctgttggtctctaccagcgattactgtagtttgcagtttctaccctcttgcttctttccaagaccttctcggccttgctagtgaagtctatagccagtttggctgttaccctgacgttatcttatatcttttagtagttttctcaaaatgtcaaaccgttattccagatctgaaaaggagaaatgggttgctggtacactcaagagttcgcgcaggagatctccagtccgtatacctcaatgtgacacctctgctctcattgcggagaacaaactcactcttattggaagagtcactaacccagcggtgcaaaagccgaaagctgttgctggttacatgcctcagctctggaatcttgagagcagagtcgtgggaa

SEQ ID NO: 70442 - DNA, 1126 bp, Arabidopsis thaliana landsberg
ccggttatctcagacactttcccagctttcatcactttttgggtcaaaatccacggtattcctcttcatttttggtctgaccaaactatcagaacaatcgggaaggagctaggcgctctctcggctagagaggtctctgaagggcgtattagggttccaataaatggtctagaagctctggaaatgtctatgcctataagattaccggatggatctgtcaaaacagtggaactagagtacgagaagctaaaaaaacattgtttcaactattttgaactctctcacgagaagaaggactgcccgcatcctattatatctagaactctagggataaatcagctaaaggcgactcaacggatggagtcggagaggagaagacaggatgatcgcagagaagacaggatgatcgcagagaagacagacttctatctcgccctcctagtgggggaaacagatcccttagtgggaacagaggagacagggttgacagagctcgcccccgggactctacggtctttgctgatctgcggggctacaggcgttcatcccctatcagggactcccgcctacctccatcgtctcgcactccctcgagagctcgaagagaagtctcaggcagatctcgctctaggtccccctcattcagacattactctactggtagagattctggggctttcagaggaagagagttatccaggtcagactctcatcgaagcccaggcgaggtggccccacttctccctcctcccccggcgagacctatttcatctgttgaaacaaggtctgctaggtccagacactctcggtccccaccacagtgtcctccaccctctgtcttgggagaagttggcgaagcctctagcattcctcactcaagaagaccggcgcttgagagaatctcacctaggattcttcctgaatcttcccgtcctacgacatccagatctgattctggccggctacaagaagttaatattcaatatgctgaggagaatgcacaagagctgttaagggaagagcaacttcttctgccacttgtagaggagcacagaatccatacttcccttagattaggacctatttctccaacaatccaactcacagctacccgggctccacggaa

SEQ ID NO: 70443 - DNA, 438 bp, Arabidopsis thaliana landsberg
taaaaccccagagcaaaagcggggtcggtgccaccggaaaaacgccatgaaacctcgttttcctcaaaatgtctattttttggctcgctattcatatctccgccgctttcagcatagtcaacgtcgaaccttcagctctttcctcaacaatatccgttcgaattattccggtgctcgtgcttcgcctctcggcggcagcagcggagccggagccggagccggaggaggtggaaccggagattccaaaggtaattcacatatatatgcttcgaaaagctcctttacatagttagattacagttgaaaagattctaagtttaagttttgagcattttgttctgtaggaaacactttgtgaagttccaatcagattgcaattagatcgattctatagttttgagcttgaatcattgtttcactcaatgtaggcaatgcttt

SEQ ID NO: 70444 - DNA, 468 bp, Arabidopsis thaliana landsberg
cctgcagcagcttcaaatcatctgtgggcggcttcggtgcttcctcagcggccgtagtgctaccttcgatgctttcgatatatgcttgctctaactgtttgagttctattaacaggaggctgtgttcaacctccatctttacaccttttgcgagccttgaaaacccgtctttaatacggtcgcgcagctcgtctttggttaaggacttgtatacgccaagcgttggtgtttgatcgttggcgccccaaagcacggcagacccttcccatagtcctacctctgatatttcgttgtaatcgggttgtttttgctcctttacgacagtgaatcctacggagtgctgggtaatgtcgccggcttcgtacagcggccataccttattccaggttggtgagttcttgtaccggcttacacctacgatgtagtccccttcttatagagttctgaaacttgccgagggcattatct

SEQ ID NO: 70445 - DNA, 115 bp, Arabidopsis thaliana landsberg
tgcaggataccgcaagagaagcacaaaaagaaagaaaccctgaaagaacaaggctttcttttgacgacaaaaaactaaaagctgaggcacgcaccccaagaagaaaaagcgcaga

SEQ ID NO: 70446 - DNA, 291 bp, Arabidopsis thaliana landsberg
  unsure (1)..(291): unsure at all n locations
aaaaaaccgaagnaaacacagggggggcgtccaaagcaacaaacggccaacaaccaagnncggaannnncaaaacaaggaagnnnnancncnaaaacaacaacaaagaaccggaacgganaaannnagcaagaaanggcnnngaaaaacccncnataaaaacanagnaanagnnagncnaacctactggagaaagaaaacnaagaaaangaagccgggattttcataaagggaagcagaaagagnggcattaagganncncccggcaaggcggccacaaagacgagcacca

SEQ ID NO: 70447 - DNA, 576 bp, Arabidopsis thaliana landsberg
  unsure (1)..(576): unsure at all n locations
aggacacgccgtttccatgcctgaccatccggggaattatacgcctatgtccatcaaaccgcgcgcctatatctttgagaacacctatgaattcgagacgatcccgctggtcaaggccacgggcttccgcgaatacgatgcgcgctggctgttcggcaaggagatcaacctgttgggcattcaggcgctgggtctgggtcttggaacctatattcaggagcgcggggttgcgccgcgcatcgtcaccggccacgatttccgttcttactcgatcaatatcaagaacgccctgatgctgggcctgatgcaggccggctgcgaggtgctggatatcgggctttgcctgnnnnnnnnnnnnnnnnnnnnnnnnnnnnnnnnngaggcgccgtgcgtggccatggtcacggcttcgcacaatgagaacggctggaccggggtgaagatgggctgtcaggccccgctgaccttcgggccggaggagatcgggcggctgaaggagatcgtgctgaacggcgaatgcgtggcgcgtcccggcggcagcgtcactcaggttgagggcgtgcaggaccgctacat

SEQ ID NO: 70448 - DNA, 3898 bp, Arabidopsis thaliana landsberg
aaaggatgactcacctctgctcgacgccctgtgttaggtgatatagtcccaacgatgttactgcttggtgctggaggaggagagttaccgaaagagggaaaagaaagccgcgagaagaacgaagccacaaactcagggaactgtgatgtggtcagacaaatttagtgttactctagtgacattgaaaactaaggagccaacaagttgacagagagataaataatgatgtggataacctttgccttgcggatgccaaggatgttcaaacgatacaaggaacccgcaattatgccgcaaattccaggaaagatggatcttttccaagaagatagtagaagctgcaaaaaaaaaagaaaaaaaagaagattatcaatactaagaattcactactcgaacaacaatgatcatacaaacacctatggttttaattacctgcactcctgcgagatatatgaatgacttatcagagaagttgacaccaaatacgcgaaacctcgttgaaacaggaatgtccaagtagaagggtataaacgaagcaaatatcaggccgtatggtccagaggttagtaagtttgctgtggtatctgagaaacaaacaaacaacatatagttgcaataaatatatacaataaagaccaatgaactgaaacacataatcgaattcatgaccaggacaatatcttgtaagagatcttcatgaatattagaacaaaaagaaaaataggagggatactgaaaccaattaagaccatcgcagtaatgtaatcataactcatcagctcccacatcataatcagagaaccacaatccttccttttgcatttttttccatagtttttgtaggagtggtaatgaagcaaatttaagtgaaccaacaaccaccacgcaaatcctacttataagccaaatcaaaggctttaaagaggctgtcttgaaatagaatgatggatacctttaagcagtgataacaaaatgacctcgagtaatagagatacagtccctgagaacaagataaaaacctgcagcaggaacaacaccctttgatttaacttttgtaagtaaaagaaaatagtgaaatttaaatataaaaaacgaaaaaaagaatcatcaccagtaaacctttctagaaaccagttttccaagtgaacaagaaaaacataaaacacatgagaatatatctaagaagcaaagagagtcgagctacaagcatcagttaccgagtacttatttgagccaatctgtctctcaaaaactcggaagtagtatagcaaatacaatccgaacatcaattctggtgtggaggagaaggcaaaagtggacatgattaacttccatatccgaaatttctcaaaaatgtcctgcagcgtgtttggaagaagattaaatagagaaatagtattatgagatatcagatttacataacaagtagaaataacttagaatcataaactaggatgctagaatcaaacatctttcaggtaacagaaacagataattacatgcaagccatcgaactacttaacactcgacaagtgagtctaaaccctccttatcaaatcatgtaatattcagcatcacacgactgactaaaatcgaagttgaagctcataaatgatgataattagcgaaacgagaatcattccgagtgccaacaacgtttgttcaaaacagtaaggcaacagcacactaagtactgcatattgttctaatagatcaaaatcgaacaaattctaggttcatacagcaatttccaaagtaaatccccagaaatctacaccaaatgcgaaatacctggtaagacaaaccgagcttagaagaacgaccttggatcccgaagaagacagtgaaaagagcgctcgtaataacgaaggctttcgttaccggagcattatctgcaaagtcaacaattcatcactcagaaatcgacatttaaatcaggagcagagaagaaactgatcaagcgttagagaggaagacgatacgtacggaaaccggagggaccgccgttcatcttcgttgggtgaacagaggacggcgacgaaacaaccggtgagcagatttcgtgacgaatcaatctggatttggagatcgatgcaacaacaaccaacctttttatcttcttctttctgatgagaaggaagtttccaagaattttttgcttcgaaatcaaacatcaattacgaaatagtactgtataaaaaatcattacatctttaatttttttgtgcaacataaaacatatcattattgttgcaataggcaagagagaatagtccagaagatttcttatagcacaaattaattgcgttttgtagtaagtaatgagagaaataattaatctttatttacggtggagaatagatgggcctatattttcctactgttatttttttccctatcttcgtctccatctaaatcgtgcacaaaattgacctaactcattaattattttatatgaccagtgagctgcagatgtgtgacagaatcgggtgttatagaaattggaactttgaaacatgtacagcttttaaattcaccagactgtacgtaaaaaaataaacggttttgattgaaacgggagagatgtattatttgttcatgaaggaacaaaagaaagatgaaagaagacattttttagttttatgcaaagaaattcaaaagacaacacagccttgcaaaaaaaagcaatacaaacatacttgtccagaaagaagaagcttgaggagacaaagctagtcagaatttggaaccttccgacgctccccacattccctgatgataacctcttctccaaatgtcagggccttgcaaatcccatcttgggttaaagatagcggtactgatgagtctgatgagctagattgcaacaaacgaaaaaccctgaagaagtccttgctgcgtgatgagatgtcgccgacaaatagcatcaaatttaatggtccatcttccttcacaacacaagaatataagtctatcatatacacctcaagtctcgcatctctatctcctgaaaacatatatgagaacatatcaagatacaagacatacaagtttaaaggagaatgagagtttaattgaaagggtaaggaattcacctgcggataggtgacggacaggaataccattaaactcaccatttgattttgtcaaatcggtataaggtgtagttgagacatcaccacgataaccattatccataaggacacgttttatgttactgaaaacatcatgaggaccaagaccatcagggatagggcaaacctcgacgtcccataagacgaatgttttcccacctgtacaaaacggaaaacgcatactaagtttactttactaaactgaaaactcgaataatacaattgattgctttactaaaaacagatcagtaagctgaactggaacagatctacatgggattttttcaattgcagaattcatccgtttcaaatcccacaaaagggcagaggtaaaagcatcaaatctagatatagacagttatggaaagaggcaaaacaacaaacagatctctaacgcttcaagagagatcttaccagcaaagccagacctactatggacggcgaagttagacttatacatggttttgacggattgatcgagaggggtggttacaaagctattggttttatataaaaaaaaaaacgtattaatttgttgaacgaattatataaccagggcagataaccaaaaaggcaaaagatattgattgtgaaataagaagaactaacctgcgggaaaagtataggaggatatattagggttttattgggaccatatgcaagtatgcaacatgtaagggttatgatggatccctggaaaagtgtttggtttcggaggttcataaaggaatagaaaggtttacttattgtagggattaaaaaaa

SEQ ID NO: 70449 - DNA, 4621 bp, Arabidopsis thaliana landsberg
gttgtttagagaggtggtgttttacctacgatctggattgttgggacaagttaggaatatgcatttgggtttttctagttctacaactgcagcgatgcggtctacattcaagctgaaatgggggtttcttggaactgtgaaacaaacaaagaccaacatgtttaagactatacattcagagagagagagagaagcacaatcgaagagaatgaaacacatgaaaatcgtaaatctttcacctttaatgacacgtgctccattcacagccgcatcaaacacatacattgagaaagttggaggacaatctataatcttctccccagggtctaacacgcatctgcaagaagcagagtcttagacagaaaatacgattctggtagaagctcaattgactgaaaaaatcaaatcttgaagccatacctcatgatcaaatcaataagttcgtcagcaccacagcctacaagtatgtattcagactccaaaccagagtcttgagccagtgcatcacgaagtctacgactttgtggatcaggataaacgtaagggaatttcatattgcctaatgcttcaaaaacctacacagagcttctgaaacctgaagttagagaggacaactaactaactaacaaaattatcctttttccagtcatcaacatatctatgaatgagtgaaagaaagatatagacttgcctctggaggaggaccatatgggttctcattagcatctaacttgacaatatcctcaggctttcttcctaattgagcagacaatacctaattacaaacaaacatacacattttagaagataaatccaatccaacccaatccaatcatctataattgtcaaaaaataaattcaatgcaatctaaatatcacctcaaagggtaaaattggctgataagcagccaattgtctcaaatgtggacggataaaagagtctcccatagttatattcttggattcgtctacagctgcacttgaagactgagcacaataaaccctattccggattgagcaaaagggtttcttcaaagctcgagactttcgaagatttgactctgaagaatgaatagagaacgatggagagccctgaacattgatcacacccatcagttttcgtgtctgcgcatatcaaaggtggaatcagttcaatctagaggaaacatctgatgcacatactcaatttcacatcttattgacaagtaatacctgaaaggtgacaggaagaggggcaaatggagataaccctaagtagacgagaagggtcgtgagcagagagactaaagtgactgagatcagtcaaaagcttcgatttttctatgacccacttgcgattcgtggacaaaggtgaggtttttttttattccgagtgactgagaattggcgtaccaatttaggggttatccgaaattgaatccaaaacccggttctgacgaatcgggtctatagtgagagtaggtaagaaagtcttccaagtgtagtgttaaataaaaaagtctactcttatctttttcatatgaaggtcacctaatttttctcccaatgattccggagatacctaaatcagttttgatgcttgaatatgattcatggctatcttttctgtcgacattaatggtggtcttcatatatataaaaggtattaaaatgtttttatgtagttcgataattggaccagacttttgacattgaaatgtttctcatttgacatgttactatagaatcatagttttagtaaattgagaatttaaacatgtttgttttgaaccaagaagtagttggtcacgttagtataaagagaagaactaactactgtacaattctttcttcgacggggattaatattcattctaatttccgatccaagggattatggatcaaagtctagaatcttcgatttatcaagaaggaaaaaaaacatgtcttctttaatataacttttagggagaaaacaaaactctacgattgtgaacttaaggagaaaacaaattggaacagtattttaggcagggcggttcttggcatgaaccaagtgagtagtgagtaagtgtacaagactagtagactacaaacattttgacaattttgaaaacctttttgattcagactaaagtagtgtttcataaagacccattttaaaataaagaccaccaaaagttttagatgttacaaatccttttgatcacacatttgaaaagtgatatcaaataacacacaagtggattgtctcaaatagaacttaaaagttttcgggcggtaaaatgataaaataacttttaccttcctttactattgcaccctagtattctgaccctttttcatttttcaccttataaattcatacatattcaaatcaaaccccacgctacaggcaaatgaatcaagacgaggaaccaaaaaagactccagatgtgttattaaaaatttaggaccctaaaattaatttttgtgaaccacccaaactaaactacaaataaatcattttcagacgattccaattttctccacaaaagccccgtaagttctgaagttcacaaaataacccccccaattcacaattatcacggtggagatcaatcaccgtggatgagttttcaccggcgacctctgagacgaacttcgcaacacaataagcttcttcaaaaccctcatcaacaccaaaacgttcagattcgtcttcttctttgtcttcttcgataacttcatcccacaccccacggccacggcagagctctcatcgggaaacaaagccgttttcttctctccaccgtcgccgccatgtacaattctcaaactctgacttcttggaggcaattcttcgttgagatcttcccataacatatccattttctcctcttctttgtcgtcgatccaacgacttctcatctccacgtacgagaagctcttcctctgatcatgatcaccgtcttttccaatgactaatcttgccaaaccaaagtcgtaatctttccggcgaaaggaagtaaccggtgagtgtttccacaaaggaggtgaatcaataccggaatggtgagaagaatcatgagaagctagcgatgggaaggtaaattcttcagaggagacactattcagagccattttttctgagatcaagaaaccaaaaaataaaaatacttaaaaagaaaaagaagaagaagaagaagagaagaccaaagaagagagacaacacacagtttgtgttttgttttgtgatgttggattcgttactctgtttcttttctgcttcaactgctacaacaagttctctttttctatattatttctttctttctctaaggattataggacttgtagagaaagatttttgtttattgattgattattcgaaagaaatctgtaactatggtaacaaattaatattttgtctcttttgggatcttttttctttcgttacgatatttataggcgattttattactcaataagtcaactctagttttctttttttaggtaatatatagtttatagcccttatacacgtaatcctctgtttgtaatgcaaatcaggtttaacttttaaccatttttaccatgatccctataagatatgtgaaagttgaaacttgtttgaagttaagaggttttatgctattataaagttttaaataaattggttttggattagctataagatgagaaacgtatacaaaaagagtaatgagagtgacataacgcagtttcaatttgacatctcatctaccggtggagtgattgattgaggaaaagatgaacatagaacgttgtcactatctattatcatcaatgttataactccacctcatcaaattactattgactaataataaaacatgtgtgtttcgtcaactttcaaagtctccatttcttgtttttcaaagggtttaaagcttcaaaccaactgaggaagaaaaatagaagattcaatacaaaaaaatgcaaatcttgaattgaaacctttagttatagatgcttgtaagaccaatttaagcaaaacccatctcttgtttataaaattttaactgtcacaccaagggtttaggcgtgggtgtgtgctaatggcgtgtgcttgaactcacagcatatttaccgatattggcgagtgatctcatcctcgtgctcctctttccttctcaatcttcttaaccatttgtaagtgtagacagaaccatggtccatgttcataataagtcgagataaggaaaaaaggttgattctctggtttgcagttatcgcagtggaccaggaaacagagcgaaaaagcttttaaggtgaccggagagattcttggcgtctgagtggaatgccttcttcttcatttatatgcttgcttatccgcaacggtaatattaccgacgaacctgcaataacaatagcgaataacagtcagtttcaaactctcaaaaactccagagggatacagagacttggtattaagaatgtatggatacaacagatgacaatcccttttgtcaatcaccaaaactatgtttacaaaattctagctaggagtgtgtacatacatgtagtatgtatattcttattccttgtagttaagagagagttagaatatcttccgatttcttttcatatccgcatacgtttttttctcattgaatgc

SEQ ID NO: 70450 - DNA, 3682 bp, Arabidopsis thaliana landsberg
aaaggcacatggaacgatttttatgcatatcttttcgtggccattttctgatatattttttatttttttttgtgtgatttgattattgaaaatgctgaatgattgagtaatcgaggatatataaaccatttaatgttttggagaaaaatattgaaaatcagtatactagtatttgtttttgtccattataaaaaattgagagaatcctatggtggtgaagaactcaccggaaaaactaccaacggccaatacctaccaagcaatggtcataatcatcatattgattggttgcatcttttttttttctctcttaaaaataataattgtagtaccctacagacaaatatttcaaaagattcctccaaaaaaatatctccgcattaattcatatgttagaaggctaggtataatatgttcgatggacggaaaaaggaagttgaatcttcgagtttgacggaaaataagatcatgtccttatctccacaaaaacatatctccacagcatataacgagatgatcacatagttcattaatctctcaaattttagtctcatgtacgttgtttttaacttttaattactgttattaaaacagctgatatcatttaacatttacgtacgttaaaacataatttcgtatacaggcttagatttaattagtagttaataaattattgttcttgcattttatatatgatgtgatttttagtcatcaatctttaatcatgcgaagacatttatacatttttttctttctatcattcttattctccacttaaaaataaatgtacaatttagaaatagaattagttctttttacgatatgcgaattcaaacagatgatgccatatcgacataactaacacaaactgtatatgtcagtttagtaatggtgagagctctctttcgataaaaaaaatgaatcaagttatgttatctaaaactgaacttgagattttggtctagactaaaaatttacctttgtatcaccaccatatgtaacaagacccatatattgtatgggcaaatgataatagtataggcccattattaagcccatttcatagaattaattactcgcaaaaggaattatatttgtatattgggtaattgcacgtatcattcttaattaacttcataagatagtaataattaatccaacaaaagaactgtcattaggacatctacagattcttctacactaaaagatttgcggcagttacttaaaatattaaaatgaataaatagatatactctggtttacgtcttctcgattaccaatttacaacaaaacaaaaaaaaatgaggaagagctgaaagattcgcgacgaagcaaaacgacagtgttatctatcgccgccttgttgttctgtaagaatctgaaaaatctgatctttgtcctctataatgttgtttagcttcgatcacttgttctatcgattcttgcttctctgtttcttcatcgatttcgcttcttctagtggatttctctttgccccttttcttctagggtttgatccactgaattggaatttggattctagttcaatcgatttctattacagaatctggaaatttgattagtgttagtgttagtgatggtgctgattctccatttcaggtttaacaagtgtagaggaaccaaagttgaaaactttgaacttcccattgattttaatgttaattactgatcattcgaatctgaaattgaagcatatgagtgcttaatctgtgagtgttagaagaagtagaagaagatgcagagggttagggtttcatctcaaagagcagttgtgcataagcttggtgattctcagatgacattatctcccaaatttagagtagctgcatcgatacaatcgacattgttcgatagatcatcggaattagaactgtctcttagaggagagcccttgattcccggtttaccagacgatgttgcgcttaactgtcttttacgggttccagttcaaagccatgtatcgagtaaatccgtgtgcaagagatggcatcttttgtttggtactaaagagacgtttttcgctaagcgtaaggagttcgggtttaaagacccgtggctgttcgttgtcgggtttagtagatgcactgggaagatccagtggaaggttttggatttgaggaatctcacttggcatgaaatccctgctatgccttgcagagataaagtttgtcctcacggttttagatcggtttcgatgcctcgcgaaggtactatgtttgtatgtggtggaacggtttcggattctgattgtcctcttgatttggtgttgaagtatgatatggtgaagaatcattggactgtcactaacaagatgataaccgcgaggtcgtttttcgctagcggtgtgatcgatgggatgatatacgcggcaggtggaaatgctgcggatttatatgagcttgattgtgccgaggttttgaaccctttggatgggaattggcggccagtttcgaacatggtagctcatatggcgtcttacgacacagcggttttaaacgggaagcttttggtaacggaaggatggttatggccgttctttgtatccccgagaggtcaagtttatgacccgaggacggatcaatgggaaacaatgtcaatggggctaagagaaggatggaccgggacgagtgacgagatttatgatcggttgtttatagtttcggagttagagagaatgaagatgaaggtttatgatccggttacagattcgtgggagacgattaacggaccggaattgcctgagcagatttgtagaccgtttgcggttaactgttatgggaacagagtatatgtggttggtaggaatcttcatctcgcggttgggaatatttggcagtcggagaataagtttggtgtgaggtgggaggttgttgagtcgccggagcgttatgcagatataactccatcgaattctcagattctttttgcttaaaagagatttgatcagtctgtttggtatggtttccaaatgtctgtgaaccatattgtatgaataagtaaaaacttgtcttagtaacatcatcatgatgtttgaactcttgtatcatatatactcatgtgcgtgtataactttaagtccgaaactgttaaatattacatggactggattgttgttctaggcttgttcacacaattttcaaaaacatttattattatttactgttctcttattgttttctaaataatactttcatttcaatatacagtaaatgtatagtttaaagttttttcacacatattaagaatacatttaaaaaatttcttccctaatttatacactattttcattggtcaaaacattaaaaagaggaagaaattggaaatataatcaaaaatttacatttgtaaatataaaacacaattgttatgaaacaaaatctgaagtccaaaatgacacttaatatgattaaaaaaacattgtattggaagaagaaggcaatgtcaagtgctcaaaattcatcaatctaactaggtggtaaagaaatctactaaagatagtgaaaataaattcactaaggactatgagaaattgtgtgtttgatggattttattgtcagtattatattcgatacttagatatatcttgagatagaaaaatgtattacattttttttttttaattagtttgaactacttatgtgctatctagaacatcaagagt

SEQ ID NO: 70451 - DNA, 598 bp, Arabidopsis thaliana landsberg
cagtatgtgttttcgatcaatttatggcaagtttttctatcatattcagttctagtaaggatttctcaatcaattttgttttggtaaagatttttcgatcaatcctgattacgttaagatttatcgatcgatcaatcttgtttatgataaaaaaaattctgttcatttacacttcaggttcgatcatcttcaacatcgggtttttctcgatcacttctgataatatttggatttgttcgactatttcttataccggataaattttctcgagcatatttgttttggcctgaagaattctaaatctatatcctcatcattatgtctatttaagtggcttagctgaccaaccgaattatagcaaagattgcaccatcttatttactaatctaagtaaatgtaacatattgatcttactaatcttatcaaatttcaggtgtcttttaaatagggtcttatttatgattatgcaaattatgtatatgcaaacaaaattcatttttttatcaaacaatattatatgtcaatatatagatatgctgattttttttcttctcactgtggcgaagttagtttccatatacataaataatctttcaaa

SEQ ID NO: 70452 - DNA, 560 bp, Arabidopsis thaliana landsberg
  unsure (1)..(560): unsure at all n locations
aaccgtcttagttccagctaaattgacaacacgattccattcgtgtcttctcttatttatctgatgctagctcaacgggtgcggaacagagaagaactatttagagtgggatatggaagatcctcagaggtggatttgataaccatttgcgatgcagcaagccctccaacttacacagtagcgcttaatcgtgattaagacgatgaatcccccatcaaggatttccattcgtcttaaatgggggtttccattgtatttaggttccgtccagcgtttgtcactggaatctgatactggaatctgcgattctaaagaaaatggagctttctcgaaaaactcgctccttcactactgtatatataaatacacacgaatgatgcagcagactacacgtcgttaaatgtcatctacatgtcaagtgctctttccagcatgtcgcgaagacgagcgaaacaaggcttangtcgttatttcggtgaaaaaacatgccatccctccacgtctctagaaaaatgacgtcacgcttctagaagatactcagcccgcaccggatttaatgt

SEQ ID NO: 70453 - DNA, 577 bp, Arabidopsis thaliana landsberg
  unsure (1)..(577): unsure at all n locations
ctctcagttttgttttcatgttcgatcaaacgtaaaatgttttaactgggatatgaaaaccttcctttaattttattaggttttatagtattggaacgtaggtacgtcgatcaagtcctaattaatataggcttggtcgtttggagagacttgtatagcaagtttacacaaatataaacagtattacctcagtaatttctaatactgtataatcttcacatttggttctacttcgctggcatcttataaacactaatattaatagatcaaatctcaaaaacatgatccagaaatgttaaatgaaaaaaattagatcgagttgtgggtggatgacaagtgcttaatctttcttgatctatcgaaaatacttttaatatacaaacgagatgctgctgttactaatccatcataagaagattacaaacccttcaccttttagggaatatactcattatagtattcactaattattcctgtttaaacaaaattaactacnnnnnnnnnnnnnnnnnnnnaataatgaattaaatctgtaaccagatttatcattattaggtttcatctcattggtactcac

SEQ ID NO: 70454 - DNA, 628 bp, Arabidopsis thaliana landsberg
  unsure (1)..(628): unsure at all n locations
gtacattattcacacaactgacataaacacaacataggattttggatccatgcacagntnaatttgtaataatatgattncctccagcacagaggaacgaaaacttgtttaggtaaatagttacattatattcccgcaccattcttgatagatgccatctaggaggaacacatagtgtacacaagtaagaaaaattagaagaaacatacccacggactggaaccgaatgctcctttgcagcagtggcaacaacacgatatctcaagagactctcttcgatggtacagttaatatttgacaaggagaatgactcagaagccgatgcaaagattgcaacttcctttgcacctgcagatacagccgcttgaaagccctaaaaagaagcaagcaccccatgttagtgttcaacaccaagaaaccaagaattgttggagagccttaagaaatatatgatacagacttttagattcggtgtcagaaccggtaatcgagccccatctaaagtanttactgcatccattacatcctttgcatctgcaagctacaaggcgaaatagtataaatgtctggtcagtcagattaagtttacataagcatncactacagatattgtttctatactctaaat

SEQ ID NO: 70455 - DNA, 553 bp, Arabidopsis thaliana landsberg
atctcaaattcttccgggtgttgatatgtttgaagttcattgttgagtccgtccttagtagacaaaccccttgatgatgaaggataaacaaatgaagggaagatgttacggtctgagtacatcggcctttcaaactccctcatgttctcagtgccccctgcagaagttaagggaccaagaaactgagagtgacgcaaatgaccattccaatgttcaataggcattggaatatagaaaccacccgagcccagactactagtgttcatgcttgtaccattatgctcatcagggaatggttggaatctctcggagggcaaggcgtcactgacataatcaccaaaaggtataatatcttctccaaatccataatttgagttcgctgtaaaggaagctgagccagttagatcaacattaggtgcaccaagaccatgcctagagcttgtcattgttgcatctcccatgatgctgggatgatcagggtcatagtatcctgtgtttgtttcatatggtaagtctggaggtactgaagcttgagcaggaccactggatctga

SEQ ID NO: 70456 - DNA, 552 bp, Arabidopsis thaliana landsberg
  unsure (1)..(552): unsure at all n locations
cttgtatttttgtggccatagtcatataaaaagcgttccattttactggaaaatgctcaatgatagcaatagaacacgtcattctcgttgacgaaaatgacaatgccaccggcacagccgaaaaacttgaagcgcataaggcgaatttacgccatagggctttttccgtctttgtttttcgacaaggcactcagttggagttattgctgcagcaacgcgctgacgataaataccattctgccggcttatggactaacacttgttgctctcatccacgccctgaggaagacattattcacgcgggggagcgtcgtttgcaagaagaaatgaacttggatgtgagattaaagtcattagggtggtttcattatattgcgcattttgacaatggcttggtggaaaatgagattgatcatgtattggtcgggacgactacagctgaaaatattacgccgaatgccttggaagtgcaggcgtatcggtgggtaagcattccagagctaanaaaagaattagagaaagagtncgttaaatttacgccatggttgaagc

SEQ ID NO: 70457 - DNA, 443 bp, Arabidopsis thaliana landsberg
agactgggccaagtccacactgggggttttattggcctgtgcgctcgagacctgtacggaaggcgcctgagcgaataagttcggcaatggtgtgtaacacgcccaggcccatcaccacggcaatatggatgggcttacacagggggtatcgattcatgacggctaattaacgtgagtctgtgatggatccgcggggcaatacggtttgaactgatgcgcgctgaacaagcacttaaacgggcttgtcacccatcgtggctaccaccagggacatgtgagcatcgcccagcttggaaattctgcccaacaaaccaccggtggtgatgacttaatcaccctattgaatggctcagatcatggccttgtgttctttatggcgtttcatctggggacgaatggccagaaatagagcacgccaaacatcagactcaggggaaggaagc

SEQ ID NO: 70458 - DNA, 3713 bp, Arabidopsis thaliana landsberg
aacttgccaatggtcccaagatgaacctcatcaggtccatcagcaatcctcagtgttctagctgtagcccacaaatgcgctaaaactgtgtccgaggatacaccggctgctccatgaacttgtattgccgtgtctagtaccttcaatgccatgtttggagctgcaacctgagtaccaaaatgattttgcttcttcaagatctgtatttgtcaatttctggcgcaaaacaaatgtcaccaaaatacaacagtttttaccttggccattgcgagaattcctcgagcttttttgtttccaaatttatcaagatgatcagcagcttctagaaccaacaatcgggttccttctagctctacccgtaactgtatcagacaaccactcatataagaagaacataagaagcaattgggagataaaagcagtgtcgtttacctttgcaagatcagagacgaaagaaccgtgctgcgcaatgaacttcccaaagtttttctactcagagctctttgagccattagctccattccacgctctgctgcacctattagtctcatgcaatggtgcagtcttccagggcctaacctaccctaatataacaaacaacaacgcaagcaaccgataaatacacaatccttacactctctgttactgcaagccctgaatctgtgaatcttttgtagtattacctgagcaatctcgaatcctcggccttctccaaggagaatgttcttcgccgggacaaccacattttcaaaagaaatttcagcatgtccatgaggtgcgtcatcaaaaccaaacactgtgagaggcctcttcacacttatacctggagtccgcatgtccactaatatcatagactgctgcttatgttttggggcgttgaaatcagtttttccctatatagcacagatatgaattcatgtgtgtgtatttacatatatagatagattaagagagaaatagaacaaggaaagagaactaaccatgagaataaggactctgcacctgggatccatagctccacttgtccaccattttgtgccattaatgacgtatgaatcaccttgtctatatcaacatcagaattagctataaggaacattgcggactgagtctcattttttgggagttaccagcagaaaaattgaagatgacatatagctttcaaatgttttcatttttttgttcagttgagaattcgaatgaaagtagatatcaatataaagaaaatctcttaccttcggatagagcattcaatattggttgcatcagacgatgcaacttgtggctcagtcatagcaaatccagaacgaattcttccctcgagcaacggaataagccattcagaaatttgttctttgttaccataccgcagtatcacctacaagatagtacagattatataaatacaagtaacaagcaatgagacaactcttggaacggtaaacaacatcaggcttttatacctccatgtttccagtatctggtgcaccacagttaaacacctgtggagcccaaacagaacgacccatgatctcacaaaggtaaccatactccaggttcgtgaggccctcaccaaacaattgatcaaaagacttgcccgagaggttatgtttattctcggtagccgccagttctcttctagctctagcagcactatctacctgcaagaaccaagaatcaataagtacagtctcaatcagggtagaagtaataagagatttgtagcgaaaaagatgcatacaggaacaaataagttccataggccttctctctttgccatttcctttaacttttcctcctgagggtgaacggtccatcgcatatctgattgagcaagtttggagaactcgttttccattgggtagatatgagtttccataaacttgatcaacttctgccttaactccaatacttttctgttggggatgaatctcccgcttccatccacaaggctttcatacgacggagacacgtctctttgaactgcatccatatataagaaatgtaaaataaacagttatccttaacaaacttgaatctcaaagaggtcgattaccagatggagggtgttctggaagaacattttcacgtgcaatataacccaaggcagactctacaagctcattagcttgaacccctgtatttcgcgctctttcaccggcagaagcattcccctgcatgatcaacacaatgtcaatggctctacaactgcataataaagaatcttagaattaaaaaatatgcccggggaataccattaaccatctactgtacacccctgtgtagattgaagcagcccgaaataaggagaacgctacgtagaacttgcaagtttgcagcaggccatggttttccctaaagttcatttgccaatatgtcactacaacagaaatttgagaaaatataggcaatgtacaaggaacacctgacttgattccttttaaagactacatgttgttgcaggacaataccgatgcagaacagtattctaagagaaattctggcatcgaaagcattccttctggaagcccagtagtttcaaaaccttcactaacatgctccttatcgagctgaacattcacaatgtaatgctgccaacacaaatgaactgtatattagagcaggaagcaaagaaaactgctttatgagtacaatacaacaaacaagaataggttattaccatgcagctgtatgcaacatcacacatttggttcccaagcgtggacaattcccagtcaattattccaataactcgatcctacagtttaagatattttcagttaagtctccgagactatccaaggatcagaaaacaaaagatattgaaagtattaagacctcagaaggatgaaaaacgagattgtcaatgcgaaagtctccatggacaaggcctgatgttgctccagttgaatcttccgcggggatgtttttgcgtaaccaatcaacaagctcaaacatctttggattcctttcaggtttaccttcacttgttgaagccaaatattgtttgaaccacctatctatctgaaatggaggtatccaaaagaaaaaactttagcaagagcatataagcattaagagaacatcaaactagtgagtagtgatttggaaattcaccagccccaaataaagaacaaacctgtcttttgcagtaattgcctcgccgaccatatttctcaagaccaatggcattcacatcagcagagtgaagagatgccaaggctttggcggttgcacgatagatcgcatttctcctttcaggtgctacattctaaatcaaaaccgatgaaacacacacaaatttacacctttcgtttacaatgagtcacatctcaagctaaaaaaaccgtacatacacattcacataacagagaatatcttaccggcaactttggatcaatgaaaatacgtccttccataaactccataatgtaaaaagcagtcccaatgatagcagggtcagtgcataagcagaagactttaggaacaggaacctgtgtatgttcacctaaagcccgaagcacctacataaaccaaccaccatcaaagtattaagcaaaaaaagcatctacctttagttgataccgtatctcttataagcagcatcacaaaaagttacaatgattctgcatttcaaaacggtactagaaacaacaaaatttcatcttcttcaaaaatcgagtatgaacagttacaatgaattttacagaggt

SEQ ID NO: 70459 - DNA, 326 bp, Arabidopsis thaliana landsberg
  unsure (1)..(326): unsure at all n locations
aaaactgccattctatttttactttctcaaaacagacatatagggcaaggaaccactgtccctgggcattatcatatcaagagcaccctcagctgttaatcgcgcgtttcttttgattgcctgattcgtctctctttggtgcattctcgatctgatttttgagagaatacaaactaatttctaaacccagagattcaatttagttttacacccataattgcgagtgggtcaatcgcggcggtgcgtttatacggggccatccgatagatctagatatctaaatatcactttccttttgaatcattnnnnnnnnnnnnnnnnnnnaa

SEQ ID NO: 70460 - DNA, 632 bp, Arabidopsis thaliana landsberg
  unsure (1)..(632): unsure at all n locations
ggggatcactttgaccacgcggctcgtgtcgttttccagttcctgccgcagcgaggccgngattttgtnatccgccatcttggtggcgccgtagaaaccgggcgacttccggcgggtggagctggacgagatgttgacgatctgcccctcggctccgcacttcctcatggcgtgaatggccgcccgcgatcccacggccagtgcgagcacgttgacctcgagcatctctctccaggcctccgggtcgccgtcggcgatcgggccgaggaacgacaccccggcgttgttgaccatgatgtccagccgtccggtatcggtcatcgcccggtcgaccagcccctggaccgcggcgggatccctcagctcgacctccaccgcggtggccgcgcccccggcccgggtcaccgcctcgaccgtatcggcgagcgcgtccgcccggcgcccggacacgaacacgtgcgcgccgctctcccccaggcgcagcgcgaccgcccgcccgatcccgcttgacgctccggtgactaccgcggtcttnccggtgaacattcttatgttccgccctccagttcatgaccagatgactaaatgacccagaagaccaaaattgtcataaagtcgggttgacgcaagcc

SEQ ID NO: 70461 - DNA, 442 bp, Arabidopsis thaliana landsberg
gtcgaaaaggtgatggtatcgggggcgccgttcaggtacgaaacgatgcccgagatctgccagttgtccagcaccgccttcgtcgcaaagttgctccagatgcggctgcccttgggtaggctatagagatagttcgcaatgaaattattccgacggtcatcccctcccgggccgtaatcccaggtccttatgtcgcggtacatcgaaactttgccgttgtagctgtcagcgtagtccatcgacttcgaccaggtataagccactccgaattcaagcccatttctaaaacgccgggtcaactgggcctgaagtgcatggtagctcgacgtcaaaaagtccgtctggtagccgatgctcccataacccggatagggccggaagaaattattcggaagcacaccacccgcagggttcttgtttgcaggatcaaagtgcgccccat

SEQ ID NO: 70462 - DNA, 591 bp, Arabidopsis thaliana landsberg
tgacgagtttgactcttttccactagattccttatatttgtgcttaatctcaagctccgtaccagtctgacaatccctcctctccctaactccacttttcctgcttacttccctatgcccattgcgcctgttacgatcgctctgggtatcttcaataaagttaggaatatagtccctgcgatcactaggcctagagcgatcatgaggtgaccactcagagtaacttggacttcttctataatcatggtgacggcggtcacgaggagatcttttacgagcatgtgaagacttctcaaagatgtatggtgatctctcccgagcatatggacttctatccctgttttcatggtacctagaccggtcatgtggggaccagtcagatcgtgaagggctgtgtccatgtttgtctgaaaaagccttggcagggaaagatgcgtcttgatgctttctaggatacttttccagagatgaattttttgatggatatgaatctctgtacagtctctcagcagaatgctgtgagtagtggtccgagtgaagagagcgggaacaatcatctgaaagttttctacatttagaactcccataatc

SEQ ID NO: 70463 - DNA, 469 bp, Arabidopsis thaliana landsberg
ttacgaaatgtagaatacaaagtggattttattttctttgttggaaaacgttaaaatctagaatggaactctggttgccatattttgatcttttagtgggagactgtaaatgcagacaacgctcgttacttaaatataatcacatcaacttaactaattatataaaaatacacgatcttttgattttgcccgattaactaattcgatttaaataaacaatttagctcacgtagaagcaaatagcaattggtcgatttaacatatggagccatataccaattcgacggaaacagccataataattatttgggacaattagtcaacaaatgttacaaatccaaatcgattgttgataaacgtaatgtaaaatgactatttgaacaaaagattttggtaccaaaattttctctctggaccagagtgacaaaatcaacagtgatcttgtaatctatatatataggttattcaa

SEQ ID NO: 70464 - DNA, 2618 bp, Arabidopsis thaliana landsberg
tatgctgagatttgacaagatcatcagcaaagagattccatccaccgtggtttttgaggattacaatttactttttagttctataacctttttttatacaagtgtctcctctgttgcatctggaacatttagttatgcaatactctgaagttacctcaatcttctttccattttaaagcactgtgactacgggacataagcattcgatgaatttcaaatattaagatggtctctgcttgactatgttttaggttcttctgccattgcttataatttgtaaacgaaatgtcttgtggtaacaagtgaaattagtttcttaatatttctaccactttaaaacttgtcagtagttgtacacacttcattagcactactgttcctagcatttttactcaaatcatgttgcatgattttgcaggtcttagcttttagggacataacgccccagggtcctgttcacatcctccttattccaaaagtgagggatggcctaactggcctctctaaggtacctatcactgaaacaaaatccagacagcaatcaaataaatgaactgctaaaaccatggcaattgttgaactcgatcccattttgaaacacaagctaaataatgtttggttctgctaccgcaggctgaggaaaggcacatcgacatcttgggccgccttctctacactgccaagcttgtagcaaaacaagaaggcctagcagagggtttcagaattgttatcaatgatggtcctcaaggctgtatgtatttatatatagttccacttcttcagttagcctattcagaaattcaacacctgaagaaataaagggacctcatgattgatgcttctcacattcttgtggtttttgtaggtcaatcggtgtatcacattcatgttcatctcattggaggacgccaaatgaactggcctcctggttaaagatcatcttgaagtggattgttgtcctgatgataagagggacgcttagagtttgctctcgtctactaatgtctctataaataaaaaaacgtgggacatgacttttatgattgttatgcaaaaccttattttatgttatgaaaaggatatttcactgttttctcttctggaatcttgtggttgcttttctctattattgactctgtaaaaattgactgcgtttaaaccagagcgccatctttaaggaagaataccagagagtagagacgcatgaattgaccttgtaaacatccacgacgtgttcatgagcttctgacataatattatatacaaacttggtagcggtcacgtctttgacatttttatgtctatatagaccacctcattgcctgcaagtaaatatttggtggattcttaatttctatctgatcccagtttcacgtgtagacttttctttatagtcatatctcttatcttagattccatttccaagttcataatttgattcatggaggaagaaaaaccaaggaagagcctgaccagcagtgtcagcagaggttcactcaaaaccaagaatccgtttagccgtgtgaaggacgaaggtgagaacagaaacaagacgggattgtcgatgaggaagtcgtggtccacggactcccttggtctgctcagccagagcaaccggttggggaagacggtctgtatctgtgctcctacaaagcatgaaggctcattccgttgcaggcttcaccgttcatcagccacaagccatggtgcagcaactgcagaacttcatctcccaaagcccttgctttcttctcgtcgtctcggtgaccaataatgtcacatagtctctctttcgttattcacaaaaccagtatggtgccgtcctgattgtctagaagattgttttttcctatccatgtgatgaatccatttggtatccatgtgttcatataaaacatgtgcttatgtgtatgttgatgcacttttaaatctttttttttttggtggtggaaatttcacatatatgtttcttgacaatagtatatagctaaccttataaggagaacacaaaagtatacaaattgctaagtgtatgtgaatattttctctgttgagttgcagaaactaattgacattcatacatcatggaattgctcattgatttctccatcaagctatgatcaattcgcaacgtcacatgcctcttaaccttaagaaccgccaaatacctgaatcagaaaaaagaatataaacaaaaccataaatttgataacatatgcatgtaaatgagtcattctaaaccggaacagccaatacgatacggaggtcatatatgatagatttgcgttgaaaagctgaacacagatactaactatacgagtctaaccagcagacattaataatcatttaagcataagatataaccgattgattatgcataagagccaatacgaatactaacgaggtctacgaactcaagttggactagcaatgcaatagttcaccaggttataatgtgaatacgattcaggtttaagacattcatctaccccagctaagcagctactatatatgttgttatctagacgacctgtgatgcttctaattctaatcaaaaatcttcttggttcttcaaagataaaagaaaaaagtacagaccgatgctaggaaatcagtgg

SEQ ID NO: 70465 - DNA, 2501 bp, Arabidopsis thaliana landsberg
aacagatggagaaacaatgaaactcactgtaaggacaggaccaatggttaagtcttccagtttgcgtctttccgctagttcttttaatttggaaacaagaggggtttttgaccagttctgctcagagagaaaatacattgaaaacaacaaagacagaagaaaatggaagtaaacaaaagattcaaaggtagtttcaccataacaattaggatcaaaccaacctcatgaacaaaaagcatagactgtgcagaacacttctgtccactgcacgcatatgcatcttgatcacattgccatgcaacgtaatcaacctgacatttgagaccgaatcaagggttacaatcaaatctaaagagacttgtggaaatataaatacgaaagttataagaagaaacctcctgaacatctggtcctaaaactttccaatcaaatccagcatcttctaatctgattcgacccttaaggtcaagtgccaacttttcagctactctagaactacccgtgaagagggtcatccgtggattcgcctgaaagaagttacaaatagacaagacactgaattagctcaaccaaaaaacctgtggagacaatagacttgtgaattcctgaccaaatacctctaacaatatcttgttcattgtcttcccatcagaatttataaagtcgacatcttcagcgggtaaaccacaatagtggagcaatcgcatcatttgctccattacaatgcttacctaatcaagtaacattatattatcaaacagatggaaccaatacaattacgagaactatagtaatgtgaagagtaatttataccttgctgtccactttaagaagaggtttgttacccatgtataatgcccccatcaactgaagtagtggaatctcaagtggaaaattaaatggtgtaacaatcgttacctgcattacaaacctatgatttcataacaaagcactaaagagagttgtcaccaattacaaccatctaggaagaatgccttacaggaccataaggccaacggtaaccatgactttgctgcccaagatgattcccagggattgcaaaagaccgtgctaggaaccgcaccttataaacgaaagtgaagcggaatcattaaacatacattcttaagatgtaacttcggaaaattagccatagaaatgaaatatctggttggtaatcatacatgcaatgtctatataggcagttttgagaacatgcctacaagaattactaagttgttgaaactgataaccaggaaccaaaataaaaagtggtgaagagagttatgtacctgatcaccacaaaagttttataaaaacttccttgtgacaaagatttctccagcagcttgctggtaactctttggagcaaccctttgaatcaacctcgcgaagaaatcagcaacctaatagtgtatacacgcatacaacagtacctcagtatgcatgttattcagaaaacaaaaccttttgaattcaagactcgagattcaacaaaaaaagtatgcgttaccttaggtaaggcgagcatatgagctgcctttgtcgagatatctccatataaaaggtatctgtagaaaacaagaccattactatccttcatatatagaacaaaatgggaaatgacacaacaagaagaaataacaccaaacctcaagcaaatcatacctctctggagatttgaaagggttatggagaccatgtttcgggcactgggataagctgtccacaaatggctacaacatagaacagaggaaaactgaaagttagaattgacacggataaacaacattgtgatacgatcaacggtttttgataggctcgtacctgagttcctgattcatccacttcagcaactttgataaaaggttctccatttagaggatctagaagcgtgttatgatttgacgatcctatccactttccctgcactagacataacaatgaaagtagagctcagagactccacaacaacatttaaccaacaagctattattcatttccatagcttcaacgcacaatcagtgagaagtaaagacataccaaagctctgtacttcagcagggtgagaaccagatagctcctcagcatctacggtagcaaaaggtatggaatgattcaatctgcaagatccataaacacaaaaattaagtcaaaggaacactttttcaaatggatgacattctcagacatcaaagagtaatcagaacacaaatacataaagtaccatatcaaactctaatcagctaacactctcttcattacatagacactgagcagatgcggctactcgatgatctaaatctcaaatttttaatttacaccaacttgctaaagttttctctttttttatttatttatatatatatacaaatggaaagactattactttaggcaaaaacatgcaaccccaaaagacgaagaacaatatttaacacaaaacaagaaataatttggtgtgatcaggacagtttgaaaaacctggagagagtcaaagaagc

SEQ ID NO: 70466 - DNA, 469 bp, Arabidopsis thaliana landsberg
gccggggaaattttatggccgtgccgcgttgaccgatgcccgccaccacgtttacagacgattcttaactggtaatgtcctggttgtaaacgggaggagcgggaatgacgcataaacagtctccgagcctacgcggagcctacgtgggcattacgacttggtagctcgacttgcggtactcggaggacacccggaaccgggtctacggcgacaatcggacagctaccgcctacttggcgctgttctcggcgttctttccgcccggcgaacacttcttcttcaagttggtgaaccggttctcgcacctggtgaccgacccgaagatgctctccgaggtggccgggttcaccggccaggacgtgatccacagtcgggagcacgagcgcctcaactaggtgttcacgcaacgaggttttttacttggggtgccggaccgggccatctgaacggagcttgcgctgctgtaccg

SEQ ID NO: 70467 - DNA, 553 bp, Arabidopsis thaliana landsberg
cccgtcgccggttgctccgcgagcatgtccactgcggtcacgatacgcgctacgacacgcgccgccgcatcggtattgtcctgttcgatatacgcgccgatttcatcgagacgccgcagcgctcgaagcgtccagcgaatgcgcttgcggctcatgactggcgggcggacttgacgtatttgccgacgaccttggcaacgtcttcgtcgctggcgaactcgccacggtcagcctcggccagacccgcttcgatttcagcaagctgccattcttcgcgggccacgaagtcctcaatagcctgcgcggccatataggaacgcgagcggtcggacttctccgcgatctgctccagcttgtttgcggtctcttccgacacgcgcacggtgaatgcggccatgggatctaactttccttggttcaccttaattatgggtgaaccactttggttcgtcaaggttcgctccatgagcagggtctttctgttggtcaataaactccggcaacggagcgaaccccgtcgcccgataatgaagggctaaacccttcttgagca

SEQ ID NO: 70468 - DNA, 619 bp, Arabidopsis thaliana landsberg
gctttttagaatacatctgaacttagtctcatcagatatcatattactagtctaagcatgaaactgacatgttggtttcaagcacagcggatacacgagataaggctgctactaccgagatgagattatataacatgatatcgcctggcactactacagcggattaacaagcatcactttgtgatgcaattctataacccaataatcacaacaagaagacacaaaataaaagcaatacatacaaatgttttctgcctagaggctactaaccaaacagagtattaaagtcctaaaagaagtgaacgaggttcaaattaaggacaagttagactccaaaacgtgacacattaagagtggtttccaaacagccgctaaatagtcaaaggtacaagatcaagcggagatgtgaatgaataggcagagacaagacctaaaatttagttatttgtccttgtaacttatgatgaacagctttatttgattgaatgcaatacagtccaaatgatggacttgtgatgaactaatgatcaattaagcaaaatgaagttgagagaagacatgccttttctccactccttcttgttgtctttgacctcttctgagttttttagcctatata

SEQ ID NO: 70469 - DNA, 743 bp, Arabidopsis thaliana landsberg
aaaaatcttactaaatttgcgtaattccatcttctagccataattggaatttcctcaaataattccgttgcattgctttatatataaagggaaacaaatacattatggctggaaggagaaacttggaatgaaaagagataagaggtttctttgttctttacctcaaaactttaagcaattcccacaaaactgcaaaaatacatacgagcaaattgttaagtggtggtccttaaagcttgaaaaaatagtcaaagaacaatcaatgcatgcaagacaagaaacattattgggttgtatatttcctaaaattttctcatcctgatatatacatcttggctataattaatctgtaagcaatatatacataaaaagggtcttatatttatttatcagagtcataaagacttcgaaacagagggttttgttatactacaacaggtgtgatcttgatatactttggtctgatgtctctattgaagattgctttctgtctttcttttggggtgctgctgaatctagtacgtaattcttgctttggtttcagatctgaaaacacatgtagattggagtaagttaatgattgcagatttggactctatctataacaatactgcatgcttcacaaaatttatggacgtgaaaaattaaatatagatatccagagaacatgtttacatagttgtagtagttacgattgagcttgcgttataacagaatgcaaccattcatggactgaaaaaaaa

SEQ ID NO: 70470 - DNA, 559 bp, Arabidopsis thaliana landsberg
caaaaattaattcaattaacgcaatctgatagtatgtatcgtctagtagtagtatacttcaattcaatctttatgattctctctctctcacacagtcctttctcactcataattaaattaagccttaatgaaaaatctatctatctcctcctttaattttctctctgtgttctttcttgtatataaaggcctaagctcaagcaatccaaccaccagtggtaataagagagaagactcttctttgtgatacaagtaaccagtctttgagatcacagaaaacctccttctcaaaccgtaggtttcaaggtattttctccgaccaaactcactttcacttataacaatctctcttcttggtctgaaccaaacttaatccaatttagatgagtcgaagaagtccaaagctggaactgaagttgaatctctcgccgcctacgtcaagccagaggaggatggttcgatctccaagccgctcagcgacgacttcaccgacctcacctccaagctcatgcgtctcgtcggagatgaaccaggacgagccatctgtgagatactcgac

SEQ ID NO: 70471 - DNA, 538 bp, Arabidopsis thaliana landsberg
gcacgacttttgtgtaacacagaatgacaaaaatcgcccaactaagttgcaatatccatataattagctttagtatcatgcaactttatttcacagttgtagttttattccaaaaataaaagaaataaaccacaattatttgggtttaaattaaactcaaaagctcttgtttaccttcacacaactaatttttttataaaagaaataaatccagtataaatctacaatttgttttaaagaatacaaataggtaaatttacaatttgtttctaaattcttctataagttctgacatttgatctagctaactaaaatgatcaaaactcaacacattaaaaaaacgctctgatcggatctaaaaatttagttgaccatctttaaatataatttatggataaaataagtaagaattaggaagatataattgggaaagtaatgaataaagataaaataaaaaggatggtgtttgtatagggaaagatgaaagacagagcaatgtgagcaagagacactagtgtgtcagaagaagatgcatata

SEQ ID NO: 70472 - DNA, 547 bp, Arabidopsis thaliana landsberg
gatcctgctggatatcctcttgcccgtaaggacggatgggaagtgctggacgaactcaaagtcgatcattgaacccgccctattcccgttcatatcatgtcctcactggaagcaaaaagggaaagccgcataaagggcgcggtggattttatccacaagccggtggccatagagcagatgaagcagatgttcgaaaaactggaggacgcgatgagccgcagccctaaaaaagtactgatcattgaagaaaataccaagcacgccgaggccctggcttttttcctggagaccttcaatgttacctccaccatatcaagcagtgtgggtgaaagtgtggaggccctgcaaaacaaagaagtggattgcgtcatcatggatatgggcattccggccaaaaatgcctacgagacgctggagacgatcaaacaaaaccccgggctggaggaactgccgatcattgtgtttaccggcaaaagcctgtcggtgaccgaggaaagccacataaacagtacgccgatacaattgtgatcaagacagcacatttcta

SEQ ID NO: 70473 - DNA, 1071 bp, Arabidopsis thaliana landsberg
tactcttactgattctccattgtttccttgagtttcttccctcttttctttcgtatggtctccatcgtttgttgtaacctctaccgatttatcattttttttctgttcatcagctcctatgttatccaagttcttatcttctgttgaaactccattatttacttgagcctcttgatgcctctccttcgtggaatttccatcactttcattagcatctacctttggcttaacatcttctttattctccaaactattatctttagtcgagtctccgatgctctctccttgaatatttacattttcaccttttgttgtttctttgttcatataaacttcattacttctttgactctcttctcgcttttcttccttagaactttcattatttggcttggcctctactgatgcattgccctttaattcttcattacctaccttgttctccaagttttcacccttcattgattcttcattacctgccttgttctccaagttttcacccttcactgattctccattgttttcgtgagtctcttccttattttccttcttgtgatcttcatcattttgtgtagcatttaccattttatcattcgtagactctccacttcctttgttctgtgaattcattgtttcatttgttgaaactccattgtttctttgagcttcttccaacttccctgtcatggaacttccagcatttttagccgcctctacctccgacttaacatcttctttggattccaaattcttctctatatccgaatcttcgatactttctccttgaccctaaacttccttatcattatcaattgttgaaactccattgtttccttgagcttctcccaaattctctgtcatggaagttccatcatttttagccgcctcgacctcagaattgacatcttctttagattccaaattcttctatatggccgaatctccaatactttctccttgaccctttacctccttctcattattagattgtacattttacacacaaagatcttctttatgtttcagccgttgctcaactaacattattaccttctttgagatggtccacct

SEQ ID NO: 70474 - DNA, 3106 bp, Arabidopsis thaliana landsberg
attcacaagtaatcaatatatttagggacgaaattacaaatatttaatagaaaaacaagagtttggctgtttcctccttctttcatccttatcacaagtctgaactaaaaaacctcaattgtaataaacaaatgcaaaaatataataaagagaaaacaaacgtttttttcctgcttgcttctctctttgcttgcgttttctcaaaggttcgaagaaaacgaagaaccacgcttttgcttttttcccaagacttaatctaaaaagcgagatttccttctttcgattcttttttctcaatctggttttcagtcttcggattcaatggcgtctggatcttcgggtcgggtcaactcaggatccaaaggtttcgattttggctccgatcatatcccccgctcttatgatgactacaccaaccaagacacctctaatggtcctcactccgatcctgcgatcgctgcttccaactccaacaaggttaaccacactgatttacccttttcttcctttttttaggttcgggtattttgctcgatcggcgatttttgtttgatttttgggaatctagagttttgatttgtggtttgctcagagatacgtgtaaaaacaatttcgaggagtcaatatcgaactagtcctcttagtgttgagctaatttagctagttatttctatgttggttgtgacttatgaggagctatgttctgtggaaacgccttagctatgaatctgacttggaactagagcttgttaagctgtgcttgtcctccttattttcaattggaagaaaatttcatccacttttgatcagatatactgagcgagtctttgtttattgtttcatttttttgcttgtaggaattccataaaacaaggatggcaaggtcttcggttttccctacaagctcttacagtccaccagaggattctttgagccaagacattactgacactgtcgaaaggaccatgaagatgtatgctgataacatgatgcgctttcttgaaggcctcagttcacgcttgtctcagcttgaactctactgctacaaccttgataagaccattggagaaatgagatcggagttgactcatgcacatgaggatgccgatgtgaagcttacatctctcgacaaacatcttcaagaggtttgttattgttatgcaatgtttttaatcctttttgttaattttagtttgtaaaactctgatcagtaattgaccatggatgttctgttgtaggtgcataggtctgtccagattcttagagacaaacaagagctagcagatactcagaaagagctagcgaaacttcaacttgtgcagaaagagtcatcttcgtcgtctcactctcaacatggtgaggaccgtgtcgccactcctgttccagagcctaagaagagcgagaacacctctgatgcacacaaccagcagcttgcacttgctttgcctcaccaaatagccccacagccacaggtgcagccgcagccacagccacaacaacatcagtattacatgcctcctcctcctacacagcttcaaaacacacctgcaccagtgcccgtttctactccaccatcacaacttcaagcaccaccagcgcagagtcagttcatgcccccacttcctgctccatctcacccaagctcagcccaaactcagtcattcccgcagtaccagcaaaactggccaccccaaccacaagccaggccacagtcaagtggaggctacccaacatactcgcctgcaccaccaggcaaccaaccgccagtagaatcgttgccaagcagcatgcagatgcaatcaccatactctggacctcctcaacagtctatgcaagcttacggatacggtgcaccaccaccaccacaggctcctcctcagcagacaaagatgtcttacagcccccagactggcgatgggtatctaccctcaggacctcctcctccttccgggtatgccaatgccatgtatgaaggtgggcgaatgcaatacccaccacctcagccgcagcagcagcagcaagcccattacttgcaaggtccacaaggtggtggatactctccccagccgcaccaggcaggtggcggtaacattggtgcaccacctgtgttgagatcaaaatacggtgaactgatagagaagctagtgagcatgggtttcagaggagaccatgtcatggctgttattcagcggatggaagagagtggccaacccatcgacttcaacaccctcctcgacagattgagtgggcagtcctcaggaggacctcccagaggatggtgatgccatggctcccctctacttgtgtatctttcaaaataaaactgtgctcttcctcctcctctttgcgttactctatagaggcctagttttattgggcccaatagattgggtctgttgtgtattgttataagactcaatttatatttctttaaaaagccttattatttgtgtatgtgttactttcaatgtttttcttgaacccaaaatctcttatcaatgatttgctgctttctttacttcacttttgttttatatagattgtgaaaattaataacctgaataacaagcttttaatattaaatggaaattagttcctataccaaaaaacctttcaaatcatgaaatttgtgtatttagaaaaattggaaaaataagaaaaatggaaaaaaaaatgtcaaaaatagatttgcgtaaatccttaaaaccaaaaaacaaatagaaaaaaaaaactgcgggaaaggaaaatagaagaggcgccaaagattttatttcaagcagcgcggttagagtctcgcgccaataaacataccgccacaatctccttttacataaacagccctaatcctctatctcaatctcaatctctcattcatcatcctcttttttcaatctcgtttaaaattaacataatgatgccgccagtgaagaaaagtatcgccattagaccggtgtcgttctacggaaatgggcttcctcgtcctcgtttcttcgataatcctaagttcaatgattaccgtgttgatcctcccctctctgtgctagatcctcttctctcatgggcgagagacgctcactggtcaatgggtggtctcaacttcacgggt

SEQ ID NO: 70475 - DNA, 393 bp, Arabidopsis thaliana landsberg
tgaattgcctgccatacttgccagccgcccccccctgttactgtgcaccctgcaccagcgacggtatcaccgttaacgcgggggaggcccacgggcaggcccgcgacgagcactggctcggcgtagcctaccactccggtgcggaagtcgagatcggcgtactccttccagacccggctgaccctgcccggcggggcccgggtgcccgccgccgtggtcagtggcgtcggggtgcgacccgaccggacccgcgccgggcgcctgaccgtgctcatgcgcgcccaattgaccgcggcccgcgaccgaggcgacgtacctcgaggggctccgcacgtcggaggccggcatctacggtcgctacggctactgcgtcgccttccgcgccgaccaggt

SEQ ID NO: 70476 - DNA, 401 bp, Arabidopsis thaliana landsberg
  unsure (1)..(401): unsure at all n locations
ggggagaacaaaaagggcgaacgggaagacaaaaaagcaacagcgggcaaaagagacaaagaacaaaaacagaaaaaaggcgagccagaaggaaaaaaagcggaagaaaagagaaaacagaagggccganaggaagcaaaagaacaaagcaaacaaaaaaaaggggagccgagcgagagaaaaaaacaacaagcaagcgaacccccgaacacaaagaaaaaaaaagggaacgggcagggaaagagaaggaagcgaaaacccagaaaaaagcaaagggaaaaaaaaaaaaaaagaaagaggaaaaaccaggagacaacgaaggaaaaccgccatcaaaaagcaaaaaagggaactaaactgggggggaaggtcaaaaaaagacgacacaaacaaaaaaaagg

SEQ ID NO: 70477 - DNA, 625 bp, Arabidopsis thaliana landsberg
gggatatatcgtttttaatggttcatctatcaaaataacacataaattactgtaaatcaataatttataaatattaattttgagcggtttttataatttttaaatggtaatcttcataaaaaataaaaagtcgcttatatcgcttaaaaatgaggttaaataaaaaagagctgttttcaggccagatttttctgttttttttgatcgccttagtggtttacagctgcgcagtacaacaaaggccgcagggcgggccaaaagatcacgatccgccaaaactattaaaggctaccccacctaatctgacgcacaactttaccgcaaaagaaatccggcttgagtttgatgaatattataagttaaataatccttttcaggaaatcactgtctttcctgcccctgataaaactcctgattataaacagcgcggcaaagcactggtgattgaattaaaagattctttacaaaaaaatacgacctacgttatcaacttcggcaaaggtattggcgatgttaacgaaaataacatcctgaaaaactttacctatgttttttcgagcggtaatcatatcgactcattaacaatggcgggtaccgtgaccaataatgaaacccggcaaaaaga

SEQ ID NO: 70478 - DNA, 331 bp, Arabidopsis thaliana landsberg
  unsure (1)..(331): unsure at all n locations
cttgatatataacagatgatcttttattatgattggctgaggcacacaaacgtggaggaggaaataaacagaacacacgcgatagaactaaccgcagactgtgnnnnnnnnnnnnnnnnnnnnnnnnnnnnaaatatggaaaattgcacaacataaacgatgcagaacaaatagtgatagagactaaacataaannnnnnnnnnnnnnnnnnnnnnnnnntttgtttggaagaatacaagaacggtatactggctagacaagagacagctcttccttactgtctagcctttattcatctagaacttggaaagcatcgctatcctgtatgag

SEQ ID NO: 70479 - DNA, 605 bp, Arabidopsis thaliana landsberg
tggtacattcacacgaagttgggttaagggagactagctgttcttgctgtactttttttctttttttctttttttcacaactattcttctcttattaaagattgttgtgacaaaattataaacattaaaatatcgtttcaagtgtcttggatcagttttgcaacagcaagaaacatattaaactggagaattttatgttgcagaggctttagaagttttattttaggaatccgaagcttcttgtttgtgaatatgcattgtgatcatcttaatctaaagaatttttgtcaaattgtgtaagccaagtaaatattgtctcataaattagtcctttcgaaaaatcacttccggatacaactttaaacactacaatttttcagctgaccatacacacaaaagaattcataattacaaaatttattggggagagactcaaagtaatgataattgatgtgaaataaagtaccatcaaattaatatgattagggggaagcaattatgaaagaaccaaccatatatatctgcatttacatattacattccttccattattcattttttttttaaattccacctttctcaatcttgttagggatttttttttt

SEQ ID NO: 70480 - DNA, 570 bp, Arabidopsis thaliana landsberg
  unsure (1)..(570): unsure at all n locations
tttgcaaagataaaagaaaagcacgttcaacacaaaggcactgatatgataacgtataaacttaattaatttcaaacacataaacaccataaacaataaaattacaaaccacaaacatgtatgatatcatcaattgcgacatcgatggactttgttcaatttgttcctcaatttctcacctcatatatcnnnnnnnnnnnnnnnnnnnnnnnnnnnnnnnnactatatagacgtgtcagctgtcataatccgaccgaataagtatatgttattaaatgtctactaccacctaattatgtatcacattaaatccattgtttggttaaatttgaacagataatatttaaccaaattagttgattatttcttcctctctctaattagtgcagatgttggcaaacacaataaattatagatatattttttttggtaaaaacatttaaaaaaacaaaattatatttcctcgtattagttaattcattgattaatttcttactaattcttttaattaaaaaactttaaaaacatataatttacaactacttgctacagttttttgaaaaagtggac

SEQ ID NO: 70481 - DNA, 528 bp, Arabidopsis thaliana landsberg
tcgcgcttggttgaaaagccagtggcgcgacccccccgtgcgctggattatgactgatcgcccgtatttacgatttcgagctaagaacacaatcattggtccatgttttgtggaccgggctcgaggaatgtggaccactgtgttgaaatcggaaatacggaaattatacttctaatgccaatccatatgggttcagctacccgggatacaatgagatcttcaccggatatccagatactgccatcaattccaatgataaaatttataatcccaatgaaaatgtgctggagtttctaaacaggcaaaaggggtttcataacaggattgcagcctttagcacctgggatgttttcccctatatcctcaacgaaccccgaagtggcatatatgtgaatgcagatgttgacacgctcaattttaaagtgccccagctgaaggtgctcaatgatatgcagtttctcaccccaggcctattggtgttcgaccggatattatacctatatggctgcaagaaatttctgaagccta

SEQ ID NO: 70482 - DNA, 409 bp, Arabidopsis thaliana landsberg
  unsure (1)..(409): unsure at all n locations
ggactcaacacacagagcctccacccccccaccagccnnancgcnnnnaggggaggaggaacgaaaaagaccaggcaccccccccgccaaaangaaacggangagnccgaaaccgccacaaccacaanngnaggaaacacaccgggacaacaggagaaanccagggccncaccacanaaccaagcagcagaagnacgggcaaaacaagcagncccacagcagagcaccaaaggcgaaaacacgggcaccagaaacccaacacagnaaaaccaggagcaacacaangacnnacggancggaannncaacaagaaacagccgaagaccaaacaacaggaacagnacgnnganncgcaagagaganagacagagaaacggagagacacccaaggacaagcaccaaagcaagc

SEQ ID NO: 70483 - DNA, 2514 bp, Arabidopsis thaliana landsberg
tttacctggacaaggaattatcaaaacagaagaaaagcaaccaactcatatataaatattgaaatagtatgatatgcaggaagtgttaagaatccggttgttattgatgacttgatgtgcgttttgttaatcaccgagaattttgaaatcaacagttatctttcgcgtcacattcaacaagaaaagcggaactgcggaactgtgaaacctacctcttcaagagtaacagttccagctacagcaaccaaggtctcatgtccttgcgtctgatccataaccgtgtggcttagtgcatcactttccatgataaaatccaggttatcaacagaagacacattatctatcatagctgcaagatgttcactatcttttagaagagcatccatgtaacgtgtaagttcacccctggtgacaccaaattctttaagtcttcgaacctgcacgtagaattatacgttaaagctgaataaattctcagcagtaaagaaaaagtgtcaatggctctaacagtcttttagcttaaccaatccattattcatcacgtccaaatgatcaatccaacgaaagagagaaaaatagtatttacaatgaagataaatgagaagaaacaataagcaaacctcttggacagcaactttcactgcattttgccaattttggggctctgcggtgacagtaagagtcgtaacagtgcatccttcccttcccgaatcactatggtccagttcaacagacgtaaatggtgggtttgaactctgaaaggtacaaaaataacatcatcaaaattcactgacagtattgagtctagttataatagacataattcctaaaaccttcaatataatatagctacgtccatgaactaaaaaagagtttttactcagatagtgcacctcgagattattgaaaacacagttatattatttgaacaaacccatcaaagagccgcttttgtaatttcactgagatttgagattcattaatctataaaagcaaaatgtactgtgcaagaaaatgagaacaaattttctcttcttgagtaaaattgagaacaaatgtattcggaaagacgacatcctaacaccctcataccttgtatctcgtattaattcgaaaatgtagagcagagagaaatattcttttcatcagaacatttcgcaggtctccaaatgtctgaaccttgctaacaggtatctgcaggaagacaaaggaaattgtaacatttcataatataaactaccaccctatgttgcatgtatcatatgaagctttctgaaaaagggaagaattaaaagattgtaacaagaaccttgcaaaacatgttgattgcaaaattctgaagaagctcgtgcttaaatatctgtggaggctttagatcaacacttgttccaggaagcgaccaattatgctcaaccgggggacgaattgcatgtctttctcttttaatcatcttagactgatcagcagtatttgttttctcatttgaaaaggtaccaccaagaccagctggcagctttggaacgagaaaattagccatggcaccgaaggcaccaggactaggagaactgggtgttgattcattatccaaaccattttttccaaacacagcctgtggaagaatgatagtctggtcaagatagactacgcagtagaaattcaaaagaaatgtcagagaaaggtaagagactatcttacttcaatattgtggactatccgaggtatgttgtcaatatctcccacaatatatagagtggcattggctgggaagtaccatcgctcatgaaattttctaattttgtcaacatcccacttcttaatctgctcttccaatccaatagggaacctcctacccagcttgttctcagaatgtagatgttgcaacaactagtctcaccaaataaagtacaatgtgtcattggctatccaccaaaaattgggcaacacaaaaggctgttgtgctgacatacagaaaactattcctcatgattgattacctggcagtcaacacgatactcaattgtattcatcatctgaagttctgaaagtatggcccgcctttctttctcaactcgagaagagagaaattttgggtgaaaggctatctgtaatcatttgagaaataagaatttgtctgccaaatgaatcataatccatgaaacataagagggattttgactcttggtacagaaaaaacctcggggcatatctaattggaagacatcgtcttaattgcaaaattatacctcatttaaggcatcgagcacagatgggaagaggtcatcctcagagtcctgaaaaggttcagaactataattaatatgaagctagccaactctatcaattagcaagccagtaaggacatgatatcgaaattattatcacaataagccaaaccaataaagactttaaggtctgtaaacaaataaaaatcaacactaaacctagtatttttgctcataagagacataatattccatgtgcaacatatagatatagactataagcaacatattt

SEQ ID NO: 70484 - DNA, 242 bp, Arabidopsis thaliana landsberg
aatacacctgaatcggcctgttcttgatatcgagtccgggatgcactatgacagtaagtgactgttctgataggatatctacttccccagatcgcctgcaagtggccgccgtctagtagcaataggcggtatcgatcgcgcccctgatcgagacttatgctgtcactgaagcaatcgaagcgcgttgtcctaccgacggactgacctgtgccggaatgcatggcgcgcaccaagtctatacc

SEQ ID NO: 70485 - DNA, 556 bp, Arabidopsis thaliana landsberg
  unsure (1)..(556): unsure at all n locations
gccattgttcttggagacgacctggtagaccagcttgatggcattgataacgacaaggcaggcgacctccttctcctcgatgacttgcgatagtcgcggaccattggggctgtcggcctggacaatggaaccgcgagtggtggtcttgaccagagctaggcggccaccgttaatctcgagtgcttcgtcatcgtcgtcggtgtcgttattgaggtcgcgctcgggagggagatcggtgtgactgtggcggcggtcctcgctannnnnnnnnnnnnnnnnnactttggaggcggaccgcgaggtgaggatgcgggagatgctcagccaagagaggcgcgcgacggacaaggcgagggcgatcagagggaataggatctgaaggtagctacagcgcggcaatcgggtcagccaaccatggaaacacgctgngggtgagacaggacatactcgtgctggaaacgcaggctgaagacgccctttagnggattccatatgggcccgtcatactgggcgaatcccatggtgtcgatgagatggagcgtctgtcaagctcacc

SEQ ID NO: 70486 - DNA, 392 bp, Arabidopsis thaliana landsberg
tttccggaatgcaaatcctgggcctggcactgacgcgttgtatatggaggcagttggcttcaatccgtctttcatgtgtcattcttgggctcttcggggttgaggttgagttaataatgccggaagacccatatccattatgctttgggggagagggattcttttttgaatcgcaatacgtgcaattccctccatgccaaacgcgtttatgatgttgtcgtgggcataaattgcaacactgccccgaatgcctacatgtgcttctaaaccttcagagtacttgattggttgtgcaaaccaatcagagtggtgactttggtgtgaaccccgtctgaaaccaagcggatgtatctattgcaccgggggcctcccctcctatgtgtatcataaca

SEQ ID NO: 70487 - DNA, 2051 bp, Arabidopsis thaliana landsberg
  unsure (1)..(2051): unsure at all n locations
gagaaaaactaatgatgcgccttacttagttttttttgtaagaattactactaatgaaaaactgtgtgtatataatatgtgtatttgctggaatttcagggagaaaacatataaagtattaattagttgttgaaaccatgagaacgtgaatatacaatctatatagtacaaaatttaagatattaaatcctaaagttggtcgataaaataacannnnnnnnnnnnnnnnnnnnnnnnntggcttgatagaaaaggaaacgactagtgattgtttaaagttgttattaaggaatatattttcgattctccaatgtctaataaaataaatttaattaaatttaattaaatcgcaaacgcatatatnnnnnnnnnnnnnnnnnnnnnnnnnntggtatatatagtcatgcaattatagtaatctaattaactaagatcagcataagcaatatatatatatatatatatatatatatatatttgatggcatttttattgcccacttgtaaagatcgagtatagtgaatctattaagcgtgcgagtagctttgtgcgtggtccatgctgaattaaacattgtttcagtatgtttaatacaaattgttagtctgtctttaattagtcttgtcttttttcttttcttttctttttggtggtataagttttctctcgttattcgccaagaatccaaactatatatacacatttcaactggcgagattgtttatagttacttgtgaaaaatgttgacttgacccagacccgggaatgtatttggagtttgatcactgggctttcgcatatggaccagttgatcgccatggcctgtttccctcggtctccactacggttcattatccctaagtagcacaatatgcttggacaggaaaataaaaaaaaagtaggagcattgtgatgctttttgtgaaacaattggaataatagggcttcgactcaagtttgggctgtgttgtgtatatgacgcgaatgatgagaggcagcattgggtcattatttgacttcgagggttgtaattcgcttagcctcaattttgggcttgaaatgaaaataaagcctttgaagttcaattattttattctaggtacccaaacaaacaaacaactatataaagaagattatttggcttgtacggagttgttagaccgtcgtctttatttttttactttttcttattttagacacttgtgttatttatatatatcatgacaccttaaataatagaagaaaaataaaagaaacagtaattatctaaaccagttttagagataaaagttcattcttgggtggtcaacgcaacatgcattggtttaaattgcgagtcaaaatttgacaaaaagtttttagagttagaatagttaaataaaattctcaagtattctaaaaattaacatgaaaaagaagataaaaattagtaagagaaagtaaaaataggaagtaattaaacacgtacggaggctaagtgaagaagaagtattaattaattaattaaaaaaaaagtttcagttgccacgaaagcgaaaacatagtaaaatgacggaaacagggtaaaggaagacgaagagacagttgtaaagacaaggttaattcagggattttccatttatcagagaggcccatctaatctatctatctatctcattctctctagtagagaagaacgcgtgttctcacgctcttattacatttttcatttcttttaaggaatttattaaccccaaaaaacaaaaaaaagcgtaagtaagatccatcgtattcatatgcagcaaaacacacacatttacatacatatatatatatatatgttgtgattctcatttttattttttatttttggggtcgctctttcttgagaaagtctgcgacagagagaggagaaagaatttggatgtgttgatgctaaagctgtgtgagttttacgagagcagaggtaaatctgaaagctctttcctttcgaccacgtcttcctcttcttcctcctcttcgtctccgtcttaaaacgcgaaatgtctttcttttttcgtttctttcatttt

SEQ ID NO: 70488 - DNA, 456 bp, Arabidopsis thaliana landsberg
aatacgccggggttcctgtaagtgaagtgttctaaaagattaaaccgtgcgaatcgccataaccttgttggactacctacgacacgattacaccgaaagggtaatgaatcataacatagaccatcgcaatacagatgtgttcatcatagacaaaaaaggtgtagctgcagcgatcaatgaaggtctgtttgaagcactggaacaggagcgactggacggtatccgattcgatggcttcgtcacgatggcaaatgatatcctgatgcctcgcggatggctggaagcaatggaaaagcatgcagaggctatacccgaaagcggtatggttggcatccactgcgttgaaaagttgccacctgttcgggagcacaatggattgatgattcatcccatattcaccgcattcggttatgtgctgatcacccgcaagcctttgatacaattggtacttaatga

SEQ ID NO: 70489 - DNA, 495 bp, Arabidopsis thaliana landsberg
acatgttgcatgtcctatttctattgatcctggtcctaattaacttgctgatgcggaatgtagatgatgaaactctaatgccttgcaagtatatgcaagactctagtcccaaattctgaacaaaaataataaagaatcattgatagcataccaagaaactgcaaggcagatgctggaaggttcataataacatggtcgatatgttcccacggctttgcgattggaagcaacgtttgtctcaatctcttatttgcgtgtccttctatactcttgcagtcttttcctaccccattttctgcactcaattaacatactggtgaggatccccaggcattaggcaatattaactaaaacaatgtcttggagaaatctttatgaggcatttcttacccgtctttgtagtaccagatggcttcttatttgcaccaagaggctcatttatgcttgcattggattcacgtatttcctctgcactggaattagtctcacctatga

SEQ ID NO: 70490 - DNA, 2006 bp, Arabidopsis thaliana landsberg
tcgttgtttagcttgatcttcttatttggtggttcagttttaaattcaatataaaatttttaatccttttcagactttgtgctctttcctccgaaagactatatgtccataacttctcgactcaccagcgagttatggagaaactcagagaaatcggtagtgcaacaagggcaagtcatgatgtttaacttactttgtaacaaaagataatctcaccttcaaagctgtgatttagactaagagtgccattttggtcaatttatgttcaaattattttacatcattggatcatagaataagttagagctgaaaaacaaaatataaattaaaatttgaaattcgttaatatattaacaaaattaaaattaataaataacacatcaagtagtatattaaaaaaattatatttactaaagtgtttatataagaaaaattataaggccaacaattttatttttttaagatccgaagatgattgataaaagaatccagatttttcttcaaaatatattaaaatgggcctttttctaaatgattatttattattttgttattattatttttaacaaaagtgcaaagaattttcaaaaagtaaaaaattaaaaaaaattctaaaaatacccaaaatttctccacatgcataacaaaaaagtcctttaaaaaaaaaattatttgtcttggtcaagggctgaagacatgaagaccatagcctgtgctaatctgcatgtatttgtgtgatctgtcgaataaaaagtacgtgaatttgcttacatattgtaggagcttcctttcatgtataaccttttgctcaattgattatgtaattacaatgtttttaccttgaaaataaaataatacatacatttttaaaatatgtatctcggcagcttaatgagactatttcttcctctttccctttattttttcttaaaaaaaaactctaaagtctaaaccaaattaatataaatagaaagcaaaagggaaaggtgaggcgtgagacacgtaaacaaaaaaaaagaaatgagtttgagaaagacaactttggtgttggtgtacattctcttgatctttcatctttagcacacatttcatgactctccctttcccaagttgattaactttgaatacgaacacgataacaactttgaccaagctttaaacactccaaccagtgcaagatctccgcgttcgggtctctctcggccaccgccacattagccgtgatctgcatcactcctctgtacgagccgacgcggccgcgaacgcgagccacggctccgattctgatttgtgcggcttgtttccgcgcggcacttgcgagcagcagaatcgtggctggatcccaccgggagaagtaagaagacgtgagttggttgagccacatgacgcacgtgacgcagccggtgccatcgtcgacgccgaacttgagaaactttggggtcagatcacgagagacgattgtgcctactatctctacgcgtgaaacgcacgctccgccaagcagagagaaagagttggattctgtaggtgactgtgtcaggcgttggatgtcacgcgccacgagttttgcgtgtgtgctttggagggatcgatccatggctgggactggagagaagacaaaagatgaacattagcataacaatgaatattagggcaggaaatcgaagtactagaaagctatattgcgggcaagcgatattagggaattgctgatttttttctaataaaaaatcggatgatgaaaatatattctataactttattgtaaagcatacgtactcagattactaaacttttattcattttgtggtagtatagtcgcttcctacggtggattgttaatttccggaaccaattaactgtagaatctttcagggttcaaattttttcctttttaggttggacatcaacgttattaggtgcttagtgcttactttaacttctcaaaaaattagaagaaagaaagtaaagaaaccatcttatgatagatgacaattttgagttct

SEQ ID NO: 70491 - DNA, 452 bp, Arabidopsis thaliana landsberg
gagttacttatggcattattcttttgggtcatgctatgggatttacacatataaatctgagaatggctggtaaacatagacaaaatgctagataccaaagatagtattgcattttggattgaaagtagaacaattattgataaaggaattagatttgtagaacatgcatatgtattcattctattattacttctacatttcttatccatggaatctaacttggtaggttcagaaaaaagagactttaaataattgtttttatgatagcaaaaaggaacctttatgttgattaaatggatagttgcaacttaccaaactttcttttaaatctttataatcaacatcaatgtattgtccaagtgtacatgtgataaataagagaggggtcgtgttagttgacttgaacgttatattttgattaggtgtgtactgattcacactgaattcaaata

SEQ ID NO: 70492 - DNA, 553 bp, Arabidopsis thaliana landsberg
  unsure (1)..(553): unsure at all n locations
atactatgaccagcatattataaatccaatgatgaattgtttttgataaatctaataactaattactgcttattagcctttggatatataggcaagcgataattactttattgattatgactgtatgtgataccttgtctaactatttggtaccactagtagtttgttcatggtacgactattagtttctttgctgtacgaccatatcattgtctgatctgtagtattatcgttgtcgatcttgacaaaatattgatatgatctccccaactattattacataagcatatgttggtaaccgatatgattacttgagtgtctctctcaattttgtacaacctagtacanatcatctctcaaattttaaggttttggtcaagcttctacgcatgtttctctcatttatcattcaaaattgttaggatcattacaatgttattttggtaaaggagaattgtccgatagaccttctatcctttcgtagatcctttatgatcatcaatgttttttcgaagtgcgtgcgctaacagtcatcaaaagacattttcttggc

SEQ ID NO: 70493 - DNA, 359 bp, Arabidopsis thaliana landsberg
  unsure (1)..(359): unsure at all n locations
tacttgctcctctattcttcccacacctgcattatgaagagatacggtacttaacaaaatatgctaattcaaccgcttaaaaacactacctgtaaaagcaaaaaaacaatcaatttaaaaaatatatatcnnnnnnnnnnnnnnnnnnnnnnnnnnnnnnnnnnnnnnnnnnnnnnnnnnnnnnnnnnnnnnnnnnnnnnnnnnnnnnnnnnnnnnnnnnnnnnnnnnnnnnnnnnnnnnnnnnnnnnnnnnnnnnnnnnnnnnnnnnnnnnnnnnnnnnnnnnnnnnnnnnnnnnnnnnnnnnnnnnnnnnnnnnnnnnnnnnnnnnnnnnnnnnnnnnnnnnnnnnnnnnnnnnnnn

SEQ ID NO: 70494 - DNA, 453 bp, Arabidopsis thaliana landsberg
  unsure (1)..(453): unsure at all n locations
cataggaaaatgggattatgatataggagacnccttttgttattaagcnaggaaaccannccagggggcagttttaggatgggaccgcagctagctgacttgactccgaataccgtgtgctacgcaattactttcttccatatggacattagacagacaccccatactctcagacttaaagggacaaatatataataagtgcgtgtgaaagtaaactagaaaattgcaatcccaagaactcagtgcaagctgccctatgagatttaaggatatatactgggtcaacggagagattataaacaaataactactgcttgaaaccaaagtgtatgtgtgtctgcctgcttgcatgcacatctaactcttgagcaaagattggttactacagtccacatgcctttagggctgctaacagtcaaacctattggaaatactattatgtccgactatgat

SEQ ID NO: 70495 - DNA, 412 bp, Arabidopsis thaliana landsberg
tttggcggcagaacgaggtctaaggggtagaggaaaccgaccgaataagttttagatccttgatcagaaaggaatattgtcggtaaagatcaaacaagtaatgaggaaaaataaccaaccatcttgatgtacttgagttgcttaacgatctcacttgtctccagctcctgcataaatgaacacactatgcattgtataaacttcactggctcttttacgagtattaagatatctgttcaagaatacaaatgacatgttcatggaaaaagatgaaacgagactgctcaataattttcaatgcttaacctcctatcacggctgctaacttttcatactctgaaggatcttactttgggggaaataagatcgttgtaaaaagagtttctgaccttaaggaccgcacatttagcac

SEQ ID NO: 70496 - DNA, 550 bp, Arabidopsis thaliana landsberg
attagcatcatttaccatactttattcaatatatatgatttcaatttgttttttttaaatccttttcatttcaacttcaagtccaagacatactattttacaagcttttcccaaatcctagagttttttctttcctattttaaatgattatgagcgacgtgtcaagtgtgtaagtcaacttacttgccaaaaaaatgagattccaatatcaaaattaaacgagaatccactggataaacgagactttaatatccttgttaaagcattgccaacgaattcctttaattgtgaagatcgttaggaatttctgaaactctctataaaaaaaccacacgttcaagataatggggctttaacagtgacccttcaatggattattttgtcccatcaatatgtacatatgatcttaattcaatggttgagaattttgctttatctttaaaagagggcttcacatcagtataggccaacatatgaattatgttattatctatattgcggataatttgatggttacctaaaatttatttatattactagagatgatatg

SEQ ID NO: 70497 - DNA, 197 bp, Arabidopsis thaliana landsberg
ccctaatatgttgccaacgatgcacgtttaccaatattattatggattattcatgagacactgttttgtacattggaataacagagaaggatgcacaaaaaaagtgaaatcggaaaactcagagtctcaatcaagcaaccttgcacttctccactaatagaaactggcatattaaaccattgaccacagaatatcct

SEQ ID NO: 70498 - DNA, 475 bp, Arabidopsis thaliana landsberg
  unsure (1)..(475): unsure at all n locations
tctataactatttttttggattganaatgtataccttgtgttacgaaaaaaactccatatatatctcgatggatcctccaattcggaaataaaaatctctaatttctttaatttatatggagttttcaggatcgtcaagttattagtctacagagttcttcttgtatgttgatattttcataggtcaaattcacattgtaatccgagattaaatataacgtcaaagaaacttcaaatttttcaaatattgtcaatcgaataatctgatttgttgtgacatcataacttttgtttatggacaagatattccacgttttaacgtcatgttcttttgaaagattgtttggttattatgcagggcaagaacccaagctaaaggtggactactgttttctcttataaataaaataaaatcctttatatgtaaaatttatttaacttaaatatcttggcccatatcaaataaaaaatgaag

SEQ ID NO: 70499 - DNA, 312 bp, Arabidopsis thaliana landsberg
ccactgccaaaagttaaagctctctctctcactcaaacacacactcatttttcactacttgacaacttccttgtggacaaaattagtcgacttctctgttctctccaacactgtttcgttttcactacccaaaattcgaatctgggttattgaaaaagttccaatttttttatctgggtttttcgaaagctgatatctttttagaatctgatctatctcttctacttcatttcccttgcattttttttaataagattgtacaaatctgtccttgtatctggcaaaaatagtggaagtctgtgcttttcctgc

SEQ ID NO: 70500 - DNA, 273 bp, Arabidopsis thaliana landsberg
  unsure (1)..(273): unsure at all n locations
ggaatgtaccggagagcccaaaaccagcgagctcggctttgaactgctcgtccaaaaacaagcctgntgttttgacatccctatgaaacaaggggggcattcatgcagaatgaccatattccaaccctgttcaaaggatacatctattatcagacaacccatatcatggaaacaggaaacgggtaagaaagaatcagtgagctctatatggttaaaacctaatactacaaaccgaatgcagccaaacacagctattcgaagcccaatacccca

SEQ ID NO: 70501 - DNA, 594 bp, Arabidopsis thaliana landsberg
tgagaaataagcaaattatctacatcattatgagaactaatagtaacaaatagcaagtataacaatctattcgacttataacctaaaggttataaattttgatttcttactcggtgacaacaaggctgacgtagcctttgcaatgtttgtcgtcctcatattgacttgcttgagtttatcaagtggtcgtgatgttgtcgtattactccttggagtcaccggtttaggtctgcgattttcagtcaccaatatatatgtttcagacaaaaacaaaccgtaaactagatcatattgaagcaagagaatggaaaaaacgctacttgtctgaaatctttaaaggttttctcccttctgctgcacaaggagcatcagtggatccttctgtttcatcatcatactccgcatcagtggaagaagctaaggcctccccgtccgtgacagagtgtcgtgactgtctggtataatcgtgttggaatcttgagtcatcttctatagacaactgcgaatctcccgcttctgagttaaagtcatcggattgtcctaagctctttttctgcagtctctgtgggtaattatgtccttaagcaaatgaag

SEQ ID NO: 70502 - DNA, 524 bp, Arabidopsis thaliana landsberg
gttcacaaactcggcgaagactatagccacttagatccaatagccgtcggcgtttgcgccatcatttgtgttttagctgtcgttggcacaaaaggctcctcaagattcaattacattgcttctataatccacatggtcgtgattctctttgttatcatcgccggatttactaaagccgatgtgaaaaactacagcgatttcactccttacggcgttagaggagtgtttaaatccgccgcggttcttttctttgcctatattggatttgatgcggtttcaacgatggctgaggagacaaagaatccagggagagatattcctattggtcttgttggatcgatggtggttactacggtttgttattgtctcatggcggttacgttgtgtcttatgcagccgtatcaacagattgatccggacgcgccattctcagttgcgttttctgccgttggatgggattgggctaagtacattgtcgcctttggtgctcttcaaaggtatgccaaagattttggccttcatta

SEQ ID NO: 70503 - DNA, 502 bp, Arabidopsis thaliana landsberg
tatccacaatgcaatgtgaaaagtcatatgtgggatagatacaccttgtcgtcaccttcgtgtggatgtgcgtgataaatgacacgataggcgacaggatcccacatgtttggattgggatggttcatgtccatcttcaaccgcaaggacgcctcgccctctgcgtacaagcctcgcttcatatcaaagaacttctttcgattttcagcgggtgaggtatttctccaaggagactccgggctctctccagggtttgcgggatcaaagccaggttcatgtcgcttctgagccaaagcgcgggatcgctcaatctcatcaccagtctgatggcacacgtacgcatcgccagaatcgattagccgcagcgcgaactcgtacatctactggaagtagtcgcttgtaaacgttgtctgggctggattccatcctaaccatgccactgcctcggctaacttgtcaatgtactccttgctctcgacttctgggtttgtgtcatcatatc

SEQ ID NO: 70504 - DNA, 663 bp, Arabidopsis thaliana landsberg
ccttttttttaaaaaataacattgccatgtacgactgagaaagtagatcgggacatagtctttagagagctagtgttcttataattgggtgttgtggatacatttctgatgtcttctggattatgaagcaattctatattggcatagatgatagtatcattgagagtaatctacctataaattttgctaagaagattccaacaacaaagggaaaattcgtgctatcaaactattggctggcaacgtgcgtatacctttgaccgcatctatgaatgttctttttcactgtctgtgtgtctgtccatgcaagtcttaattactttctagcaaatctgtccgatagtgatgaatgtaacatgacttgtgatgattcgattcaattatatcagcaccttggcaatccctgtaaactaacaacatatacaatcaaatatagccttaagttcatttctttaattattactagtgaggcttggtctccaacatctattatattcttctatattacttttgactcgaacaaatatagtataggttgcctgatttttcaaacaaacacttattgcgtcctgaaaatttctcccaaacttttctgctctgaaaattcaccattcagctacatctttcataaaattcctacatgcacttttggattcattccta

SEQ ID NO: 70505 - DNA, 1189 bp, Arabidopsis thaliana landsberg
  unsure (1)..(1189): unsure at all n locations
aacgaacaatttggttatacaattcggagaaacgtttggataacgttcaacgtctagaatcaatatcatatttccatgaaaatacttttatatttaatgcagggaattataaccatatattattctggtcttacaattggtagacgagttatatttaatacgctttacatcaacactcaaatctactttgaatgaaaggttataatgctgctacacnnnnnnnnnnnnnnnnnnnnntcaaaaacacgtcacgtctaattttcaaagaatagaaaatttcaaagtcgcgaagacattaaatttggtttcgttgataaaatatatataaatgatgaaaaaccatgaacaaactacaacattcataatcataatcagcaagtccactttagagtcatggctagttcttgttttttgtttcgaccaccacacttgttctttttcttcttcttgttcgtcccatttcttagcttaggacaacaaatctccgtcgacataaacagttctgtgtgggaatttccctcgaatccattatgtttatcccaacaaagaaacttcgccgaatcccaattctccaaaaacctaaacagtcttgtctcttcaatcccttctctcaagtccaacacttacaacttctacagtctctatgtcggaagtatctcggatcaagaacgagtcgaggccatcgggatctgcaacagagtagtcaatcgagtagattgccttaactgtattgctcaagccgcagtgaatctaaccacaatatactgcccacaacataggcaagcttacgtgcgagccacgaaatgtatgtttcgttactcagacaaacccattttcgggaaactcgaaacgagtcctcctctggaagcaccaaatccgagcaatgctacgggagatagaaacgagtttattcggttgcagagcgagttacttaatcgactcagatccgaggctgcatcaggtggctctaagaggaagtatgctcaaggaactgatcctgggtctccaccttacaccacattctttggtgccgcgcagtgcacgccggatttgtctgagaaagactgcaacgactgtctctcttatggtttcggtaacgcgaccaaaggaagagttggtatcaggtggttttgtccaagctgtaattttcagatagagagtgacttgagattcttccttctcgactccg

SEQ ID NO: 70506 - DNA, 326 bp, Arabidopsis thaliana landsberg
  unsure (1)..(326): unsure at all n locations
aaaacacaaacaaaccgagaccagggaaaccgaacaacccangcccccaccccgcaaaaaaagggaacgaagaggagcagcccccagcccaagcanaccaggaacgacacaagcacggacaagcaccagcacgaggcgggggaccgaacggaaaaaagggccaaagcgagccacgacacaccaacccgccggaaaaacacacgcaaaggacgacccagagaccgacccgcgcccaagaagacgcggaccacacgccgaaccaaagcacaacngagagggcgaacaaagcagacccgcaacccacccacgcggaaagcgacaaacac

SEQ ID NO: 70507 - DNA, 588 bp, Arabidopsis thaliana landsberg
actatgaaaacctgtaaagatgttttcggttatattgaaagcaaacaagatatattgggttttgtatttcttaaacgaaatcaaattttttctcggttagttgtatcttgtattttgacttggatgttgcaattatttgcagcaagagctttttgcacgcggaaaacttgtcatgttgaggacttgcaaccaacttctccgccgactctcaaaggttcgctatctgcacccttttctagttccctttgtcaaatatccataagtcataatctactttttcatatataacacatccactcttttttaattcttttttttgctttcactatttggcatacaggccaatgatgttgtattctgtggaaggattcttatgtttttggctcacttttttccgttatctgagcgctcacgtaagaagggtttctcgtgcatatacgattatttggtatgtgaatgtttaaaaggtgtgtaacgtttacttgcgtgacttattctttcagccgtcaatataaaaagtgtttttaatacattctatgaaaccaaatatgaaaaagatccttccaaaagcaagggattttttttttt

SEQ ID NO: 70508 - DNA, 646 bp, Arabidopsis thaliana landsberg
catttatctcctatataaaatttaaactattgaacgaatgttactgcttcgaaattataatttttactctaagttggcatcaggattctattactttaaaagccaaaatttactaatcaaaaactaggtgatatgattgtaaaattaaataagcccatttattgatttaaaatttattttttactctacaaatcgtgatttccaaaagttgtatctatataaaggcaatatgctttcggacccatgcatgggctcgatgtttttttacgggtattccatttcgggtagggttatgtgataaaccctatgatttcacataaaaagattaaatctgcgggcattgtgtccgcatgggtcggggaaaaaatacttcgataaataagcctttatatttcgaatattttaaagcatttgacgtcggctgatacctataaacaaaaaaaaactttgttgtgaagctctttttgctcttcctgagcatcaaaacgcgtttcacacgcgcactttgaacccaatattgttgggataccccaaagaagagatacgacataatttttaccgcagacacctctaatttttgggaaatagctttcttttaatacatttttgacctcacacggtgtatcggcaaaaaaaaattataaat

SEQ ID NO: 70509 - DNA, 623 bp, Arabidopsis thaliana landsberg
caacactgacatgatccgagaataaggattagaatataagctcgtgatattccttgtgtccgttgattatattagcacaaaaaatgaagaatccaaagtttgatagaaattctcattttagtacacgattattttatatgcggctcgtatgcaaaagcgacactcgctgatttgtgattgtgaaacagttttaaaaagtaaattcgtccttttctatttgtgacatgccacgccatctatgtcccattaaaatgctaatcgcacttactaaagctgcatgccaagttcccaagtatcgtgcggtccaatattcttcatttaatgttttttcttgacgaaaacgatccaatattctaggatctaataataatcgggaattaatactgtgatagttaaacctctaacgtttacgacattttgaacagtgtgcttaccaaatctgaaatcacgcgaatctctattaagtatattacgcgtaaacatacatatatgggaaatttgaaccggattaatatacttaagtgtatatcattgcgacaacattagaaattaaattagcaatgcgatcggtttaggatggattacacccgtgaacaatattaaacactaatgacattcatata

SEQ ID NO: 70510 - DNA, 1835 bp, Arabidopsis thaliana landsberg
gcctaatcggaaagttaaggtattaacagaaactcttgtcttctttggtagttttgttaagtttagaatgaagagcttatatgtgatttaacacagttttgtatctccttcaggttatagttttagatactagatatcatagagaccctttaagaagtgacgggagcatattgggtgatacgcagtgggactggctcgaaaatgaattgagcggtccccgaagcgaaatcactatcataggatcctctgttcaggtatctgcaaattagacttttgtgtcctgttccagtttggccatggacttaaacttgatgaagcctgagtgtcttattccatctagaactgttgtctcttaacttgtccaggtgatatcaaatctttctgctaccactggacctctcttttatatggaatcatggggtcgttttccaaaggaaaggaaacgtctttttaaactgatagcagatactaaggtatgggattgttgacagtaatgtttccaactgtcagttttcttctttcctcgtccccataattcttcgttgctttgacattacagagagatggagttatattcatcagtggagatgtacattttggagaaatcacgagatatgattgttctgttgggtacccattatatgatgtcacctccagtggtctagtacaatctgttgagaaagttgtccctcgtcccttgcgttccatagttaggcttcttttttggtatactccaagcacgatgagagttatcaatgataactgcaaattcaaatcttgcacatacggtattattctcaatttgattccttttacgttttcttctgataaactgtggaaagatttattgacaagccaagacacagtgagtctactttaagttccaactttagctctatagctctactgtcactaacctaggacggaatatagtagactgtaactgttgtgagttgatttaacagagcagcgatgtactcttttgtatgattacattggttacaatatcttaaacttacgtgcaggacaacaaaattttggagcaatatcgattgattggaatgcaaatccggttaccataaagctcgagatcagagatgttaacggagacactgtactaggcacgaatgtttcattatctgaactccaaccaggaggctcgaattctttaaaagatacaacaactaagggaaagtctcaacgatattgcacactctaaattgaattaccaggaacgaccagataccgattggcagttctcatctacttcaccattgctggtatgtcattcttcctcactgtggttggtcatgatgaaagaatgttgcggaatactgatatatacgttgtttgattgggttcgacagtcttggcaatggcgatattaggacttatcattggagctgtattggccataacagcatgcgtttataaatgcaaggtcgattgattgttgatgacattaatcaactttttttggtccaacaaaagtgtctttatgacttataatctgtattagttggattattcagggattacaattcggatgtagcttataatgttaaaaattgttgaacacatggattttgatcttgtgatgggaattctaagcttgagctgttattaattaaacttctttgaaagagaatgtttgtgaacacaagttaaattctagactacatgcaatagcattatagtttccagtttcttttttcttttattattgtaaaccaaggtttatcgtttattacatatgaaggttttcactgaatatttgtaataaattaaacaaattaaagtttttataatttcagtaatgatctcaaaacagatac

SEQ ID NO: 70511 - DNA, 598 bp, Arabidopsis thaliana landsberg
aataactgatcattctggaactttcctatattttgagcacttgatattttccctctaggatatggaaacaaggatggattatattctattcttctaagagattacaactcccatgctgctgcagactgcatgaatcggctagcataattgaggtgagttcatctcttttgactaatttttccttgatctcgcagcaattgcaatttcttgtcttgctcattcgtttttctgcttcatgtctataagaattgcaaaagctctccgttcgagctttgtatgcactgagtttcctatgacctttctctgctatctgacattgctgcatcgagtaaatgcatagatgtcttgactaacaggcagctttttatcttatttagcgcagtgctcggtggattggtatccatggcttctttattggaattgatgacgatcaacctggtgaagagctgagtaaggaaagaaaaaacagcatccagtttggatatgaccattgccatcgcaaaaatgaggaatttaatcaaagaaatttgcaacttaaagctggcctaaatggtgcaaaatccctaaaagctgaaataacaaggattctcaatacaat

SEQ ID NO: 70512 - DNA, 649 bp, Arabidopsis thaliana landsberg
acagaagatgagaggcttcaacgtcatatgtaggagttatgggaaaacaacttaaacccgaccgacatgaagatgaaggatcacaaggcagagtaatggtttagaacttagcttaaagaattcatatgtctgctgataaattaaatattgtacaaagggaaattacgctctttcttttgagagcggagtatatgtaaccgaacttggtttttctcttcttttttttcttcattcaattaacttgcaaagagccagaccaactaacccaagcgaaacaactgcagacatgatgacatggcaatgttattgctccacaatattggggacactttaatataatgaaatgggcttaatcttagatgggtttactgttgaacagttgaagccagaaaccctaattactcattactcgtccactttactttaccggcgccaatggtgagaccctgaatcaatctttccagatcttgatttagatgaatgtttttttttttttttttaatttcgtttaagcagagtgtttattgtgtgaattaacatgataaattgtacctgcaacgaaattatgcatattttacatttctttttatttgtaccttgggattcaagcgaatgcattgggtgacgtaacacacgttagattgggttt

SEQ ID NO: 70513 - DNA, 3254 bp, Arabidopsis thaliana landsberg
  unsure (1)..(3254): unsure at all n locations
attcaggggtgatattttacttttctcgagtcttctcagtgcatgcaggatcgaacaagggaagcagattcacgccattctcttcaaagtgtcatatcaattcgacattccggtggcgactgcattgctgaatatgtatgctaagagtaaccatttgagtgatgctcgggagtgttttgaatcgatggttgtgagaaatgtagtgtcttggaatgcgatgattgtaggttttggacaaaatggagaaggaagagaagctatgagactttttggtcaaatgctccttgagaatcttcaaccagatgagcttacctttgcaagtgttctaagttcctgcgccaaattttctgcaatttgggagattaagcaagtgcaagcgatggttactaaaaagggctcagcagattttttgtcggtggctaattctctgataagttcctactccaggaatggaaatttatctgaagcacttttatgttttcattcgatccgagaacctgatcttgtttcatggacttcagtgataggagctttggcttctcatggattcgcagaagaaagcttgcaaatgtttgaaagtatgctgcagaaacttcaaccagacaagatcacttttttagaggttctgtctgcttgtagccatggaggattagttcaagaagggctccgttgcttcaaacgaatgactgagttttacaagatagaagcagaggatgaacactacacgtgtctgatcgatcttcttggtcgagcaggtttcatcgacgaggcttctgatgttttaaattcaatgcccacagaaccaagcacacatgctttggcagctttcacaggaggatgtaacatccatgagaaaagagaatccatgaaatggggtgcaaagaagcttcttgaaattgaacctaccaaacctgtgaactactccatcctgtcaaacgcttatgtctctgaaggccattggaatcaagcggctctactgcgtaaaagagagaggagaaactgctacaatcccaaaactccaggttgcagttggctaggggactactcaatctagcaattataaccatgaacacatcaatctttagtcagcttaaaaagccatggaagtaaagattgttcaagaacgccaaagcctcccattgtaccaaaacattacatagcctaggcctaagataaatgatgcaactggacaactccagtgatcttttcatgtcactatgagtgtataaacatacaagattacagatacaagttgacagtgaggttcagattctatatcgaaagaatctaagtaagggagagaatatttacccatcaccatgtcttgttacaagatacaaaaaaaatcagtaaaggcctctctttatgcttatcttagtttcttgatagcgagtcttgccttgttaactcgtagttgtcagctccgttgtgggctaggttctcgtgatttacaattgcaatcttcgaacagaggaagaagaaagaagatgtgtagattgtgaaatgccaaatactgcacacaattttcataagccaaccttcagaaaagtgatacaatcgatattattcatatttgataaactttacatacacacacacctgtgccacannnnnnnnnnnnnnnnngtttctactttgaaacttatggctgccatggtgaaggctacaagaccagccgccacaaagccccaacgaaaccgtttcttgagcgtcttgatcaaattactaaaccattctttgactgcccgtggcctatgacaagaatatgacagacctcagataaataatgattttgtcacagtaggtaatcggcgtaagtcaggaaacagaatggcttccttattttacctgtcgagcatgttcaatgaaaatccagccgacccgcagtatgatcgatacttggtaacaaattctaccaaaaatccgatgaggagaccgagtgaaccgattgctaacacaatgataatatttgacgccctgcaaaaagatagcaagccaatgtaaatgtttagaaatagtatcaaggtgctatttatcacaaccattgagtcaaacatctcagataccttgttgcttgagtcaaggccaataaagctgtgagaatggcaacaactgtgtgtattgtccttttaactgcttcaccagccgtggataagtacacaaatgtaccaaccacggccatgaaagagagccagaaatccatgaactgaagcaaaaaaattaccatctcgtaattaagtataatgtcacatagaagatgacaatgatgcagctctcaactacccgtacctgtaaaacattgtaacttaaaacacaccaggtgcctacatcacatgcatgatacagagcgctcgagattccgctggatgtaaacagaacccactctggatactcctgtttacgacatgaatcagcagcatttagatggaaaaaagaaaaaaaacaagagccccggattaaagtgttaaaccaagaaaattacccgctgccgaagagcccagtaagctggcaaaagagccgctgcatttgatgcgatgagagcaatagactgaacaatatgttctgcatcaggttttacgcacatgagtatacagaaaagttgtcaaagtttcaaacactgatagattaagataccttggtgtgacacaatttcaatgctgcagtcaaagcctccgtgggttctgtcacaagaacaaaagctgaaacacaacacaagaatttgatctcaagataatttactttccatcatgtttacatattttggcagactcgagatagataaaaaacctgtaagatgtcaatccattagcgtcaaaagcatatcggcattgcccataagacgaacaccctctcgggcatctttcgagagaaagagatactaaagtaggtgaacctctggaagcagcaggagtattagagtcaatgagctgccttaacccaaatgaccaggttccttctcgagcatacaagatgtagaaatcaaccatttctttgctagaattatacaatgagaagaacattgagcggctggcacttgttcgatttacataatagtaatcccggtcgtcaatagtgggcaatccaccaaatctaagatatacttcatactgtattgtggaatctgataataatctgaaatggatatgtccaccagaaccaccttgagggatgttcatgagaaaataagtccatgtgcatgtgtctaattctggaatagaggaaaagttgctgacgagtgggttcgagggggaaat

SEQ ID NO: 70514 - DNA, 593 bp, Arabidopsis thaliana landsberg
  unsure (1)..(593): unsure at all n locations
gtttgcgcttgatgttagtttagaaaactgaaaatatccattatgtgtcccaaccaagcatgccaataacacaacccaccggtgctaaccaaaggcatggaaggaagaggtaagtcttgaattaacaaagtgtgggcctaactcacacgaaaagttagttcaaaagtggagaatttccatacacttatatactagtcgacaagtttttaagtcacgatgtgtgacgaatagtattatacgcatgtggagagaatcatagaaagacactttttgtcgtcatctttgaaagttttattgagaaatattagacactgcaaacatatataaccggaaagaaccaagagttaagtttggccaactagtctgccgtcaaattggtaatataattcccaaattcatagattatggatgcggtccatccggagagtgaactcttgttcaccacgcaagcataaatatctaagaatctcttagaaacagaacatgtggacacatctaaattacatttattacatattgacgatgtatataacccngtagtttaaattattgaaaatatgatccaaacacatgcatatgtgttttatggcata

SEQ ID NO: 70515 - DNA, 516 bp, Arabidopsis thaliana landsberg
ctgtgtccgccaatggctgtagtcgccccctctatttataccgcgcgctgagcccctctctcgccccagctcgcactcccttccctgttcctctcttcagccgagcgccctattcccctggccgtgctgtagttccactcgacgctccctgctccatccatggacgcagcttcccctatctctccatcgcgttgctctctaggccgttgctccctatgctgcactgtctgatcgcggactggaggttccccgtgctaatccgaccaccggcactgctcccttccctagcaccggccatggaggcgccggacttgctccatgccggccctagctcccatctcctccctgcgcacgtggaggaggcaaggttgaagaaggcgcgttgtctcagtgacgtgtgggcccaaggcaggggtaatggtgcttcagattacagatttcgtaatatctttcaaaattcataacttgagtttgggaaccctaaaatcgtgaaatgtcgttttttggcttcttatg

SEQ ID NO: 70516 - DNA, 187 bp, Arabidopsis thaliana landsberg
cccccaagcaagcaggtccttaacttattccacattcaaaggtttatccaaggcaaaggggggggattttaaccttttttttacttaacctttccaacaatttctaacccttaccttattgggccccaaaatccgttttgacttacccgatttttttcctaacggaaagggccacttttttctttcc

SEQ ID NO: 70517 - DNA, 466 bp, Arabidopsis thaliana landsberg
gcccggaaaggggttcaggaatctggtttttttttattagggcccaaattttttattttgggtttccgccccttttttggggggggggtcccaaaagaattggaagattttccttcaaaccggaccttcgattttaattgaattccggtttccaacaaatttttttttgtattttgaaatcggggtcgggattcgggctccctaatttgtaaattggggttcccgttcccttcttttccggctggggagggaaatccctgtttttacctttccattccattggagtcttgggtttcccaaattggggaaaaaaaaggggttcaaattattggtattggacccggaccttgtttaaaaagggccgggcctttccaattggttggtggccccggccaaggtagggaaaacctttggaatttattcaaatttggacctttgaccataaaaaggtccgaattgaattttt

SEQ ID NO: 70518 - DNA, 194 bp, Arabidopsis thaliana landsberg
  unsure (1)..(194): unsure at all n locations
gaccaaaaaacaaaacagggcnngttcgggggaaccgccggancaccccacagaccacangacccnggacaggaccaaccaacaaaancgggaaaaaacaccaaacangcaggcggggggagcagcccccgaagacggaaccggaacaagacacggaagacacgcacagccggagagaaaaggccaaccaaaac

SEQ ID NO: 70519 - DNA, 262 bp, Arabidopsis thaliana landsberg
  unsure (1)..(262): unsure at all n locations
aaaagataaaaccacaaaacacgagagacccaagcaacacgcaaagataaanagaaactcataaactgccgcannganancaaagaccgggagaagggcaagangacacaccgngcgccccaccnacacgggnnnaaaccanggaccaaaaacgccccgacccgacnncggggacgaggaagacangccacaaaaaanccaacccagaaaagcgacaccgaccacacaaaaacaacaacacaaacnnngagnacgcccaaaa

SEQ ID NO: 70520 - DNA, 225 bp, Arabidopsis thaliana landsberg
  unsure (1)..(225): unsure at all n locations
ccccccccacgaaggaaaaggaaaggagcccagagcacaacacggacaaaacaaagacgccgacaaggagagaacaaaaccaacagcaaaaccaaaacggcgggcgagaaaccaaaaaaagaaacccgggaaaaaaccgccacaaggacgaaccccaaagaaacggagccggagggcnaaacaaaaaccacccccaggaggaccgaagacnggaaaacggggccc

SEQ ID NO: 70521 - DNA, 217 bp, Arabidopsis thaliana landsberg
agaaagggaaattgacaggctgatgcagaccatggcgaacttttttctgttagcgtaatatattttagctagtaggcgctttactatggtcctctactagcatttaacggcaaacatttattgggttcaaacaacctttttaagccaagattaaaatgtaggcagtctcctaccgtctgctaccaaaggttgaaaatggcaaattgcaccagcttta

SEQ ID NO: 70522 - DNA, 273 bp, Arabidopsis thaliana landsberg
agaaaaacccacacaattttaaagggggggaaagggccaaaataaaaaaggcttggggggggaaaaaaaaaaaaaggggggcggggccaactttcccaaggcgggccgcccgcattggccaataggggtaaaagggccaacaaacaagggttactattaaagggaaaactggggttttttttcaaaaaaaaaaacccaaaattttttttttttccggaaaaaaaaaacgggtttaaaaaaaaccaggggggggaaaaaaagggggccgggccc

SEQ ID NO: 70523 - DNA, 472 bp, Arabidopsis thaliana landsberg
gagttcgttcgccccagccagggcggcgtaggttgcggctccggcctgccagtgtccgagtaccagtgccggggccttggccgagatggcggcggtcatcgccatcggtccgagggtgtcggctgtgcggacgattccgatgtgcgcggcgccggacctcagcgtcgcgcggagcaggttgtcatccgggtcctggaccgtcgagatgaccaggtcgacgggcccgatcgcgtcgaggctctgcgcggcgttcacggtgtcaaccagagccgccttcgcgcccgtctccgcggatagcgcggcggcagcttcggggtgccttccccccagcaccagctacaggtcgtgcccggccgcaacaaggagccgggctacccagccgccaaccaggccgtaaccgcgggcgatcaagacgcgtgccatgtctaacctcccataggaagtactagtagtaacttacatcggtaactta

SEQ ID NO: 70524 - DNA, 120 bp, Arabidopsis thaliana landsberg
tttttggataaagtctggtttttttacagtacccaacgaaagaccgaaagaacgtccgcctggacttaggaaagaaagatatcgctgggaaacctacggttaatgcgtttacccgactat

SEQ ID NO: 70525 - DNA, 593 bp, Arabidopsis thaliana landsberg
attcttcctaatattccccttctttcctaaattttcctctgttaacattgtaacctttcctagtctgttccataagcaaacaacaacaaaaagtataattgaagcttcctttttagaactactgcactatttgattttcaatgtttcatacaacaacaagtatacagtcaccaacttacgaaatgaggggttatagaagacataatttcttatctgccttttcccaagtcaagaatcataatacttggatgctaatgatacttaatgttgcctcaaactaaaccgaacagaggaaaaataaatcaaacaaactcacttagaaaagtttatcttcaagggtcaaaagaaactttcctctggactagagtacttttaatctaaagtctaaacgcaatcaatgggtagtgtaaacaatgcaagacatagaacgatgtcggcgcttctttgtcccatgtgtaggggaacaataatcttctaacatatattacaggcaattagccctaaccaccaaaaattatgatatatactatacaactaacttcaataaaatgaaacagtttcggccgatgaagaaaatttatacaaattcatag

SEQ ID NO: 70526 - DNA, 3536 bp, Arabidopsis thaliana landsberg
aaatatcaacctttcggaagtttgacgcagtaaggaaggagattgaaacaaattcgccgccacagcgtccatgattagcctctgggagaagcaaaaagtcggaactttggccagagaaaggagaaatgaagaagaaacctagaatgtaggagaagatgatgtcgataaatagtgattaaaccggttagtgtggatggtttatgactcttatctcttacaataatacccactcacgttttttcttttgataattacgggaaattaatttcgtaatttttcatgtttgacacaatagaagttgggctcatatttatatttctcaaagcccattaagcgggattttagaccattatgggaaacatatatagcccagaatacgacccatcaagacaattagggtttctctcgcctttcgcgtctaaaaagttttaccccaatcggtgtgtaagaatgtcgtcgtcgtctctatctgatttttcgtttctcagtgatttcgtttaaaaaaagttattttgtcttctgtgaatctacaatttttttaaaaggtttttcgtttttgctaataaaataagaaaaacggtggcgatgatgaaaaaaaggccggacttacggctactaccaccgtgaaagtgtggtgggtagtagaatgatgctaaagtatccaaaggttacagctgagcctcctctttctacaacttcacccatttttatccgatcttcactattattttgcctcaacttctttctcaatcaaagtttcggttcggttatatcggttttcgtttttttgttaaattttggaaaagtatgctgaattgatccgatattaggttcggttcgggtaggttcggttttcgggtaattcggtttttaactgggtatgtgcaaaaaaaaccgaaataaccgaacagaaggaaatacataaaaaaaaattgggtttgtgcaaaaaaaaaaattcaactgggccaagctaaaatacataaaaggcccattgtaaaaccatagaaaataaatgcaatcagaaggacagtttaatttttaacccatttcaaagaaaacaattccaaaaaataaaatgtcagaaaagaattttcttttagaataaagacagtgaagagatttatttcaaagcctgggtttaagctgctgagagaacacaaaaaaccctaacaaaaatggaatcgaaagcaatttgcttagggtttcttcctccaagacttcgattttcatctccacgtttactctctcttcctccttctcctcctgtaagtgaaatttaaccatcaaaatttcatttttttccatttcgattcttccaaaaccttatcctaaaatttgtcaatatctcctgattctataggcttcttccacatttgcgacgcgtcacaaacttgattccagacgtaagtatctctatcttaaatcctcctacttcacccagattgtagcataaagactgatcctttttctcattttcattcttgtttaagaaaccctcctttggaacaaaccgcaattgagccgagttcgtgtagcgtgttcttcttctcaatctgactcaagacctgagaagaagcaatcggataagagtaactatgctcgagctgagctgttccgtgggaaatcaggttctgtttctttcaatggtctgactcatcagctggttgaagaaagtaaactggtttcagctccgtttcaagaagagaaaggttctttcttgtgggttttggctcctgttgttttgatttcttcgttgattcttcctcagttctttctaagtggtatcattgaagctaccttcaaaaacgacactgttgctggtaggtcaggttttactactgctttaatgtttaacatcggattatgacttatatgaatcctaggaaggaacaaatggagtagaagctatctatcttagtggtgttacatctgctaactcattatgttttagtgtagtaggctttggctttgaggttttgataggcttagtacatcttttctgatgtgcaatattagaatcctttttttcattattatcaagaacacatgacctgagccttagaaagaacctaaacgagatctcataactctcctaaagctaagagacttagcaaatgatctatctcttgttgtatgatactcattttgatgctctctcttattataatttcttgatgcagaaattgttacttctttttgctttgagacggtgttttatgctggtcttgcgatattcctgtctgtgactgaccgagtgcagaggccgtacttagacttcagctccaagagatggggtctgatcactggactgaggggataccttacgtctgcattcctcacgatgggtttaaaagttgtagttcccgtatttgctgtttacatgacttggccagctcttggaatagatgctttgattgcagtgcttcctttcttggttggctgtgcagttcaaagagttttcgaggctcggcttgaaagacgtggctcatcctgttggcccattgttccaatagtctttgaggtaaacttatattctgattttgaccattttggtcttaagtttgtctgcccatcttcttgtggtccatgatgttgtagtcttgttttgagtaactatggttgtgtatgtcatggcaggtgtataggctgtatcaggtgacaagagcagcgacttttgttcagaggctgatgtttatgatgaaagatgcggcaacgactgctgaaataacagagcgaggagttgcactagttggtttggttgtgactttgcagtttctagctgttatgtgtctctggtcgtttatcacttttcttatgcgcctctttccttctagacctgtaggtgaaaactactagatctcagtgtttagtgattgttagatgtagccaaatcccatcggttttgttttgtttctgtgttcatttcaggagtaatgaattgtattaagtcactttaagaattggttgatcatgtgaaatgagaattggctggaaatgttatagaacgatcctacttaacttcagtatttgatgagatttcttattggagactcttgtgaccccttctctaaagtttcaatgtgtgaaatcacaacataagtaacacaacaatagatgggtctggtctcagcttgtgttttggtcctttgtatgcaacaatagagaagctgaatgcttatccacgtggaagatttgtgcctccgataggtgtctttgacagtgtgacgtgtctgtattgtttcattgatgaatctgttacaccgttgagtgattgattctcaaataaattggtcccaaagctttttatcaatatgtgatggttattaatggatacttaataaaagatgccattacactaatcaacgattattgttgagaaaacaataaaataggatctcaagagaaatagccgcttttataaaaatagtgagagtgactgagatcaatagaaccaatctcagaatcatcttctttctctttcggaacaaaaatgacgtctcctctttcagatctcctaaaccttgatctatcagaca

SEQ ID NO: 70527 - DNA, 539 bp, Arabidopsis thaliana landsberg
tggcagagatgccaaaattttactcaaaaacggttcaccaagcgtttaatgggctattaagacaatgtttttatgataggctattagcacgtgatgatggacattggacaacaaaaaacatgcaaaaagtaattagtcagatcgaagagcaaagaagcaagaaagagctaaaggaccggaggttgtcgtatggtgaaatgtggctttaatttaacgttggtacaacgcgtaggggcctgcatgcccatttttctaaccagtacttactctttcgttataagatatctacatatgcattttacacttaacattttctctaattgtaatcatgtgtatacgtccaactatgatttcatatgatcatctatcgagcatttttaatctcacaaaaactagtttctatgagaggattaatggattttttttgtctagctttttcgccaattcctctttattatatttatgtagtaaacatgttttgtgggaacagtagagaactcgtgtcgagatataccttaaaaatgttcgaaaccatcagg

SEQ ID NO: 70528 - DNA, 418 bp, Arabidopsis thaliana landsberg
ctagtgatacaaacaatcgaatcaatcctttatatattaacatttatactctctatttttacatcaaccatctgattatcatacccattatatatatgaaacctaatcaacctctaatatatatacacatgtctaatccttcatattttaactcaaacccttacccaccattcaatatttattaggagaactcaaatcatactaaaatctctcattctcctcttaaaggatatattatttgaatccaacctctctctaaacaaaactgattgcctaaattccttaatatttagaaataaaccacctacactacatctttatttcattaaagataagaatagatccaaaacataagaccacggaagttatttaatacatattctaaaaaccaatggcaatgtgtcattccttttactat

SEQ ID NO: 70529 - DNA, 317 bp, Arabidopsis thaliana landsberg
  unsure (1)..(317): unsure at all n locations
gttcctctactatacacgcgaagctttcccgcttcngganggaaccgganaccgaggaccaactacaacgggagacccgcancccccccccaaccaagaaaagaaggaaaaaaacgccaaaaggagaagagaggcaagggaaagcccccccngagagaaaccaagagaaacncagcgacaacgacccgcacagaggacacgcaaacagcgcgaagaagggccgcaccaggagcggacaccccagagcggcgcaacgggacggcggccgaggcccnacgaaagaggaaaaacgcacgggacccgaaagcaaaacccca

SEQ ID NO: 70530 - DNA, 263 bp, Arabidopsis thaliana landsberg
  unsure (1)..(263): unsure at all n locations
aaccccaaaaaccacaaaagaggaaaaaggggagngnnagccccaaaaacacgaagcccccacgagggcccaaggaacccaaaccaacacagggcccccaaggcacgagccggagacgganagcaacacgcaacgacgngaacacnagccggccnaaaccaacgncnccaaaaagacaaccnagagagaggaanacccaagggcacgcacaaaccngcgagaggaacccacaccggacagaaaaacaacgggcgagcaaaaca

SEQ ID NO: 70531 - DNA, 369 bp, Arabidopsis thaliana landsberg
tactctttaattactctcaaaactgtgggtcacttctctcatttactttttattctttgacaattcaacgatagtaaagattcaaaaaagaaaaaacagattagcaatgtacttatcggataatggtaccaaatccaatccaaatgttttttttttgtctggttacaaaataaataactttatttcaatacccatatgttgtttttacttagtaaataactaattcaatttgcataaactatttaaataataataaaaaggagcttctgttcgtgtagtatgcaaataacgatggagcaaaaaggattaattgggatctgtgaaattcgttaaagccaaagatagagagaggagatgaagctgaaggca

SEQ ID NO: 70532 - DNA, 2859 bp, Arabidopsis thaliana landsberg
cacccgtgctgatatggactatatgcatatttgttttcatacggagtgtattaaattgatatcatagtggggaacaattagatatcaaattagagatttagagttattatattatttagtacatcagcagcattggttatgaaccctaattgttcaagcagaatttgtagttttagtaaaaactttttatcattttttctattttagcaatgtattgatacccatgtataatttgaatgttaggatcgacttcagattataaaatatactccaagttgcatgcacatacttttaaaatctaagctgggttcagtcattggttaattcatactaacccttagcttttaatttagctttttgactttacattattaaaacgttttgttataacatttactatcaagtcttttacaccactgacggatctactaaagaaggaaaatctttggggagtggcccgaaacttgccaatcttgatacaatcagacaacattcatcttcttgttatatgattagaaaattatcctcagaatgtcaaaagaaaaaaaaaagaaaaagatttagcatgttttattatacccttaaaatagtgaaacactcataaacgcataatctaacaactttccattaaactagtaccacttgcctaaaaatcgtctaaaagacacttcattgctaagcaaattagttgtcactacaaaatgacaatatacaaacacttaacgcgcaaatgaaaaagataatcgtacaccaaaatcaacccttattatattcctataaaaagtccaaatattagcccccaaataaaaagtcacaaattaaaaagaaagtactaatcactttctaatgattaaaaaataaacactgatattggtttgtccacgtaacatgcatgaagattctgatcattggagttgacgaagtttagtcctaaacaacagtgaaactcacgcgctttaaaagcgcgtctactctcatttccctccctgtatttcgcattttcccaactggcaaacacaaaagcaaagcagtattcacacttcccacattaattcacacctctctcccttctctctcctatctctcagtcaaaccctaattccgatgacggtacctaattccgacgatggtgaccggagtttaacggaggttatcacctctcttatcgactctatccccaaccttcttagcttcaagtgtaaatggtcatcaattcgcgccaaactcgccgatctcaaaactcagctctccgatttctccgatttcgccggctcttcttcaaacaaactcgccgtagatcttctagtttcagttcgcgagacgctaaacgacgccgttgccgttgcggcgaggtgtgaaggaccagatttagctgaaggtaagcttaaaacgcagagtgaggttgattcagtcatggcgagactcgatcgtcatgtgaaagatgctgaggttttgattaagagtggtcttctgattgataacggaatcgtcgtttctggattttcgatttcgtcgaagaaggaagctgttagattagaagcgaggaatctagtgattagattacagatcggtggtgttgaatcgaagaattcagcgattgattcgttgattgaattacttcaggaagatgataagaacgtgatgatttgtgtagctcaaggagttgttcctgttttagttaggttacttgattcgtgttctttagtgatgaaggagaagactgttgctgtgatttctagaatctctatggttgagagtagtaaacacgtgttaatagctgaaggattgtctctattgaatcatctccttcgtgtattggagtcaggaagtggttttgctaaagagaaagcttgtgttgctttgcaagctttgagtttatctaaggagaacgcgagagctattggttgtagaggtggaatctcgtctttgttggagatatgtcaaggtgggagtcctggttctcaggcttttgctgctggtgtgttgaggaacttagctttgtttggagagactaaagagaatttcgttgaggaaaacgcgattttcgtgcttattagtatggtttcttcaggtacttctttggctcaagagaatgctgttggttgtttggctaatttaacgagtggggatgaggatttgatgatatctgttgttagagaaggagggattcagtgtttgaagagtttttgggattctgtttctagtgttaagagtcttgaggttggagttgtgcttctgaagaacttagcgttgtgtcctattgtgagagaagttgttatatccgaagggtttatccctcgcttggttctggttttgagttgtggggttctcggtgtgagaattgcagctgcggaagctgtttcctcgctaggtttcagctcgaaaagccgaaaagaaatgggtgaaagcggatgtatcgttccattgattgatatgttagatggtaaagccattgaagagaaagaagcagcttctaaagctctatcgacgcttttggtgtgcacgagtaacagaaagattttcaagaagagtgacaagggtgtagtcagtctagttcagctcttggacccgaagattaagaaattggataagcggtacacagtctcggcgttggaactgcttgtaacttcaaagaaatgcaggaaacaagtcgtagctgctggtgcttgcttgcatttgcaaaagcttgtggatatggataccgaaggagctaagaaactggcggagaatctttcccggagtaagatttggggcgtctttacaaggccataagagactgcgcaggatacgtttttaacctgtatgtaagaagaatcatatattttccgaacgacgattcttgttttttcggttcatgtt

SEQ ID NO: 70533 - DNA, 425 bp, Arabidopsis thaliana landsberg
agaagggtttttggtttcttataaggtggtctacacatacttctttaactcccacctcttttgttgcttttaatgcattttaatattaaatcaaaggggtaacaattatttattactacgcaatttatgcaactgccctgatatagtaatgtaattttgtgagacattgttgtgtaaaattctgatttcacactctgcatgtcgacaatcatgtacaggggacaaatgacacgcacaataaaaagatggttcaaacttgtatatagacaaaagtggacaatatcatttataaaccatccaccaaaatgctatgcacaaaccattgccaaatcctctctggctctctctctataaagataaggtttagttcttttaaaaaaactaattgacaaatggttttgttcacgacagaacaagtccgagta

SEQ ID NO: 70534 - DNA, 419 bp, Arabidopsis thaliana landsberg
  unsure (1)..(419): unsure at all n locations
tctaagtttttactatagacagcgttaaaattcacaatatatatattattttagtataaaaatatatatttcttaaaaaattatgtatatttgtttaataaactaagtatagaccctttaatcatattaaagaatgatataatataaactaattctgtttagatcaaattattacatcttatctttaacaaaaaattcaatttaacttcaagttccaaccatggaacctgagatcttttttttttttaattgaattgaaaagaattttcatatttaaatattttgtaaaaacaatgtatgttatcttattaatgttcaaacataaattaggaaagattactnatctctttattttttctttggacaactcaagaaatttttttttggaatcctttccctttcccttttcaaccaaaaaa

SEQ ID NO: 70535 - DNA, 371 bp, Arabidopsis thaliana landsberg
  unsure (1)..(371): unsure at all n locations
cacaagngnaaccacaaaacaaggagggggggtganaaagagcacaccancaaaaccacccaaccaacaacnacacngcnaaacaacnngaacnnangagcancaagaacaagcaaccgaagggaggagaaagcncccangagncccgcacaagngaacacaaccaanancgacangaaaaaccaanacgngaagcnccgncnggnnggcnaaaaggccacgnngcanagaagcannggcagcacgaaancgagngggaaaaacccaaacgcgccnaccaccgcggaaataaccccaaagaacggnagcaacgcngccacgaacccgcaaaacgccaaaaaaagggaacnaagaaccaaacgcggcacaag

SEQ ID NO: 70536 - DNA, 537 bp, Arabidopsis thaliana landsberg
  unsure (1)..(537): unsure at all n locations
aaaaaatatgccttaaacatacgtaagactacacgtaatatcaaaattaacatgcttatacatagtaattataaagctttatgtaaagcaagactgattctattaattaattgatggatcaacacttttagcaattggggatattgtactatttactggattatgcttgtggagggagctcatggtgctccagattatcaaattttatatatggtagaaaaataattataccattacaatgtaaagcattcgagttcgaatttcattggcgcactttgattttatataggaagattgaggttaagttgtaataagtgcgatattcatattattattggaagtttattggtttagccatatggtttattcagcaaaccattaactaaactcacatgtcaaaagttgaaacttataccaccttgatatccacgtcatcaattcttaatacacttttgtattttgacccaaatttacggngttacacgttatgtaattatgatatatgcatgacatacacgttatgatatatgcatgaca

SEQ ID NO: 70537 - DNA, 295 bp, Arabidopsis thaliana landsberg
  unsure (1)..(295): unsure at all n locations
cacaaacaaaacccaaaaacctcacagatttgaacacnccganaaacaanacccgaagcggcgncacgggcagcggcaggagaanaaggcaccacccccacgaaccgaacgggaccagaccaggccnaaaaacaaaaaggagagaccccgangaangcaaacccaaacgagcccgagaaacccacaangcaacaccaggganagcgacaacancaaaggcaaacgganaggagcacaaacgaggcaaaaccnngaaancanccaacnnngaaccagcngcaacagaaaccagaaa

SEQ ID NO: 70538 - DNA, 297 bp, Arabidopsis thaliana landsberg
  unsure (1)..(297): unsure at all n locations
caaaaaaaacaaacgagagcncgaggaaaggaagagagaacacaacgaaaaaccacgggacagggacacaaccaccgacaaaagacaagaacaacgaccggacaggaaaggaaaaaacaacagaaggggaggaacaaaacccaaaccgaaaacgaagacccaacagcagcagaagaccaaccggaagagaaaccaacaccaagagaaangagaaaagagccagggcggaccnggccaccaacagggacaacggaaccgaacaaaaggacgggaaaaacgaggcnacccaacacaaaa

SEQ ID NO: 70539 - DNA, 348 bp, Arabidopsis thaliana landsberg
  unsure (1)..(348): unsure at all n locations
acgaaccctaacgaagtaaataccatagaaanaacactttaagttgtctcataaagcatacanaatttttctgtgtagaggtgtggtcnntctatttaagaaatgaccacctacacancagtcgttaaaccgngaaggtccacttgttttcttccaacattgtcgtcatcaagaccagcgaggtatatataaactcaaacaaaagccctacctcgcgagttctgattatagcattcacatttcaccaaccagaaagctcgtntttctcgtctctctctctcttttggttggctctcgcaccgaagacaaatagacgaaatcctctctctttctcttgcctatacatct

SEQ ID NO: 70540 - DNA, 2815 bp, Arabidopsis thaliana landsberg
attaactcgctcttattgttcatcccccagatcatcctgggactatacctcccgagggaggccaaggtggtgatcatgaggtacacctcctccctccttctctctctcttggaagtttatatcactcttctttctttgcgttgtgattggactatccatgacagattggaaaagatgtagctgcacagtatgtgcaaggttgggactggatttgtccaataaggttatttttttgttacaagatttagcttatcgtatagtttaaggcatttctctctgacaacattttttcttctagggaccggaatactggcatatgggatgaagtgtcaatatctgtcaccggggttcgtttagttggtttacattgttttccagagatgatatcaatcaatattctccacggaacgtttatagtcatcttcttactgaatgttataaattgcttttattgcagcctgtaagaataattgatccccatttggtctcaaccttctttgacgattacaagagagcttacttgcatgtgactgctgaactggaaaacaaaagcacatggaatactgaatgttctgtgaatattcaaataacagccgaactcgaaaacggtgtctgtttagtagagcatcttcagacagagaatgttttgatccctgctcaaggacgtattcagcacacatttaaaccagtgagtggtattgttatcgtatattacttgttacgacttaaattacttatggctctgaatctgtgatggtggtattgtttatcctagaaactaatgaaatattgaattaacagctctatttctataaacctgaattgtggtggcccaacgggatgggaaagcaaaacctttatgacatcttgatcactgttgttgtgaatgaattcggagaatctgattcgtggatgcagccatttggattccgaaagattgagagtgttattgatagtgttactggtggaaggtaaactttttatatttcagtttcagtttggcttgtgtagaatgattctgtggaggctctgcaacttgtttttgttaattttccaggctgttcaagatcaacggagagccgatcttcatccgtggtggcaattggatactatcagatggactgttacgtctctctaaagaacgttacagaaccgacataaaattccatgcagatatgaacatgaacatgatccgttgctggggcggtgggttggctgaaaggccagagttttatcacttttgtgatatctacggcttgttggtatgaatcttaagttattcgctatcacccttcttccaaaattcattgccatttctgaagtataccttatttattctcaggtgtggcaagagttttggatcactggcgatgttgatggaagaggtgttccagtatcaaatccgaatggaccactagaccatgaattattcctcttatgtgctcgtgatactgtcaaacttctgagaaaccatccaagcctggctctttgggtgggtggaaatgaacaagttccgccaaaagacataaatgaggctctaaagcaagaccttaggcttcattcttattttgaaacccaattgttatcagacaaagattcagatcctagtgtttatcttgacggtactagagtttatattcaaggatctatgtgggacggctttgcagatggaaaggggaacttcactgacggcccttatgagattcaataccctgaagatttttttaaagacacatattacaagtatgggttcaatccggaggtcggctcggttggaatgccagttgcagagacgataagagcgacaatgcctccagaaggttggacgattcctctgttcaaaaagggtttggacgggtttattaaagaagtgccaaatcgaatgtgggattatcacaagtacattccatattctaatcctggaaaagtgcatgaccagattctgatgtacggtactccagagaatctcgatgacttctgcttgaaggtaaatttgggatcttaaccgtttagcctttactggtgttgtcttaccctggtgcataaatgttacttttccccttaacttaataatgcaatgtctatgttcgattaataaaagaaacttgagatcataagtgatatattatgacttggtttttcctctgtaacaggctcaactggtaaactacattcagtacagagctctattcgagggttggagttcgcaaatgtggacgaagtacacgggtgtcttgatctggaagaaccaaaatccatggactggtctcagaggtcaattctacgatcatcttctcgaccaaacagccagtttctatggctgccgttccgctgcagagccagtccatgtacaattgaacctggcaagttactttgttgaggtcagtgtgattagttactctctctctctctgacaatcactgtgtacgaaggtctctcgaaattagattcttgatctaaataagaagtgtataaaagtctaataaattatgtaaataatacatggaatcatgtcctttgaccccccgcacaggttgtaaacacgacttctaaagagctgtcggatgtggcaatagaggcatcagtatgggacctagacgggaactgcccatactataaagtgtttaaaattgtctctgccccaccaaagaaagttgtgaaaatatcggaattcaagtatccgaaagcagcaaacccaaagcatgtatatttccttcttctcaaactgtacactgtctcagacaaagcagttatatcccggaacttctactggctgcatctgcctggaaaaaattacacactcttggagccgtac

SEQ ID NO: 70541 - DNA, 705 bp, Arabidopsis thaliana landsberg
ctcaaatttttttaacgtctttgcttaccagaaacttatgattatcatgaagaaacggaccaaactcatataatacctttcctgtcggcttggatgttaccagaaccagatatgacatccatgaacttcttcctgtccggagctagctttaaagccatctgataaaaacaaagtttaccgtgtctcaggaaatcaaaatgagattggtttgcagaatatgctgattacacagagaagcgctagtgagtacatacagagaaggtagagctggcgagccatccgtgccatttcttgagtgttttttggtatgagtcagcacaagcttgtggcattgaccagtcttgatgtgctaccaagtttcggaacagctccactaagaaatccattgctctgaaagattcactcataggtgatatatatggttttgagaagctgctctcttcgaaataaaggtgtgtattgttgacatgttgtcatcgtttacctggttaaccagagaagaccgtttgtacagctagacgatccttttgctatcttagactcaatttcgacttgaacaaaggtgtacaagtacttgaacttgtcgggatcaaataagtagttcttttccaacctctacacaagagacggaccaataaaagtatattgtaagaagacaataatccaatacagagaggtcatatcactactacagtctacaggaca

SEQ ID NO: 70542 - DNA, 624 bp, Arabidopsis thaliana landsberg
aaaatatttaaggataaaaaacgagagactcaatcaatactcaaagataaatagaaatattcttggctgtgcatttatttcaaagactgacaaaagttctcgctgacactttgtgcgttcaatttaatgtttttaaaccatggaccattaatgctctgtcccgactcttgttacattatgtcttccacaaataatctaatccataaaatctataccgaccacacaaaaacaacaacataaacttttagttctcccaaaagattcttaatttaacacttcgattgatttcagttcaattctaccagattttttttaattgaaatagtatagtttgaacttttaagatgttctgtaggattaatttttgaatttaagtttgactttgaagctacgggcttcagttcgaattgttcaggaatgatgctacgggcttacaattttgatagatacgataaaagcccatactgcggccaattcgggtccatcaagtataactatatattaatgagtatctatcgaaattgtaagtccataatgctgccaatttgacaaccgaacgttgggcgccgaaagataatatgacgtgtttagaaacaattagattttcttaccgtatgaatatga

SEQ ID NO: 70543 - DNA, 283 bp, Arabidopsis thaliana landsberg
  unsure (1)..(283): unsure at all n locations
aaccccgaaaaaaaaaaagaaagaaccggaaaccgaaaacccgagacgggaagcaagaaaaggaaaacaaaaaacaccaaacggnaaaccccaaaagccaaacgacacaacacaaaaagggcaaaagaaaagacacaaaaccaaacccgaaaggccaaaacggaaacccgaaagcaaaaaccaaacaaacgaaacaccaaaaaccaaaaaccgacggaggccaagagaacccagcacaaaacacagcaacaaagccaaagaacacagaaagcaacaaggcaaa

SEQ ID NO: 70544 - DNA, 351 bp, Arabidopsis thaliana landsberg
  unsure (1)..(351): unsure at all n locations
aaagaagnttgtttttattttgggttaaagtaacatagctagtaacgtgatacaatatgttgaggctgtttttattaacattgactgacttaacttagactaaagacgttcatttttgtaacttaaactagtaagttattatgttactatatcgagtacgtacaacgggaagagacgtacattattgtaatcatgcaaggagtttgatctatatagcaaaacacgtgaaggaaaagaagagtgataaacgaagccatcttgaaacactatccctttctggggaaaagatcaaaaatcgaaaagtaaatgtttgaaacataccacaacttcgtatcataagaaaattggaaa

SEQ ID NO: 70545 - DNA, 658 bp, Arabidopsis thaliana landsberg
ggacctctgtactgtttgcataatagtgtttctttgtgtttgtgttactccttttgtaaccgtcttctatctttgcaggttcttcaatggttcttccgttgttttcagcaaatggcatcctttctcgattaagttcaatatttcttggttttgcgcctccatttcttcttctgtctattgggtatctctctttacaagacttagttatacattaaagtccactggttatatggcttgttctcatgtttccaccatttgtttgcagatatgaagctgtattttacagtgcacttgccgttgtgcttatggcatggatattgtttgagaatgcttctcatcattctagcaaagtaaaagaatcgtctctgtcagaaaataacacagaggaacatatcactatcggaagcgatgaaagatacttgcagctatctgatgtgcggattcctttggtttttgtaagtcgtcttctttgtttccctggtcccattgtgacgtgagcgagattatgaatacatctgaaaaaatggaagtcatatgaatttagtatttggcttgtgttctgtagatggttttgttcaatgttgctttcttcggaacccggaattttgcaagtatagcaagttttgagatatcatctgtataccggtttatcacaatc

SEQ ID NO: 70546 - DNA, 1655 bp, Arabidopsis thaliana landsberg
agtctgtccaatccaatgcttgatgattattctgttatcatattggatgaggctcacgagaggagtttaaacacgtaaggtcttttctatattcagattcaagcatggacaaaggctctagaatatatcttaacttggttcactgttatcagggatattctgttgggtctagtgaaacggttggttagaatccgtgcatccaactttaaagttcttataacctctgcaacacttgacggcgaaaaggtttctgaattcttttcgggctgccctgtgctgaatgtacctggaaaattataccccgtggaaatattatacagcaaagagcgtcctgtcagctatattgagtcatctctgaaagtagctattggtatgttcaagctcgagtgtttctgttgtcaagtcaatttgatttggttaatcttacttgtttcatagttgacagtatgttttctctgttacatgacaaaaaatcttgttgttacttgtagatatacatgttcgtgagccagaaggtgatattttaatcttcatgaccggacaggtctgtatcatctgtttcaattctagccattgaaatctggcagaactatctagattgttgcgtcctgtcttactctattttggttttaacaggatgatattgaaaaattagtatcaaggctagaggaaaaagtacgaagcttagcagaaggatcctgtatggatgctattatttatcctcttcacggttctttgccccctgaaatgcaggtaacaatttctagaatcagactatgagtgtccattccagatttttgcttctgggcaattgagatatctaggtgatgtaaaaggttttggtaatttgcttgactttcaccatttctgcaggttcgtgtctttagtcctcctcctccaaactgccgcagatttattgtttctaccaatattgctgaaacttcccttactgtggacggggttgtgtaagttactcaaaaccttaagtttatagtgttattttttgttttcatgtctggtatctaccgtaagatttactgtacatattgatactttcattacgatagtgttaagtcaggccctgtaaaaaaatgaataaatttatcattcatactaatcatgaagactgcaatcgtgtaattaggtgcagtaatggatttaagcagatatatgataccggcttaatgttgtttgttatattcctcgctcctttaaattcacttcacatttcagtacatgttgttcacaatcacgtctatgagatctacttttggagtttaacttgaaacagacgattgagacatttaattctacatgaataggtcgtactgtctctttgtcaagctatcaaaactgaatgtagtatgggaagattccttattctgtgatgttactgttgccaaaagtcgtctttgtttgtatcatttgttcatgtctgcattttaagcaaagttctgataatgttttgacaatttggagatcgatagcattctcagcctagtctgttttctttgacaggtatgtaattgattccgggtatgtgaagcaaagacaatataacccatcaagtggaatgttttctcttgatgttattcaaattagcaagtaagcaaatgaatcttggttcaataccttcattcattccattagattgt

SEQ ID NO: 70547 - DNA, 386 bp, Arabidopsis thaliana landsberg
aacactctgtatagtgttttttatcaaaaggagcaagtgattagtcatacaatcatagtatacgtcatatcttcttacaaaagttgatctgttaaaaccatgagaaaaagaaaactctcatcgattaaatgatcaatcacatcacttacacgtggacaatgtcaaaggtctcgaaaatgagacatatttgctttctattcgctctctcactttgactctgttgtctttgtatggcttgggtctctatctctttcggctattgttagaatacatatggctccggctggagatgtgcgttcatgcggagcacatttagcgtctgtaggggaacaataggggatgaagtcgatctaactgtaccagtgcggctcaagtggatcacacac

SEQ ID NO: 70548 - DNA, 1816 bp, Arabidopsis thaliana landsberg
atgatgatgaagaagaagagaatatcagaaacagagtttttttttacttgttatggtttttaagtatgaaagtggtaaagtactgtaccttgtttcctaagcaacccatgattccgcgggtgacggaggagattctgagatgagaaacgtgttgaataagttcctttctcatccacacagtaaggaatatacccaccatttgctttgatgctactaagccatacttcatcgtcatttggttgcttacaagagaagcaacttttcctcctccttcatcctcgtcttcatcatcatcgtcatcatcttcatcttcttcgtcatcagaaagtacaccggattggttaactagaccttcaggacatctgaaacaagattctctcccatactttcttacaatatcttcagagaaagtgctgcagttacagatcttcagctttctcctgcactctgttctgaaactctcactaatcttcttcaaagaaggtttcgcaaagaacatcgatccagcgccaaaagatggagtttttgggctaagtcttcctccagaagatgatgatgatttgtttaaggattgattgatcatcgctaaccatttcgcagcaggctcgttgtctccaagaacaaggacatttccagcattcaatggaacaatctcctgaaaactatgagacaagattaaatcgacaaccctcaagacactaatccaagaaatactcaagacattttgaaattgtgtaccctaaaacgtatacatcgaattcactatgcacgtgaagcaaagcatcaagattaagaccagagtgtggagattttcctcccacgttccatgtcgccacaaagactcttcatatagtcacaaaaccaaaacattagaaataaacatctctgtttcgagggataactaaaaataagagaagaaatcaagaatctatacagagaaaaaaaacacaaacaaagatgtataactatgggtatataccttaaggattggatttgctgagtaggcattgaagatctgagattgcttgaagctaaaagagattcaactactatctcggattgagaccctgcaaaaattttttaaaaagagccaagaaatagctgcaatatatgagacagagacgacaaaattctgaagataaacagagacacacatgtagatatatacacagagggacatactattaaatatatagagtggatccgacatgttttgttctaagagttaaagcgactttctttagatggttctcgtggtatgagggagaattcaagagctttcttcttcagatttggtcttcgaacactaaggaattaacaaactgtagcggaaaggaattattattgtttttaccttatgcaatgcttcggtcttctcttcgtttttcttatatttttttttttaaaaagaagagatctttttgagtttaggaagcaaagataagaaagaagtaaaataattgaaagaatatattctgaaaaagtctgaaatcaagaacactgttcccttgctttgatacttatatgcccctcttgtttctttgctttttcatttatacaaatcttcttcttccttttcatcttttgttttatttttctttctattatgtggtctatagatacttagatagacatagattccattatatatatatgaatcctttgaccgaactttgattacttcaatcagaaagtaacgtttttcgtgcacatatatatgcgtgtggtatacgtagagcctagagcagtccaataaaagatcaactttagtttgtggtcttacaataaagtgtgtatcttttattcaacgatttta

SEQ ID NO: 70549 - DNA, 446 bp, Arabidopsis thaliana landsberg
tgccacaaaacagaacatttctgctcttggtgatcatcaaaaaaaaaaaaataaaaaggagatcatttcagttctttttgtttgttgataattgtaagccaagcctttgaattttaccgggcttacgttacacgctttaggattagagttaagagaaattagccgtttggtatgaattttcttgaagcaagaattaaatacccccaacgatcaaaactcagagaaacggcctcaatggttttaatggctccaaggttagttttgctttctcagcttatataagagaagacttttttgccggctaaaacctgccggcgtatgtttctaatctctcttttatctatgcttttaatcagaaacaaattcttctgctaaagaaaatttctctgttttacagttagagacaaaaactagtttcttcacaatgcagatgttcttgttcttct

SEQ ID NO: 70550 - DNA, 3886 bp, Arabidopsis thaliana landsberg
tatctttatgcatagctattatctcgaaagtttggggggtgtgttctataaaatactcaacattctgacctcctttttgggtttttttgttggcatagcttttaccattctcagagaagaaagggttgcagcagagccaatgtgatgatgttccttgactcacaagtcacaagtaatcttcgaaggtcctgtcatcaaattccattcgatcttctgggaaaaatggttgattagagaaattagcctgacttgtaagattgttggcatatataaccccatttctcagcttattaaactaatggaagaagctaattttggtcgctgagttagaatttttctcacactacttggttacatttttaatcgtccgacttttctataccttgactaatcccaaagcacaagacgatcatgtttattttactcagagcctattaaacagagcattttctgattatccacctattagttctcttatctcctcgattttaaattctttacccaaatgagaaaatcagatttgttcgagaaccttgagaaaaaaaaaatagtcgttatgcttgagtttctcaacttcagagtcgtcaagtcaaaacattgaagagtcttcgtctagactcggggaatttgaagaagtttcctcaatgtgtacttgattctataaaatataaagaatttacttcaattttttccacgagagattcttttaatgttccagaagattatattgagtgtgacaattcttataaaataaagttaaagaagaagcaaatcaatagaagtcatatttgttcacgaacacaaggtttgaccatacataacgcgtctcttgaaatatgaatgtgtatataaacaaaacagaggaaccgagagaacatcacaaataaacttcaaagtacaaattccatttcgattttaaaacttttgagaagacgatatacaataatgaacggaacatcgtgggctgaccagtgggacaatagcggcgactctgccaaaggaggccgaatcggcagcggcgccgtcgtgagaagcagcggaagtggagcaacgtcaaacacgaccaagtacaaggagaaaatgggacaagggttagacaaaaccaaagctgtagcttcttctggttttaagaagctcaagactggttctgctattggttttcgttgggtcaaggacaagtatcacaaaaccacacacaaacaataaagatttctgtaaactcctttgtatatgagtattagtaatttattcacttgccaaatactgtattatgtctgatctatattttttttagcttgtttgatttgaatgctttgtttactgtggtaaattgttcgagtttgggtgggttcatggattactttaattgtttttctctttaatttttaaattattacatctataataacaacgaattatcgtttagacaaaatcatattatgcgattaaatcataaatatataaaaataagaaacgatttatttcgaagtatataacgtgtaattttataaattttacttttaagatcggagggtaattttccctcgcttctgcagaaacaatttttatccgccggatctgaagtggttcttcttcagagtaaatcaatcggagaacccaaaaccctagaaagcaaccagaatcacatttcactctaaaattatcggcggaagcagaaaccctagtcattggttatatccgtcgccggcgttagagggccgtgatgtcgatagagatgccaagaggtttaccatttgccgtcgacacttttggaccatacacggagacgaagagaagaaagagacatcatttcttaactcatgctcataaagatcacaccgttggggtttctccttctaacattgtcgtcttccccatttactctacttccctcaccatctctcttcttcttcaacgtttccctcaggtttttgtttcctctatctcttatctcttcgtgtttccttctctgtttcctcaataattgtcataattgtgcagcttgatgagtcttacttcgtgagagttgaaattggtcaatcagtgattgttgatgatcctgatggcgagtttaaagttactgcttttgatgctaatcattgtcctggtaacttcctttgtaccttttgcttttgttaaagtcttagctttttccaaattgtgacgaatttcataaacttcaggagccgttatgttcttgtttgaaggaagttttggtaacatacttcacactggtgattgtaggcttacactagattgtctacatagtctacctgagaaatatgttggaagaagccatggcataaaaccaaaatgctctcttgattacattttcttagattgtacatttgggaaatcatctcactctcagaggtttcccactaagcattcagctattagacaggtgatttggctttaatcattatgcattggaatcgtttctgtgtaaagtttctccattttcattcttgttcaatgaattcagatcatcaattgcatatggaaccacccagatgcaccagttgtatatcttgcttgtgatatgttgggacaagaggatgttctcttagaagtttctagaacgtttggctccaagatttatgtggacaaagctacaaacttggaatgtttcagatcgttaatggttatagttcccgaaattgtctctgaagatccttcttccaggtttcacatattcagtgggttccctaaactgtatgaaagaacaagtgcaaagcttgctgaggcaagatcgaaacttcagagtgagcctcttatcatccgtccttcagctcagtggtatgtttgtgatgatgaagatgattggaaaagtggaagcattcaaaagcagagaaaagttaggtttagtgaagctgtcaaggatgagtttggcctttggcatgtgtgttactcaatgcattcatcccgtgcagagttggaatcagcgatgcaacttctttctccgaaatgggttgtatcaacagttccttcttgtagagcaatggaactcaactatgtgaagaaaaactgttttatcagtcggttttcgcctgatgatcctttctggaagcttctagacatcgatatggaagcttctccagttgcagcagctgatactcaaactgtagctcttagttgctgtctcatgagtgaagagattattctggattcgggaaaatcgaagttagaacctgtgatagaatcgtctagcacgaagaagaagcttctgagtttatcccctgaaaatagtcttcctgtaactctgtttgggagagcaaggcaaagttctcaggaatgtgatcaactacatgagagaaaagtcatacacactcaatgtgtatacaccaaaacctcgccggtattggaaaaactgaatgtaaaggtagtaattgagcctttacaagatgatactaaagaagaaacagtagagaaggaatcttgtacaatcttttctacttctacctcaaaggagacttgcaaggatcttagtggggatttgagaaagctatacagatcaatgaacgcacctgtgcctcggccgctaccatcattgatggagcttatgaacgctaggaaacgctctcggaatcacttgagtttctagcttgcggttgacatcttagcctgatcacatcattacagtctcaatcccttataaatttttatacagtggagagaatacagtttgtaatgttttttatacacagaaattgatacatttttttgaataaaagaaattgttgataaaatctatttcattttttgataaaaggttgataaaatcttgcacctctataaataccacgttgattcttccaataacactgccgcagcataaaataaagaaccctacctttttttttgtttttgctagaaccgtaaattg

SEQ ID NO: 70551 - DNA, 2921 bp, Arabidopsis thaliana landsberg
gcatccaaggtggttctggtagtcgagatttctcatcaacgaagaggaaaccgttagcttcctccaatttgagtagttccagccaaagtgacagtgatagtaggtctcagagtgatgatgaaggctcgaatggaggaatgctagacagtgatgatgacaggtcagatgtgcctacgtttgaggatgttaaggaagataccattagacggtctaagcttgccaaatggctaatggagcctttctttgaagagcttatagttgggtgctttgtgagggttgggatcggaaggtcaaagagtggtccaatttacagactctgctgggtgaagaatgttgatgcaaccgatcctgacaagacctacaagctagagaataaaactacacacaagtaccttaacgtcgtctggggaaatgaaacctcggcggctcgatggcaaatggctatgatctcagatggtcatccgctggaggaagagtataggcaatggatcagagaggttgagcgaacaaatggtcgcatgcccacaaagcaagatatatcggagaagaaagaagcgatacaaagaacaaacagttttgtttactctgcggaaactgttaaacagatgctgcaggagaaaaaatctgcgtcagtcaggccaatgaatgttgcggccgagaaagatcggcttagaaaagaattggaaattgcgcagagcaaaaacgatgaagcaggtgtagagaggatcaagtcgaaaatcaaacagctcgacgcttcacggaacaagaaaggggtagataaaaaagcgcttaaacttgctgagatgaacaagaagaacagagccgagaatttcaagaacgcatctgaggtaaaatcaataactgctagtctcaaagccggtgaagcagggtatgatccgttttcaagaagatggacccgatcatcaaactactacaacgggaaaaacaaggggaaagatggagaagagaacgaggcagcggttgcagcagcggttgagaccaatggagcagatgcaggagcaggtgttgaagcgacagaagcagctttagaagcagctgcagaggcaggaaagctaatagacacaagagctccaataggtcaaggagcagaacacaatcagcttcataactttgaattgtcgttatcgctaacggctttacagaagtacggaggacctcaaggagtacagaaagcgttcatggcgaggaagcaactgaccgaagcaactgtgggatgcagagtcgcagagaacgatggcaagagacatggccttacgttaactgttagtgattacaagagaaggagaggtcttctctgatttatttgcatttttttcaagtctcagtgtttcattatcttctgaaaactgcttcttggttcttcttttcttcatatctttcttttgtactccacaaaatatgtttagatgagtttgttttttcttgaaatatttttgtactcgtttttgtgtgaactctcctgattagtgtatgactgcatgaaattagaaaatcaagtcttttgcagttttgctactcttaattagatgaatttagttatgagctaattaacagttcaatattagtttggttttgtagaagttagtgattatgcaatcatcatgctcgtgtatggatcgtggacgataaaaacaaattactcgtaacacaattgaaagagaagtgttgacttatcaataaaatccaatatctgtcattataatgcaaatatattttataagaataaaatcttttttatattaataatttattatacaaaaaaatataccattgagttttaaaatacatttcaaccaccaaccttattattgcatatggtgagtcaataattagtgtttcaattgctcaagaaaccgattaaagtcatggttatgcttggaaactatctcttgcatgtgtttccaagtaatgaatcatataaggtgaataatatttttctaattggtctggtctgattgtttcttgtgagtttcttccatggataaccatgattggtcctaattgacatttttagctacttaccttattaaactaactaaaaacctaaaataatacttttattaattctagtaatttgatacatcaaaactagaactctaccacactctttatatgatagttaagtaaaaaactattcgcacttattataatactattttgtattggtgatctcactaatactaatacacacaacctctagccttacaaaaactaaaaataaaaatctcttacagaagaacaagtctgtcttttgcaaacattgtttgaagaaaagaaatcaaatgatggaacagagcagaagaacagaacaagttctgttagtgcagagattaaaaagattgatagtctcctttgttttttgtcttcccatgtctcttcttggtctccttctcatgcttctcttaatctataacagcttctctgttttctctcttcatcttgttcccatcccacctattcaatccactctttcaccaactcatcttcagattcttcatcaccagacatcaacatcatcatctgtgtcagattcttcattgttacttgtggtgaaagaaacctctctaggtttcatacagaagcagaacgtttcgtcgacgaggacagagagaaagacgaggagattcaagagaagaaccgagttaactcctgcgataacacagcggttacaagtcaaaccaagacagagattcaagacgagggtcaagtctttcttgtccgaatcttcttgtgagtcactcttcttcatgacttggatctcctccatcgaatcttttggtgatcgagagagattcaccatagagagtctcttcaaatttcatccaaatagctgtttgatcttggtctcaaactcatttgactgtgacagaggaaccctaatcttgaaaccctttacagat

SEQ ID NO: 70552 - DNA, 2433 bp, Arabidopsis thaliana landsberg
taaactataatcatgatcatcttcttgatgtcaattggaacttctttattgtctaaactaatttgttaagcaactaaatattcataaatatttgcaaaaagctaatcttacggaatcaaatagttcctacaactcgcaattggtttagctttggaccggaaaaatcctacacttgatgactgagctcataagtcataaccaaacccgaatttcaccgtgctttcttccttgacttaaacggaaaacccataggcggcgagggtgagaactcaaacggcaaatgcggtggctcagacacacccgaaagcatctcaacaatctccttcatcgttggtctcttaaccggagatctttgcagacaaagcaatgcaatagtaatacaaagaaccgcttgctctttctccaaagagtgtatagatttatcaactaactccaacaatttaccattgcaagctaattgcttagcccatgaaatcaagttagccctctcaaactccgacatcggcgaagcagtcacctgcaatggccgtcttcctgagacaagaaccaaaagcagaaccccaaaactataaacatcgcatttctcagacaacacacctcctcctccacattctggtgcaatgtaacacaccgtacctctcatactcggtgtgctgctgactccaccactcttctgaacattcacatcacaccacaaaccagaatcttgactgttttttttacccatgactgacttcagctccccacttaacccatctacccaccaatctatactattcctcttcttcctcttggtaggattaagattgtggtcatgaacagaggaagcaccatcgtctctatgaaaccaagagtcaatgcttgagattgagcttaaccctcttttcttcttcttcttctttttcctcttctttctagtcagctcttcacaaaactcttccttccaccactctctaggctttctcttcttctctttcttcttcttcttagagactgatgatgacccatcaccattgttgatccattccttattgttgctaggtctctctttcttaatctcactcccaatccattccatcacgtaatccttcacactccctgattcaatccctcctctgcttccaccattgttgtcctgtttccaccaccaatctctcttcgatcccactttaagcttgctactttccggtgacaatccagtatccgtcaaaacgctaatcgcacaagtctccggtgacggtatcgatgccatcgccggagatgctgctcccacctccaccgtcaaaatgctcactgcacaattctctggcgaaagtccagatttttcacccggagaggccaccgtctctgtcaagacactaatcccacaagtctccggcgagagattgacaacattattaccttcttcaaacacagtaatcacgctttcagtctcctcaagaatcgacccattatcttcaacaacatccttgctcttatcttcttcctcaatcagaatcctagtatctaaatcctccgactttactctcgcgagaccgaaatctccgattttggctttgaaatcagaatcgagaaggatgttactaggtttaatatctccatggattataattggatcacaacaatggtgaagaaactcgatgccttttgctatatccgtggcaatctcaaaccttttgttccaatccataagctccacacatttgcgatccaaaagcgcgtcttgtaaactacgattagccataagttcgtagacgaggataagcttccgaccacgacgatcggaggagaatccaaggagagagacgacatgaggagagccaattaagtgagaagagagagaaagctcgttgtgaaactcacgttcgccttgtaaagaaccagcggaggtatccatgactttgacggcgagtgaatcgccgccactcgggaaatcagctttgtaaacagagccgaatccgccgtgaccgaggtgagtcgactcggagaaagagtttgtagcgcggcggagctgagagtaagagaagcgtcgacattggtagtgttgaggagacttggagttggagataagatctgaaggagccgtacggtttcggtagagtcttcggtaaataagtaaagtgacgaggatgagtaaaactccggttaaagtcagagaaccggctatgataagtggaagagtctggaaacgatgatggccgtcactaaccgtaggcgtcggttgcagcggcggaatatctggcggagagaggcgagatggcattttagtaaatataggaagttacagaagtgtcatttaatccggagtttccattgaagaagaagatggtgagatgttaaaagattttcttcagctacttggaacactcgcgtagtaaaaataaagagatatacttgtgtgacaggcgagcgataatggtaatggtgacgcta

SEQ ID NO: 70553 - DNA, 520 bp, Arabidopsis thaliana landsberg
  unsure (1)..(520): unsure at all n locations
gtctcaaaacattgtataaattgaacttcgaagttctgcaaaacactaaacgacgtcacaacgtaaaatacataattaaaatagaaaaatgttattgtcaataatacacatacacagagaaatgattttagaaaatacacaagtttcagcttagaaaaatcgacgtgaaaaatgattaaaagacagtttgcaatcagagtaattgataaacaaatattttaaaacaacaatcaaagatatgaaccaatcaggatctaagacatgatatgttctagcaacggaccttctgtgtcaagctcatctatgtggccttcaaaaccagcatatacgagaacagctaacactatcaacaattgaagtcgaactttaaagtgaagattcaggaaaaacatccggacaatatcaaactttttcctctaaaaaatattagtttggattgcgcgacatgaaaancttttgattataaaatatgaaagtataacgatgacgttttggttttgacataatacgatgacatcta

SEQ ID NO: 70554 - DNA, 566 bp, Arabidopsis thaliana landsberg
  unsure (1)..(566): unsure at all n locations
cctttgactttttggttacaaagggtgtttggctgcttgaacacggtttttccataatggancccgancggaattagcgaatattgggnatgagtgaatactaaaactagaagggtttggtatttcttcttatttatggtgtgactttttgatttagaggtagctagttggtaatgtagttatgtagcattgaaacttatttgatatcttgtaacttgtaagttttatgttcagatatatttagttctcttttgtaacaaatcttatgatctgataattattaattacagggaccagtttacatcaccgagatagcaccaagaaacttgcgaggagctgcttcttccttcgcgcaggtaaaactcaagagaaccaaaagcttggaaactattataagcattttccttcactacaagttttgaatgttttacagttattcgccggtgttggtatatcggtcttttatgcacttggaaccatcgttgcctggcgcaatttaaccattttgggtatgttaaaaaaaaccgattcttatcgatttgcaaaaatcgaaaacttctcatttc

SEQ ID NO: 70555 - DNA, 143 bp, Arabidopsis thaliana landsberg
  unsure (1)..(143): unsure at all n locations
gaagaaaacgagagcaagcgacagaaagngagagagagagacgcacgaggagacgcccccccaaagacccggaaanggaaccgagcgngacccacgggcaaaccaaacacggaaaggaagcaacgggagccacaaggggaaag

SEQ ID NO: 70556 - DNA, 500 bp, Arabidopsis thaliana landsberg
gcattaaatgtataaatattgatatctagaaatacttacaattaatttaaattttaacttaatggataataaaacgtaaacagttacgtaaaatgatgaaaataaacacaattgacaggagaaaaaacaaacacaaaaaacagtaatcatttatattcttgacatgtgtatgctattcttgtatatatttgaaagttcttgttatggaaagcttagtttttgtcaatttttttataaatcattaattatcttaaaaattagacgatccaaagtaactcaaagattaaaagtaacttaagtttagaagtaatttttttatagataagaacgacttagaagaactcaaagttcgtatcatttgatttaatgcggagatgtcaaaacaaaatcttgcatgtgcgctataatatcttgaattgaaaataatggcatatagataccatgaaatgacacaacattttacataaggagtaaacttaatttacctcagcaaattaaat

SEQ ID NO: 70557 - DNA, 496 bp, Arabidopsis thaliana landsberg
  unsure (1)..(496): unsure at all n locations
cnnnnnnnnnnnnnnnnnnnnnnnnnnnnnnnnnnnnnnnnnnnnnnnnnnnnnnnnnnnnnnnnnnnnnnnnnnnnnnnnnnnnnnnnnnnnnnnnnnnnnnnnnnnnnnnnnnnnnnnnnnnnnnnnnnnnnnnnnnnnnnnnnnnnnnnnnnnnnnnnnnnnnnnnnnnnnnnnnnnnnnnnnnnnnnnnnnnnnnnnnnnnnnnnnnnnnnnnnnnnnnnnnnnnnnnnnnnnnnnnnnnnnnnnnnnnnnnnnnnnnnnnnnnnnnnnnnnnnnnnnnnnnnnnnnnnnnnnnnnnnnnnnnnnnnnnnnnnnnnnnnnnnnnnnnnnnnnnnnnnnnnnnnnnnnnnnnnnnnnnnncactctggaggcgcaataggagtgagaagggggtaagcttttcattattctggcgctgagctattttgccgcaggacctggcctaccgtatcggcaccgcagctgaggatagccaccacgttccggatggact

SEQ ID NO: 70558 - DNA, 238 bp, Arabidopsis thaliana landsberg
aacatgacgacccaaagcgccagacagacaggccgagacgaaaaaaacgccatgcacgaggcagcaaataaagaaaccaaggacaggaaagaaaacggacacagaccaatgaaggacaagacgaaacaaaagcgacaaatgaaaggctacaacacatatagggaaaaaacaagaaccgaacgaaacaaagacccgaatagccccagagagcaaagcataggagaccccagaaagaaca

SEQ ID NO: 70559 - DNA, 312 bp, Arabidopsis thaliana landsberg
cctggcagtggacactctccgatccttatggcccagagggacgcgagccagagggaggctttttgtgatgctaccctaggcgcgcctgatcaagggagtaacgaccgggaatagacgctgggtactgcagtaacacgcgcacgaaagcatcgatggtcaatccttcacgtagcgcaagtgaccccagggcttggggacctcgaaacatatcatctagagatgaaggcgccataaaccacgtggaaaccacacaatccaataggcgaggcgtctgatgacccaagagctcatcgccgcggcaacaacatgagc

SEQ ID NO: 70560 - DNA, 507 bp, Arabidopsis thaliana landsberg
ccgaggatgagtttgttttcaaaagtttaaaagctcaagctcttatactagatattgtttttgttccaagttttaacgttcacaaaattgaagaggacacctaataaaatcaaatttgagaaagagagcattgcctggtgaaataattcaaaagacggttctatattatataatagtcgaggacaactttcataatctaaacgattattgtattatctaagagtggccgaacctgatatccacttggtcttgttgacaaacttgagtacgacaatggggtttgtgctagcccttatttgtgtaatgttttatcatatgatatatgtacttggtaaactcgatttaataggagcaatagtgccataaattctacattctagactatgaaaaaaccattgctagccaaatcatgagtagagcccatggagtacatatatttttatttgtttgctacttttattttacaccagacatgctggagcaagatattataggaacatcccagtg

SEQ ID NO: 70561 - DNA, 504 bp, Arabidopsis thaliana landsberg
atgttcttttttatctcttttaatatttatgacagtatttttattttaatcttattttgttacaaatagtttttaataccttaggacctgttggaacttggaaaaaaacaatattttttaatatctcaggatctttgcccatacatgttttgggcacccatgcgtttatatgaaaaacagcatgcagatgtaacatataaacaactgtagatttggtcagatgttaaaatttaaattatgtcttttgaaatgtgacctataattgtccagatagatatgcataactatttagtaattgtaagtctatttcctgtaatgtattcagctaaatgcatgtagataatctgatatcacatacatttatagccatatagagaatgcatagtaacatcaacaacatataaattttgggctattttctaatgagggattttgagtataaatggatctcctaaaactagtttaccggatgggtaaggtagtacttccctttgagttatcttt

SEQ ID NO: 70562 - DNA, 592 bp, Arabidopsis thaliana landsberg
  unsure (1)..(592): unsure at all n locations
cacgcttcagccgtttgaaactggcaagcgtccacaaaggcacaacgtgaatgtggctttcctctttcttcactgtaaaccactgtatatcatcctttgagaatcccaaacactcgaggagttttagtttcacaggattgatgtatatcttttcccgtagcacacgtgcaacttccaagaacagcctctcctttcctttcaaaagagaagagatggaagaatttagatctcaacatgatatatcgaaacggaaaaagaagagtgaacatattaccgatggtgtagcttccaattaagaaaagggtcttgggattaaatgcttctgcttgaatagcctcaacaacaaactgtattaccgcctcttgctttggaaagtcatactgcaaacaaatgatgcatttgtatcaaaccactcttgctttgaaaagaaaacgtaaactctaaagttctcttcttcgttcaacttaaatgtaagatgaagaaatcngcaaagagtggaaatcatgcaggaaaacttgtggcaaaaatggatttcaaatacgaattaaaaccgaatagagttattaactgaaaaacttgatctttctttatg

SEQ ID NO: 70563 - DNA, 587 bp, Arabidopsis thaliana landsberg
ggagactcaccgttttcgtgggctaccaattgaaacgatttgattttgtcagttagtttgttaaagcgttttaaattagcgattgtaaaaagggaatgagcattatttttggacagactaatttaaacagtctaaaaaattagacgattcattgaaccgcttagaaaaagtggttggaattcattattatttttaaattttaatgtgtctatactttcatgaattttgttttttatatctataaaacaatttatgatatgtcactagcttactatacatatttttttagtcattaacatcatttctcattgctttaggctatattgtattctctacaatataaattgaaataagggaaaaaaaaacttacaatgactaaattttagtcaccaatggaactaattattttgtaagaaggttgaaaactactttttttttttttagaagagttggcgaacagtgatggttaaatgaattatgggagccatgtttggccttcgtctgctgacagccaagcccctgcgaaaccccacccctggcctgtgcaaaaggttaaccccgctttctgagaacgtgcttttcacgct

SEQ ID NO: 70564 - DNA, 404 bp, Arabidopsis thaliana landsberg
agatgttggggatgtaatcgtacggtttttagattttgaaatcggaatctgctgcgatgctttagctagtggattcaatcgcatcgagtagaaaacttaattcttaatctgtttatgcgttcatgagcatcgttttaaattactgcagttttgatgaacactgaaatggaagaagacgcagggaatggaggatttcggaaacgcatgagagcatctgtaagttttttttgaatttgtcgttgatctggtgatgatgattttgtggtggatcagatttttgattttgtcctgtgaaatttgttaggatgaagagggaaaaggagattcgagagatggaattagccttgatcataccattgagaatgaagaagctgagacgaaacttgttgcttctgatgagatgg

SEQ ID NO: 70565 - DNA, 449 bp, Arabidopsis thaliana landsberg
  unsure (1)..(449): unsure at all n locations
ctcggcttgcgcggctggcaacgcctcgatcgtgcggtatcggttggcccgcaggtagccgatgcagtctccgatccactccacatgctgctctagcgcggtgatgaaattcgttgccgcgctggggctgccgggtccctggacggtgaacagattcgggaatccggcgacttgcaggccaaggtaggacaccggcccctcggtcgcccagacatcgcggagcaaaaccccgtcgcggccatgaacatcgatgcggctcagcgcaccggtcatggcgtcgaagccggtggcgtagatgatcacgtcgaggtcgtagtggccctgctcggtctggataccggtcggggttaccgcccggatcggccccttgcgcagatcgaccagtgtcacgttgtcgcggttgaacnnnnnnnnnnnnnnnnnnnnnntgatcgggcgcttacaggcga

SEQ ID NO: 70566 - DNA, 477 bp, Arabidopsis thaliana landsberg
gtgatgtgatggccgctcaatcccacttcaagttcgttgtgaaaaaggagcccaaaaacacagttgctttggttgctctggcaacaacttacgcacaacagggtgataacgaaaaggctttttactatacgaatgaggccctgagagtcaacaaaaaataccgggacgcctattttctgaaaggaagcatttacctgagtttgggtaaccgggaacttgccaagtcatcttatcagacagcaatcgaccaggatccggacttttttgcagcttacatcaaatttggggctcatctacgaggaagaacgaaattcattgtgtatccagtatttcattacggctaccctaatcaggccaaataacattgaagcctactacaatttggcatatgcgtaccaggattttgattaattaccggaagcacagtatacttaccgcgaaatgctgaagatagacccgaatttacacctcctttat

SEQ ID NO: 70567 - DNA, 543 bp, Arabidopsis thaliana landsberg
  unsure (1)..(543): unsure at all n locations
ccccagagtgaagtatgaaatttgatccngctaactgaattcgttaaataataaaacacagatagagttatatcacctgtaaaaaattgacagactacctaaaatgaattaaaatttcccaaaatgtgaagaagaagaagaaagctaaacatagtttacgggtcacatatctataaaagactctacgaccaaaatgatcaaacgattaagcaaaaatattaccaaaagtacacttttatatcgataggagcataatggttcaaataataatgggcctatagaaaaaatcgaggcccattaactttctcttggagtatgtaaaaaataaaatgagtgttgtgtgaacttgtgagataaggtaatttgcaacttcattgaacgttaaaaataagcagaagacatgaaaattaatataagctaactagttgaatggtttggtagagctttcgtaaaaaaaagaacgaggctcaaatgatttcagtattacaaaccaaaatgaggtatgaagtaatatacaagttgtatcatacataaagaacaact

SEQ ID NO: 70568 - DNA, 559 bp, Arabidopsis thaliana landsberg
  unsure (1)..(559): unsure at all n locations
ggggattccagnggcatccttactcaatgggattttgtttattttttttagtcagacggcttggggtcaggccggtaagagtcccgtcgcaccggcgagtgagttcgaacgccaatccgcaaatcaaggcgcagccgcaaaacaatcccaatgcaaaacccggtgtcgtgctgacgacggggacgaagggtccgctaacaccaaaagacattttgggcatcaccgattcgatggctgaagtgaacgtggggctcaacctcatgctggcaccgaaaatgctgaacgcggttccggtcatgaagggcatggcgcagaaacatcgcacctattgtagaatggatattgccgagtgtcgcaaggttccctggttgaaggccgcctgtcgggttagccccacttccggctacgatgatagtctgaatgaaatctacaaatcacttttcgacgccactattatttccgccgaaggggctaaagaaatggcgacggacatcatgaaatgttctcctcgccacagttacggccagacgttggctctttttaaaatgcttgacgtcat

SEQ ID NO: 70569 - DNA, 580 bp, Arabidopsis thaliana landsberg
  unsure (1)..(580): unsure at all n locations
tgtccatatacctgagaacattcctgcaggcactgacctgttcttcttcattttattgactgaaatgttaagtgtgttgtaaacgtgtaaatacactcactgtagtctgtggctaatagaagaaaagaaaagaaactgatgcatactaagccataaaggcactagggttgtttgattaacaagagtcaactctacattgctatatcacaaagcaattttcatatctccaaaatggagataccctcaccgcatgtatctagcatttgatacgaaacttgcatgccaggtacaagcccttattgagtctaccataaaagcttctgaatgccaaaacataccnnnnnnnnnnnnnnnnnncctttaccagcgaaatttaatttcttaaatgaagagaaaacaagaacaaaagcagaaagaataatttatttaatccaccatgtttccaactgtattagctttcaataacaatcacaacagtaaccatttgaacaacctatagtatattattttaaatacgtgactatttttatgatgttagaagaacaatggtaaactgaactcacaattcaccttttttttt

SEQ ID NO: 70570 - DNA, 514 bp, Arabidopsis thaliana landsberg
tgcatgcggcgactattgggaacaaaatgatggtagttgttggagagtctgcgagcggcttcgttggatgatgtacaggtaaaacgactatggactaatcaaatcctaatagtatttggttaaagagattgatattctcagttttgcatctacaggtgcttaactttgattcatgtacatggtccaccgcatcttcaaaagtttacttatcgccgagtagtcttcctctcatgatccctgcttggaaaggccattgcttggtaattgattgctagtttgagcaaagatgtttctgttttgttgttttacacctttttgttatgattgtttatatccgttgataggtctcttggggtaaaaaagtgctgttggtgggtggaaaaacagatcctagcagtgatagagtttcaggttaaacattgttgttttgattcaaaagttttcacattgatgcttgaattctaaagtttatatatttttggcagtgtgggcatatgatactgattcggaatgc

SEQ ID NO: 70571 - DNA, 535 bp, Arabidopsis thaliana landsberg
gtactagctccattttctccccattttcattttcattttcgttcttcacctattcaaatatggtttaaatcttttctcacttttttcgcatgcacgtctaaatttatcatagtgtagtacatcagattttagggtggtcactaattttagaagtattattagaccaaaataattatacttataagtattatccagggaaggaaaaaacattaattataaacttatatagatcatatattgaagcagttagaaaatatttctagactaaatttatgtgtcatcggattttaagctatagacctaaacttgggtccctgaacagacactttgtgctaattttggagcagtgtatcaaacctcaaaacttgcaattttttatttagcaaagcaaattctccatgaaagaaccaactatttttttttttcctctctgtggtatttgttttctaaattggagagttccattagttccagagagatcatgacaaatacttaccaaagaccagacaaaaacatcacaataaactaacacgac

SEQ ID NO: 70572 - DNA, 508 bp, Arabidopsis thaliana landsberg
  unsure (1)..(508): unsure at all n locations
cccttgtgatctcgaccgaggcgtatgccgcaccccagcccgcgcttgccgccagcaccagtgcctgcagaatttttctgaacatgttcacccttcctgaaccatcccaccccgcttgctgggagggggaaatcccaccccgctcggactcgcggcagcgggtcgaatcagggcgcggtcaggatatagtcttgagcaaccatgcgcaataacgcgcaacaccggttgcgacgtccatgagatcggagaggtaaccaccatcggacctcaatcgggtgaggtcggcttgagtgaaactctgatatttgcccttcagcgcatcggggaaggtgatgtattcgatcagaccctgagcgaccagcatgtcgaggccgagcgccggcaatccttnnnnnnnnnnnnnnnnnnnnnnnnnnnnnnnnnnnnnnnnnnnnnnnnnnnnnnnnnnnnnnnnnnnnnnnnnnnnnnnnnnnnnnnnnnnnnnnnnnngaaacgacagattcacttt

SEQ ID NO: 70573 - DNA, 4138 bp, Arabidopsis thaliana landsberg
cttcttcagttttcttcgttgaatacttcacgccgaactagtctttgcctgaatcaataccatattgaacgttcgtgaaatcgatattcggtttaggcccatacacatgtcaagtagatagactcaataatgaactataactaaaaaacgggtctgatcagttgagaggaggattacagagctgagtactattaaaattggtttcatgttaactcaccgaaggtagtaatagcagacagcttctgcttcatccaaagaataacgtgggaattgctgacgagcatcaactggaacatctggcaagtctttgcgtagttttcctactgctgttgaatgtgagaatgcacccaccatcatatcttcatgcatcatgcttctgaaagcattcacctgccaaaagaattgagttaattgcgatttttgttttctggatcataaatcaatttggaagaaaaattcaccgttgtaagttctctggcatgtataggtcggcaagaacgcggtgttacgggctcttcaaactcgctgaatgtaaaccaactgttatactgaaagacaagtaaacaacaagaaacaagcagcattagctctagtgaaaaagagagagatttaaaataatagaaggcgaaatatggtatcataaaggggaaaactggggactaacttgatcgattacaatcaacactggtacatcttttacaactgagagttcttttctaagtcgcacaacgacattaacagctgcatgagtgctcttaattcccatttgcacaaggtcatacagagttgaatcctcgggaataggcatagcatctgctcctttcaagtatccaacacccgcaccctctccaagcacgataggatcatggattttgcaccgtaactctcttaagcgggattcattgaacttgacaaaatcctacagaagttaagtttattaagaaatgctgttaaataggaagaattccattccaaaagaggaggcatgtggaatcttgccttgagaatattctcagcttgtagaggagtgtcccaaaaccctgtatgtggattcttatagaagtagccaccgtgagtccagtcacgtccttttggtgcatataaaactaaccagccttcgtcacgtgcccagtgaacaagcatcgccagagcaatactctttccacacttaacagggccatccaagacaatctgcttctgaagtttgacaccttttcagaaagaaagaggaagcaatgattataaatacctatggtattacagatccccggataagggcatatgacaagcaagacttagcaaacaaattaggctgctttcgtttcaaaggaaaataaaaacacacaaaactgttaaccatagaagagatcactaatcgtgatacttagaaatcaacataacggaaacaaagaacacacctttactgtcacttggccacatgggaggatcagcaaggcgtctaaaattatccctcagagccaagtaactttttctgacaagcaatgcaggtctccatgattcattaaactcatcttcaattcctgaagctaatccttccggcagaactgctttcagtgctgcctcactatcattcccacattatatatattacatcaacacacacaaaatgattcatacaaaattctaaaaatagataaacagaaacataagggaaagagagaattgagattactcgaatttgaagtaggagccaatatccttgtgagtcagctgcgatagtgtagtatctttgggagtaaagagaggccttccattaggaccaacatctagagacggaatcttctcatcatcagctagtctcttggcacgacccgcttcaaggtcgtctccaccggcggctccaaactctccttcctcagctccggcggcaccaggatcgccgcctttaggtttggattttttgccttcagatttcttcgttttggtgattgaagatttcgtgctcttcgaagatgaaaagcatcgatgaacgtgatctaaactcgggaaaagtgttcccacggcggctgaagtcggaggtgagaaatgacaaacggtattatttagaatcgaagacctccgattcaatttgacattcccggcggcgattcttaaaccgtacttccacatttctctggttcgtatctcttgagtctgactcaaggttttagggagggatttggacgcaaatctgacgaaccaacgagagggatgaagcagcgagaaagtggcaaacttgtaattttcgatatgatgatcactttagcgttaggcccattaaacagtgggctgaagcgtttgagatgaaagtttgggccataaaggccattacttaaaaaggatgacgtcatgttccatttaacctagttatttgttttagcgccacctaatgttttaactagtcggtaaaacactgaccaatagcatgtcacatccgataaaatcggggccaataggaatgtgaagaatttgtcgaattgtgtacttttttaaattttaaaagaagacaatatttggtggaatttaaaaagaaaatgtaaaagtaggcaaggaaagggaaagcaagagaaatggcgatctaacgttgaagataataagaaggacgaaacgggcattttttttttgtgtgtgtgtgtcacatcttttttattatcctctcatggcggataacacgagacctgtccaaaggctcttcttcttcttcgtcatcactactactactcctctctaacgttttcctcattcttcttaattccgatttttgagtgatggctatggcctctgcttctggttctgctctttgcttcactgatgcatctagctctcttgctttaagacgcgattgtggagctctttgcttgcctcctaggacagttacgtttggatttgtcgataaacctcttgtcaatctcgagcgattaaggtttttgttttttggctatctcttgatgccttcttgagaatttgaattcgagcttcttttggattgctttttcgattgtgatcttagttttgtgctgattcgagtttcatgaagtaaatactgtttccgaaacaaattcttttgtagtgaattttctccacagatctctaaatccttaaaaagcatctgatacctttttttaacgattatcagaattttgtgttccgagttgctaatctttttaaaatgtccaaatgattttattgctggttataaattcgtatcttttgctggaattcgattcaaagcacagattgttttgagctgatcttctacggattcaaatacttcaattcaattcttttttttttttttcttcagattatccactttgaagattagagcatcaaatgctactgctgtggaggtatgaaaatgaaatgattacacaaggacactagtaatttgaatagactttttaaagtttatatgtttttgtttttgattttgaagaatggaaagcaagaaggaagtgctgctgattctgataaagttccaactccagttgttataatcgaccaagattctgaccctgatgcaaccgttcttgaagttacattcggagatcgtcttggagctttacttgacactgtaaggaaggataccttcttcttactcacttgttgctagctctgcataatcgaccaacattcacaaaagcttcttacttcctttcctgcttttttgactgcttcttgatctgatcaactttgcccttatagatgaatgcgctcaaaaacttgggattgaatgtcgtcaaggcaaatgtttaccttgattcttccggcaagcacaacaaatttgccattactagagcgtatgtcttttcatatcatcaaagagtattttgagctccaagagtcgtttagatagttaatgttgctttgaatcgattgactctgtcaaatagttgactttagattgagttttgagctgactgtaattgttgttacaacagagatagtggaagaaaagtagaagaccctgaattgctttaggccattcgtctcacagtcataaacaatctgcttgagtttcatcctgtaactacttcacatcctaatatcctctctttctatttttcctatatcttgcataattttttaactcacacattgcttctcgatgatttggatcaggaatcaagttctcagt

SEQ ID NO: 70574 - DNA, 636 bp, Arabidopsis thaliana landsberg
tcagcaaaccttcgtagacacatattccaaagttgccttctgtaagctttatacaacgaagacccctattatcggcagccgatttactaaatgagcgtgtattgccgttctttgaggcgcaagacgttgctatcttgcgaatgcttaccgatcgtgggacagagttttgtggcaaagcagaacagcatgattatgaactgtacttagcgattaatgacatagatcacactaaaacaaaagctcaccatccgtagaccaatggcatctgcgagcgtttccataaaacaatcctagatgagttttataaaattgcatttcgtaagaagatttattctacgcttgacgaaatgcaaaaagatctggatgattggctggctcattataataatgagcgaacacatcaggataaaatgtgctgcggcagaacgccgatcgatacattcctagatggcaaacaagttggaaggaaagagaagagttgacactttcaacttaaactgacagtaaatgcgatgacataactggtaattgtcacatcaaatttgatttactacagtttatttaataagatttattttaaatcattctgataggcatctactattgattaagaaaagagcgagttttggaattttt

SEQ ID NO: 70575 - DNA, 496 bp, Arabidopsis thaliana landsberg
gcgttttttcttgatcacgaccgtttcttcgccgtcatcgacaaacttgcagtggttggaaagcatttttctgcaattcaggacgagggtgctgtcgccggctttaaagtgccacttgcgccagtgaatatcctgatcgtcttccggatttggctcgtcgatgaactcgcccttgtagttgccgagcgatttcaaatggcgcacctgggaagcgacaaaatcgtaaatctcctgaaggtccgcgaagctctcatcacgccgtagatcgacgaaagccacgacccggccgtcttcgtaagaacaccagtgcatttccgggcggcgttcggtgatgaattgtagagccggaacccagcgcgtcgtaatgcgccgcatcctctgtcgtgcccgctcttgggcttcacaaaactccttgtcggcttcggccagatcgaccgtgcccttcttggagtgataccgaatgaaagacatttgttgctcccgtaaccttgtcagt

SEQ ID NO: 70576 - DNA, 549 bp, Arabidopsis thaliana landsberg
tcctttatcccatcgtgcactagtcaattccagggggttctcaagttctgcagagatgacaggcgtgcttatatttttggaagcattgatgatttcattgattcgggggactccttgtgtgatatctgaaccagaatcaggaaatcaaaacaaccaactactcatatgtataagcactagttttatagcgaaattcagaaaataggcattttcaacaaggatactcatgctcgcaactccagcaaagtgaaaagttttcaaagtcatttgtgtcccaggttctccaatactctgagctcctattgtcccaattgcagtcccagcctcaatttttttttcccggtagcgaaatacacaaatgtttacaaatacctgcatatttatatatatcagaggtaatatttcatatttttgtcctaacaccacaagaaatgggaaaatttctccaaattatagaaatatccacgggagagactaggtgtgataatttttcgttaactggatgtagctgacaatatatataatcaaggaacggcacaaaagaatact

SEQ ID NO: 70577 - DNA, 393 bp, Arabidopsis thaliana landsberg
aggagattcttggtgggaagaccctctaagtactgcaagaaattacagggactttccaatattgggactgtctacttgcacacggaaaagtgaaagcgggacagaaaaataagtctagacaccgctttaataaaggaaaaaaagcaagcaggaggtggcattgaccaacaagaggaagagggcaacagagagaagacagatggaaacggtaagacatggtataatagaagcgtgcaagttggagggcttggataaagaaggctttacgagactaagacttggctcggcgtggactattcgaaagagatgggacaacctgaagcctctgctggggcaaagacaaacgccatggaagcaccatgtctcgatgcagagggtaagaaatgaaagcta

SEQ ID NO: 70578 - DNA, 549 bp, Arabidopsis thaliana landsberg
ccattatagatggcgggcgaggttccgcccgacacgtagccgccgccatatacccagaccatgaccggcagcttcgcgcccggcttggtatcggcgggccgccagacattcagatagaggcaatcctccgacggcttgacgccaagcggcgcgtcgtcgcccggccacggagtttgcaggcagtccggcgcaaaatgatcggcgacgcgcacgcccgtccagcttggcgccgcctgcggcgcgcgccagcgcaaatccccgaccggtggcgcggcgtagggaatgcctttgaagctctcgacatcgtactgggtgacgccctccaccgcgccttgcggcagggcgacggtttgggccaaggtggtttgggccagcgtggcggcgggcagggcggcgggtaaggtcagggccagcagagcggcgacggcgctcagggttttcatagcggcttcctccatttttgcgcgaccctatcacgacggcgccagcgcgcataccgccggatttacgcgcttcttatctggcggcgcgcttagggcttggaaaatt

SEQ ID NO: 70579 - DNA, 582 bp, Arabidopsis thaliana landsberg
  unsure (1)..(582): unsure at all n locations
tgctctcagcttcctgcgccaccaggtgaaacaccttcactccgtcgatcaatnnnnnnnnnnnnnnnnnnnnnnnnnnnnnnntcacgggcgtgtaatccttccccggctcgccggggggatacgcctcttctgtcgacgccgctcggctggtggcggccgccacggaatgccgccgcgtcccctgggctcccggcacatcaggccgctcgctctgggccacagccgagcgcacgccccccaatatcgccccggccgccccggccgcccccgccagcaacgcctgccgtctgctgaactgattctcattcatgttagctcccatagggtccgctgaagcggaccgccgcatttatcttccgtgcctgtgcatatggtggtgcatcatgggttgactgaccggccgcgcggccgaccgcgttgtgggttggctgacgggcggcacaccgggcagtcgcccccccaccgtccgctccagatcgccttgcgcgatccagtaatcccgcaaccgctccacataattccgacgggcctcgatctgcccctgcttcggctccagcagcttgaacactccgatgaaca

SEQ ID NO: 70580 - DNA, 586 bp, Arabidopsis thaliana landsberg
  unsure (1)..(586): unsure at all n locations
ggtttcttttgcttctgcgttctcggcttgtttcagcgcacgggtcattacgatagacgcgatcgggatactcggagagttcatcagttccatattttctgaaggaatgtcctgaacacgcatgttctcgttcagtttcnnnnnnnnnnnnnnnnnnnnnnnnnnnnnnnnnnnnnnnnnnnnnnnnnnnnnnnnnnnnnnnnnnnnnnttttgatctccaggcgaccaccggcttttacaccttcgggctggccaacgaatttcaaaggcaggttggctactacttttttgtcttcaaccagctccaggaaatcgatatgcgtcagggtgtctgttacgacgtcaaattgcagttctttcaggatgcaacgatagttttttccgcctacagagatctctgccagctggaaatcaggtgtgtacaccaggtgacggaatgcaggcgccggtgcgctgaaggatacggtttccgtaccaccatagatcacgcaggggatgttgccttccgcgcgcagggtgcgggttgcttttttaccaaaatcggtccttgactgaccttcgattttaatgcttttcataagcttt

SEQ ID NO: 70581 - DNA, 555 bp, Arabidopsis thaliana landsberg
  unsure (1)..(555): unsure at all n locations
agatcgcgccgtcgagctgnnnnnnnnnnnnnnnnnnnccgagattcgggtcgactgccccgactatcatttagatggacgtcgtccgccaagtgacagcggcgctgaaggcggatccaaacgtgcgcggtgtcgtcgatgtcgacggcgtgcgcgcgaagttcgacggcggctggggcctcgtgcgcgcgtcgaacacgcagccggcgctcgtgatgcggtgcgaagcggcgacggccgagcggctcgccgagatcaaggccgtgatcgacggctacatcgccaccgccaagcgatgatcggcatcgacgtcggcggttcgaacctgcgtgccgccgtgatcggtggtgcctcccatcgcgaacctgtcggtgagccgcgtgatccgcaatcactcgtcgagcgcatcgcgcggctctgcgaaacgctcgcgccgggcggtgacaccgtcggaatcggcatcgccgcgatgctgcgcgatcgggaaggcacggtcgccaattcgccgcacctgcggtggcgcgatgtgccgttcggtccgatgctcgcggcgcg

SEQ ID NO: 70582 - DNA, 429 bp, Arabidopsis thaliana landsberg
taaaacctgacgtgtctatggagtcttgggattgctttgctacgtcataaagcatcaaaaggtgctggaaagaataagcttttccaaaagaaaatttggtctttttttctaattaaaaagtttggtattggcgtatggaagtacaacactactactcatatttccacttgaaaacaacattatgagattgagatttgatattctctggtgtgtgttagtatgcaattgcgattcattattcatagtctcttttgacattgttgtaaaataacttgattggtaacaatattttccctactagttcaggaaaagtataaagaggtgagaaaaatgtcaaatcgacacggaagaagaaagtgggggtaaagctggaaatataaaaattttggaaaagtaccacaattacaaagaggaaaaccctagaaaaaa

SEQ ID NO: 70583 - DNA, 438 bp, Arabidopsis thaliana landsberg
aactcccctgatgctgagcgaccttggacacaaggctgaaaacagtttgctgacgatcctaaccagaatgacgaacccctgtgtacagtgtctcaagaacaccctgcctgattagagagactagactgtccatggggtgaacgctgctgcggccaacacgagcgatgaacaccggctctgcggaccatggccaggtgggtattagtttagccgactggggcggaggagcgttggcagaatcaccacttatattttgtggagacacctggatactggggggcacgctacgatcttctctatcaccatgtgttggagaaagagctgctgactgtggcttggcctgatccggacaaggcatcctttgagcaggctcttgattctgtgattgagccgcagactgaatgtcggtcatggcccgtatttatagacctcactatc

SEQ ID NO: 70584 - DNA, 507 bp, Arabidopsis thaliana landsberg
aggttcgtagccgtcatgacattacattacaggaccgatgaatgtaaccggttcgtcacaatcttctgtattcttcataagcttctcattgcttgctatgtccctcactggattctacgcagcttacttcaaatccgattgtctcttccgtatccacttctttatcttcttcttgtggatgtctgttgacgtgtctaaagccatctttgtcatctttctacataaggagaccactcctagattgtttcctgggaccaagatttatgagtttaggcacgaggattactcaggatgggttagtagattggtcatcaacgacgatgaatggtatcgtacaaggagatgtcttgctaaggacaatgtttgtaacaggctaaaccataagatgccagcttctgagttttatcagatgaatctaactcctatacaggtaatataacctaagctacacattaactaaatcaaaccggatctagttttgattccggcttaatgttattttttttt

SEQ ID NO: 70585 - DNA, 4282 bp, Arabidopsis thaliana landsberg
agattcctgttgagtagaagagatacggtgtcgtttttgtgttctttgatggactaagcaaattaatgttgtaccttttttatgtttatgcgaatggaatcagttattaagttgctaattaacttagttcatttgcgcaaacaaaagaagctagaaaatacattatagactaattgaacaagcaaagaatgaaccagttttgtgtttgtaatgagaatggaataaattgttattcagcatagttaattttcgcaaaagaaagaagccaaaattaattaaaagaagcagcaaatgttgtgtcccttttatgttttctatgcgaatggctcaatggagtaaattgctaattcacgtcatgaacacaaaaatgttgatatattaaacaagaagtccatttttgtacctcatatcaaaattttatttgtaaattttgtattaataattttgtatttgctatactatactatgaaatatttttctttatagacaagttatgttatacattaaattatttatttattaataagtacagtattttagtgtattgtcagagttcagtttctttaaagaaaacacaatatattttttttttgtcgtcaagaaaacacaatatttatgttaaacaaaaatgcatgatatttcaatagtttgtggaaaattatagaaaatatttcattttccttcttttagtttggtattaagaaggaaaaaaccaaaaacatttttttgataatgtatacataaattaaaattaaaataatgagaaaacaaaacaaggtccaaaataccttgtgaagaaaatggcgacggcgtttgccaacacgacttcaagctccaacctttacctccatcgctgccgtaaaaaccatcctcttccatctccgtcgttcttttcaccgttccggtcgtatccacttccttctcagacccttttcctcgtccccactccaaaacctgtacgacgcatcgcggtcgctcctctcggccctccaacgccgcctagtcccgacccacctccgcctaaaaacacgactgagctcacaagttcgtctttcccttcttacccttaaaacttcaatgtttcaactctgagttctgattttgtttactgccaattctatttttcaatctttcctaattcgatgaaattgcattacggaattcgaattaggagaatgaaggtggtttaactgctattgattcgtagataaagatgttaatcttcgtcctcaagatcgattactgttcattgctaaagttttgatctttgtgacaatttatagacttttactcttgttaagcattaaggatttataaatctcctccttttacaacttgtgaatgtcttccaaaagttccaccattttcttttccctacaggtttagtcattggttgcaatacgagagcaatcttcttaacaatttggattcatagttgttgtttggtatcacattttgtttcattgactttaaaaagtcttttcttttatgtcttgtgtaggtcttgtgggagtagcgtcgatgattcaagaccgtgtaaagatctttctttcagtactaatttggatctctctcttcttttgggcttcggctttacaaggaagaggcagcaaaggtaatggtaaagggaagaagggttcacgcttcaaatagtattagttagattggtgtggtgatgatgatgatgattgatgaaaactcctctacacgtttgtgtatatatacagaggaaatattcttccaagtaaagcaaatttcttgtcagactacagttttatactagaaactagattgttctcttcttacgatatctctagcttagagctatagagattactctactgtgatgaaactaaagtagtttgcatttaagtcaaaatgccaaatcaatatcattgtttattgaaagctgtttcagattgtaaatgactagatgtgtttggtgtgtgcttggttcagccaaacggtaaaccgcaccgtttctttgatttgaatgtttgttgtataaaatgggcctttagatatgttatataacttgtttgggcttcaacatactcttttattgggcctctctatataatataatatttccaaagttgtatttaattattatttgatttatatttaaaacagtggttgtttattcatgatatgaaaaaagaaataactggatttaggtaaaccttattcaatactgggacaatgaattaaccagctcatgattagttggacctgttttggttaaaggctggtagtaagtttagaaacagaaatttatgataagagcctaacattttgttctgaccacactgagtaatttaacaatctatctaaattaagattttatgctatgtttaatttatatttgttctgattatagcaaataattttccatatctagagatcttcttcatacacaataaaaaaaactagtatttgaacttttgtatgtattaaaaattgcaagattttgtaagtacagattcaccaaggtgaggtgtgtgattagaaaactttgattagttgtcatgtgtcatcaacaggccatgaaaaggagatctttgaaattcaaaaaacaataccttctgatgaaattattactatataaatactatatgtgactatgtgtggatatgcacaatcattcccactaatagtttaataaagtgtataatttttttcaaattaaaacagctaaacacacacaaccacattcaaaaaggggttaagcattgaagaatattctaagaaaatttgtttctcttcttacagaagtaaaagcgactctctctctcattaagcatcaaaggagtttcgtctttcttgctttgctgttacattcttcaggaaaaaggcgttacctttactctctctgcatcaacgaggaagcgtgtagagctaaaggagctgaatttgagagatttttttgctttgtttctgggtttgttcaaagatgcaaatttttagttgtttctgctgtggaaaaggatttgatcggtatgtatggagttttaatcttgattttcaacttgatttgctggtttatgggttttatctagtttctccattgttttgttcttcagaaatttgttcttgctttgatccgttttgctattcttctttattagggttttgagatttatatcatttctcgagcctattcatgttcaaaatttatttcttggtgtaaagtttggaactttcgaacaataatctactgtttgataagcttaagttgcagatttgataaacccaagaagaaagtattgttaatttggtttgatgtgacaactttacacaggcaaaagaaggtgaaaacggagccatcgtggaggattttttcactcaaggaacttcacgcagcaacaaacagttttaattacgataacaagctcggtgaaggcagatttggcagtgtgtattggggtcagctatgggatggatctcaagtaatgattatcttgaacttacttgatatatagaaatctcttcttttccgggtcagcattgtattgacttagtttgtcgaatcacaatgtgtagatgtggtctctttgatcttcatactgtaatgagcttttgtttttgtctgtagattgcagtcaagagattgaaggcatggagtagcagagaagagatagattttgctgtagaagtcgagattcttgctcgtatccgtcacaagaatctattgagtgtacgaggttactgtgcagaaggacaagaacgactcattgtatatgattacatgccaaatttgagcttggtctctcatcttcatggacaacattcatctgagtcgcttcttgattggactaggcggatgaatattgctgtatcttctgctcaggcgattgcgtaagctttcgggatcaataaaagttcatataaattagcaacatctactgttgactgatttattcgtttccattttttttacagctacttgcatcattttgcaacacctagaatagtccatggagatgtgagagcaagcaatgtgctgctagattctgagtttgaagctcgggttacagatttcggatacgataagctgatgccagatgatggagctaacaaaagcaccaagggtaataacattgggtatctctcaccagaatgtatcgaatctggaaaagaatcagacatgggagatgtgtatagtttcggtgttcttttgctggagcttgtaactggtaagagacctacagagagggtaaacttaacaacaaagaagggtattaccgaatgggttttacctcttgtttacgaaagaaagttt

SEQ ID NO: 70586 - DNA, 2858 bp, Arabidopsis thaliana landsberg
atttgtacacatttcacattttcttagtaaccatataaagagataaaatttgtaacaccttcacaatttgtttactaaccatataagtttataaaatgtaattgcattctataatgcaaaacaaactattcaccaaaatattataaactaaacaaattgtgttgcttcgtttcaactaatatgttttttcttttgccgattaattttgtgtcgttcttttattatatccctatttggtttaaagtttaaacataccaaaaagcagtctacagtaatctctgatgcatcttgacttaatccaaaaacaaaagtatctcattgtaccacgtctcttaataaatttcgtatctcattgtaccacgtcttttttaagatacagttttgcgagtaagtagtgttcttataattaactagaagtagacaagatcttcaaatccaaaaatccgatccgaattccatacctatcggtccccaaaaaaggatgattgatcaaaaatagtaatcttacaccaacacacaacccacagtttaaaaaataaaataaaaaatagacatgatattagttttgtcgacttgcggacaaaggttggaactagaacaattgaagtggcctttgatttatgcccataataaaaagacttgcacggttgtctataacttccaagacaatttatgattcctgcttagtctgtatttaatatttatccactcgttaggtcattttcacaactttccatttccttttcttatctctatgtgctatcttctttaatttttgtccttttgaaaagatgaacatttatctttatttgtttctttcctggtgtcaccattgccgactagggttgggtacaccgtacacgtatcatgtttatatactctctctcattttttttaatgatgttcaaaattttgacatattatttaggaaattattttaataatttgttttaaaatattattttcctgattttttataattctgtcattttaaagtttttcatatatattaaaattaagtaaattttcattacaaaaagaattaggaaggtaagagacaaataaagttgatattgtaagatctgtggtgattgtgactgtatataaatatcagaccattgattaagaaatttttaattagaatctcttttggtgggtctgcgtaagattttctttgactccttgttaaatattacacacgtaaattatagacttcaaatttcgtgatgtgtatcgttgtgtaaaaaaaaatgtagaggttatgattggtaagatactagagtaattacattgtaatagagaggaatgaatgaacagaagaaaaacaacacaaagaaaggtataaatccaccaaaaataaattatcatactctaataatgtctaccagttatatccgtaaatattgaacgacaatttctaattattttataactgcaaacaattaatttttttgttaaatagctaatataattaacaaaaaaattaagatagttggttgccttgcattgatagtaacttgacagtaatcctctaaattaaggtattcgcataataattatctttacgtttaaaatagagcctataaaaaaagtagaaactttgaaaaaatgaaaaaaaaatgcccaattggtcaactcagttaggtttatggtaatatttcgtcggtgagaagatgaggatcaggccattaagagtgtgggtcccaccttatgagctaaaaccgaaaaacgcggcgaagtggataagccagtgggacccataccgtcgtcacagcaccacaagccaccaacgcatgttttttgtctattcacgtaccccgtggcgaccacatgcccaaaatagtatatttttttttttcgttctttaaacaccacaaaaattcgaacctaaactttgagacacctaacaccttcacaaatttctttttatacatataagactaaaaactacaaacaattgagatataatgacaacaattgctcataaaccaatatagggaagatatactaacgaatccataataatgggattcttttaaaacctttaacaaaaataattcatttgagaacaaaataaccatacattaagtagattttttttaattttattgctagaatttctacatccaaaacttatatacagtaacaactctagttatctaaaatttattacaaaaatggaaattacagtcacaatctttgtcaagtcactccttagtttttgttattttacagttggttaattagttgaattttaaagacagaattcatttttttgtggagaatgaaatgtgtgatgtttaaaaataactagaaataatttttaatattagttttatggtatgttggaatagtctaaatataataaatctacacttccaccaccacaatgcaaattacttgtcaaaactattgtttcaagatttgatagacataatctggcagtaaaagaggatctagtacctaatcaataaatcggggtatgttatttaccacatacaaataattgtatgttatgattttgataaaccttttttatatagatgattatatgtgtattacattccaactttttgttatttttttctttcattcatccaaacaaaaaaatcttatgttaaatttaatactgatacctatccatcataaataatatgggtggagattatggtgcttgtcctcgattcaaaaacttgacaatttgttcgtaccaaaatgtcctctcagaaaaaataagtggtaattaatcattttgtcatgtaaatgcaacatttaatatttatgtggtcggacgaggaaaactaaaggcgatagattagagtttgaatacgtataattagtgatataccattgcattt

SEQ ID NO: 70587 - DNA, 560 bp, Arabidopsis thaliana landsberg
ataacacattcacttctctttggagtttttcttttctttttcttttgtctaaacaataatcatgatcactatcatgtcaattaatacagaaataaataatcaacactatcaatatcatgtcgagaacaaccacctcacaaggaagcatcgagcaatcgacgccggagaaccatacacgtggccatgtttaaaagtcccacatgaggaagaatacgttgcattttcaaaacgacaccgtttctactacatagaagtatagaacaaaaaggaacttcttgttcttgacaaaaaaaaaaaaaaggaacttcttgtttagtttcataagacttttcaagtagattaggttgtcccctcttcttagattttctttagatgctaacgtaggacacatgtctccgaccaatttagcttaataatgttttcaagtttatttgtccgacgaaaaaaatgatctgtctgtttatgtatgtacacaatgtcctaatcatcgcaaattgtattatagattacctgtatttagccatatatttgttcgatagttataattaattaacgaacat

SEQ ID NO: 70588 - DNA, 127 bp, Arabidopsis thaliana landsberg
gaaggaagatgaaaaagaagagggaccaaacaaggccaaagcaggaacaaaagagagagagagatagggtggaagaacaagacacgaaagcagagggacggaagaaaccaagaggacgccaagagga

SEQ ID NO: 70589 - DNA, 476 bp, Arabidopsis thaliana landsberg
agaacgtccttagttctgtcccttcaccgccttttaggattgaaagtatctccttcatccccggtcttcgtgattcctcattgatcacacacgctgccgcagctcggatcatacgctccatcgaagccgagttttttctagtacatttcagccttggatctagcaactgctctgtagcttctatccctctatgcaacaacgggtttgcctgcacaaaaatatataaaactaagccattgatgcaagcagaagtgtagccaaaatggttattttttattaaaaaggtcttaaactgcgatttgacaatgttataaatcgataacagtttaaagatcattaaaacttagttgaaccgtcatttttagcttgaccaaaacccgaatttagtatgtgaagtcacaaattcgaattgatgtattgagaagcgtccatttataggaaaaggggcttgtggagtataagtgctacaactacca

SEQ ID NO: 70590 - DNA, 3589 bp, Arabidopsis thaliana landsberg
  unsure (1)..(3589): unsure at all n locations
gtcgtctggcttgccgagcccatagaagaaccttggttagttccaactgcaaagggacataaagagaaaggttttagcaacaatcataaatcataaacacaaatgcaaaggttcgtccttcttacgagagatacggtaaagtctagccctttgagagaagaatagcaaagattaacgaagaagagcttgaagctagcataccttatcattgatgtcacagaatttcaacttctcggtgaaaatggagtccccattgctaactttaaactgatgcgaaccaatctacaggataaaaataaccactcagcatcagtgagagtgagaaatgaaactaaaggattaattgagatagcacagagacgagacctgaacaatggcaaacactggttcatagggtttgaaaagtctctccgaaggtttaagaggacccatcaccttgtaccctatctcctccgcctcttccactttctccgccggtgaatattccctttctacttccatatccgccgaatcctcaaagtcttccccctcctcctcatcatcatcctctccttcactgctttcttcatcttcatcagtatcctttgtgttcgaagagaaacaacgatcttgagagcgataccaatgactgtaccatggcaaattcctagtgagagatcgattcggaattacggtcccatgagaaatgctggtcccggaaaactcaatcccatggaatgaagagatcgatcgcgtctggttgatggagaaaacagtcgtagcgcggcggctcagctcacgaaagcatcgaagactcgccatcggagagcacgaacacactagggtttacacagagtagagagaaagggtttttgttctcgtcttttagtccctttcaagtttcagaagaccctctagacgagccagaggctattcactaaaattagcgactgaatatcacaatagacatataccatcattacacagacgaatgttaacgtatttagttggtaatcttcatggggttttttattattattatataacaagaacaaggaggcgaaaattgagtcgatgaactctataaaactcataaactacatataatcagcattgcttgatttcgaatccaatgctcaacaaagtcctagctgattccatcactttctctccaccaacgtccaatgcttctttactctgcttctcactttctcgccccaccgagcactggcttgaagtcggaatgttcacctgatcgtctgtcctggttctcattgatgttggagcggctgcagctacgagcattgagcttggaggaccatggcgtttcttaggcaccggcatgtcgtggttgtgtactcctttgtatgtgattattactgcttttgtgttctcgactgctgtctcaatgtgtttacgaactggacatcccgctgaagtgcatcggtagtagttcctgaatgtttgaaacagaacaaatcaatcaccatgcgtattagaagatgtcatatgtggataaagagatgggtcatgcgtttagttttctagaccttggatgaggatttcctttcaccattttctgcccgtatttacgccacctgtatccatcaccacagataccaacatcaccagctgcgtgtactacgaatttgtttttctttccaggtttggagacagaatctgaactctgtgagttatcttttttcagtctgaaaaatagagagaagaaagtctattaatttcatctttcaaagtgaagagtaagcaccgaaatgcaaaattctacaaacttgccttcgttttggctctggttcctccacagcttcgttctcacagtgtcttttccggtcaacgagtgtttgcgactcacagatgtattctttagtagaagcagacggatctgaaccgctaggaacaattgatagctcttctactactgtatcatcctctgaaacaggccggatagctgttgtaactctaatctctctcggggagaagctagtcttccggggaggttcatgagtatgtaaacctttgttaacaatctctaccacattgcctgaatcattggagcattcaatttttttagcacaacattcagtgtatgtacacctgtagtaactccgtgagcccttgggactcttaacctgcttctgtccatattttctccaattataaccatcacgagccggtgtcctaggaacaggagtaaccgacaatctgttaaccaccggcgaatctgatctttgctcttgtttagttggaactgaaaccagtggtaaatcttgtgcggttgaagcagttgcaggatccaaagatcgacatggcgtcactgtcaatgagtctgacgatgcagccagagaaggagatgtttctacctgacgattctcttccacttcatcaaccggcacaatcgcacttacaacagtttccttgacgctatcagtctcctgccaatgtgatacaaaaagcagttaaatgtcatgccttgataacagtgattcttgtcctcagaattgcctaagaaatcagacacactaaaatgtaacagatcaaactgatacagatacagattgaacttggccaaaggttaaaaccattacgattaatcctattcccatgttattgtataatcactgaacgagtaacatcgaagacactgaaatgagttaaactttacaagttctagcacaatcaatgttaatgagagaatcaaagttgtaagtgttaagaaagtttatgaatagcagaagagtctgaagcaaactcacattcacttctaatacatcttcaacatttggttccacagaggaattttctcgaacacctggtaaactcaaacatcatttcgtcaaaaaataaagtctcgaataaataaataaaaaccaataaagaatttcgcacagaataaaccgttaccttgaacctgatccttgcctagggtttctcgcacagtctcatcatgtaaatcttccatatccgcaccaagtgatttttcctcgtctctgaattgactcagtccgtccttctccggctccactttctcgctcttctccaccgtgtatgtcttagcttcgtcgataccagtgtcttcttccatggacgattctctcttgtcctctttttctgtatctcgtgggttttgtctgaagagagtaaaagaaagaaacgaacaaattctctaggcagacaaaaaggtagccgctttccgaccgactgatctccggaagaaaacgctgcgttttggtcctttattatgccttctctgctttaaaagcaaaagaagaaagaaaaaaagataccaaaaaagaaagagaaagaaggggcattaatgtctttcagtctttgtttgactgtagatagttaaaccaactccgtttatttctccgttaatcacccctgcgtcacgtcaaatcattgacgtgttcccgttagtttactatgtaaaatttatcttaagactattaagatgcttgcttgcttattatcatgtgatgtggtgataaatagcataatgaatatggtcaatgttctacgaattttgatatatcanaggtaattctttcgtgggttgatccatctacgttacatcataactgaccccgaaaag

SEQ ID NO: 70591 - DNA, 628 bp, Arabidopsis thaliana landsberg
tctttttgcacattcacacacacatcgaaagagggattataaagtttccaactttttctttcaattcccattatttcgatcttcaaattttgaaggaagaaaaaaaccaagagcaagagttgaggaatcgaatcccaagaatcgaggtcttctccctcttcttttcactttcttttatttttctctcaccataaattacgggtctctgtctttgtgtctgcgtttttgtctcaccatgttgtgttcctaatctaacgcttcttcttcatgttcttcatttcaagcttcgttgagatcgagcttttttgtttcaattgtggtttgttgcattttcgctgactcacaaatagggcttcttgtttgatttcgtatttcccccaattttggtgtacatttggggttttcctctgatttcagatctattaggttttgtgttctactctgaaatgatcatgtaagtaatctatggaggattctgtaatttagattcagatatgtctttgatttggatacaaagttgtcaactttaagctcctttctgttatttgtgaataccaacttcactgcttttttatgacttttgcaagccagtgaattgccttagtttctattgaatcattcttatttc

SEQ ID NO: 70592 - DNA, 511 bp, Arabidopsis thaliana landsberg
gagccatcaagctgggacggctgtgacggaaaccatgtgccaacaagaatgattggttcaaggttttaaatagcaacatgattaatcaccacacttaagatattgaagcaacagaccacgccggagagcatatcccaaatgaaagcgcagcattcaaataaatctctgaagttataactagtggacaaaacgaacacagcaaaggattagggaaacaccaccgatgagaaaataactgattggaaagaagcgtagacaggagacctcaaagagttgtactaagactccaagagagagcgtggcataatgaccctaccaagaatgatctaaaacatgctgttaggggggatccatgacagccatggcatgaaaaaacatatagacatttaccttaaaagcccagtcaatgatattatcgtacttgaaaccgctgggagaagagcccttggactttatagaagaagagcgcacaccacgggatattttaagaaatggggagactagaattggt

SEQ ID NO: 70593 - DNA, 569 bp, Arabidopsis thaliana landsberg
ccagatatgttacataaagtattaataaactgcaaaataaatccaaaattttgctttgtatgcatttttacgtttaagttagtgattaccaaatcatatttgattaaaccatactaaacttatattttgaaaaaagagtatgatctataaacccaattacataccaaaacataagaaaggctaattcttcttaaactattattttttttgggcaaacttcttaagtatttatcataagttaaaaatagtgagttagatataaaaaaaatagccaacaacaattatttgtttgtcaaacaaagaaaaaaatcgaaaaacaacaattatctgcattttggtgtatatcttaggaatgcttgtcaattttaagaacaaggctgtcgaatttaacaaaaaacaaaatggttattacagggaatattttaatagggttttgccaaaaaaaaaaaaaagggcaataatgattatgctaaaatcaaatgagcttgcaagggaaattgtttacaaaaaacgtttattttgtccattcctaagaaattattcattttgataaaaccaaagaattttat

SEQ ID NO: 70594 - DNA, 559 bp, Arabidopsis thaliana landsberg
tctaacatcgatcgtgaaagaactttacgcacatgcctcaactctagaggtaattctaagcgataagctacacttccaacacgcttgagattcatacaagggcctatacagcgcaactttaactttcctgactatccagttcagaacttaccttcatatgttgaactttaataaacactttaccaccaacctgaaattccaaatcacgtcttcaacgatctgcctaactcttttgatagttttgggcagatttaatcctatctctgattagcacaacttttcaatgatttccaaaactaattcatggcaaattacaatagtttctccaacttctaccgaacatagaggtatataacatggcctaccgttcagatcctagtatggtacaataccaatacttgcatggaagctaatattataatcaacttaaccattgacaacgatctctcccatgcttgatcactatccaaaacacatgatcttaacatatcctctaatgtttgaatattcttctcagagtgcccatttgactcatgatgataaccatagattttagtcg

SEQ ID NO: 70595 - DNA, 207 bp, Arabidopsis thaliana landsberg
gaagaaattccgcaggaaggcatgaaaaaagattaccacgagctgctgggggagacggtttggcactctttttagcaaccgaagagaatgcgggaccgaaagggtccaggaaaagagagagtaacaaaagcagccagcaaaacatacatacaagaacaaccgaagaaaacgaagaaagactacagagaggaaatgcagcgagacaag

SEQ ID NO: 70596 - DNA, 122 bp, Arabidopsis thaliana landsberg
tgtcaagaatctggcataactcggttacaaaaagatatcaataggccgctatgcctgtgatgccctctgaaatcaatgccggcttaaaccgaccaaatgttgggcgtagaacatacatctat

SEQ ID NO: 70597 - DNA, 510 bp, Arabidopsis thaliana landsberg
taaagaaatgaatatgaaaatcaaactcataacttttgagagattttctcatcgtgagatagtttgcttacaatgttccagccaatttacttgtgttagcctttgtctcattttctgcaaagatttgagccatcccgaatcttcggagtcatgtctttgtcaagtaaaacattgcttggttttagatccctatgaactattctcaatcgggagtcttggtgaatatagagaattgctaacgatgccattgatgatatcaaacctcgtctgctaattcagtttacatttttggctttggtcgacagctaaacacatactttagaacattccactaacacagctataagaagataagaaaggacagtgaaaagtcctaaacgaatagaaaagaatcgagacttccattctcgaggtactcgtagacaagcataacttccgtccacgtaacaaccaagaagacggacgagattattgtgttggagattcgagataagtcttaccatgttcaag

SEQ ID NO: 70598 - DNA, 1332 bp, Arabidopsis thaliana landsberg
aataaagaacactaggctgtccagttatctgtcacaacgaagcagagtgtaaattatttcaaaaatgctcacacattcatccaaatggaaacagcgaagaagaatcacctgttggaagaggactaaacctccaccaattgtcaaagctttcaaattaggcccttggaatacttccaggaagtttcccccagatttctcatcttcataggccgttttcacagataaataggcatcatctaccaacttctctgagattttatcacctggaggtctgccacgtaatttgctgagggcaagcatggccttctctttgtattcttgtaattgtcctttaccttggacagctctaagcagcaaccagcgaggagatgcagggagactccacatgcctagtcccatcagcaaagcaacaggcgtaccaaatccatacatgtaacgccaccctccaactacatcaatctggaagcttccaacagaaaaacccaactgcacaagaaggaaatcaatatttacgcagaaatcatactgggaagagattgacatcagacacttaccaaaattcccaatacgatgaagagttctttcagagatatcaaagttccacggatttgagatgggcatgtctcagcaatatagaggggagccccatgcattgcctatcaagcaaaaccaatttacataaaacattaactaacaatcaacaacaaaagtaacaaagaaattaccataacgattcaggtttccggagctcaccaaaccaataccaaagccatagagaagccttccaactaagagaatattaagatcaggggcacagccagtgatcagagacccgaggagatagagaacagcagctataataagttcccgccttcttccttcataaagatgtgaagaaaaccagaatgagatacttgcattcagttaagaagaacgagaagtcaacccaaaaaaacaagacttaccaaggaaatcagcaacgccatagacagaaattgagccaagaagggctccatacaaggatccgctaacctacacaacaaaatgcagtaaaaactatcattttctgctaactctatggcttaactacagaaaatatcgatctccaaataacataccacaagtcctagctgaacaggtgagaagttaaaccatgtagttccgctaagcgcaggtgactgttcaagaccatatgagacagtacataatgttaaaattctgaaagctaaaatgtaactagatgaaaatagatactttaaaataacctgaagtgagagcgtagcaccggaggtagccccaatgtcatacccaaacaataatccttccaagccg

SEQ ID NO: 70599 - DNA, 1947 bp, Arabidopsis thaliana landsberg
cggatgtttaatgagactttatgctcacttatctattcaaagactgctggattctctgctgctgctgatgcaactcgagtctctgttattattggtgttttcaaggtggccctttttatttttttgtttggatgtgtaaatatcttattttccaacaagcttccagttattcaatactaacctcttcaattgataacgctctcgtagttactgatgacatgggtagctgttgcgaaagttgatgatctcggcagacgacctttactgattggaggtgtcagcggcattgtatgaattcattttatgtctatatcttctgtttcttattttccaaagaaaagatatcatttcttatatttcttccaaattccaggcgttgtccttgtttctactgtcagcatactacaagtttctcggaggctttccccttgtcgctgttggtgcactgcttctctatgttggttgttaccaggtttgtactctagctcactgttagctgtggctacatagttttatctagcatattactaaagtctcagcgcgaacagatctcatttggacccatcagctggctaatggtgtcagagattttcccgctccgcacaagagggagagggatcagtcttgcagttcttacaaactttggctccaatgctattgtgacatttgcattttcacctttaaaggtatatttttctgttcctgcttgttcaacccttgaagttattagtaactcttatcaaaatatgcattctctgtaggaatttcttggagccgagaatcttttccttctctttgggggcatagcactggtatcactgctgtttgtaatactagtagttccagagaccaagggtctcagcttggaagaaattgaatcaaaaatcttgaagtgaaacgttgaagaacatatttgttatagttgattctggtgaaatacatgtatgaggatgtgactattctctttgtaacataatatgtttcgtaatcaatgggaaaaccaaacctttttcatgattattcgagcagtaattagatatttttggtcggggatggaaacgacaaaaaccgggaggtaagcattaaggttttcaataagcttaagtcggtatttccctctctctgttctaagttacatttatgggctgtttcatttggttaatgaaaaacgataaaacatcctcctgctcagattaacatgcctgcagagctggcccaagcataggaacgaagagttgatttggctaacatcagcactggggatcacataccttctgttcttcgacctatgtatgtaaactaccattgtctctctctctctctccctcagtaaatgtatgtctttttcatggattcacattaaggtgcaaaaaggcgaagaaatggtaaagaaacgttggaaattatagcattcttccactgattttccaggtaactaggtttatggcaatgtttttgctgattttgtaggttcttggggaaagcatgtggggttaactagatgcagtctctgtacagtgtcaaaataccgatcccagaagtgtctggaggcatttaaggcaatatattatcatttccttgaaaagaaggcatgcgctcatggcttctaccgcaaacagagtagcccaagcatcagtatcatctccttccaatctgcatcgacacaccaacacaacccctttatgatgtcaaacttttacgaccaactgaaattaaaatttcttggttaaacaataagtcgttgaggttcatatggtatcaagggaatataaagaactgatgtttttatagctaatttccctgaaattatatacaaaagaaagaagtttactgaggcaatagatttgcaaacatcacatcatatatacaatcattcacactaaaacacacataaatgtagtagaaaagtactttcttgtagataaagcagattgtgttgcatgccct

SEQ ID NO: 70600 - DNA, 554 bp, Arabidopsis thaliana landsberg
tggtcagtatgtagttctttacgatgtgttcaaggttttagccaagagaagttattacattttctttcatgtactgtaacacggcaaaggcttcagcgtctcttctatcctcaccaaaggcattgatgagcgaattgagagccaataaactcggctttagtccatccgatgtcatcactctaaatgcattcacagcttgttccgataaaccctggcaagaaagaatcattcaactatcagtatcaaatgataattctcttagggatctgtaactgatactattaacagtcatggtaccctttgtgcatatgcattgatgagggcattgtacatggtcgatgatggtttcaacccaaccgacttcatctcttccaagcactctatcgcatcattaaacctacccgatttgccataaacgtcgacaagtgtagtgtgtgtcacaacattaggcaggataccttggctcttcatctttcccaacaatcttttcatatcatcccatctttcttgatcaccataactattgatcataatgttataagttgtagcacaag

SEQ ID NO: 70601 - DNA, 384 bp, Arabidopsis thaliana landsberg
tgctcgtgccatgtgactctaaaggataacgtcatcgatgtgcccgaccctgggacgcctattccgaagcggccctgatagctggccaagaacaagcccggcaccttcctcgccgacttcggcgccgccgatgccggctggatcgccgcggtgctctggcagaagggctggcggccgttcaagctcgacggcaccacgatcgctatcgccatcaacgattccatcgccaaggactgggcgaactggatgcagaagatggtcgatgccaaggcgatcgacaccaagccggagtggaccaccgactggttcgccaagttcgacaacggcacctatgcgagctggacgacggcggcctggggcccgaccctcatggtctcctcgatg

SEQ ID NO: 70602 - DNA, 3242 bp, Arabidopsis thaliana landsberg
aattttagatctaacggtggataggttagtcttcgaagttggaatgcgctggcactggataattttacactagtcatcgaatgaggccgttggactgtaaataaaaaaggtaaagcccatcccaacttttatttcttaattaaaattttggaatatgattaagaaaggaatatttcattattctttccaaaatagcaaaatgagattgtatgtttaggttttttgaaaacaaataaaatttgaaagtcttcgtatatggacatatatctgaccaaaatcaaatatctgtgtatttttcaaaaaaaaaaaatatcgtaaataaatataataaaaaaaaataaaggtaaactatgtgatagcttactttaaaaaatttgacagtcgtatgaggtattgaggttgtatctgtttattttgataatttttataaagtttgactcaaattttaagttttatcaaaaaaggaaccaatgatttgttaggaattggataattaaggaaattaaaacattccaattttgtaagaatatcaaagatcaaaaaattagttcaaaatttgtgagtacactatcatctgaaaactttagtgattgattcttacatgtagtatcctatattaactcatatctgtttcttgttattgaagtaaagtcctcaactattccttactagcattgtccatacaaaaacaaattttatatcctcgattgtgatagtcaattcaaaaacataaactaaatactgttttaatgagacgaaacctcacaaaaagatgacgaatggtttgattttacaaaggcgaaaggtagaatatggtttaaagggatatagtaaggagagaagatttcatcaagaggatgtgatcaatcagatgagaccttggcgttgaagatcagagtaagtcttcttgttgtaaatgttaccttcacgatcttcatattcttcttcaagttctggcctccatttgttcactccttgcctctcctgtatcctcttccacaattctttggcttcctgaaacaaaccaaacaacaacaagatcaaattaccaaactatttactactttaagctgtacaaagtctttgatcatattatattattacctcaatcgaagtgatttcgttgaagttctttgtgtttgggattcctaggcaacgcattccgtgttggtgtcgccattctttaaaatgtctctcaaaagcccttcttccccaatagctatagttcccacatatctcgcatttaaactcctgcgtaataacaagaaatttaatgtgaatctatgttcctttgatacaacaatggtctcataaataaactacatacctggccaaggccatgaagtttgtagagccagtatggtataggcttcccatcccaacctattggtagcttcagcggattgtaaatcaaaccgtcctcgtcatcactttctaattcggtattagcttcctccccttcacgttctccctccatttcttcatatgtcaacgactgtttctttacaatgttttgttttgtcctttcgatggtctataaaaggtgacaacaagaaaagttaacagaaaaagtacaactagatatctgggagggggaaaaaaatgtcactatgagctttcaatcaactaacctcatcaagtaaattgcagagtttcttcactttggcctctgttagtgcaatctctttagcattttcagactcatgtgttgatttggcatctccgttttgttttccgttgtgtggaggtctggcaaaatgtttcttatccagcttttccaaaggcgtatgctgtacaaaaattgaattaattaagggaattagataacctcaaggtaataagaaaagcttcaaatagaattcaatccctacaaaacatgaactatgacaacaaaagccttagtttcatattagaagaagagctgagctgaactaccaaactaggtttcataacagctaaatgttccttccaaacccagtaagaacaacaagaacgcggctactaattgataaaagtaccctctcataagacgaaacttaaagaaataggagattatatagcaagtgtaaaaacctttgtcaggaaaagtctctcggcacgctgctgcggagtaccaccaaccttcagtcctaatgcccccaatgcctgaatggcatacaaagaacatatgattaggggaatatgcttcaaaaaggatattaacatgaagtagtatggtcattacctcttttagcttttcaggtcctacatctaccagttcctcgactgtactgtagtaatcaagatctatgacagtatgctgagatggaataagttcattatccaggccttctactattccatctgcatattgctcttcaaaatcagaacaaacctgtaaaagaaccaaacatattaatcgcaacagatcaaacaataggcacagcattggccaaactagaactaccagaatgtcaaactataacatggttcaaaaccttccgaggatatacaatctctgcacttagagcaaactatgcaccaatgaatattgaatacaaccatctagttatggccatttattttccaaaattatgtattatctccagggggatgaaagactcacaaagcaaccagttgttagaactaaggaaatcaaatccaaagttctacacttaatacttgggaaactagtagaaacttcttaagcacgaataaatataccagttatgtactaatgcatagttcgaaacgcccataaaatttcataaggcaacaaggtaaacgcaataaaatgataaagaaagggaggagcttaaaccttagaaagtatccggtcaagatcttgcaacggctcggttcgctggaagaagtagaccaggtactcaagtagagcttccatatacttcatgtattgcctaaaatgaaaaatagcaatacaaaaaggaaagccattcagctgcagctagaaaaataattggaggctttctaagtaaaagaaaattccaatgaagtgtttacctcgataacttcagtttacgcggtattttctctggttgagaaaaaacatcaaggtaagcagaatattcaaccctttccccaaatttagagttgatgtactggttatacatatcatgcaagtccaagtaccgaccattgccttcctgcgtaacagacaagaagatttaagtattgacaataaaaaaggggcttacaaactgttaaaaaatgcgtcaacaaatagcaacaataaaaagtcaagc

SEQ ID NO: 70603 - DNA, 602 bp, Arabidopsis thaliana landsberg
gctaaatttcttttggaagttattaaaactcctgctacctttctccgtctcgtcttatgtctcgtcaatgatttgtgtagattcctcaatgctcttgaaactatgggaggagctgatcaactggcaaaagatgtgggatcaagaaacgttgcctcatggaatgatccactagatgctttggtgttgggtgttcaccaagtaggtctatctggttggaagcaagaagaatgtttagccattggaaatgaactccttgcttggcgagaaagggacctacttgaaaaagaaggttaattccttctctcacttatgtcaactcgttctgtttaactctgacgtgtatggcttgtttgtggctgtaaagaatttgcatgctattattataagctatatgctctttattgtttttccatgaaggggaagaggatggaaaaacaatttgggccatgaggctgaaagcaactcttgatcgagcacgcagattaacagcagaatattctgatttgccttttcaaatatttcctcctaaatgggaggtacacattatttcatgccttacatatgaagtttgtggtgcaacctctattgtagttcaaattcgt

SEQ ID NO: 70604 - DNA, 299 bp, Arabidopsis thaliana landsberg
tgagacataaatactgtcctatttcctagctaaattgaatcaagcattgaccatcccttttgatcttctcttttgatcagtgtccctgttccacaatattggtgtttctttgatttctgcagaaatacgcaagactttatactcatatccttgagcactatctatatatctatcgtatgcatgcactatcttattgagtgcattaccacgaatctatgctatccccctagattgcgatagatatgagtccgagcctttactaaggcctctgactagacaaacaatttaattttatctat

SEQ ID NO: 70605 - DNA, 488 bp, Arabidopsis thaliana landsberg
ctaacgattcacggtgaccctgatcaccagttcgcgtatttccagcggcataggctacggtattaaaacgaaaaatgttcacgtcttgcgacataatcaagtatgctgtttgaaccatcttattgcaacggatccccggttatacatccaccctcgtaaagtagttgtaggcgatctcgagcgtttccaccacgatcgaattatcctgcgatttaaaatccgtcactttcaatcccaccgggtaagcattgctgaatgaccatgtaaccagtttgttgccttcctcgttcagtaacgacacttctaacagcttgggcgtgaaagtgaagtttttaacagcatcattgatccattgtaaaagcgaggacccatgaaggagtccccgctttaagaaaagattgtcgtatttggccctctccggtaatttatgcgaagtaatcgtcacgccgccttcagggtaacccttttgttccagtgatacattgata

SEQ ID NO: 70606 - DNA, 305 bp, Arabidopsis thaliana landsberg
acgatccatcctcctgcgggaggagagtggaaggaatttaatatggcagaaatttcgacttctccaaggttaatggcagccgcgaaggagtataacatcggtaaagacacccttgtggactttttggtgagtaaaggtttcgacaaagaccaactgaaacccaccgcatagctgaccagcgaaatgtaccgggctttgcagagtgaatttcagagcgacaaggttgccaagctgaaggccatccatatagatctgccaaaagcgcccgcggctgtacccaagaagaagcgggacgaaaaaaagat

SEQ ID NO: 70607 - DNA, 540 bp, Arabidopsis thaliana landsberg
ctgttcctgctagataacaacaacagagctaatttcacatcaacactaaataagcttcttacagtagaactctttacatgttcagacaaaaacaatgattttttgatattcttgaaccaacagttacagtcatctatatgctatgctacatttcaagcatgtagaaagtagaaacccatagtataattcagagattcctgattcaatatttgcgcaagcaaaaattgaagcagacaaacattttggttatgacaagaaccagcgagaaaacacacaaatcaatctaagttagtgaatcactctctcgtcaatattgcaacaaaggtaatgatcaatctaaaacaacttgcgggaaaatcgaattagctaacgtaagaaggtgagcagtttcacgattcgttgatcacagtaaagaataaacacgattcgagagagatacgattttgcttactagcttcaaattcctcggcgaatgacatttgggaatttagggtttcccaaaatggatatgttgcataatgaaagaaatatatttgcagt

SEQ ID NO: 70608 - DNA, 270 bp, Arabidopsis thaliana landsberg
taattcgttagtgttagtctagatctagtttagtaaaaaacgagcaatataagccttctttaaataagaaagagggcttatattactcgtttttttctataaaaatgagcaaatttttatagagtatcatattttactttatttattatattaataataaataataataataaataataaaaaattactatatattttttattagaaaaaaaataaggtggaatttgctacctttttttattttttattgaaatttgtattttttttttt

SEQ ID NO: 70609 - DNA, 471 bp, Arabidopsis thaliana landsberg
  unsure (1)..(471): unsure at all n locations
agtcaaggcttcggcaatgttggatcggccgccgcggaactgttcgcggccgcgggttttcaagattttcgcggcgcaagatcaacggggaacgttgatcgacgataagggcgccgcggtcgatacgctcctccagcgccacctcgccagcgaaggcatcggcgggannnnnnnnnnnnnnnnnnnnnnnnnnnntgttccctgcgacatcctcattctggcggcccttgagagtcaactcaccgcggatcgggcgcgacgtacaacagccaagctcgcgcttgagggtgcgaacggtccaacgctgacggctgccgacgatattctcgccgaacgggcgttctggtcggccggacaatatttgcaacgccggcggcctgaccgcgaggttactatgaatgggtccaggacttttccaatttctcttggaaagaaagccacatccaccgcgcggcttgacacgctgttggt

SEQ ID NO: 70610 - DNA, 624 bp, Arabidopsis thaliana landsberg
agccgagtcgtacatatattgaaaagggtaaaataaaaatgtaaaaagtaattttaaatcgcctcttcccaaagtttcataaaaagagatgtactactgtctacagaaatcacgagttatattttgaattgaatatttcttggttcttacataaagatacgactagtgttacatggaaagtctttggaagtatggaacatttcgagataatcaaatttgtatataatgtttcgtgtgattaaattgatgtatatacaaacaatcatagaggtatgtggatggatcatgagttgtgtcagagcattgtcttatatcaaaatttgaattggaaccttcttttgaggacccaaaaactaacaatgctacaaagtctaaagtttactccattactatattcaaaatcattgattattctagtataagaactcattgataaaggtcttgcaagcacataatgtttcaagtgttatgagttcaatgtatagaaagacaaacacgagtcatttctttttctatttaaactaattatcaaatccccaatactcgccctttattacaccaagaaagacattaatttacaaaactcaccttttacttccttaatatttctcaaaataaaataca

SEQ ID NO: 70611 - DNA, 210 bp, Arabidopsis thaliana landsberg
  unsure (1)..(210): unsure at all n locations
attccgacaaagctgggttgtnnnnnnnnnnnnnnnnnnnnnnnnnnnnnnnnnnnnnnnnnnnnnnnntctcactaaatcataagagcaccccaactgaaaacattagtatctaatgctatggccctagttgcatgcaggacgcagtgannnnnnnnnnnnnnnnnnnnnnnnnnnnnaacgagcacacctgatctgttatacacagcc

SEQ ID NO: 70612 - DNA, 571 bp, Arabidopsis thaliana landsberg
attaaaactgtttgatcaatattttaccacaacatgcaatttcatttgttgtatatgtttttggcatatgatcattttctataaaatttggcgtgaaaaggatcaaaaccgttatcggtagatcagcatttctattgaccaaatttctcacgtgtatgcaaaaatgtatcaagtagactaaaggtcttatcgcaaattaaccaattctaaatacttttcttgtacaacgtaactataaatactttgtacaattgtatgacgagttatttatggcttaatatctatatggtaacatgtgttgggagtctgatggtgagggaacgacatgtggagaacaagagaaattaatgcaacggagaacaactagttgtcctgcacattttgtgattcatatacataatacatgatctgaagctataatttggttctggagggggcaaagttttttcggagttaatttggttttaagaatataacctttgtctaagaaatgaggatcgtatagtatttgtactaacttgaatttgaaaaatagttgtgcgtgttgagatgatcaaaattattaatttga

SEQ ID NO: 70613 - DNA, 367 bp, Arabidopsis thaliana landsberg
cttactagaaaacctttaggaacaaaaaagaaaagatattttcactttagtatgacaaggaagaattcaggggcctagtagtaaattgcatcccggggttgcctggaaagtggaaagatcacaggcggagaagtagagagccctgagatggaggttttagcaaagggcacagagaaattatgtgtgatgaaaccttagaaaattaggtgaagatggaggattcaatctccttatagtccttaattctctggtaaatatcaattattttgatgagttctcaaggaaagaaactatttttgatgaatcttacatagcctttgcattttgtccttgggtttaagggtggtggttgaattcctttttggct

SEQ ID NO: 70614 - DNA, 527 bp, Arabidopsis thaliana landsberg
  unsure (1)..(527): unsure at all n locations
atcgccacatgcgaggccatgatcaggaagttgttgaggctgaagtaatagggagacaggaaggagannnnnnnnnnnnnnnnnnnnnncgcgaagaacgcgcgtccttccaggatcaggcgcacgatattggtgttccgcttctgcccgttcgaaactgacttcttctcggtgacgtttgtgactgacataatcagtgctccataattccgggctagtgcgcgaccatggattcgcnnnnnnnnnnnnnnnnnnnnnnnnnnnnnnnnnnnnnnnnnnnnnnnnnnnnnnnnnnnnnnnnnnnnnnnnnnnnnnnnnnnnnnnnnnnnnnnnnnnnnnnnnnnnnnnnnnnnnnnnnnnnnnnnnnnnnnnnnnnnnnnnnnnnnnnnnnnnnnnnnnnnnnnnnnnnnnnnnnnnnnnnnnnnnnnnnnnnnnnnnnnnnnnnnnnnnnnnnnnnnnnnnnnnnnnnnnnnnnnnnnnnnnnnnnnnnnnnnnnnnnnnnnnnnnnnnnnnnnnnnnnnnnngag

SEQ ID NO: 70615 - DNA, 567 bp, Arabidopsis thaliana landsberg
ctacatatatctgcataatttaagtgaccccaacaacgcttaccaaattatttattgttttgaaaacttattttcttgtgtgagaaaatatgtgtaagttatttttacatttcctatatgaatcgtgattcatgggcagccaagtaaatgattaatatttcatcgaactaaatcaaaatttaagtttgtaaataatcaaaattagaaatatttctccagccacttttttatttgcacaactttctccagccacctaaaatcttattttcatagctcacgtccttgaaatagcagaaaattaaaacagaaaacaaagaaagaagttacattaaaattctccaaatatacttttatgattttaattttcacatattttttttctaactgcaaatgggattgacagttgacagcccaaccttcttcactcctaccagtatctttctattttcgatttattttctatgattgaaaactaaaatttgttttccgaaaaaaatagttcttggtcgggtgaatctctcacgtgaatcccaccccttaactcacacgtatgcacaaccatcgatc

SEQ ID NO: 70616 - DNA, 758 bp, Arabidopsis thaliana landsberg
acaccggcgatcacgacgcgcaagctgctggccgagaagtacgccaacgttgccggacgctcatacgccaactacgcgttctatttcggcggcgccaacgacaatctcgaagagatcgccgcgctgcaaccgaacgaggcctgcgcactgaaagtcttcatgggcgcttcgaccggcaacatgctggtcgacgatccgaagacgctcgacggcatcttcgcgcgggcgccgctgatcgtcgtcacgcattgcgaagacacgccgatgattctcgccaatgaagccaaggcacgcgagaagtacggcgaagacgtgccgatgagcgaacacccctacatccgctcggccgaggcctgttacaaatccacggaactggcgaccagcctcgcgaggaaatacaacgccgatctgcacgtgctgcatctgaccaccgcacgcgaactgtcgttcttcacgccgggcccgatcaagggcaagaaactcaccgtcgaggcctgcgcgcatcacctgtatttcagcgaagcggactacgcgacgctcggcacgctgatcaagtgcaatccggccatcaagaccgaagccgaccgcaaggccttgctgcacgcggtgatggaagaccgcatcgacgtgattgccaccgatcacgcgccggacacgttcgaaaaaaagccaacagctacttcaaggcgccgtccggactgccgctggtacagcactcgctgctgatgctgatcgaactgggcaagcgcggcgagctg

SEQ ID NO: 70617 - DNA, 536 bp, Arabidopsis thaliana landsberg
acgtggcctttttatgtagtttgttgttatgtagcagtacataactttatagtagtgacctagttaatcggtgtaagcttttattagggagaggacctgccttctgcatctctcttagttcttgtgatacttgatgtccttttcagcagaagctcaatttcttgatttccctaccagtgattattagtctgatgtactgatgcattgtctacagtcattatgtgtgaaacaacttatctgcagtgtttgttacattgcatgtggtattcttaagttatggagttgtgaataagccctaagttctcctttagggtgtgctaataaccttatttttgtgtttctagcaatccagtttgttctcagtgatgaattcagccatcttcgtccagagcagcgattggctttgttgcatgtgagtgagactcattattaagtattttaaacatacattcaatcctcactttgagaaaaaaaattgctgggtgtagcagctcactcactcctataatttcagcttttggaagaaagtcaggatt

SEQ ID NO: 70618 - DNA, 606 bp, Arabidopsis thaliana landsberg
caaaatcaccttggacaagtatgaaggagatagctgagacaaacaagagttctaaagctggaaactttaaaataccttttctcttgtaatcttttgttatatctgacgaaaaatagtagttttgggtgaaatgcagagtaagtatatctctttgttgaagtgttgatacaatatcatgatgcttcttaatattcttgttcctttttaacttttgagatgttttgatgatctatgagaggttcccaactgatctttcattgttaactaataaaacctcacgagtcacgacgggtatagcttcatagaccaatcgtagagatcttgaaggcttcatccgggtacacgtacggaaatataccaaatttaaagcgcgactaggtgaccaaaaccattcaaacccaaaactctcccgtttagaagttactactgaccaaagcaacttggttaatttcaaacaattatttaacacaactgctcatcgtgcgtaataattttcgaagtaatcaacaaatcatattgttaaaaatatttctaaacttctaagttttcacatgtcggcacaaccatgtcaccttgttcaagtaatatatgatgacatttatatat

SEQ ID NO: 70619 - DNA, 467 bp, Arabidopsis thaliana landsberg
aaagacaatgaatgatttgaattcagctctcttaatattgcccagtcattacctggctttcttttgtgccattgttattcacgaagcggcacacgcatggatggcgaataaattcggtgatccaacagcaaaaaatgaaggaagacttacacttaatccggttgctcactacgatccgtggggaacaatctttttcccgctgcttgctgcttttacgaactttgcgatgatcggttgggcgcgaccagtgcctatcgaagttcgtaatttcaaaaaagtacgtgccggaattttttgggtgagttttgcaggccctctttcaaacattcttctgggaacgttatctgccatcatcatggcacttatcgcgacgaaagtttcaactgactggggcttttatacgatttcgatccgtatgcttcagtatttcagtttttattaaatttcatttctggcattcttcaatt

SEQ ID NO: 70620 - DNA, 3354 bp, Arabidopsis thaliana landsberg
gagggtcaacccacccccctccttcttccaacctttaccttttttttatgctaacttcttctcttccaccaccgtcggcgccgccatgtcccctctcctcctcctcctcctcaccgtcttctccctcctctcctcttccctctctcagccctcttctccttcaggtatcacctcaatctcttcgtcccattgcctaaattcctatcccttccagtttccaattttgttgacatttctaattttacaatttagcaattctgatcgattgtggcgcctcttcctcctccgtaatcgacggccgacaatggcaacccgacgagaatttcgtctccagcggcacaccaaaaaacgtctccgatcaagtcctcgacgaaatcttattcactgtcagatctttccctctttccctcgacggaactcatcacaagttttgctacgtgatgagcgtttctcgtggctggaagtatatgatcaggacgacatactattacggaggagttaacggtaaaggtactcctccgccggtatttgatcagattgtcgacggcacgttatgggggatcgtcaataccaccgccgattacgcagatggtctcgcttcttattacgaaggggtttttctggcgcaggggaaatctataagcgtctgcgttgcttctaattcttatacaacttctgatccatttatctcagctttggagctcgttaggcttgatggtactctttacaattccactgactttaccactgttggcatgagtcttgttgctaggcatgcttttggttacagtggaccaatcatcaggtaaaaaagttcactactttgatagaaagtttgatactttctcagaaaaattgttccttcgatgctaaatctttcgaaaccaaggctatgtattcaccattatcaacattcttcttgtttaggtttccagatgatcagtttgataggttttgggagccttattcgttaaattcgacagtaccaaacaataggaaactagaggtttctggtttctggaaccttccgccgtcgaggatatttaacaccgatctaagagctactcaagttcagcctttggagttcacatggcctccaatgccattgaaaatggctacttattatattgcgctttactttgctcatgattctgactcgatgggtgatggatccagagtcttcgatgtttctgtcaatggtataacgtattataaagagctttctgtcactccagctggtgcggttatctttgctagcaggtggcctcttgaaggtctcacaactttagctctgagtcctagaagtggttcaaaccttccccctcttatcaatggtggtgaaatgtttgagttgttgtctcttggaggcaaaactcttgttcgagatggtaagacttagaacaacagtgaatgattgaattcattgttatggtattttgataagtagctaactgctgataacatactgaagttgtgtttcatccatgtgcagtaactgctctgaatgcaattaaaaacagtttcaagaacgcaccagctgactggagtggggatccttgtttacctaaaaattactcgtggtctggaatttcctgctctgaaggcccccgaattcgtgtagtcgctttgtgagttggaattttgccaaattgtgtcgccagttttttttaaatcatcagtttgagatttactgacactgttctaaaattgttgttccaggaacttaactaatatgggagtttcaggttcgctagcacctgcagttgctaaattaacagcattgtcctccatgtaagtactttgacctgtgaacatttagttttatgcttgtacgtcaaaaacatcaattgatatttgtgtgttatgaacagttggctgggaaacaattctctctcgggtagtttacctgacttcagttcactcaaacggctggaatcattgtgaggagatatttagtttatttcacatacttggcagcaacgtttaggctgctgctgaacagagactcataagctaatcttatcccctttttctatgtacaaggcactttgaagacaatcttttcagtggaagtattccttcatctttaggtggagtgccgcacttgcgagaactgtaagtttccattctcatattaccatatacacagtcctttgataattggttaaaaatttagttgcttctctaaaataagttgcatattgtctgcatttctgctcaagattcttgccttgtggatggaaaagacataataccttgtattcattcttcttgtttttagcatcagcacttttgtcttttagctttgctttttaagattcaaagggcataatcaacataactaaactcatggctctttatatactctgttaatagttcctatactcagttattgaacctacatgtcttttatgcatcattgcattgtcgccattttgtttccatgagcatgaattgcttgctgactgagttatgtatgatttatggataattaggttcttgcaaaacaataacctaactggccaagttccgagcaatcttcttcagaagcctggactgaacctaaggtaagctacaaaattcccaaagctgttttaacttttaaccaatccatccatatctgagtaatgtctcatcttgaattggctaatacaaatactctctgattctttacacttcaggacttctggtaacccctttttgactcaaccgtcacgttgattcggccttctaagaagaagatgacaatgcattgagtttgtgttatagttttgtagagctttgtgtgtaaattagaagcctcgcgtgtacaatcatctattttaacatatcttaatgcttcattctttgaacactttgggggataagagaactactgattgcatgggttgtatcattctattgtgtaatgcaaaacatacattgtaatatgaatcttgtgatacatggagttaaatgtgttttcctttaattaaaaaaatatcacctgaaatcatactttgagatatttctttgataaatatctatcaatatgctctgatgtaacaaaagtacaagagaaatgtgaagaacgagagctgtatttctgtaaaagtggagccccaattccaaaatagtgaagcagaaaccattggcgcagagaaaagtaatttatagaaaacatctgaatcttgcatgtgcccatcagtctttcatctttcattttctcatcattaactaacaaacagattactctgctttctatttctctgtctcatcatttttgtttttgacatttactcttttgtctctcacatctcacatctcaacatgcaacaaatctaaattcacatcttcatcttttcatgactaact

SEQ ID NO: 70621 - DNA, 211 bp, Arabidopsis thaliana landsberg
tctcttcataaagaatactagattatttcacattcaagcgtcgaacaatctgacaggagactacttttcaatcttttttggtttaaatcaacttgtgggtaagaactacttttcttcttcccataacagggagaatttgtacctattgtttagaggccccccatatctctcctctcttcgcaactctcttacctgctaacttctgatggga

SEQ ID NO: 70622 - DNA, 309 bp, Arabidopsis thaliana landsberg
ttactggagaacatgcctcaggtttgaactccactacatcaacatctttttggacatccgcacatgctttagggtaagacaatgggaaagtaggggctcattccgatatggggccgatgcttcgtattatcttcctgatagatatgggtagcatgtatgtaatacaagcgccagatatgacatttttcttatttgcgactaacattctgttaaagtgatcatctatattgactcttgaccatagagactgtccataggttgctcattaagccaatgataaggcaaaagcttaatcatctagatgtaccg

SEQ ID NO: 70623 - DNA, 3635 bp, Arabidopsis thaliana landsberg
attatctgttatcttttaaaatttcggaacacaaaattactgttttaccctctattttttaattctattttcttaatctactaaagattttcataacaaaattatatgataatcaaaagtatgaaatcatgcatgattgataacacttcgtttctttaacgaaacctgtagcattgtttatggaaaattggtatatacgtatacaaatccatctttgatatttcttagaagccgacaggaaaatgggtctcagatagtaatagttatctaaacatgatatattttgtaattagtcggatatattaaaatacgcgttcagatattcaaattagaatagtcatatagtcacgcggttataaacaattcggtgtataaattgtaagtcacacagaaaaagaaagaaacgaaacgaaacgaattatggatttgaagaaagcatctttgtttttattccttcttctctgtctccacctgcaactgcaacaccactttgctcacgcggtctcgcgatcttcaacaagtttagccttcgttgatccaaaccatgatgatctcccgtttcaagaagtagaattgaagccagacggtgacgtaatcgaagccaatttaccgaaattaacagtcgttgttaagaaaggcggcggaggaggaggcagaggtggaggcggcttcggcggaggaggacgcagtttcggcggaggagggagttctagcagaggcggtggaggaagttctagcagaggcggaggagggagttctagcagaggaggaggaatacgtccgattccgatttatggcggtggaacgcaccgcagtggtcatcattcaagcggcggccgggaaactgctagtggttggttaggtctatcgattttagccggtttaggtttggttttttaaagcttctatatttgatttaccggtttaggttaaatgtttgatgccggttttgctttccactggtttgctctctggattttatcagaagtttgttaggactatttcggtttaggttaaatgtttgatgccggtttcagtccgtaaataattcgattagagattatttctgaaaataaccttagctgctaaatttaaatccaacaacattcagatttacaaatttcaacattaggaggagttgttcaacaatcaacataaagtttttcatgttaaaacttaaaatcgaaaaagacagttacatagtgaaccaaacgtataccggaaataaccgaaaaacaaagagtctttgattttacattttctccggcaagatcaagttagaccaacaaagcatcatcttttgaaatttcaagcttcttctgaggactcgttcactggtttcaatccggatttacctttgcctgatctgacacgagggctgtcgtgcgcagcattggtgttcttgttcttgtgatcatcgtctttgttctgaactgttccagtgctgtgtcggttacggttagagactgtcttcagaatctcttcacgggaagacgagctgactgcgtcgctgaagctttttctccgagaaaggatcagttttggcgacttgggacgtgtcaaaggaagctagaaagaaacataacataagttactttggcacataagtagaacaatgctgagctctgaacaaagataaagttttggttcgaaggataccttcttgagctcaggtttcgcaggaggtgcctcgtagtagaagttggggacgggtttagccttgaacttgagattctttctaagttgcttcaaggctgcttcttgttcatcctgcaaaccatttaaatctatgaggtttcacaaccaatctagaatcaggtaaaaaaactgcatctaccggaaatgtgtactttaccttttgcctctgttcaagctcgttcctctcagcttcaagcgcttggtttttctcctcgagcttttggtaatactgagccaagcagaccccacaaaataaattccaatcagtatacagaacagagtgaattctacacgtttaatgcagattatgtttctgattatgagtttttgttggctttaaagagcttatgtgatctataactgagatgtggaagcagaaagatagaatatgtacttacctccttgcgtttctcagcacgttgagcactcctaaacgttggagcacttccataagtcaatccagacttacccatcctcatggaagttgcaacgctgtggtaaataacgttaaggaaacaatatcgattctgttaagcatcgtgtacataaacatccatacataagtatcaagtataaaatgatagagatgggaaaaggatacgaagaagcaatggagcaattatcttcgtcatcaatatgcttcttgttctcgggttgcaatggcttcctcaccgcgagaagaggagcatgctgctgctaaaaaaaacattaagaaacgggtcaaaatcggatttaggcctcaatcatataccatctacaaagcgttattctcaaaaccaagatcttatgaattagttttacctttgaaactttagcatttccattacgggttttaggtgatttctgagctccaactctctcagcagatccaacatttggtgcattctcagaaagagacttctcctctgtgcattctttgacttcaaattcctcatcagtctcctctgcagctatcttaggagcaacatgaactctaccgtttgaaacgtcggcgtttcggtccataagcacctcaacaacttctcttcccattccactggacatatccaccaaccaaagacaaaacaaacagattctctgttacaaagattctcaaagacccatttcaatttgtaaaatctcagctttctctataccctagcgataacaaaatataatcttctaaaagttcacaactcttttttcatctgacatttcaaaattggaacgtaatgaacagagattggttcaaagttagaaacattcttgaatctgtagaaagggccacagaagaacaattcataagtgaaaccaacacgcataaacaaccaaatgaagaaagagtcaaattttcaaaatttaaaaatccagatggggcaataaatagtaagaataacgaataaatttgaaaactttgagagcaatttttacagatagaacaaggatttaaggaagagcaggtacccaaaaaacagaagataaatgtttcaaccaaaatgcaaaacaaaaattgtttcttacaagtcttgtaggatataggaggaaggattcttgtgcagcaccacctctgttctcctctctccgatggcccgtgagaattttgcagacaattaaaatagaaatgaattgtctttttatccagaacaaacttgtctccctctctctttctctctctcaagaagagaaaaaaaggatttttttttttttttttttttttttgggcggtgactattttggaatggtgtttgatttgtttaagctgttggttatttattgggactttgcatttttcaaatttaatatattatttttcaaatcggtttactttaattttgtttggattttattggcgcttttactacctcatgattcttcttcattttaaaaatcaaaaattgaaaaattgattcaccttatatataatcttgcttagttttattttaaatgtgtcaaaaatt

SEQ ID NO: 70624 - DNA, 563 bp, Arabidopsis thaliana landsberg
aaaagaattaatataagacaaaggcaaaataggattataggaagctcaacaatactggattctctttattgggaaaattaaatggataatttggttaagcaaagaagaagaaggtacacgtccaaaatctcatttttattatattaattctgtagatatctttttgataagaatcacattatattgtatccctcaaaaacggttgtttttgttttcttgatctttatagggtctcaatctctgagaacataaaaacggatttgccaatgctatcagaattggacataacaggtaatttacgcttatttgacatctgtttccatatttttttataaagattcataaagaatgtatataaaattttgaattttgtcaatatcaatctgaagattacccagcattaaactggctgaaaaaccaatcatattggtacgagaaaaatgactactacaacgagaaagagagtgaattggcagtttctgttgcggttgctgcattcgtcattagatcaatggaagaagccgataaacaaaatatcgaaagaataagagaagaaatccaga

SEQ ID NO: 70625 - DNA, 486 bp, Arabidopsis thaliana landsberg
  unsure (1)..(486): unsure at all n locations
tccaagtcacaaagaggtacggggtggtaaataatnaacatgcattaatggcaactacaaactgtgattttaatcaatgtttgaaactaaaactacatgtatatctatatgtttaattacatatacacatagctacattaaagccatattggtatctataatttacctctttcactttttttggtaaaagcataatttacatattgctatatgcatgtgattacattacatatacacatagctaccctagagcggccatatatttgttaagcacaagggtgtcaaggtgaggcaaagcttccattaaacactaaaatttcaaatagtaacttcaaaggtattagctctacttagtgacctatacgtacccttaaacgaaaagaaagaatatgtgtatttaattaaccaaatattgaggtgcccaatgagaatgcaaatgcagaccttgcgaaaattcaaacacttatctatctagacggagtaaaa

SEQ ID NO: 70626 - DNA, 571 bp, Arabidopsis thaliana landsberg
  unsure (1)..(571): unsure at all n locations
cggttgaggcaacggatcagcgtggacttgccgctgccggacaggcccatcacgaccagcatttcgccttcctcggcttcgaaggacacgtcggcgcagccgaccgcgtggcccgcggcgcgaatgtccttgttgtccttgcccgcatccagcatccgcaggccttgctgcgggtgtttgccgaaaatcttggtgacgtgatcgacccggatcttgggcattggcctccgcctgtgtgggggtgtctccgcccacatggctacagcaacacgcaacgcccgacctaacgcacgcaacgcaccaccgccaccaagcgtggggggatgttcctttttaccctaacaaaggatgaacggagtctcaaccccggatgctgccggccatccacgcacagtgcggcccagtgcgtgcacccgccgcaggcgcagcgacgatgcgcagcgcgttgcgttgcaggacggacggtgacttgtgccgctgccgacggtgcaacgcgtcaaaccaggcgctgccagtacgcgacnnnnnnnnnnnnnnnnnnnnnnnnnnnnnnnnngtggaaatgagcgac

SEQ ID NO: 70627 - DNA, 474 bp, Arabidopsis thaliana landsberg
cgtatatgtcgcggcgaacgtcgcgccagaacgatagcgccgggcgccagcccgctcctttgcgaaaccggcgtgccgcgaggtcagcgccgcccaggccggccggtcgaggtcatgccgcatcgtcgtgctccctgagccgggcggcgagcggtcgcgcgtcgagcccccgctccatcttttcgagattggcgaggagatcatcggcgaagccggcacaaaggtcggcgaccgccgcctcgacggccggccaggcattgcgcttcgcctcggcgacgaagtgcgtgccgtctgccgtgagcgagacgaggcggcgccgggcatcgtcgggcgcgatcaccacctcgacgaggcccgcctcggccaactggcccagcgttcgcgtcacgccgggctgggtcaccctcagccgctccgacagttcgccgatggtgagcggggcgaaacgatcgatcgtgtgcagcatcgggtgct

SEQ ID NO: 70628 - DNA, 1015 bp, Arabidopsis thaliana landsberg
aagaggttatggggaagaccatgaagatgaaatccaatgatatggcagccttccaatttctggaatttacaattttctcatcgccgtttttcttcgatgtaacggctttaacaccattgttatctataacaaacaagttaacatctttagcactaatcgaacaaaagttacatcactcacttcaaaaagcactcaccaattttacagtggaagccaatggagtatcgtaatagaaccaagagctgaaacaagagaaacgtcattattatcaggaattgagctaaactgagtcaaaagaaacttacagggacaatggtcaatagtgctgcgatttccagaattgaagatccatcgagattgctcacaaatctgtcaaaagtcaatttgaacaaaaaaaccttgaggaatcacaaattctaaaaatctgacgaatgagagagatcattgagaagatgatgagtaaacaaaaagagagaggcttttactgttctttgagatgtttgtttggatttagagtctgctttggtagagaatccatcaatactcagagatcaaaagatcttaaagttgtaaacttaactttgaacagtcgttctcctcgttgatcaactataaatatttaatttggtttggatcacgaaccggccggtttaattggtccgaaaacgaataggattctggaaggtacaatcataatctcagaaaacgaataagataactcaaacatttgttcagaattcagaggtaaagagttttaatctttcttcagtccttgtcgttgataaaactatagagatttaatttggtttgatcacaaccggctagttcaattggtaggttctgttcatcagattttatccggttcagagagacctcttgaatgttaaagaatcaagacttttattctatttcatgatacataagtacaattacactttcacttcaacacttttgaatgtaaaaatataaaaaggaattcccaaccagggtcagtttcatttcggccttcgggttc

SEQ ID NO: 70629 - DNA, 112 bp, Arabidopsis thaliana landsberg
cgctatgtggtatgctaggcatggacttcgtacgggaatctttgatgttgtccatacatggttttaatagtaatggcttctgcgagaaggatggcctaggcagatatcttac

SEQ ID NO: 70630 - DNA, 439 bp, Arabidopsis thaliana landsberg
gaaatgttactaccggtacctttcaatataccaatacgcaaaacaatgtttatactaactcagtttttattgtagctgatagtattgcttttcctgtaggctttgataccattgtaaaatcacatgctgaaacatttacttggcaaggaagtgctcttgcacctatataaagcgtgggggtctatatcggtacatgggcttgggattaagatgcatcattctatacagacggagatggtgctaccaacatgatttttggagtgacagaaaaaagcggtttagctgttggtccatgcacggttgctatggctcggtctgttgtaaataaatctataaatgctccatctgtgggtggtgttataagatatacattttttgcacataatgcaagtggacatattgtcccatatttttaccgtatcatataaaattctaaagc

SEQ ID NO: 70631 - DNA, 626 bp, Arabidopsis thaliana landsberg
  unsure (1)..(626): unsure at all n locations
ttaattgcgcctaagtgaaacatagtgaacagaaaacattattaatggatttcaattccattttcaacaactcatttttttcaactgtaaaagcacaatttacaaatgatctgacacatgctgcaaaacaaaaagcttgttaagaagaaaaaaggattgatcattcatctctatcaacatgtaagagtatacataccttggtgctcatataaagcaacttctctctcctttcgtttttccaagaaaccacttgccctccatacaaaagcacctgaaaccattatccagcccacaaaaaatgtaacttgacaaagttttcgagaaaattagcnnnnnnnnnnnnnnnnnnnnnnnnnnagctaaaccctctctaatccaaacaacaacattagtgaaagcatcaacatttaagctcaaagtactaaactactaaacatcaaatcttcttagattaccaccatgatgctatgagaaaaaaaaaactcatttagggtaaaaattgaagaagagaagagagggaaagagtaaaaacctcagcagttgatcccgccgggtcggtcaacagaatgcgagaagagccatcacgatcattgactacatttaaaggcatcgatttgggcctaatt

SEQ ID NO: 70632 - DNA, 434 bp, Arabidopsis thaliana landsberg
cgaggacctgggctggctcgatgccgtggacgccgccttcgccagcgggcgcgcgctggtagcggtccttgccggcctccggcgctggcccggtcaccgtggcgccgagccgcgcgctgctgccatccgtggcgctgcgccccgacggcgcctggaccgacacgctggtgccggacgacatgcacgtggtgctgttcggcgccggccacgtcggccatgcgctggacaaggtgctcgccacgctgccctgccgcgtgcattgggtggacgagcgcgacacactgttcccgggcggcctgcccgagaacatcgaggccgaggcctccgataccccccgaggccgggtcgaccaggcccccgcccggcgcgtatttcctggtcatgacccaaagacacgcgctggaccaggcgctctgcgagcgcattttccgccg

SEQ ID NO: 70633 - DNA, 624 bp, Arabidopsis thaliana landsberg
ctaaagagaaccaaccaaataaccccgttcattagaacgttgcaccagcatctgcgatgccagataaatcacagcaaatccattccccagtatggatgttaattctttttcaatccgcaaatcaacaatatctggcagcggatttccataaatctcaaaagctttcttataggtcaactcagcaactgtttcttcagccttgtcgatgaaaggcgtatacaagtcacccttaacgacttcaacgggttcaaatatttctgccaaggcattggtgttttcaataaccagtttacgagccagttcctctcccaaaaaggcaaattcatccaacatctcattagtcgttcgaaaatgagcctttggaagtggtgctggttgggcatgttcaccatgaccgatagttcggttaatcatcgcaccctgtcccaaactacggacgataatttcacgataaatctcttcttccggttcgatatagtgaacatttcccgtagccaaaacaggcttgccaaggcggtctccaacctctatcaaactcttgataatggtctggagttctccatatccttgacctgctctttagcaatcaagggcgcatagatagcaggtggatgacctcgataa

SEQ ID NO: 70634 - DNA, 235 bp, Arabidopsis thaliana landsberg
cctaaaacattctggtgaaagggctcttttaggaaccaaccaggccttcaattccaatactggtagcatgatggcgctgtccatcaacatcttattaagcaacagcttgcgtatgacagtcttctattgatgctgataccgcccaatgctttaggacacattattttgcttggttggttggatatggagccaaggttgagtatcttaggattgtacttgaatatgtcaaaaatat

SEQ ID NO: 70635 - DNA, 476 bp, Arabidopsis thaliana landsberg
tgtccaagaaagttacgaagggggcagggggtcatgtatgagaaatgatgctcttctccctcatactagctaactgactcggcttgtgaagctttcttgggatacccaattactcgaaaatatttctacaaatccaggatatttctactaatccagggtattacaatttcacaaaacattctcaaagggaactatcgtttaatttgacgtgaccgtcttaatgagatgaaaacaaaccaacccctaaaatctgtggataatgaactaacatggctaaagttcagaccaagcgacaggaaaatcaacaaacgaaatggaaactattatgggccaatactcgagttctatggacccaagagacccgacataatctcttcactttttatattgttatacaaaaaaaattcggtataaaggccttgcttggattcaaattttatccacttgagaaatatcttatgtcaagatgaaacacc

SEQ ID NO: 70636 - DNA, 512 bp, Arabidopsis thaliana landsberg
cgtcttatattagcttttgatgtttaataatccaattctgaaaccaacaatttttgttttgttgttacattgcagtttcattatatgtgttttgttatacggaggagttgcaatcatgggttatctcatgtttggagaagctaccttgtctcagattacactaaacatgccacaggaccaatttttctcaaaagtggcacagtggacaacggttagaaaacaaaaccagtttttatttttctctccataatctttggaagttccattttacactaaaacttcatcttggttctgttttctccttttctcaggttgtgagtccgtttacaaaatacgctctcctgatgaatccacttgcaaggagtatagaagaactattaccggaaagaatgtcagagaacatatggtgctttcttcttctaagaacagcactcgtcgcttcttctgtttgttctgctttccttattccattttttggtaagaacattaagctacaaaggttgagaactcac

SEQ ID NO: 70637 - DNA, 487 bp, Arabidopsis thaliana landsberg
  unsure (1)..(487): unsure at all n locations
ctctacggatctgatcatcatcaccaactctttgtctgttgcccaggaggccagctttaatcgcaacattcatgttctcatattgctcggcggcagcattaattttcagtatgaattcacaaccggcgacgatgcgatcaggcaactcagcaagtataaagccgacaagctcattctttcgtcagatggtgtcagcgcccaatttggggtgacgacttatcaccacacgnnnnnnnnnnnnnnnnnnnnnnnnnnnnnnnnngtagacaagacgatccttgttgccgattatagcaagatcgggcgggcaaacttctcgcaaatcggagagatccatcagatcgatctgttgatttccaatcacaacgccagcaaagatgaaatcgaagccatccgagaggccggagttgaagttcgccttgtttgaaaaataaatttgggagtggttgacatgattatcggtttggccaagagatcaagaacaatg

SEQ ID NO: 70638 - DNA, 611 bp, Arabidopsis thaliana landsberg
tagtaacgaccgccagtgtgctctaaaggatgacttgtacttcctgagccgagcaaacaacaccatccaagccagcttcagctgtcttcttggcatagtgaatcacagactcttgcagactggtttggatattttgaaactcctgcatctgagcttctgacgttgatgtgagctgagttacagcgatcaatttagcttgacttccaagaccttcacgcgcagcttcatcatctctacaccaccagccgcatgaacattggtcatatccacaccaagctgagataggatcttcatggctgacttgactgtattaggaatgtcatgaagtttgagatccaaaaagacactatgacccaaaccttttaagtaggacacaatctcaggccccgctgcgtaataaagctccatccctaccttgagataaaggctttcttctgctgggaaaagagctaaaaattccttgaccgcctcaaaactaggaaaatcaagagcaatgattggacgatgttctcgcataggtttctccttttacctttactagtgagagagtctggccaacagaagcacgaaaaaaggacctgccaacagcaaggttcacgaaaaatgggtag

SEQ ID NO: 70639 - DNA, 253 bp, Arabidopsis thaliana landsberg
  unsure (1)..(253): unsure at all n locations
gggtgggaangcagcgacgcgatatcggggacggcgccttgcttttttgtcagggcnnnnnnnnnnnnnnnnnnnnnnnnnnnnnnnnnnnnnnnnnacagcaggttgtccatgccggtgagctgctgctccatcacttcggtcaccgagccttcggccgtgctggagcttgcgcccggataatgggcaacgatccaaacttgcggtgcgcaatgtatgcgtaggaccttacgcctactttttcaattgctat

SEQ ID NO: 70640 - DNA, 524 bp, Arabidopsis thaliana landsberg
ttactttctgaactaaaagaaggaatcgaaacaatttttgttataatattaacaattttcgtgtggtctttatcaaattacgatcctgatttatgaacacgtggcgctgagttagttcagtttcattcattgagcttttaattgaacaatgagcgttaccaattttgtgttttttttctcgcaaaaagactttttcttgttcagaaagacacgaagtgttcatcatcttgttacatggcaaaagtccgaaaacatctgagattgtggcacgtgtgttaccctgacgactctcttctggtccctttttcacttttccagtttcaagttaacacgcggatcgggcccggaggtttcttgattcgtcaatcgtttgccgcacacaagtttctttagtgtagtttcattgtaaacaattttttttttaaaacaaataaaaacagaggttgacctagaaaagaaatatatgcagcggtgtgaattgctttcttctcaacagtgatcatcatcatcaattaaagaaacat

SEQ ID NO: 70641 - DNA, 472 bp, Arabidopsis thaliana landsberg
aaatgcaatcattatcaaaagacgagggtggcaaacaagacacgctaggatttccactattagactttgaagcagggtttcctggatcgaaacactccgatttacaaggcttaggagtatagccatcttcgagttcttgcttaatcagtccacccaaatgatcaagattatcagcttcagatgcataggtagaccttgaggaactttcactttgttgcaacaactttccagcaagagaagctagcaaatcaattgcgcagatctcactttgatcatcagatctcttacctgagaccttcctctacaaaagggaaacaaaaggcatcagagacgtattacaaaagcatgcagaggataaaaccaagcagatgaagaccctgatctcttaccctgcttgaacgaggagccttgggaatattggggaaatcaaagccattagagccaccacaatttaacttccttttgaccacca

SEQ ID NO: 70642 - DNA, 3949 bp, Arabidopsis thaliana landsberg
tcacatgtataaggtttaccaaccacttatctatatgtgttgtatatattaaacagctaataagtctacggataggtgtagtttttgcctttctagtattatcaaaggtggatatgtatagttttaagatgagtacatataagttcatataaatttatgtagttgtgtttttacatgattgtaaactttttgtatacttctaaacaatttttccaaaaaataagtatatcccaaaataaattcgttgcgcaaatggaaaataagcccgagaggctgacattaaatgggcctggtcctaagaggcccatatatacccagattaatctggacttgcttaccaaaaccccaaaacctcaaatttcttcgtcacccacccgtttcgtttctaagtctctcgtccttttcttttaaccacactgcttgcttgagattcaatcgaaaactgaaattcgcaagcctccactgctcgccgtcgcactcatcggaatattccattggcaccgtactaccctgaaatcatctcatcagatcaaaagtatggaattagttgagctcaatttctattgtttggtttttatgaatccctcaatttaaatatcgcgtggtgatttatttttcttcttttggtgtgtttcttcagcgggagtttaactagaattgcgtggattaatggggaagaaggagagcgagatatctgcaatggagatcgacgatccgaaatctgaaagctcggatcagatccttccaaggttctcgatcaatggttagtttttgttttccagggaattcagatttatccgattgtttctcttgatgtttttgagactaattggtggtatacaagttaacattatagacatgatgacaatatacatgattaagtatctgcatgtttgggaattttgcttacgggaatctcgaatttggccattgtttgattccttcagtcgtcgtttttatgagggagattgctgtgaatttgttgtatcaataatatatgttttctatgtttttaatcaatgcaacattgcattttgtgtttcagttctgcagctgatgaaatcttctcaggcgcaacatggtctgcgtcatggtgactatgctcgctatcggtattaatatgaaaccctaagctcattggcttacttgcgattttattaaatttaggtcaatttctgtaatttgtgttgttttgttgtgtaggaggtattgctccgcacgtttgaggaggttatacaagtccttgaaattcactcatggccgtggaaaatacactcgacgagccattcttgaatcaactgtcactgatgttaggtatttatcttgctctcatccttattctttccaagctaaagatcttgttggcgtagtgtgattttgtttttacctgaacattatagggagaatgtgaaggctcagttgttattccactagaaattaagaagttattttgttgtcacatgctcatacttgagttcatgttgtgtatttatttgaaataggttccttcatgtggttttctatatggcggaaagagcatggagccatgcaatggaaaaaagacagctaccagatgggcctaatgcacggcagcggatatatttggttggtaggctgaggaaggcagttaaatgggcttcccttttctcaagtttgtgctctattaagacagattccaggacatctctggaagctgaggtattcttgtgacctcaggtgttgcagtattcataaatttacatataacatattcactgctttgaaaggaagaagagaatacctcagctttaggcttttagcttagttgtttcatgtaatacgggtgtttactctataaatgcttgacatgagtcgtcatattttatcttactgttttataggcatatgcatcctatatgaaaggtactctgttgtttgagcaagatcaaaattgggaaactgggttggcatgtttcaaaaacgccaggtttgtctttgttcagtatcgtcattctgcaatttagtaggttttgtttttgaaaattaccccctgttgcagagctgtttatgaggaacttgggaaatatggagatctagagaaccaagttctttgccgagaacgggttgaggagcttgagcctagtattcgatactgcctacacaaaattggcaagtcaaacttgcagacatctgaacttcttcagattggtgagatggaaggccctgcattggatcttttcaaagcaaaaatagaggtatgtatgaatattcgcgatcaaatatattatttttttgtcagcgtccccaccaaagcaagtgaataactgtagatgtatctttcaataatccacatactgcagcagaaaattttggtctgttagtttttccatctgttgttaggaacttagagtctcgcttttgacctgagaccaacatacatgaaaacgtattacatgtatagaatcttggctactcttgaatgtcttgcaatggtttagtggtgaactatttctcagctccctcacacatttggtatgtaaatatgatgtatatactcactgtcacgtaggctgctatggaagaggccaggtctcaacaagctgcatctcttacagagtttagttggcttggctacagatttccagtttcgaatccaaaatctcgggtttctattttaaaaggttcgactaactttttccttatccactcttttagaattacttaatgatgctgtaaagtttggtttgtacctttacaatgggattactgttatacgttacctattaagataatttatagaatgtcgagcacctctctgaggctcttattctttgttccttattcagctcaggaacttgagaaggaactacagagtccaacagcagaatctctccctgcagagaaaaagctaaccatttttgataaattattcactgcatatcatgatgccaggaacacgatacgcagtgacttggtgagtgaatttacaagccatcttctgatttattgattgggttcaccgaaaaggttaacattttaaaagatttttgaaagtttagacaagtttgttcatcccaaaattaagagcgtttgttttggtgctttactgtttctttgattgattttactgaggcgcatactatatttaggtaagtgcaggtaatgctgaatctgttaaagatgacctaaatggtttggacaaagctgttggagctgtgctaggacaaagaaccattgaaaggaaccagttgctggttaaagtagcaaagagtaaactgaacaggaaacgtgatgataaaaatgataaagttactaggcctgaagagcttgttcgattgtatgaccttctattacaggtaaccaatgtttacctctttttttcttcagaagcagactttgtttttaaaccagttgggagacatcacctgtgtttctttttctcagaatgtcgctgatctttctgatctcattagctctggaagagacaggaaacctgaagagattgcctttgaagaagagtgtcagcgcacaagcttggccttccgtgctgaaaggtttaatgctctcacattattgtattttttagggcggttgctattgagttgtggacttcctttacaattcacatgtttatcatctttggttagagttatgctcctctaagccgtttatctaatccttagctatatgtaatattagtacaatttattcattaaattaggaatctgtttcatggtcagtcatcctcttcgcttactttttggtctatattataaccacttatttcgttccatattactcatgtgggtctttccatatatgaactgatacatttaatgttttcattgcccttgactgactgagttagctaatgatatattttcctaatctatttcaggtgcttctacttgggaaagtcatatagtctagctggaaagagggcttgaagcatttccccctgtatttcttg

SEQ ID NO: 70643 - DNA, 3583 bp, Arabidopsis thaliana landsberg
aataagtatggaaaaaaacttgtatgtccgattcattctgagttgatccatccacgaacataagattggatggtgatagatgagataactttttctttataactcctccaagctagttgaattctgagtgctgctttcagctcatgatgaaggttgctctgatatctccttacagctttctgaatgacggaaacagatttcctcaacttgatgaaacgacttcgatcaacaatgaacttgacatatctagctacaggttttaagttggccgatctttctgcagaaataacaaaactttcattagagagaaactttttgatctgtcaatggcaatgaatatgcacgaacaaataattaccagataaatgtaaagtaacttcctcaacattgaatttctcaagaacttgtatatttttcactgataaccatgtccgaacagcagcttgtaagaagcagattgctctcatcttatttctaaacttgcggcgtgcatgaagtcccctaatattcgattgtatgaccactgctgcaatttctgcaagtaagaggtatgctgaaatcaaataatggatagagtttgatattcaatactctatctaccaagtaccaaaaagtagataaataatcaccgaatcaaaatacagtaatacaatcaagtgacatctataagagtcagatcatgaaaaggtgatgggtatcgaaaacaagcttatgatgtaaaacttgagaagggtagatatggaacttgaattacctcgttgggaatccgtggtgcattttctagacaaggagccttgcagagtatggctattagcttttccaacagaaatgtgattttggttggccatgtcctgccaccaggctttgattgcctggaaccttttagtagcatctacaagtagaatttacttttgacaatcaataccatgtatttagagtataccaagcatgcttgcttcattcaaccaattgtaagaatctgtagactctataagaaactagggtgggaaaccacttatagactatcagcatctaaataaaaagatccagttcctcatttctaagatcatatactctagggaaagtaagaaagataaccttctccattttctctgtctggttcctcgattgtaactgcttcagagctgctgcaactgattctgatgcgcgaatatctcttctcctgagcttgacagctagagcacagcaacttatgaaaattcagttgctcctgagaaaagacggaatttgtaagataacctgccaatgtaaaatctaacttccatccagaaaactaatcaaggaagccatattttgttggtaagaaaggaataccaaattctccttgacgatcagctttgatgataggaaagccaacagtataatcacactttggttgctaactactgcattatgttccagtaagtcaccaatctgtaggacctatataaatcaacaagatttgtcaggaaactgatagcactaacgtgaccatacatacagaatatgttagcctattgaagaaaatcatctattggaaagaaacaaagggcccctcagtaattcaatcttcgtatctttagtaatctttttctttctaaacttaagaataactagacattcactggctgaaattagtacctcaggaaagcttcccaaaagtgctgtcaacttttgcgacagaataaaattttgaactgcatcatggtaatcggtattggacattactgattgagggccttcttgaccaccaggatcctggatataaacatttattcagaaaatatagccagcctgtgtcataagatacgtgaagagaaatggcctaggtaaacttcaatgcatttaacctgatttcgagttaagaacatttcatacctctctgtgtagacatggacagcaaacttcttgacgaaaatagtagtcaagcaagaaccatatcccctttccatccaccaatgatgcaaagctttctaacttgaagtcattcttcctggtaattgacttagtgaagattgcaagtattgtacatggttagacatatataacataggcagagaaagcacccacaactcatagtaaggaaagtaataagaatacgctcatataagaattaagaagctacctggatccagttcaagagcatttccagaggagtagacatggtaatttgattattctgtaaagaaacccaaaaagaagacttattgagagaaaaattagtgtaactagagaagtgtcaccattaaagatctgattgagagtcttttagtagaaactacatatagattcaaataactaacaatggctagaaattggaatgaattattggaaccaaggaaattaagcgagccttagccttacctgttccactccctggactttgtagatttcctctgtcaagagtctcccattaatcagaagaggcagctgcccagttcaaagagtatacataaccgatgaaaatccgacgacacttgcagcaatccacaaaaatggacaaagaaaaagaagaaacactcacctgcaaatgtacaaaaatgttccatagtagtgaaatagtgagctctctgtcaccatctgcaacatcttccccagttatcatcattccttcgtcatcttttaacgaaacaccagcattcttaagatattgaagtgcaattctacaattggccaagttcttctttcgattgtcggatggaactaccattttctgtttgataagaaccctcataagatcaaactccctccctcaataagacaaactggaagttcttgattaaaaatcaatataaagagtaaaacagaccgtgagaatggacggatcatgaagtagtagttgaatagctctgcagagccgcacgccatcttggaggtcagcaaacaactctctcactctaaagttgtattcaactaaaggagactgcaagagccattccagttattgaagttagcgaaacatcatacacttagcaatcgagatctcatataagacattgcattgactcttaactaaaaatcacctgctgataaggtattttgtatcctataatcactagatgcgctaggagattcccttctccatgcattacatcagaggacaataattctatgttcaaagccaagaaaatggaaaattagccgcagtaaacatgaaaaaagcgacaaactaaacagcaaaatctaagaaagtaccacatataagttggtggctagactttatactagatttctctgagaacatgaggggtgagccaccatctatcccatcaatcccatacttgagcgaaaggcagctttgagatttggctctatcaattacaagaaccagcaacagaatcctcttcaaaatcacatttccaagagcttcatagtaccctggtctgtataaaccctcaaccatcttgttataaacataagatctagcaaggccatcgtgggaaaagaactgcttactaattaccatcttcaagaacgccatttcttgatctgagttacttcactatcagacaaaaaggaatcccaccaaagatgatatataacctaaacgaagcaaacttggttacagctcacagtgcttgat

SEQ ID NO: 70644 - DNA, 576 bp, Arabidopsis thaliana landsberg
ggcctggtgatccttatgtacatagacacatactactatctctcaaagcttctgtctctgtattcacgtgtctcttctctgttttcttctttccactatctcccgtcactttcttatttacagaagcaaaatcactcgagctttattttaaagcagtaagataaagaaaaagaaaaaaagcttattttatttgactatgtattacattatgacaatgagcgacattagtagtaaattattcaaatttgggttctatttgtctcagtaattacggattatatttggaaagcgacaacaccactcactactactctgtttaagtcaacagttaacactgtcttttagtgtttaattagtgatcaaagttaggattacagctttttctcatcattctaatcattcctatctttatttcaagttgatgtgagatacgactgcttttcgtactatcaaaatgatataaatgttcgaaataaaagaagggaatcgtgtgatcaatgaataataacaactatctaaactgactcttctttatcttatttacttgcatatagatgccacattctatgattcgga

SEQ ID NO: 70645 - DNA, 1244 bp, Arabidopsis thaliana landsberg
taggagcaaacattgagggtcaaaacgtcacaacagtggctcaacttcccacagatggatcagatgcagttgtaaccggtggatctcctgtatcagatcaggtacctgcctctgctcaaggactttcttatgtgttggtttaaaggtctagtcctttgtaatgttgaaactaagcaaacagtggatagtgatcatatgttatttttgcttgtgaatttaatatttctggacagtgtgcccaggatgcatctcctatgccattatcttcgcctggaaatcaccctgatacagcagttaatatcgagggtttagataacacatcagtagctgagcctcatataagtggatcagatgcatgtgaaatggaaatttcagaacctggtccccaagtagagcggtcaacctttgcaagtcagtaactgccttgggcatttttaagtatcacctaggtcgacatatgtgattgccaaacagctaacaaggagatgccttttgtgcagatcttttccatgaaggtggcgtggagcattcagcaggtgtaacagctcttgttccatcacttcttaacaatggtacggaacagattgccgttcaacctgttcctcaaatacctttccctgtgttcaacgacccgtttctgcatgaactggagaagttgcggagagaatcagagaactcaaagaagacttttgaagaaaaagtcagtttccctcattacccagttacctcttgttttggtttatttttctagctgcccattgactctcagttgcttgtgagcagaaatcaatcttgaaagctgaactcgagaggaagatggctgaagtacaagcagagtttcgaagaaaatttcatgaggtagaagccgagcataacaccagaacgacaaagatagagaaggataagaatcttgttataatgaacaaactgttggcgaatgcgttcttgtccaaatgtactgacaagaaggtatctccctcaggagctccaaggggtaagtgtcgaataatatagcaaattggttttaaaaataaggcgacgaagtcataatagcactttttctccaggtagaattcagcagctagcacagagagcagcacaagtgagtgcactgagaaattacattgctcctcagcagcttcaggcatcttcttttcctgctcctgctctggtttcggctcctctgcaacttcagcaatcatcatttcctgctcctggtccggctcctctgcagcctcaggcat

SEQ ID NO: 70646 - DNA, 2172 bp, Arabidopsis thaliana landsberg
atccttaactggcctttgatcgctgcataatatatgaatagttgacatactgaatacgttgttaataatgcattttcagagttggattgcagccttgttggtaaagcaaattcttagccacaaagaatctctggtccgtgcaaattctgaattagctttcaaatgctctagagtagaggtggattatatttattcgatattgtcctgcatgaagagtctgttcctggagcatacacaaggtttgcagaccgattgctttggtactaattctaaacagtcagtggttagcacaaaactagtaaatgaaagtctctcatgggctacagtgcgtgacgaaaagattaatacgaagtcgatgcgaaatagctcagaggatgaagagtgcatgactgagaagagatgtagccattatagcacagcaacaagagatatcgaaaagactattagtggcataaaaaagaaatacaagaagcaagtgcaaaagcttgtacaagagtatgaggaaaagaaaatggagctgttaaatatgtatgcagacaagaagcagaaacttgaaactagtaaaagtgtggaagcagcagtaattcgtattacctgttcacggaccagtactcaagtgggtgatctcaaactgctggatcataattatgaaagaaagtttgatgaaatcaaaagtgagaaaaatgaatgcctcaaaagtctggagcaaatgcacgaggttgcaaagaagaagttggctgaggatgaagcctgttggattaatcggataaagagctgggcagctaaattaaaagtttgtgttcccattcaaagtggcaataacaagcattttagtggttcatcaaacatttcccaaaatgctcctgatgtacaaatttgcaataatgctaacgttgaagctacttacgctgatacgaattgcatggcttccaaggttaatcaagtgccagaagcagaaaacacattaggaaccatgtcgggtggcagcactcaacaagttcatgaaatggtggatgtaagaaatgacgagacaatggatgtctcagctttgtctcgtgaacagcttacaaagagccagtccaatgagcacgcttctatcactgtgcctgagattttgattcctgctgactgtcaagaggaatttgcggccttgaacgtgcatttgtcagaagaccagaattgtgacagaataacatctgcggcatcagatgaagatgtttcatcaagggtgccagaggtatcccagtcactcgaaaatctttctgcctcccccgagttttctctaaatagagaggaggctttggttacaacagaaaatagaagaacaagtcatgtgggttttgatactgataacattttggaccagcagaatagagaagattgttctcttgaccaagagattcctgacgagttagcgatgcctgtgcaacatcttgcgtctgtggtagagactaggggtgctgctgaatctgatcaggtacttactggccctgtagaatagttgatgccttgttcatttaatcttttctaatgttcattcttgctttcttgaaaataacgggtagtgatcagatgtctttttttctcttattaaattcacttttctggacagtatggtcaagatatatgtcctatgccttcttcactggctggaaagcaacctgacccagcagcaaacactcagagcgaaaatcttgaagaagcaattgagcctcagtctgctggttcagaaacagtagagactactgattttgctgcatcacatcaggtccctattgaagactttccttttttactagtttaaagttatcaatctgtgttatgttcattctaagtttccgtgagaaaaaggtggggaaatgtggttactgatcaagtctcgttgttgttttaaatcgactcttttgacagggtgatcaagttacatgtcctttgctatcttcaccgactggaaatcagcctgcgtcagaagcaaatattgaaggccaaaatatcaacacatcagctgagccccatgtagcgggtccagatgcagtagagagtggtgattatgcagtaatagatcaggttattgccttaactaaagacaaatgtcttttgttgtttaaaagtcttacatctttgtaatgctcgttctggatatcctgcaggaaacaatgggtgctcaggagc

SEQ ID NO: 70647 - DNA, 628 bp, Arabidopsis thaliana landsberg
cgccaggaccgccttcaccgtgattgaagaagaaatacttggaagctaagaagaaaatctcagtagcagtaactttctctaagctcaaagcataattgtcttcatcagatccaccaaacaacctatgaagcttctgcaacactctcttcctcatatcttgccatgtctcttcctctgcccccatgtcgataaaattataggacctaacaacttttgattcctcttcctcattaggctctcgacaacacccatctccccaacctaagacttgttgtccggatctagacatggtttgttgccagaaaatagcgtagttccagctgaaattctccgagtttggccaatcaacgagactagagagcttcttattcagagtatcatcagttcccataacaagaaagagattctgattcgaattagagtttgctcgaagaaaatcagaagctaaatgccctaaaacagcactaaccaccgatttatcttcatcatcccaacctaaatcactcatattcatcattctttatctcccagattacaccaaatcctaccaaacccaaaaccacttaaacggagaagaaaaccaaaccctttttctacacaactcaatgattgactcaacgatgcttga

SEQ ID NO: 70648 - DNA, 553 bp, Arabidopsis thaliana landsberg
aaaatacagcttcttttttttttttttttaatataaaacttcattgatcgttccctagctattgatggtactcttggtctggttgtcacttttcggatcaatcgatctacgactactggtcaccaacacattttgacctacaaactcctgatcgatcgttttaggccaaacaagtccaataacgcatcaaaacatccaaatctctcacaaacacctagtacatgtaatagactcaaattaaaacaagagaaaaaaaaacgtaaaaaaactgcaatacgacaaatgattcaaacgaaaactaaacgaaagacttaagacaccaaaaaacaaaacatattagaactattcaaaagaaaatactttaataaatcataaaattttagaactggaacaaccaaaaccgaaccaaaatttttaaaaaaatctaatagctggaaccgaatgaaaccgaatcagaaccgataccaatactcgaacgcccagccatcctttttgtttaagaactcagataaatgatgggattaaagcattctaagttttaaggaaaaaaatg

SEQ ID NO: 70649 - DNA, 521 bp, Arabidopsis thaliana landsberg
  unsure (1)..(521): unsure at all n locations
cagaatctaggatgataactttttttggaaaagatggtacatagatgacacatcttctacgaaaatgcacttgaaagaatgagtttgggagcaaatagtttaaagattggttaattttcacgttggagtcaatttggaaaaatgtaattcctaagctcagtttttctagtacaatatccaaaagtgatacaaaggcagcacgaagagtatcaaaagctagagagaaagattatattttcactaaacctaccagttttcgaaataaaaccaagaaacaaaattaacatcaatgatatgatacgctttctaataatggtctcctaatgtgttgtaagtgggatatattgaaagaattaaagttcatataagatacatatgctcttggacatatatatgatgcagtttagacatagtttataattgaaagtgaaatacaagaaatcctcattagatagtttatgaaatatattgaactttgttaaaataggtaaccaaaataaaatctaattnttatttatttt

SEQ ID NO: 70650 - DNA, 238 bp, Arabidopsis thaliana landsberg
  unsure (1)..(238): unsure at all n locations
taactttgctagatagagactggtgcagcagaaaattttctttatagggcactacatcaattgcgcntcagttttctcaatctcagcaggcacaacacgcttggtagatatgggatattgctttagaggcctacacaacgcatgaagatataataagtccaaagaaaaactttcaacataaaaacattacacactatctaatcaacaaaaaacactttttaacattggtttcaaaccc

SEQ ID NO: 70651 - DNA, 527 bp, Arabidopsis thaliana landsberg
gcgcggttatccagaataatcccggtaacaaaatgctgcacaatatggcgataagcgaggacagtatgggcgactggttaaaaggatttctgaaattgcggcgccaccggcgttcatggaacccttgttgcggttcaaatgggtgattgcccggcatggatagtctgtgcccaaaccggccggagcgtggtggttcaatgtgcaataaatgccagcaaaaccaatagcccacaagcagggccgataaagctaaaaggtaaaaaatgatctttttatcccaaagcggatacacggcataggtgtgaatataaaacaggcaaagcagcaggcagtaactcatcattacattaacaataaaacgggcgcgctctgcagtgggcgcattattgttattatccatgcccaggataaaaggcaataccagtaacgacagccatactataaaaggaatgactgccaggaaccagcggttgtcaatcagttttttcacagcacatataaaatcagaaaacggcacatggtaacat

SEQ ID NO: 70652 - DNA, 436 bp, Arabidopsis thaliana landsberg
  unsure (1)..(436): unsure at all n locations
gaaggcaagggcagaagcaccacgccgacaaagcaacaacacgaaaacaatacgaaagatagaaccccgccgccccaacggggcggggggaaagggacaaaccaaacccggccggcaccaacaaacaggcaaangggacgaaaaacggacacccgaaaaaccagggaagacaggagaagagacaaaacacaggaaaccgaggggcgcagagaacaaagaaaaacgaagaggcacacacagaaacgccaagcagcacgaacccacaggggaagaagaaaagaacccacgcaagaaggaaggccagggacaaccaggaaaaacaaaagccccgcgcaaggcacaaagacaccacacacacacaaaaaagaaccgcagcacgcacccaaaggaggagccgcacgagaagaaaaacacacaaacgggcccgaaacggaga

SEQ ID NO: 70653 - DNA, 552 bp, Arabidopsis thaliana landsberg
acaagttgcacaactactacaaccaccaaattctcatttttaattgtaattgtgtaatgtggatgaactttttcagtctaaatctagaaacttgggacaaactaagcaaaaatgaacactaattatctggaaatttaactcttaaattaataaccaaaattttgtaagaaaatagtattatttatattttatcttcttcacacaacacaacacagcaagctccaaagtagctctgcaactgcaagtttaaccccaaagtcactgccacaaataaagaaagcaaagctaacacgagtgcagcgagtgttgaatcttccttctatggcatgatttccatttcctgttgcgttttccacgggaagacactgcccttctcttctttatcttctctcaaattcttcagttccttctcgaaatcattgatcttgatttgagctttagagaagagaagaacaaaatgcataagagaacatagaataagtagtgagatctaatcctgttcccatgtttttgtctataaagtagcaattagaacttcaatcttcaatttca

SEQ ID NO: 70654 - DNA, 630 bp, Arabidopsis thaliana landsberg
  unsure (1)..(630): unsure at all n locations
atcggggttgcgaagaacaaggtctgaacggttcaagagcttttgtagaagatcatcctgaaattgtatcgaatttgcaagctttgtttaatcaggataatggtaccggccgtgttgttaatattacgggccaaggctatttacatgcttatgattacatcggtcgctggttatcgaaagtacctgccgaatataagaaaggattagaaacccgttttcctggcgctccgggtggtggtggctctgactttgcctcttttgtagctgcaggagctcccggcttctctctgagttcgttaaactggtcgtatggcacttatacatggcatacaaaccgtgacacttacgacaaaatcgtatttgatgatgtgcgtaataatgccattctggcggctattttagcatatcaggcaagtgaagacccaaacagaacctcaacagagaaaagtattttaccattgaacgacaaaggagaagcaggtacatggccagtgaaaaggtctccgacacgtaaaggtggtttagattaatacttaaacatgagtcatcccgaattttgagtgagggataaattgattaagcaatttgagatggccaatctgaatctataannnnnnnnnnnnnnnnntc

SEQ ID NO: 70655 - DNA, 417 bp, Arabidopsis thaliana landsberg
tcaatgatatgggtttaactacgttcccttgacagattcgttcatgaggaaaccttgtctgacaagaaagcagggggtttttactccacaggttctgttgttcaagtgtagttttcaaacccattactatagctatgaaagtatttgttaggaattatacggtcaatgctaaaatggttcgattttggtatttgtccaaaagcatgatttccatactctatggacctaacagcaagcaactaagtatttccaatatatcaccaagaacccgtgctagactcctgtttcataagctctgaactgatgtgggatgacacgggcctcattatattcatcacattacccctttttcttacgtgaaagagggatgttttaaactcacttccaaatcccgggttaatctttataggatggtaa

SEQ ID NO: 70656 - DNA, 497 bp, Arabidopsis thaliana landsberg
tgggaaaaaaaaaatgagaaccttttctttgtgatctgatctttagtttctgtattgagtattttatctgttgatccttggtgagttatttgattccatcatcaaaattttgtctttttgaatagaatcttcacttttgcacttggaggtcgatgaagaagaagagatatgatctagtctttcttcaaattgagaatcttggggtggttgttgactatggtctgacagaacattggtgcttgatcctgctcttaggtctttgggggatttgcaaccacgctcaatgaccggggatgtcatttcaattgttctgtatagtctcctatattctggtgcttttcagagctcttggggagacggtcttcttggggcgagctttttttggcgctgcaggttcgctgagctgctttttgaaaatagggtttttaggactcatgttttcttctgttgcttgccactgctatttgtatgggtttcttgatctttttatggaccat

SEQ ID NO: 70657 - DNA, 133 bp, Arabidopsis thaliana landsberg
ttccatggtttaccattgtagcaaaattaagattttcttcctaagaaactgaaattggagtatggtgtctcttaacatacccatgcgactttctattttgtttatccgacaatgtacatggggataaccacat

SEQ ID NO: 70658 - DNA, 3127 bp, Arabidopsis thaliana landsberg
gttgaccgatccctatctctggtcttgaatattcatatcctgtagattattataaaaccaatgaaacctgaatgccatggtctactgatttattacttcaaaaattaaagcctagcataaaacacagtaagcaatacgacatcgatgagtccatatacactgtcattttagacaaaaggaaggcatttcagtcattttagacaacaaaacatcaacaagcatatgatttatgcatattggcagtaagttaaaagattgtgtaaagcctttcatcgaagatagcactactttaacagcttaaaaagaaaccttgactggatggagttttgggaaccctagagggaagcgacttgacaactcctgtaatgcaagtagtatactctgtcttgcttccactggccgaagatcagaaggaactgatatccttagtctgctcaaagcagaaattaagggtagctgaacaggaacctgaaaaacgcaaaagcaaaattctcaaaactccagcactcatgcaaatataataacatgtaagtccagtgacaatgaaaatgtgctcaccacatgcatttcacccttttccccagcacggggaggacatggctttggctttgcgccattttcactaaaaccagtagagcaatgaagtagagtatccactatatatccgccaccatgtgaagaggcggaaccagttccaactgaagaattttttacaacattaacgacaactccccagccccaatccgttccaccttctcttattttaacctacacataaaacacttgtcccataaagttactgtgaagctcctgttgtttcaaatacttacagtcatatacaaatatacaatacatttccactgtataattagctttaatttttgaccaaagtaacaaaccatcaaagaattttttgtcataacctagaggaaaagcatgatggaacaacccatgagcattcaacttttaaacattatacgaaggtgattaacatgtaacgatctgggtacaacctatgaccatagctagagaggaaaacatattgtagagcttggttactaacttttcttctctgatcatagatgagaacttatatgagattataatcagtaaatcatttagagtgaagtatactatagctttagaacgtgatattttttcccaacataaggagtaataacaaagaaaccaatctaccacttgcaggttgcagaatggaaacaatgacttatatctctaggctttgatcaagaatctgaacttaatgtatacttaccagccgaccagtatcaagaaaacaaagcaccctttcaggcctaattatttctgacataagtttcttttcatgtttagcaatgtcaaattgtagattatggtattcagcaacctccgcctgcgaataattaaagaagtgagaacagacccaaataatcttacagacgtcatattataatttcctgagagcacctctccagaagcgttaagaatggcagcttcctcttcaagtttggacaccttattcccaatatccggtaaagcctgaggttggaacaccagcgtaaattagcataaaaaatttgtagataaaatttagagagtaaaaggaccatccaacagctaccttttcatgctggaattgatggaacgagtgccttataacatgctcagcagtaaattgtccttcggcacgactcaatagattcaaaattgtgtagtaactcagcctaaaagtactaagcaaaggggctggttttcccaacatcatgtccctgagtgtattcatctccatctgttgaagaacaaatgaaaattatcctatgtcatataactatactcagtagagataataaaggatcctcttcgaagacagtataaaagatgctatcctttaatgcatataatttgaaaataataaaggatgccgtatattcctatgtcatataactatactcagtagagatatatcggatcttcctggatgggaattactagttggttgccggtaattgatgtaattatctccaatcaaattacttataaaattacctgttcatcaatcataataatgcagatgccacgctcgtcctttccacgacgtccagccctgccgctcatctacaagcattcaatataaacagacaattactacaatatcattttgtgatattacatcaaattcaccacttacgtcaacaaactaccacccacctggatatattcaccagacccaatgtaacgatggctgtcaccatcccacttcttaacagcagtaaacactacagttttggcgggcatattcaaacccatagcaaactgttacaagagcagcatttgaggaacaatcattaattagcacaaaagagcgtttaacagctgaaaaagacaagctaattccaaaacacttacggtttctgtggcaaaaagcgctttcacaagtccttcctgaaaaagaagctccactaattccttgatgacaggaagaagaccagaatgatggacagcaataccacgttggagcagtggcaacatcagttcaatggcaggtaaggatctatcctcttcattcaagcactgcattgcattattaaacacctgttccacaacttctttctcttcatctgtattaaaatcgagttttgacattgacaatgcatgctgttcacactctcttctactgaagctgaagataatgactggttcaaattttctctccatgatcatctgcaacaacaaataagagtcaatatataacttgtgccttgatactacactcttggtaccacctcagagcaataaagtaaaacttcaagagcagaagtatgacgtgtgatcggcgccacaagcagcaacataggacaaccataattaatatacatacctttacaattttgtaaacatcagaatcaccagggccacctccacctttagcacccctaccaccagatttgccattcgcactctttttcccatcattagatttcggtttggggaaagtatcctgcatcttaacgaaactatcctcccgacacctgctcatctatcatcaaccacaaggtacagtcaacccccacccataggaaaagcataatgctgcagaggtgttggcctgaaatctgtgtacaataca

SEQ ID NO: 70659 - DNA, 625 bp, Arabidopsis thaliana landsberg
  unsure (1)..(625): unsure at all n locations
ggtggccaactccactacataactaatatgcatacgtttttaaaataatcaaagaatcatataaatgtttgtagttgatatcacctactccaataataatcaattaatttttatatattacgacgagtgtatacgccattatacaccaaaatctaaatctggatctgtgtcaacattttgtatggttggatgcaagtaaaaaaccatcaaatactatatgcttatgactattaaataaatattgcatcaaagtgtacgttaaaaataaaccaaactctatatatatgtatggatnnnnnnnnnnnnnnnnnnnnnnncactcgatcactttttcttctcggatcctttcccaccaaaaacacaagcaaaacaacaaagactctctatctatcttctctttcttctttatcggttattctatatattaacgacattgtaatctaatttgcactgtcttcaacattctctttttctatggctcctctccctttcataccggaacaaacccgttcgcaaacgcgtttatcttcagacacaaagaagaagaacagaaacaagaaaacgttccaccaccgtctcatacgcaaaagataaagcagaagacggtaccatcaacatcatcatc

SEQ ID NO: 70660 - DNA, 475 bp, Arabidopsis thaliana landsberg
ttgcatcgcttgtaactctagtttttcacttgcatcactgagtctttcttggacttgaattctttcaaaccccaccaaaagaaacagaacaaacgtaagtaaaataaataaataaatcaaacttgatgttaaaaagttctcgaaagtttttgagttgggaagtatgcttactaatgatgtctccgacttggaaccgtttattagaagcccaatcattgaaactctcagaagaatttgcaggaggaactacccaattgagtttgtgttcatatgaagagacagaagctgaaatcgttaatacaataacaagccaaagaaacatatttaaagtctcagttttgatgttctgcgcctcagaatgatcagcaaaaatagagtaaatcctggctgataaatttcggatttgataagaaatggagtagggttggttaccaagaagggagagatggagatagtggagagatatgtgttagtg

SEQ ID NO: 70661 - DNA, 374 bp, Arabidopsis thaliana landsberg
caaatatactattgctatcccatttgtaaaatgaggtattaaattacgattaaattattagcttgcagtgatcgctgattctttttaataaatttatttttcataagagtttttgttaagttagtaaggttcttctgtcgataaaatctatagaaaccactaatgactaaacctaaaaacatactttttgttacttagcaaacaactatttattgaattcgactagtcttcatatatactacgatttgtgttgaactttattattttttgatgatttcaacaatagtaaactattatttattatgaagattcaaataactcatggaattggaagattcaaaatcttctattgtgggatcatcccaagggtatat

SEQ ID NO: 70662 - DNA, 534 bp, Arabidopsis thaliana landsberg
  unsure (1)..(534): unsure at all n locations
ctagtcagtctttnttccctcagccctggggaatacgtgagctctgtcttctagccttaattatgctggtatcctaagtaaggagatggggtcgatcacgaccccactgttatctaatacgaaaaacgtgtcgtattcgagactgcccagtgtgtccctttagatgctgatctgcagctacacgaaagcgatggttggttacggatctgcgaagacactgtcgtttttagtacgggcaattattccgatgtctggaagaacaatgaactgaatatggctcgcagacgctggtacccttaaatgtcttcactcgtttgagaacactccgaatcacgagtggcttagctnnnnnnnnnnnnnnnnnnnnnnnnnnnnnnnnnnnnnnnnnnnnnnnnnnnnnnnnnnnnnnnnnnnnnnnnnnnnnnnnnnnnnnnnnnnnnnnnnnnnnnnnnnnnnnnnnnnnnnnnnnnnnnnnnnnnnnnnnnnnnnnnnnnnnnnnnnnnnnnnnnnnnnnnnnnnnnnnnnnnnnnnnnn

SEQ ID NO: 70663 - DNA, 2650 bp, Arabidopsis thaliana landsberg
cttaaaatttataaagtagatggaacctctacatacgtcttatggtaacatttggccaagctctagctaatccagactgaaatcttcaagccatatgataacttcgttcctctgcaaatgcaagacaatcacaaagaacagatgagagccacgaatcagacgaaaatgatagaacctgcgactgaagacaatgatcaaaccatcatttgggtatctcatgatgataataattaaaagaaataagactaatagatggtttctaactagacatcaaatattgctaaagcttggaatcataccattatgaagttccatgttcgtcctggatcgttgtaacgagcaagcatacaacctttcttagctctcagaccatctttactcagactgctcctcagttcattctcttttgcttggacaacatcctctgtcggtttaccactgaatttcactgctgcagcaaaaccgccttccaacttcttcaaatttaccttttcttcattaggcattggtaagctagaggaaaaaggaaagcaaaaccattctcatcacacaatgattctcattaaccatatctgatgtcaactaaaaaactatccatgataaggctttacctgctaagatcttttcctgatggaataacaatttgtacagagacatcagaagagagttgagtatctgttgtttgagtaaacactggagttgtcattggtattttctccatggtcgagttctttccaaatatgtagcttcataggtaaaaaagctagcatgtgttacatttatcaaaataaaacaagatgccagaagaatttatggacactcacagaaacttagacttaaccctcacccagcaacattgttgaaacctgaagaaccagaaagcttgtcaccaattgtctccaccacaatgaagggctcatagtttctaacctgccaaacaatcaaatccaacttaaggcaagcaaccacatttgcatagttggttccattaagccaatacatgaagatatgtgacctcatagtttgctgttcttttcagtatttgatactttggagtttccaagtctggcgttttatatatccgtaactgcaaaaaaaggtagtacttgtaagatatgattaaccatttctaagggggctcaattcatgccaaatgccaagaaagcaacctgcttaaaaacatcaacaagaccttcaagagaaaagtagtcattgttcttgatagaatcccacaagtcctgcacaacatctacttgtaataagtagaccataccacaatagattttgcaagaaggacatggcaaccatacataccagatgactacaaaatttgttagtttcaggattaacttccatgattgataatccagtgaagacaagttctggtttccatggtaaaggtatgaacttcatcaccattgtccatctcgtagtgatctcatatggacctgtctatatatcagctgcatcagtgaacttaaaaaaaactagaattaaagaaatcaaatgataaacaaaagttagcaaagacctgtttagcccagtgaagctgaaactgaggagtgaagatattcttgaggaaagcaatgttgaagagatagccagagatggtgtcgtgcttagtgattgggtctctgaacttcacgcgctcatcgtacgccgttttatcgattccttggtcgtcgaaaaggtgaggaagatcctcgtacaagaatccgacgagctcttccatgttcactgtcgacggtgctgaagccacttccttgcccacctcaagactcaaaattggccgtagacgagtggttacgttgcgtctcggaacagggaggaaactggtggttacatgccgccggcagtcactgccgacggcggtgagtattggccggtagagctgctgattaacggtagccattgatcgttgataaaaaagttttctgctctattttatttcttgtggttgttcgctttcatttaacaatcggttcttttttggtactgtcggttcggttcggttctggttttattttcgaaccaaactaaatttgtttcggttaaaattcagatttttttttcactctttaggcttttttcattatggaactttgacttaacgaggcccattccatttgggctactggagggaacttaactccaacaatggattactttgcttgcatacattaattacatacgtacccagaaatgagacagagacacgaaagtttcgattatacggcaaagtaaatattgttttagtttatccgtcaaagattgtaaagaatacgacgaccatgccataaggatttggactttggttgtttgactaataaactgatagtcttcttaataaatataaattgacaagttgtaaaatcagcagaatttgctgcatatagacaatgtcaaatggaccggtggtttatcgtaaatgtcaaaatcagaagctaatgagcaaatgtgaatgaattaagacgcgaatcgggaaaattcaataaattgtccattgggggaagttttgggtggtttttaaaaagattgaaagatgccgaggtttatacccttttcctatcaagaatattccatggaatccaactacttttgaccaatttgcgaaattgttaaatcttttcagaaaatcaaaagtgggtaa

SEQ ID NO: 70664 - DNA, 173 bp, Arabidopsis thaliana landsberg
tatcttaccttttttctactatttttatatcgtttttacaatgtttccaactattttcctatcgttttttattgtattatcaatccatttaaatatattctaattaatatgtaataaaataaataaaaagaagaaaaagtgttaagaattaagaatctgaaataaactagaag

SEQ ID NO: 70665 - DNA, 592 bp, Arabidopsis thaliana landsberg
tgggtcctacttaaagcttccctcatcaaaacccatcttcttcttcttcttcttcttcaccacttttactttctccttctccaatccctcaaaaagctcacatcaatggtacatcttctttttcaagtaccgcccataatccccaatgattaaacccttttcatttcttcattcctcgagaaagttaaatgtcataatctaaaaacccttttctttttttccacggatctgttcttaatctccataaagactcaaactttctttgaaattgctttcaaagtttcgatttttacaatggtttcagaagcttggattgtgaaaatgagaaaccaagtaagttctaatctcaagcacgctcttcttcttgaatcttcttccactaagaaaacccctaaaccagtctctcttcctaaacaaacaattggaatcttatctttcgaagtagctaacgttatgtctaaaaccattcaccttcaccgttctctgtccgatacagagatctctaagcttaaagccgaggcttttcactcggaaggagatagaaagcttgtatcttccgatgagaatcatcttttagatctctctgtctctg

SEQ ID NO: 70666 - DNA, 2842 bp, Arabidopsis thaliana landsberg
aattaaatgcaagtgatatatttaacgtgaggttgtaagatctagacgcaatataacgtgtgttgcattaataagatcttgaaaagctgtctttgaagtttttgcattagtatattctcatggtacgcacgtcctaggaactcttctgtgatgagtttttctttaattagcttgcacgtttgtattgtatatacggacaatatcaatgatcaggatcaaacgtatggttgttagaatcaagattcataggagacatggcaagatcgctcaagaaatcagtcaagttgagcctaagacatgtccggatccgttcttcaaccatcaggtttaaaccagactctagttccatagaaatagatcagagaattgagtttctcggagaagaggaaaccgatggcgacagcaccagtgagtatgaagagtttgaagaagaggaagaacgaggaggagaaggggaaggagaggaacgagatgatgattgcaagatcgttgagagcggttacaaaagtgaacacgaagagaccgaagccgcggtggaagcagtagaggcggagattacagaggccgggaatagggtgatggtggtggttgataaagtgattgcatcaactggagctcttgagtgggctttgaaacatacactacaatcacaagactatctttttcttttatatttctccaaaccctttagaaaaggttattgctctatcttgagtgttcatttggcaattttggtttgactccttgagatatgaattctaaggatttctattcgctataggaaaaaggaagaaccggaaaagtgaagtaaagaccgatgaacttgttcattctcttaaaaaactctgccaaacaaagcgaccaggggtgagtccaaattctaacaaaaaggcatttgctgcgtctacaatcgctcaaatttgacggattttattatgcctatatataataacagatagaggttgagataagaaggctacaaggaaaagagaaagagaaaggagagaagatagtggaagaagctaaagaacaacaagtgagtctattagttgttggagaagagaagaaaccgccagtgtggagattgttgaagagatggggatggaagaaacggcgaggccgagccggaactctcaagtattgcctagagaaggcttcatgtatgaccattgcggttaaaccaaagaaccgtaaacttggtggttacttgatcacaaccaagcgtcacaagaacttttggctcttagcttgatggttaaaaagcaattttaggtggttactttttttttttgtttttcatattatttggagagattgattttagtatagcttgtttagtttgattaagacatttcgtgtaaaacaaattcaaagtataatacaaaattggttattaaataattcacaacggagagaagaaagaaacaaaaaataaatcaatctatcaaatattaatcaagagtaatgtaagttatctaagacaattattatcatgaatgaatgcaataaagttgacaagaaaaagaaatttagtagtccaggctgttcttaagtaagttcaagacttctttgtaagccaatttcttggccattttcttatcagaggcctttgctgtgtgagcaaaactcatctccttagctttcacctcaaccgtgaaagaatcgaaatctttagctttactcaactcgaactgccacttctgacataattctgtcaactctctcacaggatgcaacttgacagtctctggagttatcatacaacccaaaagtggtttaatacttgcaaacactacttccttgttgtaacctgagtcaacaaatatcgcgcctgctagagattctatcacatctccaagaacctgatagcgagaccaaaaaaggtaagccgttaaaggatttgtgtacacagtcgagtagagttactatatgtggttagattaaactctgttaccttaggaaaagatatatcggattcccatccgaaagtggattgcaaagaagactgttcaaactcactgacagttctagagatgtgcttatggagatgatgagaggcgtacaggatgtgtttgtgcaggtttgctttcaccgccactagggcataacattcattgttaacagaagctgatcgcatgtcggttaatagtccaggggacagacaaggatatttgtcgtatagatgcttggttatgagataatccaatacagagtcaccgaggaactccaaccgctgcagtagagtcaaattagtttaatatatgaaatgctaaaagaataacatgtatatgattaacttcatggagaagtgaccggacctgatagcatcttggaatttcaggcatcatgtatgaaccatgagtcaatgcttcaactagaagagacttatcctcaaaactgtaattcaacagcgactccatataacctacattcacaagcttctctgcttgtattggggaatctctctggatcttcgtagttgtaaagtcgacctttataccaacccaattcatgaacatcaaagctgcaagttcacctccctcgctgagatatgctccaattaatgattctacaacatcggccacactcttgcgtttcagattcctcctactagcaacgtatatgtttctagactcgggtagagtatcgtttacaagtgaataagctgcagatgattgacctggaaccatccaacctttgggttcaaaacactcatcgcggataaatccctgtaatcaaagaagataattttacattgtaagtcttactccatgaaattaatttaagactgaagatgttcacctgaagtttctgctgacatccaaattggcagagcatgaca

SEQ ID NO: 70667 - DNA, 3086 bp, Arabidopsis thaliana landsberg
  unsure (1)..(3086): unsure at all n locations
aatagtttagcctagtaaataattatactagtttaatatcataaacttttggtatgagaggataaatgctgtcaaatataaagttttataaaacaaaatattttaatgttatggataagtttttgacttacaaagaattaaaatggtatgatgcgatttctataattagtgtcaaagcatctaataacaataaccattcaagttcttagtgttaaaaaaaaagtgtttaaaatcaaaagtttaaacactaattgatactcattttacatattaatctaatacttgtattggaagttttgccactatctattaattatatgtaatttactttttgggacggaaaaaggaaattgtggattggttaaaaagagtgtaaaagcaccatatagtagcaaaaagtaaaagataactacaagaatttcctaactcctaacgaaaattaaaaaagaagaagataatttctaaattaaatttaacagaaattaaattaacaaataaaattataatcagagagaatataaaccgtcatgatcaacaccgcgttaaaattaattggagagcaagctattagcttaagctatgtatctttaattaattagaaaaaatccgagaaaaaaggaaattcaggtacacgaatttatttaagaaaaggataaatacgctcttcttttttataaagaaccctaatgctctcacacaatcaatcaaaccaaaaagacttctcgtattcatgcctctccctcctaagaaaagaaccctaatttttattatctgcagaaatcatcatcatgaacgagattcatcaaccgctggcgaggagagtatggagaagcaacgtcgatgaagagatggctcgtatggccgaatgtctcaagcgattcccactcatcgctttcgatacagagtaccctggcattattttccgcacttatttcgattcctctagcgacgaatgttacagagccatgaaaggtaatgtcgagaacaccaagctgatccagtgtggtttcactcttttcaacgccaagggagagatcggtggtgtttgggagattaacttctccaatttcggcgacccatcagacacacgcaatgagctttccatcgaattcttgaggaggcatggtttggatttgcagaagattagagacgaaggagttgatatgttcggctacgggtttttccctaagcttatgactgtgtttcgttctcagaaacacgttgagttcgtcactttccaaggagcttacgatttcgcttacttcttgagtatcctcaatcatggcaagctaccagagactcacggcgagtttgcaacagaggttgtcaaagtgttcggtcaagtttacgacaccaaggtcatggctggattctgtgaaggactaggtgaacacctcgggttaagcaaactagcccagctacttcagatcactcgtgtgggaagagcacatcacgctggttcagacagcttaatgactgcacttgtcttcatcaagcttaaacatgtctatgaagattccagatttgctagaggattgatctatggaattgggaaaagcaacctcgttgccgcccctgcccctgcccctgcgcctgtgccagagccgactcttcctttgatgtgccagcagaatgtagcttcatatcctgtgttccacaatggatatgtccagaactatgagcagcctcagcttgtctcctacgatccttcaggtgccccatgggcgttctgtaatgctaccggtacgtatgtgcagcttactcatctacctgcaagcacttttgcatacccgtctcagacgccatctgctactgttgattatcttggaccagttcctaattattacaacaataatgcttgctacgtagttgagtagattgagatttccccagctttaggatgattagatgcttctgagcttttttcttttttttttttttctttttcttttctggcttttggtagtagtaatgaagactttatttttatatatgtatggattgtttacatggcttcactttgagtaatgcctgtctgcaatctgtgatatataaaagaccaaactattttacataaaagaccaaactttcttcatgatttgatatttttcttttccacacaaactgctatatcacacacaatgtttaccgtatctatatatggtttcagaacgatgaaccctcaaagctttggaattactattctcagaatcccatccctgtttcaaacgcaataataaattggatgttagtgctctttataaaacttgctaaattctatctaaactaattcaagctaatgactgactggcactaagatgtaaaattggattctaaaacgactactttttaggtgtgcactactagctaaaacctacaggcagaatctatcattatgaactctaggattgaaagatttaaggagaatagttgtttgatcatacggttagattgttagtaagtatagcttctacttacataaattcagcggaaacattatccttgttcacattgctggggagtggccaggaaactttgaatggtccttgtagtatttcttgcttatgatatccaaggatcgaagctttggtgcctgcatcaactttttgacagatagatgtgcgtctacctgtcacagtcaagctgcagcagaacggtaagtacctttgttacacaatgcatttttactgtgtgagtaatgggaacagattgaaaaaagatgtgtatcagcaggattactttgtgttgtcaacctccactcttatatcattgatactggctcctggtagctctattgccacaacatagctgtgtgtcgattcagcaacattcgatctgggagaccaaacagtacctgcaaaaggaaaaaaacttctttaagtaagttctcatgttcatttgtacggatttgtttgaagtacggatgctagtttctgtagatcaaggctggtgagaaaccacctttagtagttatacctagtaatatntgtgtgtttgtaaactacagaaatcattaagttctctaagaaagtatcaagtataataggactagaaaagtagtgttattggagtgggatacacctata

SEQ ID NO: 70668 - DNA, 883 bp, Arabidopsis thaliana landsberg
  unsure (1)..(883): unsure at all n locations
aaaattcctttttggttgttaaaataaatctcttctttccaccgttttgaaccattattaggaatatttttacctggtgtccatcgattatgtctttcggcctgatcatagaccgtctagacaaggttatgcttgtgatattttcgtttggaacacattttatttgacagtttttaaaatttggacgttaaataagaataattataatcgggaccaaaacatcatttcaatgcctaaatgtagtgctaacttctaatatagttctgtatgaagagcctaaaaagaactaattttataatttgtgtgtgatcaaaattgcttaattggtgaggaaacaattatagtacttaatatttattttgtaagatatgatgattgcattaaaaagtttgaataaaacacatacataggtttgcgctagaggaacacttggttcatgagagcaaagataaacgctacgctgttgtcgcattcttatacaatctcggagcatctgacccttttctcttttcggtattgcaatctcaacctccctactaattgttttactaattgaacaaaaatagtaactcaatatattttttattgattagttggaaaaacaattgaagaagataactgatacacatgcgtccgaggaacatgtcggaatcattgatcccaaaaaactcagttttgaataaaaacattattatagatattccggatcacttactgctcctccatgttctgaaaatgttatttggtccgtttcaaagaggtaactattaattattttcaatcccgtccatttgggttatatatatatagctatatagnnttttcatttcaatcctatgattatgtattttaaataaataacctagttaattaatatagcaat

SEQ ID NO: 70669 - DNA, 572 bp, Arabidopsis thaliana landsberg
ccttcattctttcgcattaatcatttagggtctttaattatctcatatctgtttcgttttctctcttttttgtttggtacattttgtggctaaactactttggatgtctattcttgagaaggatgatacttttacattatgaacatgtatatacataagattcaggcgattaaaaatagattttccacaagttacttaaataaataaaaatcacatcatatgcattgagtttgtttatgtacaacactactttcgtcatctagaccacgttgttagattaggagcacaaatattgaagcaagatatttacttatttaccaaaagaatcacgacattgaatcttctttcatttctctcctcaagacatagtagcataagaaaatgaagatatcatcactaggatgggtcttagtccttatcttcatctctatcaccattgtttcgagtgcaccagcacctaaacctcctaagcgtaagcgtgcgccagcgcctacacctcctcatcctcagcccacatcagcacctacacctcaacaacaaaagcccaggccagcaccaacacctcctaaccc

SEQ ID NO: 70670 - DNA, 521 bp, Arabidopsis thaliana landsberg
  unsure (1)..(521): unsure at all n locations
cgtcgaaacttcatccacgtatccgtccgttgtcttcaattccaccagaagaattctccaaacccagtacaattaaggggtaatatgtcgggaacaaccgaaccgcccgtgatatgttaaaaaaagagaacaagatagaaagaaatatgcagcaagtccctctttgggataacagccatggtctagtaacaataagaagaagtagaaaacacctgatgtaatcgcaggctcagtgtatgtatgtgtgttgttgcatgcttccatgtctccaggaaccaaaggccacagatgcaacttnnnnnnnnnnnnnnnnnnnnnnnnnnnnnnnnnnnnnnnnnnnnnnnnnnnnnncaacaagaaaaacttgacaaatctcgttacagagtggggaagggtatcatgattcgtagtgcgacatccactcgtcgccgtgcacagaggttggcaccttcttggccgtttcggtgctggcaatactgatgttggtatctcgtctccgagggttaaaagcggaggacgag

SEQ ID NO: 70671 - DNA, 2289 bp, Arabidopsis thaliana landsberg
gatcagatgatgggtgtcgaagataatgtatccgcagaacactattgaagctaattccgctgaatatcatcgatgatactttccccagagggtggaatatctgcattcatttcattgtttagctttgtgataatatatcccaaaactttgaatagattgagagttactgagttagtacctgcaaaagggtgaagacaaggataatgaggagagcaccaaagaggaatggtccaaggaaggagaaatcatgtcctctcttcactgcccagaaggtgtagatcgttagaccaaagaccatcacagctgtgagaattgcagcctccagaacaatcctccctgttttcacaatacttggaaattagattctaaccaaatggtgtaactctagttataggaaacagagttaataagttgcttgacaaaaaagcatgaaagcatctcatgccatgttcctctttttcatgattcaccatgttaaagccaacaagatactaaatttcaacttttatggttaagaaaacagtactatctaatcaatatcacaccaacactagtgttggttgattatttcaagcagagaacaatccaaggcaaaatatgacaaatggtttgtcttttaacaacaccacaagccaaccaagtgtgatatatctctgtatccataccttgggagagagagcagcaaatccccacagagaaggaaatggagagagtgaagatggacaggacaatgcagtttatcggatgcttcttctcaaaagccaacagaggccacaacactacaacacacatcaaatccagatcactcagtgaaacactctacaaactaagtggatatatcaaatcgttaacaacacagtagaatttaaacgatgaatcaacggaacattatagtttcacaacatcaacgaagctagagtagctaaagtgaacactatatcgatcaagtcgcaagcttttttagtgaaccgcacaaataaagcaactcaaaaccctaagcgacgatgatggaacctagaaatgaatggataaacaaaagtatgtgaaaggagacgtaacggaggagaggaaggaggaggatgacgaaaaagacggcaaggccacggtgagtctcggtgatgaactcggggatcggacggacgaagtaaacaacggcggagactccgacggtgacaagcaactgaagagacaaaatgctgtaaacttttcttatgaaagcccaacgaagctccgagctctctttcattcccggatacagctcgttaccaccaccagtttcaatgtcagatttcgccatttttgttgttgaaatcgcaaaaaaaaacaaagctctgaagaagaagaagaggtttttgattgtctgaggaaactacggaagaaagaaagtgacggggaaactaaagggtaatgctggtgttactgttccgtcactgtggttactctaactacccaattatgtttcgacacgtggaatacagtggacggcgtttttccgcgggtgtgtgaatgtgacactgactgtgtaaccaaacattgccgggaaagtatcggtttttcatttttgttgaatcaagaggtgagttacgggttaatttacagtcactgaaccgtcataatggatctcgagacgtaccaatgatcttaagacacgtgttctatctggggctgctttataactgtggtgttaacgggtacgtaatttttgtcttatttatttgtcgtaactcaaaatatatgcaaatggaaaggagactattactattcttgtactatttatagaaatgaatttgtacattgaaatgctatatatttaaaatagcggatatacagtaattatgatatctatgccaattatttctttaattttccttttttaaaaccaaaaaaaagagaggataaaatgtatatcaaatgacgatctagtgagttgattaagtgttattaatgtatgattttaagagttttagaaagctcactgtataatcgaaaatttactttaaacgagagacctacagtgaaacagttcataatctgatagagtttgttctttagataacgcgttagaatcatttatcaaaaacgttaaccaatcttatgggttttggttattaattactaaactaaggctttgtttaatctcaaaaggtttggttttataaataacttgtacatgtggatcaagccaagtacttaacccaaaagtctcgagagcagagtctgtacgatatcgtaatggtgtaaactgttttaaaatctaaaaaattctgaggccaaaaaactgtgtcattt

SEQ ID NO: 70672 - DNA, 536 bp, Arabidopsis thaliana landsberg
agtggattaataaggaattgctaatagtaaagtcagaaaagagggatttccttcttatgatggacatcgccacctttcataagacgaagcccatgtcggaccttctatgagagaagaatatcatagttatactaatccctccgggttgcataagccttcttcaaccactcgatgtatctatcaatagaccttttaaagactggcctcatgtagagatagagctatatatcgaggaacgcgaaaaacggggcttaatagagtgatcaacgagagataagagggtcatgacgacctgggtagttgctcgagctgctgcatggcttaaataacgcctagaattagtggagaagatattccttaactataggataaatatcaagccagacggcacccaagataaccttattcgcattaaggatatccctcttgaggatattgacttcataggttgggaatcagctgaggagatttacatcaagcaggaagagatcgtggaccagctatgtgatgaggaacagattgtgacgatcgtattg

SEQ ID NO: 70673 - DNA, 371 bp, Arabidopsis thaliana landsberg
gagagcttccaactaacagtcgccattctgactgatgacttggacgaacactcccaaaagacccttgtgggaggattggttaggaacagaatgccggacatactggaggactcacatatatgtacccagacaatgtactcagtgtgtcacggacaacatgagatcatgactgtgcgtaaagtattgcaagacatcaatatccgggggtcacactcatcatcggttatggaggggggtaccagagcacttactaacgagagcgggtgtactaatagtgatatgctatcgttcagtatgatgccctctcacacttgtcaattgtaaatgtatgctctcgaaattggaccatcaactcttatataacgcgcaat

SEQ ID NO: 70674 - DNA, 599 bp, Arabidopsis thaliana landsberg
  unsure (1)..(599): unsure at all n locations
cgtngattataaccaagctttgtcaagttcttttaattattgaagaatgtttagaactaatggaagaagatgatattttcaaatctctttttggaattcaaatcaaagctaaaacaacagatttgtaggcataaattctattaattaaatagataaataaaacaaagtagtaaaaaaaaatattaatataaaacataatgaaataagcaaatacaacagaacaatagtcgaaccatgcatgacttacaaagttattaataactatttaaattccaacttatttgttccacataaaatgattggataaaaacttgctcgtgttttgtagaataccatagtgtacattttaacgcattattcagcagcatccgatgacaagtgtcgttggtgcattagctgagaagcttgtttgtttctatccttgtattataccgactcggtttactccaaagaaatagaaagaatcaaaaatcaagacattaatgtagtaaagtccattgactaggtggttgtatctaatccgacaatttgtttaaattaaacggtgttgatcaaagaagtttcttaaaccaatatttgatatatctaccgacttttag

SEQ ID NO: 70675 - DNA, 500 bp, Arabidopsis thaliana landsberg
atactattatacatgttgaaaaacatctagcgccctatatttgactttattttaacacaaaatgaaaaaacgaaaaaagaaaggtggttaggtaattaaaaataagaatgaaaaaaaaaaaaaaagagagagggtaatgttaggataatacactatagaagtgagaatgacgtgaaaccctaattaggaccaagactcctttggaaatggcctccaacgtgaatgtttgttgccttgaaagacattcacatcaaaacttcaaccaatctctcctccacacacacttcctctttatactattaattaatccacattcactattttaaacttttgtaaagtgattatgagaataataatgttggggaggcccgagttttcatgggaagacactgattaaacaagggactgaattaagaacttgggataattatcattatttttctcccgactccccctatttaaagaatatacaaaaatcttgacagaatctctgcgaagca

SEQ ID NO: 70676 - DNA, 561 bp, Arabidopsis thaliana landsberg
aaaaccccaatccaaattaaaaataattctttccatcaaaaagcccggaaggggggggggctttaaaaccaagttaattcggtttttgggggaaaaaaaaaaccccaaaaataaagggtgtttaacccccacctaaccactcaaaaaaaaaaggggaaggctttgggggatggtaaaaggtttttgcttttcccctatttgggcccatttttcattttggggggccccccccttttggggttttggtcctttttaatttccaaccccatttttgtttaaaaaaaattttttttttcttcaaataaaacttctgactacgggaaaaatggataccttaaaaacaaacttatttccaacctttgggggggggaaataaatttttcccggaagggaaataaaatttttaaccacgaaaaattttaagaaatttaaccaactttttccccccttggaaaaacttaaaacccctaatttttttcctttgaaccccaagggcctaaaaaaatttttaaattttttttttgggatttaaaaaaaagactttttttccaatttaaaatt

SEQ ID NO: 70677 - DNA, 489 bp, Arabidopsis thaliana landsberg
  unsure (1)..(489): unsure at all n locations
caccaacttcgatttatgatatcaacattttattaagaaaaaacaattaaaatttgaaaaatacagtaaatgaataagaaaacaattaacacgattcatgagtcttgtttttggaatttgatattgtatcgttgattgcattttcattatccattgaacttgagaatctttacctttaataggaacaaaaacagacgttctttttcagagcaaagacaaactgtaaaaaaatcataatagattattccctgtttttaataattaaattattgataatataaaatttatatacggtttggagaaatcgtttttaaacttaatatttaattaagctgaagtaaattattgtacgaattcaaaatacaataagttgtcatgtaagaaatagaatcatatttttttccttacaaggctttataaatcaaagaattcatataacnttggatcacggcccacaacgaattactattatttatggacgctttctca

SEQ ID NO: 70678 - DNA, 609 bp, Arabidopsis thaliana landsberg
  unsure (1)..(609): unsure at all n locations
ccaaggaacaatttctatgattgaatattaacattatacgcgagcggttgaataattctgctgattgtttagtcattttgttcgtgaaatgatgctttgtcaacatcaaacattataatgataaattgataaccataattgtaattaagcaagtcaatgttctgattatctcatacgtgtaatttcttttgatatttactttttaagtactccaccgtcaccacaaaaatccagtgaatcgtaaatacaaggtttatacaagttctatacatgacacgaataacaaatatgacaaacaaatgcgttgggcgtgtttaaaagtgtacttttttcaactataaacccgtgtttataaataaatttgatgtagaaagaagatttttattctgtctcgttggtccaactgtccttccagataaatattctaagcaacaaagaaaagttttataatgatcaagatcgccaaaatatatcccagaataaatcaattatttcgncgaaaaatataattaattgttttaatacanttgaccatttgcatataaatctaaaaccatgtccaaaagctgctctaataagnatatatatgtttttttttcctcatataca

SEQ ID NO: 70679 - DNA, 2558 bp, Arabidopsis thaliana landsberg
tgtttacattcagttcatatagagttcttttgctcgttctttgctttgtacaaagatcagtacctgtggattcagactctactgccaagtagaaaaggaattacaaaaggtattggactaacttgatcatactgttaagataagtgaacttacctctgcaaagctttggcgaagagcaagaagtttcccttcttcacttccagcaaaaaccagcttttgcttgacggattcagatgctgtgtttctatattgaatagtaaaaggtaagatcattttgcttcaaaatatgttgtgaagtatctataataagcttcagtatcatactatcatgttttctatacttactttcggccaatgataacacgaacagcatcatgcattatggaacgtgcaagttcttcaacagaatcgggcaaagtagcactgaacaatgaacgtatgatcgaaggatttgaacaagccttaaccacacaatctatctgctttaacaagctctgctcaaacagcttgtcagattcatcaaggacaaggtactcgaccctgtattcaacagagataaagatgaatatgggcacaacacaaatagaaatacaatgtttatattctaacatatgatattgacttacttgcttaagtcaatctttttagccttgattgctcttttcaaccgcatcggcgttgatatgagaacatcacaccacagctttgagaagtcagctgttttgacaaggggtttagtcatcaatctaatgtggaaattgcttcctttaataagtttctttccttctctagctgtttgggcagccagttcccgagcaggagaaaggataacagctcttattccatcagttgaagggcgctaatacagcaaagaaaaaactcataaacatgagtcaagaaccaggatcggcgaaatctggagggtcttaagggcaaacacaatttaataccttgagttttataagcatgggacaaataaaagcaaaggtttttcctgacccagtcggagcacaggcaaagcattcacgaccctgggataaagaaaaaagatgataaaactaaatattagaactgataccccataaaagaattcacaaaataatctggacaaaggagttctttctttgctcttaagtgactccagtgtaataaatggaaaaggagtgaataagaccataccgataggagaattggaatagcctgtctttggattggggtaggctctttaaatcctagttcagccaaattgcgtaatatgtatccttcacagccatacctgtagatggattaagcattaagatcaaaacccagaggagaggaagatctaaacacataattagagtatgtcaatagactcaacgtccatgaaacaacaaatacatacctaaactacaaaaccactaatactatgagcataatatcaaactactgtaaagaaacaatccagttccacgcacctggatgacaactctgcgaaacttttaagcggcggtggaatattgttaccggaaacatgaatgctgtactgtttcctcgacaaagcatctcgctgccattataaaagagcaaacaaagtcatgaatctgtcacactttgcctttgatgaaacagagacaacatcaaaaacaactccaatacctccatttgacgattaagttccttcttgggattctctacaatctcattctttgtgatttgttcttctgctttacctttagcacgtgccttctttgagctcttgaacacatcgaatccttcaactggcactatttcaacatatcaaaaaattagatcaagacacagttagcacaaacctgagggaaacaataatttaacttttcagacttaccagaattagaagatcttcgtttcctcttcttagaggacacaacaactttctccgcctccggctgttcagtgtcctcttcttcttccacaaagaagttcactttcttattggaatcatcatcctccgtagaattctaacacatcaatgagacatttttaatataagaacaaagagtgggagtgagtagtgctgatttaaataacacatcagctgcagaactcaccttgaatttagcaaaatcaggagcaaacttcttcttattgaagtttgttccaccaaacagaaaatatgagcttttctccatctgtcaagtaaccataaaactctcaatacaaggcaatggaatcatatcaacatagactgaaaacatcagaaaataaatttaagctgagtactattcgattagagcagacaaaaaagggagaacgccaaagagaagaaacagagcagtagagaaaattaccaagagaagatattacaactaagtcgtacctaaatagagaaagagagcgtttccggaggagaggaaaaggcagcaataatggtaacaatagagacgaaattaaaaacgccggcgatgacactgacgacggcgaatagataccgagaagaatcgaagaaccagagatactcttgcagattttgggttttacaattagggtttggtgttttggttgatttcatataattttaagggtattacagtcat

SEQ ID NO: 70680 - DNA, 3250 bp, Arabidopsis thaliana landsberg
gcaccaagcctctagccatgtaattccaatcaaatgtccactctagcagctgatttgtttttaatacaccaagtaaaacgatcagcagaacttttctgccgtttacaaccttaaaacaagaaaatagtatactaacctcatttggatatcccaaatcatataccaatttcctgacagttccgtcataagcaagggactcgaaagtttcggacttgtattgggcaagagtgtagtccatatcaaagcctacggcaataatatttttcatattcagcgatctattgcagaaaatttggttgcttatatcaattttctttcctccttccggagaggaccatttatggggaacgtcacatccatctctggagcccacagtgtgaaactgcaacacattttcactgagagcactcggtttctgatcttccatcgaactcttaaaacacagctggcttgtccctgagagtttatcaaataaagtaaacatcattttttctgttcttcaaatgatgatatagcttttttgaacacacaatacaattagcgtagagaatagtacaaactctatccagcacagataataagaatatttgaaaataatctaggaagaaacaactggttagtcagaacccacctaggctaaaattagatacacagaagaaaacgaagctacctgatgacacgttctctacgagtggataagtgatttggaaattagtcaacacgagtcatacaaccattaaagctttggtgatcaagcatgattccactaacatatcttacctcgatcaaaaggatcaaagcgtgcaccacgttaagtcctgatcctaaagtatcttccaaggtatgctccaggcaaaacctagaaactgcaacttccacgattaaagatacctactaattaccacatcctccttcccgatctacgattcttcactaacaacaaactctgatttccagaaaactaagctactatcaaaattagctaacacgaaaatccatcggaagatagaaaccagtcatagcgaagtcactgaatatgcgattaacaccattagtctactacgaaaacaagagagagcacaacgaacacgaaaacggtctacaacaagaaatcaagcacgatgaagaagaaacctagctgaaacaagcaaaacgatgtagtaggaggaagagggaagacgaaccagtagtgtggagaaattctcttcgaggagctggatattttccaggaaaatgatggaaacgggaacgaggagagaaagtagagaagcagagagaaagaggaagcgagagttggcgtttagagagacgcatggtggtggttaaactattaaataggcattgaggagtatacgaatcgaattctgaagaaaggagaataaaattgggttttacaactgtaatacaactacttgggaatgccgtcgaaaaagtaggattcctactgataaaccactcagacatttaccggaaattcgccggcgaatattccctccgtttcaattgcatttactttttatttttttctcctttctctcggcggaactagggagggaaacgaggcgttgctgaagaagaagagatcccaaaagaagtagtgccacgtgacacattaaatcagaataaagacgagtacacaaaaagattgcgtggttgtggctgttaatggctttttaaacccaatgggcttttaacctaaactaaatgggtcgaaaataaagcctagttctaaaacctcacactttattgctctcttcccgtcttcttccccatttctctccatctctcacagttcatagtttcgcgtaaacactacgcgccgccgtaagcttgactatctagttcaagtcttccgtcatgtctacgacttcctccgtgcgtgttcgactagctttcgttgcgttactctcagcgacgactttttactgtatccataaatatcgtcgcttgaaacatctgaaaaacctctcgttaaaccctagctctacattgaaagccagcagaggaaagatcttcttcatctcccaaactggtacagctaaagccttagctcaacggcttcacgagctatgcgcatctaacgacatagcatttgatatcgtcgatccacatagctacgaacctgaagatctacctaaagaaaccctagttttattcatcgcgtcgacttgggatggcgggaagccgcctaagaacggagagtttcttgtgaactggcttggtgagagcgctgaagatttccgagtcggctcgcttcttctctccgattgcaaattcgctgttttcggtgtcgggagccgtgcgtatggtgaatcgtataatgctgtggcgaaggaattgtcgagtaggatgataggactgggtggactcgagatgattccggtgggagaaggcgatgttgatgatggagaattagatagagcatttcaagactggtgtgatggagttattagggttctgaaaggaggatctgctcaagaaacaaatggggtttcgcagcagattggtgctgttgaggatgatctggagtactacgattcaacagatgaggaagatgaagacaatgatgcagacggaggtattgttgatcttgaagatattgcgggaaaagctccttcaaagagaaatggtgtagttaaagtgactaaagttgatggaaagaaggaaatggtgacccctgtgattagagcaagcttaacgaagcaggtattgggttctgttacttgagctttgaagcagtgttttcattttctcgtctttacttgaatgagcatgacttttatctcttgcagggctataaaattatcgggtcgcatagtggggttaagatatgtagatggacaaagtcacaacttagaggcaggggaggttgctacaagcactccttttatggcattgagagtcacaggtttgattgaaagttctgattttgtttcctctagtcttatgttggtaggtcgtgattcttatgttaaggtattcggtatttgattttcgaataaactaggtgcatggagacaacacctagtttggcttgtgcaaacaaatgtgttttttgttggaggcatcacacaaatcctgtgggaaagagctggcagtggaagatggatgagccttcagtgattgtgaaaggcgctcttgatcttcataaaaatatcattaagcaaatgaaaggagttccaggttagtttatatctttctccttattttgacttgcagatgatgaaagcacaggactcaaacaggtagc

SEQ ID NO: 70681 - DNA, 511 bp, Arabidopsis thaliana landsberg
aaccccctttgccgattgggcacaaaggaggccctaagtgcttaagggaaaaatggggtctgaccccaaagggaaacgttatgtggtttgggggattattggggccccccatttggcctttggggttgttgggtttgaaaaagtttagacttagaattaaatcttgaattcgaattggtctgccttttggcagccaactgggggaaatggtggggttaagagggttgaattggaaaaaggaaaacttgaaatgttttttggaccattaaagggaagggttttgtggactgggggtttgggggccggtttgggccttggcccaggggttttttggtcgaccccccttttttttgatggagggggggggttgaaaaattagatttttgcggtttgggaaattaaacccccccttacgggggaaaaattaacctattaaattcttagttggatagaggaatggggtttaaaaaaaaaaatttttcttttgactttggtataggctaggaaaaat

SEQ ID NO: 70682 - DNA, 185 bp, Arabidopsis thaliana landsberg
  unsure (1)..(185): unsure at all n locations
agnnnnnnnnnnnnnnnnnnnnnnnnnnnnnnnnnnnnnnnnnnnnnnnnnnnnnnnnnnnnnnnnnnnnnnntaagagcacaccgtacgggtcggagcaccacagtggtgacgggaaaaacagtatgagcccatatcctatagtgagtgaggacaaactggacaaggcaatccttgccgcaatg

SEQ ID NO: 70683 - DNA, 480 bp, Arabidopsis thaliana landsberg
  unsure (1)..(480): unsure at all n locations
cgtgattctccggccacgttcacgtcgagcgggtcgagttccgcgaccgccgcatcctgtgnattcttttgccggcgtcgcaggcgagttaagcgccgtgcttctgccggaacgacgggttcttacttcctctcccgatcttgattgggagcaggaatgggagagcagcgccccgcgcgagcgaggcttcttcggacgactcctcgccggcaagcgaagctgaactctcttggcgagcggagggtgtcagccctccgtgctccggtagacgacaacgcaaaaaagcccgtcacggcaactcgctaacgtcgactgccgggagactccaatcgatcggcggcagccccgcttcgagcagcgcggcgttggcacgggaaaagggcttgctgccgaaaaatccgtaccgcgccgcgagcggtgagggatgagccgcggccagcacgacgtgcggctcgcgttcgacgagcgagcgcttcgcct

SEQ ID NO: 70684 - DNA, 544 bp, Arabidopsis thaliana landsberg
tcctgcgtccggcgcgcgtcgagcaccggcgtgaggtcggcgccgccgccgaaccaggctttcgaggtgactacgaagcgcgtgttcaggtgcaccgccggcacgtgcggattgttgaggtgcgcgatgagcgagatgccggaggcccagaagcgtgggtcgtcggccgcgcccgggatctggccgcggaactcgggcgcgaactcgccgtgcacggtcgagcagtgcacgccgaccttctcgaaaacgcggccgcgcatcatgctcatgacgccgccgccgccgggttgtcccgtgtggtcggtgcgcgtccacggcgtgcgcacgaagcggccgggagcgcggtcgcccagcggcgccgaggccggcaggccgtcctccagtgcctcgaaggcacggcagatgtcgtcgcgcagcgcctcgaaccaggcgcgggcgcgcgccttgtgggcgtcgagaatcgcgggatcgggctgggcgcgcatggtctccgtcatggttcaacgacttttcgggcgggccgaaatggcacataccgcgctct

SEQ ID NO: 70685 - DNA, 474 bp, Arabidopsis thaliana landsberg
ttggatataccatgacaacgttgcaggaatcaggctgattgctacgttgcattggattccctttctgtttgcgcaaatacaatgccaccgcgacatggcggcaacaacaaacatttgggagagccgtctcgctccgcctccctcagaaatctgataaacgccaaatatgaccggcgccacgctcaaatcgcctgtaacaggccatgcgtgtagcccaaggcgaaggcgaagaagcgcttgcggccgacatcgacatcggacagcggcacgagatcgggacacaggaaaccgttacagcccgtcgcgcggtacgctctcaagcacgcgggcatgttcagcacgccctcatcggggaaggcctctcggaaaaacaaagtagcccccggtgatgttgccgaagggcaccatgaagatccgcttgcgtgcccccgaagattggggatcggtctccagcacggtggtgttcgggtcagc

SEQ ID NO: 70686 - DNA, 549 bp, Arabidopsis thaliana landsberg
attaagattagaatattgcaattcaactatacaataaaaaatgtgtgtgccaattaccattaggttaatctactttttttttattagtccactagtagctagattgagaaaatggctggcgtggagggagttctgaatcatacattttgttttgtccgatcgattctgcttatgtttatatctttgcaccggaacacaaatttttagaatattgaccgataaaattatctaattcatgttggggggggggggaaactacagaaaatcactatactaaatttggtttgtttaaagggtttcgtcactacactaaagttctaaaatcacattttacttttgttatcatttacggaacaacaatgaaaaatttttcaactatcgctgtctttaaaacttgtcatctgtggtcaaagaaaccaacacattgctctgaagccttattttaaggttccaaattagtacgtttgccatgttttccaaatttccaattgtgggtgccttgatgcctgtctttttaattaaattcaaagccattttaatattcgtttc

SEQ ID NO: 70687 - DNA, 537 bp, Arabidopsis thaliana landsberg
  unsure (1)..(537): unsure at all n locations
ctggattaatgtccgcttagcagattggcgcgtatctcgttaaagtcggcaaaggcctgcagctctctttccattatttcgcgttcatcatcgcacggctggtgcagcagtttttccatttgcgggttctnnnnnnnnnnnnnnnnnnactgcggcttgtatttactgttgcgataatattgattcagctcattggtagcaatgcggtagagccaggcggaaaggctgatgccccggtagcggaagctgccgattttcaaaaatgctttaagaaaagtttccgcggcaatatcttttgaaaggtcgtagtcggccgtgcggcgcaagatatagccgaatataggtttataccaataatcaaacacctgcccgaaggcagccctgtcggtacggcattcttcaataagatgttcttnnnnnnnnnnnnnnnnnnnnnnnnnnnnnnnnnnnnnnnnnnnnnnnnnnnnnnnnnnnnnnnnnnnnnnnnnnggttgaatagatctttagcgcatgcagcanatgctggagatttaatgg

SEQ ID NO: 70688 - DNA, 613 bp, Arabidopsis thaliana landsberg
cgaatctcgaataacaataatacatttcatcaaagaaccacgagattgcgagtgattttaaatcaatataatacaatttatggggttaatataaaatacagagaataaagcgtgtttaagcacaacctaacaactcacgagacaaagtggaaggcatgtggggatgtgtaattgtttttgctctttccctattttgtacaatttttcacttcatgtgatccaacactatttagctatagttcctttctcactatcatctccatctctgttttcaatttattatttctatcttcagattaaactcatgactactggaaagatgtagtactcagaaactaactagattgtaagcattaggggagggcaataaatattactcgtaaagtaaatttaattcttaactactgaaaatcttaagtaatttaatcaagtatatacgtacttgcaaaaacttgaaagccataattattttcgcttgaatacaaatggactaaagatattttatcattttatttttggttttaagagatgacttttttcgaatatataattcaaattatatacagtactagacatatgttagtttagtaaatgctaacaagacttttaaaat

SEQ ID NO: 70689 - DNA, 604 bp, Arabidopsis thaliana landsberg
atttgtgattaaccaacatattgtgattcttgttttcttcaaaatattcttgcattttcctttttcatcttatttatttttcttagcggcagtaaatatcaaaacaacactcatcgttgatcgttgagtttttgactttctacgttatggaaattgttttagaaaaaatagtttcagccggtttttgaatatttctttaatcaataatttgaattatttttaaaagttttttttttttttttttgaataagtaagggattttgaatatagatttgtacatcttttgagattgagaattacaacctcttatatggtttctttctaaatgttatagtcgaaccagcaatctctaaactttgtagatgagttactttactagttgagccattgacattttactatttttcaaaattttgtttctttgattcactgtggtttagtgcaagcttctagtttcaaagattagtttagattttaaattgaaatctttttaagaaaaggaagaatgttttgagtaaactaacgattagccttcacatacttagatgtctaattattgaagacacatcatgggcaagctgacttattgatttggaagaactac

SEQ ID NO: 70690 - DNA, 246 bp, Arabidopsis thaliana landsberg
cctccggtcaactgacgataatagtttttttccctacaccagctcccattgctggtcttacgctcacccactttcctatgctctcactggccgctccttctacttctccttgtggacgccgcggctaccgtgacggcccaagcacactcgggccacgatagacccatgggtgtcatacgcattgggcggttgtcggtctgttcacaagcacgaatgccataattgtgactcttaacaggggacatg

SEQ ID NO: 70691 - DNA, 565 bp, Arabidopsis thaliana landsberg
  unsure (1)..(565): unsure at all n locations
gcccgtcccgacaccaaatgcgctgcatcggccaaggcaatcccccggttttcatccgcttcaccactgttggaagatttcagtttaaagggatctccgatgagcctgttgacctcggggttttccagcaaatattctttaacgactttgtcaccgatcttattgagaaaatccggcacgtccaggattttggtgctttgcttttggttactggtggtatttgcatccagggatttgagttttttctggagcatcatcatcaggcgcatttcagcgggaatggcagaaatcacataatcataaatcggtttatggatttgcccggtgnnnnnnnnnnnnnnnnnnnnnnnnnnnnnggtattaatgtccagctctgcctggacgatgagcatgaccctttgttttacttcactggccggaacctttgaagtgggaatggcatgagcggaagcaccggtggaaccagactggttgatgagcagaacatctacctcgttattgttgaactgcctgaaagcatcattggtgttgacacgttttcgggttttgatcaaacccatattgg

SEQ ID NO: 70692 - DNA, 376 bp, Arabidopsis thaliana landsberg
  unsure (1)..(376): unsure at all n locations
caacggccaccggaggcccagcaaccaaacccacaaacacacngtagcacacataaaacccaacccaaccaacgggaagagaggaacagcgcgaaaaaccccccacacaccaagnccccaccacaaagaaaacacacccaagaaacaacaaagggggaaccaaccaaacccaaccaagaaaacaccaccccccagaagacgaggccccaggccaccggaaaaccccggaacacgcaccgagcacaccgacacgccaaggaaccaccaggcagagacacaacgaggaagagcaacgccaaggccacacaaagagacaagaacacgagaccggccaacaagcaaccgnccgaaaacaggcaaacaaaagacgaaaccg

SEQ ID NO: 70693 - DNA, 260 bp, Arabidopsis thaliana landsberg
  unsure (1)..(260): unsure at all n locations
acgccgaacggagaaanagaagaccnaaccgcaaggaacaaagacagcccacaaggccaaaaaagaaagaacaccaacccacgcgccacagagaggggcaacaagccaacagaggcaccgagaccgcacagacaaccgccgaaagcaaaagccccaaaggaacaagggagagagaaagacccaggaaacaacaacccccccggaacaacccccccaacagcagcncgagagggaggggcaacacaaacaacaaccgaaac

SEQ ID NO: 70694 - DNA, 779 bp, Arabidopsis thaliana landsberg
  unsure (1)..(779): unsure at all n locations
tgttataaaaaagccagcaaatcctatttttattcgtttacgattttaaagtaaataatataaactcattctactctttctttttcggatatnnaaatgtaaatcacacatacacgacttactctattaaacaagagaaatacgatttatggattcaaggaattttgttgggaatttgttcaattttacggtatacaaaagaaccaaaccgaaaccaaaccgaattttaagatgtatactaaacgatgccgtttaatatataggaaaaaaagcggtgtatagtcgtcgtttctcgtttaagctgattttagtttccgtcgccggctaaaaagctcattcgacgccgcctgagctttgagttttgacccgattctgacgtcttcttcaatggctaatctcctcagagttcttatggttagtgaactgggttctcctattaatcaatttcgattctacttctcccatcattatttcttcatctcttacaattcttcttttcatcaggtggcggagaagcccagcattgccctctctatagcttcagttctctcacatggccaggtttatatacctctctatctctatcgattctctagtttctaacagcctaactgcaagtagctttgattttagtaccggaactgttgtgcgttaattcgattcttgttgaattaagagatggaatcaattgaagtatgctcagctctgatggattctttaacgtagctttgttgactggatttcacttttaaaacttcatatcctttaaagttaaaaac

SEQ ID NO: 70695 - DNA, 517 bp, Arabidopsis thaliana landsberg
  unsure (1)..(517): unsure at all n locations
tcgatgccgtgtggcaagcgtggcggtcgtgcccggaagcggcgtgaaactcggacgggcggtcggcgtttggacctaaccgccggtgccgagaattctcgtcagcaaaccaccgagcaacaacccgcccaagatcacgagcaccatcaatgggatgatcggaattccgccgcgtttgggcggctcgggttcgagccggcgacggcgtggataatcgctcaagcggtggtggccactagagggcgccggcgatgccgtcgacgagggatgccggtaatccagctagttcgcccgggtgctcctcggcgaaatgcgtcatcgcttccttgagcagcccatgattgaccctcgcgtagtcgacgagcgcgccgaccgcgtgaacgtcggcgccttcgagtcgatccagcgcagcgttcgcgccctcggccgcatcctcggacgactcaccgcggtcgcgaaacgcatcaaaaatcgacgcgacgagagcgctgcgggncgtccgcggcatcgtggagac

SEQ ID NO: 70696 - DNA, 506 bp, Arabidopsis thaliana landsberg
attctttgaaaaggacatgacaaacatgcatatctgtaaccattgtgcacgtacgtctagggggtattttttgtttatttatatagagatttcttgaggtgtttattccaatccgagctatctccatcgtataaaacccaaactatctccattgtttatatataaacacgaatgagtttatcatttcatacacatactaaaagtttgatgtcctatcctacataaactatgataatttataatcatacattaaccaaaacgatgtaaatcaacttgttagtaattactagtgttcaaaatattgctttaggaaccgtctacgcgaactatgataatttagtctaatcatatattaaccaaaacgatataaattaacttgttagtaaatatcaatgttcaaaaaattggtttaatcgctgattagattctaattaatccgagtttaaagattttgattactctaaaactatggaaacaagttggaaagaaaccttaatcgtctaaac

SEQ ID NO: 70697 - DNA, 242 bp, Arabidopsis thaliana landsberg
  unsure (1)..(242): unsure at all n locations
ggcccaagcnaccagggggcnagccggaaaaggaccccaagcnaaaccggnaacacaaccnaaaccncaaaaacgggnncancacncncnaccaaccacggancccccaacnaggccnccaagggncccgccccccaacncncacaagggcncngaaaccagaagcagnggacccaacggggcnaccggacccggaccaacaaaaacaaaggcgaggnnagcanccacgcgcaacaaccaaa

SEQ ID NO: 70698 - DNA, 333 bp, Arabidopsis thaliana landsberg
  unsure (1)..(333): unsure at all n locations
agcatctgtccagcggtttgatccagaagctcagttgggnnnnnnnnnnnnnnnnnnnnnnnnnnnnntaccgcgtgcgttcaatggacaagatctgtcgttggatccgtacttggatgaagacgcgttggtttcacatatgatcaagttgttggaaactaatttgaacaacgccacggtgacggatcattttgtttaccaaactcatgcgcctttggatggaaccctgtttttggtggttgctggacaacgattgtggtgtttgaatggctcgccggtgatacttgacccttagggaaacacgcctcctgaaagattgtgggatatctccgc

SEQ ID NO: 70699 - DNA, 679 bp, Arabidopsis thaliana landsberg
ttttcttactagaaataaatcatggggttgggtgttaaggaataattctaaatgattatgtataaaaaaataatagtgataattcaggtgatttaaacgacctggaagtttttttttcctaaaatcaattacactatatactccacattatcaatcctcaaataattacagatttaattagtgaaatatatatttttgtgtatgtgtgtgtgttgcccaattgagaaaaatgtacatgtggggtccggtttcatacaatattgcctaattaggccagtaaacaataaaaaagtgttacaacttaaattaggttttcttaagtggtttaggttcatccatatatacacatatatctttattttctttcgttttacaccaagaatctcacatgggccggctttgttccattctacgtgattttcattttaaggagtaataatagtgtggagtttcttatatatatttcataaaaacaataataatttgggtttttcaaataaatttgtttgtgttactatttggaatttgggcctgtgatatactaatgggccagaccacattttaaaaaaaaaaattggttcgccaggggatttgattcattaaacttgttctaataaagggttgcaagtttcctttttaaaaaaaagttacctacctaccaattcttagccttccttta

SEQ ID NO: 70700 - DNA, 2149 bp, Arabidopsis thaliana landsberg
tatttatgagacatgagacattttgtttaagtcatggtgacttttgagtttgttataatggacatactattatagcaacaagagtgggactattatttatttagtcagaacgaataccgcccatgaagctccttggatctggacaattacccgagaactgagcttgcgagaagtcgaatcccgggttctgcaaaaaccaacagagaaagaacatgtaaaaggaaagttggtcgaaagagtaaagaaaagcatacttgagctcaatacaaagtaaatagaaactcatgcatacaagcagaaacaaaaccaataagacaaagccattaaggcatacatgaatcacacccatgtgtgcagtcttgccatgttaatttgctcaatccggttagactaaggctgagcaatttcatccaccatagctttactatcaccagctctatgcagactgtttattcatgaaactgataaaaatccggctacactataggtttactatcaccagctctatgcagactgtttatccatgaacacaaaagattcactacttgagagagacataagaaacaaaataagagagcttgaacaaagaaaacaatcatgggaatgactcatccaaaacgatcatttatggcaaagtaatcatactttgacatagattcattctactcagtagtggtgcctaagatttgctttggagatcaattagaagacctagaaaacaacatttattttttcaaaagcagaaaccatatgaaaccaagaggacttttacaggtagctaacctcttcttgaaacctctggagcatgagccgcttctgctcaagatcagtggcgtaaggatctaactgaccctgtcccagaatcggtgatgcccatgtttgccctttctccctcttctgcagggtaatgtgcattatatcatcctctgccaaatcaaacataacaatccagattagcaatcagtgccacactatgaacctaaaaaaactatgccagtaacttacatacgctgataatataacccaaaatatactgtacattccatcatccctccattagtctcaaattttccacattccaaactatatgtcccactatttataccaaactcagatcacatttccaggttcagtttatcctctctagcaatagtgaacgggtctaaaaacagaaacctaaccatcaaaaacaagcacccaatacagacacaaaaacaaaaaatggagtacctagagtccagaacgagcaatcagtcttcacaggagcactaagatcgtgctgaaaattgacaaaatttagacaattgaatcgagttatatataccacatcgaataactcagatttatgagacaaacggatcaaaaacattgaaagatagcgaaagaaactgacattgagatagggagggttgcctttgatgccaacttcgatatgtttcgactggattttgcagtggaatgactttggatgaacatttggcggcaaagttatgtacatgttcacttcttccagggtttgatcccactcaaataccttttgacctataaccatcggaaatcgaagaacattcaaaccaaatctcgtgaaatggaatcagctgaaattagagaaatagagcgaggggatagagaaagcgagaaaccattgtgaatgaaatcgtgtctcttctctggcgcaagcttctccgccatatctagggttttcttctccgttcccggcgaaatcgatcaccgttgatagtagttgttctggttccttttcaattcgtctcaacattggagaagaggcatttatgattcagtcctttcataatcatgtattttcttttagggttcttagttttagttatttacgcttagatcccttttcttgaggtacactccgtttctaacttggaagtcaaaactccatgccgttttatttgaagttcttccaagttccaagaaacatttttttgttgtcgccaaagtagaacactctttcacaattccacagaaaatttaaagatgagaagtgggtctattcaatgcatagaatacggaggaaaacaaaaattgaaagaagagtaatgtgtaggtctaccacaaaacatggtccattttaaaaccttaaacgtagccaagtgtgttagttttttaacttttcaat

SEQ ID NO: 70701 - DNA, 162 bp, Arabidopsis thaliana landsberg
  unsure (1)..(162): unsure at all n locations
aaaaagacaaccancgaacaaccggcgaagcacaaccnccgcgaaagcgaacagagcacccaacaaagaacagagaccccgggggggagggaacaaaagggganncanaacccgcagcaaacaaaggcnccaaagagagcaacaggacacccacagaaaaag

SEQ ID NO: 70702 - DNA, 390 bp, Arabidopsis thaliana landsberg
  unsure (1)..(390): unsure at all n locations
ccggagggaaacctacagaacgaaccctcaaaaccttcgaagaccacagnaacgggaggcgnggagggaggaaaaaccggcgccccggccaccgccaggagcgcccaccggcaagacagacaccccaggcaccaagggaccaccgggacccgagaaaaccancccgaaacaggaaaacgcaagcaaaacccaacccgggagggcgacaaagacngaaagaaaaaaacacaccagcccaagccaaaccggacccgcacaaagcaggcgacccggaaaagaaccccccaaacggccgacggcagaacgaagaagacgggagagcggccagacgacaccgccncncggaaaaaacggccnccaaaccggaccccnccggcaacacggaaaaaa

SEQ ID NO: 70703 - DNA, 3829 bp, Arabidopsis thaliana landsberg
  unsure (1)..(3829): unsure at all n locations
aagaccacatctgaaagtccctacctttgaataatgtgtgtccaaatcaacagctgccctttgttcaggggtctttgcttttttaaaacgtatcgcaatggaaagcgatttgcggtcaagctaaatcacataaaaacaaaaggccatagtcagattttatgtatccaaatgaaacatcatcttgtgacaaatcgtgacaaataagaaaacaacagtttgtcttcatataagaaaccaacacacatatgaacaagtcattgctatcaaagaaaaaagattcaacaatagcgccacgtatatcattcaagtaccttgggaaaacattcaaaacctccacctgtaacattaagtaacgccaaagaaagaacccgttctggcaccatcgcagctaacttgcaagctatcatagctcctgttaatcaaaaacccaagagaacaaaaataagaataaataagtacttacagaacagaaccattgtacttgaatgatcatctaacaaattacccatagaatgaccaattatatgagcttttttccaacccaaatgatccaacaaactaattgaatcatttgccattatcgttgttctgcgccaaaacaaaaaccaaattgactgaagaagctaacaaaaccaatttcacaggcaattattaaaaccgtgattaagaacacaaaagcagagaattttaagttcttcagtaatgaaattggctcacgtgtactcagatttgtgggtaggcacagagcttcgacccataccacgattatcgaaagcgcaaacctcgatgccggaatcatcggaaacaatacctccgtcgtcgtcatcatcgtcgttgggtttatccgttcccgtcaatcccatgatttgaggaccccatgactcatgcgttccggctaaacctgaacaaaattagaaaaacccaattgaaatcaagctcggaatcgctaaggaaactaatcaaatgggaaagatgcagattacaacagacctatgatgagaagagctttgataggaccatgaccgtacgttctgtagaagattttgattgcggcattgttaagcgtcgtctctgggccgacatcttctttcacgacctcgcaaaacggcatcgttttttttgttctcaaactctgatatctgggtgggatcagattttgaataaccggagaggagaagaaaggaaaggacttttctatcggaagagagagagagattgggtctgtggtgtggttcggttcggttttttgggtggaggttaggactgccacgtaggattggtcggctggattttattggcgggtaatatctaacaaaggtcaacggtcaaattttttacacgagaaaactatgttgtatagaaatatagcacgtgaaaaacgctagaagtagaagtagtactacgtcaatggaattcatatgcatcatatataagagaagcgataatgggtctgactacaagtggagcattgacctaaaacaatagcaactagaccatttgttgaagtagtcactagactattttaatctccggttcaatttgttgaactttatctctataatgttttgactatcttgatccgcgttgcttttatattatattggtgtggtttcaggagaagacagatcagacacaaaacaaggcaagatccttactgacattttatgctggacgctagataattgttcaccaggacatgtgataataaaacctccatgacttcgtggctgctttttcattatatatagtttaggtaaccatcttgtcttggcacagcctcaaaaacgcaataccttctactgaaacggaaaatttttgttgggaagatctatcattttgaaagtacttatgcccgtcaaggctcacaatttagacgaaacgatccaccaacaacttaagctttgagtctttgaccataagtgcgggacgattttcttgtattgttaatttgttattgcttgtttttgtgaactgatccttagttttttttttcatcaaaagtgatcatttagttaaagacttaaagtgcaatgagagtttggtttctttatttttaaactcttgaaaaattaattttgtcaatgaagcaatacaaattaaattgctgaaaagggatagtaaatcgttttttgtccttacggattggtgatgaaaatggtattcaacggatgcaatacttagatgcaccaaatgatttttaccatatgctaaactttaacactaaaccaattatactttacctggtaaatattaaaaggattttttgttttccaaaaacagttttagtatatgtacttaattacataataccgcggttaataaatagttaaaatttaaattagaaaaaaacacatacgtgtctacagttttagtctcgtacataacacgaaaaatcatctaattagttacgtattaatcatatcatttttacctattagaaaaaaattatttatacatttttagtatctactaatacgttacgtgagcacaaaaattcatcttcatcagtgctaataactatgcgaaaaactgatgacgattcatttgtctaacaatttatttagcttaatacgagtcttttaaagatgaagcatacccaaatttcccaagagaccaaaacgacaacgtttgggagtagctaatatcgtagttagcgcacgccactaacatcacccattgcacggtctctctctactctcaaacttcaaaaagctttggctttttagattcacaagaaagaaccctcaaaacacacaaaaagctggtgatttttgcattgcaccgattcgcctccatcgattttggacattcttgaattctccctccaagtattcctgtgaaattgaccggaaagttccttcctttttcaatttccggtaaaaaggaaagtaattgggtactgtagacttccttctagggcttgtgaactttctaatccttcagaaaaccctcgaattcgaaaaatttgctgcgagattgataaatgactagttaaagatttgaactttgatttctgggtttgcgattttattcaaatggagagatctagatccaagagaaactaccactatgaccaagactatgacggagattccatgcctaggtctaaacctcgctacaacaataattaccactttggtggtggcggcggaggaaataacagataccgtgacgncgncggtggtgaaggtggaaatggccggccatcgaagtctcatcctgaaacgatgcaacaacgacttatcgaatcctctgtcacgacgctaaagcaggaggtgttattggtaaatccgggacaattatcaaatctataaggcaacacaccggcgcgtggattaacgtgcacgagctagttcctggagatgcagagcgtatcattgagatttctgataatcgtaggcgtgaccctgatgggagaatgccgtctttctctcctgctcaagaggctttgtttagtgttcatgacaggattttggagagtgaagctcagtttggttatggtggacctccgccggaagaggaggaggattacggtggagttagacctggtggagggagagttgtgactagattagtggtttctaggatgcatgttggttgtttgttgggtaaaggtgggaagattattgagcagatgaggattgaaactaagactcatattcggattctaccaagagaaagtaacttacctcgttgtgtttcactctctgaagagattgttcaggtctgaaaaattgctattttgagaacatatatgaaatggtgaatcttgttgagattttgatatgaaatgtagtcagtctattgaacatgctagataatttaaatg

SEQ ID NO: 70704 - DNA, 341 bp, Arabidopsis thaliana landsberg
cttatctttacctatttcaccaaattattatctttgcttctctcttctgtttcttttctctgcaaagtaaagtaatgagagctcaataatgtttgactcatcttcaagcttcacacctgatgctttgtttctgcatagataattgtctctttctttatcgattaaacacccatttttgcgaagaaaaacccttttgcttgcttcaatattccagtcaggaaaattttaactgaaaatgctggaaataggaagtaccaatgctttgtttatccgtacgaacactacatgtaataatccttcttcgtgagcataacgccctgaaaatattctctctttatgat

SEQ ID NO: 70705 - DNA, 353 bp, Arabidopsis thaliana landsberg
  unsure (1)..(353): unsure at all n locations
gccgacaaaaaaaacaggcaccggccacacacccatttaaagagcttctcagccaagccgccaccaagggaagnaagggggattaaacacggcaacaccccgnaccaccnacaaagggaggacaaaacaaagaggcagcccccacacagagcagagaccacaaaggaacaccaaccggcaaagcagcagcacagaagcgagccaaaagggcaaagaaaaaaccacggaccaaaaccacgcagccaaagcaaacaaacacgacaaaccacagagcgggggcccacaaagaaaacaagcacgcagaaaaagaagaaaacaaggacggagaccgaacgcnaacaaacagcaaccga

SEQ ID NO: 70706 - DNA, 301 bp, Arabidopsis thaliana landsberg
  unsure (1)..(301): unsure at all n locations
ggggaaggcaagggaggggggagagcaagaacaggaggagagcaacagagncataggggtaagcaagcggagagggccccagcggggggagaaaaagaacagccccgnggccccacaagcccgncngaagagggcccgaagacgaggagggcgccgcacggggcgaagcccgcgcccgaaagggaaagacnaccggcgggaagcaacaagcaggaggcaaacagagacccccaaagaaaaaaggggcgaaaaggaggagacggcgggcgggggggaaaaccacgggaaaaaaaacaaaccg

SEQ ID NO: 70707 - DNA, 103 bp, Arabidopsis thaliana landsberg
aaacaaacaacaaagacgacacgccacgggcaaaaggacggggggaccaaacaacacaacaaccgcagggggagaaacgacaccgggaaacagagaaaacgaa

SEQ ID NO: 70708 - DNA, 137 bp, Arabidopsis thaliana landsberg
tataaaatacacgcacaaactaagtatatacaaactaaaagccagtgcaaacgctttttaagcccaaccgagaggaaaaagacaacagagggaggcttaatagcgatagacctagtgaaagcaaaaagaccacaaat

SEQ ID NO: 70709 - DNA, 386 bp, Arabidopsis thaliana landsberg
aacgcctttctccgaccgccaccgaaccctcgtcggctagcgctgcctaccccactacgacgggtcgtggtatgacggtgggcttgacaccgtagcgcgggagaccgtgtccggaactaccgctccgtccgccgccgcccggggggatcgggggtggcagcgtggtcatcgacctgctctccggggcgacggtccagccgctgcccgttccggcggcgggagcacccgccggggtggcggccacccaaccggttggcgcggacaacgatccgaccagggcggcacggcccaccccggccgataccggggagccggcacggtcggctgtctcaagcccgccggtggtcgtcgaggccagtgttatgccgtgcgctgagccgagtccg

SEQ ID NO: 70710 - DNA, 237 bp, Arabidopsis thaliana landsberg
tttctcctcagacattacaaagcccggtggggggtttagggaaacgggctcttggactctataagcgggactgggaatagggagaaaggtctacccgttccaacgaattttatcccatcacactgaatcatcgaccggggcctgggatttgatatccacgggaggaaagaccgaaccagctcccagacttgatttaccggggccaactgaatcggcgacctttaacgaggaatggtc

SEQ ID NO: 70711 - DNA, 1494 bp, Arabidopsis thaliana landsberg
gagaggaatggcgaaataacagacttatacatgcctaaggtactctatcattatctaattgtttgcctgataattctggtcagatctggtctcttggatttgatatcatttctctattttctatgttaggactacaactcgaagcagcaccgaggaatagggtttatcacattctctagtgctggttagtttttggttaaatcttctccaaacccgaattgagtttttatattttgatatcagaaccttctttacatgtttgactgtcaaactcatgggaaagaaaacataagaaactgatgaatgcgatcctggtaatatttattgtcacctgtttgtaaaaatttggatttagaagaaactttctattttctgattttagattcagtggaggatctgatggaggacactcatgatctgggaggtacaacagttgctgttgatcgggcaacaccaaaagaggatgatcatccgcctaggccaccgccagtggctagaatgtcgcgcccacccgtggctattgcaggtggatttggagctccaggtggttatggagcttatgatgcttacatttctgcagctacaagatacgcagcgcttggtgcccctactttgtatgataatcccgccacgttttatggaagtaagacgactcactatataataccaacatactagaaacaaatgaatttcagctcattaagagaattctcactttgtcttaggaggggaaccaaccacaaggggaataggaaacaagatctttgttggacggcttcctcaagaagcatccgttgatgatcttcgcgattattttgggagatttggccatattcaagatgcttatattccaaaggtgagttatataagttacattgttacactgagaacattttcagatatttttgtatatgtattgaacattcatccttttttaattaggacccaaagagaagtggacatagaggttttggatttgttacctttgctgaaaatggtgttgcagatcgtgtagcccgaagatctcatgaaatctgtggacaagaggtaaaaaaacaagcttgatacttgatgctttagacaaaaacttatctaagatgtataaagaagctacactgttttgattttcgggtttaggtagcaatagattcagcaacgcctcttgatgaagctggacctagcgttggcgcaagttccatgttaagttcttctcgtcctgaatattttggtggctatggaggtcctatgcgcgcatttggtcgaatgtatggaggcatgagcttggacgatgtgagtatataaatatatataactaaaaacactaatcaaagattctttttatacaagttggttctgattcactgcgttttttaaactaattctgctagtggggatatggaatgccaaacgcaagaccatcaagaccagaccggaggtaccggccatactaatgcagcagaccaacatttcattagctttggctttgtcttttta

SEQ ID NO: 70712 - DNA, 594 bp, Arabidopsis thaliana landsberg
ttgttgatgacaattggcaaataacaaacacaaaaattagtataactaaatgtatttttttgtaattgttgttaatgtgtaattatgtattagaatatcagttttattatactatgtaacgtaaacatagacactaacttttctagcgatcgttaaactcataaaagatcgagcatgtcctattttttgaactagaaattaaagagaatcgtccttatgttacaacgattgattaaagtactaatccatttttcatgagattgcttgctaatctgatcaattttttttttgttttaatattcgagtaaattggtagagagtgaattgttttcttcgaatttatcatcatatatacgatgaattttagtagctgaaacatagtgtatattgtttgtccaatcaatatacctttgtgttatttcatttgtctaatccagaaccacatgggccatattttccaggaatcttttgtttgtttgtaattattgaagcaacaaataattcattccgtggaaaatagactaaatctgatgactctcaccgcaacatcagaatatcacatgatgaattagacaataatattcacgaatttct

SEQ ID NO: 70713 - DNA, 473 bp, Arabidopsis thaliana landsberg
  unsure (1)..(473): unsure at all n locations
actgtattctgtctatgcctttaaaatcatttttttttttgcctcataactctctacacacttgncgtacggtttgcatgtatgatacgatataccccattaaattacttttcagttgtttctgttggaatctccctctcctctatcacttatgggtcggataatcccttgtctgtctcgttctctctttactttgcttcttactcacaaagcttttacatcacttatctacattgttatcctctatacatctctttggacgtgaaggcctaaatatgaatctgatatttaaaatagtatcaaattattataatagtccatgattataaatgcttgccagtattaacaccatctagtattaacaccatctcactaccacactttcaaatcttttttagtacatcattaaaaaataaacattcactttgcaaatacaacaacttgaataaccatacttatatctttcaactata

SEQ ID NO: 70714 - DNA, 450 bp, Arabidopsis thaliana landsberg
atgaagaatctgtcaattctagcatcataattagtagatctcatatccatcaaagaagatttattgacatcctccacaaatccaaggaggagaaaacaaagataatgaagaaaacaacacttaagaaagacttagagataaataaatatgaaacccataaaaaaagtaagaagacaaaactctctagtatgagagttcaaaaaaataaacaaaaacaaagacaaaagagagattattagggagaggatgtaatggaagaggccaagaatgaagaatctaacgacgaagggtcttgactctggaccaaccctttttacaagatttgccgacaactttgatgccttgcttgaacagatgttttagctccaacgcccttatcttcacctgaacctcaaaagctcccatcttcttctgtcttcgatcctcttttatctcgggaggggagagacg

SEQ ID NO: 70715 - DNA, 372 bp, Arabidopsis thaliana landsberg
  unsure (1)..(372): unsure at all n locations
aaggcgcccaagacgctgcccgacattaacgcggttatcgacgcgcaaccgcaaggggacgcgcgggaacgcagcacccagcccccgagnaaggaacaacccaacgcggccccgccaaaaaacaaccgcgacgccgcacccgcggcaccaggcgccgacgcacccgcagacaagccgaccgggacaaaccggncaccggacgccacgagcgggangcccaaaccccgaggcgagaccggcacccaaccagggggcgaagaagacgggcngcaaaacgccgccaacggcacaggcggcgccgcgacggcagcggcgcagaaggcggcagagcacggcgcccgcgcgacgaccaaagagcgaggaaccaacggc

SEQ ID NO: 70716 - DNA, 484 bp, Arabidopsis thaliana landsberg
tggacacttacttattggttaaatattttattttggaaaagaaaagaaatttttaatgggtttattacctgaagtcaaaggaccagttttggccaccagccgggttttggattataaggagtcttacccttggacctttggaggggtgggtccaaccaattttatccttaatcttggttttaaaaccgttaaaattttcaatcttcctaggctaaaattagatttcaccttttaaaaccaagtaatgggtccatggaatcaaataatatttccttacaccaccttaaaaaggtaatatgtttagagcattattacttcatatatagctaaataggtgtggacaaatccatcattccaatcaatgataggtttcattttggtaagtaaggtggctttcgtggcctatgagactgtgaccatatatatacgtaatatcgttatccaatctcggtttttttttcctcctatgaatataattaaccct

SEQ ID NO: 70717 - DNA, 616 bp, Arabidopsis thaliana landsberg
gttgtgttgagttaacagagaggttgaaagagaagatagaggaaacatttgggtgtgagtatgagctttttattgaattcacaggtttgattaggttagtctctctcccctgtctctttaacaaaacaagtcaggaaaaaagagtaaatattgattctttgttttgaatcagttggtgcaaaggagctagcattggttggcatagtgatgataacagatcatatctaaaacaaagagattttgcggttcgtattcactctcatttttgtaatctatagacgtccttgttgatattgtggtttatgtgtgtatgactttggtttttagttggtttgaaggcagtttgttacttgaatagttacgagaaagatttcataggcggtctttttcgttttcagagtggtgaaccagtaaccgttgctccatcggctggtgtaagtattgttctttttcagttggcttagtggttacttagattgaataatgagtttgtgttcttgagcaggatgttatcatgtacacagctgatgaccggaatattcactcagttgatgaggtaacagatggagaaagaatgactcttgcactctggtttagcccggactcatcacatgac

SEQ ID NO: 70718 - DNA, 466 bp, Arabidopsis thaliana landsberg
agctacgcaagaaccagtacctaagacacgaaaccaagccaaagctctgttcttttcgcagaaatgatgaatcaaagcttgttctgtggctgaggaaggagaagaagatacatcagagacagagagtaaacgacgtagttttaagctttgaaaagagaaacgacgtcgcttaaggatcttaaaacgttctcgattttaagtagttgaaaacaccctaaagccgaacactttggtagtgaattaaagaatcgatttctctctctctcaagcaacaatgggtaaaagtttctggctttatttcgaaactgtttcttttttgttgaatgatgttgttgtaaaggaattggtgtaattgcagatgaaggaagagaaggagagatagagaagaagaagaagaaagatgaagaaggagaagtgaaggaaggagtaacatcaatagcttttgtaccatgtgggactatctctg

SEQ ID NO: 70719 - DNA, 284 bp, Arabidopsis thaliana landsberg
  unsure (1)..(284): unsure at all n locations
ccgagaggccatacgacaaaaaaagcacggagggacaaagagcacagagccaccaaaagaaaaaacaggaacgaacacggcanggacaaagagangcgaaaaagaaaacaaacgcgcacagagnaggagaggaacacanngaaccaaccacacannaanngacacaaccaggagngaaacacacagaggagaagacgcacacccagaggggaaacgaaaagacggcgaaagagcacacagcnacgcaaagaaaaaaccgagacgacagcggaacggagaaagag

SEQ ID NO: 70720 - DNA, 2594 bp, Arabidopsis thaliana landsberg
ctaaaataaataacatatacaactcaataacccaaagcattgactgaatttgaatttcaagaacccattcatcatcaaccagtttaaaattttgaatgctcaaacaaacccaaaaatgcaggttccacgtaatgagtaataacttgaactttaataattccatccggagcagataccttctctcttgaacaactacactaaactctaaaagcctaggatcttaaaacaatgtccaaacgctgtttaagtccaagggacaaaggacagatctatacatatattccagttcatttcccgccccatgtagacatcatgcaacagtttatcacatcggcctaagaacgtcggtgcaagaaattcaagcattgctgggaagaatataaaaagtaggcataccagtgaattcacaggttgatttaggtgcaacaacaccaacatttggacgaacacagtacttctttggtgatgtggttttaacctgtcaaaaaccacatctagtttaggtttgtatacagaaagaatactttttctcagaaattttataagatattcgaaatcctgaagccagaaagaaagagaaaaagtttgagaagaatcttctttagaccttaaatgcaacataatgatgggtagtattggttagctgtaccacgcaggaagtttgcttcttcaggtcaactacaaaagatgaaaccagttagtattacaaggataacaatgccaaggcaaagatattccttttacaacttccatattttattatagatcctcagaatcgatatgagaggtaagaaaccacatcacagaatgtcagcacatacaaatccagtagcaggaaagagttagaagattcctccaaacaacagccacattaacatcacatcaattcatcttacaggagaatagacccacaaacaatagcaccactatgatagaattctaacgaaatagtgagaattcagaaaactcggtattcataactggaacatgttggccactttgcttaaggaataacacaccctcgctatgaaatccacattttacaaaaaaataagaaactattaacgggaccacagtgtctactcactggaacttaaaaatgatcattttacaattgataagaatcagtccccttatatcttacctgcaaactgcaacgttcgtggttgaatatccaacagcggcatattcatgttgctgtgacaaaatgactcaagtatcaaacagctaccacttgcagcaggattctctccacccctatttcaacaaaaaaataataagagaaagatcagcccagaaccattcaagtatgaaactgtcgacactagagcgaaaaacaaactcagatctatactctatttgggacaatcataaacccgctctcccattgggaacatgacgaaatctaaccaaacagtcaacaatcagaaaagtttctctgttacactctttcgagtccggattctcgtcttccgtcaccataaacaaaccaccgcactaactcgtcgacgacgcgttctcaaatctgacgatacgaactcgcccgaagactcaaacgtgactatattttaccttaatgcgctcgttttttctcagcgatccgaccgacacaattttttgggcaacgcgctttcgactagccggaaaaccaaatcgtcctagtcccccagtgtgatctagttacgccaccacaggcctgatagtattaaaacaaaagggcgaaataaaacgacgacgtttacgaggagcgactcctcgggatccggtagccaatagtaaactcagatcacatagatcttcccgagccctagcgatttcgatttctaaagcagattctaaagacaaaaatcaggaaactcgaggaagaggaacctagtttcgaaacaaaaacaaaaaccagagaagaagatgatcaacgagaatgatgaaatcggaaggaaaccttaccgtctctccgacgaagaactaacggaacggagcttgagattgagcgacgaagaagcagcgatcgagagaaagagagaagtgcaaaaactgatcttagtgaaggccaagtatggaaatgtattaatgtgttcaaacacattaaaattgaattttttttttaagaaaaagtatggtactgagattcagagatggtgaatatctgttgtacctaacagcaatttagtaaactataatttctgacgactatttttcgatacttttgtaacaattatcgtaaaaaacaaaaaattaagtgagattacattcgacgttagatgccagaaataatatatatgtgattgtgaatatgtacctttttttcttttttcaatgagtgtaatatgaatgctttgagaggattacacgcgtgattctgattcggatcaccaacttcttttgcttcccttttaatttctttcctatcttttgcttttcccattcatctctctcatcgctttccacaaaggcgagatttgaatacgtaatcctaattatactctcatagagatttggttatttggcccaaaatatctttctactttttaatatgtcgatgcatagaaaacataatcttattctaacattcacaaatctcctatatttccata

SEQ ID NO: 70721 - DNA, 185 bp, Arabidopsis thaliana landsberg
aacctcagacttcttataactcgagcatgatgcaaatctgcagcaacactctaagtgtattcgcgctgacaacagccaacctgaaggggtctgctcatacttcgacaccgggaccagaaatattccacaaatcactacaggttatgcataaaagaggataaattcagcctgccacaatcgcaaaa

SEQ ID NO: 70722 - DNA, 1222 bp, Arabidopsis thaliana landsberg
attcgattcttctccaggtttctcgttccggtttggatttcgaatcggtagatgtctcacaaacgcgctatttcccagattttgagatgaagaatgtcaaggaattgaaatgttatggagttggaggttttagtgatagcgatctggtttccatcggagtgaattttccgttgctagagaagctggacattagctatcctaattcaagtccgagtcgagtctctgattctggtgttatcgagctttcctcgaatctcaaaggtttgttgaagattaacatttctggtaatagtttcatcacagataaatctttgattgctctctcgcagaattgtcttctcttgagagagataatcttccgtgactgtgatttcatttcgtcggattgcatcaaattcgttcttcgcaattcgcgtaacttggagtctcttgcgatcaacggaatcggattgagaccgagggagtctttgttaaccgatgcgttcttgtttgctcgttgtttgactgagcttgatctttcggattcgtttttgtctgatgacttgctctgtttgattgctagtgctaagttacctctaaagaagcttcttctctccgattgccacggttttacttttgatgggatcttgtatctgctggacaagtaccaatcactagttcacttgaacctcaaaggagcaaatttcctctctgatgagatggttatgaaattagggatgttctttcggcgtttaacctttttgaatctgagtttctgttccaagttaactggtctagcattctttagtattattgaaagatgtgtttccctgaggtgcatgataatggtagggacgaactttggagtggaagaatataccaaggatacgaaggatttcaagtcaggggtcaagtttttgtacttatctagaaaccacaatttgctcgatgagtgtctcgaaaagatatcacggcattgcccttttatagaaagtcttgacgtagctcagtgtcctggcatcacgagagatgggattcttgaagtttggaggaattgtggcaagctaagatctttggacatcagcagatgtacgggcataaagagtcttggtgtagtagactttgagcttccaaagttggagtctctgcgagcatgtggaacttggatcgacgatgaagccttagatatgatcagcaaaagtgtcgagggttgttgcatcttgatctgcaaggatgcttgaat

SEQ ID NO: 70723 - DNA, 519 bp, Arabidopsis thaliana landsberg
tcaaaaccttttttttgtgtctccttgtgtattgaaggtgacaaatcacacggtgggtgctggaggagaaggtggtaaaaccaaaccagctcttggggaaacatggaaaagcatcccacacgtgagactttcgctatcacgtgaccataagaacagcaactgcaccatctccatcttaaaacacacatccttggtacgttgctaaccaaacaaaatttctgtatctcttagtccaacgtcatttcctttggttttacagtttctgtgtgtgattattttctttgtagccttcaggccaagctgcgaagaccttgactcgcaaggagaatcaacaatgtccataagcctccttggctatatattccacgcccatcgtttggatgtgcaagaagagaaccacataaatgaatgatcagatggatttcttgtttcggttttacatgtagaattatactgcagcaatgaaaattaaaatttgttgaacaaatgagtggtgtgtatataaggatcacatgaata

SEQ ID NO: 70724 - DNA, 514 bp, Arabidopsis thaliana landsberg
gatgtagatattatgttattgatggtggttggatccgttgatgcttatgaaagtcaaatcccacgtccgatgcgacgacaaatcacaaaaaagggacacgcttatatacaaaaggctttgaaagatgatcctattcattttcgtcaactatatcgtatgaatcctgaggtttttgcggaattatgtcatcttctccaaatgaaaacaggtttgaaaggtacaccacatgtatgtgtcgaggagatggttgctacctttttgatgacagtgggccaaaattcaagatattgtcacacaatggacactttcaagagatcaaaattttcaacaagtattaatttccacaaggttctcagagctttaaacatgcttgcaccaacattgatggccaaggttacaaatacagtgccctcaaaaataagcaaaagcacaagattttatccttacttcaaggtacatatcttttttgtgtgaataatatttcttgaagtcttatataaacagtttttaattt

SEQ ID NO: 70725 - DNA, 555 bp, Arabidopsis thaliana landsberg
gagcatgtatacaatacgccgcggcgcagggcgccgttggccaccatcaatgtcttatatttgcagggtgtctaatacggctgtgaggatggcaagcccgccaccaatcaccgcgcgcctgtcgtccttcaggccttccatattcaggcggtcaggggttttggccttgatcagggtttgtttaagccattccagttgtgagcgctcgatacggtccgcggcaaaccctgcaccagccaacacatcggcaaccgcgcccaccgtaccagaggcaccataagcgacttctgattggccaatgtagcggctggcaatcatgtcgatgatagactcggcggcgatttcggcacgctcgaaattgcgctcgctgaattggccatcggcaaaatatttttgtgaccaaccgaccgagcccaagcgcaaggattctgtcacgttggccttgaagtgctggcctaggataaactcggtagagcggccaccaatatcaatcaccaaccgtttttcatccgattgtggcagcatgcggctcacgccctgggtaaataagcgtgc

SEQ ID NO: 70726 - DNA, 384 bp, Arabidopsis thaliana landsberg
gaaagcgctttccggatagcatgtcgaaatcgatacctatttggtcttgtgtagtttaccgcccaatatttaatcattggaacagattatgtttcattgatgcattgagttacaatgtagatcataactcttgttgtcttttttgaggaagcgttcttgcattaacattctgttctttgagtagggtttgactagtgatgatgatggtgataacatcaggaaattgttagataaatgggattgttcgttacatctaccactatgggtttcaaatactgagagggcttctattgaagctagattggatgagtggacaagagagttagatgagagtggagctgatatagcttctctagcttcatgtttgagaaaacctttgcgtcc

SEQ ID NO: 70727 - DNA, 591 bp, Arabidopsis thaliana landsberg
  unsure (1)..(591): unsure at all n locations
atcgcattttccactcaggtccactacggtaagtgaccgtcgcaatctcgcgcgccaatttcattccttatgtgcggcgggatcgcatcgtagtagaaaccgcgcgcccacttgggatccatcatcagtacctggcgctgcgtgtgtcgcatcgcaatactgtatgggtgactacgggcacagccgctgatactaacgatcttgcccacgcgctcggggaagagcacgcccgcagccaaactctgcataccgcccatactcgacccgacagatgctgccagcttctggatgcccagaccatccagcagacggaactgagcgcgcaccatatcatccagcgtcaagatcgggaagcgcgtcgcatatcgctgtccatccgacggatccaccgaggagggccccgtactaccgtagcagccacccagcacattcgtgcaaatcacaaagtacttatccgtgtccagaggtaaaccgggaccaataaacttctcccaccaaccgggcttcggattcgagaccgtgctgtgtgcatggctagacgccgatacccccgtatgcaagagaatcgcattactcttgtncccattcaac

SEQ ID NO: 70728 - DNA, 581 bp, Arabidopsis thaliana landsberg
tatcttctttactactagttctttgttttcgtcttgtctccattagtttttgtttagtctacttgacaactataactacataaagatatacacattcttatacgagattcatgtgtgtgtaactatcaccgaactatttatatttgtatacaaaatctaacactcactattattcgattaaataactcatcaccgtagtgataaaatatgtcgctaaaatggaaaaagttttttcatacttcaactaaagatacatatatgtgttcgattcatatcaagtatattaccgtactaattcatacctcaaacataaacagtgataccaactaattatataccaatactactaaattccaccatttttctattactctgtttcgcgctaaagtttttatttaccgttttatgttaccaattcgacctatacgattaaaactctttaataagataactaattttctaatcatctgaaagtattatatcaaaaggaaaatataacagtgatttaagtttgtgtttacctgataatggctgtatgttgggaacaccatgagagtagtaactatagctaacgaagcact

SEQ ID NO: 70729 - DNA, 560 bp, Arabidopsis thaliana landsberg
aaagacattacaattactttctaatggatagagtatttgatctctattttattccattaaataacaaaagtgcatctgatatatgtaagtcaaggaattttttttttgtctgattttaaaacttaaaggaaatttctgaaggaaagagagattagtgtttaagagaggttcttacgttttgaggtcgtccgacgatggaagcgacggctttggtgacttcggagtataacggatcggtgttaacgccgtcaaaattgacgtttgttgtaatgtaaagacaaggcattttctcaccgtgaatactaacgcccgttaagctttgtttgcaagaatctcaagaaaccaaatgagaggatttaaatggtgttttgaagttgcggaagaaaagatctctcacatgggcaattatttatagagctaaattatcgcgtccaaaaaataatgaaagaaattattgtattgcattattttaaaatttcgttttgatgtgaacaattttttgaattaatattctttgagtttcaaaatttgacaaccttgggggacggtgacttaattca

SEQ ID NO: 70730 - DNA, 208 bp, Arabidopsis thaliana landsberg
agaacatcaccaccgtaacctttctcgttaaaaacacagacgcacattgatatgaatgcttgcgccactttgcttcttaccgagctctttacacttgttatgtcttacttcctccatttgcgccagctctagcctctatttctttttctgacactataaagtctttcccaatccagtaaatcaatttatggtccaggctgagctcaac

SEQ ID NO: 70731 - DNA, 1265 bp, Arabidopsis thaliana landsberg
atacctgttaaggcgggcactctctcttctctggtggtggcttgtactccaatggcggacgtggctcttaaagcttcaagagattgcttgttaagccagtagggtggctctgacccatctgcatatcagatagatccattatatcagctttaagcaacaagatatcaatcaaactgattcaaaactataaaacaagctcaagaatcaagaccaatataatcaaatcatatgacctaaaatcggaatctcaattcaatttagaactagctgatgagtgttacaacgcaatcgaaaatagaaccgaagcaagtatcaaacgacttaagagtattccaattgattagctagaaacctaatagacaacgaaactaaaatctagagagtaatcacgaattcagcgaatttagagagaagagacgaaccagcttaagctgaagaacattggctctgttctgaactttagcgcgagcttgaacagcggcgtttggattacgcaagaaaggatcgccggagtctcccatggcgacaaaagggatctcggagctgtgctagggtttttcgtgaggaagcggatggaggatttttgcagagagaagaagcaaaactaacaaaacccaaattcaatctctaaccggattctgattattaagaaaaccgagttgagatccaacagatcacgatacgtaaaacgatgccgtgctcgtatatctcggtcacactttaacccactcgctgaacaagagggttatcagcttcaattaccttttttttttggattttacaattttttgttaacatgtcaaattattggttttgtaggcattcgttgatctttggctcccatatttttctaaaatccattaacaaaaaacataattaaaatagattccaattttatttatttttacgataacaggctctaaatttttaaatattttaaagtaaccataataagaaaaattaagcatttccaaatgaccatcactgattcacttccataggatgtggctctccatccaatgattttgtgaagtatgatggaaccgaggttggagatgtattgaacttgacgggcacaccttttaccattggtctcgtgcgctaacagagtaattgttgttggttgcaacatcaaagccttttgagaaaaaatgagccaagaatagttggttgcgtccccattcctgcactacagcaccagaagcgaaaatggaaaaaaaaaggttgcaatggctatagatgctgcagaaagaaagggccttttg

SEQ ID NO: 70732 - DNA, 1547 bp, Arabidopsis thaliana landsberg
ctgacggattatgagtacgagattggatattcagtttgtgcatgttccagtggttacaatgtaacccataagatcttttaggtggatgcaaagtgagaaactgactcgttctgttttcttgtattgtggaaaatgcttgcttattataattatgtggtttttcatctacagatatggacgagtgtagaatactcaacaataatggacgtcacaaatattgttgcgaaggtagcatgtgtgttaacactcggggagggtaccattgcgtgttccacaagaagaagacgttgccaattatcatagattcataggtatgcaattttatcattcaaatttatgtattcatataatgggactgatgactccccttggtaactgcgtttggccatcgtagtagaaattgttggagccttgtcgcacctgaactcaggcgcctctatcaaaatctatcacatagacataaagagatctaaatatggatggtagtattttcgttgtgaagaagtctacatgaattcttaaaaatgatatcaatcttcttcgtgtcataaatgtaccatggcccatcgtcaatccaatacttagtcgcgacaggaccgctcatccccgaatctggattatccgcgatggctatattctcgctgtagggtccttcggagagggccacggcgcagtcatcaatacatttgttagcgatgctttgtgcataggctgcaagaaaacagttgtgtttggtcgatttgtatcatactcgtttttcttgccaaaagaaaacagttgtgtcaacaatatctagagatttcattttacattgatatccaaaatttgtctgttttgatccttcaatttgattttctcctaccttttcaaaagttgtttagccttaactgttgccttgtgtgttatcatgtaaccacatctatcgctaaggcaaggaactaggagaatttgctgtcagaatgtatcattgtgtgtgtgtgtgttttatacttaatacttgtatatacacaatttataaagtattcaagcacatgtataaaaacaatcgtaacttgaaaatttcactaataaacttatgtagttttttgtttgtgtaagaagaaagcacaaagataagtaactaatgcttgagattcattatcgtaaacatcaataggaaagttgaccagggatattctccggaggaggatcattctgacacctcacctaatcacgtttcacgatctgagtatagtcatcgcacacacacatgcacgaattggtgtcatagcttaccatatccaatacttggttgccgcgggaccactcatcccagaatccagattttctccgaagaacactacgacgcagtcatcgatacatttgttagcgattctctgtgcataggctgcaagagtctcgttccaatccttgacgtactctacgttgtgagcggcgagcatttcttgctgttcgatatcgactcctgggcttccctttggcggttgagcgagggtaccacgagccaggagggacaataatgcgactaagagaagggtataaccaca

SEQ ID NO: 70733 - DNA, 616 bp, Arabidopsis thaliana landsberg
  unsure (1)..(616): unsure at all n locations
tcggcgaaaggaactgcaaaccgcagttgttgatcagattatttttcgtgccaagctgcttttcggtttccgcgaggggctgccgcaccgaactttccgatgagacatcgcaggggatgaaaacagagtcggtttcattctggggcggattgagatcccagttggcaacgcggagcccttggcggtggagggcttgggcaatttcgaggccgatcccgctggaacctccggtgacgatagcgacttccatggactctcctgttttcagaaagtttattttttactccgaaagcggctgaagaagccacgtttctttttcggctgatccgaatgaggccgcggagccgcggccggaggcccgcctgcgcgtgaaaccgagcctgaagagtcccgtagaccggatcctccctgattgcccgaacgcgggcctgacccgcccgacggacgccggcgtnctctggcggngggattggtgtttttctcgatctgcgctttggctttgcctttggacatncgatgggcgttttccacctcatcggaatgaaaaggatgagtgcggtcgacgtcgattttctggccgatcaattttcgatgtcgcggatataagatttttctc

SEQ ID NO: 70734 - DNA, 588 bp, Arabidopsis thaliana landsberg
ctcttggagttgcaagaggtatgtatgcataggcttgattcagtaattgtatgctgtctcttagtgttttttcgctctgccacgtttgtttacttttattattattatccaaatatggatttctacaggctttgtttgagaagaacccctcagttgatcaacaagtgaatggtatgccatattaacagataacataattatcatcactataagcgagggtcaatataacatctcctttctttttctatctgtcagcaacagctagtgaagaatccaataaatcagatgcggaagatagcgatgaatggcagcgaatatctgacttgcagaaaaggtattcaagactaaatgttcaactgtccagctttaaagttctgtccaatcaaaagaattttgtttagtaaagcatgattgacttcatttggagaccagtctcataaccatttatgtttcatcgttaacacaaatttggtatttgctatgtagaatgtctgtgttccgaaacaaggctgtggacaaatggcagagaaaaacacaagtcacaactggtgcagctgctattaaaggaaagctccacgcctttaacca

SEQ ID NO: 70735 - DNA, 389 bp, Arabidopsis thaliana landsberg
gaaatcgatgaccaaagcaaatgccgatctctaacgacattttttgaatctagtgttgcaaacgcaccagttagcatacttagcgtgaacacaatcaaagttggcaaaaggctactatgcttggacagctaaaaaaggcattccaaaaagatgcgaatcaaccggaaggagaggaggaccacttactaaaagaggaatgaacgctacgtgtacccaaaataaaaacactgctacaacactgacagattacaagtggttaatagcataatgacagacaaattcaacatagatacactacatagcatactaaaccagacaagatgaatagcactaacacaacaaaaactaaaaccagggggtctaacactagcttaacaaagatgcttaaa

SEQ ID NO: 70736 - DNA, 658 bp, Arabidopsis thaliana landsberg
gatatgtacaatagcacaaagcacaataagaagttgttatttacagtcttaaaatggaaaataaattagagtggaatggtttgcattagtgtttctagcatatcataacttagattcaagatcgataatatgggtgtgtaagttggagacgataaaaaacatataaattatgtcattgtgtttttttttttttttgtctagtttgaaaaattatcaaattgctacttgctagtagcaaatagcaatgtttaccgactttgcaatcaaattttgcccatcgtttcgtttctaggcattgttttggattaaaatcctgcgggccgcttttggagtctctttggaccatgttttactgactaatccagaataaaggtgtgggctgcattctttatttttgtcaaaaatatctgataatggataatgcaaacaaatccaaatttcattatattcaaaagaaatgaaatctcccaatcttcaaatgctaatataataatttttccaagtttgtatcatgatcaccttaaaagtggcaatttcttttattttctttttgacaacaatcaaattttacaaaatgtgtttgacaacatttttgttttgttgctgttaagaatatgtggttttaccttcatattagattgcaacaatatactacaat

SEQ ID NO: 70737 - DNA, 779 bp, Arabidopsis thaliana landsberg
gaacacatttatgatcagtttcttgcattctacggcaactcattttatcattagtccttcgtgaagttgacagggaaaaaaactagaacaattgttcttagtgacttaatcttatctgtttaaaagtaaaaatgtgtcacttaattgatataaaggttcattgcttacaactaactatatgtccacattagtgattaggatatcttatcacgtcgttatatagtaatcagtagagataattagtttccgaattttgaatatatcgtctcaccatagaaaacgatgtgataaaacattagaagcaatagacaattacatgattgttgatagttattttacatcacacaaaacgacatgaacagaaacaattaataattaaggaagcttaatagcgtcaagaacaacatgaaacataaacacatctgcagcaagaagagtgagaggaagcgaaggagcagctcggtgacagaattttccaaaaacgccacaaactttcttccacatgacatgcttgttcccatgtaaacccattagcccaattgcgctggcggctccagtgccggaaaacagcaaagccaccatcactagatctcctagcaaaaccaccattaacaacttcttgcttcttcttcccctgctgatcatcagaatcgctatcgagatcgccgtgtaaccgcaagctataacgttcacagaaatgttgtacctacaacatttgtaataccacattgcttattttcgtattttatgcatgttctaatgtaattctcttctctttt

SEQ ID NO: 70738 - DNA, 499 bp, Arabidopsis thaliana landsberg
agaacagattcggcggcctttatctggtccagagggctcgtgcctcagatgtccttcgtagtcgatggcgtcgtagatcgcggcgtgcgtgttgcgggcggccaccgcgtcgccgatgcggaagagctggaacctgccgtcgggatttcgcgccacggactgggcctcgcccgcgatcagttcctcgtagtcgaccgctccgagattgctcgaccttggcttgagctcgaaatagaggtcgtcgagcgggatcgtgccgtgattgatcacgacctggtcgacggtctgcttcctggcgatgccgccgtaatcgctgccgacattggcgatcaggtggttgccgtgcttctcgacggaatcgagccgggaggtcaccgtgaaggtgacatccaacttctggagggagcgcatataaagaacaaggttcatcgccatgacttgtggcgctaaggaacggtcggtggttatgagttccaccctggcgccggcgtttgcgaga

SEQ ID NO: 70739 - DNA, 399 bp, Arabidopsis thaliana landsberg
  unsure (1)..(399): unsure at all n locations
gagcgaggacttcagagtctgggtcaaaaggcgaatcatgttgtcgccggggaagatatttttcatttcgagttggccgcgctccagggccgcctcggcaaagctgatcgcttctgggtggcggatgttggtgagctcgacggnnnnnnnnnnnnnnnnnnnnnnnnnnnngtccattgggtccgacttgcggtcgatgtatgactgttcaaagcgcttaatggcatactagatttgccgggtattggttcacggagccgcccttgtactctttggttttttggaaagagcaaccgggaattgcgtgcccgtgaactcgcctgcccatgaacataaatggtgccaccacgctcggagcgatctacacgtactgaaccgttagatactgaaggggcaaat

SEQ ID NO: 70740 - DNA, 381 bp, Arabidopsis thaliana landsberg
gttctccttccacgcctaggcatagaagaaaaagtaagagacagaattaaagtcaaccacttatcgttttagtttagatagacctcagtacctgtcttgggcatgttgagcaggaaaagtaggcatgaaatctttggattttggcagagggacttcgcggaaccaatcatgctttagagcttcattaacagttattctctgcagaagaagccacagagatccaaaagtcaaggaacaattaaagtgcatactggattaacatgcatgcaacagatacatgtattctattaccctatcatgagcgcccgtatggagctgtgggaaaaagtgaaatacaccgtggggctgaactggtgcaccaaggaacgaagtgggtgggga

SEQ ID NO: 70741 - DNA, 145 bp, Arabidopsis thaliana landsberg
aacggattatgagttatagagaaacgcccaaaacgccaaccagcaaaaacgtgacgttgaatcatcctgtaagcttcacaacccacccttgacggatgatgaaacccttcttttgaacaaacaaagacgacctgatgcgaccgaa

SEQ ID NO: 70742 - DNA, 376 bp, Arabidopsis thaliana landsberg
gccgaattttatcccccccggccctaggcatgggatgtaccggcggggaacggattatggaataccaaagcagggatgtatcaagggaacaggaatgcgggtgaacgatgggatgcaagctattccgaatgcccctgtaccactcttgtgtgttactccaacggatctcagcgcctcgatgtggaaggaatacaggatcgtacagccatggatgattccaaaatgcaagcaccaactggcgctgcagagtaagcatgcgctctggccaagctcaggccggatagagcagatagtttgagggccaaagctaatccagcgatccagaaagctgcacctgctctcatgcgtgcaaaggctgttaaagcttcttccgagg

SEQ ID NO: 70743 - DNA, 321 bp, Arabidopsis thaliana landsberg
atgaatcaaatctaaactttattatagtgataatttaatcatgtttctttcaatttcgtttatgaaacgctaaaaattttctagttagaatacaatacattcctatcatgagctggttagtggttacgatttaaataattgattaggaatactagattagatgtttggattaagcgaactaaccacttggataatgacacctatcattcttgattgttagtattgttttagaaaaaaggttatcacttatcatcaatgtcatgatcatgatccaagaaaatggagggtatttttgtttatatcttctctttgacttccttt

SEQ ID NO: 70744 - DNA, 570 bp, Arabidopsis thaliana landsberg
cctttcatttttccctcttcaacgtcaagtaatatttatttttctttcatataactaaattttattatactacgcaatttgtattgatattttaagatcaaattcacggatattttatctagtatcttgttattactgttactgttttgactattcttgattttgttttgtaaatataaaaaagaattaaatttatcacatttaggagaaaagacatcactttcattgaaaaaaggataaatataagtgggatccatgagaatgaaatgcttacttgtcgtacatgtacgtataatttttggtttttaaagtgataaatttagttgtctatatgctgattaatataaagaagtaacatagtaatgcatagacgtgttgatctctaattttatataagcttgtggcttttgatgatcttcaagtgaaagtgtgggagacaaggaatatctacttcgtcttgaagtgtactatgtttatcaacttgcccactgcactttacgtgtattcacactcaggtccaaatcaattatatatataaatatgtaactacataatactaatatgtgatct

SEQ ID NO: 70745 - DNA, 500 bp, Arabidopsis thaliana landsberg
  unsure (1)..(500): unsure at all n locations
aaagagctcctctatccgccattaacgtctggcgaagcgagaactgtgaagaaaatgctctgctccatgtttagacacactcaacttgnnnnnnnnnnnnnnnnnnnnnnnnnnnnnnnnnnnnnnnnnnnnnnnnnnnnnnnnnnnnnnnnnnnnnnnnnnnnnnnnnnnnnataattgcaggggtaatttcgagatcatcaaatgtctgacctgacacgcctacgtggattctctgttctcttcctttttccagaaacgagggagagagagacgaagcatcaaacaaggcaaaaacaaaaaaaaaccaggagagaatattccgagggaaaacgcgagaaaatttcttacgttctgcgagaatctccagctttcctggggaaatattggaaggcaaaagccgaagggtttaaggtctctgtaatcgtcggagaaaattgaaatatcggccgtaaaacgtgaatgtagtcttaatcttccgcattttataacgttgatca

SEQ ID NO: 70746 - DNA, 312 bp, Arabidopsis thaliana landsberg
gccagtagatgaacctaactgtgggttctaaacttaaaacatgcatattacacgacccgtgagcgttttgatatttactgagaactcataaaggggtggccctggacaggatatgaaaggcgacactaacacagtaaggtgggccataaaaaaactgttcgtaggctctgcgacgaagaccatccatctgcctgctagggagggccataatagatttagaccaaacaagtatatgaacataggatcgagggttggcaaagcactacagatatatagatgagtgcgaaccggaaaagaaggagcttaacaaag

SEQ ID NO: 70747 - DNA, 631 bp, Arabidopsis thaliana landsberg
tgctccatggcatcatcaccatcgagaatcagcgctggcggaggcattggctcgggctttatcgcgcggtggcgctgaagcgctgggatgtcgtcgtcgatctgcgcgcctcggccattgcctatctgctgtggggcaagcggcgctacgtcgcgcaaaagcgtcaggtcggcgagcatcgcgtcaagcagatggcgcgcatcttcggtctcgacacggtgccatcgccgcgattgtggatagcgcccgcgcgggaggccgaagccgcgagtctcgtgccgcccctttcttcatcaggtttgggcgcgccggtgctggcgatcggccccgccgcgaattggcgcggcaaggaatggcgcgcggagcgtttcgccgagctggcgcagcgtctgaccgcgccgggcgggctctttccgaatgcgcgcgtcgcggtgctggcggcggcgcatgaacggccgcaagcgctgccggtgatcgaggcgctgggcaatcgcgcgatcgatctggtgggcaagattcatctgctgacggtggcggcggtgatcaagcgcacagcgttgttcatcggcaacgacaccggtcttatgcatctcgccgcggcgaccggtaccccgacgctcggtctcttcgg

SEQ ID NO: 70748 - DNA, 353 bp, Arabidopsis thaliana landsberg
ctaccaacaacataagcattcttcttcatgtacccataattcaagtgatgggggattttatagaaattttgaggttaccatagggcctacgaaaaattacccactgcaacatggattcaattttcttggattgacgatacgctacaacactacatacatgtcatttgcccagcgggggacatctacatagaaccaagcctggccatcaaacgctggggagggacaacatgatcacctgtcatgctctatgcaaagagtgtagacatagagtccttattcctatagttggaaagagactattatcataacatgctacttgcaaggcgagttttgtttagaattgagcacaccaa

SEQ ID NO: 70749 - DNA, 606 bp, Arabidopsis thaliana landsberg
cggattctaattacttctaaccgaactcttatcatcttctatcgacttttttcgtactaataaaataattatatcactttctgtcaccaatcgaatttataaaacttctaacaaagcaattagtttatttgtgtatatattaacattcggggatgaagatatgaagtagatatctccgacatagataataaaagttcataaatagaagtacttggtgagaaaatttgttcagtgggacttgtaaaatgtaaatgcagtggcctaacatttttgtcatgtaatattataatgtttcgaaaggattacgctcctgtattctattgctttgtgtatatgattatttacattttgtaggagagacaaaagaaaaaaaggttataagtggctgtcatagagatttggtaaatatatatgcggtcgtatctaccgttggattagcattccaggaggagtctgtatattacgaaggataatcgaacggtcgtgggttcacgtatgtggattgcacatggaaagtgacagcttctcattgattgttctcttctgtctaaaacagattcttatcgtttaaaatggactatgttattaaccaccgcgtaaaccatt

SEQ ID NO: 70750 - DNA, 499 bp, Arabidopsis thaliana landsberg
aacctggttaacttattaaggcagaattaaatttttaatggttttggaggccattccttttttcttttttggacggtccaattcttttccaggcaaaccatggcattcctttttaatcttaaccataactccaccaaattttggttggaatccaattaattttttcgcaaacttttttgggcaactggaaaaggttaattgagtatacggtaaggctaaagctacagatttaaaaaggacctctttacctccagaggaaagaaatttcttactccagcctggcgttttctccttaaccttatcgacaatgaacttaaacattcctgcttttttcctggggacctcctcaggtagccccaaatactggcccccaccttcttaatggtgaattcccagaatgtgtctcatgcgagttttaactggagctttgaccctgcttccaaaagaaatcgccgatttcctcaagttaactgcatgtcccaaaattggttcatatcag

SEQ ID NO: 70751 - DNA, 628 bp, Arabidopsis thaliana landsberg
  unsure (1)..(628): unsure at all n locations
gactccacaagatcattatattcgatccgttcctttgtgactaattttgtactaaatcaaaagaagagtgttgtttcggtgcgagattgatgtttttgcattaagttaacgtcttgtcacgcttaatgtttttatcataccagcttggcttgtagaagattgcacaaccatcacgcttcctctggccggttctctgaatataaatcccagaatatcccagagagtccatgttatttctgtaaaagctatcgtactcatctacttcctgcgagcattgcaactatataactaacaagtggagacacccttttgttaaacacaattcaaaggccctatgaacaaacaacactaacatttttacaggcctgagcttgtctaatggattgaacaaaagagaagaatgaattttgtgtttcatacgaaaagggtatctcaatactacctaaacacaaaagaagaagttttcacaagaataaagtacctgcagacaaaagaaatcagcctggagatttttgagaacgctgagaatngcatgtgaacgagctttccatctgcaacacangaaaaggaagaccaagtcacatttactacaaaaccataaccctttaagaagcaccattccctaata

SEQ ID NO: 70752 - DNA, 3718 bp, Arabidopsis thaliana landsberg
  unsure (1)..(3718): unsure at all n locations
gcaccaccgattgccttttcatatttattatataccaaagaaacttattgttcaaaagcttaccctaaacttgtaagaatgtgtcaataaatcaaaacatctcttatttactataatttttttacatgaattttccttctctgttgcaagaccagtctacagtatataaaaagctgttacaagagatcatagcattcgcttgtcacagatacccttcaacttaatatataaaaagctgattaagtcgtaaaacaacgatttcttggtagatatgagtctatgtagtcatgattattacaaatataaaaacaaatccaatgcataacaataaaacaacgcaaaagaagattctgcttgatcttctttcctgtcctataaagagttgttgctagatgaagaactagagagaaaaagattcagttttaattttccacctataaattgttcaaaacataaacaacaataaacccaaatgacaacgcagatccagaagacccccatgtagaaagcaagtgagttccaagaatatggcgaggaaagaaacttacaattaaagggaagaacagagccttatctttagccactcttgacccgttcgagttcttcttcagctgtttttaactgcaaacgcaatgtgtgtactttcctctccagctcctctacattgctcctgctagtggtaggatggtacggcgtcaagaacttatgtgaaaacgcctttaaggcttcaacccctgtcacctgtgatccaaacatccacaacaagtgtaaatctcaggatgtatattatataaggctttagtttcattttcgtcttgatcatgttccttctcatctatattgaatgtcatgcgttcttacctcttccggaagcagaggaagctttgtgatattaaagtcatcgtatagcatataaaactgatcaagatacttctgttgcatccgcatccttgctctgagcaacttggactccacatctacagaagacaagtgtagataattcgtcaaatttgtatgtaaaacaagttcaaaacgagaagatagacacgacagcaaataaataggcaccttcgtcgtcgtatagtacttggttgatgataatgttatgcgtgtcaatctcaaacttggcgagttcctgaacaagtctctctgtttcatagagagacaagaactcggggatgcagacacaaacgaacgtagtcatatcctacgtaatggagccaaatgtgtcaatttcttatcttaaaatgcagagtttgttagatatgtatcagaattttcactaatgcaaatgaatgctgtcaaaccgtatgctacagaacaatgtgaagaatctaaaactaaacttcacgaacagagttaagaaaacagtcaatgagtactgaaaatagcaaagaacttaaacaattgaaaaaatgataccgggtctttgaattgccgatttacttgctcaatcacatctttcaagccctcaagtcttcccagcaaagcatcctctccgaactcatcctccatgccaaacatacggctcatctgcattaccaatcagttccatgaaaaatcagccaaagaagaaaccaaagagcaatatctgttgccaagcaaactgaatttgacaagcttaaagacatgcctgagtcatcaagccaccaaatctactcttcaatgacatcaacttcgaaagtcccttttctagtgtggccggaaactgtaacaggcggagagtatgtccagtaggagcagtgtcaaacacaatagtagcataatccattgtttgcaccaacctaaggaaacataaacatatcaaaatttgactgtgataatacatggataaaggcagatgattactagaagaactaaatggctatttacttcaacatctcagcaaaactcatagcctcatcgattccaggaatcgcatttgccaaatcagagaataaaccatccatcccgtctgtaccagccatgtcatcagtttcaacggtaggatctacctcctgagaaaagcaaacaagattcactcactatcaagagggaaggagtgtgaatcgtaaccatttgcttatagtatgtgtatatatatacatatacacacagacacaactnnnnnnnnnnnnnnnnnnnnnnnagccataaagtcatcatcaagcctgtctattagaggcgacccagaaccacaaaaaacaacttttttttttttttttgaatttggcataactagccatgaattttaactacaatagacaaaaattcgatttgatttggggacatcaaatcttcttcacaatccccttccgtatcaagaatacaaattggcgtccaaattccaaacctaatccccaaaatcagagtgggcatatgataagaaaggcacaaatcaaccgtatttatgcaagtactaaatctgacttcaaaatcaaaattgattccatcaatctgcggtttgaaattcgtgaatcagagaaccctaattcccaatgagattaaaatccaggagcgaaactaccaaattccctctaaaatctagcacgatctacaacaaaatcggagaaagcttaccatggcttagagattagagaaaccttgaaccaaagtgggagatttagtgaagcgttgctgaaaggcatcactaagattgtgagcaggatcggtggagatgatgagaacggaggatcgaacactggcgagacaaattgcgagaattgaactgcatgtcgtcttcccaacacctcctttacctccgacgaaaacccatttaagagactcttggtccagaatgttctgtactgtcgcctccggcaaatccgccgccattgctaattccttgctcgtctctcttccactagtctcaatctaaagagctccttgttagatatttggcgtacggaagagtttaactgcggcgagagacttttaacgccgaccggttcaatattttggttctcggttttgggatatcacagcagtcttggtttgatttttttggttatcggttttcacttgttcaatttttctttttttgttaaaaatttaaatttggtgtgtttaagttcataaacgctaaataagcccatacaaaagcccacatagatgaagccattacgacagcgtattgtgagttacgattgaaaacccctctctactcggttaaacccgtcgccggcatattgatcttcgccggaggatatggcgatttcagaagaagaagccaaactcgaaaggttcctagattggcttcaggttagatccggattaagtgttgtttttcagtcctgatctgctgctctatatcatggcattttgtgtttcgatctaatttcattcaggtgaatggaggtgaattaagaggctgcaacatcaaatattctgactccctaaaaggatttggcatattcgcttccacctccactcaagcttccgatggtatagtattgttcttaccatttcttgctgggtttttttccggggaatatgtatggaaagttgatattgaattctgattcagctctggaaattttcagaagttttgcttgttgttccgcttgatctggccattacccctatgagagttcttcaggaccctctcctgggccctgagtgtcagaaaatgttcgaacaaggacaagttgatgaccgctttctcatgattctgttcctcactttggagcgtcttcggatcaaatcttcttgggagccgtcagttattatttttatctat

SEQ ID NO: 70753 - DNA, 513 bp, Arabidopsis thaliana landsberg
  unsure (1)..(513): unsure at all n locations
cctccctccaagaccaccaggatccgaacccatcctttgtaaacaggtctgaaggtaggccgggcctggggttaactataacggatgctttagggtaaggtttctcagtcttggatcgcatgatttttattagggaacagaatcctaatttcatgatggcattcaaacaaccgaaatggaaaattgtttaagactacgctaaacttgtacagttgtactatttagagcccaaagtgataactgggctatggctgttatccatgcaaaggaaaaacatccaaataaagtgatgtccatcacatacatcttaagtaaagtaataatgggcctagctaaggtatagcccatgggcttattcgctgatctaaccaacgtgtcgctagatcacttccttgagtttttaacgcaaacagtcttccatgtcaattatgtcttgttaagcaacgattcctccacaccagaaaagaacgttcaaactgaatatggaacacnatcaactacactcagataatc

SEQ ID NO: 70754 - DNA, 362 bp, Arabidopsis thaliana landsberg
cttatataacggtgcacttagtggcgagacatgccttcatctttgttgcaggggcatttatggatccgttaccgggcagtagctggccacaaaaaccgagcaaagagtcggtgacgctcatacttctcttggattcgcattctttgttctcaaaatcagctagaaatgcgtgcaaggatctagaacgggaactttctggagaaggaactgcgcgcttactaatcatatttggcgcggccgtagaagacgcggactcttttgtagctgaaccaatatccggtgcaagaacgagaaaccccgcacaacctgaaatctgcccatatgatatagagagataggcgtcttgtgacacaagttacaca

SEQ ID NO: 70755 - DNA, 489 bp, Arabidopsis thaliana landsberg
ctggatatgaggtcagatcctgatttccagacagcttcagctgaatccatcattgatcatcaatcactatcactttatttgaaaaaaaaaaatagaaaaaaaaaagtttagaacggaaaaaaaaaattagataaaagcgaagtatttttatttctgtgcctcttttgatcactcctatgtgtaaatgagaatatgagtgttactttagatgatggacttcggtttttttttgctgttgtttcgtacttgggcctctctaatcatatttatcaaggcccattagtgagtgggctaaaagatataataagcctaatcaactacttttgttgacgactaccaccctttcatgtatttgaaaccttctgcatcaagttggagccgtcggctttgagggtcggaatgaaacctctacgttaagcaaagtccttacagactctcccaattcccaatgtccagctcgggttcctctttgattccttttcttatttc

SEQ ID NO: 70756 - DNA, 591 bp, Arabidopsis thaliana landsberg
acgtattttctattatatataaatggtatataatgagtaaataaagattcttagctgtaaataatgttacattttactttcaattttaaggaagtgtaagataatgatacagtatatgcaagtgattcacatatatgtagatgtggaaaatcggaaagtaagtaattaccatcttgaagactttaacagcatgagctttgagtttaggattgttgtgagggacttcatctgagtctcttaggaaagagaacaagccttttgctgctggtgctatctccagtatcctatcacaattatattgttcattagctcgcatatataaacaacatgtaaagagcttatatataactaagtatatatggttactgtgagaagaagtgaaggctgtatttggggatgtcttgtttcagtatctcccacgattccttcaccaaagcttcttgcttttctgtaaacccaatctctcccatctctttctctctttctttttctctcacaaggttgaaaaaaacacgaatatttgtgtgtttatatgtctgggtatctatatatatatggtattcaatggtccttggttgggtctgtgagcta

SEQ ID NO: 70757 - DNA, 547 bp, Arabidopsis thaliana landsberg
agctacacaccgccgctccaagaatttgaagactgagtacgagaactacgtatggcttatcgacttgaagaccggcgagaataggggcattgaagatcccaagtgcgccaatcacctcatgagcgcggcgcgctatttgctcacgaccctagcaccagccgggagcgtctatgatgcgggacggaaggagcgcgaagcggtaagggttagcgtaaagcggcgggagctcacgaagaatcaggcgcgctaattacagaaaatggcgcattgactgtcgttcgagatcgtctcgccgcgaggtgtgcaattgaacgcctcaatgtcattgctctgtccacccgtaacatcgccagaaccaggcattatgcgacatgcccgctttaacgaagatacggcagtccctgatgcgcgcacgcagttcagagtcgtgctcgatacgttccctttcgcatcataagaccggacgatgctcacctgcttcaacggtccgaaatagagcaagctccactcagaagtgagctgaggcggtctctgcggagggcacaac

SEQ ID NO: 70758 - DNA, 480 bp, Arabidopsis thaliana landsberg
  unsure (1)..(480): unsure at all n locations
aatgaatacatgcgcaattagagcatatcaacgtctgttcatccatgcaataatcttaaagactttatatgtattctaagtttctaaccatcacaaaatggatttggccacatggccaaatgaaggttatatatactatatggcccttgtctaattttccttgaatctttgaggttcggattacgctagagaaaagcaaatagttgaacattgattaacaggcccaacttgttttgagtccgggtcgattagtttagcccggcaactttaaacgcggtcgagccttcccattatttgaatatacgggccacatgctggctcgtggccaacatgaaaagatatataataaaatgnnnnnnnnnnnnnnnnnnnnnntattgaatcgccttgactgactattacatctgttcgccaatttttacaatgaaaacaggccaaccttggaattttaagcccattattacactaccaactctattt

SEQ ID NO: 70759 - DNA, 441 bp, Arabidopsis thaliana landsberg
ggaaatcgataggaaaataaaattcataaatgagtgaaaatgaggtgacaataaatgaaaaagtttgatcttctatttccatataaaagtctctgagctctctttgcgccattatgttttttctttccctttttgctgtgtttgcattttctcttggtttaacgcatacatttacaacaatgtttcacgttatttagtaaccacaccttcaataaatcaattaaatggacaaagaggatataggtatgtcagaaagaattcgaagctttgaagagtgacataacattgcgaagttaaatgtttgagtctcgatggtgttgggctggttctgatggagtacaacattgatcgcaacacatgacacgagtgatagcataattttgtgcagacataaataaaaccaaacgagatgataatataagaaaatgtgatctatagttg

SEQ ID NO: 70760 - DNA, 453 bp, Arabidopsis thaliana landsberg
aggtcaagatatccaatttatgaaagaaaaaaaaaattaaagcaatttttctaactagaccttgtttattcttttataaattgctctagacatgttaggtccctacagaacacctaattacattctaacaattttttgaacattggatccaacacgaaatcaaagtaagccagaattgaatgtactcgattattatattttgcatatacggggttgaacatattggaatttgatagatcttttaaacaatttgtaacacatgtgtaagtgtgtgacctttcaatataaaacaccaatatatcaatcactctatcagaagtgcatttccgttctccggatggcccatagcaaaacactatgcacgtacaagaatctattattatatagggcatactttcaaaatctaatgtctatgtaggtactaatatatgatacaagttcaacgggtgctgt

SEQ ID NO: 70761 - DNA, 288 bp, Arabidopsis thaliana landsberg
gactaactggggtatcggacatggcataaaagatttcttagaggctcataaacggtccatattacagttccaagagccaataaaggacctgatatgaaatatataacatcaacttggatatgctcaagtagaaagcatccttattatggtaggctgcataaccattatagtcccttaccaaatgtagtatatgcacttttatctaaatctaggttctgtctatgcaacacaactggcattgctcacacaatacatgtggataggcggttttctcatacatgaaggtgt

SEQ ID NO: 70762 - DNA, 480 bp, Arabidopsis thaliana landsberg
gcgccctcatggcttcgccaagggccgccgaatcgtccaccggcaccagcagccccgttttgtcgggttcgatcaactcgacaggcccagcggcagcgcaggcaaccaccggcttgcgtgcggcccaggcctcgatgatcgtgttgcccagcggctcgcgccgcgacgagcacaccagcatatcggccgccgcgagcagggcgccgacatcctggcgccagccgaggaagcgcacgcgatcctcgatgccaagcgataccgcctgccgccgcaacgccgcgcccaacgcgccctcgcccgcgagccacagataaagccccggcactttcgccaccgcggcaagcagcgtgtcgaagcccttattcggatgcagccggccgagcgcgatggcgagcggcgcatcggcgggcgtgtcgagcgtggcgcgcggtaccggcggcgcgggcgcgatctcggcgaaattcggcagatagtggacgc

SEQ ID NO: 70763 - DNA, 502 bp, Arabidopsis thaliana landsberg
  unsure (1)..(502): unsure at all n locations
tcaacagataaaagttttgatcttctaagaaacatagatcccaagttaaaattaaataacaagtcttacaagttatgattcatcaaattattatttttgatttagataagatacatgagcataattttcatgacaagaaaacagaaacataacaaacaaagatagatgcacggttctcctgtctttaacctctctctaagatgataagaacatacagcaacattaattaataatagccagaaccagatctgttttattcaagcgatcctcctcacttcctcacctacaaatcaacaaacatttaataaattaaacagttattgaatatagtacatcctaaataatatattagtctttttttttgtaagatccaaatcttgattatttaagtataggaaaaaaaaaccttaatcttatatctacaactaattaacacgtagttntttttcaagatccaaaccgttttgttttttggtaaaccaagatccaaaccttattagta

SEQ ID NO: 70764 - DNA, 352 bp, Arabidopsis thaliana landsberg
  unsure (1)..(352): unsure at all n locations
cccaaaaaggtatttatgaggaaaaaggtctgttggttttgccttaaaaaagcaacgaaggttcttaagagtttgttcgtgttctcttacttgccaccacaacacactatttttacttaacactaatacaataatgtattacttgactctttatgatttgatagatcatttcatttggaatcgccttaattagctgtattgcagttttcaactgtattatatgtttcaaaatcttatggagtaaattgatatatcaaacacacatacatgtcttgtgtcttcattaaattctgaaaagttaaatacgtagtagattgtaagactatttgtnggatgggattatatatattat

SEQ ID NO: 70765 - DNA, 554 bp, Arabidopsis thaliana landsberg
ctcagcgtcctgtctggttgcctatcgcgtgttcaaccgtacgcgcggcgcaagatcgttccgtcagcatttccgcggccataaggatccggcgatattcatcgtcctgatggaggacagcgccgcctgcctcggcgtgctgattgccgcggcgggtctggcgctcagcctctataccggcgattcccgttacgatgcggccgggtcgatcgccatcggctgcctgctcgctgtcgccgccttcgttctggcacgcgaaaccaagggcctgctgatcggcgaagcggcagcgccggagctttccggtgccattgcggaactcctcgacagtcatcctgacgtcacagacatcaacgaattgcgcaccgttcacctcggcccgcacgaggttctggtagccatcagcatcgacttcagggacggccgcccgtcggaagcggtcgagcagaccgtcacgcaactcgaaaaagagatcaggcggcgtttcggggatgtccgccgtgtctatatcgaggcccagaaccggaaggaccacctcggactggaaaggagag

SEQ ID NO: 70766 - DNA, 485 bp, Arabidopsis thaliana landsberg
tgacggcaggttcgatggcaagatcggcgaggcttccaaagccgctatcgtgtcgttccaggccaaagccgggctgacgcaagacggccatccaagcatggaagtgctcaaatcgctgcggcaaacggcaagataagaatgagcctgattgccattttgtagggaaacggcattggatcggctggcgcatatcctgaagatcatgcggcagtggccgatgctgttacttgcggcggcaatgctgttgctggccgttctttttgccaacgcgcccgccatggcccaggagcggcgctggtctttacgcgacttgttctttccgcgccgcgaagaacgcgtccagccaccggttggagcctttcccccggctcccaaagcacgcaaaccgcgccgtgtcacgccagccgaaacggcggcacccacgacacccgtcgggaaaaggctccagatgcccgcaccgtgctcgtcgtcggcgattttatggc

SEQ ID NO: 70767 - DNA, 552 bp, Arabidopsis thaliana landsberg
tgataaatatgcatttgttatattcatataaataagaagggataaaataattaaggagatcacatgtccattcattgttatgccgatgaacaaccccattttgttattataccaaacatttaatattcgactgtcgaaaccgataagtgagagatgcgtacacacaacacgtatacggtgcacacattgcatgtacacgtatacgaaatgactagaaaaccctcgagatgcaaatcttcgttgaagagaataaaaacttaaagacaaaatatttgagattcgagatctgatctgaattggtttcgtagatagattcagagtttttgataccttgatccaaatcaagatccaactatttttgactaaaaacacaagatctggatccgtttgtatatgtagtatacatatttatgtataagactttatttgtaacatctgatttattattatgatatatatatatatagttaaaactatatttaaaaatcaaaatatatctatattttttctaaaggtggtataattgaaaaatttgtttcattttttttcgtc

SEQ ID NO: 70768 - DNA, 615 bp, Arabidopsis thaliana landsberg
  unsure (1)..(615): unsure at all n locations
cgaactgtgcccgcccggtggctcttgaggagagaaactcctgaagccaggttgtttttcatcgtctcgagaccagcaatttccaagcgcggcgatcgcatctctgcctcatcaccagttggaccacgaagagaacccatgactttgccaacaaggccacttcccttggcagaggctccattctgaggaccagatgtcttgcgttcgaggtattgcaagcgatgacgcttggtgagaagcatttcgttggcagtatccagcccagcttgctttctcgctacatcagcatctgtgacaggtcgtttgcgacgggttgtaagatccatgaatgcctgccacggtgaagaaacagcagcgaagccagacagtaannnnnnnnnnnnnnnnnngacgacaccaatacgttccaggcattcgcgtgtcaacatctcggagaggcttccactccaattgcttgtcctgcgcatcgcgccctcgggaacagcctggccaacagaccagaaagcanatagccatcccatgaacagagcagtttgtatccccaagcgacccgggaagctttcncttggcagttctctgaaaactccatccggcactcgaaacaaccgatcgaca

SEQ ID NO: 70769 - DNA, 152 bp, Arabidopsis thaliana landsberg
  unsure (1)..(152): unsure at all n locations
ctatcaatgcacatggtattgactattcacgtagacgtgactgagtttgactggactcggctaatccgggggtatgccccaacnnnnnnnnnnnnnnnnnnnnnnncacactgagcttgatgtccccttctaggtgtcgaaccacacgggac

SEQ ID NO: 70770 - DNA, 126 bp, Arabidopsis thaliana landsberg
aagccaaaagaacagccaagaaaaaaggccaacaaaaaagggaacaaaaatgttgaaattttaaacacacacaagaagagacaaagggaaaacggacaaaagacaaaagcgcgacacgacaaacaa

SEQ ID NO: 70771 - DNA, 618 bp, Arabidopsis thaliana landsberg
  unsure (1)..(618): unsure at all n locations
cgctttcacgcagtattatatcaaaacaggtaaaagcccgctggtgatactgcaatacattgccagcgcagccgttggaaaagaaaaagcctatggaggtggagcaggcatgtacctgctggggctgctgttccactatatcatcgcttacgggcttaccattttctttttctggatatacccttactggcgggtgctggcgcgtaaccgcctggctaccgccgtgctgtacggcgtgtttgcatgggcgattaccgcgctggtgatcgtacctttaagctatataggaaagtttccatcggatcctgcgcaggctgccatcgccatattgatactgatctgcatgatcggcctgcctttgtcgttcatcatcggcaattaccacgacaggaatgtgcatattgatgaagtattatagtgttaaccccttattatgactatacaaaaagcctccgggcttatcctgtgtttttgtttgcaatgcggcctgttatccgcacagaagcaatgggtaagcctgttcaatggtaaaacattggagggatggcgtacctaccagaacanacctgccacttcatggacggncggcaacggcatcctcgccaataagggcataaa

SEQ ID NO: 70772 - DNA, 444 bp, Arabidopsis thaliana landsberg
tcagacgggcgttcgagctggcggtactggcccagccgctgctcgatcgcctcaggcacagctttgtgttttattggcgcgttgcgcatgaacatggtgccattgacggcagccaggcgcaactgctcgaagacgccgaggctgccgcggccagtgtcatcgaggtcgacgactttccggcgggggacctgccgcgccggcattgaccagcgtatctggcgtggcggcgccgtggccgcgtcacgacgcccttgatcgggacgttatttttgaacccatcttacgacttcgatggcctcggcgtagcgggtgccgatctgcacgccgcgcatcatggccaggctgcggatgaactcttcattcgcataggtgcgatgcttctgtgattcgtacatgccgagcgcgcggactttggcatcgagatggtctgtggagagattcacg

SEQ ID NO: 70773 - DNA, 193 bp, Arabidopsis thaliana landsberg
tctaatgtaacaaacaaaactcacgaaatggaacgaagtcccctcgtttatccgacaagcgtttcaaagtacgtacccaacaaccctacgccaatcaagaaacactaaaatcacactaaactcaccgggagtgggatataattcggagcacgaaacacatgaaaggtgcgagcggtgacaggaccagagtgaa

SEQ ID NO: 70774 - DNA, 553 bp, Arabidopsis thaliana landsberg
aaaaaccttaaggctataagaactcattgaaaaactaaagtaaaaatttcatgtttggcaaaaataaaactttgaagactggggaatggtctcaaagccttgaaagtctcttgccaatcactcatatgtgtttattacatatggagtgtgtaaagagactaacgaccaacgaccaacgacctcaagacaaaagcactgcatatatgtcttttctataaaataagtagaggtcaattaactgtatttttataaaagtcgctataagaaatttgaatttgttttcttaggtcgacggaatttacttacttccaattagattcccaatcaaaagcggtttagaaatattaaaaattgactataaggttattcaaaatatcaagttatattcgttttatcttgtcgatttgatccacaacaaaccaaataatatatttctataatttcaaaatcatatatttgccaacgaacataataaattccttggtggctagctacaaatttagtacaatgaacacataggagtggttcaatatattttctcacattaatgaga

SEQ ID NO: 70775 - DNA, 540 bp, Arabidopsis thaliana landsberg
  unsure (1)..(540): unsure at all n locations
aacggcaggtcggcatgtggatcaatatttacaattcctgttttttttcctaaggcttttgatgccgaccggatattggggtacgcattgttgtgcccgcnnnnnnnnnnnnnnnnnnnnnnnnnnnnnnnnnnnnnnnnnnnnnnnnnnnnnnnnnnnnnnnnnnnaatttcttctaccagggcagggagctcattaaattttttttcctctgcaagccgcatcaggtcactgcaatccactgttcctgccagcaggatatgttctccttttaaaaaacggttggactggatattgagaaatgttttcaggaattcgggccaaaaaagggcagttcccggtttcccccaattggcccttacgccaatgtcctcggggattcccaacaagacaaaacgggcatcggactccgctattttacggctattcagcagttgaacagcctgtcccattttggtctcaccttcacgttcagtcaaatatgttttgaggtcctgttcaagtatgggttttaaatacgcagacatggttgattttatg

SEQ ID NO: 70776 - DNA, 271 bp, Arabidopsis thaliana landsberg
ccataactactcacaaacgtcttaggcgaaactcttgctgcgcttttggtacacatgccaggggcaaggtgccctactgcccctgtcgggtctaacatggagtcgactctagcctacattccgcgtagcttaacgcgaccgatatctgacagctgagggcaggagtactcgtgtatgggcatatgctgcggcgcggtctccgagcgcgcaagaacggatacactactatggtgctagttctctggcccacgagcgccacctaccgcaacga

SEQ ID NO: 70777 - DNA, 381 bp, Arabidopsis thaliana landsberg
gattcatttctctgtagccctaattcaaggaagtggggtagagtatggtacactcatgtgcagaatataaaaaacctttctcttttgttcaagcattgagttattgtagggtaagcattacatgtacatgtggcctgccatatgcatttgtcacctctctctctctctcttaaagccaagaacttactctttcatctatgtgcggttcatgtgatatcaggattagatcatcctagtcaatatgagctgaaactctagctgtctaaagtcaaacatattcatagtctttttttctgcgttgggaggataagatgttgcgcttcattgggacggattgacatgcttctgtgggaccaactagcatggagggtgactttcact

SEQ ID NO: 70778 - DNA, 640 bp, Arabidopsis thaliana landsberg
cctgccctgtcaggcatgctcgaaccatgcgccgatcccgctattccagcgggtcaccttggccaggcccggcgatctcggcgtgcacacgtatcgcattcccgcacttgccgtggcgaaagacggcacgctattggcaagctacgacgcacgcatcgatgcagcgcacgacttgcccggcaacatcgacgtcatgttgcgccgcagccacgacatgggccgcagctggagcgcaccgcagcgcgtggttcactacggcgacgggatcggcgctggcgacagcagcctgctggtcgatcgcgacaccggccgcatcttcctgttctacgcctacgctccgcgcggcatcggctatgtctcgtcgcagacgggcaatgccaccgacagcaccacgacactgcatccccgctacatgtggtcagacgacaacggcgccagttggcatgggccgcgcgacctgactgcaaccatcaagtcgcccgcatggaaaggcctgtttgccaccttcggccacggcatccagttgttcaacgaccgagccgcccgcggacgactgatccagccctatgtctttcgtggcccggaccatcttaaccatgccgtcaacatctatagcgaagatcatggcgccacctggaaa

SEQ ID NO: 70779 - DNA, 508 bp, Arabidopsis thaliana landsberg
  unsure (1)..(508): unsure at all n locations
gcggcgacctttaccaggcctggcaggcgatggccgaccggatcacgcaaagcggctatgttcggccggtcccatgcgccgnacggtccggatgcacttggctgctctgcctgcgtcgcggccccgatgggcgtcgctcgtggccgccggcgttgcggcggcgggcgtcgccgcattggtcgtcctgaccgnnnnnnnnnnnnnnnnnnnnnnnnnnnnnnnnnnnnnnnnnnnnnnnaccaccacgcaccagcgtgcaacggtcacgttgcctgatggatcgcaggcggtgctcggacctcagactacccttcatgtcctgcgtcgcgcgacatccaccgaagtcagcgtggtcggtgaagtgttatttaccgtggcgcacgacgcgcgcgcaccgttcatcgtgcggacacatcacgcggtcatgcgcgtcttaggaaccaccttttccatgcgtgactacgacggcgaacattcggcgcgtgtcgtcgacactgatggacgggtg

SEQ ID NO: 70780 - DNA, 857 bp, Arabidopsis thaliana landsberg
  unsure (1)..(857): unsure at all n locations
ccatcgacaggagttatcagcaaaaagtgcaatcttctcgtctgctttcactccaacgactcgtaaaccctcaacaaagtccaagatttcttgttccaactgcaaaataagatgattgaaatgaaaggttccattactcatccaaatttagcatcactgtaaacttcaaaagtaattacccacctatctagcaacaggaagtatttcaggcagataactgaaacaacgttggttcctaacatatagattaacacagcaaataccaagggacatgcctgacaataatcataaggaaatatcaatttagtatgcttcctaacattcgaatatggttcatcttcagcaccctctagctaccttcttattgacaagcagttaagatatgtagatacaaaactaatcgataaagaaaaaaagctgatggccaatcaatctaaactcttaaacttcagctttttccctaagtgctgacatttgctttaaaaacctctatttcaaaagtgtggggatctaaaataatagcaatgagatgcgaagtagtgttacctgtctgtacgtgaatgtagaaggcgggtcatgatacggatctaccaccgcaactctgtcaccgtacttctccacagatgatctccaaatatcaggaacagacttccattcattagagctcaaagcagcctcccttggcaatgataagcggtctaagaatggcgaacaccgtcttaactccttctcctgaatctataagaacggaacacaattgatgttacatatgattcaggaaatgaaccatacgggtaacttacaagaaccctataaaagcctntcaggatcaagctgtttaaaccctggtcatcaga

SEQ ID NO: 70781 - DNA, 215 bp, Arabidopsis thaliana landsberg
cttgtgctctcagtttatctgtatactctcctactttgtggtcctactatagaagctatcgtttatgttcacacgatttttccgagctaaactatatatattgaaggttaggaggctggcaaaagatttggtgaaataagtacgagaaccataaaggaaagttttgatgccaccgggctatactttggcattacggaatgtgaaaggccacttgg

SEQ ID NO: 70782 - DNA, 587 bp, Arabidopsis thaliana landsberg
  unsure (1)..(587): unsure at all n locations
tacatactggataggaagtgcaagatggctggtaacaatttcacaccaatggcggcatacagctgggtcggtggtatcttctgaagatattcaattccttgatgcgaccactgctcagccagaattttcagatcttccaagttctccattactctctcaagtttcacttcttctgccaagctgttcaaaacctgcatccagagatgtaattcattcctcttaagacataaaaataacctagagttaactagaaaactctcttctcctacacaaacaacatgcatgggaataatttaaaactgcttcctgaaaacaaaaattgaaatcggaactctctaatatttgcaaacattatatcaatactggttctcacattatcatgttcatccttgtgataaacccagtacagtgacaataatcatcttgtgaacaaggaacacaatttgtttatcccaatttaaaaccagttttaccagatcaatacaacccgtagacccatacacgatcatcccaagttatgaaaagataaatgctaatcctacatntgatgcgctgttcaacgagatgtaaaaaatacaaacagattc

SEQ ID NO: 70783 - DNA, 3252 bp, Arabidopsis thaliana landsberg
ggaaattcttggatgtacttaggacagtgtgaacagatggcgttttgatttcttcatcttttccactggcctgacgggtggggggaagagagtgtaagactgttgaatcaatgccaccgtcgtgaagggagtttattcgttctggcaaaagggagtcagcaaacaaggtaacaagagagccaccttcacgcattttggggagagccaaatcaaccattgcaagtcttaacagtggtggtggatgccctaaccaaacagtgtgatcgagcggcaggtttgaagttgcaactggaagctcacttatgtttgactcacaaatcattgcaactccttgtattttgttgtgggagttcatgcgaagacgagatgagttaccagatatccaaacaggctggatttcatcaaccagggcatcaacctgtaattgtccagcactccaggcagttaccagaatcgaatctttgctaacaagattatataatagactcactgcccggcctttacattctgcctcccgaacagcgaaatcttcatctccgtcgccactagatgctttatataaagggccctgtacacaaggaaaacaagagatcagcattacaaggaaaacagtagacaaacaaagaacacttagggaacatgtgtgtatgtgtcatctcttttatcccgtccgtgttccgaatcaagttaaggagggtttaaatctgtgatgaagaccactggcttataaaccacatatctagaacattggtgaaacagctaaaatctacgaggagcccctcaaaaagatgaggaattcatacctgtaaagccagtgatgcgtcaagcaaagcataaggctgagctttcaccaccaatatattttcacctctagttccttgctcagtcaaatctggaaatgtagcttccaaccattcaatagccagactggagttgctaactgctaacgaattggatgacttaaccccatacatattagcatcgttgtaaatctccattacggattcccatttgtaaacactgttgcaatatacatccgaagcaatctcagtcaacctcaagggcagttaaacacaaaacatcacaacgaataaaacatcttccatgacttatagaagttcgacataaagaggatagtctgtggaaggaatgcatctgttgcatatcaagtcgtcaccgcgtcaacatgcataaactatttgatacatcaaaggaatcatgggacccagctgattttacccctcaaaagcttcaaatgagcctagatttgggatctaaaacagcttaatgagaatcattcatatcttgttcaagaaaccagaaaaccacaaaaaattgataaatgttatcttggaaacttagcataccaggtacaacttcaagcgataagaaactaattaaaaaactgccagagagaaatgaaaaggagaaagaaccatcatctgcctaccttccaaatggcacaacggggcataagatataaattgaaccatcagtgaataatataaagacctgcaccaattgaaagattaggtcaagacctaaacatgtaatcctcaaggctctatttgacaagacaactaaacaaaatcactgtcagttatcaaacaagtggagcaagaatttgtactgaacttacagtaaatctatcccacagatgatctcctccaaaactgaaatcagcaggataaattgatgaagctgttctagatcttcctggctcaccgggctgcagataatattcttgctctggtagctcagcatctgaagacaaatcgaaaagcctagcatacaaatatcttttagtaagctaaaaagctcttaaatcaggattaaataaaacgatttgattctttataatgagagactggaccagatggtaacatagtaagtcattgcatggcagaaactaacaatctacaaccttaggaactgattttttctacaatttctctaacatctttccataatgatattgatcaatatattgacatgtacatccaccttcactatcagccgaaaagattgttacctgaaaactgcatccgaggatagaattcccaaatgggtgtcactatcagggtgccacgatgcttgtagcaaggttatggcactgtcactactagtatagatttctgaaccaatagaaactaccctgcaacacatagattatgaagtgataacgtataagcagaaggccattaatttaagcaagataacatcataatcaagataacaatgaatataaatgcatcttattagggtaacgttaatcactacctgcaaatgacattgtcttctatcacagaagcacgtccaaataggtacatcacacatatcccatctgagccggcaagaagtacagctgatccagacttattgatggagattttgctaacagaaaatgtcacctgaaggtctggttgcatcacctataatatcatttattagtaaagcttagtcaatcactacatgatgaatcaatcacctataatttatcttatgtagcaaagacaacagaggaaaactaaaggtttttgacagtagtacatagcaagtagaaaagatcttcctattatcatccatcagtaagaaatctaatttctcaaactcttcctaaacctaatttctcaaagtcagtaaaatgtcagcactaaaaaagagctttcgataaatcttcttttcaatactcattttggccgacttagcggtgaaaacagaaagagagagagagagagagagagagtaaatgaccttggacgggactgcggcgaggacggaggatggttcaggttcacccaagcgcagagataatcggtgaaggagatatcgtctcgaatcccagtagtatacgcgcgagtctccgtcccaagccatgaaatttctcggaaacagctgcgacacggcgggttcatcttgggaggaaggaagagaagcgaaaaccgggtggctctggagaggaacccacctaaccggctctttgggcgtcggagatcgtcgtgaatctggtgcatcctctgtctcgttaaagttaaaattcatactttcttcactcgagtgtatctgttttcgtcggaaggagatgcagagacagacaccagattcacggcgggaagagaagggagaaaagaagcgatgaagcagatacagttgaaacgacttcgtattgacgtttaatgggcttttattcggcccattaactatcttcgaaacaaattgaaatgaagaagcactaactggttttaatatata

SEQ ID NO: 70784 - DNA, 362 bp, Arabidopsis thaliana landsberg
  unsure (1)..(362): unsure at all n locations
cttgtgcactacagagcaaaagtcttttttacccccgggttaatgatcaggtcggcataacgctggctgttacgaaaatcttttacggctactgcatcagacgggtctgcttctttttatttcacgacaggaaggggccgaagcgcctttgacaacagggtaaactactgcacgtgaatggaaatatagccggtctgggtaataaataccaattcttttacccnnnnnnnnnnnnnnnnntcaaccagctttttcnnnnnnnnnnnnnnnnnnnnnnnnnnnnnnnnnnnnnnnnnnnnnnnnngacggatatacacctgtatactccccgcgctgccctgccatactgcagagcttgacat

SEQ ID NO: 70785 - DNA, 537 bp, Arabidopsis thaliana landsberg
ctggatggcagacatttgtgggacacctctcacagtgggacaaagagggatcgactaaagaacgtcttggctagctgtagaatacttgaatctatccgatgcataacacacgagcacgcatcgaaggtactcaggtgcaagtcaaacctgggtttgatctacactccacgttcctagaaatatataccgcggaaaaaacctcgtcggtgcctaaaaaaatgcatgcacaaggggccaatggatacacccttcgcgcgagatagtgctatttcaggtctctcataatggcttctatcaccatcatgtataccgggggggtttactgtggctgggtgcacatatctaaatttgctttgtcaagatacttgttcaaacctcttgtggatactaggtagccaccagaaagttgtatccatgttgcatggtcttatgcatggacgagatatatcatggcgaattctgtataaaacatggggtcttccagaaaggactctggtaagtgagatgtcgggtctgtctttacgtaatctacctcag

SEQ ID NO: 70786 - DNA, 375 bp, Arabidopsis thaliana landsberg
acatgatccatacacgaccttagaaaccaaaacaccaaccgaacaatagaacctgaacacgtctattcatgcaaaaaacttggataccaaaacagcagccatgctatcgaacactaaagcaagaagaccaatgcacttggatatagaaccacaaccctccaaccaccaaagactatgtggattcttcgtcccatggctatcattatctcctacgcctctgccttgtccttggttaacttacccggggctattcaatatacggtccgctgactcgtatggaagactctagtgccctatgcgtcaagttacatatcttgtgagccatagtatggctatcatggacagccattataattagtacgtccagcaacaaat

SEQ ID NO: 70787 - DNA, 130 bp, Arabidopsis thaliana landsberg
gtaaaataaatttgccgtttaattatcttttgatcttcataatcctatgttctagagaatctatgattatgtgctgttattatgctcatagccctctatcatcccctatgactctctctactccaaccat

SEQ ID NO: 70788 - DNA, 255 bp, Arabidopsis thaliana landsberg
  unsure (1)..(255): unsure at all n locations
gcaagaaatccacataaacgccgcaattcaccttcactcccacagaacaaagcaccggacagggacacttgacaacgccagccccccccgccaccanacanggaccagagnaacnnggacccacaagagaagaaangcagnccgaaagagccccacaagagncanggccccacagaagagaagccacgcggacccgcccgaacaaacgaaaaggccnnganaccaccncacangacnacgaacgaaacgaggaaa

SEQ ID NO: 70789 - DNA, 287 bp, Arabidopsis thaliana landsberg
  unsure (1)..(287): unsure at all n locations
cagaggnagacccggggcggacaacaaacacaggaacaaacagacaaccncccgaagaggacagaagcagaagcgaacggaaanaacaaagacccggcggcaaagaccaccaaacgaaagaacagcacacgcagacacggcgccccaaacgaaaaaggcaccgacaacggaccacaaagaaaaacacacaagacagaagcacacagcccggaccgggggaaaaagggaaggcagccaacgccgcgggaaccacaagggaacagacaggccaaagccggaaacaagac

SEQ ID NO: 70790 - DNA, 398 bp, Arabidopsis thaliana landsberg
aggtaattacatttgcactttcgatttggagaaactactgttttacttggtggtatgtctacgggattcttttctgataatacttttgtcaggaattgaattggtacttggaactcgtgttaagtccgttgatgtgaggaggaagactcttttatcgagcacaggggagactataagtcacaaattcttgatcattgcaacaggtgcccgggtatggcttgcacaataatatttatgctttcgtttatccaaagtaagagtgtgttccggttactattattataaacgattgatcactggttcttaacaacgtatcatccttttttaggatttttgctttatttggctaaatactttgggttatcttttattggcgaattctaatttttatttgataa

SEQ ID NO: 70791 - DNA, 322 bp, Arabidopsis thaliana landsberg
  unsure (1)..(322): unsure at all n locations
atcttgccttgcaccgacatcgccgcctgccaccagcggtcggtggtgcgctctggatagtagtgggtgatcgacaggncgccaacggccggatcgctggccatgttgccgttggcgatcgtcttctgccccatcaaagtgccgttgatcgaccagtcgtcgctgaggtcgaccttcagcgccgcgcgcgcgccgttgatgtcgttgttgttgtagttcttcttcgccgcatgcgtacacaccagcaggctgctcggggtgcatgagggcgcgttgctgacggtgccgccccaggtcgggtaggtgcgcgtgcccggcacgt

SEQ ID NO: 70792 - DNA, 492 bp, Arabidopsis thaliana landsberg
  unsure (1)..(492): unsure at all n locations
tacgaaaacggccggccggtcgcgcatcacgccgaacgacgtaaccacctcgcgtgcgctggcatgacgataaacaaaaaggtccagaggttggatcatcgctacgctttcattgttttcggccgtcacgctgtcaggatgaagtctagacatatatatttatatatgactatatattttaaaccagcctgccagggcccgaacatgcttcgctcacggcaaagtgccattccgctctacacgcagatcgccgcgacgctgcgcgccgaaatggaggcaggtgcctgggcggtcggtgcgaagctgccggcgatcgaagtgcttgcggacaggttcgacgtagctccgctgacgatacgtcaggcgttgacgactctggaaagcgaaggattggtccggtgccgccagggcgtctgcaccattgtgcataaggaaggccttgagcagcgatggttgcggcnnnnnnnnnnnnnnnnnnnnnnnnnnnnnnng

SEQ ID NO: 70793 - DNA, 525 bp, Arabidopsis thaliana landsberg
  unsure (1)..(525): unsure at all n locations
nnnnnnnnnnnnnnnnnnnnnnnnnnntcatcttgattaggatttcgatctgtttcagggaattgcccaatgctgtgttaggatacaccacgccgggtgcaggctggtagtttttgatgttgttcacgttcagcatcttcatcgcatcaaaactttcccttcctgttttattgaggatctggctggatgtctggtcgtacagttgctcgaatgattgagatgcgaggttcgatgcaaacgggttgccgcgcatctgtatcgcaaattcctgcaggttgttgatggctatggattcattatcgccatacaaacttctcggcatggcactggtaatgcttaccgcctgaaaaggggaagcatcatgccccatcaatcccacagccctgttcagccacccgctgggagtgcttttgctgaacggtgtaccactctccatataatcctgcgcatcaaaatggctgcgggtattgttgggactgcctacaccatgtacaatggccattcttcctcgcgaaacaacggatc

SEQ ID NO: 70794 - DNA, 655 bp, Arabidopsis thaliana landsberg
tggatatgacacttcattataacttttaacttcataaaaactaactattaggaggaagaatcggaatctgcatatcaatcacaatagactatagtatacttagattttgatctaatcaatgggctccttcaactaataagtagcccactaccaataatgaaatcataagacattattaaattaatcaatgttctaaaaatactttggttatgtgtcacgtagagctaatgtgcacacacaatgaaagttgacccgtttcacttgtcccacttttatgatcttttcttttaggttaaatccaacttttataatctcatcttgttatcaaacaaaacttttggcctgtctttttcataatttaaagtaactctcacggagaaaagccaacattttcttcttgttttattctttttaagaaaaatgaattcaaggggaccccaaatttaaaaggaaaaccaaaactcctttctatgtatttattacttgaagttttctatgtaatcaacaatcctaacagtagagaataaaaacatcgttttgggaggttttatattagcatatgagaatagttctaaaattgttttacacaaaaattagattttcttttcctctgtcaatggagctatatcacttgtcattttgcttaaccctttgc

SEQ ID NO: 70795 - DNA, 1996 bp, Arabidopsis thaliana landsberg
  unsure (1)..(1996): unsure at all n locations
cgtttgttatatgttccataacatcagttgtactgatttggttagtttgtaacctgacagttttttatccattgtagatggctcaggaagctgacagtagaagtgaaggatcggttaaagcgattgtgatcccgcctcctcgtccaaagagaaannnnnnnnnnnnnnnnnnnnnnnnnnnnnnnnnnnnnnatactcagtctcctccaccaaatttgtcagctatggagaaaggaaccaagtctccaacctcagtgttatcatcgtttggttcagaggatcaagtcaatagatgctcttcgcctaattcgtgtaccagtgacatccaatccattggtgcaacttccattgattaaaagaataactacacaacatccaagcaacctttcaaagatgatgattctgacattggttcaacacccatttcaagcattactcttttcgggaagattgtccttgtcgcggaagaatctcacaaaccatcctcttacaatgatgatgatcttaaacaaatgacgtgtcaggagaatcactactcagggatgctagttgacactaatttatctcttggtgtatgggaaacgttttgtactggttctaatgcatttggctcggttacagaagcatctgagaacttggagaagagtgcagagccgataagttcttcatggaaacggttaagctccttagaaaaacaaggatcttgtaatcctgtaaatgcaagtgggttcaggccatacaagagatgcctatcagaaagagaagtaacatcatcattgacgctggtagcttcagatgaaaagaaaagccaaagagcacgtatatgctagttttagccattgtacagtttggagtcaattttgatgatccgtgaacattgttttagccatttgctgggtgacttggatcatagcattccacgaactaaatcctaaatccgagttggtaagtggttttacttgtccgccacatgtaattcttgtaatgaagtttctcctgctgtctcacgttaagaagacacttctttttttcttcatatacaaatcagttttaacagtgtatttgtttggccaactattcctagctctgtttcaatcttaggtctggtttatgattattagccttaagaccagtcttaatgttaaaaggtttttacattaagcagattaatatacgagtgaaacttcaaactctgagaattgaaacattgtgcaaagggaaccccctaaatttctgtggacacttgcttaaaaattggagccctcaagtctaattcacttacttaaatattggagccctcaaagtctaatgaaatctatgataaataacaacaattgaagtatatgcaatcaacacaagccttgcttattctatattggaaagtgtaattctagcttctatctccctgggttcaggtgatgaactgtatcactatcacagaaaagaagcagcaaaaaaatctcagcaatggcgtctgttagatatctcactggtttatgtatgcctatcaaagaacttctctatgagtacagagaaagttgcaaatccagcgcaacctatacacgcagcttttggcccacctgaaacaagaccaatccattaagtcctcaagaacacaatgtatcatgtaagagaaatcaaacctctacgagattacagtttgggaattaggccgttgcatattgataatgaatctctaagatttaaattccatgcacagaagataataggtcttacctcgggcggacattgaaccaccggtaacacatccagctatagcggtgtttacagtgtcatgcttagctcttgcctttttcagagaggtaaaccaaaaaagtcgataataacgttttgaagatatgatacatgagttagtagtggaatttccttgcctttcttcgtcaataaacaacgtaattaccttttcgacaatgcattctgcagcagagaaaaccaaacccataactgcaaatgtcttacaggaattccaactcct

SEQ ID NO: 70796 - DNA, 1774 bp, Arabidopsis thaliana landsberg
cggcgaaaggagagatttttatcgatgaatccgttatggagaatcggattccaagagattagagattggggtgattgcaatttcgaaggcgagaataacattgtgaatggttttagctctattcgtcagaaaccattgttaagcttcgagtcgacgataacaatggatttcagttgtgtcagcgagaaaatttgcgtcaagtttagaaacaacaatatttcacgaaaagtcctctgtttatgcgttaactattgaaaataaccccattactatcatttgagctaatttgaccttctttgcgtcatatgcaaaatcggaacaccaccacattggtttggagggtttgtgagctacaagcctataaactacacgtagcacctccctatgcacgtgtcacatgaatgattttaagggtttgggctgatgtttgagctataactacatatatacatttggtttgattcgtttttcttacattatagtttcatcaaaagccaaagcataattgatggatcaagtactctactcctcttacatcataaaaatccctgtaatatcacgaatatcaccatcacaagctcaacttacgaccaggctcaataacacgacttattttggcttgtcatcgtcgagaggcaattttgggaaggtgtttgcaaaagagtctcgtaaagtgaaactgattagtccggaaggtgaggagcaagagatagaaggaaacgaagattgttgcatacttgagtctgcggagaacgcgggacttgaactgccatactcgtgtaggtcagggacttgtgggacatgttgtggaaagttggtgtcagggaaagtggatcagtcactagggtcctttcttgaggaagagcagattcaaaaaggttacatcctcacgtgtatcgcacttccactagaagattgtgttgtttacactcacaaacaatccgatcttatatgagttacacatgcctgccttgaacttttgaaatctcagtattaaaatatgtatttcagtatttgatgtgttttgatttatttttatgtattgatatcattttacatacgttgattcaaaatatttaaatcggattccacttacaaaatcagactagtaatgtatatgtgcttcgatcatctttgttcagtagttgaggcttttatccccatcatgggtctgtaattggtatcaaatatactatataggcccattaaggattcgtaagatatgggaaataatgttgggctttatttcgtcaccatgggtttagttgttgttgttgagttgtctttttcgcatctggacggatattgtccgtatgaatttcttagactataaagattaaatgtaatttcaaattattatttgatatacttaattcaattttataaatttaatatcttcaaaaaagtttgtgtccacaatataacaaatgttatcaaagcaaaaaaaaaaaaaattcttctaatataacaaatttccctaaatagcttgcaaattatctgtaaacatgatgaaaattttaaacatgatgaaaaatattaaattatcatattattcaaaaaataattaattagccaaaagctatatatgaattttgggccttacaataatattttcgcaaacggcgcctaaataatttgggggaaaaaatcaaaaaccctatttccttttcatgaagagcgctcgttgaaatcacgcaataagtagaacacatttggacaaaaagaaaagataaaataaaataaaaaacaaaacccccaaatttgtgtctcctcc

SEQ ID NO: 70797 - DNA, 416 bp, Arabidopsis thaliana landsberg
gcagaggagaaattcttccatcttttgcactctgagctagttgaataaagatattgaggatctttttatcttttcaatatatcttctacttattgtttgatgtttcaatagaactgactattgtaattcttgtctaaatttttcaagtcataagcgcgatgaccattgtgctgtcagtgagccttaccctcttggatctggcttgccacttggttttgagaaacagataaacatacgtacatatgagcttcaacaatcttgatgttatctactattggtgtaacaaatactcttaccttgtacaacttacatatcggaatacacaattacctaactgacgatttcttgtctcttggacatggttgctgtttaatctttattgctattgcctgctacaatctaccaattactatatt

SEQ ID NO: 70798 - DNA, 599 bp, Arabidopsis thaliana landsberg
agggcatgaaatgtaagcaagctttcattttcctagaatataatttgtttttcttatctaatcttaaaagatatgattgatgatacatagaaacttaaatttaactattttttactaaaataaaaataattattaaagctacgttagaatttgtaacaaaaacggatatatcttttaacaaattcaatttatctgttagatttttgtggggctatgaatacaatctttgaagattgaaagtaaaacaattgtcgaagatttaaagtaacaaaattgtcactttgatgagttcaaaccttgaagatctaaagttaagtggttggcatcataaagattttctatgaatttgttactaaaacaaaagaagttattcgaacaatgttcttttgacatccttaacaatgggctccattacaatttgtatgtatttctttttttggacgaaaacgatttgtatgtaaatgaaaatgttcttttgatatccttaacattgttatttttatattgagtttgttccataaagacatagtctaaaaagtttgatgtccaaattaatcagtcaacacattttctattaacatgtctcatatatttaagaa

SEQ ID NO: 70799 - DNA, 443 bp, Arabidopsis thaliana landsberg
  unsure (1)..(443): unsure at all n locations
gaaacccaanccaanaaaaggaaagatttattggaaaaaggctctttttcagccgaaaccgcgatgaagaaactagaagaagcagaggaagtcacgaaccgagttgctagaatagggaaagagatggagacagagaagtttcgggcgacagcgaagaaaatcgaagtagatactctaaccgcgaagttagaatgccttgaagactacgagacattgttgaaggagaagtgataaaagctagagaagaagcttgcggaagaaggaacagagaaactgaaactagcagaggatctgagcaaatttgaaacgagaataaaagagctagaggtgaaggcgaagggaagagaagaagaattgttgagtttaggagatgagaagagagaagccactaaacaactctgatgatggttggttatccatcagatcgatacaagaaactcaag

SEQ ID NO: 70800 - DNA, 508 bp, Arabidopsis thaliana landsberg
  unsure (1)..(508): unsure at all n locations
cattcgtatgtgttttagtaagggacctaaccccaggagagaggttctgttcagtcaaagttcttgtccagataacagtatcctcccatcagccattcaatcgcccattccctctctccctttgcctttgtcattctattgttaggcccctggagcttctatagtccatccgctaccatgactttgattgtgccggtgcgtgctaggccgcacccgaaccctcctcccgctgtcgtcagcatcccggtgtccagaaagaagctgaacaagggttccaagccccagatatctaagctcaaggctcccacngaaaatgaacctggttcgggcactgttcagtttctctttccgagcgtgcaggcgaaacattgagaccaagtgtacgcaagttgaactcgtacggatcatcaccaccaaacatatattctgacatgggacaaaaacagaatcaccaccccatcacgaaatttttggaatccgatgatagctggcttttggggtttaattc

SEQ ID NO: 70801 - DNA, 3733 bp, Arabidopsis thaliana landsberg
  unsure (1)..(3733): unsure at all n locations
aaaaatggcatcgacgtattcttataaaattccatgaaaatagtaaataaattacctgcacatttttcttgtttttatggtcgcttacattcatttctttggtgtaaaaacttcaaagaaattactaatgttaaacagaaagtcaacaatggttaaatagtttcgggaagctcaaattgacatgaagagaagggcatttttcggtaggaactaatcatacacacattaatcaaattattagttaactaatcaagagaagggcattttttattcagtacaactaaaggcccaacagattcaagaagaaaataaaagcccattattacaatcaaacccacaaccacactgaggactctcttcaaaatcagcagccggaaaactcgccgacgcgattccgacggagaagtcgagatcggcgccgtcaagagacacttcagcaatattaacccagaagaaaagaaccttgacactaacgcctttcagattcttgacatgaccgggtgatataacgccggagatagttgatttgtacttgagctggtaggattggatggtgaattcacacgtgtcattgaagtagactttgaagttgcctgtttttgggttaagctcatagtcaacgactccttttgggaggattccgggtggtaagttatagagtttgacggcgtcgtaagcagttggtttttggccggagacggcgaaagagactgtgagaaagataaagaagaagatgatattacaagtgggtttagcgtttggcgacatgggctctttcacttttgttactatgattcgtgtttgattgtatttgtgttgctattttgaagcataagctttgaaatgtctcattaagtacagaagacgaaaacagttgttaggtggttgtgtcttgtggactgtgtaatcgtcgcgtctgacgaagagaccatgcaattagatgtacggtgatgatttgattgacagagagggcacacgtgttactagggaaaaacgacgatcacgtggtaacgaaaccaaccttgatagagaaagaaactgagccaagtatgcattccactggattgattttactatttcttaatcgtaactaaaaccgtactaaggatccgattcatgacttaaagcggtagtgacatgaaccttgaatttcaaaatcaaactatttaactcatttgcgaagatgcaattaatggaaaaaaagatacaatctttggggtgaaatcagttttgtgtttttttgcctttcttactgagagaccaacgaatcatcaacaatgaaatataaagcaatcatataattaacaatagaccatagataaaacaaaggacgggatcgtacttacgttttgggtttgtgctgggatccattatcagctcacatctttcaatctctttatcaacgcatctaaagatttgttcttcgggttttgcctcgaccctcttgttccaaaagtcccgaaaatactatctgatggatctctgaatttctctgaaaccgtggctactttccggtaatccaaagcattgtagcttctttctctgatcaccggattaacgaaattctcaggatgactactcagaagcaaattgatcatctgtcttatctcaatgaacgcttttttcatctctctcgcttctttatccgtgagcaatggagttaggttctctgtaaacgagtccaacaactgaatatccacatcaagtcctttgattgcagccatgctcaatctttttactagatccccgcataacgttccaacgattttctcagaaatgtgagcaaggacatcacgcaaaacccttttcaagactttagcgggtaatatctgttgtgcggtggaaaccaaagtttccaagtagatcaacacttcgttcatgtactcattcccaccttgtggaatatcgtcgcttgtccaattgacattctcgagtaatgtcatgaaaccatctatcttcttcttaagcattcctgagagtgtatcttctgcagcgttttgagatttcgtcaatgggaaatgcctcctacctctctccgccattctcaaaggaactcctgaaagatgtgcagcgtgacggaagaagaaatcgcaagcacgttcaaacacggccatgtttgctgcaacttgcattgcctgagaaactccatgaaccgaagtgctaatcagcttcaacagagcctcgtcgagaacctcgcctagaagcctatccagatacttcttcactacatcatagaaatcaagctgacctccgtgagacatgaaactaaccgaatcctcgataaaagacctcacaatccggcaacaatctgggacggtggtcgaaaatggagcaatgaatgggaatgccggtactatctctgatgtttgtaactggaaagagagcacattcatggaatactcatattctttcttcatcaacatctgctcaaacttatctgctgataaagcttctgtgatctgtttacggcaatcagatagtaacaactcatgatacttgtccctgtgcttgcttaatacttcgagaagggaatcaacagcatagccatacctgcgtagactcacccccaacaagctcacataatccttaatcagtaagagatgattagccgtctgcattctagagaactgatcctccaacacagcacacatnttagtaacagctgtatcccacatagtctccacttccagcttcgaaatcaaccctcctccagtccttaaaactctatcctctactatgaaaaacccagcaatctgtgcaaaaaacgtctgatgagactcgagaaacggagtcatagtagatacctggaagtcagaggtaagctgaagatccctattgttataatagtactgcttaaaagtatctccaagagatagtgtctgatgaatgtgaaaagctctataaagtggtgtcaaatcaaaacctagcaatccacctccggaactaccaccatcgctgccttcatggccagaaccaaattcatcatcctcttcttcgtttagcgcataaacgcaatcgcgtaaactgagtctgctctgctcctccgcttgtctctgcttgatcctgagctcttcctctcgttgacgagccgcggaagcttcaccaatagccaattgacctaaattccgactcaccacacggatctcaaccaaccaatctccaaactccttattcactttcctctccacataagatcgaatcgccggaatcctattctcaagcatccgtttcagcgttgacgaaggagttttctccatgaaatcactctcaatcgagtccacacacttcaacgccatgtaaaaattaccgctctgaagatgctgattagctcgagaaacaagttccataacacgaacacaatgagtcaccgctccaatcgccagatcgacgttcttagaaacagtttgagcctcaacaagcgaatcgagagacgaaagaagcggcgccgcaacagattggagtttagagtttgaatcggaaagcgcagatttaagtgattcaacatctgataaaagcgatttgagatcgtctacggcgtggataaagtcttgatagtgagctttacatacctcttcgatctctgattctttagatcgtgcgaaaaacttgagatggtgaagaagagtctctggtttccctgtaccgaaagttttccgaacaaatggtcctaaatcttcgccgttacaaatcgcagacgatatcaagagctcgtcgagcttctccgccgagtcta

SEQ ID NO: 70802 - DNA, 177 bp, Arabidopsis thaliana landsberg
atgattctatagttttctacttttcttccctataagaaattagtaaaacgtatgataaaatctgaaggttttaaacaactagccaaaataagatttaagtatatagatgtgaatgattttttccgcgactgatattgctattaagaaaaactgtcataatattattaatgaacgctt

SEQ ID NO: 70803 - DNA, 723 bp, Arabidopsis thaliana landsberg
ggaagaagtaaccccaacttcaagaacgaaaaagacgtactgtatgtatatagagagaaagtgtgaagtcattagccccttacccaaatttgtctttccttacaaaaaaaatctaaaccctttctatatcctgatcctctcaccacataacaatcgtcatcgtcaaagacaaaggaaccaaaaaaaaaaaaaaactttgtatatctacgagaaaatcaaaaataatatccatttgatcatctacaaaactaaaaaaacaggtcatttgattatttatttttttattttgatcatcaaaggaaacacatcacatgaaaaagaatccaaaatgaaatgaaattaattgatttttttatcgacacggattattcaaaaacgctgctctccagccaatccacgttttctggtacattcatgtctccttataatcctctattttaattcttttcaaaattccaagtttttatggcttggccttaagagttaaaacgtgggtcgtcggcttctttttcgattatttaggaaaccaaatatcaaaactaatgtaggaaatatctggtccagccccaacgaatacaataccgaaagtgttgaaatcttaaatttgtaggccccacagttcccggactttgctacttgttaaaccaacaagccactattggagcgtgagccacactttctcagatacgcatgtgatatacaacgaatatcgcttcaacaatt

SEQ ID NO: 70804 - DNA, 1015 bp, Arabidopsis thaliana landsberg
cataagactcgactgcgttgcagcctccttcttttgctgtttgaacaagagatggccacatctacaacaaaaaatcaattgaggatgaaattgagaataaagcacaatttaagaacagaggcctaaatcatccaaactcataactaaagaactgaaattgcattttcttaatcattttgagaagaggatggaaaatgcaagaaatttagaaatttcccatcaaacccatgattttaaatgtctcttagagactgattctagaatctccctcaactaaaccctcacaagctcgaaactttgttcgattcaatgtgagcataaagcacaaatccaaaaagctttcaactttagcattcaccaagtgataaaatcaaagacaaaggaagaaaaagaagaagtcactaacagcagggacgcttctgggatagtgaatggcggcggagataatgagctgacggcgattgccgatggtgagagaacggtggtcgtaggatacattcgccgcctcgatagatctccacgagaagagaaacaccatcaccaccagtatcgccgtagacgcaatgctttcagtagtaacccgattcattatcgttgttagctcttcttcgtcgtcgtacttccctcgagtgttttacaattaggagggaaaaacaagatttatcgttttagagcttccaaatatctttcttgttttgtgtgcttgttttgagtgtgtgaccaaatcactctccactgtggattatgatatcattattatttatatcagattgtctcttattaggataagcttcttcttttttttttgcttatttattcataccatttgatgtagatatcagattccatttatgcatatttgagtgagatcattttattgttaactaatagtaagttagtaactgtctcctcaatcctcataatcatatagaggttgtaatttttctttcaataataaaagtaagaaatacccttttcaccatacgcgaagaaacattttgatatatatatatat

SEQ ID NO: 70805 - DNA, 180 bp, Arabidopsis thaliana landsberg
  unsure (1)..(180): unsure at all n locations
ctgccccctatcccccctnnnnnnnnnnnnnnnnnnnnnnnnnnnnnnnnnnnnnnnnnnnntctctaaactgacaatcataaaaatataactagtttttccattgtcttgtctcctttatgatcacatatttcttcattttgtccttgggaatataatttatacacgcaataagtttca

SEQ ID NO: 70806 - DNA, 485 bp, Arabidopsis thaliana landsberg
  unsure (1)..(485): unsure at all n locations
ataagatttgagaaatgtatcatcaaaatgtcatggcaaatggagcaggtaacggctacatcacttttattttcttttttaattttattttaatatttcctctacatataaagcttcgacacaacttgttgttgtttttcatactcaatgatttcactttttcttaaaatgtacccgtgtgtccccaactcaccatatctatccacacttgcatatgtaaataaatttcttcgatttagatatgtattttgatcagctaaaacaattttgttttatgattcttttataagaatacttcaattgataagattttttttttcttttttccttttacaatttcaaacggatttgaatcaatttttttaaaaatccctacatgaaatgttacaatgattgaaacttattttgttttaaagagcttgtaaacttatatctgtatagatagtagtttttttttctttttgtctganaagaaaaaagattgt

SEQ ID NO: 70807 - DNA, 472 bp, Arabidopsis thaliana landsberg
ggccgacgacctcaaggcgtactacccttttagccaccgtatccggatgcggttcaccggcgaccgcacgaccggctggctgctgggcgtccagttgttcggccacaaggacaccgcggtcgccaagcgaatcgatatcgccgccaccgccatcttcgcgggcatgactgtcgatgagatcagcgacctcgacctggcctacaccccgccgctcggctcgccgtgggacgccatccaggccggcgcgcaggcgtggacccgcgaggcgggtgccgccgtacaggcctagcggacgtcaggctgacgggcgcagcatgtcgcccagggcggccatcgcctcgggggcgacccggtagtaggcccatttaccccgctgatcacgggtgaccagcccggcctcggccagctgcttcatgtggtgggacacagtcggctgggacaggccgaccggtgcggtcaggtcgcaaatgca

SEQ ID NO: 70808 - DNA, 1381 bp, Arabidopsis thaliana landsberg
tcgggatttggttcctgttttataaggcgaatacggtggctgcttttgcgaggatgacggtggaggattccaggaagcttttgcctcctgagtttatccatcctgggttgtcttctccgagcgtcagaagttgagttacaacattacttacatattgatgtgttttcatctctctctatctgcgtattggaagaacacgaaagttttagaatttggtcatacttgggactgattcttgttgttgctttggctttttatttacttcagttgacttggctcaaccatcacttgacaaagatctggccttatgttgatgaggtatgtttctattgtctaattcgttcaagtagagatatgttatttgtattatggataaagatattgtttcttaaaggagttttttttttttgtcctcttttgattcgatttggagttttaggcagcctctgagcttataaaggcatccgtggagcctgttcttgagcaatatagacctgccattgtggcctccttaacattttctaagcttactctcggtacagtggcacctcaatttacaggttagttttgttcatttctctttttaagtgtaaaactttgtgttgtaaggtaccagaacttgtgcaattgagtcatgttgaattgttggtggaatccttttgattgtgaacttttcttgagcttgagcttagactaagaatgttcttacttttacgtgtctccacattgtaacctactattctgtgatagtcatcgaattcctgtcaaaaggaaaatattcaattgaataacaactgaggagtgaattatcaattcgactgggaaataatcaggcaatggcagcagtatccttctttacacttcttcggattgtgtgtttaaagtttgcaaaaagacgaaccataatcttaaacgaaattgtattgttgctttagaatttatgttttgcttgtgctccttggtattcgttaggtgtttccgttatcgacggtgataaaaatgggattaccttggaacttgatatgcaatgggatggaaacccaaatatagtacttggcgtcaagaccttagttggtgtatccctccccattcaggtatatgatttgatttccctcgattgcttactttgactttatattatttgtcaattcttctgtcttgcagaacttgtgaaggaaatattgatattctaacctttttttgatcaatgataagctgattacaactgatttcttattctttgttttctaggtgaaaaacatcggattcactggtgttttcaggctaatttttaggccactagttgaggactttccctgctttggagctgtcagcgtttctcttagagaaaaggttagtgccctctgcaacatataaagct

SEQ ID NO: 70809 - DNA, 438 bp, Arabidopsis thaliana landsberg
  unsure (1)..(438): unsure at all n locations
cccaagcccggttgaggaagattttcggggcccaattaatatgccgaaacgagccggcaaaaaaggggggattttaaaggaaaatcgcgatatatcctcacagatatatatcnnnnnnnnnnnnnnnnnnnnnnnnnnnnnnnnnnnnnnnnnnnnnnnnnnnnnnnnnnnnnnnnnnnnnnnnnnnnnnnnnnnnnnnnnnnnnnnnnnnnnnnnnnnnnnnnnnnnnnnnnnnnnnnnnnnnnnnnnnnnnnnnnnnnnnnnnnnnnnnnnnnnnnnnnnnnnnnnnnnnnnnnnnnnnnnnnnnnnnnnnnnnnnnnnnnnnnnnnnnnnnnnnnnnnnnnnnnnnnnnnnnnnnnnnnnnnnnnnnnnnnnnnnnnnnnnnnnnnnnnnnnnnnnnnnnnnnnnnnnnnnnnnnnnnnnnnnnnnnnnnnnnnn

SEQ ID NO: 70810 - DNA, 214 bp, Arabidopsis thaliana landsberg
agggccaattgcatcactaggctcggccgaagattggcttcaatatttgtccatatatattatctaattgtacaatatttgtccccaaaaaataaaagacattattaacttggaaaagtccaatacactcatgttgaattacaaatccgttttacttagaggattgatgtttgacttctaaccatttttttattttattttcttgtaatattat

SEQ ID NO: 70811 - DNA, 4524 bp, Arabidopsis thaliana landsberg
accggagggtcctcttccactttttttgaagaaaacccttgaatttctttgattgttctggaacggactggtactaggaggcgacggaggaggagaatacgtgtcatggtgggaatgtgaagcaggtggaggagagtatgacatatgagaaacagatttctcgattaaagcaagaggttgttctggtgttgcactagtggacgtgtacaaggaagattcaactggaacttcagtctcagaaaatttcctgagggcagttccggtactcttaagagactgaacgtatgaaacgtgagcagcagctaacaaacatcttccatcgagtgcttgttggacgaatttttttctttctcgacataactgtaaggctttatcttcatctattctggatgttgatgcacccattgtccaagcttacatgcaaaaaaaagagtaacatgagttagatttacaacctgcaaaactactagaatagcttcagattcagaaaaagaaactttaattagtggggagtgatcatatgttaattaggactcactaactattccgactaggaaattttctgttaagtggttttggagattctaataaataggaagcaggacgatggatagatccatcctgcgacataggcttggtttagaccgagggaactgtgttctgtattttggggttctatttcagttattgatttcagtaaaatagtggttctgattatattctagtgatccttaactctaacaaaaacaaacacaacaatcacaaaaccacttcaaaaaaaaaaaaagtattaaagcctctcaagacactgtattctagggatcaatgcactgacccctggcaagacccgatcagaaataaccaaaacataactagaagagagaattaagtaatagcgagtcatctgttccactaagttatctaatgcaaaggtgtgagtgagagtatcattgtattcatgttgaatatgagagaagaacagtgccctttattaccaaattgcatcatgatatataaaacaaatgaaaattacgcattgcaggatatttgctatttagcgagacatgatcattctctcaaatctcaaactcaaatctcatgcctccgtatatagaaaaaaacaaagaaatcccaagcaaacacaacgaagatacataaattaaatccaaggcaacaaatacaaatcaagcttatgttgctcccaacacaacacaaatcaatcatacataccaaataaaaaaaaacctcaaagcaactatctatcaacaattaaagaacaaatttccactttgaaatcctaacacagtctaacctattctcttaacttagtaacctgttccgccgtttaaagttcctcaagcaaaacccttatggaaagagtaaaactttcacagaaccatcggatagatgacaaacaatcagaatcacataagaaggcaactttttcgtaatcggaatcccaaaatagggcgagagagaatataaggagagcataaccaaagtcataccgcagacaaaacacaaaactgattgaacaaattaagaagttttcttagagtaatcgaaaatcaaaacctgaaaagtgcacgaatttgacaaaaaagagagatttttatagaaaggtaaagaaacccaaatgaaattggaccattagagtagaagaaaacctagaaaaggtgagatttttcacacaagtagaagaaacaacagtaagatggagaaacggtgatacctaaagagatgtcctttgagagctttggagttacgcgagaggatcaaacccaaaagaaaacaaaacgtcttcttctacaggagacgaagaagaaggagagaggtggtctgtgtcgtgtgtgagtcagcagcgaatcagatgggtagagagaagagagagagagagaagagagagagagagaagaggaatcttatgcgagaggagaaaaaggagattgtgtgtgtatgtgtgtgactaccaacatgcaataaagcatttgcttgcttgtaaagacgattttgacggatgactcccaaaaacggtaactttctcttgccgttgttatttctactccggttacttttcttacaccttttttttgtttgtctttttatttttttaaggattcattagtttatgataaacatccttaatctatggtcttagtcaattgctttacaaaacaattttgttacatgtcaactcacattttagtattttactaataatcaaatccatagacagattatgaaaaaataatccatagtgatcccataaaaaatagaaactaatcttatcaaattgacagagatactaagacttattattggcttaatttacagaattgtttgaagaatttttctggaaatgatgggaaagaatctgactgaaatattaaaatagttttgcttcgatgaaatggaggaatagtcaaaggtgtggacaaataattaacatagaaatccaaatactgtattttcataaagacgaagatgggcctctgagagtaaggcctatttatgaagacgaagatgggtctctgagagtaaggccctattggaaataaagctcactgtaacagtaacagcagcaaaacccgtaaaggtagagggagagacacagaggcttcgagtgaaatcgtacattctccgatttagggttccgaacgaaatggccgatgttaatcttcctccgtctgattccgtcgataaccgtctccctgagaaatcaacctcttcctcaccacctcctccaccgccttcttcttctctgccgcagcaggaacaggaacaagaccagcagcagcttccgctacgccgtgagagagattcacgagagcgtcgtgacgagagagacatcgaacgtcctccgcctaatcgccgtgaacgtgaccgttcgcctctcccaccgcctcgtagggattacaagagacgtcctagcttgagtcctccgccaccgtatagagataggcgacactctcctcctcagcgtcgctcgcctcctcaaaagcgttatcggagggatgataatggctatgatggtcgccgtggtagtcctcgtggtggctatggaccacccgatagaaggtaatcttcatttcttatgcttacacttcaattggaattacatcagagttaatttgttaccgattgaattataattcaaagtcatatgggaactgtgtttgcattgttgcttagctgataactgttgattatcctcttgtatcgatggttgttatattccatcgttttcgagatttcctaatctgtactcaatttttactttgcatgttagatttgggtatgaccatggtggaggatatgaccgtgaaatgggtgggaggcctggttatggtgatgaaaggcctcatggtcgctttatgggtcgctatcagggtgagacatctctgtctaagatgtttttacagttgagagaatcagtattaccactttttcgtatgatttctgtcttgtgagacatgtttaagatacctatcattgggcgttcttattatttgtggacttctgttcatttgactagcttcgtatatttctctctgtatgctgtggattggaaacaagcgatttacattagaagataagatgtcaatatctaccttttattgtgtgttacttatggcagactgggagggaggacgtggaggttatggtgatgctttcacagtggaaatcctcaaaggttaaggttccttcttcttttgttttttaaaattttctttgtatttcatgggtttgttgtctttttcctatggcgtgtttattcttggtagcgtatttttaatcaagtaagtgtaaactaagagttgcgaactgtctaatggtgctcaatgaatggaggatacatcccttgtagaatgttctttcttcgatgagacatatatgtttttttccttatagctccggaaagttagagtgaatgtttgagagacaccattatagtggcacacaactgatgctgtctgtatcctcccttgctgttgcatttaacgatactacctttgtaattcctttacccagggatggattgatgtcatacaaacaatttatccaggagttggaagatgatatattgccatctgaagctgaacgcaggtatgatcatttctgctacttagtcttgttacttaagcaatttaataataaagctgcgggtgtaatgcttttttcctgatgcagatatcaagaatacaagtcagagtatatcacaacacaaaaacgtgccttttttaacacccacaaagaggaagactggtgatttcactatcttttttcatcttttatattcttctgggatattctgcaagctagcctaataacatgtgtatctatgttgcgcatctaccaggttgaaaaataagtatcatccaacaaacttactatctgtcatagaaaggtgagttcaagagtcatttgaagcaatttgattcggtgttagtgcctgaatagtgtaatattaatactatacatccttgactttattatctaaattctttttgcattaaaacaaac

SEQ ID NO: 70812 - DNA, 496 bp, Arabidopsis thaliana landsberg
  unsure (1)..(496): unsure at all n locations
aaagtttttncttgttggcaggacttttccaagtatgtaaataaatggattacaattgctacacctttccaaggtgatacggtttatctatttgcaaaaaattgttcataagagaaatagctggtttcattggaaatgacttggatttggtaaacaggagcaccagggtgcatcaatgattcaatcttgactggagtgcaatttgtggaagggttagaaagtttcttttttgtgtcacgttggacgatgcaccaactggtaataaacctcatagtttcgggtttacttgcatcactttttttctttttgaagttacatcaaagctttagatttttatttcagggtccatgaaactcttgtttttactgatgaatctgttnttaatgtttggttttagttggtcgaatgcccatctatatatgagatggaggcaaatccagacttttagtggaaaaagcaaccanagattcgagtttggcgtaagaaatctgaaaac

SEQ ID NO: 70813 - DNA, 626 bp, Arabidopsis thaliana landsberg
taatgaacatacttgcctttttagagcccataataatatgcgggtttaagtggcccagagggattaaaaacggcaagacgttcttccaataacggcgtgcactgtgaaacctttaaagatcaaaattttctttcaaggttcttctcagtatcactcactttacagttctactcagagatccaatttcttgcccattctcgtctcgaatttgattttcaaaggtttgatttttgagatctttagcttagtttcgacgagtcatttgcgaagatctagactattgaaaaccctacgatgtgtctttagcaaaggaaaacaatggtcaaagcgtcgacgatgcaaaggaagagatgggcactgatggttttgttgcttctatctgtatcaacagtgtgtgtgattctcgtgagatctagctttgaatcctgtagcattagtagccaattcgtggaagaaaagaatggagaaagcagcgccgcgaagattcaatcgaatcctctagatttcatgagatcgaagctcgttttgttagtatcccacgagctatcactctcaggatctgctgatttgatttctaattagaactgggttctcgaaaaaatcatacttttttgaggtgatgattg

SEQ ID NO: 70814 - DNA, 3185 bp, Arabidopsis thaliana landsberg
  unsure (1)..(3185): unsure at all n locations
actgaatcgaaaaccaaaaaacaaactcttataaactatttatggggattaatgggataactcagtagtggctagtgatttaggttcgattctgccagcaattctcttcagcttaatcagaagagggagctgtatatcctcatcgtaatctccaaaatccccatcatcattaaaaaagcgcaaacaccgatttcaaaatcgataaaaacgtataaatcgattaccagagaatttcaaattcgaaaacgcaaacaaatcagaatcaaatgaaaagagaggaaggctcagatcagcggggttatcgacacagaaacgagtcaaccaataaattggaagaaacgcctaattccggtctgttgagcttgaaatttccgagtcatcactgccaatctccctctctcgattagagaattataaagaaacttaaaaactatcaatcatccaaaaagacccataaaacgacgattgaataacagaagaagagaaccctagatgctattgaatactgataatgatgaaacgtccggcgattggtgtctaatttatagggaacgtaattagggttttgctttgatcttcggtgaaggcccattctcggcccgttaatggtttccgaattgtgctgctttgtcttcgcggatggttcggtttatattcggttcgctttaatttggttatattagaatcattttggtttaatctggtttatgcttgaaaatgagatctggtttaaatagtttctctgtttggtttttctgttttaattaatttacgggcaatggaagcattgagagcgtcctacggcgactcttcatcggattccgataccgatgatctttctccggcgagtcccgttactgcaaattctggagagaaagattcgatttccttgcctcctccaccgcttgcgcttctcgattccattgtatccacaggtgaagatgctcatcaattgtctctgtgattgttcatcaatcaaattcttagagatttcactcatcacttattttttatttcgtctgaacttgaaggttcactggatttcttctcaacagagcctggagttcgtgtaagaaactttcctcatgtcgatggaaattacgctttgcacgtttacgtacctggtatttgttcatttcgtagcttaaaatttctgagagtttcgaggtttttgaattctgaagtggttgtttagtataagaggatacgtatgtgtttgagaatgtattgatgaagtgcaggcctgatgaagtgtatcacttgtctttctctttcactcattgtttattttgtttttgggattctagtttgtatacctccactgccaaagaaggagattgtatgttttttaaagaaggttgcatcagttgttcctcatcttcatttggtagaggctgatgtgccactcagcattctatgcaaggatgatcagaagtttgagcgtgccttggggagagagttccacataagcttaggaagaaacgttccactacgtgttcatcagattaactcggtgatttctatgcttcggcaaaagcttcagttgcagaagaggtaagatcatttcttgcctaccatactacccaaattacgatggggtttgtgaattgttttccgttctgtttttgacagatacttgatagatttcaataagtgggaagtctttgtgaatgatgaccatactcgctctttcctttctttggaaatcactacttcaggactatccgaggtatgttgtacaacaagagttaaccttgaatgttggatttttgcatactcagtaccttgtgttagatattgtactgattatcatatccttaattcagataagtaagcaaattgatgctgttaatgaagtttacaagctccacaatctgccggagttctacaaggtccacttgcttttctatatagtactttacagcttgattgtattttactgtttagccaatgaaaatcgtcatggacacttatcccatcgagtctgcttcaatttttcttttaggatccgcggccgcatatatccttggtttgggcgttgggtgatattagaacttccctaaagggagctgttgacgtggaacttaggaagcttagagcaggtggttgtgtgcagaatcgtatcttcacctctaagttttgtgggatcgagtgtaagataggaaacaaaacacacaaaatatgtaaactcccagatgaataagaaaatctcaaatttctgtgtttgcagaccaatcaggtatgcatttgtaacgacatagaaggatgagttgatctgtgttcttgggtattccataatatatgtctcttcatagaaaaaagtctccatatatcataatatcactcgtaataacattggtgatttctggacaatgcaacaacaagtccttgtgatttgaaataaggtagatattgaactggctactattatgttacaaaacgtttacatgaaagtgaaatcatggagcaaattttttgtgacctggagtccaagaagtgagcgagcataccaatagggttctcgagcaacctcatcaaacccggggtggtagcagcgaggatggatgtgatgagaatgcagtaaagcttgacatgatcaggtgcaatgctggccatggttgtgttgtgcgagaaatacatagcaatcatacagatctgaagctggaaccgcaatgggaacccgagggtgagaatgttgagcatagacagtgaaaccgaaaacccaattgtgttgaagaacacaaacaaagtgaaagcaactccattgaaggtccccatgatagattgccctgctgtatgagcttgttgatttgtagtattcacactcgttgtgttctgggatacagcaggtattgagctatcttgccaggttccacctggtggggtcaagctggcctgaaacgtggctgtggcgactagtgaagccannnnnnnnnnnnnnnnnnnnnnnnnnnnnnnnnagtctctgtgctttttgaaagtgaagtacttgacaagttctttatggctttgggacttcattgttctctcttggcatgtggaagtagaagtggttctctcgacattagtagtgccaatgtctcgccctctctgagctccagcttcgatgagtttctcatagatttctctatcgctcagtcgctcggaaacataaccagcaaatccatcgctgatagacccatctt

SEQ ID NO: 70815 - DNA, 484 bp, Arabidopsis thaliana landsberg
  unsure (1)..(484): unsure at all n locations
nattgggcgtgaccaacaattaaacatatcaataaaattaaagggttgggctgactcaaaacacataaataataagaacaagtgatataatcaatttagaactccaagtaagatccgtaacttttcacaaagaaagtgagtatatttggtataagaataaccccaatgtattaaaaagaatgaagatatgaaataatataaataatcaacacacatatggagagaatcagaagaaaaagaattaaaaaataaataaatatgatacaaagttgcaaacaacacaaagatcattgttgtctgtacagctttgtcgactttctcatatcaaattgatcccttcaaaaaaatgaaaaaccgagatagctagcgacgaagagagctttgtcataagttcatggatcgggcttttgttaagtcaaaatgtacgtatgtatcttcactgatgagataacatatnttcacgtgagggagctttggtcgtcgt

SEQ ID NO: 70816 - DNA, 371 bp, Arabidopsis thaliana landsberg
taacagtactgctatagaccgctcgacccaggacacgcataaatgacagaggagatagatggaagcccctcaaaaactgtagagtgtctgactcacggcatgtgatcctcttcttcagtctctttcgatcaaaaattataataaaaattaaaggtagtggacccaaaacccaagaaccatacccccctgaacttttaccaaaacatataaacccttgtgtcgcaaaaacaccctaccccctgggggtaacccccctatagggggtttttggacccacaaaaaccccctcttccccaaccctttttacccagggggaagtaactttggggattttttttcttttttttaacccccccaaacggggggggggc

SEQ ID NO: 70817 - DNA, 3417 bp, Arabidopsis thaliana landsberg
aatgttcattgctatgtgatgccaaacaaactacagaaaaagttactgaaaaaagagtaaaacgtcgtaatggagatgattgtaacgtcgtcattttggagaaaaagcagtcgttatttttccgttacctctctgtattctctttatcttcaaccttccaacactttcgagactttctctattgcatactcttgttttccaaggcaattcttcattgcatactcttgttttctatttcgcgggagtcgaagaagactgggcgatggctcaagttatgaagccttccataggacgtgaaccaaacaaaaaaaaaaagagactcaagaaagaaagaaagagaatttcatgaggaatctaaggtcacacataatatcaacaaaagacaaaccggtccaaaggaacttgaatcaaaacgaagataattaagttacagagagatgatttagttcaggaactacacaacaaagtccttcattgattcattgtcaaaggataaggtagagtggcaatgtggttatgagccactgttccaatccaaagcttcccttgaacttccctcacttcactcacaagcttcattaccttcccttgtctatcctcgagcacctccaggactttaccttcctcgtcgaatctcgatatcacagtgtacattctcatccccatcgttttcgcaagcagcttcatcggtattggcaaccgaaagtagatgcttcttatccaagggttgtttgtaagaacctcttgtgccggtgttctgcaacaatcaattgcaacccaaaactgaccctcttcatttattcttacattgtctgggaatcccgggagatctgccaccacctcgacttcacccatctttggaccctccagccagtacttcaccaatctgtcatacacataatgatgaagagaaatgaatgatagatacagctatataaacacaaagttgagggtcatacctgcaattggttgtttcggtgaagaggaggaaagattggtctttagagagttgaattccattgggaaaagccaaaccctccagcacaatgtgtgttgttttggtaggtgggtcatatcttagaagccttcctgttgattctccttccagtaatataaagaaatgattcctacaaaatacaagtataatttctatatcatacaatttacggtaggaattgacatacaaagcaagaataagagagttgtcttacgctctgtcatatcttttgctggtgtcagtgaagaagatggagccatttctatggatgtcaaggtcattggcaaagagtataggctttccttccacatgagtagctaaaggcgtagcaatccctccttcaggaccaaccacaagtagaccatagtaagcgtctgcaatatacaaatttcctgtctctttatgaaatctcagtccaagaggcctcccacacagcttctcgtgcttccattgcttgtttgttgttgaatccacacctctcacacaagcttcctctgacctaattctcatgaacacacatcaataagaaaaactgaaacaaaactctctgcacaaaaaagaagtgatgaatatgtaatctcttaccattttgatgttaccaccgaaaatgtctcccatccgattgcttcacccatccatctaaccactcttccatcagccaaccctgtgtatggaccacgacctaaactatcaaactctaatgactctggaccaaagacttggtccacgaactccagtttcccatgattacccagtcgactaaggttgtctctaggccagcttcccatgacttccttatatggagcaacctcatgcttcacgggtttgaactcacgacccccgattggactcatgtgaaaggggtcgattgctatgaaaagtacagataaagcaatgatacagaggatcggatgatgagtcatcattgattcatatgtaccatgctggcttttcttctccatttaaaagtgcttagaggtggaccagaaagtaagatcagattcacctgatcaatgtacaaattatataagcaatgtaaaacattgtgggtgcagagaaatgcagatcttgtgaataaaattgggttgaaagtaggttcaatggaaacaaacaactagtcaaaagttgatctaagttagactactctgataccaaatacaattctcatgactctatttgagatagagcttcaaaataatcatctaaccaaaactgctcataaataaaaacttgaaactgtgaatcggtgattgttctacccttctcttaccttctctttttggaatataaaacaaggaaatgacagaagatggaaactaataacaaaagaagacactgctctagtccaagagacctgcagaaaacttcatctaattaccttgtgaacttgaaagagtgcaaataatatatcgttctgctatttcaccaattcaatatatcaaagaaaaacgagtaatacaagactgttggtagcatgctttcgtattgaaataaaggagaatgtcacaaatgaggaaacatgtctagtggacggaatctttaggtaagacatgggacccttttgcaactatacatcaaccacatgacaaaagaattgactgtgtcatattcatctgtaatgatgcctaaacaacactagcttgcttaatcctttcccaatcaccacattacgcagttcaagcaagccttgaggatctcttaaatttggttggaacttgaaactgcaaaatcttggttaccaactctcagctttatctactacctcgatgacaagaacttgttcccaagtacaatattgaccacgaactgaattcagacaacttccactccactaagaggaactgcactggcttgcaaggtccggccatttccaataaaccgcactgagggtaaagaagcatcagtaagcgattcgatctccaaaaaactgaaatcataagcacccgatttcttcaaactgaacacaaagacaactacaatccaaccaaccatagtaatagcccagtagttgttcataccaccaatcagaccccacgaaatggcgtaaccaacaaggattcccgacaaatgtcccagaaaactagcttgtggaacaatgatcgaagtgaaaatgagtgactcgaatggcgcaaagctaatgggaagagacaaaagcccaaaaagattcagcttcgaagaaggttgcttaacagagagaatcgtcatccaaccaaagacaacacaagagtaaccaacagctgtaactctccgaaaataatcaatcttgaatctagcaatcaacaaatgatagatcccaataaccaaaacaccagagaacacaacaagaacaagagtgtaatgaaggtaataagcagtgccaagaccaacatgacctagctgttcaacaacaccaagacttcatacagcactcatgttaaaca

SEQ ID NO: 70818 - DNA, 587 bp, Arabidopsis thaliana landsberg
  unsure (1)..(587): unsure at all n locations
aagaaaaggaaaacatagttaagaggtcagaagaattttactttgtaagagagagcaacatctggggcaacggaggaaacataagaatgtgtactttcttcctcaaagtcacaatcttgcatgatttcttcacctaatccaccaaaccctaaccctaattcgcttctagcatcgctactactcaccaaaatcatctaaaacccaaacctatatatatcatatcaatcgaagaagctaaaatcttccaaatttcctcagaaaaaaacttagatcgatcgagagaataagcaaaactcttaaatacccatttacatagagagacttgaacaaagcagcccgataaaatcaatcagctgaattcgttggataatgcgattcagaatccagaaagcgaataacgcccagatttgggagagntcacgtgaagagctttgaagagagaaagctttaaaaaaaaacttgaagatcgaaacgacagaggaggttcctcacgttgcaaattcaaaattccgtttttgattcctcatctctgtttctcgacaaacgaaaagaagaaaaaaattacctcacanaataatttctaaaaa

SEQ ID NO: 70819 - DNA, 545 bp, Arabidopsis thaliana landsberg
  unsure (1)..(545): unsure at all n locations
tggcattgtcatttccacgtattactataataccaaaataatattaaagacattcaaataaatataaatgaaaatatcacttatcattataacaacattgtataatattttatcagaaatatagtgtaattgatgaagtgtatttagtcaagtggttaactgttcacctttatagcttcctaatagtttgactctattaaatcacattattttgcaagtaaaaagaatttggttatggatcagattttgttaatctaatgatgctaaaaaaaaataggtagaatagtgctattacttttttctgaaaatgggcaatatattgattatgttcacatagactgaaaataacaatattaaatactattaaatatgccatattaagaaaaatattgaataatactttaaaaaattaatttgttaccaaaaaaagaaagaagaaaatttagcttttttccccttggatttgtnttttcattatctttcttagtttttacaattgaatttattttctcaacaatttctgaaaaactctttgccttattatc

SEQ ID NO: 70820 - DNA, 1059 bp, Arabidopsis thaliana landsberg
ggtgaacatagtttcgaaaaatggagtagccaatggatctgcaatggggaaagttcatcagaacggcaatgtctatagcaatggaaacgggcttcaccactgactcgagaaaggaacaattttactgcactttttaagcttttttgcttttaatcaaagctttctttaagcaagtcgacatgtatagtccctgagttttgtttccttgtcttgaaaacttgtttggtttcgttgttagggtttggggagagacatggatatgaatgtgcttcctgttcttgggttactttttacctttcatagctaaaaactaataaagatctatattctagtttcttctggctcgttgaataataacaaaaatttgcagtttgtgttttgtaactaataggtgctttcaacaacttaagtaaagataatatccaagaactttgaatgttacatttttctgtctttattgtatcgctcaatttatttttcccatagaacttgtcaagctaaatcttttcgtactttttagtgttcatgtttttgcagccatccgagctgcgtctgttttatcttttttttttggctttccttacaaaaacctgaactgatctgtttagttctttgcacactgtttctcatcgaagtcgagccatgaaccaccaaatgaatgacatcaacagcgtaaacgcgaaagcgggctgagaatcgattcttgaaactccattagctgagccggcgttttcggaaggttcatcagcagcagcaccaggagcagaggatggtggctcgtcaaaatcttgaccatcatcattaggtgattctgcagggcgtggtggagatgataccggtgacaaaggagaagcagtaggtgcattatcacctttaacatcaatcattatagcactactaatatgaagcacagagatgttaaacggtagtgctgctacagtgtcttgaagctgagcatcaaggctagacccaggaaccgcagaaccaaacgccacgtctccgtttttcataacggttgcgttcaagaacccttgttcgcctctggctagaccgctagat

SEQ ID NO: 70821 - DNA, 2303 bp, Arabidopsis thaliana landsberg
tttggatcagccgggattagtgaggtgcatgatttagcatgattagagagtgtttagtagggtcgtgttggggttttttagagtgttgaaagagaaagaagaagaaagagtaagaagggatcaagcttcttggtcggaagtttggatggtcttaattctttattggtcgtgtcatcatcaaaagttcgtgcacgccttcatttgccaaagagaactcttattttttttttgttttttttttctaaattttgtttaatttctgaatttttttttccttatattgtaagaccactgatactgatatttacgtaaatttcttatttgatttttaattacgtaaatttctgatatttacgtgttttttttccattaaacaacacaacagtcatcatagttagcaaagccaacacaagtgtgttccttattatttgcgggtctcaacacttcttcttagcagcaacacttcttatttgcggatctcgtgacaatttatttacgttttggctacaataatcaaaattcacaatttctatcttcacaatacacattaaattagggaattataatttttacatcataaaaatacacatacaataaggaggcccaatgagatatgggcctaaatgagatataggatccagctcaaaccttctggcttggaacgagggtccggtgatcctcgtactggtaagttgtgtagcacaatcggaaaaaaatagttgtggtctaagatttgagttttccgttaaaaccagtgattatgccggagacgagtcacgtcgcgatctcactggtcacagatcggatcgatcatttgcctctccggcaactcagatcggagatcgttcctccagctccgactcgatcccaatcttctattgattggcttcccgacttcgctggttactcatggcttgcttacggagcatccactctcgtcgtcatctctcatctaccttctcctctccgcggcgaagattccacgaacggaccattttcccgtcagattctagaggtttccggcgaaccagttactgcagtttgctggtctcctgtaacgccgtctgtaggcgagctcgctgttggctctgggaactatatcttcctcttcgcgcgtgatttgaaaggtaagcctcgatacatcttccttgttattcttcggtctttggagttcagtttttgagcaaatggtttggattgtgataccattgggttacgacagaatggttatcccatcttctgggttcaattagtatagtgatatattaatgtgtctttatcttaaatttgtatgtctttactcatattcaggttctttttgttggagtcagaatgccatactggtgcaggaaacaatagttgaagcgattgagtggacaggatccggggatgggataatagttggtggaactgatattgttctgtggaagagaaggaaccaatcttgggaaatagcttggaagttctctggggatcaccttcaggatctggtttcctccacctggtcattcgagggtccttttgccacagcaacttcttggaggaagtttccagctgagtgtgacgacgcaggaaaaagtgtcttggcctattatagtgatggtgaatcatatcataactttgaattgcctcatcctcagagaatatccatgattcagtggagaccgatggctgcagaacagtctgcaataggtataggtaaatcaatgaggaatgtgctaatgacatgttgcttggatggggcagtaaggttatggtgtgaggtagatggtggaaagacaaaaaaaggcatgaaagatgtgcctgatcataaaaaatcgttttgcgtggcagctgtgatagagataaatcaggtcttggatggctgtttgggtagagatttatttcttttttggggaactcgtacagggggtatattcaaaaccatcgaaggtactaatcaagttttttctatggaaaagtacgataatgagaatgttggaaaatgtgagtggttggtagggtatggccctggaaattttgctactttgtgggctgtccattgtcttgatgacatctctcctatgaggtttccacgagtaacattgtgggcgaaacaagaatcaaatgaaattggtgcaggatcactctctctagcgagtgctacaggttcttctgatcgattaccccttaagaaagtttctgtattgagaaataacctttatggcacaccacttatctgctcgtcgatttatttatctccgcagaatactgtatattggtcttccttgcacacaataaagtcacatgactcggaagattca

SEQ ID NO: 70822 - DNA, 191 bp, Arabidopsis thaliana landsberg
cacaccaagcccccaccagcagacacgaccggaaacaagaacaaaccgaccaagcccacgacagcccacggaccgcaccaacggcgggagcgagacccgacaccgagggaaaaaagggaaagccgccgcaacagacccaaccacgaaggcaaagaggagcaaccgaccacacaacaaacaaaaaaaaggag

SEQ ID NO: 70823 - DNA, 546 bp, Arabidopsis thaliana landsberg
  unsure (1)..(546): unsure at all n locations
catattattttattttttgagttcattgtttgtttgtgtttatgtttgaatttaatatgttatttttactaaattcacaattttaatatgcttataaaaatttatttattgattgttaatgcaactaaatgaaagtttgacattttcaatttttattttgcaaacatgttttgtaagaatgagagtgaagaaatattaagtataatgtttaaattcttttttaacaagtaaattcaaatacaaaattaacgtttgtaaattccgatcccagacccagatgattagtgtgtaagacatcaaatgcattttaatcacatttgtgcataaaaattgtatatttgaatattagatgattcaaaaaatatttgtctcgttctttaacaaaaaaacaatataattatgtgatttataaacggcgttattgccaaagccgaatacttaatgtcttggggtaatcgttatttaggtttcttgtttcatgaaacaaagtgcatgtgttctttaattaaaagcggtagtccgcctagttaaacanaacagatcacc

SEQ ID NO: 70824 - DNA, 583 bp, Arabidopsis thaliana landsberg
  unsure (1)..(583): unsure at all n locations
tttattccagatctgatgcctaatgtagagcgagaagaatagcgattgcttctgctattaatggcgaaattatatttcttttagtatatcagaacgaggtctctgcacatgatatcatatcattgaagatccatcctaatcatgtgttgcgagtcttcacggcaggctgcatctgtaaagcaacgtactatgcccaatctgatctttggggatgaaagggtattgggaattttctgggtagatttacctttaatctatccttcgcttcattctttcgcttaaataatggctcgagagattagagatgtgcttaattggtgtttttgctcaaaaagtttcttatttcgacatgactagagcatccacaagatccacgaggataacatactaagactgatttctataggtggaagggaaaaccaaacgatttgtggcttcaataccctgtttcaggttcagaggcatgatggttttgtaatgatctgccacctcagttttccaagtaaggcatcattaaatttattgacatctttaaaactaagtcctccatctctctttgatcttgttatcnttgacaatgcaa

SEQ ID NO: 70825 - DNA, 453 bp, Arabidopsis thaliana landsberg
  unsure (1)..(453): unsure at all n locations
cttgacatgctgaatgagcataacatcgcttcctgccgggcccatgatggagccgttaaagggactttctctctgtcctgtcggttggtcgcgagggatatgtcgtctgtgcgactgttgtagtacttgttggttagcccattgacattaactgattcggagaaaaatgaaagatgaaagggtgaagaacaagttaagggggggggggggggggannnnnnnnnnnnnnnnnnnnnnnnnnnnnnnnnnnnnnnnnnnnnnnnnnnnnnnnnnnnnnnnnnnnnnnnnnnnnnnnnnnnnnnnnnnnnnnnnnnnnnnnnnnnnnnnnnnnnnnnnnnnnnnnnnnnnnnnnnnnnnnnnnnnnnnnnnnnnnnnnnnnnnnnnnnnnnnnnnnnnnnnnnnnnnnnnnnnnnnnnnnnnnnnnnnnnnnnnnnnnnnnnnnnnnnnnnnnnn

SEQ ID NO: 70826 - DNA, 581 bp, Arabidopsis thaliana landsberg
  unsure (1)..(581): unsure at all n locations
ggcggaccgtgggtttctccttgtattcaggggaacagcccagatgcgtgcagnnnnnnnnnnnnnnnnnntaaggcttcttgatggatcgccactcgttctgggcgtacggaggctgctgggtggccacctcggagtgagggtccacgaggatgccgtccagcttggacagatcggtaatcatcgcatcggtgcgatggatcacccacgtcggctggccgcgccaggtgtcgacgacacgctgcccaggctccagcttgctgatgtcgatcttgatgggagcgccagcattgcgggctcttgcgctcggctcccaggacttcacgaatggcaccgccgctccgaccacgcccacggcgcccagcgccgcagtcagcccgatcagaaaagtannnnnnnnnnnnnnnnnnnnnntgttattcattctatgcggtctccccttcgatcccattctcgggggcttgtctcggggttcagccgaggcggttgcgacacacctcgaactccagacagaatcagccgttaaaaagagtaaataaaaagaccctgtctgacaacaagccgtacaccggcgatccttt

SEQ ID NO: 70827 - DNA, 375 bp, Arabidopsis thaliana landsberg
  unsure (1)..(375): unsure at all n locations
gcattcattgaaaccggtttcgatttcagccagggtnnnnnnnnnnnnnnnnnnnnnnnnnnnnnnnnnnnnnnnnnnnnnnnnnntctgaatcaggtaagccatctggcgacggccccaatcttcaacacgatggatcttgccattgcgggcagtgacgatgcccttgtagcgttcgatcatcgcgggcacttgctcgctctgatccggatggacgataaaaacgatttcataatgacgcatgtaatctccttttggacggattgaaaaatcgcccaccccggcgtcaagacgagtgtgggaagaggaaagcccgaaatgataacctgaatacacggaaagctcaatgctttcaatgctaaagccagatcgacg

SEQ ID NO: 70828 - DNA, 334 bp, Arabidopsis thaliana landsberg
aacaccgcaaatcatcaaggtaactaattcttcagagtcttcatttcattttcatgttggatttttgataatttggttgctcctgttatctgggttcgtgtaaaattggtgtctttcgtctacatctggttgaatttcatgacttgaatgcttcagtttatctgggttcgtgtaaagttggtgtctttcgtgtacatcttgttggatttgatgatttgaatgattcagtttatataggttcatgtcaagccagcatctttgattggctttttttgcgtctgcgatctgtaggatttgatggctcacgacctcgattcaggttttttcttactac

SEQ ID NO: 70829 - DNA, 580 bp, Arabidopsis thaliana landsberg
  unsure (1)..(580): unsure at all n locations
tttgntgttattctcatatttgtttcaggttagctcttatgcttatctctaactnncttcatantgtttagtatcgnnnncacttaaacttttccttcatacttttatgcaatcttactacaactcttacactcatacttatagtagactttcatctactacacacacttgcacacatactttcattttacctccagacactagactgactcacctacacaagcagcactacttatgcgtagactccaacaactcttaattagctaactctttaccaaagcaaaatacaacattttgcttattatttgggcctgaccaagttaatgccccaataaaacttcttaacccaaaagcaaaacaatcttcttgttaactttttttgtgcttcatctgctcattcttgtctgtctcaattgtaggatcaatcaaaggtagtcaactttcaacaagtttttcagttgtaataagagtctctttcgcagttatcgttgtatttatttgtgaacaaaacctaacttactgccattactcttaaataaaatccagagtttggaattatcaaattactatgggaagcatg

SEQ ID NO: 70830 - DNA, 543 bp, Arabidopsis thaliana landsberg
caagcatgatttttagtgctaccatcttgtgtcgcaactcaaactttgcagatactgcttttggtgctttggttttgtgttttctgactgaatatcaaggacatttttaatcaaccatgcatgatatttaagtaaatgtcaagctagtccgagttatttgacagggaacaccatgggaaattataagagggggtactaatattatgtgactgtctttgtgttgcctcatcaaaatgcctcattcgttttttaccttgtctctgtgcattaggtatcctttagagagtgatgtatcttttctttctctcttcgatcttgctaggtgactggttgggtggtagagtaccaagaaaacttgattgcacttggtgttgatgattcactagctcaagtgtgttctgagagcggttcaatggatcctctaatgaatgcatatgttgaaagaatgcaagctacaacgaaggtaatgacatacacgtttgacctactctgctagtttttgacgttaaaaatttttataattctttttgcttaaaacttttg

SEQ ID NO: 70831 - DNA, 852 bp, Arabidopsis thaliana landsberg
  unsure (1)..(852): unsure at all n locations
tatacttctgaatataataaacttcaaaaatcgagaatttgttttgaacaaaggaatttatcttattgggggtgatgttgttgaactgatagggtttaaagtttagaatctaaaattactgtataatctcaacgctagacgtgtaaaactgttatttgaatccgaaactattcaatttaccaaaatcgacgttcgagataattgcccaaatatatggaaattatgacaatcgaaaaatatttaataaatctctacttatcaatatcctaatttaaaaatatttacattnatctctttttttttttttttttttggggcaaacatttacatttatctctaaaacatttagatttgtatttatcttatattaaaaaatagggtaatacaaaagaatgtattttgtataattattcagtctaatatatttttttcaaaacgctttatgttctttattctcgtcaattaatcaaaaattacttaaatcattttgacaggtcaaactggaaaaagtgtctactaatcaacacatcattttagcaccactttggtggggcggtggatcacactggtcggttacttttgtcgactctttaagatttcttttgacaaacttattacttcacataagaagcatttgtattcaaccattagcttaaaacatacgcataaagtataaccactgatttttaagtttttaagcaatgcgattctagcttgtgctcttcctctttccttatttcctttttgattagagagtcacataaattgacatcaagactatgaatgcacaaacacaaacagtgacattagatgttnttttttccttgcttagaccattccggttattaatat

SEQ ID NO: 70832 - DNA, 708 bp, Arabidopsis thaliana landsberg
atagaaaaaacaatttcctttccattacgatctctaaatctataaataaaacctaagctcttattcttcgttcttaagcaaaaacctaacttgttatccaaacaaactgaaatatcttggaaccttcttagttttgctcgagaatatcaaataaagaaacacatcagaccaagaccaaagactggggtgagccattataatgcacaacaacaacgatgccaaaacattcaataggcctaaagacgaaatggtcgtttaaatttgctcactaaagtttctagtttttgaaattactaattaaatgtataataattatatttcctgttttcatgcatataagatgttgacaatggcaagatggatcatattccgacgacaattaatgttgaaaatttatcgaaaattacacacgaccaactacattggaagatcgagcgattggttgagatctgtcaaaatattcaacgaaggtccgataacatttttgttggaaatcaccgactacattctgagaaaacttcttcatgatatatattagttctactcctatatgtgttttcaattctgattctgcaatagacaattaattaagtagttttgtagtgacttttcaaactcacatctagacttagctagcaacttatttaaacagcaaaaaatctgtgtttgacatgcaaaggaaaaataaagaatacaacttaatcaaca

SEQ ID NO: 70833 - DNA, 465 bp, Arabidopsis thaliana landsberg
gctccgtccattatcctgaatgacgatttttttcccacaacacacgtccttattactacgagtcatcatgataatgtagcgaagaggaaggacgtgacttgtttcttaacacgatcgactacttttttgcgccactgcgacactctgcggataaacggaggatgctgatacagctagatctcctccttcatactacctatcacactgcttatgcctgatcgtgcacggttaatatgtcctacgctcacatcttttactaggcacttattcggattgtatgatggccacacacgacgccgcccagtatcgctctctgtaatttctgctgatacggtggttctttatgctgattccattgaactcttaagagcaactgctcctgacagcttggtttgctcatcacagatgattgcttacatctgagggggatcgtgagaggcgctctttggaggtcacgaatccatg

SEQ ID NO: 70834 - DNA, 570 bp, Arabidopsis thaliana landsberg
caaaggggcgcgacatcatttgcaagatgactttttgtgaaaatcacatgggctctgctagcttctttgaagaaaacccccaggagataggtatctgaacacggaatttttcaggtgttacacgatcaaggagaagtgaattgtgctgactggagtcccactgggcgtgtaccacgatattgcgcgtgccgttgggattctcacggaagacagggttcgacgcaagcttgagagtgatgtcgcgatctgtgaccatgtcgggggatttgccagcagtgtcaacagttcgaattttgcctacgcggacagaggtaacatctccccatggcaagacatttcccgagctatgtgaaatttcaatgcagatacgcctctgcagtccctgatgtagttgaaatgttccactgtcaagctcgctgggatgagtgacttcgacggcagcgtactctccgtgctcggtaagctccatgatttggattcgagagagtaggtcgtgctttttttgcgtaaaatattgagaactcataatgcgaggtccctttgcattattcgaagtgggcatgcattttt

SEQ ID NO: 70835 - DNA, 760 bp, Arabidopsis thaliana landsberg
  unsure (1)..(760): unsure at all n locations
ttatgcaacaacagttttctgctatttattacttttggtacttttaaaatgatcattttactagaagaaactcacttaattggaagagtaatatcacaagggaatatttattgtaattgaagtttatgtgttattgttttagttatactttgacatatacaagaaattaacaagattacggaagcagaccatgtcacaatacacataaatagagtaatatagtattgtttaacgaagggccactaataaatcaaaatgaccttggccaataagtcaaactcctccgagtttagtagttgttttcaaatttaggcgtctcacacattggcgtggtataataaaatggtccaaccacatacttaaccagatccctgaaaactgtgaatggtcgaactagcttcactccggtttgaccgttcccaaaattggtgggaatgttacatgacaggtccggagaagacacgagccggacattacaaagttgaggcttgagaaccttgccgtgggagaggactntgttgaccattagatcgaactggcctctctcatcggtcaaatcgctgccatagtagctcactcttctcctttcgtccatacaagtgattgataccactgcccctgaaagatacaaagtggaataatttggttaagtaaattccggtttgagaagtttctcacggtttgccaaatatgaaaaagaaaaatcgaatattaactaaaattgaaaaagaaaaaacccatttcctttttttatttgcgt

SEQ ID NO: 70836 - DNA, 253 bp, Arabidopsis thaliana landsberg
  unsure (1)..(253): unsure at all n locations
aaaaagaagccccgaaccccacagcgcccagcggaaagcaacccacaacaagcagcaaaaagaaaaagaagcgcgcaagggcccccgccgaagaaaagaagaaaaaacggccccaaccaagaaaacacggaaccccaagaaaaaccaagacacaaacaggagaccacaagagccaaanaagcaaaacgaggccaaaaagcgcacgaacgagaaacagggcccgcccaaggagccgacaaacaagcggccaaag

SEQ ID NO: 70837 - DNA, 1427 bp, Arabidopsis thaliana landsberg
tgggtagatctgtacagattcattgttcgacagaactataaaacattttaaataaccatcaaggaaaaagtggcaagaactttaccacgatttgtatcgcatcaagcatcatactaaatacgatataaataaccaacaaaaaagagaagaagtttgtgatgcttatcgccttcttacagtgctgactaattgcagcggttgaaaatgtttagggctagagaccgaaatgatccatcatgtggaagacaacatctttgccatcagaatgtaaccaatatgttttcacctacacattacagggaaaattatgtcaaatgctcttaacaaaatcgcttttgagttttgagttcttatcattaaacttgcctggatggtactatgcgcgacgtatcgttgcttgctattgtgaaagctgacatctactctttcccaagatagttgactgagtccatgtatcatttcctctacatttcacaaaaaccataacaggacgaagttagtgattctacttgttataaagaagaccaatgggtaatagatagcgaggcaaggatctaccacattccataaatctgatagagatatcattttttctagcaaattttgaaaaacaaatagtcaagtgagaaataaagcaaaaccttcaagatcagtatcttgctctgttactactgtagaagttgactggcaactaccattgtccacatttccacgttctacgtatacaatgtgtggatagtttggatccgttgctagaagatttggctggaagatgagcagggataatagttattgataaatcccacaacgtcattaaagatgtgcacaaaatataataagtaaagacatacctttgggagttcatttggacggcgaattgaagatgtcctccatccaaccatagctttctcattagttaaggcaaactcttgtaaatgatagaaataatcaaaaaccattgacagtctctttaaaaacatgtttttttcagggaaggatacaatcaaaattcacgtttgcatatgccacacgacgcttgaaagcatttaaagctgatctgttgaggtcataagaagagatgatgagcatatcaatctgcaagtcaccaatgaaaacacccagaagctagagcatttacatgaatttcaagtcatcagaatctgtagccatccggataagaagtggagcatttccatcatcgttgtccaccagaaacaaatgctttccggtcctcccagcagccaaatgtgcagtttgggatgctgttctttcaagaaacggaaggccacaaagaatcgggaactgagggaatgaagacaagagtaagcatgtcatacagattacagaaagagattatctatatatatatatgcaaaccttacataaacatttgacctaggcatgcagtctaaaacatcaattcacct

SEQ ID NO: 70838 - DNA, 1490 bp, Arabidopsis thaliana landsberg
tttccacaattattgttggttttccagttttattggcatcatttgcgagctcgtttgttttgacacgttcacataataaacatagtaggaattggacaagaaaacgaaaggacgtaaaaacatgacacaaccagtgaccaattgcccatactagaaaaacaattattcagttagttgcagtagtctccatccattatatgtgtcactgttcacattgtactgatcatccaaaagacgacaatttattgtccaacgataaacgataatgctttcaatttcagtgaatggtaaacaatgataaatggatatgcctggaaaagaaaaaaagagagaaatgtatagttgagaggctatttgttctttgataaaacttgatgatatttagtaatatatctagaaatttaggaataaaggtacaaagagaataattctcaacttcggttcgccacaacgaattagcttaatattcggcatgcgtcattgttggcacatcactagaagttttcacaacacatctctttccctctttcgtaagcatcatgtctgtacatctctcactgggaaaacatttttgtctctctatacacgaaaactgaattaaggacgcacgattttagttgtatcttttatttattttgtctgtcaagcttcagttctatctttaatcgctagtccaaaacaatcatctattcaaactcttaaaatttacatgtaccggatattccttcatgaaccataaacgggaaaaatctgaagaacactgagacaaccataatataactaaaaccatacgaaataaatacgactctaatttatatcccatcagctcacgtaaggttggcgtaattatgaaccgacacaaaaagaccggacggatcgattccggagtactccgtaacgaatgctctgttttcaaaatatgagggagggctcaccgtaacctccggtgctctgctataccacctgatcactaccctcttcttccttcttcttcgttatgatcgccgcaagtacagctttgctcagaccgagtcgctggcgtagccaagtaagtaggtctgatatcgccggccattatgacgagaaacttctccggcatttctgtgtgcttagttttgttagtgtcgttgtcgggtttggcatcatctccggcctcaagatctctctcagcggagccggagagtctccagtaggaacatgcgaggatgagaagagcgacgcagatgagagccaacatggcggccaaaccaccgaagagataaggaaccggagagtgccaaggcgagtgaggcaccaccatggaggagctcgcgtttatgctgtcttggtaattatattgtcgtccttccattgtctgcatgtgtgttttactgtttgggaagagtgaatgaaatcaaagttttctttgttaaaaaagtaattaatttattggtgggagatgagattgtgttgtagaggcgttttaacaggaacgtatggatgattgtttc

SEQ ID NO: 70839 - DNA, 578 bp, Arabidopsis thaliana landsberg
  unsure (1)..(578): unsure at all n locations
gaccgttccagtccgggatctggttgttgaccgggcagcccggcgtgccgggcgcgaccgagccgttgccatgtctatagggcacgccgcaattcatgcagcgcgcggcctgatcgcgcagctctttatccgacagcggaatgacgaactcgtcgaaattcttcacgcgctccgcgaccggctcatagctgcggtcatgacgctcgaattcgagaaaccccgtgatcttacccatggtaccttaacgccccaaacgtgtatccaatgttgctcaagcgccgatcgcgatggggcgctcggcttcccgcttcgccttgatctcgcgcaatgcgcggcggtattccaccggcatcaccttgcggaacatcggcagnnnnnnnnnnnnnnnnnnnnnnnnnnnnnnnnnnnnnnnnnnnnnnnnnnnnnnnnnnnnnnnnnnnnnnnnnnnnnnnnngcgcttgatgtcgtcggcgagcaaatcctcgaacacatcgacgcggccatgcgcctcgaggtcttcgtgcatgtggtactcgctctcggcgatcatttcctccgagagcaccggctcaagctcg

SEQ ID NO: 70840 - DNA, 628 bp, Arabidopsis thaliana landsberg
ctcagcctcaatttctacaagcatgtcgtcacctatcagaccagctgttacaaaggtattggctggatggacaccagcagtcccaaatacccagccatgagcttggctaacctcttcacaaacactggcatcccgaaccatgatccgtgtacgtacaacatcggagagcgacgaatcaagcgccttcagcgaatgctctattgtgtccaagacatatacggtctgactgcgaggcgacttgccaccaataaccgggagactggcaattgggttttgtgtagtggtgccagagacgtagatcttgttccctgtccgaacggccctgcaatagccctgcagagggttagaaaacgcacatatgtagtaatcgatattggatggtgtatttacggcaataggctcccatgggcttccagatgagtattccactcgtttgcccatggtaatagcctgccttacagggctgcctttatcaatctcctccaggtggtcgcttgtgtcaccggcagcagttaaaaatggaggcctgcgatactcgtcaccgcaatcccccggcacatcaatcaaggactgttgtgcagcgtgaataagcgcgatatcatcatcagtcagatgtagtcgaaatgct

SEQ ID NO: 70841 - DNA, 138 bp, Arabidopsis thaliana landsberg
  unsure (1)..(138): unsure at all n locations
gatatttaaccaaaggctcgactagaacaattacttttaaactttaaaccagaaaatctcattttttagccaacgcccagnatagcaggagaaagccggctaaacccccaggaacaacaccaccaagcaggaaaaacc

SEQ ID NO: 70842 - DNA, 563 bp, Arabidopsis thaliana landsberg
gcgaagcagcgccctcggtcagctcgcggctggcgccactgatagccacgatgttagtttgaatgccccaagtccccacgcctcctgccagcgcagtcagcgttccggcgtggacatatggaactacctcactgcgttcggccttgcgcaagaatgcgatcatcgccacgatgatcagcagcgcctcaagaccctcgcgcaacagaatggtgaacgcgccggcgaatgatgaggcggtactcgtttgcgtaccaaggcggtcctcggcctgccggagcaggccctgcagtttctcgatctgccggccgacttgatcggcgctggcaccggcaccgatacctgagcgcagggccgtcatctcgccctcgacctgtcgcagcagcgcggaatcgtgggcggccagctgcggttcgaccggctcgaagccgtcaagatacgcagatacggccaggcgcaaggcattcgtcgagtcacccttgcggtaagcatccagcgacgcagtaagtcggttacgcgccagtcgcagcgcgccgctgtcggagagcacgaccgcctcgggatgg

SEQ ID NO: 70843 - DNA, 244 bp, Arabidopsis thaliana landsberg
  unsure (1)..(244): unsure at all n locations
gaaacaagcacngccacaccggaggaaacccaaacggagcaaagcaaacaagaccgggacgacacgggagaaacagcgccacaggacagagacggaacagaaagacccccccncgaaaagggccaaagaaacccaacagaacaggaagcgncaaggcaacgaggccgagcaagagcccaggaaggggccgcccaaggcccaaaaagacancgacncacaaggagaggaaaacggcaaaagcgcc

SEQ ID NO: 70844 - DNA, 550 bp, Arabidopsis thaliana landsberg
  unsure (1)..(550): unsure at all n locations
cttgcaaccccagatacctacagtctttcttttcactccngactgaatctttttgaccaaaccacagnnaccacaanaatccaaaaccaaaagagatttagaaacgaaaacagcaacngaangnnaancnctcncataccccgccacagaacncacagaagcacttgctgtgctggctgacctccatcttcttaatctgcttcctgatactcgcaccataacgtgttcctgaatcacataaccatacatacgttaggaagagaactcacaatacatataataaccaacttagaccccaaaatgaagaacgaatggcattatgaacccagggtagacagatccattccatattgccaccatgtaatcaaaaatgaacgatccttgttaatttcctccattaaaatgagctacaagactccgcaattttgcagacccttcccttttttcgatggcattaacatccctagggattcaataagagatgagtcaggcactctcccggttttgccgacaattccaaccttttttggtcttttcgcctgggaacctc

SEQ ID NO: 70845 - DNA, 352 bp, Arabidopsis thaliana landsberg
atagaaagtgctaaaaataataaaataaatctttaggataaaagattttttaaatttccatcggacttcaatgtcaaacgctccatattaaggaagtggggtccacaagaggtagacaatcagacacctaaactacttgaaacggaaaaataaagaactttgtattctttcttgtgtggtgcacagaaaaaaaaagtattatgatgtctttatagcaagaaatctgtactgcaatacaaaatgggaaaagacaaagcatttgtaataggttagtttctaaactgctatattaggaatcgtgaattgtttgtgtctcataccctactccctcctccgtggggggggggggggg

SEQ ID NO: 70846 - DNA, 540 bp, Arabidopsis thaliana landsberg
aaattgatgggaaaattcatgaaatagtatattcacatgtataagatatatataggaaggaggatgatgagttattataagcctaatactgacataggaacaccatcatcaaccagtgaccgtggtggcggtggtaatggtatgtccctcctcttttcttattttacaatttttatcaactttctttttgaaacttttctacaaagtacttattcatctaaataatatgtcgccgtgttgaaattagatattactctctattaatgtttgctgctttttttattaggtaggcgattgattaatttactttaagtcatcatatcgttcaaatatttttgaatctattcgttttatttattttgccgaccctagatggttttgctttttaaagcctcaaatatgtactaagggtgtttaagatccatgatctcacattggtagatgattctcatgctgtgtagggtttggtctttggtgtttgtcttggatggagcaaatatttagcctggaaaatagaaacctattgaataaaaaaaaatt

SEQ ID NO: 70847 - DNA, 608 bp, Arabidopsis thaliana landsberg
  unsure (1)..(608): unsure at all n locations
caactttgtctaatctcagccatattctttcactaacatcatttttttctttcttacacttacatcatattccccagtccaatgggaaatcagcacgatgtactagtctagtatctcctaaaagaaaaggattaaatttgaatttaatgtggtgacgttctttcacgccacgtttttgtaagtttgcaacaccattttggggttttaacaccttatcaccttatgacgaccaaaaaaaaagtttttatatgctaaactcaaaacgtttcaaaagtcgttttttctaaaagtgaagtacatttcgtcggttagatgaaccagatccaccacctgctacgtttatatttggctaaatgtttctttttcacttttattttataaggtttttgtaacgtacttcttacgttattactgaaataggatcgagattaggaataaaagactttgctacgcatttatcactatatggaaatttaattagacggntataggagaaatccacttctttcttcaaacttgtcgaaacgtatagtagcctacttggctntctcacccattatcatttatcaatatgattcataataacattttaaattaatatacaaaac

SEQ ID NO: 70848 - DNA, 540 bp, Arabidopsis thaliana landsberg
  unsure (1)..(540): unsure at all n locations
agcgggatcttgccgatcatacttaatatgatcgggcttgggtgaagtgaacggatggtgcctggctacnnnnnnnnnnnnnnnnnnnnnnnnttcgaatagcgggaagtcgagcacccacagcaatttaaattcatcttctttgcgcagaccgaggcgtttgcccatttccagccgcagctcactggcagcttttcgtgtcctttcctctttgcctgcgagaatcagcaccaggtctccggcttgtgcatctgcagcatctgcaatggttttcagtttatcctcggtaaagaatttgtcaacgctgcttttataggtgccatcggtattgcatttaatatataccattccctgcatgcctatctgcggacgcttcacccattccgtcagttcatccacctgcttgcgggtgtattcgctgcagccgggtacggcaatggcgagaacagtttctgcattgtcgaacaccgcanagcccgattcgcctgnnnnnnnnnnnnnnnnnnnnnnnnnnnnnnnnnnnnnnnnnnnnnnnnncgg

SEQ ID NO: 70849 - DNA, 602 bp, Arabidopsis thaliana landsberg
ggtactctacacgcatcgtctccatttaaagagcttatgtattcttgcttcgtgtctttatgtggtttatgtttgaattcgtgatggatatatattcaatgatacgtggttgtattcggatttgtcatggaaataactagctagttttatattcagtgatacgaaactagttagaaatagtggttcatcgatgtacgtagtaatgtgagttcatctttccacgaagcctaaaataggctcctattcattaatactatcttgatgccaaaaaaggcactacgactaattgtaccatagatgacaaaaaaaaaaaaagaagaagactaattgtaccatataagataaactaaagtatttaggaggaaaaaaaactattagctactgtctcgagtcccatgcaattgctgggttttgttgacttgttccgtggaccggtcaattctgtatatacaccataagtccataggtccatccctaacagtttaaaacataaaaacgaatttacatttttttttttttttagaccgatttacacaaacatagaaatatatttatagacgaataatcgagtattataattatttagactaaaatttttactc

SEQ ID NO: 70850 - DNA, 415 bp, Arabidopsis thaliana landsberg
  unsure (1)..(415): unsure at all n locations
aagccaccaccccgcgaaaagcaagacaacacgcccgaacaagacacaggtgcaagtgngaccccaacaaaacccagcggganccagacccanacagccccccgcgggccaccaaccacggnacaccagccagggagaacaanggngaaacaagnggcgccaaacggagaccaancccggggacagaagaacaaacgcccagcaacggaaacaaacnaaaacccacaaagagccgagagcaaacccngaaaancaacaanccccannncaagcnngaanncccnggaggcacggaacgnngacaaggcnnncccaacancagggaccgcacaaaacnnccnaaacaggaacaaaagngnccgngagcncacaagagaagggcnaaaccnncccaacccaacaaacaaagcccaag

SEQ ID NO: 70851 - DNA, 219 bp, Arabidopsis thaliana landsberg
aggacacccaaaaacaaaggaaacggggcaaccaaaagaccgaaacacccccaccccaaagcaaaaaaaagaagaaagcaaccaacccaaacaacaacgcaccccaccacacaagccacaaaaacaaagaggacggccaaaagcaaccggggcgaccaacggaaaagacagcaaccacggacgacgaacagcaaagaaagaaagaaagacaacaagaaa

SEQ ID NO: 70852 - DNA, 567 bp, Arabidopsis thaliana landsberg
aacgagtcgctcgccgatcgcattcagggtaacctttatgcataatacaacattcttaaagacctgagagtcaggaggacattaggcgcgactaccaatagcggccgcacgggtacattcacgcccacgactctgaacgacggccgcaatgtgggcggagcggccaccgtgaacggctcgaaaagtacgttgctgctgaatgagaactatttgacctacaacaaaaaaataggcagcgcgcacgacctgtcggtaatggcgggctattcctatcagaaatcgtcgagcgaaacttggggcggctcgggtcagtcgttcattaccgatgcggtctcttactggaatctcggcggctcgtcggtgtggcagagcccgaactccgggttgacagaatgggtactggcttcctattatgcccgtttgacttattcactggccgacaaatatctttttacggccaatatccgtcaggacggctcttcaaattttagtaaaaaccacaaatgggcgacgttcccatcccgtgcatttgccttaaaaatgtcgagcgagccgttatgcagcaca

SEQ ID NO: 70853 - DNA, 744 bp, Arabidopsis thaliana landsberg
  unsure (1)..(744): unsure at all n locations
gcccgttcttaagggcccgttttcatacagattcatttattacgtatacaattttgtatccttctcaaaaaaacaaaaatcttacattttccgtttactgattgatagttgaaactggaatcagcgtgcaagcttcgcctcccacttgtgaacgagactgtactgagaaattcttgacacaagacaagactgcgataaatattgtgtaggtttttcttacaaaagaggtgtgcgcatactatccgaaggactttttccaaaaacttctacatctcgtcgttgtttttcttaaataaaatatgtaattcttcatccgctttgatcaaatatgttcatgtttattatccttttaactatactaaagagttttatttttcaaaacaagagtactgtgtattttaagaggaaaagtgtctcatcggaattgaaggaagatctacgaaggtttaacacatactcaaacgagtatttgaataaaccttaagccttttcgatgtggctcattggctctctgatatatgcccaactaactaaaccaatacaaattggaagacgcttgatgaaacaaattaattgaaattgcattaaacagcttacgaaaagttaaaacgatagttcgttgttagtagaaatttcttatgtagcangtaagctaataattgaatagaataagtcaatctaactataaaaaatttgttaatgtagattatgtgtcttttaaatgcgtagtgctattatcactag

SEQ ID NO: 70854 - DNA, 470 bp, Arabidopsis thaliana landsberg
taagatcatctctctaatctctatgatatgaatatactaagaatctttagccgatataggtctaatattactatgcacgcccttagaaatattcaaaccagagacccctagaggatttgtacaaagggtacattggacaatgttctacactaggccacgcggatcctggatacctgggtcggttctagatccagacaactacgggtgtactcgcacccctgttggcattaaattagaacgagttataaacctatcggagattatggcctcacctgatacgagaattatgatctttttcaggactgatatctgatgtatactcagatattcaaatacaacggggcttctgtgtgctgaactgggctggggagaccttctactgggctgcatagctgtcgaatgagattcgccgcctgttacctgtcagggtggcacgagatatattgtgatattctaagattaatgtcaca

SEQ ID NO: 70855 - DNA, 580 bp, Arabidopsis thaliana landsberg
aaattcttatatttatttatataacaatatacatgtttatcaaaactttgtacgagtaaaagtttcaagcgacgaagcatctcgtcaagcattgagctgacgacagaaatgaaggaggataatgacgttcaaaatgacaaaataaagttttcgaggttatttattgtccaagaaagaaaaaaaaattgaggctatttacaaattcttcttcagattgcagatatgccgaacgggttgttaggacttaggaaccgttttagaattatggtacttttgtcttctaatattaaagaaacttaatctcattcgcgttgatagatattgaaattgtgggaatgtctcctcaaagacgtagatcacaagaaatgaaattgtgggaatgtctcctcaaagacgtagatcacaagaaaacatagttatattggtaaaatcattgtatttttaaaaatttcagattacttctttttttccttctttattccgcggaaaaaacatatggacttaaaggtcgtgtggaatttggcttaagttcccggatcaatccaaatttcggattaattccaacccacctttttgaatt

SEQ ID NO: 70856 - DNA, 136 bp, Arabidopsis thaliana landsberg
  unsure (1)..(136): unsure at all n locations
aaaaaagaaatacacgacggcagtgcaaagtctaaccgacgcgagcacaccagcgcnaaggcaccggaacccaccagaacgccgcaggccagcgggcncgggcgagagaagaacaaggacgggcgagcgcccggga

SEQ ID NO: 70857 - DNA, 4144 bp, Arabidopsis thaliana landsberg
aaagaaccatactatggttacacaaaaacttcaatagatcacattacatacccaacacaacatacattaatgaagaagactataatagcttgtggctttgcaagtaagtaagaaagtcatttccccttaaagctagccagtttagcaatagagaaagatgacccggactcatatgaaagatataaacaagtcttaccggatcttatgtcttctccaacttttcctctgtttttaagtagtcttacaatcatggcacaaatgagataccaccaatatatgtggaaaacaagcagcattagtaacatagtgttgaaagaatagtacatcaatgtgccttcagctgatgtcatatccaaataatccaggagttcaatgcttcaacaaacaaaaatgtgaatctcagatcaaacattgacatcaagtaaaagacattaaaactaaatagagttcaaatatagtatgtctacctcgtggccctgatgatccaaaatgggaagtatatcaaccgtagcaatagccaggagacagcaaataatgcaaaacatacacttgctccaaattctttttcagagtacttgaaaattttagcagtttccataaagacatcacttgcatcatgaagggctaggatgattgctccaatccggaaaaaactgcagaagaaaacaaaacaattcccagtagtcttttaatctttctaggttgctctatagctcactaaacaacaaaacatcagtcaacagaatctttttaacaagaaaacaaatgcaaagaacttttttacagtaaaagctcttttagattgaattgatttgttaaacttagcaaatcctttcaaaatctaggtgctacttaagatatgaactgattaaatctaggtgctaattgattaactcttttcaacaaaggatgttctgatgcaaaatgatgaatcaaggtgtaattacctggttaagtaggagtagctaagcaggatgattgtaattacatggtgagacatcatgacagcaaaatcctttcttcttgtctcccatgcaagcaacgcagccacaccatacacataaaaaccgcactggcacatatagtaaagctttattgaaagcctacaaaaaaaaagaaaacaacattctaatgtatcacatgtcctgggtactatgccatgaaaatgaactctacgggcataattctaaaccaagaaactcaaggcagctagcaaaagtgaatactcacttcaactcttgattaggccaaccgtggaagtagagtttgatatctctagcccacggctcgtgataaatgacttgtagaacgaaaaagtcacaagcagcataatacaacaatttccacaaggactctttgcatttgacgatttttgcccgagtagcagcatcattcaatttaatcggagcagaaccagtactcaaaagccaaagagctatcctctgacaaagattaaaaacaaaatgagacaccaataaatcgacaagtaaccaacaaaactgttcctttgttaatgaaaggattaaatggtgattgaagaaattcaactgtcaacgcattatacatcatcaacaaggcgaatttaatactagagaggcaataaaagcttccgtcatgaattcgaagaaataatgacttacttgaaagacgtatctatcgaggacaagcctcaagaagaagaatccgaaagcgaaatagacagcaatctggaaatgccagacctccatcgacggttttacgacggggtctccgccgcgtgatgataccgattccatgattttcactgagaaatcatccgacagaagaatcaaaaatcttcctggagaagaagaaaccacctgttctccggaaaaaaaaattcaaacgccgagaatttggttgcgtaatcgatcggaatctatttggggaagagaagagattcggagcacgttctaattcctccggtgagcgacagatggaaattgcaaaaagccttgcgaaattgtaattgggatctcacagaccttctttctttttttctcgttttgattgcttattatgtattttagtttcgtatcgacaacaaagaacaactcctcataattactagtattaattatttattattttttaaaaatacagtgtatatgaagaagtctctctctttcctcgtttgtattgtttttagcttttgaatcactctcattcacactagtattaattatttttattgtttaaaatacagtttattaaaaaaaaagcgaagataataggataacagtggaggtaaatgagagtaattataacactttggctgtaagataaggattccttaactttaaaccaaagcaggaggaggagcatgatgcccaagtataagcaatgatgatcatgttccccttaattaacttccagccttttgttaacattctaagtttatatttattttgtatgttaatctttatgttaacaacgcaagtggtatggctttttccgttgtttcaatatgtcttcctcattcaaagtcattgacaatgagggtttgtcccattcgaggatacttttctacgtcaatctatgtgttcttgatatttttccgaaaagtgttcttgatacatgtattcaaatatcatgttttgaaattaaatggcatctttaaatctaaaattatgtatctacgtgagtcgtgacagatgaatcatatcatatgcatgataataatctgtctactaaaatatgaagcggtgtaatatgtaatctttctagttttctttatcaagattgatcccatccacggcattttataactcatgcttccaaacacttgactttcgatttgtcacgcttggactcatttatttctaaccatttatgatttctaacctttccaaccatgcatagacttttctttctaccacttcatacacattaatttgtctagtatctcgtcatctctagttacgtcgacaaataaattgtcatctgtagcttttcttcttactacaaaaatttcagaaccaagaaaacaaaatgggcttcttgaattatgtttaagcccaatgtatatttttaatccacccatttattgagcgatacttctagtactaggatatgtgaatatgtaatacaatagtcttgggccgtcgggcgtaagcccaagagcccaatctgagagaacctaaccaatgataattgataagggataattagtagtcatcatcaaatatctgaatcatcaaagtggctgactaatttttgagtgagcaggatattatgtgtttagtcttatctatgtctcttcaaaatactcagctaccaaactaattacttgtcaattccttacttgtatataaaatcttatatgtggattaaaaattcacataccatagccacacacactcaacgggacaacaactactaaatttccgacacaaaaaaaaaatggattgaaacagataaactacatcacgtaaatatataaagattaaattcttttttcattttttgttttgtttttaataattaaacaaaaatgaataatggcgatgtttggttgcacgagtaggagcaccaaacaaaaatggatataaaacagactaaaacccgaaaaggaaatcagttcgtaaattaggcccccccctagctaactttatattttcattggtacaacactcaacactcccatgtaaatttacaccccaaaaaattattatcaataataaaggaatcctccttttatatgatcaatgttgatgcttcttcttttctttttcattttttgtggttctaattttagtgtgatgattattactcacttgtgatgctcgattccttggatgatatccttgtaaggctttattttgaaactacgatcatctcatatgactaagtcataacatcatatgaataaggttatttttacaacaaaaaagaaatcatatgaataaggcatatgttttagggtggaccattcctccaagatatgatgaaacggaattcaaaaactctttctaggtggcctgttcatttatcgacacgtggcattgtctcatgaaagtgaaaagattctctcttttttaccgtagccacgtcattttcgaagtccattcacacaccacctctaattttttttttttttttttctttttcaaattcatgctttgtt

SEQ ID NO: 70858 - DNA, 458 bp, Arabidopsis thaliana landsberg
aaaaccttttttttcttaaaactaaaaaggatatgattttatgatttttgatgaagcagcataaaaaaagttgaagggaaaaagaacaaatagaaaattaaccttcataaagcattccaaatgttattataattattattatacccctttacttaatgtttctcaaactgctcggctcttattgtaaacctgaagctaacagctcttctttgtgtgtttctctgtcactttttatttccttttctttgtggtgttattgctaaagaacctaaaagtctccatgccattcgatcagtctaaaaccgaaagaagataatgaaaaaacaaatctcttttttgccgattgattaaatctttggggattccctctaacctttatgctcctatgtttttctctccctttggttagattcagtctttctctctatgtaaccgttgaaaatctcttccccgaaagg

SEQ ID NO: 70859 - DNA, 396 bp, Arabidopsis thaliana landsberg
aaagataaagggctaaaacacaaatgacagaaaagagaagcagagcaatttgtattgcgcaaaagaaaagcaattaaaacaggcaaatgaagtggacccataaatactatacaatgggtaaaaatataacataaagaaacaagaagtaaaaaagactaaaaaacaaaaaaaagagtcatttgcttaatataaaccggagggaaggaaaacaaaatttaaaaacgaacaatgaaataatcataaggaaagtatgaaaaaattgacacactgacaataacagaagacatccaagaggaaggatcgaagaaacaaaatgaacacacggaaaatataaagcgttaacaaaacaacactgtgataaaataattccagaaaagaattaagcacgaaaattac

SEQ ID NO: 70860 - DNA, 458 bp, Arabidopsis thaliana landsberg
tttaagagtgtgcctttttagttggatgaagctgttgctgctgaaatgatgacttttaaagacgagtgggaggcaactcttgatgagcttgaaacagaaagtgcaaccttgttggtatgtttcgttgttgcttcttctattcccacaaaacttactccaaagggttacttgtcatttaaagtaacttgcgcaactctgcttcccttttcgtttctttcttaaaggagcaacttgatggtgctggaatcgagcttccaaaattgtacgaaatgatagaaagtcaagcccctaatggttgctacactgaagcttggaagcaaagagcccattgggttggtactcaggtgacaaaagaaactgtggaatcattggctaacgctgagaggtttctgcacactcatcggcctgtccgaaaggagggtttttattatctttaactttgacgtagtgcatgcact

SEQ ID NO: 70861 - DNA, 120 bp, Arabidopsis thaliana landsberg
  unsure (1)..(120): unsure at all n locations
ggggagaggggancaaaacagaccaaacgaacgaggnaacaagaaagagnagggaacacgccaccggcttgagggcaaaagacgccccaaggaggggngacacacaagacaagacaacac

SEQ ID NO: 70862 - DNA, 447 bp, Arabidopsis thaliana landsberg
  unsure (1)..(447): unsure at all n locations
taaaagagaaacacgacacggtagcacacataacagaggaaacccaaacgactcatttttttgcttacagaaaaaaaagacacccacccgggatgaaacaagaaagggaaccaaagcacaagaaaagacggtcccaatacagcagaacaataaaaccaacataggggataccnnnnnnnnnnnnnnnnnnnnnnnnnnnnnnnnnnnnnnnnnnnnnnnnnnnnnnnnnnnnnnnnnnnnnnnnnnnnnnnnnnnnnnnnnnnnnnnnnnnnnnnnnnnnnnnnnnnnnnnnnnnnnnnnnnnnnnnnnnnnnnnnnnnnnnnnnnnnnnnnnnnnnnnnnnnnnnnnnnnnnnnnnnnnnnnnnnnnnnnnnnnnnnnnnnnnnnnnnnnnnnnnnnnnnnnnnnnnnnnnnnnnnnnnnnnnnnnnnnnnnnnnnnnnnnnnnnn

SEQ ID NO: 70863 - DNA, 402 bp, Arabidopsis thaliana landsberg
cccaacaggccaagttgaaaaccactgtggttcaacaagccgacgaccacctctattctccactacctctgctgcctctcgttgcatacgccccagcttctgctcggcacacaacatacgcgtggtcgctgcgctagggtgcatcatcctctgatttgataggcgacatcttcatccaaggatgcaagacgacgacaagcggaaatgccctgtccaacgagacaaagagccgtaattgatgttgtagctttcactgtcaaaataaaaaaaaacacacttcttttcaaacaagagcacgctttacatagagaactactaggtaaaatgtaccaaaaaaaaaaaaaggggatgacaacacaaccaccctattttgaccaacaatgaatgaatgaatgaatgctg

SEQ ID NO: 70864 - DNA, 260 bp, Arabidopsis thaliana landsberg
  unsure (1)..(260): unsure at all n locations
ccaacgggcgacagacaccaaccgacgcgcccgaagcgcgaaacgcccggaaaaagcacggncaacgaagagagcagaccggccacncaacgccacaaccacggcacaagacaacgacaagaacgggcaccgcaagagcaaacaggccacacaaacagcgagcgcagcacaaacaccagaaggcaaagcaaaaggaacgcaccccccaaacgaaacgagaaccccaaaaaggaccaggggcacgcaaaacgcaacggacg

SEQ ID NO: 70865 - DNA, 113 bp, Arabidopsis thaliana landsberg
ctcattctgtgaacaaaaggtgaatactgaagaatgatggtggagggtttgattatcgtatcgcctttatagcctgactttaaagtttcatgagctcatagtcaatagcaaac

SEQ ID NO: 70866 - DNA, 261 bp, Arabidopsis thaliana landsberg
  unsure (1)..(261): unsure at all n locations
aaagcagacggcgagaggggagcggaagaagaaacaacaccncccgaagacccgaggccacganacgaccaagngncannccggcagagggacaagaaaaagggcccgcaaaaacanagcagaggggaccacagcgccaacacgnnaaagaaacccgaaggcncacacgagggcggcaggcaagacggcacaacngangcaaacanccaggcnccanngggcaggaaggcaacagagacccccgacgaagcaccgaaaagg

SEQ ID NO: 70867 - DNA, 564 bp, Arabidopsis thaliana landsberg
tagatctagctctgttcccacagatgcttccttctgcttcgcaatcaaaccaaaccagcgtaactctgttgtatctaaaagcactgctttgatttgttcaggtaacacgtcatggtcttcttgacattgctgattagaaacataaaacatgttgttacttatatacaaatcattctctcaaataactattctttgactgctagttttactaatcagtgatcagcatagcatcttaacaactatattacctcagcgcggaaaacatccaaagcaaaaccgttgaaacagctaatcacagcttgttgaacatccaatcctaagttatccaaagctctcatggtggaaagtaaaagacctggtctacgtccacagaacatgtgaatgttcactgcctttccttctcttaatctaacctcaacctatatcaaaacaaagaagccttacactaagcaaattacagaatccagtttcgtccactgacaataaattgagcttatctttactcttggttgctggcctttagggctttggcaggaggaagatggacacaactcttccttaaca

SEQ ID NO: 70868 - DNA, 664 bp, Arabidopsis thaliana landsberg
cgaggaggaatgggaaatagggcattatgggatctgaaaatattgggttcgaaaaatttgggttgtgcaagtgaggtatgattgagtccttgaaagtccattcaaaacattcttttaccgcttctctgccagtttcattgggttgaaatagtgtttgaccctccctcgcaaccatatgttcaagctcaagacatatgattgatgtaaaagccacttgaacactcttaattgcacttggcagtaaatgaggagctctctcaagacgagtatctgtctacatacccacgcgttgttcagatttaggagccacccatctccacagtctttatattcctatcccatagtccatactgggctttttaagctgagcccatgattctgcatcttttctattttaattcatttaggtgttttgtgcttttccttcatttatacatactgattgattagcttttctttttcgaaaaaaaattacttcataacaatggggagaaaattgattgtacgaacggaacgaatagtaagtagagatatgcagttcgtatgtacgatatgcgtatccatgcttgcaaataaatttagtcaaccatggaatggaactaatgatgttgtcctcaaatttatcttgagctgctattttcaaatagttggattttaactaatt

SEQ ID NO: 70869 - DNA, 655 bp, Arabidopsis thaliana landsberg
aatcgaatgtggagcgggcggactgcacgtgcagccggtcgactgcgagcttgttggtaccgagggcgagcgtcgcatccaggtcgatgtcggccggcaaaagcccgtgcgaaccaagatcgaacaccgcaccgcctatcgatatcgaggcggtcagatgcgaggcggagtcgccgctgccttccgcgccgctgacacgcagggcgagcttgccgagcgacgccgcgaggggggaattcgtttcgccctccccgcccgccatctccacattggcctccagcgcagcaatgcttcgagaaccggcctcgcgccttgccaggcctgtcacggtcgcagccctgccgtcgatgtcgacattcgccgcaagctcgatctcgcccggtccggtttcggtgatagtggcgcgggctatccgcagcagcctgacgtctccggcatcgggcaagactatgtcgacgttctcgaggccgatgcggcgcaacgaatccagccgcaccgcatcgagcgcctggtgaacggcgccaaataccgcctcggccaccttgtccggagcaatcaggccgtccgcgttgcgaagcgtggcgtcccagtcgccgccgctcgacggcagggcagccgcgacgatgcgcgcatcggaaaagcctggccgctggtc

SEQ ID NO: 70870 - DNA, 697 bp, Arabidopsis thaliana landsberg
ctacagaacgtgtatgaaccaatggcaggtgcgttccatacaatgtaccattagattatgattcatttatcgcctagagtgatgttgtagaggagcaccgagaaactaatgtaagtttaacagagaatgtacttcatcggctgcattggtacactatttgattataatatttttgaccactcaaatgcatctttataatcagctatatgaagaaatccaaactcaaatcaatatccggattaaagcgggaagtttaaacgaaaacaaacacaaatattctcgctgtattaatacttactgcttcaatttacagaaaacatgaaaaaaaaaaaaaatctgttttgtttcaattcaaaactttcattcacttttctttccctatatatctttaaacaaacgaaaagggtttctttgtcgagtcacgtatatgtacgtttgcgttactatgccgctggctgagttctggagttagaacgtcgcagcttagctcgagcatcagtgaggggtgatcccggaattgtatcaggaatgttgactccatcatcaccgttaaatgttccggcggagtctcggcctggtgttggtggtggtgttggtggcggccacttcctccctctgcttgtttgcttctctagcgatcgcaatgcagatagtgatttgttcagcggtcttggagcgcgcggggatggaggatcat

SEQ ID NO: 70871 - DNA, 378 bp, Arabidopsis thaliana landsberg
cacccttgagaagctaaatgaaccaagtagaaagagtgaaaacaatagagaacagatattgtgtacaagtctagtgatattcgcgacaaaaaaaaatgtctagggatattcgttttactcaatctcaatggtaaaataaatcattcaatctagtgctctcctactaagggaattttttcacatctttttctatcgacgtgagagataggattgaaacacacagttctcaacctctgctttgatgctatcaaaatatgatgaaagtcaatacaacttttccaatcttatatctctccctcatttcaatattatgtccttgtcaacacattatatatgatcttatttcgatgaactctgatataactattattgaaaacg

SEQ ID NO: 70872 - DNA, 281 bp, Arabidopsis thaliana landsberg
  unsure (1)..(281): unsure at all n locations
ggcacannaaccggcacgggacaactagaagaccccgacccagcaaaccgccnacgaggacgaagacaacgaagcaaaanagaaccggccaagccaggagnangcacgcnaacaaaccnggcaacaacccanggcacaggaccaggcaacacaagcccaaccaaggcagcacaacncncagaaagcncgcncganggaccanaaccacaaccacaacacacaaangcgcgaacaccaacagacccancaggncnaggaagaagcnnagaagaaaaaccaag

SEQ ID NO: 70873 - DNA, 739 bp, Arabidopsis thaliana landsberg
tatcatttagattttgcctaactagtctcaatttacgacatgtgtttgattttcttccatttctgtcacaattatgatggctggcgaaagaaaaaaaatctgatctaaatatatatattaaatgctaagttggaatttgtaaatctacagtataattggctcatttcaacaatttctttccatgtaaatttgttgaagaacattattgttgttgaacaatgaaagaaaaaaatatggttgttagaaaaaaaatgatttacgattttgccaagtgtgcatgctctttcatgggaagatatgaattaattatcaaaatctatataaaaaaaaggaagataatcttcattctttcctaacttagttaataaattaaattgattaggattggtaacatagtcaattcaatttatcccgttaaagaatgttataaattcgattgttgacccctcgttgaaaatttggaattatgcgggatgtttagaaactttgccataagaccaaaagattagttgtatttgatagtagtacaagagtaatcatttttcttctttaataacataaaacgcaggtggtaaaaaggctcagctatgtggagtggcacagtacgtgaatctcgtaggggtcactattggttacaccatcactgcctccataagcttagtgtaagtcaaagattctgatttatttcgattattttgctatggctcctaacaatgtgttctgaataaaaatactaata

SEQ ID NO: 70874 - DNA, 427 bp, Arabidopsis thaliana landsberg
  unsure (1)..(427): unsure at all n locations
ataagaggcagcgcaggagccccccacggcccgccggcactgagcagcacgngtgcgcggtggcggacgggagaagaaccgaggaacggggaaggaccggggcacacccaccccaagcccggacnagaccccacgcaaagccngaacgacaagcagagcggggaaggccacccaccgggagcagaacaaacgacgccncaggaaccaaagcagggggaaaccccgaacaacnaggaccgaccccaggaacgcgagnagcagaacagacggcggcccnacgagcagaacagacggccccgccacagccaaagcagcgganggggaaagggagaaacccnagaaaccgaagccaaaagccaagacaagaaaacacgccngncgagccancncacagacaaagaaaggaggcncanggacgggacaccaa

SEQ ID NO: 70875 - DNA, 171 bp, Arabidopsis thaliana landsberg
  unsure (1)..(171): unsure at all n locations
aaacaagagacacgagggggcaaccngaaagaagccagacaggggacccaccaaaagagaaaggcncaaccacaacgcacaagggaaaagcgggacagaaccaggcgggggaccagaccacccccgcggcagaaggcaaacccaaagagagaaaggggcaaaaaggaaacc

SEQ ID NO: 70876 - DNA, 530 bp, Arabidopsis thaliana landsberg
cgaacacctcttggtgcgcggatgcgccgtgtaccagtaggtgttctcgggttggcatctcctgcacctcctgcgcggtggtgggagggtagaccttgccgtaagtcgggtcctgctcgatgaacttatggtccttcgtccgcgtcttggaatagaagagcgggcgcgggtacatgatgttgtagtggccgccgaacgcgatgctcggctcctcccacggcgtgatcaggaagtccttgtccgacgcgagccgggtggcctcgaagtagtccttctggtcgaggaaacggccgcccggaccggagtcattcaggtgcagcttgtcggcgtggaaatcgctcaggccgatgatattgatgccgagcgcgcgcatcgcggcgaggtcaggcgtttcgttatccagcgaccccgactcgcggagacggtcggcgaactggaggtggaagtggttcacgaacgtcttgtagccgggaatcgcgggataggtgtcgttgtgcgtgtagcccatcaccgtcgcgcgcgtggccatg

SEQ ID NO: 70877 - DNA, 421 bp, Arabidopsis thaliana landsberg
  unsure (1)..(421): unsure at all n locations
ctggaacactgtcaacttacaactttattcttacgacaaaacaagttggttcacatcgctggagaattttttacatataggtcaatgcttgtggtatgggatctatcttggaacgcaagtcgcaccgcatagcgagatgaatttttgagtttagtctctttgcggtatcttagcttatcacttacaaggatacgttatttttcagatggtttaaagaagttaagcaaactgatctatttgaattaggattataccactaaacttcaaagtattggtgggatattaaatctactaagtctctaagtcttgaagattttttcttcaggagttcctaatgatattgaattagcggaagtgttggaatcattggagcatctaaacattntaccaatcacactaatgaatgttaatgtttaaatag

SEQ ID NO: 70878 - DNA, 521 bp, Arabidopsis thaliana landsberg
agcccccagcgcccgaatatcatcgtttaaaaggtaggacaagcaaaggagctaccatcaggaatttacgctgctttttaaatttttctgaatatgctttcattgtttttgcttttgtggatgcttgaacatttttattcttttatcagacaaggaggtatccggcggcgggtgggcattttcctgtacccggatgacttcgttggagagatgcaaagtcggcccataaaacagggcgctacccaacaggtataaaagataaccgccgcaggacaagcaaaatataaacagggctaccttcttttgtcttaccgttaaccgctgttcctgtttttgcaggtgacggcaaagggaaagctgagcggctataatcctatgggcgatccatgatgacgctctgtcctgccaacgcttgtccgcttccttttttttcatgtgcttatgccattgtcgcttgccatcatcaataattatttcccgtttgccttgtacttacgctaaaatctttattttcgagaata

SEQ ID NO: 70879 - DNA, 242 bp, Arabidopsis thaliana landsberg
  unsure (1)..(242): unsure at all n locations
gaacgaaccccaaggcccccgagccagcaacncagcggaaacgaagccgcgccaaggccgcaaagcncccggcaacccacccaaggacaaagcgggaggacccccggaaggaagcaaccagggggcacaccgagcggaagaacgcaaggcgaccgcggcacaaaaaacaagaccagacgcagaacgcaaagagagaggaccgaaaccagaaaggccgcgagcagaccccacggaagacccaa

SEQ ID NO: 70880 - DNA, 3461 bp, Arabidopsis thaliana landsberg
agacgctgacaatctccataagctggaaaaacgttaaagaggaatcagacaatcctagaagttgaaactatagaaatggggacaatagaagattgaacgtgtcaaatgttttcaaagaattacagttcagcataccatttcagatgaaatagcttttgaaaatccgccaatgaagatctgcaacaagtacactaggctcaatatcaagcttgacagaaaaagaaattagtatagcaagcaaatacagtgaagctttcaacattatcaaccacaaagatgccgtagctgcggagagaactgcacttctattctctgcgtgtttttcactttaagattataataaggtggtctgacatttggctttccaggttgaaccactatgaacaagcttttgatcataacacctactaccagccaaacttacaaaaaagttgatccagccacatgttttattcctttgctgttaactctaacaaaattgatattctactgacagacaattaaacggaaaaggatataaaagctgtcagcatgaaaaacatgcaacaaaattccaagatatgccccacatcatgaaccatgaatggaaaggaccaagtcaaatttagaaataccgatgttttgtctctagagcaagagattacaaattacagtggtatcgaaactatggcacaaactaaaaatttgatctgaactataaaccaagggtcactgacatatacaattacagtactttcaaaagggaatacgttaagagatatttaaaagacactctacactcattttcgatataaaaagttttacccactgtcgtaagaagcaaatttagggcaattatttgtaccttgtttgatgagtcctccacgttgtcacttactgcatttgcggctggctcttttttctccaattcaccgttctgcatgaaaatagcaaccgtctgaaaacctgcttcatggatggtaaccataacatagctcagaaatcatagtaaaatgcatggtactgatgtacaaggccaaatagaaggacaaagtccacagccttgataatcagtcatttttcatagactttcctacaactactcagccgaaaatcacagtaagaactgatcaaaaatgaaggacaaaggcaaaaaatcctcgctcgcttagacccgaacgaggatctaagaggaggtggtaagagtttagggtattcatgttattcttaggcgcgccaacacgaaagaatagagataacaatcaacaccaggtatctgatcctgctgaggaatgaaacacagtaatagccaaacagataaatgaataaaggtattactacaaccacattcagttaggagacgatcaaagataaaaaaaaagattgatatggtatcatctgataccaacatatttagacaaaactaacaaagaacacaagaacggtaaaccatatcacacaggaatcatatggattatctgtatgaattcctaaaagcccaaaaaagagaagaagaatggaaacaaacttggaagacaacaaactcttcactacacctggtagtcttcttatttagcagacagcgtcatcaccctcctgaatgtgaattatgacatacccaacataaacaccctatttaagagattccaacacacaacagtcagataacggtatgacatgtggcttgaaaacatatcatgtcaagtgcaggaatccataaactacactaattcttagtgacacctattgtcagtattaattatgataatggcacgggaaaaaaacagagaagccttcaaaaccaattgcaaataaataataagattgcacctcaacacatcaagcctttttgcaaattccaaatcgcttggacttcacaacccagcaagagaatcatgtgatggaaacatcaagcaaatacagagaaattcatttattcttttcctataaccatgatgaatttacttcaacgatatctaaatttctattctcagagggccatcctttgaaaaatggctaaggttttaagcttactgaagcaacgcaaaaccatatgtttaccaacaaatctgctaacagttgtaacatcaacagtactgtcttgcatttatcaaactctcaagttgcaatacatagtttaaaagtggcaatatgcttccattgagactaccttcaaagataggaccatgagcattttttggttccaacatagtacatttaaggagtggcacagtatgggcatctaagactgaatcatacatgaatcgatgataataagaactctcctaatttttctgattatagaagacaaccataatcttcaacagaaaagttatcagtaaatgagaatttggttatacaacaccatgcttatgtgctctaaaatatagagacagatgttttgctaagttccttatgtctgtctactttgaatatatctatctggatcaaaagaggactgatgctcacgacttgtaaataatgtaacataaacttacaccggacagtggtcatataacacaataaattcaagcttaaatcattaaaaagaagtcacacaggtttcagtagcatgttatcaactgaactgaaagtggaaacattgaatcttactgatgacacctagagaaatatattgccgatatttgagctagcttgcaaaattaaccagatgactattagaagataaaacatgcggagcaagtagcaagagttttagagagagagaggttgtagaaattgcaattcttactgttgtcctgacatagtctttagggcgtcggattttgaggtttgaacccgcaaaggagcagccatccaagtagagtgcagcagaggcatcttgtggcgtaaggaactccactagcgcctgacttttttccttgtttatctgcatttaaaggacaaatactatcaggtgatataattcacaagcataacaagagtgatatgaataaggaagtcacatgacagaaacttacaatacagctaatacatggttcacttccttttatgtgattggaccctgaagataacatatagccattgaagcattcaatcagagacttctcagaggccgaatcaggcacattttctgcgtaaagtcttctcatacgtctggtggattctgtcagttgaacagaatcgaatgaagtggtctgccttgccggtggcgtcctaaaaggcgcatccataaccataagtggcttcaaaagcgtcaaggaagcctcactgatggtaggatatgctgtctgagttgctgcttggagaccagaaaatactgagtccgaaaacatgccagcagttacagtagctgcaagaccccatttagcactttttttctcggaagaaagattaggtggagatgcagccttggtagatgcttgctcccttcttttccgtggtgaatatccaccaagttcacttttggaagcaaaataccgtctagacttgttacttacagtgcttgtcactttgtcttc

SEQ ID NO: 70881 - DNA, 753 bp, Arabidopsis thaliana landsberg
tcctgaaaaaataaggaggcgatcgacaatttaaggcggatttgatggataaagaaacagaactttagatcgttttttatgagaacgagacattgaagtcagatatccacaagagcgagacagatgtacaagacgcgttcctgaagctagggattgcaatggaagaggctgacaagagtagcaagaaagcggttagagtcaccgagcaactagaggctactcaagcttcaaactcagaaatggaaacagaactcaggaagctcaaagttcaatcaaaccaatggagaaaagctgctgaagcagctactgccatgctctctgctggaaacaacgggaaattcgctgagaactataatcaaacgaactccccgtactctgaggatatcgatgatgaactgacaaagaagaaaaatgggaatgtgctcaagaagattggagttttgtggaagaagcctcagaaatagttggagaataacttaatataattaggtaacctcttctatatttttagtcagtgtctctctcaattcgcttaagaaactaacttttgctttccccaacacggtttctgcttctcaggtatcgtcgacttggagttggattataagagcaactcatgtgacttcggtatcgatgtgaattaatagtttgagaacaatgttgtggaaaatacatgttccaaagattcttagctgcggtaattttacttttgttgtttaagtgcattctggagggaaactactaaatctgtca

SEQ ID NO: 70882 - DNA, 370 bp, Arabidopsis thaliana landsberg
tgggaaccaaacaaaagggggcaaagagcaagaaggaaaaaaagggacatgggtttgaagtttacgtaaagaagaaaaggtgagaggtgaggggaggactgaaggaacagtagaaaagaataacgcccatacaaagagatagggcaagagagatgatacagaatgcagaattcccagctaacgaagaaacggttaactaggataaagagcataagatggagagagaaaaaaaaggggagcaaacgaagggaaaagctggcgggcgaaaagagagagatgacgataggaaacctttggatttaaaaagccggtgaaagaactaaaatcaaagaaggatgttgagaccgaaatggggagtgtaagagcggga

SEQ ID NO: 70883 - DNA, 206 bp, Arabidopsis thaliana landsberg
aaaacaccgacccaccggaaatgccctctggccctaccgtactcaagcgtggcagtttccaccgactgtccacggttgagccctgaggattgagacggctgacttaacaagccatctggatacactacacacaaaatccttccagataacgcgctcatgctgtgcattaccaccagcgttgacacatacctagccgatgcttagat

SEQ ID NO: 70884 - DNA, 727 bp, Arabidopsis thaliana landsberg
gaccttatcttttttcgggtcataaaagatgtactaatattaataagccaaacgaaaactttgttcttctatagatatattattctcaaaggcgtttccttttcacttgctttttctttcttttgcttttggtgaaatcttcaaagaagcttttgtggttgtacccaaacttttttccaagtatcccacttgccataagatctgtggggtcttataaatatcacaaagtggaacttttgcaaactttgagggaatatttaatcatatatcttagagactctagtattgtcacctcttcaattcctcccaaaattccaaattgtaaatctgtattttgttaggaattccaagtataatagccaattacaagagatgtattacataagatttttaaagttcgatacatttcgacttgtcccttatgctcaagtatttattctattgtagatatcttaagtgtagatcaatgaaaatccctaacccgacaactcatgttaatcttgttttcatcctcgatcgcaagtatacatgtataaactcacatgaagcaaagtaaagaattcgttaatcttttttttagttaaccaaaaactttgcaccaaaactgatatatgtatgtgagccaaaactgtcatagcatggtaaataagccccttcacaacaaggctcgacctagctagatgttagattcaaccttctttagaaaaaaacctaatggtatatatat

SEQ ID NO: 70885 - DNA, 1366 bp, Arabidopsis thaliana landsberg
taacgagagtaaagttttttcagtggcatcatagttatgttgttctttgcattggcagatattttgcttaatcatgacctgaatttgacaagtaatgtctctgtagtaaagtgtttttcttttaatccatttgctatccatttcttttcagggcttcgaagtggcatgaatttgtccagaaagtgcagcttcttggagaaaattcatcggctttaaaacactcaaaggttctaaattctggggatctattacaattgatttcgaatagacgatttgggtattcttatgatagcaaagtaacttcagcacggaaatccaatgcaattgtggattttggatctctctcttcctatgctggcttatgccatggagcaagtctctcttcactttggcttcctcttgatctagtatttgaagatgcaatggatggatatcaagtaaacccaactagtgcgattgaaatcattaccggtaatttgtagactccatcttctttcacttgtggctttgaccaaagaaaagatatctcaaatatataacgaaatgacttgggagtattaaattttcaggtctagctaaaacacttaaagaaattaatgggagcacttggcatgacactttcttggggctttggatagcagctctccgacttgttcaaagggttagattactctcttactgatctttctgtttgtgatttcaccactactttggtacccagaaaagtgcaattgctattgcttgcaagttttacttacaccgtgtgcttttgtaattggttctgttatttggttataattcccaagacttttgttacctgcagtttcagaggactttcttacacactttctcttgactgaagctgtactatttgattgttactctgtcatccatgataagtttagattttccgtatctaatggctgttctgattttctcgtttttctttattactaggaaagggatcctattgagggacctattcctcgactggacacaaggctgtgcatgtcattatgtattgtgcctcttgtgggtcgcaaaccttattgaagaggggaaatacgaatctgtcatggaaaagctgcgagatgaccttgttacaagtttgcaggtcctcggtgatttccctggattgctggctcctcccaaatgcgttgtttctgctgccaacaaggctgccacaaaggcaatcttgtttttgtctggtggcaatgttggaaagtcatgttttgatgtcataaacatgaaggacatgcctgtcaactgctgtaagtttaataaaatttcgctctattgaattgaagttaaaccaatttgtttgtcttcgtattcttcattattgtcgcttgattgtcttcatttg

SEQ ID NO: 70886 - DNA, 702 bp, Arabidopsis thaliana landsberg
atcgcttctttcactcttatagtcttatctcacaatccgtaatttgtgcacaattaatgaattcaatgttgtattttgtcgtattaaatatggattttgaccaacataaacctgattttttagtggattattttaaaatatatccacaatttattccttcaaataaaatcccattctaacttgtatatccacaaaatgcccatcccaattgtcgagacagattcagatatctaaaatgacacatagtaataaatgtcgcatattacaccattaaagtacggtacattgacaatcccttggtgaaaacttagatgtcatgtgtaaggccgaaaggaaagcgctacaaggagtttcagccctatccatataagtaaataccaatgttttttagaatctaactatatttttacaaaattctgttggcaacaaagaaaaaaaacaaagggaagaagatgtataaaccaaacctgttttattttgtccacatgtaaaaactaattttttgttgggccatatctcaaaagatgttgatgatataatattgggctttccatgggccttatataaacaaacaaccttgtaaatcgggtttggaactcatctcgcaagggctagccaagcagtacacgtagcgggtcggatccaccattttacgacaggagtacaaacattgatttggcgccaaagaaacccaaaaaaaaa

SEQ ID NO: 70887 - DNA, 680 bp, Arabidopsis thaliana landsberg
atacagctacttgcgtttcttaccaagtgagtgaatgagtgttgttgttgttttttaaagagatcataagatcctttttttgtatacccacaactatatatgtgcgaactaaatacgggacgtggcagttccaagattctcgataacaaatagacacgtctcaagaagacttgtttacatgtttaaaaaatactttaacccacttcttagtttggtaaccgttagagttccaccaaagttaataaaaataattattatgaaccttttgagttggtcagtcacagtttatttttgttttattcctattctttacttttgagatcgaattttagttctattgttaaaataaaataaaaaataattgcttaatccggtataaccattgtacataacttataagcttaccgataaataaaccacaaattaatgcgttcttatagctgaattgtttttagagctagtaataattgatatagatagaatttcgaactcactgatttgatacctgacctataggctatagccaagtgatagtaatcaaagaaaaacgttgggtatagggaaactaatttaaaagatacttatattaccgtggtgaaacttatggaatttaaagatgggtaacaataccttaagaagaatgggaactctaaaattaaagcgcccaataaatttttttt

SEQ ID NO: 70888 - DNA, 577 bp, Arabidopsis thaliana landsberg
acacaacttaaaacaaattctagcaatcctagcttagaaattcaaattttaaacatggaataacaaataaagaagagtgttgagaaggagagctaacgaaacgaatctgagtctgttgggttatcacagctacagccctcttttatagggtgaagcctttagactcagagaaaccctagttttgaatttggttatcgaatctgggccacatgggtcacactattacacattattgggccggcccatatctctttaaatttggtttatccagaatcattcgatctcagttgggaaaaaccggttttgaataaaccggattggacactactccactacttgtctccactctgctcgtaatccgcatgatcgtgttcatgagaataattcatgttgcgcagactcgcagattgatgatccgatgcaatcgcattcgacaatgtgggttttctgtgaaaactgcggcattggatttagaatcgtcggattcgataatcccaggcttagactctcatgcttacggtgcaatgctccgtcgctgcattcagaagaacgacccaatttcagcaaaggctattca

SEQ ID NO: 70889 - DNA, 549 bp, Arabidopsis thaliana landsberg
ctgaagcaacaatgtgtaaccaaaatgaaactctcagtctcagattctttgcgtttacgtatgcttatagaaacgcaaacgttaccattcaccactcactttccacagctagattgattatcaaacgacccacaagaaaagagaaaaaagtgagaaggcctaaaacataaggaccaaaaactattgtaaaaagaagaaacagacttaggaaccggacaacaagtctaatcaattcatctgttcttgccgacaaatggttgcgcttctcttcagcaatttgtcgttcgatctcggcgatatcgtatagaactttcttaacctcctcgacgattgtgttgaccaaatcattctggcgactgtcataacagagttcaaaagatctgtcagtgaacaagcttatgtcctgaactaaccaagaacagagtcaagaaacagagtattccaagtttccaacaaagaacataagctaagggacacagtccagacctgtatcgtgacgaagacaagccagttttcttagaaacatacagtatagcatctttccatctc

SEQ ID NO: 70890 - DNA, 560 bp, Arabidopsis thaliana landsberg
  unsure (1)..(560): unsure at all n locations
cactaatatgtatcataaattttgtaaatcaagtctcctggcacgaccctgaccgagatgttcaaagacaaagaggtataaatactatttggtcctattatctgcattttagtgttatatttcttgattataaattttattttatagattaaaaatagtgttaattacctctattaatttaaaaaataaaacattgaactttatttacgatgcatatgttatccgaaataatattaacgtttcatttttttatttgccttagcaccacaaatctctcggcaccgccctgggtgagatattgaaacacaatgaggtatgcatgtattcaatattgataacacatttagcagattcaattgggttataaattttattggaaaataatatatttttatccctaagaatttcagctagaaaaaaaatatgatgataaacttggactataagagaaataattacagcatacagatttgatattttctaatcatttatgaaaatattatagctgtacatcatagaaagttgnactatatgttatttctcttttggctatatgacta

SEQ ID NO: 70891 - DNA, 2408 bp, Arabidopsis thaliana landsberg
agagttattggattatttcactttcatggagggacatatcagctgttttcttgtttctgctgttatcctgctcatcaaattcagccttgatcttcaggtaaaatatgtgttgcacattctcttttgtaatactttcttctgcacatctgctgctgctagtgtttcatattgattattctcatcaatttgtatgcattttacttgtctatggaattgggaaaaaaaacaagccgttcacgccaagacctcagattaaatctaacttgatgatgcaggactacaccatcttggtgattcgcaaagctatgtttagacgggaagatacagttcgtgttgcagcaaccaaagtaataactgatcttatacttgcagagaaactagctaagagagacagctcatttactttccaagactcagcaagccaagccagttccagtcagcagactgagatgagctgtattgtgaggggaaacctctttactgaactgaatgggttgcttcaaagatgtctttaccagcaggtgtctttttccttctttatcatgaaaagttactttcaagagtatgaaaatattctttgagctctttggttcctacatgtaggcaagagtgaaggaagtagtttatgatgggcttgtgaagttagtcctgattgatccatcaagtggaggacatgtgttggactttcttatgcctcattttcttcgtttcttcggacaggtaactgtcagcttcatccctccatgcttgacaaaacagaaaacgttgatatatatatatatattgtgaacttctctctacccttgactatttttacagggacttgctgttgattttttcaacttttattgttgaaagacacaacctcacacatattttgacaacttacgattatgctggcaggacacagattttcaacttggaatcacttcatgcattagagtagaaggtgacaaatttactattgaagagcccttggataggcttctcttttgtgtctcttggattttacttctccagcagcaaaacagctctgatcggccttccgatgctgcgtggccatgctttggtttctccctttcacaagataatgaggtattgctacagaaagaactggttttgtgttacctaatagagcatagctgtcaataataacgtgtgggtacattcaaatttcgtatggcagcagcaggttggaagaaacctatctcatgaagcgtactccagtgctttggtaaagatccgaagcttcttactaggcaagaagttaggaggtacgtgacaaatgatcgttcttaaaaaaagccttgactagttttatatacctgaacacgtttgatctgctgttacatttgtttgctttcaagtctggttcgtataggttgtgtgttaggcttagtctagtgtcatttgaagtacaagctataaatagtgagtcttctaaccgaaaggagcacctgtctcaaaaaaaatctgtttatttagcacatagcttctgatcttttcgtttgcattttacagatattgtagggcagtctcaggacacagtttctgcatctctcgaagaagataaaagaaaatcctattgtttgattatattgggaatcgttcaagtgctgctaaattatattatagtggatctagagaaacagccagaagggaaaaagggttctgtcagaaaggagattgtcgacttaattgatctttatgaatcactggaaaaggatgtgggaaaatcgaagcagagcaatgttggcaagagagtacgatttagcgcctgtaatgatactgatctgggaaacacgagtatcaatgaagagcgagagaaagttccctttttggctacttcaagtatctaccagctatttctactcagtttcaaactctatagcagcaaatccgttggtactcagtcaggctcgcaggatcacagccattcatcaccagcgaagacagaaaaatcaattttctccttcactttgcatgtttgtgttgggcacataaattcatctctttgcatgaaggaggaaaatccacttaaaccgttggtctgtggtgacatgaaggttctgggtcctccactgctaaaagtagtttacctgctaaagccagagccacctctagctactggacagacgaataaggagaagaaaggaaggaaagatgttgacggaagaaaacagtgtctacatctggccttacttagcttgaaagagctactcaatatatattcaagtggatctggtttgactggcttgcttgaagatttgttggcagtacctgcatccgaggatgctactttagaagagtgcagggaagcttcaaaaattgaagatccacttataaagagcatcgaaattttcatggcgaaaatcatgaagcccatgatcacagactttatcgcgcaa

SEQ ID NO: 70892 - DNA, 3877 bp, Arabidopsis thaliana landsberg
ttgattataaattatgtaatcggattcgctaaatatattggagaaaaaaatcacctaatagtttttgcatgtgtagtatttgatttttcgtataaaactacatatactaactcattttcatttttatactatagtagatttaatttacatagaaatatttaaaattttagcattatctattttatataattttcatgtgaattatttattttctcacggatatgatttggatggttagaatatttcaatgtttggacggacattcgaaatctaaaacttggatatcaaaatatccagatatccaaaaatcttgaatatggatcttaatagttgttgttcaaataccattttcaaatattgtagaattttatgatatctaatccatttatccctctaatttttatcactttgtatttatttttatttttttatttttcttcttcttcttgacatcgattcaacctactctttaggcttaaacacgttttagacatataaaagtaagaaatcaatcacgcattcttttcgtttgtctaattttatgttatcataaccagtaggtttacttttctaaaatcgatttagataaataaatacccaccgaatcggtcttccctatgactcgatactaattgtcttgacgtaccaaaactaattgtccaagaataaacaaaaagtggccatgtgtatctactagttgatctaaattgaccaaagttaaaaatgttttagatattttagttaaagtacaaaggagccatatttggagaccacaagttgctagaaagtgatgggatcgtgtagggtcaatgatccctaaacaccaccgagataaaaccttttcttcttctttttcagactctccatcttaatccacgttggtcgttggcgacttattagcagccgttcacatcacatttgttcccatctcacaaatccaacctaaattctccaggtttttgtatatagtgaaaatataaaattagacaaacgaaaattatcatttttaatgaaatagtaggcgaaaagtctaatttgccttttcttggtaagttaagtgagaaaataaccaaaaaaagtgagacaaagacaaaaagattatgggtttccctttcatatcaagtaaccaaataataacaacaacaaacaattttggccaaacttaatcaaagaaacaacaaatccttgcattacacacctccccacatctttttccttatttcaatcttcctcccttcaacaaaagatctaacataaattcatctatattttatacattctcacaatttcatcccctcatcttttttattgctcccccatgccccaaaatgtcccttaaaacggaatcgatccctcacaatattggtttgtccatcagctcgttttcggctgcgatccttcccgagccacggccggttatcctaccgaatgatccaatagttgatagtcccatgaagctgctgctttcttcgccaaggtttattgatcttctatgttttctgaatttggaggagctaacatcacctgcctcacgatcaacaacaacaacatcatctaggcttttgctcttttcgttgttgttgttgttgttctgggcgacgactaaacatgcaatggtgcttctacagaacggacagaccggtggagtcacggttgaggtcgttgggtttggtttgttgtgacagcacagtgcaagtgtgcattgtgcacacatttggtgaccacagtctttaacttcaattgtacatacttgctcaaagcaaatgcagcacagttccgtatcactcacctatagacacatttacatgttactacaatcacaaaaattaccgagccacggggaaagtaaagagtgtagtattattacctcggacatgttatcatccgtgtcagagaaagagggtgatggtaaggaataagctgttcctttgaggatggttttctctctctccctgttagcctccattaaagcctgctctaagagaagtttcgcctcgtcattaagctcactgatgaactttaatggtgatggccaaacaagtggctctgcagaggacggattaagtaaggctccacatgctccatgcttatgcttcatcgcaaccacataaggtattctcctgaaaagatatttcaagattcaagttatgttctgaaaccaaaacaagactttgccacaaaatttatatatatacccagaagcgtctcgttgaagacgatcagcaccccaagcaagcaactttctgacacaatctatagatccacttctagctgctaaatgaagaggtgtgcttcctggagaactgtttcaacaaaagcttaaagaatcagttccaatagaacaaaacatctaagaactgttgatttcaatgcatgacaagaaaaaccattacccatatacactagtagatgcacaaacaagagaaccactatccaacaaaacattcacacattcaggtcgtctctgtcgagcagctaaatgcaacggagtcgctcctttatcatctcttatgttcacaaatctcgcatatcccctgaaaatgaaaacccctgagtgtcaaaagtttcattctcaggaataagtaaactctgatcaaagataggaagagacttaccaatggacagcaacaggacttgattgagcagcagagagaatagcttgaacacaattagcatgtccataataagcagcgtaatgcaaacatgttcttcgattcacagaatcaaacatcaaaatctgcagattccaaaagattttcaattaccaaatccaaaatcgattcaattgcaaaacaaaaaagtaaacgtacattagctccaacttcagctagcttcttcacacaagagattcttccatacatcgcagccaacattaacggagtctacaagacgaatcaaagcatcagcaaaagattcatgaaaactatacacagaacagatcaatgcgaaaatcaaaaacctgcttgtgacgattcaacaaatctggattcgtaaatcgctccaaaagcaatgacaaaatctgcaaaaaaagtacaatcattataaacaaagatacctgattccgacgagattccggcgagatctctgagaatatcactgaaactaacctcgatctgaccattaacagcagcaacatgaagaacagagtgaccatcataaggagtagtctgattcaacagactaggctccgtagccatcacacgacggatagtgatgatatcgccgcactgtacagaggcgaatattccgtgctccggtcgacttccacagctcatactctgccccatctctcgaagattttggttaggctctgtgtaaagagatggtgattgatggaggttttaggagaggaacaacgacaccgtctgccaccggtgaggcgctccgatgagagaataaagcgcccccgtgacggagaacggtggttgtgtgagagcttttaacaatggagaagaagaagagggaagaagattcacatttatgtacacattgatagagtcatttgttgagaagatattaatttttaaattttgtttttggtttttttgtaaagttgattaaaaaaaaaagagagagccggagataaagagagacgactctctattggaggatttctccgacgggcagtttttttttttttttttttttttgcccgttgtcagttttgttacagttacttgtgatttcgggcagtcttgtcagatattttctatttttattttgaggtcattttttttttcttgtagcttttttctttgagattaattatattttctttgatttgccaaaaataggatggttttgtccacaagaaactgattttaatgaacaaaatttacaaatatactgtttgagtgatcaccacatcttaactaag

SEQ ID NO: 70893 - DNA, 369 bp, Arabidopsis thaliana landsberg
attggtaatggatagtccacagatatttggcaaaatttatattttcaagcaaaaccggctaacggtgggcatgtggtgaattggaacagtccacaagttcctaatctgattcaatctctaaggtatgttaaagtccttctattagccaatggaagagaatgtaatctgaacttactacatacttgcttccctgaggaagtggtccaacaaattgtaaaacttagaccatgaggcaatacctcaaaggttagttttgcttgggattactctaatgatggtctgtatacggtgaagtatgggtattgggttaccatgaaagttattaagtgtcagcatactcctcaagaagtggtacaacctagcataatc

SEQ ID NO: 70894 - DNA, 371 bp, Arabidopsis thaliana landsberg
cccctattatcaaaactagcagccccccgagcgctcgagcttaccagagaaaaggctgaaggcttcataacattaactcattgaaccctgcaaacgtatgagggatagaggctctcaaggaacagaggaaacggacactgtaaacagacaaaaaaaagcgggaggaagacacatggcaaagagagagcacgaagaaacagagcccagaggctcaaagcccccattaccaccaacattcaccggcgcctggataaagagctggagaatcatatgcaaaccaaagagccagagaacgagcacactctctccaatacagaggatgataaacgggtccgtttagaccagagattgacaacctccatcccatgtca

SEQ ID NO: 70895 - DNA, 147 bp, Arabidopsis thaliana landsberg
  unsure (1)..(147): unsure at all n locations
gaaacacgaccnccaaaaccacncgaacccgaaacccccacaacggaagaaaacgaagcncgagaaggaacaccaaaaccnagnncacgcgcgcncagagcacccacggccgaacggcnaaagcgcccaacccaanaaagaggcaag

SEQ ID NO: 70896 - DNA, 684 bp, Arabidopsis thaliana landsberg
catatggatacatatgttaagggcatctaaatccttccattttgttttgaatcttgtaaaattttaataaatgaattgatgagaccagacgaaaatttggaactccatagtttggttctggcgcacgtgcggcaactcatagtgggctttgtctgtaactacgataatacccctactaatggccaaaaatttgatataaatttactactttatttatatcaacaatgaatgcttagcttacatttatttaacgaagttttttctaagaaaacttgactgaattactgcaattaattataagtttcgcaatatagatttaacaaaaaaaatacgtactgtatttgtatcagtgatgaaaacacaaccatgtgcaacattagacttgtgttgaacataacgaagcactttaattccatctccagtgggcatgtgaccttaatcatcttactcgaaagtacgtactgtatttgtgaataacataaaactttatactactattacttaagtcaaatacaaatctaagttttgattcaataattggacgttggactgaattgtcacaaagatttttgctgactaaaaacaaaaaaattggtgtattcgtggggctgactttttcaagtaacagtgtaacgatttcgtatcaatttatttttagagtgaaaatgacttatctcgagacga

SEQ ID NO: 70897 - DNA, 553 bp, Arabidopsis thaliana landsberg
ggatagaacgtgccgcctttgtggtgacacattcgtctattttgtttctcgctacatccatgaccatgagcaacggggcagggttgaacgggagaccggcatcgaaatcatccgctacggtgaaacccgagcagatgaaactcccgaaatcgtcattacgggataggtcatgcggatctacgctatcgccttaaccccaaagtggattgagttgagggcttgtaaaaacaagccccaacgcaaaatcgaatatgcccattttcccggtaaaacccgagacggcaaaccctacaaatactcggttgctcagttgaactggcgtggtggtaagcccataggcaacatcacccttcacaactacgcagttatttgtgctctttctggttggcctatgccctactccttttacaccgggacgtgcgttgagcttccagaaaacgcatcggaagtcctaaaagatccaaagtttcaatcttgcttacactaaggaacccccatgactacaaagaccggaatcaagtttgaagacctcgacaccgaaaccaagctgaac

SEQ ID NO: 70898 - DNA, 525 bp, Arabidopsis thaliana landsberg
  unsure (1)..(525): unsure at all n locations
taaactttgaaaatttgatgatagaaatgcccctgcagtacttttttaattctgaagttcctcgtgntaaggatagaatcattcaatgcgaataaaatcacctggtgcttcctggaaagctgcctgatttgattgaatgcacgtaacttatcacctttatcaagtgggtagggaacacgcgacaatagaacaagcaatttcattttatgacagataattaattgctgcgaatttacgaatttataaagcggaggaaagctattattttctagtttgtaacaattgttttatagaattgtactaaacttctgcaaatagctgcattattgtaattttcagttgccagtagccgggcatttttacctatttcggcatacaactgtttgtctgatacacatttactgattgccttagcaaattcatcagcacctgatgcaaggatacagtgtttgttggtttcacaatcaactccctcagcaccaatttttgtggtgattattgttttcccaagtgataagccttcta

SEQ ID NO: 70899 - DNA, 617 bp, Arabidopsis thaliana landsberg
acattctgcttccgtgaaaaacgattgtggtctctgtaagattaagatcgacattacacaaccactgatttgtcttagctttaatgattagattcttaattaattagtcattagtcttgtctctgtaatagttgacttgggtttttgaaactaatgttaaatttaccaaactaaaatttttgtagggtttaaagaagttatgaacactaatccagtgactaatgggtttgttaaacctgttcctactgaagaagaacaagcaaaggtaacttaaactttgttcattattttagatttatgttctgataagatttgtgttatttgactttagattgaggaagtgaggaagctattaggtccattaccggagaagctttcgagtttttgttccgatgatgcagttttaaggtatctaagggcaaggaattggcatgtcaagaaagctactaagatgcttaaagaaactttgaaatggagagttcaatacaaacctgaggagatttgttgggtacactattgaattatgaagtaacattgctgatatgtttgagtttatatgaccaatgagttgtgttttcgtatgaggaagttgctggtgaagcccccacagggaagat

SEQ ID NO: 70900 - DNA, 1251 bp, Arabidopsis thaliana landsberg
cattagtaatttctatttaggttgaacattgaaactatccaaaactttaaataaagaaaattacaaaacatagaggggacaaacacacactgacaccgcatacattacacattatataatgtgcatgaatacaacctacactttctagtaaagaaatgaaaatgaatataacctacaaattttaatatttaaagacacgttctaaagaataagatcgccggtttaaaacaattacctggtcatcattttggattaaactcattaggcattcattatataattgcaccaaacaagaaggggatcaagaaaatcacgaatcaccggagcaaaaaaatggcgggaggaggaacgaccttagagtacacaccaacttgggtggttgctctcgtctgctccgtcattgtctctatctcttttgccgtcgagcgtctcattcaccgtgccggaaaggttatatattacatattggctccttgtgtttattttatatgtggggcataaggcatttagacgttgtagactaaatgactattatggatctatgcatgaggaatatagcactttaagaacaacgatcagaagcagctttttggggcattacaaaagatcaaagaaggtgacttcatgtttttgttgataaaaaaaaagatccatcatgtgatgatatcatttgttctaataggattcttaaaatttggaaacagaactcatgctagtagggttcatatcgttgctattatcggtcggccagtctaaaatcgcaaagatttgcatatcaaaggagttaagtgaaaagtttctcccttgtacgaaacctgcaggggctgagaagtcccttaaagactcctcccatttccagttcagcttcaccggccgtcatctcctcgccggagatgcccccgccggtgactactgctccctaaaggtattcttatctttgcaaatctttttttgacttacacgttttatttgaagacgtgcgtagaattaacataaatttgtctataatatgatatcttttttgaatctttttgtttgttttaaattcagggaaaagtaccaataatgtcattatcagctctgcacgagcttcatatattcatcttcgtattagctgttgcccacattattttctgcctcttaaccattgtttttggtaccatgaaggtattttcttaattacaccttacttaacaataaatcttttttttaatctttattagttacgagatatcacgagcaaatatagct

SEQ ID NO: 70901 - DNA, 527 bp, Arabidopsis thaliana landsberg
ttgcttgtttccttgtctatataggctgagatcgctttcattgatttgggctattctaatattttcacgctttatgtctttcatctagtatcttttattacaggggggaggaatcggtttggaagtctcctatctctcggacatattacaggaaaagcagacagactttatatgagaggcccatgaggacgtggagaagttgaagtagctgtttctggcgttgtatgtacttttcatttcttatgcttgaatggctctttattttcctgttagtgcttattttccctattttctcgagtgttacagcgcagttagtaatattccatggactgatactaaatggcgagtaatctcatagagagtgccctacccaacaattgacttaggtcggattgtcttaatagcagctatatttaagaagtacaatcgccaaactttaagagtaggagactcgttgaaatgtatattgcagacgtagtatggtttaaaggatgaattgatagaattgctttactcagatcagagcc

SEQ ID NO: 70902 - DNA, 308 bp, Arabidopsis thaliana landsberg
tggccttatgccgtaacctgaccactcattacattttagatgcttatttcatgaccacgttactttaccacattaccacgaggtccatccctattgttttaatctattcaacacataacttatccatgaggtattgggaattcaccatggtcatatatcacataccatacctatgcactttacctgtttgatgtgtggcttaagacatacactatagcacttcggtcgaccacttggtctattgtctacacccatgaagagaaaccacttctcatccttattgctactcctaattgtccagtgtgccc

SEQ ID NO: 70903 - DNA, 362 bp, Arabidopsis thaliana landsberg
atataaagtaacctgagtgtcagacatagcaccatgtccatcacgagggcatcacgtgaacgacacgcttttctcttcttcctctctctctctctctttttcgatttttttcaggcccatttgattcaacgctacaaagttaacattcattagtcaattgaataataataagtagcatatttgatctactaattcgaaatcagaagttgatactgctttttttttttttttgacagatggtattaaagaaccaggccatttttgttgattcagaagatgttgtcattataggagaatttctttaattaaggataaaagtgaggacctctgctataacagatagttataacgtgtgcgatcga

SEQ ID NO: 70904 - DNA, 693 bp, Arabidopsis thaliana landsberg
agacaacgaaaacacaaagaagaggaagaggaagtggtaaacccaaagaactaagccttcgtttcttcaaactaaaaccaaaactctttgttgtctaataatcttctttgcctataaaatcttagtgacctttctatgctttctcacaaaacaaaacatttacctataaaccaaacaaagagcagccaaaagcaaaagagagatagagaatggctaactttggaatcgaacgtgtttaccaagaatttgagcctgcaactagatggacctctgaaccagacgccgaggttcttgtcgctgatcttccaggtttgttttcttcttctcgatcttgtttatttgtgttcctttttttctacattaaacacatagaatagagagaaagattttggtaagagcaagcaagctcatattgtcttctgtcgttaggattcaagaaagaacaacttaaagtgtcggtaactgcaacaaggaagctaagactaacaggagaacgcccaactggtggaaacaaatggattcgcttccaccaggaaattccagttccattgaccgttgacatcgactcagtttcagccatgttcaaggataacaaactctacatccggcatcccaaactcaaaacagaaatccctcaaaccaagccaccaacaccggtgatcatgaaaccccatgatcagcatgagagaaaac

SEQ ID NO: 70905 - DNA, 746 bp, Arabidopsis thaliana landsberg
accgtggtccaaatgacctcaactttaagaccaaaagttttgctaacgctttgaattcgacgtatgtacatatttcgtgtgatgcatttcatcatttggactaagctccaacgttttgtcaacccttgatctataacttctttctttggtttataacttatggagtatttgtttagttttaataaataaataagagagtcataccaaaataaaattaaaataagagacgaacatgtgtggggagagttaaatgaatatggtccataaagaggaaaaataaaagggaaaacaataagccaaaaaccaaaaaccaacaaacaagaaggaagtaaagagacagcaaaagatgcaagagaaaagacaagtacccaactgtattttccaaacttgttaaaattttgatttctttctcaaatcttatgattatcattaaatggtccatattgttcttttgtctatcgcatctatcgttatttgaattagtgtcgtcgacaattaatgactgttatagttaagcagcttccaaattatacatgttcacatatgtatgcaatgaagggtgatggtttttattataatgaagtgtgatggtttttcttacttttaagaaagttaatagtgatgataacaattaagataaattaaaagatgtagacttgattacgacaatggaacaagatctggatctatatcacgtttcgattaggtcagagatctcaccacatgatgatagagcaatagaaata

SEQ ID NO: 70906 - DNA, 233 bp, Arabidopsis thaliana landsberg
gctgcctggtcgacattcaaggtacctatcggatctcggatctacgctatttcctcccggcatttctcctactacgcccttctgcttggggcctagatcaccgagcctcctgtgaacctgccttaacttagcttgcctctagggctgtatggaagactatcacgcctgatgaaatctcatcgaactgcgatggaaaatggggttctatacttgtggtagccacgagtgaatag

SEQ ID NO: 70907 - DNA, 538 bp, Arabidopsis thaliana landsberg
taaagaatggcataattcgggttagcgctatcaaagcctaatctaaaagtgaaccccaaaaaatctttcatagtgctattgattttgatttttaaaatgtttgatatctagaactagaagtgatatgataatcgcaaagcataattatgtttggaggattagttataaaaatgatagatctaaaattggtggagtggaggaaaaatatgacgtactttagattagtcatgcatgcacaattccaaaatcaggaaagatatatgcgaatagctccatcatggaagataagttgatcgatatctctaaactgtttggttttaattagtaccctgtctcaatttaaatgtgcggtaatttacgtctcagtactagccttgatatataaaatatttatcgttgttacttgttagattttgaaactctaatttctatatacatacttatagtaggctagtagtataacgatcgatatcgtatatatacaatttcatgcaattttaagtacgtgtttgcgatttgtactccatttttcacatca

SEQ ID NO: 70908 - DNA, 406 bp, Arabidopsis thaliana landsberg
caatctctcttttttgcgtgtcaccaggtaacagggtctttccctattagacttgatgaatcacacaccttatcttcggatgatctagatctagacctacctgttcagctgctttgaaagcggtaggtggtgcgtatacacttgcctcccgccgcttaggctgcagtcgtttggacatcacattatcactctctatcatggacccgggtttacactcaatgatgcaatcgacacctaacaggccggtggcccagccttggctgttcctagaagacataccttttgatactcaggtgctatacactttgcaggcctgagcgtatcggcaagcattgcccttgcgtccacaacactttactggctagactagagtgaatagctttctgcagcgcactgttgatccgct

SEQ ID NO: 70909 - DNA, 3066 bp, Arabidopsis thaliana landsberg
  unsure (1)..(3066): unsure at all n locations
aaaataaaaaaaatatttttcggtgagaccgccacaaaacgtgaattgttctcttccacttactgcttttatatgctttggtacgaagtttgtgacataccaattttttggaactaagcaaaacaaagaaacggttccgaaaagcctttgaaagaaaacaaattaatcgacctttattggtaagatcaataaaggcgacgtgttgatattgaacttgtttcttgttatgggcggctgttttagcgttataaagttttgagtttggcattgtcgggctttcggtcaaatggcttaaagctcaccctccttcttcaccacaagcttgtgtacctcccactagccaacctttgtttacctttttcgttacaagatgttttattagctacaaaatgcaaaactgtaatcaatgatgacaacgtaaatctgtaaataccatttctacaaatcctcgcttgatcacaaagcacaacaaatgaagttgtgcactacattgtatttaattatattattttcttgcattttttatggttttctcttacaagtacatcgtccttgatctaatgcaaacataaactaaaacaccacgttggactttagcattactcatttggttattataacaaaaataccatgtcggacttgtaccgaccttagggcagaagtttgaagtttaagttctattatactatgtagaggatatagccaatatttatgatgcataagaagatcaatcagtatcaagtacaaaaatccaaaatggtcggtagaattttgttgtgcttgttgacccgtaatgcgatatatatctttcatgagtttgatttgtcaaatcaaatctactattaatataagcactaatatgcaaacaaaattgaacgtttagcattgagaatgatgtttacgtatatgcatctatctcaattattttatgttacaatctgcatgtccttatctaaaacagtattcacatgcatcataattcgcattctcactctgaatttcaactaataattttacaatgtcaataaaaaatggcctacattacctaaaaatcctagctcaacagtaactactttttttctttgctaacaaccataatttgtttacaattatatagttttacaataacaaaaccaaaaaatgaagatttccatttacaaatatcttctagatcggctaaactcaaattaacagtaacgtacataaaatgaactaatgaagactcaaaatttctccccaaaaaaataaaataaaatgaagacacaatcgactaaattttttgttgccaagtgaaaaaacaaaaatcaacggtacgacttggtacgtaggtggcagattctcgaatctcaaattctctaatcacacacaatgcataaaatattgtacttctattgtcaaaatcttgttgcaaatgttaggcaagcttatattataagtttataacttaaaacgtcaaaacccaaaactgacacgtgtcactcagataagcctccataaccataccctcaataaataaggcccacttatgattctgtaaaaagcccacacaaacacggaccacatttttaagaatttataaatttcaccgtatctatataaatccacacatctcaaagcttctttagtttattttcgtagataagaaccaccgaactaacaaaatttgaaattcccaaagcaaaaacaaattacatcattcaattcaattctcaatgcctcttcttctccctacctcttccttcaaaacgacggccaccgtcgtaatcgccggcgtttcatctattgccacggcgatgattctcacggtcccttccgtttcccatttcgtagtctcttgctttccgattatttacgataacaccgtcttcctcttaaaaccaccgtatctttacttagtcatcaactctatcatcgtctgcatcatcgctacttctaaactcactcataaatcgtcctccgtcgatgactctgagatctcggaagtagtgactccaataccgataccggtaccggttcatttaccttctgatatcgattccggttatttaaacgtggttcatgtggtttctgattataccggatttgttgagaaaatcgatgacgtgtcgattaatccaacggtggaggctatccggaagtttccagaagttcaggaggcggagaagtcgaaagagagtagcgattcgccggaaccggagacggagaagccaaaattgaagaatgattcgccggagatttcgattctgaagcacagtacgagaaaaccgccgcgatttaatcagcaaaaatctcttaaatctaattcagaaggtaaaataatttagtttttttttgctcgaaattcgaattttctgggaagggcaaaatcgtaaaatgacggaggagttgtcactgtttatacaggtggaaataaaaagacggcgttgggagtgacgaagccaccgaggagacaagacacgctggagacgacgtggaagaagataacggaaggacgttcaacgccgttaactaagcacttgactaaatccgacacgtggcaagaaagagctcacgtgcaaagctcaccagaaaataaggagaagatgaccaagtccgagaatttaaaggacataaatacccccacggaggagaagacggtgttgaaacgcgagccgtcgccgggacaggaggagttgaatcggcgcgttgaagcgtttataaagaagtttaacgaagagatgagactgcaaagattagaatctttggctaaatacaatgaaatggtaaatggagggactcgtttgtaaattttcgtggtttttgcttaggcgtcggtgaaggagaaaatgacggcacagtcgcaaaagttgacttgactcttttttacaaccacttaaaagagttttttttttcttcttccggggaacaaaatttcaaaataatgcaaaaattgtgtttatgattgttatgtttcttttggggtcgagacgttatcgtgtggtacaagtgaaggattatatgttaacagtagtgagtagtgactagtgttcgaatctgttttcttttgtaattntacatttataacat

SEQ ID NO: 70910 - DNA, 632 bp, Arabidopsis thaliana landsberg
  unsure (1)..(632): unsure at all n locations
tttggtccagncaacggagtgattggagtaatagctccacttgctcatgaacgctatactttattggtcaagttgcagtcaatttttgataaaagtgattaaaggagtcatcggattaatccaccagcaatggatgtcggttactgacgaaagaagaaccgtggaagccaggaatgtcttgtatggtgacttaatccaatcgcctctggatctgggtaaaaacaagatggacgatatctcgaactccatgaatgttcaattggaggagatgtgtaaaacagttcatgaacttactctgctttactgagtcaaactcattattaattaacgccaataggcatagctctattttatttcatgttaagctttcttgagtttaaagtgcacttttgggtcctgtgtctagtaatactaataccctcgtgcaggttcaactattgtattactatatgaaacctggcagctaaccgtactgttttctcggaaccttgtctattttcaagcgtcaatacatgtagataagtcttattacttaatacatattctcaaattttgagttgttaaaacaaacttatttagcgtttattgtactgatttactcgatttgctggtgaattctatgctttgaaaaa

SEQ ID NO: 70911 - DNA, 131 bp, Arabidopsis thaliana landsberg
agattaccttttatgaaatttgggggtctaaacctaactactaacaggtgaagggtgcatattgcaatagcaggctcaacgctttaaaatcgttgtgaaacctttgtactactttagagccagcgatcaga

SEQ ID NO: 70912 - DNA, 484 bp, Arabidopsis thaliana landsberg
tctttgtatagttcgtactaaggaatgcataatatttttttcctatggtccaagcctcctcgttaaacatttcagaagttagtttttgtgatcgaattggaacaaataccactaattttagttatgtaagatattattaggtaacctgttattctctcattcctagaattaatatttcaacgataaaactaattaatatgttaagaaatatattcggacttgaaaagaagagtaagatttattatcttttattttcgttaatatgatgaaacaagagacagtttcgttatatgtcgaaacgttgtatggtcggaaatagccggtgagcataatatcaccaatttgagtcatgaagagcgaaccacgctaggtctttgcatatgtcaggtaaatgatcgcttacaacacataagttaaccaaaaggccttccgttcctccagctgattttcaaacttgcaacttgcgatcgagcacaaaaggagt

SEQ ID NO: 70913 - DNA, 142 bp, Arabidopsis thaliana landsberg
aggcacgcgggaagcgcccaggggaactgccacagtttgggagcgtgcagggaacagagttctattctactccccggggggggggattagcaccattacgtcacggtcctacttcgatatcggtcacgcaggggaatctagc

SEQ ID NO: 70914 - DNA, 170 bp, Arabidopsis thaliana landsberg
agaacagatcatgcgcttatatgcgatggagctcgctcccaaaaatataacctcccttaccccttttcgataatcccacgagcctgttattcaaacttatttgaccacagcgatggagcctgtcacctgagaaacacacacattgaccgggtcgagggataaccaggctg

SEQ ID NO: 70915 - DNA, 399 bp, Arabidopsis thaliana landsberg
tgggtaagtatgaactatgctaatatactgtattatgaattatggactgtaacttataaatcgaccaaatggatacaccttcttgttggactcacggaccggccaaaggtctactatgaaacatactgttgggaataggcattaccagatcctttatatgtgcttagaagaagaaaaagtctagatcttttttagattatataaaaatacttgagctcagactaaatatgattctttggagatcaaagagacaaaataactgctgtatgacaataatcggttattccttattgccggatccacatcactatttcatttttgaggtttttgtattattgcatatactattgacctgaatttaataccaaaaatgaagattgtagtatccatactgcatga

SEQ ID NO: 70916 - DNA, 651 bp, Arabidopsis thaliana landsberg
aagtttttggaattagccatctctctctctctctacaagcaaatgtaactagtagcatcaaagttgtataagatgaggcaaattttaccaagctatcatcaaatctaaatcgagctttaaggtctttaaaactaaggagattaaatcgaactcttcttgaactcgtgtaatttttcgttaaatcgaactcaaagagatcaaactatattctcatttgatgggcacacaattatatatcaatgagtttaaaacaaatctttttctttcgagcccactatatgaatagataatatgcccaggcccatataaagcccttctgcttttgatgccagaatcgaatgaatcatcatcatcggtaacgtttacagatttaatttccggtctaattggtacaattcttccgtcggacccgtcgttgaccgccgatgatttttaagtctcccctgccgtaagaactctatttaacattgacctacgacggcgttcaacttcttcgttcttgcttctcaagaaagttcgctcttcaagtttaaagtctcaatttttttcttgtaaagttgcaaagttggaaactttaattttggtttgacccatctcgaaattacaaattacttgagtacgtaggttcctataatcttttggattcaattt

SEQ ID NO: 70917 - DNA, 262 bp, Arabidopsis thaliana landsberg
agttactcttaataaatatttcatagagagcttcgagtagactagacccctctcatctttcatgagccaattttaataaactctgacgtcactttatttccttttttgagtccaaagtctttagttaaaggccatcagcctatatgagatttctagatagcagcttactagccaatattccgaagatacatgaactatatacatcaacgtaggattgtttcaatgaacatcaccaaccttcatgtcaaaaaaaaccaaaaca

SEQ ID NO: 70918 - DNA, 901 bp, Arabidopsis thaliana landsberg
tatgaaggtctatttgactccgataaaatctatcgtggaccttttcgaaaaaacgcaatattctaagattatcatgaggtgatcatagatgattataagaaaatcaacggcgaggtggttgaaaaagcagttgtggtgagcgtattggtttagagggagacaaattgtatattatgaagtgtttttagtatggtagtttgtccatttaagtcgccatgttcagtatctgtacatgacttacatcagaaatctcaatttataattaaaaatataacaatatataatattaatagtattagactgaatattttagaataatcattgtatatttttaaaaaatatgtatgaatttgttttgaaaaagtatagtttttgttatattgaacctcatatgtattgtatatgaaaagatgattggttggatgactctcacctaatatattgtcttcatatgaattgataacacaaacaatgttcagttcagatgaaaaattatcaaacaattgccaaaaattgtcggatgtatattcagtatctcatggtctcgtagttttttgagtatgccaaacttatgagtgtaagttaaaaatgttggtattccaaaagaaaatatcaagctataaataatatacaattgttctagtagacggttatcatggatgatctaaatcaccggaaaatgataataatggttttgtatctcaattagctctcaatgccttggtggaactacgtaaaatgaaagactctatcttttagttgattaaaataatattgtaagttgaatttatgtgttttgctttagattatagaatataaaaagaatcattattgcgagtgacttataggcagcttataacttataacttataggaaatctttatatatgccacacatgcac

SEQ ID NO: 70919 - DNA, 2431 bp, Arabidopsis thaliana landsberg
atatattttgtaatgttcgataggagactccatgctgttcgagttattaacgaccttttttgatttattgcataacagacctggcgatggtgatgccatggtttatcctaactcatcagcatctttagcatcaagttcaactaaacaagtattcatgttttcgtttcattggcttttagaagatgagagtccatttagttataatttaaaacttaaggtagttagatcattggtcctactagcagctaaagtaggaggaatgttgcgtcttacatcaacgatagaagatgactcaagcaagaggtgtcacatgaaggatcacgaaatatttgcttcctacgatattttacacgtcttctcaaagtttctcacctttacattgtttgctttggttcggtttagattctctcttttgctgctttgatcacttttgtaaaactcgaaaccggtttttgattctttttttccttcgaaacttaaatgatatctttaaaccaaaacgaaccaaactaaatcacacaattacgatccggtttgaagatattttgttgtccgtaggattctgattccgagtctctagttccaaagagaagagaacatctgtgagagatctgagacgtctggaaatgtgaagaaaacaaaaaaaaaaaagatctgagagagagtttcgaaattctcgtgttcgtaagcaaaaatggtttgggagaaagagaagatcgtcggaagttgtatagtcggaggagctgcgttcgccgtcggagcttctttccttcatcttttccttaaaggtgagcttccgttaggattaggtttaggtttgtcttgtccatggcgcattttgagaaaacgaaaacctgttcgcgtttacatggatggttgcttcgatatgatgcactatggccactgcaacgctcttcgtcaagctcgtgctctcggtgaccaattggtcgtcggtgttgtttccgacgaagaaattatagccaacaaaggacctcctgttactcctcttcatgaaaggtttctctttctcgagattacaaattcattgtttctggtgatttcaattgcgttttgtttgattttgattttgatttcgttatgtatagaatgacaatggtgaaagctgtgaagtgggtggatgaagttatatctgatgctccttacgctattacggaagatttcatgaagaaattgttcgatgagtatcagatcgattacattatccatggtgatgatccttgtgttcttcctgatggtactgatgcttatgcacttgctaagaaggctggtcgttacaagcagattaagcgcactgaagggagttctagcactgatatcgttggtaatttgacatatccccttctgatttcattttaagctcgcatcagctgacttttgaaacgtctaatttcatcattttcgatttgtgatttctgagcaggtcgtatgcttctttgtgtaagagaaagatccattagtgacactcatagtcgttcctctctgcaaaggcaatttagtcatgggcatagtagcccaaagtttgaggatggagcttcttctgctggtactcgtgtctcgcattttcttcctacttcccgcaggattgttcagttctccaatggaaaggtatgcatattttaagagtttcttgtcctcaagttaatgtattgcatacttgtatttgcaagtttatcgtagtgtttgttgctttatgatatactaggtaggacaagtacatgacccttgatttctaatagctatgcaaggggctctgagagtctgagcttactgtttttctagttgttttggttattaaagagaacggtctcaaacagcagtttcgtcatcattatggaacactgtctggttcagtcttgttcttgaagttactggttcacactttctatgactgtttcaccaattattggatacttttatgtgcttatcgtatatttttcttcttaagtgacagaatgttacttcacatctcattttatgacctattccaagtcatatacctgctagatgtatctcaagattatttttcttgatagattcacgaatccctttcttctgtcattttactccattacctcagtgctccttctcatattttatctggggttgatcaagtttacattcttattgtaacaggggccaggacctgatgcacgcattatctacatagatggtgcttttgatcttttccatgctggccatgttgaggtatattaattggtgcatacaacatacagttcactttatatgtgaggagtggtgttttaataccgttacatgaacaatgggtgtaaggttaaccatattaatgatacattttatgcttatataaagtaaagaagtagaagtgagtgggattgagcgaccatttagtttattctgccaatttatttgctattaaaatacttaattc

SEQ ID NO: 70920 - DNA, 251 bp, Arabidopsis thaliana landsberg
cgagtggattttcctatggtgctataggcatgttgttactcaaactactgattaattaatacttctttgtggttggaaaaagaatctagctgaaaagtactcctactgtaagaatttaagttagaataaaacattttaatacagatataaaaatttagttattaaaaaagcgctactaccaagacgtccaaaagaaaaactagctttgtcttctaaaagaaaacctagcttaactacccaaaaaaatctag

SEQ ID NO: 70921 - DNA, 507 bp, Arabidopsis thaliana landsberg
gattcttccgcatggagtaaaaccttgtttgtcttacacggaatttacagaaatgcgtcggcttgctgggacaagcggggcacattttgctctgggtacgcataaaatcattgaatcttgctttcttttagcagtagtaatatatggtttgccaagtgactgttagtttcttcatttatctggtttagggaggagcagagagttacaaggtctggctaaggcaatggtaaagctatgggcaaaaagtgcgatcgccaaaatagcaatcaaacgcggtgtagaaaatacgcggaatgagagaatggcagaagaacttaaggtttgatgaaaacataaacttccatacatattcaaactcaccaatattttgcatgtgctcactttgtttatcttattcattcttgaagagacttacccgcggtgtacttgtttcgagaaacaaggagtatattgtcttctacagaggtaatgacttcatgcctactgcagtggcagatgcattgacca

SEQ ID NO: 70922 - DNA, 533 bp, Arabidopsis thaliana landsberg
tatgtttttatactaattgtatttatattgaaatcttttactattgagacaggactgaatagaacgggggaaaggggcagattgcggtggctaaattatctccggccggatatccgccgtggagacatatcccttcaagaacaatttatcatccttgaactccattctcgttggggaaatcggtatgaaacctttatttatatcgacatagacatagtcatattgtcgatacattacttaaaatagaaaaagggacacatatcgttgaagagagcaaatttggaacgtctctatgaaataaataactcgttattcaatattgtattagtagataattgacaaaatcaatttgatgcgtatttgaaatttcttggttgaattgtggttactatatgaaacttgtatcatagttgaaattaaggtaagacacatcaacgtctttttttatcagagtaacactaaaaaaactgattaatctagtactacaatagaacttataaataattaaaccctccgattcattataaataata

SEQ ID NO: 70923 - DNA, 103 bp, Arabidopsis thaliana landsberg
gaagcgccataagagtaacatatcaaagccatcgcatcatagattccaacactctcacaacatcgccaattttcttgttcagaaacaaaaagctagcaaacca

SEQ ID NO: 70924 - DNA, 523 bp, Arabidopsis thaliana landsberg
tggcagattgagccgcccatactttcttgccgatttgatgcgcttgccttgtcaacgcttggaaacttgctgcgttcccatcatggcaatgccctccagaccgcatcgaatcagcaggatattgcgaacctatagcaagaaattgccgaagtcaacgctttcataacaatcaagcttcgcaaaatttcacattctgcggtggtcgtttggcctacattcatggctatgcgacacaggaacggaagaatatacgatgagttctcgcaatcactccctgcccgagtcgtccgccaccttctcggatcgcataaaagcgctgatctacagggtcggcagcgtcactgaaatcgcacgaatgtgcggtttttccgaaggtgtcgtccgtagttggcgagatggcaacaccgacccttcgcgagcgcgctgcgtgaccctggcccgcaccttgggcgtctcgctggtctggctggtcgcgggcgaaggggccatgcaggtcgacccgtccgtcaatgcgccgatggac

SEQ ID NO: 70925 - DNA, 1372 bp, Arabidopsis thaliana landsberg
gtactcaactgacggaagaattaaaaatgaagaacagatcaagaaacacttaaagagctcttgagcaggaaaacagacagacatccaaaccatgaaaaagatgcttagcaacaagaaaccattgaagttgtttaataggaaaaaccactgccgaaactcactgatactaaagcagactggatttgtatgtgatgacccatttgagaaagaaaacaccacaaaacccggaaaagtgcaacatatttactcctatttcttagacctatctatctaaatttgatacacctaaagttattctcaaccaacaacaagaaaaacaaaacagtcaggtgaagaatgcaaggaataagagacaaacaaagcatctgcgaggttatcgagattaccattgccactctccgttcgcccacgaacacgattagactttgaactcttgtaattcttcacataaactaaactttcatactcagtcaccacctcaggtagaatcctagaatacatctcactccacaggttcttctgattcacaatgtgggcaaacctcattgactccaattgtttcctagtgtacaatctcctaaactgcttcccattgttttctactccactcccctcaataacatttctcttatctccaattttcttaagctttctaggtgtatccttctcattttgagcagtccctggtctcttaggatgatgaacaacatcaaccaacgcagtatgatcaaccaattcaatcttatcaacatcattatccatcgtctcttcgatcttaggcaacgtatccacatcaacactcttcctaaagattgacccaagttcgatttcagccagcaatcttctcttctctgcttccaatagtctctgagcttcagattcttgttccttctcctcaaaattcaaactttcttcaagggctccatcaactcgatattgctcacttcctttagagaaggatgattcctttatctcttgcagatccctattgtttacagagacggctccatcttccatagttattgcatcgttttgcgaggaagaagcttgtggatctatctcagagttcagttgcttcttaaagtcgctctctttttctaatccatccccagaaattgaggttttcgccggagtacagtggtcggaatcggagtttgtcatcatgaggcggatgtgcgcaaaacccttaacgagtgaataaattgttccttttctcgaagctaataaattgctcgaaccggtttgattaaaccggaaaaaattatcaaccctgaaccggttctatgtataaatatagccaatgtgttctcatccccgattataccggatccgcatatctgctaattccacacaccattctcttttgaagcct

SEQ ID NO: 70926 - DNA, 2073 bp, Arabidopsis thaliana landsberg
gtttgcaaggctgagatttgaaatatagctaaagttttttactttaagaagtagccttatgttgggggtgggattttttcttgtgtggtgcaggctgagtaatgggtttgaatctgaatccaatattgagacaagaactggctaatcttgacaaagacacagagagtcgtaaatcagcaatgaaagctcttaaatcttatgtgaaggacttggattcaaaggctattcctggttttctagctcaagttttcgagactaaagaaaccaactctttgtccggtgaatacacgatttcgctttatgaaatccttgctcgtgttcatggacctaacattgtgcctcagattgatacaatcatgtccactattgtcaagactttggcttctagtgctggttctttccctcttcaacaagcgtgttcgaaagttattccggcgattgctcgatatgggatcgatccgactactacagaagacaagaaacgagttataatccactctttgtgtaagcctcttacggattctctattggcctctcaagagagccttacttcaggggctgctttgtgtttgaaggctcttgtggatagtgacaattggcggtttgcttcggatgagatggtgaacagggtttgtcaaaatgtggtagttgcgttggactcaaactccaaccaaacacatcttcaaatgggtttggttatgtcacttgccaagcataatcctttgattgttgaagcttatgcaaggttgctgatacacacggggttgcgaattctaggattcggagtatctgaaggaaactcgcagaaacgattatcagcagtccaaatgttgaacttccttatgaagtgcttggatccgagaagcatatactcggaagttgagttgataataaaagaaatggagaggtgtcaatctgaccaaatggcttatgttagaggagctgcttatgaagcaatgatgacttcaaaaagaatagcggcagagctcgagtcgaagatggagaaaggttgtcgttctgttactggttcgaatttcagtcgaagaaactgttcgtccattgttcctgattactccttatcacctgaatcacagactctaggctcttttagcgggtatgattctccggttgagtcctcgcctatttctcatacttcttgtaactctgaatttgatcggaggagtgtgaaccgcaaactttggagacgtgatgagaatggaggagtggttgatatctctttaaaggatggtcttttctcccgtgtaactaaaggaagcaccactgtctctgattcacctcttgtaccgtatgatacttgtgaaaatggagatgaatttgaagggtttctaatggaaagtttgagaaacaccactcctagtcctcaggtgaacatcaatccatctttgttgtatgtttgttagtttcatttatgttaaacatttctgacttttctgatacacagagacagcgttcacgtcgcatcaatgctgaagatttcaacatcttcagcactccacggaagctaatcagctctcttcaatatcctgatgatgttgatttagatcattcagacatccaaagtccaatactgagaggcgagagagagaaaaccataggatctcgcaagaatcctaaactcagaaagcaatttccaaccatggtggaaacaatgtcatcaactatcacagttagtgaagacacagctcaaacacagatgataaccggtaagaagaagaagaacacgatgagctatgccaaactcgttattgcgatatcttttgttgtggtggctctcttcgcaactgtgatattgatggtgaatcaagatgatgatgttggttactacactgtccctacatgattcacctcttattggtgttaagtttaatcgtagtgtagcagagagagtagtttagctatttaattacgtgttagttgtttgtaatgaacttgatacaagatgtagtagaatcttcttctacttgttgttctcattttgtcccctatcccaatgttaagaatataaacgatgttaaaacaaaaggcttcaaaagagaatggtgtgtggaatta

SEQ ID NO: 70927 - DNA, 565 bp, Arabidopsis thaliana landsberg
  unsure (1)..(565): unsure at all n locations
agtgagcactctctctagccatacttgtcagaatctgagtgtaaatttcgattgatgggaaaaagtctggaagtagaactgtttcagagtccctcataactgtagtatccaactgttcaaaatcaatcatgtgcgccacaggtttccggctgaaacaaaagccaaaacgaaaaaagagaacaaatcgtaagtatgaagaaagctatggtctttcataataatacacccaagttgagaaactcttacctctttttgacctctgagagttttgaatcactactggatgatacagagatacccttgagcttaaggatagccattatttttttgaaactttcctccttctgaacaatgtatattaacttcgacgaagatgaatccagatgctttgcgaactgcatcaggtaacagttcttaagtagatcgcaatagaagagtccaacacttttcatatgtaagccatctattagngaatgctacttccattaactgattgttttgaatgtgcaaaacggcaaaactttaccaatggtggtttttataaaatcttacattaagaaacttt

SEQ ID NO: 70928 - DNA, 538 bp, Arabidopsis thaliana landsberg
acagagtaatcagaagctgcttcttattttttggtcacgaccagtcttaatcaaagtagttcgtctcctacttgttattaaaagtgtatatttctgttgggagtttctgttctcctaccacctcattgacctttaatgatggactcatagtttggtgccaagtgacccaaaaaaaaaaaaaaaaaaagtcgatcttgaagatttcatactttttctggcaattctgtttggtttcagaggaaggagtcaaaacaatggggatcgtttcagaagaagccattgatgaattccaagagctgatggatcaaggtctgaccttttcctcttaccttttcctctgtttctactttgagatttctaattagttaattactgaatctggtaaatttgtgctagttgaggagccactgaagaaaacttatgaggtatgtttgtgtttttatgttagagctgttcttggaaatgggtcaaaacccattcaacttagcagatcacataaagttctcatttttaagtttaggttgtgaagagaatcttt

SEQ ID NO: 70929 - DNA, 440 bp, Arabidopsis thaliana landsberg
tatgccaatgtacagggcatacccatgtatgaagtggtggagagggccgctgtgtttggcttcagtgtctgcacactggaaacgctgcataattgtgtgaccatgatccgttttttccagagcctgctcgcagaaaacaatgcgtatgatgtatcgatgcaggtaggcaaacacaccagcctagtaaaagaactcttcagcgacaagaccaccgtaggactggcacgttatgagaatatacaggaactgctgaactccatcaaggagtggacagaaagcccgttcaacgaatatggagaagtaggtgataaggacctgggaagttacctgcaacagatgacgctgcttacagatgcggatgaagacaaagagaacagcgatgcctggaaactcatgaccatacatggcgtcgaaggactcgagtatgattgcgtgtttgt

SEQ ID NO: 70930 - DNA, 482 bp, Arabidopsis thaliana landsberg
aaatggtatcttatcagatgagccccgagttcatagattaaagttttttcaaacagcactggcgggatcagggcgcaccgtattaaaaacaataatcagctttgccctgtacataggcgtatattattatttttttcaggataatttacgatggcttataatactcacctgcgtcattcttttgcatgaagccggccattttattgccatgaaaagttttggttacaaagatgtgcggcttttttttatcccttttttgggcgcctttgtttcgggcgagccaaaggtcgtttcgcgacaacagcgcattatcaccctttttgcagggccatttccgggaatactggcggggttgctggttttcatattgttcctgcaaaaccaacagcctgtttattatcaattggcgtttgcactggttatgctcaacgcattcaaccttttaccgggtacgcctttggatggagggcagttgctggaaa

SEQ ID NO: 70931 - DNA, 571 bp, Arabidopsis thaliana landsberg
  unsure (1)..(571): unsure at all n locations
agtctatcatgggccattaacacgccgccatcgcagccgccatttgcttggtgcctagatttttaggaatattcggaagctgatgccatcactccttgacagaaacaacgcctcgcatcccagaacattcacatcgtcaaccgacaataccaacctatacccgnnnnnnnnnnnnnnnnnnncatccttgagcccgagagccgagtttcttttatggcgtttcctttctgcgacctgctacgatagcgatggcactnnnnnnnnnnnnnnnnnnnnnnnnnnnnnnnnnnnnnnnnnnnnnnnacagagcccgccatgtcgggatatttacgcacatatgtgcccacacgcaacgggattctttctattgatggtctaccaatcctctgatagagccaaccatgcccattagcgacaggatatgcgagaccttgtcacaatggccatctcggaatcatcctcgaaatggtcgtctcagtcatctcctcaatgctttcaggagcaagcttgatgctgaaagctcttcagtttcgagatggcctagactgaaatgtaccacttccatccctag

SEQ ID NO: 70932 - DNA, 261 bp, Arabidopsis thaliana landsberg
aatttgattagttgttggtgcgtcacctagacaaagacgacgcggaagaccatggggaggaggagggtggtttctctctaagacggtaaatccgaggtatggtttcttgtgcttgttagggttagaggcggcgttggagaaaagagagtataagaaagtagctagtctgccgcccggagagataggttgtttgacttttctcaagtaggagtagatctttaacacttttgattgcggtctcaagaagccaccgagttcttt

SEQ ID NO: 70933 - DNA, 577 bp, Arabidopsis thaliana landsberg
gtttgcgcattgtcctaatctgattatgattctattcttcgtttggtatacacgagcttcattgtttatttgcttgttctatctggtccaggccaatcgaaggagctaagctgaaggagtgttgttgatttggacacctacataaactcatatcaaccatgttacatctaaaaaagacacaagtatgttgtaagacgtgataacttcaaatttgtggtaataataatacattcactgtcaatggttttaaacccttccaaattgtcagattgatttctggttatctctaagtttgtagtatattagtctttttggttgtattgatgtgctctttctccaaatgttacccatcttccaaataccactagtgcttattgcttactgcttaccactgattagacaccaaacttgtaggcctttaagcagtgcaatatgaatgcaagaacagattttctagcttaagacgctctagaaatcagtttcttgtttaagaattaagatactctcactagtaatcaggttatatttcatggaatcacaatcttttttgccgtcagctttacatacaccaaatttg

SEQ ID NO: 70934 - DNA, 387 bp, Arabidopsis thaliana landsberg
  unsure (1)..(387): unsure at all n locations
atgatgattaacccctatctgtttattatctatgatacgcccaatgttctattgtttcaagtcaagtaatatcaacaacttcggttcttatgattctggaccccgagagttattcttcccaatctctattctnnnnnnnnnnnnnnnnnnnnnnggattattcctgactatgcgctttcattatctagtgacatggtcgaatacactttatctaatgatgctttatggatagctcccaggaaaaacaaaagcgattattaggaattgtgatcagacatctttggtctcacgtttgtgagaaccttaggaatcattgcactacttgattcaacaaggaaattaatgattaactacggagactaaatgagatatctgcacttatatgaa

SEQ ID NO: 70935 - DNA, 589 bp, Arabidopsis thaliana landsberg
gggcggcgccgtcagcccccgcccggccaaccgcctcgataccgcgcgtcaccgcgagcagcatcccggctgtgcgcctttggatccgcgtccgcggccaggtcgccgtgccgccgggccgccgtcagcccggtcgccagtgccgcctcgatgcgctgcagcgcctgcctgccccgctcggccacggccgggtcatgctcggagcattcggcggtgcccttggccagcaggcagccgcggttgacggtgtcggcggccgtgccctcggcgacggcccggacgtaggcggcgacccggtccagcgcgcccgcgtcgggcccggccagcgcctgctccgctccctgcgagacgtcggcgcagtacgagtcgaagaccttcataaacaaaggacttttaccgccgaacgccccgtacagactccccttgccaagaccggtcgccgccgagatggcatccatgctcgtgcccgcgtagccgttctaccagaacgtatcgcgcgccgtccgcagcacctgccgctcatcgaacttccgtggcctggccatgccctcaggatacctgttctggacggcccgtaaaaaactctgat

SEQ ID NO: 70936 - DNA, 577 bp, Arabidopsis thaliana landsberg
ttctcaaatcaaaggcattttatgtaatattttataataataaaggtttatttttcaaatgctcttcaaaaatacttatattgatggctttgtcaagattattctagaaccaagaaaacaaaagcgtcaaaccgagtcagattcctcttctagtcgaaaattataagaaagttttaaagaatgaaacattatgttcctataatacctttttgtttaacattataagttttttaatcattaagatcactcataatgatcttggtttcttttcttatgattttttcataactttgtaagacatgtttaagaaatttataagaatttttagtaaaaaagatttatttttaaaactactgttgaattcaaaagaatataaattatttagaaatatttaaattttatattatttcaatactactatgtttattataaaaaaaatctcttattttttcttaaaatgttaccttttattcaatatttacttcatacaatatagcctatatatatataaacacattactatgttattttatgtgtataaaatacagaaaattgtgtttgttatatggattataca

SEQ ID NO: 70937 - DNA, 276 bp, Arabidopsis thaliana landsberg
gaaatttcaaagcgtacaacatctcaacgagaaatcacataactaacatggactaaagagctctgatttccaatcactcgagcaaatttttacaaagaaaatcacaaataaggaattcacacaaattttgtcatggttcgtattaactataaatggtttgtattgaagaatcttagataaatcattttcactttaagcgagaacccagatgatcaaagtcaaacaatcgacaatttttatcttttcaaaattttcaagtgggaatttaaaaacaca

SEQ ID NO: 70938 - DNA, 256 bp, Arabidopsis thaliana landsberg
tttgttgttgttatacttttcctgtacagaccgcgtatttattttttcgtctaaaattagtattgattgtttcttataatcatattatgcagtaaaatatttcaggtacaacatttatgtttgtaaccattcttaatatgttcttactatcaatttgtttcgcatcattcattatattttttttacctgtctatttcaacatatattatatactgtattatcctttaattcatattttctgtataatattcataat

SEQ ID NO: 70939 - DNA, 266 bp, Arabidopsis thaliana landsberg
ccaatcccaccccttccgtcaccgcgcgactttctgagacttcaggaaagttcttgcgacaaaaacatcaaataaatctgtggtgattgctcgcgcgagggcttccaaggtcgcgcggggtccgccaatgtctcgtgagtacgctcgtgggtttggaggacaaaatggcggaagcgcggaagtggacgcaagctgatgtcaccgcgaaggcgaagcccggtatgtaccgtgtgtagcccggcctgtatctgcaggtgaagggcgcc

SEQ ID NO: 70940 - DNA, 503 bp, Arabidopsis thaliana landsberg
tcatcatctccaccactctcatactactcaaaaaccctctgatatataattatcacattttcttctataaattccgatttctgatctttgccctcttttcataagatagttagggttttagtcttttgtgtaataattcattgatcatgaacaagggagaagaaggaggagaagacaaggaagtggtttctcttcaaactctgagtaagaaaatggatgattttgcaaaagctagagattgggagaagtatcacagtccaaggaatctccttcttgctatggtatctcgcattaacaatctcttatgtcttctgaaaaaattgaaatgggtcttggttctttagtttgatggtgtcttataaacaaaaaaagttggcttctttcactatcaaatctgtttttggttttcaatctcatcgatcttcgatttgggtttgatcttgtctttttcaaatttgatgtttgtttccatgaaaaatttcatctttttgtaacttgctctg

SEQ ID NO: 70941 - DNA, 1716 bp, Arabidopsis thaliana landsberg
caacgacaaaaacatgtgattgttcattttcttgagtaaagtgttaaactttgatttggccacatgtgctatgccctacaatctagtcaaaatagtcagaattaaaggtcaaaactttatgttgcttttgtgtttttgttacatttgaaatgatttaaggagtatggaaaatgctgcaggtgggtgaagtgggagagctatcagagatattccaatggaaaggagaagtagcaagaggatgtccagattggaaagaagaagagaaagtccatcttggagaagagttatcagatgttttgttgtatttggtgaggctttcggatgcgtgtggtgtcgatttaggcaaagccgctctgcgcaagatcgagcttaatgctattaagtatccagttcccaaaaagactgatgatcattgtgttggtgatggtgaagattcaagcagcaagattaagttgaatgaagaaaactaatctctcttattagtggttttgtgagtaagtttattgtgggtattttcttgttatgaagtaggagcatgatcaagaacatataatcttcgaaggcctctaattatatttcagatgaatctacttagtaccacttttgcaagtttttcataggttcagcatttgctttcactgaatttcgcagtaagagttcagagagaggcaacaaaagataaccttttataccatgaattagcagactacatacaagatgattgatgaataccattttgtctacactacctataccatcccctctaaaccttatctttacttcccaaatgctgtttgtacatcaaattaaaaaccggaaagtacttgtgcaatcaatgtcccaaggtgtggttcccttgctttacaggtttgttgctgctgaattcttgctcatgattcagcggtgtagccagtgctttgcggtgttgatagcgatagaacgtccctgattcgaaacccattgccccagaacgaggcaaggcatagacccattatggccattacaactacagagcaagctgctggcacggcttggctgctaccaaggaactggcttgcaagaagcccggctaatgtggagctttgcattcccgtgcaaagggagatagtccggcttacttcttcctcttgtctggttaaatgatccaacaacataacccaataaattttcgaagttctatggattaagaaaaatgttgaagagatacaaaaagaacatggatgttggagttaccgtaagcctgggatcttagagaaccaatatcctaaggcaaatgctacggcatggaatgtaacaattggaacaatcaatccaagaccttcagctgacagaatctgactgcgattaatcgaaagtgggcttccaatgcacaacgaagtgcataccatagcaacaaacggcatcacaggttgaagaagagtgaccacaggcttcgcataagtatttaacacaaggccaagagtgattggaacaagtaccacctacagatagtaaatcattggacgtcaagaacgatgaatcaacaggaactaccgatcctatgctaaatcttgttacctgaagtatagacttcgacatggcaactgcatcaacaggaactactgatccaattagaagaccactaagcaaaggtgtaaagattacagaagcaatagttgtagaactagtgagaagaatgctcatggccacatcagctttactcagagaactcgcgta

SEQ ID NO: 70942 - DNA, 268 bp, Arabidopsis thaliana landsberg
aactttgaagctatcatgtcaaaccttgaaggaataagattgaaattgaaacacattatagaacttctcacaagactttttattgcaatatgttaactcattcatgcctgcacatgcagtactgttatttttctctcttgacttactcttctccatcaaagttttgccccacatagaaaatctttcacaacatattcggtcctagtagtatataaatgtgtattgattcacctaagtgataaccaccaacaactttttcacttacaca

SEQ ID NO: 70943 - DNA, 266 bp, Arabidopsis thaliana landsberg
accgaggaagaatgggattagaattggatgcggcgattctcgaggtattgatagaaagcggagaagacgaagcaagcttttaaagtgaggatgtaactaagccatgagtcagttttccagaaatcgaagagaattgtggctttgattccccagtagaaggtcatgtgcatcatctttgcgagcttgatttgagctgctttgattggaagataaaacgatgaagctgttgggattgggaagaggtttggtttgttgaattattgatt

SEQ ID NO: 70944 - DNA, 483 bp, Arabidopsis thaliana landsberg
  unsure (1)..(483): unsure at all n locations
acctaaaatcacaatcactggcaaaaacaacttagatgcttctgtgcaacaaagactcttgttctgtttttcttcaggttttttgctcatttcagctcaaacgaaatcttaattccccaaatgcagaaccaaaaggtttagttcttgatcttcttttgtgtaactttttgcaggattttcaacttggtgaaacggtgagaagcttgccnnnnnnnnnnnnnnnnnnnnnnnnnnnnnnnnnnnnnnnnnnnnnnnnnnnnnncggatcttgtccaatgtgtagacgcgatctgtaatctcttttcttaccatttgcacagcctcttccctctctctccttcttcttgtatggtcgtaaattcgtaatcatgtggttagagtctctatatatgtccaagaaaatgaaaaaaaaaaggttttgaaataagtggatcttaaccaaacccattaaattcaagactttagattgtgtgttggtctcac

SEQ ID NO: 70945 - DNA, 319 bp, Arabidopsis thaliana landsberg
gctattggctcattcattaacatacactaggcatggtgtatttcatacacactggtggcaagggcttcggggcgtattggccaccctatccgactctggggcattacgatccgtgtcagtcgccaatggctataataagagattgctaacacttgatacggtctccgcggttgaaaactcgtacttgtccaaagccagtaaaccgatggaaagataggggtactcctgtgagtcattacctttgtgcagacttcttacagtcgaacaacaacatatagtatgctgccaagatgatactcgctagctaagaggccacctg

SEQ ID NO: 70946 - DNA, 249 bp, Arabidopsis thaliana landsberg
aagataagagagcacctgccacgtgtaacggagtcgagtggccatggttacgacgtgtggctttttctatcgactggattaaaaccgtcgctgcttccggcgtcagcgtttgctgtatagaaatcaaatctgctctcatctcaaaaaaacttttctcaacaagaagtttttttttttggttgaggttccttcaccttttgtttatctcataaagaagaaacctttgcataaagaacttttatgaccggc

SEQ ID NO: 70947 - DNA, 140 bp, Arabidopsis thaliana landsberg
ccgatctggacctggaaggcagaatcctgctcaggggttagacgaggaccacatgcgtcataagatactagacctaatcggcgacctctccagtgtctcacggggcggacatggaggactccctgtggccgacatacact

SEQ ID NO: 70948 - DNA, 540 bp, Arabidopsis thaliana landsberg
aaaggttgatcctttttcctatctgttcaggccacttattttctatatacttgtgaaatggacaaaccagattgacacttacttttattttgcaagtcacttttctggaggaccgtgctgatcatgtacatgtgaaaaggaaccctcctgtcaatactgaaaccactacaagaggtcagataccgatactcaaaacaagagcatttggggagttatatgcttcaggttcatcagtgaatgctaagccttctaaaaagagaaagcttatactcaacacgccagaaacagatgattcagatgatcaaggccctcaatcaggagagaagaaattaattaaaaatcctcctcttgtagaaaaggctccaagtcagaacatcgtacgtaccatctctatccttcttctttcggtggattagctgagagaaatgtaaagatttacagcacaaaagtagtgtattatttctttgcttgagcatagcaaaaagattattcacactgttgattagatagtattaacttatgacatttccaaattatttt

SEQ ID NO: 70949 - DNA, 305 bp, Arabidopsis thaliana landsberg
gttccaccaaggacgggatagcggtgggagcaactgtgacctgcttcaggtagccaacggccccgacatctaaaccgggacgcgcatgacgggagcagcgggaatccgaccgtgcctgggttctacacaacgaagccacaagcctagggacgggcttggcgaacacagcagggaaagatgaccctggggaacccgaccctagcgcgaccatgaaaaaagactggaaaggggtaggatgagtgggagctaccgagcaggataaggaccgctccttagaccgttattctacttaccacatagaaccg

SEQ ID NO: 70950 - DNA, 268 bp, Arabidopsis thaliana landsberg
ggtcgtgtgtgagttaaacacccattgtgacggaaaagaataaaatgctaaccactctttttaattgcttaatttaaattgtcaatttagcatctatctagcttatacaacgccaaaattagctcaatactttggttttatttttaaaaatattatgtagactttcatttatgttaaaagttattattcataaaaggacttatgtgattggggaatgtgggtgaaaagaaaaagaaaagtaaaaagaatgaaaatgaaaatggagaaa

SEQ ID NO: 70951 - DNA, 480 bp, Arabidopsis thaliana landsberg
ttcggcgctgaacaaaccgcggacttgctcatagtttgacaactttactggtgcgacattcaaaatatacaaagtgaggttgtaaaatctaccatactacgcaataatgggcattactacagttttacatatttgatatgcgtttcatgatcacggacgtttgccttcggagggtataaaaataaagctggactcctaatgcgcggggacttatatgtgatatattgactatggcaatttgagaccttgacattattgccggaggatatattgtgtgtcatgtgcgatttcaaatgataattacgtattttcgggacatgaaaggtcaggttgcaaagataaacgacctttaagatggtcgagccataaccgagatctatctatatatctatatatatatacacatatatatctatgtgaagacatgaaagattagttctacttaaggttgttctgaggcggacataatctactaccgca

SEQ ID NO: 70952 - DNA, 645 bp, Arabidopsis thaliana landsberg
tactaaaaaggaacgatttcataattgtaaggaaagtagtatactctgatagttattaaaaataaaaataaaatgttcaaaagatttggctatagtggttgctttggtgaactccactccaacggtggtttgcaccatctccattcccatcactaccaaaaacccacacttcttttttttttctttctttgcgtaatgtgggttaaaaggaactttatttatgctcttgtttttgggtgtttgaatcgaatttgaattcaacatttgtttttattttattttatttataagaaaaattgtgtgtttggaaagttgtaaaaggttcaaggggtttcggtagagattatcttaatttgttttttaacacatcgacttaatccaaattgacatctctaataggattcagatattattatatctatcctgtaattttccataaaatataatcaatatgagatttggtattagggtatgaacttaatgtatcatatcggaaaaatgttttctcctttgggttacctaatctcatatctaatgccaaaaatagcataacatagaagattggctggatcatatgtggacatcaccgactgcatggcaatgtttgttttataatcgtgtaatacttgtttgtcatttgccagt

SEQ ID NO: 70953 - DNA, 451 bp, Arabidopsis thaliana landsberg
caaaagcctgaatgatcggattttggttttgtcacgacaagaaagaataacattatgacagttatgtttttaatataatacaatagggaccatgttactaaattttattgttctctatttatatatgaggcaagtataacgagcacatcttagttggcagatcgatttgttcatatgacagcttaattggtgtgaaagtattgatctttattgaactgttaaaaattatgatcgatatcttaagttgttaactctcatgtgtcaggttataggataatttatgctgaccaaaatatctttatcaaagtaataaaaaaggaactatatttctataaacaaaaaaaaatagtttgcaacaactggaacatatcaatgtgccatcaaacatattttttgaacatgagtgggggtgttcttatcaaccagaacatatgatctcatgatccaatta

SEQ ID NO: 70954 - DNA, 535 bp, Arabidopsis thaliana landsberg
tgcaatgtttcaagacaacatcgttgtagtccgttaccatgtgattgatatattttctttcgggagactctcgtgttacgttcaattgaagtagacacatttttttgtatgggcatatttaatgcaatgattggctaatgtatcttagatgaaaattggtcaatgttactattcctttatgtctttttcattgtattgtcacaaatggattcattcaattcgacgataattaagaaaaaaggatttaaatgctattatttacgttccatggcttaaaataattcaagaactttaatatgatgaatatcatgtaccatgattgaaaataatacgaggtagagaagttaataaatggatccataaatacatcaaaagctcttttttttttttgtcaaacaatactttccattcacttaaactcttaaaatgaaaattttgttaaggaaatgaaggaaaagtgtcagagaggctctaaaagctaacccgagtacatgacaaccaccttctaagacagagagatcaatcccattaaacc

SEQ ID NO: 70955 - DNA, 598 bp, Arabidopsis thaliana landsberg
cagagtattggttcttgtctacggatcttgaaccattctcagtgtcaatagcttcatttgactccgatcctatgggtcaaaatttggattttgaaaaagatgggaacagtagtaatacttcatatactttctaatcatatatcaatgcactataagtgtgtataactaactaatcagatgtacatataattctcagaccttgctcctggctgaagtcaacgctatcatccttctcgctgccgagtggcgagttctccgggggaaggttagtcaattcatctgtgcagacactgttgccggcggagcttggagttggagttggattcatggtgggatccatcggagacaagcaaagttgagatgcagaaccatgctatcacaatttatggttactctcttgatctgaatattttaatttcacgagttccacgttctttaatataatcccaactaacttgactttttatttatttatttaaatgaagtaagttaagatcaaactgataaatcttgattaaaaatcgaacctttttgcttacatagaggaaacccaaatctttttgcttacattgggaacagaaggacctaaactaaatta

SEQ ID NO: 70956 - DNA, 473 bp, Arabidopsis thaliana landsberg
attgcaattggtacaagatcaaaacttctacaacaaaacactcttatcagtttatgataacagagctaacatctcacatagaataccgattatgtatgatatctaacgaatgaaatgaactattatgagactattaacaaagtagtcgttgatggactatctatctatatataatttaaacaggttatttggatagacccgtaaataaagcggtcaaacttagtaaggtcaaattcttaattttatatgatttactcggaccaaacataaaagaaaacaaaaactaagtgctctaaaaagagaacaagtgggtcggctcctgtctagtcgaaatccctaggggccatggagaatgaggaccatttgaattgcatgagtggtgggtgacattagctttatcctagtcggcaacttacactcgattcacgtgttacttatgttaaaatcaatccttagattcctctctttttcaa

SEQ ID NO: 70957 - DNA, 411 bp, Arabidopsis thaliana landsberg
ccgattacggcgactggaccatcaatgtcttggttaagaatctggcgaactttcatggtatcagttcgatcagtactgagaccataaagccgataagcagccctttagaggcctcgtaccacacaccacccacgtgaggtgtgtatgccagcgattttttatgacagctgaccaaaatatagttgccaggcacagaattttccttcggaaagagcagcgttgctccaaaagaaatccacattacagtgtctgcacttcatgcctcgtgtctgacgatgagcctgacatgggacttgatcttcttatggacatagtaaaatttcaagcactctggatacacttatgcacgaaatctttcggacgcagtggccacgcttcatagccggacataggactcccaagcccgaacgc

SEQ ID NO: 70958 - DNA, 767 bp, Arabidopsis thaliana landsberg
ccctttttacttaatgtgaataaaattgagatttaagggttgcgtaacttttaccatcgatttatgacattcccaatcgacaaccaaaggcaaaccgggttctctaaccaagttaagaacattcatcgtcggaccaaacaaaattgtggctatcaattcaacgcttgcatctaaatgtttcctatgccttgctgtctcagttaattccttcaatgtgtcatccttcttccttgacccatcttcctatgtccgatactgtaaaaccaaagccaatattgtttttaagtaaactaaaaccttctagtcaatttagataaccaaaaacataactcaataaacaaaacagtatagttacactaccatatgccaaaggaagataaggtccgcgtcgcgttggttaacgactcctatttttgacttgaccggtaattcgtttagtgggagattaacggtggctggatcaaacccttggtaaagataaagcttctccgacttaatactattgttaccgtattccatcacatgagagccacctgagtaggtattgtagtttgatgtcctcatcttcacctactcaccggaataaaagatccgatttatattccacattctcaaaccaacaatctagtaaacacttaaaataaaatttcacagtaccgagaggtattcgtgctttatggtctctttctttagattgtgagtctcactgcaaattgagcgattcacacaagaataaaccaattgctttaatcacaaaagaaaaaact

SEQ ID NO: 70959 - DNA, 474 bp, Arabidopsis thaliana landsberg
tcccaggttatctcaccatattgcgatgaaattttaaatcttactttataatatagcaacatatgtaccccggttttaccgacaatgaggtggaagactctgttgatagaaccttgggaagatcaatagggtgagtgtgcaccgacttatccatagaaactgaatcttagctccttactggacaccatggatcagcgtgacatcttgtctttgtttcacacatcgagagtggagatgagtactcacatgactaatatgccttgtggaaagtataagagatcaacggccaaatgcctagcaggatgaatcgatatatcattatcagatgctcactaaagaatatgaagacggatattttttttaaatgatcaagcgtattgtcattcatgacgggagtgaacaagatttcttgacacaagagttactccttgtttgacaggtgttcgattacatatgaaacaagaatctaccata

SEQ ID NO: 70960 - DNA, 185 bp, Arabidopsis thaliana landsberg
cttactaacttgatttctatcatagacataatacttgttattcctagatattctaaatgtgtcaatttctcaaaacattgtaattctcaaatttaaatatgaaaatttttagttatttttcttttttgaaaaaaaactcttacggtgatcatcgacaattttgttacgatgatcgtaaaacaata

SEQ ID NO: 70961 - DNA, 582 bp, Arabidopsis thaliana landsberg
  unsure (1)..(582): unsure at all n locations
gtcgccggnccaaagctgccgagagcgcctgcggcaccggccaatccgtttccaccattgccgccgataccgggcgtgcggaacagggcccactgagaggcgtcaccaccagcgccgccagcaccaccatcgccacccgcggtgaccgcggtaccgccagcgccgccagcaccaccgtgactgaaccaggcgaaggggccggcggcaccaccggcgccaccggcaccaccgtcatagccggagccaccatccccgccgtcaccaccgaacaggccgccctgcccgcccgagccgccgtcgtcaatgccgcccgtaccgtccgagtcccagcccgcgccgccgctgccgtagatccacccaccggcgccaccgtcggggtgggcggccgtgccgtcagttccgtcaccgaacggcatcagccaattgacgtcaccccagttgaaggaaccgtccgcctcgcccggcagatcgagcgaggccgcgccgatgccgcttagctgcagatcagccaggatcgcatcccaggcgctcggctcaccgagaccgtcgaagagggcgttcaactacttgggtcgaaaacca

SEQ ID NO: 70962 - DNA, 382 bp, Arabidopsis thaliana landsberg
acttctcgggggcgcgctttctcactgagttgggaccaggaaccggggtgctaatggtgggggcccgatatgccaagcgaagagcatgagaaactctgtttatatttctggtttgaacacttccctgacgtcacactagagggacaggggggcgtggagagggattctaggagcttgtttcgatctaagacggtctttttatgggactggggaaacgtaactgtctataaactgaagaaggctatgacttatgagataaccataggcgtggacacctaatcttggggtgtgaatctgtgtcatacctatgtacacatgaagcattatctatggctgataaggaggtgatactgtcgtactttacagaccaggtaccttggta

SEQ ID NO: 70963 - DNA, 159 bp, Arabidopsis thaliana landsberg
cgacgacacagttgttgctgaccggtgcgctgtacagcaccacggtcaccaaccttgtcgcgcaggatccgatcaccctgctgtattaccagattggcagggagcgcgtgcaaggtatcgagctgaccgccgtcggcaagctcagcgaaaactgggccg

SEQ ID NO: 70964 - DNA, 188 bp, Arabidopsis thaliana landsberg
ctttttttgctccaatcttccgtctctcgtgcccaattgaaattttttaacttcttccgtgatggttctacgattacagttttcttctcagattcctgcaaaagcatttatatacgaatttaaatataatcccaaaatctcattcagctatcaaactaaacgaaatttgttggagattattcaaaatc

SEQ ID NO: 70965 - DNA, 514 bp, Arabidopsis thaliana landsberg
  unsure (1)..(514): unsure at all n locations
taaagcccanttgnatatagtgaaaaccacaaacaaaagaaaaatgtatgtgttttgtatgtttcttctcgaaagtaacaatagagaatggaagaggagatctctacatatttgttttggtgcttatgaatactagaggacttacccgctctgggtttatatagaagatgggtcagagataagagaaataagagggaataaaataattgaattgaaaagagagaaagatttgagattttatgcccccaagaaggtagataagcaaaaaaatataataaaaaaagataaggaaagaaaaacctaaattaatttgaaagaaatataaaacagttgtcatatattaaagaattatatatattcgaaaaataaaaagaattaatgaaagagataaggttcctccatgcttctccatcctcataatattagttntcttaagctgcaaaaacctttacagctttaacagatgccattaagagatatggggccatatacatatctactcattcatatacat

SEQ ID NO: 70966 - DNA, 548 bp, Arabidopsis thaliana landsberg
  unsure (1)..(548): unsure at all n locations
agcagagactaagtccttannnnnnnaatacccagtgatcatctaagtccaagtaactacatttttgtcaaccagtgcacataacaccttattcgccgatgccatcacttctgcacatgagtacatctcaatcaacttagttcctaaataagcatttgacctaaaccctgttttaatcgaaaagcactgtaactcctgtccctgtctaagatccttnnnnnnnnnnnnnnnnnnnnnnnnnnnnnnnnnnnnnnnnnnnnnnnnnnncacatcaaagcttctcattctcttgaacaacaacaaaacttcaaaagacaaatctttttgcgcatacccatntaaacatagcgttccaaacagaaacatttggttgagagattctgtcgncacttggcgtgcgtaatcaattctcgtgattcgacaacaagcagcgacgagtctcggagcgacgtaatcattctgtagtaactcgtgacttacggtttgagattgaatntgaagaagctgtttctgggttttacatgattccaggaaagagatgaactttt

SEQ ID NO: 70967 - DNA, 509 bp, Arabidopsis thaliana landsberg
  unsure (1)..(509): unsure at all n locations
tttttnattggcttaaccatcaaagttactcagaagcacaccacaggtaagattatatactatctattgttgaatattttatatagagttatcagttttgtagtcaaagtgtcaaacacatagattaatacaagtatctatcacatgaacatgaactacctgagatggtgttttagaaatccacaaattttagatttacaaactgcaattagtgttcgagatttgaatcttggatctgatgtaacaaaattaaagttttggtcaaccatatttaaaactaaattttaataaatcagccgttcgttagatttaataaattccaattaaaaatgtttttgttacatgtttattacaatcgggtaggtaaaattcaactgcttagtgtatctgtatatcaatacattaatatggaaatgagatcttgtactttaatcttttgccattttcgtatgatttttgtctgttttctatttagcttgaaaagttaaatacacaccctactattccta

SEQ ID NO: 70968 - DNA, 530 bp, Arabidopsis thaliana landsberg
tcttctaacttctaagtaatactttcttcttaacaactaactagctcaacatcttcttttcccttctctttgtaagtttggagaactcaaacaaccaacaatatccactagaactcttttgacaatcttaacgatgattacacttaattgatacacaattctaaataatttccactctagtgatctcatccaaccgtgaaattaatggaacgaacattcacgtttcagttttatatgaaaagcttcaaggtatatacaatctctcaaacaatggttctaagtgttagcggctaaacctatgatactaatctgctaaaactataaccaagattcttcgagtgatcactgatctaaggcatatatttccaaatttatatgagaaaaacaaaactaaaatttggaacaacgaactccggttttggtaattatgtggtttatagttaaagccgtctcatttcaacttttaattgcttaggtaatcccatggttttcattgatccatttcattagccatcttccgttgataatct

SEQ ID NO: 70969 - DNA, 565 bp, Arabidopsis thaliana landsberg
  unsure (1)..(565): unsure at all n locations
gccattgaaacaggnnnnnnnnnnnnnnnnnnngtatggggaggggcgaaggggtgctaagaacaggaccagttttcctatctcgagatcattgcgagtacaactaaaaatactatttatcgactcataactcttccaacgtcttctattaaaatccaataaggccatgatatcacctcattcttaaccccaccaatcacgtctcaggacggaacacaagatccaccaacaatggtatataagacggcgctagtctctgacaaacaagtcattctttgccaattgcaactctgtatccaaacaaccgcaaccatggcacccgcttctactgcccaaccgcnnnnnnnnnnnnnnnnnnnaaggtccaacctagccatggttcaggctgagggcatccgtgacagtctgcagaagattgcgcccgaccgcacctttgagattgaggctctgaagacgctgggcgacaaggacaagtctacggcgctgtatagttttggggctaagaacttgtggaccactgagttggaggagaaactcacttctggcgaaatcgacgtggttgttc

SEQ ID NO: 70970 - DNA, 409 bp, Arabidopsis thaliana landsberg
taagctatagcataaacaacaagcgaagaaccaatagtctcaacaaccaaaagctttatcatttatcactacaacaaacacatacaccgcaagatgaggaacaagaccaaaacgccgaaccagctaaactcaggatgtcacaggccacgtgaagggccaacatactctggagccacaaagtcccacactacacaaatgagacgaacctatgccaatctcccggcaccacacaacaccgtgaaacaaaacccgaatcgcaatctggttcggagaaaacctatcagcaatcgcacatccgaaaaaccaccacacaagagcaccaatctacgatgacgaagagaaatgaaacaacgcgtccaaagtacacacactaagaggaaaggcgcccacacacaggggctggaacaca

SEQ ID NO: 70971 - DNA, 645 bp, Arabidopsis thaliana landsberg
  unsure (1)..(645): unsure at all n locations
gcataccctaaaattgtccgccattttttggattaagtcacgctacgaagcaagctccctggagccaagacaggagtttcaagccttgaaggcaatagagatatccggaacggattccgtccccgacatcgaattttaagaccgttcttgacaacatgcgcatagaacgttacacaccgccccgtgtgtgggtttaaatttgcggggtgggtatgcattttatttttattcctgtctacattacatcccaacagctgggctttagatgaccttgccccgcccaatgtcaaaacaggacttgggcgtgatcaagcagttctagagccaggacaaagccagtttgttcaaaattttagaaagaaatacttcctaaatagcgatggcagctatagctccgaaaaattaactgaatttcttctccgattagaatcagaacagaagcaactcgttcaagacctggaagaatctcaagctatcgaagactttgaaatgcgcacgcagcgcccagatcgagcgttcgggcaaccgatttcaagaagcgatcagaaaatcgtcaatgtctattcccattatcttattccaattattaaggaacttaccttcaagtangcaccaacacagcccctgagacctggaatgggactc

SEQ ID NO: 70972 - DNA, 519 bp, Arabidopsis thaliana landsberg
aaaagcggaagcatttctaaacaactcaaactgaaagaagataaattcagcctgaattgcagccagtttattgaaaatgtacaggccggtaaagagcctatgagtcgcgacctgatggtggcgctgaataaagcgaggattaacgacctgttattgttcattcccgcagatagtattaacgaaaaaaggatggaaggcgattacctgcttgtgtatgctgtcaaaaaacaattgccctcatccgttgtacaatacctggttgataaaggtagtgatgtgaattttttcgggaagcgttttgccgataatacagagatataccagacacccctggccacggcttgtattaacggtgacgacaaaacagtgaaggtactggcaggtgccaaagccggttttgttccgcctgcggcttctgcaaaagagaagcggcataacctcaatatattttgtccaaaacaacccatccgaaagtgatcacagtgttgaaggaggcagggtatgatctgaatgatggca

SEQ ID NO: 70973 - DNA, 628 bp, Arabidopsis thaliana landsberg
  unsure (1)..(628): unsure at all n locations
tacattctggtcccaattatgctgatgtgtctctggtctgtagggcagatttgtggcctctgtgtggccttgctgcatttccctcagctctcctgcagttggttgatgacccacgtgtcatgtcctcactatcaccataaggcttgcttcacctgggccccgtgtataccataatagacacacacagctgagtgtcaagtgcagagggagtcagcttagcttaattagagcagtgaaaatggactgtttgcttaaagctgtattgtactctttgttatttattatacacctaaacttttagaaggtgaacatttaggaattaagcaataagtaataaaaaaatgaatgaaacgaccttttagaaagggtctcttcactgaacatggagacaccaatataagtagagttaggtgaacagcaagcctgagggatccccctgtttccaactccctaacattaagattgtaatgtggtgaccagctttttatgtgaggatttgtgtgtcctgactcanggtctcatgcttggttgacgaacaatttactgatcagagtatttcttcagcaaccaagaagtattcttaaatggattttgtagtatacggaggcaaatcaattggaaactggct

SEQ ID NO: 70974 - DNA, 553 bp, Arabidopsis thaliana landsberg
  unsure (1)..(553): unsure at all n locations
gatttaggaacgcacngngnaacccttatcaaacttttcactttcttcatcaactcaagcgtgcgtgctacgtttgattgtgccgccctacaatccttctctgtgataggtgaatctaatagaagaagctgatggaattnnnnnnnnnnnnnnnnnnnnnnnnnnngaatagaagcgactttggttttgagatcgatgtaacttaaaagacttagatcgataagacttcattgcattgaaaaatttaacgatgattgtcttatcatccaactctttcacttttttcacgaactcgcaactccgttgaatctcttcttccgaacaatccgacggaatttcataaaaatctctctcttgattcttcatccgatgtctcttgcaactattcatgtttgttcaaatatcttctctaatggagaggcgattctaattgtgattatatatacactatttataatatagggttatggtatatattcgaactcatcctatttgggtttacatatatatcctaacanaaagataaaacangaggactaaatgatagaatcga

SEQ ID NO: 70975 - DNA, 482 bp, Arabidopsis thaliana landsberg
agcttcttacgcgttgaggcggcagcaacacaccctggcaggtccgggacgtaggcgctgtttccattgccaaatttttcaacgataacggtatattgcatcataactttcacgattatattatggcacatcgaccgttcgtatagaacttaacatcgtctccggcacccgcaactgccccgaaatcaaacgcggcaacaacgcatcgcgaatttgcgcgagtgtgcggctttgtacgctgttgctggcgatcttattaacgagcggctggacaaactttgcgaatcgctcgcagatttctttgtttggcaccgcgagtagatactgactgagtgagctggtttgcacacgctggcgaccactcgtgccagtcatgctctgaatcgcatagctgcgaaagccctcgtgccgacaaagcaaatatgcaaagtaggccggcagcggccccgagggtgtagaacatgacttcagtagaaccccac

SEQ ID NO: 70976 - DNA, 474 bp, Arabidopsis thaliana landsberg
  unsure (1)..(474): unsure at all n locations
ttacttgcttcctcanaagtcactgatttgtttgttatatcaaatataactcaaaatgtaactagctacctgtgttggtaagtctcagtgtcttaccatgctcacaggatgggagcttctttggccactgctgtcagcttcctcttaattcctactcaactctagcatcaggcagagaaaagttattgtaagttttgttttggacatccagacttttttttctttttactattttaattaaactctttgtaaaatctattctttctacaaacactattcgtgttcattacttttctcctcactgggacaaaaatacctgacaggagcactttgaggaaggaaaggtttcttttagctcacagtttgagaggacagtctgtctcagtgagggagtcgtggagacaggagcctgagacaggtttatgacattcacagtcagaaattagaagcagaaggaggtcattgttcatcttt

SEQ ID NO: 70977 - DNA, 586 bp, Arabidopsis thaliana landsberg
  unsure (1)..(586): unsure at all n locations
tgctctcagatacgctttaccactgcatgaagaaatctaatctatcataattctttgctaatacagataatcaagacatctttgtgatatcatactcgatcttgtttctaaccttcgaagtcaaaaatgtcgtctagagttgaaattaattcatgccaaaactaatacacatcatgggttgcttttggctaaactatttaattaatttgtagattatataccctcatgattaatagcaaacacagaaaaatgtttaacattaagaaaagaaaaaaggcaaagagaaagctaaagattttggttctacatgatattagctaatgaatattggagcactactttgctcttagtttagtgtaatgatcataacttctaacttttgtgtaatcaaagaagccaagatgggtcttattatggtggagagagtccaaatcattgnggaataatattcccataggacccatgaaatgagagacagaccaaatataaatatatttaattgagactactctatttgcaaggaaagtatatacttttagagaaagattgatgaagaaaaatgcaatgaagttttcttaatactgat

SEQ ID NO: 70978 - DNA, 506 bp, Arabidopsis thaliana landsberg
atttgttgagattgagatataatcgtttttgctctcatttcatcacatactcaactgattttgttgatatgatactacatctagaagattattgggtagttttcggttcacaattgcatgaattcaagagatttaggactgcgtatctggtacaagcttaaatgaacctatttcaagcaatccaaactagtggggctgaaactttgctgggcttaaaaaatcctacatactttatcggctgtagaaatatatcgatgcctaaacactcaacagaccaatatcaataacagacctactatacgactgtgttcatgtttagcggttataaaaaaagtcaacactgttggcaaccacatcattcgatccatatactgttatcaggcgcggacaacacaaaggtcaataacagataaataaatataattggccataagctgtgaatagtgattaaatatgatgtatgctacactcattcgttaataactaactaaaaatatatgttctta

SEQ ID NO: 70979 - DNA, 522 bp, Arabidopsis thaliana landsberg
cagaatataaacgaaaaggacacgactttacacatccagagattgctaggaatgatgaacatagcgatttataatcaatccgacgtaccgaggcaatgaatcgattgcagagacctttcgtcgcaaaattggagacttgtggattaacaagatctaagaatttcgtattaaaagaaacagagatgttaaaaatcgttcctttaagaaacagagagaaaaaagagagaagagagatacctgaggaagaagaactgtaccaaagggctttagctctaagatgaggtttgctttgaagatggcgttttctagcgacttgagtgtcttgaaactctttctcgcaataatcacagtcatatttccccgacggcatctttcggcgatgacgacgacgacgacgactcgtagaatcaaaaagttttggcttttattagttctaggcgcgtgaggatacttgtatttgctacagtgactcttagggtctttgtttgatgacggtgctcagggagaagaagattcataagc

SEQ ID NO: 70980 - DNA, 485 bp, Arabidopsis thaliana landsberg
tacgaattccgcccttacaacgcggcatcatcgacgcttgcggcgcagttcttgcgacgttctcctgtgggcccgtcgaccgacggctaacgacaaccagcgaaatttgttcggctgatcacgacaaatactgaggactacgcgcatgcggcgctgctccggacccgcaggcactctccgaccgggcgctgacccttgaccttggttcggtattctaccgacgccacggagatcacgatctcttgtcggaaacgtacaaaacggcttctagcggccgccactattgacggaatgccgggattggtcacaacctcgtagggatctagctcggaggaaattgatgacaacgccgctcggacgggttcgtggtttaggatcgtcaaaatcgggaacgacagcttatgtgatcaagcaggcgtccggcttggccctcggcatcctcacgccctatgtaatcgggatcggcatctatttgcttggtcgag

SEQ ID NO: 70981 - DNA, 195 bp, Arabidopsis thaliana landsberg
cctcaacgtgcaccatatactcacaagtcggtgacccaacgttagtcacagtcctcttatatctcaccgttttcaaattcgcgccattaacgaggttgaccgcgaacgagggatagttcaaatcaccgggactcaaaacgacggcgttactagcacacgtgtagttagtgccggagaacaagagtattctctcac

SEQ ID NO: 70982 - DNA, 117 bp, Arabidopsis thaliana landsberg
aatgggcccgaacagttttgggctcttgatcatgtctaaaacagacgataaagttaactgcaatttagttggttcaggtgagctaccaaatccaaaaatacgcaagattagggttca

SEQ ID NO: 70983 - DNA, 1343 bp, Arabidopsis thaliana landsberg
agctaatatgctttggctttttctttaggattctctctctctcgtgtcttcaaccacgctattactttcgcatattccaagaaaaacaaccaaaaataaagtgaatttaaatgacggaaatcgatatttctactgtttattcggtgaccaagtttttgtttggatagtggttgctttaaaacatgtagtgtactaaaaatattttgtaatttcttacttcaaaaccgaataaaaaaaaactttgtttactacaacaaggtaaatttaagaagtttggatttttttgcacattgtctattttactaaacaaaaggtttgcttagcaaaaataaaatgaaatgaaatgcttgtcgctaatcataagtcataacatgtgtatgtgtgagacttgcttgatttctttccttagcacactagttaacataattacatcattagacagcaacttcttcccacctttttcatataataggattcgtttatcttgaatattacactctctttttgttgttgttgatagtttggtgacattaattattcttggtttttcatctcttttactttttaagtaatggatactatatatcataatccataagcaatctggttaaagttaacaaaaacacattagtagcgaatccggaaagatgtaaaagaataatttaacagtaaatatattttttattctatctgagaaaaaaatcattaatcatgtagattctaatttcaaatatataataaagcatggaaaataaataaattaattaaaaatttaactaagaagtttcagatttaaacccataatctcttctaaaaaatgaataatacatatcaatttagtttctttttcaccaacggtgaaatcgacattttttttattttttggaacttcggatggtacattgatgaagctaccaaaaccaagtactaaatgtgttacgtattatataactttttaaaataaatacataataaaaattaatattgaaaatgattacacaattatcttacaattaaaaattgttacaccaacccttcgtagaaatattaggtggtaacaaaaataaattaatgattattgagagcttaacttataatgagctcatttgagttgtttgatcctcaagtcccaaccaccaacccataacccattcaacatgtttccagttggtttgcataatgtaaatgaatactacacacacgagacaaccacaacatgcatatatgaataagatatatatgggtgaaattggaaacaaactaaacgttatttttactttttagtttcacacaaaacttttggatatgttttgatcgatagtggaattggggcagcaaaacaa

SEQ ID NO: 70984 - DNA, 692 bp, Arabidopsis thaliana landsberg
ctcggcctggccggcagtctgcggcgcatcgtctacgagcacgacctgacgctgaaggacagcctggtcgaggaactgctcgaccagccggcccaggtcgccctgtggcgcggcgccgacggccgcctgcgcgacttcctggtggtgatgaagcgcggcggcctggccaggctgctggagccgctggcgcacatcgccgccgacgacagccagctgcgcaaggtcggcgagctgaagggcggcgccaatgtctaccgcctgcgctacaacgcccagaagaccctgctgttcgcctccagcggcgactacctggtgctgctgtccaacccgaagatgctgttccccaacgccagtgacgacgaacccggcgaggccgacgcccaggtcagcgccgacctggctgccctgctcggcggtgacgacgccttcccgcgtgccttcggcctgggtccgcgcggcgagctgagccagcgcatcagcctcggcgccggcgccctggccatgggctaccagcgcttcatcccggccttcgccggggtgcgtttcgacaaggatgccaagggctggagcagctacctggcgctgaacgcggtggagcgccagccggacctcgacttcagccccgtgtggcaagccatgcccatgggccgcccgcagcctgcgtggcccctgcccgctgacccccggggcct

SEQ ID NO: 70985 - DNA, 442 bp, Arabidopsis thaliana landsberg
tccggtttaataatctcaatgaaagacccaatcaagaacatttaagacctaaatctcaaatacccagaagatggcgaaaacccacgaattggtttttcaaaaaaatcaccttttcacagtcaattcaaagaaccaacgcgagattaagtcgacccttgatcataaattcttatgaaacccagtgaatctcctaaaccctaatagtcttttatcccgttggatccaagttgatcaaacaaaggagagaaagagagatcttttagtaaaacccaaagattcaaccacgctctctttctctctagtggcttcggttttgaagatacttcccactctctctctatctctcttctctctctctctataagggtaaagaaaaaaaggaaaaaaaaaaagagtgattgattttgaagattagaagagcgtctatagtgtattagctttc

SEQ ID NO: 70986 - DNA, 429 bp, Arabidopsis thaliana landsberg
ttgatgaacaggctgttgaggaaaacaagatcttaattagctctctgcatctattttgtgaacaaaagaaggggatgtttacgaagagaaccataccatattccagattatgcagaactgataaaggaagacaagcaatacatgaatttgattagatagatgacccaaaaacaacgacaacattaaaaatcataagacctattctgagtaaaatagctcacatatcccacactttttgcatatgaccaatctttgtagaatacacgatccccgaagcagagaatctctgcccatatgtttaacctttggataagagatttgcgattagtgactgaaaatacattcccgactctaagacactaagaaaatcaaatgtgtatgaaatatagccttttttggcttttttaactacgcaaattattttgaaag

SEQ ID NO: 70987 - DNA, 604 bp, Arabidopsis thaliana landsberg
gtatatttctctttgcagatgtcacatgtgtttacttaattggagaatgtattggccctttttttgtttttaataggcgagctcaactggagcgactggtgcacgatcatctgtaagcggaaaggttcagtcgttcttgaaggatatcaaagaggtctaataacagttttttttttaaagattgattctcaaatatcttgaaatgatgtacaaatgctcaagttgtttagtcatttgtaattcaatgcaggcgacagacaagccggtggcagtcggttttggaatatcaaagccggagcatgtgaaacaggtcctaaaccttacaaagcttctcttatgctgccttcatagttacttctttgctgactagttttgttgcgtcaacagatatctggatggggagctgacggagtgatcgtaggcagagcaatggtaaagctattgggtgatgcaaagtcgccaactgaaggacttaaggagcttgagaaactaaccaagtctcttaaatctgctcttctttgaaacacacacatttgcagacaacatctttagattgtgattttgattattatcggtgggtgacaatgatgtctcaatcttttga

SEQ ID NO: 70988 - DNA, 575 bp, Arabidopsis thaliana landsberg
attgaaacattatccggacatgataaagacaataacaaaattgcaattgaacttcgtaatcatgaataagtttgttacatttgcttaaattaattaacatgtcttttcttttagttacatatgagtatattaatttatgagaaatctgtgaaaaaaaataaaatgacttctcaaatttttacccctaacaattctgatggactgtatctttatagttgatgttttagaagaaaataaaatgtttcaaattagatgatgatttcaattttaatactaaattaattatttttgactatttatatcatagaattattttattattggttgatttgtgtctaaatagattatcaatgtttctttaatttagaaaaaaaaaaaaaaaaaaaaatctaaacatcaactataaaaatacggaggaagtatattggatggtttgctcttgtgttattaattttagagatgttcgtgtaatcatctctcttgtggccttgtgggatcagtttgcggaaaatgtgtccaatttcacacacacacacacaacagaaccccgaacggtactcctatatataatcgag

SEQ ID NO: 70989 - DNA, 581 bp, Arabidopsis thaliana landsberg
  unsure (1)..(581): unsure at all n locations
tggcagatttacgaagacgagacggttgaaatctggccgattgccgacacgaacggcgacgcgacaattcgcgatggctacctgaaattcaccggcatgcgcaacttgaaccagtnnnnnnnnnnnnnnnnnnnnnnnnnnnnnnnnnnnnnnnnnatcgttctgtacgccgcagccgaaatgttggcagcgggcggcgcgaaagacgcgcagttgaagctggatcaggccaacgcgatttacacgaaactacgcggcaatctcacgccgcgcaagcagttccgcatgttcggtatcggcgagcctatgccgccacgccggatcgtgatctcgcagtaccgtcgcccgacctagtcaaaaacggagaccgtaggaaggtgcttatatcgctccccgcgtcggatggtgttaatggtgcttcggtttgtcccgtagtcctttgcgatggccgcgccggagcgtttatcagctcgtatagccaagatctgttcgtcggtgagagagcagttcccgtggcgcgtggtgcgagggcggcattttcgtctattgagcgcctgctcggatcgcgtagcccatcggca

SEQ ID NO: 70990 - DNA, 520 bp, Arabidopsis thaliana landsberg
aaatatttaaaaatgtctgaattactgcggccctttaatttagtcatttattagtaaaaatgtttttgtttgaataagagaaatagtcggttgaataagtttaatagatttactttttgtgatgatcattatttataaatgtagctgttatatgctctcactatttcactctcattcaattataggtttcacaaatttaacgtttaatcatttcaatgtatttatttaattacattgaatatttagtaacgctgagtcatgattgtggagatatcttatagatgaaacctactaaggtataagagcaccaccaacggcggttccttaacaggatctctgccaacaaaaaaaaaagaaaaataactcaaagataaaagttttacgagagagactctaaaatcccttatctaagggatagtctcacgaaataataaacacgtgtacttttattagtaatcagtttatattagaaaaattataatatcattataagaataaaatcttttatttttctggtttt

SEQ ID NO: 70991 - DNA, 567 bp, Arabidopsis thaliana landsberg
  unsure (1)..(567): unsure at all n locations
gcgtagagcgccgcaagctcgcggtcgcgaatcatccgaagaacgcggccagaaccggggagcgccgcttcgccaacaacccgtcgaccatcgtttggatttgcgtgcgcacttgatctgcgagcttgttcacgagcaggcgatcgttcgcgtcacccnnnnnnnnnnnnnnnnnnnnnnnnnnnnnnnnncacttgctcggcagtggcagaaggcctgccggaccgatccacgggaacgtcggcgtcaccggaatccacgggatgccgatgttcttcgcgaaccacgtgaccttgccgagcatcggtgccgcttcttccgcgccgacgacggcaacaggaatgatcggcgcgcccgtgcgaagcgcgagcttgatgaagccgccgcgaccgaaccgctgcaagcgatagcggtccttccacagcttgcccatgcccttttcgccttcggggaagacggcgacgagctcgtccttttgcaggaggcgctcggcgttcgcgggatccgcacgcacgccaccgatgcggttcatcaccggaccccaaaagggcaggtggaagaccgtgt

SEQ ID NO: 70992 - DNA, 515 bp, Arabidopsis thaliana landsberg
tacattgaatgtcgacaccagtgctgtaggaagtacagaagctcatcttagtatatgaccgatacatttacggttttgaatctaatccattttcaggatgtctcgaatcttcttgacaaaggtaaaatagaaacagcgtacctgcagcttcttgtccagtcatggcatcaacaactagtaacacttctgttggattcagaaatttcttcacgtcttttaattcgtccatcatgcctttatctatctgtcacaaagaggcaatttcatgactgaagctgcaatagatttatgatacaatgactcttaaagacgaaacattacctgaagcctccctgcagtatccataataactacatcaacattgttctttttagcttctttaaaaccttgcttacctatatctgcaggttttacatcagtccctgctgtataaaccggcacaccaacctgacacaaagagggcatcagggaatattgatttccggaatcaaatatcatcacatattcacacagag

SEQ ID NO: 70993 - DNA, 2764 bp, Arabidopsis thaliana landsberg
  unsure (1)..(2764): unsure at all n locations
acagttgtgttgttctgattcattcggattttaaaaagctcccatttttgatccattgtttatgtatgcaggtgatggaattcaacgaaacaccgtgatcatcgaccattgatccgtgtcctgtatctgaactgaaaccggggaagatgacaaggcaatgcaaggaatataatttgtaaatttggctttgttggtttgtgaatattttcatttacaatggtaaatatatgaagcagaaaaggagaaactgttactctgcaacagtttaagttcctgagaaaatttaacttccatgaaacaagaagcaatgtttcttctttaagtgactttttctcatgaaatgcctctgttgttgtattctctagtcagtcatcaaaactcttacatcattgtcgttatataaataaatttttctttttttatgtgttcaatctaaggaactgatgcagtgataaaagtcttatgaagtgggggaaaagagaaaagaaaacataatttagggactgttttgtaatattttataaagtaaaggtcttccgatgttaatatcagaaatgtctctccggagtcggtcccggagctctcggagcaaatgaatgaacgagactcattgcttctctctttcccttcgtttcttacacattaactactccaaaaaccgaacaaagaccttcagaatttgcgattcatccaatttcaacattgatttgtgaggtacggtttcagattctttctccttttttttttggttaattgtgattctcgtgcatatgcgtgtggtgtcatctttagttatgtaattcgcgattagctctaagatggnnnnnnnnnnnnnnnnnnnattcgtgatcgcttctgctcatttctgtaaaagtcagagttttgttcataaagtttgggtctttaagaagaataacaattttgtgcatgttttcttctttaaaaggggaatttctaaaaatggatattggagaaatcattggtgaagtagctccttctgtgagtatcccaacgaagagtgctatatacgtttggggttacaatcaaagcggacaaactggtaggaatgaacaagagaagcttttgcgtatcccaaaacagcttcctcctgagctttttggttgccccgctggtgccaattcgcgttggctcgatatttcttgtggtcgggaacatacagctgcggttgcatcagatggttctctctttgcttggggtcagtctctcagttttcttttcctttgtgttgttactagattgtctttcttcttgtgttataaagttcttttctttatgtaattcttggctttgattatgtatcaagtgtgatagaaagcaatctaagtagttaccaattagttgtttggttataattgttggatcttgtgattgaatcttaggcaatccgtaacttcctgaagacgggatgattcttacatttttatgtcctcgtttcaggtgctaatgaatatggtcagcttggggatggaaccgaggttgggaggaaacatccaaagaaggtgaaacagctgcaatcagaatttgtgaaatttgtgtcttgtggagctttttgcactgcagctatcgcagaaccccgtgaaaatgacggtactctttccactagtagactctgggtttggggccaaaatcaggtataacaggttccattatcgtgactggaattgtcacgtcatgtgtttttctaatactctctcaattttttcatgatagggatcaaatctaccacgcttgttttcgggggcatttcctgctacaacggtatgtacttaaatcctatccatgatagaaacatactagtgtagacattgatttggtatttgcacatattataggcaatccgccaagtatcatgtgggacagctcatgttgtggccttatcagaggaaggccttcttcaagcttggggtaagaatgctttgagatcttgttatgcattagaatctgtttgtttggtatttatttataatgattttgaggtttctgtgttccatggatattataaggctataatgaacaaggccaacttggtagaggagtcacttgtgaaggactacaagcacctcgtgtgataaatgcttatgcgaagttccttgatgaagcacccgagcttgtgaagattatgcaactttcatgtggagaataccatactgctgctctttctgatgcaggcgaggtgtaagttatctaaatgccttctcttgaaaagtttgtggttattcacatgaatgggtagctaattctctgtgcaatgttccgaggaaggaaatccttttgatggagatattggtctcatcacatcctagcagatgggaatgcttgaggaagcaaatgaattcctgacttgcaagtcttcttcccttttgcttatattttttcggtttatcttattcagtgtccactgcttatctctttcgtggcagttacacttggggattaggaagcatgggtcaacttgggcatgtttctcttcaatccggggataaggagttaataccaaggagagtcgttggtctcgatggtgtgtccatgaaagaagttgcttgtggtggtgtacacacttgtgctttatctttggaaggagcactttatgcttggggtggtggccaagcaggacagctaggacttggtcctcaatctggtttcttttttagtgtctctaatggaagccaaatgcttctacgaaatgtcccggttttagtcatcccaactgatgtcaggctgtggcgtgtggacattctcacac

SEQ ID NO: 70994 - DNA, 520 bp, Arabidopsis thaliana landsberg
taaagcttagtatgaagtaactacactagcatcaaatattgggaacatatgtggtaccgtatgtcgttgattaaggcattagtgctgatttgcgctttttggaattcttttctgtaagtagaaaggagagcaaagcagtcggtcaagttcctaccggagtatcaagcatgtcggatatgaacatggagaaccttatggaggactctgctgcttctagggttcgggctatacgtgggtgcgcatctcatcctcgcagcattgccgagagggtaaacaacatacaatctttattttcagagttctggaagtgtagtgatcaaggctctcttaactttatacattgaagcttagtgatacaacttatatctgtactttcaatgtacggatgtttaatgatgcactgtatgcttcattgaacagaggattggtctgagcgggtcagagtatatttatctctacctttcattgcagacgtacgaaggacacggatcagcgaccggataagggagctacaagagct

SEQ ID NO: 70995 - DNA, 562 bp, Arabidopsis thaliana landsberg
ttctcctccaagcttttgcaacaaataaagtccccccccccccccccctttttctctctaggttcaaaaggactcacaagagagagatagtatgattgatagggaaagagagagagatgaaagaaagtaaaatatataatagattattaggacacgattgtcatcttttgatttgtgtcttgtgtgctctctctttcttctcttcctcgattgatcttctttatataaccctactctctttctcttttcccattctttctatcattctccctttctctctcgggatctgatctctctttccagtaacctattcccgaggagcactgtcaaatcttgtccactctttgatcttatctcgatctctttctctttctagtcttgtgtagtcttcaaacttgtgatgttagctatatagtaatcacgagagagaatcatacaatagctgaaacataaagctttcttagaagctttaaaaaggtctcatctggattatcctgtttaatttctagagtttcttcaggtaaaaccctaatttatgtcaattttctatttattaccaatc

SEQ ID NO: 70996 - DNA, 586 bp, Arabidopsis thaliana landsberg
  unsure (1)..(586): unsure at all n locations
gagataattggccggattcccgtcaccgccgcactatccacactaacacttcccttgcttctacgcattctcaccgagcctcgcaattccctgcttgcgcaatacacaaccctcttctcactctctggcatagaactgcgctttacaacgccggcgttgcataaaatcgcagcgaatgccttcaaaatgggcaccggggcgcgcgcgctgcgcacagannnnnnnnnnnnnnnnnnnnnnnnnnnnnnnnnnnnnnnnnnnnnnnnnnnnnnnnntattatggtgaatgaggccgttgccagtcgccaagaacaaccgatatatcttgcccgcggtcagggggggaaattccacgccatgatcgctgcggaggaaagcgaatgggaggcgcgacacggcaagaaggaggagaaacctagtgcacaggctgatgttgatagtatgcaacatgtatccaactttcaggaatatcgcaagcgagcgattggntagttgcttactgtggattggtggcttttattctttaaccggggcgttctttattcaaaatgcatagtatatgaacatgattatcgaacatcgagaa

SEQ ID NO: 70997 - DNA, 633 bp, Arabidopsis thaliana landsberg
  unsure (1)..(633): unsure at all n locations
atacgtatcgttttatccttcccacaaaaaaaatatcgatcgataacttcctccctgattgaagccttattctatatatgtggaaactttcacattctccttactatcttttgactcataacaggcacacagtatacataatgaattgttttgtgcaatcacatagtatacaagttaagatctcacctctaacaaccacaaaagttaaaacataactgtaaatattaaaattctatctagaatctattttatatcttatgtgcaaaataagctctagtttataagagaatggtagaagatttgcttataaataattaccctttttcgacaacttatagaagcattagcatgtaccctttattcgaaatatgaggctctatgagaccattagagcaactgcatagaagtttgaagtgctttgacctaaaaatagtctaaaccctcaaacttttgtgaaatttaggttatagtatgattctgacaaaaaattaggttcttcagttagcaaagaaccatcgagctggatcttncgacttcatttattattcttatagtcctgatagacttcagatgtttttcacaatgaccacattgattatgattaagaatgaaggtgatagtaaaaacaaaatc

SEQ ID NO: 70998 - DNA, 387 bp, Arabidopsis thaliana landsberg
agtacacaccaaagaaacgggcgcctgctgttaaacatgttatccatgccgaacgtgccagccatgaagctggaggctgcttacggatggggggctatgagcataggtgagctacatgttccatacgggaaatggcctgggaactgtgggagtcaagaggaagccacagcgggctacatttgattgagatggcttataggaggactcgctcctttactacaaatacgggatccgcatcaacacaatggttacgtacagatcatggaataaaccggaccgaaagatttagatctcatgaacaaaggtgatcgtctgttggagtagcgacggactaatatcatgaatgtttgacaatgcaaacgcaccacactggacagtaattgatca

SEQ ID NO: 70999 - DNA, 446 bp, Arabidopsis thaliana landsberg
cttttgaaaaaagactatcaaacctgcagcatcggttgcagtctcttcgacaatcggataaagactctggctgatttcttcattttcatcaaagctaccatcatcatcttcatcttcatcttcatcttcatcatcatcatcttcaacaacatcagttgagtctttttcgtcttccacaacagaatcagaatcagaatcagaaagtgggatggcttgtatttcagctctgacctctttgctaccccaacgatcaaagacactcacttcaaaggtacgatgaccatcatacacaaatgtcatgaactctccgctcttcagctcatgttcctctgcgaattatggccatcctctagtaagatacgcagcttcgcttactttcttcaagctcacagtccaaaggtatactccaagacacttggagcttcacttgtctttggcaatggatc

SEQ ID NO: 71000 - DNA, 600 bp, Arabidopsis thaliana landsberg
  unsure (1)..(600): unsure at all n locations
atgccgcatgatgataatacaattatgtcgctaattttccataaatgcatttttacgtgagaaataaggaacatacgtgagctatataacaacatactacgaaagaagcacgttttcgttaagaatagtcgtaatttcgtgtattatagagatatgcgtaatttcagtaaagaaaaaccgaaatgtatgttcgtgaaggttcagttgaaatggcgataactacctttcacgtgaccgccgcaagctcttccttattcgtcacattgcttattgtaaagaacgaaatttggggtttatatggtcaaatatatccacgtcatattagactttttgtttgtttgtcaagttggaccgtaattgaatacttaaatgtatatttttttgttcatcccatcacccacgtaagtcgatttatctatcaatgctggatagaaatataagaatctgacctcacacacaaaaagaagaagactgaactacattatatttgggaaaatcgcatttttaaaaagacagaaccncataatagttacttgtttaacaaattaaatgttccaagtnaacgacgtcgtaggttcaactactattgcgcgcgacaca

SEQ ID NO: 71001 - DNA, 757 bp, Arabidopsis thaliana landsberg
tgagattgaagtataatgatattggctatgtgtctatatatatacacacataaatacatttccatatatattttttatacataaccatattatttaatcaatattcaaaagtatgtgataagttttccataaaaggaaagatacattaaatatttgtatttattaatttggacataaatttggtcaaaaggttctattctatatttttactgatttagattggtatttcatgttaattcattattaaagaaaaatacaaactttcattctaattttatcaaataaattttatttgtagaccgtaaatacacatagatgagtaaaaaaacgctataagcatttgttaatgctttattttaaccaatattttcaaatgcccatatggcattaactatcttaaaaaattagttataaaaataagattaatgactttaatgggactttgcataattaaatccatgagttgaaaatgtttaatgggactttaacagcatcacttaagcccattagcccaatgcgacgtaacctctagttgagatcgagacaaagtgaaggtcgacgatttcaaggaagacctacgatcgaggagagaattgacatgactaggggacaaaacttgaatgacgatggtctaattaaaaaagacgccacccctataagagataattgtctactagctctacaataacacttaagcaaaatactctaataatacattgtaaacatcaatatacttgaaactaaatgcattacctat

SEQ ID NO: 71002 - DNA, 568 bp, Arabidopsis thaliana landsberg
caatgctccagtgtttctgcatggcatatacgcatacgaaaacaagtcctaccagttttacgaacaatacattaataaaatagccgatgaacttttctgtatcggccctcacttttgtgaggatggagagggtttctccgctgcgctggtcttcaaattcctggtagggcaggcgcatggaatgctgcaggccatcggtaaatattttggcgccgaatttctgtacgatcacattcaccacataatcctggaatgccttggctatacggcttaccatggcggtgcctacgagcagcagcaatagtttgatcacccccgccgtaaaatcgttccccgacctgggaataagcccggccttgtcttcggtaaacgggtgcgtggcataattgtccaggatcttaccaaagatcagcggatcaaaaagtgaaaagacctggttgatggctgccagcagcaaagcgagcgcaataagccctttattagggttgaggtattgaaggagtagtttcatgtaaggctgtgggttgatggttgatagtccatggtccatagtcgatagtccatagtc

SEQ ID NO: 71003 - DNA, 176 bp, Arabidopsis thaliana landsberg
  unsure (1)..(176): unsure at all n locations
ggagnnnnnnnnnnnnnnnnnnnnnnnnnnnnnnnnnnnnnnnnnnnnnnnnnnnnnnnnnnnnnnnnntttagggtacataaccagtgactgatagccggccccaaaagaggaaccagaagtactccaaagggcaaaaacaggaaccgggaatataaacggacccaaaaacacaa

SEQ ID NO: 71004 - DNA, 536 bp, Arabidopsis thaliana landsberg
aaaatctatatgtttttagttttattttcaatctcgacttttattattggcaaggtgaaattataaacattgttatctatcaatacatgtactttccatgtcaaataagaaccaaactgcgtcttgtccaaagacaaacagtagtggtcggtttgtatttttgctaccgcctagaacattgggacgacacatctcaactccaacctttgacaaatcaaaccatctgttctttgttttagcaagcttcagatccttcttgctttggtctcactttaagaactggtggtaggagttttataaagcttccctgaacaaccggaggagcaggaggaggtcgatcacaaggcggtctcgacgatgtttgcgatgaatttgaggtctccgaagatccattatctaagggagcagttcatacacacactaaaccatttaaaaaaacacattcaagattcacatggtattagccatattttggaccaataaaagaggctgttgggtactcgagagtgacttgaccattggtcgcgctgactttt

SEQ ID NO: 71005 - DNA, 285 bp, Arabidopsis thaliana landsberg
cgatatctttccccggcaggagtgccaacgggatgtctcgttgtgcgggtacatcacgttgtgtgatgacttttgcgatgacgctcgagcgtgttgatcacggatggatcggcacgcccgagcgcgggttacgcatgacgcgaaggattactttcgtgcggcgtgcttcgcccgctgctgattccgccactgctggaattcggtgattcgcggttcatcgcgcagcagcaccgagtgcgggtcgatggttaccagtgcatcggccggcaccgcgagactgccatg

SEQ ID NO: 71006 - DNA, 175 bp, Arabidopsis thaliana landsberg
ttccgcttgttgcaattttgatgaactgtgtggtttggattcagccttggagatgggatgtttttcaaatgaagactgtcgtgcgggtcaagaggcttctggtagtggcatagcttcaggtctagacaagagtgttccagggtataccatgtatgcaagtggttggatgtatggt

SEQ ID NO: 71007 - DNA, 455 bp, Arabidopsis thaliana landsberg
ctgaattgatcaaaatattatttcgttgttatgttctttattggggcgtatctaaaattatgttgatatttttttgacttgtcaattcagaagattgtaccactgaattattctatacatattataaaaattatacatttcaaaaatatcttttttctatattttgtatgatcttcggacttaaacttccaggaaaaaaaaaaccatttgcctttaaaaataaaaactatattcaaaatctaattgaaaacacagaatgacagaagacaacacaaatgtgcaaaaaaaaaagaaaaaaaaaatcatgatcatacatatgaaagggtttcttttaaatttatcaaaataatttaaatcatgaaggattttcttttaaaactttttttaactttctacaatgtggtatttttatacatatgccacataacacaaatgggttttttcttttcatttat

SEQ ID NO: 71008 - DNA, 460 bp, Arabidopsis thaliana landsberg
gaacggcatataaaaatcaatcccaaagaacgacgacccacgggagagggaagacacagggctttcagttttgacccgcgccggaacctaggagcaccccaaacaatagcccagccgccccgacaagcaaacgaaacgagaaaaccacgcccacaccaagacaaagcaacagcggaaacaaaggacaaaccaaagcagacaaaccacactaccccccctgctgccgagagcccaaaggaggcccaaccagcagccccggcaagctccgcaggaacaatccccagacaaccccctaaaagacaaagctcctacagagaggaaacgcacacaacaacgaagagaaaacacaatgccccacacacgaacacggaaagcaagcccccccagaaactggacaccccaaacccaacccaaaacgacgccaaccgcgaaaggcgacacaacctggggagagaaaaag

SEQ ID NO: 71009 - DNA, 466 bp, Arabidopsis thaliana landsberg
  unsure (1)..(466): unsure at all n locations
acacccttngaagtgaaagcgttaactacgaaccacccccaggcgacgatgataccgactagtcttctccgctccctccgggcctccgcggtagaaaactagctcgccagcaactcttcgaccagttcgatgggnnnnnnnnnnnnnnnnnnnnnnnnnnnnnnnnnnnnnnnnnnnnnnnnnnnnnnnnnnnnnnnnnnnnnnnnnnnnnnnnnnnnnnnnnnnnnnnnnnnnnngaacgtgacctgtgccggcgcgcccgaatcggcatccagtccggtagggatatcgacggcgatccgctgagcggaagccgcgttggctagttcgatccactggtcgagcggcgctcgcggcgtgccgcgggcgcctgagccgagcatggcatcgacgatgatctcggcttccgaaatcgcccgcgcgatgtgctcttcggtctgcttgtccgggcttccctccgctgact

SEQ ID NO: 71010 - DNA, 431 bp, Arabidopsis thaliana landsberg
cagtcttcccaatactaaaagcaattatcaaaaatatatcaaaaccagtcttcatctctaattcactcttttgcttaattcaatcatttcatttcttcctcggctattcaaaactcttcgatgcaacgtttgttaacaccttgctcaaaaatcgcatacacaacaagatacattgcaaatacaaccctaccttacccaaacccatgtgatattttcatcaatcatcgtgggatcgataccaagaagactatttgaggcctactatatgattgttacactagacaacgtttgactgctttcttggatagttagagtttaaagcctggagacaggctttttgtctagatcgacatggcaatcaaagcatgcggggtaggtgttgcggatttctcctctcgttactgtgaccctaacttctgactccatgaact

SEQ ID NO: 71011 - DNA, 391 bp, Arabidopsis thaliana landsberg
gcttttcttcttttaaaaataagaatacagcgcaaccccccaagagactgggtgctagataacacccgctggactttggcgcccactggtgcactctgagcgaccatacagctggcacaaatcccaagccgagctgaatccttgaacgacattgcatagaagatgactgattctgggcgagagcttgaggaatgacgaaccgaagtcgggcttgcgaggagagccttcagagatcttgaagacatagccaagaaacaaacggattggcacaaaacaagtcggcaccactacgtcaaggcgctggtatggcaactccatgcctacaaaggcccgaacaggcaaagctggagcgggctgatgagaaccaatgcgatagtgctgagatgagcgc

SEQ ID NO: 71012 - DNA, 540 bp, Arabidopsis thaliana landsberg
ggatattcatgccgccgattcttctatcaatttttccgcttcgcggcagtatctgactctctggcgtcatggcgcgacattaaagttagcgcattccaaacttgcatacaggcaggcaatagcggtactggcggatgtaggagtgctttataatgatacggccagtctctggacctttggggtcgtagcgaaaaatatgggggttattgtgaaaaaatataatccgaatctgccgcaggaacctttgccttttgatcttcagatcggattgactaaacaattgcgtaatgtacctttaaagatttatattaccggccatcatttgtatcaatgggatattcgctatgataaccccgcggatgtaaaaaatcaaactatttttggctctgaagataccaccacggaagataaatcttactttgttgataagctgttccgtcacatcaatattggcgcggaattgttaattgctaagcgtctgactattagtgcgggctacaaccatctccaccggggcgaattgagtacggatgagcaaaa

SEQ ID NO: 71013 - DNA, 133 bp, Arabidopsis thaliana landsberg
agaatgcgcatggcatgcccatcctgctccgctgctccaatgggaagtccattactcgtcgaggattaatttttgcgaatgaaccgcacgcacagggccgatgtcttcgtttcttatgccgactcccaagaag

SEQ ID NO: 71014 - DNA, 591 bp, Arabidopsis thaliana landsberg
gggaacaaacttttgttctctacctccttgtccattgctaaatacatttgtttgaattgctatttgtttttcttgtctattccccaagaactcaaagtcaacctcatcgtgggtgtctcccttagaagtcaactgtaattacacaaatatataaagaaacaaattcacaatgatggaattctaaaatcaatgtaatgaaatgacaatagaaaaaaatttgcattgaaatggataaatacgaacgtacgtagaaagctgtgacaacaccggcggaatctcttggaggcaatttgattctcatttggaagaatcctgatccgtagtggcttttagactcaaagccagaacctgttatattgtagctagattatgacaaactatgtatttggatgttttgtacaaatttatatatatcgaaaacaattaagctacatagtcatttttgttacaatattttagtaaaaactaattagaaaccttaagtatattcatataagaatatgatagaagattaaatttgaaatcaatacactcataaatttttaaaacgatgtcgtagtttggaaattaaagaagaagaaaaacaatgac

SEQ ID NO: 71015 - DNA, 469 bp, Arabidopsis thaliana landsberg
acacccgcgccgtggcggcggcgcagaccgacccggtgtggccggcgctcgcccgggtgagtctgtacttcatgctgcacaccggggagcccgacggggacggctggcggccggtcgcgcagttgtaccgcgacaccgcggtgctcgatgcgctcgtcgacgcggtgggtgagcgcatcgcggcaccgcaccgccgggtggccgcctcgacgttccacctgggattcgcggcccggctgtggtcgatctggctgggcgcggccctcgggcacggggtggtggtcgacctggatcccgagctgctgcacttccgtcacgacgccggcggactgcagctgcatctgcgtgcaccgcgctgctggcacgccccgagcggcgccgccgaaggtcccgctggggcctcctctgagatccccgcggtcgacgccgcggtggcaccggtggtgcacacccatctgcgcccgctggc

SEQ ID NO: 71016 - DNA, 203 bp, Arabidopsis thaliana landsberg
attgccattagtacacgcctatcgcttctcttgatagccgttactacacgcctcttctatctctttgggccggctataagactccaaaggctcttaaacatacgccgcccaccatgcttgattatagcatacctcggacattcccatacatgtggatcatagatccgagtctgaaaggccatgtggttttttgccacaagggc

SEQ ID NO: 71017 - DNA, 310 bp, Arabidopsis thaliana landsberg
gttaacgtgcccctctggtttctcaaatttgggaactctgtttttgttctgttctgggaaagtagaacaattcgaattacggttcgaccgaagtcaaaccgggttttgtccggttaaataaattgaaagaaaaaacaaaggaacactgtaataaaaaccctcttctaaaaccctaatttcttcttctctccgtcttccttcttgttgttccccgtgcgatttctttcatttttgattcgatagtttattctttctcttgtttcaactgttgtgtgattgattctttccatgaattgataattcttacact

SEQ ID NO: 71018 - DNA, 243 bp, Arabidopsis thaliana landsberg
tggtgtcttctcgtgatatgtctcgcaaaatggtacacctaagtaaacattgttcttgataaaattaattttaaactttctttggttatttctgggtgttgtaatagactttctttaatctagttgttgtcaacaagttgttcttaatatctagaaagagttcatttgccattccgatcaagttgtactcaaacaaaattcctgtgtccagagttagcacccttgccaaatgaaacgaaccca

SEQ ID NO: 71019 - DNA, 240 bp, Arabidopsis thaliana landsberg
taacaccatatcatgcactaatgatcgcagtacactgactgaaaaactgaaatattctgcatccttatagaaattttgtttatatcagcttcataattgtttttggggatgagttggcaacaacattgggatcttcgttctcttcttgttttgttaattctgtttttaatgttgggattagagctctgccattgcttatccttgttcaccagttcaaaggtccttacaagctccttttat

SEQ ID NO: 71020 - DNA, 505 bp, Arabidopsis thaliana landsberg
tacttcaattaggaaccagagacgcaatctctccatcgatcatattagctatctttgagacatcttggttttccaactcaagttcttccaccatcgctcttgcaacgcttattgctgtgtcggtctcgatgtcgaacgggaagcatatgattcttacacaaccttccttgttgacgattctgagtcgcaaaaatagcccatctccattgactcttctcttccctttaatgcttatatctacactaccaaacctcgtatcttcttcttcttcatcatcataattttgaaactccaagagatctatttcgtgagactccactgtcttatctccatagtaatcccaatggattagaatatagaggctgtagtaaccgtttgagcagtgaggtatatgataagaatgtctaagaggaggccctgctacatctatcaagcccctttcgatctctacgcgtctcatatccgattcatgaaacaaagaaaagggccatctagagttaacaac

SEQ ID NO: 71021 - DNA, 205 bp, Arabidopsis thaliana landsberg
  unsure (1)..(205): unsure at all n locations
catagctgtgtgtgttttatcgctgtcccgggcatgataattctaccccaccagcgggaaagggcccttccttttgggcctattgtgggccacgagggataataaccaacgtcaccgtggaccgagggcacgggctataatgcgttgagcgacaggccnnnnnnnnnnnnnnnnnnnnnnnnnnncaagagttccctatgcaaag

SEQ ID NO: 71022 - DNA, 504 bp, Arabidopsis thaliana landsberg
ccggactcgtaatactcgaggtagcgcaagccgccatgcaccagcttggtcgctgccgacgaggtgccagaggcgaggtcgtgcatcttggccagcatcaccgaatagccgcgccccgccgcatcccgcgcaatccccgtcccgttgacgcccccgacgatgacgaacacgtcgtagggggaattggcgctggtcatcggtgcacggctttcgaaacgaagaactgccgctgatctaggggacaatcgaccgccggatcaacgacatattcccagaaggctacttgttgtgcgccttcacatacgccttgagcacgttctgcatgcgcgtgatgtgacccttgccctgcgacttgaagaaggcaaacaccttgggttcgaggttgaggcgcacggaagttgggcgttcatgcggaaacactacctgcgccttctaccaaaacccttcaggaagctcctcgccgggagaagcgtgttcgcgcgtgggaaccaagtcaccacgctt

SEQ ID NO: 71023 - DNA, 2991 bp, Arabidopsis thaliana landsberg
ctatcatcaagtttgccttcttcaaatttgactattgcctggtacaattccattttcttcttttgcaatttaaagaaaggttcatcatttttttttgaaggagacatccaacattgcagacaattcaaagtaagcattgttcctgggatgatacttctaaactacctgtatatcacggaatgtggcctcttcaatagtcaatttagagcccacattgccagacttcttgtatttctcctcgtatttttttgctagagattcaagctggagtacatgttgattatgttagttaatcaatctagatctctaataccatcacaaaagaggctcaataacagaaactgtatacctcacgtttatcacccaagactctctctgcgatctcattgtaccggttgtcacatctgctcttgtataaaacctgtaatccacggaaccaaagtgatgaggttagagaaacaaactgattgatagtatgtaggaggaacctgaagacaactacattcctagaacttttgagattacttcaaaaaaggccagatcaaacaacacacttatatacgaccgtagttcgagcaattttcccttcttctggttatcaaataagcggattccattccagaaaacaatttaaaaggaaagaccaagctgaagaagcagagatacttacaagttcttgcatcttagcacggaagaaatcaattttctgcttggaatcagctatttctttttcgagttcatccacctaaacaccaaaacacaagaattaaaaaaatgaaaggcagccacgcaagtttttaagttacgccagcaaatattgcatggataactgatcaattatgcgggaaaggtacggatgatatgtgatagagaaaggaaactcaaaacaggattagaaaaggaaattattcatagttctcaatggcgatgtgatttcttccatgccaatgaaattaagattcactgccactgccaatcataagttgagagaatatcttctaatcttgactatggctacgcaaatccacaaatatttcatataaatgccatatggaaggggtaaaagatatcttcggatagaaaatgcgaaaaaagaaaactcacgataactaatgcaattcaccacattaacaaatgaaaatcagagagaaaccagagagtgcctttttatcaacagcagttgcttcttcaaacttcgtgttgagtgaatcctgctcctctttgctaagttgatccaccagcggtttttctaacacaggcattttacgctttggctgagtgggctggaccattccatcactaggagacagaggcactggcctcggaggctttcctttgggaccagctggtggccttaagcccccaggatgtggttgctgttggaaccctacaatatttggtacatatgaatttatctagtgtaacggaaaaaaaggtaagtaatacagtatgtgcaattgaataccttgaggatgtccccaggatgcattgccatgtggtgccacagattgaccaggagaggtgaacatgctctcactatgtattatagagcttgggaacactgggggaagtggtcggccctctctgtaacgctccataagatagaccgcaatacagaactcccgcaaggagagcatgctgtcattatcttgatcagataaatcccacacctgcttcaaagcgtctgtaacaccaaggaccagcatgagacacataaaacattcctcaatattccccatggaaatttcaacaaattgtgctagaggaacattaaatctctatccacatatagtatagtctacaggaggaccaaaacatgaaatactcaagatgaaccagaaacggcagttaatcaatatccaaacaaatattcagaagtgccactaaattataatccccgttcaccattctaagaagataaaattgaaactaaaccattgttaacggagaaagtaacaaaaaagtaagtgtagcctacctcttggaagcctccaacttaagaacaaattccgagcctggttccctgtgatctttccgtccctatcagtgtcaacttgcacaaaaaccttggtatatttctggacatcagctggagtcatttttggccaaggaggttgggactggccctggggccggggttgtggttgagagtgggggtggggcggacgctgggccaactgactggtagctgaaattccaactccaacagtagagccaggtggaccagaagccgcacctgaggaagtatatggttgccctgagtttccagtaagctgggtctgaacaccaacagcatgctggctcaatgaaccctgttgtgggattgaactttgcctaactacagactgtgtgatctcagggcccgcgacagttccagtagtaaccgatgagatgcctgttgttgatgcacttcccgtaggatgttgttttggctgcgtggaagtaactgaaaagacatctccgaaaagtgagtcagaggtaaacccgtttcctgatgcagccagttccttgggatccttgggcaccaattgattggatggaacatttgatacacgagaaccgaaagtagcagatgattcttggggattgtgcacaggggctgactcttggggtctggttgttgtagagcttgttactgcaggtgttatatgtggttttgttatatggttggcagttgaattaggtgctgtcaaaccatatgtactctgactcgaaggaatttgagaattcacgttcccagagggaccaacacttctgccgctgagccaatcagatggcataggttggtttgcaggacgaggtgcattagtccctccagctggcattcccgggctttgaaagttttgctgtgtctgagatggaggtatcccagtaaactggttctgttggcctgggactacttgttggttactagtgcttacagttccacccatgtgaggccctctcacaccagccgctactgatggcattgatgtaactccctgagcttgt

SEQ ID NO: 71024 - DNA, 834 bp, Arabidopsis thaliana landsberg
  unsure (1)..(834): unsure at all n locations
cagccactccattgggatcgtctaaaacaactgctcgagcttttcttagagctgcaagagaaaaaacaaaagagctaagcttcacaatattatactacagatatctagaagaaagaaccattagcaatagagactctcacggctaagataagccaaggcgagagtgactacgttattgaatagaattgcataaccaatgagaaccgcgattccaatccaataccaatagtcattcgttggaaagctacgtagctttagaaggttgagtccaattgtagtatcagatatagctgatggctgcatgatgtttaaaagtaatatagttaagcattgcatgcatattctaacaaagtattattaactcaacaaaaagattaatgaacacaccgtcatccaccgtgtggctgtgaattcattgaccgcaatggcacgttgtccataggataacggcgacacccaaaaaccccaaacccaccagggtttaatatcagctgtaagaaatgatagggtcttattatagcaacactaaccaacaaataaaatgtcttatatgcatgaagtagtaaagtagtaatgattaaccttttgggataacgaatccaccaagcaagaacactatcaagattgctgcggatccgaatgtattggcaatgaccatatctcttgctagagaagccatcatacgaaataaaccgtgagccatttgatgcaccgagaagagaagtaacatgtatcgcgaaaatctaagagaaaaaacagagatttattgtaagactacataacttaaaagtcacangaagtttagaaatgataatatcaagatatatgaccaac

SEQ ID NO: 71025 - DNA, 3221 bp, Arabidopsis thaliana landsberg
agctccaaagactttttgtttgtttgtgttcttgaatgcggacttctcgaggggattagggtcttcccaaaattgttttcttatggataacttcagctttgaaaataattatcctactttctattataatgtgcaaacattattagttttcaatgaattgacctacaaggtgctgatttgtaagagcttaatagcattaaataatcaaaactgtttctgacattttagaaactccaaacagattataagttggcatttttaaaaaagtagctattttctaattaataacaaaaatatattgtcattgtttttttcttctaagaaatattttcaaagagcttgttggcacaaactcatgtttggtgtgcttcgtatgaggattgatcagtattctcaatcacacgtaaaaaaattaatattataaaaattaattcttaaaaccatttttttgcaagcaacaattcaaaatcacaatcccgatgattccttaaatcatgtattaactttatatgttttgatgcaacaattgcaacaagaaacatatatttgatggacacttgaaaacagatccaccaaaaaaaacccatcaaaccaagtgtagattcttagttatgtatgattctatgtaatagatgatgacttaatacatgtgagttgtgacatcaacgtcacgttggtgacgacatttgcacaccttaccgtgtgtgtagcgtgaagcacaattatcctttttcttttccatagaaaatgttatcaatttcttttcataaatacaaaattaactgatcaacttgataacgtgagagatgaaaacaaacaaaaacaacacttttttttttcttttcctaactttagaacttttgtgatttcataaaattttggttttacaaattcataaagcaaaaaaaggaaaaaaagatgattactatagcgaatattcgtcaacaaactttgtcactttgcaactaaacccacacttgtagtctctgtagagtgtagttcacctttttgagcattcgtcgctatgtttccacatttaaaccataacagttggcccaaagaaaaagtgaaagctaatgggctttttatgttactgggcttaacccagaaaatgacatacagctagcgatacgacattggtttagctctgcaaaacgctctatagtgtctgtctggtcagaaattcttcgactcactttcggtttctgatgttttgtctctctgattgaaaaaggtaaaatctcttgaatctatatcatatcgctaaggttaatttgttggctaggattttacctgattttttgggtatatagtgatgatagaaatttgaagtaatttctccagttttctcattgatttaggggttttaaatgtagacttagtattcatgaatgagttgatttctaattgatattatcatgttaatcatcttgaagaattgaccttgaattggtggttcatagatgtctcatcttgtacaatttatttgctcgaggatcttatgattcttggacatagtggaacaaagatagctttaaaaagggacgctgaaatgattacttggttgatgtataatagtttggtctcttaattaaggttttgatggtccttaaggttagtgtatagcttctatagaactttttagtctctccttttagatggttatgacgaattgacgattgtgttattcacgagataatttgcatccgaacatgtaaatgttacacacttgcaatattggtgtgcatggagaaattatagattgtgttaagtgttaaccccaaaatgcatctgctaaaagtgttgcataatcatcttgttgactagataacttgtttttgtggtttggacaatgtgacgatactatatatgatgtaggtaaagatcgggttttgcaagatgagaaacaaagctacaacggtgaaagaagaacgcgaagagatccatttgaagattgtacctccattggacaaagtttttctgcgttggctcgcaagagatctccagagagctcatggattcaaaccgaagaacaacactcgtgcgatcactcctccagatagctacatcgagtttatgcggttaaatggatcgcttgatgtagatttagatgaccctgatcttgcccatttgttcaagtaaaaaggggttcttctattgttgtctctgtttgttatgtatgaagctttcaaagtcttagtatcttttttgattactcatacagtcatacttaaagcttgtgttttggaagctcagtctataaatatatattataatctaaaaacagtatagcattcataagagatccaagtgtctgcattcagacgacacatgtttctattgtcttggtgctatgatttggaatccctatgtttcgaggttccatttaaaaaagttgttaaatgatgagacactcatgagcataattttcatcaatacagttttggctctcctatgaattaaaataaaaaacgtataagttcgacagattttgacgataattgctcacgcttaacgcgtgtaacggatgctgcaacagtttgatggaattattatgctccacttcttaacatgaataaatccaaaattcattttttttcttctcaatctcaaggaaataaaactgtatccaaattagttacatagctttattaacttcgttgactttaaaaaaaaaaaaaaacttaaaattttataattttgtattatatataaaaataggattattattatttagtagagagatattggtaaaaagatttgtgtacaaagagagagataaagagcgctaattccctccacatcagtattcagaaccaaacgcaactcattccctcgttttctctcttcctcttccaccggctcttttttttttttttttttttataatccttcctcttcttcatcttcttctcctctcccgctttttttcgattcgccgatctcttcacattctcttcccggaatctccgtaattcccgccgtagatctgcttcttaatcgttattgggatctctgcttaccggagatccgagtttccgtgacaattttcgccgtttctttttttttttgggggattttttatcgagattcgttcttatgtctgaagaagtacctcaacaattcccatcttctaagcggcagcttcatccttctctttcttctatgaagcctcctctagttgctcctggtgagtatcaccggtttgatgcggcggagac

SEQ ID NO: 71026 - DNA, 169 bp, Arabidopsis thaliana landsberg
ctgagcaaataaaatggtctatgctcatagactttgccggaataaagactgctatcacacgttcaatcatactgaacgtcgagggaattaggagagcttaagggcgatattctataatctcgcatgtgaggggttatttcttggattagaccaggcatcaataactgga

SEQ ID NO: 71027 - DNA, 3472 bp, Arabidopsis thaliana landsberg
gatggtatgttgaagatgtgcttcatgctgtttctactctgttaatctttttcttctcgtattttgtgaaatagttgtgcatgtaccctatttttccttactataatcgatgtgttataaaatgacatgattttataagcatttcacgtttttctttctcaaaatttttattgacagcaattaatcttctcattgatagtttgtaagcaaatggtaacgtcatagtgaaagttgaagctgtgatgtattgttcatttatgtctatattctcatttatgcctggtccactccaacattaaggttagatgtttatattaccatacatgaattagatcatcgattcttacattcaggttggattttctcattcaaacattctgcgaacaatcgtccaccgtgcttgctcgaggtttccccatcttgattggtataattatgggtatagtcaattactccaaggttcaacaaccctggaagtctctgaggacccccagaaagtgtttgtcatatttggaggagatacttcagagcggcaggtgtccgtcatgagtggaacaaatgtctgggtcaatttgcaaagatatgtagatgtaagttgaaaagaacgcagacatcatttgaggtgtaatcatgtatcttatgaaatcattaattcctgtgtatattgtcattaaacgataatagtgggtgcaataggattgccctgactctgatgatcttgttctttacagcttaatgtaactccctgtttgctttccccctcacttagcaactcattaggcgcatcttcgaacttggacaatagagaagtctgggttttgccgtaagtatattctcagacatatgttgaaataatatattcagtagtctgtacacatagatacaaatgttgacctcccagacgatagaggggacaccggtataacatttcacatggatgtatgaaattattttagcttttctcatttgtaacgctatagacggtcaacatcactaatgagtttctttattctcagctactcggttgtgctaaggcacactgctgaggaagttcttgcagcgtgcttagaagcagtcgagcctgttagggctttatttacatctctgctgcagaagcaagtgatggaggatcttatggatggttttaagaatcaaagctggtttgcagggtttgatataacagacgagctgcccagaaagtactcattgaaagagtggatcaagcatgccaaggaagctcaagcaactgtcttcattgcaggttagtcttgtaagagagagactgcaatgtttccttttttgtactaacatgactacatgagcaaatataagattatgagaaaaagctatcaacaaactaaatcagaaaacctagttgcaagatcaaaaacaaaagccgggaatgttgatacattttttgtttaatattgcaatgttgatactcttcctgacgcacttttttttggtaagagagtgcttctgttctgcatgcaacacatgcaacattatgattttagttttcaaaatgctaactggcagtgcatggaggaattggtgaagatggtacactgcagggcttgctggaggatgaaggagtttcttatacaggttagttgctacttttgatgtagcatttgggcttctatttaattctccacataatatatgttcacggtattgtttaattttccttttctgttcttaaataaaggtccaggcgtactagcttcaaggacttgtatggacaaggttatgacatctcaggctcttagtaatgtatggaaaccaatcgatatactcttcaagccgatttggaaaccgtgagtattattgtaacaatttttgttgttgttgttgttgtgtgtttcttgtaatcaatagctttcagagtttggaattcataccataagcaaagatgtgaagagaacagaggatataatgcatgagaccttcccaaatgtttgggatgaattaatcaagaagcttcagtgtctcacactatgtgttaaaccagcaaaggatggatgttccactggcgttgcaagattatggtaacttgtatttaaaattcttttatcgttaccactaagttttttgggtgtgtgattaaacctttgtgtttttctgcagttcctctgaagaccttgctgtatatgtacaagctttgaaagattgtataccaagaattcctccaaacactctttctaaggttaaaaaaaaaataattttgttagtacaaccgtgaagcattcattattaagttaggattatccaaatccgtatcttcacttgtgtgtgtagacacatggaatgattgagatgccaaatcctactccagaattcttgatttttgaaccatttgtcgaaaccgatgaaatcatagtttcatccaaagccaagcagcagctctcttggaaaggtaggaggcggtgggtagagatgactgtgggtgtaattggaaagcgtgggtcaatgcattcactgagtcctagtcttactgtcaaggaaagtggggatatattgtctctcgaggaaaagttccaaggtactctcacttgtctttctttgccacttcatgtcttcttttgactttatgagagaaataattagtctttacagtggcatatgaaattaaatcttgaataggaggcactggcataaatcttactccacctccaccaacaatcatgaggtttgtctatagtttcttttgggatattattagtacatggagtagaataaaaccatacgaaacagagcattttactttgtaggaaaaggggctatttaagctctttaaaaagctattcttgttacggttagcaaattcaggttttcggtcgaaggaaactataaactaatttgaaacttaatgtgttgtcagctccaaaaaagtgagtttcgttttagttttggggtataaaaaatcctataactaaatcaagatatttatcagtttattggcttttgttgactttggtttaaccaaagaacacagagggtaaagtataaagaagcttatgactaatgttgtgagatttcagtaaggaagctttggagagatgcaaacaaggcattgagctgattgcagaaactctcggcttagaagggttttcacggatcgatgcttttgtgcatgttgaaaccggagaggtacgatagggacctagagaattactttacattctactaatggttactctcatcttacattccaaaatcaattgcttggttctcactagttggttgtgcaggtgctggttatagaggtaaacacagttcccggaatgactccttccactgttttaatccaacaggtgacttttgcattcctatttgtccaacagaagtgttgtttacaatttcaatctaatctataccataaacacatattcgaaagatttgtacttggaattctcctcatgagtacatagacgataacatgttctttgtttgttttgggatattggaa

SEQ ID NO: 71028 - DNA, 572 bp, Arabidopsis thaliana landsberg
ggccacctgtatcggccgaccgcctacaaatgggcgatcggcctcggcctcaaggtcgccgaggcctagctcgacggccgcaagccctcgccggccctgaagctcgcctatcgcctcgccgactggatggtgctcgacaacatcaagcgcgcgatcggcatgcatcgcatcaagttcgccggcaccggcgccgcgccgatcgcccccgacctgatcaagtggtaccgcgcgctcggcgtagacatgcgcgaggtctacggccagaccgagaattgcggcctggcgaccggcatgcccaaccgcatcaagctcggcacggtcggcaccatcgcgcccgacaccgagctggtgatctcgcccgagggcgagatcctgctcaagggaccgcacgtcttcatgggctacctcaaccagccggagaagacggccgagacgctgcgcgacggctggctgcacaccggcgacgtcggcatcaaggacaacgagggctatgtccgcatcaccgaccgcatgaaggacatcatcatcaccgccggcggcaagaacatcacgccgtcggagatcgagaacca

SEQ ID NO: 71029 - DNA, 440 bp, Arabidopsis thaliana landsberg
tacattttgggcggcaaggagggtccgactattttacttggtttggagcattttttttgggggtatgttgaaacctttatggtgctatgcgctgaatgtacgcgtcttcgagaagaactacacaagactagacctgactacttcaaacgcttattgctcctaaataccgaacgtcatcatcttttaatcattaaactagagccaaaacgcatcctagtgggctataatgcctttgacttcacacgttactgcaaaaaatatgacaacacattcagtcacctatttgccgctaggcataacactagatactgcttttgtgttgcctgataaggttgggtgaagctgatcgtattcagccattgaggatactttatatacttgttgtcctggctaactatcatagccgtcatagctatctttttcaactgagttagcgcggt

SEQ ID NO: 71030 - DNA, 202 bp, Arabidopsis thaliana landsberg
gaatcataaagacgcccgattgaacctgcagcaaacgcgagcgatgcttggagccggacagtcggaggaggacaagacatgacgtgccggggaaggggctgcgccggctgtgatcatgaaagatgaaaatgttattgcatacaagaggggctttgctagggggcaggaacaaccgcttttgatacgctaaaagcagaattgc

SEQ ID NO: 71031 - DNA, 128 bp, Arabidopsis thaliana landsberg
gagacgtactgccgtgatcgggtctgttcacgtgtctaacgacgagcctcgacatcagggggctccgggcgtatttcaaagggctccccattctaccccccttgaaacactgaccaatgagtctgaca

SEQ ID NO: 71032 - DNA, 580 bp, Arabidopsis thaliana landsberg
tgtatttgtgaaccatctgaagttatgtacgtatggagagtaaaactaattcttgtaaatatttgcctaagaaaatgaacagcagagtttattttaagtttccaaacgtgttgttactattgtagactctcgaaagattaatatataaccttctagaatttcgtagtcacaaacaaaaatatatgacaggataatgtttaggggggaagaacctgatggtgtaagtataaacgacaaattaagagaataacataaagactttagcttagatcattggagatactccagtcgataatacgcgttgatttagatttatcctcgtgagcaagatccttttttgttctatatgatttagtggtgcacgttgctctctctatcttaaaactagcaaagttgacgtgagaggaaaattcaaatgacatttcaagagattttatgaagatggtggacatattacattaacatccattctatattaaaaaggggtggtcttgaagttgaactactaggttcctctgagaaagaaactggtagaaaattgaatgagaccggaaaattcgtattagtttttattttttac

SEQ ID NO: 71033 - DNA, 484 bp, Arabidopsis thaliana landsberg
cgggatttatctaaactcccgtcaggagaataacgggcaacagctaggtttttacggccactgactttcttaattcctgccgcaactattttcccatcactgtgtactgctatcgtattaatctggtcagtaaggaacccaatacctgctatgactttgccatctataccaaaggctttgtccaatttttgagcctgaatgtcggagctaaaaaagatgaataacgcaaataatattgttttcatagaaaatttattgtagacttattggatggcgaagtaaaggtattcctgtttcgttcccaaacattgctctgaggtaggtagaacaaagaataggccgcttagcgtatcatcgatacagctctaatatctagttcaagaaagaaaatagcaacttcatacattgccttgagatgaccattttctttcattacccgaaatttagctgccgtgttttgtaatgcaaaaaatatcgtagggca

SEQ ID NO: 71034 - DNA, 3978 bp, Arabidopsis thaliana landsberg
cctgaactagggtttaacatatggtaaccgtagaagtgttttcatttattaaataattaccgcagaaattttactcacatgaataaaaaaggggtataatttcctgaaacaattaataataaagactgtacctgaagtggcaagctagctccagaccattccgtgaggtttgtctgtatcaaatatttcaacgagaatcaaaatggcaactatcaatgccacatggaacagatgtgtacacagcaaatcgatcgaacaaccaattacaaagatcctcatagagtaggtataagcatgcatacaaaataggctaaaactcagacataccttgtatttaagggtaaacaagcgagcttgagggaaatcatttgaaagccactcgctcggccaaaatgttcccagctttcctgcttcctggtcaatcttctccaccaagccagatttggtagaagatttatcctcagcaattcgccaagttttaaagggcccaccacgcctgccatgaagaaagataacatcaaattcaggatcatgtacatgcgaaccactactggaaggatctatggagctagacagattgctagcatcaacaacatggtctccgactgtatcagtaacatttgctggttcaccttcacttgaggattcgttcttcttaccactttgacgttctttttcatgacacttccaatggggtagtccgggattaattaaaaatatcatgtctccatagcgaggacagttgctgttcatgttagagatgtctggcttggaactgccaccgtctcctgatccactaccatcttgctgattgcaatatacatttaacagagaagctcttgcataactttgtgtcttagggtcattgcaacaggaaatatttccttttgcacaatcatcaagccatttgcaccatgtctcatcagctaaaatgattttctggacttgcggtagaagcgaaagaatagttagcaatctcgcagcatgccttcggatgtgcgcactagctgggactctgacactacatggatcctgaatatctgtgattgaagattcaccaagactatctggagttcggtctcgagcctcaagggctctggatgcatcataagcttctattgcacctagcttctcataatcatcacttaacagaaagcgccttagtaaacaaagaataccaaaatcaactattttgttctggcatacagaatcttcagcacaaacatccgtcagtgacttgattgccttaatggttgccaatgcagactcagcagcattaaatttaggagggctatccttctttaaattcttaattggtaccgcaaaaggctctgaaaggagcagatctgccagtggaacattattgacagactctgggactgtacccagttgagccatggcaagattaacaacagcaactgctaacagattggttgactgagtagcagaagtaactttggactgatctacctgcatgcgaaagaaaatagcttttgttacaaaaataaattgaaagatataactaaactaaaatagacattattctcaactattctctgttcagatgcagaatcaatgaccataaattttatgaaccttaggtttctcgtttttaggtaggctagctcctttagctgacaccgtcttactgtggttcaaaatctcattcattataagggtcaaccatccctgagatatcgggacagagtgtggtccatagtcttcaaaggtgcgtgaaaggattcttcttgctgaagattgaacagtatcagatgcaacttttccaagaacccatgaaagtagtatgccggaccatttctgactctcttcaagagataaatgcatgtcaccagcacagagtaattcaagagcctttgacaaaccttcttgcactgttttgtgttttctcgttttcctagcactatctctcatcagatgaagacccttctgcattaccatcttctgtgctttgtcacttctgtcgacagaaactaaaaaggcagacaacgcaacttgagccagagagatatcctcagttttactggcatgtgaaacagtggcaagtaaactggaactccagtcggaaacagaatcacttaatggaagcttgagatcctctaacaacagccgagccaccaaactcccatgccacttcacagtcctctctggtgccattaaagctgtcatgacaacttgcccatcacgatcgagttcttgaatatgagatctatttgtatcagaagccattgcccagtttgccagtgcccacgcagcaaatggcactgcgacatgttgacaatgtaaatcatcccaaaggccaggaatgacggcagatgacaaattagcttgtgaagaattatcatgtttactaagcaatgcaaatgttttaggagtctcctctcccgcattagcattaaggtcacccaacggcgcaagcccactggttcttgataatcccagaactgtggttccttcaaggattttaattccaattcccttaatcccacttcttccatcgtcactgtcatcatctttttctggctcatcaaaatacataccaccttcctcaattacttgaattgcagcagcaatatctctcatcgtagcatttccaggcaaggatgacttgaaaggtgtcttttctatagtgtcacagttggaagtgacgatatccattatggcagccacaagcatgctcctacctttcaaagaatcagaaatatcgaatgaactacgtcttgaatgctgctcccaaagaaaagctatatatcaatggcaaaacacaaccagaagcataacagtatcaagaatcagatgtatcaaaaagcttctagtgtgttaatgagaaagagaaatctacaacttgacacatgataaacaaccctagcgatatacaaaactcatttttctacaacaactacttgctgatcatagatatgtgctttgattcttctaaatccaaaaatgttacctagagtcatatcagctggctagtatctatccattagatctaaccagactaatccatttaataacgagaacaagtaatcactcgaaatttaatcatttcaagcaactagtggaagcaaaacggacctttttgttttttggttgacacgagaatacgaacttcagtaacttgggcactgcatcgggccttcctagagcgtctttcctcaccgttggatcagcaataagataagctagagccctagccgcttcgtcctgtgccccaattctgtcgccgggaatggccaccgtctccagtaaccaatcaaccaccgcaccactgccagctccaacgagagcggctctacgagcagcatttgcggacgctatatcggctaaaagagcagccacacgcagctcgaatcccgcacgcacctcatgattagctgaagagagcacagacctaagcgactgccacagaaccgatgccgcaacaccggtctgtctagcatgatgaaccactctcctcaacgaattaccggatttctgaacagcgtcctcgatagactcgtatatacggctgtttccgctagggctacgatttgattgatcatgatcagaagggaaaacagcggaatacgcaatagcggtggataaagcggcggcggagagaacaaaaacggatttcttagagaaggaggaagaaggcgagacggtataaattgaccggagaagacctcgtgattggtgtggcggcggagacggtgtgagtttaggtttaatgagattcaaggaaggacctgaggaaccgttggttggcgcagaagaggaggagaaaaatcgaggaagacggtggaagagacgacggtgtgaagatcggagaatattgaaacggagacgaatcattctctattttcttcttcttttgcgtccttttcggaattaaaatttgttctcacgtttttatttgaattaaagaatgtatcatttggaatattgaggatatgcgataacgaagggggagatttt

SEQ ID NO: 71035 - DNA, 2696 bp, Arabidopsis thaliana landsberg
tgagagatgaaactgtcaaaattcgttctttgatacatagactactaccatatagtgctccagctaataatgtacactggtcaaacaagacaagccatactcgaaatgaagacacagatatgattagacgcagatggatataaccatctgtgagtgacccgtaactaaagctcagaaatttgagacataattttcgagccaatgtagtaaaatgtgagtagccttgcaatacgttcagaatttcagcttaaaacgattccaagtctaattccaatgaattgagacctaaaaaatgagctatgagagacacaggtacagtgaatgaaagagagagggattaagaagaacttacgcggtcgaggaagcgggaatcagcgtcgggagagagagcgccgttgattctgtcatcgaattcagaactgatcttgtgggagagtttcttcgcggcgtagacggtaaccggagaatagaggcggcgggagtagcaagaagaaaaccggagcgacggcgaaaaagaagaacatggagtgaaagggaagagaggagaaagaggagtgaagcttggattcagcttcagagacaagactagctgtgaatccatttttctgggtttaagcagaaagtcgaaaagaccaacaacaacaagaacctcatataattttcgatatttaaaataattattatatattatttggttaatattatcagctaactaaaatattccatccataccaaaaatatgcaatgaatatgagattaaaaacacacaaaatcagcttaggtttttgacttttgctaagcttttgaagaaaactaaaaaaagtcttgtttcttggtgaagcaaggaccaaagctcaaagacttttgatcatctcctgcaattgcttgaatcatattccatgacaatgcaaccccaaaagtcctccatcttctccgaaactactccatcattcttcttcactctgaaaaccacatgccaatgaagttattcgaactatattccagcataattttgaaacttactcttaaacaacaagctttgctactatactatgagcctaatagattttgatgcttattaagattttcacaatcctgcagttataaacttattaataacgttgttgggatcatttgtacatgcaacaacaatgaaccatttagctattcatcatcatttcatgactagttcctttggatcggcacaactgcattgtactctcaactcatccttttttttttttgtaaaagttggatgataatgcaaatcaatagagcattgaaattggctacatcaaaagaggaacgaatgaaagatacatgaatcggaaactgagaaagtgatgagacaaactatgtacctttcatgttattccctttaagtatcatgtgcttgatacaacaaggaaaaacaactggtgatgtgtgcatgtgcaatggattatatctgcaaacaaaaggacattgattcaattcagatttagcctacagtccatcctaaaatggatacaacaccagataaagagagacaaacacacacgcactgcaccacttgattatacatacagagatagcaatccataactcgaaaggacattaaagacagtgtagaagattgtcttttgaaatcagattgatctcaaaaccatagaaatgaatgctgttatcttaatgaaaacttttgagattacgagttgtctaatttctccgatcaaaacacataaattctcagcgaatagtcacttttcccgcttatccatactcttgatcaacacagcttatcgctagctgttcgatgaccttatttattgataatcaaaataaccccttatatcacgtgacctatatattaatcattaatgattaccaacctccaacttttttccttctgtattagtatgattcatgaacaaatatttttaaaggttttgtctcccaaatttataaggtaaactttttggaatattccagagttagataataatagtttccattaaagaaagacaattaagttaattaaaaagttactaatctgtgaattagccgttgatccgagaggctccgccattggctccaacagaacaaataccgtgaatgcccccactagtgcggtgagaagcacgcgccacctgggtcgtttataataactgtggatggcattcgtggcccctactctccaaaacaaactcacaacgctccaaacaaaccattgtcactcatccataaacctctctctttcttctctctctctctcgtttggatctggccgttgattttctcccgacggcgataagtttgttgcatgaacgccggtgatggcttctgtttgcgtcaacaatgttactgtttctcaggattttcctacttacggatgtttcaatccacgagcttctttcagccgtgacgacggtggtcggagttctggatccgtcgcatcggagattccgaaggaggaaacagcagtcggagctggtgatttcgagtttaggttagaggaggatccagtcggaatgctcccagccgatgagcttttctccgacggtaaactcgtgacgaagcagcaacaacaacagacgacggagatcggcgggaaatgcaggaggatggaagtcgtggagattgagatctccgggggtggcgataattgctcgttttctccaaaggcgccacggtgttcgagtagatggagggacttg

SEQ ID NO: 71036 - DNA, 607 bp, Arabidopsis thaliana landsberg
ctagatgaaactatccagataaagccaggcgaaaaagtggcgcttgatggtgaattgctttctcaaagcgcctcgtttaacaccgctgctcttacaggcgaaagcagacctgatacaaagtacaaaggcgaacccgttttagcaggtatgattaacctcaatacggtatctgaagtaaaagtaacagcactgtttaaagacagtaagctaagtaagattttggagatggtgcaggatgctacagcacgtaagtcgcagactcaattattcatttcacgtttcgcaaaggtttatacgcctatcgtattctttcttgcattagcagttgttttagttccttatttttttgtagacaattatgtgttcagagactggttatatcggggactggtattccttgttattagttgtccgtgtgcattggtagtatctattccattagggtatttcggcggtattggcctggcatctaaaaacggaatattatttaaagggggaaactttctggatgtaatgaccaaggtgaatgcgattgttatggacaaaaccggaacactcaccaaaggtgtatttaaagtgcagcaaataatggctaatggaatggatg

SEQ ID NO: 71037 - DNA, 2650 bp, Arabidopsis thaliana landsberg
gtgtatgagatgccgaagaagtttactttcgatcttctctggttatttcacaatacttacaaagagacttcgaatgctacctctaatggtagccctgtgcatcgtctaatcgaacaggtactataagaagcttaattgatcattttggttggttgttagatttcttgtgccattggtaattttggttggacgattgaattgaattgaagccaattcaaccgagaatcgtgattaggtttgtggttttgttcaattgtttgttcttcacttgtgtagcctgaataaacttgtctatttttttttctatattgcagcattctattgactattggctttgggctgatctgatatctcctgaatctgaaaggcgtttgaaaagtgtcgtgagagttcagaagcagcaggacgccgactttttctatgttccgtttttcactacaatcagctttttcttgttggagaagcagcaatgcaaagcactctatagggtgtgagtgagctttgattatatatttgtagcattagatttaattttcagttttagatagttttcatctccatgtcctttatttgaaaagtacaagctgatttaaaacttcgtgtttaagaatgtttgaagttatatcctgaaagatcctgtttgtagattttaccacatctcaggagctcagagcatctgaatggtctattgcatgtgatttcttaaaactgttctatatttgttcttagttgattcaggttaagcctgcctcaatgggagatgtattagttgaaaaacatgagatgccagattttactggtaatatattttttaactctttttaaactgtaggaagctttgaagtgggtcactgatcagcctgcttggaagaggtccgagggaagggatcacatatttcctattcatcatccttggtccttcaagtctgtccgcaaatttgtgaaaaacgcaatctggcttttaccagatatggactccactggcaattggtgagtttagatttctttctataactgatttcaagtcatgtaatctgctctcttagctatacgttttttattctgtttgaacttgacctcgtaggtataagcctgggcaagtttcattggagaaagacctaattcttccttatgttcccaatgttgatatctgtgataccaaatgcttgtcagaaagtgcaccaatgagaaccacattactttttttccgagggcggcttaagcgaaatgcagtgagagtcatgccccttctaatttatcattttacaagttacatcaaatgctcttgccttttcttgtgtcggtggcttttaggatttcccataatagttggtatactttgtttgttatataaaataattggaatacctcattatactgggaaagctctcagtcgacccttgccttttcttataattttgtgtctcatgatttggttgctgaatttgtattaggggggtaaaatacgtgccaaacttggtgcagaattaagtggtatcaaggatataataatttctgaggggactgccggagagggaggaaaattggcagcgcaacgtggcatgcgtaggtatattgggtggctccttgacccatttggttgcagcacatttagtttttctttcaactttctctaactatttctgcctttctatcagatctttattctgtttgtgtcctgctggtgacacaccatcttcagcgaggttgtttgatgccattgtcagtggctgtatacctgttatagtcagtgacgagttggaatttccttttgaaggaatacttgattacaagaaggtatgctagaaaacgtattacattggtgctctgaattataaccattttttgtctgaattagtttagatatgaagcaaagtttgtatgactgttcgctctcttttcttttgcttttgtttacctttcaggttgctgtgcttgtttcttccagtgatgcaatacagccagggtggcttgtaaaccatctgagaagtcttacgcccttccaagtcaaggggttgcagaataatcttgctcaagtaagtacttagttttccttatcactaactttgatgttacaaaatgcatagttcgccttacacgaaagggcatagcaaccttacttgggcagtggatctttatatatattaagtaatatggttgttttaaacttttccagtactctcgccatttcctatattcgagccctgctcagccattaggtccagaggacttgacatggagaatggtatgtacctacaaaacttacatacctttctataactaagatggaaaagaaatcaaaagcttaataatatctgacagaatgtacatgtggtaacttaattttgatattgtgaaaaaaaacagagtataaaaacttcaccttttgtgttgtacaatggcaaggtctcttccttaattatcctgattgttcagcaccatgtgtgttcggcttatccattaatcgtctaattaagtatttgccttgatctttgatcagtcagtgagaagaacttactgcaatgtcgaaatctaagattcagaaaatcttgatgtgtttgttgcgttgacagatagccggaaagctggtgaatatcaagcttcacacgaggaggtcacagcgggtcgtgaaaggatctaggagtatttg

SEQ ID NO: 71038 - DNA, 608 bp, Arabidopsis thaliana landsberg
  unsure (1)..(608): unsure at all n locations
tattatcatcaatacactaaacttatttaataattgttttatcccatatatagtgcagtgcaggttgtttatcaagttaataagttattaggtcaaatggttagatgaatcaaatgttttattaaatgtagccattattttgttttcaagtacgagataaagattttgttttgttcaaactaaagttactaaacaaacacaggacaaggaagacgacccaaacaaaaacaaaacccaaaagattaaaatgaacgtcccaaagttactatttacatgtgtttttatcacatctagtttcacactatataaccatgacatttgattatgactaaaatagcggaggtgaatcaaatctagcaatcctacaaaaaaaacaaaagaaaatcaagagactttaatcctccatgaaccctaatagtaaagtagcggctagtagttcctgtagcgaggatctagaggttgataaagatggtaaaattgaggtccctctggttgtccccatgggtattattgtagtccgcgttaggaaaatccgtgaaacctctgtcgtagttgtcgaccggccacgttagtctttgattcanggaatagtcatggctgggatagtg

SEQ ID NO: 71039 - DNA, 373 bp, Arabidopsis thaliana landsberg
cggatggcatatgtttccggctgcgctgcgtcattgggaaagtcgctatctttagcggtggtcgtttttccgatattgagcgtgatgccggaaacgaccataccgtcggtttttaatggctatcgcacaccgctgattttctgcaggctacgttgcaaatccctggcagcttgctgcatgaggtttggcgcattgacctgcagaacgatggtggcacttggactggccgtttttgacgatagttaaaggcgcggcgtatgcggcggatgatgcacccgctaacgcgaggtctaaaagtacttgtgagaagtgtggctgcatgagatgatgataggacattttttgattagacgagacacaccggtcactactg

SEQ ID NO: 71040 - DNA, 541 bp, Arabidopsis thaliana landsberg
  unsure (1)..(541): unsure at all n locations
ggtaatgtattcgggagcggcattattgttatctactacctggtagcgcaggtaatacagtttctgttgtgtttccctgcggatcacttcctcatcgctcagcgctgttttggcctttacatcccagttgatcatccgcttgccgcggtatatccagcctttctggtacaggtcgatgaatacccggatcacagaacggtaataggtttcatccatggtaaaggaaacacggttccagtcgaggctgcatcccagctttttcnnnnnnnnnnnnnnnnnnnnnnnntatttctctttccattcccatgcatattttaggaattcatcgcggttgagcgaggatttggcaatccctttttcgcggagcatctgcaccaccttggcttcggtggcaatggatgcatggtcggtgcccggcacccagcaggcatttttaccctgcatacgcgccctgcggataaggatatcctggatcgtattggtcaggcaatggcccatatgcaatacgccggttacattatggggcggtattacaatggta

SEQ ID NO: 71041 - DNA, 364 bp, Arabidopsis thaliana landsberg
gaaatcacatcaactgtgtcctcatttaatcgagtttttggaaagaaacaatcttattttaccatatctaaaacatcggccctcgtataagctttgtccgaaatgactaccaaatcttcaacaataggtactgaaaactcttcgaacttgcatgcttagagcaatgcagctgaaccaacaagctgaagctctcttattgcaacgacaccgcttggcaagaaaatgtatgtcatagggacatgggatagacaatgacgcagtaaagaccttaaactgatcactgtcctgaaacatacaggacgctgcctattcagcctatatatatacgatactacagtaacattgagaggtgcttgaatatacc

SEQ ID NO: 71042 - DNA, 585 bp, Arabidopsis thaliana landsberg
aaatgttttataaaatatagctatcttttttttttttttgtaaaacaaacttttttagtcatctttcggttcaattcatagatgagtagtcgatgtgttcaaaataatcattttatttattaccattttattaatggtaatttttgttctaactatttgttttgtttgaatgtgtgatgaaattaatttgtaaagcgtagtagtagtattaatgggtaatttggtcattgcgtagtctcccactggttctccgtaactgtctcaaaattactcatttgagacgctcattcgttttccttcgttccctctctttcttcacactcctttttttatttatttccattgatctctctcctctcctcgatttttccctcctttaatccatctctgcatattcttcaagcttgggttcatcttcatcttgatctgaatcgatccggtatgtgaactctttctctttccctcaattctctataaatctctaagctcaattcgttattgtacgtcttcgttctgcgtttgatgccgtatcctgaagtttttttttttttttcggttcatgatgctttcttatcgttttccact

SEQ ID NO: 71043 - DNA, 644 bp, Arabidopsis thaliana landsberg
ggcggcacaccgggcggtcggtgaaggcgtacagcttggtgtcgtagatttcgctatcgtagtagaagttttccgagacgaatactccgccctccttgtcttcgccgatcacgaaggagcgctcggggctggcgtgctgcaggcgcagcaggccctcggcgtcggtgcggccgctgctcatcacgcccaggccgtcggtccagagcacctgggtatccggcaccggggtgccttcgtgcttgcgcgccgaccacaccagcagctcgttgccggcgatcttgctcaccgccacggtgctggagacgaataccacggtggtggcgcggtacttgcccaccagcgcctcgaccaggtacagccccggcttgagcttgcccagcggcacgtagacgttgcccggcgagacgttgatgaactcgctggaggagccggccagcttgacgtcggccggcggctcgatgggcttggcatcccacagcggatagcggaactgctcgaccagcggcaggccgggaatcggcgcgtactgtggctgggcgtcatagggcgtgggcgcggccatggcctggcccatctttagcttcggcaccacctcggtgacctgcttgcgccactcgtaagagaaggcgcgctgcattacccgc

SEQ ID NO: 71044 - DNA, 571 bp, Arabidopsis thaliana landsberg
  unsure (1)..(571): unsure at all n locations
cgtaacacaaatttatttgcattcaacagctaaaacaaagtagtcatcatcatcatggtgtgtgtcccatatgcatatatgtgtgtgtggtcgcacgcgtgtgttgcacaaagaaacgaagtcaagaattgttttgttcataaaaagttatagaaacacaaaagaaatgttgtcttttctttctttttttcattattgttttagctttgggtctcatcatctcattcaatgtcctttttggacccatcttctttttctcatcttctgttttctcatcttcataattttgttccccacgtatgttcgtgtgtctatacatctaaagcattctttttgacaatattgtcatagttaattatttatatgcttacattactaatcatgatctagtataaaagcatgatgtacacacaatagattttaaaatagacccacaacattcgagacccatcacccatctaaccaatacaattaaaaaccttaaaagattacattttcatcatataccataatatttcttttagaacggatctcatgattgaaaagttaggcttantcctgaatctagaac

SEQ ID NO: 71045 - DNA, 392 bp, Arabidopsis thaliana landsberg
  unsure (1)..(392): unsure at all n locations
acccgaccaggggccgacccgcgagccgaaaggccgaggctcccttccccaggaagnccaggaagacggnacccgagcagcgcngggagagcaagccgaccccaccaggnccacaancaacaaagagcccaacaacagccccaaacnacccgaaaacaacacaaanangcaanacgcacgcaaaancacccccaacacgcaaagngaagacaaacgacgagaaacgacacaaaaaacggagacacgacgccaaagcgacgacaaaaggacgcccaaaacacgnaaaacgcacacccagnaacccccccaaacnaaggcnnggcaggcccacaagcaacacaaaaagaacaagccggaggcgaggcccgaaagcggggacccagaaccaaagc

SEQ ID NO: 71046 - DNA, 493 bp, Arabidopsis thaliana landsberg
gaatacgggaatggccttatctgtctttatggaggcgatccatacgaagcaaccgccgcctccggcctgcgcgcccgtatgctgcccgttcacaggatatccgaagagcccggttttgatgaaaagtatatcgagaatgttccccggtaaagcggtggaccctataaaattctgattttttagatagctatggcgctagatgcgcttcatcctgttcacagccttactgcttttatccctggaacagcccgctttggggcaggaaaaaacacgcgccggaaaactcctttttaaagccaatgccagcaaagcaaaaaaagataccctccgtgcgtatcgttttgcaagaacaagctataaaagaggaccctgcttacgagcaggcgtacagcacgtacggcgtctggcttttcgatcgcggaaattcctgcgttccgcagggtctttgccgccgtcgcggtacagtgccggaacgggaaagccggtttgcgct

SEQ ID NO: 71047 - DNA, 520 bp, Arabidopsis thaliana landsberg
  unsure (1)..(520): unsure at all n locations
gnnnnnnnnnnnnnnnnnnnnnnnnnnnnnnnnnnnnnnnnnnnnnnnnnnnnnnnnnnnnnnnnnnnnnnnnnnnnnnnnnnnnnnnnnnnnnnnnnnnnnnnnnnnnnnnnnnnnnnnnnnnnnnnnnnnnnnnnnnnnnnnnnnnnnnnnnnnnnnnnnnnnnnnnnnnnnnnnnnnnnnnnnnnnnnnnnnnnnnnnnnnnnnnnnnnnnnnnnnnnnnnnnnnnnnnnnnnnnnnnnnnnnnnnnnnnnnnnnnnnnnnnnnnnnnnnnnnnnnnnnnnnnnnnnnnnnnnnnnnnnnnnnnnnnnnnnnnnnnnnnnnnnnnnnnnnnnnnnnnnntaccactgagggcagcattgatgggacatgctgtgggcttcgaacacaattattgtctttatccatattactatctcttgagagtcaatcattatatatgagggactcctgaactcaatcacctgctgccggaactctcaagggtgatgtggaggtctatactgtagaggcactcaaa

SEQ ID NO: 71048 - DNA, 239 bp, Arabidopsis thaliana landsberg
cttcaaaacggattaaggatatttttaaataaatataagtaaaaacattttatttttatttttgcaacaagtctattattggtagtagttttagctgcctgaaactttttttttttttttcgtctataaattgtaactctcgacttgactccgatgtatggaactacaaaagaaaaaagaaaaccgtattcgtaattactacattacgaaccttcctttaattatatgacggtttctta

SEQ ID NO: 71049 - DNA, 1344 bp, Arabidopsis thaliana landsberg
tttttatttggaatgaaaaatggccaccggaaacaattccttaaataacggttttcaaattttattataaaatctaggggactaccatattatattgtataaacgtccatatccatcttagaaatgttatcaataataggtctggaaaatttcatggaaccacacctattttggagctgaattcaatcccccaacgtactttctcgttcttgttatgtttcgttgtcgctttgtttatatttcttcttattttaggggttttttcagttcgattttgttttgtttttagttagcggacgaaaatatacagatggtagtactaacttttctcctagcattctcatctatgtgtgtgtgttatacatttatatcggtgctcttggttgaccttagaaggtactttatatatggttcgagggtccatatggataagttcagattaaacatctaaaagtgcatcttgtgaccaaaaaaaaaaaactatccatatttaaatgcaaaaagatctttggatgaattattatgacacaagcaatcgcgatagaataggaaaaaaataaaatgcatgcatcctcagcattggttgctaaatttccagttcgattttcaatttcgaaaggtgggctccatttgtttactagatgtgtttttttctttctttttgttgtgaatgtttactagatatgtttattttcaattatttgtatacgtgtgggtcgcaaatgccgcttgcgtggtacacaaaataatatcaatcctttgagaaaattaaaagtcaaagtgcataataatatactcagtatgtttttttcctttgcagatattccatgcatatgctaaataacatcatttatatatcattaaaaatgtacaacaagaaaccaaatgcatatgctaaaccaatccatataatatgttttgcaggttcatttaaatcgactaattatattatggttttttttttttttttgcttctgatattgcatctaaattgttgttgaactcttttccgccaatagaaacaatatttcaaatttgtagcatcgctaaataaaatacataataagttgaaacaatatagttgttgagtaaattatataatcatctttgctattgttaattctaaatttatttaacacaaaaagctaaccattaagcaaagaagaaagtgacctgatgatcgaaaggaacattagaaacgtcctcattgtccgccgggaaatattttggagaaggacatcgattaatctatagattagaggacacctcttagtttaaataattatatcgttatacacctaatgaaattaaataaatgctcaattcatcaataaataatttaat

SEQ ID NO: 71050 - DNA, 3896 bp, Arabidopsis thaliana landsberg
acagtgagatggtaccatcgtctcatggcaagtgtacaaccagtcatgaaccgagacttgtcttcctttatgcgcacaatgaacaccttggcagtctcaagtgatgttgcattctttaacatcactctcaggttctggatccgaagggtattaacatatatatctatatcatctcttcatatgtatcccccttgttgttctaatctcaacgtatgtttcattgttttctatatgtatacttttcatcaattttttcgacttttgtgtagaatgatgaaacaagggaacaagggaaatttaagcctcataccgatttacctcgtttgcaaagtttctatctagactattaccagaaaaccgtcatggatgtgatcaagatcattggcaaccagtatacaattttgaaaggtattgcccctgaccattggcagatctagttttaattgtcttctattacattaatatataaatgaaaacaacaaataaggaactagtttgcatcctacaagtttatcatctacattcatatttggcactccattcgttattctgctaattgaaacgatataggaccatctctttttgttaaacgagtttaatgcttgttttcactataatgcttgttttcatagaaattgagtcgagtgcacacagtgctgctattcgtgccatccatgctgcccttcccccccataaaattaacggagattcccgaagacaagctgacaggtttgtgcattatacaaatctcgtttgctcaaaatctctccttctatttatgtacaatatctttctttctctactttcagttacattcaacatgcatgtgacactgctggtgttctcttcagagtcttggagcttctttcggaagatgtacaacttccttctgaggtatataattttacacatagctagttaatagattaccaatatatgtatatggtgatgtttgtttggaagtcgcaagaggtctgcgattgcgattgcgattgaaagttgttcgtttgatagcaactgcgattgaaagttgttcgtgatcgatttgcgactgagttttttgtttgcatgaaaaattagctatgtgactttttaaatggcgattagtcttgcgattgctatatcaacaacgagcatggccatatattgtttttgtcttatgtttataattgttaatacttttgctgtagtttttggaagccgacgctgatgtgaaacaactagctgaaatcttcaggccttataacattattcccctctatatttgtggaaaatattctatgaagagactacctgaggtcattccagagattcactctcttttaacttttttggatgtgatttcttgttttagttataatctgagtctaaagtggacaaatatttgcatatacttatatattttgcagttacaagctgctatagacgcactatctttcccattgtgcactatcttgcccttgcgggttgcttataaccccagcccagcccgagacagcgaagacctgcctgccgtgtttgagatcagtccacgagaacccatattatcattatttttttcttcagtttttttttcctactttttagtattgattatacttttcattatatcgtctcttacttgcgattaaaaatgtgtcgtttaactactatgtaaactttggttatgactggaacgtctcatatttttgcaatagagaaacaataacaaggcatcaataaattaagaacgactctctttcttgatcctattatgaaagtgacgccgggcttcccttagccaaatacgagttttgaactaactttataaaattttggtatattccaaacttctaaagtacagtataagattagtccaaacaatatccacctttttgaaagatttaagaatgtaaaaatttaccaattattacttaatcccacatacatgatacatcaagagaaaatacttttttttttatggttgaaatcatatgctttaaatcatatgaaatactaataattattatattttataggaatggaaaataaaatctactaacttttaatgtacaattaaaaaaatctgtgctgtaaaattgttggcaataatatatgtatgtatagtaatttttgtttttggatagtgttaaaagatttaagattctaaagcttatggtaattccataaaatcgggtcgtggagaagagttgcactaatttaggcaaactcgaaaacaaatcgttgaacaagtttgtttgattttaccgcggaacaaggaagagtcttcaattcccaagatttcacctctcttctctcttttgaccaaacctccatttcccaggtaaaaaaaacttctctcaagttgtttttacttttatgatccaatatcacgtttttgcttccatgttcatgcaaatctcagacccaagattctgagttttgcccacatttgctcctttttgttgttgttgttgttgtgatagtttttgagatgagtttcaatgtttttcaggattcatcatcaccagtctgaaagatggattcaaatcttatatttgatcaaaaggtcatcaacgggttcgcgccggtgctaacttacgcagcctgcgaatggttccttatattactcatgttcatcgatgctcttctctcctatcttctcgtctggtttgcgcgttactgcagattgcagatgccatgtttcctctgttccaagcttcttcatcctctacattggagattcttgctctgcagaaaccacagatcagaggtttcatcttacatgtcatgtcagaatcacggcaacaaccttgctgattgtcgaggcatgtgcgatgactgtctcttgtcgtttaccaaaatgaccggtccgaatccagatatgaacagattgcttctaggtaaattagggtatgatctgctctctagaagccattttgctcaccctaggtcttgttcttgttgcaataaaccgtggagaacgaggcaccatacacagagactgattcggttaggctctcgagggagaaactcctcaagtaaacccaacattcctgctccacggcatcttacccgacgaggaagcggtggaagtttgaagaagatgagagatcatatagcaacaagtggttctgagtatgttgatgttggaagccgcgacggtatggcacatgtgggctacacagagctgaagatacactcggattctgagtctgagttcttgttttcagatgatgatgcattcctccatataactgacttcaatgttgagccatctgagaaacgcacgcacaaatctcgaaggcggaaatcgtttgacgacaagaagatgtcgaatcataaacagcctgtcttgcaagacaaccagtataagaaaattcatgtagaagataatgaaactgtcgaatcttcaatgcttgggtataatcttgaaaacaggactcggcagaaacaacctgttaaggcaaaggagcatgatgatgtactctctgagcttataactatgagtgaagctcgtccgtttttactgggttcacctcgaaagtatgctgcaggagcagtcacacaaaatggtttgtttattatgctttctccgcttatgtcagaacatatgcattcacgtcatattgttccttactttgatgtttttcatgcagaaaatgaagctgaggtaagtggcagctcatctccttctggcggagaatttttgagcccttctgcagaaaacggtgcctctagggaaatccgaattcaagagcatgatgattcctcagatttttctcaaaacatcaccagttcagctatggagatagaagaatttgaggcagctattgagcaaaaagagtctgatcacatggatgtgtctggttctgttgcaaatgaaccgtctagtgatgaggagaatgaagttgaag

SEQ ID NO: 71051 - DNA, 112 bp, Arabidopsis thaliana landsberg
tggttggacaggccgtttcttggacgggcacaaacatcgttccagtttcataactcctaagatctttatcctgtcagtttcttagctagttattgacagaacctaaaaaatc

SEQ ID NO: 71052 - DNA, 512 bp, Arabidopsis thaliana landsberg
  unsure (1)..(512): unsure at all n locations
aaaaaacgaaaaacatataacactgattttgacagcccnaaataatgtgcccccccccaccgcacgcccaagaggaaaatatgcaaagctatcccattgaccccacaactcccatcaaaactccnnnnnnnnnnnnnnnnnnnnnnnnnnnnnnnnnnnnnnnnnnnnnnnnnnnnnnnnnnnnnnnnnnnnnnnnnnnnnnnnnnnnnnnnnnnnnnnnnnnnnnnnnnnnnnnnnnnnnnnnnnnnnnnnnnnnnnnnnnnnnnnnnnnnnnnnnnnnnnnnnnnnnnnnnnnnnnnnnnnnnnnnnnnnnnnnnnnnnnnnnnnnnnnnnnnnnnnnnnnnnnnnnnnnnnnnnnnnnnnnnnnnnnnnnnnnnnnnnnnnnnnnnnnnnnnnnnnnnnnnnnnnnnnnnnnnnnnnnnnnnnnnnnnnnnnnnnnnnnnnnnnnnnnnnnnnnnnnnnnnnnnnnnnnnnnnnnnnnnnnnnnnnnnnnnnnnnnnnnnnnnnnnnnn

SEQ ID NO: 71053 - DNA, 583 bp, Arabidopsis thaliana landsberg
  unsure (1)..(583): unsure at all n locations
gacgtaaaaatctcttgagaaatgaatatacattgtacgtgtttacaagtgtttgctcgattgttcatttgggttccattttactaccttaagcaggtgcaatcactaattaaggctcactgttataactacaaattattgcaactccgtggaagagaaaataatataaataaagctggttccacacttccactcattgcatactcaaaagtatatgcaatatttaataatcagcactactataaaatcaaaagtatataatattatatgaacaatttggcacgagatagaaataaaaaaaaactaatgtttcatgcatgttttgttgatcatttactaagattttagttttgattgtgtcaaatagtgcatggaatgatataatttctgattcatgctctttatttttgctcactcagtttgctcagcagatttagacacttactataattattgtcagaataataaggataaaatttgaccaaaaataaagtaaattaaaaggataaaaagtccatgttaatagaaactcattggacagtagaagatangatcataaagtgtgcatatgcatgtatgaaat

SEQ ID NO: 71054 - DNA, 289 bp, Arabidopsis thaliana landsberg
  unsure (1)..(289): unsure at all n locations
nnnnnnnnnnnnnnnnnnnnnnnnnnnnnnnnnnnnnnnnnnnnnnnnnnnnnnnnnnnnnnnnnnnnnnnnnnnnnnnnnnnnnnnnnnnnnnnnnnnnnnnnnnnnnnnaggaagagggcaggggagacccaaggccaagacaacagaagagccancaagcacaagaacgagagcgaaccgcaccagccaccgcaccaaaagcccgccccacaaggggcaaacaaagcccaggccgcacgccaaccccaccaacagaacgcccccaggaaaaagggccagcagcaaa

SEQ ID NO: 71055 - DNA, 2940 bp, Arabidopsis thaliana landsberg
  unsure (1)..(2940): unsure at all n locations
tctccaatgtaaacctctattttattttgtttttcttctaaaatagtgcatggttttgggtccaatgtatgagtatcactctaatcctaccatttcctctattttagaagtatgtatagagtggggttggagatgctcttaattgtgtcattaaactaatcaaccattgatagattaaaatcaatgatcaaacctattttgaaactacattgaactctatagctaccaattgaacacaaacatgatcgatgattaggttttttaaccttttgattggatgaaaaagtcgaaaacagtggcgacggtttcgttggctttggcttgagagtctcggccgccccaaccgttttcgacggcggctcgcatannnnnnnnnnnnnnnnnnatcaagccgattccttcttttagtatatccctagcctccaccgtcaacgaccccggtacacgaatggcgttttgattcattcttcgttcttcttctcgctattgatcaatcaagatattacgaaattgaatgatttctccaaaatggatacaacaaagataattagaagattaaatcacaaattcagagcaatagattcaaatagagccagcactgattctgattcaattgaaaaccctaatttgatccatcgtgagatgtgaaacagggagagaagaaaaacctttgattgtcgaaactccggcgagacggtgagctaagtaaattggttccggcgactttgcggcaagagaacgaagttttttttttttgtgaatgaaagaagaagtgagagagactgaaactttaaaaccctaattaaaagaccctaaccgattgattgagttagctaaaccggatagtatttaactggttcaattatcggtttgattgttctaaccaaagcgaaatcgattggatttcttcggttcagtgaaaaccgaaccgaatcattcatatgtttgattgttattggctaaattaagagggaaaatcagagaaagtcgaggagagccgttgttgttgtttatgtaagatagtcacagaattgaatggctaatgcaaaacttatataaattctgaacattacatttatagatattgcctagagaaaaaaaggaaaagagagaaagagttacccaaaaaaaatgagcgaagaacagctgcagaaacctatagattgtgctgatgtaaaaggagaggcagagaagatttcgacaacggagggaggcgttaaggcggccgaggacaaagagaaaggtgttgtagccgaggcctccggtgaacaggttgatttgtgactatataatctagtggtttgtgctagtgtcgtcgctgttgtgttaatatccaaattaaaatttgaataattagaatgttgcatttgtaggcggagggagaagttaaccagaaaaaggtggtagctaatcctctgaaatcggaaggaaccataacaattggagaggctctagaggcagcggttctcacggcagggaataagccggtggagtggagtgacgcagccgccattcaagcggccgaggttagagctacggggcggaccaatatcatgcccggcggtgttgcggcttcagctcaatcagccgccactcttaatgctcgtatcggctctgacgataccaagactacgctagccgacgttctcactgtaagtaatagcacataagacgtgatacataaaatgcttgaatccaatatctagttttatttctttcattttcgggttctaatgttttttttcgattttgggaaacaatgattatgaaagggagcgagtagcaaattaccatcggataaagcagcaacgagaaaggacgcagagggagtgactggcgccgagatgaggaacgatcctcatctcactacatacccaaccggtgtggctgcctctgtccgtgccgccgctcggatcaatcagtccaaatgatgcaattcttctttcttgttattgagaagcaagtttatataaacttaaacaaatgtatatatgttgatgtatataacattctcaagtttttaattttacctaattaaaataggcatatacgagttgaaacacaaatttatttccaacaagatcagaatgaaatagcacaagttaaccaaacatcgtcaatggaccaagtacacgaaggcaggttaggatggtctagactgtattgatgatcgaaccgtggttctcagaatcagttaacagagtactttgttgaaccaaaccaacataaaatctcggagaatggcgtattgtagaatacagcacacagagtaattcagaacacgctaaaacaaagaatacaacctatatggtataaaaccaaaatttctcaagaatctaatgtaagaactcaaatctgctgagaaacattcccatctattgccatcaactggatagactaaccttttctaggcctagttccgtagcaactgctcgtagtaaaacttgcaccagctctctcacccgcatttccctggtgaaaaaaaaactctcaaaatcttaacttgatagggtccatacagagaatttgctgtcacccttttgtgcttcgaacaaaaaacaataattgtagaagttatattaccttgataacacaatctcgcacagagagggaaaaaggacaagtaggtgtgcacgggtgtcacggttatcttcgcgtagaacgtttttcaggtagggttgcaacggaagaacagatgcaacctcaggatgaatgctgaggcggtaaagttcttggagggtaaagataatctcttcaagtctagctgttgggattggacggttgcctgccaaaagataaccactgattaaggaatggcaagcgaaaaagatgttggagtttataagaaaatggagagccttacatagattattttcgtcgattaaaaatctactcaaaatgaattcacatctggccattagtgtggtgatagagatcttg

SEQ ID NO: 71056 - DNA, 358 bp, Arabidopsis thaliana landsberg
  unsure (1)..(358): unsure at all n locations
aataaaagcaaggatgggttnnnnnnnnnnnnnnnnnnnnnnnnnnnnnnnnnnnnnnnnnnnnnnnnnnnnnnnnnnnnnnnnnnactgcatgaagtctcaggtatgctcaagcccacaaggtcactccaaactgatatccattcatataacggggtcactctgggaatgcttatatgcataaacaaaggagatatgcaatgatcgacgaacaatgcacgggtgagtaaatcgcaccgcccaaacacagagctattccctcaaacccaacaagagacagccctcatacgacccatccaaacagaaacatgtatgatgccgtctgtcaatcacggatcctatatcgccctgcggctta

SEQ ID NO: 71057 - DNA, 2012 bp, Arabidopsis thaliana landsberg
gggtttcctcacatagcaaaactacaaaccaataaagacagcctcttcttctaacaaaagcaaactgaaccaagaatggagtcgctgatcaagtcccagcacgctcagcaactggcgggtcacaagaatacgaccggtaaaactccgtccatggagatgataccggcgacgggacttgcgatgtcatcggacgaaagcatgatgctgaagctgattcaacaaactcactccccagatgctcgcgaagtccaagtgcgtggccttctctctctcgttgaagatattctcgatcgtgccactcttgactctgaagacaccaacgcctccgttagtattcctacacacaatcaatttcgttcttagtacgtacgtatgatcatgttcctttacgtacttgctttgatttttcagatgcttccgttgcccactgaggataaactgatgcagtcaagcatgatgagcgttcttgatagtgtctcctatgctatcgatcgtgttgcctgcgaggtatagctacattcactttttgtttgccacaattcaagtgattctttgtttagacttttttggctcaccaaaataacatccaagttattaggtttcgttcgggctaaattcggtgtgttttggttcagtttcaggatattcagtctaaatataaatatgttgaccatcttggttcggttaggttgcgcagtttccacctacccctagatatcaatctttgtggttatagatgctcttataaaccacactctctaaagattgttgtacacgtaaccagcaataacttgttacagaagcaatacactgtttacgtggttctctctctgttcttcttttcagatagcctataagtctctgacgggatctgattcacacgaaatcacaatgtccgtgttcgaacacctctcgagcttccagtgggacggcaagctcgtgctgactctagcagcgttcgcgttgaactatggagagttttggcttctggtccaattctactcaaagaaccagcttgctaagtccctagctatgctcaagctcgtccctgtgcagaacagagtgaccctagagtctgtatcccaagggctcaacgatctcatccgagagatgaagagcgtcacggcatgtgtagtggaactcagcgagttacctgatcggtacattacaccagacgttcctcagctgtcgagaatcctctctacaatcccaattgctgtctattggaccataagaagcgtcatcgcttgcatttctcagatcaacatgatcactgctatgggacatgagtatgataattaactttgttttaatcgatctttctattgatcacacgctaacgcgtgcactttatttatcaggatgatgaacacgcaaatggatttatgggaaacatcgatgttagctaacaagcttaagaacatacatgaccatctcgctgagaccttgaggctttgttaccggcatataggtttgtttgtttgttccgtcccattcaacagctattcatcaccctgtttctttactgacaaagactggaatttgcagagaagcagaggagctcagagtccttaaaggtgttgcattctctattcgacaccactcacattgataacatgaagattctcacggccttggttcatcccaaaccccacatcactccattgcaagatggtttgaccaagagaaaggttttcgtgttaggtttttttttatagaaaggttcatcaatacaaaagattttaactaagaaatctctgttctgttatatgaatgttgcaggttcacttggatgtgttgaggaggaagacagtgttgctgctcatctctgatctcaacatactacaagatgagctatcgattttcgagcaaatctacacagagtcaaggaggaacttggttggggtcgatggtaagagtcatatgccttacgaggttgtgtgggttccagtagtggatcctattgaagattttgaaagatctccgattttacagaagaaatttgaggatct

SEQ ID NO: 71058 - DNA, 658 bp, Arabidopsis thaliana landsberg
  unsure (1)..(658): unsure at all n locations
cctacatgaatgcattggaccatccttttgtcacacacagcttggaccaatctttatttattcatttcaccatcattccaccgacatatctctctcgcgggaaagggcattttaaaaacatttagcaatttaggagcgatgctcaatatttatttatttttttattttttttggatgtaaattcaaatataacacaataacggtactatcataaattactagcttacctatctgaattttcattttgtgatttataaatataatggtatttcattatatgatatcaaacttaaaatatctaaataaatatgatttctcataatttatttaatctaaaaatgcgtatggaaataacacaaaatttgtttggataagatatcatctttttgtcaacaaattatattagttctagtaaaaatacatgtaatactaactctaaacgattcaaaaaattcaaaccaaaatagtagaacctgaaaaaataatatcatggtgctaatttatccattttaaagtatggaaaatacctgaaaagtgaggaaacaagaaactcctaaatattttcgaaatcattcaagattccaagtgtgttgagaaggcaactagctagtttacagcctgagagccaatccaaannnnnnnctttttttttttgaac

SEQ ID NO: 71059 - DNA, 187 bp, Arabidopsis thaliana landsberg
  unsure (1)..(187): unsure at all n locations
gacacgcagaagctttccttccctccccacgcagaccaagacagaacggggacgagttcaaanaacaacccaggcgaaccagggncaggaacaacgaancnccnnacgacaaacgganccacnnagcaaganngccaccacgggcagacccggcaaaggaccggaccaaagacgcacacaagaaaga

SEQ ID NO: 71060 - DNA, 410 bp, Arabidopsis thaliana landsberg
gtctggggccatgccacctaattgcacgttcacagagggaccttttttttcttcactgctgcctgtgattgacgaggggcttttcctgctccggtgacgcggtgggcgctaaccgacaacttacagggggggccgatccattaatacaataccactgtggacaagctagaattattaccttgtggagtgacctacagctcaccggacaaattaactaacacagattatgtggggcgcttgcctgcccaaccgatacccaggcgtgcgaaggtgagctaggcctggacgaatatggggcctcgagtgcacatgcaaaacgtaggtcgactgcccgacccagccggccagcagggacgaatgtggtgcttagtgatcctactgagccgagagctatggccgccgatcaacgg

SEQ ID NO: 71061 - DNA, 528 bp, Arabidopsis thaliana landsberg
  unsure (1)..(528): unsure at all n locations
tcgcggctttcggccaccgccttgtccgccaggcccacgatctgcatgcccatcttgccgggcgccaccatgacctgcacatggaggggcacgccctcgatgccctgaaacgcaatcgtaccgacccgcgccaccatgcctgcccccactcgccttgcagcgccgcgccctcatggcgcgtgaacatgccgcaacacgtttctgccgaaacctgcgccaacaaccgcctctgggttnnnnnnnnnnnnnnnnnnnggaacagagaatgaaacaagaacaattatagaaccggcgagtgatttttccgcgcgccggttgcatgtggttgtattttcggaacgaaggcgggacgttcgcgaacgcaacgccccgcaaggcgcttcaggaccggtcgacattcagttcaggccgagccgaaaatagtggctttccgggatccggagcgcagcgtacttttggtacgtgagcaccggaagcccggaaaggcgccatttgcaggccggattgggctgaatggcgattggtcct

SEQ ID NO: 71062 - DNA, 618 bp, Arabidopsis thaliana landsberg
ttctaatcccttaaaataggactcctaattacaaattaactcaaaatcaaaccactaatcaacacacacaagaaacaaaattagcaatctctcagtagccctagaatcaaatcacatagacaaccccagaaaaaacaaaaaatctcggatttcaaaaaaaaaatcgagtgaagaaacacacagtattattacccaaaataaccaaaacaaagcacgacacaggaaacaaaagctttaaactttttccgtcaatttcggtgtaaaacacagagacatagaagacagagagaaaaaacacagacctgcgaatttttcgtctccctttcttcagctttcttcttgtggcatttaacaacgagtcaataaagggctaatgcgaaaaaagacaaaaacatttgagagggccaaaaatattttaattacagcaaaaaaaattgtggatttgtttggttataacactttctctgttttgttaaattaatggtttgtttttgtttgggcttttagataatatttttgcttaaagatatttccttcttgcttttttattatgcttctgtgatcagttacttcttcttttttagaggtcacgtgaaaaccacgtgtctactatgcaaa

SEQ ID NO: 71063 - DNA, 2062 bp, Arabidopsis thaliana landsberg
agggttctgtagtggagcagagaagtctccctgaagaaggagagcaggtttttgtgatatcatcaaatattggagattctttgaaagaggatttagcatgggcaacgtatgttttgttgaggaatacaagtactatagctgtggtatggtgtactctcttggataagggtttgtttgatctttgatatgttctttagttgagaaagattgtattttgttcagttgatatcggttcaaggcgagctttgtgttcgcgggtactggaattgtccagatcaaatgtcaaaggctcaacttcatgattggtttaagaaaaaagtggatgagattggcttggctgatgtgaaggagaccctttatttccctcagtatgcaggtattgtgttttcttcaatcgcacggtcttgaatttgttcagcattgtcgatctattgtatacctgaatgcatggaatattactcttttgtttctatggtgttgaaatatatgttaactttcagttttattttaggttctgcactatctttggatatacttcctgatgggacgcgttctctttttgtgcaacctctcgtacaaaatacaaatgaaccgcagaaagtgaatgggtttttgctggtggcctctactgctggatatgcatatagcgataaagatagagcctggattggagctatggctgagaaattcagaggttagattgttcccatggattaaaggatttgttgcttattttgttctgttttggtgggcttcgttgaagttaaaattgtgcagtctcaactttgacagacttttcatcttggtaattatgcttcgtcgctgttccatctgaatatgggaggaatttgtacatttcatagaacgttaattggaccaaagccaactgtttactttctttgctgatttagtaataagacttctgaatgtcatgttacttgtggatgactacgtagcactggtaatatacaagcttacttgtgaacctaaacttcaaaatatcagtaaccaaaagcattgaacatcttattttccaggccgtaaatctattagtaatgtagtagttgtttaatatgaaatccttgggatactgttcgacgttgttagtgttctcaccttaaatattgaacactcgtatcatgatgaaagaaaatatcaacctatttcctaacttcatatgtcttgcaggatgacatgagctgttcatgatgatgttatctttgactggtgaaacacttcagttcctacagaaatttctcgaggccataaaccagattctggaaaaccaaagagaataatggcaagtgattagataacagtaagagattaatggatggagaattcttgcttgtttccatgttaccttgaggcgtaccacctttctgattgctaggagtaggccgggcattagggaccttacgtcaattatgtcatgtttaacagtgtaaacctgtggacagcattttgtatcagaagaattttaatgagctatgtagcctaaattttaaaatagagtatccaattttcagtttgattttgagtgatctaacaagaggtcaagtattattaattacgtctcctggacttgagaagtagacttgtgtactagatggtagtcctggtagaaccatactgtgaacacgaaccccgtcttctccgattacttgacctcttgcctggaaatatgtggaaaactcagctttgtttatgtataatatgtacaggatccctaactggtccatatctgcaagcttattcatgctttacctgaacatcagttgaactatcctctctgttgtagatctgaccaagatttgatatgttgtttgcaatttggatagcttcaggagaaggaagatcctgcatttcataggtatcgtttaagtcacttcttgtgattcaatgtcaaaagctgcatatgcgctctatatgaaaaagctctatattggtctttcttaactagcctctttgaagtattatatgccttaattagtcttgatcaacattccacaagtgtcaaagttaaaacccagaattctaggaaattaaaatggtttttttt

SEQ ID NO: 71064 - DNA, 389 bp, Arabidopsis thaliana landsberg
  unsure (1)..(389): unsure at all n locations
tcaaatacagctgagnnnnnnnnnnnnnnnnnnnnnnatatttcacggtacccatctgtcgctgatagtgggccatgtgggcgctgccgtggttggtttatgaccgtgcatcaacgcaccatataataattgcattaccaggactggcagtatccacaggttccacctgcacatggatgggcgaacaagaacctgctctttattcaccagtaatcgcagcgcataccaaaaagtatatcattacaggcctagtgcaaacacataatgcatggccaggcgggtgggtattacatagatggcatagaccgttaatccactcgcaaccatgatccatgccaccaggccttgtaatgcgccctgcatgagagggtgagcagcgggctgatcat

SEQ ID NO: 71065 - DNA, 341 bp, Arabidopsis thaliana landsberg
cgattctaataccaagaatgttcgcacgctggctatgactttttcaaaaaggcacctggtcgttgctcttcttacgtcaatgctaaatgccaagacggacgatcaggatacgaggcttaccttgtcactcacaatctccttatctctcacgcagaagcagttgaagcttaccggaaatgcgaaaaggtacatcacatatataaatcataattagttatctatcatctttcggatctgaaaatagtttgttttgtattatgttaaattatgaccatagtgtaaaggtgggaagatcggaattgcacatagtcctgcttggttcaagcacatgaccttgctga

SEQ ID NO: 71066 - DNA, 461 bp, Arabidopsis thaliana landsberg
  unsure (1)..(461): unsure at all n locations
tcgatgttgcacttcgattccagagcgcgaacgccgctcttcaggaacaggtcagtgccttcacgactagacagtttgcattttggaccaatgtaacgtgccatttatctgtctcctgattacacgcgacgcttcttcggcggacggcacccgttgtgcgggattggcgtcacgtcggtgatgctggcgatcnnnnnnnnnnnnnnnnnnnnnnnnnnnnnnnnnnnnnnnnnnnnnnnnnnnngacccttgacgtttacgtcgaggttcttcagaccgtattccagcgcagcttgaccagcacgctcagcagcgatctgggctgcgaacggggtggatttgcgcgaaccacggaaacccgaaccaccggaggtcgcccaggacaaagcgttgccctgacggtcggtgatggtcacgatgggtgttgctgaaagaggcatggatgtgggcgatgccatcac

SEQ ID NO: 71067 - DNA, 197 bp, Arabidopsis thaliana landsberg
aggaagcggagaacgacaaaacacagcgaaaccaccacaaggggagacggacaaagaacgggcaaacccaaaggggagacaaccgaagacaaggaacgggaggcccacaaggcagcaaaagaagcccaagcgcaggggaacgggagagacagcagcggcgaaaaaaaaaaaaggagggagggcaagcgaaacaacaa

SEQ ID NO: 71068 - DNA, 553 bp, Arabidopsis thaliana landsberg
atggccctgaacacgactttgtggtccagcccggtttttttcagggcgcgcgctttgccgtcggacgcgccggggatgttgtatatgcgggccagttcggggcattgttccacgagctggcgcgtgagccggtagttgcggtcggcgttgtcctggccttcgcgcaagccgacgacttcgatgcatggaaactgttcgcggaacaggtacaggaaccccatttcccgctcttcgtgcgcgcggtagctgaggctgccggcgatcatggccaccttggccggacgcggtccgatgaatatgccgatcaggtatgcggcggtacgcccggcagcccggttgttcaggcccaggtaggcggcactgaccgacccggatatgtcggtgatcagggtgaccacgtgcacgccgcttttcacgagctggttcacggcatcgcgcaccagcgggtgttcgatggccatgaatgcgacaccgtcggtccgttcggcctggcgtttcagcgccgcggcgagaagctgggggttgaacccttctatgtattcgacacggcagc

SEQ ID NO: 71069 - DNA, 588 bp, Arabidopsis thaliana landsberg
  unsure (1)..(588): unsure at all n locations
gccgactcgcacgaccggtgcgtcgagtgaatggaagcaccgctcactgatgcgggctgtcacctcgcccgcgacgccggcgaaaccttgcgcctcggccagcacgacacagcggccggtgcgtcgcaccgactcggagacggtcgcatcgtcgaagggtgtgatcgtgcgcaggtcgatgacctcgacgtcccatccttcctcggtggccgcttcggctgccttgagcgccgtgggcacctgtgggccgtaggtgacgagggtgacgtcgttgcccggccggcggatcgcggcggtgccgaacggggcggtccggcaggggagttcgatctcctgcttggaccagtagagcgccttcggctccatgaagatcatccggatccgggtcggtgatcgcctcgcgcagcaggctgtaggcgtctgcggcatcggacggagtgacgaccttcaggcccggtgtgtgtgcgtagtagccctccgacgagtcacagtggtgctccacgccgccgatccccncggcatacgggatgcgaatgaccatgggcagatgcaccttgcccttggtgcgattgcgcatcttggcgacat

SEQ ID NO: 71070 - DNA, 352 bp, Arabidopsis thaliana landsberg
  unsure (1)..(352): unsure at all n locations
aaacaaggacagaagcacaccccgggacccggaaacacaaggaaaaggctcacttccgcgccgncaaaagccaagaacaagggggagccacgcaaaaaaaccgccaccccacacggcaagaccgagaaaggaagaagcggaagcaccccaagaaagcaacaagccgcacaggccgccgcacgacccgcccggcaaagaaaacaccccccacacacaacggaagacccgacggacccaacccaacccaaggcgcaacgacccgaacacaggccaaagcaacgaacacaggagcaacaccgggaacgagaaacccacccccaccaggangcaacggagaaaacccgcgacacac

SEQ ID NO: 71071 - DNA, 334 bp, Arabidopsis thaliana landsberg
  unsure (1)..(334): unsure at all n locations
aatgagacaccaaccccaagacnacagcacaccaacaaaagaannaagaancccctcccctccccaacgacaaggagcaaaaacgaaacaaaggnnggataaagctccagcccgacacacccaacancccaananaaaaaggaaagagcagcacccgcccaaccaaccgacccacgcgacacacgccccaggaggaccacccacccggaggcaacccgccgaagacgccacacacggcaggncacggcccgaaacanccacgccgagaccaccaccggggcccaccccccccccccagggcaggccacccgaccaggacccagagccacgacgg

SEQ ID NO: 71072 - DNA, 414 bp, Arabidopsis thaliana landsberg
  unsure (1)..(414): unsure at all n locations
caagaacaatagacaaaaccccccaagggaaaaaaaacaaaaaagaaccgagacaccagacctcaactcccaacgacgnggggccgcccccacacagggagaacatcggcaagcccgcccgaaccgcaacgggcgaccnngaaaggccacccgccacgcacaggaacanaagacacaaacggagccccgcggaccccagccncccnccagagcacggcccgggaccaggccaancacccgcccgccaacaccagcgagccggacanaccggccacacacaacanagggcagcaaaaggaccaccgcaggccnagacaaaccccgacccaccggcgggggnnagcacccgaccaaggacacacncaccncccggnnggggaaccgaaccaccancaccagggcgaggccacacac

SEQ ID NO: 71073 - DNA, 663 bp, Arabidopsis thaliana landsberg
tggcgcttgtggaatcgctcgcacataaatgtggctattgaaatagacatcttaccatctaacatttttgccagatgctctgttggcatcttttgtccaaatattacacctttaatttctctctttttctgtttttttctttttctttcctcttttaattttcagcatcagcatatctgtatataatttatctatatatatttaattatttagttataaccagagaaaaggttggatacatctacgggccaaccaaaatgcaatattttctatcaaaatacataactaaaaagaatcaatcatttgtctagaatcgggaaaagactccacacctcaagcgggagctacccgctcatcacaacatggttcatataagttaattatagtgtaagttacattacattacattaactataggttgatagttcaagtcgaaatgtaccctgaaaaattctaaaagttcacatgttcgaatggcagctactacgggtaaaagtattagaagatgacctatacttacgaagatgtatgagttttggtctgaaacttcttaatgagttcacacaaaaaagttgctttcatttgttttaaaagtttttaaaaatgctaacatatttaagctatattaaagtgaatattttaacaatatgatatttttttaac

SEQ ID NO: 71074 - DNA, 2837 bp, Arabidopsis thaliana landsberg
ccagcagcgccaggaacgcgaacagcaagaacaagcagcagcagcatcccttcagcgacgccgacgacgacgatgagtagctccggtaatacggctgctggttctgagcagcaatcggatcgccgttgagacctgctctagaactagaaggaggaggaggcatagtaagtgaaagcaggaagctccctctcccttttcactcttcttctgtaatagcggtgttgaaattatacacaacaagagagagagaccctgtttccgtgtctggactctagtattattgacaaattaatgtttcacaattttaaccaccaataaaaatatcaataatgtaatttacagcaattttaggcaaatctcacactcagacaagggttagagatgactcaaaaaatgttggatctgatattaaaaaaacaaacaaatacagacacacagttactatcctttagttacatcatataaatgtattacgtcgttgctttgtgctatatagctgacctcttgctgatatttatattttcgtcaactcttgatcaaacacagatgccacgtcgtttctatactgactctcctcactctcttttatcttcttcaacatcttcttccctgtccgactccgcattcttctcttgcttaactaagctaatatcaccatcttgcttcccccctgtcagagattgagcttcctcgttttcttcatccacgtctcccgaatatgcatatctgtccatcattagtttcatattagcatccctatcacacccaggaacaccaaaattggaccactacataagaaccactagcatgtagccaagacttcccacaacatgctcagctgaaaccgtttccacaaaaccatgcttatttgttggtatgcccgagaggtatcaaaaccttttaagttgatgtaacatacctttgggagttctgcgagggggtccagagatagcaaataatacatagcaacaagaatgcgataacatcccagaaggcagttatagtccaagcagtctgccatcgttcattgaatggatctgttgctttgaaatacacctgcacggggacaaatcatcaggcaagcaagctgggtatattccaagaaagaaggagcttcttttttcctagcttgaaacaaagccagttttagttgagcagtttgtttcctagaggtaagatttgagtttactaaatcagcatcaaatcaggcttgacaggatggtacctcatacactatccacgcaacagaggcaacaaccatcacagcgagtgcatttgagaacttgcggtaaatttccagcttcaccgaggtccttttcatctgcagtaataaagaattttatagctggtctgatgaatcttgcctcaaaacccttacaacttacagagtctgatggctatatttagaaagaaagagatacctgtaactgttccagtgttttcgaaagagaggtaaatatccacaatatgagaaatgcatcgaggaaggcgtcaggaaggacaagaaaaagttttgatcttccggacatatcgtcaatgatgccaacgtgctcagcaatatcaaggatctcagaagctatgaagtaagtaactccaacaaggaggactttagaagtgagaccaccaagagtagatttgacaaccccaaatcccatggaaacacagagaatgagaatgcgggaaacagtctttctcaaggcaccaatggtaacaacccatgtagtaagggctaaaggcctcatccccgtgtgattaaaattagcataatccaagtaccaaaagatcatctcaagcaatcctagaagaatgacggcagtaatgcaatgttgaagtggcaatatatccatccggaacctcaaatactggaagaaccagacggcactgagcaacaaataagcgagagacatatagacatagaaattcacgagtggagccatcctaccaggaagatagccgtcgggatttttccaaacagtctttccggtcattttgaggcccttaagttgtggatcacaagatatgaataagagattatagattccagtcttggtgataagaatctcagtgtctgccatcttagcagacgagcgttttcctttaaagcggacaggtaagaggataggccattgagggtcatgtggagaaggaatcctaatgatctcaccctgcttacagccttgaagcttggccagatctggagtgcagcaaatagatctttggcctccgtaagctgaaccaccgatattgttacgatcggaggcttcaaagatcactgcttgaactaacccattgctgcggtggcccttaccggtaattgtcctccagagagtgatgttctcaaacctgcagtgaggagggaggatgagtagagtagagtagagagcatcaaaagagttgaaaatgtaatccatagaatatacctgattaaagatcgggaagaggcgaagatgccctcgctgccaccgtagaggaggagagaattaccgacatcgtggaagggctgggaagagtagatgtgggcggaggccccagcgattctaaagtgtaatgatagaagaaatgggcacagcagcgcagacagctggatcagttttcccaaatccattatcggggaacgaggatctctgaggctaactaacaggaaggaagcgggagaagagcagctgcagagtcgctcttgttctagctgctgctgactttggtggaccaaccaacttaatataatggtttgggccttagaatggttgggcctataccgagaggcccggcttgacccagaaagaaatgcagcaatcggtcaaatgcactgccgggaattcggcgatcgagcgataaga

SEQ ID NO: 71075 - DNA, 592 bp, Arabidopsis thaliana landsberg
  unsure (1)..(592): unsure at all n locations
ttttcttgcttgtaattccggttttgctcccctcattgttcttttatcaatctttgtaattcttttcaaatacaacattaacaatatacaaagtggtagtgagacgagacacaagcagttcctatgactcgttacattcttgtgtgatcactatcagtgtgcaaacgagctttgtcacatcattaaaaatcgaaacttgcatccattgcagaaaaagcttgtcaacctaagatctccaagaaaataaggaatgcttccatttgcatctccggcgaattcactgtggattttccacttggctctggcctgcgttgaagatgatagctttttgaagaagacgaggttttatggcttaagagaatatagcattcacaaaagcctccggatcaaaaggttggagatcttctacagcttctcctacaccgataaactttacgggaatgcccaattcctcaaccacactgacctgcaagacatggagaaccagtttcaatgacagagctaatgaaaaataagagctttgaatgagatcaaaaattntatgagatatttaccacacagcctcctctagcagagccatctagtttcgtca

SEQ ID NO: 71076 - DNA, 448 bp, Arabidopsis thaliana landsberg
actggcaaccaatgcctcaaactatgtaccatttttatttttttggatgagaatcacccctataatgggcagggttgaggctaaacgtgacattggccctaacaccatctgatgcaacacagcttgcctccctgaccttagcggggagcatatagacagactgagcccatgacgaatgacaggcgtacaatcacctggctgctaccatgaagagttgacattggactatttggcctttaaagaagcttatgttactcggacggccactggatgaatcctgatgagggaaggctgaagaactcctgcagacagagagatgagactgagggctaatgtacatatacgtatagctcgcgcccttgctaccaccacgataccatactgactagaccatttaagctgcgcctcatcctatctgggtcgacatggaagagaggcagcgatcaga

SEQ ID NO: 71077 - DNA, 522 bp, Arabidopsis thaliana landsberg
  unsure (1)..(522): unsure at all n locations
nnnnnnnnnnnnnnnnnnnnnnnnnnnnnnnnnnnnnnnnnnnnnnnnnnnnnnnnnnnnnnnnnnnnnnnnnnnnnnnnnnnnnnnnnnnnnnnnnnnnnnnnnnnnnnnnnnnnnnnnnnnnnnnnnnnnnnnnnnnnnnnnnnnnnnnnnnnnnnnnnnnnnnnnnnnnnnnnnnnnnnnnnnnnnnnnnnnnnnnnnnnnnnnnnnnnnnnnnnnnnnnnnnnnnnnnnnnnnnnnnnnnnnnnnnnnnnnnnnnnnnnnnnnnnnnnnnnnnnnnnnnnnnnnnnnnnnnnnnnnnnnnnnnnnnnnnnnnnnnnnnnnnnnnnnnnnnnnnnnnnnnnnnnnnnnnnnnnnnnnnnnnnnnnnnnnnnnnnnnnnnnnnnnnnnnnnnnnnnnnttttttttttcccccacaattttttttttcctccccccccaaaaaaaatatttttcttttttttattaaaggtgtcccacccacccaaaaaaaatatgtgtttttttttttcttaaaaaaaa

SEQ ID NO: 71078 - DNA, 544 bp, Arabidopsis thaliana landsberg
  unsure (1)..(544): unsure at all n locations
gaacacaaatccgtcgcccgccgaggtctccagccaggtgaaggccgtgcgcggacaggctcgttccttagcctcttggttgtggccgatctccacgaccagcactccctgtggcgatagatagcgcggcgcagacgcaatgatccgtttcaccaggtccagcccatccttgccgccggcgagcgcctgcacgggctcgtggcgatattcggtggggagcgctcgcatggactttgcgtccacatagggcgggttggagatgatgagatcgtaggcctgtgccggcaactggtcgaagaggtcggagcgccccaggcgtatgcgcttcccgagccggtgccgcttcaggttgatggccgccactgcgagcgcgtccttcgacaggtcaacggcgtcgaccgccgcgcctggatggcgcttggcagcgaggatggcgaggcagtcggaacccgtgcacatgtccnnnnnnnnnnnnnnnnnnnnnnnnnnnnnnnnnnnnnnnnnnnnnnnnncaattccgctttgaacgagcgcggtacgatga

SEQ ID NO: 71079 - DNA, 531 bp, Arabidopsis thaliana landsberg
  unsure (1)..(531): unsure at all n locations
taaagaacacattaatcacattctccttgttgagcaaactactttcgaattctgattcgcatactcgcttcaaatgcggtacaacgtagacatgtgataacacaagtagatgtattgcaaaatcctccatatcttgtttctcatagctacaaaaacagagcaagaaacaaaatgtttaagtatgtatccctaaatgtttatagccaaagatttgtaaaatccaaaacttttgctacttaccaagaagagtataagaatcgaatgaaaactcgaacagcgtcgtgaggaacaccgaggattgaaatcgatttacgatgagattttctcttatgttgcttcatcattcctctgattacatctgaagccattccctaattaaagtttaacagataaaacttcattaagattcaatacaaaaaacaatgttactgattnttctaagcattgnattagagaacttacgatgacattagaatgtgcgtaaatcaaacccatttcatcagtatgaatcaaaacatcagctccatgagc

SEQ ID NO: 71080 - DNA, 110 bp, Arabidopsis thaliana landsberg
  unsure (1)..(110): unsure at all n locations
gcgcgcaccaacaacgaaacggacaacgcaaaacaagggaagcaacgccnnnccaacaaaccgaccacaccaccaaaagcnaaaaacaaacgaaaagaaaagnnccccaa

SEQ ID NO: 71081 - DNA, 565 bp, Arabidopsis thaliana landsberg
  unsure (1)..(565): unsure at all n locations
ttggacacaacataaagaggtcccttttttagatttgtaattctttaacttgtagttattggacaatatagcattttgattgaatggtgctctatggctggatgataacattggtttacttgatcatttggacaggagaggctcttggtttggtacgagcaaatttgtcattttattgagcatgagatgaacaatgaggcctatagtactgtaatcaggtacaattgatatcttcttgaactagttttaaattggatgttaggatttcatttttaatgcatatgttatattgtaatgtgtatgatagttttgtatgttcagctaattatctggagatagtcagtcttttatccaccaatgtgtaattccaccttcctgagggtggtttgctacgttcttgtgtgaattggttttgatgattctctttatcttttggtagcttaatgcagaaccgtgatttcgcaatgcttncacgggccaatctgtttataggaatctcattctacaagatgtggtgtaataaattcttgaaggagttgcagcctgaagatgcagatgacaatgg

SEQ ID NO: 71082 - DNA, 246 bp, Arabidopsis thaliana landsberg
  unsure (1)..(246): unsure at all n locations
ccgaaaaaggagcaacgggcggaggaccaacggggaacaacaacggccccaagaaggcaaaacccacaaagaaaggagaaaccgccgacncgacgacagagacagccgcccccgcaaccnncacagggaacgagccgaccacgcnacacgaccccacaggcnaacaagacgaacaagaggcaagcaccgcgcccacaaaaaaaacaagggccaaggacagaaacccgaagccccacacaaaaaaga

SEQ ID NO: 71083 - DNA, 409 bp, Arabidopsis thaliana landsberg
  unsure (1)..(409): unsure at all n locations
agaccaggccggcaggaaggccggcgcccagcggcaggggcacgaccctcacttcggcacgcncnacgaagaggaagggggaggctacaagcacaagaacgacccccaccagcggccccaaanagggagaccgggacgcccacccagcaancaaagcacccaggcgcgggacacggccnccagggccgcccagccaggggcgcagagaaacccnacagaagccgcccgcaaagaacgacgcccgcagaacgggagccgaagagggccggcacgggcacgcgaggggagcacggcccgggccaacgccgnnccaccggaagaaccgggcncgngacgcccagaaaaccagccccaacggacacggaagccccgaaaaggccggaagacnccacggcaaaaaacggccgaa

SEQ ID NO: 71084 - DNA, 1528 bp, Arabidopsis thaliana landsberg
tcacggtttctcatcatctgccaaacttggataagcaaacagtaccaacgtggtgattagaacaaaagccatgtaaacgtgattatttttcttcatttttttattttataacttagcctcctctttcacctatttactccttgtaattaaaatttgtatgtgtatagagattatatatataccctaaacacacagtagtcaactgaatgttattaacttatccgttatattgtaattaataaaactacgttttgtttctttgtttgttttctattaacaaaaaaaatgatttactctataaaatttgacgtttttttttgtaataaaaaatatgttcagttacgttattactattttatgtattaaatgtaaaattgaaaaaatgctttatggaattctgaatttcttgaaaacaatttggagggtggcccaaatcatcaattttcttttaaggtatttattattcaataaagttttattccggagttatgctaaagaaaagagtgtcgatatctgtattttgtggacgatttagattacgaagaaaatctcgaggaataaaaatttatgtggcgagagatcaattgcatcataatattaagctcatgaatcacgcgagagtttatggtgatttcgctcattgtgtccccattctctcttcttttgtttgattcctcctccctcttggttaacaacaacttcactcacaaagcattcccttttttatttttatcgctactctccgacaaagccttcttctttggatcatctagtctaggttcggttttctcaattagctctgttcgatttcgcggatgaaacttgttcaagtttgtgtctgatctgctctgctctgctcatacttaaaaaaggaaactttatttttctgtaaatggcatcagttgccgagagctcttttcctcttctctgtcaaatcaagactcagcgtcgcatcaattcctctacgctgaggcattcccgtgtttcttaccatgatttgccttctggctcgctgtcttttcgttctcggagctttgttctgggacatcgatgcaagtgtgtgagccgcgtcgaggcttccggctcagacgatgatgagccagaggatgcgcttcaggctaccattgacaagagcaagaaggttcttgctatgcaaaggaaccttcttcaccaggtacatcctccttccttccttccttctatttgggccttttggcaatgatccaatgtgaagattaggtcacttaattgttttctactgatctttattcctaaaaggtccatttttttaacactatgagctgtaagtgagaatgtgatttgaatatcctaatctgctttggagcctgctctcgagttagttttatgattaatatgtgttaaattattatttgacatttgtgtttaacaatctttcactttatctatcatgttacccttcagattgctgaaaggaggaagctggtctcatctattaaagagagcacacctgacttggatgatgcaaaagcttcttccaaacaagagt

SEQ ID NO: 71085 - DNA, 666 bp, Arabidopsis thaliana landsberg
cgaaatggccgaatcttggcgtatgaagatgggtttaagcgttgatccattcttctccattgctcgtaaatcaatggatgctcgtatcgacgcggaagacttcgctgatgttttcggcggtccgccgcgaagcgttctcacccgaaaattttccggcgacttctctcgttccgactgtttctacgacgagatttttcagcctccgggaactttctcctccggcggctctcttgcgtcttctaaatctcacggaagaaacttaccggcattcagaattccgtccggcggggaaggattttacgacggcgtgtttggtggtcgcggcggttctgcgaaggaaggatcgaaaaaacagagctcgatgacgaaaccaagatcgaattcatcgtcgatgctctcttccgaggaggccaggcctcactatcctccaccagcggcagcttccggcgacgactccggattctcttctttcacttctagacttaggtgagtgagatttaccattttaccctccaattcggttctactctcgaggacaattcagtaattttgacatgctcttgtttttttccctcttcagaccgttaaacgtcccgtcgagaagtcataaacgagagtcaaagaaacagagtttctcggcgggtccaaaagccaaagaatcatttt

SEQ ID NO: 71086 - DNA, 529 bp, Arabidopsis thaliana landsberg
gtcagttcgcgtagacggtgaaatgcgaaaggcacccgatttttgtaaatctcaatcccgagaaaccaaaccctccttcgtcccctctttggaaacatcatctctttctttatttctctcttccatcttcttcttcttctaaaacaacatcttaacaatttttagtattactaaaaaccctagacgtaaaagaaatgtgttattctgttcctgatctttgtcttaattaagaccatacattatttcttttaattagatgtcaatcattattctttactaaattttttttcttgagtagatttaggttaatttgcaatcttggattaaagacctacaaaaatgcaattgtttttttttaatgcaattattttttattaagtctttatctagtttttatatcatatagttgacaaaagaaatgcaccggagggctcatttatggaaccaacattaagtaagatttactataacggttttatgtataaaagatgtatattataaagatctctagctagaaaacatgtaacac

SEQ ID NO: 71087 - DNA, 576 bp, Arabidopsis thaliana landsberg
ctataagatatgtgtaaggttttcaaatagtttaattaaagatgctcttttttagtaccaaatgtgtaataccaaactaacatcacgcgagaatattttagattgattatccataaataatttactcgtttgatttgatgtatccatacatgcatatataattccctatcatcttaacctcatatgaacattttttataatgaatgaaaaaaaaaatattctactaatgaatataataaatattcggaacgatgaaacattagttcagttagctccttcgaccgtagttcaactaagaacttgtcgtcacaattttggaagctttataaaatagagagttcgttgggtccgtccaacttttgttagttgcctagttggtaaactttgtcctttatttattgcccacctccatttttatatactcacgtcactcaccaataaattttggttaaaagaaaaaaagagagagatttcttcttatttattaaccaaatttagtattttgataagttaagaaattaaagaagatttgtttatttcacttcatcaagctgatttcgtgggccagaagtgatc
